United States Patent Application Publication US 2006/0003322 A1 - sequence listing, part 25

SEQ ID NO: 1059881 - RNA, 21 nt, Human
gcauuucaaagaauguuccuu

SEQ ID NO: 1059882 - RNA, 20 nt, Human
gcgguggcagcagcaagcgg

SEQ ID NO: 1059883 - RNA, 21 nt, Human
ggccgaggagaggcaggaacc

SEQ ID NO: 1059884 - RNA, 20 nt, Human
gggaaaccugguuacaagug

SEQ ID NO: 1059885 - RNA, 21 nt, Human
gggcgagagggaggcagggcc

SEQ ID NO: 1059886 - RNA, 20 nt, Human
guuuacaucacagcagccac

SEQ ID NO: 1059887 - RNA, 23 nt, Human
uaacuaagcuuucacauaaagcu

SEQ ID NO: 1059888 - RNA, 25 nt, Human
uaagaacaccauuuuagggcacugu

SEQ ID NO: 1059889 - RNA, 18 nt, Human
uaagcuuucacauaaagc

SEQ ID NO: 1059890 - RNA, 21 nt, Human
uacaaaauagaaucaggacaa

SEQ ID NO: 1059891 - RNA, 21 nt, Human
uaggacccucccccaacuucc

SEQ ID NO: 1059892 - RNA, 21 nt, Human
uaugaauuucucucuccccuc

SEQ ID NO: 1059893 - RNA, 18 nt, Human
ucaauccauucaaacagc

SEQ ID NO: 1059894 - RNA, 19 nt, Human
uccaagaacagagaauagu

SEQ ID NO: 1059895 - RNA, 23 nt, Human
ucccaguaaaagccugaucaugg

SEQ ID NO: 1059896 - RNA, 24 nt, Human
ucucucuccccucaccccucuuaa

SEQ ID NO: 1059897 - RNA, 19 nt, Human
ugaaaaggucaaauguuac

SEQ ID NO: 1059898 - RNA, 21 nt, Human
ugaaaggggagagaaaaucca

SEQ ID NO: 1059899 - RNA, 24 nt, Human
ugaaaggggagagaaaauccaaag

SEQ ID NO: 1059900 - RNA, 20 nt, Human
ugcaacacaaaacuuaaaac

SEQ ID NO: 1059901 - RNA, 22 nt, Human
ugcaacacaaaacuuaaaacac

SEQ ID NO: 1059902 - RNA, 24 nt, Human
ugcaacacaaaacuuaaaacacag

SEQ ID NO: 1059903 - RNA, 22 nt, Human
ugcaguaaguaaucagccucca

SEQ ID NO: 1059904 - RNA, 18 nt, Human
ugcauucuuaaggcagaa

SEQ ID NO: 1059905 - RNA, 22 nt, Human
ugccaggaaauccccaguagag

SEQ ID NO: 1059906 - RNA, 19 nt, Human
ugcggccaccgggcccagc

SEQ ID NO: 1059907 - RNA, 22 nt, Human
uggcauauguucagcagaagcc

SEQ ID NO: 1059908 - RNA, 18 nt, Human
uggccgaggagaggcagg

SEQ ID NO: 1059909 - RNA, 20 nt, Human
ugucuuugcucucccuuggg

SEQ ID NO: 1059910 - RNA, 22 nt, Human
uuaucuaaagagacaugaaauc

SEQ ID NO: 1059911 - RNA, 26 nt, Human
uuauuuagcauucggauguacaugaa

SEQ ID NO: 1059912 - RNA, 23 nt, Human
uucaaguuuauuccauuuguucu

SEQ ID NO: 1059913 - RNA, 26 nt, Human
uucaaugcuauauaaauguaugaauc

SEQ ID NO: 1059914 - RNA, 18 nt, Human
uuccggaguuaucagucc

SEQ ID NO: 1059915 - RNA, 23 nt, Human
uucggauguacaugaacuaggau

SEQ ID NO: 1059916 - RNA, 24 nt, Human
uuucuccauuuacaaaauagaauc

SEQ ID NO: 1059917 - RNA, 19 nt, Human
uuuuuuucugguagucgga

SEQ ID NO: 1059918 - RNA, 25 nt, Human
caagcuccuggccucggaagaccca

SEQ ID NO: 1059919 - RNA, 23 nt, Human
caggaaaaguacucucgaaccag

SEQ ID NO: 1059920 - RNA, 23 nt, Human
cauagcccaccugccaaucuggg

SEQ ID NO: 1059921 - RNA, 20 nt, Human
ccagacuccagaaauggagc

SEQ ID NO: 1059922 - RNA, 22 nt, Human
ccauguguaugacucauagccc

SEQ ID NO: 1059923 - RNA, 22 nt, Human
cccaggaaaaguacucucgaac

SEQ ID NO: 1059924 - RNA, 24 nt, Human
ccugccaaucuggacucaguggaa

SEQ ID NO: 1059925 - RNA, 19 nt, Human
cuggcgaaggcauucuucc

SEQ ID NO: 1059926 - RNA, 18 nt, Human
gacccagacuccagaaau

SEQ ID NO: 1059927 - RNA, 21 nt, Human
gcgguugguauugggaaaggc

SEQ ID NO: 1059928 - RNA, 22 nt, Human
ucauagcccaccugccaaucug

SEQ ID NO: 1059929 - RNA, 24 nt, Human
ucauagcccaccugccaaucugga

SEQ ID NO: 1059930 - RNA, 19 nt, Human
uccuggccucggaagaccc

SEQ ID NO: 1059931 - RNA, 18 nt, Human
ugaggaaccagcgguugg

SEQ ID NO: 1059932 - RNA, 18 nt, Human
ugccaggauccaguuucu

SEQ ID NO: 1059933 - RNA, 22 nt, Human
uggcgaaggcauucuuccucag

SEQ ID NO: 1059934 - RNA, 18 nt, Human
ugggaaaggccuggcaga

SEQ ID NO: 1059935 - RNA, 18 nt, Human
uguaugacucauagccca

SEQ ID NO: 1059936 - RNA, 21 nt, Human
uucaggcagcuaggugauggc

SEQ ID NO: 1059937 - RNA, 19 nt, Human
uuccucagcuuguccaguc

SEQ ID NO: 1059938 - RNA, 24 nt, Human
uugaaggguuugcccacaugcugg

SEQ ID NO: 1059939 - RNA, 22 nt, Human
uuuuuuuuuuuuuuuuuuccaa

SEQ ID NO: 1059940 - RNA, 21 nt, Human
aaaaucccaaauaaauggccc

SEQ ID NO: 1059941 - RNA, 18 nt, Human
aaacaaaaaccaaacaac

SEQ ID NO: 1059942 - RNA, 25 nt, Human
aaacaaaaaccaaacaacuccaaaa

SEQ ID NO: 1059943 - RNA, 28 nt, Human
aaacaacccacccaccaauuaaagucaa

SEQ ID NO: 1059944 - RNA, 18 nt, Human
aaacagagcggcagaaac

SEQ ID NO: 1059945 - RNA, 25 nt, Human
aaaccagccccaaaccccuccccca

SEQ ID NO: 1059946 - RNA, 23 nt, Human
aaauaaauggcccacaguuuugu

SEQ ID NO: 1059947 - RNA, 21 nt, Human
aaccagccccaaaccccuccc

SEQ ID NO: 1059948 - RNA, 23 nt, Human
aaccagccccaaaccccuccccc

SEQ ID NO: 1059949 - RNA, 22 nt, Human
aacuccugcuucuuccugggaa

SEQ ID NO: 1059950 - RNA, 21 nt, Human
aagaagacagauggaaauuga

SEQ ID NO: 1059951 - RNA, 23 nt, Human
aagaggggaagaggcccuugaug

SEQ ID NO: 1059952 - RNA, 24 nt, Human
aaggagcaggggaaguucccggag

SEQ ID NO: 1059953 - RNA, 22 nt, Human
aauugagcuuuucuuuuuaggu

SEQ ID NO: 1059954 - RNA, 22 nt, Human
acaaacaaaaaccaaacaacuc

SEQ ID NO: 1059955 - RNA, 22 nt, Human
accagccccaaaccccuccccc

SEQ ID NO: 1059956 - RNA, 22 nt, Human
accagccuaccacucuguuucu

SEQ ID NO: 1059957 - RNA, 18 nt, Human
accuucacuuaguggcac

SEQ ID NO: 1059958 - RNA, 21 nt, Human
acugggcucacuguuccugga

SEQ ID NO: 1059959 - RNA, 24 nt, Human
agaaauggggacagccagaaaauu

SEQ ID NO: 1059960 - RNA, 18 nt, Human
agaagccagacaugcaac

SEQ ID NO: 1059961 - RNA, 18 nt, Human
agacacgguggaaugagg

SEQ ID NO: 1059962 - RNA, 21 nt, Human
agagcuggcaggaagagggga

SEQ ID NO: 1059963 - RNA, 21 nt, Human
agcuaccaagaaaugucaggg

SEQ ID NO: 1059964 - RNA, 18 nt, Human
agcuccuggaggugacuc

SEQ ID NO: 1059965 - RNA, 20 nt, Human
agcuggcaggaagaggggaa

SEQ ID NO: 1059966 - RNA, 21 nt, Human
aggaagaggcugaggguucaa

SEQ ID NO: 1059967 - RNA, 19 nt, Human
aggaagaggggaagaggcc

SEQ ID NO: 1059968 - RNA, 18 nt, Human
aggagaaaugaccagccu

SEQ ID NO: 1059969 - RNA, 24 nt, Human
aggagcacaggcagaagccagaca

SEQ ID NO: 1059970 - RNA, 19 nt, Human
aggaggagcacaggcagaa

SEQ ID NO: 1059971 - RNA, 19 nt, Human
aggagggacagggaggaug

SEQ ID NO: 1059972 - RNA, 22 nt, Human
aggcaagaaaauauuuuccuga

SEQ ID NO: 1059973 - RNA, 22 nt, Human
aggcagaagccagacaugcaac

SEQ ID NO: 1059974 - RNA, 28 nt, Human
aggcagaagccagacaugcaacgggaga

SEQ ID NO: 1059975 - RNA, 19 nt, Human
aggcagcuuuggguggggu

SEQ ID NO: 1059976 - RNA, 22 nt, Human
aggcagcuuugggugggguagg

SEQ ID NO: 1059977 - RNA, 19 nt, Human
agggagcuccuacagccag

SEQ ID NO: 1059978 - RNA, 23 nt, Human
agggagcuccuacagccaggaag

SEQ ID NO: 1059979 - RNA, 19 nt, Human
aggggcuggcuuugggugc

SEQ ID NO: 1059980 - RNA, 21 nt, Human
agggguaggcuuuaggggcug

SEQ ID NO: 1059981 - RNA, 18 nt, Human
agucaaaccagccccaaa

SEQ ID NO: 1059982 - RNA, 21 nt, Human
auaaaucgcccugggacagag

SEQ ID NO: 1059983 - RNA, 18 nt, Human
aucgcccugggacagagg

SEQ ID NO: 1059984 - RNA, 22 nt, Human
auggcggggggggauuuggggc

SEQ ID NO: 1059985 - RNA, 21 nt, Human
auuuaggaccccacaaagccc

SEQ ID NO: 1059986 - RNA, 25 nt, Human
caaacaaaaaccaaacaaccccggg

SEQ ID NO: 1059987 - RNA, 24 nt, Human
caaacaacuccaaaaucccaaaua

SEQ ID NO: 1059988 - RNA, 18 nt, Human
cacaaagcccccuucuuc

SEQ ID NO: 1059989 - RNA, 24 nt, Human
cacucuguuucuugucuuccucua

SEQ ID NO: 1059990 - RNA, 24 nt, Human
cagaagccagacaugcaacgggag

SEQ ID NO: 1059991 - RNA, 26 nt, Human
cagcaaacagagcggcagaaacaacc

SEQ ID NO: 1059992 - RNA, 19 nt, Human
cagcagaagauaauuuuua

SEQ ID NO: 1059993 - RNA, 21 nt, Human
cagccagaaaauuugucuguc

SEQ ID NO: 1059994 - RNA, 21 nt, Human
caggcagaagccagacaugca

SEQ ID NO: 1059995 - RNA, 24 nt, Human
caggcagaagccagacaugcaacg

SEQ ID NO: 1059996 - RNA, 20 nt, Human
cagggaggaugcucguggca

SEQ ID NO: 1059997 - RNA, 24 nt, Human
cagggcacggagcugccuggggua

SEQ ID NO: 1059998 - RNA, 20 nt, Human
cauggaaagaccccuugaag

SEQ ID NO: 1059999 - RNA, 22 nt, Human
cauuggaauguaccuuggccug

SEQ ID NO: 1060000 - RNA, 20 nt, Human
ccaaauaaauggcccacagu

SEQ ID NO: 1060001 - RNA, 21 nt, Human
ccaagaauccaaacggaagaa

SEQ ID NO: 1060002 - RNA, 22 nt, Human
ccacccaccaauuaaagucaaa

SEQ ID NO: 1060003 - RNA, 23 nt, Human
ccacucuguuucuugucuuccuc

SEQ ID NO: 1060004 - RNA, 21 nt, Human
cccaaaccccucccccaggag

SEQ ID NO: 1060005 - RNA, 22 nt, Human
cccaggagaaauggggacagcc

SEQ ID NO: 1060006 - RNA, 19 nt, Human
ccccaaaccccucccccag

SEQ ID NO: 1060007 - RNA, 19 nt, Human
ccccacaaagcccccuucu

SEQ ID NO: 1060008 - RNA, 23 nt, Human
ccggagaggggcuucucugggcc

SEQ ID NO: 1060009 - RNA, 19 nt, Human
ccucccagucaccuguccu

SEQ ID NO: 1060010 - RNA, 23 nt, Human
ccucccccaggagaaauggggac

SEQ ID NO: 1060011 - RNA, 21 nt, Human
ccugcagagcaccuuccuacc

SEQ ID NO: 1060012 - RNA, 20 nt, Human
ccuugucuccucuuucuucc

SEQ ID NO: 1060013 - RNA, 24 nt, Human
cgcccugggacagaggcuaugugu

SEQ ID NO: 1060014 - RNA, 26 nt, Human
cggaagaaauggaaaacaaacagcag

SEQ ID NO: 1060015 - RNA, 25 nt, Human
cggcagaaacaacccacccaccaau

SEQ ID NO: 1060016 - RNA, 23 nt, Human
cugcagcaaacagagcggcagaa

SEQ ID NO: 1060017 - RNA, 24 nt, Human
cuggcuggggcugcucacugggcu

SEQ ID NO: 1060018 - RNA, 18 nt, Human
cugggccugaggggacca

SEQ ID NO: 1060019 - RNA, 19 nt, Human
cuugucuccucuuucuucc

SEQ ID NO: 1060020 - RNA, 19 nt, Human
gaaugaggagggacaggga

SEQ ID NO: 1060021 - RNA, 20 nt, Human
gaggaugcucguggcaggag

SEQ ID NO: 1060022 - RNA, 22 nt, Human
gauggggacccauagggccuug

SEQ ID NO: 1060023 - RNA, 23 nt, Human
gcaccaagaauccaaacggaaga

SEQ ID NO: 1060024 - RNA, 20 nt, Human
gccagacaugcaacgggaga

SEQ ID NO: 1060025 - RNA, 18 nt, Human
gccaggaaggcagcuuug

SEQ ID NO: 1060026 - RNA, 26 nt, Human
gccccaaaccccucccccaggagaaa

SEQ ID NO: 1060027 - RNA, 20 nt, Human
gcugucugugaggugggagg

SEQ ID NO: 1060028 - RNA, 18 nt, Human
ggaaaacaaacagcagaa

SEQ ID NO: 1060029 - RNA, 25 nt, Human
ggaaauugagcuuuucuuuuuaggu

SEQ ID NO: 1060030 - RNA, 22 nt, Human
ggaagaggcugaggguucaagg

SEQ ID NO: 1060031 - RNA, 23 nt, Human
ggagcugccugggguaggucuuc

SEQ ID NO: 1060032 - RNA, 19 nt, Human
ggcagaagccagacaugca

SEQ ID NO: 1060033 - RNA, 18 nt, Human
ggccuugaagagcuggcu

SEQ ID NO: 1060034 - RNA, 18 nt, Human
gggaagaggcccuugaug

SEQ ID NO: 1060035 - RNA, 25 nt, Human
gggagaagccagggcacggagcugc

SEQ ID NO: 1060036 - RNA, 21 nt, Human
gggauuuggggcauggggaga

SEQ ID NO: 1060037 - RNA, 18 nt, Human
gggcagucacagagggcu

SEQ ID NO: 1060038 - RNA, 21 nt, Human
gggugggguaggauggggcug

SEQ ID NO: 1060039 - RNA, 24 nt, Human
gguaaggauucuucuugcagugga

SEQ ID NO: 1060040 - RNA, 18 nt, Human
ggugggguaggauggggc

SEQ ID NO: 1060041 - RNA, 18 nt, Human
ggugggguaggauggggc

SEQ ID NO: 1060042 - RNA, 19 nt, Human
guccuugucuccucuuucu

SEQ ID NO: 1060043 - RNA, 18 nt, Human
uaaaauuuaggaccccac

SEQ ID NO: 1060044 - RNA, 21 nt, Human
uaacuggcaugauggccaccu

SEQ ID NO: 1060045 - RNA, 23 nt, Human
uaagauauacaaacaaaaaccaa

SEQ ID NO: 1060046 - RNA, 20 nt, Human
uaagcaagaugggcuguggc

SEQ ID NO: 1060047 - RNA, 22 nt, Human
uaccaagaaaugucagggucuc

SEQ ID NO: 1060048 - RNA, 18 nt, Human
uaccagggaccugguugc

SEQ ID NO: 1060049 - RNA, 19 nt, Human
uaggaccccacaaagcccc

SEQ ID NO: 1060050 - RNA, 18 nt, Human
uaggauggggcuggggca

SEQ ID NO: 1060051 - RNA, 24 nt, Human
ucaaaccagccccaaaccccuccc

SEQ ID NO: 1060052 - RNA, 24 nt, Human
ucacacgugcaccaagaauccaaa

SEQ ID NO: 1060053 - RNA, 19 nt, Human
ucagagacuuuuccugugg

SEQ ID NO: 1060054 - RNA, 25 nt, Human
ucauggaaagaccccuugaaggccu

SEQ ID NO: 1060055 - RNA, 24 nt, Human
uccaaaaucccaaauaaauggccc

SEQ ID NO: 1060056 - RNA, 23 nt, Human
uccccaagcaggccacggggacu

SEQ ID NO: 1060057 - RNA, 19 nt, Human
ucccccaggagaaaugggg

SEQ ID NO: 1060058 - RNA, 25 nt, Human
ucucaguccccaagcaggccacggg

SEQ ID NO: 1060059 - RNA, 18 nt, Human
ucuguccuugucuccucu

SEQ ID NO: 1060060 - RNA, 20 nt, Human
ugagaggucugagcagcucc

SEQ ID NO: 1060061 - RNA, 25 nt, Human
ugagcagcuccuguacucaagugga

SEQ ID NO: 1060062 - RNA, 24 nt, Human
ugcagcaaacagagcggcagaaac

SEQ ID NO: 1060063 - RNA, 23 nt, Human
ugcagcuaccaagaaaugucagg

SEQ ID NO: 1060064 - RNA, 20 nt, Human
ugccucaaacuuugggauuu

SEQ ID NO: 1060065 - RNA, 18 nt, Human
ugccugggguaggucuuc

SEQ ID NO: 1060066 - RNA, 18 nt, Human
uggaaaacaaacagcaga

SEQ ID NO: 1060067 - RNA, 23 nt, Human
uggaaaacaaacagcagaagaua

SEQ ID NO: 1060068 - RNA, 22 nt, Human
uggaagucauagguuuugcucc

SEQ ID NO: 1060069 - RNA, 22 nt, Human
uggaaugaggagggacagggag

SEQ ID NO: 1060070 - RNA, 19 nt, Human
uggcuggggcugcucacug

SEQ ID NO: 1060071 - RNA, 20 nt, Human
uggcuggggcugcucacugg

SEQ ID NO: 1060072 - RNA, 21 nt, Human
uggggaaggacaaagaauggg

SEQ ID NO: 1060073 - RNA, 20 nt, Human
uggggacccauagggccuug

SEQ ID NO: 1060074 - RNA, 19 nt, Human
uggggcagucacagagggc

SEQ ID NO: 1060075 - RNA, 20 nt, Human
ugggguaggauggggcuggg

SEQ ID NO: 1060076 - RNA, 18 nt, Human
uggguaacuccugcuucu

SEQ ID NO: 1060077 - RNA, 25 nt, Human
ugggugcagggaucaugcugccauu

SEQ ID NO: 1060078 - RNA, 19 nt, Human
uguccucugaaccucuccu

SEQ ID NO: 1060079 - RNA, 23 nt, Human
ugucugucugucuuucccucacu

SEQ ID NO: 1060080 - RNA, 21 nt, Human
uguuuuguuuuguuuuuuuua

SEQ ID NO: 1060081 - RNA, 21 nt, Human
uucacuuguagcuccucacaa

SEQ ID NO: 1060082 - RNA, 20 nt, Human
uuccugaggaaguaacuggc

SEQ ID NO: 1060083 - RNA, 19 nt, Human
uucuugcaguggaggucau

SEQ ID NO: 1060084 - RNA, 22 nt, Human
uugaagagcuggcuggggcugc

SEQ ID NO: 1060085 - RNA, 22 nt, Human
uugucuccucuuucuuccuaac

SEQ ID NO: 1060086 - RNA, 18 nt, Human
uuucuugucuuccucuac

SEQ ID NO: 1060087 - RNA, 21 nt, Human
aaacaaaacgugaagaagcaa

SEQ ID NO: 1060088 - RNA, 21 nt, Human
aaauaauuagcaaaaauccaa

SEQ ID NO: 1060089 - RNA, 24 nt, Human
aaaucccaggucacacuuguuucu

SEQ ID NO: 1060090 - RNA, 20 nt, Human
acagcaaagcuuuucacaau

SEQ ID NO: 1060091 - RNA, 19 nt, Human
acccgugccgucagccccg

SEQ ID NO: 1060092 - RNA, 23 nt, Human
acuccgugcucaauaaaaacaaa

SEQ ID NO: 1060093 - RNA, 23 nt, Human
agaaagcaacaugaacggcagau

SEQ ID NO: 1060094 - RNA, 18 nt, Human
agaaagcaucaaauacca

SEQ ID NO: 1060095 - RNA, 24 nt, Human
agagaagcagagagucgcggccaa

SEQ ID NO: 1060096 - RNA, 19 nt, Human
agggugccacugagcaaaa

SEQ ID NO: 1060097 - RNA, 20 nt, Human
augcaaacgaaauaaugacc

SEQ ID NO: 1060098 - RNA, 18 nt, Human
augugauucacgacagcc

SEQ ID NO: 1060099 - RNA, 19 nt, Human
cacuccucuccccgccaaa

SEQ ID NO: 1060100 - RNA, 21 nt, Human
cacuccucuccccgccaaaac

SEQ ID NO: 1060101 - RNA, 23 nt, Human
cagagagucgcggccaaguccca

SEQ ID NO: 1060102 - RNA, 20 nt, Human
cagcagcaugcggagugguu

SEQ ID NO: 1060103 - RNA, 19 nt, Human
cagccccgucuccugaccc

SEQ ID NO: 1060104 - RNA, 18 nt, Human
cagcuccaggacugcugc

SEQ ID NO: 1060105 - RNA, 21 nt, Human
caugcaaacgaaauaaugacc

SEQ ID NO: 1060106 - RNA, 19 nt, Human
ccaaaaaauucccagcuuc

SEQ ID NO: 1060107 - RNA, 20 nt, Human
ccacagaaagccucauuuca

SEQ ID NO: 1060108 - RNA, 22 nt, Human
ccacccgugccgucagccccgu

SEQ ID NO: 1060109 - RNA, 22 nt, Human
cccaagccugggucacugcuac

SEQ ID NO: 1060110 - RNA, 22 nt, Human
ccuaacccauggacacuaggga

SEQ ID NO: 1060111 - RNA, 21 nt, Human
ccucuccccgccaaaaccaaa

SEQ ID NO: 1060112 - RNA, 19 nt, Human
ccugaccgacgcugcuacc

SEQ ID NO: 1060113 - RNA, 20 nt, Human
ccugggucacugcuacaugg

SEQ ID NO: 1060114 - RNA, 19 nt, Human
cgaggacagaagcggccgg

SEQ ID NO: 1060115 - RNA, 25 nt, Human
cgcaugccgagcacgguggagcgcc

SEQ ID NO: 1060116 - RNA, 21 nt, Human
cgccaaaaccaaauaaacaaa

SEQ ID NO: 1060117 - RNA, 18 nt, Human
cgugugcacgaccgcaug

SEQ ID NO: 1060118 - RNA, 22 nt, Human
cuaaaaauaauuagcaaaaauc

SEQ ID NO: 1060119 - RNA, 20 nt, Human
cucaguuagccaucugcgcc

SEQ ID NO: 1060120 - RNA, 24 nt, Human
cuccaggacugcugcgcugguggu

SEQ ID NO: 1060121 - RNA, 19 nt, Human
cuccuguacuucuaaagcc

SEQ ID NO: 1060122 - RNA, 18 nt, Human
cuggcucccaagccuggg

SEQ ID NO: 1060123 - RNA, 18 nt, Human
cuuuccuuucucuccuuu

SEQ ID NO: 1060124 - RNA, 20 nt, Human
cuuuccuuucucuccuuucu

SEQ ID NO: 1060125 - RNA, 20 nt, Human
gaaucuagcaaaaccuacac

SEQ ID NO: 1060126 - RNA, 23 nt, Human
gaggauccggaagcacuagagga

SEQ ID NO: 1060127 - RNA, 21 nt, Human
gagucaauguucgcgaacuga

SEQ ID NO: 1060128 - RNA, 20 nt, Human
gagucgcggccaagucccaa

SEQ ID NO: 1060129 - RNA, 19 nt, Human
gccaaaaccaaauaaacaa

SEQ ID NO: 1060130 - RNA, 29 nt, Human
gcuggugguggcggcggcuccucgcgcuu

SEQ ID NO: 1060131 - RNA, 21 nt, Human
ggaaggaaagucacugggagg

SEQ ID NO: 1060132 - RNA, 20 nt, Human
ggcagauccucaugugaaag

SEQ ID NO: 1060133 - RNA, 21 nt, Human
ggccgguggcgggacgcagga

SEQ ID NO: 1060134 - RNA, 20 nt, Human
gugguggcggcggcuccucg

SEQ ID NO: 1060135 - RNA, 22 nt, Human
guucaaccuccuugugccgucu

SEQ ID NO: 1060136 - RNA, 19 nt, Human
guuuaggguuacauugucc

SEQ ID NO: 1060137 - RNA, 21 nt, Human
uacauuguccacagaaagcau

SEQ ID NO: 1060138 - RNA, 23 nt, Human
uaccacuccucuccccgccaaaa

SEQ ID NO: 1060139 - RNA, 21 nt, Human
uaccggcccguuuuccccagc

SEQ ID NO: 1060140 - RNA, 22 nt, Human
uacugaauuaccuucuaauucc

SEQ ID NO: 1060141 - RNA, 22 nt, Human
uagcaaaaauccaagaaaaaaa

SEQ ID NO: 1060142 - RNA, 22 nt, Human
uagcaaaaccuacaccauauuu

SEQ ID NO: 1060143 - RNA, 19 nt, Human
ucacugggagggagcaugc

SEQ ID NO: 1060144 - RNA, 21 nt, Human
ucacugggagggagcaugcag

SEQ ID NO: 1060145 - RNA, 19 nt, Human
ucaguuagccaucugcgcc

SEQ ID NO: 1060146 - RNA, 19 nt, Human
uccaagaaaaaaauaugga

SEQ ID NO: 1060147 - RNA, 21 nt, Human
uccaagaggacaaaggagaaa

SEQ ID NO: 1060148 - RNA, 24 nt, Human
uccacagaaagcaucaaauaccac

SEQ ID NO: 1060149 - RNA, 22 nt, Human
ucccaaacgucuguccccgcca

SEQ ID NO: 1060150 - RNA, 26 nt, Human
ucccaggucacacuuguuucuggcuc

SEQ ID NO: 1060151 - RNA, 22 nt, Human
uccccagcauggcccuaacccu

SEQ ID NO: 1060152 - RNA, 24 nt, Human
uccccgccaaaaccaaauaaacaa

SEQ ID NO: 1060153 - RNA, 20 nt, Human
uccuuucucuccuuucuccc

SEQ ID NO: 1060154 - RNA, 19 nt, Human
ucuccugacccugcucuga

SEQ ID NO: 1060155 - RNA, 21 nt, Human
ugaaacaugaguucaaccucc

SEQ ID NO: 1060156 - RNA, 23 nt, Human
ugaccgacgcugcuaccuagcgc

SEQ ID NO: 1060157 - RNA, 22 nt, Human
ugaccggaagugggcgcaucua

SEQ ID NO: 1060158 - RNA, 22 nt, Human
ugauccgugaucgcauaauccu

SEQ ID NO: 1060159 - RNA, 25 nt, Human
ugccgucagccccgucuccugaccc

SEQ ID NO: 1060160 - RNA, 19 nt, Human
ugcuaccuagcgcgugugc

SEQ ID NO: 1060161 - RNA, 22 nt, Human
uggagagaagcagagagucgcg

SEQ ID NO: 1060162 - RNA, 18 nt, Human
uggagcgccagcgucugg

SEQ ID NO: 1060163 - RNA, 20 nt, Human
uggcggcggcuccucgcgcu

SEQ ID NO: 1060164 - RNA, 21 nt, Human
uggguguuuugcgcgugugua

SEQ ID NO: 1060165 - RNA, 23 nt, Human
ugugcacgaccgcaugccgagca

SEQ ID NO: 1060166 - RNA, 19 nt, Human
uguggccucgagacagucc

SEQ ID NO: 1060167 - RNA, 21 nt, Human
uguuaaauaaaaucccagguc

SEQ ID NO: 1060168 - RNA, 21 nt, Human
uuagcaaaaauccaagaaaaa

SEQ ID NO: 1060169 - RNA, 23 nt, Human
uucaacacugcuagauuaaaauu

SEQ ID NO: 1060170 - RNA, 22 nt, Human
uuccagcagcaugcggaguggu

SEQ ID NO: 1060171 - RNA, 18 nt, Human
uuuuuuuuuuuuuuuuug

SEQ ID NO: 1060172 - RNA, 23 nt, Human
uuuuuuuuuuuuuuuuuuguauu

SEQ ID NO: 1060173 - RNA, 19 nt, Human
acagcgggggccacauggc

SEQ ID NO: 1060174 - RNA, 23 nt, Human
acaguucugccccagagcugccc

SEQ ID NO: 1060175 - RNA, 23 nt, Human
agcaacagcgggggccacauggc

SEQ ID NO: 1060176 - RNA, 20 nt, Human
agcagcagcagcaacagcgg

SEQ ID NO: 1060177 - RNA, 24 nt, Human
cacgagccugagccacgcccucga

SEQ ID NO: 1060178 - RNA, 23 nt, Human
cagcagcagcagcagcaacagcg

SEQ ID NO: 1060179 - RNA, 25 nt, Human
ccccagagcugcccuggagcucgga

SEQ ID NO: 1060180 - RNA, 19 nt, Human
ccugagccacgcccucgag

SEQ ID NO: 1060181 - RNA, 21 nt, Human
ccugcgggcagggcggcuguc

SEQ ID NO: 1060182 - RNA, 19 nt, Human
cggccgggagcagcagcag

SEQ ID NO: 1060183 - RNA, 23 nt, Human
cggggcggccgggagcagcagca

SEQ ID NO: 1060184 - RNA, 23 nt, Human
gacgccuccacgagccugagcca

SEQ ID NO: 1060185 - RNA, 21 nt, Human
gcccuggagcucggacgccuc

SEQ ID NO: 1060186 - RNA, 18 nt, Human
gcgguggggaccggggcg

SEQ ID NO: 1060187 - RNA, 19 nt, Human
gcgguggggaccggggcgg

SEQ ID NO: 1060188 - RNA, 22 nt, Human
gcgguggggaccggggcggccg

SEQ ID NO: 1060189 - RNA, 19 nt, Human
gggagcggcuuuggcggug

SEQ ID NO: 1060190 - RNA, 20 nt, Human
gggagcggcuuuggcggugg

SEQ ID NO: 1060191 - RNA, 23 nt, Human
gggauuguuagauccggacaguu

SEQ ID NO: 1060192 - RNA, 19 nt, Human
ucaccggucuccggcuccc

SEQ ID NO: 1060193 - RNA, 19 nt, Human
uccacgagccugagccacg

SEQ ID NO: 1060194 - RNA, 26 nt, Human
acaucaccuuuucuggguuccuccaa

SEQ ID NO: 1060195 - RNA, 24 nt, Human
cugaaaauguaaaccucacuaaca

SEQ ID NO: 1060196 - RNA, 19 nt, Human
ucauaacaucaccuuuucu

SEQ ID NO: 1060197 - RNA, 19 nt, Human
uccuugugguuuaaucuag

SEQ ID NO: 1060198 - RNA, 20 nt, Human
uucaagaagucauaacaagg

SEQ ID NO: 1060199 - RNA, 22 nt, Human
uuuaaucuagaaaacagaaucc

SEQ ID NO: 1060200 - RNA, 23 nt, Human
uuuuuuuuuuuuuuuuucuaguu

SEQ ID NO: 1060201 - RNA, 19 nt, Human
agcuggaaggcagagcgcu

SEQ ID NO: 1060202 - RNA, 22 nt, Human
ugacaacaucuagcuggaaggc

SEQ ID NO: 1060203 - RNA, 24 nt, Human
ugcaaugacaacaucuagcuggaa

SEQ ID NO: 1060204 - RNA, 24 nt, Human
aaaaauaagugagaaaaaagauaa

SEQ ID NO: 1060205 - RNA, 21 nt, Human
aaaagcccgucacucccuaag

SEQ ID NO: 1060206 - RNA, 23 nt, Human
aaacuaaacucuuuaagaagaaa

SEQ ID NO: 1060207 - RNA, 23 nt, Human
aaagaaaaaaaacccaauaauua

SEQ ID NO: 1060208 - RNA, 21 nt, Human
aagagaaacucuugcaugccc

SEQ ID NO: 1060209 - RNA, 18 nt, Human
aagugagaaaaaagauaa

SEQ ID NO: 1060210 - RNA, 20 nt, Human
aauaagugagaaaaaagaua

SEQ ID NO: 1060211 - RNA, 23 nt, Human
acccugaucccucuggagaggaa

SEQ ID NO: 1060212 - RNA, 25 nt, Human
agaagaaaaccaaacccaaccugaa

SEQ ID NO: 1060213 - RNA, 22 nt, Human
agagaaacucuugcaugcccuc

SEQ ID NO: 1060214 - RNA, 25 nt, Human
agcaggaaaaagaaaaaaaacccaa

SEQ ID NO: 1060215 - RNA, 19 nt, Human
agccgggcgccagggugcc

SEQ ID NO: 1060216 - RNA, 18 nt, Human
caaaaauaagugagaaaa

SEQ ID NO: 1060217 - RNA, 18 nt, Human
caacucgaagccaggcgg

SEQ ID NO: 1060218 - RNA, 18 nt, Human
cacaccagugaggggcaa

SEQ ID NO: 1060219 - RNA, 23 nt, Human
cagcaggaaaaagaaaaaaaacc

SEQ ID NO: 1060220 - RNA, 22 nt, Human
cagccgccagccgggcgccagg

SEQ ID NO: 1060221 - RNA, 24 nt, Human
cauauauucuucagcaaaaauaua

SEQ ID NO: 1060222 - RNA, 23 nt, Human
caugaaauccauuaagcugcugg

SEQ ID NO: 1060223 - RNA, 21 nt, Human
ccaaccugaacuaaucgucca

SEQ ID NO: 1060224 - RNA, 21 nt, Human
ccacgaaaggcagauuuccau

SEQ ID NO: 1060225 - RNA, 24 nt, Human
cccggcgccccccaggcucuacaa

SEQ ID NO: 1060226 - RNA, 22 nt, Human
cccucgacuuucaccgcaaaaa

SEQ ID NO: 1060227 - RNA, 19 nt, Human
ccuagaguccucugcgucc

SEQ ID NO: 1060228 - RNA, 21 nt, Human
ccugaacuaaucguccaagga

SEQ ID NO: 1060229 - RNA, 23 nt, Human
cgaaaggcagauuuccauccaca

SEQ ID NO: 1060230 - RNA, 23 nt, Human
cgccagccgggcgccagggugcc

SEQ ID NO: 1060231 - RNA, 21 nt, Human
cuaaacucuuuaagaagaaaa

SEQ ID NO: 1060232 - RNA, 21 nt, Human
cuagaguccucugcguccugg

SEQ ID NO: 1060233 - RNA, 24 nt, Human
cucccuaagaggacccugaucccu

SEQ ID NO: 1060234 - RNA, 21 nt, Human
cuuuaagaagaaaaccaaacc

SEQ ID NO: 1060235 - RNA, 21 nt, Human
cuuugccacccggcgcccccc

SEQ ID NO: 1060236 - RNA, 24 nt, Human
gaaacucuugcaugcccucgacuu

SEQ ID NO: 1060237 - RNA, 21 nt, Human
gaagaaaaccaaacccaaccu

SEQ ID NO: 1060238 - RNA, 24 nt, Human
gaagaaaaccaaacccaaccugaa

SEQ ID NO: 1060239 - RNA, 20 nt, Human
gacuuucaccgcaaaaauaa

SEQ ID NO: 1060240 - RNA, 21 nt, Human
gagaaaaaagauaaaucccau

SEQ ID NO: 1060241 - RNA, 19 nt, Human
gccagccgggcgccagggu

SEQ ID NO: 1060242 - RNA, 23 nt, Human
guccacgugacgcaaaugccacc

SEQ ID NO: 1060243 - RNA, 22 nt, Human
gugagaaaaaagauaaauccca

SEQ ID NO: 1060244 - RNA, 20 nt, Human
gugaggggcaaguguccggg

SEQ ID NO: 1060245 - RNA, 20 nt, Human
guucuccucuuggcuucugg

SEQ ID NO: 1060246 - RNA, 19 nt, Human
uaagaagaaaaccaaaccc

SEQ ID NO: 1060247 - RNA, 23 nt, Human
uacagcaggaaaaagaaaaaaaa

SEQ ID NO: 1060248 - RNA, 26 nt, Human
uauacagcaggaaaaagaaaaaaaac

SEQ ID NO: 1060249 - RNA, 19 nt, Human
uauuucauuccaugaaauc

SEQ ID NO: 1060250 - RNA, 21 nt, Human
ucaccagccgccagccgggcg

SEQ ID NO: 1060251 - RNA, 20 nt, Human
uccaaaggguggaauaguac

SEQ ID NO: 1060252 - RNA, 19 nt, Human
uccacgugacgcaaaugcc

SEQ ID NO: 1060253 - RNA, 23 nt, Human
uccacgugacgcaaaugccaccc

SEQ ID NO: 1060254 - RNA, 22 nt, Human
ucccacgaaaggcagauuucca

SEQ ID NO: 1060255 - RNA, 21 nt, Human
ucccuaagaggacccugaucc

SEQ ID NO: 1060256 - RNA, 22 nt, Human
ucuuuaagaagaaaaccaaacc

SEQ ID NO: 1060257 - RNA, 20 nt, Human
ugaaauccauuaagcugcug

SEQ ID NO: 1060258 - RNA, 18 nt, Human
ugccacccuuuccauaua

SEQ ID NO: 1060259 - RNA, 18 nt, Human
uggcauuugcauggcucu

SEQ ID NO: 1060260 - RNA, 18 nt, Human
uuguucuccucuuggcuu

SEQ ID NO: 1060261 - RNA, 21 nt, Human
agaucugaaagacccggcugu

SEQ ID NO: 1060262 - RNA, 26 nt, Human
caagaguaaaugaacucggaagacca

SEQ ID NO: 1060263 - RNA, 21 nt, Human
caccacccaagaguaaaugaa

SEQ ID NO: 1060264 - RNA, 22 nt, Human
ccacccaagaguaaaugaacuc

SEQ ID NO: 1060265 - RNA, 20 nt, Human
ccggcugugcacggugcugu

SEQ ID NO: 1060266 - RNA, 19 nt, Human
cggaagaccacagcaucaa

SEQ ID NO: 1060267 - RNA, 25 nt, Human
cuugaagacaccuucaaggucacuc

SEQ ID NO: 1060268 - RNA, 25 nt, Human
gacccggcugugcacggugcuguca

SEQ ID NO: 1060269 - RNA, 21 nt, Human
guauaagaucugaaagacccg

SEQ ID NO: 1060270 - RNA, 23 nt, Human
uaccucuucauuccgguauaaga

SEQ ID NO: 1060271 - RNA, 20 nt, Human
ucaaggucacucggaucugg

SEQ ID NO: 1060272 - RNA, 24 nt, Human
ucagucugugggggauccuugaag

SEQ ID NO: 1060273 - RNA, 22 nt, Human
aaggagacagagacggucaugg

SEQ ID NO: 1060274 - RNA, 27 nt, Human
acagacgaugacacaagcugcgaugug

SEQ ID NO: 1060275 - RNA, 20 nt, Human
agacgaugacacaagcugcg

SEQ ID NO: 1060276 - RNA, 22 nt, Human
agagacggucaugguggccccc

SEQ ID NO: 1060277 - RNA, 22 nt, Human
agcgcggaggucccggggagga

SEQ ID NO: 1060278 - RNA, 18 nt, Human
caucagaaauaaaacuca

SEQ ID NO: 1060279 - RNA, 22 nt, Human
caucagaaauaaaacucagcca

SEQ ID NO: 1060280 - RNA, 24 nt, Human
caucagaaauaaaacucagccagc

SEQ ID NO: 1060281 - RNA, 21 nt, Human
cucagccagcugucuucccag

SEQ ID NO: 1060282 - RNA, 21 nt, Human
gcaucagaaauaaaacucagc

SEQ ID NO: 1060283 - RNA, 19 nt, Human
gcgccgcgagagcgcggag

SEQ ID NO: 1060284 - RNA, 27 nt, Human
uaaaacucagccagcugucuucccaga

SEQ ID NO: 1060285 - RNA, 22 nt, Human
uccagaagcgccgcgagagcgc

SEQ ID NO: 1060286 - RNA, 24 nt, Human
agagcuuggacgucuggucugggc

SEQ ID NO: 1060287 - RNA, 22 nt, Human
cggaccguggggcagagggagg

SEQ ID NO: 1060288 - RNA, 18 nt, Human
cugcgggauggcccgugg

SEQ ID NO: 1060289 - RNA, 20 nt, Human
cuggucugggccuggcacug

SEQ ID NO: 1060290 - RNA, 22 nt, Human
ggaaggcagcugugcccgcagg

SEQ ID NO: 1060291 - RNA, 23 nt, Human
gggaggcucggcagcuccucugg

SEQ ID NO: 1060292 - RNA, 24 nt, Human
gggcagagggaggcucggcagcuc

SEQ ID NO: 1060293 - RNA, 19 nt, Human
uagcaggacaagcacaggg

SEQ ID NO: 1060294 - RNA, 23 nt, Human
uggggcagagggaggcucccccg

SEQ ID NO: 1060295 - RNA, 24 nt, Human
aaaguguugggauuacaggcauga

SEQ ID NO: 1060296 - RNA, 27 nt, Human
aagcgauucuccugccucaaccuccca

SEQ ID NO: 1060297 - RNA, 21 nt, Human
aaguguugggauuacaggcau

SEQ ID NO: 1060298 - RNA, 26 nt, Human
aaguguugggauuacaggcaugagcc

SEQ ID NO: 1060299 - RNA, 24 nt, Human
accauguuggccaggcuggucucg

SEQ ID NO: 1060300 - RNA, 22 nt, Human
acccgccucggccucucaaagu

SEQ ID NO: 1060301 - RNA, 18 nt, Human
acgggguuucaccauguu

SEQ ID NO: 1060302 - RNA, 23 nt, Human
acgggguuucaccauguuggcca

SEQ ID NO: 1060303 - RNA, 24 nt, Human
acgggguuucaccauguuggccag

SEQ ID NO: 1060304 - RNA, 21 nt, Human
agaggacagaaucaaaaucug

SEQ ID NO: 1060305 - RNA, 18 nt, Human
aggugacccacccgccuc

SEQ ID NO: 1060306 - RNA, 24 nt, Human
auauuuuauuuuuuaguagagacg

SEQ ID NO: 1060307 - RNA, 23 nt, Human
caaaguguugggauuacaggcau

SEQ ID NO: 1060308 - RNA, 24 nt, Human
caaaguguugggauuacaggcaug

SEQ ID NO: 1060309 - RNA, 20 nt, Human
caauggugcaaucuuggcuc

SEQ ID NO: 1060310 - RNA, 21 nt, Human
caauggugcaaucuuggcuca

SEQ ID NO: 1060311 - RNA, 21 nt, Human
caccauguuggccaggcuggu

SEQ ID NO: 1060312 - RNA, 24 nt, Human
caccauguuggccaggcuggucuc

SEQ ID NO: 1060313 - RNA, 27 nt, Human
caccauguuggccaggcuggucucgaa

SEQ ID NO: 1060314 - RNA, 23 nt, Human
cacccgccucggccucucaaagu

SEQ ID NO: 1060315 - RNA, 20 nt, Human
caccgggcacccaggcuggu

SEQ ID NO: 1060316 - RNA, 21 nt, Human
caccugcugggcuaaaaucau

SEQ ID NO: 1060317 - RNA, 21 nt, Human
cacugcaaccuucgccuccca

SEQ ID NO: 1060318 - RNA, 25 nt, Human
cagccucauugaugcccucagugau

SEQ ID NO: 1060319 - RNA, 22 nt, Human
caggaugcaccaccaugcacgg

SEQ ID NO: 1060320 - RNA, 24 nt, Human
cauguuggccaggcuggucucgaa

SEQ ID NO: 1060321 - RNA, 24 nt, Human
ccagaagucuuccuccaaggcugg

SEQ ID NO: 1060322 - RNA, 18 nt, Human
ccagaggacagaaucaaa

SEQ ID NO: 1060323 - RNA, 21 nt, Human
cccagaagucuuccuccaagg

SEQ ID NO: 1060324 - RNA, 20 nt, Human
cccagguucaagcgauucuc

SEQ ID NO: 1060325 - RNA, 23 nt, Human
cccagguucaagcgauucuccug

SEQ ID NO: 1060326 - RNA, 24 nt, Human
ccucccagguucaagcgauucucc

SEQ ID NO: 1060327 - RNA, 22 nt, Human
ccugaccucaggugacccaccc

SEQ ID NO: 1060328 - RNA, 23 nt, Human
ccugaccucaggugacccacccg

SEQ ID NO: 1060329 - RNA, 19 nt, Human
cucaaccucccaaguagcu

SEQ ID NO: 1060330 - RNA, 24 nt, Human
cucacugcaaccuucgccucccag

SEQ ID NO: 1060331 - RNA, 18 nt, Human
cuccucuagcccaggcug

SEQ ID NO: 1060332 - RNA, 20 nt, Human
cucuuguugcccaggcugga

SEQ ID NO: 1060333 - RNA, 23 nt, Human
cugcaaccuucgccucccagguu

SEQ ID NO: 1060334 - RNA, 24 nt, Human
cugcaaccuucgccucccagguuc

SEQ ID NO: 1060335 - RNA, 22 nt, Human
cuggagccaagacuaugugucu

SEQ ID NO: 1060336 - RNA, 24 nt, Human
gagacgggguuucaccauguuggc

SEQ ID NO: 1060337 - RNA, 20 nt, Human
gauuacaggaugcaccacca

SEQ ID NO: 1060338 - RNA, 21 nt, Human
gauuacaggaugcaccaccau

SEQ ID NO: 1060339 - RNA, 18 nt, Human
gauuacaggcaugagcca

SEQ ID NO: 1060340 - RNA, 22 nt, Human
gauuacaggcaugagccacugc

SEQ ID NO: 1060341 - RNA, 23 nt, Human
gauuacaggcaugagccacugca

SEQ ID NO: 1060342 - RNA, 23 nt, Human
gcaccgggcacccaggcugguuu

SEQ ID NO: 1060343 - RNA, 23 nt, Human
gccaagacuaugugucucugcuc

SEQ ID NO: 1060344 - RNA, 20 nt, Human
gccucaaccucccaaguagc

SEQ ID NO: 1060345 - RNA, 20 nt, Human
gcucuuguugcccaggcugg

SEQ ID NO: 1060346 - RNA, 21 nt, Human
gcucuuguugcccaggcugga

SEQ ID NO: 1060347 - RNA, 23 nt, Human
gcuggucucgaacuccugaccuc

SEQ ID NO: 1060348 - RNA, 22 nt, Human
ggauuacaggcaugagccacug

SEQ ID NO: 1060349 - RNA, 24 nt, Human
ggcuggucucgaacuccugaccuc

SEQ ID NO: 1060350 - RNA, 23 nt, Human
gggguuucaccauguuggccagg

SEQ ID NO: 1060351 - RNA, 22 nt, Human
ggguuucaccauguuggccagg

SEQ ID NO: 1060352 - RNA, 19 nt, Human
ggucucgaacuccugaccu

SEQ ID NO: 1060353 - RNA, 23 nt, Human
guagagacgggguuucaccaugu

SEQ ID NO: 1060354 - RNA, 22 nt, Human
gugacccacccgccucggccuc

SEQ ID NO: 1060355 - RNA, 22 nt, Human
uacaggcaugagccacugcacc

SEQ ID NO: 1060356 - RNA, 22 nt, Human
uagagacgggguuucaccaugu

SEQ ID NO: 1060357 - RNA, 24 nt, Human
uaguagagacgggguuucaccaug

SEQ ID NO: 1060358 - RNA, 26 nt, Human
uaguagagacgggguuucaccauguu

SEQ ID NO: 1060359 - RNA, 19 nt, Human
uauuuuauuuuuuaguaga

SEQ ID NO: 1060360 - RNA, 23 nt, Human
ucaaaguguugggauuacaggca

SEQ ID NO: 1060361 - RNA, 24 nt, Human
ucaaaguguugggauuacaggcau

SEQ ID NO: 1060362 - RNA, 19 nt, Human
ucacugcaaccuucgccuc

SEQ ID NO: 1060363 - RNA, 24 nt, Human
ucacugcaaccuucgccucccagg

SEQ ID NO: 1060364 - RNA, 25 nt, Human
ucacugcaaccuucgccucccaggu

SEQ ID NO: 1060365 - RNA, 23 nt, Human
uccaaggcugggccgggcagucc

SEQ ID NO: 1060366 - RNA, 21 nt, Human
ucccagguucaagcgauucuc

SEQ ID NO: 1060367 - RNA, 24 nt, Human
ucccagguucaagcgauucuccug

SEQ ID NO: 1060368 - RNA, 24 nt, Human
ucucaaaguguugggauuacaggc

SEQ ID NO: 1060369 - RNA, 26 nt, Human
ucuccugccucaaccucccaaguagc

SEQ ID NO: 1060370 - RNA, 23 nt, Human
ucucgaacuccugaccucaggug

SEQ ID NO: 1060371 - RNA, 24 nt, Human
ugaccucaggugacccacccgccu

SEQ ID NO: 1060372 - RNA, 25 nt, Human
ugaccucaggugacccacccgccuc

SEQ ID NO: 1060373 - RNA, 23 nt, Human
ugcaaccuucgccucccagguuc

SEQ ID NO: 1060374 - RNA, 18 nt, Human
ugcccagaagucuuccuc

SEQ ID NO: 1060375 - RNA, 19 nt, Human
ugcccaggcuggaguucaa

SEQ ID NO: 1060376 - RNA, 21 nt, Human
ugcccaggcuggaguucaaug

SEQ ID NO: 1060377 - RNA, 24 nt, Human
ugcccaggcuggaguucaauggug

SEQ ID NO: 1060378 - RNA, 23 nt, Human
ugccucaaccucccaaguagcua

SEQ ID NO: 1060379 - RNA, 25 nt, Human
ugccucaaccucccaaguagcuaug

SEQ ID NO: 1060380 - RNA, 24 nt, Human
ugcucuuguugcccaggcuggagu

SEQ ID NO: 1060381 - RNA, 20 nt, Human
ugcugggcuaaaaucaugac

SEQ ID NO: 1060382 - RNA, 24 nt, Human
uggaguucaauggugcaaucuugg

SEQ ID NO: 1060383 - RNA, 21 nt, Human
uggcauugauacagcugaagu

SEQ ID NO: 1060384 - RNA, 24 nt, Human
uggccaggcuggucucgaacuccu

SEQ ID NO: 1060385 - RNA, 20 nt, Human
uggccaucucgaauucuccu

SEQ ID NO: 1060386 - RNA, 18 nt, Human
ugggauuacaggcaugag

SEQ ID NO: 1060387 - RNA, 19 nt, Human
ugggauuacaggcaugagc

SEQ ID NO: 1060388 - RNA, 21 nt, Human
ugggauuacaggcaugagcca

SEQ ID NO: 1060389 - RNA, 22 nt, Human
ugggauuacaggcaugagccac

SEQ ID NO: 1060390 - RNA, 22 nt, Human
ugggauuacaggcaugagccac

SEQ ID NO: 1060391 - RNA, 24 nt, Human
ugggauuacaggcaugagccacug

SEQ ID NO: 1060392 - RNA, 24 nt, Human
ugggauuacaggcaugagccacug

SEQ ID NO: 1060393 - RNA, 26 nt, Human
ugggauuacaggcaugagccacugca

SEQ ID NO: 1060394 - RNA, 18 nt, Human
uuaguagagacgggguuu

SEQ ID NO: 1060395 - RNA, 22 nt, Human
uuaguagagacgggguuucacc

SEQ ID NO: 1060396 - RNA, 24 nt, Human
uuaguagagacgggguuucaccau

SEQ ID NO: 1060397 - RNA, 21 nt, Human
uucaagcgauucuccugccuc

SEQ ID NO: 1060398 - RNA, 24 nt, Human
uucaagcgauucuccugccucaac

SEQ ID NO: 1060399 - RNA, 23 nt, Human
uuccuccaaggcugggccgggca

SEQ ID NO: 1060400 - RNA, 22 nt, Human
uugcucuuguugcccaggcugg

SEQ ID NO: 1060401 - RNA, 23 nt, Human
uugcucuuguugcccaggcugga

SEQ ID NO: 1060402 - RNA, 21 nt, Human
uuggggauauagaugugcuuc

SEQ ID NO: 1060403 - RNA, 24 nt, Human
uuucaccauguuggccaggcuggu

SEQ ID NO: 1060404 - RNA, 24 nt, Human
uuugcucuuguugcccaggcugga

SEQ ID NO: 1060405 - RNA, 23 nt, Human
uuuugcucuuguugcccaggcug

SEQ ID NO: 1060406 - RNA, 24 nt, Human
uuuugcucuuguugcccaggcugg

SEQ ID NO: 1060407 - RNA, 24 nt, Human
uuuuuaguagagacgggguuucac

SEQ ID NO: 1060408 - RNA, 23 nt, Human
uuuuuuaguagagacgggguuuc

SEQ ID NO: 1060409 - RNA, 23 nt, Human
aacucgucauccucaucaucuuc

SEQ ID NO: 1060410 - RNA, 25 nt, Human
aacucgucauccucaucaucuucug

SEQ ID NO: 1060411 - RNA, 21 nt, Human
aagcccgccccucgcgccgcc

SEQ ID NO: 1060412 - RNA, 18 nt, Human
caagcagccgccgggagc

SEQ ID NO: 1060413 - RNA, 23 nt, Human
cauagcaaagugaguauaaaguu

SEQ ID NO: 1060414 - RNA, 19 nt, Human
ccgccgggagccugaaagc

SEQ ID NO: 1060415 - RNA, 22 nt, Human
ccgccgggagccugaaagcccg

SEQ ID NO: 1060416 - RNA, 18 nt, Human
ccugaaagcccgccccuc

SEQ ID NO: 1060417 - RNA, 23 nt, Human
cgacaaguggauaccuaaaaguu

SEQ ID NO: 1060418 - RNA, 19 nt, Human
gccugaaagcccgccccuc

SEQ ID NO: 1060419 - RNA, 21 nt, Human
uauaaaguucuacaauuuagu

SEQ ID NO: 1060420 - RNA, 22 nt, Human
uguaacaucuaacucgucaucc

SEQ ID NO: 1060421 - RNA, 22 nt, Human
uuggucagcauaaguuuccuuu

SEQ ID NO: 1060422 - RNA, 24 nt, Human
aagaaaaaggaaugauaaaaauau

SEQ ID NO: 1060423 - RNA, 19 nt, Human
auggagcuacaaagucugc

SEQ ID NO: 1060424 - RNA, 19 nt, Human
cacagcucugcucuuucac

SEQ ID NO: 1060425 - RNA, 19 nt, Human
cacuccucaccuguaacac

SEQ ID NO: 1060426 - RNA, 23 nt, Human
cagauuggaccagaacucgagug

SEQ ID NO: 1060427 - RNA, 24 nt, Human
cagcucugcucuuucaccugaggg

SEQ ID NO: 1060428 - RNA, 18 nt, Human
cauugaauuccaaaucug

SEQ ID NO: 1060429 - RNA, 18 nt, Human
ccugcuggacugacugcu

SEQ ID NO: 1060430 - RNA, 20 nt, Human
cugcuggacugacugcucug

SEQ ID NO: 1060431 - RNA, 23 nt, Human
cuucacagcucugcucuuucacc

SEQ ID NO: 1060432 - RNA, 23 nt, Human
gauaguucuucacagcucugcuc

SEQ ID NO: 1060433 - RNA, 19 nt, Human
gcuucauggcuguauagcu

SEQ ID NO: 1060434 - RNA, 19 nt, Human
uccuaggauuacacuccuc

SEQ ID NO: 1060435 - RNA, 24 nt, Human
uggagcuacaaagucugccacucu

SEQ ID NO: 1060436 - RNA, 21 nt, Human
uguggcauaucagggcuuugg

SEQ ID NO: 1060437 - RNA, 21 nt, Human
uuaauccauggcuucagauug

SEQ ID NO: 1060438 - RNA, 19 nt, Human
uugcaugaaacugacugau

SEQ ID NO: 1060439 - RNA, 20 nt, Human
agaggacauuuggaaaacuu

SEQ ID NO: 1060440 - RNA, 23 nt, Human
ugagauguuucuacgguagagga

SEQ ID NO: 1060441 - RNA, 20 nt, Human
aaagaaagaaaaauaagggu

SEQ ID NO: 1060442 - RNA, 22 nt, Human
aaccggccagccagggagccug

SEQ ID NO: 1060443 - RNA, 19 nt, Human
aagaggaaaaaaaucuaaa

SEQ ID NO: 1060444 - RNA, 20 nt, Human
aagcgcuggggaccgcgucu

SEQ ID NO: 1060445 - RNA, 23 nt, Human
accggccagccagggagccuggc

SEQ ID NO: 1060446 - RNA, 18 nt, Human
aggcauuuaaucaaggua

SEQ ID NO: 1060447 - RNA, 26 nt, Human
cacaaagaaagaaaaauaaggguuuc

SEQ ID NO: 1060448 - RNA, 24 nt, Human
caccuucacggcccagacgcccaa

SEQ ID NO: 1060449 - RNA, 22 nt, Human
caugcauaggcauuuaaucaag

SEQ ID NO: 1060450 - RNA, 19 nt, Human
ccaguggcucggcccggcg

SEQ ID NO: 1060451 - RNA, 19 nt, Human
cccaccuucacggcccaga

SEQ ID NO: 1060452 - RNA, 20 nt, Human
cccccgggggcgcucuccgc

SEQ ID NO: 1060453 - RNA, 19 nt, Human
ccgcgccgccgucacuugc

SEQ ID NO: 1060454 - RNA, 19 nt, Human
ccggaggcccuggaaggcu

SEQ ID NO: 1060455 - RNA, 24 nt, Human
ccgucacuugcgugccccgccccc

SEQ ID NO: 1060456 - RNA, 18 nt, Human
ccugcuucucccaguggc

SEQ ID NO: 1060457 - RNA, 21 nt, Human
cggcccagacgcccaaaccgg

SEQ ID NO: 1060458 - RNA, 18 nt, Human
cuccucggguccacgggc

SEQ ID NO: 1060459 - RNA, 21 nt, Human
cucuaagccuguccugccugc

SEQ ID NO: 1060460 - RNA, 24 nt, Human
cucuggccugcuucucccaguggg

SEQ ID NO: 1060461 - RNA, 20 nt, Human
gcgcuggggaccgcgucuuc

SEQ ID NO: 1060462 - RNA, 19 nt, Human
gcgugccccgcccccgggg

SEQ ID NO: 1060463 - RNA, 23 nt, Human
ggaaggcucuggccugcuucucc

SEQ ID NO: 1060464 - RNA, 21 nt, Human
ggagcggggugggacguccgu

SEQ ID NO: 1060465 - RNA, 25 nt, Human
ggcccggcgguucuccagcgacagg

SEQ ID NO: 1060466 - RNA, 22 nt, Human
gguaagaggaacagcaguggaa

SEQ ID NO: 1060467 - RNA, 19 nt, Human
guggaacuuaaauaugaua

SEQ ID NO: 1060468 - RNA, 23 nt, Human
ucaguucuguauacaaucuauau

SEQ ID NO: 1060469 - RNA, 18 nt, Human
uccacgggccggaggccc

SEQ ID NO: 1060470 - RNA, 22 nt, Human
uccacgggccggaggcccugga

SEQ ID NO: 1060471 - RNA, 21 nt, Human
uccguggcccaagcgcugggg

SEQ ID NO: 1060472 - RNA, 18 nt, Human
ucuaaauaccauccuuga

SEQ ID NO: 1060473 - RNA, 21 nt, Human
ucuccagcgacagaggagcgg

SEQ ID NO: 1060474 - RNA, 19 nt, Human
ucucuaagccuguccugcc

SEQ ID NO: 1060475 - RNA, 22 nt, Human
ugcaaaccauaaauauaaaaca

SEQ ID NO: 1060476 - RNA, 22 nt, Human
uggcccaagcgcuggggaccgc

SEQ ID NO: 1060477 - RNA, 25 nt, Human
uggccgcccagcgcuccaccacccg

SEQ ID NO: 1060478 - RNA, 21 nt, Human
ugggacguccguggcccaagc

SEQ ID NO: 1060479 - RNA, 20 nt, Human
ugucccauuccucucuuggc

SEQ ID NO: 1060480 - RNA, 21 nt, Human
uguuugguuuugugucccauu

SEQ ID NO: 1060481 - RNA, 23 nt, Human
uuaaaaguuucuuuugugagaug

SEQ ID NO: 1060482 - RNA, 23 nt, Human
uuccucacaguugaaaauaguuu

SEQ ID NO: 1060483 - RNA, 18 nt, Human
uugaaaaaagguuaagag

SEQ ID NO: 1060484 - RNA, 25 nt, Human
uuuauuguagguauuaaaaguuucu

SEQ ID NO: 1060485 - RNA, 20 nt, Human
caccccacaaccccaugcuc

SEQ ID NO: 1060486 - RNA, 23 nt, Human
caccccacaaccccaugcucuuc

SEQ ID NO: 1060487 - RNA, 25 nt, Human
caccccacaaccccaugcucuucua

SEQ ID NO: 1060488 - RNA, 18 nt, Human
ccaguauuuccacuugac

SEQ ID NO: 1060489 - RNA, 20 nt, Human
cccacaaccccaugcucuuc

SEQ ID NO: 1060490 - RNA, 18 nt, Human
ccuccaccccacaacccc

SEQ ID NO: 1060491 - RNA, 21 nt, Human
gccuccaccccacaaccccau

SEQ ID NO: 1060492 - RNA, 22 nt, Human
uucccugcucuuucagcugcca

SEQ ID NO: 1060493 - RNA, 18 nt, Human
uugccaguauuuccacuu

SEQ ID NO: 1060494 - RNA, 18 nt, Human
aagccauugguguaacag

SEQ ID NO: 1060495 - RNA, 21 nt, Human
accugucaaagcccacaggac

SEQ ID NO: 1060496 - RNA, 18 nt, Human
acuccgaggaucacggaa

SEQ ID NO: 1060497 - RNA, 19 nt, Human
agugagaccaagaacccac

SEQ ID NO: 1060498 - RNA, 21 nt, Human
cacaggaccagagucccgucc

SEQ ID NO: 1060499 - RNA, 18 nt, Human
caccuggucuccugggga

SEQ ID NO: 1060500 - RNA, 20 nt, Human
cagcagaagccauuggugua

SEQ ID NO: 1060501 - RNA, 20 nt, Human
caggaccagagucccgucca

SEQ ID NO: 1060502 - RNA, 23 nt, Human
caggaccagagucccguccaggg

SEQ ID NO: 1060503 - RNA, 21 nt, Human
cagugagaccaagaacccacc

SEQ ID NO: 1060504 - RNA, 21 nt, Human
cccacaggaccagagucccgu

SEQ ID NO: 1060505 - RNA, 20 nt, Human
ccugucaaagcccacaggac

SEQ ID NO: 1060506 - RNA, 18 nt, Human
uaaacgcaaaacgucgac

SEQ ID NO: 1060507 - RNA, 22 nt, Human
uaccacugucuccucacaccgg

SEQ ID NO: 1060508 - RNA, 25 nt, Human
ucacaccggacaugggauagccaca

SEQ ID NO: 1060509 - RNA, 24 nt, Human
ugacgucagugagaccaagaaccc

SEQ ID NO: 1060510 - RNA, 19 nt, Human
ugacugguaaaggcuauua

SEQ ID NO: 1060511 - RNA, 26 nt, Human
ugacugguaaaggcuauuaugguugg

SEQ ID NO: 1060512 - RNA, 18 nt, Human
ugagaccaagaacccacc

SEQ ID NO: 1060513 - RNA, 19 nt, Human
ugagaccaagaacccacca

SEQ ID NO: 1060514 - RNA, 21 nt, Human
uggcaggaaugcagugaccug

SEQ ID NO: 1060515 - RNA, 24 nt, Human
ugguguaacagcuaugaggucugc

SEQ ID NO: 1060516 - RNA, 19 nt, Human
uuagagcuggcuguaccac

SEQ ID NO: 1060517 - RNA, 22 nt, Human
aggcgggggcaggggcaggggc

SEQ ID NO: 1060518 - RNA, 24 nt, Human
cuagagcggcgacagaagcucuuc

SEQ ID NO: 1060519 - RNA, 18 nt, Human
gcaggggcaggggcagcc

SEQ ID NO: 1060520 - RNA, 19 nt, Human
gcggcgacagaagcucuuc

SEQ ID NO: 1060521 - RNA, 22 nt, Human
gggcaggggcagcucuccuuua

SEQ ID NO: 1060522 - RNA, 21 nt, Human
ggggcagcucuccuuuacccu

SEQ ID NO: 1060523 - RNA, 23 nt, Human
ugaaaaugacaaauucaguuucu

SEQ ID NO: 1060524 - RNA, 24 nt, Human
uugacacagaaguuagauaaauau

SEQ ID NO: 1060525 - RNA, 24 nt, Human
auauauccacuuuuuucuguucuu

SEQ ID NO: 1060526 - RNA, 18 nt, Human
auccacuuuuuucuguuc

SEQ ID NO: 1060527 - RNA, 20 nt, Human
ccacuuuuuucuguucuugu

SEQ ID NO: 1060528 - RNA, 27 nt, Human
acauucaauuuauuggucuuuguggag

SEQ ID NO: 1060529 - RNA, 19 nt, Human
caacaguauuccuccuaca

SEQ ID NO: 1060530 - RNA, 22 nt, Human
cagcaaugcuuuugaacgccaa

SEQ ID NO: 1060531 - RNA, 19 nt, Human
cagguaacaccaucuggca

SEQ ID NO: 1060532 - RNA, 21 nt, Human
cugaaacagcaaugcuuuuga

SEQ ID NO: 1060533 - RNA, 20 nt, Human
guaaguaauuaaggaacuac

SEQ ID NO: 1060534 - RNA, 20 nt, Human
uaaguaauuaaggaacuacu

SEQ ID NO: 1060535 - RNA, 29 nt, Human
uaauuaaggaacuacuuaacugaaacagg

SEQ ID NO: 1060536 - RNA, 24 nt, Human
uagccuuacuacauuguaaguaau

SEQ ID NO: 1060537 - RNA, 24 nt, Human
ugaacgccaacaguauuccuccua

SEQ ID NO: 1060538 - RNA, 24 nt, Human
uuaacacuugcgugcagcuuuuua

SEQ ID NO: 1060539 - RNA, 20 nt, Human
caccccaggcuugccuggcg

SEQ ID NO: 1060540 - RNA, 22 nt, Human
ccaggcuugccuggcggggaca

SEQ ID NO: 1060541 - RNA, 22 nt, Human
cccggcccacuccucugugcuc

SEQ ID NO: 1060542 - RNA, 20 nt, Human
cuccucugugcucucacccc

SEQ ID NO: 1060543 - RNA, 19 nt, Human
ggcauucggggcugggccg

SEQ ID NO: 1060544 - RNA, 19 nt, Human
gucccggcccacuccucug

SEQ ID NO: 1060545 - RNA, 21 nt, Human
ugggccgcauagggccauggg

SEQ ID NO: 1060546 - RNA, 18 nt, Human
cugcaaacuucugccagg

SEQ ID NO: 1060547 - RNA, 25 nt, Human
cugcagccuuuuugugacaagaaau

SEQ ID NO: 1060548 - RNA, 21 nt, Human
cuuggcuuucccaguauuugc

SEQ ID NO: 1060549 - RNA, 20 nt, Human
gaggaggcuguagcaguuuc

SEQ ID NO: 1060550 - RNA, 20 nt, Human
uacgcugcagccuuuuugug

SEQ ID NO: 1060551 - RNA, 21 nt, Human
uagcaguuucugaauguggug

SEQ ID NO: 1060552 - RNA, 27 nt, Human
ucugcucuguugaugagccagguugag

SEQ ID NO: 1060553 - RNA, 23 nt, Human
ugccuacagcuaauaaacggucu

SEQ ID NO: 1060554 - RNA, 20 nt, Human
ugcugcaaacuucugccagg

SEQ ID NO: 1060555 - RNA, 23 nt, Human
aaaaggcuauucuggugugagga

SEQ ID NO: 1060556 - RNA, 21 nt, Human
acaggaacaaaaggcuauucu

SEQ ID NO: 1060557 - RNA, 18 nt, Human
accuauguuauucucccu

SEQ ID NO: 1060558 - RNA, 21 nt, Human
augugcaguucauauccaggu

SEQ ID NO: 1060559 - RNA, 19 nt, Human
caugauccaguuuuccugc

SEQ ID NO: 1060560 - RNA, 23 nt, Human
ccugcugacgacgcuuuuuccac

SEQ ID NO: 1060561 - RNA, 23 nt, Human
cggacaggaacaaaaggcuauuc

SEQ ID NO: 1060562 - RNA, 19 nt, Human
cuggugugaggagaaauca

SEQ ID NO: 1060563 - RNA, 22 nt, Human
cuuuuuccacugcugugucaau

SEQ ID NO: 1060564 - RNA, 21 nt, Human
gguccugcaaaaaucuaaaac

SEQ ID NO: 1060565 - RNA, 18 nt, Human
uauguaauguauauaugu

SEQ ID NO: 1060566 - RNA, 18 nt, Human
ucaaucacacccucugug

SEQ ID NO: 1060567 - RNA, 19 nt, Human
ucauauccagguccugcaa

SEQ ID NO: 1060568 - RNA, 24 nt, Human
uccaaaaagaugaauggaaaauug

SEQ ID NO: 1060569 - RNA, 24 nt, Human
uccagguccugcaaaaaucuaaaa

SEQ ID NO: 1060570 - RNA, 24 nt, Human
ucccuuucgagcaaaagucaugau

SEQ ID NO: 1060571 - RNA, 19 nt, Human
uccugcaaaaaucuaaaac

SEQ ID NO: 1060572 - RNA, 21 nt, Human
ucucccuuucgagcaaaaguu

SEQ ID NO: 1060573 - RNA, 19 nt, Human
ugaagcagacggacaggaa

SEQ ID NO: 1060574 - RNA, 19 nt, Human
ugaggagaaaucagucacu

SEQ ID NO: 1060575 - RNA, 19 nt, Human
uggaccauucgaagaagcu

SEQ ID NO: 1060576 - RNA, 18 nt, Human
uggugugaggagaaauca

SEQ ID NO: 1060577 - RNA, 26 nt, Human
uguauuguuuuguuuuguucuguuuu

SEQ ID NO: 1060578 - RNA, 20 nt, Human
ugugaggagaaaucagucaa

SEQ ID NO: 1060579 - RNA, 23 nt, Human
uuuaaaauuuuaaaagucgggga

SEQ ID NO: 1060580 - RNA, 18 nt, Human
uuuguuaaaaaccaugua

SEQ ID NO: 1060581 - RNA, 18 nt, Human
uuuuuuuuuuuucaggga

SEQ ID NO: 1060582 - RNA, 22 nt, Human
uuuuuuuuuuuuuuuuucaggg

SEQ ID NO: 1060583 - RNA, 18 nt, Human
uauccagcccagguuuga

SEQ ID NO: 1060584 - RNA, 23 nt, Human
uccagcccagguuugaccuugac

SEQ ID NO: 1060585 - RNA, 24 nt, Human
aucaaacgacucccaucugcuaac

SEQ ID NO: 1060586 - RNA, 21 nt, Human
cagguguaaggcuuccaaguu

SEQ ID NO: 1060587 - RNA, 25 nt, Human
caguaaugccacauuaaaagauuuc

SEQ ID NO: 1060588 - RNA, 22 nt, Human
ccagcaguaaugccacauuaaa

SEQ ID NO: 1060589 - RNA, 18 nt, Human
gccagcaguaaugccaca

SEQ ID NO: 1060590 - RNA, 23 nt, Human
gucaccccucucuuaacagacuc

SEQ ID NO: 1060591 - RNA, 18 nt, Human
ucaaacgacucccaucug

SEQ ID NO: 1060592 - RNA, 18 nt, Human
uccaaauucacuuggcca

SEQ ID NO: 1060593 - RNA, 23 nt, Human
ucucuuaacagacuccagaaauu

SEQ ID NO: 1060594 - RNA, 24 nt, Human
ugaacaaggcgcugaagcuccagg

SEQ ID NO: 1060595 - RNA, 26 nt, Human
ugaagucacaagaauaaagucaagag

SEQ ID NO: 1060596 - RNA, 22 nt, Human
ugaaucaucaauaagaacaacu

SEQ ID NO: 1060597 - RNA, 18 nt, Human
ugagagucaccccucucu

SEQ ID NO: 1060598 - RNA, 23 nt, Human
uguaucaaacgacucccaucugc

SEQ ID NO: 1060599 - RNA, 25 nt, Human
aaacacggccacaggaggcaacugc

SEQ ID NO: 1060600 - RNA, 23 nt, Human
aaaggaagcaaguucccgaagaa

SEQ ID NO: 1060601 - RNA, 20 nt, Human
aacagcccugugagguagga

SEQ ID NO: 1060602 - RNA, 20 nt, Human
aagaacaaauccaaagccca

SEQ ID NO: 1060603 - RNA, 19 nt, Human
aagcccagugcagcagcuc

SEQ ID NO: 1060604 - RNA, 19 nt, Human
aagcgaccgcgaggcuagg

SEQ ID NO: 1060605 - RNA, 23 nt, Human
aagugagcagugaggacgggggc

SEQ ID NO: 1060606 - RNA, 22 nt, Human
aauagaaggccugggaacagaa

SEQ ID NO: 1060607 - RNA, 21 nt, Human
aaucacuggcacuucacacag

SEQ ID NO: 1060608 - RNA, 20 nt, Human
acagcuuccaggauccuccu

SEQ ID NO: 1060609 - RNA, 20 nt, Human
accccauuccaaaguccaca

SEQ ID NO: 1060610 - RNA, 21 nt, Human
accccgcacgguggccccagc

SEQ ID NO: 1060611 - RNA, 22 nt, Human
accgcucccucccgcccuugcc

SEQ ID NO: 1060612 - RNA, 20 nt, Human
accuggccucuuccccuccc

SEQ ID NO: 1060613 - RNA, 18 nt, Human
agaaggaaagagaugcug

SEQ ID NO: 1060614 - RNA, 19 nt, Human
agaugcaucuggcauuggu

SEQ ID NO: 1060615 - RNA, 20 nt, Human
agauggaguuucugugcaag

SEQ ID NO: 1060616 - RNA, 24 nt, Human
agcuacagucuuugccagaaggaa

SEQ ID NO: 1060617 - RNA, 18 nt, Human
agcucugagcucaggccu

SEQ ID NO: 1060618 - RNA, 23 nt, Human
aggcugggggcgauguugaggcc

SEQ ID NO: 1060619 - RNA, 21 nt, Human
agugagcagugaggacggggg

SEQ ID NO: 1060620 - RNA, 21 nt, Human
aucacauggggaguucagggu

SEQ ID NO: 1060621 - RNA, 19 nt, Human
aucuggccccauccuccuc

SEQ ID NO: 1060622 - RNA, 24 nt, Human
caaacagcugcuuacaugcugcca

SEQ ID NO: 1060623 - RNA, 18 nt, Human
cacauggggaguucaggg

SEQ ID NO: 1060624 - RNA, 28 nt, Human
caccagccagggaaaggaagcaaguucc

SEQ ID NO: 1060625 - RNA, 20 nt, Human
cacccgcagcacuuuaaucc

SEQ ID NO: 1060626 - RNA, 23 nt, Human
cacccuuucuuagcagugaccug

SEQ ID NO: 1060627 - RNA, 24 nt, Human
cagaauggauggacucuaaagaug

SEQ ID NO: 1060628 - RNA, 19 nt, Human
cagaugguccuuccugaca

SEQ ID NO: 1060629 - RNA, 23 nt, Human
cagcaaaccccauuccaaagucc

SEQ ID NO: 1060630 - RNA, 21 nt, Human
cagggaaaggaagcaaguucc

SEQ ID NO: 1060631 - RNA, 19 nt, Human
cagugaggacgggggcucu

SEQ ID NO: 1060632 - RNA, 18 nt, Human
caucacauggggaguuca

SEQ ID NO: 1060633 - RNA, 18 nt, Human
cauggccacaucucccca

SEQ ID NO: 1060634 - RNA, 18 nt, Human
cauuccaaaguccacacc

SEQ ID NO: 1060635 - RNA, 24 nt, Human
cauuccaaaguccacacccuucaa

SEQ ID NO: 1060636 - RNA, 21 nt, Human
ccacacccuucaaccgccuga

SEQ ID NO: 1060637 - RNA, 27 nt, Human
ccacacccuucaaccgccugaauagaa

SEQ ID NO: 1060638 - RNA, 25 nt, Human
ccagaaggaaagagaugcuggcaca

SEQ ID NO: 1060639 - RNA, 21 nt, Human
ccagcucugagcccguuggca

SEQ ID NO: 1060640 - RNA, 19 nt, Human
ccaggccaggccagcaccu

SEQ ID NO: 1060641 - RNA, 20 nt, Human
ccaggccaggccagcaccug

SEQ ID NO: 1060642 - RNA, 18 nt, Human
ccccaaccacucagcccg

SEQ ID NO: 1060643 - RNA, 20 nt, Human
ccccagcacaucccuggcac

SEQ ID NO: 1060644 - RNA, 19 nt, Human
cccgaagaacagcaaaccc

SEQ ID NO: 1060645 - RNA, 22 nt, Human
cccgaagaacagcaaaccccau

SEQ ID NO: 1060646 - RNA, 22 nt, Human
cccgaaggcacccuuucuuagc

SEQ ID NO: 1060647 - RNA, 20 nt, Human
ccgaagaacagcaaacccca

SEQ ID NO: 1060648 - RNA, 21 nt, Human
ccgaagaacagcaaaccccau

SEQ ID NO: 1060649 - RNA, 18 nt, Human
ccucagcugugccuuucc

SEQ ID NO: 1060650 - RNA, 20 nt, Human
ccucccgcccuugccgccgc

SEQ ID NO: 1060651 - RNA, 19 nt, Human
ccugaugcugcuuccagag

SEQ ID NO: 1060652 - RNA, 19 nt, Human
ccugcagaucugucacuac

SEQ ID NO: 1060653 - RNA, 24 nt, Human
ccuggagagcuacagucuuugcca

SEQ ID NO: 1060654 - RNA, 22 nt, Human
ccuggccucuuccccucccuuu

SEQ ID NO: 1060655 - RNA, 20 nt, Human
ccuguacuugaaacacugaa

SEQ ID NO: 1060656 - RNA, 19 nt, Human
cgaccgcgaggcuaggcag

SEQ ID NO: 1060657 - RNA, 23 nt, Human
cgaggcuaggcagcuccaaaucc

SEQ ID NO: 1060658 - RNA, 22 nt, Human
cggcgaccgcucccucccgccc

SEQ ID NO: 1060659 - RNA, 26 nt, Human
cguccugggucgcaacacccagcagc

SEQ ID NO: 1060660 - RNA, 19 nt, Human
cucacaagaacaaauccaa

SEQ ID NO: 1060661 - RNA, 25 nt, Human
cucacccgcagcacuuuaaucccca

SEQ ID NO: 1060662 - RNA, 26 nt, Human
cucacccgcagcacuuuaauccccac

SEQ ID NO: 1060663 - RNA, 21 nt, Human
cuccuaccuggagagcuacag

SEQ ID NO: 1060664 - RNA, 18 nt, Human
cuccucuggcaaggcucc

SEQ ID NO: 1060665 - RNA, 21 nt, Human
cugcccaagagcauucaacag

SEQ ID NO: 1060666 - RNA, 24 nt, Human
cuuccccucccuuuaguaacccca

SEQ ID NO: 1060667 - RNA, 23 nt, Human
gaaaaacacggccacaggaggca

SEQ ID NO: 1060668 - RNA, 18 nt, Human
gaaaggaagcaaguuccc

SEQ ID NO: 1060669 - RNA, 22 nt, Human
gaacaaauccaaagcccagugc

SEQ ID NO: 1060670 - RNA, 23 nt, Human
gaacaaauccaaagcccagugca

SEQ ID NO: 1060671 - RNA, 18 nt, Human
gaccgcucccucccgccc

SEQ ID NO: 1060672 - RNA, 23 nt, Human
gaggccgaagccagccacagugc

SEQ ID NO: 1060673 - RNA, 24 nt, Human
gauccagagcagcccggggagccc

SEQ ID NO: 1060674 - RNA, 18 nt, Human
gaugcaucuggcauuggu

SEQ ID NO: 1060675 - RNA, 19 nt, Human
gcaccccgcacgguggccc

SEQ ID NO: 1060676 - RNA, 22 nt, Human
gcucugagcucaggccugccgu

SEQ ID NO: 1060677 - RNA, 20 nt, Human
ggaaaggacacagcaguggg

SEQ ID NO: 1060678 - RNA, 21 nt, Human
ggcauugguauccucuggaca

SEQ ID NO: 1060679 - RNA, 22 nt, Human
gggaaaccgagacacacauuca

SEQ ID NO: 1060680 - RNA, 18 nt, Human
guggccccagccagcugg

SEQ ID NO: 1060681 - RNA, 18 nt, Human
uaaccccaucagcagcag

SEQ ID NO: 1060682 - RNA, 22 nt, Human
uaacuccagaugcaucuggcau

SEQ ID NO: 1060683 - RNA, 27 nt, Human
uagcacaagaccauggccacaucuccc

SEQ ID NO: 1060684 - RNA, 23 nt, Human
uauccucuggacacucuucuccc

SEQ ID NO: 1060685 - RNA, 24 nt, Human
ucagcggcccaccuggccucuucc

SEQ ID NO: 1060686 - RNA, 18 nt, Human
ucaggccugccgugcccc

SEQ ID NO: 1060687 - RNA, 22 nt, Human
ucaggguuagccuggaguacga

SEQ ID NO: 1060688 - RNA, 24 nt, Human
uccacacccuucaaccgccugaau

SEQ ID NO: 1060689 - RNA, 24 nt, Human
uccagaauggauggacucuaaaga

SEQ ID NO: 1060690 - RNA, 22 nt, Human
uccccacaacagcccugugagg

SEQ ID NO: 1060691 - RNA, 23 nt, Human
ucccgcugcggcucggcgaaagc

SEQ ID NO: 1060692 - RNA, 20 nt, Human
uccucuggcaaggcuccugg

SEQ ID NO: 1060693 - RNA, 18 nt, Human
uccugggauccagagcag

SEQ ID NO: 1060694 - RNA, 19 nt, Human
uccuggugcucacagcuuc

SEQ ID NO: 1060695 - RNA, 25 nt, Human
uccuguggagggguaaucacuggca

SEQ ID NO: 1060696 - RNA, 20 nt, Human
ucucccgaaggcacccuuuc

SEQ ID NO: 1060697 - RNA, 21 nt, Human
ucucuagcacaagaccauggc

SEQ ID NO: 1060698 - RNA, 19 nt, Human
ugccucagcugugccuuuc

SEQ ID NO: 1060699 - RNA, 27 nt, Human
ugcucugcuguccugaugcugcuucca

SEQ ID NO: 1060700 - RNA, 21 nt, Human
ugggucuucaguaaaagcauc

SEQ ID NO: 1060701 - RNA, 24 nt, Human
uggguucuuggcaaacagcugcuu

SEQ ID NO: 1060702 - RNA, 18 nt, Human
uguggaaauuaaauaacu

SEQ ID NO: 1060703 - RNA, 20 nt, Human
uucaacagauaaaucugucc

SEQ ID NO: 1060704 - RNA, 21 nt, Human
uucaggguuagccuggaguac

SEQ ID NO: 1060705 - RNA, 23 nt, Human
uuccagagguuuuacaugguuuu

SEQ ID NO: 1060706 - RNA, 20 nt, Human
uugaaacacugaacgugaug

SEQ ID NO: 1060707 - RNA, 21 nt, Human
uuguaccgccaucucuagcac

SEQ ID NO: 1060708 - RNA, 19 nt, Human
uuucuuagcagugaccugg

SEQ ID NO: 1060709 - RNA, 18 nt, Human
aggcccgcccccaggcgg

SEQ ID NO: 1060710 - RNA, 24 nt, Human
aggucacccgcgaaccuggaaaug

SEQ ID NO: 1060711 - RNA, 22 nt, Human
auggagccuaggggcugagguu

SEQ ID NO: 1060712 - RNA, 20 nt, Human
caccaaauaauaauaaacau

SEQ ID NO: 1060713 - RNA, 18 nt, Human
cagccgcugccguccccc

SEQ ID NO: 1060714 - RNA, 22 nt, Human
ccacuggggcgggagccagggc

SEQ ID NO: 1060715 - RNA, 23 nt, Human
ccaggcuugcccguucccggcuu

SEQ ID NO: 1060716 - RNA, 22 nt, Human
ccccaagggacuuuugugaggc

SEQ ID NO: 1060717 - RNA, 18 nt, Human
ccccuaagcgauacgaaa

SEQ ID NO: 1060718 - RNA, 20 nt, Human
cccgcgaaccuggaaaugga

SEQ ID NO: 1060719 - RNA, 20 nt, Human
cccguucccggcuuucuggg

SEQ ID NO: 1060720 - RNA, 22 nt, Human
ccgugugcucuccucuuuccug

SEQ ID NO: 1060721 - RNA, 24 nt, Human
cucuuuugcuaguuaaaaaaauuu

SEQ ID NO: 1060722 - RNA, 19 nt, Human
cugccguccccccaccccc

SEQ ID NO: 1060723 - RNA, 22 nt, Human
cuuuccaggcuugcccguuccc

SEQ ID NO: 1060724 - RNA, 19 nt, Human
gaccagaauuagaagccac

SEQ ID NO: 1060725 - RNA, 18 nt, Human
gccgcugccgucccccca

SEQ ID NO: 1060726 - RNA, 21 nt, Human
ggaaauggagccuaggggcug

SEQ ID NO: 1060727 - RNA, 24 nt, Human
gggaccagaauuagaagccacugg

SEQ ID NO: 1060728 - RNA, 21 nt, Human
uaauaaacaugagguugggua

SEQ ID NO: 1060729 - RNA, 21 nt, Human
ucacccaaucaacacccgugc

SEQ ID NO: 1060730 - RNA, 24 nt, Human
uccuaaagaaauuccaaaaacaaa

SEQ ID NO: 1060731 - RNA, 21 nt, Human
ucugucagaugguucuugcga

SEQ ID NO: 1060732 - RNA, 25 nt, Human
ucuuuauaauuuuucugaaagacca

SEQ ID NO: 1060733 - RNA, 19 nt, Human
ugaggcagaaacgcauccu

SEQ ID NO: 1060734 - RNA, 22 nt, Human
ugcgaggaaccccuaagcgaua

SEQ ID NO: 1060735 - RNA, 23 nt, Human
ugcgaggaaccccuaagcgauac

SEQ ID NO: 1060736 - RNA, 24 nt, Human
ugcucuccucuuuccugcgccuca

SEQ ID NO: 1060737 - RNA, 22 nt, Human
uggcaugauguuuucucuuuuu

SEQ ID NO: 1060738 - RNA, 20 nt, Human
ugguuccaagggccacuccc

SEQ ID NO: 1060739 - RNA, 18 nt, Human
aaccugacaauuguacag

SEQ ID NO: 1060740 - RNA, 20 nt, Human
acaugacauuguuggaaaua

SEQ ID NO: 1060741 - RNA, 21 nt, Human
aggaacaggaggugaaaugac

SEQ ID NO: 1060742 - RNA, 24 nt, Human
cacagcacaagacaacagcuaaga

SEQ ID NO: 1060743 - RNA, 18 nt, Human
cuccagcuccggcucgcg

SEQ ID NO: 1060744 - RNA, 22 nt, Human
cuggaaaugucuccagcuccgg

SEQ ID NO: 1060745 - RNA, 24 nt, Human
cugugaagaugguuucuuccauuu

SEQ ID NO: 1060746 - RNA, 24 nt, Human
gaaaaaaaaaacauaauuagcaaa

SEQ ID NO: 1060747 - RNA, 27 nt, Human
gaaaaaaaaaacauaauuagcaaaggg

SEQ ID NO: 1060748 - RNA, 19 nt, Human
gagaguuccuaggaacagg

SEQ ID NO: 1060749 - RNA, 21 nt, Human
ggaauuucuaaaacugagcaa

SEQ ID NO: 1060750 - RNA, 23 nt, Human
uaaaacugagcaauacugucccc

SEQ ID NO: 1060751 - RNA, 22 nt, Human
uaaauuauaaaaacuagcauaa

SEQ ID NO: 1060752 - RNA, 22 nt, Human
uacccagacugaaguaauaauu

SEQ ID NO: 1060753 - RNA, 20 nt, Human
uagaagaaauggaauuucua

SEQ ID NO: 1060754 - RNA, 19 nt, Human
uauacagggcagaaauaua

SEQ ID NO: 1060755 - RNA, 18 nt, Human
ucacagaucaaaccaaca

SEQ ID NO: 1060756 - RNA, 23 nt, Human
ucuuuauuaauaaaaagggugcu

SEQ ID NO: 1060757 - RNA, 21 nt, Human
ugcucaacuuaaucacagauc

SEQ ID NO: 1060758 - RNA, 22 nt, Human
uggaaaacacuggcaaugcuuu

SEQ ID NO: 1060759 - RNA, 23 nt, Human
uggaauuucuaaaacugagcaau

SEQ ID NO: 1060760 - RNA, 22 nt, Human
uggcaaugcuugggaauggaga

SEQ ID NO: 1060761 - RNA, 18 nt, Human
uggccuggagccagcccc

SEQ ID NO: 1060762 - RNA, 22 nt, Human
uggggguugucacaguuucucu

SEQ ID NO: 1060763 - RNA, 21 nt, Human
ugucacaguuucucuuuucug

SEQ ID NO: 1060764 - RNA, 23 nt, Human
uguccaguaagaaaccuccuuuc

SEQ ID NO: 1060765 - RNA, 27 nt, Human
ugucuccagcuccggcucgcguggccu

SEQ ID NO: 1060766 - RNA, 21 nt, Human
ugugaagaugguuucuuccau

SEQ ID NO: 1060767 - RNA, 23 nt, Human
uuaaaagaaacaguauuuauuaa

SEQ ID NO: 1060768 - RNA, 22 nt, Human
uucuccuacggucugugaagau

SEQ ID NO: 1060769 - RNA, 18 nt, Human
uucucuuuucugcuuugu

SEQ ID NO: 1060770 - RNA, 23 nt, Human
uuguauauaguguuucccuuacc

SEQ ID NO: 1060771 - RNA, 25 nt, Human
uuuccacagcacaagacaacagcua

SEQ ID NO: 1060772 - RNA, 21 nt, Human
uuucuggggguugucacaguu

SEQ ID NO: 1060773 - RNA, 21 nt, Human
uuuguauauaguguuucccuu

SEQ ID NO: 1060774 - RNA, 19 nt, Human
aacaagagccucagaaagg

SEQ ID NO: 1060775 - RNA, 23 nt, Human
acauagcaagacucucaacaaga

SEQ ID NO: 1060776 - RNA, 24 nt, Human
accagaaccugaaacaagcaguga

SEQ ID NO: 1060777 - RNA, 18 nt, Human
accgcacuccagccuggg

SEQ ID NO: 1060778 - RNA, 23 nt, Human
accgcacuccagccugggugaca

SEQ ID NO: 1060779 - RNA, 20 nt, Human
acgcugcggaggcggggcgg

SEQ ID NO: 1060780 - RNA, 23 nt, Human
acucugaggaacguuuaccagaa

SEQ ID NO: 1060781 - RNA, 22 nt, Human
agccugggugacauagcaagac

SEQ ID NO: 1060782 - RNA, 24 nt, Human
agccugggugacauagcaagacuc

SEQ ID NO: 1060783 - RNA, 21 nt, Human
agcugcagcacuaggcuuccc

SEQ ID NO: 1060784 - RNA, 21 nt, Human
aggcagagcuuggagugagcc

SEQ ID NO: 1060785 - RNA, 23 nt, Human
aggcagagcuuggagugagccga

SEQ ID NO: 1060786 - RNA, 24 nt, Human
aggcagagcuuggagugagccgag

SEQ ID NO: 1060787 - RNA, 19 nt, Human
aggcugagguaggagaaug

SEQ ID NO: 1060788 - RNA, 21 nt, Human
agguaggagaauggugugaac

SEQ ID NO: 1060789 - RNA, 24 nt, Human
agguaggagaauggugugaacccg

SEQ ID NO: 1060790 - RNA, 28 nt, Human
auaucacaaugaugacagcaagaccaau

SEQ ID NO: 1060791 - RNA, 24 nt, Human
auggugccaccgcacuccagccug

SEQ ID NO: 1060792 - RNA, 24 nt, Human
caaacuucuuucucuuccaaggug

SEQ ID NO: 1060793 - RNA, 25 nt, Human
caagaccaauaaggaaugcaaugcu

SEQ ID NO: 1060794 - RNA, 23 nt, Human
caagacucucaacaagagccuca

SEQ ID NO: 1060795 - RNA, 22 nt, Human
caagagagaauaguuuccaaau

SEQ ID NO: 1060796 - RNA, 20 nt, Human
cacaaugaugacagcaagac

SEQ ID NO: 1060797 - RNA, 24 nt, Human
caccgcacuccagccugggugaca

SEQ ID NO: 1060798 - RNA, 23 nt, Human
cacuaggcuucccugcuuuugga

SEQ ID NO: 1060799 - RNA, 19 nt, Human
cacuccagccugggugaca

SEQ ID NO: 1060800 - RNA, 22 nt, Human
cacuccagccugggugacauag

SEQ ID NO: 1060801 - RNA, 23 nt, Human
cacuccagccugggugacauagc

SEQ ID NO: 1060802 - RNA, 21 nt, Human
cagcgcggccagcgcccugcc

SEQ ID NO: 1060803 - RNA, 21 nt, Human
cagcuacucaggaggcugagg

SEQ ID NO: 1060804 - RNA, 19 nt, Human
cauagcaagacucucaaca

SEQ ID NO: 1060805 - RNA, 24 nt, Human
cauuauggauguucuuuaccaaga

SEQ ID NO: 1060806 - RNA, 20 nt, Human
ccaccgcacuccagccuggg

SEQ ID NO: 1060807 - RNA, 20 nt, Human
ccaccgcacuccagccuggg

SEQ ID NO: 1060808 - RNA, 21 nt, Human
ccaccgcacuccagccugggu

SEQ ID NO: 1060809 - RNA, 21 nt, Human
ccaccgcacuccagccugggu

SEQ ID NO: 1060810 - RNA, 23 nt, Human
ccaccgcacuccagccuggguga

SEQ ID NO: 1060811 - RNA, 24 nt, Human
ccaccgcacuccagccugggugac

SEQ ID NO: 1060812 - RNA, 23 nt, Human
ccccgaagagccgccgaccauug

SEQ ID NO: 1060813 - RNA, 22 nt, Human
ccccgaagagccgccgggggcc

SEQ ID NO: 1060814 - RNA, 20 nt, Human
ccccugaagguguccacgcu

SEQ ID NO: 1060815 - RNA, 22 nt, Human
ccugggugacauagcaagacuc

SEQ ID NO: 1060816 - RNA, 18 nt, Human
cgcggccagcgcccugcc

SEQ ID NO: 1060817 - RNA, 18 nt, Human
cucaggaggcugagguag

SEQ ID NO: 1060818 - RNA, 24 nt, Human
cuccaaaucuguauuccaaccuac

SEQ ID NO: 1060819 - RNA, 19 nt, Human
cugcagcacuaggcuuccc

SEQ ID NO: 1060820 - RNA, 21 nt, Human
cugcaguuccagcuacucagg

SEQ ID NO: 1060821 - RNA, 20 nt, Human
gaacccgggaggcagagcuu

SEQ ID NO: 1060822 - RNA, 19 nt, Human
gaaccugaaacaagcagug

SEQ ID NO: 1060823 - RNA, 21 nt, Human
gcagcgcggccagcgcccugc

SEQ ID NO: 1060824 - RNA, 19 nt, Human
gccaccgcacuccagccug

SEQ ID NO: 1060825 - RNA, 22 nt, Human
gcgcggccugggcaucgcgccc

SEQ ID NO: 1060826 - RNA, 18 nt, Human
gcugcggaggcggggcgg

SEQ ID NO: 1060827 - RNA, 22 nt, Human
guccugcugggagaucccagcu

SEQ ID NO: 1060828 - RNA, 20 nt, Human
guggcggcgcggccugggca

SEQ ID NO: 1060829 - RNA, 19 nt, Human
uaccaagagagaauaguuu

SEQ ID NO: 1060830 - RNA, 22 nt, Human
uaccaagagagaauaguuucca

SEQ ID NO: 1060831 - RNA, 22 nt, Human
uaccagaaccugaaacaagcag

SEQ ID NO: 1060832 - RNA, 25 nt, Human
ucauccaaacugcaguuccagcuac

SEQ ID NO: 1060833 - RNA, 25 nt, Human
uccaaauucuccaaaucuguauucc

SEQ ID NO: 1060834 - RNA, 19 nt, Human
uccacgcugcggaggcggg

SEQ ID NO: 1060835 - RNA, 24 nt, Human
uccagccugggugacauagcaaga

SEQ ID NO: 1060836 - RNA, 23 nt, Human
uccgugcugggugcugacagagg

SEQ ID NO: 1060837 - RNA, 22 nt, Human
ugagccgagauggugccaccgc

SEQ ID NO: 1060838 - RNA, 24 nt, Human
ugagguaggagaauggugugaacc

SEQ ID NO: 1060839 - RNA, 24 nt, Human
ugcggaggcggggcggcagggcag

SEQ ID NO: 1060840 - RNA, 27 nt, Human
ugucguucagcugcaggauagauccgg

SEQ ID NO: 1060841 - RNA, 20 nt, Human
uuagaaauccaauuguuaaa

SEQ ID NO: 1060842 - RNA, 22 nt, Human
uuggagugagccgagauggugc

SEQ ID NO: 1060843 - RNA, 18 nt, Human
uuuaccagaaccugaaac

SEQ ID NO: 1060844 - RNA, 19 nt, Human
aauuucuguccuguuuccc

SEQ ID NO: 1060845 - RNA, 22 nt, Human
acuucaggacauacaaauucca

SEQ ID NO: 1060846 - RNA, 19 nt, Human
auacaaauuccaaaagcaa

SEQ ID NO: 1060847 - RNA, 19 nt, Human
caaauuccaaaagcaugca

SEQ ID NO: 1060848 - RNA, 22 nt, Human
ccaauuucuguccuguuuccca

SEQ ID NO: 1060849 - RNA, 21 nt, Human
uaccuaaaaacuucaccaauu

SEQ ID NO: 1060850 - RNA, 24 nt, Human
uccaaaagcaugcauguccaaaga

SEQ ID NO: 1060851 - RNA, 21 nt, Human
uguccaaagaggguuauagag

SEQ ID NO: 1060852 - RNA, 25 nt, Human
uuccaaaagcaugcauguccaaaga

SEQ ID NO: 1060853 - RNA, 19 nt, Human
aagcgccucugcgagcaag

SEQ ID NO: 1060854 - RNA, 18 nt, Human
agagggcuccucucggga

SEQ ID NO: 1060855 - RNA, 23 nt, Human
agcugcccggccgcgccaacccc

SEQ ID NO: 1060856 - RNA, 21 nt, Human
aggccgagguccgggccacgc

SEQ ID NO: 1060857 - RNA, 26 nt, Human
agggagccaagagcggacggggcggu

SEQ ID NO: 1060858 - RNA, 18 nt, Human
caaaaagcgccucugcga

SEQ ID NO: 1060859 - RNA, 18 nt, Human
caagagcggacggggcgg

SEQ ID NO: 1060860 - RNA, 19 nt, Human
cagcuugccagccgccacc

SEQ ID NO: 1060861 - RNA, 22 nt, Human
ccaccccccgccuucccuccug

SEQ ID NO: 1060862 - RNA, 23 nt, Human
ccccccgccuucccuccugccca

SEQ ID NO: 1060863 - RNA, 26 nt, Human
cccccgccuucccuccugcccacccc

SEQ ID NO: 1060864 - RNA, 18 nt, Human
cccggguagccgcaaccc

SEQ ID NO: 1060865 - RNA, 19 nt, Human
ccgcaggcucgcuccgguc

SEQ ID NO: 1060866 - RNA, 21 nt, Human
ccggccgcgccaaccccuucc

SEQ ID NO: 1060867 - RNA, 20 nt, Human
cugccuccgccgcgcagccc

SEQ ID NO: 1060868 - RNA, 24 nt, Human
cuugccagccgccaccccccgccu

SEQ ID NO: 1060869 - RNA, 27 nt, Human
gagccaagagcggacggggcgguggga

SEQ ID NO: 1060870 - RNA, 22 nt, Human
gcgcagcccugcgcagcugccc

SEQ ID NO: 1060871 - RNA, 24 nt, Human
gcggcgaccgggagggugaaggga

SEQ ID NO: 1060872 - RNA, 18 nt, Human
gggcggugggacgggggg

SEQ ID NO: 1060873 - RNA, 19 nt, Human
ggggaaggggaggccgagg

SEQ ID NO: 1060874 - RNA, 21 nt, Human
gguagcccagcaggcugcggc

SEQ ID NO: 1060875 - RNA, 22 nt, Human
guagcccagcaggcugcggcuc

SEQ ID NO: 1060876 - RNA, 23 nt, Human
uccccgccgcagcgcgccccgag

SEQ ID NO: 1060877 - RNA, 22 nt, Human
ucccgggcuccuccgcaggcuc

SEQ ID NO: 1060878 - RNA, 22 nt, Human
uccucucgggagugugcgggga

SEQ ID NO: 1060879 - RNA, 21 nt, Human
ucgcgggcgcucggacggcgg

SEQ ID NO: 1060880 - RNA, 25 nt, Human
ugccagccgccaccccccgccuucc

SEQ ID NO: 1060881 - RNA, 20 nt, Human
aaacaaauaaaacacgacca

SEQ ID NO: 1060882 - RNA, 24 nt, Human
aaacacgaccaccacauaaagcac

SEQ ID NO: 1060883 - RNA, 22 nt, Human
aacacgaccaccacauaaagca

SEQ ID NO: 1060884 - RNA, 23 nt, Human
aaccauccugaacuacuggauuc

SEQ ID NO: 1060885 - RNA, 20 nt, Human
acagaucacauccaauguga

SEQ ID NO: 1060886 - RNA, 21 nt, Human
accaccacauaaagcacuuuu

SEQ ID NO: 1060887 - RNA, 19 nt, Human
auaaaacacgaccaccaca

SEQ ID NO: 1060888 - RNA, 18 nt, Human
cacgaccaccacauaaag

SEQ ID NO: 1060889 - RNA, 20 nt, Human
cauccugaacuacuggauuc

SEQ ID NO: 1060890 - RNA, 27 nt, Human
ccaccacauaaagcacuuuuauacaga

SEQ ID NO: 1060891 - RNA, 23 nt, Human
ccccuuguggacugaaccgaggg

SEQ ID NO: 1060892 - RNA, 25 nt, Human
ccccuuguggacugaaccgaggggg

SEQ ID NO: 1060893 - RNA, 22 nt, Human
ccuuguggacugaaccgagggg

SEQ ID NO: 1060894 - RNA, 19 nt, Human
cuccaagugguguuugaag

SEQ ID NO: 1060895 - RNA, 18 nt, Human
gcaagguggcaguccccu

SEQ ID NO: 1060896 - RNA, 23 nt, Human
gguggcaguccccuuguggacug

SEQ ID NO: 1060897 - RNA, 19 nt, Human
gugguguuugaagaaugca

SEQ ID NO: 1060898 - RNA, 20 nt, Human
guuucaggucuccaaguggu

SEQ ID NO: 1060899 - RNA, 24 nt, Human
uauacagaucacauccaaugugac

SEQ ID NO: 1060900 - RNA, 22 nt, Human
ugaaacaaauaaaacacgacca

SEQ ID NO: 1060901 - RNA, 20 nt, Human
ugacugggucuucaaaacca

SEQ ID NO: 1060902 - RNA, 28 nt, Human
uucaaaaccauccugaacuacuggauuc

SEQ ID NO: 1060903 - RNA, 26 nt, Human
aacucccugcagcguugacaccgcac

SEQ ID NO: 1060904 - RNA, 22 nt, Human
aaggugccacaacucccugcag

SEQ ID NO: 1060905 - RNA, 26 nt, Human
acucugaguaauacguuaacaaaaaa

SEQ ID NO: 1060906 - RNA, 19 nt, Human
agaggcuugggugacucug

SEQ ID NO: 1060907 - RNA, 22 nt, Human
agccccuggcucccaggguucc

SEQ ID NO: 1060908 - RNA, 21 nt, Human
aggcggccaggugcucagagg

SEQ ID NO: 1060909 - RNA, 18 nt, Human
cacaacucccugcagcgu

SEQ ID NO: 1060910 - RNA, 21 nt, Human
caccaccagcccccucccgcc

SEQ ID NO: 1060911 - RNA, 22 nt, Human
caccuucacccucagccaagag

SEQ ID NO: 1060912 - RNA, 20 nt, Human
cagccccuggcucccagggu

SEQ ID NO: 1060913 - RNA, 22 nt, Human
caggccagccccugagcuggga

SEQ ID NO: 1060914 - RNA, 23 nt, Human
ccaccagcccccucccgccuccc

SEQ ID NO: 1060915 - RNA, 22 nt, Human
ccagccccugagcugggagccu

SEQ ID NO: 1060916 - RNA, 25 nt, Human
cccaggccagccccugagcugggag

SEQ ID NO: 1060917 - RNA, 21 nt, Human
cccgccucccgucccaccuuc

SEQ ID NO: 1060918 - RNA, 23 nt, Human
ccgcacgagcggcaccaccagcc

SEQ ID NO: 1060919 - RNA, 25 nt, Human
ccucccaccugagcccuucuccggc

SEQ ID NO: 1060920 - RNA, 24 nt, Human
ccugagcugggagccugcugaggc

SEQ ID NO: 1060921 - RNA, 18 nt, Human
ccugcugaggccccuccc

SEQ ID NO: 1060922 - RNA, 18 nt, Human
ccugcugaggccccuccc

SEQ ID NO: 1060923 - RNA, 19 nt, Human
ccugcugaggccccuccca

SEQ ID NO: 1060924 - RNA, 24 nt, Human
cgagcggcaccaccagcccccucc

SEQ ID NO: 1060925 - RNA, 23 nt, Human
cguugacaccgcacgagcggcac

SEQ ID NO: 1060926 - RNA, 19 nt, Human
cucccagaacaggcagaca

SEQ ID NO: 1060927 - RNA, 22 nt, Human
cucccaggguuccccccaggcc

SEQ ID NO: 1060928 - RNA, 24 nt, Human
gcggccaggugcucagagggcacc

SEQ ID NO: 1060929 - RNA, 25 nt, Human
ggcaccaccagcccccucccgccuc

SEQ ID NO: 1060930 - RNA, 25 nt, Human
uaaaaaaauagguuuaaugcaggug

SEQ ID NO: 1060931 - RNA, 18 nt, Human
ucagccaagaggcuuggg

SEQ ID NO: 1060932 - RNA, 24 nt, Human
ucagccccuggcucccaggguucc

SEQ ID NO: 1060933 - RNA, 18 nt, Human
uccccccaggccagcccc

SEQ ID NO: 1060934 - RNA, 19 nt, Human
ucccgucccaccuucaccc

SEQ ID NO: 1060935 - RNA, 21 nt, Human
ugagcccuucuccggcccccc

SEQ ID NO: 1060936 - RNA, 19 nt, Human
uggagucagccccuggcuc

SEQ ID NO: 1060937 - RNA, 24 nt, Human
uggagucagccccuggcucccagg

SEQ ID NO: 1060938 - RNA, 21 nt, Human
aaaaaaaaaaaaaaagacaua

SEQ ID NO: 1060939 - RNA, 21 nt, Human
aaaacaacaaaaaaaggaaga

SEQ ID NO: 1060940 - RNA, 21 nt, Human
acaaaacaacaaaaaaaggaa

SEQ ID NO: 1060941 - RNA, 23 nt, Human
acaaaacaacaaaaaaaggaaga

SEQ ID NO: 1060942 - RNA, 20 nt, Human
acagagcgggauccugucuc

SEQ ID NO: 1060943 - RNA, 25 nt, Human
acagagcgggauccugucucugaag

SEQ ID NO: 1060944 - RNA, 23 nt, Human
acaugugcaaugcauacaaaaca

SEQ ID NO: 1060945 - RNA, 18 nt, Human
acugcacuccggccuggg

SEQ ID NO: 1060946 - RNA, 24 nt, Human
acugcacuccggccugggagacag

SEQ ID NO: 1060947 - RNA, 21 nt, Human
aggaaaaaguauacuucaaga

SEQ ID NO: 1060948 - RNA, 24 nt, Human
aggaaaaaguauacuucaagacau

SEQ ID NO: 1060949 - RNA, 21 nt, Human
aggaggcuaaggcuaaggcag

SEQ ID NO: 1060950 - RNA, 23 nt, Human
aggcaggaagaucgcuugagucc

SEQ ID NO: 1060951 - RNA, 24 nt, Human
aggcaggaagaucgcuugagucca

SEQ ID NO: 1060952 - RNA, 24 nt, Human
aggcuaaggcaggaagaucgcuug

SEQ ID NO: 1060953 - RNA, 24 nt, Human
aucgugccacugcacuccggccug

SEQ ID NO: 1060954 - RNA, 24 nt, Human
cacuccggccugggagacagagcg

SEQ ID NO: 1060955 - RNA, 18 nt, Human
cacugcacuccggccugg

SEQ ID NO: 1060956 - RNA, 19 nt, Human
cacugcacuccggccuggg

SEQ ID NO: 1060957 - RNA, 22 nt, Human
cacugcacuccggccugggaga

SEQ ID NO: 1060958 - RNA, 24 nt, Human
cacugcacuccggccugggagaca

SEQ ID NO: 1060959 - RNA, 25 nt, Human
cacugcacuccggccugggagacag

SEQ ID NO: 1060960 - RNA, 18 nt, Human
caggaguuugagguuaca

SEQ ID NO: 1060961 - RNA, 26 nt, Human
cauacaaaacaacaaaaaaaggaaga

SEQ ID NO: 1060962 - RNA, 22 nt, Human
caugugcaaugcauacaaaaca

SEQ ID NO: 1060963 - RNA, 20 nt, Human
ccacugcacuccggccuggg

SEQ ID NO: 1060964 - RNA, 22 nt, Human
ccacugcacuccggccugggag

SEQ ID NO: 1060965 - RNA, 24 nt, Human
ccacugcacuccggccugggagac

SEQ ID NO: 1060966 - RNA, 20 nt, Human
ccggccugggagacagagcg

SEQ ID NO: 1060967 - RNA, 18 nt, Human
ccuacaguccuagcuacu

SEQ ID NO: 1060968 - RNA, 22 nt, Human
cuucaagacauuuccuccauuu

SEQ ID NO: 1060969 - RNA, 21 nt, Human
gacacuauuucuaaauuucgu

SEQ ID NO: 1060970 - RNA, 21 nt, Human
gacagagcgggauccugucuc

SEQ ID NO: 1060971 - RNA, 24 nt, Human
gaucgcuugaguccaggaguuuga

SEQ ID NO: 1060972 - RNA, 24 nt, Human
gcacuccggccugggagacagagc

SEQ ID NO: 1060973 - RNA, 18 nt, Human
gccugggagacagagcgg

SEQ ID NO: 1060974 - RNA, 22 nt, Human
gguacgcggagggcccgugcgg

SEQ ID NO: 1060975 - RNA, 24 nt, Human
ggugguacaugccuacaguccuag

SEQ ID NO: 1060976 - RNA, 22 nt, Human
uaaggcaggaagaucgcuugag

SEQ ID NO: 1060977 - RNA, 21 nt, Human
uacuucaagacauuuccucca

SEQ ID NO: 1060978 - RNA, 19 nt, Human
uaguugauuuugagucguu

SEQ ID NO: 1060979 - RNA, 24 nt, Human
uaugaucgugccacugcacuccgg

SEQ ID NO: 1060980 - RNA, 23 nt, Human
uccggccugggagacagagcggg

SEQ ID NO: 1060981 - RNA, 24 nt, Human
uccggccugggagacagagcggga

SEQ ID NO: 1060982 - RNA, 23 nt, Human
uccugucaucacugauaguugau

SEQ ID NO: 1060983 - RNA, 19 nt, Human
ucgcuugaguccaggaguu

SEQ ID NO: 1060984 - RNA, 20 nt, Human
ucgcuugaguccaggaguuu

SEQ ID NO: 1060985 - RNA, 24 nt, Human
ucgcuugaguccaggaguuugagg

SEQ ID NO: 1060986 - RNA, 23 nt, Human
ucgugccacugcacuccggccug

SEQ ID NO: 1060987 - RNA, 20 nt, Human
ucucugaagaaaaaaaaaaa

SEQ ID NO: 1060988 - RNA, 22 nt, Human
ucugaagaaaaaaaaaaaaaaa

SEQ ID NO: 1060989 - RNA, 24 nt, Human
ugccuacaguccuagcuacucagg

SEQ ID NO: 1060990 - RNA, 25 nt, Human
ugguacgcggagggcccgugcgguc

SEQ ID NO: 1060991 - RNA, 22 nt, Human
uuacagugagcuaugaucgugc

SEQ ID NO: 1060992 - RNA, 22 nt, Human
uuucuuagauugaaagugaaca

SEQ ID NO: 1060993 - RNA, 21 nt, Human
uuuuuccaggugguaucacuu

SEQ ID NO: 1060994 - RNA, 20 nt, Human
aagucaauuucagaucaaaa

SEQ ID NO: 1060995 - RNA, 26 nt, Human
aagucaauuucagaucaaaauuccuu

SEQ ID NO: 1060996 - RNA, 20 nt, Human
accaaagucaauuucagauc

SEQ ID NO: 1060997 - RNA, 23 nt, Human
agauauugggaauauugaaaacc

SEQ ID NO: 1060998 - RNA, 19 nt, Human
cuauggaaauuuuccuggg

SEQ ID NO: 1060999 - RNA, 23 nt, Human
gaagugggcuaauugacaauagc

SEQ ID NO: 1061000 - RNA, 19 nt, Human
uccugggucugaacuuucu

SEQ ID NO: 1061001 - RNA, 22 nt, Human
ucugagguuucugaagugggcu

SEQ ID NO: 1061002 - RNA, 21 nt, Human
ugccaagcauuuuagauaugg

SEQ ID NO: 1061003 - RNA, 23 nt, Human
uggagguggugggggagauauug

SEQ ID NO: 1061004 - RNA, 20 nt, Human
uugacaauagccaucauuuu

SEQ ID NO: 1061005 - RNA, 24 nt, Human
aaaguguugggauuacaggcguga

SEQ ID NO: 1061006 - RNA, 23 nt, Human
aacgcagccuuuccgccccggcu

SEQ ID NO: 1061007 - RNA, 22 nt, Human
aagaaagcaggauuaaagagaa

SEQ ID NO: 1061008 - RNA, 21 nt, Human
aagagaaggaagaccuggcua

SEQ ID NO: 1061009 - RNA, 23 nt, Human
aagggaggcgguggcggcggcgg

SEQ ID NO: 1061010 - RNA, 21 nt, Human
aaguguugggauuacaggcgu

SEQ ID NO: 1061011 - RNA, 26 nt, Human
aaguguugggauuacaggcgugagcc

SEQ ID NO: 1061012 - RNA, 19 nt, Human
aaugacccggaagaaacaa

SEQ ID NO: 1061013 - RNA, 21 nt, Human
agaaagcaggauuaaagagaa

SEQ ID NO: 1061014 - RNA, 21 nt, Human
agaauucccccauuggcccuu

SEQ ID NO: 1061015 - RNA, 25 nt, Human
agcaaagaaagcaggauuaaagaga

SEQ ID NO: 1061016 - RNA, 19 nt, Human
agccucuccuugagcucag

SEQ ID NO: 1061017 - RNA, 25 nt, Human
agcgccucccacccugccgggcggc

SEQ ID NO: 1061018 - RNA, 19 nt, Human
aggcaaaaggaugagggga

SEQ ID NO: 1061019 - RNA, 21 nt, Human
aggcccgagagcaaccgacgg

SEQ ID NO: 1061020 - RNA, 19 nt, Human
aggcgguggcggcggcggc

SEQ ID NO: 1061021 - RNA, 23 nt, Human
aggcgugagccacugugcccggc

SEQ ID NO: 1061022 - RNA, 19 nt, Human
aggggaaagaaaaccaacg

SEQ ID NO: 1061023 - RNA, 24 nt, Human
aggugauccacccuccuuggccuc

SEQ ID NO: 1061024 - RNA, 20 nt, Human
agucaguggccaacuccugg

SEQ ID NO: 1061025 - RNA, 20 nt, Human
aucgcucugcccucccugcu

SEQ ID NO: 1061026 - RNA, 22 nt, Human
caaacccggagaacaaguccca

SEQ ID NO: 1061027 - RNA, 24 nt, Human
caaaguguugggauuacaggcgug

SEQ ID NO: 1061028 - RNA, 21 nt, Human
caaugacccggaagaaacaaa

SEQ ID NO: 1061029 - RNA, 21 nt, Human
cagccucgaccccuccggcuc

SEQ ID NO: 1061030 - RNA, 23 nt, Human
cagccucgaccccuccggcuccg

SEQ ID NO: 1061031 - RNA, 22 nt, Human
cagccucuuucucaaacccgga

SEQ ID NO: 1061032 - RNA, 24 nt, Human
cauguuggccaggcuggucucgaa

SEQ ID NO: 1061033 - RNA, 20 nt, Human
ccaaaguguugggauuacag

SEQ ID NO: 1061034 - RNA, 22 nt, Human
ccaaaguguugggauuacaggc

SEQ ID NO: 1061035 - RNA, 22 nt, Human
ccaaaguguugggauuacaggc

SEQ ID NO: 1061036 - RNA, 24 nt, Human
ccaaaguguugggauuacaggcgu

SEQ ID NO: 1061037 - RNA, 18 nt, Human
ccaacgaacuacucccag

SEQ ID NO: 1061038 - RNA, 22 nt, Human
ccacgcggcgcagccucgaccc

SEQ ID NO: 1061039 - RNA, 19 nt, Human
ccauguuggccaggcuggu

SEQ ID NO: 1061040 - RNA, 22 nt, Human
ccauguuggccaggcuggucuc

SEQ ID NO: 1061041 - RNA, 23 nt, Human
ccauguuggccaggcuggucucg

SEQ ID NO: 1061042 - RNA, 22 nt, Human
ccccgcccgcuaguaggcugga

SEQ ID NO: 1061043 - RNA, 22 nt, Human
ccccuccggcuccgcgcagccu

SEQ ID NO: 1061044 - RNA, 23 nt, Human
ccccuccguuccccuccagucuu

SEQ ID NO: 1061045 - RNA, 18 nt, Human
cccgcuaccggaacgagc

SEQ ID NO: 1061046 - RNA, 23 nt, Human
cccucccugcuguuaagccaagc

SEQ ID NO: 1061047 - RNA, 20 nt, Human
cccuccguuccccuccaguc

SEQ ID NO: 1061048 - RNA, 21 nt, Human
cccuccguuccccuccagucu

SEQ ID NO: 1061049 - RNA, 19 nt, Human
ccuccugcugagcgagcuc

SEQ ID NO: 1061050 - RNA, 19 nt, Human
ccucgaccccuccggcucc

SEQ ID NO: 1061051 - RNA, 20 nt, Human
ccugaccucaggugauccac

SEQ ID NO: 1061052 - RNA, 23 nt, Human
ccugaccucaggugauccacccu

SEQ ID NO: 1061053 - RNA, 24 nt, Human
ccugaccucaggugauccacccuc

SEQ ID NO: 1061054 - RNA, 21 nt, Human
ccugcugagcgagcucagccu

SEQ ID NO: 1061055 - RNA, 25 nt, Human
cgaaaucaaagccaccccucgccgg

SEQ ID NO: 1061056 - RNA, 20 nt, Human
cgaaaugagaauucccccau

SEQ ID NO: 1061057 - RNA, 21 nt, Human
cgagagcaaccgacgggcagc

SEQ ID NO: 1061058 - RNA, 21 nt, Human
cgcagccucgaccccuccggc

SEQ ID NO: 1061059 - RNA, 24 nt, Human
cgccauguuggccaggcuggucuc

SEQ ID NO: 1061060 - RNA, 27 nt, Human
cgccauguuggccaggcuggucucgaa

SEQ ID NO: 1061061 - RNA, 22 nt, Human
cgccccggcucugggucagccc

SEQ ID NO: 1061062 - RNA, 22 nt, Human
cgcucugcccucccugcuguua

SEQ ID NO: 1061063 - RNA, 20 nt, Human
cggccgcgcgggacgugagg

SEQ ID NO: 1061064 - RNA, 21 nt, Human
cuaccggaacgagccucgcgc

SEQ ID NO: 1061065 - RNA, 25 nt, Human
cuggagccggggucagcuuuggcac

SEQ ID NO: 1061066 - RNA, 22 nt, Human
cugggucagcccacgugacucc

SEQ ID NO: 1061067 - RNA, 21 nt, Human
cuuuccgccccggcucugggu

SEQ ID NO: 1061068 - RNA, 24 nt, Human
gaagaaacaaacgcagccuuuccg

SEQ ID NO: 1061069 - RNA, 25 nt, Human
gacccggaagaaacaaacgcagccu

SEQ ID NO: 1061070 - RNA, 24 nt, Human
gaccucaggugauccacccuccuu

SEQ ID NO: 1061071 - RNA, 24 nt, Human
gaggcgguggcggcggcggcugcg

SEQ ID NO: 1061072 - RNA, 18 nt, Human
gauuacaggcgugagcca

SEQ ID NO: 1061073 - RNA, 21 nt, Human
gauuacaggcgugagccacug

SEQ ID NO: 1061074 - RNA, 24 nt, Human
gauuacaggcgugagccacugugc

SEQ ID NO: 1061075 - RNA, 22 nt, Human
gccucugauugguggaagugag

SEQ ID NO: 1061076 - RNA, 20 nt, Human
gcgcagccucgaccccuccg

SEQ ID NO: 1061077 - RNA, 18 nt, Human
gcucaguggggauugugc

SEQ ID NO: 1061078 - RNA, 19 nt, Human
gcucugcccucccugcugu

SEQ ID NO: 1061079 - RNA, 23 nt, Human
gcuggucucgaacuccugaccuc

SEQ ID NO: 1061080 - RNA, 18 nt, Human
gcuuuggcaccuuccucc

SEQ ID NO: 1061081 - RNA, 20 nt, Human
ggaagaaacaaacgcagccu

SEQ ID NO: 1061082 - RNA, 19 nt, Human
ggaggagcaaagaaagcag

SEQ ID NO: 1061083 - RNA, 20 nt, Human
ggaggucaaagagcaucgcu

SEQ ID NO: 1061084 - RNA, 22 nt, Human
ggcaaaaggaugaggggaaaga

SEQ ID NO: 1061085 - RNA, 18 nt, Human
ggcggccucugauuggug

SEQ ID NO: 1061086 - RNA, 18 nt, Human
ggcgguggcggcggcggc

SEQ ID NO: 1061087 - RNA, 21 nt, Human
ggcugggcuccgucucucccc

SEQ ID NO: 1061088 - RNA, 24 nt, Human
ggcuggucucgaacuccugaccuc

SEQ ID NO: 1061089 - RNA, 20 nt, Human
gggaggcgguggcggcggcg

SEQ ID NO: 1061090 - RNA, 21 nt, Human
ggguuccgccauguuggccag

SEQ ID NO: 1061091 - RNA, 22 nt, Human
ggguuccgccauguuggccagg

SEQ ID NO: 1061092 - RNA, 19 nt, Human
ggucucgaacuccugaccu

SEQ ID NO: 1061093 - RNA, 24 nt, Human
ggugauccacccuccuuggccucc

SEQ ID NO: 1061094 - RNA, 20 nt, Human
guccccuccguuccccucca

SEQ ID NO: 1061095 - RNA, 24 nt, Human
gugauccacccuccuuggccuccc

SEQ ID NO: 1061096 - RNA, 23 nt, Human
uacaggcgugagccacugugccc

SEQ ID NO: 1061097 - RNA, 23 nt, Human
uacaggcgugagccacugugccc

SEQ ID NO: 1061098 - RNA, 23 nt, Human
ucaaagccaccccucgccgggag

SEQ ID NO: 1061099 - RNA, 21 nt, Human
uccacccuccuuggccuccca

SEQ ID NO: 1061100 - RNA, 24 nt, Human
ucccaaaguguugggauuacaggc

SEQ ID NO: 1061101 - RNA, 23 nt, Human
ucccaggaauugacgcuucuguc

SEQ ID NO: 1061102 - RNA, 24 nt, Human
uccccuccagucuuccucccgcua

SEQ ID NO: 1061103 - RNA, 27 nt, Human
ucccugcuguuaagccaagccacucca

SEQ ID NO: 1061104 - RNA, 21 nt, Human
uccgcaauccccgccuccugc

SEQ ID NO: 1061105 - RNA, 21 nt, Human
uccuuggccucccaaaguguu

SEQ ID NO: 1061106 - RNA, 18 nt, Human
ucgcucugcccucccugc

SEQ ID NO: 1061107 - RNA, 23 nt, Human
ucucgaacuccugaccucaggug

SEQ ID NO: 1061108 - RNA, 24 nt, Human
ugacccggaagaaacaaacgcagc

SEQ ID NO: 1061109 - RNA, 20 nt, Human
ugaccucaggugauccaccc

SEQ ID NO: 1061110 - RNA, 21 nt, Human
ugaccucaggugauccacccu

SEQ ID NO: 1061111 - RNA, 22 nt, Human
ugaccucaggugauccacccuc

SEQ ID NO: 1061112 - RNA, 20 nt, Human
ugcagugccagaaagggagg

SEQ ID NO: 1061113 - RNA, 21 nt, Human
ugcagugccagaaagggaggc

SEQ ID NO: 1061114 - RNA, 24 nt, Human
uggccaggcuggucucgaacuccu

SEQ ID NO: 1061115 - RNA, 19 nt, Human
uggcggcggcggcugcgac

SEQ ID NO: 1061116 - RNA, 21 nt, Human
uggcuaggucuggguggcguc

SEQ ID NO: 1061117 - RNA, 18 nt, Human
ugggauuacaggcgugag

SEQ ID NO: 1061118 - RNA, 21 nt, Human
ugggauuacaggcgugagcca

SEQ ID NO: 1061119 - RNA, 22 nt, Human
ugggauuacaggcgugagccac

SEQ ID NO: 1061120 - RNA, 22 nt, Human
ugggauuacaggcgugagccac

SEQ ID NO: 1061121 - RNA, 22 nt, Human
ugggauuacaggcgugagccac

SEQ ID NO: 1061122 - RNA, 24 nt, Human
ugggauuacaggcgugagccacug

SEQ ID NO: 1061123 - RNA, 26 nt, Human
ugggauuacaggcgugagccacugug

SEQ ID NO: 1061124 - RNA, 21 nt, Human
ugguggaagugaggcaaggcu

SEQ ID NO: 1061125 - RNA, 21 nt, Human
uuccgccauguuggccaggcu

SEQ ID NO: 1061126 - RNA, 21 nt, Human
uugguucuucuuuuccgcaau

SEQ ID NO: 1061127 - RNA, 24 nt, Human
cugauguccaaauuggggauucau

SEQ ID NO: 1061128 - RNA, 20 nt, Human
gccgauauguugaauuacac

SEQ ID NO: 1061129 - RNA, 18 nt, Human
uagaaaaucaucaacugc

SEQ ID NO: 1061130 - RNA, 20 nt, Human
ucaucaacugcuacauccau

SEQ ID NO: 1061131 - RNA, 20 nt, Human
ucgguucccagucgccgaua

SEQ ID NO: 1061132 - RNA, 21 nt, Human
ugcuacauccauuuuucauua

SEQ ID NO: 1061133 - RNA, 25 nt, Human
ugggaaaagcuucucugucacggug

SEQ ID NO: 1061134 - RNA, 20 nt, Human
uucccagucgccgauauguu

SEQ ID NO: 1061135 - RNA, 20 nt, Human
uuguggaaacuggaauaauc

SEQ ID NO: 1061136 - RNA, 23 nt, Human
acagcgguggacgcugcuggggc

SEQ ID NO: 1061137 - RNA, 22 nt, Human
acccaggauggugcacggcagc

SEQ ID NO: 1061138 - RNA, 22 nt, Human
agccugcccagccacccuccug

SEQ ID NO: 1061139 - RNA, 22 nt, Human
agcucagagacguggguuucug

SEQ ID NO: 1061140 - RNA, 23 nt, Human
aggaggggcaggggugggcgggc

SEQ ID NO: 1061141 - RNA, 23 nt, Human
aggauggugcacggcagccuggc

SEQ ID NO: 1061142 - RNA, 22 nt, Human
cacccaggauggugcacggcag

SEQ ID NO: 1061143 - RNA, 20 nt, Human
cagcgguggacgcugcuggg

SEQ ID NO: 1061144 - RNA, 20 nt, Human
caggugcaggugaccuggug

SEQ ID NO: 1061145 - RNA, 20 nt, Human
caucaggacagcuuggcugc

SEQ ID NO: 1061146 - RNA, 25 nt, Human
caucaggacagcuuggcugcuggca

SEQ ID NO: 1061147 - RNA, 24 nt, Human
ccugcgcccggagcaccacgagga

SEQ ID NO: 1061148 - RNA, 24 nt, Human
ccuggugggcagggugcccaggag

SEQ ID NO: 1061149 - RNA, 23 nt, Human
cgccaucggcccuggugacaccc

SEQ ID NO: 1061150 - RNA, 21 nt, Human
cgcccggagcaccacgaggac

SEQ ID NO: 1061151 - RNA, 22 nt, Human
cggagccugagaggaagaggag

SEQ ID NO: 1061152 - RNA, 18 nt, Human
cgggcuccggguuccccu

SEQ ID NO: 1061153 - RNA, 20 nt, Human
cucagagacguggguuucug

SEQ ID NO: 1061154 - RNA, 18 nt, Human
cugccaccugcgcccgga

SEQ ID NO: 1061155 - RNA, 19 nt, Human
cuggccuagacagcagccu

SEQ ID NO: 1061156 - RNA, 18 nt, Human
cuggugacacccacgccc

SEQ ID NO: 1061157 - RNA, 22 nt, Human
gaggacacccaggauggugcac

SEQ ID NO: 1061158 - RNA, 21 nt, Human
gaggggcaggggugggcgggc

SEQ ID NO: 1061159 - RNA, 22 nt, Human
gcgggguccgggcuccggguuc

SEQ ID NO: 1061160 - RNA, 22 nt, Human
ggggcaggggugggcgggcgcu

SEQ ID NO: 1061161 - RNA, 20 nt, Human
ucacaguuuauucagagcag

SEQ ID NO: 1061162 - RNA, 21 nt, Human
ucaucaggacagcuuggcugc

SEQ ID NO: 1061163 - RNA, 26 nt, Human
ucaucaggacagcuuggcugcuggca

SEQ ID NO: 1061164 - RNA, 21 nt, Human
ugagaggaagaggagcuccac

SEQ ID NO: 1061165 - RNA, 21 nt, Human
ugccaccugcgcccggagcac

SEQ ID NO: 1061166 - RNA, 24 nt, Human
ugcugcacagccugggccgauucu

SEQ ID NO: 1061167 - RNA, 24 nt, Human
uggacgcugcuggggccgucucgg

SEQ ID NO: 1061168 - RNA, 22 nt, Human
uggcgggguccgggcuccgggu

SEQ ID NO: 1061169 - RNA, 23 nt, Human
ugucaucaggacagcuuggcugc

SEQ ID NO: 1061170 - RNA, 21 nt, Human
aagaugcagcggacccugagg

SEQ ID NO: 1061171 - RNA, 18 nt, Human
agagcaccaggugcgcca

SEQ ID NO: 1061172 - RNA, 23 nt, Human
caccuggccagcuccaggaaggg

SEQ ID NO: 1061173 - RNA, 24 nt, Human
ccagccaggccaggaagaugcagc

SEQ ID NO: 1061174 - RNA, 20 nt, Human
cccccuuggaggacucuccu

SEQ ID NO: 1061175 - RNA, 20 nt, Human
ccugcaggcgcuuggagaag

SEQ ID NO: 1061176 - RNA, 21 nt, Human
ccugcaggcgcuuggagaagg

SEQ ID NO: 1061177 - RNA, 24 nt, Human
cgccuuugcuccgagcuggggucu

SEQ ID NO: 1061178 - RNA, 24 nt, Human
cuccaggaaggguggccaggcccc

SEQ ID NO: 1061179 - RNA, 18 nt, Human
cugcaaagacgcccagcc

SEQ ID NO: 1061180 - RNA, 19 nt, Human
cuggggucucaugucugug

SEQ ID NO: 1061181 - RNA, 25 nt, Human
gagaaggggcagaagagcaccaggu

SEQ ID NO: 1061182 - RNA, 23 nt, Human
gaguagugcacguacaccagcca

SEQ ID NO: 1061183 - RNA, 22 nt, Human
gcagcggacccugaggccuggg

SEQ ID NO: 1061184 - RNA, 25 nt, Human
gccagcuccaggaaggggggaacgc

SEQ ID NO: 1061185 - RNA, 18 nt, Human
gcgcuuggagaaggggca

SEQ ID NO: 1061186 - RNA, 19 nt, Human
gcuggaauccagagcccug

SEQ ID NO: 1061187 - RNA, 23 nt, Human
ggacccuggcaccuggccagcuc

SEQ ID NO: 1061188 - RNA, 19 nt, Human
ggagccggcccugcaggcg

SEQ ID NO: 1061189 - RNA, 20 nt, Human
uccauguccgccuuugcucc

SEQ ID NO: 1061190 - RNA, 22 nt, Human
uccuggcagacggagcccgaga

SEQ ID NO: 1061191 - RNA, 18 nt, Human
ucuucagaguaacaaacc

SEQ ID NO: 1061192 - RNA, 22 nt, Human
uggcaccuggccagcuccagga

SEQ ID NO: 1061193 - RNA, 19 nt, Human
uggccaggccccucacugc

SEQ ID NO: 1061194 - RNA, 22 nt, Human
uguccgccuuugcuccgagcug

SEQ ID NO: 1061195 - RNA, 24 nt, Human
ugucuguggugcuggaauccagag

SEQ ID NO: 1061196 - RNA, 22 nt, Human
cagaagaggcuguaguuuggac

SEQ ID NO: 1061197 - RNA, 24 nt, Human
cccuuggacaaugcaagcuccaga

SEQ ID NO: 1061198 - RNA, 25 nt, Human
cuggggcugcuucuugucacccuug

SEQ ID NO: 1061199 - RNA, 25 nt, Human
gcaagcuccagaagagggggaacgc

SEQ ID NO: 1061200 - RNA, 19 nt, Human
agcucccagcauacuuuuc

SEQ ID NO: 1061201 - RNA, 19 nt, Human
cucauagcucccagcauac

SEQ ID NO: 1061202 - RNA, 18 nt, Human
uucucauagcucccagca

SEQ ID NO: 1061203 - RNA, 23 nt, Human
aaaaagccaggggagggagggua

SEQ ID NO: 1061204 - RNA, 26 nt, Human
aaacagagaacagaaggcagagacaa

SEQ ID NO: 1061205 - RNA, 18 nt, Human
aaaccgacucccaaacac

SEQ ID NO: 1061206 - RNA, 18 nt, Human
aaagccaggggagggagg

SEQ ID NO: 1061207 - RNA, 18 nt, Human
aaagggaaagggugaggg

SEQ ID NO: 1061208 - RNA, 24 nt, Human
aaagugcagggauuacaaguauga

SEQ ID NO: 1061209 - RNA, 22 nt, Human
aagcacacacacagacacacaa

SEQ ID NO: 1061210 - RNA, 18 nt, Human
aagccaggggagggaggg

SEQ ID NO: 1061211 - RNA, 21 nt, Human
aagccaggggagggaggguag

SEQ ID NO: 1061212 - RNA, 21 nt, Human
aagcgcagaugccagccaacc

SEQ ID NO: 1061213 - RNA, 23 nt, Human
aauuacagguacuaccaccaugc

SEQ ID NO: 1061214 - RNA, 20 nt, Human
acaaaugacaggaagaccag

SEQ ID NO: 1061215 - RNA, 20 nt, Human
acacaccccaccacagucac

SEQ ID NO: 1061216 - RNA, 21 nt, Human
acagagaacagaaggcagaga

SEQ ID NO: 1061217 - RNA, 18 nt, Human
acagaugugcugucaccc

SEQ ID NO: 1061218 - RNA, 19 nt, Human
acaggcuauauuggagacu

SEQ ID NO: 1061219 - RNA, 20 nt, Human
acagguacuaccaccaugcc

SEQ ID NO: 1061220 - RNA, 20 nt, Human
accacagucacuagcaaacc

SEQ ID NO: 1061221 - RNA, 20 nt, Human
acggagcccugagacauguu

SEQ ID NO: 1061222 - RNA, 18 nt, Human
agaaagagggagggaggg

SEQ ID NO: 1061223 - RNA, 25 nt, Human
agaaggacucucccaaccugcccga

SEQ ID NO: 1061224 - RNA, 22 nt, Human
agacacacacgggcgcacacgg

SEQ ID NO: 1061225 - RNA, 23 nt, Human
agacagacagcuugaaggagagc

SEQ ID NO: 1061226 - RNA, 18 nt, Human
agacaggaagaacacagg

SEQ ID NO: 1061227 - RNA, 19 nt, Human
agacaggaagaacacaggg

SEQ ID NO: 1061228 - RNA, 21 nt, Human
agacaggaagaacacagggcu

SEQ ID NO: 1061229 - RNA, 19 nt, Human
agacaggggccccuuuggc

SEQ ID NO: 1061230 - RNA, 20 nt, Human
agacccgagaccucgcgcaa

SEQ ID NO: 1061231 - RNA, 23 nt, Human
agagagcaagguggagagggaag

SEQ ID NO: 1061232 - RNA, 19 nt, Human
agagagcaaugagccgaga

SEQ ID NO: 1061233 - RNA, 23 nt, Human
agagauagaaacggaaggagaga

SEQ ID NO: 1061234 - RNA, 23 nt, Human
agagaugaggacaggaacagaga

SEQ ID NO: 1061235 - RNA, 24 nt, Human
agagaugggguuucaucauuuugg

SEQ ID NO: 1061236 - RNA, 23 nt, Human
agagcaaugagccgagacucagg

SEQ ID NO: 1061237 - RNA, 18 nt, Human
agagcccaguccagcuac

SEQ ID NO: 1061238 - RNA, 22 nt, Human
agagcucgaggcagauaguccc

SEQ ID NO: 1061239 - RNA, 21 nt, Human
agaggaaccagggagauugag

SEQ ID NO: 1061240 - RNA, 20 nt, Human
agagggaaguagggaaaggg

SEQ ID NO: 1061241 - RNA, 18 nt, Human
agagggagggagggagaa

SEQ ID NO: 1061242 - RNA, 19 nt, Human
agagggagggagggagaaa

SEQ ID NO: 1061243 - RNA, 23 nt, Human
agagggagggagggagaaaggga

SEQ ID NO: 1061244 - RNA, 18 nt, Human
agcaaaccgacucccaaa

SEQ ID NO: 1061245 - RNA, 23 nt, Human
agcaacagagccuuggagaggga

SEQ ID NO: 1061246 - RNA, 21 nt, Human
agcaagaaacagagaacagaa

SEQ ID NO: 1061247 - RNA, 18 nt, Human
agcacagaaagaauagau

SEQ ID NO: 1061248 - RNA, 18 nt, Human
agccaggggagggagggu

SEQ ID NO: 1061249 - RNA, 27 nt, Human
agcgauggagagagacacagagaggaa

SEQ ID NO: 1061250 - RNA, 22 nt, Human
agcucgugaccccggaggccuc

SEQ ID NO: 1061251 - RNA, 21 nt, Human
aggaacagagacagagugaga

SEQ ID NO: 1061252 - RNA, 27 nt, Human
aggaagaacacagggcucugcuggagg

SEQ ID NO: 1061253 - RNA, 21 nt, Human
aggaagaccagaacccacagc

SEQ ID NO: 1061254 - RNA, 20 nt, Human
aggcaagagggaaggcaggc

SEQ ID NO: 1061255 - RNA, 19 nt, Human
aggcagagaugaggacagg

SEQ ID NO: 1061256 - RNA, 20 nt, Human
aggcgugucuucccuuccag

SEQ ID NO: 1061257 - RNA, 22 nt, Human
aggcugggaucaggcaccccgg

SEQ ID NO: 1061258 - RNA, 19 nt, Human
agggaaguagggaaaggga

SEQ ID NO: 1061259 - RNA, 23 nt, Human
agggaaguagggaaagggaaagg

SEQ ID NO: 1061260 - RNA, 21 nt, Human
agggagaaagggaggaaaaag

SEQ ID NO: 1061261 - RNA, 21 nt, Human
agggagggagaaagggaggaa

SEQ ID NO: 1061262 - RNA, 18 nt, Human
agggagggagggagaaag

SEQ ID NO: 1061263 - RNA, 22 nt, Human
agggauuacaaguaugagccac

SEQ ID NO: 1061264 - RNA, 23 nt, Human
aggggagggaggguagaacagau

SEQ ID NO: 1061265 - RNA, 22 nt, Human
agggggcuuucgugagccagga

SEQ ID NO: 1061266 - RNA, 18 nt, Human
agggugccugggcugggc

SEQ ID NO: 1061267 - RNA, 20 nt, Human
aguacaguggugcggucucg

SEQ ID NO: 1061268 - RNA, 24 nt, Human
aguacaguggugcggucucggcuc

SEQ ID NO: 1061269 - RNA, 18 nt, Human
agucaccagcugcagugg

SEQ ID NO: 1061270 - RNA, 24 nt, Human
aucauuuuggccaggcuggucuug

SEQ ID NO: 1061271 - RNA, 23 nt, Human
auccagacacaccccaccacagu

SEQ ID NO: 1061272 - RNA, 18 nt, Human
augccuccagaaccaaca

SEQ ID NO: 1061273 - RNA, 23 nt, Human
auggacauccagacacaccccac

SEQ ID NO: 1061274 - RNA, 20 nt, Human
auggagcuaggcaaggaugg

SEQ ID NO: 1061275 - RNA, 20 nt, Human
augggguuucaucauuuugg

SEQ ID NO: 1061276 - RNA, 23 nt, Human
augggguuucaucauuuuggcca

SEQ ID NO: 1061277 - RNA, 24 nt, Human
augggguuucaucauuuuggccag

SEQ ID NO: 1061278 - RNA, 18 nt, Human
augugcugucacccagac

SEQ ID NO: 1061279 - RNA, 24 nt, Human
caaagugcagggauuacaaguaug

SEQ ID NO: 1061280 - RNA, 20 nt, Human
caagagcccaguccagcuac

SEQ ID NO: 1061281 - RNA, 22 nt, Human
caagccauucuucugccucagc

SEQ ID NO: 1061282 - RNA, 18 nt, Human
caagcgcagaugccagcc

SEQ ID NO: 1061283 - RNA, 18 nt, Human
cacacacacagacacaca

SEQ ID NO: 1061284 - RNA, 28 nt, Human
cacacagacacacacgggcgcacacgcg

SEQ ID NO: 1061285 - RNA, 22 nt, Human
cacccuccucccuccucuaucg

SEQ ID NO: 1061286 - RNA, 22 nt, Human
caccucccgagcucgugacccc

SEQ ID NO: 1061287 - RNA, 22 nt, Human
cacuccucagacaggaagaaca

SEQ ID NO: 1061288 - RNA, 24 nt, Human
cacucuuguugcccaggcuggagu

SEQ ID NO: 1061289 - RNA, 23 nt, Human
cacugcaaccucugccuccaggg

SEQ ID NO: 1061290 - RNA, 25 nt, Human
cagaaccaacaggacccagaacucc

SEQ ID NO: 1061291 - RNA, 19 nt, Human
cagaacuccgggaauaugu

SEQ ID NO: 1061292 - RNA, 19 nt, Human
cagagaacagaaggcagag

SEQ ID NO: 1061293 - RNA, 28 nt, Human
cagcaccauagagcgccuuacaacuaaa

SEQ ID NO: 1061294 - RNA, 18 nt, Human
cagcgcgacggccugcug

SEQ ID NO: 1061295 - RNA, 18 nt, Human
caggaaacaggaauccau

SEQ ID NO: 1061296 - RNA, 23 nt, Human
caggaagaccagaacccacagcg

SEQ ID NO: 1061297 - RNA, 24 nt, Human
caggcugcacaggcagaaggacuc

SEQ ID NO: 1061298 - RNA, 21 nt, Human
caggguucaagccauucuucu

SEQ ID NO: 1061299 - RNA, 24 nt, Human
caguaggucucaauagugggauua

SEQ ID NO: 1061300 - RNA, 24 nt, Human
cagugggacagcuuggggccccuc

SEQ ID NO: 1061301 - RNA, 24 nt, Human
caucauuuuggccaggcuggucuu

SEQ ID NO: 1061302 - RNA, 21 nt, Human
cauccagacacaccccaccac

SEQ ID NO: 1061303 - RNA, 18 nt, Human
cauuuuggccaggcuggu

SEQ ID NO: 1061304 - RNA, 20 nt, Human
cauuuuggccaggcuggucu

SEQ ID NO: 1061305 - RNA, 22 nt, Human
ccaaagugcagggauuacaagu

SEQ ID NO: 1061306 - RNA, 24 nt, Human
ccaaagugcagggauuacaaguau

SEQ ID NO: 1061307 - RNA, 21 nt, Human
ccaacccgugucccgccagcc

SEQ ID NO: 1061308 - RNA, 21 nt, Human
ccacccacgucccaccggagu

SEQ ID NO: 1061309 - RNA, 19 nt, Human
ccacgggccgcagcuuggg

SEQ ID NO: 1061310 - RNA, 20 nt, Human
ccacucgggaaaaccaacgg

SEQ ID NO: 1061311 - RNA, 23 nt, Human
ccagccaaccgggcaccucccaa

SEQ ID NO: 1061312 - RNA, 19 nt, Human
ccaggcaagagggaaggca

SEQ ID NO: 1061313 - RNA, 24 nt, Human
ccaggguaggguggagggugccug

SEQ ID NO: 1061314 - RNA, 19 nt, Human
ccaggguucaagccauucu

SEQ ID NO: 1061315 - RNA, 23 nt, Human
ccaggguucaagccauucuucug

SEQ ID NO: 1061316 - RNA, 20 nt, Human
ccaguccagcuacgccugcc

SEQ ID NO: 1061317 - RNA, 20 nt, Human
cccaagagcccaguccagcu

SEQ ID NO: 1061318 - RNA, 21 nt, Human
cccagaaacuuccaggaaugc

SEQ ID NO: 1061319 - RNA, 21 nt, Human
ccccaacaaaugacaggaaga

SEQ ID NO: 1061320 - RNA, 28 nt, Human
ccccaacaaaugacaggaagggaguuuc

SEQ ID NO: 1061321 - RNA, 21 nt, Human
ccccagaguuucagcaaaagg

SEQ ID NO: 1061322 - RNA, 24 nt, Human
cccccugcuccagcccagccaggc

SEQ ID NO: 1061323 - RNA, 21 nt, Human
ccccucacuguggcagaagcu

SEQ ID NO: 1061324 - RNA, 23 nt, Human
cccgagcucgugaccccggaggc

SEQ ID NO: 1061325 - RNA, 24 nt, Human
cccgaguagcugaaauuacaggua

SEQ ID NO: 1061326 - RNA, 19 nt, Human
cccucuggaucaccagccu

SEQ ID NO: 1061327 - RNA, 19 nt, Human
ccgaaacuggggcucuccc

SEQ ID NO: 1061328 - RNA, 19 nt, Human
ccgcuccaggagccggggc

SEQ ID NO: 1061329 - RNA, 18 nt, Human
ccggaagggagagaaaga

SEQ ID NO: 1061330 - RNA, 21 nt, Human
ccggcgccacugggggagcug

SEQ ID NO: 1061331 - RNA, 19 nt, Human
ccuacaccggggcgugggg

SEQ ID NO: 1061332 - RNA, 22 nt, Human
ccucagacucccugguggccuc

SEQ ID NO: 1061333 - RNA, 20 nt, Human
ccucaggugauccucagccu

SEQ ID NO: 1061334 - RNA, 23 nt, Human
ccuccagaaccaacaggacccag

SEQ ID NO: 1061335 - RNA, 19 nt, Human
ccucccaaagugcagggau

SEQ ID NO: 1061336 - RNA, 22 nt, Human
ccuccgaaccccaacaaaugac

SEQ ID NO: 1061337 - RNA, 18 nt, Human
ccucuggaucaccagccu

SEQ ID NO: 1061338 - RNA, 24 nt, Human
ccucuguaaaggugccuguugcuc

SEQ ID NO: 1061339 - RNA, 18 nt, Human
ccugaccucaggugaucc

SEQ ID NO: 1061340 - RNA, 18 nt, Human
ccugaccucaggugaucc

SEQ ID NO: 1061341 - RNA, 23 nt, Human
ccugaccucaggugauccucagc

SEQ ID NO: 1061342 - RNA, 19 nt, Human
ccugcaacagagcucgagg

SEQ ID NO: 1061343 - RNA, 19 nt, Human
cgccuggcuggcccaagag

SEQ ID NO: 1061344 - RNA, 19 nt, Human
cggaaggagagaaacagcg

SEQ ID NO: 1061345 - RNA, 22 nt, Human
cggaagggagagaaagagggag

SEQ ID NO: 1061346 - RNA, 24 nt, Human
cggaagggagagaaagagggaggg

SEQ ID NO: 1061347 - RNA, 21 nt, Human
cggagcccugagacauguuuu

SEQ ID NO: 1061348 - RNA, 22 nt, Human
cggaggccuccgcgucaagcgc

SEQ ID NO: 1061349 - RNA, 24 nt, Human
cucacugcaaccucugccuccagg

SEQ ID NO: 1061350 - RNA, 18 nt, Human
cucuuguugcccaggcug

SEQ ID NO: 1061351 - RNA, 24 nt, Human
cugaagccaaguguugacuucucu

SEQ ID NO: 1061352 - RNA, 24 nt, Human
cugcaaccucugccuccaggguuc

SEQ ID NO: 1061353 - RNA, 18 nt, Human
cugcccuuuccaggcaag

SEQ ID NO: 1061354 - RNA, 20 nt, Human
cugcccuuuccaggcaagag

SEQ ID NO: 1061355 - RNA, 23 nt, Human
cugccucagccucccgaguagcu

SEQ ID NO: 1061356 - RNA, 20 nt, Human
cugccuccaggguucaagcc

SEQ ID NO: 1061357 - RNA, 19 nt, Human
cugcuggaggagcagguug

SEQ ID NO: 1061358 - RNA, 22 nt, Human
gaacacagggcucugcuggagg

SEQ ID NO: 1061359 - RNA, 19 nt, Human
gaagaacacagggcucugc

SEQ ID NO: 1061360 - RNA, 25 nt, Human
gaaggagagaaacagcgauggagag

SEQ ID NO: 1061361 - RNA, 21 nt, Human
gaaucguuuuuuuuuuuuuuc

SEQ ID NO: 1061362 - RNA, 22 nt, Human
gacaaaaggagcaagaaacaga

SEQ ID NO: 1061363 - RNA, 20 nt, Human
gacacaccccaccacaguca

SEQ ID NO: 1061364 - RNA, 23 nt, Human
gaccucaggugauccucagccuc

SEQ ID NO: 1061365 - RNA, 18 nt, Human
gacuugcaagucuuccuu

SEQ ID NO: 1061366 - RNA, 18 nt, Human
gagagaaacagcgaugga

SEQ ID NO: 1061367 - RNA, 18 nt, Human
gagaugggguuucaucau

SEQ ID NO: 1061368 - RNA, 18 nt, Human
gagcaugcggggcuuugu

SEQ ID NO: 1061369 - RNA, 23 nt, Human
gagcucgugaccccggaggccuc

SEQ ID NO: 1061370 - RNA, 22 nt, Human
gaguagcugaaauuacagguac

SEQ ID NO: 1061371 - RNA, 22 nt, Human
gauggacggagagacaaaagga

SEQ ID NO: 1061372 - RNA, 18 nt, Human
gauuacaaguaugagcca

SEQ ID NO: 1061373 - RNA, 24 nt, Human
gauuacaaguaugagccacuaugc

SEQ ID NO: 1061374 - RNA, 22 nt, Human
gcaaccucugccuccaggguuc

SEQ ID NO: 1061375 - RNA, 24 nt, Human
gcacucaccuccagccuguuagau

SEQ ID NO: 1061376 - RNA, 18 nt, Human
gcaugggaacccgaagac

SEQ ID NO: 1061377 - RNA, 21 nt, Human
gccagccuccucgccagcacc

SEQ ID NO: 1061378 - RNA, 19 nt, Human
gcccaggcuggaguacagu

SEQ ID NO: 1061379 - RNA, 22 nt, Human
gccccaggucgccagggcggca

SEQ ID NO: 1061380 - RNA, 20 nt, Human
gcccucuggaucaccagccu

SEQ ID NO: 1061381 - RNA, 25 nt, Human
gccuggcuaauuuuuuuuguauuuu

SEQ ID NO: 1061382 - RNA, 20 nt, Human
gcgcaaaccagggugcugcc

SEQ ID NO: 1061383 - RNA, 22 nt, Human
gcgccacugggggagcugaagg

SEQ ID NO: 1061384 - RNA, 18 nt, Human
gcuggaacaggggggcag

SEQ ID NO: 1061385 - RNA, 23 nt, Human
gcuggucuugaacuccugaccuc

SEQ ID NO: 1061386 - RNA, 25 nt, Human
ggaacacaagcacacacacagacac

SEQ ID NO: 1061387 - RNA, 26 nt, Human
ggaaggagagaaacagcgauggagag

SEQ ID NO: 1061388 - RNA, 24 nt, Human
ggaagggagagaaagagggaggga

SEQ ID NO: 1061389 - RNA, 23 nt, Human
ggagaaagggaggaaaaagccag

SEQ ID NO: 1061390 - RNA, 18 nt, Human
ggagagaaagagggaggg

SEQ ID NO: 1061391 - RNA, 24 nt, Human
ggagagcaagggacagagggauga

SEQ ID NO: 1061392 - RNA, 21 nt, Human
ggagcagguuggggcggguuu

SEQ ID NO: 1061393 - RNA, 20 nt, Human
ggagggugccugggcugggc

SEQ ID NO: 1061394 - RNA, 21 nt, Human
ggauggagcuaggcaaggaug

SEQ ID NO: 1061395 - RNA, 18 nt, Human
ggcagggugggggcaggg

SEQ ID NO: 1061396 - RNA, 23 nt, Human
ggcgccacugggggagcugaagg

SEQ ID NO: 1061397 - RNA, 19 nt, Human
ggcuggaacaggggggcag

SEQ ID NO: 1061398 - RNA, 24 nt, Human
ggcuggucuugaacuccugaccuc

SEQ ID NO: 1061399 - RNA, 20 nt, Human
gggaacacaagcacacacac

SEQ ID NO: 1061400 - RNA, 25 nt, Human
gggaacacaagcacacacacagaca

SEQ ID NO: 1061401 - RNA, 24 nt, Human
gggagagcaacagagccuuggaga

SEQ ID NO: 1061402 - RNA, 21 nt, Human
gggauuacaaguaugagccac

SEQ ID NO: 1061403 - RNA, 23 nt, Human
gggauuacaaguaugagccacua

SEQ ID NO: 1061404 - RNA, 19 nt, Human
gggcagggugggggcaggg

SEQ ID NO: 1061405 - RNA, 20 nt, Human
gggcagggugggggcagggc

SEQ ID NO: 1061406 - RNA, 21 nt, Human
gggcuggagccccaggucgcc

SEQ ID NO: 1061407 - RNA, 20 nt, Human
ggggcagggugggggcaggg

SEQ ID NO: 1061408 - RNA, 22 nt, Human
gggguuucaucauuuuggccag

SEQ ID NO: 1061409 - RNA, 22 nt, Human
ggguuucaucauuuuggccagg

SEQ ID NO: 1061410 - RNA, 21 nt, Human
ggguuuggggcaggguggggg

SEQ ID NO: 1061411 - RNA, 19 nt, Human
ggucuugaacuccugaccu

SEQ ID NO: 1061412 - RNA, 21 nt, Human
ggugagggagcuugagaggga

SEQ ID NO: 1061413 - RNA, 18 nt, Human
gguggagggugccugggc

SEQ ID NO: 1061414 - RNA, 24 nt, Human
guucacuguccuggccccucccuc

SEQ ID NO: 1061415 - RNA, 19 nt, Human
uaaagacccgagaccucgc

SEQ ID NO: 1061416 - RNA, 23 nt, Human
uacaacuaaauaaagacccgaga

SEQ ID NO: 1061417 - RNA, 22 nt, Human
uacaaguaugagccacuaugcc

SEQ ID NO: 1061418 - RNA, 23 nt, Human
uacaaguaugagccacuaugccu

SEQ ID NO: 1061419 - RNA, 21 nt, Human
uacagguacuaccaccaugcc

SEQ ID NO: 1061420 - RNA, 22 nt, Human
uaccaccaugccuggcuaauuu

SEQ ID NO: 1061421 - RNA, 23 nt, Human
uagaacagauggaaggauggacg

SEQ ID NO: 1061422 - RNA, 20 nt, Human
uagagaugggguuucaucau

SEQ ID NO: 1061423 - RNA, 21 nt, Human
uagcaaaccgacucccaaaca

SEQ ID NO: 1061424 - RNA, 24 nt, Human
uagcaaaccgacucccaaacacac

SEQ ID NO: 1061425 - RNA, 18 nt, Human
uagcgucauuccuuuguu

SEQ ID NO: 1061426 - RNA, 19 nt, Human
uaggguggagggugccugg

SEQ ID NO: 1061427 - RNA, 20 nt, Human
uaucacggcaacugugacac

SEQ ID NO: 1061428 - RNA, 19 nt, Human
uauuagagaugggguuuca

SEQ ID NO: 1061429 - RNA, 22 nt, Human
uauuagagaugggguuucauca

SEQ ID NO: 1061430 - RNA, 25 nt, Human
ucaagccauucuucugccucagccu

SEQ ID NO: 1061431 - RNA, 22 nt, Human
ucaccucccgagcucgugaccc

SEQ ID NO: 1061432 - RNA, 23 nt, Human
ucacucuuguugcccaggcugga

SEQ ID NO: 1061433 - RNA, 23 nt, Human
ucacugcaaccucugccuccagg

SEQ ID NO: 1061434 - RNA, 24 nt, Human
ucacugcaaccucugccuccaggg

SEQ ID NO: 1061435 - RNA, 27 nt, Human
ucacugcaaccucugccuccaggguuc

SEQ ID NO: 1061436 - RNA, 18 nt, Human
ucagacaggaagaacaca

SEQ ID NO: 1061437 - RNA, 23 nt, Human
ucagcggcccucuggaucaccag

SEQ ID NO: 1061438 - RNA, 21 nt, Human
uccagaaccaacaggacccag

SEQ ID NO: 1061439 - RNA, 24 nt, Human
uccagaaccaacaggacccagaac

SEQ ID NO: 1061440 - RNA, 23 nt, Human
ucccaaagugcagggauuacaag

SEQ ID NO: 1061441 - RNA, 21 nt, Human
ucccauccucagacucccugg

SEQ ID NO: 1061442 - RNA, 21 nt, Human
uccccacguugagcccugcaa

SEQ ID NO: 1061443 - RNA, 23 nt, Human
ucccgaguagcugaaauuacagg

SEQ ID NO: 1061444 - RNA, 24 nt, Human
ucccgaguagcugaaauuacaggu

SEQ ID NO: 1061445 - RNA, 18 nt, Human
ucccuguccucuuggugc

SEQ ID NO: 1061446 - RNA, 22 nt, Human
uccucaaagagagucagcccau

SEQ ID NO: 1061447 - RNA, 22 nt, Human
uccucagccucccaaagugcag

SEQ ID NO: 1061448 - RNA, 23 nt, Human
uccucagccucccaaagugcagg

SEQ ID NO: 1061449 - RNA, 23 nt, Human
ucgaggcagauagucccauccac

SEQ ID NO: 1061450 - RNA, 20 nt, Human
ucgccagggcggcaugggaa

SEQ ID NO: 1061451 - RNA, 22 nt, Human
ucgcgcaaaccagggugcugcc

SEQ ID NO: 1061452 - RNA, 24 nt, Human
ucucucuagcuaugaaaauucuac

SEQ ID NO: 1061453 - RNA, 23 nt, Human
ucuugaacuccugaccucaggug

SEQ ID NO: 1061454 - RNA, 20 nt, Human
ucuuugcccucuguaaaggu

SEQ ID NO: 1061455 - RNA, 18 nt, Human
ucuuuuuuuuuuuuuuuu

SEQ ID NO: 1061456 - RNA, 23 nt, Human
ugaaauuacagguacuaccacca

SEQ ID NO: 1061457 - RNA, 20 nt, Human
ugaacacaccugcgugugug

SEQ ID NO: 1061458 - RNA, 18 nt, Human
ugaccucaggugauccuc

SEQ ID NO: 1061459 - RNA, 23 nt, Human
ugaccucaggugauccucagccu

SEQ ID NO: 1061460 - RNA, 21 nt, Human
ugagagagagagagagagagc

SEQ ID NO: 1061461 - RNA, 21 nt, Human
ugauucuggauuccacguuuc

SEQ ID NO: 1061462 - RNA, 23 nt, Human
ugcacaggcagaaggacucuccc

SEQ ID NO: 1061463 - RNA, 24 nt, Human
ugcagggauuacaaguaugagcca

SEQ ID NO: 1061464 - RNA, 20 nt, Human
ugcauaauucuuaagggccc

SEQ ID NO: 1061465 - RNA, 22 nt, Human
ugccaacccgugucccgccagc

SEQ ID NO: 1061466 - RNA, 21 nt, Human
ugcccaggcuggaguacagug

SEQ ID NO: 1061467 - RNA, 24 nt, Human
ugcccaggcuggaguacaguggug

SEQ ID NO: 1061468 - RNA, 18 nt, Human
ugcccaguacaggcugag

SEQ ID NO: 1061469 - RNA, 24 nt, Human
ugccucagccucccgaguagcuga

SEQ ID NO: 1061470 - RNA, 19 nt, Human
ugccugggcugggcuggaa

SEQ ID NO: 1061471 - RNA, 23 nt, Human
ugccugggcugggcuggaacagg

SEQ ID NO: 1061472 - RNA, 25 nt, Human
ugcuggaggagcagguuggggcggg

SEQ ID NO: 1061473 - RNA, 19 nt, Human
uggagcuaggcaaggaugg

SEQ ID NO: 1061474 - RNA, 18 nt, Human
uggagggugccugggcug

SEQ ID NO: 1061475 - RNA, 20 nt, Human
uggaguacaguggugcgguc

SEQ ID NO: 1061476 - RNA, 24 nt, Human
uggaguacaguggugcggucucgg

SEQ ID NO: 1061477 - RNA, 19 nt, Human
uggcagaagcaguggcgcu

SEQ ID NO: 1061478 - RNA, 24 nt, Human
uggccaggcuggucuugaacuccu

SEQ ID NO: 1061479 - RNA, 21 nt, Human
uggccggcggggcgcucagcg

SEQ ID NO: 1061480 - RNA, 22 nt, Human
ugggaucaggcaccccggagcc

SEQ ID NO: 1061481 - RNA, 24 nt, Human
ugggcugggcuggaacaggggggc

SEQ ID NO: 1061482 - RNA, 23 nt, Human
uggggccccagaaacuuccagga

SEQ ID NO: 1061483 - RNA, 18 nt, Human
uggggcucucccacaggg

SEQ ID NO: 1061484 - RNA, 23 nt, Human
ugggggcagggugggggcagggg

SEQ ID NO: 1061485 - RNA, 24 nt, Human
ugggguuucaucauuuuggccagg

SEQ ID NO: 1061486 - RNA, 29 nt, Human
uggguggaaggagggaccccggaagggag

SEQ ID NO: 1061487 - RNA, 24 nt, Human
ugguauggagaggcgugucuuccc

SEQ ID NO: 1061488 - RNA, 23 nt, Human
ugguggggcuggagccccagguc

SEQ ID NO: 1061489 - RNA, 19 nt, Human
uguacaggaaacaggaauc

SEQ ID NO: 1061490 - RNA, 22 nt, Human
ugugacacccaggcguuggcaa

SEQ ID NO: 1061491 - RNA, 20 nt, Human
uguggcagaagcaguggcgc

SEQ ID NO: 1061492 - RNA, 21 nt, Human
uuagagaugggguuucaucau

SEQ ID NO: 1061493 - RNA, 24 nt, Human
uuauuagagaugggguuucaucau

SEQ ID NO: 1061494 - RNA, 18 nt, Human
uucaagccauucuucugc

SEQ ID NO: 1061495 - RNA, 21 nt, Human
uucaagccauucuucugccuc

SEQ ID NO: 1061496 - RNA, 20 nt, Human
uucacagaugacauaucccc

SEQ ID NO: 1061497 - RNA, 22 nt, Human
uucacagaugacauauccccac

SEQ ID NO: 1061498 - RNA, 24 nt, Human
uucacucuuguugcccaggcugga

SEQ ID NO: 1061499 - RNA, 27 nt, Human
uucacuguccuggccccucccuccgaa

SEQ ID NO: 1061500 - RNA, 24 nt, Human
uuccaggaaugcguggaagaccag

SEQ ID NO: 1061501 - RNA, 20 nt, Human
uucuuugaggccacuguggu

SEQ ID NO: 1061502 - RNA, 24 nt, Human
uugcccaggcuggaguacaguggu

SEQ ID NO: 1061503 - RNA, 20 nt, Human
uuguuggcuccucccugucc

SEQ ID NO: 1061504 - RNA, 24 nt, Human
uuucacucuuguugcccaggcugg

SEQ ID NO: 1061505 - RNA, 24 nt, Human
uuucaucauuuuggccaggcuggu

SEQ ID NO: 1061506 - RNA, 18 nt, Human
uuugaaguucugaagcca

SEQ ID NO: 1061507 - RNA, 20 nt, Human
uuugcuggaaccacuccuca

SEQ ID NO: 1061508 - RNA, 19 nt, Human
uuuggccaggguagggugg

SEQ ID NO: 1061509 - RNA, 25 nt, Human
uuuucagaguggucaaugagcacug

SEQ ID NO: 1061510 - RNA, 24 nt, Human
uuuugcagugaaccucaggcuugg

SEQ ID NO: 1061511 - RNA, 22 nt, Human
uuuuggccaggcuggucuugaa

SEQ ID NO: 1061512 - RNA, 24 nt, Human
uuuuuauuagagaugggguuucau

SEQ ID NO: 1061513 - RNA, 24 nt, Human
uuuuuuguauuuuuauuagagaug

SEQ ID NO: 1061514 - RNA, 27 nt, Human
uuuuuuuuuucugagcaguaggucuca

SEQ ID NO: 1061515 - RNA, 24 nt, Human
uuuuuuuuuuuuuuuuugacguag

SEQ ID NO: 1061516 - RNA, 27 nt, Human
uuuuuuuuuuuuuuuuuuuuuuugggg

SEQ ID NO: 1061517 - RNA, 18 nt, Human
aaccccgcgcaaacaaac

SEQ ID NO: 1061518 - RNA, 26 nt, Human
aagcaugcagcccuagccauaccacu

SEQ ID NO: 1061519 - RNA, 20 nt, Human
aaggugcggguggcuggugg

SEQ ID NO: 1061520 - RNA, 23 nt, Human
acagcuuggguggcugcaguugc

SEQ ID NO: 1061521 - RNA, 21 nt, Human
accauuucuuuguguggaucc

SEQ ID NO: 1061522 - RNA, 18 nt, Human
acgggauccuugagguau

SEQ ID NO: 1061523 - RNA, 20 nt, Human
acuacuccaagcaugcacac

SEQ ID NO: 1061524 - RNA, 24 nt, Human
agcacacagcgagauugaaggcac

SEQ ID NO: 1061525 - RNA, 21 nt, Human
agcagccacagcuuggguggc

SEQ ID NO: 1061526 - RNA, 23 nt, Human
agccacuccugccaccaccacuu

SEQ ID NO: 1061527 - RNA, 23 nt, Human
aggcaaggugcggguggcuggug

SEQ ID NO: 1061528 - RNA, 18 nt, Human
aggugcggguggcuggug

SEQ ID NO: 1061529 - RNA, 21 nt, Human
auccauguuguuacuauuucu

SEQ ID NO: 1061530 - RNA, 18 nt, Human
augaagaggagcuuuacc

SEQ ID NO: 1061531 - RNA, 19 nt, Human
augauacuuuucauuucgu

SEQ ID NO: 1061532 - RNA, 18 nt, Human
augcagcccuagccauac

SEQ ID NO: 1061533 - RNA, 24 nt, Human
caaacaaacccaaugcuccugggg

SEQ ID NO: 1061534 - RNA, 18 nt, Human
caacuuucuggcuccaua

SEQ ID NO: 1061535 - RNA, 21 nt, Human
caagcaugcacacaugcagcu

SEQ ID NO: 1061536 - RNA, 23 nt, Human
caaggaguaccugcaggccagug

SEQ ID NO: 1061537 - RNA, 24 nt, Human
caaugcuccuggggccaccccaca

SEQ ID NO: 1061538 - RNA, 19 nt, Human
cacacaugcagcugggaug

SEQ ID NO: 1061539 - RNA, 20 nt, Human
caccaccacuugugccucca

SEQ ID NO: 1061540 - RNA, 21 nt, Human
cacccccuaggcuucagcccc

SEQ ID NO: 1061541 - RNA, 21 nt, Human
cacuuuguacugucuuuggua

SEQ ID NO: 1061542 - RNA, 23 nt, Human
cagacuccugagacgcagcacac

SEQ ID NO: 1061543 - RNA, 19 nt, Human
cagcacuacuccaagcaug

SEQ ID NO: 1061544 - RNA, 22 nt, Human
cagccaaccccgcgcaaacaaa

SEQ ID NO: 1061545 - RNA, 21 nt, Human
cagcucagaggagacccgcag

SEQ ID NO: 1061546 - RNA, 21 nt, Human
cagcugcacuugggagggcgg

SEQ ID NO: 1061547 - RNA, 18 nt, Human
caggucuccaguucuugu

SEQ ID NO: 1061548 - RNA, 20 nt, Human
caguagaucacaucauguaa

SEQ ID NO: 1061549 - RNA, 20 nt, Human
caguagaucacaucauguac

SEQ ID NO: 1061550 - RNA, 24 nt, Human
caguucuuguccugagaccaggaa

SEQ ID NO: 1061551 - RNA, 25 nt, Human
caugcacacaugcagcugggaugcg

SEQ ID NO: 1061552 - RNA, 22 nt, Human
ccaagcuguccucagccccacu

SEQ ID NO: 1061553 - RNA, 20 nt, Human
ccaauccauugaacuuuccc

SEQ ID NO: 1061554 - RNA, 22 nt, Human
ccacagcugcagcuuggguggc

SEQ ID NO: 1061555 - RNA, 19 nt, Human
ccacugcugcucccacagc

SEQ ID NO: 1061556 - RNA, 19 nt, Human
ccagguugugaacugugac

SEQ ID NO: 1061557 - RNA, 20 nt, Human
cccacaaguccuggcugcac

SEQ ID NO: 1061558 - RNA, 21 nt, Human
cccacaaguccuggcugcacu

SEQ ID NO: 1061559 - RNA, 21 nt, Human
cccacagccacuccugccacc

SEQ ID NO: 1061560 - RNA, 26 nt, Human
cccacagccacuccugccaccaccac

SEQ ID NO: 1061561 - RNA, 20 nt, Human
cccaugcuugucagccucca

SEQ ID NO: 1061562 - RNA, 24 nt, Human
ccccagcuugcagguggggcuuca

SEQ ID NO: 1061563 - RNA, 24 nt, Human
cccccaagaguacggagauuccug

SEQ ID NO: 1061564 - RNA, 19 nt, Human
cccccuaggcuucagcccc

SEQ ID NO: 1061565 - RNA, 18 nt, Human
ccccgcgcaaacaaaccc

SEQ ID NO: 1061566 - RNA, 21 nt, Human
ccuccuucccaugcuugucag

SEQ ID NO: 1061567 - RNA, 18 nt, Human
ccugcaggccagugccaa

SEQ ID NO: 1061568 - RNA, 21 nt, Human
ccugcaggccagugccaagcu

SEQ ID NO: 1061569 - RNA, 22 nt, Human
ccugcucccuuccacccaagag

SEQ ID NO: 1061570 - RNA, 19 nt, Human
ccuggguccacagcugcag

SEQ ID NO: 1061571 - RNA, 22 nt, Human
cgcaaacaaacccaaugcuccu

SEQ ID NO: 1061572 - RNA, 24 nt, Human
cggcugaccuucaggugacaguag

SEQ ID NO: 1061573 - RNA, 22 nt, Human
cucacagacuccugagacgcag

SEQ ID NO: 1061574 - RNA, 23 nt, Human
cuccugccaccaccacuugugcc

SEQ ID NO: 1061575 - RNA, 21 nt, Human
cucucugcaggcaggucaucc

SEQ ID NO: 1061576 - RNA, 20 nt, Human
cugcaguggguccugcccag

SEQ ID NO: 1061577 - RNA, 20 nt, Human
cugccucagggauguagggc

SEQ ID NO: 1061578 - RNA, 20 nt, Human
cuggguccacagcugcagcu

SEQ ID NO: 1061579 - RNA, 24 nt, Human
cuggguccacagcugcagcuuggg

SEQ ID NO: 1061580 - RNA, 21 nt, Human
cuuaacuuuucuuauagugca

SEQ ID NO: 1061581 - RNA, 21 nt, Human
cuuccugggcccccaagagua

SEQ ID NO: 1061582 - RNA, 20 nt, Human
cuuguccugagaccaggaag

SEQ ID NO: 1061583 - RNA, 25 nt, Human
cuuuaagcucuuauugucauccauu

SEQ ID NO: 1061584 - RNA, 22 nt, Human
cuuuaccgagagauaagacagc

SEQ ID NO: 1061585 - RNA, 23 nt, Human
cuuuguguggauccagauuucca

SEQ ID NO: 1061586 - RNA, 22 nt, Human
gaugcgaaagugcugagagaga

SEQ ID NO: 1061587 - RNA, 18 nt, Human
gcaaggugcggguggcug

SEQ ID NO: 1061588 - RNA, 23 nt, Human
gcagcuuggguggcugcagcugc

SEQ ID NO: 1061589 - RNA, 24 nt, Human
gcagcuuggguggcugcagcugca

SEQ ID NO: 1061590 - RNA, 26 nt, Human
gcaugcacacaugcagcugggaugcg

SEQ ID NO: 1061591 - RNA, 19 nt, Human
gccucagccaaccccgcgc

SEQ ID NO: 1061592 - RNA, 22 nt, Human
gcuccauaaagcaugcagcccu

SEQ ID NO: 1061593 - RNA, 18 nt, Human
gcuccugccuacucuugg

SEQ ID NO: 1061594 - RNA, 20 nt, Human
gcugcagcugcacuugggag

SEQ ID NO: 1061595 - RNA, 19 nt, Human
gcugcaguugcaccuggga

SEQ ID NO: 1061596 - RNA, 19 nt, Human
ggcagcaggcaaggugcgg

SEQ ID NO: 1061597 - RNA, 19 nt, Human
ggcagcuccucucugcagg

SEQ ID NO: 1061598 - RNA, 21 nt, Human
ggcugguggccucagccaacc

SEQ ID NO: 1061599 - RNA, 21 nt, Human
gggaagcucccacucuaccaa

SEQ ID NO: 1061600 - RNA, 18 nt, Human
ggggacccaccacuacca

SEQ ID NO: 1061601 - RNA, 22 nt, Human
ggguggcugcaguugcaccugg

SEQ ID NO: 1061602 - RNA, 19 nt, Human
ggugcagucagcugccuca

SEQ ID NO: 1061603 - RNA, 19 nt, Human
guagcagccacagcuuggg

SEQ ID NO: 1061604 - RNA, 22 nt, Human
gugcagucagcugccucaggga

SEQ ID NO: 1061605 - RNA, 21 nt, Human
guggauccagauuuccaucug

SEQ ID NO: 1061606 - RNA, 20 nt, Human
guggcugcaguugcaccugg

SEQ ID NO: 1061607 - RNA, 20 nt, Human
guucauggcacccacguuau

SEQ ID NO: 1061608 - RNA, 24 nt, Human
uaaaacgcacuuuguacugucuuu

SEQ ID NO: 1061609 - RNA, 23 nt, Human
uaaaccaauccauugaacuuucc

SEQ ID NO: 1061610 - RNA, 22 nt, Human
uaacaguaaggagaacacggac

SEQ ID NO: 1061611 - RNA, 21 nt, Human
uaauagcuguaaucuuuuggu

SEQ ID NO: 1061612 - RNA, 18 nt, Human
uagaccauuucuuugugu

SEQ ID NO: 1061613 - RNA, 20 nt, Human
uagccauaccacuggucugc

SEQ ID NO: 1061614 - RNA, 23 nt, Human
uagccauaccacuggucugcauu

SEQ ID NO: 1061615 - RNA, 20 nt, Human
uagggcacaggggacccacc

SEQ ID NO: 1061616 - RNA, 25 nt, Human
uaguaaacuuccccccuuuuagucu

SEQ ID NO: 1061617 - RNA, 21 nt, Human
ucacagacuccugagacgcag

SEQ ID NO: 1061618 - RNA, 28 nt, Human
ucagccaaccccgcgcaaacaaacccaa

SEQ ID NO: 1061619 - RNA, 18 nt, Human
ucagccccacuucagccu

SEQ ID NO: 1061620 - RNA, 18 nt, Human
ucagcugccucagggaug

SEQ ID NO: 1061621 - RNA, 27 nt, Human
uccacaguccaaagggggccggggucc

SEQ ID NO: 1061622 - RNA, 18 nt, Human
uccaguucuuguccugag

SEQ ID NO: 1061623 - RNA, 22 nt, Human
ucccacagccacuccugccacc

SEQ ID NO: 1061624 - RNA, 22 nt, Human
uccgccauucagcaggucucca

SEQ ID NO: 1061625 - RNA, 22 nt, Human
uccgggccugcaguggguccug

SEQ ID NO: 1061626 - RNA, 20 nt, Human
uccugggcccccaagaguac

SEQ ID NO: 1061627 - RNA, 18 nt, Human
ucuaccaacuuucuggcu

SEQ ID NO: 1061628 - RNA, 21 nt, Human
ucuccauagccaggguguccu

SEQ ID NO: 1061629 - RNA, 23 nt, Human
ucuuaaguuuuugcaggccugcu

SEQ ID NO: 1061630 - RNA, 18 nt, Human
ucuuugguaacuugacug

SEQ ID NO: 1061631 - RNA, 22 nt, Human
ucuuugguaacuugacugucuu

SEQ ID NO: 1061632 - RNA, 22 nt, Human
ugaccguuaguuaaaccaaucc

SEQ ID NO: 1061633 - RNA, 21 nt, Human
ugagaauaguaaacuuccccc

SEQ ID NO: 1061634 - RNA, 20 nt, Human
ugccaagcuguccucagccc

SEQ ID NO: 1061635 - RNA, 20 nt, Human
ugccaaggaguaccugcagg

SEQ ID NO: 1061636 - RNA, 18 nt, Human
ugcccugguagcagccac

SEQ ID NO: 1061637 - RNA, 18 nt, Human
ugccucagggauguaggg

SEQ ID NO: 1061638 - RNA, 22 nt, Human
ugccugaaggacaucccuuaac

SEQ ID NO: 1061639 - RNA, 18 nt, Human
uggaaaccugcucccuuc

SEQ ID NO: 1061640 - RNA, 22 nt, Human
uggcagcaggcaaggugcgggu

SEQ ID NO: 1061641 - RNA, 24 nt, Human
uggcugcagcugcacuugggaggg

SEQ ID NO: 1061642 - RNA, 18 nt, Human
uggcugcaguugcaccug

SEQ ID NO: 1061643 - RNA, 19 nt, Human
uggggccaccccacaaguc

SEQ ID NO: 1061644 - RNA, 23 nt, Human
uggggccaccccacaaguccugg

SEQ ID NO: 1061645 - RNA, 22 nt, Human
uguguggauccagauuuccauc

SEQ ID NO: 1061646 - RNA, 19 nt, Human
uuaauagcuguaaucuuuu

SEQ ID NO: 1061647 - RNA, 24 nt, Human
uucccaugcuugucagccuccaca

SEQ ID NO: 1061648 - RNA, 23 nt, Human
uuccccccuuuuagucuuuaagc

SEQ ID NO: 1061649 - RNA, 24 nt, Human
aaagugcugggauuauagguguga

SEQ ID NO: 1061650 - RNA, 22 nt, Human
aaguagcagggauuacaggcau

SEQ ID NO: 1061651 - RNA, 24 nt, Human
aaguagcagggauuacaggcaugc

SEQ ID NO: 1061652 - RNA, 27 nt, Human
aagugauucuccugccucagucuccca

SEQ ID NO: 1061653 - RNA, 18 nt, Human
aagugcugggauuauagg

SEQ ID NO: 1061654 - RNA, 26 nt, Human
aagugcugggauuauaggugugagcc

SEQ ID NO: 1061655 - RNA, 22 nt, Human
aaguuuagucuuccugaaguuc

SEQ ID NO: 1061656 - RNA, 18 nt, Human
acaggguuucaccauguu

SEQ ID NO: 1061657 - RNA, 21 nt, Human
acaggguuucaccauguuggc

SEQ ID NO: 1061658 - RNA, 24 nt, Human
acaggguuucaccauguuggccag

SEQ ID NO: 1061659 - RNA, 24 nt, Human
accauguuggccaggcuggucucg

SEQ ID NO: 1061660 - RNA, 18 nt, Human
acucugucacccagacug

SEQ ID NO: 1061661 - RNA, 25 nt, Human
acucugucacccagacuggagugca

SEQ ID NO: 1061662 - RNA, 22 nt, Human
acuuuuuguauuuuuaguagag

SEQ ID NO: 1061663 - RNA, 21 nt, Human
agcaaucccccagccucggcc

SEQ ID NO: 1061664 - RNA, 18 nt, Human
aggcagccauggccacua

SEQ ID NO: 1061665 - RNA, 20 nt, Human
aggcagccauggccacuagu

SEQ ID NO: 1061666 - RNA, 20 nt, Human
aggugugagccacugcaccc

SEQ ID NO: 1061667 - RNA, 21 nt, Human
agguucaagugauucuccugc

SEQ ID NO: 1061668 - RNA, 22 nt, Human
agguucaagugauucuccugcc

SEQ ID NO: 1061669 - RNA, 23 nt, Human
agguucaagugauucuccugccu

SEQ ID NO: 1061670 - RNA, 24 nt, Human
agugauucuccugccucagucucc

SEQ ID NO: 1061671 - RNA, 24 nt, Human
agugcagugccacaaucucagcuc

SEQ ID NO: 1061672 - RNA, 18 nt, Human
auucuccugccucagucu

SEQ ID NO: 1061673 - RNA, 24 nt, Human
caaagugcugggauuauaggugug

SEQ ID NO: 1061674 - RNA, 21 nt, Human
caagugauucuccugccucag

SEQ ID NO: 1061675 - RNA, 20 nt, Human
caaucucagcucacagcaac

SEQ ID NO: 1061676 - RNA, 21 nt, Human
caccauguuggccaggcuggu

SEQ ID NO: 1061677 - RNA, 24 nt, Human
caccauguuggccaggcuggucuc

SEQ ID NO: 1061678 - RNA, 27 nt, Human
caccauguuggccaggcuggucucgaa

SEQ ID NO: 1061679 - RNA, 21 nt, Human
caccccgcagcagccaauccu

SEQ ID NO: 1061680 - RNA, 23 nt, Human
cacucugucacccagacuggagu

SEQ ID NO: 1061681 - RNA, 24 nt, Human
cacucugucacccagacuggagug

SEQ ID NO: 1061682 - RNA, 24 nt, Human
cagcaaccuccgccucccagguuc

SEQ ID NO: 1061683 - RNA, 24 nt, Human
caggguuucaccauguuggccagg

SEQ ID NO: 1061684 - RNA, 24 nt, Human
cauguuggccaggcuggucucgaa

SEQ ID NO: 1061685 - RNA, 21 nt, Human
ccaaagugcugggauuauagg

SEQ ID NO: 1061686 - RNA, 24 nt, Human
ccaaagugcugggauuauaggugu

SEQ ID NO: 1061687 - RNA, 24 nt, Human
ccaaguagcagggauuacaggcau

SEQ ID NO: 1061688 - RNA, 21 nt, Human
ccacugcacccggccuccaag

SEQ ID NO: 1061689 - RNA, 21 nt, Human
ccacugcacccggccuccaag

SEQ ID NO: 1061690 - RNA, 22 nt, Human
ccacugcacccggccuccaagc

SEQ ID NO: 1061691 - RNA, 19 nt, Human
cccaaguagcagggauuac

SEQ ID NO: 1061692 - RNA, 24 nt, Human
cccaaguagcagggauuacaggca

SEQ ID NO: 1061693 - RNA, 23 nt, Human
cccagguucaagugauucuccuc

SEQ ID NO: 1061694 - RNA, 23 nt, Human
cccagguucaagugauucuccug

SEQ ID NO: 1061695 - RNA, 24 nt, Human
ccgccucccagguucaagugauuc

SEQ ID NO: 1061696 - RNA, 28 nt, Human
ccggccuccaagccagcaucuuuaaucu

SEQ ID NO: 1061697 - RNA, 24 nt, Human
ccucccagguucaagugauucucc

SEQ ID NO: 1061698 - RNA, 22 nt, Human
cgccucccagguucaagugauu

SEQ ID NO: 1061699 - RNA, 21 nt, Human
cgucacagugucccuucggga

SEQ ID NO: 1061700 - RNA, 24 nt, Human
cucacagcaaccuccgccucccag

SEQ ID NO: 1061701 - RNA, 19 nt, Human
cucccagguucaagugauu

SEQ ID NO: 1061702 - RNA, 21 nt, Human
cugggauuauaggugugagcc

SEQ ID NO: 1061703 - RNA, 25 nt, Human
cuucaguagcgcggcgucacagugu

SEQ ID NO: 1061704 - RNA, 24 nt, Human
cuuuuuguauuuuuaguagagaca

SEQ ID NO: 1061705 - RNA, 24 nt, Human
gaaccuacuccagaaauggacugg

SEQ ID NO: 1061706 - RNA, 23 nt, Human
gaacuccugacgucaagcaaucc

SEQ ID NO: 1061707 - RNA, 20 nt, Human
gaaguuccccuacgucccaa

SEQ ID NO: 1061708 - RNA, 22 nt, Human
gaaguuccccuacgucccaagu

SEQ ID NO: 1061709 - RNA, 24 nt, Human
gauuacaggcaugcaccaccaugc

SEQ ID NO: 1061710 - RNA, 18 nt, Human
gauuauaggugugagcca

SEQ ID NO: 1061711 - RNA, 22 nt, Human
gauuauaggugugagccacugc

SEQ ID NO: 1061712 - RNA, 23 nt, Human
gauuauaggugugagccacugca

SEQ ID NO: 1061713 - RNA, 22 nt, Human
gcaaccuccgccucccagguuc

SEQ ID NO: 1061714 - RNA, 23 nt, Human
gccucagucucccaaguagcagg

SEQ ID NO: 1061715 - RNA, 24 nt, Human
ggauuacaggcaugcaccaccaug

SEQ ID NO: 1061716 - RNA, 23 nt, Human
gggauuacaggcaugcaccacca

SEQ ID NO: 1061717 - RNA, 21 nt, Human
gggcggaagcggcgaggcggu

SEQ ID NO: 1061718 - RNA, 22 nt, Human
ggguuucaccauguuggccagg

SEQ ID NO: 1061719 - RNA, 20 nt, Human
gucacagugucccuucggga

SEQ ID NO: 1061720 - RNA, 19 nt, Human
guggccgccaugcuucuga

SEQ ID NO: 1061721 - RNA, 20 nt, Human
uaaaaaguagauaccaaggc

SEQ ID NO: 1061722 - RNA, 22 nt, Human
uacaggcaugcaccaccaugcc

SEQ ID NO: 1061723 - RNA, 22 nt, Human
uagagacaggguuucaccaugu

SEQ ID NO: 1061724 - RNA, 25 nt, Human
uaggacacagagagaagaaccuacu

SEQ ID NO: 1061725 - RNA, 19 nt, Human
uaggccucaaccucuccag

SEQ ID NO: 1061726 - RNA, 24 nt, Human
uaguagagacaggguuucaccaug

SEQ ID NO: 1061727 - RNA, 25 nt, Human
uaguagagacaggguuucaccaugu

SEQ ID NO: 1061728 - RNA, 19 nt, Human
uauaggugugagccacugc

SEQ ID NO: 1061729 - RNA, 19 nt, Human
ucaagugauucuccugccu

SEQ ID NO: 1061730 - RNA, 24 nt, Human
ucacagcaaccuccgccucccagg

SEQ ID NO: 1061731 - RNA, 25 nt, Human
ucacagcaaccuccgccucccaggu

SEQ ID NO: 1061732 - RNA, 24 nt, Human
ucacagucacccccacuuuaaucc

SEQ ID NO: 1061733 - RNA, 23 nt, Human
ucccaaagugcugggauuauagg

SEQ ID NO: 1061734 - RNA, 24 nt, Human
ucccaaguagcagggauuacaggc

SEQ ID NO: 1061735 - RNA, 21 nt, Human
ucccagguucaagugauucuc

SEQ ID NO: 1061736 - RNA, 24 nt, Human
ucccagguucaagugauucuccug

SEQ ID NO: 1061737 - RNA, 19 nt, Human
ucccccagccucggccucc

SEQ ID NO: 1061738 - RNA, 20 nt, Human
ucccccagccucggccuccc

SEQ ID NO: 1061739 - RNA, 24 nt, Human
uccgcaggcagccuggaacagucu

SEQ ID NO: 1061740 - RNA, 27 nt, Human
uccgcaggcagccuggaacagucuaga

SEQ ID NO: 1061741 - RNA, 19 nt, Human
uccgggaacccaggcgccu

SEQ ID NO: 1061742 - RNA, 18 nt, Human
ucggccucccaaagugcu

SEQ ID NO: 1061743 - RNA, 25 nt, Human
ucguguugccaacuguuuggcgucc

SEQ ID NO: 1061744 - RNA, 24 nt, Human
ucucacucugucacccagacugga

SEQ ID NO: 1061745 - RNA, 26 nt, Human
ucucacucugucacccagacuggagu

SEQ ID NO: 1061746 - RNA, 27 nt, Human
ucucacucugucacccagacuggagug

SEQ ID NO: 1061747 - RNA, 19 nt, Human
ucucccaaguagcagggau

SEQ ID NO: 1061748 - RNA, 20 nt, Human
ucucccaaguagcagggauu

SEQ ID NO: 1061749 - RNA, 21 nt, Human
ucucgaacuccugacgucaag

SEQ ID NO: 1061750 - RNA, 24 nt, Human
ucugucacccagacuggagugcag

SEQ ID NO: 1061751 - RNA, 20 nt, Human
ugacgucaagcaauccccca

SEQ ID NO: 1061752 - RNA, 21 nt, Human
ugccacaaucucagcucacag

SEQ ID NO: 1061753 - RNA, 20 nt, Human
ugccucagucucccaaguag

SEQ ID NO: 1061754 - RNA, 19 nt, Human
uggagugcagugccacaau

SEQ ID NO: 1061755 - RNA, 23 nt, Human
uggagugcagugccacaaucuca

SEQ ID NO: 1061756 - RNA, 28 nt, Human
uggcaaguccuuuccccgcuguaggccu

SEQ ID NO: 1061757 - RNA, 20 nt, Human
uggcaguggcuggguuggug

SEQ ID NO: 1061758 - RNA, 24 nt, Human
uggccaggcuggucucgaacuccu

SEQ ID NO: 1061759 - RNA, 18 nt, Human
ugggauuauaggugugag

SEQ ID NO: 1061760 - RNA, 19 nt, Human
ugggauuauaggugugagc

SEQ ID NO: 1061761 - RNA, 21 nt, Human
ugggauuauaggugugagcca

SEQ ID NO: 1061762 - RNA, 22 nt, Human
ugggauuauaggugugagccac

SEQ ID NO: 1061763 - RNA, 22 nt, Human
ugggauuauaggugugagccac

SEQ ID NO: 1061764 - RNA, 24 nt, Human
ugggauuauaggugugagccacug

SEQ ID NO: 1061765 - RNA, 18 nt, Human
uuaaucuuacagaugcgu

SEQ ID NO: 1061766 - RNA, 24 nt, Human
uuaguagagacaggguuucaccau

SEQ ID NO: 1061767 - RNA, 21 nt, Human
uucaagugauucuccugccuc

SEQ ID NO: 1061768 - RNA, 23 nt, Human
uucaagugauucuccugccucag

SEQ ID NO: 1061769 - RNA, 24 nt, Human
uucaagugauucuccugccucagu

SEQ ID NO: 1061770 - RNA, 24 nt, Human
uuucaccauguuggccaggcuggu

SEQ ID NO: 1061771 - RNA, 24 nt, Human
uuuuuaguagagacaggguuucac

SEQ ID NO: 1061772 - RNA, 21 nt, Human
uuuuuguauuuuuaguagaga

SEQ ID NO: 1061773 - RNA, 23 nt, Human
aagaauacaggcuccggaaucca

SEQ ID NO: 1061774 - RNA, 24 nt, Human
aaggagugaucaggggcaugcagg

SEQ ID NO: 1061775 - RNA, 19 nt, Human
agaaugccucccagagcuc

SEQ ID NO: 1061776 - RNA, 20 nt, Human
aggagcagggggccgggagg

SEQ ID NO: 1061777 - RNA, 22 nt, Human
agggcugcagccuucagccucc

SEQ ID NO: 1061778 - RNA, 20 nt, Human
aggggcaugcaggcuccugg

SEQ ID NO: 1061779 - RNA, 18 nt, Human
augaggaccaagcugcag

SEQ ID NO: 1061780 - RNA, 20 nt, Human
caccugagaucaguaguaga

SEQ ID NO: 1061781 - RNA, 21 nt, Human
cagaaugccucccagagcucc

SEQ ID NO: 1061782 - RNA, 18 nt, Human
cagaggagggcagagcuc

SEQ ID NO: 1061783 - RNA, 27 nt, Human
cagcccccaggaccccugcuucucccu

SEQ ID NO: 1061784 - RNA, 24 nt, Human
caggccccggagcaguucuggagg

SEQ ID NO: 1061785 - RNA, 21 nt, Human
caggcuggaguuuccuggagg

SEQ ID NO: 1061786 - RNA, 22 nt, Human
cauuuuacagauuagaccagcg

SEQ ID NO: 1061787 - RNA, 23 nt, Human
ccaaucccagcgccaggccacgc

SEQ ID NO: 1061788 - RNA, 22 nt, Human
ccagcgaggcacagagagguuu

SEQ ID NO: 1061789 - RNA, 24 nt, Human
ccagcgccaggccacgccuccuuc

SEQ ID NO: 1061790 - RNA, 24 nt, Human
ccaucuggaugacaagagggcugc

SEQ ID NO: 1061791 - RNA, 20 nt, Human
cccaccugcaucccuagagu

SEQ ID NO: 1061792 - RNA, 22 nt, Human
cccagcgccaggccacgccucc

SEQ ID NO: 1061793 - RNA, 23 nt, Human
cccaucguccagauccggagagu

SEQ ID NO: 1061794 - RNA, 24 nt, Human
ccccaggaccccugcuucucccac

SEQ ID NO: 1061795 - RNA, 25 nt, Human
ccccaggaccccugcuucucccacc

SEQ ID NO: 1061796 - RNA, 23 nt, Human
cccccaggaccccugcuucuccc

SEQ ID NO: 1061797 - RNA, 22 nt, Human
ccccugagccuccauuucaugg

SEQ ID NO: 1061798 - RNA, 25 nt, Human
ccccugcuucucccaccugcauccc

SEQ ID NO: 1061799 - RNA, 22 nt, Human
ccuucacccccugagccuccau

SEQ ID NO: 1061800 - RNA, 22 nt, Human
ccuucagccuccccccuugccc

SEQ ID NO: 1061801 - RNA, 19 nt, Human
cggaauccaaaagccaugg

SEQ ID NO: 1061802 - RNA, 25 nt, Human
cggaucccgacccgaucccaccccu

SEQ ID NO: 1061803 - RNA, 20 nt, Human
cggcaccuggacccuuccuu

SEQ ID NO: 1061804 - RNA, 25 nt, Human
cucaagauccgcggcaccuggaccc

SEQ ID NO: 1061805 - RNA, 23 nt, Human
cugggccucaguuuccccaucug

SEQ ID NO: 1061806 - RNA, 20 nt, Human
gaccccugcuucucccaccu

SEQ ID NO: 1061807 - RNA, 19 nt, Human
gagcucaccugagaucagu

SEQ ID NO: 1061808 - RNA, 20 nt, Human
gcccagaucaugaggaccaa

SEQ ID NO: 1061809 - RNA, 21 nt, Human
gcgaccaucaggaggaagcgc

SEQ ID NO: 1061810 - RNA, 23 nt, Human
ggcagcccccaggaccccugcuu

SEQ ID NO: 1061811 - RNA, 18 nt, Human
ggcccgggggaaccggcg

SEQ ID NO: 1061812 - RNA, 21 nt, Human
gggaaccggcguuccuggcgu

SEQ ID NO: 1061813 - RNA, 19 nt, Human
gggggccgggaggccuggg

SEQ ID NO: 1061814 - RNA, 18 nt, Human
uaaugaguuaaugagguc

SEQ ID NO: 1061815 - RNA, 23 nt, Human
uacagauuagaccagcgaggcac

SEQ ID NO: 1061816 - RNA, 22 nt, Human
uagcaccuugcuccagucacac

SEQ ID NO: 1061817 - RNA, 28 nt, Human
uaggggaugcugcccucuggcgaccauu

SEQ ID NO: 1061818 - RNA, 19 nt, Human
ucagaggccaggcuggagu

SEQ ID NO: 1061819 - RNA, 22 nt, Human
ucaggggcaugcaggcuccugg

SEQ ID NO: 1061820 - RNA, 18 nt, Human
ucccagagcuccaggcag

SEQ ID NO: 1061821 - RNA, 20 nt, Human
ucccagcgccaggccacgcc

SEQ ID NO: 1061822 - RNA, 20 nt, Human
ucccgacccgaucccacccc

SEQ ID NO: 1061823 - RNA, 18 nt, Human
uccggagaguggggccgg

SEQ ID NO: 1061824 - RNA, 19 nt, Human
ucguccagauccggagagu

SEQ ID NO: 1061825 - RNA, 21 nt, Human
ugaacuggggucagaggccag

SEQ ID NO: 1061826 - RNA, 20 nt, Human
ugagaaaagugacuuucaga

SEQ ID NO: 1061827 - RNA, 21 nt, Human
ugagaaaagugacuuucagag

SEQ ID NO: 1061828 - RNA, 22 nt, Human
ugagaaaagugacuuucagagg

SEQ ID NO: 1061829 - RNA, 24 nt, Human
ugaggaccaagcugcaggagcugg

SEQ ID NO: 1061830 - RNA, 21 nt, Human
ugcuucucccaccugcauccc

SEQ ID NO: 1061831 - RNA, 20 nt, Human
uggaugacaagagggcugca

SEQ ID NO: 1061832 - RNA, 24 nt, Human
ugguuaagaauacaggcuccggaa

SEQ ID NO: 1061833 - RNA, 20 nt, Human
uuucagaggagggcagagcu

SEQ ID NO: 1061834 - RNA, 20 nt, Human
uuuccuggaggaaggagaag

SEQ ID NO: 1061835 - RNA, 20 nt, Human
aaaagaaaacauugagaaga

SEQ ID NO: 1061836 - RNA, 23 nt, Human
aaaagaaaacauugagaagagac

SEQ ID NO: 1061837 - RNA, 22 nt, Human
aaaugcagauaaucccaguuca

SEQ ID NO: 1061838 - RNA, 21 nt, Human
accaaaugcagauaaucccag

SEQ ID NO: 1061839 - RNA, 21 nt, Human
accuggagguuggaugcagcu

SEQ ID NO: 1061840 - RNA, 19 nt, Human
caaaagaaaacauugagaa

SEQ ID NO: 1061841 - RNA, 18 nt, Human
cagcaagacugucagagg

SEQ ID NO: 1061842 - RNA, 18 nt, Human
cagcaucuucagcuccug

SEQ ID NO: 1061843 - RNA, 21 nt, Human
ccuucccaauuuugaguuccu

SEQ ID NO: 1061844 - RNA, 27 nt, Human
gaaaacauugagaagagaccgguaccc

SEQ ID NO: 1061845 - RNA, 21 nt, Human
gaaaucaaaagaaaacauuga

SEQ ID NO: 1061846 - RNA, 23 nt, Human
gaagagcagcaagacugucagag

SEQ ID NO: 1061847 - RNA, 18 nt, Human
gacaggauugcuugguuc

SEQ ID NO: 1061848 - RNA, 24 nt, Human
gacugucagaggaaaucaaaagaa

SEQ ID NO: 1061849 - RNA, 19 nt, Human
gcagcagugggcauucugu

SEQ ID NO: 1061850 - RNA, 24 nt, Human
gcuuguguuccuguacagcaucuu

SEQ ID NO: 1061851 - RNA, 22 nt, Human
guuccuguacagcaucuucagc

SEQ ID NO: 1061852 - RNA, 20 nt, Human
ucagaggaaaucaaaagaaa

SEQ ID NO: 1061853 - RNA, 24 nt, Human
ucccaguucaggguguucacuuuu

SEQ ID NO: 1061854 - RNA, 18 nt, Human
ugggaaggagcagcagug

SEQ ID NO: 1061855 - RNA, 21 nt, Human
ugggaaggagcagcagugggc

SEQ ID NO: 1061856 - RNA, 25 nt, Human
ugguucucugccaaauuugaccugg

SEQ ID NO: 1061857 - RNA, 20 nt, Human
uuuugaguuccugugccucu

SEQ ID NO: 1061858 - RNA, 18 nt, Human
aagagaaaggcaggggcg

SEQ ID NO: 1061859 - RNA, 22 nt, Human
acagggccugauggaggaagag

SEQ ID NO: 1061860 - RNA, 19 nt, Human
aggcaggggcgggcacagg

SEQ ID NO: 1061861 - RNA, 19 nt, Human
aggcaggggcgggcacagg

SEQ ID NO: 1061862 - RNA, 21 nt, Human
aggcaggggcgggcacagggu

SEQ ID NO: 1061863 - RNA, 18 nt, Human
aggggcgggcacagggug

SEQ ID NO: 1061864 - RNA, 22 nt, Human
agguugccagcauacagggccu

SEQ ID NO: 1061865 - RNA, 19 nt, Human
aucucucuggaaagcaggu

SEQ ID NO: 1061866 - RNA, 20 nt, Human
cagaagacgucucuggucug

SEQ ID NO: 1061867 - RNA, 21 nt, Human
cagaagacgucucuggucugu

SEQ ID NO: 1061868 - RNA, 21 nt, Human
caggguggaauugacaaccgu

SEQ ID NO: 1061869 - RNA, 18 nt, Human
cccacaugugagacuaca

SEQ ID NO: 1061870 - RNA, 23 nt, Human
cccacaugugagacuacauggac

SEQ ID NO: 1061871 - RNA, 21 nt, Human
cuguaggccgaccccacaugu

SEQ ID NO: 1061872 - RNA, 18 nt, Human
guggauggccgcccgggc

SEQ ID NO: 1061873 - RNA, 22 nt, Human
ucucuggaaagcagguggcugc

SEQ ID NO: 1061874 - RNA, 27 nt, Human
ucucuggaaagcagguggcugcagaag

SEQ ID NO: 1061875 - RNA, 18 nt, Human
uggaggaagagaaaggca

SEQ ID NO: 1061876 - RNA, 24 nt, Human
uggcugcagaagacgucucugguc

SEQ ID NO: 1061877 - RNA, 23 nt, Human
acaggaaggagcacugggcugga

SEQ ID NO: 1061878 - RNA, 19 nt, Human
aggaaggagcacugggcug

SEQ ID NO: 1061879 - RNA, 23 nt, Human
aucccgaggccaaaagccgaagc

SEQ ID NO: 1061880 - RNA, 24 nt, Human
cccaacaagccugauucuauuucu

SEQ ID NO: 1061881 - RNA, 18 nt, Human
cgaggccaaaagccgaag

SEQ ID NO: 1061882 - RNA, 19 nt, Human
ggaucuugcuuuccagaua

SEQ ID NO: 1061883 - RNA, 18 nt, Human
uccccaacaagccugauu

SEQ ID NO: 1061884 - RNA, 19 nt, Human
uggacaucccgaggccaaa

SEQ ID NO: 1061885 - RNA, 18 nt, Human
ugggcuggacaucccgag

SEQ ID NO: 1061886 - RNA, 20 nt, Human
uucuuuggcccagauucuag

SEQ ID NO: 1061887 - RNA, 19 nt, Human
acaggaaucgcccuggcag

SEQ ID NO: 1061888 - RNA, 25 nt, Human
agaaggcaggaccguugggcagggc

SEQ ID NO: 1061889 - RNA, 22 nt, Human
cagagggcagcgcugcugagga

SEQ ID NO: 1061890 - RNA, 19 nt, Human
cccuggcagccugucucug

SEQ ID NO: 1061891 - RNA, 22 nt, Human
ccuggccagagcucgaguccca

SEQ ID NO: 1061892 - RNA, 24 nt, Human
cgaggcggggccgcagcggccguc

SEQ ID NO: 1061893 - RNA, 19 nt, Human
cucauuuuucgacgcagcu

SEQ ID NO: 1061894 - RNA, 25 nt, Human
gaaggcaggaccguugggcagggcg

SEQ ID NO: 1061895 - RNA, 20 nt, Human
gagcucgagucccacgacaa

SEQ ID NO: 1061896 - RNA, 20 nt, Human
gccgcagcggccgucggggc

SEQ ID NO: 1061897 - RNA, 18 nt, Human
gccgucggggcuggggcu

SEQ ID NO: 1061898 - RNA, 20 nt, Human
gcuucauggaaggccaggcu

SEQ ID NO: 1061899 - RNA, 18 nt, Human
ggcagccugucucuggga

SEQ ID NO: 1061900 - RNA, 20 nt, Human
gggcgccagcagagggcagc

SEQ ID NO: 1061901 - RNA, 19 nt, Human
gggcuggggcuggucccgg

SEQ ID NO: 1061902 - RNA, 21 nt, Human
ucccuggccagagcucgaguc

SEQ ID NO: 1061903 - RNA, 23 nt, Human
ucggggcuggggcuggucccggc

SEQ ID NO: 1061904 - RNA, 19 nt, Human
ugucucugggaaaagaauu

SEQ ID NO: 1061905 - RNA, 23 nt, Human
aaaaaagaaaccuuuaaaaauau

SEQ ID NO: 1061906 - RNA, 22 nt, Human
aaaaagaaaaggaaaaacaaaa

SEQ ID NO: 1061907 - RNA, 24 nt, Human
aaaaagaaaaggaaaaacaaaaaa

SEQ ID NO: 1061908 - RNA, 24 nt, Human
aaaaauauuguagcaauagccuuc

SEQ ID NO: 1061909 - RNA, 21 nt, Human
aaaacucuaggaagaguucca

SEQ ID NO: 1061910 - RNA, 23 nt, Human
aaaagaaaaggaaaaacaaaaaa

SEQ ID NO: 1061911 - RNA, 23 nt, Human
aaaaggaaaaacaaaaaauuuca

SEQ ID NO: 1061912 - RNA, 23 nt, Human
aaacuaaaucucucugaaaaaua

SEQ ID NO: 1061913 - RNA, 20 nt, Human
aaagagacagacagacaggg

SEQ ID NO: 1061914 - RNA, 18 nt, Human
aaaggaagagaaagagac

SEQ ID NO: 1061915 - RNA, 21 nt, Human
aaauaauaugcuuugaaaccc

SEQ ID NO: 1061916 - RNA, 21 nt, Human
aacagcuuaagacacuuggug

SEQ ID NO: 1061917 - RNA, 23 nt, Human
aaguggcaccaaauuuauggcaa

SEQ ID NO: 1061918 - RNA, 20 nt, Human
acaaagagcaagucuacuuu

SEQ ID NO: 1061919 - RNA, 19 nt, Human
acuggacuaagacacugaa

SEQ ID NO: 1061920 - RNA, 22 nt, Human
agaaagagacagacagacagag

SEQ ID NO: 1061921 - RNA, 21 nt, Human
agacagacagacagagacaga

SEQ ID NO: 1061922 - RNA, 22 nt, Human
agacagacagacagagacagag

SEQ ID NO: 1061923 - RNA, 19 nt, Human
agacagagacagagacagg

SEQ ID NO: 1061924 - RNA, 23 nt, Human
agacagggagaggagagggaggu

SEQ ID NO: 1061925 - RNA, 28 nt, Human
agagacagagacagggagaggagaggga

SEQ ID NO: 1061926 - RNA, 25 nt, Human
agagagcagggcuggcacagagccc

SEQ ID NO: 1061927 - RNA, 18 nt, Human
agaggcaagcccugcuuc

SEQ ID NO: 1061928 - RNA, 23 nt, Human
aggaaaaacaaaaaauuucaaag

SEQ ID NO: 1061929 - RNA, 18 nt, Human
agggagugggaauaaggc

SEQ ID NO: 1061930 - RNA, 19 nt, Human
augguagaugagaaaguag

SEQ ID NO: 1061931 - RNA, 20 nt, Human
caagcaaaaaaucccaacca

SEQ ID NO: 1061932 - RNA, 23 nt, Human
caagguuguuuggaaaucugaca

SEQ ID NO: 1061933 - RNA, 20 nt, Human
caaucuucaacuuauucaca

SEQ ID NO: 1061934 - RNA, 19 nt, Human
cagaaacaguucacaagag

SEQ ID NO: 1061935 - RNA, 21 nt, Human
cagacagacagagacagagac

SEQ ID NO: 1061936 - RNA, 20 nt, Human
cagagacagagacagggaga

SEQ ID NO: 1061937 - RNA, 26 nt, Human
cagcacaaacuaacaacauucaaaau

SEQ ID NO: 1061938 - RNA, 18 nt, Human
cagggcuggcacagagcc

SEQ ID NO: 1061939 - RNA, 18 nt, Human
caugauucuugcgcugcc

SEQ ID NO: 1061940 - RNA, 21 nt, Human
ccacacuuccugccucugauc

SEQ ID NO: 1061941 - RNA, 22 nt, Human
ccacacuuccugccucugaucc

SEQ ID NO: 1061942 - RNA, 18 nt, Human
cccagccucuccacuucc

SEQ ID NO: 1061943 - RNA, 21 nt, Human
ccccacaaucuucaacuuauu

SEQ ID NO: 1061944 - RNA, 21 nt, Human
ccccaguuucucucuaugaaa

SEQ ID NO: 1061945 - RNA, 22 nt, Human
ccucccagccucuccacuucca

SEQ ID NO: 1061946 - RNA, 21 nt, Human
ccugcccugcacgaauauccc

SEQ ID NO: 1061947 - RNA, 21 nt, Human
cucauccccugcuucacaagc

SEQ ID NO: 1061948 - RNA, 26 nt, Human
cugagauaaggucgguuaaagcuuau

SEQ ID NO: 1061949 - RNA, 26 nt, Human
cugcacgaauaucccuguggaguccc

SEQ ID NO: 1061950 - RNA, 19 nt, Human
cuuagcaacuuuccacacu

SEQ ID NO: 1061951 - RNA, 24 nt, Human
cuuuccacacuuccugccucugau

SEQ ID NO: 1061952 - RNA, 22 nt, Human
cuuuucagccuucuggugaaca

SEQ ID NO: 1061953 - RNA, 19 nt, Human
gaauguaaacaccauauac

SEQ ID NO: 1061954 - RNA, 20 nt, Human
gacagagacagagacaggga

SEQ ID NO: 1061955 - RNA, 18 nt, Human
gagaaaaaguagccccac

SEQ ID NO: 1061956 - RNA, 19 nt, Human
gaggacagaggcaagcccu

SEQ ID NO: 1061957 - RNA, 20 nt, Human
gcccugcacgaauaucccug

SEQ ID NO: 1061958 - RNA, 18 nt, Human
gcuccugccuccuuuuga

SEQ ID NO: 1061959 - RNA, 19 nt, Human
ggaauggauacacaaugag

SEQ ID NO: 1061960 - RNA, 24 nt, Human
ggaccccucccagccucuccacuu

SEQ ID NO: 1061961 - RNA, 19 nt, Human
uaacaaauauaaaacagcu

SEQ ID NO: 1061962 - RNA, 24 nt, Human
uaagacacugaauucuguaagccc

SEQ ID NO: 1061963 - RNA, 20 nt, Human
uacaagcaaaaaaucccaac

SEQ ID NO: 1061964 - RNA, 23 nt, Human
uacaagcaaaaaaucccaaccac

SEQ ID NO: 1061965 - RNA, 19 nt, Human
uauagcacagggaaagggc

SEQ ID NO: 1061966 - RNA, 22 nt, Human
uaucccuguggaguccccggga

SEQ ID NO: 1061967 - RNA, 25 nt, Human
uaugaaacucauccccugcuucaca

SEQ ID NO: 1061968 - RNA, 24 nt, Human
uaugcuuugaaacccucuguuaca

SEQ ID NO: 1061969 - RNA, 27 nt, Human
uauuuuggaaagacaaguuaugauuau

SEQ ID NO: 1061970 - RNA, 19 nt, Human
ucacuccauuaaaguaaaa

SEQ ID NO: 1061971 - RNA, 18 nt, Human
ucagaaaccacagaaaca

SEQ ID NO: 1061972 - RNA, 21 nt, Human
ucagucaaauaaauaaaagaa

SEQ ID NO: 1061973 - RNA, 21 nt, Human
uccacacuuccugccucugau

SEQ ID NO: 1061974 - RNA, 21 nt, Human
ucccaaccacuucacagucac

SEQ ID NO: 1061975 - RNA, 24 nt, Human
ucccaaccacuucacagucacucc

SEQ ID NO: 1061976 - RNA, 18 nt, Human
uccccgggaggacagagg

SEQ ID NO: 1061977 - RNA, 21 nt, Human
ucgccacauauucuuucccaa

SEQ ID NO: 1061978 - RNA, 25 nt, Human
ucucuacuuuauucagaaaccacag

SEQ ID NO: 1061979 - RNA, 22 nt, Human
ucuuccuuuucagccuucuggu

SEQ ID NO: 1061980 - RNA, 24 nt, Human
ucuuccuuuucagccuucugguga

SEQ ID NO: 1061981 - RNA, 22 nt, Human
ugaaagacucaggcuccagagu

SEQ ID NO: 1061982 - RNA, 18 nt, Human
ugaacaaaacagaacuau

SEQ ID NO: 1061983 - RNA, 18 nt, Human
ugagaaaaaguagcccca

SEQ ID NO: 1061984 - RNA, 21 nt, Human
ugagaaaaaguagccccacaa

SEQ ID NO: 1061985 - RNA, 20 nt, Human
ugagaaaguagaaauaaggg

SEQ ID NO: 1061986 - RNA, 22 nt, Human
ugcaugauucuugcgcugccca

SEQ ID NO: 1061987 - RNA, 20 nt, Human
uggaguccccgggaggacag

SEQ ID NO: 1061988 - RNA, 21 nt, Human
uggaucuuuaggucugaaaua

SEQ ID NO: 1061989 - RNA, 22 nt, Human
uggaucuuuaggucugaaauau

SEQ ID NO: 1061990 - RNA, 18 nt, Human
uggcacagagccccugcc

SEQ ID NO: 1061991 - RNA, 23 nt, Human
uggcacagagccccugcccugca

SEQ ID NO: 1061992 - RNA, 22 nt, Human
uggcucagcagcaacccaaggg

SEQ ID NO: 1061993 - RNA, 23 nt, Human
uggugaacaaaacagaacuauuu

SEQ ID NO: 1061994 - RNA, 22 nt, Human
uguaaagaugcuauuuggcuca

SEQ ID NO: 1061995 - RNA, 22 nt, Human
uuagcaacuuuccacacuuccu

SEQ ID NO: 1061996 - RNA, 23 nt, Human
uucaaaauaaagugcuaugagaa

SEQ ID NO: 1061997 - RNA, 20 nt, Human
uucaaaguuaaaaaagaaac

SEQ ID NO: 1061998 - RNA, 21 nt, Human
uucaaaguuaaaaaagaaacc

SEQ ID NO: 1061999 - RNA, 30 nt, Human
uucaaaguuaaaaaagaaaccuuuaaaaaa

SEQ ID NO: 1062000 - RNA, 20 nt, Human
uuccacacuuccugccucug

SEQ ID NO: 1062001 - RNA, 20 nt, Human
uuccugccucugaucccacu

SEQ ID NO: 1062002 - RNA, 21 nt, Human
uuuaaaauaaauaauugguuc

SEQ ID NO: 1062003 - RNA, 24 nt, Human
uuucaaaguuaaaaaagaaaccuu

SEQ ID NO: 1062004 - RNA, 18 nt, Human
aaauccaagauccacccc

SEQ ID NO: 1062005 - RNA, 18 nt, Human
aacccgcgauccaccccc

SEQ ID NO: 1062006 - RNA, 21 nt, Human
aacccgcgauccacccccaaa

SEQ ID NO: 1062007 - RNA, 29 nt, Human
acaacccgcgauccacccccaaauccaaa

SEQ ID NO: 1062008 - RNA, 18 nt, Human
accacagccuucagcagc

SEQ ID NO: 1062009 - RNA, 21 nt, Human
accacagccuucagcagcgac

SEQ ID NO: 1062010 - RNA, 24 nt, Human
acccgcgauccacccccaaaucca

SEQ ID NO: 1062011 - RNA, 23 nt, Human
auccaagauccacccccaaaccc

SEQ ID NO: 1062012 - RNA, 19 nt, Human
caacccgcgauccaccccc

SEQ ID NO: 1062013 - RNA, 22 nt, Human
caacccgcgauccacccccaaa

SEQ ID NO: 1062014 - RNA, 22 nt, Human
caagaucugaauccugagugug

SEQ ID NO: 1062015 - RNA, 21 nt, Human
caccacagccuucagcagcga

SEQ ID NO: 1062016 - RNA, 19 nt, Human
caccacccgcuccugagcc

SEQ ID NO: 1062017 - RNA, 22 nt, Human
caccacccgcuccugagccgcc

SEQ ID NO: 1062018 - RNA, 20 nt, Human
cacccagccccaaauccgcc

SEQ ID NO: 1062019 - RNA, 25 nt, Human
cacccccaaacccgcgauguagcuc

SEQ ID NO: 1062020 - RNA, 21 nt, Human
cacccccaaauccaagaucca

SEQ ID NO: 1062021 - RNA, 20 nt, Human
cagacgcccaccacccgcuc

SEQ ID NO: 1062022 - RNA, 23 nt, Human
cagccccaaauccgccauccccc

SEQ ID NO: 1062023 - RNA, 21 nt, Human
cagccuccgaccucucagacc

SEQ ID NO: 1062024 - RNA, 22 nt, Human
cagcgacacucgcagccuccga

SEQ ID NO: 1062025 - RNA, 23 nt, Human
caucccccccacaacccgcgauc

SEQ ID NO: 1062026 - RNA, 28 nt, Human
ccacccccaaauccaagauccacccccu

SEQ ID NO: 1062027 - RNA, 20 nt, Human
cccaaauccaagauccaccc

SEQ ID NO: 1062028 - RNA, 26 nt, Human
cccacaacccgcgauccacccccaaa

SEQ ID NO: 1062029 - RNA, 22 nt, Human
ccccaaacccgcgauguagcuc

SEQ ID NO: 1062030 - RNA, 21 nt, Human
ccccaaauccaagauccaccc

SEQ ID NO: 1062031 - RNA, 23 nt, Human
ccccaaauccgccauccccccca

SEQ ID NO: 1062032 - RNA, 26 nt, Human
ccccacaacccgcgauccacccccaa

SEQ ID NO: 1062033 - RNA, 22 nt, Human
ccccacccagccccaaauccgc

SEQ ID NO: 1062034 - RNA, 21 nt, Human
cccccaaacccgcgauguagc

SEQ ID NO: 1062035 - RNA, 18 nt, Human
cccccaaauccaagaucc

SEQ ID NO: 1062036 - RNA, 25 nt, Human
cccccacaacccgcgauccaccccc

SEQ ID NO: 1062037 - RNA, 26 nt, Human
cccccacaacccgcgauccacccccc

SEQ ID NO: 1062038 - RNA, 18 nt, Human
cccccacccagccccaaa

SEQ ID NO: 1062039 - RNA, 23 nt, Human
ccccccacaacccgcgauccacc

SEQ ID NO: 1062040 - RNA, 22 nt, Human
cccccccacaacccgcgaucca

SEQ ID NO: 1062041 - RNA, 19 nt, Human
cccgcgauccacccccaau

SEQ ID NO: 1062042 - RNA, 21 nt, Human
ccgccgcggcuccucguggcc

SEQ ID NO: 1062043 - RNA, 21 nt, Human
ccgccgcggcuccucguggcc

SEQ ID NO: 1062044 - RNA, 22 nt, Human
ccgccgcggcuccucguggccu

SEQ ID NO: 1062045 - RNA, 23 nt, Human
ccucguggccuuuccacccccac

SEQ ID NO: 1062046 - RNA, 27 nt, Human
cggcuccucguggccuuuccacccccu

SEQ ID NO: 1062047 - RNA, 21 nt, Human
cgugcagagugucgauaucgc

SEQ ID NO: 1062048 - RNA, 21 nt, Human
cucguggccuuuccaccccca

SEQ ID NO: 1062049 - RNA, 22 nt, Human
cugagccgccgcggcuccucgu

SEQ ID NO: 1062050 - RNA, 25 nt, Human
gcuuucaacaagaucugaauccuga

SEQ ID NO: 1062051 - RNA, 20 nt, Human
gugugugugugugcgcccgu

SEQ ID NO: 1062052 - RNA, 18 nt, Human
uccaagauccacccccaa

SEQ ID NO: 1062053 - RNA, 20 nt, Human
uccgaccucucagaccgagu

SEQ ID NO: 1062054 - RNA, 19 nt, Human
uccugagccgccgcggcuc

SEQ ID NO: 1062055 - RNA, 20 nt, Human
ucucagaccgagugagcucc

SEQ ID NO: 1062056 - RNA, 24 nt, Human
ugagugugugugugugcgcccgug

SEQ ID NO: 1062057 - RNA, 20 nt, Human
ugcuggaggagaucaccaag

SEQ ID NO: 1062058 - RNA, 23 nt, Human
uggggacagacuugcuggaggag

SEQ ID NO: 1062059 - RNA, 24 nt, Human
ugugugugugcgcccgugaauccc

SEQ ID NO: 1062060 - RNA, 20 nt, Human
uugcuggaggagaucaccaa

SEQ ID NO: 1062061 - RNA, 21 nt, Human
uuuccacccccacccagcccc

SEQ ID NO: 1062062 - RNA, 20 nt, Human
uuugaggagcacgugcagag

SEQ ID NO: 1062063 - RNA, 24 nt, Human
uuuugcaccuucuugucuuuuuuu

SEQ ID NO: 1062064 - RNA, 24 nt, Human
cagccuccagucugggcugcuccu

SEQ ID NO: 1062065 - RNA, 24 nt, Human
ccccugagaggcaaugaacuccug

SEQ ID NO: 1062066 - RNA, 19 nt, Human
ccgccagaaguucuccagu

SEQ ID NO: 1062067 - RNA, 24 nt, Human
ccuccagcugggucagccugaccc

SEQ ID NO: 1062068 - RNA, 20 nt, Human
ccuugcucaccuccuucagc

SEQ ID NO: 1062069 - RNA, 21 nt, Human
cgcaccagccgccagaaguuc

SEQ ID NO: 1062070 - RNA, 19 nt, Human
gaccugcugcucccgcacc

SEQ ID NO: 1062071 - RNA, 22 nt, Human
ugagaggccccugagaggcaau

SEQ ID NO: 1062072 - RNA, 19 nt, Human
ugagcacucuuggccucau

SEQ ID NO: 1062073 - RNA, 20 nt, Human
ugagcacucuuggccucaua

SEQ ID NO: 1062074 - RNA, 20 nt, Human
ugggcggguguagccuggga

SEQ ID NO: 1062075 - RNA, 21 nt, Human
uggugguguuggcaggguacu

SEQ ID NO: 1062076 - RNA, 25 nt, Human
aggcuaaaaaagaauuugugacuga

SEQ ID NO: 1062077 - RNA, 22 nt, Human
gagugaauuuuuucuuggggac

SEQ ID NO: 1062078 - RNA, 22 nt, Human
uaaaaaaccauauauauugugg

SEQ ID NO: 1062079 - RNA, 21 nt, Human
uaaaugauccaacauuuucuu

SEQ ID NO: 1062080 - RNA, 23 nt, Human
ugagagaaaauauuuuuucucua

SEQ ID NO: 1062081 - RNA, 22 nt, Human
acaucagugaccuugagagcuc

SEQ ID NO: 1062082 - RNA, 21 nt, Human
cagcuuccaggcgcagucccc

SEQ ID NO: 1062083 - RNA, 20 nt, Human
ccccgaggaaagggccgccu

SEQ ID NO: 1062084 - RNA, 21 nt, Human
ccugguaccaggcgggacccc

SEQ ID NO: 1062085 - RNA, 20 nt, Human
gcgcagucccccagcugagg

SEQ ID NO: 1062086 - RNA, 22 nt, Human
ggccgccuucuuuccagccagc

SEQ ID NO: 1062087 - RNA, 18 nt, Human
ucccccagcugagggggu

SEQ ID NO: 1062088 - RNA, 23 nt, Human
ucccccagcugagggggucccug

SEQ ID NO: 1062089 - RNA, 21 nt, Human
aaaaggcacaagcaccccaga

SEQ ID NO: 1062090 - RNA, 19 nt, Human
aagcaccccagacauucag

SEQ ID NO: 1062091 - RNA, 23 nt, Human
acgauccggagccaagauggcgc

SEQ ID NO: 1062092 - RNA, 26 nt, Human
aggaagcccuuauuuagcaaugcaga

SEQ ID NO: 1062093 - RNA, 20 nt, Human
agggaaggggaagcaugaua

SEQ ID NO: 1062094 - RNA, 26 nt, Human
cacaagcaccccagacauucaggccc

SEQ ID NO: 1062095 - RNA, 21 nt, Human
cagaacuuggcagaggcccca

SEQ ID NO: 1062096 - RNA, 22 nt, Human
cucuuucagaaggcaguucaaa

SEQ ID NO: 1062097 - RNA, 20 nt, Human
cugucuugucugugacucuc

SEQ ID NO: 1062098 - RNA, 26 nt, Human
cuucucagaaaaggcacaagcacccc

SEQ ID NO: 1062099 - RNA, 20 nt, Human
cuugauggggauguugagca

SEQ ID NO: 1062100 - RNA, 20 nt, Human
guagguagaaggcagaggaa

SEQ ID NO: 1062101 - RNA, 20 nt, Human
uagaaacuuuauuuccuaau

SEQ ID NO: 1062102 - RNA, 21 nt, Human
ucacagcagucccuucccaca

SEQ ID NO: 1062103 - RNA, 19 nt, Human
ucugugacucucgcugccc

SEQ ID NO: 1062104 - RNA, 19 nt, Human
ugcuugcugucuugucugu

SEQ ID NO: 1062105 - RNA, 21 nt, Human
uggcagaggccccacaucugu

SEQ ID NO: 1062106 - RNA, 18 nt, Human
uuuuguggacucaaaccu

SEQ ID NO: 1062107 - RNA, 20 nt, Human
agaauuuccauuucuugucu

SEQ ID NO: 1062108 - RNA, 24 nt, Human
auuagaauuuccauuucuugucuc

SEQ ID NO: 1062109 - RNA, 20 nt, Human
auuucuugucuccacauccc

SEQ ID NO: 1062110 - RNA, 18 nt, Human
ccacauccccaccuuccc

SEQ ID NO: 1062111 - RNA, 24 nt, Human
gacuccuguggcugaagcugggaa

SEQ ID NO: 1062112 - RNA, 18 nt, Human
uccacauccccaccuucc

SEQ ID NO: 1062113 - RNA, 18 nt, Human
uggcuucaggucuuggca

SEQ ID NO: 1062114 - RNA, 21 nt, Human
uuucuccccucucugagaccc

SEQ ID NO: 1062115 - RNA, 21 nt, Human
aaaaaaggugcucagccucca

SEQ ID NO: 1062116 - RNA, 18 nt, Human
aaaaaggugcucagccuc

SEQ ID NO: 1062117 - RNA, 19 nt, Human
aaaaaggugcucagccucc

SEQ ID NO: 1062118 - RNA, 22 nt, Human
acccaccucucucccuuccaaa

SEQ ID NO: 1062119 - RNA, 20 nt, Human
acccucccacccucccaccc

SEQ ID NO: 1062120 - RNA, 18 nt, Human
aggaugaaaagggaaggg

SEQ ID NO: 1062121 - RNA, 21 nt, Human
cacccaccucucucccuucca

SEQ ID NO: 1062122 - RNA, 23 nt, Human
cacccaccucucucccuuccaaa

SEQ ID NO: 1062123 - RNA, 24 nt, Human
cacccaccucucucccuuccaaaa

SEQ ID NO: 1062124 - RNA, 19 nt, Human
cacccucccacccucccac

SEQ ID NO: 1062125 - RNA, 21 nt, Human
cacccucccacccucccaccc

SEQ ID NO: 1062126 - RNA, 26 nt, Human
cacccucccacccucccacccaccuc

SEQ ID NO: 1062127 - RNA, 18 nt, Human
cagccuccaaaccauuuu

SEQ ID NO: 1062128 - RNA, 19 nt, Human
ccacccucccacccuccca

SEQ ID NO: 1062129 - RNA, 22 nt, Human
ccacccucccacccucccaccc

SEQ ID NO: 1062130 - RNA, 25 nt, Human
cccacccaccucucucccuuccaaa

SEQ ID NO: 1062131 - RNA, 19 nt, Human
cccacccucccacccuccc

SEQ ID NO: 1062132 - RNA, 20 nt, Human
cccucccacccucccaccca

SEQ ID NO: 1062133 - RNA, 26 nt, Human
ccucccacccaccucucucccuucca

SEQ ID NO: 1062134 - RNA, 21 nt, Human
ccucccacccucccacccacc

SEQ ID NO: 1062135 - RNA, 18 nt, Human
gggauaggaugaaaaggg

SEQ ID NO: 1062136 - RNA, 19 nt, Human
guucccccacccucccacc

SEQ ID NO: 1062137 - RNA, 22 nt, Human
uaaaaaaggugcucagccucca

SEQ ID NO: 1062138 - RNA, 21 nt, Human
ucccccacccucccacccucc

SEQ ID NO: 1062139 - RNA, 22 nt, Human
ucuuuguguucccccacccucc

SEQ ID NO: 1062140 - RNA, 18 nt, Human
uguguucccccacccucc

SEQ ID NO: 1062141 - RNA, 26 nt, Human
uguucccccacccucccacccuccca

SEQ ID NO: 1062142 - RNA, 24 nt, Human
uucccccacccucccacccuccca

SEQ ID NO: 1062143 - RNA, 23 nt, Human
cucguuguggcucugccuccuug

SEQ ID NO: 1062144 - RNA, 19 nt, Human
ucugccuccuugguucuuc

SEQ ID NO: 1062145 - RNA, 18 nt, Human
aagcugccguggagaugg

SEQ ID NO: 1062146 - RNA, 21 nt, Human
agcugccguggagaugguugg

SEQ ID NO: 1062147 - RNA, 18 nt, Human
aggcggcgggcucuccgg

SEQ ID NO: 1062148 - RNA, 19 nt, Human
ccacgcuguggaaaagccc

SEQ ID NO: 1062149 - RNA, 19 nt, Human
cccugugucgugugugucc

SEQ ID NO: 1062150 - RNA, 20 nt, Human
ccgugcuggggcugcccugc

SEQ ID NO: 1062151 - RNA, 18 nt, Human
cggauuugacugaggucc

SEQ ID NO: 1062152 - RNA, 21 nt, Human
cgucccguucccugugucgug

SEQ ID NO: 1062153 - RNA, 23 nt, Human
cugggggcacccugcccgugcug

SEQ ID NO: 1062154 - RNA, 24 nt, Human
gaguguuucccaagcugccgugga

SEQ ID NO: 1062155 - RNA, 19 nt, Human
uaagcagagagggucuuca

SEQ ID NO: 1062156 - RNA, 18 nt, Human
ucccugugucgugugugu

SEQ ID NO: 1062157 - RNA, 20 nt, Human
ucccugugucgugugugucc

SEQ ID NO: 1062158 - RNA, 22 nt, Human
ucccugugucgugugugucccu

SEQ ID NO: 1062159 - RNA, 23 nt, Human
ucggccuuugcugccuccagacc

SEQ ID NO: 1062160 - RNA, 19 nt, Human
ugccaggagucggccuuug

SEQ ID NO: 1062161 - RNA, 21 nt, Human
ugcccgugcuggggcugcccu

SEQ ID NO: 1062162 - RNA, 22 nt, Human
ugcccgugcuggggcugcccug

SEQ ID NO: 1062163 - RNA, 21 nt, Human
ugggagcaccugggcuucugc

SEQ ID NO: 1062164 - RNA, 19 nt, Human
ugucacggauuugacugag

SEQ ID NO: 1062165 - RNA, 26 nt, Human
ugugguaagcagagagggucuucaca

SEQ ID NO: 1062166 - RNA, 18 nt, Human
uugcugccuccagaccug

SEQ ID NO: 1062167 - RNA, 21 nt, Human
aaggagaggcggcggcggcgg

SEQ ID NO: 1062168 - RNA, 24 nt, Human
aggaaaacccaacaugcaugcacu

SEQ ID NO: 1062169 - RNA, 19 nt, Human
aggcggcggcggcggcugc

SEQ ID NO: 1062170 - RNA, 22 nt, Human
aggcggcggcggcggcugcugc

SEQ ID NO: 1062171 - RNA, 23 nt, Human
aggcggcggcggcggcugcugcg

SEQ ID NO: 1062172 - RNA, 31 nt, Human
cccacggcuauggggaaauuagccugaggcc

SEQ ID NO: 1062173 - RNA, 21 nt, Human
cuuggugaccagggaagucac

SEQ ID NO: 1062174 - RNA, 23 nt, Human
gaaaacccaacaugcaugcacug

SEQ ID NO: 1062175 - RNA, 22 nt, Human
gcggcggcggcggcugcugcgc

SEQ ID NO: 1062176 - RNA, 18 nt, Human
ggcggcggcggcggcugc

SEQ ID NO: 1062177 - RNA, 19 nt, Human
ggugaccagggaagucacc

SEQ ID NO: 1062178 - RNA, 24 nt, Human
uacaacuuauagaaaagguaaagg

SEQ ID NO: 1062179 - RNA, 21 nt, Human
uuggugaccagggaagucacc

SEQ ID NO: 1062180 - RNA, 19 nt, Human
aagaggcccgaaggccuuc

SEQ ID NO: 1062181 - RNA, 25 nt, Human
agcgccgcuccaccgagggccgcgc

SEQ ID NO: 1062182 - RNA, 19 nt, Human
agcuaucgcagaggacuug

SEQ ID NO: 1062183 - RNA, 22 nt, Human
aggaugugcagggggugcagga

SEQ ID NO: 1062184 - RNA, 19 nt, Human
aggcgggcggggggcggcg

SEQ ID NO: 1062185 - RNA, 22 nt, Human
agggagggggcgucucugggcc

SEQ ID NO: 1062186 - RNA, 22 nt, Human
cacgguggagggagggggcguc

SEQ ID NO: 1062187 - RNA, 23 nt, Human
cagacaggaaugugugcugacug

SEQ ID NO: 1062188 - RNA, 21 nt, Human
ccaggccugccugggccgcgc

SEQ ID NO: 1062189 - RNA, 21 nt, Human
cccgaggcgggcggggggcgg

SEQ ID NO: 1062190 - RNA, 20 nt, Human
cccggaugacgaguacgaag

SEQ ID NO: 1062191 - RNA, 21 nt, Human
ccgcgagaggaugugcagggg

SEQ ID NO: 1062192 - RNA, 23 nt, Human
cgagggccgcgcgucggccgccg

SEQ ID NO: 1062193 - RNA, 23 nt, Human
cgccgcuccaccgagggccgcgc

SEQ ID NO: 1062194 - RNA, 20 nt, Human
cgggccagagcagggaacgg

SEQ ID NO: 1062195 - RNA, 24 nt, Human
cuccaccgagggccgcgcgucggc

SEQ ID NO: 1062196 - RNA, 20 nt, Human
cuggagcgagugugcgggcc

SEQ ID NO: 1062197 - RNA, 18 nt, Human
gacugugugcggggcugg

SEQ ID NO: 1062198 - RNA, 21 nt, Human
gagcagggaacgggucccgga

SEQ ID NO: 1062199 - RNA, 18 nt, Human
gagccugaucagacagga

SEQ ID NO: 1062200 - RNA, 22 nt, Human
gccaggccugccugggccgcgc

SEQ ID NO: 1062201 - RNA, 18 nt, Human
gcccgaaggccuucccga

SEQ ID NO: 1062202 - RNA, 20 nt, Human
gcgcuuccugccacgccagg

SEQ ID NO: 1062203 - RNA, 21 nt, Human
gcggggggcggcgaucccggg

SEQ ID NO: 1062204 - RNA, 24 nt, Human
gcuaaaguguagaggccugcucug

SEQ ID NO: 1062205 - RNA, 22 nt, Human
gggaggaugugcggggggcggu

SEQ ID NO: 1062206 - RNA, 20 nt, Human
gggagggggcgucucugggc

SEQ ID NO: 1062207 - RNA, 21 nt, Human
gggggcggcgaucccgggugg

SEQ ID NO: 1062208 - RNA, 27 nt, Human
gggggugcaggacugugugcggggcug

SEQ ID NO: 1062209 - RNA, 23 nt, Human
gugcggggcuggagcgagugugc

SEQ ID NO: 1062210 - RNA, 23 nt, Human
gugcugacuguugcagucucuga

SEQ ID NO: 1062211 - RNA, 19 nt, Human
ucggcugggcacgggcggc

SEQ ID NO: 1062212 - RNA, 18 nt, Human
ugacgcagcggcuccgga

SEQ ID NO: 1062213 - RNA, 21 nt, Human
ugcacgguggagggagggggc

SEQ ID NO: 1062214 - RNA, 22 nt, Human
uggcgcuuccugccacgccagg

SEQ ID NO: 1062215 - RNA, 18 nt, Human
ugugugcggggcuggagc

SEQ ID NO: 1062216 - RNA, 18 nt, Human
aagggagcuucuggauuc

SEQ ID NO: 1062217 - RNA, 22 nt, Human
acaaaacagauuugccucuuga

SEQ ID NO: 1062218 - RNA, 21 nt, Human
acaaagcacaaagagacgaag

SEQ ID NO: 1062219 - RNA, 21 nt, Human
acacggccaauguguuccaga

SEQ ID NO: 1062220 - RNA, 19 nt, Human
acaguuccaaggguuaucu

SEQ ID NO: 1062221 - RNA, 22 nt, Human
agcugguacagguguaccaguu

SEQ ID NO: 1062222 - RNA, 22 nt, Human
aggaaugaaaucagauugucau

SEQ ID NO: 1062223 - RNA, 23 nt, Human
cacggccaauguguuccagaacc

SEQ ID NO: 1062224 - RNA, 24 nt, Human
cacgucaaaaucacugccggugcc

SEQ ID NO: 1062225 - RNA, 25 nt, Human
cagaaccccgauauaagggagcuuc

SEQ ID NO: 1062226 - RNA, 18 nt, Human
ccccacaggacuccacag

SEQ ID NO: 1062227 - RNA, 20 nt, Human
cggccaauguguuccagaac

SEQ ID NO: 1062228 - RNA, 21 nt, Human
cggccaauguguuccagaacc

SEQ ID NO: 1062229 - RNA, 18 nt, Human
cuguucccucguauaucc

SEQ ID NO: 1062230 - RNA, 24 nt, Human
gacacggccaauguguuccagaac

SEQ ID NO: 1062231 - RNA, 18 nt, Human
gagacacccuuggaaaca

SEQ ID NO: 1062232 - RNA, 21 nt, Human
gagcuucuggauucuguuccc

SEQ ID NO: 1062233 - RNA, 23 nt, Human
gauucuguucccucguauaucca

SEQ ID NO: 1062234 - RNA, 18 nt, Human
gcagaagcaaggugccgg

SEQ ID NO: 1062235 - RNA, 20 nt, Human
ggcaagguguuagaggaggc

SEQ ID NO: 1062236 - RNA, 24 nt, Human
ggguacaaaacagauuugccucuu

SEQ ID NO: 1062237 - RNA, 21 nt, Human
gguuucuuuuaaaagccuucc

SEQ ID NO: 1062238 - RNA, 23 nt, Human
uaaauaaauguccucuguaugaa

SEQ ID NO: 1062239 - RNA, 20 nt, Human
uaagacacaaucugacugaa

SEQ ID NO: 1062240 - RNA, 23 nt, Human
uaagggagcuucuggauucuguu

SEQ ID NO: 1062241 - RNA, 22 nt, Human
uacaaaacagauuugccucuug

SEQ ID NO: 1062242 - RNA, 18 nt, Human
uacaaagcacaaagagac

SEQ ID NO: 1062243 - RNA, 21 nt, Human
uagaggaggcacccuuguuug

SEQ ID NO: 1062244 - RNA, 19 nt, Human
uagaguuugcaguaucccc

SEQ ID NO: 1062245 - RNA, 22 nt, Human
ucacagcuacaguuccaagggg

SEQ ID NO: 1062246 - RNA, 24 nt, Human
uccacaguauagguuuuauguagu

SEQ ID NO: 1062247 - RNA, 20 nt, Human
uccucuguaugaaguaagau

SEQ ID NO: 1062248 - RNA, 23 nt, Human
ucuuggcaguucacacuuagucc

SEQ ID NO: 1062249 - RNA, 22 nt, Human
ugaaggguguguuuugcagaag

SEQ ID NO: 1062250 - RNA, 18 nt, Human
ugagauugcgguuggaga

SEQ ID NO: 1062251 - RNA, 24 nt, Human
ugagauugcgguuggagagggcuu

SEQ ID NO: 1062252 - RNA, 25 nt, Human
uggaaggauuuguuguuuuuggugg

SEQ ID NO: 1062253 - RNA, 24 nt, Human
uggcauguucuccagccaagcuuu

SEQ ID NO: 1062254 - RNA, 27 nt, Human
uuaaaagccuuccauauaagucacugg

SEQ ID NO: 1062255 - RNA, 22 nt, Human
uugagguuaaauucaguauuau

SEQ ID NO: 1062256 - RNA, 19 nt, Human
uuucacagauagcuucucc

SEQ ID NO: 1062257 - RNA, 19 nt, Human
uuucacagauagcuucucc

SEQ ID NO: 1062258 - RNA, 23 nt, Human
uuucaucauuaaauaaauguccu

SEQ ID NO: 1062259 - RNA, 24 nt, Human
uuuuuuuuuuuuuuuuuuacuuuu

SEQ ID NO: 1062260 - RNA, 19 nt, Human
acccuagagcaacaguagc

SEQ ID NO: 1062261 - RNA, 20 nt, Human
cacccuagagcaacaguagc

SEQ ID NO: 1062262 - RNA, 18 nt, Human
ccaacauccaagaaucuu

SEQ ID NO: 1062263 - RNA, 19 nt, Human
cccugccacccuagagcaa

SEQ ID NO: 1062264 - RNA, 24 nt, Human
ccuacagccucuccugauuuuucc

SEQ ID NO: 1062265 - RNA, 22 nt, Human
ccucuccugauuuuucccuaac

SEQ ID NO: 1062266 - RNA, 23 nt, Human
cuagagcaacaguagccuacucc

SEQ ID NO: 1062267 - RNA, 23 nt, Human
ucccuaaccccugccacccuaga

SEQ ID NO: 1062268 - RNA, 23 nt, Human
ucucugcacaggagaccauuucu

SEQ ID NO: 1062269 - RNA, 23 nt, Human
ucugcacaggagaccauuucuag

SEQ ID NO: 1062270 - RNA, 19 nt, Human
ugaacaguagccuacagcc

SEQ ID NO: 1062271 - RNA, 25 nt, Human
ugaacaguagccuacagccucuccu

SEQ ID NO: 1062272 - RNA, 23 nt, Human
uuggugcaauauguaguuucucu

SEQ ID NO: 1062273 - RNA, 21 nt, Human
uuucccuaaccccugccaccc

SEQ ID NO: 1062274 - RNA, 19 nt, Human
ggagccugggggagaaggu

SEQ ID NO: 1062275 - RNA, 18 nt, Human
uauugggagggagccugg

SEQ ID NO: 1062276 - RNA, 20 nt, Human
augucacagaccccagcaac

SEQ ID NO: 1062277 - RNA, 22 nt, Human
uuacugcagugugguucuuucc

SEQ ID NO: 1062278 - RNA, 22 nt, Human
aaaacgccaccacuuccaaaug

SEQ ID NO: 1062279 - RNA, 25 nt, Human
agcaugggaacuguaguaagaggga

SEQ ID NO: 1062280 - RNA, 19 nt, Human
cauuccagcucaguuucag

SEQ ID NO: 1062281 - RNA, 23 nt, Human
ccugaaaaacgccaccacuucca

SEQ ID NO: 1062282 - RNA, 20 nt, Human
gaaaaacgccaccacuucca

SEQ ID NO: 1062283 - RNA, 24 nt, Human
ggaagccauuuucccugaaaaacg

SEQ ID NO: 1062284 - RNA, 27 nt, Human
ggcaagaaggccauggaagccauuuuc

SEQ ID NO: 1062285 - RNA, 22 nt, Human
guagagagcauacucggaguca

SEQ ID NO: 1062286 - RNA, 19 nt, Human
uacucggagucaugggcaa

SEQ ID NO: 1062287 - RNA, 26 nt, Human
uagugagguucuucccauuccagcuc

SEQ ID NO: 1062288 - RNA, 25 nt, Human
ucccugaaaaacgccaccacuucca

SEQ ID NO: 1062289 - RNA, 22 nt, Human
uggaagccauuuucccugaaaa

SEQ ID NO: 1062290 - RNA, 21 nt, Human
accuguagucacagcucgggu

SEQ ID NO: 1062291 - RNA, 19 nt, Human
auccaaaugagcacugagg

SEQ ID NO: 1062292 - RNA, 20 nt, Human
caccuguagucacagcucgg

SEQ ID NO: 1062293 - RNA, 21 nt, Human
caccuguagucacagcucggg

SEQ ID NO: 1062294 - RNA, 24 nt, Human
gcugcaauccaaaugagcacugag

SEQ ID NO: 1062295 - RNA, 24 nt, Human
guuccuguaauguggacacaaaag

SEQ ID NO: 1062296 - RNA, 19 nt, Human
ugagaggguuccuguaaug

SEQ ID NO: 1062297 - RNA, 19 nt, Human
ugccuggaguauagcaccu

SEQ ID NO: 1062298 - RNA, 19 nt, Human
aaaaaguagaaacagcaga

SEQ ID NO: 1062299 - RNA, 20 nt, Human
agaaacagcagaaaggaggc

SEQ ID NO: 1062300 - RNA, 24 nt, Human
agaaaggaaaugcagaaaugagaa

SEQ ID NO: 1062301 - RNA, 18 nt, Human
agaaaggaggccagacuc

SEQ ID NO: 1062302 - RNA, 24 nt, Human
agauaaaaaguagaaacagcagaa

SEQ ID NO: 1062303 - RNA, 21 nt, Human
aggaaaugcagaaaugagaaa

SEQ ID NO: 1062304 - RNA, 21 nt, Human
aggcagaaaggaaaugcagaa

SEQ ID NO: 1062305 - RNA, 25 nt, Human
aggcagaaaggaaaugcagaaauga

SEQ ID NO: 1062306 - RNA, 18 nt, Human
agacugugcagagcgugg

SEQ ID NO: 1062307 - RNA, 22 nt, Human
uacuuuuuaucuuuuucaugca

SEQ ID NO: 1062308 - RNA, 26 nt, Human
aaacaaaauaguacuuucccuucaaa

SEQ ID NO: 1062309 - RNA, 20 nt, Human
aacaagagcccaagagcaac

SEQ ID NO: 1062310 - RNA, 24 nt, Human
aacauuuauucucacaaaaauaua

SEQ ID NO: 1062311 - RNA, 21 nt, Human
aaccacagauccuagagaucu

SEQ ID NO: 1062312 - RNA, 20 nt, Human
aacugcuuguccagcagggc

SEQ ID NO: 1062313 - RNA, 20 nt, Human
aagauaccacugucaugugg

SEQ ID NO: 1062314 - RNA, 19 nt, Human
aagcaaguauaguuauaau

SEQ ID NO: 1062315 - RNA, 27 nt, Human
aagcagccaaaauuauuuucugcaugc

SEQ ID NO: 1062316 - RNA, 22 nt, Human
aauacaauaagucuagcugccu

SEQ ID NO: 1062317 - RNA, 20 nt, Human
acagguagaaaugcagacag

SEQ ID NO: 1062318 - RNA, 19 nt, Human
acccagcucggcacuucug

SEQ ID NO: 1062319 - RNA, 23 nt, Human
agaaaaggaaauaaagauguaau

SEQ ID NO: 1062320 - RNA, 23 nt, Human
agagaauuguucagagacuuuuu

SEQ ID NO: 1062321 - RNA, 18 nt, Human
agagagaauuguucagag

SEQ ID NO: 1062322 - RNA, 24 nt, Human
auaaaacaaaauaguacuuucccu

SEQ ID NO: 1062323 - RNA, 25 nt, Human
auaaaacaaaauaguacuuucccuu

SEQ ID NO: 1062324 - RNA, 21 nt, Human
caaaacaccaaacuuuugcaa

SEQ ID NO: 1062325 - RNA, 22 nt, Human
caaaacaccaaacuuuugcaaa

SEQ ID NO: 1062326 - RNA, 19 nt, Human
caacagcagaaauugaaca

SEQ ID NO: 1062327 - RNA, 20 nt, Human
caacagcagaaauugaacaa

SEQ ID NO: 1062328 - RNA, 20 nt, Human
cacaauauauuuaacaauac

SEQ ID NO: 1062329 - RNA, 24 nt, Human
cacauuauccaugcucccauuugc

SEQ ID NO: 1062330 - RNA, 20 nt, Human
caccucaauuuuccaaggau

SEQ ID NO: 1062331 - RNA, 22 nt, Human
cagcuauauuaagaagaucuac

SEQ ID NO: 1062332 - RNA, 21 nt, Human
caucacaugcagauugcccag

SEQ ID NO: 1062333 - RNA, 25 nt, Human
ccaaaauaaacuaacuuuucuaaca

SEQ ID NO: 1062334 - RNA, 21 nt, Human
ccagcagggccuuuacccagc

SEQ ID NO: 1062335 - RNA, 24 nt, Human
ccauacucagauaauugucauauu

SEQ ID NO: 1062336 - RNA, 18 nt, Human
cccuguagccuagacaug

SEQ ID NO: 1062337 - RNA, 22 nt, Human
ccuggugggucugguccugugg

SEQ ID NO: 1062338 - RNA, 23 nt, Human
ccuggugggucugguccuguggu

SEQ ID NO: 1062339 - RNA, 23 nt, Human
ccuucaagcaguuuggaaugacu

SEQ ID NO: 1062340 - RNA, 18 nt, Human
cuaacccaucaacagcag

SEQ ID NO: 1062341 - RNA, 20 nt, Human
cucaaaaaaaagugaacaca

SEQ ID NO: 1062342 - RNA, 22 nt, Human
cugguccugugguccggcuguc

SEQ ID NO: 1062343 - RNA, 19 nt, Human
gacuguauaacaagagccc

SEQ ID NO: 1062344 - RNA, 21 nt, Human
gaguggccaggcuguaaauac

SEQ ID NO: 1062345 - RNA, 19 nt, Human
gcuguaaauacaauaaguc

SEQ ID NO: 1062346 - RNA, 24 nt, Human
ggaaaacccaauauuuuauaaaaa

SEQ ID NO: 1062347 - RNA, 18 nt, Human
gugggucugguccugugg

SEQ ID NO: 1062348 - RNA, 18 nt, Human
uaaaagacucagaacaaa

SEQ ID NO: 1062349 - RNA, 21 nt, Human
uaaagauguaauuauaaccac

SEQ ID NO: 1062350 - RNA, 23 nt, Human
uaacaauacagcauagacucaaa

SEQ ID NO: 1062351 - RNA, 23 nt, Human
uaacaccagugcaauuuuaacau

SEQ ID NO: 1062352 - RNA, 19 nt, Human
uaacccaucaacagcagaa

SEQ ID NO: 1062353 - RNA, 19 nt, Human
uaagccuuuagaauuuccu

SEQ ID NO: 1062354 - RNA, 22 nt, Human
uaccaaagguugagguggcuau

SEQ ID NO: 1062355 - RNA, 22 nt, Human
uagcugccuuccacaugugguc

SEQ ID NO: 1062356 - RNA, 19 nt, Human
uauaacaagagcccaagag

SEQ ID NO: 1062357 - RNA, 18 nt, Human
uauuuaaccauacucaga

SEQ ID NO: 1062358 - RNA, 20 nt, Human
uauuuaaccauacucagaua

SEQ ID NO: 1062359 - RNA, 25 nt, Human
uauuuaaccauacucagauaauugu

SEQ ID NO: 1062360 - RNA, 18 nt, Human
ucagacauuuaauuguau

SEQ ID NO: 1062361 - RNA, 21 nt, Human
ucagagacuuuuuucaacuag

SEQ ID NO: 1062362 - RNA, 22 nt, Human
ucauaugucuagaguggccagg

SEQ ID NO: 1062363 - RNA, 21 nt, Human
ucauuggcuucagacauuuaa

SEQ ID NO: 1062364 - RNA, 24 nt, Human
ucccugucaugguuucaacuuuca

SEQ ID NO: 1062365 - RNA, 20 nt, Human
uccuagagaucucaaaaaaa

SEQ ID NO: 1062366 - RNA, 19 nt, Human
ucucagauucugguucauc

SEQ ID NO: 1062367 - RNA, 21 nt, Human
ugaagaagcgcaagaaaagga

SEQ ID NO: 1062368 - RNA, 22 nt, Human
ugaccuauuuccaaauucucag

SEQ ID NO: 1062369 - RNA, 19 nt, Human
ugcaaguucuacccaaaac

SEQ ID NO: 1062370 - RNA, 21 nt, Human
ugcacugucuuuccaaggcuu

SEQ ID NO: 1062371 - RNA, 23 nt, Human
uggaggcuuuuucugugaccuau

SEQ ID NO: 1062372 - RNA, 18 nt, Human
uggcaagaaaaauacuuc

SEQ ID NO: 1062373 - RNA, 19 nt, Human
uguauguauuuaaccauac

SEQ ID NO: 1062374 - RNA, 20 nt, Human
uguauguauuuaaccauacu

SEQ ID NO: 1062375 - RNA, 21 nt, Human
ugucauguggauccugguggg

SEQ ID NO: 1062376 - RNA, 18 nt, Human
ugucuagaguggccaggc

SEQ ID NO: 1062377 - RNA, 18 nt, Human
uucaagcaguuuggaaug

SEQ ID NO: 1062378 - RNA, 22 nt, Human
uucaaguuagaauaaacaacuc

SEQ ID NO: 1062379 - RNA, 18 nt, Human
uugaauuacaaguuguuu

SEQ ID NO: 1062380 - RNA, 23 nt, Human
uugcacugucuuuccaaggcuug

SEQ ID NO: 1062381 - RNA, 24 nt, Human
uugcuugguuugagacaacuaugu

SEQ ID NO: 1062382 - RNA, 20 nt, Human
uuuauauuugugugccaagg

SEQ ID NO: 1062383 - RNA, 20 nt, Human
aaagcaacagaaaagcagaa

SEQ ID NO: 1062384 - RNA, 20 nt, Human
aacaaaaauaaaucuaauag

SEQ ID NO: 1062385 - RNA, 21 nt, Human
aacagcaauccacaccuugcc

SEQ ID NO: 1062386 - RNA, 19 nt, Human
aacauuauuucaucaguag

SEQ ID NO: 1062387 - RNA, 21 nt, Human
aagaaccacuggcuuaaauua

SEQ ID NO: 1062388 - RNA, 25 nt, Human
aagaacuugagagagauauagacug

SEQ ID NO: 1062389 - RNA, 19 nt, Human
aagccuuuguaucaacuga

SEQ ID NO: 1062390 - RNA, 19 nt, Human
aagggaacuaaauuaugau

SEQ ID NO: 1062391 - RNA, 24 nt, Human
aaucaacauagcaucaagucuaaa

SEQ ID NO: 1062392 - RNA, 21 nt, Human
aaugaaugaaaacagacagaa

SEQ ID NO: 1062393 - RNA, 20 nt, Human
aaugcuauccacaauauaaa

SEQ ID NO: 1062394 - RNA, 21 nt, Human
acaauaagaacuugagagaga

SEQ ID NO: 1062395 - RNA, 23 nt, Human
accuugcccacccccacaccuca

SEQ ID NO: 1062396 - RNA, 24 nt, Human
acucuaggaaaacauuuaaagaaa

SEQ ID NO: 1062397 - RNA, 20 nt, Human
acuuuaguagucuuuaaaag

SEQ ID NO: 1062398 - RNA, 23 nt, Human
aggcgccucccuguugguuucug

SEQ ID NO: 1062399 - RNA, 23 nt, Human
agucaaaacguuuacccaaagua

SEQ ID NO: 1062400 - RNA, 21 nt, Human
caaaaugcuauccacaauaua

SEQ ID NO: 1062401 - RNA, 22 nt, Human
caaccauaucacagaccuuggc

SEQ ID NO: 1062402 - RNA, 19 nt, Human
caagaaccacuggcuuaaa

SEQ ID NO: 1062403 - RNA, 21 nt, Human
caagaugcauguaaacccaua

SEQ ID NO: 1062404 - RNA, 22 nt, Human
caagaugcauguaaacccauaa

SEQ ID NO: 1062405 - RNA, 18 nt, Human
cacaccuugcccaccccc

SEQ ID NO: 1062406 - RNA, 25 nt, Human
cacccccacaccucagaaaagauuu

SEQ ID NO: 1062407 - RNA, 24 nt, Human
caccgccauaaacuuuaaacaguc

SEQ ID NO: 1062408 - RNA, 25 nt, Human
caccucagaaaagauuuccaccagg

SEQ ID NO: 1062409 - RNA, 26 nt, Human
caccuucaaaaugcuauccacaaaac

SEQ ID NO: 1062410 - RNA, 21 nt, Human
caccuugcccacccccacacc

SEQ ID NO: 1062411 - RNA, 20 nt, Human
cacuaguaugcauuccuaac

SEQ ID NO: 1062412 - RNA, 26 nt, Human
cagaaaagauuuccaccaggaaucaa

SEQ ID NO: 1062413 - RNA, 21 nt, Human
cagacagaacuaaaacuaaug

SEQ ID NO: 1062414 - RNA, 22 nt, Human
cagcaguaccuugaaaucuucu

SEQ ID NO: 1062415 - RNA, 24 nt, Human
cauaaacuuuaaacagucaaaacg

SEQ ID NO: 1062416 - RNA, 24 nt, Human
caucagaauaacccagcacuuguu

SEQ ID NO: 1062417 - RNA, 20 nt, Human
cccacccccacaccucagaa

SEQ ID NO: 1062418 - RNA, 27 nt, Human
cccacuucaccgccauaaacuuuaaac

SEQ ID NO: 1062419 - RNA, 21 nt, Human
cccugcccccacucuaaccug

SEQ ID NO: 1062420 - RNA, 20 nt, Human
ccgccauaaacuuuaaacag

SEQ ID NO: 1062421 - RNA, 24 nt, Human
ccgccccugcccccacucuaaccu

SEQ ID NO: 1062422 - RNA, 23 nt, Human
cgccccugcccccacucuaaccu

SEQ ID NO: 1062423 - RNA, 18 nt, Human
cgcuccggggugugcccg

SEQ ID NO: 1062424 - RNA, 18 nt, Human
cgcugcugcuugccgggg

SEQ ID NO: 1062425 - RNA, 20 nt, Human
cuaggucacaugccagaagc

SEQ ID NO: 1062426 - RNA, 22 nt, Human
cuaguaugcauuccuaacaacu

SEQ ID NO: 1062427 - RNA, 19 nt, Human
cugcucccgcgcccgcccc

SEQ ID NO: 1062428 - RNA, 22 nt, Human
cugugcugaaaaaaaaaugacc

SEQ ID NO: 1062429 - RNA, 19 nt, Human
cuugcccacccccacaccu

SEQ ID NO: 1062430 - RNA, 23 nt, Human
gaaaacagacagaacuaaaacua

SEQ ID NO: 1062431 - RNA, 24 nt, Human
gauugucaguaguaucaguuucca

SEQ ID NO: 1062432 - RNA, 21 nt, Human
gcccgcugcugcuugccgggg

SEQ ID NO: 1062433 - RNA, 22 nt, Human
ggaguauuuuaaugcucacaaa

SEQ ID NO: 1062434 - RNA, 21 nt, Human
ggcaggcugggcgucgcggcc

SEQ ID NO: 1062435 - RNA, 24 nt, Human
ggcccgcugcugcuugccggggug

SEQ ID NO: 1062436 - RNA, 18 nt, Human
ggcucgggcucccucucu

SEQ ID NO: 1062437 - RNA, 22 nt, Human
ggcucgggcucccucucuggcc

SEQ ID NO: 1062438 - RNA, 24 nt, Human
uaaacuaagaaauuguaacauuaa

SEQ ID NO: 1062439 - RNA, 21 nt, Human
uaacaacuucucaagugaugc

SEQ ID NO: 1062440 - RNA, 21 nt, Human
uaacuaggucacaugccagaa

SEQ ID NO: 1062441 - RNA, 24 nt, Human
uaacuaggucacaugccagaagcu

SEQ ID NO: 1062442 - RNA, 21 nt, Human
uaagguguuuucuauaucuca

SEQ ID NO: 1062443 - RNA, 19 nt, Human
uaaugcuauuucuaauguu

SEQ ID NO: 1062444 - RNA, 24 nt, Human
uacaucagcacagcccuaaccaaa

SEQ ID NO: 1062445 - RNA, 22 nt, Human
uaggcgccucccuguugguuuc

SEQ ID NO: 1062446 - RNA, 24 nt, Human
uaucacagaccuuggcaaagcugc

SEQ ID NO: 1062447 - RNA, 23 nt, Human
uaugaucucuacacauguaugua

SEQ ID NO: 1062448 - RNA, 18 nt, Human
ucaagacaugugguagaa

SEQ ID NO: 1062449 - RNA, 23 nt, Human
ucagcaguaccuugaaaucuucu

SEQ ID NO: 1062450 - RNA, 20 nt, Human
ucccgcgcccgccccugccc

SEQ ID NO: 1062451 - RNA, 18 nt, Human
ucccucucuggcccuggg

SEQ ID NO: 1062452 - RNA, 24 nt, Human
ucccucucuggcccugggcugcuc

SEQ ID NO: 1062453 - RNA, 21 nt, Human
ucguaaacagcaauccacacc

SEQ ID NO: 1062454 - RNA, 26 nt, Human
ucucaagugaugcugaagcugcaggu

SEQ ID NO: 1062455 - RNA, 21 nt, Human
ugaaaaaaaaaugaccuacaa

SEQ ID NO: 1062456 - RNA, 22 nt, Human
ugaaagcaacagaaaagcagaa

SEQ ID NO: 1062457 - RNA, 25 nt, Human
ugaaagcaacagaaaagcuggagac

SEQ ID NO: 1062458 - RNA, 23 nt, Human
ugaagacgcccacuucaccgcca

SEQ ID NO: 1062459 - RNA, 24 nt, Human
ugacguaacaaaaaguaaaaaaaa

SEQ ID NO: 1062460 - RNA, 29 nt, Human
ugcccacccccacaccucagaaaagauuu

SEQ ID NO: 1062461 - RNA, 23 nt, Human
ugcccccacucuaaccuguccgc

SEQ ID NO: 1062462 - RNA, 18 nt, Human
ugcugaagcugcaggucu

SEQ ID NO: 1062463 - RNA, 20 nt, Human
ugcugaagcugcaggucuug

SEQ ID NO: 1062464 - RNA, 20 nt, Human
uggcaggcugggcgucgcgg

SEQ ID NO: 1062465 - RNA, 18 nt, Human
uggcccugggcugcuccc

SEQ ID NO: 1062466 - RNA, 23 nt, Human
ugguuucugauucacuaugucug

SEQ ID NO: 1062467 - RNA, 20 nt, Human
uuaaaaauuagagcugugcu

SEQ ID NO: 1062468 - RNA, 20 nt, Human
uuagagcucuauuaauaacc

SEQ ID NO: 1062469 - RNA, 22 nt, Human
uuaugaucucuacacauguaug

SEQ ID NO: 1062470 - RNA, 22 nt, Human
uucaaggaacgaaaaugaaauc

SEQ ID NO: 1062471 - RNA, 23 nt, Human
uucaaggaacgaaaaugaaaucc

SEQ ID NO: 1062472 - RNA, 19 nt, Human
uucaugauaacaaacacuc

SEQ ID NO: 1062473 - RNA, 23 nt, Human
uucaugauaacaaacacucuagg

SEQ ID NO: 1062474 - RNA, 18 nt, Human
uugcccacccccacaccu

SEQ ID NO: 1062475 - RNA, 19 nt, Human
agggacuucugacaggugg

SEQ ID NO: 1062476 - RNA, 23 nt, Human
cugaguucugagagacaaauguu

SEQ ID NO: 1062477 - RNA, 21 nt, Human
cuucugacagguggggguggg

SEQ ID NO: 1062478 - RNA, 22 nt, Human
gauguggguguugauggcagcc

SEQ ID NO: 1062479 - RNA, 22 nt, Human
gcuccaggcugauguggguguu

SEQ ID NO: 1062480 - RNA, 24 nt, Human
uaggaugcguggagcuccaggcug

SEQ ID NO: 1062481 - RNA, 18 nt, Human
ucgcaccggcgacagcgg

SEQ ID NO: 1062482 - RNA, 19 nt, Human
ucugagagacaaauguugu

SEQ ID NO: 1062483 - RNA, 21 nt, Human
ugauguggguguugauggcag

SEQ ID NO: 1062484 - RNA, 25 nt, Human
uggagcuccaggcugaugugggugu

SEQ ID NO: 1062485 - RNA, 22 nt, Human
ugggggagcacgcugaguucug

SEQ ID NO: 1062486 - RNA, 18 nt, Human
acagggaagggaccaggg

SEQ ID NO: 1062487 - RNA, 28 nt, Human
acccugcugcaccagacuggaauguguu

SEQ ID NO: 1062488 - RNA, 23 nt, Human
agccucuggcccugagaccgcuc

SEQ ID NO: 1062489 - RNA, 25 nt, Human
aucaucuucacugcugcuucugcua

SEQ ID NO: 1062490 - RNA, 18 nt, Human
caggcaacagggaaggga

SEQ ID NO: 1062491 - RNA, 21 nt, Human
ccaaaguaguucuguguucuu

SEQ ID NO: 1062492 - RNA, 20 nt, Human
ccacaucaucuucacugcug

SEQ ID NO: 1062493 - RNA, 22 nt, Human
ccaccagucccccaaaugccaa

SEQ ID NO: 1062494 - RNA, 23 nt, Human
ccaugccaccagucccccaaaug

SEQ ID NO: 1062495 - RNA, 22 nt, Human
cccccaaaugccaaaguaguuc

SEQ ID NO: 1062496 - RNA, 20 nt, Human
ccucuggcccugagaccgcu

SEQ ID NO: 1062497 - RNA, 22 nt, Human
cgcucuggggaagggcuguggg

SEQ ID NO: 1062498 - RNA, 24 nt, Human
cggaagacccagaauuacuaaaag

SEQ ID NO: 1062499 - RNA, 21 nt, Human
cugcuuguguucucaauggcu

SEQ ID NO: 1062500 - RNA, 21 nt, Human
gaaguuuuuccacaucaucuu

SEQ ID NO: 1062501 - RNA, 20 nt, Human
gacccagaauuacuaaaagu

SEQ ID NO: 1062502 - RNA, 23 nt, Human
gagcacaacugaaguuuuuccac

SEQ ID NO: 1062503 - RNA, 23 nt, Human
ggaagacccagaauuacuaaaag

SEQ ID NO: 1062504 - RNA, 23 nt, Human
ggcaacagggaagggaccaggga

SEQ ID NO: 1062505 - RNA, 20 nt, Human
gggaagggcugugggagagc

SEQ ID NO: 1062506 - RNA, 18 nt, Human
ggggaagggcugugggag

SEQ ID NO: 1062507 - RNA, 20 nt, Human
uaucacugcaguugcuggug

SEQ ID NO: 1062508 - RNA, 20 nt, Human
uaucacugggguccugcugc

SEQ ID NO: 1062509 - RNA, 21 nt, Human
uaugauuucacuagcaaugga

SEQ ID NO: 1062510 - RNA, 23 nt, Human
uaugcuggcauuguugauguugc

SEQ ID NO: 1062511 - RNA, 19 nt, Human
ucacugcaguugcuggugc

SEQ ID NO: 1062512 - RNA, 21 nt, Human
ucacugggguccugcugcucc

SEQ ID NO: 1062513 - RNA, 24 nt, Human
ucauuuuucacuuugauguucuua

SEQ ID NO: 1062514 - RNA, 22 nt, Human
ucuuagagcugcuugggccacu

SEQ ID NO: 1062515 - RNA, 22 nt, Human
ucuuauggcacuacugccacuu

SEQ ID NO: 1062516 - RNA, 19 nt, Human
ugccaaguuugucuccuga

SEQ ID NO: 1062517 - RNA, 24 nt, Human
ugcugcuuguguucucaauggcua

SEQ ID NO: 1062518 - RNA, 19 nt, Human
uggaauguguuggucccag

SEQ ID NO: 1062519 - RNA, 18 nt, Human
ugggcuggggagagccuc

SEQ ID NO: 1062520 - RNA, 21 nt, Human
ugggcuggggagagccucugg

SEQ ID NO: 1062521 - RNA, 21 nt, Human
uguguuggucccaguugggcu

SEQ ID NO: 1062522 - RNA, 18 nt, Human
uguucucucuuuaauucu

SEQ ID NO: 1062523 - RNA, 20 nt, Human
uucacuuugauguucuuaau

SEQ ID NO: 1062524 - RNA, 19 nt, Human
uucuguguucuuggcagaa

SEQ ID NO: 1062525 - RNA, 21 nt, Human
uuuuccacaucaucuucacug

SEQ ID NO: 1062526 - RNA, 23 nt, Human
uuuuucacuuugauguucuuaau

SEQ ID NO: 1062527 - RNA, 26 nt, Human
accaccuuuuguguauccuucucucc

SEQ ID NO: 1062528 - RNA, 26 nt, Human
caccuugaucuggauuccuuuggccc

SEQ ID NO: 1062529 - RNA, 22 nt, Human
cagcacaugcaggccuuccuca

SEQ ID NO: 1062530 - RNA, 24 nt, Human
cagcacaugcaggccuuccucaca

SEQ ID NO: 1062531 - RNA, 24 nt, Human
caugcaggccuuccucacagaucu

SEQ ID NO: 1062532 - RNA, 22 nt, Human
ccaggccuuccagcacaugcag

SEQ ID NO: 1062533 - RNA, 19 nt, Human
cccacacggucgcugugcg

SEQ ID NO: 1062534 - RNA, 23 nt, Human
cccacacggucgcugugcgaggc

SEQ ID NO: 1062535 - RNA, 22 nt, Human
cccuuucgguucaaccuuuucc

SEQ ID NO: 1062536 - RNA, 24 nt, Human
cucccuuucgguucaaccuuuucc

SEQ ID NO: 1062537 - RNA, 18 nt, Human
cuugcuuugacaagucca

SEQ ID NO: 1062538 - RNA, 22 nt, Human
cuuuuguguauccuucucuccu

SEQ ID NO: 1062539 - RNA, 22 nt, Human
ggccuuccagcacaugcaggcc

SEQ ID NO: 1062540 - RNA, 22 nt, Human
ggcuggucuccugaggccaggu

SEQ ID NO: 1062541 - RNA, 18 nt, Human
uauccuucucuccuggca

SEQ ID NO: 1062542 - RNA, 23 nt, Human
uccuccucuugcuuugacaaguc

SEQ ID NO: 1062543 - RNA, 21 nt, Human
ucgcugugcgaggcuggucuc

SEQ ID NO: 1062544 - RNA, 21 nt, Human
ucuccuggcaccuugaucugg

SEQ ID NO: 1062545 - RNA, 22 nt, Human
ugcgaggcuggucuccugaggc

SEQ ID NO: 1062546 - RNA, 22 nt, Human
uggcugggcucuagggcaaauc

SEQ ID NO: 1062547 - RNA, 18 nt, Human
uaaguuguuuuacuauuu

SEQ ID NO: 1062548 - RNA, 24 nt, Human
uguuuuacuauuucuucagcucca

SEQ ID NO: 1062549 - RNA, 18 nt, Human
aagcuaauacuucuaccu

SEQ ID NO: 1062550 - RNA, 19 nt, Human
acacugcauucacaguuug

SEQ ID NO: 1062551 - RNA, 19 nt, Human
aucaguuacccauuacaug

SEQ ID NO: 1062552 - RNA, 22 nt, Human
cacaguuuguguguuaaccacu

SEQ ID NO: 1062553 - RNA, 18 nt, Human
cacugcauucacaguuug

SEQ ID NO: 1062554 - RNA, 18 nt, Human
cuuguaguuuucugugua

SEQ ID NO: 1062555 - RNA, 20 nt, Human
uaaaggucaucaaaugcaag

SEQ ID NO: 1062556 - RNA, 20 nt, Human
uacccauuacaugauuuauu

SEQ ID NO: 1062557 - RNA, 22 nt, Human
ugcaacgccacacaucuuguag

SEQ ID NO: 1062558 - RNA, 21 nt, Human
uggaaauguaagggagaaacu

SEQ ID NO: 1062559 - RNA, 21 nt, Human
uuuacacugcauucacaguuu

SEQ ID NO: 1062560 - RNA, 20 nt, Human
agaacagauggcccaccagu

SEQ ID NO: 1062561 - RNA, 20 nt, Human
cagaagaacagauggcccac

SEQ ID NO: 1062562 - RNA, 23 nt, Human
cagauggcccaccaguagguggu

SEQ ID NO: 1062563 - RNA, 23 nt, Human
ccaacagccagaugucagccaga

SEQ ID NO: 1062564 - RNA, 18 nt, Human
gcagguggaccuccuggc

SEQ ID NO: 1062565 - RNA, 21 nt, Human
ggcuuugcagguggaccuccu

SEQ ID NO: 1062566 - RNA, 21 nt, Human
uaagaaccaaccaaacacugu

SEQ ID NO: 1062567 - RNA, 19 nt, Human
uaaugggcuuugcaggugg

SEQ ID NO: 1062568 - RNA, 22 nt, Human
ugcagguggaccuccuggccag

SEQ ID NO: 1062569 - RNA, 22 nt, Human
uggaccuccuggccaggacccu

SEQ ID NO: 1062570 - RNA, 19 nt, Human
uggguaagaaccaaccaaa

SEQ ID NO: 1062571 - RNA, 24 nt, Human
uggguaagaaccaaccaaacacug

SEQ ID NO: 1062572 - RNA, 19 nt, Human
aaacccaacauauuucuuu

SEQ ID NO: 1062573 - RNA, 24 nt, Human
aagcgaugaaagccacguuuugcu

SEQ ID NO: 1062574 - RNA, 19 nt, Human
aagucagccuuaauacuga

SEQ ID NO: 1062575 - RNA, 22 nt, Human
aagucagccuuaauacugaaac

SEQ ID NO: 1062576 - RNA, 26 nt, Human
aagucagccuuaauacugaaacuaua

SEQ ID NO: 1062577 - RNA, 20 nt, Human
acuuuaagggccgcucuagg

SEQ ID NO: 1062578 - RNA, 21 nt, Human
aguuuuuuaacuuauugcaaa

SEQ ID NO: 1062579 - RNA, 18 nt, Human
auaaaacacaaugaagaa

SEQ ID NO: 1062580 - RNA, 19 nt, Human
auacuacgguucacauacc

SEQ ID NO: 1062581 - RNA, 19 nt, Human
cauauuacaucagcagagu

SEQ ID NO: 1062582 - RNA, 20 nt, Human
ccccacccgcccuccucucc

SEQ ID NO: 1062583 - RNA, 21 nt, Human
ccccacccgcccuccucuccc

SEQ ID NO: 1062584 - RNA, 23 nt, Human
ccccacccgcccuccucucccug

SEQ ID NO: 1062585 - RNA, 24 nt, Human
ccuuauugcugccacuucucuucu

SEQ ID NO: 1062586 - RNA, 24 nt, Human
ccuuauugcugccacuucucuucu

SEQ ID NO: 1062587 - RNA, 24 nt, Human
cgcccuccucucccuggcacuuua

SEQ ID NO: 1062588 - RNA, 22 nt, Human
cguaguccugucuccgcccccu

SEQ ID NO: 1062589 - RNA, 18 nt, Human
cuccauaucuacauccaa

SEQ ID NO: 1062590 - RNA, 23 nt, Human
guccugucuccgcccccuucucu

SEQ ID NO: 1062591 - RNA, 21 nt, Human
uacagcagauacuaguuugcc

SEQ ID NO: 1062592 - RNA, 18 nt, Human
uagguuguuuuacagcag

SEQ ID NO: 1062593 - RNA, 22 nt, Human
uccccacccgcccuccucuccc

SEQ ID NO: 1062594 - RNA, 19 nt, Human
uccugucuccgcccccuuc

SEQ ID NO: 1062595 - RNA, 18 nt, Human
ucuaggccaggauggaag

SEQ ID NO: 1062596 - RNA, 19 nt, Human
ucuuuuuuccuccuucucc

SEQ ID NO: 1062597 - RNA, 24 nt, Human
ucuuuuuuccuccuucuccuacuc

SEQ ID NO: 1062598 - RNA, 18 nt, Human
ugcccuagagacucuggc

SEQ ID NO: 1062599 - RNA, 23 nt, Human
uggacacauaccauaaaacacaa

SEQ ID NO: 1062600 - RNA, 18 nt, Human
ugucuccgcccccuucuc

SEQ ID NO: 1062601 - RNA, 19 nt, Human
aaaaugccaccaauuauga

SEQ ID NO: 1062602 - RNA, 21 nt, Human
aggaaucugacaggggaucug

SEQ ID NO: 1062603 - RNA, 25 nt, Human
augagaccaaauacuguucagaaug

SEQ ID NO: 1062604 - RNA, 22 nt, Human
caaaauaugcaccaaaaaaugu

SEQ ID NO: 1062605 - RNA, 22 nt, Human
cagaaugaaaaagaguugaaua

SEQ ID NO: 1062606 - RNA, 19 nt, Human
ccaccaauuaugaugccaa

SEQ ID NO: 1062607 - RNA, 21 nt, Human
ccauccagagaauuuucaucu

SEQ ID NO: 1062608 - RNA, 18 nt, Human
gcagaguagcaaaggaga

SEQ ID NO: 1062609 - RNA, 19 nt, Human
uaaaauuauguaauuaggg

SEQ ID NO: 1062610 - RNA, 19 nt, Human
uagcagaguagcaaaggag

SEQ ID NO: 1062611 - RNA, 28 nt, Human
uauguaauuaggggcacacacauauaua

SEQ ID NO: 1062612 - RNA, 23 nt, Human
ugauguucauauagauauacaga

SEQ ID NO: 1062613 - RNA, 18 nt, Human
ugcuuggaauccuuuggg

SEQ ID NO: 1062614 - RNA, 25 nt, Human
uucagaaugaaaaagaguugaauaa

SEQ ID NO: 1062615 - RNA, 23 nt, Human
uucuauggaggaaucugacaggg

SEQ ID NO: 1062616 - RNA, 22 nt, Human
aacacagcgcagacaugcuccc

SEQ ID NO: 1062617 - RNA, 22 nt, Human
acagcgcagacaugcucccaga

SEQ ID NO: 1062618 - RNA, 22 nt, Human
caacacagcgcagacaugcucc

SEQ ID NO: 1062619 - RNA, 19 nt, Human
cacacccccacaagcacug

SEQ ID NO: 1062620 - RNA, 18 nt, Human
cacuggaugacccaggga

SEQ ID NO: 1062621 - RNA, 18 nt, Human
cagcgcagacaugcuccc

SEQ ID NO: 1062622 - RNA, 19 nt, Human
cagcgcagacaugcuccca

SEQ ID NO: 1062623 - RNA, 23 nt, Human
caggagauuuccucugauugcuu

SEQ ID NO: 1062624 - RNA, 24 nt, Human
ccagaaccacacccccacaagcac

SEQ ID NO: 1062625 - RNA, 18 nt, Human
gaaccacacccccacaag

SEQ ID NO: 1062626 - RNA, 22 nt, Human
gcagacaugcucccagaaccac

SEQ ID NO: 1062627 - RNA, 19 nt, Human
gcuucccugcaacacagcg

SEQ ID NO: 1062628 - RNA, 24 nt, Human
ucacuggaugacccagggacaugu

SEQ ID NO: 1062629 - RNA, 18 nt, Human
ucccagaaccacaccccc

SEQ ID NO: 1062630 - RNA, 22 nt, Human
ucccagaaccacacccccacaa

SEQ ID NO: 1062631 - RNA, 25 nt, Human
ucccagaaccacacccccacaagca

SEQ ID NO: 1062632 - RNA, 21 nt, Human
ucucacuggaugacccaggga

SEQ ID NO: 1062633 - RNA, 21 nt, Human
ugcucccagaaccacaccccc

SEQ ID NO: 1062634 - RNA, 23 nt, Human
aaccuuguaucucaagaaggcug

SEQ ID NO: 1062635 - RNA, 22 nt, Human
accuuguaucucaagaaggcug

SEQ ID NO: 1062636 - RNA, 19 nt, Human
aggcugugagguggaccag

SEQ ID NO: 1062637 - RNA, 22 nt, Human
agguggaccagcuuggaagggu

SEQ ID NO: 1062638 - RNA, 18 nt, Human
caagaaggcugugaggug

SEQ ID NO: 1062639 - RNA, 19 nt, Human
ccagcuuggaagggucauc

SEQ ID NO: 1062640 - RNA, 22 nt, Human
gaaacucuucaccuucccacaa

SEQ ID NO: 1062641 - RNA, 27 nt, Human
ggaaacucuucaccuucccacaaugcc

SEQ ID NO: 1062642 - RNA, 21 nt, Human
uccuuagggaaacucuucacc

SEQ ID NO: 1062643 - RNA, 22 nt, Human
ugugagguggaccagcuuggaa

SEQ ID NO: 1062644 - RNA, 24 nt, Human
acaaacaguaccccgacauucagc

SEQ ID NO: 1062645 - RNA, 23 nt, Human
caaacaguaccccgacauucagc

SEQ ID NO: 1062646 - RNA, 21 nt, Human
cucaggggaggaccaagagga

SEQ ID NO: 1062647 - RNA, 18 nt, Human
uagacaggccccuccuuc

SEQ ID NO: 1062648 - RNA, 25 nt, Human
uagacaggccccuccuucgcaguuc

SEQ ID NO: 1062649 - RNA, 19 nt, Human
agcaggugcuccacgcucu

SEQ ID NO: 1062650 - RNA, 25 nt, Human
agggaagaacuuugaauuuaauugu

SEQ ID NO: 1062651 - RNA, 19 nt, Human
ccugguagcggcugaagcu

SEQ ID NO: 1062652 - RNA, 24 nt, Human
gacccggccguagcgcccgggggu

SEQ ID NO: 1062653 - RNA, 20 nt, Human
gggaagaggcuguuaacgag

SEQ ID NO: 1062654 - RNA, 24 nt, Human
uaaggugaaaauaugccaagcaga

SEQ ID NO: 1062655 - RNA, 23 nt, Human
ucuuggccaggcugugcuggggc

SEQ ID NO: 1062656 - RNA, 18 nt, Human
ucuuuggucuugauaaga

SEQ ID NO: 1062657 - RNA, 18 nt, Human
uggaaggaggugacgaug

SEQ ID NO: 1062658 - RNA, 19 nt, Human
uggaaggaggugacgauga

SEQ ID NO: 1062659 - RNA, 18 nt, Human
uggccaggcugugcuggg

SEQ ID NO: 1062660 - RNA, 19 nt, Human
uggccaggcugugcugggg

SEQ ID NO: 1062661 - RNA, 22 nt, Human
uggcuuucuggaaggaggugac

SEQ ID NO: 1062662 - RNA, 20 nt, Human
ugugcuggggcgccagcagg

SEQ ID NO: 1062663 - RNA, 24 nt, Human
uuaacauaaucucuuuggucuuga

SEQ ID NO: 1062664 - RNA, 24 nt, Human
aaguuuaucacccagguucugguu

SEQ ID NO: 1062665 - RNA, 22 nt, Human
auauaccucuagaacaaaacua

SEQ ID NO: 1062666 - RNA, 23 nt, Human
caaacuaagacuuuccuucccaa

SEQ ID NO: 1062667 - RNA, 24 nt, Human
caaacuaagacuuuccuucccaaa

SEQ ID NO: 1062668 - RNA, 19 nt, Human
cagccuuguuggagaaaau

SEQ ID NO: 1062669 - RNA, 21 nt, Human
cccaaagaugguuuccucccc

SEQ ID NO: 1062670 - RNA, 19 nt, Human
cuucccaaagaugguuucc

SEQ ID NO: 1062671 - RNA, 26 nt, Human
uacuguuuuuuuuuaagauuaugaga

SEQ ID NO: 1062672 - RNA, 20 nt, Human
uagaacaaaacuacauuaac

SEQ ID NO: 1062673 - RNA, 23 nt, Human
uagaacaaaacuacauuaacauu

SEQ ID NO: 1062674 - RNA, 24 nt, Human
uaucucagccuuguuggagaaaau

SEQ ID NO: 1062675 - RNA, 22 nt, Human
ugaaaguacacucugaaagcua

SEQ ID NO: 1062676 - RNA, 25 nt, Human
ugauuuaucauuauaaguucacaug

SEQ ID NO: 1062677 - RNA, 22 nt, Human
ugcuaaaaaguuuaucacccag

SEQ ID NO: 1062678 - RNA, 19 nt, Human
uucauauaaacauaaacuu

SEQ ID NO: 1062679 - RNA, 19 nt, Human
uuccuucccaaagaugguu

SEQ ID NO: 1062680 - RNA, 27 nt, Human
uuuaacugaacuguuauuauuucuaau

SEQ ID NO: 1062681 - RNA, 24 nt, Human
uuuguugagccacauuuugagggu

SEQ ID NO: 1062682 - RNA, 19 nt, Human
aaagugcuaggauuacagg

SEQ ID NO: 1062683 - RNA, 24 nt, Human
aaagugcuaggauuacagguguga

SEQ ID NO: 1062684 - RNA, 26 nt, Human
aagugcuaggauuacaggugugagcc

SEQ ID NO: 1062685 - RNA, 24 nt, Human
aaugcagucgugugaucuuggcuc

SEQ ID NO: 1062686 - RNA, 20 nt, Human
acaccacugcacuccagucu

SEQ ID NO: 1062687 - RNA, 24 nt, Human
acaccacugcacuccagucugggc

SEQ ID NO: 1062688 - RNA, 22 nt, Human
accacugcacuccagucugggc

SEQ ID NO: 1062689 - RNA, 21 nt, Human
accgcacccgacccucuuugc

SEQ ID NO: 1062690 - RNA, 18 nt, Human
acgggguuucacuguguu

SEQ ID NO: 1062691 - RNA, 19 nt, Human
acgggguuucacuguguua

SEQ ID NO: 1062692 - RNA, 20 nt, Human
acgggguuucacuguguuag

SEQ ID NO: 1062693 - RNA, 18 nt, Human
acugcaagcuccgccucc

SEQ ID NO: 1062694 - RNA, 24 nt, Human
acugcacuccagucugggcaacag

SEQ ID NO: 1062695 - RNA, 24 nt, Human
acugcacuccagucugggcaacag

SEQ ID NO: 1062696 - RNA, 24 nt, Human
agauggucuugaucuccugaccuc

SEQ ID NO: 1062697 - RNA, 24 nt, Human
agcugcuugaaaggcugagguggg

SEQ ID NO: 1062698 - RNA, 24 nt, Human
aggauugcuugagcucaggaguuc

SEQ ID NO: 1062699 - RNA, 24 nt, Human
aggcugaggugggaggauugcuug

SEQ ID NO: 1062700 - RNA, 18 nt, Human
agguacaguggcucccaa

SEQ ID NO: 1062701 - RNA, 22 nt, Human
aggugggaggauugcuugagcu

SEQ ID NO: 1062702 - RNA, 24 nt, Human
aucacaccacugcacuccagucug

SEQ ID NO: 1062703 - RNA, 24 nt, Human
caaagugcuaggauuacaggugug

SEQ ID NO: 1062704 - RNA, 21 nt, Human
cacaccacugcacuccagucu

SEQ ID NO: 1062705 - RNA, 24 nt, Human
caccacugcacuccagucugggca

SEQ ID NO: 1062706 - RNA, 21 nt, Human
cacccugaccucccacagcuc

SEQ ID NO: 1062707 - RNA, 23 nt, Human
cacuccagucugggcaacagagc

SEQ ID NO: 1062708 - RNA, 24 nt, Human
cacuccagucugggcaacagagcg

SEQ ID NO: 1062709 - RNA, 19 nt, Human
cacugcacuccagucuggg

SEQ ID NO: 1062710 - RNA, 21 nt, Human
cacugcacuccagucugggca

SEQ ID NO: 1062711 - RNA, 22 nt, Human
cacugcacuccagucugggcaa

SEQ ID NO: 1062712 - RNA, 23 nt, Human
cacugcacuccagucugggcaac

SEQ ID NO: 1062713 - RNA, 24 nt, Human
cacugcacuccagucugggcaaca

SEQ ID NO: 1062714 - RNA, 24 nt, Human
cacuguguuagccaagauggucuu

SEQ ID NO: 1062715 - RNA, 18 nt, Human
caggaguucuaggcuaua

SEQ ID NO: 1062716 - RNA, 21 nt, Human
ccaaagugcuaggauuacagg

SEQ ID NO: 1062717 - RNA, 24 nt, Human
ccaaagugcuaggauuacaggugu

SEQ ID NO: 1062718 - RNA, 19 nt, Human
ccaacuguacuccuagcug

SEQ ID NO: 1062719 - RNA, 18 nt, Human
ccaagccaucacauagaa

SEQ ID NO: 1062720 - RNA, 20 nt, Human
ccacugcacuccagucuggg

SEQ ID NO: 1062721 - RNA, 21 nt, Human
ccacugcacuccagucugggc

SEQ ID NO: 1062722 - RNA, 23 nt, Human
ccacugcacuccagucugggcaa

SEQ ID NO: 1062723 - RNA, 24 nt, Human
ccacugcacuccagucugggcaac

SEQ ID NO: 1062724 - RNA, 21 nt, Human
cccacccugaccucccacagc

SEQ ID NO: 1062725 - RNA, 20 nt, Human
cccgacccucuuugcucuau

SEQ ID NO: 1062726 - RNA, 24 nt, Human
ccugccucagccuccugagcagcu

SEQ ID NO: 1062727 - RNA, 19 nt, Human
cgccucccggguuuacgcc

SEQ ID NO: 1062728 - RNA, 24 nt, Human
cgcucugucacccaggcuagaaug

SEQ ID NO: 1062729 - RNA, 19 nt, Human
cgggguuucacuguguuag

SEQ ID NO: 1062730 - RNA, 21 nt, Human
cuaggacuacaggaacccgcc

SEQ ID NO: 1062731 - RNA, 23 nt, Human
cucccaacuguacuccuagcugc

SEQ ID NO: 1062732 - RNA, 24 nt, Human
cuccugaccucaugauccgccugc

SEQ ID NO: 1062733 - RNA, 24 nt, Human
cuccugagcagcuaggacuacagg

SEQ ID NO: 1062734 - RNA, 23 nt, Human
cugccucggccucccaaagugcu

SEQ ID NO: 1062735 - RNA, 21 nt, Human
cugcuugaaaggcugaggugg

SEQ ID NO: 1062736 - RNA, 20 nt, Human
cuugagcucaggaguucuag

SEQ ID NO: 1062737 - RNA, 19 nt, Human
gaacccgccaccacgccug

SEQ ID NO: 1062738 - RNA, 19 nt, Human
gaagaaucucccucagacu

SEQ ID NO: 1062739 - RNA, 22 nt, Human
gaccucaugauccgccugccuc

SEQ ID NO: 1062740 - RNA, 22 nt, Human
gaccucaugauccgccugccuc

SEQ ID NO: 1062741 - RNA, 24 nt, Human
gaccucaugauccgccugccucgg

SEQ ID NO: 1062742 - RNA, 21 nt, Human
gagacagagucucgcucuguc

SEQ ID NO: 1062743 - RNA, 20 nt, Human
gagcagcuaggacuacagga

SEQ ID NO: 1062744 - RNA, 26 nt, Human
gagcagcuaggacuacaggaacccgc

SEQ ID NO: 1062745 - RNA, 24 nt, Human
gaggugggaggauugcuugagcuc

SEQ ID NO: 1062746 - RNA, 18 nt, Human
gauuacaggugugagcca

SEQ ID NO: 1062747 - RNA, 20 nt, Human
gauuacaggugugagccacc

SEQ ID NO: 1062748 - RNA, 23 nt, Human
gauuacaggugugagccaccgca

SEQ ID NO: 1062749 - RNA, 24 nt, Human
gcacuccagucugggcaacagagc

SEQ ID NO: 1062750 - RNA, 19 nt, Human
gccauucuccugccucagc

SEQ ID NO: 1062751 - RNA, 25 nt, Human
gccucccggguuuacgccauucucc

SEQ ID NO: 1062752 - RNA, 21 nt, Human
gccuccugagcagcuaggacu

SEQ ID NO: 1062753 - RNA, 23 nt, Human
gccuggcuaauuuuuuguauuuu

SEQ ID NO: 1062754 - RNA, 25 nt, Human
gcucugucacccaggcuagaaugca

SEQ ID NO: 1062755 - RNA, 22 nt, Human
ggacuacaggaacccgccacca

SEQ ID NO: 1062756 - RNA, 19 nt, Human
ggagaguuucccaauuaga

SEQ ID NO: 1062757 - RNA, 22 nt, Human
ggaggauugcuugagcucagga

SEQ ID NO: 1062758 - RNA, 22 nt, Human
ggauuacaggugugagccaccg

SEQ ID NO: 1062759 - RNA, 23 nt, Human
ggauugcuugagcucaggaguuc

SEQ ID NO: 1062760 - RNA, 18 nt, Human
gggguuucacuguguuag

SEQ ID NO: 1062761 - RNA, 23 nt, Human
guagagacgggguuucacugugu

SEQ ID NO: 1062762 - RNA, 18 nt, Human
gugaagcuacuuuaacca

SEQ ID NO: 1062763 - RNA, 23 nt, Human
guuaugaucacaccacugcacuu

SEQ ID NO: 1062764 - RNA, 21 nt, Human
uaaauggagaguuucccaauu

SEQ ID NO: 1062765 - RNA, 24 nt, Human
uaacacaaacauauuauucacugu

SEQ ID NO: 1062766 - RNA, 23 nt, Human
uaaccaucuauuaaaggaacaac

SEQ ID NO: 1062767 - RNA, 24 nt, Human
uaaccaucuauuaaaggaacaaca

SEQ ID NO: 1062768 - RNA, 24 nt, Human
uaauuuuuuguauuuuuaguagag

SEQ ID NO: 1062769 - RNA, 22 nt, Human
uacaggaacccgccaccacgcc

SEQ ID NO: 1062770 - RNA, 23 nt, Human
uacaggugugagccaccgcaccc

SEQ ID NO: 1062771 - RNA, 22 nt, Human
uacucuuaaucucacauacaga

SEQ ID NO: 1062772 - RNA, 23 nt, Human
uagaaugcagucgugugaucuug

SEQ ID NO: 1062773 - RNA, 24 nt, Human
uagaaugcagucgugugaucuugg

SEQ ID NO: 1062774 - RNA, 24 nt, Human
uagcugcuugaaaggcugaggugg

SEQ ID NO: 1062775 - RNA, 25 nt, Human
uaggaaaugccuaauuuacuaccau

SEQ ID NO: 1062776 - RNA, 24 nt, Human
uaggacuacaggaacccgccacca

SEQ ID NO: 1062777 - RNA, 18 nt, Human
uaggauuacaggugugag

SEQ ID NO: 1062778 - RNA, 19 nt, Human
uaggauuacaggugugagc

SEQ ID NO: 1062779 - RNA, 22 nt, Human
uaggauuacaggugugagccac

SEQ ID NO: 1062780 - RNA, 23 nt, Human
uaggauuacaggugugagccacc

SEQ ID NO: 1062781 - RNA, 24 nt, Human
uaggauuacaggugugagccaccg

SEQ ID NO: 1062782 - RNA, 20 nt, Human
uaguagagacgggguuucac

SEQ ID NO: 1062783 - RNA, 23 nt, Human
uaguagagacgggguuucacugu

SEQ ID NO: 1062784 - RNA, 24 nt, Human
uaguagagacgggguuucacugug

SEQ ID NO: 1062785 - RNA, 21 nt, Human
uauaaagcaauaaaucgcuua

SEQ ID NO: 1062786 - RNA, 23 nt, Human
ucacaccacugcacuccagucug

SEQ ID NO: 1062787 - RNA, 19 nt, Human
ucacccaggcuagaaugca

SEQ ID NO: 1062788 - RNA, 18 nt, Human
ucacugcaagcuccgccu

SEQ ID NO: 1062789 - RNA, 19 nt, Human
ucacugcaagcuccgccuc

SEQ ID NO: 1062790 - RNA, 24 nt, Human
ucacugcaagcuccgccucccggg

SEQ ID NO: 1062791 - RNA, 24 nt, Human
ucacuguguuagccaagauggucu

SEQ ID NO: 1062792 - RNA, 19 nt, Human
uccagucccacccugaccu

SEQ ID NO: 1062793 - RNA, 23 nt, Human
uccagucugggcaacagagcgag

SEQ ID NO: 1062794 - RNA, 24 nt, Human
uccagucugggcaacagagcgagg

SEQ ID NO: 1062795 - RNA, 23 nt, Human
ucccaaagugcuaggauuacagg

SEQ ID NO: 1062796 - RNA, 18 nt, Human
ucccaacuguacuccuag

SEQ ID NO: 1062797 - RNA, 21 nt, Human
ucccggguuuacgccauucuc

SEQ ID NO: 1062798 - RNA, 24 nt, Human
ucccggguuuacgccauucuccug

SEQ ID NO: 1062799 - RNA, 18 nt, Human
ucggccucccaaagugcu

SEQ ID NO: 1062800 - RNA, 19 nt, Human
ucucgcucugucacccagg

SEQ ID NO: 1062801 - RNA, 23 nt, Human
ucucgcucugucacccaggcuag

SEQ ID NO: 1062802 - RNA, 26 nt, Human
ucucgcucugucacccaggcuagaau

SEQ ID NO: 1062803 - RNA, 27 nt, Human
ucucgcucugucacccaggcuagaaug

SEQ ID NO: 1062804 - RNA, 24 nt, Human
ucugucacccaggcuagaaugcag

SEQ ID NO: 1062805 - RNA, 22 nt, Human
ugaaaggcugaggugggaggau

SEQ ID NO: 1062806 - RNA, 21 nt, Human
ugagccaccgcacccgacccu

SEQ ID NO: 1062807 - RNA, 20 nt, Human
ugaggugggaggauugcuug

SEQ ID NO: 1062808 - RNA, 22 nt, Human
ugaggugggaggauugcuugag

SEQ ID NO: 1062809 - RNA, 23 nt, Human
ugaggugggaggauugcuugagc

SEQ ID NO: 1062810 - RNA, 23 nt, Human
ugaggugggaggauugcuugagc

SEQ ID NO: 1062811 - RNA, 24 nt, Human
ugaggugggaggauugcuugagcu

SEQ ID NO: 1062812 - RNA, 25 nt, Human
ugcagcagccaaaaaggcaggugau

SEQ ID NO: 1062813 - RNA, 23 nt, Human
ugccucagccuccugagcagcua

SEQ ID NO: 1062814 - RNA, 24 nt, Human
ugccucagccuccugagcagcuag

SEQ ID NO: 1062815 - RNA, 21 nt, Human
ugccucggccucccaaagugc

SEQ ID NO: 1062816 - RNA, 23 nt, Human
ugccucggccucccaaagugcua

SEQ ID NO: 1062817 - RNA, 24 nt, Human
ugccucggccucccaaagugcuag

SEQ ID NO: 1062818 - RNA, 24 nt, Human
ugcuaggauuacaggugugagcca

SEQ ID NO: 1062819 - RNA, 18 nt, Human
uggcucacugcaagcucc

SEQ ID NO: 1062820 - RNA, 21 nt, Human
uguauuuuuaguagagacggg

SEQ ID NO: 1062821 - RNA, 18 nt, Human
uuaguagagacgggguuu

SEQ ID NO: 1062822 - RNA, 21 nt, Human
uuaguagagacgggguuucac

SEQ ID NO: 1062823 - RNA, 21 nt, Human
uuaguagagacgggguuucac

SEQ ID NO: 1062824 - RNA, 24 nt, Human
uuaguagagacgggguuucacugu

SEQ ID NO: 1062825 - RNA, 20 nt, Human
uugaaaggcugaggugggag

SEQ ID NO: 1062826 - RNA, 24 nt, Human
uugcuugagcucaggaguucuagg

SEQ ID NO: 1062827 - RNA, 19 nt, Human
uuucacuguguuagccaag

SEQ ID NO: 1062828 - RNA, 24 nt, Human
uuuuuaguagagacgggguuucac

SEQ ID NO: 1062829 - RNA, 21 nt, Human
uuuuuguauuuuuaguagaga

SEQ ID NO: 1062830 - RNA, 24 nt, Human
uuuuuuguauuuuuaguagagacg

SEQ ID NO: 1062831 - RNA, 19 nt, Human
aaaccagcuccaaacucaa

SEQ ID NO: 1062832 - RNA, 24 nt, Human
aaaccagcuccaaacucaaaccag

SEQ ID NO: 1062833 - RNA, 21 nt, Human
aaccagcuccaaacucaaacc

SEQ ID NO: 1062834 - RNA, 24 nt, Human
ucaaaaccagcuccaaacucaaac

SEQ ID NO: 1062835 - RNA, 25 nt, Human
uccaaacucaaaccaguuagggaug

SEQ ID NO: 1062836 - RNA, 22 nt, Human
acccuggaucccuuccaggagc

SEQ ID NO: 1062837 - RNA, 22 nt, Human
acccuggaucccuuccaggagc

SEQ ID NO: 1062838 - RNA, 20 nt, Human
ccucuggggacaucuugggg

SEQ ID NO: 1062839 - RNA, 18 nt, Human
ccuggaucccuuccagga

SEQ ID NO: 1062840 - RNA, 23 nt, Human
cguggugacccuggaucccuucc

SEQ ID NO: 1062841 - RNA, 19 nt, Human
gcagggcaaagacaacuuc

SEQ ID NO: 1062842 - RNA, 18 nt, Human
ggagauacaauauccccu

SEQ ID NO: 1062843 - RNA, 19 nt, Human
ggaguguuuccaaagauuc

SEQ ID NO: 1062844 - RNA, 21 nt, Human
uccaaagauucaaaguuugac

SEQ ID NO: 1062845 - RNA, 24 nt, Human
uccucuguccucucaucguuacuc

SEQ ID NO: 1062846 - RNA, 24 nt, Human
ucuucuuccucuguccucucaucg

SEQ ID NO: 1062847 - RNA, 18 nt, Human
ugacccuggaucccuucc

SEQ ID NO: 1062848 - RNA, 21 nt, Human
ugcaccuuuuacaucugggcu

SEQ ID NO: 1062849 - RNA, 19 nt, Human
ugggcucuggagcccuaug

SEQ ID NO: 1062850 - RNA, 24 nt, Human
uggugaacucuucuuccucugucc

SEQ ID NO: 1062851 - RNA, 20 nt, Human
aagcuuaaagugagaagucc

SEQ ID NO: 1062852 - RNA, 18 nt, Human
agccacaccggggugcca

SEQ ID NO: 1062853 - RNA, 20 nt, Human
cagagccacaccggggugcc

SEQ ID NO: 1062854 - RNA, 21 nt, Human
cagcagcagugccacguggag

SEQ ID NO: 1062855 - RNA, 18 nt, Human
cggggugccagcugggaa

SEQ ID NO: 1062856 - RNA, 18 nt, Human
cugggaagccuuccugcu

SEQ ID NO: 1062857 - RNA, 18 nt, Human
ggaaucacagauguaagc

SEQ ID NO: 1062858 - RNA, 26 nt, Human
ucagcagcagugccacguggagaguc

SEQ ID NO: 1062859 - RNA, 21 nt, Human
uuagcuguucugugaagaguu

SEQ ID NO: 1062860 - RNA, 22 nt, Human
aaccuccuucuccuugcaaaac

SEQ ID NO: 1062861 - RNA, 23 nt, Human
aagcagcagacagccugacagaa

SEQ ID NO: 1062862 - RNA, 23 nt, Human
aggaaacccaggccgaggucgcc

SEQ ID NO: 1062863 - RNA, 20 nt, Human
aggugcugggguuggggacc

SEQ ID NO: 1062864 - RNA, 20 nt, Human
ccuugaggugcugggguugg

SEQ ID NO: 1062865 - RNA, 21 nt, Human
cgcagcucccgcguacacgug

SEQ ID NO: 1062866 - RNA, 21 nt, Human
cguggccggaucugggcugga

SEQ ID NO: 1062867 - RNA, 18 nt, Human
cugggguuggggaccaag

SEQ ID NO: 1062868 - RNA, 19 nt, Human
cuugcaaaacccucacacc

SEQ ID NO: 1062869 - RNA, 20 nt, Human
cuugcaaaacccucacacca

SEQ ID NO: 1062870 - RNA, 21 nt, Human
cuuucuggagcucaucgaaca

SEQ ID NO: 1062871 - RNA, 23 nt, Human
gacuuucuuuuccugcuccugcu

SEQ ID NO: 1062872 - RNA, 19 nt, Human
gagcguggucgacgaagcc

SEQ ID NO: 1062873 - RNA, 20 nt, Human
gcgcugggguccucuggcuc

SEQ ID NO: 1062874 - RNA, 24 nt, Human
uaaaccuccuucuccuugcaaaac

SEQ ID NO: 1062875 - RNA, 21 nt, Human
uaugaauaaaccuccuucucc

SEQ ID NO: 1062876 - RNA, 19 nt, Human
ucgcaucgucuucuuucug

SEQ ID NO: 1062877 - RNA, 20 nt, Human
ucuccuccagcuucagucac

SEQ ID NO: 1062878 - RNA, 21 nt, Human
ucuccuugcaaaacccucaca

SEQ ID NO: 1062879 - RNA, 25 nt, Human
ugacacccacaauugugaagagaga

SEQ ID NO: 1062880 - RNA, 19 nt, Human
ugacagaaaguucaugcuc

SEQ ID NO: 1062881 - RNA, 25 nt, Human
ugacagaaaguucaugcucacccaa

SEQ ID NO: 1062882 - RNA, 18 nt, Human
ugcaaaacccucacacca

SEQ ID NO: 1062883 - RNA, 20 nt, Human
uggaauuucugagaaauccu

SEQ ID NO: 1062884 - RNA, 19 nt, Human
uggacuucgggucggacgc

SEQ ID NO: 1062885 - RNA, 23 nt, Human
uggcuccugguccgaguuccucc

SEQ ID NO: 1062886 - RNA, 19 nt, Human
ugugcuccuugaggugcug

SEQ ID NO: 1062887 - RNA, 22 nt, Human
uucaugcucacccaagaaaaug

SEQ ID NO: 1062888 - RNA, 22 nt, Human
uucuuugugcuuaaaaugaaua

SEQ ID NO: 1062889 - RNA, 18 nt, Human
uuggaaauucuuugugcu

SEQ ID NO: 1062890 - RNA, 18 nt, Human
uuucugagaaauccuugg

SEQ ID NO: 1062891 - RNA, 24 nt, Human
aaaaaaacaaaaaaaacacguugg

SEQ ID NO: 1062892 - RNA, 26 nt, Human
aaaaaaacaaaaaaacaaaaaaaaca

SEQ ID NO: 1062893 - RNA, 26 nt, Human
aaaaaaacaaaaaaacaaaaaaaaca

SEQ ID NO: 1062894 - RNA, 26 nt, Human
aaaaaacaaaaaaacaaaaaaaacac

SEQ ID NO: 1062895 - RNA, 28 nt, Human
aaaaaacaaaaaaacaaaaaaacaaaaa

SEQ ID NO: 1062896 - RNA, 20 nt, Human
aaaaagggaauucccucuag

SEQ ID NO: 1062897 - RNA, 23 nt, Human
aaaacaaaaaaaacaaaaaaaca

SEQ ID NO: 1062898 - RNA, 28 nt, Human
aaaacaaaaaaaacaaaaaaacaaaaaa

SEQ ID NO: 1062899 - RNA, 20 nt, Human
aaaacaaaaaaacaaaaaaa

SEQ ID NO: 1062900 - RNA, 20 nt, Human
aaaacaaaaaaacaaaaaaa

SEQ ID NO: 1062901 - RNA, 22 nt, Human
aaaacaaaaaaacaaaaaaaca

SEQ ID NO: 1062902 - RNA, 26 nt, Human
aaaacaaaaaaacaaaaaaacaaaaa

SEQ ID NO: 1062903 - RNA, 21 nt, Human
aaaagcaggcaaguuuagcua

SEQ ID NO: 1062904 - RNA, 22 nt, Human
aaacaaaaaaaacaaaaaaaca

SEQ ID NO: 1062905 - RNA, 25 nt, Human
aaacaaaaaaaacacguuggucugg

SEQ ID NO: 1062906 - RNA, 23 nt, Human
aaacauugggaauuaccacgacc

SEQ ID NO: 1062907 - RNA, 20 nt, Human
aaccacgauuuucccauuua

SEQ ID NO: 1062908 - RNA, 27 nt, Human
aagcuucuuuucaaaccacgauuuucc

SEQ ID NO: 1062909 - RNA, 20 nt, Human
aauuaccacgacccccaagu

SEQ ID NO: 1062910 - RNA, 25 nt, Human
acaaaaaaacaaaaaaaacaaaaaa

SEQ ID NO: 1062911 - RNA, 23 nt, Human
acaaaaaaacaaaaaaacaaaaa

SEQ ID NO: 1062912 - RNA, 19 nt, Human
accacgacccccaagugcu

SEQ ID NO: 1062913 - RNA, 22 nt, Human
agaaaccaggaccuuguuaaau

SEQ ID NO: 1062914 - RNA, 18 nt, Human
agagagaaaaugcccaag

SEQ ID NO: 1062915 - RNA, 21 nt, Human
agaugacgauaagagucuaaa

SEQ ID NO: 1062916 - RNA, 21 nt, Human
agcaucaggaacaggcaagga

SEQ ID NO: 1062917 - RNA, 19 nt, Human
agguuugggagguuuagaa

SEQ ID NO: 1062918 - RNA, 18 nt, Human
aucucacacuuuuccuuc

SEQ ID NO: 1062919 - RNA, 24 nt, Human
aucuccuuccaggucaucguuuca

SEQ ID NO: 1062920 - RNA, 28 nt, Human
caaaaaaaacaaaaaaacaaaaaaacaa

SEQ ID NO: 1062921 - RNA, 19 nt, Human
caagagaaaccaggaccuu

SEQ ID NO: 1062922 - RNA, 21 nt, Human
caagguuucaauacaaugugg

SEQ ID NO: 1062923 - RNA, 19 nt, Human
caccacaacuuuuccucua

SEQ ID NO: 1062924 - RNA, 22 nt, Human
caccacaacuuuuccucuaaaa

SEQ ID NO: 1062925 - RNA, 23 nt, Human
caccaguacccccauccucagcc

SEQ ID NO: 1062926 - RNA, 20 nt, Human
cagcagcaugcaaaauaguu

SEQ ID NO: 1062927 - RNA, 24 nt, Human
cagccuccuggagacuaaaacaac

SEQ ID NO: 1062928 - RNA, 24 nt, Human
cagcucuccauggcugagagagaa

SEQ ID NO: 1062929 - RNA, 18 nt, Human
ccacaacuuuuccucuaa

SEQ ID NO: 1062930 - RNA, 22 nt, Human
ccccauccucagccagaaaguc

SEQ ID NO: 1062931 - RNA, 19 nt, Human
ccccugggggguaaaaaaa

SEQ ID NO: 1062932 - RNA, 20 nt, Human
cccguggagcagugggaagg

SEQ ID NO: 1062933 - RNA, 23 nt, Human
cccuauuaccuggugcaaaauga

SEQ ID NO: 1062934 - RNA, 20 nt, Human
cccugucccuauuuauccac

SEQ ID NO: 1062935 - RNA, 18 nt, Human
ccguucccguuccugagu

SEQ ID NO: 1062936 - RNA, 24 nt, Human
ccuauagucucacucccaacuacc

SEQ ID NO: 1062937 - RNA, 20 nt, Human
ccuccccuacugcccaacca

SEQ ID NO: 1062938 - RNA, 18 nt, Human
ccuucucccucccucccc

SEQ ID NO: 1062939 - RNA, 28 nt, Human
cucaagggaagcuaaaaaaacaaaaaaa

SEQ ID NO: 1062940 - RNA, 18 nt, Human
cucaucacuucccaaaag

SEQ ID NO: 1062941 - RNA, 22 nt, Human
cuggcagccuccuggagacuaa

SEQ ID NO: 1062942 - RNA, 21 nt, Human
cuucccaaaagcuucuuuuca

SEQ ID NO: 1062943 - RNA, 21 nt, Human
cuuguuaaauaguucucucca

SEQ ID NO: 1062944 - RNA, 22 nt, Human
cuuuauggccuauagucucacu

SEQ ID NO: 1062945 - RNA, 24 nt, Human
gaaaacauugggaauuaccacgac

SEQ ID NO: 1062946 - RNA, 23 nt, Human
gaauucauauaugccacaauagg

SEQ ID NO: 1062947 - RNA, 24 nt, Human
gacucaucacuucccaaaagcuuc

SEQ ID NO: 1062948 - RNA, 20 nt, Human
gacugguuuggaaacauagg

SEQ ID NO: 1062949 - RNA, 18 nt, Human
gagaauucauauaugcca

SEQ ID NO: 1062950 - RNA, 18 nt, Human
gcuguagucccuuucucu

SEQ ID NO: 1062951 - RNA, 25 nt, Human
ggaauucccucuaggguggcccuuc

SEQ ID NO: 1062952 - RNA, 24 nt, Human
ggagaaaagcacaggauguagagg

SEQ ID NO: 1062953 - RNA, 20 nt, Human
gggaagcuaaaaaaacaaaa

SEQ ID NO: 1062954 - RNA, 21 nt, Human
ggggcugaucagguuugggag

SEQ ID NO: 1062955 - RNA, 24 nt, Human
guaaaaaaaaaaaaaaaagggaau

SEQ ID NO: 1062956 - RNA, 23 nt, Human
guggugacauaacgcaccacaac

SEQ ID NO: 1062957 - RNA, 28 nt, Human
uaaaaaaacaaaaaaacaaaaaaaacaa

SEQ ID NO: 1062958 - RNA, 19 nt, Human
uaaaaaguagaaaucucac

SEQ ID NO: 1062959 - RNA, 20 nt, Human
uaaaagcaggcaaguuuagc

SEQ ID NO: 1062960 - RNA, 26 nt, Human
uaccacgacccccaagugcuuccggc

SEQ ID NO: 1062961 - RNA, 26 nt, Human
uacccccauccucagccagaaagucu

SEQ ID NO: 1062962 - RNA, 19 nt, Human
uaccuggugcaaaaugacu

SEQ ID NO: 1062963 - RNA, 20 nt, Human
uacuguguugcaagagaaac

SEQ ID NO: 1062964 - RNA, 22 nt, Human
uagaaaggguaaaacuaggaca

SEQ ID NO: 1062965 - RNA, 19 nt, Human
uagaaaucucacacuuuuc

SEQ ID NO: 1062966 - RNA, 28 nt, Human
uaggguggcccccaaaacucagaauuaa

SEQ ID NO: 1062967 - RNA, 24 nt, Human
uauucggcauaaucuucucccuca

SEQ ID NO: 1062968 - RNA, 23 nt, Human
uauuuugguccaaugcaguccca

SEQ ID NO: 1062969 - RNA, 21 nt, Human
uccaagaguggaaaauuuauu

SEQ ID NO: 1062970 - RNA, 27 nt, Human
uccaccaguacccccauccucagccag

SEQ ID NO: 1062971 - RNA, 23 nt, Human
uccaccauccaagaccauccauu

SEQ ID NO: 1062972 - RNA, 20 nt, Human
uccagggguuauaucacucu

SEQ ID NO: 1062973 - RNA, 31 nt, Human
uccauggcugagagagaaaaugcccaagacc

SEQ ID NO: 1062974 - RNA, 18 nt, Human
ucccucuaggguggcccc

SEQ ID NO: 1062975 - RNA, 22 nt, Human
ucccucuaggguggcccccaaa

SEQ ID NO: 1062976 - RNA, 19 nt, Human
ucuagagcacucugaucua

SEQ ID NO: 1062977 - RNA, 19 nt, Human
ucuccauuaccguuuauuc

SEQ ID NO: 1062978 - RNA, 20 nt, Human
ucucccucccuccccuacug

SEQ ID NO: 1062979 - RNA, 20 nt, Human
ucucuccuucgugcauuucu

SEQ ID NO: 1062980 - RNA, 18 nt, Human
ucugaucuauaaaagggg

SEQ ID NO: 1062981 - RNA, 21 nt, Human
ucuggauagagguuuugauuu

SEQ ID NO: 1062982 - RNA, 20 nt, Human
ugaguuuuauuuugucuugu

SEQ ID NO: 1062983 - RNA, 19 nt, Human
ugccacaauaggauaaaaa

SEQ ID NO: 1062984 - RNA, 19 nt, Human
ugcucucgaauguuccagg

SEQ ID NO: 1062985 - RNA, 23 nt, Human
ugcuuccuccaccaguaccccca

SEQ ID NO: 1062986 - RNA, 23 nt, Human
uggagcagugggaaggauggaac

SEQ ID NO: 1062987 - RNA, 21 nt, Human
uggcagccuccuggagacuaa

SEQ ID NO: 1062988 - RNA, 21 nt, Human
ugggggguaaaaaaaaaaaaa

SEQ ID NO: 1062989 - RNA, 28 nt, Human
ugggggguaaaaaaaaaaaaaaaaggga

SEQ ID NO: 1062990 - RNA, 25 nt, Human
uggucuggccaccucaugaauccaa

SEQ ID NO: 1062991 - RNA, 19 nt, Human
ugucucucccgagcagccc

SEQ ID NO: 1062992 - RNA, 18 nt, Human
ugucuugucuggauagag

SEQ ID NO: 1062993 - RNA, 18 nt, Human
uuauaucacucucauuac

SEQ ID NO: 1062994 - RNA, 24 nt, Human
uuauccaccauccaagaccaucca

SEQ ID NO: 1062995 - RNA, 19 nt, Human
uuauucagauaauguuuga

SEQ ID NO: 1062996 - RNA, 21 nt, Human
uucaaaccacgauuuucccau

SEQ ID NO: 1062997 - RNA, 24 nt, Human
uucaggagauggugaguuuuauuu

SEQ ID NO: 1062998 - RNA, 18 nt, Human
uuccuccaccaguacccc

SEQ ID NO: 1062999 - RNA, 22 nt, Human
uuggagaguggcaaucuuccuc

SEQ ID NO: 1063000 - RNA, 21 nt, Human
uuuauccaccauccaagacca

SEQ ID NO: 1063001 - RNA, 22 nt, Human
uuuccccuauuaccuggugcaa

SEQ ID NO: 1063002 - RNA, 22 nt, Human
uuugcucucgaauguuccaggg

SEQ ID NO: 1063003 - RNA, 23 nt, Human
aaaaagcuuauaaaacaccugaa

SEQ ID NO: 1063004 - RNA, 24 nt, Human
acaccugaaggcuuuaaaaaaaga

SEQ ID NO: 1063005 - RNA, 25 nt, Human
acagaaaaaggccccagcauccaaa

SEQ ID NO: 1063006 - RNA, 18 nt, Human
agacagaaaaaggcccca

SEQ ID NO: 1063007 - RNA, 26 nt, Human
agacagaaaaaggccccagcauccaa

SEQ ID NO: 1063008 - RNA, 24 nt, Human
agacugaucaacuuagauugcaca

SEQ ID NO: 1063009 - RNA, 24 nt, Human
agcaaggaguccucccgaaaggga

SEQ ID NO: 1063010 - RNA, 19 nt, Human
aggccagggcucagggggc

SEQ ID NO: 1063011 - RNA, 19 nt, Human
agggggcuggagcaaggag

SEQ ID NO: 1063012 - RNA, 18 nt, Human
augaacucacacagaacc

SEQ ID NO: 1063013 - RNA, 21 nt, Human
augaacucacacagaacccca

SEQ ID NO: 1063014 - RNA, 23 nt, Human
caaaagaguaagggacagaggua

SEQ ID NO: 1063015 - RNA, 19 nt, Human
cacaagacgaauaaaaacu

SEQ ID NO: 1063016 - RNA, 18 nt, Human
cacacagaaccccacuga

SEQ ID NO: 1063017 - RNA, 20 nt, Human
caccugaaggcuuuaaaaaa

SEQ ID NO: 1063018 - RNA, 23 nt, Human
cacugagagacugaucaacuuag

SEQ ID NO: 1063019 - RNA, 24 nt, Human
cagaaaaaggccccagcauccaaa

SEQ ID NO: 1063020 - RNA, 20 nt, Human
cagcauccaaaagaguaagg

SEQ ID NO: 1063021 - RNA, 20 nt, Human
ccacucccucccggaccucc

SEQ ID NO: 1063022 - RNA, 23 nt, Human
ccaugagcccugccucauuggcc

SEQ ID NO: 1063023 - RNA, 24 nt, Human
cccaaucauccacucccucccgga

SEQ ID NO: 1063024 - RNA, 22 nt, Human
cgaaucaaaagcaaucccauga

SEQ ID NO: 1063025 - RNA, 23 nt, Human
cucuauugaggccuccuccucug

SEQ ID NO: 1063026 - RNA, 22 nt, Human
cucuuugaucgugcccgcugcu

SEQ ID NO: 1063027 - RNA, 22 nt, Human
gaacucacacagaaccccacug

SEQ ID NO: 1063028 - RNA, 22 nt, Human
gcccaaucauccacucccuccc

SEQ ID NO: 1063029 - RNA, 22 nt, Human
gcuggagcaaggaguccucccg

SEQ ID NO: 1063030 - RNA, 24 nt, Human
ggaccuccgaaucaaaagcaaucc

SEQ ID NO: 1063031 - RNA, 19 nt, Human
uaaaaagcuuauaaaacac

SEQ ID NO: 1063032 - RNA, 19 nt, Human
uccaaaagaguaagggaca

SEQ ID NO: 1063033 - RNA, 21 nt, Human
uccaaaagaguaagggacaga

SEQ ID NO: 1063034 - RNA, 18 nt, Human
uccacccucagccaagga

SEQ ID NO: 1063035 - RNA, 18 nt, Human
ucccucuucaaggcacuc

SEQ ID NO: 1063036 - RNA, 24 nt, Human
ucucuuugaucgugcccgcugcuc

SEQ ID NO: 1063037 - RNA, 19 nt, Human
uuccucaggaagcccaauc

SEQ ID NO: 1063038 - RNA, 24 nt, Human
uucucacuuccucaggaagcccaa

SEQ ID NO: 1063039 - RNA, 19 nt, Human
uugagccaggugucucuuu

SEQ ID NO: 1063040 - RNA, 23 nt, Human
ggugaccaaaagguaagguacuu

SEQ ID NO: 1063041 - RNA, 19 nt, Human
acccugcaacccugcacca

SEQ ID NO: 1063042 - RNA, 27 nt, Human
acccugcaacccugcaccacagcucuu

SEQ ID NO: 1063043 - RNA, 23 nt, Human
agacagacagacgcacgcacagg

SEQ ID NO: 1063044 - RNA, 19 nt, Human
aggacccugcaacccugcc

SEQ ID NO: 1063045 - RNA, 24 nt, Human
agggggcggccuaacgacugcccu

SEQ ID NO: 1063046 - RNA, 21 nt, Human
caccacagcucugccacccug

SEQ ID NO: 1063047 - RNA, 26 nt, Human
cacgcacaggcacacacgcagccaug

SEQ ID NO: 1063048 - RNA, 25 nt, Human
cacuggccuccugacggcccuagcc

SEQ ID NO: 1063049 - RNA, 22 nt, Human
cacugggcucccucuggcucca

SEQ ID NO: 1063050 - RNA, 20 nt, Human
cagagacagacagacgcacg

SEQ ID NO: 1063051 - RNA, 23 nt, Human
caggacccugcaacccugcacca

SEQ ID NO: 1063052 - RNA, 24 nt, Human
caugucacccuccugcagcucucu

SEQ ID NO: 1063053 - RNA, 18 nt, Human
ccacacuggccuccugac

SEQ ID NO: 1063054 - RNA, 23 nt, Human
ccaggacccugcaacccugcacc

SEQ ID NO: 1063055 - RNA, 19 nt, Human
cccugggcucccggcacuc

SEQ ID NO: 1063056 - RNA, 25 nt, Human
ccuaacgacugcccuggccccuccu

SEQ ID NO: 1063057 - RNA, 21 nt, Human
ccucacccucgcuuucuucuc

SEQ ID NO: 1063058 - RNA, 21 nt, Human
ccuccuccuccaccucuuccc

SEQ ID NO: 1063059 - RNA, 23 nt, Human
ccucuggcuccaccauuaauccc

SEQ ID NO: 1063060 - RNA, 19 nt, Human
ccuggccccuccuccuccc

SEQ ID NO: 1063061 - RNA, 22 nt, Human
cgcacgcacaggcacacacgca

SEQ ID NO: 1063062 - RNA, 24 nt, Human
cucacugggcucccucuggcucca

SEQ ID NO: 1063063 - RNA, 18 nt, Human
cucgcuuucuucucuacc

SEQ ID NO: 1063064 - RNA, 22 nt, Human
cucuaugucaauccaagucaaa

SEQ ID NO: 1063065 - RNA, 22 nt, Human
cuggccuccugacggcccuagc

SEQ ID NO: 1063066 - RNA, 21 nt, Human
ggcccuagccuuugcuccccu

SEQ ID NO: 1063067 - RNA, 18 nt, Human
gggccagagacagacaga

SEQ ID NO: 1063068 - RNA, 20 nt, Human
ucacugggcucccucuggcu

SEQ ID NO: 1063069 - RNA, 21 nt, Human
uccaccauuaaucccucaccc

SEQ ID NO: 1063070 - RNA, 19 nt, Human
uccccggccacacuggccu

SEQ ID NO: 1063071 - RNA, 24 nt, Human
ucccucuggcuccaccauuaaucc

SEQ ID NO: 1063072 - RNA, 22 nt, Human
ucuggggcugggggccagagac

SEQ ID NO: 1063073 - RNA, 22 nt, Human
ugcccuggccccuccuccucca

SEQ ID NO: 1063074 - RNA, 19 nt, Human
ugcuccccugccuggaaug

SEQ ID NO: 1063075 - RNA, 25 nt, Human
ugggcucccggcacucacugggcuc

SEQ ID NO: 1063076 - RNA, 25 nt, Human
uuccccggccacacuggccuccuga

SEQ ID NO: 1063077 - RNA, 18 nt, Human
uucgaucagauaucugcc

SEQ ID NO: 1063078 - RNA, 26 nt, Human
auaguuuuccuuuccaaguacuuuug

SEQ ID NO: 1063079 - RNA, 22 nt, Human
aucacagucaauccugaucaca

SEQ ID NO: 1063080 - RNA, 25 nt, Human
caauaguuuuccuuuccaaguacuu

SEQ ID NO: 1063081 - RNA, 24 nt, Human
gugcuuccagcaauaguuuuccuu

SEQ ID NO: 1063082 - RNA, 21 nt, Human
uccaaguacuuuuggauccau

SEQ ID NO: 1063083 - RNA, 20 nt, Human
ugcaucaucacagucaaucc

SEQ ID NO: 1063084 - RNA, 27 nt, Human
uggauccaugucucaauuggggacgac

SEQ ID NO: 1063085 - RNA, 18 nt, Human
ucucacggcugcccagcu

SEQ ID NO: 1063086 - RNA, 23 nt, Human
uguuucuauggcaucugguaccu

SEQ ID NO: 1063087 - RNA, 19 nt, Human
uuuuaagcgcaaaaugaga

SEQ ID NO: 1063088 - RNA, 21 nt, Human
aaaaaagacuaaggaaacaag

SEQ ID NO: 1063089 - RNA, 22 nt, Human
aaagacuaaggaaacaaguucc

SEQ ID NO: 1063090 - RNA, 20 nt, Human
aaagucacauauaugcuaga

SEQ ID NO: 1063091 - RNA, 18 nt, Human
aacuacugaaacaaaucu

SEQ ID NO: 1063092 - RNA, 28 nt, Human
aagagaaagggccgaggagaggggcggg

SEQ ID NO: 1063093 - RNA, 20 nt, Human
aagagcucaucugugcuuca

SEQ ID NO: 1063094 - RNA, 22 nt, Human
aaguaaaucugaacaacaucua

SEQ ID NO: 1063095 - RNA, 21 nt, Human
aaguuccuggcauucaagggc

SEQ ID NO: 1063096 - RNA, 24 nt, Human
aauaaacagggaagaaguguccaa

SEQ ID NO: 1063097 - RNA, 20 nt, Human
acagaagaaacuaggucaug

SEQ ID NO: 1063098 - RNA, 20 nt, Human
agaaagggccgaggagaggg

SEQ ID NO: 1063099 - RNA, 19 nt, Human
aggaugagcuguguccuug

SEQ ID NO: 1063100 - RNA, 20 nt, Human
aggcagccuccucucgccuc

SEQ ID NO: 1063101 - RNA, 25 nt, Human
aucugggaugacacagacauaggag

SEQ ID NO: 1063102 - RNA, 18 nt, Human
auuuuaagagacggaguc

SEQ ID NO: 1063103 - RNA, 27 nt, Human
caaaaaaggccacaggugccaaguuag

SEQ ID NO: 1063104 - RNA, 22 nt, Human
caaaguaaaucugaacaacauc

SEQ ID NO: 1063105 - RNA, 22 nt, Human
caagcuauucuucugccucagc

SEQ ID NO: 1063106 - RNA, 24 nt, Human
cacaaaaaaggccacaggugccaa

SEQ ID NO: 1063107 - RNA, 18 nt, Human
ccgcugccgggcagcagc

SEQ ID NO: 1063108 - RNA, 20 nt, Human
ccuccucucgccucucgcug

SEQ ID NO: 1063109 - RNA, 27 nt, Human
ccucucgcugcugugugggccgccgac

SEQ ID NO: 1063110 - RNA, 21 nt, Human
ccuuggagugugaaagagcuc

SEQ ID NO: 1063111 - RNA, 18 nt, Human
cucaagcuauucuucugc

SEQ ID NO: 1063112 - RNA, 21 nt, Human
cucaagcuauucuucugccuc

SEQ ID NO: 1063113 - RNA, 23 nt, Human
cucacagcugccuugaagcaguu

SEQ ID NO: 1063114 - RNA, 18 nt, Human
cucuuuaaaucuauaggu

SEQ ID NO: 1063115 - RNA, 18 nt, Human
cugccucagccuccugag

SEQ ID NO: 1063116 - RNA, 21 nt, Human
cugcugccgcugccgggcagc

SEQ ID NO: 1063117 - RNA, 21 nt, Human
gaggagaggggcggggagaga

SEQ ID NO: 1063118 - RNA, 19 nt, Human
gcacaaaaaaggccacagg

SEQ ID NO: 1063119 - RNA, 22 nt, Human
gcagcagccgaggugcugggaa

SEQ ID NO: 1063120 - RNA, 19 nt, Human
gcuagacuaaagcuccugg

SEQ ID NO: 1063121 - RNA, 26 nt, Human
ggaaauacagacacauaagagcacaa

SEQ ID NO: 1063122 - RNA, 24 nt, Human
gggccgccgacgcagcugcugccg

SEQ ID NO: 1063123 - RNA, 22 nt, Human
gggcggggagagagaggcgccu

SEQ ID NO: 1063124 - RNA, 22 nt, Human
uaaaaaagacuaaggaaacaag

SEQ ID NO: 1063125 - RNA, 20 nt, Human
uaagagcacaaaaaaggcca

SEQ ID NO: 1063126 - RNA, 22 nt, Human
uaagagcacaaaaaaggccagu

SEQ ID NO: 1063127 - RNA, 26 nt, Human
uaagagcacaaaaaaggcuggagacc

SEQ ID NO: 1063128 - RNA, 19 nt, Human
uacagauaguguaguauac

SEQ ID NO: 1063129 - RNA, 28 nt, Human
uauaaaaaagacuaaggaaacaaguucc

SEQ ID NO: 1063130 - RNA, 18 nt, Human
uauauugcucaggcuaga

SEQ ID NO: 1063131 - RNA, 23 nt, Human
uauauugcucaggcuagacuaaa

SEQ ID NO: 1063132 - RNA, 23 nt, Human
uaucucacagcugccuugaagca

SEQ ID NO: 1063133 - RNA, 23 nt, Human
ucaaaguaaaucugaacaacauc

SEQ ID NO: 1063134 - RNA, 20 nt, Human
uccauucacauacuugauuc

SEQ ID NO: 1063135 - RNA, 20 nt, Human
uccugggcucaagcuauucu

SEQ ID NO: 1063136 - RNA, 21 nt, Human
uccugggcucaagcuauucuu

SEQ ID NO: 1063137 - RNA, 24 nt, Human
uccugggcucaagcuauucuucug

SEQ ID NO: 1063138 - RNA, 18 nt, Human
ucgccucucgcugcugug

SEQ ID NO: 1063139 - RNA, 22 nt, Human
ucuauagguucauccuccaucu

SEQ ID NO: 1063140 - RNA, 19 nt, Human
ugaggcagacgcguaacac

SEQ ID NO: 1063141 - RNA, 18 nt, Human
ugccaaguuagaauuaug

SEQ ID NO: 1063142 - RNA, 19 nt, Human
ugccgggcagcagccgagg

SEQ ID NO: 1063143 - RNA, 21 nt, Human
ugccucagccuccugaggcag

SEQ ID NO: 1063144 - RNA, 19 nt, Human
uggagugugaaagagcuca

SEQ ID NO: 1063145 - RNA, 25 nt, Human
uguccuguaguuucuuauagucugg

SEQ ID NO: 1063146 - RNA, 24 nt, Human
uucacaauuccauucauccaucca

SEQ ID NO: 1063147 - RNA, 24 nt, Human
uucacauacuugauucuuucaaag

SEQ ID NO: 1063148 - RNA, 25 nt, Human
uuccauucauccauccauucacaua

SEQ ID NO: 1063149 - RNA, 26 nt, Human
uuuuacagauaguguaguauacugcc

SEQ ID NO: 1063150 - RNA, 22 nt, Human
caacauaaagacugcauguaug

SEQ ID NO: 1063151 - RNA, 21 nt, Human
cauaaagacugcauguauggu

SEQ ID NO: 1063152 - RNA, 20 nt, Human
ugcauguaugguuucagcuu

SEQ ID NO: 1063153 - RNA, 28 nt, Human
uuuuacuggugaaguuuccaacauaaag

SEQ ID NO: 1063154 - RNA, 26 nt, Human
cagugacaaagaaucaagauggcgga

SEQ ID NO: 1063155 - RNA, 19 nt, Human
ucagucuucauuugucuug

SEQ ID NO: 1063156 - RNA, 18 nt, Human
ugacaaagaaucaagaug

SEQ ID NO: 1063157 - RNA, 21 nt, Human
uucuugguuucagucuucauu

SEQ ID NO: 1063158 - RNA, 24 nt, Human
agaggauaggggugacgcucugag

SEQ ID NO: 1063159 - RNA, 27 nt, Human
augaagucagaggauaggggugacgcu

SEQ ID NO: 1063160 - RNA, 25 nt, Human
cauggcucuugugauucugugccaa

SEQ ID NO: 1063161 - RNA, 27 nt, Human
cccacuuggccacuuccuaauuagcca

SEQ ID NO: 1063162 - RNA, 18 nt, Human
cccugcugucugaccaca

SEQ ID NO: 1063163 - RNA, 22 nt, Human
cugguggggaugaagucagagg

SEQ ID NO: 1063164 - RNA, 21 nt, Human
gagcacagggucuggcaccca

SEQ ID NO: 1063165 - RNA, 19 nt, Human
gcccuggagcccugcuguc

SEQ ID NO: 1063166 - RNA, 18 nt, Human
guggcuguggagagucca

SEQ ID NO: 1063167 - RNA, 18 nt, Human
uacccaagaucccugccc

SEQ ID NO: 1063168 - RNA, 24 nt, Human
uacccaagaucccugcccuggagc

SEQ ID NO: 1063169 - RNA, 18 nt, Human
uauuggcaccguucagag

SEQ ID NO: 1063170 - RNA, 24 nt, Human
ucuggcacccaggcaaugcuccau

SEQ ID NO: 1063171 - RNA, 19 nt, Human
ugcccuggagcccugcugu

SEQ ID NO: 1063172 - RNA, 19 nt, Human
ugugguggcuguggagagu

SEQ ID NO: 1063173 - RNA, 19 nt, Human
agggacggcgcaguguacc

SEQ ID NO: 1063174 - RNA, 19 nt, Human
cagcgcggccagccuggcg

SEQ ID NO: 1063175 - RNA, 21 nt, Human
caguguaccccuccagcgcgg

SEQ ID NO: 1063176 - RNA, 20 nt, Human
ccgcugcagcugcucccgga

SEQ ID NO: 1063177 - RNA, 23 nt, Human
ccguucuccugccgcugcagcug

SEQ ID NO: 1063178 - RNA, 20 nt, Human
ggaagugcgccaccugcucc

SEQ ID NO: 1063179 - RNA, 18 nt, Human
uccugccgcugcagcugc

SEQ ID NO: 1063180 - RNA, 21 nt, Human
uccugccgcugcagcugcucc

SEQ ID NO: 1063181 - RNA, 20 nt, Human
ucuccugccgcugcagcugc

SEQ ID NO: 1063182 - RNA, 21 nt, Human
aggcgaccucugaaccugagg

SEQ ID NO: 1063183 - RNA, 21 nt, Human
agggagcccugauguugcucc

SEQ ID NO: 1063184 - RNA, 22 nt, Human
cugcagaggcuggcaccgcgaa

SEQ ID NO: 1063185 - RNA, 21 nt, Human
gaaccugagggagcccugaug

SEQ ID NO: 1063186 - RNA, 18 nt, Human
gccugggaagcuagaggc

SEQ ID NO: 1063187 - RNA, 19 nt, Human
gggcuccguggcugacugg

SEQ ID NO: 1063188 - RNA, 19 nt, Human
guugcucccucagaggacc

SEQ ID NO: 1063189 - RNA, 18 nt, Human
ucccucagaggaccugca

SEQ ID NO: 1063190 - RNA, 23 nt, Human
ucccucagaggaccugcagaggc

SEQ ID NO: 1063191 - RNA, 21 nt, Human
uccguggcugacuggccuggg

SEQ ID NO: 1063192 - RNA, 24 nt, Human
uccugcccacgggcuccguggcug

SEQ ID NO: 1063193 - RNA, 18 nt, Human
uggcaccgcgaagcuccu

SEQ ID NO: 1063194 - RNA, 18 nt, Human
uggauuccugagacaugc

SEQ ID NO: 1063195 - RNA, 21 nt, Human
uggauuccugagacaugcuua

SEQ ID NO: 1063196 - RNA, 20 nt, Human
agagagaagcccuguuggua

SEQ ID NO: 1063197 - RNA, 20 nt, Human
ccagagagaagcccuguugg

SEQ ID NO: 1063198 - RNA, 20 nt, Human
gcccuguugguacagcucca

SEQ ID NO: 1063199 - RNA, 18 nt, Human
gggcaggucacacaggga

SEQ ID NO: 1063200 - RNA, 21 nt, Human
gggcaggucacacagggaggu

SEQ ID NO: 1063201 - RNA, 18 nt, Human
ugccagagagaagcccug

SEQ ID NO: 1063202 - RNA, 22 nt, Human
ugggugggcaggucacacaggg

SEQ ID NO: 1063203 - RNA, 22 nt, Human
caacaaggaaacccuuguucuc

SEQ ID NO: 1063204 - RNA, 22 nt, Human
ggaaacccuuguucucccacuu

SEQ ID NO: 1063205 - RNA, 22 nt, Human
uacagccaccaacaaggaaacc

SEQ ID NO: 1063206 - RNA, 19 nt, Human
uuacagccaccaacaagga

SEQ ID NO: 1063207 - RNA, 18 nt, Human
uuugacauuuaaaaccau

SEQ ID NO: 1063208 - RNA, 21 nt, Human
agaagcacuuaaaggauuugc

SEQ ID NO: 1063209 - RNA, 21 nt, Human
cuccaguaugaacuauuuuau

SEQ ID NO: 1063210 - RNA, 21 nt, Human
cuccagugugaauucucuuau

SEQ ID NO: 1063211 - RNA, 18 nt, Human
uaaggguugaggagcggg

SEQ ID NO: 1063212 - RNA, 20 nt, Human
uaguaugaauuuucuuaugu

SEQ ID NO: 1063213 - RNA, 21 nt, Human
ucucuugugguuaauaagggu

SEQ ID NO: 1063214 - RNA, 21 nt, Human
ugagaaugagcucaauguuug

SEQ ID NO: 1063215 - RNA, 22 nt, Human
ugccacauucuucacaucugua

SEQ ID NO: 1063216 - RNA, 23 nt, Human
uguaggguuucucuccaguguga

SEQ ID NO: 1063217 - RNA, 19 nt, Human
ugucuaaugaggugugaga

SEQ ID NO: 1063218 - RNA, 23 nt, Human
ugugggguuucucuccaguauga

SEQ ID NO: 1063219 - RNA, 19 nt, Human
uucauggaugugggguuuc

SEQ ID NO: 1063220 - RNA, 19 nt, Human
uuguaggauuucucagcag

SEQ ID NO: 1063221 - RNA, 19 nt, Human
uuuguaggguuucucucca

SEQ ID NO: 1063222 - RNA, 19 nt, Human
agaaauucucaccaguauc

SEQ ID NO: 1063223 - RNA, 18 nt, Human
agggugaguggauucuug

SEQ ID NO: 1063224 - RNA, 19 nt, Human
cuguauguagucucucgcu

SEQ ID NO: 1063225 - RNA, 25 nt, Human
cuuccuuuccacuccgguucugucc

SEQ ID NO: 1063226 - RNA, 21 nt, Human
uagaaauucucaccaguauca

SEQ ID NO: 1063227 - RNA, 23 nt, Human
uggauucuugaaugacuguaucc

SEQ ID NO: 1063228 - RNA, 19 nt, Human
uucuaagcagggugagugg

SEQ ID NO: 1063229 - RNA, 24 nt, Human
cacaauuuccugaacugaggcaaa

SEQ ID NO: 1063230 - RNA, 21 nt, Human
cacaguaccagggaaacuagg

SEQ ID NO: 1063231 - RNA, 20 nt, Human
cugcugugucugcugcuggu

SEQ ID NO: 1063232 - RNA, 21 nt, Human
uaccagggaaacuaggguucc

SEQ ID NO: 1063233 - RNA, 24 nt, Human
uaccagggaaacuaggguuccccu

SEQ ID NO: 1063234 - RNA, 21 nt, Human
uacugcugugucugcugcugg

SEQ ID NO: 1063235 - RNA, 19 nt, Human
uuacugcugugucugcugc

SEQ ID NO: 1063236 - RNA, 23 nt, Human
uugugacucuuucacaguaccag

SEQ ID NO: 1063237 - RNA, 21 nt, Human
uuuccugaacugaggcaaaug

SEQ ID NO: 1063238 - RNA, 21 nt, Human
aaguacuuuaagggagauuca

SEQ ID NO: 1063239 - RNA, 25 nt, Human
accucccucaccuuguucuccuuca

SEQ ID NO: 1063240 - RNA, 23 nt, Human
accuuguucuccuucaaauucca

SEQ ID NO: 1063241 - RNA, 24 nt, Human
accuuguucuccuucaaauuccac

SEQ ID NO: 1063242 - RNA, 19 nt, Human
acuaagcuguagagaacag

SEQ ID NO: 1063243 - RNA, 18 nt, Human
aucuaacaaugagucuca

SEQ ID NO: 1063244 - RNA, 19 nt, Human
auuuggaaacaccucccuc

SEQ ID NO: 1063245 - RNA, 20 nt, Human
caaugagucucaaauaugga

SEQ ID NO: 1063246 - RNA, 19 nt, Human
ccuccacgaccagcugaaa

SEQ ID NO: 1063247 - RNA, 28 nt, Human
gaaaagccuugaacuguuuuucuacuga

SEQ ID NO: 1063248 - RNA, 22 nt, Human
ggcuuccacauauaagcaauuc

SEQ ID NO: 1063249 - RNA, 20 nt, Human
uaagcuguagagaacaguga

SEQ ID NO: 1063250 - RNA, 18 nt, Human
uaaguacuuuaagggaga

SEQ ID NO: 1063251 - RNA, 19 nt, Human
uaaguacuuuaagggagau

SEQ ID NO: 1063252 - RNA, 25 nt, Human
ucaccuuguucuccuucaaauucca

SEQ ID NO: 1063253 - RNA, 20 nt, Human
ucauuuguaauuggaauuuu

SEQ ID NO: 1063254 - RNA, 22 nt, Human
ugucauaaaagagaauuuguuc

SEQ ID NO: 1063255 - RNA, 19 nt, Human
ugugacagcauacgcuaaa

SEQ ID NO: 1063256 - RNA, 21 nt, Human
uucaacugcuguccuugaacu

SEQ ID NO: 1063257 - RNA, 18 nt, Human
uuccuguuuucauuugua

SEQ ID NO: 1063258 - RNA, 23 nt, Human
uugaagauuuccuccacgaccag

SEQ ID NO: 1063259 - RNA, 19 nt, Human
uuggacaccguaugaaaac

SEQ ID NO: 1063260 - RNA, 18 nt, Human
uuuaucaccauuuuccuu

SEQ ID NO: 1063261 - RNA, 20 nt, Human
uuucuagaaccuccuucagu

SEQ ID NO: 1063262 - RNA, 23 nt, Human
aaggggccaguguagagugacac

SEQ ID NO: 1063263 - RNA, 24 nt, Human
agcauuagagacaugucugaagaa

SEQ ID NO: 1063264 - RNA, 18 nt, Human
agguguccgaggccaccu

SEQ ID NO: 1063265 - RNA, 18 nt, Human
agucacuacugccaggau

SEQ ID NO: 1063266 - RNA, 26 nt, Human
caaauugaguacuuuuauuagaccua

SEQ ID NO: 1063267 - RNA, 19 nt, Human
caagcccuccugccucaua

SEQ ID NO: 1063268 - RNA, 24 nt, Human
cacaguuguccccaagcccuccug

SEQ ID NO: 1063269 - RNA, 22 nt, Human
caggaucagaucaucugggcca

SEQ ID NO: 1063270 - RNA, 23 nt, Human
ucaucugggccauguccccacag

SEQ ID NO: 1063271 - RNA, 18 nt, Human
uccccacaguugucccca

SEQ ID NO: 1063272 - RNA, 19 nt, Human
ugccaggaucagaucaucu

SEQ ID NO: 1063273 - RNA, 26 nt, Human
uuagagacaugucugaagaacuucaa

SEQ ID NO: 1063274 - RNA, 23 nt, Human
aaaaggccgggcagggcaguggg

SEQ ID NO: 1063275 - RNA, 21 nt, Human
aaggggcaaaggggaggaggg

SEQ ID NO: 1063276 - RNA, 24 nt, Human
agcugcguggccccgaagaggggc

SEQ ID NO: 1063277 - RNA, 28 nt, Human
aggggaggagggagagggggaggugggg

SEQ ID NO: 1063278 - RNA, 23 nt, Human
caaaggggaggagggagaggggg

SEQ ID NO: 1063279 - RNA, 21 nt, Human
gcaccgagcuucgagcugcgu

SEQ ID NO: 1063280 - RNA, 20 nt, Human
gccccaagagcccggcaccg

SEQ ID NO: 1063281 - RNA, 18 nt, Human
gccccaggacagcagccc

SEQ ID NO: 1063282 - RNA, 20 nt, Human
gcucagccccaagagcccgg

SEQ ID NO: 1063283 - RNA, 19 nt, Human
ggaggagggagagggggag

SEQ ID NO: 1063284 - RNA, 19 nt, Human
ggaggagggagagggggag

SEQ ID NO: 1063285 - RNA, 20 nt, Human
ggaggagggagagggggagg

SEQ ID NO: 1063286 - RNA, 26 nt, Human
ggaggagggagagggggagguggggu

SEQ ID NO: 1063287 - RNA, 22 nt, Human
ggggaggagggagagggggagg

SEQ ID NO: 1063288 - RNA, 23 nt, Human
ugagaacugcaggaaaaggccgg

SEQ ID NO: 1063289 - RNA, 23 nt, Human
ugccagugaaguuuacgggucuc

SEQ ID NO: 1063290 - RNA, 18 nt, Human
uucgagcugcguggcccc

SEQ ID NO: 1063291 - RNA, 18 nt, Human
aaagugcuggauuacagg

SEQ ID NO: 1063292 - RNA, 23 nt, Human
aaagugcuggauuacaggcauga

SEQ ID NO: 1063293 - RNA, 19 nt, Human
aagcaaauuaaauccuuca

SEQ ID NO: 1063294 - RNA, 24 nt, Human
aaugcaggggaacuacaggaagaa

SEQ ID NO: 1063295 - RNA, 21 nt, Human
aaugcaguggugcgaucucag

SEQ ID NO: 1063296 - RNA, 21 nt, Human
aauggagaagggcacaccaaa

SEQ ID NO: 1063297 - RNA, 24 nt, Human
acaguguuucaccauguuggccag

SEQ ID NO: 1063298 - RNA, 18 nt, Human
accaagagaugaaauuuc

SEQ ID NO: 1063299 - RNA, 20 nt, Human
accacucccucuaaacccca

SEQ ID NO: 1063300 - RNA, 25 nt, Human
accacucccucuaaaccccaucuua

SEQ ID NO: 1063301 - RNA, 19 nt, Human
accagcagcagcuaggggc

SEQ ID NO: 1063302 - RNA, 24 nt, Human
accauguuggccaggauggucucg

SEQ ID NO: 1063303 - RNA, 22 nt, Human
accuagacaagggccacaccac

SEQ ID NO: 1063304 - RNA, 24 nt, Human
accuugugaucugcccaccucggc

SEQ ID NO: 1063305 - RNA, 22 nt, Human
acguggcucucucucuuuuucu

SEQ ID NO: 1063306 - RNA, 27 nt, Human
acucagagcaauauuuuucuccuacgg

SEQ ID NO: 1063307 - RNA, 20 nt, Human
acucugucaccaggcugcaa

SEQ ID NO: 1063308 - RNA, 22 nt, Human
agagugagaggacgauagccca

SEQ ID NO: 1063309 - RNA, 22 nt, Human
agaguguguaucccucggaucc

SEQ ID NO: 1063310 - RNA, 24 nt, Human
agaguuuguuguaaggacuugggg

SEQ ID NO: 1063311 - RNA, 20 nt, Human
agcagccauuuggagaacug

SEQ ID NO: 1063312 - RNA, 21 nt, Human
agcuuagaaugagaguuuguu

SEQ ID NO: 1063313 - RNA, 23 nt, Human
aguagcugagauuacagguacgu

SEQ ID NO: 1063314 - RNA, 24 nt, Human
aguggugcgaucucagcucacugc

SEQ ID NO: 1063315 - RNA, 23 nt, Human
aguguuucaccauguuggccagg

SEQ ID NO: 1063316 - RNA, 23 nt, Human
auauaacaggaucuggcagccuc

SEQ ID NO: 1063317 - RNA, 19 nt, Human
auuacagguacgugccacc

SEQ ID NO: 1063318 - RNA, 23 nt, Human
caaagugcuggauuacaggcaug

SEQ ID NO: 1063319 - RNA, 24 nt, Human
caaagugcuggauuacaggcauga

SEQ ID NO: 1063320 - RNA, 20 nt, Human
caagcgauucuccugccuca

SEQ ID NO: 1063321 - RNA, 22 nt, Human
caagcgauucuccugccucagc

SEQ ID NO: 1063322 - RNA, 21 nt, Human
caauggccccaucaauugcac

SEQ ID NO: 1063323 - RNA, 18 nt, Human
cacagguucuaagucagg

SEQ ID NO: 1063324 - RNA, 18 nt, Human
caccauguuggccaggau

SEQ ID NO: 1063325 - RNA, 22 nt, Human
caccauguuggccaggaugguc

SEQ ID NO: 1063326 - RNA, 24 nt, Human
caccauguuggccaggauggucuc

SEQ ID NO: 1063327 - RNA, 24 nt, Human
caccucggccucccaaagugcugg

SEQ ID NO: 1063328 - RNA, 24 nt, Human
cacucagagcaauauuuuuucccc

SEQ ID NO: 1063329 - RNA, 24 nt, Human
cagcaacaaauaggagcaaaagca

SEQ ID NO: 1063330 - RNA, 19 nt, Human
cagcagcagcuaggggcac

SEQ ID NO: 1063331 - RNA, 20 nt, Human
cagccuccugaguagcugag

SEQ ID NO: 1063332 - RNA, 20 nt, Human
cagcuaggggcacugggcag

SEQ ID NO: 1063333 - RNA, 22 nt, Human
caggucugcauuccucuccugc

SEQ ID NO: 1063334 - RNA, 24 nt, Human
caguguuucaccauguuggccagg

SEQ ID NO: 1063335 - RNA, 24 nt, Human
cauaaccaauuguuaauagaugcc

SEQ ID NO: 1063336 - RNA, 19 nt, Human
caugcauggcucacagagu

SEQ ID NO: 1063337 - RNA, 18 nt, Human
ccaaagugcuggauuaca

SEQ ID NO: 1063338 - RNA, 23 nt, Human
ccaaagugcuggauuacaggcau

SEQ ID NO: 1063339 - RNA, 19 nt, Human
ccaccacgccagcuaauuu

SEQ ID NO: 1063340 - RNA, 18 nt, Human
ccauccaucuauccaucu

SEQ ID NO: 1063341 - RNA, 18 nt, Human
cccaggucugcauuccuc

SEQ ID NO: 1063342 - RNA, 24 nt, Human
cccucagauggggaaggaccucac

SEQ ID NO: 1063343 - RNA, 24 nt, Human
cccugaagauuccugaccccaucu

SEQ ID NO: 1063344 - RNA, 23 nt, Human
cccugguucaagcgauucuccug

SEQ ID NO: 1063345 - RNA, 23 nt, Human
ccuacaagucuaccagcagcagc

SEQ ID NO: 1063346 - RNA, 21 nt, Human
ccugaagcccuuucccucggg

SEQ ID NO: 1063347 - RNA, 19 nt, Human
ccugaguagcugagauuac

SEQ ID NO: 1063348 - RNA, 22 nt, Human
ccugaguagcugagauuacagg

SEQ ID NO: 1063349 - RNA, 24 nt, Human
ccugaguagcugagauuacaggua

SEQ ID NO: 1063350 - RNA, 23 nt, Human
ccugccucagccuccugaguagc

SEQ ID NO: 1063351 - RNA, 27 nt, Human
cgacaucagcaacaaauaggagcaaaa

SEQ ID NO: 1063352 - RNA, 21 nt, Human
cguggcucucucucuuuuucu

SEQ ID NO: 1063353 - RNA, 21 nt, Human
cuacaggaagaaacuggaacc

SEQ ID NO: 1063354 - RNA, 18 nt, Human
cuaccagcagcagcuagg

SEQ ID NO: 1063355 - RNA, 19 nt, Human
cuagaggaagacagcagcc

SEQ ID NO: 1063356 - RNA, 23 nt, Human
cucccugguucaagcgauucucc

SEQ ID NO: 1063357 - RNA, 22 nt, Human
cuccugaccuugugaucugccc

SEQ ID NO: 1063358 - RNA, 22 nt, Human
cuccugccucagccuccugagu

SEQ ID NO: 1063359 - RNA, 24 nt, Human
cucucaauccauccaucuauccau

SEQ ID NO: 1063360 - RNA, 18 nt, Human
cucuccucuuuccugucc

SEQ ID NO: 1063361 - RNA, 22 nt, Human
cucucuccaucuauccaucuaa

SEQ ID NO: 1063362 - RNA, 23 nt, Human
cucucuuucugucucucuccauc

SEQ ID NO: 1063363 - RNA, 25 nt, Human
cucuuuuucuuuuucucgugcccuu

SEQ ID NO: 1063364 - RNA, 18 nt, Human
cugaguagcugagauuac

SEQ ID NO: 1063365 - RNA, 21 nt, Human
cugaguagcugagauuacagg

SEQ ID NO: 1063366 - RNA, 18 nt, Human
cugcauuccucuccugca

SEQ ID NO: 1063367 - RNA, 23 nt, Human
cugccucagccuccugaguagcu

SEQ ID NO: 1063368 - RNA, 18 nt, Human
cuuucucuccucuuuccu

SEQ ID NO: 1063369 - RNA, 18 nt, Human
gaagauuccugaccccau

SEQ ID NO: 1063370 - RNA, 22 nt, Human
gaccuugugaucugcccaccuc

SEQ ID NO: 1063371 - RNA, 22 nt, Human
gaccuugugaucugcccaccuc

SEQ ID NO: 1063372 - RNA, 24 nt, Human
gaccuugugaucugcccaccucgg

SEQ ID NO: 1063373 - RNA, 21 nt, Human
gacugccuucucccgcuuccu

SEQ ID NO: 1063374 - RNA, 18 nt, Human
gagcgacaucagcaacaa

SEQ ID NO: 1063375 - RNA, 23 nt, Human
gaggaagacagcagccauuugga

SEQ ID NO: 1063376 - RNA, 22 nt, Human
gaguagcugagauuacagguac

SEQ ID NO: 1063377 - RNA, 20 nt, Human
gagucucacucugucaccag

SEQ ID NO: 1063378 - RNA, 21 nt, Human
gaguguguaucccucggaucc

SEQ ID NO: 1063379 - RNA, 22 nt, Human
gauggcagacuaaguacuagag

SEQ ID NO: 1063380 - RNA, 18 nt, Human
gauuacaggcaugagcca

SEQ ID NO: 1063381 - RNA, 21 nt, Human
gauuacaggcaugagccacua

SEQ ID NO: 1063382 - RNA, 23 nt, Human
gauuacaggcaugagccacuagc

SEQ ID NO: 1063383 - RNA, 18 nt, Human
gauuacagguacgugcca

SEQ ID NO: 1063384 - RNA, 21 nt, Human
gauucuccugccucagccucc

SEQ ID NO: 1063385 - RNA, 19 nt, Human
gcagaucagggugaccugc

SEQ ID NO: 1063386 - RNA, 23 nt, Human
gcauaaaagaccaagagaugaaa

SEQ ID NO: 1063387 - RNA, 18 nt, Human
gcccuuucuuucuuucuc

SEQ ID NO: 1063388 - RNA, 23 nt, Human
gcgauucuccugccucagccucc

SEQ ID NO: 1063389 - RNA, 21 nt, Human
gcuccccugaagauuccugac

SEQ ID NO: 1063390 - RNA, 19 nt, Human
ggagugcguauuccgcucc

SEQ ID NO: 1063391 - RNA, 24 nt, Human
ggauggucucgaucuccugaccuu

SEQ ID NO: 1063392 - RNA, 19 nt, Human
ggauuacaggcaugagcca

SEQ ID NO: 1063393 - RNA, 20 nt, Human
ggauuacaggcaugagccac

SEQ ID NO: 1063394 - RNA, 23 nt, Human
ggauuacaggcaugagccacuag

SEQ ID NO: 1063395 - RNA, 31 nt, Human
ggcugcaaugcaguggugcgaucucagcucc

SEQ ID NO: 1063396 - RNA, 27 nt, Human
gggaacuacaggaagaaaccgguaccc

SEQ ID NO: 1063397 - RNA, 20 nt, Human
ggucucgaucuccugaccuu

SEQ ID NO: 1063398 - RNA, 24 nt, Human
gugaucugcccaccucggccuccc

SEQ ID NO: 1063399 - RNA, 20 nt, Human
gugcaggcaacagaaacaaa

SEQ ID NO: 1063400 - RNA, 20 nt, Human
guucaagcgauucuccugcc

SEQ ID NO: 1063401 - RNA, 19 nt, Human
uaaaacaaggaaccauaac

SEQ ID NO: 1063402 - RNA, 19 nt, Human
uaaaacaaggaaccauaac

SEQ ID NO: 1063403 - RNA, 21 nt, Human
uaaagacugaauuccaaauca

SEQ ID NO: 1063404 - RNA, 22 nt, Human
uaagucaggagaauguuaauga

SEQ ID NO: 1063405 - RNA, 21 nt, Human
uaauuaaaacaaggaaccaua

SEQ ID NO: 1063406 - RNA, 18 nt, Human
uacuccauauaacaggau

SEQ ID NO: 1063407 - RNA, 24 nt, Human
uacuuccuacuugacugccuucuc

SEQ ID NO: 1063408 - RNA, 22 nt, Human
uagagacaguguuucaccaugu

SEQ ID NO: 1063409 - RNA, 19 nt, Human
uaggauccuacaagucuac

SEQ ID NO: 1063410 - RNA, 24 nt, Human
uaguagagacaguguuucaccaug

SEQ ID NO: 1063411 - RNA, 22 nt, Human
uaucacagguucuaagucagga

SEQ ID NO: 1063412 - RNA, 19 nt, Human
ucaagcgauucuccugccu

SEQ ID NO: 1063413 - RNA, 21 nt, Human
ucaaucuuaaaaguguuauca

SEQ ID NO: 1063414 - RNA, 24 nt, Human
ucaccauguuggccaggauggucu

SEQ ID NO: 1063415 - RNA, 19 nt, Human
ucacugcaaucuccgacuc

SEQ ID NO: 1063416 - RNA, 24 nt, Human
ucacugcaaucuccgacucccugg

SEQ ID NO: 1063417 - RNA, 21 nt, Human
ucauggaaccaaggaauagga

SEQ ID NO: 1063418 - RNA, 19 nt, Human
ucauuugcaugcauggcuc

SEQ ID NO: 1063419 - RNA, 23 nt, Human
ucccaaagugcuggauuacaggc

SEQ ID NO: 1063420 - RNA, 21 nt, Human
ucccaauuguuugucuauuac

SEQ ID NO: 1063421 - RNA, 19 nt, Human
ucccaggcuauugacuucc

SEQ ID NO: 1063422 - RNA, 21 nt, Human
ucccaugcacauuucucucug

SEQ ID NO: 1063423 - RNA, 18 nt, Human
ucccucuaaaccccaucu

SEQ ID NO: 1063424 - RNA, 21 nt, Human
ucccugguucaagcgauucuc

SEQ ID NO: 1063425 - RNA, 24 nt, Human
ucccugguucaagcgauucuccug

SEQ ID NO: 1063426 - RNA, 19 nt, Human
uccgugacccacacuccca

SEQ ID NO: 1063427 - RNA, 24 nt, Human
uccugaguagcugagauuacaggu

SEQ ID NO: 1063428 - RNA, 22 nt, Human
ucgugcccuuucuuucuuucuc

SEQ ID NO: 1063429 - RNA, 23 nt, Human
ucuaucaucucucaauccaucca

SEQ ID NO: 1063430 - RNA, 22 nt, Human
ucucaauccauccaucuaucca

SEQ ID NO: 1063431 - RNA, 21 nt, Human
ucucacucugucaccaggcug

SEQ ID NO: 1063432 - RNA, 22 nt, Human
ucucacucugucaccaggcugc

SEQ ID NO: 1063433 - RNA, 23 nt, Human
ucucacucugucaccaggcugca

SEQ ID NO: 1063434 - RNA, 21 nt, Human
ucucauggucaauucuugcag

SEQ ID NO: 1063435 - RNA, 19 nt, Human
ucucucuguacguggcucu

SEQ ID NO: 1063436 - RNA, 18 nt, Human
ucuggaguacagaaucua

SEQ ID NO: 1063437 - RNA, 21 nt, Human
ucuugcagugagagcaggagu

SEQ ID NO: 1063438 - RNA, 24 nt, Human
ucuuucucuccucuuuccuguccu

SEQ ID NO: 1063439 - RNA, 21 nt, Human
ucuuucuuucucuccucuuuc

SEQ ID NO: 1063440 - RNA, 23 nt, Human
ucuuuuucuuuuucucgugcccu

SEQ ID NO: 1063441 - RNA, 21 nt, Human
ugaagcaucauuuggguaaaa

SEQ ID NO: 1063442 - RNA, 22 nt, Human
ugagauggagucucacucuguc

SEQ ID NO: 1063443 - RNA, 21 nt, Human
ugagauuacagguacgugcca

SEQ ID NO: 1063444 - RNA, 22 nt, Human
ugagauuacagguacgugccac

SEQ ID NO: 1063445 - RNA, 24 nt, Human
ugagauuacagguacgugccacca

SEQ ID NO: 1063446 - RNA, 24 nt, Human
ugaucugcccaccucggccuccca

SEQ ID NO: 1063447 - RNA, 19 nt, Human
ugcaaugcaguggugcgau

SEQ ID NO: 1063448 - RNA, 24 nt, Human
ugcaugcauggcucacagagugaa

SEQ ID NO: 1063449 - RNA, 21 nt, Human
ugcauuccucuccugcacccc

SEQ ID NO: 1063450 - RNA, 24 nt, Human
ugccucagccuccugaguagcuga

SEQ ID NO: 1063451 - RNA, 20 nt, Human
uggagaacugagcgacauca

SEQ ID NO: 1063452 - RNA, 20 nt, Human
uggauuacaggcaugagcca

SEQ ID NO: 1063453 - RNA, 21 nt, Human
uggauuacaggcaugagccac

SEQ ID NO: 1063454 - RNA, 23 nt, Human
uggauuacaggcaugagccacua

SEQ ID NO: 1063455 - RNA, 24 nt, Human
uggccaggauggucucgaucuccu

SEQ ID NO: 1063456 - RNA, 20 nt, Human
ugggaugacugcuacggaga

SEQ ID NO: 1063457 - RNA, 22 nt, Human
ugggccccaggucugcauuccu

SEQ ID NO: 1063458 - RNA, 18 nt, Human
uggggggugcucucucag

SEQ ID NO: 1063459 - RNA, 21 nt, Human
ugggugucuuuaauuugcuuc

SEQ ID NO: 1063460 - RNA, 24 nt, Human
uggugcgaucucagcucacugcaa

SEQ ID NO: 1063461 - RNA, 23 nt, Human
ugguucaagcgauucuccugccu

SEQ ID NO: 1063462 - RNA, 24 nt, Human
uguuucaccauguuggccaggaug

SEQ ID NO: 1063463 - RNA, 24 nt, Human
uuaguagagacaguguuucaccau

SEQ ID NO: 1063464 - RNA, 21 nt, Human
uucaagcgauucuccugccuc

SEQ ID NO: 1063465 - RNA, 23 nt, Human
uucaagcgauucuccugccucag

SEQ ID NO: 1063466 - RNA, 24 nt, Human
uucaagcgauucuccugccucagc

SEQ ID NO: 1063467 - RNA, 22 nt, Human
uucccaugcacauuucucucug

SEQ ID NO: 1063468 - RNA, 19 nt, Human
uuucaccauguuggccagg

SEQ ID NO: 1063469 - RNA, 20 nt, Human
uuucaccauguuggccagga

SEQ ID NO: 1063470 - RNA, 24 nt, Human
uuuuuaguagagacaguguuucac

SEQ ID NO: 1063471 - RNA, 22 nt, Human
uuuuuguauuuuuaguagagaa

SEQ ID NO: 1063472 - RNA, 24 nt, Human
uuuuuuguauuuuuaguagagaca

SEQ ID NO: 1063473 - RNA, 22 nt, Human
uuuuuuguauuuuuaguagagg

SEQ ID NO: 1063474 - RNA, 26 nt, Human
uuuuuuuuuuuugagauggagucuca

SEQ ID NO: 1063475 - RNA, 30 nt, Human
uuuuuuuuuuuuuguauuuuuaguagagaa

SEQ ID NO: 1063476 - RNA, 22 nt, Human
uuuuuuuuuuuuuugagaugga

SEQ ID NO: 1063477 - RNA, 18 nt, Human
uuuuuuuuuuuuuuuuug

SEQ ID NO: 1063478 - RNA, 20 nt, Human
aacauggcaaaacuccgucu

SEQ ID NO: 1063479 - RNA, 21 nt, Human
aacauggcaaaacuccgucuc

SEQ ID NO: 1063480 - RNA, 20 nt, Human
aaccacccccuacucugccu

SEQ ID NO: 1063481 - RNA, 24 nt, Human
aacugcucuccaaccacccccuac

SEQ ID NO: 1063482 - RNA, 23 nt, Human
aaguuccuuucugacagcagccu

SEQ ID NO: 1063483 - RNA, 19 nt, Human
acaacauggcaaaacuccg

SEQ ID NO: 1063484 - RNA, 23 nt, Human
acaugcacaucugcauguacaua

SEQ ID NO: 1063485 - RNA, 23 nt, Human
agcagccucaccuguaaucccag

SEQ ID NO: 1063486 - RNA, 22 nt, Human
agccuggacaacauggcaaaac

SEQ ID NO: 1063487 - RNA, 24 nt, Human
agccuggacaacauggcaaaacuc

SEQ ID NO: 1063488 - RNA, 26 nt, Human
aggcaggcagaccacuugagcucagg

SEQ ID NO: 1063489 - RNA, 19 nt, Human
auaaaacucuacaacaugc

SEQ ID NO: 1063490 - RNA, 22 nt, Human
caaccacccccuacucugccuc

SEQ ID NO: 1063491 - RNA, 20 nt, Human
caccuguaaucccagcacuu

SEQ ID NO: 1063492 - RNA, 23 nt, Human
caccuguaaucccagcacuuugg

SEQ ID NO: 1063493 - RNA, 24 nt, Human
caccuguaaucccagcacuuuggg

SEQ ID NO: 1063494 - RNA, 23 nt, Human
cagaccacuugagcucaggauuu

SEQ ID NO: 1063495 - RNA, 25 nt, Human
cagcaaugcagcaggugcaggcuuc

SEQ ID NO: 1063496 - RNA, 18 nt, Human
cagcacuuugggaagccg

SEQ ID NO: 1063497 - RNA, 24 nt, Human
cagcacuuugggaagccgaggcag

SEQ ID NO: 1063498 - RNA, 18 nt, Human
cagcaggugcaggcuuca

SEQ ID NO: 1063499 - RNA, 22 nt, Human
cagcuggagcggucccaggcac

SEQ ID NO: 1063500 - RNA, 21 nt, Human
caggaaaacagcaaugcagca

SEQ ID NO: 1063501 - RNA, 19 nt, Human
caggcaacucuuggaauuc

SEQ ID NO: 1063502 - RNA, 20 nt, Human
cauggcaaaacuccgucuca

SEQ ID NO: 1063503 - RNA, 21 nt, Human
ccacccccuacucugccucca

SEQ ID NO: 1063504 - RNA, 22 nt, Human
cccacguuucuuccuagcugau

SEQ ID NO: 1063505 - RNA, 20 nt, Human
ccuccaguauuacucugcuu

SEQ ID NO: 1063506 - RNA, 23 nt, Human
ccuggacaacauggcaaaacucc

SEQ ID NO: 1063507 - RNA, 22 nt, Human
ccuggcugcagugcagcuggag

SEQ ID NO: 1063508 - RNA, 19 nt, Human
cgacaccagccuggacaac

SEQ ID NO: 1063509 - RNA, 22 nt, Human
cgacaccagccuggacaacaug

SEQ ID NO: 1063510 - RNA, 19 nt, Human
cgucucaggaaaacagcaa

SEQ ID NO: 1063511 - RNA, 24 nt, Human
cucaccuguaaucccagcacuuug

SEQ ID NO: 1063512 - RNA, 21 nt, Human
cuccaaccacccccuacucug

SEQ ID NO: 1063513 - RNA, 18 nt, Human
cuggcugcagugcagcug

SEQ ID NO: 1063514 - RNA, 24 nt, Human
gaccacuugagcucaggauuucga

SEQ ID NO: 1063515 - RNA, 19 nt, Human
gcacaucugcauguacaua

SEQ ID NO: 1063516 - RNA, 22 nt, Human
gcucaggauuucgacaccagcc

SEQ ID NO: 1063517 - RNA, 23 nt, Human
uaaaaugggcuuuaauguucccu

SEQ ID NO: 1063518 - RNA, 23 nt, Human
uaacaugcacaucugcauguaca

SEQ ID NO: 1063519 - RNA, 18 nt, Human
uacauagagcucuggaag

SEQ ID NO: 1063520 - RNA, 19 nt, Human
uacucugaggaaugaagcu

SEQ ID NO: 1063521 - RNA, 18 nt, Human
uaucugaaggcuauggaa

SEQ ID NO: 1063522 - RNA, 21 nt, Human
ucccuacuacgcccaccacag

SEQ ID NO: 1063523 - RNA, 19 nt, Human
uccuucuauacccagucag

SEQ ID NO: 1063524 - RNA, 23 nt, Human
ucgacaccagccuggacaacaug

SEQ ID NO: 1063525 - RNA, 23 nt, Human
ucuaaauacccacaucuccugua

SEQ ID NO: 1063526 - RNA, 22 nt, Human
ugaagcugguauccccccuggc

SEQ ID NO: 1063527 - RNA, 21 nt, Human
ugauucauggaauuaucccuu

SEQ ID NO: 1063528 - RNA, 18 nt, Human
ugcaguucuggaaccggc

SEQ ID NO: 1063529 - RNA, 21 nt, Human
uggcucccuacuacgcccacc

SEQ ID NO: 1063530 - RNA, 24 nt, Human
ugggaagccgaggcaggcagacca

SEQ ID NO: 1063531 - RNA, 19 nt, Human
uguacuaacugcucuccaa

SEQ ID NO: 1063532 - RNA, 26 nt, Human
uguacuaacugcucuccaaccacccc

SEQ ID NO: 1063533 - RNA, 19 nt, Human
uucaccaacuuugcaguuc

SEQ ID NO: 1063534 - RNA, 20 nt, Human
uucauggaauuaucccuuuc

SEQ ID NO: 1063535 - RNA, 20 nt, Human
uugcaguucuggaaccggca

SEQ ID NO: 1063536 - RNA, 18 nt, Human
uuugaauccucuguucug

SEQ ID NO: 1063537 - RNA, 20 nt, Human
uuugcaguucuggaaccggc

SEQ ID NO: 1063538 - RNA, 18 nt, Human
aaagaagcuucuugcccu

SEQ ID NO: 1063539 - RNA, 19 nt, Human
aaggcacaauucaaagaca

SEQ ID NO: 1063540 - RNA, 22 nt, Human
aggggcgguaugaaaauuaaag

SEQ ID NO: 1063541 - RNA, 21 nt, Human
auacuguaccuggccuugugc

SEQ ID NO: 1063542 - RNA, 22 nt, Human
caugcaaagggaaauuuucacc

SEQ ID NO: 1063543 - RNA, 20 nt, Human
cuucuugcccuacccggcug

SEQ ID NO: 1063544 - RNA, 21 nt, Human
cuugcccuacccggcugacca

SEQ ID NO: 1063545 - RNA, 20 nt, Human
gaaagaagcuucuugcccua

SEQ ID NO: 1063546 - RNA, 18 nt, Human
gaagcuucuugcccuacc

SEQ ID NO: 1063547 - RNA, 24 nt, Human
gggcgguaugaaaauuaaaggcac

SEQ ID NO: 1063548 - RNA, 26 nt, Human
uagcagccaacacuccuuacacauac

SEQ ID NO: 1063549 - RNA, 22 nt, Human
ucaccaaucacucuaauugugc

SEQ ID NO: 1063550 - RNA, 19 nt, Human
ucccugaaagaagcuucuu

SEQ ID NO: 1063551 - RNA, 21 nt, Human
ucccugaaagaagcuucuugc

SEQ ID NO: 1063552 - RNA, 20 nt, Human
ugccucauuuaagccucagg

SEQ ID NO: 1063553 - RNA, 23 nt, Human
ugguguaagaaccuuuagcugaa

SEQ ID NO: 1063554 - RNA, 22 nt, Human
uuuaagccucaggacaaaccuc

SEQ ID NO: 1063555 - RNA, 23 nt, Human
uuuagcugaagccaccuuuuucu

SEQ ID NO: 1063556 - RNA, 23 nt, Human
cagagucuucuucaaacucccac

SEQ ID NO: 1063557 - RNA, 25 nt, Human
ccagagucuucuucaaacucccaca

SEQ ID NO: 1063558 - RNA, 22 nt, Human
cuucuucaaacucccacagccc

SEQ ID NO: 1063559 - RNA, 25 nt, Human
uuggaagcaguccagagucuucuuc

SEQ ID NO: 1063560 - RNA, 24 nt, Human
aaacaaugaaagagagaggagaaa

SEQ ID NO: 1063561 - RNA, 19 nt, Human
aacccauccuucccaccuc

SEQ ID NO: 1063562 - RNA, 21 nt, Human
aagcaacaugugguucacuca

SEQ ID NO: 1063563 - RNA, 22 nt, Human
aagcaguucucagaggacucag

SEQ ID NO: 1063564 - RNA, 22 nt, Human
aaucucagagaaacugaacaug

SEQ ID NO: 1063565 - RNA, 26 nt, Human
acaacaauaucauaccaguaugaaac

SEQ ID NO: 1063566 - RNA, 19 nt, Human
accaaccgccuuuacucua

SEQ ID NO: 1063567 - RNA, 23 nt, Human
acccaacccauccuucccaccuc

SEQ ID NO: 1063568 - RNA, 26 nt, Human
accucaucucuuaccacccccuccca

SEQ ID NO: 1063569 - RNA, 20 nt, Human
acugcagauuuccacaaaug

SEQ ID NO: 1063570 - RNA, 22 nt, Human
agaaagacgaccgaacuacaaa

SEQ ID NO: 1063571 - RNA, 21 nt, Human
agaauucuuucaaacuaccau

SEQ ID NO: 1063572 - RNA, 22 nt, Human
agacagaaugaugcaaggucca

SEQ ID NO: 1063573 - RNA, 23 nt, Human
agaggcaaccagagaaauuacca

SEQ ID NO: 1063574 - RNA, 22 nt, Human
aggcaggcuuaggaguuaccag

SEQ ID NO: 1063575 - RNA, 21 nt, Human
aucaggcucugugguuaagga

SEQ ID NO: 1063576 - RNA, 21 nt, Human
aucucuuaccacccccuccca

SEQ ID NO: 1063577 - RNA, 20 nt, Human
auuuccacaaaugcagacug

SEQ ID NO: 1063578 - RNA, 21 nt, Human
caaaaacacugagaauaaaag

SEQ ID NO: 1063579 - RNA, 22 nt, Human
caaaauucucuaaaaagcuccc

SEQ ID NO: 1063580 - RNA, 24 nt, Human
caaaucucagagaaacugaacaug

SEQ ID NO: 1063581 - RNA, 21 nt, Human
caacacacaacagccaauguu

SEQ ID NO: 1063582 - RNA, 23 nt, Human
caaccagagaaauuaccaaccgc

SEQ ID NO: 1063583 - RNA, 24 nt, Human
cagcagcuccacuucuaagagaaa

SEQ ID NO: 1063584 - RNA, 19 nt, Human
cagcucccucgcucccuug

SEQ ID NO: 1063585 - RNA, 18 nt, Human
cauggagucaaaccucag

SEQ ID NO: 1063586 - RNA, 20 nt, Human
ccaacccauccuucccaccu

SEQ ID NO: 1063587 - RNA, 22 nt, Human
ccaugaaagcaaaaacacugag

SEQ ID NO: 1063588 - RNA, 22 nt, Human
cccacgaaggaaaggaugaaaa

SEQ ID NO: 1063589 - RNA, 18 nt, Human
cccauccuucccaccuca

SEQ ID NO: 1063590 - RNA, 21 nt, Human
cccuaaauaaguccccuccuu

SEQ ID NO: 1063591 - RNA, 19 nt, Human
ccuaauguaacucaaaaac

SEQ ID NO: 1063592 - RNA, 23 nt, Human
ccuagaagcaacaugugguucac

SEQ ID NO: 1063593 - RNA, 22 nt, Human
ccucaucucuuaccacccccuc

SEQ ID NO: 1063594 - RNA, 21 nt, Human
ccuccaaacuucaaauacugc

SEQ ID NO: 1063595 - RNA, 22 nt, Human
ccuucugucuccaucucagguu

SEQ ID NO: 1063596 - RNA, 18 nt, Human
cuaaguaauaucacaaaa

SEQ ID NO: 1063597 - RNA, 24 nt, Human
cucaucucuuaccacccccuccca

SEQ ID NO: 1063598 - RNA, 23 nt, Human
gaaacaggaagcaguucucagag

SEQ ID NO: 1063599 - RNA, 21 nt, Human
gaaacuuggacccaaaaaugu

SEQ ID NO: 1063600 - RNA, 18 nt, Human
gagucaguuuaaacauga

SEQ ID NO: 1063601 - RNA, 24 nt, Human
ggcccuaauguaacucaaaaacaa

SEQ ID NO: 1063602 - RNA, 19 nt, Human
gggagcacuuggggguggg

SEQ ID NO: 1063603 - RNA, 25 nt, Human
ggguggggaaagcuggccacaguuu

SEQ ID NO: 1063604 - RNA, 21 nt, Human
gguauguauuuuuuaaaacag

SEQ ID NO: 1063605 - RNA, 21 nt, Human
uaacucaaaaacaauuuguca

SEQ ID NO: 1063606 - RNA, 22 nt, Human
uaccagacgaaacaggaagcag

SEQ ID NO: 1063607 - RNA, 22 nt, Human
uaccuuccuacaugcucagaau

SEQ ID NO: 1063608 - RNA, 24 nt, Human
uagaccccucuaaauauuuaaaca

SEQ ID NO: 1063609 - RNA, 19 nt, Human
uagcauaacagaaagacga

SEQ ID NO: 1063610 - RNA, 22 nt, Human
ucaacacccuagugguucaacu

SEQ ID NO: 1063611 - RNA, 19 nt, Human
ucacccaacccauccuucc

SEQ ID NO: 1063612 - RNA, 21 nt, Human
ucacccaacccauccuuccca

SEQ ID NO: 1063613 - RNA, 21 nt, Human
ucagaacucuuuggucuccag

SEQ ID NO: 1063614 - RNA, 23 nt, Human
ucagagaaacugaacauggaguc

SEQ ID NO: 1063615 - RNA, 18 nt, Human
ucagagucaguuuaaaca

SEQ ID NO: 1063616 - RNA, 20 nt, Human
uccaaacuucaaauacugca

SEQ ID NO: 1063617 - RNA, 19 nt, Human
ucccauagauguguccagg

SEQ ID NO: 1063618 - RNA, 25 nt, Human
ucuaaauauuuaaacaacaauauca

SEQ ID NO: 1063619 - RNA, 22 nt, Human
ucuaagagaaaucaaagcaaau

SEQ ID NO: 1063620 - RNA, 18 nt, Human
ucuaaguccugauucugu

SEQ ID NO: 1063621 - RNA, 19 nt, Human
ucucagguuucuacccuaa

SEQ ID NO: 1063622 - RNA, 18 nt, Human
ucuccagaggugguugaa

SEQ ID NO: 1063623 - RNA, 18 nt, Human
ucuccagaggugguugaa

SEQ ID NO: 1063624 - RNA, 22 nt, Human
ucuccagaggugguugaaauau

SEQ ID NO: 1063625 - RNA, 19 nt, Human
ucucuuaccacccccuccc

SEQ ID NO: 1063626 - RNA, 22 nt, Human
ucugucuccaucucagguuucu

SEQ ID NO: 1063627 - RNA, 20 nt, Human
ucuuccacaaaguacaacua

SEQ ID NO: 1063628 - RNA, 19 nt, Human
ugaaagcaaaaacacugag

SEQ ID NO: 1063629 - RNA, 19 nt, Human
ugaaagcaaaaacacugag

SEQ ID NO: 1063630 - RNA, 18 nt, Human
ugaaauauucuuuauccc

SEQ ID NO: 1063631 - RNA, 18 nt, Human
ugaacauggagucaaacc

SEQ ID NO: 1063632 - RNA, 21 nt, Human
ugagaaacccuaaauaagucc

SEQ ID NO: 1063633 - RNA, 21 nt, Human
ugagaaacccuaaauaagucc

SEQ ID NO: 1063634 - RNA, 23 nt, Human
ugagaaacccuaaauaagucccc

SEQ ID NO: 1063635 - RNA, 29 nt, Human
ugaugaggaaugaaauauauuuucuggcu

SEQ ID NO: 1063636 - RNA, 22 nt, Human
ugcagacuguaggaaagaaagg

SEQ ID NO: 1063637 - RNA, 18 nt, Human
ugccucaucucuccuucu

SEQ ID NO: 1063638 - RNA, 20 nt, Human
uggggagcacuugggggugg

SEQ ID NO: 1063639 - RNA, 22 nt, Human
uguggggagcacuugggggugg

SEQ ID NO: 1063640 - RNA, 23 nt, Human
ugugguucacucaaguagacaga

SEQ ID NO: 1063641 - RNA, 18 nt, Human
uucaacuuuaaugcagcu

SEQ ID NO: 1063642 - RNA, 21 nt, Human
uuggacccaaaaauguuccaa

SEQ ID NO: 1063643 - RNA, 24 nt, Human
uuguggggagcacuuggggguggg

SEQ ID NO: 1063644 - RNA, 21 nt, Human
aaaaaaaaaacgaggcaugaa

SEQ ID NO: 1063645 - RNA, 20 nt, Human
aaaaaaaaacgaggcaugaa

SEQ ID NO: 1063646 - RNA, 20 nt, Human
aaaaaaacgaggcaugaaaa

SEQ ID NO: 1063647 - RNA, 21 nt, Human
aaacgaggcaugaaaaguccc

SEQ ID NO: 1063648 - RNA, 18 nt, Human
aaagucccagaggagcaa

SEQ ID NO: 1063649 - RNA, 24 nt, Human
aacucacgucucgcacccccucca

SEQ ID NO: 1063650 - RNA, 20 nt, Human
aacugcuuuccacaggggau

SEQ ID NO: 1063651 - RNA, 20 nt, Human
acaaguuuaacugcuuucca

SEQ ID NO: 1063652 - RNA, 18 nt, Human
acaggaagggaccgcggg

SEQ ID NO: 1063653 - RNA, 24 nt, Human
accaagccacaucugaaaaaaaaa

SEQ ID NO: 1063654 - RNA, 22 nt, Human
acccacguucugugggcccccu

SEQ ID NO: 1063655 - RNA, 22 nt, Human
accuugcguccagaccaagcca

SEQ ID NO: 1063656 - RNA, 19 nt, Human
agaacucacgucucgcacc

SEQ ID NO: 1063657 - RNA, 19 nt, Human
agaccaagccacaucugaa

SEQ ID NO: 1063658 - RNA, 21 nt, Human
aggacgagguacaggaaggga

SEQ ID NO: 1063659 - RNA, 21 nt, Human
aucugaaaaaaaaaacgaggc

SEQ ID NO: 1063660 - RNA, 24 nt, Human
aucuuggcagcccccucccccuca

SEQ ID NO: 1063661 - RNA, 21 nt, Human
augcugaggacgagguacagg

SEQ ID NO: 1063662 - RNA, 19 nt, Human
caacggagaaaaaccgacc

SEQ ID NO: 1063663 - RNA, 23 nt, Human
caagggccuggcucucuuucaau

SEQ ID NO: 1063664 - RNA, 20 nt, Human
cagaccaagccacaucugaa

SEQ ID NO: 1063665 - RNA, 19 nt, Human
cagcucaaguccacaccau

SEQ ID NO: 1063666 - RNA, 23 nt, Human
caucuuggcagcccccucccccu

SEQ ID NO: 1063667 - RNA, 19 nt, Human
ccagaccaagccacaucug

SEQ ID NO: 1063668 - RNA, 26 nt, Human
ccagcucaaguccacaccauucgccu

SEQ ID NO: 1063669 - RNA, 24 nt, Human
cccccuccagggcucccucagaca

SEQ ID NO: 1063670 - RNA, 24 nt, Human
ccccuccagggcucccucagacaa

SEQ ID NO: 1063671 - RNA, 24 nt, Human
ccuccccgcccccuccagggcucc

SEQ ID NO: 1063672 - RNA, 18 nt, Human
ccucccuagccaccgccu

SEQ ID NO: 1063673 - RNA, 18 nt, Human
cgaagacaacggcccgga

SEQ ID NO: 1063674 - RNA, 21 nt, Human
cgaagacaacggcccggagga

SEQ ID NO: 1063675 - RNA, 25 nt, Human
cgcacccccuccacaaguuuaacug

SEQ ID NO: 1063676 - RNA, 21 nt, Human
cggagaaaaaccgaccgaaga

SEQ ID NO: 1063677 - RNA, 23 nt, Human
cggagaaaaaccgaccgaagaca

SEQ ID NO: 1063678 - RNA, 22 nt, Human
cggcccggaggaggccgacgcc

SEQ ID NO: 1063679 - RNA, 21 nt, Human
cgggaucaacggagaaaaacc

SEQ ID NO: 1063680 - RNA, 24 nt, Human
cgggaucaacggagaaaaaccgac

SEQ ID NO: 1063681 - RNA, 24 nt, Human
cucacgucucgcacccccuccaca

SEQ ID NO: 1063682 - RNA, 23 nt, Human
cucgcacccccuccacaaguuua

SEQ ID NO: 1063683 - RNA, 20 nt, Human
cucuuccucuucucggaauc

SEQ ID NO: 1063684 - RNA, 25 nt, Human
cugcuggaccagcucaaguccacac

SEQ ID NO: 1063685 - RNA, 21 nt, Human
gaccgaagacaacggcccgga

SEQ ID NO: 1063686 - RNA, 21 nt, Human
gagaaaaaccgaccgaagaca

SEQ ID NO: 1063687 - RNA, 19 nt, Human
gagcaaacgcccccucucc

SEQ ID NO: 1063688 - RNA, 19 nt, Human
gagcaaacgcccccucucc

SEQ ID NO: 1063689 - RNA, 19 nt, Human
gauacuuuccccuuucaca

SEQ ID NO: 1063690 - RNA, 21 nt, Human
gccuggcaugggggagaacuc

SEQ ID NO: 1063691 - RNA, 19 nt, Human
gcugaggacgagguacagg

SEQ ID NO: 1063692 - RNA, 21 nt, Human
gcugcugggaccuugcgucca

SEQ ID NO: 1063693 - RNA, 22 nt, Human
ggaccgcgggaucaacggagaa

SEQ ID NO: 1063694 - RNA, 21 nt, Human
ggcagcccccucccccucaag

SEQ ID NO: 1063695 - RNA, 23 nt, Human
gggaucaacggagaaaaaccgac

SEQ ID NO: 1063696 - RNA, 18 nt, Human
gggcccccuccccgcccu

SEQ ID NO: 1063697 - RNA, 18 nt, Human
uacaggaagggaccgcgg

SEQ ID NO: 1063698 - RNA, 19 nt, Human
ucaagggccuggcucucuu

SEQ ID NO: 1063699 - RNA, 23 nt, Human
ucacagaagaguaagcuuaagcu

SEQ ID NO: 1063700 - RNA, 23 nt, Human
ucccaaugucucuuuauagaacc

SEQ ID NO: 1063701 - RNA, 22 nt, Human
uccccgcccccuccagggcucc

SEQ ID NO: 1063702 - RNA, 18 nt, Human
ucugugggcccccucccc

SEQ ID NO: 1063703 - RNA, 24 nt, Human
ugaaaaaaaaaacgaggcaugaaa

SEQ ID NO: 1063704 - RNA, 20 nt, Human
uggcagcccccucccccuca

SEQ ID NO: 1063705 - RNA, 21 nt, Human
uggcagcccccucccccucaa

SEQ ID NO: 1063706 - RNA, 21 nt, Human
ugggcccccuccccgcccccu

SEQ ID NO: 1063707 - RNA, 25 nt, Human
ugggcccccuccccgcccccuccag

SEQ ID NO: 1063708 - RNA, 21 nt, Human
uuccacaggggauacuuuccc

SEQ ID NO: 1063709 - RNA, 27 nt, Human
uucccaaugucucuuuauagaacccac

SEQ ID NO: 1063710 - RNA, 26 nt, Human
uagaucuuuaaacacacagcgccaug

SEQ ID NO: 1063711 - RNA, 19 nt, Human
ugaaaaauacacauccaaa

SEQ ID NO: 1063712 - RNA, 21 nt, Human
ugugaaaaauacacauccaaa

SEQ ID NO: 1063713 - RNA, 18 nt, Human
aagcaggaggaucacuug

SEQ ID NO: 1063714 - RNA, 22 nt, Human
aagcaggaggaucacuugagcc

SEQ ID NO: 1063715 - RNA, 24 nt, Human
aagcaggaggaucacuugagccua

SEQ ID NO: 1063716 - RNA, 18 nt, Human
acucuacuccagccuggg

SEQ ID NO: 1063717 - RNA, 24 nt, Human
acucuacuccagccugggugagag

SEQ ID NO: 1063718 - RNA, 21 nt, Human
agccgcugcagcugcugccaa

SEQ ID NO: 1063719 - RNA, 22 nt, Human
aggagguggaggcugcaguggu

SEQ ID NO: 1063720 - RNA, 18 nt, Human
agguggaggcugcagugg

SEQ ID NO: 1063721 - RNA, 23 nt, Human
agucuggcaggaagggggcagcc

SEQ ID NO: 1063722 - RNA, 22 nt, Human
auugucacucuacuccagccug

SEQ ID NO: 1063723 - RNA, 19 nt, Human
cacucuacuccagccuggg

SEQ ID NO: 1063724 - RNA, 19 nt, Human
cacucuacuccagccuggg

SEQ ID NO: 1063725 - RNA, 20 nt, Human
cacucuacuccagccugggu

SEQ ID NO: 1063726 - RNA, 22 nt, Human
cacucuacuccagccuggguga

SEQ ID NO: 1063727 - RNA, 24 nt, Human
cacucuacuccagccugggugaga

SEQ ID NO: 1063728 - RNA, 19 nt, Human
cagucuggcaggaaggggg

SEQ ID NO: 1063729 - RNA, 22 nt, Human
ccagucuggcaggaagggggca

SEQ ID NO: 1063730 - RNA, 21 nt, Human
ccugcaaucccugagggcagg

SEQ ID NO: 1063731 - RNA, 21 nt, Human
ccuugggaccucuugugucac

SEQ ID NO: 1063732 - RNA, 23 nt, Human
cgacucugucugaaggaagugau

SEQ ID NO: 1063733 - RNA, 20 nt, Human
gaccccuagcugcuucuuga

SEQ ID NO: 1063734 - RNA, 22 nt, Human
gagagcaagacccgacucuguc

SEQ ID NO: 1063735 - RNA, 23 nt, Human
gaggaucacuugagccuaggagg

SEQ ID NO: 1063736 - RNA, 24 nt, Human
gccuaggagguggaggcugcagug

SEQ ID NO: 1063737 - RNA, 20 nt, Human
ggcaggaagggggcagccug

SEQ ID NO: 1063738 - RNA, 23 nt, Human
gggggucuuguuauguugccugg

SEQ ID NO: 1063739 - RNA, 21 nt, Human
gucacgucgcucguuuguuuc

SEQ ID NO: 1063740 - RNA, 24 nt, Human
gucacucuacuccagccuggguga

SEQ ID NO: 1063741 - RNA, 18 nt, Human
uacuccagccugggugag

SEQ ID NO: 1063742 - RNA, 23 nt, Human
uacuccagccugggugagagagc

SEQ ID NO: 1063743 - RNA, 19 nt, Human
uagcugcuucuugaugacg

SEQ ID NO: 1063744 - RNA, 20 nt, Human
uaggagguggaggcugcagu

SEQ ID NO: 1063745 - RNA, 21 nt, Human
ucacucuacuccagccugggu

SEQ ID NO: 1063746 - RNA, 19 nt, Human
ucacuugagccuaggaggu

SEQ ID NO: 1063747 - RNA, 24 nt, Human
ucacuugagccuaggagguggagg

SEQ ID NO: 1063748 - RNA, 22 nt, Human
uccaagaagacgacagugcuga

SEQ ID NO: 1063749 - RNA, 22 nt, Human
uccagaagugaaaaggagaugg

SEQ ID NO: 1063750 - RNA, 18 nt, Human
uccagccugggugagaga

SEQ ID NO: 1063751 - RNA, 19 nt, Human
uccagccugggugagagag

SEQ ID NO: 1063752 - RNA, 20 nt, Human
uccaggaagggcgcuggagg

SEQ ID NO: 1063753 - RNA, 18 nt, Human
ucuuguuauguugccugg

SEQ ID NO: 1063754 - RNA, 20 nt, Human
ugaagcaggaggaucacuug

SEQ ID NO: 1063755 - RNA, 24 nt, Human
ugaagcaggaggaucacuugagcc

SEQ ID NO: 1063756 - RNA, 24 nt, Human
ugagccuaggagguggaggcugca

SEQ ID NO: 1063757 - RNA, 21 nt, Human
ugagggcaggucugggacuag

SEQ ID NO: 1063758 - RNA, 21 nt, Human
ugcucccuugggaccucuugu

SEQ ID NO: 1063759 - RNA, 24 nt, Human
uggcaggaagggggcagccugcaa

SEQ ID NO: 1063760 - RNA, 25 nt, Human
uguagagaugggggucuuguuaugu

SEQ ID NO: 1063761 - RNA, 19 nt, Human
uuaauuuuuuguagagaug

SEQ ID NO: 1063762 - RNA, 22 nt, Human
uugcucccuugggaccucuugu

SEQ ID NO: 1063763 - RNA, 24 nt, Human
uuguagagaugggggucuuguuau

SEQ ID NO: 1063764 - RNA, 21 nt, Human
uuguuauguugccuggugugg

SEQ ID NO: 1063765 - RNA, 20 nt, Human
uuucagguuugcucccuugg

SEQ ID NO: 1063766 - RNA, 21 nt, Human
uuuguagagaugggggucuug

SEQ ID NO: 1063767 - RNA, 18 nt, Human
uuuuuuguagagaugggg

SEQ ID NO: 1063768 - RNA, 25 nt, Human
aaaaaaaaaaaaaaaaagguugggg

SEQ ID NO: 1063769 - RNA, 22 nt, Human
aaaaaaaaaaaaaaaagcugag

SEQ ID NO: 1063770 - RNA, 23 nt, Human
aaaaaaaaaaaaaaaagcugagg

SEQ ID NO: 1063771 - RNA, 28 nt, Human
aaaaaaaaaaagguuggggggaugggag

SEQ ID NO: 1063772 - RNA, 18 nt, Human
aaacacucccccaguccc

SEQ ID NO: 1063773 - RNA, 18 nt, Human
aaagugcugggauuacaa

SEQ ID NO: 1063774 - RNA, 24 nt, Human
aaagugcugggauuacaagcauga

SEQ ID NO: 1063775 - RNA, 28 nt, Human
aacaacagaaccaggauaguggaaggaa

SEQ ID NO: 1063776 - RNA, 20 nt, Human
aaccgguugccuccccauuu

SEQ ID NO: 1063777 - RNA, 24 nt, Human
aacugcaccaaauucggagaccua

SEQ ID NO: 1063778 - RNA, 24 nt, Human
aagcaaaaaggaauuuuccucuaa

SEQ ID NO: 1063779 - RNA, 23 nt, Human
aagcaucagugaaggucaguggc

SEQ ID NO: 1063780 - RNA, 26 nt, Human
aaguaccagagguugacacaaaaacu

SEQ ID NO: 1063781 - RNA, 19 nt, Human
aagugcugggauuacaagc

SEQ ID NO: 1063782 - RNA, 21 nt, Human
aagugcugggauuacaagcau

SEQ ID NO: 1063783 - RNA, 26 nt, Human
aagugcugggauuacaagcaugagcc

SEQ ID NO: 1063784 - RNA, 19 nt, Human
aauucggagaccuaguugg

SEQ ID NO: 1063785 - RNA, 18 nt, Human
acaccagcuugggcaaca

SEQ ID NO: 1063786 - RNA, 18 nt, Human
acagaagcaucagugaag

SEQ ID NO: 1063787 - RNA, 19 nt, Human
accaaugcaauaguccuug

SEQ ID NO: 1063788 - RNA, 25 nt, Human
accacucaaacgaugacaggaggca

SEQ ID NO: 1063789 - RNA, 24 nt, Human
accagcuugggcaacauagugaga

SEQ ID NO: 1063790 - RNA, 24 nt, Human
acccaggcuagagugcaguggugu

SEQ ID NO: 1063791 - RNA, 23 nt, Human
acccaguucugcccucuggaacc

SEQ ID NO: 1063792 - RNA, 18 nt, Human
acgaugucauucaagaag

SEQ ID NO: 1063793 - RNA, 18 nt, Human
acgggguuucgccauguu

SEQ ID NO: 1063794 - RNA, 19 nt, Human
acgggguuucgccauguug

SEQ ID NO: 1063795 - RNA, 24 nt, Human
acgggguuucgccauguugcccag

SEQ ID NO: 1063796 - RNA, 20 nt, Human
agagagucccuggcucaaaa

SEQ ID NO: 1063797 - RNA, 22 nt, Human
agauaaauaccaaacagaacca

SEQ ID NO: 1063798 - RNA, 22 nt, Human
agcaagcagaagcaaaaaggaa

SEQ ID NO: 1063799 - RNA, 20 nt, Human
agccaccgcgcccagccaag

SEQ ID NO: 1063800 - RNA, 19 nt, Human
agccugggccugcuccuuu

SEQ ID NO: 1063801 - RNA, 23 nt, Human
agcgugguggcucacaccuguaa

SEQ ID NO: 1063802 - RNA, 22 nt, Human
agcuugggcaacauagugagac

SEQ ID NO: 1063803 - RNA, 23 nt, Human
agcuugggcaacauagugagacc

SEQ ID NO: 1063804 - RNA, 24 nt, Human
agcuugggcaacauagugagaccc

SEQ ID NO: 1063805 - RNA, 20 nt, Human
aggaaaacaaacauuaccaa

SEQ ID NO: 1063806 - RNA, 24 nt, Human
aggaagaggcugcggugagccgag

SEQ ID NO: 1063807 - RNA, 27 nt, Human
aggagugugcugaauaacucagcuuug

SEQ ID NO: 1063808 - RNA, 21 nt, Human
aggaucacuugaggccaggag

SEQ ID NO: 1063809 - RNA, 24 nt, Human
aggaucacuugaggccaggaguuu

SEQ ID NO: 1063810 - RNA, 21 nt, Human
aggccaagguggaaggaucac

SEQ ID NO: 1063811 - RNA, 24 nt, Human
aggggccagacacgguggcucaca

SEQ ID NO: 1063812 - RNA, 18 nt, Human
agguggaaggaucacuug

SEQ ID NO: 1063813 - RNA, 18 nt, Human
aguaccugggauuauagc

SEQ ID NO: 1063814 - RNA, 22 nt, Human
aguagagacgggguuucgccau

SEQ ID NO: 1063815 - RNA, 19 nt, Human
agugcaguggugugaucuc

SEQ ID NO: 1063816 - RNA, 21 nt, Human
agugcaguggugugaucucag

SEQ ID NO: 1063817 - RNA, 23 nt, Human
agugcaguggugugaucucagcu

SEQ ID NO: 1063818 - RNA, 24 nt, Human
agugcaguggugugaucucagcuc

SEQ ID NO: 1063819 - RNA, 24 nt, Human
aguggugugaucucagcucccugc

SEQ ID NO: 1063820 - RNA, 18 nt, Human
aguugcuuuuuucauaag

SEQ ID NO: 1063821 - RNA, 22 nt, Human
auaaagaagacauccaugagga

SEQ ID NO: 1063822 - RNA, 22 nt, Human
aucccagcacuuugggaggcca

SEQ ID NO: 1063823 - RNA, 23 nt, Human
augaggacgaauguccacaccug

SEQ ID NO: 1063824 - RNA, 21 nt, Human
augggugggaccaugucacag

SEQ ID NO: 1063825 - RNA, 21 nt, Human
augucucuuuaccacucaaac

SEQ ID NO: 1063826 - RNA, 24 nt, Human
auuuuuguauuuuuaguagagacg

SEQ ID NO: 1063827 - RNA, 22 nt, Human
caaaaacuuuaaaucaaaguaa

SEQ ID NO: 1063828 - RNA, 24 nt, Human
caaagugcugggauuacaagcaug

SEQ ID NO: 1063829 - RNA, 19 nt, Human
caacccaguucugcccucu

SEQ ID NO: 1063830 - RNA, 27 nt, Human
caacgccgacucccacagcaugccaca

SEQ ID NO: 1063831 - RNA, 28 nt, Human
caacuccuggguucaagcgagucucccu

SEQ ID NO: 1063832 - RNA, 26 nt, Human
caagguggaaggaucacuugaggcca

SEQ ID NO: 1063833 - RNA, 19 nt, Human
cacacccuucauacuuccc

SEQ ID NO: 1063834 - RNA, 23 nt, Human
cacaccuauaaucccaguacuuu

SEQ ID NO: 1063835 - RNA, 24 nt, Human
cacaccuguaaucccagcacuuug

SEQ ID NO: 1063836 - RNA, 18 nt, Human
cacagcucacauccggcc

SEQ ID NO: 1063837 - RNA, 24 nt, Human
caccaugcccgguuaauuuuugua

SEQ ID NO: 1063838 - RNA, 19 nt, Human
caccuguaaucccagcacu

SEQ ID NO: 1063839 - RNA, 24 nt, Human
caccuguaaucccagcacuuuggg

SEQ ID NO: 1063840 - RNA, 19 nt, Human
cacucccccagucccccug

SEQ ID NO: 1063841 - RNA, 20 nt, Human
cacuguacuacagucugggc

SEQ ID NO: 1063842 - RNA, 24 nt, Human
cacuguacuacagucugggcgaca

SEQ ID NO: 1063843 - RNA, 21 nt, Human
cacuguguaaacccaccugcc

SEQ ID NO: 1063844 - RNA, 25 nt, Human
cagaaccaggauaguggaaggaagu

SEQ ID NO: 1063845 - RNA, 18 nt, Human
cagagcucucuguccucc

SEQ ID NO: 1063846 - RNA, 19 nt, Human
cagagcucucuguccuccc

SEQ ID NO: 1063847 - RNA, 23 nt, Human
cagagcucucuguccucccaaag

SEQ ID NO: 1063848 - RNA, 19 nt, Human
cagaugauaaccaugaccc

SEQ ID NO: 1063849 - RNA, 25 nt, Human
cagcaccaaugcaauaguccuugaa

SEQ ID NO: 1063850 - RNA, 21 nt, Human
cagcacuuugggaggccaagg

SEQ ID NO: 1063851 - RNA, 24 nt, Human
cagcacuuugggaggccaaggugg

SEQ ID NO: 1063852 - RNA, 23 nt, Human
cagcagccucgggugccugaguu

SEQ ID NO: 1063853 - RNA, 21 nt, Human
cagcaugccacaacaugccuu

SEQ ID NO: 1063854 - RNA, 28 nt, Human
cagccaagggacauuacuucuuaaguac

SEQ ID NO: 1063855 - RNA, 22 nt, Human
cagcccacagagaacuguccag

SEQ ID NO: 1063856 - RNA, 20 nt, Human
cagccucccgaguaccuggg

SEQ ID NO: 1063857 - RNA, 19 nt, Human
cagcucccaaagugcuggg

SEQ ID NO: 1063858 - RNA, 19 nt, Human
caggauaguggaaggaagu

SEQ ID NO: 1063859 - RNA, 22 nt, Human
caguaucagagacacaaaagcc

SEQ ID NO: 1063860 - RNA, 24 nt, Human
cagucggcaggaguaacaacagaa

SEQ ID NO: 1063861 - RNA, 25 nt, Human
caugaccccaaaucaagaguuauaa

SEQ ID NO: 1063862 - RNA, 20 nt, Human
caugcaucacgugugucuuu

SEQ ID NO: 1063863 - RNA, 20 nt, Human
cauguugcccaggcuggucu

SEQ ID NO: 1063864 - RNA, 23 nt, Human
cauguugcccaggcuggucuuga

SEQ ID NO: 1063865 - RNA, 24 nt, Human
cauguugcccaggcuggucuugaa

SEQ ID NO: 1063866 - RNA, 19 nt, Human
ccaaagugcugggauuaca

SEQ ID NO: 1063867 - RNA, 24 nt, Human
ccaaagugcugggauuacaagcau

SEQ ID NO: 1063868 - RNA, 22 nt, Human
ccacaacaugccuuguggccag

SEQ ID NO: 1063869 - RNA, 22 nt, Human
ccacucacaugucucucauccc

SEQ ID NO: 1063870 - RNA, 21 nt, Human
ccacuguacuacagucugggc

SEQ ID NO: 1063871 - RNA, 23 nt, Human
ccacuguacuacagucugggcga

SEQ ID NO: 1063872 - RNA, 24 nt, Human
ccagagcucucuguccucccaaag

SEQ ID NO: 1063873 - RNA, 21 nt, Human
ccagcccacagagaacugucc

SEQ ID NO: 1063874 - RNA, 23 nt, Human
cccacagcaugccacaacaugcc

SEQ ID NO: 1063875 - RNA, 26 nt, Human
cccacuucucaccacuguguaaaccc

SEQ ID NO: 1063876 - RNA, 21 nt, Human
cccaggacgccagcccacaga

SEQ ID NO: 1063877 - RNA, 23 nt, Human
cccaggacgccagcccacagaga

SEQ ID NO: 1063878 - RNA, 21 nt, Human
cccccagucccccugaagggc

SEQ ID NO: 1063879 - RNA, 24 nt, Human
cccccagucccccugaagggcaaa

SEQ ID NO: 1063880 - RNA, 18 nt, Human
ccccccacuuaguccuca

SEQ ID NO: 1063881 - RNA, 24 nt, Human
cccgaguaccugggauuauagccu

SEQ ID NO: 1063882 - RNA, 24 nt, Human
cccucuggaaccgguugccucccc

SEQ ID NO: 1063883 - RNA, 25 nt, Human
cccucuggaaccgguugccucccca

SEQ ID NO: 1063884 - RNA, 19 nt, Human
cccuggcucaaaaaaaaaa

SEQ ID NO: 1063885 - RNA, 23 nt, Human
ccuccagcucccaaagugcuggg

SEQ ID NO: 1063886 - RNA, 23 nt, Human
ccucuggaaccgguugccucccc

SEQ ID NO: 1063887 - RNA, 24 nt, Human
ccugaccucaggugauucgcccac

SEQ ID NO: 1063888 - RNA, 20 nt, Human
ccuggagcuauuaaaggacc

SEQ ID NO: 1063889 - RNA, 21 nt, Human
ccuggagcuauuaaaggaccc

SEQ ID NO: 1063890 - RNA, 23 nt, Human
ccuggcucaaaaaaaaaaaaaaa

SEQ ID NO: 1063891 - RNA, 23 nt, Human
ccuggguucaagcgagucucccc

SEQ ID NO: 1063892 - RNA, 18 nt, Human
ccuucggugagcucuuca

SEQ ID NO: 1063893 - RNA, 30 nt, Human
ccuuucaugggcaggggugguaaaaggagc

SEQ ID NO: 1063894 - RNA, 24 nt, Human
cgccauguugcccaggcuggucuu

SEQ ID NO: 1063895 - RNA, 27 nt, Human
cgccauguugcccaggcuggucuugaa

SEQ ID NO: 1063896 - RNA, 24 nt, Human
cgccucagccucccgaguaccugg

SEQ ID NO: 1063897 - RNA, 24 nt, Human
cgggguuucgccauguugcccagg

SEQ ID NO: 1063898 - RNA, 24 nt, Human
cguucugucacccaggcuagagug

SEQ ID NO: 1063899 - RNA, 18 nt, Human
cuaauacccgccaugcaa

SEQ ID NO: 1063900 - RNA, 25 nt, Human
cuagaaaucaauagcccuacucaac

SEQ ID NO: 1063901 - RNA, 24 nt, Human
cuagagugcaguggugugaucuca

SEQ ID NO: 1063902 - RNA, 22 nt, Human
cucacaccuauaaucccaguac

SEQ ID NO: 1063903 - RNA, 24 nt, Human
cucacaccuauaaucccaguacuu

SEQ ID NO: 1063904 - RNA, 22 nt, Human
cucacaccuguaaucccagcac

SEQ ID NO: 1063905 - RNA, 24 nt, Human
cucacaccuguaaucccagcacuu

SEQ ID NO: 1063906 - RNA, 23 nt, Human
cucacaugucucucaucccccca

SEQ ID NO: 1063907 - RNA, 20 nt, Human
cucccaacccaguucugccc

SEQ ID NO: 1063908 - RNA, 19 nt, Human
cuccuucggugagcucuuc

SEQ ID NO: 1063909 - RNA, 21 nt, Human
cucuggaaccgguugccuccc

SEQ ID NO: 1063910 - RNA, 20 nt, Human
cugcggugagccgagaucau

SEQ ID NO: 1063911 - RNA, 22 nt, Human
cugggauuauagccugccacca

SEQ ID NO: 1063912 - RNA, 23 nt, Human
cugucuuccaaagagccugggcc

SEQ ID NO: 1063913 - RNA, 22 nt, Human
cuguuggcucaguuucauaugc

SEQ ID NO: 1063914 - RNA, 24 nt, Human
cuucuaauacccgccaugcaaacu

SEQ ID NO: 1063915 - RNA, 23 nt, Human
gaagaucacacccuucauacuuc

SEQ ID NO: 1063916 - RNA, 24 nt, Human
gaccucaggugauucgcccaccuc

SEQ ID NO: 1063917 - RNA, 22 nt, Human
gacgggguuucgccauguugcc

SEQ ID NO: 1063918 - RNA, 21 nt, Human
gagacagagucucguucuguc

SEQ ID NO: 1063919 - RNA, 23 nt, Human
gagacgggguuucgccauguugc

SEQ ID NO: 1063920 - RNA, 21 nt, Human
gaggagggccagcgugguggc

SEQ ID NO: 1063921 - RNA, 24 nt, Human
gaggagggccagcgugguggcuca

SEQ ID NO: 1063922 - RNA, 23 nt, Human
gaucacggccaaagcuauacuug

SEQ ID NO: 1063923 - RNA, 24 nt, Human
gaucacuugaggccaggaguuuga

SEQ ID NO: 1063924 - RNA, 21 nt, Human
gaugauaaccaugaccccaaa

SEQ ID NO: 1063925 - RNA, 18 nt, Human
gauuacaagcaugagcca

SEQ ID NO: 1063926 - RNA, 19 nt, Human
gauuauagccugccaccau

SEQ ID NO: 1063927 - RNA, 24 nt, Human
gcaggaguaacaacagaaccagga

SEQ ID NO: 1063928 - RNA, 21 nt, Human
gccaaagaucaagaugagaua

SEQ ID NO: 1063929 - RNA, 24 nt, Human
gccacuguacuacagucugggcga

SEQ ID NO: 1063930 - RNA, 24 nt, Human
gccauguugcccaggcuggucuug

SEQ ID NO: 1063931 - RNA, 20 nt, Human
gcccaacacccacucacaug

SEQ ID NO: 1063932 - RNA, 22 nt, Human
gcccgguuaauuuuuguauuuu

SEQ ID NO: 1063933 - RNA, 22 nt, Human
gccugaguuacuuuccugcacc

SEQ ID NO: 1063934 - RNA, 24 nt, Human
gcgagucucccgccucagccuccc

SEQ ID NO: 1063935 - RNA, 21 nt, Human
gcuaaacugaaaagggacaaa

SEQ ID NO: 1063936 - RNA, 21 nt, Human
gcucucgacaauaaauuuuag

SEQ ID NO: 1063937 - RNA, 21 nt, Human
gcugggauuacaagcaugagc

SEQ ID NO: 1063938 - RNA, 23 nt, Human
gcuggucuugaacuccugaccuc

SEQ ID NO: 1063939 - RNA, 21 nt, Human
ggaacagcacugcagucggca

SEQ ID NO: 1063940 - RNA, 20 nt, Human
ggaaccugggggccaagggg

SEQ ID NO: 1063941 - RNA, 23 nt, Human
ggagcaagcagaagcaaaaagga

SEQ ID NO: 1063942 - RNA, 23 nt, Human
ggagcgggaugaccugugcaguu

SEQ ID NO: 1063943 - RNA, 22 nt, Human
ggagggccagcgugguggcuca

SEQ ID NO: 1063944 - RNA, 22 nt, Human
ggaucacuugaggccaggaguu

SEQ ID NO: 1063945 - RNA, 22 nt, Human
ggauuacaagcaugagccaccg

SEQ ID NO: 1063946 - RNA, 22 nt, Human
ggccagcgugguggcucacacc

SEQ ID NO: 1063947 - RNA, 22 nt, Human
ggcuagagugcaguggugugau

SEQ ID NO: 1063948 - RNA, 21 nt, Human
ggcucacaccuguaaucccag

SEQ ID NO: 1063949 - RNA, 24 nt, Human
ggcuggucuugaacuccugaccuc

SEQ ID NO: 1063950 - RNA, 21 nt, Human
gggaaccugggggccaagggg

SEQ ID NO: 1063951 - RNA, 24 nt, Human
gggccagacacgguggcucacacc

SEQ ID NO: 1063952 - RNA, 23 nt, Human
gggguuucgccauguugcccagg

SEQ ID NO: 1063953 - RNA, 20 nt, Human
gguaaaaggagcaagcagaa

SEQ ID NO: 1063954 - RNA, 19 nt, Human
ggucuugaacuccugaccu

SEQ ID NO: 1063955 - RNA, 24 nt, Human
gguggcucacaccuauaaucccag

SEQ ID NO: 1063956 - RNA, 21 nt, Human
gguuauuuaaaaaaaaaaaaa

SEQ ID NO: 1063957 - RNA, 23 nt, Human
guagagacgggguuucgccaugu

SEQ ID NO: 1063958 - RNA, 24 nt, Human
guauuugccauccagcugaccaag

SEQ ID NO: 1063959 - RNA, 24 nt, Human
gugauucgcccaccuccagcuccc

SEQ ID NO: 1063960 - RNA, 23 nt, Human
guggcucacaccuguaaucccag

SEQ ID NO: 1063961 - RNA, 24 nt, Human
guuucgccauguugcccaggcugg

SEQ ID NO: 1063962 - RNA, 22 nt, Human
uaaaaaaaaaaaaaaaagcuga

SEQ ID NO: 1063963 - RNA, 21 nt, Human
uaaaaacagaauugcugaaag

SEQ ID NO: 1063964 - RNA, 21 nt, Human
uaaaaggagcaagcagaagca

SEQ ID NO: 1063965 - RNA, 23 nt, Human
uaaaaggagcaagcagaagcugg

SEQ ID NO: 1063966 - RNA, 26 nt, Human
uaacugaauauguaucauaaacugaa

SEQ ID NO: 1063967 - RNA, 21 nt, Human
uaaguacagaagcaucaguga

SEQ ID NO: 1063968 - RNA, 24 nt, Human
uaauuuuuguauuuuuaguagaga

SEQ ID NO: 1063969 - RNA, 24 nt, Human
uacaagcaugagccaccgcgccca

SEQ ID NO: 1063970 - RNA, 24 nt, Human
uacagaagcaucagugaaggucag

SEQ ID NO: 1063971 - RNA, 18 nt, Human
uaccaaacagaaccauuu

SEQ ID NO: 1063972 - RNA, 26 nt, Human
uaccaaacagaaccauuucacuuucu

SEQ ID NO: 1063973 - RNA, 22 nt, Human
uacuggcccaacacccacucac

SEQ ID NO: 1063974 - RNA, 23 nt, Human
uagaaaaaauauggaauaauaau

SEQ ID NO: 1063975 - RNA, 22 nt, Human
uagagacgggguuucgccaugu

SEQ ID NO: 1063976 - RNA, 18 nt, Human
uagagggauaggggccag

SEQ ID NO: 1063977 - RNA, 24 nt, Human
uagagugcaguggugugaucucag

SEQ ID NO: 1063978 - RNA, 22 nt, Human
uaggguaagaauaacaucucuc

SEQ ID NO: 1063979 - RNA, 24 nt, Human
uaguagagacgggguuucgccaug

SEQ ID NO: 1063980 - RNA, 19 nt, Human
ucaaaaaaaaaaaaaaaaa

SEQ ID NO: 1063981 - RNA, 22 nt, Human
ucaaaaaaaaaaaaaaaaaggu

SEQ ID NO: 1063982 - RNA, 19 nt, Human
ucaacgccuaacaauugag

SEQ ID NO: 1063983 - RNA, 24 nt, Human
ucaauagcccuacucaacgccuaa

SEQ ID NO: 1063984 - RNA, 25 nt, Human
ucaauagcccuacucaacgccuaac

SEQ ID NO: 1063985 - RNA, 20 nt, Human
ucaaugcaauggacaagcug

SEQ ID NO: 1063986 - RNA, 21 nt, Human
ucacacccuucauacuuccca

SEQ ID NO: 1063987 - RNA, 19 nt, Human
ucaccugaaaaugucucuc

SEQ ID NO: 1063988 - RNA, 18 nt, Human
ucacuauugcucauuacc

SEQ ID NO: 1063989 - RNA, 20 nt, Human
ucagcagccucgggugccug

SEQ ID NO: 1063990 - RNA, 24 nt, Human
uccaaagagccugggccugcuccu

SEQ ID NO: 1063991 - RNA, 23 nt, Human
uccaagccaaagaucaagaugag

SEQ ID NO: 1063992 - RNA, 18 nt, Human
uccagcucccaaagugcu

SEQ ID NO: 1063993 - RNA, 18 nt, Human
ucccaaagugcugggauu

SEQ ID NO: 1063994 - RNA, 24 nt, Human
ucccaaagugcugggauuacaagc

SEQ ID NO: 1063995 - RNA, 20 nt, Human
ucccaacccaguucugcccu

SEQ ID NO: 1063996 - RNA, 24 nt, Human
ucccccuuucaugggcagggguug

SEQ ID NO: 1063997 - RNA, 22 nt, Human
ucccugcaacuuccaacuccug

SEQ ID NO: 1063998 - RNA, 24 nt, Human
ucccugcaacuuccaacuccuggg

SEQ ID NO: 1063999 - RNA, 25 nt, Human
ucccuggcucaaaaaaaaaaaaaaa

SEQ ID NO: 1064000 - RNA, 21 nt, Human
uccucccaaagagaguuucau

SEQ ID NO: 1064001 - RNA, 24 nt, Human
uccugcaccguccauucccaccuc

SEQ ID NO: 1064002 - RNA, 21 nt, Human
uccuggguucaagcgagucuc

SEQ ID NO: 1064003 - RNA, 24 nt, Human
uccuugucucccaacccaguucug

SEQ ID NO: 1064004 - RNA, 22 nt, Human
ucgccauguugcccaggcuggu

SEQ ID NO: 1064005 - RNA, 22 nt, Human
ucggagauacuguacgauguca

SEQ ID NO: 1064006 - RNA, 22 nt, Human
ucuaauuucuuuaauaggguaa

SEQ ID NO: 1064007 - RNA, 24 nt, Human
ucucccgccucagccucccgagua

SEQ ID NO: 1064008 - RNA, 19 nt, Human
ucucguucugucacccagg

SEQ ID NO: 1064009 - RNA, 23 nt, Human
ucucguucugucacccaggcuag

SEQ ID NO: 1064010 - RNA, 24 nt, Human
ucucguucugucacccaggcuaga

SEQ ID NO: 1064011 - RNA, 25 nt, Human
ucucucauccccccacuuaguccuc

SEQ ID NO: 1064012 - RNA, 22 nt, Human
ucucugggaugcuucaacgccg

SEQ ID NO: 1064013 - RNA, 24 nt, Human
ucugucacccaggcuagagugcag

SEQ ID NO: 1064014 - RNA, 23 nt, Human
ucuugaacuccugaccucaggug

SEQ ID NO: 1064015 - RNA, 19 nt, Human
ugaaacagugaaaugcaaa

SEQ ID NO: 1064016 - RNA, 23 nt, Human
ugaaacagugaaaugcaaagaau

SEQ ID NO: 1064017 - RNA, 24 nt, Human
ugaaacagugaaaugcaaagaaug

SEQ ID NO: 1064018 - RNA, 20 nt, Human
ugaaaugcaaagaauguauc

SEQ ID NO: 1064019 - RNA, 21 nt, Human
ugaagaucacggccaaagcua

SEQ ID NO: 1064020 - RNA, 20 nt, Human
ugaccaacaaucagacccca

SEQ ID NO: 1064021 - RNA, 22 nt, Human
ugaccaacaaucagaccccaca

SEQ ID NO: 1064022 - RNA, 18 nt, Human
ugaccucaggugauucgc

SEQ ID NO: 1064023 - RNA, 24 nt, Human
ugaccucaggugauucgcccaccu

SEQ ID NO: 1064024 - RNA, 22 nt, Human
ugagccgagaucaugccacugu

SEQ ID NO: 1064025 - RNA, 20 nt, Human
ugaggagggccagcguggug

SEQ ID NO: 1064026 - RNA, 24 nt, Human
ugauucgcccaccuccagcuccca

SEQ ID NO: 1064027 - RNA, 25 nt, Human
ugauuuacaagaacugugcuuccuu

SEQ ID NO: 1064028 - RNA, 18 nt, Human
ugcaauggacaagcugaa

SEQ ID NO: 1064029 - RNA, 22 nt, Human
ugcagcucacagcauguacaug

SEQ ID NO: 1064030 - RNA, 22 nt, Human
ugcaguggugugaucucagcuc

SEQ ID NO: 1064031 - RNA, 19 nt, Human
ugccacuguacuacagucu

SEQ ID NO: 1064032 - RNA, 24 nt, Human
ugcccaggcuggucuugaacuccu

SEQ ID NO: 1064033 - RNA, 19 nt, Human
ugccccagagcucucuguc

SEQ ID NO: 1064034 - RNA, 22 nt, Human
ugccccuccccuggaagucugc

SEQ ID NO: 1064035 - RNA, 20 nt, Human
ugccucaaaacaagcugcga

SEQ ID NO: 1064036 - RNA, 18 nt, Human
ugccuuguggccaggcgg

SEQ ID NO: 1064037 - RNA, 20 nt, Human
ugccuuguggccaggcggcc

SEQ ID NO: 1064038 - RNA, 24 nt, Human
ugcugggauuacaagcaugagcca

SEQ ID NO: 1064039 - RNA, 20 nt, Human
uggaacaauacuccaaggac

SEQ ID NO: 1064040 - RNA, 21 nt, Human
uggaacaauacuccaaggaca

SEQ ID NO: 1064041 - RNA, 22 nt, Human
uggaauaauaaugguuauuuaa

SEQ ID NO: 1064042 - RNA, 27 nt, Human
uggcaaggggcguggaccgcugugggg

SEQ ID NO: 1064043 - RNA, 19 nt, Human
uggcccaacacccacucac

SEQ ID NO: 1064044 - RNA, 18 nt, Human
uggcucaaaaaaaaaaaa

SEQ ID NO: 1064045 - RNA, 22 nt, Human
uggcucacaccuauaaucccag

SEQ ID NO: 1064046 - RNA, 22 nt, Human
uggcucacaccuauaaucccag

SEQ ID NO: 1064047 - RNA, 21 nt, Human
uggcucacaccuguaauccca

SEQ ID NO: 1064048 - RNA, 22 nt, Human
uggcucacaccuguaaucccag

SEQ ID NO: 1064049 - RNA, 24 nt, Human
uggcucacaccuguaaucccagca

SEQ ID NO: 1064050 - RNA, 19 nt, Human
uggcucagggggagcacag

SEQ ID NO: 1064051 - RNA, 26 nt, Human
ugggaaccugggggccaaggggcccc

SEQ ID NO: 1064052 - RNA, 20 nt, Human
ugggaccaugucacaggagg

SEQ ID NO: 1064053 - RNA, 22 nt, Human
ugggaccaugucacaggagggu

SEQ ID NO: 1064054 - RNA, 23 nt, Human
ugggaccaugucacaggaggguu

SEQ ID NO: 1064055 - RNA, 19 nt, Human
ugggagcgggaugaccugu

SEQ ID NO: 1064056 - RNA, 24 nt, Human
ugggaggccaagguggaaggauca

SEQ ID NO: 1064057 - RNA, 21 nt, Human
ugggauuacaagcaugagcca

SEQ ID NO: 1064058 - RNA, 22 nt, Human
ugggauuacaagcaugagccac

SEQ ID NO: 1064059 - RNA, 23 nt, Human
ugggauuacaagcaugagccacc

SEQ ID NO: 1064060 - RNA, 24 nt, Human
ugggauuacaagcaugagccaccg

SEQ ID NO: 1064061 - RNA, 24 nt, Human
ugggauuacaagcaugagccaccg

SEQ ID NO: 1064062 - RNA, 26 nt, Human
ugggauuacaagcaugagccaccgcg

SEQ ID NO: 1064063 - RNA, 19 nt, Human
ugggauuauagccugccac

SEQ ID NO: 1064064 - RNA, 21 nt, Human
ugggauuauagccugccacca

SEQ ID NO: 1064065 - RNA, 22 nt, Human
ugggauuauagccugccaccau

SEQ ID NO: 1064066 - RNA, 24 nt, Human
uggggggaugggauuuggcugaaa

SEQ ID NO: 1064067 - RNA, 24 nt, Human
ugguggcucacaccuguaauccca

SEQ ID NO: 1064068 - RNA, 18 nt, Human
uggugugaucucagcucc

SEQ ID NO: 1064069 - RNA, 24 nt, Human
uggugugaucucagcucccugcaa

SEQ ID NO: 1064070 - RNA, 21 nt, Human
uguauuuuuaguagagacggg

SEQ ID NO: 1064071 - RNA, 21 nt, Human
ugucaagacaacuguaacugg

SEQ ID NO: 1064072 - RNA, 23 nt, Human
ugucucccaacccaguucugccc

SEQ ID NO: 1064073 - RNA, 22 nt, Human
uuaaaagacgugcucucgacaa

SEQ ID NO: 1064074 - RNA, 18 nt, Human
uuaguagagacgggguuu

SEQ ID NO: 1064075 - RNA, 22 nt, Human
uuaguagagacgggguuucgcc

SEQ ID NO: 1064076 - RNA, 24 nt, Human
uuaguagagacgggguuucgccau

SEQ ID NO: 1064077 - RNA, 18 nt, Human
uucaagcgagucucccgc

SEQ ID NO: 1064078 - RNA, 21 nt, Human
uucgcccaccuccagcuccca

SEQ ID NO: 1064079 - RNA, 22 nt, Human
uuuaaaaaaaaaaaaaaaagcu

SEQ ID NO: 1064080 - RNA, 22 nt, Human
uuucgccauguugcccaggcug

SEQ ID NO: 1064081 - RNA, 23 nt, Human
uuucgccauguugcccaggcugg

SEQ ID NO: 1064082 - RNA, 23 nt, Human
uuucgccauguugcccaggcugu

SEQ ID NO: 1064083 - RNA, 18 nt, Human
uuuucuuugaugcugcug

SEQ ID NO: 1064084 - RNA, 22 nt, Human
uuuuuaguagagacgggguuuc

SEQ ID NO: 1064085 - RNA, 23 nt, Human
uuuuuaguagagacgggguuucg

SEQ ID NO: 1064086 - RNA, 20 nt, Human
uuuuuguauuuuuaguagag

SEQ ID NO: 1064087 - RNA, 23 nt, Human
aaaaagaauacuggcccugugaa

SEQ ID NO: 1064088 - RNA, 23 nt, Human
aaacaauccucccacuugccaac

SEQ ID NO: 1064089 - RNA, 22 nt, Human
aagacucucaauggaguacggc

SEQ ID NO: 1064090 - RNA, 25 nt, Human
aagcaauccuccugccugagccucc

SEQ ID NO: 1064091 - RNA, 21 nt, Human
aaguagcuggaaccacaggua

SEQ ID NO: 1064092 - RNA, 18 nt, Human
acagcucacugcagccuc

SEQ ID NO: 1064093 - RNA, 23 nt, Human
agauuccugggcucaaacaaucc

SEQ ID NO: 1064094 - RNA, 19 nt, Human
aggaaaggccagcgaagug

SEQ ID NO: 1064095 - RNA, 24 nt, Human
aggaaaggccagcgaaguguccug

SEQ ID NO: 1064096 - RNA, 20 nt, Human
aggcauuugagcuugagaag

SEQ ID NO: 1064097 - RNA, 19 nt, Human
aggcuggagugcaguggca

SEQ ID NO: 1064098 - RNA, 23 nt, Human
aguagcuggaaccacagguaugc

SEQ ID NO: 1064099 - RNA, 21 nt, Human
agugcaguggcacaaucacag

SEQ ID NO: 1064100 - RNA, 18 nt, Human
auggggucucaucauguu

SEQ ID NO: 1064101 - RNA, 24 nt, Human
auggggucucaucauguugcucag

SEQ ID NO: 1064102 - RNA, 22 nt, Human
caaaaagaggaaaagcaccaac

SEQ ID NO: 1064103 - RNA, 22 nt, Human
caaacaauccucccacuugcca

SEQ ID NO: 1064104 - RNA, 24 nt, Human
caagaaucugcaucugaacgccau

SEQ ID NO: 1064105 - RNA, 27 nt, Human
caagcaauccuccugccugagccuccc

SEQ ID NO: 1064106 - RNA, 27 nt, Human
caagcaauccuccugccugagccuccc

SEQ ID NO: 1064107 - RNA, 24 nt, Human
cacagguaugcgccaccacaccca

SEQ ID NO: 1064108 - RNA, 24 nt, Human
caccgagugacaaguaugaggcca

SEQ ID NO: 1064109 - RNA, 23 nt, Human
cacuuaaucauucagcaccccgg

SEQ ID NO: 1064110 - RNA, 28 nt, Human
cagcccgccagcugcagaacuuugggcu

SEQ ID NO: 1064111 - RNA, 24 nt, Human
cagccucgaccuacugggcucaag

SEQ ID NO: 1064112 - RNA, 24 nt, Human
caucauguugcucaggcuggucuc

SEQ ID NO: 1064113 - RNA, 19 nt, Human
cauguugcucaggcugguc

SEQ ID NO: 1064114 - RNA, 21 nt, Human
cauguugcucaggcuggucuc

SEQ ID NO: 1064115 - RNA, 22 nt, Human
cauguugcucaggcuggucuca

SEQ ID NO: 1064116 - RNA, 23 nt, Human
cauguugcucaggcuggucucag

SEQ ID NO: 1064117 - RNA, 24 nt, Human
cauguugcucaggcuggucucaga

SEQ ID NO: 1064118 - RNA, 24 nt, Human
ccucccacuugccauuugcaagcc

SEQ ID NO: 1064119 - RNA, 26 nt, Human
ccuccugccugagccucccaaguagc

SEQ ID NO: 1064120 - RNA, 19 nt, Human
ccucgaccuacugggcuca

SEQ ID NO: 1064121 - RNA, 21 nt, Human
ccugugaaguugcaauuuuaa

SEQ ID NO: 1064122 - RNA, 21 nt, Human
cgaaguguccugucugcccuc

SEQ ID NO: 1064123 - RNA, 20 nt, Human
cgcagugucaccgagugaca

SEQ ID NO: 1064124 - RNA, 24 nt, Human
cggcggcaaaaagaggaaaagcac

SEQ ID NO: 1064125 - RNA, 24 nt, Human
cguucuguggcccaggcuggagug

SEQ ID NO: 1064126 - RNA, 22 nt, Human
cucaaacaauccucccacuugc

SEQ ID NO: 1064127 - RNA, 24 nt, Human
cucaagcaauccuccugccugagc

SEQ ID NO: 1064128 - RNA, 23 nt, Human
cugaacgccaucuccaaaggacu

SEQ ID NO: 1064129 - RNA, 18 nt, Human
gagauggggucucaucau

SEQ ID NO: 1064130 - RNA, 23 nt, Human
gagugacaaguaugaggccagga

SEQ ID NO: 1064131 - RNA, 24 nt, Human
gagugcaguggcacaaucacagcu

SEQ ID NO: 1064132 - RNA, 21 nt, Human
gcaaaaagaggaaaagcacca

SEQ ID NO: 1064133 - RNA, 19 nt, Human
gcccaggcuggagugcagu

SEQ ID NO: 1064134 - RNA, 23 nt, Human
gcccaggcuggagugcaguggca

SEQ ID NO: 1064135 - RNA, 19 nt, Human
gcuggagugcaguggcaca

SEQ ID NO: 1064136 - RNA, 22 nt, Human
gggcucaagcaauccuccugcc

SEQ ID NO: 1064137 - RNA, 22 nt, Human
gggucucaucauguugcucagg

SEQ ID NO: 1064138 - RNA, 21 nt, Human
guagagauggggucucaucau

SEQ ID NO: 1064139 - RNA, 23 nt, Human
guggcacaaucacagcucacugc

SEQ ID NO: 1064140 - RNA, 19 nt, Human
guggcccaggcuggagugc

SEQ ID NO: 1064141 - RNA, 22 nt, Human
guucuguggcccaggcuggagu

SEQ ID NO: 1064142 - RNA, 20 nt, Human
uaaaaagaauacuggcccug

SEQ ID NO: 1064143 - RNA, 18 nt, Human
uaaaugugcuuucugaac

SEQ ID NO: 1064144 - RNA, 23 nt, Human
uauccaaacuuuucugaucugau

SEQ ID NO: 1064145 - RNA, 20 nt, Human
uaugcgccaccacacccagc

SEQ ID NO: 1064146 - RNA, 24 nt, Human
uauggaacaagaaucugcaucuga

SEQ ID NO: 1064147 - RNA, 24 nt, Human
ucacugcagccucgaccuacuggg

SEQ ID NO: 1064148 - RNA, 24 nt, Human
ucauucagcaccccgguuuccuca

SEQ ID NO: 1064149 - RNA, 24 nt, Human
ucccaaguagcuggaaccacaggu

SEQ ID NO: 1064150 - RNA, 24 nt, Human
uccugggcucaaacaauccuccca

SEQ ID NO: 1064151 - RNA, 22 nt, Human
ucguucuguggcccaggcugga

SEQ ID NO: 1064152 - RNA, 19 nt, Human
ucucagauuccugggcuca

SEQ ID NO: 1064153 - RNA, 23 nt, Human
ucucaucauguugcucaggcugg

SEQ ID NO: 1064154 - RNA, 23 nt, Human
ucucguucuguggcccaggcugg

SEQ ID NO: 1064155 - RNA, 24 nt, Human
ucucguucuguggcccaggcugga

SEQ ID NO: 1064156 - RNA, 24 nt, Human
ucuguggcccaggcuggagugcag

SEQ ID NO: 1064157 - RNA, 21 nt, Human
ugacaaguaugaggccaggaa

SEQ ID NO: 1064158 - RNA, 19 nt, Human
ugaggccaggaaaggccag

SEQ ID NO: 1064159 - RNA, 24 nt, Human
ugccugagccucccaaguagcugg

SEQ ID NO: 1064160 - RNA, 22 nt, Human
ugcucaggcuggucucagauuc

SEQ ID NO: 1064161 - RNA, 24 nt, Human
ugcucaggcuggucucagauuccu

SEQ ID NO: 1064162 - RNA, 21 nt, Human
uggaaccacagguaugcgcca

SEQ ID NO: 1064163 - RNA, 24 nt, Human
uggaaccacagguaugcgccacca

SEQ ID NO: 1064164 - RNA, 18 nt, Human
uggagugcaguggcacaa

SEQ ID NO: 1064165 - RNA, 19 nt, Human
uggagugcaguggcacaau

SEQ ID NO: 1064166 - RNA, 21 nt, Human
uggagugcaguggcacaauca

SEQ ID NO: 1064167 - RNA, 20 nt, Human
uggcacaaucacagcucacu

SEQ ID NO: 1064168 - RNA, 23 nt, Human
uggcacaaucacagcucacugca

SEQ ID NO: 1064169 - RNA, 18 nt, Human
uggcccaggcuggagugc

SEQ ID NO: 1064170 - RNA, 24 nt, Human
ugggcucaagcaauccuccugccu

SEQ ID NO: 1064171 - RNA, 24 nt, Human
uggggucucaucauguugcucagg

SEQ ID NO: 1064172 - RNA, 24 nt, Human
uguagagauggggucucaucaugu

SEQ ID NO: 1064173 - RNA, 20 nt, Human
uguugcucaggcuggucuca

SEQ ID NO: 1064174 - RNA, 19 nt, Human
uuaauuuuuuguagagaug

SEQ ID NO: 1064175 - RNA, 23 nt, Human
uuccugggcucaaacaauccucc

SEQ ID NO: 1064176 - RNA, 24 nt, Human
uuguagagauggggucucaucaug

SEQ ID NO: 1064177 - RNA, 18 nt, Human
uuuguagagauggggucu

SEQ ID NO: 1064178 - RNA, 21 nt, Human
uuuguagagauggggucucau

SEQ ID NO: 1064179 - RNA, 24 nt, Human
uuuguagagauggggucucaucau

SEQ ID NO: 1064180 - RNA, 24 nt, Human
uuuuuuguagagauggggucucau

SEQ ID NO: 1064181 - RNA, 25 nt, Human
uuuuuuuuuucugagaugaagucuc

SEQ ID NO: 1064182 - RNA, 20 nt, Human
uuuuuuuuuuuuuuuucugg

SEQ ID NO: 1064183 - RNA, 22 nt, Human
aaaugguuaauaaauccgagca

SEQ ID NO: 1064184 - RNA, 20 nt, Human
aacccagaucuacccaauca

SEQ ID NO: 1064185 - RNA, 27 nt, Human
aacuuauuccuccuaccuaaucuccua

SEQ ID NO: 1064186 - RNA, 18 nt, Human
aaggaagaugugggugau

SEQ ID NO: 1064187 - RNA, 23 nt, Human
aagugagaacaugccguauuugg

SEQ ID NO: 1064188 - RNA, 18 nt, Human
acaauagcaggcccugga

SEQ ID NO: 1064189 - RNA, 22 nt, Human
acagaaaaaccucuccaggagc

SEQ ID NO: 1064190 - RNA, 19 nt, Human
accacauuuuccugaucca

SEQ ID NO: 1064191 - RNA, 20 nt, Human
accccucucuucuuagugcc

SEQ ID NO: 1064192 - RNA, 20 nt, Human
acuugagugcaugugucuuu

SEQ ID NO: 1064193 - RNA, 19 nt, Human
agaaagccugguauuuguc

SEQ ID NO: 1064194 - RNA, 18 nt, Human
agcacaauagcaggcccu

SEQ ID NO: 1064195 - RNA, 20 nt, Human
agcaggaacgaaagaaccua

SEQ ID NO: 1064196 - RNA, 24 nt, Human
agcaggcccuggagagcaaguuuu

SEQ ID NO: 1064197 - RNA, 22 nt, Human
aggagaagccagcugacccuug

SEQ ID NO: 1064198 - RNA, 24 nt, Human
aggccugcaaagaauguucgcugg

SEQ ID NO: 1064199 - RNA, 19 nt, Human
aggggcguaauaauuguuu

SEQ ID NO: 1064200 - RNA, 22 nt, Human
auagcacacuugagugcaugug

SEQ ID NO: 1064201 - RNA, 20 nt, Human
auggccaggcuccaccuugc

SEQ ID NO: 1064202 - RNA, 19 nt, Human
auuguuaucaauacaaucc

SEQ ID NO: 1064203 - RNA, 21 nt, Human
caacuucccagcuccuaaccc

SEQ ID NO: 1064204 - RNA, 26 nt, Human
caauagcaggaacgaaagaaccuauu

SEQ ID NO: 1064205 - RNA, 25 nt, Human
cacauuuuccugauccaaucuacca

SEQ ID NO: 1064206 - RNA, 19 nt, Human
cagcauccguccagcuuag

SEQ ID NO: 1064207 - RNA, 23 nt, Human
cagccuuggguuugcccuucuca

SEQ ID NO: 1064208 - RNA, 24 nt, Human
caggcaggcucucaucuguguauc

SEQ ID NO: 1064209 - RNA, 21 nt, Human
cauggccaggcuccaccuugc

SEQ ID NO: 1064210 - RNA, 21 nt, Human
ccagcuccuaacccagaucua

SEQ ID NO: 1064211 - RNA, 21 nt, Human
ccagguggugaguguaguacc

SEQ ID NO: 1064212 - RNA, 18 nt, Human
cccacuugucaguggagc

SEQ ID NO: 1064213 - RNA, 23 nt, Human
ccccaaccuucuaauaguccaca

SEQ ID NO: 1064214 - RNA, 21 nt, Human
ccccagagagcuguaauugcc

SEQ ID NO: 1064215 - RNA, 22 nt, Human
ccccugaggcucugcccugccu

SEQ ID NO: 1064216 - RNA, 19 nt, Human
ccuaacccagaucuaccca

SEQ ID NO: 1064217 - RNA, 22 nt, Human
ccuccagcuccauccauguugc

SEQ ID NO: 1064218 - RNA, 23 nt, Human
ccuccagcuccauccauguugcu

SEQ ID NO: 1064219 - RNA, 22 nt, Human
ccuuggguuugcccuucucaga

SEQ ID NO: 1064220 - RNA, 25 nt, Human
cgaagggagcaacauucacccaggu

SEQ ID NO: 1064221 - RNA, 28 nt, Human
cgagcaauuuacucuugaguuguaugaa

SEQ ID NO: 1064222 - RNA, 18 nt, Human
cuaacauaugcuaggggc

SEQ ID NO: 1064223 - RNA, 25 nt, Human
cuuaaaaauaaccaauuacagaaaa

SEQ ID NO: 1064224 - RNA, 21 nt, Human
gaaaccccugaggcucugccc

SEQ ID NO: 1064225 - RNA, 23 nt, Human
gaacuuauuccuccuaccuaauc

SEQ ID NO: 1064226 - RNA, 19 nt, Human
gaagccauuugauugaaaa

SEQ ID NO: 1064227 - RNA, 20 nt, Human
gacacuugagcagacugcag

SEQ ID NO: 1064228 - RNA, 22 nt, Human
gacagcacaaauaaauacagaa

SEQ ID NO: 1064229 - RNA, 20 nt, Human
gccuuggguuugcccuucuc

SEQ ID NO: 1064230 - RNA, 19 nt, Human
gcuuugggguuagacuugg

SEQ ID NO: 1064231 - RNA, 20 nt, Human
ggagcucgcccagccuuggg

SEQ ID NO: 1064232 - RNA, 18 nt, Human
ggaggccugcaaagaaug

SEQ ID NO: 1064233 - RNA, 21 nt, Human
ggcccuggagagcaaguuuua

SEQ ID NO: 1064234 - RNA, 23 nt, Human
gggaauauugugugguguuaagg

SEQ ID NO: 1064235 - RNA, 21 nt, Human
gugggugauuucccauggagg

SEQ ID NO: 1064236 - RNA, 22 nt, Human
uaacccagaucuacccaaucaa

SEQ ID NO: 1064237 - RNA, 22 nt, Human
uaagacaauagcaggaacgaaa

SEQ ID NO: 1064238 - RNA, 24 nt, Human
uaagauuucaucuugauucuuuuu

SEQ ID NO: 1064239 - RNA, 23 nt, Human
uaauaaucaaacuuacuucauac

SEQ ID NO: 1064240 - RNA, 22 nt, Human
uaaucuacguagaguauuuagc

SEQ ID NO: 1064241 - RNA, 21 nt, Human
uacaaagauugagaaauggug

SEQ ID NO: 1064242 - RNA, 19 nt, Human
uacagaaaauagaaaugag

SEQ ID NO: 1064243 - RNA, 21 nt, Human
uacagaaaauagaaaugagau

SEQ ID NO: 1064244 - RNA, 24 nt, Human
uacuuuuguauuuuacaagagaua

SEQ ID NO: 1064245 - RNA, 21 nt, Human
uagcacacuugagugcaugug

SEQ ID NO: 1064246 - RNA, 21 nt, Human
uagcaggaacgaaagaaccua

SEQ ID NO: 1064247 - RNA, 21 nt, Human
uagcuccuuccccaagucucc

SEQ ID NO: 1064248 - RNA, 23 nt, Human
uauauggaccacauuuuccugau

SEQ ID NO: 1064249 - RNA, 22 nt, Human
uauauuguuaucaauacaaucc

SEQ ID NO: 1064250 - RNA, 19 nt, Human
uauguuguauauggaccac

SEQ ID NO: 1064251 - RNA, 21 nt, Human
uauguuguauauggaccacau

SEQ ID NO: 1064252 - RNA, 24 nt, Human
uauuugguuuucuguuccuguguu

SEQ ID NO: 1064253 - RNA, 18 nt, Human
ucacagaccagcucugcc

SEQ ID NO: 1064254 - RNA, 24 nt, Human
uccagaucuuagcuccuuccccaa

SEQ ID NO: 1064255 - RNA, 21 nt, Human
ucccagcuccuaacccagauc

SEQ ID NO: 1064256 - RNA, 24 nt, Human
ucccauggaggucucagcgagggc

SEQ ID NO: 1064257 - RNA, 24 nt, Human
ucgggauacucugggagggccuau

SEQ ID NO: 1064258 - RNA, 18 nt, Human
ucuaccauugcugggcac

SEQ ID NO: 1064259 - RNA, 21 nt, Human
ucugcaaagacccuuauucca

SEQ ID NO: 1064260 - RNA, 23 nt, Human
ucugcaaagacccuuauuccaaa

SEQ ID NO: 1064261 - RNA, 24 nt, Human
ucuggggcuagaaaccccugaggc

SEQ ID NO: 1064262 - RNA, 19 nt, Human
ucuuugcuauugugaauag

SEQ ID NO: 1064263 - RNA, 20 nt, Human
ugaagccugagcuuuggggu

SEQ ID NO: 1064264 - RNA, 21 nt, Human
ugccaucagaccccucucuuc

SEQ ID NO: 1064265 - RNA, 26 nt, Human
uggaauggcuaaaucaagcuaauuga

SEQ ID NO: 1064266 - RNA, 23 nt, Human
uggagagcaaguuuuauccagug

SEQ ID NO: 1064267 - RNA, 30 nt, Human
uggccaggcuccaccuugcugagaaagccu

SEQ ID NO: 1064268 - RNA, 18 nt, Human
uggccuccagcuccaucc

SEQ ID NO: 1064269 - RNA, 22 nt, Human
ugggaagggcugaguuaagagu

SEQ ID NO: 1064270 - RNA, 23 nt, Human
ugggaagggcugaguuaagagug

SEQ ID NO: 1064271 - RNA, 20 nt, Human
ugggagggggcuagaauccu

SEQ ID NO: 1064272 - RNA, 18 nt, Human
ugugccagcauccgucca

SEQ ID NO: 1064273 - RNA, 19 nt, Human
uguggacugaagccugagc

SEQ ID NO: 1064274 - RNA, 21 nt, Human
ugugugguguuaagguuugca

SEQ ID NO: 1064275 - RNA, 24 nt, Human
uguuacaugggaauauuguguggu

SEQ ID NO: 1064276 - RNA, 19 nt, Human
uguuguuguuuuaauuaca

SEQ ID NO: 1064277 - RNA, 19 nt, Human
uguuuuaagacaauagcag

SEQ ID NO: 1064278 - RNA, 19 nt, Human
uuaaagcaaauauagucuc

SEQ ID NO: 1064279 - RNA, 19 nt, Human
uuaacccaccuccccaacc

SEQ ID NO: 1064280 - RNA, 21 nt, Human
uuaagcaacugugcaccuaac

SEQ ID NO: 1064281 - RNA, 21 nt, Human
uuccuaagccaacuuuuuucu

SEQ ID NO: 1064282 - RNA, 20 nt, Human
uucuauguuguauauggacc

SEQ ID NO: 1064283 - RNA, 21 nt, Human
uugccuuaggaggaagguggc

SEQ ID NO: 1064284 - RNA, 21 nt, Human
uuggaagugagaacaugccgu

SEQ ID NO: 1064285 - RNA, 22 nt, Human
uuguggaauggcuaaaucaagc

SEQ ID NO: 1064286 - RNA, 20 nt, Human
uuguggacugaagccugagc

SEQ ID NO: 1064287 - RNA, 22 nt, Human
uuucauuaagaagcauauguuu

SEQ ID NO: 1064288 - RNA, 20 nt, Human
uuuuauggcugcauaguauu

SEQ ID NO: 1064289 - RNA, 19 nt, Human
uuuuguuguaagauucaac

SEQ ID NO: 1064290 - RNA, 22 nt, Human
gagugugcugggugagaagaau

SEQ ID NO: 1064291 - RNA, 19 nt, Human
uauggcaaggaccauggug

SEQ ID NO: 1064292 - RNA, 18 nt, Human
ugagaagaauaugaagug

SEQ ID NO: 1064293 - RNA, 20 nt, Human
aaaagaacacagcuuccaca

SEQ ID NO: 1064294 - RNA, 22 nt, Human
aaaagaacacagcuuccacaaa

SEQ ID NO: 1064295 - RNA, 23 nt, Human
aaaauaaagccccgaggguucac

SEQ ID NO: 1064296 - RNA, 24 nt, Human
aaaaugcagggauuacaggcguga

SEQ ID NO: 1064297 - RNA, 18 nt, Human
aaaguucuccaagucccc

SEQ ID NO: 1064298 - RNA, 22 nt, Human
aaaguucuccaaguccccaccc

SEQ ID NO: 1064299 - RNA, 25 nt, Human
aagaagaaaugaaaauaaagccccg

SEQ ID NO: 1064300 - RNA, 24 nt, Human
acacagcuuccacaaacucgaaac

SEQ ID NO: 1064301 - RNA, 24 nt, Human
acacgauuucaccauguuggccag

SEQ ID NO: 1064302 - RNA, 22 nt, Human
accaaaagaacacagcuuccac

SEQ ID NO: 1064303 - RNA, 23 nt, Human
accacacccggccaguguuacag

SEQ ID NO: 1064304 - RNA, 18 nt, Human
accccuaagacucccaga

SEQ ID NO: 1064305 - RNA, 21 nt, Human
acccuuccuccugguuaccac

SEQ ID NO: 1064306 - RNA, 23 nt, Human
acugccucagccuccgaguagcu

SEQ ID NO: 1064307 - RNA, 23 nt, Human
agaaaggaaaagaauccagaagg

SEQ ID NO: 1064308 - RNA, 19 nt, Human
agaccccuaagacucccag

SEQ ID NO: 1064309 - RNA, 19 nt, Human
aggaaaagaaaggaaaaga

SEQ ID NO: 1064310 - RNA, 18 nt, Human
agggauuacaggcgugag

SEQ ID NO: 1064311 - RNA, 22 nt, Human
agggauuacaggcgugagccac

SEQ ID NO: 1064312 - RNA, 23 nt, Human
agggauuacaggcgugagccacc

SEQ ID NO: 1064313 - RNA, 24 nt, Human
agggauuacaggcgugagccacca

SEQ ID NO: 1064314 - RNA, 18 nt, Human
aguagcugggacuacagg

SEQ ID NO: 1064315 - RNA, 19 nt, Human
aguagcugggacuacaggc

SEQ ID NO: 1064316 - RNA, 18 nt, Human
aguccccacccgacccag

SEQ ID NO: 1064317 - RNA, 21 nt, Human
agugcagugaugcaaucccag

SEQ ID NO: 1064318 - RNA, 22 nt, Human
aguuacguccugccaagaagaa

SEQ ID NO: 1064319 - RNA, 23 nt, Human
auccagaaggcuccuccugggcu

SEQ ID NO: 1064320 - RNA, 21 nt, Human
auuucaccauguuggccagga

SEQ ID NO: 1064321 - RNA, 24 nt, Human
caaaaugcagggauuacaggcgug

SEQ ID NO: 1064322 - RNA, 25 nt, Human
caagacagaaaaguucuccaagucc

SEQ ID NO: 1064323 - RNA, 19 nt, Human
caccacacccggccagugu

SEQ ID NO: 1064324 - RNA, 18 nt, Human
caccauguuggccaggau

SEQ ID NO: 1064325 - RNA, 22 nt, Human
caccauguuggccaggaugguc

SEQ ID NO: 1064326 - RNA, 22 nt, Human
cacccaggcuggagugcaguga

SEQ ID NO: 1064327 - RNA, 18 nt, Human
cacccgacccagaagacc

SEQ ID NO: 1064328 - RNA, 22 nt, Human
caccucagcccccccaaaaugc

SEQ ID NO: 1064329 - RNA, 24 nt, Human
caccucagcccccccaaaaugcag

SEQ ID NO: 1064330 - RNA, 24 nt, Human
cacgauuucaccauguuggccagg

SEQ ID NO: 1064331 - RNA, 21 nt, Human
cagugacccuuccuccugguu

SEQ ID NO: 1064332 - RNA, 22 nt, Human
ccaaaaugcagggauuacaggc

SEQ ID NO: 1064333 - RNA, 24 nt, Human
ccaaaaugcagggauuacaggcgu

SEQ ID NO: 1064334 - RNA, 18 nt, Human
ccaaggccagacuucgcu

SEQ ID NO: 1064335 - RNA, 21 nt, Human
ccagagccuccuuccucggcu

SEQ ID NO: 1064336 - RNA, 18 nt, Human
ccaggcccugauauaccg

SEQ ID NO: 1064337 - RNA, 19 nt, Human
ccaugcugccaagaccccu

SEQ ID NO: 1064338 - RNA, 20 nt, Human
cccaaggccagacuucgcuc

SEQ ID NO: 1064339 - RNA, 22 nt, Human
cccagaagaccagcuggcuuca

SEQ ID NO: 1064340 - RNA, 24 nt, Human
cccagaagaccagcuggcuucacc

SEQ ID NO: 1064341 - RNA, 24 nt, Human
ccccaaaaugcagggauuacaggc

SEQ ID NO: 1064342 - RNA, 18 nt, Human
ccccaggacccaaggcca

SEQ ID NO: 1064343 - RNA, 19 nt, Human
ccccgaggguucacucggg

SEQ ID NO: 1064344 - RNA, 19 nt, Human
ccccuaagacucccagagc

SEQ ID NO: 1064345 - RNA, 22 nt, Human
ccgaguagcugggacuacaggc

SEQ ID NO: 1064346 - RNA, 26 nt, Human
ccgcccaccucagcccccccaaaaug

SEQ ID NO: 1064347 - RNA, 22 nt, Human
ccucccggguucaugccauucu

SEQ ID NO: 1064348 - RNA, 23 nt, Human
ccucgcucugucacccaggcugg

SEQ ID NO: 1064349 - RNA, 24 nt, Human
ccucgcucugucacccaggcugga

SEQ ID NO: 1064350 - RNA, 26 nt, Human
ccucgcucugucacccaggcuggagu

SEQ ID NO: 1064351 - RNA, 27 nt, Human
ccucgcucugucacccaggcuggagug

SEQ ID NO: 1064352 - RNA, 22 nt, Human
ccugccaagaagaaaugaaaau

SEQ ID NO: 1064353 - RNA, 21 nt, Human
ccugccaccacuccuggcuaa

SEQ ID NO: 1064354 - RNA, 22 nt, Human
cggcuccucacugccccuuccc

SEQ ID NO: 1064355 - RNA, 22 nt, Human
cgguaggaucguggucuugaug

SEQ ID NO: 1064356 - RNA, 24 nt, Human
cucacugcaagcuccaccucccgg

SEQ ID NO: 1064357 - RNA, 23 nt, Human
cucagccuccgaguagcugggac

SEQ ID NO: 1064358 - RNA, 21 nt, Human
cucccggguucaugccauucu

SEQ ID NO: 1064359 - RNA, 24 nt, Human
cuccgaguagcugggacuacaggc

SEQ ID NO: 1064360 - RNA, 20 nt, Human
cuccugaacuugugauccgc

SEQ ID NO: 1064361 - RNA, 20 nt, Human
cuccugggcuugcacaaauu

SEQ ID NO: 1064362 - RNA, 21 nt, Human
cuccugguuaccacauucccc

SEQ ID NO: 1064363 - RNA, 24 nt, Human
cucgcucugucacccaggcuggag

SEQ ID NO: 1064364 - RNA, 20 nt, Human
cucgggguucgcugggagcc

SEQ ID NO: 1064365 - RNA, 20 nt, Human
cucugucacccaggcuggag

SEQ ID NO: 1064366 - RNA, 18 nt, Human
cugagcucccugacgcuu

SEQ ID NO: 1064367 - RNA, 21 nt, Human
cugcaguugggccgguggcca

SEQ ID NO: 1064368 - RNA, 22 nt, Human
cuuugggcugaggccaggcccu

SEQ ID NO: 1064369 - RNA, 22 nt, Human
gaacuugugauccgcccaccuc

SEQ ID NO: 1064370 - RNA, 24 nt, Human
gaacuugugauccgcccaccucag

SEQ ID NO: 1064371 - RNA, 22 nt, Human
gacccuuccuccugguuaccac

SEQ ID NO: 1064372 - RNA, 19 nt, Human
gaggguucacucgggguuc

SEQ ID NO: 1064373 - RNA, 26 nt, Human
gaguagcugggacuacaggcgccugc

SEQ ID NO: 1064374 - RNA, 20 nt, Human
gaguuauucauuccucccgg

SEQ ID NO: 1064375 - RNA, 23 nt, Human
gaguuauucauuccucccgguag

SEQ ID NO: 1064376 - RNA, 18 nt, Human
gauuacaggcgugagcca

SEQ ID NO: 1064377 - RNA, 21 nt, Human
gauuacaggcgugagccacca

SEQ ID NO: 1064378 - RNA, 22 nt, Human
gauuacaggcgugagccaccac

SEQ ID NO: 1064379 - RNA, 21 nt, Human
gauuucaccauguuggccagg

SEQ ID NO: 1064380 - RNA, 24 nt, Human
gauuucaccauguuggccaggaug

SEQ ID NO: 1064381 - RNA, 22 nt, Human
gcaagcuccaccucccggguuc

SEQ ID NO: 1064382 - RNA, 21 nt, Human
gcaggcaaggcagccuggcag

SEQ ID NO: 1064383 - RNA, 24 nt, Human
gccuccuuccucggcuccucacug

SEQ ID NO: 1064384 - RNA, 25 nt, Human
gcucugucacccaggcuggagugca

SEQ ID NO: 1064385 - RNA, 25 nt, Human
ggaguuauucauuccucccgguagg

SEQ ID NO: 1064386 - RNA, 19 nt, Human
ggauuacaggcgugagcca

SEQ ID NO: 1064387 - RNA, 22 nt, Human
ggccaggauggucuggaucucc

SEQ ID NO: 1064388 - RNA, 18 nt, Human
gggauuacaggcgugagc

SEQ ID NO: 1064389 - RNA, 23 nt, Human
gggauuacaggcgugagccacca

SEQ ID NO: 1064390 - RNA, 20 nt, Human
gggggaugugcgggacaccc

SEQ ID NO: 1064391 - RNA, 21 nt, Human
guccauuuuacagagugcuga

SEQ ID NO: 1064392 - RNA, 23 nt, Human
guccauuuuuacagagugcugau

SEQ ID NO: 1064393 - RNA, 22 nt, Human
gugaagcccccuuacccaguga

SEQ ID NO: 1064394 - RNA, 21 nt, Human
gugauccgcccaccucagccc

SEQ ID NO: 1064395 - RNA, 24 nt, Human
uacaaaacuuaagcuagacacaga

SEQ ID NO: 1064396 - RNA, 23 nt, Human
uacaggcgugagccaccacaccc

SEQ ID NO: 1064397 - RNA, 26 nt, Human
uacugcaggaaaagaaaggaaaagaa

SEQ ID NO: 1064398 - RNA, 19 nt, Human
uagcaagacagaaaaguuc

SEQ ID NO: 1064399 - RNA, 23 nt, Human
uagcaagacagaaaaguucucca

SEQ ID NO: 1064400 - RNA, 24 nt, Human
uagcaagacagaaaaguucuccaa

SEQ ID NO: 1064401 - RNA, 21 nt, Human
uagcacaguucccaacacuaa

SEQ ID NO: 1064402 - RNA, 24 nt, Human
uagcagagacacgauuucaccaug

SEQ ID NO: 1064403 - RNA, 24 nt, Human
ucaccauguuggccaggauggucu

SEQ ID NO: 1064404 - RNA, 22 nt, Human
ucacccaggcuggagugcagug

SEQ ID NO: 1064405 - RNA, 24 nt, Human
ucacugcaagcuccaccucccggg

SEQ ID NO: 1064406 - RNA, 21 nt, Human
ucacugccccuucccgcccua

SEQ ID NO: 1064407 - RNA, 18 nt, Human
ucaugccauucuacugcc

SEQ ID NO: 1064408 - RNA, 25 nt, Human
uccaaguccccacccgacccagaag

SEQ ID NO: 1064409 - RNA, 21 nt, Human
uccacaaacucgaaacagacc

SEQ ID NO: 1064410 - RNA, 23 nt, Human
uccacaaacucgaaacagacccu

SEQ ID NO: 1064411 - RNA, 23 nt, Human
ucccagcucacugcaagcuccac

SEQ ID NO: 1064412 - RNA, 22 nt, Human
uccccaguggcgccuggucuau

SEQ ID NO: 1064413 - RNA, 24 nt, Human
ucccggguucaugccauucuacug

SEQ ID NO: 1064414 - RNA, 22 nt, Human
ucccugacgcuuugggcugagg

SEQ ID NO: 1064415 - RNA, 23 nt, Human
uccgaguagcugggacuacaggc

SEQ ID NO: 1064416 - RNA, 24 nt, Human
uccgaguagcugggacuacaggcg

SEQ ID NO: 1064417 - RNA, 18 nt, Human
uccgcccaccucagcccc

SEQ ID NO: 1064418 - RNA, 22 nt, Human
uccgcccaccucagccccccca

SEQ ID NO: 1064419 - RNA, 24 nt, Human
uccgcccaccucagcccccccaaa

SEQ ID NO: 1064420 - RNA, 25 nt, Human
uccgcccaccucagcccccccaaaa

SEQ ID NO: 1064421 - RNA, 24 nt, Human
ucgaaacagacccuacaggguugc

SEQ ID NO: 1064422 - RNA, 24 nt, Human
ucgcucugucacccaggcuggagu

SEQ ID NO: 1064423 - RNA, 21 nt, Human
ucuccaaguccccacccgacc

SEQ ID NO: 1064424 - RNA, 22 nt, Human
ucuccaaguccccacccgaccc

SEQ ID NO: 1064425 - RNA, 24 nt, Human
ucugucacccaggcuggagugcag

SEQ ID NO: 1064426 - RNA, 23 nt, Human
ugaaaauaaagccccgaggguuc

SEQ ID NO: 1064427 - RNA, 19 nt, Human
ugaaggcaggcaaggcagc

SEQ ID NO: 1064428 - RNA, 25 nt, Human
ugauccgcccaccucagccccccca

SEQ ID NO: 1064429 - RNA, 24 nt, Human
ugaugcaaucccagcucacugcaa

SEQ ID NO: 1064430 - RNA, 22 nt, Human
ugcacagguaacagugaagccc

SEQ ID NO: 1064431 - RNA, 24 nt, Human
ugccccuucccgcccuacuccaug

SEQ ID NO: 1064432 - RNA, 23 nt, Human
ugccucagccuccgaguagcugg

SEQ ID NO: 1064433 - RNA, 19 nt, Human
uggagugcagugaugcaau

SEQ ID NO: 1064434 - RNA, 24 nt, Human
uggccaggauggucuggaucuccu

SEQ ID NO: 1064435 - RNA, 21 nt, Human
uggcuucaccucucacuucca

SEQ ID NO: 1064436 - RNA, 21 nt, Human
ugggacuacaggcgccugcca

SEQ ID NO: 1064437 - RNA, 22 nt, Human
ugggacuacaggcgccugccac

SEQ ID NO: 1064438 - RNA, 24 nt, Human
ugggacuacaggcgccugccacca

SEQ ID NO: 1064439 - RNA, 24 nt, Human
uuagcagagacacgauuucaccau

SEQ ID NO: 1064440 - RNA, 27 nt, Human
uuauucauuccucccgguaggaucgug

SEQ ID NO: 1064441 - RNA, 21 nt, Human
uuauugugaagaccaaaagaa

SEQ ID NO: 1064442 - RNA, 19 nt, Human
uucaugccauucuacugcc

SEQ ID NO: 1064443 - RNA, 23 nt, Human
uuccacaaacucgaaacagaccc

SEQ ID NO: 1064444 - RNA, 19 nt, Human
uuccccaguggcgccuggu

SEQ ID NO: 1064445 - RNA, 20 nt, Human
uucccgcccuacuccaugcc

SEQ ID NO: 1064446 - RNA, 21 nt, Human
uucccgcccuacuccaugccu

SEQ ID NO: 1064447 - RNA, 21 nt, Human
uuccuccugguuaccacauuc

SEQ ID NO: 1064448 - RNA, 22 nt, Human
uuccucggcuccucacugcccc

SEQ ID NO: 1064449 - RNA, 25 nt, Human
uuccucggcuccucacugccccuuc

SEQ ID NO: 1064450 - RNA, 19 nt, Human
uugguccauuuuacagagu

SEQ ID NO: 1064451 - RNA, 19 nt, Human
uuucaccauguuggccagg

SEQ ID NO: 1064452 - RNA, 18 nt, Human
uuucuuagaagcaggaag

SEQ ID NO: 1064453 - RNA, 24 nt, Human
uuuuuagcagagacacgauuucac

SEQ ID NO: 1064454 - RNA, 19 nt, Human
aagggcagguccgacuuac

SEQ ID NO: 1064455 - RNA, 22 nt, Human
caauaaagaugaauacucgaca

SEQ ID NO: 1064456 - RNA, 23 nt, Human
cugggcacggugggaaaugacau

SEQ ID NO: 1064457 - RNA, 21 nt, Human
gggaacaugugaaggagcaac

SEQ ID NO: 1064458 - RNA, 20 nt, Human
uacaaaaucgagagccauaa

SEQ ID NO: 1064459 - RNA, 21 nt, Human
uggccgcacagagagugggaa

SEQ ID NO: 1064460 - RNA, 20 nt, Human
uuacaugguggccgcacaga

SEQ ID NO: 1064461 - RNA, 18 nt, Human
aagcagaagaucaggucc

SEQ ID NO: 1064462 - RNA, 25 nt, Human
aagucacuuucaaguagcccaaccg

SEQ ID NO: 1064463 - RNA, 23 nt, Human
cauguaagaagaaaagucacauc

SEQ ID NO: 1064464 - RNA, 25 nt, Human
uacuuuauuuucuggcaauucuugc

SEQ ID NO: 1064465 - RNA, 21 nt, Human
ucuugcuuauccuaacguuuc

SEQ ID NO: 1064466 - RNA, 21 nt, Human
uuggugaugacauaccuuucu

SEQ ID NO: 1064467 - RNA, 19 nt, Human
uuucuggcaauucuugcuu

SEQ ID NO: 1064468 - RNA, 24 nt, Human
aaaaauacaaaaugaaaccaugua

SEQ ID NO: 1064469 - RNA, 20 nt, Human
aaaacucugaguggcuuuuc

SEQ ID NO: 1064470 - RNA, 21 nt, Human
aaaccuacacuuucucccuaa

SEQ ID NO: 1064471 - RNA, 20 nt, Human
aaagaaaccuugaagugcag

SEQ ID NO: 1064472 - RNA, 25 nt, Human
aaaucaaguuucaaacuuuaucuag

SEQ ID NO: 1064473 - RNA, 18 nt, Human
aacaucauucacccugcc

SEQ ID NO: 1064474 - RNA, 20 nt, Human
aagcagcagcacagaagucc

SEQ ID NO: 1064475 - RNA, 19 nt, Human
aaggaaaccuuucuaaacu

SEQ ID NO: 1064476 - RNA, 21 nt, Human
aaggaaaccuuucuaaacuga

SEQ ID NO: 1064477 - RNA, 23 nt, Human
aaggaaaccuuucuaaacugaaa

SEQ ID NO: 1064478 - RNA, 20 nt, Human
aaguccacuuucaccuggcc

SEQ ID NO: 1064479 - RNA, 25 nt, Human
aagugccucugugggucuggcuucc

SEQ ID NO: 1064480 - RNA, 23 nt, Human
aaucauaaucauaaucauaaugc

SEQ ID NO: 1064481 - RNA, 18 nt, Human
aaugaacauguaggcuga

SEQ ID NO: 1064482 - RNA, 21 nt, Human
aaugaauauacucuagaccca

SEQ ID NO: 1064483 - RNA, 25 nt, Human
aaugaauauacucuagacccacagc

SEQ ID NO: 1064484 - RNA, 21 nt, Human
acaaugaauauacucuagacc

SEQ ID NO: 1064485 - RNA, 21 nt, Human
acccugagucccaugggaggg

SEQ ID NO: 1064486 - RNA, 20 nt, Human
accuacacuuucucccuaag

SEQ ID NO: 1064487 - RNA, 18 nt, Human
accuuguugaaccacuuc

SEQ ID NO: 1064488 - RNA, 19 nt, Human
agaaugcugauccucuacu

SEQ ID NO: 1064489 - RNA, 21 nt, Human
agcaaaggaaaccuuucuaaa

SEQ ID NO: 1064490 - RNA, 23 nt, Human
agcacagaaguccucaagggaua

SEQ ID NO: 1064491 - RNA, 22 nt, Human
agcccacuccuuuacuccccug

SEQ ID NO: 1064492 - RNA, 18 nt, Human
agcgcucuggggcagaug

SEQ ID NO: 1064493 - RNA, 20 nt, Human
aggaagaacugacaucucac

SEQ ID NO: 1064494 - RNA, 18 nt, Human
aggaaggugcugcacacg

SEQ ID NO: 1064495 - RNA, 21 nt, Human
aggagaagcagcagcacagaa

SEQ ID NO: 1064496 - RNA, 24 nt, Human
aguuauguacaaacccuuuuuaca

SEQ ID NO: 1064497 - RNA, 23 nt, Human
auauaugugugccuuguguuccc

SEQ ID NO: 1064498 - RNA, 21 nt, Human
auccagucccuacaaucccaa

SEQ ID NO: 1064499 - RNA, 21 nt, Human
augugugaggaaggugcugca

SEQ ID NO: 1064500 - RNA, 19 nt, Human
caaacacaucugccagcug

SEQ ID NO: 1064501 - RNA, 19 nt, Human
caaaggcgugucaggcugc

SEQ ID NO: 1064502 - RNA, 21 nt, Human
caacagaucuggguuuguguu

SEQ ID NO: 1064503 - RNA, 23 nt, Human
caaucccaaccaaucuucuacaa

SEQ ID NO: 1064504 - RNA, 19 nt, Human
cacugccuccgcuucuugc

SEQ ID NO: 1064505 - RNA, 18 nt, Human
cacuucaaaccacagcau

SEQ ID NO: 1064506 - RNA, 20 nt, Human
cagagaaagguuucuuuuca

SEQ ID NO: 1064507 - RNA, 23 nt, Human
caucuaagauucuaaacaguggg

SEQ ID NO: 1064508 - RNA, 19 nt, Human
caucucacuacuuucaacc

SEQ ID NO: 1064509 - RNA, 19 nt, Human
ccaacaccuuucaucucca

SEQ ID NO: 1064510 - RNA, 24 nt, Human
ccaacaccuuucaucuccaaccuc

SEQ ID NO: 1064511 - RNA, 18 nt, Human
ccaaggcaggcauggccg

SEQ ID NO: 1064512 - RNA, 22 nt, Human
ccaaucuucuacaacuauuacg

SEQ ID NO: 1064513 - RNA, 23 nt, Human
ccacaugccagauaauccugccu

SEQ ID NO: 1064514 - RNA, 24 nt, Human
ccagcugccuucccacgcugaccc

SEQ ID NO: 1064515 - RNA, 21 nt, Human
ccaggaagaacugacaucuca

SEQ ID NO: 1064516 - RNA, 19 nt, Human
ccaugggagggaagcacug

SEQ ID NO: 1064517 - RNA, 19 nt, Human
cccaaccaaucuucuacaa

SEQ ID NO: 1064518 - RNA, 22 nt, Human
cccacagccauugccccacauc

SEQ ID NO: 1064519 - RNA, 21 nt, Human
ccccccuuucucuagaaaucc

SEQ ID NO: 1064520 - RNA, 19 nt, Human
ccccuaaagaaaccuugaa

SEQ ID NO: 1064521 - RNA, 19 nt, Human
cccuaaagaaaccuugaag

SEQ ID NO: 1064522 - RNA, 25 nt, Human
ccuacaaucccaaccaaucuucuac

SEQ ID NO: 1064523 - RNA, 22 nt, Human
ccuagaaugcugauccucuacu

SEQ ID NO: 1064524 - RNA, 22 nt, Human
ccuagaucuccugucccaagaa

SEQ ID NO: 1064525 - RNA, 22 nt, Human
ccucacggacagcucucagcuu

SEQ ID NO: 1064526 - RNA, 26 nt, Human
ccuccgcuucuugccugcuucucuug

SEQ ID NO: 1064527 - RNA, 28 nt, Human
ccugugacagaaagcaaagccggggucc

SEQ ID NO: 1064528 - RNA, 20 nt, Human
ccuugaagugcagguuuugg

SEQ ID NO: 1064529 - RNA, 20 nt, Human
ccuuucaucuccaaccucau

SEQ ID NO: 1064530 - RNA, 23 nt, Human
cuaaaccuacacuuucucccuaa

SEQ ID NO: 1064531 - RNA, 26 nt, Human
cuaauggugcuuugagcauguuuucu

SEQ ID NO: 1064532 - RNA, 20 nt, Human
cuagacccacagccauugcc

SEQ ID NO: 1064533 - RNA, 22 nt, Human
cucaagggauaagcaaaggaaa

SEQ ID NO: 1064534 - RNA, 19 nt, Human
cucagcuuuucuugcucug

SEQ ID NO: 1064535 - RNA, 21 nt, Human
cuccaaccucauagaugaucu

SEQ ID NO: 1064536 - RNA, 21 nt, Human
cuccugucccugccagcugcc

SEQ ID NO: 1064537 - RNA, 20 nt, Human
cucuggggcagaugggacuc

SEQ ID NO: 1064538 - RNA, 18 nt, Human
cugccuccgcuucuugcc

SEQ ID NO: 1064539 - RNA, 22 nt, Human
cuggccagaacaucucuucuca

SEQ ID NO: 1064540 - RNA, 23 nt, Human
cugucccacuccucuugccugug

SEQ ID NO: 1064541 - RNA, 23 nt, Human
cuucccucucuuucuuaaaauuc

SEQ ID NO: 1064542 - RNA, 22 nt, Human
cuuggagugugcacccuuuagc

SEQ ID NO: 1064543 - RNA, 19 nt, Human
gaaaaacuuggcuguagcc

SEQ ID NO: 1064544 - RNA, 19 nt, Human
gaaggaaggggaggagagc

SEQ ID NO: 1064545 - RNA, 18 nt, Human
gagaagcagcagcacaga

SEQ ID NO: 1064546 - RNA, 19 nt, Human
gaggacacagcagcugcuc

SEQ ID NO: 1064547 - RNA, 23 nt, Human
gccugcuucucuuguuuuccuau

SEQ ID NO: 1064548 - RNA, 21 nt, Human
gcugauugauggcagaaccca

SEQ ID NO: 1064549 - RNA, 24 nt, Human
ggagugugcacccuuuagcacucc

SEQ ID NO: 1064550 - RNA, 19 nt, Human
ggaugaacccaauguaaca

SEQ ID NO: 1064551 - RNA, 20 nt, Human
ggcaggugggcugucuuccu

SEQ ID NO: 1064552 - RNA, 21 nt, Human
gggcggggcuccugucccugc

SEQ ID NO: 1064553 - RNA, 20 nt, Human
guggaagugaggcucagucc

SEQ ID NO: 1064554 - RNA, 19 nt, Human
guggcuuuucaugacuuuc

SEQ ID NO: 1064555 - RNA, 23 nt, Human
guuacugauuaacaucauucacc

SEQ ID NO: 1064556 - RNA, 20 nt, Human
uaaaaauaaaguccacuuuc

SEQ ID NO: 1064557 - RNA, 19 nt, Human
uaacuccuaaaccccccuu

SEQ ID NO: 1064558 - RNA, 22 nt, Human
uaacuccuaaaccccccuuucu

SEQ ID NO: 1064559 - RNA, 18 nt, Human
uacccuagaucuccuguc

SEQ ID NO: 1064560 - RNA, 22 nt, Human
uacuuugugaguuuguugcuga

SEQ ID NO: 1064561 - RNA, 23 nt, Human
uagaaaacaguaugauuggcagg

SEQ ID NO: 1064562 - RNA, 24 nt, Human
uagaucuccugucccaagaaguuc

SEQ ID NO: 1064563 - RNA, 23 nt, Human
uagcccacuccuuuacuccccug

SEQ ID NO: 1064564 - RNA, 24 nt, Human
uaugugugccuuguguucccaguu

SEQ ID NO: 1064565 - RNA, 22 nt, Human
uauugugcucauuucuccccca

SEQ ID NO: 1064566 - RNA, 20 nt, Human
ucaaaagauugaaagaugaa

SEQ ID NO: 1064567 - RNA, 22 nt, Human
ucaaugaacauguaggcugaac

SEQ ID NO: 1064568 - RNA, 25 nt, Human
ucaaugccuuguguacauuuccauc

SEQ ID NO: 1064569 - RNA, 21 nt, Human
ucagaguaauuaaucauaauc

SEQ ID NO: 1064570 - RNA, 19 nt, Human
ucauucacccugccacaug

SEQ ID NO: 1064571 - RNA, 22 nt, Human
uccaacaccuuucaucuccaac

SEQ ID NO: 1064572 - RNA, 19 nt, Human
uccaggaagaacugacauc

SEQ ID NO: 1064573 - RNA, 22 nt, Human
ucccaguuaggcaggugggcug

SEQ ID NO: 1064574 - RNA, 19 nt, Human
uccccugucccacuccucu

SEQ ID NO: 1064575 - RNA, 23 nt, Human
uccccugucccacuccucuugcc

SEQ ID NO: 1064576 - RNA, 23 nt, Human
ucccuacaaucccaaccaaucuu

SEQ ID NO: 1064577 - RNA, 20 nt, Human
ucccugccagcugccuuccc

SEQ ID NO: 1064578 - RNA, 21 nt, Human
ucucuucuucaauuccuguca

SEQ ID NO: 1064579 - RNA, 20 nt, Human
ucugaugguccugugacaga

SEQ ID NO: 1064580 - RNA, 22 nt, Human
ucugccagcugaucuaaaccua

SEQ ID NO: 1064581 - RNA, 24 nt, Human
ucuuagcugcuguacucacugccu

SEQ ID NO: 1064582 - RNA, 20 nt, Human
ucuucccucucuuucuuaaa

SEQ ID NO: 1064583 - RNA, 19 nt, Human
ugaaaaacuuggcuguagc

SEQ ID NO: 1064584 - RNA, 20 nt, Human
ugaaaaacuuggcuguagcc

SEQ ID NO: 1064585 - RNA, 23 nt, Human
ugaaccacuucaaaccacagcau

SEQ ID NO: 1064586 - RNA, 21 nt, Human
ugaacccaauguaacauuucu

SEQ ID NO: 1064587 - RNA, 23 nt, Human
ugaggacacagcagcugcucagu

SEQ ID NO: 1064588 - RNA, 22 nt, Human
ugccaacaaucaaaagauugaa

SEQ ID NO: 1064589 - RNA, 19 nt, Human
ugccuguguggccuucccu

SEQ ID NO: 1064590 - RNA, 18 nt, Human
uggcuguagcccacaaac

SEQ ID NO: 1064591 - RNA, 18 nt, Human
ugggagggaagcacuggg

SEQ ID NO: 1064592 - RNA, 20 nt, Human
uguauuauaagcugauugau

SEQ ID NO: 1064593 - RNA, 20 nt, Human
ugugugaggaaggugcugca

SEQ ID NO: 1064594 - RNA, 23 nt, Human
ugugugaggaaggugcugcacac

SEQ ID NO: 1064595 - RNA, 23 nt, Human
uuacagaugacagaguuggguag

SEQ ID NO: 1064596 - RNA, 21 nt, Human
uuacuccccugucccacuccu

SEQ ID NO: 1064597 - RNA, 23 nt, Human
uuagacuguacuuuguagccccu

SEQ ID NO: 1064598 - RNA, 21 nt, Human
uucacccugccacaugccaga

SEQ ID NO: 1064599 - RNA, 21 nt, Human
uucagaaaagccaccaaagca

SEQ ID NO: 1064600 - RNA, 21 nt, Human
uucaggagagucaggacguuc

SEQ ID NO: 1064601 - RNA, 25 nt, Human
uucccacgcugacccugagucccau

SEQ ID NO: 1064602 - RNA, 25 nt, Human
uugagcggaaggaaggggaggagag

SEQ ID NO: 1064603 - RNA, 23 nt, Human
uugcugcugagaaaauguucagu

SEQ ID NO: 1064604 - RNA, 21 nt, Human
uugcuuaaaacucugaguggc

SEQ ID NO: 1064605 - RNA, 20 nt, Human
uuucaaacuuuaucuaggcc

SEQ ID NO: 1064606 - RNA, 22 nt, Human
uuuccaauauaugugugccuug

SEQ ID NO: 1064607 - RNA, 19 nt, Human
uuuggcaguucuggacuau

SEQ ID NO: 1064608 - RNA, 19 nt, Human
uuugugugcauucucauga

SEQ ID NO: 1064609 - RNA, 20 nt, Human
aaaacucaggaucuccccuc

SEQ ID NO: 1064610 - RNA, 22 nt, Human
aagaaaacagcccagcugugua

SEQ ID NO: 1064611 - RNA, 22 nt, Human
acagaaaacucaggaucucccc

SEQ ID NO: 1064612 - RNA, 21 nt, Human
acagugcuaaagcccugucuc

SEQ ID NO: 1064613 - RNA, 25 nt, Human
agcccagcuguguagggccggggcc

SEQ ID NO: 1064614 - RNA, 21 nt, Human
aggccagcuccaagggccaca

SEQ ID NO: 1064615 - RNA, 19 nt, Human
aggcugcaguccugugguc

SEQ ID NO: 1064616 - RNA, 18 nt, Human
agggccggaagccccagg

SEQ ID NO: 1064617 - RNA, 22 nt, Human
agguuccaccugucagcaacuu

SEQ ID NO: 1064618 - RNA, 19 nt, Human
caaugccaggcuguccugc

SEQ ID NO: 1064619 - RNA, 22 nt, Human
cagaaaacucaggaucuccccu

SEQ ID NO: 1064620 - RNA, 19 nt, Human
ccaccgucccuggcccagg

SEQ ID NO: 1064621 - RNA, 21 nt, Human
ccaccgucccuggcccagguc

SEQ ID NO: 1064622 - RNA, 20 nt, Human
ccagcugccgguggguccag

SEQ ID NO: 1064623 - RNA, 24 nt, Human
cccccaccgucccuggcccagguu

SEQ ID NO: 1064624 - RNA, 18 nt, Human
cccguggccaaugccagg

SEQ ID NO: 1064625 - RNA, 22 nt, Human
ccucugcacagugcuaaagccc

SEQ ID NO: 1064626 - RNA, 20 nt, Human
ccugucucaaaguucagagc

SEQ ID NO: 1064627 - RNA, 19 nt, Human
cuccaagggccacagcucc

SEQ ID NO: 1064628 - RNA, 20 nt, Human
gccagcuccaagggccacag

SEQ ID NO: 1064629 - RNA, 21 nt, Human
ggaagccccaggcugcagucc

SEQ ID NO: 1064630 - RNA, 22 nt, Human
ggcccaggccagcuccaagggc

SEQ ID NO: 1064631 - RNA, 26 nt, Human
guggccgaugucccguggccaaugcc

SEQ ID NO: 1064632 - RNA, 19 nt, Human
ucagagcccggaaggugca

SEQ ID NO: 1064633 - RNA, 21 nt, Human
ucccuggcccaggucuaggac

SEQ ID NO: 1064634 - RNA, 22 nt, Human
uccugccccauuugaugccgaa

SEQ ID NO: 1064635 - RNA, 18 nt, Human
ugcccagcugccgguggg

SEQ ID NO: 1064636 - RNA, 23 nt, Human
ugccccauuugaugccgaaguug

SEQ ID NO: 1064637 - RNA, 21 nt, Human
ugccgguggguccagggggca

SEQ ID NO: 1064638 - RNA, 26 nt, Human
ugccucagguuccaccugucagcaac

SEQ ID NO: 1064639 - RNA, 22 nt, Human
uguccugcugccucagguucca

SEQ ID NO: 1064640 - RNA, 21 nt, Human
uguggcccuuggaaaucaagc

SEQ ID NO: 1064641 - RNA, 27 nt, Human
uguggccgaugucccguggccaaugcc

SEQ ID NO: 1064642 - RNA, 22 nt, Human
uuaauguucucucuccugcccc

SEQ ID NO: 1064643 - RNA, 25 nt, Human
aaaaacccauauucccuggccccuc

SEQ ID NO: 1064644 - RNA, 20 nt, Human
accacagcaaaggcacuuca

SEQ ID NO: 1064645 - RNA, 21 nt, Human
accccccucacacccaaccug

SEQ ID NO: 1064646 - RNA, 24 nt, Human
accucgggggcaccuuucccaggg

SEQ ID NO: 1064647 - RNA, 18 nt, Human
acuaagguuggcauugug

SEQ ID NO: 1064648 - RNA, 20 nt, Human
agacgcuuguuaaaaaccca

SEQ ID NO: 1064649 - RNA, 19 nt, Human
agaugggaauggggcuggg

SEQ ID NO: 1064650 - RNA, 21 nt, Human
agcccuucaugcugaggcauc

SEQ ID NO: 1064651 - RNA, 23 nt, Human
agcuccugcagggaggaaggaau

SEQ ID NO: 1064652 - RNA, 25 nt, Human
aggaaguugggaagaggaguccagg

SEQ ID NO: 1064653 - RNA, 24 nt, Human
agugaggaguccuggagacucugg

SEQ ID NO: 1064654 - RNA, 18 nt, Human
aguggugcugagggcaug

SEQ ID NO: 1064655 - RNA, 18 nt, Human
cacacccaaccugcgucc

SEQ ID NO: 1064656 - RNA, 21 nt, Human
cacaccugccugccguccccu

SEQ ID NO: 1064657 - RNA, 21 nt, Human
cagggcagcgccacaccugcc

SEQ ID NO: 1064658 - RNA, 22 nt, Human
caugauagagaaguguuuugua

SEQ ID NO: 1064659 - RNA, 18 nt, Human
ccacaaguccccaagccc

SEQ ID NO: 1064660 - RNA, 19 nt, Human
cccccgggcucugccuggc

SEQ ID NO: 1064661 - RNA, 21 nt, Human
cccccgggcucugccuggcuu

SEQ ID NO: 1064662 - RNA, 24 nt, Human
ccccucgcccccgggcucugccug

SEQ ID NO: 1064663 - RNA, 21 nt, Human
ccucacacccaaccugcgucc

SEQ ID NO: 1064664 - RNA, 19 nt, Human
ccugcagcugaggagugag

SEQ ID NO: 1064665 - RNA, 24 nt, Human
ccugccguccccucgcccccgggc

SEQ ID NO: 1064666 - RNA, 22 nt, Human
ccugccugccguccccucgccc

SEQ ID NO: 1064667 - RNA, 23 nt, Human
cgcccccgggcucugccuggcuu

SEQ ID NO: 1064668 - RNA, 20 nt, Human
cucccaggccccacccagac

SEQ ID NO: 1064669 - RNA, 19 nt, Human
cugaggcaucugucuggcu

SEQ ID NO: 1064670 - RNA, 23 nt, Human
cugcguccauggccgagguugaa

SEQ ID NO: 1064671 - RNA, 18 nt, Human
cuggcuccugcagcugag

SEQ ID NO: 1064672 - RNA, 19 nt, Human
cuggcuccugcagcugagg

SEQ ID NO: 1064673 - RNA, 23 nt, Human
cuggcuuugggcaucuccugugg

SEQ ID NO: 1064674 - RNA, 21 nt, Human
cugggaccccccucacaccca

SEQ ID NO: 1064675 - RNA, 20 nt, Human
cuuugcucuuguucuucugu

SEQ ID NO: 1064676 - RNA, 19 nt, Human
gaaaaccacagcaaaggca

SEQ ID NO: 1064677 - RNA, 19 nt, Human
gaauuuguaguuuauuuug

SEQ ID NO: 1064678 - RNA, 27 nt, Human
gacccuguuucaguagaugggaauggg

SEQ ID NO: 1064679 - RNA, 19 nt, Human
gcccagggcagcgccacac

SEQ ID NO: 1064680 - RNA, 22 nt, Human
gccguccccucgcccccgggcu

SEQ ID NO: 1064681 - RNA, 21 nt, Human
ggaaugauccacaagucccca

SEQ ID NO: 1064682 - RNA, 21 nt, Human
ggacaagaguggugcugaggg

SEQ ID NO: 1064683 - RNA, 19 nt, Human
ggaccccccucacacccaa

SEQ ID NO: 1064684 - RNA, 22 nt, Human
ggaccccccucacacccaaccu

SEQ ID NO: 1064685 - RNA, 22 nt, Human
ggaggaaggaaugauccacaag

SEQ ID NO: 1064686 - RNA, 18 nt, Human
ggcuucauggucuuugcu

SEQ ID NO: 1064687 - RNA, 19 nt, Human
guggugcugagggcauggu

SEQ ID NO: 1064688 - RNA, 22 nt, Human
uaagacgcuuguuaaaaaccca

SEQ ID NO: 1064689 - RNA, 18 nt, Human
uagaagaccgaaaggcug

SEQ ID NO: 1064690 - RNA, 19 nt, Human
uagaugggaauggggcugg

SEQ ID NO: 1064691 - RNA, 22 nt, Human
ucaggaauuuguaguuuauuuu

SEQ ID NO: 1064692 - RNA, 22 nt, Human
uccagguacccagucucaguug

SEQ ID NO: 1064693 - RNA, 18 nt, Human
ucccaggccccacccaga

SEQ ID NO: 1064694 - RNA, 19 nt, Human
ucgcccccgggcucugccu

SEQ ID NO: 1064695 - RNA, 22 nt, Human
ucuguauaaccugugcccagga

SEQ ID NO: 1064696 - RNA, 23 nt, Human
ucuguauaaccugugcccaggag

SEQ ID NO: 1064697 - RNA, 26 nt, Human
ucugucuggcuggagaaacacuaagg

SEQ ID NO: 1064698 - RNA, 21 nt, Human
ucugugcugcaugcagagggg

SEQ ID NO: 1064699 - RNA, 24 nt, Human
ugaccuggucagccaccaggggag

SEQ ID NO: 1064700 - RNA, 23 nt, Human
ugagggcauggucacacccuucu

SEQ ID NO: 1064701 - RNA, 18 nt, Human
ugagugaggaguccugga

SEQ ID NO: 1064702 - RNA, 20 nt, Human
uggaggaaguugggaagagg

SEQ ID NO: 1064703 - RNA, 25 nt, Human
uggaggaaguugggaagaggagucc

SEQ ID NO: 1064704 - RNA, 22 nt, Human
uggcauugugcucacacuggga

SEQ ID NO: 1064705 - RNA, 22 nt, Human
uggcucccaggccccacccaga

SEQ ID NO: 1064706 - RNA, 28 nt, Human
uggcuggagaaacacuaagguuggcauu

SEQ ID NO: 1064707 - RNA, 18 nt, Human
uggcuuugggcaucuccu

SEQ ID NO: 1064708 - RNA, 18 nt, Human
ugggaagaggaguccagg

SEQ ID NO: 1064709 - RNA, 19 nt, Human
ugggaauggggcugggguc

SEQ ID NO: 1064710 - RNA, 21 nt, Human
ugggaccccccucacacccaa

SEQ ID NO: 1064711 - RNA, 23 nt, Human
uggggacaagaguggugcugagg

SEQ ID NO: 1064712 - RNA, 24 nt, Human
uggggucuguauaaccugugccca

SEQ ID NO: 1064713 - RNA, 19 nt, Human
uggugcugagggcaugguc

SEQ ID NO: 1064714 - RNA, 19 nt, Human
uggugcugagggcaugguc

SEQ ID NO: 1064715 - RNA, 18 nt, Human
uguggcucccaggcccca

SEQ ID NO: 1064716 - RNA, 23 nt, Human
auagaacuuggcaucacccugaa

SEQ ID NO: 1064717 - RNA, 22 nt, Human
auucccugucauuucucuggcu

SEQ ID NO: 1064718 - RNA, 26 nt, Human
caaagccccuuuucuagccacugacu

SEQ ID NO: 1064719 - RNA, 18 nt, Human
caacagcaugggugcaaa

SEQ ID NO: 1064720 - RNA, 21 nt, Human
caauggcuucuccacccaagc

SEQ ID NO: 1064721 - RNA, 22 nt, Human
caccaaagguuucugaagacaa

SEQ ID NO: 1064722 - RNA, 22 nt, Human
cagcaugggugcaaaaaaaaaa

SEQ ID NO: 1064723 - RNA, 24 nt, Human
cucuccugcuaagcuuuguuuccu

SEQ ID NO: 1064724 - RNA, 18 nt, Human
cugcuaagcuuuguuucc

SEQ ID NO: 1064725 - RNA, 26 nt, Human
cuguagauucccugucauuucucugg

SEQ ID NO: 1064726 - RNA, 19 nt, Human
gacagggcuuuccuaacuu

SEQ ID NO: 1064727 - RNA, 20 nt, Human
gacagggcuuuccuaacuuc

SEQ ID NO: 1064728 - RNA, 24 nt, Human
gucauggucaucaaaaguuacaaa

SEQ ID NO: 1064729 - RNA, 24 nt, Human
guuuuuugcccauacacaugaguc

SEQ ID NO: 1064730 - RNA, 18 nt, Human
uaaaaucugccacugcca

SEQ ID NO: 1064731 - RNA, 18 nt, Human
uacugcugcugcuggaac

SEQ ID NO: 1064732 - RNA, 18 nt, Human
ucauuucucuggcucucc

SEQ ID NO: 1064733 - RNA, 20 nt, Human
ucucuggcucuccucuccug

SEQ ID NO: 1064734 - RNA, 25 nt, Human
ucugaagacaauggcuucuccaccc

SEQ ID NO: 1064735 - RNA, 21 nt, Human
ucugccacugccauagcuacu

SEQ ID NO: 1064736 - RNA, 19 nt, Human
ugaaugacaaucuuaucga

SEQ ID NO: 1064737 - RNA, 18 nt, Human
ugacucggucagucauga

SEQ ID NO: 1064738 - RNA, 18 nt, Human
uggaaccgccaauagcca

SEQ ID NO: 1064739 - RNA, 18 nt, Human
uucccacagaacagaaac

SEQ ID NO: 1064740 - RNA, 18 nt, Human
uuguggucauucacagua

SEQ ID NO: 1064741 - RNA, 25 nt, Human
uuguggucauucacaguaugguauu

SEQ ID NO: 1064742 - RNA, 26 nt, Human
aucuuccuguauggguuccccacugg

SEQ ID NO: 1064743 - RNA, 19 nt, Human
guucggagucgucaccauc

SEQ ID NO: 1064744 - RNA, 21 nt, Human
uccauauuuauuaugaucuuc

SEQ ID NO: 1064745 - RNA, 19 nt, Human
agcuaauggggaaaugaaa

SEQ ID NO: 1064746 - RNA, 21 nt, Human
cgugcuuacagacugcuccau

SEQ ID NO: 1064747 - RNA, 18 nt, Human
gccaguuuauuugaucgu

SEQ ID NO: 1064748 - RNA, 21 nt, Human
gcuaauggggaaaugaaagga

SEQ ID NO: 1064749 - RNA, 19 nt, Human
gugcuuacagacugcucca

SEQ ID NO: 1064750 - RNA, 19 nt, Human
uacaauuagccucaucuuu

SEQ ID NO: 1064751 - RNA, 23 nt, Human
uagccucaucuuuggccaguuua

SEQ ID NO: 1064752 - RNA, 30 nt, Human
uguuuuauucccauuuacaauuagccucaa

SEQ ID NO: 1064753 - RNA, 19 nt, Human
uugugguguguuuuauucc

SEQ ID NO: 1064754 - RNA, 21 nt, Human
uuuuaaaaucuguuuuuugug

SEQ ID NO: 1064755 - RNA, 24 nt, Human
aaaaagauacaaacaaaaccagca

SEQ ID NO: 1064756 - RNA, 21 nt, Human
aaaaccagcauucaacuugaa

SEQ ID NO: 1064757 - RNA, 21 nt, Human
aaaaugcacacacugugaacg

SEQ ID NO: 1064758 - RNA, 24 nt, Human
aaaccagcauucaacuugaaccaa

SEQ ID NO: 1064759 - RNA, 21 nt, Human
aagcuggcaugaugcaaggug

SEQ ID NO: 1064760 - RNA, 18 nt, Human
aaucuguauuauuuccuc

SEQ ID NO: 1064761 - RNA, 21 nt, Human
aauuucaguuacuccuuuaag

SEQ ID NO: 1064762 - RNA, 23 nt, Human
acagaccagugucacucccagau

SEQ ID NO: 1064763 - RNA, 21 nt, Human
acccuacuaccaaaacuguaa

SEQ ID NO: 1064764 - RNA, 20 nt, Human
agaaaaagacaauuauggaa

SEQ ID NO: 1064765 - RNA, 23 nt, Human
agcuaaauuuuguucaaagccua

SEQ ID NO: 1064766 - RNA, 18 nt, Human
agcuggcaugaugcaagg

SEQ ID NO: 1064767 - RNA, 21 nt, Human
aggcauaggaggcaacacugg

SEQ ID NO: 1064768 - RNA, 22 nt, Human
aggccgccgcaccauggagaau

SEQ ID NO: 1064769 - RNA, 22 nt, Human
agugauauagauuuaaaaaccc

SEQ ID NO: 1064770 - RNA, 21 nt, Human
auguaagaaagucuacacuuu

SEQ ID NO: 1064771 - RNA, 23 nt, Human
auuuccucaggccuuuuauccuc

SEQ ID NO: 1064772 - RNA, 25 nt, Human
cacaguaucauguacagagagcaaa

SEQ ID NO: 1064773 - RNA, 19 nt, Human
caccauggagaaugggcac

SEQ ID NO: 1064774 - RNA, 19 nt, Human
cacccagaaacagcagagc

SEQ ID NO: 1064775 - RNA, 21 nt, Human
cacucuauagaaaaagacaau

SEQ ID NO: 1064776 - RNA, 22 nt, Human
cagcauucaacuugaaccaaga

SEQ ID NO: 1064777 - RNA, 20 nt, Human
cagccaacagcucauacaga

SEQ ID NO: 1064778 - RNA, 21 nt, Human
cagccacaccugagaccagca

SEQ ID NO: 1064779 - RNA, 22 nt, Human
caggccuuuuauccuccacugg

SEQ ID NO: 1064780 - RNA, 18 nt, Human
caggucagcccaccgcuc

SEQ ID NO: 1064781 - RNA, 21 nt, Human
caugcacucuauagaaaaaga

SEQ ID NO: 1064782 - RNA, 21 nt, Human
ccaaaacuguaauugauuuca

SEQ ID NO: 1064783 - RNA, 22 nt, Human
ccaccgcucuccggacacccug

SEQ ID NO: 1064784 - RNA, 20 nt, Human
ccagaaacagcagagcucac

SEQ ID NO: 1064785 - RNA, 25 nt, Human
ccagugguucucuauuuuugaccag

SEQ ID NO: 1064786 - RNA, 20 nt, Human
ccauggagaaugggcaccgg

SEQ ID NO: 1064787 - RNA, 19 nt, Human
cccagaaacagcagagcuc

SEQ ID NO: 1064788 - RNA, 21 nt, Human
cccagaaacagcagagcucac

SEQ ID NO: 1064789 - RNA, 19 nt, Human
cccauacauacuaagccuc

SEQ ID NO: 1064790 - RNA, 19 nt, Human
cgacagcagcagccacacc

SEQ ID NO: 1064791 - RNA, 24 nt, Human
cgacagcagcagccacaccugaga

SEQ ID NO: 1064792 - RNA, 20 nt, Human
cggucuguucauccuucuua

SEQ ID NO: 1064793 - RNA, 19 nt, Human
cucaucgucaauaucuuca

SEQ ID NO: 1064794 - RNA, 23 nt, Human
cucccauacauacuaagccucua

SEQ ID NO: 1064795 - RNA, 20 nt, Human
cucucugaucucacuguuua

SEQ ID NO: 1064796 - RNA, 21 nt, Human
cugcagcugggcuggcagagc

SEQ ID NO: 1064797 - RNA, 23 nt, Human
cugccggguauaaucuuaaaugu

SEQ ID NO: 1064798 - RNA, 22 nt, Human
cugcugaauugauaccuucaac

SEQ ID NO: 1064799 - RNA, 23 nt, Human
gaacaggucagcccaccgcucuc

SEQ ID NO: 1064800 - RNA, 22 nt, Human
gacagcagcagccacaccugag

SEQ ID NO: 1064801 - RNA, 19 nt, Human
gaggaaggucaggucuucc

SEQ ID NO: 1064802 - RNA, 23 nt, Human
gccgcaccauggagaaugggcac

SEQ ID NO: 1064803 - RNA, 23 nt, Human
uaaaaacccuacuaccaaaacug

SEQ ID NO: 1064804 - RNA, 23 nt, Human
uaaaaagauacaaacaaaaccag

SEQ ID NO: 1064805 - RNA, 25 nt, Human
uaaaaagauacaaacaaaaccagca

SEQ ID NO: 1064806 - RNA, 19 nt, Human
uaaaaugcacacacuguga

SEQ ID NO: 1064807 - RNA, 24 nt, Human
uaagccucuagcuaagucucucug

SEQ ID NO: 1064808 - RNA, 21 nt, Human
uaauggcuuguucugaagcuc

SEQ ID NO: 1064809 - RNA, 19 nt, Human
uaauucuucugagccacag

SEQ ID NO: 1064810 - RNA, 23 nt, Human
uaccuucaacagcuaacauucaa

SEQ ID NO: 1064811 - RNA, 22 nt, Human
uagcuaagucucucugaaaauu

SEQ ID NO: 1064812 - RNA, 19 nt, Human
uaguguaguuuuucaugac

SEQ ID NO: 1064813 - RNA, 22 nt, Human
uauaauaacuguuaaaagucua

SEQ ID NO: 1064814 - RNA, 19 nt, Human
uauguaagaaagucuacac

SEQ ID NO: 1064815 - RNA, 19 nt, Human
ucaaagccuaggagaaccu

SEQ ID NO: 1064816 - RNA, 25 nt, Human
ucagcccaccgcucuccggacaccc

SEQ ID NO: 1064817 - RNA, 24 nt, Human
ucccauacauacuaagccucuagc

SEQ ID NO: 1064818 - RNA, 21 nt, Human
ucuccggacacccugccuucg

SEQ ID NO: 1064819 - RNA, 27 nt, Human
ucugagccacaguaucauguacagaga

SEQ ID NO: 1064820 - RNA, 22 nt, Human
ucugugaugauccacccagaaa

SEQ ID NO: 1064821 - RNA, 24 nt, Human
ucuuuugauggugucuccucuuug

SEQ ID NO: 1064822 - RNA, 19 nt, Human
ugaauaagaccacuucuau

SEQ ID NO: 1064823 - RNA, 19 nt, Human
ugacaaagcuggcaugaug

SEQ ID NO: 1064824 - RNA, 26 nt, Human
ugagaccagcagaagcgcugaacucc

SEQ ID NO: 1064825 - RNA, 22 nt, Human
ugccuuauccucauuaggauua

SEQ ID NO: 1064826 - RNA, 20 nt, Human
ugcgaauauguaagaaaguc

SEQ ID NO: 1064827 - RNA, 19 nt, Human
uggcagagcagccaacagc

SEQ ID NO: 1064828 - RNA, 23 nt, Human
uguaaaaagauacaaacaaaacc

SEQ ID NO: 1064829 - RNA, 18 nt, Human
uguaaaaggaagugcaca

SEQ ID NO: 1064830 - RNA, 19 nt, Human
ugucugucuggagcugcuc

SEQ ID NO: 1064831 - RNA, 21 nt, Human
uucaaacucgacagcagcagc

SEQ ID NO: 1064832 - RNA, 22 nt, Human
uucacucaagguaaaauuucag

SEQ ID NO: 1064833 - RNA, 19 nt, Human
uucauccuucuuaauggua

SEQ ID NO: 1064834 - RNA, 18 nt, Human
uuccaauucaacagccug

SEQ ID NO: 1064835 - RNA, 28 nt, Human
uucccuaaguucaucaccaacaugaaua

SEQ ID NO: 1064836 - RNA, 25 nt, Human
uuccuggcuauccacauguggcugc

SEQ ID NO: 1064837 - RNA, 18 nt, Human
uuuacugagucuuccuca

SEQ ID NO: 1064838 - RNA, 21 nt, Human
uuugauaaaccuugccuucuu

SEQ ID NO: 1064839 - RNA, 21 nt, Human
acaccgaggccugaggccucc

SEQ ID NO: 1064840 - RNA, 22 nt, Human
agauagccgacauguuugaagc

SEQ ID NO: 1064841 - RNA, 24 nt, Human
agccgacauguuugaagcagcccu

SEQ ID NO: 1064842 - RNA, 24 nt, Human
augucucuguuaagccuccagaca

SEQ ID NO: 1064843 - RNA, 18 nt, Human
caaucuguccauccacuc

SEQ ID NO: 1064844 - RNA, 22 nt, Human
cacacaucacuuaagagacaga

SEQ ID NO: 1064845 - RNA, 18 nt, Human
caccggaagaugcuggac

SEQ ID NO: 1064846 - RNA, 21 nt, Human
cacuuaagagacagaaagaaa

SEQ ID NO: 1064847 - RNA, 21 nt, Human
cagcacgggggcccaccucuu

SEQ ID NO: 1064848 - RNA, 20 nt, Human
ccaggaggcuacagcucagc

SEQ ID NO: 1064849 - RNA, 22 nt, Human
cccacuauccagcacgggggcc

SEQ ID NO: 1064850 - RNA, 19 nt, Human
ccuccagacaugcagcuca

SEQ ID NO: 1064851 - RNA, 23 nt, Human
ccuccaggucaccaucaaacucu

SEQ ID NO: 1064852 - RNA, 23 nt, Human
cuuaaagcugagggcaaucuguc

SEQ ID NO: 1064853 - RNA, 20 nt, Human
cuuaagagacagaaagaaac

SEQ ID NO: 1064854 - RNA, 24 nt, Human
cuucuccaguccaccaggaggcua

SEQ ID NO: 1064855 - RNA, 25 nt, Human
gucaccaucaaacucagcauucaga

SEQ ID NO: 1064856 - RNA, 20 nt, Human
uaagacagaucauccugaac

SEQ ID NO: 1064857 - RNA, 20 nt, Human
uaagccuccagacaugcagc

SEQ ID NO: 1064858 - RNA, 21 nt, Human
uacagcucagcucucaggacc

SEQ ID NO: 1064859 - RNA, 23 nt, Human
uagcaacagagccuagugcagag

SEQ ID NO: 1064860 - RNA, 25 nt, Human
uccacagagcaucgaucuuaagaca

SEQ ID NO: 1064861 - RNA, 19 nt, Human
ugaacugcccuuaaagcug

SEQ ID NO: 1064862 - RNA, 18 nt, Human
ugcccauuggauguagga

SEQ ID NO: 1064863 - RNA, 21 nt, Human
auugcugcccagcccacacca

SEQ ID NO: 1064864 - RNA, 23 nt, Human
caagugaauugcugcccagccca

SEQ ID NO: 1064865 - RNA, 21 nt, Human
cagccgccucuccacacccgg

SEQ ID NO: 1064866 - RNA, 23 nt, Human
ccuccaaggacagccgccucucc

SEQ ID NO: 1064867 - RNA, 22 nt, Human
cuccaaggacagccgccucucc

SEQ ID NO: 1064868 - RNA, 23 nt, Human
cuccacacccgggcuguuucucc

SEQ ID NO: 1064869 - RNA, 24 nt, Human
cuccuuagaaaggaucccuccaag

SEQ ID NO: 1064870 - RNA, 23 nt, Human
uccuuagaaaggaucccuccaag

SEQ ID NO: 1064871 - RNA, 18 nt, Human
ugaauugcugcccagccc

SEQ ID NO: 1064872 - RNA, 18 nt, Human
uguuagagaaucagauag

SEQ ID NO: 1064873 - RNA, 22 nt, Human
uucuccuucaagugaauugcug

SEQ ID NO: 1064874 - RNA, 24 nt, Human
aacugguuuggccacccagaagcu

SEQ ID NO: 1064875 - RNA, 21 nt, Human
aaguuccccgggguucuucuc

SEQ ID NO: 1064876 - RNA, 21 nt, Human
agaagucuuuggcugcaagag

SEQ ID NO: 1064877 - RNA, 21 nt, Human
cacccagaagcuugcagaagu

SEQ ID NO: 1064878 - RNA, 19 nt, Human
caggaacaaguuugucauc

SEQ ID NO: 1064879 - RNA, 22 nt, Human
caggauccaggggauuaauguc

SEQ ID NO: 1064880 - RNA, 19 nt, Human
cauucuccaggauccaggg

SEQ ID NO: 1064881 - RNA, 21 nt, Human
ccauuccauaagugcuuugcc

SEQ ID NO: 1064882 - RNA, 22 nt, Human
ccuugugcugggcaaguucccc

SEQ ID NO: 1064883 - RNA, 23 nt, Human
guaccucuuuggguugcagaaga

SEQ ID NO: 1064884 - RNA, 24 nt, Human
guaccucuuuggguugcagaagag

SEQ ID NO: 1064885 - RNA, 23 nt, Human
guucucauagucaaagguuccau

SEQ ID NO: 1064886 - RNA, 22 nt, Human
uaagucucccaaauaucgccca

SEQ ID NO: 1064887 - RNA, 19 nt, Human
uaauuccuucuucaaugau

SEQ ID NO: 1064888 - RNA, 23 nt, Human
ucccaugccauacguaaacuuca

SEQ ID NO: 1064889 - RNA, 19 nt, Human
ugcagaagagagcacuuug

SEQ ID NO: 1064890 - RNA, 22 nt, Human
uucacuaccaaaaucaaacacc

SEQ ID NO: 1064891 - RNA, 25 nt, Human
uucccaugccauacguaaacuucac

SEQ ID NO: 1064892 - RNA, 19 nt, Human
uuucaguucuguccaaucc

SEQ ID NO: 1064893 - RNA, 22 nt, Human
uuuuucguugugcuaacgugac

SEQ ID NO: 1064894 - RNA, 19 nt, Human
aacgucccucaaacaaucu

SEQ ID NO: 1064895 - RNA, 22 nt, Human
aagcagccggcgaaguuguagc

SEQ ID NO: 1064896 - RNA, 26 nt, Human
aagcggauuucuucuugcacaagucc

SEQ ID NO: 1064897 - RNA, 24 nt, Human
aaguccugcacugguuacaccacc

SEQ ID NO: 1064898 - RNA, 20 nt, Human
acaagcgagguggcgcugcc

SEQ ID NO: 1064899 - RNA, 18 nt, Human
acaccaccuccaacaaaa

SEQ ID NO: 1064900 - RNA, 24 nt, Human
caaggguuuuucacaucuuuccca

SEQ ID NO: 1064901 - RNA, 23 nt, Human
cacaaguccugcacugguuacac

SEQ ID NO: 1064902 - RNA, 19 nt, Human
caccaccuccaacaaaaug

SEQ ID NO: 1064903 - RNA, 24 nt, Human
caccaccuccaacaaaaugauuug

SEQ ID NO: 1064904 - RNA, 18 nt, Human
caccauucccucucugcc

SEQ ID NO: 1064905 - RNA, 18 nt, Human
cacugguuacaccaccuc

SEQ ID NO: 1064906 - RNA, 18 nt, Human
cagcgccugccugcacca

SEQ ID NO: 1064907 - RNA, 18 nt, Human
caugcugggaccagcagc

SEQ ID NO: 1064908 - RNA, 21 nt, Human
ccaccuccaacaaaaugauuu

SEQ ID NO: 1064909 - RNA, 24 nt, Human
ccaccuguagcaugccucggccau

SEQ ID NO: 1064910 - RNA, 25 nt, Human
ccaguagguuuuuucucugugacuc

SEQ ID NO: 1064911 - RNA, 19 nt, Human
ccccgggcggagagccuca

SEQ ID NO: 1064912 - RNA, 18 nt, Human
ccgccggccucccaaguc

SEQ ID NO: 1064913 - RNA, 21 nt, Human
ccggccccgggcggagagccu

SEQ ID NO: 1064914 - RNA, 23 nt, Human
ccugccugcaccauucccucucu

SEQ ID NO: 1064915 - RNA, 18 nt, Human
cgccugccugcaccauuc

SEQ ID NO: 1064916 - RNA, 27 nt, Human
cucucugccgcugccugcuucugcaau

SEQ ID NO: 1064917 - RNA, 26 nt, Human
cugccugcugggaaagcuccgggcgu

SEQ ID NO: 1064918 - RNA, 22 nt, Human
cuggcgaggacggugggacccu

SEQ ID NO: 1064919 - RNA, 19 nt, Human
cugucccgccugcccuggg

SEQ ID NO: 1064920 - RNA, 18 nt, Human
gcccugggacgcaggcug

SEQ ID NO: 1064921 - RNA, 20 nt, Human
gcguccgaagcagccggcga

SEQ ID NO: 1064922 - RNA, 19 nt, Human
guccgaagcagccggcgaa

SEQ ID NO: 1064923 - RNA, 28 nt, Human
uaaccugagagagauggacugcgcgucc

SEQ ID NO: 1064924 - RNA, 18 nt, Human
uacaccaccuccaacaaa

SEQ ID NO: 1064925 - RNA, 20 nt, Human
uacaccaccuccaacaaaau

SEQ ID NO: 1064926 - RNA, 23 nt, Human
uagacauucauugugauccagca

SEQ ID NO: 1064927 - RNA, 22 nt, Human
uagcaugccucggccauuuucu

SEQ ID NO: 1064928 - RNA, 19 nt, Human
ucaaggguuuuucacaucu

SEQ ID NO: 1064929 - RNA, 20 nt, Human
ucaaggguuuuucacaucuu

SEQ ID NO: 1064930 - RNA, 26 nt, Human
ucacaucuuucccauucuggaaaauc

SEQ ID NO: 1064931 - RNA, 26 nt, Human
ucccaagucaggccguaaacacucgc

SEQ ID NO: 1064932 - RNA, 23 nt, Human
ucccucucugccgcugccugcua

SEQ ID NO: 1064933 - RNA, 22 nt, Human
ucugccugcugggaaagcuccg

SEQ ID NO: 1064934 - RNA, 18 nt, Human
ucuugauuccuucagugu

SEQ ID NO: 1064935 - RNA, 19 nt, Human
ugaaaacaagcgagguggc

SEQ ID NO: 1064936 - RNA, 23 nt, Human
ugaaaacaagcgagguggcgcug

SEQ ID NO: 1064937 - RNA, 18 nt, Human
ugagagagauggacugcg

SEQ ID NO: 1064938 - RNA, 19 nt, Human
ugauuugcaaaauccaccu

SEQ ID NO: 1064939 - RNA, 20 nt, Human
uggcgcugccucugugcugu

SEQ ID NO: 1064940 - RNA, 23 nt, Human
ugggacgcaggcuggcgaggacg

SEQ ID NO: 1064941 - RNA, 23 nt, Human
ugucuugauuccuucagugucca

SEQ ID NO: 1064942 - RNA, 21 nt, Human
uuacaccaccuccaacaaaau

SEQ ID NO: 1064943 - RNA, 20 nt, Human
uucucugugacucuucuaaa

SEQ ID NO: 1064944 - RNA, 19 nt, Human
uuuacuauccaaacucugu

SEQ ID NO: 1064945 - RNA, 21 nt, Human
uuucccauucuggaaaaucuu

SEQ ID NO: 1064946 - RNA, 26 nt, Human
uuucccauucuggaaaaucuucaaga

SEQ ID NO: 1064947 - RNA, 23 nt, Human
aagcaggagcuggacccgcagag

SEQ ID NO: 1064948 - RNA, 19 nt, Human
aaguagcuaggcucuuuug

SEQ ID NO: 1064949 - RNA, 22 nt, Human
acacggaggucuacuuccccca

SEQ ID NO: 1064950 - RNA, 25 nt, Human
acagugacccuaacaucuacuuccu

SEQ ID NO: 1064951 - RNA, 24 nt, Human
agaacagccagccugguggccagg

SEQ ID NO: 1064952 - RNA, 19 nt, Human
agagguucagggaggaguu

SEQ ID NO: 1064953 - RNA, 18 nt, Human
agccugguggccaggcug

SEQ ID NO: 1064954 - RNA, 21 nt, Human
agcuuaagcuggagucacugc

SEQ ID NO: 1064955 - RNA, 24 nt, Human
aggaccacuugagcccgagaauuu

SEQ ID NO: 1064956 - RNA, 19 nt, Human
aggaggaggaggccuggcu

SEQ ID NO: 1064957 - RNA, 22 nt, Human
aggaggaggaggccuggcugca

SEQ ID NO: 1064958 - RNA, 19 nt, Human
aggcaaaugccagcaacag

SEQ ID NO: 1064959 - RNA, 20 nt, Human
aggcugagguuagggauuug

SEQ ID NO: 1064960 - RNA, 18 nt, Human
aggcugcagaucaucagc

SEQ ID NO: 1064961 - RNA, 24 nt, Human
agguacggugucucacgccauuaa

SEQ ID NO: 1064962 - RNA, 23 nt, Human
aguccuagcuacuccuaaguagc

SEQ ID NO: 1064963 - RNA, 20 nt, Human
agugagcucugaucaacugc

SEQ ID NO: 1064964 - RNA, 18 nt, Human
caaccaugccaccacccc

SEQ ID NO: 1064965 - RNA, 24 nt, Human
caacugcugcacuccagccugggu

SEQ ID NO: 1064966 - RNA, 24 nt, Human
caagaacagcucgcccugccaagg

SEQ ID NO: 1064967 - RNA, 19 nt, Human
caagaagccucuguauggc

SEQ ID NO: 1064968 - RNA, 24 nt, Human
caagcaacagaaugggaaaugaaa

SEQ ID NO: 1064969 - RNA, 21 nt, Human
caagccccccacgcaacaacu

SEQ ID NO: 1064970 - RNA, 24 nt, Human
caccaacagugacccuaacaucua

SEQ ID NO: 1064971 - RNA, 24 nt, Human
cacgccauuaaucccagcacuuug

SEQ ID NO: 1064972 - RNA, 20 nt, Human
cacuccagccugggugacag

SEQ ID NO: 1064973 - RNA, 22 nt, Human
cacuccagccugggugacagag

SEQ ID NO: 1064974 - RNA, 22 nt, Human
cacuccagccugggugacagag

SEQ ID NO: 1064975 - RNA, 22 nt, Human
cagcaaaguggaccugcucucc

SEQ ID NO: 1064976 - RNA, 22 nt, Human
cagcaauggccagccagacucc

SEQ ID NO: 1064977 - RNA, 22 nt, Human
cagcaccaucgccucagaccac

SEQ ID NO: 1064978 - RNA, 19 nt, Human
cagcacuuugggaggacca

SEQ ID NO: 1064979 - RNA, 23 nt, Human
cagcacuuugggaggaccacuug

SEQ ID NO: 1064980 - RNA, 23 nt, Human
cagccaccaacagugacccuaac

SEQ ID NO: 1064981 - RNA, 23 nt, Human
cagccagccugguggccaggcug

SEQ ID NO: 1064982 - RNA, 22 nt, Human
cagccgacccccaccaccccag

SEQ ID NO: 1064983 - RNA, 19 nt, Human
caggccgagugcuugcccc

SEQ ID NO: 1064984 - RNA, 20 nt, Human
cagugcgcucucccuaccuu

SEQ ID NO: 1064985 - RNA, 30 nt, Human
cauggagaagaagaacccucccucaauucc

SEQ ID NO: 1064986 - RNA, 22 nt, Human
caugguggccguggccuguagu

SEQ ID NO: 1064987 - RNA, 26 nt, Human
ccacuacagcaagcugggugagcagg

SEQ ID NO: 1064988 - RNA, 22 nt, Human
cccacaugcaggaggaggaggc

SEQ ID NO: 1064989 - RNA, 26 nt, Human
ccccaccaccccauagcagcucacgg

SEQ ID NO: 1064990 - RNA, 23 nt, Human
cccccaccaccccauagcagcuc

SEQ ID NO: 1064991 - RNA, 22 nt, Human
ccccgcaaccaugccaccaccc

SEQ ID NO: 1064992 - RNA, 24 nt, Human
ccccggccacuuccuggaccacaa

SEQ ID NO: 1064993 - RNA, 23 nt, Human
cccgcaaccaugccaccaccccu

SEQ ID NO: 1064994 - RNA, 26 nt, Human
cccgcaaccaugccaccaccccuuac

SEQ ID NO: 1064995 - RNA, 22 nt, Human
cccgcagaggcugcagaucauc

SEQ ID NO: 1064996 - RNA, 18 nt, Human
cccuaccugcuguccgac

SEQ ID NO: 1064997 - RNA, 22 nt, Human
ccgcaaccaugccaccaccccu

SEQ ID NO: 1064998 - RNA, 22 nt, Human
ccucaaggacucagcuggucag

SEQ ID NO: 1064999 - RNA, 23 nt, Human
ccucugccucuacaaaaaauuua

SEQ ID NO: 1065000 - RNA, 20 nt, Human
ccucuguauggcaucuugca

SEQ ID NO: 1065001 - RNA, 18 nt, Human
ccugcagcuuugaggcca

SEQ ID NO: 1065002 - RNA, 20 nt, Human
ccuguaguccuagcuacucc

SEQ ID NO: 1065003 - RNA, 20 nt, Human
cgaaggcaagccccccacgc

SEQ ID NO: 1065004 - RNA, 22 nt, Human
cgacaagcuccagggccugggg

SEQ ID NO: 1065005 - RNA, 23 nt, Human
cguccaacaggucccagcugcac

SEQ ID NO: 1065006 - RNA, 22 nt, Human
cucacgccauuaaucccagcac

SEQ ID NO: 1065007 - RNA, 24 nt, Human
cucacgccauuaaucccagcacuu

SEQ ID NO: 1065008 - RNA, 20 nt, Human
cuccaaaaaaaauugaugua

SEQ ID NO: 1065009 - RNA, 18 nt, Human
cugcacuccagccugggu

SEQ ID NO: 1065010 - RNA, 20 nt, Human
cugcacuccagccuggguga

SEQ ID NO: 1065011 - RNA, 21 nt, Human
cugcacuccagccugggugac

SEQ ID NO: 1065012 - RNA, 22 nt, Human
cugcacuccagccugggugaca

SEQ ID NO: 1065013 - RNA, 23 nt, Human
cugcacuccagccugggugacag

SEQ ID NO: 1065014 - RNA, 25 nt, Human
cugcacuccagccugggugacagag

SEQ ID NO: 1065015 - RNA, 25 nt, Human
cugccagcuugaggcugagcagugg

SEQ ID NO: 1065016 - RNA, 20 nt, Human
cugcugcacuccagccuggg

SEQ ID NO: 1065017 - RNA, 21 nt, Human
cugcugcacuccagccugggu

SEQ ID NO: 1065018 - RNA, 24 nt, Human
cugcugcacuccagccugggugac

SEQ ID NO: 1065019 - RNA, 23 nt, Human
cugcuggugcagcucuuccccaa

SEQ ID NO: 1065020 - RNA, 19 nt, Human
cuggcugcuggugcagcuc

SEQ ID NO: 1065021 - RNA, 18 nt, Human
cugugugacaggccgagu

SEQ ID NO: 1065022 - RNA, 21 nt, Human
cuucccccacaugcaggagga

SEQ ID NO: 1065023 - RNA, 24 nt, Human
gaaaaaaaaaaaaaauauggccag

SEQ ID NO: 1065024 - RNA, 20 nt, Human
gacaagcuccagggccuggg

SEQ ID NO: 1065025 - RNA, 24 nt, Human
gaccacuugagcccgagaauuuga

SEQ ID NO: 1065026 - RNA, 18 nt, Human
gacggcggcaagcaggag

SEQ ID NO: 1065027 - RNA, 24 nt, Human
gacuguggcagcacuggggcagcc

SEQ ID NO: 1065028 - RNA, 22 nt, Human
gagaagaagaacccucccucag

SEQ ID NO: 1065029 - RNA, 23 nt, Human
gagucagaaccaucuccaaaaaa

SEQ ID NO: 1065030 - RNA, 22 nt, Human
gagugaaaaggcaagcaacaga

SEQ ID NO: 1065031 - RNA, 24 nt, Human
gaucaacugcugcacuccagccug

SEQ ID NO: 1065032 - RNA, 20 nt, Human
gcaagccccccacgcaacaa

SEQ ID NO: 1065033 - RNA, 24 nt, Human
gcacuccagccugggugacagagu

SEQ ID NO: 1065034 - RNA, 19 nt, Human
gcagcacuggggcagccac

SEQ ID NO: 1065035 - RNA, 24 nt, Human
gcagcucauccacaacuacaugga

SEQ ID NO: 1065036 - RNA, 21 nt, Human
gcaggagcuggacccgcagag

SEQ ID NO: 1065037 - RNA, 21 nt, Human
gccaccaacagugacccuaac

SEQ ID NO: 1065038 - RNA, 18 nt, Human
gccuguaguccuagcuac

SEQ ID NO: 1065039 - RNA, 21 nt, Human
gcucaacacgcucacguccaa

SEQ ID NO: 1065040 - RNA, 21 nt, Human
gcuggcugcuggugcagcucu

SEQ ID NO: 1065041 - RNA, 20 nt, Human
ggacuucugagaagcacccu

SEQ ID NO: 1065042 - RNA, 18 nt, Human
ggaggaccacuugagccc

SEQ ID NO: 1065043 - RNA, 19 nt, Human
ggaggucaaggaugcagug

SEQ ID NO: 1065044 - RNA, 22 nt, Human
ggcaacuuugccgcggggcucc

SEQ ID NO: 1065045 - RNA, 19 nt, Human
ggccuguaguccuagcuac

SEQ ID NO: 1065046 - RNA, 20 nt, Human
gggcaacuuugccgcggggc

SEQ ID NO: 1065047 - RNA, 18 nt, Human
gggccuggggcuggacgc

SEQ ID NO: 1065048 - RNA, 19 nt, Human
ggguccuggccugcuggcu

SEQ ID NO: 1065049 - RNA, 24 nt, Human
ggugucucacgccauuaaucccag

SEQ ID NO: 1065050 - RNA, 24 nt, Human
gucagaaccaucuccaaaaaaaau

SEQ ID NO: 1065051 - RNA, 24 nt, Human
guggaccugcucucccugaaggug

SEQ ID NO: 1065052 - RNA, 20 nt, Human
guggagaggagguagcugau

SEQ ID NO: 1065053 - RNA, 20 nt, Human
uaaaauaacucacugaguga

SEQ ID NO: 1065054 - RNA, 27 nt, Human
uaaaauaacucacugagugaaaaggcc

SEQ ID NO: 1065055 - RNA, 22 nt, Human
uagauagauagauagauaggua

SEQ ID NO: 1065056 - RNA, 24 nt, Human
uagauagauagauagauagguuag

SEQ ID NO: 1065057 - RNA, 22 nt, Human
uagauagauagauagguaggua

SEQ ID NO: 1065058 - RNA, 22 nt, Human
uagauagauagguagguagaua

SEQ ID NO: 1065059 - RNA, 18 nt, Human
ucaacugcugcacuccag

SEQ ID NO: 1065060 - RNA, 24 nt, Human
ucaccuaguuccuggaugaagccu

SEQ ID NO: 1065061 - RNA, 23 nt, Human
ucagccacagucaacuucuccca

SEQ ID NO: 1065062 - RNA, 18 nt, Human
ucagggaggaguuugagg

SEQ ID NO: 1065063 - RNA, 22 nt, Human
ucaggugggguccuggccugcu

SEQ ID NO: 1065064 - RNA, 19 nt, Human
ucauggagaagaagaaccc

SEQ ID NO: 1065065 - RNA, 18 nt, Human
uccaaaaaaaauugaugu

SEQ ID NO: 1065066 - RNA, 23 nt, Human
uccacaacuacauggaggucuac

SEQ ID NO: 1065067 - RNA, 23 nt, Human
uccaccgccgagaacuuccggcu

SEQ ID NO: 1065068 - RNA, 21 nt, Human
uccacuacagcaagcugggug

SEQ ID NO: 1065069 - RNA, 18 nt, Human
uccacuggcucuucccug

SEQ ID NO: 1065070 - RNA, 24 nt, Human
uccagccugggugacagagucaga

SEQ ID NO: 1065071 - RNA, 22 nt, Human
uccgugaauuccaggacuucug

SEQ ID NO: 1065072 - RNA, 18 nt, Human
uccgugggcaacuuugcc

SEQ ID NO: 1065073 - RNA, 21 nt, Human
uccuagcaggcauguggaacc

SEQ ID NO: 1065074 - RNA, 21 nt, Human
uccuggaccacaaagaugagg

SEQ ID NO: 1065075 - RNA, 23 nt, Human
uccuggccugcuggcugcuggug

SEQ ID NO: 1065076 - RNA, 19 nt, Human
ucugcaagauccccuugga

SEQ ID NO: 1065077 - RNA, 19 nt, Human
ugacagagucagaaccauc

SEQ ID NO: 1065078 - RNA, 18 nt, Human
ugagaggagcagcaagga

SEQ ID NO: 1065079 - RNA, 18 nt, Human
ugaguuugccgucuuccu

SEQ ID NO: 1065080 - RNA, 20 nt, Human
ugcaaucaauccugagaggu

SEQ ID NO: 1065081 - RNA, 19 nt, Human
ugcaccugcagcucaucca

SEQ ID NO: 1065082 - RNA, 18 nt, Human
ugccccugagaggagcag

SEQ ID NO: 1065083 - RNA, 23 nt, Human
ugcugcacuccagccugggugac

SEQ ID NO: 1065084 - RNA, 24 nt, Human
ugcugcacuccagccugggugaca

SEQ ID NO: 1065085 - RNA, 21 nt, Human
ugcuggugcagcucuucccca

SEQ ID NO: 1065086 - RNA, 24 nt, Human
uggagacagaggccaaagaugcug

SEQ ID NO: 1065087 - RNA, 21 nt, Human
uggccaggcugccagcuugag

SEQ ID NO: 1065088 - RNA, 23 nt, Human
uggccaggcugccagcuugaggc

SEQ ID NO: 1065089 - RNA, 20 nt, Human
ugggguccuggccugcuggc

SEQ ID NO: 1065090 - RNA, 22 nt, Human
ugguggccguggccuguagucc

SEQ ID NO: 1065091 - RNA, 22 nt, Human
uguaaucauaaaauaacucacu

SEQ ID NO: 1065092 - RNA, 24 nt, Human
ugucucacgccauuaaucccagca

SEQ ID NO: 1065093 - RNA, 20 nt, Human
uuacugcccucaaggacuca

SEQ ID NO: 1065094 - RNA, 19 nt, Human
uuagccaggcaugguggcc

SEQ ID NO: 1065095 - RNA, 22 nt, Human
uucccugagcucuuccacuaca

SEQ ID NO: 1065096 - RNA, 19 nt, Human
uucuaagaagugagagugg

SEQ ID NO: 1065097 - RNA, 24 nt, Human
uugagggucccccgcugccccuga

SEQ ID NO: 1065098 - RNA, 20 nt, Human
uuugaaaaaaaaaaaaaaua

SEQ ID NO: 1065099 - RNA, 19 nt, Human
uuugcaaacauaaauacaa

SEQ ID NO: 1065100 - RNA, 23 nt, Human
uuuguaaucauaaaauaacucac

SEQ ID NO: 1065101 - RNA, 21 nt, Human
aaaaaaaaaaaauauggccag

SEQ ID NO: 1065102 - RNA, 18 nt, Human
aaaaauagcaaaacacac

SEQ ID NO: 1065103 - RNA, 22 nt, Human
aaaagagaagauacauaagaaa

SEQ ID NO: 1065104 - RNA, 20 nt, Human
aaaaggaaacaaucauaaaa

SEQ ID NO: 1065105 - RNA, 19 nt, Human
aaaaguaacuauugaaggc

SEQ ID NO: 1065106 - RNA, 22 nt, Human
aaacagaauagagagcucauaa

SEQ ID NO: 1065107 - RNA, 24 nt, Human
aaacauugaauuccuaauauaaaa

SEQ ID NO: 1065108 - RNA, 24 nt, Human
aaagacuuuaauauaccuuuuuca

SEQ ID NO: 1065109 - RNA, 23 nt, Human
aaagauauucaacagaaauaaag

SEQ ID NO: 1065110 - RNA, 22 nt, Human
aaaguuacuuugaaaagacuga

SEQ ID NO: 1065111 - RNA, 26 nt, Human
aaaugcaguguauagauaacuuugaa

SEQ ID NO: 1065112 - RNA, 18 nt, Human
aacuauugaaggcuagua

SEQ ID NO: 1065113 - RNA, 22 nt, Human
aagaaaaaauauaaugugaaga

SEQ ID NO: 1065114 - RNA, 20 nt, Human
aagcugcaaaucuauagcaa

SEQ ID NO: 1065115 - RNA, 19 nt, Human
aaguagcuaggcucuuuug

SEQ ID NO: 1065116 - RNA, 21 nt, Human
aaugaaaucagcaaaagccaa

SEQ ID NO: 1065117 - RNA, 20 nt, Human
aaugcaaaugaaaaugcagu

SEQ ID NO: 1065118 - RNA, 25 nt, Human
acagugacccuaacaucuacuuccu

SEQ ID NO: 1065119 - RNA, 25 nt, Human
acugagagaaauuaaagauauucaa

SEQ ID NO: 1065120 - RNA, 21 nt, Human
agaaaaggaaacaaucauaaa

SEQ ID NO: 1065121 - RNA, 22 nt, Human
agaauagagagcucauaaagag

SEQ ID NO: 1065122 - RNA, 24 nt, Human
agaauagagagcucauaaagagaa

SEQ ID NO: 1065123 - RNA, 18 nt, Human
agcauaauuugucugcau

SEQ ID NO: 1065124 - RNA, 18 nt, Human
agcucauaaagagaacca

SEQ ID NO: 1065125 - RNA, 24 nt, Human
aggaccacuugagcccgagaauuu

SEQ ID NO: 1065126 - RNA, 19 nt, Human
aggcaaaugccagcaacag

SEQ ID NO: 1065127 - RNA, 24 nt, Human
agguacggugucucacgccauuaa

SEQ ID NO: 1065128 - RNA, 20 nt, Human
aggugggguccuggccugcu

SEQ ID NO: 1065129 - RNA, 23 nt, Human
aguccuagcuacuccuaaguagc

SEQ ID NO: 1065130 - RNA, 20 nt, Human
agugagcucugaucaacugc

SEQ ID NO: 1065131 - RNA, 18 nt, Human
aguuuuuauaaauguaua

SEQ ID NO: 1065132 - RNA, 22 nt, Human
auaaaaaugaaaguaaaaauac

SEQ ID NO: 1065133 - RNA, 19 nt, Human
augaaacagaauagagagc

SEQ ID NO: 1065134 - RNA, 23 nt, Human
augaauauuaacauccaaccuca

SEQ ID NO: 1065135 - RNA, 19 nt, Human
caaaaauagcaaaacacac

SEQ ID NO: 1065136 - RNA, 18 nt, Human
caaccaugccaccacccc

SEQ ID NO: 1065137 - RNA, 19 nt, Human
caacugaaaaacugacuau

SEQ ID NO: 1065138 - RNA, 24 nt, Human
caacugcugcacuccagccugggu

SEQ ID NO: 1065139 - RNA, 24 nt, Human
caagaacagcucgcccugccaagg

SEQ ID NO: 1065140 - RNA, 19 nt, Human
caagaagccucuguauggc

SEQ ID NO: 1065141 - RNA, 24 nt, Human
caagcaacagaaugggaaaugaaa

SEQ ID NO: 1065142 - RNA, 19 nt, Human
caauaauaacaaggaaauc

SEQ ID NO: 1065143 - RNA, 24 nt, Human
cacaaaaauuauuucauauagaag

SEQ ID NO: 1065144 - RNA, 24 nt, Human
caccaacagugacccuaacaucua

SEQ ID NO: 1065145 - RNA, 23 nt, Human
cacccaaaaauagcaaaacacac

SEQ ID NO: 1065146 - RNA, 24 nt, Human
cacgccauuaaucccagcacuuug

SEQ ID NO: 1065147 - RNA, 22 nt, Human
cacuccagccugggugacagag

SEQ ID NO: 1065148 - RNA, 22 nt, Human
cagcaaaguggaccugcucucc

SEQ ID NO: 1065149 - RNA, 22 nt, Human
cagcaauggccagccagacucc

SEQ ID NO: 1065150 - RNA, 23 nt, Human
cagcacuuugggaggaccacuug

SEQ ID NO: 1065151 - RNA, 25 nt, Human
cagcacuuugggaggaccacuugag

SEQ ID NO: 1065152 - RNA, 23 nt, Human
cagccaccaacagugacccuaac

SEQ ID NO: 1065153 - RNA, 22 nt, Human
cagccgacccccaccaccccag

SEQ ID NO: 1065154 - RNA, 23 nt, Human
cauaaaauaaaugaaaucagcaa

SEQ ID NO: 1065155 - RNA, 18 nt, Human
cauaaagagaaccacaca

SEQ ID NO: 1065156 - RNA, 30 nt, Human; identical to SEQ ID NO: 1064985

SEQ ID NO: 1065157 - RNA, 22 nt, Human
caugguggccguggccuguagu

SEQ ID NO: 1065158 - RNA, 18 nt, Human
ccaaaaauagcaaaacac

SEQ ID NO: 1065159 - RNA, 22 nt, Human
ccaaaaauagcaaaacacacaa

SEQ ID NO: 1065160 - RNA, 22 nt, Human
ccaggaagaaacauugaauucc

SEQ ID NO: 1065161 - RNA, 23 nt, Human
cccaaaaauagcaaaacacacaa

SEQ ID NO: 1065162 - RNA, 26 nt, Human
ccccaccaccccauagcagcucacgg

SEQ ID NO: 1065163 - RNA, 23 nt, Human
cccccaccaccccauagcagcuc

SEQ ID NO: 1065164 - RNA, 23 nt, Human
cccgcaaccaugccaccaccccu

SEQ ID NO: 1065165 - RNA, 26 nt, Human
cccgcaaccaugccaccaccccuuac

SEQ ID NO: 1065166 - RNA, 22 nt, Human
ccgcaaccaugccaccaccccu

SEQ ID NO: 1065167 - RNA, 22 nt, Human
ccucaaggacucagcuggucag

SEQ ID NO: 1065168 - RNA, 23 nt, Human
ccucugccucuacaaaaaauuua

SEQ ID NO: 1065169 - RNA, 20 nt, Human
ccucuguauggcaucuugca

SEQ ID NO: 1065170 - RNA, 18 nt, Human
ccugcagcuuugaggcca

SEQ ID NO: 1065171 - RNA, 20 nt, Human
ccuguaguccuagcuacucc

SEQ ID NO: 1065172 - RNA, 22 nt, Human
cucacgccauuaaucccagcac

SEQ ID NO: 1065173 - RNA, 24 nt, Human
cucacgccauuaaucccagcacuu

SEQ ID NO: 1065174 - RNA, 18 nt, Human
cugaaaaacugacuauaa

SEQ ID NO: 1065175 - RNA, 19 nt, Human
cugauaaaaauauaccaug

SEQ ID NO: 1065176 - RNA, 18 nt, Human
cugcacuccagccugggu

SEQ ID NO: 1065177 - RNA, 20 nt, Human
cugcacuccagccuggguga

SEQ ID NO: 1065178 - RNA, 21 nt, Human
cugcacuccagccugggugac

SEQ ID NO: 1065179 - RNA, 23 nt, Human
cugcacuccagccugggugacag

SEQ ID NO: 1065180 - RNA, 25 nt, Human
cugcacuccagccugggugacagag

SEQ ID NO: 1065181 - RNA, 20 nt, Human
cugcugcacuccagccuggg

SEQ ID NO: 1065182 - RNA, 21 nt, Human
cugcugcacuccagccugggu

SEQ ID NO: 1065183 - RNA, 24 nt, Human
cugcugcacuccagccugggugac

SEQ ID NO: 1065184 - RNA, 23 nt, Human
cugcuggugcagcucuuccccaa

SEQ ID NO: 1065185 - RNA, 19 nt, Human
cuggcugcuggugcagcuc

SEQ ID NO: 1065186 - RNA, 20 nt, Human
cuugaaaauuaauaaucuaa

SEQ ID NO: 1065187 - RNA, 24 nt, Human
gaccacuugagcccgagaauuuga

SEQ ID NO: 1065188 - RNA, 24 nt, Human
gacuguggcagcacuggggcagcc

SEQ ID NO: 1065189 - RNA, 22 nt, Human
gagaagaagaacccucccucag

SEQ ID NO: 1065190 - RNA, 20 nt, Human
gagagaaauuaaagauauuc

SEQ ID NO: 1065191 - RNA, 19 nt, Human
gaggaaaagauucauuuuc

SEQ ID NO: 1065192 - RNA, 23 nt, Human
gagucagaaccaucuccaaaaaa

SEQ ID NO: 1065193 - RNA, 24 nt, Human
gaucaacugcugcacuccagccug

SEQ ID NO: 1065194 - RNA, 24 nt, Human
gcacuccagccugggugacagagu

SEQ ID NO: 1065195 - RNA, 19 nt, Human
gcagcacuggggcagccac

SEQ ID NO: 1065196 - RNA, 23 nt, Human
gcaguguauagauaacuuugaag

SEQ ID NO: 1065197 - RNA, 21 nt, Human
gcucaacacgcucacguccaa

SEQ ID NO: 1065198 - RNA, 24 nt, Human
gcugcacuccagccugggugacag

SEQ ID NO: 1065199 - RNA, 21 nt, Human
gcuggcugcuggugcagcucu

SEQ ID NO: 1065200 - RNA, 23 nt, Human
ggaaaagauucauuuucaauaaa

SEQ ID NO: 1065201 - RNA, 20 nt, Human
ggacuucugagaagcacccu

SEQ ID NO: 1065202 - RNA, 18 nt, Human
ggaggaccacuugagccc

SEQ ID NO: 1065203 - RNA, 19 nt, Human
ggaggucaaggaugcagug

SEQ ID NO: 1065204 - RNA, 19 nt, Human
ggccuguaguccuagcuac

SEQ ID NO: 1065205 - RNA, 19 nt, Human
ggguccuggccugcuggcu

SEQ ID NO: 1065206 - RNA, 24 nt, Human
gucagaaccaucuccaaaaaaaau

SEQ ID NO: 1065207 - RNA, 24 nt, Human
guggaccugcucucccugaaggug

SEQ ID NO: 1065208 - RNA, 24 nt, Human
uaaaaaaagacucaaaaaguaacu

SEQ ID NO: 1065209 - RNA, 27 nt, Human
uaaaauaaaugaaaucagcaaaagcca

SEQ ID NO: 1065210 - RNA, 20 nt, Human
uaaaauaacucacugaguga

SEQ ID NO: 1065211 - RNA, 27 nt, Human
uaaaauaacucacugagugaaaaggcc

SEQ ID NO: 1065212 - RNA, 23 nt, Human
uaacauagcauaugcaaucccuu

SEQ ID NO: 1065213 - RNA, 24 nt, Human
uaacugauagcaaaaaggauacaa

SEQ ID NO: 1065214 - RNA, 19 nt, Human
uaacuuuaagucaaaaauu

SEQ ID NO: 1065215 - RNA, 23 nt, Human
uacaaugaauauuaaaauauauu

SEQ ID NO: 1065216 - RNA, 25 nt, Human
uacaaugaauauuaaaauauauuuu

SEQ ID NO: 1065217 - RNA, 21 nt, Human
uacuuugaaaagacugauaaa

SEQ ID NO: 1065218 - RNA, 22 nt, Human
uagauagauagauagauaggua

SEQ ID NO: 1065219 - RNA, 24 nt, Human
uagauagauagauagauagguuag

SEQ ID NO: 1065220 - RNA, 22 nt, Human
uagauagauagauagguaggua

SEQ ID NO: 1065221 - RNA, 22 nt, Human
uagauagauagguagguagaua

SEQ ID NO: 1065222 - RNA, 21 nt, Human
uauaaaauauaacauagcaua

SEQ ID NO: 1065223 - RNA, 19 nt, Human
uauaaaaugcaaaugaaaa

SEQ ID NO: 1065224 - RNA, 23 nt, Human
uauaaaaugcaaaugaaaaugca

SEQ ID NO: 1065225 - RNA, 19 nt, Human
uauagaagccaauguguac

SEQ ID NO: 1065226 - RNA, 18 nt, Human
ucaacugcugcacuccag

SEQ ID NO: 1065227 - RNA, 19 nt, Human
ucauggagaagaagaaccc

SEQ ID NO: 1065228 - RNA, 18 nt, Human
uccaaaaaaaauugaugu

SEQ ID NO: 1065229 - RNA, 22 nt, Human
uccacaaauucuaaauaucauc

SEQ ID NO: 1065230 - RNA, 24 nt, Human
uccagccugggugacagagucaga

SEQ ID NO: 1065231 - RNA, 21 nt, Human
uccuagcaggcauguggaacc

SEQ ID NO: 1065232 - RNA, 23 nt, Human
uccuggccugcuggcugcuggug

SEQ ID NO: 1065233 - RNA, 21 nt, Human
ucuccaaaaaaaauugaugua

SEQ ID NO: 1065234 - RNA, 27 nt, Human
ugaaauagauacauuucuagaaaauca

SEQ ID NO: 1065235 - RNA, 19 nt, Human
ugacagagucagaaccauc

SEQ ID NO: 1065236 - RNA, 24 nt, Human
ugagaaaaggaaacaaucauaaaa

SEQ ID NO: 1065237 - RNA, 23 nt, Human
ugagugaaaaggcaagcaacaga

SEQ ID NO: 1065238 - RNA, 18 nt, Human
ugauagcaaaaaggauac

SEQ ID NO: 1065239 - RNA, 23 nt, Human
ugcugcacuccagccugggugac

SEQ ID NO: 1065240 - RNA, 24 nt, Human
ugcugcacuccagccugggugaca

SEQ ID NO: 1065241 - RNA, 25 nt, Human
ugcugcacuccagccugggugacag

SEQ ID NO: 1065242 - RNA, 21 nt, Human
ugcuggugcagcucuucccca

SEQ ID NO: 1065243 - RNA, 18 nt, Human
ugcuuguuaaaagauggg

SEQ ID NO: 1065244 - RNA, 20 nt, Human
ugcuuguuuaaaaaauuaaa

SEQ ID NO: 1065245 - RNA, 22 nt, Human
uggaaaaggugcaaguauagau

SEQ ID NO: 1065246 - RNA, 24 nt, Human
uggagacagaggccaaagaugcug

SEQ ID NO: 1065247 - RNA, 20 nt, Human
ugggguccuggccugcuggc

SEQ ID NO: 1065248 - RNA, 22 nt, Human
ugguggccguggccuguagucc

SEQ ID NO: 1065249 - RNA, 22 nt, Human
ugucucacgccauuaaucccag

SEQ ID NO: 1065250 - RNA, 24 nt, Human
ugucucacgccauuaaucccagca

SEQ ID NO: 1065251 - RNA, 24 nt, Human
uguuuagaaauuaagcaucacauu

SEQ ID NO: 1065252 - RNA, 18 nt, Human
uuaaagcuugaaaauuaa

SEQ ID NO: 1065253 - RNA, 26 nt, Human
uuaaauacuuugauauaaaaacugca

SEQ ID NO: 1065254 - RNA, 20 nt, Human
uuacugcccucaaggacuca

SEQ ID NO: 1065255 - RNA, 19 nt, Human
uuagccaggcaugguggcc

SEQ ID NO: 1065256 - RNA, 22 nt, Human
uuaggcaaaccucagcuuggag

SEQ ID NO: 1065257 - RNA, 19 nt, Human
uucuaagaagugagagugg

SEQ ID NO: 1065258 - RNA, 24 nt, Human
uugaauuccuaauauaaaauauaa

SEQ ID NO: 1065259 - RNA, 20 nt, Human
uuugaaaaaaaaaaaaaaua

SEQ ID NO: 1065260 - RNA, 19 nt, Human
uuugcaaacauaaauacaa

SEQ ID NO: 1065261 - RNA, 23 nt, Human
uuuguaaucauaaaauaacucac

SEQ ID NO: 1065262 - RNA, 24 nt, Human
uuuguaaucauaaaauaacucacu

SEQ ID NO: 1065263 - RNA, 23 nt, Human
agacuaacaaauccaccuuggca

SEQ ID NO: 1065264 - RNA, 21 nt, Human
agcaggcuguacagcagcagc

SEQ ID NO: 1065265 - RNA, 20 nt, Human
aggguccuccuggcuggugc

SEQ ID NO: 1065266 - RNA, 20 nt, Human
agguaugcucaaagaucuau

SEQ ID NO: 1065267 - RNA, 22 nt, Human
agucgauggaauggaggaggaa

SEQ ID NO: 1065268 - RNA, 22 nt, Human
aguugcuucuucuuauuucuac

SEQ ID NO: 1065269 - RNA, 26 nt, Human
caccaaggagacugcagucaaauaaa

SEQ ID NO: 1065270 - RNA, 18 nt, Human
caccaccugugccucugc

SEQ ID NO: 1065271 - RNA, 18 nt, Human
caccaccugugccucugc

SEQ ID NO: 1065272 - RNA, 18 nt, Human
cacgacaggucaguaugu

SEQ ID NO: 1065273 - RNA, 22 nt, Human
cacugaacugaggguccuccug

SEQ ID NO: 1065274 - RNA, 22 nt, Human
cgaaaaguacugaaaaugcuau

SEQ ID NO: 1065275 - RNA, 26 nt, Human
cgccucuacugucugccaccaccugu

SEQ ID NO: 1065276 - RNA, 19 nt, Human
cuacugucugccaccaccu

SEQ ID NO: 1065277 - RNA, 24 nt, Human
cucacagcuuuggccacgcacucc

SEQ ID NO: 1065278 - RNA, 19 nt, Human
cucccggucacgaacgugg

SEQ ID NO: 1065279 - RNA, 22 nt, Human
cuccugccauccuguccucagc

SEQ ID NO: 1065280 - RNA, 22 nt, Human
cuggugcugggagucgauggaa

SEQ ID NO: 1065281 - RNA, 20 nt, Human
gacuugggcaauguggccag

SEQ ID NO: 1065282 - RNA, 21 nt, Human
gggcaauguggccaggagggc

SEQ ID NO: 1065283 - RNA, 20 nt, Human
ggguggguguguuggcagug

SEQ ID NO: 1065284 - RNA, 20 nt, Human
ggucagaaaaaucaacauuu

SEQ ID NO: 1065285 - RNA, 19 nt, Human
guacagcagcagccauggg

SEQ ID NO: 1065286 - RNA, 22 nt, Human
gugcacacgacaggucaguaug

SEQ ID NO: 1065287 - RNA, 27 nt, Human
uaaauacauaauacagaagccugugug

SEQ ID NO: 1065288 - RNA, 18 nt, Human
uauuagcugaauuuguga

SEQ ID NO: 1065289 - RNA, 20 nt, Human
uauuucaaauauauuuucac

SEQ ID NO: 1065290 - RNA, 19 nt, Human
uauuuuucccauuuuguuu

SEQ ID NO: 1065291 - RNA, 18 nt, Human
uccauuucuguucuucgu

SEQ ID NO: 1065292 - RNA, 18 nt, Human
uccuaggccgaggcuaug

SEQ ID NO: 1065293 - RNA, 21 nt, Human
uccucagcuccugccuuccuc

SEQ ID NO: 1065294 - RNA, 22 nt, Human
uccuccuggcuggugcugggag

SEQ ID NO: 1065295 - RNA, 22 nt, Human
ugaguuauccuuauuuuuccca

SEQ ID NO: 1065296 - RNA, 24 nt, Human
ugaguuauccuuauuuuucccauu

SEQ ID NO: 1065297 - RNA, 21 nt, Human
ugcaaacgggggugggugugu

SEQ ID NO: 1065298 - RNA, 19 nt, Human
ugccaccaccugugccucu

SEQ ID NO: 1065299 - RNA, 23 nt, Human
ugcugggagucgauggaauggag

SEQ ID NO: 1065300 - RNA, 20 nt, Human
uggaauggaggaggaauagu

SEQ ID NO: 1065301 - RNA, 18 nt, Human
uguccuaggccgaggcua

SEQ ID NO: 1065302 - RNA, 23 nt, Human
ugugauaugaugagguaucucca

SEQ ID NO: 1065303 - RNA, 24 nt, Human
uuagcugaauuugugauuuccuuu

SEQ ID NO: 1065304 - RNA, 24 nt, Human
uuauggucagaaaaaucaacauuu

SEQ ID NO: 1065305 - RNA, 22 nt, Human
uuggcagaaggguuaaacucca

SEQ ID NO: 1065306 - RNA, 22 nt, Human
uuuaaacucccaccuccauuuc

SEQ ID NO: 1065307 - RNA, 18 nt, Human
aagcaggcaaccaucaaa

SEQ ID NO: 1065308 - RNA, 23 nt, Human
aagcaucuaggauuauugggaca

SEQ ID NO: 1065309 - RNA, 19 nt, Human
aggaagcugaggugccagg

SEQ ID NO: 1065310 - RNA, 20 nt, Human
aggagguucccuuccaggag

SEQ ID NO: 1065311 - RNA, 22 nt, Human
agggcuucaggaagggauuggg

SEQ ID NO: 1065312 - RNA, 24 nt, Human
agucagcaggaauccugccucucu

SEQ ID NO: 1065313 - RNA, 19 nt, Human
augcagccuggagaagugg

SEQ ID NO: 1065314 - RNA, 21 nt, Human
augcagccuggagaaguggga

SEQ ID NO: 1065315 - RNA, 18 nt, Human
auggcuauuucaacagaa

SEQ ID NO: 1065316 - RNA, 26 nt, Human
caagcugaagugacauuuacuccccg

SEQ ID NO: 1065317 - RNA, 20 nt, Human
cagcacugcagacaugcaga

SEQ ID NO: 1065318 - RNA, 26 nt, Human
caggagguucccuuccaggaggaccc

SEQ ID NO: 1065319 - RNA, 25 nt, Human
caggcaaccaucaaagcacuuugug

SEQ ID NO: 1065320 - RNA, 19 nt, Human
caggggcugccccaaguuc

SEQ ID NO: 1065321 - RNA, 21 nt, Human
ccccccaacucuggguuccug

SEQ ID NO: 1065322 - RNA, 20 nt, Human
cccccccaacucuggguucc

SEQ ID NO: 1065323 - RNA, 19 nt, Human
cccugcccggcaccccucc

SEQ ID NO: 1065324 - RNA, 19 nt, Human
ccugcccggcaccccucca

SEQ ID NO: 1065325 - RNA, 20 nt, Human
cuuccaggaggacccugccc

SEQ ID NO: 1065326 - RNA, 21 nt, Human
gaggugccaggugucccccug

SEQ ID NO: 1065327 - RNA, 21 nt, Human
gauggcuauuucaacagaaga

SEQ ID NO: 1065328 - RNA, 20 nt, Human
gcaaccaucaaagcacuuug

SEQ ID NO: 1065329 - RNA, 21 nt, Human
ggcaccccuccaugcagccuu

SEQ ID NO: 1065330 - RNA, 23 nt, Human
ggcugcaggagguucccuuccag

SEQ ID NO: 1065331 - RNA, 23 nt, Human
ggugcuugaggcugcaggagguu

SEQ ID NO: 1065332 - RNA, 22 nt, Human
ucccccuggagucagcaggaau

SEQ ID NO: 1065333 - RNA, 18 nt, Human
ucccuuccaggaggaccc

SEQ ID NO: 1065334 - RNA, 18 nt, Human
ucuggguuccugguaugg

SEQ ID NO: 1065335 - RNA, 18 nt, Human
ugacucaagcaggcaacc

SEQ ID NO: 1065336 - RNA, 19 nt, Human
ugccccaaguucgccacac

SEQ ID NO: 1065337 - RNA, 19 nt, Human
ugggagugacucaagcagg

SEQ ID NO: 1065338 - RNA, 25 nt, Human
uggguuccugguaugggguaaguuu

SEQ ID NO: 1065339 - RNA, 24 nt, Human
uggucaaagaacaagacuuccagg

SEQ ID NO: 1065340 - RNA, 23 nt, Human
uuacacagcacugcagacaugca

SEQ ID NO: 1065341 - RNA, 18 nt, Human
uucaggaagggauuggga

SEQ ID NO: 1065342 - RNA, 19 nt, Human
aaacagaaguuuuuuucag

SEQ ID NO: 1065343 - RNA, 19 nt, Human
aaacaggagaaagggaucc

SEQ ID NO: 1065344 - RNA, 21 nt, Human
aaacaggagaaagggauccaa

SEQ ID NO: 1065345 - RNA, 21 nt, Human
aauauccuuuuuucuucuucu

SEQ ID NO: 1065346 - RNA, 18 nt, Human
acaggacggccgccucuc

SEQ ID NO: 1065347 - RNA, 18 nt, Human
acgcggccgcggccgcau

SEQ ID NO: 1065348 - RNA, 24 nt, Human
agaaacaggagaaagggauccaac

SEQ ID NO: 1065349 - RNA, 19 nt, Human
aggagaaagggauccaaca

SEQ ID NO: 1065350 - RNA, 23 nt, Human
caacucgcccucccagauccuua

SEQ ID NO: 1065351 - RNA, 18 nt, Human
cauauuggucagcugaag

SEQ ID NO: 1065352 - RNA, 22 nt, Human
ccggcaccuacaugcugggucc

SEQ ID NO: 1065353 - RNA, 18 nt, Human
ccucugcuuaaacacacu

SEQ ID NO: 1065354 - RNA, 18 nt, Human
ccuuuacuguggauccuc

SEQ ID NO: 1065355 - RNA, 21 nt, Human
cgucacgcggccgcggccgca

SEQ ID NO: 1065356 - RNA, 22 nt, Human
cuucaacucgcccucccagauc

SEQ ID NO: 1065357 - RNA, 20 nt, Human
cuucccggcaaucuuucuga

SEQ ID NO: 1065358 - RNA, 21 nt, Human
gaaauucuucaacucgcccuu

SEQ ID NO: 1065359 - RNA, 21 nt, Human
gaagggugggggaugggcucu

SEQ ID NO: 1065360 - RNA, 19 nt, Human
gacacuugcagaaacagga

SEQ ID NO: 1065361 - RNA, 18 nt, Human
gacuuaaaugaacuucca

SEQ ID NO: 1065362 - RNA, 18 nt, Human
gccuauaaaguuggcuca

SEQ ID NO: 1065363 - RNA, 22 nt, Human
gcuuuuugagucuuccuguucu

SEQ ID NO: 1065364 - RNA, 20 nt, Human
ggaugaggugaagugguuuc

SEQ ID NO: 1065365 - RNA, 20 nt, Human
ggcugggaugaggugaagug

SEQ ID NO: 1065366 - RNA, 18 nt, Human
guccuugauagcuuuuuc

SEQ ID NO: 1065367 - RNA, 25 nt, Human
gugaagugguuucugcaguauuugc

SEQ ID NO: 1065368 - RNA, 23 nt, Human
guugacaggacggccgccucucu

SEQ ID NO: 1065369 - RNA, 18 nt, Human
uaagcccucucaagucau

SEQ ID NO: 1065370 - RNA, 18 nt, Human
uacuguggauccucacgg

SEQ ID NO: 1065371 - RNA, 21 nt, Human
uagaauaauuuauaaaaggca

SEQ ID NO: 1065372 - RNA, 18 nt, Human
ucaaagauggucuguuuu

SEQ ID NO: 1065373 - RNA, 18 nt, Human
ucacgcggccgcggccgc

SEQ ID NO: 1065374 - RNA, 20 nt, Human
ucauggcagucgcccggcac

SEQ ID NO: 1065375 - RNA, 20 nt, Human
ucauuuuugacuuggauucc

SEQ ID NO: 1065376 - RNA, 21 nt, Human
uccggggccggauccggcucc

SEQ ID NO: 1065377 - RNA, 19 nt, Human
uccuguucuuguuuuuugu

SEQ ID NO: 1065378 - RNA, 21 nt, Human
uccuuaauguccuuuugcagu

SEQ ID NO: 1065379 - RNA, 21 nt, Human
uccuuuuuauuugaaauaaga

SEQ ID NO: 1065380 - RNA, 23 nt, Human
ucucuacuuccgcuggcuacgga

SEQ ID NO: 1065381 - RNA, 19 nt, Human
ucuuguuaagcccucucaa

SEQ ID NO: 1065382 - RNA, 22 nt, Human
ugaaaaugcgucacgcggccgc

SEQ ID NO: 1065383 - RNA, 19 nt, Human
ugacagaagguaagucaag

SEQ ID NO: 1065384 - RNA, 20 nt, Human
ugcaagcaacauucacaaua

SEQ ID NO: 1065385 - RNA, 25 nt, Human
ugcaccacuaccaacucuuuugccc

SEQ ID NO: 1065386 - RNA, 23 nt, Human
uggcugggaugaggugaaguggu

SEQ ID NO: 1065387 - RNA, 18 nt, Human
ugggaugaggugaagugg

SEQ ID NO: 1065388 - RNA, 22 nt, Human
uggguccggagaaagggucgcg

SEQ ID NO: 1065389 - RNA, 20 nt, Human
uggugacuuaaaugaacuuc

SEQ ID NO: 1065390 - RNA, 22 nt, Human
uguaaaauaagaccagucacaa

SEQ ID NO: 1065391 - RNA, 19 nt, Human
uuucaguuuccugggucuc

SEQ ID NO: 1065392 - RNA, 19 nt, Human
uuuccugggucucuuuaua

SEQ ID NO: 1065393 - RNA, 21 nt, Human
uuugcagauucuggacuuggu

SEQ ID NO: 1065394 - RNA, 21 nt, Human
uuuggauucuuaguuuaaccu

SEQ ID NO: 1065395 - RNA, 19 nt, Human
uuuggauuuuucuggccug

SEQ ID NO: 1065396 - RNA, 20 nt, Human
uuuguucaauguaguaucua

SEQ ID NO: 1065397 - RNA, 22 nt, Human
uuuuucagauauggugacagaa

SEQ ID NO: 1065398 - RNA, 22 nt, Human
uuuuucuucuucucuuucaacu

SEQ ID NO: 1065399 - RNA, 23 nt, Human
agcaggggccggaaccaccuucu

SEQ ID NO: 1065400 - RNA, 19 nt, Human
cagcaggggccggaaccac

SEQ ID NO: 1065401 - RNA, 18 nt, Human
gggccggaaccaccuucu

SEQ ID NO: 1065402 - RNA, 18 nt, Human
uguacagaaaacucaaca

SEQ ID NO: 1065403 - RNA, 24 nt, Human
aaaaaaaaaagaaauacaaaaauu

SEQ ID NO: 1065404 - RNA, 23 nt, Human
aaaagaaaaagaaaaaaaaagaa

SEQ ID NO: 1065405 - RNA, 18 nt, Human
aaaauuagcugggcgugg

SEQ ID NO: 1065406 - RNA, 22 nt, Human
aaagaaaaaaaaagaaaaaaaa

SEQ ID NO: 1065407 - RNA, 22 nt, Human
aaaucacccagaaccacagcac

SEQ ID NO: 1065408 - RNA, 19 nt, Human
aacauggugaaacuccauc

SEQ ID NO: 1065409 - RNA, 20 nt, Human
aacauggugaaacuccaucu

SEQ ID NO: 1065410 - RNA, 21 nt, Human
aacauggugaaacuccaucuc

SEQ ID NO: 1065411 - RNA, 19 nt, Human
aagaaaaagaaaaaaaaag

SEQ ID NO: 1065412 - RNA, 27 nt, Human
aaucacccagaaccacagcacauuuga

SEQ ID NO: 1065413 - RNA, 23 nt, Human
aaucauaaagcucugggauggga

SEQ ID NO: 1065414 - RNA, 24 nt, Human
aaucgcuuggaccugggaggugga

SEQ ID NO: 1065415 - RNA, 28 nt, Human
acaaaaaaaaaaaaaagaaauacaaaaa

SEQ ID NO: 1065416 - RNA, 25 nt, Human
acaaaaugaauaauccacagcucau

SEQ ID NO: 1065417 - RNA, 18 nt, Human
acaccccgucuaaggcau

SEQ ID NO: 1065418 - RNA, 23 nt, Human
acagggcaagacucugucucaaa

SEQ ID NO: 1065419 - RNA, 24 nt, Human
acagggcaagacucugucucaaaa

SEQ ID NO: 1065420 - RNA, 24 nt, Human
acccagaaccacagcacauuugau

SEQ ID NO: 1065421 - RNA, 22 nt, Human
accccggaaggugcccccgaga

SEQ ID NO: 1065422 - RNA, 23 nt, Human
acuccacuccagccaggcgacag

SEQ ID NO: 1065423 - RNA, 24 nt, Human
agaaaaagaaaaaaaaagaaaaaa

SEQ ID NO: 1065424 - RNA, 19 nt, Human
agagcuggacuaagaccuu

SEQ ID NO: 1065425 - RNA, 19 nt, Human
agaggaaaggcggccagag

SEQ ID NO: 1065426 - RNA, 23 nt, Human
agcugggcgugguggugugugcc

SEQ ID NO: 1065427 - RNA, 22 nt, Human
aggcaagagaaucgcuuggacc

SEQ ID NO: 1065428 - RNA, 24 nt, Human
aggcaagagaaucgcuuggaccug

SEQ ID NO: 1065429 - RNA, 23 nt, Human
aggccaaagccuaggucagggaa

SEQ ID NO: 1065430 - RNA, 24 nt, Human
aggcugaggcaagagaaucgcuug

SEQ ID NO: 1065431 - RNA, 24 nt, Human
agguggagguugcagugagccaag

SEQ ID NO: 1065432 - RNA, 21 nt, Human
auccuggccaacauggugaaa

SEQ ID NO: 1065433 - RNA, 20 nt, Human
auuugaugucaguuuccccu

SEQ ID NO: 1065434 - RNA, 23 nt, Human
caaaaugaauaauccacagcuca

SEQ ID NO: 1065435 - RNA, 24 nt, Human
caacauggugaaacuccaucucua

SEQ ID NO: 1065436 - RNA, 18 nt, Human
cacccagaaccacagcac

SEQ ID NO: 1065437 - RNA, 21 nt, Human
cagaucacagagcuggacuaa

SEQ ID NO: 1065438 - RNA, 20 nt, Human
caucccagggaacagaagau

SEQ ID NO: 1065439 - RNA, 19 nt, Human
ccacuccacuccagccagg

SEQ ID NO: 1065440 - RNA, 20 nt, Human
ccacuccacuccagccaggc

SEQ ID NO: 1065441 - RNA, 23 nt, Human
ccacuccacuccagccaggcgac

SEQ ID NO: 1065442 - RNA, 27 nt, Human
ccaucucuacaaaaaaaaaaaaaagaa

SEQ ID NO: 1065443 - RNA, 21 nt, Human
cccagggaacagaagaugcgg

SEQ ID NO: 1065444 - RNA, 23 nt, Human
ccccggaaggugcccccgagagc

SEQ ID NO: 1065445 - RNA, 26 nt, Human
ccccggaaggugcccccgagagcaga

SEQ ID NO: 1065446 - RNA, 19 nt, Human
cccggaaggugcccccgag

SEQ ID NO: 1065447 - RNA, 20 nt, Human
ccucgaggggcagcgagggg

SEQ ID NO: 1065448 - RNA, 20 nt, Human
ccuggccaacauggugaaac

SEQ ID NO: 1065449 - RNA, 23 nt, Human
ccuggccaacauggugaaacucc

SEQ ID NO: 1065450 - RNA, 24 nt, Human
ccuggccaacauggugaaacucca

SEQ ID NO: 1065451 - RNA, 21 nt, Human
ccugggagguggagguugcag

SEQ ID NO: 1065452 - RNA, 21 nt, Human
ccuguagucccagcuacuugg

SEQ ID NO: 1065453 - RNA, 22 nt, Human
ccuguagucccagcuacuuggg

SEQ ID NO: 1065454 - RNA, 23 nt, Human
ccuuacaugcugucccugccgcc

SEQ ID NO: 1065455 - RNA, 19 nt, Human
ccuucagaucacagagcug

SEQ ID NO: 1065456 - RNA, 24 nt, Human
cgagaccauccuggccaacauggu

SEQ ID NO: 1065457 - RNA, 21 nt, Human
cgcuuggaccugggaggugga

SEQ ID NO: 1065458 - RNA, 19 nt, Human
cuaaaauacugcacacccc

SEQ ID NO: 1065459 - RNA, 21 nt, Human
cuauaaauacuuccaccagca

SEQ ID NO: 1065460 - RNA, 18 nt, Human
cucacgauguaccuaaaa

SEQ ID NO: 1065461 - RNA, 20 nt, Human
cucauuuaaauuccuccuuu

SEQ ID NO: 1065462 - RNA, 21 nt, Human
cucugggaugggaagggaccc

SEQ ID NO: 1065463 - RNA, 19 nt, Human
cucugucucaaaaaaaaaa

SEQ ID NO: 1065464 - RNA, 23 nt, Human
cuggccaacauggugaaacucca

SEQ ID NO: 1065465 - RNA, 21 nt, Human
cugucccugccgcccccuggg

SEQ ID NO: 1065466 - RNA, 23 nt, Human
gagaaucgcuuggaccugggagg

SEQ ID NO: 1065467 - RNA, 23 nt, Human
gaggggccccgcggcuuaggaac

SEQ ID NO: 1065468 - RNA, 18 nt, Human
gagguugcagugagccaa

SEQ ID NO: 1065469 - RNA, 23 nt, Human
gagguugcagugagccaagauug

SEQ ID NO: 1065470 - RNA, 22 nt, Human
gcacauggauggagugcucuug

SEQ ID NO: 1065471 - RNA, 24 nt, Human
gccaacauggugaaacuccaucuc

SEQ ID NO: 1065472 - RNA, 19 nt, Human
gcucuuguucuauuuuuga

SEQ ID NO: 1065473 - RNA, 22 nt, Human
ggagguugcagugagccaagau

SEQ ID NO: 1065474 - RNA, 24 nt, Human
ggagguugcagugagccaagauug

SEQ ID NO: 1065475 - RNA, 18 nt, Human
gggaaugcaggcuccuug

SEQ ID NO: 1065476 - RNA, 24 nt, Human
gggcacgguggcucacaagguuaa

SEQ ID NO: 1065477 - RNA, 19 nt, Human
gguugggcacgguggcuca

SEQ ID NO: 1065478 - RNA, 18 nt, Human
guggugugugccuguagu

SEQ ID NO: 1065479 - RNA, 25 nt, Human
uaaaucacccagaaccacagcacau

SEQ ID NO: 1065480 - RNA, 21 nt, Human
uaauggguuucucccuugauu

SEQ ID NO: 1065481 - RNA, 22 nt, Human
uacagaaucauaaagcucuggg

SEQ ID NO: 1065482 - RNA, 24 nt, Human
uaggguugggcacgguggcucaca

SEQ ID NO: 1065483 - RNA, 25 nt, Human
ucaaaaaaaaaaagaaaaagaaaaa

SEQ ID NO: 1065484 - RNA, 24 nt, Human
ucacaagguuaagagaucgagacc

SEQ ID NO: 1065485 - RNA, 22 nt, Human
ucacgauguaccuaaaauacug

SEQ ID NO: 1065486 - RNA, 23 nt, Human
ucagccuuauuauuuuguuagaa

SEQ ID NO: 1065487 - RNA, 21 nt, Human
ucagugagaaggcuucucauu

SEQ ID NO: 1065488 - RNA, 23 nt, Human
uccgcacauggauggagugcucu

SEQ ID NO: 1065489 - RNA, 24 nt, Human
ucgcuuggaccugggagguggagg

SEQ ID NO: 1065490 - RNA, 23 nt, Human
ucuacaaaaaaaaaaaaaagaaa

SEQ ID NO: 1065491 - RNA, 26 nt, Human
ucucaaaaaaaaaaagaaaaagaaaa

SEQ ID NO: 1065492 - RNA, 21 nt, Human
ucucuacaaaaaaaaaaaaaa

SEQ ID NO: 1065493 - RNA, 19 nt, Human
ucugucucaaaaaaaaaaa

SEQ ID NO: 1065494 - RNA, 24 nt, Human
ucugucucaaaaaaaaaaagaaaa

SEQ ID NO: 1065495 - RNA, 21 nt, Human
ucuuaugggacaaaaugaaua

SEQ ID NO: 1065496 - RNA, 23 nt, Human
ugaauaauccacagcucauuuaa

SEQ ID NO: 1065497 - RNA, 21 nt, Human
ugagaaggcuucucauugaag

SEQ ID NO: 1065498 - RNA, 19 nt, Human
ugagccaagauugugccac

SEQ ID NO: 1065499 - RNA, 20 nt, Human
ugaggcaagagaaucgcuug

SEQ ID NO: 1065500 - RNA, 24 nt, Human
ugaggcaagagaaucgcuuggacc

SEQ ID NO: 1065501 - RNA, 25 nt, Human
ugaggcaagagaaucgcuuggaccu

SEQ ID NO: 1065502 - RNA, 19 nt, Human
ugccaaguacucaugcacu

SEQ ID NO: 1065503 - RNA, 23 nt, Human
ugccuguagucccagcuacuugg

SEQ ID NO: 1065504 - RNA, 24 nt, Human
ugccuguagucccagcuacuuggg

SEQ ID NO: 1065505 - RNA, 24 nt, Human
uggaccugggagguggagguugca

SEQ ID NO: 1065506 - RNA, 18 nt, Human
uggacuaagaccuuacau

SEQ ID NO: 1065507 - RNA, 24 nt, Human
uggccaacauggugaaacuccauc

SEQ ID NO: 1065508 - RNA, 20 nt, Human
ugggaggcugaggcaagaga

SEQ ID NO: 1065509 - RNA, 23 nt, Human
ugggaggcugaggcaagagaauc

SEQ ID NO: 1065510 - RNA, 18 nt, Human
ugggagguggagguugca

SEQ ID NO: 1065511 - RNA, 29 nt, Human
ugggagguggagguugcagugacaacggu

SEQ ID NO: 1065512 - RNA, 24 nt, Human
ugggagguggagguugcagugagc

SEQ ID NO: 1065513 - RNA, 18 nt, Human
ugggaugggaagggacca

SEQ ID NO: 1065514 - RNA, 19 nt, Human
ugggaugggaagggaccag

SEQ ID NO: 1065515 - RNA, 24 nt, Human
ugguggugugugccuguaguccca

SEQ ID NO: 1065516 - RNA, 18 nt, Human
uggugugugccuguaguc

SEQ ID NO: 1065517 - RNA, 24 nt, Human
uggugugugccuguagucccagcu

SEQ ID NO: 1065518 - RNA, 19 nt, Human
uguaggucucagugaccuu

SEQ ID NO: 1065519 - RNA, 23 nt, Human
uuacaugcugucccugccgcccc

SEQ ID NO: 1065520 - RNA, 22 nt, Human
uuagcugggcgugguggugugu

SEQ ID NO: 1065521 - RNA, 24 nt, Human
uuagcugggcgugguggugugugc

SEQ ID NO: 1065522 - RNA, 23 nt, Human
uuccguccagggcagcucuuuca

SEQ ID NO: 1065523 - RNA, 22 nt, Human
uugcagugagccaagauugugc

SEQ ID NO: 1065524 - RNA, 24 nt, Human
uuggaccugggagguggagguugc

SEQ ID NO: 1065525 - RNA, 24 nt, Human
uugggaggcugaggcaagagaauc

SEQ ID NO: 1065526 - RNA, 18 nt, Human
uuguucuauuuuugaggu

SEQ ID NO: 1065527 - RNA, 19 nt, Human
uuucucccuugauuauuac

SEQ ID NO: 1065528 - RNA, 20 nt, Human
uuucucccuugauuauuaca

SEQ ID NO: 1065529 - RNA, 20 nt, Human
uuuuguucaguucauuuuug

SEQ ID NO: 1065530 - RNA, 23 nt, Human
aacagagcagccuacuucaucuc

SEQ ID NO: 1065531 - RNA, 26 nt, Human
aagcaacagaaacucauucuuaaaga

SEQ ID NO: 1065532 - RNA, 20 nt, Human
aaguaggcuucccauccugg

SEQ ID NO: 1065533 - RNA, 19 nt, Human
aagugccccucccugagcu

SEQ ID NO: 1065534 - RNA, 19 nt, Human
aauacagagucacagggga

SEQ ID NO: 1065535 - RNA, 19 nt, Human
aaucaguggcagucugaug

SEQ ID NO: 1065536 - RNA, 18 nt, Human
aaugcauguggcccaggc

SEQ ID NO: 1065537 - RNA, 20 nt, Human
aauuccugcgcucacauccc

SEQ ID NO: 1065538 - RNA, 18 nt, Human
acacacuagggcauaaga

SEQ ID NO: 1065539 - RNA, 18 nt, Human
agaaaaggaaugcaugug

SEQ ID NO: 1065540 - RNA, 21 nt, Human
agaagaagggaggccuggagc

SEQ ID NO: 1065541 - RNA, 23 nt, Human
agaagaagggaggccuggagcug

SEQ ID NO: 1065542 - RNA, 23 nt, Human
agaggcuauguuuacucaacagg

SEQ ID NO: 1065543 - RNA, 18 nt, Human
agcagggcaaggaagaaa

SEQ ID NO: 1065544 - RNA, 20 nt, Human
agccaauuaggaacccucuc

SEQ ID NO: 1065545 - RNA, 21 nt, Human
agccagacauggcuagcugcc

SEQ ID NO: 1065546 - RNA, 23 nt, Human
agcugccuccagcucuagguuca

SEQ ID NO: 1065547 - RNA, 20 nt, Human
aggaacccucucuggacugg

SEQ ID NO: 1065548 - RNA, 29 nt, Human
aggagguggggguagagugggugaggggg

SEQ ID NO: 1065549 - RNA, 22 nt, Human
aggcagcaggucccucaaagcc

SEQ ID NO: 1065550 - RNA, 20 nt, Human
aggcagggcugccugaaggu

SEQ ID NO: 1065551 - RNA, 19 nt, Human
aguaggcuucccauccugg

SEQ ID NO: 1065552 - RNA, 19 nt, Human
aguuugauggcugcaagca

SEQ ID NO: 1065553 - RNA, 26 nt, Human
augcugagcaggguggagaagaaggg

SEQ ID NO: 1065554 - RNA, 28 nt, Human
caagaaaaagcugagcaagcaggucuug

SEQ ID NO: 1065555 - RNA, 22 nt, Human
caccccacacacucucuuaagu

SEQ ID NO: 1065556 - RNA, 19 nt, Human
caccccuuacuucccaaag

SEQ ID NO: 1065557 - RNA, 19 nt, Human
caccuugccccucgccuca

SEQ ID NO: 1065558 - RNA, 21 nt, Human
cagagucacaggggaggcagc

SEQ ID NO: 1065559 - RNA, 22 nt, Human
cagcaggucccucaaagccaag

SEQ ID NO: 1065560 - RNA, 20 nt, Human
cagcagugcuggaaaucagu

SEQ ID NO: 1065561 - RNA, 23 nt, Human
cagccauggaacagcagugcugg

SEQ ID NO: 1065562 - RNA, 25 nt, Human
caggaagcaauaaacagcagugaua

SEQ ID NO: 1065563 - RNA, 18 nt, Human
caggcuuuggagucaggg

SEQ ID NO: 1065564 - RNA, 19 nt, Human
cauccugggucgagcuucc

SEQ ID NO: 1065565 - RNA, 23 nt, Human
ccccauucagaauuuaccccccu

SEQ ID NO: 1065566 - RNA, 19 nt, Human
ccccucccugagcuggaaa

SEQ ID NO: 1065567 - RNA, 22 nt, Human
ccccuguauggcuucucagcuc

SEQ ID NO: 1065568 - RNA, 19 nt, Human
cccucaaagccaaggcucu

SEQ ID NO: 1065569 - RNA, 24 nt, Human
ccuggccgggcgcgguggaaagua

SEQ ID NO: 1065570 - RNA, 19 nt, Human
ccuguggaacccacucagg

SEQ ID NO: 1065571 - RNA, 25 nt, Human
cgccucaugagguauguuguaaccc

SEQ ID NO: 1065572 - RNA, 19 nt, Human
cggccggggcccagcuggu

SEQ ID NO: 1065573 - RNA, 22 nt, Human
cuaguacuuauuauuguuagaa

SEQ ID NO: 1065574 - RNA, 20 nt, Human
cugaaugccugaaaauacaa

SEQ ID NO: 1065575 - RNA, 20 nt, Human
cugggcggccggggcccagc

SEQ ID NO: 1065576 - RNA, 19 nt, Human
cuucccaucccaggucgag

SEQ ID NO: 1065577 - RNA, 20 nt, Human
cuugcccacuaucagacccu

SEQ ID NO: 1065578 - RNA, 23 nt, Human
gaaaagcagagaggucuugaaga

SEQ ID NO: 1065579 - RNA, 19 nt, Human
gaaagucacacagccaugg

SEQ ID NO: 1065580 - RNA, 23 nt, Human
gagaagaagggaggccuggagcu

SEQ ID NO: 1065581 - RNA, 23 nt, Human
gagcuucuccagcuccuucccag

SEQ ID NO: 1065582 - RNA, 25 nt, Human
gaggggaaaugagacggucgaaagu

SEQ ID NO: 1065583 - RNA, 19 nt, Human
gcagaauccagggcucaaa

SEQ ID NO: 1065584 - RNA, 20 nt, Human
gcagaauccagggcucaaag

SEQ ID NO: 1065585 - RNA, 27 nt, Human
gcagugcuggaaaucaguucuguucac

SEQ ID NO: 1065586 - RNA, 18 nt, Human
gccucugucuugggagga

SEQ ID NO: 1065587 - RNA, 20 nt, Human
gcuucaguucagaagccccu

SEQ ID NO: 1065588 - RNA, 21 nt, Human
gcuucaguucagaagccccug

SEQ ID NO: 1065589 - RNA, 20 nt, Human
ggcuuuguggccagcaggcc

SEQ ID NO: 1065590 - RNA, 19 nt, Human
gggaagaagccagguuccu

SEQ ID NO: 1065591 - RNA, 18 nt, Human
gggguagagugggugagg

SEQ ID NO: 1065592 - RNA, 19 nt, Human
gucacaggggaggcagcag

SEQ ID NO: 1065593 - RNA, 18 nt, Human
guggacuuugcugggugu

SEQ ID NO: 1065594 - RNA, 18 nt, Human
uaaaacaaaaucaguggc

SEQ ID NO: 1065595 - RNA, 19 nt, Human
uaaaacagggcuacugaac

SEQ ID NO: 1065596 - RNA, 22 nt, Human
uaagagcacaggcuuuggaguc

SEQ ID NO: 1065597 - RNA, 18 nt, Human
uaaugaggaggugggggu

SEQ ID NO: 1065598 - RNA, 21 nt, Human
uacuagaaagaucuuucuggg

SEQ ID NO: 1065599 - RNA, 18 nt, Human
uagaaagaucuuucuggg

SEQ ID NO: 1065600 - RNA, 22 nt, Human
uagagugggugaggggaagcca

SEQ ID NO: 1065601 - RNA, 22 nt, Human
uaggagcucacagacaugguca

SEQ ID NO: 1065602 - RNA, 20 nt, Human
uaggaucaccccacacacuc

SEQ ID NO: 1065603 - RNA, 18 nt, Human
uauaguuucuguuugcaa

SEQ ID NO: 1065604 - RNA, 20 nt, Human
ucaaagaggcuacacaccuu

SEQ ID NO: 1065605 - RNA, 20 nt, Human
ucacaggggaggcagcaggu

SEQ ID NO: 1065606 - RNA, 22 nt, Human
ucacaggggaggcagcaggucc

SEQ ID NO: 1065607 - RNA, 24 nt, Human
uccaguauauaaaugcagaaucca

SEQ ID NO: 1065608 - RNA, 20 nt, Human
uccaucuccugcaaaaacca

SEQ ID NO: 1065609 - RNA, 19 nt, Human
ucccaaacagagcagccua

SEQ ID NO: 1065610 - RNA, 18 nt, Human
ucccugagcuggaaaggu

SEQ ID NO: 1065611 - RNA, 20 nt, Human
ucccuggagaccuggcucag

SEQ ID NO: 1065612 - RNA, 19 nt, Human
uccuggguggacuuugcug

SEQ ID NO: 1065613 - RNA, 20 nt, Human
uccuguggaacccacucagg

SEQ ID NO: 1065614 - RNA, 21 nt, Human
ucucaaguucaaaugcgucuc

SEQ ID NO: 1065615 - RNA, 19 nt, Human
ucucaggagaggcugaggu

SEQ ID NO: 1065616 - RNA, 23 nt, Human
ucuccagcuccuucccaggggcc

SEQ ID NO: 1065617 - RNA, 20 nt, Human
ucucugggcggccggggccc

SEQ ID NO: 1065618 - RNA, 23 nt, Human
ucucugggcggccggggcccagc

SEQ ID NO: 1065619 - RNA, 24 nt, Human
ucugaggaucuucugugcuuacca

SEQ ID NO: 1065620 - RNA, 20 nt, Human
ucugcugagaacuucucgga

SEQ ID NO: 1065621 - RNA, 18 nt, Human
ucugucuugggaggagcc

SEQ ID NO: 1065622 - RNA, 19 nt, Human
ugaaaagcagagaggucuu

SEQ ID NO: 1065623 - RNA, 23 nt, Human
ugaaauggauaaaacacugcuca

SEQ ID NO: 1065624 - RNA, 20 nt, Human
ugacaaaauaggaaguucaa

SEQ ID NO: 1065625 - RNA, 19 nt, Human
ugacucuaucccuuaauaa

SEQ ID NO: 1065626 - RNA, 18 nt, Human
ugagaaacagaggggaaa

SEQ ID NO: 1065627 - RNA, 21 nt, Human
ugagcaggguggagaagaagg

SEQ ID NO: 1065628 - RNA, 20 nt, Human
ugagcuggaaagguucccua

SEQ ID NO: 1065629 - RNA, 22 nt, Human
ugaggaucuucugugcuuacca

SEQ ID NO: 1065630 - RNA, 20 nt, Human
ugauggagagaggaguccac

SEQ ID NO: 1065631 - RNA, 21 nt, Human
ugauggcugcaagcaacagaa

SEQ ID NO: 1065632 - RNA, 21 nt, Human
ugcagaauccagggcucaaag

SEQ ID NO: 1065633 - RNA, 20 nt, Human
ugcaugaucucugggcggcc

SEQ ID NO: 1065634 - RNA, 24 nt, Human
ugcugcaagguggacuaaucugac

SEQ ID NO: 1065635 - RNA, 24 nt, Human
ugcuugaaaagcagagaggucuug

SEQ ID NO: 1065636 - RNA, 23 nt, Human
uggaaagguucccuacaguucuc

SEQ ID NO: 1065637 - RNA, 18 nt, Human
uggaacagcagugcugga

SEQ ID NO: 1065638 - RNA, 22 nt, Human
uggacuggcgggaagaagccag

SEQ ID NO: 1065639 - RNA, 21 nt, Human
uggagaccuggcucaguauca

SEQ ID NO: 1065640 - RNA, 21 nt, Human
uggagguaguaggagcucaca

SEQ ID NO: 1065641 - RNA, 24 nt, Human
uggcaaguuuuguuuuuauuuuua

SEQ ID NO: 1065642 - RNA, 18 nt, Human
uggcccaggcucugaagg

SEQ ID NO: 1065643 - RNA, 24 nt, Human
uggccgggcgcgguggaaaguaaa

SEQ ID NO: 1065644 - RNA, 25 nt, Human
uggcuucucagcucuuccaucuccu

SEQ ID NO: 1065645 - RNA, 24 nt, Human
uguggcccaggcucugaaggagca

SEQ ID NO: 1065646 - RNA, 21 nt, Human
uguggucuugaucaaguuucu

SEQ ID NO: 1065647 - RNA, 24 nt, Human
uguggucuugaucaaguuucuuaa

SEQ ID NO: 1065648 - RNA, 21 nt, Human
uguguuuccuguggaacccac

SEQ ID NO: 1065649 - RNA, 25 nt, Human
uguucuguaaugaggaggugggggu

SEQ ID NO: 1065650 - RNA, 24 nt, Human
uuaauggaaagccaauuaggaacc

SEQ ID NO: 1065651 - RNA, 22 nt, Human
uucagucucaggugcugcaagg

SEQ ID NO: 1065652 - RNA, 20 nt, Human
uuccacagggguucagcgug

SEQ ID NO: 1065653 - RNA, 25 nt, Human
uuccuggguggacuuugcugggugu

SEQ ID NO: 1065654 - RNA, 21 nt, Human
uugaaggucacuuguucagca

SEQ ID NO: 1065655 - RNA, 19 nt, Human
uugauggcugcaagcaaca

SEQ ID NO: 1065656 - RNA, 21 nt, Human
uuggacaaggagaacauggca

SEQ ID NO: 1065657 - RNA, 19 nt, Human
uuucugggcaggggaagaa

SEQ ID NO: 1065658 - RNA, 21 nt, Human
uuuucaauacuuucugguuuc

SEQ ID NO: 1065659 - RNA, 22 nt, Human
aaagauggagucucgcucuguu

SEQ ID NO: 1065660 - RNA, 24 nt, Human
aaaggcaaguacuuucuguaacuu

SEQ ID NO: 1065661 - RNA, 21 nt, Human
aaaucuaacaaacauauucuc

SEQ ID NO: 1065662 - RNA, 22 nt, Human
aagauucccccaacuugcguau

SEQ ID NO: 1065663 - RNA, 20 nt, Human
aagcugguuuuuuuuuuuuu

SEQ ID NO: 1065664 - RNA, 19 nt, Human
aaguagcugggauuacagg

SEQ ID NO: 1065665 - RNA, 27 nt, Human
aaguagcugggauuacaggcacgagcc

SEQ ID NO: 1065666 - RNA, 24 nt, Human
aagugcugauacacugggggugca

SEQ ID NO: 1065667 - RNA, 20 nt, Human
acagcauucaguggauggaa

SEQ ID NO: 1065668 - RNA, 25 nt, Human
acccgccucggccucccaaagugcu

SEQ ID NO: 1065669 - RNA, 18 nt, Human
acgggguuucaccauguu

SEQ ID NO: 1065670 - RNA, 23 nt, Human
acgggguuucaccauguuggcca

SEQ ID NO: 1065671 - RNA, 24 nt, Human
acgggguuucaccauguuggccag

SEQ ID NO: 1065672 - RNA, 21 nt, Human
acugcacugcagaggaaagua

SEQ ID NO: 1065673 - RNA, 18 nt, Human
agagguuaggaguguuuu

SEQ ID NO: 1065674 - RNA, 23 nt, Human
agccugggcaacauaacaagacc

SEQ ID NO: 1065675 - RNA, 24 nt, Human
agccugggcaacauaacaagaccu

SEQ ID NO: 1065676 - RNA, 22 nt, Human
agcugggauuacaggcacgagc

SEQ ID NO: 1065677 - RNA, 20 nt, Human
aggaguuugagaccagccug

SEQ ID NO: 1065678 - RNA, 20 nt, Human
agguggggucaacuggguuu

SEQ ID NO: 1065679 - RNA, 20 nt, Human
agugcaauggcgcgaucucg

SEQ ID NO: 1065680 - RNA, 24 nt, Human
agugcaauggcgcgaucucggcuc

SEQ ID NO: 1065681 - RNA, 24 nt, Human
agugcuugcacaccuucugaugau

SEQ ID NO: 1065682 - RNA, 19 nt, Human
auagaacaacaaaaacgug

SEQ ID NO: 1065683 - RNA, 21 nt, Human
auagagccuuucuugugaccu

SEQ ID NO: 1065684 - RNA, 18 nt, Human
augcucaugacuuuaaga

SEQ ID NO: 1065685 - RNA, 18 nt, Human
auucuccugccucagccu

SEQ ID NO: 1065686 - RNA, 21 nt, Human
auucuccugccucagccuccc

SEQ ID NO: 1065687 - RNA, 24 nt, Human
caacacauuccugaaauccuggca

SEQ ID NO: 1065688 - RNA, 21 nt, Human
caaccucugacucccugguuc

SEQ ID NO: 1065689 - RNA, 22 nt, Human
caagcuauucuccugccucagc

SEQ ID NO: 1065690 - RNA, 20 nt, Human
caauggcuuuguucucaacu

SEQ ID NO: 1065691 - RNA, 22 nt, Human
cacaccuucugaugauguucaa

SEQ ID NO: 1065692 - RNA, 24 nt, Human
caccaugcccagcuaauuuuugua

SEQ ID NO: 1065693 - RNA, 18 nt, Human
caccauguuggccaggau

SEQ ID NO: 1065694 - RNA, 22 nt, Human
caccauguuggccaggaugguc

SEQ ID NO: 1065695 - RNA, 24 nt, Human
caccauguuggccaggauggucuc

SEQ ID NO: 1065696 - RNA, 23 nt, Human
cacccgccucggccucccaaagu

SEQ ID NO: 1065697 - RNA, 18 nt, Human
cacuguaugacuggagac

SEQ ID NO: 1065698 - RNA, 28 nt, Human
cagcaauaugcucaugacuuuaagaaaa

SEQ ID NO: 1065699 - RNA, 24 nt, Human
cagucuaacucaaagauuccccca

SEQ ID NO: 1065700 - RNA, 24 nt, Human
caguguagacgggguuucaccaug

SEQ ID NO: 1065701 - RNA, 19 nt, Human
ccaaaggaaaaggagggga

SEQ ID NO: 1065702 - RNA, 23 nt, Human
ccaaguagcugggauuacaggca

SEQ ID NO: 1065703 - RNA, 23 nt, Human
cccaaguagcugggauuacaggc

SEQ ID NO: 1065704 - RNA, 24 nt, Human
cccaaguagcugggauuacaggca

SEQ ID NO: 1065705 - RNA, 23 nt, Human
ccugccucagccucccaaguagc

SEQ ID NO: 1065706 - RNA, 24 nt, Human
cgggguuucaccauguuggccagg

SEQ ID NO: 1065707 - RNA, 20 nt, Human
cuaaugucacaucuuccucc

SEQ ID NO: 1065708 - RNA, 22 nt, Human
cucaaagauucccccaacuugc

SEQ ID NO: 1065709 - RNA, 25 nt, Human
cucacugcaaccucugacucccugg

SEQ ID NO: 1065710 - RNA, 21 nt, Human
cucagauuaaccucaaaaggc

SEQ ID NO: 1065711 - RNA, 24 nt, Human
cucagccucccaaguagcugggau

SEQ ID NO: 1065712 - RNA, 23 nt, Human
cucgcucuguugccaagcuggag

SEQ ID NO: 1065713 - RNA, 24 nt, Human
cucuggaccucgugauccacccgc

SEQ ID NO: 1065714 - RNA, 24 nt, Human
cugcaaccucugacucccugguuc

SEQ ID NO: 1065715 - RNA, 23 nt, Human
cugccucagccucccaaguagcu

SEQ ID NO: 1065716 - RNA, 20 nt, Human
cuggaccucgugauccaccc

SEQ ID NO: 1065717 - RNA, 20 nt, Human
cuugcacaccuucugaugau

SEQ ID NO: 1065718 - RNA, 22 nt, Human
gaccucgugauccacccgccuc

SEQ ID NO: 1065719 - RNA, 22 nt, Human
gaccucgugauccacccgccuc

SEQ ID NO: 1065720 - RNA, 24 nt, Human
gaccucgugauccacccgccucgg

SEQ ID NO: 1065721 - RNA, 18 nt, Human
gauuacaggcacgagcca

SEQ ID NO: 1065722 - RNA, 24 nt, Human
gauuacaggcacgagccaccaugc

SEQ ID NO: 1065723 - RNA, 22 nt, Human
gcaaccucugacucccugguuc

SEQ ID NO: 1065724 - RNA, 24 nt, Human
gcaagcugguuuuuuuuuuuuuuu

SEQ ID NO: 1065725 - RNA, 22 nt, Human
gcccagcuaauuuuuguauuuu

SEQ ID NO: 1065726 - RNA, 22 nt, Human
gcccaggaguuugagaccagcc

SEQ ID NO: 1065727 - RNA, 19 nt, Human
gcuggagugcaauggcgcg

SEQ ID NO: 1065728 - RNA, 24 nt, Human
ggauuacaggcacgagccaccaug

SEQ ID NO: 1065729 - RNA, 23 nt, Human
gggguuucaccauguuggccagg

SEQ ID NO: 1065730 - RNA, 24 nt, Human
gguuucaccauguuggccaggaug

SEQ ID NO: 1065731 - RNA, 20 nt, Human
guaaauuuaaaaacacugca

SEQ ID NO: 1065732 - RNA, 19 nt, Human
guagacgggguuucaccau

SEQ ID NO: 1065733 - RNA, 24 nt, Human
gucucgcucuguugccaagcugga

SEQ ID NO: 1065734 - RNA, 24 nt, Human
gugauccacccgccucggccuccc

SEQ ID NO: 1065735 - RNA, 20 nt, Human
uaaaugaucuuuguacuugc

SEQ ID NO: 1065736 - RNA, 30 nt, Human
uaaauuuaaaaacacugcauuuacacucaa

SEQ ID NO: 1065737 - RNA, 20 nt, Human
uaaccucaaaaggcaaguac

SEQ ID NO: 1065738 - RNA, 21 nt, Human
uaagaagugcugauacacugg

SEQ ID NO: 1065739 - RNA, 24 nt, Human
uaauuuuuguauuuucaguguaga

SEQ ID NO: 1065740 - RNA, 24 nt, Human
uacacgcauuuuugcaaaugcucu

SEQ ID NO: 1065741 - RNA, 24 nt, Human
uacaggcacgagccaccaugccca

SEQ ID NO: 1065742 - RNA, 23 nt, Human
uacuuuacuagcccaaccagucu

SEQ ID NO: 1065743 - RNA, 21 nt, Human
uagaauguuuuacauauccuc

SEQ ID NO: 1065744 - RNA, 18 nt, Human
ucaaagauucccccaacu

SEQ ID NO: 1065745 - RNA, 23 nt, Human
ucaauggcuuuguucucaacuag

SEQ ID NO: 1065746 - RNA, 24 nt, Human
ucaccauguuggccaggauggucu

SEQ ID NO: 1065747 - RNA, 19 nt, Human
ucacugcaaccucugacuc

SEQ ID NO: 1065748 - RNA, 24 nt, Human
ucacugcaaccucugacucccugg

SEQ ID NO: 1065749 - RNA, 18 nt, Human
ucagccucccaaguagcu

SEQ ID NO: 1065750 - RNA, 20 nt, Human
ucagccucccaaguagcugg

SEQ ID NO: 1065751 - RNA, 19 nt, Human
ucaguguagacgggguuuc

SEQ ID NO: 1065752 - RNA, 24 nt, Human
ucaguguagacgggguuucaccau

SEQ ID NO: 1065753 - RNA, 20 nt, Human
ucccaaagugcuugcacacc

SEQ ID NO: 1065754 - RNA, 24 nt, Human
ucccaaguagcugggauuacaggc

SEQ ID NO: 1065755 - RNA, 21 nt, Human
ucccugguucaagcuauucuc

SEQ ID NO: 1065756 - RNA, 24 nt, Human
ucccugguucaagcuauucuccug

SEQ ID NO: 1065757 - RNA, 24 nt, Human
ucccuuaggucuaucugaagucua

SEQ ID NO: 1065758 - RNA, 21 nt, Human
ucuaaugucacaucuuccucc

SEQ ID NO: 1065759 - RNA, 26 nt, Human
ucuccugccucagccucccaaguagc

SEQ ID NO: 1065760 - RNA, 23 nt, Human
ucucgcucuguugccaagcugga

SEQ ID NO: 1065761 - RNA, 28 nt, Human
ucucucaacacauuccugaaauccuggg

SEQ ID NO: 1065762 - RNA, 23 nt, Human
ucuguugccaagcuggagugcaa

SEQ ID NO: 1065763 - RNA, 19 nt, Human
ugaacugaaucaaacucuu

SEQ ID NO: 1065764 - RNA, 24 nt, Human
ugacaguaauaauaaaucuaacaa

SEQ ID NO: 1065765 - RNA, 21 nt, Human
ugcagaggaaaguacagaggu

SEQ ID NO: 1065766 - RNA, 23 nt, Human
ugccaagcuggagugcaauggcg

SEQ ID NO: 1065767 - RNA, 24 nt, Human
ugccucagccucccaaguagcugg

SEQ ID NO: 1065768 - RNA, 23 nt, Human
ugcgcccaggaguuugagaccag

SEQ ID NO: 1065769 - RNA, 23 nt, Human
uggagugcaauggcgcgaucucg

SEQ ID NO: 1065770 - RNA, 24 nt, Human
uggagugcaauggcgcgaucucgg

SEQ ID NO: 1065771 - RNA, 22 nt, Human
uggcagccaaaggaaaaggagg

SEQ ID NO: 1065772 - RNA, 21 nt, Human
uggccaggauggucucaaucu

SEQ ID NO: 1065773 - RNA, 22 nt, Human
ugggauuacaggcacgagccac

SEQ ID NO: 1065774 - RNA, 23 nt, Human
ugggauuacaggcacgagccacc

SEQ ID NO: 1065775 - RNA, 24 nt, Human
ugggauuacaggcacgagccacca

SEQ ID NO: 1065776 - RNA, 20 nt, Human
ugggcaacauaacaagaccu

SEQ ID NO: 1065777 - RNA, 21 nt, Human
uguagacgggguuucaccaug

SEQ ID NO: 1065778 - RNA, 23 nt, Human
ugugauaacuacuuagcuugcaa

SEQ ID NO: 1065779 - RNA, 23 nt, Human
uguuuuacauauccuccuccugu

SEQ ID NO: 1065780 - RNA, 21 nt, Human
uucaagcuauucuccugccuc

SEQ ID NO: 1065781 - RNA, 23 nt, Human
uucaguggauggaaaacagguug

SEQ ID NO: 1065782 - RNA, 22 nt, Human
uuccugaaauccuggcacucca

SEQ ID NO: 1065783 - RNA, 25 nt, Human
uuuaagaagugcugauacacugggg

SEQ ID NO: 1065784 - RNA, 19 nt, Human
uuucaccauguuggccagg

SEQ ID NO: 1065785 - RNA, 20 nt, Human
uuucaccauguuggccagga

SEQ ID NO: 1065786 - RNA, 26 nt, Human
uuuuuuuuuuuuaaagauggagucuc

SEQ ID NO: 1065787 - RNA, 19 nt, Human
uuuuuuuuuuuuuuuuuaa

SEQ ID NO: 1065788 - RNA, 24 nt, Human
aaucacuugaacccgggaggcaga

SEQ ID NO: 1065789 - RNA, 25 nt, Human
acuccagccugggcaacaagaguga

SEQ ID NO: 1065790 - RNA, 22 nt, Human
agagguugcagugagcugagau

SEQ ID NO: 1065791 - RNA, 24 nt, Human
agagguugcagugagcugagauug

SEQ ID NO: 1065792 - RNA, 20 nt, Human
aggcagagguugcagugagc

SEQ ID NO: 1065793 - RNA, 24 nt, Human
aggcagagguugcagugagcugag

SEQ ID NO: 1065794 - RNA, 18 nt, Human
aggcaggagaaucacuug

SEQ ID NO: 1065795 - RNA, 24 nt, Human
aggcaggagaaucacuugaacccg

SEQ ID NO: 1065796 - RNA, 24 nt, Human
aggcugaggcaggagaaucacuug

SEQ ID NO: 1065797 - RNA, 24 nt, Human
auugcacuccagccugggcaacaa

SEQ ID NO: 1065798 - RNA, 25 nt, Human
auugcacuccagccugggcaacaag

SEQ ID NO: 1065799 - RNA, 24 nt, Human
auugugccauugcacuccagccug

SEQ ID NO: 1065800 - RNA, 19 nt, Human
cacacgcgccugcucgcca

SEQ ID NO: 1065801 - RNA, 23 nt, Human
cacuccagccugggcaacaagag

SEQ ID NO: 1065802 - RNA, 24 nt, Human
cacuccagccugggcaacaagagu

SEQ ID NO: 1065803 - RNA, 25 nt, Human
cacuccagccugggcaacaagagug

SEQ ID NO: 1065804 - RNA, 24 nt, Human
cagcuacuuggaaggcugaggcag

SEQ ID NO: 1065805 - RNA, 19 nt, Human
cauugcacuccagccuggg

SEQ ID NO: 1065806 - RNA, 21 nt, Human
cauugcacuccagccugggca

SEQ ID NO: 1065807 - RNA, 22 nt, Human
cauugcacuccagccugggcaa

SEQ ID NO: 1065808 - RNA, 24 nt, Human
cauugcacuccagccugggcaaca

SEQ ID NO: 1065809 - RNA, 20 nt, Human
ccauugcacuccagccuggg

SEQ ID NO: 1065810 - RNA, 21 nt, Human
ccauugcacuccagccugggc

SEQ ID NO: 1065811 - RNA, 22 nt, Human
ccauugcacuccagccugggca

SEQ ID NO: 1065812 - RNA, 23 nt, Human
ccauugcacuccagccugggcaa

SEQ ID NO: 1065813 - RNA, 24 nt, Human
ccauugcacuccagccugggcaac

SEQ ID NO: 1065814 - RNA, 18 nt, Human
ccuguaaucccagcuacu

SEQ ID NO: 1065815 - RNA, 21 nt, Human
ccuguaaucccagcuacuugg

SEQ ID NO: 1065816 - RNA, 24 nt, Human
cgggaggcagagguugcagugagc

SEQ ID NO: 1065817 - RNA, 23 nt, Human
gagaaucacuugaacccgggagg

SEQ ID NO: 1065818 - RNA, 23 nt, Human
gagauugugccauugcacuccag

SEQ ID NO: 1065819 - RNA, 23 nt, Human
gcaggagaaucacuugaacccgg

SEQ ID NO: 1065820 - RNA, 22 nt, Human
gccauugcacuccagccugggc

SEQ ID NO: 1065821 - RNA, 24 nt, Human
gccauugcacuccagccugggcaa

SEQ ID NO: 1065822 - RNA, 19 nt, Human
gcucgccacccaggagccc

SEQ ID NO: 1065823 - RNA, 26 nt, Human
ucccuacacacgcgccugcucgccac

SEQ ID NO: 1065824 - RNA, 18 nt, Human
ucuuuuuuuuuuuuuuuu

SEQ ID NO: 1065825 - RNA, 23 nt, Human
ugaaauuugaaacaaacaaaaac

SEQ ID NO: 1065826 - RNA, 24 nt, Human
ugaggcaggagaaucacuugaacc

SEQ ID NO: 1065827 - RNA, 25 nt, Human
ugaggcaggagaaucacuugaaccc

SEQ ID NO: 1065828 - RNA, 19 nt, Human
ugcacuccagccugggcaa

SEQ ID NO: 1065829 - RNA, 20 nt, Human
uggaaggcugaggcaggaga

SEQ ID NO: 1065830 - RNA, 24 nt, Human
uggaaggcugaggcaggagaauca

SEQ ID NO: 1065831 - RNA, 22 nt, Human
uugcagugagcugagauugugc

SEQ ID NO: 1065832 - RNA, 23 nt, Human
uugcagugagcugagauugugcc

SEQ ID NO: 1065833 - RNA, 25 nt, Human
uuggaaggcugaggcaggagaauca

SEQ ID NO: 1065834 - RNA, 23 nt, Human
uugugccauugcacuccagccug

SEQ ID NO: 1065835 - RNA, 30 nt, Human; identical to SEQ ID NO: 289986

SEQ ID NO: 1065836 - RNA, 31 nt, Human; identical to SEQ ID NO: 289987

SEQ ID NO: 1065837 - RNA, 32 nt, Human; identical to SEQ ID NO: 423254

SEQ ID NO: 1065838 - RNA, 23 nt, Human
uuuuuuuuuuuuuugaaauuuga

SEQ ID NO: 1065839 - RNA, 22 nt, Human
uuuuuuuuuuuuuuuucuuuuu

SEQ ID NO: 1065840 - RNA, 27 nt, Human
uuuuuuuuuuuuuuuuuuuuuuugggg

SEQ ID NO: 1065841 - RNA, 31 nt, Human
aaaaaaaaaaaaaaaaacuaaaccacaagcc

SEQ ID NO: 1065842 - RNA, 26 nt, Human
aaaaaaaaaaacuaaaccacaagcag

SEQ ID NO: 1065843 - RNA, 21 nt, Human
aaaaaaacuaaaccacaagca

SEQ ID NO: 1065844 - RNA, 20 nt, Human
aaccaaaauaaaacgucaaa

SEQ ID NO: 1065845 - RNA, 22 nt, Human
aaccacaagcagcacccacccc

SEQ ID NO: 1065846 - RNA, 21 nt, Human
aagaggcuucgauuccaacug

SEQ ID NO: 1065847 - RNA, 24 nt, Human
aauuaaaaaaaaaaaaaaaaaaaa

SEQ ID NO: 1065848 - RNA, 21 nt, Human
accacugccaccuugggagcc

SEQ ID NO: 1065849 - RNA, 21 nt, Human
agaggcuucgauuccaacugg

SEQ ID NO: 1065850 - RNA, 21 nt, Human
agcacccacccccuucucccc

SEQ ID NO: 1065851 - RNA, 18 nt, Human
aggaggaguccagccuag

SEQ ID NO: 1065852 - RNA, 20 nt, Human
aggcaggcgagggggcuggu

SEQ ID NO: 1065853 - RNA, 21 nt, Human
aggcaggcgagggggcugguc

SEQ ID NO: 1065854 - RNA, 21 nt, Human
agggcuaugggcaacagggga

SEQ ID NO: 1065855 - RNA, 19 nt, Human
aggggguggggaaaaccaa

SEQ ID NO: 1065856 - RNA, 23 nt, Human
agucuguuggguggugcucaggg

SEQ ID NO: 1065857 - RNA, 25 nt, Human
aucacugcugccaccacugccaccu

SEQ ID NO: 1065858 - RNA, 24 nt, Human
caagggagcuaggugaagggcagg

SEQ ID NO: 1065859 - RNA, 21 nt, Human
cacaagcagcacccacccccu

SEQ ID NO: 1065860 - RNA, 19 nt, Human
caccagggcuguaguguga

SEQ ID NO: 1065861 - RNA, 22 nt, Human
cacccccuucucccccaccagg

SEQ ID NO: 1065862 - RNA, 28 nt, Human
caggccagagccaggccaggcuggggga

SEQ ID NO: 1065863 - RNA, 22 nt, Human
cagguccccuccccucuccucc

SEQ ID NO: 1065864 - RNA, 18 nt, Human
ccaggccagagccaggcc

SEQ ID NO: 1065865 - RNA, 24 nt, Human
ccaugggggcagggccuucccaga

SEQ ID NO: 1065866 - RNA, 18 nt, Human
cccacccccuucuccccc

SEQ ID NO: 1065867 - RNA, 22 nt, Human
cccacccccuucucccccacca

SEQ ID NO: 1065868 - RNA, 18 nt, Human
ccccucuccuccucuucc

SEQ ID NO: 1065869 - RNA, 19 nt, Human
cccgccgccgccgccgccg

SEQ ID NO: 1065870 - RNA, 25 nt, Human
cccgccgccgccgccgccgccgccu

SEQ ID NO: 1065871 - RNA, 23 nt, Human
ccgccgccgccgccgccgccgcc

SEQ ID NO: 1065872 - RNA, 24 nt, Human
ccgccgccgccgccgccgccgccu

SEQ ID NO: 1065873 - RNA, 22 nt, Human
ccgccgccgccgccgccgccgg

SEQ ID NO: 1065874 - RNA, 20 nt, Human
ccuccgagcccgccgccgcc

SEQ ID NO: 1065875 - RNA, 21 nt, Human
ccucuccuccucuucccuccc

SEQ ID NO: 1065876 - RNA, 18 nt, Human
ccucuucccuccccaucu

SEQ ID NO: 1065877 - RNA, 20 nt, Human
ccucuucccuccccaucuaa

SEQ ID NO: 1065878 - RNA, 20 nt, Human
cuccccucuccuccucuucc

SEQ ID NO: 1065879 - RNA, 21 nt, Human
cucgccgcgagcccaaccgcu

SEQ ID NO: 1065880 - RNA, 28 nt, Human
cuggcgcaaacggcacugacucgacccc

SEQ ID NO: 1065881 - RNA, 19 nt, Human
cuucucccccaccagggcu

SEQ ID NO: 1065882 - RNA, 25 nt, Human
gagggcacaaggaccauuugccaga

SEQ ID NO: 1065883 - RNA, 23 nt, Human
gcacccacccccuucucccccac

SEQ ID NO: 1065884 - RNA, 21 nt, Human
ggcagggccuucccagaugcc

SEQ ID NO: 1065885 - RNA, 22 nt, Human
ggccaggcugggggagggggcc

SEQ ID NO: 1065886 - RNA, 19 nt, Human
gggaaaaccaaaauaaaac

SEQ ID NO: 1065887 - RNA, 25 nt, Human
guuuggggagagacacaggcaggcc

SEQ ID NO: 1065888 - RNA, 21 nt, Human
uagugugaggggagaagagga

SEQ ID NO: 1065889 - RNA, 23 nt, Human
uagugugaggggagaagaggagg

SEQ ID NO: 1065890 - RNA, 19 nt, Human
ucuccuccucuucccuccc

SEQ ID NO: 1065891 - RNA, 25 nt, Human
ucugcagguucggaggaucacugcu

SEQ ID NO: 1065892 - RNA, 20 nt, Human
ugaggagggggcaggucccc

SEQ ID NO: 1065893 - RNA, 20 nt, Human
ugaggggguggggaaaacca

SEQ ID NO: 1065894 - RNA, 24 nt, Human
ugggggcagggccuucccagaugc

SEQ ID NO: 1065895 - RNA, 18 nt, Human
uguaggaggaguccagcc

SEQ ID NO: 1065896 - RNA, 23 nt, Human
uguaguuuuauucagguuugauu

SEQ ID NO: 1065897 - RNA, 20 nt, Human
ugugaggggagaagaggagg

SEQ ID NO: 1065898 - RNA, 20 nt, Human
uuaaaaaaaaaaaaaaaaaa

SEQ ID NO: 1065899 - RNA, 20 nt, Human
aaccaaaauaaaacgucaaa

SEQ ID NO: 1065900 - RNA, 21 nt, Human
aagaggcuucgauuccaacug

SEQ ID NO: 1065901 - RNA, 22 nt, Human
accacugccaccuugggagcca

SEQ ID NO: 1065902 - RNA, 21 nt, Human
agaggcuucgauuccaacugg

SEQ ID NO: 1065903 - RNA, 25 nt, Human
aucacugcugccaccacugccaccu

SEQ ID NO: 1065904 - RNA, 24 nt, Human
caagggagcuaggugaagggcagg

SEQ ID NO: 1065905 - RNA, 22 nt, Human
gaggggguggggaaaaccaaaa

SEQ ID NO: 1065906 - RNA, 20 nt, Human
uaggaggaguccagccuagg

SEQ ID NO: 1065907 - RNA, 20 nt, Human
ugaggggguggggaaaacca

SEQ ID NO: 1065908 - RNA, 18 nt, Human
uguaggaggaguccagcc

SEQ ID NO: 1065909 - RNA, 23 nt, Human
cccugggcuagggguguggggug

SEQ ID NO: 1065910 - RNA, 22 nt, Human
gaucacccccuaucgaugaaga

SEQ ID NO: 1065911 - RNA, 22 nt, Human
aaucugugcuggcgucuccccu

SEQ ID NO: 1065912 - RNA, 18 nt, Human
aggguugguuucuucugg

SEQ ID NO: 1065913 - RNA, 24 nt, Human
cacacuucucaaggucagaagucu

SEQ ID NO: 1065914 - RNA, 22 nt, Human
ccacugcaguuguuuuauuggc

SEQ ID NO: 1065915 - RNA, 23 nt, Human
ccggugguggcuggccauucuuc

SEQ ID NO: 1065916 - RNA, 20 nt, Human
gaggguugguuucuucugga

SEQ ID NO: 1065917 - RNA, 24 nt, Human
gccgcaucacuucugucucugauc

SEQ ID NO: 1065918 - RNA, 18 nt, Human
uauuuuggaguucucaga

SEQ ID NO: 1065919 - RNA, 24 nt, Human
uauuuuggaguucucagauuagga

SEQ ID NO: 1065920 - RNA, 24 nt, Human
uccuuggcuugcagccgcaucacu

SEQ ID NO: 1065921 - RNA, 19 nt, Human
ucugugcuggcgucucccc

SEQ ID NO: 1065922 - RNA, 24 nt, Human
uggcuugcagccgcaucacuucug

SEQ ID NO: 1065923 - RNA, 19 nt, Human
uuggaggguugguuucuuc

SEQ ID NO: 1065924 - RNA, 23 nt, Human
aagcccguggaccuaccccccaa

SEQ ID NO: 1065925 - RNA, 18 nt, Human
aaucuggucccucuccca

SEQ ID NO: 1065926 - RNA, 19 nt, Human
aaucuuccucuucugccac

SEQ ID NO: 1065927 - RNA, 19 nt, Human
acaugaaggauuuggcugc

SEQ ID NO: 1065928 - RNA, 20 nt, Human
accaagcccguggaccuacc

SEQ ID NO: 1065929 - RNA, 21 nt, Human
agaaacaagcccaguagauua

SEQ ID NO: 1065930 - RNA, 24 nt, Human
agaaauaauucuaucaccaagccc

SEQ ID NO: 1065931 - RNA, 20 nt, Human
agcaguagccuagugggcac

SEQ ID NO: 1065932 - RNA, 18 nt, Human
agccuagugggcaccaca

SEQ ID NO: 1065933 - RNA, 18 nt, Human
aggaggaaggaggcagag

SEQ ID NO: 1065934 - RNA, 21 nt, Human
aggaggaaggaggcagagaua

SEQ ID NO: 1065935 - RNA, 20 nt, Human
agugguauggccagugucuu

SEQ ID NO: 1065936 - RNA, 23 nt, Human
caacauugcaaaaauggacuuca

SEQ ID NO: 1065937 - RNA, 19 nt, Human
caagaagucaaucgagaaa

SEQ ID NO: 1065938 - RNA, 22 nt, Human
caagcccguggaccuacccccc

SEQ ID NO: 1065939 - RNA, 22 nt, Human
caaguggccucugguuccuuuu

SEQ ID NO: 1065940 - RNA, 19 nt, Human
cagcaguagccuagugggc

SEQ ID NO: 1065941 - RNA, 20 nt, Human
cagugguauggccagugucu

SEQ ID NO: 1065942 - RNA, 27 nt, Human
caguucaaauugcacucaagaagucaa

SEQ ID NO: 1065943 - RNA, 23 nt, Human
ccaagcccguggaccuacccccc

SEQ ID NO: 1065944 - RNA, 19 nt, Human
cccaaucuggucccucucc

SEQ ID NO: 1065945 - RNA, 18 nt, Human
ccguggaccuacccccca

SEQ ID NO: 1065946 - RNA, 19 nt, Human
cucaagaagucaaucgaga

SEQ ID NO: 1065947 - RNA, 21 nt, Human
cucaagacccagcaauucagg

SEQ ID NO: 1065948 - RNA, 26 nt, Human
gacccagcaauucagguguuaacaua

SEQ ID NO: 1065949 - RNA, 23 nt, Human
gagaaauaauucuaucaccaagc

SEQ ID NO: 1065950 - RNA, 19 nt, Human
gaggaggaaggaggcagag

SEQ ID NO: 1065951 - RNA, 18 nt, Human
gaugauagacugggaagg

SEQ ID NO: 1065952 - RNA, 20 nt, Human
gaugcaaaaugacuccaagu

SEQ ID NO: 1065953 - RNA, 23 nt, Human
gguuccuuuuuguuuguuucccu

SEQ ID NO: 1065954 - RNA, 19 nt, Human
uaaaugcugaagagaccua

SEQ ID NO: 1065955 - RNA, 22 nt, Human
uaagcaaauguuacaguucaaa

SEQ ID NO: 1065956 - RNA, 24 nt, Human
uaccccccaaucuggucccucucc

SEQ ID NO: 1065957 - RNA, 26 nt, Human
uacuccacuaaaggugacuaagcaaa

SEQ ID NO: 1065958 - RNA, 23 nt, Human
ucagaaaucuuccucuucugcca

SEQ ID NO: 1065959 - RNA, 20 nt, Human
ucggcagggcucgguucagg

SEQ ID NO: 1065960 - RNA, 20 nt, Human
ugacuaagcaaauguuacag

SEQ ID NO: 1065961 - RNA, 23 nt, Human
ugccaccaauaaaugcugaagag

SEQ ID NO: 1065962 - RNA, 23 nt, Human
uggaacaacauugcaaaaaugga

SEQ ID NO: 1065963 - RNA, 19 nt, Human
uggaggaauuucagcuccc

SEQ ID NO: 1065964 - RNA, 27 nt, Human
uuacuccacuaaaggugacuaagcaaa

SEQ ID NO: 1065965 - RNA, 21 nt, Human
uucaaauugcacucaagaagu

SEQ ID NO: 1065966 - RNA, 22 nt, Human
aaauuaaaauaccccccaccuc

SEQ ID NO: 1065967 - RNA, 24 nt, Human
aagaagagagcuuuuaauuaugaa

SEQ ID NO: 1065968 - RNA, 21 nt, Human
aggcaaauugguggugguucu

SEQ ID NO: 1065969 - RNA, 18 nt, Human
caaucaaaucauuacaaa

SEQ ID NO: 1065970 - RNA, 25 nt, Human
ccaccuccaccaccaggacaccuag

SEQ ID NO: 1065971 - RNA, 21 nt, Human
cccaccuccaccaccaggaca

SEQ ID NO: 1065972 - RNA, 18 nt, Human
ccccccaccuccaccacc

SEQ ID NO: 1065973 - RNA, 19 nt, Human
ccccuccuuuuccuuuuuc

SEQ ID NO: 1065974 - RNA, 23 nt, Human
ccccuccuuuuccuuuuucucaa

SEQ ID NO: 1065975 - RNA, 19 nt, Human
ccucuguccaaaccccaaa

SEQ ID NO: 1065976 - RNA, 20 nt, Human
ccuuuuucucagucuacugg

SEQ ID NO: 1065977 - RNA, 18 nt, Human
cuccucuguccaaacccc

SEQ ID NO: 1065978 - RNA, 21 nt, Human
cucuguccaaaccccaaacuc

SEQ ID NO: 1065979 - RNA, 23 nt, Human
cuucuguuuucagcagcuucuuu

SEQ ID NO: 1065980 - RNA, 19 nt, Human
cuugaaagccgaagaagag

SEQ ID NO: 1065981 - RNA, 20 nt, Human
gcaaauugguggugguucuc

SEQ ID NO: 1065982 - RNA, 24 nt, Human
uaaaauaaucuaacuuuaugagaa

SEQ ID NO: 1065983 - RNA, 20 nt, Human
uaaaauaccccccaccuccu

SEQ ID NO: 1065984 - RNA, 20 nt, Human
uaccccccaccuccaccacc

SEQ ID NO: 1065985 - RNA, 26 nt, Human
uacgcuguuuuugucuaacaucaagg

SEQ ID NO: 1065986 - RNA, 23 nt, Human
uagggaaaacaagaugugcaggu

SEQ ID NO: 1065987 - RNA, 22 nt, Human
uccaccaccaggacaccuagac

SEQ ID NO: 1065988 - RNA, 23 nt, Human
uccaccaccaggacaccuagaca

SEQ ID NO: 1065989 - RNA, 19 nt, Human
uccucuguccaaaccccaa

SEQ ID NO: 1065990 - RNA, 23 nt, Human
uccuuuuccuuuuucucagucua

SEQ ID NO: 1065991 - RNA, 23 nt, Human
ugaaauuaaaauaccccccaccu

SEQ ID NO: 1065992 - RNA, 23 nt, Human
ugaacuucuguuuucagcagcuu

SEQ ID NO: 1065993 - RNA, 18 nt, Human
uggcuccucuguccaaac

SEQ ID NO: 1065994 - RNA, 21 nt, Human
uggcuccucuguccaaacccc

SEQ ID NO: 1065995 - RNA, 18 nt, Human
ugugcaggugaacuucug

SEQ ID NO: 1065996 - RNA, 21 nt, Human
uguuuucagcagcuucuuucu

SEQ ID NO: 1065997 - RNA, 21 nt, Human
uuaugagaauuccagcuacau

SEQ ID NO: 1065998 - RNA, 22 nt, Human
uucuucgggcuaacagcugaaa

SEQ ID NO: 1065999 - RNA, 19 nt, Human
uugucuaacaucaaggcaa

SEQ ID NO: 1066000 - RNA, 20 nt, Human
uuucagcagcuucuuucuuc

SEQ ID NO: 1066001 - RNA, 19 nt, Human
uuuccuuuccuuucuuguc

SEQ ID NO: 1066002 - RNA, 20 nt, Human
uuucuugucgcccccuccuu

SEQ ID NO: 1066003 - RNA, 18 nt, Human
uuuucucagucuacugga

SEQ ID NO: 1066004 - RNA, 19 nt, Human
aaacauugcaucccccucc

SEQ ID NO: 1066005 - RNA, 22 nt, Human
aaagagcauuccccaggaccga

SEQ ID NO: 1066006 - RNA, 23 nt, Human
aaagagcauuccccaggaccgag

SEQ ID NO: 1066007 - RNA, 23 nt, Human
aaccuggacuucuccccaaucuc

SEQ ID NO: 1066008 - RNA, 27 nt, Human
aagccuuauuaggguagagggaacgac

SEQ ID NO: 1066009 - RNA, 20 nt, Human
aaucucuaucacaguacccc

SEQ ID NO: 1066010 - RNA, 18 nt, Human
acauugcaucccccuccc

SEQ ID NO: 1066011 - RNA, 18 nt, Human
acccuugcccccaccccc

SEQ ID NO: 1066012 - RNA, 23 nt, Human
agcuuucccuuccccacgccucc

SEQ ID NO: 1066013 - RNA, 22 nt, Human
aggcaaagagcauuccccagga

SEQ ID NO: 1066014 - RNA, 18 nt, Human
aucucacccuuacccuug

SEQ ID NO: 1066015 - RNA, 20 nt, Human
caaagagcauuccccaggac

SEQ ID NO: 1066016 - RNA, 23 nt, Human
caaagagcauuccccaggaccga

SEQ ID NO: 1066017 - RNA, 19 nt, Human
caagcaucucacccuuacc

SEQ ID NO: 1066018 - RNA, 19 nt, Human
caauaaacauugcaucccc

SEQ ID NO: 1066019 - RNA, 20 nt, Human
cacccuuacccuugccccca

SEQ ID NO: 1066020 - RNA, 22 nt, Human
cacccuuacccuugcccccacc

SEQ ID NO: 1066021 - RNA, 18 nt, Human
cacucucaucccaagcau

SEQ ID NO: 1066022 - RNA, 19 nt, Human
cauugcaucccccucccca

SEQ ID NO: 1066023 - RNA, 23 nt, Human
ccagagauucuccauaccccuua

SEQ ID NO: 1066024 - RNA, 20 nt, Human
cccacccccauucgagaacc

SEQ ID NO: 1066025 - RNA, 19 nt, Human
ccccaucaacccucccuaa

SEQ ID NO: 1066026 - RNA, 22 nt, Human
cccccacccccauucgagaacc

SEQ ID NO: 1066027 - RNA, 23 nt, Human
cccccacccccauucgagaaccu

SEQ ID NO: 1066028 - RNA, 22 nt, Human
cccccaucaacccucccuaagc

SEQ ID NO: 1066029 - RNA, 20 nt, Human
cccccggucuaagacgcccu

SEQ ID NO: 1066030 - RNA, 24 nt, Human
ccccuuacacucucaucccaagca

SEQ ID NO: 1066031 - RNA, 22 nt, Human
cccggucuaagacgcccuuagc

SEQ ID NO: 1066032 - RNA, 20 nt, Human
cccuaagccggcaggcaguc

SEQ ID NO: 1066033 - RNA, 23 nt, Human
cccuuacacucucaucccaagca

SEQ ID NO: 1066034 - RNA, 19 nt, Human
ccucccccaucaacccucc

SEQ ID NO: 1066035 - RNA, 21 nt, Human
ccucccccaucaacccucccu

SEQ ID NO: 1066036 - RNA, 20 nt, Human
ccuuccccacgccuccccca

SEQ ID NO: 1066037 - RNA, 22 nt, Human
cucacccuuacccuugccccca

SEQ ID NO: 1066038 - RNA, 20 nt, Human
cuuacacucucaucccaagc

SEQ ID NO: 1066039 - RNA, 19 nt, Human
gauuucucuccccagucuc

SEQ ID NO: 1066040 - RNA, 19 nt, Human
gcaauugcucauggcugca

SEQ ID NO: 1066041 - RNA, 20 nt, Human
ggcaaagagcauuccccagg

SEQ ID NO: 1066042 - RNA, 18 nt, Human
uaacuucucugcuauccc

SEQ ID NO: 1066043 - RNA, 25 nt, Human
uaccccuuacacucucaucccaagc

SEQ ID NO: 1066044 - RNA, 20 nt, Human
uacgccuauuucuguuucca

SEQ ID NO: 1066045 - RNA, 25 nt, Human
uccccaaucucuaucacaguacccc

SEQ ID NO: 1066046 - RNA, 22 nt, Human
ucccccaucaacccucccuaag

SEQ ID NO: 1066047 - RNA, 18 nt, Human
ucucagaccacguuuguc

SEQ ID NO: 1066048 - RNA, 19 nt, Human
ucucagaccacguuugucg

SEQ ID NO: 1066049 - RNA, 20 nt, Human
ucuccccaaucucuaucaca

SEQ ID NO: 1066050 - RNA, 20 nt, Human
ucucuaucacaguacccccc

SEQ ID NO: 1066051 - RNA, 21 nt, Human
uuagucacucuaucucccccu

SEQ ID NO: 1066052 - RNA, 21 nt, Human
uuccccaggaccgaguucugg

SEQ ID NO: 1066053 - RNA, 26 nt, Human
uugcaucccccuccccacaugggacu

SEQ ID NO: 1066054 - RNA, 18 nt, Human
aaaaguacugaaguaacu

SEQ ID NO: 1066055 - RNA, 24 nt, Human
aaaccagagauggagauggcaaag

SEQ ID NO: 1066056 - RNA, 20 nt, Human
aaauuccucaggaugggaug

SEQ ID NO: 1066057 - RNA, 31 nt, Human
aaccccuccccgccccccccccccccccagg

SEQ ID NO: 1066058 - RNA, 21 nt, Human
aagcuugguucauaaagugaa

SEQ ID NO: 1066059 - RNA, 24 nt, Human
aaggaccagcagucuuccuacccu

SEQ ID NO: 1066060 - RNA, 23 nt, Human
aaucucauucuuaccucauucac

SEQ ID NO: 1066061 - RNA, 24 nt, Human
aauggaauccucucacagccaccc

SEQ ID NO: 1066062 - RNA, 23 nt, Human
acugagccuaccacacuggccua

SEQ ID NO: 1066063 - RNA, 19 nt, Human
agaaauuggugaugggugg

SEQ ID NO: 1066064 - RNA, 19 nt, Human
agcccaggaagaagcagag

SEQ ID NO: 1066065 - RNA, 20 nt, Human
agcccaggaagaagcagaga

SEQ ID NO: 1066066 - RNA, 18 nt, Human
agcuggauuugcagagag

SEQ ID NO: 1066067 - RNA, 22 nt, Human
aggaaaacuaaacaggcuucug

SEQ ID NO: 1066068 - RNA, 18 nt, Human
aguugauuuccaguuuuc

SEQ ID NO: 1066069 - RNA, 22 nt, Human
auacugagccuaccacacuggc

SEQ ID NO: 1066070 - RNA, 21 nt, Human
augaaugugugugugugugug

SEQ ID NO: 1066071 - RNA, 20 nt, Human
augcccuguucccucagccc

SEQ ID NO: 1066072 - RNA, 18 nt, Human
auggagauggcaaagcag

SEQ ID NO: 1066073 - RNA, 19 nt, Human
auuugcagagagacauacu

SEQ ID NO: 1066074 - RNA, 20 nt, Human
caccccaguccccuggcuuu

SEQ ID NO: 1066075 - RNA, 22 nt, Human
cacccugcgaagcagccagggu

SEQ ID NO: 1066076 - RNA, 24 nt, Human
caccucagcuguauauauagccaa

SEQ ID NO: 1066077 - RNA, 21 nt, Human
cacuguuaccaccaacccacu

SEQ ID NO: 1066078 - RNA, 22 nt, Human
cagaaaugcugccacauugaac

SEQ ID NO: 1066079 - RNA, 23 nt, Human
cagaggagcaaagcuugguucau

SEQ ID NO: 1066080 - RNA, 22 nt, Human
cagccauuucaucaaaucaaac

SEQ ID NO: 1066081 - RNA, 18 nt, Human
cagcccaggaagaagcag

SEQ ID NO: 1066082 - RNA, 20 nt, Human
caggcagcacagcuuuaugc

SEQ ID NO: 1066083 - RNA, 24 nt, Human
cauaaagccaccauuguacacagu

SEQ ID NO: 1066084 - RNA, 19 nt, Human
caugcuaaagcugagaaau

SEQ ID NO: 1066085 - RNA, 24 nt, Human
cauucauucuaacaauugagucuc

SEQ ID NO: 1066086 - RNA, 23 nt, Human
ccaaaaccaugccaguauuucug

SEQ ID NO: 1066087 - RNA, 21 nt, Human
ccacccugcgaagcagccagg

SEQ ID NO: 1066088 - RNA, 19 nt, Human
ccacuaggaaccccucccc

SEQ ID NO: 1066089 - RNA, 24 nt, Human
ccagcagucuuccuacccugccuc

SEQ ID NO: 1066090 - RNA, 25 nt, Human
ccagcagucuuccuacccugccucc

SEQ ID NO: 1066091 - RNA, 19 nt, Human
ccaggaagaagcagagaca

SEQ ID NO: 1066092 - RNA, 19 nt, Human
cccacccccuucaccuagg

SEQ ID NO: 1066093 - RNA, 21 nt, Human
cccacuaggaaccccuccccg

SEQ ID NO: 1066094 - RNA, 25 nt, Human
cccaggaagaagcagagacauugcc

SEQ ID NO: 1066095 - RNA, 23 nt, Human
ccccaacacaagccugugcauaa

SEQ ID NO: 1066096 - RNA, 20 nt, Human
ccccagccauuucaucaaau

SEQ ID NO: 1066097 - RNA, 20 nt, Human
ccccauccauaaaauggggc

SEQ ID NO: 1066098 - RNA, 21 nt, Human
cccccccccagccauuucauc

SEQ ID NO: 1066099 - RNA, 18 nt, Human
ccccccccccagccauuu

SEQ ID NO: 1066100 - RNA, 20 nt, Human
ccccccccccccccccagcc

SEQ ID NO: 1066101 - RNA, 22 nt, Human
ccccgcccccccccccccccca

SEQ ID NO: 1066102 - RNA, 21 nt, Human
cccgcccccccccccccccca

SEQ ID NO: 1066103 - RNA, 25 nt, Human
cccgccccccccccccccccagcca

SEQ ID NO: 1066104 - RNA, 18 nt, Human
cccugcuuccuccuucuc

SEQ ID NO: 1066105 - RNA, 19 nt, Human
ccuacucgccaccuccaga

SEQ ID NO: 1066106 - RNA, 23 nt, Human
ccucagacguccuuacucagucc

SEQ ID NO: 1066107 - RNA, 18 nt, Human
ccuccuucucagacuuuu

SEQ ID NO: 1066108 - RNA, 21 nt, Human
ccuccuucucagacuuuucca

SEQ ID NO: 1066109 - RNA, 22 nt, Human
ccuccuucucagacuuuuccag

SEQ ID NO: 1066110 - RNA, 23 nt, Human
ccuccuucucagacuuuuccagg

SEQ ID NO: 1066111 - RNA, 20 nt, Human
ccugcuuccuccuucucaga

SEQ ID NO: 1066112 - RNA, 21 nt, Human
cgggagcuggagcuucucugu

SEQ ID NO: 1066113 - RNA, 23 nt, Human
cuaggaaccccuccccgcccccc

SEQ ID NO: 1066114 - RNA, 22 nt, Human
cucacagccacccugcgaagca

SEQ ID NO: 1066115 - RNA, 25 nt, Human
cucacagccacccugcgaagcagcc

SEQ ID NO: 1066116 - RNA, 21 nt, Human
cucauucacuauguucauucc

SEQ ID NO: 1066117 - RNA, 24 nt, Human
cuccaagacgacuggcugggagga

SEQ ID NO: 1066118 - RNA, 23 nt, Human
cuccauaaacacaagaaugaacu

SEQ ID NO: 1066119 - RNA, 22 nt, Human
cucuccccgccacacacauccu

SEQ ID NO: 1066120 - RNA, 22 nt, Human
cuggaaaacauaaagccaccau

SEQ ID NO: 1066121 - RNA, 20 nt, Human
cuuagcccugccuugacugg

SEQ ID NO: 1066122 - RNA, 22 nt, Human
cuuccuuaguuccccaacacaa

SEQ ID NO: 1066123 - RNA, 24 nt, Human
cuugaccuugccccaaggccugac

SEQ ID NO: 1066124 - RNA, 23 nt, Human
gacagcccaggaagaagcagaga

SEQ ID NO: 1066125 - RNA, 24 nt, Human
gacuaagcgagcuaaugcaugaaa

SEQ ID NO: 1066126 - RNA, 18 nt, Human
gagccuaccacacuggcc

SEQ ID NO: 1066127 - RNA, 19 nt, Human
gaggaaaacuaaacaggcu

SEQ ID NO: 1066128 - RNA, 20 nt, Human
gaggaaaacuaaacaggcuu

SEQ ID NO: 1066129 - RNA, 21 nt, Human
gcaaaccauaucuccaaaaau

SEQ ID NO: 1066130 - RNA, 20 nt, Human
gccccaaggccugaccucag

SEQ ID NO: 1066131 - RNA, 24 nt, Human
gcccugccuugacuggucuuccca

SEQ ID NO: 1066132 - RNA, 18 nt, Human
ggaaaacauaaagccacc

SEQ ID NO: 1066133 - RNA, 23 nt, Human
ggaaccccuccccgccccccccc

SEQ ID NO: 1066134 - RNA, 20 nt, Human
ggaaccugcucaaguuucag

SEQ ID NO: 1066135 - RNA, 22 nt, Human
ggaauccucucacagccacccu

SEQ ID NO: 1066136 - RNA, 18 nt, Human
ggacuaagcgagcuaaug

SEQ ID NO: 1066137 - RNA, 18 nt, Human
ggagggaugaggggauga

SEQ ID NO: 1066138 - RNA, 22 nt, Human
ggggaugacagcccaggaagaa

SEQ ID NO: 1066139 - RNA, 23 nt, Human
gugcaaaguggagcuaaacucug

SEQ ID NO: 1066140 - RNA, 24 nt, Human
gugcccuauuucuuuggauaccgg

SEQ ID NO: 1066141 - RNA, 24 nt, Human
guggucugcuaucaaaaguacuga

SEQ ID NO: 1066142 - RNA, 20 nt, Human
gugucuaccucaggguuugu

SEQ ID NO: 1066143 - RNA, 22 nt, Human
uaaguaacuguucugugcaaag

SEQ ID NO: 1066144 - RNA, 20 nt, Human
uaaguggcugacaaucacug

SEQ ID NO: 1066145 - RNA, 19 nt, Human
uaauugcuguauacuuugc

SEQ ID NO: 1066146 - RNA, 21 nt, Human
uaccacacuggccuacucgcc

SEQ ID NO: 1066147 - RNA, 27 nt, Human
uacccugccuccacuguuaccaccaac

SEQ ID NO: 1066148 - RNA, 21 nt, Human
uacccugcuuccuccuucuca

SEQ ID NO: 1066149 - RNA, 20 nt, Human
uacuuaaugucuuagagccu

SEQ ID NO: 1066150 - RNA, 19 nt, Human
uacuuacuagagggcaggc

SEQ ID NO: 1066151 - RNA, 24 nt, Human
uagagggcaggcagcacagcuuua

SEQ ID NO: 1066152 - RNA, 20 nt, Human
uagccaaaauaaagaccaca

SEQ ID NO: 1066153 - RNA, 22 nt, Human
uauagccaaaauaaagaccaca

SEQ ID NO: 1066154 - RNA, 22 nt, Human
uaugaaugugugugugugugug

SEQ ID NO: 1066155 - RNA, 20 nt, Human
uaugggcagcuccauuaauu

SEQ ID NO: 1066156 - RNA, 22 nt, Human
ucacugcccucuuucaugcccc

SEQ ID NO: 1066157 - RNA, 24 nt, Human
ucagcccaccccaguccccuggcu

SEQ ID NO: 1066158 - RNA, 21 nt, Human
uccacuguuaccaccaaccca

SEQ ID NO: 1066159 - RNA, 22 nt, Human
uccacuguuaccaccaacccac

SEQ ID NO: 1066160 - RNA, 23 nt, Human
uccacuguuaccaccaacccacu

SEQ ID NO: 1066161 - RNA, 18 nt, Human
uccagcuaucucugcuga

SEQ ID NO: 1066162 - RNA, 21 nt, Human
uccagucuugauuguccucuc

SEQ ID NO: 1066163 - RNA, 20 nt, Human
uccccgcccccccccccccc

SEQ ID NO: 1066164 - RNA, 18 nt, Human
uccuuaguuccccaacac

SEQ ID NO: 1066165 - RNA, 18 nt, Human
ucuccccagcuaccuucc

SEQ ID NO: 1066166 - RNA, 18 nt, Human
ucugaguuugccaucagc

SEQ ID NO: 1066167 - RNA, 19 nt, Human
ucuuacagcaaaguugggg

SEQ ID NO: 1066168 - RNA, 21 nt, Human
ucuugcuuuggauuguccagu

SEQ ID NO: 1066169 - RNA, 22 nt, Human
ucuuucuuagcccugccuugac

SEQ ID NO: 1066170 - RNA, 24 nt, Human
ugacagccccuacagaagaagcac

SEQ ID NO: 1066171 - RNA, 18 nt, Human
ugaccucagaucccagau

SEQ ID NO: 1066172 - RNA, 18 nt, Human
ugacuggucuucccaccu

SEQ ID NO: 1066173 - RNA, 25 nt, Human
ugcccuguucccucagcccacccca

SEQ ID NO: 1066174 - RNA, 18 nt, Human
ugcuuuuacaucugauac

SEQ ID NO: 1066175 - RNA, 19 nt, Human
uggaaugcccuguucccuc

SEQ ID NO: 1066176 - RNA, 20 nt, Human
uggauaccgggagcuggagc

SEQ ID NO: 1066177 - RNA, 19 nt, Human
uggcaaagcaggaacagaa

SEQ ID NO: 1066178 - RNA, 20 nt, Human
uggcaaagcaggaacagaaa

SEQ ID NO: 1066179 - RNA, 23 nt, Human
uggcugacaaucacugcugaaga

SEQ ID NO: 1066180 - RNA, 20 nt, Human
ugggaguuggggaggcuaag

SEQ ID NO: 1066181 - RNA, 18 nt, Human
uggggcggagggaugagg

SEQ ID NO: 1066182 - RNA, 19 nt, Human
uguucugugcaaaguggag

SEQ ID NO: 1066183 - RNA, 18 nt, Human
uuaaagauuuuauacuac

SEQ ID NO: 1066184 - RNA, 24 nt, Human
uuaaugucuuagagccuguuuccc

SEQ ID NO: 1066185 - RNA, 21 nt, Human
uuaguuccccaacacaagccu

SEQ ID NO: 1066186 - RNA, 20 nt, Human
uuaguugauuuccaguuuuc

SEQ ID NO: 1066187 - RNA, 20 nt, Human
uuaguugauuuccaguuuuu

SEQ ID NO: 1066188 - RNA, 19 nt, Human
uuccccuucuggcuuaccc

SEQ ID NO: 1066189 - RNA, 22 nt, Human
uucuucuguggucuuuuucaaa

SEQ ID NO: 1066190 - RNA, 24 nt, Human
uuguacacaguucacuuuuauaua

SEQ ID NO: 1066191 - RNA, 24 nt, Human
uuuuccagcauuugugggaauguc

SEQ ID NO: 1066192 - RNA, 23 nt, Human
uuuuuuuuuuuuuaaagauuuua

SEQ ID NO: 1066193 - RNA, 19 nt, Human
aaagaagagaguggcgacc

SEQ ID NO: 1066194 - RNA, 23 nt, Human
aagggugcacucuaaguucugga

SEQ ID NO: 1066195 - RNA, 19 nt, Human
acacacagccauccaaacu

SEQ ID NO: 1066196 - RNA, 23 nt, Human
acaugaauacugucauggaugga

SEQ ID NO: 1066197 - RNA, 20 nt, Human
accaccccccccccgccccg

SEQ ID NO: 1066198 - RNA, 23 nt, Human
accuuguguucagagcuucccua

SEQ ID NO: 1066199 - RNA, 21 nt, Human
agccccuaccuuguguucaga

SEQ ID NO: 1066200 - RNA, 19 nt, Human
agcggaggagaggacgggc

SEQ ID NO: 1066201 - RNA, 19 nt, Human
aggaaggaccaggcugggu

SEQ ID NO: 1066202 - RNA, 22 nt, Human
aggaaggaccaggcugggucag

SEQ ID NO: 1066203 - RNA, 20 nt, Human
aggcagguggacaucuggga

SEQ ID NO: 1066204 - RNA, 24 nt, Human
aggccaccaccagggggcgauuuc

SEQ ID NO: 1066205 - RNA, 19 nt, Human
auguggagggugcacgggg

SEQ ID NO: 1066206 - RNA, 24 nt, Human
caagagucaaucacauauguuccu

SEQ ID NO: 1066207 - RNA, 21 nt, Human
caagccccuaccuuguguuca

SEQ ID NO: 1066208 - RNA, 25 nt, Human
caagcugaacagccccugaagcugg

SEQ ID NO: 1066209 - RNA, 26 nt, Human
caaggcgaggagugcgggcggcgccc

SEQ ID NO: 1066210 - RNA, 19 nt, Human
caccccccccccgccccgc

SEQ ID NO: 1066211 - RNA, 24 nt, Human
caccccccccccgccccgccucca

SEQ ID NO: 1066212 - RNA, 20 nt, Human
cacccccggcuccgccucca

SEQ ID NO: 1066213 - RNA, 22 nt, Human
cacccccggcuccgccuccacc

SEQ ID NO: 1066214 - RNA, 23 nt, Human
cacccuaggccgagagcagaagc

SEQ ID NO: 1066215 - RNA, 21 nt, Human
cagaagcggguggcaggagca

SEQ ID NO: 1066216 - RNA, 22 nt, Human
cagcggaggagaggacgggcua

SEQ ID NO: 1066217 - RNA, 24 nt, Human
caguaggcaagucagggggguccu

SEQ ID NO: 1066218 - RNA, 19 nt, Human
cauccuaguugaguuaaag

SEQ ID NO: 1066219 - RNA, 19 nt, Human
caucucccccacgcauagc

SEQ ID NO: 1066220 - RNA, 23 nt, Human
ccaccaccccccccccgccccgc

SEQ ID NO: 1066221 - RNA, 18 nt, Human
ccacccagucggccccgc

SEQ ID NO: 1066222 - RNA, 19 nt, Human
ccagaaagaaggaugaagc

SEQ ID NO: 1066223 - RNA, 21 nt, Human
cccaaccccgcaacgccagga

SEQ ID NO: 1066224 - RNA, 23 nt, Human
ccccaaccccgcaacgccaggac

SEQ ID NO: 1066225 - RNA, 18 nt, Human
ccccacccagucggcccc

SEQ ID NO: 1066226 - RNA, 22 nt, Human
ccccacguccauucuacccucc

SEQ ID NO: 1066227 - RNA, 25 nt, Human
ccccaucucccccacgcauagcuca

SEQ ID NO: 1066228 - RNA, 24 nt, Human
cccccaaccccgcaacgccaggac

SEQ ID NO: 1066229 - RNA, 20 nt, Human
cccccgccccgccuccagcc

SEQ ID NO: 1066230 - RNA, 22 nt, Human
cccccgccccgccuccagccgc

SEQ ID NO: 1066231 - RNA, 25 nt, Human
cccccggcuccgccuccaccacccc

SEQ ID NO: 1066232 - RNA, 19 nt, Human
cccuggcgugagccugggg

SEQ ID NO: 1066233 - RNA, 18 nt, Human
ccgcaacgccaggacagg

SEQ ID NO: 1066234 - RNA, 19 nt, Human
ccuagaagggugcacucua

SEQ ID NO: 1066235 - RNA, 22 nt, Human
cggccccgccuuucaggacccc

SEQ ID NO: 1066236 - RNA, 20 nt, Human
cggcuccgccuccaccaccc

SEQ ID NO: 1066237 - RNA, 18 nt, Human
cucccccacgcauagcuc

SEQ ID NO: 1066238 - RNA, 26 nt, Human
cucccccacguccauucuacccucca

SEQ ID NO: 1066239 - RNA, 23 nt, Human
cuccgagagggucccccaacccu

SEQ ID NO: 1066240 - RNA, 20 nt, Human
cuccgccuccaccacccccc

SEQ ID NO: 1066241 - RNA, 22 nt, Human
cucuccccgccacacacauccu

SEQ ID NO: 1066242 - RNA, 24 nt, Human
cugaagcugggaaucaagccccua

SEQ ID NO: 1066243 - RNA, 21 nt, Human
cugaccccaucucccccacgc

SEQ ID NO: 1066244 - RNA, 21 nt, Human
cuggcgugagccuggggcugc

SEQ ID NO: 1066245 - RNA, 23 nt, Human
cuggugcuguggggccgcggagc

SEQ ID NO: 1066246 - RNA, 20 nt, Human
cugugugugagccucgcccu

SEQ ID NO: 1066247 - RNA, 24 nt, Human
gaacagccccugaagcugggaauc

SEQ ID NO: 1066248 - RNA, 21 nt, Human
gaccaggcugggucagggccu

SEQ ID NO: 1066249 - RNA, 18 nt, Human
gaggugagccuagguuag

SEQ ID NO: 1066250 - RNA, 20 nt, Human
gcaaagaagagaguggcgac

SEQ ID NO: 1066251 - RNA, 23 nt, Human
gcaaagaagagaguggcgaccuu

SEQ ID NO: 1066252 - RNA, 21 nt, Human
gcaacgccaggacagguuugc

SEQ ID NO: 1066253 - RNA, 22 nt, Human
gcagagggaaauaccgccuaca

SEQ ID NO: 1066254 - RNA, 18 nt, Human
gcgggcggcgcccuggcg

SEQ ID NO: 1066255 - RNA, 19 nt, Human
ggacagguuugcacguccc

SEQ ID NO: 1066256 - RNA, 19 nt, Human
ggcaggagcacagggagug

SEQ ID NO: 1066257 - RNA, 18 nt, Human
gggagugagguccagguu

SEQ ID NO: 1066258 - RNA, 24 nt, Human
gggcggcgcccuggcgugagccug

SEQ ID NO: 1066259 - RNA, 21 nt, Human
ggugauugaaucugggaagga

SEQ ID NO: 1066260 - RNA, 19 nt, Human
gguggcaggagcacaggga

SEQ ID NO: 1066261 - RNA, 19 nt, Human
uacacuaggcagguggaca

SEQ ID NO: 1066262 - RNA, 21 nt, Human
uauugugcuagaguagggggc

SEQ ID NO: 1066263 - RNA, 21 nt, Human
uccaccaccccccccccgccc

SEQ ID NO: 1066264 - RNA, 22 nt, Human
uccaccaccccccccccgcccc

SEQ ID NO: 1066265 - RNA, 18 nt, Human
uccccagcaguaggcaag

SEQ ID NO: 1066266 - RNA, 26 nt, Human
uccccagcuaccuucccucuccccgc

SEQ ID NO: 1066267 - RNA, 20 nt, Human
uccccaguucccuccacccc

SEQ ID NO: 1066268 - RNA, 20 nt, Human
ucccccaaccccgcaacgcc

SEQ ID NO: 1066269 - RNA, 21 nt, Human
ucccugaggugagccuagguc

SEQ ID NO: 1066270 - RNA, 22 nt, Human
uccgagagggucccccaacccc

SEQ ID NO: 1066271 - RNA, 22 nt, Human
uccuuuaguuaaaugugccacu

SEQ ID NO: 1066272 - RNA, 22 nt, Human
ucgcugucucuauggccccgga

SEQ ID NO: 1066273 - RNA, 18 nt, Human
ucuccccagcuaccuucc

SEQ ID NO: 1066274 - RNA, 26 nt, Human
ucucuugagcccacaugaauacuguc

SEQ ID NO: 1066275 - RNA, 27 nt, Human
ucugcagucacacacagccauccaaac

SEQ ID NO: 1066276 - RNA, 23 nt, Human
ugagcuggaggggaaggcaagug

SEQ ID NO: 1066277 - RNA, 23 nt, Human
ugagcuuuggggaauccagaaag

SEQ ID NO: 1066278 - RNA, 22 nt, Human
ugagguccagguuagaggacag

SEQ ID NO: 1066279 - RNA, 23 nt, Human
ugagugaacaggugcaaacgcuu

SEQ ID NO: 1066280 - RNA, 18 nt, Human
ugcccaagaugagcugga

SEQ ID NO: 1066281 - RNA, 19 nt, Human
ugcgggcggcgcccuggcg

SEQ ID NO: 1066282 - RNA, 21 nt, Human
uggcaggagcacagggaguga

SEQ ID NO: 1066283 - RNA, 20 nt, Human
uggcgaggccaccaccaggg

SEQ ID NO: 1066284 - RNA, 19 nt, Human
ugggaugaaggucgagagc

SEQ ID NO: 1066285 - RNA, 23 nt, Human
ugggcccugcugucuagcagucu

SEQ ID NO: 1066286 - RNA, 22 nt, Human
uggggaauccagaaagaaggau

SEQ ID NO: 1066287 - RNA, 21 nt, Human
uggggcugcgggccggggguc

SEQ ID NO: 1066288 - RNA, 26 nt, Human
uggggcugcgggccgggggucgggca

SEQ ID NO: 1066289 - RNA, 20 nt, Human
uggggggucgcccgauggcc

SEQ ID NO: 1066290 - RNA, 24 nt, Human
ugguccaucucuugagcccacaug

SEQ ID NO: 1066291 - RNA, 18 nt, Human
uggugagugaacaggugc

SEQ ID NO: 1066292 - RNA, 21 nt, Human
uggugcuguggggccgcggag

SEQ ID NO: 1066293 - RNA, 23 nt, Human
uggugcuguggggccgcggagcc

SEQ ID NO: 1066294 - RNA, 20 nt, Human
ugugggcccugcugucuagc

SEQ ID NO: 1066295 - RNA, 21 nt, Human
uucaggaccccgccccacccc

SEQ ID NO: 1066296 - RNA, 19 nt, Human
uucaggccugaccccaucu

SEQ ID NO: 1066297 - RNA, 20 nt, Human
uugaaugacccagucccuga

SEQ ID NO: 1066298 - RNA, 18 nt, Human
uuuugguccaucucuuga

SEQ ID NO: 1066299 - RNA, 23 nt, Human
ucucggauggcagcauuuggcuu

SEQ ID NO: 1066300 - RNA, 18 nt, Human
ugaagacacuggcccucu

SEQ ID NO: 1066301 - RNA, 19 nt, Human
uggcugacaauuuacugau

SEQ ID NO: 1066302 - RNA, 19 nt, Human
uguaaggcugagcugaauc

SEQ ID NO: 1066303 - RNA, 21 nt, Human
ugucacagucucggauggcag

SEQ ID NO: 1066304 - RNA, 23 nt, Human
uugaugaagacacuggcccucuu

SEQ ID NO: 1066305 - RNA, 23 nt, Human
aaaaggcccaaaacuuuauuuag

SEQ ID NO: 1066306 - RNA, 22 nt, Human
aaacugaaccaccacagguguc

SEQ ID NO: 1066307 - RNA, 18 nt, Human
aacaaagacaaaacucca

SEQ ID NO: 1066308 - RNA, 23 nt, Human
aacgugccucucacuugccucua

SEQ ID NO: 1066309 - RNA, 22 nt, Human
aagcugugggucacugauccug

SEQ ID NO: 1066310 - RNA, 19 nt, Human
aaguuaacaguggggcugu

SEQ ID NO: 1066311 - RNA, 20 nt, Human
acacacuucccaggaagugu

SEQ ID NO: 1066312 - RNA, 22 nt, Human
acaugcucacgcuucagggauu

SEQ ID NO: 1066313 - RNA, 20 nt, Human
accagguggcaggcucagca

SEQ ID NO: 1066314 - RNA, 22 nt, Human
accagugugcccaccuuauggc

SEQ ID NO: 1066315 - RNA, 20 nt, Human
acccagucuaauucauacca

SEQ ID NO: 1066316 - RNA, 20 nt, Human
acugauccugucuucucacu

SEQ ID NO: 1066317 - RNA, 20 nt, Human
agauugguuuguggcuggug

SEQ ID NO: 1066318 - RNA, 24 nt, Human
agcaaguucucaccccaaccaccu

SEQ ID NO: 1066319 - RNA, 23 nt, Human
agccagaaacucaggaaggucua

SEQ ID NO: 1066320 - RNA, 19 nt, Human
aggccacugaguucuagga

SEQ ID NO: 1066321 - RNA, 25 nt, Human
aggcggggaccuucagugcagggga

SEQ ID NO: 1066322 - RNA, 24 nt, Human
auuggccaggauggaacugggagc

SEQ ID NO: 1066323 - RNA, 24 nt, Human
caaacugaaccaccacagguguca

SEQ ID NO: 1066324 - RNA, 18 nt, Human
caacaagacgacaaagga

SEQ ID NO: 1066325 - RNA, 21 nt, Human
caaccaccugacccacccucu

SEQ ID NO: 1066326 - RNA, 19 nt, Human
caaguucucaccccaacca

SEQ ID NO: 1066327 - RNA, 19 nt, Human
cacagagacaugagacugc

SEQ ID NO: 1066328 - RNA, 22 nt, Human
cacagcccuccacacacuuccc

SEQ ID NO: 1066329 - RNA, 19 nt, Human
cacccagucuaauucauac

SEQ ID NO: 1066330 - RNA, 20 nt, Human
cacccagucuaauucauacc

SEQ ID NO: 1066331 - RNA, 19 nt, Human
caccccaaccaccugaccc

SEQ ID NO: 1066332 - RNA, 21 nt, Human
caccccaaccaccugacccac

SEQ ID NO: 1066333 - RNA, 22 nt, Human
caccccaaccaccugacccacc

SEQ ID NO: 1066334 - RNA, 24 nt, Human
caccccaaccaccugacccacccu

SEQ ID NO: 1066335 - RNA, 20 nt, Human
cagcguguggcccaaugagu

SEQ ID NO: 1066336 - RNA, 20 nt, Human
caggaaggucuagcacagcc

SEQ ID NO: 1066337 - RNA, 23 nt, Human
caggcucagcaaacugaaccacc

SEQ ID NO: 1066338 - RNA, 18 nt, Human
cagggaaauauaagaugc

SEQ ID NO: 1066339 - RNA, 24 nt, Human
caguaggccccagcuaccccaaac

SEQ ID NO: 1066340 - RNA, 20 nt, Human
caugcagcuugggaaccaca

SEQ ID NO: 1066341 - RNA, 24 nt, Human
cauguaaacauaaaauacaaaaca

SEQ ID NO: 1066342 - RNA, 18 nt, Human
cauuauaaggggcuucuc

SEQ ID NO: 1066343 - RNA, 26 nt, Human
ccaccugacccacccucugaaacaag

SEQ ID NO: 1066344 - RNA, 21 nt, Human
cccuuucuaccugcucucuuc

SEQ ID NO: 1066345 - RNA, 18 nt, Human
ccucccucccucccuuuu

SEQ ID NO: 1066346 - RNA, 25 nt, Human
ccugacccacccucugguccccugg

SEQ ID NO: 1066347 - RNA, 27 nt, Human
ccugcaguugggacuaaaccggggucc

SEQ ID NO: 1066348 - RNA, 20 nt, Human
ccuuuuuucucuuucaccuc

SEQ ID NO: 1066349 - RNA, 22 nt, Human
cucaccccaaccaccugaccca

SEQ ID NO: 1066350 - RNA, 23 nt, Human
cucaccccaaccaccugacccac

SEQ ID NO: 1066351 - RNA, 24 nt, Human
cucaccccaaccaccugacccacc

SEQ ID NO: 1066352 - RNA, 18 nt, Human
cucaguguuucuauuccc

SEQ ID NO: 1066353 - RNA, 20 nt, Human
cucuucuuccugaaacacuc

SEQ ID NO: 1066354 - RNA, 19 nt, Human
cuggcccugcaguugggac

SEQ ID NO: 1066355 - RNA, 27 nt, Human
cugguaccaacaagacgacaaaggagg

SEQ ID NO: 1066356 - RNA, 20 nt, Human
cuguuuugcuguucuuucuc

SEQ ID NO: 1066357 - RNA, 21 nt, Human
cuucagggauuacugaagucu

SEQ ID NO: 1066358 - RNA, 20 nt, Human
cuucuggaagccuccuuccc

SEQ ID NO: 1066359 - RNA, 19 nt, Human
gaaguuaacaguggggcug

SEQ ID NO: 1066360 - RNA, 21 nt, Human
gaccccauucucuaaggccac

SEQ ID NO: 1066361 - RNA, 18 nt, Human
gacugcaccaaacagggc

SEQ ID NO: 1066362 - RNA, 19 nt, Human
gcccaccuuauggccuggg

SEQ ID NO: 1066363 - RNA, 24 nt, Human
ggacuaaacuuauaugcaccugca

SEQ ID NO: 1066364 - RNA, 18 nt, Human
ggaguaggagagggugcu

SEQ ID NO: 1066365 - RNA, 21 nt, Human
ggauuggggaagggggauugc

SEQ ID NO: 1066366 - RNA, 24 nt, Human
ggcaaaaccagcugagaacccggg

SEQ ID NO: 1066367 - RNA, 23 nt, Human
ggggacccagguuugcaggaggg

SEQ ID NO: 1066368 - RNA, 23 nt, Human
gguaccaacaagacgacaaagga

SEQ ID NO: 1066369 - RNA, 18 nt, Human
guaccaacaagacgacaa

SEQ ID NO: 1066370 - RNA, 18 nt, Human
gucuggcccugcaguugg

SEQ ID NO: 1066371 - RNA, 20 nt, Human
uaaaauacaaaacaaaaccc

SEQ ID NO: 1066372 - RNA, 21 nt, Human
uaaauaauucuuccucccucc

SEQ ID NO: 1066373 - RNA, 21 nt, Human
uaaucccaaccuuauaggcag

SEQ ID NO: 1066374 - RNA, 22 nt, Human
uaauuuguggaggugggucccu

SEQ ID NO: 1066375 - RNA, 23 nt, Human
uagcacagcccuccacacacuuc

SEQ ID NO: 1066376 - RNA, 22 nt, Human
uagccagaaacucaggaagguc

SEQ ID NO: 1066377 - RNA, 21 nt, Human
ucaacaaagacaaaacuccaa

SEQ ID NO: 1066378 - RNA, 21 nt, Human
ucagcaaacugaaccaccaca

SEQ ID NO: 1066379 - RNA, 24 nt, Human
uccugcagaccucugaguaccugg

SEQ ID NO: 1066380 - RNA, 21 nt, Human
ucucaccccaaccaccugacc

SEQ ID NO: 1066381 - RNA, 18 nt, Human
ucuggaagccuccuuccc

SEQ ID NO: 1066382 - RNA, 20 nt, Human
ucuggaaucagggccugcaa

SEQ ID NO: 1066383 - RNA, 19 nt, Human
ucuguaagcaccagugugc

SEQ ID NO: 1066384 - RNA, 19 nt, Human
ucuuccucccucccucccu

SEQ ID NO: 1066385 - RNA, 18 nt, Human
ugaagggacaguaggccc

SEQ ID NO: 1066386 - RNA, 20 nt, Human
ugacccacccucugaaacaa

SEQ ID NO: 1066387 - RNA, 23 nt, Human
ugacccauuguggucacugcucu

SEQ ID NO: 1066388 - RNA, 20 nt, Human
ugagaacccgggagcuggau

SEQ ID NO: 1066389 - RNA, 23 nt, Human
ugagaacccgggagcuggaugca

SEQ ID NO: 1066390 - RNA, 22 nt, Human
ugagaacugauggggacccagc

SEQ ID NO: 1066391 - RNA, 19 nt, Human
ugagagacuggcuuuggau

SEQ ID NO: 1066392 - RNA, 21 nt, Human
ugagagacuggcuuuggauug

SEQ ID NO: 1066393 - RNA, 18 nt, Human
ugaggcgcagccuauugg

SEQ ID NO: 1066394 - RNA, 21 nt, Human
ugcaggagggaaguuaacagu

SEQ ID NO: 1066395 - RNA, 20 nt, Human
ugccagugugaaauuuccaa

SEQ ID NO: 1066396 - RNA, 21 nt, Human
uggacagucaaagggaagugg

SEQ ID NO: 1066397 - RNA, 21 nt, Human
uggagccugggaugacugccu

SEQ ID NO: 1066398 - RNA, 21 nt, Human
uggcaggcucagcaaacugaa

SEQ ID NO: 1066399 - RNA, 25 nt, Human
uggcauggcugaggggugggaguca

SEQ ID NO: 1066400 - RNA, 27 nt, Human
ugggaaccacagagacaugagacugca

SEQ ID NO: 1066401 - RNA, 24 nt, Human
uggggacccagcguguggcccaau

SEQ ID NO: 1066402 - RNA, 24 nt, Human
uucccuuucuaccugcucucuucu

SEQ ID NO: 1066403 - RNA, 20 nt, Human
uuccucccucccucccuuuu

SEQ ID NO: 1066404 - RNA, 23 nt, Human
uuccugaaacacucagagcugac

SEQ ID NO: 1066405 - RNA, 23 nt, Human
uucucaccccaaccaccugaccc

SEQ ID NO: 1066406 - RNA, 23 nt, Human
uucucauacccauggcauggcug

SEQ ID NO: 1066407 - RNA, 30 nt, Human
uucucugcaguaaacucuuauggggagugg

SEQ ID NO: 1066408 - RNA, 20 nt, Human
uucucuuucaccucuugagg

SEQ ID NO: 1066409 - RNA, 21 nt, Human
uugcuguucuuucucugcagu

SEQ ID NO: 1066410 - RNA, 19 nt, Human
uugggaaccacagagacau

SEQ ID NO: 1066411 - RNA, 20 nt, Human
aaaaugaacauuugugaggg

SEQ ID NO: 1066412 - RNA, 18 nt, Human
aaacaaaggagccaucua

SEQ ID NO: 1066413 - RNA, 22 nt, Human
aaacaaaucacaaauuggccug

SEQ ID NO: 1066414 - RNA, 23 nt, Human
aaagacuguuuguguucuguacu

SEQ ID NO: 1066415 - RNA, 18 nt, Human
aaagaggucauggacaca

SEQ ID NO: 1066416 - RNA, 24 nt, Human
aaagugcugggauuacaggcguga

SEQ ID NO: 1066417 - RNA, 20 nt, Human
aaagugggugggagaagcca

SEQ ID NO: 1066418 - RNA, 20 nt, Human
aacaugcgcauaacauagga

SEQ ID NO: 1066419 - RNA, 19 nt, Human
aaccucucccccagcccua

SEQ ID NO: 1066420 - RNA, 20 nt, Human
aacuaggcccucagcaaguu

SEQ ID NO: 1066421 - RNA, 19 nt, Human
aagcaaggacaaaaaaggu

SEQ ID NO: 1066422 - RNA, 19 nt, Human
aagcaaggcagugcaagga

SEQ ID NO: 1066423 - RNA, 22 nt, Human
aagugcaaagcuccaugaagca

SEQ ID NO: 1066424 - RNA, 19 nt, Human
aagugcugggauuacaggc

SEQ ID NO: 1066425 - RNA, 19 nt, Human
aagugcugggauuacaggc

SEQ ID NO: 1066426 - RNA, 26 nt, Human
aagugcugggauuacaggcgugagcc

SEQ ID NO: 1066427 - RNA, 19 nt, Human
aauccaguuccuuccacag

SEQ ID NO: 1066428 - RNA, 24 nt, Human
aaugccacuuuuaaaaggaaggau

SEQ ID NO: 1066429 - RNA, 23 nt, Human
acacugcugugggaggccagccc

SEQ ID NO: 1066430 - RNA, 23 nt, Human
acaggcucccgccaccacgcccg

SEQ ID NO: 1066431 - RNA, 18 nt, Human
acaguggaaauauuuggc

SEQ ID NO: 1066432 - RNA, 23 nt, Human
accucggccucccaaagugcugg

SEQ ID NO: 1066433 - RNA, 18 nt, Human
acuaagcccagaacucca

SEQ ID NO: 1066434 - RNA, 20 nt, Human
agaaagcaauaaaggcgacu

SEQ ID NO: 1066435 - RNA, 22 nt, Human
agacuaugagcuuuugaaggag

SEQ ID NO: 1066436 - RNA, 19 nt, Human
agagaaugugguuuggagu

SEQ ID NO: 1066437 - RNA, 22 nt, Human
agagaggaaagucuacguaaua

SEQ ID NO: 1066438 - RNA, 20 nt, Human
agcaaggacaaaaaagguaa

SEQ ID NO: 1066439 - RNA, 20 nt, Human
agcaauaaaggcgacuaaaa

SEQ ID NO: 1066440 - RNA, 23 nt, Human
agcuacaugacucucugagccuc

SEQ ID NO: 1066441 - RNA, 21 nt, Human
aggacggagggaggcaggaaa

SEQ ID NO: 1066442 - RNA, 22 nt, Human
aggccuccagcagacuccccag

SEQ ID NO: 1066443 - RNA, 25 nt, Human
aggcuggggugcaguggcgcaaucu

SEQ ID NO: 1066444 - RNA, 22 nt, Human
aggguuucaccauguuagccag

SEQ ID NO: 1066445 - RNA, 19 nt, Human
aguagcugggacuacaggc

SEQ ID NO: 1066446 - RNA, 18 nt, Human
agugcugggauuacaggc

SEQ ID NO: 1066447 - RNA, 20 nt, Human
agugggaaguuccaugcugc

SEQ ID NO: 1066448 - RNA, 18 nt, Human
auaggguuucaccauguu

SEQ ID NO: 1066449 - RNA, 20 nt, Human
auaggguuucaccauguuag

SEQ ID NO: 1066450 - RNA, 21 nt, Human
aucaucaucccuauucuccaa

SEQ ID NO: 1066451 - RNA, 21 nt, Human
auuaugccucuuuuaaguuaa

SEQ ID NO: 1066452 - RNA, 24 nt, Human
caaagugcugggauuacaggcgug

SEQ ID NO: 1066453 - RNA, 24 nt, Human
cacacugcugugggaggccagccc

SEQ ID NO: 1066454 - RNA, 18 nt, Human
cacaguggaaauauuugg

SEQ ID NO: 1066455 - RNA, 18 nt, Human
caccauguuagccaggau

SEQ ID NO: 1066456 - RNA, 22 nt, Human
caccauguuagccaggaugguc

SEQ ID NO: 1066457 - RNA, 24 nt, Human
caccauguuagccaggauggucuc

SEQ ID NO: 1066458 - RNA, 25 nt, Human
cacccagcaaguauuuacugagcac

SEQ ID NO: 1066459 - RNA, 24 nt, Human
cacccaggcuggggugcaguggcg

SEQ ID NO: 1066460 - RNA, 22 nt, Human
cacccauccuucaaggccuuca

SEQ ID NO: 1066461 - RNA, 22 nt, Human
caccgugacuuccuuccagccc

SEQ ID NO: 1066462 - RNA, 23 nt, Human
cacuccucuuccuuucccucaac

SEQ ID NO: 1066463 - RNA, 22 nt, Human
cagaacuccaucccaggccucc

SEQ ID NO: 1066464 - RNA, 23 nt, Human
cagacaaucacauaacaugcgca

SEQ ID NO: 1066465 - RNA, 20 nt, Human
cagccuccugaguagcuggg

SEQ ID NO: 1066466 - RNA, 18 nt, Human
cagcuucagaucuacuga

SEQ ID NO: 1066467 - RNA, 20 nt, Human
caggggcacuggcacaucuu

SEQ ID NO: 1066468 - RNA, 22 nt, Human
caggucccaaaucagcugaagg

SEQ ID NO: 1066469 - RNA, 18 nt, Human
caucaucccuauucucca

SEQ ID NO: 1066470 - RNA, 21 nt, Human
cauccaugcuaucaucauccc

SEQ ID NO: 1066471 - RNA, 22 nt, Human
caucuuuugggagagaggaaag

SEQ ID NO: 1066472 - RNA, 21 nt, Human
caugaccucuagcuaauaaag

SEQ ID NO: 1066473 - RNA, 22 nt, Human
caugcaaagagaaugugguuug

SEQ ID NO: 1066474 - RNA, 18 nt, Human
caugcgguuugugguacc

SEQ ID NO: 1066475 - RNA, 22 nt, Human
ccaaagugcugggauuacaggc

SEQ ID NO: 1066476 - RNA, 22 nt, Human
ccaaagugcugggauuacaggc

SEQ ID NO: 1066477 - RNA, 24 nt, Human
ccaaagugcugggauuacaggcgu

SEQ ID NO: 1066478 - RNA, 20 nt, Human
ccaggccuccagcagacucc

SEQ ID NO: 1066479 - RNA, 22 nt, Human
ccaugaagcaaggcagugcaag

SEQ ID NO: 1066480 - RNA, 18 nt, Human
cccacucccuccuuucuc

SEQ ID NO: 1066481 - RNA, 20 nt, Human
cccacucccuccuuucuccc

SEQ ID NO: 1066482 - RNA, 21 nt, Human
cccacucccuccuuucucccu

SEQ ID NO: 1066483 - RNA, 22 nt, Human
cccagcuccaccacccaugagc

SEQ ID NO: 1066484 - RNA, 20 nt, Human
cccuccuuucucccuucucc

SEQ ID NO: 1066485 - RNA, 18 nt, Human
ccgcaagcuccaccuccc

SEQ ID NO: 1066486 - RNA, 24 nt, Human
ccgcaagcuccaccucccggguuc

SEQ ID NO: 1066487 - RNA, 19 nt, Human
ccggagcacauuuuagagc

SEQ ID NO: 1066488 - RNA, 22 nt, Human
ccggagcacauuuuagagccgg

SEQ ID NO: 1066489 - RNA, 18 nt, Human
ccuaacccacuucuggga

SEQ ID NO: 1066490 - RNA, 19 nt, Human
ccuaaccucucccccagcc

SEQ ID NO: 1066491 - RNA, 22 nt, Human
ccuauggccaagugucuaucuu

SEQ ID NO: 1066492 - RNA, 21 nt, Human
ccucaaaugagcuuccccaag

SEQ ID NO: 1066493 - RNA, 18 nt, Human
ccucagccuggaaugccc

SEQ ID NO: 1066494 - RNA, 24 nt, Human
ccucccggguucucgccauucucc

SEQ ID NO: 1066495 - RNA, 21 nt, Human
ccuccuggcugagaugcugcc

SEQ ID NO: 1066496 - RNA, 24 nt, Human
ccugaguagcugggacuacaggcu

SEQ ID NO: 1066497 - RNA, 23 nt, Human
ccugccucagccuccugaguagc

SEQ ID NO: 1066498 - RNA, 24 nt, Human
ccugccucagccuccugaguagcu

SEQ ID NO: 1066499 - RNA, 22 nt, Human
ccuuaagacccccuaccccaga

SEQ ID NO: 1066500 - RNA, 21 nt, Human
ccuuccagccccuuccuagac

SEQ ID NO: 1066501 - RNA, 24 nt, Human
cgcucugucacccaggcuggggug

SEQ ID NO: 1066502 - RNA, 18 nt, Human
cuaccuggugguggaaag

SEQ ID NO: 1066503 - RNA, 18 nt, Human
cuaggagacagaggaucc

SEQ ID NO: 1066504 - RNA, 21 nt, Human
cuaugagcuuuugaaggaggg

SEQ ID NO: 1066505 - RNA, 21 nt, Human
cucaaaugagcuuccccaagc

SEQ ID NO: 1066506 - RNA, 20 nt, Human
cucaauauuccacuuccaga

SEQ ID NO: 1066507 - RNA, 23 nt, Human
cucacccauccuucaaggggacc

SEQ ID NO: 1066508 - RNA, 24 nt, Human
cucaccgcaagcuccaccucccgg

SEQ ID NO: 1066509 - RNA, 24 nt, Human
cucagccuccugaguagcugggac

SEQ ID NO: 1066510 - RNA, 21 nt, Human
cuccacaccugggaguucuuc

SEQ ID NO: 1066511 - RNA, 23 nt, Human
cuccagacuaagcccagaacucc

SEQ ID NO: 1066512 - RNA, 19 nt, Human
cuccaucccaggccuccag

SEQ ID NO: 1066513 - RNA, 23 nt, Human
cucccuuaagacccccuacccca

SEQ ID NO: 1066514 - RNA, 20 nt, Human
cuccugaccucgugaucggc

SEQ ID NO: 1066515 - RNA, 24 nt, Human
cucgcucugucacccaggcugggg

SEQ ID NO: 1066516 - RNA, 24 nt, Human
cugcagacaggguggggugcaaac

SEQ ID NO: 1066517 - RNA, 21 nt, Human
cugcuccucaggcccacuccu

SEQ ID NO: 1066518 - RNA, 20 nt, Human
cugcugcuccucaggcccac

SEQ ID NO: 1066519 - RNA, 25 nt, Human
cugcugcuccucaggcccacuccuc

SEQ ID NO: 1066520 - RNA, 18 nt, Human
cugcuuggcccuacagac

SEQ ID NO: 1066521 - RNA, 20 nt, Human
cuggugguggaaagugggug

SEQ ID NO: 1066522 - RNA, 18 nt, Human
cuguaacaucccuucucu

SEQ ID NO: 1066523 - RNA, 25 nt, Human
cuuaagacccccuaccccagaaagc

SEQ ID NO: 1066524 - RNA, 20 nt, Human
cuuccacaggaggauguccc

SEQ ID NO: 1066525 - RNA, 25 nt, Human
cuuccagccccuuccuagacauccc

SEQ ID NO: 1066526 - RNA, 20 nt, Human
cuuccugugaaucugccuuu

SEQ ID NO: 1066527 - RNA, 18 nt, Human
gaauuccugcugcuccuc

SEQ ID NO: 1066528 - RNA, 22 nt, Human
gaccucgugaucggcccaccuc

SEQ ID NO: 1066529 - RNA, 21 nt, Human
gagacggagucucgcucuguc

SEQ ID NO: 1066530 - RNA, 21 nt, Human
gagagaaaguuaguaagcgag

SEQ ID NO: 1066531 - RNA, 18 nt, Human
gagcugugugguguuggg

SEQ ID NO: 1066532 - RNA, 21 nt, Human
gaggcaggaaagggcagaaag

SEQ ID NO: 1066533 - RNA, 20 nt, Human
gaguagcugggacuacaggc

SEQ ID NO: 1066534 - RNA, 25 nt, Human
gaguagcugggacuacaggcucccg

SEQ ID NO: 1066535 - RNA, 23 nt, Human
gagugccaggucccaaaucagcu

SEQ ID NO: 1066536 - RNA, 20 nt, Human
gauaccacacacugcugugg

SEQ ID NO: 1066537 - RNA, 18 nt, Human
gauuacaggcgugagcca

SEQ ID NO: 1066538 - RNA, 21 nt, Human
gauuacaggcgugagccaccg

SEQ ID NO: 1066539 - RNA, 24 nt, Human
gauuacaggcgugagccaccgugc

SEQ ID NO: 1066540 - RNA, 23 nt, Human
gauugcuugggugagccacgaua

SEQ ID NO: 1066541 - RNA, 24 nt, Human
gcaccgugacuuccuuccagcccc

SEQ ID NO: 1066542 - RNA, 19 nt, Human
gccauucuccugccucagc

SEQ ID NO: 1066543 - RNA, 23 nt, Human
gcccggcuaauuuuuuguauuuu

SEQ ID NO: 1066544 - RNA, 18 nt, Human
gcuaagugcaaagcucca

SEQ ID NO: 1066545 - RNA, 19 nt, Human
gcuacucuguaacaucccu

SEQ ID NO: 1066546 - RNA, 25 nt, Human
gcucugucacccaggcuggggugca

SEQ ID NO: 1066547 - RNA, 22 nt, Human
ggagaacaaagacuguuugugu

SEQ ID NO: 1066548 - RNA, 22 nt, Human
ggauacuugggcucagagaggu

SEQ ID NO: 1066549 - RNA, 21 nt, Human
ggcagggccucugcuagagcc

SEQ ID NO: 1066550 - RNA, 25 nt, Human
ggccaugcuuuucauaagguuggca

SEQ ID NO: 1066551 - RNA, 18 nt, Human
gggaggcacgcaggcauc

SEQ ID NO: 1066552 - RNA, 21 nt, Human
gggcagggccucugcuagagc

SEQ ID NO: 1066553 - RNA, 18 nt, Human
ggggcugguggaauuccu

SEQ ID NO: 1066554 - RNA, 19 nt, Human
ggguggcccugagauaacc

SEQ ID NO: 1066555 - RNA, 22 nt, Human
gggugggagaagccaaacuucu

SEQ ID NO: 1066556 - RNA, 21 nt, Human
ggguuucaccauguuagccag

SEQ ID NO: 1066557 - RNA, 22 nt, Human
ggguuucaccauguuagccagg

SEQ ID NO: 1066558 - RNA, 23 nt, Human
ggucacacagauauaaacccaga

SEQ ID NO: 1066559 - RNA, 20 nt, Human
ggucucaaucuccugaccuc

SEQ ID NO: 1066560 - RNA, 21 nt, Human
ggugcaguggcgcaaucucag

SEQ ID NO: 1066561 - RNA, 22 nt, Human
gguggaugaggggugggaggga

SEQ ID NO: 1066562 - RNA, 23 nt, Human
ggugguguugcgauuucugcagc

SEQ ID NO: 1066563 - RNA, 24 nt, Human
gguuucaccauguuagccaggaug

SEQ ID NO: 1066564 - RNA, 21 nt, Human
guccucucuccuccuaaccuc

SEQ ID NO: 1066565 - RNA, 24 nt, Human
gugaucggcccaccucggccuccc

SEQ ID NO: 1066566 - RNA, 22 nt, Human
gugaucuguaggauaccacaca

SEQ ID NO: 1066567 - RNA, 19 nt, Human
gugcaguggcgcaaucuca

SEQ ID NO: 1066568 - RNA, 22 nt, Human
gugguguugggcaagcuacaug

SEQ ID NO: 1066569 - RNA, 24 nt, Human
guuuccuuaaggaggcugcaccug

SEQ ID NO: 1066570 - RNA, 23 nt, Human
uaaaagcaaggacaaaaaaggua

SEQ ID NO: 1066571 - RNA, 20 nt, Human
uaaaaggaaggauuuuguuu

SEQ ID NO: 1066572 - RNA, 23 nt, Human
uaaaaugaacauuugugagggua

SEQ ID NO: 1066573 - RNA, 24 nt, Human
uaaacaaaucacaaauuggccugc

SEQ ID NO: 1066574 - RNA, 24 nt, Human
uaaaguaagcagcucagcagcuca

SEQ ID NO: 1066575 - RNA, 20 nt, Human
uaaauuaaacaaaucacaaa

SEQ ID NO: 1066576 - RNA, 20 nt, Human
uaacacuacggaaauggagu

SEQ ID NO: 1066577 - RNA, 18 nt, Human
uaaccucucccccagccc

SEQ ID NO: 1066578 - RNA, 24 nt, Human
uaagcgagugugagugccaggucc

SEQ ID NO: 1066579 - RNA, 19 nt, Human
uaagugcaaagcuccauga

SEQ ID NO: 1066580 - RNA, 24 nt, Human
uaauuuuuuguauuuuuaguagag

SEQ ID NO: 1066581 - RNA, 25 nt, Human
uaauuuuuuguauuuuuaguagaga

SEQ ID NO: 1066582 - RNA, 23 nt, Human
uacaggcucccgccaccacgccc

SEQ ID NO: 1066583 - RNA, 18 nt, Human
uacauagcacaccgccug

SEQ ID NO: 1066584 - RNA, 22 nt, Human
uacugagugggaaguuccaugc

SEQ ID NO: 1066585 - RNA, 22 nt, Human
uagagauaggguuucaccaugu

SEQ ID NO: 1066586 - RNA, 24 nt, Human
uagagccaucagcccuauggccaa

SEQ ID NO: 1066587 - RNA, 24 nt, Human
uaggaccuaaagcuaugcuuaagc

SEQ ID NO: 1066588 - RNA, 18 nt, Human
uaggauaccacacacugc

SEQ ID NO: 1066589 - RNA, 21 nt, Human
uaggcacuuaauaaaugcugg

SEQ ID NO: 1066590 - RNA, 24 nt, Human
uaggguuucaccauguuagccagg

SEQ ID NO: 1066591 - RNA, 24 nt, Human
uaguagagauaggguuucaccaug

SEQ ID NO: 1066592 - RNA, 26 nt, Human
uaguagagauaggguuucaccauguu

SEQ ID NO: 1066593 - RNA, 19 nt, Human
uauggccaagugucuaucu

SEQ ID NO: 1066594 - RNA, 21 nt, Human
uauuuuggguaauggggauga

SEQ ID NO: 1066595 - RNA, 21 nt, Human
ucacacagauauaaacccaga

SEQ ID NO: 1066596 - RNA, 24 nt, Human
ucacaguuggacgauugcuugggu

SEQ ID NO: 1066597 - RNA, 24 nt, Human
ucaccauguuagccaggauggucu

SEQ ID NO: 1066598 - RNA, 24 nt, Human
ucacccaggcuggggugcaguggc

SEQ ID NO: 1066599 - RNA, 24 nt, Human
ucaccgcaagcuccaccucccggg

SEQ ID NO: 1066600 - RNA, 23 nt, Human
ucagccuccugaguagcugggac

SEQ ID NO: 1066601 - RNA, 19 nt, Human
ucaggcccagcuccaccac

SEQ ID NO: 1066602 - RNA, 20 nt, Human
ucaggguggaugaggggugg

SEQ ID NO: 1066603 - RNA, 19 nt, Human
uccaaaacuguucuuucca

SEQ ID NO: 1066604 - RNA, 20 nt, Human
uccagaguuucaugaccucc

SEQ ID NO: 1066605 - RNA, 19 nt, Human
uccaggucccggagcacau

SEQ ID NO: 1066606 - RNA, 24 nt, Human
ucccaaagugcugggauuacaggc

SEQ ID NO: 1066607 - RNA, 19 nt, Human
ucccaggccuccagcagac

SEQ ID NO: 1066608 - RNA, 21 nt, Human
ucccaggccuccagcagacuc

SEQ ID NO: 1066609 - RNA, 24 nt, Human
uccccaggcgaaucugucauccug

SEQ ID NO: 1066610 - RNA, 21 nt, Human
ucccggguucucgccauucuc

SEQ ID NO: 1066611 - RNA, 24 nt, Human
ucccggguucucgccauucuccug

SEQ ID NO: 1066612 - RNA, 18 nt, Human
ucccuggggguggcccug

SEQ ID NO: 1066613 - RNA, 24 nt, Human
uccugaguagcugggacuacaggc

SEQ ID NO: 1066614 - RNA, 19 nt, Human
uccuuaaggaggcugcacc

SEQ ID NO: 1066615 - RNA, 19 nt, Human
uccuuccagccccuuccuc

SEQ ID NO: 1066616 - RNA, 22 nt, Human
uccuuccaggucccggagcaca

SEQ ID NO: 1066617 - RNA, 24 nt, Human
ucgcucugucacccaggcuggggu

SEQ ID NO: 1066618 - RNA, 18 nt, Human
ucggccucccaaagugcu

SEQ ID NO: 1066619 - RNA, 19 nt, Human
ucguccucucuccuccuaa

SEQ ID NO: 1066620 - RNA, 25 nt, Human
ucucacccauccuucaaggccuuca

SEQ ID NO: 1066621 - RNA, 24 nt, Human
ucuccugccucagccuccugagua

SEQ ID NO: 1066622 - RNA, 22 nt, Human
ucucgccauucuccugccucag

SEQ ID NO: 1066623 - RNA, 19 nt, Human
ucucgcucugucacccagg

SEQ ID NO: 1066624 - RNA, 23 nt, Human
ucucgcucugucacccaggcugg

SEQ ID NO: 1066625 - RNA, 23 nt, Human
ucucgcucugucacccaggcugg

SEQ ID NO: 1066626 - RNA, 24 nt, Human
ucucgcucugucacccaggcuggg

SEQ ID NO: 1066627 - RNA, 26 nt, Human
ucucgcucugucacccaggcuggggu

SEQ ID NO: 1066628 - RNA, 27 nt, Human
ucucgcucugucacccaggcuggggug

SEQ ID NO: 1066629 - RNA, 18 nt, Human
ucucuccuccuaaccucu

SEQ ID NO: 1066630 - RNA, 24 nt, Human
ucugucacccaggcuggggugcag

SEQ ID NO: 1066631 - RNA, 22 nt, Human
ucuuccuuucccucagccugga

SEQ ID NO: 1066632 - RNA, 21 nt, Human
ugaauccaguuccuuccacag

SEQ ID NO: 1066633 - RNA, 18 nt, Human
ugaauggcucaggccaaa

SEQ ID NO: 1066634 - RNA, 24 nt, Human
ugacagguccacaaccauugcaga

SEQ ID NO: 1066635 - RNA, 19 nt, Human
ugacuugccuaaggucaca

SEQ ID NO: 1066636 - RNA, 19 nt, Human
ugagauaacggacauggcc

SEQ ID NO: 1066637 - RNA, 26 nt, Human
ugagcaccugcuaagugcaaagcucc

SEQ ID NO: 1066638 - RNA, 19 nt, Human
ugagcuuccccaagcucau

SEQ ID NO: 1066639 - RNA, 19 nt, Human
ugaucaaacagcuucagau

SEQ ID NO: 1066640 - RNA, 21 nt, Human
ugauucaugaacaacauucuc

SEQ ID NO: 1066641 - RNA, 22 nt, Human
ugcaguggcgcaaucucagcuc

SEQ ID NO: 1066642 - RNA, 23 nt, Human
ugcaguggcgcaaucucagcuca

SEQ ID NO: 1066643 - RNA, 24 nt, Human
ugccucagccuccugaguagcugg

SEQ ID NO: 1066644 - RNA, 24 nt, Human
ugcugggauuacaggcgugagcca

SEQ ID NO: 1066645 - RNA, 23 nt, Human
ugcuuugcacauccagaguuuca

SEQ ID NO: 1066646 - RNA, 19 nt, Human
uggaaagugggugggagaa

SEQ ID NO: 1066647 - RNA, 22 nt, Human
uggaacaaggcaagguaaaagc

SEQ ID NO: 1066648 - RNA, 23 nt, Human
uggaacuggcuguccaugcuaga

SEQ ID NO: 1066649 - RNA, 21 nt, Human
uggaagcaucacccucccugg

SEQ ID NO: 1066650 - RNA, 19 nt, Human
uggaagugaucaagggaug

SEQ ID NO: 1066651 - RNA, 18 nt, Human
uggaaugcccacucccuc

SEQ ID NO: 1066652 - RNA, 23 nt, Human
uggaaugcccacucccuccuuuc

SEQ ID NO: 1066653 - RNA, 21 nt, Human
uggcaaaggguagcaugguca

SEQ ID NO: 1066654 - RNA, 24 nt, Human
uggcgcaaucucagcucaccgcaa

SEQ ID NO: 1066655 - RNA, 20 nt, Human
uggcucaggccaaaagucgg

SEQ ID NO: 1066656 - RNA, 19 nt, Human
uggcugggcauuucaggca

SEQ ID NO: 1066657 - RNA, 21 nt, Human
ugggacuacaggcucccgcca

SEQ ID NO: 1066658 - RNA, 22 nt, Human
ugggacuacaggcucccgccac

SEQ ID NO: 1066659 - RNA, 24 nt, Human
ugggacuacaggcucccgccacca

SEQ ID NO: 1066660 - RNA, 21 nt, Human
ugggagaagccaaacuucuua

SEQ ID NO: 1066661 - RNA, 18 nt, Human
ugggauuacaggcgugag

SEQ ID NO: 1066662 - RNA, 21 nt, Human
ugggauuacaggcgugagcca

SEQ ID NO: 1066663 - RNA, 22 nt, Human
ugggauuacaggcgugagccac

SEQ ID NO: 1066664 - RNA, 23 nt, Human
ugggauuacaggcgugagccacc

SEQ ID NO: 1066665 - RNA, 23 nt, Human
ugggauuacaggcgugagccacc

SEQ ID NO: 1066666 - RNA, 24 nt, Human
ugggauuacaggcgugagccaccg

SEQ ID NO: 1066667 - RNA, 18 nt, Human
uggggugcaguggcgcaa

SEQ ID NO: 1066668 - RNA, 24 nt, Human
uggggugcaguggcgcaaucucag

SEQ ID NO: 1066669 - RNA, 23 nt, Human
ugggugggagaagccaaacuucu

SEQ ID NO: 1066670 - RNA, 22 nt, Human
ugguacaauacauagacagcac

SEQ ID NO: 1066671 - RNA, 25 nt, Human
ugguacaauacauagacagcacuuu

SEQ ID NO: 1066672 - RNA, 21 nt, Human
uggugauaaaaacugggccac

SEQ ID NO: 1066673 - RNA, 22 nt, Human
ugguguugggcaagcuacauga

SEQ ID NO: 1066674 - RNA, 21 nt, Human
uguccaugcaaggagcucugc

SEQ ID NO: 1066675 - RNA, 20 nt, Human
uguugggcaagcuacaugac

SEQ ID NO: 1066676 - RNA, 21 nt, Human
uguuugcucaggucaccaugu

SEQ ID NO: 1066677 - RNA, 23 nt, Human
uuaaguuaaagaggcucucugag

SEQ ID NO: 1066678 - RNA, 20 nt, Human
uuacgcuagggagagaaagu

SEQ ID NO: 1066679 - RNA, 18 nt, Human
uuaguagagauaggguuu

SEQ ID NO: 1066680 - RNA, 22 nt, Human
uuaguagagauaggguuucacc

SEQ ID NO: 1066681 - RNA, 24 nt, Human
uuaguagagauaggguuucaccau

SEQ ID NO: 1066682 - RNA, 18 nt, Human
uuccaggucccggagcac

SEQ ID NO: 1066683 - RNA, 24 nt, Human
uuccaugcugcuggguucuuauuu

SEQ ID NO: 1066684 - RNA, 23 nt, Human
uucccaguugaaaggugguguug

SEQ ID NO: 1066685 - RNA, 19 nt, Human
uucucauaaaaugagaaau

SEQ ID NO: 1066686 - RNA, 21 nt, Human
uuuaccaccacuccucaaaug

SEQ ID NO: 1066687 - RNA, 19 nt, Human
uuucaccauguuagccagg

SEQ ID NO: 1066688 - RNA, 20 nt, Human
uuucaccauguuagccagga

SEQ ID NO: 1066689 - RNA, 21 nt, Human
uuuugggucuuuggagaacaa

SEQ ID NO: 1066690 - RNA, 20 nt, Human
uuuuguauuuuuaguagaga

SEQ ID NO: 1066691 - RNA, 18 nt, Human
uuuuguuuguuuuuuuaa

SEQ ID NO: 1066692 - RNA, 24 nt, Human
uuuuuaguagagauaggguuucac

SEQ ID NO: 1066693 - RNA, 21 nt, Human
uuuuuguauuuuuaguagaga

SEQ ID NO: 1066694 - RNA, 27 nt, Human
uaguaugucccuuucucuuagaagcuc

SEQ ID NO: 1066695 - RNA, 21 nt, Human
uauauuugcugccucacccua

SEQ ID NO: 1066696 - RNA, 21 nt, Human
acagccugaacuuccccagca

SEQ ID NO: 1066697 - RNA, 18 nt, Human
gauccuguguuggcagag

SEQ ID NO: 1066698 - RNA, 19 nt, Human
gccugaacuuccccagcac

SEQ ID NO: 1066699 - RNA, 21 nt, Human
uggcagaggcguuguaacugu

SEQ ID NO: 1066700 - RNA, 23 nt, Human
acacacacgaccaguaccuuaua

SEQ ID NO: 1066701 - RNA, 20 nt, Human
acccucauacugaacucugg

SEQ ID NO: 1066702 - RNA, 21 nt, Human
acccucauacugaacucuggc

SEQ ID NO: 1066703 - RNA, 22 nt, Human
aucaaggacaacuccuguggca

SEQ ID NO: 1066704 - RNA, 23 nt, Human
ccagaaagaaccacuaacggggc

SEQ ID NO: 1066705 - RNA, 25 nt, Human
cccucauacugaacucuggcuucau

SEQ ID NO: 1066706 - RNA, 22 nt, Human
ccucauacugaacucuggcuuc

SEQ ID NO: 1066707 - RNA, 23 nt, Human
ccugaccaggugucuuucucacc

SEQ ID NO: 1066708 - RNA, 21 nt, Human
uccacuaacacacacacgacc

SEQ ID NO: 1066709 - RNA, 21 nt, Human
uccagaaagaaccacuauuac

SEQ ID NO: 1066710 - RNA, 22 nt, Human
uccagaaagaaccacuauuacc

SEQ ID NO: 1066711 - RNA, 22 nt, Human
ucucacccacugguuucaacaa

SEQ ID NO: 1066712 - RNA, 22 nt, Human
ucuuuagucugacaccaugggc

SEQ ID NO: 1066713 - RNA, 18 nt, Human
ugacaccaugggcgagcc

SEQ ID NO: 1066714 - RNA, 22 nt, Human
ugucugugugacucccugucug

SEQ ID NO: 1066715 - RNA, 25 nt, Human
uucacaauuuuuauggauuuaucca

SEQ ID NO: 1066716 - RNA, 19 nt, Human
aaaaaaacacagauuuaaa

SEQ ID NO: 1066717 - RNA, 22 nt, Human
aaauguccuaccgaauacaucc

SEQ ID NO: 1066718 - RNA, 20 nt, Human
aagcaugcuuggcacaccag

SEQ ID NO: 1066719 - RNA, 19 nt, Human
aaggcuuuucauucaaccg

SEQ ID NO: 1066720 - RNA, 23 nt, Human
aaucagcucuuccugaauccaga

SEQ ID NO: 1066721 - RNA, 22 nt, Human
acaaaagaaaauuggggauugg

SEQ ID NO: 1066722 - RNA, 20 nt, Human
agaagaaaaucagagaaaac

SEQ ID NO: 1066723 - RNA, 21 nt, Human
agaagaaaaucagagaaaacc

SEQ ID NO: 1066724 - RNA, 19 nt, Human
agagaagaaaaucagagaa

SEQ ID NO: 1066725 - RNA, 23 nt, Human
agagaggcuucucugucuuaaaa

SEQ ID NO: 1066726 - RNA, 23 nt, Human
agaggaagagaagaaaaucagag

SEQ ID NO: 1066727 - RNA, 20 nt, Human
agcaaaaauuaacuccccau

SEQ ID NO: 1066728 - RNA, 21 nt, Human
aggaagagaagaaaaucagag

SEQ ID NO: 1066729 - RNA, 22 nt, Human
aggacggagggaguggaaaaaa

SEQ ID NO: 1066730 - RNA, 22 nt, Human
agggaguggaaaaaaacacaga

SEQ ID NO: 1066731 - RNA, 21 nt, Human
aggguaccuucaccugcacug

SEQ ID NO: 1066732 - RNA, 19 nt, Human
aggugguggagggaggccu

SEQ ID NO: 1066733 - RNA, 22 nt, Human
augcuuuuucagacccuuucuc

SEQ ID NO: 1066734 - RNA, 24 nt, Human
auugugugugugugugugugugug

SEQ ID NO: 1066735 - RNA, 20 nt, Human
cacccucaaaaaccucagga

SEQ ID NO: 1066736 - RNA, 18 nt, Human
cacugccacagucacccg

SEQ ID NO: 1066737 - RNA, 22 nt, Human
cagcaagagauguucaaacuaa

SEQ ID NO: 1066738 - RNA, 18 nt, Human
cagcaggaaaugccacgg

SEQ ID NO: 1066739 - RNA, 19 nt, Human
cagcucaaugccaggaaua

SEQ ID NO: 1066740 - RNA, 23 nt, Human
caggaaaugccacgggcagauua

SEQ ID NO: 1066741 - RNA, 20 nt, Human
caggugucaggggucaaugu

SEQ ID NO: 1066742 - RNA, 21 nt, Human
cagucacccggucucgcccca

SEQ ID NO: 1066743 - RNA, 24 nt, Human
caguuucugaguaccuacuauggg

SEQ ID NO: 1066744 - RNA, 22 nt, Human
caucagaaaugcccaaugacag

SEQ ID NO: 1066745 - RNA, 18 nt, Human
ccagaaaagcacaucaga

SEQ ID NO: 1066746 - RNA, 27 nt, Human
ccagaaaagcacaucagaaaugcccaa

SEQ ID NO: 1066747 - RNA, 22 nt, Human
ccaggacggagggaguggaaaa

SEQ ID NO: 1066748 - RNA, 21 nt, Human
ccaggucacccucaaaaaccu

SEQ ID NO: 1066749 - RNA, 21 nt, Human
cccaaugacagaccacagcca

SEQ ID NO: 1066750 - RNA, 24 nt, Human
cccaaugacagaccacaggguacc

SEQ ID NO: 1066751 - RNA, 18 nt, Human
cccacaaagucuaccccc

SEQ ID NO: 1066752 - RNA, 20 nt, Human
cccacaaagucuacccccgu

SEQ ID NO: 1066753 - RNA, 21 nt, Human
ccccagguaaucaaccuuuac

SEQ ID NO: 1066754 - RNA, 22 nt, Human
ccccugggagacugagcuucag

SEQ ID NO: 1066755 - RNA, 25 nt, Human
ccccugggagacugagcuucaguuu

SEQ ID NO: 1066756 - RNA, 24 nt, Human
cccuaagcugcugucagagggccc

SEQ ID NO: 1066757 - RNA, 25 nt, Human
cccuaagcugcugucagagggcccu

SEQ ID NO: 1066758 - RNA, 20 nt, Human
cccuguguucucaaguucag

SEQ ID NO: 1066759 - RNA, 18 nt, Human
ccgaagucgcagcugcgc

SEQ ID NO: 1066760 - RNA, 18 nt, Human
ccggugcugggcuuggca

SEQ ID NO: 1066761 - RNA, 19 nt, Human
ccucaaaaaccucaggagg

SEQ ID NO: 1066762 - RNA, 26 nt, Human
cggacuaacuggcgaauuucccacaa

SEQ ID NO: 1066763 - RNA, 20 nt, Human
cuacuucacucuagucuuag

SEQ ID NO: 1066764 - RNA, 20 nt, Human
cuccuauucccaccugcacc

SEQ ID NO: 1066765 - RNA, 19 nt, Human
cuugucagcauccugugcu

SEQ ID NO: 1066766 - RNA, 21 nt, Human
gaaaaccuucuauugaugccg

SEQ ID NO: 1066767 - RNA, 19 nt, Human
gaagagaagaaaaucagag

SEQ ID NO: 1066768 - RNA, 20 nt, Human
gaggaagagaagaaaaucag

SEQ ID NO: 1066769 - RNA, 23 nt, Human
gaggaagagaagaaaaucagaga

SEQ ID NO: 1066770 - RNA, 21 nt, Human
gaggcccagaggaguggcugc

SEQ ID NO: 1066771 - RNA, 23 nt, Human
gcaaaaauuaacuccccauggca

SEQ ID NO: 1066772 - RNA, 24 nt, Human
gcagacagccgaagucgcagcugc

SEQ ID NO: 1066773 - RNA, 22 nt, Human
gcucuggcaucuccuauuccca

SEQ ID NO: 1066774 - RNA, 28 nt, Human
ggcaauaaagaacaaggugguggaggga

SEQ ID NO: 1066775 - RNA, 20 nt, Human
ggggauugguaagaaagccc

SEQ ID NO: 1066776 - RNA, 21 nt, Human
guaaagagaauacagcgucuc

SEQ ID NO: 1066777 - RNA, 23 nt, Human
gucagagggcccuguguucucaa

SEQ ID NO: 1066778 - RNA, 21 nt, Human
gugugugugugugugugugug

SEQ ID NO: 1066779 - RNA, 21 nt, Human
gugugugugugugugugugug

SEQ ID NO: 1066780 - RNA, 21 nt, Human
gugugugugugugugugugug

SEQ ID NO: 1066781 - RNA, 19 nt, Human
uaaaugaaauguccuaccg

SEQ ID NO: 1066782 - RNA, 21 nt, Human
uaccugacagcugugacuucc

SEQ ID NO: 1066783 - RNA, 19 nt, Human
uaccuucaccugcacugcc

SEQ ID NO: 1066784 - RNA, 19 nt, Human
uacgaugaagaauugggga

SEQ ID NO: 1066785 - RNA, 24 nt, Human
uaggaucuguguuaugcuugcagg

SEQ ID NO: 1066786 - RNA, 21 nt, Human
uauccugauauaaaugaaaug

SEQ ID NO: 1066787 - RNA, 20 nt, Human
uaugcuugcaggugucaggg

SEQ ID NO: 1066788 - RNA, 18 nt, Human
uauucccaccugcaccau

SEQ ID NO: 1066789 - RNA, 19 nt, Human
ucaaggcuuuucauucaac

SEQ ID NO: 1066790 - RNA, 18 nt, Human
ucccuaagcugcugucag

SEQ ID NO: 1066791 - RNA, 23 nt, Human
uccucagcuaaagcagcucuggc

SEQ ID NO: 1066792 - RNA, 21 nt, Human
uccugaauccagaaaagcaca

SEQ ID NO: 1066793 - RNA, 25 nt, Human
uccugauauaaaugaaauguccuac

SEQ ID NO: 1066794 - RNA, 18 nt, Human
ucucaggauacugaugga

SEQ ID NO: 1066795 - RNA, 19 nt, Human
ucugaguaccuacuauggg

SEQ ID NO: 1066796 - RNA, 18 nt, Human
ucuggccagucuccuggc

SEQ ID NO: 1066797 - RNA, 23 nt, Human
ugaaagagagcugaaucagccaa

SEQ ID NO: 1066798 - RNA, 21 nt, Human
ugaaauggaaggauucugcca

SEQ ID NO: 1066799 - RNA, 23 nt, Human
ugaaucagccaauauccugauau

SEQ ID NO: 1066800 - RNA, 18 nt, Human
ugacuguuugcuuuccuc

SEQ ID NO: 1066801 - RNA, 20 nt, Human
ugagaagguccaggguaccu

SEQ ID NO: 1066802 - RNA, 23 nt, Human
ugagcacugcugacuguuugcuu

SEQ ID NO: 1066803 - RNA, 21 nt, Human
ugagccuguugggagagaugc

SEQ ID NO: 1066804 - RNA, 26 nt, Human
ugauuuguaaagagaauacagcgucu

SEQ ID NO: 1066805 - RNA, 18 nt, Human
ugccaaucuggaagggau

SEQ ID NO: 1066806 - RNA, 19 nt, Human
ugccacagucacccggucu

SEQ ID NO: 1066807 - RNA, 18 nt, Human
ugcccaaugacagaccac

SEQ ID NO: 1066808 - RNA, 23 nt, Human
uggaucauauagcccuccaauca

SEQ ID NO: 1066809 - RNA, 18 nt, Human
uggcaucuccuauuccca

SEQ ID NO: 1066810 - RNA, 19 nt, Human
uggcuccugagagaggcuu

SEQ ID NO: 1066811 - RNA, 21 nt, Human
ugggacaagaugcugauauug

SEQ ID NO: 1066812 - RNA, 21 nt, Human
ugguaagaaagcccagccuga

SEQ ID NO: 1066813 - RNA, 23 nt, Human
ugucagcauccugugcuugaggc

SEQ ID NO: 1066814 - RNA, 20 nt, Human
uguguguguguguguguaug

SEQ ID NO: 1066815 - RNA, 18 nt, Human
ugugugugugugugugug

SEQ ID NO: 1066816 - RNA, 18 nt, Human
ugugugugugugugugug

SEQ ID NO: 1066817 - RNA, 18 nt, Human
ugugugugugugugugug

SEQ ID NO: 1066818 - RNA, 18 nt, Human
ugugugugugugugugug

SEQ ID NO: 1066819 - RNA, 18 nt, Human
ugugugugugugugugug

SEQ ID NO: 1066820 - RNA, 18 nt, Human
ugugugugugugugugug

SEQ ID NO: 1066821 - RNA, 18 nt, Human
ugugugugugugugugug

SEQ ID NO: 1066822 - RNA, 18 nt, Human
ugugugugugugugugug

SEQ ID NO: 1066823 - RNA, 18 nt, Human
ugugugugugugugugug

SEQ ID NO: 1066824 - RNA, 18 nt, Human
ugugugugugugugugug

SEQ ID NO: 1066825 - RNA, 20 nt, Human
ugugugugugugugugugug

SEQ ID NO: 1066826 - RNA, 21 nt, Human
ugugugugugugugugugugu

SEQ ID NO: 1066827 - RNA, 21 nt, Human
ugugugugugugugugugugu

SEQ ID NO: 1066828 - RNA, 21 nt, Human
ugugugugugugugugugugu

SEQ ID NO: 1066829 - RNA, 21 nt, Human
ugugugugugugugugugugu

SEQ ID NO: 1066830 - RNA, 21 nt, Human
ugugugugugugugugugugu

SEQ ID NO: 1066831 - RNA, 21 nt, Human
ugugugugugugugugugugu

SEQ ID NO: 1066832 - RNA, 21 nt, Human
ugugugugugugugugugugu

SEQ ID NO: 1066833 - RNA, 21 nt, Human
ugugugugugugugugugugu

SEQ ID NO: 1066834 - RNA, 21 nt, Human
ugugugugugugugugugugu

SEQ ID NO: 1066835 - RNA, 21 nt, Human
ugugugugugugugugugugu

SEQ ID NO: 1066836 - RNA, 21 nt, Human
ugugugugugugugugugugu

SEQ ID NO: 1066837 - RNA, 21 nt, Human
ugugugugugugugugugugu

SEQ ID NO: 1066838 - RNA, 21 nt, Human
ugugugugugugugugugugu

SEQ ID NO: 1066839 - RNA, 21 nt, Human
ugugugugugugugugugugu

SEQ ID NO: 1066840 - RNA, 21 nt, Human
ugugugugugugugugugugu

SEQ ID NO: 1066841 - RNA, 21 nt, Human
ugugugugugugugugugugu

SEQ ID NO: 1066842 - RNA, 22 nt, Human
ugugugugugugugugugugua

SEQ ID NO: 1066843 - RNA, 22 nt, Human
ugugugugugugugugugugug

SEQ ID NO: 1066844 - RNA, 22 nt, Human
ugugugugugugugugugugug

SEQ ID NO: 1066845 - RNA, 22 nt, Human
ugugugugugugugugugugug

SEQ ID NO: 1066846 - RNA, 22 nt, Human
ugugugugugugugugugugug

SEQ ID NO: 1066847 - RNA, 21 nt, Human
uucccuaagcugcugucagag

SEQ ID NO: 1066848 - RNA, 18 nt, Human
uucucccaggucacccuc

SEQ ID NO: 1066849 - RNA, 19 nt, Human
uugcaggugucagggguca

SEQ ID NO: 1066850 - RNA, 20 nt, Human
uugcaggugucaggggucaa

SEQ ID NO: 1066851 - RNA, 24 nt, Human
uugcuuuccucagcuaaagcagcu

SEQ ID NO: 1066852 - RNA, 22 nt, Human
augguguucuuaaagugaacac

SEQ ID NO: 1066853 - RNA, 20 nt, Human
uggccugagcaguuucaugg

SEQ ID NO: 1066854 - RNA, 21 nt, Human
aaaaugccaaguccacaaaug

SEQ ID NO: 1066855 - RNA, 19 nt, Human
aaagcaaaagagauccuga

SEQ ID NO: 1066856 - RNA, 26 nt, Human
aacaaaacaagugcuuaaaaaaaaaa

SEQ ID NO: 1066857 - RNA, 18 nt, Human
aagagauccugacaugug

SEQ ID NO: 1066858 - RNA, 18 nt, Human
aagcaaaagagauccuga

SEQ ID NO: 1066859 - RNA, 20 nt, Human
aagcaaaagagauccugaca

SEQ ID NO: 1066860 - RNA, 24 nt, Human
aagcaaaagagauccugacaugug

SEQ ID NO: 1066861 - RNA, 18 nt, Human
acaugugaaaccaauaca

SEQ ID NO: 1066862 - RNA, 19 nt, Human
acguggugcgagggacugg

SEQ ID NO: 1066863 - RNA, 24 nt, Human
acucccacgcaacagggcagaggu

SEQ ID NO: 1066864 - RNA, 26 nt, Human
agaaagcggagccaaaaggggcggga

SEQ ID NO: 1066865 - RNA, 21 nt, Human
agcagcaacguuuuuuuuuuu

SEQ ID NO: 1066866 - RNA, 19 nt, Human
agcugggggcgcggccagg

SEQ ID NO: 1066867 - RNA, 20 nt, Human
caaaacaagugcuuaaaaaa

SEQ ID NO: 1066868 - RNA, 22 nt, Human
caaaagcagaguuagcauuuuc

SEQ ID NO: 1066869 - RNA, 22 nt, Human
caaaaugccaaguccacaaaug

SEQ ID NO: 1066870 - RNA, 19 nt, Human
cacccccaagucuagcagc

SEQ ID NO: 1066871 - RNA, 19 nt, Human
cacucccacgcaacagggc

SEQ ID NO: 1066872 - RNA, 23 nt, Human
cagcugggggcgcggccaggagg

SEQ ID NO: 1066873 - RNA, 23 nt, Human
cccacugugcucugaauacaguc

SEQ ID NO: 1066874 - RNA, 19 nt, Human
ccucacaggcaccugccgc

SEQ ID NO: 1066875 - RNA, 21 nt, Human
ccucacaggcaccugccgccu

SEQ ID NO: 1066876 - RNA, 21 nt, Human
cgccucggcuggcagggagcu

SEQ ID NO: 1066877 - RNA, 19 nt, Human
cggcaggaaugggcgcagc

SEQ ID NO: 1066878 - RNA, 26 nt, Human
cggcggcaggaaugggcgcagcggag

SEQ ID NO: 1066879 - RNA, 25 nt, Human
cggggccgacuagcuugaagacgcg

SEQ ID NO: 1066880 - RNA, 21 nt, Human
cucaaggcacagaguagaaga

SEQ ID NO: 1066881 - RNA, 25 nt, Human
cucacaggcaccugccgccugucuc

SEQ ID NO: 1066882 - RNA, 20 nt, Human
cugacggcggugggcgcucc

SEQ ID NO: 1066883 - RNA, 24 nt, Human
cuuugugacagagcuccugaguug

SEQ ID NO: 1066884 - RNA, 23 nt, Human
gagcuccugagugugugcagccc

SEQ ID NO: 1066885 - RNA, 18 nt, Human
gagggcacguggugcgag

SEQ ID NO: 1066886 - RNA, 20 nt, Human
gccaucuuggugggugaguu

SEQ ID NO: 1066887 - RNA, 20 nt, Human
gcggugggcgcuccggggcu

SEQ ID NO: 1066888 - RNA, 20 nt, Human
gcugcggugcgcagggucuc

SEQ ID NO: 1066889 - RNA, 22 nt, Human
ggagccaaaaggggcgggagcu

SEQ ID NO: 1066890 - RNA, 21 nt, Human
ggcagagguucgccccgccuc

SEQ ID NO: 1066891 - RNA, 19 nt, Human
gggcgcagcggagagggcu

SEQ ID NO: 1066892 - RNA, 19 nt, Human
uaaagcagcggcgcuccuc

SEQ ID NO: 1066893 - RNA, 18 nt, Human
uaacaggggaggcgcgac

SEQ ID NO: 1066894 - RNA, 19 nt, Human
uaagaaguccaacauccuc

SEQ ID NO: 1066895 - RNA, 21 nt, Human
uaaguggcacagggaauggaa

SEQ ID NO: 1066896 - RNA, 28 nt, Human
ugaauacagucucugcagcuccagugug

SEQ ID NO: 1066897 - RNA, 18 nt, Human
ugagugugugcagccccc

SEQ ID NO: 1066898 - RNA, 23 nt, Human
ugcacaaagcucaaggcacagag

SEQ ID NO: 1066899 - RNA, 26 nt, Human
ugccaaguccacaaaugaacaaaaca

SEQ ID NO: 1066900 - RNA, 18 nt, Human
ugcgagggacuggccgcg

SEQ ID NO: 1066901 - RNA, 19 nt, Human
ugcuacagggccacaccug

SEQ ID NO: 1066902 - RNA, 21 nt, Human
uggaaagggcagcugggggcg

SEQ ID NO: 1066903 - RNA, 23 nt, Human
uggcagggagcuaacaggggagg

SEQ ID NO: 1066904 - RNA, 19 nt, Human
uggcccccggcacccgccc

SEQ ID NO: 1066905 - RNA, 21 nt, Human
ugggagaggcagccguaaagc

SEQ ID NO: 1066906 - RNA, 19 nt, Human
ugugaaaccaauacaccaa

SEQ ID NO: 1066907 - RNA, 21 nt, Human
uuucuauuuucccacuuaauu

SEQ ID NO: 1066908 - RNA, 18 nt, Human
uuuuuuaguuuuuguuuu

SEQ ID NO: 1066909 - RNA, 25 nt, Human
aaauccuccacgaacccacuacucu

SEQ ID NO: 1066910 - RNA, 20 nt, Human
aaccaaaagccuaaagacaa

SEQ ID NO: 1066911 - RNA, 23 nt, Human
aggcagggguggugggagggugc

SEQ ID NO: 1066912 - RNA, 18 nt, Human
agggagccaucugcuugg

SEQ ID NO: 1066913 - RNA, 21 nt, Human
agucaugggggaugggagaga

SEQ ID NO: 1066914 - RNA, 21 nt, Human
cagcaagagugaaggcauggg

SEQ ID NO: 1066915 - RNA, 23 nt, Human
caggagaggcuguuguccugaug

SEQ ID NO: 1066916 - RNA, 20 nt, Human
ccuccacgaacccacuacuc

SEQ ID NO: 1066917 - RNA, 18 nt, Human
cuggcaggcagggguggu

SEQ ID NO: 1066918 - RNA, 23 nt, Human
cuuggcccuguguuucucagcga

SEQ ID NO: 1066919 - RNA, 19 nt, Human
gcagcuaggaggaggcugg

SEQ ID NO: 1066920 - RNA, 18 nt, Human
gcugguccugagugccag

SEQ ID NO: 1066921 - RNA, 19 nt, Human
ggugggagggugcucugag

SEQ ID NO: 1066922 - RNA, 23 nt, Human
guccugaugcaggggucugggag

SEQ ID NO: 1066923 - RNA, 22 nt, Human
uccacgaacccacuacucuaaa

SEQ ID NO: 1066924 - RNA, 18 nt, Human
uccuccacgaacccacua

SEQ ID NO: 1066925 - RNA, 20 nt, Human
uccugagugccaggagaggc

SEQ ID NO: 1066926 - RNA, 23 nt, Human
ugaaggcauggggucagagccga

SEQ ID NO: 1066927 - RNA, 19 nt, Human
ugaugcaggggucugggag

SEQ ID NO: 1066928 - RNA, 24 nt, Human
ugcaaaccaaaagccuaaagacaa

SEQ ID NO: 1066929 - RNA, 19 nt, Human
uggcuggcacuggcaggca

SEQ ID NO: 1066930 - RNA, 26 nt, Human
ugggggaugggagagagaagggagcc

SEQ ID NO: 1066931 - RNA, 26 nt, Human
aaaauucucugcacacaaauccuuuc

SEQ ID NO: 1066932 - RNA, 18 nt, Human
uauaaaaaaauucucugc

SEQ ID NO: 1066933 - RNA, 22 nt, Human
aacuucuuuccaauauauucua

SEQ ID NO: 1066934 - RNA, 23 nt, Human
aacuucuuuccaauauauucuac

SEQ ID NO: 1066935 - RNA, 20 nt, Human
agagcaaauccaacuuaaaa

SEQ ID NO: 1066936 - RNA, 19 nt, Human
cuuucugcuggacucgcuc

SEQ ID NO: 1066937 - RNA, 18 nt, Human
gacucgcucacaggcugc

SEQ ID NO: 1066938 - RNA, 21 nt, Human
gcaguugaaauccucugguuc

SEQ ID NO: 1066939 - RNA, 20 nt, Human
ucacugcagcuuucugcugg

SEQ ID NO: 1066940 - RNA, 23 nt, Human
ucacugcagcuuucugcuggacu

SEQ ID NO: 1066941 - RNA, 27 nt, Human
ucacugcagcuuucugcugggggcccu

SEQ ID NO: 1066942 - RNA, 24 nt, Human
uccaacuuaaaaaaaaaacuugcu

SEQ ID NO: 1066943 - RNA, 18 nt, Human
ucucggcugagacgagcc

SEQ ID NO: 1066944 - RNA, 21 nt, Human
ugggaagagcaaauccaacuu

SEQ ID NO: 1066945 - RNA, 24 nt, Human
uuccaaaguuuuaaaaaaugaggc

SEQ ID NO: 1066946 - RNA, 20 nt, Human
aaacaaaggccuauagccuu

SEQ ID NO: 1066947 - RNA, 22 nt, Human
aagcuucugagguggggaacag

SEQ ID NO: 1066948 - RNA, 23 nt, Human
aagcuucugagguggggaacagu

SEQ ID NO: 1066949 - RNA, 26 nt, Human
aaggaagcugaguaaugaaugagaug

SEQ ID NO: 1066950 - RNA, 21 nt, Human
acccaaucuggaaagaaggcc

SEQ ID NO: 1066951 - RNA, 19 nt, Human
acuauccugguggcgcuag

SEQ ID NO: 1066952 - RNA, 24 nt, Human
acucuggauucugcuguaaagaga

SEQ ID NO: 1066953 - RNA, 25 nt, Human
acugcuuccuacaaacaaaggccua

SEQ ID NO: 1066954 - RNA, 18 nt, Human
agacaauauuucugcuaa

SEQ ID NO: 1066955 - RNA, 18 nt, Human
agcccccaguccucccag

SEQ ID NO: 1066956 - RNA, 18 nt, Human
agccguuggaagauagca

SEQ ID NO: 1066957 - RNA, 21 nt, Human
agccucucagccucguugccu

SEQ ID NO: 1066958 - RNA, 18 nt, Human
agcuacugagugaguagu

SEQ ID NO: 1066959 - RNA, 21 nt, Human
agcuacugagugaguaguguu

SEQ ID NO: 1066960 - RNA, 23 nt, Human
aggcagaaccuuggauucucuuu

SEQ ID NO: 1066961 - RNA, 20 nt, Human
aggcagaguugcaaaugggc

SEQ ID NO: 1066962 - RNA, 24 nt, Human
aggcagaguugcaaaugggcugag

SEQ ID NO: 1066963 - RNA, 20 nt, Human
agggaacagccugcuugucu

SEQ ID NO: 1066964 - RNA, 22 nt, Human
aguaggcacagcugccucagga

SEQ ID NO: 1066965 - RNA, 19 nt, Human
agugaagcuugaauguaau

SEQ ID NO: 1066966 - RNA, 19 nt, Human
agugcugugguuacagcug

SEQ ID NO: 1066967 - RNA, 19 nt, Human
aguggucucugcccagccu

SEQ ID NO: 1066968 - RNA, 19 nt, Human
aguggucucugcccagccu

SEQ ID NO: 1066969 - RNA, 24 nt, Human
agugugcaaugggcuuccgaggau

SEQ ID NO: 1066970 - RNA, 22 nt, Human
auucagguucaccaaacccaau

SEQ ID NO: 1066971 - RNA, 23 nt, Human
auugugugaaaagaaaaauacua

SEQ ID NO: 1066972 - RNA, 19 nt, Human
caagagaacagaggcagag

SEQ ID NO: 1066973 - RNA, 25 nt, Human
caagcaguccucuuacccaugguca

SEQ ID NO: 1066974 - RNA, 20 nt, Human
cacaguuauuuucuggagac

SEQ ID NO: 1066975 - RNA, 19 nt, Human
cacgugcaugggaggaggc

SEQ ID NO: 1066976 - RNA, 24 nt, Human
cacuauaucuaucauuuguuuuug

SEQ ID NO: 1066977 - RNA, 23 nt, Human
cacuccaguggucucugcccagc

SEQ ID NO: 1066978 - RNA, 19 nt, Human
cacugcuuccuacaaacaa

SEQ ID NO: 1066979 - RNA, 23 nt, Human
cagaggaagccaaguuuuccuua

SEQ ID NO: 1066980 - RNA, 18 nt, Human
caggccagagaagcccaa

SEQ ID NO: 1066981 - RNA, 22 nt, Human
cagggaacagccugcuugucuu

SEQ ID NO: 1066982 - RNA, 22 nt, Human
caguggucucugcccagccucu

SEQ ID NO: 1066983 - RNA, 19 nt, Human
cauugugaccuacacgguc

SEQ ID NO: 1066984 - RNA, 22 nt, Human
ccaaacagaaugcaagagaaca

SEQ ID NO: 1066985 - RNA, 20 nt, Human
ccaccuucuauuucauacca

SEQ ID NO: 1066986 - RNA, 23 nt, Human
ccaggaagguaaacuacaaucca

SEQ ID NO: 1066987 - RNA, 23 nt, Human
ccauucagguucaccaaacccaa

SEQ ID NO: 1066988 - RNA, 19 nt, Human
cccaggauaugcugaggcc

SEQ ID NO: 1066989 - RNA, 24 nt, Human
cccauggucaucguuucuccaccu

SEQ ID NO: 1066990 - RNA, 19 nt, Human
ccccagacccagccggccc

SEQ ID NO: 1066991 - RNA, 19 nt, Human
ccgcccaguuaguuccaug

SEQ ID NO: 1066992 - RNA, 20 nt, Human
ccgccgccuccgggccgucc

SEQ ID NO: 1066993 - RNA, 21 nt, Human
ccggucggucaggcuuucucu

SEQ ID NO: 1066994 - RNA, 22 nt, Human
ccuauaaugggacagagaggac

SEQ ID NO: 1066995 - RNA, 23 nt, Human
ccuauagccuucuuagaucugcc

SEQ ID NO: 1066996 - RNA, 20 nt, Human
ccucaggaucuccaacccag

SEQ ID NO: 1066997 - RNA, 20 nt, Human
ccuuggcacaagcaguccuc

SEQ ID NO: 1066998 - RNA, 19 nt, Human
cguuggaagauagcacagg

SEQ ID NO: 1066999 - RNA, 19 nt, Human
cucauugugaccuacacgg

SEQ ID NO: 1067000 - RNA, 21 nt, Human
cugagcccgagccccagaccc

SEQ ID NO: 1067001 - RNA, 19 nt, Human
cugcugccuauuuagcacc

SEQ ID NO: 1067002 - RNA, 25 nt, Human
cuugggccaccugcagaagguggcu

SEQ ID NO: 1067003 - RNA, 22 nt, Human
cuuucucucucucccgcccccc

SEQ ID NO: 1067004 - RNA, 21 nt, Human
gaagacguauaacgauccuuc

SEQ ID NO: 1067005 - RNA, 20 nt, Human
gagggaugagcagaggggaa

SEQ ID NO: 1067006 - RNA, 18 nt, Human
gcaaaugggcugagggag

SEQ ID NO: 1067007 - RNA, 26 nt, Human
ggauaugcugaggccuuugguuucau

SEQ ID NO: 1067008 - RNA, 18 nt, Human
ggaugagcagaggggaac

SEQ ID NO: 1067009 - RNA, 24 nt, Human
gggcaggaagcuucugaggugggg

SEQ ID NO: 1067010 - RNA, 20 nt, Human
gucaucguuucuccaccagg

SEQ ID NO: 1067011 - RNA, 19 nt, Human
guccgaucuugguucuugg

SEQ ID NO: 1067012 - RNA, 20 nt, Human
guggucucugcccagccucu

SEQ ID NO: 1067013 - RNA, 24 nt, Human
uacagacaauauuucugcuaacua

SEQ ID NO: 1067014 - RNA, 25 nt, Human
uaccccagaaggcauucaggccaga

SEQ ID NO: 1067015 - RNA, 20 nt, Human
uagcuggccauugguuggca

SEQ ID NO: 1067016 - RNA, 22 nt, Human
uaggaaacuaaagggcaaccaa

SEQ ID NO: 1067017 - RNA, 19 nt, Human
uagguaacagcccccaguc

SEQ ID NO: 1067018 - RNA, 24 nt, Human
uagguaacagcccccaguccuccc

SEQ ID NO: 1067019 - RNA, 19 nt, Human
uaugacaacauuucacucc

SEQ ID NO: 1067020 - RNA, 19 nt, Human
uaugguggaggaugucuga

SEQ ID NO: 1067021 - RNA, 19 nt, Human
ucaaacagagauaaugagc

SEQ ID NO: 1067022 - RNA, 18 nt, Human
ucaaagguagucaugugu

SEQ ID NO: 1067023 - RNA, 23 nt, Human
ucaaagguagucaugugugaauu

SEQ ID NO: 1067024 - RNA, 21 nt, Human
ucagcgagacuuucacauagg

SEQ ID NO: 1067025 - RNA, 22 nt, Human
ucaggccagagaagcccaaaag

SEQ ID NO: 1067026 - RNA, 22 nt, Human
uccaacccaggcuuccauugcc

SEQ ID NO: 1067027 - RNA, 22 nt, Human
ucccaggauaugcugaggccuu

SEQ ID NO: 1067028 - RNA, 19 nt, Human
ucccagugguuggaagccu

SEQ ID NO: 1067029 - RNA, 19 nt, Human
uccgcgcucaccgccaggg

SEQ ID NO: 1067030 - RNA, 22 nt, Human
uccucaaaaucugguuuuagca

SEQ ID NO: 1067031 - RNA, 22 nt, Human
uccucaucaccaagggcuucau

SEQ ID NO: 1067032 - RNA, 25 nt, Human
ucuaacuaauuacuuuucauucuaa

SEQ ID NO: 1067033 - RNA, 22 nt, Human
ucucugggaccauucuucuggg

SEQ ID NO: 1067034 - RNA, 21 nt, Human
ucucugggcaggaagcuucug

SEQ ID NO: 1067035 - RNA, 18 nt, Human
ucugccaucaaaguagag

SEQ ID NO: 1067036 - RNA, 25 nt, Human
ucuucugggcucaucugccuagcuu

SEQ ID NO: 1067037 - RNA, 19 nt, Human
ugaggagggaugagcagag

SEQ ID NO: 1067038 - RNA, 18 nt, Human
ugcaagagaacagaggca

SEQ ID NO: 1067039 - RNA, 24 nt, Human
ugcuguaccaguuucugaggcugu

SEQ ID NO: 1067040 - RNA, 19 nt, Human
uggaagauagcacagggaa

SEQ ID NO: 1067041 - RNA, 18 nt, Human
uggaagccaaucagagaa

SEQ ID NO: 1067042 - RNA, 19 nt, Human
uggacaaguggauuugguc

SEQ ID NO: 1067043 - RNA, 21 nt, Human
uggaggcagaagcaaugagga

SEQ ID NO: 1067044 - RNA, 20 nt, Human
ugguaauggucagccugcca

SEQ ID NO: 1067045 - RNA, 18 nt, Human
uggucucugcccagccuc

SEQ ID NO: 1067046 - RNA, 20 nt, Human
uggugugaaagugauguaug

SEQ ID NO: 1067047 - RNA, 18 nt, Human
ugucugaaugaggaggga

SEQ ID NO: 1067048 - RNA, 26 nt, Human
ugugccuuucuauaggggauggcugu

SEQ ID NO: 1067049 - RNA, 21 nt, Human
uguugcauauggaaauacccc

SEQ ID NO: 1067050 - RNA, 22 nt, Human
uguugggggucucugauuccuc

SEQ ID NO: 1067051 - RNA, 22 nt, Human
uuacguggaggcagaagcaaug

SEQ ID NO: 1067052 - RNA, 21 nt, Human
uuaguuccaugcugaaauguu

SEQ ID NO: 1067053 - RNA, 18 nt, Human
uucagucgucugccauca

SEQ ID NO: 1067054 - RNA, 22 nt, Human
uucucugggaccauucuucugg

SEQ ID NO: 1067055 - RNA, 22 nt, Human
uuggaauaacgauuuccagggc

SEQ ID NO: 1067056 - RNA, 23 nt, Human
uuuaaauauucuguccuuccagg

SEQ ID NO: 1067057 - RNA, 22 nt, Human
uuuggucacugaaaucgucugg

SEQ ID NO: 1067058 - RNA, 18 nt, Human
aacuguguaaccuaaggc

SEQ ID NO: 1067059 - RNA, 18 nt, Human
aacuguguaaccuaaggc

SEQ ID NO: 1067060 - RNA, 18 nt, Human
aagcuuuuagcauggugc

SEQ ID NO: 1067061 - RNA, 21 nt, Human
aauccugagcccgggaggagg

SEQ ID NO: 1067062 - RNA, 30 nt, Human
acagcggcaggaaaagcacaacugaggccu

SEQ ID NO: 1067063 - RNA, 20 nt, Human
acccuccccaggcccagguc

SEQ ID NO: 1067064 - RNA, 19 nt, Human
acuccgucucaccgccccc

SEQ ID NO: 1067065 - RNA, 21 nt, Human
agcccagggcagagcuagaug

SEQ ID NO: 1067066 - RNA, 21 nt, Human
agcugcauguuggaggaagag

SEQ ID NO: 1067067 - RNA, 20 nt, Human
aggaaaagcacaacugaggc

SEQ ID NO: 1067068 - RNA, 24 nt, Human
aggaggggccugaggucaguggua

SEQ ID NO: 1067069 - RNA, 24 nt, Human
aggcagaggcucaggggagggugc

SEQ ID NO: 1067070 - RNA, 23 nt, Human
aggcccagguccaaaccccggcc

SEQ ID NO: 1067071 - RNA, 23 nt, Human
aggggacaaagagagguuccaga

SEQ ID NO: 1067072 - RNA, 18 nt, Human
aguacagugcccugugcc

SEQ ID NO: 1067073 - RNA, 20 nt, Human
aguacagugcccugugccag

SEQ ID NO: 1067074 - RNA, 20 nt, Human
auccugagcccgggaggagg

SEQ ID NO: 1067075 - RNA, 18 nt, Human
caaacagcgacccucccc

SEQ ID NO: 1067076 - RNA, 22 nt, Human
caacuccucccuguggagugau

SEQ ID NO: 1067077 - RNA, 21 nt, Human
caccgcccccugucuccagga

SEQ ID NO: 1067078 - RNA, 20 nt, Human
cacuaagugcucuauucaug

SEQ ID NO: 1067079 - RNA, 23 nt, Human
cagaaagcacacugggcuagaag

SEQ ID NO: 1067080 - RNA, 25 nt, Human
cagaugaccugcagcggcccuuccu

SEQ ID NO: 1067081 - RNA, 19 nt, Human
cagcgacccuccccaggcc

SEQ ID NO: 1067082 - RNA, 21 nt, Human
cagcgacccuccccaggccca

SEQ ID NO: 1067083 - RNA, 23 nt, Human
cagcggcccuuccugcucagucu

SEQ ID NO: 1067084 - RNA, 19 nt, Human
caggaaaagcacaacugag

SEQ ID NO: 1067085 - RNA, 24 nt, Human
cagggucuguggugaagccagagg

SEQ ID NO: 1067086 - RNA, 18 nt, Human
caguggcuccucagggaa

SEQ ID NO: 1067087 - RNA, 22 nt, Human
caguggcuccucagggaaccca

SEQ ID NO: 1067088 - RNA, 20 nt, Human
ccaggcaccaugcuaacagc

SEQ ID NO: 1067089 - RNA, 22 nt, Human
cccaggaggggccugaggucag

SEQ ID NO: 1067090 - RNA, 24 nt, Human
cccagggcagagcuagaugcggcc

SEQ ID NO: 1067091 - RNA, 20 nt, Human
cccagugggaauagcagguu

SEQ ID NO: 1067092 - RNA, 20 nt, Human
cccaugggacccgaggcagg

SEQ ID NO: 1067093 - RNA, 22 nt, Human
ccccaggcccagguccaaaccc

SEQ ID NO: 1067094 - RNA, 23 nt, Human
ccccaggcccagguccaaaccuu

SEQ ID NO: 1067095 - RNA, 20 nt, Human
ccccggccacugguguggcc

SEQ ID NO: 1067096 - RNA, 21 nt, Human
cccugugccaggcaccaugcc

SEQ ID NO: 1067097 - RNA, 22 nt, Human
cccugugccaggcaccaugcua

SEQ ID NO: 1067098 - RNA, 24 nt, Human
ccugcagcggcccuuccugcucag

SEQ ID NO: 1067099 - RNA, 22 nt, Human
ccuuacuccagaccugcucuuc

SEQ ID NO: 1067100 - RNA, 24 nt, Human
cgcuugagucccccagccuuacuc

SEQ ID NO: 1067101 - RNA, 21 nt, Human
cggcaggaaaagcacaacuga

SEQ ID NO: 1067102 - RNA, 21 nt, Human
cucacuccaacauuucaaaga

SEQ ID NO: 1067103 - RNA, 19 nt, Human
cuccuguuuucuggcaaug

SEQ ID NO: 1067104 - RNA, 24 nt, Human
cugaggcagaggcucaggggaggg

SEQ ID NO: 1067105 - RNA, 23 nt, Human
cugcagcggcccuuccugcucag

SEQ ID NO: 1067106 - RNA, 19 nt, Human
cugcucagucuucugggau

SEQ ID NO: 1067107 - RNA, 21 nt, Human
cuggaaaagcgcaucuggagc

SEQ ID NO: 1067108 - RNA, 18 nt, Human
cugguguggccugggcag

SEQ ID NO: 1067109 - RNA, 20 nt, Human
gaagaggggucuggacagug

SEQ ID NO: 1067110 - RNA, 21 nt, Human
gaccugcucuuccuccuguuu

SEQ ID NO: 1067111 - RNA, 21 nt, Human
gagacugggcugauuuucagc

SEQ ID NO: 1067112 - RNA, 22 nt, Human
gagcugcauguuggaggaagag

SEQ ID NO: 1067113 - RNA, 21 nt, Human
gaggcagaggcucaggggagg

SEQ ID NO: 1067114 - RNA, 27 nt, Human
gaggcaggacagcacagcggcaggaaa

SEQ ID NO: 1067115 - RNA, 24 nt, Human
gcaaagcagaaagcacacugggcu

SEQ ID NO: 1067116 - RNA, 27 nt, Human
gcagcggcccuuccugcucagucuucu

SEQ ID NO: 1067117 - RNA, 20 nt, Human
gcagggucuguggugaagcc

SEQ ID NO: 1067118 - RNA, 23 nt, Human
gcccaggaggggccugaggucag

SEQ ID NO: 1067119 - RNA, 20 nt, Human
gcccugugccaggcaccaug

SEQ ID NO: 1067120 - RNA, 24 nt, Human
ggaaaagcgcaucuggagcuuaga

SEQ ID NO: 1067121 - RNA, 20 nt, Human
ggaggaggcugaggcagagg

SEQ ID NO: 1067122 - RNA, 23 nt, Human
ggccacugguguggccugggcag

SEQ ID NO: 1067123 - RNA, 18 nt, Human
gggaauccugagcccggg

SEQ ID NO: 1067124 - RNA, 20 nt, Human
gggaggaggcugaggcagag

SEQ ID NO: 1067125 - RNA, 24 nt, Human
gugccugcacuaagugcucuauuc

SEQ ID NO: 1067126 - RNA, 19 nt, Human
guggccugggcagacuccg

SEQ ID NO: 1067127 - RNA, 21 nt, Human
gugguacagcugaggcaagcc

SEQ ID NO: 1067128 - RNA, 23 nt, Human
guguagagaaaaagcaaagaugg

SEQ ID NO: 1067129 - RNA, 25 nt, Human
guuaucuggaaggggacaaagagag

SEQ ID NO: 1067130 - RNA, 19 nt, Human
uaacagcauauaggguccc

SEQ ID NO: 1067131 - RNA, 19 nt, Human
uacagcugaggcaagccca

SEQ ID NO: 1067132 - RNA, 22 nt, Human
uagcccagggcagagcuagaug

SEQ ID NO: 1067133 - RNA, 26 nt, Human
uagcccagggcagagcuagaugcggg

SEQ ID NO: 1067134 - RNA, 19 nt, Human
uaggucuuucucauuucug

SEQ ID NO: 1067135 - RNA, 20 nt, Human
uaguaggugguuuguguaga

SEQ ID NO: 1067136 - RNA, 18 nt, Human
ucaccccauugcaaguga

SEQ ID NO: 1067137 - RNA, 20 nt, Human
ucagugguacagcugaggca

SEQ ID NO: 1067138 - RNA, 22 nt, Human
uccccaggcccagguccaaacc

SEQ ID NO: 1067139 - RNA, 18 nt, Human
uccugagcccgggaggag

SEQ ID NO: 1067140 - RNA, 20 nt, Human
uccugagcccgggaggaggc

SEQ ID NO: 1067141 - RNA, 21 nt, Human
ucucaaacagcgacccuccca

SEQ ID NO: 1067142 - RNA, 21 nt, Human
ucugggauucaacgaucauuc

SEQ ID NO: 1067143 - RNA, 18 nt, Human
ucuguggugaagccagag

SEQ ID NO: 1067144 - RNA, 18 nt, Human
ugaccugcagcggcccuu

SEQ ID NO: 1067145 - RNA, 22 nt, Human
ugagcaggcucuucaauagccc

SEQ ID NO: 1067146 - RNA, 21 nt, Human
ugaggcaagcccaugggaccc

SEQ ID NO: 1067147 - RNA, 19 nt, Human
ugaguguguggcuguggaa

SEQ ID NO: 1067148 - RNA, 21 nt, Human
ugcagacuaagggagaggagg

SEQ ID NO: 1067149 - RNA, 20 nt, Human
ugccaggcaccaugcuaaca

SEQ ID NO: 1067150 - RNA, 23 nt, Human
ugcccugugccaggcaccaugcu

SEQ ID NO: 1067151 - RNA, 18 nt, Human
ugccugcacuaagugcuc

SEQ ID NO: 1067152 - RNA, 18 nt, Human
ugcuaacagcauauaggg

SEQ ID NO: 1067153 - RNA, 19 nt, Human
ugcucuuccuccuguuuuc

SEQ ID NO: 1067154 - RNA, 20 nt, Human
uggccugggcagacuccguc

SEQ ID NO: 1067155 - RNA, 19 nt, Human
ugggcucuuuguccgggcu

SEQ ID NO: 1067156 - RNA, 28 nt, Human
uguaguaggugguuuguguuguaaugac

SEQ ID NO: 1067157 - RNA, 21 nt, Human
ugugaggagagggaaauucag

SEQ ID NO: 1067158 - RNA, 19 nt, Human
uguuggaggaagagggguc

SEQ ID NO: 1067159 - RNA, 25 nt, Human
uguuuugcucccugcuguaucccca

SEQ ID NO: 1067160 - RNA, 27 nt, Human
uuaacacagaugaccugcagcggcccu

SEQ ID NO: 1067161 - RNA, 19 nt, Human
uuacuauucagaugugcca

SEQ ID NO: 1067162 - RNA, 19 nt, Human
uucucauuucugggccuca

SEQ ID NO: 1067163 - RNA, 20 nt, Human
uucuuaucugcaaacaagug

SEQ ID NO: 1067164 - RNA, 18 nt, Human
uugcucccugcuguaucc

SEQ ID NO: 1067165 - RNA, 22 nt, Human
uuuauaaagcugcguccuccuc

SEQ ID NO: 1067166 - RNA, 24 nt, Human
uuucuuaucugcaaacaaguggaa

SEQ ID NO: 1067167 - RNA, 20 nt, Human
aaaacacagguaaaggugcc

SEQ ID NO: 1067168 - RNA, 24 nt, Human
aaaacacagguaaaggugccacca

SEQ ID NO: 1067169 - RNA, 20 nt, Human
aaccuggccugguuugugca

SEQ ID NO: 1067170 - RNA, 20 nt, Human
aaggugccaccagccagagg

SEQ ID NO: 1067171 - RNA, 25 nt, Human
accuugcucaccuucuacuugucca

SEQ ID NO: 1067172 - RNA, 21 nt, Human
acguugggaugaccugccugc

SEQ ID NO: 1067173 - RNA, 22 nt, Human
agaagagagaaggagagaagag

SEQ ID NO: 1067174 - RNA, 18 nt, Human
agccaggaauggguggga

SEQ ID NO: 1067175 - RNA, 24 nt, Human
agccaggaaugggugggagaccug

SEQ ID NO: 1067176 - RNA, 20 nt, Human
agccccgcccucccaggcaa

SEQ ID NO: 1067177 - RNA, 26 nt, Human
aggcaagaagaagagaagagggaccc

SEQ ID NO: 1067178 - RNA, 22 nt, Human
aggcagaaaagugacaccucag

SEQ ID NO: 1067179 - RNA, 22 nt, Human
agugcugagguacuaggaagga

SEQ ID NO: 1067180 - RNA, 22 nt, Human
aguggggaggaguggcuggggc

SEQ ID NO: 1067181 - RNA, 23 nt, Human
aguggggaggaguggcuggggcu

SEQ ID NO: 1067182 - RNA, 23 nt, Human
augauggcagcaguggcccacgu

SEQ ID NO: 1067183 - RNA, 21 nt, Human
caaaacacagguaaaggugcc

SEQ ID NO: 1067184 - RNA, 21 nt, Human
caaacccaggcaucucugcac

SEQ ID NO: 1067185 - RNA, 21 nt, Human
caagcacaggagggaggcuga

SEQ ID NO: 1067186 - RNA, 18 nt, Human
cacaggagggaggcugag

SEQ ID NO: 1067187 - RNA, 20 nt, Human
caccuugcucaccuucuacu

SEQ ID NO: 1067188 - RNA, 20 nt, Human
cagaaaggagcuacccacug

SEQ ID NO: 1067189 - RNA, 27 nt, Human
cagcaagccccccugucccgcaggcuc

SEQ ID NO: 1067190 - RNA, 18 nt, Human
cagccagagguuucaggc

SEQ ID NO: 1067191 - RNA, 24 nt, Human
cagccagagguuucaggcagaaaa

SEQ ID NO: 1067192 - RNA, 18 nt, Human
cagcccccugccaccucg

SEQ ID NO: 1067193 - RNA, 18 nt, Human
cagcccccugccaccucg

SEQ ID NO: 1067194 - RNA, 22 nt, Human
cagcccccugccaccucggccc

SEQ ID NO: 1067195 - RNA, 20 nt, Human
caggcaucucugcacucucu

SEQ ID NO: 1067196 - RNA, 21 nt, Human
caggcgggagccccgcccucc

SEQ ID NO: 1067197 - RNA, 21 nt, Human
caguggggaggaguggcuggg

SEQ ID NO: 1067198 - RNA, 21 nt, Human
ccaaaccugggcacagucaca

SEQ ID NO: 1067199 - RNA, 19 nt, Human
ccaggcaucucugcacucu

SEQ ID NO: 1067200 - RNA, 20 nt, Human
cccaggcacagcugcagcca

SEQ ID NO: 1067201 - RNA, 20 nt, Human
cccccugccaccucggcccc

SEQ ID NO: 1067202 - RNA, 21 nt, Human
ccccugccaccucggcccccu

SEQ ID NO: 1067203 - RNA, 22 nt, Human
cccgcccucccaggcacagcug

SEQ ID NO: 1067204 - RNA, 22 nt, Human
ccgugcgucuccucucagcugc

SEQ ID NO: 1067205 - RNA, 22 nt, Human
ccucagagcuggugggagccag

SEQ ID NO: 1067206 - RNA, 23 nt, Human
ccucagagcuggugggagccagg

SEQ ID NO: 1067207 - RNA, 19 nt, Human
ccucaggauucuguaacac

SEQ ID NO: 1067208 - RNA, 22 nt, Human
ccugcagaaaggagcuacccac

SEQ ID NO: 1067209 - RNA, 24 nt, Human
ccugccaccucggcccccuccaga

SEQ ID NO: 1067210 - RNA, 23 nt, Human
ccuucuacuuguccacauaccuc

SEQ ID NO: 1067211 - RNA, 22 nt, Human
ccuuugaucucucggagcagcu

SEQ ID NO: 1067212 - RNA, 20 nt, Human
cgcaggcucaguuguaccug

SEQ ID NO: 1067213 - RNA, 18 nt, Human
cgccugggcacuaugggc

SEQ ID NO: 1067214 - RNA, 21 nt, Human
cguugggaugaccugccugca

SEQ ID NO: 1067215 - RNA, 24 nt, Human
cucagaggcccagcaagccccccu

SEQ ID NO: 1067216 - RNA, 19 nt, Human
cucaggacaagaacucagg

SEQ ID NO: 1067217 - RNA, 23 nt, Human
cugcaguggggaggaguggcugg

SEQ ID NO: 1067218 - RNA, 21 nt, Human
cugccaccucggcccccucca

SEQ ID NO: 1067219 - RNA, 19 nt, Human
cugguuugugcaagcucag

SEQ ID NO: 1067220 - RNA, 21 nt, Human
gaaccugaaaggacccauuua

SEQ ID NO: 1067221 - RNA, 21 nt, Human
gacaugccagcccccugccac

SEQ ID NO: 1067222 - RNA, 25 nt, Human
gagcccacuccaaauucagauccaa

SEQ ID NO: 1067223 - RNA, 24 nt, Human
gcaaaacacagguaaaggugccac

SEQ ID NO: 1067224 - RNA, 21 nt, Human
gcaaacccaggcaucucugca

SEQ ID NO: 1067225 - RNA, 23 nt, Human
gcaagccccccugucccgcaggc

SEQ ID NO: 1067226 - RNA, 23 nt, Human
gcucaauaaagcaccucuucacc

SEQ ID NO: 1067227 - RNA, 20 nt, Human
ggacucaggacaagaacuca

SEQ ID NO: 1067228 - RNA, 24 nt, Human
ggcugcaguggggaggaguggcug

SEQ ID NO: 1067229 - RNA, 21 nt, Human
gggcacagcuacccaccgugc

SEQ ID NO: 1067230 - RNA, 18 nt, Human
guggagcaguugcuaugg

SEQ ID NO: 1067231 - RNA, 19 nt, Human
gugggagccaggaaugggg

SEQ ID NO: 1067232 - RNA, 18 nt, Human
uaacauaaacagggcuga

SEQ ID NO: 1067233 - RNA, 22 nt, Human
uaacccagugggcccgagcaag

SEQ ID NO: 1067234 - RNA, 22 nt, Human
uaccugguccugcccccuggca

SEQ ID NO: 1067235 - RNA, 24 nt, Human
uaucaggcgggagccccgcccucc

SEQ ID NO: 1067236 - RNA, 20 nt, Human
ucacugaaucugcugugauu

SEQ ID NO: 1067237 - RNA, 25 nt, Human
uccaaguugaggccaaaccgggguc

SEQ ID NO: 1067238 - RNA, 23 nt, Human
uccuggacucaggacaagaacuc

SEQ ID NO: 1067239 - RNA, 25 nt, Human
ucuauaaaucuuccaccaugugucu

SEQ ID NO: 1067240 - RNA, 21 nt, Human
ucucagaggcccagcaagccc

SEQ ID NO: 1067241 - RNA, 23 nt, Human
ucucugcuuccagagcccacucc

SEQ ID NO: 1067242 - RNA, 18 nt, Human
ucugcugugauucugggg

SEQ ID NO: 1067243 - RNA, 21 nt, Human
ugaaaggacccauuuaugaug

SEQ ID NO: 1067244 - RNA, 18 nt, Human
ugacaagcacaggaggga

SEQ ID NO: 1067245 - RNA, 25 nt, Human
ugagguacuaggaaggaaccugaaa

SEQ ID NO: 1067246 - RNA, 18 nt, Human
ugcacucucagaggccca

SEQ ID NO: 1067247 - RNA, 23 nt, Human
ugcaguggggaggaguggcuggg

SEQ ID NO: 1067248 - RNA, 25 nt, Human
ugcucaccuucuacuuguccacaua

SEQ ID NO: 1067249 - RNA, 20 nt, Human
uggacagaacuaacccagug

SEQ ID NO: 1067250 - RNA, 18 nt, Human
uggagacacuggcugcag

SEQ ID NO: 1067251 - RNA, 21 nt, Human
uggccggaaggcccuccucag

SEQ ID NO: 1067252 - RNA, 19 nt, Human
uggcugcaguggggaggag

SEQ ID NO: 1067253 - RNA, 25 nt, Human
uggcugcaguggggaggaguggcug

SEQ ID NO: 1067254 - RNA, 19 nt, Human
uggcuggggcugugcacuc

SEQ ID NO: 1067255 - RNA, 20 nt, Human
uggcuggggcugugcacucc

SEQ ID NO: 1067256 - RNA, 19 nt, Human
ugggaugaccugccugcag

SEQ ID NO: 1067257 - RNA, 21 nt, Human
ugggcacagucacaaccuggc

SEQ ID NO: 1067258 - RNA, 19 nt, Human
ugggcccgagcaaaacaca

SEQ ID NO: 1067259 - RNA, 19 nt, Human
ugugauucugggggcugcc

SEQ ID NO: 1067260 - RNA, 19 nt, Human
uucaggcagaaaagugaca

SEQ ID NO: 1067261 - RNA, 19 nt, Human
uucuacuuguccacauacc

SEQ ID NO: 1067262 - RNA, 19 nt, Human
uucuugccaaauugcaggc

SEQ ID NO: 1067263 - RNA, 23 nt, Human
uugcucaauuaagcuccuuuaaa

SEQ ID NO: 1067264 - RNA, 22 nt, Human
uuuaugauggcagcaguggccc

SEQ ID NO: 1067265 - RNA, 19 nt, Human
acuuccauccaauucacuc

SEQ ID NO: 1067266 - RNA, 22 nt, Human
ggaaaacagaggugcagaggcu

SEQ ID NO: 1067267 - RNA, 19 nt, Human
ugaaaucacagauggacca

SEQ ID NO: 1067268 - RNA, 21 nt, Human
uucuuuggccacuucggcuga

SEQ ID NO: 1067269 - RNA, 19 nt, Human
accagugccagcagggcca

SEQ ID NO: 1067270 - RNA, 23 nt, Human
caagaccagugccagcagggcca

SEQ ID NO: 1067271 - RNA, 26 nt, Human
caccaccagcacaaaaaugacggagc

SEQ ID NO: 1067272 - RNA, 22 nt, Human
caccagcacaaaaaugacggag

SEQ ID NO: 1067273 - RNA, 20 nt, Human
caccaggcgggacagcagca

SEQ ID NO: 1067274 - RNA, 21 nt, Human
cagggccaccaccagcacaaa

SEQ ID NO: 1067275 - RNA, 21 nt, Human
ccaccaggcgggacagcagca

SEQ ID NO: 1067276 - RNA, 24 nt, Human
gggugcugcagccggugcacgggc

SEQ ID NO: 1067277 - RNA, 22 nt, Human
ugaagucacaaacaccugccca

SEQ ID NO: 1067278 - RNA, 25 nt, Human
ugaagucacaaacaccugcccacug

SEQ ID NO: 1067279 - RNA, 21 nt, Human
uguugucuugacaguuauucu

SEQ ID NO: 1067280 - RNA, 18 nt, Human
uugcaguggugggggugg

SEQ ID NO: 1067281 - RNA, 21 nt, Human
aaaaaaaacaaauaugaugca

SEQ ID NO: 1067282 - RNA, 19 nt, Human
aaaagcacuggauuuaacu

SEQ ID NO: 1067283 - RNA, 21 nt, Human
aaaaugccaccaaacauuuga

SEQ ID NO: 1067284 - RNA, 27 nt, Human
aaacaaaaaaaacaaauaugaugcaca

SEQ ID NO: 1067285 - RNA, 21 nt, Human
aaacaaaaccaccuagauuua

SEQ ID NO: 1067286 - RNA, 21 nt, Human
aaacaaauaugaugcacacac

SEQ ID NO: 1067287 - RNA, 24 nt, Human
aaagugcugagauuacagguguga

SEQ ID NO: 1067288 - RNA, 20 nt, Human
aaauagaaguaaacaaaacc

SEQ ID NO: 1067289 - RNA, 21 nt, Human
aaauggucucauaauuuugag

SEQ ID NO: 1067290 - RNA, 24 nt, Human
aaccucaggugaucugccugcuuc

SEQ ID NO: 1067291 - RNA, 20 nt, Human
aacuuagcccagugaaaugg

SEQ ID NO: 1067292 - RNA, 21 nt, Human
aagcaagccccuucaugaaca

SEQ ID NO: 1067293 - RNA, 27 nt, Human
aagccccacuaaaaaaauacuggaauu

SEQ ID NO: 1067294 - RNA, 22 nt, Human
aaggauugcuuuugagguucac

SEQ ID NO: 1067295 - RNA, 24 nt, Human
aaguagcugugauuacaggcgugu

SEQ ID NO: 1067296 - RNA, 26 nt, Human
aagugcugagauuacaggugugagcc

SEQ ID NO: 1067297 - RNA, 23 nt, Human
aaguguauuauuugucaugaaag

SEQ ID NO: 1067298 - RNA, 18 nt, Human
aauagccaauaacaaaag

SEQ ID NO: 1067299 - RNA, 18 nt, Human
acaggguuucaccauguu

SEQ ID NO: 1067300 - RNA, 21 nt, Human
acaggguuucaccauguuggc

SEQ ID NO: 1067301 - RNA, 24 nt, Human
acaggguuucaccauguuggccag

SEQ ID NO: 1067302 - RNA, 21 nt, Human
acauacauaguuacauacacc

SEQ ID NO: 1067303 - RNA, 23 nt, Human
accaaacauuugaaacuggccua

SEQ ID NO: 1067304 - RNA, 18 nt, Human
accaccaaagccccacua

SEQ ID NO: 1067305 - RNA, 24 nt, Human
accauguuggccaggcuggucuug

SEQ ID NO: 1067306 - RNA, 20 nt, Human
acccuaaagaaagcuacaug

SEQ ID NO: 1067307 - RNA, 22 nt, Human
accuugaucauuaacaccuccu

SEQ ID NO: 1067308 - RNA, 23 nt, Human
acgcacaccaccaccaaagcccc

SEQ ID NO: 1067309 - RNA, 18 nt, Human
acuccgucacccaggcug

SEQ ID NO: 1067310 - RNA, 19 nt, Human
acuccgucacccaggcugg

SEQ ID NO: 1067311 - RNA, 22 nt, Human
acuccgucacccaggcuggagu

SEQ ID NO: 1067312 - RNA, 26 nt, Human
acuccgucacccaggcuggagugaag

SEQ ID NO: 1067313 - RNA, 22 nt, Human
agaaaaauagaaguaaacaaaa

SEQ ID NO: 1067314 - RNA, 24 nt, Human
agaaaaauagaaguaaacaaaacc

SEQ ID NO: 1067315 - RNA, 22 nt, Human
agaaagcuacaugaagaauagc

SEQ ID NO: 1067316 - RNA, 26 nt, Human
agaaagcuacaugaagaauagccaau

SEQ ID NO: 1067317 - RNA, 22 nt, Human
agauuacaggugugagccacua

SEQ ID NO: 1067318 - RNA, 19 nt, Human
agccaauaacaaaagcacu

SEQ ID NO: 1067319 - RNA, 19 nt, Human
agccuuuccaauacccccc

SEQ ID NO: 1067320 - RNA, 20 nt, Human
aggcaagaugcugcuguuac

SEQ ID NO: 1067321 - RNA, 19 nt, Human
aggcacauaugugcaugug

SEQ ID NO: 1067322 - RNA, 24 nt, Human
aggcgugugccaccacgccuagcu

SEQ ID NO: 1067323 - RNA, 24 nt, Human
aggugaucugccugcuucagccuc

SEQ ID NO: 1067324 - RNA, 20 nt, Human
aguaaugggggcaaauagga

SEQ ID NO: 1067325 - RNA, 20 nt, Human
agucuuuuuuuuuuuuuucu

SEQ ID NO: 1067326 - RNA, 20 nt, Human
agugaaguggugcaaucucg

SEQ ID NO: 1067327 - RNA, 21 nt, Human
auacagaaaaauagaaguaaa

SEQ ID NO: 1067328 - RNA, 21 nt, Human
auacuggaaucucugggagua

SEQ ID NO: 1067329 - RNA, 21 nt, Human
auaguuacauacacccaaggc

SEQ ID NO: 1067330 - RNA, 18 nt, Human
aucugugagcaucuccuu

SEQ ID NO: 1067331 - RNA, 21 nt, Human
augaaagcaaagugcuuuuaa

SEQ ID NO: 1067332 - RNA, 22 nt, Human
augccucagccucccaaguagc

SEQ ID NO: 1067333 - RNA, 23 nt, Human
augccucagccucccaaguagcu

SEQ ID NO: 1067334 - RNA, 24 nt, Human
caaaaugccaccaaacauuugaaa

SEQ ID NO: 1067335 - RNA, 24 nt, Human
caaagugcugagauuacaggugug

SEQ ID NO: 1067336 - RNA, 23 nt, Human
caaccuccaccuccuggguucaa

SEQ ID NO: 1067337 - RNA, 27 nt, Human
caagcaauucucaugccucagccuccc

SEQ ID NO: 1067338 - RNA, 22 nt, Human
caagcauacugugaaucaaaac

SEQ ID NO: 1067339 - RNA, 19 nt, Human
caaguaagcacagaacaca

SEQ ID NO: 1067340 - RNA, 21 nt, Human
cacaguccauccaagcauacu

SEQ ID NO: 1067341 - RNA, 21 nt, Human
caccauguuggccaggcuggu

SEQ ID NO: 1067342 - RNA, 23 nt, Human
caccauguuggccaggcuggucu

SEQ ID NO: 1067343 - RNA, 24 nt, Human
caccauguuggccaggcuggucuu

SEQ ID NO: 1067344 - RNA, 27 nt, Human
caccauguuggccaggcuggucuugaa

SEQ ID NO: 1067345 - RNA, 20 nt, Human
caccuguggugcuuaagauu

SEQ ID NO: 1067346 - RNA, 22 nt, Human
cacuccgucacccaggcuggag

SEQ ID NO: 1067347 - RNA, 23 nt, Human
cacuccgucacccaggcuggagu

SEQ ID NO: 1067348 - RNA, 21 nt, Human
cacugcaaccuccaccuccug

SEQ ID NO: 1067349 - RNA, 20 nt, Human
cacugccacauuuacaagaa

SEQ ID NO: 1067350 - RNA, 23 nt, Human
cacuuugaacaaacauugcuaga

SEQ ID NO: 1067351 - RNA, 26 nt, Human
cagaaagucuuuuuuuuuuuuuucuu

SEQ ID NO: 1067352 - RNA, 25 nt, Human
cagcaaugaaauaucucaaacauac

SEQ ID NO: 1067353 - RNA, 22 nt, Human
cagcuaugccccacuuugaaca

SEQ ID NO: 1067354 - RNA, 24 nt, Human
cagcuaugccccacuuugaacaaa

SEQ ID NO: 1067355 - RNA, 23 nt, Human
caggcaucgucuagaaaacuaac

SEQ ID NO: 1067356 - RNA, 24 nt, Human
caggguuucaccauguuggccagg

SEQ ID NO: 1067357 - RNA, 22 nt, Human
caguucacucucuaucuacaug

SEQ ID NO: 1067358 - RNA, 21 nt, Human
cauacacgcacaccaccacca

SEQ ID NO: 1067359 - RNA, 23 nt, Human
cauacagaaaaauagaaguaaac

SEQ ID NO: 1067360 - RNA, 20 nt, Human
caugaagaauagccaauaac

SEQ ID NO: 1067361 - RNA, 25 nt, Human
cauguguauacauaacauauacaca

SEQ ID NO: 1067362 - RNA, 24 nt, Human
cauguuggccaggcuggucuugaa

SEQ ID NO: 1067363 - RNA, 19 nt, Human
cauuaggaccaucuaacug

SEQ ID NO: 1067364 - RNA, 19 nt, Human
cauugcuagaaucuggaag

SEQ ID NO: 1067365 - RNA, 21 nt, Human
ccaaagugcugagauuacagg

SEQ ID NO: 1067366 - RNA, 21 nt, Human
ccaaagugcugagauuacagg

SEQ ID NO: 1067367 - RNA, 24 nt, Human
ccaaagugcugagauuacaggugu

SEQ ID NO: 1067368 - RNA, 24 nt, Human
ccaaggcacauaugugcauguguu

SEQ ID NO: 1067369 - RNA, 22 nt, Human
ccaaguagcugugauuacaggc

SEQ ID NO: 1067370 - RNA, 24 nt, Human
ccaaguagcugugauuacaggcgu

SEQ ID NO: 1067371 - RNA, 19 nt, Human
ccaauaccccccgcccccc

SEQ ID NO: 1067372 - RNA, 21 nt, Human
ccaccaccaaagccccacuaa

SEQ ID NO: 1067373 - RNA, 20 nt, Human
ccaccacgccuagcuaauuu

SEQ ID NO: 1067374 - RNA, 22 nt, Human
ccacccuaaagaaagcuacaug

SEQ ID NO: 1067375 - RNA, 26 nt, Human
ccaccuccuggguucaagcaauucuu

SEQ ID NO: 1067376 - RNA, 23 nt, Human
ccacuacaccuggccagcuaugc

SEQ ID NO: 1067377 - RNA, 24 nt, Human
ccacugcaaccuccaccuccuggg

SEQ ID NO: 1067378 - RNA, 26 nt, Human
ccacugcaaccuccaccuccuggguu

SEQ ID NO: 1067379 - RNA, 19 nt, Human
cccaaguagcugugauuac

SEQ ID NO: 1067380 - RNA, 24 nt, Human
cccaaguagcugugauuacaggcg

SEQ ID NO: 1067381 - RNA, 27 nt, Human
cccacugcaaccuccaccuccuggguu

SEQ ID NO: 1067382 - RNA, 21 nt, Human
cccuaaagaaagcuacaugaa

SEQ ID NO: 1067383 - RNA, 19 nt, Human
ccuccaccuccuggguuca

SEQ ID NO: 1067384 - RNA, 22 nt, Human
ccuccuggguucaagcaauucu

SEQ ID NO: 1067385 - RNA, 18 nt, Human
ccuggccagcuaugcccc

SEQ ID NO: 1067386 - RNA, 19 nt, Human
ccuggccagcuaugcccca

SEQ ID NO: 1067387 - RNA, 23 nt, Human
ccuggguucaagcaauucucaug

SEQ ID NO: 1067388 - RNA, 19 nt, Human
ccuuuugugaacaaaaugc

SEQ ID NO: 1067389 - RNA, 21 nt, Human
cgucacccaggcuggagugaa

SEQ ID NO: 1067390 - RNA, 20 nt, Human
cgugugccaccacgccuagc

SEQ ID NO: 1067391 - RNA, 20 nt, Human
cguugcccaaaaauaaucag

SEQ ID NO: 1067392 - RNA, 28 nt, Human
cucaaacauacagaaaaauagaaguaaa

SEQ ID NO: 1067393 - RNA, 25 nt, Human
cucaugccucagccucccaaguagc

SEQ ID NO: 1067394 - RNA, 21 nt, Human
cucccaaagugcugagauuac

SEQ ID NO: 1067395 - RNA, 21 nt, Human
cuccuggguucaagcaauucu

SEQ ID NO: 1067396 - RNA, 26 nt, Human
cucuuaaccucaggugaucugccugc

SEQ ID NO: 1067397 - RNA, 23 nt, Human
cugcaaccuccaccuccuggguu

SEQ ID NO: 1067398 - RNA, 24 nt, Human
cugcaaccuccaccuccuggguuc

SEQ ID NO: 1067399 - RNA, 19 nt, Human
cugcggggcuucaaacuua

SEQ ID NO: 1067400 - RNA, 23 nt, Human
cugcuucagccucccaaagugcu

SEQ ID NO: 1067401 - RNA, 24 nt, Human
cugcuucagccucccaaagugcug

SEQ ID NO: 1067402 - RNA, 25 nt, Human
cuuucuccaccuuaucucuuuguug

SEQ ID NO: 1067403 - RNA, 19 nt, Human
cuuuuggcuugucuucuga

SEQ ID NO: 1067404 - RNA, 18 nt, Human
cuuuuuuuuuuuuuucuu

SEQ ID NO: 1067405 - RNA, 18 nt, Human
gaaaaaacaaaaaaaaca

SEQ ID NO: 1067406 - RNA, 24 nt, Human
gaaucucugggaguaaugggggca

SEQ ID NO: 1067407 - RNA, 20 nt, Human
gagauggagucucacuccgu

SEQ ID NO: 1067408 - RNA, 21 nt, Human
gaucugccugcuucagccucc

SEQ ID NO: 1067409 - RNA, 18 nt, Human
gauuacaggcgugugcca

SEQ ID NO: 1067410 - RNA, 21 nt, Human
gauuacaggcgugugccacca

SEQ ID NO: 1067411 - RNA, 18 nt, Human
gauuacaggugugagcca

SEQ ID NO: 1067412 - RNA, 22 nt, Human
gauuacaggugugagccacuac

SEQ ID NO: 1067413 - RNA, 19 nt, Human
gcacaccaccaccaaagcc

SEQ ID NO: 1067414 - RNA, 19 nt, Human
gcacaccaccaccaaagcc

SEQ ID NO: 1067415 - RNA, 23 nt, Human
gcacaccaccaccaaagccccac

SEQ ID NO: 1067416 - RNA, 23 nt, Human
gccuagcuaauuuuuuguauuuu

SEQ ID NO: 1067417 - RNA, 20 nt, Human
ggaaacaauauacccacaac

SEQ ID NO: 1067418 - RNA, 22 nt, Human
ggcacauaugugcauguguaua

SEQ ID NO: 1067419 - RNA, 19 nt, Human
gggcaaauaggaggaguua

SEQ ID NO: 1067420 - RNA, 22 nt, Human
ggguuucaccauguuggccagg

SEQ ID NO: 1067421 - RNA, 20 nt, Human
gucuuuuuuuuuuuuuucuu

SEQ ID NO: 1067422 - RNA, 25 nt, Human
gugaaucaaaacacaugucauagcu

SEQ ID NO: 1067423 - RNA, 24 nt, Human
gugaucugccugcuucagccuccc

SEQ ID NO: 1067424 - RNA, 19 nt, Human
gugugccaccacgccuagc

SEQ ID NO: 1067425 - RNA, 23 nt, Human
uaaauaauuuugcaggcaagaug

SEQ ID NO: 1067426 - RNA, 21 nt, Human
uaacauauacacauacauaca

SEQ ID NO: 1067427 - RNA, 19 nt, Human
uaaccucaggugaucugcc

SEQ ID NO: 1067428 - RNA, 19 nt, Human
uaaccucaggugaucugcc

SEQ ID NO: 1067429 - RNA, 21 nt, Human
uaaccucaggugaucugccug

SEQ ID NO: 1067430 - RNA, 24 nt, Human
uaaccucaggugaucugccugcuu

SEQ ID NO: 1067431 - RNA, 20 nt, Human
uaacuggauuccacuggaau

SEQ ID NO: 1067432 - RNA, 19 nt, Human
uaauuagcaaacauuccuu

SEQ ID NO: 1067433 - RNA, 22 nt, Human
uaauuagcaaacauuccuuucu

SEQ ID NO: 1067434 - RNA, 24 nt, Human
uaauuuuuuguauuuuuacuagag

SEQ ID NO: 1067435 - RNA, 19 nt, Human
uacacgcacaccaccacca

SEQ ID NO: 1067436 - RNA, 22 nt, Human
uacaggcgugugccaccacgcc

SEQ ID NO: 1067437 - RNA, 22 nt, Human
uacaggugugagccacuacacc

SEQ ID NO: 1067438 - RNA, 23 nt, Human
uacaggugugagccacuacaccu

SEQ ID NO: 1067439 - RNA, 26 nt, Human
uacauacacccaaggcacauaugugc

SEQ ID NO: 1067440 - RNA, 21 nt, Human
uacauacauacacgcacacca

SEQ ID NO: 1067441 - RNA, 24 nt, Human
uacauacauacacgcacaccacca

SEQ ID NO: 1067442 - RNA, 22 nt, Human
uaccaccggggacaaauggucu

SEQ ID NO: 1067443 - RNA, 24 nt, Human
uacuagagacaggguuucaccaug

SEQ ID NO: 1067444 - RNA, 21 nt, Human
uagagacaggguuucaccaug

SEQ ID NO: 1067445 - RNA, 22 nt, Human
uagagacaggguuucaccaugu

SEQ ID NO: 1067446 - RNA, 18 nt, Human
uagccaauaacaaaagca

SEQ ID NO: 1067447 - RNA, 19 nt, Human
uagcccagugaaauggcag

SEQ ID NO: 1067448 - RNA, 22 nt, Human
uaggaggaguuaauguucaggu

SEQ ID NO: 1067449 - RNA, 23 nt, Human
uaggaggaguuaauguucaggua

SEQ ID NO: 1067450 - RNA, 25 nt, Human
uauacacauacauacauacacgcac

SEQ ID NO: 1067451 - RNA, 25 nt, Human
uauacacauacauacauacacgcag

SEQ ID NO: 1067452 - RNA, 19 nt, Human
uauacauaacauauacaca

SEQ ID NO: 1067453 - RNA, 18 nt, Human
uaugugcauguguauaca

SEQ ID NO: 1067454 - RNA, 20 nt, Human
uaugugcauguguauacaua

SEQ ID NO: 1067455 - RNA, 22 nt, Human
uaugugcauguguauacauaac

SEQ ID NO: 1067456 - RNA, 20 nt, Human
uauguguguauauacauaca

SEQ ID NO: 1067457 - RNA, 26 nt, Human
uauguuuaaaaauauguguguauaua

SEQ ID NO: 1067458 - RNA, 22 nt, Human
uauuauggacccauuguugaga

SEQ ID NO: 1067459 - RNA, 18 nt, Human
ucaaccacuaccuugauc

SEQ ID NO: 1067460 - RNA, 21 nt, Human
ucacccaggcuggagugaagu

SEQ ID NO: 1067461 - RNA, 21 nt, Human
ucagcaaugaaauaucucaaa

SEQ ID NO: 1067462 - RNA, 18 nt, Human
ucagccucccaaguagcu

SEQ ID NO: 1067463 - RNA, 20 nt, Human
ucagccucccaaguagcugg

SEQ ID NO: 1067464 - RNA, 18 nt, Human
ucaugaacaugggcauuu

SEQ ID NO: 1067465 - RNA, 20 nt, Human
uccaauaccccccgcccccc

SEQ ID NO: 1067466 - RNA, 21 nt, Human
uccacacaguccauccaagca

SEQ ID NO: 1067467 - RNA, 22 nt, Human
uccaugucccguugcccaaaaa

SEQ ID NO: 1067468 - RNA, 23 nt, Human
ucccaaagugcugagauuacagg

SEQ ID NO: 1067469 - RNA, 21 nt, Human
ucccaacaauggcuggacuuc

SEQ ID NO: 1067470 - RNA, 24 nt, Human
ucccaaguagcugugauuacaggc

SEQ ID NO: 1067471 - RNA, 22 nt, Human
ucccguugcccaaaaauaauca

SEQ ID NO: 1067472 - RNA, 21 nt, Human
uccuggguucaagcaauucuc

SEQ ID NO: 1067473 - RNA, 24 nt, Human
uccuggguucaagcaauucucaug

SEQ ID NO: 1067474 - RNA, 24 nt, Human
ucucacuccgucacccaggcugga

SEQ ID NO: 1067475 - RNA, 26 nt, Human
ucucacuccgucacccaggcuggagu

SEQ ID NO: 1067476 - RNA, 18 nt, Human
ucucugggaguaaugggg

SEQ ID NO: 1067477 - RNA, 19 nt, Human
ucuuccaugucccguugcc

SEQ ID NO: 1067478 - RNA, 25 nt, Human
ugaaaaaacaaaaaaaacaaauaug

SEQ ID NO: 1067479 - RNA, 22 nt, Human
ugaaguggugcaaucucggccc

SEQ ID NO: 1067480 - RNA, 23 nt, Human
ugaaguggugcaaucucggccca

SEQ ID NO: 1067481 - RNA, 22 nt, Human
ugagauggagucucacuccguc

SEQ ID NO: 1067482 - RNA, 18 nt, Human
ugagauuacaggugugag

SEQ ID NO: 1067483 - RNA, 19 nt, Human
ugagauuacaggugugagc

SEQ ID NO: 1067484 - RNA, 21 nt, Human
ugagauuacaggugugagcca

SEQ ID NO: 1067485 - RNA, 22 nt, Human
ugagauuacaggugugagccac

SEQ ID NO: 1067486 - RNA, 22 nt, Human
ugagauuacaggugugagccac

SEQ ID NO: 1067487 - RNA, 23 nt, Human
ugagauuacaggugugagccacu

SEQ ID NO: 1067488 - RNA, 24 nt, Human
ugagauuacaggugugagccacua

SEQ ID NO: 1067489 - RNA, 24 nt, Human
ugauuccaugguucccaacaaugg

SEQ ID NO: 1067490 - RNA, 19 nt, Human
ugcauguguauacauaaca

SEQ ID NO: 1067491 - RNA, 25 nt, Human
ugccaccaaacauuugaaacuggcc

SEQ ID NO: 1067492 - RNA, 25 nt, Human
ugccucagccucccaaguagcugug

SEQ ID NO: 1067493 - RNA, 27 nt, Human
ugccucugacuuuaaaaacauaaugaa

SEQ ID NO: 1067494 - RNA, 24 nt, Human
ugcugagauuacaggugugagcca

SEQ ID NO: 1067495 - RNA, 24 nt, Human
ugcuucagccucccaaagugcuga

SEQ ID NO: 1067496 - RNA, 18 nt, Human
uggaagagacaugcuggg

SEQ ID NO: 1067497 - RNA, 20 nt, Human
uggaaucucugggaguaauu

SEQ ID NO: 1067498 - RNA, 21 nt, Human
uggaggugacuuuuucccugc

SEQ ID NO: 1067499 - RNA, 24 nt, Human
uggagugaaguggugcaaucucgg

SEQ ID NO: 1067500 - RNA, 20 nt, Human
uggcagucuuuuuuaguuuu

SEQ ID NO: 1067501 - RNA, 22 nt, Human
uggccaggcuggucuugaacuc

SEQ ID NO: 1067502 - RNA, 24 nt, Human
ugggaguaaugggggcaaauagga

SEQ ID NO: 1067503 - RNA, 23 nt, Human
uguauacauaacauauacacaua

SEQ ID NO: 1067504 - RNA, 28 nt, Human
uguauacauaacauauacacauacauag

SEQ ID NO: 1067505 - RNA, 20 nt, Human
ugugagcaucuccuucucuu

SEQ ID NO: 1067506 - RNA, 24 nt, Human
ugugagcaucuccuucucuuccua

SEQ ID NO: 1067507 - RNA, 22 nt, Human
ugugauuacaggcgugugccac

SEQ ID NO: 1067508 - RNA, 24 nt, Human
ugugauuacaggcgugugccacca

SEQ ID NO: 1067509 - RNA, 18 nt, Human
uguguauauacauacaua

SEQ ID NO: 1067510 - RNA, 18 nt, Human
uguguauauacauacaua

SEQ ID NO: 1067511 - RNA, 25 nt, Human
uguguauauacauacauaguuacau

SEQ ID NO: 1067512 - RNA, 18 nt, Human
uguguguauauacauaca

SEQ ID NO: 1067513 - RNA, 21 nt, Human
uguguguauauacauacauag

SEQ ID NO: 1067514 - RNA, 21 nt, Human
uguguguauauacauacauag

SEQ ID NO: 1067515 - RNA, 21 nt, Human
uguguuugauuccaugguucc

SEQ ID NO: 1067516 - RNA, 24 nt, Human
uguuuaaaaauauguguguauaua

SEQ ID NO: 1067517 - RNA, 22 nt, Human
uguuuguuuugagauggagucu

SEQ ID NO: 1067518 - RNA, 20 nt, Human
uuacaaguuuucuguucuga

SEQ ID NO: 1067519 - RNA, 24 nt, Human
uuacuagagacaggguuucaccau

SEQ ID NO: 1067520 - RNA, 21 nt, Human
uucaugaacaugggcauuuuu

SEQ ID NO: 1067521 - RNA, 21 nt, Human
uuccaugguucccaacaaugg

SEQ ID NO: 1067522 - RNA, 22 nt, Human
uuccaugguucccaacaauggc

SEQ ID NO: 1067523 - RNA, 21 nt, Human
uucuguuagccaaggauugcu

SEQ ID NO: 1067524 - RNA, 23 nt, Human
uucuuccaugucccguugcccaa

SEQ ID NO: 1067525 - RNA, 26 nt, Human
uuguaaacaaccacccuaaagaaagc

SEQ ID NO: 1067526 - RNA, 22 nt, Human
uuuaccaggauccacucaacca

SEQ ID NO: 1067527 - RNA, 24 nt, Human
uuuaccaggauccacucaaccacu

SEQ ID NO: 1067528 - RNA, 24 nt, Human
uuucaccauguuggccaggcuggu

SEQ ID NO: 1067529 - RNA, 21 nt, Human
uuuguaaacaaccacccuaaa

SEQ ID NO: 1067530 - RNA, 24 nt, Human
uuuuuacuagagacaggguuucac

SEQ ID NO: 1067531 - RNA, 21 nt, Human
uuuuuguauuuuuacuagaga

SEQ ID NO: 1067532 - RNA, 24 nt, Human
uuuuuuguauuuuuacuagagaca

SEQ ID NO: 1067533 - RNA, 19 nt, Human
aucuuugugauuuuugcac

SEQ ID NO: 1067534 - RNA, 20 nt, Human
cagcaugggaggagccaaca

SEQ ID NO: 1067535 - RNA, 20 nt, Human
cugugguauagugcagugga

SEQ ID NO: 1067536 - RNA, 21 nt, Human
uagugcaguggaucacagaug

SEQ ID NO: 1067537 - RNA, 23 nt, Human
ucucaggaccacagccaagccaa

SEQ ID NO: 1067538 - RNA, 21 nt, Human
ugcaguggaucacagauggcc

SEQ ID NO: 1067539 - RNA, 22 nt, Human
ugggaggagccaacacgcagac

SEQ ID NO: 1067540 - RNA, 21 nt, Human
uucagcaugggaggagccaac

SEQ ID NO: 1067541 - RNA, 24 nt, Human
aauacagccucucugucuccgccu

SEQ ID NO: 1067542 - RNA, 22 nt, Human
auguuaacauuaaaaucugaau

SEQ ID NO: 1067543 - RNA, 24 nt, Human
cagguagaggcucaaccguaugga

SEQ ID NO: 1067544 - RNA, 23 nt, Human
cccccuuuguccagucuuccucc

SEQ ID NO: 1067545 - RNA, 22 nt, Human
cugaacugugaccagcaccagg

SEQ ID NO: 1067546 - RNA, 19 nt, Human
gaauggaaaagaaguuuga

SEQ ID NO: 1067547 - RNA, 20 nt, Human
gaccagcaccaggcagguag

SEQ ID NO: 1067548 - RNA, 18 nt, Human
ucugucuccgccuacucc

SEQ ID NO: 1067549 - RNA, 23 nt, Human
ugaagaagcugaacugugaccag

SEQ ID NO: 1067550 - RNA, 19 nt, Human
aaaaagaaauuccuagccc

SEQ ID NO: 1067551 - RNA, 20 nt, Human
aaaagaaauuccuagcccuu

SEQ ID NO: 1067552 - RNA, 23 nt, Human
aaacugggaaggacaacaggaga

SEQ ID NO: 1067553 - RNA, 21 nt, Human
aaagucuuucccuucucuagc

SEQ ID NO: 1067554 - RNA, 19 nt, Human
acaaacaucagcuaacaga

SEQ ID NO: 1067555 - RNA, 18 nt, Human
acuuguggaccuccccuc

SEQ ID NO: 1067556 - RNA, 22 nt, Human
agggaaaaagggagguugggga

SEQ ID NO: 1067557 - RNA, 19 nt, Human
agggagguuggggagaaac

SEQ ID NO: 1067558 - RNA, 19 nt, Human
agguauagacagggaaacc

SEQ ID NO: 1067559 - RNA, 22 nt, Human
aggugguggcgccgagggcguc

SEQ ID NO: 1067560 - RNA, 18 nt, Human
aguugcuagcuucggccu

SEQ ID NO: 1067561 - RNA, 25 nt, Human
aucacuagcaauacaccuacaauga

SEQ ID NO: 1067562 - RNA, 20 nt, Human
caacugccugcccauuuauu

SEQ ID NO: 1067563 - RNA, 23 nt, Human
cagaaguucuggugcuagcacau

SEQ ID NO: 1067564 - RNA, 18 nt, Human
cagcacaggagggguugg

SEQ ID NO: 1067565 - RNA, 22 nt, Human
caggagcuggaucaguaggcac

SEQ ID NO: 1067566 - RNA, 19 nt, Human
cagggccaggugguggcgc

SEQ ID NO: 1067567 - RNA, 22 nt, Human
cauaauagaucaaguaagccug

SEQ ID NO: 1067568 - RNA, 28 nt, Human
ccaccuggagaucuucaaagggggcugc

SEQ ID NO: 1067569 - RNA, 18 nt, Human
ccaccuuugucauguccc

SEQ ID NO: 1067570 - RNA, 21 nt, Human
cccgcuggaaaccauuuucca

SEQ ID NO: 1067571 - RNA, 18 nt, Human
cccuguccuauugauccc

SEQ ID NO: 1067572 - RNA, 18 nt, Human
ccugucuuacaaacuagg

SEQ ID NO: 1067573 - RNA, 20 nt, Human
cgagcucccugaaaaagaaa

SEQ ID NO: 1067574 - RNA, 26 nt, Human
cuacuaaguaauugucuguguugugc

SEQ ID NO: 1067575 - RNA, 19 nt, Human
cuagcacauucagcuccuc

SEQ ID NO: 1067576 - RNA, 23 nt, Human
cuauagcuaugccuuucuuuucu

SEQ ID NO: 1067577 - RNA, 23 nt, Human
cuccauaagcuuguaugccgggu

SEQ ID NO: 1067578 - RNA, 24 nt, Human
cucccgcuggaaaccauuuuccaa

SEQ ID NO: 1067579 - RNA, 20 nt, Human
cucggugccuacauaucuaa

SEQ ID NO: 1067580 - RNA, 19 nt, Human
cuuaagagccgagcucccu

SEQ ID NO: 1067581 - RNA, 22 nt, Human
cuugugcccauguggcaggccc

SEQ ID NO: 1067582 - RNA, 24 nt, Human
gaaaaaacaaggauaauacacagg

SEQ ID NO: 1067583 - RNA, 22 nt, Human
gaaguugcuagcuucggccuuc

SEQ ID NO: 1067584 - RNA, 20 nt, Human
gagauucuggaugagccgaa

SEQ ID NO: 1067585 - RNA, 22 nt, Human
gagccgagcucccugaaaaaga

SEQ ID NO: 1067586 - RNA, 20 nt, Human
gcaacaaaaccuuuuaucau

SEQ ID NO: 1067587 - RNA, 23 nt, Human
gccauucauuaucuuuccaguuu

SEQ ID NO: 1067588 - RNA, 18 nt, Human
gcguacauaacaagaagu

SEQ ID NO: 1067589 - RNA, 20 nt, Human
ggagguuggggagaaacugg

SEQ ID NO: 1067590 - RNA, 22 nt, Human
ggccaggugguggcgccgaggg

SEQ ID NO: 1067591 - RNA, 19 nt, Human
gucuaaggccaaucuauuc

SEQ ID NO: 1067592 - RNA, 22 nt, Human
uaaaaccgucaaagcucugcca

SEQ ID NO: 1067593 - RNA, 18 nt, Human
uaacacaacugccugccc

SEQ ID NO: 1067594 - RNA, 24 nt, Human
uaagccugaggaaugugacugggg

SEQ ID NO: 1067595 - RNA, 25 nt, Human
uaaggggucuacccgaaaaagucau

SEQ ID NO: 1067596 - RNA, 23 nt, Human
uaauugucuguguugugcuguua

SEQ ID NO: 1067597 - RNA, 22 nt, Human
uacuucuguuuuuuccaacuuu

SEQ ID NO: 1067598 - RNA, 25 nt, Human
uagcaauacaccuacaaugaggggu

SEQ ID NO: 1067599 - RNA, 21 nt, Human
ucaaguaagccugaggaaugu

SEQ ID NO: 1067600 - RNA, 24 nt, Human
ucacuagcaauacaccuacaauga

SEQ ID NO: 1067601 - RNA, 21 nt, Human
ucagcuacuagcaaguagucu

SEQ ID NO: 1067602 - RNA, 26 nt, Human
uccacaaacuccuccuucagcuacua

SEQ ID NO: 1067603 - RNA, 21 nt, Human
ucccugaaaaagaaauuccua

SEQ ID NO: 1067604 - RNA, 26 nt, Human
ucccugaaaaagaaauuccuagcccu

SEQ ID NO: 1067605 - RNA, 21 nt, Human
uccuucagcuacuagcaagua

SEQ ID NO: 1067606 - RNA, 20 nt, Human
uccuugaucauuuauuugua

SEQ ID NO: 1067607 - RNA, 19 nt, Human
ucggugccuacauaucuag

SEQ ID NO: 1067608 - RNA, 23 nt, Human
ucucauaccauauuuccccccuu

SEQ ID NO: 1067609 - RNA, 24 nt, Human
ucugaugaaucaaaguagcaacaa

SEQ ID NO: 1067610 - RNA, 19 nt, Human
ugaaucaaaguagcaacaa

SEQ ID NO: 1067611 - RNA, 23 nt, Human
ugaaucaaaguagcaacaaaacc

SEQ ID NO: 1067612 - RNA, 21 nt, Human
ugacuauguuuuuaaccaccu

SEQ ID NO: 1067613 - RNA, 24 nt, Human
ugagccgaagcaguuuuuaauuua

SEQ ID NO: 1067614 - RNA, 22 nt, Human
ugaggaaugugacugggggcua

SEQ ID NO: 1067615 - RNA, 23 nt, Human
ugccaagcuaaaaccgucaaagc

SEQ ID NO: 1067616 - RNA, 22 nt, Human
uggaaaccauuuuccaaauaaa

SEQ ID NO: 1067617 - RNA, 22 nt, Human
uggacccugccucgcauuaugc

SEQ ID NO: 1067618 - RNA, 18 nt, Human
uguggaccuccccucuaa

SEQ ID NO: 1067619 - RNA, 19 nt, Human
uguuauacaacuucugucc

SEQ ID NO: 1067620 - RNA, 24 nt, Human
uuaagggcuuacaauucuaagggg

SEQ ID NO: 1067621 - RNA, 25 nt, Human
uuacuaaauggauucuuuucagugu

SEQ ID NO: 1067622 - RNA, 23 nt, Human
uuacuucuguuuuuuccaacuuu

SEQ ID NO: 1067623 - RNA, 20 nt, Human
uucagcuccucacaaaaggu

SEQ ID NO: 1067624 - RNA, 21 nt, Human
uucagcuccucacaaaagguu

SEQ ID NO: 1067625 - RNA, 20 nt, Human
uuccacaaacuccuccuuca

SEQ ID NO: 1067626 - RNA, 21 nt, Human
uucucccuuuuuuccugucuu

SEQ ID NO: 1067627 - RNA, 21 nt, Human
uugcuagcuucggccuucuga

SEQ ID NO: 1067628 - RNA, 18 nt, Human
uugcuuucucccuuuuuu

SEQ ID NO: 1067629 - RNA, 21 nt, Human
uugcuuucucccuuuuuuccu

SEQ ID NO: 1067630 - RNA, 23 nt, Human
uugucuuuuucagaaguucuggu

SEQ ID NO: 1067631 - RNA, 19 nt, Human
uuuaaccaccuguccuuga

SEQ ID NO: 1067632 - RNA, 25 nt, Human
uuuagugggaguucucacucucauc

SEQ ID NO: 1067633 - RNA, 21 nt, Human
uuuuccacaaacuccuccuuc

SEQ ID NO: 1067634 - RNA, 23 nt, Human
uuuuccacaaacuccuccuucag

SEQ ID NO: 1067635 - RNA, 19 nt, Human
uuuuuagugggaguucuca

SEQ ID NO: 1067636 - RNA, 22 nt, Human
agcaaggaaaggagaaggcaau

SEQ ID NO: 1067637 - RNA, 19 nt, Human
aggaaaggagaaggcaaug

SEQ ID NO: 1067638 - RNA, 19 nt, Human
aggagaaggcaaugcugaa

SEQ ID NO: 1067639 - RNA, 18 nt, Human
aggcaaugcugaaccuaa

SEQ ID NO: 1067640 - RNA, 20 nt, Human
ccaaagcaaggaaaggagaa

SEQ ID NO: 1067641 - RNA, 19 nt, Human
uccucaagcauccuuggcu

SEQ ID NO: 1067642 - RNA, 23 nt, Human
ugagcagcucuacagccagguua

SEQ ID NO: 1067643 - RNA, 18 nt, Human
uggagagauuccaggcac

SEQ ID NO: 1067644 - RNA, 18 nt, Human
uggagugagcagcucuac

SEQ ID NO: 1067645 - RNA, 21 nt, Human
uggcuuggacugcagcaugaa

SEQ ID NO: 1067646 - RNA, 19 nt, Human
uucauccagugcucuuccc

SEQ ID NO: 1067647 - RNA, 21 nt, Human
uucaugggcaguacaguauaa

SEQ ID NO: 1067648 - RNA, 19 nt, Human
aagaacauagagauuggcc

SEQ ID NO: 1067649 - RNA, 20 nt, Human
aagcgcugaacaaugacagu

SEQ ID NO: 1067650 - RNA, 19 nt, Human
aaugacagugaaaauuccu

SEQ ID NO: 1067651 - RNA, 22 nt, Human
agggagggcagccugaagacug

SEQ ID NO: 1067652 - RNA, 20 nt, Human
caccaagggagggcagccug

SEQ ID NO: 1067653 - RNA, 22 nt, Human
cagcaggauguggacauacuug

SEQ ID NO: 1067654 - RNA, 22 nt, Human
ccaagcaccaagggagggcagc

SEQ ID NO: 1067655 - RNA, 18 nt, Human
cugaagacugcuugaacu

SEQ ID NO: 1067656 - RNA, 22 nt, Human
cuugggaaauuuucaggcaaag

SEQ ID NO: 1067657 - RNA, 19 nt, Human
ugagugcuuucauccaagc

SEQ ID NO: 1067658 - RNA, 19 nt, Human
acgcugugaggagaugcgg

SEQ ID NO: 1067659 - RNA, 25 nt, Human
acccacccgggccccagcccaggca

SEQ ID NO: 1067660 - RNA, 21 nt, Human
acccuccuuacccugcccccu

SEQ ID NO: 1067661 - RNA, 23 nt, Human
agaggagcgcggcgcugguagca

SEQ ID NO: 1067662 - RNA, 18 nt, Human
agagggaagggcccccug

SEQ ID NO: 1067663 - RNA, 22 nt, Human
cacacgggacggcacagcagcg

SEQ ID NO: 1067664 - RNA, 27 nt, Human
cacuuuaucacuuagaagauucacccu

SEQ ID NO: 1067665 - RNA, 22 nt, Human
ccaaauccacacgggacggcac

SEQ ID NO: 1067666 - RNA, 25 nt, Human
ccacacggcuucugcgcggcauccu

SEQ ID NO: 1067667 - RNA, 18 nt, Human
ccaggacucuucucccca

SEQ ID NO: 1067668 - RNA, 19 nt, Human
ccaggccuggccugcaguc

SEQ ID NO: 1067669 - RNA, 19 nt, Human
cccacaccugcgcagaccc

SEQ ID NO: 1067670 - RNA, 20 nt, Human
cccccggggcccagcugcuc

SEQ ID NO: 1067671 - RNA, 19 nt, Human
cccccgucuuccccgucuc

SEQ ID NO: 1067672 - RNA, 18 nt, Human
ccccggagccuccccugg

SEQ ID NO: 1067673 - RNA, 19 nt, Human
ccccgucuuccccgucucu

SEQ ID NO: 1067674 - RNA, 20 nt, Human
ccccuggugcgcugcagcca

SEQ ID NO: 1067675 - RNA, 22 nt, Human
ccccuggugcgcugcagccacg

SEQ ID NO: 1067676 - RNA, 21 nt, Human
cccgcucgggacgccucccca

SEQ ID NO: 1067677 - RNA, 19 nt, Human
cccgggccccagcccaggc

SEQ ID NO: 1067678 - RNA, 24 nt, Human
cccuccuuacccugcccccuuguc

SEQ ID NO: 1067679 - RNA, 26 nt, Human
cccuccuuacccugcccccuugucuu

SEQ ID NO: 1067680 - RNA, 24 nt, Human
ccgaggcccacacggcuucugcgc

SEQ ID NO: 1067681 - RNA, 25 nt, Human
ccgcagcaaauccuggcaacuccgc

SEQ ID NO: 1067682 - RNA, 20 nt, Human
ccgccuucagcaucuaccgg

SEQ ID NO: 1067683 - RNA, 19 nt, Human
ccuccccagcgcuccccgc

SEQ ID NO: 1067684 - RNA, 26 nt, Human
ccuuauccacuuucaugcuccucccg

SEQ ID NO: 1067685 - RNA, 22 nt, Human
cgaccuggagccaaauccacac

SEQ ID NO: 1067686 - RNA, 23 nt, Human
cgcaggccugcgucccgaggccc

SEQ ID NO: 1067687 - RNA, 27 nt, Human
cgcaggccugcgucccgaggcccacac

SEQ ID NO: 1067688 - RNA, 24 nt, Human
cgccucauuucuccaaaaguccgc

SEQ ID NO: 1067689 - RNA, 19 nt, Human
cgcugcagccacgcaggcc

SEQ ID NO: 1067690 - RNA, 21 nt, Human
cggaggccuaacccccucccu

SEQ ID NO: 1067691 - RNA, 21 nt, Human
cggcacagcagcguccugccg

SEQ ID NO: 1067692 - RNA, 20 nt, Human
cggcuucugcgcggcauccu

SEQ ID NO: 1067693 - RNA, 24 nt, Human
cgguagaagaaauagugaaagucu

SEQ ID NO: 1067694 - RNA, 19 nt, Human
cucccguacuccuggcucc

SEQ ID NO: 1067695 - RNA, 21 nt, Human
cucccguacuccuggcuccuc

SEQ ID NO: 1067696 - RNA, 24 nt, Human
cucuuuguggcauuacuaauacaa

SEQ ID NO: 1067697 - RNA, 21 nt, Human
cuggauauucuccaggccugg

SEQ ID NO: 1067698 - RNA, 26 nt, Human
cuuggucaagcgguaacgccagugcc

SEQ ID NO: 1067699 - RNA, 21 nt, Human
gaaaaugcugacauaugcugc

SEQ ID NO: 1067700 - RNA, 20 nt, Human
gaccuagaaggcaagaggug

SEQ ID NO: 1067701 - RNA, 19 nt, Human
gacgcggggcugggcugga

SEQ ID NO: 1067702 - RNA, 18 nt, Human
gauucacccuccuuaccc

SEQ ID NO: 1067703 - RNA, 18 nt, Human
gcacacggggaggacacc

SEQ ID NO: 1067704 - RNA, 19 nt, Human
gcagagaagaaaaugcuga

SEQ ID NO: 1067705 - RNA, 19 nt, Human
gccucauuucuccaaaagu

SEQ ID NO: 1067706 - RNA, 23 nt, Human
gccucccccgucuuccccgucuc

SEQ ID NO: 1067707 - RNA, 18 nt, Human
gcgcccgcucgggacgcc

SEQ ID NO: 1067708 - RNA, 18 nt, Human
gcugcagccacgcaggcc

SEQ ID NO: 1067709 - RNA, 19 nt, Human
gcugcagccacgcaggccu

SEQ ID NO: 1067710 - RNA, 18 nt, Human
gcugcgggacgggcggac

SEQ ID NO: 1067711 - RNA, 23 nt, Human
ggacucuucuccccaggugcucc

SEQ ID NO: 1067712 - RNA, 24 nt, Human
ggcaagaggugagcccucugucac

SEQ ID NO: 1067713 - RNA, 21 nt, Human
ggcgcugguagcaggcgacgc

SEQ ID NO: 1067714 - RNA, 21 nt, Human
gggaggcuggauauucuccag

SEQ ID NO: 1067715 - RNA, 21 nt, Human
gggccccagcccaggcagccc

SEQ ID NO: 1067716 - RNA, 21 nt, Human
gugcagagaagaaaaugcuga

SEQ ID NO: 1067717 - RNA, 24 nt, Human
uagcaggcgacgccaggacucuuc

SEQ ID NO: 1067718 - RNA, 18 nt, Human
uaguggucccccggggcc

SEQ ID NO: 1067719 - RNA, 19 nt, Human
ucacggagggcuccggcag

SEQ ID NO: 1067720 - RNA, 20 nt, Human
ucagcaucuaccgggagccg

SEQ ID NO: 1067721 - RNA, 21 nt, Human
uccccaggugcucccgccgcg

SEQ ID NO: 1067722 - RNA, 19 nt, Human
ucccccggggcccagcugc

SEQ ID NO: 1067723 - RNA, 22 nt, Human
ucccccgucuuccccgucuccc

SEQ ID NO: 1067724 - RNA, 18 nt, Human
uccccuggugcgcugcag

SEQ ID NO: 1067725 - RNA, 23 nt, Human
uccccuggugcgcugcagccacg

SEQ ID NO: 1067726 - RNA, 23 nt, Human
ucccgaggcccacacggcuucug

SEQ ID NO: 1067727 - RNA, 22 nt, Human
uccuaugaucacgugacuugcu

SEQ ID NO: 1067728 - RNA, 24 nt, Human
ucuccaaaaguccgcagcaaaucc

SEQ ID NO: 1067729 - RNA, 20 nt, Human
ucucuggucucugcacacgg

SEQ ID NO: 1067730 - RNA, 18 nt, Human
ucuuaaagucuuugaucg

SEQ ID NO: 1067731 - RNA, 23 nt, Human
ugagaagugaccuagaaggcaag

SEQ ID NO: 1067732 - RNA, 19 nt, Human
ugagggcuccuuggucaag

SEQ ID NO: 1067733 - RNA, 20 nt, Human
ugccuaagagggaagggccc

SEQ ID NO: 1067734 - RNA, 19 nt, Human
ugcgcagacccacccgggc

SEQ ID NO: 1067735 - RNA, 19 nt, Human
uggcauuacuaauacaacc

SEQ ID NO: 1067736 - RNA, 24 nt, Human
uggucaagcgguaacgccagugcc

SEQ ID NO: 1067737 - RNA, 23 nt, Human
ugugggaggcuggauauucucca

SEQ ID NO: 1067738 - RNA, 22 nt, Human
uucuccaaaaguccgcagcaaa

SEQ ID NO: 1067739 - RNA, 22 nt, Human
uuuaucacuuagaagauucacc

SEQ ID NO: 1067740 - RNA, 28 nt, Human
aaaacaaaaaccaaacaaacaaaaacaa

SEQ ID NO: 1067741 - RNA, 18 nt, Human
aaaacagcucacaucuga

SEQ ID NO: 1067742 - RNA, 24 nt, Human
aaacaaaaaccaaacaaacaaaaa

SEQ ID NO: 1067743 - RNA, 25 nt, Human
aaacaaaaaccaaacaaacaaaaac

SEQ ID NO: 1067744 - RNA, 22 nt, Human
aaaccaaacaaacaaaaacaaa

SEQ ID NO: 1067745 - RNA, 19 nt, Human
aagggguaggggggugggg

SEQ ID NO: 1067746 - RNA, 19 nt, Human
aauuccuagccccguccuc

SEQ ID NO: 1067747 - RNA, 24 nt, Human
acaaaaaccaaacaaacaaaaaca

SEQ ID NO: 1067748 - RNA, 25 nt, Human
acaaacaaaaacaaaaacuuugaag

SEQ ID NO: 1067749 - RNA, 21 nt, Human
acagggagauugggugccagg

SEQ ID NO: 1067750 - RNA, 22 nt, Human
accaaacaaacaaaaacaaaaa

SEQ ID NO: 1067751 - RNA, 18 nt, Human
acccugggcugaggaccc

SEQ ID NO: 1067752 - RNA, 21 nt, Human
acuagcugacucccaaaacag

SEQ ID NO: 1067753 - RNA, 20 nt, Human
agacuccuaaggcagcuccu

SEQ ID NO: 1067754 - RNA, 18 nt, Human
agaggagcugacucagag

SEQ ID NO: 1067755 - RNA, 23 nt, Human
agcccuggucaauuccuagcccc

SEQ ID NO: 1067756 - RNA, 22 nt, Human
agccugcugcuggucucugauc

SEQ ID NO: 1067757 - RNA, 19 nt, Human
aggaagcaaguggaggugg

SEQ ID NO: 1067758 - RNA, 19 nt, Human
aggacccacggacaccgga

SEQ ID NO: 1067759 - RNA, 22 nt, Human
aggccccccccccuccccgccc

SEQ ID NO: 1067760 - RNA, 24 nt, Human
aggccccccccccuccccgcccag

SEQ ID NO: 1067761 - RNA, 21 nt, Human
aggggacagugaaggacaggg

SEQ ID NO: 1067762 - RNA, 20 nt, Human
aggggggugggguccucagg

SEQ ID NO: 1067763 - RNA, 23 nt, Human
agguggcugggguggggcagugu

SEQ ID NO: 1067764 - RNA, 19 nt, Human
agguguuguguggcaaccc

SEQ ID NO: 1067765 - RNA, 22 nt, Human
agguguuguguggcaaccccca

SEQ ID NO: 1067766 - RNA, 24 nt, Human
agguguuguguggcaacccccaga

SEQ ID NO: 1067767 - RNA, 26 nt, Human
caaaaacaaaaacuuugaagcacaaa

SEQ ID NO: 1067768 - RNA, 23 nt, Human
caaaaaccaaacaaacaaaaaca

SEQ ID NO: 1067769 - RNA, 23 nt, Human
caaaacaaaaaccaaacaaacaa

SEQ ID NO: 1067770 - RNA, 26 nt, Human
caaaacaaaaaccaaacaaacaaaaa

SEQ ID NO: 1067771 - RNA, 27 nt, Human
caaaacaaaaaccaaacaaacaaaaac

SEQ ID NO: 1067772 - RNA, 24 nt, Human
caaaacuccaaauacaagucuacc

SEQ ID NO: 1067773 - RNA, 22 nt, Human
caaacaaaaacaaaaacuuuga

SEQ ID NO: 1067774 - RNA, 21 nt, Human
caacccccagaugggcccaga

SEQ ID NO: 1067775 - RNA, 20 nt, Human
cacaaaacuccaaauacaag

SEQ ID NO: 1067776 - RNA, 19 nt, Human
cacagcaccuugguuucug

SEQ ID NO: 1067777 - RNA, 19 nt, Human
caccugggccaccauccau

SEQ ID NO: 1067778 - RNA, 20 nt, Human
cacuuuagcaaggggccaga

SEQ ID NO: 1067779 - RNA, 24 nt, Human
cagaagacugcccagggcugccca

SEQ ID NO: 1067780 - RNA, 22 nt, Human
cagaagccacgggaucuggaga

SEQ ID NO: 1067781 - RNA, 22 nt, Human
cagagcagcuaaauucugggcc

SEQ ID NO: 1067782 - RNA, 22 nt, Human
cagagggacaggggcgagguuc

SEQ ID NO: 1067783 - RNA, 18 nt, Human
cagccgcuccagcucucu

SEQ ID NO: 1067784 - RNA, 18 nt, Human
cagccugcugcuggucuc

SEQ ID NO: 1067785 - RNA, 18 nt, Human
cagcuuccugccccucac

SEQ ID NO: 1067786 - RNA, 21 nt, Human
caggaaaagguaaguuaggug

SEQ ID NO: 1067787 - RNA, 22 nt, Human
caggccccccccccuccccccu

SEQ ID NO: 1067788 - RNA, 18 nt, Human
cagggcugcccacuccug

SEQ ID NO: 1067789 - RNA, 22 nt, Human
ccaaacaaacaaaaacaaaaac

SEQ ID NO: 1067790 - RNA, 23 nt, Human
ccaaacaaacaaaaacaaaaacu

SEQ ID NO: 1067791 - RNA, 19 nt, Human
ccaaaggcugcuggggaag

SEQ ID NO: 1067792 - RNA, 21 nt, Human
ccaccagggcgcagcgccuga

SEQ ID NO: 1067793 - RNA, 23 nt, Human
ccacccccucaaaacaaaaacca

SEQ ID NO: 1067794 - RNA, 20 nt, Human
ccacgggaucuggagaaccc

SEQ ID NO: 1067795 - RNA, 24 nt, Human
ccagaagacugcccagggcugccc

SEQ ID NO: 1067796 - RNA, 26 nt, Human
ccagcuggucucaaaaguggcuguca

SEQ ID NO: 1067797 - RNA, 26 nt, Human
ccauccaucucauuacccuaagagcc

SEQ ID NO: 1067798 - RNA, 24 nt, Human
ccccacccccucaaaacaaaaacc

SEQ ID NO: 1067799 - RNA, 27 nt, Human
ccccacccccucaaaacaaaaaccaaa

SEQ ID NO: 1067800 - RNA, 19 nt, Human
ccccagcuuccugccccuc

SEQ ID NO: 1067801 - RNA, 22 nt, Human
ccccccacccccucaaaacaaa

SEQ ID NO: 1067802 - RNA, 21 nt, Human
ccccccccacccccucaaaac

SEQ ID NO: 1067803 - RNA, 25 nt, Human
ccccccccacccccucaaaacaaaa

SEQ ID NO: 1067804 - RNA, 18 nt, Human
cccccucaaaacaaaaac

SEQ ID NO: 1067805 - RNA, 20 nt, Human
ccccucaaaacaaaaaccaa

SEQ ID NO: 1067806 - RNA, 24 nt, Human
ccccucaaaacaaaaaccaaacaa

SEQ ID NO: 1067807 - RNA, 19 nt, Human
ccccuccccgcccaggucu

SEQ ID NO: 1067808 - RNA, 20 nt, Human
cccggcagagggacaggggc

SEQ ID NO: 1067809 - RNA, 19 nt, Human
ccggcagagggacaggggc

SEQ ID NO: 1067810 - RNA, 20 nt, Human
ccuagccccguccuccgacc

SEQ ID NO: 1067811 - RNA, 24 nt, Human
ccucucugagcaaaggccucuagu

SEQ ID NO: 1067812 - RNA, 22 nt, Human
cgacccaagacuccuaaggcag

SEQ ID NO: 1067813 - RNA, 27 nt, Human
cggcaggcaaagcccuggucaauuccu

SEQ ID NO: 1067814 - RNA, 19 nt, Human
cggcuuucuggagggcagc

SEQ ID NO: 1067815 - RNA, 27 nt, Human
cgucccaucccgccugacugcagcuca

SEQ ID NO: 1067816 - RNA, 19 nt, Human
cuccauacuagcugacucc

SEQ ID NO: 1067817 - RNA, 21 nt, Human
cucuagacagggcagacagcc

SEQ ID NO: 1067818 - RNA, 24 nt, Human
cucuagacagggcagacagccugc

SEQ ID NO: 1067819 - RNA, 22 nt, Human
cucucugagcaaaggccucuag

SEQ ID NO: 1067820 - RNA, 24 nt, Human
cugaaugucaggaagaauccacaa

SEQ ID NO: 1067821 - RNA, 21 nt, Human
gagacggaagcgugcugcaga

SEQ ID NO: 1067822 - RNA, 21 nt, Human
gagcugacucagaggacaguc

SEQ ID NO: 1067823 - RNA, 22 nt, Human
gagcugacucagaggacagucu

SEQ ID NO: 1067824 - RNA, 21 nt, Human
gagcuggcaggggacucccag

SEQ ID NO: 1067825 - RNA, 21 nt, Human
gagguggcugggguggggcag

SEQ ID NO: 1067826 - RNA, 26 nt, Human
gcaaaguugccuccacucaacagaag

SEQ ID NO: 1067827 - RNA, 18 nt, Human
gccccccccccuccccgc

SEQ ID NO: 1067828 - RNA, 19 nt, Human
gcgccaaguggaacuggag

SEQ ID NO: 1067829 - RNA, 22 nt, Human
gcucuguauccccccccacccc

SEQ ID NO: 1067830 - RNA, 20 nt, Human
gcuggggaagggguaggggg

SEQ ID NO: 1067831 - RNA, 21 nt, Human
ggacaagagacaggguugggg

SEQ ID NO: 1067832 - RNA, 24 nt, Human
ggacagucuaagucagggugagga

SEQ ID NO: 1067833 - RNA, 22 nt, Human
ggagagaggugaggguccaaag

SEQ ID NO: 1067834 - RNA, 21 nt, Human
ggagauugggugccaggggcc

SEQ ID NO: 1067835 - RNA, 19 nt, Human
ggagggaaggaggaggaag

SEQ ID NO: 1067836 - RNA, 22 nt, Human
ggcccuggaaaaugcaccuggg

SEQ ID NO: 1067837 - RNA, 19 nt, Human
ggggaagagcucuagacag

SEQ ID NO: 1067838 - RNA, 21 nt, Human
ggggaagggguaggggggugg

SEQ ID NO: 1067839 - RNA, 22 nt, Human
ggggggugggguccucagggag

SEQ ID NO: 1067840 - RNA, 23 nt, Human
ggguuggggucuggcuggcucuu

SEQ ID NO: 1067841 - RNA, 20 nt, Human
guauccccccccacccccuc

SEQ ID NO: 1067842 - RNA, 20 nt, Human
gucagagcagcuaaauucug

SEQ ID NO: 1067843 - RNA, 26 nt, Human
uaaaauaaauaaauacaaauugauca

SEQ ID NO: 1067844 - RNA, 18 nt, Human
uaaagcaguguuuuggaa

SEQ ID NO: 1067845 - RNA, 19 nt, Human
uaagaaggaccacgcccua

SEQ ID NO: 1067846 - RNA, 21 nt, Human
uaagagaaugaagagaggaaa

SEQ ID NO: 1067847 - RNA, 21 nt, Human
uaccaagacugaaaucacaaa

SEQ ID NO: 1067848 - RNA, 25 nt, Human
uaccaagacugaaaucacaaagggc

SEQ ID NO: 1067849 - RNA, 21 nt, Human
uaccccggcuuucuggagggc

SEQ ID NO: 1067850 - RNA, 21 nt, Human
uagcugacucccaaaacagcu

SEQ ID NO: 1067851 - RNA, 22 nt, Human
uagguuugggggcuggguugca

SEQ ID NO: 1067852 - RNA, 22 nt, Human
uaucagagguggcuggagaggc

SEQ ID NO: 1067853 - RNA, 19 nt, Human
ucacaggccccccccccuc

SEQ ID NO: 1067854 - RNA, 26 nt, Human
ucacaggccccccccccuccccgccc

SEQ ID NO: 1067855 - RNA, 19 nt, Human
ucaggaaaagguaaguuag

SEQ ID NO: 1067856 - RNA, 23 nt, Human
ucauuacccuaagagccuuuugc

SEQ ID NO: 1067857 - RNA, 25 nt, Human
uccacucaacagaagccacgggauc

SEQ ID NO: 1067858 - RNA, 22 nt, Human
ucccagucagggcccagugggc

SEQ ID NO: 1067859 - RNA, 20 nt, Human
uccccgcccaggucugaggg

SEQ ID NO: 1067860 - RNA, 21 nt, Human
ucucagguggucacaggcccc

SEQ ID NO: 1067861 - RNA, 30 nt, Human
ucuccuaaauucagcccuuuagauaaauaa

SEQ ID NO: 1067862 - RNA, 24 nt, Human
ucucugauccucugccaacgauuc

SEQ ID NO: 1067863 - RNA, 24 nt, Human
ugaagagugugugugagcugggag

SEQ ID NO: 1067864 - RNA, 18 nt, Human
ugaagugacuacaaagcc

SEQ ID NO: 1067865 - RNA, 22 nt, Human
ugaccucuggccugcccguccc

SEQ ID NO: 1067866 - RNA, 22 nt, Human
ugacugcagcucacccugggcu

SEQ ID NO: 1067867 - RNA, 22 nt, Human
ugaggguccaaaggcugcuggg

SEQ ID NO: 1067868 - RNA, 20 nt, Human
ugaugaugguuucccaacuu

SEQ ID NO: 1067869 - RNA, 23 nt, Human
ugcuaggagcuggcugaccucug

SEQ ID NO: 1067870 - RNA, 18 nt, Human
ugcucuguaucccccccc

SEQ ID NO: 1067871 - RNA, 23 nt, Human
ugcugagggcggcaggcaaagcc

SEQ ID NO: 1067872 - RNA, 22 nt, Human
uggcaacccccagaugggccca

SEQ ID NO: 1067873 - RNA, 22 nt, Human
uggcaggggacucccagucagg

SEQ ID NO: 1067874 - RNA, 19 nt, Human
uggcugggguggggcagug

SEQ ID NO: 1067875 - RNA, 19 nt, Human
ugggagggggcgccaagug

SEQ ID NO: 1067876 - RNA, 19 nt, Human
ugggcagccgcuccagcuc

SEQ ID NO: 1067877 - RNA, 24 nt, Human
uggggucuggcuggcucuucucug

SEQ ID NO: 1067878 - RNA, 21 nt, Human
uuccuccaacuaguccaggca

SEQ ID NO: 1067879 - RNA, 20 nt, Human
uucuggagggcagccccagc

SEQ ID NO: 1067880 - RNA, 22 nt, Human
uugaagcacaaaacuccaaaua

SEQ ID NO: 1067881 - RNA, 23 nt, Human
uuggggucuggcuggcucuucuc

SEQ ID NO: 1067882 - RNA, 29 nt, Human
uuugccccuggguaaaaagucuccuaaau

SEQ ID NO: 1067883 - RNA, 18 nt, Human
uuuucagaguuccuaccc

SEQ ID NO: 1067884 - RNA, 23 nt, Human
uuuuucagaguuccuaccccggc

SEQ ID NO: 1067885 - RNA, 18 nt, Human
ccuggcuccugucguccc

SEQ ID NO: 1067886 - RNA, 20 nt, Human
guccuggcuccugucguccc

SEQ ID NO: 1067887 - RNA, 21 nt, Human
aaagagacagaguuagcauca

SEQ ID NO: 1067888 - RNA, 20 nt, Human
aacaccaucagcagcugcca

SEQ ID NO: 1067889 - RNA, 18 nt, Human
acaaagcaaaacaaugcu

SEQ ID NO: 1067890 - RNA, 24 nt, Human
acacaaaucuuuuaggauuggcac

SEQ ID NO: 1067891 - RNA, 27 nt, Human
acagagaaaaauauaucuuguccuuuu

SEQ ID NO: 1067892 - RNA, 18 nt, Human
agggucacuuugcugagc

SEQ ID NO: 1067893 - RNA, 21 nt, Human
agugcagaaaaaaguaaguac

SEQ ID NO: 1067894 - RNA, 23 nt, Human
aguuauagaaauacagagaaaaa

SEQ ID NO: 1067895 - RNA, 21 nt, Human
aucuuuuaggauuggcaccau

SEQ ID NO: 1067896 - RNA, 22 nt, Human
caacugagaaacaggcaaguau

SEQ ID NO: 1067897 - RNA, 23 nt, Human
caagcugccacaacagagaaaga

SEQ ID NO: 1067898 - RNA, 24 nt, Human
caauagacaguagagacucuccca

SEQ ID NO: 1067899 - RNA, 19 nt, Human
cacagaacugcagcagagc

SEQ ID NO: 1067900 - RNA, 21 nt, Human
cacugaucuguauuuuuucac

SEQ ID NO: 1067901 - RNA, 23 nt, Human
ccuagaaugaauauucaguucuc

SEQ ID NO: 1067902 - RNA, 21 nt, Human
ccucuucaaagugaauucuga

SEQ ID NO: 1067903 - RNA, 22 nt, Human
cgacugaauuaucacugggcac

SEQ ID NO: 1067904 - RNA, 19 nt, Human
ggcuuggaagucacagaac

SEQ ID NO: 1067905 - RNA, 23 nt, Human
uaaaaagagcauuuaauuccugg

SEQ ID NO: 1067906 - RNA, 22 nt, Human
uaaaaccaaaucaguuauaagu

SEQ ID NO: 1067907 - RNA, 19 nt, Human
uaccuuugaagucuccaaa

SEQ ID NO: 1067908 - RNA, 21 nt, Human
uagaguuauuacuuggaaccu

SEQ ID NO: 1067909 - RNA, 20 nt, Human
uauacaauucauuuacaguc

SEQ ID NO: 1067910 - RNA, 24 nt, Human
uauagcccuagaaugaauauucag

SEQ ID NO: 1067911 - RNA, 25 nt, Human
uauuauuuuaauaguacaagcugcc

SEQ ID NO: 1067912 - RNA, 23 nt, Human
uccaaaauaaaagaucucaagaa

SEQ ID NO: 1067913 - RNA, 22 nt, Human
ucccaggccucagacccucuuc

SEQ ID NO: 1067914 - RNA, 21 nt, Human
ucucccaggccucagacccuc

SEQ ID NO: 1067915 - RNA, 26 nt, Human
ugccacaacagagaaagaacagauac

SEQ ID NO: 1067916 - RNA, 20 nt, Human
ugcuuuuuaagagauauguu

SEQ ID NO: 1067917 - RNA, 19 nt, Human
ugugaaguucauauccuau

SEQ ID NO: 1067918 - RNA, 25 nt, Human
uguuacuaaaaaaauagaaaaugaa

SEQ ID NO: 1067919 - RNA, 24 nt, Human
uuaauuccuggcuuggaagucaca

SEQ ID NO: 1067920 - RNA, 19 nt, Human
uuauuauuacaguugauua

SEQ ID NO: 1067921 - RNA, 24 nt, Human
uucacaguauaaaauuguaaaugg

SEQ ID NO: 1067922 - RNA, 19 nt, Human
uuggaagucacagaacugc

SEQ ID NO: 1067923 - RNA, 19 nt, Human
uuuaaaaccaaaucaguua

SEQ ID NO: 1067924 - RNA, 26 nt, Human
uuucuaauuacaacaccaucagcagc

SEQ ID NO: 1067925 - RNA, 24 nt, Human
uuugaagucuccaaaacauguaca

SEQ ID NO: 1067926 - RNA, 18 nt, Human
aaaaugcucuacaacauu

SEQ ID NO: 1067927 - RNA, 20 nt, Human
caacucuuuaaaacaaaaua

SEQ ID NO: 1067928 - RNA, 23 nt, Human
caaugaaaauuuaccccaagcau

SEQ ID NO: 1067929 - RNA, 23 nt, Human
caugaaaacuaagccgucagaga

SEQ ID NO: 1067930 - RNA, 21 nt, Human
cauuaagaaaaccucagcaaa

SEQ ID NO: 1067931 - RNA, 23 nt, Human
ccacucuacaaaaugcucuacaa

SEQ ID NO: 1067932 - RNA, 23 nt, Human
cccaagcauacaacucuuuaaaa

SEQ ID NO: 1067933 - RNA, 24 nt, Human
cuagugaugccaguaguucaugcc

SEQ ID NO: 1067934 - RNA, 20 nt, Human
cucuacaacauuaagaaaac

SEQ ID NO: 1067935 - RNA, 20 nt, Human
gugggaauuagacucuguuu

SEQ ID NO: 1067936 - RNA, 21 nt, Human
uaaauuccacauaugacaaug

SEQ ID NO: 1067937 - RNA, 18 nt, Human
uacaaaaugcucuacaac

SEQ ID NO: 1067938 - RNA, 21 nt, Human
uaucugucaucaaaauaucac

SEQ ID NO: 1067939 - RNA, 21 nt, Human
uccacauaugacaaugaaaau

SEQ ID NO: 1067940 - RNA, 23 nt, Human
ugcuuuuuuuccuagacaugaaa

SEQ ID NO: 1067941 - RNA, 24 nt, Human
uuaaauuccacauaugacaaugaa

SEQ ID NO: 1067942 - RNA, 23 nt, Human
auaguuuuugaagaagauauugg

SEQ ID NO: 1067943 - RNA, 20 nt, Human
gagacgguggcugcccgggc

SEQ ID NO: 1067944 - RNA, 22 nt, Human
gagacgguggcugcccgggcuc

SEQ ID NO: 1067945 - RNA, 21 nt, Human
guaauagaugcuucauccaca

SEQ ID NO: 1067946 - RNA, 22 nt, Human
uguaucuuuugucucucugggg

SEQ ID NO: 1067947 - RNA, 25 nt, Human
aaaaacauuacagguacacauggaa

SEQ ID NO: 1067948 - RNA, 21 nt, Human
aacucgccuuccuccaucccc

SEQ ID NO: 1067949 - RNA, 21 nt, Human
acucgccuuccuccauccccu

SEQ ID NO: 1067950 - RNA, 22 nt, Human
acuuugagacaugauggaaaaa

SEQ ID NO: 1067951 - RNA, 22 nt, Human
augacuguacuuugagacauga

SEQ ID NO: 1067952 - RNA, 24 nt, Human
augauggaaaaacauuacagguac

SEQ ID NO: 1067953 - RNA, 19 nt, Human
cagaauccacaccaaccuc

SEQ ID NO: 1067954 - RNA, 21 nt, Human
cagaauccacaccaaccuccu

SEQ ID NO: 1067955 - RNA, 21 nt, Human
caggagcagacacuggguccc

SEQ ID NO: 1067956 - RNA, 19 nt, Human
cauuacagguacacaugga

SEQ ID NO: 1067957 - RNA, 24 nt, Human
ccaaccuccucauaauccuucuca

SEQ ID NO: 1067958 - RNA, 24 nt, Human
cccacguaccagugaacaaaggca

SEQ ID NO: 1067959 - RNA, 22 nt, Human
ccuccauccccucacccacgua

SEQ ID NO: 1067960 - RNA, 19 nt, Human
cgagcccaggccucagcaa

SEQ ID NO: 1067961 - RNA, 22 nt, Human
cucacccacguaccagugaaca

SEQ ID NO: 1067962 - RNA, 18 nt, Human
gacuguacuuugagacau

SEQ ID NO: 1067963 - RNA, 23 nt, Human
guccaggcgagcccaggccucag

SEQ ID NO: 1067964 - RNA, 25 nt, Human
uaaccagaaagcuuuaaugucuguc

SEQ ID NO: 1067965 - RNA, 18 nt, Human
uaccagugaacaaaggca

SEQ ID NO: 1067966 - RNA, 20 nt, Human
ucacgggccucugaaaacuc

SEQ ID NO: 1067967 - RNA, 20 nt, Human
ucagcuaagcugaagcugaa

SEQ ID NO: 1067968 - RNA, 22 nt, Human
uccacaccaaccuccucauaau

SEQ ID NO: 1067969 - RNA, 20 nt, Human
uccucucuuucuuccucacc

SEQ ID NO: 1067970 - RNA, 25 nt, Human
ucugaaaacucgccuuccuccaucc

SEQ ID NO: 1067971 - RNA, 18 nt, Human
ucuuucuuccucacccuc

SEQ ID NO: 1067972 - RNA, 20 nt, Human
ucuuucuuccucacccucuc

SEQ ID NO: 1067973 - RNA, 22 nt, Human
ugaaauucugggagcacgacau

SEQ ID NO: 1067974 - RNA, 21 nt, Human
ugagacaugauggaaaaacau

SEQ ID NO: 1067975 - RNA, 19 nt, Human
uggcauacaucaggucaaa

SEQ ID NO: 1067976 - RNA, 25 nt, Human
ugguccaggcgagcccaggccucag

SEQ ID NO: 1067977 - RNA, 22 nt, Human
aaaguacacauucaaggugguu

SEQ ID NO: 1067978 - RNA, 22 nt, Human
acaauaaaucaucgugaaaccc

SEQ ID NO: 1067979 - RNA, 19 nt, Human
acaggcucucgcacauagu

SEQ ID NO: 1067980 - RNA, 21 nt, Human
aggcucucgcacauagugucu

SEQ ID NO: 1067981 - RNA, 19 nt, Human
cacauucaaggugguuauc

SEQ ID NO: 1067982 - RNA, 22 nt, Human
cacauucaaggugguuauccca

SEQ ID NO: 1067983 - RNA, 18 nt, Human
cauuccaugaaguuacaa

SEQ ID NO: 1067984 - RNA, 22 nt, Human
cauuccaugaaguuacaaugag

SEQ ID NO: 1067985 - RNA, 23 nt, Human
aaaauguccucgcccuccuuucg

SEQ ID NO: 1067986 - RNA, 18 nt, Human
accauauuuaauagaaac

SEQ ID NO: 1067987 - RNA, 18 nt, Human
agacaaauuagcccacag

SEQ ID NO: 1067988 - RNA, 21 nt, Human
aggcucagacacuugcagcag

SEQ ID NO: 1067989 - RNA, 22 nt, Human
augagagacaaauuagcccaca

SEQ ID NO: 1067990 - RNA, 22 nt, Human
caacucugaauccacugagccu

SEQ ID NO: 1067991 - RNA, 23 nt, Human
caauaaaguaucacucacacucu

SEQ ID NO: 1067992 - RNA, 27 nt, Human
cagaguaaaaucaacucugaauccacu

SEQ ID NO: 1067993 - RNA, 25 nt, Human
ccaaaaugagagacaaauuagccca

SEQ ID NO: 1067994 - RNA, 21 nt, Human
ccagcaucugguucugguggu

SEQ ID NO: 1067995 - RNA, 23 nt, Human
ccuccugcaaaagagccaugaau

SEQ ID NO: 1067996 - RNA, 18 nt, Human
ccucgcccuccuuucgca

SEQ ID NO: 1067997 - RNA, 23 nt, Human
ccugcacugagcucuggauucac

SEQ ID NO: 1067998 - RNA, 21 nt, Human
ccuuccagcaucugguucugg

SEQ ID NO: 1067999 - RNA, 19 nt, Human
cucacauaauccuuccagc

SEQ ID NO: 1068000 - RNA, 20 nt, Human
cuccaaaagccugaguagcu

SEQ ID NO: 1068001 - RNA, 23 nt, Human
cucccugggauguuccauucugg

SEQ ID NO: 1068002 - RNA, 18 nt, Human
cuuggcuuucauugaguu

SEQ ID NO: 1068003 - RNA, 20 nt, Human
gaagcacaagugaggacaau

SEQ ID NO: 1068004 - RNA, 20 nt, Human
gacacuugcagcagcgggga

SEQ ID NO: 1068005 - RNA, 19 nt, Human
gaguuugcuuuguuucucc

SEQ ID NO: 1068006 - RNA, 23 nt, Human
gcacugagcucuggauucacagg

SEQ ID NO: 1068007 - RNA, 27 nt, Human
gcgaaaaagagggcuuucugggauaaa

SEQ ID NO: 1068008 - RNA, 25 nt, Human
gcuuuguuucuccucauguuuguca

SEQ ID NO: 1068009 - RNA, 30 nt, Human; identical to SEQ ID NO: 846133

SEQ ID NO: 1068010 - RNA, 18 nt, Human
uacgaaggacccaaaaug

SEQ ID NO: 1068011 - RNA, 30 nt, Human; identical to SEQ ID NO: 846135

SEQ ID NO: 1068012 - RNA, 22 nt, Human
ucaacucugaauccacugagcc

SEQ ID NO: 1068013 - RNA, 18 nt, Human
ucacucacacucugauau

SEQ ID NO: 1068014 - RNA, 19 nt, Human
ucacucacacucugauaua

SEQ ID NO: 1068015 - RNA, 19 nt, Human
uccacaucugcuuuauggu

SEQ ID NO: 1068016 - RNA, 22 nt, Human
ucuccaaaagccugaguagcuc

SEQ ID NO: 1068017 - RNA, 20 nt, Human
ugaaaaauguccucgcccuc

SEQ ID NO: 1068018 - RNA, 21 nt, Human
ugaaaaauguccucgcccucc

SEQ ID NO: 1068019 - RNA, 18 nt, Human
ugagagacaaauuagccc

SEQ ID NO: 1068020 - RNA, 22 nt, Human
ugagauuuucacaagcuuuuug

SEQ ID NO: 1068021 - RNA, 18 nt, Human
ugagccuguccagcaguc

SEQ ID NO: 1068022 - RNA, 23 nt, Human
ugaguagcuccacaucugcuuua

SEQ ID NO: 1068023 - RNA, 21 nt, Human
uggcuuggcuuucauugaguu

SEQ ID NO: 1068024 - RNA, 21 nt, Human
ugguucuggugguuucugugu

SEQ ID NO: 1068025 - RNA, 19 nt, Human
ugguucuuucaggcugcag

SEQ ID NO: 1068026 - RNA, 22 nt, Human
ugucuccaaaagccugaguagc

SEQ ID NO: 1068027 - RNA, 24 nt, Human
uucacaagcuuuuugccauaaaga

SEQ ID NO: 1068028 - RNA, 19 nt, Human
uugaugaggugcgaaaaag

SEQ ID NO: 1068029 - RNA, 19 nt, Human
aaaggcccaauuccaagag

SEQ ID NO: 1068030 - RNA, 20 nt, Human
aacacacccaagacuaaaga

SEQ ID NO: 1068031 - RNA, 18 nt, Human
agaggaggugagaaggag

SEQ ID NO: 1068032 - RNA, 19 nt, Human
agagucccccacauggacc

SEQ ID NO: 1068033 - RNA, 23 nt, Human
agagucccccacauggaccuccc

SEQ ID NO: 1068034 - RNA, 24 nt, Human
aguacuccucaaggucaggagcuc

SEQ ID NO: 1068035 - RNA, 23 nt, Human
auaaaacagaacguauuuguccu

SEQ ID NO: 1068036 - RNA, 18 nt, Human
caaaacacagcuuccucu

SEQ ID NO: 1068037 - RNA, 24 nt, Human
caagacuaaagagucccuccucuc

SEQ ID NO: 1068038 - RNA, 21 nt, Human
caccaaaggcccaauuccaag

SEQ ID NO: 1068039 - RNA, 18 nt, Human
caccccaugcaagaaaac

SEQ ID NO: 1068040 - RNA, 19 nt, Human
cucaaggucaggagcucau

SEQ ID NO: 1068041 - RNA, 23 nt, Human
cuuaacacacccaagacuaaaga

SEQ ID NO: 1068042 - RNA, 18 nt, Human
gaacacauaucugauuug

SEQ ID NO: 1068043 - RNA, 20 nt, Human
gaaggagcaauuagggaugg

SEQ ID NO: 1068044 - RNA, 22 nt, Human
gagaaauaauucuguuaaguac

SEQ ID NO: 1068045 - RNA, 19 nt, Human
gugguaaagaggcugcacu

SEQ ID NO: 1068046 - RNA, 22 nt, Human
guuaaguacuccucaaggucag

SEQ ID NO: 1068047 - RNA, 20 nt, Human
uaaagaggcugcacugaaug

SEQ ID NO: 1068048 - RNA, 23 nt, Human
uagcuucacaauccaggaauaau

SEQ ID NO: 1068049 - RNA, 21 nt, Human
ucagaggucaccaaaacacag

SEQ ID NO: 1068050 - RNA, 18 nt, Human
uccucaaggucaggagcu

SEQ ID NO: 1068051 - RNA, 18 nt, Human
ucgcuggguucuuugaag

SEQ ID NO: 1068052 - RNA, 19 nt, Human
ucgucccuuuccaauacuu

SEQ ID NO: 1068053 - RNA, 23 nt, Human
ugaacacagcaaaagauaggccu

SEQ ID NO: 1068054 - RNA, 25 nt, Human
ugagaaggagcaauuagggauggug

SEQ ID NO: 1068055 - RNA, 18 nt, Human
ugagaggaggugagaagg

SEQ ID NO: 1068056 - RNA, 21 nt, Human
ugagaggaggugagaaggagc

SEQ ID NO: 1068057 - RNA, 19 nt, Human
ugauaaggcacaaggaaga

SEQ ID NO: 1068058 - RNA, 20 nt, Human
uucgucccuuuccaauacuu

SEQ ID NO: 1068059 - RNA, 20 nt, Human
uaaaacacccgaggcagccu

SEQ ID NO: 1068060 - RNA, 23 nt, Human
uaaacaacaacuuuauuaaaaca

SEQ ID NO: 1068061 - RNA, 18 nt, Human
aaaacggggcugauuuga

SEQ ID NO: 1068062 - RNA, 19 nt, Human
aaaacuaaaaacaaaguca

SEQ ID NO: 1068063 - RNA, 24 nt, Human
aaaagaaguaagaaacaacuucca

SEQ ID NO: 1068064 - RNA, 20 nt, Human
aaacaaagucacucaagugu

SEQ ID NO: 1068065 - RNA, 21 nt, Human
aaacagacagacagaagcaaa

SEQ ID NO: 1068066 - RNA, 27 nt, Human
aaacagacagacagaagcaaaacccca

SEQ ID NO: 1068067 - RNA, 23 nt, Human
aacaaaaacaacucucagaccau

SEQ ID NO: 1068068 - RNA, 23 nt, Human
aacaaagucacucaaguguccaa

SEQ ID NO: 1068069 - RNA, 21 nt, Human
aagaaguaagaaacaacuucc

SEQ ID NO: 1068070 - RNA, 23 nt, Human
aaggcuagaggcugaaaggagcu

SEQ ID NO: 1068071 - RNA, 18 nt, Human
acaaaaacaacucucaga

SEQ ID NO: 1068072 - RNA, 21 nt, Human
acaaaaacaacucucagacca

SEQ ID NO: 1068073 - RNA, 22 nt, Human
acaaaacuaaaaacaaagucac

SEQ ID NO: 1068074 - RNA, 23 nt, Human
acaaaacuaaaaacaaagucacu

SEQ ID NO: 1068075 - RNA, 20 nt, Human
acaaagcauagacauacaau

SEQ ID NO: 1068076 - RNA, 20 nt, Human
acccaucuagaaaugacauu

SEQ ID NO: 1068077 - RNA, 18 nt, Human
agaauuagaaacccaucu

SEQ ID NO: 1068078 - RNA, 23 nt, Human
agacagacagaagcaaaacccca

SEQ ID NO: 1068079 - RNA, 22 nt, Human
agacauacaaugagaaagagca

SEQ ID NO: 1068080 - RNA, 24 nt, Human
agagagaaaagaaguaagaaacaa

SEQ ID NO: 1068081 - RNA, 19 nt, Human
agcaggcuucauguggcuc

SEQ ID NO: 1068082 - RNA, 22 nt, Human
agcaggcuucauguggcucugc

SEQ ID NO: 1068083 - RNA, 18 nt, Human
agcgucucccugagacag

SEQ ID NO: 1068084 - RNA, 25 nt, Human
agcuggcuugcugcucccuggcccc

SEQ ID NO: 1068085 - RNA, 18 nt, Human
auagaacaaaaacaacuc

SEQ ID NO: 1068086 - RNA, 27 nt, Human
caaaaacaaaacuaaaaacaaagucac

SEQ ID NO: 1068087 - RNA, 21 nt, Human
caaaaccccaaaugagaaaga

SEQ ID NO: 1068088 - RNA, 18 nt, Human
caaagcagcaccuugaac

SEQ ID NO: 1068089 - RNA, 18 nt, Human
caccagcgucuggguagc

SEQ ID NO: 1068090 - RNA, 19 nt, Human
cagacagaagcaaaacccc

SEQ ID NO: 1068091 - RNA, 19 nt, Human
cagcaggcuucauguggcu

SEQ ID NO: 1068092 - RNA, 24 nt, Human
caggaggagacuuuuuacccaggc

SEQ ID NO: 1068093 - RNA, 26 nt, Human
cauagacauacaaugagaaagagcaa

SEQ ID NO: 1068094 - RNA, 25 nt, Human
ccacccuccaaaacggggcugauuu

SEQ ID NO: 1068095 - RNA, 20 nt, Human
ccaucuagaaaugacauugc

SEQ ID NO: 1068096 - RNA, 20 nt, Human
cccacccuccaaaacggggc

SEQ ID NO: 1068097 - RNA, 21 nt, Human
cccacccuccaaaacggggcu

SEQ ID NO: 1068098 - RNA, 18 nt, Human
ccccaguccccagcaggc

SEQ ID NO: 1068099 - RNA, 20 nt, Human
cccugagacagcguccgccu

SEQ ID NO: 1068100 - RNA, 22 nt, Human
ccugcaaacacgauuugccuau

SEQ ID NO: 1068101 - RNA, 19 nt, Human
cugcucccuggcccccagu

SEQ ID NO: 1068102 - RNA, 23 nt, Human
gacagacagaagcaaaaccccaa

SEQ ID NO: 1068103 - RNA, 22 nt, Human
gacugugcaaccacuacaaagc

SEQ ID NO: 1068104 - RNA, 22 nt, Human
gcaaagcagcaccuugaaccuc

SEQ ID NO: 1068105 - RNA, 21 nt, Human
gccccaucuucugucccccac

SEQ ID NO: 1068106 - RNA, 23 nt, Human
gccgcagcgcaggaugcacccag

SEQ ID NO: 1068107 - RNA, 21 nt, Human
gcuggcuugcugcucccuggc

SEQ ID NO: 1068108 - RNA, 22 nt, Human
ggauauucaggauggccaggga

SEQ ID NO: 1068109 - RNA, 19 nt, Human
gggaaauguagccccaucu

SEQ ID NO: 1068110 - RNA, 18 nt, Human
gugcaaccacuacaaagc

SEQ ID NO: 1068111 - RNA, 21 nt, Human
uaaaaacaaagucacucaagu

SEQ ID NO: 1068112 - RNA, 22 nt, Human
uaaaaacaaagucacucaagug

SEQ ID NO: 1068113 - RNA, 25 nt, Human
uaaaaacaaagucacucaagugucc

SEQ ID NO: 1068114 - RNA, 24 nt, Human
uaaacagacagacagaagcaaaac

SEQ ID NO: 1068115 - RNA, 19 nt, Human
uacauagaacaaaaacaac

SEQ ID NO: 1068116 - RNA, 23 nt, Human
uacuguuacauagaacaaaaaca

SEQ ID NO: 1068117 - RNA, 22 nt, Human
uccaaaacggggcugauuugau

SEQ ID NO: 1068118 - RNA, 19 nt, Human
ucccagcuggcuugcugcu

SEQ ID NO: 1068119 - RNA, 27 nt, Human
ucccugagacagcguccgccucagucc

SEQ ID NO: 1068120 - RNA, 21 nt, Human
ugacaaagcauagacauacaa

SEQ ID NO: 1068121 - RNA, 20 nt, Human
ugagaaagaauacauuggua

SEQ ID NO: 1068122 - RNA, 23 nt, Human
ugcagaauuagaaacccaucuag

SEQ ID NO: 1068123 - RNA, 20 nt, Human
ugcugcucccuggcccccag

SEQ ID NO: 1068124 - RNA, 20 nt, Human
uggagcccaggagugaaggc

SEQ ID NO: 1068125 - RNA, 23 nt, Human
uggagcccaggagugaaggcuag

SEQ ID NO: 1068126 - RNA, 19 nt, Human
uggcaggcaugcaaagcag

SEQ ID NO: 1068127 - RNA, 19 nt, Human
uggcccccaguccccagca

SEQ ID NO: 1068128 - RNA, 24 nt, Human
uuacauagaacaaaaacaacucuc

SEQ ID NO: 1068129 - RNA, 21 nt, Human
uucauacaaucuaccuauuuc

SEQ ID NO: 1068130 - RNA, 18 nt, Human
uuccacauaaucugcagg

SEQ ID NO: 1068131 - RNA, 20 nt, Human
uugcugcucccuggccccca

SEQ ID NO: 1068132 - RNA, 18 nt, Human
uuucucuuuugaaagaug

SEQ ID NO: 1068133 - RNA, 20 nt, Human
aaaacuuacuaaguugccag

SEQ ID NO: 1068134 - RNA, 21 nt, Human
aaaauguuccuguuaauccuc

SEQ ID NO: 1068135 - RNA, 20 nt, Human
aaagcaaaugacaaagaccc

SEQ ID NO: 1068136 - RNA, 23 nt, Human
aacucaaaagucuaugacaaaua

SEQ ID NO: 1068137 - RNA, 18 nt, Human
aaguugccagcauucaug

SEQ ID NO: 1068138 - RNA, 23 nt, Human
acaacuagaaaacauccuuaauu

SEQ ID NO: 1068139 - RNA, 21 nt, Human
acacuaaagagucaagacuca

SEQ ID NO: 1068140 - RNA, 21 nt, Human
acccaguuuaccagcuuuacu

SEQ ID NO: 1068141 - RNA, 20 nt, Human
agacaaaaaaaaaauggucc

SEQ ID NO: 1068142 - RNA, 22 nt, Human
agacaaaaaaaaaaugguccua

SEQ ID NO: 1068143 - RNA, 24 nt, Human
agcaaaugacaaagacccaguuua

SEQ ID NO: 1068144 - RNA, 25 nt, Human
caacaauuuuaaagacaaaaaaaaa

SEQ ID NO: 1068145 - RNA, 19 nt, Human
cagacacaaugaaaagcag

SEQ ID NO: 1068146 - RNA, 18 nt, Human
cagcuccaggacugcugc

SEQ ID NO: 1068147 - RNA, 23 nt, Human
caugcacaacuagaaaacauccu

SEQ ID NO: 1068148 - RNA, 22 nt, Human
caugcugguguuaguguacaau

SEQ ID NO: 1068149 - RNA, 19 nt, Human
cgaggacagaagcggccgg

SEQ ID NO: 1068150 - RNA, 20 nt, Human
cguuugaaaucuucaaaaaa

SEQ ID NO: 1068151 - RNA, 21 nt, Human
cuagaaaacauccuuaauuua

SEQ ID NO: 1068152 - RNA, 25 nt, Human
cuagaaaacauccuuaauuuauauu

SEQ ID NO: 1068153 - RNA, 24 nt, Human
cuccaggacugcugcgcugguggu

SEQ ID NO: 1068154 - RNA, 23 nt, Human
cuuaauuuauauuaaaccagaaa

SEQ ID NO: 1068155 - RNA, 18 nt, Human
cuuuccuuucucuccuuu

SEQ ID NO: 1068156 - RNA, 20 nt, Human
cuuuccuuucucuccuuucu

SEQ ID NO: 1068157 - RNA, 25 nt, Human
gcaggccgacacuacguggcucaca

SEQ ID NO: 1068158 - RNA, 29 nt, Human
gcuggugguggcggcggcuccucgcgcuu

SEQ ID NO: 1068159 - RNA, 21 nt, Human
ggccgguggcgggacgcagga

SEQ ID NO: 1068160 - RNA, 20 nt, Human
gugguggcggcggcuccucg

SEQ ID NO: 1068161 - RNA, 20 nt, Human
uaaaaaagcaaagugcauac

SEQ ID NO: 1068162 - RNA, 22 nt, Human
uaaagcaaaugacaaagaccca

SEQ ID NO: 1068163 - RNA, 23 nt, Human
uaacuucacagcaggccgacacu

SEQ ID NO: 1068164 - RNA, 21 nt, Human
ucagacacaaugaaaagcagg

SEQ ID NO: 1068165 - RNA, 20 nt, Human
uccuacacuaaagagucaag

SEQ ID NO: 1068166 - RNA, 22 nt, Human
ugcaccaacacauucgcauuua

SEQ ID NO: 1068167 - RNA, 20 nt, Human
uggcggcggcuccucgcgcu

SEQ ID NO: 1068168 - RNA, 23 nt, Human
uuaaagcaaaugacaaagacccu

SEQ ID NO: 1068169 - RNA, 24 nt, Human
uuacuaaguugccagcauucaugc

SEQ ID NO: 1068170 - RNA, 19 nt, Human
uucaugcacaacuagaaaa

SEQ ID NO: 1068171 - RNA, 20 nt, Human
uugaaauuauuucuguagaa

SEQ ID NO: 1068172 - RNA, 22 nt, Human
uuuaaagcaaaugacaaagacc

SEQ ID NO: 1068173 - RNA, 20 nt, Human
uuuccuuucucuccuuucuc

SEQ ID NO: 1068174 - RNA, 22 nt, Human
uuuucuuuuuuuuuuuuuaaag

SEQ ID NO: 1068175 - RNA, 20 nt, Human
uuuuuuuuuuuaaagcaaau

SEQ ID NO: 1068176 - RNA, 25 nt, Human
aaaauaagaaaccaaccaaaaaaga

SEQ ID NO: 1068177 - RNA, 24 nt, Human
aaacaaauaaaguuauauuaaaac

SEQ ID NO: 1068178 - RNA, 18 nt, Human
acacugaaaauaagagag

SEQ ID NO: 1068179 - RNA, 21 nt, Human
acacugaaaauaagagagaaa

SEQ ID NO: 1068180 - RNA, 22 nt, Human
accaaaaaagaauggccaacag

SEQ ID NO: 1068181 - RNA, 18 nt, Human
accuuuguguuuauuuuc

SEQ ID NO: 1068182 - RNA, 21 nt, Human
agaaaaaaaaaacaauaaaug

SEQ ID NO: 1068183 - RNA, 23 nt, Human
agaaaaaaaaaacaauaaaugaa

SEQ ID NO: 1068184 - RNA, 19 nt, Human
agaaaaaguuugcugaagg

SEQ ID NO: 1068185 - RNA, 24 nt, Human
agccaaauucaacccaccacaaaa

SEQ ID NO: 1068186 - RNA, 21 nt, Human
aggugucagcaaacuauaacc

SEQ ID NO: 1068187 - RNA, 23 nt, Human
aguuacauauuauccaaaaacac

SEQ ID NO: 1068188 - RNA, 26 nt, Human
aguuguaugccuugauacuguaguuu

SEQ ID NO: 1068189 - RNA, 18 nt, Human
augaagauacugccaucc

SEQ ID NO: 1068190 - RNA, 22 nt, Human
caaaacaaucauauauaaaagc

SEQ ID NO: 1068191 - RNA, 22 nt, Human
caaaagcccaaauuaaauuauc

SEQ ID NO: 1068192 - RNA, 21 nt, Human
caaauuucugggauacaguau

SEQ ID NO: 1068193 - RNA, 24 nt, Human
caaccaaaaaagaauggccaacaa

SEQ ID NO: 1068194 - RNA, 23 nt, Human
caccacaaaaauauuugcuauca

SEQ ID NO: 1068195 - RNA, 23 nt, Human
ccaaauucaacccaccacaaaaa

SEQ ID NO: 1068196 - RNA, 18 nt, Human
ccaaauuucugggauaca

SEQ ID NO: 1068197 - RNA, 32 nt, Human
ccaaauuucugggauacaguauuuaacacuac

SEQ ID NO: 1068198 - RNA, 18 nt, Human
ccaggcaguaaaggacag

SEQ ID NO: 1068199 - RNA, 20 nt, Human
ccucagagaaugccaggcag

SEQ ID NO: 1068200 - RNA, 21 nt, Human
ccucuuguuuccacagcuuga

SEQ ID NO: 1068201 - RNA, 20 nt, Human
cuaaaauggugauaccucuu

SEQ ID NO: 1068202 - RNA, 22 nt, Human
cuugaaauguuuaggaccagca

SEQ ID NO: 1068203 - RNA, 18 nt, Human
gaagauacugccauccac

SEQ ID NO: 1068204 - RNA, 19 nt, Human
gcaaacuauaacccauaag

SEQ ID NO: 1068205 - RNA, 21 nt, Human
guaccuuuguguuuauuuucu

SEQ ID NO: 1068206 - RNA, 24 nt, Human
uaaaauaagaaaccaaccaaaaaa

SEQ ID NO: 1068207 - RNA, 19 nt, Human
uaaaauacuuugacacuuu

SEQ ID NO: 1068208 - RNA, 23 nt, Human
uaaaauggugauaccucuuguuu

SEQ ID NO: 1068209 - RNA, 24 nt, Human
uaagaaaaaaaaaacaauaaauga

SEQ ID NO: 1068210 - RNA, 24 nt, Human
uaagaaaccaaccaaaaaagaaug

SEQ ID NO: 1068211 - RNA, 24 nt, Human
ucaaauacacugaaaauaagagag

SEQ ID NO: 1068212 - RNA, 20 nt, Human
uccaaaaacacauuuuucac

SEQ ID NO: 1068213 - RNA, 18 nt, Human
uccuaaaauggugauacc

SEQ ID NO: 1068214 - RNA, 22 nt, Human
uccucagagaaugccaggcagu

SEQ ID NO: 1068215 - RNA, 19 nt, Human
ucuaagaaaaaaaaaacaa

SEQ ID NO: 1068216 - RNA, 23 nt, Human
ucuaagaaaaaaaaaacaauaaa

SEQ ID NO: 1068217 - RNA, 25 nt, Human
ucuaagaaaaaaaaaacaauaaaug

SEQ ID NO: 1068218 - RNA, 19 nt, Human
ucugugguucaaaauaauu

SEQ ID NO: 1068219 - RNA, 25 nt, Human
ugaacccugcuucauucaaauacac

SEQ ID NO: 1068220 - RNA, 22 nt, Human
ugacacuuuacaaucuuccaag

SEQ ID NO: 1068221 - RNA, 20 nt, Human
ugcugaagaucacaaaacaa

SEQ ID NO: 1068222 - RNA, 23 nt, Human
uggaaaacaaauaaaguuauauu

SEQ ID NO: 1068223 - RNA, 18 nt, Human
uggaguucacuccuccua

SEQ ID NO: 1068224 - RNA, 23 nt, Human
ugguagaaaauaugugcauauaa

SEQ ID NO: 1068225 - RNA, 24 nt, Human
uuaaaauacuuugacacuuuacaa

SEQ ID NO: 1068226 - RNA, 24 nt, Human
uuacauccuugaaauguuuaggac

SEQ ID NO: 1068227 - RNA, 20 nt, Human
uugaaugcauuuucucacaa

SEQ ID NO: 1068228 - RNA, 21 nt, Human
aaaagccuccacugaauuuuc

SEQ ID NO: 1068229 - RNA, 24 nt, Human
aaaaugccuuuaucuuuuaaacug

SEQ ID NO: 1068230 - RNA, 20 nt, Human
aaacaaaagccuccacugaa

SEQ ID NO: 1068231 - RNA, 19 nt, Human
aacaaugacaacaguaccc

SEQ ID NO: 1068232 - RNA, 22 nt, Human
aaccuagcaaugauacauaaaa

SEQ ID NO: 1068233 - RNA, 23 nt, Human
aacuaaucagcaauuuuuaaagc

SEQ ID NO: 1068234 - RNA, 24 nt, Human
aagaauauuuucucuccguaacuc

SEQ ID NO: 1068235 - RNA, 18 nt, Human
aagcaggggucuuaaaac

SEQ ID NO: 1068236 - RNA, 22 nt, Human
aagccacacacacacaaacaaa

SEQ ID NO: 1068237 - RNA, 18 nt, Human
aaugagagggggggagga

SEQ ID NO: 1068238 - RNA, 21 nt, Human
acaaaucuuuuauggacagag

SEQ ID NO: 1068239 - RNA, 26 nt, Human
acacacaaacaaaagccuccacugaa

SEQ ID NO: 1068240 - RNA, 22 nt, Human
acacacacacaaacaaaagccu

SEQ ID NO: 1068241 - RNA, 25 nt, Human
acacuuuuaaagaaugugcacauuu

SEQ ID NO: 1068242 - RNA, 22 nt, Human
acauaaacucaggccaggugua

SEQ ID NO: 1068243 - RNA, 24 nt, Human
agaaacauauacucuuggaaggcc

SEQ ID NO: 1068244 - RNA, 23 nt, Human
agaaagauuaacauuuacaacug

SEQ ID NO: 1068245 - RNA, 21 nt, Human
agaguacuuuaaaaaucaaag

SEQ ID NO: 1068246 - RNA, 19 nt, Human
agccacacacacacaaaca

SEQ ID NO: 1068247 - RNA, 20 nt, Human
aggagagagagagagagagc

SEQ ID NO: 1068248 - RNA, 18 nt, Human
auacaucaucacagaaaa

SEQ ID NO: 1068249 - RNA, 20 nt, Human
augguacauuaugcuuuuaa

SEQ ID NO: 1068250 - RNA, 21 nt, Human
caaacaaaagccuccacugaa

SEQ ID NO: 1068251 - RNA, 24 nt, Human
caaauacacaaaguucagagccaa

SEQ ID NO: 1068252 - RNA, 20 nt, Human
caacaguacccuuacauugu

SEQ ID NO: 1068253 - RNA, 22 nt, Human
caacauuucccuuugcaaccac

SEQ ID NO: 1068254 - RNA, 20 nt, Human
caauaccaaaagccaaguca

SEQ ID NO: 1068255 - RNA, 20 nt, Human
cacaaacaaaagccuccacu

SEQ ID NO: 1068256 - RNA, 19 nt, Human
cacacacacacaaacaaaa

SEQ ID NO: 1068257 - RNA, 20 nt, Human
cacagaaaauugauauggua

SEQ ID NO: 1068258 - RNA, 20 nt, Human
cacuuuuaaagaaugugcac

SEQ ID NO: 1068259 - RNA, 19 nt, Human
cagaaucaccuaccugaga

SEQ ID NO: 1068260 - RNA, 20 nt, Human
cagaguacuuuaaaaaucaa

SEQ ID NO: 1068261 - RNA, 19 nt, Human
cagucgaaccguucgacaa

SEQ ID NO: 1068262 - RNA, 22 nt, Human
cauuuacaacugaguguagaaa

SEQ ID NO: 1068263 - RNA, 21 nt, Human
cauuuuuacucucucuagagg

SEQ ID NO: 1068264 - RNA, 18 nt, Human
ccacacacacacaaacaa

SEQ ID NO: 1068265 - RNA, 20 nt, Human
ccagaauccaaaaauuucca

SEQ ID NO: 1068266 - RNA, 20 nt, Human
cucuccguaacucgaaagac

SEQ ID NO: 1068267 - RNA, 19 nt, Human
cugaacuaaaaaaggguaa

SEQ ID NO: 1068268 - RNA, 19 nt, Human
cugaaguaguaaaccaaca

SEQ ID NO: 1068269 - RNA, 22 nt, Human
cuuuauaguugguauacaucau

SEQ ID NO: 1068270 - RNA, 18 nt, Human
gaaaugccauaauaauga

SEQ ID NO: 1068271 - RNA, 19 nt, Human
gaacuacuaauuaaaucca

SEQ ID NO: 1068272 - RNA, 18 nt, Human
gagcuagaaauugaaacc

SEQ ID NO: 1068273 - RNA, 21 nt, Human
gaggagagagagagagagagc

SEQ ID NO: 1068274 - RNA, 22 nt, Human
ggaggagagagagagagagagc

SEQ ID NO: 1068275 - RNA, 21 nt, Human
uaaaaaaggguaaaaagggua

SEQ ID NO: 1068276 - RNA, 20 nt, Human
uaaaacccaaaaugccuuua

SEQ ID NO: 1068277 - RNA, 19 nt, Human
uaaacugauuaaagaaaca

SEQ ID NO: 1068278 - RNA, 22 nt, Human
uaacaauauucucaccucugau

SEQ ID NO: 1068279 - RNA, 26 nt, Human
uaagaaaugccauaauaaugauccac

SEQ ID NO: 1068280 - RNA, 18 nt, Human
uaagaauaauuuacugaa

SEQ ID NO: 1068281 - RNA, 22 nt, Human
uaccaagaagaaaucauuuuuc

SEQ ID NO: 1068282 - RNA, 25 nt, Human
uacuaaguauucuggauuccccaag

SEQ ID NO: 1068283 - RNA, 22 nt, Human
uauuuuguauuuuaaguuuuug

SEQ ID NO: 1068284 - RNA, 23 nt, Human
ucaaagccacacacacacaaaca

SEQ ID NO: 1068285 - RNA, 23 nt, Human
ucaaauacacaaaguucagagcc

SEQ ID NO: 1068286 - RNA, 21 nt, Human
ucuccguaacucgaaagacua

SEQ ID NO: 1068287 - RNA, 24 nt, Human
ucugaacuaaaaaaggguaaaaag

SEQ ID NO: 1068288 - RNA, 24 nt, Human
ucuuaaaacccaaaaugccuuuau

SEQ ID NO: 1068289 - RNA, 24 nt, Human
ugaaaaaaugagucauuaaaaaaa

SEQ ID NO: 1068290 - RNA, 25 nt, Human
ugaaaacaauauuuauuuuaaacau

SEQ ID NO: 1068291 - RNA, 18 nt, Human
ugaaguaguaaaccaaca

SEQ ID NO: 1068292 - RNA, 18 nt, Human
ugagagggggggaggaga

SEQ ID NO: 1068293 - RNA, 19 nt, Human
ugagagggggggaggagag

SEQ ID NO: 1068294 - RNA, 19 nt, Human
ugccauaauaaugauccac

SEQ ID NO: 1068295 - RNA, 18 nt, Human
uggaaggcagaaucaccu

SEQ ID NO: 1068296 - RNA, 24 nt, Human
uggcaucaugauaugacucggcaa

SEQ ID NO: 1068297 - RNA, 20 nt, Human
uggcauuauaacaugguaca

SEQ ID NO: 1068298 - RNA, 19 nt, Human
ugguaaaauauauuuugua

SEQ ID NO: 1068299 - RNA, 23 nt, Human
uguagcugaaauuuggauaaagc

SEQ ID NO: 1068300 - RNA, 19 nt, Human
uuaacauuuacaacugagu

SEQ ID NO: 1068301 - RNA, 22 nt, Human
uuauaaagcugggagaauuauu

SEQ ID NO: 1068302 - RNA, 18 nt, Human
uucgacaacauuucccuu

SEQ ID NO: 1068303 - RNA, 21 nt, Human
uuuuauggacagaguacuuua

SEQ ID NO: 1068304 - RNA, 22 nt, Human
aaaaaugcaaaagaagccagac

SEQ ID NO: 1068305 - RNA, 18 nt, Human
aaaugcaaaagaagccag

SEQ ID NO: 1068306 - RNA, 23 nt, Human
aagaaaacaacacaaucuccuga

SEQ ID NO: 1068307 - RNA, 23 nt, Human
aaguagguagagagcaggaaugu

SEQ ID NO: 1068308 - RNA, 23 nt, Human
acaacacaaucuccugauguaca

SEQ ID NO: 1068309 - RNA, 20 nt, Human
accacugagcaaacugcagu

SEQ ID NO: 1068310 - RNA, 21 nt, Human
acccacuucccucugaaccaa

SEQ ID NO: 1068311 - RNA, 22 nt, Human
agauaggagcaggugaagaaga

SEQ ID NO: 1068312 - RNA, 19 nt, Human
aggccaaaauccacagaga

SEQ ID NO: 1068313 - RNA, 19 nt, Human
aguagacuuaacaaccaug

SEQ ID NO: 1068314 - RNA, 18 nt, Human
auauccagcaucccaccu

SEQ ID NO: 1068315 - RNA, 21 nt, Human
caaaagaagccagacaguaga

SEQ ID NO: 1068316 - RNA, 22 nt, Human
caaaguagcugcucuauggugc

SEQ ID NO: 1068317 - RNA, 23 nt, Human
caacacaaucuccugauguacag

SEQ ID NO: 1068318 - RNA, 24 nt, Human
caagaaguagguagagagcaggaa

SEQ ID NO: 1068319 - RNA, 24 nt, Human
cagaaaaggccuucucuaaauuaa

SEQ ID NO: 1068320 - RNA, 18 nt, Human
cagaugucuucauccaac

SEQ ID NO: 1068321 - RNA, 22 nt, Human
caguagacuuaacaaccaugaa

SEQ ID NO: 1068322 - RNA, 24 nt, Human
cagucuaauccuuuaucuucaaac

SEQ ID NO: 1068323 - RNA, 24 nt, Human
caucuuuaccaaugauuuucugaa

SEQ ID NO: 1068324 - RNA, 21 nt, Human
ccacugagcaaacugcagugc

SEQ ID NO: 1068325 - RNA, 24 nt, Human
cccuucagaaaaggccuucucuaa

SEQ ID NO: 1068326 - RNA, 24 nt, Human
cggaugccuuuccuccaaagucuu

SEQ ID NO: 1068327 - RNA, 22 nt, Human
cugcagugcuuuuuuccucuga

SEQ ID NO: 1068328 - RNA, 23 nt, Human
cuuucucggaugccuuuccucca

SEQ ID NO: 1068329 - RNA, 25 nt, Human
gaccacucuucaucagauuccauua

SEQ ID NO: 1068330 - RNA, 20 nt, Human
gcaauggaaauaaaacugaa

SEQ ID NO: 1068331 - RNA, 21 nt, Human
gcaauggaaauaaaacugaac

SEQ ID NO: 1068332 - RNA, 18 nt, Human
ggaugccuuuccuccaaa

SEQ ID NO: 1068333 - RNA, 22 nt, Human
gguagagagcaggaaugugagc

SEQ ID NO: 1068334 - RNA, 23 nt, Human
guagacuuaacaaccaugaagca

SEQ ID NO: 1068335 - RNA, 19 nt, Human
guagagagcaggaauguga

SEQ ID NO: 1068336 - RNA, 21 nt, Human
uaaaaaugcaaaagaagccag

SEQ ID NO: 1068337 - RNA, 20 nt, Human
uaaaaugaaguccauagauu

SEQ ID NO: 1068338 - RNA, 22 nt, Human
uaaaauggaagguacaccucaa

SEQ ID NO: 1068339 - RNA, 23 nt, Human
uacaguugucacugacccagagc

SEQ ID NO: 1068340 - RNA, 22 nt, Human
uacuccauggugacuaaaauga

SEQ ID NO: 1068341 - RNA, 20 nt, Human
uauauguuuuuacuccaugg

SEQ ID NO: 1068342 - RNA, 24 nt, Human
ucagauuccauuauggcuuucuua

SEQ ID NO: 1068343 - RNA, 21 nt, Human
ucaguugcuucauuagaugca

SEQ ID NO: 1068344 - RNA, 18 nt, Human
uccacagagaaguaaggu

SEQ ID NO: 1068345 - RNA, 24 nt, Human
uccauagauaggagcaggugaaga

SEQ ID NO: 1068346 - RNA, 24 nt, Human
ucggaugccuuuccuccaaagucu

SEQ ID NO: 1068347 - RNA, 22 nt, Human
ucuucauccaacaaaguagcug

SEQ ID NO: 1068348 - RNA, 21 nt, Human
ugaagaagaaaacaacacaau

SEQ ID NO: 1068349 - RNA, 21 nt, Human
ugaaggccaaaauccacagag

SEQ ID NO: 1068350 - RNA, 19 nt, Human
ugcaaaagaagccagacag

SEQ ID NO: 1068351 - RNA, 23 nt, Human
ugcaaaagaagccagacaguaga

SEQ ID NO: 1068352 - RNA, 24 nt, Human
ugcugugacucucucugccuguga

SEQ ID NO: 1068353 - RNA, 22 nt, Human
ugcuuuuuuccucugauccuca

SEQ ID NO: 1068354 - RNA, 18 nt, Human
uggugaagucauaugguu

SEQ ID NO: 1068355 - RNA, 18 nt, Human
ugucacccacuuccuugg

SEQ ID NO: 1068356 - RNA, 25 nt, Human
uuccuuuuccuuuaacaaaaagaau

SEQ ID NO: 1068357 - RNA, 26 nt, Human
uucucuaaauuaacugaacaauucgg

SEQ ID NO: 1068358 - RNA, 21 nt, Human
uuuucuauaaaauccuaugaa

SEQ ID NO: 1068359 - RNA, 21 nt, Human
aaagagaaaggaaauuuccaa

SEQ ID NO: 1068360 - RNA, 21 nt, Human
aaagagcaaaauggaaaaaau

SEQ ID NO: 1068361 - RNA, 20 nt, Human
aaagccaaaagcagcuugua

SEQ ID NO: 1068362 - RNA, 24 nt, Human
aaagugcugggauuacaggcguga

SEQ ID NO: 1068363 - RNA, 18 nt, Human
aagcagcuuguaagagga

SEQ ID NO: 1068364 - RNA, 19 nt, Human
aagugcugggauuacaggc

SEQ ID NO: 1068365 - RNA, 19 nt, Human
aagugcugggauuacaggc

SEQ ID NO: 1068366 - RNA, 26 nt, Human
aagugcugggauuacaggcgugagcc

SEQ ID NO: 1068367 - RNA, 20 nt, Human
acaguaaaaaaaaaucuaaa

SEQ ID NO: 1068368 - RNA, 18 nt, Human
accauguuggccaggcug

SEQ ID NO: 1068369 - RNA, 23 nt, Human
acccaggcuggagugcaguggug

SEQ ID NO: 1068370 - RNA, 24 nt, Human
acccaggcuggagugcaguggugu

SEQ ID NO: 1068371 - RNA, 18 nt, Human
acgggguuucaccauguu

SEQ ID NO: 1068372 - RNA, 23 nt, Human
acgggguuucaccauguuggcca

SEQ ID NO: 1068373 - RNA, 24 nt, Human
acgggguuucaccauguuggccag

SEQ ID NO: 1068374 - RNA, 25 nt, Human
acucugucacccaggcuggagugca

SEQ ID NO: 1068375 - RNA, 18 nt, Human
acuguucugaaauuuggu

SEQ ID NO: 1068376 - RNA, 21 nt, Human
agccaccgggagaacuagucc

SEQ ID NO: 1068377 - RNA, 20 nt, Human
aggcgugagccacugcaacc

SEQ ID NO: 1068378 - RNA, 22 nt, Human
aggcugcugucucccuauagaa

SEQ ID NO: 1068379 - RNA, 25 nt, Human
aggcuggagugcagugguguaaucu

SEQ ID NO: 1068380 - RNA, 21 nt, Human
agguucaagugauucuccugc

SEQ ID NO: 1068381 - RNA, 22 nt, Human
agguucaagugauucuccugcc

SEQ ID NO: 1068382 - RNA, 20 nt, Human
aguagcugggauuacaggca

SEQ ID NO: 1068383 - RNA, 24 nt, Human
agugauucuccugccucagccucc

SEQ ID NO: 1068384 - RNA, 19 nt, Human
agugcagugguguaaucuc

SEQ ID NO: 1068385 - RNA, 21 nt, Human
agugcagugguguaaucucag

SEQ ID NO: 1068386 - RNA, 23 nt, Human
agugcagugguguaaucucagcu

SEQ ID NO: 1068387 - RNA, 18 nt, Human
agugcugggauuacaggc

SEQ ID NO: 1068388 - RNA, 24 nt, Human
agugguguaaucucagcucacugc

SEQ ID NO: 1068389 - RNA, 24 nt, Human
aguuuuuacgcaaaagauauuaau

SEQ ID NO: 1068390 - RNA, 18 nt, Human
auaaaauuaccuucaggg

SEQ ID NO: 1068391 - RNA, 26 nt, Human
auaaagcaaaaaguaagaauucccuu

SEQ ID NO: 1068392 - RNA, 22 nt, Human
augccaccuuuaauaacagagu

SEQ ID NO: 1068393 - RNA, 21 nt, Human
augccuuucaccugacuacag

SEQ ID NO: 1068394 - RNA, 21 nt, Human
auuuugcaauuugauccauac

SEQ ID NO: 1068395 - RNA, 24 nt, Human
auuuuuguauuuuuaguagagacg

SEQ ID NO: 1068396 - RNA, 22 nt, Human
caaaaaguaagaauucccuuca

SEQ ID NO: 1068397 - RNA, 24 nt, Human
caaagugcugggauuacaggcgug

SEQ ID NO: 1068398 - RNA, 20 nt, Human
caagugauucuccugccuca

SEQ ID NO: 1068399 - RNA, 22 nt, Human
caagugauucuccugccucagc

SEQ ID NO: 1068400 - RNA, 24 nt, Human
caccaugccuggcuaauuuuugua

SEQ ID NO: 1068401 - RNA, 21 nt, Human
caccauguuggccaggcuggu

SEQ ID NO: 1068402 - RNA, 24 nt, Human
caccauguuggccaggcuggucuc

SEQ ID NO: 1068403 - RNA, 27 nt, Human
caccauguuggccaggcuggucucaaa

SEQ ID NO: 1068404 - RNA, 21 nt, Human
cacccaggcuggagugcagug

SEQ ID NO: 1068405 - RNA, 23 nt, Human
cacucugucacccaggcuggagu

SEQ ID NO: 1068406 - RNA, 24 nt, Human
cacucugucacccaggcuggagug

SEQ ID NO: 1068407 - RNA, 19 nt, Human
cacugcaaccggccagagu

SEQ ID NO: 1068408 - RNA, 18 nt, Human
cacugcaaccucugccuc

SEQ ID NO: 1068409 - RNA, 21 nt, Human
cacugcaaccucugccuccca

SEQ ID NO: 1068410 - RNA, 18 nt, Human
cagucuucuauacugucc

SEQ ID NO: 1068411 - RNA, 20 nt, Human
caguuaucuuucaccuauuc

SEQ ID NO: 1068412 - RNA, 24 nt, Human
cauguuggccaggcuggucucaaa

SEQ ID NO: 1068413 - RNA, 22 nt, Human
ccaaagugcugggauuacaggc

SEQ ID NO: 1068414 - RNA, 22 nt, Human
ccaaagugcugggauuacaggc

SEQ ID NO: 1068415 - RNA, 22 nt, Human
ccaaagugcugggauuacaggc

SEQ ID NO: 1068416 - RNA, 24 nt, Human
ccaaagugcugggauuacaggcgu

SEQ ID NO: 1068417 - RNA, 20 nt, Human
ccaucuacauauauaaagcc

SEQ ID NO: 1068418 - RNA, 23 nt, Human
cccagguucaagugauucuccuc

SEQ ID NO: 1068419 - RNA, 23 nt, Human
cccagguucaagugauucuccug

SEQ ID NO: 1068420 - RNA, 23 nt, Human
cccgaguagcugggauuacaggc

SEQ ID NO: 1068421 - RNA, 24 nt, Human
cccgaguagcugggauuacaggca

SEQ ID NO: 1068422 - RNA, 19 nt, Human
cccuauagaauuuuuugag

SEQ ID NO: 1068423 - RNA, 23 nt, Human
ccgaguagcugggauuacaggca

SEQ ID NO: 1068424 - RNA, 19 nt, Human
ccuauagcauaccuucauc

SEQ ID NO: 1068425 - RNA, 18 nt, Human
ccucaaaagauccgccca

SEQ ID NO: 1068426 - RNA, 23 nt, Human
ccuccacagucuccaugccaccu

SEQ ID NO: 1068427 - RNA, 24 nt, Human
ccucccagguucaagugauucucc

SEQ ID NO: 1068428 - RNA, 23 nt, Human
ccugccucagccucccgaguagc

SEQ ID NO: 1068429 - RNA, 23 nt, Human
ccugguccuaagcauuucagaug

SEQ ID NO: 1068430 - RNA, 22 nt, Human
cuaagauagugacaccuuugcu

SEQ ID NO: 1068431 - RNA, 23 nt, Human
cuaagguuggcauuuuucuuuau

SEQ ID NO: 1068432 - RNA, 19 nt, Human
cuaugauccccaaguuuuc

SEQ ID NO: 1068433 - RNA, 24 nt, Human
cucacucugucacccaggcuggag

SEQ ID NO: 1068434 - RNA, 24 nt, Human
cucacugcaaccucugccucccag

SEQ ID NO: 1068435 - RNA, 24 nt, Human
cucacugcaaccucugccucccag

SEQ ID NO: 1068436 - RNA, 24 nt, Human
cucagccucccgaguagcugggau

SEQ ID NO: 1068437 - RNA, 19 nt, Human
cucccagguucaagugauu

SEQ ID NO: 1068438 - RNA, 20 nt, Human
cuccugguccuaagcauuuu

SEQ ID NO: 1068439 - RNA, 23 nt, Human
cugcaaccucugccucccagguu

SEQ ID NO: 1068440 - RNA, 24 nt, Human
cugcaaccucugccucccagguuc

SEQ ID NO: 1068441 - RNA, 23 nt, Human
cugccucagccucccgaguagcu

SEQ ID NO: 1068442 - RNA, 18 nt, Human
cugguccuaagcauuuca

SEQ ID NO: 1068443 - RNA, 20 nt, Human
gaaguggaagagaaaaagug

SEQ ID NO: 1068444 - RNA, 24 nt, Human
gaccucaaaagauccgcccaucuc

SEQ ID NO: 1068445 - RNA, 21 nt, Human
gacggggggcggggggacaac

SEQ ID NO: 1068446 - RNA, 26 nt, Human
gagaaaggaaauuuccaaagucuuca

SEQ ID NO: 1068447 - RNA, 24 nt, Human
gagacgggguuucaccauguuggc

SEQ ID NO: 1068448 - RNA, 26 nt, Human
gaguagcugggauuacaggcaaaugc

SEQ ID NO: 1068449 - RNA, 24 nt, Human
gauuacaggcaaaugccaccaugc

SEQ ID NO: 1068450 - RNA, 18 nt, Human
gauuacaggcgugagcca

SEQ ID NO: 1068451 - RNA, 22 nt, Human
gauuacaggcgugagccacugc

SEQ ID NO: 1068452 - RNA, 23 nt, Human
gauuacaggcgugagccacugca

SEQ ID NO: 1068453 - RNA, 23 nt, Human
gcaaauauucccaaaucuuaaaa

SEQ ID NO: 1068454 - RNA, 22 nt, Human
gcaaccucugccucccagguuc

SEQ ID NO: 1068455 - RNA, 23 nt, Human
gcuggucucaaacuccugaccuc

SEQ ID NO: 1068456 - RNA, 18 nt, Human
ggauacucaaccaguacu

SEQ ID NO: 1068457 - RNA, 24 nt, Human
ggcuggucucaaacuccugaccuc

SEQ ID NO: 1068458 - RNA, 23 nt, Human
gggguuucaccauguuggccagg

SEQ ID NO: 1068459 - RNA, 22 nt, Human
ggguuucaccauguuggccagg

SEQ ID NO: 1068460 - RNA, 23 nt, Human
guagagacgggguuucaccaugu

SEQ ID NO: 1068461 - RNA, 18 nt, Human
guagcugggauuacaggc

SEQ ID NO: 1068462 - RNA, 24 nt, Human
guagugcuuuaaaaaauauucccu

SEQ ID NO: 1068463 - RNA, 18 nt, Human
guccuaaauccugacccu

SEQ ID NO: 1068464 - RNA, 24 nt, Human
gugauucuccugccucagccuccc

SEQ ID NO: 1068465 - RNA, 21 nt, Human
uaaaaaaucugaagccugaaa

SEQ ID NO: 1068466 - RNA, 24 nt, Human
uaaacauagauuuaaaaagagcaa

SEQ ID NO: 1068467 - RNA, 26 nt, Human
uaagucccaagauauaaaguucuaaa

SEQ ID NO: 1068468 - RNA, 26 nt, Human
uaauaacagagucauucucuucuucc

SEQ ID NO: 1068469 - RNA, 24 nt, Human
uaauuuuuguauuuuuaguagaga

SEQ ID NO: 1068470 - RNA, 20 nt, Human
uacacaggagugugauucug

SEQ ID NO: 1068471 - RNA, 22 nt, Human
uacaggcaaaugccaccaugcc

SEQ ID NO: 1068472 - RNA, 22 nt, Human
uacaggcaaaugccaccaugcc

SEQ ID NO: 1068473 - RNA, 19 nt, Human
uacaggcgugagccacugc

SEQ ID NO: 1068474 - RNA, 23 nt, Human
uacaggcgugagccacugcaacc

SEQ ID NO: 1068475 - RNA, 22 nt, Human
uagagacgggguuucaccaugu

SEQ ID NO: 1068476 - RNA, 22 nt, Human
uagcaggcuuccugaagauugu

SEQ ID NO: 1068477 - RNA, 24 nt, Human
uaguagagacgggguuucaccaug

SEQ ID NO: 1068478 - RNA, 26 nt, Human
uaguagagacgggguuucaccauguu

SEQ ID NO: 1068479 - RNA, 20 nt, Human
uaugaguccuaaauccugac

SEQ ID NO: 1068480 - RNA, 23 nt, Human
uauguaaaccaauaaauauguaa

SEQ ID NO: 1068481 - RNA, 21 nt, Human
uaugugaacaagguauauaua

SEQ ID NO: 1068482 - RNA, 25 nt, Human
uauuuaaaagguauauauauacaua

SEQ ID NO: 1068483 - RNA, 19 nt, Human
ucaagugauucuccugccu

SEQ ID NO: 1068484 - RNA, 22 nt, Human
ucacccaggcuggagugcagug

SEQ ID NO: 1068485 - RNA, 24 nt, Human
ucacucugucacccaggcuggagu

SEQ ID NO: 1068486 - RNA, 19 nt, Human
ucacugcaaccucugccuc

SEQ ID NO: 1068487 - RNA, 24 nt, Human
ucacugcaaccucugccucccagg

SEQ ID NO: 1068488 - RNA, 25 nt, Human
ucacugcaaccucugccucccaggu

SEQ ID NO: 1068489 - RNA, 22 nt, Human
ucagaccuucuaaaaggaagcu

SEQ ID NO: 1068490 - RNA, 20 nt, Human
ucagccucccgaguagcugg

SEQ ID NO: 1068491 - RNA, 27 nt, Human
ucagcucacugcaaccucugccuccca

SEQ ID NO: 1068492 - RNA, 25 nt, Human
uccaugccaccuuuaauaacagagu

SEQ ID NO: 1068493 - RNA, 18 nt, Human
ucccaagauagcaggcuu

SEQ ID NO: 1068494 - RNA, 21 nt, Human
ucccagguucaagugauucuc

SEQ ID NO: 1068495 - RNA, 24 nt, Human
ucccagguucaagugauucuccug

SEQ ID NO: 1068496 - RNA, 24 nt, Human
ucccgaguagcugggauuacaggc

SEQ ID NO: 1068497 - RNA, 19 nt, Human
ucccuucacuccaucuucu

SEQ ID NO: 1068498 - RNA, 24 nt, Human
uccuaaauccugacccuguccuaa

SEQ ID NO: 1068499 - RNA, 23 nt, Human
uccuaagcauuucagaugaggga

SEQ ID NO: 1068500 - RNA, 23 nt, Human
ucucacucugucacccaggcugg

SEQ ID NO: 1068501 - RNA, 24 nt, Human
ucucacucugucacccaggcugga

SEQ ID NO: 1068502 - RNA, 26 nt, Human
ucucacucugucacccaggcuggagu

SEQ ID NO: 1068503 - RNA, 27 nt, Human
ucucacucugucacccaggcuggagug

SEQ ID NO: 1068504 - RNA, 24 nt, Human
ucuccugccucagccucccgagua

SEQ ID NO: 1068505 - RNA, 24 nt, Human
ucugucacccaggcuggagugcag

SEQ ID NO: 1068506 - RNA, 23 nt, Human
ugaaauagaaaagugguggagug

SEQ ID NO: 1068507 - RNA, 27 nt, Human
ugaaucuccucccaaacuuucaaccac

SEQ ID NO: 1068508 - RNA, 22 nt, Human
ugagauggagucucacucuguc

SEQ ID NO: 1068509 - RNA, 22 nt, Human
ugagcuuucaggcuaugagucc

SEQ ID NO: 1068510 - RNA, 21 nt, Human
ugaguccuaaauccugacccu

SEQ ID NO: 1068511 - RNA, 19 nt, Human
ugauauuugguaaugcuug

SEQ ID NO: 1068512 - RNA, 18 nt, Human
ugauuagacuguucugaa

SEQ ID NO: 1068513 - RNA, 20 nt, Human
ugauucuccugccucagccu

SEQ ID NO: 1068514 - RNA, 22 nt, Human
ugcagugguguaaucucagcuc

SEQ ID NO: 1068515 - RNA, 24 nt, Human
ugccucagccucccgaguagcugg

SEQ ID NO: 1068516 - RNA, 24 nt, Human
ugcugggauuacaggcgugagcca

SEQ ID NO: 1068517 - RNA, 20 nt, Human
uggaaguggaagagaaaaag

SEQ ID NO: 1068518 - RNA, 19 nt, Human
uggaauuacuaacuuaagg

SEQ ID NO: 1068519 - RNA, 21 nt, Human
uggagugaggaauggaugcuu

SEQ ID NO: 1068520 - RNA, 22 nt, Human
uggagugaggaauggaugcuug

SEQ ID NO: 1068521 - RNA, 26 nt, Human
uggagugcagugguguaaggcucuag

SEQ ID NO: 1068522 - RNA, 23 nt, Human
uggagugcagugguguaaucuca

SEQ ID NO: 1068523 - RNA, 24 nt, Human
uggagugcagugguguaaucucag

SEQ ID NO: 1068524 - RNA, 26 nt, Human
uggcaaaauuuaguuuaaaggauaug

SEQ ID NO: 1068525 - RNA, 24 nt, Human
uggccaggcuggucucaaacuccu

SEQ ID NO: 1068526 - RNA, 21 nt, Human
ugggauuacaggcaaaugcca

SEQ ID NO: 1068527 - RNA, 22 nt, Human
ugggauuacaggcaaaugccac

SEQ ID NO: 1068528 - RNA, 24 nt, Human
ugggauuacaggcaaaugccacca

SEQ ID NO: 1068529 - RNA, 25 nt, Human
ugggauuacaggcaaaugccaccau

SEQ ID NO: 1068530 - RNA, 18 nt, Human
ugggauuacaggcgugag

SEQ ID NO: 1068531 - RNA, 19 nt, Human
ugggauuacaggcgugagc

SEQ ID NO: 1068532 - RNA, 21 nt, Human
ugggauuacaggcgugagcca

SEQ ID NO: 1068533 - RNA, 22 nt, Human
ugggauuacaggcgugagccac

SEQ ID NO: 1068534 - RNA, 22 nt, Human
ugggauuacaggcgugagccac

SEQ ID NO: 1068535 - RNA, 24 nt, Human
ugggauuacaggcgugagccacug

SEQ ID NO: 1068536 - RNA, 24 nt, Human
ugggauuacaggcgugagccacug

SEQ ID NO: 1068537 - RNA, 21 nt, Human
uggugaaucuccucccaaacu

SEQ ID NO: 1068538 - RNA, 24 nt, Human
ugguguaaucucagcucacugcaa

SEQ ID NO: 1068539 - RNA, 21 nt, Human
uguauuuuuaguagagacggg

SEQ ID NO: 1068540 - RNA, 25 nt, Human
uuaaagcacauccuuccuguuccac

SEQ ID NO: 1068541 - RNA, 18 nt, Human
uuaguagagacgggguuu

SEQ ID NO: 1068542 - RNA, 22 nt, Human
uuaguagagacgggguuucacc

SEQ ID NO: 1068543 - RNA, 24 nt, Human
uuaguagagacgggguuucaccau

SEQ ID NO: 1068544 - RNA, 18 nt, Human
uuauguagauuaaggcug

SEQ ID NO: 1068545 - RNA, 21 nt, Human
uucaagugauucuccugccuc

SEQ ID NO: 1068546 - RNA, 23 nt, Human
uucaagugauucuccugccucag

SEQ ID NO: 1068547 - RNA, 24 nt, Human
uucaagugauucuccugccucagc

SEQ ID NO: 1068548 - RNA, 24 nt, Human
uucacuccaucuucuccucagaua

SEQ ID NO: 1068549 - RNA, 20 nt, Human
uucagcaagaauagauguaa

SEQ ID NO: 1068550 - RNA, 22 nt, Human
uuccugaagauuguuguagagg

SEQ ID NO: 1068551 - RNA, 21 nt, Human
uuccuuaaaguguagccggga

SEQ ID NO: 1068552 - RNA, 23 nt, Human
uuguauuuuuaguagagacgggg

SEQ ID NO: 1068553 - RNA, 23 nt, Human
uuuauuuuuauuuucaguuuuug

SEQ ID NO: 1068554 - RNA, 20 nt, Human
uuucaaaccagaaagccauu

SEQ ID NO: 1068555 - RNA, 24 nt, Human
uuucaccauguuggccaggcuggu

SEQ ID NO: 1068556 - RNA, 25 nt, Human
uuugagugcugacaccaccacuugg

SEQ ID NO: 1068557 - RNA, 22 nt, Human
uuuuaaagcacauccuuccugu

SEQ ID NO: 1068558 - RNA, 24 nt, Human
uuuuuaguagagacgggguuucac

SEQ ID NO: 1068559 - RNA, 20 nt, Human
uuuuuguauuuuuaguagag

SEQ ID NO: 1068560 - RNA, 21 nt, Human
gaauggaccagagaccgagcc

SEQ ID NO: 1068561 - RNA, 21 nt, Human
gccgcgcugcugccgccgccg

SEQ ID NO: 1068562 - RNA, 20 nt, Human
gugaauggaccagagaccga

SEQ ID NO: 1068563 - RNA, 18 nt, Human
ugaauggaccagagaccg

SEQ ID NO: 1068564 - RNA, 22 nt, Human
ugaauggaccagagaccgagcc

SEQ ID NO: 1068565 - RNA, 25 nt, Human
aagagaagguuguuuccaaagugaa

SEQ ID NO: 1068566 - RNA, 22 nt, Human
auccugaucuaagagaagguug

SEQ ID NO: 1068567 - RNA, 23 nt, Human
cacaaguacucacuaacugguaa

SEQ ID NO: 1068568 - RNA, 20 nt, Human
ugaucucaaugauccugauc

SEQ ID NO: 1068569 - RNA, 20 nt, Human
uuccugggacucuuuucggc

SEQ ID NO: 1068570 - RNA, 27 nt, Human
uucuuuauuuuaacacaaguacucacu

SEQ ID NO: 1068571 - RNA, 23 nt, Human
aaaacagaggugguuuuccaagc

SEQ ID NO: 1068572 - RNA, 23 nt, Human
aaacagauaugagaauugccgau

SEQ ID NO: 1068573 - RNA, 20 nt, Human
aacacucuguuuccugcucu

SEQ ID NO: 1068574 - RNA, 21 nt, Human
aacacucuguuuccugcucuu

SEQ ID NO: 1068575 - RNA, 22 nt, Human
aaccaagugacauuuauugaga

SEQ ID NO: 1068576 - RNA, 23 nt, Human
aaccagcucccugucccccuccg

SEQ ID NO: 1068577 - RNA, 27 nt, Human
acaaaaaaagguccccuguggccacau

SEQ ID NO: 1068578 - RNA, 18 nt, Human
acaugcucauccacagga

SEQ ID NO: 1068579 - RNA, 19 nt, Human
accuucuguguauuuuccu

SEQ ID NO: 1068580 - RNA, 22 nt, Human
agaggggaaccagcucccuguc

SEQ ID NO: 1068581 - RNA, 18 nt, Human
agccagagaggggcgagu

SEQ ID NO: 1068582 - RNA, 18 nt, Human
agcuggaugacuggcugg

SEQ ID NO: 1068583 - RNA, 22 nt, Human
aggcgggggggagggcgcggag

SEQ ID NO: 1068584 - RNA, 20 nt, Human
auagagcaaggaaaacagag

SEQ ID NO: 1068585 - RNA, 21 nt, Human
caaaaaaagguccccuguggc

SEQ ID NO: 1068586 - RNA, 18 nt, Human
cacagacuaacacucugu

SEQ ID NO: 1068587 - RNA, 22 nt, Human
cacaggccagccugugcuacca

SEQ ID NO: 1068588 - RNA, 23 nt, Human
cacucggccagccagagaggggc

SEQ ID NO: 1068589 - RNA, 18 nt, Human
cacucuguuuccugcucu

SEQ ID NO: 1068590 - RNA, 23 nt, Human
cagauaugagaauugccgaugca

SEQ ID NO: 1068591 - RNA, 23 nt, Human
cagcagcaucucuaggccaccga

SEQ ID NO: 1068592 - RNA, 24 nt, Human
cagcagcaucucuaggccaccgac

SEQ ID NO: 1068593 - RNA, 20 nt, Human
ccagcucccugucccccucc

SEQ ID NO: 1068594 - RNA, 19 nt, Human
ccccgcuggcuggcccgcc

SEQ ID NO: 1068595 - RNA, 22 nt, Human
cccugucccccuccgagcuucc

SEQ ID NO: 1068596 - RNA, 19 nt, Human
ccgacagccuccuccagcg

SEQ ID NO: 1068597 - RNA, 26 nt, Human
ccuccagcgagguuggcgccagacac

SEQ ID NO: 1068598 - RNA, 18 nt, Human
ccuccgagcuucccuggg

SEQ ID NO: 1068599 - RNA, 26 nt, Human
ccugucccccuccgagcuucccuggg

SEQ ID NO: 1068600 - RNA, 23 nt, Human
cggccagccagagaggggcgagu

SEQ ID NO: 1068601 - RNA, 20 nt, Human
cggcgguggagcgggcuggc

SEQ ID NO: 1068602 - RNA, 25 nt, Human
cuaacacucuguuuccugcucuuua

SEQ ID NO: 1068603 - RNA, 22 nt, Human
cuaugugccagaccugggcaag

SEQ ID NO: 1068604 - RNA, 24 nt, Human
cuccuccagcgagguuggcgccag

SEQ ID NO: 1068605 - RNA, 23 nt, Human
cuggaugucaggagaaacaaaaa

SEQ ID NO: 1068606 - RNA, 23 nt, Human
cuuuuccauuguugucaguuuca

SEQ ID NO: 1068607 - RNA, 22 nt, Human
gaugucaggagaaacaaaaaaa

SEQ ID NO: 1068608 - RNA, 21 nt, Human
ggcgggggggagggcgcggag

SEQ ID NO: 1068609 - RNA, 21 nt, Human
ggcuggcgggcagaggcgugc

SEQ ID NO: 1068610 - RNA, 19 nt, Human
ggcuuugaaaagauucugg

SEQ ID NO: 1068611 - RNA, 25 nt, Human
gggauaaaggauacagccaaaacgu

SEQ ID NO: 1068612 - RNA, 21 nt, Human
gugcgccccccgacacucggg

SEQ ID NO: 1068613 - RNA, 18 nt, Human
uaccauaugugggcuuug

SEQ ID NO: 1068614 - RNA, 20 nt, Human
uauagagcaaggaaaacaga

SEQ ID NO: 1068615 - RNA, 22 nt, Human
uaucacugccagguaaagcucu

SEQ ID NO: 1068616 - RNA, 21 nt, Human
ucccugggagaucccgcguuu

SEQ ID NO: 1068617 - RNA, 23 nt, Human
ucccugucccccuccgagcuucc

SEQ ID NO: 1068618 - RNA, 22 nt, Human
ucuaagcuuguucauagaccuu

SEQ ID NO: 1068619 - RNA, 23 nt, Human
ucuguaugauaauaugugcugcu

SEQ ID NO: 1068620 - RNA, 24 nt, Human
ucuuuauuugauuuuauuauucuu

SEQ ID NO: 1068621 - RNA, 21 nt, Human
ugaaaaaaacagauaugagaa

SEQ ID NO: 1068622 - RNA, 21 nt, Human
ugccgaugcacaggccagccu

SEQ ID NO: 1068623 - RNA, 18 nt, Human
ugcgaggagggcagcccc

SEQ ID NO: 1068624 - RNA, 19 nt, Human
ugcgccccccgacacucgg

SEQ ID NO: 1068625 - RNA, 19 nt, Human
ugcgcgacaacugcaaccg

SEQ ID NO: 1068626 - RNA, 21 nt, Human
ugcgcgacaacugcaaccgcg

SEQ ID NO: 1068627 - RNA, 22 nt, Human
ugcuguauagagcaaggaaaac

SEQ ID NO: 1068628 - RNA, 21 nt, Human
ugucaggagaaacaaaaaaag

SEQ ID NO: 1068629 - RNA, 21 nt, Human
ugucaggagaaacaaaaaaag

SEQ ID NO: 1068630 - RNA, 18 nt, Human
ugucccuuaaaaguuaga

SEQ ID NO: 1068631 - RNA, 19 nt, Human
ugugggcuuugaaaagauu

SEQ ID NO: 1068632 - RNA, 24 nt, Human
uucauagaccuucuguguauuuuc

SEQ ID NO: 1068633 - RNA, 18 nt, Human
uuccaagucuggauguca

SEQ ID NO: 1068634 - RNA, 24 nt, Human
uuuuccauuguugucaguuucagu

SEQ ID NO: 1068635 - RNA, 19 nt, Human
uuuugcuuaucauuucuuu

SEQ ID NO: 1068636 - RNA, 19 nt, Human
aaaaaccucacuccugccu

SEQ ID NO: 1068637 - RNA, 22 nt, Human
accccggcgcccaggccugcaa

SEQ ID NO: 1068638 - RNA, 25 nt, Human
cacuccugccucaagguauuuacag

SEQ ID NO: 1068639 - RNA, 19 nt, Human
cccugggaggcgugggcug

SEQ ID NO: 1068640 - RNA, 20 nt, Human
ccugggaggcgugggcugcc

SEQ ID NO: 1068641 - RNA, 23 nt, Human
ccuguccuuuaaaagauaaaaac

SEQ ID NO: 1068642 - RNA, 22 nt, Human
cggcgcccaggccugcaauccc

SEQ ID NO: 1068643 - RNA, 23 nt, Human
gcuuaaaaauaccauuuuauucu

SEQ ID NO: 1068644 - RNA, 21 nt, Human
ucacauccauuuuuagaaacu

SEQ ID NO: 1068645 - RNA, 22 nt, Human
ucacggguacagaauaaccagg

SEQ ID NO: 1068646 - RNA, 27 nt, Human
uccaaccccggcgcccaggccugcaau

SEQ ID NO: 1068647 - RNA, 20 nt, Human
ucccugggaggcgugggcug

SEQ ID NO: 1068648 - RNA, 23 nt, Human
ucccugggaggcgugggcugccg

SEQ ID NO: 1068649 - RNA, 22 nt, Human
ugaagaucucuaaccaacacac

SEQ ID NO: 1068650 - RNA, 19 nt, Human
ugguuccucaucuggugcc

SEQ ID NO: 1068651 - RNA, 21 nt, Human
uuugaagaucucuaaccaaca

SEQ ID NO: 1068652 - RNA, 19 nt, Human
aaaaaagaaaauuauaagc

SEQ ID NO: 1068653 - RNA, 21 nt, Human
aaagcauugcuuuuuuuuuuu

SEQ ID NO: 1068654 - RNA, 19 nt, Human
aacagaccaaaaugugggc

SEQ ID NO: 1068655 - RNA, 23 nt, Human
aaccagagaucugugcaggcccu

SEQ ID NO: 1068656 - RNA, 26 nt, Human
aagauaaaacaucuuggaauaaaaug

SEQ ID NO: 1068657 - RNA, 21 nt, Human
aagcauugcuuuuuuuuuuuu

SEQ ID NO: 1068658 - RNA, 20 nt, Human
acugaguccacugaacagcc

SEQ ID NO: 1068659 - RNA, 24 nt, Human
acugaguccacugaacagccuggu

SEQ ID NO: 1068660 - RNA, 19 nt, Human
agaagagccugccccucac

SEQ ID NO: 1068661 - RNA, 19 nt, Human
agcauugcuuuuuuuuuuu

SEQ ID NO: 1068662 - RNA, 24 nt, Human
agcauugcuuuuuuuuuuuuuuuu

SEQ ID NO: 1068663 - RNA, 23 nt, Human
agccuggugaccagaagagccug

SEQ ID NO: 1068664 - RNA, 22 nt, Human
agggggucagcugucccgggcc

SEQ ID NO: 1068665 - RNA, 20 nt, Human
augcaacauaaccccacauu

SEQ ID NO: 1068666 - RNA, 23 nt, Human
caaaaccaguuugaccuaaccac

SEQ ID NO: 1068667 - RNA, 21 nt, Human
caacauaaccccacauugagc

SEQ ID NO: 1068668 - RNA, 24 nt, Human
caacauaaccccacauugagcaau

SEQ ID NO: 1068669 - RNA, 20 nt, Human
cacaaguauuccgacagaau

SEQ ID NO: 1068670 - RNA, 18 nt, Human
cacauucuacugugugcu

SEQ ID NO: 1068671 - RNA, 26 nt, Human
cagaaccaaaaccaguuugaccuaac

SEQ ID NO: 1068672 - RNA, 21 nt, Human
cagaagugucagaacguuggg

SEQ ID NO: 1068673 - RNA, 22 nt, Human
caggagcugagaaaaugcaaca

SEQ ID NO: 1068674 - RNA, 19 nt, Human
caggcccuagaaucaaagg

SEQ ID NO: 1068675 - RNA, 20 nt, Human
cauaaccccacauugagcaa

SEQ ID NO: 1068676 - RNA, 20 nt, Human
caucaucaucaucaucaucu

SEQ ID NO: 1068677 - RNA, 20 nt, Human
caucuuggaauaaaaugacu

SEQ ID NO: 1068678 - RNA, 25 nt, Human
cauuuccauccccaggagcugagaa

SEQ ID NO: 1068679 - RNA, 20 nt, Human
cccucccggucucagacacc

SEQ ID NO: 1068680 - RNA, 23 nt, Human
ccuagaaucaaaggggccagggc

SEQ ID NO: 1068681 - RNA, 24 nt, Human
ccucccggucucagacacccaggc

SEQ ID NO: 1068682 - RNA, 22 nt, Human
ccucuauucugagggccugugc

SEQ ID NO: 1068683 - RNA, 19 nt, Human
cgacauuacaagaugaaga

SEQ ID NO: 1068684 - RNA, 25 nt, Human
cuaagaucucucuucauguuccucu

SEQ ID NO: 1068685 - RNA, 21 nt, Human
cucacugcugggcccucccgg

SEQ ID NO: 1068686 - RNA, 23 nt, Human
cuccauuuccauccccaggagcu

SEQ ID NO: 1068687 - RNA, 24 nt, Human
cucccggucucagacacccaggcu

SEQ ID NO: 1068688 - RNA, 18 nt, Human
cugcugggcccucccggu

SEQ ID NO: 1068689 - RNA, 20 nt, Human
cuuggccugguguggcaaag

SEQ ID NO: 1068690 - RNA, 23 nt, Human
cuuugaucucuuaacauaaaaga

SEQ ID NO: 1068691 - RNA, 20 nt, Human
gaauggacccagaggcagcc

SEQ ID NO: 1068692 - RNA, 18 nt, Human
gagaaaaugcaacauaac

SEQ ID NO: 1068693 - RNA, 23 nt, Human
gagaaaaugcaacauaaccccac

SEQ ID NO: 1068694 - RNA, 23 nt, Human
gaucucucuucauguuccucuau

SEQ ID NO: 1068695 - RNA, 24 nt, Human
gcauugcuuuuuuuuuuuuuuuuu

SEQ ID NO: 1068696 - RNA, 23 nt, Human
gccacugaucagacugcagaagu

SEQ ID NO: 1068697 - RNA, 20 nt, Human
gcccacagaauggacccaga

SEQ ID NO: 1068698 - RNA, 22 nt, Human
gccuggugaccagaagagccug

SEQ ID NO: 1068699 - RNA, 26 nt, Human
gggccaggugaucugagggcugaccu

SEQ ID NO: 1068700 - RNA, 18 nt, Human
gggggucagcugucccgg

SEQ ID NO: 1068701 - RNA, 20 nt, Human
uaaaaaagaaaauuauaagc

SEQ ID NO: 1068702 - RNA, 22 nt, Human
uaaccaucagaaccaaaaccag

SEQ ID NO: 1068703 - RNA, 22 nt, Human
ucagacugcagaagugucagaa

SEQ ID NO: 1068704 - RNA, 21 nt, Human
uccucuauucugagggccugu

SEQ ID NO: 1068705 - RNA, 26 nt, Human
ucucuuaacauaaaagauaaaacauc

SEQ ID NO: 1068706 - RNA, 21 nt, Human
ugaacagccuggugaccagaa

SEQ ID NO: 1068707 - RNA, 25 nt, Human
ugaccuaaccacaaccacuuugaca

SEQ ID NO: 1068708 - RNA, 19 nt, Human
ugaucagacugcagaagug

SEQ ID NO: 1068709 - RNA, 19 nt, Human
ugcaacauaaccccacauu

SEQ ID NO: 1068710 - RNA, 20 nt, Human
uggaauaaaaugacucccuc

SEQ ID NO: 1068711 - RNA, 19 nt, Human
uggcaugggcuuggccugg

SEQ ID NO: 1068712 - RNA, 22 nt, Human
uggcaugggcuuggccuggugu

SEQ ID NO: 1068713 - RNA, 22 nt, Human
ugggauccuccauuuccauccc

SEQ ID NO: 1068714 - RNA, 23 nt, Human
ugugcaggcccuagaaucaaagg

SEQ ID NO: 1068715 - RNA, 23 nt, Human
ugugggcagagucuuagguccua

SEQ ID NO: 1068716 - RNA, 22 nt, Human
uucaucaucaucaucaucaucu

SEQ ID NO: 1068717 - RNA, 19 nt, Human
uuugacagucuugacaagg

SEQ ID NO: 1068718 - RNA, 23 nt, Human
uuuuuuuuuuaaaggaaaaacuc

SEQ ID NO: 1068719 - RNA, 20 nt, Human
uuuuuuuuuuuuuaaaggaa

SEQ ID NO: 1068720 - RNA, 20 nt, Human
uuuuuuuuuuuuuuaaagga

SEQ ID NO: 1068721 - RNA, 22 nt, Human
uuuuuuuuuuuuuuuuuaaagg

SEQ ID NO: 1068722 - RNA, 22 nt, Human
aaagccugauccagccccaggg

SEQ ID NO: 1068723 - RNA, 26 nt, Human
aacaauaaaaauaacacuccaacaau

SEQ ID NO: 1068724 - RNA, 19 nt, Human
aagaacuaaugacauccug

SEQ ID NO: 1068725 - RNA, 22 nt, Human
aagaagcccaaacauaaaguug

SEQ ID NO: 1068726 - RNA, 21 nt, Human
aagccagggcugagccucaga

SEQ ID NO: 1068727 - RNA, 23 nt, Human
acaaagcagauacagucagcccu

SEQ ID NO: 1068728 - RNA, 20 nt, Human
acccuaaggcucccuccuac

SEQ ID NO: 1068729 - RNA, 18 nt, Human
acuggggagaucugaggc

SEQ ID NO: 1068730 - RNA, 22 nt, Human
acuggggagaucugaggcuggg

SEQ ID NO: 1068731 - RNA, 23 nt, Human
agaaaagaacuaaugacauccug

SEQ ID NO: 1068732 - RNA, 23 nt, Human
agaacuccuucaucauuuugccu

SEQ ID NO: 1068733 - RNA, 21 nt, Human
agccaagaaagccugauccag

SEQ ID NO: 1068734 - RNA, 21 nt, Human
agcugcugaagauaagaagcc

SEQ ID NO: 1068735 - RNA, 22 nt, Human
aggcagccacccucauuuaaag

SEQ ID NO: 1068736 - RNA, 24 nt, Human
agggaaagguaaacagagccaaau

SEQ ID NO: 1068737 - RNA, 18 nt, Human
agggccgggagcugcugg

SEQ ID NO: 1068738 - RNA, 23 nt, Human
aucagcacaucuggcaggcagcc

SEQ ID NO: 1068739 - RNA, 21 nt, Human
aucuaguguaaaucaccuugc

SEQ ID NO: 1068740 - RNA, 23 nt, Human
auuuacauagaauuuacauugug

SEQ ID NO: 1068741 - RNA, 19 nt, Human
caaacauaaaguuggggac

SEQ ID NO: 1068742 - RNA, 21 nt, Human
caacuggaugucccgcugggc

SEQ ID NO: 1068743 - RNA, 25 nt, Human
caauaaaaauaacacuccaacaaua

SEQ ID NO: 1068744 - RNA, 24 nt, Human
cacagggcagaaugucuccaggga

SEQ ID NO: 1068745 - RNA, 22 nt, Human
cagagcagccaagaaagccuga

SEQ ID NO: 1068746 - RNA, 21 nt, Human
cagggccgggagcugcuggag

SEQ ID NO: 1068747 - RNA, 19 nt, Human
caggucacagaagcccagu

SEQ ID NO: 1068748 - RNA, 21 nt, Human
cauuucuguucucaaaaagag

SEQ ID NO: 1068749 - RNA, 19 nt, Human
ccagugcuuggcuggcaug

SEQ ID NO: 1068750 - RNA, 20 nt, Human
ccccagggcaaaaucagacc

SEQ ID NO: 1068751 - RNA, 19 nt, Human
ccgggagcugcuggaggag

SEQ ID NO: 1068752 - RNA, 21 nt, Human
ccuaagccagggcugagccuc

SEQ ID NO: 1068753 - RNA, 28 nt, Human
ccucagagcagccaagaaagccugaucc

SEQ ID NO: 1068754 - RNA, 25 nt, Human
ccuccuaccuaagccagggcugagc

SEQ ID NO: 1068755 - RNA, 23 nt, Human
ccugagcaucccagggcuuuggu

SEQ ID NO: 1068756 - RNA, 18 nt, Human
cgggagcugcuggaggag

SEQ ID NO: 1068757 - RNA, 24 nt, Human
cuaggagccuuuucuucagccucu

SEQ ID NO: 1068758 - RNA, 21 nt, Human
cuaucuugcugugccuuugau

SEQ ID NO: 1068759 - RNA, 22 nt, Human
cuccaacaaagcagauacaguc

SEQ ID NO: 1068760 - RNA, 23 nt, Human
cuccuaccuaagccagggcugag

SEQ ID NO: 1068761 - RNA, 22 nt, Human
cugauccagccccagggcaaaa

SEQ ID NO: 1068762 - RNA, 20 nt, Human
gacuccaacaaagcagauac

SEQ ID NO: 1068763 - RNA, 23 nt, Human
gagaacuccuucaucauuuugcc

SEQ ID NO: 1068764 - RNA, 22 nt, Human
gagcauccagagcugcugaaga

SEQ ID NO: 1068765 - RNA, 20 nt, Human
gagguggugggcaacuggau

SEQ ID NO: 1068766 - RNA, 23 nt, Human
gcagcagcgagaugaauuccgug

SEQ ID NO: 1068767 - RNA, 21 nt, Human
gccccagggcaaaaucagacc

SEQ ID NO: 1068768 - RNA, 20 nt, Human
gcucauggucauuucuguca

SEQ ID NO: 1068769 - RNA, 18 nt, Human
gcuccagaacuggggaga

SEQ ID NO: 1068770 - RNA, 24 nt, Human
gcuuguugcccgaggggaguugag

SEQ ID NO: 1068771 - RNA, 24 nt, Human
ggaagauaagcagauccgugaggg

SEQ ID NO: 1068772 - RNA, 20 nt, Human
gggacagaugugacaaugga

SEQ ID NO: 1068773 - RNA, 18 nt, Human
gggcagauaaugggcuca

SEQ ID NO: 1068774 - RNA, 19 nt, Human
ggggaaaaaacaauaaaaa

SEQ ID NO: 1068775 - RNA, 25 nt, Human
gguggcuggcagagguaaucggcag

SEQ ID NO: 1068776 - RNA, 21 nt, Human
gugugugugggggugugugua

SEQ ID NO: 1068777 - RNA, 21 nt, Human
uaagaaauacaguauauccac

SEQ ID NO: 1068778 - RNA, 24 nt, Human
uauuauaagcaaucuagagaugau

SEQ ID NO: 1068779 - RNA, 19 nt, Human
uauuuggggaaaaaacaau

SEQ ID NO: 1068780 - RNA, 18 nt, Human
ucacaggagagagggaaa

SEQ ID NO: 1068781 - RNA, 18 nt, Human
ucacuaucuugcugugcc

SEQ ID NO: 1068782 - RNA, 23 nt, Human
ucagggaggguagggggaugcag

SEQ ID NO: 1068783 - RNA, 18 nt, Human
ucauggucauuucuguuc

SEQ ID NO: 1068784 - RNA, 24 nt, Human
uccagaacuggggagaucugaggc

SEQ ID NO: 1068785 - RNA, 21 nt, Human
ucccagggcuuugguaucugu

SEQ ID NO: 1068786 - RNA, 19 nt, Human
ucccugaauacuuuucagc

SEQ ID NO: 1068787 - RNA, 21 nt, Human
uccgugugugugggggugugu

SEQ ID NO: 1068788 - RNA, 19 nt, Human
uccuucaucauuuugccuu

SEQ ID NO: 1068789 - RNA, 18 nt, Human
ucuccagggagaacuccu

SEQ ID NO: 1068790 - RNA, 19 nt, Human
ugagcauccagagcugcug

SEQ ID NO: 1068791 - RNA, 19 nt, Human
ugaggcugggguggcuggc

SEQ ID NO: 1068792 - RNA, 25 nt, Human
ugaggcugggguggcuggcagaggu

SEQ ID NO: 1068793 - RNA, 25 nt, Human
ugaggcugggguggcuggcagaggu

SEQ ID NO: 1068794 - RNA, 19 nt, Human
ugccagcacccuaaggcuc

SEQ ID NO: 1068795 - RNA, 18 nt, Human
ugcccgaggggaguugag

SEQ ID NO: 1068796 - RNA, 27 nt, Human
uggccacccacagggccgggagcugcu

SEQ ID NO: 1068797 - RNA, 19 nt, Human
ugggagggggcagauaaug

SEQ ID NO: 1068798 - RNA, 20 nt, Human
ugggagggggcagauaaugg

SEQ ID NO: 1068799 - RNA, 21 nt, Human
ugggagggggcagauaaugga

SEQ ID NO: 1068800 - RNA, 22 nt, Human
ugggagggggcagauaaugggc

SEQ ID NO: 1068801 - RNA, 20 nt, Human
uggggagaucugaggcuggg

SEQ ID NO: 1068802 - RNA, 22 nt, Human
uggggguguguguaugugugug

SEQ ID NO: 1068803 - RNA, 22 nt, Human
uggugacaggagcccugcucca

SEQ ID NO: 1068804 - RNA, 21 nt, Human
ugguggauacaaagggaugac

SEQ ID NO: 1068805 - RNA, 23 nt, Human
ugugacaauggagugaugcucag

SEQ ID NO: 1068806 - RNA, 20 nt, Human
uguguguaugugugugcuug

SEQ ID NO: 1068807 - RNA, 23 nt, Human
ugugugugcuuguugcccgaggg

SEQ ID NO: 1068808 - RNA, 21 nt, Human
uguguguggggguguguguau

SEQ ID NO: 1068809 - RNA, 23 nt, Human
uguguguggggguguguguaugu

SEQ ID NO: 1068810 - RNA, 18 nt, Human
aaaaaaaaacaccccaga

SEQ ID NO: 1068811 - RNA, 21 nt, Human
aaaaaaaaacaccccagaaag

SEQ ID NO: 1068812 - RNA, 23 nt, Human
aaaaaaaaacaccccagaaagga

SEQ ID NO: 1068813 - RNA, 18 nt, Human
aaaaaaccaaacacugca

SEQ ID NO: 1068814 - RNA, 20 nt, Human
aaaaaaccaaacacugcaug

SEQ ID NO: 1068815 - RNA, 22 nt, Human
aaaccaucauucucagcaaacu

SEQ ID NO: 1068816 - RNA, 19 nt, Human
aaagccuggcucccaugcc

SEQ ID NO: 1068817 - RNA, 19 nt, Human
aacaaggugaaaccccauc

SEQ ID NO: 1068818 - RNA, 20 nt, Human
aacaaggugaaaccccaucu

SEQ ID NO: 1068819 - RNA, 21 nt, Human
aacaaggugaaaccccaucuc

SEQ ID NO: 1068820 - RNA, 21 nt, Human
aacaaguuuauuggaggucug

SEQ ID NO: 1068821 - RNA, 27 nt, Human
aacaauccaggcgguggaggauuaccc

SEQ ID NO: 1068822 - RNA, 21 nt, Human
aacacaacuugccuccccacu

SEQ ID NO: 1068823 - RNA, 19 nt, Human
aaccaaacacugcauguuc

SEQ ID NO: 1068824 - RNA, 21 nt, Human
aacccaaauguccaucaauga

SEQ ID NO: 1068825 - RNA, 21 nt, Human
aacuugccuccccacuaccac

SEQ ID NO: 1068826 - RNA, 23 nt, Human
aagacccucauucucuagccuuc

SEQ ID NO: 1068827 - RNA, 20 nt, Human
aagagacucuccagaccucc

SEQ ID NO: 1068828 - RNA, 21 nt, Human
aagcagagaauaggaccagga

SEQ ID NO: 1068829 - RNA, 26 nt, Human
aaggacaaaaaaccaaacacugcaug

SEQ ID NO: 1068830 - RNA, 27 nt, Human
aauaaaaaaaaacaccccagaaaggaa

SEQ ID NO: 1068831 - RNA, 25 nt, Human
aaucaacagggcagcuuaaaaggaa

SEQ ID NO: 1068832 - RNA, 18 nt, Human
acaaggacaaaaaaccaa

SEQ ID NO: 1068833 - RNA, 20 nt, Human
acaauagcaaagaccuggaa

SEQ ID NO: 1068834 - RNA, 21 nt, Human
acaauagcaaagaccuggaac

SEQ ID NO: 1068835 - RNA, 23 nt, Human
acacacacacacacgcacaugca

SEQ ID NO: 1068836 - RNA, 26 nt, Human
acacacacacacgcacaugcacacac

SEQ ID NO: 1068837 - RNA, 23 nt, Human
acacacacacauacacacacaca

SEQ ID NO: 1068838 - RNA, 23 nt, Human
acacacacauacacacacacaca

SEQ ID NO: 1068839 - RNA, 23 nt, Human
acacacacgcacaugcacacaca

SEQ ID NO: 1068840 - RNA, 25 nt, Human
acacacacgcacaugcacacacaca

SEQ ID NO: 1068841 - RNA, 23 nt, Human
acacacauacacacacacacaca

SEQ ID NO: 1068842 - RNA, 27 nt, Human
acacgcacaugcacacacacaagcaca

SEQ ID NO: 1068843 - RNA, 23 nt, Human
acacuuacacauagacauauagc

SEQ ID NO: 1068844 - RNA, 20 nt, Human
accagccuggccaacaaggu

SEQ ID NO: 1068845 - RNA, 24 nt, Human
accccaucucuacuaaaacuacaa

SEQ ID NO: 1068846 - RNA, 18 nt, Human
acccucauucucuagccu

SEQ ID NO: 1068847 - RNA, 24 nt, Human
accucaaacguccugcucuuaacc

SEQ ID NO: 1068848 - RNA, 21 nt, Human
acuugccuccccacuaccacc

SEQ ID NO: 1068849 - RNA, 26 nt, Human
agacaagauaaggguaaucaccccag

SEQ ID NO: 1068850 - RNA, 18 nt, Human
agaccuggaaccaaccca

SEQ ID NO: 1068851 - RNA, 19 nt, Human
agcaggcugggugcagugg

SEQ ID NO: 1068852 - RNA, 23 nt, Human
agcaggcugggugcagugguuca

SEQ ID NO: 1068853 - RNA, 24 nt, Human
agccuggccaacaaggugaaaccc

SEQ ID NO: 1068854 - RNA, 20 nt, Human
aggaaguagcccugcagaca

SEQ ID NO: 1068855 - RNA, 19 nt, Human
aggccgaggugguggauca

SEQ ID NO: 1068856 - RNA, 18 nt, Human
agggacauggaugaagcc

SEQ ID NO: 1068857 - RNA, 21 nt, Human
aggugguggaucaccugaggu

SEQ ID NO: 1068858 - RNA, 24 nt, Human
agugguucacgccuguaaucccag

SEQ ID NO: 1068859 - RNA, 24 nt, Human
aguuaaucacuuauaucuuuagau

SEQ ID NO: 1068860 - RNA, 25 nt, Human
auaaaaaaaaacaccccagaaagga

SEQ ID NO: 1068861 - RNA, 18 nt, Human
auaacacaacuugccucc

SEQ ID NO: 1068862 - RNA, 23 nt, Human
aucacgucucaccccugccacag

SEQ ID NO: 1068863 - RNA, 24 nt, Human
augaagccggaaaccaucauucuc

SEQ ID NO: 1068864 - RNA, 20 nt, Human
augcagccaggguugagaac

SEQ ID NO: 1068865 - RNA, 18 nt, Human
caaaaaaccaaacacugc

SEQ ID NO: 1068866 - RNA, 18 nt, Human
caaacaggcccaauccug

SEQ ID NO: 1068867 - RNA, 23 nt, Human
caaagaccuggaaccaacccaaa

SEQ ID NO: 1068868 - RNA, 22 nt, Human
caaauguccaucaaugauagac

SEQ ID NO: 1068869 - RNA, 20 nt, Human
caacuugccuccccacuacc

SEQ ID NO: 1068870 - RNA, 21 nt, Human
caaggacaaaaaaccaaacac

SEQ ID NO: 1068871 - RNA, 22 nt, Human
caauagcaaagaccuggaacca

SEQ ID NO: 1068872 - RNA, 19 nt, Human
cacaaggacaaaaaaccaa

SEQ ID NO: 1068873 - RNA, 24 nt, Human
cacacaaacauggcacauguauac

SEQ ID NO: 1068874 - RNA, 26 nt, Human
cacacacacacacacgcacaugcaca

SEQ ID NO: 1068875 - RNA, 25 nt, Human
cacacacacacacgcacaugcacac

SEQ ID NO: 1068876 - RNA, 22 nt, Human
cacacacacauacacacacaca

SEQ ID NO: 1068877 - RNA, 28 nt, Human
cacacacauacacacacacacacacacg

SEQ ID NO: 1068878 - RNA, 25 nt, Human
cacauacacacacacacacacacgc

SEQ ID NO: 1068879 - RNA, 27 nt, Human
cacaugcacacacacaagcacauccuu

SEQ ID NO: 1068880 - RNA, 18 nt, Human
cacauguauacauaugua

SEQ ID NO: 1068881 - RNA, 25 nt, Human
caccccagaaaggaucaguagcuca

SEQ ID NO: 1068882 - RNA, 24 nt, Human
cacgccuguaaucccagcaguuug

SEQ ID NO: 1068883 - RNA, 20 nt, Human
cagaaaggaucagcaggcug

SEQ ID NO: 1068884 - RNA, 21 nt, Human
cagcaaacuaucacaaggaca

SEQ ID NO: 1068885 - RNA, 26 nt, Human
cagcacacaaacauggcacauguaua

SEQ ID NO: 1068886 - RNA, 24 nt, Human
cagcaguuugggaggccgaggugg

SEQ ID NO: 1068887 - RNA, 20 nt, Human
caggauauaauaaauagaca

SEQ ID NO: 1068888 - RNA, 23 nt, Human
cauccuuuaucaaacaggcccaa

SEQ ID NO: 1068889 - RNA, 25 nt, Human
cauguacaccauagaauacuaugca

SEQ ID NO: 1068890 - RNA, 22 nt, Human
ccaauacacacacacauacaca

SEQ ID NO: 1068891 - RNA, 23 nt, Human
ccaccaaggugauucuaacaugc

SEQ ID NO: 1068892 - RNA, 22 nt, Human
ccccacuaccaccagugccaaa

SEQ ID NO: 1068893 - RNA, 18 nt, Human
ccccuaugauaaugagac

SEQ ID NO: 1068894 - RNA, 18 nt, Human
ccggggccuguugugggg

SEQ ID NO: 1068895 - RNA, 23 nt, Human
ccuccaaccucaauggcaggcug

SEQ ID NO: 1068896 - RNA, 26 nt, Human
ccuccacaaacaaguuuauuggaggu

SEQ ID NO: 1068897 - RNA, 28 nt, Human
ccuccccacuaccaccagugccaaagcc

SEQ ID NO: 1068898 - RNA, 24 nt, Human
ccugacccucaguuuggucuggga

SEQ ID NO: 1068899 - RNA, 22 nt, Human
ccugaggucagaaguuugagac

SEQ ID NO: 1068900 - RNA, 24 nt, Human
ccuggccaacaaggugaaacccca

SEQ ID NO: 1068901 - RNA, 18 nt, Human
ccuguugugggguggggg

SEQ ID NO: 1068902 - RNA, 22 nt, Human
ccuucaguagcuucgaguucac

SEQ ID NO: 1068903 - RNA, 23 nt, Human
cgaggugguggaucaccugaggu

SEQ ID NO: 1068904 - RNA, 25 nt, Human
cgaggugguggaucaccugagguca

SEQ ID NO: 1068905 - RNA, 24 nt, Human
cgccuguaaucccagcaguuuggg

SEQ ID NO: 1068906 - RNA, 24 nt, Human
cuaccaccagugccaaagccuggc

SEQ ID NO: 1068907 - RNA, 24 nt, Human
cucaccccugccacagagauguca

SEQ ID NO: 1068908 - RNA, 21 nt, Human
cuccaaccucaauggcaggcu

SEQ ID NO: 1068909 - RNA, 20 nt, Human
cuccuaaagaccuccaauac

SEQ ID NO: 1068910 - RNA, 25 nt, Human
cucuacugccccugucagcaucacg

SEQ ID NO: 1068911 - RNA, 26 nt, Human
cugcagacauuuggagaaagaacaau

SEQ ID NO: 1068912 - RNA, 23 nt, Human
cuggccaacaaggugaaacccca

SEQ ID NO: 1068913 - RNA, 19 nt, Human
cuguuguggggugggggca

SEQ ID NO: 1068914 - RNA, 23 nt, Human
cuguuguggggugggggcagugg

SEQ ID NO: 1068915 - RNA, 23 nt, Human
gaauaagcagccugacccucagu

SEQ ID NO: 1068916 - RNA, 30 nt, Human
gaccuccaauacacacacacauacacacag

SEQ ID NO: 1068917 - RNA, 23 nt, Human
gagaccagccuggccaacaaggu

SEQ ID NO: 1068918 - RNA, 24 nt, Human
gaucaccugaggucagaaguuuga

SEQ ID NO: 1068919 - RNA, 18 nt, Human
gcagugguucacgccugu

SEQ ID NO: 1068920 - RNA, 24 nt, Human
gccaacaaggugaaaccccaucuc

SEQ ID NO: 1068921 - RNA, 19 nt, Human
gccgggcaugguggugcau

SEQ ID NO: 1068922 - RNA, 22 nt, Human
gccuguuguggggugggggcag

SEQ ID NO: 1068923 - RNA, 20 nt, Human
gcuaugacauggcaaaagug

SEQ ID NO: 1068924 - RNA, 21 nt, Human
gcuuaagaaaggagggucccc

SEQ ID NO: 1068925 - RNA, 22 nt, Human
gcuuaagaaaggaggguccccu

SEQ ID NO: 1068926 - RNA, 27 nt, Human
gggcacaguaaaaguugaccgguaccc

SEQ ID NO: 1068927 - RNA, 24 nt, Human
ggggaacaucacacaccggggccu

SEQ ID NO: 1068928 - RNA, 23 nt, Human
ggggugggggcaguggggaggga

SEQ ID NO: 1068929 - RNA, 22 nt, Human
gggugggggcaguggggaggga

SEQ ID NO: 1068930 - RNA, 23 nt, Human
ggugacaaguacuaugggaaaaa

SEQ ID NO: 1068931 - RNA, 23 nt, Human
ggugcagugguucacgccuguaa

SEQ ID NO: 1068932 - RNA, 20 nt, Human
gugagucaaucauucaacaa

SEQ ID NO: 1068933 - RNA, 22 nt, Human
gugcaaccucaaacguccugcu

SEQ ID NO: 1068934 - RNA, 24 nt, Human
gugcuugcaugccccauaacacaa

SEQ ID NO: 1068935 - RNA, 24 nt, Human
gugguggaucaccugaggucagaa

SEQ ID NO: 1068936 - RNA, 22 nt, Human
uaaaaaaaaacaccccagaaag

SEQ ID NO: 1068937 - RNA, 20 nt, Human
uaaaacuacaaaaauuugcc

SEQ ID NO: 1068938 - RNA, 21 nt, Human
uaaauagacaaaaauuccugc

SEQ ID NO: 1068939 - RNA, 24 nt, Human
uaagagauauaccuaauguuaaac

SEQ ID NO: 1068940 - RNA, 26 nt, Human
uaauaauaauaaaaaaaaacacccca

SEQ ID NO: 1068941 - RNA, 18 nt, Human
uacacacacacacacaca

SEQ ID NO: 1068942 - RNA, 24 nt, Human
uacacacacacacacacacgcaca

SEQ ID NO: 1068943 - RNA, 26 nt, Human
uacacacacacacacacacgcacaug

SEQ ID NO: 1068944 - RNA, 26 nt, Human
uacacacacacauacacacacacaca

SEQ ID NO: 1068945 - RNA, 25 nt, Human
uacacacacacauacacacacacag

SEQ ID NO: 1068946 - RNA, 21 nt, Human
uaccaccagugccaaagccug

SEQ ID NO: 1068947 - RNA, 18 nt, Human
uacuaaaacuacaaaaaa

SEQ ID NO: 1068948 - RNA, 28 nt, Human
uagaauggcagagacuuaagucagagag

SEQ ID NO: 1068949 - RNA, 19 nt, Human
uagguuccagaggaauguc

SEQ ID NO: 1068950 - RNA, 19 nt, Human
uaucaaacaggcccaaucc

SEQ ID NO: 1068951 - RNA, 23 nt, Human
ucaaacguccugcucuuaacccc

SEQ ID NO: 1068952 - RNA, 24 nt, Human
ucaacagggcagcuuaaaaggaaa

SEQ ID NO: 1068953 - RNA, 20 nt, Human
ucacgccuguaaucccagca

SEQ ID NO: 1068954 - RNA, 22 nt, Human
ucagcaaacuaucacaaggaca

SEQ ID NO: 1068955 - RNA, 18 nt, Human
ucccaccuuccuucuguc

SEQ ID NO: 1068956 - RNA, 19 nt, Human
uccuuuaucaaacaggccc

SEQ ID NO: 1068957 - RNA, 20 nt, Human
ucucacucauaggugggaau

SEQ ID NO: 1068958 - RNA, 21 nt, Human
ucucuacuaaaacuacaaaaa

SEQ ID NO: 1068959 - RNA, 25 nt, Human
ucugaagagacucuccagaccucca

SEQ ID NO: 1068960 - RNA, 19 nt, Human
ugaaaccccaucucuacua

SEQ ID NO: 1068961 - RNA, 25 nt, Human
ugaaauuccaggucugugcaaccuc

SEQ ID NO: 1068962 - RNA, 24 nt, Human
ugaacaaugagaacacauggacac

SEQ ID NO: 1068963 - RNA, 19 nt, Human
ugacgcugaaauuccaggu

SEQ ID NO: 1068964 - RNA, 21 nt, Human
ugagaccagccuggccaacaa

SEQ ID NO: 1068965 - RNA, 23 nt, Human
ugagaccagccuggccaacaagg

SEQ ID NO: 1068966 - RNA, 21 nt, Human
ugcacacacacaagcacaucc

SEQ ID NO: 1068967 - RNA, 24 nt, Human
ugcagacauuuggagaaagaacaa

SEQ ID NO: 1068968 - RNA, 24 nt, Human
ugcccaggacuagggaggguuugc

SEQ ID NO: 1068969 - RNA, 20 nt, Human
ugccccugucagcaucacgu

SEQ ID NO: 1068970 - RNA, 20 nt, Human
ugccugcacacuuacacaua

SEQ ID NO: 1068971 - RNA, 23 nt, Human
uggacucuuggauaaggagguuc

SEQ ID NO: 1068972 - RNA, 20 nt, Human
uggauaaggagguucaugag

SEQ ID NO: 1068973 - RNA, 23 nt, Human
uggaucaccugaggucagaaguu

SEQ ID NO: 1068974 - RNA, 24 nt, Human
uggaucaccugaggucagaaguuu

SEQ ID NO: 1068975 - RNA, 27 nt, Human
uggaucaccugaggucagaaguuugag

SEQ ID NO: 1068976 - RNA, 20 nt, Human
uggauuaagaaaauguggcc

SEQ ID NO: 1068977 - RNA, 19 nt, Human
uggcacauguauacauaug

SEQ ID NO: 1068978 - RNA, 18 nt, Human
uggcagagacuuaaguca

SEQ ID NO: 1068979 - RNA, 21 nt, Human
ugggaaaaaauaaagcagaga

SEQ ID NO: 1068980 - RNA, 18 nt, Human
ugggaggccgagguggug

SEQ ID NO: 1068981 - RNA, 23 nt, Human
ugggaggccgaggugguggauca

SEQ ID NO: 1068982 - RNA, 21 nt, Human
uggggugggggcaguggggag

SEQ ID NO: 1068983 - RNA, 24 nt, Human
uggggugggggcaguggggaggga

SEQ ID NO: 1068984 - RNA, 25 nt, Human
uggggugggggcaguggggagggau

SEQ ID NO: 1068985 - RNA, 19 nt, Human
uggugacaaguacuauggg

SEQ ID NO: 1068986 - RNA, 22 nt, Human
ugguucacgccuguaaucccag

SEQ ID NO: 1068987 - RNA, 24 nt, Human
ugguucacgccuguaaucccagca

SEQ ID NO: 1068988 - RNA, 23 nt, Human
uguggggugggggcaguggggag

SEQ ID NO: 1068989 - RNA, 18 nt, Human
uguuguggggugggggca

SEQ ID NO: 1068990 - RNA, 18 nt, Human
uguuguggggugggggca

SEQ ID NO: 1068991 - RNA, 19 nt, Human
uguuguggggugggggcag

SEQ ID NO: 1068992 - RNA, 20 nt, Human
uuacacauagacauauagcu

SEQ ID NO: 1068993 - RNA, 18 nt, Human
uuacuuagguuccagagg

SEQ ID NO: 1068994 - RNA, 22 nt, Human
uucacaauagcaaagaccugga

SEQ ID NO: 1068995 - RNA, 19 nt, Human
uucucuagccuucaguagc

SEQ ID NO: 1068996 - RNA, 20 nt, Human
uugacgcugaaauuccaggu

SEQ ID NO: 1068997 - RNA, 19 nt, Human
uugauccucaacaguagaa

SEQ ID NO: 1068998 - RNA, 24 nt, Human
uugggaggccgaggugguggauca

SEQ ID NO: 1068999 - RNA, 23 nt, Human
uuguacauauguacccuaaaacu

SEQ ID NO: 1069000 - RNA, 23 nt, Human
aaaggccaaugcugccacaggua

SEQ ID NO: 1069001 - RNA, 20 nt, Human
acaagcacauugacgcuccu

SEQ ID NO: 1069002 - RNA, 24 nt, Human
acagagaacaccuggagaugggag

SEQ ID NO: 1069003 - RNA, 18 nt, Human
accccuggggaaagggga

SEQ ID NO: 1069004 - RNA, 18 nt, Human
acccugagggcgggaagg

SEQ ID NO: 1069005 - RNA, 25 nt, Human
acccugagggcgggaaggagagaag

SEQ ID NO: 1069006 - RNA, 23 nt, Human
acccugagggcgggaaggagagg

SEQ ID NO: 1069007 - RNA, 18 nt, Human
agagaaggcgcgcacgug

SEQ ID NO: 1069008 - RNA, 18 nt, Human
agagccuccugcuccacc

SEQ ID NO: 1069009 - RNA, 27 nt, Human
aucuccuucaggauauccacuucacug

SEQ ID NO: 1069010 - RNA, 26 nt, Human
caagcacauugacgcuccugacuacc

SEQ ID NO: 1069011 - RNA, 23 nt, Human
cagcucuaaacuaaaggaaugac

SEQ ID NO: 1069012 - RNA, 27 nt, Human
cagguacuggaucuccuuggccagggg

SEQ ID NO: 1069013 - RNA, 23 nt, Human
ccccugguagaggggcuaugcug

SEQ ID NO: 1069014 - RNA, 24 nt, Human
cccugagaagcgccauggcuuaag

SEQ ID NO: 1069015 - RNA, 20 nt, Human
cccuuuucuucccccuuguc

SEQ ID NO: 1069016 - RNA, 20 nt, Human
ccguggacccugagggcggg

SEQ ID NO: 1069017 - RNA, 20 nt, Human
ccuccugcuccacccucuuc

SEQ ID NO: 1069018 - RNA, 20 nt, Human
cgccaugguggccguggacc

SEQ ID NO: 1069019 - RNA, 21 nt, Human
cgcugcagagccuggugcugc

SEQ ID NO: 1069020 - RNA, 21 nt, Human
cgcuggggggugccgcugcag

SEQ ID NO: 1069021 - RNA, 23 nt, Human
cgggcagacccacagagaacacc

SEQ ID NO: 1069022 - RNA, 20 nt, Human
cucuuugcacucaccaguga

SEQ ID NO: 1069023 - RNA, 19 nt, Human
cugcagagccuggugcugc

SEQ ID NO: 1069024 - RNA, 18 nt, Human
cugcugccccugauacgc

SEQ ID NO: 1069025 - RNA, 18 nt, Human
cuggaaucgaggaaugug

SEQ ID NO: 1069026 - RNA, 18 nt, Human
gacccuuuucuucccccu

SEQ ID NO: 1069027 - RNA, 18 nt, Human
gacucugggcucauacag

SEQ ID NO: 1069028 - RNA, 22 nt, Human
gcaguggagucuggcuuccuau

SEQ ID NO: 1069029 - RNA, 18 nt, Human
gccacagguacugcugcc

SEQ ID NO: 1069030 - RNA, 20 nt, Human
gcccugagaagcgccauggc

SEQ ID NO: 1069031 - RNA, 20 nt, Human
gcuggggggugccgcugcag

SEQ ID NO: 1069032 - RNA, 24 nt, Human
ggacccuuuucuucccccuugucu

SEQ ID NO: 1069033 - RNA, 21 nt, Human
ggcagacccacagagaacacc

SEQ ID NO: 1069034 - RNA, 22 nt, Human
gguggccguggacccugagggc

SEQ ID NO: 1069035 - RNA, 22 nt, Human
gguggccguggacccugagggc

SEQ ID NO: 1069036 - RNA, 19 nt, Human
guacaagcacauugacgcu

SEQ ID NO: 1069037 - RNA, 22 nt, Human
guacaagcacauugacgcuccu

SEQ ID NO: 1069038 - RNA, 19 nt, Human
guacuggaucuccuuggcc

SEQ ID NO: 1069039 - RNA, 21 nt, Human
uacuuuugcugcuaccaucgu

SEQ ID NO: 1069040 - RNA, 18 nt, Human
uaggggacccuuuucuuc

SEQ ID NO: 1069041 - RNA, 23 nt, Human
ucaacuucuuauccaguuucuca

SEQ ID NO: 1069042 - RNA, 18 nt, Human
uccacuucacugcccagc

SEQ ID NO: 1069043 - RNA, 20 nt, Human
ucuaaacuaaaggaaugacc

SEQ ID NO: 1069044 - RNA, 19 nt, Human
ugcuaccaucgucucucca

SEQ ID NO: 1069045 - RNA, 20 nt, Human
ugcuccacccucuucuucug

SEQ ID NO: 1069046 - RNA, 24 nt, Human
uggagagccccugguagaggggcu

SEQ ID NO: 1069047 - RNA, 22 nt, Human
uggagucuggcuuccuaucucc

SEQ ID NO: 1069048 - RNA, 19 nt, Human
uggccguggacccugaggg

SEQ ID NO: 1069049 - RNA, 22 nt, Human
ugggcucauacagaugccacua

SEQ ID NO: 1069050 - RNA, 24 nt, Human
uugcggaccucuucuaucaaaucu

SEQ ID NO: 1069051 - RNA, 23 nt, Human
uuuuccagcucuuugcacucacc

SEQ ID NO: 1069052 - RNA, 23 nt, Human
uuuugcugcuaccaucgucucuc

SEQ ID NO: 1069053 - RNA, 20 nt, Human
cccccugcagcuccagggcc

SEQ ID NO: 1069054 - RNA, 21 nt, Human
ccccucgcccgcggacgcccg

SEQ ID NO: 1069055 - RNA, 21 nt, Human
ccccugcagcuccagggccuu

SEQ ID NO: 1069056 - RNA, 18 nt, Human
cccguccccucgcccgcg

SEQ ID NO: 1069057 - RNA, 18 nt, Human
ccugcagcuccagggccu

SEQ ID NO: 1069058 - RNA, 20 nt, Human
cugcagcuccagggccuugg

SEQ ID NO: 1069059 - RNA, 21 nt, Human
guucagggcccagucccgucc

SEQ ID NO: 1069060 - RNA, 20 nt, Human
uccagggccuuggacuguuc

SEQ ID NO: 1069061 - RNA, 23 nt, Human
aaaaauacccccuucugugagaa

SEQ ID NO: 1069062 - RNA, 23 nt, Human
aaagcagagacugguuagaggcc

SEQ ID NO: 1069063 - RNA, 24 nt, Human
aaagcagagacugguuagaggccu

SEQ ID NO: 1069064 - RNA, 23 nt, Human
aaaguagaaaagcaaggagaggg

SEQ ID NO: 1069065 - RNA, 24 nt, Human
aaagugcugggauuacaggcauga

SEQ ID NO: 1069066 - RNA, 23 nt, Human
aaagugggcaggguuaccacaga

SEQ ID NO: 1069067 - RNA, 21 nt, Human
aagacagccagaacuaaggcg

SEQ ID NO: 1069068 - RNA, 21 nt, Human
aaggacccagaaauaacaggc

SEQ ID NO: 1069069 - RNA, 19 nt, Human
aagugcugggauuacaggc

SEQ ID NO: 1069070 - RNA, 21 nt, Human
aagugcugggauuacaggcau

SEQ ID NO: 1069071 - RNA, 23 nt, Human
aagugguugucuucaaaagaacu

SEQ ID NO: 1069072 - RNA, 20 nt, Human
aauaacaaagugaaugagga

SEQ ID NO: 1069073 - RNA, 24 nt, Human
acccaggcuggagugcaguggcgu

SEQ ID NO: 1069074 - RNA, 24 nt, Human
accucgugauccgcccgccuuggc

SEQ ID NO: 1069075 - RNA, 20 nt, Human
acugcaagcuccaccuccca

SEQ ID NO: 1069076 - RNA, 20 nt, Human
agaaacuagaaagaguucaa

SEQ ID NO: 1069077 - RNA, 24 nt, Human
agacagagaugaagacagccagaa

SEQ ID NO: 1069078 - RNA, 20 nt, Human
agacagccagaacuaaggcg

SEQ ID NO: 1069079 - RNA, 20 nt, Human
agagagaaagcagagacugg

SEQ ID NO: 1069080 - RNA, 24 nt, Human
agagaugaagacagccagaacuaa

SEQ ID NO: 1069081 - RNA, 18 nt, Human
agaggcugcugaucuucc

SEQ ID NO: 1069082 - RNA, 18 nt, Human
agcaaggagagggucuca

SEQ ID NO: 1069083 - RNA, 22 nt, Human
aggagucaaggacuuguugacc

SEQ ID NO: 1069084 - RNA, 19 nt, Human
aggcaugagacacugcgcc

SEQ ID NO: 1069085 - RNA, 20 nt, Human
aggcggcagugacagacugg

SEQ ID NO: 1069086 - RNA, 22 nt, Human
aggcggcagugacagacuggaa

SEQ ID NO: 1069087 - RNA, 25 nt, Human
aggcuggagugcaguggcgugaucu

SEQ ID NO: 1069088 - RNA, 23 nt, Human
aggguccaagucaggaaggaccu

SEQ ID NO: 1069089 - RNA, 18 nt, Human
agugacagacuggaagga

SEQ ID NO: 1069090 - RNA, 19 nt, Human
agugcaguggcgugaucuc

SEQ ID NO: 1069091 - RNA, 20 nt, Human
agugcaguggcgugaucucg

SEQ ID NO: 1069092 - RNA, 23 nt, Human
agugcaguggcgugaucucggcu

SEQ ID NO: 1069093 - RNA, 24 nt, Human
agugcaguggcgugaucucggcuc

SEQ ID NO: 1069094 - RNA, 18 nt, Human
agugcugggauuacaggc

SEQ ID NO: 1069095 - RNA, 19 nt, Human
auccgcccgccuuggccuc

SEQ ID NO: 1069096 - RNA, 21 nt, Human
auucuccugccucagccuccc

SEQ ID NO: 1069097 - RNA, 19 nt, Human
auuuggcuuaacaaggacc

SEQ ID NO: 1069098 - RNA, 23 nt, Human
caaagugcugggauuacaggcau

SEQ ID NO: 1069099 - RNA, 24 nt, Human
caaagugcugggauuacaggcaug

SEQ ID NO: 1069100 - RNA, 19 nt, Human
caacccuuaagaucuuagc

SEQ ID NO: 1069101 - RNA, 24 nt, Human
caacgggucuggcacaaaaguggc

SEQ ID NO: 1069102 - RNA, 21 nt, Human
caagacagagaugaagacagc

SEQ ID NO: 1069103 - RNA, 27 nt, Human
caagaccagaggccucagggcugccgg

SEQ ID NO: 1069104 - RNA, 18 nt, Human
caaggacccagaaauaac

SEQ ID NO: 1069105 - RNA, 21 nt, Human
caaggacccagaaauaacagg

SEQ ID NO: 1069106 - RNA, 21 nt, Human
caauucuauucuaaaauuugg

SEQ ID NO: 1069107 - RNA, 18 nt, Human
cacagcccuauaccaagu

SEQ ID NO: 1069108 - RNA, 19 nt, Human
caccaacugauuaccaccc

SEQ ID NO: 1069109 - RNA, 21 nt, Human
caccacguccagcuaauuuuu

SEQ ID NO: 1069110 - RNA, 24 nt, Human
cacccaggcuggagugcaguggcg

SEQ ID NO: 1069111 - RNA, 19 nt, Human
cacccccagccucccaauc

SEQ ID NO: 1069112 - RNA, 24 nt, Human
caccguguuagcaaggauggucuc

SEQ ID NO: 1069113 - RNA, 22 nt, Human
cacgccauucuccugccucagc

SEQ ID NO: 1069114 - RNA, 21 nt, Human
cacugcaagcuccaccuccca

SEQ ID NO: 1069115 - RNA, 23 nt, Human
cagacaauucccacaaugaucac

SEQ ID NO: 1069116 - RNA, 23 nt, Human
caggaaggaccuugacuaucuca

SEQ ID NO: 1069117 - RNA, 23 nt, Human
caggccacgaagcggaggggaag

SEQ ID NO: 1069118 - RNA, 24 nt, Human
caggguccaagucaggaaggaccu

SEQ ID NO: 1069119 - RNA, 20 nt, Human
cauaucuggacacuagggac

SEQ ID NO: 1069120 - RNA, 24 nt, Human
caugccaccacguccagcuaauuu

SEQ ID NO: 1069121 - RNA, 24 nt, Human
ccauuuaaaaauacccccuucugu

SEQ ID NO: 1069122 - RNA, 20 nt, Human
cccaagaccagaggccucag

SEQ ID NO: 1069123 - RNA, 23 nt, Human
cccaagaccagaggccucagggc

SEQ ID NO: 1069124 - RNA, 19 nt, Human
cccaaguagcugggaguac

SEQ ID NO: 1069125 - RNA, 20 nt, Human
cccacagugacgauaccaag

SEQ ID NO: 1069126 - RNA, 20 nt, Human
cccagguucacgccauucuc

SEQ ID NO: 1069127 - RNA, 20 nt, Human
ccccacagcccuauaccaag

SEQ ID NO: 1069128 - RNA, 22 nt, Human
cccgccuuggccucucaaagug

SEQ ID NO: 1069129 - RNA, 27 nt, Human
ccuacaguucaagacagagaugaagac

SEQ ID NO: 1069130 - RNA, 24 nt, Human
ccucccaauccaaggggugggggu

SEQ ID NO: 1069131 - RNA, 24 nt, Human
ccucccagguucacgccauucucc

SEQ ID NO: 1069132 - RNA, 24 nt, Human
cgcucugucacccaggcuggagug

SEQ ID NO: 1069133 - RNA, 23 nt, Human
cggagguacuucugcccauaugg

SEQ ID NO: 1069134 - RNA, 22 nt, Human
cgggcacaguaagcaaaguggg

SEQ ID NO: 1069135 - RNA, 24 nt, Human
cucacugcaagcuccaccucccag

SEQ ID NO: 1069136 - RNA, 19 nt, Human
cucagggcugccgggguca

SEQ ID NO: 1069137 - RNA, 24 nt, Human
cuccugaccucgugauccgcccgc

SEQ ID NO: 1069138 - RNA, 24 nt, Human
cucgcucugucacccaggcuggag

SEQ ID NO: 1069139 - RNA, 26 nt, Human
cucugaauuaugcccuacugaggccc

SEQ ID NO: 1069140 - RNA, 23 nt, Human
cucugucacccaggcuggagugc

SEQ ID NO: 1069141 - RNA, 24 nt, Human
cugacaggaugaugauuuuagaaa

SEQ ID NO: 1069142 - RNA, 24 nt, Human
cugcaagcuccaccucccagguuc

SEQ ID NO: 1069143 - RNA, 23 nt, Human
cugccucagccucccaaguagcu

SEQ ID NO: 1069144 - RNA, 24 nt, Human
cuuggccucucaaagugcugggau

SEQ ID NO: 1069145 - RNA, 18 nt, Human
gaagcggaggggaaggcc

SEQ ID NO: 1069146 - RNA, 20 nt, Human
gaccucgugauccgcccgcc

SEQ ID NO: 1069147 - RNA, 21 nt, Human
gaccucgugauccgcccgccu

SEQ ID NO: 1069148 - RNA, 21 nt, Human
gagacagagucucgcucuguc

SEQ ID NO: 1069149 - RNA, 20 nt, Human
gagacugguuagaggccuac

SEQ ID NO: 1069150 - RNA, 26 nt, Human
gaugacaggguccaagucaggaagga

SEQ ID NO: 1069151 - RNA, 22 nt, Human
gauuacaggcaugagacacugc

SEQ ID NO: 1069152 - RNA, 22 nt, Human
gauuacaggcaugagacacugc

SEQ ID NO: 1069153 - RNA, 18 nt, Human
gcaagcuccaccucccag

SEQ ID NO: 1069154 - RNA, 20 nt, Human
gcaaugaaaacaacauugaa

SEQ ID NO: 1069155 - RNA, 22 nt, Human
gcagccuugcacccccagccuc

SEQ ID NO: 1069156 - RNA, 20 nt, Human
gccucagccucccaaguagc

SEQ ID NO: 1069157 - RNA, 22 nt, Human
gccuuggccucucaaagugcug

SEQ ID NO: 1069158 - RNA, 22 nt, Human
gcggaacguacaguauggauaa

SEQ ID NO: 1069159 - RNA, 18 nt, Human
gcggcagugacagacugg

SEQ ID NO: 1069160 - RNA, 18 nt, Human
gcgugaagaaugaggagc

SEQ ID NO: 1069161 - RNA, 18 nt, Human
gcugagagagaaagcaga

SEQ ID NO: 1069162 - RNA, 19 nt, Human
gcuggagugcaguggcgug

SEQ ID NO: 1069163 - RNA, 20 nt, Human
ggaguacaagcacaugccac

SEQ ID NO: 1069164 - RNA, 22 nt, Human
ggauuacaggcaugagacacug

SEQ ID NO: 1069165 - RNA, 24 nt, Human
ggcaaugaaaacaacauugaaaga

SEQ ID NO: 1069166 - RNA, 22 nt, Human
ggcuggagugcaguggcgugau

SEQ ID NO: 1069167 - RNA, 20 nt, Human
ggucucgaucuccugaccuc

SEQ ID NO: 1069168 - RNA, 22 nt, Human
guaaaguuuccuuucacaucaa

SEQ ID NO: 1069169 - RNA, 22 nt, Human
guagaggcagccuugcaccccc

SEQ ID NO: 1069170 - RNA, 23 nt, Human
guaggagucaaggacuuguugac

SEQ ID NO: 1069171 - RNA, 21 nt, Human
gugaucucggcucacugcaag

SEQ ID NO: 1069172 - RNA, 19 nt, Human
gugggugggagaagaggcu

SEQ ID NO: 1069173 - RNA, 19 nt, Human
uaagggaguuuguagucuu

SEQ ID NO: 1069174 - RNA, 19 nt, Human
uaauuuuuugcauuuuuag

SEQ ID NO: 1069175 - RNA, 24 nt, Human
uacaagcacaugccaccacgucca

SEQ ID NO: 1069176 - RNA, 22 nt, Human
uacaggcaugagacacugcgcc

SEQ ID NO: 1069177 - RNA, 19 nt, Human
uacccuaaaauguagauua

SEQ ID NO: 1069178 - RNA, 19 nt, Human
uacucaucugcaugguucu

SEQ ID NO: 1069179 - RNA, 18 nt, Human
uagaauguggucuuuuag

SEQ ID NO: 1069180 - RNA, 24 nt, Human
uagcaaagagcugagagccccaca

SEQ ID NO: 1069181 - RNA, 18 nt, Human
uagcugggaguacaagca

SEQ ID NO: 1069182 - RNA, 24 nt, Human
uaguaaagacagcuuuucaccgug

SEQ ID NO: 1069183 - RNA, 22 nt, Human
uauuagcaguggaagagaaagu

SEQ ID NO: 1069184 - RNA, 21 nt, Human
ucaaaagaacucaugccgcaa

SEQ ID NO: 1069185 - RNA, 23 nt, Human
ucaaagugcugggauuacaggca

SEQ ID NO: 1069186 - RNA, 24 nt, Human
ucaaagugcugggauuacaggcau

SEQ ID NO: 1069187 - RNA, 20 nt, Human
ucaagacagagaugaagaca

SEQ ID NO: 1069188 - RNA, 20 nt, Human
ucaauaucagaacagggagc

SEQ ID NO: 1069189 - RNA, 21 nt, Human
ucaccaacugauuaccaccca

SEQ ID NO: 1069190 - RNA, 22 nt, Human
ucacccaggcuggagugcagug

SEQ ID NO: 1069191 - RNA, 24 nt, Human
ucaccguguuagcaaggauggucu

SEQ ID NO: 1069192 - RNA, 19 nt, Human
ucacugcaagcuccaccuc

SEQ ID NO: 1069193 - RNA, 24 nt, Human
ucacugcaagcuccaccucccagg

SEQ ID NO: 1069194 - RNA, 20 nt, Human
ucagccucccaaguagcugg

SEQ ID NO: 1069195 - RNA, 20 nt, Human
uccaagggguggggguagcc

SEQ ID NO: 1069196 - RNA, 19 nt, Human
ucccagguucacgccauuc

SEQ ID NO: 1069197 - RNA, 20 nt, Human
ucccagguucacgccauucu

SEQ ID NO: 1069198 - RNA, 21 nt, Human
ucccagguucacgccauucuc

SEQ ID NO: 1069199 - RNA, 24 nt, Human
ucccagguucacgccauucuccug

SEQ ID NO: 1069200 - RNA, 24 nt, Human
ucgcucugucacccaggcuggagu

SEQ ID NO: 1069201 - RNA, 24 nt, Human
ucucaaagugcugggauuacaggc

SEQ ID NO: 1069202 - RNA, 26 nt, Human
ucuccugccucagccucccaaguagc

SEQ ID NO: 1069203 - RNA, 19 nt, Human
ucucgcucugucacccagg

SEQ ID NO: 1069204 - RNA, 23 nt, Human
ucucgcucugucacccaggcugg

SEQ ID NO: 1069205 - RNA, 24 nt, Human
ucucgcucugucacccaggcugga

SEQ ID NO: 1069206 - RNA, 26 nt, Human
ucucgcucugucacccaggcuggagu

SEQ ID NO: 1069207 - RNA, 27 nt, Human
ucucgcucugucacccaggcuggagug

SEQ ID NO: 1069208 - RNA, 21 nt, Human
ucuguaguaggagucaaggac

SEQ ID NO: 1069209 - RNA, 24 nt, Human
ucugucacccaggcuggagugcag

SEQ ID NO: 1069210 - RNA, 18 nt, Human
ugaagacagccagaacua

SEQ ID NO: 1069211 - RNA, 18 nt, Human
ugagagccccacagcccu

SEQ ID NO: 1069212 - RNA, 23 nt, Human
ugaggagcaguggcugagagaga

SEQ ID NO: 1069213 - RNA, 21 nt, Human
ugagggcacccauucaaagau

SEQ ID NO: 1069214 - RNA, 19 nt, Human
ugcacccccagccucccaa

SEQ ID NO: 1069215 - RNA, 24 nt, Human
ugccucagccucccaaguagcugg

SEQ ID NO: 1069216 - RNA, 24 nt, Human
ugcugggauuacaggcaugagaca

SEQ ID NO: 1069217 - RNA, 25 nt, Human
ugcuugggaaaguagaaaagcaagg

SEQ ID NO: 1069218 - RNA, 24 nt, Human
uggacacuagggacacugucucca

SEQ ID NO: 1069219 - RNA, 19 nt, Human
uggagugcaguggcgugau

SEQ ID NO: 1069220 - RNA, 23 nt, Human
uggagugcaguggcgugaucucg

SEQ ID NO: 1069221 - RNA, 24 nt, Human
uggagugcaguggcgugaucucgg

SEQ ID NO: 1069222 - RNA, 22 nt, Human
uggcaacccuuaagaucuuagc

SEQ ID NO: 1069223 - RNA, 25 nt, Human
uggcacaaaaguggcauuugugggu

SEQ ID NO: 1069224 - RNA, 20 nt, Human
uggcgugaucucggcucacu

SEQ ID NO: 1069225 - RNA, 24 nt, Human
ugggaguacaagcacaugccacca

SEQ ID NO: 1069226 - RNA, 18 nt, Human
ugggauuacaggcaugag

SEQ ID NO: 1069227 - RNA, 19 nt, Human
ugggauuacaggcaugaga

SEQ ID NO: 1069228 - RNA, 21 nt, Human
ugggauuacaggcaugagaca

SEQ ID NO: 1069229 - RNA, 22 nt, Human
ugggauuacaggcaugagacac

SEQ ID NO: 1069230 - RNA, 22 nt, Human
ugggauuacaggcaugagacac

SEQ ID NO: 1069231 - RNA, 22 nt, Human
ugggauuacaggcaugagacac

SEQ ID NO: 1069232 - RNA, 24 nt, Human
ugggauuacaggcaugagacacug

SEQ ID NO: 1069233 - RNA, 24 nt, Human
ugggauuacaggcaugagacacug

SEQ ID NO: 1069234 - RNA, 23 nt, Human
ugggcaggguuaccacagaugau

SEQ ID NO: 1069235 - RNA, 20 nt, Human
ugguaccaugauaguucuug

SEQ ID NO: 1069236 - RNA, 22 nt, Human
uuaguaaagacagcuuuucacc

SEQ ID NO: 1069237 - RNA, 24 nt, Human
uuaguaaagacagcuuuucaccgu

SEQ ID NO: 1069238 - RNA, 18 nt, Human
uuggccucucaaagugcu

SEQ ID NO: 1069239 - RNA, 22 nt, Human
uuuagauaaaaccacuggcaac

SEQ ID NO: 1069240 - RNA, 24 nt, Human
uuuagauaaaaccacuggcaaccc

SEQ ID NO: 1069241 - RNA, 24 nt, Human
uuuuuaguaaagacagcuuuucac

SEQ ID NO: 1069242 - RNA, 23 nt, Human
aggguuggguuuuuucucuaggg

SEQ ID NO: 1069243 - RNA, 18 nt, Human
cauccagagguugggcuc

SEQ ID NO: 1069244 - RNA, 19 nt, Human
ccucccucuuccuacgucc

SEQ ID NO: 1069245 - RNA, 23 nt, Human
ccugagaccuccagcuuuccagg

SEQ ID NO: 1069246 - RNA, 21 nt, Human
gagguugggcucauaaucugg

SEQ ID NO: 1069247 - RNA, 18 nt, Human
gggguggcugagaggagg

SEQ ID NO: 1069248 - RNA, 20 nt, Human
gggguggcugagaggagggg

SEQ ID NO: 1069249 - RNA, 19 nt, Human
ucagguccucccucuuccu

SEQ ID NO: 1069250 - RNA, 25 nt, Human
uccucccucuuccuacguccugaga

SEQ ID NO: 1069251 - RNA, 19 nt, Human
ucucuagggguaauuuugg

SEQ ID NO: 1069252 - RNA, 21 nt, Human
ugagaccuccagcuuuccagg

SEQ ID NO: 1069253 - RNA, 21 nt, Human
uuccagggggauacacaaugu

SEQ ID NO: 1069254 - RNA, 18 nt, Human
gccgggagggggagcgag

SEQ ID NO: 1069255 - RNA, 21 nt, Human
aaaaucuagaugauuucaucc

SEQ ID NO: 1069256 - RNA, 23 nt, Human
aaccagaaagugcugcuuccacc

SEQ ID NO: 1069257 - RNA, 19 nt, Human
agaaagugcugcuuccacc

SEQ ID NO: 1069258 - RNA, 22 nt, Human
augaauauacuccaaauuggcu

SEQ ID NO: 1069259 - RNA, 23 nt, Human
auuacaucacacucagauacacc

SEQ ID NO: 1069260 - RNA, 18 nt, Human
caggagacacugcagaaa

SEQ ID NO: 1069261 - RNA, 28 nt, Human
ccagcagguggccaaauauuguaaugac

SEQ ID NO: 1069262 - RNA, 19 nt, Human
cuccucccuagccccccua

SEQ ID NO: 1069263 - RNA, 22 nt, Human
gcugcuuccacccauagcugag

SEQ ID NO: 1069264 - RNA, 20 nt, Human
uaguccagucuugaguaagc

SEQ ID NO: 1069265 - RNA, 21 nt, Human
ugaacagacuauucaucaaga

SEQ ID NO: 1069266 - RNA, 25 nt, Human
ugaggaucuuucucuuucuccuccc

SEQ ID NO: 1069267 - RNA, 18 nt, Human
ugcagaaagucugcccuu

SEQ ID NO: 1069268 - RNA, 25 nt, Human
aaacaaaaaacaaaaaaaaacagga

SEQ ID NO: 1069269 - RNA, 18 nt, Human
aaacacacacauucuugc

SEQ ID NO: 1069270 - RNA, 19 nt, Human
aaggugaguugagccgcug

SEQ ID NO: 1069271 - RNA, 25 nt, Human
accccuuccuuucaucacuuucuca

SEQ ID NO: 1069272 - RNA, 23 nt, Human
accugguaaguauaaauaguuca

SEQ ID NO: 1069273 - RNA, 27 nt, Human
acuccuuccucccccuucccucccccu

SEQ ID NO: 1069274 - RNA, 18 nt, Human
aggaaagagagagugaug

SEQ ID NO: 1069275 - RNA, 28 nt, Human
aggcggagccggguggggccaggagccu

SEQ ID NO: 1069276 - RNA, 21 nt, Human
caaaaaacaaaaaaaaacagg

SEQ ID NO: 1069277 - RNA, 18 nt, Human
cagcccuguggcuccucc

SEQ ID NO: 1069278 - RNA, 24 nt, Human
cagcgacuccucugagcugaguuu

SEQ ID NO: 1069279 - RNA, 21 nt, Human
ccagcagugagucggagcucu

SEQ ID NO: 1069280 - RNA, 18 nt, Human
ccccuucccucccccuuu

SEQ ID NO: 1069281 - RNA, 21 nt, Human
ccccuucccucccccuuuuuu

SEQ ID NO: 1069282 - RNA, 19 nt, Human
ccccuuuccccucccuucc

SEQ ID NO: 1069283 - RNA, 22 nt, Human
cccgacuccuuccucccccuuc

SEQ ID NO: 1069284 - RNA, 21 nt, Human
cccucccuucccuauccccga

SEQ ID NO: 1069285 - RNA, 24 nt, Human
cccuguggcuccuccucgcugccc

SEQ ID NO: 1069286 - RNA, 23 nt, Human
cccuuuuuuuuguuuuccguucc

SEQ ID NO: 1069287 - RNA, 21 nt, Human
ccgccgccgaguggagcgcuc

SEQ ID NO: 1069288 - RNA, 22 nt, Human
ccgggcgcacgucucgccuccu

SEQ ID NO: 1069289 - RNA, 23 nt, Human
ccuccaaacacccgcggaagucu

SEQ ID NO: 1069290 - RNA, 24 nt, Human
ccucuuacugaacacuuuaaaagu

SEQ ID NO: 1069291 - RNA, 25 nt, Human
cgacuccuuccucccccuucccucc

SEQ ID NO: 1069292 - RNA, 19 nt, Human
cgaggaccuggagccgggu

SEQ ID NO: 1069293 - RNA, 20 nt, Human
cgucucgccuccuccccacu

SEQ ID NO: 1069294 - RNA, 24 nt, Human
cuccuccccacuacuuucuggguu

SEQ ID NO: 1069295 - RNA, 26 nt, Human
cuccuccccacuacuuucuggguucc

SEQ ID NO: 1069296 - RNA, 22 nt, Human
cucugguggguucggcugcccc

SEQ ID NO: 1069297 - RNA, 18 nt, Human
cugcagcagcgacuccuc

SEQ ID NO: 1069298 - RNA, 18 nt, Human
cuuucuggguucccuaag

SEQ ID NO: 1069299 - RNA, 22 nt, Human
gaaaaucaaccccuuccuuuca

SEQ ID NO: 1069300 - RNA, 19 nt, Human
gaccagggaaccgcaggcg

SEQ ID NO: 1069301 - RNA, 19 nt, Human
gaccggauccugaggaggc

SEQ ID NO: 1069302 - RNA, 20 nt, Human
gaccuggagucggcaggggc

SEQ ID NO: 1069303 - RNA, 19 nt, Human
gaggaaagagagagugaug

SEQ ID NO: 1069304 - RNA, 21 nt, Human
gaggaccuggagccggguagu

SEQ ID NO: 1069305 - RNA, 22 nt, Human
gaggaccuggagccggguagug

SEQ ID NO: 1069306 - RNA, 24 nt, Human
gcaaccgagcucagcccuguggcu

SEQ ID NO: 1069307 - RNA, 22 nt, Human
gcggcgaaggagccauucgggg

SEQ ID NO: 1069308 - RNA, 24 nt, Human
gcucagccucagagacuucgcgaa

SEQ ID NO: 1069309 - RNA, 18 nt, Human
gcugacggaguagaagga

SEQ ID NO: 1069310 - RNA, 25 nt, Human
gcugaguuugaggccguccccgacu

SEQ ID NO: 1069311 - RNA, 21 nt, Human
ggaccagggaaccgcaggcgu

SEQ ID NO: 1069312 - RNA, 24 nt, Human
ggagccuggccucccggcggggag

SEQ ID NO: 1069313 - RNA, 20 nt, Human
ggaggcagcugcgguggcag

SEQ ID NO: 1069314 - RNA, 18 nt, Human
ggccgcugauugggcggc

SEQ ID NO: 1069315 - RNA, 20 nt, Human
ggcgucccggagccuggccu

SEQ ID NO: 1069316 - RNA, 19 nt, Human
ggcugcagcagcgacuccu

SEQ ID NO: 1069317 - RNA, 21 nt, Human
gggaggcacgcgggccggcag

SEQ ID NO: 1069318 - RNA, 25 nt, Human
gggccgcugauugggcggcgaagga

SEQ ID NO: 1069319 - RNA, 20 nt, Human
gguggcagcugcugaguucu

SEQ ID NO: 1069320 - RNA, 23 nt, Human
guagaaggaaaacgucaguguug

SEQ ID NO: 1069321 - RNA, 18 nt, Human
gugcucggacggcgaggg

SEQ ID NO: 1069322 - RNA, 22 nt, Human
guggcagcggguaccgaguggc

SEQ ID NO: 1069323 - RNA, 22 nt, Human
guuccccuuuccccucccuucc

SEQ ID NO: 1069324 - RNA, 23 nt, Human
uaaaacacacacauucuugccuu

SEQ ID NO: 1069325 - RNA, 22 nt, Human
uaaaaugaaaauacacaacuga

SEQ ID NO: 1069326 - RNA, 27 nt, Human
uaaacaaacaaaaaacaaaaaaaaaca

SEQ ID NO: 1069327 - RNA, 23 nt, Human
uaacgugcacuuaaacaaacaaa

SEQ ID NO: 1069328 - RNA, 22 nt, Human
uagaaggaaaacgucaguguug

SEQ ID NO: 1069329 - RNA, 22 nt, Human
uauacacuguaaaaguacuaca

SEQ ID NO: 1069330 - RNA, 21 nt, Human
uauggagguggcagcggguac

SEQ ID NO: 1069331 - RNA, 18 nt, Human
ucacuuucucauucacuc

SEQ ID NO: 1069332 - RNA, 18 nt, Human
ucccccuucccucccccu

SEQ ID NO: 1069333 - RNA, 20 nt, Human
ucggugaaggugaguugagc

SEQ ID NO: 1069334 - RNA, 21 nt, Human
ugaaggugaguugagccgcug

SEQ ID NO: 1069335 - RNA, 22 nt, Human
ugacacacaggguguuuuccuc

SEQ ID NO: 1069336 - RNA, 19 nt, Human
ugaggaggcagcugcggug

SEQ ID NO: 1069337 - RNA, 22 nt, Human
ugauaaguucggcuucagacac

SEQ ID NO: 1069338 - RNA, 18 nt, Human
ugcaggagggggcccgcu

SEQ ID NO: 1069339 - RNA, 19 nt, Human
ugcgguggcagcugcuggc

SEQ ID NO: 1069340 - RNA, 19 nt, Human
ugcuuggagaacaaagagc

SEQ ID NO: 1069341 - RNA, 21 nt, Human
uggaaguaugacuccauuuua

SEQ ID NO: 1069342 - RNA, 21 nt, Human
uggcagcugcugaguucucgg

SEQ ID NO: 1069343 - RNA, 20 nt, Human
uggccaggccgccgugcgga

SEQ ID NO: 1069344 - RNA, 22 nt, Human
uggcgggaggcacgcgggccgg

SEQ ID NO: 1069345 - RNA, 19 nt, Human
ugggaaaagcagcuucuuc

SEQ ID NO: 1069346 - RNA, 26 nt, Human
ugggaaaagcagcuucuucucccggg

SEQ ID NO: 1069347 - RNA, 21 nt, Human
ugggaaaagcagcuucuucug

SEQ ID NO: 1069348 - RNA, 21 nt, Human
ugguggguucggcugccccaa

SEQ ID NO: 1069349 - RNA, 21 nt, Human
uuguuuaaguuuauggaagua

SEQ ID NO: 1069350 - RNA, 24 nt, Human
uuuuuuuuguuuuccguuccccuu

SEQ ID NO: 1069351 - RNA, 21 nt, Human
aagccccugcuccugggccag

SEQ ID NO: 1069352 - RNA, 20 nt, Human
aagcuggugccucuguuauc

SEQ ID NO: 1069353 - RNA, 19 nt, Human
aauucuguggcccucagag

SEQ ID NO: 1069354 - RNA, 23 nt, Human
acgcaguccaucccagagguagc

SEQ ID NO: 1069355 - RNA, 19 nt, Human
aggagacccaaaccccaga

SEQ ID NO: 1069356 - RNA, 19 nt, Human
agucaguccucuuacuacc

SEQ ID NO: 1069357 - RNA, 19 nt, Human
agucaguccucuuacuacc

SEQ ID NO: 1069358 - RNA, 20 nt, Human
caccagccccacuccaagcc

SEQ ID NO: 1069359 - RNA, 20 nt, Human
caggcacgcaguccauccca

SEQ ID NO: 1069360 - RNA, 18 nt, Human
caggcccuccucgcaagg

SEQ ID NO: 1069361 - RNA, 22 nt, Human
cccagcccugccugugcccggc

SEQ ID NO: 1069362 - RNA, 25 nt, Human
ccccacacaggcacgcaguccaucc

SEQ ID NO: 1069363 - RNA, 22 nt, Human
ccccacuccaagccccugcucc

SEQ ID NO: 1069364 - RNA, 19 nt, Human
cccgcaggucuuccuccuc

SEQ ID NO: 1069365 - RNA, 18 nt, Human
cccugauggaggggugag

SEQ ID NO: 1069366 - RNA, 18 nt, Human
ccgggcaccagccccacu

SEQ ID NO: 1069367 - RNA, 19 nt, Human
ccucagagacccugguucc

SEQ ID NO: 1069368 - RNA, 21 nt, Human
ccucagagacccugguuccag

SEQ ID NO: 1069369 - RNA, 22 nt, Human
ccucagagacccugguuccagg

SEQ ID NO: 1069370 - RNA, 20 nt, Human
ccuccuccucauccucaaag

SEQ ID NO: 1069371 - RNA, 25 nt, Human
ccugggccaggcccuccucgcaagg

SEQ ID NO: 1069372 - RNA, 18 nt, Human
ccugguuccaggaggaag

SEQ ID NO: 1069373 - RNA, 20 nt, Human
ccugugcccggcaacucgcc

SEQ ID NO: 1069374 - RNA, 25 nt, Human
ccugugcccggcaacucgccaaaag

SEQ ID NO: 1069375 - RNA, 18 nt, Human
cgacgcgcgggggcccgg

SEQ ID NO: 1069376 - RNA, 26 nt, Human
cgccaaaaguagccguuccauugacc

SEQ ID NO: 1069377 - RNA, 21 nt, Human
cucagggggccgaggagggag

SEQ ID NO: 1069378 - RNA, 23 nt, Human
cuccaagccccugcuccugggcc

SEQ ID NO: 1069379 - RNA, 24 nt, Human
cugccccacacaggcacgcagucc

SEQ ID NO: 1069380 - RNA, 23 nt, Human
cugcuccugggccaggcccuccu

SEQ ID NO: 1069381 - RNA, 19 nt, Human
cugggcgccggggcggagg

SEQ ID NO: 1069382 - RNA, 18 nt, Human
gaggaacacgguguccgc

SEQ ID NO: 1069383 - RNA, 18 nt, Human
gcuccaucggggacugga

SEQ ID NO: 1069384 - RNA, 24 nt, Human
gcuccuguccuagaaagggugggc

SEQ ID NO: 1069385 - RNA, 19 nt, Human
gggacccaccagucccgca

SEQ ID NO: 1069386 - RNA, 20 nt, Human
guccuagaaagggugggccu

SEQ ID NO: 1069387 - RNA, 19 nt, Human
uaaguagggacccaccagu

SEQ ID NO: 1069388 - RNA, 21 nt, Human
uagucaguccucuuacuaccu

SEQ ID NO: 1069389 - RNA, 19 nt, Human
uccaggaggaagcuggugc

SEQ ID NO: 1069390 - RNA, 19 nt, Human
ucccagagguagcggcucc

SEQ ID NO: 1069391 - RNA, 18 nt, Human
ucccgcaggucuuccucc

SEQ ID NO: 1069392 - RNA, 21 nt, Human
ucccgcaggucuuccuccucc

SEQ ID NO: 1069393 - RNA, 21 nt, Human
ucccgggcaccagccccacuc

SEQ ID NO: 1069394 - RNA, 24 nt, Human
uccuccucauccucaaaggcccgc

SEQ ID NO: 1069395 - RNA, 21 nt, Human
ucuuccuccuccucauccucc

SEQ ID NO: 1069396 - RNA, 20 nt, Human
ugaagaugagccccagcccu

SEQ ID NO: 1069397 - RNA, 19 nt, Human
ugauggaggggugagggca

SEQ ID NO: 1069398 - RNA, 18 nt, Human
uguccgcgacgcgcgggg

SEQ ID NO: 1069399 - RNA, 18 nt, Human
uuccaggaggaagcuggu

SEQ ID NO: 1069400 - RNA, 21 nt, Human
auuaagugacuuccuaaagag

SEQ ID NO: 1069401 - RNA, 22 nt, Human
ccuuucugcagucuuuuucuca

SEQ ID NO: 1069402 - RNA, 20 nt, Human
cuacucaggaauuguugcgg

SEQ ID NO: 1069403 - RNA, 20 nt, Human
cuacucaggaauuguugcgg

SEQ ID NO: 1069404 - RNA, 24 nt, Human
cucaagcaaggcccuacucaggaa

SEQ ID NO: 1069405 - RNA, 18 nt, Human
cucuccuuucugcagucu

SEQ ID NO: 1069406 - RNA, 21 nt, Human
cugcagucuuuuucucaagaa

SEQ ID NO: 1069407 - RNA, 18 nt, Human
gaagugaaggagcaagug

SEQ ID NO: 1069408 - RNA, 19 nt, Human
gggaauaaugaagcccaac

SEQ ID NO: 1069409 - RNA, 20 nt, Human
gguuugcuuguuucuacuga

SEQ ID NO: 1069410 - RNA, 19 nt, Human
uaagugacuuccuaaagag

SEQ ID NO: 1069411 - RNA, 22 nt, Human
ugaaagccccaccucuccuuuc

SEQ ID NO: 1069412 - RNA, 19 nt, Human
ugacuuccuaaagaggcga

SEQ ID NO: 1069413 - RNA, 19 nt, Human
uggagaguccccccacagg

SEQ ID NO: 1069414 - RNA, 20 nt, Human
uguggggguggaugagacuu

SEQ ID NO: 1069415 - RNA, 22 nt, Human
uucugcagucuuuuucucaaga

SEQ ID NO: 1069416 - RNA, 22 nt, Human
aacaccuccagcacagauucua

SEQ ID NO: 1069417 - RNA, 19 nt, Human
acccuuggggguccugggg

SEQ ID NO: 1069418 - RNA, 19 nt, Human
caaagcguggccccgugcc

SEQ ID NO: 1069419 - RNA, 20 nt, Human
cagaagaugcucaguuugac

SEQ ID NO: 1069420 - RNA, 18 nt, Human
ccauggagggcauggagc

SEQ ID NO: 1069421 - RNA, 22 nt, Human
cccggugcgcccggcgcucuuc

SEQ ID NO: 1069422 - RNA, 19 nt, Human
cccuuggggguccuggggg

SEQ ID NO: 1069423 - RNA, 21 nt, Human
ccuccagcacagauucuagcc

SEQ ID NO: 1069424 - RNA, 19 nt, Human
cgagauguccacacuccuc

SEQ ID NO: 1069425 - RNA, 19 nt, Human
cuccaggucuuucuucagc

SEQ ID NO: 1069426 - RNA, 23 nt, Human
cucuagcaugcuccugcuccggc

SEQ ID NO: 1069427 - RNA, 18 nt, Human
cugugugguuggccuggg

SEQ ID NO: 1069428 - RNA, 20 nt, Human
gacucgcucugcuggugugu

SEQ ID NO: 1069429 - RNA, 22 nt, Human
gagaaucccccagcgagauguc

SEQ ID NO: 1069430 - RNA, 19 nt, Human
gccacacggugccaucccg

SEQ ID NO: 1069431 - RNA, 19 nt, Human
ggagauggaggcacagaga

SEQ ID NO: 1069432 - RNA, 18 nt, Human
gggugggaagacccuugg

SEQ ID NO: 1069433 - RNA, 23 nt, Human
ggugggaagacccuugggggucc

SEQ ID NO: 1069434 - RNA, 23 nt, Human
guccgguggcuucacugugacuc

SEQ ID NO: 1069435 - RNA, 21 nt, Human
gugcaacaccuccagcacaga

SEQ ID NO: 1069436 - RNA, 24 nt, Human
guggccgccggggugggaagaccc

SEQ ID NO: 1069437 - RNA, 21 nt, Human
guguguggccgccgggguggg

SEQ ID NO: 1069438 - RNA, 23 nt, Human
uagcaugcuccugcuccggcccu

SEQ ID NO: 1069439 - RNA, 20 nt, Human
ucagcuggagguagguauca

SEQ ID NO: 1069440 - RNA, 19 nt, Human
ucauguaacccauggaggg

SEQ ID NO: 1069441 - RNA, 22 nt, Human
uccuggaggacccugucuuguu

SEQ ID NO: 1069442 - RNA, 26 nt, Human
uccugggggagggauguccgagggag

SEQ ID NO: 1069443 - RNA, 22 nt, Human
ucgcucugcugguguguguggc

SEQ ID NO: 1069444 - RNA, 23 nt, Human
ucucucguauguccgggucccac

SEQ ID NO: 1069445 - RNA, 19 nt, Human
ucugugugguuggccuggg

SEQ ID NO: 1069446 - RNA, 22 nt, Human
ugcuccggcccuggucggugaa

SEQ ID NO: 1069447 - RNA, 20 nt, Human
uggaggcacagagauggagc

SEQ ID NO: 1069448 - RNA, 23 nt, Human
ugggaagacccuuggggguccug

SEQ ID NO: 1069449 - RNA, 20 nt, Human
uggggagccaaggcagaugg

SEQ ID NO: 1069450 - RNA, 22 nt, Human
uggggagccaaggcagaugggc

SEQ ID NO: 1069451 - RNA, 18 nt, Human
ugggucauguaacccaug

SEQ ID NO: 1069452 - RNA, 22 nt, Human
uguaacccauggagggcaugga

SEQ ID NO: 1069453 - RNA, 21 nt, Human
uucacagaagaugcucaguuu

SEQ ID NO: 1069454 - RNA, 20 nt, Human
uuccaaguccuggaggaccc

SEQ ID NO: 1069455 - RNA, 19 nt, Human
uucugcaaagcguggcccc

SEQ ID NO: 1069456 - RNA, 20 nt, Human
uuggggguccugggggaggg

SEQ ID NO: 1069457 - RNA, 22 nt, Human
accggcuaaugauauucuugga

SEQ ID NO: 1069458 - RNA, 18 nt, Human
aggcuuuauagugggacc

SEQ ID NO: 1069459 - RNA, 20 nt, Human
auucaucuguccauugcugg

SEQ ID NO: 1069460 - RNA, 18 nt, Human
cacugacagaccgccccg

SEQ ID NO: 1069461 - RNA, 21 nt, Human
ccacugguucaaacugcuuuu

SEQ ID NO: 1069462 - RNA, 22 nt, Human
ccaguagggaagggaagccuuu

SEQ ID NO: 1069463 - RNA, 19 nt, Human
cccaagcugcucacugguc

SEQ ID NO: 1069464 - RNA, 19 nt, Human
cccaggucccaagcugcuc

SEQ ID NO: 1069465 - RNA, 22 nt, Human
ccucuucauauucucgcugccu

SEQ ID NO: 1069466 - RNA, 23 nt, Human
cugaguaaaucagugaaguucau

SEQ ID NO: 1069467 - RNA, 22 nt, Human
gccacugacagaccgccccggg

SEQ ID NO: 1069468 - RNA, 25 nt, Human
gcuggaauugagccacuuauggauc

SEQ ID NO: 1069469 - RNA, 26 nt, Human
gucguauucaucaucaucgucaucuu

SEQ ID NO: 1069470 - RNA, 19 nt, Human
gugaaguucauggguggug

SEQ ID NO: 1069471 - RNA, 18 nt, Human
uaccuugauuuccacugg

SEQ ID NO: 1069472 - RNA, 22 nt, Human
ucauauucucgcugccuuuugu

SEQ ID NO: 1069473 - RNA, 23 nt, Human
ucaugggugguggggcacuuuua

SEQ ID NO: 1069474 - RNA, 19 nt, Human
ucccagggccacugacaga

SEQ ID NO: 1069475 - RNA, 21 nt, Human
ucccagggccacugacagacc

SEQ ID NO: 1069476 - RNA, 20 nt, Human
uccucuucauauucucgcug

SEQ ID NO: 1069477 - RNA, 21 nt, Human
ucgcugccuuuuguaaccagu

SEQ ID NO: 1069478 - RNA, 22 nt, Human
ucggagacaacagugcacuuag

SEQ ID NO: 1069479 - RNA, 22 nt, Human
ucuguagccagauaggggaggc

SEQ ID NO: 1069480 - RNA, 22 nt, Human
uggauauuucuuccugaggcuc

SEQ ID NO: 1069481 - RNA, 18 nt, Human
uggaucucccagggccac

SEQ ID NO: 1069482 - RNA, 21 nt, Human
uuccauuucagagucguauuc

SEQ ID NO: 1069483 - RNA, 19 nt, Human
uucugcggucauaggucgc

SEQ ID NO: 1069484 - RNA, 25 nt, Human
uugaggaccuugggcagcucuguag

SEQ ID NO: 1069485 - RNA, 22 nt, Human
uugcuggaccggcuaaugauau

SEQ ID NO: 1069486 - RNA, 21 nt, Human
aacaaacaccagagagcaaac

SEQ ID NO: 1069487 - RNA, 23 nt, Human
aacaaacaccagagagcaaacug

SEQ ID NO: 1069488 - RNA, 19 nt, Human
cagccuccugaugccuggg

SEQ ID NO: 1069489 - RNA, 22 nt, Human
caggccaagaaacuccacauca

SEQ ID NO: 1069490 - RNA, 22 nt, Human
ccuacacugggccaugcagagg

SEQ ID NO: 1069491 - RNA, 23 nt, Human
ccugaugccugggcuuggcugga

SEQ ID NO: 1069492 - RNA, 23 nt, Human
gaaacuccacaucauaacagccu

SEQ ID NO: 1069493 - RNA, 19 nt, Human
gccuccugaugccugggcu

SEQ ID NO: 1069494 - RNA, 18 nt, Human
uaacagccuccugaugcc

SEQ ID NO: 1069495 - RNA, 24 nt, Human
uacauuaacaaacaccagagagca

SEQ ID NO: 1069496 - RNA, 21 nt, Human
uacauuaacaaacaccagagg

SEQ ID NO: 1069497 - RNA, 24 nt, Human
uacguuuauugccccaucccuuca

SEQ ID NO: 1069498 - RNA, 22 nt, Human
uuaacaaacaccagagagcaaa

SEQ ID NO: 1069499 - RNA, 24 nt, Human
uuccuacacugggccaugcagagg

SEQ ID NO: 1069500 - RNA, 18 nt, Human
aagaagcugagcaccauc

SEQ ID NO: 1069501 - RNA, 21 nt, Human
aagagggaaaagaaacggagg

SEQ ID NO: 1069502 - RNA, 20 nt, Human
acaaggauagaagagggaaa

SEQ ID NO: 1069503 - RNA, 19 nt, Human
agagggaaaagaaacggag

SEQ ID NO: 1069504 - RNA, 22 nt, Human
agagggaaaagaaacggaggcu

SEQ ID NO: 1069505 - RNA, 24 nt, Human
aggacagaaacauauagcagagaa

SEQ ID NO: 1069506 - RNA, 24 nt, Human
aggacagaaacauauagcagagaa

SEQ ID NO: 1069507 - RNA, 21 nt, Human
aggauagaagagggaaaagaa

SEQ ID NO: 1069508 - RNA, 25 nt, Human
aggggaaguggguggggggguguca

SEQ ID NO: 1069509 - RNA, 22 nt, Human
aguaacaaggauagaagaggga

SEQ ID NO: 1069510 - RNA, 24 nt, Human
aguaacaaggauagaagagggaaa

SEQ ID NO: 1069511 - RNA, 23 nt, Human
aguguaggagggacaaggaggaa

SEQ ID NO: 1069512 - RNA, 20 nt, Human
auagaagagggaaaagaaac

SEQ ID NO: 1069513 - RNA, 20 nt, Human
augggaccugagcuuugggc

SEQ ID NO: 1069514 - RNA, 19 nt, Human
augggcagcagaagaugga

SEQ ID NO: 1069515 - RNA, 23 nt, Human
auucuugagaccccaaacuccga

SEQ ID NO: 1069516 - RNA, 18 nt, Human
caccccucagcagcuccc

SEQ ID NO: 1069517 - RNA, 23 nt, Human
cagcagaagauggaguuguccca

SEQ ID NO: 1069518 - RNA, 20 nt, Human
caggacagaaacauauagca

SEQ ID NO: 1069519 - RNA, 19 nt, Human
cagucuucccaacuagggg

SEQ ID NO: 1069520 - RNA, 23 nt, Human
ccacaccucuucauguccccacc

SEQ ID NO: 1069521 - RNA, 24 nt, Human
ccacucucauccagucuucccaac

SEQ ID NO: 1069522 - RNA, 23 nt, Human
ccagccccaggaggagagagggg

SEQ ID NO: 1069523 - RNA, 18 nt, Human
cccacacgaacuugcaaa

SEQ ID NO: 1069524 - RNA, 21 nt, Human
cccaggcuggcacugcagcca

SEQ ID NO: 1069525 - RNA, 18 nt, Human
ccccagccccaggaggag

SEQ ID NO: 1069526 - RNA, 19 nt, Human
ccccucagcagcucccuga

SEQ ID NO: 1069527 - RNA, 24 nt, Human
ccccucagcagcucccugaggccc

SEQ ID NO: 1069528 - RNA, 19 nt, Human
ccugauaggguagaggugg

SEQ ID NO: 1069529 - RNA, 22 nt, Human
ccugcagguccccaggaucugg

SEQ ID NO: 1069530 - RNA, 26 nt, Human
ccuggacccacaccucuucauguccc

SEQ ID NO: 1069531 - RNA, 24 nt, Human
ccuuccagggggguuuugaaaguc

SEQ ID NO: 1069532 - RNA, 20 nt, Human
cggccaggacgcgcccacgg

SEQ ID NO: 1069533 - RNA, 20 nt, Human
cugaaccacgaguucugcua

SEQ ID NO: 1069534 - RNA, 20 nt, Human
cuuagagacugagauuguuc

SEQ ID NO: 1069535 - RNA, 23 nt, Human
cuugagaccccaaacuccgagac

SEQ ID NO: 1069536 - RNA, 19 nt, Human
gaagagggaaaagaaacgg

SEQ ID NO: 1069537 - RNA, 19 nt, Human
gacauaggcagacuaggag

SEQ ID NO: 1069538 - RNA, 24 nt, Human
gagaccccaaacuccgagaccaag

SEQ ID NO: 1069539 - RNA, 21 nt, Human
gagccaggcucagcaccccuc

SEQ ID NO: 1069540 - RNA, 18 nt, Human
gauucucccguuucccuc

SEQ ID NO: 1069541 - RNA, 20 nt, Human
gcaggacagaaacauauagc

SEQ ID NO: 1069542 - RNA, 23 nt, Human
gccccuuccuuuggcaugguuca

SEQ ID NO: 1069543 - RNA, 22 nt, Human
gcggcggcggcggcggcuggca

SEQ ID NO: 1069544 - RNA, 25 nt, Human
gcggcggcggcggcggcuggcaccc

SEQ ID NO: 1069545 - RNA, 19 nt, Human
gcucucagcauuguccuga

SEQ ID NO: 1069546 - RNA, 23 nt, Human
ggacagaaacauauagcagagaa

SEQ ID NO: 1069547 - RNA, 21 nt, Human
ggagauccuuuuccagccucc

SEQ ID NO: 1069548 - RNA, 19 nt, Human
ggagcccccuccucuugcu

SEQ ID NO: 1069549 - RNA, 18 nt, Human
ggaggagagaggggugac

SEQ ID NO: 1069550 - RNA, 22 nt, Human
ggccagguaagccggcgacgau

SEQ ID NO: 1069551 - RNA, 18 nt, Human
ggcggcggcggcggcggc

SEQ ID NO: 1069552 - RNA, 18 nt, Human
gggaaguggguggggggg

SEQ ID NO: 1069553 - RNA, 18 nt, Human
gggaccugagcuuugggc

SEQ ID NO: 1069554 - RNA, 19 nt, Human
ggggaaguggguggggggg

SEQ ID NO: 1069555 - RNA, 24 nt, Human
gggggguuuugaaaguccugauag

SEQ ID NO: 1069556 - RNA, 22 nt, Human
uacaaagcccggagggacggac

SEQ ID NO: 1069557 - RNA, 23 nt, Human
uacacacacacacagagaagcug

SEQ ID NO: 1069558 - RNA, 21 nt, Human
ucagcaccccucagcagcucc

SEQ ID NO: 1069559 - RNA, 23 nt, Human
ucagcagcucccugaggcccucu

SEQ ID NO: 1069560 - RNA, 20 nt, Human
ucauuggagcccccuccucu

SEQ ID NO: 1069561 - RNA, 23 nt, Human
uccacucucauccagucuuccca

SEQ ID NO: 1069562 - RNA, 19 nt, Human
ucccauccuugcuccccuu

SEQ ID NO: 1069563 - RNA, 20 nt, Human
uccccaggaucugggcccca

SEQ ID NO: 1069564 - RNA, 23 nt, Human
uccucaggcaguaccugcugccc

SEQ ID NO: 1069565 - RNA, 23 nt, Human
uccuuuggcaugguucacccuag

SEQ ID NO: 1069566 - RNA, 21 nt, Human
uccuuuuccagccuccccaca

SEQ ID NO: 1069567 - RNA, 21 nt, Human
ucugggccccagccccaggag

SEQ ID NO: 1069568 - RNA, 22 nt, Human
ugagaccccaaacuccgagacc

SEQ ID NO: 1069569 - RNA, 21 nt, Human
ugcagaugaaaaaggggagga

SEQ ID NO: 1069570 - RNA, 18 nt, Human
ugcccgagagagagaugg

SEQ ID NO: 1069571 - RNA, 24 nt, Human
ugggggggugucaagaagcugagc

SEQ ID NO: 1069572 - RNA, 21 nt, Human
ugggugaacccagcacugcca

SEQ ID NO: 1069573 - RNA, 19 nt, Human
ugguucacccuagcccugg

SEQ ID NO: 1069574 - RNA, 20 nt, Human
ugugaaaggggcuccugggu

SEQ ID NO: 1069575 - RNA, 22 nt, Human
ugugaaaggggcuccugggucu

SEQ ID NO: 1069576 - RNA, 22 nt, Human
uuuccagccuccccacacgaac

SEQ ID NO: 1069577 - RNA, 19 nt, Human
aaagcuggaugggucuggg

SEQ ID NO: 1069578 - RNA, 19 nt, Human
acagagcagagagcuugag

SEQ ID NO: 1069579 - RNA, 21 nt, Human
acaggcaccucaaaugcagga

SEQ ID NO: 1069580 - RNA, 22 nt, Human
agagagcuugagacccauuugu

SEQ ID NO: 1069581 - RNA, 21 nt, Human
agcugggcugcucuggaagcc

SEQ ID NO: 1069582 - RNA, 20 nt, Human
aggaggcaggcagcagcagg

SEQ ID NO: 1069583 - RNA, 25 nt, Human
aggcagcuccaggguuuggcugccu

SEQ ID NO: 1069584 - RNA, 20 nt, Human
aggcaggaugaauuuguggg

SEQ ID NO: 1069585 - RNA, 23 nt, Human
aggcaggcagcagcagggccaag

SEQ ID NO: 1069586 - RNA, 24 nt, Human
aggcaggcagcagcagggccaagg

SEQ ID NO: 1069587 - RNA, 23 nt, Human
aggcuugaggcaggaugaauuug

SEQ ID NO: 1069588 - RNA, 23 nt, Human
aggcuugaggcaggaugaauuug

SEQ ID NO: 1069589 - RNA, 25 nt, Human
caccggugcccagccuggagucccc

SEQ ID NO: 1069590 - RNA, 20 nt, Human
cacggugcccguagcaggau

SEQ ID NO: 1069591 - RNA, 18 nt, Human
cagaagcagccaccgggc

SEQ ID NO: 1069592 - RNA, 24 nt, Human
cagagcagagagcuugagacccau

SEQ ID NO: 1069593 - RNA, 22 nt, Human
caggauucaccucuugugcucc

SEQ ID NO: 1069594 - RNA, 22 nt, Human
cagggccaaggcuguggggagg

SEQ ID NO: 1069595 - RNA, 22 nt, Human
caggguggacagagcagagagc

SEQ ID NO: 1069596 - RNA, 21 nt, Human
cccacaccuggaaacggaggc

SEQ ID NO: 1069597 - RNA, 21 nt, Human
ccccuuuccuccugggccuuc

SEQ ID NO: 1069598 - RNA, 23 nt, Human
ccguagcaggauucaccucuugu

SEQ ID NO: 1069599 - RNA, 21 nt, Human
ccugcgagcuucugauaccac

SEQ ID NO: 1069600 - RNA, 21 nt, Human
ccugggccacggcacuccagg

SEQ ID NO: 1069601 - RNA, 21 nt, Human
cggcacuccaggcccacaccu

SEQ ID NO: 1069602 - RNA, 18 nt, Human
cggccaagcugggcugcu

SEQ ID NO: 1069603 - RNA, 20 nt, Human
cuccugggccuucuaaggca

SEQ ID NO: 1069604 - RNA, 23 nt, Human
cucuuugcugcggucgcguagac

SEQ ID NO: 1069605 - RNA, 20 nt, Human
cugauaccaccugggccacg

SEQ ID NO: 1069606 - RNA, 18 nt, Human
cuggaugggucugggcuc

SEQ ID NO: 1069607 - RNA, 21 nt, Human
cuggcagccugggaguccguu

SEQ ID NO: 1069608 - RNA, 18 nt, Human
cugggcugcucuggaagc

SEQ ID NO: 1069609 - RNA, 21 nt, Human
gaagccuguggaccaccggug

SEQ ID NO: 1069610 - RNA, 20 nt, Human
gcagcagcagggccaaggcu

SEQ ID NO: 1069611 - RNA, 18 nt, Human
gcaggaugaauuuguggg

SEQ ID NO: 1069612 - RNA, 18 nt, Human
ggagacugaggcuugagg

SEQ ID NO: 1069613 - RNA, 18 nt, Human
ggcagugguugagcagcu

SEQ ID NO: 1069614 - RNA, 25 nt, Human
ggcuugaggcaggaugaauuugugg

SEQ ID NO: 1069615 - RNA, 25 nt, Human
gggaaagcuggauggguuggacguc

SEQ ID NO: 1069616 - RNA, 26 nt, Human
gggcagugguugagcagcucuguccg

SEQ ID NO: 1069617 - RNA, 19 nt, Human
gggcccgaggcagcuccag

SEQ ID NO: 1069618 - RNA, 20 nt, Human
ggggacccugggcuccagug

SEQ ID NO: 1069619 - RNA, 22 nt, Human
ggucugggcuccccccaugagg

SEQ ID NO: 1069620 - RNA, 19 nt, Human
ucugggcuccccccaugag

SEQ ID NO: 1069621 - RNA, 23 nt, Human
ugacuuugacguaugaggccuuu

SEQ ID NO: 1069622 - RNA, 22 nt, Human
ugaggggaaagcuggauggguc

SEQ ID NO: 1069623 - RNA, 23 nt, Human
ugcguccucguuagcucccagug

SEQ ID NO: 1069624 - RNA, 18 nt, Human
uggaggaggcaggcagca

SEQ ID NO: 1069625 - RNA, 23 nt, Human
ugggcuccccccaugagggugcg

SEQ ID NO: 1069626 - RNA, 18 nt, Human
uggggagggugcgggggg

SEQ ID NO: 1069627 - RNA, 21 nt, Human
uugaggggaaagcuggauggg

SEQ ID NO: 1069628 - RNA, 19 nt, Human
acccagaagccucaggccu

SEQ ID NO: 1069629 - RNA, 21 nt, Human
caccaggacccagaagccuca

SEQ ID NO: 1069630 - RNA, 19 nt, Human
cccagaagccucaggccuc

SEQ ID NO: 1069631 - RNA, 20 nt, Human
cccagaagccucaggccucu

SEQ ID NO: 1069632 - RNA, 25 nt, Human
ccccccacugaagacauuggggacc

SEQ ID NO: 1069633 - RNA, 21 nt, Human
cccgucaccaggacccagaag

SEQ ID NO: 1069634 - RNA, 22 nt, Human
cccgucaccaggacccagaagc

SEQ ID NO: 1069635 - RNA, 18 nt, Human
gacccagaagccucaggc

SEQ ID NO: 1069636 - RNA, 18 nt, Human
ucaggccucuagacugcu

SEQ ID NO: 1069637 - RNA, 21 nt, Human
caaguagagauuugccagaag

SEQ ID NO: 1069638 - RNA, 24 nt, Human
aaaaaaagagaauauacuguaugc

SEQ ID NO: 1069639 - RNA, 21 nt, Human
aaugguucccacaacgauuuu

SEQ ID NO: 1069640 - RNA, 22 nt, Human
agaacccaauugugggggcugc

SEQ ID NO: 1069641 - RNA, 19 nt, Human
agagaauauacuguaugcc

SEQ ID NO: 1069642 - RNA, 20 nt, Human
aguuagauaaagaggaagaa

SEQ ID NO: 1069643 - RNA, 20 nt, Human
caccaaaaugcaguucuaag

SEQ ID NO: 1069644 - RNA, 26 nt, Human
cagucagaaauaaagaaaaaaagaga

SEQ ID NO: 1069645 - RNA, 21 nt, Human
caguccaucaggaaaagaaau

SEQ ID NO: 1069646 - RNA, 19 nt, Human
caguucuaagugcaguccu

SEQ ID NO: 1069647 - RNA, 20 nt, Human
cauucagacaugucugccau

SEQ ID NO: 1069648 - RNA, 18 nt, Human
cuucauucagacaugucu

SEQ ID NO: 1069649 - RNA, 25 nt, Human
gaaaagaaaucccccgcuggcugga

SEQ ID NO: 1069650 - RNA, 23 nt, Human
gugacagucagaaauaaagaaaa

SEQ ID NO: 1069651 - RNA, 21 nt, Human
uaaaauagagccuauuugucc

SEQ ID NO: 1069652 - RNA, 18 nt, Human
uacaguccaucaggaaaa

SEQ ID NO: 1069653 - RNA, 21 nt, Human
uaguuagauaaagaggaagaa

SEQ ID NO: 1069654 - RNA, 23 nt, Human
ucaagauauaaaauagagccuau

SEQ ID NO: 1069655 - RNA, 21 nt, Human
ucagaggucaccaaaaugcag

SEQ ID NO: 1069656 - RNA, 26 nt, Human
uccaaaaauaauuuuguuaaguucac

SEQ ID NO: 1069657 - RNA, 22 nt, Human
uccaaguuuuuugcaugaagca

SEQ ID NO: 1069658 - RNA, 21 nt, Human
ucuccuucagagaaaacugag

SEQ ID NO: 1069659 - RNA, 24 nt, Human
ucucuucuguguccuuuuauaaga

SEQ ID NO: 1069660 - RNA, 19 nt, Human
ugcuuaagcaaaugugaga

SEQ ID NO: 1069661 - RNA, 22 nt, Human
ugguuuaaagucaauagggggc

SEQ ID NO: 1069662 - RNA, 23 nt, Human
uguaauauaguuagauaaagagg

SEQ ID NO: 1069663 - RNA, 22 nt, Human
ugucucuucuguguccuuuuau

SEQ ID NO: 1069664 - RNA, 26 nt, Human
uucaccucaacgucagaagcucauuc

SEQ ID NO: 1069665 - RNA, 20 nt, Human
aaagagggcuuucugugaua

SEQ ID NO: 1069666 - RNA, 18 nt, Human
accauauuuaauagaaac

SEQ ID NO: 1069667 - RNA, 26 nt, Human
agaaggagcaauuaaggauucagagg

SEQ ID NO: 1069668 - RNA, 18 nt, Human
agacaaauuagcccacag

SEQ ID NO: 1069669 - RNA, 18 nt, Human
agaggaggugagaaggag

SEQ ID NO: 1069670 - RNA, 24 nt, Human
aucaacaaagcucaugguucuacc

SEQ ID NO: 1069671 - RNA, 22 nt, Human
augagagacaaauuagcccaca

SEQ ID NO: 1069672 - RNA, 18 nt, Human
auucugucuccucuuucc

SEQ ID NO: 1069673 - RNA, 22 nt, Human
cauucugucuccucuuuccaau

SEQ ID NO: 1069674 - RNA, 25 nt, Human
ccaaaaugagagacaaauuagccca

SEQ ID NO: 1069675 - RNA, 24 nt, Human
ccaagaagaaagagucccuccucu

SEQ ID NO: 1069676 - RNA, 23 nt, Human
cugcucagaagugacuacagcaa

SEQ ID NO: 1069677 - RNA, 20 nt, Human
gaaagagucccuccucucca

SEQ ID NO: 1069678 - RNA, 20 nt, Human
gaaggagcaauuaaggaugg

SEQ ID NO: 1069679 - RNA, 25 nt, Human
gcuguguuucuccucauguuugucg

SEQ ID NO: 1069680 - RNA, 21 nt, Human
gguaaagagauugcagugacu

SEQ ID NO: 1069681 - RNA, 18 nt, Human
uacgaagggcccaaaaug

SEQ ID NO: 1069682 - RNA, 19 nt, Human
uagcccacagaaaagagag

SEQ ID NO: 1069683 - RNA, 22 nt, Human
uagcccacagaaaagagaguuu

SEQ ID NO: 1069684 - RNA, 22 nt, Human
uccuccuuaacacauccaagaa

SEQ ID NO: 1069685 - RNA, 21 nt, Human
uccucuccaucuaucuuguca

SEQ ID NO: 1069686 - RNA, 25 nt, Human
ucugugauaaacagguucccagagc

SEQ ID NO: 1069687 - RNA, 19 nt, Human
ugaaaaagagggcuuucug

SEQ ID NO: 1069688 - RNA, 21 nt, Human
ugaagacaauaaaguaucauu

SEQ ID NO: 1069689 - RNA, 25 nt, Human
ugagaaggagcaauuaaggauggug

SEQ ID NO: 1069690 - RNA, 21 nt, Human
ugaucaacaucaacaaagcuc

SEQ ID NO: 1069691 - RNA, 19 nt, Human
uugcagugacuguccuccu

SEQ ID NO: 1069692 - RNA, 23 nt, Human
uuucugcucagaagugacuacag

SEQ ID NO: 1069693 - RNA, 22 nt, Human
aaaauagaacaacaaugacaaa

SEQ ID NO: 1069694 - RNA, 21 nt, Human
aaacaugguauaguagaugac

SEQ ID NO: 1069695 - RNA, 20 nt, Human
aaaccccagacuaccaggug

SEQ ID NO: 1069696 - RNA, 24 nt, Human
aacaacaaugacaaaugagcagcc

SEQ ID NO: 1069697 - RNA, 25 nt, Human
acaaaauagaacaacaaugacaaau

SEQ ID NO: 1069698 - RNA, 22 nt, Human
acccuagcaacucuucugggca

SEQ ID NO: 1069699 - RNA, 20 nt, Human
agcccaaucaacuucggaaa

SEQ ID NO: 1069700 - RNA, 18 nt, Human
caacaaugacaaaugagc

SEQ ID NO: 1069701 - RNA, 20 nt, Human
cacccuagcaacucuucugg

SEQ ID NO: 1069702 - RNA, 21 nt, Human
cagcccaaucaacuucggaaa

SEQ ID NO: 1069703 - RNA, 21 nt, Human
cucaaaccccagacuaccagg

SEQ ID NO: 1069704 - RNA, 20 nt, Human
gaacaacaaugacaaaugag

SEQ ID NO: 1069705 - RNA, 21 nt, Human
uaagacagacuaaagucaaga

SEQ ID NO: 1069706 - RNA, 18 nt, Human
uacuuagagaguaugggg

SEQ ID NO: 1069707 - RNA, 21 nt, Human
uagcaaaaacauuaacgcaaa

SEQ ID NO: 1069708 - RNA, 19 nt, Human
ucucaggcaccuacccaag

SEQ ID NO: 1069709 - RNA, 20 nt, Human
ucucaggcaccuacccaaga

SEQ ID NO: 1069710 - RNA, 22 nt, Human
ugagggagugacagauugcaga

SEQ ID NO: 1069711 - RNA, 23 nt, Human
ugcacuagauaaucucuaaaucu

SEQ ID NO: 1069712 - RNA, 21 nt, Human
uguaaaaaggguuuuaaucuc

SEQ ID NO: 1069713 - RNA, 23 nt, Human
aaaaggaaacgauucagacgguu

SEQ ID NO: 1069714 - RNA, 22 nt, Human
aacucggcugcacuguccucgg

SEQ ID NO: 1069715 - RNA, 21 nt, Human
acgaaccauccagagcccaga

SEQ ID NO: 1069716 - RNA, 21 nt, Human
agaaaaggaaacgauucagac

SEQ ID NO: 1069717 - RNA, 21 nt, Human
auccaaagaggguaaauugga

SEQ ID NO: 1069718 - RNA, 22 nt, Human
auccaaagaggguaaauuggag

SEQ ID NO: 1069719 - RNA, 23 nt, Human
augcacaguguuagcuaggucau

SEQ ID NO: 1069720 - RNA, 25 nt, Human
caaagaggguaaauuggagaaauca

SEQ ID NO: 1069721 - RNA, 24 nt, Human
caaagcagcuacguccaucuguaa

SEQ ID NO: 1069722 - RNA, 28 nt, Human
caacuuuccuacggaagaaaaggaaacg

SEQ ID NO: 1069723 - RNA, 22 nt, Human
caagacggacuaucaagaccug

SEQ ID NO: 1069724 - RNA, 21 nt, Human
cacaggacaucaaacaauggc

SEQ ID NO: 1069725 - RNA, 18 nt, Human
cacaguguuagcuagguc

SEQ ID NO: 1069726 - RNA, 19 nt, Human
caggcugcgcgaggcuggc

SEQ ID NO: 1069727 - RNA, 18 nt, Human
cauccagagcccagaaag

SEQ ID NO: 1069728 - RNA, 23 nt, Human
caucuucuaaaaucaacauccaa

SEQ ID NO: 1069729 - RNA, 19 nt, Human
ccgugccgaccgcggcgcg

SEQ ID NO: 1069730 - RNA, 25 nt, Human
cgcacgaaccauccagagcccagaa

SEQ ID NO: 1069731 - RNA, 25 nt, Human
cgcugcggggcugcugggcugcggg

SEQ ID NO: 1069732 - RNA, 19 nt, Human
cuggcaccauccaaagagg

SEQ ID NO: 1069733 - RNA, 21 nt, Human
gaagaaaaggaaacgauucag

SEQ ID NO: 1069734 - RNA, 19 nt, Human
gacacuguaaacagcaguu

SEQ ID NO: 1069735 - RNA, 21 nt, Human
gaccugagccgaccugacuua

SEQ ID NO: 1069736 - RNA, 18 nt, Human
gagacggcgcuggcagcu

SEQ ID NO: 1069737 - RNA, 18 nt, Human
gcacgaaccauccagagc

SEQ ID NO: 1069738 - RNA, 21 nt, Human
gcaggcugcgcgaggcuggca

SEQ ID NO: 1069739 - RNA, 20 nt, Human
ggcggccgcgggagacggcg

SEQ ID NO: 1069740 - RNA, 24 nt, Human
ggcugcggggcugaggagcugcgg

SEQ ID NO: 1069741 - RNA, 20 nt, Human
gggcggcggcggccgcggga

SEQ ID NO: 1069742 - RNA, 19 nt, Human
uaaagccugguuucucagu

SEQ ID NO: 1069743 - RNA, 24 nt, Human
uaaaugacaaacacuagugcuuua

SEQ ID NO: 1069744 - RNA, 19 nt, Human
uaaauuggagaaaucacac

SEQ ID NO: 1069745 - RNA, 22 nt, Human
uacggaagaaaaggaaacgauu

SEQ ID NO: 1069746 - RNA, 22 nt, Human
ucaagaccugagccgaccugac

SEQ ID NO: 1069747 - RNA, 23 nt, Human
ucaagaccugagccgaccugacu

SEQ ID NO: 1069748 - RNA, 23 nt, Human
ucagcgcaggcugcgcgaggcug

SEQ ID NO: 1069749 - RNA, 20 nt, Human
uccaaagaggguaaauugga

SEQ ID NO: 1069750 - RNA, 20 nt, Human
uccaaagaggguaaauugga

SEQ ID NO: 1069751 - RNA, 22 nt, Human
uccaccuggcaccauccaaaga

SEQ ID NO: 1069752 - RNA, 23 nt, Human
ucuaaaaucaacauccaaucccc

SEQ ID NO: 1069753 - RNA, 18 nt, Human
ugauacaauacaauguuu

SEQ ID NO: 1069754 - RNA, 24 nt, Human
ugcacaguguuagcuaggucaucg

SEQ ID NO: 1069755 - RNA, 18 nt, Human
ugcugggcugcggggcug

SEQ ID NO: 1069756 - RNA, 20 nt, Human
uggcaccauccaaagagggu

SEQ ID NO: 1069757 - RNA, 20 nt, Human
uggcagcugggcugcaggcg

SEQ ID NO: 1069758 - RNA, 24 nt, Human
uggcuaaguuuuaaacaaaugcuc

SEQ ID NO: 1069759 - RNA, 21 nt, Human
uggcuggaguucuccaucuuc

SEQ ID NO: 1069760 - RNA, 18 nt, Human
ugggcaaagaaagcacuu

SEQ ID NO: 1069761 - RNA, 21 nt, Human
uguccucggcgccgcugcggg

SEQ ID NO: 1069762 - RNA, 20 nt, Human
uuaaagccugguuucucagu

SEQ ID NO: 1069763 - RNA, 27 nt, Human
ucuguggcucagacaugaccggggucc

SEQ ID NO: 1069764 - RNA, 19 nt, Human
aguaaauuggacaggcaca

SEQ ID NO: 1069765 - RNA, 19 nt, Human
ccgugcugccucuucucac

SEQ ID NO: 1069766 - RNA, 23 nt, Human
ccuccgcgggagcuggagcacuc

SEQ ID NO: 1069767 - RNA, 19 nt, Human
ccuccuccgcgggagcugg

SEQ ID NO: 1069768 - RNA, 21 nt, Human
ccugccagggggcgagucccg

SEQ ID NO: 1069769 - RNA, 21 nt, Human
ccuggagcugcagggucccua

SEQ ID NO: 1069770 - RNA, 21 nt, Human
ggcgagucccgcgcucccugc

SEQ ID NO: 1069771 - RNA, 28 nt, Human
gggagcagcagagagcaaaccgguaccc

SEQ ID NO: 1069772 - RNA, 21 nt, Human
gguaguaaauuggacaggcac

SEQ ID NO: 1069773 - RNA, 21 nt, Human
gugcugccucuucucacgggc

SEQ ID NO: 1069774 - RNA, 21 nt, Human
uaaauuggacaggcacauuua

SEQ ID NO: 1069775 - RNA, 25 nt, Human
uaaauuggacaggcacauuuaaaua

SEQ ID NO: 1069776 - RNA, 21 nt, Human
uaauuugacaaguucaacucc

SEQ ID NO: 1069777 - RNA, 22 nt, Human
uaucccggggcgccgcccgcag

SEQ ID NO: 1069778 - RNA, 18 nt, Human
ugccagggggcgaguccc

SEQ ID NO: 1069779 - RNA, 19 nt, Human
uggacaggcacauuuaaau

SEQ ID NO: 1069780 - RNA, 22 nt, Human
uucauuaucucuuagguaguaa

SEQ ID NO: 1069781 - RNA, 22 nt, Human
aaauggaaauuuuaagccaagc

SEQ ID NO: 1069782 - RNA, 23 nt, Human
aauguaaagaaucgaaaauuuua

SEQ ID NO: 1069783 - RNA, 23 nt, Human
acucuucaucagaggacauuaau

SEQ ID NO: 1069784 - RNA, 21 nt, Human
acuuaaaaagacauugaagua

SEQ ID NO: 1069785 - RNA, 21 nt, Human
acuuggggaaaggaaauacua

SEQ ID NO: 1069786 - RNA, 23 nt, Human
agacacaaaauggaaauuuuaag

SEQ ID NO: 1069787 - RNA, 24 nt, Human
auaaaucuaucccuuggguuuuuu

SEQ ID NO: 1069788 - RNA, 19 nt, Human
aucacaauagguuuaccug

SEQ ID NO: 1069789 - RNA, 19 nt, Human
auuaagguguuuuaacuuu

SEQ ID NO: 1069790 - RNA, 22 nt, Human
auugacuuauuucauauaguca

SEQ ID NO: 1069791 - RNA, 21 nt, Human
caccauauuaaucuacagaau

SEQ ID NO: 1069792 - RNA, 20 nt, Human
cacccauuucaggaaggccc

SEQ ID NO: 1069793 - RNA, 19 nt, Human
ggaggccaccgggcucggg

SEQ ID NO: 1069794 - RNA, 19 nt, Human
gggcucgggccaccggcag

SEQ ID NO: 1069795 - RNA, 19 nt, Human
guaaaaaugcacccauuuc

SEQ ID NO: 1069796 - RNA, 24 nt, Human
uaaaugaaaauaaaucuaucccuu

SEQ ID NO: 1069797 - RNA, 26 nt, Human
uaaaugaugugucuugaacccugaag

SEQ ID NO: 1069798 - RNA, 22 nt, Human
uaagccaagccuacuuuucccc

SEQ ID NO: 1069799 - RNA, 18 nt, Human
uagaaaaugaacuacuug

SEQ ID NO: 1069800 - RNA, 18 nt, Human
ucaguggaggacgaaaag

SEQ ID NO: 1069801 - RNA, 19 nt, Human
ucaguggaggacgaaaagc

SEQ ID NO: 1069802 - RNA, 26 nt, Human
ucccucaauguucacuaaauauaguu

SEQ ID NO: 1069803 - RNA, 30 nt, Human
ugauaccccaccauauuaaucuacagaauu

SEQ ID NO: 1069804 - RNA, 21 nt, Human
ugaugugucuugaacgcugcu

SEQ ID NO: 1069805 - RNA, 27 nt, Human
ugcugagauugagaagaccuuagaaac

SEQ ID NO: 1069806 - RNA, 21 nt, Human
uuagcuucauuggggcguauc

SEQ ID NO: 1069807 - RNA, 21 nt, Human
uuauuucauauagucaaaaag

SEQ ID NO: 1069808 - RNA, 20 nt, Human
aaaacucaaguuaauuugcc

SEQ ID NO: 1069809 - RNA, 18 nt, Human
aacaccucccucuaaucu

SEQ ID NO: 1069810 - RNA, 19 nt, Human
aagauccaacaaacugcag

SEQ ID NO: 1069811 - RNA, 18 nt, Human
aagcagaagaggaugucc

SEQ ID NO: 1069812 - RNA, 18 nt, Human
aagcagaagaggaugucc

SEQ ID NO: 1069813 - RNA, 22 nt, Human
aagcagaagaggauguccagga

SEQ ID NO: 1069814 - RNA, 24 nt, Human
aagccauugaagauccaacaaacu

SEQ ID NO: 1069815 - RNA, 20 nt, Human
aaguuaauuugccgcguaga

SEQ ID NO: 1069816 - RNA, 23 nt, Human
aauaucagaacccaagggaggaa

SEQ ID NO: 1069817 - RNA, 23 nt, Human
acaccucccucuaaucucaauuu

SEQ ID NO: 1069818 - RNA, 21 nt, Human
acccuccaauaaugaacaaca

SEQ ID NO: 1069819 - RNA, 23 nt, Human
acugcagccuuggggugcucaug

SEQ ID NO: 1069820 - RNA, 23 nt, Human
aggcauacaacuuuucugagaaa

SEQ ID NO: 1069821 - RNA, 22 nt, Human
agguggcuuucccaugccggga

SEQ ID NO: 1069822 - RNA, 20 nt, Human
caaaucuuuuacucuauaac

SEQ ID NO: 1069823 - RNA, 19 nt, Human
caccuuaaccucuccagca

SEQ ID NO: 1069824 - RNA, 24 nt, Human
caccuuaaccucuccagcaucaaa

SEQ ID NO: 1069825 - RNA, 25 nt, Human
caggcaccacaucauuuacccucca

SEQ ID NO: 1069826 - RNA, 18 nt, Human
caguccuggguucauccu

SEQ ID NO: 1069827 - RNA, 22 nt, Human
ccaucugaaggacagaaauugu

SEQ ID NO: 1069828 - RNA, 21 nt, Human
cccaagggaggaaaagcuggc

SEQ ID NO: 1069829 - RNA, 21 nt, Human
ccugcggucagagcagggguc

SEQ ID NO: 1069830 - RNA, 18 nt, Human
cuccaauaaugaacaagg

SEQ ID NO: 1069831 - RNA, 19 nt, Human
cucuccagcaucaaaucuu

SEQ ID NO: 1069832 - RNA, 21 nt, Human
cugaaaugaagguagguucac

SEQ ID NO: 1069833 - RNA, 21 nt, Human
cuuccacacucauauguaucu

SEQ ID NO: 1069834 - RNA, 20 nt, Human
gaccucaggcaccacaucau

SEQ ID NO: 1069835 - RNA, 19 nt, Human
ggagggagguggaaggagg

SEQ ID NO: 1069836 - RNA, 18 nt, Human
uaaccucucuuuaaacac

SEQ ID NO: 1069837 - RNA, 21 nt, Human
uaaccucucuuuaaacaccuc

SEQ ID NO: 1069838 - RNA, 19 nt, Human
uacccuccaauaaugaaca

SEQ ID NO: 1069839 - RNA, 24 nt, Human
uagcuuuauuaaauaggcauacaa

SEQ ID NO: 1069840 - RNA, 22 nt, Human
uauaaccucucuuuaaacaccu

SEQ ID NO: 1069841 - RNA, 24 nt, Human
uauggaagugaggaaggugcucuu

SEQ ID NO: 1069842 - RNA, 21 nt, Human
ucaggcaccacaucauuuacc

SEQ ID NO: 1069843 - RNA, 20 nt, Human
ucccucuaaucucaauuucc

SEQ ID NO: 1069844 - RNA, 18 nt, Human
ucccugaauucuuauugc

SEQ ID NO: 1069845 - RNA, 26 nt, Human
ucccugaauucuuauugcaccuucua

SEQ ID NO: 1069846 - RNA, 21 nt, Human
ucuagugcggcaauaucagaa

SEQ ID NO: 1069847 - RNA, 22 nt, Human
ucucuccuaagcagaagaggau

SEQ ID NO: 1069848 - RNA, 20 nt, Human
ucugagguuggggcaacugc

SEQ ID NO: 1069849 - RNA, 18 nt, Human
ucuuuaaacaccucccuc

SEQ ID NO: 1069850 - RNA, 22 nt, Human
ugagggagagguggcuuuccca

SEQ ID NO: 1069851 - RNA, 24 nt, Human
ugagggagagguggcuuucccaug

SEQ ID NO: 1069852 - RNA, 20 nt, Human
ugcggucagagcaggggucc

SEQ ID NO: 1069853 - RNA, 18 nt, Human
uggcaaaguugucaugug

SEQ ID NO: 1069854 - RNA, 18 nt, Human
uguccugcggucagagca

SEQ ID NO: 1069855 - RNA, 23 nt, Human
uguccugcggucagagcaggggu

SEQ ID NO: 1069856 - RNA, 23 nt, Human
uuccacacucauauguaucugcu

SEQ ID NO: 1069857 - RNA, 19 nt, Human
uugacucccucuccaauuu

SEQ ID NO: 1069858 - RNA, 26 nt, Human
uugucaugugccaagcggccaauccc

SEQ ID NO: 1069859 - RNA, 19 nt, Human
uuucccaugccgggaggga

SEQ ID NO: 1069860 - RNA, 26 nt, Human
aaaaacuaaacaggcauuuuggacaa

SEQ ID NO: 1069861 - RNA, 28 nt, Human
aaacaggcauuuuggacaacacauucuu

SEQ ID NO: 1069862 - RNA, 21 nt, Human
acuauaaaaaggacagccaga

SEQ ID NO: 1069863 - RNA, 22 nt, Human
agauaguucuggggccucaggg

SEQ ID NO: 1069864 - RNA, 24 nt, Human
aggcauuuuggacaacacauucuu

SEQ ID NO: 1069865 - RNA, 24 nt, Human
auaguucuggggccucagggggcu

SEQ ID NO: 1069866 - RNA, 20 nt, Human
augguagggaaaguucucac

SEQ ID NO: 1069867 - RNA, 21 nt, Human
auucuuggcaauagaaccugg

SEQ ID NO: 1069868 - RNA, 22 nt, Human
ccagauaucaacuguuacagaa

SEQ ID NO: 1069869 - RNA, 20 nt, Human
cccauacauacuuaaaacca

SEQ ID NO: 1069870 - RNA, 19 nt, Human
ccccaccauuuccaugucu

SEQ ID NO: 1069871 - RNA, 23 nt, Human
ccucugcuucaacaaugugcagu

SEQ ID NO: 1069872 - RNA, 27 nt, Human
cucacucugcacuauaaaaaggacaac

SEQ ID NO: 1069873 - RNA, 18 nt, Human
cuuaaagauaacuggucu

SEQ ID NO: 1069874 - RNA, 21 nt, Human
gcacuauaaaaaggacagcca

SEQ ID NO: 1069875 - RNA, 20 nt, Human
gcauuuuggacaacacauuc

SEQ ID NO: 1069876 - RNA, 20 nt, Human
gggccucagggggcucaugu

SEQ ID NO: 1069877 - RNA, 21 nt, Human
uaacuggucucauuuucauca

SEQ ID NO: 1069878 - RNA, 21 nt, Human
uacuuuauuaaaauacugagu

SEQ ID NO: 1069879 - RNA, 19 nt, Human
uacuuuugucuccccacca

SEQ ID NO: 1069880 - RNA, 23 nt, Human
uagaaccuggacaacauuuauca

SEQ ID NO: 1069881 - RNA, 23 nt, Human
uagaaccuggacaacauuuauca

SEQ ID NO: 1069882 - RNA, 21 nt, Human
uagggaaaguucucacucugc

SEQ ID NO: 1069883 - RNA, 24 nt, Human
ucaacaaugugcaguucauccuuu

SEQ ID NO: 1069884 - RNA, 24 nt, Human
ucacguguauacuuuugucucccu

SEQ ID NO: 1069885 - RNA, 21 nt, Human
ucacucugcacuauaaaaagg

SEQ ID NO: 1069886 - RNA, 18 nt, Human
ugaaugcugcuccagaga

SEQ ID NO: 1069887 - RNA, 24 nt, Human
ugcugcuccagagaacagccgcgc

SEQ ID NO: 1069888 - RNA, 23 nt, Human
ugcuucaacaaugugcaguucau

SEQ ID NO: 1069889 - RNA, 25 nt, Human
ugucugaccacugcuacuacuaugu

SEQ ID NO: 1069890 - RNA, 19 nt, Human
ugugcaguucauccuuugc

SEQ ID NO: 1069891 - RNA, 20 nt, Human
uuugucuccccaccauuucc

SEQ ID NO: 1069892 - RNA, 22 nt, Human
aaaacaaaaaugagagauuuau

SEQ ID NO: 1069893 - RNA, 24 nt, Human
aaacaaaaaugagagauuuauaaa

SEQ ID NO: 1069894 - RNA, 21 nt, Human
aaauauauaugccuaaauuuu

SEQ ID NO: 1069895 - RNA, 22 nt, Human
aagaaaccauagcccacugcaa

SEQ ID NO: 1069896 - RNA, 24 nt, Human
aagaaaccauagcccacugcaaac

SEQ ID NO: 1069897 - RNA, 18 nt, Human
acaaaacaaaaaugagag

SEQ ID NO: 1069898 - RNA, 27 nt, Human
agaguaguucuuuacuauuuccaagga

SEQ ID NO: 1069899 - RNA, 22 nt, Human
aggaaagagaaaauccagaugc

SEQ ID NO: 1069900 - RNA, 23 nt, Human
auguacauacacacacauaugua

SEQ ID NO: 1069901 - RNA, 18 nt, Human
caagaaaccauagcccac

SEQ ID NO: 1069902 - RNA, 21 nt, Human
caagaaaccauagcccacugc

SEQ ID NO: 1069903 - RNA, 21 nt, Human
caggugccuguguuacuucug

SEQ ID NO: 1069904 - RNA, 19 nt, Human
cauacacacacauauguac

SEQ ID NO: 1069905 - RNA, 31 nt, Human
cauagacauguacauacacacacauauguag

SEQ ID NO: 1069906 - RNA, 24 nt, Human
ccugucaacuuacaaaacaaaaau

SEQ ID NO: 1069907 - RNA, 19 nt, Human
cuuccacaucuacugugua

SEQ ID NO: 1069908 - RNA, 22 nt, Human
cuuuucuuucuucaacuacugu

SEQ ID NO: 1069909 - RNA, 24 nt, Human
gcccacugcaaacuguucacgaug

SEQ ID NO: 1069910 - RNA, 24 nt, Human
ggauaaauguacaaccguguccuu

SEQ ID NO: 1069911 - RNA, 21 nt, Human
uaaaagguacauauauagcug

SEQ ID NO: 1069912 - RNA, 21 nt, Human
uacauacacacacauauguac

SEQ ID NO: 1069913 - RNA, 21 nt, Human
uacuagauguguuuucaaugg

SEQ ID NO: 1069914 - RNA, 19 nt, Human
uauaaauagauauuuagau

SEQ ID NO: 1069915 - RNA, 23 nt, Human
ucagaugguucaugauuuuuuuc

SEQ ID NO: 1069916 - RNA, 23 nt, Human
uccaaggaaagagaaaauccaga

SEQ ID NO: 1069917 - RNA, 18 nt, Human
ugaaguaccagacacuuu

SEQ ID NO: 1069918 - RNA, 18 nt, Human
ugacaagaaaccauagcc

SEQ ID NO: 1069919 - RNA, 19 nt, Human
uguacaaauauauaugccu

SEQ ID NO: 1069920 - RNA, 20 nt, Human
uguacauacacacacauaug

SEQ ID NO: 1069921 - RNA, 22 nt, Human
aaaaagugaaacagacauagaa

SEQ ID NO: 1069922 - RNA, 21 nt, Human
aaaagugaaacagacauagaa

SEQ ID NO: 1069923 - RNA, 20 nt, Human
aaaugggaagaacaauauua

SEQ ID NO: 1069924 - RNA, 18 nt, Human
aagcagcccuugucccca

SEQ ID NO: 1069925 - RNA, 19 nt, Human
aagcagcccuuguccccaa

SEQ ID NO: 1069926 - RNA, 22 nt, Human
aagcuuuggaaauagcaaaacc

SEQ ID NO: 1069927 - RNA, 23 nt, Human
aauucuuggcuucuucuagagga

SEQ ID NO: 1069928 - RNA, 21 nt, Human
acagagagcaugggggcggag

SEQ ID NO: 1069929 - RNA, 23 nt, Human
acagagagcaugggggcggaggg

SEQ ID NO: 1069930 - RNA, 22 nt, Human
acuccuucugcauccuuccccc

SEQ ID NO: 1069931 - RNA, 21 nt, Human
acugccaauuucccuccaccc

SEQ ID NO: 1069932 - RNA, 26 nt, Human
acuuagugccuggugcacagugggug

SEQ ID NO: 1069933 - RNA, 23 nt, Human
agaaagaggcuagagacuuagug

SEQ ID NO: 1069934 - RNA, 21 nt, Human
agaauggauagggcugggugg

SEQ ID NO: 1069935 - RNA, 23 nt, Human
agacagaagucuugaaggcaugg

SEQ ID NO: 1069936 - RNA, 27 nt, Human
agacagagaaggaacagagauuccugg

SEQ ID NO: 1069937 - RNA, 20 nt, Human
agacaggaaagagcauagau

SEQ ID NO: 1069938 - RNA, 21 nt, Human
agagacuuagugccuggugca

SEQ ID NO: 1069939 - RNA, 26 nt, Human
agagagcuuuggucaaggaagacagg

SEQ ID NO: 1069940 - RNA, 21 nt, Human
agagcaaggacacucaggugc

SEQ ID NO: 1069941 - RNA, 24 nt, Human
agagcuuuggucaaggaagacagg

SEQ ID NO: 1069942 - RNA, 18 nt, Human
agaggcugggccaggaug

SEQ ID NO: 1069943 - RNA, 29 nt, Human
agagggaaggagagaauggauagggccga

SEQ ID NO: 1069944 - RNA, 19 nt, Human
agccagaagcaggggauca

SEQ ID NO: 1069945 - RNA, 19 nt, Human
aggaaagagcauagaugag

SEQ ID NO: 1069946 - RNA, 20 nt, Human
aggaaagagcauagaugaga

SEQ ID NO: 1069947 - RNA, 19 nt, Human
aggaaggaggugggagaaa

SEQ ID NO: 1069948 - RNA, 27 nt, Human
aggaaggaggugggagaaaagauaggg

SEQ ID NO: 1069949 - RNA, 18 nt, Human
aggaggaaggagguggga

SEQ ID NO: 1069950 - RNA, 26 nt, Human
aggauggggccagccccaaacccauc

SEQ ID NO: 1069951 - RNA, 21 nt, Human
aggcacccagcacagcagcug

SEQ ID NO: 1069952 - RNA, 22 nt, Human
aggcauggaggccacagagagc

SEQ ID NO: 1069953 - RNA, 19 nt, Human
aggguaagaagagguuaag

SEQ ID NO: 1069954 - RNA, 21 nt, Human
aggugugugcugggcaagagg

SEQ ID NO: 1069955 - RNA, 19 nt, Human
agugccuggugcacagugg

SEQ ID NO: 1069956 - RNA, 22 nt, Human
aguuuguuggggugagaugggg

SEQ ID NO: 1069957 - RNA, 22 nt, Human
auagcucacugccuugcugccu

SEQ ID NO: 1069958 - RNA, 20 nt, Human
auggaggccacagagagcau

SEQ ID NO: 1069959 - RNA, 21 nt, Human
caaaacgacauugaagcacca

SEQ ID NO: 1069960 - RNA, 23 nt, Human
caaaacgacauugaagcaccauu

SEQ ID NO: 1069961 - RNA, 22 nt, Human
caacaucacagcuuaaagauac

SEQ ID NO: 1069962 - RNA, 21 nt, Human
caaggcacccagcacagcagc

SEQ ID NO: 1069963 - RNA, 21 nt, Human
caauagaggcuagaaauggua

SEQ ID NO: 1069964 - RNA, 22 nt, Human
cacagcagcugguacacaagaa

SEQ ID NO: 1069965 - RNA, 21 nt, Human
cacagcuuaaagauacaaaac

SEQ ID NO: 1069966 - RNA, 24 nt, Human
cagagauguuccuuauacacuguc

SEQ ID NO: 1069967 - RNA, 18 nt, Human
cagccccaaacccaucuc

SEQ ID NO: 1069968 - RNA, 20 nt, Human
cagccccaaacccaucuccu

SEQ ID NO: 1069969 - RNA, 19 nt, Human
cauauggcccagggcagcc

SEQ ID NO: 1069970 - RNA, 21 nt, Human
caugcaaggcacccagcacag

SEQ ID NO: 1069971 - RNA, 22 nt, Human
caugcaaggcacccagcacagc

SEQ ID NO: 1069972 - RNA, 24 nt, Human
ccaaacccaucuccuucugccugg

SEQ ID NO: 1069973 - RNA, 21 nt, Human
ccagccccaaacccaucuccu

SEQ ID NO: 1069974 - RNA, 19 nt, Human
ccaugcugggcucauagcu

SEQ ID NO: 1069975 - RNA, 22 nt, Human
ccccaaacccaucuccuucugc

SEQ ID NO: 1069976 - RNA, 23 nt, Human
ccccaaacccaucuccuucugcc

SEQ ID NO: 1069977 - RNA, 21 nt, Human
ccugagacacauccaugcugg

SEQ ID NO: 1069978 - RNA, 18 nt, Human
ccugaggacuggggagag

SEQ ID NO: 1069979 - RNA, 21 nt, Human
ccuuauacacugucuuucuug

SEQ ID NO: 1069980 - RNA, 19 nt, Human
ccuucugcauccuuccccc

SEQ ID NO: 1069981 - RNA, 21 nt, Human
ccuuuuuugaccucugacucc

SEQ ID NO: 1069982 - RNA, 25 nt, Human
cuggugcccaugguugcaugccuga

SEQ ID NO: 1069983 - RNA, 19 nt, Human
gaaagaggcuagagacuua

SEQ ID NO: 1069984 - RNA, 24 nt, Human
gaaagaggcuagagacuuagugcc

SEQ ID NO: 1069985 - RNA, 18 nt, Human
gaacuggaagcagcccuu

SEQ ID NO: 1069986 - RNA, 19 nt, Human
gagaauggauagggcuggg

SEQ ID NO: 1069987 - RNA, 21 nt, Human
gagaauggauagggcugggug

SEQ ID NO: 1069988 - RNA, 18 nt, Human
gagaugggugauggaugg

SEQ ID NO: 1069989 - RNA, 20 nt, Human
gagcaugggggcggaggggg

SEQ ID NO: 1069990 - RNA, 20 nt, Human
gagcaugggggcggaggggg

SEQ ID NO: 1069991 - RNA, 20 nt, Human
gauaaggggaagcuuuggaa

SEQ ID NO: 1069992 - RNA, 23 nt, Human
gauaaugguauuaagaauuacag

SEQ ID NO: 1069993 - RNA, 22 nt, Human
gcagcaggcugcucuauccaca

SEQ ID NO: 1069994 - RNA, 18 nt, Human
gcauccuucccccaggaa

SEQ ID NO: 1069995 - RNA, 18 nt, Human
gcuauuggggguuuggga

SEQ ID NO: 1069996 - RNA, 20 nt, Human
gcugcugccugaggacuggg

SEQ ID NO: 1069997 - RNA, 20 nt, Human
gcuguggagaggcagacaga

SEQ ID NO: 1069998 - RNA, 20 nt, Human
gcuuaaagauacaaaacgac

SEQ ID NO: 1069999 - RNA, 24 nt, Human
ggaaauagcaaaacccuucauggc

SEQ ID NO: 1070000 - RNA, 24 nt, Human
ggaacugccaauuucccuccaccc

SEQ ID NO: 1070001 - RNA, 19 nt, Human
ggaagcuuuggaaauagca

SEQ ID NO: 1070002 - RNA, 22 nt, Human
ggacuggggagagugagauggg

SEQ ID NO: 1070003 - RNA, 27 nt, Human
ggcuuacagucuagcugggaggcauug

SEQ ID NO: 1070004 - RNA, 19 nt, Human
gggaagcuuuggaaauagc

SEQ ID NO: 1070005 - RNA, 21 nt, Human
gggcggagggggguucaaggu

SEQ ID NO: 1070006 - RNA, 18 nt, Human
ggggaugaggugccugag

SEQ ID NO: 1070007 - RNA, 20 nt, Human
gggggcggagggggguucaa

SEQ ID NO: 1070008 - RNA, 22 nt, Human
guggaaaagcugcugccugagg

SEQ ID NO: 1070009 - RNA, 21 nt, Human
gugggugcuuggugcagugug

SEQ ID NO: 1070010 - RNA, 19 nt, Human
uacacagcaucuuuacaug

SEQ ID NO: 1070011 - RNA, 20 nt, Human
uacaguuuacacagcaucuu

SEQ ID NO: 1070012 - RNA, 20 nt, Human
uaccugugagacuuuagacc

SEQ ID NO: 1070013 - RNA, 21 nt, Human
uaccuuugucacgggguuggg

SEQ ID NO: 1070014 - RNA, 22 nt, Human
uaggagaacgccauccaagaac

SEQ ID NO: 1070015 - RNA, 19 nt, Human
uaggaggaaggagguggga

SEQ ID NO: 1070016 - RNA, 25 nt, Human
uaggugugugcugggcaagagggcu

SEQ ID NO: 1070017 - RNA, 22 nt, Human
ucaagguaugacccacauguua

SEQ ID NO: 1070018 - RNA, 18 nt, Human
ucacugccuugcugccuu

SEQ ID NO: 1070019 - RNA, 24 nt, Human
uccaaaaagugaaacagacauaga

SEQ ID NO: 1070020 - RNA, 20 nt, Human
uccaagaacuggaagcagcc

SEQ ID NO: 1070021 - RNA, 20 nt, Human
uccacccuucuucugguagu

SEQ ID NO: 1070022 - RNA, 24 nt, Human
uccauagcacauauggcccagggc

SEQ ID NO: 1070023 - RNA, 23 nt, Human
uccaucacuuggaauccuuuuuu

SEQ ID NO: 1070024 - RNA, 21 nt, Human
uccccaaagggcuuacagucu

SEQ ID NO: 1070025 - RNA, 20 nt, Human
ucccuuagccuugguuucug

SEQ ID NO: 1070026 - RNA, 21 nt, Human
ucccuuagccuugguuucuga

SEQ ID NO: 1070027 - RNA, 25 nt, Human
ucccuuagccuugguuucugaaucu

SEQ ID NO: 1070028 - RNA, 29 nt, Human
uccugggguggaaaagcugcuccaccagg

SEQ ID NO: 1070029 - RNA, 21 nt, Human
ucuccauagcacauauggccc

SEQ ID NO: 1070030 - RNA, 18 nt, Human
ucuuucuuggaugggagc

SEQ ID NO: 1070031 - RNA, 22 nt, Human
ucuuuugagagcaguaguacug

SEQ ID NO: 1070032 - RNA, 23 nt, Human
ugaaccucuagagcaaggacacu

SEQ ID NO: 1070033 - RNA, 19 nt, Human
ugaccucugacuccaaucu

SEQ ID NO: 1070034 - RNA, 18 nt, Human
ugagcgccuugcccagcc

SEQ ID NO: 1070035 - RNA, 18 nt, Human
ugaggugccugagacaca

SEQ ID NO: 1070036 - RNA, 19 nt, Human
ugcagagcaguugaaggaa

SEQ ID NO: 1070037 - RNA, 18 nt, Human
ugccaggaggacagcucu

SEQ ID NO: 1070038 - RNA, 19 nt, Human
ugccaggaggacagcucug

SEQ ID NO: 1070039 - RNA, 23 nt, Human
ugccuggaucuugugggcuccca

SEQ ID NO: 1070040 - RNA, 18 nt, Human
ugcuuuggccaucagcga

SEQ ID NO: 1070041 - RNA, 19 nt, Human
uggauagggcuggguggua

SEQ ID NO: 1070042 - RNA, 22 nt, Human
uggcccagggcagccuuuuuug

SEQ ID NO: 1070043 - RNA, 23 nt, Human
uggcugggggccuuuguccuucc

SEQ ID NO: 1070044 - RNA, 22 nt, Human
ugggagaguccucuccauagca

SEQ ID NO: 1070045 - RNA, 19 nt, Human
ugggagcagaagggagaaa

SEQ ID NO: 1070046 - RNA, 19 nt, Human
uggggagagugagaugggu

SEQ ID NO: 1070047 - RNA, 19 nt, Human
uggggccagccccaaaccc

SEQ ID NO: 1070048 - RNA, 21 nt, Human
ugggggcggagggggguucaa

SEQ ID NO: 1070049 - RNA, 18 nt, Human
ugguagugaggccaagug

SEQ ID NO: 1070050 - RNA, 18 nt, Human
ugguccugagagcagcag

SEQ ID NO: 1070051 - RNA, 20 nt, Human
uguauauauacaacaucaca

SEQ ID NO: 1070052 - RNA, 21 nt, Human
ugucacgggguugggagauaa

SEQ ID NO: 1070053 - RNA, 26 nt, Human
uuacaugcgucaucucacuuaauccc

SEQ ID NO: 1070054 - RNA, 22 nt, Human
uuagugccuggugcacaguggg

SEQ ID NO: 1070055 - RNA, 23 nt, Human
uugaaccucuagagcaaggacac

SEQ ID NO: 1070056 - RNA, 19 nt, Human
uuggccaucagcgaaagga

SEQ ID NO: 1070057 - RNA, 19 nt, Human
uugguuucugacuccaccc

SEQ ID NO: 1070058 - RNA, 21 nt, Human
uuuaguuuuuggggagaugca

SEQ ID NO: 1070059 - RNA, 21 nt, Human
uuuuuugaccucugacuccaa

SEQ ID NO: 1070060 - RNA, 26 nt, Human
aaaaacaaacaaacaaaaaaacagaa

SEQ ID NO: 1070061 - RNA, 23 nt, Human
aaaacccuuucaauaucuuucuu

SEQ ID NO: 1070062 - RNA, 21 nt, Human
aaacaaacaaaaaaacagaaa

SEQ ID NO: 1070063 - RNA, 21 nt, Human
aaacaaacaaacaaaaaaaca

SEQ ID NO: 1070064 - RNA, 23 nt, Human
aaagcagcccucuccauaaccca

SEQ ID NO: 1070065 - RNA, 23 nt, Human
aacaaacaaaaaaacagaaaaua

SEQ ID NO: 1070066 - RNA, 19 nt, Human
aagcagcccucuccauaac

SEQ ID NO: 1070067 - RNA, 21 nt, Human
aagcagcccucuccauaaccc

SEQ ID NO: 1070068 - RNA, 20 nt, Human
aaggagaaugaacauaauuc

SEQ ID NO: 1070069 - RNA, 23 nt, Human
aaguccagaagccugaagaaacc

SEQ ID NO: 1070070 - RNA, 25 nt, Human
aauccccaaaagcagcccucuccau

SEQ ID NO: 1070071 - RNA, 18 nt, Human
aaugcaaaaacaaacaaa

SEQ ID NO: 1070072 - RNA, 23 nt, Human
aaugcaaaaacaaacaaacaaag

SEQ ID NO: 1070073 - RNA, 21 nt, Human
aauuaugugccuuggacauuu

SEQ ID NO: 1070074 - RNA, 25 nt, Human
agaagaaugcaaaaacaaacaaaca

SEQ ID NO: 1070075 - RNA, 24 nt, Human
caaaagcagcccucuccauaaccc

SEQ ID NO: 1070076 - RNA, 21 nt, Human
caaacaauggggaacagauac

SEQ ID NO: 1070077 - RNA, 24 nt, Human
cagaaaauagauuccuaagcccca

SEQ ID NO: 1070078 - RNA, 23 nt, Human
ccaaaagcagcccucuccauaac

SEQ ID NO: 1070079 - RNA, 18 nt, Human
ccaaaagcuccugccagg

SEQ ID NO: 1070080 - RNA, 20 nt, Human
ccaaaagcuccugccagguu

SEQ ID NO: 1070081 - RNA, 21 nt, Human
ccaaaggcaggccuagcaagu

SEQ ID NO: 1070082 - RNA, 20 nt, Human
ccauaacccauaaccaggac

SEQ ID NO: 1070083 - RNA, 18 nt, Human
ccccaaaagcagcccucu

SEQ ID NO: 1070084 - RNA, 19 nt, Human
ccccaaaagcagcccucuc

SEQ ID NO: 1070085 - RNA, 20 nt, Human
ccccaaaagcagcccucucc

SEQ ID NO: 1070086 - RNA, 22 nt, Human
ccugauuguuaaggaauuaagg

SEQ ID NO: 1070087 - RNA, 18 nt, Human
gaagccugaagaaaccag

SEQ ID NO: 1070088 - RNA, 23 nt, Human
uacugauucuuucaauuaugugc

SEQ ID NO: 1070089 - RNA, 22 nt, Human
ucaauaucuuucuuggucuucu

SEQ ID NO: 1070090 - RNA, 20 nt, Human
uccacagauucauucuccuc

SEQ ID NO: 1070091 - RNA, 22 nt, Human
uccacguucugaaaaacuguac

SEQ ID NO: 1070092 - RNA, 22 nt, Human
uccagaccugaauuacuaaggu

SEQ ID NO: 1070093 - RNA, 18 nt, Human
uccauaacccauaaccag

SEQ ID NO: 1070094 - RNA, 23 nt, Human
uccauaacccauaaccaggacca

SEQ ID NO: 1070095 - RNA, 24 nt, Human
uccuaagccccauuccagaccuga

SEQ ID NO: 1070096 - RNA, 25 nt, Human
ugccagguuuugcggcugccugauu

SEQ ID NO: 1070097 - RNA, 22 nt, Human
uuacuaagguuuugcccaaagg

SEQ ID NO: 1070098 - RNA, 24 nt, Human
uucaauuaugugccuuggacauuu

SEQ ID NO: 1070099 - RNA, 18 nt, Human
uucuuggucuucuugccc

SEQ ID NO: 1070100 - RNA, 20 nt, Human
uuuaccaaaagcuccugcca

SEQ ID NO: 1070101 - RNA, 20 nt, Human
aagcuaccaucaacaugcgg

SEQ ID NO: 1070102 - RNA, 21 nt, Human
caugcgguuuccagggucacc

SEQ ID NO: 1070103 - RNA, 23 nt, Human
cugcuaagcuaccaucaacaugc

SEQ ID NO: 1070104 - RNA, 21 nt, Human
ucaacaugcgguuuccagggu

SEQ ID NO: 1070105 - RNA, 20 nt, Human
aaccacaauuacuuuugcac

SEQ ID NO: 1070106 - RNA, 23 nt, Human
aagaacccacuccuggaaaauuc

SEQ ID NO: 1070107 - RNA, 23 nt, Human
aauaaacuuauacauacaaaaca

SEQ ID NO: 1070108 - RNA, 24 nt, Human
aauggucuaauuauuaaguccauu

SEQ ID NO: 1070109 - RNA, 24 nt, Human
acaaaacauucccaagcuuuguga

SEQ ID NO: 1070110 - RNA, 24 nt, Human
acagccacugcccaagaacccacu

SEQ ID NO: 1070111 - RNA, 18 nt, Human
accacaauuacuuuugca

SEQ ID NO: 1070112 - RNA, 18 nt, Human
agcgcgggaggggcgugg

SEQ ID NO: 1070113 - RNA, 19 nt, Human
auuaaguccauuuuuacag

SEQ ID NO: 1070114 - RNA, 23 nt, Human
caaaacauucccaagcuuuguga

SEQ ID NO: 1070115 - RNA, 21 nt, Human
caaaacuuccggaaagggcgg

SEQ ID NO: 1070116 - RNA, 20 nt, Human
cauacaaaacauucccaagc

SEQ ID NO: 1070117 - RNA, 21 nt, Human
cauuucuauuuugacuuagaa

SEQ ID NO: 1070118 - RNA, 21 nt, Human
cccacagccacugcccaagaa

SEQ ID NO: 1070119 - RNA, 26 nt, Human
cccacagccacugcccaagaacccac

SEQ ID NO: 1070120 - RNA, 20 nt, Human
gagcgcgggaggggcguggc

SEQ ID NO: 1070121 - RNA, 27 nt, Human
uagguugguacaaaaguaauugugguc

SEQ ID NO: 1070122 - RNA, 18 nt, Human
uaguucuaguaauaugaa

SEQ ID NO: 1070123 - RNA, 21 nt, Human
uccaucacauuacucggggcg

SEQ ID NO: 1070124 - RNA, 20 nt, Human
ucccacagccacugcccaag

SEQ ID NO: 1070125 - RNA, 26 nt, Human
ucccacagccacugcccaagaaccca

SEQ ID NO: 1070126 - RNA, 23 nt, Human
ugaagcauacccaguuuuaauaa

SEQ ID NO: 1070127 - RNA, 22 nt, Human
ugagcccggaaacccgagcugg

SEQ ID NO: 1070128 - RNA, 22 nt, Human
ugccuagacagacauauaugag

SEQ ID NO: 1070129 - RNA, 20 nt, Human
ugcugggagagcgcggaucc

SEQ ID NO: 1070130 - RNA, 21 nt, Human
uguuaaggaacuuuucaguca

SEQ ID NO: 1070131 - RNA, 24 nt, Human
uguuaaggaacuuuucagucaaga

SEQ ID NO: 1070132 - RNA, 21 nt, Human
aaccauuuuuccaugcugcuu

SEQ ID NO: 1070133 - RNA, 20 nt, Human
uuccaugcugcuuaagagcc

SEQ ID NO: 1070134 - RNA, 21 nt, Human
aaaaaggaaugagacaaagcc

SEQ ID NO: 1070135 - RNA, 19 nt, Human
aaaauacaaaaauuagccc

SEQ ID NO: 1070136 - RNA, 24 nt, Human
aaagagcgagacuccgucucaaaa

SEQ ID NO: 1070137 - RNA, 23 nt, Human
aagccacuaaaaucuacuuaggu

SEQ ID NO: 1070138 - RNA, 24 nt, Human
aauggcuugaagccaggaggugga

SEQ ID NO: 1070139 - RNA, 20 nt, Human
acaccauugcacuccagccu

SEQ ID NO: 1070140 - RNA, 22 nt, Human
accauugcacuccagccugggc

SEQ ID NO: 1070141 - RNA, 24 nt, Human
accauugcacuccagccugggcga

SEQ ID NO: 1070142 - RNA, 23 nt, Human
acccauucccagauugccuuccu

SEQ ID NO: 1070143 - RNA, 25 nt, Human
acuuugugcuuguuccaaaaaggaa

SEQ ID NO: 1070144 - RNA, 19 nt, Human
agaauggcuugaagccagg

SEQ ID NO: 1070145 - RNA, 23 nt, Human
agcaugguggcaggcgccuguaa

SEQ ID NO: 1070146 - RNA, 24 nt, Human
agccaggagguggagguugcagug

SEQ ID NO: 1070147 - RNA, 26 nt, Human
agccaggagguggagguuggggaccc

SEQ ID NO: 1070148 - RNA, 24 nt, Human
agccugggcgaaagagcgagacuc

SEQ ID NO: 1070149 - RNA, 23 nt, Human
aggaaucauuugacacaaucccu

SEQ ID NO: 1070150 - RNA, 18 nt, Human
aggcaggagaauggcuug

SEQ ID NO: 1070151 - RNA, 24 nt, Human
aggcuaaggcaggagaauggcuug

SEQ ID NO: 1070152 - RNA, 20 nt, Human
agguggagguugcagugagc

SEQ ID NO: 1070153 - RNA, 24 nt, Human
agguggagguugcagugagcggag

SEQ ID NO: 1070154 - RNA, 24 nt, Human
aucacaccauugcacuccagccug

SEQ ID NO: 1070155 - RNA, 22 nt, Human
auugcacuccagccugggcgaa

SEQ ID NO: 1070156 - RNA, 25 nt, Human
caaaaaggaaugagacaaagcccug

SEQ ID NO: 1070157 - RNA, 25 nt, Human
caccauugcacuccagccugggcga

SEQ ID NO: 1070158 - RNA, 23 nt, Human
cacuccagccugggcgaaagagc

SEQ ID NO: 1070159 - RNA, 24 nt, Human
cacuccagccugggcgaaagagcg

SEQ ID NO: 1070160 - RNA, 21 nt, Human
cacugcaucauagcaugugga

SEQ ID NO: 1070161 - RNA, 29 nt, Human
caggagguggagguugcagugacaacggu

SEQ ID NO: 1070162 - RNA, 24 nt, Human
caggagguggagguugcagugagc

SEQ ID NO: 1070163 - RNA, 23 nt, Human
caguggcuuacacuggcuggugc

SEQ ID NO: 1070164 - RNA, 21 nt, Human
cauccaacccauucccagauu

SEQ ID NO: 1070165 - RNA, 19 nt, Human
cauugcacuccagccuggg

SEQ ID NO: 1070166 - RNA, 20 nt, Human
cauugcacuccagccugggc

SEQ ID NO: 1070167 - RNA, 21 nt, Human
cauugcacuccagccugggcg

SEQ ID NO: 1070168 - RNA, 24 nt, Human
cauugcacuccagccugggcgaaa

SEQ ID NO: 1070169 - RNA, 25 nt, Human
ccaccuuuucucccuccccauccaa

SEQ ID NO: 1070170 - RNA, 23 nt, Human
ccacuaaaaucuacuuagguaaa

SEQ ID NO: 1070171 - RNA, 20 nt, Human
ccaggagguggagguugcag

SEQ ID NO: 1070172 - RNA, 20 nt, Human
ccauugcacuccagccuggg

SEQ ID NO: 1070173 - RNA, 21 nt, Human
ccauugcacuccagccugggc

SEQ ID NO: 1070174 - RNA, 22 nt, Human
ccauugcacuccagccugggcg

SEQ ID NO: 1070175 - RNA, 23 nt, Human
ccauugcacuccagccugggcga

SEQ ID NO: 1070176 - RNA, 24 nt, Human
ccauugcacuccagccugggcgaa

SEQ ID NO: 1070177 - RNA, 21 nt, Human
cccaccuuuucucccucccca

SEQ ID NO: 1070178 - RNA, 20 nt, Human
ccccauccaacccauuccca

SEQ ID NO: 1070179 - RNA, 18 nt, Human
cccuccccauccaaccca

SEQ ID NO: 1070180 - RNA, 18 nt, Human
cccuccccauccaaccca

SEQ ID NO: 1070181 - RNA, 22 nt, Human
ccugggcgaaagagcgagacuc

SEQ ID NO: 1070182 - RNA, 19 nt, Human
ccuguaaucccagcuacuc

SEQ ID NO: 1070183 - RNA, 21 nt, Human
ccuguaaucccagcuacucgg

SEQ ID NO: 1070184 - RNA, 20 nt, Human
ccuuuucucccuccccaucc

SEQ ID NO: 1070185 - RNA, 24 nt, Human
cgccuguaaucccagcuacucggg

SEQ ID NO: 1070186 - RNA, 23 nt, Human
cucuccuauuacaccauccacag

SEQ ID NO: 1070187 - RNA, 18 nt, Human
cucuuccucugcuucccu

SEQ ID NO: 1070188 - RNA, 21 nt, Human
gaaagagcgagacuccgucuc

SEQ ID NO: 1070189 - RNA, 19 nt, Human
gagcgagacuccgucucaa

SEQ ID NO: 1070190 - RNA, 24 nt, Human
gauugccuuccuuugcucuccuau

SEQ ID NO: 1070191 - RNA, 22 nt, Human
gcuugaagccaggagguggagg

SEQ ID NO: 1070192 - RNA, 22 nt, Human
ggaaugagacaaagcccugccg

SEQ ID NO: 1070193 - RNA, 24 nt, Human
ggagaucacaccauugcacuccag

SEQ ID NO: 1070194 - RNA, 23 nt, Human
ggagguugcagugagcggagauc

SEQ ID NO: 1070195 - RNA, 24 nt, Human
ggagguugcagugagcggagauca

SEQ ID NO: 1070196 - RNA, 22 nt, Human
gggcaugguuggagaucaagaa

SEQ ID NO: 1070197 - RNA, 24 nt, Human
gguggcaggcgccuguaaucccag

SEQ ID NO: 1070198 - RNA, 22 nt, Human
gugaccaaagauaguccacacu

SEQ ID NO: 1070199 - RNA, 20 nt, Human
uaaaaauacaaaaauuagcc

SEQ ID NO: 1070200 - RNA, 21 nt, Human
uaaaaauacaaaaauuagccc

SEQ ID NO: 1070201 - RNA, 18 nt, Human
uaaaagagaacagaaggu

SEQ ID NO: 1070202 - RNA, 22 nt, Human
uaagagagaacugacaggccug

SEQ ID NO: 1070203 - RNA, 19 nt, Human
uacuuucuucauugccaug

SEQ ID NO: 1070204 - RNA, 24 nt, Human
ucaagaauagaaaagccacuaaaa

SEQ ID NO: 1070205 - RNA, 23 nt, Human
ucacaccauugcacuccagccug

SEQ ID NO: 1070206 - RNA, 20 nt, Human
uccacaguggcuuacacugg

SEQ ID NO: 1070207 - RNA, 23 nt, Human
uccagccugggcgaaagagcgag

SEQ ID NO: 1070208 - RNA, 24 nt, Human
uccagccugggcgaaagagcgaga

SEQ ID NO: 1070209 - RNA, 23 nt, Human
ucccccaccuuuucucccucccc

SEQ ID NO: 1070210 - RNA, 25 nt, Human
ucccccaccuuuucucccuccccau

SEQ ID NO: 1070211 - RNA, 24 nt, Human
ucucuuucccccaccuuuucuccc

SEQ ID NO: 1070212 - RNA, 18 nt, Human
ugacacaaucccuacacu

SEQ ID NO: 1070213 - RNA, 22 nt, Human
ugacacuucagauacaaacaua

SEQ ID NO: 1070214 - RNA, 18 nt, Human
ugacaggccugcuguggg

SEQ ID NO: 1070215 - RNA, 18 nt, Human
ugaccguccagguccagc

SEQ ID NO: 1070216 - RNA, 23 nt, Human
ugacuucuagucuacuccaacau

SEQ ID NO: 1070217 - RNA, 19 nt, Human
ugagacaaagcccugccgu

SEQ ID NO: 1070218 - RNA, 20 nt, Human
ugagacaaagcccugccguc

SEQ ID NO: 1070219 - RNA, 20 nt, Human
ugagagcaaauaagggugga

SEQ ID NO: 1070220 - RNA, 21 nt, Human
ugagagcaaauaaggguggau

SEQ ID NO: 1070221 - RNA, 24 nt, Human
ugcacuccagccugggcgaaagag

SEQ ID NO: 1070222 - RNA, 22 nt, Human
ugccauguuaucucuuccucug

SEQ ID NO: 1070223 - RNA, 22 nt, Human
uggaacagaaaaugaccaaaga

SEQ ID NO: 1070224 - RNA, 24 nt, Human
uggcuugaagccaggagguggagg

SEQ ID NO: 1070225 - RNA, 24 nt, Human
ugguggcaggcgccuguaauccca

SEQ ID NO: 1070226 - RNA, 19 nt, Human
uucuagucuacuccaacau

SEQ ID NO: 1070227 - RNA, 24 nt, Human
uugaagccaggagguggagguugc

SEQ ID NO: 1070228 - RNA, 19 nt, Human
uugcagugagcggagauca

SEQ ID NO: 1070229 - RNA, 20 nt, Human
uugcagugagcggagaucac

SEQ ID NO: 1070230 - RNA, 21 nt, Human
uuucucucuuucccccaccuc

SEQ ID NO: 1070231 - RNA, 21 nt, Human
ucucuggaucaggaauccugg

SEQ ID NO: 1070232 - RNA, 24 nt, Human
ucucuggaucaggaauccuggcuc

SEQ ID NO: 1070233 - RNA, 21 nt, Human
uggcucgcagacaugauccuu

SEQ ID NO: 1070234 - RNA, 22 nt, Human
uguccagcuuccacuccucucg

SEQ ID NO: 1070235 - RNA, 21 nt, Human
aaaaaccuuccagaaccuuca

SEQ ID NO: 1070236 - RNA, 18 nt, Human
aaaacccaggcgacuucc

SEQ ID NO: 1070237 - RNA, 20 nt, Human
aaagaaaaauauuuucccca

SEQ ID NO: 1070238 - RNA, 19 nt, Human
aagcagaaagcaaguccga

SEQ ID NO: 1070239 - RNA, 22 nt, Human
aaguaaacaaaauccugcauuu

SEQ ID NO: 1070240 - RNA, 19 nt, Human
aaucugaaaaaccuuccag

SEQ ID NO: 1070241 - RNA, 25 nt, Human
aauuggcuaaaaacucagaacuugg

SEQ ID NO: 1070242 - RNA, 18 nt, Human
acacugggccagcugcug

SEQ ID NO: 1070243 - RNA, 21 nt, Human
agaaggaaaguagaggaucaa

SEQ ID NO: 1070244 - RNA, 19 nt, Human
agacugaaggggcugcuuu

SEQ ID NO: 1070245 - RNA, 21 nt, Human
agcccauagggugcagugucu

SEQ ID NO: 1070246 - RNA, 23 nt, Human
aggaaaguagaggaucaauuggc

SEQ ID NO: 1070247 - RNA, 20 nt, Human
agguacuucugcauccucag

SEQ ID NO: 1070248 - RNA, 21 nt, Human
aguuuguuuuuauuaaccucu

SEQ ID NO: 1070249 - RNA, 18 nt, Human
augcucgaguaucuucua

SEQ ID NO: 1070250 - RNA, 21 nt, Human
caaucugaaaaaccuuccaga

SEQ ID NO: 1070251 - RNA, 21 nt, Human
caccagcgagcagucugacca

SEQ ID NO: 1070252 - RNA, 22 nt, Human
cagccccucacagccccuccca

SEQ ID NO: 1070253 - RNA, 23 nt, Human
caguguuuugagaggcgauauga

SEQ ID NO: 1070254 - RNA, 21 nt, Human
caugacaugaugaaaguaaac

SEQ ID NO: 1070255 - RNA, 21 nt, Human
caugcucgaguaucuucuacc

SEQ ID NO: 1070256 - RNA, 20 nt, Human
ccucauagaccacuguaccu

SEQ ID NO: 1070257 - RNA, 18 nt, Human
ccugcagguaggcagggu

SEQ ID NO: 1070258 - RNA, 22 nt, Human
ccugccuucugcugcuuuggga

SEQ ID NO: 1070259 - RNA, 24 nt, Human
cgagcagucugaccaccacaugac

SEQ ID NO: 1070260 - RNA, 20 nt, Human
cgcagcucuaucugcuccgu

SEQ ID NO: 1070261 - RNA, 23 nt, Human
cugaaaaaccuuccagaaccuuc

SEQ ID NO: 1070262 - RNA, 19 nt, Human
cuguucuuuguggccuucg

SEQ ID NO: 1070263 - RNA, 24 nt, Human
cuucugcugcuuugggauugcugc

SEQ ID NO: 1070264 - RNA, 23 nt, Human
cuuugugcaucugagcuguucuu

SEQ ID NO: 1070265 - RNA, 19 nt, Human
gagaucuucagguguuuca

SEQ ID NO: 1070266 - RNA, 19 nt, Human
gcagaaagcaaguccgaca

SEQ ID NO: 1070267 - RNA, 22 nt, Human
gcaguagaaaacacugccugaa

SEQ ID NO: 1070268 - RNA, 22 nt, Human
gccagccccucacagccccucc

SEQ ID NO: 1070269 - RNA, 23 nt, Human
ggaagggcgaaugcgccugcaaa

SEQ ID NO: 1070270 - RNA, 20 nt, Human
gggaacgcagacugaagggg

SEQ ID NO: 1070271 - RNA, 21 nt, Human
gggcggggcuugaugaaaacc

SEQ ID NO: 1070272 - RNA, 22 nt, Human
gugaaucuuugugcaucugagc

SEQ ID NO: 1070273 - RNA, 20 nt, Human
gugcaacugagaggacucgg

SEQ ID NO: 1070274 - RNA, 25 nt, Human
uaacuaacuauugguuuucgauucc

SEQ ID NO: 1070275 - RNA, 21 nt, Human
uagcccauagggugcaguguc

SEQ ID NO: 1070276 - RNA, 21 nt, Human
uaggaagggcgaaugcgccug

SEQ ID NO: 1070277 - RNA, 21 nt, Human
ucaagaguuguauauuuuguc

SEQ ID NO: 1070278 - RNA, 20 nt, Human
ucagugugauugauuccagg

SEQ ID NO: 1070279 - RNA, 24 nt, Human
ucagugugauugauuccaggaugu

SEQ ID NO: 1070280 - RNA, 20 nt, Human
uccacgaauggcagguacgu

SEQ ID NO: 1070281 - RNA, 18 nt, Human
uccccuggcagcaugcuc

SEQ ID NO: 1070282 - RNA, 19 nt, Human
uccccuguguaguuggaga

SEQ ID NO: 1070283 - RNA, 19 nt, Human
ucugcugcuuugggauugc

SEQ ID NO: 1070284 - RNA, 21 nt, Human
ucuuuaaauccaaguaaauuc

SEQ ID NO: 1070285 - RNA, 22 nt, Human
ugaaagggucuggauaaaggua

SEQ ID NO: 1070286 - RNA, 20 nt, Human
ugagagagaaagggcggggc

SEQ ID NO: 1070287 - RNA, 23 nt, Human
ugagaggcgauaugagaucuuca

SEQ ID NO: 1070288 - RNA, 26 nt, Human
ugagaggcgauaugagaucuucaggu

SEQ ID NO: 1070289 - RNA, 22 nt, Human
ugagagggacuaaagaaggaaa

SEQ ID NO: 1070290 - RNA, 23 nt, Human
ugagagggacuaaagaaggaaag

SEQ ID NO: 1070291 - RNA, 20 nt, Human
ugagcugaggugccagcccc

SEQ ID NO: 1070292 - RNA, 19 nt, Human
ugauacguacacgugugca

SEQ ID NO: 1070293 - RNA, 25 nt, Human
ugccugaaguuggcgugcuugaaga

SEQ ID NO: 1070294 - RNA, 20 nt, Human
uggaauugucuuauuuugcu

SEQ ID NO: 1070295 - RNA, 21 nt, Human
uggcuaaaaacucagaacuug

SEQ ID NO: 1070296 - RNA, 19 nt, Human
uggcugcguaucuuaagca

SEQ ID NO: 1070297 - RNA, 22 nt, Human
uggcugcguaucuuaagcaauc

SEQ ID NO: 1070298 - RNA, 19 nt, Human
ugggaggggcuacacuugg

SEQ ID NO: 1070299 - RNA, 20 nt, Human
ugggaggggcuacacuugga

SEQ ID NO: 1070300 - RNA, 21 nt, Human
ugggaggggcuacacuuggga

SEQ ID NO: 1070301 - RNA, 18 nt, Human
ugggccagcugcuggcug

SEQ ID NO: 1070302 - RNA, 18 nt, Human
ugggccagcugcuggcug

SEQ ID NO: 1070303 - RNA, 22 nt, Human
uuacacuccguuaucuuuaauu

SEQ ID NO: 1070304 - RNA, 25 nt, Human
uucccaugugguagguacuucugca

SEQ ID NO: 1070305 - RNA, 20 nt, Human
uucugcugcuuugggauugc

SEQ ID NO: 1070306 - RNA, 18 nt, Human
uuguugauuucucacuau

SEQ ID NO: 1070307 - RNA, 18 nt, Human
uuuaaauccaaguaaauu

SEQ ID NO: 1070308 - RNA, 23 nt, Human
uuuuguauucugugcuuuuacug

SEQ ID NO: 1070309 - RNA, 24 nt, Human
uuuuuuuuuuaaacugcuucuggc

SEQ ID NO: 1070310 - RNA, 24 nt, Human
uuuuuuuuuuuaaacugcuucugg

SEQ ID NO: 1070311 - RNA, 22 nt, Human
aaaaaauccauuaagccaauaa

SEQ ID NO: 1070312 - RNA, 31 nt, Human
aaaccaaggccacgucauuucagcagaggaa

SEQ ID NO: 1070313 - RNA, 23 nt, Human
aaagacucagugaagaugguuag

SEQ ID NO: 1070314 - RNA, 22 nt, Human
aaagaugccucauaaacuuaga

SEQ ID NO: 1070315 - RNA, 20 nt, Human
aaaggaaccaucugccuaca

SEQ ID NO: 1070316 - RNA, 20 nt, Human
acacacacacacacacaaaa

SEQ ID NO: 1070317 - RNA, 23 nt, Human
acacacacacacacacacacaca

SEQ ID NO: 1070318 - RNA, 23 nt, Human
acacacacacacacacacacaca

SEQ ID NO: 1070319 - RNA, 23 nt, Human
acacacacacacacacacacaca

SEQ ID NO: 1070320 - RNA, 23 nt, Human
acacacacacacacacacacaca

SEQ ID NO: 1070321 - RNA, 24 nt, Human
acaggacaacaggacuggcaggag

SEQ ID NO: 1070322 - RNA, 18 nt, Human
acccucccccacccuccc

SEQ ID NO: 1070323 - RNA, 24 nt, Human
acccucccugcucagcuguccagc

SEQ ID NO: 1070324 - RNA, 18 nt, Human
acucauccuccggcccca

SEQ ID NO: 1070325 - RNA, 18 nt, Human
acugccaacaucuguugc

SEQ ID NO: 1070326 - RNA, 18 nt, Human
agaacucugcggcuccuc

SEQ ID NO: 1070327 - RNA, 19 nt, Human
agagacaggcccgaggcca

SEQ ID NO: 1070328 - RNA, 23 nt, Human
agagagagacaggcccgaggcca

SEQ ID NO: 1070329 - RNA, 22 nt, Human
agccugaccucucuucagccca

SEQ ID NO: 1070330 - RNA, 20 nt, Human
agccuggaacacccuccccc

SEQ ID NO: 1070331 - RNA, 23 nt, Human
agcgauaaggagguucagagaga

SEQ ID NO: 1070332 - RNA, 21 nt, Human
agcuccuacucauccuccggc

SEQ ID NO: 1070333 - RNA, 19 nt, Human
agcugggcuguucuggccu

SEQ ID NO: 1070334 - RNA, 19 nt, Human
aggacccugcagcuggccc

SEQ ID NO: 1070335 - RNA, 24 nt, Human
aggaggaccuaaacccccaagcca

SEQ ID NO: 1070336 - RNA, 18 nt, Human
aggcagcuuucucuuccc

SEQ ID NO: 1070337 - RNA, 18 nt, Human
aggcagcuuucucuuccc

SEQ ID NO: 1070338 - RNA, 21 nt, Human
augaugacaggacaacaggac

SEQ ID NO: 1070339 - RNA, 22 nt, Human
auuuguuggggccuaauggaaa

SEQ ID NO: 1070340 - RNA, 20 nt, Human
caaaggcagaaaaaauccau

SEQ ID NO: 1070341 - RNA, 21 nt, Human
caaaggcagaaaaaauccauu

SEQ ID NO: 1070342 - RNA, 24 nt, Human
caaauucacucuuccacaaagccu

SEQ ID NO: 1070343 - RNA, 21 nt, Human
caacccgcagcugaccgcugg

SEQ ID NO: 1070344 - RNA, 23 nt, Human
caagagagagacaggcccgaggc

SEQ ID NO: 1070345 - RNA, 22 nt, Human
caagccacccuuggcaccaccc

SEQ ID NO: 1070346 - RNA, 18 nt, Human
caaggggcagccaccaca

SEQ ID NO: 1070347 - RNA, 19 nt, Human
caauauguaaaugaaucag

SEQ ID NO: 1070348 - RNA, 20 nt, Human
cacacacacacaaaaagaga

SEQ ID NO: 1070349 - RNA, 22 nt, Human
cacacacacacacacaaaaaga

SEQ ID NO: 1070350 - RNA, 18 nt, Human
cacacacacacacacaca

SEQ ID NO: 1070351 - RNA, 20 nt, Human
cacacacacacacacacaca

SEQ ID NO: 1070352 - RNA, 20 nt, Human
cacacacacacacacacaca

SEQ ID NO: 1070353 - RNA, 20 nt, Human
cacacacacacacacacaca

SEQ ID NO: 1070354 - RNA, 20 nt, Human
cacacacacacacacacaca

SEQ ID NO: 1070355 - RNA, 20 nt, Human
cacacacacacacacacaca

SEQ ID NO: 1070356 - RNA, 20 nt, Human
cacacacacacacacacaca

SEQ ID NO: 1070357 - RNA, 20 nt, Human
cacacacacacacacacaca

SEQ ID NO: 1070358 - RNA, 22 nt, Human
cacacacacacacacacacaaa

SEQ ID NO: 1070359 - RNA, 22 nt, Human
cacacacacacacacacacaca

SEQ ID NO: 1070360 - RNA, 22 nt, Human
cacacacacacacacacacaca

SEQ ID NO: 1070361 - RNA, 23 nt, Human
cacacacacacacacacacacaa

SEQ ID NO: 1070362 - RNA, 26 nt, Human
cacacacacacacacacacacacaca

SEQ ID NO: 1070363 - RNA, 26 nt, Human
cacacacacacacacacacacacaca

SEQ ID NO: 1070364 - RNA, 26 nt, Human
cacacacacacacacacacacacaca

SEQ ID NO: 1070365 - RNA, 18 nt, Human
cacccaugucugcucuua

SEQ ID NO: 1070366 - RNA, 22 nt, Human
cacccuuggcaccaccccuaca

SEQ ID NO: 1070367 - RNA, 18 nt, Human
cacguuuguguucccagg

SEQ ID NO: 1070368 - RNA, 22 nt, Human
cagaaaaaauccauuaagccaa

SEQ ID NO: 1070369 - RNA, 27 nt, Human
cagaggaccugcguguggaaggacccu

SEQ ID NO: 1070370 - RNA, 23 nt, Human
cagaggacuacuaaaagggacac

SEQ ID NO: 1070371 - RNA, 26 nt, Human
cagcacagucaucucugaccccuugg

SEQ ID NO: 1070372 - RNA, 27 nt, Human
cagccacaccccaugcugguccucagc

SEQ ID NO: 1070373 - RNA, 20 nt, Human
cagcccacaggaucucuccu

SEQ ID NO: 1070374 - RNA, 24 nt, Human
cagcccugacaucagcaucacacu

SEQ ID NO: 1070375 - RNA, 23 nt, Human
caggagcgguuccugacccauga

SEQ ID NO: 1070376 - RNA, 18 nt, Human
caggugucuggggucugu

SEQ ID NO: 1070377 - RNA, 21 nt, Human
caucuguugcugccaacaugg

SEQ ID NO: 1070378 - RNA, 19 nt, Human
caugaagaugcugguucuc

SEQ ID NO: 1070379 - RNA, 19 nt, Human
cauucaucucugggcuacc

SEQ ID NO: 1070380 - RNA, 19 nt, Human
ccaugugugauuucuuucc

SEQ ID NO: 1070381 - RNA, 25 nt, Human
cccaaaggaaccaucugccuacacc

SEQ ID NO: 1070382 - RNA, 18 nt, Human
cccacaggauagaagcgc

SEQ ID NO: 1070383 - RNA, 20 nt, Human
cccacaggauagaagcgcag

SEQ ID NO: 1070384 - RNA, 23 nt, Human
cccacccucccugcucagcuguc

SEQ ID NO: 1070385 - RNA, 25 nt, Human
cccagguauguuggcacagcuggcc

SEQ ID NO: 1070386 - RNA, 19 nt, Human
cccaguaaugauuauaaaa

SEQ ID NO: 1070387 - RNA, 27 nt, Human
cccaugauuugaaaucuacaaucuguc

SEQ ID NO: 1070388 - RNA, 21 nt, Human
cccaugcugguccucagccug

SEQ ID NO: 1070389 - RNA, 24 nt, Human
cccccaagccacccuuggcaccac

SEQ ID NO: 1070390 - RNA, 21 nt, Human
ccggccccagggcaaauucac

SEQ ID NO: 1070391 - RNA, 23 nt, Human
ccucaugggcccuuuguauugcc

SEQ ID NO: 1070392 - RNA, 20 nt, Human
ccugaccucucuucagccca

SEQ ID NO: 1070393 - RNA, 19 nt, Human
ccugcguguggaaggaccc

SEQ ID NO: 1070394 - RNA, 22 nt, Human
ccuggaacugauugguuucugg

SEQ ID NO: 1070395 - RNA, 25 nt, Human
cggcuccucuuucugaguacccccc

SEQ ID NO: 1070396 - RNA, 23 nt, Human
cuacaaucugucaaaauuaccau

SEQ ID NO: 1070397 - RNA, 19 nt, Human
cuccacuggcuuuaaagag

SEQ ID NO: 1070398 - RNA, 22 nt, Human
cuccugggagugcugcccuggc

SEQ ID NO: 1070399 - RNA, 20 nt, Human
cugccaacaucuguugcugc

SEQ ID NO: 1070400 - RNA, 19 nt, Human
cuggcuuuaaagagggucu

SEQ ID NO: 1070401 - RNA, 20 nt, Human
cugucaggaucaacaggccu

SEQ ID NO: 1070402 - RNA, 21 nt, Human
cuucccugcuagccuguugug

SEQ ID NO: 1070403 - RNA, 23 nt, Human
cuucuaguucugccagccacacc

SEQ ID NO: 1070404 - RNA, 22 nt, Human
gaaaaaauccauuaagccaaua

SEQ ID NO: 1070405 - RNA, 20 nt, Human
gacaacaggacuggcaggag

SEQ ID NO: 1070406 - RNA, 24 nt, Human
gacacagcacagucaucucugacu

SEQ ID NO: 1070407 - RNA, 23 nt, Human
gcacuggucagucuuccagcccc

SEQ ID NO: 1070408 - RNA, 21 nt, Human
ggacaacaggacuggcaggag

SEQ ID NO: 1070409 - RNA, 20 nt, Human
ggcacaaugagaacaaggag

SEQ ID NO: 1070410 - RNA, 18 nt, Human
ggcuaggcuggaaaacuc

SEQ ID NO: 1070411 - RNA, 22 nt, Human
gugaagcaccagaguuuaucca

SEQ ID NO: 1070412 - RNA, 25 nt, Human
guguauuuguuggggccuaauggaa

SEQ ID NO: 1070413 - RNA, 18 nt, Human
uaaagagggucuagaggc

SEQ ID NO: 1070414 - RNA, 23 nt, Human
uaaagagggucuagaggcacaau

SEQ ID NO: 1070415 - RNA, 25 nt, Human
uacacacacacacacacacacacac

SEQ ID NO: 1070416 - RNA, 22 nt, Human
uagauaauuaucaaccugugcc

SEQ ID NO: 1070417 - RNA, 25 nt, Human
uauacacacacacacacacacacac

SEQ ID NO: 1070418 - RNA, 22 nt, Human
uauccaaaggggggacgugggg

SEQ ID NO: 1070419 - RNA, 18 nt, Human
uauguguguauacacaca

SEQ ID NO: 1070420 - RNA, 23 nt, Human
uauucaugcaaagaugccucaua

SEQ ID NO: 1070421 - RNA, 21 nt, Human
ucaagagagagacaggcccga

SEQ ID NO: 1070422 - RNA, 21 nt, Human
ucaaugccugggcugagcaua

SEQ ID NO: 1070423 - RNA, 24 nt, Human
ucagcccacaggaucucuccugcc

SEQ ID NO: 1070424 - RNA, 20 nt, Human
uccaaaggggggacgugggg

SEQ ID NO: 1070425 - RNA, 20 nt, Human
uccacaaagccugaccucuc

SEQ ID NO: 1070426 - RNA, 19 nt, Human
ucccaaaggaaccaucugc

SEQ ID NO: 1070427 - RNA, 23 nt, Human
ucccaacuaggcccacucaucac

SEQ ID NO: 1070428 - RNA, 18 nt, Human
ucccaaggggacccuggc

SEQ ID NO: 1070429 - RNA, 19 nt, Human
ucccaugcugcacuucuag

SEQ ID NO: 1070430 - RNA, 22 nt, Human
uccuacucauccuccggcccca

SEQ ID NO: 1070431 - RNA, 23 nt, Human
ucuccugcaaaaccaaggccacg

SEQ ID NO: 1070432 - RNA, 20 nt, Human
ucucugggcuaccacaggug

SEQ ID NO: 1070433 - RNA, 25 nt, Human
ugaagcaccagaguuuauccaaagg

SEQ ID NO: 1070434 - RNA, 19 nt, Human
ugacaggacaacaggacug

SEQ ID NO: 1070435 - RNA, 19 nt, Human
ugaguaagggcgagaucaa

SEQ ID NO: 1070436 - RNA, 21 nt, Human
ugaguaagggcgagaucaaga

SEQ ID NO: 1070437 - RNA, 21 nt, Human
ugaugacaggacaacaggacu

SEQ ID NO: 1070438 - RNA, 19 nt, Human
ugccagccacaccccaugc

SEQ ID NO: 1070439 - RNA, 20 nt, Human
ugccauuuaacuuuuccucu

SEQ ID NO: 1070440 - RNA, 21 nt, Human
ugccauuuaacuuuuccucug

SEQ ID NO: 1070441 - RNA, 21 nt, Human
ugccucauaaacuuagauguc

SEQ ID NO: 1070442 - RNA, 23 nt, Human
uggaaaacucuuccuggaacuga

SEQ ID NO: 1070443 - RNA, 24 nt, Human
uggcaccaccccuacaaggggcag

SEQ ID NO: 1070444 - RNA, 20 nt, Human
uggcaggagcgguuccugac

SEQ ID NO: 1070445 - RNA, 24 nt, Human
uggcaggagcgguuccuggguccc

SEQ ID NO: 1070446 - RNA, 23 nt, Human
uggcaggguucaggcuaggcugg

SEQ ID NO: 1070447 - RNA, 18 nt, Human
uggguuuuuuuuuuuuuu

SEQ ID NO: 1070448 - RNA, 25 nt, Human
uguauacacacacacacacacacac

SEQ ID NO: 1070449 - RNA, 25 nt, Human
uguauacacacacacacacacacag

SEQ ID NO: 1070450 - RNA, 20 nt, Human
ugucaaaauuaccauaauua

SEQ ID NO: 1070451 - RNA, 23 nt, Human
ugucaggaucaacaggccuugag

SEQ ID NO: 1070452 - RNA, 21 nt, Human
uguggaaggacccugcagcug

SEQ ID NO: 1070453 - RNA, 26 nt, Human
uguggaaggacccugcagcuggccca

SEQ ID NO: 1070454 - RNA, 22 nt, Human
uuaguaugguguauaccacguu

SEQ ID NO: 1070455 - RNA, 20 nt, Human
uuccuggaacugauugguuu

SEQ ID NO: 1070456 - RNA, 22 nt, Human
uucuccugcaaaaccaaggcca

SEQ ID NO: 1070457 - RNA, 25 nt, Human
uucugaauccacagugucacagaga

SEQ ID NO: 1070458 - RNA, 23 nt, Human
uucugccagccacaccccaugcu

SEQ ID NO: 1070459 - RNA, 23 nt, Human
uugcugccaacaugguaucaguu

SEQ ID NO: 1070460 - RNA, 22 nt, Human
uugguugugcauauuuguccug

SEQ ID NO: 1070461 - RNA, 19 nt, Human
uuugagaaggggacccugc

SEQ ID NO: 1070462 - RNA, 21 nt, Human
uuuuacacugcccaguaauga

SEQ ID NO: 1070463 - RNA, 24 nt, Human
accaccaucaccaccaccaugcgc

SEQ ID NO: 1070464 - RNA, 23 nt, Human
accaugcgcuccacgaggcgccc

SEQ ID NO: 1070465 - RNA, 26 nt, Human
aggaccaucgagcagucuuugcuggc

SEQ ID NO: 1070466 - RNA, 24 nt, Human
aucgagcagucuuugcuggccacg

SEQ ID NO: 1070467 - RNA, 22 nt, Human
caccaucaccaccaccaugcgc

SEQ ID NO: 1070468 - RNA, 23 nt, Human
caccaucaccaccaccaugcgcu

SEQ ID NO: 1070469 - RNA, 20 nt, Human
caccaugcgcuccacgaggc

SEQ ID NO: 1070470 - RNA, 22 nt, Human
caccguggagacccuggagcac

SEQ ID NO: 1070471 - RNA, 18 nt, Human
ccacaagcagggggcacu

SEQ ID NO: 1070472 - RNA, 21 nt, Human
ccacaagcagggggcacugua

SEQ ID NO: 1070473 - RNA, 21 nt, Human
ccacggcaauggcaccccccu

SEQ ID NO: 1070474 - RNA, 27 nt, Human
ccgccgccaaccaccaccaucaccacc

SEQ ID NO: 1070475 - RNA, 27 nt, Human
ccggcagccgccgccaaccaccaccau

SEQ ID NO: 1070476 - RNA, 22 nt, Human
ccguggagacccuggagcacac

SEQ ID NO: 1070477 - RNA, 22 nt, Human
ccugcagccccucaaugccaag

SEQ ID NO: 1070478 - RNA, 18 nt, Human
cggagaucuggggucucc

SEQ ID NO: 1070479 - RNA, 22 nt, Human
cggcaauggcaccccccugcac

SEQ ID NO: 1070480 - RNA, 19 nt, Human
cggucaacaacgacucgga

SEQ ID NO: 1070481 - RNA, 20 nt, Human
cugcagcccuaccagcaccu

SEQ ID NO: 1070482 - RNA, 23 nt, Human
gaagccaaguuuaagcaggaccu

SEQ ID NO: 1070483 - RNA, 23 nt, Human
gcaauggcaccccccugcaccac

SEQ ID NO: 1070484 - RNA, 19 nt, Human
gcagcaucgccgaauugag

SEQ ID NO: 1070485 - RNA, 21 nt, Human
uacugggagcccgaggcccug

SEQ ID NO: 1070486 - RNA, 24 nt, Human
ucacagagacccacagcggucaaa

SEQ ID NO: 1070487 - RNA, 18 nt, Human
ucagccagucggagcuga

SEQ ID NO: 1070488 - RNA, 22 nt, Human
ugaacuguggacgaacagaccu

SEQ ID NO: 1070489 - RNA, 18 nt, Human
ugaccuggugucccgugc

SEQ ID NO: 1070490 - RNA, 19 nt, Human
uggacgaacagaccuggug

SEQ ID NO: 1070491 - RNA, 19 nt, Human
uguggacgaacagaccugg

SEQ ID NO: 1070492 - RNA, 22 nt, Human
aagggcagguggucucuugucu

SEQ ID NO: 1070493 - RNA, 24 nt, Human
acaacacagggcaggcaagaagac

SEQ ID NO: 1070494 - RNA, 22 nt, Human
aggaaaauuuguauuauuuuca

SEQ ID NO: 1070495 - RNA, 19 nt, Human
cacagggcaggcaagaaga

SEQ ID NO: 1070496 - RNA, 26 nt, Human
ccaagguggugaugguguuaacuccu

SEQ ID NO: 1070497 - RNA, 24 nt, Human
cuuucuuguucuccaccaaggugg

SEQ ID NO: 1070498 - RNA, 27 nt, Human
ggcaagaagacaaccagcucgauggaa

SEQ ID NO: 1070499 - RNA, 18 nt, Human
ggcaguucagggccuggg

SEQ ID NO: 1070500 - RNA, 24 nt, Human
gggcaggcaagaagacaaccagcu

SEQ ID NO: 1070501 - RNA, 21 nt, Human
uacaacacagggcaggcaaga

SEQ ID NO: 1070502 - RNA, 23 nt, Human
uacaacacagggcaggcaagaag

SEQ ID NO: 1070503 - RNA, 18 nt, Human
uguacagaaaacucaaca

SEQ ID NO: 1070504 - RNA, 23 nt, Human
uguucuccaccaagguggugaug

SEQ ID NO: 1070505 - RNA, 21 nt, Human
uuugugggccagcuuaagcag

SEQ ID NO: 1070506 - RNA, 25 nt, Human
aaaaugcucucugucccugugacug

SEQ ID NO: 1070507 - RNA, 20 nt, Human
aaacaaaagaggaugggugg

SEQ ID NO: 1070508 - RNA, 19 nt, Human
aaagugcugggauuacaga

SEQ ID NO: 1070509 - RNA, 24 nt, Human
aaagugcugggauuacagauguga

SEQ ID NO: 1070510 - RNA, 23 nt, Human
aacuggcccaggacacucuccca

SEQ ID NO: 1070511 - RNA, 18 nt, Human
aagacaagggccaugaac

SEQ ID NO: 1070512 - RNA, 18 nt, Human
aagugcugggauuacaga

SEQ ID NO: 1070513 - RNA, 19 nt, Human
aagugcugggauuacagau

SEQ ID NO: 1070514 - RNA, 24 nt, Human
aaugauucuccugccucagccucc

SEQ ID NO: 1070515 - RNA, 24 nt, Human
aauuuuguauuuuuaguagagaug

SEQ ID NO: 1070516 - RNA, 19 nt, Human
acauaccacuggauauccc

SEQ ID NO: 1070517 - RNA, 24 nt, Human
accaugguggccaggcuggucucg

SEQ ID NO: 1070518 - RNA, 24 nt, Human
acccaggcuggagugcaguggcau

SEQ ID NO: 1070519 - RNA, 18 nt, Human
acucugucacccaggcug

SEQ ID NO: 1070520 - RNA, 25 nt, Human
acucugucacccaggcuggagugca

SEQ ID NO: 1070521 - RNA, 22 nt, Human
acugcaaccuccaccucccggg

SEQ ID NO: 1070522 - RNA, 21 nt, Human
acuguaauuauacugccccca

SEQ ID NO: 1070523 - RNA, 22 nt, Human
agaaacuaagagauaggaagac

SEQ ID NO: 1070524 - RNA, 24 nt, Human
agaaacuaagagauaggaagacaa

SEQ ID NO: 1070525 - RNA, 18 nt, Human
agaaccucugagacucac

SEQ ID NO: 1070526 - RNA, 24 nt, Human
agagaugggguuucaccauggugg

SEQ ID NO: 1070527 - RNA, 19 nt, Human
agaugugagacaccgugcc

SEQ ID NO: 1070528 - RNA, 23 nt, Human
agaugugagacaccgugccuggu

SEQ ID NO: 1070529 - RNA, 23 nt, Human
agcaggaaugaaaaugcucucug

SEQ ID NO: 1070530 - RNA, 25 nt, Human
aggcuggagugcaguggcaugaucu

SEQ ID NO: 1070531 - RNA, 22 nt, Human
aguagagaugggguuucaccau

SEQ ID NO: 1070532 - RNA, 19 nt, Human
aguagcugggauuacaggc

SEQ ID NO: 1070533 - RNA, 23 nt, Human
aguagcugggauuacaggcgucc

SEQ ID NO: 1070534 - RNA, 19 nt, Human
agugcaguggcaugaucuc

SEQ ID NO: 1070535 - RNA, 21 nt, Human
agugcaguggcaugaucucag

SEQ ID NO: 1070536 - RNA, 23 nt, Human
agugcaguggcaugaucucagcu

SEQ ID NO: 1070537 - RNA, 24 nt, Human
aguggcaugaucucagcucacugc

SEQ ID NO: 1070538 - RNA, 24 nt, Human
augauucuccugccucagccuccc

SEQ ID NO: 1070539 - RNA, 19 nt, Human
augggguuucaccauggug

SEQ ID NO: 1070540 - RNA, 20 nt, Human
augggguuucaccauggugg

SEQ ID NO: 1070541 - RNA, 24 nt, Human
augggguuucaccaugguggccag

SEQ ID NO: 1070542 - RNA, 24 nt, Human
caaagugcugggauuacagaugug

SEQ ID NO: 1070543 - RNA, 22 nt, Human
caaaugauucuccugccucagc

SEQ ID NO: 1070544 - RNA, 19 nt, Human
caaccaucugcccaucagc

SEQ ID NO: 1070545 - RNA, 23 nt, Human
caaccuccaccucccggguucaa

SEQ ID NO: 1070546 - RNA, 24 nt, Human
caacugcaaccuccaccucccggg

SEQ ID NO: 1070547 - RNA, 19 nt, Human
caagugauccacccaccuc

SEQ ID NO: 1070548 - RNA, 23 nt, Human
caagugauccacccaccucgccc

SEQ ID NO: 1070549 - RNA, 22 nt, Human
caccagagggaaaagggucuca

SEQ ID NO: 1070550 - RNA, 21 nt, Human
caccaugguggccaggcuggu

SEQ ID NO: 1070551 - RNA, 22 nt, Human
caccaugguggccaggcugguc

SEQ ID NO: 1070552 - RNA, 24 nt, Human
caccaugguggccaggcuggucuc

SEQ ID NO: 1070553 - RNA, 22 nt, Human
cacccaccucgcccucccaaag

SEQ ID NO: 1070554 - RNA, 23 nt, Human
cacccaccucgcccucccaaagu

SEQ ID NO: 1070555 - RNA, 26 nt, Human
cacccaccucgcccucccaaagugcu

SEQ ID NO: 1070556 - RNA, 19 nt, Human
cacccagccuuuuccuauc

SEQ ID NO: 1070557 - RNA, 21 nt, Human
caccuaaagucauaucagacu

SEQ ID NO: 1070558 - RNA, 23 nt, Human
cacucugucacccaggcuggagu

SEQ ID NO: 1070559 - RNA, 24 nt, Human
cacucugucacccaggcuggagug

SEQ ID NO: 1070560 - RNA, 24 nt, Human
cacugcuggaguaggugcuacugg

SEQ ID NO: 1070561 - RNA, 21 nt, Human
cagccuucucuccccaguuuc

SEQ ID NO: 1070562 - RNA, 24 nt, Human
cagccuucucuccccaguuucuua

SEQ ID NO: 1070563 - RNA, 24 nt, Human
caguuguuucucuguccuuuagac

SEQ ID NO: 1070564 - RNA, 21 nt, Human
cauccucaaccaucugcccau

SEQ ID NO: 1070565 - RNA, 20 nt, Human
caucugcccaucagcagagc

SEQ ID NO: 1070566 - RNA, 21 nt, Human
ccaaagugcugggauuacaga

SEQ ID NO: 1070567 - RNA, 22 nt, Human
ccaaagugcugggauuacagau

SEQ ID NO: 1070568 - RNA, 24 nt, Human
ccaaagugcugggauuacagaugu

SEQ ID NO: 1070569 - RNA, 24 nt, Human
ccaccucccggguucaaaugauuc

SEQ ID NO: 1070570 - RNA, 20 nt, Human
cccaacucaugccccagauc

SEQ ID NO: 1070571 - RNA, 19 nt, Human
ccccuaaauuucgcuaggc

SEQ ID NO: 1070572 - RNA, 23 nt, Human
cccgaguagcugggauuacaggc

SEQ ID NO: 1070573 - RNA, 24 nt, Human
cccgaguagcugggauuacaggcg

SEQ ID NO: 1070574 - RNA, 21 nt, Human
cccggguucaaaugauucucc

SEQ ID NO: 1070575 - RNA, 23 nt, Human
cccggguucaaaugauucuccug

SEQ ID NO: 1070576 - RNA, 22 nt, Human
ccgaguagcugggauuacaggc

SEQ ID NO: 1070577 - RNA, 24 nt, Human
ccgaguagcugggauuacaggcgu

SEQ ID NO: 1070578 - RNA, 23 nt, Human
ccucaaccaucugcccaucagca

SEQ ID NO: 1070579 - RNA, 24 nt, Human
ccucccggguucaaaugauucucc

SEQ ID NO: 1070580 - RNA, 24 nt, Human
ccugaccucaagugauccacccac

SEQ ID NO: 1070581 - RNA, 23 nt, Human
ccugccucagccucccgaguagc

SEQ ID NO: 1070582 - RNA, 22 nt, Human
ccuguggugcaguguguuggaa

SEQ ID NO: 1070583 - RNA, 19 nt, Human
ccuuuccuuuuaacucuuu

SEQ ID NO: 1070584 - RNA, 18 nt, Human
cggaagugggagccuuau

SEQ ID NO: 1070585 - RNA, 24 nt, Human
cuaauuuuguauuuuuaguagaga

SEQ ID NO: 1070586 - RNA, 19 nt, Human
cuauucagucccacaccca

SEQ ID NO: 1070587 - RNA, 24 nt, Human
cucacucugucacccaggcuggag

SEQ ID NO: 1070588 - RNA, 24 nt, Human
cucagccucccgaguagcugggau

SEQ ID NO: 1070589 - RNA, 21 nt, Human
cucccuuuccuuuuaacucuu

SEQ ID NO: 1070590 - RNA, 19 nt, Human
cucugagacucaccgucua

SEQ ID NO: 1070591 - RNA, 18 nt, Human
cugcaaccuccaccuccc

SEQ ID NO: 1070592 - RNA, 21 nt, Human
cugcaaccuccaccucccggg

SEQ ID NO: 1070593 - RNA, 23 nt, Human
cugcaaccuccaccucccggguu

SEQ ID NO: 1070594 - RNA, 24 nt, Human
cugcaaccuccgccugccggguuc

SEQ ID NO: 1070595 - RNA, 23 nt, Human
cugccucagccucccgaguagcu

SEQ ID NO: 1070596 - RNA, 24 nt, Human
cuggagugcaguggcaugaucuca

SEQ ID NO: 1070597 - RNA, 24 nt, Human
cugucccugugacuguccagaacc

SEQ ID NO: 1070598 - RNA, 24 nt, Human
gaccucaagugauccacccaccuc

SEQ ID NO: 1070599 - RNA, 21 nt, Human
gagaugggguuucaccauggu

SEQ ID NO: 1070600 - RNA, 23 nt, Human
gaggaugggugggauuggccugg

SEQ ID NO: 1070601 - RNA, 23 nt, Human
gauauccccuucuggcaguucua

SEQ ID NO: 1070602 - RNA, 18 nt, Human
gauuacagaugugagaca

SEQ ID NO: 1070603 - RNA, 20 nt, Human
gauuacagaugugagacacc

SEQ ID NO: 1070604 - RNA, 19 nt, Human
gauuacaggcguccaccac

SEQ ID NO: 1070605 - RNA, 18 nt, Human
gcaaccuccaccucccgg

SEQ ID NO: 1070606 - RNA, 22 nt, Human
gcaaccuccaccucccggguuc

SEQ ID NO: 1070607 - RNA, 22 nt, Human
gcaaccuccgccugccggguuc

SEQ ID NO: 1070608 - RNA, 20 nt, Human
gccacuggcugguaacaucu

SEQ ID NO: 1070609 - RNA, 18 nt, Human
gcucccgggccacagccu

SEQ ID NO: 1070610 - RNA, 19 nt, Human
gcuggagugcaguggcaug

SEQ ID NO: 1070611 - RNA, 23 nt, Human
gcuggucucgaacuccugaccuc

SEQ ID NO: 1070612 - RNA, 19 nt, Human
ggaagacugucauguagug

SEQ ID NO: 1070613 - RNA, 25 nt, Human
ggacccuagcaucgucuagggaaca

SEQ ID NO: 1070614 - RNA, 18 nt, Human
ggagaaguggcauauucc

SEQ ID NO: 1070615 - RNA, 24 nt, Human
ggcuggucucgaacuccugaccuc

SEQ ID NO: 1070616 - RNA, 25 nt, Human
ggggugugcuaugaugagcaguugu

SEQ ID NO: 1070617 - RNA, 22 nt, Human
gggguuucaccaugguggccag

SEQ ID NO: 1070618 - RNA, 19 nt, Human
ggucucgaacuccugaccu

SEQ ID NO: 1070619 - RNA, 25 nt, Human
guagcccaacuggcccaggacacuc

SEQ ID NO: 1070620 - RNA, 18 nt, Human
guagcugggauuacaggc

SEQ ID NO: 1070621 - RNA, 18 nt, Human
guagcugggauuacaggc

SEQ ID NO: 1070622 - RNA, 21 nt, Human
gucuuuuuuuucccucccuca

SEQ ID NO: 1070623 - RNA, 24 nt, Human
gugauccacccaccucgcccuccc

SEQ ID NO: 1070624 - RNA, 21 nt, Human
uaagaagccugaccuuucauc

SEQ ID NO: 1070625 - RNA, 20 nt, Human
uagcaucgucuagggaacag

SEQ ID NO: 1070626 - RNA, 21 nt, Human
uaggcuccccuggggcccugu

SEQ ID NO: 1070627 - RNA, 24 nt, Human
uaguagagaugggguuucaccaug

SEQ ID NO: 1070628 - RNA, 25 nt, Human
uaguagagaugggguuucaccaugg

SEQ ID NO: 1070629 - RNA, 24 nt, Human
uauccccuucuggcaguucuaaac

SEQ ID NO: 1070630 - RNA, 19 nt, Human
ucaaaugauucuccugccu

SEQ ID NO: 1070631 - RNA, 20 nt, Human
ucaagugauccacccaccuc

SEQ ID NO: 1070632 - RNA, 24 nt, Human
ucacccaggcuggagugcaguggc

SEQ ID NO: 1070633 - RNA, 24 nt, Human
ucacucugucacccaggcuggagu

SEQ ID NO: 1070634 - RNA, 18 nt, Human
ucacugcaaccuccgccu

SEQ ID NO: 1070635 - RNA, 19 nt, Human
ucacugcaaccuccgccug

SEQ ID NO: 1070636 - RNA, 20 nt, Human
ucacugcaaccuccgccugc

SEQ ID NO: 1070637 - RNA, 24 nt, Human
ucacugcaaccuccgccugccggg

SEQ ID NO: 1070638 - RNA, 20 nt, Human
ucagccucccgaguagcugg

SEQ ID NO: 1070639 - RNA, 20 nt, Human
uccacccaccucgcccuccc

SEQ ID NO: 1070640 - RNA, 18 nt, Human
ucccaaagugcugggauu

SEQ ID NO: 1070641 - RNA, 23 nt, Human
ucccaaagugcugggauuacaga

SEQ ID NO: 1070642 - RNA, 19 nt, Human
uccccaguuucuuauucca

SEQ ID NO: 1070643 - RNA, 24 nt, Human
ucccgaguagcugggauuacaggc

SEQ ID NO: 1070644 - RNA, 21 nt, Human
ucccggguucaaaugauucuc

SEQ ID NO: 1070645 - RNA, 24 nt, Human
ucccggguucaaaugauucuccug

SEQ ID NO: 1070646 - RNA, 22 nt, Human
ucccucauccccauucccccac

SEQ ID NO: 1070647 - RNA, 25 nt, Human
uccuuuagacucuacuaaaucuuuc

SEQ ID NO: 1070648 - RNA, 18 nt, Human
ucgcccucccaaagugcu

SEQ ID NO: 1070649 - RNA, 23 nt, Human
ucuaaaccagccuugcccggaag

SEQ ID NO: 1070650 - RNA, 23 nt, Human
ucuaaaccagccuugcccggaag

SEQ ID NO: 1070651 - RNA, 19 nt, Human
ucuaagaauuucuaacuuc

SEQ ID NO: 1070652 - RNA, 23 nt, Human
ucucacucugucacccaggcugg

SEQ ID NO: 1070653 - RNA, 24 nt, Human
ucucacucugucacccaggcugga

SEQ ID NO: 1070654 - RNA, 26 nt, Human
ucucacucugucacccaggcuggagu

SEQ ID NO: 1070655 - RNA, 27 nt, Human
ucucacucugucacccaggcuggagug

SEQ ID NO: 1070656 - RNA, 23 nt, Human
ucucccacagcaggaaugaaaau

SEQ ID NO: 1070657 - RNA, 24 nt, Human
ucuccugccucagccucccgagua

SEQ ID NO: 1070658 - RNA, 21 nt, Human
ucucgaacuccugaccucaag

SEQ ID NO: 1070659 - RNA, 20 nt, Human
ucuggcaguucuaaaccagc

SEQ ID NO: 1070660 - RNA, 24 nt, Human
ucuguaccugacauauuuuguuuu

SEQ ID NO: 1070661 - RNA, 24 nt, Human
ucugucacccaggcuggagugcag

SEQ ID NO: 1070662 - RNA, 23 nt, Human
ucuuuuuuuucccucccucaucc

SEQ ID NO: 1070663 - RNA, 24 nt, Human
ugacuguccagaaccucugagacu

SEQ ID NO: 1070664 - RNA, 20 nt, Human
ugagacaccgugccuggugg

SEQ ID NO: 1070665 - RNA, 24 nt, Human
ugauccacccaccucgcccuccca

SEQ ID NO: 1070666 - RNA, 19 nt, Human
ugauccuaaacugcugcug

SEQ ID NO: 1070667 - RNA, 20 nt, Human
ugauucuccugccucagccu

SEQ ID NO: 1070668 - RNA, 22 nt, Human
ugcaguggcaugaucucagcuc

SEQ ID NO: 1070669 - RNA, 25 nt, Human
ugcccccaacucaugccccagaucu

SEQ ID NO: 1070670 - RNA, 24 nt, Human
ugccucagccucccgaguagcugg

SEQ ID NO: 1070671 - RNA, 19 nt, Human
ugcucccgggccacagccu

SEQ ID NO: 1070672 - RNA, 22 nt, Human
ugcucucugucccugugacugu

SEQ ID NO: 1070673 - RNA, 18 nt, Human
ugcugggauuacagaugu

SEQ ID NO: 1070674 - RNA, 24 nt, Human
ugcugggauuacagaugugagaca

SEQ ID NO: 1070675 - RNA, 19 nt, Human
uggagugcaguggcaugau

SEQ ID NO: 1070676 - RNA, 24 nt, Human
uggagugcaguggcaugaucucag

SEQ ID NO: 1070677 - RNA, 24 nt, Human
uggcaugaucucagcucacugcaa

SEQ ID NO: 1070678 - RNA, 24 nt, Human
uggccaggcuggucucgaacuccu

SEQ ID NO: 1070679 - RNA, 20 nt, Human
ugggacccuagcaucgucuu

SEQ ID NO: 1070680 - RNA, 18 nt, Human
ugggauuacagaugugag

SEQ ID NO: 1070681 - RNA, 19 nt, Human
ugggauuacagaugugaga

SEQ ID NO: 1070682 - RNA, 20 nt, Human
ugggauuacagaugugagac

SEQ ID NO: 1070683 - RNA, 21 nt, Human
ugggauuacagaugugagaca

SEQ ID NO: 1070684 - RNA, 23 nt, Human
ugggauuacagaugugagacacc

SEQ ID NO: 1070685 - RNA, 23 nt, Human
ugggauuacagaugugagacacc

SEQ ID NO: 1070686 - RNA, 24 nt, Human
ugggauuacagaugugagacaccg

SEQ ID NO: 1070687 - RNA, 18 nt, Human
ugggauuacaggcgucca

SEQ ID NO: 1070688 - RNA, 21 nt, Human
ugggauuacaggcguccacca

SEQ ID NO: 1070689 - RNA, 24 nt, Human
ugggauuacaggcguccaccacca

SEQ ID NO: 1070690 - RNA, 25 nt, Human
ugggauuacaggcguccaccaccau

SEQ ID NO: 1070691 - RNA, 22 nt, Human
ugggauuggccuggauuggggc

SEQ ID NO: 1070692 - RNA, 24 nt, Human
ugggguuucaccaugguggccagg

SEQ ID NO: 1070693 - RNA, 19 nt, Human
ugggugggauuggccugga

SEQ ID NO: 1070694 - RNA, 23 nt, Human
ugggugggauuggccuggauugg

SEQ ID NO: 1070695 - RNA, 24 nt, Human
ugggugggauuggccuggauuggg

SEQ ID NO: 1070696 - RNA, 19 nt, Human
ugguggccaggcuggucuc

SEQ ID NO: 1070697 - RNA, 21 nt, Human
uguauuuuuaguagagauggg

SEQ ID NO: 1070698 - RNA, 19 nt, Human
uguccagaaccucugagac

SEQ ID NO: 1070699 - RNA, 21 nt, Human
ugucuuuuuuuucccucccuc

SEQ ID NO: 1070700 - RNA, 23 nt, Human
ugugacugauucugccauccaaa

SEQ ID NO: 1070701 - RNA, 18 nt, Human
uuaguagagaugggguuu

SEQ ID NO: 1070702 - RNA, 22 nt, Human
uuaguagagaugggguuucacc

SEQ ID NO: 1070703 - RNA, 24 nt, Human
uuaguagagaugggguuucaccau

SEQ ID NO: 1070704 - RNA, 21 nt, Human
uuauacugcccccaacucaug

SEQ ID NO: 1070705 - RNA, 23 nt, Human
uucaaaugauucuccugccucag

SEQ ID NO: 1070706 - RNA, 24 nt, Human
uucaaaugauucuccugccucagc

SEQ ID NO: 1070707 - RNA, 19 nt, Human
uucgcuaggcuccccuggg

SEQ ID NO: 1070708 - RNA, 21 nt, Human
uugauuuucucaccucugggg

SEQ ID NO: 1070709 - RNA, 23 nt, Human
uuguauuuuuaguagagaugggg

SEQ ID NO: 1070710 - RNA, 21 nt, Human
uuucaccaugguggccaggcu

SEQ ID NO: 1070711 - RNA, 20 nt, Human
uuucuuggccccuaaauuuc

SEQ ID NO: 1070712 - RNA, 22 nt, Human
uuuuaagaggauuaaacaaaag

SEQ ID NO: 1070713 - RNA, 19 nt, Human
uuuuguauuuuuaguagag

SEQ ID NO: 1070714 - RNA, 20 nt, Human
uuuuguauuuuuaguagaga

SEQ ID NO: 1070715 - RNA, 24 nt, Human
uuuuuaguagagaugggguuucac

SEQ ID NO: 1070716 - RNA, 22 nt, Human
aaaaaaaaaaagcaaaauaaaa

SEQ ID NO: 1070717 - RNA, 27 nt, Human
aaaaaaaaaaagcaaaauaaaauugua

SEQ ID NO: 1070718 - RNA, 18 nt, Human
aaaaauagcuggccauag

SEQ ID NO: 1070719 - RNA, 19 nt, Human
aacacgguggcucacaccc

SEQ ID NO: 1070720 - RNA, 27 nt, Human
aagaagcuccagcauacuuuacaaccc

SEQ ID NO: 1070721 - RNA, 26 nt, Human
aagcaaaauaaaauuguaugagccua

SEQ ID NO: 1070722 - RNA, 19 nt, Human
aagcucaggaagcccccug

SEQ ID NO: 1070723 - RNA, 21 nt, Human
acacaacaaaaauacaccaag

SEQ ID NO: 1070724 - RNA, 22 nt, Human
accacugcacuccagccugggc

SEQ ID NO: 1070725 - RNA, 18 nt, Human
accccagccuccucccag

SEQ ID NO: 1070726 - RNA, 18 nt, Human
accuccuggcuccaucuc

SEQ ID NO: 1070727 - RNA, 21 nt, Human
acgugugugccccagggcccc

SEQ ID NO: 1070728 - RNA, 24 nt, Human
acugcacuccagccugggcaacag

SEQ ID NO: 1070729 - RNA, 24 nt, Human
acugcacuccagccugggcaacag

SEQ ID NO: 1070730 - RNA, 21 nt, Human
acuuaaaaaacaaacacacaa

SEQ ID NO: 1070731 - RNA, 23 nt, Human
agacaggaggaucgcuugggucc

SEQ ID NO: 1070732 - RNA, 24 nt, Human
agacaggaggaucgcuugggucca

SEQ ID NO: 1070733 - RNA, 19 nt, Human
agaccauagaugaagcauu

SEQ ID NO: 1070734 - RNA, 23 nt, Human
agcuacuuguaggcugagguggg

SEQ ID NO: 1070735 - RNA, 23 nt, Human
agcuaggcgugguggugcacgcc

SEQ ID NO: 1070736 - RNA, 19 nt, Human
aggaagacuugcaaaggug

SEQ ID NO: 1070737 - RNA, 18 nt, Human
aggaggaucgcuuggguc

SEQ ID NO: 1070738 - RNA, 24 nt, Human
aggaucgcuuggguccaggaguuu

SEQ ID NO: 1070739 - RNA, 24 nt, Human
aggccgagacaggaggaucgcuug

SEQ ID NO: 1070740 - RNA, 24 nt, Human
aggcgugguggugcacgccuguag

SEQ ID NO: 1070741 - RNA, 23 nt, Human
aggcugaggugggaggaucagug

SEQ ID NO: 1070742 - RNA, 19 nt, Human
agggccccggggcccgggg

SEQ ID NO: 1070743 - RNA, 22 nt, Human
aggguucuucucacuucccagg

SEQ ID NO: 1070744 - RNA, 24 nt, Human
agucagccugaaagccaggucauu

SEQ ID NO: 1070745 - RNA, 18 nt, Human
aucaugucaagugugagg

SEQ ID NO: 1070746 - RNA, 24 nt, Human
aucgcuuggguccaggaguuuaag

SEQ ID NO: 1070747 - RNA, 22 nt, Human
aucuccucucccugcaccccag

SEQ ID NO: 1070748 - RNA, 24 nt, Human
augguugguuaaaaaaaaaaaagc

SEQ ID NO: 1070749 - RNA, 24 nt, Human
auugcaccacugcacuccagccug

SEQ ID NO: 1070750 - RNA, 28 nt, Human
auugcaccacugcacuccagccugggca

SEQ ID NO: 1070751 - RNA, 20 nt, Human
caaaauagcugggcaaaggc

SEQ ID NO: 1070752 - RNA, 22 nt, Human
caaagcagaccauagaugaagc

SEQ ID NO: 1070753 - RNA, 19 nt, Human
caacaaaaauacaccaagc

SEQ ID NO: 1070754 - RNA, 18 nt, Human
caacacuuugggaggccg

SEQ ID NO: 1070755 - RNA, 24 nt, Human
caacacuuugggaggccgagacag

SEQ ID NO: 1070756 - RNA, 24 nt, Human
caacuuaaaaaacaaacacacaac

SEQ ID NO: 1070757 - RNA, 21 nt, Human
caagaggagacccguugggug

SEQ ID NO: 1070758 - RNA, 18 nt, Human
cacaacaaaaauacacca

SEQ ID NO: 1070759 - RNA, 21 nt, Human
caccaagcucaggaagccccc

SEQ ID NO: 1070760 - RNA, 22 nt, Human
caccccagccuccucccagcuu

SEQ ID NO: 1070761 - RNA, 23 nt, Human
cacgccuguagucccagcuacuu

SEQ ID NO: 1070762 - RNA, 24 nt, Human
cacuccagccugggcaacagagcg

SEQ ID NO: 1070763 - RNA, 19 nt, Human
cacugcacuccagccuggg

SEQ ID NO: 1070764 - RNA, 21 nt, Human
cacugcacuccagccugggca

SEQ ID NO: 1070765 - RNA, 22 nt, Human
cacugcacuccagccugggcaa

SEQ ID NO: 1070766 - RNA, 23 nt, Human
cacugcacuccagccugggcaac

SEQ ID NO: 1070767 - RNA, 24 nt, Human
cacugcacuccagccugggcaaca

SEQ ID NO: 1070768 - RNA, 25 nt, Human
cacugcacuccagccugggcaacaa

SEQ ID NO: 1070769 - RNA, 26 nt, Human
cagcacacaguaggcaugcacaguag

SEQ ID NO: 1070770 - RNA, 21 nt, Human
cagcauacuuuacaacccauc

SEQ ID NO: 1070771 - RNA, 25 nt, Human
cagggccagcagguaacacccauga

SEQ ID NO: 1070772 - RNA, 18 nt, Human
caucacccacaccccagc

SEQ ID NO: 1070773 - RNA, 19 nt, Human
cauuccagcaggaugacuu

SEQ ID NO: 1070774 - RNA, 25 nt, Human
ccaacacgguggcucacacccauaa

SEQ ID NO: 1070775 - RNA, 20 nt, Human
ccaacuaggaacuguccucc

SEQ ID NO: 1070776 - RNA, 20 nt, Human
ccacugcacuccagccuggg

SEQ ID NO: 1070777 - RNA, 21 nt, Human
ccacugcacuccagccugggc

SEQ ID NO: 1070778 - RNA, 23 nt, Human
ccacugcacuccagccugggcaa

SEQ ID NO: 1070779 - RNA, 24 nt, Human
ccacugcacuccagccugggcaac

SEQ ID NO: 1070780 - RNA, 20 nt, Human
ccacugcccaauuccaacug

SEQ ID NO: 1070781 - RNA, 18 nt, Human
ccagggccccggggcccg

SEQ ID NO: 1070782 - RNA, 21 nt, Human
cccaacacgguggcucacacc

SEQ ID NO: 1070783 - RNA, 22 nt, Human
cccaacuuaaaaaacaaacaca

SEQ ID NO: 1070784 - RNA, 23 nt, Human
cccacaccccagcacagugauua

SEQ ID NO: 1070785 - RNA, 18 nt, Human
cccacuuccucggccccc

SEQ ID NO: 1070786 - RNA, 22 nt, Human
cccagaucccggcucaggaaac

SEQ ID NO: 1070787 - RNA, 22 nt, Human
cccauaaucccaacacuuuggg

SEQ ID NO: 1070788 - RNA, 18 nt, Human
cccaucacccacacccca

SEQ ID NO: 1070789 - RNA, 23 nt, Human
cccaucacccacaccccagcacc

SEQ ID NO: 1070790 - RNA, 23 nt, Human
cccaugacugaagguggcggggc

SEQ ID NO: 1070791 - RNA, 21 nt, Human
ccccaaaaacucccaacuuaa

SEQ ID NO: 1070792 - RNA, 21 nt, Human
ccccacuuccucggcccccag

SEQ ID NO: 1070793 - RNA, 18 nt, Human
ccccagaucccggcucag

SEQ ID NO: 1070794 - RNA, 21 nt, Human
ccccagggccccggggcccgg

SEQ ID NO: 1070795 - RNA, 19 nt, Human
cccccaucacccacacccc

SEQ ID NO: 1070796 - RNA, 21 nt, Human
cccccuggcaucauacacaaa

SEQ ID NO: 1070797 - RNA, 28 nt, Human
ccccggggcccgggguaccgagggcucc

SEQ ID NO: 1070798 - RNA, 20 nt, Human
cccuagauaagaggaugacc

SEQ ID NO: 1070799 - RNA, 18 nt, Human
ccgguuacagguguaagg

SEQ ID NO: 1070800 - RNA, 18 nt, Human
ccucccccaucacccaca

SEQ ID NO: 1070801 - RNA, 19 nt, Human
ccuccucccagcuugucac

SEQ ID NO: 1070802 - RNA, 24 nt, Human
ccugcaccccagccuccucccagc

SEQ ID NO: 1070803 - RNA, 19 nt, Human
ccugggcucaagcgauugu

SEQ ID NO: 1070804 - RNA, 23 nt, Human
ccuguagucccagcuacuuguag

SEQ ID NO: 1070805 - RNA, 24 nt, Human
cgaaaaaaauagcuggccauagca

SEQ ID NO: 1070806 - RNA, 22 nt, Human
cgccuguagucccagcuacuug

SEQ ID NO: 1070807 - RNA, 26 nt, Human
cgccuguagucccagcuacuuguagg

SEQ ID NO: 1070808 - RNA, 19 nt, Human
cgggaacacaaaaaguagc

SEQ ID NO: 1070809 - RNA, 22 nt, Human
cucacacccauaaucccaacac

SEQ ID NO: 1070810 - RNA, 23 nt, Human
cucagccaaaugccugcagggcc

SEQ ID NO: 1070811 - RNA, 21 nt, Human
cuccagaaacgugcaagagga

SEQ ID NO: 1070812 - RNA, 23 nt, Human
cucccccaucacccacaccccag

SEQ ID NO: 1070813 - RNA, 18 nt, Human
cuccucucccugcacccc

SEQ ID NO: 1070814 - RNA, 19 nt, Human
cuccucucccugcacccca

SEQ ID NO: 1070815 - RNA, 18 nt, Human
cugcaccccagccuccuc

SEQ ID NO: 1070816 - RNA, 19 nt, Human
cuucccagguuccuggugu

SEQ ID NO: 1070817 - RNA, 22 nt, Human
cuugcugcuaagaagcuccagc

SEQ ID NO: 1070818 - RNA, 18 nt, Human
gaauaaccuaggauuuac

SEQ ID NO: 1070819 - RNA, 23 nt, Human
gacaaccaccuuucacguccaga

SEQ ID NO: 1070820 - RNA, 24 nt, Human
gagagguggaacaaauuugggcuc

SEQ ID NO: 1070821 - RNA, 24 nt, Human
gaucgcuuggguccaggaguuuaa

SEQ ID NO: 1070822 - RNA, 19 nt, Human
gcaaagguguguagggaag

SEQ ID NO: 1070823 - RNA, 24 nt, Human
gcacuccagccugggcaacagagc

SEQ ID NO: 1070824 - RNA, 24 nt, Human
gccaaguauuucaaaauaaaaagc

SEQ ID NO: 1070825 - RNA, 19 nt, Human
gcccaacacgguggcucac

SEQ ID NO: 1070826 - RNA, 20 nt, Human
gcccccaggaaggaugcuug

SEQ ID NO: 1070827 - RNA, 23 nt, Human
gcuccagcauacuuuacaaccca

SEQ ID NO: 1070828 - RNA, 19 nt, Human
gcugagccgaguguccagg

SEQ ID NO: 1070829 - RNA, 21 nt, Human
gcugggcuggacgugugugcc

SEQ ID NO: 1070830 - RNA, 19 nt, Human
gcuggucggcacaggaaga

SEQ ID NO: 1070831 - RNA, 22 nt, Human
ggaucgcuuggguccaggaguu

SEQ ID NO: 1070832 - RNA, 21 nt, Human
ggcauugaaugucaggagaaa

SEQ ID NO: 1070833 - RNA, 21 nt, Human
ggcccgggguaccgagggcuc

SEQ ID NO: 1070834 - RNA, 18 nt, Human
gggaacacaaaaaguagc

SEQ ID NO: 1070835 - RNA, 21 nt, Human
gggcggguggcagucagccug

SEQ ID NO: 1070836 - RNA, 20 nt, Human
ggguggcagucagccugaaa

SEQ ID NO: 1070837 - RNA, 24 nt, Human
gguggugcacgccuguagucccag

SEQ ID NO: 1070838 - RNA, 20 nt, Human
gguugguuaaaaaaaaaaaa

SEQ ID NO: 1070839 - RNA, 23 nt, Human
gucacacucccagcacacaguag

SEQ ID NO: 1070840 - RNA, 22 nt, Human
guuaaaaaaaaaaaagcaaaau

SEQ ID NO: 1070841 - RNA, 21 nt, Human
guugccagaccuucagauuuu

SEQ ID NO: 1070842 - RNA, 22 nt, Human
uaaaaaacaaacacacaacaaa

SEQ ID NO: 1070843 - RNA, 23 nt, Human
uaaaaaacaaacacacaacaaaa

SEQ ID NO: 1070844 - RNA, 21 nt, Human
uaaaaaacaaacacacaacca

SEQ ID NO: 1070845 - RNA, 22 nt, Human
uaaauucaaauauauauaaaua

SEQ ID NO: 1070846 - RNA, 22 nt, Human
uaggaacuguccucccccauca

SEQ ID NO: 1070847 - RNA, 23 nt, Human
uaugcccuagauaagaggaugac

SEQ ID NO: 1070848 - RNA, 23 nt, Human
uccagccugggcaacagagcgag

SEQ ID NO: 1070849 - RNA, 24 nt, Human
uccagccugggcaacagagcgaga

SEQ ID NO: 1070850 - RNA, 19 nt, Human
ucccaacuuaaaaaacaaa

SEQ ID NO: 1070851 - RNA, 23 nt, Human
ucccaggguucuucucacuuccc

SEQ ID NO: 1070852 - RNA, 22 nt, Human
uccucccagcuugucacacucc

SEQ ID NO: 1070853 - RNA, 24 nt, Human
uccucccccaucacccacacccca

SEQ ID NO: 1070854 - RNA, 19 nt, Human
ugagccgaguguccagggc

SEQ ID NO: 1070855 - RNA, 21 nt, Human
ugaggugggaggaucagugca

SEQ ID NO: 1070856 - RNA, 22 nt, Human
ugcaagaggagacccguugggu

SEQ ID NO: 1070857 - RNA, 21 nt, Human
ugcacaguaggcaugcuggug

SEQ ID NO: 1070858 - RNA, 21 nt, Human
ugcaccacugcacuccagccu

SEQ ID NO: 1070859 - RNA, 24 nt, Human
ugcaggaaacacugcaaacagcug

SEQ ID NO: 1070860 - RNA, 21 nt, Human
ugggaggaucagugcaguggu

SEQ ID NO: 1070861 - RNA, 23 nt, Human
ugggaggccgagacaggaggauc

SEQ ID NO: 1070862 - RNA, 19 nt, Human
ugggcuggacgugugugcc

SEQ ID NO: 1070863 - RNA, 19 nt, Human
uggguggagcagacccggg

SEQ ID NO: 1070864 - RNA, 21 nt, Human
uggucggcacaggaagacuug

SEQ ID NO: 1070865 - RNA, 18 nt, Human
uggugcacgccuguaguc

SEQ ID NO: 1070866 - RNA, 21 nt, Human
uggugcacgccuguaguccca

SEQ ID NO: 1070867 - RNA, 24 nt, Human
ugguggugcacgccuguaguccca

SEQ ID NO: 1070868 - RNA, 21 nt, Human
uguaagcaccccuccaauucu

SEQ ID NO: 1070869 - RNA, 24 nt, Human
uguagggaaguccaccgguuacag

SEQ ID NO: 1070870 - RNA, 22 nt, Human
ugucaggagaaaaauuuuuuuc

SEQ ID NO: 1070871 - RNA, 23 nt, Human
uuaagaccagccugggcucaagc

SEQ ID NO: 1070872 - RNA, 20 nt, Human
uuagcuaggcgugguggugc

SEQ ID NO: 1070873 - RNA, 24 nt, Human
uuagcuaggcgugguggugcacgc

SEQ ID NO: 1070874 - RNA, 24 nt, Human
uucaaaauaaaaagcuuuuccaaa

SEQ ID NO: 1070875 - RNA, 19 nt, Human
uuccaacugggaaagcagg

SEQ ID NO: 1070876 - RNA, 23 nt, Human
uuccaacugggaaagcaggcccc

SEQ ID NO: 1070877 - RNA, 21 nt, Human
uucuucucacuucccagguuc

SEQ ID NO: 1070878 - RNA, 23 nt, Human
uugcaccacugcacuccagccug

SEQ ID NO: 1070879 - RNA, 23 nt, Human
uugcugcuaagaagcuccagcug

SEQ ID NO: 1070880 - RNA, 24 nt, Human
uugggaggccgagacaggaggauc

SEQ ID NO: 1070881 - RNA, 22 nt, Human
uuggguccaggaguuuaagacc

SEQ ID NO: 1070882 - RNA, 19 nt, Human
uuggguggagcagacccgg

SEQ ID NO: 1070883 - RNA, 20 nt, Human
uuguaggcugaggugggagg

SEQ ID NO: 1070884 - RNA, 18 nt, Human
uuuguaagcaccccucca

SEQ ID NO: 1070885 - RNA, 18 nt, Human
aaaaaccuguccagccgc

SEQ ID NO: 1070886 - RNA, 20 nt, Human
aaaaggaacggaacauggug

SEQ ID NO: 1070887 - RNA, 21 nt, Human
aaaccgccauuuacacaacaa

SEQ ID NO: 1070888 - RNA, 22 nt, Human
aaagcagagaugucgagggccc

SEQ ID NO: 1070889 - RNA, 22 nt, Human
aaagcucuucaaccucccaccu

SEQ ID NO: 1070890 - RNA, 24 nt, Human
aaccaucucuucaaaggagcccug

SEQ ID NO: 1070891 - RNA, 21 nt, Human
aaccucccaccuugcuguccc

SEQ ID NO: 1070892 - RNA, 20 nt, Human
aacgucagcaacagacagag

SEQ ID NO: 1070893 - RNA, 22 nt, Human
aacuucuaggcucaagcaaucc

SEQ ID NO: 1070894 - RNA, 20 nt, Human
aagaaaagcccucaguggcg

SEQ ID NO: 1070895 - RNA, 21 nt, Human
aaguagcugggaccacaggca

SEQ ID NO: 1070896 - RNA, 25 nt, Human
aaguagcugggaccacaggcacuca

SEQ ID NO: 1070897 - RNA, 23 nt, Human
acacacacacacacacacgcaua

SEQ ID NO: 1070898 - RNA, 23 nt, Human
acacacacacacgcauacacaca

SEQ ID NO: 1070899 - RNA, 29 nt, Human
acacacacacgcauacacacaaagucaac

SEQ ID NO: 1070900 - RNA, 19 nt, Human
acacaccacauccccgugc

SEQ ID NO: 1070901 - RNA, 19 nt, Human
acacgcacacgcgcgcgug

SEQ ID NO: 1070902 - RNA, 21 nt, Human
acagugugacuggggcaugga

SEQ ID NO: 1070903 - RNA, 19 nt, Human
accauggaaggcagcagug

SEQ ID NO: 1070904 - RNA, 26 nt, Human
acccaggcuggagugcaguguggcau

SEQ ID NO: 1070905 - RNA, 19 nt, Human
acggagaugaggugggugu

SEQ ID NO: 1070906 - RNA, 21 nt, Human
agaugucgagggcccggagcc

SEQ ID NO: 1070907 - RNA, 19 nt, Human
agccacacaccacaucccc

SEQ ID NO: 1070908 - RNA, 20 nt, Human
agcucacugcaacuucuagg

SEQ ID NO: 1070909 - RNA, 22 nt, Human
agcuguggggcccgggcugagc

SEQ ID NO: 1070910 - RNA, 21 nt, Human
aggcagcagugcagugcaggg

SEQ ID NO: 1070911 - RNA, 24 nt, Human
agggcaauuuaucagaaacccgcc

SEQ ID NO: 1070912 - RNA, 23 nt, Human
aggguuuugcucugucacccagg

SEQ ID NO: 1070913 - RNA, 23 nt, Human
agguggguuccucuggggccggg

SEQ ID NO: 1070914 - RNA, 25 nt, Human
agugcaguguggcaugaucauagcu

SEQ ID NO: 1070915 - RNA, 18 nt, Human
auagcucacugcaacuuc

SEQ ID NO: 1070916 - RNA, 22 nt, Human
augcaaauauaguuuaaaaaau

SEQ ID NO: 1070917 - RNA, 20 nt, Human
augcugcugagccucaaagc

SEQ ID NO: 1070918 - RNA, 22 nt, Human
augcugcugagccucaaagcuc

SEQ ID NO: 1070919 - RNA, 24 nt, Human
caaaacaaaauuccaugaagucaa

SEQ ID NO: 1070920 - RNA, 28 nt, Human
caaaauuccaugaagucaacacgcacac

SEQ ID NO: 1070921 - RNA, 18 nt, Human
caaagcucuucaaccucc

SEQ ID NO: 1070922 - RNA, 21 nt, Human
caacacgcacacgcgcgcgug

SEQ ID NO: 1070923 - RNA, 24 nt, Human
caacuucuaggcucaagcaauccu

SEQ ID NO: 1070924 - RNA, 18 nt, Human
cacacacacacacacaca

SEQ ID NO: 1070925 - RNA, 25 nt, Human
cacacacacacacacacacgcauac

SEQ ID NO: 1070926 - RNA, 26 nt, Human
cacacacacacacacacgcauacaca

SEQ ID NO: 1070927 - RNA, 26 nt, Human
cacacacacacacacgcauacacaca

SEQ ID NO: 1070928 - RNA, 21 nt, Human
cacacaccacauccccgugca

SEQ ID NO: 1070929 - RNA, 19 nt, Human
cacgcacacgcgcgcgugc

SEQ ID NO: 1070930 - RNA, 31 nt, Human
cacgcgcgcgugcacacacacacacacacag

SEQ ID NO: 1070931 - RNA, 19 nt, Human
cagaaugaaaagcccacag

SEQ ID NO: 1070932 - RNA, 20 nt, Human
cagaccacgagguggaacca

SEQ ID NO: 1070933 - RNA, 21 nt, Human
cagcaagugaauccguuuucc

SEQ ID NO: 1070934 - RNA, 18 nt, Human
cagcccgcccagggugcc

SEQ ID NO: 1070935 - RNA, 21 nt, Human
cagcccuccuuucccuucccc

SEQ ID NO: 1070936 - RNA, 20 nt, Human
cagccucaggcccaaguagc

SEQ ID NO: 1070937 - RNA, 23 nt, Human
cagcugcucuguccucacccgcu

SEQ ID NO: 1070938 - RNA, 18 nt, Human
cagggugacguggaccgg

SEQ ID NO: 1070939 - RNA, 19 nt, Human
ccaaauaacuguuaggaaa

SEQ ID NO: 1070940 - RNA, 23 nt, Human
ccaacccuccacaaccucaacuc

SEQ ID NO: 1070941 - RNA, 23 nt, Human
ccaccaaauaacuguuaggaaac

SEQ ID NO: 1070942 - RNA, 22 nt, Human
ccagaaaaaaccgccauuuaca

SEQ ID NO: 1070943 - RNA, 22 nt, Human
ccagagcagagaaaccuuagga

SEQ ID NO: 1070944 - RNA, 22 nt, Human
cccaacccuccacaaccucaac

SEQ ID NO: 1070945 - RNA, 18 nt, Human
cccaaggccauggugucc

SEQ ID NO: 1070946 - RNA, 22 nt, Human
cccaaguagcugggaccacagg

SEQ ID NO: 1070947 - RNA, 28 nt, Human
cccacccaccauggaaggcagcagugca

SEQ ID NO: 1070948 - RNA, 22 nt, Human
ccccaaggaaacgcugggccaa

SEQ ID NO: 1070949 - RNA, 24 nt, Human
ccccaaggaaacgcugggccaagc

SEQ ID NO: 1070950 - RNA, 18 nt, Human
ccccgcucuggggucucc

SEQ ID NO: 1070951 - RNA, 18 nt, Human
ccccucuccccugacaag

SEQ ID NO: 1070952 - RNA, 22 nt, Human
cccgggcugagcccucccugcc

SEQ ID NO: 1070953 - RNA, 23 nt, Human
cccgggcugagcccucccugccu

SEQ ID NO: 1070954 - RNA, 24 nt, Human
ccggagccacacaccacauccccg

SEQ ID NO: 1070955 - RNA, 22 nt, Human
ccgggaccaugcgcagcacugg

SEQ ID NO: 1070956 - RNA, 22 nt, Human
ccucacaucacaaaaaccuguc

SEQ ID NO: 1070957 - RNA, 30 nt, Human
ccucacaucacaaaaaccuguccagccggu

SEQ ID NO: 1070958 - RNA, 24 nt, Human
ccucaggcccaaguagcugggacc

SEQ ID NO: 1070959 - RNA, 20 nt, Human
ccucuaagaauccaaauuua

SEQ ID NO: 1070960 - RNA, 28 nt, Human
ccugccaccaucaccaaagcucacacca

SEQ ID NO: 1070961 - RNA, 19 nt, Human
ccugccccgcucugggguc

SEQ ID NO: 1070962 - RNA, 18 nt, Human
ccugguacaggcaugggg

SEQ ID NO: 1070963 - RNA, 24 nt, Human
ccuucgucagcguuccuggagccc

SEQ ID NO: 1070964 - RNA, 18 nt, Human
cgagggcccggagccaca

SEQ ID NO: 1070965 - RNA, 21 nt, Human
cgcauacacacaaagucaaca

SEQ ID NO: 1070966 - RNA, 20 nt, Human
cgcccaaggccauggugucc

SEQ ID NO: 1070967 - RNA, 25 nt, Human
cgcgugcacacacacacacacacac

SEQ ID NO: 1070968 - RNA, 20 nt, Human
cgcugccugcccggaucagu

SEQ ID NO: 1070969 - RNA, 19 nt, Human
cgggagggcuggcugacgg

SEQ ID NO: 1070970 - RNA, 25 nt, Human
cgugcacacacacacacacacacgc

SEQ ID NO: 1070971 - RNA, 24 nt, Human
cuagagaaaagggggcacuguggg

SEQ ID NO: 1070972 - RNA, 19 nt, Human
cucaaagcucuucaaccuc

SEQ ID NO: 1070973 - RNA, 21 nt, Human
cuccagccucaggcccaagua

SEQ ID NO: 1070974 - RNA, 26 nt, Human
cucccaacccuccacaaccucaacuc

SEQ ID NO: 1070975 - RNA, 20 nt, Human
cuccccuggcugacagcucc

SEQ ID NO: 1070976 - RNA, 25 nt, Human
cucuccccugacaagugugcagaca

SEQ ID NO: 1070977 - RNA, 22 nt, Human
cucuggccaaaccagacucuuc

SEQ ID NO: 1070978 - RNA, 20 nt, Human
cucugucacccaggcuggag

SEQ ID NO: 1070979 - RNA, 27 nt, Human
cugaaccugaaaaaggaacggaacaug

SEQ ID NO: 1070980 - RNA, 23 nt, Human
cugacagcacagggcaauuuauc

SEQ ID NO: 1070981 - RNA, 23 nt, Human
cugcuggccgacuccaagaaaag

SEQ ID NO: 1070982 - RNA, 23 nt, Human
cuggggucucccacccaccaugg

SEQ ID NO: 1070983 - RNA, 18 nt, Human
cugucacccaggcuggag

SEQ ID NO: 1070984 - RNA, 23 nt, Human
cuucaaaggagcccugccaccau

SEQ ID NO: 1070985 - RNA, 24 nt, Human
cuucuaggcucaagcaauccucca

SEQ ID NO: 1070986 - RNA, 22 nt, Human
cuuuucuuucucgaagguuggu

SEQ ID NO: 1070987 - RNA, 23 nt, Human
cuuuuuuuuuuugagauaggguu

SEQ ID NO: 1070988 - RNA, 22 nt, Human
gagggcuggcugacggcugacc

SEQ ID NO: 1070989 - RNA, 25 nt, Human
gccacugugcuacuuuaucugggca

SEQ ID NO: 1070990 - RNA, 18 nt, Human
gcgccugccccgcucugg

SEQ ID NO: 1070991 - RNA, 20 nt, Human
gcucugucacccaggcugga

SEQ ID NO: 1070992 - RNA, 25 nt, Human
gcucugucacccaggcuggagugca

SEQ ID NO: 1070993 - RNA, 18 nt, Human
gcugggaccacaggcacu

SEQ ID NO: 1070994 - RNA, 20 nt, Human
ggagcccuugccaagcuuac

SEQ ID NO: 1070995 - RNA, 19 nt, Human
ggcgggaaacgggagggcu

SEQ ID NO: 1070996 - RNA, 18 nt, Human
gggauggccuggagcugu

SEQ ID NO: 1070997 - RNA, 30 nt, Human
gggcgaggcagcggccaggcgacaagggaa

SEQ ID NO: 1070998 - RNA, 22 nt, Human
ggggauggccuggagcuguggg

SEQ ID NO: 1070999 - RNA, 19 nt, Human
gggggucugcugcuuucca

SEQ ID NO: 1071000 - RNA, 21 nt, Human
ggggucucccacccaccaugg

SEQ ID NO: 1071001 - RNA, 20 nt, Human
gguggggguccuaaaacccu

SEQ ID NO: 1071002 - RNA, 18 nt, Human
gguguugagggaaaggcc

SEQ ID NO: 1071003 - RNA, 24 nt, Human
gucaacacgcacacgcgcgcgugg

SEQ ID NO: 1071004 - RNA, 24 nt, Human
guuuugcucugucacccaggcugg

SEQ ID NO: 1071005 - RNA, 23 nt, Human
uaagaaggcagcuagccagcccg

SEQ ID NO: 1071006 - RNA, 20 nt, Human
uaaggugucuuuauugucuu

SEQ ID NO: 1071007 - RNA, 24 nt, Human
uaccaugugccccaugcguguccc

SEQ ID NO: 1071008 - RNA, 20 nt, Human
uagaacuucaguuucuccca

SEQ ID NO: 1071009 - RNA, 20 nt, Human
uaggcucaagcaauccucca

SEQ ID NO: 1071010 - RNA, 24 nt, Human
uaggguuuugcucugucacccagg

SEQ ID NO: 1071011 - RNA, 20 nt, Human
ucaacacgcacacgcgcgcg

SEQ ID NO: 1071012 - RNA, 23 nt, Human
ucacccaggcuggagugcagugu

SEQ ID NO: 1071013 - RNA, 19 nt, Human
uccacaaccucaacucuug

SEQ ID NO: 1071014 - RNA, 25 nt, Human
uccagcccuccuuucccuuccccaa

SEQ ID NO: 1071015 - RNA, 30 nt, Human
uccaugaagucaacacgcacacgcgcggug

SEQ ID NO: 1071016 - RNA, 22 nt, Human
ucccacccaccauggaaggcag

SEQ ID NO: 1071017 - RNA, 20 nt, Human
ucccaccuugcuguccccuc

SEQ ID NO: 1071018 - RNA, 26 nt, Human
ucccccaaagcagagaugucgagggc

SEQ ID NO: 1071019 - RNA, 19 nt, Human
ucccucacaucacaaaaac

SEQ ID NO: 1071020 - RNA, 20 nt, Human
ucccuuuucuuucucgaagg

SEQ ID NO: 1071021 - RNA, 25 nt, Human
uccgccgugaacaaaaucagcaagu

SEQ ID NO: 1071022 - RNA, 23 nt, Human
uccuggagcccuugccaagcuua

SEQ ID NO: 1071023 - RNA, 18 nt, Human
ucucccaacccuccacaa

SEQ ID NO: 1071024 - RNA, 24 nt, Human
ucucccaacccuccacaaccucaa

SEQ ID NO: 1071025 - RNA, 24 nt, Human
ucugucacccaggcuggagugcag

SEQ ID NO: 1071026 - RNA, 23 nt, Human
ucuguccucacccgcucuggagg

SEQ ID NO: 1071027 - RNA, 21 nt, Human
ucuuagccagagcagagaaac

SEQ ID NO: 1071028 - RNA, 21 nt, Human
ucuuuggcacucuggcuggcc

SEQ ID NO: 1071029 - RNA, 28 nt, Human
ugaaaagcccacagcugcucuguccucc

SEQ ID NO: 1071030 - RNA, 22 nt, Human
ugacaagugugcagacaaggua

SEQ ID NO: 1071031 - RNA, 18 nt, Human
ugacagcagagcaaucag

SEQ ID NO: 1071032 - RNA, 19 nt, Human
ugacagcagagcaaucaga

SEQ ID NO: 1071033 - RNA, 23 nt, Human
ugagggaaaggccacuuucccac

SEQ ID NO: 1071034 - RNA, 24 nt, Human
ugcacggagaugaggugggugugu

SEQ ID NO: 1071035 - RNA, 18 nt, Human
ugccaccaucaccaaagc

SEQ ID NO: 1071036 - RNA, 21 nt, Human
ugccccgcucuggggucuccc

SEQ ID NO: 1071037 - RNA, 21 nt, Human
ugcgcagcacugggggggucu

SEQ ID NO: 1071038 - RNA, 19 nt, Human
ugcgugucccucacaucac

SEQ ID NO: 1071039 - RNA, 18 nt, Human
ugcuaggaggccucaggc

SEQ ID NO: 1071040 - RNA, 20 nt, Human
ugcugcguggccugcuggcc

SEQ ID NO: 1071041 - RNA, 21 nt, Human
ugcugcugagccucaaagcuc

SEQ ID NO: 1071042 - RNA, 25 nt, Human
uggagcccuugccaagcuuaccaug

SEQ ID NO: 1071043 - RNA, 22 nt, Human
uggagugcaguguggcaugauc

SEQ ID NO: 1071044 - RNA, 23 nt, Human
uggagugcaguguggcaugauca

SEQ ID NO: 1071045 - RNA, 18 nt, Human
uggcaugaucauagcuca

SEQ ID NO: 1071046 - RNA, 24 nt, Human
uggcaugaucauagcucacugcaa

SEQ ID NO: 1071047 - RNA, 21 nt, Human
uggccaaaccagacucuucuc

SEQ ID NO: 1071048 - RNA, 20 nt, Human
uggccgacuccaagaaaagc

SEQ ID NO: 1071049 - RNA, 22 nt, Human
uggccuggagcuguggggcccg

SEQ ID NO: 1071050 - RNA, 21 nt, Human
uggcgccugccccgcucuggg

SEQ ID NO: 1071051 - RNA, 19 nt, Human
ugggaccacaggcacucac

SEQ ID NO: 1071052 - RNA, 21 nt, Human
ugggaccacaggcacucacug

SEQ ID NO: 1071053 - RNA, 24 nt, Human
ugggcagggacugggggugccaug

SEQ ID NO: 1071054 - RNA, 20 nt, Human
ugggcgggaaacgggagggc

SEQ ID NO: 1071055 - RNA, 23 nt, Human
uggggguggggguccuaaaaccc

SEQ ID NO: 1071056 - RNA, 21 nt, Human
ugucacccaggcuggagugca

SEQ ID NO: 1071057 - RNA, 21 nt, Human
ugugcagacaagguaaaaauc

SEQ ID NO: 1071058 - RNA, 22 nt, Human
ugugcagacaagguaaaaaucc

SEQ ID NO: 1071059 - RNA, 20 nt, Human
uucaaaggagcccugccacc

SEQ ID NO: 1071060 - RNA, 24 nt, Human
uucaaaguagagauguccuaagaa

SEQ ID NO: 1071061 - RNA, 22 nt, Human
uucaaccucccaccuugcuguc

SEQ ID NO: 1071062 - RNA, 19 nt, Human
uucagagcgcagaaccaac

SEQ ID NO: 1071063 - RNA, 25 nt, Human
uucucccaacccuccacaaccucaa

SEQ ID NO: 1071064 - RNA, 23 nt, Human
uucuuuuuuuuuuugagauaggg

SEQ ID NO: 1071065 - RNA, 19 nt, Human
uugccaagcuuaccaugug

SEQ ID NO: 1071066 - RNA, 20 nt, Human
uugcucugucacccaggcug

SEQ ID NO: 1071067 - RNA, 22 nt, Human
uugcucugucacccaggcugga

SEQ ID NO: 1071068 - RNA, 24 nt, Human
uugcucugucacccaggcuggagu

SEQ ID NO: 1071069 - RNA, 24 nt, Human
uuuugcucugucacccaggcugga

SEQ ID NO: 1071070 - RNA, 18 nt, Human
uuuuuuuugagauagggu

SEQ ID NO: 1071071 - RNA, 24 nt, Human
aaaaguagugggugaagccaagag

SEQ ID NO: 1071072 - RNA, 18 nt, Human
aaaauuagcugggcgugg

SEQ ID NO: 1071073 - RNA, 23 nt, Human
aaacaaaugaaccucaauccaua

SEQ ID NO: 1071074 - RNA, 26 nt, Human
aaacaaaugaaccucaauccauaacu

SEQ ID NO: 1071075 - RNA, 22 nt, Human
aaaguagugggugaagccaaga

SEQ ID NO: 1071076 - RNA, 20 nt, Human
aacauggagaaaccccaguc

SEQ ID NO: 1071077 - RNA, 21 nt, Human
aacauggagaaaccccagucu

SEQ ID NO: 1071078 - RNA, 22 nt, Human
aacauggagaaaccccagucuc

SEQ ID NO: 1071079 - RNA, 23 nt, Human
aagaaacuagaauagccaaaaca

SEQ ID NO: 1071080 - RNA, 24 nt, Human
aagagugaaaacucugucucaaaa

SEQ ID NO: 1071081 - RNA, 23 nt, Human
aagcccacguccacacguuccga

SEQ ID NO: 1071082 - RNA, 24 nt, Human
accugaggucaggaguucgagacc

SEQ ID NO: 1071083 - RNA, 24 nt, Human
acuccagccugggcgacaggguga

SEQ ID NO: 1071084 - RNA, 22 nt, Human
acuucgaaacuuacuguaaaga

SEQ ID NO: 1071085 - RNA, 24 nt, Human
agaaaaguagugggugaagccaag

SEQ ID NO: 1071086 - RNA, 23 nt, Human
agaacgcugaaagcuggugggcu

SEQ ID NO: 1071087 - RNA, 18 nt, Human
agagcuggaagacucgca

SEQ ID NO: 1071088 - RNA, 22 nt, Human
agagguugcagugaguugagau

SEQ ID NO: 1071089 - RNA, 23 nt, Human
agagguugcagugaguugagauc

SEQ ID NO: 1071090 - RNA, 24 nt, Human
agagguugcagugaguugagaucg

SEQ ID NO: 1071091 - RNA, 20 nt, Human
agcaaagauaaagaguuuac

SEQ ID NO: 1071092 - RNA, 24 nt, Human
agcacuuugggaggccgaggcugg

SEQ ID NO: 1071093 - RNA, 22 nt, Human
agccugggcgacagggugagac

SEQ ID NO: 1071094 - RNA, 24 nt, Human
aggaagagguugcagugaguugag

SEQ ID NO: 1071095 - RNA, 22 nt, Human
aggcaccugucaucccagcuac

SEQ ID NO: 1071096 - RNA, 22 nt, Human
aggcaggagaaaugcuugaacc

SEQ ID NO: 1071097 - RNA, 23 nt, Human
aggcaggagaaaugcuugaaccu

SEQ ID NO: 1071098 - RNA, 24 nt, Human
aggcaggagaaaugcuugaaccug

SEQ ID NO: 1071099 - RNA, 25 nt, Human
aggcaggagaaaugcuugaaccugg

SEQ ID NO: 1071100 - RNA, 21 nt, Human
aggccgaggcugguggaucac

SEQ ID NO: 1071101 - RNA, 24 nt, Human
aggcgugguggcucacaccuguaa

SEQ ID NO: 1071102 - RNA, 24 nt, Human
aggcugaggcaggagaaaugcuug

SEQ ID NO: 1071103 - RNA, 22 nt, Human
aggcugguggaucaccugaggu

SEQ ID NO: 1071104 - RNA, 26 nt, Human
aggcugguggaucaccugaggucagg

SEQ ID NO: 1071105 - RNA, 21 nt, Human
aucaccugaggucaggaguuc

SEQ ID NO: 1071106 - RNA, 24 nt, Human
aucaccugaggucaggaguucgag

SEQ ID NO: 1071107 - RNA, 24 nt, Human
aucgcacuccagccugggcgacag

SEQ ID NO: 1071108 - RNA, 24 nt, Human
aucgcgccaucgcacuccagccug

SEQ ID NO: 1071109 - RNA, 19 nt, Human
aucuaaacauugugucaga

SEQ ID NO: 1071110 - RNA, 24 nt, Human
augcuugaaccugggaggaagagg

SEQ ID NO: 1071111 - RNA, 23 nt, Human
caaaacaaaugaaccucaaucca

SEQ ID NO: 1071112 - RNA, 19 nt, Human
caaagcccacguccacacg

SEQ ID NO: 1071113 - RNA, 19 nt, Human
caaugaaggaacuuccaaa

SEQ ID NO: 1071114 - RNA, 24 nt, Human
cacaccuguaaucccagcacuuug

SEQ ID NO: 1071115 - RNA, 23 nt, Human
caccugaggucaggaguucgaga

SEQ ID NO: 1071116 - RNA, 23 nt, Human
caccuguaaucccagcacuuugg

SEQ ID NO: 1071117 - RNA, 24 nt, Human
caccuguaaucccagcacuuuggg

SEQ ID NO: 1071118 - RNA, 18 nt, Human
caccugucaucccagcua

SEQ ID NO: 1071119 - RNA, 24 nt, Human
caccugucaucccagcuacucagg

SEQ ID NO: 1071120 - RNA, 20 nt, Human
cacuccagccugggcgacag

SEQ ID NO: 1071121 - RNA, 20 nt, Human
cacuccagccugggcgacag

SEQ ID NO: 1071122 - RNA, 24 nt, Human
cacuccagccugggcgacagggug

SEQ ID NO: 1071123 - RNA, 19 nt, Human
cacugcaccacagcaaaga

SEQ ID NO: 1071124 - RNA, 23 nt, Human
cacugcaccacagcaaagauaaa

SEQ ID NO: 1071125 - RNA, 19 nt, Human
cacuucgcggcggcucagu

SEQ ID NO: 1071126 - RNA, 25 nt, Human
cagcacuuugggaggccgaggcugg

SEQ ID NO: 1071127 - RNA, 24 nt, Human
cagcccgaccaacauggagaaacc

SEQ ID NO: 1071128 - RNA, 24 nt, Human
cagcuacucaggaggcugaggcag

SEQ ID NO: 1071129 - RNA, 19 nt, Human
caucgcacuccagccuggg

SEQ ID NO: 1071130 - RNA, 22 nt, Human
caucgcacuccagccugggcga

SEQ ID NO: 1071131 - RNA, 23 nt, Human
caucgcacuccagccugggcgac

SEQ ID NO: 1071132 - RNA, 24 nt, Human
caucgcacuccagccugggcgaca

SEQ ID NO: 1071133 - RNA, 18 nt, Human
ccaaagauugccaucaga

SEQ ID NO: 1071134 - RNA, 22 nt, Human
ccaaagcccacguccacacguu

SEQ ID NO: 1071135 - RNA, 28 nt, Human
ccaaagcccacguccacacguuccgagc

SEQ ID NO: 1071136 - RNA, 22 nt, Human
ccacugcgccuaacgaccgccc

SEQ ID NO: 1071137 - RNA, 20 nt, Human
ccaucgcacuccagccuggg

SEQ ID NO: 1071138 - RNA, 21 nt, Human
ccaucgcacuccagccugggc

SEQ ID NO: 1071139 - RNA, 23 nt, Human
ccaucgcacuccagccugggcga

SEQ ID NO: 1071140 - RNA, 24 nt, Human
ccaucgcacuccagccugggcgac

SEQ ID NO: 1071141 - RNA, 22 nt, Human
cccaucgcaaacauccgggggc

SEQ ID NO: 1071142 - RNA, 23 nt, Human
ccuaacgaccgcccaucucugac

SEQ ID NO: 1071143 - RNA, 23 nt, Human
ccucugagcuuccugacggccgu

SEQ ID NO: 1071144 - RNA, 22 nt, Human
ccugaggucaggaguucgagac

SEQ ID NO: 1071145 - RNA, 29 nt, Human
cgaggcggggguguggcgaggggaagucc

SEQ ID NO: 1071146 - RNA, 20 nt, Human
cgaggcugguggaucaccug

SEQ ID NO: 1071147 - RNA, 24 nt, Human
cgaggcugguggaucaccugaggu

SEQ ID NO: 1071148 - RNA, 26 nt, Human
cgaggcugguggaucaccugagguca

SEQ ID NO: 1071149 - RNA, 26 nt, Human
cgccaucgcacuccagccugggcgac

SEQ ID NO: 1071150 - RNA, 22 nt, Human
cgccgggcucacuucagugcgc

SEQ ID NO: 1071151 - RNA, 18 nt, Human
cgcugaaagcuggugggc

SEQ ID NO: 1071152 - RNA, 20 nt, Human
cgcugaaagcuggugggcuu

SEQ ID NO: 1071153 - RNA, 24 nt, Human
cggcccgaggcggggguguggcga

SEQ ID NO: 1071154 - RNA, 19 nt, Human
cggcucagucagcgcugcu

SEQ ID NO: 1071155 - RNA, 24 nt, Human
cguuccgagcccgccgucccaucg

SEQ ID NO: 1071156 - RNA, 18 nt, Human
cucaaaaaaaaaaaaaaa

SEQ ID NO: 1071157 - RNA, 22 nt, Human
cucacaccuguaaucccagcac

SEQ ID NO: 1071158 - RNA, 24 nt, Human
cucacaccuguaaucccagcacuu

SEQ ID NO: 1071159 - RNA, 19 nt, Human
cucugucucaaaaaaaaaa

SEQ ID NO: 1071160 - RNA, 21 nt, Human
cugucaucccagcuacucagg

SEQ ID NO: 1071161 - RNA, 20 nt, Human
gaaagucaauauacaaaaca

SEQ ID NO: 1071162 - RNA, 23 nt, Human
gaacagagcuggaagacucgcac

SEQ ID NO: 1071163 - RNA, 18 nt, Human
gaaccuaaacuaguauug

SEQ ID NO: 1071164 - RNA, 18 nt, Human
gaacgcugaaagcuggug

SEQ ID NO: 1071165 - RNA, 22 nt, Human
gaccaacauggagaaaccccag

SEQ ID NO: 1071166 - RNA, 22 nt, Human
gagaaaccccagucucuacuaa

SEQ ID NO: 1071167 - RNA, 22 nt, Human
gagaauacauaaauagaccuuc

SEQ ID NO: 1071168 - RNA, 23 nt, Human
gagaccagcccgaccaacaugga

SEQ ID NO: 1071169 - RNA, 23 nt, Human
gagaucgcgccaucgcacuccag

SEQ ID NO: 1071170 - RNA, 24 nt, Human
gagccaggcgugguggcucacacc

SEQ ID NO: 1071171 - RNA, 21 nt, Human
gaucaccugaggucaggaguu

SEQ ID NO: 1071172 - RNA, 24 nt, Human
gaucaccugaggucaggaguucga

SEQ ID NO: 1071173 - RNA, 21 nt, Human
gcacuccagccugggcgacag

SEQ ID NO: 1071174 - RNA, 22 nt, Human
gccaucgcacuccagccugggc

SEQ ID NO: 1071175 - RNA, 21 nt, Human
gcgcugcuggguuccaccccu

SEQ ID NO: 1071176 - RNA, 21 nt, Human
gcugcagccucugagcuuccu

SEQ ID NO: 1071177 - RNA, 23 nt, Human
gcugcuggguuccaccccuccua

SEQ ID NO: 1071178 - RNA, 18 nt, Human
gcuugggaagacaaacga

SEQ ID NO: 1071179 - RNA, 26 nt, Human
ggaaaagcagaagaaacuagaauagc

SEQ ID NO: 1071180 - RNA, 21 nt, Human
ggagccaggcgugguggcuca

SEQ ID NO: 1071181 - RNA, 22 nt, Human
ggcggggacggcccgaggcggg

SEQ ID NO: 1071182 - RNA, 23 nt, Human
ggcggggacggcccgaggcgggg

SEQ ID NO: 1071183 - RNA, 24 nt, Human
gguggcucacaccuguaaucccag

SEQ ID NO: 1071184 - RNA, 23 nt, Human
guggcucacaccuguaaucccag

SEQ ID NO: 1071185 - RNA, 21 nt, Human
uaaaaaaauggugcugcaaca

SEQ ID NO: 1071186 - RNA, 26 nt, Human
uauacaaaacaaaugaaccucaaucc

SEQ ID NO: 1071187 - RNA, 20 nt, Human
ucaaaaaaaaaaaaaaaaaa

SEQ ID NO: 1071188 - RNA, 21 nt, Human
ucaaaaaaaaaaaaaaaaaaa

SEQ ID NO: 1071189 - RNA, 18 nt, Human
ucaauauacaaaacaaau

SEQ ID NO: 1071190 - RNA, 19 nt, Human
ucaaugaaaauagugguuu

SEQ ID NO: 1071191 - RNA, 18 nt, Human
ucagagaaaaguaguggg

SEQ ID NO: 1071192 - RNA, 23 nt, Human
uccagccugggcgacagggugag

SEQ ID NO: 1071193 - RNA, 24 nt, Human
uccagccugggcgacagggugaga

SEQ ID NO: 1071194 - RNA, 24 nt, Human
ucuaaacauugugucagagaaagg

SEQ ID NO: 1071195 - RNA, 21 nt, Human
ucucuacuaaaaauacaaaaa

SEQ ID NO: 1071196 - RNA, 23 nt, Human
ucugucucaaaaaaaaaaaaaaa

SEQ ID NO: 1071197 - RNA, 19 nt, Human
ugaaagcuggugggcuugg

SEQ ID NO: 1071198 - RNA, 21 nt, Human
ugaaauuuggcucccagguaa

SEQ ID NO: 1071199 - RNA, 24 nt, Human
ugaaccugggaggaagagguugca

SEQ ID NO: 1071200 - RNA, 22 nt, Human
ugacaaaguugcaaggggacgc

SEQ ID NO: 1071201 - RNA, 24 nt, Human
ugaggcaggagaaaugcuugaacc

SEQ ID NO: 1071202 - RNA, 25 nt, Human
ugaggcaggagaaaugcuugaaccu

SEQ ID NO: 1071203 - RNA, 22 nt, Human
ugaguugagaucgcgccaucgc

SEQ ID NO: 1071204 - RNA, 22 nt, Human
ugcaacaauugaaagucaauau

SEQ ID NO: 1071205 - RNA, 24 nt, Human
ugcaagggcaaaucaaugaaaaua

SEQ ID NO: 1071206 - RNA, 21 nt, Human
ugcuugaaccugggaggaaga

SEQ ID NO: 1071207 - RNA, 19 nt, Human
uggagaacgcugaaagcug

SEQ ID NO: 1071208 - RNA, 24 nt, Human
uggagccaggcgugguggcucaca

SEQ ID NO: 1071209 - RNA, 24 nt, Human
uggaucaccugaggucaggaguuc

SEQ ID NO: 1071210 - RNA, 27 nt, Human
uggaucaccugaggucaggaguucgag

SEQ ID NO: 1071211 - RNA, 21 nt, Human
uggcucacaccuguaauccca

SEQ ID NO: 1071212 - RNA, 22 nt, Human
uggcucacaccuguaaucccag

SEQ ID NO: 1071213 - RNA, 24 nt, Human
uggcucacaccuguaaucccagca

SEQ ID NO: 1071214 - RNA, 22 nt, Human
uggcucccagguaauacguucc

SEQ ID NO: 1071215 - RNA, 24 nt, Human
ugggaggaagagguugcagugagu

SEQ ID NO: 1071216 - RNA, 21 nt, Human
ugggaggaagagguugcaguu

SEQ ID NO: 1071217 - RNA, 19 nt, Human
ugggaggccgaggcuggug

SEQ ID NO: 1071218 - RNA, 24 nt, Human
ugggaggccgaggcugguggauca

SEQ ID NO: 1071219 - RNA, 18 nt, Human
ugggugaagccaagaggu

SEQ ID NO: 1071220 - RNA, 23 nt, Human
ugguggaucaccugaggucagga

SEQ ID NO: 1071221 - RNA, 24 nt, Human
ugguggcucacaccuguaauccca

SEQ ID NO: 1071222 - RNA, 22 nt, Human
uguaaaaccuucacuuaacaaa

SEQ ID NO: 1071223 - RNA, 23 nt, Human
ugugucagagaaaggauaaacac

SEQ ID NO: 1071224 - RNA, 21 nt, Human
uuaacccaagaaaagaguaaa

SEQ ID NO: 1071225 - RNA, 20 nt, Human
uuagcugggcguggugucag

SEQ ID NO: 1071226 - RNA, 22 nt, Human
uuagcugggcguggugucaggc

SEQ ID NO: 1071227 - RNA, 24 nt, Human
uuagcugggcguggugucaggcac

SEQ ID NO: 1071228 - RNA, 24 nt, Human
uucacuuaacaaaaauucuagaca

SEQ ID NO: 1071229 - RNA, 24 nt, Human
uugaaccugggaggaagagguugc

SEQ ID NO: 1071230 - RNA, 19 nt, Human
uugcagugaguugagaucg

SEQ ID NO: 1071231 - RNA, 22 nt, Human
uugcagugaguugagaucgcgc

SEQ ID NO: 1071232 - RNA, 22 nt, Human
uuggaaaagcagaagaaacuag

SEQ ID NO: 1071233 - RNA, 25 nt, Human
uugggaggccgaggcugguggauca

SEQ ID NO: 1071234 - RNA, 19 nt, Human
uuugacaaaguugcaaggg

SEQ ID NO: 1071235 - RNA, 19 nt, Human
aaacaacuacuuauuucuc

SEQ ID NO: 1071236 - RNA, 19 nt, Human
aaaccaccccaaaugcagu

SEQ ID NO: 1071237 - RNA, 30 nt, Human
aaccaccccaaaugcaguggcuuaaacaag

SEQ ID NO: 1071238 - RNA, 20 nt, Human
aaccuucucuucagaagaaa

SEQ ID NO: 1071239 - RNA, 20 nt, Human
aacuggucagugaucaguag

SEQ ID NO: 1071240 - RNA, 22 nt, Human
aagaaaacaaaagcaaaauuaa

SEQ ID NO: 1071241 - RNA, 24 nt, Human
aagcaaaauuaaaaaccacccugg

SEQ ID NO: 1071242 - RNA, 25 nt, Human
accgugaaaagugagcgacagagga

SEQ ID NO: 1071243 - RNA, 20 nt, Human
agaagaaaacaaaagcaaaa

SEQ ID NO: 1071244 - RNA, 21 nt, Human
agaaggagacaaccgugaaaa

SEQ ID NO: 1071245 - RNA, 19 nt, Human
agcaaaauuaaaaaccacc

SEQ ID NO: 1071246 - RNA, 20 nt, Human
augcugcccuggggccaaac

SEQ ID NO: 1071247 - RNA, 22 nt, Human
cacuccucccagggcccauucc

SEQ ID NO: 1071248 - RNA, 18 nt, Human
ccaaaugcaguggcuuaa

SEQ ID NO: 1071249 - RNA, 21 nt, Human
ccagggcccauuccaaccagg

SEQ ID NO: 1071250 - RNA, 20 nt, Human
cucccagggcccauuccaac

SEQ ID NO: 1071251 - RNA, 22 nt, Human
cugguguuuaacaaccuucucu

SEQ ID NO: 1071252 - RNA, 22 nt, Human
gggaaagauuucaagcccaggg

SEQ ID NO: 1071253 - RNA, 21 nt, Human
uaaacaacuacuuauuucuca

SEQ ID NO: 1071254 - RNA, 20 nt, Human
uaauaaaccaccccaaaugc

SEQ ID NO: 1071255 - RNA, 27 nt, Human
ucccagggcccauuccaaccaggccaa

SEQ ID NO: 1071256 - RNA, 24 nt, Human
ucucaugauuauaugcuggcugcc

SEQ ID NO: 1071257 - RNA, 23 nt, Human
ucucuucagaagaaaacaaaagc

SEQ ID NO: 1071258 - RNA, 22 nt, Human
ugcaaacacuccucccagggcc

SEQ ID NO: 1071259 - RNA, 22 nt, Human
uugugccgcgggaaagauuuca

SEQ ID NO: 1071260 - RNA, 25 nt, Human
uuugaagcauuuaccaauuuccaca

SEQ ID NO: 1071261 - RNA, 23 nt, Human
uuugugccgcgggaaagauuuca

SEQ ID NO: 1071262 - RNA, 23 nt, Human
aaacuauuccaaaaaccacaaag

SEQ ID NO: 1071263 - RNA, 24 nt, Human
aaacuauuccaaaaaccacaaaga

SEQ ID NO: 1071264 - RNA, 20 nt, Human
aaagagcccaccuuacaugu

SEQ ID NO: 1071265 - RNA, 21 nt, Human
acauguuuagaaaaugaaaau

SEQ ID NO: 1071266 - RNA, 20 nt, Human
aguauggaauggcaauugga

SEQ ID NO: 1071267 - RNA, 18 nt, Human
aucacaugaaaauaccac

SEQ ID NO: 1071268 - RNA, 19 nt, Human
auucauugauggaagaggu

SEQ ID NO: 1071269 - RNA, 21 nt, Human
caccaauaaaaacuaugacag

SEQ ID NO: 1071270 - RNA, 22 nt, Human
cagauuccucuaccacaacuaa

SEQ ID NO: 1071271 - RNA, 20 nt, Human
caguaacaguaaaaacaaaa

SEQ ID NO: 1071272 - RNA, 22 nt, Human
ccacuaccaccaauaaaaacua

SEQ ID NO: 1071273 - RNA, 23 nt, Human
ccacuuaaacuauuccaaaaacc

SEQ ID NO: 1071274 - RNA, 23 nt, Human
ccaugaauauucauugauggaag

SEQ ID NO: 1071275 - RNA, 26 nt, Human
gucuuuuuuuguauuacacuuuuggu

SEQ ID NO: 1071276 - RNA, 19 nt, Human
uaaaaaacauuccaauggu

SEQ ID NO: 1071277 - RNA, 19 nt, Human
uaaaacacagagauggaaa

SEQ ID NO: 1071278 - RNA, 20 nt, Human
uacuauuuaaaacacagaga

SEQ ID NO: 1071279 - RNA, 18 nt, Human
uagaauaacauggugaaa

SEQ ID NO: 1071280 - RNA, 18 nt, Human
uagaauaacauggugaaa

SEQ ID NO: 1071281 - RNA, 21 nt, Human
uaguauuacuagugguaagca

SEQ ID NO: 1071282 - RNA, 23 nt, Human
uauaaauaauaaguuugcauccu

SEQ ID NO: 1071283 - RNA, 25 nt, Human
uaugacaguaacaguaaaaacaaaa

SEQ ID NO: 1071284 - RNA, 20 nt, Human
uauucauugauggaagaggu

SEQ ID NO: 1071285 - RNA, 23 nt, Human
uccaaaaaccacaaagacaaaua

SEQ ID NO: 1071286 - RNA, 19 nt, Human
ucuuagugucaaagagccc

SEQ ID NO: 1071287 - RNA, 18 nt, Human
ucuuuuuccuccucuuuc

SEQ ID NO: 1071288 - RNA, 20 nt, Human
ucuuuuuuuguauuacacuu

SEQ ID NO: 1071289 - RNA, 19 nt, Human
ugaaaauaccacuaccacc

SEQ ID NO: 1071290 - RNA, 19 nt, Human
ugaauaacaaguuaauagu

SEQ ID NO: 1071291 - RNA, 23 nt, Human
ugaauaaguauaggagagaaggg

SEQ ID NO: 1071292 - RNA, 26 nt, Human
ugacaguaacaguaaaaacaaaaaaa

SEQ ID NO: 1071293 - RNA, 23 nt, Human
uggaagcacccagauuccucuac

SEQ ID NO: 1071294 - RNA, 21 nt, Human
uggaaugaucuuaagcaccuu

SEQ ID NO: 1071295 - RNA, 25 nt, Human
uggcagaaaauuacagcaagucuuu

SEQ ID NO: 1071296 - RNA, 23 nt, Human
ugguuguuaugaacuuggaauga

SEQ ID NO: 1071297 - RNA, 23 nt, Human
uuacaaaguugauccaugaauau

SEQ ID NO: 1071298 - RNA, 24 nt, Human
uuagaauaacauggugaaaucuua

SEQ ID NO: 1071299 - RNA, 18 nt, Human
uuagauaccuuaauaucc

SEQ ID NO: 1071300 - RNA, 19 nt, Human
uuuagaaaaugaaaauucc

SEQ ID NO: 1071301 - RNA, 18 nt, Human
uuuuguuucuuuguuuua

SEQ ID NO: 1071302 - RNA, 21 nt, Human
uuuuuuuuuuuuucugucuuu

SEQ ID NO: 1071303 - RNA, 19 nt, Human
cagugacucuucugagcuc

SEQ ID NO: 1071304 - RNA, 22 nt, Human
ggcacggaagggaucagggcag

SEQ ID NO: 1071305 - RNA, 23 nt, Human
ucccugguuuugucuugcuuccu

SEQ ID NO: 1071306 - RNA, 20 nt, Human
aaaaauagaugcuuuuacug

SEQ ID NO: 1071307 - RNA, 21 nt, Human
aaaccgacagcugagcuccga

SEQ ID NO: 1071308 - RNA, 22 nt, Human
aaauacaucagucauuuugccc

SEQ ID NO: 1071309 - RNA, 20 nt, Human
aacuguggagugcauucagg

SEQ ID NO: 1071310 - RNA, 22 nt, Human
aaucuccccuccucaccuccac

SEQ ID NO: 1071311 - RNA, 30 nt, Human
acaccaaaacaaggagaccaccaccuagcu

SEQ ID NO: 1071312 - RNA, 22 nt, Human
accccgggccggccccagcccc

SEQ ID NO: 1071313 - RNA, 20 nt, Human
acggaaucuccccuccucac

SEQ ID NO: 1071314 - RNA, 20 nt, Human
acgggacacuggcaaggcca

SEQ ID NO: 1071315 - RNA, 21 nt, Human
acuugguuuugacaucaaggg

SEQ ID NO: 1071316 - RNA, 18 nt, Human
agaaaaugcacucucugu

SEQ ID NO: 1071317 - RNA, 21 nt, Human
agagguaccccucuucccuca

SEQ ID NO: 1071318 - RNA, 20 nt, Human
aggacacaugggguggcagg

SEQ ID NO: 1071319 - RNA, 22 nt, Human
aggcuccagaggcugagcaccu

SEQ ID NO: 1071320 - RNA, 18 nt, Human
agggagcucaagccccag

SEQ ID NO: 1071321 - RNA, 21 nt, Human
aggggggaggaaggcucagag

SEQ ID NO: 1071322 - RNA, 22 nt, Human
agugucucuuuaaaccgacagc

SEQ ID NO: 1071323 - RNA, 23 nt, Human
caaaucuuugacacuggagggca

SEQ ID NO: 1071324 - RNA, 21 nt, Human
caaccuccuggcucaacaucc

SEQ ID NO: 1071325 - RNA, 18 nt, Human
caagggcacuccauggac

SEQ ID NO: 1071326 - RNA, 22 nt, Human
cacagagggagcucaagcccca

SEQ ID NO: 1071327 - RNA, 22 nt, Human
cacagugcuggcuucuggggug

SEQ ID NO: 1071328 - RNA, 18 nt, Human
cacaugggguggcagggc

SEQ ID NO: 1071329 - RNA, 18 nt, Human
cacaugggguggcagggc

SEQ ID NO: 1071330 - RNA, 19 nt, Human
caccaaaacaaggagacca

SEQ ID NO: 1071331 - RNA, 20 nt, Human
caccaaaacaaggagaccac

SEQ ID NO: 1071332 - RNA, 21 nt, Human
caccaccuaacagugcaugcc

SEQ ID NO: 1071333 - RNA, 24 nt, Human
cacuugguuuugacaucaaggguu

SEQ ID NO: 1071334 - RNA, 20 nt, Human
cagcaccccgggccggcccc

SEQ ID NO: 1071335 - RNA, 19 nt, Human
cagcacccugccacagugc

SEQ ID NO: 1071336 - RNA, 21 nt, Human
cagcacccugccacagugcug

SEQ ID NO: 1071337 - RNA, 20 nt, Human
cagcagcagggaagagaggu

SEQ ID NO: 1071338 - RNA, 18 nt, Human
cagcggggagccgccucc

SEQ ID NO: 1071339 - RNA, 20 nt, Human
cagcggggagccgccuccuu

SEQ ID NO: 1071340 - RNA, 21 nt, Human
cagucauuuugccccuccugg

SEQ ID NO: 1071341 - RNA, 25 nt, Human
caucccacaggcaggggugagccug

SEQ ID NO: 1071342 - RNA, 18 nt, Human
caucguguccauccuccc

SEQ ID NO: 1071343 - RNA, 21 nt, Human
ccaccuaacagugcaugcccc

SEQ ID NO: 1071344 - RNA, 20 nt, Human
ccccaggcugggggcucccc

SEQ ID NO: 1071345 - RNA, 21 nt, Human
ccccagggaaccuuccccucc

SEQ ID NO: 1071346 - RNA, 21 nt, Human
ccccagggcucccggcuccuc

SEQ ID NO: 1071347 - RNA, 21 nt, Human
ccccgggccggccccagcccc

SEQ ID NO: 1071348 - RNA, 18 nt, Human
ccccucuucccucacaca

SEQ ID NO: 1071349 - RNA, 20 nt, Human
ccccugacccuggggguggc

SEQ ID NO: 1071350 - RNA, 20 nt, Human
cccgugcauccuggcuuguu

SEQ ID NO: 1071351 - RNA, 20 nt, Human
ccgacagcugagcuccgacu

SEQ ID NO: 1071352 - RNA, 20 nt, Human
ccucccuucccgccuccugc

SEQ ID NO: 1071353 - RNA, 21 nt, Human
ccuccugcccgagugccaggc

SEQ ID NO: 1071354 - RNA, 23 nt, Human
ccugcaggugaggcuccagaggc

SEQ ID NO: 1071355 - RNA, 18 nt, Human
ccuguaggucagggcagg

SEQ ID NO: 1071356 - RNA, 21 nt, Human
ccuuggccaccagccuaggac

SEQ ID NO: 1071357 - RNA, 22 nt, Human
cgaguucagacccggccucaca

SEQ ID NO: 1071358 - RNA, 22 nt, Human
cggugcaaccugcaugugugcg

SEQ ID NO: 1071359 - RNA, 24 nt, Human
cucacaacaucccacaggcagggg

SEQ ID NO: 1071360 - RNA, 22 nt, Human
cuccccuccucaccuccacaga

SEQ ID NO: 1071361 - RNA, 20 nt, Human
cuccuggcucaacauccgcc

SEQ ID NO: 1071362 - RNA, 21 nt, Human
cucugggggaguggcagccgu

SEQ ID NO: 1071363 - RNA, 19 nt, Human
cugaggcugggaugccucu

SEQ ID NO: 1071364 - RNA, 23 nt, Human
cugaggcugggaugccucugucc

SEQ ID NO: 1071365 - RNA, 19 nt, Human
cugcugggcugccccaggc

SEQ ID NO: 1071366 - RNA, 19 nt, Human
cuggcagccucccuucccg

SEQ ID NO: 1071367 - RNA, 25 nt, Human
cuggcagccucccuucccgccuccu

SEQ ID NO: 1071368 - RNA, 22 nt, Human
cuugacaccaaaacaaggagac

SEQ ID NO: 1071369 - RNA, 22 nt, Human
cuugccagcuuaagugcuaaaa

SEQ ID NO: 1071370 - RNA, 19 nt, Human
gaaauaccccaggccagca

SEQ ID NO: 1071371 - RNA, 21 nt, Human
gaacggaaucuccccuccuca

SEQ ID NO: 1071372 - RNA, 24 nt, Human
gaagagagguaccccucuucccuc

SEQ ID NO: 1071373 - RNA, 18 nt, Human
gacacuggagggcacggg

SEQ ID NO: 1071374 - RNA, 20 nt, Human
gcaggcagcggggagccgcc

SEQ ID NO: 1071375 - RNA, 23 nt, Human
gccacagugcuggcuucuggggu

SEQ ID NO: 1071376 - RNA, 19 nt, Human
gcugagggcggcagcccgg

SEQ ID NO: 1071377 - RNA, 18 nt, Human
ggcagcccccaacugugg

SEQ ID NO: 1071378 - RNA, 18 nt, Human
ggcuucuccccagggcuc

SEQ ID NO: 1071379 - RNA, 22 nt, Human
gggcucugggggaguggcagcc

SEQ ID NO: 1071380 - RNA, 20 nt, Human
ggggaggaaggcucagaggg

SEQ ID NO: 1071381 - RNA, 21 nt, Human
ggggggaggaaggcucagagg

SEQ ID NO: 1071382 - RNA, 21 nt, Human
ggguccuuggucuggcagccu

SEQ ID NO: 1071383 - RNA, 22 nt, Human
guccccucagugucucuuuaaa

SEQ ID NO: 1071384 - RNA, 23 nt, Human
gugccaggccgagcucaucgugu

SEQ ID NO: 1071385 - RNA, 19 nt, Human
guuuugacaucaaggguuc

SEQ ID NO: 1071386 - RNA, 23 nt, Human
uaaccagacagcaucucuggaga

SEQ ID NO: 1071387 - RNA, 18 nt, Human
uacaucagucauuuugcc

SEQ ID NO: 1071388 - RNA, 18 nt, Human
uaccccaggccagcagcu

SEQ ID NO: 1071389 - RNA, 21 nt, Human
uaggacacaugggguggcagg

SEQ ID NO: 1071390 - RNA, 19 nt, Human
uaggucagggcaggcagcg

SEQ ID NO: 1071391 - RNA, 20 nt, Human
uaggucagggcaggcagcgg

SEQ ID NO: 1071392 - RNA, 20 nt, Human
ucacacauggccuuggccac

SEQ ID NO: 1071393 - RNA, 23 nt, Human
ucaccgccuccacugggcacuug

SEQ ID NO: 1071394 - RNA, 24 nt, Human
uccauggacccauucuuuuccccu

SEQ ID NO: 1071395 - RNA, 19 nt, Human
uccccagggcucccggcuc

SEQ ID NO: 1071396 - RNA, 25 nt, Human
ucccccagcuccccgugcauccugg

SEQ ID NO: 1071397 - RNA, 18 nt, Human
uccccgugcauccuggcu

SEQ ID NO: 1071398 - RNA, 19 nt, Human
ucccucacacauggccuug

SEQ ID NO: 1071399 - RNA, 23 nt, Human
ucccucgaguucagacccggccu

SEQ ID NO: 1071400 - RNA, 22 nt, Human
uccggccuuugcccaaccuccu

SEQ ID NO: 1071401 - RNA, 21 nt, Human
ucuccccagcacccugccaca

SEQ ID NO: 1071402 - RNA, 18 nt, Human
ucucuggagagaaaaugc

SEQ ID NO: 1071403 - RNA, 20 nt, Human
ucucuggagagaaaaugcaa

SEQ ID NO: 1071404 - RNA, 21 nt, Human
ucugaggggggaggaaggcuc

SEQ ID NO: 1071405 - RNA, 20 nt, Human
ugaguccuugacaccaaaac

SEQ ID NO: 1071406 - RNA, 24 nt, Human
ugcucggggcuguucucugcuuca

SEQ ID NO: 1071407 - RNA, 18 nt, Human
uggcaggggcagccccca

SEQ ID NO: 1071408 - RNA, 22 nt, Human
uggcaggggcagcccccaacug

SEQ ID NO: 1071409 - RNA, 23 nt, Human
uggcaggggcagcccccaacugu

SEQ ID NO: 1071410 - RNA, 19 nt, Human
ugggcacuugguuuugaca

SEQ ID NO: 1071411 - RNA, 18 nt, Human
ugggcugccccaggcugg

SEQ ID NO: 1071412 - RNA, 18 nt, Human
uggggacgcccugcaggu

SEQ ID NO: 1071413 - RNA, 22 nt, Human
uggugcguggauggguguuagc

SEQ ID NO: 1071414 - RNA, 24 nt, Human
uguccauccucccggcuucucccc

SEQ ID NO: 1071415 - RNA, 21 nt, Human
ugucuggcucauguuccucuc

SEQ ID NO: 1071416 - RNA, 18 nt, Human
uucaagggcacuccaugg

SEQ ID NO: 1071417 - RNA, 18 nt, Human
uuccacacggguccuugg

SEQ ID NO: 1071418 - RNA, 21 nt, Human
uugguuuugacaucaaggguu

SEQ ID NO: 1071419 - RNA, 21 nt, Human
uuuacugaguccuugacacca

SEQ ID NO: 1071420 - RNA, 19 nt, Human
aaauauuucuugggucaau

SEQ ID NO: 1071421 - RNA, 18 nt, Human
aagaugugucucuuggau

SEQ ID NO: 1071422 - RNA, 22 nt, Human
agaagcucucuuaucuuccaaa

SEQ ID NO: 1071423 - RNA, 20 nt, Human
caaagaugugucucuuggau

SEQ ID NO: 1071424 - RNA, 22 nt, Human
caacaaaucaaucucacauaug

SEQ ID NO: 1071425 - RNA, 21 nt, Human
caagcaggcuccucggggucc

SEQ ID NO: 1071426 - RNA, 23 nt, Human
cacauaugccuccucagaaacaa

SEQ ID NO: 1071427 - RNA, 21 nt, Human
cacuuggcaugaaccaacaaa

SEQ ID NO: 1071428 - RNA, 22 nt, Human
cagagguccacauucaaaguca

SEQ ID NO: 1071429 - RNA, 24 nt, Human
cagcaagcaggcuccucggggucc

SEQ ID NO: 1071430 - RNA, 23 nt, Human
cagcagccuucugcgcugggugc

SEQ ID NO: 1071431 - RNA, 22 nt, Human
caugaaccaacaaaucaaucuc

SEQ ID NO: 1071432 - RNA, 19 nt, Human
ccaggccgcgggcgccgcg

SEQ ID NO: 1071433 - RNA, 21 nt, Human
ccccuggaaucuuccucuucc

SEQ ID NO: 1071434 - RNA, 20 nt, Human
ccccuguaucgaaggaugag

SEQ ID NO: 1071435 - RNA, 21 nt, Human
ccugccugucuuucuacggaa

SEQ ID NO: 1071436 - RNA, 24 nt, Human
cgggaugcucgccuccucugccgg

SEQ ID NO: 1071437 - RNA, 18 nt, Human
cucagagguccacauuca

SEQ ID NO: 1071438 - RNA, 18 nt, Human
gaacacacuuggcaugaa

SEQ ID NO: 1071439 - RNA, 21 nt, Human
gaacacacuuggcaugaacca

SEQ ID NO: 1071440 - RNA, 20 nt, Human
gaaccaacaaaucaaucuca

SEQ ID NO: 1071441 - RNA, 19 nt, Human
gagagccauccugcgugga

SEQ ID NO: 1071442 - RNA, 24 nt, Human
gcagcagccuucugcgcugggugc

SEQ ID NO: 1071443 - RNA, 21 nt, Human
gccggacgcagggcgccucca

SEQ ID NO: 1071444 - RNA, 20 nt, Human
gcgcugggugcgcgaggggu

SEQ ID NO: 1071445 - RNA, 20 nt, Human
gcggcagcagccuucugcgc

SEQ ID NO: 1071446 - RNA, 24 nt, Human
ggacaccucacaggugcgccuccg

SEQ ID NO: 1071447 - RNA, 22 nt, Human
gggaauucccuacauggguauc

SEQ ID NO: 1071448 - RNA, 20 nt, Human
uacaggguuuccuuccuagu

SEQ ID NO: 1071449 - RNA, 21 nt, Human
uagaaaaaggacuguacagua

SEQ ID NO: 1071450 - RNA, 26 nt, Human
uaucaugccgucuccuuuuuuggucu

SEQ ID NO: 1071451 - RNA, 23 nt, Human
ucaaucucacauaugccuccuca

SEQ ID NO: 1071452 - RNA, 21 nt, Human
ucacaggugcgccuccgagcc

SEQ ID NO: 1071453 - RNA, 20 nt, Human
uccuuuuuuggucuugaaga

SEQ ID NO: 1071454 - RNA, 22 nt, Human
ucugcgcugggugcgcgagggg

SEQ ID NO: 1071455 - RNA, 22 nt, Human
ucugugacugggaccugagagc

SEQ ID NO: 1071456 - RNA, 18 nt, Human
ugacugggaccugagagc

SEQ ID NO: 1071457 - RNA, 18 nt, Human
ugacuuccacgugaauuc

SEQ ID NO: 1071458 - RNA, 20 nt, Human
ugagccccuggaaucuuccu

SEQ ID NO: 1071459 - RNA, 18 nt, Human
ugcgcugggugcgcgagg

SEQ ID NO: 1071460 - RNA, 21 nt, Human
ugcucagagguccacauucaa

SEQ ID NO: 1071461 - RNA, 21 nt, Human
uuccaaagaugugucucuugg

SEQ ID NO: 1071462 - RNA, 20 nt, Human
uucccugccugucuuucuac

SEQ ID NO: 1071463 - RNA, 23 nt, Human
aaaagccucgaccgcuacgacuc

SEQ ID NO: 1071464 - RNA, 21 nt, Human
aaaauugagcauaaaguugcu

SEQ ID NO: 1071465 - RNA, 19 nt, Human
aaguaaugacuccauacau

SEQ ID NO: 1071466 - RNA, 19 nt, Human
agcauaaaguugcugauac

SEQ ID NO: 1071467 - RNA, 20 nt, Human
aggcccaaagguagcagcag

SEQ ID NO: 1071468 - RNA, 19 nt, Human
ccaaagguagcagcagcaa

SEQ ID NO: 1071469 - RNA, 22 nt, Human
ccagcaggcuauuucaagguca

SEQ ID NO: 1071470 - RNA, 19 nt, Human
cuacugcgaagcggggugg

SEQ ID NO: 1071471 - RNA, 22 nt, Human
gauuccuuucaaaaguuaagag

SEQ ID NO: 1071472 - RNA, 25 nt, Human
gccggagccgcaaaagccucgaccg

SEQ ID NO: 1071473 - RNA, 25 nt, Human
gggauuuuuuacacaacauguauau

SEQ ID NO: 1071474 - RNA, 23 nt, Human
ggugaaaaaauaagggauuccuu

SEQ ID NO: 1071475 - RNA, 19 nt, Human
guucaguagggcagcucag

SEQ ID NO: 1071476 - RNA, 20 nt, Human
guuuuguagugaaccuugag

SEQ ID NO: 1071477 - RNA, 23 nt, Human
uaaaaauaauuggcuaaguccua

SEQ ID NO: 1071478 - RNA, 25 nt, Human
uaaaauggagaaauaagcuaaaaau

SEQ ID NO: 1071479 - RNA, 21 nt, Human
uaagcuaaaaauaauuggcua

SEQ ID NO: 1071480 - RNA, 25 nt, Human
uaccaggaacuguuuguuuuguagu

SEQ ID NO: 1071481 - RNA, 27 nt, Human
uaucaaagaagguaauugauacacaac

SEQ ID NO: 1071482 - RNA, 28 nt, Human
uaucaaagaagguaauugauacacaaca

SEQ ID NO: 1071483 - RNA, 22 nt, Human
uauuuccuuuuaucaaagaagg

SEQ ID NO: 1071484 - RNA, 21 nt, Human
uccauacauauuauuuauuuc

SEQ ID NO: 1071485 - RNA, 19 nt, Human
uccggcacgccggagccgc

SEQ ID NO: 1071486 - RNA, 18 nt, Human
ucuacugcgaagcggggu

SEQ ID NO: 1071487 - RNA, 25 nt, Human
ucuccguaugaacagaaguugaaac

SEQ ID NO: 1071488 - RNA, 19 nt, Human
ugacuccauacauauuauu

SEQ ID NO: 1071489 - RNA, 24 nt, Human
uggcacugauagcuaaauuaaagu

SEQ ID NO: 1071490 - RNA, 20 nt, Human
uggcguugggggaggugggc

SEQ ID NO: 1071491 - RNA, 20 nt, Human
uggcuaaguccuauuaaguu

SEQ ID NO: 1071492 - RNA, 22 nt, Human
ugggggaggugggcaaccuguc

SEQ ID NO: 1071493 - RNA, 18 nt, Human
ugucaguaaaauggagaa

SEQ ID NO: 1071494 - RNA, 19 nt, Human
uucaaaauugggugcucau

SEQ ID NO: 1071495 - RNA, 25 nt, Human
uucaguagggcagcucagggauuuu

SEQ ID NO: 1071496 - RNA, 20 nt, Human
uuuaugcauaacauacgcag

SEQ ID NO: 1071497 - RNA, 23 nt, Human
uuuuacacaacauguauaucuuc

SEQ ID NO: 1071498 - RNA, 20 nt, Human
aacgccccaaggacagccag

SEQ ID NO: 1071499 - RNA, 20 nt, Human
aagccccugggcaggagccc

SEQ ID NO: 1071500 - RNA, 28 nt, Human
acugaaggagugacucaggaaggaggag

SEQ ID NO: 1071501 - RNA, 19 nt, Human
agacuuggaggaacuggca

SEQ ID NO: 1071502 - RNA, 24 nt, Human
agagggagaagacaggcgcaguca

SEQ ID NO: 1071503 - RNA, 19 nt, Human
agccuaauggcccuuggca

SEQ ID NO: 1071504 - RNA, 21 nt, Human
aggaacuggcacgaagccaag

SEQ ID NO: 1071505 - RNA, 18 nt, Human
aggaaggaggaggggaag

SEQ ID NO: 1071506 - RNA, 18 nt, Human
agugguugagagggaggg

SEQ ID NO: 1071507 - RNA, 23 nt, Human
augcaggauggaaagaaagauuc

SEQ ID NO: 1071508 - RNA, 22 nt, Human
caagccccugggcaggagcccu

SEQ ID NO: 1071509 - RNA, 21 nt, Human
caccuucuucgccggcagaau

SEQ ID NO: 1071510 - RNA, 21 nt, Human
cagaagaucccagcugaccac

SEQ ID NO: 1071511 - RNA, 19 nt, Human
cagcugccacagccuccug

SEQ ID NO: 1071512 - RNA, 23 nt, Human
cagggcuguggggcaggauagag

SEQ ID NO: 1071513 - RNA, 27 nt, Human
cagugacuuuccuccugcccccgguuu

SEQ ID NO: 1071514 - RNA, 21 nt, Human
caguuugcgauuucaccaguc

SEQ ID NO: 1071515 - RNA, 24 nt, Human
caugcaggauggaaagaaagauuc

SEQ ID NO: 1071516 - RNA, 20 nt, Human
ccaaggacagccaggaccca

SEQ ID NO: 1071517 - RNA, 21 nt, Human
ccccaaggacagccaggaccc

SEQ ID NO: 1071518 - RNA, 22 nt, Human
cccugaugguggcagaagaucc

SEQ ID NO: 1071519 - RNA, 22 nt, Human
ccuccugcccccgguuuguccc

SEQ ID NO: 1071520 - RNA, 19 nt, Human
ccucgucccgcugcuccuc

SEQ ID NO: 1071521 - RNA, 21 nt, Human
ccuuugcaaacagggguccgg

SEQ ID NO: 1071522 - RNA, 24 nt, Human
cggagaugccacaguggaugccac

SEQ ID NO: 1071523 - RNA, 22 nt, Human
cgucccgcugcuccucguccua

SEQ ID NO: 1071524 - RNA, 24 nt, Human
cguccuaaggaccucugcugccac

SEQ ID NO: 1071525 - RNA, 20 nt, Human
cuauuccaggaggggagcug

SEQ ID NO: 1071526 - RNA, 18 nt, Human
cucaggaaggaggagggg

SEQ ID NO: 1071527 - RNA, 21 nt, Human
cucaggaaggaggaggggaag

SEQ ID NO: 1071528 - RNA, 20 nt, Human
cuccaugaugauacgggguu

SEQ ID NO: 1071529 - RNA, 22 nt, Human
cucuauagucauguugagagcc

SEQ ID NO: 1071530 - RNA, 20 nt, Human
gaccacggccccuuucucug

SEQ ID NO: 1071531 - RNA, 24 nt, Human
gagaagacaggcgcagucagcagg

SEQ ID NO: 1071532 - RNA, 19 nt, Human
gagagggagggaggugcca

SEQ ID NO: 1071533 - RNA, 19 nt, Human
gagggauauuuucccacag

SEQ ID NO: 1071534 - RNA, 20 nt, Human
gccacaguggaugccacagc

SEQ ID NO: 1071535 - RNA, 19 nt, Human
gcccuguggccaugggauc

SEQ ID NO: 1071536 - RNA, 18 nt, Human
ggaacagacgcccaguuu

SEQ ID NO: 1071537 - RNA, 18 nt, Human
gggcagaggcagaugggc

SEQ ID NO: 1071538 - RNA, 20 nt, Human
ggucagagggagaagacagg

SEQ ID NO: 1071539 - RNA, 23 nt, Human
uacaaauccaggcagggcugugg

SEQ ID NO: 1071540 - RNA, 19 nt, Human
uagcugugcaggaugcaaa

SEQ ID NO: 1071541 - RNA, 20 nt, Human
ucaagugguugagagggagg

SEQ ID NO: 1071542 - RNA, 21 nt, Human
ucaccuucuucgccggcagaa

SEQ ID NO: 1071543 - RNA, 23 nt, Human
ucagugacuuuccuccugccccc

SEQ ID NO: 1071544 - RNA, 18 nt, Human
uccaggaggggagcugcc

SEQ ID NO: 1071545 - RNA, 23 nt, Human
uccaggaggggagcugcccugga

SEQ ID NO: 1071546 - RNA, 24 nt, Human
uccaugaugauacggggucucuau

SEQ ID NO: 1071547 - RNA, 23 nt, Human
uccuccugcccccgguuuguccc

SEQ ID NO: 1071548 - RNA, 25 nt, Human
uccugcccccgguuugucccugaug

SEQ ID NO: 1071549 - RNA, 20 nt, Human
ucugcccuuccucguccccc

SEQ ID NO: 1071550 - RNA, 19 nt, Human
ugagagggagggaggugcc

SEQ ID NO: 1071551 - RNA, 21 nt, Human
ugagagggagggaggugccau

SEQ ID NO: 1071552 - RNA, 21 nt, Human
ugcaaacagggguccggcgcc

SEQ ID NO: 1071553 - RNA, 20 nt, Human
ugccacagccuccuguggag

SEQ ID NO: 1071554 - RNA, 25 nt, Human
ugccacagccuccuguggagaccaa

SEQ ID NO: 1071555 - RNA, 21 nt, Human
ugccacagcugccacagccuc

SEQ ID NO: 1071556 - RNA, 24 nt, Human
ugccacaguggaugccacagcugc

SEQ ID NO: 1071557 - RNA, 22 nt, Human
ugcccuggaacgccccaaggac

SEQ ID NO: 1071558 - RNA, 19 nt, Human
ugcccuuccucgucccgcu

SEQ ID NO: 1071559 - RNA, 19 nt, Human
uggaugccacagcugccac

SEQ ID NO: 1071560 - RNA, 19 nt, Human
uggcagaagaucccagcug

SEQ ID NO: 1071561 - RNA, 22 nt, Human
ugggcaggacggagaugccaca

SEQ ID NO: 1071562 - RNA, 20 nt, Human
uggggucagagggagaagac

SEQ ID NO: 1071563 - RNA, 20 nt, Human
uucaggauucccgcauuuuc

SEQ ID NO: 1071564 - RNA, 25 nt, Human
uucccacaggaacaaaggucuccau

SEQ ID NO: 1071565 - RNA, 21 nt, Human
uuccucgucccgcugcuccuc

SEQ ID NO: 1071566 - RNA, 30 nt, Human
uuuccuccugcccccgguuugucccugauu

SEQ ID NO: 1071567 - RNA, 22 nt, Human
aauguuuacuggugagaaaguc

SEQ ID NO: 1071568 - RNA, 22 nt, Human
caggaacagccacaauguuuac

SEQ ID NO: 1071569 - RNA, 20 nt, Human
ccacaauguuuacuggugag

SEQ ID NO: 1071570 - RNA, 21 nt, Human
gcuuugcacucagcaguucca

SEQ ID NO: 1071571 - RNA, 22 nt, Human
uacaggaacagccacaauguuu

SEQ ID NO: 1071572 - RNA, 23 nt, Human
ucaguagggugacaguaacuucu

SEQ ID NO: 1071573 - RNA, 19 nt, Human
aaaaaaugacagaccccau

SEQ ID NO: 1071574 - RNA, 20 nt, Human
aaaacccaauucaagauaac

SEQ ID NO: 1071575 - RNA, 18 nt, Human
aacccaauucaagauaac

SEQ ID NO: 1071576 - RNA, 23 nt, Human
aacugggaccgacugaggaccug

SEQ ID NO: 1071577 - RNA, 18 nt, Human
aagauaacuuuagccaag

SEQ ID NO: 1071578 - RNA, 24 nt, Human
aaugauagcauccuucagaagaaa

SEQ ID NO: 1071579 - RNA, 24 nt, Human
acuacagccuucgacauuuacauc

SEQ ID NO: 1071580 - RNA, 22 nt, Human
acugcauuuuauugccuagggu

SEQ ID NO: 1071581 - RNA, 18 nt, Human
agggagcuucuuucucuu

SEQ ID NO: 1071582 - RNA, 22 nt, Human
cagacgcugccugcccucguuc

SEQ ID NO: 1071583 - RNA, 22 nt, Human
cagauucucauuuucaccccag

SEQ ID NO: 1071584 - RNA, 18 nt, Human
caucuuccagcuuccacc

SEQ ID NO: 1071585 - RNA, 23 nt, Human
caugacagaaaacccaauucaag

SEQ ID NO: 1071586 - RNA, 19 nt, Human
caugagccagagcuggcac

SEQ ID NO: 1071587 - RNA, 18 nt, Human
cauugggacccagcacag

SEQ ID NO: 1071588 - RNA, 23 nt, Human
cccaugcuggggcugggcaggac

SEQ ID NO: 1071589 - RNA, 26 nt, Human
ccccauccccagccccccugaaauga

SEQ ID NO: 1071590 - RNA, 19 nt, Human
ccccugaaaugacagugag

SEQ ID NO: 1071591 - RNA, 22 nt, Human
cccucaguuguuaggacccuau

SEQ ID NO: 1071592 - RNA, 22 nt, Human
cgcugccugcccucguuccgcu

SEQ ID NO: 1071593 - RNA, 18 nt, Human
cuccuggugccaaggugg

SEQ ID NO: 1071594 - RNA, 19 nt, Human
cugcccucagcagccucug

SEQ ID NO: 1071595 - RNA, 18 nt, Human
cugccugcccucguuccg

SEQ ID NO: 1071596 - RNA, 24 nt, Human
cuggaauggacagcagcucuuucu

SEQ ID NO: 1071597 - RNA, 21 nt, Human
cuggcaccauuugcugaccgg

SEQ ID NO: 1071598 - RNA, 19 nt, Human
gaacugggaccgacugagg

SEQ ID NO: 1071599 - RNA, 24 nt, Human
gaggugacaccuccucuaaucuca

SEQ ID NO: 1071600 - RNA, 24 nt, Human
gagugaccugggcagaggugacac

SEQ ID NO: 1071601 - RNA, 18 nt, Human
gauugcaugacagaaaac

SEQ ID NO: 1071602 - RNA, 18 nt, Human
gcccucagcagccucugu

SEQ ID NO: 1071603 - RNA, 19 nt, Human
ggaccaggagagaaaggcc

SEQ ID NO: 1071604 - RNA, 25 nt, Human
gggcuguaggugcccagagggggga

SEQ ID NO: 1071605 - RNA, 19 nt, Human
gggcuuuuuucugagugac

SEQ ID NO: 1071606 - RNA, 22 nt, Human
gucccccauccccagccccccu

SEQ ID NO: 1071607 - RNA, 18 nt, Human
uaacuuuagccaagaaag

SEQ ID NO: 1071608 - RNA, 24 nt, Human
uagcacugacagagggccggaguc

SEQ ID NO: 1071609 - RNA, 23 nt, Human
uagucccccauccccagcccccc

SEQ ID NO: 1071610 - RNA, 21 nt, Human
ucaacacgugggaacugggac

SEQ ID NO: 1071611 - RNA, 21 nt, Human
ucacccuggccaggugucccc

SEQ ID NO: 1071612 - RNA, 23 nt, Human
ucacuuugaaaccaagauaucac

SEQ ID NO: 1071613 - RNA, 25 nt, Human
ucauuuucaccccagucuccauggu

SEQ ID NO: 1071614 - RNA, 22 nt, Human
uccaggugugguggccuuuccu

SEQ ID NO: 1071615 - RNA, 18 nt, Human
uccaugagucauuuucug

SEQ ID NO: 1071616 - RNA, 23 nt, Human
uccaugcaccuuccaugagucau

SEQ ID NO: 1071617 - RNA, 22 nt, Human
uccccagccccccugaaaugac

SEQ ID NO: 1071618 - RNA, 25 nt, Human
ucccccauccccagccccccugaaa

SEQ ID NO: 1071619 - RNA, 23 nt, Human
ucccucaguuguuaggacccuau

SEQ ID NO: 1071620 - RNA, 20 nt, Human
uccuccuggugccaaggugg

SEQ ID NO: 1071621 - RNA, 23 nt, Human
ucucugucauagucccccauccc

SEQ ID NO: 1071622 - RNA, 24 nt, Human
ucucugucauagucccccaucccc

SEQ ID NO: 1071623 - RNA, 24 nt, Human
ugagucauuuucugugucugggag

SEQ ID NO: 1071624 - RNA, 20 nt, Human
ugauacaaaggcacagugcu

SEQ ID NO: 1071625 - RNA, 21 nt, Human
ugcccucguuccgcuucugac

SEQ ID NO: 1071626 - RNA, 18 nt, Human
ugcuaaaaaaugacagac

SEQ ID NO: 1071627 - RNA, 21 nt, Human
uggaaaagagggagcuucuuu

SEQ ID NO: 1071628 - RNA, 18 nt, Human
uggaauggacagcagcuc

SEQ ID NO: 1071629 - RNA, 18 nt, Human
uggcuuaggucucuguca

SEQ ID NO: 1071630 - RNA, 23 nt, Human
ugggcagaggugacaccuccucu

SEQ ID NO: 1071631 - RNA, 26 nt, Human
uggugccaagguggcugucaugcuuc

SEQ ID NO: 1071632 - RNA, 20 nt, Human
uguagaggaggaagaagguu

SEQ ID NO: 1071633 - RNA, 23 nt, Human
ugucugggagugcagaauaugcu

SEQ ID NO: 1071634 - RNA, 22 nt, Human
ugugguggccuuuccugauaca

SEQ ID NO: 1071635 - RNA, 22 nt, Human
uguugcauccucugcccucagc

SEQ ID NO: 1071636 - RNA, 19 nt, Human
uucucauuuucaccccagu

SEQ ID NO: 1071637 - RNA, 21 nt, Human
uucuguagaggaggaagaagg

SEQ ID NO: 1071638 - RNA, 22 nt, Human
uucugugucugggagugcagaa

SEQ ID NO: 1071639 - RNA, 18 nt, Human
uugguccaggugcucaca

SEQ ID NO: 1071640 - RNA, 22 nt, Human
uuuuguuagccuccuccuggug

SEQ ID NO: 1071641 - RNA, 22 nt, Human
uuuuucaucucuugcaauggaa

SEQ ID NO: 1071642 - RNA, 22 nt, Human
aaggauguugggcgucacuggc

SEQ ID NO: 1071643 - RNA, 23 nt, Human
cgcccacaaccacagcucgggcg

SEQ ID NO: 1071644 - RNA, 18 nt, Human
gaggaggcgccuuggacu

SEQ ID NO: 1071645 - RNA, 21 nt, Human
gcgcccacaaccacagcucgg

SEQ ID NO: 1071646 - RNA, 21 nt, Human
uauuucagaaagcccuaauug

SEQ ID NO: 1071647 - RNA, 21 nt, Human
ugcaccaguaaggauguuggg

SEQ ID NO: 1071648 - RNA, 18 nt, Human
ugggaggaggcgccuugg

SEQ ID NO: 1071649 - RNA, 25 nt, Human
uuguccggcgcccacaaccacagcu

SEQ ID NO: 1071650 - RNA, 22 nt, Human
aaggagcccgggagcccccugc

SEQ ID NO: 1071651 - RNA, 22 nt, Human
cagcaggaaguugaagacuucg

SEQ ID NO: 1071652 - RNA, 21 nt, Human
caggaauguggagacguagug

SEQ ID NO: 1071653 - RNA, 24 nt, Human
cgaauggucagggugcaguaauac

SEQ ID NO: 1071654 - RNA, 23 nt, Human
gagcccccugcagucugaagucc

SEQ ID NO: 1071655 - RNA, 19 nt, Human
guaggcgaacuuggccugg

SEQ ID NO: 1071656 - RNA, 19 nt, Human
uccggacaggaauguggag

SEQ ID NO: 1071657 - RNA, 18 nt, Human
ugccacggcacccaggag

SEQ ID NO: 1071658 - RNA, 18 nt, Human
ugcugggaaggagcccgg

SEQ ID NO: 1071659 - RNA, 18 nt, Human
ugggaaggagcccgggag

SEQ ID NO: 1071660 - RNA, 23 nt, Human
ugggaaggagcccgggagccccc

SEQ ID NO: 1071661 - RNA, 24 nt, Human
uucaaguagagccuggaaggaaac

SEQ ID NO: 1071662 - RNA, 19 nt, Human
aaaauaacggaaacacaga

SEQ ID NO: 1071663 - RNA, 23 nt, Human
aaacacagauauguuuaaaaucc

SEQ ID NO: 1071664 - RNA, 22 nt, Human
aaacucaaaagcauaacugaua

SEQ ID NO: 1071665 - RNA, 19 nt, Human
aacacucacaaaggggaag

SEQ ID NO: 1071666 - RNA, 18 nt, Human
aacacucaguuaaaagcu

SEQ ID NO: 1071667 - RNA, 19 nt, Human
aacauacuugacagcaaga

SEQ ID NO: 1071668 - RNA, 19 nt, Human
aaguagggugggaaaaaag

SEQ ID NO: 1071669 - RNA, 25 nt, Human
aagucacugaaagcuuacuggaacc

SEQ ID NO: 1071670 - RNA, 27 nt, Human
aauaacggaaacacagaagggagggcc

SEQ ID NO: 1071671 - RNA, 23 nt, Human
aauggagaacucucucacccaaa

SEQ ID NO: 1071672 - RNA, 23 nt, Human
acaaagagaacagacaaaaaucu

SEQ ID NO: 1071673 - RNA, 21 nt, Human
acaaagcaacucuuaggcccu

SEQ ID NO: 1071674 - RNA, 18 nt, Human
acagaaaggucucuaaac

SEQ ID NO: 1071675 - RNA, 21 nt, Human
accucccuuuuccaaugccaa

SEQ ID NO: 1071676 - RNA, 22 nt, Human
acuaaaucaaaacacuaaaauc

SEQ ID NO: 1071677 - RNA, 27 nt, Human
acuuuuuuuuuucuuuucgcucuuugg

SEQ ID NO: 1071678 - RNA, 25 nt, Human
agaccaaaagaauaaaauuuguauu

SEQ ID NO: 1071679 - RNA, 25 nt, Human
agagaacagacaaaaaucucaccac

SEQ ID NO: 1071680 - RNA, 26 nt, Human
agaguccuucucuuuuucuccucugg

SEQ ID NO: 1071681 - RNA, 23 nt, Human
agguaucaaagucacugaaagcu

SEQ ID NO: 1071682 - RNA, 24 nt, Human
aggugccccaaggaagacagaggc

SEQ ID NO: 1071683 - RNA, 21 nt, Human
auacaaagagaacagacaaaa

SEQ ID NO: 1071684 - RNA, 28 nt, Human
auacacuaaaucaaaacacuaaaaucau

SEQ ID NO: 1071685 - RNA, 22 nt, Human
caaacugauagccagacuauaa

SEQ ID NO: 1071686 - RNA, 22 nt, Human
caaagucacugaaagcuuacug

SEQ ID NO: 1071687 - RNA, 25 nt, Human
caacucaagaaacuuggggagguau

SEQ ID NO: 1071688 - RNA, 20 nt, Human
caagaccaaaagaauaaaau

SEQ ID NO: 1071689 - RNA, 19 nt, Human
caaugccaaguucauauga

SEQ ID NO: 1071690 - RNA, 23 nt, Human
cacagguaucugauuaaaagccu

SEQ ID NO: 1071691 - RNA, 20 nt, Human
cacuccuggcaaaguucuaa

SEQ ID NO: 1071692 - RNA, 22 nt, Human
cagacaaaaaucucaccacaaa

SEQ ID NO: 1071693 - RNA, 21 nt, Human
cagauugagaaacauacuuga

SEQ ID NO: 1071694 - RNA, 26 nt, Human
cagcaagauaucaaacugauagccag

SEQ ID NO: 1071695 - RNA, 21 nt, Human
caguucccaaaauaacggaaa

SEQ ID NO: 1071696 - RNA, 23 nt, Human
cauggcaacacaaaacccaagag

SEQ ID NO: 1071697 - RNA, 22 nt, Human
cauugcuguuugcaacuggaga

SEQ ID NO: 1071698 - RNA, 24 nt, Human
ccaauaauacugaacuauguagua

SEQ ID NO: 1071699 - RNA, 24 nt, Human
ccagggguagcauccagagcugag

SEQ ID NO: 1071700 - RNA, 18 nt, Human
cccaaaaaguaauucuca

SEQ ID NO: 1071701 - RNA, 22 nt, Human
ccucggagggcuauuucucacc

SEQ ID NO: 1071702 - RNA, 22 nt, Human
cggacuacacggcacaaagcaa

SEQ ID NO: 1071703 - RNA, 18 nt, Human
cuauguaguauacacuaa

SEQ ID NO: 1071704 - RNA, 20 nt, Human
cucccuuuuccaaugccaag

SEQ ID NO: 1071705 - RNA, 24 nt, Human
gaaacuuggggagguaucaaaguc

SEQ ID NO: 1071706 - RNA, 22 nt, Human
gaacagacaaaaaucucaccac

SEQ ID NO: 1071707 - RNA, 23 nt, Human
gaacagacaaaaaucucaccaca

SEQ ID NO: 1071708 - RNA, 21 nt, Human
gacaagaaaagaguuuuaggu

SEQ ID NO: 1071709 - RNA, 18 nt, Human
gagaacucucucacccaa

SEQ ID NO: 1071710 - RNA, 21 nt, Human
gagguaucaaagucacugaaa

SEQ ID NO: 1071711 - RNA, 24 nt, Human
gcauagacugcuuaaauucuccca

SEQ ID NO: 1071712 - RNA, 24 nt, Human
gcuucaacugaagaguuccugauu

SEQ ID NO: 1071713 - RNA, 21 nt, Human
ggagaacucucucacccaaaa

SEQ ID NO: 1071714 - RNA, 20 nt, Human
gguacuuaagccagcuggca

SEQ ID NO: 1071715 - RNA, 21 nt, Human
guccuuuuucuuuaccucccu

SEQ ID NO: 1071716 - RNA, 21 nt, Human
uaaaccaucaggagcaaacac

SEQ ID NO: 1071717 - RNA, 23 nt, Human
uaaaccaucaggagcaaacacuc

SEQ ID NO: 1071718 - RNA, 21 nt, Human
uaaacucaaaagcauaacuga

SEQ ID NO: 1071719 - RNA, 21 nt, Human
uaaauucucccaagaccaaaa

SEQ ID NO: 1071720 - RNA, 19 nt, Human
uaacaagcagcaacucaag

SEQ ID NO: 1071721 - RNA, 22 nt, Human
uaacaagcagcaacucaagaaa

SEQ ID NO: 1071722 - RNA, 21 nt, Human
uacacugauucaugaauggga

SEQ ID NO: 1071723 - RNA, 22 nt, Human
uaccgugcuuguuucaaacuca

SEQ ID NO: 1071724 - RNA, 19 nt, Human
uaccugagugacagauugg

SEQ ID NO: 1071725 - RNA, 19 nt, Human
uacuucagaagaccgauuu

SEQ ID NO: 1071726 - RNA, 26 nt, Human
uagccagacuauaaaauguauacauc

SEQ ID NO: 1071727 - RNA, 24 nt, Human
uaguaagcacuuuuuucuaguuca

SEQ ID NO: 1071728 - RNA, 21 nt, Human
uaguauacacuaaaucaaaac

SEQ ID NO: 1071729 - RNA, 24 nt, Human
uaguucacuccuggcaaaguucua

SEQ ID NO: 1071730 - RNA, 28 nt, Human
uaucaaaauaacucauaaacaaaaaaaa

SEQ ID NO: 1071731 - RNA, 24 nt, Human
uaucugauuaaaagccuuaaggac

SEQ ID NO: 1071732 - RNA, 23 nt, Human
ucaacugaagaguuccugauuac

SEQ ID NO: 1071733 - RNA, 21 nt, Human
ucaagcaucccucuccaugcu

SEQ ID NO: 1071734 - RNA, 21 nt, Human
ucacuuaccuccuaucauuca

SEQ ID NO: 1071735 - RNA, 23 nt, Human
ucccagggguagcauccagagcu

SEQ ID NO: 1071736 - RNA, 24 nt, Human
ucugacaagaaaagaguuuuaggu

SEQ ID NO: 1071737 - RNA, 19 nt, Human
ucuuuuuuucauuagccau

SEQ ID NO: 1071738 - RNA, 25 nt, Human
ugaaguagggugggaaaaaagguca

SEQ ID NO: 1071739 - RNA, 20 nt, Human
ugacagcaagauaucaaacu

SEQ ID NO: 1071740 - RNA, 20 nt, Human
ugauacaacaugaaaaucuc

SEQ ID NO: 1071741 - RNA, 20 nt, Human
ugaugaguugcauagacugc

SEQ ID NO: 1071742 - RNA, 23 nt, Human
ugcauagacugcuuaaauucucc

SEQ ID NO: 1071743 - RNA, 21 nt, Human
uggagaauuaaguagcagagg

SEQ ID NO: 1071744 - RNA, 22 nt, Human
uggcagaauaauaugcugagaa

SEQ ID NO: 1071745 - RNA, 20 nt, Human
uggggagguaucaaagucac

SEQ ID NO: 1071746 - RNA, 24 nt, Human
uuaaaauuuuucugucaacacugg

SEQ ID NO: 1071747 - RNA, 22 nt, Human
uuagcaugcugucaagcauccc

SEQ ID NO: 1071748 - RNA, 25 nt, Human
uucacauaacagcaguagauauccc

SEQ ID NO: 1071749 - RNA, 24 nt, Human
uuuuuuuucuuuucgcucuuuggu

SEQ ID NO: 1071750 - RNA, 22 nt, Human
aaaacguuuuuggaauaaaaua

SEQ ID NO: 1071751 - RNA, 20 nt, Human
guaagcuccucauccagucc

SEQ ID NO: 1071752 - RNA, 20 nt, Human
uccaagaaccagaaagcucc

SEQ ID NO: 1071753 - RNA, 22 nt, Human
aaaaagaagagaaauagagaaa

SEQ ID NO: 1071754 - RNA, 24 nt, Human
aaaaaggaugacagaauaaaagga

SEQ ID NO: 1071755 - RNA, 19 nt, Human
aaaaagucgaccagccuuc

SEQ ID NO: 1071756 - RNA, 23 nt, Human
aaaagaaagagaaaaaagaagag

SEQ ID NO: 1071757 - RNA, 21 nt, Human
aaaagaagagaaauagagaac

SEQ ID NO: 1071758 - RNA, 22 nt, Human
aaacagaugugagucaucuuau

SEQ ID NO: 1071759 - RNA, 19 nt, Human
aaacagcuguccugagagc

SEQ ID NO: 1071760 - RNA, 18 nt, Human
aaagaaaaaaagaaagag

SEQ ID NO: 1071761 - RNA, 19 nt, Human
aaagaaaaaaagaaagaga

SEQ ID NO: 1071762 - RNA, 20 nt, Human
aaagguaucaccagggucuu

SEQ ID NO: 1071763 - RNA, 22 nt, Human
aaaugucaauggcugcaagggc

SEQ ID NO: 1071764 - RNA, 18 nt, Human
aacuucugaugaaagcca

SEQ ID NO: 1071765 - RNA, 19 nt, Human
aagaaagagaaaaaagaag

SEQ ID NO: 1071766 - RNA, 18 nt, Human
aagaagagaaauagagaa

SEQ ID NO: 1071767 - RNA, 21 nt, Human
aagagacucgagagccagcca

SEQ ID NO: 1071768 - RNA, 20 nt, Human
aagagagaaaaguaaaaaag

SEQ ID NO: 1071769 - RNA, 22 nt, Human
aagaggaaauauuauaaccuga

SEQ ID NO: 1071770 - RNA, 24 nt, Human
aagaguucaaguuaaacagaugug

SEQ ID NO: 1071771 - RNA, 21 nt, Human
aauaguggaagcagaaagaaa

SEQ ID NO: 1071772 - RNA, 22 nt, Human
acaguugaauauauuuuccuca

SEQ ID NO: 1071773 - RNA, 19 nt, Human
accaucacuccuauaugcc

SEQ ID NO: 1071774 - RNA, 21 nt, Human
acucagagcucaagauggagg

SEQ ID NO: 1071775 - RNA, 24 nt, Human
agaaagccucaaacaaaaacguua

SEQ ID NO: 1071776 - RNA, 23 nt, Human
agaaagguaucaccagggucuuc

SEQ ID NO: 1071777 - RNA, 22 nt, Human
agacaggauggaucccaugggg

SEQ ID NO: 1071778 - RNA, 24 nt, Human
agacaggauggaucccauggggcc

SEQ ID NO: 1071779 - RNA, 26 nt, Human
agagaaaaaagaagagaaauagagaa

SEQ ID NO: 1071780 - RNA, 20 nt, Human
agagacucgagagccagccc

SEQ ID NO: 1071781 - RNA, 21 nt, Human
aggcacuugggagcccacgac

SEQ ID NO: 1071782 - RNA, 22 nt, Human
aggcuagaaccagguccuagaa

SEQ ID NO: 1071783 - RNA, 20 nt, Human
agggaaaaaaaggaugacag

SEQ ID NO: 1071784 - RNA, 25 nt, Human
agguauguccugggccuaauaugcu

SEQ ID NO: 1071785 - RNA, 21 nt, Human
aucuguuuccuugguguccag

SEQ ID NO: 1071786 - RNA, 21 nt, Human
auuuauaagucauguauguuu

SEQ ID NO: 1071787 - RNA, 19 nt, Human
cacagcagugcucaccgag

SEQ ID NO: 1071788 - RNA, 24 nt, Human
cacagcagugcucaccgagcgaaa

SEQ ID NO: 1071789 - RNA, 27 nt, Human
cagccuucagguauguccugggccuaa

SEQ ID NO: 1071790 - RNA, 25 nt, Human
cagcucuggaccccauuagccuccc

SEQ ID NO: 1071791 - RNA, 24 nt, Human
caggcauuaggugauccaucuccu

SEQ ID NO: 1071792 - RNA, 19 nt, Human
ccagcuccaguauccugcc

SEQ ID NO: 1071793 - RNA, 24 nt, Human
cccacgacaaacagcuguccugag

SEQ ID NO: 1071794 - RNA, 23 nt, Human
cccguguugcgacacgauuagga

SEQ ID NO: 1071795 - RNA, 22 nt, Human
cccugcugcugcucagucuugc

SEQ ID NO: 1071796 - RNA, 18 nt, Human
ccuagaacuugguggcac

SEQ ID NO: 1071797 - RNA, 20 nt, Human
ccucaguuuccuuguucagc

SEQ ID NO: 1071798 - RNA, 23 nt, Human
ccucaguuuccuuguucagcucu

SEQ ID NO: 1071799 - RNA, 19 nt, Human
ccucccagcuccaguaucc

SEQ ID NO: 1071800 - RNA, 20 nt, Human
ccugcgugucugggccuuug

SEQ ID NO: 1071801 - RNA, 20 nt, Human
ccuuucuuuauggcuaaaga

SEQ ID NO: 1071802 - RNA, 24 nt, Human
cgauuaggauuuuugcauaagagu

SEQ ID NO: 1071803 - RNA, 22 nt, Human
cggaaucauggugguagccccc

SEQ ID NO: 1071804 - RNA, 20 nt, Human
cuaaagaaaaaaagaaagag

SEQ ID NO: 1071805 - RNA, 21 nt, Human
cuccaguauccugcccauucc

SEQ ID NO: 1071806 - RNA, 18 nt, Human
cuguccugagagcucccu

SEQ ID NO: 1071807 - RNA, 21 nt, Human
cuguccugagagcucccuggg

SEQ ID NO: 1071808 - RNA, 23 nt, Human
cuucacaguugaauauauuuucc

SEQ ID NO: 1071809 - RNA, 19 nt, Human
gaaauauuauaaccugaaa

SEQ ID NO: 1071810 - RNA, 24 nt, Human
gagccagccacaauguugauccca

SEQ ID NO: 1071811 - RNA, 26 nt, Human
gagcccacgacaaacagcuguccuga

SEQ ID NO: 1071812 - RNA, 21 nt, Human
gagguagcggaaucauggugg

SEQ ID NO: 1071813 - RNA, 23 nt, Human
gaugacagaauaaaaggaaaaga

SEQ ID NO: 1071814 - RNA, 20 nt, Human
gcugaaccccuguaaacuca

SEQ ID NO: 1071815 - RNA, 23 nt, Human
gcugaaccccuguaaacucagga

SEQ ID NO: 1071816 - RNA, 20 nt, Human
gcugcugcucagucuugcuu

SEQ ID NO: 1071817 - RNA, 20 nt, Human
gggaaguguggcuggacccc

SEQ ID NO: 1071818 - RNA, 19 nt, Human
gggacuggggccuccagga

SEQ ID NO: 1071819 - RNA, 21 nt, Human
ggggaaguucucacacuggac

SEQ ID NO: 1071820 - RNA, 23 nt, Human
ggggacuggggccuccaggaggu

SEQ ID NO: 1071821 - RNA, 22 nt, Human
gggucuggacuuagguuuccca

SEQ ID NO: 1071822 - RNA, 18 nt, Human
guauccugcccauuccca

SEQ ID NO: 1071823 - RNA, 24 nt, Human
guauccugcccauucccaaaugac

SEQ ID NO: 1071824 - RNA, 25 nt, Human
uaauaugcugcuuuugguccuugga

SEQ ID NO: 1071825 - RNA, 21 nt, Human
uaccaguggcauuuugauggg

SEQ ID NO: 1071826 - RNA, 19 nt, Human
uacuagaaaagcagcacaa

SEQ ID NO: 1071827 - RNA, 23 nt, Human
uagccucccagcuccaguauccu

SEQ ID NO: 1071828 - RNA, 23 nt, Human
uauaaccugaaaaaugggacaga

SEQ ID NO: 1071829 - RNA, 24 nt, Human
ucaggcauuaggugauccaucucc

SEQ ID NO: 1071830 - RNA, 18 nt, Human
ucauggcaagacauaagc

SEQ ID NO: 1071831 - RNA, 23 nt, Human
ucauguauguuuuucagauuccu

SEQ ID NO: 1071832 - RNA, 19 nt, Human
ucccggaagacuccaccuu

SEQ ID NO: 1071833 - RNA, 19 nt, Human
uccuagaacuugguggcac

SEQ ID NO: 1071834 - RNA, 23 nt, Human
uccuuucuuuauggcuaaagaaa

SEQ ID NO: 1071835 - RNA, 26 nt, Human
ucuaggcuagaaccagguccuagaac

SEQ ID NO: 1071836 - RNA, 24 nt, Human
ucuggugcugaugaagcuuaagaa

SEQ ID NO: 1071837 - RNA, 19 nt, Human
ugaaccccuguaaacucag

SEQ ID NO: 1071838 - RNA, 18 nt, Human
ugacagaauaaaaggaaa

SEQ ID NO: 1071839 - RNA, 23 nt, Human
ugacagaauaaaaggaaaagaga

SEQ ID NO: 1071840 - RNA, 20 nt, Human
ugacccgauagacacaguaa

SEQ ID NO: 1071841 - RNA, 19 nt, Human
ugaugggggaaguucucac

SEQ ID NO: 1071842 - RNA, 20 nt, Human
ugcugcugcucagucuugcu

SEQ ID NO: 1071843 - RNA, 22 nt, Human
ugcuucaaccacgugguccauu

SEQ ID NO: 1071844 - RNA, 18 nt, Human
ugcuuggcugaaccccug

SEQ ID NO: 1071845 - RNA, 19 nt, Human
ugcuuggcugaaccccugu

SEQ ID NO: 1071846 - RNA, 24 nt, Human
uggcuaaagaaaaaaagaaagaga

SEQ ID NO: 1071847 - RNA, 19 nt, Human
uggggccuccaggaggugu

SEQ ID NO: 1071848 - RNA, 22 nt, Human
ugugaucaauaccucagguacc

SEQ ID NO: 1071849 - RNA, 22 nt, Human
uuacuagaaaagcagcacaacc

SEQ ID NO: 1071850 - RNA, 24 nt, Human
uucaggcauuaggugauccaucuc

SEQ ID NO: 1071851 - RNA, 20 nt, Human
uuccucaguuuccuuguucc

SEQ ID NO: 1071852 - RNA, 18 nt, Human
uucuccagugcccaacac

SEQ ID NO: 1071853 - RNA, 21 nt, Human
uuggcuucguuuuucuccagu

SEQ ID NO: 1071854 - RNA, 19 nt, Human
uuuccacaacuaauaaucu

SEQ ID NO: 1071855 - RNA, 24 nt, Human
uuuccacaacuaauaaucuaugaa

SEQ ID NO: 1071856 - RNA, 21 nt, Human
uuuuugguuaagacuuauuug

SEQ ID NO: 1071857 - RNA, 25 nt, Human
aaaccgggcccggcauugcaggaga

SEQ ID NO: 1071858 - RNA, 22 nt, Human
aagaaaccgggcccggcauugc

SEQ ID NO: 1071859 - RNA, 26 nt, Human
acaggaaaagggcccagagguggaga

SEQ ID NO: 1071860 - RNA, 19 nt, Human
accaugcaagggacacuga

SEQ ID NO: 1071861 - RNA, 22 nt, Human
accccgcggcguccgggcagcg

SEQ ID NO: 1071862 - RNA, 20 nt, Human
acgacacugugugaccuuga

SEQ ID NO: 1071863 - RNA, 23 nt, Human
acuuuggauuaaccacagcugug

SEQ ID NO: 1071864 - RNA, 18 nt, Human
aggccaggcaagcugaaa

SEQ ID NO: 1071865 - RNA, 23 nt, Human
auuuccccacucagaagaaacaa

SEQ ID NO: 1071866 - RNA, 24 nt, Human
caagggacacugaaagacggcagc

SEQ ID NO: 1071867 - RNA, 24 nt, Human
cacucagaagaaacaagagaguuu

SEQ ID NO: 1071868 - RNA, 18 nt, Human
cacugugugaccuugacu

SEQ ID NO: 1071869 - RNA, 22 nt, Human
cagaggcgcuucugagcugagg

SEQ ID NO: 1071870 - RNA, 23 nt, Human
caggagaauagagaacaggaaaa

SEQ ID NO: 1071871 - RNA, 21 nt, Human
ccagcgcucagaccggccgag

SEQ ID NO: 1071872 - RNA, 20 nt, Human
ccaggcaagcugaaauucac

SEQ ID NO: 1071873 - RNA, 23 nt, Human
cccacucagaagaaacaagagag

SEQ ID NO: 1071874 - RNA, 20 nt, Human
cccgcgccgagugcccuggg

SEQ ID NO: 1071875 - RNA, 21 nt, Human
cccugggcuggcggggacccc

SEQ ID NO: 1071876 - RNA, 18 nt, Human
ccggccgagcgcaacucc

SEQ ID NO: 1071877 - RNA, 20 nt, Human
cgagugcccugggcuggcgg

SEQ ID NO: 1071878 - RNA, 18 nt, Human
cucagaccggccgagcgc

SEQ ID NO: 1071879 - RNA, 23 nt, Human
cugacucugaagcugagggucug

SEQ ID NO: 1071880 - RNA, 25 nt, Human
cuggcucauccuccuccugagguuu

SEQ ID NO: 1071881 - RNA, 20 nt, Human
gaaagacggcagcugaccug

SEQ ID NO: 1071882 - RNA, 21 nt, Human
gagaacaggaaaagggcccag

SEQ ID NO: 1071883 - RNA, 23 nt, Human
gagggucugcagaagggagugug

SEQ ID NO: 1071884 - RNA, 19 nt, Human
gagggugcagaugacagcu

SEQ ID NO: 1071885 - RNA, 21 nt, Human
gagugcccugggcuggcgggg

SEQ ID NO: 1071886 - RNA, 24 nt, Human
gauccaaggccaggcaagcugaaa

SEQ ID NO: 1071887 - RNA, 21 nt, Human
gcaaggucuguggaaucugag

SEQ ID NO: 1071888 - RNA, 20 nt, Human
gcccugggcuggcggggacc

SEQ ID NO: 1071889 - RNA, 19 nt, Human
gccgacgagaagcugggcu

SEQ ID NO: 1071890 - RNA, 21 nt, Human
gcgaggcgcgcagauccccgc

SEQ ID NO: 1071891 - RNA, 18 nt, Human
ggaccuccacggacccaa

SEQ ID NO: 1071892 - RNA, 21 nt, Human
ggcaaggucuguggaaucuga

SEQ ID NO: 1071893 - RNA, 20 nt, Human
ggcugacucugaagcugagg

SEQ ID NO: 1071894 - RNA, 19 nt, Human
gggcccacaguaggggggg

SEQ ID NO: 1071895 - RNA, 20 nt, Human
guggagaugguaagaccaug

SEQ ID NO: 1071896 - RNA, 19 nt, Human
uaaccacagcuguggggcc

SEQ ID NO: 1071897 - RNA, 19 nt, Human
uacuuugccuuuuaguggc

SEQ ID NO: 1071898 - RNA, 24 nt, Human
uacuuugccuuuuaguggcuggcu

SEQ ID NO: 1071899 - RNA, 21 nt, Human
uagaagaaaccgggcccggca

SEQ ID NO: 1071900 - RNA, 18 nt, Human
uccccgcgccgagugccc

SEQ ID NO: 1071901 - RNA, 25 nt, Human
ucccuacuuugccuuuuaguggcug

SEQ ID NO: 1071902 - RNA, 23 nt, Human
uccuguguuugggagagcaccaa

SEQ ID NO: 1071903 - RNA, 23 nt, Human
ucugcagggaccuccacggaccc

SEQ ID NO: 1071904 - RNA, 24 nt, Human
ucugcagggaccuccacggaccca

SEQ ID NO: 1071905 - RNA, 25 nt, Human
ucugcagggaccuccacggacccaa

SEQ ID NO: 1071906 - RNA, 20 nt, Human
ugagggucugcagaagggag

SEQ ID NO: 1071907 - RNA, 23 nt, Human
ugcaagggacacugaaagacggc

SEQ ID NO: 1071908 - RNA, 21 nt, Human
ugcagaagggaguguggacga

SEQ ID NO: 1071909 - RNA, 21 nt, Human
uggacgacacugugugaccuu

SEQ ID NO: 1071910 - RNA, 23 nt, Human
ugggagagcaccaagaguagaag

SEQ ID NO: 1071911 - RNA, 20 nt, Human
uggggccgacgagaagcugg

SEQ ID NO: 1071912 - RNA, 18 nt, Human
uggggcuucugagcuucu

SEQ ID NO: 1071913 - RNA, 19 nt, Human
uuaguggcuggcucauccu

SEQ ID NO: 1071914 - RNA, 24 nt, Human
uugcuguugccuuuccugaaaucu

SEQ ID NO: 1071915 - RNA, 20 nt, Human
uugggcaugacaagcgacag

SEQ ID NO: 1071916 - RNA, 24 nt, Human
uuguuggacgacacugugugaccu

SEQ ID NO: 1071917 - RNA, 18 nt, Human
aaaccucaauuuaucauc

SEQ ID NO: 1071918 - RNA, 24 nt, Human
aaaguuuugggauuacaggcauga

SEQ ID NO: 1071919 - RNA, 20 nt, Human
acaccucuuccugauuccca

SEQ ID NO: 1071920 - RNA, 19 nt, Human
acaggcgcccgccaccaac

SEQ ID NO: 1071921 - RNA, 24 nt, Human
accaacaccuggcuaauuuuugua

SEQ ID NO: 1071922 - RNA, 21 nt, Human
acccaugugcuccuggccaca

SEQ ID NO: 1071923 - RNA, 25 nt, Human
acccgccucagccucccaaagugcu

SEQ ID NO: 1071924 - RNA, 18 nt, Human
acgggguuucuccauguu

SEQ ID NO: 1071925 - RNA, 20 nt, Human
acgggguuucuccauguugg

SEQ ID NO: 1071926 - RNA, 24 nt, Human
acgggguuucuccauguuggccag

SEQ ID NO: 1071927 - RNA, 24 nt, Human
acucuuguugcccaggcuggagug

SEQ ID NO: 1071928 - RNA, 21 nt, Human
acugcaaccucugccucccag

SEQ ID NO: 1071929 - RNA, 22 nt, Human
acugcaaccucugccucccagg

SEQ ID NO: 1071930 - RNA, 19 nt, Human
agaaagaggcugguuuagc

SEQ ID NO: 1071931 - RNA, 22 nt, Human
agaggcugguuuagcuggcuuc

SEQ ID NO: 1071932 - RNA, 18 nt, Human
agcugcugcaucccagaa

SEQ ID NO: 1071933 - RNA, 18 nt, Human
aggugaucaacccgccuc

SEQ ID NO: 1071934 - RNA, 21 nt, Human
agguucaagugauucuccugc

SEQ ID NO: 1071935 - RNA, 21 nt, Human
agguucaagugauucuccugc

SEQ ID NO: 1071936 - RNA, 22 nt, Human
agguucaagugauucuccugcc

SEQ ID NO: 1071937 - RNA, 22 nt, Human
agguucaagugauucuccugcc

SEQ ID NO: 1071938 - RNA, 23 nt, Human
agguucaagugauucuccugccu

SEQ ID NO: 1071939 - RNA, 23 nt, Human
agguucaagugauucuccugccu

SEQ ID NO: 1071940 - RNA, 22 nt, Human
aguagagacgggguuucuccau

SEQ ID NO: 1071941 - RNA, 22 nt, Human
aguagagaugggguuucuccau

SEQ ID NO: 1071942 - RNA, 18 nt, Human
aguagcugggauuacagg

SEQ ID NO: 1071943 - RNA, 21 nt, Human
aguagcugggauuacaggcau

SEQ ID NO: 1071944 - RNA, 24 nt, Human
agugauucuccugccucagccucc

SEQ ID NO: 1071945 - RNA, 24 nt, Human
agugcaauggcuugaucucggcuc

SEQ ID NO: 1071946 - RNA, 24 nt, Human
aguuuuguauuuuuaguagagaug

SEQ ID NO: 1071947 - RNA, 20 nt, Human
augggguuucuccauguugg

SEQ ID NO: 1071948 - RNA, 21 nt, Human
augggguuucuccauguuggu

SEQ ID NO: 1071949 - RNA, 24 nt, Human
augggguuucuccauguuggucag

SEQ ID NO: 1071950 - RNA, 18 nt, Human
auucuccugccucagccu

SEQ ID NO: 1071951 - RNA, 20 nt, Human
auugcacccggccaguuuac

SEQ ID NO: 1071952 - RNA, 24 nt, Human
auuuuuguauuuuuaguagagacg

SEQ ID NO: 1071953 - RNA, 22 nt, Human
caacccgccucagccucccaaa

SEQ ID NO: 1071954 - RNA, 20 nt, Human
caagugauucuccugccuca

SEQ ID NO: 1071955 - RNA, 22 nt, Human
caagugauucuccugccucaac

SEQ ID NO: 1071956 - RNA, 22 nt, Human
caagugauucuccugccucagc

SEQ ID NO: 1071957 - RNA, 18 nt, Human
caagugucuaccaaacac

SEQ ID NO: 1071958 - RNA, 21 nt, Human
caagugucuaccaaacaccag

SEQ ID NO: 1071959 - RNA, 21 nt, Human
cacaauauaugccagggcaag

SEQ ID NO: 1071960 - RNA, 21 nt, Human
caccacaacaucugccuccca

SEQ ID NO: 1071961 - RNA, 23 nt, Human
caccacaacaucugccucccagg

SEQ ID NO: 1071962 - RNA, 24 nt, Human
caccucuuccugauucccacaguc

SEQ ID NO: 1071963 - RNA, 18 nt, Human
cacguagcauagggcagc

SEQ ID NO: 1071964 - RNA, 24 nt, Human
cacucuuguugcccaggcuggagu

SEQ ID NO: 1071965 - RNA, 22 nt, Human
cagacagaacucaguuguaauc

SEQ ID NO: 1071966 - RNA, 20 nt, Human
cagccuccugaguagcuggg

SEQ ID NO: 1071967 - RNA, 18 nt, Human
caguaaagcaaucuacca

SEQ ID NO: 1071968 - RNA, 21 nt, Human
caguuguaauccuagcucuug

SEQ ID NO: 1071969 - RNA, 26 nt, Human
cauaaauaaggcacaauauaugccag

SEQ ID NO: 1071970 - RNA, 27 nt, Human
cauccugcugcuucuaguauuucucua

SEQ ID NO: 1071971 - RNA, 24 nt, Human
cauguuggccaggcuggucucaaa

SEQ ID NO: 1071972 - RNA, 24 nt, Human
cauguuggucaggcuggucuugaa

SEQ ID NO: 1071973 - RNA, 23 nt, Human
ccaaacaccagccacagauagcu

SEQ ID NO: 1071974 - RNA, 24 nt, Human
ccaaaguuuugggauuacaggcau

SEQ ID NO: 1071975 - RNA, 24 nt, Human
ccacaacacagugaagaccaccac

SEQ ID NO: 1071976 - RNA, 23 nt, Human
ccacaacaucugccucccagguu

SEQ ID NO: 1071977 - RNA, 24 nt, Human
ccacaacaucugccucccagguuc

SEQ ID NO: 1071978 - RNA, 27 nt, Human
ccaccacugccuuuccugcucuccuca

SEQ ID NO: 1071979 - RNA, 19 nt, Human
ccauguuggccaggcuggu

SEQ ID NO: 1071980 - RNA, 22 nt, Human
ccauguuggccaggcuggucuc

SEQ ID NO: 1071981 - RNA, 19 nt, Human
ccauguuggucaggcuggu

SEQ ID NO: 1071982 - RNA, 21 nt, Human
ccauguuggucaggcuggucu

SEQ ID NO: 1071983 - RNA, 18 nt, Human
ccauugcacccggccagu

SEQ ID NO: 1071984 - RNA, 24 nt, Human
cccaaaguuuugggauuacaggca

SEQ ID NO: 1071985 - RNA, 19 nt, Human
cccacagucucugagcauu

SEQ ID NO: 1071986 - RNA, 18 nt, Human
cccaggcuggagugcaau

SEQ ID NO: 1071987 - RNA, 19 nt, Human
cccaggcuggagugcaaug

SEQ ID NO: 1071988 - RNA, 23 nt, Human
cccagguucaagugauucuccuc

SEQ ID NO: 1071989 - RNA, 23 nt, Human
cccagguucaagugauucuccuc

SEQ ID NO: 1071990 - RNA, 23 nt, Human
cccagguucaagugauucuccug

SEQ ID NO: 1071991 - RNA, 23 nt, Human
cccagguucaagugauucuccug

SEQ ID NO: 1071992 - RNA, 18 nt, Human
cccgaccucaggugaucc

SEQ ID NO: 1071993 - RNA, 22 nt, Human
cccgaccucaggugauccgccc

SEQ ID NO: 1071994 - RNA, 23 nt, Human
cccgaguagcugggauuacaggc

SEQ ID NO: 1071995 - RNA, 24 nt, Human
cccgaguagcugggauuacaggca

SEQ ID NO: 1071996 - RNA, 21 nt, Human
cccgccugggacucccaaagu

SEQ ID NO: 1071997 - RNA, 23 nt, Human
ccgaguagcugggauuacaggca

SEQ ID NO: 1071998 - RNA, 24 nt, Human
ccgaguagcugggauuacaggcau

SEQ ID NO: 1071999 - RNA, 24 nt, Human
ccgccucagccucccaaagugcug

SEQ ID NO: 1072000 - RNA, 24 nt, Human
ccucccagguucaagugauucucc

SEQ ID NO: 1072001 - RNA, 24 nt, Human
ccucccagguucaagugauucucc

SEQ ID NO: 1072002 - RNA, 20 nt, Human
ccugaccucaggugaucaac

SEQ ID NO: 1072003 - RNA, 22 nt, Human
ccugaccucaggugaucaaccc

SEQ ID NO: 1072004 - RNA, 23 nt, Human
ccugaguagcugggauuacaggc

SEQ ID NO: 1072005 - RNA, 24 nt, Human
ccugaguagcugggauuacaggcg

SEQ ID NO: 1072006 - RNA, 23 nt, Human
ccugccucaaccucccgaguagc

SEQ ID NO: 1072007 - RNA, 24 nt, Human
ccugccucaaccucccgaguagcu

SEQ ID NO: 1072008 - RNA, 22 nt, Human
ccuuuccugcucuccucaggag

SEQ ID NO: 1072009 - RNA, 18 nt, Human
cgaccucaggugauccgc

SEQ ID NO: 1072010 - RNA, 24 nt, Human
cgccucagccucccaaagugcugg

SEQ ID NO: 1072011 - RNA, 24 nt, Human
cgggguuucuccauguuggccagg

SEQ ID NO: 1072012 - RNA, 19 nt, Human
cuaccaaacaccagccaca

SEQ ID NO: 1072013 - RNA, 24 nt, Human
cuaguuuuguauuuuuaguagaga

SEQ ID NO: 1072014 - RNA, 24 nt, Human
cucaccacaacaucugccucccag

SEQ ID NO: 1072015 - RNA, 23 nt, Human
cucagccuccugaguagcuggga

SEQ ID NO: 1072016 - RNA, 23 nt, Human
cucaggugaucaacccgccucag

SEQ ID NO: 1072017 - RNA, 23 nt, Human
cuccagagacaccugcuaucucu

SEQ ID NO: 1072018 - RNA, 24 nt, Human
cuccauguuggccaggcuggucuc

SEQ ID NO: 1072019 - RNA, 19 nt, Human
cucccagguucaagugauu

SEQ ID NO: 1072020 - RNA, 19 nt, Human
cucccagguucaagugauu

SEQ ID NO: 1072021 - RNA, 26 nt, Human
cucccgaccucaggugauccgcccgc

SEQ ID NO: 1072022 - RNA, 22 nt, Human
cuccugccucagccuccugagu

SEQ ID NO: 1072023 - RNA, 23 nt, Human
cuccuguuaucacuaggugaaca

SEQ ID NO: 1072024 - RNA, 22 nt, Human
cucuccuacugggaaacuccag

SEQ ID NO: 1072025 - RNA, 18 nt, Human
cucuuguugcccaggcug

SEQ ID NO: 1072026 - RNA, 20 nt, Human
cucuuguugcccaggcugga

SEQ ID NO: 1072027 - RNA, 22 nt, Human
cugagcauuaccuguuuuucuu

SEQ ID NO: 1072028 - RNA, 22 nt, Human
cugaguagcugggauuacaggc

SEQ ID NO: 1072029 - RNA, 23 nt, Human
cugcaaccucugccucccagguu

SEQ ID NO: 1072030 - RNA, 24 nt, Human
cugcaaccucugccucccagguuc

SEQ ID NO: 1072031 - RNA, 23 nt, Human
cugccucagccuccugaguagcu

SEQ ID NO: 1072032 - RNA, 19 nt, Human
cugggacucccaaaguuuu

SEQ ID NO: 1072033 - RNA, 23 nt, Human
cuuccuguguccaggauggaggu

SEQ ID NO: 1072034 - RNA, 24 nt, Human
cuuguugcccaggcuggagugcaa

SEQ ID NO: 1072035 - RNA, 21 nt, Human
cuuuccugcucuccucaggag

SEQ ID NO: 1072036 - RNA, 24 nt, Human
gaccucaggugaucaacccgccuc

SEQ ID NO: 1072037 - RNA, 22 nt, Human
gaccucaggugauccgcccgcc

SEQ ID NO: 1072038 - RNA, 23 nt, Human
gaccucaggugauccgcccgccu

SEQ ID NO: 1072039 - RNA, 24 nt, Human
gagacgggguuucuccauguuggc

SEQ ID NO: 1072040 - RNA, 24 nt, Human
gagaugggguuucuccauguuggu

SEQ ID NO: 1072041 - RNA, 23 nt, Human
gaggagcagcggugugagggugg

SEQ ID NO: 1072042 - RNA, 18 nt, Human
gaggcugguuuagcuggc

SEQ ID NO: 1072043 - RNA, 24 nt, Human
gaguagcugggauuacaggcaugc

SEQ ID NO: 1072044 - RNA, 25 nt, Human
gaguagcugggauuacaggcgcccg

SEQ ID NO: 1072045 - RNA, 18 nt, Human
gauuacaggcaugagcca

SEQ ID NO: 1072046 - RNA, 22 nt, Human
gauuacaggcaugagccauugc

SEQ ID NO: 1072047 - RNA, 23 nt, Human
gauuacaggcaugagccauugca

SEQ ID NO: 1072048 - RNA, 18 nt, Human
gauuacaggcgcccgcca

SEQ ID NO: 1072049 - RNA, 22 nt, Human
gcaaccucugccucccagguuc

SEQ ID NO: 1072050 - RNA, 26 nt, Human
gcagcuucagugguggggggaacgcc

SEQ ID NO: 1072051 - RNA, 19 nt, Human
gcccaggcuggagugcaac

SEQ ID NO: 1072052 - RNA, 20 nt, Human
gccucagccuccugaguagc

SEQ ID NO: 1072053 - RNA, 20 nt, Human
gcucuuguugcccaggcugg

SEQ ID NO: 1072054 - RNA, 21 nt, Human
gcucuuguugcccaggcugga

SEQ ID NO: 1072055 - RNA, 24 nt, Human
gcucuuguugcccaggcuggagug

SEQ ID NO: 1072056 - RNA, 20 nt, Human
gcugcauucagaaagaggcu

SEQ ID NO: 1072057 - RNA, 19 nt, Human
gcuggagugcaacggcacg

SEQ ID NO: 1072058 - RNA, 19 nt, Human
gcuggagugcaauggcuug

SEQ ID NO: 1072059 - RNA, 23 nt, Human
gcuggucucaaacuccugaccuc

SEQ ID NO: 1072060 - RNA, 23 nt, Human
gcuggucuugaacucccgaccuc

SEQ ID NO: 1072061 - RNA, 20 nt, Human
ggagcagcggugugagggug

SEQ ID NO: 1072062 - RNA, 22 nt, Human
ggauuacaggcaugagccauug

SEQ ID NO: 1072063 - RNA, 18 nt, Human
ggcugagcugcauucaga

SEQ ID NO: 1072064 - RNA, 24 nt, Human
ggcuggucucaaacuccugaccuc

SEQ ID NO: 1072065 - RNA, 24 nt, Human
ggcuggucuugaacucccgaccuc

SEQ ID NO: 1072066 - RNA, 22 nt, Human
gggaaccuccaaaaccucauaa

SEQ ID NO: 1072067 - RNA, 23 nt, Human
gggguuucuccauguuggccagg

SEQ ID NO: 1072068 - RNA, 22 nt, Human
gggguuucuccauguuggucag

SEQ ID NO: 1072069 - RNA, 23 nt, Human
guagagacgggguuucuccaugu

SEQ ID NO: 1072070 - RNA, 20 nt, Human
guagcugggauuacaggcau

SEQ ID NO: 1072071 - RNA, 24 nt, Human
gugaucaacccgccucagccuccc

SEQ ID NO: 1072072 - RNA, 24 nt, Human
gugauucuccugccucaaccuccc

SEQ ID NO: 1072073 - RNA, 24 nt, Human
gugauucuccugccucagccuccu

SEQ ID NO: 1072074 - RNA, 28 nt, Human
gugcagcuucagugguggggggaacgcc

SEQ ID NO: 1072075 - RNA, 21 nt, Human
gugcuccuggccacaacacag

SEQ ID NO: 1072076 - RNA, 21 nt, Human
guggugggaaccuccaaaacc

SEQ ID NO: 1072077 - RNA, 24 nt, Human
uaauuuuuguauuuuuaguagaga

SEQ ID NO: 1072078 - RNA, 23 nt, Human
uacaggcaugagccauugcaccc

SEQ ID NO: 1072079 - RNA, 22 nt, Human
uacaggcaugcaccaccgcgcc

SEQ ID NO: 1072080 - RNA, 23 nt, Human
uacaggcgcccgccaccaacacc

SEQ ID NO: 1072081 - RNA, 21 nt, Human
uacugcaaccucugccuccca

SEQ ID NO: 1072082 - RNA, 23 nt, Human
uacugcaaccucugccucccagg

SEQ ID NO: 1072083 - RNA, 24 nt, Human
uagcauagggcagccauuccaugu

SEQ ID NO: 1072084 - RNA, 23 nt, Human
uagcuuacugcaaccucugccuc

SEQ ID NO: 1072085 - RNA, 25 nt, Human
uagcuucuuaagucauuucucuccu

SEQ ID NO: 1072086 - RNA, 24 nt, Human
uaguagagacgggguuucuccaug

SEQ ID NO: 1072087 - RNA, 24 nt, Human
uaguagagaugggguuucuccaug

SEQ ID NO: 1072088 - RNA, 22 nt, Human
uauacagaugcaauaaauuauc

SEQ ID NO: 1072089 - RNA, 19 nt, Human
uaucaucaauaaaaugaag

SEQ ID NO: 1072090 - RNA, 19 nt, Human
ucaagugauucuccugccu

SEQ ID NO: 1072091 - RNA, 19 nt, Human
ucaagugauucuccugccu

SEQ ID NO: 1072092 - RNA, 24 nt, Human
ucaccacaacaucugccucccagg

SEQ ID NO: 1072093 - RNA, 23 nt, Human
ucacucuuguugcccaggcugga

SEQ ID NO: 1072094 - RNA, 20 nt, Human
ucagccuccugaguagcugg

SEQ ID NO: 1072095 - RNA, 20 nt, Human
ucagccuggcucauuguucu

SEQ ID NO: 1072096 - RNA, 24 nt, Human
uccauguuggucaggcuggucuug

SEQ ID NO: 1072097 - RNA, 24 nt, Human
ucccaaaguuuugggauuacaggc

SEQ ID NO: 1072098 - RNA, 23 nt, Human
ucccacagucucugagcauuacc

SEQ ID NO: 1072099 - RNA, 21 nt, Human
ucccagguucaagugauucuc

SEQ ID NO: 1072100 - RNA, 21 nt, Human
ucccagguucaagugauucuc

SEQ ID NO: 1072101 - RNA, 24 nt, Human
ucccagguucaagugauucuccug

SEQ ID NO: 1072102 - RNA, 24 nt, Human
ucccagguucaagugauucuccug

SEQ ID NO: 1072103 - RNA, 24 nt, Human
ucccgaguagcugggauuacaggc

SEQ ID NO: 1072104 - RNA, 19 nt, Human
ucccuacaccucuuccuga

SEQ ID NO: 1072105 - RNA, 18 nt, Human
uccuacugggaaacucca

SEQ ID NO: 1072106 - RNA, 24 nt, Human
uccugaguagcugggauuacaggc

SEQ ID NO: 1072107 - RNA, 19 nt, Human
uccugugugacagaggucc

SEQ ID NO: 1072108 - RNA, 24 nt, Human
ucuccugccucaaccucccgagua

SEQ ID NO: 1072109 - RNA, 21 nt, Human
ucucuggacacccaugugcuc

SEQ ID NO: 1072110 - RNA, 22 nt, Human
ucuuguugcccaggcuggagug

SEQ ID NO: 1072111 - RNA, 22 nt, Human
ucuuguugcccaggcuggagug

SEQ ID NO: 1072112 - RNA, 20 nt, Human
ugaccucaggugaucaaccc

SEQ ID NO: 1072113 - RNA, 24 nt, Human
ugaccucaggugaucaacccgccu

SEQ ID NO: 1072114 - RNA, 23 nt, Human
ugagcauuaccuguuuuucuugu

SEQ ID NO: 1072115 - RNA, 25 nt, Human
ugagcugcauucagaaagaggcugg

SEQ ID NO: 1072116 - RNA, 24 nt, Human
ugaggguggaugggacacugcaga

SEQ ID NO: 1072117 - RNA, 18 nt, Human
ugcccaggcuggagugca

SEQ ID NO: 1072118 - RNA, 18 nt, Human
ugcccaggcuggagugca

SEQ ID NO: 1072119 - RNA, 21 nt, Human
ugcccaggcuggagugcaacg

SEQ ID NO: 1072120 - RNA, 21 nt, Human
ugcccaggcuggagugcaaug

SEQ ID NO: 1072121 - RNA, 24 nt, Human
ugccucaaccucccgaguagcugg

SEQ ID NO: 1072122 - RNA, 24 nt, Human
ugccucagccuccugaguagcugg

SEQ ID NO: 1072123 - RNA, 21 nt, Human
ugcuccugugugacagagguu

SEQ ID NO: 1072124 - RNA, 24 nt, Human
ugcucuuguugcccaggcuggagu

SEQ ID NO: 1072125 - RNA, 26 nt, Human
uggaauggguugauuccucuaauuuu

SEQ ID NO: 1072126 - RNA, 20 nt, Human
uggagugcaacggcacgauc

SEQ ID NO: 1072127 - RNA, 19 nt, Human
uggagugcaauggcuugau

SEQ ID NO: 1072128 - RNA, 23 nt, Human
uggagugcaauggcuugaucucg

SEQ ID NO: 1072129 - RNA, 24 nt, Human
uggagugcaauggcuugaucucgg

SEQ ID NO: 1072130 - RNA, 24 nt, Human
uggccaggcuggucucaaacuccu

SEQ ID NO: 1072131 - RNA, 24 nt, Human
uggcuugaucucggcucaccacaa

SEQ ID NO: 1072132 - RNA, 18 nt, Human
ugggauuacaggcaugag

SEQ ID NO: 1072133 - RNA, 19 nt, Human
ugggauuacaggcaugagc

SEQ ID NO: 1072134 - RNA, 21 nt, Human
ugggauuacaggcaugagcca

SEQ ID NO: 1072135 - RNA, 21 nt, Human
ugggauuacaggcaugagcca

SEQ ID NO: 1072136 - RNA, 21 nt, Human
ugggauuacaggcaugagcca

SEQ ID NO: 1072137 - RNA, 22 nt, Human
ugggauuacaggcaugagccau

SEQ ID NO: 1072138 - RNA, 24 nt, Human
ugggauuacaggcaugagccauug

SEQ ID NO: 1072139 - RNA, 24 nt, Human
ugggauuacaggcaugagccauug

SEQ ID NO: 1072140 - RNA, 27 nt, Human
ugggauuacaggcaugagccauugcac

SEQ ID NO: 1072141 - RNA, 31 nt, Human
ugggauuacaggcaugagccauugcacccgg

SEQ ID NO: 1072142 - RNA, 21 nt, Human
ugggauuacaggcaugcacca

SEQ ID NO: 1072143 - RNA, 24 nt, Human
ugggauuacaggcaugcaccaccg

SEQ ID NO: 1072144 - RNA, 21 nt, Human
ugggauuacaggcgcccgcca

SEQ ID NO: 1072145 - RNA, 22 nt, Human
ugggauuacaggcgcccgccac

SEQ ID NO: 1072146 - RNA, 24 nt, Human
ugggauuacaggcgcccgccacca

SEQ ID NO: 1072147 - RNA, 24 nt, Human
ugggguuucuccauguuggucagg

SEQ ID NO: 1072148 - RNA, 23 nt, Human
uggucaggcuggucuugaacucc

SEQ ID NO: 1072149 - RNA, 23 nt, Human
uggugggaaccuccaaaaccuca

SEQ ID NO: 1072150 - RNA, 24 nt, Human
ugugucaagugucuaccaaacacc

SEQ ID NO: 1072151 - RNA, 20 nt, Human
uguugcccaggcuggagugc

SEQ ID NO: 1072152 - RNA, 20 nt, Human
uguugcccaggcuggagugc

SEQ ID NO: 1072153 - RNA, 22 nt, Human
uguugcccaggcuggagugcaa

SEQ ID NO: 1072154 - RNA, 19 nt, Human
uuacugcaaccucugccuc

SEQ ID NO: 1072155 - RNA, 24 nt, Human
uuacugcaaccucugccucccagg

SEQ ID NO: 1072156 - RNA, 25 nt, Human
uuacugcaaccucugccucccaggu

SEQ ID NO: 1072157 - RNA, 27 nt, Human
uuagcuuacugcaaccucugccuccca

SEQ ID NO: 1072158 - RNA, 18 nt, Human
uuaguagagacgggguuu

SEQ ID NO: 1072159 - RNA, 24 nt, Human
uuaguagagacgggguuucuccau

SEQ ID NO: 1072160 - RNA, 18 nt, Human
uuaguagagaugggguuu

SEQ ID NO: 1072161 - RNA, 24 nt, Human
uuaguagagaugggguuucuccau

SEQ ID NO: 1072162 - RNA, 21 nt, Human
uucaagugauucuccugccuc

SEQ ID NO: 1072163 - RNA, 21 nt, Human
uucaagugauucuccugccuc

SEQ ID NO: 1072164 - RNA, 24 nt, Human
uucaagugauucuccugccucaac

SEQ ID NO: 1072165 - RNA, 23 nt, Human
uucaagugauucuccugccucag

SEQ ID NO: 1072166 - RNA, 24 nt, Human
uucaagugauucuccugccucagc

SEQ ID NO: 1072167 - RNA, 24 nt, Human
uucacucuuguugcccaggcugga

SEQ ID NO: 1072168 - RNA, 18 nt, Human
uugcccaggcuggagugc

SEQ ID NO: 1072169 - RNA, 23 nt, Human
uugcucuuguugcccaggcugga

SEQ ID NO: 1072170 - RNA, 23 nt, Human
uuguauuuuuaguagagacgggg

SEQ ID NO: 1072171 - RNA, 23 nt, Human
uuguauuuuuaguagagaugggg

SEQ ID NO: 1072172 - RNA, 24 nt, Human
uuucacucuuguugcccaggcugg

SEQ ID NO: 1072173 - RNA, 21 nt, Human
uuucuccauguuggccaggcu

SEQ ID NO: 1072174 - RNA, 21 nt, Human
uuucuccauguuggucaggcu

SEQ ID NO: 1072175 - RNA, 24 nt, Human
uuugcucuuguugcccaggcugga

SEQ ID NO: 1072176 - RNA, 24 nt, Human
uuuugcucuuguugcccaggcugg

SEQ ID NO: 1072177 - RNA, 19 nt, Human
uuuuguauuuuuaguagag

SEQ ID NO: 1072178 - RNA, 20 nt, Human
uuuuguauuuuuaguagaga

SEQ ID NO: 1072179 - RNA, 22 nt, Human
uuuuuaguagagacgggguuuc

SEQ ID NO: 1072180 - RNA, 22 nt, Human
uuuuuaguagagaugggguuuc

SEQ ID NO: 1072181 - RNA, 20 nt, Human
uuuuuguauuuuuaguagag

SEQ ID NO: 1072182 - RNA, 26 nt, Human
aaacagauucacuggcugaugcuccu

SEQ ID NO: 1072183 - RNA, 21 nt, Human
aagaaggugccugcgucagua

SEQ ID NO: 1072184 - RNA, 18 nt, Human
aagcaaagaaaugaccuu

SEQ ID NO: 1072185 - RNA, 23 nt, Human
acacacacacacacacacacaca

SEQ ID NO: 1072186 - RNA, 23 nt, Human
acacacacacacacacacacaca

SEQ ID NO: 1072187 - RNA, 25 nt, Human
acacacacacacacacacacagagc

SEQ ID NO: 1072188 - RNA, 27 nt, Human
acagagaaaacaggaugauuucuccca

SEQ ID NO: 1072189 - RNA, 22 nt, Human
agaauauccuccauucauaauu

SEQ ID NO: 1072190 - RNA, 23 nt, Human
aguaaaaagauuuaugagaagaa

SEQ ID NO: 1072191 - RNA, 21 nt, Human
aguacaguagaauauccucca

SEQ ID NO: 1072192 - RNA, 18 nt, Human
agugccucauccaggcag

SEQ ID NO: 1072193 - RNA, 19 nt, Human
aguuagggaaggagugcaa

SEQ ID NO: 1072194 - RNA, 23 nt, Human
aucuccuuucagaauauaaacuc

SEQ ID NO: 1072195 - RNA, 20 nt, Human
cacacacacacacacacaca

SEQ ID NO: 1072196 - RNA, 20 nt, Human
cacacacacacacacacaca

SEQ ID NO: 1072197 - RNA, 20 nt, Human
cacacacacacacacacaca

SEQ ID NO: 1072198 - RNA, 20 nt, Human
cacacacacacacacacaca

SEQ ID NO: 1072199 - RNA, 20 nt, Human
cacacacacacacacacaca

SEQ ID NO: 1072200 - RNA, 22 nt, Human
cacacacacacacacacacaca

SEQ ID NO: 1072201 - RNA, 22 nt, Human
cacacacacacacacacacaca

SEQ ID NO: 1072202 - RNA, 26 nt, Human
cacacacacacacacacacacacaca

SEQ ID NO: 1072203 - RNA, 26 nt, Human
cacacacacacacacacacacacaca

SEQ ID NO: 1072204 - RNA, 20 nt, Human
cacacacacacacagagcua

SEQ ID NO: 1072205 - RNA, 25 nt, Human
cacacacacagagcuauuuuuccac

SEQ ID NO: 1072206 - RNA, 19 nt, Human
cacugugguaagacaagau

SEQ ID NO: 1072207 - RNA, 24 nt, Human
cagaaaaccuauccccaaccuaac

SEQ ID NO: 1072208 - RNA, 19 nt, Human
caggcaguaacaaaaacaa

SEQ ID NO: 1072209 - RNA, 24 nt, Human
ccaaaguaaaaagauuuaugagaa

SEQ ID NO: 1072210 - RNA, 18 nt, Human
ccacacauacaaaaacac

SEQ ID NO: 1072211 - RNA, 18 nt, Human
ccacaguuacuucaagca

SEQ ID NO: 1072212 - RNA, 18 nt, Human
ccacuagcacaugcuuug

SEQ ID NO: 1072213 - RNA, 18 nt, Human
ccaggcaguaacaaaaac

SEQ ID NO: 1072214 - RNA, 20 nt, Human
cccaagaacauacaaggaaa

SEQ ID NO: 1072215 - RNA, 33 nt, Human
cuaacagauuacacacacacacacacacacagu

SEQ ID NO: 1072216 - RNA, 19 nt, Human
cuagugaaagcccccuacc

SEQ ID NO: 1072217 - RNA, 19 nt, Human
cuugaugcucagagcagcu

SEQ ID NO: 1072218 - RNA, 23 nt, Human
gaaaggcauuuugaucugaauuu

SEQ ID NO: 1072219 - RNA, 21 nt, Human
gaauaaggacucugcuauaga

SEQ ID NO: 1072220 - RNA, 22 nt, Human
gaccuuaggaacauacccaggu

SEQ ID NO: 1072221 - RNA, 22 nt, Human
gauaccagaaggucgagagaga

SEQ ID NO: 1072222 - RNA, 21 nt, Human
gggcaugaacacacauucacc

SEQ ID NO: 1072223 - RNA, 21 nt, Human
gggcuucaaggauuuuuccau

SEQ ID NO: 1072224 - RNA, 19 nt, Human
uacaaggaaaaguuaaggg

SEQ ID NO: 1072225 - RNA, 22 nt, Human
uacaaggaaaaguuaagggaaa

SEQ ID NO: 1072226 - RNA, 20 nt, Human
uacacacacacacacacaca

SEQ ID NO: 1072227 - RNA, 25 nt, Human
uacacacacacacacacacacacac

SEQ ID NO: 1072228 - RNA, 25 nt, Human
uacacacacacacacacacacacag

SEQ ID NO: 1072229 - RNA, 21 nt, Human
uacacacacacacacacacag

SEQ ID NO: 1072230 - RNA, 22 nt, Human
uacgggcaugaacacacauuca

SEQ ID NO: 1072231 - RNA, 18 nt, Human
uagcacaugcuuuggagg

SEQ ID NO: 1072232 - RNA, 18 nt, Human
uaggaaccacccaagaac

SEQ ID NO: 1072233 - RNA, 24 nt, Human
uaggaaccacccaagaacauacaa

SEQ ID NO: 1072234 - RNA, 18 nt, Human
uagguaaugggccugaaa

SEQ ID NO: 1072235 - RNA, 19 nt, Human
uaugagaagaauaaggacu

SEQ ID NO: 1072236 - RNA, 19 nt, Human
uauugcaggucucuuuuaa

SEQ ID NO: 1072237 - RNA, 22 nt, Human
ucaggucacagagaaaacagga

SEQ ID NO: 1072238 - RNA, 24 nt, Human
ucaguaguauuuugaacacucccu

SEQ ID NO: 1072239 - RNA, 18 nt, Human
ucagugccaaaugcacua

SEQ ID NO: 1072240 - RNA, 21 nt, Human
ucagugccaaaugcacuaggu

SEQ ID NO: 1072241 - RNA, 18 nt, Human
uccacaguuacuucaagc

SEQ ID NO: 1072242 - RNA, 18 nt, Human
ucccaugaucaugugcuu

SEQ ID NO: 1072243 - RNA, 18 nt, Human
ucuccagcgccaagaagg

SEQ ID NO: 1072244 - RNA, 19 nt, Human
ucuccuauaaaacacugug

SEQ ID NO: 1072245 - RNA, 19 nt, Human
ugaaagcccccuaccuauu

SEQ ID NO: 1072246 - RNA, 18 nt, Human
ugaaaggcauuuugaucu

SEQ ID NO: 1072247 - RNA, 22 nt, Human
ugaacacacauucacccacaca

SEQ ID NO: 1072248 - RNA, 21 nt, Human
ugaacacucccuccacaguua

SEQ ID NO: 1072249 - RNA, 23 nt, Human
ugacagaagugccucauccaggc

SEQ ID NO: 1072250 - RNA, 20 nt, Human
ugagagaagaugagacggca

SEQ ID NO: 1072251 - RNA, 19 nt, Human
ugccaaaugcacuagguuc

SEQ ID NO: 1072252 - RNA, 18 nt, Human
ugccucauccaggcagua

SEQ ID NO: 1072253 - RNA, 21 nt, Human
uggggagguucaaaagaagug

SEQ ID NO: 1072254 - RNA, 22 nt, Human
uucaaggauuuuuccauucugc

SEQ ID NO: 1072255 - RNA, 24 nt, Human
uucagaauauaaacucagaagccc

SEQ ID NO: 1072256 - RNA, 25 nt, Human
uucccugccguuauaauuuuuggau

SEQ ID NO: 1072257 - RNA, 19 nt, Human
uuuaagauagauuucuagg

SEQ ID NO: 1072258 - RNA, 21 nt, Human
uuugaacacucccuccacagu

SEQ ID NO: 1072259 - RNA, 18 nt, Human
uuuuaagauagauuucua

SEQ ID NO: 1072260 - RNA, 25 nt, Human
uuuuuuauugcaggucucuuuuaau

SEQ ID NO: 1072261 - RNA, 22 nt, Human
aaaacacccucuuacuacauca

SEQ ID NO: 1072262 - RNA, 24 nt, Human
aaaacacccucuuacuacaucaca

SEQ ID NO: 1072263 - RNA, 22 nt, Human
aaaagcaaccauuuauuagaac

SEQ ID NO: 1072264 - RNA, 20 nt, Human
aaacacagagaaccagaaug

SEQ ID NO: 1072265 - RNA, 21 nt, Human
aaacucccccauaaaccuaaa

SEQ ID NO: 1072266 - RNA, 18 nt, Human
aaagggggaaaagaggag

SEQ ID NO: 1072267 - RNA, 19 nt, Human
aacacagcuaaaacucccc

SEQ ID NO: 1072268 - RNA, 21 nt, Human
aacacagcuaaaacuccccca

SEQ ID NO: 1072269 - RNA, 24 nt, Human
aacccagcucuugagucucuuaga

SEQ ID NO: 1072270 - RNA, 24 nt, Human
aacuagauuaauucaauaacugaa

SEQ ID NO: 1072271 - RNA, 28 nt, Human
aagcaagaucacauuccaacagaaacaa

SEQ ID NO: 1072272 - RNA, 23 nt, Human
aagcaaugacauaaaucaaaacc

SEQ ID NO: 1072273 - RNA, 23 nt, Human
aagcagacauguuuggcugaaau

SEQ ID NO: 1072274 - RNA, 23 nt, Human
aagugccuuccccaacaacaucc

SEQ ID NO: 1072275 - RNA, 19 nt, Human
aaucaguugaggagguggg

SEQ ID NO: 1072276 - RNA, 21 nt, Human
acaaaacacagagaaccagaa

SEQ ID NO: 1072277 - RNA, 20 nt, Human
acugaguaaccugaauuccu

SEQ ID NO: 1072278 - RNA, 20 nt, Human
acuugggagcagagggaagu

SEQ ID NO: 1072279 - RNA, 19 nt, Human
acuuuaauccccaaccugc

SEQ ID NO: 1072280 - RNA, 27 nt, Human
agaaacaaugaauaagaaccgguaccc

SEQ ID NO: 1072281 - RNA, 21 nt, Human
agaaagagcccuauugggaag

SEQ ID NO: 1072282 - RNA, 24 nt, Human
agagggggagagaaugaggucugc

SEQ ID NO: 1072283 - RNA, 23 nt, Human
agaguguacuugggagcagaggg

SEQ ID NO: 1072284 - RNA, 19 nt, Human
agauaccacaaagggguac

SEQ ID NO: 1072285 - RNA, 19 nt, Human
agcauccacucgauucuug

SEQ ID NO: 1072286 - RNA, 22 nt, Human
agccaggaccuugugcuuuuuc

SEQ ID NO: 1072287 - RNA, 23 nt, Human
aggaaguggugggaaagccagcg

SEQ ID NO: 1072288 - RNA, 21 nt, Human
agggggaaaagaggaggguag

SEQ ID NO: 1072289 - RNA, 21 nt, Human
aguacagagugcugaaagaaa

SEQ ID NO: 1072290 - RNA, 26 nt, Human
aucacaucccuccccacaauacccag

SEQ ID NO: 1072291 - RNA, 21 nt, Human
auccugagacagucugagucu

SEQ ID NO: 1072292 - RNA, 23 nt, Human
augcaagacacagaaaaucccaa

SEQ ID NO: 1072293 - RNA, 21 nt, Human
auguagcuuuugggggugggg

SEQ ID NO: 1072294 - RNA, 24 nt, Human
auuucucauuuccauucagaaauc

SEQ ID NO: 1072295 - RNA, 24 nt, Human
caaaacacagagaaccagaaugug

SEQ ID NO: 1072296 - RNA, 20 nt, Human
caaaccagagggaaaaaagg

SEQ ID NO: 1072297 - RNA, 22 nt, Human
caacagaaacaaugaauaagaa

SEQ ID NO: 1072298 - RNA, 25 nt, Human
caauguagcuuuugggggugggggg

SEQ ID NO: 1072299 - RNA, 23 nt, Human
cacaaacuagauuaauucaauaa

SEQ ID NO: 1072300 - RNA, 22 nt, Human
cagaaaaucccaagugccuucc

SEQ ID NO: 1072301 - RNA, 18 nt, Human
cagaaccaucugguacug

SEQ ID NO: 1072302 - RNA, 33 nt, Human
cagcuaaaacucccccauaaaccuaaaagucuu

SEQ ID NO: 1072303 - RNA, 20 nt, Human
caucacaucccuccccacaa

SEQ ID NO: 1072304 - RNA, 19 nt, Human
caucccuccccacaauacc

SEQ ID NO: 1072305 - RNA, 23 nt, Human
ccaauacaagaguaugaaaaggg

SEQ ID NO: 1072306 - RNA, 27 nt, Human
ccaguggugguucuuggagucuuccgg

SEQ ID NO: 1072307 - RNA, 19 nt, Human
cccacaauacccagagggc

SEQ ID NO: 1072308 - RNA, 23 nt, Human
cccagguacagauaccacaaagg

SEQ ID NO: 1072309 - RNA, 25 nt, Human
cccagguacagauaccacaaagggg

SEQ ID NO: 1072310 - RNA, 20 nt, Human
ccccaggacuccacagaacc

SEQ ID NO: 1072311 - RNA, 21 nt, Human
ccccauaaaccuaaaagucca

SEQ ID NO: 1072312 - RNA, 23 nt, Human
cccccauaaaccuaaaaguccau

SEQ ID NO: 1072313 - RNA, 18 nt, Human
ccccuaaacugagaugga

SEQ ID NO: 1072314 - RNA, 22 nt, Human
cccuccccacaauacccagagg

SEQ ID NO: 1072315 - RNA, 20 nt, Human
ccuaaaaguccauggagaau

SEQ ID NO: 1072316 - RNA, 19 nt, Human
ccugagacagucugagucu

SEQ ID NO: 1072317 - RNA, 21 nt, Human
cuagcaccacaaaacacccuc

SEQ ID NO: 1072318 - RNA, 26 nt, Human
cugaaggguauuaacugagggccuau

SEQ ID NO: 1072319 - RNA, 21 nt, Human
cugaauuccuaaaauccagaa

SEQ ID NO: 1072320 - RNA, 21 nt, Human
cugaguguuauacacauuucu

SEQ ID NO: 1072321 - RNA, 24 nt, Human
cuuacuacaucacaucccucccca

SEQ ID NO: 1072322 - RNA, 18 nt, Human
cuuccccaacaacauccu

SEQ ID NO: 1072323 - RNA, 18 nt, Human
gaagaggagcuggcugcg

SEQ ID NO: 1072324 - RNA, 22 nt, Human
gagcccuauugggaagaggagc

SEQ ID NO: 1072325 - RNA, 24 nt, Human
gaguaugaaaagggggaaaagagg

SEQ ID NO: 1072326 - RNA, 21 nt, Human
gagucugcuucaaacccaugg

SEQ ID NO: 1072327 - RNA, 22 nt, Human
gccaaggagagggaaagcagaa

SEQ ID NO: 1072328 - RNA, 21 nt, Human
gcuaaaacucccccauaaacc

SEQ ID NO: 1072329 - RNA, 26 nt, Human
gcuaaaacucccccauaaaccuaaaa

SEQ ID NO: 1072330 - RNA, 18 nt, Human
ggaaagcagaaagagccc

SEQ ID NO: 1072331 - RNA, 19 nt, Human
ggagugguaagcaaugaca

SEQ ID NO: 1072332 - RNA, 19 nt, Human
gggggaaaagaggagggua

SEQ ID NO: 1072333 - RNA, 22 nt, Human
gggggugggggguggaaauaag

SEQ ID NO: 1072334 - RNA, 20 nt, Human
ggugggggguggaaauaagg

SEQ ID NO: 1072335 - RNA, 24 nt, Human
guaagcaaugacauaaaucaaaac

SEQ ID NO: 1072336 - RNA, 19 nt, Human
guccugggauugguugggg

SEQ ID NO: 1072337 - RNA, 26 nt, Human
uaaaaaaaaaaucaaaagcagacaug

SEQ ID NO: 1072338 - RNA, 25 nt, Human
uaaaaccaagaaacacagcuaaaac

SEQ ID NO: 1072339 - RNA, 24 nt, Human
uaaaacucccccauaaaccuaaaa

SEQ ID NO: 1072340 - RNA, 18 nt, Human
uaagaaccuuuuccccag

SEQ ID NO: 1072341 - RNA, 22 nt, Human
uaccacaaagggguacagugac

SEQ ID NO: 1072342 - RNA, 20 nt, Human
uacuugggagcagagggaaa

SEQ ID NO: 1072343 - RNA, 23 nt, Human
uagcaccacaaaacacccucuua

SEQ ID NO: 1072344 - RNA, 20 nt, Human
uagggccaaggagagggaaa

SEQ ID NO: 1072345 - RNA, 20 nt, Human
uagguucagacugcagacac

SEQ ID NO: 1072346 - RNA, 19 nt, Human
uaucuaguauaaugugagg

SEQ ID NO: 1072347 - RNA, 23 nt, Human
ucaaaagcagacauguuuggcug

SEQ ID NO: 1072348 - RNA, 24 nt, Human
ucagaaaucuggcuacaaagugau

SEQ ID NO: 1072349 - RNA, 22 nt, Human
ucagaguuuuauacugaguaac

SEQ ID NO: 1072350 - RNA, 26 nt, Human
ucagaguuuuauacugaguaaccuga

SEQ ID NO: 1072351 - RNA, 21 nt, Human
uccaaaguuuucucaaaccag

SEQ ID NO: 1072352 - RNA, 18 nt, Human
uccaaugcucuugaaucu

SEQ ID NO: 1072353 - RNA, 20 nt, Human
uccacaaaacacagagaacc

SEQ ID NO: 1072354 - RNA, 23 nt, Human
uccauuucccagagcauuuuacc

SEQ ID NO: 1072355 - RNA, 21 nt, Human
ucccaagugccuuccccaaca

SEQ ID NO: 1072356 - RNA, 24 nt, Human
ucccagagcauuuuaccucucaga

SEQ ID NO: 1072357 - RNA, 20 nt, Human
ucccccauaaaccuaaaagu

SEQ ID NO: 1072358 - RNA, 24 nt, Human
ucccccauaaaccuaaaaguccau

SEQ ID NO: 1072359 - RNA, 18 nt, Human
ucccuccccacaauaccc

SEQ ID NO: 1072360 - RNA, 18 nt, Human
ucuagggccaaggagagg

SEQ ID NO: 1072361 - RNA, 19 nt, Human
ugaaaacacugucaacauu

SEQ ID NO: 1072362 - RNA, 18 nt, Human
ugaaaagggggaaaagag

SEQ ID NO: 1072363 - RNA, 20 nt, Human
ugaaaagggggaaaagagga

SEQ ID NO: 1072364 - RNA, 24 nt, Human
ugaaauaaaaccaagaaacacagc

SEQ ID NO: 1072365 - RNA, 20 nt, Human
ugaaggguauuaacugaggg

SEQ ID NO: 1072366 - RNA, 20 nt, Human
ugaauaagaaccuuuucccc

SEQ ID NO: 1072367 - RNA, 21 nt, Human
ugaauaagaaccuuuucccca

SEQ ID NO: 1072368 - RNA, 20 nt, Human
ugaaucugaaauggccuccc

SEQ ID NO: 1072369 - RNA, 20 nt, Human
ugacagauguugaauacggu

SEQ ID NO: 1072370 - RNA, 21 nt, Human
ugacagauguugaauacggug

SEQ ID NO: 1072371 - RNA, 19 nt, Human
ugaggaaggagaggcccag

SEQ ID NO: 1072372 - RNA, 20 nt, Human
ugcaaguugguggcguggga

SEQ ID NO: 1072373 - RNA, 22 nt, Human
ugccuuccccaacaacauccua

SEQ ID NO: 1072374 - RNA, 19 nt, Human
ugcuuugauccugagacag

SEQ ID NO: 1072375 - RNA, 20 nt, Human
uggaaaaaugaacugcuucu

SEQ ID NO: 1072376 - RNA, 23 nt, Human
ugggacaguacagagugcugaaa

SEQ ID NO: 1072377 - RNA, 20 nt, Human
ugggagcagagggaaguugg

SEQ ID NO: 1072378 - RNA, 24 nt, Human
ugggagcagagggaaguuggcagg

SEQ ID NO: 1072379 - RNA, 22 nt, Human
ugggaugaagcuuuaaggauca

SEQ ID NO: 1072380 - RNA, 19 nt, Human
uggggagugguaagcaaug

SEQ ID NO: 1072381 - RNA, 18 nt, Human
ugggggugggggguggaa

SEQ ID NO: 1072382 - RNA, 21 nt, Human
ugguacugcuagugcugggug

SEQ ID NO: 1072383 - RNA, 23 nt, Human
ugguacugcuagugcugggugaa

SEQ ID NO: 1072384 - RNA, 23 nt, Human
uguaggaaguggugggaaagcca

SEQ ID NO: 1072385 - RNA, 20 nt, Human
uguccaaaguuuucucaaac

SEQ ID NO: 1072386 - RNA, 25 nt, Human
uguuauagauguuuugaaaauaaaa

SEQ ID NO: 1072387 - RNA, 18 nt, Human
uugauccugagacagucu

SEQ ID NO: 1072388 - RNA, 22 nt, Human
uuggcugaaauaaaaccaagaa

SEQ ID NO: 1072389 - RNA, 19 nt, Human
uugggagcagagggaaguu

SEQ ID NO: 1072390 - RNA, 19 nt, Human
uuggggagugguaagcaau

SEQ ID NO: 1072391 - RNA, 21 nt, Human
uugguuggggagugguaagca

SEQ ID NO: 1072392 - RNA, 25 nt, Human
uuuaaaaaaaaaaucaaaagcagac

SEQ ID NO: 1072393 - RNA, 21 nt, Human
uuugggggugggggguggaaa

SEQ ID NO: 1072394 - RNA, 24 nt, Human
aaaguauugggauuacaggcauga

SEQ ID NO: 1072395 - RNA, 19 nt, Human
aaagugcuaggauuauagg

SEQ ID NO: 1072396 - RNA, 19 nt, Human
aagccauucuuagaucugg

SEQ ID NO: 1072397 - RNA, 21 nt, Human
aaguauugggauuacaggcau

SEQ ID NO: 1072398 - RNA, 26 nt, Human
aaguauugggauuacaggcaugagcu

SEQ ID NO: 1072399 - RNA, 20 nt, Human
aagugcuucacuugccucag

SEQ ID NO: 1072400 - RNA, 18 nt, Human
acugcagccucaaccucc

SEQ ID NO: 1072401 - RNA, 21 nt, Human
agagacgugcaccaccacacc

SEQ ID NO: 1072402 - RNA, 26 nt, Human
agcagcaucucaaaagggcugacugg

SEQ ID NO: 1072403 - RNA, 20 nt, Human
agccucaaccuccugggcuc

SEQ ID NO: 1072404 - RNA, 22 nt, Human
aggggagaagcugggcaaagag

SEQ ID NO: 1072405 - RNA, 20 nt, Human
agggugauugguaccugaaa

SEQ ID NO: 1072406 - RNA, 23 nt, Human
aggucuucagcaugacuugguuu

SEQ ID NO: 1072407 - RNA, 23 nt, Human
aguagcugggauuacaggcaugu

SEQ ID NO: 1072408 - RNA, 19 nt, Human
agucagcagcaucucaaaa

SEQ ID NO: 1072409 - RNA, 24 nt, Human
aguggcaugaucuuaguucacugc

SEQ ID NO: 1072410 - RNA, 20 nt, Human
aucucauucuguugcccaag

SEQ ID NO: 1072411 - RNA, 24 nt, Human
augggguuuugccauguuggccag

SEQ ID NO: 1072412 - RNA, 23 nt, Human
augggugcaguggcaugaucuua

SEQ ID NO: 1072413 - RNA, 24 nt, Human
caaaguauugggauuacaggcaug

SEQ ID NO: 1072414 - RNA, 24 nt, Human
caaagugcuaggauuauaggcaua

SEQ ID NO: 1072415 - RNA, 22 nt, Human
caagugauucuccugucucagc

SEQ ID NO: 1072416 - RNA, 19 nt, Human
caccugguuaauuuuuuua

SEQ ID NO: 1072417 - RNA, 24 nt, Human
cacuaaguugcccaggcuggucuu

SEQ ID NO: 1072418 - RNA, 23 nt, Human
cacucaggaauuucucccucuca

SEQ ID NO: 1072419 - RNA, 19 nt, Human
cacugcagccucaaccucc

SEQ ID NO: 1072420 - RNA, 21 nt, Human
cacuguaaccuccaccuccug

SEQ ID NO: 1072421 - RNA, 23 nt, Human
cacuguaaccuccaccuccuggg

SEQ ID NO: 1072422 - RNA, 23 nt, Human
cagcagcaucucaaaagggcuga

SEQ ID NO: 1072423 - RNA, 24 nt, Human
cagccucaaccuccugggcucaag

SEQ ID NO: 1072424 - RNA, 20 nt, Human
cagccuccugaguagcugag

SEQ ID NO: 1072425 - RNA, 25 nt, Human
caguggugugaucuuggcucacugu

SEQ ID NO: 1072426 - RNA, 22 nt, Human
caugccuguuuuuuucuggagg

SEQ ID NO: 1072427 - RNA, 24 nt, Human
cauguuggccaggcuggucucgaa

SEQ ID NO: 1072428 - RNA, 24 nt, Human
ccaaaguauugggauuacaggcau

SEQ ID NO: 1072429 - RNA, 24 nt, Human
ccaaagugcuaggauuauaggcau

SEQ ID NO: 1072430 - RNA, 22 nt, Human
ccacaccugguuaauuuuuuua

SEQ ID NO: 1072431 - RNA, 24 nt, Human
ccaccuccuggguucaagugauuc

SEQ ID NO: 1072432 - RNA, 19 nt, Human
ccauguuggccaggcuggu

SEQ ID NO: 1072433 - RNA, 22 nt, Human
ccauguuggccaggcuggucuc

SEQ ID NO: 1072434 - RNA, 23 nt, Human
ccauguuggccaggcuggucucg

SEQ ID NO: 1072435 - RNA, 24 nt, Human
cccaaaguauugggauuacaggca

SEQ ID NO: 1072436 - RNA, 20 nt, Human
ccccgggcaucucguuccca

SEQ ID NO: 1072437 - RNA, 23 nt, Human
cccgaguagcugggauuacaggc

SEQ ID NO: 1072438 - RNA, 24 nt, Human
cccgaguagcugggauuacaggca

SEQ ID NO: 1072439 - RNA, 23 nt, Human
ccgaguagcugggauuacaggca

SEQ ID NO: 1072440 - RNA, 24 nt, Human
ccgaguagcugggauuacaggcau

SEQ ID NO: 1072441 - RNA, 19 nt, Human
ccucaaccuccugggcuca

SEQ ID NO: 1072442 - RNA, 20 nt, Human
ccucaaccuccugggcucaa

SEQ ID NO: 1072443 - RNA, 19 nt, Human
ccucacuaaguugcccagg

SEQ ID NO: 1072444 - RNA, 22 nt, Human
ccuccaccuccuggguucaagu

SEQ ID NO: 1072445 - RNA, 26 nt, Human
ccuccuaccuuggccucccaaagugc

SEQ ID NO: 1072446 - RNA, 24 nt, Human
ccuccugggcucaagccaucuucc

SEQ ID NO: 1072447 - RNA, 24 nt, Human
ccuccuggguucaagugauucucc

SEQ ID NO: 1072448 - RNA, 20 nt, Human
ccuggccucaagccauccuc

SEQ ID NO: 1072449 - RNA, 20 nt, Human
ccugggcucaagccaucuuc

SEQ ID NO: 1072450 - RNA, 23 nt, Human
ccugggcucaagccaucuuccug

SEQ ID NO: 1072451 - RNA, 23 nt, Human
ccuggguucaagugauucuccuc

SEQ ID NO: 1072452 - RNA, 23 nt, Human
ccuggguucaagugauucuccug

SEQ ID NO: 1072453 - RNA, 21 nt, Human
ccuguauggucauuaucacuc

SEQ ID NO: 1072454 - RNA, 24 nt, Human
cucaagccauccuccuaccuuggc

SEQ ID NO: 1072455 - RNA, 21 nt, Human
cucaagccaucuuccugccac

SEQ ID NO: 1072456 - RNA, 24 nt, Human
cucacuguaaccuccaccuccugg

SEQ ID NO: 1072457 - RNA, 27 nt, Human
cucacuguaaccuccaccuccuggguu

SEQ ID NO: 1072458 - RNA, 23 nt, Human
cucagccucccgaguagcuggga

SEQ ID NO: 1072459 - RNA, 18 nt, Human
cuccaagugguggaaaag

SEQ ID NO: 1072460 - RNA, 19 nt, Human
cuccuggccucaagccauc

SEQ ID NO: 1072461 - RNA, 25 nt, Human
cuccugggcucaagccaucuuccug

SEQ ID NO: 1072462 - RNA, 20 nt, Human
cuccuggguucaagugauuc

SEQ ID NO: 1072463 - RNA, 21 nt, Human
cuccuggguucaagugauucu

SEQ ID NO: 1072464 - RNA, 20 nt, Human
cucucacccaaccucagcuc

SEQ ID NO: 1072465 - RNA, 19 nt, Human
cugcagccccagccugaag

SEQ ID NO: 1072466 - RNA, 20 nt, Human
cugcagccccagccugaagc

SEQ ID NO: 1072467 - RNA, 22 nt, Human
cugcagccucaaccuccugggc

SEQ ID NO: 1072468 - RNA, 23 nt, Human
cugccacagccuccugaguagcu

SEQ ID NO: 1072469 - RNA, 21 nt, Human
cuguaaccuccaccuccuggg

SEQ ID NO: 1072470 - RNA, 24 nt, Human
cuguaaccuccaccuccuggguuc

SEQ ID NO: 1072471 - RNA, 23 nt, Human
cugucucagccucccgaguagcu

SEQ ID NO: 1072472 - RNA, 19 nt, Human
cuuuauaggugcuuucuug

SEQ ID NO: 1072473 - RNA, 24 nt, Human
gaccucaagugcuucacuugccuc

SEQ ID NO: 1072474 - RNA, 18 nt, Human
gagaugggguuuugccau

SEQ ID NO: 1072475 - RNA, 25 nt, Human
gaguagcugggauuacaggcaugug

SEQ ID NO: 1072476 - RNA, 19 nt, Human
gauuacaggcaugagcuac

SEQ ID NO: 1072477 - RNA, 21 nt, Human
gauuacaggcaugagcuacua

SEQ ID NO: 1072478 - RNA, 18 nt, Human
gauuacaggcaugugcca

SEQ ID NO: 1072479 - RNA, 24 nt, Human
gauuacaggcaugugccaccaugc

SEQ ID NO: 1072480 - RNA, 18 nt, Human
gauuauaggcauaagcca

SEQ ID NO: 1072481 - RNA, 21 nt, Human
gauuauaggcauaagccaaug

SEQ ID NO: 1072482 - RNA, 21 nt, Human
gauucuccugucucagccucc

SEQ ID NO: 1072483 - RNA, 22 nt, Human
gcaaagaggugacugcagcccc

SEQ ID NO: 1072484 - RNA, 18 nt, Human
gcagcaucucaaaagggc

SEQ ID NO: 1072485 - RNA, 19 nt, Human
gcagccccagccugaagcc

SEQ ID NO: 1072486 - RNA, 21 nt, Human
gcagccugcugggauuuccag

SEQ ID NO: 1072487 - RNA, 20 nt, Human
gccauguuggccaggcuggu

SEQ ID NO: 1072488 - RNA, 23 nt, Human
gcuggucucgaacuccugaccuc

SEQ ID NO: 1072489 - RNA, 23 nt, Human
gcuggucuugaacuccuggccuc

SEQ ID NO: 1072490 - RNA, 24 nt, Human
ggauuacaggcaugagcuacuaug

SEQ ID NO: 1072491 - RNA, 24 nt, Human
ggauuacaggcaugugccaccaug

SEQ ID NO: 1072492 - RNA, 24 nt, Human
ggauuauaggcauaagccaaugug

SEQ ID NO: 1072493 - RNA, 18 nt, Human
ggcaggggagaagcuggg

SEQ ID NO: 1072494 - RNA, 24 nt, Human
ggcuggucucgaacuccugaccuc

SEQ ID NO: 1072495 - RNA, 24 nt, Human
ggcuggucuugaacuccuggccuc

SEQ ID NO: 1072496 - RNA, 21 nt, Human
gggagaagcugggcaaagagg

SEQ ID NO: 1072497 - RNA, 22 nt, Human
gggguuuugccauguuggccag

SEQ ID NO: 1072498 - RNA, 23 nt, Human
gggguuuugccauguuggccagg

SEQ ID NO: 1072499 - RNA, 18 nt, Human
ggguuuugccauguuggc

SEQ ID NO: 1072500 - RNA, 20 nt, Human
gguacaguggugugaucuug

SEQ ID NO: 1072501 - RNA, 19 nt, Human
ggucucgaacuccugaccu

SEQ ID NO: 1072502 - RNA, 21 nt, Human
ggugcaguggcaugaucuuag

SEQ ID NO: 1072503 - RNA, 23 nt, Human
ggugcaguggcaugaucuuaguu

SEQ ID NO: 1072504 - RNA, 23 nt, Human
guacaguggugugaucuuggcuc

SEQ ID NO: 1072505 - RNA, 23 nt, Human
guagagaugggguuuugccaugu

SEQ ID NO: 1072506 - RNA, 18 nt, Human
guagcugggauuacaggc

SEQ ID NO: 1072507 - RNA, 20 nt, Human
guagcugggauuacaggcau

SEQ ID NO: 1072508 - RNA, 24 nt, Human
gugauucuccugucucagccuccc

SEQ ID NO: 1072509 - RNA, 21 nt, Human
gugcuucacuugccucagccu

SEQ ID NO: 1072510 - RNA, 24 nt, Human
gugcuucacuugccucagccuccc

SEQ ID NO: 1072511 - RNA, 21 nt, Human
guugcccaggcuggucuugaa

SEQ ID NO: 1072512 - RNA, 19 nt, Human
uaacuuggcagauaagugg

SEQ ID NO: 1072513 - RNA, 24 nt, Human
uaaguugcccaggcuggucuugaa

SEQ ID NO: 1072514 - RNA, 24 nt, Human
uaauguuugcauuuuuaguagaga

SEQ ID NO: 1072515 - RNA, 23 nt, Human
uaauuuuuuuauuuuuuauagag

SEQ ID NO: 1072516 - RNA, 24 nt, Human
uaauuuuuuuauuuuuuauagaga

SEQ ID NO: 1072517 - RNA, 24 nt, Human
uacaggcaugagcuacuaugccca

SEQ ID NO: 1072518 - RNA, 24 nt, Human
uacaggcaugugccaccaugccca

SEQ ID NO: 1072519 - RNA, 19 nt, Human
uacaguggugugaucuugg

SEQ ID NO: 1072520 - RNA, 23 nt, Human
uacaguggugugaucuuggcucc

SEQ ID NO: 1072521 - RNA, 18 nt, Human
uagaagagcucuugggug

SEQ ID NO: 1072522 - RNA, 22 nt, Human
uagagaugggguuuugccaugu

SEQ ID NO: 1072523 - RNA, 21 nt, Human
uaggauuauaggcauaagcca

SEQ ID NO: 1072524 - RNA, 23 nt, Human
uaggauuauaggcauaagccaau

SEQ ID NO: 1072525 - RNA, 24 nt, Human
uaguagagaugggguuuugccaug

SEQ ID NO: 1072526 - RNA, 23 nt, Human
uaguucacugcagccucaaccuc

SEQ ID NO: 1072527 - RNA, 24 nt, Human
uaguucacugcagccucaaccucc

SEQ ID NO: 1072528 - RNA, 25 nt, Human
ucaagccauccuccuaccuuggccu

SEQ ID NO: 1072529 - RNA, 20 nt, Human
ucacugcagccucaaccucc

SEQ ID NO: 1072530 - RNA, 23 nt, Human
ucacugcagccucaaccuccugg

SEQ ID NO: 1072531 - RNA, 24 nt, Human
ucacugcagccucaaccuccuggg

SEQ ID NO: 1072532 - RNA, 23 nt, Human
ucacuguaaccuccaccuccugg

SEQ ID NO: 1072533 - RNA, 23 nt, Human
ucacuguaaccuccaccuccugg

SEQ ID NO: 1072534 - RNA, 24 nt, Human
ucacuguaaccuccaccuccuggg

SEQ ID NO: 1072535 - RNA, 27 nt, Human
ucacuguaaccuccaccuccuggguuc

SEQ ID NO: 1072536 - RNA, 20 nt, Human
ucagccucccgaguagcugg

SEQ ID NO: 1072537 - RNA, 19 nt, Human
uccaggucuucagcaugac

SEQ ID NO: 1072538 - RNA, 24 nt, Human
ucccaaaguauugggauuacaggc

SEQ ID NO: 1072539 - RNA, 24 nt, Human
ucccaaagugcuaggauuauaggc

SEQ ID NO: 1072540 - RNA, 24 nt, Human
ucccgaguagcugggauuacaggc

SEQ ID NO: 1072541 - RNA, 20 nt, Human
uccugggcucaagccaucuu

SEQ ID NO: 1072542 - RNA, 24 nt, Human
uccugggcucaagccaucuuccug

SEQ ID NO: 1072543 - RNA, 21 nt, Human
uccuggguucaagugauucuc

SEQ ID NO: 1072544 - RNA, 24 nt, Human
uccuggguucaagugauucuccug

SEQ ID NO: 1072545 - RNA, 18 nt, Human
ucucauucuguugcccaa

SEQ ID NO: 1072546 - RNA, 19 nt, Human
ucucauucuguugcccaag

SEQ ID NO: 1072547 - RNA, 20 nt, Human
ucucauucuguugcccaaga

SEQ ID NO: 1072548 - RNA, 23 nt, Human
ucucauucuguugcccaagaugg

SEQ ID NO: 1072549 - RNA, 23 nt, Human
ucucauucuguugcccaagaugg

SEQ ID NO: 1072550 - RNA, 24 nt, Human
ucucauucuguugcccaagauggg

SEQ ID NO: 1072551 - RNA, 24 nt, Human
ucuccugucucagccucccgagua

SEQ ID NO: 1072552 - RNA, 21 nt, Human
ucucgaacuccugaccucaag

SEQ ID NO: 1072553 - RNA, 23 nt, Human
ucucuucucuguugccuuuguuc

SEQ ID NO: 1072554 - RNA, 21 nt, Human
ucugcucucuucucuguugcc

SEQ ID NO: 1072555 - RNA, 24 nt, Human
ucugcucucuucucuguugccuuu

SEQ ID NO: 1072556 - RNA, 21 nt, Human
ucuugaacuccuggccucaag

SEQ ID NO: 1072557 - RNA, 22 nt, Human
ugaauccauggcuuaacacugg

SEQ ID NO: 1072558 - RNA, 19 nt, Human
ugaccucaagugcuucacu

SEQ ID NO: 1072559 - RNA, 20 nt, Human
ugaccucaagugcuucacuu

SEQ ID NO: 1072560 - RNA, 20 nt, Human
ugacugcagccccagccuga

SEQ ID NO: 1072561 - RNA, 19 nt, Human
ugacuugguuucucagugg

SEQ ID NO: 1072562 - RNA, 24 nt, Human
ugagacuagagacgugcaccacca

SEQ ID NO: 1072563 - RNA, 20 nt, Human
ugauucuccugucucagccu

SEQ ID NO: 1072564 - RNA, 23 nt, Human
ugcagccugcugggauuuccagg

SEQ ID NO: 1072565 - RNA, 22 nt, Human
ugcaguggcaugaucuuaguuc

SEQ ID NO: 1072566 - RNA, 24 nt, Human
ugccacagccuccugaguagcuga

SEQ ID NO: 1072567 - RNA, 27 nt, Human
ugccauguuggccaggcuggucucgaa

SEQ ID NO: 1072568 - RNA, 23 nt, Human
ugcccaagaugggugcaguggca

SEQ ID NO: 1072569 - RNA, 24 nt, Human
ugcccaggcuggucuugaacuccu

SEQ ID NO: 1072570 - RNA, 24 nt, Human
ugccucagccucccaaaguauugg

SEQ ID NO: 1072571 - RNA, 23 nt, Human
ugcugggauuuccaggucuucag

SEQ ID NO: 1072572 - RNA, 24 nt, Human
ugcuucacuugccucagccuccca

SEQ ID NO: 1072573 - RNA, 21 nt, Human
uggcagauaaguggguaguca

SEQ ID NO: 1072574 - RNA, 19 nt, Human
uggcaugaucuuaguucac

SEQ ID NO: 1072575 - RNA, 24 nt, Human
uggccaggcuggucucgaacuccu

SEQ ID NO: 1072576 - RNA, 20 nt, Human
uggccucaagccauccuccu

SEQ ID NO: 1072577 - RNA, 21 nt, Human
uggccucaagccauccuccua

SEQ ID NO: 1072578 - RNA, 18 nt, Human
ugggauuacaggcaugag

SEQ ID NO: 1072579 - RNA, 19 nt, Human
ugggauuacaggcaugagc

SEQ ID NO: 1072580 - RNA, 19 nt, Human
ugggauuacaggcaugagc

SEQ ID NO: 1072581 - RNA, 21 nt, Human
ugggauuacaggcaugagcua

SEQ ID NO: 1072582 - RNA, 22 nt, Human
ugggauuacaggcaugagcuac

SEQ ID NO: 1072583 - RNA, 22 nt, Human
ugggauuacaggcaugagcuac

SEQ ID NO: 1072584 - RNA, 23 nt, Human
ugggauuacaggcaugagcuacu

SEQ ID NO: 1072585 - RNA, 24 nt, Human
ugggauuacaggcaugagcuacua

SEQ ID NO: 1072586 - RNA, 26 nt, Human
ugggauuacaggcaugagcuacuaug

SEQ ID NO: 1072587 - RNA, 18 nt, Human
ugggauuacaggcaugug

SEQ ID NO: 1072588 - RNA, 21 nt, Human
ugggauuacaggcaugugcca

SEQ ID NO: 1072589 - RNA, 22 nt, Human
ugggauuacaggcaugugccac

SEQ ID NO: 1072590 - RNA, 24 nt, Human
ugggauuacaggcaugugccacca

SEQ ID NO: 1072591 - RNA, 20 nt, Human
uggggcuuguguacaggugc

SEQ ID NO: 1072592 - RNA, 24 nt, Human
ugggguuuugccauguuggccagg

SEQ ID NO: 1072593 - RNA, 23 nt, Human
ugggugcaguggcaugaucuuag

SEQ ID NO: 1072594 - RNA, 21 nt, Human
uggguggaaccuuuaaggaug

SEQ ID NO: 1072595 - RNA, 20 nt, Human
uggguucaagugauucuccu

SEQ ID NO: 1072596 - RNA, 24 nt, Human
uggguucaagugauucuccugucu

SEQ ID NO: 1072597 - RNA, 22 nt, Human
ugguacaguggugugaucuugg

SEQ ID NO: 1072598 - RNA, 23 nt, Human
uggugugaucuuggcucacugua

SEQ ID NO: 1072599 - RNA, 24 nt, Human
uggugugaucuuggcucacuguaa

SEQ ID NO: 1072600 - RNA, 24 nt, Human
ugucucagccucccgaguagcugg

SEQ ID NO: 1072601 - RNA, 24 nt, Human
ugugguacaguggugugaucuugg

SEQ ID NO: 1072602 - RNA, 22 nt, Human
uguuuuuauuuuuuuagagaca

SEQ ID NO: 1072603 - RNA, 18 nt, Human
uuaguagagaugggguuu

SEQ ID NO: 1072604 - RNA, 22 nt, Human
uuaguagagaugggguuuugcc

SEQ ID NO: 1072605 - RNA, 24 nt, Human
uuaguagagaugggguuuugccau

SEQ ID NO: 1072606 - RNA, 26 nt, Human
uuauagagacggggccucacuaaguu

SEQ ID NO: 1072607 - RNA, 23 nt, Human
uucaagugauucuccugucucag

SEQ ID NO: 1072608 - RNA, 24 nt, Human
uucacugcagccucaaccuccugg

SEQ ID NO: 1072609 - RNA, 23 nt, Human
uucucccucucacccaaccucag

SEQ ID NO: 1072610 - RNA, 19 nt, Human
uucuuucguugcucaggcu

SEQ ID NO: 1072611 - RNA, 24 nt, Human
uugccauguuggccaggcuggucu

SEQ ID NO: 1072612 - RNA, 23 nt, Human
uugcucaggcugugguacagugg

SEQ ID NO: 1072613 - RNA, 24 nt, Human
uugcucaggcugugguacaguggu

SEQ ID NO: 1072614 - RNA, 18 nt, Human
uuggccucccaaagugcu

SEQ ID NO: 1072615 - RNA, 21 nt, Human
uuguguacaggugcuuacugu

SEQ ID NO: 1072616 - RNA, 18 nt, Human
uuugacaggcucccucca

SEQ ID NO: 1072617 - RNA, 18 nt, Human
uuugcauuuuuaguagag

SEQ ID NO: 1072618 - RNA, 19 nt, Human
uuugcauuuuuaguagaga

SEQ ID NO: 1072619 - RNA, 23 nt, Human
uuuugccauguuggccaggcugg

SEQ ID NO: 1072620 - RNA, 21 nt, Human
uuuuuaguagagaugggguuu

SEQ ID NO: 1072621 - RNA, 24 nt, Human
uuuuuaguagagaugggguuuugc

SEQ ID NO: 1072622 - RNA, 18 nt, Human
aaccugugcucuagaacu

SEQ ID NO: 1072623 - RNA, 24 nt, Human
aagcaacuagaacaugauucagaa

SEQ ID NO: 1072624 - RNA, 20 nt, Human
acaaagcacucgcaaaaacc

SEQ ID NO: 1072625 - RNA, 18 nt, Human
acaagaaaccccagaagg

SEQ ID NO: 1072626 - RNA, 20 nt, Human
acuccgcucauggggacaga

SEQ ID NO: 1072627 - RNA, 24 nt, Human
agaaccugugcucuagaacugcua

SEQ ID NO: 1072628 - RNA, 18 nt, Human
agaugaacacuggaccca

SEQ ID NO: 1072629 - RNA, 19 nt, Human
aggcaggaagggauucuaa

SEQ ID NO: 1072630 - RNA, 22 nt, Human
aggcaguggccugacugcagaa

SEQ ID NO: 1072631 - RNA, 19 nt, Human
augaagggagugggugcag

SEQ ID NO: 1072632 - RNA, 22 nt, Human
caaccgccacaagaaaccccag

SEQ ID NO: 1072633 - RNA, 26 nt, Human
cacuccugccccucagaggucaagga

SEQ ID NO: 1072634 - RNA, 19 nt, Human
cacugccaugaaacaaggc

SEQ ID NO: 1072635 - RNA, 24 nt, Human
cacugccaugaaacaaggcaggaa

SEQ ID NO: 1072636 - RNA, 27 nt, Human
cacugccaugaaacaaggcaggaaggg

SEQ ID NO: 1072637 - RNA, 23 nt, Human
cagguuacauucgucuuccacug

SEQ ID NO: 1072638 - RNA, 19 nt, Human
caguaggcaguggccugac

SEQ ID NO: 1072639 - RNA, 20 nt, Human
cauuucacugccaugaaaca

SEQ ID NO: 1072640 - RNA, 24 nt, Human
ccacaagaaaccccagaaggguua

SEQ ID NO: 1072641 - RNA, 23 nt, Human
cgccacaagaaaccccagaaggg

SEQ ID NO: 1072642 - RNA, 20 nt, Human
cuaauacacacaccaggaag

SEQ ID NO: 1072643 - RNA, 24 nt, Human
cucaagaugucuacagaugugguc

SEQ ID NO: 1072644 - RNA, 21 nt, Human
cuccccaaaguccuuaguaaa

SEQ ID NO: 1072645 - RNA, 23 nt, Human
cucgcaaaaacccaagucacuac

SEQ ID NO: 1072646 - RNA, 20 nt, Human
cuuggacaggaccaagaggc

SEQ ID NO: 1072647 - RNA, 19 nt, Human
gagcagaggacagacuccg

SEQ ID NO: 1072648 - RNA, 21 nt, Human
gcagaggacagacuccgcuca

SEQ ID NO: 1072649 - RNA, 24 nt, Human
gcagguuacauucgucuuccacug

SEQ ID NO: 1072650 - RNA, 22 nt, Human
ggagcuuuuccauagcuuagac

SEQ ID NO: 1072651 - RNA, 19 nt, Human
gggacagacaggcucuguu

SEQ ID NO: 1072652 - RNA, 21 nt, Human
gucagugugacaugugcaggu

SEQ ID NO: 1072653 - RNA, 24 nt, Human
uaaacaaagcacucgcaaaaaccc

SEQ ID NO: 1072654 - RNA, 24 nt, Human
uaaauuaacacauaacgaaauuca

SEQ ID NO: 1072655 - RNA, 23 nt, Human
uacaguuaugcucagaugaacac

SEQ ID NO: 1072656 - RNA, 21 nt, Human
uacauucgucuuccacuggaa

SEQ ID NO: 1072657 - RNA, 24 nt, Human
uagaacaugauucagaaaucagug

SEQ ID NO: 1072658 - RNA, 24 nt, Human
uauuauacugauauggaaaaagga

SEQ ID NO: 1072659 - RNA, 18 nt, Human
ucauggggacagacaggc

SEQ ID NO: 1072660 - RNA, 19 nt, Human
uccauagcuuagacugaga

SEQ ID NO: 1072661 - RNA, 19 nt, Human
ucccaaccuagagccagau

SEQ ID NO: 1072662 - RNA, 21 nt, Human
uccccaaaguccuuaguaaac

SEQ ID NO: 1072663 - RNA, 23 nt, Human
uccccaaaguccuuaguaaacaa

SEQ ID NO: 1072664 - RNA, 24 nt, Human
uggaaugacuagagcccccaggca

SEQ ID NO: 1072665 - RNA, 24 nt, Human
uggcuuagcaugguuccuccccaa

SEQ ID NO: 1072666 - RNA, 19 nt, Human
ugggagccacuggucccca

SEQ ID NO: 1072667 - RNA, 21 nt, Human
uggggucagggaggaaacagu

SEQ ID NO: 1072668 - RNA, 18 nt, Human
uguggucagugugacaug

SEQ ID NO: 1072669 - RNA, 20 nt, Human
uuagacugagaaccugugcu

SEQ ID NO: 1072670 - RNA, 25 nt, Human
uuagcaugguuccuccccaaagucc

SEQ ID NO: 1072671 - RNA, 27 nt, Human
aaaaaacaccaaccagauaaaaagucc

SEQ ID NO: 1072672 - RNA, 19 nt, Human
aaaaguccaaaagacaaaa

SEQ ID NO: 1072673 - RNA, 19 nt, Human
aaacacgcacacauacaug

SEQ ID NO: 1072674 - RNA, 26 nt, Human
aaagcagugagaaucaaagcccaacc

SEQ ID NO: 1072675 - RNA, 20 nt, Human
aaagcccaaccaaggcacug

SEQ ID NO: 1072676 - RNA, 21 nt, Human
aaaugcucagcaaaugugagc

SEQ ID NO: 1072677 - RNA, 18 nt, Human
aacacgcacacauacaug

SEQ ID NO: 1072678 - RNA, 18 nt, Human
aaccaaggcacugaacaa

SEQ ID NO: 1072679 - RNA, 22 nt, Human
aagcagugagaaucaaagccca

SEQ ID NO: 1072680 - RNA, 22 nt, Human
acaaagcagugagaaucaaagc

SEQ ID NO: 1072681 - RNA, 19 nt, Human
acauauguacacacauaua

SEQ ID NO: 1072682 - RNA, 24 nt, Human
accauguuggccagggucgucucg

SEQ ID NO: 1072683 - RNA, 20 nt, Human
agacuccaaggcaagugccc

SEQ ID NO: 1072684 - RNA, 24 nt, Human
agcgugcugggauuacaggcguga

SEQ ID NO: 1072685 - RNA, 24 nt, Human
agggaaggagaggcgcgaaaagga

SEQ ID NO: 1072686 - RNA, 24 nt, Human
aggugauccaccugccuuggccuc

SEQ ID NO: 1072687 - RNA, 22 nt, Human
aguaauuguaucccacaccccu

SEQ ID NO: 1072688 - RNA, 21 nt, Human
augaaucccuuauuuuccuua

SEQ ID NO: 1072689 - RNA, 20 nt, Human
augggauuucaccauguugg

SEQ ID NO: 1072690 - RNA, 22 nt, Human
augggauuucaccauguuggcc

SEQ ID NO: 1072691 - RNA, 24 nt, Human
augggauuucaccauguuggccag

SEQ ID NO: 1072692 - RNA, 22 nt, Human
caaagcagugagaaucaaagcc

SEQ ID NO: 1072693 - RNA, 19 nt, Human
caacaacaacaaaaucacc

SEQ ID NO: 1072694 - RNA, 21 nt, Human
caacaacaacaaaaucaccuc

SEQ ID NO: 1072695 - RNA, 19 nt, Human
cacaccaaaaaugccugac

SEQ ID NO: 1072696 - RNA, 18 nt, Human
caccauguuggccagggu

SEQ ID NO: 1072697 - RNA, 24 nt, Human
caccauguuggccagggucgucuc

SEQ ID NO: 1072698 - RNA, 20 nt, Human
caccugccuuggccucccag

SEQ ID NO: 1072699 - RNA, 23 nt, Human
cagcaaaugugagcuacuguuau

SEQ ID NO: 1072700 - RNA, 19 nt, Human
cagcaaccggcgucggugg

SEQ ID NO: 1072701 - RNA, 20 nt, Human
cagcaaccggcgucgguggc

SEQ ID NO: 1072702 - RNA, 19 nt, Human
cagcgugcugggauuacag

SEQ ID NO: 1072703 - RNA, 19 nt, Human
cauauguacacacauauau

SEQ ID NO: 1072704 - RNA, 18 nt, Human
cauccagcaacauuccau

SEQ ID NO: 1072705 - RNA, 21 nt, Human
ccaaaaaugccugacaguaau

SEQ ID NO: 1072706 - RNA, 19 nt, Human
ccaaaagacaaaauguaaa

SEQ ID NO: 1072707 - RNA, 22 nt, Human
ccagcgugcugggauuacaggc

SEQ ID NO: 1072708 - RNA, 22 nt, Human
ccagcgugcugggauuacaggc

SEQ ID NO: 1072709 - RNA, 24 nt, Human
ccagcgugcugggauuacaggcgu

SEQ ID NO: 1072710 - RNA, 24 nt, Human
ccccuggggcucuggggaucucug

SEQ ID NO: 1072711 - RNA, 18 nt, Human
cccggccccgccgcugcc

SEQ ID NO: 1072712 - RNA, 19 nt, Human
ccgcugccgcugucacccg

SEQ ID NO: 1072713 - RNA, 20 nt, Human
ccgcugccgcugucacccgu

SEQ ID NO: 1072714 - RNA, 20 nt, Human
ccgcugucacccguggccgc

SEQ ID NO: 1072715 - RNA, 23 nt, Human
ccgcugucacccguggccgcucc

SEQ ID NO: 1072716 - RNA, 21 nt, Human
ccugaccucaggugauccacc

SEQ ID NO: 1072717 - RNA, 23 nt, Human
ccugaccucaggugauccaccug

SEQ ID NO: 1072718 - RNA, 23 nt, Human
ccugaccucaggugauccaccug

SEQ ID NO: 1072719 - RNA, 22 nt, Human
cggaaaugagacagcugugggg

SEQ ID NO: 1072720 - RNA, 24 nt, Human
cucaggugauccaccugccuuggc

SEQ ID NO: 1072721 - RNA, 22 nt, Human
cucugaguccaucccagggccc

SEQ ID NO: 1072722 - RNA, 23 nt, Human
cugccuuggccucccagcgugcu

SEQ ID NO: 1072723 - RNA, 19 nt, Human
cuuuuuguauuuuuaauag

SEQ ID NO: 1072724 - RNA, 23 nt, Human
gaccucaggugauccaccugccu

SEQ ID NO: 1072725 - RNA, 18 nt, Human
gagccaccgccauuuccc

SEQ ID NO: 1072726 - RNA, 18 nt, Human
gauuacaggcgugagcca

SEQ ID NO: 1072727 - RNA, 20 nt, Human
gauuacaggcgugagccacc

SEQ ID NO: 1072728 - RNA, 21 nt, Human
gauuacaggcgugagccaccg

SEQ ID NO: 1072729 - RNA, 18 nt, Human
gcuccaacgacgcgcauc

SEQ ID NO: 1072730 - RNA, 19 nt, Human
ggaaggagaggcgcgaaaa

SEQ ID NO: 1072731 - RNA, 22 nt, Human
ggaaggagaggcgcgaaaagga

SEQ ID NO: 1072732 - RNA, 22 nt, Human
ggagcgcagcccggccccgccg

SEQ ID NO: 1072733 - RNA, 22 nt, Human
ggccccgccgcugccgcuguca

SEQ ID NO: 1072734 - RNA, 22 nt, Human
gggauuucaccauguuggccag

SEQ ID NO: 1072735 - RNA, 18 nt, Human
ggggaagagggaaggaga

SEQ ID NO: 1072736 - RNA, 23 nt, Human
ggucgucucgaacuccugaccuc

SEQ ID NO: 1072737 - RNA, 21 nt, Human
gguguggggaagagggaagga

SEQ ID NO: 1072738 - RNA, 21 nt, Human
guauuccauugcauguaccaa

SEQ ID NO: 1072739 - RNA, 20 nt, Human
guccuuuuuuucccuccucu

SEQ ID NO: 1072740 - RNA, 24 nt, Human
gugauccaccugccuuggccuccc

SEQ ID NO: 1072741 - RNA, 21 nt, Human
gugcugggauuacaggcguga

SEQ ID NO: 1072742 - RNA, 20 nt, Human
guugucuggcuccagcguuu

SEQ ID NO: 1072743 - RNA, 21 nt, Human
uaaaaaagguggcaaauagua

SEQ ID NO: 1072744 - RNA, 20 nt, Human
uaaauuacaaaaaacaccaa

SEQ ID NO: 1072745 - RNA, 22 nt, Human
uaaauuacaaaaaacaccaacc

SEQ ID NO: 1072746 - RNA, 21 nt, Human
uaagcuguacuucacaaagca

SEQ ID NO: 1072747 - RNA, 23 nt, Human
uacaaaaaacaccaaccagauaa

SEQ ID NO: 1072748 - RNA, 24 nt, Human
uacaggcgugagccaccgccauuu

SEQ ID NO: 1072749 - RNA, 19 nt, Human
uaccacagagauuucugga

SEQ ID NO: 1072750 - RNA, 21 nt, Human
ucaggugauccaccugccuug

SEQ ID NO: 1072751 - RNA, 23 nt, Human
uccaaaagacaaaauguaaaaca

SEQ ID NO: 1072752 - RNA, 22 nt, Human
uccaccugccuuggccucccag

SEQ ID NO: 1072753 - RNA, 24 nt, Human
uccaccugccuuggccucccagcg

SEQ ID NO: 1072754 - RNA, 19 nt, Human
uccauuaccaacucgcugu

SEQ ID NO: 1072755 - RNA, 24 nt, Human
ucccagcgugcugggauuacaggc

SEQ ID NO: 1072756 - RNA, 24 nt, Human
ucccuccucuuaagagacacgguc

SEQ ID NO: 1072757 - RNA, 24 nt, Human
ucccucuaacggcuccggcagcaa

SEQ ID NO: 1072758 - RNA, 20 nt, Human
uccuuaugaaucccuuauuu

SEQ ID NO: 1072759 - RNA, 20 nt, Human
ucgcgcuccaacgacgcgca

SEQ ID NO: 1072760 - RNA, 21 nt, Human
ucggaaaugagacagcugugg

SEQ ID NO: 1072761 - RNA, 23 nt, Human
ucucgaacuccugaccucaggug

SEQ ID NO: 1072762 - RNA, 23 nt, Human
ucucugaguccaucccagggccc

SEQ ID NO: 1072763 - RNA, 22 nt, Human
ucuggaguugucuggcuccagc

SEQ ID NO: 1072764 - RNA, 24 nt, Human
ucuggaguugucuggcuccagcgu

SEQ ID NO: 1072765 - RNA, 22 nt, Human
ucuuggggguaaaaauaagcug

SEQ ID NO: 1072766 - RNA, 23 nt, Human
ugaaaggcugaccgccuacuuug

SEQ ID NO: 1072767 - RNA, 24 nt, Human
ugaccucaggugauccaccugccu

SEQ ID NO: 1072768 - RNA, 19 nt, Human
ugccacacaaaugcucagc

SEQ ID NO: 1072769 - RNA, 21 nt, Human
ugccuuggccucccagcgugc

SEQ ID NO: 1072770 - RNA, 24 nt, Human
ugcugggauuacaggcgugagcca

SEQ ID NO: 1072771 - RNA, 18 nt, Human
uggaagugggacaacuuu

SEQ ID NO: 1072772 - RNA, 19 nt, Human
uggaguugucuggcuccag

SEQ ID NO: 1072773 - RNA, 19 nt, Human
uggaguugucuggcuccag

SEQ ID NO: 1072774 - RNA, 21 nt, Human
uggcaaauaguauccuuauga

SEQ ID NO: 1072775 - RNA, 24 nt, Human
uggccagggucgucucgaacuccu

SEQ ID NO: 1072776 - RNA, 18 nt, Human
ugggaaggugucuguuuc

SEQ ID NO: 1072777 - RNA, 18 nt, Human
ugggauuacaggcgugag

SEQ ID NO: 1072778 - RNA, 22 nt, Human
ugggauuacaggcgugagccac

SEQ ID NO: 1072779 - RNA, 23 nt, Human
ugggauuacaggcgugagccacc

SEQ ID NO: 1072780 - RNA, 23 nt, Human
ugggauuacaggcgugagccacc

SEQ ID NO: 1072781 - RNA, 24 nt, Human
ugggauuacaggcgugagccaccg

SEQ ID NO: 1072782 - RNA, 26 nt, Human
ugggauuacaggcgugagccaccgcc

SEQ ID NO: 1072783 - RNA, 24 nt, Human
ugggauuucaccauguuggccagg

SEQ ID NO: 1072784 - RNA, 23 nt, Human
uggggaagagggaaggagaggcg

SEQ ID NO: 1072785 - RNA, 20 nt, Human
uggggaugggaaggugucug

SEQ ID NO: 1072786 - RNA, 20 nt, Human
uggggguaaaaauaagcugu

SEQ ID NO: 1072787 - RNA, 26 nt, Human
uguacacuuauauuaacauauguaca

SEQ ID NO: 1072788 - RNA, 18 nt, Human
uguccaauaauaacuaca

SEQ ID NO: 1072789 - RNA, 19 nt, Human
uguggggaagagggaagga

SEQ ID NO: 1072790 - RNA, 22 nt, Human
uuaacauauguacacacauaua

SEQ ID NO: 1072791 - RNA, 22 nt, Human
uuaauagaugggauuucaccau

SEQ ID NO: 1072792 - RNA, 21 nt, Human
uucaacaacaacaaaaucacc

SEQ ID NO: 1072793 - RNA, 18 nt, Human
uuccuuaggguauaugcc

SEQ ID NO: 1072794 - RNA, 20 nt, Human
uucugcuuuuuuuuuccuga

SEQ ID NO: 1072795 - RNA, 24 nt, Human
uuuaauagaugggauuucaccaug

SEQ ID NO: 1072796 - RNA, 24 nt, Human
uuucaccauguuggccagggucgu

SEQ ID NO: 1072797 - RNA, 21 nt, Human
uuuuuguauuuuuaauagaug

SEQ ID NO: 1072798 - RNA, 27 nt, Human
uuuuuuggacauacuuuaaugcaaaua

SEQ ID NO: 1072799 - RNA, 22 nt, Human
aaaacagacacacagcuuucuc

SEQ ID NO: 1072800 - RNA, 19 nt, Human
aaaagcaccaaucagcacc

SEQ ID NO: 1072801 - RNA, 21 nt, Human
aaacagacacacagcuuucuc

SEQ ID NO: 1072802 - RNA, 23 nt, Human
aaacagacacacagcuuucucca

SEQ ID NO: 1072803 - RNA, 24 nt, Human
aaacagacacacagcuuucuccau

SEQ ID NO: 1072804 - RNA, 19 nt, Human
aaccuagaggcuccaagcu

SEQ ID NO: 1072805 - RNA, 21 nt, Human
aagagcacgggaaagccaaga

SEQ ID NO: 1072806 - RNA, 18 nt, Human
aagaggaggugaggcaag

SEQ ID NO: 1072807 - RNA, 24 nt, Human
aagccucagcauugagagccaaga

SEQ ID NO: 1072808 - RNA, 25 nt, Human
aagcugcugggagcuggcugggggc

SEQ ID NO: 1072809 - RNA, 28 nt, Human
aaggaagcugugcagugggaggcuggug

SEQ ID NO: 1072810 - RNA, 22 nt, Human
aaggagggaaggaagcugugca

SEQ ID NO: 1072811 - RNA, 23 nt, Human
acacagcuuucuccauagacaaa

SEQ ID NO: 1072812 - RNA, 20 nt, Human
acaguaaaggcggaagguga

SEQ ID NO: 1072813 - RNA, 24 nt, Human
acccuuguaaggcugucauuuggg

SEQ ID NO: 1072814 - RNA, 23 nt, Human
acucacucaucaccaaggagaug

SEQ ID NO: 1072815 - RNA, 25 nt, Human
acugugccuucuuccuggccugcug

SEQ ID NO: 1072816 - RNA, 29 nt, Human
acugugccuucuuccuggccugcuggagg

SEQ ID NO: 1072817 - RNA, 24 nt, Human
agaaaggaggagcucuaaccccau

SEQ ID NO: 1072818 - RNA, 21 nt, Human
agaagaaaggaggagcucuaa

SEQ ID NO: 1072819 - RNA, 20 nt, Human
agacaaaacugaccccuaau

SEQ ID NO: 1072820 - RNA, 21 nt, Human
agagacaaggcaaggcuugag

SEQ ID NO: 1072821 - RNA, 18 nt, Human
agaggagagugaaggagg

SEQ ID NO: 1072822 - RNA, 23 nt, Human
agcaagaaggggacauggcccca

SEQ ID NO: 1072823 - RNA, 24 nt, Human
agccugaugcuggaggaggagccu

SEQ ID NO: 1072824 - RNA, 19 nt, Human
aggagaacagaggcccuga

SEQ ID NO: 1072825 - RNA, 22 nt, Human
aggaguaugccugccaacaccc

SEQ ID NO: 1072826 - RNA, 19 nt, Human
aggccuggagggccuugag

SEQ ID NO: 1072827 - RNA, 27 nt, Human
agggacccaugggaggaggaagggaug

SEQ ID NO: 1072828 - RNA, 19 nt, Human
aggggcagggaggggagag

SEQ ID NO: 1072829 - RNA, 20 nt, Human
aggggcagggaggggagagg

SEQ ID NO: 1072830 - RNA, 19 nt, Human
agugaaggagggaaggaag

SEQ ID NO: 1072831 - RNA, 21 nt, Human
aguggagugcccugggguucc

SEQ ID NO: 1072832 - RNA, 25 nt, Human
augaagagccugaggaaaagcacca

SEQ ID NO: 1072833 - RNA, 24 nt, Human
augcagaaacaggaagggaagcaa

SEQ ID NO: 1072834 - RNA, 20 nt, Human
auggagcggaguggcucuga

SEQ ID NO: 1072835 - RNA, 23 nt, Human
auggagggaggaaggggaaggag

SEQ ID NO: 1072836 - RNA, 21 nt, Human
auugagagccaagaggaggag

SEQ ID NO: 1072837 - RNA, 22 nt, Human
caaaacugaccccuaauuccga

SEQ ID NO: 1072838 - RNA, 23 nt, Human
caagccucagcauugagagccaa

SEQ ID NO: 1072839 - RNA, 22 nt, Human
cacagcuuucuccauagacaaa

SEQ ID NO: 1072840 - RNA, 19 nt, Human
cagagcucagauccaggcu

SEQ ID NO: 1072841 - RNA, 21 nt, Human
cagcaagaaggggacauggcc

SEQ ID NO: 1072842 - RNA, 23 nt, Human
cagcaagaaggggacauggcccc

SEQ ID NO: 1072843 - RNA, 18 nt, Human
cagcagccagccuuccca

SEQ ID NO: 1072844 - RNA, 20 nt, Human
cagccagccuucccaggaau

SEQ ID NO: 1072845 - RNA, 27 nt, Human
cagcuggaccucaagggcuuggaagcu

SEQ ID NO: 1072846 - RNA, 21 nt, Human
caggacagggcccacgccguc

SEQ ID NO: 1072847 - RNA, 19 nt, Human
caggccuggagggccuuga

SEQ ID NO: 1072848 - RNA, 21 nt, Human
cagggaggggagaggagagug

SEQ ID NO: 1072849 - RNA, 22 nt, Human
caguaacccuccagugcucccc

SEQ ID NO: 1072850 - RNA, 19 nt, Human
cagucccagucccaguucc

SEQ ID NO: 1072851 - RNA, 18 nt, Human
caguggagugcccugggg

SEQ ID NO: 1072852 - RNA, 23 nt, Human
caucaggaaaaccucuggccaga

SEQ ID NO: 1072853 - RNA, 25 nt, Human
cauggccccaagauagccaaucagg

SEQ ID NO: 1072854 - RNA, 21 nt, Human
ccaccaggcuccacuuccaac

SEQ ID NO: 1072855 - RNA, 22 nt, Human
cccacagcuggaccucaagggc

SEQ ID NO: 1072856 - RNA, 21 nt, Human
cccaccaggcuccacuuccaa

SEQ ID NO: 1072857 - RNA, 18 nt, Human
cccccggccggaagcagg

SEQ ID NO: 1072858 - RNA, 23 nt, Human
cccccggccggaagcaggagggc

SEQ ID NO: 1072859 - RNA, 23 nt, Human
ccccuccucccuucacucccuaa

SEQ ID NO: 1072860 - RNA, 18 nt, Human
cccucuuuugggacuuug

SEQ ID NO: 1072861 - RNA, 18 nt, Human
cccugggguuccuggggu

SEQ ID NO: 1072862 - RNA, 25 nt, Human
ccucucccacccuggcagcccacaa

SEQ ID NO: 1072863 - RNA, 23 nt, Human
ccugggaugggcccagaccucug

SEQ ID NO: 1072864 - RNA, 19 nt, Human
ccugggguuccuggggucc

SEQ ID NO: 1072865 - RNA, 21 nt, Human
cgacucacccaucaggaaaac

SEQ ID NO: 1072866 - RNA, 19 nt, Human
cuaauuccgacucacccau

SEQ ID NO: 1072867 - RNA, 23 nt, Human
cuccugcccaaucucaagcugcc

SEQ ID NO: 1072868 - RNA, 19 nt, Human
cugcuuucuugagucuagc

SEQ ID NO: 1072869 - RNA, 21 nt, Human
cuuggaagcucccagacuugc

SEQ ID NO: 1072870 - RNA, 18 nt, Human
cuuuuaaacaaccauauc

SEQ ID NO: 1072871 - RNA, 20 nt, Human
gaaagccaagagggucuuca

SEQ ID NO: 1072872 - RNA, 19 nt, Human
gaccaggggucuccaaggc

SEQ ID NO: 1072873 - RNA, 20 nt, Human
gacuuuuucucccuuaauug

SEQ ID NO: 1072874 - RNA, 23 nt, Human
gagaaagaggggagaggucucag

SEQ ID NO: 1072875 - RNA, 26 nt, Human
gagaggagagugaaggagggaaggaa

SEQ ID NO: 1072876 - RNA, 21 nt, Human
gagcauccaaaccauaucaga

SEQ ID NO: 1072877 - RNA, 19 nt, Human
gagccugaugcuggaggag

SEQ ID NO: 1072878 - RNA, 19 nt, Human
gaggaaaagcaccaaucag

SEQ ID NO: 1072879 - RNA, 19 nt, Human
gaggaggaagggaugcggg

SEQ ID NO: 1072880 - RNA, 19 nt, Human
gaggcuggugccgcuggga

SEQ ID NO: 1072881 - RNA, 21 nt, Human
gagggcccaggggggugagcg

SEQ ID NO: 1072882 - RNA, 19 nt, Human
gaggugaggcaaggggcag

SEQ ID NO: 1072883 - RNA, 22 nt, Human
gagugcccugggguuccugggg

SEQ ID NO: 1072884 - RNA, 21 nt, Human
gcaaggggcagggaggggaga

SEQ ID NO: 1072885 - RNA, 22 nt, Human
gcccugggguuccugggguccc

SEQ ID NO: 1072886 - RNA, 20 nt, Human
gcuggaguauguguuaucuu

SEQ ID NO: 1072887 - RNA, 21 nt, Human
gcuggugccgcugggaugccu

SEQ ID NO: 1072888 - RNA, 24 nt, Human
gcuuccacucccagggaguugauu

SEQ ID NO: 1072889 - RNA, 19 nt, Human
ggaagcaggagggcccagg

SEQ ID NO: 1072890 - RNA, 26 nt, Human
ggacagggcccacgccguccuccucg

SEQ ID NO: 1072891 - RNA, 18 nt, Human
ggagaacuuuguguguac

SEQ ID NO: 1072892 - RNA, 18 nt, Human
ggagaggucucagacucu

SEQ ID NO: 1072893 - RNA, 19 nt, Human
ggaggaagggaugcgggug

SEQ ID NO: 1072894 - RNA, 21 nt, Human
ggagggaggaaggggaaggag

SEQ ID NO: 1072895 - RNA, 20 nt, Human
ggcaagagcagcuuccggag

SEQ ID NO: 1072896 - RNA, 19 nt, Human
ggcccaggggggugagcga

SEQ ID NO: 1072897 - RNA, 21 nt, Human
ggcucacaauucugcaggcug

SEQ ID NO: 1072898 - RNA, 19 nt, Human
ggcugggggcacagagcuc

SEQ ID NO: 1072899 - RNA, 21 nt, Human
ggcugggggcacagagcucag

SEQ ID NO: 1072900 - RNA, 20 nt, Human
ggcuuccacucccagggagu

SEQ ID NO: 1072901 - RNA, 20 nt, Human
gggagggccaggcuauuugg

SEQ ID NO: 1072902 - RNA, 19 nt, Human
gggaugccucugcaagccu

SEQ ID NO: 1072903 - RNA, 24 nt, Human
ggucaaggauugggcaagagucag

SEQ ID NO: 1072904 - RNA, 24 nt, Human
gucaguaacccuccagugcucccc

SEQ ID NO: 1072905 - RNA, 22 nt, Human
guguguaccagcugcacugguc

SEQ ID NO: 1072906 - RNA, 18 nt, Human
guuuugaaccccucucuc

SEQ ID NO: 1072907 - RNA, 22 nt, Human
uaaacaaccauaucuaugugaa

SEQ ID NO: 1072908 - RNA, 20 nt, Human
uacaggacagggcccacgcc

SEQ ID NO: 1072909 - RNA, 20 nt, Human
uaggucccaaauagccaggg

SEQ ID NO: 1072910 - RNA, 26 nt, Human
uauggcaagagcagcuuccggagaag

SEQ ID NO: 1072911 - RNA, 24 nt, Human
uauuuuggcucacaauucugcagg

SEQ ID NO: 1072912 - RNA, 25 nt, Human
ucagcacccucuuuugggacuuugg

SEQ ID NO: 1072913 - RNA, 26 nt, Human
uccaaauacuucccaccaggcuccac

SEQ ID NO: 1072914 - RNA, 26 nt, Human
uccaaauacuucccaccaggcuccuu

SEQ ID NO: 1072915 - RNA, 23 nt, Human
ucccuaauacugucaggucucug

SEQ ID NO: 1072916 - RNA, 19 nt, Human
ucccuuggaaaccaaugaa

SEQ ID NO: 1072917 - RNA, 22 nt, Human
uccugggcucccccaugaaugc

SEQ ID NO: 1072918 - RNA, 22 nt, Human
ucuccaaggccuggugcaccaa

SEQ ID NO: 1072919 - RNA, 19 nt, Human
ucucuggggagcccaaaga

SEQ ID NO: 1072920 - RNA, 20 nt, Human
ucuggccaacauguccuggc

SEQ ID NO: 1072921 - RNA, 21 nt, Human
ugaaccccucucucaguucaa

SEQ ID NO: 1072922 - RNA, 23 nt, Human
ugaccccuaauuccgacucaccc

SEQ ID NO: 1072923 - RNA, 19 nt, Human
ugagacaggagaacuuugu

SEQ ID NO: 1072924 - RNA, 18 nt, Human
ugagagccaagaggagga

SEQ ID NO: 1072925 - RNA, 24 nt, Human
ugagagccaagaggaggagauagg

SEQ ID NO: 1072926 - RNA, 19 nt, Human
ugagaggggagauaaaaac

SEQ ID NO: 1072927 - RNA, 19 nt, Human
ugagauaggagucaagguc

SEQ ID NO: 1072928 - RNA, 21 nt, Human
ugagauaggagucaaggucaa

SEQ ID NO: 1072929 - RNA, 22 nt, Human
ugagaugaaugaaucuaaugca

SEQ ID NO: 1072930 - RNA, 23 nt, Human
ugaggauuugcucccuuggaaac

SEQ ID NO: 1072931 - RNA, 19 nt, Human
ugcagugggaggcuggugc

SEQ ID NO: 1072932 - RNA, 21 nt, Human
ugccaacaccccugucuucug

SEQ ID NO: 1072933 - RNA, 23 nt, Human
ugccaacaccccugucuucuggu

SEQ ID NO: 1072934 - RNA, 19 nt, Human
ugccugccaacaccccugu

SEQ ID NO: 1072935 - RNA, 18 nt, Human
ugccuggacugugccuuc

SEQ ID NO: 1072936 - RNA, 23 nt, Human
ugcugggagcuggcugggggcag

SEQ ID NO: 1072937 - RNA, 20 nt, Human
uggcaaaugagaugaaugaa

SEQ ID NO: 1072938 - RNA, 21 nt, Human
uggcaagagcagcuuccggag

SEQ ID NO: 1072939 - RNA, 25 nt, Human
uggcaagagcagcuuccgggguccc

SEQ ID NO: 1072940 - RNA, 19 nt, Human
uggcagcaagaaggggaca

SEQ ID NO: 1072941 - RNA, 23 nt, Human
uggccccaagauagccaaucagg

SEQ ID NO: 1072942 - RNA, 18 nt, Human
ugggaagugggccugggg

SEQ ID NO: 1072943 - RNA, 19 nt, Human
ugggaagugggccuggggc

SEQ ID NO: 1072944 - RNA, 19 nt, Human
ugggacuuuggggaugaga

SEQ ID NO: 1072945 - RNA, 20 nt, Human
ugggaggcuggugccgcugg

SEQ ID NO: 1072946 - RNA, 21 nt, Human
ugggaggcuggugccgcuggg

SEQ ID NO: 1072947 - RNA, 22 nt, Human
ugggaugggcccagaccucugg

SEQ ID NO: 1072948 - RNA, 19 nt, Human
ugggcauggagggaggaag

SEQ ID NO: 1072949 - RNA, 31 nt, Human
uggggagcccaaagagcacgggaaagccaag

SEQ ID NO: 1072950 - RNA, 21 nt, Human
uuauuuuggcucacaauucug

SEQ ID NO: 1072951 - RNA, 21 nt, Human
uugggaagugggccuggggcu

SEQ ID NO: 1072952 - RNA, 22 nt, Human
uuuauaugucuuguauccccac

SEQ ID NO: 1072953 - RNA, 22 nt, Human
cucuagcaauccucagacuagc

SEQ ID NO: 1072954 - RNA, 22 nt, Human
cugcucugccaaguccucuuuc

SEQ ID NO: 1072955 - RNA, 22 nt, Human
gagugcauuuccugaggguggc

SEQ ID NO: 1072956 - RNA, 21 nt, Human
gucccuggcacauggaucuga

SEQ ID NO: 1072957 - RNA, 21 nt, Human
ucugccaaguccucuuucuuc

SEQ ID NO: 1072958 - RNA, 18 nt, Human
ugaggguggcccguuggu

SEQ ID NO: 1072959 - RNA, 23 nt, Human
uggcacauggaucugagcuuggc

SEQ ID NO: 1072960 - RNA, 19 nt, Human
ugugcagaugccgagugca

SEQ ID NO: 1072961 - RNA, 19 nt, Human
aagaggaaauagagggacc

SEQ ID NO: 1072962 - RNA, 19 nt, Human
aagccagcuccacucacug

SEQ ID NO: 1072963 - RNA, 30 nt, Human
agaaaagccagcuccacucacugagggguu

SEQ ID NO: 1072964 - RNA, 22 nt, Human
agagucuuuaauucaaacaaaa

SEQ ID NO: 1072965 - RNA, 21 nt, Human
agaugcugccauucuuaggaa

SEQ ID NO: 1072966 - RNA, 19 nt, Human
agauguacacguggugucc

SEQ ID NO: 1072967 - RNA, 21 nt, Human
agcuauguaggacacagcccc

SEQ ID NO: 1072968 - RNA, 22 nt, Human
agcuccacucacugagcucagc

SEQ ID NO: 1072969 - RNA, 18 nt, Human
aucuggacuaggcaguag

SEQ ID NO: 1072970 - RNA, 19 nt, Human
cagagaauccccaauacac

SEQ ID NO: 1072971 - RNA, 19 nt, Human
cagauguacacgugguguc

SEQ ID NO: 1072972 - RNA, 20 nt, Human
cagccccagagagacugugg

SEQ ID NO: 1072973 - RNA, 24 nt, Human
cagcgacagaaaagccagcuccac

SEQ ID NO: 1072974 - RNA, 26 nt, Human
cagcucauggcaccaaaaauugagag

SEQ ID NO: 1072975 - RNA, 24 nt, Human
caguagcacucagcgacagaaaag

SEQ ID NO: 1072976 - RNA, 23 nt, Human
cccugagccacgacaucuggacu

SEQ ID NO: 1072977 - RNA, 25 nt, Human
cgacagaaaagccagcuccacucac

SEQ ID NO: 1072978 - RNA, 21 nt, Human
gccccagagagacuguggaag

SEQ ID NO: 1072979 - RNA, 25 nt, Human
ggaggugggugggugacacaggcug

SEQ ID NO: 1072980 - RNA, 21 nt, Human
gugcagcugguggucuacaga

SEQ ID NO: 1072981 - RNA, 20 nt, Human
gugggugggugacacaggcu

SEQ ID NO: 1072982 - RNA, 19 nt, Human
ucuggacuaggcaguagca

SEQ ID NO: 1072983 - RNA, 19 nt, Human
ugaaggaggugggugggug

SEQ ID NO: 1072984 - RNA, 22 nt, Human
uugacaaaugaugguagcuauu

SEQ ID NO: 1072985 - RNA, 23 nt, Human
aaacaucuccccuauucccagau

SEQ ID NO: 1072986 - RNA, 23 nt, Human
aaagcugacccaauaccuacagu

SEQ ID NO: 1072987 - RNA, 20 nt, Human
aaaggaaagagacugcugcc

SEQ ID NO: 1072988 - RNA, 22 nt, Human
aagcaggcauucucauucacuu

SEQ ID NO: 1072989 - RNA, 21 nt, Human
aagcugacccaauaccuacag

SEQ ID NO: 1072990 - RNA, 19 nt, Human
acccaauaccuacaguacc

SEQ ID NO: 1072991 - RNA, 25 nt, Human
acccugcaacccagcgauuagacug

SEQ ID NO: 1072992 - RNA, 18 nt, Human
accuaccagaaaccucaa

SEQ ID NO: 1072993 - RNA, 20 nt, Human
acggcaugaaagcugacccc

SEQ ID NO: 1072994 - RNA, 24 nt, Human
acucugugcuuacucauauucagg

SEQ ID NO: 1072995 - RNA, 19 nt, Human
acugcauaacuuccaacuc

SEQ ID NO: 1072996 - RNA, 20 nt, Human
acuucaaugaacauuugcac

SEQ ID NO: 1072997 - RNA, 20 nt, Human
acuuguauaacuccaaccuu

SEQ ID NO: 1072998 - RNA, 21 nt, Human
agaaaauggcagaacaguuac

SEQ ID NO: 1072999 - RNA, 23 nt, Human
agaaaauggcagaacaguuacaa

SEQ ID NO: 1073000 - RNA, 22 nt, Human
agacaaaaauaaauaguagauc

SEQ ID NO: 1073001 - RNA, 24 nt, Human
agacaaaaauaaauaguagaucua

SEQ ID NO: 1073002 - RNA, 25 nt, Human
agacaaaaauaaauaguagaucuaa

SEQ ID NO: 1073003 - RNA, 22 nt, Human
agagaauggaaucaagugacac

SEQ ID NO: 1073004 - RNA, 25 nt, Human
agcaaacgaccaggaaggaagcaac

SEQ ID NO: 1073005 - RNA, 18 nt, Human
agcaaagaaaguggcuca

SEQ ID NO: 1073006 - RNA, 18 nt, Human
aggaaaaaaaaggaaagg

SEQ ID NO: 1073007 - RNA, 25 nt, Human
aggaaaaauaauauauuuuaaaugc

SEQ ID NO: 1073008 - RNA, 21 nt, Human
augcugcagacagcaaagaaa

SEQ ID NO: 1073009 - RNA, 18 nt, Human
caacaguucugccuucag

SEQ ID NO: 1073010 - RNA, 24 nt, Human
caggaaugagguauggguguuaug

SEQ ID NO: 1073011 - RNA, 20 nt, Human
caggcauucucauucacuac

SEQ ID NO: 1073012 - RNA, 22 nt, Human
caggcauucucauucacuacuu

SEQ ID NO: 1073013 - RNA, 22 nt, Human
caggucacaggccacccugcaa

SEQ ID NO: 1073014 - RNA, 21 nt, Human
ccagagcaaacgaccaggaag

SEQ ID NO: 1073015 - RNA, 20 nt, Human
cccacuucaaugguccaaau

SEQ ID NO: 1073016 - RNA, 19 nt, Human
cccagauguuuauauuguu

SEQ ID NO: 1073017 - RNA, 23 nt, Human
cccugguucaugugaccaagggg

SEQ ID NO: 1073018 - RNA, 24 nt, Human
cccuucucaaaagauacaauuaaa

SEQ ID NO: 1073019 - RNA, 22 nt, Human
ccugcaacccagcgauuagacu

SEQ ID NO: 1073020 - RNA, 20 nt, Human
ccuuaaugccaugcagcuag

SEQ ID NO: 1073021 - RNA, 20 nt, Human
cgcauauccuaagaaaauaa

SEQ ID NO: 1073022 - RNA, 21 nt, Human
cggcaugaaagcugacccaau

SEQ ID NO: 1073023 - RNA, 23 nt, Human
cuccaacaguucugccuucagcc

SEQ ID NO: 1073024 - RNA, 23 nt, Human
cucuagguaaacucugugcuuac

SEQ ID NO: 1073025 - RNA, 21 nt, Human
cucuaugacuguagacuugcu

SEQ ID NO: 1073026 - RNA, 23 nt, Human
cugacccaauaccuacaguacca

SEQ ID NO: 1073027 - RNA, 21 nt, Human
cuuccaacucuaaaauaucug

SEQ ID NO: 1073028 - RNA, 19 nt, Human
cuucuuuuaaaagucagga

SEQ ID NO: 1073029 - RNA, 19 nt, Human
gaaagagacugcugccucu

SEQ ID NO: 1073030 - RNA, 20 nt, Human
gaccaaggggggucuggggu

SEQ ID NO: 1073031 - RNA, 23 nt, Human
gcaaagaaaguggcucagaaacg

SEQ ID NO: 1073032 - RNA, 21 nt, Human
gccugggauggaagggaugga

SEQ ID NO: 1073033 - RNA, 21 nt, Human
gcucagaaacgauguaaagag

SEQ ID NO: 1073034 - RNA, 19 nt, Human
ggagauggccagcagggaa

SEQ ID NO: 1073035 - RNA, 19 nt, Human
ggcaggucacaggccaccc

SEQ ID NO: 1073036 - RNA, 21 nt, Human
gggauggaagggauggagaga

SEQ ID NO: 1073037 - RNA, 18 nt, Human
gggggugaaggaagaagg

SEQ ID NO: 1073038 - RNA, 19 nt, Human
ggugaaggaagaaggaaga

SEQ ID NO: 1073039 - RNA, 23 nt, Human
guguacacacauacacaaacgua

SEQ ID NO: 1073040 - RNA, 22 nt, Human
uaaaacaacaacaacucuugaa

SEQ ID NO: 1073041 - RNA, 24 nt, Human
uaaaacacuucuguuggcacuucc

SEQ ID NO: 1073042 - RNA, 24 nt, Human
uaacuuccaacucuaaaauaucug

SEQ ID NO: 1073043 - RNA, 18 nt, Human
uaauaggcaccuaccaga

SEQ ID NO: 1073044 - RNA, 23 nt, Human
uaauucauccaaacaucuccccu

SEQ ID NO: 1073045 - RNA, 24 nt, Human
uaauucauccaaacaucuccccua

SEQ ID NO: 1073046 - RNA, 24 nt, Human
uacacacauacacaaacguacugg

SEQ ID NO: 1073047 - RNA, 19 nt, Human
uaccagaaaccucaacauc

SEQ ID NO: 1073048 - RNA, 18 nt, Human
uaccuacaguaccagucc

SEQ ID NO: 1073049 - RNA, 22 nt, Human
uagacuugcugacuuuacucug

SEQ ID NO: 1073050 - RNA, 23 nt, Human
uagcaagcaaagaauaaaaggga

SEQ ID NO: 1073051 - RNA, 26 nt, Human
uauaagagcauuuaccagaaagacag

SEQ ID NO: 1073052 - RNA, 21 nt, Human
uaugacuguagacuugcugac

SEQ ID NO: 1073053 - RNA, 20 nt, Human
ucaacuccacuucuauacgc

SEQ ID NO: 1073054 - RNA, 18 nt, Human
ucaaugaacauuugcaca

SEQ ID NO: 1073055 - RNA, 22 nt, Human
uccaaauacucaccggccuuca

SEQ ID NO: 1073056 - RNA, 21 nt, Human
ugaagccccuggggcacaggu

SEQ ID NO: 1073057 - RNA, 21 nt, Human
ugaccaaggggggucuggggu

SEQ ID NO: 1073058 - RNA, 19 nt, Human
ugaugauucuuuaugcucu

SEQ ID NO: 1073059 - RNA, 20 nt, Human
ugccugggauggaagggaug

SEQ ID NO: 1073060 - RNA, 18 nt, Human
uggauaacagauaacucc

SEQ ID NO: 1073061 - RNA, 20 nt, Human
uggcaauuuggagauauaug

SEQ ID NO: 1073062 - RNA, 21 nt, Human
uggcaauuuggagauauaugu

SEQ ID NO: 1073063 - RNA, 22 nt, Human
uggcaugaacacauuagggaau

SEQ ID NO: 1073064 - RNA, 22 nt, Human
ugggauggaagggauggagaga

SEQ ID NO: 1073065 - RNA, 19 nt, Human
uguacauacauguaacagg

SEQ ID NO: 1073066 - RNA, 24 nt, Human
ugugaccaaggggggucugggguu

SEQ ID NO: 1073067 - RNA, 18 nt, Human
uguggaagaaccacucca

SEQ ID NO: 1073068 - RNA, 21 nt, Human
uucuguuggcacuuccacacu

SEQ ID NO: 1073069 - RNA, 21 nt, Human
uugaguucaggauaccaaguc

SEQ ID NO: 1073070 - RNA, 22 nt, Human
uuuucccaauuuucuaaaaccu

SEQ ID NO: 1073071 - RNA, 26 nt, Human
auagcccagaggucuuuuuuuuuuuu

SEQ ID NO: 1073072 - RNA, 19 nt, Human
ggucuuuuuuuuuuuuuuu

SEQ ID NO: 1073073 - RNA, 21 nt, Human
gucuuuuuuuuuuuuuuuuuu

SEQ ID NO: 1073074 - RNA, 30 nt, Human
uagcccagaggucuuuuuuuuuuuuuuuuu

SEQ ID NO: 1073075 - RNA, 22 nt, Human
aaaacacucuugucuuaucuca

SEQ ID NO: 1073076 - RNA, 21 nt, Human
aaaaccaaccaaccaaaaaca

SEQ ID NO: 1073077 - RNA, 21 nt, Human
aaacaacaacaaaagaaauac

SEQ ID NO: 1073078 - RNA, 19 nt, Human
aaacaaguaaaucacauua

SEQ ID NO: 1073079 - RNA, 21 nt, Human
aaaccccgucucuacaagaaa

SEQ ID NO: 1073080 - RNA, 19 nt, Human
aaagagcuugauacaaaaa

SEQ ID NO: 1073081 - RNA, 18 nt, Human
aaaggaaaaagcgugggu

SEQ ID NO: 1073082 - RNA, 20 nt, Human
aacauggcaaaaccccgucu

SEQ ID NO: 1073083 - RNA, 21 nt, Human
aacauggcaaaaccccgucuc

SEQ ID NO: 1073084 - RNA, 22 nt, Human
aaccaaccaaaaacaacaacaa

SEQ ID NO: 1073085 - RNA, 22 nt, Human
aaguaaaucacauuacuguaga

SEQ ID NO: 1073086 - RNA, 18 nt, Human
aaucauggcagaaggcaa

SEQ ID NO: 1073087 - RNA, 25 nt, Human
acaacaacaaaagaaauaccugaga

SEQ ID NO: 1073088 - RNA, 18 nt, Human
acagaaagaacaccauau

SEQ ID NO: 1073089 - RNA, 21 nt, Human
acaugggaaggagcauccccc

SEQ ID NO: 1073090 - RNA, 22 nt, Human
accccagcacuuugggaagcca

SEQ ID NO: 1073091 - RNA, 24 nt, Human
accccgucucuacaagaaaaacaa

SEQ ID NO: 1073092 - RNA, 25 nt, Human
accugagacuggguaauuuuuguuu

SEQ ID NO: 1073093 - RNA, 22 nt, Human
acgauggcucaugacuguaacc

SEQ ID NO: 1073094 - RNA, 25 nt, Human
acucugucgcccaggcuggagugca

SEQ ID NO: 1073095 - RNA, 20 nt, Human
agaaggcaaagggggagcag

SEQ ID NO: 1073096 - RNA, 24 nt, Human
agagacacacagaaagaacaccau

SEQ ID NO: 1073097 - RNA, 18 nt, Human
agagugaggggaaggggc

SEQ ID NO: 1073098 - RNA, 23 nt, Human
agcaaaagcaggagcaagagaga

SEQ ID NO: 1073099 - RNA, 19 nt, Human
agcagguuaagcaugugug

SEQ ID NO: 1073100 - RNA, 18 nt, Human
agccacaggaauaaaguc

SEQ ID NO: 1073101 - RNA, 24 nt, Human
agccugggcaacauggcaaaaccc

SEQ ID NO: 1073102 - RNA, 22 nt, Human
aggagguggcaagagccacagg

SEQ ID NO: 1073103 - RNA, 18 nt, Human
aggaguucgagacuagcc

SEQ ID NO: 1073104 - RNA, 24 nt, Human
aggaucgcuucaggucaggaguuc

SEQ ID NO: 1073105 - RNA, 18 nt, Human
aggcaggaggaucaccug

SEQ ID NO: 1073106 - RNA, 18 nt, Human
aggcaggaggaucaccug

SEQ ID NO: 1073107 - RNA, 24 nt, Human
aggcugaggcaggaggaucaccug

SEQ ID NO: 1073108 - RNA, 25 nt, Human
aggcuggagugcaguggcgugaucu

SEQ ID NO: 1073109 - RNA, 23 nt, Human
aggcuuaggugggaggaucgcuu

SEQ ID NO: 1073110 - RNA, 22 nt, Human
aggggccacacccuuuuaaacc

SEQ ID NO: 1073111 - RNA, 25 nt, Human
agggugagggugggggugggggcaa

SEQ ID NO: 1073112 - RNA, 23 nt, Human
aggugggaggaucgcuucagguc

SEQ ID NO: 1073113 - RNA, 19 nt, Human
agugcaguggcgugaucuc

SEQ ID NO: 1073114 - RNA, 21 nt, Human
agugcaguggcgugaucucag

SEQ ID NO: 1073115 - RNA, 23 nt, Human
agugcaguggcgugaucucagcu

SEQ ID NO: 1073116 - RNA, 24 nt, Human
agugcaguggcgugaucucagcuc

SEQ ID NO: 1073117 - RNA, 18 nt, Human
aguggcgugaucucagcu

SEQ ID NO: 1073118 - RNA, 22 nt, Human
auauacgggcagcacauauaua

SEQ ID NO: 1073119 - RNA, 24 nt, Human
aucgcuucaggucaggaguucgag

SEQ ID NO: 1073120 - RNA, 23 nt, Human
auggcucaugacuguaaccccag

SEQ ID NO: 1073121 - RNA, 24 nt, Human
auggcucaugacuguaaccccagc

SEQ ID NO: 1073122 - RNA, 20 nt, Human
auugcaccacugcacuccag

SEQ ID NO: 1073123 - RNA, 24 nt, Human
caaaaacaacaacaaaagaaauac

SEQ ID NO: 1073124 - RNA, 27 nt, Human
caaaagaaauaccugagaccggggccc

SEQ ID NO: 1073125 - RNA, 23 nt, Human
caacaacaaaagaaauaccugag

SEQ ID NO: 1073126 - RNA, 21 nt, Human
caacagcaaaagcaggagcaa

SEQ ID NO: 1073127 - RNA, 24 nt, Human
caacauggcaaaaccccgucucua

SEQ ID NO: 1073128 - RNA, 23 nt, Human
caaccaaaaacaacaacaaaaga

SEQ ID NO: 1073129 - RNA, 23 nt, Human
caaccaaccaaaaacaacaacaa

SEQ ID NO: 1073130 - RNA, 21 nt, Human
caagacccagucucuacaaaa

SEQ ID NO: 1073131 - RNA, 26 nt, Human
caccacugcacuccagcccagguguc

SEQ ID NO: 1073132 - RNA, 22 nt, Human
caccuguagucucagcuacuua

SEQ ID NO: 1073133 - RNA, 24 nt, Human
caccuguagucucagcuacuuaag

SEQ ID NO: 1073134 - RNA, 24 nt, Human
cacucugucgcccaggcuggagug

SEQ ID NO: 1073135 - RNA, 22 nt, Human
cacucuugucuuaucucaagaa

SEQ ID NO: 1073136 - RNA, 18 nt, Human
cacugcacuccagcccag

SEQ ID NO: 1073137 - RNA, 19 nt, Human
cacugcacuccagcccagg

SEQ ID NO: 1073138 - RNA, 19 nt, Human
cacugcacuccagcccagg

SEQ ID NO: 1073139 - RNA, 24 nt, Human
cacugcacuccagcccagguguca

SEQ ID NO: 1073140 - RNA, 21 nt, Human
cagaaagaacaccauaugaca

SEQ ID NO: 1073141 - RNA, 22 nt, Human
cagaaagaacaccauaugacaa

SEQ ID NO: 1073142 - RNA, 21 nt, Human
cagaaggcaaagggggagcag

SEQ ID NO: 1073143 - RNA, 18 nt, Human
cagaccaugcuccaaaac

SEQ ID NO: 1073144 - RNA, 23 nt, Human
cagaucucucacuucucaccaaa

SEQ ID NO: 1073145 - RNA, 24 nt, Human
cagcacuuugggaagccaaggcag

SEQ ID NO: 1073146 - RNA, 25 nt, Human
cagcacuuugggaagccaaggcagg

SEQ ID NO: 1073147 - RNA, 24 nt, Human
cagcuacuuaagaggcugaggcag

SEQ ID NO: 1073148 - RNA, 22 nt, Human
caggaauaaagucuuccaucuc

SEQ ID NO: 1073149 - RNA, 24 nt, Human
caugacuguaaccccagcacuuug

SEQ ID NO: 1073150 - RNA, 20 nt, Human
cauuuuagaauaagccaggc

SEQ ID NO: 1073151 - RNA, 25 nt, Human
cauuuuguuuuuugagauggagucu

SEQ ID NO: 1073152 - RNA, 27 nt, Human
cauuuuguuuuuugagauggagucuca

SEQ ID NO: 1073153 - RNA, 18 nt, Human
ccaaaaccaaccaaccaa

SEQ ID NO: 1073154 - RNA, 28 nt, Human
ccaaaaccaaccaaccaaaaacaacaag

SEQ ID NO: 1073155 - RNA, 21 nt, Human
ccaagccauucaugagggauc

SEQ ID NO: 1073156 - RNA, 21 nt, Human
ccaccaggcccuaccuccagc

SEQ ID NO: 1073157 - RNA, 22 nt, Human
ccaccaggcccuaccuccagca

SEQ ID NO: 1073158 - RNA, 24 nt, Human
ccacggaaaugggaugagaacccc

SEQ ID NO: 1073159 - RNA, 19 nt, Human
ccacugcacuccagcccag

SEQ ID NO: 1073160 - RNA, 20 nt, Human
ccacugcacuccagcccagg

SEQ ID NO: 1073161 - RNA, 20 nt, Human
ccacugcacuccagcccagg

SEQ ID NO: 1073162 - RNA, 20 nt, Human
ccacugcacuccagcccagg

SEQ ID NO: 1073163 - RNA, 21 nt, Human
ccacugcacuccagcccaggu

SEQ ID NO: 1073164 - RNA, 21 nt, Human
ccacuggguuaggugcagagg

SEQ ID NO: 1073165 - RNA, 20 nt, Human
ccagcuccccacccuccucc

SEQ ID NO: 1073166 - RNA, 19 nt, Human
ccagucucuacaaaacauu

SEQ ID NO: 1073167 - RNA, 22 nt, Human
cccagagcuuuagaaggcuuag

SEQ ID NO: 1073168 - RNA, 22 nt, Human
cccaggcuggagugcaguggcg

SEQ ID NO: 1073169 - RNA, 21 nt, Human
cccaugaucccaauaccuccc

SEQ ID NO: 1073170 - RNA, 20 nt, Human
ccccagcacuuugggaagcc

SEQ ID NO: 1073171 - RNA, 20 nt, Human
ccccaugaucccaauaccuc

SEQ ID NO: 1073172 - RNA, 23 nt, Human
ccccugaguucccaggccacgga

SEQ ID NO: 1073173 - RNA, 19 nt, Human
ccgggccugguccacgccc

SEQ ID NO: 1073174 - RNA, 22 nt, Human
ccucccaccaggcccuaccucc

SEQ ID NO: 1073175 - RNA, 22 nt, Human
ccuccuccuccuucuuugaccc

SEQ ID NO: 1073176 - RNA, 19 nt, Human
ccuccuccuucuuugaccc

SEQ ID NO: 1073177 - RNA, 19 nt, Human
ccuccuccuucuuugaccc

SEQ ID NO: 1073178 - RNA, 20 nt, Human
ccugaaaggagguuuuauug

SEQ ID NO: 1073179 - RNA, 23 nt, Human
ccugggcaacauggcaaaacccc

SEQ ID NO: 1073180 - RNA, 24 nt, Human
ccugggcaacauggcaaaaccccg

SEQ ID NO: 1073181 - RNA, 22 nt, Human
ccuguagucucagcuacuuaag

SEQ ID NO: 1073182 - RNA, 19 nt, Human
cgacuuucugugcacaugu

SEQ ID NO: 1073183 - RNA, 22 nt, Human
cucaagaccagccugggcaaca

SEQ ID NO: 1073184 - RNA, 24 nt, Human
cucacgccugucaucccagagcuu

SEQ ID NO: 1073185 - RNA, 24 nt, Human
cucacucugucgcccaggcuggag

SEQ ID NO: 1073186 - RNA, 24 nt, Human
cucacuucucaccaaacggauggc

SEQ ID NO: 1073187 - RNA, 21 nt, Human
cucagcucgcugcauccugaa

SEQ ID NO: 1073188 - RNA, 24 nt, Human
cucaugacuguaaccccagcacuu

SEQ ID NO: 1073189 - RNA, 18 nt, Human
cuccaaaaccaaccaacc

SEQ ID NO: 1073190 - RNA, 23 nt, Human
cuccaaaaccaaccaaccaaaaa

SEQ ID NO: 1073191 - RNA, 24 nt, Human
cuccaugccgggccugguccacgc

SEQ ID NO: 1073192 - RNA, 21 nt, Human
cuccuccuccuucuuugaccc

SEQ ID NO: 1073193 - RNA, 20 nt, Human
cucucacuucucaccaaacg

SEQ ID NO: 1073194 - RNA, 22 nt, Human
cucucauaugucaaaaccuuag

SEQ ID NO: 1073195 - RNA, 21 nt, Human
cucuuucccccugaguuccca

SEQ ID NO: 1073196 - RNA, 20 nt, Human
cugcacuccagcccaggugu

SEQ ID NO: 1073197 - RNA, 21 nt, Human
cugcucucuggugcucaaggc

SEQ ID NO: 1073198 - RNA, 24 nt, Human
cuggagugcaguggcgugaucuca

SEQ ID NO: 1073199 - RNA, 23 nt, Human
cugugcacauguguguuccagug

SEQ ID NO: 1073200 - RNA, 23 nt, Human
cuucaggucaggaguucgagacu

SEQ ID NO: 1073201 - RNA, 22 nt, Human
cuugagcccaggaguucucaag

SEQ ID NO: 1073202 - RNA, 20 nt, Human
cuuggaguucugcucucugg

SEQ ID NO: 1073203 - RNA, 20 nt, Human
cuuucccccugaguucccag

SEQ ID NO: 1073204 - RNA, 18 nt, Human
cuuuuaaaccaucagauc

SEQ ID NO: 1073205 - RNA, 18 nt, Human
gaaaucuggccuuucugg

SEQ ID NO: 1073206 - RNA, 20 nt, Human
gaacccccggccuaagucag

SEQ ID NO: 1073207 - RNA, 18 nt, Human
gaaggagcaucccccccu

SEQ ID NO: 1073208 - RNA, 18 nt, Human
gaauaaacaggcaaacaa

SEQ ID NO: 1073209 - RNA, 25 nt, Human
gaccacuugagcccaggaguucuca

SEQ ID NO: 1073210 - RNA, 23 nt, Human
gaccucucauaugucaaaaccuu

SEQ ID NO: 1073211 - RNA, 23 nt, Human
gauacaaaaauaaaaaaaauaaa

SEQ ID NO: 1073212 - RNA, 18 nt, Human
gaucgcuucaggucagga

SEQ ID NO: 1073213 - RNA, 24 nt, Human
gaucgcuucaggucaggaguucga

SEQ ID NO: 1073214 - RNA, 27 nt, Human
gcagcaagacccagucucuacaaaaca

SEQ ID NO: 1073215 - RNA, 25 nt, Human
gcccaagccauucaugagggaucug

SEQ ID NO: 1073216 - RNA, 24 nt, Human
gcccaggaguucucaagaccagcc

SEQ ID NO: 1073217 - RNA, 20 nt, Human
gcccaggcuggagugcagug

SEQ ID NO: 1073218 - RNA, 24 nt, Human
gcccaggcuggagugcaguggcgu

SEQ ID NO: 1073219 - RNA, 20 nt, Human
gcccaggugucagaccaugc

SEQ ID NO: 1073220 - RNA, 21 nt, Human
gcccaggugucagaccaugcu

SEQ ID NO: 1073221 - RNA, 19 nt, Human
gcuggagugcaguggcgug

SEQ ID NO: 1073222 - RNA, 18 nt, Human
ggagcaagagagagagug

SEQ ID NO: 1073223 - RNA, 23 nt, Human
ggaucgcuucaggucaggaguuc

SEQ ID NO: 1073224 - RNA, 21 nt, Human
ggccagacacgauggcucaug

SEQ ID NO: 1073225 - RNA, 21 nt, Human
ggcucugugugggcuccaugc

SEQ ID NO: 1073226 - RNA, 22 nt, Human
ggcuggagugcaguggcgugau

SEQ ID NO: 1073227 - RNA, 23 nt, Human
gggaauaaacaggcaaacaagua

SEQ ID NO: 1073228 - RNA, 24 nt, Human
gggcaugguggugcgcaccuguag

SEQ ID NO: 1073229 - RNA, 23 nt, Human
ggggagcaggcaugucaacagca

SEQ ID NO: 1073230 - RNA, 24 nt, Human
gguggaccacuugagcccaggagu

SEQ ID NO: 1073231 - RNA, 24 nt, Human
gguggugcgcaccuguagucucag

SEQ ID NO: 1073232 - RNA, 22 nt, Human
uaaagagcuugauacaaaaaua

SEQ ID NO: 1073233 - RNA, 24 nt, Human
uaagaggcugaggcaggaggauca

SEQ ID NO: 1073234 - RNA, 23 nt, Human
uaagccaggcauggugggaggau

SEQ ID NO: 1073235 - RNA, 19 nt, Human
uaauugaaauagagucaua

SEQ ID NO: 1073236 - RNA, 26 nt, Human
uaccuccagcauuggggauuacaauu

SEQ ID NO: 1073237 - RNA, 21 nt, Human
uagaauaagccaggcauggug

SEQ ID NO: 1073238 - RNA, 23 nt, Human
uagcagcauuugcuucuggggag

SEQ ID NO: 1073239 - RNA, 20 nt, Human
uagcccgggcaaugcagcaa

SEQ ID NO: 1073240 - RNA, 19 nt, Human
uaugucaaaaccuuagagc

SEQ ID NO: 1073241 - RNA, 24 nt, Human
ucacucugucgcccaggcuggagu

SEQ ID NO: 1073242 - RNA, 23 nt, Human
ucagaccaugcuccaaaaccaac

SEQ ID NO: 1073243 - RNA, 18 nt, Human
ucauaugucaaaaccuua

SEQ ID NO: 1073244 - RNA, 22 nt, Human
ucaugacuguaaccccagcacu

SEQ ID NO: 1073245 - RNA, 23 nt, Human
ucauucauuuacccauucauuca

SEQ ID NO: 1073246 - RNA, 22 nt, Human
ucccagagcuuuagaaggcuua

SEQ ID NO: 1073247 - RNA, 18 nt, Human
ucccugcagacuaagagu

SEQ ID NO: 1073248 - RNA, 18 nt, Human
uccuuguaagaagauggc

SEQ ID NO: 1073249 - RNA, 22 nt, Human
ucgcccaggcuggagugcagug

SEQ ID NO: 1073250 - RNA, 24 nt, Human
ucgcuucaggucaggaguucgaga

SEQ ID NO: 1073251 - RNA, 19 nt, Human
ucucaagaccagccugggc

SEQ ID NO: 1073252 - RNA, 23 nt, Human
ucucacucugucgcccaggcugg

SEQ ID NO: 1073253 - RNA, 24 nt, Human
ucucacucugucgcccaggcugga

SEQ ID NO: 1073254 - RNA, 26 nt, Human
ucucacucugucgcccaggcuggagu

SEQ ID NO: 1073255 - RNA, 27 nt, Human
ucucacucugucgcccaggcuggagug

SEQ ID NO: 1073256 - RNA, 19 nt, Human
ucucucacuucucaccaaa

SEQ ID NO: 1073257 - RNA, 18 nt, Human
ucugcuccaucaaguguc

SEQ ID NO: 1073258 - RNA, 24 nt, Human
ucugucgcccaggcuggagugcag

SEQ ID NO: 1073259 - RNA, 20 nt, Human
ugaaaggaagggcugugugg

SEQ ID NO: 1073260 - RNA, 18 nt, Human
ugacacagagauugggcc

SEQ ID NO: 1073261 - RNA, 22 nt, Human
ugagauggagucucacucuguc

SEQ ID NO: 1073262 - RNA, 25 nt, Human
ugagcccaggaguucucaagaccag

SEQ ID NO: 1073263 - RNA, 20 nt, Human
ugaggcaggaggaucaccug

SEQ ID NO: 1073264 - RNA, 24 nt, Human
ugaggcaggaggaucaccugaaac

SEQ ID NO: 1073265 - RNA, 18 nt, Human
ugauucuggaacuucaag

SEQ ID NO: 1073266 - RNA, 21 nt, Human
ugcaccacugcacuccagccc

SEQ ID NO: 1073267 - RNA, 22 nt, Human
ugcagugaaccaugauugcacc

SEQ ID NO: 1073268 - RNA, 22 nt, Human
ugcaguggcgugaucucagcuc

SEQ ID NO: 1073269 - RNA, 21 nt, Human
ugccgggccugguccacgccc

SEQ ID NO: 1073270 - RNA, 21 nt, Human
ugcucuuucccccugaguucc

SEQ ID NO: 1073271 - RNA, 20 nt, Human
ugcuuguuuguuuguuuugu

SEQ ID NO: 1073272 - RNA, 24 nt, Human
uggaccacuugagcccaggaguuc

SEQ ID NO: 1073273 - RNA, 24 nt, Human
uggagucucacucugucgcccagg

SEQ ID NO: 1073274 - RNA, 19 nt, Human
uggagugcaguggcgugau

SEQ ID NO: 1073275 - RNA, 24 nt, Human
uggagugcaguggcgugaucucag

SEQ ID NO: 1073276 - RNA, 22 nt, Human
uggcaagagccacaggaauagu

SEQ ID NO: 1073277 - RNA, 23 nt, Human
uggcgugaucucagcucgcugca

SEQ ID NO: 1073278 - RNA, 21 nt, Human
uggcucacgccugucauccca

SEQ ID NO: 1073279 - RNA, 21 nt, Human
uggcucaugacuguaacccca

SEQ ID NO: 1073280 - RNA, 24 nt, Human
uggcucaugacuguaaccccagca

SEQ ID NO: 1073281 - RNA, 22 nt, Human
uggcuugagcccaggaguucag

SEQ ID NO: 1073282 - RNA, 21 nt, Human
ugggaaaacacucuugucuua

SEQ ID NO: 1073283 - RNA, 24 nt, Human
ugggaggauggcuugagcccagga

SEQ ID NO: 1073284 - RNA, 21 nt, Human
ugggggcagggaauaaacagg

SEQ ID NO: 1073285 - RNA, 20 nt, Human
ugggucuggccaccagcucc

SEQ ID NO: 1073286 - RNA, 22 nt, Human
uggugcgcaccuguagucucag

SEQ ID NO: 1073287 - RNA, 24 nt, Human
ugguggugcgcaccuguagucuca

SEQ ID NO: 1073288 - RNA, 23 nt, Human
ugugcacauguguguucucaugg

SEQ ID NO: 1073289 - RNA, 24 nt, Human
uguggcucacgccugucaucccag

SEQ ID NO: 1073290 - RNA, 21 nt, Human
uguguggaagcuacaugggaa

SEQ ID NO: 1073291 - RNA, 20 nt, Human
uguuacacgagccuucuguu

SEQ ID NO: 1073292 - RNA, 21 nt, Human
uguuuguuuuguuucauuuug

SEQ ID NO: 1073293 - RNA, 21 nt, Human
uuacaauucaacaugaguuug

SEQ ID NO: 1073294 - RNA, 20 nt, Human
uuagcugggcaugguggugc

SEQ ID NO: 1073295 - RNA, 20 nt, Human
uuagcugggcaugguggugc

SEQ ID NO: 1073296 - RNA, 20 nt, Human
uuaggugcagaggagguggc

SEQ ID NO: 1073297 - RNA, 18 nt, Human
uuaugcaauauuucuccu

SEQ ID NO: 1073298 - RNA, 23 nt, Human
uucaacaugaguuugggugggga

SEQ ID NO: 1073299 - RNA, 20 nt, Human
uucaggucaggaguucgaga

SEQ ID NO: 1073300 - RNA, 22 nt, Human
uucuccuauucacgcucucuac

SEQ ID NO: 1073301 - RNA, 26 nt, Human
uucugcuccaucaagugucuuugggg

SEQ ID NO: 1073302 - RNA, 18 nt, Human
uucugugcacaugugugu

SEQ ID NO: 1073303 - RNA, 22 nt, Human
uugcagugaaccaugauugcac

SEQ ID NO: 1073304 - RNA, 18 nt, Human
uuggggagcagagagcag

SEQ ID NO: 1073305 - RNA, 25 nt, Human
uuguuuguuuguuuuguuucauuuu

SEQ ID NO: 1073306 - RNA, 21 nt, Human
uuuaauugaaaaauucugggg

SEQ ID NO: 1073307 - RNA, 23 nt, Human
uuucuaaccucuggaaaaccagg

SEQ ID NO: 1073308 - RNA, 20 nt, Human
aaaaagaagauacagacaga

SEQ ID NO: 1073309 - RNA, 24 nt, Human
aaaaagaagauacagacagauaua

SEQ ID NO: 1073310 - RNA, 25 nt, Human
aaaaagaagauacagacagauauaa

SEQ ID NO: 1073311 - RNA, 21 nt, Human
aaaaugcugggauuacacaag

SEQ ID NO: 1073312 - RNA, 21 nt, Human
aaaaugcugggauuacacaug

SEQ ID NO: 1073313 - RNA, 22 nt, Human
aaaaugcugggauuacacaugu

SEQ ID NO: 1073314 - RNA, 24 nt, Human
aaaaugcugggauuacacauguga

SEQ ID NO: 1073315 - RNA, 21 nt, Human
aaagaagauaaaacgcuaaaa

SEQ ID NO: 1073316 - RNA, 20 nt, Human
aaauacuaugccccaacuaa

SEQ ID NO: 1073317 - RNA, 26 nt, Human
aaaugcugggauuacacaugugagcc

SEQ ID NO: 1073318 - RNA, 18 nt, Human
aacacggugaaacccggu

SEQ ID NO: 1073319 - RNA, 18 nt, Human
aacacuuaccauuguguu

SEQ ID NO: 1073320 - RNA, 23 nt, Human
aacugcaauaaauugaaacacag

SEQ ID NO: 1073321 - RNA, 23 nt, Human
aagcacaagcuaacaaagccaaa

SEQ ID NO: 1073322 - RNA, 18 nt, Human
aagcuaacaaagccaaac

SEQ ID NO: 1073323 - RNA, 20 nt, Human
aaguagcugggacuacaggc

SEQ ID NO: 1073324 - RNA, 22 nt, Human
aaguagcugggacuacaggcau

SEQ ID NO: 1073325 - RNA, 24 nt, Human
aaguagcugggacuacaggcauac

SEQ ID NO: 1073326 - RNA, 25 nt, Human
aauaacagacaacaacaaaaaaaga

SEQ ID NO: 1073327 - RNA, 24 nt, Human
aaucacuugaacucaggaggugga

SEQ ID NO: 1073328 - RNA, 21 nt, Human
acaaugaugacaucaccuaaa

SEQ ID NO: 1073329 - RNA, 21 nt, Human
acaguggcgugaucuuggcuc

SEQ ID NO: 1073330 - RNA, 19 nt, Human
acaugcuguagccuacaag

SEQ ID NO: 1073331 - RNA, 24 nt, Human
acccgguuucuacuaaaaauacaa

SEQ ID NO: 1073332 - RNA, 24 nt, Human
accguguuggccaggcuagucucg

SEQ ID NO: 1073333 - RNA, 18 nt, Human
acgguguuucaccguguu

SEQ ID NO: 1073334 - RNA, 24 nt, Human
acgguguuucaccguguuggccag

SEQ ID NO: 1073335 - RNA, 18 nt, Human
acuaugccccaacuaaag

SEQ ID NO: 1073336 - RNA, 24 nt, Human
acucaggagguggagguugcagug

SEQ ID NO: 1073337 - RNA, 18 nt, Human
acucugucacccaggcug

SEQ ID NO: 1073338 - RNA, 25 nt, Human
acucugucacccaggcuggaguaca

SEQ ID NO: 1073339 - RNA, 18 nt, Human
agacaggaggaucaccug

SEQ ID NO: 1073340 - RNA, 18 nt, Human
agacaggaggaucaccug

SEQ ID NO: 1073341 - RNA, 19 nt, Human
agauagaaaauuuaaacau

SEQ ID NO: 1073342 - RNA, 19 nt, Human
agcacuuugggaggccgag

SEQ ID NO: 1073343 - RNA, 22 nt, Human
agcagaaagaggauaaaacuaa

SEQ ID NO: 1073344 - RNA, 24 nt, Human
agcaguucuccugccucagccucc

SEQ ID NO: 1073345 - RNA, 23 nt, Human
agccagguaugguggugggcgcc

SEQ ID NO: 1073346 - RNA, 24 nt, Human
agccuggcuaacacggugaaaccc

SEQ ID NO: 1073347 - RNA, 19 nt, Human
agcuaacaaagccaaacug

SEQ ID NO: 1073348 - RNA, 20 nt, Human
aggaguuugagaccagccug

SEQ ID NO: 1073349 - RNA, 24 nt, Human
aggaucaccugaguucaggaguuu

SEQ ID NO: 1073350 - RNA, 24 nt, Human
agguaugguggugggcgccuguaa

SEQ ID NO: 1073351 - RNA, 24 nt, Human
agguggagguugcagugagcugag

SEQ ID NO: 1073352 - RNA, 20 nt, Human
aguacaguggcgugaucuug

SEQ ID NO: 1073353 - RNA, 24 nt, Human
aguacaguggcgugaucuuggcuc

SEQ ID NO: 1073354 - RNA, 19 nt, Human
agucucgaacuccugaccu

SEQ ID NO: 1073355 - RNA, 21 nt, Human
agugaagaaggauaaagaaaa

SEQ ID NO: 1073356 - RNA, 24 nt, Human
aguggcucacuccuguaaucccag

SEQ ID NO: 1073357 - RNA, 18 nt, Human
auugcacuccagcuuggg

SEQ ID NO: 1073358 - RNA, 25 nt, Human
auugcacuccagcuugggcaacaag

SEQ ID NO: 1073359 - RNA, 24 nt, Human
auuucuguauuuuuaguagagacg

SEQ ID NO: 1073360 - RNA, 18 nt, Human
caaaaagcaaggagggua

SEQ ID NO: 1073361 - RNA, 20 nt, Human
caaaaggauaacaacugcaa

SEQ ID NO: 1073362 - RNA, 24 nt, Human
caaaaugcugggauuacacaugug

SEQ ID NO: 1073363 - RNA, 22 nt, Human
caagcaguucuccugccucagc

SEQ ID NO: 1073364 - RNA, 20 nt, Human
caagcuacauaaagcccaga

SEQ ID NO: 1073365 - RNA, 22 nt, Human
caauaacagacaacaacaaaaa

SEQ ID NO: 1073366 - RNA, 21 nt, Human
cacaccugucauuucaauaac

SEQ ID NO: 1073367 - RNA, 21 nt, Human
cacagcagaaagaggauaaaa

SEQ ID NO: 1073368 - RNA, 21 nt, Human
caccguguuggccaggcuagu

SEQ ID NO: 1073369 - RNA, 24 nt, Human
caccguguuggccaggcuagucuc

SEQ ID NO: 1073370 - RNA, 18 nt, Human
caccuaaagaggcauuuc

SEQ ID NO: 1073371 - RNA, 24 nt, Human
caccuugaauagguuuccacugga

SEQ ID NO: 1073372 - RNA, 24 nt, Human
cacuccagcuugggcaacaagagc

SEQ ID NO: 1073373 - RNA, 24 nt, Human
cacuccuguaaucccagcacuuug

SEQ ID NO: 1073374 - RNA, 22 nt, Human
cacucugucacccaggcuggag

SEQ ID NO: 1073375 - RNA, 23 nt, Human
cacucugucacccaggcuggagu

SEQ ID NO: 1073376 - RNA, 18 nt, Human
cacugcgaccuccuccuc

SEQ ID NO: 1073377 - RNA, 27 nt, Human
cagacaacaacaaaaaaagaguuagca

SEQ ID NO: 1073378 - RNA, 18 nt, Human
cagcacuuugggaggccg

SEQ ID NO: 1073379 - RNA, 24 nt, Human
cagcacuuugggaggccgagacag

SEQ ID NO: 1073380 - RNA, 29 nt, Human
caggagguggagguugcagugacaacggu

SEQ ID NO: 1073381 - RNA, 20 nt, Human
caguucuccugccucagccu

SEQ ID NO: 1073382 - RNA, 21 nt, Human
cauaaaauguucaagauaaga

SEQ ID NO: 1073383 - RNA, 23 nt, Human
cauaaagcccagauguauauagu

SEQ ID NO: 1073384 - RNA, 24 nt, Human
caucuaaaaccuuaccuuaagcac

SEQ ID NO: 1073385 - RNA, 19 nt, Human
cauugcacuccagcuuggg

SEQ ID NO: 1073386 - RNA, 21 nt, Human
cauugcacuccagcuugggca

SEQ ID NO: 1073387 - RNA, 22 nt, Human
cauugcacuccagcuugggcaa

SEQ ID NO: 1073388 - RNA, 24 nt, Human
cauugcacuccagcuugggcaaca

SEQ ID NO: 1073389 - RNA, 19 nt, Human
ccaaaaugcugggauuaca

SEQ ID NO: 1073390 - RNA, 24 nt, Human
ccaaaaugcugggauuacacaugu

SEQ ID NO: 1073391 - RNA, 24 nt, Human
ccacucugucacccaggcuggagu

SEQ ID NO: 1073392 - RNA, 20 nt, Human
ccauugcacuccagcuuggg

SEQ ID NO: 1073393 - RNA, 21 nt, Human
ccauugcacuccagcuugggc

SEQ ID NO: 1073394 - RNA, 23 nt, Human
ccauugcacuccagcuugggcaa

SEQ ID NO: 1073395 - RNA, 24 nt, Human
ccauugcacuccagcuugggcaac

SEQ ID NO: 1073396 - RNA, 21 nt, Human
cccaggcuggaguacaguggc

SEQ ID NO: 1073397 - RNA, 23 nt, Human
ccuaaguagcugggacuacaggc

SEQ ID NO: 1073398 - RNA, 24 nt, Human
ccuaaguagcugggacuacaggca

SEQ ID NO: 1073399 - RNA, 23 nt, Human
ccuacaagcuacauaaagcccag

SEQ ID NO: 1073400 - RNA, 24 nt, Human
ccuccuccuccuggguucaagcag

SEQ ID NO: 1073401 - RNA, 21 nt, Human
ccuccuccuggguucaagcag

SEQ ID NO: 1073402 - RNA, 20 nt, Human
ccugaccucaggugauccac

SEQ ID NO: 1073403 - RNA, 22 nt, Human
ccuggcuaacacggugaaaccc

SEQ ID NO: 1073404 - RNA, 23 nt, Human
ccuggcuaacacggugaaacccg

SEQ ID NO: 1073405 - RNA, 23 nt, Human
ccuggguucaagcaguucuccug

SEQ ID NO: 1073406 - RNA, 22 nt, Human
ccuguaaucccagcacuuuggg

SEQ ID NO: 1073407 - RNA, 19 nt, Human
ccuguaaucccagcuacuc

SEQ ID NO: 1073408 - RNA, 22 nt, Human
ccuguaaucccagcuacucugg

SEQ ID NO: 1073409 - RNA, 23 nt, Human
ccuguaaucccagcuacucugga

SEQ ID NO: 1073410 - RNA, 19 nt, Human
ccuuuuuuuuucaaacacc

SEQ ID NO: 1073411 - RNA, 20 nt, Human
cgagacaggaggaucaccug

SEQ ID NO: 1073412 - RNA, 18 nt, Human
cgauaauauucaaaaaua

SEQ ID NO: 1073413 - RNA, 21 nt, Human
cggaaacacaaacacuuacca

SEQ ID NO: 1073414 - RNA, 18 nt, Human
cggggaaaaaaagguaac

SEQ ID NO: 1073415 - RNA, 24 nt, Human
cgguguuucaccguguuggccagg

SEQ ID NO: 1073416 - RNA, 24 nt, Human
cucacuccuguaaucccagcacuu

SEQ ID NO: 1073417 - RNA, 19 nt, Human
cucacugcgaccuccuccu

SEQ ID NO: 1073418 - RNA, 24 nt, Human
cucacugcgaccuccuccuccugg

SEQ ID NO: 1073419 - RNA, 24 nt, Human
cucagccuccuaaguagcugggac

SEQ ID NO: 1073420 - RNA, 21 nt, Human
cuccuggguucaagcaguucu

SEQ ID NO: 1073421 - RNA, 23 nt, Human
cuccuguaaucccagcacuuugg

SEQ ID NO: 1073422 - RNA, 22 nt, Human
cugaguucaggaguuugagacc

SEQ ID NO: 1073423 - RNA, 24 nt, Human
cugccucacccucccaaaaugcug

SEQ ID NO: 1073424 - RNA, 23 nt, Human
cugccucagccuccuaaguagcu

SEQ ID NO: 1073425 - RNA, 18 nt, Human
cuggcuaacacggugaaa

SEQ ID NO: 1073426 - RNA, 24 nt, Human
cuguuuacaaguuaaauaacaaaa

SEQ ID NO: 1073427 - RNA, 20 nt, Human
cuuaagcacaagcuaacaaa

SEQ ID NO: 1073428 - RNA, 25 nt, Human
cuuagcaaaaugggcuaauuccaaa

SEQ ID NO: 1073429 - RNA, 21 nt, Human
cuugaacucaggagguggagg

SEQ ID NO: 1073430 - RNA, 21 nt, Human
gaaaaagaagauacagacaga

SEQ ID NO: 1073431 - RNA, 20 nt, Human
gaacaucuaaaaccuuaccu

SEQ ID NO: 1073432 - RNA, 21 nt, Human
gaacucacaggucaucuuugg

SEQ ID NO: 1073433 - RNA, 18 nt, Human
gaagaaggauaaagaaaa

SEQ ID NO: 1073434 - RNA, 23 nt, Human
gagaaucacuugaacucaggagg

SEQ ID NO: 1073435 - RNA, 23 nt, Human
gagacaggaggaucaccugaguu

SEQ ID NO: 1073436 - RNA, 23 nt, Human
gagaucgugccauugcacuccag

SEQ ID NO: 1073437 - RNA, 21 nt, Human
gagauggagucccacucuguc

SEQ ID NO: 1073438 - RNA, 21 nt, Human
gagguggagguugcagugagc

SEQ ID NO: 1073439 - RNA, 23 nt, Human
gagguugcagugagcugagaucg

SEQ ID NO: 1073440 - RNA, 24 nt, Human
gaucaccugaguucaggaguuuga

SEQ ID NO: 1073441 - RNA, 24 nt, Human
gauggcaguguuguuauucuaaga

SEQ ID NO: 1073442 - RNA, 18 nt, Human
gauuacacaugugagcca

SEQ ID NO: 1073443 - RNA, 22 nt, Human
gcaacaguuaacuaucacccca

SEQ ID NO: 1073444 - RNA, 22 nt, Human
gccauugcacuccagcuugggc

SEQ ID NO: 1073445 - RNA, 24 nt, Human
gccauugcacuccagcuugggcaa

SEQ ID NO: 1073446 - RNA, 20 nt, Human
gccucagccuccuaaguagc

SEQ ID NO: 1073447 - RNA, 20 nt, Human
gccuuguuuuguagauuuga

SEQ ID NO: 1073448 - RNA, 18 nt, Human
gcgcaggagaaucacuug

SEQ ID NO: 1073449 - RNA, 24 nt, Human
gcuaacacggugaaacccgguuuc

SEQ ID NO: 1073450 - RNA, 23 nt, Human
gcuagucucgaacuccugaccuc

SEQ ID NO: 1073451 - RNA, 22 nt, Human
gcucacugcgaccuccuccucc

SEQ ID NO: 1073452 - RNA, 19 nt, Human
gcuggaguacaguggcgug

SEQ ID NO: 1073453 - RNA, 20 nt, Human
ggaaacacaaacacuuacca

SEQ ID NO: 1073454 - RNA, 19 nt, Human
ggaacauguugucauacca

SEQ ID NO: 1073455 - RNA, 24 nt, Human
ggacgcaguggcucacuccuguaa

SEQ ID NO: 1073456 - RNA, 22 nt, Human
ggagguugcagugagcugagau

SEQ ID NO: 1073457 - RNA, 24 nt, Human
ggagguugcagugagcugagaucg

SEQ ID NO: 1073458 - RNA, 22 nt, Human
ggaucaccugaguucaggaguu

SEQ ID NO: 1073459 - RNA, 19 nt, Human
ggcauacaccuccacaccc

SEQ ID NO: 1073460 - RNA, 19 nt, Human
ggccuaaaagguaugagua

SEQ ID NO: 1073461 - RNA, 25 nt, Human
ggcgccuguaaucccagcuacucug

SEQ ID NO: 1073462 - RNA, 22 nt, Human
ggcuggaguacaguggcgugau

SEQ ID NO: 1073463 - RNA, 19 nt, Human
gguggagguugcagugagc

SEQ ID NO: 1073464 - RNA, 24 nt, Human
gguggugggcgccuguaaucccag

SEQ ID NO: 1073465 - RNA, 23 nt, Human
gguguuucaccguguuggccagg

SEQ ID NO: 1073466 - RNA, 20 nt, Human
guggagguugcagugagcug

SEQ ID NO: 1073467 - RNA, 22 nt, Human
guucacacaaugaugacaucac

SEQ ID NO: 1073468 - RNA, 20 nt, Human
guucuccugccucagccucc

SEQ ID NO: 1073469 - RNA, 24 nt, Human
guugcagugagcugagaucgugcc

SEQ ID NO: 1073470 - RNA, 24 nt, Human
guuuuaaaaaaagaaaaaaaaaaa

SEQ ID NO: 1073471 - RNA, 20 nt, Human
uaaaaaccuuguaguccuga

SEQ ID NO: 1073472 - RNA, 23 nt, Human
uaaagaggcauuucucagaggca

SEQ ID NO: 1073473 - RNA, 21 nt, Human
uaaaggaacuauaauuccuua

SEQ ID NO: 1073474 - RNA, 20 nt, Human
uaaauacuaugccccaacua

SEQ ID NO: 1073475 - RNA, 28 nt, Human
uaaauugaaacacaguuuguuuuaaucc

SEQ ID NO: 1073476 - RNA, 19 nt, Human
uaacacggugaaacccggu

SEQ ID NO: 1073477 - RNA, 24 nt, Human
uaacacggugaaacccgguuucua

SEQ ID NO: 1073478 - RNA, 23 nt, Human
uaacagacaacaacaaaaaaaga

SEQ ID NO: 1073479 - RNA, 19 nt, Human
uaacguagauacaucuccc

SEQ ID NO: 1073480 - RNA, 22 nt, Human
uaagcacaagcuaacaaagcca

SEQ ID NO: 1073481 - RNA, 23 nt, Human
uaaguaaaaaccuuguaguccug

SEQ ID NO: 1073482 - RNA, 24 nt, Human
uaauuucuguauuuuuaguagaga

SEQ ID NO: 1073483 - RNA, 22 nt, Human
uacaggcauacaccuccacacc

SEQ ID NO: 1073484 - RNA, 19 nt, Human
uacaguggcgugaucuugg

SEQ ID NO: 1073485 - RNA, 22 nt, Human
uaccaaaaagcaaggaggguau

SEQ ID NO: 1073486 - RNA, 22 nt, Human
uaccuuaagcacaagcuaacaa

SEQ ID NO: 1073487 - RNA, 18 nt, Human
uagaaaauuuaaacaucg

SEQ ID NO: 1073488 - RNA, 19 nt, Human
uagaaaauuuaaacaucga

SEQ ID NO: 1073489 - RNA, 23 nt, Human
uagcaaaaugggcuaauuccaaa

SEQ ID NO: 1073490 - RNA, 21 nt, Human
uaguagagacgguguuucacc

SEQ ID NO: 1073491 - RNA, 24 nt, Human
uaguagagacgguguuucaccgug

SEQ ID NO: 1073492 - RNA, 26 nt, Human
uaguagagacgguguuucaccguguu

SEQ ID NO: 1073493 - RNA, 18 nt, Human
uauaguaggcuauacugu

SEQ ID NO: 1073494 - RNA, 21 nt, Human
ucaaaaauaggaacucacagg

SEQ ID NO: 1073495 - RNA, 24 nt, Human
ucaaaacaaaaggauaacaacugc

SEQ ID NO: 1073496 - RNA, 24 nt, Human
ucaccguguuggccaggcuagucu

SEQ ID NO: 1073497 - RNA, 23 nt, Human
ucaccugaguucaggaguuugag

SEQ ID NO: 1073498 - RNA, 22 nt, Human
ucacugcgaccuccuccuccug

SEQ ID NO: 1073499 - RNA, 24 nt, Human
ucacugcgaccuccuccuccuggg

SEQ ID NO: 1073500 - RNA, 20 nt, Human
ucaggagguggagguugcag

SEQ ID NO: 1073501 - RNA, 18 nt, Human
ucagugaagaaggauaaa

SEQ ID NO: 1073502 - RNA, 25 nt, Human
ucauaccaaaaagcaaggaggguau

SEQ ID NO: 1073503 - RNA, 19 nt, Human
uccagcuugggcaacaaga

SEQ ID NO: 1073504 - RNA, 21 nt, Human
ucccaaaaugcugggauuaca

SEQ ID NO: 1073505 - RNA, 24 nt, Human
ucccacucugucacccaggcugga

SEQ ID NO: 1073506 - RNA, 25 nt, Human
ucccacucugucacccaggcuggag

SEQ ID NO: 1073507 - RNA, 26 nt, Human
ucccacucugucacccaggcuggagu

SEQ ID NO: 1073508 - RNA, 24 nt, Human
uccuaaguagcugggacuacaggc

SEQ ID NO: 1073509 - RNA, 19 nt, Human
uccuggguucaagcaguuc

SEQ ID NO: 1073510 - RNA, 19 nt, Human
uccuggguucaagcaguuc

SEQ ID NO: 1073511 - RNA, 21 nt, Human
uccuggguucaagcaguucuc

SEQ ID NO: 1073512 - RNA, 24 nt, Human
uccuggguucaagcaguucuccug

SEQ ID NO: 1073513 - RNA, 18 nt, Human
ucgagaaggauaacaggc

SEQ ID NO: 1073514 - RNA, 22 nt, Human
ucuccugccucacccucccaaa

SEQ ID NO: 1073515 - RNA, 24 nt, Human
ucuccugccucagccuccuaagua

SEQ ID NO: 1073516 - RNA, 23 nt, Human
ucucgaacuccugaccucaggug

SEQ ID NO: 1073517 - RNA, 18 nt, Human
ucugucacccaggcugga

SEQ ID NO: 1073518 - RNA, 24 nt, Human
ucugucacccaggcuggaguacag

SEQ ID NO: 1073519 - RNA, 18 nt, Human
ugaaaaggccuaaaaggu

SEQ ID NO: 1073520 - RNA, 19 nt, Human
ugaaaaggccuaaaaggua

SEQ ID NO: 1073521 - RNA, 18 nt, Human
ugaaugaacaucuaucag

SEQ ID NO: 1073522 - RNA, 20 nt, Human
ugaccucaggugauccacuu

SEQ ID NO: 1073523 - RNA, 23 nt, Human
ugagaccagccuggcuaacacgg

SEQ ID NO: 1073524 - RNA, 19 nt, Human
ugcacuccagcuugggcaa

SEQ ID NO: 1073525 - RNA, 24 nt, Human
ugccucacccucccaaaaugcugg

SEQ ID NO: 1073526 - RNA, 24 nt, Human
ugccucagccuccuaaguagcugg

SEQ ID NO: 1073527 - RNA, 24 nt, Human
ugcugggauuacacaugugagcca

SEQ ID NO: 1073528 - RNA, 19 nt, Human
uggaguacaguggcgugau

SEQ ID NO: 1073529 - RNA, 23 nt, Human
uggaguacaguggcgugaucuug

SEQ ID NO: 1073530 - RNA, 24 nt, Human
uggaguacaguggcgugaucuugg

SEQ ID NO: 1073531 - RNA, 24 nt, Human
uggccaggcuagucucgaacuccu

SEQ ID NO: 1073532 - RNA, 21 nt, Human
uggcucacuccuguaauccca

SEQ ID NO: 1073533 - RNA, 22 nt, Human
uggcucacuccuguaaucccag

SEQ ID NO: 1073534 - RNA, 24 nt, Human
uggcucacuccuguaaucccagca

SEQ ID NO: 1073535 - RNA, 20 nt, Human
ugggaaaaagaagauacaga

SEQ ID NO: 1073536 - RNA, 18 nt, Human
ugggacuacaggcauaca

SEQ ID NO: 1073537 - RNA, 24 nt, Human
ugggacuacaggcauacaccucca

SEQ ID NO: 1073538 - RNA, 24 nt, Human
ugggaggccgagacaggaggauca

SEQ ID NO: 1073539 - RNA, 22 nt, Human
ugggauuacacaugugagccac

SEQ ID NO: 1073540 - RNA, 23 nt, Human
ugggauuacacaugugagccacc

SEQ ID NO: 1073541 - RNA, 24 nt, Human
ugggauuacacaugugagccaccg

SEQ ID NO: 1073542 - RNA, 20 nt, Human
ugggcucgaaagauucuccu

SEQ ID NO: 1073543 - RNA, 24 nt, Human
ugguggugggcgccuguaauccca

SEQ ID NO: 1073544 - RNA, 20 nt, Human
ugucauaccaaaaagcaagg

SEQ ID NO: 1073545 - RNA, 22 nt, Human
uuagccagguaugguggugggc

SEQ ID NO: 1073546 - RNA, 22 nt, Human
uuaguagagacgguguuucacc

SEQ ID NO: 1073547 - RNA, 24 nt, Human
uuaguagagacgguguuucaccgu

SEQ ID NO: 1073548 - RNA, 21 nt, Human
uucaagcaguucuccugccuc

SEQ ID NO: 1073549 - RNA, 19 nt, Human
uucaauaacagacaacaac

SEQ ID NO: 1073550 - RNA, 28 nt, Human
uuccuuagcaaaaugggcuaauuccaag

SEQ ID NO: 1073551 - RNA, 24 nt, Human
uugaacucaggagguggagguugc

SEQ ID NO: 1073552 - RNA, 18 nt, Human
uugcagugagcugagauc

SEQ ID NO: 1073553 - RNA, 22 nt, Human
uugcagugagcugagaucgugc

SEQ ID NO: 1073554 - RNA, 25 nt, Human
uugggaggccgagacaggaggauca

SEQ ID NO: 1073555 - RNA, 25 nt, Human
uuucaaacaccuguccuccucuuau

SEQ ID NO: 1073556 - RNA, 24 nt, Human
uuucaccguguuggccaggcuagu

SEQ ID NO: 1073557 - RNA, 22 nt, Human
uuucuacuaaaaauacaaaaaa

SEQ ID NO: 1073558 - RNA, 20 nt, Human
uuucuguauuuuuaguagag

SEQ ID NO: 1073559 - RNA, 24 nt, Human
uuuuuaguagagacgguguuucac

SEQ ID NO: 1073560 - RNA, 24 nt, Human
aaaccuacugcugggugguuuuga

SEQ ID NO: 1073561 - RNA, 21 nt, Human
uguuaacaaaaccuacugcug

SEQ ID NO: 1073562 - RNA, 19 nt, Human
aaauaagauguacagcaga

SEQ ID NO: 1073563 - RNA, 24 nt, Human
aaguaucaugaacagcaauuuuuu

SEQ ID NO: 1073564 - RNA, 20 nt, Human
aauggaaaauauccucugaa

SEQ ID NO: 1073565 - RNA, 18 nt, Human
aguuaaauccuucucugc

SEQ ID NO: 1073566 - RNA, 18 nt, Human
caaacaaguaucaugaac

SEQ ID NO: 1073567 - RNA, 20 nt, Human
cacaacaauuucuuuaucag

SEQ ID NO: 1073568 - RNA, 20 nt, Human
cacagcagcauccacagaaa

SEQ ID NO: 1073569 - RNA, 19 nt, Human
cagugcagacacagacaua

SEQ ID NO: 1073570 - RNA, 19 nt, Human
cauuucugccauaggaaca

SEQ ID NO: 1073571 - RNA, 18 nt, Human
ccucugaauauccacaag

SEQ ID NO: 1073572 - RNA, 21 nt, Human
ccucugaauauccacaagucu

SEQ ID NO: 1073573 - RNA, 24 nt, Human
cuuccugggcuuccuaaagauucc

SEQ ID NO: 1073574 - RNA, 21 nt, Human
gcagugcagacacagacauac

SEQ ID NO: 1073575 - RNA, 21 nt, Human
uaccacaaugucaaugucuuc

SEQ ID NO: 1073576 - RNA, 20 nt, Human
uaucagguugaacauccugg

SEQ ID NO: 1073577 - RNA, 20 nt, Human
uccaaaggaaagaucaaacc

SEQ ID NO: 1073578 - RNA, 26 nt, Human
uccacagaaauaacaucuuuucuucc

SEQ ID NO: 1073579 - RNA, 20 nt, Human
ugccaaauggaaaauauccu

SEQ ID NO: 1073580 - RNA, 24 nt, Human
ugccaaauggaaaauauccucuga

SEQ ID NO: 1073581 - RNA, 23 nt, Human
uuaucguguccacaacaauuucu

SEQ ID NO: 1073582 - RNA, 21 nt, Human
uucaaacaaguaucaugaaca

SEQ ID NO: 1073583 - RNA, 22 nt, Human
uucacagcagcauccacagaaa

SEQ ID NO: 1073584 - RNA, 23 nt, Human
uucacagcagcauccacagaaau

SEQ ID NO: 1073585 - RNA, 24 nt, Human
uucacagcagcauccacagaaaua

SEQ ID NO: 1073586 - RNA, 23 nt, Human
uuccugggcuuccuaaagauucc

SEQ ID NO: 1073587 - RNA, 21 nt, Human
uugaacauccuggggagcagu

SEQ ID NO: 1073588 - RNA, 21 nt, Human
uugacucuggaucauccugcc

SEQ ID NO: 1073589 - RNA, 19 nt, Human
uugacuguccuucuuuaua

SEQ ID NO: 1073590 - RNA, 23 nt, Human
uuuauagcagugaauuacuucau

SEQ ID NO: 1073591 - RNA, 22 nt, Human
uuuaucugccacagaagauaaa

SEQ ID NO: 1073592 - RNA, 24 nt, Human
caggcgccggagcggagaggccag

SEQ ID NO: 1073593 - RNA, 19 nt, Human
cccucgggccucccaggug

SEQ ID NO: 1073594 - RNA, 20 nt, Human
ccucgcgucgccccuucccc

SEQ ID NO: 1073595 - RNA, 22 nt, Human
ccugcgcccccucgcgucgccc

SEQ ID NO: 1073596 - RNA, 21 nt, Human
cggggcugcaggcgccggagc

SEQ ID NO: 1073597 - RNA, 18 nt, Human
gccggagcggagaggcca

SEQ ID NO: 1073598 - RNA, 19 nt, Human
gcgccggagcggagaggcc

SEQ ID NO: 1073599 - RNA, 21 nt, Human
ggccagaaguuggggccgcgg

SEQ ID NO: 1073600 - RNA, 23 nt, Human
ucccgggcgcccccucgggccuc

SEQ ID NO: 1073601 - RNA, 24 nt, Human
ucccugcgcccccucgcgucgccc

SEQ ID NO: 1073602 - RNA, 20 nt, Human
aaaaccugagauugugaaga

SEQ ID NO: 1073603 - RNA, 19 nt, Human
aaagugcugggauuacagg

SEQ ID NO: 1073604 - RNA, 24 nt, Human
aaagugcugggauuacaggugcga

SEQ ID NO: 1073605 - RNA, 27 nt, Human
aaccucuuuaagacucugucuuuguca

SEQ ID NO: 1073606 - RNA, 20 nt, Human
aagaaaaggcagacucauga

SEQ ID NO: 1073607 - RNA, 24 nt, Human
aagaaaaggcagacucaugacuga

SEQ ID NO: 1073608 - RNA, 21 nt, Human
aagaaugauccagccccaaau

SEQ ID NO: 1073609 - RNA, 24 nt, Human
aagcauccuacaaugccccgacaa

SEQ ID NO: 1073610 - RNA, 25 nt, Human
aagcgauccucccaccucagccucc

SEQ ID NO: 1073611 - RNA, 21 nt, Human
aaggucuugcuauuuuuccca

SEQ ID NO: 1073612 - RNA, 21 nt, Human
aaguagcugagaccacaggca

SEQ ID NO: 1073613 - RNA, 24 nt, Human
aaguagcugagaccacaggcaugu

SEQ ID NO: 1073614 - RNA, 27 nt, Human
aaguagcugagaccacaggcauguauc

SEQ ID NO: 1073615 - RNA, 18 nt, Human
aagugcugggauuacagg

SEQ ID NO: 1073616 - RNA, 19 nt, Human
aagugcugggauuacaggu

SEQ ID NO: 1073617 - RNA, 22 nt, Human
aauagugcugaaagugagagac

SEQ ID NO: 1073618 - RNA, 20 nt, Human
acaucuagucagcaucuguu

SEQ ID NO: 1073619 - RNA, 18 nt, Human
acccagccucaacuguuu

SEQ ID NO: 1073620 - RNA, 19 nt, Human
acccaggcuggagugcagu

SEQ ID NO: 1073621 - RNA, 20 nt, Human
acccaggcuggagugcagug

SEQ ID NO: 1073622 - RNA, 23 nt, Human
acccaggcuggagugcaguggug

SEQ ID NO: 1073623 - RNA, 24 nt, Human
acccugauuccaucuuagagauca

SEQ ID NO: 1073624 - RNA, 23 nt, Human
accucagccucccaaguagcuga

SEQ ID NO: 1073625 - RNA, 19 nt, Human
acggagcaguaaguacaga

SEQ ID NO: 1073626 - RNA, 19 nt, Human
acugcagccucuaccuccu

SEQ ID NO: 1073627 - RNA, 22 nt, Human
aguacagaguucuggagaggga

SEQ ID NO: 1073628 - RNA, 18 nt, Human
aguauccuuccaccaccc

SEQ ID NO: 1073629 - RNA, 20 nt, Human
agugcaguggugcgaucccg

SEQ ID NO: 1073630 - RNA, 23 nt, Human
agugcaguggugcgaucccggcu

SEQ ID NO: 1073631 - RNA, 24 nt, Human
agugcaguggugcgaucccggcuc

SEQ ID NO: 1073632 - RNA, 24 nt, Human
aucacuuugcaauaaaaccugagg

SEQ ID NO: 1073633 - RNA, 24 nt, Human
caaagugcugggauuacaggugcg

SEQ ID NO: 1073634 - RNA, 24 nt, Human
caaccgggagugauuuugcccccc

SEQ ID NO: 1073635 - RNA, 27 nt, Human
caagcgauccucccaccucagccuccc

SEQ ID NO: 1073636 - RNA, 27 nt, Human
caagcgauccucccaccucagccuccc

SEQ ID NO: 1073637 - RNA, 24 nt, Human
caaggucuugcuauuuuucccagg

SEQ ID NO: 1073638 - RNA, 20 nt, Human
cacauauuuaugaaaaugcc

SEQ ID NO: 1073639 - RNA, 19 nt, Human
caccacaccuggcuaauuu

SEQ ID NO: 1073640 - RNA, 23 nt, Human
cacugcagccucuaccuccuggg

SEQ ID NO: 1073641 - RNA, 21 nt, Human
cacuuugcaauaaaaccugag

SEQ ID NO: 1073642 - RNA, 24 nt, Human
cagcauccccuguguggcccuuag

SEQ ID NO: 1073643 - RNA, 25 nt, Human
cagcauccccuguguggcccuuagg

SEQ ID NO: 1073644 - RNA, 23 nt, Human
cagccucuaccuccuggguucaa

SEQ ID NO: 1073645 - RNA, 18 nt, Human
caguauccuuccaccacc

SEQ ID NO: 1073646 - RNA, 18 nt, Human
cagugcaccuguguuugg

SEQ ID NO: 1073647 - RNA, 20 nt, Human
cauccaagcacacuuggcca

SEQ ID NO: 1073648 - RNA, 23 nt, Human
caugaagaaaaggcagacucaug

SEQ ID NO: 1073649 - RNA, 25 nt, Human
caugaagaaaaggcagacucaugac

SEQ ID NO: 1073650 - RNA, 24 nt, Human
cauuuucaauugagucauuggggg

SEQ ID NO: 1073651 - RNA, 20 nt, Human
ccaaaggagagacaaucuug

SEQ ID NO: 1073652 - RNA, 21 nt, Human
ccaaagugcugggauuacagg

SEQ ID NO: 1073653 - RNA, 21 nt, Human
ccaaagugcugggauuacagg

SEQ ID NO: 1073654 - RNA, 22 nt, Human
ccaaagugcugggauuacaggu

SEQ ID NO: 1073655 - RNA, 21 nt, Human
ccaggcuggucuugaacuccu

SEQ ID NO: 1073656 - RNA, 22 nt, Human
ccauuccccacccugaucugga

SEQ ID NO: 1073657 - RNA, 20 nt, Human
cccaccucagccucccaagu

SEQ ID NO: 1073658 - RNA, 23 nt, Human
cccaccucagccucccaaguagc

SEQ ID NO: 1073659 - RNA, 21 nt, Human
cccccagagaacauguggcca

SEQ ID NO: 1073660 - RNA, 22 nt, Human
cccccagagaacauguggccau

SEQ ID NO: 1073661 - RNA, 23 nt, Human
cccgacaacucccacuaagacaa

SEQ ID NO: 1073662 - RNA, 18 nt, Human
cccuggagagcaggaugg

SEQ ID NO: 1073663 - RNA, 25 nt, Human
ccuacaaugccccgacaacucccac

SEQ ID NO: 1073664 - RNA, 24 nt, Human
ccuccuggguucaagcgauccucc

SEQ ID NO: 1073665 - RNA, 19 nt, Human
ccucuaccuccuggguuca

SEQ ID NO: 1073666 - RNA, 20 nt, Human
ccuggguucaagcgauccuc

SEQ ID NO: 1073667 - RNA, 23 nt, Human
ccuggguucaagcgauccuccca

SEQ ID NO: 1073668 - RNA, 21 nt, Human
ccuguagcugucaacucugug

SEQ ID NO: 1073669 - RNA, 19 nt, Human
cgaccucauuuuuauaacu

SEQ ID NO: 1073670 - RNA, 20 nt, Human
cgacuggccauuccccaccc

SEQ ID NO: 1073671 - RNA, 19 nt, Human
cggcuggaggagguggugc

SEQ ID NO: 1073672 - RNA, 23 nt, Human
cuaagcauccuacaaugccccuc

SEQ ID NO: 1073673 - RNA, 24 nt, Human
cucacugcagccucuaccuccugg

SEQ ID NO: 1073674 - RNA, 19 nt, Human
cucagcaucuuuuaacuca

SEQ ID NO: 1073675 - RNA, 21 nt, Human
cucccaaguagcugagaccac

SEQ ID NO: 1073676 - RNA, 22 nt, Human
cucucggcagcugggacuucau

SEQ ID NO: 1073677 - RNA, 23 nt, Human
cugcagccucuaccuccuggguu

SEQ ID NO: 1073678 - RNA, 24 nt, Human
cuucagggcuucucaaccgggagu

SEQ ID NO: 1073679 - RNA, 23 nt, Human
cuuuucucuuucuccaccucuuu

SEQ ID NO: 1073680 - RNA, 21 nt, Human
gaaaaugccaccccaggaauu

SEQ ID NO: 1073681 - RNA, 19 nt, Human
gaagaaaaggcagacucau

SEQ ID NO: 1073682 - RNA, 19 nt, Human
gaguaaucccaaagugcug

SEQ ID NO: 1073683 - RNA, 18 nt, Human
gauuacaggugcgaguca

SEQ ID NO: 1073684 - RNA, 24 nt, Human
gauuacaggugcgagucacucuac

SEQ ID NO: 1073685 - RNA, 20 nt, Human
gauuuugccccccagagaac

SEQ ID NO: 1073686 - RNA, 22 nt, Human
gcccugagcaugacuuugagua

SEQ ID NO: 1073687 - RNA, 22 nt, Human
gcggggggagggugaggguuca

SEQ ID NO: 1073688 - RNA, 21 nt, Human
gcucacugcagccucuaccuc

SEQ ID NO: 1073689 - RNA, 19 nt, Human
gcuuuuuuuuuuuuuuucc

SEQ ID NO: 1073690 - RNA, 22 nt, Human
ggaggaacuuuauuucuggcca

SEQ ID NO: 1073691 - RNA, 24 nt, Human
ggcuggaggagguggugcuacugg

SEQ ID NO: 1073692 - RNA, 20 nt, Human
ggcuggucuugaacuccuga

SEQ ID NO: 1073693 - RNA, 26 nt, Human
guacugcuuuuuuuuuuuuuuuccuu

SEQ ID NO: 1073694 - RNA, 19 nt, Human
gucucaaucucugguuucu

SEQ ID NO: 1073695 - RNA, 21 nt, Human
uacagaguucuggagagggaa

SEQ ID NO: 1073696 - RNA, 22 nt, Human
uaccauuugugcaaguugugca

SEQ ID NO: 1073697 - RNA, 24 nt, Human
uaccuccuggguucaagcgauccu

SEQ ID NO: 1073698 - RNA, 21 nt, Human
uacuuacaugugaucugcgua

SEQ ID NO: 1073699 - RNA, 18 nt, Human
uacuucagggcuucucaa

SEQ ID NO: 1073700 - RNA, 21 nt, Human
uagagaucauccaagcacacu

SEQ ID NO: 1073701 - RNA, 20 nt, Human
uagaggcaaggucuugcuau

SEQ ID NO: 1073702 - RNA, 26 nt, Human
uaguacugcuuuuuuuuuuuuuuucc

SEQ ID NO: 1073703 - RNA, 18 nt, Human
uaugucuuuacuucaggg

SEQ ID NO: 1073704 - RNA, 24 nt, Human
uauuuuucccaggcuggucuugaa

SEQ ID NO: 1073705 - RNA, 23 nt, Human
ucaagaaaggagaaauguugaaa

SEQ ID NO: 1073706 - RNA, 24 nt, Human
ucacugcagccucuaccuccuggg

SEQ ID NO: 1073707 - RNA, 25 nt, Human
ucacugcagccucuaccuccugggu

SEQ ID NO: 1073708 - RNA, 18 nt, Human
ucagcagcguugucccug

SEQ ID NO: 1073709 - RNA, 18 nt, Human
ucagccucccaaguagcu

SEQ ID NO: 1073710 - RNA, 21 nt, Human
ucagccucccaaguagcugag

SEQ ID NO: 1073711 - RNA, 23 nt, Human
ucagugcaccuguguuuggggcu

SEQ ID NO: 1073712 - RNA, 26 nt, Human
ucagugcaccuguguuuggggcuuug

SEQ ID NO: 1073713 - RNA, 23 nt, Human
ucccaaagugcugggauuacagg

SEQ ID NO: 1073714 - RNA, 24 nt, Human
ucccaaguagcugagaccacaggc

SEQ ID NO: 1073715 - RNA, 24 nt, Human
ucccaugaagaaaaggcagacuca

SEQ ID NO: 1073716 - RNA, 27 nt, Human
uccucccaccucagccucccaaguagc

SEQ ID NO: 1073717 - RNA, 20 nt, Human
uccugaguucaagcaaucuu

SEQ ID NO: 1073718 - RNA, 21 nt, Human
uccuggguucaagcgauccuc

SEQ ID NO: 1073719 - RNA, 25 nt, Human
ucuacauggcaauaagcaguugcuc

SEQ ID NO: 1073720 - RNA, 23 nt, Human
ucucugguuucuuuacucagugc

SEQ ID NO: 1073721 - RNA, 19 nt, Human
ucuguaacccaggcuggag

SEQ ID NO: 1073722 - RNA, 20 nt, Human
ucuguaacccaggcuggagu

SEQ ID NO: 1073723 - RNA, 24 nt, Human
ucuguaacccaggcuggagugcag

SEQ ID NO: 1073724 - RNA, 23 nt, Human
ucuugaacuccugaguucaagca

SEQ ID NO: 1073725 - RNA, 23 nt, Human
ucuugcuauuuuucccaggcugg

SEQ ID NO: 1073726 - RNA, 24 nt, Human
ucuugcuauuuuucccaggcuggu

SEQ ID NO: 1073727 - RNA, 21 nt, Human
ucuuuucucuuucuccaccuc

SEQ ID NO: 1073728 - RNA, 24 nt, Human
ugaaaaugccaccccaggaauugc

SEQ ID NO: 1073729 - RNA, 19 nt, Human
ugaacagagacgaccucau

SEQ ID NO: 1073730 - RNA, 24 nt, Human
ugaacuccugaguucaagcaaucu

SEQ ID NO: 1073731 - RNA, 19 nt, Human
ugacugauggcaacaucga

SEQ ID NO: 1073732 - RNA, 18 nt, Human
ugagaagcagauuagcca

SEQ ID NO: 1073733 - RNA, 24 nt, Human
ugagaccacaggcauguaucacca

SEQ ID NO: 1073734 - RNA, 21 nt, Human
ugaguucaagcaaucuuccca

SEQ ID NO: 1073735 - RNA, 19 nt, Human
ugccaccccaggaauugca

SEQ ID NO: 1073736 - RNA, 18 nt, Human
ugccccgacaacucccac

SEQ ID NO: 1073737 - RNA, 20 nt, Human
ugccccgacaacucccacua

SEQ ID NO: 1073738 - RNA, 26 nt, Human
ugccccgacaacucccacuaagacaa

SEQ ID NO: 1073739 - RNA, 24 nt, Human
ugcugggauuacaggugcgaguca

SEQ ID NO: 1073740 - RNA, 18 nt, Human
uggagacaauuuuggugg

SEQ ID NO: 1073741 - RNA, 24 nt, Human
uggagugcaguggugcgaucccgg

SEQ ID NO: 1073742 - RNA, 21 nt, Human
uggccaaauugguuuugcuac

SEQ ID NO: 1073743 - RNA, 23 nt, Human
uggcuaauuuuuucccuuuuucu

SEQ ID NO: 1073744 - RNA, 18 nt, Human
ugggauuacaggugcgag

SEQ ID NO: 1073745 - RNA, 18 nt, Human
ugggauuacaggugcgag

SEQ ID NO: 1073746 - RNA, 21 nt, Human
ugggauuacaggugcgaguca

SEQ ID NO: 1073747 - RNA, 22 nt, Human
ugggauuacaggugcgagucac

SEQ ID NO: 1073748 - RNA, 23 nt, Human
ugggauuacaggugcgagucacu

SEQ ID NO: 1073749 - RNA, 25 nt, Human
ugggauuacaggugcgagucacucu

SEQ ID NO: 1073750 - RNA, 24 nt, Human
uggugcgaucccggcucacugcag

SEQ ID NO: 1073751 - RNA, 19 nt, Human
ugguugcggcuggaggagg

SEQ ID NO: 1073752 - RNA, 26 nt, Human
ugucaguauccuuccaccacccuggc

SEQ ID NO: 1073753 - RNA, 20 nt, Human
ugucauggguacagcauccc

SEQ ID NO: 1073754 - RNA, 18 nt, Human
ugucccuggagagcagga

SEQ ID NO: 1073755 - RNA, 19 nt, Human
uguccugaggugcucugga

SEQ ID NO: 1073756 - RNA, 24 nt, Human
uucaagcaaucuucccaccucagc

SEQ ID NO: 1073757 - RNA, 24 nt, Human
uucaagcgauccucccaccucagc

SEQ ID NO: 1073758 - RNA, 18 nt, Human
uucauugucauuaccagu

SEQ ID NO: 1073759 - RNA, 20 nt, Human
uucccaccucagccugggag

SEQ ID NO: 1073760 - RNA, 22 nt, Human
uucccaccucagccugggagua

SEQ ID NO: 1073761 - RNA, 24 nt, Human
uucccaggcuggucuugaacuccu

SEQ ID NO: 1073762 - RNA, 23 nt, Human
uuggugguugcggcuggaggagg

SEQ ID NO: 1073763 - RNA, 19 nt, Human
uugucccuggagagcagga

SEQ ID NO: 1073764 - RNA, 21 nt, Human
uuucuuuucucuuucuccacc

SEQ ID NO: 1073765 - RNA, 23 nt, Human
uuuuucagcagcguugucccugg

SEQ ID NO: 1073766 - RNA, 19 nt, Human
aaaaagaaauuccuagccc

SEQ ID NO: 1073767 - RNA, 23 nt, Human
aaacugggaaggacaacaggaga

SEQ ID NO: 1073768 - RNA, 19 nt, Human
aaagaaauuccuagcccuu

SEQ ID NO: 1073769 - RNA, 21 nt, Human
aaagucuuucccuucucuagc

SEQ ID NO: 1073770 - RNA, 22 nt, Human
aacacauguccaauaggcacaa

SEQ ID NO: 1073771 - RNA, 19 nt, Human
aacaguccaguccugauga

SEQ ID NO: 1073772 - RNA, 19 nt, Human
aagguuugaaauacugguu

SEQ ID NO: 1073773 - RNA, 18 nt, Human
aaguuucuuuuauuguuu

SEQ ID NO: 1073774 - RNA, 18 nt, Human
acuuguggaccuccccuc

SEQ ID NO: 1073775 - RNA, 23 nt, Human
aggacaacaggagaagugguggc

SEQ ID NO: 1073776 - RNA, 23 nt, Human
aggagcuggaucaguagacacca

SEQ ID NO: 1073777 - RNA, 22 nt, Human
agggaaaaggggagguugggga

SEQ ID NO: 1073778 - RNA, 20 nt, Human
aguccaaaauuuaagaaaaa

SEQ ID NO: 1073779 - RNA, 24 nt, Human
aguggcauuauacaaacaaguuuc

SEQ ID NO: 1073780 - RNA, 25 nt, Human
aucacuagcaauacaccuacaauga

SEQ ID NO: 1073781 - RNA, 20 nt, Human
augaaccaaaguagcuacaa

SEQ ID NO: 1073782 - RNA, 19 nt, Human
auugucuuuguugugcugu

SEQ ID NO: 1073783 - RNA, 20 nt, Human
caacugccugcccauuuauu

SEQ ID NO: 1073784 - RNA, 21 nt, Human
cacucgaucaucucuacacuu

SEQ ID NO: 1073785 - RNA, 22 nt, Human
caggagcuggaucaguagacac

SEQ ID NO: 1073786 - RNA, 28 nt, Human
ccaccuggagaucuucaaagggggcugc

SEQ ID NO: 1073787 - RNA, 18 nt, Human
cccuguccuauugauccc

SEQ ID NO: 1073788 - RNA, 20 nt, Human
cgagcucccugaaaaagaaa

SEQ ID NO: 1073789 - RNA, 20 nt, Human
cgaugagcuuccucaugcuu

SEQ ID NO: 1073790 - RNA, 21 nt, Human
cgcguacauaacaagaaguag

SEQ ID NO: 1073791 - RNA, 23 nt, Human
cgggugugacuggagcagggcgu

SEQ ID NO: 1073792 - RNA, 21 nt, Human
cuagauucugccuucuaacug

SEQ ID NO: 1073793 - RNA, 23 nt, Human
cuccauaagcuuguaugccgggu

SEQ ID NO: 1073794 - RNA, 20 nt, Human
cucugugccuacauaucuaa

SEQ ID NO: 1073795 - RNA, 23 nt, Human
cugaaguuuuucugaugaaccaa

SEQ ID NO: 1073796 - RNA, 18 nt, Human
cugugccuacauaucuag

SEQ ID NO: 1073797 - RNA, 19 nt, Human
cuuaagagccgagcucccu

SEQ ID NO: 1073798 - RNA, 20 nt, Human
gagauucuggaugagccuaa

SEQ ID NO: 1073799 - RNA, 22 nt, Human
gagccgagcucccugaaaaaga

SEQ ID NO: 1073800 - RNA, 19 nt, Human
gaucaucucuacacuuuga

SEQ ID NO: 1073801 - RNA, 18 nt, Human
gcugcacaagcaucaaau

SEQ ID NO: 1073802 - RNA, 20 nt, Human
gcugugguggauccaagcug

SEQ ID NO: 1073803 - RNA, 21 nt, Human
gggaaaaggggagguugggga

SEQ ID NO: 1073804 - RNA, 18 nt, Human
gggagguuggggagaaac

SEQ ID NO: 1073805 - RNA, 21 nt, Human
gggagguuggggagaaacugg

SEQ ID NO: 1073806 - RNA, 20 nt, Human
ggguugucugggcuuggucu

SEQ ID NO: 1073807 - RNA, 20 nt, Human
guuugcuuggggauuuccuu

SEQ ID NO: 1073808 - RNA, 18 nt, Human
uaacacaacugccugccc

SEQ ID NO: 1073809 - RNA, 18 nt, Human
uaagaaaaaugaaucuca

SEQ ID NO: 1073810 - RNA, 19 nt, Human
uaagaaaaaugaaucucac

SEQ ID NO: 1073811 - RNA, 22 nt, Human
uaagcuuuccuaaagggaugau

SEQ ID NO: 1073812 - RNA, 23 nt, Human
uaauugucuuuguugugcuguua

SEQ ID NO: 1073813 - RNA, 27 nt, Human
uacacguucucccuuuuuccaaugggg

SEQ ID NO: 1073814 - RNA, 20 nt, Human
uaccuugcacugaguggcau

SEQ ID NO: 1073815 - RNA, 18 nt, Human
uacgugaaaaagucacaa

SEQ ID NO: 1073816 - RNA, 22 nt, Human
uacuucuguuuuuuccaacuuu

SEQ ID NO: 1073817 - RNA, 24 nt, Human
uagcaauacaccuacaaugagggu

SEQ ID NO: 1073818 - RNA, 23 nt, Human
uaguccagagggaacaguccagu

SEQ ID NO: 1073819 - RNA, 24 nt, Human
uauagaacagaaagauugcuuuaa

SEQ ID NO: 1073820 - RNA, 25 nt, Human
uauuucccuccuuugagcauuuuca

SEQ ID NO: 1073821 - RNA, 21 nt, Human
uauuucuagcuuuuuacuauu

SEQ ID NO: 1073822 - RNA, 24 nt, Human
ucacuagcaauacaccuacaauga

SEQ ID NO: 1073823 - RNA, 19 nt, Human
uccacaguggacacaaaga

SEQ ID NO: 1073824 - RNA, 21 nt, Human
uccacaguggacacaaagagg

SEQ ID NO: 1073825 - RNA, 21 nt, Human
ucccugaaaaagaaauuccua

SEQ ID NO: 1073826 - RNA, 26 nt, Human
ucccugaaaaagaaauuccuagcccu

SEQ ID NO: 1073827 - RNA, 26 nt, Human
ucuuuagcuccuuucucaggggccgc

SEQ ID NO: 1073828 - RNA, 20 nt, Human
ucuuuuucagaaguuauggu

SEQ ID NO: 1073829 - RNA, 25 nt, Human
ugaaaaagucacaauagaucaagua

SEQ ID NO: 1073830 - RNA, 23 nt, Human
ugaaccaaaguagcuacaaaacc

SEQ ID NO: 1073831 - RNA, 21 nt, Human
ugaguggcauuauacaaacaa

SEQ ID NO: 1073832 - RNA, 21 nt, Human
ugcuagauucugccuucuaac

SEQ ID NO: 1073833 - RNA, 19 nt, Human
ugcucaggacgacagucug

SEQ ID NO: 1073834 - RNA, 18 nt, Human
ugguggauccaagcuggg

SEQ ID NO: 1073835 - RNA, 22 nt, Human
uguggaccuccccucuaauuaa

SEQ ID NO: 1073836 - RNA, 23 nt, Human
ugugguggauccaagcugggauu

SEQ ID NO: 1073837 - RNA, 19 nt, Human
uguuauacaacuucugucc

SEQ ID NO: 1073838 - RNA, 25 nt, Human
uuacuaaauggauucuuuucagugu

SEQ ID NO: 1073839 - RNA, 23 nt, Human
uuacuucuguuuuuuccaacuuu

SEQ ID NO: 1073840 - RNA, 19 nt, Human
uucuacgugaaaaagucac

SEQ ID NO: 1073841 - RNA, 20 nt, Human
uugcuuucucccuuuuuugc

SEQ ID NO: 1073842 - RNA, 25 nt, Human
uuuagugggaguucucacucucauu

SEQ ID NO: 1073843 - RNA, 23 nt, Human
uuuccuuuucuucuguucuaguu

SEQ ID NO: 1073844 - RNA, 18 nt, Human
uuuuaagggcugacaacu

SEQ ID NO: 1073845 - RNA, 21 nt, Human
uuuucagaaguuauggugcug

SEQ ID NO: 1073846 - RNA, 20 nt, Human
aaccuccaccuccugggcuc

SEQ ID NO: 1073847 - RNA, 24 nt, Human
aaggauucuccucccucagccucc

SEQ ID NO: 1073848 - RNA, 24 nt, Human
aaggcgcugagaucacagguguga

SEQ ID NO: 1073849 - RNA, 19 nt, Human
aaguagcugggaaugcagg

SEQ ID NO: 1073850 - RNA, 22 nt, Human
aagugcugccugcacagguugg

SEQ ID NO: 1073851 - RNA, 21 nt, Human
acaggugcccaccacuacacc

SEQ ID NO: 1073852 - RNA, 22 nt, Human
accauagggaaaugucuucuca

SEQ ID NO: 1073853 - RNA, 18 nt, Human
accauguuggccaggcug

SEQ ID NO: 1073854 - RNA, 23 nt, Human
accuaucagguacuggaggugaa

SEQ ID NO: 1073855 - RNA, 24 nt, Human
acucuguugcccaagcuggagugc

SEQ ID NO: 1073856 - RNA, 23 nt, Human
agacaggaaggaaaugaggggac

SEQ ID NO: 1073857 - RNA, 19 nt, Human
agaucacaggugugagcca

SEQ ID NO: 1073858 - RNA, 18 nt, Human
agcaggaagaagacauga

SEQ ID NO: 1073859 - RNA, 21 nt, Human
aggaaggcagguuugggcugg

SEQ ID NO: 1073860 - RNA, 26 nt, Human
aggcgcugagaucacaggugugagcc

SEQ ID NO: 1073861 - RNA, 24 nt, Human
aggugauccgccugccucggccuc

SEQ ID NO: 1073862 - RNA, 22 nt, Human
aguagcgaugggguuucaccau

SEQ ID NO: 1073863 - RNA, 18 nt, Human
aguaggugggauuacagg

SEQ ID NO: 1073864 - RNA, 18 nt, Human
agugcaguggcaugaucu

SEQ ID NO: 1073865 - RNA, 19 nt, Human
agugcaguggcaugaucuc

SEQ ID NO: 1073866 - RNA, 21 nt, Human
agugcaguggcaugaucucug

SEQ ID NO: 1073867 - RNA, 22 nt, Human
augggguuucaccauguuggcc

SEQ ID NO: 1073868 - RNA, 24 nt, Human
augggguuucaccauguuggccag

SEQ ID NO: 1073869 - RNA, 23 nt, Human
auguuggcuuucuguacaagacu

SEQ ID NO: 1073870 - RNA, 19 nt, Human
auuuggguggcauguuggc

SEQ ID NO: 1073871 - RNA, 24 nt, Human
caaaggauucuccucccucagccu

SEQ ID NO: 1073872 - RNA, 20 nt, Human
caaccuccaccuccugggcu

SEQ ID NO: 1073873 - RNA, 23 nt, Human
caaccuccaccuccugggcucaa

SEQ ID NO: 1073874 - RNA, 24 nt, Human
caaccuccaccuccugggcucaag

SEQ ID NO: 1073875 - RNA, 22 nt, Human
caagccccuccagaaaagcaag

SEQ ID NO: 1073876 - RNA, 24 nt, Human
caaggcgcugagaucacaggugug

SEQ ID NO: 1073877 - RNA, 22 nt, Human
caagugauucucgugucucagc

SEQ ID NO: 1073878 - RNA, 19 nt, Human
cacagaacucaagagacag

SEQ ID NO: 1073879 - RNA, 19 nt, Human
cacaggugugagccaccac

SEQ ID NO: 1073880 - RNA, 21 nt, Human
caccauguuggccaggcuggu

SEQ ID NO: 1073881 - RNA, 24 nt, Human
caccauguuggccaggcuggucuc

SEQ ID NO: 1073882 - RNA, 27 nt, Human
caccauguuggccaggcuggucucaaa

SEQ ID NO: 1073883 - RNA, 21 nt, Human
cacccaccuagacugcagagu

SEQ ID NO: 1073884 - RNA, 21 nt, Human
cacugcaaccuccaccuccug

SEQ ID NO: 1073885 - RNA, 23 nt, Human
cacugcaaccuccaccuccuggg

SEQ ID NO: 1073886 - RNA, 20 nt, Human
cacuggacauuucaagcccc

SEQ ID NO: 1073887 - RNA, 24 nt, Human
caggugcccaccacuacaccuggc

SEQ ID NO: 1073888 - RNA, 24 nt, Human
cauguuggccaggcuggucucaaa

SEQ ID NO: 1073889 - RNA, 24 nt, Human
ccaaggcgcugagaucacaggugu

SEQ ID NO: 1073890 - RNA, 24 nt, Human
ccaccuccugggcucaagugauuc

SEQ ID NO: 1073891 - RNA, 21 nt, Human
ccagggagcaacgugugccag

SEQ ID NO: 1073892 - RNA, 23 nt, Human
cccaagcuggagugcaguggcau

SEQ ID NO: 1073893 - RNA, 23 nt, Human
cccaaguagcugggaaugcaggu

SEQ ID NO: 1073894 - RNA, 21 nt, Human
cccagguucaaaggauucucc

SEQ ID NO: 1073895 - RNA, 23 nt, Human
cccgaguaggugggauuacaggu

SEQ ID NO: 1073896 - RNA, 18 nt, Human
ccgggccgaaagugcugc

SEQ ID NO: 1073897 - RNA, 22 nt, Human
ccuccaccuccugggcucaagu

SEQ ID NO: 1073898 - RNA, 24 nt, Human
ccucccagguucaaaggauucucc

SEQ ID NO: 1073899 - RNA, 21 nt, Human
ccuccugggcucaagugauuc

SEQ ID NO: 1073900 - RNA, 21 nt, Human
ccugaccuaaggugauccgcc

SEQ ID NO: 1073901 - RNA, 23 nt, Human
ccugaccuaaggugauccgccug

SEQ ID NO: 1073902 - RNA, 26 nt, Human
ccugcacagguugguggaugguccuu

SEQ ID NO: 1073903 - RNA, 21 nt, Human
ccugccucggccucccaaggc

SEQ ID NO: 1073904 - RNA, 24 nt, Human
ccugccucggccucccaaggcgcu

SEQ ID NO: 1073905 - RNA, 20 nt, Human
ccugggcucaagugauucuc

SEQ ID NO: 1073906 - RNA, 20 nt, Human
ccugggcucaagugauucuc

SEQ ID NO: 1073907 - RNA, 21 nt, Human
cgacagagaggggcagggcac

SEQ ID NO: 1073908 - RNA, 30 nt, Human; identical to SEQ ID NO: 675786

SEQ ID NO: 1073909 - RNA, 24 nt, Human
cgcugagaucacaggugugagcca

SEQ ID NO: 1073910 - RNA, 23 nt, Human
cuaaggugauccgccugccucgg

SEQ ID NO: 1073911 - RNA, 24 nt, Human
cuaauuuuuguauuuuuaguagcg

SEQ ID NO: 1073912 - RNA, 23 nt, Human
cucaagugauucucgugucucag

SEQ ID NO: 1073913 - RNA, 24 nt, Human
cucacugcaaccuccaccuccugg

SEQ ID NO: 1073914 - RNA, 27 nt, Human
cucacugcaaccuccaccuccugggcu

SEQ ID NO: 1073915 - RNA, 21 nt, Human
cucccaaggcgcugagaucac

SEQ ID NO: 1073916 - RNA, 23 nt, Human
cucccucagccucccaaguagcu

SEQ ID NO: 1073917 - RNA, 26 nt, Human
cuccugaccuaaggugauccgccugc

SEQ ID NO: 1073918 - RNA, 21 nt, Human
cuccugggcucaagugauucu

SEQ ID NO: 1073919 - RNA, 24 nt, Human
cugcaaccuccaccuccugggcuc

SEQ ID NO: 1073920 - RNA, 24 nt, Human
cuggggaacccaccucccagguuc

SEQ ID NO: 1073921 - RNA, 26 nt, Human
cuuacugugcugggaguacuugugga

SEQ ID NO: 1073922 - RNA, 19 nt, Human
cuuguggagugcgggcugu

SEQ ID NO: 1073923 - RNA, 20 nt, Human
cuuguggagugcgggcugug

SEQ ID NO: 1073924 - RNA, 20 nt, Human
cuuuuguauuuuuaguggag

SEQ ID NO: 1073925 - RNA, 18 nt, Human
gaaagcacaaaauacuug

SEQ ID NO: 1073926 - RNA, 19 nt, Human
gacacagaacucaagagac

SEQ ID NO: 1073927 - RNA, 24 nt, Human
gacaggggucccugccagggaugc

SEQ ID NO: 1073928 - RNA, 19 nt, Human
gacagugucaggcaaggac

SEQ ID NO: 1073929 - RNA, 24 nt, Human
gaccuaaggugauccgccugccuc

SEQ ID NO: 1073930 - RNA, 18 nt, Human
gagcaggaagaagacaug

SEQ ID NO: 1073931 - RNA, 22 nt, Human
gagcaggaagaagacaugaagc

SEQ ID NO: 1073932 - RNA, 18 nt, Human
gaucacaggugugagcca

SEQ ID NO: 1073933 - RNA, 21 nt, Human
gauucucgugucucagccucc

SEQ ID NO: 1073934 - RNA, 21 nt, Human
gcauuguaacacagggaaagc

SEQ ID NO: 1073935 - RNA, 24 nt, Human
gcccaagcuggagugcaguggcau

SEQ ID NO: 1073936 - RNA, 20 nt, Human
gccuguuccccaccacaucc

SEQ ID NO: 1073937 - RNA, 21 nt, Human
gcgcugagaucacagguguga

SEQ ID NO: 1073938 - RNA, 25 nt, Human
gcuggagugcaguggcaugaucucu

SEQ ID NO: 1073939 - RNA, 22 nt, Human
ggacaagauggcgguuuugcuc

SEQ ID NO: 1073940 - RNA, 19 nt, Human
gggcuaggaaggcagguuu

SEQ ID NO: 1073941 - RNA, 22 nt, Human
gggguuucaccauguuggccag

SEQ ID NO: 1073942 - RNA, 18 nt, Human
ggguuucaccauguuggc

SEQ ID NO: 1073943 - RNA, 19 nt, Human
gugauccgccugccucggc

SEQ ID NO: 1073944 - RNA, 24 nt, Human
gugauucucgugucucagccuccc

SEQ ID NO: 1073945 - RNA, 20 nt, Human
gugcugccugcacagguugg

SEQ ID NO: 1073946 - RNA, 21 nt, Human
gugugagccaccacgcugggc

SEQ ID NO: 1073947 - RNA, 22 nt, Human
uaacuuuuguauuuuuagugga

SEQ ID NO: 1073948 - RNA, 24 nt, Human
uaauuuuuguauuuuuaguagcga

SEQ ID NO: 1073949 - RNA, 24 nt, Human
uacucuguugcccaagcuggagug

SEQ ID NO: 1073950 - RNA, 22 nt, Human
uagcuacgacagagaggggcag

SEQ ID NO: 1073951 - RNA, 19 nt, Human
uagcugggaaugcaggugc

SEQ ID NO: 1073952 - RNA, 25 nt, Human
uaggaaggcagguuugggcuggaga

SEQ ID NO: 1073953 - RNA, 24 nt, Human
uaguagcgaugggguuucaccaug

SEQ ID NO: 1073954 - RNA, 20 nt, Human
uauguuccaaaggacugacg

SEQ ID NO: 1073955 - RNA, 23 nt, Human
ucacugcaaccuccaccuccugg

SEQ ID NO: 1073956 - RNA, 24 nt, Human
ucacugcaaccuccaccuccuggg

SEQ ID NO: 1073957 - RNA, 25 nt, Human
ucacugcaaccuccaccuccugggc

SEQ ID NO: 1073958 - RNA, 27 nt, Human
ucacugcaaccuccaccuccugggcuc

SEQ ID NO: 1073959 - RNA, 18 nt, Human
ucagccucccaaguagcu

SEQ ID NO: 1073960 - RNA, 20 nt, Human
ucagccucccaaguagcugg

SEQ ID NO: 1073961 - RNA, 19 nt, Human
uccaaaggacugacggacc

SEQ ID NO: 1073962 - RNA, 23 nt, Human
ucccaaggcgcugagaucacagg

SEQ ID NO: 1073963 - RNA, 23 nt, Human
ucccaaguagcugggaaugcagg

SEQ ID NO: 1073964 - RNA, 21 nt, Human
ucccagguucaaaggauucuc

SEQ ID NO: 1073965 - RNA, 23 nt, Human
ucccgaguaggugggauuacagg

SEQ ID NO: 1073966 - RNA, 24 nt, Human
ucccgaguaggugggauuacaggu

SEQ ID NO: 1073967 - RNA, 24 nt, Human
ucccucagccucccaaguagcugg

SEQ ID NO: 1073968 - RNA, 21 nt, Human
uccugggcucaagugauucuc

SEQ ID NO: 1073969 - RNA, 24 nt, Human
uccugggcucaagugauucucgug

SEQ ID NO: 1073970 - RNA, 22 nt, Human
ucuagacuccauccuccauccc

SEQ ID NO: 1073971 - RNA, 20 nt, Human
ucuccucccucagccuccca

SEQ ID NO: 1073972 - RNA, 24 nt, Human
ucuguugcccaagcuggagugcag

SEQ ID NO: 1073973 - RNA, 23 nt, Human
ucuuacucuguugcccaagcugg

SEQ ID NO: 1073974 - RNA, 24 nt, Human
ucuuacucuguugcccaagcugga

SEQ ID NO: 1073975 - RNA, 18 nt, Human
ugaccuaaggugauccgc

SEQ ID NO: 1073976 - RNA, 24 nt, Human
ugaccuaaggugauccgccugccu

SEQ ID NO: 1073977 - RNA, 18 nt, Human
ugacguuggacucauugg

SEQ ID NO: 1073978 - RNA, 22 nt, Human
ugagaucacaggugugagccac

SEQ ID NO: 1073979 - RNA, 24 nt, Human
ugagaucacaggugugagccacca

SEQ ID NO: 1073980 - RNA, 20 nt, Human
ugaguugaaggcugggacag

SEQ ID NO: 1073981 - RNA, 23 nt, Human
ugaucucugcucacugcaaccuc

SEQ ID NO: 1073982 - RNA, 18 nt, Human
ugcagaguggauuugggu

SEQ ID NO: 1073983 - RNA, 24 nt, Human
ugcccaagcuggagugcaguggca

SEQ ID NO: 1073984 - RNA, 19 nt, Human
ugcccugggcuuuaauuau

SEQ ID NO: 1073985 - RNA, 21 nt, Human
ugccucggccucccaaggcgc

SEQ ID NO: 1073986 - RNA, 24 nt, Human
ugccucggccucccaaggcgcuga

SEQ ID NO: 1073987 - RNA, 22 nt, Human
ugccugggaugagaguggagac

SEQ ID NO: 1073988 - RNA, 22 nt, Human
ugccugguuuggggaguguuca

SEQ ID NO: 1073989 - RNA, 18 nt, Human
ugcgcgccaccaugcccg

SEQ ID NO: 1073990 - RNA, 19 nt, Human
uggagugcaguggcaugau

SEQ ID NO: 1073991 - RNA, 22 nt, Human
uggagugcaguggcaugaucuc

SEQ ID NO: 1073992 - RNA, 23 nt, Human
uggagugcaguggcaugaucucu

SEQ ID NO: 1073993 - RNA, 24 nt, Human
uggagugcaguggcaugaucucug

SEQ ID NO: 1073994 - RNA, 23 nt, Human
uggauuuggguggcauguuggcu

SEQ ID NO: 1073995 - RNA, 24 nt, Human
uggccaggcuggucucaaacuccu

SEQ ID NO: 1073996 - RNA, 24 nt, Human
ugggaaugcaggugcgcgccacca

SEQ ID NO: 1073997 - RNA, 20 nt, Human
ugggaugagaguggagacgg

SEQ ID NO: 1073998 - RNA, 21 nt, Human
ugggauuacaggugcccacca

SEQ ID NO: 1073999 - RNA, 24 nt, Human
ugggauuacaggugcccaccacua

SEQ ID NO: 1074000 - RNA, 18 nt, Human
ugggcucaagugauucuc

SEQ ID NO: 1074001 - RNA, 24 nt, Human
ugggcucaagugauucucgugucu

SEQ ID NO: 1074002 - RNA, 20 nt, Human
ugggcuggagacuugggcuu

SEQ ID NO: 1074003 - RNA, 18 nt, Human
uggggaguguucauggga

SEQ ID NO: 1074004 - RNA, 24 nt, Human
ugggguuucaccauguuggccagg

SEQ ID NO: 1074005 - RNA, 26 nt, Human
uguaacacagggaaagcacaaaauac

SEQ ID NO: 1074006 - RNA, 21 nt, Human
uguauuuuuaguagcgauggg

SEQ ID NO: 1074007 - RNA, 18 nt, Human
ugucucagccucccgagu

SEQ ID NO: 1074008 - RNA, 20 nt, Human
ugucucagccucccgaguag

SEQ ID NO: 1074009 - RNA, 22 nt, Human
ugugacacagaacucaagagac

SEQ ID NO: 1074010 - RNA, 18 nt, Human
uuaguagcgaugggguuu

SEQ ID NO: 1074011 - RNA, 22 nt, Human
uuaguagcgaugggguuucacc

SEQ ID NO: 1074012 - RNA, 24 nt, Human
uuaguagcgaugggguuucaccau

SEQ ID NO: 1074013 - RNA, 18 nt, Human
uucuucuuguggccucug

SEQ ID NO: 1074014 - RNA, 20 nt, Human
uugagcaggaagaagacaug

SEQ ID NO: 1074015 - RNA, 18 nt, Human
uugcccaagcuggagugc

SEQ ID NO: 1074016 - RNA, 21 nt, Human
uugggacgcaucccagguaga

SEQ ID NO: 1074017 - RNA, 23 nt, Human
uuguauuuuuaguagcgaugggg

SEQ ID NO: 1074018 - RNA, 22 nt, Human
uuuaaagauggagucuuacucu

SEQ ID NO: 1074019 - RNA, 24 nt, Human
uuucaccauguuggccaggcuggu

SEQ ID NO: 1074020 - RNA, 24 nt, Human
uuuuuaguagcgaugggguuucac

SEQ ID NO: 1074021 - RNA, 21 nt, Human
uuuuucuucuuguggccucug

SEQ ID NO: 1074022 - RNA, 18 nt, Human
uuuuuguauuuuuaguag

SEQ ID NO: 1074023 - RNA, 23 nt, Human
uuuuuguauuuuuaguagcgaug

SEQ ID NO: 1074024 - RNA, 23 nt, Human
agucggcugcaucuuugggauga

SEQ ID NO: 1074025 - RNA, 23 nt, Human
aucaaaaagcucauccaccacaa

SEQ ID NO: 1074026 - RNA, 19 nt, Human
gaacucaguuucucucugu

SEQ ID NO: 1074027 - RNA, 20 nt, Human
uagcaaacagaauccagcag

SEQ ID NO: 1074028 - RNA, 20 nt, Human
ugcugcaggacacucagcag

SEQ ID NO: 1074029 - RNA, 18 nt, Human
aaaaaaaugauacaguga

SEQ ID NO: 1074030 - RNA, 22 nt, Human
aaaagacuuugcaguucaagga

SEQ ID NO: 1074031 - RNA, 23 nt, Human
aaaugcuugaagaccacaaggcu

SEQ ID NO: 1074032 - RNA, 21 nt, Human
aagcaggaggauugagccaag

SEQ ID NO: 1074033 - RNA, 22 nt, Human
aagcaggaggauugagccaaga

SEQ ID NO: 1074034 - RNA, 21 nt, Human
aaggagcucccaggucugggc

SEQ ID NO: 1074035 - RNA, 22 nt, Human
aaggauagcuguaaagucaagg

SEQ ID NO: 1074036 - RNA, 20 nt, Human
acaaaauaagaaauaaaagc

SEQ ID NO: 1074037 - RNA, 20 nt, Human
acuaugcuacccagaacuaa

SEQ ID NO: 1074038 - RNA, 22 nt, Human
agacaaaauaagaaauaaaagc

SEQ ID NO: 1074039 - RNA, 20 nt, Human
agacuugaugaauaaacacu

SEQ ID NO: 1074040 - RNA, 20 nt, Human
agcagcuuccaacaguggca

SEQ ID NO: 1074041 - RNA, 18 nt, Human
agggccccaaagagggag

SEQ ID NO: 1074042 - RNA, 26 nt, Human
auagaauaccaagauuaaacuuaaag

SEQ ID NO: 1074043 - RNA, 21 nt, Human
caagugcugaaggacuucaga

SEQ ID NO: 1074044 - RNA, 24 nt, Human
cacaguaaggauguccuuuccaca

SEQ ID NO: 1074045 - RNA, 19 nt, Human
cacuaugcuacccagaacu

SEQ ID NO: 1074046 - RNA, 19 nt, Human
cacuggcgaaugcagugac

SEQ ID NO: 1074047 - RNA, 21 nt, Human
cagcagagaggagguucugga

SEQ ID NO: 1074048 - RNA, 24 nt, Human
cagcagagaggagguucuggaaug

SEQ ID NO: 1074049 - RNA, 23 nt, Human
cauaugauucccaauagaauacc

SEQ ID NO: 1074050 - RNA, 22 nt, Human
cccauugaguguucagcuuuca

SEQ ID NO: 1074051 - RNA, 20 nt, Human
cccgggcucaaggagcuccc

SEQ ID NO: 1074052 - RNA, 22 nt, Human
ccgggcucaaggagcucccagg

SEQ ID NO: 1074053 - RNA, 24 nt, Human
ccucucugcaaacaggucuuccca

SEQ ID NO: 1074054 - RNA, 23 nt, Human
ccuggaguggcuggcuccucucu

SEQ ID NO: 1074055 - RNA, 21 nt, Human
cgaaugcagugacgccaacca

SEQ ID NO: 1074056 - RNA, 21 nt, Human
cucucugcaaacaggucuucc

SEQ ID NO: 1074057 - RNA, 20 nt, Human
cuggcuccucucugcaaaca

SEQ ID NO: 1074058 - RNA, 22 nt, Human
cuggcuccucucugcaaacagg

SEQ ID NO: 1074059 - RNA, 20 nt, Human
cugugcagcuccucagcucc

SEQ ID NO: 1074060 - RNA, 21 nt, Human
cuuccaaucuagcugagucug

SEQ ID NO: 1074061 - RNA, 20 nt, Human
cuuugcuggaguccuguucu

SEQ ID NO: 1074062 - RNA, 21 nt, Human
gaaaugcuugaagaccacaag

SEQ ID NO: 1074063 - RNA, 20 nt, Human
gagcucccaggucugggcuu

SEQ ID NO: 1074064 - RNA, 25 nt, Human
ggaaagaauacucucugcucaugga

SEQ ID NO: 1074065 - RNA, 23 nt, Human
gggcauguugcagcccuguuugu

SEQ ID NO: 1074066 - RNA, 19 nt, Human
ggucugggcuucuccgagg

SEQ ID NO: 1074067 - RNA, 22 nt, Human
guuucccacuguacugauuagg

SEQ ID NO: 1074068 - RNA, 22 nt, Human
uaaaagacugacuucaccagaa

SEQ ID NO: 1074069 - RNA, 24 nt, Human
uaaacuaagaacuggaaaagacuu

SEQ ID NO: 1074070 - RNA, 21 nt, Human
uaaagcaggaggauugagcca

SEQ ID NO: 1074071 - RNA, 19 nt, Human
uaaggacuguggggaaaga

SEQ ID NO: 1074072 - RNA, 23 nt, Human
uagaaaaacacauuuauuggaga

SEQ ID NO: 1074073 - RNA, 23 nt, Human
uaugcuacccagaacuaagggaa

SEQ ID NO: 1074074 - RNA, 19 nt, Human
ucaaggagcucccaggucu

SEQ ID NO: 1074075 - RNA, 22 nt, Human
ucaaugucuuucccuguuuccu

SEQ ID NO: 1074076 - RNA, 24 nt, Human
ucagaauacaaaaaaaugauacag

SEQ ID NO: 1074077 - RNA, 18 nt, Human
uccacagcaagggugucc

SEQ ID NO: 1074078 - RNA, 23 nt, Human
uccacaguaaggauguccuuucc

SEQ ID NO: 1074079 - RNA, 19 nt, Human
ucccaggucugggcuucuc

SEQ ID NO: 1074080 - RNA, 18 nt, Human
ucccauccucucuuccaa

SEQ ID NO: 1074081 - RNA, 18 nt, Human
uccucagcuccugcaguu

SEQ ID NO: 1074082 - RNA, 18 nt, Human
uccuuuccacagcaaggg

SEQ ID NO: 1074083 - RNA, 19 nt, Human
ucucagagcuccacagaag

SEQ ID NO: 1074084 - RNA, 19 nt, Human
ucuccgagggccagagcuc

SEQ ID NO: 1074085 - RNA, 19 nt, Human
ucuuucuucuggaacuuug

SEQ ID NO: 1074086 - RNA, 24 nt, Human
ugaaguaggaaagguuaaagcagg

SEQ ID NO: 1074087 - RNA, 21 nt, Human
ugagcugaaaauaaugaaggg

SEQ ID NO: 1074088 - RNA, 20 nt, Human
uggagacccaaaucugucuu

SEQ ID NO: 1074089 - RNA, 21 nt, Human
uggcuccucucugcaaacagg

SEQ ID NO: 1074090 - RNA, 24 nt, Human
uggcuccucucugcaaacaggucu

SEQ ID NO: 1074091 - RNA, 21 nt, Human
ugggaauacccuaugaaaaac

SEQ ID NO: 1074092 - RNA, 21 nt, Human
ugggacuugaccugaauuggg

SEQ ID NO: 1074093 - RNA, 19 nt, Human
ugggcacuaugcuacccag

SEQ ID NO: 1074094 - RNA, 20 nt, Human
ugggguuucagauucaauaa

SEQ ID NO: 1074095 - RNA, 21 nt, Human
uguucagcuucuagcagaacg

SEQ ID NO: 1074096 - RNA, 25 nt, Human
uguuuccuguucauucaauaaauau

SEQ ID NO: 1074097 - RNA, 22 nt, Human
uuaaaggauagcuguaaaguca

SEQ ID NO: 1074098 - RNA, 23 nt, Human
uucagaauacaaaaaaaugauac

SEQ ID NO: 1074099 - RNA, 19 nt, Human
uugcuggaguccuguucuc

SEQ ID NO: 1074100 - RNA, 21 nt, Human
uuggaaaugcuugaagaccac

SEQ ID NO: 1074101 - RNA, 21 nt, Human
uuuccacaguaaggauguccu

SEQ ID NO: 1074102 - RNA, 24 nt, Human
uuucccacuguacugauuagguuu

SEQ ID NO: 1074103 - RNA, 21 nt, Human
aaacaaagcagaugccaaccc

SEQ ID NO: 1074104 - RNA, 21 nt, Human
caaagcagaugccaaccccug

SEQ ID NO: 1074105 - RNA, 19 nt, Human
cuagcauauuuuaacaaac

SEQ ID NO: 1074106 - RNA, 21 nt, Human
uuuuauagaugacuagcauau

SEQ ID NO: 1074107 - RNA, 22 nt, Human
aaaauacugaaacuacuuugcu

SEQ ID NO: 1074108 - RNA, 26 nt, Human
aaacagaaagcgaagcggagggaccc

SEQ ID NO: 1074109 - RNA, 20 nt, Human
aaacagaaagcgaagcggau

SEQ ID NO: 1074110 - RNA, 21 nt, Human
aaagaagucaaaacaaaugca

SEQ ID NO: 1074111 - RNA, 19 nt, Human
aaauaaccaaggaguagag

SEQ ID NO: 1074112 - RNA, 26 nt, Human
aacaacagaaaaacauaugggaaaaa

SEQ ID NO: 1074113 - RNA, 19 nt, Human
acaacagaaaaacauaugg

SEQ ID NO: 1074114 - RNA, 19 nt, Human
acaacagaaaaacauaugg

SEQ ID NO: 1074115 - RNA, 22 nt, Human
acagaaaacauauaguucuuaa

SEQ ID NO: 1074116 - RNA, 22 nt, Human
agaaggagggaaacagagaggc

SEQ ID NO: 1074117 - RNA, 22 nt, Human
agacagaaaacauauaguucuu

SEQ ID NO: 1074118 - RNA, 25 nt, Human
agacagaaaacauauaguucuuaau

SEQ ID NO: 1074119 - RNA, 21 nt, Human
agaggcuguuuggaauugcag

SEQ ID NO: 1074120 - RNA, 21 nt, Human
agaucagaaucauaaaucuac

SEQ ID NO: 1074121 - RNA, 22 nt, Human
agcagaaaagugauaaacagaa

SEQ ID NO: 1074122 - RNA, 22 nt, Human
agccuaaaaauaaccaaggagu

SEQ ID NO: 1074123 - RNA, 19 nt, Human
aguacugaggugauuacuc

SEQ ID NO: 1074124 - RNA, 22 nt, Human
aguugauuuuuagcaaguacag

SEQ ID NO: 1074125 - RNA, 22 nt, Human
auaaaucuacuaacuccauauu

SEQ ID NO: 1074126 - RNA, 24 nt, Human
aucauuagggcaauuaagaacagu

SEQ ID NO: 1074127 - RNA, 18 nt, Human
auuaccccaaaagaaccc

SEQ ID NO: 1074128 - RNA, 20 nt, Human
cagaccaccguagaucauua

SEQ ID NO: 1074129 - RNA, 21 nt, Human
cagcagaaaagugauaaacag

SEQ ID NO: 1074130 - RNA, 23 nt, Human
cauaugggaaaaaaaaaagccuu

SEQ ID NO: 1074131 - RNA, 21 nt, Human
caugauggcuuaugcugacuu

SEQ ID NO: 1074132 - RNA, 20 nt, Human
caugcuaccaaucugacuca

SEQ ID NO: 1074133 - RNA, 24 nt, Human
ccaaaagaacccauggcuauuaaa

SEQ ID NO: 1074134 - RNA, 20 nt, Human
ccaagaaggagggaaacaga

SEQ ID NO: 1074135 - RNA, 22 nt, Human
ccaccuacuucccaugaacacc

SEQ ID NO: 1074136 - RNA, 18 nt, Human
cccaugaccacuuccuag

SEQ ID NO: 1074137 - RNA, 21 nt, Human
cccauggcuauuaaagcugcc

SEQ ID NO: 1074138 - RNA, 22 nt, Human
ccugccgaaggaaagaaauaag

SEQ ID NO: 1074139 - RNA, 22 nt, Human
cgucaugcuaccaaucugacuc

SEQ ID NO: 1074140 - RNA, 22 nt, Human
cuacuaacuccauauucauuug

SEQ ID NO: 1074141 - RNA, 19 nt, Human
cugaaacuacuuugcugua

SEQ ID NO: 1074142 - RNA, 23 nt, Human
cuuauaaagugugcaacacaggg

SEQ ID NO: 1074143 - RNA, 19 nt, Human
cuuccuagauuacucuuug

SEQ ID NO: 1074144 - RNA, 24 nt, Human
gaaaccccuccacgcaaaucaccu

SEQ ID NO: 1074145 - RNA, 23 nt, Human
gaaaccccuccacgcaaaucacu

SEQ ID NO: 1074146 - RNA, 18 nt, Human
gcacaguugauuuuuagc

SEQ ID NO: 1074147 - RNA, 23 nt, Human
gccuucacugauccaccuacuuc

SEQ ID NO: 1074148 - RNA, 25 nt, Human
ggaaaauacugaaacuacuuugcug

SEQ ID NO: 1074149 - RNA, 25 nt, Human
uaaaaauaaccaaggaguagagcca

SEQ ID NO: 1074150 - RNA, 20 nt, Human
uaagccuaaaaauaaccaag

SEQ ID NO: 1074151 - RNA, 20 nt, Human
uaauaugcugaagaaugaag

SEQ ID NO: 1074152 - RNA, 21 nt, Human
uaccccaaaagaacccauggc

SEQ ID NO: 1074153 - RNA, 26 nt, Human
uagaacacaauguuuagaacaaccgc

SEQ ID NO: 1074154 - RNA, 19 nt, Human
uagaucagaaucauaaauc

SEQ ID NO: 1074155 - RNA, 19 nt, Human
uagcccaugaccacuuccu

SEQ ID NO: 1074156 - RNA, 24 nt, Human
uaucucaucccuauuacucuucca

SEQ ID NO: 1074157 - RNA, 20 nt, Human
ucagcagaaaagugauaaac

SEQ ID NO: 1074158 - RNA, 21 nt, Human
ucaugcuaccaaucugacuca

SEQ ID NO: 1074159 - RNA, 23 nt, Human
ucccaugaacaccugccgaagga

SEQ ID NO: 1074160 - RNA, 20 nt, Human
ucuaaacauaauuugugggg

SEQ ID NO: 1074161 - RNA, 22 nt, Human
ucuuaauucuaaaaaggccauu

SEQ ID NO: 1074162 - RNA, 21 nt, Human
ucuuuguggcuucuuuuuauu

SEQ ID NO: 1074163 - RNA, 21 nt, Human
ugaaagaggcaugaauggaug

SEQ ID NO: 1074164 - RNA, 21 nt, Human
ugaacuguuaaaaccuuacgu

SEQ ID NO: 1074165 - RNA, 20 nt, Human
ugaagaaagcccacaugaug

SEQ ID NO: 1074166 - RNA, 26 nt, Human
ugccaugaggaucuucugaacuguua

SEQ ID NO: 1074167 - RNA, 25 nt, Human
uggauguaaacucuauucacagacc

SEQ ID NO: 1074168 - RNA, 24 nt, Human
uggcaucaaaaauguuaauuugua

SEQ ID NO: 1074169 - RNA, 21 nt, Human
uggcugaaaaaccgacugcau

SEQ ID NO: 1074170 - RNA, 23 nt, Human
uguacauuaccccaaaagaaccc

SEQ ID NO: 1074171 - RNA, 23 nt, Human
uguggggggcaggcaugaaaccc

SEQ ID NO: 1074172 - RNA, 22 nt, Human
uguguacauuaccccaaaagaa

SEQ ID NO: 1074173 - RNA, 23 nt, Human
uguguacauuaccccaaaagaac

SEQ ID NO: 1074174 - RNA, 19 nt, Human
aaagugcuaggauuacagg

SEQ ID NO: 1074175 - RNA, 24 nt, Human
aaagugcuaggauuacagguguga

SEQ ID NO: 1074176 - RNA, 21 nt, Human
aaaugagccccuucugcuccu

SEQ ID NO: 1074177 - RNA, 20 nt, Human
aacauuugcugaaugaauau

SEQ ID NO: 1074178 - RNA, 24 nt, Human
aaccucaagugaucugcccaccuc

SEQ ID NO: 1074179 - RNA, 20 nt, Human
aagaccucaaucccuggggc

SEQ ID NO: 1074180 - RNA, 24 nt, Human
aagcaaucuggucugcugacccua

SEQ ID NO: 1074181 - RNA, 26 nt, Human
aagugcuaggauuacaggugugagcc

SEQ ID NO: 1074182 - RNA, 22 nt, Human
acaaccuccgccucccacguuc

SEQ ID NO: 1074183 - RNA, 21 nt, Human
acagagaccagcccuggccca

SEQ ID NO: 1074184 - RNA, 19 nt, Human
accaggaacaggaccgucc

SEQ ID NO: 1074185 - RNA, 18 nt, Human
accauguuggccaggcug

SEQ ID NO: 1074186 - RNA, 23 nt, Human
accucagccucccaaagugcuag

SEQ ID NO: 1074187 - RNA, 25 nt, Human
agaaagaccauaaacaccuuucccg

SEQ ID NO: 1074188 - RNA, 18 nt, Human
agagaccagcccuggccc

SEQ ID NO: 1074189 - RNA, 23 nt, Human
aggguaggggugggagagcaggg

SEQ ID NO: 1074190 - RNA, 19 nt, Human
agggucaggguaggggugg

SEQ ID NO: 1074191 - RNA, 23 nt, Human
aguaggugggacuauaggugugu

SEQ ID NO: 1074192 - RNA, 24 nt, Human
agugauuauccugccucagccucc

SEQ ID NO: 1074193 - RNA, 18 nt, Human
augggguuucaccauguu

SEQ ID NO: 1074194 - RNA, 22 nt, Human
augggguuucaccauguuggcc

SEQ ID NO: 1074195 - RNA, 24 nt, Human
augggguuucaccauguuggccag

SEQ ID NO: 1074196 - RNA, 19 nt, Human
auguccaagaaaugggagg

SEQ ID NO: 1074197 - RNA, 22 nt, Human
auuguuggcccgugggucugag

SEQ ID NO: 1074198 - RNA, 21 nt, Human
caaaaaugagccccuucugcu

SEQ ID NO: 1074199 - RNA, 24 nt, Human
caaagugcuaggauuacaggugug

SEQ ID NO: 1074200 - RNA, 24 nt, Human
caacaugcccggcuaauuuuugua

SEQ ID NO: 1074201 - RNA, 20 nt, Human
caaccagaccucucgucuua

SEQ ID NO: 1074202 - RNA, 22 nt, Human
caagugauuauccugccucagc

SEQ ID NO: 1074203 - RNA, 22 nt, Human
caccauguuggccaggcuggac

SEQ ID NO: 1074204 - RNA, 24 nt, Human
caccauguuggccaggcuggacuc

SEQ ID NO: 1074205 - RNA, 21 nt, Human
cacuacaaccuccgccuccca

SEQ ID NO: 1074206 - RNA, 19 nt, Human
cacugguggcuaacaaggu

SEQ ID NO: 1074207 - RNA, 18 nt, Human
caggaacaggaccguccu

SEQ ID NO: 1074208 - RNA, 21 nt, Human
caggaacaggaccguccugcu

SEQ ID NO: 1074209 - RNA, 20 nt, Human
cagguccaguguucucugcc

SEQ ID NO: 1074210 - RNA, 18 nt, Human
caguccuuuccugaggcc

SEQ ID NO: 1074211 - RNA, 21 nt, Human
cauacaccucugaauccuuac

SEQ ID NO: 1074212 - RNA, 25 nt, Human
cauguccacuccccucacuugggag

SEQ ID NO: 1074213 - RNA, 24 nt, Human
cauucugucacucgggcuggagug

SEQ ID NO: 1074214 - RNA, 19 nt, Human
cauuucuuggugaaagugc

SEQ ID NO: 1074215 - RNA, 21 nt, Human
ccaaagugcuaggauuacagg

SEQ ID NO: 1074216 - RNA, 24 nt, Human
ccaaagugcuaggauuacaggugu

SEQ ID NO: 1074217 - RNA, 23 nt, Human
ccacuagauugugaccuccacaa

SEQ ID NO: 1074218 - RNA, 20 nt, Human
ccacuguguucagcccacuu

SEQ ID NO: 1074219 - RNA, 23 nt, Human
ccagaccucucgucuuacauaac

SEQ ID NO: 1074220 - RNA, 26 nt, Human
cccagauaagcuugagccuguagagg

SEQ ID NO: 1074221 - RNA, 23 nt, Human
ccccgucuaccaguccuuuccug

SEQ ID NO: 1074222 - RNA, 20 nt, Human
ccgguaggaaugggccugcu

SEQ ID NO: 1074223 - RNA, 24 nt, Human
ccucauucugucacucgggcugga

SEQ ID NO: 1074224 - RNA, 18 nt, Human
ccucgccaugggucccca

SEQ ID NO: 1074225 - RNA, 24 nt, Human
ccugaguaggugggacuauaggug

SEQ ID NO: 1074226 - RNA, 18 nt, Human
ccuggcccagugaacccg

SEQ ID NO: 1074227 - RNA, 18 nt, Human
ccuuuccugaggccugga

SEQ ID NO: 1074228 - RNA, 19 nt, Human
cgccauggguccccacagc

SEQ ID NO: 1074229 - RNA, 27 nt, Human
cgccauggguccccacagccuuggugc

SEQ ID NO: 1074230 - RNA, 22 nt, Human
cggaagaaagaccauaaacacc

SEQ ID NO: 1074231 - RNA, 24 nt, Human
cuacaaccuccgccucccacguuc

SEQ ID NO: 1074232 - RNA, 24 nt, Human
cucaagugaucugcccaccucagc

SEQ ID NO: 1074233 - RNA, 24 nt, Human
cucauucugucacucgggcuggag

SEQ ID NO: 1074234 - RNA, 22 nt, Human
cuccgguaggaaugggccugcu

SEQ ID NO: 1074235 - RNA, 23 nt, Human
cucgucuuacauaacaagcaauc

SEQ ID NO: 1074236 - RNA, 20 nt, Human
cugauccucuccacguccau

SEQ ID NO: 1074237 - RNA, 21 nt, Human
cugccucagccuccugaguag

SEQ ID NO: 1074238 - RNA, 23 nt, Human
cugcucugcugucuguggagcag

SEQ ID NO: 1074239 - RNA, 24 nt, Human
cugcugucuguggagcaggucugg

SEQ ID NO: 1074240 - RNA, 19 nt, Human
cugugugugagccaggugg

SEQ ID NO: 1074241 - RNA, 20 nt, Human
gaagaaagaccauaaacacc

SEQ ID NO: 1074242 - RNA, 18 nt, Human
gaauccucuuccuucauu

SEQ ID NO: 1074243 - RNA, 19 nt, Human
gagaccagcccuggcccag

SEQ ID NO: 1074244 - RNA, 20 nt, Human
gagaugggguuucaccaugu

SEQ ID NO: 1074245 - RNA, 24 nt, Human
gagaugggguuucaccauguuggc

SEQ ID NO: 1074246 - RNA, 23 nt, Human
gaggcaccuccuugagaagucuu

SEQ ID NO: 1074247 - RNA, 18 nt, Human
gauuacaggugugagcca

SEQ ID NO: 1074248 - RNA, 21 nt, Human
gauuacaggugugagccacug

SEQ ID NO: 1074249 - RNA, 24 nt, Human
gauuacaggugugagccacugugu

SEQ ID NO: 1074250 - RNA, 18 nt, Human
gccacuguguucagccca

SEQ ID NO: 1074251 - RNA, 22 nt, Human
ggaacagagaccagcccuggcc

SEQ ID NO: 1074252 - RNA, 22 nt, Human
ggauuacaggugugagccacug

SEQ ID NO: 1074253 - RNA, 20 nt, Human
ggcacauucagaaauuuugu

SEQ ID NO: 1074254 - RNA, 18 nt, Human
gggcuggggaacagagac

SEQ ID NO: 1074255 - RNA, 22 nt, Human
gggguuucaccauguuggccag

SEQ ID NO: 1074256 - RNA, 19 nt, Human
gggucaggguagggguggg

SEQ ID NO: 1074257 - RNA, 18 nt, Human
ggguuucaccauguuggc

SEQ ID NO: 1074258 - RNA, 22 nt, Human
ggguuucaccauguuggccagg

SEQ ID NO: 1074259 - RNA, 19 nt, Human
guagagaugggguuucacc

SEQ ID NO: 1074260 - RNA, 21 nt, Human
guagagaugggguuucaccau

SEQ ID NO: 1074261 - RNA, 22 nt, Human
guagagaugggguuucaccaug

SEQ ID NO: 1074262 - RNA, 19 nt, Human
guaggagcguuugguauaa

SEQ ID NO: 1074263 - RNA, 23 nt, Human
guccauuguuggcccgugggucu

SEQ ID NO: 1074264 - RNA, 25 nt, Human
guccuuuccugaggccuggaguucu

SEQ ID NO: 1074265 - RNA, 20 nt, Human
gugaaugggucaaaaaugag

SEQ ID NO: 1074266 - RNA, 24 nt, Human
gugaucugcccaccucagccuccc

SEQ ID NO: 1074267 - RNA, 24 nt, Human
gugauuauccugccucagccuccu

SEQ ID NO: 1074268 - RNA, 21 nt, Human
uaacacagaccgaggcagcaa

SEQ ID NO: 1074269 - RNA, 18 nt, Human
uaaccucaagugaucugc

SEQ ID NO: 1074270 - RNA, 24 nt, Human
uaauuuuuguacuuuuuguagaga

SEQ ID NO: 1074271 - RNA, 18 nt, Human
uacaggugugagccacug

SEQ ID NO: 1074272 - RNA, 22 nt, Human
uacaggugugagccacuguguu

SEQ ID NO: 1074273 - RNA, 22 nt, Human
uagagaugggguuucaccaugu

SEQ ID NO: 1074274 - RNA, 18 nt, Human
uagccgccaugaguccuu

SEQ ID NO: 1074275 - RNA, 21 nt, Human
uaggauuacaggugugagcca

SEQ ID NO: 1074276 - RNA, 22 nt, Human
uaggauuacaggugugagccac

SEQ ID NO: 1074277 - RNA, 22 nt, Human
uaggauuacaggugugagccac

SEQ ID NO: 1074278 - RNA, 22 nt, Human
uaggauuacaggugugagccac

SEQ ID NO: 1074279 - RNA, 24 nt, Human
uaggauuacaggugugagccacug

SEQ ID NO: 1074280 - RNA, 23 nt, Human
uaggcucaaaaaacauuugcuga

SEQ ID NO: 1074281 - RNA, 23 nt, Human
uagggccucucacccaugugcuu

SEQ ID NO: 1074282 - RNA, 20 nt, Human
uauagaacuugaagacugau

SEQ ID NO: 1074283 - RNA, 19 nt, Human
uauagaacuugaagacugc

SEQ ID NO: 1074284 - RNA, 24 nt, Human
uauggucaaugucugguguguacc

SEQ ID NO: 1074285 - RNA, 18 nt, Human
ucacuacaaccuccgccu

SEQ ID NO: 1074286 - RNA, 19 nt, Human
ucacuacaaccuccgccuc

SEQ ID NO: 1074287 - RNA, 22 nt, Human
ucacuacaaccuccgccuccca

SEQ ID NO: 1074288 - RNA, 24 nt, Human
ucacuacaaccuccgccucccacg

SEQ ID NO: 1074289 - RNA, 26 nt, Human
ucacuacaaccuccgccucccacguu

SEQ ID NO: 1074290 - RNA, 22 nt, Human
ucacucgggcuggagugcaauu

SEQ ID NO: 1074291 - RNA, 18 nt, Human
ucagccucccaaagugcu

SEQ ID NO: 1074292 - RNA, 22 nt, Human
ucauucugucacucgggcugga

SEQ ID NO: 1074293 - RNA, 24 nt, Human
ucauucugucacucgggcuggagu

SEQ ID NO: 1074294 - RNA, 21 nt, Human
uccaagaccucaaucccuggg

SEQ ID NO: 1074295 - RNA, 22 nt, Human
uccaugccauaguuuucagaag

SEQ ID NO: 1074296 - RNA, 23 nt, Human
ucccaaagugcuaggauuacagg

SEQ ID NO: 1074297 - RNA, 23 nt, Human
ucccugacacauucuuuaguuau

SEQ ID NO: 1074298 - RNA, 21 nt, Human
ucccuggggcuagugaauggg

SEQ ID NO: 1074299 - RNA, 21 nt, Human
uccgguaggaaugggccugcu

SEQ ID NO: 1074300 - RNA, 24 nt, Human
uccugaguaggugggacuauaggu

SEQ ID NO: 1074301 - RNA, 23 nt, Human
ucuccuuggcagcacugggcaca

SEQ ID NO: 1074302 - RNA, 21 nt, Human
ucugcccaccucagccuccca

SEQ ID NO: 1074303 - RNA, 24 nt, Human
ucugucacucgggcuggagugcaa

SEQ ID NO: 1074304 - RNA, 18 nt, Human
ugagauggucagaccuca

SEQ ID NO: 1074305 - RNA, 20 nt, Human
ugaguaggugggacuauagg

SEQ ID NO: 1074306 - RNA, 24 nt, Human
ugaucugcccaccucagccuccca

SEQ ID NO: 1074307 - RNA, 23 nt, Human
ugcccggcuaauuuuuguacuuu

SEQ ID NO: 1074308 - RNA, 24 nt, Human
ugccucagccuccugaguaggugg

SEQ ID NO: 1074309 - RNA, 24 nt, Human
ugcuaggauuacaggugugagcca

SEQ ID NO: 1074310 - RNA, 18 nt, Human
ugcugaaugaauauagaa

SEQ ID NO: 1074311 - RNA, 18 nt, Human
ugcuugagauggucagac

SEQ ID NO: 1074312 - RNA, 24 nt, Human
uggaagggaucuggugcccuggua

SEQ ID NO: 1074313 - RNA, 21 nt, Human
uggauggagggcaccuggaug

SEQ ID NO: 1074314 - RNA, 24 nt, Human
uggccaggcuggacucuaacuucu

SEQ ID NO: 1074315 - RNA, 21 nt, Human
ugggacuauaggugugugcca

SEQ ID NO: 1074316 - RNA, 22 nt, Human
ugggcuggggaacagagaccag

SEQ ID NO: 1074317 - RNA, 24 nt, Human
ugggguuucaccauguuggccagg

SEQ ID NO: 1074318 - RNA, 21 nt, Human
uggucagaccucaugaacucu

SEQ ID NO: 1074319 - RNA, 24 nt, Human
uguagagaugggguuucaccaugu

SEQ ID NO: 1074320 - RNA, 21 nt, Human
ugucuguggagcaggucuggg

SEQ ID NO: 1074321 - RNA, 23 nt, Human
ugugccauccuggcucacuacaa

SEQ ID NO: 1074322 - RNA, 20 nt, Human
ugugugagccaggugggcug

SEQ ID NO: 1074323 - RNA, 22 nt, Human
ugugugugagccaggugggcug

SEQ ID NO: 1074324 - RNA, 21 nt, Human
uucaagugauuauccugccuc

SEQ ID NO: 1074325 - RNA, 23 nt, Human
uucaagugauuauccugccucag

SEQ ID NO: 1074326 - RNA, 23 nt, Human
uucauacaccucugaauccuuac

SEQ ID NO: 1074327 - RNA, 23 nt, Human
uucccugacacauucuuuaguua

SEQ ID NO: 1074328 - RNA, 24 nt, Human
uuguagagaugggguuucaccaug

SEQ ID NO: 1074329 - RNA, 21 nt, Human
uuucaccauguuggccaggcu

SEQ ID NO: 1074330 - RNA, 24 nt, Human
uuuguagagaugggguuucaccau

SEQ ID NO: 1074331 - RNA, 23 nt, Human
uuuuuguagagaugggguuucac

SEQ ID NO: 1074332 - RNA, 20 nt, Human
aaaacccucacuggauguac

SEQ ID NO: 1074333 - RNA, 21 nt, Human
aaacacaucacagguaagaaa

SEQ ID NO: 1074334 - RNA, 25 nt, Human
accagcuccaaaauguuuucgugcu

SEQ ID NO: 1074335 - RNA, 20 nt, Human
aggugaguguccggaggugc

SEQ ID NO: 1074336 - RNA, 20 nt, Human
aguauggugagcuauuuccu

SEQ ID NO: 1074337 - RNA, 20 nt, Human
aucaaguacugcuggucagg

SEQ ID NO: 1074338 - RNA, 23 nt, Human
caaauaccaaagguggcagugug

SEQ ID NO: 1074339 - RNA, 22 nt, Human
cacaaucuauggaagggaaacc

SEQ ID NO: 1074340 - RNA, 26 nt, Human
caccagcuccaaaauguuuucgugcu

SEQ ID NO: 1074341 - RNA, 24 nt, Human
cagguaagaaaugggaaaccuacc

SEQ ID NO: 1074342 - RNA, 23 nt, Human
cggcccacaaggcucugcucauc

SEQ ID NO: 1074343 - RNA, 20 nt, Human
cucaucagcaaaaucuucug

SEQ ID NO: 1074344 - RNA, 21 nt, Human
gaguauggugagcuauuuccu

SEQ ID NO: 1074345 - RNA, 19 nt, Human
gcgcagcagaugaaugaag

SEQ ID NO: 1074346 - RNA, 23 nt, Human
gguaagaaaugggaaaccuaccu

SEQ ID NO: 1074347 - RNA, 20 nt, Human
ggugcuggguaaaacacauc

SEQ ID NO: 1074348 - RNA, 21 nt, Human
guaaaacacaucacagguaaa

SEQ ID NO: 1074349 - RNA, 22 nt, Human
gugcuggguaaaacacaucaca

SEQ ID NO: 1074350 - RNA, 19 nt, Human
guguccggaggugcugggu

SEQ ID NO: 1074351 - RNA, 18 nt, Human
ucaaaaucaaguacugcu

SEQ ID NO: 1074352 - RNA, 22 nt, Human
uccgcugauuuccaccagcucc

SEQ ID NO: 1074353 - RNA, 22 nt, Human
ucuggaucagggucuucuacag

SEQ ID NO: 1074354 - RNA, 27 nt, Human
ugaaugaagcggcccacaaggcucugc

SEQ ID NO: 1074355 - RNA, 21 nt, Human
uggguaaaacacaucacaggu

SEQ ID NO: 1074356 - RNA, 23 nt, Human
ugguaagcugcaaauaccaaagg

SEQ ID NO: 1074357 - RNA, 19 nt, Human
uguccggaggugcugggua

SEQ ID NO: 1074358 - RNA, 21 nt, Human
uguucaaaaucaaguacugcu

SEQ ID NO: 1074359 - RNA, 20 nt, Human
uuccccagcagcuagugcuc

SEQ ID NO: 1074360 - RNA, 28 nt, Human
uucuggcauuucuuuucccauuugucau

SEQ ID NO: 1074361 - RNA, 21 nt, Human
uuucaaaaccaauuuccccag

SEQ ID NO: 1074362 - RNA, 22 nt, Human
aaaaaaaaaaaaaggaguucag

SEQ ID NO: 1074363 - RNA, 20 nt, Human
aaccaggucucuaguuuguu

SEQ ID NO: 1074364 - RNA, 21 nt, Human
aagcuaggaccaaggcuagaa

SEQ ID NO: 1074365 - RNA, 22 nt, Human
acaccugccaccaccaucaccu

SEQ ID NO: 1074366 - RNA, 20 nt, Human
accaccaucaccucauuacc

SEQ ID NO: 1074367 - RNA, 18 nt, Human
acccucaaugagggugac

SEQ ID NO: 1074368 - RNA, 24 nt, Human
acgcugcaggaacaaagggggacc

SEQ ID NO: 1074369 - RNA, 25 nt, Human
aggaacaaagggggacagcaucagc

SEQ ID NO: 1074370 - RNA, 18 nt, Human
aggccagggcugggaggg

SEQ ID NO: 1074371 - RNA, 24 nt, Human
agggaaguauuugcucuucagggc

SEQ ID NO: 1074372 - RNA, 19 nt, Human
aggggggccucuggacugc

SEQ ID NO: 1074373 - RNA, 20 nt, Human
agguggaggacggauguguc

SEQ ID NO: 1074374 - RNA, 26 nt, Human
agugaugaggccagggcugggaggga

SEQ ID NO: 1074375 - RNA, 22 nt, Human
caaggcuagaaucagcaccacc

SEQ ID NO: 1074376 - RNA, 24 nt, Human
cacaccugccaccaccaucaccuc

SEQ ID NO: 1074377 - RNA, 24 nt, Human
cacaccugccaccaccaucaccuu

SEQ ID NO: 1074378 - RNA, 19 nt, Human
caccacaccugccaccacc

SEQ ID NO: 1074379 - RNA, 22 nt, Human
caccaggugguccacaugcccc

SEQ ID NO: 1074380 - RNA, 18 nt, Human
caccccaaccuaaaccua

SEQ ID NO: 1074381 - RNA, 20 nt, Human
caccucauuacccacacccu

SEQ ID NO: 1074382 - RNA, 22 nt, Human
caccugccaccaccaucaccuc

SEQ ID NO: 1074383 - RNA, 24 nt, Human
ccaaggcuagaaucagcaccacca

SEQ ID NO: 1074384 - RNA, 18 nt, Human
ccacgcugcaggaacaaa

SEQ ID NO: 1074385 - RNA, 23 nt, Human
ccagcccugaaaaaaaaaaaaaa

SEQ ID NO: 1074386 - RNA, 23 nt, Human
ccaucaccucauuacccacaccc

SEQ ID NO: 1074387 - RNA, 19 nt, Human
cccugaaaaaaaaaaaaaa

SEQ ID NO: 1074388 - RNA, 20 nt, Human
ccugaaaaaaaaaaaaaagg

SEQ ID NO: 1074389 - RNA, 20 nt, Human
ccuuccuaauuccggcaccc

SEQ ID NO: 1074390 - RNA, 22 nt, Human
cugaaaaaaaaaaaaaaggagu

SEQ ID NO: 1074391 - RNA, 20 nt, Human
cugcaccugcuuguccucug

SEQ ID NO: 1074392 - RNA, 20 nt, Human
cugcaggaacaaagggggac

SEQ ID NO: 1074393 - RNA, 19 nt, Human
cugcugcugccugcaccug

SEQ ID NO: 1074394 - RNA, 20 nt, Human
gccuagccacagccagcucc

SEQ ID NO: 1074395 - RNA, 19 nt, Human
ggaguucaguuggcucggg

SEQ ID NO: 1074396 - RNA, 21 nt, Human
ggcugggagggaggcaggugc

SEQ ID NO: 1074397 - RNA, 19 nt, Human
gggacagcaucagcagagc

SEQ ID NO: 1074398 - RNA, 19 nt, Human
gugacaucagagagcucca

SEQ ID NO: 1074399 - RNA, 24 nt, Human
gugaugaggccagggcugggaggg

SEQ ID NO: 1074400 - RNA, 22 nt, Human
uagaaucagcaccaccacaccc

SEQ ID NO: 1074401 - RNA, 22 nt, Human
uagguucuaacugacccagccc

SEQ ID NO: 1074402 - RNA, 18 nt, Human
ucagcagagccugagggg

SEQ ID NO: 1074403 - RNA, 23 nt, Human
ucagcagagccugagggguugca

SEQ ID NO: 1074404 - RNA, 21 nt, Human
uccacgcugcaggaacaaagg

SEQ ID NO: 1074405 - RNA, 18 nt, Human
ugaaaaaaaaaaaaaagg

SEQ ID NO: 1074406 - RNA, 21 nt, Human
ugacacaauagcgcccaggag

SEQ ID NO: 1074407 - RNA, 18 nt, Human
ugaugaggccagggcugg

SEQ ID NO: 1074408 - RNA, 20 nt, Human
ugaugaggccagggcuggga

SEQ ID NO: 1074409 - RNA, 27 nt, Human
ugccaccaccaucaccucauuacccuc

SEQ ID NO: 1074410 - RNA, 21 nt, Human
ugccaccaggugguccacaug

SEQ ID NO: 1074411 - RNA, 18 nt, Human
ugcugcugccugcaccug

SEQ ID NO: 1074412 - RNA, 20 nt, Human
ugcugcugccugcaccugcu

SEQ ID NO: 1074413 - RNA, 20 nt, Human
acuuccaccccagccuucuu

SEQ ID NO: 1074414 - RNA, 23 nt, Human
aucccccguggcacgguagaggu

SEQ ID NO: 1074415 - RNA, 21 nt, Human
cacuguguaucccugaggaau

SEQ ID NO: 1074416 - RNA, 21 nt, Human
cagccuucuuggagagcagau

SEQ ID NO: 1074417 - RNA, 21 nt, Human
cccaaacugcuuccauacagu

SEQ ID NO: 1074418 - RNA, 20 nt, Human
cccugaggaauguuguagaa

SEQ ID NO: 1074419 - RNA, 22 nt, Human
ccucucgcuucuccacugugua

SEQ ID NO: 1074420 - RNA, 19 nt, Human
cuuuucaauggauuccaca

SEQ ID NO: 1074421 - RNA, 18 nt, Human
gccaggaagaacgacucc

SEQ ID NO: 1074422 - RNA, 19 nt, Human
gccauccagccucuacuuc

SEQ ID NO: 1074423 - RNA, 25 nt, Human
ggagccccccaaacugcuuccauac

SEQ ID NO: 1074424 - RNA, 23 nt, Human
guguaucccugaggaauguugua

SEQ ID NO: 1074425 - RNA, 20 nt, Human
uagaauuccgggagcccccc

SEQ ID NO: 1074426 - RNA, 18 nt, Human
uaggagggugggaucccc

SEQ ID NO: 1074427 - RNA, 25 nt, Human
ucuacuuccaccccagccuucuugg

SEQ ID NO: 1074428 - RNA, 19 nt, Human
ugcgguuguccagcuuuuc

SEQ ID NO: 1074429 - RNA, 19 nt, Human
uguaguaguugaggaaggu

SEQ ID NO: 1074430 - RNA, 19 nt, Human
uucacagucucggccagga

SEQ ID NO: 1074431 - RNA, 19 nt, Human
uucuaggagggugggaucc

SEQ ID NO: 1074432 - RNA, 20 nt, Human
aaacacacacacacaccccc

SEQ ID NO: 1074433 - RNA, 20 nt, Human
acacacccccaaaggggagc

SEQ ID NO: 1074434 - RNA, 24 nt, Human
acacacccccaaaggggagcaggg

SEQ ID NO: 1074435 - RNA, 22 nt, Human
acccccaaaggggagcagggac

SEQ ID NO: 1074436 - RNA, 18 nt, Human
acuguauccacagaaaug

SEQ ID NO: 1074437 - RNA, 23 nt, Human
agcaggaggcagcgggaggucgc

SEQ ID NO: 1074438 - RNA, 18 nt, Human
aggcuccccuccuuccca

SEQ ID NO: 1074439 - RNA, 19 nt, Human
agguccaggccccgggugg

SEQ ID NO: 1074440 - RNA, 19 nt, Human
cacacccccaaaggggagc

SEQ ID NO: 1074441 - RNA, 22 nt, Human
cacacccccaaaggggagcagg

SEQ ID NO: 1074442 - RNA, 23 nt, Human
cagaaacaagaggugggguggga

SEQ ID NO: 1074443 - RNA, 22 nt, Human
cagaggccggcgugggcggcgg

SEQ ID NO: 1074444 - RNA, 24 nt, Human
cagcagaggccggcgugggcggcg

SEQ ID NO: 1074445 - RNA, 25 nt, Human
caggccccggguggccccccaaagg

SEQ ID NO: 1074446 - RNA, 20 nt, Human
cagggacccagaaacaagag

SEQ ID NO: 1074447 - RNA, 18 nt, Human
ccaaguggaggagggcgg

SEQ ID NO: 1074448 - RNA, 22 nt, Human
ccccaaaggcuccccuccuucc

SEQ ID NO: 1074449 - RNA, 21 nt, Human
ccccaaaggggagcagggacc

SEQ ID NO: 1074450 - RNA, 20 nt, Human
cccccaaaggggagcaggga

SEQ ID NO: 1074451 - RNA, 18 nt, Human
ccccccaaaggcuccccu

SEQ ID NO: 1074452 - RNA, 19 nt, Human
ccccccaaaggcuccccuc

SEQ ID NO: 1074453 - RNA, 22 nt, Human
ccccggguggccccccaaaggc

SEQ ID NO: 1074454 - RNA, 18 nt, Human
ccccucccucuugccucc

SEQ ID NO: 1074455 - RNA, 24 nt, Human
ccucucugugcuaagggcugggga

SEQ ID NO: 1074456 - RNA, 20 nt, Human
cgugggcggcggcggcugcg

SEQ ID NO: 1074457 - RNA, 21 nt, Human
cucaguaccuccagagagcag

SEQ ID NO: 1074458 - RNA, 24 nt, Human
cucucucuauuuuuuuuuugucaa

SEQ ID NO: 1074459 - RNA, 22 nt, Human
gccggggcuuagugagggccgg

SEQ ID NO: 1074460 - RNA, 18 nt, Human
gccuccaggugagaccac

SEQ ID NO: 1074461 - RNA, 23 nt, Human
gccucuguccccucccucuugcc

SEQ ID NO: 1074462 - RNA, 21 nt, Human
gcggugggcacuguauccaca

SEQ ID NO: 1074463 - RNA, 23 nt, Human
ggaugggcagggaggauaccguu

SEQ ID NO: 1074464 - RNA, 18 nt, Human
ggcacuguauccacagaa

SEQ ID NO: 1074465 - RNA, 26 nt, Human
ggcagcagaggccggcgugggcggcg

SEQ ID NO: 1074466 - RNA, 18 nt, Human
ggccggcgugggcggcgg

SEQ ID NO: 1074467 - RNA, 22 nt, Human
ggccggcgugggcggcggcggc

SEQ ID NO: 1074468 - RNA, 18 nt, Human
gggaggggcauguguccc

SEQ ID NO: 1074469 - RNA, 25 nt, Human
gggcagcagaggccggcgugggcga

SEQ ID NO: 1074470 - RNA, 24 nt, Human
ggguggccccccaaaggcuccccu

SEQ ID NO: 1074471 - RNA, 21 nt, Human
gugcuaagggcuggggaaggg

SEQ ID NO: 1074472 - RNA, 18 nt, Human
gugggcggcggcggcugc

SEQ ID NO: 1074473 - RNA, 18 nt, Human
uaaaacacacacacacac

SEQ ID NO: 1074474 - RNA, 21 nt, Human
uaaaacacacacacacacccc

SEQ ID NO: 1074475 - RNA, 19 nt, Human
uccaggccccggguggccc

SEQ ID NO: 1074476 - RNA, 20 nt, Human
ugcauagguccaggccccgg

SEQ ID NO: 1074477 - RNA, 20 nt, Human
uggccccccaaaggcucccu

SEQ ID NO: 1074478 - RNA, 23 nt, Human
ugggcagggaggauaccguuucc

SEQ ID NO: 1074479 - RNA, 18 nt, Human
uggggugggacguggccc

SEQ ID NO: 1074480 - RNA, 21 nt, Human
uguccccucccucuugccucc

SEQ ID NO: 1074481 - RNA, 24 nt, Human
uuuauugcaguuaaauaccucucu

SEQ ID NO: 1074482 - RNA, 22 nt, Human
aaaaaaacauagcaacaaagag

SEQ ID NO: 1074483 - RNA, 24 nt, Human
aaaaaaacauagcaacaaagagac

SEQ ID NO: 1074484 - RNA, 25 nt, Human
aaacaaaaaaacauagcaacaaaga

SEQ ID NO: 1074485 - RNA, 26 nt, Human
aaacaaaaaaacauagcaacaaagag

SEQ ID NO: 1074486 - RNA, 21 nt, Human
aaacagaugggagaacaagac

SEQ ID NO: 1074487 - RNA, 18 nt, Human
aaagacacccccgccccc

SEQ ID NO: 1074488 - RNA, 24 nt, Human
aacaaaaaaacauagcaacaaaga

SEQ ID NO: 1074489 - RNA, 21 nt, Human
aagaauaaacagaugggagaa

SEQ ID NO: 1074490 - RNA, 23 nt, Human
aagacacccccgcccccagaaga

SEQ ID NO: 1074491 - RNA, 20 nt, Human
aagacccuccucuuccuugg

SEQ ID NO: 1074492 - RNA, 30 nt, Human; identical to SEQ ID NO: 759010

SEQ ID NO: 1074493 - RNA, 21 nt, Human
aagugaguucuaggaaaccag

SEQ ID NO: 1074494 - RNA, 22 nt, Human
acaaaaaaacauagcaacaaag

SEQ ID NO: 1074495 - RNA, 25 nt, Human
acccccgcccccagaagacgggguc

SEQ ID NO: 1074496 - RNA, 19 nt, Human
accgagaccgcagguuggu

SEQ ID NO: 1074497 - RNA, 19 nt, Human
agaaagccccaaaguaguc

SEQ ID NO: 1074498 - RNA, 18 nt, Human
agacacccuuuggcagau

SEQ ID NO: 1074499 - RNA, 22 nt, Human
agagauggguggggggcgaugg

SEQ ID NO: 1074500 - RNA, 18 nt, Human
agcccaaagaauaaacag

SEQ ID NO: 1074501 - RNA, 18 nt, Human
agccccaccccacaucag

SEQ ID NO: 1074502 - RNA, 22 nt, Human
aggccuggggcugggcagcugc

SEQ ID NO: 1074503 - RNA, 25 nt, Human
agggcggagcagcgccagcagggga

SEQ ID NO: 1074504 - RNA, 20 nt, Human
auuccugggaacuucaaaca

SEQ ID NO: 1074505 - RNA, 22 nt, Human
caacaaagagacccagcuucca

SEQ ID NO: 1074506 - RNA, 23 nt, Human
caacaaagagacccagcuuccag

SEQ ID NO: 1074507 - RNA, 22 nt, Human
caacauacaaaagucuggagaa

SEQ ID NO: 1074508 - RNA, 24 nt, Human
cacccccgcccccagaagacgggg

SEQ ID NO: 1074509 - RNA, 26 nt, Human
caccggaaccccucaaauauuccugg

SEQ ID NO: 1074510 - RNA, 24 nt, Human
cagacacccuuuggcagauauccu

SEQ ID NO: 1074511 - RNA, 18 nt, Human
cagagauggguggggggc

SEQ ID NO: 1074512 - RNA, 22 nt, Human
caucaccggaaccccucaaaua

SEQ ID NO: 1074513 - RNA, 20 nt, Human
caucugcucuguucagcuuc

SEQ ID NO: 1074514 - RNA, 23 nt, Human
ccaacacacgccgucaaaggaag

SEQ ID NO: 1074515 - RNA, 24 nt, Human
ccacagagaagaucccuaaacaca

SEQ ID NO: 1074516 - RNA, 22 nt, Human
ccacaucagacacccuuuggca

SEQ ID NO: 1074517 - RNA, 19 nt, Human
ccaccuagaaccuuccugg

SEQ ID NO: 1074518 - RNA, 25 nt, Human
ccagccccaccccacaucagacacc

SEQ ID NO: 1074519 - RNA, 19 nt, Human
cccaccccacaucagacac

SEQ ID NO: 1074520 - RNA, 22 nt, Human
cccaccccacaucagacacccu

SEQ ID NO: 1074521 - RNA, 21 nt, Human
cccccacagagaagaucccua

SEQ ID NO: 1074522 - RNA, 21 nt, Human
cccccagaagacgggguccca

SEQ ID NO: 1074523 - RNA, 21 nt, Human
cccgacuacccucagaaucca

SEQ ID NO: 1074524 - RNA, 18 nt, Human
cccgcccccagaagacgg

SEQ ID NO: 1074525 - RNA, 20 nt, Human
cccgcccccagaagacgggg

SEQ ID NO: 1074526 - RNA, 22 nt, Human
cccucagaauccaaauucugca

SEQ ID NO: 1074527 - RNA, 18 nt, Human
ccucccggaagaacuccu

SEQ ID NO: 1074528 - RNA, 18 nt, Human
ccucugagcaacuccucu

SEQ ID NO: 1074529 - RNA, 22 nt, Human
ccugugcccgacagggaccgag

SEQ ID NO: 1074530 - RNA, 18 nt, Human
cgaguggccucgccuggc

SEQ ID NO: 1074531 - RNA, 22 nt, Human
cggcuccaccgucguccucccg

SEQ ID NO: 1074532 - RNA, 18 nt, Human
cgugacguagguuaagug

SEQ ID NO: 1074533 - RNA, 18 nt, Human
cuccgugcgaggcccagc

SEQ ID NO: 1074534 - RNA, 18 nt, Human
cuccucuuccuuuucccc

SEQ ID NO: 1074535 - RNA, 18 nt, Human
cucugccucagugagcug

SEQ ID NO: 1074536 - RNA, 25 nt, Human
cugcagguuccuccgugcgaggccc

SEQ ID NO: 1074537 - RNA, 19 nt, Human
cuucaugcuggaccaggcc

SEQ ID NO: 1074538 - RNA, 19 nt, Human
cuucugccgaacuuccagg

SEQ ID NO: 1074539 - RNA, 21 nt, Human
gaaaagacacccccgccccca

SEQ ID NO: 1074540 - RNA, 25 nt, Human
gacccuccucuuccuuuucccccac

SEQ ID NO: 1074541 - RNA, 21 nt, Human
gagaacaagacccuccucuuc

SEQ ID NO: 1074542 - RNA, 19 nt, Human
gagccucugagcaacuccu

SEQ ID NO: 1074543 - RNA, 18 nt, Human
gaguggccucgccuggcu

SEQ ID NO: 1074544 - RNA, 21 nt, Human
gaugggcuucugccgaacuuc

SEQ ID NO: 1074545 - RNA, 22 nt, Human
gccccaccccacaucagacacc

SEQ ID NO: 1074546 - RNA, 23 nt, Human
gcugggcccggccggggcucugc

SEQ ID NO: 1074547 - RNA, 25 nt, Human
ggaccgagaccgcagguugguugca

SEQ ID NO: 1074548 - RNA, 23 nt, Human
ggagaacaagacccuccucuucc

SEQ ID NO: 1074549 - RNA, 20 nt, Human
gggaacuucaaacaaaaaaa

SEQ ID NO: 1074550 - RNA, 19 nt, Human
gggcacagggcggagcagc

SEQ ID NO: 1074551 - RNA, 19 nt, Human
gggcaggccuggggcuggg

SEQ ID NO: 1074552 - RNA, 22 nt, Human
gucggccccggccccgggaguc

SEQ ID NO: 1074553 - RNA, 19 nt, Human
gugcagagggcucuccaga

SEQ ID NO: 1074554 - RNA, 18 nt, Human
gugcagaucggcuccacc

SEQ ID NO: 1074555 - RNA, 22 nt, Human
guggcgguggacagguaggcac

SEQ ID NO: 1074556 - RNA, 23 nt, Human
uaaacagaugggagaacaagacc

SEQ ID NO: 1074557 - RNA, 24 nt, Human
uaccgugcauccuugcagauggaa

SEQ ID NO: 1074558 - RNA, 23 nt, Human
uagcaacaaagagacccagcuuc

SEQ ID NO: 1074559 - RNA, 20 nt, Human
uauccuguucugccuggcua

SEQ ID NO: 1074560 - RNA, 18 nt, Human
ucagugagcuggucugag

SEQ ID NO: 1074561 - RNA, 18 nt, Human
ucccaccuagaaccuucc

SEQ ID NO: 1074562 - RNA, 24 nt, Human
uccgagggcugggcccggccgggg

SEQ ID NO: 1074563 - RNA, 24 nt, Human
ucgaguggccucgccuggcugcgg

SEQ ID NO: 1074564 - RNA, 18 nt, Human
ucgcagaccccgguggcg

SEQ ID NO: 1074565 - RNA, 23 nt, Human
ucggcuccaccgucguccucccg

SEQ ID NO: 1074566 - RNA, 21 nt, Human
ucugcagguuccuccgugcga

SEQ ID NO: 1074567 - RNA, 23 nt, Human
ucugcagguuccuccgugcgagg

SEQ ID NO: 1074568 - RNA, 22 nt, Human
ucuuuggcuggaagcaaaaggc

SEQ ID NO: 1074569 - RNA, 20 nt, Human
ugagcaacuccucugccuca

SEQ ID NO: 1074570 - RNA, 22 nt, Human
ugcagagggcucuccagagaug

SEQ ID NO: 1074571 - RNA, 26 nt, Human
ugccagccccaccccacaucagacac

SEQ ID NO: 1074572 - RNA, 20 nt, Human
ugcucuguucagcuucagcc

SEQ ID NO: 1074573 - RNA, 20 nt, Human
uggccucgccuggcugcggc

SEQ ID NO: 1074574 - RNA, 24 nt, Human
uggcugcggcuccagcacuggcgu

SEQ ID NO: 1074575 - RNA, 19 nt, Human
uggcuggaagcaaaaggcc

SEQ ID NO: 1074576 - RNA, 21 nt, Human
uggcuggaagcaaaaggccgu

SEQ ID NO: 1074577 - RNA, 24 nt, Human
ugggaacuucaaacaaaaaaacau

SEQ ID NO: 1074578 - RNA, 20 nt, Human
ugggcugguguucguggagu

SEQ ID NO: 1074579 - RNA, 26 nt, Human
uggguggggggcgaugggcggggggc

SEQ ID NO: 1074580 - RNA, 19 nt, Human
ugugcagaucggcuccacc

SEQ ID NO: 1074581 - RNA, 23 nt, Human
uucaaacaaaaaaacauagcaac

SEQ ID NO: 1074582 - RNA, 24 nt, Human
uucccagagcccaaagaauaaaca

SEQ ID NO: 1074583 - RNA, 24 nt, Human
uuccugggaacuucaaacaaaaaa

SEQ ID NO: 1074584 - RNA, 23 nt, Human
uuggguaggggacaggccugcuc

SEQ ID NO: 1074585 - RNA, 20 nt, Human
aacccugucuuuggccuugc

SEQ ID NO: 1074586 - RNA, 23 nt, Human
aaggccccagggaaaccccacac

SEQ ID NO: 1074587 - RNA, 20 nt, Human
aaguaccccuucggccaggc

SEQ ID NO: 1074588 - RNA, 20 nt, Human
aggagcaggaaaaugucaug

SEQ ID NO: 1074589 - RNA, 19 nt, Human
agugacaagaagggguggu

SEQ ID NO: 1074590 - RNA, 19 nt, Human
agugcaggugaucccuccu

SEQ ID NO: 1074591 - RNA, 20 nt, Human
cacaaggccccagggaaacc

SEQ ID NO: 1074592 - RNA, 21 nt, Human
caccacgggcaaauugcucca

SEQ ID NO: 1074593 - RNA, 20 nt, Human
cagcaaagauggggugggug

SEQ ID NO: 1074594 - RNA, 21 nt, Human
cagcaggcccccgauggcacc

SEQ ID NO: 1074595 - RNA, 18 nt, Human
ccaggcaucaucugcacc

SEQ ID NO: 1074596 - RNA, 21 nt, Human
ccauacagcucuccccaucca

SEQ ID NO: 1074597 - RNA, 22 nt, Human
ccccuucggccaggcauggcuu

SEQ ID NO: 1074598 - RNA, 18 nt, Human
cccuccuccccagaaaca

SEQ ID NO: 1074599 - RNA, 23 nt, Human
ccuggaaguaccccuucggccag

SEQ ID NO: 1074600 - RNA, 24 nt, Human
cgaagagcacaguccuccuccgug

SEQ ID NO: 1074601 - RNA, 20 nt, Human
cucagcuuuggggcugccau

SEQ ID NO: 1074602 - RNA, 18 nt, Human
gagcaggaaaaugucaug

SEQ ID NO: 1074603 - RNA, 20 nt, Human
gaggcuggggguuggaaaac

SEQ ID NO: 1074604 - RNA, 22 nt, Human
ggcuggggguuggaaaacccug

SEQ ID NO: 1074605 - RNA, 18 nt, Human
gggacugaaauuuccccu

SEQ ID NO: 1074606 - RNA, 23 nt, Human
gggugggugggagacagugacaa

SEQ ID NO: 1074607 - RNA, 22 nt, Human
gucaaacugccucauucucagu

SEQ ID NO: 1074608 - RNA, 20 nt, Human
gucauagccucugaccuuau

SEQ ID NO: 1074609 - RNA, 20 nt, Human
ucaaaaagaugcgugucacc

SEQ ID NO: 1074610 - RNA, 21 nt, Human
uccacaucugcccaggcauca

SEQ ID NO: 1074611 - RNA, 20 nt, Human
uccuccccagaaacaagaac

SEQ ID NO: 1074612 - RNA, 21 nt, Human
ugagaaaaaauaguuguagcc

SEQ ID NO: 1074613 - RNA, 22 nt, Human
ugauuuuauuuugugaucugug

SEQ ID NO: 1074614 - RNA, 21 nt, Human
ugcuccagcaggcccccgaug

SEQ ID NO: 1074615 - RNA, 20 nt, Human
uggcuuccacaaggccccuc

SEQ ID NO: 1074616 - RNA, 19 nt, Human
uggggugggugggagacag

SEQ ID NO: 1074617 - RNA, 19 nt, Human
uggggugggugggagacag

SEQ ID NO: 1074618 - RNA, 21 nt, Human
uggggugggugggagacagug

SEQ ID NO: 1074619 - RNA, 22 nt, Human
ugucuuuggccuugcucagcuu

SEQ ID NO: 1074620 - RNA, 24 nt, Human
uuccccugaccuggaaguaccccc

SEQ ID NO: 1074621 - RNA, 18 nt, Human
uugcucagcuuuggggcu

SEQ ID NO: 1074622 - RNA, 19 nt, Human
aagaugccuccaacucgag

SEQ ID NO: 1074623 - RNA, 26 nt, Human
agaucuuagaaacuacuaugaaaaac

SEQ ID NO: 1074624 - RNA, 18 nt, Human
cagaaaugaacauuucug

SEQ ID NO: 1074625 - RNA, 20 nt, Human
ccuccaacucgagagacagg

SEQ ID NO: 1074626 - RNA, 25 nt, Human
ccuccaacucgagagacaggaccgu

SEQ ID NO: 1074627 - RNA, 24 nt, Human
cucuuagccgacaaccaaccaauu

SEQ ID NO: 1074628 - RNA, 20 nt, Human
uaacauagcacauguuuggc

SEQ ID NO: 1074629 - RNA, 23 nt, Human
uagaaacuacuaugaaaaaccau

SEQ ID NO: 1074630 - RNA, 22 nt, Human
ucaguuagcagcuaucuucuuc

SEQ ID NO: 1074631 - RNA, 24 nt, Human
uccaacaaauaaguuccaacacaa

SEQ ID NO: 1074632 - RNA, 25 nt, Human
ugccuccaacucgagagacaggacc

SEQ ID NO: 1074633 - RNA, 22 nt, Human
uucuccaacaaauaaguuccaa

SEQ ID NO: 1074634 - RNA, 19 nt, Human
uugccagaugacuuuugug

SEQ ID NO: 1074635 - RNA, 22 nt, Human
uuggcaccaaaagaucuuagaa

SEQ ID NO: 1074636 - RNA, 24 nt, Human
aacaggaucuacaggagaguggag

SEQ ID NO: 1074637 - RNA, 19 nt, Human
acguuucuccuaagacugc

SEQ ID NO: 1074638 - RNA, 18 nt, Human
agaguggagggccugucu

SEQ ID NO: 1074639 - RNA, 19 nt, Human
auggagagcaaccuucucu

SEQ ID NO: 1074640 - RNA, 19 nt, Human
caggaggacugaauguuug

SEQ ID NO: 1074641 - RNA, 22 nt, Human
cucaugaaacguuucuccuaag

SEQ ID NO: 1074642 - RNA, 21 nt, Human
cuccuaagacugcaucucucc

SEQ ID NO: 1074643 - RNA, 21 nt, Human
cucucuggcuucugcaucacu

SEQ ID NO: 1074644 - RNA, 23 nt, Human
cugcaucucuccuccuggcuuca

SEQ ID NO: 1074645 - RNA, 26 nt, Human
gcuacagcucaugaaacguuucuccu

SEQ ID NO: 1074646 - RNA, 21 nt, Human
uaagacugcaucucuccuccu

SEQ ID NO: 1074647 - RNA, 21 nt, Human
ucacugaguuaggauucagga

SEQ ID NO: 1074648 - RNA, 23 nt, Human
uccgauggagagcaaccuucucu

SEQ ID NO: 1074649 - RNA, 23 nt, Human
ucucucuggcuucugcaucacuu

SEQ ID NO: 1074650 - RNA, 20 nt, Human
ugagaaagacugauagggua

SEQ ID NO: 1074651 - RNA, 21 nt, Human
uuuuagggaggucuccgaaac

SEQ ID NO: 1074652 - RNA, 19 nt, Human
aaacaaaaacaaaaaaccc

SEQ ID NO: 1074653 - RNA, 20 nt, Human
aaacaaaaacaaaaaaccca

SEQ ID NO: 1074654 - RNA, 19 nt, Human
aacauagggagaccccauc

SEQ ID NO: 1074655 - RNA, 20 nt, Human
aacauagggagaccccaucu

SEQ ID NO: 1074656 - RNA, 21 nt, Human
aacauagggagaccccaucuc

SEQ ID NO: 1074657 - RNA, 19 nt, Human
aacauguggagagaccagg

SEQ ID NO: 1074658 - RNA, 22 nt, Human
aagacaggaccaaaggaaggga

SEQ ID NO: 1074659 - RNA, 26 nt, Human
aagcacaccccuccucagggccagcc

SEQ ID NO: 1074660 - RNA, 22 nt, Human
aaugaguucacauuggccaccc

SEQ ID NO: 1074661 - RNA, 24 nt, Human
aauuugaggccagccugggcaaca

SEQ ID NO: 1074662 - RNA, 24 nt, Human
acagagcaagacccugccucaaaa

SEQ ID NO: 1074663 - RNA, 23 nt, Human
acccugccucaaaaacaaaaaca

SEQ ID NO: 1074664 - RNA, 20 nt, Human
acgccacuacccuccagccu

SEQ ID NO: 1074665 - RNA, 24 nt, Human
acgggagcaagcacaccccuccuc

SEQ ID NO: 1074666 - RNA, 24 nt, Human
acuacccuccagccuggaugacag

SEQ ID NO: 1074667 - RNA, 18 nt, Human
agacagaugcaagacagg

SEQ ID NO: 1074668 - RNA, 21 nt, Human
agacagaugcaagacaggacc

SEQ ID NO: 1074669 - RNA, 23 nt, Human
agacaggacaaguucccugcagg

SEQ ID NO: 1074670 - RNA, 20 nt, Human
agcacaccccuccucagggc

SEQ ID NO: 1074671 - RNA, 21 nt, Human
agcacugguggggauccugcc

SEQ ID NO: 1074672 - RNA, 21 nt, Human
agcagagacaagacaggacaa

SEQ ID NO: 1074673 - RNA, 23 nt, Human
agccaggugugguggugccugcc

SEQ ID NO: 1074674 - RNA, 20 nt, Human
agccucggugcaagcagcag

SEQ ID NO: 1074675 - RNA, 24 nt, Human
agccugggcaacauagggagaccc

SEQ ID NO: 1074676 - RNA, 21 nt, Human
agcgagggcuucugagcacug

SEQ ID NO: 1074677 - RNA, 24 nt, Human
agcugggaggaucgcuugagccug

SEQ ID NO: 1074678 - RNA, 20 nt, Human
aggaauuugaggccagccug

SEQ ID NO: 1074679 - RNA, 22 nt, Human
aggcagccagcagggggcgagc

SEQ ID NO: 1074680 - RNA, 20 nt, Human
aggccggggcuuggagccag

SEQ ID NO: 1074681 - RNA, 24 nt, Human
aggcugagcugggaggaucgcuug

SEQ ID NO: 1074682 - RNA, 21 nt, Human
aggcugggagcuggaacaugu

SEQ ID NO: 1074683 - RNA, 24 nt, Human
aguggcucacaucuguaaccccag

SEQ ID NO: 1074684 - RNA, 23 nt, Human
aucucuacaaaaaguuuaaaaaa

SEQ ID NO: 1074685 - RNA, 23 nt, Human
auggcuccaggcagccagcaggg

SEQ ID NO: 1074686 - RNA, 22 nt, Human
caaaaacaaaaacaaaaaaccc

SEQ ID NO: 1074687 - RNA, 24 nt, Human
caaaaacaaaaacaaaaaacccac

SEQ ID NO: 1074688 - RNA, 22 nt, Human
caacauuaagagcugaagauag

SEQ ID NO: 1074689 - RNA, 23 nt, Human
caagacccugccucaaaaacaaa

SEQ ID NO: 1074690 - RNA, 21 nt, Human
caagcacaccccuccucaggg

SEQ ID NO: 1074691 - RNA, 21 nt, Human
cacaccccuccucagggccag

SEQ ID NO: 1074692 - RNA, 19 nt, Human
cacaucuguaaccccagua

SEQ ID NO: 1074693 - RNA, 22 nt, Human
caccaacauuaagagcugaaga

SEQ ID NO: 1074694 - RNA, 23 nt, Human
caccccuccucagggccagccca

SEQ ID NO: 1074695 - RNA, 21 nt, Human
cacgccacuacccuccagccu

SEQ ID NO: 1074696 - RNA, 24 nt, Human
cacuacccuccagccuggaugaca

SEQ ID NO: 1074697 - RNA, 25 nt, Human
cagagcaagacccugccucaaaaac

SEQ ID NO: 1074698 - RNA, 19 nt, Human
cagaugagacccaucccgc

SEQ ID NO: 1074699 - RNA, 21 nt, Human
cagcaagggcugugcucagca

SEQ ID NO: 1074700 - RNA, 20 nt, Human
cagcauaccccacaucccug

SEQ ID NO: 1074701 - RNA, 19 nt, Human
cagccucucgguagccccu

SEQ ID NO: 1074702 - RNA, 19 nt, Human
caggaccugggagguaugg

SEQ ID NO: 1074703 - RNA, 19 nt, Human
caggccccagaccaggaga

SEQ ID NO: 1074704 - RNA, 24 nt, Human
caguacuauaggaggccagggugg

SEQ ID NO: 1074705 - RNA, 23 nt, Human
ccagcauaccccacaucccugcc

SEQ ID NO: 1074706 - RNA, 23 nt, Human
ccagcccagccucucgguagccc

SEQ ID NO: 1074707 - RNA, 25 nt, Human
ccagcccagccucucgguagccccu

SEQ ID NO: 1074708 - RNA, 20 nt, Human
ccaggaaaagugagguucgg

SEQ ID NO: 1074709 - RNA, 19 nt, Human
ccaggccuuucuaggcaga

SEQ ID NO: 1074710 - RNA, 22 nt, Human
cccaccucuggggagaagugca

SEQ ID NO: 1074711 - RNA, 22 nt, Human
cccacuggcauuccugagaauc

SEQ ID NO: 1074712 - RNA, 21 nt, Human
cccagagggguuucucuuggg

SEQ ID NO: 1074713 - RNA, 23 nt, Human
cccagccucggccuucgcaucac

SEQ ID NO: 1074714 - RNA, 21 nt, Human
cccaggguuggggagaggggc

SEQ ID NO: 1074715 - RNA, 20 nt, Human
cccaggucagcaagggcugu

SEQ ID NO: 1074716 - RNA, 18 nt, Human
ccccaggaaaagugaggu

SEQ ID NO: 1074717 - RNA, 19 nt, Human
ccccaggccuuucuaggca

SEQ ID NO: 1074718 - RNA, 18 nt, Human
ccccgaggggcauauuac

SEQ ID NO: 1074719 - RNA, 23 nt, Human
cccgagaggcuggcuuucucucu

SEQ ID NO: 1074720 - RNA, 21 nt, Human
cccuccaacucugcagggccu

SEQ ID NO: 1074721 - RNA, 23 nt, Human
cccuccagccuggaugacagagc

SEQ ID NO: 1074722 - RNA, 18 nt, Human
cccuggggcccagcugca

SEQ ID NO: 1074723 - RNA, 24 nt, Human
ccuccccaccuccaggcccugcag

SEQ ID NO: 1074724 - RNA, 21 nt, Human
ccucuggccuccccaccucca

SEQ ID NO: 1074725 - RNA, 18 nt, Human
ccucuggggagaagugca

SEQ ID NO: 1074726 - RNA, 20 nt, Human
ccugccucaaaaacaaaaac

SEQ ID NO: 1074727 - RNA, 24 nt, Human
ccugggcaacauagggagacccca

SEQ ID NO: 1074728 - RNA, 22 nt, Human
ccuucaggucacuccuguguac

SEQ ID NO: 1074729 - RNA, 26 nt, Human
cgcuggagccucggugcaagcagcag

SEQ ID NO: 1074730 - RNA, 23 nt, Human
cucaaaaacaaaaacaaaaaacc

SEQ ID NO: 1074731 - RNA, 24 nt, Human
cucaaaaacaaaaacaaaaaaccc

SEQ ID NO: 1074732 - RNA, 23 nt, Human
cugccucaaaaacaaaaacaaaa

SEQ ID NO: 1074733 - RNA, 23 nt, Human
cugggagcuggaacauguggaga

SEQ ID NO: 1074734 - RNA, 28 nt, Human
gaagaaaccagcacggaauggcuccagg

SEQ ID NO: 1074735 - RNA, 20 nt, Human
gaccugggagguauggaggc

SEQ ID NO: 1074736 - RNA, 18 nt, Human
gacgggcggaaaaaggga

SEQ ID NO: 1074737 - RNA, 21 nt, Human
gagaagugcaggaccugggag

SEQ ID NO: 1074738 - RNA, 19 nt, Human
gagcugccccuucucagcc

SEQ ID NO: 1074739 - RNA, 20 nt, Human
gaggccagggugggaggaug

SEQ ID NO: 1074740 - RNA, 21 nt, Human
gagggcuucugagcacuggug

SEQ ID NO: 1074741 - RNA, 22 nt, Human
gagggcuucugagcacuggugg

SEQ ID NO: 1074742 - RNA, 23 nt, Human
gaucgcuugagccugggagguca

SEQ ID NO: 1074743 - RNA, 18 nt, Human
gcaggaaggagugaggcc

SEQ ID NO: 1074744 - RNA, 23 nt, Human
gccagcaggacacggcuuuccag

SEQ ID NO: 1074745 - RNA, 24 nt, Human
gccugggaggucaaggcugcagug

SEQ ID NO: 1074746 - RNA, 19 nt, Human
gcgaagaaaccagcacgga

SEQ ID NO: 1074747 - RNA, 18 nt, Human
ggacaaguucccugcagg

SEQ ID NO: 1074748 - RNA, 20 nt, Human
ggagaagugcaggaccuggg

SEQ ID NO: 1074749 - RNA, 22 nt, Human
ggagcaagcacaccccuccuca

SEQ ID NO: 1074750 - RNA, 19 nt, Human
ggaguaggcagguugaagg

SEQ ID NO: 1074751 - RNA, 24 nt, Human
ggaguaggcagguugaagggcuag

SEQ ID NO: 1074752 - RNA, 24 nt, Human
ggcuguguuugugaccacagugag

SEQ ID NO: 1074753 - RNA, 18 nt, Human
gggcccuggggcccagcu

SEQ ID NO: 1074754 - RNA, 23 nt, Human
gggccugugauuuaguccacgcu

SEQ ID NO: 1074755 - RNA, 24 nt, Human
gggcgaaguggcucacaucuguaa

SEQ ID NO: 1074756 - RNA, 20 nt, Human
ggguugggccgggcccuggg

SEQ ID NO: 1074757 - RNA, 21 nt, Human
gguuggggagaggggccccag

SEQ ID NO: 1074758 - RNA, 25 nt, Human
uaaugaguucacauuggccacccua

SEQ ID NO: 1074759 - RNA, 20 nt, Human
uagccaggugugguggugcc

SEQ ID NO: 1074760 - RNA, 22 nt, Human
uagccccuggagaauccucaca

SEQ ID NO: 1074761 - RNA, 20 nt, Human
uauaggaggccaggguggga

SEQ ID NO: 1074762 - RNA, 19 nt, Human
ucaagacagaugcaagaca

SEQ ID NO: 1074763 - RNA, 23 nt, Human
ucacgccacuacccuccagccug

SEQ ID NO: 1074764 - RNA, 18 nt, Human
ucagcaggcugagcuggg

SEQ ID NO: 1074765 - RNA, 20 nt, Human
ucagcaggcugggagcugga

SEQ ID NO: 1074766 - RNA, 24 nt, Human
uccagccuggaugacagagcaaga

SEQ ID NO: 1074767 - RNA, 24 nt, Human
ucccaccccaugcauuucccagaa

SEQ ID NO: 1074768 - RNA, 25 nt, Human
ucccaccccaugcauuucccagaag

SEQ ID NO: 1074769 - RNA, 21 nt, Human
uccccaccuccaggcccugca

SEQ ID NO: 1074770 - RNA, 20 nt, Human
ucccugaguaagcaucagca

SEQ ID NO: 1074771 - RNA, 19 nt, Human
uccucagggccagcccagg

SEQ ID NO: 1074772 - RNA, 18 nt, Human
ucgcuugagccugggagg

SEQ ID NO: 1074773 - RNA, 23 nt, Human
ucgcuugagccugggaggucaag

SEQ ID NO: 1074774 - RNA, 23 nt, Human
ucuaggggaagagccacuccguc

SEQ ID NO: 1074775 - RNA, 18 nt, Human
ucucagcccuccaacucu

SEQ ID NO: 1074776 - RNA, 22 nt, Human
ucuuccugaaaacucccugccu

SEQ ID NO: 1074777 - RNA, 20 nt, Human
ugacagagcaagacccugcc

SEQ ID NO: 1074778 - RNA, 20 nt, Human
ugaccacagugaggggccuu

SEQ ID NO: 1074779 - RNA, 20 nt, Human
ugacugcccugccucuggcc

SEQ ID NO: 1074780 - RNA, 23 nt, Human
ugagcccaggaauuugaggccag

SEQ ID NO: 1074781 - RNA, 24 nt, Human
ugagccugggaggucaaggcugca

SEQ ID NO: 1074782 - RNA, 18 nt, Human
ugagcugggaggaucgcu

SEQ ID NO: 1074783 - RNA, 20 nt, Human
ugagcugggaggaucgcuug

SEQ ID NO: 1074784 - RNA, 23 nt, Human
ugagcugggaggaucgcuugagc

SEQ ID NO: 1074785 - RNA, 24 nt, Human
ugagcugggaggaucgcuugagcc

SEQ ID NO: 1074786 - RNA, 21 nt, Human
ugcagugagcccuggucacgc

SEQ ID NO: 1074787 - RNA, 18 nt, Human
ugccucaaaaacaaaaac

SEQ ID NO: 1074788 - RNA, 23 nt, Human
ugccucagcugggcgaaguggcu

SEQ ID NO: 1074789 - RNA, 22 nt, Human
ugccucuggccuccccaccucc

SEQ ID NO: 1074790 - RNA, 24 nt, Human
uggagccagggucucccagagggg

SEQ ID NO: 1074791 - RNA, 23 nt, Human
uggagccucggugcaagcagcag

SEQ ID NO: 1074792 - RNA, 21 nt, Human
uggcucacaucuguaacccca

SEQ ID NO: 1074793 - RNA, 22 nt, Human
uggcucacaucuguaaccccag

SEQ ID NO: 1074794 - RNA, 23 nt, Human
uggcucacaucuguaaccccagu

SEQ ID NO: 1074795 - RNA, 24 nt, Human
uggcuugagcccaggaauuugagg

SEQ ID NO: 1074796 - RNA, 18 nt, Human
ugggaaagccacuaggca

SEQ ID NO: 1074797 - RNA, 20 nt, Human
ugggagcuggaacaugugga

SEQ ID NO: 1074798 - RNA, 24 nt, Human
ugggaggauggcuugagcccagga

SEQ ID NO: 1074799 - RNA, 22 nt, Human
ugggcaacauagggagacccca

SEQ ID NO: 1074800 - RNA, 19 nt, Human
uggggagaagugcaggacc

SEQ ID NO: 1074801 - RNA, 18 nt, Human
uggguguggcacucggcc

SEQ ID NO: 1074802 - RNA, 23 nt, Human
uggucagcaggcugagcugggag

SEQ ID NO: 1074803 - RNA, 24 nt, Human
ugguggugccugccuaucauccca

SEQ ID NO: 1074804 - RNA, 19 nt, Human
ugucccaccccaugcauuu

SEQ ID NO: 1074805 - RNA, 26 nt, Human
ugugaccucucccagccucggccuuc

SEQ ID NO: 1074806 - RNA, 18 nt, Human
ugugacugcccugccucu

SEQ ID NO: 1074807 - RNA, 21 nt, Human
uuagccaggugugguggugcc

SEQ ID NO: 1074808 - RNA, 21 nt, Human
uucaagacagaugcaagacag

SEQ ID NO: 1074809 - RNA, 18 nt, Human
uuccuuuuaaugaguuca

SEQ ID NO: 1074810 - RNA, 19 nt, Human
uuggccaccccaggccuuu

SEQ ID NO: 1074811 - RNA, 19 nt, Human
uuuuucggcagcugccugg

SEQ ID NO: 1074812 - RNA, 24 nt, Human
acagugcccaccccugguauuccc

SEQ ID NO: 1074813 - RNA, 22 nt, Human
caggaacccucucuugaggucu

SEQ ID NO: 1074814 - RNA, 23 nt, Human
cauagggacccucuggcacagcc

SEQ ID NO: 1074815 - RNA, 18 nt, Human
ccugcuccugcucugaaa

SEQ ID NO: 1074816 - RNA, 22 nt, Human
gacucacacucuccucuggccu

SEQ ID NO: 1074817 - RNA, 20 nt, Human
gcuccugcucugaaagugag

SEQ ID NO: 1074818 - RNA, 20 nt, Human
ggcauuugaagucaaagcug

SEQ ID NO: 1074819 - RNA, 23 nt, Human
guggcauuugaagucaaagcugg

SEQ ID NO: 1074820 - RNA, 23 nt, Human
uaucuuggcucuaaucaguuuca

SEQ ID NO: 1074821 - RNA, 19 nt, Human
ucacacucuccucuggccu

SEQ ID NO: 1074822 - RNA, 22 nt, Human
ucauuugguuggcuaucuuggc

SEQ ID NO: 1074823 - RNA, 22 nt, Human
ucucuugacagugcccaccccu

SEQ ID NO: 1074824 - RNA, 24 nt, Human
ucucuugacagugcccaccccugg

SEQ ID NO: 1074825 - RNA, 23 nt, Human
ucuuccugaagucauuugguugg

SEQ ID NO: 1074826 - RNA, 18 nt, Human
ugaagccugaggucuucc

SEQ ID NO: 1074827 - RNA, 23 nt, Human
ugagaugauaaugaagccugagg

SEQ ID NO: 1074828 - RNA, 19 nt, Human
ugaggucuuccugaaguca

SEQ ID NO: 1074829 - RNA, 22 nt, Human
ugaggucuuccugaagucauuu

SEQ ID NO: 1074830 - RNA, 23 nt, Human
uucagcuggucuugaaucccuuu

SEQ ID NO: 1074831 - RNA, 23 nt, Human
aaaaaaaacauggaagucaucau

SEQ ID NO: 1074832 - RNA, 19 nt, Human
acucccucagcccuggaga

SEQ ID NO: 1074833 - RNA, 22 nt, Human
agcuggaacugccuguccgcgu

SEQ ID NO: 1074834 - RNA, 23 nt, Human
cacggaaacuccgugucugcaga

SEQ ID NO: 1074835 - RNA, 22 nt, Human
caucaugaguuuguuucugggg

SEQ ID NO: 1074836 - RNA, 22 nt, Human
cccgggcuccaggaccgucccc

SEQ ID NO: 1074837 - RNA, 19 nt, Human
ccgcguggacccgcuccuc

SEQ ID NO: 1074838 - RNA, 19 nt, Human
ccucagcccuggagacuuc

SEQ ID NO: 1074839 - RNA, 20 nt, Human
cgccguccgacuccggagcc

SEQ ID NO: 1074840 - RNA, 22 nt, Human
cucccucagcccuggagacuuc

SEQ ID NO: 1074841 - RNA, 21 nt, Human
cuccucuggcacggaaacucc

SEQ ID NO: 1074842 - RNA, 19 nt, Human
cucgcacccuucccgggcu

SEQ ID NO: 1074843 - RNA, 19 nt, Human
cucuuguuccuguucuugu

SEQ ID NO: 1074844 - RNA, 23 nt, Human
cuggaacugccuguccgcgugga

SEQ ID NO: 1074845 - RNA, 21 nt, Human
gagccggggacggagaggaga

SEQ ID NO: 1074846 - RNA, 19 nt, Human
gcagacucccucagcccug

SEQ ID NO: 1074847 - RNA, 20 nt, Human
ggaggagagagagcgcgggc

SEQ ID NO: 1074848 - RNA, 22 nt, Human
gggaaaggaaaauucuccaugu

SEQ ID NO: 1074849 - RNA, 21 nt, Human
guccgcguggacccgcuccuc

SEQ ID NO: 1074850 - RNA, 18 nt, Human
uaaaaaagcuuacugaaa

SEQ ID NO: 1074851 - RNA, 23 nt, Human
uaaaaaagcuuacugaaaauuag

SEQ ID NO: 1074852 - RNA, 18 nt, Human
uaggagguggcaggucuc

SEQ ID NO: 1074853 - RNA, 22 nt, Human
ucccgggcuccaggaccguccc

SEQ ID NO: 1074854 - RNA, 23 nt, Human
ucccucagcccuggagacuucug

SEQ ID NO: 1074855 - RNA, 19 nt, Human
ucuccgggacugcugcugg

SEQ ID NO: 1074856 - RNA, 22 nt, Human
ucucuuguuccuguucuugucc

SEQ ID NO: 1074857 - RNA, 19 nt, Human
ucugcagacucccucagcc

SEQ ID NO: 1074858 - RNA, 20 nt, Human
ucugcagacucccucagccc

SEQ ID NO: 1074859 - RNA, 24 nt, Human
ucugcagacucccucagcccugga

SEQ ID NO: 1074860 - RNA, 23 nt, Human
ugguaagacugucucuuguuccu

SEQ ID NO: 1074861 - RNA, 22 nt, Human
ugucugcagacucccucagccc

SEQ ID NO: 1074862 - RNA, 23 nt, Human
uuauucagaaauaaaaaagcuua

SEQ ID NO: 1074863 - RNA, 19 nt, Human
uucuuguccauugcugcau

SEQ ID NO: 1074864 - RNA, 23 nt, Human
aaaaaaaacauggaagucaucau

SEQ ID NO: 1074865 - RNA, 22 nt, Human
caucaugaguuuguuucugggg

SEQ ID NO: 1074866 - RNA, 22 nt, Human
gggaaaggaaaauucuccaugu

SEQ ID NO: 1074867 - RNA, 18 nt, Human
uaggagguggcaggucuc

SEQ ID NO: 1074868 - RNA, 19 nt, Human
aaccagaggcacuaaaacu

SEQ ID NO: 1074869 - RNA, 19 nt, Human
agaggcacuaaaacugcca

SEQ ID NO: 1074870 - RNA, 18 nt, Human
agccaugcaugguggggc

SEQ ID NO: 1074871 - RNA, 22 nt, Human
agggaagaaaaccagaggcacu

SEQ ID NO: 1074872 - RNA, 19 nt, Human
aucuacaugagaugcucac

SEQ ID NO: 1074873 - RNA, 25 nt, Human
ccaauuuuaauccuggcuccagcau

SEQ ID NO: 1074874 - RNA, 18 nt, Human
cggcagccugugcagugc

SEQ ID NO: 1074875 - RNA, 20 nt, Human
cucacaguaggagagaggga

SEQ ID NO: 1074876 - RNA, 20 nt, Human
cuggagggagggagugcugg

SEQ ID NO: 1074877 - RNA, 20 nt, Human
cuuuauacuuucgucuuccu

SEQ ID NO: 1074878 - RNA, 19 nt, Human
gagugcugggaaccuuggg

SEQ ID NO: 1074879 - RNA, 20 nt, Human
gagugcugggaaccuugggc

SEQ ID NO: 1074880 - RNA, 23 nt, Human
gaucuuuauacuuucgucuuccu

SEQ ID NO: 1074881 - RNA, 23 nt, Human
ggagggagugcugggaaccuugg

SEQ ID NO: 1074882 - RNA, 20 nt, Human
gggcucuggccuggagccag

SEQ ID NO: 1074883 - RNA, 20 nt, Human
uacuuucgucuuccuaagug

SEQ ID NO: 1074884 - RNA, 20 nt, Human
ucuggaaggaacuauacagg

SEQ ID NO: 1074885 - RNA, 20 nt, Human
ugcuggagggagggagugcu

SEQ ID NO: 1074886 - RNA, 21 nt, Human
ugcuggagggagggagugcug

SEQ ID NO: 1074887 - RNA, 20 nt, Human
uggaaggaacuauacaggca

SEQ ID NO: 1074888 - RNA, 20 nt, Human
uggggcugcuuccugcccaa

SEQ ID NO: 1074889 - RNA, 23 nt, Human
ugucccagucuucuagaucuuua

SEQ ID NO: 1074890 - RNA, 23 nt, Human
uguggcuaagcagacaaccacau

SEQ ID NO: 1074891 - RNA, 23 nt, Human
uguuguaugacuuggugaaaauu

SEQ ID NO: 1074892 - RNA, 21 nt, Human
uuccuaagugucagggaagaa

SEQ ID NO: 1074893 - RNA, 20 nt, Human
uugcuggagggagggagugc

SEQ ID NO: 1074894 - RNA, 23 nt, Human
aaauaccaagaggccagagagcu

SEQ ID NO: 1074895 - RNA, 23 nt, Human
aaccacagcuacaacuaaauuca

SEQ ID NO: 1074896 - RNA, 22 nt, Human
aagaaaauaccaagaggccaga

SEQ ID NO: 1074897 - RNA, 18 nt, Human
aagaggccagagagcuca

SEQ ID NO: 1074898 - RNA, 25 nt, Human
aagccagaggcagguggcuccaggg

SEQ ID NO: 1074899 - RNA, 19 nt, Human
aagucauggguucuuggau

SEQ ID NO: 1074900 - RNA, 20 nt, Human
aagucugucuguagcagucu

SEQ ID NO: 1074901 - RNA, 18 nt, Human
aauaccaagaggccagag

SEQ ID NO: 1074902 - RNA, 22 nt, Human
acagacacaaaagaaaauacca

SEQ ID NO: 1074903 - RNA, 23 nt, Human
acagacacaaaagaaaauaccaa

SEQ ID NO: 1074904 - RNA, 21 nt, Human
accagcaucuccucagggccg

SEQ ID NO: 1074905 - RNA, 20 nt, Human
acccugccucgcccccaccu

SEQ ID NO: 1074906 - RNA, 19 nt, Human
accuguguagcccuuccuc

SEQ ID NO: 1074907 - RNA, 21 nt, Human
agaaaauaccaagaggccagu

SEQ ID NO: 1074908 - RNA, 21 nt, Human
agacacaaaagaaaauaccaa

SEQ ID NO: 1074909 - RNA, 22 nt, Human
agacugcccugcaggggugggg

SEQ ID NO: 1074910 - RNA, 22 nt, Human
agccagucccccggccuuccug

SEQ ID NO: 1074911 - RNA, 19 nt, Human
aggagcagugagggcagcc

SEQ ID NO: 1074912 - RNA, 18 nt, Human
aggcagguggcuccaggg

SEQ ID NO: 1074913 - RNA, 23 nt, Human
agguuccuucuguguuuccuccu

SEQ ID NO: 1074914 - RNA, 23 nt, Human
augaagccagaggcagguggcuc

SEQ ID NO: 1074915 - RNA, 21 nt, Human
auggagcacugacggaugaca

SEQ ID NO: 1074916 - RNA, 26 nt, Human
auggagcacugacggaugacacgugc

SEQ ID NO: 1074917 - RNA, 18 nt, Human
auggcgaugaggacgaca

SEQ ID NO: 1074918 - RNA, 19 nt, Human
caaagcccugaggugcagg

SEQ ID NO: 1074919 - RNA, 19 nt, Human
caacucaauuuccuccuca

SEQ ID NO: 1074920 - RNA, 21 nt, Human
cacagugacaccuguguagcc

SEQ ID NO: 1074921 - RNA, 27 nt, Human
cacagugacaccuguguagcccuuccu

SEQ ID NO: 1074922 - RNA, 20 nt, Human
caccaugcaugggugggggc

SEQ ID NO: 1074923 - RNA, 23 nt, Human
cagaguggagcacagacccugcc

SEQ ID NO: 1074924 - RNA, 21 nt, Human
cagcucacaugaagccagagg

SEQ ID NO: 1074925 - RNA, 21 nt, Human
cagggccccagucucccuggg

SEQ ID NO: 1074926 - RNA, 18 nt, Human
cagguccgggaugucacc

SEQ ID NO: 1074927 - RNA, 18 nt, Human
cauccccgcggagcuggu

SEQ ID NO: 1074928 - RNA, 21 nt, Human
cauccccgcggagcugguggc

SEQ ID NO: 1074929 - RNA, 22 nt, Human
ccagcagugcagcacaggggag

SEQ ID NO: 1074930 - RNA, 20 nt, Human
ccagucccccggccuuccug

SEQ ID NO: 1074931 - RNA, 22 nt, Human
cccaccucagggagcucagagc

SEQ ID NO: 1074932 - RNA, 18 nt, Human
cccaugcugauucccagg

SEQ ID NO: 1074933 - RNA, 19 nt, Human
cccaugcugauucccaggg

SEQ ID NO: 1074934 - RNA, 20 nt, Human
ccccgcggagcugguggcag

SEQ ID NO: 1074935 - RNA, 25 nt, Human
ccccuugucauuaucacccuccuca

SEQ ID NO: 1074936 - RNA, 18 nt, Human
cccugaggugcagggccc

SEQ ID NO: 1074937 - RNA, 23 nt, Human
ccucagaguggagcacagacccu

SEQ ID NO: 1074938 - RNA, 19 nt, Human
ccucccucagaagccuggg

SEQ ID NO: 1074939 - RNA, 23 nt, Human
ccuguggucaucguggcuccccu

SEQ ID NO: 1074940 - RNA, 24 nt, Human
ccuguggucaucguggcuccccuu

SEQ ID NO: 1074941 - RNA, 23 nt, Human
ccuuccugcguggauacgggaau

SEQ ID NO: 1074942 - RNA, 20 nt, Human
ccuugucugaccccagcagu

SEQ ID NO: 1074943 - RNA, 19 nt, Human
cgcagguuccuucuguguu

SEQ ID NO: 1074944 - RNA, 22 nt, Human
cgugcacauggcgaugaggacg

SEQ ID NO: 1074945 - RNA, 23 nt, Human
cucccaugcugauucccagggcu

SEQ ID NO: 1074946 - RNA, 25 nt, Human
gaagcagagaggcagcuacugguuc

SEQ ID NO: 1074947 - RNA, 20 nt, Human
gacagggcuuccacgcagac

SEQ ID NO: 1074948 - RNA, 24 nt, Human
gacugcccugcagggguggggugg

SEQ ID NO: 1074949 - RNA, 19 nt, Human
gagaagacagacacaaaag

SEQ ID NO: 1074950 - RNA, 20 nt, Human
gagcacagacccugccucgc

SEQ ID NO: 1074951 - RNA, 22 nt, Human
gagccgggggcacaucagagga

SEQ ID NO: 1074952 - RNA, 19 nt, Human
gccacaggauggcugccac

SEQ ID NO: 1074953 - RNA, 19 nt, Human
gcuuggauuucuuucuucu

SEQ ID NO: 1074954 - RNA, 19 nt, Human
ggagcacugcauggagcac

SEQ ID NO: 1074955 - RNA, 21 nt, Human
ggagccagucccccggccuuc

SEQ ID NO: 1074956 - RNA, 19 nt, Human
ggaggcgacauggugugug

SEQ ID NO: 1074957 - RNA, 23 nt, Human
ggcacagugacaccuguguagcc

SEQ ID NO: 1074958 - RNA, 23 nt, Human
ggggugggcacagugacaccugu

SEQ ID NO: 1074959 - RNA, 19 nt, Human
guggagcacagacccugcc

SEQ ID NO: 1074960 - RNA, 20 nt, Human
guggagcacugcauggagca

SEQ ID NO: 1074961 - RNA, 21 nt, Human
guguagaugaggaagcagaga

SEQ ID NO: 1074962 - RNA, 18 nt, Human
uagaaugcagggcaauga

SEQ ID NO: 1074963 - RNA, 21 nt, Human
uaguuaacuuguccgaggcuu

SEQ ID NO: 1074964 - RNA, 21 nt, Human
ucagcaaauggcgagaucucu

SEQ ID NO: 1074965 - RNA, 23 nt, Human
ucccagaccuggauccaaagccc

SEQ ID NO: 1074966 - RNA, 18 nt, Human
ucccucagaagccugggc

SEQ ID NO: 1074967 - RNA, 19 nt, Human
ucccucagaagccugggcu

SEQ ID NO: 1074968 - RNA, 22 nt, Human
ucccugggugcccccaaggucc

SEQ ID NO: 1074969 - RNA, 24 nt, Human
ucccugggugcccccaagguccug

SEQ ID NO: 1074970 - RNA, 22 nt, Human
ucugaccccagcagugcagcac

SEQ ID NO: 1074971 - RNA, 23 nt, Human
ucugccugggguaaacccuaugu

SEQ ID NO: 1074972 - RNA, 18 nt, Human
ucuguagcagucucccua

SEQ ID NO: 1074973 - RNA, 24 nt, Human
ucuugggcacuuccaacucaauuu

SEQ ID NO: 1074974 - RNA, 19 nt, Human
ucuuucuuuugaagucaug

SEQ ID NO: 1074975 - RNA, 22 nt, Human
ugacggaugacacgugcacaug

SEQ ID NO: 1074976 - RNA, 18 nt, Human
ugagaagacagacacaaa

SEQ ID NO: 1074977 - RNA, 23 nt, Human
ugagaagacagacacaaaagaaa

SEQ ID NO: 1074978 - RNA, 24 nt, Human
ugagaagacagacacaaaagaaaa

SEQ ID NO: 1074979 - RNA, 20 nt, Human
ugaggacaaagguuucuuuc

SEQ ID NO: 1074980 - RNA, 18 nt, Human
ugagggcagcacguccug

SEQ ID NO: 1074981 - RNA, 21 nt, Human
ugagggcagcacguccuggag

SEQ ID NO: 1074982 - RNA, 19 nt, Human
ugcccugcaggcaucgggg

SEQ ID NO: 1074983 - RNA, 24 nt, Human
ugcucagccuugagccgggggcac

SEQ ID NO: 1074984 - RNA, 19 nt, Human
uggauccaaagcccugagg

SEQ ID NO: 1074985 - RNA, 23 nt, Human
uggauuucuuucuucugccuccc

SEQ ID NO: 1074986 - RNA, 23 nt, Human
uggcgaugaggacgacaccuccu

SEQ ID NO: 1074987 - RNA, 21 nt, Human
ugggucucaugcccuuaugag

SEQ ID NO: 1074988 - RNA, 19 nt, Human
ugggugcccccaagguccu

SEQ ID NO: 1074989 - RNA, 21 nt, Human
ugggugcccccaagguccugg

SEQ ID NO: 1074990 - RNA, 19 nt, Human
ugggugggggccggguccc

SEQ ID NO: 1074991 - RNA, 18 nt, Human
uggguucuuggauggagc

SEQ ID NO: 1074992 - RNA, 21 nt, Human
uguagcccuuccucugccuga

SEQ ID NO: 1074993 - RNA, 22 nt, Human
ugucugaccccagcagugcagc

SEQ ID NO: 1074994 - RNA, 19 nt, Human
ugucuguagcagucucccu

SEQ ID NO: 1074995 - RNA, 23 nt, Human
uguguucgaacaccugcugcucc

SEQ ID NO: 1074996 - RNA, 18 nt, Human
uugccuguuaccaaauuu

SEQ ID NO: 1074997 - RNA, 23 nt, Human
uuucagguuguccuccagccagc

SEQ ID NO: 1074998 - RNA, 24 nt, Human
aaaagcugaacagacugaaaaagc

SEQ ID NO: 1074999 - RNA, 22 nt, Human
aaaccacuguccccagaacugg

SEQ ID NO: 1075000 - RNA, 18 nt, Human
aaccaugucguugucccc

SEQ ID NO: 1075001 - RNA, 23 nt, Human
aagucuggaaguuaaagauccac

SEQ ID NO: 1075002 - RNA, 23 nt, Human
agcaaaccacuguccccagaacu

SEQ ID NO: 1075003 - RNA, 22 nt, Human
agcagaagcccugggcagcagc

SEQ ID NO: 1075004 - RNA, 19 nt, Human
aggcgcgggccccgccgcu

SEQ ID NO: 1075005 - RNA, 18 nt, Human
agguaccggagcagaagc

SEQ ID NO: 1075006 - RNA, 19 nt, Human
auugcaauuccauccuagc

SEQ ID NO: 1075007 - RNA, 21 nt, Human
caaguaaaaagcugaacagac

SEQ ID NO: 1075008 - RNA, 21 nt, Human
cacuguccccagaacuggaga

SEQ ID NO: 1075009 - RNA, 21 nt, Human
cagagcgggcaagucuggaag

SEQ ID NO: 1075010 - RNA, 21 nt, Human
caggcgacgagagcgcuucuc

SEQ ID NO: 1075011 - RNA, 23 nt, Human
caggcgacgagagcgcuucuccc

SEQ ID NO: 1075012 - RNA, 24 nt, Human
cauuauauauaucaucaucuuaua

SEQ ID NO: 1075013 - RNA, 24 nt, Human
ccagaacuggagaaaccggcagga

SEQ ID NO: 1075014 - RNA, 19 nt, Human
ccagagugccggaggcgca

SEQ ID NO: 1075015 - RNA, 21 nt, Human
ccccagaacuggagaaaccuc

SEQ ID NO: 1075016 - RNA, 19 nt, Human
ccuguacauagauauaugu

SEQ ID NO: 1075017 - RNA, 19 nt, Human
cgcuggggggaggaggcgc

SEQ ID NO: 1075018 - RNA, 24 nt, Human
cgggaaccaugucguuguccccuc

SEQ ID NO: 1075019 - RNA, 23 nt, Human
cuagcaaguaaaaagcugaacag

SEQ ID NO: 1075020 - RNA, 20 nt, Human
cuccuuggauccauaaagga

SEQ ID NO: 1075021 - RNA, 19 nt, Human
cugggcagcagccucugcc

SEQ ID NO: 1075022 - RNA, 21 nt, Human
gaaaaagcaagucuccuugga

SEQ ID NO: 1075023 - RNA, 18 nt, Human
gaacuggagaaaccggca

SEQ ID NO: 1075024 - RNA, 23 nt, Human
gaacuggagaaaccggcaggaga

SEQ ID NO: 1075025 - RNA, 21 nt, Human
gacauuccucuaucucauggg

SEQ ID NO: 1075026 - RNA, 22 nt, Human
gagcaaaccacuguccccagaa

SEQ ID NO: 1075027 - RNA, 19 nt, Human
gcaaaccacuguccccaga

SEQ ID NO: 1075028 - RNA, 20 nt, Human
gccccgccgcuccggccucg

SEQ ID NO: 1075029 - RNA, 20 nt, Human
gcccugggcagcagccucug

SEQ ID NO: 1075030 - RNA, 28 nt, Human
ggauuucuuucacauaugggcacucuuc

SEQ ID NO: 1075031 - RNA, 20 nt, Human
ggcgcagagcgggcaagucu

SEQ ID NO: 1075032 - RNA, 19 nt, Human
gggaagacagauauauucu

SEQ ID NO: 1075033 - RNA, 18 nt, Human
gggggaggaggcgcgggc

SEQ ID NO: 1075034 - RNA, 22 nt, Human
uaaaaagcugaacagacugaaa

SEQ ID NO: 1075035 - RNA, 19 nt, Human
uaaaauuaaaguguggaac

SEQ ID NO: 1075036 - RNA, 19 nt, Human
uacauagauauauguacac

SEQ ID NO: 1075037 - RNA, 20 nt, Human
uacauuguucccauuaaaau

SEQ ID NO: 1075038 - RNA, 21 nt, Human
uaccggagcagaagcccuggg

SEQ ID NO: 1075039 - RNA, 20 nt, Human
uauauguacacauguauaua

SEQ ID NO: 1075040 - RNA, 18 nt, Human
uauauguauauauauaau

SEQ ID NO: 1075041 - RNA, 26 nt, Human
uaucaucaucuuauauguauauauau

SEQ ID NO: 1075042 - RNA, 24 nt, Human
ucacaagguaccggagcagaagcc

SEQ ID NO: 1075043 - RNA, 20 nt, Human
ucagggcaggaacagggaau

SEQ ID NO: 1075044 - RNA, 25 nt, Human
ucagugauugaaauuguuucagggc

SEQ ID NO: 1075045 - RNA, 21 nt, Human
ucaucuuauauguauauauau

SEQ ID NO: 1075046 - RNA, 19 nt, Human
uccauaaaggaagcgaggu

SEQ ID NO: 1075047 - RNA, 18 nt, Human
uccccagaacuggagaaa

SEQ ID NO: 1075048 - RNA, 24 nt, Human
ucucauggggaaacugcuaggcag

SEQ ID NO: 1075049 - RNA, 20 nt, Human
ugaaauacguagacauuccu

SEQ ID NO: 1075050 - RNA, 18 nt, Human
ugggcacucaguaaacau

SEQ ID NO: 1075051 - RNA, 18 nt, Human
ugggcagcagccucugcc

SEQ ID NO: 1075052 - RNA, 19 nt, Human
uggggaaacugcuaggcag

SEQ ID NO: 1075053 - RNA, 19 nt, Human
uggggggaggaggcgcggg

SEQ ID NO: 1075054 - RNA, 22 nt, Human
uguacacauguauauauuuaua

SEQ ID NO: 1075055 - RNA, 24 nt, Human
uguacacauguauauauuuauaug

SEQ ID NO: 1075056 - RNA, 28 nt, Human
uguacacauguauauauuuauauguaua

SEQ ID NO: 1075057 - RNA, 23 nt, Human
uguacauagauauauguacacau

SEQ ID NO: 1075058 - RNA, 22 nt, Human
uguauaaaauuaaaguguggaa

SEQ ID NO: 1075059 - RNA, 21 nt, Human
uguauauauauaauaccccuc

SEQ ID NO: 1075060 - RNA, 18 nt, Human
uuauauguauauauauaa

SEQ ID NO: 1075061 - RNA, 18 nt, Human
uuccugucgaagaagcuu

SEQ ID NO: 1075062 - RNA, 21 nt, Human
uuccuuguguguccagcuauc

SEQ ID NO: 1075063 - RNA, 20 nt, Human
ccagaaggcuacauguagua

SEQ ID NO: 1075064 - RNA, 19 nt, Human
cugcaaggaacuuguuccu

SEQ ID NO: 1075065 - RNA, 23 nt, Human
gaggaaggguauaguaaaaauac

SEQ ID NO: 1075066 - RNA, 19 nt, Human
uaaaaauacaagucauaaa

SEQ ID NO: 1075067 - RNA, 20 nt, Human
uaauggugggagagauuucu

SEQ ID NO: 1075068 - RNA, 18 nt, Human
uauaauggugggagagau

SEQ ID NO: 1075069 - RNA, 23 nt, Human
ucugggcacauauaucccagaag

SEQ ID NO: 1075070 - RNA, 19 nt, Human
ucugugguucugagacuca

SEQ ID NO: 1075071 - RNA, 18 nt, Human
ugcuucucccucugggca

SEQ ID NO: 1075072 - RNA, 19 nt, Human
ugcuucucccucugggcac

SEQ ID NO: 1075073 - RNA, 22 nt, Human
aaauacauccaucaaggggcac

SEQ ID NO: 1075074 - RNA, 21 nt, Human
aggaggagcccuggaguggca

SEQ ID NO: 1075075 - RNA, 30 nt, Human
cagcaugagaacagacaaauacauccaucu

SEQ ID NO: 1075076 - RNA, 21 nt, Human
caucaaggggcacucacaggc

SEQ ID NO: 1075077 - RNA, 24 nt, Human
cuccacagccucagcucucuuaaa

SEQ ID NO: 1075078 - RNA, 19 nt, Human
gaggaggagcccuggagug

SEQ ID NO: 1075079 - RNA, 22 nt, Human
gaugaggaggagcccuggagug

SEQ ID NO: 1075080 - RNA, 19 nt, Human
uagcagcaugagaacagac

SEQ ID NO: 1075081 - RNA, 25 nt, Human
ugagaacagacaaauacauccauca

SEQ ID NO: 1075082 - RNA, 27 nt, Human
uggcagggaaauaaggauggaggguga

SEQ ID NO: 1075083 - RNA, 21 nt, Human
cucuaaggagcaggugaaaga

SEQ ID NO: 1075084 - RNA, 18 nt, Human
uaaggagcaggugaaaga

SEQ ID NO: 1075085 - RNA, 19 nt, Human
uaaggagcaggugaaagag

SEQ ID NO: 1075086 - RNA, 18 nt, Human
uggcugggaugcuucuug

SEQ ID NO: 1075087 - RNA, 18 nt, Human
ugggaugcuucuuggaac

SEQ ID NO: 1075088 - RNA, 23 nt, Human
aaaaaacacaggagagaacagga

SEQ ID NO: 1075089 - RNA, 25 nt, Human
aaaaacacaggagagaaccgguacc

SEQ ID NO: 1075090 - RNA, 20 nt, Human
aaacauucuugucaaaaaua

SEQ ID NO: 1075091 - RNA, 20 nt, Human
aaacucaggcugucuuggca

SEQ ID NO: 1075092 - RNA, 25 nt, Human
aagaacagagacauuugucuuccac

SEQ ID NO: 1075093 - RNA, 24 nt, Human
aaugcugaaaaaacacaggagaga

SEQ ID NO: 1075094 - RNA, 20 nt, Human
acaggagagaacaggacaca

SEQ ID NO: 1075095 - RNA, 20 nt, Human
acucuuaaagggccaaagaa

SEQ ID NO: 1075096 - RNA, 20 nt, Human
acugccgcucaucacgcacu

SEQ ID NO: 1075097 - RNA, 22 nt, Human
agaacagagacauuugucuucc

SEQ ID NO: 1075098 - RNA, 22 nt, Human
agagcaagaccuuuuuuagaug

SEQ ID NO: 1075099 - RNA, 23 nt, Human
aucuaccauucuacucucuaccu

SEQ ID NO: 1075100 - RNA, 18 nt, Human
augcugaaaaaacacagg

SEQ ID NO: 1075101 - RNA, 18 nt, Human
cacaccauuaccagccuc

SEQ ID NO: 1075102 - RNA, 19 nt, Human
cacaggagagaacaggaca

SEQ ID NO: 1075103 - RNA, 21 nt, Human
cacaguucuaaagcaugcaaa

SEQ ID NO: 1075104 - RNA, 23 nt, Human
caccuuauuccacuccaaacuca

SEQ ID NO: 1075105 - RNA, 24 nt, Human
caggacacauccauaugcugaccg

SEQ ID NO: 1075106 - RNA, 21 nt, Human
caggcugucuuggcaguggag

SEQ ID NO: 1075107 - RNA, 24 nt, Human
cauuacuaagcuacaagagccaaa

SEQ ID NO: 1075108 - RNA, 23 nt, Human
cccacacaccauuaccagccucu

SEQ ID NO: 1075109 - RNA, 26 nt, Human
ccucuaguuccauccacguugcaugu

SEQ ID NO: 1075110 - RNA, 20 nt, Human
cuaaaguacaacugcuugcc

SEQ ID NO: 1075111 - RNA, 21 nt, Human
cuacucucuaccuccaugaga

SEQ ID NO: 1075112 - RNA, 20 nt, Human
cuauucacaguucuaaagca

SEQ ID NO: 1075113 - RNA, 19 nt, Human
cuuucccaaauacugacug

SEQ ID NO: 1075114 - RNA, 18 nt, Human
ggccaaagaacagagaca

SEQ ID NO: 1075115 - RNA, 22 nt, Human
uaccagccucugguaucuacca

SEQ ID NO: 1075116 - RNA, 20 nt, Human
uagagcuugaacugcuuucc

SEQ ID NO: 1075117 - RNA, 23 nt, Human
uagagcuugaacugcuuucccaa

SEQ ID NO: 1075118 - RNA, 21 nt, Human
uagugaccucuaguuccaucc

SEQ ID NO: 1075119 - RNA, 22 nt, Human
uaucagaucuggugaauauucu

SEQ ID NO: 1075120 - RNA, 21 nt, Human
uaugcugaccgagaagaauuc

SEQ ID NO: 1075121 - RNA, 21 nt, Human
ucaaaaauaacuugcaaaggc

SEQ ID NO: 1075122 - RNA, 18 nt, Human
ucuagccagaacucguca

SEQ ID NO: 1075123 - RNA, 18 nt, Human
ugaaaaaacacaggagag

SEQ ID NO: 1075124 - RNA, 19 nt, Human
ugaagguuucagaaagaug

SEQ ID NO: 1075125 - RNA, 19 nt, Human
ugaccgagaagaauucaca

SEQ ID NO: 1075126 - RNA, 21 nt, Human
uggcaguggaggauacuguuc

SEQ ID NO: 1075127 - RNA, 19 nt, Human
uggugaauauucugcacuu

SEQ ID NO: 1075128 - RNA, 22 nt, Human
uuacuaagcuacaagagccaaa

SEQ ID NO: 1075129 - RNA, 24 nt, Human
uuccaugccuggcuuauuucacuu

SEQ ID NO: 1075130 - RNA, 20 nt, Human
uucucuauauuucuuucaag

SEQ ID NO: 1075131 - RNA, 18 nt, Human
uugcaugucuguagaaga

SEQ ID NO: 1075132 - RNA, 18 nt, Human
aaaauaaauaaaauucca

SEQ ID NO: 1075133 - RNA, 21 nt, Human
aacuucuguaagcuuccuccu

SEQ ID NO: 1075134 - RNA, 20 nt, Human
acuucaguaguuacugguau

SEQ ID NO: 1075135 - RNA, 24 nt, Human
agaguaaugagaaagcaccugggu

SEQ ID NO: 1075136 - RNA, 22 nt, Human
aggaaguccggguagggcagaa

SEQ ID NO: 1075137 - RNA, 18 nt, Human
agucccaauuacacgaac

SEQ ID NO: 1075138 - RNA, 25 nt, Human
ccccaagucccaauuacacgaacuc

SEQ ID NO: 1075139 - RNA, 26 nt, Human
cccugauccccaagucccaauuacac

SEQ ID NO: 1075140 - RNA, 24 nt, Human
ccuccgagagcggccgagaacuaa

SEQ ID NO: 1075141 - RNA, 18 nt, Human
gagaggggucccauggag

SEQ ID NO: 1075142 - RNA, 22 nt, Human
gaguaaugagaaagcaccuggg

SEQ ID NO: 1075143 - RNA, 21 nt, Human
gcagaaucaggcaagccugga

SEQ ID NO: 1075144 - RNA, 21 nt, Human
gggcucccagaucgccauccu

SEQ ID NO: 1075145 - RNA, 21 nt, Human
uagggcagaaucaggcaagcc

SEQ ID NO: 1075146 - RNA, 21 nt, Human
uaucuuucucuucuauaagca

SEQ ID NO: 1075147 - RNA, 19 nt, Human
uaugagaaguuucggcaac

SEQ ID NO: 1075148 - RNA, 19 nt, Human
ucagguuuuagccugugcc

SEQ ID NO: 1075149 - RNA, 18 nt, Human
ucccauggaggggcuccc

SEQ ID NO: 1075150 - RNA, 21 nt, Human
ucccauggaggggcucccaga

SEQ ID NO: 1075151 - RNA, 24 nt, Human
uccccaagucccaauuacacgaac

SEQ ID NO: 1075152 - RNA, 23 nt, Human
ucucccacagacgggauaaggaa

SEQ ID NO: 1075153 - RNA, 22 nt, Human
ucuucuauaagcaaaauaaaau

SEQ ID NO: 1075154 - RNA, 18 nt, Human
aaaauuagcugggcaugg

SEQ ID NO: 1075155 - RNA, 18 nt, Human
aaagugcccccuccaaga

SEQ ID NO: 1075156 - RNA, 19 nt, Human
aacacaguucucaggugaa

SEQ ID NO: 1075157 - RNA, 20 nt, Human
aacauggugaaaaccugucu

SEQ ID NO: 1075158 - RNA, 22 nt, Human
aacuccaagagacaggccaaaa

SEQ ID NO: 1075159 - RNA, 22 nt, Human
aacuguaugcauauaacaggau

SEQ ID NO: 1075160 - RNA, 20 nt, Human
aagaauccacaauacaccuc

SEQ ID NO: 1075161 - RNA, 19 nt, Human
aagagacaggccaaaauca

SEQ ID NO: 1075162 - RNA, 18 nt, Human
aagcaagagagaaaagcc

SEQ ID NO: 1075163 - RNA, 23 nt, Human
aagcaagagagaaaagccgcugg

SEQ ID NO: 1075164 - RNA, 23 nt, Human
aagcaccauggacugaacagcaa

SEQ ID NO: 1075165 - RNA, 18 nt, Human
aagcagaugugcagaaac

SEQ ID NO: 1075166 - RNA, 25 nt, Human
aagccaaccacaaaccccuuccccc

SEQ ID NO: 1075167 - RNA, 24 nt, Human
aagccgcuggggggagccucugga

SEQ ID NO: 1075168 - RNA, 25 nt, Human
aagguggguggaucauuugaggcca

SEQ ID NO: 1075169 - RNA, 22 nt, Human
aagguuugaacggggaaugauc

SEQ ID NO: 1075170 - RNA, 19 nt, Human
acacccauaaccccagcac

SEQ ID NO: 1075171 - RNA, 20 nt, Human
acagagugagacccuguuug

SEQ ID NO: 1075172 - RNA, 19 nt, Human
accacaaaccccuucccca

SEQ ID NO: 1075173 - RNA, 24 nt, Human
accacaagaagggaacugaagaau

SEQ ID NO: 1075174 - RNA, 22 nt, Human
accccagcacuuugggaggcca

SEQ ID NO: 1075175 - RNA, 22 nt, Human
accucaaagaauccacaauaca

SEQ ID NO: 1075176 - RNA, 24 nt, Human
acuguacuccagccuaggcaacag

SEQ ID NO: 1075177 - RNA, 25 nt, Human
acuguacuccagccuaggcaacaga

SEQ ID NO: 1075178 - RNA, 23 nt, Human
agaaaagccgcuggggggagccu

SEQ ID NO: 1075179 - RNA, 18 nt, Human
agaaacuggaauggaggu

SEQ ID NO: 1075180 - RNA, 22 nt, Human
agagaaaaggugaggaccuagg

SEQ ID NO: 1075181 - RNA, 24 nt, Human
agcacuuugggaggccaagguggg

SEQ ID NO: 1075182 - RNA, 24 nt, Human
agccuggccaacauggugaaaacc

SEQ ID NO: 1075183 - RNA, 23 nt, Human
agcugggcaugguaacaugugcc

SEQ ID NO: 1075184 - RNA, 18 nt, Human
aggcaggagaauagcuug

SEQ ID NO: 1075185 - RNA, 24 nt, Human
aggcaggagaauagcuugaacccg

SEQ ID NO: 1075186 - RNA, 20 nt, Human
aggccaagguggguggauca

SEQ ID NO: 1075187 - RNA, 22 nt, Human
aggccaggcgcgguggcucaca

SEQ ID NO: 1075188 - RNA, 24 nt, Human
aggcgaagguugcagggagccgag

SEQ ID NO: 1075189 - RNA, 24 nt, Human
aggcgcgguggcucacacccauaa

SEQ ID NO: 1075190 - RNA, 26 nt, Human
aggcgcgguggcucacacccauaacc

SEQ ID NO: 1075191 - RNA, 27 nt, Human
aggcgcgguggcucacacccauaaccc

SEQ ID NO: 1075192 - RNA, 21 nt, Human
aggcuccaugggccaaaaaca

SEQ ID NO: 1075193 - RNA, 24 nt, Human
aggcugaggcaggagaauagcuug

SEQ ID NO: 1075194 - RNA, 18 nt, Human
agggaccucaaagaaucc

SEQ ID NO: 1075195 - RNA, 23 nt, Human
agguggguggaucauuugaggcc

SEQ ID NO: 1075196 - RNA, 21 nt, Human
aucauuugaggccaugaguuc

SEQ ID NO: 1075197 - RNA, 20 nt, Human
aucuugccacuguacuccag

SEQ ID NO: 1075198 - RNA, 20 nt, Human
auggcaaagaguguggauac

SEQ ID NO: 1075199 - RNA, 22 nt, Human
caaagcaccauggacugaacag

SEQ ID NO: 1075200 - RNA, 19 nt, Human
caacaaggcagcuaguuuc

SEQ ID NO: 1075201 - RNA, 24 nt, Human
caacauggugaaaaccugucucua

SEQ ID NO: 1075202 - RNA, 22 nt, Human
caaccacaaaccccuuccccaa

SEQ ID NO: 1075203 - RNA, 23 nt, Human
caagguggguggaucauuugagg

SEQ ID NO: 1075204 - RNA, 20 nt, Human
cacaaaccccuuccccaaca

SEQ ID NO: 1075205 - RNA, 25 nt, Human
cacaagaagggaacugaagaauccc

SEQ ID NO: 1075206 - RNA, 18 nt, Human
caccugaaaggaguagaa

SEQ ID NO: 1075207 - RNA, 21 nt, Human
cacuacuggucaagagagccc

SEQ ID NO: 1075208 - RNA, 19 nt, Human
cacuguacuccagccuagg

SEQ ID NO: 1075209 - RNA, 21 nt, Human
cacuguacuccagccuaggca

SEQ ID NO: 1075210 - RNA, 22 nt, Human
cacuguacuccagccuaggcaa

SEQ ID NO: 1075211 - RNA, 23 nt, Human
cacuguacuccagccuaggcaac

SEQ ID NO: 1075212 - RNA, 24 nt, Human
cacuguacuccagccuaggcaaca

SEQ ID NO: 1075213 - RNA, 23 nt, Human
cagaauaagcaagagagaaaagc

SEQ ID NO: 1075214 - RNA, 24 nt, Human
cagcacuuugggaggccaaggugg

SEQ ID NO: 1075215 - RNA, 21 nt, Human
cagcaggagaacuccaagaga

SEQ ID NO: 1075216 - RNA, 24 nt, Human
cagcuacucagaaggcugaggcag

SEQ ID NO: 1075217 - RNA, 22 nt, Human
cagucucagcugaagguuugaa

SEQ ID NO: 1075218 - RNA, 19 nt, Human
cauucagggucucuuguuc

SEQ ID NO: 1075219 - RNA, 27 nt, Human
ccaaccacaaaccccuuccccaacauc

SEQ ID NO: 1075220 - RNA, 19 nt, Human
ccacuguacuccagccuag

SEQ ID NO: 1075221 - RNA, 20 nt, Human
ccacuguacuccagccuagg

SEQ ID NO: 1075222 - RNA, 21 nt, Human
ccacuguacuccagccuaggc

SEQ ID NO: 1075223 - RNA, 22 nt, Human
ccacuguacuccagccuaggca

SEQ ID NO: 1075224 - RNA, 24 nt, Human
ccacuguacuccagccuaggcaac

SEQ ID NO: 1075225 - RNA, 20 nt, Human
ccccagcacuuugggaggcc

SEQ ID NO: 1075226 - RNA, 19 nt, Human
cccucugcucccuugggcc

SEQ ID NO: 1075227 - RNA, 18 nt, Human
ccgcuggggggagccucu

SEQ ID NO: 1075228 - RNA, 20 nt, Human
ccuccaagaacuguaccucc

SEQ ID NO: 1075229 - RNA, 23 nt, Human
ccuccaagaacuguaccuccauu

SEQ ID NO: 1075230 - RNA, 19 nt, Human
ccucuccucccucugcucc

SEQ ID NO: 1075231 - RNA, 21 nt, Human
ccucuccucccucugcucccu

SEQ ID NO: 1075232 - RNA, 22 nt, Human
ccucuggaaaguugcuuaacuu

SEQ ID NO: 1075233 - RNA, 22 nt, Human
ccuggccaacauggugaaaacc

SEQ ID NO: 1075234 - RNA, 24 nt, Human
ccuggccaacauggugaaaaccug

SEQ ID NO: 1075235 - RNA, 21 nt, Human
ccuguagucccagcuacucag

SEQ ID NO: 1075236 - RNA, 22 nt, Human
ccugucucuacuaaaaauacaa

SEQ ID NO: 1075237 - RNA, 23 nt, Human
ccuucugccacauucuguugguc

SEQ ID NO: 1075238 - RNA, 24 nt, Human
cgagaccagccuggccaacauggu

SEQ ID NO: 1075239 - RNA, 23 nt, Human
cggaguccacaggcucaggaucu

SEQ ID NO: 1075240 - RNA, 22 nt, Human
cucacacccauaaccccagcac

SEQ ID NO: 1075241 - RNA, 19 nt, Human
cuccaagaacuguaccucc

SEQ ID NO: 1075242 - RNA, 22 nt, Human
cugauucugcucuuauucacau

SEQ ID NO: 1075243 - RNA, 21 nt, Human
cuguuggccaguggucaugcu

SEQ ID NO: 1075244 - RNA, 20 nt, Human
cuucauccauaaaauucagg

SEQ ID NO: 1075245 - RNA, 21 nt, Human
gaacuguaccuccauuuaucu

SEQ ID NO: 1075246 - RNA, 18 nt, Human
gaagcaucccaccugaaa

SEQ ID NO: 1075247 - RNA, 22 nt, Human
gaagggaacugaagaauccccc

SEQ ID NO: 1075248 - RNA, 18 nt, Human
gaggcuagguggcucugc

SEQ ID NO: 1075249 - RNA, 20 nt, Human
gaggggcuaacaagccaugg

SEQ ID NO: 1075250 - RNA, 25 nt, Human
gagucaagcagaugugcagaaacug

SEQ ID NO: 1075251 - RNA, 18 nt, Human
gaucauuugaggccauga

SEQ ID NO: 1075252 - RNA, 24 nt, Human
gaucauuugaggccaugaguucga

SEQ ID NO: 1075253 - RNA, 18 nt, Human
gccaacauggugaaaacc

SEQ ID NO: 1075254 - RNA, 24 nt, Human
gccaacauggugaaaaccugucuc

SEQ ID NO: 1075255 - RNA, 24 nt, Human
gccacuguacuccagccuaggcaa

SEQ ID NO: 1075256 - RNA, 23 nt, Human
gcuagguggcucugcuaaucuug

SEQ ID NO: 1075257 - RNA, 19 nt, Human
gcuugaacccgggaggcga

SEQ ID NO: 1075258 - RNA, 18 nt, Human
ggaagccaaccacaaacc

SEQ ID NO: 1075259 - RNA, 19 nt, Human
ggcaugggaucugggaaag

SEQ ID NO: 1075260 - RNA, 23 nt, Human
ggcaugggaucugggaaagaggc

SEQ ID NO: 1075261 - RNA, 25 nt, Human
gggccuuuggcuagcaaucagagaa

SEQ ID NO: 1075262 - RNA, 20 nt, Human
ggguauugguuucaguugag

SEQ ID NO: 1075263 - RNA, 24 nt, Human
gggucaggaauccaggcacagcug

SEQ ID NO: 1075264 - RNA, 21 nt, Human
guacucacagcuaccaccugg

SEQ ID NO: 1075265 - RNA, 23 nt, Human
guacuccagccuaggcaacagag

SEQ ID NO: 1075266 - RNA, 18 nt, Human
gucauuggcuucuuucuc

SEQ ID NO: 1075267 - RNA, 24 nt, Human
guggaucauuugaggccaugaguu

SEQ ID NO: 1075268 - RNA, 21 nt, Human
guuuauucacaggacagcagg

SEQ ID NO: 1075269 - RNA, 19 nt, Human
uaaaauggaauauuugggu

SEQ ID NO: 1075270 - RNA, 19 nt, Human
uaacaaauuuccccaaaac

SEQ ID NO: 1075271 - RNA, 19 nt, Human
uaacagggaccucaaagaa

SEQ ID NO: 1075272 - RNA, 22 nt, Human
uacuccagccuaggcaacagag

SEQ ID NO: 1075273 - RNA, 23 nt, Human
uacuccagccuaggcaacagagu

SEQ ID NO: 1075274 - RNA, 24 nt, Human
uacuccagccuaggcaacagagug

SEQ ID NO: 1075275 - RNA, 22 nt, Human
uagcugggcaugguaacaugug

SEQ ID NO: 1075276 - RNA, 21 nt, Human
uaggcaacagagugagacccu

SEQ ID NO: 1075277 - RNA, 24 nt, Human
uagguggcucugcuaaucuuggug

SEQ ID NO: 1075278 - RNA, 22 nt, Human
uauaacaggaugcuaaaaugga

SEQ ID NO: 1075279 - RNA, 23 nt, Human
ucaaauaccugacauuuccaacc

SEQ ID NO: 1075280 - RNA, 20 nt, Human
ucacacccauaaccccagca

SEQ ID NO: 1075281 - RNA, 21 nt, Human
ucacauagucugucauuccgc

SEQ ID NO: 1075282 - RNA, 21 nt, Human
uccaagagacaggccaaaauc

SEQ ID NO: 1075283 - RNA, 19 nt, Human
uccacaauacaccucaaag

SEQ ID NO: 1075284 - RNA, 19 nt, Human
uccacagaguaacucacaa

SEQ ID NO: 1075285 - RNA, 22 nt, Human
uccacaggcucaggaucucuca

SEQ ID NO: 1075286 - RNA, 23 nt, Human
uccagccuaggcaacagagugag

SEQ ID NO: 1075287 - RNA, 22 nt, Human
uccauaaagaaacgggucucca

SEQ ID NO: 1075288 - RNA, 19 nt, Human
uccaucagugcaguaaauc

SEQ ID NO: 1075289 - RNA, 18 nt, Human
ucccacaacaacguaaaa

SEQ ID NO: 1075290 - RNA, 20 nt, Human
ucccucugcucccuugggcc

SEQ ID NO: 1075291 - RNA, 21 nt, Human
ucccucugcucccuugggccu

SEQ ID NO: 1075292 - RNA, 23 nt, Human
ucccucugcucccuugggccucc

SEQ ID NO: 1075293 - RNA, 22 nt, Human
ucucccacaacaacguaaaagu

SEQ ID NO: 1075294 - RNA, 21 nt, Human
ucucuacuaaaaauacaaaaa

SEQ ID NO: 1075295 - RNA, 19 nt, Human
ucuuccaagcucaugagug

SEQ ID NO: 1075296 - RNA, 19 nt, Human
ugaaaggaguagaaagagg

SEQ ID NO: 1075297 - RNA, 18 nt, Human
ugaaauguucaaauaccu

SEQ ID NO: 1075298 - RNA, 21 nt, Human
ugaagaauccccaccugaaca

SEQ ID NO: 1075299 - RNA, 24 nt, Human
ugagaggggcuaacaagccauggc

SEQ ID NO: 1075300 - RNA, 24 nt, Human
ugaggcaggagaauagcuugaacc

SEQ ID NO: 1075301 - RNA, 25 nt, Human
ugaggcaggagaauagcuugaaccc

SEQ ID NO: 1075302 - RNA, 25 nt, Human
ugcaguaaaucucccacaacaacgu

SEQ ID NO: 1075303 - RNA, 24 nt, Human
ugcagucucagcugaagguuugaa

SEQ ID NO: 1075304 - RNA, 24 nt, Human
ugcauaacaaauuuccccaaaacu

SEQ ID NO: 1075305 - RNA, 22 nt, Human
ugcauauaacaggaugcuaaaa

SEQ ID NO: 1075306 - RNA, 19 nt, Human
ugccucuaggucauuggcu

SEQ ID NO: 1075307 - RNA, 23 nt, Human
ugccuguagucccagcuacucag

SEQ ID NO: 1075308 - RNA, 24 nt, Human
ugccuguagucccagcuacucaga

SEQ ID NO: 1075309 - RNA, 24 nt, Human
uggaauauuuggguauugguuuca

SEQ ID NO: 1075310 - RNA, 21 nt, Human
uggaauggaggugucuuagaa

SEQ ID NO: 1075311 - RNA, 24 nt, Human
uggaucauuugaggccaugaguuc

SEQ ID NO: 1075312 - RNA, 21 nt, Human
uggcaugggaucugggaaaga

SEQ ID NO: 1075313 - RNA, 24 nt, Human
uggcaugggaucugggaaagaggc

SEQ ID NO: 1075314 - RNA, 24 nt, Human
uggccaacauggugaaaaccuguc

SEQ ID NO: 1075315 - RNA, 23 nt, Human
uggcucugcuaaucuuggugggg

SEQ ID NO: 1075316 - RNA, 24 nt, Human
ugggaaauagacuucaacccuuga

SEQ ID NO: 1075317 - RNA, 23 nt, Human
ugggaggccaagguggguggauc

SEQ ID NO: 1075318 - RNA, 24 nt, Human
ugggaggccaagguggguggauca

SEQ ID NO: 1075319 - RNA, 20 nt, Human
ugggcaguucugaucaccug

SEQ ID NO: 1075320 - RNA, 24 nt, Human
ugguaacaugugccuguaguccca

SEQ ID NO: 1075321 - RNA, 20 nt, Human
ugucauuccgcccacagguu

SEQ ID NO: 1075322 - RNA, 19 nt, Human
ugugccuguaacaagcaau

SEQ ID NO: 1075323 - RNA, 18 nt, Human
uuagaagcaucccaccug

SEQ ID NO: 1075324 - RNA, 19 nt, Human
uuagcugggcaugguaaca

SEQ ID NO: 1075325 - RNA, 24 nt, Human
uuagcugggcaugguaacaugugc

SEQ ID NO: 1075326 - RNA, 21 nt, Human
uucagaauaagcaagagagaa

SEQ ID NO: 1075327 - RNA, 24 nt, Human
uucauccauaaagaaacgggucuc

SEQ ID NO: 1075328 - RNA, 22 nt, Human
uugcagggagccgagaucuugc

SEQ ID NO: 1075329 - RNA, 21 nt, Human
uuggcuagcaaucagagaaaa

SEQ ID NO: 1075330 - RNA, 23 nt, Human
uuuaaauaccugccaggcagaga

SEQ ID NO: 1075331 - RNA, 20 nt, Human
uuugccucuaggucauuggc

SEQ ID NO: 1075332 - RNA, 18 nt, Human
accugucagcagcugccu

SEQ ID NO: 1075333 - RNA, 22 nt, Human
agccauaacccucgaggaccca

SEQ ID NO: 1075334 - RNA, 22 nt, Human
aggacugaccagggacaagcca

SEQ ID NO: 1075335 - RNA, 19 nt, Human
aggcaacacaguccggggc

SEQ ID NO: 1075336 - RNA, 20 nt, Human
aggcucccagaugacagccc

SEQ ID NO: 1075337 - RNA, 19 nt, Human
aggggcagagaggcgaggc

SEQ ID NO: 1075338 - RNA, 20 nt, Human
caccuaggcaacacaguccg

SEQ ID NO: 1075339 - RNA, 23 nt, Human
caggcucccagaugacagccccu

SEQ ID NO: 1075340 - RNA, 21 nt, Human
caggggcacaggcucccagau

SEQ ID NO: 1075341 - RNA, 19 nt, Human
ccagguggguaggaacugg

SEQ ID NO: 1075342 - RNA, 18 nt, Human
cugaaugagcaccuaggc

SEQ ID NO: 1075343 - RNA, 21 nt, Human
gaccagggacaagccauaacc

SEQ ID NO: 1075344 - RNA, 21 nt, Human
gguaggguuaaaaaugggcac

SEQ ID NO: 1075345 - RNA, 18 nt, Human
uaggaacugggcagggag

SEQ ID NO: 1075346 - RNA, 21 nt, Human
ucagcagcugccuccugggac

SEQ ID NO: 1075347 - RNA, 23 nt, Human
ugccuccugggacaaccaccccc

SEQ ID NO: 1075348 - RNA, 18 nt, Human
ugccugggugccacacag

SEQ ID NO: 1075349 - RNA, 20 nt, Human
ugggacaaccacccccuuaa

SEQ ID NO: 1075350 - RNA, 18 nt, Human
uguggaacauguuuugcc

SEQ ID NO: 1075351 - RNA, 19 nt, Human
uugccugggugccacacag

SEQ ID NO: 1075352 - RNA, 24 nt, Human
aaaaaaaaauacagugcagagaga

SEQ ID NO: 1075353 - RNA, 19 nt, Human
aaaaaaacacacacagaaa

SEQ ID NO: 1075354 - RNA, 20 nt, Human
aaaaaacacacacagaaacu

SEQ ID NO: 1075355 - RNA, 20 nt, Human
aaaaacagcaaccacagaua

SEQ ID NO: 1075356 - RNA, 19 nt, Human
aaaaagaagaggggaaaag

SEQ ID NO: 1075357 - RNA, 21 nt, Human
aaaaagaagaggggaaaagaa

SEQ ID NO: 1075358 - RNA, 18 nt, Human
aaaaagcuaccaagggaa

SEQ ID NO: 1075359 - RNA, 21 nt, Human
aaaacaacagccaucaaaaga

SEQ ID NO: 1075360 - RNA, 21 nt, Human
aaaagaaaacagcagaagaaa

SEQ ID NO: 1075361 - RNA, 23 nt, Human
aaaccagaaaccccgggaagguu

SEQ ID NO: 1075362 - RNA, 24 nt, Human
aacaacagccaucaaaagaacuaa

SEQ ID NO: 1075363 - RNA, 21 nt, Human
aacaaugguuaaauccagagc

SEQ ID NO: 1075364 - RNA, 22 nt, Human
aacagcagaagaaaagaugaaa

SEQ ID NO: 1075365 - RNA, 20 nt, Human
aagaagaggggaaaagaaaa

SEQ ID NO: 1075366 - RNA, 22 nt, Human
aagacugaggcuagagacccau

SEQ ID NO: 1075367 - RNA, 21 nt, Human
aaguuucucagcuggacucgg

SEQ ID NO: 1075368 - RNA, 24 nt, Human
acaaaauuuucuguucagcuaaag

SEQ ID NO: 1075369 - RNA, 18 nt, Human
acuaaaaaaacacacaca

SEQ ID NO: 1075370 - RNA, 25 nt, Human
acuaaauacagagggcuuuaaccca

SEQ ID NO: 1075371 - RNA, 21 nt, Human
acuccaaaaacagcaaccaca

SEQ ID NO: 1075372 - RNA, 22 nt, Human
acugaagccuccauuucugcca

SEQ ID NO: 1075373 - RNA, 25 nt, Human
agaaaaaaaaauacagugcagagag

SEQ ID NO: 1075374 - RNA, 27 nt, Human
agaaaaaaaaauacagugcagagagaa

SEQ ID NO: 1075375 - RNA, 22 nt, Human
agaaaacagcagaagaaaagau

SEQ ID NO: 1075376 - RNA, 18 nt, Human
agacagcagcaccuggag

SEQ ID NO: 1075377 - RNA, 21 nt, Human
agcaauucagggaaagaggug

SEQ ID NO: 1075378 - RNA, 18 nt, Human
agccaucaaaagaacuaa

SEQ ID NO: 1075379 - RNA, 21 nt, Human
auacacaggccaaagaaacac

SEQ ID NO: 1075380 - RNA, 19 nt, Human
auagaaguugguucaugug

SEQ ID NO: 1075381 - RNA, 24 nt, Human
auaggaauaccauugcagucuuuu

SEQ ID NO: 1075382 - RNA, 23 nt, Human
auucagacugauacacaggccaa

SEQ ID NO: 1075383 - RNA, 22 nt, Human
auuucauucagacugauacaca

SEQ ID NO: 1075384 - RNA, 23 nt, Human
caaaauuuucuguucagcuaaag

SEQ ID NO: 1075385 - RNA, 24 nt, Human
caaagaaacacauaggaauaccaa

SEQ ID NO: 1075386 - RNA, 21 nt, Human
caaaugaaguccaggcccuac

SEQ ID NO: 1075387 - RNA, 26 nt, Human
caacgacuaugaccucauucugcaaa

SEQ ID NO: 1075388 - RNA, 19 nt, Human
caagacugaggcuagagac

SEQ ID NO: 1075389 - RNA, 22 nt, Human
caagacugaggcuagagaccca

SEQ ID NO: 1075390 - RNA, 23 nt, Human
caagggaauguuggacauugagu

SEQ ID NO: 1075391 - RNA, 25 nt, Human
caagguaagcccaucuuggucuccu

SEQ ID NO: 1075392 - RNA, 28 nt, Human
cacaggccaaagaaacacauaggaauac

SEQ ID NO: 1075393 - RNA, 20 nt, Human
caccuggagcugggagaugg

SEQ ID NO: 1075394 - RNA, 22 nt, Human
cacuggugcagaagugagaaga

SEQ ID NO: 1075395 - RNA, 25 nt, Human
cagaagugagaagaacgagacuucc

SEQ ID NO: 1075396 - RNA, 20 nt, Human
cagacagcagcaccuggagc

SEQ ID NO: 1075397 - RNA, 21 nt, Human
cagcagaagacacaagagaca

SEQ ID NO: 1075398 - RNA, 21 nt, Human
cagccaucaaaagaacuaaaa

SEQ ID NO: 1075399 - RNA, 20 nt, Human
cagcuggacucggcuggcca

SEQ ID NO: 1075400 - RNA, 22 nt, Human
caggccaaagaaacacauagga

SEQ ID NO: 1075401 - RNA, 19 nt, Human
caggcugaaaaaccagaaa

SEQ ID NO: 1075402 - RNA, 25 nt, Human
cauuuuauucuuccauuaauuucca

SEQ ID NO: 1075403 - RNA, 21 nt, Human
ccaaaaacagcaaccacagau

SEQ ID NO: 1075404 - RNA, 22 nt, Human
ccaaaaacagcaaccacagaua

SEQ ID NO: 1075405 - RNA, 22 nt, Human
ccaaagaaacacauaggaauac

SEQ ID NO: 1075406 - RNA, 23 nt, Human
ccaggcccuacuuuuuuguuucc

SEQ ID NO: 1075407 - RNA, 25 nt, Human
ccccaucaugguauuuacaaugcaa

SEQ ID NO: 1075408 - RNA, 19 nt, Human
cccgugaugacuuuggacc

SEQ ID NO: 1075409 - RNA, 18 nt, Human
cggcuggccagugcggga

SEQ ID NO: 1075410 - RNA, 18 nt, Human
cggggcuuagagagaagu

SEQ ID NO: 1075411 - RNA, 19 nt, Human
cguacaggcugaaaaacca

SEQ ID NO: 1075412 - RNA, 23 nt, Human
cuaugucacuggguuauuugaau

SEQ ID NO: 1075413 - RNA, 20 nt, Human
cugauacacaggccaaagaa

SEQ ID NO: 1075414 - RNA, 20 nt, Human
cuguucagcuaaaggggaaa

SEQ ID NO: 1075415 - RNA, 21 nt, Human
cuuuucccaauauuacucaau

SEQ ID NO: 1075416 - RNA, 22 nt, Human
gaaaaagaagaggggaaaagaa

SEQ ID NO: 1075417 - RNA, 20 nt, Human
gaaaagaaaacagcagaaga

SEQ ID NO: 1075418 - RNA, 23 nt, Human
gaaaagaaaacagcagaagaaaa

SEQ ID NO: 1075419 - RNA, 22 nt, Human
gacugaggcuagagacccauuc

SEQ ID NO: 1075420 - RNA, 18 nt, Human
gagaaaaagcuaccaagg

SEQ ID NO: 1075421 - RNA, 21 nt, Human
gagccucaguuuucuccucug

SEQ ID NO: 1075422 - RNA, 24 nt, Human
gaggaauccuguuuuuugacuucg

SEQ ID NO: 1075423 - RNA, 25 nt, Human
gaggggaaaagaaaacagcagaaga

SEQ ID NO: 1075424 - RNA, 21 nt, Human
gcaaaacaacagccaucaaaa

SEQ ID NO: 1075425 - RNA, 18 nt, Human
ggugcagaagugagaaga

SEQ ID NO: 1075426 - RNA, 22 nt, Human
gucaacucccccuccugagccu

SEQ ID NO: 1075427 - RNA, 22 nt, Human
guccuucucuuuucccaauauu

SEQ ID NO: 1075428 - RNA, 21 nt, Human
gucuuuuuggcuuggcucguu

SEQ ID NO: 1075429 - RNA, 21 nt, Human
gugauucuagcacuccuuacc

SEQ ID NO: 1075430 - RNA, 21 nt, Human
uaaaaaaacacacacagaaac

SEQ ID NO: 1075431 - RNA, 24 nt, Human
uaaugcccuugcugcagacagcag

SEQ ID NO: 1075432 - RNA, 22 nt, Human
uaauuugugugacugaagccuc

SEQ ID NO: 1075433 - RNA, 18 nt, Human
uacaggcugaaaaaccag

SEQ ID NO: 1075434 - RNA, 24 nt, Human
uacaggcugaaaaaccagaaaccc

SEQ ID NO: 1075435 - RNA, 19 nt, Human
uagcacaggaccccggaga

SEQ ID NO: 1075436 - RNA, 21 nt, Human
uagcauaaguuucucagcugg

SEQ ID NO: 1075437 - RNA, 23 nt, Human
uaggaauaccauugcagucuuuu

SEQ ID NO: 1075438 - RNA, 20 nt, Human
uaggacaagccccauuuuac

SEQ ID NO: 1075439 - RNA, 21 nt, Human
ucaacucccccuccugagccu

SEQ ID NO: 1075440 - RNA, 22 nt, Human
ucagcuaaaggggaaagugggg

SEQ ID NO: 1075441 - RNA, 18 nt, Human
uccaaaaacagcaaccac

SEQ ID NO: 1075442 - RNA, 20 nt, Human
uccugagccucaguuuucuc

SEQ ID NO: 1075443 - RNA, 20 nt, Human
ugacagcaacuugaggucuc

SEQ ID NO: 1075444 - RNA, 20 nt, Human
ugaccucauucugcaaauga

SEQ ID NO: 1075445 - RNA, 23 nt, Human
ugaccucauucugcaaaugaagu

SEQ ID NO: 1075446 - RNA, 20 nt, Human
ugacugugggacucaacgac

SEQ ID NO: 1075447 - RNA, 19 nt, Human
ugagaagaacgagacuuca

SEQ ID NO: 1075448 - RNA, 22 nt, Human
ugagaagaacgagacuucaaua

SEQ ID NO: 1075449 - RNA, 19 nt, Human
ugagacaaaauuuucuguu

SEQ ID NO: 1075450 - RNA, 22 nt, Human
ugagaccauuuugaacauuugu

SEQ ID NO: 1075451 - RNA, 20 nt, Human
ugagccucaguuuucuccuc

SEQ ID NO: 1075452 - RNA, 25 nt, Human
ugcaaaacaacagccaucaaaagaa

SEQ ID NO: 1075453 - RNA, 18 nt, Human
ugcagaagugagaagaac

SEQ ID NO: 1075454 - RNA, 18 nt, Human
ugcagacagcagcaccug

SEQ ID NO: 1075455 - RNA, 23 nt, Human
ugcagagagaaguucuuauagca

SEQ ID NO: 1075456 - RNA, 19 nt, Human
ugcgggaggaggcauguuu

SEQ ID NO: 1075457 - RNA, 23 nt, Human
ugcugcagacagcagcaccugga

SEQ ID NO: 1075458 - RNA, 19 nt, Human
uggccagaaaaaaaaaaga

SEQ ID NO: 1075459 - RNA, 20 nt, Human
uggcucguuagaagaugagg

SEQ ID NO: 1075460 - RNA, 21 nt, Human
ugggagaaaaaaaaauacagu

SEQ ID NO: 1075461 - RNA, 22 nt, Human
ugggagaaaaaaaaauacagug

SEQ ID NO: 1075462 - RNA, 18 nt, Human
uuacuccaaaaacagcaa

SEQ ID NO: 1075463 - RNA, 19 nt, Human
uuggcuuggcucguuagaa

SEQ ID NO: 1075464 - RNA, 23 nt, Human
uuuacaaugcaaaacaacagcca

SEQ ID NO: 1075465 - RNA, 18 nt, Human
uuucaaggaguugugacu

SEQ ID NO: 1075466 - RNA, 24 nt, Human
uuucccaauauuacucaauaaaua

SEQ ID NO: 1075467 - RNA, 24 nt, Human
uuuccuggagauaaccaguguuuu

SEQ ID NO: 1075468 - RNA, 21 nt, Human
uuucucagcuggacucggcug

SEQ ID NO: 1075469 - RNA, 24 nt, Human
acuggcccuggguugucaggaucu

SEQ ID NO: 1075470 - RNA, 23 nt, Human
acuguaaaggacaucaauaagaa

SEQ ID NO: 1075471 - RNA, 23 nt, Human
agaguggaacuuagcgauugagg

SEQ ID NO: 1075472 - RNA, 24 nt, Human
aggcuuccgagacacucacuggcc

SEQ ID NO: 1075473 - RNA, 20 nt, Human
aucaauaagaacagacagga

SEQ ID NO: 1075474 - RNA, 20 nt, Human
auccccggcucggaucccgg

SEQ ID NO: 1075475 - RNA, 23 nt, Human
auucuggucagcugccgggagcg

SEQ ID NO: 1075476 - RNA, 21 nt, Human
auugaggcgcagccugcagaa

SEQ ID NO: 1075477 - RNA, 22 nt, Human
cacucuugccccaucagcucca

SEQ ID NO: 1075478 - RNA, 20 nt, Human
cacugcacgacuggcgcggc

SEQ ID NO: 1075479 - RNA, 27 nt, Human
cagcagccuccaagguucccaaagccc

SEQ ID NO: 1075480 - RNA, 24 nt, Human
cagccuccaagguucccaaagccc

SEQ ID NO: 1075481 - RNA, 22 nt, Human
caggagacccuccaagagauuc

SEQ ID NO: 1075482 - RNA, 19 nt, Human
ccaaagccaccaaggcgcc

SEQ ID NO: 1075483 - RNA, 23 nt, Human
ccaaagccaccaaggcgccgcgc

SEQ ID NO: 1075484 - RNA, 20 nt, Human
ccaaagcccacgauucaggc

SEQ ID NO: 1075485 - RNA, 21 nt, Human
ccaaggcgccgcgccaagucc

SEQ ID NO: 1075486 - RNA, 19 nt, Human
cccagcaacgaagcucccc

SEQ ID NO: 1075487 - RNA, 18 nt, Human
cccaggagacccuccaag

SEQ ID NO: 1075488 - RNA, 19 nt, Human
ccccgggccgggucuccgc

SEQ ID NO: 1075489 - RNA, 25 nt, Human
ccccucacaggcuuccgagacacuc

SEQ ID NO: 1075490 - RNA, 21 nt, Human
cccgggccgggucuccgcccc

SEQ ID NO: 1075491 - RNA, 21 nt, Human
ccgcgacccgccagggccgcc

SEQ ID NO: 1075492 - RNA, 21 nt, Human
ccgcgaguuccuggagcagca

SEQ ID NO: 1075493 - RNA, 19 nt, Human
ccggccgcgacccgccagg

SEQ ID NO: 1075494 - RNA, 18 nt, Human
ccggcucccggccgaccg

SEQ ID NO: 1075495 - RNA, 18 nt, Human
ccgggccguggacugugg

SEQ ID NO: 1075496 - RNA, 23 nt, Human
ccuagccacaaccuuauuccgac

SEQ ID NO: 1075497 - RNA, 22 nt, Human
cgcagccugcagaaagcugcac

SEQ ID NO: 1075498 - RNA, 24 nt, Human
cgccggaguccgcgaauaccgccc

SEQ ID NO: 1075499 - RNA, 22 nt, Human
cgggucuuccucgcagcagccu

SEQ ID NO: 1075500 - RNA, 22 nt, Human
cguggaagagcaaccaaagcca

SEQ ID NO: 1075501 - RNA, 23 nt, Human
cucacaggcuuccgagacacuca

SEQ ID NO: 1075502 - RNA, 22 nt, Human
cucagcuuuccguucucccucu

SEQ ID NO: 1075503 - RNA, 18 nt, Human
gagcagcagccuccaagg

SEQ ID NO: 1075504 - RNA, 21 nt, Human
gaguuccuggagcagcagccu

SEQ ID NO: 1075505 - RNA, 25 nt, Human
gcagcagccuccaagguucccaaag

SEQ ID NO: 1075506 - RNA, 23 nt, Human
gcgauugaggcgcagccugcaga

SEQ ID NO: 1075507 - RNA, 24 nt, Human
gcucccagcaacgaagcuccccgg

SEQ ID NO: 1075508 - RNA, 19 nt, Human
gcuuccgagacacucacug

SEQ ID NO: 1075509 - RNA, 18 nt, Human
ggcuucuggcgcuuccuu

SEQ ID NO: 1075510 - RNA, 18 nt, Human
gggccguggacuguggca

SEQ ID NO: 1075511 - RNA, 22 nt, Human
uaaaacuacagaagucucacug

SEQ ID NO: 1075512 - RNA, 19 nt, Human
uaagaggaccgauggggga

SEQ ID NO: 1075513 - RNA, 19 nt, Human
uacaauuacuccacaggcu

SEQ ID NO: 1075514 - RNA, 26 nt, Human
ucacugcacgacuggcgcggccgagg

SEQ ID NO: 1075515 - RNA, 21 nt, Human
uccaagagauucuggucagcu

SEQ ID NO: 1075516 - RNA, 23 nt, Human
ucccaaagcccacgauucaggcg

SEQ ID NO: 1075517 - RNA, 24 nt, Human
uccccggagcagucaccucagcuu

SEQ ID NO: 1075518 - RNA, 23 nt, Human
uccccggcucggaucccggccgc

SEQ ID NO: 1075519 - RNA, 23 nt, Human
ucccggccgaccgcgaguuccug

SEQ ID NO: 1075520 - RNA, 24 nt, Human
ucuuccuagccacaaccuuauucc

SEQ ID NO: 1075521 - RNA, 24 nt, Human
ugauccacaugccaggaguagcgc

SEQ ID NO: 1075522 - RNA, 25 nt, Human
ugggggaagggacagcugaccgggu

SEQ ID NO: 1075523 - RNA, 23 nt, Human
uguaaaggacaucaauaagaaca

SEQ ID NO: 1075524 - RNA, 23 nt, Human
uuccuggagcagcagccuccaag

SEQ ID NO: 1075525 - RNA, 20 nt, Human
agugcucuuguacauuuccc

SEQ ID NO: 1075526 - RNA, 26 nt, Human
caucacaaaauguauaguugucucuu

SEQ ID NO: 1075527 - RNA, 18 nt, Human
gcuggacuucuucaguag

SEQ ID NO: 1075528 - RNA, 19 nt, Human
ggcuggacuucuucaguag

SEQ ID NO: 1075529 - RNA, 25 nt, Human
ucaguagugcucuuguacauuuccc

SEQ ID NO: 1075530 - RNA, 22 nt, Human
aacucauggaccguucuuccuc

SEQ ID NO: 1075531 - RNA, 21 nt, Human
aaucgccacacugacuuccac

SEQ ID NO: 1075532 - RNA, 21 nt, Human
agagggaaggauggcaacuca

SEQ ID NO: 1075533 - RNA, 20 nt, Human
aggcaggaagagggaaggau

SEQ ID NO: 1075534 - RNA, 19 nt, Human
aucguuguuggacauuugg

SEQ ID NO: 1075535 - RNA, 20 nt, Human
auggcaacucauggaccguu

SEQ ID NO: 1075536 - RNA, 21 nt, Human
auggcugcauaguauuccaug

SEQ ID NO: 1075537 - RNA, 23 nt, Human
augguauuucuaguucuacaucu

SEQ ID NO: 1075538 - RNA, 23 nt, Human
auucugcuccuucuucagugggc

SEQ ID NO: 1075539 - RNA, 19 nt, Human
auuucuaguucuacaucuc

SEQ ID NO: 1075540 - RNA, 22 nt, Human
caacaguguaaaaguguuccua

SEQ ID NO: 1075541 - RNA, 19 nt, Human
caagccagagcagagugag

SEQ ID NO: 1075542 - RNA, 20 nt, Human
cagugggcucuaccucuucu

SEQ ID NO: 1075543 - RNA, 19 nt, Human
caugucccuacaaaggaca

SEQ ID NO: 1075544 - RNA, 24 nt, Human
ccacacugacuuccacaaugguug

SEQ ID NO: 1075545 - RNA, 18 nt, Human
ccacauuuucuuaaucca

SEQ ID NO: 1075546 - RNA, 21 nt, Human
cccaguaaugggauggcuggg

SEQ ID NO: 1075547 - RNA, 19 nt, Human
ccucaggaaaggaauugcu

SEQ ID NO: 1075548 - RNA, 21 nt, Human
ccucaggaaaggaauugcuuc

SEQ ID NO: 1075549 - RNA, 24 nt, Human
cuuccacaaugguugaacuaguuu

SEQ ID NO: 1075550 - RNA, 21 nt, Human
ggacaugaacucaucauuuuu

SEQ ID NO: 1075551 - RNA, 19 nt, Human
ggcugcauaguauuccaug

SEQ ID NO: 1075552 - RNA, 18 nt, Human
gggcagcguuucuuaucu

SEQ ID NO: 1075553 - RNA, 19 nt, Human
uagcagcaugauuuauaau

SEQ ID NO: 1075554 - RNA, 20 nt, Human
uauaugugccacauuuucuu

SEQ ID NO: 1075555 - RNA, 23 nt, Human
ucaccuagcuucauccauguccc

SEQ ID NO: 1075556 - RNA, 19 nt, Human
ucauuguccaacccuguca

SEQ ID NO: 1075557 - RNA, 22 nt, Human
uccaacccugucacuuauuagu

SEQ ID NO: 1075558 - RNA, 24 nt, Human
uccacaaugguugaacuaguuuac

SEQ ID NO: 1075559 - RNA, 19 nt, Human
uccagcacuuuuccggaag

SEQ ID NO: 1075560 - RNA, 22 nt, Human
ucccagucuucucauguuugag

SEQ ID NO: 1075561 - RNA, 20 nt, Human
ucccuacaaaggacaugaac

SEQ ID NO: 1075562 - RNA, 23 nt, Human
ucuuugcuguugugaauagugcc

SEQ ID NO: 1075563 - RNA, 26 nt, Human
ugccacaauaaacauacguguguaug

SEQ ID NO: 1075564 - RNA, 20 nt, Human
ugcuucaccuagcuucaucc

SEQ ID NO: 1075565 - RNA, 21 nt, Human
ugcuucaccuagcuucaucca

SEQ ID NO: 1075566 - RNA, 20 nt, Human
uggaccguucuuccucaacu

SEQ ID NO: 1075567 - RNA, 20 nt, Human
ugucccagucuucucauguu

SEQ ID NO: 1075568 - RNA, 24 nt, Human
uguugugaauagugccacaauaaa

SEQ ID NO: 1075569 - RNA, 20 nt, Human
uuauucugcuccuucuucaa

SEQ ID NO: 1075570 - RNA, 22 nt, Human
uuauucugcuccuucuucagug

SEQ ID NO: 1075571 - RNA, 20 nt, Human
uuccaugguguauaugugcc

SEQ ID NO: 1075572 - RNA, 26 nt, Human
uuccaugguguauaugugccacauuu

SEQ ID NO: 1075573 - RNA, 22 nt, Human
uucccaaacagcaaauggaggc

SEQ ID NO: 1075574 - RNA, 23 nt, Human
uuuacagucccaccaacagugua

SEQ ID NO: 1075575 - RNA, 18 nt, Human
uuucuaguucuacaucuc

SEQ ID NO: 1075576 - RNA, 22 nt, Human
uuuuauggcugcauaguauucc

SEQ ID NO: 1075577 - RNA, 18 nt, Human
aaccuauaagaaagauaa

SEQ ID NO: 1075578 - RNA, 21 nt, Human
aagaaggcaagaaagacagac

SEQ ID NO: 1075579 - RNA, 19 nt, Human
aagggaggaggguuagagc

SEQ ID NO: 1075580 - RNA, 19 nt, Human
aagucucuggcuuugcuca

SEQ ID NO: 1075581 - RNA, 24 nt, Human
aaucacuugaguccagguguucaa

SEQ ID NO: 1075582 - RNA, 22 nt, Human
accuucaucagaggccaccagu

SEQ ID NO: 1075583 - RNA, 21 nt, Human
acuccagccugagugauggag

SEQ ID NO: 1075584 - RNA, 24 nt, Human
acuccagccugagugauggaguga

SEQ ID NO: 1075585 - RNA, 18 nt, Human
acuguacuccagccugag

SEQ ID NO: 1075586 - RNA, 24 nt, Human
acuguacuccagccugagugaugg

SEQ ID NO: 1075587 - RNA, 27 nt, Human
agagagaaaaccugguucaagcuuagu

SEQ ID NO: 1075588 - RNA, 22 nt, Human
agaggccaccaaccuauaagaa

SEQ ID NO: 1075589 - RNA, 24 nt, Human
agccugggcaacagaaugaggcuc

SEQ ID NO: 1075590 - RNA, 18 nt, Human
aggcaggagaaucacuug

SEQ ID NO: 1075591 - RNA, 23 nt, Human
aggcaggagaaucacuugagucc

SEQ ID NO: 1075592 - RNA, 24 nt, Human
aggcaggagaaucacuugagucca

SEQ ID NO: 1075593 - RNA, 24 nt, Human
aggcugaggcaggagaaucacuug

SEQ ID NO: 1075594 - RNA, 20 nt, Human
agggaugagaauuccauugu

SEQ ID NO: 1075595 - RNA, 23 nt, Human
agguagacaaugagucucaacca

SEQ ID NO: 1075596 - RNA, 24 nt, Human
agguguucaaggcugcagugagcc

SEQ ID NO: 1075597 - RNA, 19 nt, Human
aucacaguuguuuucccua

SEQ ID NO: 1075598 - RNA, 24 nt, Human
aucucagcacuguacuccagccug

SEQ ID NO: 1075599 - RNA, 24 nt, Human
auugcacuccagccugggcaacag

SEQ ID NO: 1075600 - RNA, 19 nt, Human
caagaaagacagacagcaa

SEQ ID NO: 1075601 - RNA, 23 nt, Human
caagaagaaaauguggucacagu

SEQ ID NO: 1075602 - RNA, 19 nt, Human
cacaaucugcaugguuccu

SEQ ID NO: 1075603 - RNA, 20 nt, Human
cacuccagccugggcaacag

SEQ ID NO: 1075604 - RNA, 19 nt, Human
cacuguacuccagccugag

SEQ ID NO: 1075605 - RNA, 19 nt, Human
cacuguacuccagccugag

SEQ ID NO: 1075606 - RNA, 21 nt, Human
cacuguacuccagccugagug

SEQ ID NO: 1075607 - RNA, 22 nt, Human
cacuguacuccagccugaguga

SEQ ID NO: 1075608 - RNA, 22 nt, Human
cacuguacuccagccugaguga

SEQ ID NO: 1075609 - RNA, 25 nt, Human
cacuguacuccagccugagugaugg

SEQ ID NO: 1075610 - RNA, 24 nt, Human
caggaggcugaggcaggagaauca

SEQ ID NO: 1075611 - RNA, 18 nt, Human
cauugcacuccagccugg

SEQ ID NO: 1075612 - RNA, 19 nt, Human
cauugcacuccagccuggg

SEQ ID NO: 1075613 - RNA, 21 nt, Human
cauugcacuccagccugggca

SEQ ID NO: 1075614 - RNA, 23 nt, Human
cauugcacuccagccugggcaac

SEQ ID NO: 1075615 - RNA, 24 nt, Human
cauugcacuccagccugggcaaca

SEQ ID NO: 1075616 - RNA, 20 nt, Human
ccauugcacuccagccuggg

SEQ ID NO: 1075617 - RNA, 21 nt, Human
ccauugcacuccagccugggc

SEQ ID NO: 1075618 - RNA, 22 nt, Human
ccauugcacuccagccugggca

SEQ ID NO: 1075619 - RNA, 23 nt, Human
ccauugcacuccagccugggcaa

SEQ ID NO: 1075620 - RNA, 24 nt, Human
ccauugcacuccagccugggcaac

SEQ ID NO: 1075621 - RNA, 21 nt, Human
cccucagugguguuacugaau

SEQ ID NO: 1075622 - RNA, 22 nt, Human
cccuugaaagugcagcuuagug

SEQ ID NO: 1075623 - RNA, 21 nt, Human
ccucucaaguuuacuuggccc

SEQ ID NO: 1075624 - RNA, 23 nt, Human
ccucuggaaaccaugcaaagaga

SEQ ID NO: 1075625 - RNA, 18 nt, Human
cgugcuaugacuuaaaug

SEQ ID NO: 1075626 - RNA, 22 nt, Human
cuaaaaggaaaaugugcagaaa

SEQ ID NO: 1075627 - RNA, 18 nt, Human
cuaacuuuucuuacuccc

SEQ ID NO: 1075628 - RNA, 18 nt, Human
cuccaucaaugccguauc

SEQ ID NO: 1075629 - RNA, 21 nt, Human
cucccuaacuuuucuuacucc

SEQ ID NO: 1075630 - RNA, 22 nt, Human
cucucaaguuuacuuggcccga

SEQ ID NO: 1075631 - RNA, 20 nt, Human
cucuguagucucugcuacuc

SEQ ID NO: 1075632 - RNA, 23 nt, Human
cugcagugagccuugaucucagc

SEQ ID NO: 1075633 - RNA, 19 nt, Human
gaaaauguacuucucugac

SEQ ID NO: 1075634 - RNA, 18 nt, Human
gaaagaugugggauguug

SEQ ID NO: 1075635 - RNA, 20 nt, Human
gcacuguacuccagccugag

SEQ ID NO: 1075636 - RNA, 21 nt, Human
gcacuguacuccagccugagu

SEQ ID NO: 1075637 - RNA, 22 nt, Human
gcaggagaaucacuugagucca

SEQ ID NO: 1075638 - RNA, 18 nt, Human
gccauugcacuccagccu

SEQ ID NO: 1075639 - RNA, 22 nt, Human
gccauugcacuccagccugggc

SEQ ID NO: 1075640 - RNA, 24 nt, Human
gccauugcacuccagccugggcaa

SEQ ID NO: 1075641 - RNA, 22 nt, Human
gcuacucaggaggcugaggcag

SEQ ID NO: 1075642 - RNA, 22 nt, Human
ggaaaaugugcagaaagaaggc

SEQ ID NO: 1075643 - RNA, 24 nt, Human
guacuccagccugagugauggagu

SEQ ID NO: 1075644 - RNA, 24 nt, Human
guccagguguucaaggcugcagug

SEQ ID NO: 1075645 - RNA, 20 nt, Human
uaagucucuggcuuugcuca

SEQ ID NO: 1075646 - RNA, 18 nt, Human
uacaaccagagagaaaac

SEQ ID NO: 1075647 - RNA, 25 nt, Human
uaccuugcccccuugaaagugcagc

SEQ ID NO: 1075648 - RNA, 28 nt, Human
uaccuugcccccuugaaagugcagcuua

SEQ ID NO: 1075649 - RNA, 21 nt, Human
uacuacaaccagagagaaaac

SEQ ID NO: 1075650 - RNA, 24 nt, Human
uacuacaaccagagagaaaaccug

SEQ ID NO: 1075651 - RNA, 22 nt, Human
uacuccagccugagugauggag

SEQ ID NO: 1075652 - RNA, 24 nt, Human
uacuccagccugagugauggagug

SEQ ID NO: 1075653 - RNA, 23 nt, Human
uacuucucugacucuugggcaca

SEQ ID NO: 1075654 - RNA, 20 nt, Human
uagaguucauuggcuugaaa

SEQ ID NO: 1075655 - RNA, 21 nt, Human
uagcuucaguuugcugaguga

SEQ ID NO: 1075656 - RNA, 23 nt, Human
uaguagggaugagaauuccauug

SEQ ID NO: 1075657 - RNA, 25 nt, Human
uauuaguauucaaaccauuuaaaau

SEQ ID NO: 1075658 - RNA, 24 nt, Human
uauuuuguccauuuucuguaucca

SEQ ID NO: 1075659 - RNA, 23 nt, Human
uccagccugagugauggagugag

SEQ ID NO: 1075660 - RNA, 24 nt, Human
uccagccugagugauggagugaga

SEQ ID NO: 1075661 - RNA, 18 nt, Human
ucccaggaucacaguugu

SEQ ID NO: 1075662 - RNA, 21 nt, Human
uccugcugaugaauuuagagg

SEQ ID NO: 1075663 - RNA, 18 nt, Human
ucucuggcuuugcucauc

SEQ ID NO: 1075664 - RNA, 18 nt, Human
ucuugcagcacuuaauac

SEQ ID NO: 1075665 - RNA, 20 nt, Human
ugaggcaggagaaucacuug

SEQ ID NO: 1075666 - RNA, 24 nt, Human
ugaggcaggagaaucacuugaguc

SEQ ID NO: 1075667 - RNA, 25 nt, Human
ugaggcaggagaaucacuugagucc

SEQ ID NO: 1075668 - RNA, 19 nt, Human
ugcaaagagaccuagcuuc

SEQ ID NO: 1075669 - RNA, 22 nt, Human
ugcacuccagccugggcaacag

SEQ ID NO: 1075670 - RNA, 24 nt, Human
ugcagcacuuaauacaugcacgua

SEQ ID NO: 1075671 - RNA, 18 nt, Human
uggcuuugcucauccugu

SEQ ID NO: 1075672 - RNA, 21 nt, Human
uucaaggaagugaaauauguc

SEQ ID NO: 1075673 - RNA, 21 nt, Human
uucauugucuccauuucuuua

SEQ ID NO: 1075674 - RNA, 23 nt, Human
uuuauggguaacucaaccuuucu

SEQ ID NO: 1075675 - RNA, 21 nt, Human
uuuauuagcucccaggaucac

SEQ ID NO: 1075676 - RNA, 19 nt, Human
uuuggguggauacgaaaug

SEQ ID NO: 1075677 - RNA, 18 nt, Human
uuuguggcuuuuucacuu

SEQ ID NO: 1075678 - RNA, 21 nt, Human
uuuugcucccucagugguguu

SEQ ID NO: 1075679 - RNA, 20 nt, Human
guccuuuauuuauuuuuuuu

SEQ ID NO: 1075680 - RNA, 20 nt, Human
aaagcacccacuagauacca

SEQ ID NO: 1075681 - RNA, 21 nt, Human
aaagcacccacuagauaccag

SEQ ID NO: 1075682 - RNA, 18 nt, Human
aacaaauaugcacaaagc

SEQ ID NO: 1075683 - RNA, 24 nt, Human
aacaaauaugcacaaagcacccac

SEQ ID NO: 1075684 - RNA, 19 nt, Human
aagcugccauuccuauuca

SEQ ID NO: 1075685 - RNA, 22 nt, Human
acaaagcacccacuagauacca

SEQ ID NO: 1075686 - RNA, 22 nt, Human
caaauaugcacaaagcacccac

SEQ ID NO: 1075687 - RNA, 25 nt, Human
cauucaacaaauaugcacaaagcac

SEQ ID NO: 1075688 - RNA, 27 nt, Human
ccauuccuauucaguguaguuuucuua

SEQ ID NO: 1075689 - RNA, 21 nt, Human
cuugcuggcaaaauuuauaug

SEQ ID NO: 1075690 - RNA, 20 nt, Human
ggauacaugggcaaacuucc

SEQ ID NO: 1075691 - RNA, 23 nt, Human
uauuagaaauuauucacugucau

SEQ ID NO: 1075692 - RNA, 24 nt, Human
uauuagaaauuauucacugucauu

SEQ ID NO: 1075693 - RNA, 20 nt, Human
ucaacaaauaugcacaaagc

SEQ ID NO: 1075694 - RNA, 24 nt, Human
agguucccucgugccagcugcccc

SEQ ID NO: 1075695 - RNA, 20 nt, Human
ggagggagguaggccagggc

SEQ ID NO: 1075696 - RNA, 18 nt, Human
ucaccucgccgcggccgc

SEQ ID NO: 1075697 - RNA, 22 nt, Human
ucccaggaucccaggggaaacc

SEQ ID NO: 1075698 - RNA, 21 nt, Human
uuggugcgaacgcggcgggcc

SEQ ID NO: 1075699 - RNA, 20 nt, Human
aaaugucucucuaauccauc

SEQ ID NO: 1075700 - RNA, 20 nt, Human
aaccuguuuuuccagcccua

SEQ ID NO: 1075701 - RNA, 21 nt, Human
aaccuguuuuuccagcccuaa

SEQ ID NO: 1075702 - RNA, 19 nt, Human
aagaugaauuauccauugu

SEQ ID NO: 1075703 - RNA, 22 nt, Human
aauuucucucuugcagucaguu

SEQ ID NO: 1075704 - RNA, 28 nt, Human
acugaacugaacaaaucuauuccugauc

SEQ ID NO: 1075705 - RNA, 21 nt, Human
auccauuguaauccauuuggu

SEQ ID NO: 1075706 - RNA, 23 nt, Human
aucuacucucuucccuauuuuaa

SEQ ID NO: 1075707 - RNA, 21 nt, Human
augcacuuucaguuucaugcc

SEQ ID NO: 1075708 - RNA, 22 nt, Human
caaaaaccucuacaucuuucga

SEQ ID NO: 1075709 - RNA, 19 nt, Human
caaccuguuuuuccagccc

SEQ ID NO: 1075710 - RNA, 18 nt, Human
cacaauuuaaauccaucc

SEQ ID NO: 1075711 - RNA, 21 nt, Human
cacaauuuaaauccauccucu

SEQ ID NO: 1075712 - RNA, 19 nt, Human
cacacaauuuaaauccauc

SEQ ID NO: 1075713 - RNA, 18 nt, Human
cauugcauuugagacccu

SEQ ID NO: 1075714 - RNA, 22 nt, Human
ccaaucuugguaagcagccaag

SEQ ID NO: 1075715 - RNA, 19 nt, Human
cccaaaagaugaauuaucc

SEQ ID NO: 1075716 - RNA, 22 nt, Human
cuaauccaucuacucucuuccc

SEQ ID NO: 1075717 - RNA, 25 nt, Human
cuagucucuaugcuuuggucucaca

SEQ ID NO: 1075718 - RNA, 23 nt, Human
cuuucaguuucaugcccugguuc

SEQ ID NO: 1075719 - RNA, 22 nt, Human
gacccuuacuuaucuguuucca

SEQ ID NO: 1075720 - RNA, 24 nt, Human
gaucgccucuuaucuagucucuau

SEQ ID NO: 1075721 - RNA, 23 nt, Human
ggaaaaaaaaaaaaaacauccuu

SEQ ID NO: 1075722 - RNA, 23 nt, Human
uaaccucuauuccuuauguucuc

SEQ ID NO: 1075723 - RNA, 18 nt, Human
uaacucaugcccacaccc

SEQ ID NO: 1075724 - RNA, 18 nt, Human
uaagcagccaagcagaaa

SEQ ID NO: 1075725 - RNA, 24 nt, Human
uaaguaaaucaaacagcuaaauuu

SEQ ID NO: 1075726 - RNA, 22 nt, Human
uaauccaucuacucucuucccu

SEQ ID NO: 1075727 - RNA, 20 nt, Human
uagucucuaugcuuuggucu

SEQ ID NO: 1075728 - RNA, 24 nt, Human
uaucuaguaacaggaucuauugau

SEQ ID NO: 1075729 - RNA, 21 nt, Human
uaucuagucucuaugcuuugg

SEQ ID NO: 1075730 - RNA, 25 nt, Human
ucaaacagcuaaauuucucucuugc

SEQ ID NO: 1075731 - RNA, 20 nt, Human
ucaguuauuauuacaauuaa

SEQ ID NO: 1075732 - RNA, 22 nt, Human
ucuuaaaugucucucuaaucca

SEQ ID NO: 1075733 - RNA, 18 nt, Human
ucuuucgagcccauguga

SEQ ID NO: 1075734 - RNA, 20 nt, Human
ugacuuuuccacucuuccuc

SEQ ID NO: 1075735 - RNA, 22 nt, Human
ugauuuucucuguaauauuuuu

SEQ ID NO: 1075736 - RNA, 24 nt, Human
ugguaagcagccaagcagaaaucu

SEQ ID NO: 1075737 - RNA, 23 nt, Human
uguaauaaacagggagaacaaac

SEQ ID NO: 1075738 - RNA, 20 nt, Human
uguucauuuugauucacaua

SEQ ID NO: 1075739 - RNA, 20 nt, Human
uuggucucacacaauuuaaa

SEQ ID NO: 1075740 - RNA, 27 nt, Human
uuuccagcccuaacucaugcccacacc

SEQ ID NO: 1075741 - RNA, 23 nt, Human
uuuuuggcugccuacucauugcc

SEQ ID NO: 1075742 - RNA, 24 nt, Human
aaaaaggacucucccaguuauuuc

SEQ ID NO: 1075743 - RNA, 19 nt, Human
aaagugcugggauuacagg

SEQ ID NO: 1075744 - RNA, 24 nt, Human
aaagugcugggauuacaggaguga

SEQ ID NO: 1075745 - RNA, 24 nt, Human
aaagugcugggauuacaggcguga

SEQ ID NO: 1075746 - RNA, 25 nt, Human
aagaaaaccagucagaaaaaaggac

SEQ ID NO: 1075747 - RNA, 18 nt, Human
aagugcugggauuacagg

SEQ ID NO: 1075748 - RNA, 22 nt, Human
aagugcugggauuacaggaguc

SEQ ID NO: 1075749 - RNA, 26 nt, Human
aagugcugggauuacaggagugagcc

SEQ ID NO: 1075750 - RNA, 19 nt, Human
aagugcugggauuacaggc

SEQ ID NO: 1075751 - RNA, 19 nt, Human
aagugcugggauuacaggc

SEQ ID NO: 1075752 - RNA, 26 nt, Human
aagugcugggauuacaggcgugagcc

SEQ ID NO: 1075753 - RNA, 27 nt, Human
acaagagaaaagccaaguauccacagg

SEQ ID NO: 1075754 - RNA, 18 nt, Human
acaggguuucaccguguu

SEQ ID NO: 1075755 - RNA, 19 nt, Human
acaggguuucaccguguua

SEQ ID NO: 1075756 - RNA, 20 nt, Human
acaggguuucaccguguuag

SEQ ID NO: 1075757 - RNA, 24 nt, Human
acaggguuucaccguguuagccag

SEQ ID NO: 1075758 - RNA, 18 nt, Human
acaggguuucacuauguu

SEQ ID NO: 1075759 - RNA, 21 nt, Human
acaggguuucacuauguuggc

SEQ ID NO: 1075760 - RNA, 22 nt, Human
acaggguuucacuauguuggcc

SEQ ID NO: 1075761 - RNA, 24 nt, Human
acauuguccccugggcuggagugc

SEQ ID NO: 1075762 - RNA, 22 nt, Human
accacugcacuccagccugggc

SEQ ID NO: 1075763 - RNA, 18 nt, Human
acccaggaacaugcccca

SEQ ID NO: 1075764 - RNA, 22 nt, Human
acucucuccauuuucaucuucc

SEQ ID NO: 1075765 - RNA, 24 nt, Human
acugcacuccagccugggcgacag

SEQ ID NO: 1075766 - RNA, 26 nt, Human
acugcacuccagccugggcgacagag

SEQ ID NO: 1075767 - RNA, 18 nt, Human
agaaaaaaggacucuccc

SEQ ID NO: 1075768 - RNA, 24 nt, Human
agaaaaaaggacucucccaguuau

SEQ ID NO: 1075769 - RNA, 18 nt, Human
agacaggguuucaccgug

SEQ ID NO: 1075770 - RNA, 22 nt, Human
agagaaaagccaaguauccaca

SEQ ID NO: 1075771 - RNA, 19 nt, Human
agauuacaggugugcgcca

SEQ ID NO: 1075772 - RNA, 22 nt, Human
agccacagacuuaaggcugccc

SEQ ID NO: 1075773 - RNA, 23 nt, Human
agccugggcgacagagcaagacu

SEQ ID NO: 1075774 - RNA, 24 nt, Human
agccugggcgacagagcaagacuu

SEQ ID NO: 1075775 - RNA, 26 nt, Human
aggcaggagggagcagccauuuccag

SEQ ID NO: 1075776 - RNA, 23 nt, Human
aggcaggguguguuugugggggg

SEQ ID NO: 1075777 - RNA, 18 nt, Human
agggacugaagaaaacca

SEQ ID NO: 1075778 - RNA, 22 nt, Human
agggagcagccauuuccaggcu

SEQ ID NO: 1075779 - RNA, 24 nt, Human
agggauucuccugccucagccucc

SEQ ID NO: 1075780 - RNA, 24 nt, Human
aggugauccgcccaccucagccuc

SEQ ID NO: 1075781 - RNA, 18 nt, Human
aguagcugagauuacagg

SEQ ID NO: 1075782 - RNA, 23 nt, Human
aguagcugagauuacaggugugc

SEQ ID NO: 1075783 - RNA, 25 nt, Human
aguauccacaggauacuuggauagc

SEQ ID NO: 1075784 - RNA, 23 nt, Human
agucagaaaaaaggacucuccca

SEQ ID NO: 1075785 - RNA, 23 nt, Human
agugauccgcccgccucagccuc

SEQ ID NO: 1075786 - RNA, 18 nt, Human
agugcugggauuacaggc

SEQ ID NO: 1075787 - RNA, 18 nt, Human
aucuuccuccaaccuguu

SEQ ID NO: 1075788 - RNA, 21 nt, Human
auuacaggugugcgccaccau

SEQ ID NO: 1075789 - RNA, 24 nt, Human
auuguccccugggcuggagugcaa

SEQ ID NO: 1075790 - RNA, 21 nt, Human
auuucaucaugggugcccugg

SEQ ID NO: 1075791 - RNA, 24 nt, Human
caaagugcugggauuacaggagug

SEQ ID NO: 1075792 - RNA, 24 nt, Human
caaagugcugggauuacaggcgug

SEQ ID NO: 1075793 - RNA, 23 nt, Human
caagagaaaagccaaguauccac

SEQ ID NO: 1075794 - RNA, 22 nt, Human
caagagaaaagccaaguauccc

SEQ ID NO: 1075795 - RNA, 19 nt, Human
caagcuccugaccucaggu

SEQ ID NO: 1075796 - RNA, 22 nt, Human
caagggauucuccugccucagc

SEQ ID NO: 1075797 - RNA, 24 nt, Human
cacacccaggaacaugccccaaac

SEQ ID NO: 1075798 - RNA, 18 nt, Human
caccguguuagccaggau

SEQ ID NO: 1075799 - RNA, 24 nt, Human
caccguguuagccaggauggucuc

SEQ ID NO: 1075800 - RNA, 24 nt, Human
caccucagccucccaaagugcugg

SEQ ID NO: 1075801 - RNA, 24 nt, Human
cacuauguuggccgggaugaucuc

SEQ ID NO: 1075802 - RNA, 23 nt, Human
cacuccagccugggcgacagagc

SEQ ID NO: 1075803 - RNA, 26 nt, Human
cacucuacucucuccauuuucaucuu

SEQ ID NO: 1075804 - RNA, 19 nt, Human
cacugcacuccagccuggg

SEQ ID NO: 1075805 - RNA, 20 nt, Human
cacugcacuccagccugggc

SEQ ID NO: 1075806 - RNA, 22 nt, Human
cacugcacuccagccugggcga

SEQ ID NO: 1075807 - RNA, 23 nt, Human
cacugcacuccagccugggcgac

SEQ ID NO: 1075808 - RNA, 24 nt, Human
cacugcacuccagccugggcgaca

SEQ ID NO: 1075809 - RNA, 27 nt, Human
cacugcacuccagccugggcgacagag

SEQ ID NO: 1075810 - RNA, 19 nt, Human
cagaaaaaaggacucuccc

SEQ ID NO: 1075811 - RNA, 21 nt, Human
caggccaucugguuucuucag

SEQ ID NO: 1075812 - RNA, 24 nt, Human
caggguuucaccguguuagccagg

SEQ ID NO: 1075813 - RNA, 24 nt, Human
caggguuucacuauguuggccggg

SEQ ID NO: 1075814 - RNA, 21 nt, Human
cauugcaaccucugccuccug

SEQ ID NO: 1075815 - RNA, 21 nt, Human
ccaaaccagugagccaagguc

SEQ ID NO: 1075816 - RNA, 19 nt, Human
ccaaagugcugggauuaca

SEQ ID NO: 1075817 - RNA, 20 nt, Human
ccaaagugcugggauuacag

SEQ ID NO: 1075818 - RNA, 20 nt, Human
ccaaagugcugggauuacag

SEQ ID NO: 1075819 - RNA, 21 nt, Human
ccaaagugcugggauuacagg

SEQ ID NO: 1075820 - RNA, 24 nt, Human
ccaaagugcugggauuacaggagu

SEQ ID NO: 1075821 - RNA, 22 nt, Human
ccaaagugcugggauuacaggc

SEQ ID NO: 1075822 - RNA, 22 nt, Human
ccaaagugcugggauuacaggc

SEQ ID NO: 1075823 - RNA, 24 nt, Human
ccaaagugcugggauuacaggcgu

SEQ ID NO: 1075824 - RNA, 20 nt, Human
ccacugcacuccagccuggg

SEQ ID NO: 1075825 - RNA, 21 nt, Human
ccacugcacuccagccugggc

SEQ ID NO: 1075826 - RNA, 21 nt, Human
ccacugcacuccagccugggc

SEQ ID NO: 1075827 - RNA, 23 nt, Human
ccacugcacuccagccugggcga

SEQ ID NO: 1075828 - RNA, 23 nt, Human
ccacugcacuccagccugggcga

SEQ ID NO: 1075829 - RNA, 24 nt, Human
ccacugcacuccagccugggcgac

SEQ ID NO: 1075830 - RNA, 20 nt, Human
ccaggcucugagugucagaa

SEQ ID NO: 1075831 - RNA, 19 nt, Human
cccacaagagaaaagccaa

SEQ ID NO: 1075832 - RNA, 18 nt, Human
cccaggaacaugccccaa

SEQ ID NO: 1075833 - RNA, 23 nt, Human
cccaggaacaugccccaaaccag

SEQ ID NO: 1075834 - RNA, 19 nt, Human
cccagggccccacagaugc

SEQ ID NO: 1075835 - RNA, 19 nt, Human
cccgaguagcugagauuac

SEQ ID NO: 1075836 - RNA, 24 nt, Human
cccgaguagcugagauuacaggug

SEQ ID NO: 1075837 - RNA, 18 nt, Human
cccugggcuggagugcaa

SEQ ID NO: 1075838 - RNA, 19 nt, Human
cccugggcuggagugcaau

SEQ ID NO: 1075839 - RNA, 21 nt, Human
ccgaguagcugagauuacagg

SEQ ID NO: 1075840 - RNA, 24 nt, Human
ccgaguagcugagauuacaggugu

SEQ ID NO: 1075841 - RNA, 26 nt, Human
ccgcccaccucagccucccaaagugc

SEQ ID NO: 1075842 - RNA, 26 nt, Human
ccgcccgccucagccucccaaagugc

SEQ ID NO: 1075843 - RNA, 24 nt, Human
ccgccucagccucccaaagugcug

SEQ ID NO: 1075844 - RNA, 19 nt, Human
ccucacagacacacccagg

SEQ ID NO: 1075845 - RNA, 20 nt, Human
ccuccaaccuguuauauuuu

SEQ ID NO: 1075846 - RNA, 24 nt, Human
ccuccuggguucaagggauucucc

SEQ ID NO: 1075847 - RNA, 19 nt, Human
ccucugccuccuggguuca

SEQ ID NO: 1075848 - RNA, 20 nt, Human
ccugaccuagugauccgccc

SEQ ID NO: 1075849 - RNA, 24 nt, Human
ccugaccucaggugauccgcccac

SEQ ID NO: 1075850 - RNA, 23 nt, Human
ccugccucagccucccgaguagc

SEQ ID NO: 1075851 - RNA, 21 nt, Human
ccugggcgacagagcaagacu

SEQ ID NO: 1075852 - RNA, 18 nt, Human
ccuggguucaagggauuc

SEQ ID NO: 1075853 - RNA, 23 nt, Human
ccuggguucaagggauucuccug

SEQ ID NO: 1075854 - RNA, 24 nt, Human
ccugguaacaacacccggacaccu

SEQ ID NO: 1075855 - RNA, 21 nt, Human
cgcaccacugcacuccagccu

SEQ ID NO: 1075856 - RNA, 24 nt, Human
cgccucagccucccaaagugcugg

SEQ ID NO: 1075857 - RNA, 27 nt, Human
cuagugauccgcccgccucagccuccc

SEQ ID NO: 1075858 - RNA, 20 nt, Human
cucacagacacacccaggaa

SEQ ID NO: 1075859 - RNA, 24 nt, Human
cucauugcaaccucugccuccugg

SEQ ID NO: 1075860 - RNA, 24 nt, Human
cuccugaccuagugauccgcccgc

SEQ ID NO: 1075861 - RNA, 21 nt, Human
cuccuggguucaagggauucu

SEQ ID NO: 1075862 - RNA, 25 nt, Human
cucucuccauuuucaucuuccucca

SEQ ID NO: 1075863 - RNA, 23 nt, Human
cugccucagccucccgaguagcu

SEQ ID NO: 1075864 - RNA, 23 nt, Human
cugggggaggcaggguguguuug

SEQ ID NO: 1075865 - RNA, 19 nt, Human
cuugucgugugcucuggag

SEQ ID NO: 1075866 - RNA, 21 nt, Human
gaaaagccaaguauccacagg

SEQ ID NO: 1075867 - RNA, 21 nt, Human
gaacaugccccaaaccaguga

SEQ ID NO: 1075868 - RNA, 24 nt, Human
gaacaugccccaaaccagugagcc

SEQ ID NO: 1075869 - RNA, 24 nt, Human
gaccuagugauccgcccgccucag

SEQ ID NO: 1075870 - RNA, 24 nt, Human
gaccucaggugauccgcccaccuc

SEQ ID NO: 1075871 - RNA, 23 nt, Human
gagucucucccagggccccacag

SEQ ID NO: 1075872 - RNA, 18 nt, Human
gauuacaggcgugagcca

SEQ ID NO: 1075873 - RNA, 19 nt, Human
gauuacaggcgugagccac

SEQ ID NO: 1075874 - RNA, 22 nt, Human
gauuacaggcgugagccacugc

SEQ ID NO: 1075875 - RNA, 18 nt, Human
gauuacaggugugcgcca

SEQ ID NO: 1075876 - RNA, 24 nt, Human
gauuacaggugugcgccaccaugc

SEQ ID NO: 1075877 - RNA, 22 nt, Human
gcaaccucugccuccuggguuc

SEQ ID NO: 1075878 - RNA, 20 nt, Human
gcaccacugcacuccagccu

SEQ ID NO: 1075879 - RNA, 24 nt, Human
gcacuccagccugggcgacagagc

SEQ ID NO: 1075880 - RNA, 18 nt, Human
gcccggccaggcauaggg

SEQ ID NO: 1075881 - RNA, 18 nt, Human
gccuguacagggugggac

SEQ ID NO: 1075882 - RNA, 21 nt, Human
gcucauugcaaccucugccuc

SEQ ID NO: 1075883 - RNA, 18 nt, Human
ggaacaugccccaaacca

SEQ ID NO: 1075884 - RNA, 20 nt, Human
ggacaccuggacuacuacaa

SEQ ID NO: 1075885 - RNA, 18 nt, Human
ggacugggggaggcaggg

SEQ ID NO: 1075886 - RNA, 24 nt, Human
gggagcagccauuuccaggcucug

SEQ ID NO: 1075887 - RNA, 24 nt, Human
gggauucuccugccucagccuccc

SEQ ID NO: 1075888 - RNA, 22 nt, Human
ggguuucacuauguuggccggg

SEQ ID NO: 1075889 - RNA, 24 nt, Human
gucgcaccacugcacuccagccug

SEQ ID NO: 1075890 - RNA, 24 nt, Human
gugauccgcccaccucagccuccc

SEQ ID NO: 1075891 - RNA, 24 nt, Human
gugauccgcccgccucagccuccc

SEQ ID NO: 1075892 - RNA, 19 nt, Human
gugcuuuggcugauucgac

SEQ ID NO: 1075893 - RNA, 21 nt, Human
gugugcgccaccaugcccagc

SEQ ID NO: 1075894 - RNA, 22 nt, Human
uaaagacaggguuucaccgugu

SEQ ID NO: 1075895 - RNA, 24 nt, Human
uaauuuuucguauuuuuauuagag

SEQ ID NO: 1075896 - RNA, 25 nt, Human
uaauuuuucguauuuuuauuagaga

SEQ ID NO: 1075897 - RNA, 19 nt, Human
uacaggcgugagccacugc

SEQ ID NO: 1075898 - RNA, 23 nt, Human
uacaggcgugagccacugcgccc

SEQ ID NO: 1075899 - RNA, 21 nt, Human
uacagggugggacucuaggug

SEQ ID NO: 1075900 - RNA, 21 nt, Human
uagagacaggguuucacuaug

SEQ ID NO: 1075901 - RNA, 22 nt, Human
uagagacaggguuucacuaugu

SEQ ID NO: 1075902 - RNA, 27 nt, Human
uaggguuucuaaggacugggggaggca

SEQ ID NO: 1075903 - RNA, 21 nt, Human
uaguaaagacaggguuucacc

SEQ ID NO: 1075904 - RNA, 24 nt, Human
uaguaaagacaggguuucaccgug

SEQ ID NO: 1075905 - RNA, 26 nt, Human
uaguaaagacaggguuucaccguguu

SEQ ID NO: 1075906 - RNA, 24 nt, Human
uauuagagacaggguuucacuaug

SEQ ID NO: 1075907 - RNA, 19 nt, Human
ucaaacccugugauggguu

SEQ ID NO: 1075908 - RNA, 24 nt, Human
ucacauuguccccugggcuggagu

SEQ ID NO: 1075909 - RNA, 24 nt, Human
ucaccguguuagccaggauggucu

SEQ ID NO: 1075910 - RNA, 18 nt, Human
ucagccucccaaagugcu

SEQ ID NO: 1075911 - RNA, 19 nt, Human
ucagugauuugccaggguc

SEQ ID NO: 1075912 - RNA, 23 nt, Human
ucagugauuugccagggucucuc

SEQ ID NO: 1075913 - RNA, 24 nt, Human
ucauugcaaccucugccuccuggg

SEQ ID NO: 1075914 - RNA, 25 nt, Human
ucauugcaaccucugccuccugggu

SEQ ID NO: 1075915 - RNA, 19 nt, Human
uccaaugagauugugaggu

SEQ ID NO: 1075916 - RNA, 24 nt, Human
uccagccugggcgacagagcaaga

SEQ ID NO: 1075917 - RNA, 22 nt, Human
uccaguucgugcccacuugugg

SEQ ID NO: 1075918 - RNA, 18 nt, Human
ucccaaagugcugggauu

SEQ ID NO: 1075919 - RNA, 23 nt, Human
ucccaaagugcugggauuacagg

SEQ ID NO: 1075920 - RNA, 24 nt, Human
ucccaaagugcugggauuacaggc

SEQ ID NO: 1075921 - RNA, 22 nt, Human
uccccugggcuggagugcaauc

SEQ ID NO: 1075922 - RNA, 23 nt, Human
ucccgaguagcugagauuacagg

SEQ ID NO: 1075923 - RNA, 24 nt, Human
ucccgaguagcugagauuacaggu

SEQ ID NO: 1075924 - RNA, 21 nt, Human
uccgcccaccucagccuccca

SEQ ID NO: 1075925 - RNA, 21 nt, Human
uccgcccgccucagccuccca

SEQ ID NO: 1075926 - RNA, 19 nt, Human
uccucaauucccuucccca

SEQ ID NO: 1075927 - RNA, 22 nt, Human
uccucacagacacacccaggaa

SEQ ID NO: 1075928 - RNA, 21 nt, Human
uccuggguucaagggauucuc

SEQ ID NO: 1075929 - RNA, 24 nt, Human
uccuggguucaagggauucuccug

SEQ ID NO: 1075930 - RNA, 23 nt, Human
ucgcaccacugcacuccagccug

SEQ ID NO: 1075931 - RNA, 21 nt, Human
ucgccaguuccaguucgugcc

SEQ ID NO: 1075932 - RNA, 24 nt, Human
ucuccugccucagccucccgagua

SEQ ID NO: 1075933 - RNA, 19 nt, Human
ucucucccagggccccaca

SEQ ID NO: 1075934 - RNA, 27 nt, Human
ucuucagcuuuuggacuuauaucagug

SEQ ID NO: 1075935 - RNA, 25 nt, Human
ucuuccucuugucgugugcucugga

SEQ ID NO: 1075936 - RNA, 23 nt, Human
ugaagaaaaccagucagaaaaaa

SEQ ID NO: 1075937 - RNA, 23 nt, Human
ugaccuagugauccgcccgccuc

SEQ ID NO: 1075938 - RNA, 18 nt, Human
ugaccucaggugauccgc

SEQ ID NO: 1075939 - RNA, 21 nt, Human
ugaccucaggugauccgccca

SEQ ID NO: 1075940 - RNA, 24 nt, Human
ugaccucaggugauccgcccaccu

SEQ ID NO: 1075941 - RNA, 18 nt, Human
ugagauuacaggugugcg

SEQ ID NO: 1075942 - RNA, 21 nt, Human
ugagauuacaggugugcgcca

SEQ ID NO: 1075943 - RNA, 22 nt, Human
ugagauuacaggugugcgccac

SEQ ID NO: 1075944 - RNA, 24 nt, Human
ugagauuacaggugugcgccacca

SEQ ID NO: 1075945 - RNA, 25 nt, Human
ugagauuacaggugugcgccaccau

SEQ ID NO: 1075946 - RNA, 23 nt, Human
ugagauugugagguaaaguugcu

SEQ ID NO: 1075947 - RNA, 23 nt, Human
ugagccaaggucgcaccacugca

SEQ ID NO: 1075948 - RNA, 23 nt, Human
ugagucucucccagggccccaca

SEQ ID NO: 1075949 - RNA, 23 nt, Human
ugagugucagaauggucccagcu

SEQ ID NO: 1075950 - RNA, 24 nt, Human
ugauccgcccaccucagccuccca

SEQ ID NO: 1075951 - RNA, 20 nt, Human
ugcaaccucugccuccuggg

SEQ ID NO: 1075952 - RNA, 25 nt, Human
ugcccugucggcuucccuacuuuug

SEQ ID NO: 1075953 - RNA, 24 nt, Human
ugccucagccucccgaguagcuga

SEQ ID NO: 1075954 - RNA, 23 nt, Human
ugcuccucacagacacacccagg

SEQ ID NO: 1075955 - RNA, 24 nt, Human
ugcugggauuacaggcgugagcca

SEQ ID NO: 1075956 - RNA, 19 nt, Human
ugggauuacaggagugagc

SEQ ID NO: 1075957 - RNA, 20 nt, Human
ugggauuacaggagugagcc

SEQ ID NO: 1075958 - RNA, 21 nt, Human
ugggauuacaggagugagccg

SEQ ID NO: 1075959 - RNA, 21 nt, Human
ugggauuacaggagugagccg

SEQ ID NO: 1075960 - RNA, 22 nt, Human
ugggauuacaggagugagccgu

SEQ ID NO: 1075961 - RNA, 23 nt, Human
ugggauuacaggagugagccgua

SEQ ID NO: 1075962 - RNA, 18 nt, Human
ugggauuacaggcgugag

SEQ ID NO: 1075963 - RNA, 19 nt, Human
ugggauuacaggcgugagc

SEQ ID NO: 1075964 - RNA, 21 nt, Human
ugggauuacaggcgugagcca

SEQ ID NO: 1075965 - RNA, 22 nt, Human
ugggauuacaggcgugagccac

SEQ ID NO: 1075966 - RNA, 22 nt, Human
ugggauuacaggcgugagccac

SEQ ID NO: 1075967 - RNA, 24 nt, Human
ugggauuacaggcgugagccacug

SEQ ID NO: 1075968 - RNA, 26 nt, Human
ugggauuacaggcgugagccacugcg

SEQ ID NO: 1075969 - RNA, 20 nt, Human
ugggggggugcauguaggga

SEQ ID NO: 1075970 - RNA, 19 nt, Human
uuacacucuacucucucca

SEQ ID NO: 1075971 - RNA, 18 nt, Human
uuagagacaggguuucac

SEQ ID NO: 1075972 - RNA, 22 nt, Human
uuaguaaagacaggguuucacc

SEQ ID NO: 1075973 - RNA, 24 nt, Human
uuaguaaagacaggguuucaccgu

SEQ ID NO: 1075974 - RNA, 24 nt, Human
uuauuagagacaggguuucacuau

SEQ ID NO: 1075975 - RNA, 24 nt, Human
uucaaaaacuucuguuuucauugc

SEQ ID NO: 1075976 - RNA, 18 nt, Human
uucaagggauucuccugc

SEQ ID NO: 1075977 - RNA, 23 nt, Human
uucaagggauucuccugccucag

SEQ ID NO: 1075978 - RNA, 19 nt, Human
uucaucuuccuccaaccug

SEQ ID NO: 1075979 - RNA, 24 nt, Human
uuccaguucgugcccacuuguggg

SEQ ID NO: 1075980 - RNA, 25 nt, Human
uuccaguucgugcccacuugugggg

SEQ ID NO: 1075981 - RNA, 22 nt, Human
uugaugccuuuuucaaaaacuu

SEQ ID NO: 1075982 - RNA, 23 nt, Human
uugcaaccucugccuccuggguu

SEQ ID NO: 1075983 - RNA, 24 nt, Human
uugcaaccucugccuccuggguuc

SEQ ID NO: 1075984 - RNA, 20 nt, Human
uugccagggucucucaggcc

SEQ ID NO: 1075985 - RNA, 19 nt, Human
uuggauagcaggcaggagg

SEQ ID NO: 1075986 - RNA, 23 nt, Human
uugucgugugcucuggagacccu

SEQ ID NO: 1075987 - RNA, 19 nt, Human
uuucaccguguuagccagg

SEQ ID NO: 1075988 - RNA, 18 nt, Human
uuucacuauguuggccgg

SEQ ID NO: 1075989 - RNA, 22 nt, Human
uuucuaaggacugggggaggca

SEQ ID NO: 1075990 - RNA, 21 nt, Human
uuuucguauuuuuauuagaga

SEQ ID NO: 1075991 - RNA, 24 nt, Human
uuuuuaguaaagacaggguuucac

SEQ ID NO: 1075992 - RNA, 24 nt, Human
uuuuuauuagagacaggguuucac

SEQ ID NO: 1075993 - RNA, 20 nt, Human
uuuuuuuuuuugagacagag

SEQ ID NO: 1075994 - RNA, 26 nt, Human
uuuuuuuuuuuugagacagagucuca

SEQ ID NO: 1075995 - RNA, 24 nt, Human
accucccauggguguucacgagaa

SEQ ID NO: 1075996 - RNA, 21 nt, Human
agcaguccauucacccaucuc

SEQ ID NO: 1075997 - RNA, 18 nt, Human
cacaccuucagaccaguc

SEQ ID NO: 1075998 - RNA, 23 nt, Human
cacccaucucuucaggaucucug

SEQ ID NO: 1075999 - RNA, 19 nt, Human
cacugagcgagcucccuug

SEQ ID NO: 1076000 - RNA, 21 nt, Human
cagaacuucccgagccagcau

SEQ ID NO: 1076001 - RNA, 26 nt, Human
cagagggcaccugcacaccuucagac

SEQ ID NO: 1076002 - RNA, 24 nt, Human
ccagcauccaccacaucaaaccca

SEQ ID NO: 1076003 - RNA, 20 nt, Human
gaacucaggagcuggagcag

SEQ ID NO: 1076004 - RNA, 21 nt, Human
ggagcugcagaccagucuucc

SEQ ID NO: 1076005 - RNA, 24 nt, Human
gugaacucaggagcuggagcaguc

SEQ ID NO: 1076006 - RNA, 21 nt, Human
uagcgcagaggagaaucuguu

SEQ ID NO: 1076007 - RNA, 20 nt, Human
uccauucacccaucucuuca

SEQ ID NO: 1076008 - RNA, 20 nt, Human
ucccgagccagcauccacca

SEQ ID NO: 1076009 - RNA, 26 nt, Human
ucccuuguuguugcaugggauggcaa

SEQ ID NO: 1076010 - RNA, 24 nt, Human
ucucuucaggaucucuguagaagu

SEQ ID NO: 1076011 - RNA, 25 nt, Human
ucugcaaccucaggcugaguagcag

SEQ ID NO: 1076012 - RNA, 22 nt, Human
ugaauaggcacagagggcaccu

SEQ ID NO: 1076013 - RNA, 25 nt, Human
ugaauaggcacagagggcaccugca

SEQ ID NO: 1076014 - RNA, 18 nt, Human
ugagcgagcucccuuguu

SEQ ID NO: 1076015 - RNA, 20 nt, Human
uggcaggcugagcgcuccag

SEQ ID NO: 1076016 - RNA, 18 nt, Human
uggugccacgcaugcgca

SEQ ID NO: 1076017 - RNA, 21 nt, Human
uguccacauagcgcagaggag

SEQ ID NO: 1076018 - RNA, 19 nt, Human
aaagugcugggauuacagg

SEQ ID NO: 1076019 - RNA, 19 nt, Human
aaagugcugggauuacagg

SEQ ID NO: 1076020 - RNA, 24 nt, Human
aaagugcugggauuacaggaguga

SEQ ID NO: 1076021 - RNA, 19 nt, Human
aacaguggacacuccaccu

SEQ ID NO: 1076022 - RNA, 23 nt, Human
aagaagaggccagucugaccuga

SEQ ID NO: 1076023 - RNA, 22 nt, Human
aagcaccaagaguagaggaggg

SEQ ID NO: 1076024 - RNA, 24 nt, Human
aagugaucugcccgccuuggccuc

SEQ ID NO: 1076025 - RNA, 18 nt, Human
aagugcugggauuacagg

SEQ ID NO: 1076026 - RNA, 22 nt, Human
aagugcugggauuacaggaguc

SEQ ID NO: 1076027 - RNA, 26 nt, Human
aagugcugggauuacaggagugagcc

SEQ ID NO: 1076028 - RNA, 21 nt, Human
acaaguccaaauuuacacuca

SEQ ID NO: 1076029 - RNA, 19 nt, Human
acacugcagcuuccccugg

SEQ ID NO: 1076030 - RNA, 19 nt, Human
acacugcccagagcaaaac

SEQ ID NO: 1076031 - RNA, 20 nt, Human
accauguuggccaggcuggu

SEQ ID NO: 1076032 - RNA, 22 nt, Human
accauguuggccaggcuggucu

SEQ ID NO: 1076033 - RNA, 24 nt, Human
accauguuggccaggcuggucuug

SEQ ID NO: 1076034 - RNA, 18 nt, Human
acgggguuuuaccauguu

SEQ ID NO: 1076035 - RNA, 23 nt, Human
acgggguuuuaccauguuggcca

SEQ ID NO: 1076036 - RNA, 24 nt, Human
acgggguuuuaccauguuggccag

SEQ ID NO: 1076037 - RNA, 23 nt, Human
acugucagaucugaacucugcgg

SEQ ID NO: 1076038 - RNA, 23 nt, Human
acuucacccccaccuugccccac

SEQ ID NO: 1076039 - RNA, 22 nt, Human
agcaccaagaguagaggaggga

SEQ ID NO: 1076040 - RNA, 22 nt, Human
aggcacacagaacaguggacac

SEQ ID NO: 1076041 - RNA, 21 nt, Human
aguagcugagauuacaggcau

SEQ ID NO: 1076042 - RNA, 24 nt, Human
agugauuuuccugccucagccucc

SEQ ID NO: 1076043 - RNA, 23 nt, Human
agugccacccauucccuccccac

SEQ ID NO: 1076044 - RNA, 18 nt, Human
aguggacacuccaccucc

SEQ ID NO: 1076045 - RNA, 20 nt, Human
augcagcaggagugcacuuc

SEQ ID NO: 1076046 - RNA, 24 nt, Human
auuuuuguauuuuuaguagagacg

SEQ ID NO: 1076047 - RNA, 24 nt, Human
caaagugcugggauuacaggagug

SEQ ID NO: 1076048 - RNA, 18 nt, Human
caacugucagaucugaac

SEQ ID NO: 1076049 - RNA, 20 nt, Human
caagaguagaggagggaaga

SEQ ID NO: 1076050 - RNA, 22 nt, Human
caagugauuuuccugccucagc

SEQ ID NO: 1076051 - RNA, 24 nt, Human
cacaaugaaguuucagcauugaga

SEQ ID NO: 1076052 - RNA, 22 nt, Human
cacacagaacaguggacacucc

SEQ ID NO: 1076053 - RNA, 21 nt, Human
cacaugcuuuacaacuguacc

SEQ ID NO: 1076054 - RNA, 24 nt, Human
caccaugcauggcuaauuuuugua

SEQ ID NO: 1076055 - RNA, 23 nt, Human
cacccccaccuugccccaccucg

SEQ ID NO: 1076056 - RNA, 21 nt, Human
cacugcaaccuccgccucccg

SEQ ID NO: 1076057 - RNA, 23 nt, Human
cacugcaaccuccgccucccggg

SEQ ID NO: 1076058 - RNA, 18 nt, Human
cacugcagcuuccccugg

SEQ ID NO: 1076059 - RNA, 28 nt, Human
cacuucacccccaccuugccccaccaac

SEQ ID NO: 1076060 - RNA, 22 nt, Human
cagacacgcagcagugccaccc

SEQ ID NO: 1076061 - RNA, 24 nt, Human
cagagucuugcucugucgcccggg

SEQ ID NO: 1076062 - RNA, 19 nt, Human
cagcacccacgugugugug

SEQ ID NO: 1076063 - RNA, 24 nt, Human
caguggacacuccaccucccugag

SEQ ID NO: 1076064 - RNA, 24 nt, Human
cauguuggccaggcuggucuugaa

SEQ ID NO: 1076065 - RNA, 19 nt, Human
ccaaagugcugggauuaca

SEQ ID NO: 1076066 - RNA, 21 nt, Human
ccaaagugcugggauuacagg

SEQ ID NO: 1076067 - RNA, 24 nt, Human
ccaaagugcugggauuacaggagu

SEQ ID NO: 1076068 - RNA, 20 nt, Human
ccacacugcagcuuccccug

SEQ ID NO: 1076069 - RNA, 23 nt, Human
ccacagacacgcagcagugccac

SEQ ID NO: 1076070 - RNA, 18 nt, Human
ccacccauucccucccca

SEQ ID NO: 1076071 - RNA, 20 nt, Human
ccacucaugcagcaggaguu

SEQ ID NO: 1076072 - RNA, 23 nt, Human
ccagcacccacgugugugugugc

SEQ ID NO: 1076073 - RNA, 21 nt, Human
ccagccagcacccacgugugu

SEQ ID NO: 1076074 - RNA, 18 nt, Human
cccaccacaaccuggccc

SEQ ID NO: 1076075 - RNA, 19 nt, Human
cccagagcaaaacuaggca

SEQ ID NO: 1076076 - RNA, 22 nt, Human
cccagugggguggcccccacag

SEQ ID NO: 1076077 - RNA, 20 nt, Human
ccccacacugcagcuucccc

SEQ ID NO: 1076078 - RNA, 26 nt, Human
ccccacagacacgcagcagugccacc

SEQ ID NO: 1076079 - RNA, 19 nt, Human
cccgaguagcugagauuac

SEQ ID NO: 1076080 - RNA, 24 nt, Human
cccgaguagcugagauuacaggca

SEQ ID NO: 1076081 - RNA, 22 nt, Human
cccgccuuggccucccaaagug

SEQ ID NO: 1076082 - RNA, 23 nt, Human
cccggguucaagugauuuuccuc

SEQ ID NO: 1076083 - RNA, 23 nt, Human
cccggguucaagugauuuuccug

SEQ ID NO: 1076084 - RNA, 23 nt, Human
ccgaguagcugagauuacaggca

SEQ ID NO: 1076085 - RNA, 24 nt, Human
ccgaguagcugagauuacaggcau

SEQ ID NO: 1076086 - RNA, 24 nt, Human
ccgccucccggguucaagugauuu

SEQ ID NO: 1076087 - RNA, 24 nt, Human
ccggagggacugagaguacuggug

SEQ ID NO: 1076088 - RNA, 24 nt, Human
ccucacugcaaccuccgccucccg

SEQ ID NO: 1076089 - RNA, 19 nt, Human
ccugaccucaagugaucug

SEQ ID NO: 1076090 - RNA, 22 nt, Human
ccugaccucaagugaucugccc

SEQ ID NO: 1076091 - RNA, 18 nt, Human
ccugcaccugccagcgcc

SEQ ID NO: 1076092 - RNA, 22 nt, Human
ccugccacucaugcagcaggag

SEQ ID NO: 1076093 - RNA, 23 nt, Human
ccugccucagccucccgaguagc

SEQ ID NO: 1076094 - RNA, 24 nt, Human
cgcccgggcuggaguguaguggug

SEQ ID NO: 1076095 - RNA, 24 nt, Human
cggguucaagugauuuuccugccu

SEQ ID NO: 1076096 - RNA, 24 nt, Human
cucacugcaaccuccgccucccgg

SEQ ID NO: 1076097 - RNA, 21 nt, Human
cuccaccucccugagcgacca

SEQ ID NO: 1076098 - RNA, 26 nt, Human
cuccugaccucaagugaucugcccgc

SEQ ID NO: 1076099 - RNA, 19 nt, Human
cucgaguguccuagaagcc

SEQ ID NO: 1076100 - RNA, 23 nt, Human
cugcaaccuccgccucccggguu

SEQ ID NO: 1076101 - RNA, 24 nt, Human
cugcaaccuccgccucccggguuc

SEQ ID NO: 1076102 - RNA, 24 nt, Human
cugcccagagcaaaacuaggcaca

SEQ ID NO: 1076103 - RNA, 23 nt, Human
cugccucagccucccgaguagcu

SEQ ID NO: 1076104 - RNA, 19 nt, Human
cuugcucugucgcccgggc

SEQ ID NO: 1076105 - RNA, 24 nt, Human
cuugcucugucgcccgggcuggag

SEQ ID NO: 1076106 - RNA, 25 nt, Human
gaagcccccaucauagcuucuaccc

SEQ ID NO: 1076107 - RNA, 24 nt, Human
gaccucaagugaucugcccgccuu

SEQ ID NO: 1076108 - RNA, 19 nt, Human
gagacccccaguggggugg

SEQ ID NO: 1076109 - RNA, 24 nt, Human
gagacgggguuuuaccauguuggc

SEQ ID NO: 1076110 - RNA, 24 nt, Human
gaguagcugagauuacaggcaugc

SEQ ID NO: 1076111 - RNA, 18 nt, Human
gauuacaggagugagccg

SEQ ID NO: 1076112 - RNA, 24 nt, Human
gauuacaggcaugcaccaccaugc

SEQ ID NO: 1076113 - RNA, 21 nt, Human
gcaugcaccaccaugcauggu

SEQ ID NO: 1076114 - RNA, 18 nt, Human
gccccgcccccaccacaa

SEQ ID NO: 1076115 - RNA, 20 nt, Human
gcccgggcuggaguguagug

SEQ ID NO: 1076116 - RNA, 23 nt, Human
gcccgggcuggaguguaguggug

SEQ ID NO: 1076117 - RNA, 22 nt, Human
gccuuggccucccaaagugcug

SEQ ID NO: 1076118 - RNA, 23 nt, Human
gcuggucuugaacuccugaccuc

SEQ ID NO: 1076119 - RNA, 24 nt, Human
ggcuggucuugaacuccugaccuc

SEQ ID NO: 1076120 - RNA, 23 nt, Human
gggguuuuaccauguuggccagg

SEQ ID NO: 1076121 - RNA, 22 nt, Human
ggguucaagugauuuuccugcc

SEQ ID NO: 1076122 - RNA, 22 nt, Human
ggguuuuaccauguuggccagg

SEQ ID NO: 1076123 - RNA, 19 nt, Human
ggucuugaacuccugaccu

SEQ ID NO: 1076124 - RNA, 23 nt, Human
guagagacgggguuuuaccaugu

SEQ ID NO: 1076125 - RNA, 20 nt, Human
guagcugagauuacaggcau

SEQ ID NO: 1076126 - RNA, 24 nt, Human
gugauuuuccugccucagccuccc

SEQ ID NO: 1076127 - RNA, 24 nt, Human
uaauuuuuguauuuuuaguagaga

SEQ ID NO: 1076128 - RNA, 22 nt, Human
uacaggagugagccgccgcgcc

SEQ ID NO: 1076129 - RNA, 23 nt, Human
uacaggagugagccgccgcgccu

SEQ ID NO: 1076130 - RNA, 23 nt, Human
uacaggagugagccgccgcgccu

SEQ ID NO: 1076131 - RNA, 21 nt, Human
uaccauguuggccaggcuggu

SEQ ID NO: 1076132 - RNA, 24 nt, Human
uaccauguuggccaggcuggucuu

SEQ ID NO: 1076133 - RNA, 27 nt, Human
uaccauguuggccaggcuggucuugaa

SEQ ID NO: 1076134 - RNA, 19 nt, Human
uacccuggcagacggaacu

SEQ ID NO: 1076135 - RNA, 24 nt, Human
uaccucacugcaaccuccgccucc

SEQ ID NO: 1076136 - RNA, 21 nt, Human
uagaagagcugccccggaggg

SEQ ID NO: 1076137 - RNA, 18 nt, Human
uagaaucaacuugcuccc

SEQ ID NO: 1076138 - RNA, 22 nt, Human
uagagacgggguuuuaccaugu

SEQ ID NO: 1076139 - RNA, 18 nt, Human
uaggaagaaacugaugca

SEQ ID NO: 1076140 - RNA, 21 nt, Human
uaggaagaaacugaugcaaug

SEQ ID NO: 1076141 - RNA, 24 nt, Human
uaguagagacgggguuuuaccaug

SEQ ID NO: 1076142 - RNA, 19 nt, Human
ucaagugauuuuccugccu

SEQ ID NO: 1076143 - RNA, 23 nt, Human
ucacugcaaccuccgccucccgg

SEQ ID NO: 1076144 - RNA, 24 nt, Human
ucacugcaaccuccgccucccggg

SEQ ID NO: 1076145 - RNA, 25 nt, Human
ucacugcaaccuccgccucccgggu

SEQ ID NO: 1076146 - RNA, 27 nt, Human
ucacugcaaccuccgccucccggguuc

SEQ ID NO: 1076147 - RNA, 23 nt, Human
ucagcaacacugcccagagcaaa

SEQ ID NO: 1076148 - RNA, 21 nt, Human
ucagccccgcccccaccacaa

SEQ ID NO: 1076149 - RNA, 21 nt, Human
ucagccucgaguguccuagaa

SEQ ID NO: 1076150 - RNA, 18 nt, Human
ucccaaagugcugggauu

SEQ ID NO: 1076151 - RNA, 23 nt, Human
ucccaaagugcugggauuacagg

SEQ ID NO: 1076152 - RNA, 24 nt, Human
ucccgaguagcugagauuacaggc

SEQ ID NO: 1076153 - RNA, 18 nt, Human
ucccggguucaagugauu

SEQ ID NO: 1076154 - RNA, 24 nt, Human
ucccggguucaagugauuuuccug

SEQ ID NO: 1076155 - RNA, 19 nt, Human
ucccugagcgaccaagagc

SEQ ID NO: 1076156 - RNA, 20 nt, Human
ucccugagcgaccaagagcc

SEQ ID NO: 1076157 - RNA, 21 nt, Human
ucccugagcgaccaagagccc

SEQ ID NO: 1076158 - RNA, 25 nt, Human
ucccugagcgaccaagagcccucug

SEQ ID NO: 1076159 - RNA, 24 nt, Human
ucgcccgggcuggaguguaguggu

SEQ ID NO: 1076160 - RNA, 24 nt, Human
ucugucgcccgggcuggaguguag

SEQ ID NO: 1076161 - RNA, 21 nt, Human
ucuugaacuccugaccucaag

SEQ ID NO: 1076162 - RNA, 18 nt, Human
ucuugcucugucgcccgg

SEQ ID NO: 1076163 - RNA, 23 nt, Human
ucuugcucugucgcccgggcugg

SEQ ID NO: 1076164 - RNA, 24 nt, Human
ucuugcucugucgcccgggcugga

SEQ ID NO: 1076165 - RNA, 23 nt, Human
ucuuuucuuguaaucuuucugac

SEQ ID NO: 1076166 - RNA, 27 nt, Human
ugaaaagagacugacuuuauaaaagua

SEQ ID NO: 1076167 - RNA, 22 nt, Human
ugacacagagucuugcucuguc

SEQ ID NO: 1076168 - RNA, 18 nt, Human
ugaccucaagugaucugc

SEQ ID NO: 1076169 - RNA, 24 nt, Human
ugaccucaagugaucugcccgccu

SEQ ID NO: 1076170 - RNA, 21 nt, Human
ugagauuacaggcaugcacca

SEQ ID NO: 1076171 - RNA, 24 nt, Human
ugagauuacaggcaugcaccacca

SEQ ID NO: 1076172 - RNA, 23 nt, Human
ugcacaaagaccugcaccugcca

SEQ ID NO: 1076173 - RNA, 19 nt, Human
ugcccugccacucaugcag

SEQ ID NO: 1076174 - RNA, 24 nt, Human
ugccucagccucccgaguagcuga

SEQ ID NO: 1076175 - RNA, 24 nt, Human
ugcucugucgcccgggcuggagug

SEQ ID NO: 1076176 - RNA, 21 nt, Human
ugcuuuacaacuguacccaca

SEQ ID NO: 1076177 - RNA, 22 nt, Human
ugcuuuacaacuguacccacaa

SEQ ID NO: 1076178 - RNA, 21 nt, Human
uggagccuuagcagucagccc

SEQ ID NO: 1076179 - RNA, 24 nt, Human
uggccaggcuggucuugaacuccu

SEQ ID NO: 1076180 - RNA, 19 nt, Human
ugggauuacaggagugagc

SEQ ID NO: 1076181 - RNA, 21 nt, Human
ugggauuacaggagugagccg

SEQ ID NO: 1076182 - RNA, 22 nt, Human
ugggauuacaggagugagccgc

SEQ ID NO: 1076183 - RNA, 23 nt, Human
ugggauuacaggagugagccgcc

SEQ ID NO: 1076184 - RNA, 24 nt, Human
ugggauuacaggagugagccgccg

SEQ ID NO: 1076185 - RNA, 21 nt, Human
ugugugugugcacccugcccu

SEQ ID NO: 1076186 - RNA, 18 nt, Human
uuaguagagacgggguuu

SEQ ID NO: 1076187 - RNA, 22 nt, Human
uuaguagagacgggguuuuacc

SEQ ID NO: 1076188 - RNA, 24 nt, Human
uuaguagagacgggguuuuaccau

SEQ ID NO: 1076189 - RNA, 21 nt, Human
uucaagugauuuuccugccuc

SEQ ID NO: 1076190 - RNA, 23 nt, Human
uucaagugauuuuccugccucag

SEQ ID NO: 1076191 - RNA, 24 nt, Human
uucaagugauuuuccugccucagc

SEQ ID NO: 1076192 - RNA, 19 nt, Human
uucacccccaccuugcccc

SEQ ID NO: 1076193 - RNA, 21 nt, Human
uucccuccccacacugcagcu

SEQ ID NO: 1076194 - RNA, 24 nt, Human
uugcucugucgcccgggcuggagu

SEQ ID NO: 1076195 - RNA, 18 nt, Human
uuggccucccaaagugcu

SEQ ID NO: 1076196 - RNA, 23 nt, Human
uuguauuuuuaguagagacgggg

SEQ ID NO: 1076197 - RNA, 24 nt, Human
uuuuuaguagagacgggguuuuac

SEQ ID NO: 1076198 - RNA, 20 nt, Human
uuuuuguauuuuuaguagag

SEQ ID NO: 1076199 - RNA, 19 nt, Human
uuuuuuuuuugacacagag

SEQ ID NO: 1076200 - RNA, 24 nt, Human
uuuuuuuuuuuugacacagagucu

SEQ ID NO: 1076201 - RNA, 23 nt, Human
uuuuuuuuuuuuuuuugacacag

SEQ ID NO: 1076202 - RNA, 19 nt, Human
aaaagcaacccucgacaca

SEQ ID NO: 1076203 - RNA, 24 nt, Human
aaauaaaucccacuuccaagguuu

SEQ ID NO: 1076204 - RNA, 21 nt, Human
aagcaacccucgacacaagau

SEQ ID NO: 1076205 - RNA, 19 nt, Human
acuccaugcacacugucgu

SEQ ID NO: 1076206 - RNA, 19 nt, Human
agaggaaccaaguucccag

SEQ ID NO: 1076207 - RNA, 19 nt, Human
caccauggcccugggucac

SEQ ID NO: 1076208 - RNA, 21 nt, Human
caccauggcccugggucacgg

SEQ ID NO: 1076209 - RNA, 22 nt, Human
ccagaggcauccuggaggcugg

SEQ ID NO: 1076210 - RNA, 18 nt, Human
ccaucugucucucccagg

SEQ ID NO: 1076211 - RNA, 23 nt, Human
cuggaggcuggccuuggugcugc

SEQ ID NO: 1076212 - RNA, 19 nt, Human
gaagccacacacagcggcc

SEQ ID NO: 1076213 - RNA, 20 nt, Human
ggugcugcuggaaguuuugg

SEQ ID NO: 1076214 - RNA, 24 nt, Human
uacgucacaaaugagcaggagucu

SEQ ID NO: 1076215 - RNA, 21 nt, Human
uacuugauacuuguacugagc

SEQ ID NO: 1076216 - RNA, 22 nt, Human
uauuuguguaugucugaaauac

SEQ ID NO: 1076217 - RNA, 21 nt, Human
uccacuacuuuggguaaaagc

SEQ ID NO: 1076218 - RNA, 19 nt, Human
ucccacugaugaaggcuuc

SEQ ID NO: 1076219 - RNA, 18 nt, Human
ucccagaggcauccugga

SEQ ID NO: 1076220 - RNA, 24 nt, Human
uccuggaggcuggccuuggugcug

SEQ ID NO: 1076221 - RNA, 18 nt, Human
ucgaagccacacacagcg

SEQ ID NO: 1076222 - RNA, 20 nt, Human
ucucccaggugugaguacuu

SEQ ID NO: 1076223 - RNA, 21 nt, Human
ucuguggugacagaggcuguu

SEQ ID NO: 1076224 - RNA, 20 nt, Human
ucuuccuucucuuuaaucuc

SEQ ID NO: 1076225 - RNA, 21 nt, Human
ugaaauaaaucccacuuccaa

SEQ ID NO: 1076226 - RNA, 18 nt, Human
ugacagaggcuguuugug

SEQ ID NO: 1076227 - RNA, 21 nt, Human
ugagcaaaucacugaaauaaa

SEQ ID NO: 1076228 - RNA, 19 nt, Human
ugauguggacauccuccag

SEQ ID NO: 1076229 - RNA, 25 nt, Human
ugcacaccacgaucuuccacuacuu

SEQ ID NO: 1076230 - RNA, 20 nt, Human
uggcccugggucacggcucc

SEQ ID NO: 1076231 - RNA, 21 nt, Human
uggcccugggucacggcuccu

SEQ ID NO: 1076232 - RNA, 25 nt, Human
ugggcacaugacuuuuauuugugua

SEQ ID NO: 1076233 - RNA, 22 nt, Human
uggugcugcuggaaguuuuggc

SEQ ID NO: 1076234 - RNA, 20 nt, Human
uucuuugcacaccacgaucu

SEQ ID NO: 1076235 - RNA, 18 nt, Human
uugaaaaauuugaaaacu

SEQ ID NO: 1076236 - RNA, 19 nt, Human
uuguguaugucugaaauac

SEQ ID NO: 1076237 - RNA, 24 nt, Human
aaacagggacuccucaaggccaga

SEQ ID NO: 1076238 - RNA, 22 nt, Human
aaagacgggguccuuguccguc

SEQ ID NO: 1076239 - RNA, 21 nt, Human
aacauuuugucuuucuuccuc

SEQ ID NO: 1076240 - RNA, 22 nt, Human
aaccucuaaaggccaaccaagc

SEQ ID NO: 1076241 - RNA, 19 nt, Human
aagaacaaaauucagagga

SEQ ID NO: 1076242 - RNA, 20 nt, Human
aagugcuagggaucgcugcu

SEQ ID NO: 1076243 - RNA, 19 nt, Human
acccccucccaccuggcug

SEQ ID NO: 1076244 - RNA, 21 nt, Human
acuccucugcccaaaagcagg

SEQ ID NO: 1076245 - RNA, 19 nt, Human
acuucuguggcuccacccc

SEQ ID NO: 1076246 - RNA, 22 nt, Human
agaggcuggccuaacguggaua

SEQ ID NO: 1076247 - RNA, 18 nt, Human
aggaaaaaagggaaacag

SEQ ID NO: 1076248 - RNA, 19 nt, Human
aggaagaggaggggccagg

SEQ ID NO: 1076249 - RNA, 20 nt, Human
aggaagaggaggggccaggc

SEQ ID NO: 1076250 - RNA, 18 nt, Human
aggcauggagaggcuggc

SEQ ID NO: 1076251 - RNA, 24 nt, Human
agugcuccuccaugggcacugccu

SEQ ID NO: 1076252 - RNA, 18 nt, Human
aguuccugauuugugaau

SEQ ID NO: 1076253 - RNA, 23 nt, Human
aucugaucuguaauaaacauggc

SEQ ID NO: 1076254 - RNA, 20 nt, Human
augaacaugcucaucucuca

SEQ ID NO: 1076255 - RNA, 19 nt, Human
auuuugucuuucuuccucu

SEQ ID NO: 1076256 - RNA, 18 nt, Human
caagugaacacaacucuc

SEQ ID NO: 1076257 - RNA, 24 nt, Human
caccccagugcacacccuucccag

SEQ ID NO: 1076258 - RNA, 20 nt, Human
cacuuuuguuuuagaguaaa

SEQ ID NO: 1076259 - RNA, 21 nt, Human
cagaucaccgucagcauccuc

SEQ ID NO: 1076260 - RNA, 23 nt, Human
cauggaaacuaagccgucagaga

SEQ ID NO: 1076261 - RNA, 20 nt, Human
cauucaugaauacauuugcu

SEQ ID NO: 1076262 - RNA, 22 nt, Human
ccacgcagagucaccagcugca

SEQ ID NO: 1076263 - RNA, 23 nt, Human
ccacgcagagucaccagcugcac

SEQ ID NO: 1076264 - RNA, 21 nt, Human
ccacgcugucuuacacacugc

SEQ ID NO: 1076265 - RNA, 18 nt, Human
ccaggaagaggaggggcc

SEQ ID NO: 1076266 - RNA, 22 nt, Human
ccaggaagaggaggggccaggc

SEQ ID NO: 1076267 - RNA, 24 nt, Human
cccaggaagaggaggggccaggcu

SEQ ID NO: 1076268 - RNA, 26 nt, Human
cccaggaagaggaggggccaggcucc

SEQ ID NO: 1076269 - RNA, 21 nt, Human
ccccagugcacacccuuccca

SEQ ID NO: 1076270 - RNA, 24 nt, Human
cccucccaccuggcugccucacaa

SEQ ID NO: 1076271 - RNA, 19 nt, Human
ccgcaggacuuuuccuuag

SEQ ID NO: 1076272 - RNA, 20 nt, Human
ccucgagggcauggguugcu

SEQ ID NO: 1076273 - RNA, 21 nt, Human
ccugucaccugcuguggcugg

SEQ ID NO: 1076274 - RNA, 21 nt, Human
ccuuaguucagcuaaagacgg

SEQ ID NO: 1076275 - RNA, 18 nt, Human
cgcagcuugaauccccag

SEQ ID NO: 1076276 - RNA, 22 nt, Human
cgcaggacuuuuccuuaguuca

SEQ ID NO: 1076277 - RNA, 21 nt, Human
cggcagguggcccgagcccca

SEQ ID NO: 1076278 - RNA, 22 nt, Human
cggcagguggcccgagccccuc

SEQ ID NO: 1076279 - RNA, 23 nt, Human
cguguuaaaacaaaaacaaaaac

SEQ ID NO: 1076280 - RNA, 19 nt, Human
cuaguccacaaaaauccuu

SEQ ID NO: 1076281 - RNA, 19 nt, Human
cuccccacugcaaaggguu

SEQ ID NO: 1076282 - RNA, 20 nt, Human
cuccuccccacugcaaaggg

SEQ ID NO: 1076283 - RNA, 20 nt, Human
cugcacaugcugugcgugug

SEQ ID NO: 1076284 - RNA, 18 nt, Human
cugccacaguaacaggcc

SEQ ID NO: 1076285 - RNA, 21 nt, Human
cugcggcagguggcccgagcc

SEQ ID NO: 1076286 - RNA, 21 nt, Human
cuuuauaacucagugcuccuc

SEQ ID NO: 1076287 - RNA, 20 nt, Human
gaaauugaaaaaaagucuuu

SEQ ID NO: 1076288 - RNA, 25 nt, Human
gagcuaccauucaugaauacauuug

SEQ ID NO: 1076289 - RNA, 19 nt, Human
gcagaguuauucuucuuac

SEQ ID NO: 1076290 - RNA, 22 nt, Human
gccacaguaacaggccuggggu

SEQ ID NO: 1076291 - RNA, 22 nt, Human
ggaaacuaagccagggguccac

SEQ ID NO: 1076292 - RNA, 22 nt, Human
ggaauaaaagcaaccagagcua

SEQ ID NO: 1076293 - RNA, 19 nt, Human
ggcuuuucaaggcuuagca

SEQ ID NO: 1076294 - RNA, 19 nt, Human
ggugaaaaggaaaaaaggg

SEQ ID NO: 1076295 - RNA, 18 nt, Human
ggugaguaaagcaggguu

SEQ ID NO: 1076296 - RNA, 22 nt, Human
gucuacacaauaguaugacuuc

SEQ ID NO: 1076297 - RNA, 19 nt, Human
gugaacacaacucucauug

SEQ ID NO: 1076298 - RNA, 21 nt, Human
gugguuugaacuccucugccc

SEQ ID NO: 1076299 - RNA, 22 nt, Human
uaaaacaaaaacaaaaacauuu

SEQ ID NO: 1076300 - RNA, 21 nt, Human
uaacauguguuucuguguagc

SEQ ID NO: 1076301 - RNA, 19 nt, Human
uaacguggauaacaugugu

SEQ ID NO: 1076302 - RNA, 18 nt, Human
uaauccaaaacacagcag

SEQ ID NO: 1076303 - RNA, 19 nt, Human
uagcuuguguuaauaaccu

SEQ ID NO: 1076304 - RNA, 20 nt, Human
uaucuggaauaaaagcaacc

SEQ ID NO: 1076305 - RNA, 22 nt, Human
ucagcauccucgagggcauggg

SEQ ID NO: 1076306 - RNA, 18 nt, Human
uccaugggcacugccucc

SEQ ID NO: 1076307 - RNA, 21 nt, Human
uccaugggcacugccuccuug

SEQ ID NO: 1076308 - RNA, 19 nt, Human
ugaaaaaaagucuuucuac

SEQ ID NO: 1076309 - RNA, 21 nt, Human
ugaaaaaaagucuuucuacau

SEQ ID NO: 1076310 - RNA, 25 nt, Human
ugaaaaaaagucuuucuacauaggg

SEQ ID NO: 1076311 - RNA, 18 nt, Human
ugaaaaggaaaaaaggga

SEQ ID NO: 1076312 - RNA, 21 nt, Human
ugaaaguaaacauuaauaacc

SEQ ID NO: 1076313 - RNA, 18 nt, Human
ugaaaugcaaacaaacug

SEQ ID NO: 1076314 - RNA, 21 nt, Human
ugaaaugcaaacaaacugugg

SEQ ID NO: 1076315 - RNA, 18 nt, Human
ugccaugcuaagauagca

SEQ ID NO: 1076316 - RNA, 19 nt, Human
uggccuaacguggauaaca

SEQ ID NO: 1076317 - RNA, 22 nt, Human
ugggugaaaaggaaaaaaggga

SEQ ID NO: 1076318 - RNA, 20 nt, Human
uggugacaacucuuuuuuua

SEQ ID NO: 1076319 - RNA, 19 nt, Human
ugguuugaacuccucugcc

SEQ ID NO: 1076320 - RNA, 19 nt, Human
ugugaauguuugaagcuga

SEQ ID NO: 1076321 - RNA, 19 nt, Human
uguuaauaaccucacacaa

SEQ ID NO: 1076322 - RNA, 24 nt, Human
uucaugaauacauuugccuauagg

SEQ ID NO: 1076323 - RNA, 19 nt, Human
uucccagggcgcagucugg

SEQ ID NO: 1076324 - RNA, 19 nt, Human
uuccucuauuguuauaaau

SEQ ID NO: 1076325 - RNA, 21 nt, Human
uuucaggaagggcugagcuuc

SEQ ID NO: 1076326 - RNA, 22 nt, Human
uuucugcuucaguaucugaaga

SEQ ID NO: 1076327 - RNA, 18 nt, Human
aaaaaaaagguuaccugg

SEQ ID NO: 1076328 - RNA, 25 nt, Human
aaaaaaacccccaaauaaucccacc

SEQ ID NO: 1076329 - RNA, 20 nt, Human
aaaaagguuaccuggcaccu

SEQ ID NO: 1076330 - RNA, 23 nt, Human
aaaacacuacauugagauggauu

SEQ ID NO: 1076331 - RNA, 19 nt, Human
aaaaggaaagaagagcaga

SEQ ID NO: 1076332 - RNA, 20 nt, Human
aaaaggaaccagauugaaaa

SEQ ID NO: 1076333 - RNA, 22 nt, Human
aaaaggaaccagauugaaaaag

SEQ ID NO: 1076334 - RNA, 18 nt, Human
aaacaaacaaaaaaaacc

SEQ ID NO: 1076335 - RNA, 21 nt, Human
aaacaaacaaaaaaaaccccc

SEQ ID NO: 1076336 - RNA, 24 nt, Human
aaacaaacaaaaaaaacccccaaa

SEQ ID NO: 1076337 - RNA, 20 nt, Human
aaagaagagcagaauacaaa

SEQ ID NO: 1076338 - RNA, 21 nt, Human
aaaggaaccagauugaaaaag

SEQ ID NO: 1076339 - RNA, 24 nt, Human
aaaugucaaagacaacuucugacc

SEQ ID NO: 1076340 - RNA, 18 nt, Human
aacacagugaaaccccau

SEQ ID NO: 1076341 - RNA, 18 nt, Human
aacacagugaaaccccau

SEQ ID NO: 1076342 - RNA, 19 nt, Human
aacacagugaaaccccauu

SEQ ID NO: 1076343 - RNA, 21 nt, Human
aacacagugaaaccccauuuc

SEQ ID NO: 1076344 - RNA, 24 nt, Human
aacagagcaagauucugucucaaa

SEQ ID NO: 1076345 - RNA, 22 nt, Human
aacccccaaauaaucccaccuc

SEQ ID NO: 1076346 - RNA, 18 nt, Human
aacugcuugaacccggga

SEQ ID NO: 1076347 - RNA, 24 nt, Human
aaggcgggcagaucacaaggucag

SEQ ID NO: 1076348 - RNA, 18 nt, Human
aauuagccaggcauggug

SEQ ID NO: 1076349 - RNA, 25 nt, Human
acaaacaucuccaauguuuaccucc

SEQ ID NO: 1076350 - RNA, 18 nt, Human
acaaaguacagaccacug

SEQ ID NO: 1076351 - RNA, 24 nt, Human
acagagcaagauucugucucaaaa

SEQ ID NO: 1076352 - RNA, 22 nt, Human
accaaaaaggaaagaagagcag

SEQ ID NO: 1076353 - RNA, 19 nt, Human
accacugauaacuccaccc

SEQ ID NO: 1076354 - RNA, 24 nt, Human
accccauuucuacuaaaaauacaa

SEQ ID NO: 1076355 - RNA, 23 nt, Human
acuccacccaugaagcucaccaa

SEQ ID NO: 1076356 - RNA, 23 nt, Human
agaaagcacaaacuuucagaacu

SEQ ID NO: 1076357 - RNA, 21 nt, Human
agaauacaacagcuguggcua

SEQ ID NO: 1076358 - RNA, 18 nt, Human
agagcaagauucugucuc

SEQ ID NO: 1076359 - RNA, 19 nt, Human
agcaagaguaauauuuuca

SEQ ID NO: 1076360 - RNA, 23 nt, Human
agccaggcaugguggugcgugcc

SEQ ID NO: 1076361 - RNA, 24 nt, Human
agccugggcaacagagcaagauuc

SEQ ID NO: 1076362 - RNA, 18 nt, Human
agcuguaagguguucacu

SEQ ID NO: 1076363 - RNA, 18 nt, Human
aggcaggagaacugcuug

SEQ ID NO: 1076364 - RNA, 24 nt, Human
aggcaggagaacugcuugaacccg

SEQ ID NO: 1076365 - RNA, 24 nt, Human
aggcagggggaaugacuaucucuu

SEQ ID NO: 1076366 - RNA, 24 nt, Human
aggcgcaguggcucacgccuguaa

SEQ ID NO: 1076367 - RNA, 18 nt, Human
aggcgggcagaucacaag

SEQ ID NO: 1076368 - RNA, 24 nt, Human
aggcgggcagaucacaaggucagg

SEQ ID NO: 1076369 - RNA, 24 nt, Human
aggcugaggcaggagaacugcuug

SEQ ID NO: 1076370 - RNA, 23 nt, Human
aguggcucacgccuguaauccca

SEQ ID NO: 1076371 - RNA, 20 nt, Human
auauacaaaaggaaccagaa

SEQ ID NO: 1076372 - RNA, 23 nt, Human
auauuuguagacaugucugagac

SEQ ID NO: 1076373 - RNA, 20 nt, Human
aucacaaggucaggagaucc

SEQ ID NO: 1076374 - RNA, 28 nt, Human
auucugucucaaaaaaaaaaaaaaaaaa

SEQ ID NO: 1076375 - RNA, 21 nt, Human
caaaauauccacaaaguacag

SEQ ID NO: 1076376 - RNA, 20 nt, Human
caaagacaacuucugaccca

SEQ ID NO: 1076377 - RNA, 24 nt, Human
caacacuuuggaaggccaaggcgg

SEQ ID NO: 1076378 - RNA, 24 nt, Human
caagaccauccuggcuaacacagu

SEQ ID NO: 1076379 - RNA, 23 nt, Human
caccagaaaacugccgacagcca

SEQ ID NO: 1076380 - RNA, 24 nt, Human
cacgccuguaaucccaacacuuug

SEQ ID NO: 1076381 - RNA, 19 nt, Human
cagaaaacugccgacagcc

SEQ ID NO: 1076382 - RNA, 21 nt, Human
cagaaaacugccgacagccau

SEQ ID NO: 1076383 - RNA, 18 nt, Human
cagaauacaacagcugug

SEQ ID NO: 1076384 - RNA, 23 nt, Human
cagaccacugauaacuccaccca

SEQ ID NO: 1076385 - RNA, 23 nt, Human
cagauugaaaaagauauugcuga

SEQ ID NO: 1076386 - RNA, 23 nt, Human
cagcgaaacaacagauugcagag

SEQ ID NO: 1076387 - RNA, 19 nt, Human
cagggccgugucuguaacc

SEQ ID NO: 1076388 - RNA, 24 nt, Human
caguggcuaauuuuacucuuaaau

SEQ ID NO: 1076389 - RNA, 23 nt, Human
caucuccaauguuuaccuccucc

SEQ ID NO: 1076390 - RNA, 20 nt, Human
ccaaaaaggaaagaagagca

SEQ ID NO: 1076391 - RNA, 19 nt, Human
ccaacacuuuggaaggcca

SEQ ID NO: 1076392 - RNA, 23 nt, Human
ccauaaauauuuuuauuaaaugu

SEQ ID NO: 1076393 - RNA, 21 nt, Human
cccaaauaaucccaccucuua

SEQ ID NO: 1076394 - RNA, 22 nt, Human
cccaucaccagggccgugucug

SEQ ID NO: 1076395 - RNA, 19 nt, Human
ccccaaauaaucccaccuc

SEQ ID NO: 1076396 - RNA, 23 nt, Human
cccguuuuggaaccuuuucacaa

SEQ ID NO: 1076397 - RNA, 19 nt, Human
cccugcacuccagccuggg

SEQ ID NO: 1076398 - RNA, 19 nt, Human
cccugcacuccagccuggg

SEQ ID NO: 1076399 - RNA, 20 nt, Human
cccugcacuccagccugggc

SEQ ID NO: 1076400 - RNA, 23 nt, Human
cccugcacuccagccugggcaac

SEQ ID NO: 1076401 - RNA, 24 nt, Human
cccugcacuccagccugggcaaca

SEQ ID NO: 1076402 - RNA, 18 nt, Human
ccuacagugagacaggca

SEQ ID NO: 1076403 - RNA, 24 nt, Human
ccuacagugagacaggccgggguc

SEQ ID NO: 1076404 - RNA, 21 nt, Human
ccuauagucccagcuacuugg

SEQ ID NO: 1076405 - RNA, 23 nt, Human
ccucucugauuucacuuuuccug

SEQ ID NO: 1076406 - RNA, 24 nt, Human
ccugcacuccagccugggcaacag

SEQ ID NO: 1076407 - RNA, 24 nt, Human
ccuggcuaacacagugaaacccca

SEQ ID NO: 1076408 - RNA, 22 nt, Human
ccugggcaacagagcaagauuc

SEQ ID NO: 1076409 - RNA, 22 nt, Human
cgggcagaucacaaggucagga

SEQ ID NO: 1076410 - RNA, 18 nt, Human
cucaaaaaaaaaaaaaaa

SEQ ID NO: 1076411 - RNA, 22 nt, Human
cucacgccuguaaucccaacac

SEQ ID NO: 1076412 - RNA, 24 nt, Human
cucacgccuguaaucccaacacuu

SEQ ID NO: 1076413 - RNA, 20 nt, Human
cuccuaaauagaugcagaaa

SEQ ID NO: 1076414 - RNA, 18 nt, Human
cucuccguuuggguggac

SEQ ID NO: 1076415 - RNA, 18 nt, Human
cugacuaaagagaaaggc

SEQ ID NO: 1076416 - RNA, 23 nt, Human
cugcacuccagccugggcaacag

SEQ ID NO: 1076417 - RNA, 23 nt, Human
cugcacuccagccugggcaacag

SEQ ID NO: 1076418 - RNA, 18 nt, Human
cugcuugaacccgggagg

SEQ ID NO: 1076419 - RNA, 23 nt, Human
cuggcuaacacagugaaacccca

SEQ ID NO: 1076420 - RNA, 21 nt, Human
gaaacaacagauugcagagaa

SEQ ID NO: 1076421 - RNA, 19 nt, Human
gaaagcacaaacuuucaga

SEQ ID NO: 1076422 - RNA, 24 nt, Human
gcacuccagccugggcaacagagc

SEQ ID NO: 1076423 - RNA, 19 nt, Human
gcaggagugacugucucuc

SEQ ID NO: 1076424 - RNA, 24 nt, Human
gccacagacaagugcaacaaaacc

SEQ ID NO: 1076425 - RNA, 21 nt, Human
gcgaaacaacagauugcagag

SEQ ID NO: 1076426 - RNA, 20 nt, Human
gcgcaguggcucacgccugu

SEQ ID NO: 1076427 - RNA, 21 nt, Human
ggaggugucccugcacuccag

SEQ ID NO: 1076428 - RNA, 21 nt, Human
ggcacuggcauguggcaccag

SEQ ID NO: 1076429 - RNA, 21 nt, Human
ggcagaucacaaggucaggag

SEQ ID NO: 1076430 - RNA, 22 nt, Human
ggccaggcgcaguggcucacgg

SEQ ID NO: 1076431 - RNA, 22 nt, Human
gggcaaaauauccacaaaguac

SEQ ID NO: 1076432 - RNA, 22 nt, Human
ggugucccugcacuccagccug

SEQ ID NO: 1076433 - RNA, 22 nt, Human
gucaaagacaacuucugaccca

SEQ ID NO: 1076434 - RNA, 21 nt, Human
uaaaaauacaaaaauuagcca

SEQ ID NO: 1076435 - RNA, 18 nt, Human
uaaacaaacaaaaaaaac

SEQ ID NO: 1076436 - RNA, 19 nt, Human
uaaacugccacuaacaaaa

SEQ ID NO: 1076437 - RNA, 20 nt, Human
uaccugauggccaggcgcag

SEQ ID NO: 1076438 - RNA, 21 nt, Human
uagaaaaaggauauucguugu

SEQ ID NO: 1076439 - RNA, 20 nt, Human
uagaugcagaaagcacuuaa

SEQ ID NO: 1076440 - RNA, 22 nt, Human
uaugguuuuacaguggauaaug

SEQ ID NO: 1076441 - RNA, 25 nt, Human
uauugguaagaaauagacuccuaaa

SEQ ID NO: 1076442 - RNA, 22 nt, Human
ucaaaaaaaaaaaaaaaaaaaa

SEQ ID NO: 1076443 - RNA, 23 nt, Human
ucaaaaaaaaaaaaaaaaaaaaa

SEQ ID NO: 1076444 - RNA, 21 nt, Human
ucaaaacaaacuaaaaccuca

SEQ ID NO: 1076445 - RNA, 23 nt, Human
ucaaagacaacuucugacccauu

SEQ ID NO: 1076446 - RNA, 18 nt, Human
ucacaaggucaggagauc

SEQ ID NO: 1076447 - RNA, 24 nt, Human
ucacaaggucaggagaucaagacc

SEQ ID NO: 1076448 - RNA, 19 nt, Human
uccacccaugaagcucacc

SEQ ID NO: 1076449 - RNA, 19 nt, Human
uccccaagggaaaaugaaa

SEQ ID NO: 1076450 - RNA, 21 nt, Human
ucccugcacuccagccugggc

SEQ ID NO: 1076451 - RNA, 23 nt, Human
ucugucucaaaaaaaaaaaaaaa

SEQ ID NO: 1076452 - RNA, 24 nt, Human
ugaaaauacacgggcauaaaaaua

SEQ ID NO: 1076453 - RNA, 22 nt, Human
ugaaacauuaaagcaaaaugaa

SEQ ID NO: 1076454 - RNA, 23 nt, Human
ugaaauuacaggauaaacugcca

SEQ ID NO: 1076455 - RNA, 26 nt, Human
ugaaauuacaggauaaacugccacua

SEQ ID NO: 1076456 - RNA, 19 nt, Human
ugaaucagcgaaacaacag

SEQ ID NO: 1076457 - RNA, 21 nt, Human
ugaauuaaauuuugucucccg

SEQ ID NO: 1076458 - RNA, 18 nt, Human
ugacuaaagagaaaggca

SEQ ID NO: 1076459 - RNA, 24 nt, Human
ugaggcaggagaacugcuugaacc

SEQ ID NO: 1076460 - RNA, 25 nt, Human
ugaggcaggagaacugcuugaaccc

SEQ ID NO: 1076461 - RNA, 18 nt, Human
ugccacuaacaaaaaagg

SEQ ID NO: 1076462 - RNA, 20 nt, Human
ugccacuaacaaaaaaggaa

SEQ ID NO: 1076463 - RNA, 21 nt, Human
ugccgacagccaucaaggcug

SEQ ID NO: 1076464 - RNA, 23 nt, Human
ugccuauagucccagcuacuugg

SEQ ID NO: 1076465 - RNA, 24 nt, Human
uggaaggccaaggcgggcagauca

SEQ ID NO: 1076466 - RNA, 22 nt, Human
uggacaccagaaaacugccgac

SEQ ID NO: 1076467 - RNA, 18 nt, Human
uggauuaaguuacuuagu

SEQ ID NO: 1076468 - RNA, 23 nt, Human
uggcaaauuaacauuugccuucu

SEQ ID NO: 1076469 - RNA, 24 nt, Human
uggccaggcgcaguggcucacgcc

SEQ ID NO: 1076470 - RNA, 20 nt, Human
uggcuaggguacgccucucu

SEQ ID NO: 1076471 - RNA, 24 nt, Human
uggcucacgccuguaaucccaaca

SEQ ID NO: 1076472 - RNA, 18 nt, Human
uggugcgugccuauaguc

SEQ ID NO: 1076473 - RNA, 24 nt, Human
uggugcgugccuauagucccagcu

SEQ ID NO: 1076474 - RNA, 24 nt, Human
ugguggugcgugccuauaguccca

SEQ ID NO: 1076475 - RNA, 21 nt, Human
uguagaauuaguaguacguua

SEQ ID NO: 1076476 - RNA, 24 nt, Human
ugucccugcacuccagccugggca

SEQ ID NO: 1076477 - RNA, 22 nt, Human
uugccuucuuccuuccuuuaua

SEQ ID NO: 1076478 - RNA, 25 nt, Human
uuuccacugcagguaaguguuucag

SEQ ID NO: 1076479 - RNA, 23 nt, Human
uuucuacuaaaaauacaaaaauu

SEQ ID NO: 1076480 - RNA, 22 nt, Human
uuuuacaguggauaaugcuacc

SEQ ID NO: 1076481 - RNA, 18 nt, Human
aaggaucuagaccuggaa

SEQ ID NO: 1076482 - RNA, 18 nt, Human
agaacagccaaaagaaga

SEQ ID NO: 1076483 - RNA, 22 nt, Human
agaacugauucuuugaaaaaau

SEQ ID NO: 1076484 - RNA, 20 nt, Human
aggaagucuuggcaaauucu

SEQ ID NO: 1076485 - RNA, 23 nt, Human
caaaagaagacauacauagagca

SEQ ID NO: 1076486 - RNA, 22 nt, Human
caaaaggauacaaaucagaaca

SEQ ID NO: 1076487 - RNA, 21 nt, Human
cacaaaguuucugugcccuca

SEQ ID NO: 1076488 - RNA, 18 nt, Human
ccuagaaaaucccaagga

SEQ ID NO: 1076489 - RNA, 18 nt, Human
cuggaaccuggaguggag

SEQ ID NO: 1076490 - RNA, 22 nt, Human
gaacagccaaaagaagacauac

SEQ ID NO: 1076491 - RNA, 22 nt, Human
gaaggacuucuuuuccccaccu

SEQ ID NO: 1076492 - RNA, 18 nt, Human
ggacuucuuuuccccacc

SEQ ID NO: 1076493 - RNA, 22 nt, Human
ggaucuagaccuggaaccugga

SEQ ID NO: 1076494 - RNA, 21 nt, Human
uaacaagaagaaaacauuaga

SEQ ID NO: 1076495 - RNA, 19 nt, Human
uauuauagcaaaaggauac

SEQ ID NO: 1076496 - RNA, 20 nt, Human
ucccaaacacaaaguuucug

SEQ ID NO: 1076497 - RNA, 23 nt, Human
ugcaauuggugaaaaaaauggga

SEQ ID NO: 1076498 - RNA, 19 nt, Human
uucagggaagggaaaugag

SEQ ID NO: 1076499 - RNA, 23 nt, Human
uuuaacaagaagaaaacauuaga

SEQ ID NO: 1076500 - RNA, 22 nt, Human
uuuccccaccuuuuucaacuuu

SEQ ID NO: 1076501 - RNA, 20 nt, Human
uuugggaggagggaaggaag

SEQ ID NO: 1076502 - RNA, 24 nt, Human
uuuguacaaugugcauauauuacc

SEQ ID NO: 1076503 - RNA, 24 nt, Human
aaaaacaggaaauacagagaagga

SEQ ID NO: 1076504 - RNA, 23 nt, Human
aaaacaggaaauacagagaagga

SEQ ID NO: 1076505 - RNA, 20 nt, Human
aaaagguucuggagaccuuu

SEQ ID NO: 1076506 - RNA, 19 nt, Human
aaaauagcauagaacagga

SEQ ID NO: 1076507 - RNA, 18 nt, Human
aaaggcauccaagucaga

SEQ ID NO: 1076508 - RNA, 24 nt, Human
aaauuaccucaacaucauaaaggc

SEQ ID NO: 1076509 - RNA, 21 nt, Human
aacacauugcugaaagcaauu

SEQ ID NO: 1076510 - RNA, 18 nt, Human
aacagaaggaaauuaccu

SEQ ID NO: 1076511 - RNA, 22 nt, Human
aagaaaaagaaauuuaaaaggc

SEQ ID NO: 1076512 - RNA, 21 nt, Human
aagcauagggaaguguagggu

SEQ ID NO: 1076513 - RNA, 19 nt, Human
aagcuuuucuucugagauc

SEQ ID NO: 1076514 - RNA, 24 nt, Human
aaguucucagccuggcggcagucu

SEQ ID NO: 1076515 - RNA, 23 nt, Human
aauaagcaaucugaaaagacaaa

SEQ ID NO: 1076516 - RNA, 28 nt, Human
aaugcagaaagaggaaaacccaauccaa

SEQ ID NO: 1076517 - RNA, 22 nt, Human
acaauuuuuaaaacuccacaaa

SEQ ID NO: 1076518 - RNA, 22 nt, Human
accagccauccccucuacccag

SEQ ID NO: 1076519 - RNA, 20 nt, Human
agaaaaagaaauuuaaaagg

SEQ ID NO: 1076520 - RNA, 25 nt, Human
agaaagaggaaaacccaauccaaaa

SEQ ID NO: 1076521 - RNA, 30 nt, Human
agaaagaggaaaacccaauccaaaaauguu

SEQ ID NO: 1076522 - RNA, 21 nt, Human
agagccagagaggcuuuugga

SEQ ID NO: 1076523 - RNA, 18 nt, Human
agcccucaucuuaguuuc

SEQ ID NO: 1076524 - RNA, 18 nt, Human
agcgguuucugagggaga

SEQ ID NO: 1076525 - RNA, 24 nt, Human
aggaaaaaacacacaaucacuuca

SEQ ID NO: 1076526 - RNA, 20 nt, Human
aggaaauacagagaaggauu

SEQ ID NO: 1076527 - RNA, 27 nt, Human
aggaacaagaaaaggaugccgguaccc

SEQ ID NO: 1076528 - RNA, 25 nt, Human
aggaacagaaggaaauuaccucaac

SEQ ID NO: 1076529 - RNA, 20 nt, Human
aguccagcaggcccaggcuc

SEQ ID NO: 1076530 - RNA, 20 nt, Human
auccccucuacccagcccuc

SEQ ID NO: 1076531 - RNA, 21 nt, Human
auggagucucauugcaugccc

SEQ ID NO: 1076532 - RNA, 25 nt, Human
auuuuuaaaacuccacaaauuaaaa

SEQ ID NO: 1076533 - RNA, 20 nt, Human
caaauauacuuaacacuacu

SEQ ID NO: 1076534 - RNA, 22 nt, Human
caaauuaaaaaacaggaaauac

SEQ ID NO: 1076535 - RNA, 21 nt, Human
caacaaaggaacagaaggaaa

SEQ ID NO: 1076536 - RNA, 26 nt, Human
caacacaacuucaugauuuaaaaaca

SEQ ID NO: 1076537 - RNA, 20 nt, Human
cagccauccccucuacccag

SEQ ID NO: 1076538 - RNA, 24 nt, Human
caggcaagauguguacacugaaaa

SEQ ID NO: 1076539 - RNA, 18 nt, Human
caggcucaguuccugcug

SEQ ID NO: 1076540 - RNA, 22 nt, Human
cagugcaagugacagagccaga

SEQ ID NO: 1076541 - RNA, 27 nt, Human
ccaagcaggcaagauguguacacugaa

SEQ ID NO: 1076542 - RNA, 19 nt, Human
ccaccauacuugacagggu

SEQ ID NO: 1076543 - RNA, 21 nt, Human
ccagcccucacucuggugcca

SEQ ID NO: 1076544 - RNA, 24 nt, Human
cccucaaugacacuguggcuucau

SEQ ID NO: 1076545 - RNA, 23 nt, Human
cgucuuuccuuucucucgucuca

SEQ ID NO: 1076546 - RNA, 21 nt, Human
cugccuggcuccuucagcuau

SEQ ID NO: 1076547 - RNA, 19 nt, Human
cugcguuguucccugcaug

SEQ ID NO: 1076548 - RNA, 18 nt, Human
cugcugccucucaccagc

SEQ ID NO: 1076549 - RNA, 19 nt, Human
cuggagaccuuuuucacaa

SEQ ID NO: 1076550 - RNA, 23 nt, Human
cuguaaucaaaauagcauagaac

SEQ ID NO: 1076551 - RNA, 23 nt, Human
cuucagcuaucaccagccauccc

SEQ ID NO: 1076552 - RNA, 21 nt, Human
cuuggggucagugcaagugac

SEQ ID NO: 1076553 - RNA, 23 nt, Human
gaaauuaccucaacaucauaaag

SEQ ID NO: 1076554 - RNA, 19 nt, Human
gaacaaaaagcauagggaa

SEQ ID NO: 1076555 - RNA, 22 nt, Human
gaaggagcgguuucugagggag

SEQ ID NO: 1076556 - RNA, 21 nt, Human
gagcaaguucuuucucugccu

SEQ ID NO: 1076557 - RNA, 21 nt, Human
gcaaucaggcaagaaaaagaa

SEQ ID NO: 1076558 - RNA, 24 nt, Human
gcagaaagaggaaaacccaaucca

SEQ ID NO: 1076559 - RNA, 24 nt, Human
gcugccucgucuuuccuuucucuc

SEQ ID NO: 1076560 - RNA, 19 nt, Human
ggaaaacccaauccaaaaa

SEQ ID NO: 1076561 - RNA, 24 nt, Human
ggagaccuuuuucacaacucaaau

SEQ ID NO: 1076562 - RNA, 19 nt, Human
ggagcgguuucugagggag

SEQ ID NO: 1076563 - RNA, 20 nt, Human
ggaguccagcaggcccaggc

SEQ ID NO: 1076564 - RNA, 19 nt, Human
ggauggugccaccaccucu

SEQ ID NO: 1076565 - RNA, 20 nt, Human
guucagaugucaauauuucc

SEQ ID NO: 1076566 - RNA, 25 nt, Human
uaaaacaaguagggaacaaaaagca

SEQ ID NO: 1076567 - RNA, 20 nt, Human
uaaaaggcauccaagucaga

SEQ ID NO: 1076568 - RNA, 22 nt, Human
uaauacacuacauuaacagaau

SEQ ID NO: 1076569 - RNA, 20 nt, Human
uagaaaauguaaacauuuca

SEQ ID NO: 1076570 - RNA, 20 nt, Human
uagaacuaauaagcaaauuc

SEQ ID NO: 1076571 - RNA, 24 nt, Human
uagaacuaauaagcaaauucagug

SEQ ID NO: 1076572 - RNA, 24 nt, Human
uagcauagaacaggaauuccuccu

SEQ ID NO: 1076573 - RNA, 23 nt, Human
uagcaucaaaaagaauaaaauac

SEQ ID NO: 1076574 - RNA, 18 nt, Human
uaugaaaagcccacagcu

SEQ ID NO: 1076575 - RNA, 18 nt, Human
ucacaacucaaauauacu

SEQ ID NO: 1076576 - RNA, 22 nt, Human
ucaccagccauccccucuaccc

SEQ ID NO: 1076577 - RNA, 28 nt, Human
ucagcagcaggaagagcaaguucuuucu

SEQ ID NO: 1076578 - RNA, 19 nt, Human
ucaggaacaagaaaaggau

SEQ ID NO: 1076579 - RNA, 25 nt, Human
uccaagucagagguaagaaguaaaa

SEQ ID NO: 1076580 - RNA, 24 nt, Human
uccaccauacuugacagggucacc

SEQ ID NO: 1076581 - RNA, 24 nt, Human
ucccugcauggcugcguuguuccc

SEQ ID NO: 1076582 - RNA, 22 nt, Human
ucccuugggccuuggggucagu

SEQ ID NO: 1076583 - RNA, 21 nt, Human
uccuagcuggagcaaucaggc

SEQ ID NO: 1076584 - RNA, 22 nt, Human
ucgggccagagcccucaucuua

SEQ ID NO: 1076585 - RNA, 29 nt, Human
ucugugguuuugcuuuccgugacaguggu

SEQ ID NO: 1076586 - RNA, 25 nt, Human
ucuucugucuccccucaaugacacu

SEQ ID NO: 1076587 - RNA, 21 nt, Human
ugaaaagacaaacuauuccau

SEQ ID NO: 1076588 - RNA, 23 nt, Human
ugaaaaguacaacacauugcuga

SEQ ID NO: 1076589 - RNA, 21 nt, Human
ugaaagcaauuaaagaggaca

SEQ ID NO: 1076590 - RNA, 23 nt, Human
ugaaagcaauuaaagaggacaua

SEQ ID NO: 1076591 - RNA, 19 nt, Human
ugacaagugugucuucugu

SEQ ID NO: 1076592 - RNA, 23 nt, Human
ugacagggucaccucccuugggc

SEQ ID NO: 1076593 - RNA, 24 nt, Human
ugacuucaaaacuuaucauaaagu

SEQ ID NO: 1076594 - RNA, 23 nt, Human
ugagaucaggaacaagaaaagga

SEQ ID NO: 1076595 - RNA, 18 nt, Human
ugagggagagugccugug

SEQ ID NO: 1076596 - RNA, 20 nt, Human
ugagggagagugccugugcu

SEQ ID NO: 1076597 - RNA, 20 nt, Human
ugauuuaaaaacagucaaca

SEQ ID NO: 1076598 - RNA, 21 nt, Human
ugcaagaugaaaagguucugg

SEQ ID NO: 1076599 - RNA, 24 nt, Human
ugcaaguucucagccuggcggcag

SEQ ID NO: 1076600 - RNA, 19 nt, Human
ugcagaaagaggaaaaccc

SEQ ID NO: 1076601 - RNA, 19 nt, Human
ugccauugcagagccugag

SEQ ID NO: 1076602 - RNA, 22 nt, Human
ugccuggcuccuucagcuauca

SEQ ID NO: 1076603 - RNA, 18 nt, Human
uggcugcguuguucccug

SEQ ID NO: 1076604 - RNA, 21 nt, Human
ugugaucuuggaaaagaacaa

SEQ ID NO: 1076605 - RNA, 24 nt, Human
uuaaaaacagucaacaaaggaaca

SEQ ID NO: 1076606 - RNA, 22 nt, Human
uuaaugcaguccuuuaaugcag

SEQ ID NO: 1076607 - RNA, 19 nt, Human
uuacugaaggagcgguuuc

SEQ ID NO: 1076608 - RNA, 19 nt, Human
uuauguguauuuuaucaca

SEQ ID NO: 1076609 - RNA, 19 nt, Human
uucagcuaucaccagccau

SEQ ID NO: 1076610 - RNA, 23 nt, Human
uucaguuuugcaagaugaaaagg

SEQ ID NO: 1076611 - RNA, 20 nt, Human
uucccugcauggcugcauuu

SEQ ID NO: 1076612 - RNA, 23 nt, Human
uugcaggagacaaaauucacaca

SEQ ID NO: 1076613 - RNA, 22 nt, Human
uuggaggucucauacuuccuga

SEQ ID NO: 1076614 - RNA, 23 nt, Human
uuucucugccuccccgcugccug

SEQ ID NO: 1076615 - RNA, 24 nt, Human
uuugcaaaccaucucugccauugc

SEQ ID NO: 1076616 - RNA, 21 nt, Human
uuuuauacacuaacaauaagc

SEQ ID NO: 1076617 - RNA, 18 nt, Human
aaaggcaccaucuccaca

SEQ ID NO: 1076618 - RNA, 20 nt, Human
aauguuuauaaaccugcuac

SEQ ID NO: 1076619 - RNA, 19 nt, Human
acaaauuucaccaugaggc

SEQ ID NO: 1076620 - RNA, 21 nt, Human
acucgaucccugaauuaguag

SEQ ID NO: 1076621 - RNA, 18 nt, Human
acuuuccagguuucuuuc

SEQ ID NO: 1076622 - RNA, 18 nt, Human
agcagauggucacauucu

SEQ ID NO: 1076623 - RNA, 18 nt, Human
aggaagaaugaaaaccug

SEQ ID NO: 1076624 - RNA, 19 nt, Human
aggaagaaugaaaaccugu

SEQ ID NO: 1076625 - RNA, 21 nt, Human
aggcugaaaagccccagacug

SEQ ID NO: 1076626 - RNA, 20 nt, Human
aucuccacauaaucaucaca

SEQ ID NO: 1076627 - RNA, 22 nt, Human
augcauauauuaccacaccaug

SEQ ID NO: 1076628 - RNA, 24 nt, Human
augggcggguuccagugaggacuu

SEQ ID NO: 1076629 - RNA, 21 nt, Human
auuaguagccuccuuaggucu

SEQ ID NO: 1076630 - RNA, 23 nt, Human
caaaggcaccaucuccacauaau

SEQ ID NO: 1076631 - RNA, 18 nt, Human
cacaccaugaaguagugu

SEQ ID NO: 1076632 - RNA, 21 nt, Human
cacaucuaagcccaguuaccu

SEQ ID NO: 1076633 - RNA, 22 nt, Human
caccuuguggcaguucuaauuc

SEQ ID NO: 1076634 - RNA, 25 nt, Human
caucuaagcccaguuaccucccaaa

SEQ ID NO: 1076635 - RNA, 22 nt, Human
cccacaucuaagcccaguuacc

SEQ ID NO: 1076636 - RNA, 24 nt, Human
cccauagccucuuuguagaauuca

SEQ ID NO: 1076637 - RNA, 25 nt, Human
ccucauguggcagaggaagaaugaa

SEQ ID NO: 1076638 - RNA, 23 nt, Human
cuagguacuagagaagacaugcc

SEQ ID NO: 1076639 - RNA, 22 nt, Human
cuauaugcauauauuaccacaa

SEQ ID NO: 1076640 - RNA, 20 nt, Human
cucaagguuuugcuugcacc

SEQ ID NO: 1076641 - RNA, 22 nt, Human
cucacgcccacaucuaagccca

SEQ ID NO: 1076642 - RNA, 21 nt, Human
cuugagagaugauacuucaag

SEQ ID NO: 1076643 - RNA, 23 nt, Human
gaucccugaauuaguagccuccu

SEQ ID NO: 1076644 - RNA, 22 nt, Human
gcuucuauaugcauauauuacc

SEQ ID NO: 1076645 - RNA, 21 nt, Human
ggauguuuuacucgcaaaugu

SEQ ID NO: 1076646 - RNA, 21 nt, Human
ggugaaggauuagaagaggaa

SEQ ID NO: 1076647 - RNA, 18 nt, Human
uaaugggcauucuucuuu

SEQ ID NO: 1076648 - RNA, 18 nt, Human
uaauuccuuuugcaucuc

SEQ ID NO: 1076649 - RNA, 19 nt, Human
uacucaaauguacacagcc

SEQ ID NO: 1076650 - RNA, 23 nt, Human
uacuugagagaugauacuucaag

SEQ ID NO: 1076651 - RNA, 20 nt, Human
ucucaugguucuggaggcuc

SEQ ID NO: 1076652 - RNA, 19 nt, Human
ugaggacuuuccuccuggc

SEQ ID NO: 1076653 - RNA, 24 nt, Human
ugcuugcaccuuguggcaguucua

SEQ ID NO: 1076654 - RNA, 22 nt, Human
uguggcagaggaagaaugaaaa

SEQ ID NO: 1076655 - RNA, 23 nt, Human
uuauagugcucucuuuacucaaa

SEQ ID NO: 1076656 - RNA, 19 nt, Human
uuuacuagcuucuauaugc

SEQ ID NO: 1076657 - RNA, 19 nt, Human
uuuauaaaccugcuacugc

SEQ ID NO: 1076658 - RNA, 19 nt, Human
uuuccagguuucuuuccca

SEQ ID NO: 1076659 - RNA, 22 nt, Human
aagcuaucuuaaaaccuaaagc

SEQ ID NO: 1076660 - RNA, 19 nt, Human
acaaaguuugauuuuuacc

SEQ ID NO: 1076661 - RNA, 25 nt, Human
acuuccugcuaugcagguuccuaac

SEQ ID NO: 1076662 - RNA, 22 nt, Human
agacacgucccacaacuucucc

SEQ ID NO: 1076663 - RNA, 22 nt, Human
cacacagacacgucccacaacu

SEQ ID NO: 1076664 - RNA, 20 nt, Human
cucacuuccugcuaugcagg

SEQ ID NO: 1076665 - RNA, 23 nt, Human
cuucaagcuaucuuaaaaccuaa

SEQ ID NO: 1076666 - RNA, 18 nt, Human
gagagaauaaaguaggga

SEQ ID NO: 1076667 - RNA, 21 nt, Human
gcccacacucagugaaggacc

SEQ ID NO: 1076668 - RNA, 20 nt, Human
uaaaaccuaaagcaauguua

SEQ ID NO: 1076669 - RNA, 21 nt, Human
uaaagcaauguuaugcuuucc

SEQ ID NO: 1076670 - RNA, 19 nt, Human
uaccaguccgugaccuggc

SEQ ID NO: 1076671 - RNA, 20 nt, Human
uaugcuuuccugagacacaa

SEQ ID NO: 1076672 - RNA, 23 nt, Human
ucagugaaggaccggauaaaacu

SEQ ID NO: 1076673 - RNA, 19 nt, Human
ucaugcuugcuuccggccg

SEQ ID NO: 1076674 - RNA, 23 nt, Human
ucgaucuucaagcuaucuuaaaa

SEQ ID NO: 1076675 - RNA, 23 nt, Human
uuaaaaccuaaagcaauguuagu

SEQ ID NO: 1076676 - RNA, 23 nt, Human
acagcugacauuaaggacaacgc

SEQ ID NO: 1076677 - RNA, 23 nt, Human
agcgaacagcugacauuaaggac

SEQ ID NO: 1076678 - RNA, 24 nt, Human
agcggcagcugccagcccuggggu

SEQ ID NO: 1076679 - RNA, 20 nt, Human
aucggggagagcuggucucu

SEQ ID NO: 1076680 - RNA, 20 nt, Human
cacaucauccuggcccagga

SEQ ID NO: 1076681 - RNA, 25 nt, Human
cagcggcagcugccagcccuggggu

SEQ ID NO: 1076682 - RNA, 22 nt, Human
caggaaggagagagcugugaug

SEQ ID NO: 1076683 - RNA, 18 nt, Human
cauuaaggacaacgcccc

SEQ ID NO: 1076684 - RNA, 24 nt, Human
cccucauuguugcuggcuucugac

SEQ ID NO: 1076685 - RNA, 22 nt, Human
cccucgcaugcaacgguuccac

SEQ ID NO: 1076686 - RNA, 20 nt, Human
cccuggcucccggaggcagg

SEQ ID NO: 1076687 - RNA, 22 nt, Human
ccgggagcgcucuguuucuucu

SEQ ID NO: 1076688 - RNA, 21 nt, Human
ccugugcugugaugaaugggg

SEQ ID NO: 1076689 - RNA, 18 nt, Human
cgcucuguuucuucuucc

SEQ ID NO: 1076690 - RNA, 18 nt, Human
cggcagcugccagcccug

SEQ ID NO: 1076691 - RNA, 20 nt, Human
cggcagcugccagcccuggg

SEQ ID NO: 1076692 - RNA, 23 nt, Human
cucuucaaccugugcugugauga

SEQ ID NO: 1076693 - RNA, 19 nt, Human
gaacagcugacauuaagga

SEQ ID NO: 1076694 - RNA, 21 nt, Human
gagcuggucucuucaaccugu

SEQ ID NO: 1076695 - RNA, 24 nt, Human
gaugcugcagcgaacagcugacau

SEQ ID NO: 1076696 - RNA, 25 nt, Human
gccuucaacaaguccucccuucagc

SEQ ID NO: 1076697 - RNA, 22 nt, Human
gcgcucuguuucuucuuccuug

SEQ ID NO: 1076698 - RNA, 18 nt, Human
gcggcagcugccagcccu

SEQ ID NO: 1076699 - RNA, 22 nt, Human
gcugugaugaauggggcucugc

SEQ ID NO: 1076700 - RNA, 21 nt, Human
guuuacaacuagauguaggug

SEQ ID NO: 1076701 - RNA, 21 nt, Human
ucugcuuuuucaacauuuccc

SEQ ID NO: 1076702 - RNA, 18 nt, Human
ugugauggaaauucugcc

SEQ ID NO: 1076703 - RNA, 20 nt, Human
uucaacauuucccgggagcg

SEQ ID NO: 1076704 - RNA, 19 nt, Human
uucauauuuucucaugccu

SEQ ID NO: 1076705 - RNA, 23 nt, Human
uugcuggcuucugacugccucuc

SEQ ID NO: 1076706 - RNA, 22 nt, Human
uuuuucaacauuucccgggagc

SEQ ID NO: 1076707 - RNA, 20 nt, Human
cccugaagccuuucucuguu

SEQ ID NO: 1076708 - RNA, 21 nt, Human
cucuuuuauuccagaggcggg

SEQ ID NO: 1076709 - RNA, 21 nt, Human
cuuuuauuccagaggcgggaa

SEQ ID NO: 1076710 - RNA, 24 nt, Human
ucucuguucugcgacucuuuuauu

SEQ ID NO: 1076711 - RNA, 21 nt, Human
uuggucucgauuccucugugc

SEQ ID NO: 1076712 - RNA, 22 nt, Human
aaaaaaaaguuucugaagagga

SEQ ID NO: 1076713 - RNA, 20 nt, Human
acacagucacuccagcagca

SEQ ID NO: 1076714 - RNA, 19 nt, Human
agagacacgcggagccugg

SEQ ID NO: 1076715 - RNA, 23 nt, Human
agcuggucgucagucgugacaca

SEQ ID NO: 1076716 - RNA, 18 nt, Human
aguaacaccaaaaacugc

SEQ ID NO: 1076717 - RNA, 22 nt, Human
auugcaaaaaaaaguuucugaa

SEQ ID NO: 1076718 - RNA, 23 nt, Human
caaaaaaaaguuucugaagagga

SEQ ID NO: 1076719 - RNA, 22 nt, Human
caccaaaaacugcugcacgaua

SEQ ID NO: 1076720 - RNA, 24 nt, Human
ccaaaaacugcugcacgauacccu

SEQ ID NO: 1076721 - RNA, 23 nt, Human
ccagccugaagcuaagaaaccga

SEQ ID NO: 1076722 - RNA, 22 nt, Human
cgaagacucucgucagagcugg

SEQ ID NO: 1076723 - RNA, 25 nt, Human
cuccagcagcaaacacgagguaccc

SEQ ID NO: 1076724 - RNA, 23 nt, Human
cucccugggaggaccgcgagcuu

SEQ ID NO: 1076725 - RNA, 18 nt, Human
gaacacacagucacucca

SEQ ID NO: 1076726 - RNA, 27 nt, Human
gcugcgccgcccccugguacccagaga

SEQ ID NO: 1076727 - RNA, 18 nt, Human
gggcaagggaacacacag

SEQ ID NO: 1076728 - RNA, 21 nt, Human
uaagggcaagggaacacacag

SEQ ID NO: 1076729 - RNA, 25 nt, Human
uaauaauauugcaaaaaaaaguuuc

SEQ ID NO: 1076730 - RNA, 23 nt, Human
ucuaauaauauugcaaaaaaaag

SEQ ID NO: 1076731 - RNA, 20 nt, Human
ugaaagcauuucuucaucuu

SEQ ID NO: 1076732 - RNA, 26 nt, Human
uugcaaaaaaaaguuucugaagagga

SEQ ID NO: 1076733 - RNA, 26 nt, Human
aaaagauaaacaaauuagaagccaag

SEQ ID NO: 1076734 - RNA, 23 nt, Human
aaagauaaacaaauuagaagcca

SEQ ID NO: 1076735 - RNA, 23 nt, Human
aagcuuguuuuccugcaacugga

SEQ ID NO: 1076736 - RNA, 24 nt, Human
aagcuuguuuuccugcaacuggau

SEQ ID NO: 1076737 - RNA, 22 nt, Human
acuggauggucccaccuccugc

SEQ ID NO: 1076738 - RNA, 22 nt, Human
acuuagcucccaaggcaugugc

SEQ ID NO: 1076739 - RNA, 25 nt, Human
agaaacgacccuucuucccacaccu

SEQ ID NO: 1076740 - RNA, 26 nt, Human
auaauaaggaaaauaaaauaaaaaau

SEQ ID NO: 1076741 - RNA, 21 nt, Human
caaaaaguugccaugacuguc

SEQ ID NO: 1076742 - RNA, 20 nt, Human
caaauaauaaggaaaauaaa

SEQ ID NO: 1076743 - RNA, 21 nt, Human
caacaguaagugguagcuuga

SEQ ID NO: 1076744 - RNA, 22 nt, Human
caacuggauggucccaccuccu

SEQ ID NO: 1076745 - RNA, 18 nt, Human
caccagcaucccauuucc

SEQ ID NO: 1076746 - RNA, 21 nt, Human
cagcaaccacuuagcucccaa

SEQ ID NO: 1076747 - RNA, 24 nt, Human
cagugggcguguuaagcuuguuuu

SEQ ID NO: 1076748 - RNA, 24 nt, Human
cugcuguguggcuccuugcggcuc

SEQ ID NO: 1076749 - RNA, 20 nt, Human
gacccuucuucccacaccag

SEQ ID NO: 1076750 - RNA, 18 nt, Human
ggaaaggccguugugagg

SEQ ID NO: 1076751 - RNA, 21 nt, Human
ggaagggaaaaacggggccug

SEQ ID NO: 1076752 - RNA, 20 nt, Human
gugcagaaacucacuccaaa

SEQ ID NO: 1076753 - RNA, 21 nt, Human
uaaacaaauuagaagccaaga

SEQ ID NO: 1076754 - RNA, 21 nt, Human
uaagugguagcuugagucacu

SEQ ID NO: 1076755 - RNA, 18 nt, Human
uagaagccaagaggcugc

SEQ ID NO: 1076756 - RNA, 25 nt, Human
ucaacaguaagugguagcuugaguc

SEQ ID NO: 1076757 - RNA, 20 nt, Human
ucaccagcaucccauuuccc

SEQ ID NO: 1076758 - RNA, 21 nt, Human
uccauggcucagggguugggg

SEQ ID NO: 1076759 - RNA, 18 nt, Human
ucccacuggcaaagagcu

SEQ ID NO: 1076760 - RNA, 21 nt, Human
uccugcuguguggcuccuugc

SEQ ID NO: 1076761 - RNA, 23 nt, Human
ucgggcauggugcagaaacucac

SEQ ID NO: 1076762 - RNA, 25 nt, Human
ugcaucagaaacgacccuucuuccc

SEQ ID NO: 1076763 - RNA, 25 nt, Human
ugccggaagggaaaaacggggccug

SEQ ID NO: 1076764 - RNA, 20 nt, Human
uggaaaggccguugugagga

SEQ ID NO: 1076765 - RNA, 18 nt, Human
ugugaggaaugagcuggg

SEQ ID NO: 1076766 - RNA, 18 nt, Human
uucacaguggucaagugc

SEQ ID NO: 1076767 - RNA, 22 nt, Human
uucacaguggucaagugcagca

SEQ ID NO: 1076768 - RNA, 25 nt, Human
uucacaguggucaagugcagcaacc

SEQ ID NO: 1076769 - RNA, 22 nt, Human
uucauugugccaaaaaguugcc

SEQ ID NO: 1076770 - RNA, 27 nt, Human
uucccacaccagucuucacagugguca

SEQ ID NO: 1076771 - RNA, 20 nt, Human
uuggggaccccugcucaagu

SEQ ID NO: 1076772 - RNA, 18 nt, Human
uugugaggaaugagcugg

SEQ ID NO: 1076773 - RNA, 21 nt, Human
uuuuccugcaacuggaugguc

SEQ ID NO: 1076774 - RNA, 18 nt, Human
aacacuuuguuggaaugc

SEQ ID NO: 1076775 - RNA, 19 nt, Human
aacacuuuguuggaaugcu

SEQ ID NO: 1076776 - RNA, 21 nt, Human
aacacuuuguuggaaugcuuu

SEQ ID NO: 1076777 - RNA, 18 nt, Human
caacagcaugggugcaaa

SEQ ID NO: 1076778 - RNA, 21 nt, Human
caaggugaagagagacuuuaa

SEQ ID NO: 1076779 - RNA, 23 nt, Human
cagcaugggugcaaaaaaaaaaa

SEQ ID NO: 1076780 - RNA, 20 nt, Human
ccugcuaagcuuuguuuccu

SEQ ID NO: 1076781 - RNA, 18 nt, Human
cugcuaagcuuuguuucc

SEQ ID NO: 1076782 - RNA, 21 nt, Human
cuuuccacagaacagaaacua

SEQ ID NO: 1076783 - RNA, 20 nt, Human
gaagagagacuuuaacgaug

SEQ ID NO: 1076784 - RNA, 24 nt, Human
guuuuuugcccauacacaugaguc

SEQ ID NO: 1076785 - RNA, 18 nt, Human
ucagcggcguccacgggc

SEQ ID NO: 1076786 - RNA, 20 nt, Human
ucucuggcucuccucuccug

SEQ ID NO: 1076787 - RNA, 19 nt, Human
uguuguaaccuguagcuuc

SEQ ID NO: 1076788 - RNA, 18 nt, Human
aaaaccccuucaaaucuc

SEQ ID NO: 1076789 - RNA, 21 nt, Human
aaaagacaaagugguaucaca

SEQ ID NO: 1076790 - RNA, 25 nt, Human
aaaauaacaucauauaacagagaca

SEQ ID NO: 1076791 - RNA, 20 nt, Human
agaccuaaaagacaaagugg

SEQ ID NO: 1076792 - RNA, 22 nt, Human
agagcuuuggaaaggcuguuac

SEQ ID NO: 1076793 - RNA, 20 nt, Human
agcaaggugcucucuaaagg

SEQ ID NO: 1076794 - RNA, 24 nt, Human
agcuuuggaaaggcuguuacuagg

SEQ ID NO: 1076795 - RNA, 23 nt, Human
caacuuguaaauaaauaaucacu

SEQ ID NO: 1076796 - RNA, 26 nt, Human
caauuuuuagaaguuuggguuucuua

SEQ ID NO: 1076797 - RNA, 19 nt, Human
cacaucacauauuuuguau

SEQ ID NO: 1076798 - RNA, 24 nt, Human
cacaucacauauuuuguaugugug

SEQ ID NO: 1076799 - RNA, 18 nt, Human
caccuauuagagcaaggu

SEQ ID NO: 1076800 - RNA, 18 nt, Human
cacuguuugcucaugcau

SEQ ID NO: 1076801 - RNA, 24 nt, Human
cagauaauguguuaaacccugaag

SEQ ID NO: 1076802 - RNA, 20 nt, Human
caucauauaacagagacaac

SEQ ID NO: 1076803 - RNA, 23 nt, Human
cauuucagauacauaaauugucc

SEQ ID NO: 1076804 - RNA, 23 nt, Human
ccaaaaauuuuaaaugcugaaag

SEQ ID NO: 1076805 - RNA, 22 nt, Human
cccucacacauuggcacaacca

SEQ ID NO: 1076806 - RNA, 19 nt, Human
ccuaaagguaaaucccuca

SEQ ID NO: 1076807 - RNA, 19 nt, Human
cuccagugcucaaacagcc

SEQ ID NO: 1076808 - RNA, 20 nt, Human
cuggcaaaaauaacaucaua

SEQ ID NO: 1076809 - RNA, 22 nt, Human
gagaaggcacaaaauuauccac

SEQ ID NO: 1076810 - RNA, 22 nt, Human
gcacaaaacuguuugucaugaa

SEQ ID NO: 1076811 - RNA, 24 nt, Human
gcugaugggaguuguccacucuuc

SEQ ID NO: 1076812 - RNA, 18 nt, Human
uaaauacagauaaugugu

SEQ ID NO: 1076813 - RNA, 27 nt, Human
uaacagagacaacacauuucagauaca

SEQ ID NO: 1076814 - RNA, 24 nt, Human
uaaguggauaucugucuaguaaga

SEQ ID NO: 1076815 - RNA, 24 nt, Human
uacaaggucccuucuuuucuaauu

SEQ ID NO: 1076816 - RNA, 20 nt, Human
uauaaaagcuuagaguccug

SEQ ID NO: 1076817 - RNA, 20 nt, Human
uaugacauuuuugcuguuuc

SEQ ID NO: 1076818 - RNA, 19 nt, Human
ucaauguuuguuuuugcuu

SEQ ID NO: 1076819 - RNA, 21 nt, Human
uccucaauucaacuauaaaag

SEQ ID NO: 1076820 - RNA, 19 nt, Human
ucugcuccagugcucaaac

SEQ ID NO: 1076821 - RNA, 21 nt, Human
ugcucucuaaaggugugauuu

SEQ ID NO: 1076822 - RNA, 25 nt, Human
uggcacaaccaauuauuacaaccuu

SEQ ID NO: 1076823 - RNA, 19 nt, Human
uggccagaagagaaggcac

SEQ ID NO: 1076824 - RNA, 22 nt, Human
uggguuucuuacugaaauuucc

SEQ ID NO: 1076825 - RNA, 23 nt, Human
uguccaaaauauagagagucaau

SEQ ID NO: 1076826 - RNA, 18 nt, Human
uguccacucuucccucuc

SEQ ID NO: 1076827 - RNA, 23 nt, Human
ugucuaguaagagagaagcaaca

SEQ ID NO: 1076828 - RNA, 22 nt, Human
ugugauuuuggcaucucauagg

SEQ ID NO: 1076829 - RNA, 23 nt, Human
uguuacuaggaaccaaaauauag

SEQ ID NO: 1076830 - RNA, 23 nt, Human
uguuugucaugaagcuguaaaau

SEQ ID NO: 1076831 - RNA, 21 nt, Human
uuagaguccugacugcugaau

SEQ ID NO: 1076832 - RNA, 22 nt, Human
uuccuugaaagccaagcaccag

SEQ ID NO: 1076833 - RNA, 23 nt, Human
uuucuacacuggcuugguggcca

SEQ ID NO: 1076834 - RNA, 24 nt, Human
uuuuggcaucucauaggcuuccuu

SEQ ID NO: 1076835 - RNA, 22 nt, Human
uuuuugcuguuucuacacuggc

SEQ ID NO: 1076836 - RNA, 23 nt, Human
aaaaaaaaaaaaaaaaaaaagag

SEQ ID NO: 1076837 - RNA, 21 nt, Human
aaaaaaacaguacacuacaag

SEQ ID NO: 1076838 - RNA, 28 nt, Human
aaaaaaagagagagagaggaagcaggga

SEQ ID NO: 1076839 - RNA, 21 nt, Human
aaaagaaaaaaaguuuguuaa

SEQ ID NO: 1076840 - RNA, 18 nt, Human
aaacccgggaggcggagg

SEQ ID NO: 1076841 - RNA, 22 nt, Human
aaagaacuguaauauacguaaa

SEQ ID NO: 1076842 - RNA, 19 nt, Human
aaagagagagagaggaagc

SEQ ID NO: 1076843 - RNA, 24 nt, Human
aagcagggaacaacugagccaaaa

SEQ ID NO: 1076844 - RNA, 19 nt, Human
aauaaccugagguuuccaa

SEQ ID NO: 1076845 - RNA, 18 nt, Human
aauugcuuaaacccggga

SEQ ID NO: 1076846 - RNA, 24 nt, Human
acagagcgagacuccaucucaaaa

SEQ ID NO: 1076847 - RNA, 18 nt, Human
acauguauaaguaucaua

SEQ ID NO: 1076848 - RNA, 24 nt, Human
accagaguucacugaucucacauu

SEQ ID NO: 1076849 - RNA, 21 nt, Human
accagccuagccaaaagagug

SEQ ID NO: 1076850 - RNA, 24 nt, Human
acccugucucuacuaaaaauacaa

SEQ ID NO: 1076851 - RNA, 24 nt, Human
acugcacuccagccugggcgacag

SEQ ID NO: 1076852 - RNA, 26 nt, Human
acugcacuccagccugggcgacagag

SEQ ID NO: 1076853 - RNA, 18 nt, Human
agaaucugccaauuaccu

SEQ ID NO: 1076854 - RNA, 20 nt, Human
agagagagaggaagcaggga

SEQ ID NO: 1076855 - RNA, 19 nt, Human
agagagaggaagcagggaa

SEQ ID NO: 1076856 - RNA, 24 nt, Human
agcacuuugggaggccgaggcggg

SEQ ID NO: 1076857 - RNA, 22 nt, Human
agccaaaacaaaauuauccccu

SEQ ID NO: 1076858 - RNA, 23 nt, Human
agccaggcgugguggcaggugcc

SEQ ID NO: 1076859 - RNA, 24 nt, Human
agccugggcgacagagcgagacuc

SEQ ID NO: 1076860 - RNA, 21 nt, Human
aggaugcagugagcugagauc

SEQ ID NO: 1076861 - RNA, 19 nt, Human
aggcagccaaccugguaag

SEQ ID NO: 1076862 - RNA, 21 nt, Human
aggccgaggcggguggaucac

SEQ ID NO: 1076863 - RNA, 20 nt, Human
aggcggaggaugcagugagc

SEQ ID NO: 1076864 - RNA, 24 nt, Human
aggcggaggaugcagugagcugag

SEQ ID NO: 1076865 - RNA, 24 nt, Human
aggcggguggaucacgaggucagg

SEQ ID NO: 1076866 - RNA, 24 nt, Human
aggcgugguggcaggugccuguaa

SEQ ID NO: 1076867 - RNA, 21 nt, Human
agggaacaacugagccaaaac

SEQ ID NO: 1076868 - RNA, 21 nt, Human
aggugccuguaaucccaacua

SEQ ID NO: 1076869 - RNA, 18 nt, Human
agugaaacccugucucua

SEQ ID NO: 1076870 - RNA, 23 nt, Human
auagaaaauauccuugauuuccc

SEQ ID NO: 1076871 - RNA, 20 nt, Human
aucaaauauggucccggauc

SEQ ID NO: 1076872 - RNA, 22 nt, Human
aucacgaggucaggaguucaag

SEQ ID NO: 1076873 - RNA, 24 nt, Human
aucgcgccacugcacuccagccug

SEQ ID NO: 1076874 - RNA, 23 nt, Human
augagaucaaauucauauaaacg

SEQ ID NO: 1076875 - RNA, 19 nt, Human
augcagugagcugagaucg

SEQ ID NO: 1076876 - RNA, 22 nt, Human
augcagugagcugagaucgcgc

SEQ ID NO: 1076877 - RNA, 19 nt, Human
augccuguaaucccagcac

SEQ ID NO: 1076878 - RNA, 23 nt, Human
auguagacaauugcuuaaacccg

SEQ ID NO: 1076879 - RNA, 18 nt, Human
caaaacaaaauuaucccc

SEQ ID NO: 1076880 - RNA, 23 nt, Human
caaugagcucugucccugcaucu

SEQ ID NO: 1076881 - RNA, 19 nt, Human
cacauguauaaguaucaua

SEQ ID NO: 1076882 - RNA, 23 nt, Human
cacuccagccugggcgacagagc

SEQ ID NO: 1076883 - RNA, 24 nt, Human
cacuccagccugggcgacagagcg

SEQ ID NO: 1076884 - RNA, 19 nt, Human
cacugcacuccagccuggg

SEQ ID NO: 1076885 - RNA, 20 nt, Human
cacugcacuccagccugggc

SEQ ID NO: 1076886 - RNA, 22 nt, Human
cacugcacuccagccugggcga

SEQ ID NO: 1076887 - RNA, 23 nt, Human
cacugcacuccagccugggcgac

SEQ ID NO: 1076888 - RNA, 24 nt, Human
cacugcacuccagccugggcgaca

SEQ ID NO: 1076889 - RNA, 24 nt, Human
cagcacuuugggaggccgaggcgg

SEQ ID NO: 1076890 - RNA, 24 nt, Human
caggcauguggcucaugccuguaa

SEQ ID NO: 1076891 - RNA, 20 nt, Human
caugccuguaaucccagcac

SEQ ID NO: 1076892 - RNA, 24 nt, Human
caugccuguaaucccagcacuuug

SEQ ID NO: 1076893 - RNA, 24 nt, Human
ccaaaacaaaauuauccccuaagg

SEQ ID NO: 1076894 - RNA, 21 nt, Human
ccaaaagagugaaacccuguc

SEQ ID NO: 1076895 - RNA, 20 nt, Human
ccacugcacuccagccuggg

SEQ ID NO: 1076896 - RNA, 21 nt, Human
ccacugcacuccagccugggc

SEQ ID NO: 1076897 - RNA, 21 nt, Human
ccacugcacuccagccugggc

SEQ ID NO: 1076898 - RNA, 23 nt, Human
ccacugcacuccagccugggcga

SEQ ID NO: 1076899 - RNA, 24 nt, Human
ccacugcacuccagccugggcgac

SEQ ID NO: 1076900 - RNA, 20 nt, Human
ccagaguucacugaucucac

SEQ ID NO: 1076901 - RNA, 25 nt, Human
ccaucucaaaaaaaaaaaaaaaaaa

SEQ ID NO: 1076902 - RNA, 21 nt, Human
cccacacaauaauugcccaga

SEQ ID NO: 1076903 - RNA, 18 nt, Human
ccccuaaggacuugacuu

SEQ ID NO: 1076904 - RNA, 22 nt, Human
ccuagccaaaagagugaaaccc

SEQ ID NO: 1076905 - RNA, 24 nt, Human
ccuagccaaaagagugaaacccug

SEQ ID NO: 1076906 - RNA, 21 nt, Human
ccucacccacacaauaauugc

SEQ ID NO: 1076907 - RNA, 22 nt, Human
ccugggcgacagagcgagacuc

SEQ ID NO: 1076908 - RNA, 19 nt, Human
ccuguaaucccaacuacuc

SEQ ID NO: 1076909 - RNA, 22 nt, Human
ccuguaaucccagcacuuuggg

SEQ ID NO: 1076910 - RNA, 23 nt, Human
cgagacuccaucucaaaaaaaaa

SEQ ID NO: 1076911 - RNA, 26 nt, Human
cgccacugcacuccagccugggcgac

SEQ ID NO: 1076912 - RNA, 21 nt, Human
cgggaggcggaggaugcagug

SEQ ID NO: 1076913 - RNA, 21 nt, Human
cuagccaaaagagugaaaccc

SEQ ID NO: 1076914 - RNA, 18 nt, Human
cucaaaaaaaaaaaaaaa

SEQ ID NO: 1076915 - RNA, 19 nt, Human
cucaggaggcugauguaga

SEQ ID NO: 1076916 - RNA, 23 nt, Human
cucaugccuguaaucccagcacu

SEQ ID NO: 1076917 - RNA, 24 nt, Human
cucaugccuguaaucccagcacuu

SEQ ID NO: 1076918 - RNA, 19 nt, Human
cuccaucucaaaaaaaaaa

SEQ ID NO: 1076919 - RNA, 21 nt, Human
cuuccauccucacccacacaa

SEQ ID NO: 1076920 - RNA, 22 nt, Human
cuuuccaugcaaacaguggcua

SEQ ID NO: 1076921 - RNA, 24 nt, Human
cuuuucauugaguugacuucugau

SEQ ID NO: 1076922 - RNA, 23 nt, Human
gaggaugcagugagcugagaucg

SEQ ID NO: 1076923 - RNA, 23 nt, Human
gaggcggguggaucacgagguca

SEQ ID NO: 1076924 - RNA, 19 nt, Human
gaguaucaucauaccaaaa

SEQ ID NO: 1076925 - RNA, 22 nt, Human
gaucacgaggucaggaguucaa

SEQ ID NO: 1076926 - RNA, 24 nt, Human
gaucacgaggucaggaguucaaga

SEQ ID NO: 1076927 - RNA, 24 nt, Human
gcacuccagccugggcgacagagc

SEQ ID NO: 1076928 - RNA, 24 nt, Human
gccaaaagagugaaacccugucuc

SEQ ID NO: 1076929 - RNA, 25 nt, Human
gccaauuaccuagauccuccugaac

SEQ ID NO: 1076930 - RNA, 22 nt, Human
gccacugcacuccagccugggc

SEQ ID NO: 1076931 - RNA, 24 nt, Human
gccacugcacuccagccugggcga

SEQ ID NO: 1076932 - RNA, 20 nt, Human
gcugagaucgcgccacugca

SEQ ID NO: 1076933 - RNA, 22 nt, Human
gcugcauggcugaaaccuccau

SEQ ID NO: 1076934 - RNA, 18 nt, Human
ggaggaugcagugagcug

SEQ ID NO: 1076935 - RNA, 24 nt, Human
ggaggaugcagugagcugagaucg

SEQ ID NO: 1076936 - RNA, 21 nt, Human
ggcggaggaugcagugagcug

SEQ ID NO: 1076937 - RNA, 23 nt, Human
gguggaucacgaggucaggaguu

SEQ ID NO: 1076938 - RNA, 21 nt, Human
gugaaacccugucucuacuaa

SEQ ID NO: 1076939 - RNA, 20 nt, Human
gugcuaccuuuucauugagu

SEQ ID NO: 1076940 - RNA, 23 nt, Human
guggaucacgaggucaggaguuc

SEQ ID NO: 1076941 - RNA, 22 nt, Human
guggcucaugccuguaauccca

SEQ ID NO: 1076942 - RNA, 23 nt, Human
guggcucaugccuguaaucccag

SEQ ID NO: 1076943 - RNA, 25 nt, Human
uaaaaagaacuguaauauacguaaa

SEQ ID NO: 1076944 - RNA, 21 nt, Human
uaaaaauacaaaaauuagcca

SEQ ID NO: 1076945 - RNA, 22 nt, Human
uaaauaauaaccugagguuucc

SEQ ID NO: 1076946 - RNA, 26 nt, Human
uaacaaaauacuaaaucauaaacugg

SEQ ID NO: 1076947 - RNA, 18 nt, Human
uaagagccaggcugcaug

SEQ ID NO: 1076948 - RNA, 20 nt, Human
uaaguaguaacaaacauccc

SEQ ID NO: 1076949 - RNA, 19 nt, Human
uaagugauuccuaaacaga

SEQ ID NO: 1076950 - RNA, 24 nt, Human
uacacacucaaaaaaaacaguaca

SEQ ID NO: 1076951 - RNA, 22 nt, Human
uagaaaauguuucaaaugcuau

SEQ ID NO: 1076952 - RNA, 20 nt, Human
uagagaggaagcagggaggg

SEQ ID NO: 1076953 - RNA, 19 nt, Human
uagcagaguuucugccuuc

SEQ ID NO: 1076954 - RNA, 19 nt, Human
uauauuacucccaaggacc

SEQ ID NO: 1076955 - RNA, 24 nt, Human
uauauuacucccaaggaccuuguu

SEQ ID NO: 1076956 - RNA, 23 nt, Human
uaucauagcuauuagaaaauguu

SEQ ID NO: 1076957 - RNA, 19 nt, Human
uauuuggcaagagcuaaga

SEQ ID NO: 1076958 - RNA, 22 nt, Human
ucaaaaaaaaaaaaaaaaaaaa

SEQ ID NO: 1076959 - RNA, 23 nt, Human
ucaaaaaaaaaaaaaaaaaaaaa

SEQ ID NO: 1076960 - RNA, 23 nt, Human
ucaaaaaaaacaguacacuacaa

SEQ ID NO: 1076961 - RNA, 24 nt, Human
ucacgaggucaggaguucaagacc

SEQ ID NO: 1076962 - RNA, 21 nt, Human
ucacugaucucacauuuuaaa

SEQ ID NO: 1076963 - RNA, 19 nt, Human
ucagaaagagcuucaaaca

SEQ ID NO: 1076964 - RNA, 25 nt, Human
uccaagauuugaauacccugaacuu

SEQ ID NO: 1076965 - RNA, 23 nt, Human
uccagccugggcgacagagcgag

SEQ ID NO: 1076966 - RNA, 24 nt, Human
uccagccugggcgacagagcgaga

SEQ ID NO: 1076967 - RNA, 23 nt, Human
uccaucucaaaaaaaaaaaaaaa

SEQ ID NO: 1076968 - RNA, 23 nt, Human
ucgcgccacugcacuccagccug

SEQ ID NO: 1076969 - RNA, 23 nt, Human
ucucuacuaaaaauacaaaaauu

SEQ ID NO: 1076970 - RNA, 20 nt, Human
ugaaaacagacaauguggua

SEQ ID NO: 1076971 - RNA, 19 nt, Human
ugaacuuccugaaagcaca

SEQ ID NO: 1076972 - RNA, 24 nt, Human
ugagaucgcgccacugcacuccag

SEQ ID NO: 1076973 - RNA, 23 nt, Human
ugagcucugucccugcaucugaa

SEQ ID NO: 1076974 - RNA, 22 nt, Human
ugagcugagaucgcgccacugc

SEQ ID NO: 1076975 - RNA, 24 nt, Human
ugauguagacaauugcuuaaaccc

SEQ ID NO: 1076976 - RNA, 24 nt, Human
ugccuguaaucccaacuacucagg

SEQ ID NO: 1076977 - RNA, 23 nt, Human
ugccuguaaucccagcacuuugg

SEQ ID NO: 1076978 - RNA, 23 nt, Human
ugccuguaaucccagcacuuugg

SEQ ID NO: 1076979 - RNA, 18 nt, Human
ugcuacuucaucaucagu

SEQ ID NO: 1076980 - RNA, 22 nt, Human
uggaucacgaggucaggaguuc

SEQ ID NO: 1076981 - RNA, 18 nt, Human
uggcaagagcuaagagua

SEQ ID NO: 1076982 - RNA, 22 nt, Human
uggcucaugccuguaaucccag

SEQ ID NO: 1076983 - RNA, 24 nt, Human
uggcucaugccuguaaucccagca

SEQ ID NO: 1076984 - RNA, 21 nt, Human
uggcugaaaccuccauccaaa

SEQ ID NO: 1076985 - RNA, 23 nt, Human
uggcugaaaccuccauccaaauc

SEQ ID NO: 1076986 - RNA, 22 nt, Human
ugggaaaauauccaucaaugag

SEQ ID NO: 1076987 - RNA, 23 nt, Human
ugggaggccgaggcggguggauc

SEQ ID NO: 1076988 - RNA, 24 nt, Human
ugggaggccgaggcggguggauca

SEQ ID NO: 1076989 - RNA, 24 nt, Human
ugguggcaggugccuguaauccca

SEQ ID NO: 1076990 - RNA, 24 nt, Human
uguggcucaugccuguaaucccag

SEQ ID NO: 1076991 - RNA, 20 nt, Human
ugugguauuuuuucagccau

SEQ ID NO: 1076992 - RNA, 21 nt, Human
uuccuuuccaugcaaacagug

SEQ ID NO: 1076993 - RNA, 24 nt, Human
uugcuuaaacccgggaggcggagg

SEQ ID NO: 1076994 - RNA, 25 nt, Human
uugggaggccgaggcggguggauca

SEQ ID NO: 1076995 - RNA, 21 nt, Human
acagcacugaguacaucaugc

SEQ ID NO: 1076996 - RNA, 22 nt, Human
auagucuuaaguguguauaaaa

SEQ ID NO: 1076997 - RNA, 25 nt, Human
aagccagcacauaucuuuaacaggg

SEQ ID NO: 1076998 - RNA, 26 nt, Human
aagccagcacauaucuuuaacagggg

SEQ ID NO: 1076999 - RNA, 23 nt, Human
acacagcuuuuugcaaaaaggcc

SEQ ID NO: 1077000 - RNA, 18 nt, Human
agcuccgaaucccaaccu

SEQ ID NO: 1077001 - RNA, 24 nt, Human
aggggguuucgcuauguuucccag

SEQ ID NO: 1077002 - RNA, 21 nt, Human
caacucaggggcaaagagaaa

SEQ ID NO: 1077003 - RNA, 24 nt, Human
cagcaggggcugucuagccaugac

SEQ ID NO: 1077004 - RNA, 18 nt, Human
caggcccagcaggggcug

SEQ ID NO: 1077005 - RNA, 21 nt, Human
ccagcaggggcugucuagcca

SEQ ID NO: 1077006 - RNA, 23 nt, Human
ccucaaaucuccugacacaacuc

SEQ ID NO: 1077007 - RNA, 19 nt, Human
ccugaccucaagugauccg

SEQ ID NO: 1077008 - RNA, 24 nt, Human
ccugaccucaagugauccgcccac

SEQ ID NO: 1077009 - RNA, 24 nt, Human
cgcuauguuucccaggcuggucuc

SEQ ID NO: 1077010 - RNA, 26 nt, Human
cucaagugauccgcccaccuugggac

SEQ ID NO: 1077011 - RNA, 23 nt, Human
gaccucaagugauccgcccaccu

SEQ ID NO: 1077012 - RNA, 18 nt, Human
gcaaagagaaagggacag

SEQ ID NO: 1077013 - RNA, 24 nt, Human
ggcuggucucuaauuccugaccuc

SEQ ID NO: 1077014 - RNA, 23 nt, Human
uaagaagccagcacauaucuuua

SEQ ID NO: 1077015 - RNA, 19 nt, Human
uagagaggggguuucgcua

SEQ ID NO: 1077016 - RNA, 22 nt, Human
uagagaggggguuucgcuaugu

SEQ ID NO: 1077017 - RNA, 21 nt, Human
uagccaugacauaagaagcca

SEQ ID NO: 1077018 - RNA, 19 nt, Human
uauguuucccaggcugguc

SEQ ID NO: 1077019 - RNA, 24 nt, Human
uauguuucccaggcuggucucuaa

SEQ ID NO: 1077020 - RNA, 22 nt, Human
ucgcuauguuucccaggcuggu

SEQ ID NO: 1077021 - RNA, 25 nt, Human
ugacacaacucaggggcaaagagaa

SEQ ID NO: 1077022 - RNA, 18 nt, Human
ugaccucaagugauccgc

SEQ ID NO: 1077023 - RNA, 24 nt, Human
uguagagaggggguuucgcuaugu

SEQ ID NO: 1077024 - RNA, 22 nt, Human
uuccucaaaucuccugacacaa

SEQ ID NO: 1077025 - RNA, 24 nt, Human
uuguagagaggggguuucgcuaug

SEQ ID NO: 1077026 - RNA, 24 nt, Human
uuuguagagaggggguuucgcuau

SEQ ID NO: 1077027 - RNA, 24 nt, Human
uuuuuuguagagaggggguuucgc

SEQ ID NO: 1077028 - RNA, 24 nt, Human
uuuuuuuguagagaggggguuucg

SEQ ID NO: 1077029 - RNA, 30 nt, Human
uuuuuuuuuuuuguagagaggggguuucgc

SEQ ID NO: 1077030 - RNA, 24 nt, Human
uuuuuuuuuuuuuuguagagaggg

SEQ ID NO: 1077031 - RNA, 22 nt, Human
aacuuguguuccucacauccuu

SEQ ID NO: 1077032 - RNA, 25 nt, Human
cuccuagaacuugagcaacaaaaaa

SEQ ID NO: 1077033 - RNA, 23 nt, Human
cugccacccccacuagcuggccc

SEQ ID NO: 1077034 - RNA, 22 nt, Human
gagaccucugccacccccacua

SEQ ID NO: 1077035 - RNA, 24 nt, Human
gcaaagagaccucugccaccccca

SEQ ID NO: 1077036 - RNA, 23 nt, Human
gcaacaaaaaaaagaguucaacc

SEQ ID NO: 1077037 - RNA, 19 nt, Human
gcccaguccuggaaacgga

SEQ ID NO: 1077038 - RNA, 24 nt, Human
ggaaagggacuccuagaacuugag

SEQ ID NO: 1077039 - RNA, 22 nt, Human
uagcuggcccaguccuggaaac

SEQ ID NO: 1077040 - RNA, 27 nt, Human
ucuacagagcucgggcugaaugaagca

SEQ ID NO: 1077041 - RNA, 21 nt, Human
ugaaaaggaaacuaugacaaa

SEQ ID NO: 1077042 - RNA, 22 nt, Human
ugaagcaaagagaccucugcca

SEQ ID NO: 1077043 - RNA, 19 nt, Human
ugagcaacaaaaaaaagag

SEQ ID NO: 1077044 - RNA, 20 nt, Human
uggcccaguccuggaaacgg

SEQ ID NO: 1077045 - RNA, 20 nt, Human
aacuuguuucucaaaggcag

SEQ ID NO: 1077046 - RNA, 20 nt, Human
agauuggcauuuuuucacga

SEQ ID NO: 1077047 - RNA, 23 nt, Human
aggagaagcaggucuacaccaaa

SEQ ID NO: 1077048 - RNA, 25 nt, Human
caacaaaacuuguuucucaaaggca

SEQ ID NO: 1077049 - RNA, 20 nt, Human
cgcggcgcgcagucugggcg

SEQ ID NO: 1077050 - RNA, 23 nt, Human
cggcgcgcagucugggcgcacgg

SEQ ID NO: 1077051 - RNA, 27 nt, Human
cguguuugcagaauucaccacccaagg

SEQ ID NO: 1077052 - RNA, 23 nt, Human
gagaagcaggucuacaccaaaag

SEQ ID NO: 1077053 - RNA, 24 nt, Human
guggggcggugcuccggucuggac

SEQ ID NO: 1077054 - RNA, 26 nt, Human
guguuugcagaauucaccacccaagg

SEQ ID NO: 1077055 - RNA, 22 nt, Human
ucagaugugcauugagacugca

SEQ ID NO: 1077056 - RNA, 22 nt, Human
ucuccugcgcuagcgguggggc

SEQ ID NO: 1077057 - RNA, 21 nt, Human
ugaaggagugaucugguagau

SEQ ID NO: 1077058 - RNA, 21 nt, Human
ugaggcaaugccucacgggac

SEQ ID NO: 1077059 - RNA, 30 nt, Human
uuaaagucaaaacuucacacagggcuuacu

SEQ ID NO: 1077060 - RNA, 23 nt, Human
uuucacgaucguguuugcagaau

SEQ ID NO: 1077061 - RNA, 22 nt, Human
aaaaagacaaagcuacaacaga

SEQ ID NO: 1077062 - RNA, 23 nt, Human
aaaagaaaaagaaaaagacaaag

SEQ ID NO: 1077063 - RNA, 23 nt, Human
aacagcucucuuugguuccacua

SEQ ID NO: 1077064 - RNA, 23 nt, Human
aacuguggcuaugagaguccuga

SEQ ID NO: 1077065 - RNA, 19 nt, Human
acagaauccucucuagaaa

SEQ ID NO: 1077066 - RNA, 20 nt, Human
accaccaacaaaaauuuucu

SEQ ID NO: 1077067 - RNA, 18 nt, Human
acuaccacaauuuacagg

SEQ ID NO: 1077068 - RNA, 20 nt, Human
agaaaaagacaaagcuacaa

SEQ ID NO: 1077069 - RNA, 23 nt, Human
auaaaagaccucaggaaucuaca

SEQ ID NO: 1077070 - RNA, 18 nt, Human
aucuucuuuaauaccacc

SEQ ID NO: 1077071 - RNA, 21 nt, Human
augaaaagaaaaagaaaaaga

SEQ ID NO: 1077072 - RNA, 24 nt, Human
cugauguaaugaaaagaaaaagaa

SEQ ID NO: 1077073 - RNA, 18 nt, Human
gaaaagaaaaagaaaaag

SEQ ID NO: 1077074 - RNA, 19 nt, Human
gaaaagaaaaagaaaaaga

SEQ ID NO: 1077075 - RNA, 21 nt, Human
uaaugaaaagaaaaagaaaaa

SEQ ID NO: 1077076 - RNA, 18 nt, Human
uccucucuagaaacagcu

SEQ ID NO: 1077077 - RNA, 20 nt, Human
uccugacaacuccuugcucu

SEQ ID NO: 1077078 - RNA, 21 nt, Human
ucuaaugcauuugggacaacu

SEQ ID NO: 1077079 - RNA, 18 nt, Human
ugagaguccugaacaaga

SEQ ID NO: 1077080 - RNA, 21 nt, Human
uggcuaugagaguccugaaca

SEQ ID NO: 1077081 - RNA, 20 nt, Human
uuacagaauccucucuagaa

SEQ ID NO: 1077082 - RNA, 21 nt, Human
uucuaugguuucaaucuugcu

SEQ ID NO: 1077083 - RNA, 18 nt, Human
uugcaaacuguggcuaug

SEQ ID NO: 1077084 - RNA, 22 nt, Human
uuuacagaauccucucuagaaa

SEQ ID NO: 1077085 - RNA, 26 nt, Human
aaaccaucucccuucuggcuccccca

SEQ ID NO: 1077086 - RNA, 23 nt, Human
aaacuccuggguccaagcaaucc

SEQ ID NO: 1077087 - RNA, 21 nt, Human
aaaugaccaacaaaaggaagc

SEQ ID NO: 1077088 - RNA, 24 nt, Human
aacacaaucucaaaaucuaugccu

SEQ ID NO: 1077089 - RNA, 20 nt, Human
aacauggcaaaaccucgucu

SEQ ID NO: 1077090 - RNA, 18 nt, Human
aaccuccgccucuggauc

SEQ ID NO: 1077091 - RNA, 21 nt, Human
aagaagugauuauaggccaga

SEQ ID NO: 1077092 - RNA, 22 nt, Human
aagagacaggguuuugccaugu

SEQ ID NO: 1077093 - RNA, 25 nt, Human
aagcaauccuucugccucagccucc

SEQ ID NO: 1077094 - RNA, 24 nt, Human
aagcagguagaucccuugagccca

SEQ ID NO: 1077095 - RNA, 23 nt, Human
aagguggguggaucaccuuaggu

SEQ ID NO: 1077096 - RNA, 19 nt, Human
aagguuuugaaauuuguuu

SEQ ID NO: 1077097 - RNA, 25 nt, Human
aagugauccucccaccuuggcuucc

SEQ ID NO: 1077098 - RNA, 27 nt, Human
aagugauccucccaccuuggcuuccca

SEQ ID NO: 1077099 - RNA, 23 nt, Human
aauuucaucacauucucuuacug

SEQ ID NO: 1077100 - RNA, 18 nt, Human
aauuuuuuguauuuuuag

SEQ ID NO: 1077101 - RNA, 23 nt, Human
acacacacacacacacacacaca

SEQ ID NO: 1077102 - RNA, 23 nt, Human
acacacacacacacacacacaca

SEQ ID NO: 1077103 - RNA, 23 nt, Human
acacacacacacacacacacaca

SEQ ID NO: 1077104 - RNA, 23 nt, Human
acacacacacacacacacacaca

SEQ ID NO: 1077105 - RNA, 23 nt, Human
acacacacacacacacacacaca

SEQ ID NO: 1077106 - RNA, 23 nt, Human
acacacacacacacacacacaca

SEQ ID NO: 1077107 - RNA, 23 nt, Human
acacacacacacacacacacaca

SEQ ID NO: 1077108 - RNA, 23 nt, Human
acacacacacacacacacacaca

SEQ ID NO: 1077109 - RNA, 23 nt, Human
acacacacacacacacacacaua

SEQ ID NO: 1077110 - RNA, 23 nt, Human
acacacacacacacacacacaua

SEQ ID NO: 1077111 - RNA, 24 nt, Human
acagacggagacccugucucaaaa

SEQ ID NO: 1077112 - RNA, 18 nt, Human
acaggguuuugccauguu

SEQ ID NO: 1077113 - RNA, 21 nt, Human
acaggguuuugccauguuggu

SEQ ID NO: 1077114 - RNA, 23 nt, Human
acaggguuuugccauguugguca

SEQ ID NO: 1077115 - RNA, 24 nt, Human
acaggguuuugccauguuggucag

SEQ ID NO: 1077116 - RNA, 21 nt, Human
acaguggcaagaucuuggcuc

SEQ ID NO: 1077117 - RNA, 18 nt, Human
accacacccagcaaauuu

SEQ ID NO: 1077118 - RNA, 24 nt, Human
accaucucccuucuggcuccccca

SEQ ID NO: 1077119 - RNA, 28 nt, Human
acccugucucaaaaaaaaaaaaaaaaaa

SEQ ID NO: 1077120 - RNA, 23 nt, Human
accucgucucuaugaaaauacaa

SEQ ID NO: 1077121 - RNA, 24 nt, Human
acuacacuccagacagggaaacag

SEQ ID NO: 1077122 - RNA, 19 nt, Human
acuacaggugcgugucacc

SEQ ID NO: 1077123 - RNA, 19 nt, Human
acuuaaggagaauugguga

SEQ ID NO: 1077124 - RNA, 23 nt, Human
agaaacccaacucaaauauuagu

SEQ ID NO: 1077125 - RNA, 19 nt, Human
agaagaagauagaggcagg

SEQ ID NO: 1077126 - RNA, 21 nt, Human
agacaaaaaacaguacaugua

SEQ ID NO: 1077127 - RNA, 18 nt, Human
agacaggguuuugccaug

SEQ ID NO: 1077128 - RNA, 22 nt, Human
agagaggagcacaucaaugaaa

SEQ ID NO: 1077129 - RNA, 22 nt, Human
agauacaggagugcugggaagg

SEQ ID NO: 1077130 - RNA, 20 nt, Human
agcacuuugaggggcugaag

SEQ ID NO: 1077131 - RNA, 25 nt, Human
agcagaagaagauagaggcaggggg

SEQ ID NO: 1077132 - RNA, 20 nt, Human
agcaggcucaaguuauucca

SEQ ID NO: 1077133 - RNA, 23 nt, Human
agcuggucuugaacucagggcuc

SEQ ID NO: 1077134 - RNA, 26 nt, Human
aggaaaaagaauaaaaauaaacagaa

SEQ ID NO: 1077135 - RNA, 22 nt, Human
aggcaggaggaugauuugagcc

SEQ ID NO: 1077136 - RNA, 24 nt, Human
aggcaggaggaugauuugagccug

SEQ ID NO: 1077137 - RNA, 24 nt, Human
aggccagaugugguggcucaugcc

SEQ ID NO: 1077138 - RNA, 24 nt, Human
aggcugaggcaggaggaugauuug

SEQ ID NO: 1077139 - RNA, 21 nt, Human
aggugauccacccaccugagu

SEQ ID NO: 1077140 - RNA, 24 nt, Human
aggugugguggcucaugccuguaa

SEQ ID NO: 1077141 - RNA, 24 nt, Human
aguacaguggcaagaucuuggcuc

SEQ ID NO: 1077142 - RNA, 20 nt, Human
agugcaauggugcgaucaug

SEQ ID NO: 1077143 - RNA, 23 nt, Human
agugcaauggugcgaucauggcu

SEQ ID NO: 1077144 - RNA, 22 nt, Human
auaggccagaugugguggcuca

SEQ ID NO: 1077145 - RNA, 24 nt, Human
auaggccagaugugguggcucaug

SEQ ID NO: 1077146 - RNA, 21 nt, Human
aucagagguuagaauguucca

SEQ ID NO: 1077147 - RNA, 20 nt, Human
auccuucugccucagccucc

SEQ ID NO: 1077148 - RNA, 22 nt, Human
augaaaaacaacuauuguugca

SEQ ID NO: 1077149 - RNA, 24 nt, Human
augauucuccugccucagccuccc

SEQ ID NO: 1077150 - RNA, 19 nt, Human
augccuguaaucccagcac

SEQ ID NO: 1077151 - RNA, 27 nt, Human
auuuugaucuguaaucuuuuuuuuuuu

SEQ ID NO: 1077152 - RNA, 23 nt, Human
caaaagagacaggguuuugccau

SEQ ID NO: 1077153 - RNA, 24 nt, Human
caaaagagacaggguuuugccaug

SEQ ID NO: 1077154 - RNA, 22 nt, Human
caaaagauauguaauaagagaa

SEQ ID NO: 1077155 - RNA, 25 nt, Human
caaacuccuggguccaagcaauccu

SEQ ID NO: 1077156 - RNA, 18 nt, Human
caaacuuaugaaaaacaa

SEQ ID NO: 1077157 - RNA, 24 nt, Human
caaagaccgaaacgacuggacgug

SEQ ID NO: 1077158 - RNA, 20 nt, Human
caaaugauucuccugccuca

SEQ ID NO: 1077159 - RNA, 22 nt, Human
caaaugauucuccugccucagc

SEQ ID NO: 1077160 - RNA, 24 nt, Human
caacauggcaaaaccucgucucua

SEQ ID NO: 1077161 - RNA, 21 nt, Human
caagaccauccuggcccacca

SEQ ID NO: 1077162 - RNA, 22 nt, Human
caagcaauccuucugccucagc

SEQ ID NO: 1077163 - RNA, 27 nt, Human
caagcaauccuucugccucagccuccu

SEQ ID NO: 1077164 - RNA, 18 nt, Human
caaggcaaagaccgaaac

SEQ ID NO: 1077165 - RNA, 27 nt, Human
caagugauccucccaccuuggcuuccc

SEQ ID NO: 1077166 - RNA, 20 nt, Human
caauuucucaccaauuugcc

SEQ ID NO: 1077167 - RNA, 18 nt, Human
cacacacacacacacaca

SEQ ID NO: 1077168 - RNA, 20 nt, Human
cacacacacacacacacaca

SEQ ID NO: 1077169 - RNA, 20 nt, Human
cacacacacacacacacaca

SEQ ID NO: 1077170 - RNA, 20 nt, Human
cacacacacacacacacaca

SEQ ID NO: 1077171 - RNA, 20 nt, Human
cacacacacacacacacaca

SEQ ID NO: 1077172 - RNA, 20 nt, Human
cacacacacacacacacaca

SEQ ID NO: 1077173 - RNA, 20 nt, Human
cacacacacacacacacaca

SEQ ID NO: 1077174 - RNA, 20 nt, Human
cacacacacacacacacaca

SEQ ID NO: 1077175 - RNA, 20 nt, Human
cacacacacacacacacaca

SEQ ID NO: 1077176 - RNA, 20 nt, Human
cacacacacacacacacaca

SEQ ID NO: 1077177 - RNA, 20 nt, Human
cacacacacacacacacaca

SEQ ID NO: 1077178 - RNA, 20 nt, Human
cacacacacacacacacaca

SEQ ID NO: 1077179 - RNA, 22 nt, Human
cacacacacacacacacacaca

SEQ ID NO: 1077180 - RNA, 22 nt, Human
cacacacacacacacacacaca

SEQ ID NO: 1077181 - RNA, 22 nt, Human
cacacacacacacacacacaca

SEQ ID NO: 1077182 - RNA, 22 nt, Human
cacacacacacacacacacaca

SEQ ID NO: 1077183 - RNA, 26 nt, Human
cacacacacacacacacacacacaca

SEQ ID NO: 1077184 - RNA, 26 nt, Human
cacacacacacacacacacacacaca

SEQ ID NO: 1077185 - RNA, 26 nt, Human
cacacacacacacacacacacacaca

SEQ ID NO: 1077186 - RNA, 26 nt, Human
cacacacacacacacacacacacaua

SEQ ID NO: 1077187 - RNA, 25 nt, Human
cacacacacacacacacacauacaa

SEQ ID NO: 1077188 - RNA, 20 nt, Human
cacacacacacacacacaua

SEQ ID NO: 1077189 - RNA, 22 nt, Human
cacacacacacacacacauaca

SEQ ID NO: 1077190 - RNA, 19 nt, Human
cacacacacacacacauac

SEQ ID NO: 1077191 - RNA, 24 nt, Human
cacacacacacauacaagauacuc

SEQ ID NO: 1077192 - RNA, 19 nt, Human
caccacacccagcaaauuu

SEQ ID NO: 1077193 - RNA, 21 nt, Human
cacucugaaaugaccaacaaa

SEQ ID NO: 1077194 - RNA, 25 nt, Human
cagaagaagauagaggcagggggau

SEQ ID NO: 1077195 - RNA, 24 nt, Human
cagcacuuugaggggcugaagcag

SEQ ID NO: 1077196 - RNA, 27 nt, Human
cagcugaagagcacaccgacaggacac

SEQ ID NO: 1077197 - RNA, 21 nt, Human
caggggaaaaccaucucccuu

SEQ ID NO: 1077198 - RNA, 19 nt, Human
caggguuuugccauguugg

SEQ ID NO: 1077199 - RNA, 23 nt, Human
caggguuuugccauguuggucag

SEQ ID NO: 1077200 - RNA, 21 nt, Human
cagugagccacgauuuugcca

SEQ ID NO: 1077201 - RNA, 21 nt, Human
caguggcaaucucaucuggcu

SEQ ID NO: 1077202 - RNA, 24 nt, Human
caugccaguaauuccagcacucug

SEQ ID NO: 1077203 - RNA, 20 nt, Human
caugccuguaaucccagcac

SEQ ID NO: 1077204 - RNA, 24 nt, Human
caugccuguaaucccagcacuuug

SEQ ID NO: 1077205 - RNA, 19 nt, Human
ccaaaugauucuccugccu

SEQ ID NO: 1077206 - RNA, 19 nt, Human
ccaccacggccccauccug

SEQ ID NO: 1077207 - RNA, 19 nt, Human
ccacuacacuccagacagg

SEQ ID NO: 1077208 - RNA, 20 nt, Human
ccaguaucauuuccaaaucu

SEQ ID NO: 1077209 - RNA, 19 nt, Human
ccauguuggucagucuggu

SEQ ID NO: 1077210 - RNA, 22 nt, Human
ccauguuggucagucuggucuc

SEQ ID NO: 1077211 - RNA, 23 nt, Human
ccauguuggucagucuggucucg

SEQ ID NO: 1077212 - RNA, 22 nt, Human
cccaaauguuguauuucccaag

SEQ ID NO: 1077213 - RNA, 23 nt, Human
cccaacucaaauauuaacacaau

SEQ ID NO: 1077214 - RNA, 23 nt, Human
cccaccuuggcuucccaagcgug

SEQ ID NO: 1077215 - RNA, 19 nt, Human
cccugucucaaaaaaaaaa

SEQ ID NO: 1077216 - RNA, 21 nt, Human
ccuauagucccagcuauuggg

SEQ ID NO: 1077217 - RNA, 22 nt, Human
ccuauagucccagcuauugggg

SEQ ID NO: 1077218 - RNA, 22 nt, Human
ccuauguugucccagcuggucu

SEQ ID NO: 1077219 - RNA, 19 nt, Human
ccuccuuuucccucugugu

SEQ ID NO: 1077220 - RNA, 24 nt, Human
ccugaucucaggugauccacccac

SEQ ID NO: 1077221 - RNA, 18 nt, Human
ccugcagucuagagugca

SEQ ID NO: 1077222 - RNA, 25 nt, Human
ccuggcccaccacggccccauccug

SEQ ID NO: 1077223 - RNA, 22 nt, Human
ccuggccguggagugccccaac

SEQ ID NO: 1077224 - RNA, 21 nt, Human
ccugggcaacauggcaaaacc

SEQ ID NO: 1077225 - RNA, 24 nt, Human
ccugggcaacauggcaaaaccucg

SEQ ID NO: 1077226 - RNA, 21 nt, Human
ccuggguccaagcaauccuuc

SEQ ID NO: 1077227 - RNA, 23 nt, Human
ccugucucaaaaaaaaaaaaaaa

SEQ ID NO: 1077228 - RNA, 24 nt, Human
ccugugacuauaaaaaccugagac

SEQ ID NO: 1077229 - RNA, 24 nt, Human
ccuucugccucagccuccucagua

SEQ ID NO: 1077230 - RNA, 24 nt, Human
cgggagugcuggguagaggaaggg

SEQ ID NO: 1077231 - RNA, 18 nt, Human
cucaaaaaaaaaaaaaaa

SEQ ID NO: 1077232 - RNA, 24 nt, Human
cucaagugauccucccaccuuggc

SEQ ID NO: 1077233 - RNA, 24 nt, Human
cucacuauagccucaaacuccugg

SEQ ID NO: 1077234 - RNA, 23 nt, Human
cucacugcaaccuccgccucugg

SEQ ID NO: 1077235 - RNA, 19 nt, Human
cucaggugauccacccacc

SEQ ID NO: 1077236 - RNA, 23 nt, Human
cucaugccaguaauuccagcacu

SEQ ID NO: 1077237 - RNA, 24 nt, Human
cucaugccuguaaucccagcacuu

SEQ ID NO: 1077238 - RNA, 19 nt, Human
cucccuucuggcuccccca

SEQ ID NO: 1077239 - RNA, 21 nt, Human
cuccuggguccaagcaauccu

SEQ ID NO: 1077240 - RNA, 18 nt, Human
cugaagacaaguguaaag

SEQ ID NO: 1077241 - RNA, 22 nt, Human
cugcaaccuccgccucuggauc

SEQ ID NO: 1077242 - RNA, 23 nt, Human
cugccucagccucccuaguagcu

SEQ ID NO: 1077243 - RNA, 22 nt, Human
cugccucagccuccucaguagc

SEQ ID NO: 1077244 - RNA, 23 nt, Human
cugccucagccuccucaguagcu

SEQ ID NO: 1077245 - RNA, 18 nt, Human
cuggaacuggaacuauag

SEQ ID NO: 1077246 - RNA, 18 nt, Human
cuggcuagggcuccaccc

SEQ ID NO: 1077247 - RNA, 19 nt, Human
cuggguagaggaagggugu

SEQ ID NO: 1077248 - RNA, 19 nt, Human
cugguacuacaggugcgug

SEQ ID NO: 1077249 - RNA, 20 nt, Human
cuuucuguacagacgguuuu

SEQ ID NO: 1077250 - RNA, 18 nt, Human
gaagguggguggaucacc

SEQ ID NO: 1077251 - RNA, 19 nt, Human
gagaggauguugaggggag

SEQ ID NO: 1077252 - RNA, 23 nt, Human
gagcccaggaguuugacaaaaga

SEQ ID NO: 1077253 - RNA, 23 nt, Human
gagugcuggguagaggaagggug

SEQ ID NO: 1077254 - RNA, 21 nt, Human
gaguuuggugggggcaguggg

SEQ ID NO: 1077255 - RNA, 19 nt, Human
gaucauggcucacuauagc

SEQ ID NO: 1077256 - RNA, 24 nt, Human
gaucccuugagcccaggaguuuga

SEQ ID NO: 1077257 - RNA, 18 nt, Human
gaugaggcggaguuuggu

SEQ ID NO: 1077258 - RNA, 21 nt, Human
gauucuccugccucagccucc

SEQ ID NO: 1077259 - RNA, 20 nt, Human
gcaaccuccgccucuggauc

SEQ ID NO: 1077260 - RNA, 26 nt, Human
gcaauccuucugccucagccuccuca

SEQ ID NO: 1077261 - RNA, 20 nt, Human
gccauguuggucagucuggu

SEQ ID NO: 1077262 - RNA, 18 nt, Human
gccuuacacauuaagggc

SEQ ID NO: 1077263 - RNA, 24 nt, Human
gcggaucagcagaagaagauagag

SEQ ID NO: 1077264 - RNA, 23 nt, Human
gcgguaagugccuauagucccag

SEQ ID NO: 1077265 - RNA, 18 nt, Human
gcuugcucuucuuccugc

SEQ ID NO: 1077266 - RNA, 26 nt, Human
ggaaaagagguguagaaaacaaaacu

SEQ ID NO: 1077267 - RNA, 23 nt, Human
ggaacacacaggccguugaagcg

SEQ ID NO: 1077268 - RNA, 18 nt, Human
ggagaugaggcuacagug

SEQ ID NO: 1077269 - RNA, 18 nt, Human
ggagcggaucagcagaag

SEQ ID NO: 1077270 - RNA, 23 nt, Human
ggcagugggaggagagcccuggc

SEQ ID NO: 1077271 - RNA, 19 nt, Human
ggccagcaggcucaaguuc

SEQ ID NO: 1077272 - RNA, 21 nt, Human
gggcucaagugauccucccac

SEQ ID NO: 1077273 - RNA, 24 nt, Human
gguagaucccuugagcccaggagu

SEQ ID NO: 1077274 - RNA, 20 nt, Human
ggucucgaacuccugaucuc

SEQ ID NO: 1077275 - RNA, 19 nt, Human
gguggcaugagccuggccu

SEQ ID NO: 1077276 - RNA, 24 nt, Human
gguggcucaugccaguaauuccag

SEQ ID NO: 1077277 - RNA, 24 nt, Human
gguggcucaugccuguaaucccag

SEQ ID NO: 1077278 - RNA, 24 nt, Human
ggugggggcagugggaggagagcc

SEQ ID NO: 1077279 - RNA, 23 nt, Human
guggcucaugccaguaauuccag

SEQ ID NO: 1077280 - RNA, 24 nt, Human
guggucucccuauguugucccagc

SEQ ID NO: 1077281 - RNA, 18 nt, Human
guuagaugcuugaugugu

SEQ ID NO: 1077282 - RNA, 24 nt, Human
guuagaugcuugauguguuccaug

SEQ ID NO: 1077283 - RNA, 21 nt, Human
guuauuuuucagaagcaaacu

SEQ ID NO: 1077284 - RNA, 18 nt, Human
guuggccaccacucccag

SEQ ID NO: 1077285 - RNA, 21 nt, Human
uaaaagcaguggcaaucucau

SEQ ID NO: 1077286 - RNA, 24 nt, Human
uaaauucuauucauaccuuagaaa

SEQ ID NO: 1077287 - RNA, 22 nt, Human
uaagauagggucucucuccguc

SEQ ID NO: 1077288 - RNA, 19 nt, Human
uacaagauacucucuuuuu

SEQ ID NO: 1077289 - RNA, 25 nt, Human
uacacacacacacacacacacacac

SEQ ID NO: 1077290 - RNA, 24 nt, Human
uacaggugcgugucaccacaccca

SEQ ID NO: 1077291 - RNA, 22 nt, Human
uacagugagccacgauuuugcc

SEQ ID NO: 1077292 - RNA, 19 nt, Human
uacaguggcaagaucuugg

SEQ ID NO: 1077293 - RNA, 22 nt, Human
uagaggaaggguguggucccug

SEQ ID NO: 1077294 - RNA, 21 nt, Human
uagagugcaauggugcgauca

SEQ ID NO: 1077295 - RNA, 24 nt, Human
uagaucccuugagcccaggaguuu

SEQ ID NO: 1077296 - RNA, 20 nt, Human
uagcaaggcaaagaccgaaa

SEQ ID NO: 1077297 - RNA, 22 nt, Human
uagggcuccacccccaccgacc

SEQ ID NO: 1077298 - RNA, 24 nt, Human
uagucaggugugguggcucaugcc

SEQ ID NO: 1077299 - RNA, 25 nt, Human
uauacacacacacacacacacacac

SEQ ID NO: 1077300 - RNA, 22 nt, Human
uauagcacuuuucacaauacac

SEQ ID NO: 1077301 - RNA, 24 nt, Human
uauagucaggugugguggcucaug

SEQ ID NO: 1077302 - RNA, 25 nt, Human
uauauacacacacacacacacacac

SEQ ID NO: 1077303 - RNA, 25 nt, Human
uauauacacacacacacacacacag

SEQ ID NO: 1077304 - RNA, 24 nt, Human
uaucaaacuuaugaaaaacaacua

SEQ ID NO: 1077305 - RNA, 24 nt, Human
uauguugucccagcuggucuugaa

SEQ ID NO: 1077306 - RNA, 22 nt, Human
ucaaaaaaaaaaaaaaaaaaaa

SEQ ID NO: 1077307 - RNA, 23 nt, Human
ucaaaaaaaaaaaaaaaaaaaaa

SEQ ID NO: 1077308 - RNA, 24 nt, Human
ucaaaaaaaaaaaaaaaaaaaaau

SEQ ID NO: 1077309 - RNA, 18 nt, Human
ucaaugaaagaaggcaca

SEQ ID NO: 1077310 - RNA, 24 nt, Human
ucacuauagccucaaacuccuggg

SEQ ID NO: 1077311 - RNA, 18 nt, Human
ucacugcaaccuccgccu

SEQ ID NO: 1077312 - RNA, 19 nt, Human
ucacugcaaccuccgccuc

SEQ ID NO: 1077313 - RNA, 22 nt, Human
ucacugcaaccuccgccucugg

SEQ ID NO: 1077314 - RNA, 23 nt, Human
ucacugcaaccuccgccucugga

SEQ ID NO: 1077315 - RNA, 25 nt, Human
ucacugcaaccuccgccucuggauc

SEQ ID NO: 1077316 - RNA, 20 nt, Human
ucagggcucaagugauccuc

SEQ ID NO: 1077317 - RNA, 21 nt, Human
ucaucacauucucuuacugug

SEQ ID NO: 1077318 - RNA, 22 nt, Human
ucaugccaguaauuccagcacu

SEQ ID NO: 1077319 - RNA, 22 nt, Human
ucaugccuguaaucccagcacu

SEQ ID NO: 1077320 - RNA, 24 nt, Human
uccaaaugauucuccugccucagc

SEQ ID NO: 1077321 - RNA, 24 nt, Human
uccaagcaauccuucugccucagc

SEQ ID NO: 1077322 - RNA, 21 nt, Human
uccacccccaccgaccuagau

SEQ ID NO: 1077323 - RNA, 24 nt, Human
ucccagcuggucuugaacucaggg

SEQ ID NO: 1077324 - RNA, 19 nt, Human
ucccagcuuaccaaauauu

SEQ ID NO: 1077325 - RNA, 23 nt, Human
ucccagcuuaccaaauauuucac

SEQ ID NO: 1077326 - RNA, 24 nt, Human
uccucccaccuuggcuucccaagc

SEQ ID NO: 1077327 - RNA, 18 nt, Human
uccuggguccaagcaauc

SEQ ID NO: 1077328 - RNA, 24 nt, Human
uccuggguccaagcaauccuucug

SEQ ID NO: 1077329 - RNA, 19 nt, Human
ucuagcaaggcaaagaccg

SEQ ID NO: 1077330 - RNA, 18 nt, Human
ucuauucauaccuuagaa

SEQ ID NO: 1077331 - RNA, 24 nt, Human
ucucccuauguugucccagcuggu

SEQ ID NO: 1077332 - RNA, 25 nt, Human
ucuccugccucagccucccuaguag

SEQ ID NO: 1077333 - RNA, 19 nt, Human
ucucgaacuccugaucuca

SEQ ID NO: 1077334 - RNA, 21 nt, Human
ucugaaaugaccaacaaaagg

SEQ ID NO: 1077335 - RNA, 24 nt, Human
ucugucaccuaggcuagaguacag

SEQ ID NO: 1077336 - RNA, 18 nt, Human
ugaaaugccuuacacauu

SEQ ID NO: 1077337 - RNA, 18 nt, Human
ugaacugaagacaagugu

SEQ ID NO: 1077338 - RNA, 18 nt, Human
ugaagagcacaccgacag

SEQ ID NO: 1077339 - RNA, 22 nt, Human
ugaagagcacaccgacaggaca

SEQ ID NO: 1077340 - RNA, 20 nt, Human
ugacuauaaaaaccugagac

SEQ ID NO: 1077341 - RNA, 21 nt, Human
ugacuauaaaaaccugagacu

SEQ ID NO: 1077342 - RNA, 22 nt, Human
ugagacagagucucugucuguc

SEQ ID NO: 1077343 - RNA, 24 nt, Human
ugaggcaggaggaugauuugagcc

SEQ ID NO: 1077344 - RNA, 25 nt, Human
ugaggcaggaggaugauuugagccu

SEQ ID NO: 1077345 - RNA, 24 nt, Human
ugaucucaggugauccacccaccu

SEQ ID NO: 1077346 - RNA, 18 nt, Human
ugaucuguaaucuuuuuu

SEQ ID NO: 1077347 - RNA, 21 nt, Human
ugauggaaguuauauacuuaa

SEQ ID NO: 1077348 - RNA, 19 nt, Human
ugauguguuccaugacgug

SEQ ID NO: 1077349 - RNA, 20 nt, Human
ugauucuccugccucagccu

SEQ ID NO: 1077350 - RNA, 19 nt, Human
ugauuugagccugggagau

SEQ ID NO: 1077351 - RNA, 22 nt, Human
ugauuugagccugggagaugag

SEQ ID NO: 1077352 - RNA, 18 nt, Human
ugccuauagucccagcua

SEQ ID NO: 1077353 - RNA, 22 nt, Human
ugccuauagucccagcuauugg

SEQ ID NO: 1077354 - RNA, 24 nt, Human
ugccucagccucccuaguagcugg

SEQ ID NO: 1077355 - RNA, 24 nt, Human
ugccucagccuccucaguagcugg

SEQ ID NO: 1077356 - RNA, 18 nt, Human
ugccuguaaucccagcac

SEQ ID NO: 1077357 - RNA, 23 nt, Human
ugccuguaaucccagcacuuuga

SEQ ID NO: 1077358 - RNA, 25 nt, Human
ugcuggguagaggaagggugugguc

SEQ ID NO: 1077359 - RNA, 24 nt, Human
ugcuucaggcuuuucuaauauuuu

SEQ ID NO: 1077360 - RNA, 21 nt, Human
uggaacuauaggcaugugcca

SEQ ID NO: 1077361 - RNA, 24 nt, Human
uggaacuauaggcaugugccacug

SEQ ID NO: 1077362 - RNA, 23 nt, Human
uggaagguggguggaucaccuua

SEQ ID NO: 1077363 - RNA, 19 nt, Human
uggaucaccuuagguuagg

SEQ ID NO: 1077364 - RNA, 20 nt, Human
uggaucaccuuagguuaggu

SEQ ID NO: 1077365 - RNA, 20 nt, Human
uggauccaaaugauucuccu

SEQ ID NO: 1077366 - RNA, 24 nt, Human
uggauccaaaugauucuccugccu

SEQ ID NO: 1077367 - RNA, 25 nt, Human
uggcaaaaccucgucucuaugaaaa

SEQ ID NO: 1077368 - RNA, 18 nt, Human
uggcagcugaagagcaca

SEQ ID NO: 1077369 - RNA, 19 nt, Human
uggcuagggcuccaccccc

SEQ ID NO: 1077370 - RNA, 24 nt, Human
uggcucaugccuguaaucccagca

SEQ ID NO: 1077371 - RNA, 19 nt, Human
uggcuucccaagcgugggg

SEQ ID NO: 1077372 - RNA, 18 nt, Human
ugggaaggcaagaccaug

SEQ ID NO: 1077373 - RNA, 20 nt, Human
ugggagaugaggcuacagug

SEQ ID NO: 1077374 - RNA, 24 nt, Human
ugggggcagugggaggagagcccu

SEQ ID NO: 1077375 - RNA, 21 nt, Human
uggguagaggaaggguguggu

SEQ ID NO: 1077376 - RNA, 23 nt, Human
uggguccaagcaauccuucugcc

SEQ ID NO: 1077377 - RNA, 18 nt, Human
uggguggguggcaugagc

SEQ ID NO: 1077378 - RNA, 24 nt, Human
ugguacuacaggugcgugucacca

SEQ ID NO: 1077379 - RNA, 24 nt, Human
uggucagucuggucucgaacuccu

SEQ ID NO: 1077380 - RNA, 19 nt, Human
uggugcgaucauggcucac

SEQ ID NO: 1077381 - RNA, 24 nt, Human
ugguggcucaugccaguaauucca

SEQ ID NO: 1077382 - RNA, 24 nt, Human
ugguggcucaugccuguaauccca

SEQ ID NO: 1077383 - RNA, 23 nt, Human
ugguggguggguggcaugagccu

SEQ ID NO: 1077384 - RNA, 18 nt, Human
ugucagaagcuagauacc

SEQ ID NO: 1077385 - RNA, 20 nt, Human
ugugugaaaugccuuacaca

SEQ ID NO: 1077386 - RNA, 23 nt, Human
uuaaacauauuuucuguuuuuca

SEQ ID NO: 1077387 - RNA, 19 nt, Human
uuagaugcuugauguguuc

SEQ ID NO: 1077388 - RNA, 20 nt, Human
uuccaaaucuuucagguuuu

SEQ ID NO: 1077389 - RNA, 24 nt, Human
uucucaccaauuugcccuuuuaaa

SEQ ID NO: 1077390 - RNA, 20 nt, Human
uugaaauuuguuuuaagauu

SEQ ID NO: 1077391 - RNA, 24 nt, Human
uugccauguuggucagucuggucu

SEQ ID NO: 1077392 - RNA, 24 nt, Human
uuggugggggcagugggaggagag

SEQ ID NO: 1077393 - RNA, 26 nt, Human
uuggugggggcagugggaggagagcc

SEQ ID NO: 1077394 - RNA, 20 nt, Human
uuguugcauuuuuaaaauaa

SEQ ID NO: 1077395 - RNA, 21 nt, Human
uuuggcuugcucuucuuccug

SEQ ID NO: 1077396 - RNA, 22 nt, Human
uuuucagaagcaaacuaaaacu

SEQ ID NO: 1077397 - RNA, 23 nt, Human
uuuuuuuuuuaagauagggucuc

SEQ ID NO: 1077398 - RNA, 20 nt, Human
uuuuuuuuuuugagacagag

SEQ ID NO: 1077399 - RNA, 21 nt, Human
uuuuuuuuuuuuaagauaggg

SEQ ID NO: 1077400 - RNA, 20 nt, Human
aaaaaagcaacaaagacaac

SEQ ID NO: 1077401 - RNA, 22 nt, Human
aaaagagcagauuuuagacaca

SEQ ID NO: 1077402 - RNA, 20 nt, Human
aaaaggaaagaaguggagaa

SEQ ID NO: 1077403 - RNA, 21 nt, Human
aaaauugaggaagagugggga

SEQ ID NO: 1077404 - RNA, 27 nt, Human
aaagacaaccaauguugccccagaggu

SEQ ID NO: 1077405 - RNA, 24 nt, Human
aaagaccuaaaacacacacaggca

SEQ ID NO: 1077406 - RNA, 26 nt, Human
aaagauuaauaacauugaguagauaa

SEQ ID NO: 1077407 - RNA, 20 nt, Human
aaaucauguccuugugccaa

SEQ ID NO: 1077408 - RNA, 23 nt, Human
aacaaagacaaccaauguugccc

SEQ ID NO: 1077409 - RNA, 21 nt, Human
aacauucaaaaacuuguccuc

SEQ ID NO: 1077410 - RNA, 22 nt, Human
aacuuauacauagcugucuucc

SEQ ID NO: 1077411 - RNA, 19 nt, Human
aagauuaauaacauugagu

SEQ ID NO: 1077412 - RNA, 18 nt, Human
aagcaguucccuacccuc

SEQ ID NO: 1077413 - RNA, 20 nt, Human
aaucaugacauuucaucugg

SEQ ID NO: 1077414 - RNA, 18 nt, Human
aauucccucuccuucccc

SEQ ID NO: 1077415 - RNA, 24 nt, Human
acaaacacaguaauagaccaagau

SEQ ID NO: 1077416 - RNA, 23 nt, Human
acacacacacacacacacacaca

SEQ ID NO: 1077417 - RNA, 23 nt, Human
acacacacacacacacacacaca

SEQ ID NO: 1077418 - RNA, 23 nt, Human
acacacacacacacacacacaca

SEQ ID NO: 1077419 - RNA, 23 nt, Human
acacacacacacacacacacaca

SEQ ID NO: 1077420 - RNA, 23 nt, Human
acacacacacacacacacacaca

SEQ ID NO: 1077421 - RNA, 23 nt, Human
acacacacacacacacacacaca

SEQ ID NO: 1077422 - RNA, 23 nt, Human
acacacacacacacacacacaca

SEQ ID NO: 1077423 - RNA, 23 nt, Human
acacacacacacacacacacaca

SEQ ID NO: 1077424 - RNA, 23 nt, Human
acacacacacacacacacacaca

SEQ ID NO: 1077425 - RNA, 23 nt, Human
acacacacacacacacacacaca

SEQ ID NO: 1077426 - RNA, 28 nt, Human
acacacacacacacacacacacaaacac

SEQ ID NO: 1077427 - RNA, 19 nt, Human
accugcuaccuaccacaag

SEQ ID NO: 1077428 - RNA, 23 nt, Human
accugcuaccuaccacaagcauc

SEQ ID NO: 1077429 - RNA, 25 nt, Human
acucaguccacuagccuggacaccu

SEQ ID NO: 1077430 - RNA, 21 nt, Human
acuuauacauagcugucuucc

SEQ ID NO: 1077431 - RNA, 20 nt, Human
agaaaaaagcaacaaagaca

SEQ ID NO: 1077432 - RNA, 22 nt, Human
agaaaugaaaauaaaaaaggga

SEQ ID NO: 1077433 - RNA, 22 nt, Human
agaccuaaaacacacacaggca

SEQ ID NO: 1077434 - RNA, 21 nt, Human
agcuggugacaggaggccugg

SEQ ID NO: 1077435 - RNA, 22 nt, Human
aggaaagaaguggagaacaagg

SEQ ID NO: 1077436 - RNA, 19 nt, Human
aggaagauccaagcuggcu

SEQ ID NO: 1077437 - RNA, 22 nt, Human
aggcagagaguuuccaggaaca

SEQ ID NO: 1077438 - RNA, 18 nt, Human
aggcauuuggaaagaaaa

SEQ ID NO: 1077439 - RNA, 21 nt, Human
agggcuggaggcucccaaacu

SEQ ID NO: 1077440 - RNA, 19 nt, Human
aucugaagaugguaugaag

SEQ ID NO: 1077441 - RNA, 19 nt, Human
auuaauaaagaccuaaaac

SEQ ID NO: 1077442 - RNA, 21 nt, Human
caaaagagcagauuuuagaca

SEQ ID NO: 1077443 - RNA, 26 nt, Human
caaacacaguaauagaccaagaugaa

SEQ ID NO: 1077444 - RNA, 25 nt, Human
caacauuaauaaagaccuaaaacac

SEQ ID NO: 1077445 - RNA, 25 nt, Human
cacacacacacacacaaacacagua

SEQ ID NO: 1077446 - RNA, 20 nt, Human
cacacacacacacacacaca

SEQ ID NO: 1077447 - RNA, 20 nt, Human
cacacacacacacacacaca

SEQ ID NO: 1077448 - RNA, 20 nt, Human
cacacacacacacacacaca

SEQ ID NO: 1077449 - RNA, 20 nt, Human
cacacacacacacacacaca

SEQ ID NO: 1077450 - RNA, 20 nt, Human
cacacacacacacacacaca

SEQ ID NO: 1077451 - RNA, 20 nt, Human
cacacacacacacacacaca

SEQ ID NO: 1077452 - RNA, 20 nt, Human
cacacacacacacacacaca

SEQ ID NO: 1077453 - RNA, 20 nt, Human
cacacacacacacacacaca

SEQ ID NO: 1077454 - RNA, 20 nt, Human
cacacacacacacacacaca

SEQ ID NO: 1077455 - RNA, 20 nt, Human
cacacacacacacacacaca

SEQ ID NO: 1077456 - RNA, 20 nt, Human
cacacacacacacacacaca

SEQ ID NO: 1077457 - RNA, 20 nt, Human
cacacacacacacacacaca

SEQ ID NO: 1077458 - RNA, 22 nt, Human
cacacacacacacacacacaca

SEQ ID NO: 1077459 - RNA, 22 nt, Human
cacacacacacacacacacaca

SEQ ID NO: 1077460 - RNA, 22 nt, Human
cacacacacacacacacacaca

SEQ ID NO: 1077461 - RNA, 26 nt, Human
cacacacacacacacacacacacaaa

SEQ ID NO: 1077462 - RNA, 26 nt, Human
cacacacacacacacacacacacaca

SEQ ID NO: 1077463 - RNA, 26 nt, Human
cacacacacacacacacacacacaca

SEQ ID NO: 1077464 - RNA, 26 nt, Human
cacacacacacacacacacacacaca

SEQ ID NO: 1077465 - RNA, 26 nt, Human
cacacacacacacacacacacacaca

SEQ ID NO: 1077466 - RNA, 26 nt, Human
cacacacacacacacacacacacaca

SEQ ID NO: 1077467 - RNA, 20 nt, Human
cacacagcuggugacaggag

SEQ ID NO: 1077468 - RNA, 20 nt, Human
cacacaggcagaacacucac

SEQ ID NO: 1077469 - RNA, 26 nt, Human
cacacugaccaucaagcucuugcggu

SEQ ID NO: 1077470 - RNA, 21 nt, Human
cacaguaauagaccaagauga

SEQ ID NO: 1077471 - RNA, 22 nt, Human
cacaguaauagaccaagaugaa

SEQ ID NO: 1077472 - RNA, 21 nt, Human
cacagugaaugagaacccaua

SEQ ID NO: 1077473 - RNA, 20 nt, Human
cacucuguuuuuucucucug

SEQ ID NO: 1077474 - RNA, 19 nt, Human
cagccgcuuccagguccug

SEQ ID NO: 1077475 - RNA, 23 nt, Human
caguccacuagccuggacaccag

SEQ ID NO: 1077476 - RNA, 24 nt, Human
cauacacauccaacuccacguucc

SEQ ID NO: 1077477 - RNA, 22 nt, Human
cauauacauuauguuguauaug

SEQ ID NO: 1077478 - RNA, 22 nt, Human
cauccccaucauacacauccaa

SEQ ID NO: 1077479 - RNA, 21 nt, Human
caugacauaacagaaagagca

SEQ ID NO: 1077480 - RNA, 19 nt, Human
cauggaaaaauucagggaa

SEQ ID NO: 1077481 - RNA, 20 nt, Human
cccauguaccuccuccagcc

SEQ ID NO: 1077482 - RNA, 24 nt, Human
ccccagaaaggcagcaccagucuc

SEQ ID NO: 1077483 - RNA, 24 nt, Human
cccccaggugacaaaacuuaauuu

SEQ ID NO: 1077484 - RNA, 20 nt, Human
cccucuccuuccccagccca

SEQ ID NO: 1077485 - RNA, 18 nt, Human
ccuaaaacacacacaggc

SEQ ID NO: 1077486 - RNA, 24 nt, Human
ccugcuaccuaccacaagcaucug

SEQ ID NO: 1077487 - RNA, 26 nt, Human
cgggagagggggaugaacuuuggauc

SEQ ID NO: 1077488 - RNA, 20 nt, Human
cucgauugaguuacugaugu

SEQ ID NO: 1077489 - RNA, 23 nt, Human
cuguaauauuaaaugcuuggccu

SEQ ID NO: 1077490 - RNA, 20 nt, Human
gaaaacuucuagaaaaaagc

SEQ ID NO: 1077491 - RNA, 23 nt, Human
gaagaugguaugaaggaaagagg

SEQ ID NO: 1077492 - RNA, 25 nt, Human
gacacagaaaucacgauucauaaca

SEQ ID NO: 1077493 - RNA, 20 nt, Human
gauaaagagauauucccucg

SEQ ID NO: 1077494 - RNA, 25 nt, Human
gcccuggcucauuacagauucuucc

SEQ ID NO: 1077495 - RNA, 28 nt, Human
gcccuggcucauuacagauucuuccaac

SEQ ID NO: 1077496 - RNA, 20 nt, Human
gcuaccuaccacaagcaucu

SEQ ID NO: 1077497 - RNA, 21 nt, Human
gcugccaagcuuccauaucca

SEQ ID NO: 1077498 - RNA, 20 nt, Human
ggcaaaauguucacucuguu

SEQ ID NO: 1077499 - RNA, 18 nt, Human
gugaagcacggaaauuag

SEQ ID NO: 1077500 - RNA, 21 nt, Human
guuauuuaauacagagaagac

SEQ ID NO: 1077501 - RNA, 18 nt, Human
uaaaacacacacaggcag

SEQ ID NO: 1077502 - RNA, 23 nt, Human
uaaagaccuaaaacacacacagg

SEQ ID NO: 1077503 - RNA, 22 nt, Human
uaaagagauauucccucguuga

SEQ ID NO: 1077504 - RNA, 22 nt, Human
uaaagagauauucccucguuga

SEQ ID NO: 1077505 - RNA, 25 nt, Human
uaacaaaagagcagauuuuagacac

SEQ ID NO: 1077506 - RNA, 19 nt, Human
uaauggaucacaccaauac

SEQ ID NO: 1077507 - RNA, 20 nt, Human
uacacacacacacacacaca

SEQ ID NO: 1077508 - RNA, 25 nt, Human
uacacacacacacacacacacacac

SEQ ID NO: 1077509 - RNA, 25 nt, Human
uacacacacacacacacacacacag

SEQ ID NO: 1077510 - RNA, 24 nt, Human
uacacacacacacacacacacagu

SEQ ID NO: 1077511 - RNA, 18 nt, Human
uacacaccaccugcuacc

SEQ ID NO: 1077512 - RNA, 23 nt, Human
uacacuaaaaagauuaauaacau

SEQ ID NO: 1077513 - RNA, 18 nt, Human
uacagggacucucgggag

SEQ ID NO: 1077514 - RNA, 18 nt, Human
uacauuauugaguccugg

SEQ ID NO: 1077515 - RNA, 22 nt, Human
uaccacaucacagugaaugagg

SEQ ID NO: 1077516 - RNA, 19 nt, Human
uacuauguaccaguaggcc

SEQ ID NO: 1077517 - RNA, 20 nt, Human
uacuuaucaaaacaccacuc

SEQ ID NO: 1077518 - RNA, 21 nt, Human
uagcuuucuucacuucucugu

SEQ ID NO: 1077519 - RNA, 23 nt, Human
uaggaaaacuggcccuggcucau

SEQ ID NO: 1077520 - RNA, 18 nt, Human
uaggaagauccaagcugg

SEQ ID NO: 1077521 - RNA, 24 nt, Human
uaggagaagcaguucccuacccuc

SEQ ID NO: 1077522 - RNA, 20 nt, Human
uagucugcuucuggggaaac

SEQ ID NO: 1077523 - RNA, 22 nt, Human
uaucuacuuaucaaaacaccac

SEQ ID NO: 1077524 - RNA, 24 nt, Human
uaucuacuuaucaaaacaccacuc

SEQ ID NO: 1077525 - RNA, 19 nt, Human
uaucucagauuuucagccg

SEQ ID NO: 1077526 - RNA, 19 nt, Human
uaucuggggcacaggccag

SEQ ID NO: 1077527 - RNA, 24 nt, Human
uauuagcuuucuucacuucucugu

SEQ ID NO: 1077528 - RNA, 20 nt, Human
uauuuggagggagaagguug

SEQ ID NO: 1077529 - RNA, 23 nt, Human
uauuuggagggagaagguugggu

SEQ ID NO: 1077530 - RNA, 22 nt, Human
ucaaaaacuuguccuccugcca

SEQ ID NO: 1077531 - RNA, 21 nt, Human
ucaaaacaccacucaccagaa

SEQ ID NO: 1077532 - RNA, 24 nt, Human
ucaacuccaaaaaaacugcuugca

SEQ ID NO: 1077533 - RNA, 21 nt, Human
ucaagcucgcagucccccagg

SEQ ID NO: 1077534 - RNA, 19 nt, Human
ucaggccauggaguacagg

SEQ ID NO: 1077535 - RNA, 19 nt, Human
ucagugucguguuuguacc

SEQ ID NO: 1077536 - RNA, 19 nt, Human
uccaaaaaaacugcuugca

SEQ ID NO: 1077537 - RNA, 22 nt, Human
uccaacuccacguuccccugau

SEQ ID NO: 1077538 - RNA, 24 nt, Human
uccacgggagagggggaugaacuu

SEQ ID NO: 1077539 - RNA, 25 nt, Human
uccauacacaccaccugcuaccuac

SEQ ID NO: 1077540 - RNA, 27 nt, Human
uccauacacaccaccugcuaccuacca

SEQ ID NO: 1077541 - RNA, 28 nt, Human
uccauacacaccaccugcuaccuaccac

SEQ ID NO: 1077542 - RNA, 19 nt, Human
ucccccaggugacaaaacu

SEQ ID NO: 1077543 - RNA, 23 nt, Human
uccucgggcuuucucuggccaca

SEQ ID NO: 1077544 - RNA, 20 nt, Human
ucuauaacuaggaaaacugg

SEQ ID NO: 1077545 - RNA, 22 nt, Human
ucuauaacuaggaaaacuggcc

SEQ ID NO: 1077546 - RNA, 21 nt, Human
ucucgggaguuaacucagucc

SEQ ID NO: 1077547 - RNA, 22 nt, Human
ucucuggccacagaagcaugcc

SEQ ID NO: 1077548 - RNA, 25 nt, Human
ugaaaacuucuagaaaaaagcaaca

SEQ ID NO: 1077549 - RNA, 24 nt, Human
ugacuucagcaaagucacacagcu

SEQ ID NO: 1077550 - RNA, 18 nt, Human
ugagaacccauaaaguca

SEQ ID NO: 1077551 - RNA, 22 nt, Human
ugagacuuaggggaaagaaaug

SEQ ID NO: 1077552 - RNA, 23 nt, Human
ugaggaagaguggggagucuuug

SEQ ID NO: 1077553 - RNA, 18 nt, Human
ugauaucuacuuaucaaa

SEQ ID NO: 1077554 - RNA, 19 nt, Human
ugcagcaaaaucaugguau

SEQ ID NO: 1077555 - RNA, 24 nt, Human
ugcauaggaaaaugguuugcuucu

SEQ ID NO: 1077556 - RNA, 22 nt, Human
ugcguuguggaaacuaauuugg

SEQ ID NO: 1077557 - RNA, 20 nt, Human
uggcauaguuuauuuaugca

SEQ ID NO: 1077558 - RNA, 19 nt, Human
uggggaaacuaagucugag

SEQ ID NO: 1077559 - RNA, 25 nt, Human
uguacaauaauggaucacaccaaua

SEQ ID NO: 1077560 - RNA, 18 nt, Human
uguaccuccuccagccua

SEQ ID NO: 1077561 - RNA, 21 nt, Human
uguguagaaagugcaucauuu

SEQ ID NO: 1077562 - RNA, 18 nt, Human
uguugggauagucagggc

SEQ ID NO: 1077563 - RNA, 21 nt, Human
uucagggaacuugcuguuuuc

SEQ ID NO: 1077564 - RNA, 20 nt, Human
uuccagcgcucucuuucagg

SEQ ID NO: 1077565 - RNA, 18 nt, Human
uuccagguccugggacuc

SEQ ID NO: 1077566 - RNA, 23 nt, Human
uuccccagcccauguaccuccuc

SEQ ID NO: 1077567 - RNA, 18 nt, Human
uugaggaagaguggggag

SEQ ID NO: 1077568 - RNA, 24 nt, Human
uugcuguuuucccaagcccucccc

SEQ ID NO: 1077569 - RNA, 20 nt, Human
uuuagaaaugaaaauaaaaa

SEQ ID NO: 1077570 - RNA, 18 nt, Human
uuucccaagcccucccca

SEQ ID NO: 1077571 - RNA, 19 nt, Human
uuucccaagcccuccccag

SEQ ID NO: 1077572 - RNA, 24 nt, Human
uuuucccaagcccuccccagaaag

SEQ ID NO: 1077573 - RNA, 22 nt, Human
aaaaaaggaaaaaaaauaaacc

SEQ ID NO: 1077574 - RNA, 25 nt, Human
aaaaagaaagcgagaguucagggac

SEQ ID NO: 1077575 - RNA, 23 nt, Human
aaacaggccaaaaaaaauaaaca

SEQ ID NO: 1077576 - RNA, 28 nt, Human
aaauacaaacaaauuuccuuuuuaaagu

SEQ ID NO: 1077577 - RNA, 21 nt, Human
aacaggccaaaaaaaauaaac

SEQ ID NO: 1077578 - RNA, 24 nt, Human
aaggaggaacaaugcaaagauggc

SEQ ID NO: 1077579 - RNA, 23 nt, Human
aauaaaaaauacaaacaaauuuc

SEQ ID NO: 1077580 - RNA, 22 nt, Human
acaaauuuccuuuuuaaaguac

SEQ ID NO: 1077581 - RNA, 21 nt, Human
accaucucauacaaaccaacu

SEQ ID NO: 1077582 - RNA, 23 nt, Human
acccuaacaauauguauaaaaau

SEQ ID NO: 1077583 - RNA, 23 nt, Human
agaaaaaaagcauggccuuggaa

SEQ ID NO: 1077584 - RNA, 26 nt, Human
agacaaaaaaggaaaaaaagggaccc

SEQ ID NO: 1077585 - RNA, 19 nt, Human
aggaacaaugcaaagaugg

SEQ ID NO: 1077586 - RNA, 24 nt, Human
aggccaaaaaaaauaaacagcaac

SEQ ID NO: 1077587 - RNA, 22 nt, Human
auaaacagcaacuucauagaca

SEQ ID NO: 1077588 - RNA, 24 nt, Human
caaaaaaaauaaacagcaacuuca

SEQ ID NO: 1077589 - RNA, 19 nt, Human
caaacaggccaaaaaaaau

SEQ ID NO: 1077590 - RNA, 22 nt, Human
caagguuuuuuucuccuuugag

SEQ ID NO: 1077591 - RNA, 23 nt, Human
cacaccacaaguaaagucagaag

SEQ ID NO: 1077592 - RNA, 23 nt, Human
cauacaaaccaacuccuuauagu

SEQ ID NO: 1077593 - RNA, 18 nt, Human
cucaugguuuggguuggg

SEQ ID NO: 1077594 - RNA, 20 nt, Human
cuggaaugcucagaauaaga

SEQ ID NO: 1077595 - RNA, 23 nt, Human
gaaaaaaagcauggccuuggaag

SEQ ID NO: 1077596 - RNA, 18 nt, Human
gaacauggucacaccacc

SEQ ID NO: 1077597 - RNA, 25 nt, Human
gaacgcucccaaggcugguuugguc

SEQ ID NO: 1077598 - RNA, 21 nt, Human
gaugcaggggauuaaaaagaa

SEQ ID NO: 1077599 - RNA, 18 nt, Human
gcgcgcggcggaggcggc

SEQ ID NO: 1077600 - RNA, 20 nt, Human
gcggcggaggcggcugcggc

SEQ ID NO: 1077601 - RNA, 18 nt, Human
gcggcggcggaggaggcg

SEQ ID NO: 1077602 - RNA, 24 nt, Human
gcugguuuggucauccgagaucau

SEQ ID NO: 1077603 - RNA, 22 nt, Human
ggcgggccucucuacuugaagg

SEQ ID NO: 1077604 - RNA, 24 nt, Human
ggucauccgagaucauuaaaaaug

SEQ ID NO: 1077605 - RNA, 21 nt, Human
ggugggcaggcgggccucucu

SEQ ID NO: 1077606 - RNA, 21 nt, Human
uaaaaagaaagcgagaguuca

SEQ ID NO: 1077607 - RNA, 26 nt, Human
uacaaacaaauuuccuuuuuaaagua

SEQ ID NO: 1077608 - RNA, 19 nt, Human
uacaagguuuuuuucuccu

SEQ ID NO: 1077609 - RNA, 26 nt, Human
uacauacacaaaaaaguuacuggaau

SEQ ID NO: 1077610 - RNA, 18 nt, Human
ucacaccacaaguaaagu

SEQ ID NO: 1077611 - RNA, 23 nt, Human
ucauagacaaaaaaggaaaaaaa

SEQ ID NO: 1077612 - RNA, 20 nt, Human
ucucaugguuuggguugggu

SEQ ID NO: 1077613 - RNA, 18 nt, Human
ugaauaggucacggcggc

SEQ ID NO: 1077614 - RNA, 19 nt, Human
ugcccacggugggcaggcg

SEQ ID NO: 1077615 - RNA, 18 nt, Human
ugcggcgagcaaggagga

SEQ ID NO: 1077616 - RNA, 24 nt, Human
uggaaguuuugguucuuuuuuccu

SEQ ID NO: 1077617 - RNA, 20 nt, Human
uggaaugcucagaauaagau

SEQ ID NO: 1077618 - RNA, 24 nt, Human
uguaaauaaaaaauacaaacaaau

SEQ ID NO: 1077619 - RNA, 25 nt, Human
uuguuggacaacauuguuucacaca

SEQ ID NO: 1077620 - RNA, 22 nt, Human
uuuagauucugagacgggaagu

SEQ ID NO: 1077621 - RNA, 23 nt, Human
uuugguucuuuuuuccuccccug

SEQ ID NO: 1077622 - RNA, 20 nt, Human
aaaacacagguaaaggugcc

SEQ ID NO: 1077623 - RNA, 24 nt, Human
aaaacacagguaaaggugccacca

SEQ ID NO: 1077624 - RNA, 20 nt, Human
aaccuggccugguuugugca

SEQ ID NO: 1077625 - RNA, 20 nt, Human
aagcacaggagggaggcuga

SEQ ID NO: 1077626 - RNA, 20 nt, Human
aaggugccaccagccagagg

SEQ ID NO: 1077627 - RNA, 25 nt, Human
accuugcucaccuucuacuugucca

SEQ ID NO: 1077628 - RNA, 21 nt, Human
acguugggaugaccugccugc

SEQ ID NO: 1077629 - RNA, 22 nt, Human
agaagagagaaggagagaagag

SEQ ID NO: 1077630 - RNA, 18 nt, Human
agccaggaauggguggga

SEQ ID NO: 1077631 - RNA, 24 nt, Human
agccaggaaugggugggagaccug

SEQ ID NO: 1077632 - RNA, 20 nt, Human
agccccgcccucccaggcaa

SEQ ID NO: 1077633 - RNA, 26 nt, Human
aggcaagaagaagagaagagggaccc

SEQ ID NO: 1077634 - RNA, 22 nt, Human
aggcagaaaagugacaccucag

SEQ ID NO: 1077635 - RNA, 22 nt, Human
agugcugagguacaaggaagga

SEQ ID NO: 1077636 - RNA, 22 nt, Human
aguggggaggaguggcuggggc

SEQ ID NO: 1077637 - RNA, 23 nt, Human
aguggggaggaguggcuggggcu

SEQ ID NO: 1077638 - RNA, 23 nt, Human
augauggcagcaguggcccacgu

SEQ ID NO: 1077639 - RNA, 21 nt, Human
caaaacacagguaaaggugcc

SEQ ID NO: 1077640 - RNA, 21 nt, Human
caaacccaggcaucucugcac

SEQ ID NO: 1077641 - RNA, 18 nt, Human
cacaggagggaggcugag

SEQ ID NO: 1077642 - RNA, 19 nt, Human
caccucggcccccuccaga

SEQ ID NO: 1077643 - RNA, 20 nt, Human
caccuugcucaccuucuacu

SEQ ID NO: 1077644 - RNA, 27 nt, Human
cagcaagccccccugucccgcaggcuc

SEQ ID NO: 1077645 - RNA, 18 nt, Human
cagccagagguuucaggc

SEQ ID NO: 1077646 - RNA, 24 nt, Human
cagccagagguuucaggcagaaaa

SEQ ID NO: 1077647 - RNA, 18 nt, Human
cagcccccugccaccucg

SEQ ID NO: 1077648 - RNA, 18 nt, Human
cagcccccugccaccucg

SEQ ID NO: 1077649 - RNA, 22 nt, Human
cagcccccugccaccucggccc

SEQ ID NO: 1077650 - RNA, 20 nt, Human
caggcaucucugcacucucu

SEQ ID NO: 1077651 - RNA, 21 nt, Human
caguggggaggaguggcuggg

SEQ ID NO: 1077652 - RNA, 19 nt, Human
caugccagcccccugccac

SEQ ID NO: 1077653 - RNA, 21 nt, Human
ccaaaccugggcacagucaca

SEQ ID NO: 1077654 - RNA, 18 nt, Human
ccagagugcugagguaca

SEQ ID NO: 1077655 - RNA, 19 nt, Human
ccaggcaucucugcacucu

SEQ ID NO: 1077656 - RNA, 20 nt, Human
cccaggcacagcugcagcca

SEQ ID NO: 1077657 - RNA, 20 nt, Human
cccccugccaccucggcccc

SEQ ID NO: 1077658 - RNA, 21 nt, Human
ccccugccaccucggcccccu

SEQ ID NO: 1077659 - RNA, 22 nt, Human
cccgcccucccaggcacagcug

SEQ ID NO: 1077660 - RNA, 22 nt, Human
ccgugcgucuccucucagcugc

SEQ ID NO: 1077661 - RNA, 22 nt, Human
ccucagagcuggugggagccag

SEQ ID NO: 1077662 - RNA, 23 nt, Human
ccucagagcuggugggagccagg

SEQ ID NO: 1077663 - RNA, 19 nt, Human
ccucaggauucuguaacac

SEQ ID NO: 1077664 - RNA, 22 nt, Human
ccugcagaaaggagcuacccac

SEQ ID NO: 1077665 - RNA, 24 nt, Human
ccugccaccucggcccccuccaga

SEQ ID NO: 1077666 - RNA, 22 nt, Human
ccuuugaucucucggagcagcu

SEQ ID NO: 1077667 - RNA, 20 nt, Human
cgcaggcucaguuguaccug

SEQ ID NO: 1077668 - RNA, 18 nt, Human
cgccugggcacuaugggc

SEQ ID NO: 1077669 - RNA, 21 nt, Human
cguugggaugaccugccugca

SEQ ID NO: 1077670 - RNA, 24 nt, Human
cucagaggcccagcaagccccccu

SEQ ID NO: 1077671 - RNA, 19 nt, Human
cucaggacaagaacucagg

SEQ ID NO: 1077672 - RNA, 23 nt, Human
cugcaguggggaggaguggcugg

SEQ ID NO: 1077673 - RNA, 19 nt, Human
cugguuugugcaagcucag

SEQ ID NO: 1077674 - RNA, 22 nt, Human
cuucuacuuguccacauaccuc

SEQ ID NO: 1077675 - RNA, 21 nt, Human
gaaccugaaaggacccauuua

SEQ ID NO: 1077676 - RNA, 25 nt, Human
gagcccacuccaaauucagauccaa

SEQ ID NO: 1077677 - RNA, 24 nt, Human
gcaaaacacagguaaaggugccac

SEQ ID NO: 1077678 - RNA, 21 nt, Human
gcaaacccaggcaucucugca

SEQ ID NO: 1077679 - RNA, 23 nt, Human
gcaagccccccugucccgcaggc

SEQ ID NO: 1077680 - RNA, 23 nt, Human
gcucaauaaagcaccucuucacc

SEQ ID NO: 1077681 - RNA, 24 nt, Human
gcugagguacaaggaaggaaccug

SEQ ID NO: 1077682 - RNA, 20 nt, Human
ggacucaggacaagaacuca

SEQ ID NO: 1077683 - RNA, 24 nt, Human
ggcugcaguggggaggaguggcug

SEQ ID NO: 1077684 - RNA, 21 nt, Human
gggcacagcuacccaccgugc

SEQ ID NO: 1077685 - RNA, 18 nt, Human
guggagcaguugcuaugg

SEQ ID NO: 1077686 - RNA, 19 nt, Human
gugggagccaggaaugggg

SEQ ID NO: 1077687 - RNA, 18 nt, Human
uaacauaaacagggcuga

SEQ ID NO: 1077688 - RNA, 22 nt, Human
uaacccagugggcccgagcaag

SEQ ID NO: 1077689 - RNA, 22 nt, Human
uaccugguccugcccccuggca

SEQ ID NO: 1077690 - RNA, 24 nt, Human
uaucaggcaggagccccgcccucc

SEQ ID NO: 1077691 - RNA, 25 nt, Human
uccaaguugaggccaaaccgggguc

SEQ ID NO: 1077692 - RNA, 23 nt, Human
uccuggacucaggacaagaacuc

SEQ ID NO: 1077693 - RNA, 25 nt, Human
ucuauaaaucuuccaccaugugucu

SEQ ID NO: 1077694 - RNA, 21 nt, Human
ucucagaggcccagcaagccc

SEQ ID NO: 1077695 - RNA, 23 nt, Human
ucucugcuuccagagcccacucc

SEQ ID NO: 1077696 - RNA, 18 nt, Human
ucugcugugauucugggg

SEQ ID NO: 1077697 - RNA, 21 nt, Human
ugaaaggacccauuuaugaug

SEQ ID NO: 1077698 - RNA, 18 nt, Human
ugacaagcacaggaggga

SEQ ID NO: 1077699 - RNA, 19 nt, Human
ugagcaguguugcuaaggc

SEQ ID NO: 1077700 - RNA, 25 nt, Human
ugagguacaaggaaggaaccugaaa

SEQ ID NO: 1077701 - RNA, 18 nt, Human
ugcacucucagaggccca

SEQ ID NO: 1077702 - RNA, 23 nt, Human
ugcaguggggaggaguggcuggg

SEQ ID NO: 1077703 - RNA, 20 nt, Human
ugccaccucggcccccucca

SEQ ID NO: 1077704 - RNA, 24 nt, Human
ugcuaaggcuucuaaugaccccca

SEQ ID NO: 1077705 - RNA, 25 nt, Human
ugcucaccuucuacuuguccacaua

SEQ ID NO: 1077706 - RNA, 20 nt, Human
uggacagaacuaacccagug

SEQ ID NO: 1077707 - RNA, 18 nt, Human
uggagacacuggcugcag

SEQ ID NO: 1077708 - RNA, 21 nt, Human
uggccggaaggcccuccucag

SEQ ID NO: 1077709 - RNA, 19 nt, Human
uggcugcaguggggaggag

SEQ ID NO: 1077710 - RNA, 25 nt, Human
uggcugcaguggggaggaguggcug

SEQ ID NO: 1077711 - RNA, 19 nt, Human
uggcuggggcugugcacuc

SEQ ID NO: 1077712 - RNA, 20 nt, Human
uggcuggggcugugcacucc

SEQ ID NO: 1077713 - RNA, 19 nt, Human
ugggaugaccugccugcag

SEQ ID NO: 1077714 - RNA, 21 nt, Human
ugggcacagucacaaccuggc

SEQ ID NO: 1077715 - RNA, 19 nt, Human
ugggcccgagcaaaacaca

SEQ ID NO: 1077716 - RNA, 19 nt, Human
ugugauucugggggcugcc

SEQ ID NO: 1077717 - RNA, 23 nt, Human
uguggugagcaguguugcuaagg

SEQ ID NO: 1077718 - RNA, 19 nt, Human
uucaggcagaaaagugaca

SEQ ID NO: 1077719 - RNA, 19 nt, Human
uucuacuuguccacauacc

SEQ ID NO: 1077720 - RNA, 19 nt, Human
uucuugccaaauugcaggc

SEQ ID NO: 1077721 - RNA, 23 nt, Human
uugcucaauuaagcuccuuuaaa

SEQ ID NO: 1077722 - RNA, 22 nt, Human
uuuaugauggcagcaguggccc

SEQ ID NO: 1077723 - RNA, 19 nt, Human
aagccccaggccugcucag

SEQ ID NO: 1077724 - RNA, 19 nt, Human
agccccaggccugcucagc

SEQ ID NO: 1077725 - RNA, 24 nt, Human
aggauggcccaucuaugccuguag

SEQ ID NO: 1077726 - RNA, 19 nt, Human
aggcccccgacccaugacc

SEQ ID NO: 1077727 - RNA, 22 nt, Human
aggcccccgacccaugaccugc

SEQ ID NO: 1077728 - RNA, 27 nt, Human
aggcccccgacccaugaccugcccagg

SEQ ID NO: 1077729 - RNA, 18 nt, Human
agggaaacaaaaggaugg

SEQ ID NO: 1077730 - RNA, 19 nt, Human
agggacauagaaccaagcc

SEQ ID NO: 1077731 - RNA, 22 nt, Human
auuaacaagggaaacaaaagga

SEQ ID NO: 1077732 - RNA, 23 nt, Human
auuggagaaggucgcagcgagga

SEQ ID NO: 1077733 - RNA, 19 nt, Human
caagccccaggccugcuca

SEQ ID NO: 1077734 - RNA, 23 nt, Human
caagggaaacaaaaggauggccc

SEQ ID NO: 1077735 - RNA, 24 nt, Human
cagcagggaauggcccucccuggc

SEQ ID NO: 1077736 - RNA, 19 nt, Human
cccaugaccugcccagugu

SEQ ID NO: 1077737 - RNA, 20 nt, Human
cccccgacccaugaccugcc

SEQ ID NO: 1077738 - RNA, 22 nt, Human
ccgcaaagucuccuucccaucu

SEQ ID NO: 1077739 - RNA, 23 nt, Human
ccgcaaagucuccuucccaucuc

SEQ ID NO: 1077740 - RNA, 20 nt, Human
ccuggcacugggaggccccc

SEQ ID NO: 1077741 - RNA, 20 nt, Human
ccugggaagaugagguagca

SEQ ID NO: 1077742 - RNA, 21 nt, Human
cucccuggccucucuggcccc

SEQ ID NO: 1077743 - RNA, 24 nt, Human
cucccuggccucucuggggagagu

SEQ ID NO: 1077744 - RNA, 23 nt, Human
gcagcagggaauggcccucccug

SEQ ID NO: 1077745 - RNA, 21 nt, Human
gccgcaaagucuccuucccau

SEQ ID NO: 1077746 - RNA, 20 nt, Human
ggaaacaaaaggauggccca

SEQ ID NO: 1077747 - RNA, 18 nt, Human
ggcacaggucccuggcac

SEQ ID NO: 1077748 - RNA, 23 nt, Human
ggcagcagggaauggcccucccu

SEQ ID NO: 1077749 - RNA, 20 nt, Human
guguugcguguggccgcaaa

SEQ ID NO: 1077750 - RNA, 19 nt, Human
uaacaagggaaacaaaagg

SEQ ID NO: 1077751 - RNA, 23 nt, Human
uagaaccaagccccaggccugcu

SEQ ID NO: 1077752 - RNA, 23 nt, Human
ucccuggcacugggaggcccccg

SEQ ID NO: 1077753 - RNA, 25 nt, Human
uccugggaagaugagguagcagagg

SEQ ID NO: 1077754 - RNA, 23 nt, Human
ucuguguguuuaaggcgugcuug

SEQ ID NO: 1077755 - RNA, 23 nt, Human
ugaccugcccagugucaugucua

SEQ ID NO: 1077756 - RNA, 21 nt, Human
ugccuguagcccaggcguagg

SEQ ID NO: 1077757 - RNA, 18 nt, Human
ugggaagaugagguagca

SEQ ID NO: 1077758 - RNA, 20 nt, Human
aaacagagcaagacagacaa

SEQ ID NO: 1077759 - RNA, 27 nt, Human
aaaguugugucuuugauagguucguaa

SEQ ID NO: 1077760 - RNA, 20 nt, Human
aaaugccuuugcucaauuuc

SEQ ID NO: 1077761 - RNA, 28 nt, Human
aagaaaaaacaauuuaaaacgcugaaga

SEQ ID NO: 1077762 - RNA, 26 nt, Human
aagaaagaaaaaacaauuuaaaacgc

SEQ ID NO: 1077763 - RNA, 24 nt, Human
aagacagacaaccuacagcagcug

SEQ ID NO: 1077764 - RNA, 18 nt, Human
aagcugaaaguugagucu

SEQ ID NO: 1077765 - RNA, 22 nt, Human
aagucaugucuucuugaacuaa

SEQ ID NO: 1077766 - RNA, 23 nt, Human
aaucuugaacucacgacuuacua

SEQ ID NO: 1077767 - RNA, 27 nt, Human
acagaaaaaaguauguaaaagacacca

SEQ ID NO: 1077768 - RNA, 25 nt, Human
agaacagaaaaaaguauguaaaaga

SEQ ID NO: 1077769 - RNA, 21 nt, Human
agacagacaaccuacagcagc

SEQ ID NO: 1077770 - RNA, 18 nt, Human
aggagaaaacauaucagg

SEQ ID NO: 1077771 - RNA, 20 nt, Human
aggagaaaacauaucaggaa

SEQ ID NO: 1077772 - RNA, 20 nt, Human
aggagauguggggauucagu

SEQ ID NO: 1077773 - RNA, 18 nt, Human
aguauguaaaagacacca

SEQ ID NO: 1077774 - RNA, 20 nt, Human
caaccuuaaaaacccaaaca

SEQ ID NO: 1077775 - RNA, 20 nt, Human
caagacagacaaccuacagc

SEQ ID NO: 1077776 - RNA, 23 nt, Human
caagacagacaaccuacagcagc

SEQ ID NO: 1077777 - RNA, 25 nt, Human
cagaaaaagcugaaaguugagucug

SEQ ID NO: 1077778 - RNA, 18 nt, Human
caggcaaagaaugcaaag

SEQ ID NO: 1077779 - RNA, 23 nt, Human
cauuuuugcucaaaaauucuuua

SEQ ID NO: 1077780 - RNA, 22 nt, Human
cccacagccucaucucgacucc

SEQ ID NO: 1077781 - RNA, 26 nt, Human
cccucccucacguguaaaaucauccc

SEQ ID NO: 1077782 - RNA, 21 nt, Human
ccugcaggcaaagaaugcaaa

SEQ ID NO: 1077783 - RNA, 20 nt, Human
ccuggagacgcuccaaccuu

SEQ ID NO: 1077784 - RNA, 20 nt, Human
cgcuccaaccuuaaaaaccc

SEQ ID NO: 1077785 - RNA, 21 nt, Human
cuagaaccggcccgaggucac

SEQ ID NO: 1077786 - RNA, 25 nt, Human
cucccuuuacagaaaaagcugaaag

SEQ ID NO: 1077787 - RNA, 18 nt, Human
cuuacuaggaagaaagaa

SEQ ID NO: 1077788 - RNA, 20 nt, Human
cuugaacucacgacuuacua

SEQ ID NO: 1077789 - RNA, 21 nt, Human
gaaaguugagucugagcacag

SEQ ID NO: 1077790 - RNA, 22 nt, Human
gaagcaaacagaggagaaaaca

SEQ ID NO: 1077791 - RNA, 25 nt, Human
gacauuagaagcaaacagaggagaa

SEQ ID NO: 1077792 - RNA, 21 nt, Human
gcagacacaccugguaucuca

SEQ ID NO: 1077793 - RNA, 18 nt, Human
gcccacagccucaucucg

SEQ ID NO: 1077794 - RNA, 23 nt, Human
gggauucaguguggagucagcac

SEQ ID NO: 1077795 - RNA, 23 nt, Human
guaaaaucaucccgaaggcucac

SEQ ID NO: 1077796 - RNA, 24 nt, Human
uaaaaucaucccgaaggcucacaa

SEQ ID NO: 1077797 - RNA, 24 nt, Human
uacuaggaagaaagaaaaaacaau

SEQ ID NO: 1077798 - RNA, 22 nt, Human
uaucaggaagugcauaggcuuc

SEQ ID NO: 1077799 - RNA, 18 nt, Human
uaugugaauguauaugua

SEQ ID NO: 1077800 - RNA, 22 nt, Human
uaugugaauguauauguaaagu

SEQ ID NO: 1077801 - RNA, 21 nt, Human
uauuuccagaacagaaaaaag

SEQ ID NO: 1077802 - RNA, 19 nt, Human
ucacaagggggugaaaugu

SEQ ID NO: 1077803 - RNA, 23 nt, Human
ucagaguguguuucugauaaugc

SEQ ID NO: 1077804 - RNA, 21 nt, Human
ucauccggagacauuagaagc

SEQ ID NO: 1077805 - RNA, 18 nt, Human
uccaaccuuaaaaaccca

SEQ ID NO: 1077806 - RNA, 24 nt, Human
uccaaguuaauucucugauguuuu

SEQ ID NO: 1077807 - RNA, 28 nt, Human
uccagaacagaaaaaaguauguaaaaga

SEQ ID NO: 1077808 - RNA, 19 nt, Human
ugaaaaacauugaggaaac

SEQ ID NO: 1077809 - RNA, 18 nt, Human
ugaaaauguuguaguguu

SEQ ID NO: 1077810 - RNA, 23 nt, Human
ugagcacagucuuauuuaaacaa

SEQ ID NO: 1077811 - RNA, 19 nt, Human
ugaggaaacgaaccugagu

SEQ ID NO: 1077812 - RNA, 22 nt, Human
ugauucaugacauucggugccc

SEQ ID NO: 1077813 - RNA, 18 nt, Human
ugcaaagcaaggagauga

SEQ ID NO: 1077814 - RNA, 22 nt, Human
ugcauacaagcacgcucauaug

SEQ ID NO: 1077815 - RNA, 24 nt, Human
ugcauacaagcacgcucauaugua

SEQ ID NO: 1077816 - RNA, 18 nt, Human
ugccaccugcaggccagg

SEQ ID NO: 1077817 - RNA, 21 nt, Human
ugccaugcaggagaugugggg

SEQ ID NO: 1077818 - RNA, 23 nt, Human
ugcccacagccucaucucgacuc

SEQ ID NO: 1077819 - RNA, 20 nt, Human
ugcuggggauugaagucaug

SEQ ID NO: 1077820 - RNA, 21 nt, Human
ugcuggggauugaagucaugu

SEQ ID NO: 1077821 - RNA, 18 nt, Human
ugggcuucuagaaccggc

SEQ ID NO: 1077822 - RNA, 26 nt, Human
uguccugcaggcaaagaaugcaaagc

SEQ ID NO: 1077823 - RNA, 22 nt, Human
uguggagucagcacaugcccug

SEQ ID NO: 1077824 - RNA, 19 nt, Human
uuacuaggaagaaagaaaa

SEQ ID NO: 1077825 - RNA, 28 nt, Human
uucaccaaggucuucccauguuuuccaa

SEQ ID NO: 1077826 - RNA, 23 nt, Human
uuuccaaguuaauucucugaugu

SEQ ID NO: 1077827 - RNA, 24 nt, Human
uuuuuuuuuuuuuuuuugauacug

SEQ ID NO: 1077828 - RNA, 23 nt, Human
aaaacaaacagcgagaacccaga

SEQ ID NO: 1077829 - RNA, 18 nt, Human
aaaagcaacuucagaaca

SEQ ID NO: 1077830 - RNA, 19 nt, Human
aaacaaacagcgagaaccc

SEQ ID NO: 1077831 - RNA, 23 nt, Human
aaacaaacagcgagaacccagag

SEQ ID NO: 1077832 - RNA, 24 nt, Human
aaacaaacagcgagaacccagagc

SEQ ID NO: 1077833 - RNA, 21 nt, Human
aaaggaacuguugacuuugag

SEQ ID NO: 1077834 - RNA, 23 nt, Human
aacaaacagcgagaacccagagc

SEQ ID NO: 1077835 - RNA, 24 nt, Human
aagcaaaaagaaggugaaauuuca

SEQ ID NO: 1077836 - RNA, 21 nt, Human
acaaaagcaacuucagaacag

SEQ ID NO: 1077837 - RNA, 24 nt, Human
acacaaguccaagggcagccgagg

SEQ ID NO: 1077838 - RNA, 23 nt, Human
acauuuuuagaaagcaaaaagaa

SEQ ID NO: 1077839 - RNA, 25 nt, Human
accccggacaacacaaguccaaggg

SEQ ID NO: 1077840 - RNA, 23 nt, Human
acugaauuuauugaaaacaugcu

SEQ ID NO: 1077841 - RNA, 21 nt, Human
aggucucacacugcccagcag

SEQ ID NO: 1077842 - RNA, 22 nt, Human
aguggccaccaccccggacaac

SEQ ID NO: 1077843 - RNA, 30 nt, Human
auaaaauguccucauucuccauuuucugcu

SEQ ID NO: 1077844 - RNA, 20 nt, Human
aucaucaaaaggcaaaauau

SEQ ID NO: 1077845 - RNA, 23 nt, Human
aucccccccccccccacccccaa

SEQ ID NO: 1077846 - RNA, 20 nt, Human
augcugaaaacaaacagcga

SEQ ID NO: 1077847 - RNA, 22 nt, Human
caaaaagaaggugaaauuucaa

SEQ ID NO: 1077848 - RNA, 18 nt, Human
caaaagcaacuucagaac

SEQ ID NO: 1077849 - RNA, 23 nt, Human
caaacagcgagaacccagagcac

SEQ ID NO: 1077850 - RNA, 19 nt, Human
caagagccaccuugguguu

SEQ ID NO: 1077851 - RNA, 23 nt, Human
caagagccaccuugguguucagc

SEQ ID NO: 1077852 - RNA, 21 nt, Human
caagauaaaugcauaaaauua

SEQ ID NO: 1077853 - RNA, 28 nt, Human
caagguguaauaucccccccccccccaa

SEQ ID NO: 1077854 - RNA, 22 nt, Human
caaguccaagggcagccgagga

SEQ ID NO: 1077855 - RNA, 22 nt, Human
cacugcccagcaggaagauaac

SEQ ID NO: 1077856 - RNA, 18 nt, Human
cacuguggagaugcaagg

SEQ ID NO: 1077857 - RNA, 21 nt, Human
cacuugcuaucaucaaaaggc

SEQ ID NO: 1077858 - RNA, 19 nt, Human
cagaacagcucugagccgg

SEQ ID NO: 1077859 - RNA, 18 nt, Human
cagcacgccucaccacag

SEQ ID NO: 1077860 - RNA, 26 nt, Human
cagcaggaagauaacacacaaauagc

SEQ ID NO: 1077861 - RNA, 20 nt, Human
cagcucugagccggccuccc

SEQ ID NO: 1077862 - RNA, 19 nt, Human
ccaguggccaccaccccgg

SEQ ID NO: 1077863 - RNA, 21 nt, Human
cccaaccugccccauugaaag

SEQ ID NO: 1077864 - RNA, 24 nt, Human
ccccccacccccaaccugccccau

SEQ ID NO: 1077865 - RNA, 19 nt, Human
ccccccccacccccaaccu

SEQ ID NO: 1077866 - RNA, 22 nt, Human
ccccccccacccccaaccugcc

SEQ ID NO: 1077867 - RNA, 19 nt, Human
cccccccccacccccaacc

SEQ ID NO: 1077868 - RNA, 24 nt, Human
cccccccccacccccaaccugccc

SEQ ID NO: 1077869 - RNA, 23 nt, Human
ccccccccccccacccccaaccu

SEQ ID NO: 1077870 - RNA, 22 nt, Human
cccggacaacacaaguccaagg

SEQ ID NO: 1077871 - RNA, 31 nt, Human
ccucaccacagaggggcccugcucucccugg

SEQ ID NO: 1077872 - RNA, 20 nt, Human
ccucagcagccucaggcagg

SEQ ID NO: 1077873 - RNA, 24 nt, Human
ccucaggcaggagccugcuccgaa

SEQ ID NO: 1077874 - RNA, 20 nt, Human
ccucauucuccauuuucugc

SEQ ID NO: 1077875 - RNA, 18 nt, Human
ccugugagucuguugcau

SEQ ID NO: 1077876 - RNA, 22 nt, Human
cuccgaaggugcaggagaaaag

SEQ ID NO: 1077877 - RNA, 22 nt, Human
cuugcuaucaucaaaaggcaaa

SEQ ID NO: 1077878 - RNA, 24 nt, Human
cuuuuaugauaaaaacaaaauuuu

SEQ ID NO: 1077879 - RNA, 22 nt, Human
gaaaacaaacagcgagaaccca

SEQ ID NO: 1077880 - RNA, 22 nt, Human
gaaaaggagcuuugagaauagu

SEQ ID NO: 1077881 - RNA, 20 nt, Human
gaaagaaaaugaaucgagaa

SEQ ID NO: 1077882 - RNA, 21 nt, Human
gaacccagagcaccucagcag

SEQ ID NO: 1077883 - RNA, 25 nt, Human
gaaguccugccaccaagagccaccu

SEQ ID NO: 1077884 - RNA, 18 nt, Human
gagcaaucucuuuucacu

SEQ ID NO: 1077885 - RNA, 25 nt, Human
gcugaaaacaaacagcgagaaccca

SEQ ID NO: 1077886 - RNA, 21 nt, Human
ggaaagaaaaugaaucgagaa

SEQ ID NO: 1077887 - RNA, 27 nt, Human
ggcccugcucucccugcucaguagcca

SEQ ID NO: 1077888 - RNA, 21 nt, Human
guuguugaauuucuauaagga

SEQ ID NO: 1077889 - RNA, 25 nt, Human
uaaaaacaaaauuuuaauuguauuc

SEQ ID NO: 1077890 - RNA, 25 nt, Human
uacacugagcagcacgccucaccac

SEQ ID NO: 1077891 - RNA, 25 nt, Human
uacacugagcagcacgccuuccuug

SEQ ID NO: 1077892 - RNA, 18 nt, Human
uagaaagcaaaaagaagg

SEQ ID NO: 1077893 - RNA, 23 nt, Human
uagaaagcaaaaagaaggugaaa

SEQ ID NO: 1077894 - RNA, 19 nt, Human
uccaagggcagccgaggaa

SEQ ID NO: 1077895 - RNA, 19 nt, Human
ucccccccccccccacccc

SEQ ID NO: 1077896 - RNA, 22 nt, Human
ucccccccccccccacccccaa

SEQ ID NO: 1077897 - RNA, 30 nt, Human
ucccuaagcuaguaaccuuccagcuauguu

SEQ ID NO: 1077898 - RNA, 24 nt, Human
ucgagaaguaaaauacaaggugua

SEQ ID NO: 1077899 - RNA, 22 nt, Human
ugaaaacaugcuuggagcaauc

SEQ ID NO: 1077900 - RNA, 23 nt, Human
ugagaaaagccugaaccuggaug

SEQ ID NO: 1077901 - RNA, 22 nt, Human
ugagaauagauuguguuacaaa

SEQ ID NO: 1077902 - RNA, 21 nt, Human
ugcagaauuuuuguguugcag

SEQ ID NO: 1077903 - RNA, 21 nt, Human
ugcgugugugugugugugugu

SEQ ID NO: 1077904 - RNA, 25 nt, Human
ugcgugugugugugugugugugugg

SEQ ID NO: 1077905 - RNA, 22 nt, Human
uggccaccaccccggacaacac

SEQ ID NO: 1077906 - RNA, 19 nt, Human
ugugugugugcaagugugc

SEQ ID NO: 1077907 - RNA, 21 nt, Human
ugugugugugugugugcaagu

SEQ ID NO: 1077908 - RNA, 22 nt, Human
ugugugugugugugugcaagug

SEQ ID NO: 1077909 - RNA, 23 nt, Human
ugugugugugugugugcaagugu

SEQ ID NO: 1077910 - RNA, 18 nt, Human
ugugugugugugugugug

SEQ ID NO: 1077911 - RNA, 18 nt, Human
ugugugugugugugugug

SEQ ID NO: 1077912 - RNA, 21 nt, Human
ugugugugugugugugugugu

SEQ ID NO: 1077913 - RNA, 22 nt, Human
ugugugugugugugugugugug

SEQ ID NO: 1077914 - RNA, 27 nt, Human
uucuccaccauuuuugcuuuuccuuug

SEQ ID NO: 1077915 - RNA, 21 nt, Human
uugaaaacaugcuuggagcaa

SEQ ID NO: 1077916 - RNA, 23 nt, Human
uuuuacacugagcagcacgccuc

SEQ ID NO: 1077917 - RNA, 22 nt, Human
uuuucugcuauaguuguugaau

SEQ ID NO: 1077918 - RNA, 21 nt, Human
uuuugcuuuuccuuugacauu

SEQ ID NO: 1077919 - RNA, 22 nt, Human
acucaggugggucacaagccag

SEQ ID NO: 1077920 - RNA, 24 nt, Human
aggcuuugcggcacagaccggccu

SEQ ID NO: 1077921 - RNA, 22 nt, Human
aggugggucacaagccagggga

SEQ ID NO: 1077922 - RNA, 20 nt, Human
cccacgccacggccuccaca

SEQ ID NO: 1077923 - RNA, 22 nt, Human
cccucccaggccagcccuacaa

SEQ ID NO: 1077924 - RNA, 23 nt, Human
ccggugugucuugaacaagccug

SEQ ID NO: 1077925 - RNA, 18 nt, Human
ccucugcggaccagggau

SEQ ID NO: 1077926 - RNA, 19 nt, Human
cgccacggccuccacacag

SEQ ID NO: 1077927 - RNA, 18 nt, Human
cgcccaggcuuugcggca

SEQ ID NO: 1077928 - RNA, 22 nt, Human
cuguggccauggccgucgccuc

SEQ ID NO: 1077929 - RNA, 20 nt, Human
gcccacgccacggccuccac

SEQ ID NO: 1077930 - RNA, 18 nt, Human
ggagggacaggcgcagag

SEQ ID NO: 1077931 - RNA, 19 nt, Human
ggcucucgaggaacagccc

SEQ ID NO: 1077932 - RNA, 24 nt, Human
gggaugcccucccaggccagcccu

SEQ ID NO: 1077933 - RNA, 27 nt, Human
gucacaagccaggggacugagaucgcc

SEQ ID NO: 1077934 - RNA, 18 nt, Human
guuguggggaagaauaac

SEQ ID NO: 1077935 - RNA, 20 nt, Human
uaaaucuccaacagucaaac

SEQ ID NO: 1077936 - RNA, 18 nt, Human
uccaggucucuugcacag

SEQ ID NO: 1077937 - RNA, 23 nt, Human
ucccaggccagcccuacaagcac

SEQ ID NO: 1077938 - RNA, 23 nt, Human
ucuugcacaggauaaaucuccaa

SEQ ID NO: 1077939 - RNA, 21 nt, Human
ugcccucccaggccagcccua

SEQ ID NO: 1077940 - RNA, 22 nt, Human
uugcuuccaggucucuugcaca

SEQ ID NO: 1077941 - RNA, 20 nt, Human
uuuuggccucauugggccgu

SEQ ID NO: 1077942 - RNA, 20 nt, Human
uuuuuggccucauugggccg

SEQ ID NO: 1077943 - RNA, 19 nt, Human
agacuugccuggcucuccc

SEQ ID NO: 1077944 - RNA, 24 nt, Human
caaauuuugcuuucaauuuccuca

SEQ ID NO: 1077945 - RNA, 22 nt, Human
cagccacuaaaaguucacacug

SEQ ID NO: 1077946 - RNA, 25 nt, Human
caguaggaauggaauuuucaguaua

SEQ ID NO: 1077947 - RNA, 23 nt, Human
cccagcaaggguccugcaggcug

SEQ ID NO: 1077948 - RNA, 26 nt, Human
ccgcugccgccgccgcccugccgccg

SEQ ID NO: 1077949 - RNA, 21 nt, Human
ccucagccuuuaggcuuucag

SEQ ID NO: 1077950 - RNA, 20 nt, Human
cgccgcugccgccgccgccc

SEQ ID NO: 1077951 - RNA, 21 nt, Human
cgccgcugccgccgccgcccu

SEQ ID NO: 1077952 - RNA, 25 nt, Human
cgccgcugccgccgccgcccugccg

SEQ ID NO: 1077953 - RNA, 23 nt, Human
cuaccugggcgcggggaagggag

SEQ ID NO: 1077954 - RNA, 23 nt, Human
cugcgccgcugccgccgccgccc

SEQ ID NO: 1077955 - RNA, 19 nt, Human
cuuaacaauagguacccag

SEQ ID NO: 1077956 - RNA, 19 nt, Human
cuuucaguccuuuuucgcu

SEQ ID NO: 1077957 - RNA, 19 nt, Human
gcagccacuaaaaguucac

SEQ ID NO: 1077958 - RNA, 19 nt, Human
gcccuaccugggcgcgggg

SEQ ID NO: 1077959 - RNA, 22 nt, Human
gggcucccugcagcuugcagcc

SEQ ID NO: 1077960 - RNA, 21 nt, Human
gugcaaauuuugcuuucaauu

SEQ ID NO: 1077961 - RNA, 21 nt, Human
uaccugggcgcggggaaggga

SEQ ID NO: 1077962 - RNA, 19 nt, Human
uccacaguaggaauggaau

SEQ ID NO: 1077963 - RNA, 23 nt, Human
uccucaguccccagcaagggucc

SEQ ID NO: 1077964 - RNA, 23 nt, Human
ugagacuugccuggcucucccaa

SEQ ID NO: 1077965 - RNA, 23 nt, Human
ugccuggcucucccaagucugcu

SEQ ID NO: 1077966 - RNA, 24 nt, Human
uggaagaagcugugaggaaagguc

SEQ ID NO: 1077967 - RNA, 19 nt, Human
aaacagaaagcgggagcug

SEQ ID NO: 1077968 - RNA, 22 nt, Human
aacugaguaaauaucuaaauau

SEQ ID NO: 1077969 - RNA, 26 nt, Human
aagccaccccccacguuuucaacuga

SEQ ID NO: 1077970 - RNA, 24 nt, Human
aagcccauuucagaggcuuccuag

SEQ ID NO: 1077971 - RNA, 22 nt, Human
aaggacaguuccugaggcugga

SEQ ID NO: 1077972 - RNA, 20 nt, Human
agauuucuguaaaacaguuu

SEQ ID NO: 1077973 - RNA, 21 nt, Human
aggcugcaguccucgcccggu

SEQ ID NO: 1077974 - RNA, 23 nt, Human
auaaagcccagacaugcaacuug

SEQ ID NO: 1077975 - RNA, 26 nt, Human
auccuggguucgaagucuuugggauu

SEQ ID NO: 1077976 - RNA, 19 nt, Human
caacuguaagucaaaagcc

SEQ ID NO: 1077977 - RNA, 20 nt, Human
caacuguaagucaaaagccc

SEQ ID NO: 1077978 - RNA, 23 nt, Human
cacaauuaauacacugaaauaaa

SEQ ID NO: 1077979 - RNA, 18 nt, Human
caccggcccaaguacuac

SEQ ID NO: 1077980 - RNA, 20 nt, Human
caggggagccuuuugaaaug

SEQ ID NO: 1077981 - RNA, 21 nt, Human
caggggagccuuuugaaaugu

SEQ ID NO: 1077982 - RNA, 27 nt, Human
caugcaacuuguuacauccaucaccau

SEQ ID NO: 1077983 - RNA, 22 nt, Human
ccacauuguuugagguuccagg

SEQ ID NO: 1077984 - RNA, 18 nt, Human
ccuggguucgaagucuuu

SEQ ID NO: 1077985 - RNA, 19 nt, Human
cgacagggugcgucucagg

SEQ ID NO: 1077986 - RNA, 18 nt, Human
cuccccaggucuccggcg

SEQ ID NO: 1077987 - RNA, 20 nt, Human
cugaaauaaagcccagacau

SEQ ID NO: 1077988 - RNA, 21 nt, Human
gaccacgaagccaccccccac

SEQ ID NO: 1077989 - RNA, 23 nt, Human
gcccaaguacuacccccucccca

SEQ ID NO: 1077990 - RNA, 20 nt, Human
gcugcaguccucgcccgguu

SEQ ID NO: 1077991 - RNA, 19 nt, Human
ggcggcggcggcguucgug

SEQ ID NO: 1077992 - RNA, 20 nt, Human
gggagcuggcaguuccucuc

SEQ ID NO: 1077993 - RNA, 18 nt, Human
guuuucaacugaguaaau

SEQ ID NO: 1077994 - RNA, 30 nt, Human
uaauacacugaaauaaagcccagacaugcc

SEQ ID NO: 1077995 - RNA, 22 nt, Human
ucagaggcuuccuaguccuugg

SEQ ID NO: 1077996 - RNA, 19 nt, Human
uccccaggucuccggcggc

SEQ ID NO: 1077997 - RNA, 21 nt, Human
uccuggguucgaagucuuugg

SEQ ID NO: 1077998 - RNA, 23 nt, Human
ucgcgugcuuucggaaaggggcc

SEQ ID NO: 1077999 - RNA, 25 nt, Human
ugaaauaaagcccagacaugcaacu

SEQ ID NO: 1078000 - RNA, 23 nt, Human
ugaaauguggauugagaauugug

SEQ ID NO: 1078001 - RNA, 19 nt, Human
ugaggcuggacucaccggc

SEQ ID NO: 1078002 - RNA, 20 nt, Human
ugccagccuuaaguucgcgu

SEQ ID NO: 1078003 - RNA, 23 nt, Human
uuccugaggcuggacucaccggg

SEQ ID NO: 1078004 - RNA, 23 nt, Human
uucggaaaggggccgacagggug

SEQ ID NO: 1078005 - RNA, 18 nt, Human
uuuaaagcaccugccagc

SEQ ID NO: 1078006 - RNA, 24 nt, Human
uuucggaaaggggccgacagggug

SEQ ID NO: 1078007 - RNA, 18 nt, Human
aaagagcucuggaccaga

SEQ ID NO: 1078008 - RNA, 21 nt, Human
acccagacacuaucaucugac

SEQ ID NO: 1078009 - RNA, 21 nt, Human
agaaugcaguggaaaacacca

SEQ ID NO: 1078010 - RNA, 19 nt, Human
agagauccauccuggaucc

SEQ ID NO: 1078011 - RNA, 24 nt, Human
agaguugaggguaagaguaugggg

SEQ ID NO: 1078012 - RNA, 21 nt, Human
agauggcucagaguugagggu

SEQ ID NO: 1078013 - RNA, 21 nt, Human
agcagcugaggggacagaggc

SEQ ID NO: 1078014 - RNA, 19 nt, Human
agcuagccaggggaaauga

SEQ ID NO: 1078015 - RNA, 24 nt, Human
aggggacagaggcuccaagaggcu

SEQ ID NO: 1078016 - RNA, 19 nt, Human
auccacccuggggugggug

SEQ ID NO: 1078017 - RNA, 25 nt, Human
aucuggagucaccuucgcaccggca

SEQ ID NO: 1078018 - RNA, 19 nt, Human
cagcagcacaggcccuggc

SEQ ID NO: 1078019 - RNA, 18 nt, Human
cagcugaggggacagagg

SEQ ID NO: 1078020 - RNA, 20 nt, Human
caggagccagccguaaccag

SEQ ID NO: 1078021 - RNA, 21 nt, Human
caggagccagccguaaccagc

SEQ ID NO: 1078022 - RNA, 18 nt, Human
caggggacaggugucugc

SEQ ID NO: 1078023 - RNA, 22 nt, Human
cauaacugcccgcuccagcagc

SEQ ID NO: 1078024 - RNA, 21 nt, Human
ccagaagugagcaugguucag

SEQ ID NO: 1078025 - RNA, 19 nt, Human
ccaggccauugaggcugga

SEQ ID NO: 1078026 - RNA, 19 nt, Human
ccaugaugcauucuccauc

SEQ ID NO: 1078027 - RNA, 21 nt, Human
cccacuguccugggccugagc

SEQ ID NO: 1078028 - RNA, 20 nt, Human
ccguaaccagcugucucccu

SEQ ID NO: 1078029 - RNA, 22 nt, Human
ccuagggggcagcuagccaggg

SEQ ID NO: 1078030 - RNA, 22 nt, Human
ccucacaccagccucagccucc

SEQ ID NO: 1078031 - RNA, 21 nt, Human
ccuccuucagagaaugaggau

SEQ ID NO: 1078032 - RNA, 20 nt, Human
ccucuaugggcagggauggg

SEQ ID NO: 1078033 - RNA, 25 nt, Human
ccucuaugggcagggaugggguuuc

SEQ ID NO: 1078034 - RNA, 24 nt, Human
ccugaggaaagagcucuggaccag

SEQ ID NO: 1078035 - RNA, 23 nt, Human
ccuuucccucacaccagccucag

SEQ ID NO: 1078036 - RNA, 24 nt, Human
cgaggccaggagccagccguaacc

SEQ ID NO: 1078037 - RNA, 18 nt, Human
cuccaagaggcugagaag

SEQ ID NO: 1078038 - RNA, 22 nt, Human
cuccauccuagggggcagcuag

SEQ ID NO: 1078039 - RNA, 21 nt, Human
cugcaucccccuuucccucac

SEQ ID NO: 1078040 - RNA, 18 nt, Human
cuguguccccacuggcuc

SEQ ID NO: 1078041 - RNA, 19 nt, Human
cuguugaccacccacuguc

SEQ ID NO: 1078042 - RNA, 22 nt, Human
gagcaugguucaggcuacacac

SEQ ID NO: 1078043 - RNA, 19 nt, Human
gaggagcaggccaggcugu

SEQ ID NO: 1078044 - RNA, 24 nt, Human
gcaguggaaaacaccaggugaggg

SEQ ID NO: 1078045 - RNA, 19 nt, Human
gcuccagcagcacaggccc

SEQ ID NO: 1078046 - RNA, 19 nt, Human
gcucuggaccagaagugag

SEQ ID NO: 1078047 - RNA, 22 nt, Human
gcucugugucuugccuugggug

SEQ ID NO: 1078048 - RNA, 22 nt, Human
ggagauguguuccuucagcagc

SEQ ID NO: 1078049 - RNA, 21 nt, Human
ggagucaccuucgcaccggca

SEQ ID NO: 1078050 - RNA, 21 nt, Human
ggccaggagccagccguaacc

SEQ ID NO: 1078051 - RNA, 19 nt, Human
guauccccuugcugcaucc

SEQ ID NO: 1078052 - RNA, 18 nt, Human
gugucuugccuugggugg

SEQ ID NO: 1078053 - RNA, 23 nt, Human
uacugccacccacauuauugcug

SEQ ID NO: 1078054 - RNA, 18 nt, Human
uagcaaucagugcugacu

SEQ ID NO: 1078055 - RNA, 21 nt, Human
ucacagagcucaggcuaugcc

SEQ ID NO: 1078056 - RNA, 18 nt, Human
ucacuguucacagagcuc

SEQ ID NO: 1078057 - RNA, 26 nt, Human
ucaggauggugcucaggugguucagc

SEQ ID NO: 1078058 - RNA, 21 nt, Human
ucagugaccaugaugcauucu

SEQ ID NO: 1078059 - RNA, 24 nt, Human
ucagugaccaugaugcauucucca

SEQ ID NO: 1078060 - RNA, 25 nt, Human
ucccagggcccugaggaaagagcuc

SEQ ID NO: 1078061 - RNA, 21 nt, Human
ucccccuuucccucacaccag

SEQ ID NO: 1078062 - RNA, 23 nt, Human
uccccuugcugcaucccccuuuc

SEQ ID NO: 1078063 - RNA, 18 nt, Human
ucccugcacauaacugcc

SEQ ID NO: 1078064 - RNA, 20 nt, Human
ucucaggccacugagagacc

SEQ ID NO: 1078065 - RNA, 19 nt, Human
ucuugccuuggguggcugg

SEQ ID NO: 1078066 - RNA, 21 nt, Human
ucuuuuagcaaucagugcuga

SEQ ID NO: 1078067 - RNA, 26 nt, Human
ugaaugucccagggcccugaggaaag

SEQ ID NO: 1078068 - RNA, 22 nt, Human
ugagaagugcaggagauguguu

SEQ ID NO: 1078069 - RNA, 18 nt, Human
ugagcagcuacggagccc

SEQ ID NO: 1078070 - RNA, 18 nt, Human
ugaggauaauaguuagag

SEQ ID NO: 1078071 - RNA, 18 nt, Human
ugaggguaagaguauggg

SEQ ID NO: 1078072 - RNA, 23 nt, Human
ugaguacauaguagguguauaua

SEQ ID NO: 1078073 - RNA, 19 nt, Human
uggcuggccuaauguagga

SEQ ID NO: 1078074 - RNA, 22 nt, Human
ugucacugugaacugggaagca

SEQ ID NO: 1078075 - RNA, 21 nt, Human
uguguccccacuggcucugcc

SEQ ID NO: 1078076 - RNA, 19 nt, Human
ugugucuugccuugggugg

SEQ ID NO: 1078077 - RNA, 24 nt, Human
uguuaugcuuuccaauaagaauca

SEQ ID NO: 1078078 - RNA, 23 nt, Human
uuggguggcuggaagaggagcag

SEQ ID NO: 1078079 - RNA, 24 nt, Human
aaaacucccacagucuucaauagg

SEQ ID NO: 1078080 - RNA, 24 nt, Human
acucccacagucuucaauaggggu

SEQ ID NO: 1078081 - RNA, 22 nt, Human
acuuucgcuggcucauugggaa

SEQ ID NO: 1078082 - RNA, 19 nt, Human
cauuaagccgccaaaacuc

SEQ ID NO: 1078083 - RNA, 21 nt, Human
cauuaagccgccaaaacuccc

SEQ ID NO: 1078084 - RNA, 25 nt, Human
ccaaaacucccacagucuucaauag

SEQ ID NO: 1078085 - RNA, 18 nt, Human
gaaggaccgaacacaauc

SEQ ID NO: 1078086 - RNA, 20 nt, Human
gacagacuuucgcuggcuca

SEQ ID NO: 1078087 - RNA, 25 nt, Human
ucauugggaaccacgggguuucagu

SEQ ID NO: 1078088 - RNA, 23 nt, Human
ugccauggaaucuuuuaaaggag

SEQ ID NO: 1078089 - RNA, 22 nt, Human
ccaguacccauuagaaacacag

SEQ ID NO: 1078090 - RNA, 22 nt, Human
ccaguacccauuagaaacacag

SEQ ID NO: 1078091 - RNA, 24 nt, Human
cccuuugcagacugaguuuuuauu

SEQ ID NO: 1078092 - RNA, 22 nt, Human
uugaucccaguacccauuagaa

SEQ ID NO: 1078093 - RNA, 24 nt, Human
aaagugcugggauuacaggcguga

SEQ ID NO: 1078094 - RNA, 21 nt, Human
aaccaggaaggcucuggcuca

SEQ ID NO: 1078095 - RNA, 19 nt, Human
aagaagaaaagacggaaga

SEQ ID NO: 1078096 - RNA, 19 nt, Human
aagcagccaagaggcagag

SEQ ID NO: 1078097 - RNA, 22 nt, Human
aagcagccaagaggcagagagc

SEQ ID NO: 1078098 - RNA, 19 nt, Human
aagugcugggauuacaggc

SEQ ID NO: 1078099 - RNA, 19 nt, Human
aagugcugggauuacaggc

SEQ ID NO: 1078100 - RNA, 26 nt, Human
aagugcugggauuacaggcgugagcc

SEQ ID NO: 1078101 - RNA, 19 nt, Human
acaggugcccaccacgucc

SEQ ID NO: 1078102 - RNA, 21 nt, Human
acgggguuuugucauguuggu

SEQ ID NO: 1078103 - RNA, 23 nt, Human
acgggguuuugucauguugguca

SEQ ID NO: 1078104 - RNA, 24 nt, Human
acgggguuuugucauguuggucag

SEQ ID NO: 1078105 - RNA, 19 nt, Human
acuguuuugcucaaggcug

SEQ ID NO: 1078106 - RNA, 23 nt, Human
agaaugucagggaaaacccgaaa

SEQ ID NO: 1078107 - RNA, 19 nt, Human
agagcuccccuuucucuuc

SEQ ID NO: 1078108 - RNA, 26 nt, Human
agcuggggaaaagcaguggguuaggu

SEQ ID NO: 1078109 - RNA, 21 nt, Human
aggaggccuugaaggacagac

SEQ ID NO: 1078110 - RNA, 22 nt, Human
aggcagagagcuggggaaaagc

SEQ ID NO: 1078111 - RNA, 19 nt, Human
aggcaggagagggagcgau

SEQ ID NO: 1078112 - RNA, 23 nt, Human
aggcaggagagggagcgaugcgg

SEQ ID NO: 1078113 - RNA, 21 nt, Human
agggaccaagacuccuacccu

SEQ ID NO: 1078114 - RNA, 18 nt, Human
aggucaggaaugaaugaa

SEQ ID NO: 1078115 - RNA, 24 nt, Human
aggugauccgcccgccucagccuu

SEQ ID NO: 1078116 - RNA, 18 nt, Human
aguagcugggauuacagg

SEQ ID NO: 1078117 - RNA, 24 nt, Human
agugauucuccugccucagccucc

SEQ ID NO: 1078118 - RNA, 18 nt, Human
agugcugggauuacaggc

SEQ ID NO: 1078119 - RNA, 21 nt, Human
auggauccccucccucuuugg

SEQ ID NO: 1078120 - RNA, 19 nt, Human
auggugcuauggaagggcc

SEQ ID NO: 1078121 - RNA, 24 nt, Human
auuuuuguguuuuuaguagagacg

SEQ ID NO: 1078122 - RNA, 24 nt, Human
caaagugcugggauuacaggcgug

SEQ ID NO: 1078123 - RNA, 18 nt, Human
caacauccagagggaaag

SEQ ID NO: 1078124 - RNA, 18 nt, Human
caagaggcagagagcugg

SEQ ID NO: 1078125 - RNA, 20 nt, Human
caagugauucuccugccuca

SEQ ID NO: 1078126 - RNA, 22 nt, Human
caagugauucuccugccucagc

SEQ ID NO: 1078127 - RNA, 23 nt, Human
caccacguccggcuaauuuuugu

SEQ ID NO: 1078128 - RNA, 22 nt, Human
cacugcaaccuucgcuuccggg

SEQ ID NO: 1078129 - RNA, 20 nt, Human
cacugcccuccaggccagcc

SEQ ID NO: 1078130 - RNA, 20 nt, Human
cagccuccugaguagcuggg

SEQ ID NO: 1078131 - RNA, 26 nt, Human
cagccuuuucuuccucacaggggccc

SEQ ID NO: 1078132 - RNA, 22 nt, Human
cauacuacagaaacccccuaca

SEQ ID NO: 1078133 - RNA, 25 nt, Human
caucccccuuuguaaauccuggcac

SEQ ID NO: 1078134 - RNA, 18 nt, Human
cauguuggucaggcuggu

SEQ ID NO: 1078135 - RNA, 20 nt, Human
cauguuggucaggcuggucu

SEQ ID NO: 1078136 - RNA, 20 nt, Human
cauguuggucaggcuggucu

SEQ ID NO: 1078137 - RNA, 24 nt, Human
cauguuggucaggcuggucuugaa

SEQ ID NO: 1078138 - RNA, 20 nt, Human
ccaaagugcugggauuacag

SEQ ID NO: 1078139 - RNA, 22 nt, Human
ccaaagugcugggauuacaggc

SEQ ID NO: 1078140 - RNA, 22 nt, Human
ccaaagugcugggauuacaggc

SEQ ID NO: 1078141 - RNA, 24 nt, Human
ccaaagugcugggauuacaggcgu

SEQ ID NO: 1078142 - RNA, 22 nt, Human
ccagguguggcuguuacaugac

SEQ ID NO: 1078143 - RNA, 22 nt, Human
ccccagacagauuccagaagga

SEQ ID NO: 1078144 - RNA, 25 nt, Human
ccccccuuccuucuguaagcauccc

SEQ ID NO: 1078145 - RNA, 20 nt, Human
cccccuacaaagaagaaagg

SEQ ID NO: 1078146 - RNA, 19 nt, Human
ccccuagugguccccccuu

SEQ ID NO: 1078147 - RNA, 18 nt, Human
ccccucccucuuugggcc

SEQ ID NO: 1078148 - RNA, 18 nt, Human
ccccucccucuuugggcc

SEQ ID NO: 1078149 - RNA, 18 nt, Human
ccccuuucucuuccuucc

SEQ ID NO: 1078150 - RNA, 23 nt, Human
ccccuuucucuuccuuccagccc

SEQ ID NO: 1078151 - RNA, 21 nt, Human
ccgcacccggucgacagcagu

SEQ ID NO: 1078152 - RNA, 26 nt, Human
ccgcccgccucagccuuccaaagugc

SEQ ID NO: 1078153 - RNA, 19 nt, Human
ccggguucaagugauucuc

SEQ ID NO: 1078154 - RNA, 22 nt, Human
ccggguucaagugauucuccug

SEQ ID NO: 1078155 - RNA, 24 nt, Human
ccggucgacagcaccuuuugacag

SEQ ID NO: 1078156 - RNA, 22 nt, Human
ccugaguagcugggauuacagg

SEQ ID NO: 1078157 - RNA, 23 nt, Human
ccugaguagcugggauuacaggu

SEQ ID NO: 1078158 - RNA, 24 nt, Human
ccugaguagcugggauuacaggug

SEQ ID NO: 1078159 - RNA, 23 nt, Human
ccugccucagccuccugaguagc

SEQ ID NO: 1078160 - RNA, 20 nt, Human
cgacagcaccuuuugacagu

SEQ ID NO: 1078161 - RNA, 26 nt, Human
cgacagcaccuuuugacagugucccc

SEQ ID NO: 1078162 - RNA, 24 nt, Human
cgccucagccuuccaaagugcugg

SEQ ID NO: 1078163 - RNA, 18 nt, Human
cgccuuccuggaauuucc

SEQ ID NO: 1078164 - RNA, 21 nt, Human
cgggaauggauccccucccuc

SEQ ID NO: 1078165 - RNA, 22 nt, Human
cuagugguccccccuuccuucu

SEQ ID NO: 1078166 - RNA, 23 nt, Human
cucacugcaaccuucgcuuccgg

SEQ ID NO: 1078167 - RNA, 24 nt, Human
cucagccuccugaguagcugggau

SEQ ID NO: 1078168 - RNA, 20 nt, Human
cuccaggccagccuccucug

SEQ ID NO: 1078169 - RNA, 26 nt, Human
cucuugaccucaggugauccgcccgc

SEQ ID NO: 1078170 - RNA, 21 nt, Human
cugaguagcugggauuacagg

SEQ ID NO: 1078171 - RNA, 23 nt, Human
cugaguagcugggauuacaggug

SEQ ID NO: 1078172 - RNA, 24 nt, Human
cugcccuccccuaguggucccccc

SEQ ID NO: 1078173 - RNA, 23 nt, Human
cugccucagccuccugaguagcu

SEQ ID NO: 1078174 - RNA, 20 nt, Human
cuugcucugucgcuaggcug

SEQ ID NO: 1078175 - RNA, 21 nt, Human
cuugcugggagcagaguuggg

SEQ ID NO: 1078176 - RNA, 24 nt, Human
gaccucaggugauccgcccgccuc

SEQ ID NO: 1078177 - RNA, 19 nt, Human
gaccuuggcucacugcaac

SEQ ID NO: 1078178 - RNA, 19 nt, Human
gacgggguuuugucauguu

SEQ ID NO: 1078179 - RNA, 23 nt, Human
gagacgggguuuugucauguugg

SEQ ID NO: 1078180 - RNA, 24 nt, Human
gagacgggguuuugucauguuggu

SEQ ID NO: 1078181 - RNA, 21 nt, Human
gagauggagucuugcucuguc

SEQ ID NO: 1078182 - RNA, 19 nt, Human
gagcuccccuuucucuucc

SEQ ID NO: 1078183 - RNA, 19 nt, Human
gaggaagccaucuguuucc

SEQ ID NO: 1078184 - RNA, 19 nt, Human
gaggacagggaccucacug

SEQ ID NO: 1078185 - RNA, 18 nt, Human
gauuacaggcgugagcca

SEQ ID NO: 1078186 - RNA, 22 nt, Human
gauuacaggcgugagccaccgc

SEQ ID NO: 1078187 - RNA, 23 nt, Human
gauuacaggcgugagccaccgca

SEQ ID NO: 1078188 - RNA, 18 nt, Human
gccggaauacaaacucug

SEQ ID NO: 1078189 - RNA, 20 nt, Human
gccuggaccuggccgccgcu

SEQ ID NO: 1078190 - RNA, 21 nt, Human
gcuuccggguucaagugauuc

SEQ ID NO: 1078191 - RNA, 24 nt, Human
gcuuccggguucaagugauucucc

SEQ ID NO: 1078192 - RNA, 19 nt, Human
ggaaagagucccccuaaug

SEQ ID NO: 1078193 - RNA, 19 nt, Human
ggaaggcucuggcucagga

SEQ ID NO: 1078194 - RNA, 21 nt, Human
ggaagggccuucaguggggua

SEQ ID NO: 1078195 - RNA, 19 nt, Human
ggagagccacagcccggag

SEQ ID NO: 1078196 - RNA, 19 nt, Human
ggccuuggagagccacagc

SEQ ID NO: 1078197 - RNA, 19 nt, Human
ggccuuggagagccacagc

SEQ ID NO: 1078198 - RNA, 18 nt, Human
gggaaaacccgaaauaaa

SEQ ID NO: 1078199 - RNA, 20 nt, Human
gggaggucaaaggcaggaga

SEQ ID NO: 1078200 - RNA, 25 nt, Human
gggccuggaccuggccgccgcugag

SEQ ID NO: 1078201 - RNA, 21 nt, Human
gggccuuggagagccacagcc

SEQ ID NO: 1078202 - RNA, 23 nt, Human
gggguuuugucauguuggucagg

SEQ ID NO: 1078203 - RNA, 18 nt, Human
gggugcagcagcacgacc

SEQ ID NO: 1078204 - RNA, 22 nt, Human
ggguucaagugauucuccugcc

SEQ ID NO: 1078205 - RNA, 23 nt, Human
ggguucaagugauucuccugccu

SEQ ID NO: 1078206 - RNA, 19 nt, Human
ggguucuguuaaaaugcag

SEQ ID NO: 1078207 - RNA, 22 nt, Human
ggguuuugucauguuggucagg

SEQ ID NO: 1078208 - RNA, 19 nt, Human
ggucuugaacucuugaccu

SEQ ID NO: 1078209 - RNA, 23 nt, Human
guagagacgggguuuugucaugu

SEQ ID NO: 1078210 - RNA, 18 nt, Human
guagcugggauuacaggu

SEQ ID NO: 1078211 - RNA, 21 nt, Human
guccccccuuccuucuguaag

SEQ ID NO: 1078212 - RNA, 19 nt, Human
guccggcucucguccuccc

SEQ ID NO: 1078213 - RNA, 24 nt, Human
gucuugcucugucgcuaggcuggg

SEQ ID NO: 1078214 - RNA, 24 nt, Human
gugauccgcccgccucagccuucc

SEQ ID NO: 1078215 - RNA, 24 nt, Human
gugauucuccugccucagccuccu

SEQ ID NO: 1078216 - RNA, 23 nt, Human
uaaaucgccuuccuggaauuucc

SEQ ID NO: 1078217 - RNA, 24 nt, Human
uaauuuuuguguuuuuaguagaga

SEQ ID NO: 1078218 - RNA, 24 nt, Human
uacaaacucugugaggacagggac

SEQ ID NO: 1078219 - RNA, 19 nt, Human
uacaaagaagaaagguguu

SEQ ID NO: 1078220 - RNA, 23 nt, Human
uacaggcgugagccaccgcaccc

SEQ ID NO: 1078221 - RNA, 20 nt, Human
uagaagaaugucagggaaaa

SEQ ID NO: 1078222 - RNA, 24 nt, Human
uaguagagacgggguuuugucaug

SEQ ID NO: 1078223 - RNA, 19 nt, Human
ucaagugauucuccugccu

SEQ ID NO: 1078224 - RNA, 23 nt, Human
ucacugcaaccuucgcuuccggg

SEQ ID NO: 1078225 - RNA, 23 nt, Human
ucagcagauccaccuagaaugga

SEQ ID NO: 1078226 - RNA, 20 nt, Human
ucagccuccugaguagcugg

SEQ ID NO: 1078227 - RNA, 23 nt, Human
uccaaagugcugggauuacaggc

SEQ ID NO: 1078228 - RNA, 24 nt, Human
uccaaagugcugggauuacaggcg

SEQ ID NO: 1078229 - RNA, 18 nt, Human
uccagaaggaagggagaa

SEQ ID NO: 1078230 - RNA, 27 nt, Human
uccaggccagccuccucuggacuuucu

SEQ ID NO: 1078231 - RNA, 21 nt, Human
ucccagauugaugcuccaucc

SEQ ID NO: 1078232 - RNA, 24 nt, Human
ucccccuuuguaaaucgccuuccu

SEQ ID NO: 1078233 - RNA, 21 nt, Human
ucccucuuugggccugccucu

SEQ ID NO: 1078234 - RNA, 21 nt, Human
uccgcccgccucagccuucca

SEQ ID NO: 1078235 - RNA, 23 nt, Human
uccggguucaagugauucuccuc

SEQ ID NO: 1078236 - RNA, 24 nt, Human
uccugaguagcugggauuacaggu

SEQ ID NO: 1078237 - RNA, 24 nt, Human
ucuccugccucagccuccugagua

SEQ ID NO: 1078238 - RNA, 21 nt, Human
ucugucgcuaggcuggggugc

SEQ ID NO: 1078239 - RNA, 20 nt, Human
ucuuccuuccagcccugaug

SEQ ID NO: 1078240 - RNA, 19 nt, Human
ucuugcucugucgcuaggc

SEQ ID NO: 1078241 - RNA, 21 nt, Human
ucuugcucugucgcuaggcug

SEQ ID NO: 1078242 - RNA, 22 nt, Human
ucuugcucugucgcuaggcugg

SEQ ID NO: 1078243 - RNA, 22 nt, Human
ucuugcucugucgcuaggcugg

SEQ ID NO: 1078244 - RNA, 23 nt, Human
ucuugcucugucgcuaggcuggg

SEQ ID NO: 1078245 - RNA, 19 nt, Human
ugaaguguccuggcccagc

SEQ ID NO: 1078246 - RNA, 24 nt, Human
ugaaguguccuggcccagcagccu

SEQ ID NO: 1078247 - RNA, 18 nt, Human
ugaccucaggugauccgc

SEQ ID NO: 1078248 - RNA, 20 nt, Human
ugaccucaggugauccgccc

SEQ ID NO: 1078249 - RNA, 21 nt, Human
ugaccucaggugauccgcccg

SEQ ID NO: 1078250 - RNA, 24 nt, Human
ugaccucaggugauccgcccgccu

SEQ ID NO: 1078251 - RNA, 20 nt, Human
ugauucuccugccucagccu

SEQ ID NO: 1078252 - RNA, 22 nt, Human
ugcagccagauguggaggugcc

SEQ ID NO: 1078253 - RNA, 23 nt, Human
ugccagaaggggugaggggucuc

SEQ ID NO: 1078254 - RNA, 21 nt, Human
ugcccuccaggccagccuccu

SEQ ID NO: 1078255 - RNA, 24 nt, Human
ugccucagccuccugaguagcugg

SEQ ID NO: 1078256 - RNA, 22 nt, Human
ugcuggagagcuccccuuucuc

SEQ ID NO: 1078257 - RNA, 24 nt, Human
ugcugggauuacaggcgugagcca

SEQ ID NO: 1078258 - RNA, 18 nt, Human
uggagucuugcucugucg

SEQ ID NO: 1078259 - RNA, 24 nt, Human
uggauccccucccucuuugggccu

SEQ ID NO: 1078260 - RNA, 18 nt, Human
ugggauuacaggcgugag

SEQ ID NO: 1078261 - RNA, 19 nt, Human
ugggauuacaggcgugagc

SEQ ID NO: 1078262 - RNA, 21 nt, Human
ugggauuacaggcgugagcca

SEQ ID NO: 1078263 - RNA, 22 nt, Human
ugggauuacaggcgugagccac

SEQ ID NO: 1078264 - RNA, 23 nt, Human
ugggauuacaggcgugagccacc

SEQ ID NO: 1078265 - RNA, 24 nt, Human
ugggauuacaggcgugagccaccg

SEQ ID NO: 1078266 - RNA, 21 nt, Human
ugggauuacaggugcccacca

SEQ ID NO: 1078267 - RNA, 27 nt, Human
uggggaaaagcagugggggaggcgcuu

SEQ ID NO: 1078268 - RNA, 24 nt, Human
uggucaggcuggucuugaacucuu

SEQ ID NO: 1078269 - RNA, 20 nt, Human
uguaagcaucccccuuugua

SEQ ID NO: 1078270 - RNA, 24 nt, Human
ugucauguuggucaggcuggucuu

SEQ ID NO: 1078271 - RNA, 21 nt, Human
ugugaggacagggaccucacu

SEQ ID NO: 1078272 - RNA, 24 nt, Human
ugugcagggaccaagacuccuacc

SEQ ID NO: 1078273 - RNA, 18 nt, Human
uguggaggugcccugugg

SEQ ID NO: 1078274 - RNA, 21 nt, Human
uguguuuuuaguagagacggg

SEQ ID NO: 1078275 - RNA, 18 nt, Human
uuaguagagacgggguuu

SEQ ID NO: 1078276 - RNA, 18 nt, Human
uuaguagagacgggguuu

SEQ ID NO: 1078277 - RNA, 24 nt, Human
uuaguagagacgggguuuugucau

SEQ ID NO: 1078278 - RNA, 21 nt, Human
uucaagugauucuccugccuc

SEQ ID NO: 1078279 - RNA, 23 nt, Human
uucaagugauucuccugccucag

SEQ ID NO: 1078280 - RNA, 24 nt, Human
uucaagugauucuccugccucagc

SEQ ID NO: 1078281 - RNA, 24 nt, Human
uuuguguuuuuaguagagacgggg

SEQ ID NO: 1078282 - RNA, 21 nt, Human
uuuuuaguagagacgggguuu

SEQ ID NO: 1078283 - RNA, 24 nt, Human
uuuuuaguagagacgggguuuugu

SEQ ID NO: 1078284 - RNA, 20 nt, Human
uuuuuguguuuuuaguagag

SEQ ID NO: 1078285 - RNA, 18 nt, Human
aaccugcaccccaccaca

SEQ ID NO: 1078286 - RNA, 23 nt, Human
aagagacagagggaccaacggag

SEQ ID NO: 1078287 - RNA, 22 nt, Human
aagggucagccuugcugggagg

SEQ ID NO: 1078288 - RNA, 22 nt, Human
aaucuguaacucagagaugcug

SEQ ID NO: 1078289 - RNA, 19 nt, Human
aaugcuuggcagggcuggg

SEQ ID NO: 1078290 - RNA, 19 nt, Human
acacccugcacaguauggg

SEQ ID NO: 1078291 - RNA, 19 nt, Human
acacuccccaccagcaccc

SEQ ID NO: 1078292 - RNA, 24 nt, Human
acagucccacccaccucaaaggcc

SEQ ID NO: 1078293 - RNA, 20 nt, Human
accaaggugccaaugcccau

SEQ ID NO: 1078294 - RNA, 23 nt, Human
acccacucagcagcugccucccc

SEQ ID NO: 1078295 - RNA, 21 nt, Human
accugcaccccaccacacccu

SEQ ID NO: 1078296 - RNA, 21 nt, Human
agagaggaaauggugccaggg

SEQ ID NO: 1078297 - RNA, 23 nt, Human
agagcugcccaacugggagacag

SEQ ID NO: 1078298 - RNA, 24 nt, Human
agagcugcccaacugggagacagu

SEQ ID NO: 1078299 - RNA, 22 nt, Human
agaugucggaagcaguucaacc

SEQ ID NO: 1078300 - RNA, 23 nt, Human
agcaaacacuccccaccagcacc

SEQ ID NO: 1078301 - RNA, 19 nt, Human
agcaggcaaugggcgcaca

SEQ ID NO: 1078302 - RNA, 20 nt, Human
agcccagggcuucauaaaug

SEQ ID NO: 1078303 - RNA, 21 nt, Human
aggcacacaggcauaccccca

SEQ ID NO: 1078304 - RNA, 23 nt, Human
aggcagagucugcaagcuuuucu

SEQ ID NO: 1078305 - RNA, 18 nt, Human
agggaccaggacaaaagg

SEQ ID NO: 1078306 - RNA, 28 nt, Human
agggcugggauuauuccaaacuuugagu

SEQ ID NO: 1078307 - RNA, 23 nt, Human
aguucaaccaugcagggcaacac

SEQ ID NO: 1078308 - RNA, 23 nt, Human
auacccccaggaccuccugcacu

SEQ ID NO: 1078309 - RNA, 26 nt, Human
auugcccagagagaacggggaagcca

SEQ ID NO: 1078310 - RNA, 24 nt, Human
caaagcccuggaauuggggccgca

SEQ ID NO: 1078311 - RNA, 22 nt, Human
caagaccuggugggccaaucaa

SEQ ID NO: 1078312 - RNA, 22 nt, Human
caaggcaacuucuggagcagca

SEQ ID NO: 1078313 - RNA, 23 nt, Human
cacacaggcauacccccaggacc

SEQ ID NO: 1078314 - RNA, 23 nt, Human
caccagcacccuuaaugcuuggc

SEQ ID NO: 1078315 - RNA, 21 nt, Human
caccccaccacaaccugcacc

SEQ ID NO: 1078316 - RNA, 22 nt, Human
caccccaccacacccugcacag

SEQ ID NO: 1078317 - RNA, 23 nt, Human
caccccaccacacccugcacagu

SEQ ID NO: 1078318 - RNA, 23 nt, Human
caccuauagauggaaaacaaucu

SEQ ID NO: 1078319 - RNA, 20 nt, Human
cagagggaccaacggagaca

SEQ ID NO: 1078320 - RNA, 23 nt, Human
cagcaaacacuccccaccagcac

SEQ ID NO: 1078321 - RNA, 21 nt, Human
caggcaaugggcgcacaaacc

SEQ ID NO: 1078322 - RNA, 23 nt, Human
cagggaagaggacauucucucca

SEQ ID NO: 1078323 - RNA, 24 nt, Human
cauaaaaaggggaaggcuaauuuc

SEQ ID NO: 1078324 - RNA, 18 nt, Human
caucccagggugaugccu

SEQ ID NO: 1078325 - RNA, 23 nt, Human
ccacaaggcaacuucuggagcag

SEQ ID NO: 1078326 - RNA, 20 nt, Human
ccaccacaaccugcacccca

SEQ ID NO: 1078327 - RNA, 22 nt, Human
ccaccacaaccugcaccccacc

SEQ ID NO: 1078328 - RNA, 19 nt, Human
ccaccagcacccuuaaugc

SEQ ID NO: 1078329 - RNA, 18 nt, Human
ccaccuauagauggaaaa

SEQ ID NO: 1078330 - RNA, 19 nt, Human
ccagacaauauucuccucc

SEQ ID NO: 1078331 - RNA, 25 nt, Human
ccauggguuguugccuuccuuugcu

SEQ ID NO: 1078332 - RNA, 21 nt, Human
cccaccccaccacaaccugca

SEQ ID NO: 1078333 - RNA, 26 nt, Human
cccaccccaccacaaccugcacccca

SEQ ID NO: 1078334 - RNA, 20 nt, Human
cccccaggaccuccugcacu

SEQ ID NO: 1078335 - RNA, 23 nt, Human
ccugcaccccaccacacccugca

SEQ ID NO: 1078336 - RNA, 21 nt, Human
ccugcaucuccuccaggucug

SEQ ID NO: 1078337 - RNA, 25 nt, Human
ccuggccacuaagggauuggggccc

SEQ ID NO: 1078338 - RNA, 19 nt, Human
cucccugccauggcucccc

SEQ ID NO: 1078339 - RNA, 23 nt, Human
cugaaccuguagaucccgugguc

SEQ ID NO: 1078340 - RNA, 24 nt, Human
cugcacaguaugggcagggcagcc

SEQ ID NO: 1078341 - RNA, 20 nt, Human
cugcagaaaauccugccaaa

SEQ ID NO: 1078342 - RNA, 19 nt, Human
cugggccucuaaccugucu

SEQ ID NO: 1078343 - RNA, 20 nt, Human
gagaaaugggacaccuagau

SEQ ID NO: 1078344 - RNA, 18 nt, Human
gagcagcaagaccuggug

SEQ ID NO: 1078345 - RNA, 19 nt, Human
gagcuggggccugcaucuc

SEQ ID NO: 1078346 - RNA, 19 nt, Human
gcaacuucuggagcagcaa

SEQ ID NO: 1078347 - RNA, 20 nt, Human
gcccaacugggagacagucc

SEQ ID NO: 1078348 - RNA, 19 nt, Human
ggacaaaguggggcagggg

SEQ ID NO: 1078349 - RNA, 24 nt, Human
ggacaccuagauggagcagaaaca

SEQ ID NO: 1078350 - RNA, 21 nt, Human
ggacccagagaggaaauggug

SEQ ID NO: 1078351 - RNA, 19 nt, Human
ggaggaguuuggggagagg

SEQ ID NO: 1078352 - RNA, 21 nt, Human
ggccacuuucuaacggacccu

SEQ ID NO: 1078353 - RNA, 22 nt, Human
ggcccugauacccaaaaaagca

SEQ ID NO: 1078354 - RNA, 21 nt, Human
ggcuaacugcagaaaauccug

SEQ ID NO: 1078355 - RNA, 19 nt, Human
ggcuaggaaauacccuucg

SEQ ID NO: 1078356 - RNA, 19 nt, Human
ggcugggauuauuccaaac

SEQ ID NO: 1078357 - RNA, 22 nt, Human
gggcagggcagccagcagggaa

SEQ ID NO: 1078358 - RNA, 20 nt, Human
gggcugggccucuaaccugu

SEQ ID NO: 1078359 - RNA, 20 nt, Human
guauaggacccagagaggaa

SEQ ID NO: 1078360 - RNA, 20 nt, Human
gugcacaaaugugaaaagga

SEQ ID NO: 1078361 - RNA, 18 nt, Human
guuuggggagaggggcag

SEQ ID NO: 1078362 - RNA, 18 nt, Human
uaccaugggaugggccac

SEQ ID NO: 1078363 - RNA, 25 nt, Human
uacccuucguucugcucuggacggg

SEQ ID NO: 1078364 - RNA, 20 nt, Human
uagcagagcuggggccugca

SEQ ID NO: 1078365 - RNA, 22 nt, Human
uagcagagcuggggccugcauc

SEQ ID NO: 1078366 - RNA, 21 nt, Human
uauggaggcaucaacaagcug

SEQ ID NO: 1078367 - RNA, 19 nt, Human
uaugugcacaaaugugaaa

SEQ ID NO: 1078368 - RNA, 28 nt, Human
ucccuggccacuaagggauuggggcccu

SEQ ID NO: 1078369 - RNA, 24 nt, Human
ucuccacaggugauaccgucacuu

SEQ ID NO: 1078370 - RNA, 21 nt, Human
ucugcaagcuuuucuccagac

SEQ ID NO: 1078371 - RNA, 18 nt, Human
ucugggcuaucccuggug

SEQ ID NO: 1078372 - RNA, 20 nt, Human
ucuguaacucagagaugcug

SEQ ID NO: 1078373 - RNA, 21 nt, Human
ugaauaagcauaggccauugu

SEQ ID NO: 1078374 - RNA, 20 nt, Human
ugacucacuggcauugaaga

SEQ ID NO: 1078375 - RNA, 22 nt, Human
ugagaucugaaccuguagaucc

SEQ ID NO: 1078376 - RNA, 21 nt, Human
ugaggagugagagucagagcc

SEQ ID NO: 1078377 - RNA, 18 nt, Human
ugagucccuggccacuaa

SEQ ID NO: 1078378 - RNA, 23 nt, Human
ugccaggcacacaggcauacccc

SEQ ID NO: 1078379 - RNA, 20 nt, Human
ugccuuaugaggggcaacug

SEQ ID NO: 1078380 - RNA, 23 nt, Human
uggaaugcaagugugaagguggg

SEQ ID NO: 1078381 - RNA, 18 nt, Human
uggacggggcuaacugca

SEQ ID NO: 1078382 - RNA, 21 nt, Human
uggagagaggcccaggacacc

SEQ ID NO: 1078383 - RNA, 22 nt, Human
uggagcagcaagaccugguggg

SEQ ID NO: 1078384 - RNA, 22 nt, Human
uggagugaguauuucaccuguc

SEQ ID NO: 1078385 - RNA, 22 nt, Human
uggcugagaauuauggaggcau

SEQ ID NO: 1078386 - RNA, 21 nt, Human
ugggaacguauaggacccaga

SEQ ID NO: 1078387 - RNA, 22 nt, Human
ugggagacuaagacaacaugga

SEQ ID NO: 1078388 - RNA, 23 nt, Human
ugggccucuaaccugucugcauc

SEQ ID NO: 1078389 - RNA, 19 nt, Human
uggucaggccauggguugu

SEQ ID NO: 1078390 - RNA, 18 nt, Human
ugucacaggacaaagugg

SEQ ID NO: 1078391 - RNA, 19 nt, Human
uuaauacuguuuaaggagu

SEQ ID NO: 1078392 - RNA, 21 nt, Human
uuaaugcuuggcagggcuggg

SEQ ID NO: 1078393 - RNA, 21 nt, Human
uucauggggacucccuaggua

SEQ ID NO: 1078394 - RNA, 22 nt, Human
uugcucuggcugagaauuaugg

SEQ ID NO: 1078395 - RNA, 21 nt, Human
aaaaagaaagagaucaaccaa

SEQ ID NO: 1078396 - RNA, 20 nt, Human
aagaaagagaucaaccaaga

SEQ ID NO: 1078397 - RNA, 20 nt, Human
acaaaaagaaaccaucugca

SEQ ID NO: 1078398 - RNA, 23 nt, Human
agcugagccucuggugcugauga

SEQ ID NO: 1078399 - RNA, 21 nt, Human
auuuucucuaaaaauugaaag

SEQ ID NO: 1078400 - RNA, 24 nt, Human
caaccccagcucuggcucagguuc

SEQ ID NO: 1078401 - RNA, 18 nt, Human
cacccccaugcccagccu

SEQ ID NO: 1078402 - RNA, 24 nt, Human
cagcuucaaccccagcucuggcuc

SEQ ID NO: 1078403 - RNA, 21 nt, Human
ccagcuggccaagaggacaau

SEQ ID NO: 1078404 - RNA, 23 nt, Human
ccagggugguggcaaauauuuuu

SEQ ID NO: 1078405 - RNA, 21 nt, Human
cccccagaggguugcugacuu

SEQ ID NO: 1078406 - RNA, 25 nt, Human
cccccaugcccagccugggaucugc

SEQ ID NO: 1078407 - RNA, 24 nt, Human
ccuuuaggguuggccuucuccuug

SEQ ID NO: 1078408 - RNA, 22 nt, Human
cggaacucuuuacaaaaagaaa

SEQ ID NO: 1078409 - RNA, 19 nt, Human
cuccagcuucaaccccagc

SEQ ID NO: 1078410 - RNA, 21 nt, Human
cucuaaaaauugaaaggcaaa

SEQ ID NO: 1078411 - RNA, 24 nt, Human
cugagcagagcccagaauccuauu

SEQ ID NO: 1078412 - RNA, 22 nt, Human
cugcccaguccugcugccccca

SEQ ID NO: 1078413 - RNA, 20 nt, Human
cugcuucugcugcuucucug

SEQ ID NO: 1078414 - RNA, 19 nt, Human
cuggcuccagcucuuggcu

SEQ ID NO: 1078415 - RNA, 25 nt, Human
cuguagcugcuguugcuuuugcugc

SEQ ID NO: 1078416 - RNA, 22 nt, Human
cuguugcuuuugcugcugcucc

SEQ ID NO: 1078417 - RNA, 22 nt, Human
cuuagcuugagcuuguccagga

SEQ ID NO: 1078418 - RNA, 19 nt, Human
cuucugcugcuucucugcu

SEQ ID NO: 1078419 - RNA, 19 nt, Human
gaagaacacucuauaggug

SEQ ID NO: 1078420 - RNA, 20 nt, Human
gaggaaggaaucuaaauagg

SEQ ID NO: 1078421 - RNA, 21 nt, Human
gaggguugcugacuuuccagg

SEQ ID NO: 1078422 - RNA, 19 nt, Human
ggaagguccaggugagagg

SEQ ID NO: 1078423 - RNA, 21 nt, Human
ggcagugauggugcucuucuu

SEQ ID NO: 1078424 - RNA, 23 nt, Human
gggaagguccaggugagaggaag

SEQ ID NO: 1078425 - RNA, 18 nt, Human
gggaucugcccaguccug

SEQ ID NO: 1078426 - RNA, 25 nt, Human
gguuggccuucuccuuggucccugu

SEQ ID NO: 1078427 - RNA, 19 nt, Human
gugcucuucuugccucagc

SEQ ID NO: 1078428 - RNA, 24 nt, Human
guguuggucuagacuccagggugg

SEQ ID NO: 1078429 - RNA, 24 nt, Human
uaaauaggccaggguuagccagga

SEQ ID NO: 1078430 - RNA, 20 nt, Human
ucagguuccuggucuggcuc

SEQ ID NO: 1078431 - RNA, 24 nt, Human
ucaugccauaagccagucucacaa

SEQ ID NO: 1078432 - RNA, 20 nt, Human
ucccagaagggucaagagga

SEQ ID NO: 1078433 - RNA, 18 nt, Human
uccuuggucccuguucau

SEQ ID NO: 1078434 - RNA, 22 nt, Human
ucucugcuccucuccguccugg

SEQ ID NO: 1078435 - RNA, 23 nt, Human
ucugccacccccaugcccagccu

SEQ ID NO: 1078436 - RNA, 21 nt, Human
ucuggcucagguuccuggucu

SEQ ID NO: 1078437 - RNA, 19 nt, Human
ugccauaagccagucucac

SEQ ID NO: 1078438 - RNA, 25 nt, Human
ugccucagcugagccucuggugcug

SEQ ID NO: 1078439 - RNA, 23 nt, Human
ugcuccagcuucaaccccagcuc

SEQ ID NO: 1078440 - RNA, 21 nt, Human
ugcuguugcuuuugcugcugc

SEQ ID NO: 1078441 - RNA, 27 nt, Human
ugcuuuugcugcugcuccagcuucaac

SEQ ID NO: 1078442 - RNA, 27 nt, Human
uggcaaauauuuuuaaaaagaaagaga

SEQ ID NO: 1078443 - RNA, 18 nt, Human
uggcauggauugggccug

SEQ ID NO: 1078444 - RNA, 19 nt, Human
uggcauggauugggccuga

SEQ ID NO: 1078445 - RNA, 22 nt, Human
uggcucagguuccuggucuggc

SEQ ID NO: 1078446 - RNA, 19 nt, Human
ugggagauguaguccuuag

SEQ ID NO: 1078447 - RNA, 19 nt, Human
ugggugcugagcagcagcc

SEQ ID NO: 1078448 - RNA, 25 nt, Human
uggucuggcuccagcucuuggcugc

SEQ ID NO: 1078449 - RNA, 23 nt, Human
uguauagccccuagaaauaggca

SEQ ID NO: 1078450 - RNA, 21 nt, Human
ugucaggugugcaaacauucc

SEQ ID NO: 1078451 - RNA, 21 nt, Human
ugugcaaacauucccagaagg

SEQ ID NO: 1078452 - RNA, 18 nt, Human
uguguuggucuagacucc

SEQ ID NO: 1078453 - RNA, 24 nt, Human
uuccaacuucuguagcugcuguug

SEQ ID NO: 1078454 - RNA, 25 nt, Human
uuccaggucuuagagaagaacacuc

SEQ ID NO: 1078455 - RNA, 23 nt, Human
uucccagaagggucaagaggauc

SEQ ID NO: 1078456 - RNA, 20 nt, Human
uuccuggucuggcuccagcu

SEQ ID NO: 1078457 - RNA, 23 nt, Human
uuggcugcuucugcugcuucucu

SEQ ID NO: 1078458 - RNA, 21 nt, Human
aaaaaagucggagguagauaa

SEQ ID NO: 1078459 - RNA, 18 nt, Human
aaaaauaaaacgaguggg

SEQ ID NO: 1078460 - RNA, 22 nt, Human
aaaagacaggacucacauuccu

SEQ ID NO: 1078461 - RNA, 24 nt, Human
aaacuccugggcucaagugauccu

SEQ ID NO: 1078462 - RNA, 23 nt, Human
aaagugcugggauuacaggcaug

SEQ ID NO: 1078463 - RNA, 24 nt, Human
aaagugcugggauuacaggcaugg

SEQ ID NO: 1078464 - RNA, 25 nt, Human
aaagugcugggauuacaggcauggg

SEQ ID NO: 1078465 - RNA, 24 nt, Human
aaagugcugggauuauaggcauga

SEQ ID NO: 1078466 - RNA, 18 nt, Human
aaaugaaguggcuuaaaa

SEQ ID NO: 1078467 - RNA, 21 nt, Human
aacacagcagggucaaaaaca

SEQ ID NO: 1078468 - RNA, 23 nt, Human
aacuuuugauacuggagcuugau

SEQ ID NO: 1078469 - RNA, 24 nt, Human
aagaagauugaacacagcaggguc

SEQ ID NO: 1078470 - RNA, 23 nt, Human
aagcaaggagcaggcaaagagcu

SEQ ID NO: 1078471 - RNA, 23 nt, Human
aaggcaggaccucagccucccaa

SEQ ID NO: 1078472 - RNA, 24 nt, Human
aagggacaacuaugagcuggucca

SEQ ID NO: 1078473 - RNA, 22 nt, Human
aaguaauucgccugccucagcc

SEQ ID NO: 1078474 - RNA, 22 nt, Human
aaguagcugggauuacaggcau

SEQ ID NO: 1078475 - RNA, 24 nt, Human
aaguagcugggauuacaggcaugc

SEQ ID NO: 1078476 - RNA, 19 nt, Human
aagugcugggauuacaggc

SEQ ID NO: 1078477 - RNA, 21 nt, Human
aagugcugggauuacaggcau

SEQ ID NO: 1078478 - RNA, 19 nt, Human
aagugcugggauuauaggc

SEQ ID NO: 1078479 - RNA, 21 nt, Human
aagugcugggauuauaggcau

SEQ ID NO: 1078480 - RNA, 22 nt, Human
aaucauggguuccagggacucg

SEQ ID NO: 1078481 - RNA, 18 nt, Human
acacaccguugccugcug

SEQ ID NO: 1078482 - RNA, 20 nt, Human
acacacuuccagaaaacauc

SEQ ID NO: 1078483 - RNA, 25 nt, Human
acacugucacccaggcuggagugca

SEQ ID NO: 1078484 - RNA, 19 nt, Human
acagggucuuguuauguug

SEQ ID NO: 1078485 - RNA, 20 nt, Human
acaguucuuaugaggccacc

SEQ ID NO: 1078486 - RNA, 24 nt, Human
acauaguuucaccauguuggucag

SEQ ID NO: 1078487 - RNA, 24 nt, Human
accauguuggucaggcuagucucg

SEQ ID NO: 1078488 - RNA, 24 nt, Human
acccaaguagcugggauuacaggc

SEQ ID NO: 1078489 - RNA, 21 nt, Human
acccacccagauaauccagaa

SEQ ID NO: 1078490 - RNA, 19 nt, Human
acccaggcuggagugcagu

SEQ ID NO: 1078491 - RNA, 23 nt, Human
accccauguccaagggacaacua

SEQ ID NO: 1078492 - RNA, 18 nt, Human
acggaguuucaucauguu

SEQ ID NO: 1078493 - RNA, 19 nt, Human
acggaguuucaucauguug

SEQ ID NO: 1078494 - RNA, 24 nt, Human
acggaguuucaucauguugcucag

SEQ ID NO: 1078495 - RNA, 20 nt, Human
acugacaggcaucacuuuau

SEQ ID NO: 1078496 - RNA, 24 nt, Human
acugucacccaggcuggagugcag

SEQ ID NO: 1078497 - RNA, 23 nt, Human
agacaaaagacaggacucacauu

SEQ ID NO: 1078498 - RNA, 19 nt, Human
agacaggacucacauuccu

SEQ ID NO: 1078499 - RNA, 18 nt, Human
agacagggucuuguuaug

SEQ ID NO: 1078500 - RNA, 24 nt, Human
agagaaggcaggaccucagccucc

SEQ ID NO: 1078501 - RNA, 18 nt, Human
agagacugaaagaggguu

SEQ ID NO: 1078502 - RNA, 19 nt, Human
agauaaaaauauuaggcag

SEQ ID NO: 1078503 - RNA, 24 nt, Human
agauaauccagaaccaaucucccc

SEQ ID NO: 1078504 - RNA, 18 nt, Human
agcaacggccccagccuu

SEQ ID NO: 1078505 - RNA, 22 nt, Human
agcagcuaaggcagccucccaa

SEQ ID NO: 1078506 - RNA, 19 nt, Human
aggaaagagauguaaugga

SEQ ID NO: 1078507 - RNA, 19 nt, Human
aggcaaugacacuaaguca

SEQ ID NO: 1078508 - RNA, 20 nt, Human
aggcaggaaagagauguaau

SEQ ID NO: 1078509 - RNA, 20 nt, Human
aggcaugagccauugcaccc

SEQ ID NO: 1078510 - RNA, 25 nt, Human
aggcuggagugcaguagcgcgaucu

SEQ ID NO: 1078511 - RNA, 18 nt, Human
aguagcugagauuacagg

SEQ ID NO: 1078512 - RNA, 19 nt, Human
agucucgaacuccugaccu

SEQ ID NO: 1078513 - RNA, 22 nt, Human
agucuuuaagugccuguuuuuc

SEQ ID NO: 1078514 - RNA, 20 nt, Human
agugcaguagcgcgaucucg

SEQ ID NO: 1078515 - RNA, 24 nt, Human
agugcaguagcgcgaucucggcuc

SEQ ID NO: 1078516 - RNA, 18 nt, Human
agugcugggauuacaggc

SEQ ID NO: 1078517 - RNA, 21 nt, Human
aguuucaccauguuggucagg

SEQ ID NO: 1078518 - RNA, 24 nt, Human
augauucacccgccucagccuccc

SEQ ID NO: 1078519 - RNA, 25 nt, Human
augcaccaccacgcccugcuagagc

SEQ ID NO: 1078520 - RNA, 20 nt, Human
auggaggagguggguggcag

SEQ ID NO: 1078521 - RNA, 21 nt, Human
auucuccugccucagccuccc

SEQ ID NO: 1078522 - RNA, 22 nt, Human
caaaagacaggacucacauucc

SEQ ID NO: 1078523 - RNA, 24 nt, Human
caaagugcugggauuacaggcaug

SEQ ID NO: 1078524 - RNA, 24 nt, Human
caaagugcugggauuauaggcaug

SEQ ID NO: 1078525 - RNA, 24 nt, Human
caaccuccaucucccagguugaag

SEQ ID NO: 1078526 - RNA, 22 nt, Human
caagcaauucuccugccucagc

SEQ ID NO: 1078527 - RNA, 25 nt, Human
caagccagagagaggagagaugggc

SEQ ID NO: 1078528 - RNA, 19 nt, Human
caagugccuccuggacauu

SEQ ID NO: 1078529 - RNA, 24 nt, Human
cacacagagaggggccaagauaag

SEQ ID NO: 1078530 - RNA, 24 nt, Human
cacacugucacccaggcuggagug

SEQ ID NO: 1078531 - RNA, 25 nt, Human
cacagcagggucaaaaacauuagga

SEQ ID NO: 1078532 - RNA, 24 nt, Human
caccauguuggucaggcuagucuc

SEQ ID NO: 1078533 - RNA, 21 nt, Human
cacccaccaccacacccagcu

SEQ ID NO: 1078534 - RNA, 23 nt, Human
cacccgccucagccucccaaagu

SEQ ID NO: 1078535 - RNA, 21 nt, Human
caccgcaaccuccgccucccg

SEQ ID NO: 1078536 - RNA, 20 nt, Human
caccgugcccggcccagagu

SEQ ID NO: 1078537 - RNA, 24 nt, Human
caccucagccucccaagcagcugg

SEQ ID NO: 1078538 - RNA, 24 nt, Human
caccucagccugccaaagugcugg

SEQ ID NO: 1078539 - RNA, 19 nt, Human
cagaaccaaucuccccacc

SEQ ID NO: 1078540 - RNA, 24 nt, Human
cagacgagcucacaucugccuccc

SEQ ID NO: 1078541 - RNA, 18 nt, Human
cagcacagagacugaaag

SEQ ID NO: 1078542 - RNA, 22 nt, Human
cagcauaacaaagcacagcuga

SEQ ID NO: 1078543 - RNA, 23 nt, Human
cagccuacuacuacccucagcac

SEQ ID NO: 1078544 - RNA, 21 nt, Human
caggcacccaccaccacaccc

SEQ ID NO: 1078545 - RNA, 23 nt, Human
caggcacccaccaccacacccag

SEQ ID NO: 1078546 - RNA, 24 nt, Human
cagggucuuguuauguuguucagg

SEQ ID NO: 1078547 - RNA, 22 nt, Human
cauaacgcagacccuaaagucu

SEQ ID NO: 1078548 - RNA, 24 nt, Human
cauaggccaaagaacuggcaaagc

SEQ ID NO: 1078549 - RNA, 22 nt, Human
caucauguugcucaggcugguc

SEQ ID NO: 1078550 - RNA, 24 nt, Human
caucauguugcucaggcuggucuu

SEQ ID NO: 1078551 - RNA, 24 nt, Human
caugauucacccgccucagccucc

SEQ ID NO: 1078552 - RNA, 26 nt, Human
caugcaccaccacgcccugcuagagc

SEQ ID NO: 1078553 - RNA, 20 nt, Human
cauguugcucaggcuggucu

SEQ ID NO: 1078554 - RNA, 24 nt, Human
cauguugcucaggcuggucuugaa

SEQ ID NO: 1078555 - RNA, 23 nt, Human
ccaaagugcugggauuacaggca

SEQ ID NO: 1078556 - RNA, 24 nt, Human
ccaaagugcugggauuacaggcau

SEQ ID NO: 1078557 - RNA, 22 nt, Human
ccaaagugcugggauuauaggc

SEQ ID NO: 1078558 - RNA, 24 nt, Human
ccaaagugcugggauuauaggcau

SEQ ID NO: 1078559 - RNA, 23 nt, Human
ccaaguagcugggauuacaggca

SEQ ID NO: 1078560 - RNA, 24 nt, Human
ccaaguagcugggauuacaggcau

SEQ ID NO: 1078561 - RNA, 24 nt, Human
ccacccaaguagcugggauuacag

SEQ ID NO: 1078562 - RNA, 21 nt, Human
ccacccagauaauccagaacc

SEQ ID NO: 1078563 - RNA, 19 nt, Human
ccaggucagacugggccaa

SEQ ID NO: 1078564 - RNA, 18 nt, Human
ccauugcacccuggcuag

SEQ ID NO: 1078565 - RNA, 24 nt, Human
cccaaagugcugggauuacaggca

SEQ ID NO: 1078566 - RNA, 23 nt, Human
cccaaguagcugggauuacaggc

SEQ ID NO: 1078567 - RNA, 24 nt, Human
cccaaguagcugggauuacaggca

SEQ ID NO: 1078568 - RNA, 18 nt, Human
cccacacacacuuccaga

SEQ ID NO: 1078569 - RNA, 21 nt, Human
cccaccaccacacccagcuaa

SEQ ID NO: 1078570 - RNA, 20 nt, Human
cccagccuuauccacugacc

SEQ ID NO: 1078571 - RNA, 24 nt, Human
cccaugagcaacggccccagccuu

SEQ ID NO: 1078572 - RNA, 19 nt, Human
ccccagggcaugaacgaug

SEQ ID NO: 1078573 - RNA, 19 nt, Human
cccgaguagcugagauuac

SEQ ID NO: 1078574 - RNA, 24 nt, Human
cccgaguagcugagauuacaggca

SEQ ID NO: 1078575 - RNA, 23 nt, Human
cccggguucaagcaauucuccug

SEQ ID NO: 1078576 - RNA, 21 nt, Human
cccucccucccuuacucccuu

SEQ ID NO: 1078577 - RNA, 20 nt, Human
cccuggcuuuucuagcuucu

SEQ ID NO: 1078578 - RNA, 23 nt, Human
ccgaguagcugagauuacaggca

SEQ ID NO: 1078579 - RNA, 18 nt, Human
ccgcaaccuccgccuccc

SEQ ID NO: 1078580 - RNA, 23 nt, Human
ccgcaaccuccgccucccggguu

SEQ ID NO: 1078581 - RNA, 24 nt, Human
ccgcaaccuccgccucccggguuc

SEQ ID NO: 1078582 - RNA, 24 nt, Human
ccgccucagccucccaaagugcug

SEQ ID NO: 1078583 - RNA, 27 nt, Human
ccgccucccggguucaagcaauucuuu

SEQ ID NO: 1078584 - RNA, 21 nt, Human
ccuaaaggugauacccaaucu

SEQ ID NO: 1078585 - RNA, 21 nt, Human
ccucaccucagccucccaagc

SEQ ID NO: 1078586 - RNA, 24 nt, Human
ccucccggguucaagcaauucucc

SEQ ID NO: 1078587 - RNA, 19 nt, Human
ccucccuuacucccuuccu

SEQ ID NO: 1078588 - RNA, 24 nt, Human
ccugcaucugagacaacaggaagc

SEQ ID NO: 1078589 - RNA, 23 nt, Human
ccugccucagccucccgaguagc

SEQ ID NO: 1078590 - RNA, 24 nt, Human
ccugccucagccucccgaguagcu

SEQ ID NO: 1078591 - RNA, 21 nt, Human
ccuggacauuuggaauuggga

SEQ ID NO: 1078592 - RNA, 23 nt, Human
ccuggagcugggcugcccucugg

SEQ ID NO: 1078593 - RNA, 18 nt, Human
ccugggcucaagugaucc

SEQ ID NO: 1078594 - RNA, 18 nt, Human
ccuuugaagcuagggcag

SEQ ID NO: 1078595 - RNA, 24 nt, Human
cgccucagccucccaaagugcugg

SEQ ID NO: 1078596 - RNA, 20 nt, Human
cggaaauggauaucuugggg

SEQ ID NO: 1078597 - RNA, 24 nt, Human
cggaguuucaucauguugcucagg

SEQ ID NO: 1078598 - RNA, 18 nt, Human
cggcaccacauccggcua

SEQ ID NO: 1078599 - RNA, 23 nt, Human
cuaauuuuuuguauuuuuaguag

SEQ ID NO: 1078600 - RNA, 22 nt, Human
cuagcccaugagcaacggcccc

SEQ ID NO: 1078601 - RNA, 18 nt, Human
cuagggacaauacccauu

SEQ ID NO: 1078602 - RNA, 24 nt, Human
cucaccgcaaccuccgccucccgg

SEQ ID NO: 1078603 - RNA, 24 nt, Human
cucacugcaaccuccaucucccag

SEQ ID NO: 1078604 - RNA, 24 nt, Human
cucagccacccaaguagcugggau

SEQ ID NO: 1078605 - RNA, 23 nt, Human
cuccagcaggucaugccuauacc

SEQ ID NO: 1078606 - RNA, 24 nt, Human
cucccuuacucccuuccuuccuuc

SEQ ID NO: 1078607 - RNA, 24 nt, Human
cuccugaccucaugauucacccgc

SEQ ID NO: 1078608 - RNA, 21 nt, Human
cuccugcugggcccagcuauu

SEQ ID NO: 1078609 - RNA, 22 nt, Human
cuccugcugggcccagcuauuc

SEQ ID NO: 1078610 - RNA, 23 nt, Human
cuccuggacauuuggaauuggga

SEQ ID NO: 1078611 - RNA, 23 nt, Human
cuccugggcucaagugauccuca

SEQ ID NO: 1078612 - RNA, 22 nt, Human
cucuagggacaauacccauugc

SEQ ID NO: 1078613 - RNA, 18 nt, Human
cucuccucaccaccucag

SEQ ID NO: 1078614 - RNA, 22 nt, Human
cucuggguacccacuaugcaac

SEQ ID NO: 1078615 - RNA, 23 nt, Human
cugcaaccuccaucucccagguu

SEQ ID NO: 1078616 - RNA, 19 nt, Human
cuggaggcucucagggaga

SEQ ID NO: 1078617 - RNA, 18 nt, Human
cuggcuccugcaucugag

SEQ ID NO: 1078618 - RNA, 19 nt, Human
cuggcuccugcaucugaga

SEQ ID NO: 1078619 - RNA, 18 nt, Human
cugggcccagcuauucug

SEQ ID NO: 1078620 - RNA, 23 nt, Human
cugggcucgagcgauccgcccac

SEQ ID NO: 1078621 - RNA, 21 nt, Human
cugggcugcccucuggcuccu

SEQ ID NO: 1078622 - RNA, 20 nt, Human
cuguagaccugcauucuauc

SEQ ID NO: 1078623 - RNA, 21 nt, Human
cuucacacagcucaugccacc

SEQ ID NO: 1078624 - RNA, 23 nt, Human
cuucagucucuccucaccaccuc

SEQ ID NO: 1078625 - RNA, 19 nt, Human
cuuccuucuccccucucca

SEQ ID NO: 1078626 - RNA, 19 nt, Human
cuugaccccacacacacuu

SEQ ID NO: 1078627 - RNA, 21 nt, Human
cuuguuauguuguucaggcug

SEQ ID NO: 1078628 - RNA, 22 nt, Human
cuuguuauguuguucaggcugg

SEQ ID NO: 1078629 - RNA, 23 nt, Human
cuuuccaguucuguggcuggugc

SEQ ID NO: 1078630 - RNA, 25 nt, Human
gaaguccuuuacacauccaugacuu

SEQ ID NO: 1078631 - RNA, 22 nt, Human
gaccucaugauucacccgccuc

SEQ ID NO: 1078632 - RNA, 20 nt, Human
gagacccaaaaugggucugu

SEQ ID NO: 1078633 - RNA, 20 nt, Human
gagagaggagagaugggccu

SEQ ID NO: 1078634 - RNA, 20 nt, Human
gagagcuuuggagccuuaaa

SEQ ID NO: 1078635 - RNA, 23 nt, Human
gagcucacaucugccucccuuga

SEQ ID NO: 1078636 - RNA, 19 nt, Human
gaguagauacaggugcccc

SEQ ID NO: 1078637 - RNA, 25 nt, Human
gaguagcugagauuacaggcaccca

SEQ ID NO: 1078638 - RNA, 19 nt, Human
gauggaggagguggguggc

SEQ ID NO: 1078639 - RNA, 18 nt, Human
gauuacaggcaugggcca

SEQ ID NO: 1078640 - RNA, 21 nt, Human
gauuacaggcaugggccaccg

SEQ ID NO: 1078641 - RNA, 24 nt, Human
gauuacaggcaugggccaccgugc

SEQ ID NO: 1078642 - RNA, 22 nt, Human
gauuauaggcaugagccauugc

SEQ ID NO: 1078643 - RNA, 23 nt, Human
gauuauaggcaugagccauugca

SEQ ID NO: 1078644 - RNA, 18 nt, Human
gcagccucccaagggcca

SEQ ID NO: 1078645 - RNA, 25 nt, Human
gcagcuaaggcagccucccaagggc

SEQ ID NO: 1078646 - RNA, 21 nt, Human
gcccaugagcaacggccccag

SEQ ID NO: 1078647 - RNA, 23 nt, Human
gcuagucucgaacuccugaccuc

SEQ ID NO: 1078648 - RNA, 22 nt, Human
gcugggcugcccucuggcuccu

SEQ ID NO: 1078649 - RNA, 21 nt, Human
gcuuccuucuccccucuccau

SEQ ID NO: 1078650 - RNA, 20 nt, Human
ggaggagguggguggcagcu

SEQ ID NO: 1078651 - RNA, 23 nt, Human
ggaguuucaucauguugcucagg

SEQ ID NO: 1078652 - RNA, 24 nt, Human
ggauuacaggcaugggccaccgug

SEQ ID NO: 1078653 - RNA, 20 nt, Human
gggcaguuucuccagcaggu

SEQ ID NO: 1078654 - RNA, 24 nt, Human
gggcucgagcgauccgcccaccuc

SEQ ID NO: 1078655 - RNA, 20 nt, Human
gggcugcagggagaggaggg

SEQ ID NO: 1078656 - RNA, 21 nt, Human
ggugccuaccuggagcugggc

SEQ ID NO: 1078657 - RNA, 18 nt, Human
guaauucgccugccucag

SEQ ID NO: 1078658 - RNA, 20 nt, Human
guaauucgccugccucagcc

SEQ ID NO: 1078659 - RNA, 19 nt, Human
guaguccaaauggccggug

SEQ ID NO: 1078660 - RNA, 18 nt, Human
guauuuuucuguaaucag

SEQ ID NO: 1078661 - RNA, 19 nt, Human
gucaagggauggacaagcc

SEQ ID NO: 1078662 - RNA, 20 nt, Human
gucuguagaccugcauucua

SEQ ID NO: 1078663 - RNA, 19 nt, Human
gugauacccaaucuagccc

SEQ ID NO: 1078664 - RNA, 22 nt, Human
gugauccucaccucagccuccc

SEQ ID NO: 1078665 - RNA, 20 nt, Human
gugucaagaaaaugucaaca

SEQ ID NO: 1078666 - RNA, 24 nt, Human
guugaaguaauucgccugccucag

SEQ ID NO: 1078667 - RNA, 23 nt, Human
guuucacacugucacccaggcug

SEQ ID NO: 1078668 - RNA, 20 nt, Human
uaagaagauugaacacagca

SEQ ID NO: 1078669 - RNA, 21 nt, Human
uaagacaccauuaauccuaaa

SEQ ID NO: 1078670 - RNA, 20 nt, Human
uaaggcagccucccaagggc

SEQ ID NO: 1078671 - RNA, 21 nt, Human
uaagucaugacugcuaucugg

SEQ ID NO: 1078672 - RNA, 28 nt, Human
uaauccagaaccaaucuccccaccucaa

SEQ ID NO: 1078673 - RNA, 23 nt, Human
uaauuuuguauuuuuaguaaaga

SEQ ID NO: 1078674 - RNA, 25 nt, Human
uaauuuuguauuuuuaguaaagacg

SEQ ID NO: 1078675 - RNA, 24 nt, Human
uaauuuuuuguauuuuuaguagag

SEQ ID NO: 1078676 - RNA, 25 nt, Human
uaauuuuuuguauuuuuaguagaga

SEQ ID NO: 1078677 - RNA, 25 nt, Human
uacacuaugaucaucagcauuuucu

SEQ ID NO: 1078678 - RNA, 23 nt, Human
uacaggcaugcggcaccacaucc

SEQ ID NO: 1078679 - RNA, 23 nt, Human
uacaggcaugggccaccgugccc

SEQ ID NO: 1078680 - RNA, 22 nt, Human
uacaggugccccacaccauccu

SEQ ID NO: 1078681 - RNA, 30 nt, Human
uacaggugccccacaccauccuugaccccu

SEQ ID NO: 1078682 - RNA, 19 nt, Human
uaggagacugugaagaaau

SEQ ID NO: 1078683 - RNA, 20 nt, Human
uaggcaggaaagagauguaa

SEQ ID NO: 1078684 - RNA, 22 nt, Human
uaggcaggcaaugacacuaagu

SEQ ID NO: 1078685 - RNA, 24 nt, Human
uaguaaagacggaguuucaucaug

SEQ ID NO: 1078686 - RNA, 24 nt, Human
uaguagagacauaguuucaccaug

SEQ ID NO: 1078687 - RNA, 21 nt, Human
uauccuaaaggugauacccaa

SEQ ID NO: 1078688 - RNA, 19 nt, Human
uaucucaauaucagagaug

SEQ ID NO: 1078689 - RNA, 18 nt, Human
uauguuguucaggcugga

SEQ ID NO: 1078690 - RNA, 22 nt, Human
uauuaggcaggaaagagaugua

SEQ ID NO: 1078691 - RNA, 21 nt, Human
ucaacaaagucccuacaaaaa

SEQ ID NO: 1078692 - RNA, 18 nt, Human
ucaagggauggacaagcc

SEQ ID NO: 1078693 - RNA, 22 nt, Human
ucacacugucacccaggcugga

SEQ ID NO: 1078694 - RNA, 24 nt, Human
ucacacugucacccaggcuggagu

SEQ ID NO: 1078695 - RNA, 22 nt, Human
ucacagggcuguuuggugccgu

SEQ ID NO: 1078696 - RNA, 22 nt, Human
ucacccaggcuggagugcagua

SEQ ID NO: 1078697 - RNA, 24 nt, Human
ucaccgcaaccuccgccucccggg

SEQ ID NO: 1078698 - RNA, 25 nt, Human
ucaccgcaaccuccgccucccgggu

SEQ ID NO: 1078699 - RNA, 27 nt, Human
ucaccgcaaccuccgccucccggguuc

SEQ ID NO: 1078700 - RNA, 24 nt, Human
ucacugcaaccuccaucucccagg

SEQ ID NO: 1078701 - RNA, 25 nt, Human
ucacugcaaccuccaucucccaggu

SEQ ID NO: 1078702 - RNA, 20 nt, Human
ucagccucccaagcagcugg

SEQ ID NO: 1078703 - RNA, 23 nt, Human
ucagccucccaagggcuuuccag

SEQ ID NO: 1078704 - RNA, 24 nt, Human
ucaggcuggucuugaacuucuggg

SEQ ID NO: 1078705 - RNA, 23 nt, Human
uccagaaccaaucuccccaccuc

SEQ ID NO: 1078706 - RNA, 22 nt, Human
uccaugacuuucuguccaacuc

SEQ ID NO: 1078707 - RNA, 24 nt, Human
ucccaaagugcugggauuacaggc

SEQ ID NO: 1078708 - RNA, 22 nt, Human
ucccaagggcuuuccaguucug

SEQ ID NO: 1078709 - RNA, 19 nt, Human
ucccagguugaaguaauuc

SEQ ID NO: 1078710 - RNA, 24 nt, Human
ucccagguugaaguaauucgccug

SEQ ID NO: 1078711 - RNA, 21 nt, Human
ucccccauuuuacagacaggg

SEQ ID NO: 1078712 - RNA, 24 nt, Human
ucccgaguagcugagauuacaggc

SEQ ID NO: 1078713 - RNA, 21 nt, Human
ucccggguucaagcaauucuc

SEQ ID NO: 1078714 - RNA, 24 nt, Human
ucccggguucaagcaauucuccug

SEQ ID NO: 1078715 - RNA, 22 nt, Human
ucccuggcuuuucuagcuucua

SEQ ID NO: 1078716 - RNA, 21 nt, Human
uccgcccaccucagccugcca

SEQ ID NO: 1078717 - RNA, 24 nt, Human
uccgccucccggguucaagcaauu

SEQ ID NO: 1078718 - RNA, 24 nt, Human
uccugcugggcccagcuauucugg

SEQ ID NO: 1078719 - RNA, 21 nt, Human
uccugggcucaagugauccuc

SEQ ID NO: 1078720 - RNA, 19 nt, Human
uccuucagcaugaucucgg

SEQ ID NO: 1078721 - RNA, 24 nt, Human
ucuccugccucagccucccgagua

SEQ ID NO: 1078722 - RNA, 21 nt, Human
ucucgaacuccugaccucaug

SEQ ID NO: 1078723 - RNA, 24 nt, Human
ucucucgccucccucccucccuua

SEQ ID NO: 1078724 - RNA, 23 nt, Human
ucucuggguacccacuaugcaac

SEQ ID NO: 1078725 - RNA, 22 nt, Human
ucugggcucgagcgauccgccc

SEQ ID NO: 1078726 - RNA, 25 nt, Human
ucuguggcuggugccuaccuggagc

SEQ ID NO: 1078727 - RNA, 23 nt, Human
ucuuguuauguuguucaggcugg

SEQ ID NO: 1078728 - RNA, 24 nt, Human
ucuuguuauguuguucaggcugga

SEQ ID NO: 1078729 - RNA, 22 nt, Human
ucuuucucucucucucgccucc

SEQ ID NO: 1078730 - RNA, 23 nt, Human
ugaagaaacugaaguguaagaag

SEQ ID NO: 1078731 - RNA, 21 nt, Human
ugaagcuagggcaguuucucc

SEQ ID NO: 1078732 - RNA, 22 nt, Human
ugaagcuagggcaguuucucca

SEQ ID NO: 1078733 - RNA, 22 nt, Human
ugaauuaacaaucauggguucc

SEQ ID NO: 1078734 - RNA, 18 nt, Human
ugacaggcaucacuuuau

SEQ ID NO: 1078735 - RNA, 19 nt, Human
ugacucuuaagagacaacu

SEQ ID NO: 1078736 - RNA, 19 nt, Human
ugagauuacaggcacccac

SEQ ID NO: 1078737 - RNA, 21 nt, Human
ugagauuacaggcacccacca

SEQ ID NO: 1078738 - RNA, 24 nt, Human
ugagauuacaggcacccaccacca

SEQ ID NO: 1078739 - RNA, 18 nt, Human
ugagcaacggccccagcc

SEQ ID NO: 1078740 - RNA, 21 nt, Human
ugauggaggagguggguggca

SEQ ID NO: 1078741 - RNA, 20 nt, Human
ugcagggagaggagggaggc

SEQ ID NO: 1078742 - RNA, 22 nt, Human
ugcaguagcgcgaucucggcuc

SEQ ID NO: 1078743 - RNA, 20 nt, Human
ugccaucaauagaacugaaa

SEQ ID NO: 1078744 - RNA, 20 nt, Human
ugccguggaaaaaugaaggu

SEQ ID NO: 1078745 - RNA, 24 nt, Human
ugccucagccacccaaguagcugg

SEQ ID NO: 1078746 - RNA, 24 nt, Human
ugccucagccucccgaguagcuga

SEQ ID NO: 1078747 - RNA, 24 nt, Human
ugcucaggcuggucuugaacuucu

SEQ ID NO: 1078748 - RNA, 19 nt, Human
ugcuguaacaaauuaucac

SEQ ID NO: 1078749 - RNA, 23 nt, Human
ugcuucugucgucacauuuccuc

SEQ ID NO: 1078750 - RNA, 25 nt, Human
ugcuucugucgucacauuuccucug

SEQ ID NO: 1078751 - RNA, 18 nt, Human
uggaggagguggguggca

SEQ ID NO: 1078752 - RNA, 23 nt, Human
uggagugcaguagcgcgaucucg

SEQ ID NO: 1078753 - RNA, 24 nt, Human
uggagugcaguagcgcgaucucgg

SEQ ID NO: 1078754 - RNA, 25 nt, Human
uggauaucuugggggaccauuacuc

SEQ ID NO: 1078755 - RNA, 21 nt, Human
uggcacuacggacaugcacca

SEQ ID NO: 1078756 - RNA, 23 nt, Human
uggccucacaucacuccaacccc

SEQ ID NO: 1078757 - RNA, 18 nt, Human
ugggauuacaggcaugcg

SEQ ID NO: 1078758 - RNA, 24 nt, Human
ugggauuacaggcaugcggcacca

SEQ ID NO: 1078759 - RNA, 21 nt, Human
ugggauuacaggcaugggcca

SEQ ID NO: 1078760 - RNA, 22 nt, Human
ugggauuacaggcaugggccac

SEQ ID NO: 1078761 - RNA, 23 nt, Human
ugggauuacaggcaugggccacc

SEQ ID NO: 1078762 - RNA, 23 nt, Human
ugggauuacaggcaugggccacc

SEQ ID NO: 1078763 - RNA, 24 nt, Human
ugggauuacaggcaugggccaccg

SEQ ID NO: 1078764 - RNA, 19 nt, Human
ugggauuauaggcaugagc

SEQ ID NO: 1078765 - RNA, 21 nt, Human
ugggauuauaggcaugagcca

SEQ ID NO: 1078766 - RNA, 21 nt, Human
ugggauuauaggcaugagcca

SEQ ID NO: 1078767 - RNA, 21 nt, Human
ugggauuauaggcaugagcca

SEQ ID NO: 1078768 - RNA, 24 nt, Human
ugggauuauaggcaugagccauug

SEQ ID NO: 1078769 - RNA, 24 nt, Human
ugggauuauaggcaugagccauug

SEQ ID NO: 1078770 - RNA, 22 nt, Human
ugggcucaagugauccucaccu

SEQ ID NO: 1078771 - RNA, 23 nt, Human
ugggcugcagggagaggagggag

SEQ ID NO: 1078772 - RNA, 19 nt, Human
uggggcuuaucaucaagaa

SEQ ID NO: 1078773 - RNA, 18 nt, Human
ugggucuguagaccugca

SEQ ID NO: 1078774 - RNA, 24 nt, Human
uggucaggcuagucucgaacuccu

SEQ ID NO: 1078775 - RNA, 22 nt, Human
uggucuugaacuucugggcucg

SEQ ID NO: 1078776 - RNA, 20 nt, Human
ugucaagggauggacaagcc

SEQ ID NO: 1078777 - RNA, 24 nt, Human
uguuauguuguucaggcuggacuc

SEQ ID NO: 1078778 - RNA, 24 nt, Human
uuaguaaagacggaguuucaucau

SEQ ID NO: 1078779 - RNA, 24 nt, Human
uuaguagagacauaguuucaccau

SEQ ID NO: 1078780 - RNA, 21 nt, Human
uucaagcaauucuccugccuc

SEQ ID NO: 1078781 - RNA, 24 nt, Human
uucaagcaauucuccugccucagc

SEQ ID NO: 1078782 - RNA, 21 nt, Human
uucacccgccucagccuccca

SEQ ID NO: 1078783 - RNA, 22 nt, Human
uucaggcuggacucaaaacucc

SEQ ID NO: 1078784 - RNA, 18 nt, Human
uucguaagccaguacuac

SEQ ID NO: 1078785 - RNA, 18 nt, Human
uugggcacuaaccccaug

SEQ ID NO: 1078786 - RNA, 23 nt, Human
uuguauuuuuaguaaagacggag

SEQ ID NO: 1078787 - RNA, 20 nt, Human
uuuaguaaagacggaguuuc

SEQ ID NO: 1078788 - RNA, 24 nt, Human
uuucacacaccguugccugcugug

SEQ ID NO: 1078789 - RNA, 24 nt, Human
uuucacacugucacccaggcugga

SEQ ID NO: 1078790 - RNA, 24 nt, Human
uuucaccauguuggucaggcuagu

SEQ ID NO: 1078791 - RNA, 23 nt, Human
uuucaucauguugcucaggcugg

SEQ ID NO: 1078792 - RNA, 20 nt, Human
uuuuguauuuuuaguaaaga

SEQ ID NO: 1078793 - RNA, 24 nt, Human
uuuuuaguaaagacggaguuucau

SEQ ID NO: 1078794 - RNA, 24 nt, Human
uuuuuaguagagacauaguuucac

SEQ ID NO: 1078795 - RNA, 21 nt, Human
uuuuuguauuuuuaguagaga

SEQ ID NO: 1078796 - RNA, 24 nt, Human
uuuuuuguauuuuuaguagagaca

SEQ ID NO: 1078797 - RNA, 19 nt, Human
aaagcgccuuugucuuccg

SEQ ID NO: 1078798 - RNA, 20 nt, Human
aacagugcacauuuaaccca

SEQ ID NO: 1078799 - RNA, 24 nt, Human
aggaaaauuuguauuauuuuaauu

SEQ ID NO: 1078800 - RNA, 18 nt, Human
caaugcgagccacagacu

SEQ ID NO: 1078801 - RNA, 22 nt, Human
ccagcuuagccaaagcgccuuu

SEQ ID NO: 1078802 - RNA, 18 nt, Human
gcaaugcgagccacagac

SEQ ID NO: 1078803 - RNA, 21 nt, Human
uaggacccaggauguugccac

SEQ ID NO: 1078804 - RNA, 21 nt, Human
ugauagcuuccaccagcuuag

SEQ ID NO: 1078805 - RNA, 18 nt, Human
uguacagaaaacucaaca

SEQ ID NO: 1078806 - RNA, 19 nt, Human
uuagccaaagcgccuuugu

SEQ ID NO: 1078807 - RNA, 24 nt, Human
uuucuuugaaggaaaauuuguauu

SEQ ID NO: 1078808 - RNA, 19 nt, Human
uuuuuuuucuuugaaggaa

SEQ ID NO: 1078809 - RNA, 18 nt, Human
uuuuuuuuuuuuucuuug

SEQ ID NO: 1078810 - RNA, 22 nt, Human
uuuuuuuuuuuuucuuugaagg

SEQ ID NO: 1078811 - RNA, 25 nt, Human
aaaaaaaaacucuucucuuugcaga

SEQ ID NO: 1078812 - RNA, 19 nt, Human
aaaaauaccccaagccaga

SEQ ID NO: 1078813 - RNA, 21 nt, Human
aacaguaaagaggaaaaucac

SEQ ID NO: 1078814 - RNA, 23 nt, Human
aagaagcccaacaguaaagagga

SEQ ID NO: 1078815 - RNA, 19 nt, Human
aagaaggaaucacaaucaa

SEQ ID NO: 1078816 - RNA, 21 nt, Human
aagagugacccugauguacac

SEQ ID NO: 1078817 - RNA, 19 nt, Human
aagccagagcagcagaaga

SEQ ID NO: 1078818 - RNA, 22 nt, Human
aauacuccucaaaagcccccac

SEQ ID NO: 1078819 - RNA, 24 nt, Human
aauacuccucaaaagcccccacaa

SEQ ID NO: 1078820 - RNA, 19 nt, Human
agaagcccaacaguaaaga

SEQ ID NO: 1078821 - RNA, 19 nt, Human
agacaaaaauaccccaagc

SEQ ID NO: 1078822 - RNA, 21 nt, Human
agacaagaaggaaucacaauc

SEQ ID NO: 1078823 - RNA, 26 nt, Human
agacaagaaggaaucacaaucaaugg

SEQ ID NO: 1078824 - RNA, 18 nt, Human
agagccauccaggagccu

SEQ ID NO: 1078825 - RNA, 18 nt, Human
agagcugauccuccagga

SEQ ID NO: 1078826 - RNA, 23 nt, Human
agcagcagaagagugacccugau

SEQ ID NO: 1078827 - RNA, 20 nt, Human
agccugacaguagccagaaa

SEQ ID NO: 1078828 - RNA, 21 nt, Human
agggauguacuaacauuucug

SEQ ID NO: 1078829 - RNA, 22 nt, Human
aggugucuagaaaccaagagcu

SEQ ID NO: 1078830 - RNA, 21 nt, Human
aguagccagaaauagacaaaa

SEQ ID NO: 1078831 - RNA, 18 nt, Human
auguuaagaauaaccugc

SEQ ID NO: 1078832 - RNA, 21 nt, Human
caaagagacuaaaguguaaua

SEQ ID NO: 1078833 - RNA, 22 nt, Human
caaccagagacucaggggcacc

SEQ ID NO: 1078834 - RNA, 19 nt, Human
caagccagagcagcagaag

SEQ ID NO: 1078835 - RNA, 20 nt, Human
caauggcaaaaaaaaaaacu

SEQ ID NO: 1078836 - RNA, 18 nt, Human
cacaacaagcacugaaca

SEQ ID NO: 1078837 - RNA, 19 nt, Human
cacaacaagcacugaacac

SEQ ID NO: 1078838 - RNA, 24 nt, Human
cacaaccagagacucaggggcacc

SEQ ID NO: 1078839 - RNA, 26 nt, Human
cagaaauagacaaaaauaccccaagc

SEQ ID NO: 1078840 - RNA, 22 nt, Human
cagagacucaggggcacccucc

SEQ ID NO: 1078841 - RNA, 21 nt, Human
cagccugacaguagccagaaa

SEQ ID NO: 1078842 - RNA, 20 nt, Human
caggagccuuugcacuucug

SEQ ID NO: 1078843 - RNA, 20 nt, Human
caguaaagaggaaaaucaca

SEQ ID NO: 1078844 - RNA, 19 nt, Human
cauaagaagcccaacagua

SEQ ID NO: 1078845 - RNA, 24 nt, Human
cauguuaagaauaaccugcacuua

SEQ ID NO: 1078846 - RNA, 20 nt, Human
cauuucugcugcaaagagag

SEQ ID NO: 1078847 - RNA, 24 nt, Human
ccaacaguaaagaggaaaauccua

SEQ ID NO: 1078848 - RNA, 22 nt, Human
ccaagccagagcagcagaagag

SEQ ID NO: 1078849 - RNA, 21 nt, Human
ccacaacaagcacugaacaca

SEQ ID NO: 1078850 - RNA, 21 nt, Human
ccacaacaagcacugaacacu

SEQ ID NO: 1078851 - RNA, 23 nt, Human
ccagaaauagacaaaaauacccc

SEQ ID NO: 1078852 - RNA, 19 nt, Human
ccagaacauugucguagau

SEQ ID NO: 1078853 - RNA, 19 nt, Human
ccccacaacaagcacugaa

SEQ ID NO: 1078854 - RNA, 21 nt, Human
cccccacaacaagcacugaac

SEQ ID NO: 1078855 - RNA, 24 nt, Human
cccugauguacacuagggucccau

SEQ ID NO: 1078856 - RNA, 19 nt, Human
cguaaccaugauaguaaca

SEQ ID NO: 1078857 - RNA, 22 nt, Human
cuaaaguguaauaauucaugga

SEQ ID NO: 1078858 - RNA, 25 nt, Human
cugaacacaaccagagacucagggg

SEQ ID NO: 1078859 - RNA, 18 nt, Human
cugccccugcugaucacc

SEQ ID NO: 1078860 - RNA, 18 nt, Human
cugccccugcugaucacc

SEQ ID NO: 1078861 - RNA, 26 nt, Human
gaacacaaccagagacucaggggcac

SEQ ID NO: 1078862 - RNA, 20 nt, Human
gaauauuaaauuagagacau

SEQ ID NO: 1078863 - RNA, 22 nt, Human
gagggaaagauguagcuucagu

SEQ ID NO: 1078864 - RNA, 26 nt, Human
gccagagcagcagaagagugacccug

SEQ ID NO: 1078865 - RNA, 25 nt, Human
gcccccacaacaagcacugaacaca

SEQ ID NO: 1078866 - RNA, 21 nt, Human
ggaugaagagcugauccucca

SEQ ID NO: 1078867 - RNA, 23 nt, Human
gggcacccuccacguaaccauga

SEQ ID NO: 1078868 - RNA, 18 nt, Human
gggucccauccacugcca

SEQ ID NO: 1078869 - RNA, 24 nt, Human
uaagaagcccaacaguaaagagga

SEQ ID NO: 1078870 - RNA, 20 nt, Human
uacacuagggucccauccac

SEQ ID NO: 1078871 - RNA, 19 nt, Human
uaccccaagccagagcagc

SEQ ID NO: 1078872 - RNA, 29 nt, Human
uacuuuguaaaccagguguucaaaugugg

SEQ ID NO: 1078873 - RNA, 21 nt, Human
uagggucccauccacugccau

SEQ ID NO: 1078874 - RNA, 24 nt, Human
uaggugaacacugggaggugucua

SEQ ID NO: 1078875 - RNA, 23 nt, Human
ucaaaagcccccacaacaagcac

SEQ ID NO: 1078876 - RNA, 19 nt, Human
ucaauggcaaaaaaaaaaa

SEQ ID NO: 1078877 - RNA, 23 nt, Human
ucugugcuggcaguagggcgggg

SEQ ID NO: 1078878 - RNA, 23 nt, Human
ucuuaaccugaugaaugagccuu

SEQ ID NO: 1078879 - RNA, 21 nt, Human
ugaacacaaccagagacucag

SEQ ID NO: 1078880 - RNA, 19 nt, Human
ugaagagcugauccuccag

SEQ ID NO: 1078881 - RNA, 21 nt, Human
ugacaauguuugugguacuga

SEQ ID NO: 1078882 - RNA, 22 nt, Human
ugaugaaugagccuuaguuucu

SEQ ID NO: 1078883 - RNA, 23 nt, Human
uggaauauuaaauuagagacauu

SEQ ID NO: 1078884 - RNA, 20 nt, Human
ugggaccagaacauugucgu

SEQ ID NO: 1078885 - RNA, 23 nt, Human
ugggagggcccagccugacagua

SEQ ID NO: 1078886 - RNA, 24 nt, Human
uguaggugaacacugggagguguc

SEQ ID NO: 1078887 - RNA, 21 nt, Human
ugucuagaaaccaagagcuuc

SEQ ID NO: 1078888 - RNA, 25 nt, Human
uuaauacuccucaaaagcccccaca

SEQ ID NO: 1078889 - RNA, 20 nt, Human
uucagggauguacuaacauu

SEQ ID NO: 1078890 - RNA, 21 nt, Human
uuucagggauguacuaacauu

SEQ ID NO: 1078891 - RNA, 23 nt, Human
aaaaaggaaaacagcaucccgga

SEQ ID NO: 1078892 - RNA, 23 nt, Human
aaagauaaggguuggggcccagg

SEQ ID NO: 1078893 - RNA, 19 nt, Human
aacaucugccaucccugcu

SEQ ID NO: 1078894 - RNA, 19 nt, Human
aaccccgcaucuguaaaau

SEQ ID NO: 1078895 - RNA, 18 nt, Human
aaggguuggggcccagga

SEQ ID NO: 1078896 - RNA, 22 nt, Human
agaaacaaaaaaggaaaacagc

SEQ ID NO: 1078897 - RNA, 22 nt, Human
aggcuuccagccaucaagcagu

SEQ ID NO: 1078898 - RNA, 19 nt, Human
caccuaaacugugaugacu

SEQ ID NO: 1078899 - RNA, 23 nt, Human
ccgcaucuguaaaaucgcuagcc

SEQ ID NO: 1078900 - RNA, 22 nt, Human
cgcggcgggggcccaauccgcu

SEQ ID NO: 1078901 - RNA, 25 nt, Human
cgcuagccgcaccuaaacugugaug

SEQ ID NO: 1078902 - RNA, 25 nt, Human
cuaaccccgcaucuguaaaaucgcu

SEQ ID NO: 1078903 - RNA, 25 nt, Human
cugccaucccugcuaagaaacaaaa

SEQ ID NO: 1078904 - RNA, 21 nt, Human
cugcuaagaaacaaaaaagga

SEQ ID NO: 1078905 - RNA, 21 nt, Human
cuguaaaaucgcuagccgcac

SEQ ID NO: 1078906 - RNA, 24 nt, Human
gaaacaaaaaaggaaaacagcauc

SEQ ID NO: 1078907 - RNA, 23 nt, Human
gccgcaccuaaacugugaugacu

SEQ ID NO: 1078908 - RNA, 21 nt, Human
gcgcggcgggggcccaauccg

SEQ ID NO: 1078909 - RNA, 21 nt, Human
ggcguggcuggagcagggguu

SEQ ID NO: 1078910 - RNA, 23 nt, Human
ggguugggagagugggaggaugu

SEQ ID NO: 1078911 - RNA, 23 nt, Human
uaaacugugaugacuggaguuca

SEQ ID NO: 1078912 - RNA, 19 nt, Human
ucaaagcugggcuggaugc

SEQ ID NO: 1078913 - RNA, 23 nt, Human
ucuguucuacaaacaucugccau

SEQ ID NO: 1078914 - RNA, 22 nt, Human
ugacuggaguucacauaaaacc

SEQ ID NO: 1078915 - RNA, 21 nt, Human
ugauccagaggcggugaagcc

SEQ ID NO: 1078916 - RNA, 18 nt, Human
ugcacaggcacagaggca

SEQ ID NO: 1078917 - RNA, 23 nt, Human
ugcacaggcacagaggcagauac

SEQ ID NO: 1078918 - RNA, 26 nt, Human
ugcuaagaaacaaaaaaggaaaacag

SEQ ID NO: 1078919 - RNA, 19 nt, Human
uggagcagggguugggaga

SEQ ID NO: 1078920 - RNA, 23 nt, Human
uggcuggagcagggguugggaga

SEQ ID NO: 1078921 - RNA, 25 nt, Human
uguucuacaaacaucugccaucccu

SEQ ID NO: 1078922 - RNA, 22 nt, Human
uuggggcccaggacuguucaaa

SEQ ID NO: 1078923 - RNA, 22 nt, Human
cccugaccccagacgccgaccc

SEQ ID NO: 1078924 - RNA, 19 nt, Human
ccugaccccagacgccgac

SEQ ID NO: 1078925 - RNA, 20 nt, Human
ccugaccccagacgccgacc

SEQ ID NO: 1078926 - RNA, 24 nt, Human
cgcccugaccccagacgccgaccc

SEQ ID NO: 1078927 - RNA, 18 nt, Human
cggccucgggcugcuggg

SEQ ID NO: 1078928 - RNA, 19 nt, Human
cgggcaagugucccgcggc

SEQ ID NO: 1078929 - RNA, 19 nt, Human
cugugcgcgcccugacccc

SEQ ID NO: 1078930 - RNA, 21 nt, Human
gcccugaccccagacgccgac

SEQ ID NO: 1078931 - RNA, 22 nt, Human
guaauacgggcaagugucccgc

SEQ ID NO: 1078932 - RNA, 22 nt, Human
uacgggcaagugucccgcggcc

SEQ ID NO: 1078933 - RNA, 27 nt, Human
ucacuuuauuguacugucacccuuaau

SEQ ID NO: 1078934 - RNA, 21 nt, Human
ugaccccagacgccgacccuc

SEQ ID NO: 1078935 - RNA, 21 nt, Human
ugcgcgcccugaccccagacg

SEQ ID NO: 1078936 - RNA, 23 nt, Human
ugggcugugcgcgcccugacccc

SEQ ID NO: 1078937 - RNA, 18 nt, Human
uuccucuuucucgacccc

SEQ ID NO: 1078938 - RNA, 23 nt, Human
uuccucuuucucgacccccuccc

SEQ ID NO: 1078939 - RNA, 23 nt, Human
ucccuuuaaguuacgacgggaau

SEQ ID NO: 1078940 - RNA, 26 nt, Human
ugauguuuauuuuccgccaaucauuu

SEQ ID NO: 1078941 - RNA, 20 nt, Human
uuccguguugcuuaagagcc

SEQ ID NO: 1078942 - RNA, 22 nt, Human
acaguaauguuuuccaucugga

SEQ ID NO: 1078943 - RNA, 18 nt, Human
aggaaggaugaagauggc

SEQ ID NO: 1078944 - RNA, 18 nt, Human
caggaaggaugaagaugg

SEQ ID NO: 1078945 - RNA, 21 nt, Human
caggaaggaugaagauggcug

SEQ ID NO: 1078946 - RNA, 23 nt, Human
caggaaggaugaagauggcugug

SEQ ID NO: 1078947 - RNA, 23 nt, Human
cccucaucaggaaggaugaagau

SEQ ID NO: 1078948 - RNA, 23 nt, Human
cuccaagugcuucagcuugcccu

SEQ ID NO: 1078949 - RNA, 22 nt, Human
cugcgugacaguaauguuuucc

SEQ ID NO: 1078950 - RNA, 19 nt, Human
guacagacacgucuacgac

SEQ ID NO: 1078951 - RNA, 23 nt, Human
uggguacagacacgucuacgacc

SEQ ID NO: 1078952 - RNA, 23 nt, Human
aaaacaaacaaaacggaauaacc

SEQ ID NO: 1078953 - RNA, 23 nt, Human
aaaagcagacagugacuugcccc

SEQ ID NO: 1078954 - RNA, 22 nt, Human
aaaaucaaggugugagcagggc

SEQ ID NO: 1078955 - RNA, 19 nt, Human
aaauacaaaaauuagcugg

SEQ ID NO: 1078956 - RNA, 23 nt, Human
aaaucaaggugugagcagggcca

SEQ ID NO: 1078957 - RNA, 18 nt, Human
aacaaacaaaacggaaua

SEQ ID NO: 1078958 - RNA, 20 nt, Human
aacauggugaaacucugucu

SEQ ID NO: 1078959 - RNA, 21 nt, Human
aacauggugaaacucugucuc

SEQ ID NO: 1078960 - RNA, 18 nt, Human
aagagagaagucaguggc

SEQ ID NO: 1078961 - RNA, 23 nt, Human
aauagaccucaaauucugcugua

SEQ ID NO: 1078962 - RNA, 24 nt, Human
aaucgcuugaacccggcgggugga

SEQ ID NO: 1078963 - RNA, 25 nt, Human
acaaaacggaauaaccguucuuaac

SEQ ID NO: 1078964 - RNA, 19 nt, Human
acauggugaaacucugucu

SEQ ID NO: 1078965 - RNA, 21 nt, Human
accacguaugacaaauuuauu

SEQ ID NO: 1078966 - RNA, 24 nt, Human
acccgagguuaggaguucgagacc

SEQ ID NO: 1078967 - RNA, 18 nt, Human
acuucgcuccagccuggg

SEQ ID NO: 1078968 - RNA, 24 nt, Human
agcaccuguaaucccagcuacuug

SEQ ID NO: 1078969 - RNA, 24 nt, Human
agcacuuuggaaggcugagguggg

SEQ ID NO: 1078970 - RNA, 19 nt, Human
agcagcuggcagucccgca

SEQ ID NO: 1078971 - RNA, 22 nt, Human
agccuggccaacauggugaaac

SEQ ID NO: 1078972 - RNA, 24 nt, Human
agccuggccaacauggugaaacuc

SEQ ID NO: 1078973 - RNA, 20 nt, Human
agcuggacgugguggugagc

SEQ ID NO: 1078974 - RNA, 19 nt, Human
agcugugccaagccauagc

SEQ ID NO: 1078975 - RNA, 24 nt, Human
aggaagaagagaaguggcuuuugg

SEQ ID NO: 1078976 - RNA, 24 nt, Human
aggcaggagaaucgcuugaacccg

SEQ ID NO: 1078977 - RNA, 24 nt, Human
aggccacauuaggcugugaaugag

SEQ ID NO: 1078978 - RNA, 20 nt, Human
aggcugaggcaggagaaucg

SEQ ID NO: 1078979 - RNA, 24 nt, Human
aggcugaggcaggagaaucgcuug

SEQ ID NO: 1078980 - RNA, 19 nt, Human
aggcugagguggguggauc

SEQ ID NO: 1078981 - RNA, 22 nt, Human
agguggguggaucacccgaggu

SEQ ID NO: 1078982 - RNA, 24 nt, Human
aucucgucacuucgcuccagccug

SEQ ID NO: 1078983 - RNA, 18 nt, Human
augcaaccagccugugga

SEQ ID NO: 1078984 - RNA, 20 nt, Human
augcaaccagccuguggaag

SEQ ID NO: 1078985 - RNA, 20 nt, Human
auucuuuuucugaaugagug

SEQ ID NO: 1078986 - RNA, 25 nt, Human
auuggaaucaguuugcucucuaauu

SEQ ID NO: 1078987 - RNA, 21 nt, Human
auuggcccuguucaggucaca

SEQ ID NO: 1078988 - RNA, 24 nt, Human
caacauggugaaacucugucucua

SEQ ID NO: 1078989 - RNA, 22 nt, Human
caccaaagucugugaaugaugu

SEQ ID NO: 1078990 - RNA, 23 nt, Human
cacccgagguuaggaguucgaga

SEQ ID NO: 1078991 - RNA, 23 nt, Human
caccuguaaucccagcuacuugg

SEQ ID NO: 1078992 - RNA, 24 nt, Human
caccuguaaucccagcuacuuggg

SEQ ID NO: 1078993 - RNA, 23 nt, Human
cacgcugucaucccagcacuuug

SEQ ID NO: 1078994 - RNA, 18 nt, Human
cacugcauuuugcuguca

SEQ ID NO: 1078995 - RNA, 19 nt, Human
cacuucgcuccagccuggg

SEQ ID NO: 1078996 - RNA, 20 nt, Human
cacuucgcuccagccugggc

SEQ ID NO: 1078997 - RNA, 23 nt, Human
cacuucgcuccagccugggcaaa

SEQ ID NO: 1078998 - RNA, 18 nt, Human
cacuuuggaaggcugagg

SEQ ID NO: 1078999 - RNA, 23 nt, Human
cagagcagcugugccaagccaua

SEQ ID NO: 1079000 - RNA, 24 nt, Human
cagcacuuuggaaggcugaggugg

SEQ ID NO: 1079001 - RNA, 24 nt, Human
cagcuacuugggaggcugaggcag

SEQ ID NO: 1079002 - RNA, 23 nt, Human
cagcugcggccccuccgccuccu

SEQ ID NO: 1079003 - RNA, 24 nt, Human
cagcugcggccccuccgccuccua

SEQ ID NO: 1079004 - RNA, 20 nt, Human
cagguacagcuggcuccagg

SEQ ID NO: 1079005 - RNA, 21 nt, Human
cauccagacauagucuguguc

SEQ ID NO: 1079006 - RNA, 19 nt, Human
ccagcaauucucugccuuc

SEQ ID NO: 1079007 - RNA, 24 nt, Human
ccagcaauucucugccuuccuugg

SEQ ID NO: 1079008 - RNA, 20 nt, Human
ccauggcacaugcaaccagc

SEQ ID NO: 1079009 - RNA, 24 nt, Human
ccauuaaguuggccccagucacau

SEQ ID NO: 1079010 - RNA, 22 nt, Human
cccgagguuaggaguucgagac

SEQ ID NO: 1079011 - RNA, 21 nt, Human
cccggcggguggagguugcag

SEQ ID NO: 1079012 - RNA, 19 nt, Human
ccugcaggccucgguuugc

SEQ ID NO: 1079013 - RNA, 20 nt, Human
ccuggccaacauggugaaac

SEQ ID NO: 1079014 - RNA, 24 nt, Human
ccuggccaacauggugaaacucug

SEQ ID NO: 1079015 - RNA, 21 nt, Human
ccuguaaucccagcuacuugg

SEQ ID NO: 1079016 - RNA, 24 nt, Human
cgagaccagccuggccaacauggu

SEQ ID NO: 1079017 - RNA, 24 nt, Human
cgcuccagccugggcaaaagagug

SEQ ID NO: 1079018 - RNA, 23 nt, Human
cgcugucaucccagcacuuugga

SEQ ID NO: 1079019 - RNA, 23 nt, Human
cucacgcugucaucccagcacuu

SEQ ID NO: 1079020 - RNA, 18 nt, Human
cucaucuuaucucauuca

SEQ ID NO: 1079021 - RNA, 20 nt, Human
cuccagccugggcaaaagag

SEQ ID NO: 1079022 - RNA, 20 nt, Human
cuccagccugggcaaaagag

SEQ ID NO: 1079023 - RNA, 23 nt, Human
cuccagccugggcaaaagaguga

SEQ ID NO: 1079024 - RNA, 19 nt, Human
cucucccaguuuugaaagc

SEQ ID NO: 1079025 - RNA, 23 nt, Human
cugcagugacuccacucucugcc

SEQ ID NO: 1079026 - RNA, 24 nt, Human
cuggccaacauggugaaacucugu

SEQ ID NO: 1079027 - RNA, 21 nt, Human
cuguaaucccagcuacuuggg

SEQ ID NO: 1079028 - RNA, 18 nt, Human
cuuggccagguguggugg

SEQ ID NO: 1079029 - RNA, 22 nt, Human
cuuuuggggagcagcuggcagu

SEQ ID NO: 1079030 - RNA, 20 nt, Human
gaaaagcagacagugacuug

SEQ ID NO: 1079031 - RNA, 22 nt, Human
gaaacaauuucaaacugucuua

SEQ ID NO: 1079032 - RNA, 19 nt, Human
gaaacucugucucuacuaa

SEQ ID NO: 1079033 - RNA, 22 nt, Human
gacuccacucucugccugcauc

SEQ ID NO: 1079034 - RNA, 22 nt, Human
gagguugcagugagccaagauc

SEQ ID NO: 1079035 - RNA, 24 nt, Human
gaucacccgagguuaggaguucga

SEQ ID NO: 1079036 - RNA, 21 nt, Human
gcagugacuccacucucugcc

SEQ ID NO: 1079037 - RNA, 24 nt, Human
gccaacauggugaaacucugucuc

SEQ ID NO: 1079038 - RNA, 25 nt, Human
ggaagaagagaaguggcuuuugggg

SEQ ID NO: 1079039 - RNA, 24 nt, Human
ggacgugguggugagcaccuguaa

SEQ ID NO: 1079040 - RNA, 27 nt, Human
ggaggcucuagaggaaaauuuuuccuu

SEQ ID NO: 1079041 - RNA, 18 nt, Human
ggagguugcagugagcca

SEQ ID NO: 1079042 - RNA, 20 nt, Human
ggagguugcagugagccaag

SEQ ID NO: 1079043 - RNA, 21 nt, Human
ggccaggugugguggcucacg

SEQ ID NO: 1079044 - RNA, 18 nt, Human
ggccauggcacaugcaac

SEQ ID NO: 1079045 - RNA, 20 nt, Human
ggcucacgcugucaucccag

SEQ ID NO: 1079046 - RNA, 18 nt, Human
gggagcagcuggcagucc

SEQ ID NO: 1079047 - RNA, 19 nt, Human
gggcaaccaguuuugugcc

SEQ ID NO: 1079048 - RNA, 19 nt, Human
gguggagguugcagugagc

SEQ ID NO: 1079049 - RNA, 23 nt, Human
gguggagguugcagugagccaag

SEQ ID NO: 1079050 - RNA, 24 nt, Human
gguggugagcaccuguaaucccag

SEQ ID NO: 1079051 - RNA, 19 nt, Human
gucucuacuaaaaauacaa

SEQ ID NO: 1079052 - RNA, 19 nt, Human
gugacuccacucucugccu

SEQ ID NO: 1079053 - RNA, 22 nt, Human
guggcucacgcugucaucccag

SEQ ID NO: 1079054 - RNA, 23 nt, Human
guggcucacgcugucaucccagc

SEQ ID NO: 1079055 - RNA, 19 nt, Human
guggcuuuuggggagcagc

SEQ ID NO: 1079056 - RNA, 23 nt, Human
guggugagcaccuguaaucccag

SEQ ID NO: 1079057 - RNA, 22 nt, Human
guuugcucucuaauucuuccac

SEQ ID NO: 1079058 - RNA, 24 nt, Human
guuuugugccugccuaguuucagg

SEQ ID NO: 1079059 - RNA, 20 nt, Human
uaaaacaccaaagucuguga

SEQ ID NO: 1079060 - RNA, 21 nt, Human
uaaaacaccaaagucugugaa

SEQ ID NO: 1079061 - RNA, 21 nt, Human
uaacagcucagacuauaacac

SEQ ID NO: 1079062 - RNA, 22 nt, Human
uaacccaucaguggcugcauca

SEQ ID NO: 1079063 - RNA, 28 nt, Human
uagaccucaaauucugcuguaacagcuc

SEQ ID NO: 1079064 - RNA, 18 nt, Human
uagcuggacgugguggug

SEQ ID NO: 1079065 - RNA, 19 nt, Human
uaggaauauuuuuguuuga

SEQ ID NO: 1079066 - RNA, 24 nt, Human
uaggcaaggcuaaguugcuaugac

SEQ ID NO: 1079067 - RNA, 24 nt, Human
uauugcucucauaauaccaaacua

SEQ ID NO: 1079068 - RNA, 27 nt, Human
uauuucaaaaaacaaacaaaacggaau

SEQ ID NO: 1079069 - RNA, 20 nt, Human
ucacccgagguuaggaguuc

SEQ ID NO: 1079070 - RNA, 20 nt, Human
ucacuucgcuccagccuggg

SEQ ID NO: 1079071 - RNA, 21 nt, Human
ucacuucgcuccagccugggc

SEQ ID NO: 1079072 - RNA, 21 nt, Human
ucccagcugcggccccuccgc

SEQ ID NO: 1079073 - RNA, 24 nt, Human
ucgcuugaacccggcggguggagg

SEQ ID NO: 1079074 - RNA, 27 nt, Human
ucucacuuugucucuguaaggucggac

SEQ ID NO: 1079075 - RNA, 22 nt, Human
ucucccaguuuugaaagccaga

SEQ ID NO: 1079076 - RNA, 21 nt, Human
ucucuacuaaaaauacaaaaa

SEQ ID NO: 1079077 - RNA, 22 nt, Human
ugaaagccagaagaccaaaauc

SEQ ID NO: 1079078 - RNA, 23 nt, Human
ugaagcuauauuucaaaaaacaa

SEQ ID NO: 1079079 - RNA, 18 nt, Human
ugacaaauagaccucaaa

SEQ ID NO: 1079080 - RNA, 22 nt, Human
ugacaaauagaccucaaauucu

SEQ ID NO: 1079081 - RNA, 22 nt, Human
ugacaaauuuauucucucccag

SEQ ID NO: 1079082 - RNA, 23 nt, Human
ugacuugcccacuucuucccagc

SEQ ID NO: 1079083 - RNA, 19 nt, Human
ugagaagguagggucagcu

SEQ ID NO: 1079084 - RNA, 20 nt, Human
ugaggcaggagaaucgcuug

SEQ ID NO: 1079085 - RNA, 24 nt, Human
ugaggcaggagaaucgcuugaacc

SEQ ID NO: 1079086 - RNA, 25 nt, Human
ugaggcaggagaaucgcuugaaccc

SEQ ID NO: 1079087 - RNA, 20 nt, Human
ugagguggguggaucacccg

SEQ ID NO: 1079088 - RNA, 21 nt, Human
ugagguggguggaucacccga

SEQ ID NO: 1079089 - RNA, 24 nt, Human
ugagguggguggaucacccgaggu

SEQ ID NO: 1079090 - RNA, 22 nt, Human
ugccaagccauagccuucagca

SEQ ID NO: 1079091 - RNA, 23 nt, Human
ugccccaggccauggcacaugca

SEQ ID NO: 1079092 - RNA, 19 nt, Human
ugcggccccuccgccuccc

SEQ ID NO: 1079093 - RNA, 25 nt, Human
ugcggccccuccgccuccuacacga

SEQ ID NO: 1079094 - RNA, 20 nt, Human
uggaaggcugaggugggugg

SEQ ID NO: 1079095 - RNA, 23 nt, Human
uggaaggcugagguggguggauc

SEQ ID NO: 1079096 - RNA, 24 nt, Human
uggaaggcugagguggguggauca

SEQ ID NO: 1079097 - RNA, 21 nt, Human
uggaagggaaaagaaaagcag

SEQ ID NO: 1079098 - RNA, 23 nt, Human
uggaagggaaaagaaaagcagac

SEQ ID NO: 1079099 - RNA, 24 nt, Human
uggaucacccgagguuaggaguuc

SEQ ID NO: 1079100 - RNA, 24 nt, Human
uggccaacauggugaaacucuguc

SEQ ID NO: 1079101 - RNA, 24 nt, Human
uggccaggugugguggcucacgcu

SEQ ID NO: 1079102 - RNA, 21 nt, Human
uggcucacgcugucaucccag

SEQ ID NO: 1079103 - RNA, 23 nt, Human
uggcucacgcugucaucccagca

SEQ ID NO: 1079104 - RNA, 19 nt, Human
ugggaggcugaggcaggag

SEQ ID NO: 1079105 - RNA, 23 nt, Human
ugggaggcugaggcaggagaauc

SEQ ID NO: 1079106 - RNA, 23 nt, Human
ugggcaaaaacaggaccacaggc

SEQ ID NO: 1079107 - RNA, 24 nt, Human
uggguggaucacccgagguuagga

SEQ ID NO: 1079108 - RNA, 23 nt, Human
ugguggcucacgcugucauccca

SEQ ID NO: 1079109 - RNA, 24 nt, Human
ugguggugagcaccuguaauccca

SEQ ID NO: 1079110 - RNA, 18 nt, Human
uuagcuggacgugguggu

SEQ ID NO: 1079111 - RNA, 23 nt, Human
uugaaagccagaagaccaaaauc

SEQ ID NO: 1079112 - RNA, 24 nt, Human
uugaacccggcggguggagguugc

SEQ ID NO: 1079113 - RNA, 21 nt, Human
uugcagugagccaagaucucg

SEQ ID NO: 1079114 - RNA, 19 nt, Human
uuggaaggcugaggugggu

SEQ ID NO: 1079115 - RNA, 25 nt, Human
uuggaaggcugagguggguggauca

SEQ ID NO: 1079116 - RNA, 24 nt, Human
uugggaggcugaggcaggagaauc

SEQ ID NO: 1079117 - RNA, 22 nt, Human
uuguagcgggaugggcaaccag

SEQ ID NO: 1079118 - RNA, 20 nt, Human
uuuuuguuugaauguaacag

SEQ ID NO: 1079119 - RNA, 22 nt, Human
agaaaguugcaccuuggccucc

SEQ ID NO: 1079120 - RNA, 19 nt, Human
ccuccuccaagccgaaagc

SEQ ID NO: 1079121 - RNA, 22 nt, Human
gccuccuccaagccgaaagccg

SEQ ID NO: 1079122 - RNA, 22 nt, Human
ucaccaguugucaaaugauucu

SEQ ID NO: 1079123 - RNA, 24 nt, Human
aaagugcugggauuacaggcguga

SEQ ID NO: 1079124 - RNA, 19 nt, Human
aagugcugggauuacaggc

SEQ ID NO: 1079125 - RNA, 19 nt, Human
aagugcugggauuacaggc

SEQ ID NO: 1079126 - RNA, 26 nt, Human
aagugcugggauuacaggcgugagcc

SEQ ID NO: 1079127 - RNA, 25 nt, Human
acccgccucggccucccaaagugcu

SEQ ID NO: 1079128 - RNA, 18 nt, Human
acgggguuucaccuuguu

SEQ ID NO: 1079129 - RNA, 20 nt, Human
acgggguuucaccuuguuag

SEQ ID NO: 1079130 - RNA, 20 nt, Human
acugcaguggcgcaaucucg

SEQ ID NO: 1079131 - RNA, 24 nt, Human
acugcaguggcgcaaucucggcuc

SEQ ID NO: 1079132 - RNA, 20 nt, Human
aguagagacgggguuucacc

SEQ ID NO: 1079133 - RNA, 18 nt, Human
aguagcugggacuacagg

SEQ ID NO: 1079134 - RNA, 24 nt, Human
augauccacccgccucggccuccc

SEQ ID NO: 1079135 - RNA, 24 nt, Human
caaagugcugggauuacaggcgug

SEQ ID NO: 1079136 - RNA, 23 nt, Human
cacccgccucggccucccaaagu

SEQ ID NO: 1079137 - RNA, 24 nt, Human
caccuuguuagccaggauggucuc

SEQ ID NO: 1079138 - RNA, 22 nt, Human
cacgccauucuccugccucagc

SEQ ID NO: 1079139 - RNA, 21 nt, Human
caggcgcccgccaccgcgccc

SEQ ID NO: 1079140 - RNA, 22 nt, Human
ccaaagugcugggauuacaggc

SEQ ID NO: 1079141 - RNA, 22 nt, Human
ccaaagugcugggauuacaggc

SEQ ID NO: 1079142 - RNA, 24 nt, Human
ccaaagugcugggauuacaggcgu

SEQ ID NO: 1079143 - RNA, 23 nt, Human
cccgaguagcugggacuacaggc

SEQ ID NO: 1079144 - RNA, 24 nt, Human
cccgaguagcugggacuacaggcg

SEQ ID NO: 1079145 - RNA, 20 nt, Human
ccugaccucaugauccaccc

SEQ ID NO: 1079146 - RNA, 23 nt, Human
ccugccucagccucccgaguagc

SEQ ID NO: 1079147 - RNA, 21 nt, Human
cgcccaggccggacugcggac

SEQ ID NO: 1079148 - RNA, 24 nt, Human
cgccucggccucccaaagugcugg

SEQ ID NO: 1079149 - RNA, 19 nt, Human
cgcucugucgcccaggccg

SEQ ID NO: 1079150 - RNA, 24 nt, Human
cgggguuucaccuuguuagccagg

SEQ ID NO: 1079151 - RNA, 24 nt, Human
cucagccucccgaguagcugggac

SEQ ID NO: 1079152 - RNA, 24 nt, Human
cuccugaccucaugauccacccgc

SEQ ID NO: 1079153 - RNA, 22 nt, Human
cuccugccucagccucccgagu

SEQ ID NO: 1079154 - RNA, 23 nt, Human
cucugucgcccaggccggacugc

SEQ ID NO: 1079155 - RNA, 23 nt, Human
cugccucagccucccgaguagcu

SEQ ID NO: 1079156 - RNA, 22 nt, Human
gaccucaugauccacccgccuc

SEQ ID NO: 1079157 - RNA, 20 nt, Human
gagacgggguuucaccuugu

SEQ ID NO: 1079158 - RNA, 20 nt, Human
gaguagcugggacuacaggc

SEQ ID NO: 1079159 - RNA, 25 nt, Human
gaguagcugggacuacaggcgcccg

SEQ ID NO: 1079160 - RNA, 18 nt, Human
gauuacaggcgugagcca

SEQ ID NO: 1079161 - RNA, 22 nt, Human
gauuacaggcgugagccaccgc

SEQ ID NO: 1079162 - RNA, 22 nt, Human
gauuacaggcgugagccaccgc

SEQ ID NO: 1079163 - RNA, 23 nt, Human
gcccggcuaauuuuuuguauuuu

SEQ ID NO: 1079164 - RNA, 21 nt, Human
gccggacugcggacugcagug

SEQ ID NO: 1079165 - RNA, 25 nt, Human
gcuucccggguucacgccauucucc

SEQ ID NO: 1079166 - RNA, 20 nt, Human
ggucucgaucuccugaccuc

SEQ ID NO: 1079167 - RNA, 24 nt, Human
uaauuuuuuguauuuuuaguagag

SEQ ID NO: 1079168 - RNA, 25 nt, Human
uaauuuuuuguauuuuuaguagaga

SEQ ID NO: 1079169 - RNA, 23 nt, Human
uacaggcgugagccaccgcgccc

SEQ ID NO: 1079170 - RNA, 24 nt, Human
uaguagagacgggguuucaccuug

SEQ ID NO: 1079171 - RNA, 26 nt, Human
uaguagagacgggguuucaccuuguu

SEQ ID NO: 1079172 - RNA, 24 nt, Human
ucaccuuguuagccaggauggucu

SEQ ID NO: 1079173 - RNA, 23 nt, Human
ucacugcaagcuccgcuucccgg

SEQ ID NO: 1079174 - RNA, 24 nt, Human
ucacugcaagcuccgcuucccggg

SEQ ID NO: 1079175 - RNA, 23 nt, Human
ucagccucccgaguagcugggac

SEQ ID NO: 1079176 - RNA, 24 nt, Human
ucccaaagugcugggauuacaggc

SEQ ID NO: 1079177 - RNA, 24 nt, Human
ucccgaguagcugggacuacaggc

SEQ ID NO: 1079178 - RNA, 20 nt, Human
ucccggguucacgccauucu

SEQ ID NO: 1079179 - RNA, 21 nt, Human
ucccggguucacgccauucuc

SEQ ID NO: 1079180 - RNA, 24 nt, Human
ucccggguucacgccauucuccug

SEQ ID NO: 1079181 - RNA, 18 nt, Human
ucggccucccaaagugcu

SEQ ID NO: 1079182 - RNA, 18 nt, Human
ucucgcucugucgcccag

SEQ ID NO: 1079183 - RNA, 19 nt, Human
ucucgcucugucgcccagg

SEQ ID NO: 1079184 - RNA, 24 nt, Human
ucucgcucugucgcccaggccgga

SEQ ID NO: 1079185 - RNA, 23 nt, Human
ugaccucaugauccacccgccuc

SEQ ID NO: 1079186 - RNA, 22 nt, Human
ugagacggagucucgcucuguc

SEQ ID NO: 1079187 - RNA, 23 nt, Human
ugcaguggcgcaaucucggcuca

SEQ ID NO: 1079188 - RNA, 24 nt, Human
ugccucagccucccgaguagcugg

SEQ ID NO: 1079189 - RNA, 24 nt, Human
ugcugggauuacaggcgugagcca

SEQ ID NO: 1079190 - RNA, 21 nt, Human
ugggacuacaggcgcccgcca

SEQ ID NO: 1079191 - RNA, 22 nt, Human
ugggacuacaggcgcccgccac

SEQ ID NO: 1079192 - RNA, 23 nt, Human
ugggacuacaggcgcccgccacc

SEQ ID NO: 1079193 - RNA, 24 nt, Human
ugggacuacaggcgcccgccaccg

SEQ ID NO: 1079194 - RNA, 18 nt, Human
ugggauuacaggcgugag

SEQ ID NO: 1079195 - RNA, 19 nt, Human
ugggauuacaggcgugagc

SEQ ID NO: 1079196 - RNA, 21 nt, Human
ugggauuacaggcgugagcca

SEQ ID NO: 1079197 - RNA, 22 nt, Human
ugggauuacaggcgugagccac

SEQ ID NO: 1079198 - RNA, 23 nt, Human
ugggauuacaggcgugagccacc

SEQ ID NO: 1079199 - RNA, 24 nt, Human
ugggauuacaggcgugagccaccg

SEQ ID NO: 1079200 - RNA, 21 nt, Human
uguauuuuuaguagagacggg

SEQ ID NO: 1079201 - RNA, 22 nt, Human
uuaguagagacgggguuucacc

SEQ ID NO: 1079202 - RNA, 24 nt, Human
uuaguagagacgggguuucaccuu

SEQ ID NO: 1079203 - RNA, 25 nt, Human
uuaguagagacgggguuucaccuug

SEQ ID NO: 1079204 - RNA, 23 nt, Human
uuguauuuuuaguagagacgggg

SEQ ID NO: 1079205 - RNA, 24 nt, Human
uuuuuaguagagacgggguuucac

SEQ ID NO: 1079206 - RNA, 21 nt, Human
uuuuuguauuuuuaguagaga

SEQ ID NO: 1079207 - RNA, 24 nt, Human
uuuuuuguauuuuuaguagagacg

SEQ ID NO: 1079208 - RNA, 18 nt, Human
acacugcacuccagccug

SEQ ID NO: 1079209 - RNA, 19 nt, Human
acacugcacuccagccugc

SEQ ID NO: 1079210 - RNA, 21 nt, Human
auauuugcuucccuucuccaa

SEQ ID NO: 1079211 - RNA, 21 nt, Human
cacuccagccugcacaaccaa

SEQ ID NO: 1079212 - RNA, 18 nt, Human
cacugcacuccagccugc

SEQ ID NO: 1079213 - RNA, 22 nt, Human
cacugcacuccagccugcacaa

SEQ ID NO: 1079214 - RNA, 25 nt, Human
cacugcacuccagccugcacaacca

SEQ ID NO: 1079215 - RNA, 21 nt, Human
ccugcacaaccaagcaagucu

SEQ ID NO: 1079216 - RNA, 18 nt, Human
uauaaaauuaauagauga

SEQ ID NO: 1079217 - RNA, 20 nt, Human
uccaaauuuggaaauauuuu

SEQ ID NO: 1079218 - RNA, 22 nt, Human
ugaauaauuuaucucuucucuc

SEQ ID NO: 1079219 - RNA, 18 nt, Human
uggaaauauuuuuugcua

SEQ ID NO: 1079220 - RNA, 21 nt, Human
uucaucuguaaaaucauggug

SEQ ID NO: 1079221 - RNA, 20 nt, Human
uuuuuugcuauuauuuugaa

SEQ ID NO: 1079222 - RNA, 22 nt, Human
cugaucaccgaauggaaacacu

SEQ ID NO: 1079223 - RNA, 19 nt, Human
aaacuugaagaccaaggcc

SEQ ID NO: 1079224 - RNA, 19 nt, Human
aaagugagaggucucuggu

SEQ ID NO: 1079225 - RNA, 24 nt, Human
acagggacucuuauuccuuaaaca

SEQ ID NO: 1079226 - RNA, 18 nt, Human
acauggccucuucucugc

SEQ ID NO: 1079227 - RNA, 21 nt, Human
acccaagccugaaacagggac

SEQ ID NO: 1079228 - RNA, 24 nt, Human
agaccaaggccaggauagauaaga

SEQ ID NO: 1079229 - RNA, 18 nt, Human
aggcacccaagccugaaa

SEQ ID NO: 1079230 - RNA, 19 nt, Human
aggcacccaagccugaaac

SEQ ID NO: 1079231 - RNA, 21 nt, Human
aggguugguucuuggugaggc

SEQ ID NO: 1079232 - RNA, 22 nt, Human
auaaaaggcaacuuuugugaca

SEQ ID NO: 1079233 - RNA, 21 nt, Human
augugcccagccccagcgggc

SEQ ID NO: 1079234 - RNA, 18 nt, Human
caaagcccccagggcuuc

SEQ ID NO: 1079235 - RNA, 22 nt, Human
cagaaauuggccaacagggaca

SEQ ID NO: 1079236 - RNA, 18 nt, Human
cagaagauggucaguggu

SEQ ID NO: 1079237 - RNA, 20 nt, Human
cagcagaagauggucagugg

SEQ ID NO: 1079238 - RNA, 18 nt, Human
caguagguguacucaggc

SEQ ID NO: 1079239 - RNA, 18 nt, Human
caucaguuauguccuaau

SEQ ID NO: 1079240 - RNA, 24 nt, Human
ccaacugguacucauuguucauca

SEQ ID NO: 1079241 - RNA, 20 nt, Human
ccagcgggcugauucugcau

SEQ ID NO: 1079242 - RNA, 19 nt, Human
cccagaaauuggccaacag

SEQ ID NO: 1079243 - RNA, 24 nt, Human
ccccagggcuucuuuaaaagaccc

SEQ ID NO: 1079244 - RNA, 21 nt, Human
cuagugcauuacgucuccaca

SEQ ID NO: 1079245 - RNA, 27 nt, Human
gaagacauagaguaauguuccguuucg

SEQ ID NO: 1079246 - RNA, 18 nt, Human
gacagcgcuaacagaguu

SEQ ID NO: 1079247 - RNA, 22 nt, Human
gcagaagauggucaguggucag

SEQ ID NO: 1079248 - RNA, 20 nt, Human
ggaaaucugagagaugugcc

SEQ ID NO: 1079249 - RNA, 21 nt, Human
uaaaagaccuugcccagaaau

SEQ ID NO: 1079250 - RNA, 18 nt, Human
uaacagaguuauguggua

SEQ ID NO: 1079251 - RNA, 20 nt, Human
uagguguacucaggcaccca

SEQ ID NO: 1079252 - RNA, 20 nt, Human
uauuccuuaaacagaagaca

SEQ ID NO: 1079253 - RNA, 22 nt, Human
ucugucuggaucuucauaagaa

SEQ ID NO: 1079254 - RNA, 19 nt, Human
ucuugcacaggagguccag

SEQ ID NO: 1079255 - RNA, 18 nt, Human
ugaaacuugaagaccaag

SEQ ID NO: 1079256 - RNA, 18 nt, Human
ugacaaagcccccagggc

SEQ ID NO: 1079257 - RNA, 18 nt, Human
ugagaggucucugguguc

SEQ ID NO: 1079258 - RNA, 22 nt, Human
ugagaggucucuggugucucuu

SEQ ID NO: 1079259 - RNA, 20 nt, Human
uggcaggguugguucuuggu

SEQ ID NO: 1079260 - RNA, 18 nt, Human
ugggcuggauccaguagg

SEQ ID NO: 1079261 - RNA, 22 nt, Human
uggucagucuccauccaacugg

SEQ ID NO: 1079262 - RNA, 20 nt, Human
uggugaggcuucuuccuggc

SEQ ID NO: 1079263 - RNA, 19 nt, Human
uguaacagugugacugguc

SEQ ID NO: 1079264 - RNA, 22 nt, Human
ugugacuggucauuucucaggu

SEQ ID NO: 1079265 - RNA, 25 nt, Human
uuaggagacagcagaagauggucag

SEQ ID NO: 1079266 - RNA, 24 nt, Human
uuagucugucuggaucuucauaag

SEQ ID NO: 1079267 - RNA, 19 nt, Human
uuucucaggugauguguuc

SEQ ID NO: 1079268 - RNA, 20 nt, Human
uuugugacaaagcccccagg

SEQ ID NO: 1079269 - RNA, 19 nt, Human
aaaauguccgugagucccc

SEQ ID NO: 1079270 - RNA, 18 nt, Human
acacgucaugugcguccc

SEQ ID NO: 1079271 - RNA, 23 nt, Human
acagccucuggacgacucauccu

SEQ ID NO: 1079272 - RNA, 20 nt, Human
accaggaucuccgucuccca

SEQ ID NO: 1079273 - RNA, 21 nt, Human
accuggcuccccgggcugcag

SEQ ID NO: 1079274 - RNA, 19 nt, Human
acgcauccugucucuuccc

SEQ ID NO: 1079275 - RNA, 19 nt, Human
acucuggaacccccugccu

SEQ ID NO: 1079276 - RNA, 18 nt, Human
acugagcagcugaucccc

SEQ ID NO: 1079277 - RNA, 20 nt, Human
agacaggugaagaccccugc

SEQ ID NO: 1079278 - RNA, 22 nt, Human
agcuguugcuguggccucuccu

SEQ ID NO: 1079279 - RNA, 23 nt, Human
aggaccccagcacggcccacccc

SEQ ID NO: 1079280 - RNA, 20 nt, Human
aggccucugacgagcugugu

SEQ ID NO: 1079281 - RNA, 23 nt, Human
aggcuaucaccccagggccccaa

SEQ ID NO: 1079282 - RNA, 21 nt, Human
auccugucucuucccucgcug

SEQ ID NO: 1079283 - RNA, 21 nt, Human
aucuguccuucugugucuucc

SEQ ID NO: 1079284 - RNA, 25 nt, Human
caccaggaucuccgucucccagcag

SEQ ID NO: 1079285 - RNA, 25 nt, Human
cacucuggaacccccugccuggcug

SEQ ID NO: 1079286 - RNA, 19 nt, Human
cacuggcuccugccuccac

SEQ ID NO: 1079287 - RNA, 21 nt, Human
cacuguagccacuggcuccug

SEQ ID NO: 1079288 - RNA, 23 nt, Human
cacuguagccacuggcuccugcc

SEQ ID NO: 1079289 - RNA, 22 nt, Human
caggcccuucagucacagagug

SEQ ID NO: 1079290 - RNA, 20 nt, Human
cauugagucacugucuucuu

SEQ ID NO: 1079291 - RNA, 21 nt, Human
ccacucuggaacccccugccu

SEQ ID NO: 1079292 - RNA, 23 nt, Human
cccaacucuuccaggaccccagc

SEQ ID NO: 1079293 - RNA, 19 nt, Human
cccaccccacucuggaacc

SEQ ID NO: 1079294 - RNA, 23 nt, Human
ccccagggccccaacucuuccag

SEQ ID NO: 1079295 - RNA, 22 nt, Human
ccccugugcuucugcaugugug

SEQ ID NO: 1079296 - RNA, 20 nt, Human
cccggcccugccuucugcuc

SEQ ID NO: 1079297 - RNA, 25 nt, Human
cccggcccugccuucugcucuuggc

SEQ ID NO: 1079298 - RNA, 19 nt, Human
cccggcuccuuccaccucc

SEQ ID NO: 1079299 - RNA, 21 nt, Human
cccggcuccuuccaccuccuc

SEQ ID NO: 1079300 - RNA, 18 nt, Human
cccugggcuuccucuggg

SEQ ID NO: 1079301 - RNA, 19 nt, Human
cccugucccgagccugucc

SEQ ID NO: 1079302 - RNA, 19 nt, Human
cccuucccugcucuguguc

SEQ ID NO: 1079303 - RNA, 19 nt, Human
ccgugagcugggccucugu

SEQ ID NO: 1079304 - RNA, 24 nt, Human
ccuccagggucuuuccauggagcc

SEQ ID NO: 1079305 - RNA, 19 nt, Human
ccucuggacgacucauccu

SEQ ID NO: 1079306 - RNA, 20 nt, Human
ccucuggacgacucauccug

SEQ ID NO: 1079307 - RNA, 21 nt, Human
ccucuggacgacucauccuga

SEQ ID NO: 1079308 - RNA, 18 nt, Human
ccucuggcugcccggccc

SEQ ID NO: 1079309 - RNA, 19 nt, Human
ccugaaaaauguccgugag

SEQ ID NO: 1079310 - RNA, 22 nt, Human
ccugccccuccagggucuuucc

SEQ ID NO: 1079311 - RNA, 24 nt, Human
ccuucacccucccggcucauucca

SEQ ID NO: 1079312 - RNA, 21 nt, Human
ccuuccaccuccucacccuuc

SEQ ID NO: 1079313 - RNA, 22 nt, Human
ccuuccaccuccucacccuuca

SEQ ID NO: 1079314 - RNA, 23 nt, Human
cgaaugcccucauccgcaggccc

SEQ ID NO: 1079315 - RNA, 23 nt, Human
cgaaugcccucauccgcaggccc

SEQ ID NO: 1079316 - RNA, 23 nt, Human
cgauuuccaggcucugcaguccc

SEQ ID NO: 1079317 - RNA, 19 nt, Human
cgccuucacccucccggcu

SEQ ID NO: 1079318 - RNA, 21 nt, Human
cggcagccucagucguguauu

SEQ ID NO: 1079319 - RNA, 21 nt, Human
cguggucgaaugcccucaucc

SEQ ID NO: 1079320 - RNA, 22 nt, Human
cucauccugaaaaauguccgug

SEQ ID NO: 1079321 - RNA, 24 nt, Human
cucgcuuccaccaggaucuccguc

SEQ ID NO: 1079322 - RNA, 21 nt, Human
cugcaugugugguugguuccc

SEQ ID NO: 1079323 - RNA, 20 nt, Human
cugcccggcccugccuucug

SEQ ID NO: 1079324 - RNA, 18 nt, Human
cugcccucuccucucucc

SEQ ID NO: 1079325 - RNA, 24 nt, Human
cugccgggggcgucuuccuggagu

SEQ ID NO: 1079326 - RNA, 19 nt, Human
cugccuggcuguccugucg

SEQ ID NO: 1079327 - RNA, 21 nt, Human
cugggcccugggcuuccucug

SEQ ID NO: 1079328 - RNA, 20 nt, Human
cugggccucugugucugugc

SEQ ID NO: 1079329 - RNA, 18 nt, Human
cuggugggccaaucugug

SEQ ID NO: 1079330 - RNA, 21 nt, Human
cugucucuucccucgcugugg

SEQ ID NO: 1079331 - RNA, 20 nt, Human
cuguggcagccccagucucc

SEQ ID NO: 1079332 - RNA, 21 nt, Human
cuguugcuguggccucuccuu

SEQ ID NO: 1079333 - RNA, 24 nt, Human
cuucccuucccugcucugugucuu

SEQ ID NO: 1079334 - RNA, 19 nt, Human
cuucugcaugugugguugg

SEQ ID NO: 1079335 - RNA, 19 nt, Human
cuuuaaaucguguacucgc

SEQ ID NO: 1079336 - RNA, 22 nt, Human
gaccccagcacggcccaccccc

SEQ ID NO: 1079337 - RNA, 19 nt, Human
gagcugggccucugugucu

SEQ ID NO: 1079338 - RNA, 19 nt, Human
gagcugugugaccucuggg

SEQ ID NO: 1079339 - RNA, 21 nt, Human
gcccugggcuuccucugggcc

SEQ ID NO: 1079340 - RNA, 22 nt, Human
gcucugugucuucuguggcuuu

SEQ ID NO: 1079341 - RNA, 23 nt, Human
ggcugggcccugggcuuccucug

SEQ ID NO: 1079342 - RNA, 21 nt, Human
gggcgucuuccuggagucccc

SEQ ID NO: 1079343 - RNA, 23 nt, Human
ggucuuuccauggagccuggcug

SEQ ID NO: 1079344 - RNA, 20 nt, Human
guggaaaaugcaaauuuugg

SEQ ID NO: 1079345 - RNA, 19 nt, Human
guggcagccccagucuccu

SEQ ID NO: 1079346 - RNA, 20 nt, Human
guggucgaaugcccucaucc

SEQ ID NO: 1079347 - RNA, 24 nt, Human
uaaggaggguaucuugaacuuggg

SEQ ID NO: 1079348 - RNA, 23 nt, Human
ucauccgcaggcccuucagucac

SEQ ID NO: 1079349 - RNA, 23 nt, Human
uccaccaggaucuccgucuccca

SEQ ID NO: 1079350 - RNA, 21 nt, Human
uccaggaccccagcacggccc

SEQ ID NO: 1079351 - RNA, 21 nt, Human
uccauggagccuggcugcccu

SEQ ID NO: 1079352 - RNA, 19 nt, Human
ucccgagccuguccugaau

SEQ ID NO: 1079353 - RNA, 19 nt, Human
ucccggcccccgcuugcuc

SEQ ID NO: 1079354 - RNA, 22 nt, Human
ucccuagguucguaggccucug

SEQ ID NO: 1079355 - RNA, 19 nt, Human
ucccucgccuucacccucc

SEQ ID NO: 1079356 - RNA, 18 nt, Human
uccucugggccacugcug

SEQ ID NO: 1079357 - RNA, 18 nt, Human
uccuggaguccaaagucg

SEQ ID NO: 1079358 - RNA, 19 nt, Human
uccugugccugccccucca

SEQ ID NO: 1079359 - RNA, 20 nt, Human
ucguagacaggugaagaccc

SEQ ID NO: 1079360 - RNA, 25 nt, Human
ucuccaucuccuucaucccccugug

SEQ ID NO: 1079361 - RNA, 20 nt, Human
ucucccagcagaaccuugcc

SEQ ID NO: 1079362 - RNA, 21 nt, Human
ucucccagcagaaccuugccu

SEQ ID NO: 1079363 - RNA, 18 nt, Human
ucuggcucuuuuucugug

SEQ ID NO: 1079364 - RNA, 23 nt, Human
ucugggccacugcugucuccugu

SEQ ID NO: 1079365 - RNA, 20 nt, Human
ucuguaguccuuccucucca

SEQ ID NO: 1079366 - RNA, 26 nt, Human
ucuguaguccuuccucuccaucuccu

SEQ ID NO: 1079367 - RNA, 21 nt, Human
ucuguccuucugugucuuccc

SEQ ID NO: 1079368 - RNA, 21 nt, Human
ucugucuucagcgucaccucu

SEQ ID NO: 1079369 - RNA, 24 nt, Human
ucugucuucagcgucaccucuguu

SEQ ID NO: 1079370 - RNA, 19 nt, Human
ucugugcgucucuguucuc

SEQ ID NO: 1079371 - RNA, 20 nt, Human
ucuguggcuuuuucucugcc

SEQ ID NO: 1079372 - RNA, 20 nt, Human
ucugugucuucccugcccuu

SEQ ID NO: 1079373 - RNA, 18 nt, Human
ucuucccugcccuugucc

SEQ ID NO: 1079374 - RNA, 20 nt, Human
ucuucccugcccuuguccug

SEQ ID NO: 1079375 - RNA, 23 nt, Human
ugaccucuggggucccggccccc

SEQ ID NO: 1079376 - RNA, 20 nt, Human
ugcaugugugguugguuccc

SEQ ID NO: 1079377 - RNA, 23 nt, Human
ugcccggcccugccuucugcucu

SEQ ID NO: 1079378 - RNA, 18 nt, Human
ugcccugagucccccuuc

SEQ ID NO: 1079379 - RNA, 18 nt, Human
ugcccuuguccuguuccu

SEQ ID NO: 1079380 - RNA, 22 nt, Human
ugccgggggcgucuuccuggag

SEQ ID NO: 1079381 - RNA, 23 nt, Human
ugccugccccuccagggucuuuc

SEQ ID NO: 1079382 - RNA, 19 nt, Human
uggaaaaugcaaauuuugg

SEQ ID NO: 1079383 - RNA, 23 nt, Human
uggaguccaaagucggcagccuc

SEQ ID NO: 1079384 - RNA, 18 nt, Human
uggcagccccagucuccu

SEQ ID NO: 1079385 - RNA, 20 nt, Human
uggccucuccuucccuuccc

SEQ ID NO: 1079386 - RNA, 20 nt, Human
uggccucuccuucccuuccc

SEQ ID NO: 1079387 - RNA, 20 nt, Human
uggcuccccgggcugcagcu

SEQ ID NO: 1079388 - RNA, 19 nt, Human
uggcuccugccuccaccuc

SEQ ID NO: 1079389 - RNA, 20 nt, Human
uggcugcccugagucccccu

SEQ ID NO: 1079390 - RNA, 20 nt, Human
ugggcaauggcaugcucuga

SEQ ID NO: 1079391 - RNA, 23 nt, Human
uguccuguuccucagugauccuu

SEQ ID NO: 1079392 - RNA, 21 nt, Human
ugucucuucccucgcuguggg

SEQ ID NO: 1079393 - RNA, 21 nt, Human
ugugugccuccuucgguugug

SEQ ID NO: 1079394 - RNA, 20 nt, Human
uuccaggcucugcagucccu

SEQ ID NO: 1079395 - RNA, 22 nt, Human
uuccucagugauccuuguccuc

SEQ ID NO: 1079396 - RNA, 20 nt, Human
uuccugagggguucccucgc

SEQ ID NO: 1079397 - RNA, 20 nt, Human
uucguaggccucugacgagc

SEQ ID NO: 1079398 - RNA, 26 nt, Human
uucuguggcuuuuucucugccugucu

SEQ ID NO: 1079399 - RNA, 23 nt, Human
uucugugucuucccugcccuugu

SEQ ID NO: 1079400 - RNA, 21 nt, Human
uugaggaacuuccgccuccuc

SEQ ID NO: 1079401 - RNA, 27 nt, Human
uuggcggcugaggaguccuucagcacu

SEQ ID NO: 1079402 - RNA, 20 nt, Human
uuggugucuuuaaaucgugu

SEQ ID NO: 1079403 - RNA, 24 nt, Human
uugucauugagucacugucuucuu

SEQ ID NO: 1079404 - RNA, 31 nt, Human
uuucuggugggccaaucugugugccuccuuc

SEQ ID NO: 1079405 - RNA, 20 nt, Human
aacaugguccugguucccuc

SEQ ID NO: 1079406 - RNA, 21 nt, Human
aacgggccaggcccgcccagg

SEQ ID NO: 1079407 - RNA, 25 nt, Human
accccucccaggcccuugagaguug

SEQ ID NO: 1079408 - RNA, 23 nt, Human
acccucuuggccggcagcacccc

SEQ ID NO: 1079409 - RNA, 19 nt, Human
aggcccuugagaguugagc

SEQ ID NO: 1079410 - RNA, 22 nt, Human
cacaggugaacgggccaggccc

SEQ ID NO: 1079411 - RNA, 24 nt, Human
ccuccuucccgagggcucugaucu

SEQ ID NO: 1079412 - RNA, 24 nt, Human
cgcccaggccuccuucccgagggc

SEQ ID NO: 1079413 - RNA, 20 nt, Human
cggcagcaccccucccaggc

SEQ ID NO: 1079414 - RNA, 19 nt, Human
cuccccgagggacagaaac

SEQ ID NO: 1079415 - RNA, 25 nt, Human
cuggaacaugguccugguucccucc

SEQ ID NO: 1079416 - RNA, 23 nt, Human
gggcagaacugcagggcacacag

SEQ ID NO: 1079417 - RNA, 22 nt, Human
ucccuccuggcuccccgaggga

SEQ ID NO: 1079418 - RNA, 21 nt, Human
ugagguccuggacccucuugg

SEQ ID NO: 1079419 - RNA, 18 nt, Human
ugcccguccugcccgucc

SEQ ID NO: 1079420 - RNA, 24 nt, Human
uggggcacaguccagugagguccu

SEQ ID NO: 1079421 - RNA, 24 nt, Human
ugguccugguucccuccuggcucc

SEQ ID NO: 1079422 - RNA, 23 nt, Human
uucccuccuggcuccccgaggga

SEQ ID NO: 1079423 - RNA, 21 nt, Human
uuggccggcagcaccccuccc

SEQ ID NO: 1079424 - RNA, 21 nt, Human
aaaaaguaaaggcacaaaaca

SEQ ID NO: 1079425 - RNA, 24 nt, Human
aaagugcugggauuacaggcguga

SEQ ID NO: 1079426 - RNA, 19 nt, Human
aacauagcauuugcccaca

SEQ ID NO: 1079427 - RNA, 20 nt, Human
aaccacuaggcuccaaaccu

SEQ ID NO: 1079428 - RNA, 20 nt, Human
aaccuaggucacccaaccua

SEQ ID NO: 1079429 - RNA, 22 nt, Human
aaccucuuucccauccacccac

SEQ ID NO: 1079430 - RNA, 19 nt, Human
aacgauggauaggaggugg

SEQ ID NO: 1079431 - RNA, 19 nt, Human
aacucuucccuuccccucc

SEQ ID NO: 1079432 - RNA, 20 nt, Human
aacugccugggucuccaaga

SEQ ID NO: 1079433 - RNA, 23 nt, Human
aacuggagcuugguacuaagcug

SEQ ID NO: 1079434 - RNA, 24 nt, Human
aagauaucagacuuuggcuuugcc

SEQ ID NO: 1079435 - RNA, 24 nt, Human
aagcauuccucccaaggaacucuu

SEQ ID NO: 1079436 - RNA, 23 nt, Human
aagcucccugcucucagcaagcc

SEQ ID NO: 1079437 - RNA, 19 nt, Human
aaguagcugggacuacagg

SEQ ID NO: 1079438 - RNA, 20 nt, Human
aaguagcugggacuacaggc

SEQ ID NO: 1079439 - RNA, 25 nt, Human
aaguagcugggacuacaggcgcccg

SEQ ID NO: 1079440 - RNA, 19 nt, Human
aagugcugggauuacaggc

SEQ ID NO: 1079441 - RNA, 19 nt, Human
aagugcugggauuacaggc

SEQ ID NO: 1079442 - RNA, 26 nt, Human
aagugcugggauuacaggcgugagcc

SEQ ID NO: 1079443 - RNA, 22 nt, Human
aaguuaaaccucuuucccaucc

SEQ ID NO: 1079444 - RNA, 28 nt, Human
acaccagagccaucucacaaccggaggg

SEQ ID NO: 1079445 - RNA, 20 nt, Human
acaccagagccaucucacac

SEQ ID NO: 1079446 - RNA, 23 nt, Human
acaccuggagcaugggcgucauc

SEQ ID NO: 1079447 - RNA, 22 nt, Human
accaaccaccacagccuaccau

SEQ ID NO: 1079448 - RNA, 24 nt, Human
acccaaccuaggccucccaacccu

SEQ ID NO: 1079449 - RNA, 21 nt, Human
acccacucaccuucagucccc

SEQ ID NO: 1079450 - RNA, 21 nt, Human
accuggagcaugggcgucauc

SEQ ID NO: 1079451 - RNA, 20 nt, Human
acgggguuucaccguuuuag

SEQ ID NO: 1079452 - RNA, 21 nt, Human
acucuucccuuccccuccagg

SEQ ID NO: 1079453 - RNA, 20 nt, Human
acugcaagcucugccuccca

SEQ ID NO: 1079454 - RNA, 18 nt, Human
agaaaccccuaaaccaga

SEQ ID NO: 1079455 - RNA, 23 nt, Human
agaaaccccuaaaccagaacuga

SEQ ID NO: 1079456 - RNA, 20 nt, Human
agaaaguaacaacagccagu

SEQ ID NO: 1079457 - RNA, 18 nt, Human
agacucagaaggagguca

SEQ ID NO: 1079458 - RNA, 23 nt, Human
agagccaucucacacacuagcuc

SEQ ID NO: 1079459 - RNA, 27 nt, Human
agcaccaaccaccacagccuaccauuc

SEQ ID NO: 1079460 - RNA, 19 nt, Human
aggagaaaguaacaacagc

SEQ ID NO: 1079461 - RNA, 20 nt, Human
aggcagcaccaaccaccaac

SEQ ID NO: 1079462 - RNA, 23 nt, Human
aggcagcaccaaccaccacagcc

SEQ ID NO: 1079463 - RNA, 24 nt, Human
aggccagaagggaaauauggaaag

SEQ ID NO: 1079464 - RNA, 25 nt, Human
aggcuggagugcaguggcgcaaucu

SEQ ID NO: 1079465 - RNA, 21 nt, Human
aguagagacgggguuucaccg

SEQ ID NO: 1079466 - RNA, 21 nt, Human
aguccuaagucaguagcugag

SEQ ID NO: 1079467 - RNA, 20 nt, Human
agugcaguggcgcaaucucg

SEQ ID NO: 1079468 - RNA, 24 nt, Human
agugcaguggcgcaaucucggcuc

SEQ ID NO: 1079469 - RNA, 21 nt, Human
caaaaagcugcuaagagagac

SEQ ID NO: 1079470 - RNA, 24 nt, Human
caaagugcugggauuacaggcgug

SEQ ID NO: 1079471 - RNA, 24 nt, Human
cacaacuccauggcuuuccuuccu

SEQ ID NO: 1079472 - RNA, 19 nt, Human
cacagccuaccauucccuc

SEQ ID NO: 1079473 - RNA, 24 nt, Human
caccagagccaucucacacacuag

SEQ ID NO: 1079474 - RNA, 24 nt, Human
caccguuuuagccgggauggucuc

SEQ ID NO: 1079475 - RNA, 22 nt, Human
cacgccauucuccugccucagc

SEQ ID NO: 1079476 - RNA, 18 nt, Human
cagcaccaaccaccacag

SEQ ID NO: 1079477 - RNA, 20 nt, Human
cagcaccaaccaccacagcc

SEQ ID NO: 1079478 - RNA, 20 nt, Human
cagcaccaaccaccacagcc

SEQ ID NO: 1079479 - RNA, 18 nt, Human
cagcaucccagacucgug

SEQ ID NO: 1079480 - RNA, 21 nt, Human
caggcgcccgccacuacgccc

SEQ ID NO: 1079481 - RNA, 23 nt, Human
cauccucugucucucucccuacu

SEQ ID NO: 1079482 - RNA, 27 nt, Human
cauggggaagggagaugucuuagaggc

SEQ ID NO: 1079483 - RNA, 20 nt, Human
ccaaagugcugggauuacag

SEQ ID NO: 1079484 - RNA, 22 nt, Human
ccaaagugcugggauuacaggc

SEQ ID NO: 1079485 - RNA, 22 nt, Human
ccaaagugcugggauuacaggc

SEQ ID NO: 1079486 - RNA, 24 nt, Human
ccaaagugcugggauuacaggcgu

SEQ ID NO: 1079487 - RNA, 21 nt, Human
ccaacaccauggggaagggag

SEQ ID NO: 1079488 - RNA, 21 nt, Human
ccaaucucaaaaagcugcuaa

SEQ ID NO: 1079489 - RNA, 18 nt, Human
ccagaaaccccuaaacca

SEQ ID NO: 1079490 - RNA, 22 nt, Human
ccauuggccauggcuccuaugg

SEQ ID NO: 1079491 - RNA, 20 nt, Human
cccaaggaacucuucccuuc

SEQ ID NO: 1079492 - RNA, 23 nt, Human
cccaaguagcugggacuacaggc

SEQ ID NO: 1079493 - RNA, 23 nt, Human
cccaaguagcugggacuacaggc

SEQ ID NO: 1079494 - RNA, 24 nt, Human
cccacucaccuucaguccccaaaa

SEQ ID NO: 1079495 - RNA, 18 nt, Human
cccacuuccucuguccuc

SEQ ID NO: 1079496 - RNA, 22 nt, Human
cccaggcuggagugcaguggcg

SEQ ID NO: 1079497 - RNA, 20 nt, Human
cccagguucacgccauucuc

SEQ ID NO: 1079498 - RNA, 25 nt, Human
ccccuaaaccagaacugaaaugucu

SEQ ID NO: 1079499 - RNA, 21 nt, Human
ccccuggcccuucagcuccca

SEQ ID NO: 1079500 - RNA, 20 nt, Human
ccgcgcccggccgcacuuca

SEQ ID NO: 1079501 - RNA, 26 nt, Human
ccggugguccucagauaccauccucu

SEQ ID NO: 1079502 - RNA, 23 nt, Human
ccgugaaauacagguuggaaagg

SEQ ID NO: 1079503 - RNA, 22 nt, Human
ccuaugggucgguauaugaggc

SEQ ID NO: 1079504 - RNA, 18 nt, Human
ccucagauaccauccucu

SEQ ID NO: 1079505 - RNA, 19 nt, Human
ccuccaaguuccuagugga

SEQ ID NO: 1079506 - RNA, 20 nt, Human
ccucccaaggaacucuuccc

SEQ ID NO: 1079507 - RNA, 21 nt, Human
ccucccaaggaacucuucccu

SEQ ID NO: 1079508 - RNA, 23 nt, Human
ccugccucagccucccaaguagc

SEQ ID NO: 1079509 - RNA, 20 nt, Human
ccuugaggaguuccguaacc

SEQ ID NO: 1079510 - RNA, 24 nt, Human
cgcucugucgcccaggcuggagug

SEQ ID NO: 1079511 - RNA, 24 nt, Human
cgggguuucaccguuuuagccggg

SEQ ID NO: 1079512 - RNA, 22 nt, Human
cuaaaacuaagcccucucccca

SEQ ID NO: 1079513 - RNA, 21 nt, Human
cuaggucacccaaccuaggcc

SEQ ID NO: 1079514 - RNA, 20 nt, Human
cucaaaaagcugcuaagaga

SEQ ID NO: 1079515 - RNA, 22 nt, Human
cucaaaaagcugcuaagagaga

SEQ ID NO: 1079516 - RNA, 22 nt, Human
cucacacacuagcuccuguccu

SEQ ID NO: 1079517 - RNA, 18 nt, Human
cucagcaagcccaacacc

SEQ ID NO: 1079518 - RNA, 24 nt, Human
cucagccucccaaguagcugggac

SEQ ID NO: 1079519 - RNA, 26 nt, Human
cucccaacccuggggaaaggcucuuu

SEQ ID NO: 1079520 - RNA, 18 nt, Human
cuccccagccugaugccc

SEQ ID NO: 1079521 - RNA, 24 nt, Human
cuccugaccucgugauccgcccgc

SEQ ID NO: 1079522 - RNA, 25 nt, Human
cuccugccucagccucccaaguagc

SEQ ID NO: 1079523 - RNA, 21 nt, Human
cucgcucugucgcccaggcug

SEQ ID NO: 1079524 - RNA, 24 nt, Human
cucgcucugucgcccaggcuggag

SEQ ID NO: 1079525 - RNA, 19 nt, Human
cucucagcaagcccaacac

SEQ ID NO: 1079526 - RNA, 24 nt, Human
cugcaagcucugccucccagguuc

SEQ ID NO: 1079527 - RNA, 23 nt, Human
cugccucagccucccaaguagcu

SEQ ID NO: 1079528 - RNA, 29 nt, Human
cuuaccgccaagugaacugcuuuucccag

SEQ ID NO: 1079529 - RNA, 22 nt, Human
gaaaccccuaaaccagaacuga

SEQ ID NO: 1079530 - RNA, 20 nt, Human
gaacucuucccuuccccucc

SEQ ID NO: 1079531 - RNA, 25 nt, Human
gaccccuggcccuucagcucccagg

SEQ ID NO: 1079532 - RNA, 22 nt, Human
gaccucgugauccgcccgccuc

SEQ ID NO: 1079533 - RNA, 22 nt, Human
gaccucgugauccgcccgccuc

SEQ ID NO: 1079534 - RNA, 24 nt, Human
gaccucgugauccgcccgccucgg

SEQ ID NO: 1079535 - RNA, 21 nt, Human
gagacggagucucgcucuguc

SEQ ID NO: 1079536 - RNA, 18 nt, Human
gauuacaggcgugagcca

SEQ ID NO: 1079537 - RNA, 22 nt, Human
gauuacaggcgugagccaccgc

SEQ ID NO: 1079538 - RNA, 22 nt, Human
gauuacaggcgugagccaccgc

SEQ ID NO: 1079539 - RNA, 20 nt, Human
gcccacaggccaccaguucu

SEQ ID NO: 1079540 - RNA, 21 nt, Human
gcccagccuuucugcugcugg

SEQ ID NO: 1079541 - RNA, 19 nt, Human
gcccaggcuggagugcagu

SEQ ID NO: 1079542 - RNA, 20 nt, Human
gcccaggcuggagugcagug

SEQ ID NO: 1079543 - RNA, 23 nt, Human
gcccggcuaauuuuuuguauuuu

SEQ ID NO: 1079544 - RNA, 19 nt, Human
gcccucuccccagccugau

SEQ ID NO: 1079545 - RNA, 25 nt, Human
gccucccagguucacgccauucucc

SEQ ID NO: 1079546 - RNA, 23 nt, Human
gccucggccucccaaagugcugg

SEQ ID NO: 1079547 - RNA, 20 nt, Human
gccuucuaaccagccugugg

SEQ ID NO: 1079548 - RNA, 25 nt, Human
gcucugucgcccaggcuggagugca

SEQ ID NO: 1079549 - RNA, 19 nt, Human
gcuggagugcaguggcgca

SEQ ID NO: 1079550 - RNA, 21 nt, Human
ggaaagcauuccucccaagga

SEQ ID NO: 1079551 - RNA, 24 nt, Human
ggagaaugugaagauaucagacuu

SEQ ID NO: 1079552 - RNA, 20 nt, Human
ggucucgaucuccugaccuc

SEQ ID NO: 1079553 - RNA, 19 nt, Human
guagagacgggguuucacc

SEQ ID NO: 1079554 - RNA, 24 nt, Human
gugauccgcccgccucggccuccc

SEQ ID NO: 1079555 - RNA, 20 nt, Human
uaaaggcacaaaacauagca

SEQ ID NO: 1079556 - RNA, 21 nt, Human
uaaccaaaaggagaaaguaac

SEQ ID NO: 1079557 - RNA, 21 nt, Human
uaagagagacucagaaggagg

SEQ ID NO: 1079558 - RNA, 24 nt, Human
uaauuuuuuguauuuuuaguagag

SEQ ID NO: 1079559 - RNA, 23 nt, Human
uacaggcgugagccaccgcgccc

SEQ ID NO: 1079560 - RNA, 21 nt, Human
uacccuagccuucagcagcuc

SEQ ID NO: 1079561 - RNA, 24 nt, Human
uaccuaaggagggcugagccuuca

SEQ ID NO: 1079562 - RNA, 24 nt, Human
uaccuugugcccucauaaugguuu

SEQ ID NO: 1079563 - RNA, 26 nt, Human
uaggaggcuuccaaguaguaaagcuc

SEQ ID NO: 1079564 - RNA, 21 nt, Human
uaguagagacgggguuucacc

SEQ ID NO: 1079565 - RNA, 22 nt, Human
uaguagagacgggguuucaccg

SEQ ID NO: 1079566 - RNA, 25 nt, Human
uaguagagacgggguuucaccguuu

SEQ ID NO: 1079567 - RNA, 22 nt, Human
uauaggcaagcauuuggggacc

SEQ ID NO: 1079568 - RNA, 22 nt, Human
ucaaagaagaaggccucugaug

SEQ ID NO: 1079569 - RNA, 18 nt, Human
ucacugcaagcucugccu

SEQ ID NO: 1079570 - RNA, 18 nt, Human
ucacugcaagcucugccu

SEQ ID NO: 1079571 - RNA, 19 nt, Human
ucacugcaagcucugccuc

SEQ ID NO: 1079572 - RNA, 24 nt, Human
ucacugcaagcucugccucccagg

SEQ ID NO: 1079573 - RNA, 20 nt, Human
ucagccucccaaguagcugg

SEQ ID NO: 1079574 - RNA, 22 nt, Human
ucaguagcugaggguaggagac

SEQ ID NO: 1079575 - RNA, 24 nt, Human
ucccaaagugcugggauuacaggc

SEQ ID NO: 1079576 - RNA, 22 nt, Human
ucccaacccuggggaaaggcuc

SEQ ID NO: 1079577 - RNA, 25 nt, Human
ucccaaggaacucuucccuuccccu

SEQ ID NO: 1079578 - RNA, 24 nt, Human
ucccaaguagcugggacuacaggc

SEQ ID NO: 1079579 - RNA, 19 nt, Human
ucccagguucacgccauuc

SEQ ID NO: 1079580 - RNA, 21 nt, Human
ucccagguucacgccauucuc

SEQ ID NO: 1079581 - RNA, 24 nt, Human
ucccagguucacgccauucuccug

SEQ ID NO: 1079582 - RNA, 23 nt, Human
ucccauccacccacucaccuuca

SEQ ID NO: 1079583 - RNA, 22 nt, Human
uccccagccugaugcccagccu

SEQ ID NO: 1079584 - RNA, 24 nt, Human
ucgcccaggcuggagugcaguggc

SEQ ID NO: 1079585 - RNA, 24 nt, Human
ucgcucugucgcccaggcuggagu

SEQ ID NO: 1079586 - RNA, 18 nt, Human
ucggccucccaaagugcu

SEQ ID NO: 1079587 - RNA, 21 nt, Human
ucucagcaagcccaacaccau

SEQ ID NO: 1079588 - RNA, 19 nt, Human
ucucgcucugucgcccagg

SEQ ID NO: 1079589 - RNA, 23 nt, Human
ucucgcucugucgcccaggcugg

SEQ ID NO: 1079590 - RNA, 24 nt, Human
ucucgcucugucgcccaggcugga

SEQ ID NO: 1079591 - RNA, 26 nt, Human
ucucgcucugucgcccaggcuggagu

SEQ ID NO: 1079592 - RNA, 27 nt, Human
ucucgcucugucgcccaggcuggagug

SEQ ID NO: 1079593 - RNA, 24 nt, Human
ucugucgcccaggcuggagugcag

SEQ ID NO: 1079594 - RNA, 20 nt, Human
ucuuucccauccacccacuc

SEQ ID NO: 1079595 - RNA, 22 nt, Human
ugaccccuggcccuucagcucc

SEQ ID NO: 1079596 - RNA, 23 nt, Human
ugaccccuggcccuucagcuccc

SEQ ID NO: 1079597 - RNA, 23 nt, Human
ugaggggcugauccuauugcaaa

SEQ ID NO: 1079598 - RNA, 22 nt, Human
ugcaguggcgcaaucucggcuc

SEQ ID NO: 1079599 - RNA, 23 nt, Human
ugcaguggcgcaaucucggcuca

SEQ ID NO: 1079600 - RNA, 21 nt, Human
ugcccagagaucuuacgaggc

SEQ ID NO: 1079601 - RNA, 24 nt, Human
ugcccagagaucuuacgaggcuug

SEQ ID NO: 1079602 - RNA, 24 nt, Human
ugccucagccucccaaguagcugg

SEQ ID NO: 1079603 - RNA, 19 nt, Human
ugccucccagguucacgcc

SEQ ID NO: 1079604 - RNA, 25 nt, Human
ugcuaagagagacucagaaggaggu

SEQ ID NO: 1079605 - RNA, 24 nt, Human
ugcugggauuacaggcgugagcca

SEQ ID NO: 1079606 - RNA, 22 nt, Human
ugcuucucuuucuuucccccuc

SEQ ID NO: 1079607 - RNA, 23 nt, Human
uggaaggcauaaagggccaacca

SEQ ID NO: 1079608 - RNA, 23 nt, Human
uggagugcaguggcgcaaucucg

SEQ ID NO: 1079609 - RNA, 24 nt, Human
uggagugcaguggcgcaaucucgg

SEQ ID NO: 1079610 - RNA, 22 nt, Human
uggaugaauaugguuaugaggu

SEQ ID NO: 1079611 - RNA, 21 nt, Human
uggccaggagggguggggcca

SEQ ID NO: 1079612 - RNA, 21 nt, Human
uggcccuucagcucccagucu

SEQ ID NO: 1079613 - RNA, 21 nt, Human
ugggacuacaggcgcccgcca

SEQ ID NO: 1079614 - RNA, 22 nt, Human
ugggacuacaggcgcccgccac

SEQ ID NO: 1079615 - RNA, 22 nt, Human
ugggacuacaggcgcccgccac

SEQ ID NO: 1079616 - RNA, 24 nt, Human
ugggacuacaggcgcccgccacua

SEQ ID NO: 1079617 - RNA, 23 nt, Human
ugggagaaugugaagauaucaga

SEQ ID NO: 1079618 - RNA, 18 nt, Human
ugggauuacaggcgugag

SEQ ID NO: 1079619 - RNA, 19 nt, Human
ugggauuacaggcgugagc

SEQ ID NO: 1079620 - RNA, 21 nt, Human
ugggauuacaggcgugagcca

SEQ ID NO: 1079621 - RNA, 22 nt, Human
ugggauuacaggcgugagccac

SEQ ID NO: 1079622 - RNA, 23 nt, Human
ugggauuacaggcgugagccacc

SEQ ID NO: 1079623 - RNA, 24 nt, Human
ugggauuacaggcgugagccaccg

SEQ ID NO: 1079624 - RNA, 18 nt, Human
ugguaugaugggcuaucc

SEQ ID NO: 1079625 - RNA, 22 nt, Human
ugguaugaugggcuauccugcu

SEQ ID NO: 1079626 - RNA, 21 nt, Human
uguagcccuucuuaccgccaa

SEQ ID NO: 1079627 - RNA, 21 nt, Human
uguauuuuuaguagagacggg

SEQ ID NO: 1079628 - RNA, 21 nt, Human
uguugcuggacaagugggaga

SEQ ID NO: 1079629 - RNA, 22 nt, Human
uuaguagagacgggguuucacc

SEQ ID NO: 1079630 - RNA, 22 nt, Human
uuaguagagacgggguuucacc

SEQ ID NO: 1079631 - RNA, 24 nt, Human
uuaguagagacgggguuucaccgu

SEQ ID NO: 1079632 - RNA, 20 nt, Human
uuggagaaccuguugcuggg

SEQ ID NO: 1079633 - RNA, 24 nt, Human
uuuuuaguagagacgggguuucac

SEQ ID NO: 1079634 - RNA, 21 nt, Human
uuuuuguauuuuuaguagaga

SEQ ID NO: 1079635 - RNA, 24 nt, Human
uuuuuuguauuuuuaguagagacg

SEQ ID NO: 1079636 - RNA, 20 nt, Human
aaaaagcuucugaaacaaaa

SEQ ID NO: 1079637 - RNA, 19 nt, Human
aaacuacaaaagcugcuga

SEQ ID NO: 1079638 - RNA, 21 nt, Human
aacaggaaggaaagugucuga

SEQ ID NO: 1079639 - RNA, 22 nt, Human
aagagaccaagaccaagaggug

SEQ ID NO: 1079640 - RNA, 26 nt, Human
agaccaagaccaagaggugugaggaa

SEQ ID NO: 1079641 - RNA, 20 nt, Human
agagaacaggaaggaaagug

SEQ ID NO: 1079642 - RNA, 20 nt, Human
cuggaaagaacucaaccagc

SEQ ID NO: 1079643 - RNA, 23 nt, Human
gcaggcucuuuucugcaagaucu

SEQ ID NO: 1079644 - RNA, 19 nt, Human
uaaaacuacaaaagcugcu

SEQ ID NO: 1079645 - RNA, 21 nt, Human
uaaaacuacaaaagcugcuga

SEQ ID NO: 1079646 - RNA, 21 nt, Human
uacaaaagcugcugagaugaa

SEQ ID NO: 1079647 - RNA, 20 nt, Human
ugaacaagggaaacacugca

SEQ ID NO: 1079648 - RNA, 19 nt, Human
ugaagagaccaagaccaag

SEQ ID NO: 1079649 - RNA, 21 nt, Human
ugaagagaccaagaccaagag

SEQ ID NO: 1079650 - RNA, 18 nt, Human
uggaaagaacucaaccag

SEQ ID NO: 1079651 - RNA, 21 nt, Human
uggaaagaacucaaccagcug

SEQ ID NO: 1079652 - RNA, 23 nt, Human
ugggucggcuuagcccucuuugc

SEQ ID NO: 1079653 - RNA, 19 nt, Human
uuagcccucuuugccucau

SEQ ID NO: 1079654 - RNA, 21 nt, Human
aacagagcagacugaaggaga

SEQ ID NO: 1079655 - RNA, 19 nt, Human
aagagccaauaaagagagg

SEQ ID NO: 1079656 - RNA, 20 nt, Human
aagagcuuguccggguuuug

SEQ ID NO: 1079657 - RNA, 21 nt, Human
agagccaauaaagagaggcgg

SEQ ID NO: 1079658 - RNA, 22 nt, Human
auuccucagcaucuucuugucg

SEQ ID NO: 1079659 - RNA, 21 nt, Human
cacacacagcgcacacagggu

SEQ ID NO: 1079660 - RNA, 19 nt, Human
cacacaggguuuacagcag

SEQ ID NO: 1079661 - RNA, 18 nt, Human
cacagcgcacacaggguu

SEQ ID NO: 1079662 - RNA, 21 nt, Human
cacaggguuuacagcaggucc

SEQ ID NO: 1079663 - RNA, 22 nt, Human
cacgaaccccaaggcauccccu

SEQ ID NO: 1079664 - RNA, 18 nt, Human
cagacagcagaauuaaac

SEQ ID NO: 1079665 - RNA, 24 nt, Human
cagcagaauuaaacagagcagacu

SEQ ID NO: 1079666 - RNA, 20 nt, Human
cagcauuauuucagaaauau

SEQ ID NO: 1079667 - RNA, 18 nt, Human
ccccaaggcauccccuuu

SEQ ID NO: 1079668 - RNA, 18 nt, Human
ccuacaaagcggacacug

SEQ ID NO: 1079669 - RNA, 20 nt, Human
cgaaccccaaggcauccccu

SEQ ID NO: 1079670 - RNA, 23 nt, Human
cuagcccauuuuugcaaagggag

SEQ ID NO: 1079671 - RNA, 23 nt, Human
cucacacacagcgcacacagggu

SEQ ID NO: 1079672 - RNA, 19 nt, Human
cugaaggagagaucuucau

SEQ ID NO: 1079673 - RNA, 21 nt, Human
cugggcucacacacagcgcac

SEQ ID NO: 1079674 - RNA, 22 nt, Human
gaaugaagccuaaguauuccuc

SEQ ID NO: 1079675 - RNA, 21 nt, Human
gcaaugucuauguaagcaguu

SEQ ID NO: 1079676 - RNA, 23 nt, Human
gcagacagcagaauuaaacagag

SEQ ID NO: 1079677 - RNA, 18 nt, Human
gcgggaagugagugugag

SEQ ID NO: 1079678 - RNA, 18 nt, Human
ggaagugagugugaggug

SEQ ID NO: 1079679 - RNA, 19 nt, Human
gggaaagcaaccaaugccu

SEQ ID NO: 1079680 - RNA, 27 nt, Human
guaaacucauucauuagccaaacaaag

SEQ ID NO: 1079681 - RNA, 23 nt, Human
gugguguccuacaaagcggacac

SEQ ID NO: 1079682 - RNA, 23 nt, Human
guuucaaccaaaugauuuugauu

SEQ ID NO: 1079683 - RNA, 19 nt, Human
uaaacagagcagacugaag

SEQ ID NO: 1079684 - RNA, 20 nt, Human
uagccaaacaaagcugucua

SEQ ID NO: 1079685 - RNA, 18 nt, Human
uaucucaggaaucagcau

SEQ ID NO: 1079686 - RNA, 21 nt, Human
ucagcauuauuucagaaauau

SEQ ID NO: 1079687 - RNA, 31 nt, Human
ucauuuuuaucauuuaucaaaaacuaaaggg

SEQ ID NO: 1079688 - RNA, 19 nt, Human
ucccucagcacaauuacua

SEQ ID NO: 1079689 - RNA, 22 nt, Human
ucgcuuccuucaccuuguuuuu

SEQ ID NO: 1079690 - RNA, 20 nt, Human
ucugcaaugucuauguaagc

SEQ ID NO: 1079691 - RNA, 21 nt, Human
ucuucuuugauaacuggcuca

SEQ ID NO: 1079692 - RNA, 23 nt, Human
ucuugcucuucuucauugacugg

SEQ ID NO: 1079693 - RNA, 25 nt, Human
ucuugcucuucuucauugacugguu

SEQ ID NO: 1079694 - RNA, 24 nt, Human
ugaaggagagaucuucauuauuug

SEQ ID NO: 1079695 - RNA, 20 nt, Human
ugacugguuuuuggggccau

SEQ ID NO: 1079696 - RNA, 21 nt, Human
ugagacuggggaucaaaucca

SEQ ID NO: 1079697 - RNA, 23 nt, Human
ugagacuggggaucaaauccacu

SEQ ID NO: 1079698 - RNA, 20 nt, Human
ugaucaccuugacugucugg

SEQ ID NO: 1079699 - RNA, 23 nt, Human
ugcucuucuucauugacugguuu

SEQ ID NO: 1079700 - RNA, 23 nt, Human
uggaauacagaggaaugaacuuc

SEQ ID NO: 1079701 - RNA, 24 nt, Human
ugggcucaaaggcaacuccagggu

SEQ ID NO: 1079702 - RNA, 18 nt, Human
uguccauuuuucauuaug

SEQ ID NO: 1079703 - RNA, 23 nt, Human
ugucuauguaagcaguuucccuc

SEQ ID NO: 1079704 - RNA, 18 nt, Human
uguguacacagaagcaug

SEQ ID NO: 1079705 - RNA, 24 nt, Human
uucaccuuguuuuucuugcucuuc

SEQ ID NO: 1079706 - RNA, 25 nt, Human
uugugcacgaaccccaaggcauccc

SEQ ID NO: 1079707 - RNA, 24 nt, Human
uuucacaaauuuacaaguguugcu

SEQ ID NO: 1079708 - RNA, 23 nt, Human
aaacaggccagcagagccugguu

SEQ ID NO: 1079709 - RNA, 18 nt, Human
aagcaccugccucugagc

SEQ ID NO: 1079710 - RNA, 25 nt, Human
aagcagagaagagacacgaugcacg

SEQ ID NO: 1079711 - RNA, 19 nt, Human
aagcuauacccugucccua

SEQ ID NO: 1079712 - RNA, 18 nt, Human
acacaguacacgaaguuc

SEQ ID NO: 1079713 - RNA, 19 nt, Human
acccaguucuuuguuuugg

SEQ ID NO: 1079714 - RNA, 19 nt, Human
agaauggaggugacuuuuu

SEQ ID NO: 1079715 - RNA, 22 nt, Human
agaccacuccaggguggacggg

SEQ ID NO: 1079716 - RNA, 20 nt, Human
agagaagugggggaagagag

SEQ ID NO: 1079717 - RNA, 21 nt, Human
agagagaaaaagcagagaaga

SEQ ID NO: 1079718 - RNA, 21 nt, Human
agagguagggcagccccaggc

SEQ ID NO: 1079719 - RNA, 22 nt, Human
agccccaggcucgaggacuccc

SEQ ID NO: 1079720 - RNA, 19 nt, Human
agccugguuaacagucugg

SEQ ID NO: 1079721 - RNA, 20 nt, Human
agcgggcucagcccugcucc

SEQ ID NO: 1079722 - RNA, 21 nt, Human
aggaaggaaggaaagagcgag

SEQ ID NO: 1079723 - RNA, 18 nt, Human
aggcaggcgggcagccaa

SEQ ID NO: 1079724 - RNA, 20 nt, Human
aggcaggcgggcagccaagc

SEQ ID NO: 1079725 - RNA, 22 nt, Human
aggccuguggcuggggaaacag

SEQ ID NO: 1079726 - RNA, 19 nt, Human
agguagggcagccccaggc

SEQ ID NO: 1079727 - RNA, 25 nt, Human
auggcacccugccugaucuucaggg

SEQ ID NO: 1079728 - RNA, 23 nt, Human
caaacccucaagccuaucaggag

SEQ ID NO: 1079729 - RNA, 20 nt, Human
caagacagcaggugcagagg

SEQ ID NO: 1079730 - RNA, 21 nt, Human
caaggaagcaacuccagccuu

SEQ ID NO: 1079731 - RNA, 20 nt, Human
caagucccuggcugaagaca

SEQ ID NO: 1079732 - RNA, 18 nt, Human
caauucuccuucugcucc

SEQ ID NO: 1079733 - RNA, 23 nt, Human
cacagauuggagccacugcccaa

SEQ ID NO: 1079734 - RNA, 18 nt, Human
caccccucauuuuguuuc

SEQ ID NO: 1079735 - RNA, 23 nt, Human
cacccuguagccuuuggcccacc

SEQ ID NO: 1079736 - RNA, 25 nt, Human
caccuguagccacagugugguuggc

SEQ ID NO: 1079737 - RNA, 22 nt, Human
cacgagccuggguccauccccu

SEQ ID NO: 1079738 - RNA, 24 nt, Human
cacgcagugcagcuaauguguggc

SEQ ID NO: 1079739 - RNA, 21 nt, Human
cacugaccccagggcucuccu

SEQ ID NO: 1079740 - RNA, 25 nt, Human
cagaaccccuaggguacaguacaaa

SEQ ID NO: 1079741 - RNA, 21 nt, Human
cagcagggcaaagccccggcu

SEQ ID NO: 1079742 - RNA, 19 nt, Human
caggagguagagggcaaga

SEQ ID NO: 1079743 - RNA, 26 nt, Human
cagggcaaagccccggcuccccuguc

SEQ ID NO: 1079744 - RNA, 18 nt, Human
cagggccuuccuucucuc

SEQ ID NO: 1079745 - RNA, 19 nt, Human
caggguggacgggcugggg

SEQ ID NO: 1079746 - RNA, 22 nt, Human
cauuuuguuuccuucucugaag

SEQ ID NO: 1079747 - RNA, 23 nt, Human
ccagaaccccuaggguacaguac

SEQ ID NO: 1079748 - RNA, 21 nt, Human
ccagcagagccugguuaacag

SEQ ID NO: 1079749 - RNA, 18 nt, Human
ccagcucucccuugcucu

SEQ ID NO: 1079750 - RNA, 20 nt, Human
ccaggagaaccuugguugcu

SEQ ID NO: 1079751 - RNA, 18 nt, Human
ccagggccuuccuucucu

SEQ ID NO: 1079752 - RNA, 19 nt, Human
ccagggccuuccuucucuc

SEQ ID NO: 1079753 - RNA, 19 nt, Human
cccaaggagucccaucuuc

SEQ ID NO: 1079754 - RNA, 18 nt, Human
cccacgggccuccugagg

SEQ ID NO: 1079755 - RNA, 19 nt, Human
cccaggcucgaggacuccc

SEQ ID NO: 1079756 - RNA, 20 nt, Human
cccagugugauguggcauag

SEQ ID NO: 1079757 - RNA, 18 nt, Human
ccccagugugauguggca

SEQ ID NO: 1079758 - RNA, 19 nt, Human
ccccuggaguacccacagg

SEQ ID NO: 1079759 - RNA, 20 nt, Human
cccuaaguccugagccaccc

SEQ ID NO: 1079760 - RNA, 22 nt, Human
cccuggaguacccacaggccuu

SEQ ID NO: 1079761 - RNA, 23 nt, Human
cccuggcugaagacagacuugag

SEQ ID NO: 1079762 - RNA, 21 nt, Human
cccuggcuguugucugguggg

SEQ ID NO: 1079763 - RNA, 19 nt, Human
ccgcucucagggccaggca

SEQ ID NO: 1079764 - RNA, 22 nt, Human
ccgcugccaucgcggcccgcgc

SEQ ID NO: 1079765 - RNA, 19 nt, Human
ccucgcccaccuugggacg

SEQ ID NO: 1079766 - RNA, 18 nt, Human
ccugagggaagaggggug

SEQ ID NO: 1079767 - RNA, 20 nt, Human
ccuggacuccagcccuggcc

SEQ ID NO: 1079768 - RNA, 20 nt, Human
ccuggauccaaggguggaac

SEQ ID NO: 1079769 - RNA, 20 nt, Human
ccuggcuguugucugguggg

SEQ ID NO: 1079770 - RNA, 21 nt, Human
ccuguggcuggggaaacaggc

SEQ ID NO: 1079771 - RNA, 20 nt, Human
cuacccagggccuuccuucu

SEQ ID NO: 1079772 - RNA, 18 nt, Human
cuaggcucaguccuccgc

SEQ ID NO: 1079773 - RNA, 20 nt, Human
cuccugagggaagaggggug

SEQ ID NO: 1079774 - RNA, 21 nt, Human
cugccucugagcucaguuccc

SEQ ID NO: 1079775 - RNA, 24 nt, Human
cugcucacaauucauauauggacc

SEQ ID NO: 1079776 - RNA, 21 nt, Human
cugcugugcaaacugcugucc

SEQ ID NO: 1079777 - RNA, 18 nt, Human
cugucccuggccagcucu

SEQ ID NO: 1079778 - RNA, 22 nt, Human
cuuccugaacauagcacucugg

SEQ ID NO: 1079779 - RNA, 24 nt, Human
gaagcaccugccucugagcucagu

SEQ ID NO: 1079780 - RNA, 22 nt, Human
gagcagguggcgugccuggggc

SEQ ID NO: 1079781 - RNA, 22 nt, Human
gagccuggguccauccccuugg

SEQ ID NO: 1079782 - RNA, 23 nt, Human
gagcuaguccuucauuuccaaau

SEQ ID NO: 1079783 - RNA, 21 nt, Human
gaugguucuuuccccacuucu

SEQ ID NO: 1079784 - RNA, 19 nt, Human
gcccauggcacaugaggga

SEQ ID NO: 1079785 - RNA, 23 nt, Human
gccugggagucugaggaaaugcu

SEQ ID NO: 1079786 - RNA, 21 nt, Human
gcgggcgggcagcgggcucag

SEQ ID NO: 1079787 - RNA, 20 nt, Human
ggacaggggcugcuugagau

SEQ ID NO: 1079788 - RNA, 18 nt, Human
ggagaaccuugguugcug

SEQ ID NO: 1079789 - RNA, 20 nt, Human
ggagcagcugaaaguggccc

SEQ ID NO: 1079790 - RNA, 23 nt, Human
ggaggaaagguuugaugguucuu

SEQ ID NO: 1079791 - RNA, 21 nt, Human
ggaguccucuucccuccaccu

SEQ ID NO: 1079792 - RNA, 22 nt, Human
ggccaaagagaacagcaccaag

SEQ ID NO: 1079793 - RNA, 24 nt, Human
ggccuguggcuggggaaacaggcu

SEQ ID NO: 1079794 - RNA, 21 nt, Human
ggcgggcagcgggcucagccc

SEQ ID NO: 1079795 - RNA, 23 nt, Human
gggacggugggcaggaaccccag

SEQ ID NO: 1079796 - RNA, 22 nt, Human
gggagucugaggaaaugcucuu

SEQ ID NO: 1079797 - RNA, 22 nt, Human
gggcgggcagcgggcucagccc

SEQ ID NO: 1079798 - RNA, 18 nt, Human
gggcuggggacaggggcg

SEQ ID NO: 1079799 - RNA, 20 nt, Human
gggcuggggacaggggcugc

SEQ ID NO: 1079800 - RNA, 24 nt, Human
ggggccagcggggccgggaacugc

SEQ ID NO: 1079801 - RNA, 19 nt, Human
ggggccuaggaggcccugc

SEQ ID NO: 1079802 - RNA, 23 nt, Human
ggggcugcuugagaugacagcag

SEQ ID NO: 1079803 - RNA, 23 nt, Human
gggggaagagagaaaaagcagag

SEQ ID NO: 1079804 - RNA, 20 nt, Human
gggggugggggaagaggaag

SEQ ID NO: 1079805 - RNA, 24 nt, Human
ggguuaaagaaacuuccugaacau

SEQ ID NO: 1079806 - RNA, 20 nt, Human
ggugagacagugcuugcggc

SEQ ID NO: 1079807 - RNA, 20 nt, Human
gguugcugaaggcuaggcuc

SEQ ID NO: 1079808 - RNA, 23 nt, Human
guagaacugguaaauuacuuguu

SEQ ID NO: 1079809 - RNA, 26 nt, Human
gugggggaagagagaaaaagcagaga

SEQ ID NO: 1079810 - RNA, 20 nt, Human
uaaaauagaugaacccugcu

SEQ ID NO: 1079811 - RNA, 20 nt, Human
uaaagaaacuuccugaacau

SEQ ID NO: 1079812 - RNA, 21 nt, Human
uaacuucucaagucccuggcu

SEQ ID NO: 1079813 - RNA, 23 nt, Human
uaaguccugagccacccucuccu

SEQ ID NO: 1079814 - RNA, 21 nt, Human
uacaaauauaguccuucuuuc

SEQ ID NO: 1079815 - RNA, 24 nt, Human
uacccacaggccuugguccacauc

SEQ ID NO: 1079816 - RNA, 18 nt, Human
uacugguccacagauugg

SEQ ID NO: 1079817 - RNA, 20 nt, Human
uagccacagugugguuggca

SEQ ID NO: 1079818 - RNA, 23 nt, Human
uagcugcacccuaaaaucccaau

SEQ ID NO: 1079819 - RNA, 19 nt, Human
uagucacagcuucauccua

SEQ ID NO: 1079820 - RNA, 26 nt, Human
ucaacacccaguucuuuguuuuggcu

SEQ ID NO: 1079821 - RNA, 19 nt, Human
ucaagacagcaggugcaga

SEQ ID NO: 1079822 - RNA, 23 nt, Human
ucacugaccccagggcucuccuu

SEQ ID NO: 1079823 - RNA, 22 nt, Human
ucagagaaagagaaguggggga

SEQ ID NO: 1079824 - RNA, 19 nt, Human
ucagggccaggcaggggga

SEQ ID NO: 1079825 - RNA, 23 nt, Human
ucccauaaacuuugggucccagg

SEQ ID NO: 1079826 - RNA, 18 nt, Human
ucccauaccuuuucccag

SEQ ID NO: 1079827 - RNA, 23 nt, Human
ucccuagccccagugugaugugg

SEQ ID NO: 1079828 - RNA, 19 nt, Human
uccuaccucgaugcuccac

SEQ ID NO: 1079829 - RNA, 22 nt, Human
uccuagaguuagcugucuccuu

SEQ ID NO: 1079830 - RNA, 21 nt, Human
uccugaacauagcacucugga

SEQ ID NO: 1079831 - RNA, 20 nt, Human
ucugaagcaccugccucuga

SEQ ID NO: 1079832 - RNA, 18 nt, Human
ucugggccucaagacaug

SEQ ID NO: 1079833 - RNA, 25 nt, Human
ugaacccugcucacaauucauauau

SEQ ID NO: 1079834 - RNA, 19 nt, Human
ugaagacagacuugagggc

SEQ ID NO: 1079835 - RNA, 19 nt, Human
ugaccccagggcucuccuu

SEQ ID NO: 1079836 - RNA, 19 nt, Human
ugagggaagaggggugucg

SEQ ID NO: 1079837 - RNA, 21 nt, Human
ugagggcuggcaucaccuacu

SEQ ID NO: 1079838 - RNA, 19 nt, Human
ugauacucaauagggucau

SEQ ID NO: 1079839 - RNA, 25 nt, Human
ugauuuacaacuuccugcucuccuu

SEQ ID NO: 1079840 - RNA, 22 nt, Human
ugccaccccucauuuuguuucc

SEQ ID NO: 1079841 - RNA, 21 nt, Human
ugccuggggcuggauggaguc

SEQ ID NO: 1079842 - RNA, 20 nt, Human
uggaggaguaaggaagugag

SEQ ID NO: 1079843 - RNA, 23 nt, Human
uggaggaguaaggaagugagguu

SEQ ID NO: 1079844 - RNA, 21 nt, Human
uggauccaaggguggaaccuc

SEQ ID NO: 1079845 - RNA, 24 nt, Human
uggcugcagccacgcagugcagcu

SEQ ID NO: 1079846 - RNA, 23 nt, Human
ugggacggugggcaggaacccca

SEQ ID NO: 1079847 - RNA, 21 nt, Human
ugggccucaagacaugcccca

SEQ ID NO: 1079848 - RNA, 18 nt, Human
uggggccagcggggccgg

SEQ ID NO: 1079849 - RNA, 18 nt, Human
uggggcuggauggagucu

SEQ ID NO: 1079850 - RNA, 18 nt, Human
ugucuggugggugcggga

SEQ ID NO: 1079851 - RNA, 25 nt, Human
uguuuucccuuccagaaccccuagg

SEQ ID NO: 1079852 - RNA, 23 nt, Human
uuccuaggccucgcccaccuugg

SEQ ID NO: 1079853 - RNA, 22 nt, Human
uugaaauaaucuuuauuuugua

SEQ ID NO: 1079854 - RNA, 20 nt, Human
uugguucuuaguugaugaau

SEQ ID NO: 1079855 - RNA, 20 nt, Human
uugguugcugaaggcuaggc

SEQ ID NO: 1079856 - RNA, 24 nt, Human
uuuccuucucugaagcaccugccu

SEQ ID NO: 1079857 - RNA, 21 nt, Human
aaaagcaucuucuuuuacuuc

SEQ ID NO: 1079858 - RNA, 21 nt, Human
agagaagaaaaacugacuaag

SEQ ID NO: 1079859 - RNA, 22 nt, Human
aggcggcgcaggggucuggagc

SEQ ID NO: 1079860 - RNA, 24 nt, Human
cagaacauucagcaauauguugcc

SEQ ID NO: 1079861 - RNA, 19 nt, Human
cagaguaccuaugccuuuc

SEQ ID NO: 1079862 - RNA, 24 nt, Human
cagcaauauguugccuaaauuggu

SEQ ID NO: 1079863 - RNA, 19 nt, Human
ccacauuaaucuuccucac

SEQ ID NO: 1079864 - RNA, 18 nt, Human
ccgcugcacucgcugggu

SEQ ID NO: 1079865 - RNA, 18 nt, Human
ccucagaggacuuggugc

SEQ ID NO: 1079866 - RNA, 20 nt, Human
gaacauucagcaauauguug

SEQ ID NO: 1079867 - RNA, 18 nt, Human
gcacucgcugggucuugg

SEQ ID NO: 1079868 - RNA, 20 nt, Human
gcacucgcugggucuugggu

SEQ ID NO: 1079869 - RNA, 21 nt, Human
ggaacacagacgauaagaacg

SEQ ID NO: 1079870 - RNA, 22 nt, Human
ggccgcuuccggugcugcccug

SEQ ID NO: 1079871 - RNA, 19 nt, Human
ggcugguggucgccgggcu

SEQ ID NO: 1079872 - RNA, 18 nt, Human
uaaagguuuuacuggcca

SEQ ID NO: 1079873 - RNA, 20 nt, Human
ucaaagaagagaagaaaaac

SEQ ID NO: 1079874 - RNA, 19 nt, Human
ucagaacauucagcaauau

SEQ ID NO: 1079875 - RNA, 20 nt, Human
ucccuguucgcguacauggc

SEQ ID NO: 1079876 - RNA, 20 nt, Human
ucggccgcuuccggugcugc

SEQ ID NO: 1079877 - RNA, 21 nt, Human
uggaagaagcagcaacuuggc

SEQ ID NO: 1079878 - RNA, 22 nt, Human
uggaagaagcagcaacuuggca

SEQ ID NO: 1079879 - RNA, 22 nt, Human
uggaguaaaaagcaucuucuuu

SEQ ID NO: 1079880 - RNA, 24 nt, Human
uuacuggccacauuaaucuuccuc

SEQ ID NO: 1079881 - RNA, 22 nt, Human
uucuuagaaugucaaagaagag

SEQ ID NO: 1079882 - RNA, 22 nt, Human
aagaugccaacuaccggcaugg

SEQ ID NO: 1079883 - RNA, 19 nt, Human
acagaaaguauaaaaggac

SEQ ID NO: 1079884 - RNA, 24 nt, Human
acggcugcccggggcgcggagcgg

SEQ ID NO: 1079885 - RNA, 18 nt, Human
agacaucgaggcuccccc

SEQ ID NO: 1079886 - RNA, 19 nt, Human
aggacaguguuuucaugac

SEQ ID NO: 1079887 - RNA, 18 nt, Human
augggcacagaguccaga

SEQ ID NO: 1079888 - RNA, 22 nt, Human
caagaugccaacuaccggcaug

SEQ ID NO: 1079889 - RNA, 24 nt, Human
caucaaggaaggauaucucccaaa

SEQ ID NO: 1079890 - RNA, 21 nt, Human
ccccaagaugccaacuaccgg

SEQ ID NO: 1079891 - RNA, 20 nt, Human
cccgcaggcgccugcacacg

SEQ ID NO: 1079892 - RNA, 20 nt, Human
ccuccugcgaggaauguuga

SEQ ID NO: 1079893 - RNA, 18 nt, Human
cgcggagcggggcggggc

SEQ ID NO: 1079894 - RNA, 24 nt, Human
cguuuugccaucauucuccugaac

SEQ ID NO: 1079895 - RNA, 25 nt, Human
cuccugaacugaacaaaagucaugc

SEQ ID NO: 1079896 - RNA, 20 nt, Human
cugcccggggcgcggagcgg

SEQ ID NO: 1079897 - RNA, 20 nt, Human
cuggaucaagggggugaagc

SEQ ID NO: 1079898 - RNA, 20 nt, Human
cuggaucaagggggugaagc

SEQ ID NO: 1079899 - RNA, 21 nt, Human
gagaggacaguguuuucauga

SEQ ID NO: 1079900 - RNA, 25 nt, Human
gaggauaccgcccgcaggcgccugc

SEQ ID NO: 1079901 - RNA, 23 nt, Human
gcagcagaguagacaugacugga

SEQ ID NO: 1079902 - RNA, 18 nt, Human
gcgcggagcggggcgggg

SEQ ID NO: 1079903 - RNA, 20 nt, Human
gcggagcggggcggggcguc

SEQ ID NO: 1079904 - RNA, 18 nt, Human
gcugcccggggcgcggag

SEQ ID NO: 1079905 - RNA, 20 nt, Human
ggaagacaauccaagccaca

SEQ ID NO: 1079906 - RNA, 24 nt, Human
ggcagcagaguagacaugacugga

SEQ ID NO: 1079907 - RNA, 20 nt, Human
ggcgcggagcggggcggggc

SEQ ID NO: 1079908 - RNA, 21 nt, Human
gggcacagaguccagaguucc

SEQ ID NO: 1079909 - RNA, 21 nt, Human
uaccggcaugggcacagaguc

SEQ ID NO: 1079910 - RNA, 25 nt, Human
uacuugagauauggaauguaccagg

SEQ ID NO: 1079911 - RNA, 23 nt, Human
uccugaauccucauguuauuguu

SEQ ID NO: 1079912 - RNA, 26 nt, Human
ucucaaagacguuuugagcuuuuucu

SEQ ID NO: 1079913 - RNA, 23 nt, Human
ucuccugaacugaacaaaaguug

SEQ ID NO: 1079914 - RNA, 21 nt, Human
ucuggaucaagggggugaagc

SEQ ID NO: 1079915 - RNA, 23 nt, Human
ucuucuggaucaagggggugaag

SEQ ID NO: 1079916 - RNA, 21 nt, Human
ugcacacggcugcccggggcg

SEQ ID NO: 1079917 - RNA, 22 nt, Human
ugcccggggcgcggagcggggc

SEQ ID NO: 1079918 - RNA, 27 nt, Human
ugcccggggcgcggagcggggcggggc

SEQ ID NO: 1079919 - RNA, 19 nt, Human
ugggcacagaguccagagu

SEQ ID NO: 1079920 - RNA, 23 nt, Human
uguugauagcuuuuuuaauugcu

SEQ ID NO: 1079921 - RNA, 18 nt, Human
uguuuucuucuggaucaa

SEQ ID NO: 1079922 - RNA, 20 nt, Human
uuauuguuuuccaucaagga

SEQ ID NO: 1079923 - RNA, 19 nt, Human
acaggccccagugugugau

SEQ ID NO: 1079924 - RNA, 20 nt, Human
accuguuguuuccugacuuu

SEQ ID NO: 1079925 - RNA, 24 nt, Human
agaagccacugaggucagaaguuc

SEQ ID NO: 1079926 - RNA, 22 nt, Human
agaaguucaagaccagccuggu

SEQ ID NO: 1079927 - RNA, 23 nt, Human
agccuggucaauguagugaaacc

SEQ ID NO: 1079928 - RNA, 23 nt, Human
agccuggucaauguagugaaacc

SEQ ID NO: 1079929 - RNA, 24 nt, Human
agccuggucaauguagugaaaccu

SEQ ID NO: 1079930 - RNA, 22 nt, Human
aucccucuccccuccccccacc

SEQ ID NO: 1079931 - RNA, 21 nt, Human
auggcugcauaguauuccaug

SEQ ID NO: 1079932 - RNA, 24 nt, Human
augguauuucuaguucuggauccu

SEQ ID NO: 1079933 - RNA, 24 nt, Human
caagaccagccuggucaauguagu

SEQ ID NO: 1079934 - RNA, 19 nt, Human
caauguagugaaaccuugc

SEQ ID NO: 1079935 - RNA, 19 nt, Human
cacauguauacaugugcca

SEQ ID NO: 1079936 - RNA, 22 nt, Human
cacccaguaacucgucauuuac

SEQ ID NO: 1079937 - RNA, 23 nt, Human
caggagguucuccuuugucauuu

SEQ ID NO: 1079938 - RNA, 23 nt, Human
cagugugugauguuccccuuccu

SEQ ID NO: 1079939 - RNA, 23 nt, Human
cauguacacaacaugcagguuug

SEQ ID NO: 1079940 - RNA, 19 nt, Human
caugucccuacaaaggaca

SEQ ID NO: 1079941 - RNA, 24 nt, Human
ccacacugucuuccacaaugguug

SEQ ID NO: 1079942 - RNA, 21 nt, Human
ccaccccacaacaggccccag

SEQ ID NO: 1079943 - RNA, 21 nt, Human
ccagaucucaaguuauauaac

SEQ ID NO: 1079944 - RNA, 18 nt, Human
ccagggacuucucuuccc

SEQ ID NO: 1079945 - RNA, 22 nt, Human
ccagugaugaugagcauuuuuu

SEQ ID NO: 1079946 - RNA, 21 nt, Human
cccaguaaugggauggcuggg

SEQ ID NO: 1079947 - RNA, 21 nt, Human
cccccaccccacaacaggccc

SEQ ID NO: 1079948 - RNA, 20 nt, Human
ccccccaccccacaacaggc

SEQ ID NO: 1079949 - RNA, 26 nt, Human
cccuccccccaccccacaacaggccc

SEQ ID NO: 1079950 - RNA, 21 nt, Human
ccuccccccaccccacaacag

SEQ ID NO: 1079951 - RNA, 21 nt, Human
ccuggucaauguagugaaacc

SEQ ID NO: 1079952 - RNA, 24 nt, Human
ccuggucaauguagugaaaccuug

SEQ ID NO: 1079953 - RNA, 21 nt, Human
cuaugagugagaacaugcagu

SEQ ID NO: 1079954 - RNA, 19 nt, Human
cuccccuccccccaccccc

SEQ ID NO: 1079955 - RNA, 18 nt, Human
cucuccccuccccccacc

SEQ ID NO: 1079956 - RNA, 18 nt, Human
cuguagguugccuguuca

SEQ ID NO: 1079957 - RNA, 20 nt, Human
cuuccacaaugguugaacca

SEQ ID NO: 1079958 - RNA, 18 nt, Human
cuuuugagaagugucugu

SEQ ID NO: 1079959 - RNA, 18 nt, Human
gaacugaguccagcagca

SEQ ID NO: 1079960 - RNA, 24 nt, Human
gcccacuuuuugaugggguuguuu

SEQ ID NO: 1079961 - RNA, 21 nt, Human
ggacaugaacucauccuuuuu

SEQ ID NO: 1079962 - RNA, 19 nt, Human
ggcugcauaguauuccaug

SEQ ID NO: 1079963 - RNA, 18 nt, Human
gugugcaugugucuuuau

SEQ ID NO: 1079964 - RNA, 20 nt, Human
gugugcaugugucuuuauag

SEQ ID NO: 1079965 - RNA, 20 nt, Human
uaaaugucuucuuuugagaa

SEQ ID NO: 1079966 - RNA, 18 nt, Human
uacacauguauacaugug

SEQ ID NO: 1079967 - RNA, 19 nt, Human
uagcagcaugauuuauaau

SEQ ID NO: 1079968 - RNA, 21 nt, Human
uaggggcaguauuuuccagac

SEQ ID NO: 1079969 - RNA, 20 nt, Human
uauaugugccacauuuucuu

SEQ ID NO: 1079970 - RNA, 24 nt, Human
uauugugaauagugccacaauaaa

SEQ ID NO: 1079971 - RNA, 24 nt, Human
uccacaaugguugaaccaguuuac

SEQ ID NO: 1079972 - RNA, 23 nt, Human
ucccacuaauaguguaaaagugu

SEQ ID NO: 1079973 - RNA, 18 nt, Human
uccccccaccccacaaca

SEQ ID NO: 1079974 - RNA, 20 nt, Human
ucccuacaaaggacaugaac

SEQ ID NO: 1079975 - RNA, 21 nt, Human
ucccucuccccuccccccacc

SEQ ID NO: 1079976 - RNA, 22 nt, Human
uccuuugucauuuuuaucucca

SEQ ID NO: 1079977 - RNA, 23 nt, Human
uccuuugucauuuuuaucuccaa

SEQ ID NO: 1079978 - RNA, 18 nt, Human
ucuaaugauugcaaacuu

SEQ ID NO: 1079979 - RNA, 23 nt, Human
ucuccccuccccccaccccacaa

SEQ ID NO: 1079980 - RNA, 24 nt, Human
ucucugauggccagugaugaugag

SEQ ID NO: 1079981 - RNA, 23 nt, Human
ucuuugcuauugugaauagugcc

SEQ ID NO: 1079982 - RNA, 24 nt, Human
ugagaaugaugguuuccagcuuca

SEQ ID NO: 1079983 - RNA, 24 nt, Human
ugagaugguaucucauugugauuu

SEQ ID NO: 1079984 - RNA, 24 nt, Human
ugagugagaacaugcaguauuugg

SEQ ID NO: 1079985 - RNA, 24 nt, Human
ugaugagcauuuuuucaugugucu

SEQ ID NO: 1079986 - RNA, 20 nt, Human
ugauggacauuuggguuggu

SEQ ID NO: 1079987 - RNA, 26 nt, Human
ugccacaauaaacauacgugugcaug

SEQ ID NO: 1079988 - RNA, 19 nt, Human
ugccauguuggugugcugc

SEQ ID NO: 1079989 - RNA, 26 nt, Human
ugguaguuucuuuugcugucguagac

SEQ ID NO: 1079990 - RNA, 21 nt, Human
uguuacacauguauacaugug

SEQ ID NO: 1079991 - RNA, 18 nt, Human
uguugagaauucuuccca

SEQ ID NO: 1079992 - RNA, 18 nt, Human
uguugagaauucuuccca

SEQ ID NO: 1079993 - RNA, 20 nt, Human
uuccaugguguauaugugcc

SEQ ID NO: 1079994 - RNA, 26 nt, Human
uuccaugguguauaugugccacauuu

SEQ ID NO: 1079995 - RNA, 21 nt, Human
uucccagaucucaaguuauau

SEQ ID NO: 1079996 - RNA, 20 nt, Human
uucuagaagccacugagguu

SEQ ID NO: 1079997 - RNA, 23 nt, Human
uucucccauuugaaaguaggggc

SEQ ID NO: 1079998 - RNA, 24 nt, Human
uucuuuguagauucuggcuauuag

SEQ ID NO: 1079999 - RNA, 20 nt, Human
uugccuguucacucugaugg

SEQ ID NO: 1080000 - RNA, 19 nt, Human
uuguuuguuuuuucuugua

SEQ ID NO: 1080001 - RNA, 19 nt, Human
uuuacagucccacuaauag

SEQ ID NO: 1080002 - RNA, 19 nt, Human
uuuccagcuucauccaugu

SEQ ID NO: 1080003 - RNA, 18 nt, Human
uuugcuguauaucaacag

SEQ ID NO: 1080004 - RNA, 22 nt, Human
uuuuauggcugcauaguauucc

SEQ ID NO: 1080005 - RNA, 21 nt, Human
aaacacagccauuacgaauuc

SEQ ID NO: 1080006 - RNA, 23 nt, Human
aaacuccugcacucaagcaaucc

SEQ ID NO: 1080007 - RNA, 23 nt, Human
aaagugcugggauuacaggugua

SEQ ID NO: 1080008 - RNA, 19 nt, Human
aaaguucuucugagcuaau

SEQ ID NO: 1080009 - RNA, 23 nt, Human
aacaaccucuuuauuaaagcuga

SEQ ID NO: 1080010 - RNA, 24 nt, Human
aagcaauccuuuugccuuggccuc

SEQ ID NO: 1080011 - RNA, 25 nt, Human
aagcaauccuuuugccuuggccucc

SEQ ID NO: 1080012 - RNA, 25 nt, Human
aagugauccucccaccucagccucc

SEQ ID NO: 1080013 - RNA, 22 nt, Human
aagugcugggauaacaggcaug

SEQ ID NO: 1080014 - RNA, 18 nt, Human
aagugcugggauuacagg

SEQ ID NO: 1080015 - RNA, 19 nt, Human
aagugcugggauuacaggu

SEQ ID NO: 1080016 - RNA, 26 nt, Human
aagugcugggauuacagguguaagcc

SEQ ID NO: 1080017 - RNA, 22 nt, Human
aauaaaaucacuccuugccuuu

SEQ ID NO: 1080018 - RNA, 19 nt, Human
aaucauagcucacugcagc

SEQ ID NO: 1080019 - RNA, 21 nt, Human
acaggcaugggccaccgugcc

SEQ ID NO: 1080020 - RNA, 20 nt, Human
acaggguuucaccauauugg

SEQ ID NO: 1080021 - RNA, 24 nt, Human
acaggguuucaccauauuggccag

SEQ ID NO: 1080022 - RNA, 24 nt, Human
accauauuggccaggcuggucucg

SEQ ID NO: 1080023 - RNA, 19 nt, Human
acccaggcuggagugcagu

SEQ ID NO: 1080024 - RNA, 20 nt, Human
accucagccuccugaguagc

SEQ ID NO: 1080025 - RNA, 24 nt, Human
accuugugaucugcccgccucagc

SEQ ID NO: 1080026 - RNA, 18 nt, Human
acucugccacccaggcug

SEQ ID NO: 1080027 - RNA, 25 nt, Human
acucugccacccaggcuggagugca

SEQ ID NO: 1080028 - RNA, 20 nt, Human
acugcaccuggccuuggcag

SEQ ID NO: 1080029 - RNA, 18 nt, Human
acugcagccuccaccucc

SEQ ID NO: 1080030 - RNA, 18 nt, Human
agacaggauuuugccaug

SEQ ID NO: 1080031 - RNA, 23 nt, Human
agaccacaggcacaugccaccaa

SEQ ID NO: 1080032 - RNA, 24 nt, Human
agacuaccaccagcaaggccacag

SEQ ID NO: 1080033 - RNA, 18 nt, Human
agccuuccgaguagcuag

SEQ ID NO: 1080034 - RNA, 20 nt, Human
agcuaggacuacaugugccc

SEQ ID NO: 1080035 - RNA, 19 nt, Human
aggcuggagugcaguggca

SEQ ID NO: 1080036 - RNA, 18 nt, Human
aggugcuucacaaaccag

SEQ ID NO: 1080037 - RNA, 21 nt, Human
aguagcuaggacuacaugugc

SEQ ID NO: 1080038 - RNA, 23 nt, Human
agugcacuggugugaucuuggcu

SEQ ID NO: 1080039 - RNA, 21 nt, Human
agugcaguggcacaaucauag

SEQ ID NO: 1080040 - RNA, 23 nt, Human
agugcaguggcacaaucauagcu

SEQ ID NO: 1080041 - RNA, 21 nt, Human
auagagacaggauuuugccau

SEQ ID NO: 1080042 - RNA, 24 nt, Human
auagcucacugcagccuccaccuc

SEQ ID NO: 1080043 - RNA, 24 nt, Human
auuuugccauguugcccaggcugg

SEQ ID NO: 1080044 - RNA, 24 nt, Human
auuuuuguauuuuuaguagagaca

SEQ ID NO: 1080045 - RNA, 24 nt, Human
caaagugcugggauuacaggugua

SEQ ID NO: 1080046 - RNA, 21 nt, Human
caaccacgcccgacuaauuuu

SEQ ID NO: 1080047 - RNA, 22 nt, Human
caagcaauccuuuugccuuggc

SEQ ID NO: 1080048 - RNA, 27 nt, Human
caagcaauccuuuugccuuggccuccc

SEQ ID NO: 1080049 - RNA, 27 nt, Human
caagcaauccuuuugccuuggccuccc

SEQ ID NO: 1080050 - RNA, 22 nt, Human
caagcaauucuccugccucagc

SEQ ID NO: 1080051 - RNA, 20 nt, Human
caaggccacaggauuucaug

SEQ ID NO: 1080052 - RNA, 20 nt, Human
caagugauccucccaccuca

SEQ ID NO: 1080053 - RNA, 27 nt, Human
caagugauccucccaccucagccuccu

SEQ ID NO: 1080054 - RNA, 24 nt, Human
caagugcugggauaacaggcaugg

SEQ ID NO: 1080055 - RNA, 23 nt, Human
caaugcagccauccucacagaac

SEQ ID NO: 1080056 - RNA, 26 nt, Human
cacaaugcagccauccucacagaacu

SEQ ID NO: 1080057 - RNA, 18 nt, Human
cacagaacuuuuccuaca

SEQ ID NO: 1080058 - RNA, 20 nt, Human
caccagcaaggccacaggau

SEQ ID NO: 1080059 - RNA, 21 nt, Human
caccauauuggccaggcuggu

SEQ ID NO: 1080060 - RNA, 24 nt, Human
caccauauuggccaggcuggucuc

SEQ ID NO: 1080061 - RNA, 24 nt, Human
caccucagccuccugaguagcuga

SEQ ID NO: 1080062 - RNA, 23 nt, Human
cacucugccacccaggcuggagu

SEQ ID NO: 1080063 - RNA, 24 nt, Human
cacucugccacccaggcuggagug

SEQ ID NO: 1080064 - RNA, 21 nt, Human
cacugcaaccuccgccuccca

SEQ ID NO: 1080065 - RNA, 20 nt, Human
cagaaagaaaacuaaaaauu

SEQ ID NO: 1080066 - RNA, 21 nt, Human
cagagaaaaagucaggggccc

SEQ ID NO: 1080067 - RNA, 23 nt, Human
cagccuccaccuccuggacccaa

SEQ ID NO: 1080068 - RNA, 24 nt, Human
cagccuccaccuccuggacccaag

SEQ ID NO: 1080069 - RNA, 20 nt, Human
cagccuccugaguagcugag

SEQ ID NO: 1080070 - RNA, 24 nt, Human
caggauuuugccauguugcccagg

SEQ ID NO: 1080071 - RNA, 24 nt, Human
caggguuucaccauauuggccagg

SEQ ID NO: 1080072 - RNA, 23 nt, Human
cauauuggccaggcuggucucga

SEQ ID NO: 1080073 - RNA, 18 nt, Human
caugacuaacuaauuuug

SEQ ID NO: 1080074 - RNA, 23 nt, Human
cauguugcccaggcuggucucaa

SEQ ID NO: 1080075 - RNA, 24 nt, Human
cauguugcccaggcuggucucaaa

SEQ ID NO: 1080076 - RNA, 21 nt, Human
ccaaagugcugggauuacagg

SEQ ID NO: 1080077 - RNA, 21 nt, Human
ccaaagugcugggauuacagg

SEQ ID NO: 1080078 - RNA, 24 nt, Human
ccaaagugcugggauuacaggugu

SEQ ID NO: 1080079 - RNA, 23 nt, Human
ccaagugauccucccaccucagc

SEQ ID NO: 1080080 - RNA, 23 nt, Human
ccaagugcugggauaacaggcau

SEQ ID NO: 1080081 - RNA, 24 nt, Human
ccaagugcugggauaacaggcaug

SEQ ID NO: 1080082 - RNA, 23 nt, Human
ccaccucagccuccugaguagcu

SEQ ID NO: 1080083 - RNA, 24 nt, Human
ccaccuccuggacccaagugaucc

SEQ ID NO: 1080084 - RNA, 26 nt, Human
ccacuaggaaaccugaggggaaaucc

SEQ ID NO: 1080085 - RNA, 19 nt, Human
ccacugcaccuggccuugg

SEQ ID NO: 1080086 - RNA, 19 nt, Human
ccacugcaccuggccuugg

SEQ ID NO: 1080087 - RNA, 20 nt, Human
ccacugcaccuggccuuggc

SEQ ID NO: 1080088 - RNA, 21 nt, Human
ccacugcaccuggccuuggca

SEQ ID NO: 1080089 - RNA, 19 nt, Human
ccauguugcccaggcuggu

SEQ ID NO: 1080090 - RNA, 22 nt, Human
ccauguugcccaggcuggucuc

SEQ ID NO: 1080091 - RNA, 20 nt, Human
cccaggcuggagugcacugg

SEQ ID NO: 1080092 - RNA, 23 nt, Human
cccagguucaagcaauucuccug

SEQ ID NO: 1080093 - RNA, 26 nt, Human
ccgccucccagguucaagcaauucuu

SEQ ID NO: 1080094 - RNA, 19 nt, Human
ccguuccuugcaucccaga

SEQ ID NO: 1080095 - RNA, 24 nt, Human
ccucaagauuuuuaugcccagccu

SEQ ID NO: 1080096 - RNA, 24 nt, Human
ccucccaccucagccuccugagua

SEQ ID NO: 1080097 - RNA, 24 nt, Human
ccucccagguucaagcaauucucc

SEQ ID NO: 1080098 - RNA, 23 nt, Human
ccugccucagccuuccgaguagc

SEQ ID NO: 1080099 - RNA, 24 nt, Human
ccuggacccaagugauccucccac

SEQ ID NO: 1080100 - RNA, 23 nt, Human
ccuggccuuggcaguuuccuugg

SEQ ID NO: 1080101 - RNA, 24 nt, Human
ccuggccuuggcaguuuccuuggu

SEQ ID NO: 1080102 - RNA, 24 nt, Human
cgcaaccacgcccgacuaauuuuu

SEQ ID NO: 1080103 - RNA, 24 nt, Human
cgccucagccuccccaagugcugg

SEQ ID NO: 1080104 - RNA, 21 nt, Human
cuaccaccagcaaggccacag

SEQ ID NO: 1080105 - RNA, 24 nt, Human
cucacugcaaccuccgccucccag

SEQ ID NO: 1080106 - RNA, 21 nt, Human
cucacugcagccuccaccucc

SEQ ID NO: 1080107 - RNA, 24 nt, Human
cucacugcagccuccaccuccugg

SEQ ID NO: 1080108 - RNA, 24 nt, Human
cuccugaguagcugagaccacagg

SEQ ID NO: 1080109 - RNA, 24 nt, Human
cucucucugucgcccaggcuggag

SEQ ID NO: 1080110 - RNA, 24 nt, Human
cucucugucgcccaggcuggagug

SEQ ID NO: 1080111 - RNA, 23 nt, Human
cugcaaccuccgccucccagguu

SEQ ID NO: 1080112 - RNA, 24 nt, Human
cugcaaccuccgccucccagguuc

SEQ ID NO: 1080113 - RNA, 23 nt, Human
cugcagccuccaccuccuggacc

SEQ ID NO: 1080114 - RNA, 19 nt, Human
cugccacccaggcuggagu

SEQ ID NO: 1080115 - RNA, 24 nt, Human
cugcccgccucagccuccccaagu

SEQ ID NO: 1080116 - RNA, 23 nt, Human
cugccucagccuuccgaguagcu

SEQ ID NO: 1080117 - RNA, 21 nt, Human
gaaaaagucaggggccccuac

SEQ ID NO: 1080118 - RNA, 24 nt, Human
gaccuugugaucugcccgccucag

SEQ ID NO: 1080119 - RNA, 18 nt, Human
gacuaccaccagcaaggc

SEQ ID NO: 1080120 - RNA, 25 nt, Human
gaguagcugagaccacaggcacaug

SEQ ID NO: 1080121 - RNA, 19 nt, Human
gaguggcucccagagcucc

SEQ ID NO: 1080122 - RNA, 21 nt, Human
gauaacaggcaugggccaccg

SEQ ID NO: 1080123 - RNA, 24 nt, Human
gauaacaggcaugggccaccgugc

SEQ ID NO: 1080124 - RNA, 18 nt, Human
gauuacagguguaagcca

SEQ ID NO: 1080125 - RNA, 22 nt, Human
gauuacagguguaagccacugc

SEQ ID NO: 1080126 - RNA, 23 nt, Human
gauuacagguguaagccacugca

SEQ ID NO: 1080127 - RNA, 22 nt, Human
gcaaccuccgccucccagguuc

SEQ ID NO: 1080128 - RNA, 20 nt, Human
gccauguugcccaggcuggu

SEQ ID NO: 1080129 - RNA, 22 nt, Human
gcccgacuaauuuuuguauuuu

SEQ ID NO: 1080130 - RNA, 22 nt, Human
gccuuggccucccaaagugcug

SEQ ID NO: 1080131 - RNA, 19 nt, Human
gcuggagugcaguggcaca

SEQ ID NO: 1080132 - RNA, 24 nt, Human
ggauaacaggcaugggccaccgug

SEQ ID NO: 1080133 - RNA, 22 nt, Human
ggauuacagguguaagccacug

SEQ ID NO: 1080134 - RNA, 22 nt, Human
ggcuggagugcacuggugugau

SEQ ID NO: 1080135 - RNA, 20 nt, Human
ggucucgaucuacugaccuu

SEQ ID NO: 1080136 - RNA, 22 nt, Human
gugaaguauuuuuugcauguug

SEQ ID NO: 1080137 - RNA, 24 nt, Human
gugauccucccaccucagccuccu

SEQ ID NO: 1080138 - RNA, 24 nt, Human
gugaucugcccgccucagccuccc

SEQ ID NO: 1080139 - RNA, 22 nt, Human
uaaacacagccauuacgaauuc

SEQ ID NO: 1080140 - RNA, 25 nt, Human
uaagucaaagagaauugcuagauga

SEQ ID NO: 1080141 - RNA, 24 nt, Human
uaauuuugguauuuuuuauagaga

SEQ ID NO: 1080142 - RNA, 24 nt, Human
uaauuuuuguauuuuuaguagaga

SEQ ID NO: 1080143 - RNA, 22 nt, Human
uacagguguaagccacugcacc

SEQ ID NO: 1080144 - RNA, 22 nt, Human
uagagacaggauuuugccaugu

SEQ ID NO: 1080145 - RNA, 20 nt, Human
uagagacaggguuucaccau

SEQ ID NO: 1080146 - RNA, 23 nt, Human
uagaugaaauaagcugaaguagg

SEQ ID NO: 1080147 - RNA, 21 nt, Human
uagcucacugcagccuccacc

SEQ ID NO: 1080148 - RNA, 19 nt, Human
uaggugaguggcucccaga

SEQ ID NO: 1080149 - RNA, 22 nt, Human
uagguucauuuucuggaguaau

SEQ ID NO: 1080150 - RNA, 19 nt, Human
uaguagagacaggguuuca

SEQ ID NO: 1080151 - RNA, 26 nt, Human
uaguagagacaggguuucaccauauu

SEQ ID NO: 1080152 - RNA, 23 nt, Human
uauagagacaggauuuugccaug

SEQ ID NO: 1080153 - RNA, 24 nt, Human
uauagagacaggauuuugccaugu

SEQ ID NO: 1080154 - RNA, 26 nt, Human
ucacucagcuccauucuuccucgggg

SEQ ID NO: 1080155 - RNA, 19 nt, Human
ucacugcaaccuccgccuc

SEQ ID NO: 1080156 - RNA, 24 nt, Human
ucacugcaaccuccgccucccagg

SEQ ID NO: 1080157 - RNA, 25 nt, Human
ucacugcaaccuccgccucccaggu

SEQ ID NO: 1080158 - RNA, 27 nt, Human
ucacugcaaccuccgccucccagguuc

SEQ ID NO: 1080159 - RNA, 19 nt, Human
ucacugcagccuccaccuc

SEQ ID NO: 1080160 - RNA, 23 nt, Human
ucacugcagccuccaccuccugg

SEQ ID NO: 1080161 - RNA, 24 nt, Human
ucacugcagccuccaccuccugga

SEQ ID NO: 1080162 - RNA, 27 nt, Human
ucacugcagccuccaccuccuggaccc

SEQ ID NO: 1080163 - RNA, 19 nt, Human
ucagagccugcucugagug

SEQ ID NO: 1080164 - RNA, 23 nt, Human
ucccaaagugcugggauuacagg

SEQ ID NO: 1080165 - RNA, 21 nt, Human
ucccagguucaagcaauucuc

SEQ ID NO: 1080166 - RNA, 24 nt, Human
ucccagguucaagcaauucuccug

SEQ ID NO: 1080167 - RNA, 24 nt, Human
uccccaagugcugggauaacaggc

SEQ ID NO: 1080168 - RNA, 24 nt, Human
uccugaguagcugagaccacaggc

SEQ ID NO: 1080169 - RNA, 21 nt, Human
uccuggacccaagugauccuc

SEQ ID NO: 1080170 - RNA, 18 nt, Human
ucgcccaggcuggagugc

SEQ ID NO: 1080171 - RNA, 23 nt, Human
ucucacucugccacccaggcugg

SEQ ID NO: 1080172 - RNA, 24 nt, Human
ucucacucugccacccaggcugga

SEQ ID NO: 1080173 - RNA, 26 nt, Human
ucucacucugccacccaggcuggagu

SEQ ID NO: 1080174 - RNA, 27 nt, Human
ucucacucugccacccaggcuggagug

SEQ ID NO: 1080175 - RNA, 22 nt, Human
ucucaggcagaaaucuuuaaag

SEQ ID NO: 1080176 - RNA, 24 nt, Human
ucuccugccucagccuuccgagua

SEQ ID NO: 1080177 - RNA, 23 nt, Human
ucucucucugucgcccaggcugg

SEQ ID NO: 1080178 - RNA, 24 nt, Human
ucucucucugucgcccaggcugga

SEQ ID NO: 1080179 - RNA, 24 nt, Human
ucucucugucgcccaggcuggagu

SEQ ID NO: 1080180 - RNA, 19 nt, Human
ucucugucgcccaggcugg

SEQ ID NO: 1080181 - RNA, 27 nt, Human
ucucugucgcccaggcuggagugcacu

SEQ ID NO: 1080182 - RNA, 20 nt, Human
ucugagcuaauggcuuauuu

SEQ ID NO: 1080183 - RNA, 24 nt, Human
ucugccacccaggcuggagugcag

SEQ ID NO: 1080184 - RNA, 22 nt, Human
ucugcccgccucagccucccca

SEQ ID NO: 1080185 - RNA, 18 nt, Human
ucugucgcccaggcugga

SEQ ID NO: 1080186 - RNA, 21 nt, Human
ugaaauaagcugaaguaggug

SEQ ID NO: 1080187 - RNA, 21 nt, Human
ugacacaaugcagccauccuc

SEQ ID NO: 1080188 - RNA, 20 nt, Human
ugagacagggucucacucug

SEQ ID NO: 1080189 - RNA, 22 nt, Human
ugagacagggucucacucugcc

SEQ ID NO: 1080190 - RNA, 21 nt, Human
ugagaccacaggcacaugcca

SEQ ID NO: 1080191 - RNA, 24 nt, Human
ugagaccacaggcacaugccacca

SEQ ID NO: 1080192 - RNA, 22 nt, Human
ugagauggagucucucucuguc

SEQ ID NO: 1080193 - RNA, 26 nt, Human
ugcacucaagcaauccuuuugccuug

SEQ ID NO: 1080194 - RNA, 20 nt, Human
ugcauguuguucuauugugu

SEQ ID NO: 1080195 - RNA, 24 nt, Human
ugccauguugcccaggcuggucuc

SEQ ID NO: 1080196 - RNA, 27 nt, Human
ugccauguugcccaggcuggucucaaa

SEQ ID NO: 1080197 - RNA, 24 nt, Human
ugcccaggcuggucucaaacuccu

SEQ ID NO: 1080198 - RNA, 23 nt, Human
ugccucagccuuccgaguagcua

SEQ ID NO: 1080199 - RNA, 24 nt, Human
ugccucagccuuccgaguagcuag

SEQ ID NO: 1080200 - RNA, 22 nt, Human
ugccuuggccucccaaagugcu

SEQ ID NO: 1080201 - RNA, 24 nt, Human
ugcugggauuacagguguaagcca

SEQ ID NO: 1080202 - RNA, 24 nt, Human
uggaguaauacagaauaaaaucac

SEQ ID NO: 1080203 - RNA, 18 nt, Human
uggagugcacugguguga

SEQ ID NO: 1080204 - RNA, 24 nt, Human
uggagugcacuggugugaucuugg

SEQ ID NO: 1080205 - RNA, 18 nt, Human
uggagugcaguggcacaa

SEQ ID NO: 1080206 - RNA, 19 nt, Human
uggagugcaguggcacaau

SEQ ID NO: 1080207 - RNA, 21 nt, Human
uggagugcaguggcacaauca

SEQ ID NO: 1080208 - RNA, 20 nt, Human
uggcacaaucauagcucacu

SEQ ID NO: 1080209 - RNA, 23 nt, Human
uggcacaaucauagcucacugca

SEQ ID NO: 1080210 - RNA, 26 nt, Human
uggcaggugcuucacaaaccagcuuc

SEQ ID NO: 1080211 - RNA, 21 nt, Human
uggccaggcuggucucgaucu

SEQ ID NO: 1080212 - RNA, 22 nt, Human
ugggauaacaggcaugggccac

SEQ ID NO: 1080213 - RNA, 23 nt, Human
ugggauaacaggcaugggccacc

SEQ ID NO: 1080214 - RNA, 24 nt, Human
ugggauaacaggcaugggccaccg

SEQ ID NO: 1080215 - RNA, 19 nt, Human
ugggauuacagguguaagc

SEQ ID NO: 1080216 - RNA, 21 nt, Human
ugggauuacagguguaagcca

SEQ ID NO: 1080217 - RNA, 22 nt, Human
ugggauuacagguguaagccac

SEQ ID NO: 1080218 - RNA, 22 nt, Human
ugggauuacagguguaagccac

SEQ ID NO: 1080219 - RNA, 24 nt, Human
ugggauuacagguguaagccacug

SEQ ID NO: 1080220 - RNA, 19 nt, Human
uggucucaaacuccugcac

SEQ ID NO: 1080221 - RNA, 24 nt, Human
uuaguagagacaggguuucaccau

SEQ ID NO: 1080222 - RNA, 23 nt, Human
uuauagagacaggauuuugccau

SEQ ID NO: 1080223 - RNA, 24 nt, Human
uuauagagacaggauuuugccaug

SEQ ID NO: 1080224 - RNA, 21 nt, Human
uucaagcaauucuccugccuc

SEQ ID NO: 1080225 - RNA, 24 nt, Human
uucaagcaauucuccugccucagc

SEQ ID NO: 1080226 - RNA, 23 nt, Human
uuccgacuaagucaaagagaauu

SEQ ID NO: 1080227 - RNA, 23 nt, Human
uuccgaguagcuaggacuacaug

SEQ ID NO: 1080228 - RNA, 24 nt, Human
uuccuacagaaagaaaacuaaaaa

SEQ ID NO: 1080229 - RNA, 23 nt, Human
uuccugguaacaucuacagucuu

SEQ ID NO: 1080230 - RNA, 21 nt, Human
uugccauguugcccaggcugg

SEQ ID NO: 1080231 - RNA, 24 nt, Human
uugccuuggccucccaaagugcug

SEQ ID NO: 1080232 - RNA, 21 nt, Human
uuuaaacacagccauuacgaa

SEQ ID NO: 1080233 - RNA, 24 nt, Human
uuucaccauauuggccaggcuggu

SEQ ID NO: 1080234 - RNA, 22 nt, Human
uuucauggcaggugcuucacaa

SEQ ID NO: 1080235 - RNA, 20 nt, Human
uuuccuauucucucaggcaa

SEQ ID NO: 1080236 - RNA, 19 nt, Human
uuuuaaggaugcugaagau

SEQ ID NO: 1080237 - RNA, 23 nt, Human
uuuugccauguugcccaggcugg

SEQ ID NO: 1080238 - RNA, 24 nt, Human
uuuuuaguagagacaggguuucac

SEQ ID NO: 1080239 - RNA, 20 nt, Human
uuuuuguauuuuuaguagag

SEQ ID NO: 1080240 - RNA, 23 nt, Human
accagggaggguaaaaccuggca

SEQ ID NO: 1080241 - RNA, 19 nt, Human
caccauccaagcccucauc

SEQ ID NO: 1080242 - RNA, 22 nt, Human
cuaagccugguuccugggaugu

SEQ ID NO: 1080243 - RNA, 19 nt, Human
cuccucuaagccugguucc

SEQ ID NO: 1080244 - RNA, 23 nt, Human
uaaaaccuggcagcucaguguca

SEQ ID NO: 1080245 - RNA, 24 nt, Human
uaccagggaggguaaaaccuggca

SEQ ID NO: 1080246 - RNA, 21 nt, Human
ucaccauccaagcccucaucc

SEQ ID NO: 1080247 - RNA, 20 nt, Human
uccucuaagccugguuccug

SEQ ID NO: 1080248 - RNA, 23 nt, Human
ugugauaccagggaggguaaaac

SEQ ID NO: 1080249 - RNA, 23 nt, Human
ccuaccagcugcaaaaucuguuc

SEQ ID NO: 1080250 - RNA, 20 nt, Human
ugagacccuaccagcugcaa

SEQ ID NO: 1080251 - RNA, 18 nt, Human
aaaauguaaaagcuguga

SEQ ID NO: 1080252 - RNA, 24 nt, Human
aaagugcugggauuacaggcguga

SEQ ID NO: 1080253 - RNA, 25 nt, Human
aagagcagggcaguuuuuuuuuuuu

SEQ ID NO: 1080254 - RNA, 22 nt, Human
aagccaccuccgccggggaccg

SEQ ID NO: 1080255 - RNA, 19 nt, Human
aaguagcugggacuacagg

SEQ ID NO: 1080256 - RNA, 20 nt, Human
aaguagcugggacuacaggc

SEQ ID NO: 1080257 - RNA, 25 nt, Human
aaguagcugggacuacaggcgcccg

SEQ ID NO: 1080258 - RNA, 19 nt, Human
aagugcugggauuacaggc

SEQ ID NO: 1080259 - RNA, 19 nt, Human
aagugcugggauuacaggc

SEQ ID NO: 1080260 - RNA, 26 nt, Human
aagugcugggauuacaggcgugagcc

SEQ ID NO: 1080261 - RNA, 20 nt, Human
acaccaccgcguccaccuga

SEQ ID NO: 1080262 - RNA, 23 nt, Human
accucggccucccaaagugcugg

SEQ ID NO: 1080263 - RNA, 20 nt, Human
acgggguuucaccguuuuag

SEQ ID NO: 1080264 - RNA, 21 nt, Human
acucaggccaaacagccgccc

SEQ ID NO: 1080265 - RNA, 18 nt, Human
acucugucacccaggcua

SEQ ID NO: 1080266 - RNA, 26 nt, Human
acucugucacccaggcuagagucccg

SEQ ID NO: 1080267 - RNA, 20 nt, Human
acugcaagcuccgccucccg

SEQ ID NO: 1080268 - RNA, 19 nt, Human
agacacauaaaccccggca

SEQ ID NO: 1080269 - RNA, 19 nt, Human
agagagcuucagcuguaaa

SEQ ID NO: 1080270 - RNA, 19 nt, Human
agccggaggcggagaaggc

SEQ ID NO: 1080271 - RNA, 30 nt, Human
aggcagucauugaaacauauuucuuguucc

SEQ ID NO: 1080272 - RNA, 20 nt, Human
aggcgcccgccacuacgccc

SEQ ID NO: 1080273 - RNA, 25 nt, Human
aggcuggagugcaguggcgggaucu

SEQ ID NO: 1080274 - RNA, 24 nt, Human
aggcugucuugaacucccggccuc

SEQ ID NO: 1080275 - RNA, 22 nt, Human
agggaguccagccggaggcgga

SEQ ID NO: 1080276 - RNA, 23 nt, Human
agguccuguuuccuugucuccuc

SEQ ID NO: 1080277 - RNA, 18 nt, Human
aguaagacgacacucagg

SEQ ID NO: 1080278 - RNA, 25 nt, Human
aguacaguauccuuagaaacugccc

SEQ ID NO: 1080279 - RNA, 20 nt, Human
aguagagacgggguuucacc

SEQ ID NO: 1080280 - RNA, 21 nt, Human
aguagagacgggguuucaccg

SEQ ID NO: 1080281 - RNA, 21 nt, Human
aguagcuggggcuacaggcau

SEQ ID NO: 1080282 - RNA, 20 nt, Human
agugcaguggcgggaucucg

SEQ ID NO: 1080283 - RNA, 23 nt, Human
agugcaguggcgggaucucggcu

SEQ ID NO: 1080284 - RNA, 24 nt, Human
agugcaguggcgggaucucggcuc

SEQ ID NO: 1080285 - RNA, 20 nt, Human
aguuuuuuuuuuuuuuuuuu

SEQ ID NO: 1080286 - RNA, 18 nt, Human
aucgccgugguccacacc

SEQ ID NO: 1080287 - RNA, 24 nt, Human
caaagugcugggauuacaggcgug

SEQ ID NO: 1080288 - RNA, 21 nt, Human
caagaggcacacuuucaacca

SEQ ID NO: 1080289 - RNA, 24 nt, Human
caagaggcacacuuucaaccagua

SEQ ID NO: 1080290 - RNA, 24 nt, Human
caccguuuuagccgggauggucuc

SEQ ID NO: 1080291 - RNA, 24 nt, Human
caccucagccuccugaguagcugg

SEQ ID NO: 1080292 - RNA, 23 nt, Human
caccuccgucuccacagcagggg

SEQ ID NO: 1080293 - RNA, 22 nt, Human
caccugaggcucgccucgcuuc

SEQ ID NO: 1080294 - RNA, 22 nt, Human
cacgccauucuccugccucagc

SEQ ID NO: 1080295 - RNA, 19 nt, Human
cacuaaaaccacagcagac

SEQ ID NO: 1080296 - RNA, 22 nt, Human
cacucugucacccaggcuagag

SEQ ID NO: 1080297 - RNA, 26 nt, Human
cacucugucacccaggcuagaguccc

SEQ ID NO: 1080298 - RNA, 19 nt, Human
cacuguggccucaaccucc

SEQ ID NO: 1080299 - RNA, 23 nt, Human
cagccgcccccggccagcccgac

SEQ ID NO: 1080300 - RNA, 20 nt, Human
cagccuccugaguagcuggg

SEQ ID NO: 1080301 - RNA, 21 nt, Human
caggcgcccgccacuacgccc

SEQ ID NO: 1080302 - RNA, 18 nt, Human
cauaaaccccggcacucc

SEQ ID NO: 1080303 - RNA, 26 nt, Human
caucccauuuuaaaagccagacacau

SEQ ID NO: 1080304 - RNA, 22 nt, Human
caugggccaccaugcccggaaa

SEQ ID NO: 1080305 - RNA, 19 nt, Human
ccaaacagccgcccccggc

SEQ ID NO: 1080306 - RNA, 21 nt, Human
ccaaagugcuggaguaccgcu

SEQ ID NO: 1080307 - RNA, 22 nt, Human
ccaaagugcugggauuacaggc

SEQ ID NO: 1080308 - RNA, 22 nt, Human
ccaaagugcugggauuacaggc

SEQ ID NO: 1080309 - RNA, 24 nt, Human
ccaaagugcugggauuacaggcgu

SEQ ID NO: 1080310 - RNA, 23 nt, Human
ccaagccauccucccaccucagc

SEQ ID NO: 1080311 - RNA, 25 nt, Human
ccaagccauccucccaccucagccu

SEQ ID NO: 1080312 - RNA, 23 nt, Human
ccaccucagccuccugaguagcu

SEQ ID NO: 1080313 - RNA, 25 nt, Human
ccaugcaaacaagaggcacacuuuc

SEQ ID NO: 1080314 - RNA, 23 nt, Human
cccaaguagcugggacuacaggc

SEQ ID NO: 1080315 - RNA, 24 nt, Human
cccaaguagcugggacuacaggcg

SEQ ID NO: 1080316 - RNA, 23 nt, Human
cccaccucagccuccugaguagc

SEQ ID NO: 1080317 - RNA, 22 nt, Human
cccaggcuggagugcaguggcg

SEQ ID NO: 1080318 - RNA, 22 nt, Human
ccccaaguggccgcaccccucc

SEQ ID NO: 1080319 - RNA, 22 nt, Human
cccccaaguggccgcaccccuc

SEQ ID NO: 1080320 - RNA, 24 nt, Human
cccccggccagcccgacucggcuc

SEQ ID NO: 1080321 - RNA, 24 nt, Human
cccggccucaaacgauccugucac

SEQ ID NO: 1080322 - RNA, 22 nt, Human
ccgcccccggccagcccgacuc

SEQ ID NO: 1080323 - RNA, 21 nt, Human
ccucaaccuccuaggcccaag

SEQ ID NO: 1080324 - RNA, 24 nt, Human
ccucaucccauuuuaaaagccaga

SEQ ID NO: 1080325 - RNA, 24 nt, Human
ccucccaccucagccuccugagua

SEQ ID NO: 1080326 - RNA, 18 nt, Human
ccugaggaacuggagagg

SEQ ID NO: 1080327 - RNA, 24 nt, Human
ccugaguagcuggggcuacaggca

SEQ ID NO: 1080328 - RNA, 21 nt, Human
ccugcccccaaguggccgcac

SEQ ID NO: 1080329 - RNA, 19 nt, Human
cgccucccggguucacgcc

SEQ ID NO: 1080330 - RNA, 20 nt, Human
cgccucgcuuccuggguccc

SEQ ID NO: 1080331 - RNA, 23 nt, Human
cgccucgcuuccugggucccuag

SEQ ID NO: 1080332 - RNA, 24 nt, Human
cgcuuuaguaagacgacacucagg

SEQ ID NO: 1080333 - RNA, 22 nt, Human
cgggcagggggcugcaggauuc

SEQ ID NO: 1080334 - RNA, 23 nt, Human
cgggcgggcagggggcugcagga

SEQ ID NO: 1080335 - RNA, 24 nt, Human
cgggguuucaccguuuuagccggg

SEQ ID NO: 1080336 - RNA, 18 nt, Human
cucaaccuccuaggccca

SEQ ID NO: 1080337 - RNA, 24 nt, Human
cucagccucccaaguagcugggac

SEQ ID NO: 1080338 - RNA, 24 nt, Human
cucagccuccugaguagcuggggc

SEQ ID NO: 1080339 - RNA, 21 nt, Human
cucccggguucacgccauucu

SEQ ID NO: 1080340 - RNA, 21 nt, Human
cuccgcuuucuccugccccca

SEQ ID NO: 1080341 - RNA, 20 nt, Human
cuccuaggcccaagccaucu

SEQ ID NO: 1080342 - RNA, 24 nt, Human
cuccugaccucgugauccgcccgc

SEQ ID NO: 1080343 - RNA, 21 nt, Human
cucgcucugucgcccaggcug

SEQ ID NO: 1080344 - RNA, 24 nt, Human
cucgcucugucgcccaggcuggag

SEQ ID NO: 1080345 - RNA, 20 nt, Human
cucugucgcccaggcuggag

SEQ ID NO: 1080346 - RNA, 24 nt, Human
cugcccccaaguggccgcaccccu

SEQ ID NO: 1080347 - RNA, 23 nt, Human
cugccucagccucccaaguagcu

SEQ ID NO: 1080348 - RNA, 20 nt, Human
cugggucccuagaggggugg

SEQ ID NO: 1080349 - RNA, 22 nt, Human
cuguggccucaaccuccuaggc

SEQ ID NO: 1080350 - RNA, 21 nt, Human
cuugguuggguccagggcggg

SEQ ID NO: 1080351 - RNA, 24 nt, Human
gaaaggcccugaucgccguggucc

SEQ ID NO: 1080352 - RNA, 18 nt, Human
gacacauaaaccccggca

SEQ ID NO: 1080353 - RNA, 24 nt, Human
gacacucaggccaaacagccgccc

SEQ ID NO: 1080354 - RNA, 22 nt, Human
gaccucgugauccgcccgccuc

SEQ ID NO: 1080355 - RNA, 22 nt, Human
gaccucgugauccgcccgccuc

SEQ ID NO: 1080356 - RNA, 24 nt, Human
gaccucgugauccgcccgccucgg

SEQ ID NO: 1080357 - RNA, 30 nt, Human
gagcagggcaguuuuuuuuuuuuuuuuuuu

SEQ ID NO: 1080358 - RNA, 18 nt, Human
gauuacaggcgugagcca

SEQ ID NO: 1080359 - RNA, 20 nt, Human
gauuacaggcgugagccacc

SEQ ID NO: 1080360 - RNA, 22 nt, Human
gauuacaggcgugagccaccgc

SEQ ID NO: 1080361 - RNA, 20 nt, Human
gcccaggcuggagugcagug

SEQ ID NO: 1080362 - RNA, 23 nt, Human
gcccggcuaauuuuuuguauuuu

SEQ ID NO: 1080363 - RNA, 20 nt, Human
gccucagccucccaaguagc

SEQ ID NO: 1080364 - RNA, 25 nt, Human
gccucccggguucacgccauucucc

SEQ ID NO: 1080365 - RNA, 23 nt, Human
gccucggccucccaaagugcugg

SEQ ID NO: 1080366 - RNA, 25 nt, Human
gcucugucgcccaggcuggagugca

SEQ ID NO: 1080367 - RNA, 20 nt, Human
ggcacuaaaaccacagcaga

SEQ ID NO: 1080368 - RNA, 23 nt, Human
ggcaguuuuuuuuuuuuuuuuuu

SEQ ID NO: 1080369 - RNA, 20 nt, Human
ggccucaaccuccuaggccc

SEQ ID NO: 1080370 - RNA, 23 nt, Human
ggcuacaggcaugggccaccaug

SEQ ID NO: 1080371 - RNA, 24 nt, Human
ggcuacaggcaugggccaccaugc

SEQ ID NO: 1080372 - RNA, 20 nt, Human
gggcgggcgggcgcuccccg

SEQ ID NO: 1080373 - RNA, 24 nt, Human
gggcuacaggcaugggccaccaug

SEQ ID NO: 1080374 - RNA, 20 nt, Human
ggucucgaucuccugaccuc

SEQ ID NO: 1080375 - RNA, 19 nt, Human
guagagacgggguuucacc

SEQ ID NO: 1080376 - RNA, 24 nt, Human
gugauccgcccgccucggccuccc

SEQ ID NO: 1080377 - RNA, 24 nt, Human
guuggguccagggcggggcgggcg

SEQ ID NO: 1080378 - RNA, 27 nt, Human
guuuuuuuuuuuuuuuuuuuuuugggg

SEQ ID NO: 1080379 - RNA, 22 nt, Human
uaaaagcugugacugagacaau

SEQ ID NO: 1080380 - RNA, 21 nt, Human
uaaauaaacacaaaacugaau

SEQ ID NO: 1080381 - RNA, 24 nt, Human
uaauuuuuuguauuuuuaguagag

SEQ ID NO: 1080382 - RNA, 25 nt, Human
uaauuuuuuguauuuuuaguagaga

SEQ ID NO: 1080383 - RNA, 23 nt, Human
uacaggcaugggccaccaugccc

SEQ ID NO: 1080384 - RNA, 19 nt, Human
uaccugaggaacuggagag

SEQ ID NO: 1080385 - RNA, 22 nt, Human
uagaaacugcccaguuuuauca

SEQ ID NO: 1080386 - RNA, 24 nt, Human
uaguagaaacaaggucuggcuaug

SEQ ID NO: 1080387 - RNA, 21 nt, Human
uaguagagacgggguuucacc

SEQ ID NO: 1080388 - RNA, 22 nt, Human
uaguagagacgggguuucaccg

SEQ ID NO: 1080389 - RNA, 26 nt, Human
uaguagagacgggguuucaccguuuu

SEQ ID NO: 1080390 - RNA, 22 nt, Human
uaugaugcccaggcugucuuga

SEQ ID NO: 1080391 - RNA, 23 nt, Human
uaugaugcccaggcugucuugaa

SEQ ID NO: 1080392 - RNA, 24 nt, Human
uauuuuuuauuuuuaguagaaaca

SEQ ID NO: 1080393 - RNA, 18 nt, Human
ucacugcaagcuccgccu

SEQ ID NO: 1080394 - RNA, 19 nt, Human
ucacugcaagcuccgccuc

SEQ ID NO: 1080395 - RNA, 24 nt, Human
ucacugcaagcuccgccucccggg

SEQ ID NO: 1080396 - RNA, 19 nt, Human
ucacuguggccucaaccuc

SEQ ID NO: 1080397 - RNA, 18 nt, Human
ucagccucccaaguagcu

SEQ ID NO: 1080398 - RNA, 23 nt, Human
ucagccuccugaguagcuggggc

SEQ ID NO: 1080399 - RNA, 21 nt, Human
ucaguucuaauggcaugguuc

SEQ ID NO: 1080400 - RNA, 18 nt, Human
ucauauauucaucuuugg

SEQ ID NO: 1080401 - RNA, 19 nt, Human
uccauccagcgugaaaccc

SEQ ID NO: 1080402 - RNA, 22 nt, Human
ucccaaagugcuggaguaccuc

SEQ ID NO: 1080403 - RNA, 24 nt, Human
ucccaaagugcugggauuacaggc

SEQ ID NO: 1080404 - RNA, 24 nt, Human
ucccaaguagcugggacuacaggc

SEQ ID NO: 1080405 - RNA, 21 nt, Human
ucccggguucacgccauucuc

SEQ ID NO: 1080406 - RNA, 24 nt, Human
ucccggguucacgccauucuccug

SEQ ID NO: 1080407 - RNA, 20 nt, Human
uccuaggcccaagccauccu

SEQ ID NO: 1080408 - RNA, 24 nt, Human
uccugaguagcuggggcuacaggc

SEQ ID NO: 1080409 - RNA, 22 nt, Human
uccugggucccuagaggggugg

SEQ ID NO: 1080410 - RNA, 24 nt, Human
ucgcccaggcuggagugcaguggc

SEQ ID NO: 1080411 - RNA, 24 nt, Human
ucgcucugucgcccaggcuggagu

SEQ ID NO: 1080412 - RNA, 18 nt, Human
ucggccucccaaagugcu

SEQ ID NO: 1080413 - RNA, 18 nt, Human
ucggccucccaaagugcu

SEQ ID NO: 1080414 - RNA, 23 nt, Human
ucggccucccaaagugcuggagu

SEQ ID NO: 1080415 - RNA, 19 nt, Human
ucucacucugucacccagg

SEQ ID NO: 1080416 - RNA, 23 nt, Human
ucucacucugucacccaggcuag

SEQ ID NO: 1080417 - RNA, 24 nt, Human
ucucacucugucacccaggcuaga

SEQ ID NO: 1080418 - RNA, 24 nt, Human
ucuccucaucccauuuuaaaagcc

SEQ ID NO: 1080419 - RNA, 26 nt, Human
ucuccugccucagccucccaaguagc

SEQ ID NO: 1080420 - RNA, 19 nt, Human
ucucgcucugucgcccagg

SEQ ID NO: 1080421 - RNA, 23 nt, Human
ucucgcucugucgcccaggcugg

SEQ ID NO: 1080422 - RNA, 24 nt, Human
ucucgcucugucgcccaggcugga

SEQ ID NO: 1080423 - RNA, 26 nt, Human
ucucgcucugucgcccaggcuggagu

SEQ ID NO: 1080424 - RNA, 27 nt, Human
ucucgcucugucgcccaggcuggagug

SEQ ID NO: 1080425 - RNA, 23 nt, Human
ucugucacccaggcuagaguccc

SEQ ID NO: 1080426 - RNA, 21 nt, Human
ugaaaagagcagggcaguuuu

SEQ ID NO: 1080427 - RNA, 22 nt, Human
ugagacggagucucgcucuguc

SEQ ID NO: 1080428 - RNA, 24 nt, Human
ugcaaacaagaggcacacuuucaa

SEQ ID NO: 1080429 - RNA, 22 nt, Human
ugcaguggcgggaucucggcuc

SEQ ID NO: 1080430 - RNA, 18 nt, Human
ugcccccaaguggccgca

SEQ ID NO: 1080431 - RNA, 24 nt, Human
ugccucagccucccaaguagcugg

SEQ ID NO: 1080432 - RNA, 24 nt, Human
ugcugggauuacaggcgugagcca

SEQ ID NO: 1080433 - RNA, 23 nt, Human
uggagagguagaauuagaggggg

SEQ ID NO: 1080434 - RNA, 21 nt, Human
uggaguaccgcuaauuuaaaa

SEQ ID NO: 1080435 - RNA, 23 nt, Human
uggagugcaguggcgggaucucg

SEQ ID NO: 1080436 - RNA, 24 nt, Human
uggagugcaguggcgggaucucgg

SEQ ID NO: 1080437 - RNA, 19 nt, Human
uggauaguguccuuucuca

SEQ ID NO: 1080438 - RNA, 22 nt, Human
uggcaugguuccccaaaaugua

SEQ ID NO: 1080439 - RNA, 21 nt, Human
ugggacuacaggcgcccgcca

SEQ ID NO: 1080440 - RNA, 22 nt, Human
ugggacuacaggcgcccgccac

SEQ ID NO: 1080441 - RNA, 22 nt, Human
ugggacuacaggcgcccgccac

SEQ ID NO: 1080442 - RNA, 24 nt, Human
ugggacuacaggcgcccgccacua

SEQ ID NO: 1080443 - RNA, 18 nt, Human
ugggauuacaggcgugag

SEQ ID NO: 1080444 - RNA, 19 nt, Human
ugggauuacaggcgugagc

SEQ ID NO: 1080445 - RNA, 21 nt, Human
ugggauuacaggcgugagcca

SEQ ID NO: 1080446 - RNA, 22 nt, Human
ugggauuacaggcgugagccac

SEQ ID NO: 1080447 - RNA, 23 nt, Human
ugggauuacaggcgugagccacc

SEQ ID NO: 1080448 - RNA, 24 nt, Human
ugggauuacaggcgugagccaccg

SEQ ID NO: 1080449 - RNA, 22 nt, Human
uggggcuacaggcaugggccac

SEQ ID NO: 1080450 - RNA, 24 nt, Human
uggggcuacaggcaugggccacca

SEQ ID NO: 1080451 - RNA, 20 nt, Human
uggguccagggcggggcggg

SEQ ID NO: 1080452 - RNA, 23 nt, Human
uguaaaagcugugacugagacaa

SEQ ID NO: 1080453 - RNA, 21 nt, Human
ugucgcccaggcuggagugca

SEQ ID NO: 1080454 - RNA, 19 nt, Human
ugugaaaagacaaaagauc

SEQ ID NO: 1080455 - RNA, 22 nt, Human
uuaguagagacgggguuucacc

SEQ ID NO: 1080456 - RNA, 22 nt, Human
uuaguagagacgggguuucacc

SEQ ID NO: 1080457 - RNA, 24 nt, Human
uuaguagagacgggguuucaccgu

SEQ ID NO: 1080458 - RNA, 24 nt, Human
uucacuguggccucaaccuccuag

SEQ ID NO: 1080459 - RNA, 23 nt, Human
uuccuugucuccucaucccauuu

SEQ ID NO: 1080460 - RNA, 23 nt, Human
uuguauuuuuaguagagacgggg

SEQ ID NO: 1080461 - RNA, 19 nt, Human
uuguucucuuuugcaucau

SEQ ID NO: 1080462 - RNA, 24 nt, Human
uuuuuaguagagacgggguuucac

SEQ ID NO: 1080463 - RNA, 21 nt, Human
uuuuuguauuuuuaguagaga

SEQ ID NO: 1080464 - RNA, 24 nt, Human
uuuuuuguauuuuuaguagagacg

SEQ ID NO: 1080465 - RNA, 25 nt, Human
uuuuuuuuuuuugagacggagucuc

SEQ ID NO: 1080466 - RNA, 22 nt, Human
uuuuuuuuuuuuuugagacgga

SEQ ID NO: 1080467 - RNA, 18 nt, Human
aaacaaggcagaaacaca

SEQ ID NO: 1080468 - RNA, 18 nt, Human
aacaaggcagaaacacag

SEQ ID NO: 1080469 - RNA, 18 nt, Human
aagaaaaaaacagauaug

SEQ ID NO: 1080470 - RNA, 21 nt, Human
aagcacugcagcguaggcagc

SEQ ID NO: 1080471 - RNA, 23 nt, Human
aaguuuccaaccagaagaagcuu

SEQ ID NO: 1080472 - RNA, 24 nt, Human
agaaaaaaacagauaugaaggcua

SEQ ID NO: 1080473 - RNA, 22 nt, Human
agaaacccagaagcaggaaaca

SEQ ID NO: 1080474 - RNA, 25 nt, Human
agacaggagaggcucaaaggggacc

SEQ ID NO: 1080475 - RNA, 22 nt, Human
agagagaaagagacuugucuaa

SEQ ID NO: 1080476 - RNA, 21 nt, Human
agaggcucaaagagagaaaga

SEQ ID NO: 1080477 - RNA, 24 nt, Human
aggaauguggagaaacccagaagc

SEQ ID NO: 1080478 - RNA, 24 nt, Human
aggcuauaggaauguggagaaacc

SEQ ID NO: 1080479 - RNA, 21 nt, Human
agugcauucucaaauacagcu

SEQ ID NO: 1080480 - RNA, 22 nt, Human
augacagaaagaaaaggagaca

SEQ ID NO: 1080481 - RNA, 23 nt, Human
augacagaaagaaaaggagacac

SEQ ID NO: 1080482 - RNA, 18 nt, Human
caaauacagcugaaagca

SEQ ID NO: 1080483 - RNA, 21 nt, Human
caaccagaagaagcuucauaa

SEQ ID NO: 1080484 - RNA, 18 nt, Human
cagaaagaaaaggagaca

SEQ ID NO: 1080485 - RNA, 18 nt, Human
cagauccccuggccugug

SEQ ID NO: 1080486 - RNA, 23 nt, Human
cagccaucugcaaacguaaaaca

SEQ ID NO: 1080487 - RNA, 19 nt, Human
cagcguaggcagcugaauc

SEQ ID NO: 1080488 - RNA, 23 nt, Human
cagcugaaucccauuaagaaauc

SEQ ID NO: 1080489 - RNA, 22 nt, Human
ccacaggcucaggcuggacuug

SEQ ID NO: 1080490 - RNA, 23 nt, Human
ccaucugcaaacguaaaacaagg

SEQ ID NO: 1080491 - RNA, 21 nt, Human
cccagaagcaggaaacagggu

SEQ ID NO: 1080492 - RNA, 21 nt, Human
cccucccaggggaucuaagag

SEQ ID NO: 1080493 - RNA, 24 nt, Human
ccugggugucgggugccagggcug

SEQ ID NO: 1080494 - RNA, 20 nt, Human
ccuuagacuccucguggccg

SEQ ID NO: 1080495 - RNA, 23 nt, Human
cucauggcccaugagcucuugcc

SEQ ID NO: 1080496 - RNA, 24 nt, Human
cuccccucuguuauuucaucugau

SEQ ID NO: 1080497 - RNA, 21 nt, Human
cucuauguugucaugcccucc

SEQ ID NO: 1080498 - RNA, 23 nt, Human
cucuauguugucaugcccuccca

SEQ ID NO: 1080499 - RNA, 23 nt, Human
cugaaucccauuaagaaaucaug

SEQ ID NO: 1080500 - RNA, 20 nt, Human
cuuccuguagcccacucucc

SEQ ID NO: 1080501 - RNA, 25 nt, Human
gaaaaggagacacggagaguuccag

SEQ ID NO: 1080502 - RNA, 23 nt, Human
gaaagaaaaggagacacggagag

SEQ ID NO: 1080503 - RNA, 18 nt, Human
gaagcaggaaacagggug

SEQ ID NO: 1080504 - RNA, 20 nt, Human
gugccagggcugcucugguu

SEQ ID NO: 1080505 - RNA, 23 nt, Human
uaagaaaaaaacagauaugaagg

SEQ ID NO: 1080506 - RNA, 21 nt, Human
ucaggcuuuccuugcuuucag

SEQ ID NO: 1080507 - RNA, 23 nt, Human
ucaggcuuuccuugcuuucagug

SEQ ID NO: 1080508 - RNA, 21 nt, Human
ucccaggggaucuaagagacc

SEQ ID NO: 1080509 - RNA, 22 nt, Human
uccuguagcccacucuccuggg

SEQ ID NO: 1080510 - RNA, 22 nt, Human
ucuaguuucugcagacucugug

SEQ ID NO: 1080511 - RNA, 18 nt, Human
ucuccacugccgaccaca

SEQ ID NO: 1080512 - RNA, 18 nt, Human
ucugcagacucugugggc

SEQ ID NO: 1080513 - RNA, 18 nt, Human
ugaaagcacugcagcgua

SEQ ID NO: 1080514 - RNA, 24 nt, Human
ugaaagcacugcagcguaggcagc

SEQ ID NO: 1080515 - RNA, 20 nt, Human
ugaaggcuaagguccucuuu

SEQ ID NO: 1080516 - RNA, 18 nt, Human
ugacagaaagaaaaggag

SEQ ID NO: 1080517 - RNA, 18 nt, Human
ugccaguggccuggugcu

SEQ ID NO: 1080518 - RNA, 22 nt, Human
ugccucuaguuucugcagacuc

SEQ ID NO: 1080519 - RNA, 19 nt, Human
uggccuggugcugaugggg

SEQ ID NO: 1080520 - RNA, 18 nt, Human
uggcuccuggcuacaacc

SEQ ID NO: 1080521 - RNA, 21 nt, Human
ugggaggaggaccugucuucc

SEQ ID NO: 1080522 - RNA, 24 nt, Human
ugucaugcccucccaggggaucua

SEQ ID NO: 1080523 - RNA, 22 nt, Human
ugucgggugccagggcugcucu

SEQ ID NO: 1080524 - RNA, 18 nt, Human
ugugccucuaguuucugc

SEQ ID NO: 1080525 - RNA, 26 nt, Human
uguggagaaacccagaagcaggaaac

SEQ ID NO: 1080526 - RNA, 23 nt, Human
uguucccaccacacugggcuuac

SEQ ID NO: 1080527 - RNA, 28 nt, Human
uguugaaugcuuuuaaaggacucuucuu

SEQ ID NO: 1080528 - RNA, 18 nt, Human
uuccaaccagaagaagcu

SEQ ID NO: 1080529 - RNA, 18 nt, Human
uucccaccacacugggcu

SEQ ID NO: 1080530 - RNA, 23 nt, Human
uuccuguagcccacucuccuggg

SEQ ID NO: 1080531 - RNA, 24 nt, Human
uucucaaagaaugugggacuauac

SEQ ID NO: 1080532 - RNA, 18 nt, Human
aaagagcaggaggauggg

SEQ ID NO: 1080533 - RNA, 20 nt, Human
agaacauuccauacugccua

SEQ ID NO: 1080534 - RNA, 23 nt, Human
ccaccuccuauuaccaucacacu

SEQ ID NO: 1080535 - RNA, 24 nt, Human
cccagauauucggaccauagcaac

SEQ ID NO: 1080536 - RNA, 22 nt, Human
cccaguacaauuuuacauuaga

SEQ ID NO: 1080537 - RNA, 19 nt, Human
ccuccuauuaccaucacac

SEQ ID NO: 1080538 - RNA, 22 nt, Human
cuacuuugugguucauagauga

SEQ ID NO: 1080539 - RNA, 23 nt, Human
cucauccgaccagcccaguacaa

SEQ ID NO: 1080540 - RNA, 20 nt, Human
cuugggcuggucggucugag

SEQ ID NO: 1080541 - RNA, 23 nt, Human
gaccauagcaacuaccuuauuca

SEQ ID NO: 1080542 - RNA, 22 nt, Human
gcaggcccagauauucggacca

SEQ ID NO: 1080543 - RNA, 22 nt, Human
guaaaaauccuggaauguuccg

SEQ ID NO: 1080544 - RNA, 20 nt, Human
guguuugggccaagucuuca

SEQ ID NO: 1080545 - RNA, 18 nt, Human
uaaauaagaacauuccau

SEQ ID NO: 1080546 - RNA, 20 nt, Human
uauaagggcacuaaucucau

SEQ ID NO: 1080547 - RNA, 24 nt, Human
ucagagcucagucccaccuccuau

SEQ ID NO: 1080548 - RNA, 23 nt, Human
ugggggggcaggcccagauauuc

SEQ ID NO: 1080549 - RNA, 19 nt, Human
uuccauacugccuaacauu

SEQ ID NO: 1080550 - RNA, 18 nt, Human
uuggugagauguuucuug

SEQ ID NO: 1080551 - RNA, 22 nt, Human
uuuaccaaauucugguucucca

SEQ ID NO: 1080552 - RNA, 25 nt, Human
aaaaaaagaagaaagaaagaaagaa

SEQ ID NO: 1080553 - RNA, 19 nt, Human
aaaaaauaaaaaaauaggc

SEQ ID NO: 1080554 - RNA, 23 nt, Human
aaaagaaaauacaaaaaauaaaa

SEQ ID NO: 1080555 - RNA, 26 nt, Human
aaaagaaaauacaaaaaauaaaaaaa

SEQ ID NO: 1080556 - RNA, 21 nt, Human
aaacaggaauaauccccagaa

SEQ ID NO: 1080557 - RNA, 23 nt, Human
aaacaucuugagagacuucauuc

SEQ ID NO: 1080558 - RNA, 22 nt, Human
aaagaaaaaaaagaagaaagaa

SEQ ID NO: 1080559 - RNA, 22 nt, Human
aaagaaagagaaagaaagaaaa

SEQ ID NO: 1080560 - RNA, 25 nt, Human
aaagagaaagaaagaaaaagcaaga

SEQ ID NO: 1080561 - RNA, 24 nt, Human
aaagcagacagauccuugagguca

SEQ ID NO: 1080562 - RNA, 26 nt, Human
aaagcagacagauccuugaggucagg

SEQ ID NO: 1080563 - RNA, 24 nt, Human
aaauaggcugggcgugguggcuca

SEQ ID NO: 1080564 - RNA, 18 nt, Human
aacaggaauaauccccag

SEQ ID NO: 1080565 - RNA, 19 nt, Human
aacaugacaaaaccccauc

SEQ ID NO: 1080566 - RNA, 21 nt, Human
aacaugacaaaaccccaucuc

SEQ ID NO: 1080567 - RNA, 21 nt, Human
aacaugacaaaaccccaucuc

SEQ ID NO: 1080568 - RNA, 24 nt, Human
aaccucaggugauccaccugccuu

SEQ ID NO: 1080569 - RNA, 23 nt, Human
aagaaaaagcaagagaaagagau

SEQ ID NO: 1080570 - RNA, 25 nt, Human
aagaaaaagcaagagaaagagauua

SEQ ID NO: 1080571 - RNA, 21 nt, Human
aagaaagaaaaagcaagagaa

SEQ ID NO: 1080572 - RNA, 21 nt, Human
aagaaagaaagaaagaaagaa

SEQ ID NO: 1080573 - RNA, 23 nt, Human
aagaaagaaagaaagaaagagaa

SEQ ID NO: 1080574 - RNA, 21 nt, Human
aagaaagaaagaaggaaagaa

SEQ ID NO: 1080575 - RNA, 21 nt, Human
aagaaagaaagagaaagaaag

SEQ ID NO: 1080576 - RNA, 21 nt, Human
aagaaagagaaagaaagaaaa

SEQ ID NO: 1080577 - RNA, 21 nt, Human
aagaaggaaagaaagaaagaa

SEQ ID NO: 1080578 - RNA, 21 nt, Human
aagagaaagagauuaccaaaa

SEQ ID NO: 1080579 - RNA, 25 nt, Human
aagcaagagaaagagauuaccaaaa

SEQ ID NO: 1080580 - RNA, 19 nt, Human
aaguagcugggauuacagg

SEQ ID NO: 1080581 - RNA, 26 nt, Human
aaguagcugggauuacaggugacugc

SEQ ID NO: 1080582 - RNA, 23 nt, Human
aauacaaaaaauaaaaaaauagg

SEQ ID NO: 1080583 - RNA, 24 nt, Human
aauggugcgcaccuguaaucccag

SEQ ID NO: 1080584 - RNA, 24 nt, Human
aaugugcucagauuacagguguga

SEQ ID NO: 1080585 - RNA, 19 nt, Human
acacagugagacccugucu

SEQ ID NO: 1080586 - RNA, 20 nt, Human
acacagugagacccugucuc

SEQ ID NO: 1080587 - RNA, 19 nt, Human
accaaccaacacuccacca

SEQ ID NO: 1080588 - RNA, 21 nt, Human
accagcgagaacaaccaugug

SEQ ID NO: 1080589 - RNA, 26 nt, Human
accuuacuuuaugugucucuccauug

SEQ ID NO: 1080590 - RNA, 23 nt, Human
acgagguucacgguguuggccag

SEQ ID NO: 1080591 - RNA, 25 nt, Human
acucuguugcccaggcugaagugca

SEQ ID NO: 1080592 - RNA, 24 nt, Human
agaaaaaaaagaagaaagaaagaa

SEQ ID NO: 1080593 - RNA, 19 nt, Human
agaaaaagcaagagaaaga

SEQ ID NO: 1080594 - RNA, 20 nt, Human
agaaagaaaaagcaagagaa

SEQ ID NO: 1080595 - RNA, 24 nt, Human
agaaagaauacacuuugcaaagaa

SEQ ID NO: 1080596 - RNA, 23 nt, Human
agaaagagauuaccaaaagaaaa

SEQ ID NO: 1080597 - RNA, 25 nt, Human
agacagauccuugaggucaggaguu

SEQ ID NO: 1080598 - RNA, 23 nt, Human
agaccaaagcagacagauccuug

SEQ ID NO: 1080599 - RNA, 25 nt, Human
agagaaagagauuaccaaaagaaaa

SEQ ID NO: 1080600 - RNA, 21 nt, Human
agauccuugaggucaggaguu

SEQ ID NO: 1080601 - RNA, 22 nt, Human
agauccuugaggucaggaguuu

SEQ ID NO: 1080602 - RNA, 24 nt, Human
agauccuugaggucaggaguuuga

SEQ ID NO: 1080603 - RNA, 24 nt, Human
agauuacaggugugagccacggca

SEQ ID NO: 1080604 - RNA, 24 nt, Human
agauuacaggugugagccacggca

SEQ ID NO: 1080605 - RNA, 28 nt, Human
agcaagagaaagagauuaccaaaagaaa

SEQ ID NO: 1080606 - RNA, 24 nt, Human
agcgauucucgugccucagccucc

SEQ ID NO: 1080607 - RNA, 22 nt, Human
agcuucgcauccagcgcccucc

SEQ ID NO: 1080608 - RNA, 21 nt, Human
aggaaagaaagaaagaaagaa

SEQ ID NO: 1080609 - RNA, 20 nt, Human
aggaguuugagaccagacug

SEQ ID NO: 1080610 - RNA, 22 nt, Human
aggcugggcgugguggcucaug

SEQ ID NO: 1080611 - RNA, 24 nt, Human
aggugauccaccugccuuggccuc

SEQ ID NO: 1080612 - RNA, 24 nt, Human
auccuugaggucaggaguuugaga

SEQ ID NO: 1080613 - RNA, 31 nt, Human
augaaaccccaauaaaaacuuuagauaccgg

SEQ ID NO: 1080614 - RNA, 19 nt, Human
augccuguaaucccagcac

SEQ ID NO: 1080615 - RNA, 23 nt, Human
augccuguaaucccagcacguug

SEQ ID NO: 1080616 - RNA, 22 nt, Human
auuugggcuggaagaugagaug

SEQ ID NO: 1080617 - RNA, 27 nt, Human
caaaagaaaauacaaaaaauaaaaaaa

SEQ ID NO: 1080618 - RNA, 21 nt, Human
caaagaaugaugcccucagac

SEQ ID NO: 1080619 - RNA, 22 nt, Human
caaagugugacuggcaucaaaa

SEQ ID NO: 1080620 - RNA, 23 nt, Human
caagagaaagagauuaccaaaag

SEQ ID NO: 1080621 - RNA, 20 nt, Human
caagauggaggccaguuacc

SEQ ID NO: 1080622 - RNA, 27 nt, Human
caagcgauucucgugccucagccuccc

SEQ ID NO: 1080623 - RNA, 24 nt, Human
caccaugcccggcuaauuuuugua

SEQ ID NO: 1080624 - RNA, 22 nt, Human
cacccagccaaaccccuagauu

SEQ ID NO: 1080625 - RNA, 19 nt, Human
caccuguaaucccagcuac

SEQ ID NO: 1080626 - RNA, 23 nt, Human
caccuguaaucccagcuacucca

SEQ ID NO: 1080627 - RNA, 22 nt, Human
cacgguguuggccaggcugcuc

SEQ ID NO: 1080628 - RNA, 18 nt, Human
cacuccaccauuggcaag

SEQ ID NO: 1080629 - RNA, 18 nt, Human
cacuccaccauuggcaag

SEQ ID NO: 1080630 - RNA, 20 nt, Human
cacuccaccauuggcaaguu

SEQ ID NO: 1080631 - RNA, 24 nt, Human
cacucuguugcccaggcugaagug

SEQ ID NO: 1080632 - RNA, 18 nt, Human
cacugcaaccucugccuc

SEQ ID NO: 1080633 - RNA, 21 nt, Human
cacugcaaccucugccuccca

SEQ ID NO: 1080634 - RNA, 23 nt, Human
cagacagauccuugaggucagga

SEQ ID NO: 1080635 - RNA, 20 nt, Human
cagaccucuccuaccaacca

SEQ ID NO: 1080636 - RNA, 20 nt, Human
cagauuacaggugugagcca

SEQ ID NO: 1080637 - RNA, 18 nt, Human
cauccagcgcccuccuag

SEQ ID NO: 1080638 - RNA, 21 nt, Human
cauccagcgcccuccuagacc

SEQ ID NO: 1080639 - RNA, 22 nt, Human
cauggugaagcauccugguugg

SEQ ID NO: 1080640 - RNA, 23 nt, Human
ccaaagcagacagauccuugagg

SEQ ID NO: 1080641 - RNA, 24 nt, Human
ccaaagugugacuggcaucaaaag

SEQ ID NO: 1080642 - RNA, 21 nt, Human
ccaaguagcugggauuacagg

SEQ ID NO: 1080643 - RNA, 24 nt, Human
ccaaugugcucagauuacaggugu

SEQ ID NO: 1080644 - RNA, 18 nt, Human
ccagcgagaacaaccaug

SEQ ID NO: 1080645 - RNA, 19 nt, Human
ccaguuaccagcgagaaca

SEQ ID NO: 1080646 - RNA, 22 nt, Human
cccaaguagcugggauuacagg

SEQ ID NO: 1080647 - RNA, 23 nt, Human
cccaaguagcugggauuacaggu

SEQ ID NO: 1080648 - RNA, 24 nt, Human
cccaaguagcugggauuacaggug

SEQ ID NO: 1080649 - RNA, 20 nt, Human
cccagcacguugggagacca

SEQ ID NO: 1080650 - RNA, 20 nt, Human
cccagguucaagcgauucuc

SEQ ID NO: 1080651 - RNA, 22 nt, Human
cccucagaccucuccuaccaac

SEQ ID NO: 1080652 - RNA, 21 nt, Human
ccuaaccucaggugauccacc

SEQ ID NO: 1080653 - RNA, 23 nt, Human
ccuaaccucaggugauccaccug

SEQ ID NO: 1080654 - RNA, 23 nt, Human
ccuaaccucaggugauccaccug

SEQ ID NO: 1080655 - RNA, 21 nt, Human
ccuaccaaccaacacuccacc

SEQ ID NO: 1080656 - RNA, 22 nt, Human
ccuaggaggcagacucaaaaua

SEQ ID NO: 1080657 - RNA, 22 nt, Human
ccucccagguucaagcgauucu

SEQ ID NO: 1080658 - RNA, 21 nt, Human
ccugccuuggccucccaaugu

SEQ ID NO: 1080659 - RNA, 20 nt, Human
ccuguaaucccagcacguug

SEQ ID NO: 1080660 - RNA, 22 nt, Human
ccuguaaucccagcuacuccag

SEQ ID NO: 1080661 - RNA, 23 nt, Human
ccuguaaucccagcuacuccaga

SEQ ID NO: 1080662 - RNA, 24 nt, Human
ccugucuccaaagaaaaaaaagaa

SEQ ID NO: 1080663 - RNA, 24 nt, Human
ccuugaggucaggaguuugagacc

SEQ ID NO: 1080664 - RNA, 23 nt, Human
cgagguucacgguguuggccagg

SEQ ID NO: 1080665 - RNA, 19 nt, Human
cgcaccuguaaucccagcu

SEQ ID NO: 1080666 - RNA, 24 nt, Human
cucacugcaaccucugccucccag

SEQ ID NO: 1080667 - RNA, 24 nt, Human
cucacugcaaccucugccucccag

SEQ ID NO: 1080668 - RNA, 22 nt, Human
cucagaccucuccuaccaacca

SEQ ID NO: 1080669 - RNA, 23 nt, Human
cucagccucccaaguagcuggga

SEQ ID NO: 1080670 - RNA, 24 nt, Human
cucaggugauccaccugccuuggc

SEQ ID NO: 1080671 - RNA, 25 nt, Human
cucaugccuguaaucccagcacguu

SEQ ID NO: 1080672 - RNA, 24 nt, Human
cucccaaagugugacuggcaucaa

SEQ ID NO: 1080673 - RNA, 25 nt, Human
cucgugccucagccucccaaguagc

SEQ ID NO: 1080674 - RNA, 23 nt, Human
cugcaaccucugccucccagguu

SEQ ID NO: 1080675 - RNA, 24 nt, Human
cugcaaccucugccucccagguuc

SEQ ID NO: 1080676 - RNA, 23 nt, Human
cugccuuggccucccaaugugcu

SEQ ID NO: 1080677 - RNA, 23 nt, Human
cuggccaacaugacaaaacccca

SEQ ID NO: 1080678 - RNA, 23 nt, Human
cuuauauccuucauaauaaaaca

SEQ ID NO: 1080679 - RNA, 20 nt, Human
cuucgcauccagcgcccucc

SEQ ID NO: 1080680 - RNA, 20 nt, Human
gaaagaaagaaggaaagaaa

SEQ ID NO: 1080681 - RNA, 21 nt, Human
gacacagugagacccugucuc

SEQ ID NO: 1080682 - RNA, 19 nt, Human
gagaaagaaagaaaaagca

SEQ ID NO: 1080683 - RNA, 25 nt, Human
gagaaagagauuaccaaaagaaaau

SEQ ID NO: 1080684 - RNA, 21 nt, Human
gagguucacgguguuggccag

SEQ ID NO: 1080685 - RNA, 23 nt, Human
gauccuugaggucaggaguuuga

SEQ ID NO: 1080686 - RNA, 18 nt, Human
gauuacaggugacugcca

SEQ ID NO: 1080687 - RNA, 24 nt, Human
gauuacaggugacugccaccaugc

SEQ ID NO: 1080688 - RNA, 18 nt, Human
gauuacaggugugagcca

SEQ ID NO: 1080689 - RNA, 19 nt, Human
gcaaaacaggaauaauccc

SEQ ID NO: 1080690 - RNA, 25 nt, Human
gcauggugaagcauccugguuggug

SEQ ID NO: 1080691 - RNA, 21 nt, Human
gccaacaugacaaaaccccau

SEQ ID NO: 1080692 - RNA, 22 nt, Human
gcccggcuaauuuuuguauuuu

SEQ ID NO: 1080693 - RNA, 24 nt, Human
gcgauucucgugccucagccuccc

SEQ ID NO: 1080694 - RNA, 23 nt, Human
gcgcccuccuagaccuuacuucu

SEQ ID NO: 1080695 - RNA, 20 nt, Human
gcugaagugcaguggcacca

SEQ ID NO: 1080696 - RNA, 21 nt, Human
gcugggcgugguggcucaugc

SEQ ID NO: 1080697 - RNA, 23 nt, Human
ggcugggcgugguggcucaugcc

SEQ ID NO: 1080698 - RNA, 24 nt, Human
gggcgugguggcucaugccuguaa

SEQ ID NO: 1080699 - RNA, 19 nt, Human
ggucaggaguuugagacca

SEQ ID NO: 1080700 - RNA, 22 nt, Human
ggugaagcauccugguugguga

SEQ ID NO: 1080701 - RNA, 24 nt, Human
gguggcucaugccuguaaucccag

SEQ ID NO: 1080702 - RNA, 18 nt, Human
guagcugggauuacaggu

SEQ ID NO: 1080703 - RNA, 21 nt, Human
gugacacacccgauuccacaa

SEQ ID NO: 1080704 - RNA, 24 nt, Human
gugauccaccugccuuggccuccc

SEQ ID NO: 1080705 - RNA, 22 nt, Human
gugccucagccucccaaguagc

SEQ ID NO: 1080706 - RNA, 23 nt, Human
gugccucagccucccaaguagcu

SEQ ID NO: 1080707 - RNA, 21 nt, Human
gugcucagauuacagguguga

SEQ ID NO: 1080708 - RNA, 23 nt, Human
guggcucaugccuguaaucccag

SEQ ID NO: 1080709 - RNA, 24 nt, Human
uaaccucaggugauccaccugccu

SEQ ID NO: 1080710 - RNA, 19 nt, Human
uaagggguaggguggagau

SEQ ID NO: 1080711 - RNA, 22 nt, Human
uaauuuuuguauuuuuaguaga

SEQ ID NO: 1080712 - RNA, 24 nt, Human
uacaggugugagccacggcaccca

SEQ ID NO: 1080713 - RNA, 21 nt, Human
uacccuguagugucauagaau

SEQ ID NO: 1080714 - RNA, 20 nt, Human
uagaaaaucuauaaugaagg

SEQ ID NO: 1080715 - RNA, 22 nt, Human
uagaaaaucuauaaugaaggac

SEQ ID NO: 1080716 - RNA, 22 nt, Human
uagauaccgaagcauggugaag

SEQ ID NO: 1080717 - RNA, 18 nt, Human
uagcuggauguaauggug

SEQ ID NO: 1080718 - RNA, 20 nt, Human
uaguagauacgagguucacg

SEQ ID NO: 1080719 - RNA, 24 nt, Human
uauauccuucauaauaaaacaauu

SEQ ID NO: 1080720 - RNA, 24 nt, Human
uauuuagaaaaucuauaaugaagg

SEQ ID NO: 1080721 - RNA, 18 nt, Human
ucacaccugaauuugggc

SEQ ID NO: 1080722 - RNA, 19 nt, Human
ucacugcaaccucugccuc

SEQ ID NO: 1080723 - RNA, 23 nt, Human
ucacugcaaccucugccucccag

SEQ ID NO: 1080724 - RNA, 24 nt, Human
ucacugcaaccucugccucccagg

SEQ ID NO: 1080725 - RNA, 22 nt, Human
ucagauuacaggugugagccac

SEQ ID NO: 1080726 - RNA, 20 nt, Human
ucagccucccaaguagcugg

SEQ ID NO: 1080727 - RNA, 27 nt, Human
ucagcucacugcaaccucugccuccca

SEQ ID NO: 1080728 - RNA, 21 nt, Human
ucaggugauccaccugccuug

SEQ ID NO: 1080729 - RNA, 22 nt, Human
ucaugccuguaaucccagcacg

SEQ ID NO: 1080730 - RNA, 25 nt, Human
ucauugucaucaugcuuuccccggg

SEQ ID NO: 1080731 - RNA, 21 nt, Human
uccaaagaaaaaaaagaagaa

SEQ ID NO: 1080732 - RNA, 23 nt, Human
uccaaagaaaaaaaagaagaaag

SEQ ID NO: 1080733 - RNA, 23 nt, Human
uccaaagaaaaaaaagaagaaag

SEQ ID NO: 1080734 - RNA, 23 nt, Human
uccacaaugcaggacaugaaagc

SEQ ID NO: 1080735 - RNA, 23 nt, Human
ucccaaguagcugggauuacagg

SEQ ID NO: 1080736 - RNA, 23 nt, Human
ucccaaugugcucagauuacagg

SEQ ID NO: 1080737 - RNA, 21 nt, Human
ucccagguucaagcgauucuc

SEQ ID NO: 1080738 - RNA, 24 nt, Human
ucccagguucaagcgauucucgug

SEQ ID NO: 1080739 - RNA, 19 nt, Human
uccccagaaaaggugaaaa

SEQ ID NO: 1080740 - RNA, 19 nt, Human
ucccuaaguaacagggaua

SEQ ID NO: 1080741 - RNA, 21 nt, Human
uccuaggaggcagacucaaaa

SEQ ID NO: 1080742 - RNA, 21 nt, Human
uccuugaggucaggaguuuga

SEQ ID NO: 1080743 - RNA, 18 nt, Human
ucuaacccuaauuagugc

SEQ ID NO: 1080744 - RNA, 19 nt, Human
ucucacucuguugcccagg

SEQ ID NO: 1080745 - RNA, 21 nt, Human
ucucacucuguugcccaggcu

SEQ ID NO: 1080746 - RNA, 23 nt, Human
ucucacucuguugcccaggcuga

SEQ ID NO: 1080747 - RNA, 24 nt, Human
ucucacucuguugcccaggcugaa

SEQ ID NO: 1080748 - RNA, 26 nt, Human
ucucacucuguugcccaggcugaagu

SEQ ID NO: 1080749 - RNA, 23 nt, Human
ucuccaaagaaaaaaaagaagaa

SEQ ID NO: 1080750 - RNA, 18 nt, Human
ugaagcauccugguuggu

SEQ ID NO: 1080751 - RNA, 25 nt, Human
ugacaaaaccccaucuccacuaaaa

SEQ ID NO: 1080752 - RNA, 25 nt, Human
ugagaaguggucauugucaucaugc

SEQ ID NO: 1080753 - RNA, 23 nt, Human
ugagagacuucauucugugcaga

SEQ ID NO: 1080754 - RNA, 18 nt, Human
ugaggucaggaguuugag

SEQ ID NO: 1080755 - RNA, 22 nt, Human
ugcaguggcaccaucucagcuc

SEQ ID NO: 1080756 - RNA, 23 nt, Human
ugcccaggcugaagugcaguggc

SEQ ID NO: 1080757 - RNA, 24 nt, Human
ugcccaggcugaagugcaguggca

SEQ ID NO: 1080758 - RNA, 24 nt, Human
ugcccggcuaauuuuuguauuuuu

SEQ ID NO: 1080759 - RNA, 18 nt, Human
ugcccuaaagaaguuuuc

SEQ ID NO: 1080760 - RNA, 20 nt, Human
ugcccucagaccucuccuac

SEQ ID NO: 1080761 - RNA, 24 nt, Human
ugccucagccucccaaguagcugg

SEQ ID NO: 1080762 - RNA, 23 nt, Human
ugccuguaaucccagcacguugg

SEQ ID NO: 1080763 - RNA, 24 nt, Human
ugccuguaaucccagcacguuggg

SEQ ID NO: 1080764 - RNA, 21 nt, Human
ugcucucgaacuccuaaccuc

SEQ ID NO: 1080765 - RNA, 22 nt, Human
uggaagaugagaugacccaaga

SEQ ID NO: 1080766 - RNA, 19 nt, Human
uggcaccaucucagcucac

SEQ ID NO: 1080767 - RNA, 24 nt, Human
uggcaccaucucagcucacugcaa

SEQ ID NO: 1080768 - RNA, 24 nt, Human
uggccaggcugcucucgaacuccu

SEQ ID NO: 1080769 - RNA, 22 nt, Human
uggcucaugccuguaaucccag

SEQ ID NO: 1080770 - RNA, 24 nt, Human
uggcucaugccuguaaucccagca

SEQ ID NO: 1080771 - RNA, 18 nt, Human
ugggauuacaggugacug

SEQ ID NO: 1080772 - RNA, 21 nt, Human
ugggauuacaggugacugcca

SEQ ID NO: 1080773 - RNA, 22 nt, Human
ugggauuacaggugacugccac

SEQ ID NO: 1080774 - RNA, 24 nt, Human
ugggauuacaggugacugccacca

SEQ ID NO: 1080775 - RNA, 25 nt, Human
ugggauuacaggugacugccaccau

SEQ ID NO: 1080776 - RNA, 22 nt, Human
ugguacagaaagaauacacuuu

SEQ ID NO: 1080777 - RNA, 21 nt, Human
uggugcgcaccuguaauccca

SEQ ID NO: 1080778 - RNA, 24 nt, Human
ugguggcucaugccuguaauccca

SEQ ID NO: 1080779 - RNA, 19 nt, Human
ugucauagaauaaauaauu

SEQ ID NO: 1080780 - RNA, 20 nt, Human
ugugugacauagcgugcaca

SEQ ID NO: 1080781 - RNA, 21 nt, Human
uguugcccaggcugaagugca

SEQ ID NO: 1080782 - RNA, 20 nt, Human
uuagcuggauguaauggugc

SEQ ID NO: 1080783 - RNA, 23 nt, Human
uucaagcgauucucgugccucag

SEQ ID NO: 1080784 - RNA, 24 nt, Human
uucaauauaccgguugaggucaga

SEQ ID NO: 1080785 - RNA, 21 nt, Human
uucugugcagaugaaugagua

SEQ ID NO: 1080786 - RNA, 24 nt, Human
uugcccaggcugaagugcaguggc

SEQ ID NO: 1080787 - RNA, 20 nt, Human
uuuaacucagugguggaguu

SEQ ID NO: 1080788 - RNA, 22 nt, Human
uuugagucagccugacacccag

SEQ ID NO: 1080789 - RNA, 18 nt, Human
uuuuuguauuuuuaguag

SEQ ID NO: 1080790 - RNA, 21 nt, Human
uuuuuguauuuuuaguagaua

SEQ ID NO: 1080791 - RNA, 20 nt, Human
aaaagaauagagcuaacuca

SEQ ID NO: 1080792 - RNA, 24 nt, Human
aaacaaaaagaagcauuuccccca

SEQ ID NO: 1080793 - RNA, 20 nt, Human
aaacccucucgccgcucucc

SEQ ID NO: 1080794 - RNA, 19 nt, Human
aaggaaaugauaaaauagc

SEQ ID NO: 1080795 - RNA, 20 nt, Human
aguaacaggaaacuaaguac

SEQ ID NO: 1080796 - RNA, 22 nt, Human
auacauuuuuauaagagaaaaa

SEQ ID NO: 1080797 - RNA, 28 nt, Human
aucauaauauuccaaauguaugacaguu

SEQ ID NO: 1080798 - RNA, 18 nt, Human
aucuuaacaagugugaaa

SEQ ID NO: 1080799 - RNA, 23 nt, Human
augaugaacagcucuauuauaac

SEQ ID NO: 1080800 - RNA, 21 nt, Human
auggcauuugaaagcaaacac

SEQ ID NO: 1080801 - RNA, 21 nt, Human
caagcagcaccacuccagaac

SEQ ID NO: 1080802 - RNA, 20 nt, Human
cacaacaccagcagcuugca

SEQ ID NO: 1080803 - RNA, 21 nt, Human
cacaacaccagcagcuugcaa

SEQ ID NO: 1080804 - RNA, 24 nt, Human
cacugugcauuauaacaauaaggc

SEQ ID NO: 1080805 - RNA, 25 nt, Human
cagcucuauuauaacaaagaauaau

SEQ ID NO: 1080806 - RNA, 19 nt, Human
ccagccacaacaccagcag

SEQ ID NO: 1080807 - RNA, 23 nt, Human
ccggcccaagcagcaccacucca

SEQ ID NO: 1080808 - RNA, 23 nt, Human
cucgccgcucuccccagccacaa

SEQ ID NO: 1080809 - RNA, 21 nt, Human
gaacauaucacaguaucgaau

SEQ ID NO: 1080810 - RNA, 24 nt, Human
gacaaaaaaugccaaacccucucg

SEQ ID NO: 1080811 - RNA, 23 nt, Human
gcagcagaaauauccaugaugaa

SEQ ID NO: 1080812 - RNA, 20 nt, Human
gcagcuugcaauccuccacc

SEQ ID NO: 1080813 - RNA, 20 nt, Human
uaacaagugugaaaaguacu

SEQ ID NO: 1080814 - RNA, 22 nt, Human
uaagagaaaaauaugaaggaaa

SEQ ID NO: 1080815 - RNA, 23 nt, Human
uacccaaucuuuugccaaaauua

SEQ ID NO: 1080816 - RNA, 19 nt, Human
uaguuaaaaaaaaaaucca

SEQ ID NO: 1080817 - RNA, 21 nt, Human
uaucacaaacaaaaagaagca

SEQ ID NO: 1080818 - RNA, 18 nt, Human
ucacaaacaaaaagaagc

SEQ ID NO: 1080819 - RNA, 19 nt, Human
ucuccccagccacaacacc

SEQ ID NO: 1080820 - RNA, 18 nt, Human
ugaaaaguacuugcucuc

SEQ ID NO: 1080821 - RNA, 18 nt, Human
ugaaaggaaguggaguac

SEQ ID NO: 1080822 - RNA, 22 nt, Human
ugccaaacccucucgccgcucu

SEQ ID NO: 1080823 - RNA, 22 nt, Human
uggccaaauuuuaucaaaaauc

SEQ ID NO: 1080824 - RNA, 23 nt, Human
ugggaaacugcucuuuauuuaga

SEQ ID NO: 1080825 - RNA, 18 nt, Human
uugcaauccuccaccggc

SEQ ID NO: 1080826 - RNA, 21 nt, Human
uuugccaaaauuaauuuagau

SEQ ID NO: 1080827 - RNA, 24 nt, Human
aacuugauuuauaccgaggaggug

SEQ ID NO: 1080828 - RNA, 26 nt, Human
aaggccccaagggccagcgucagggg

SEQ ID NO: 1080829 - RNA, 19 nt, Human
accccugaggggggaggga

SEQ ID NO: 1080830 - RNA, 20 nt, Human
acccgggauggggaagcucc

SEQ ID NO: 1080831 - RNA, 22 nt, Human
acuggcuuugugguaguauguu

SEQ ID NO: 1080832 - RNA, 21 nt, Human
agccgauggugaguccagagc

SEQ ID NO: 1080833 - RNA, 21 nt, Human
aggagguuggccuugggcagg

SEQ ID NO: 1080834 - RNA, 22 nt, Human
agggaagggaggggggucaggu

SEQ ID NO: 1080835 - RNA, 19 nt, Human
aggggcaggagcuggagcu

SEQ ID NO: 1080836 - RNA, 23 nt, Human
agguggagguggaaucggaaggg

SEQ ID NO: 1080837 - RNA, 24 nt, Human
cacacugccccugguacucagaau

SEQ ID NO: 1080838 - RNA, 19 nt, Human
cagaaucccgaagcaccau

SEQ ID NO: 1080839 - RNA, 20 nt, Human
cagaauccugcgugccccuc

SEQ ID NO: 1080840 - RNA, 18 nt, Human
cagggggagguggaggug

SEQ ID NO: 1080841 - RNA, 19 nt, Human
caugcccacugggcacacu

SEQ ID NO: 1080842 - RNA, 28 nt, Human
ccccucuguggcagggggagguggaggu

SEQ ID NO: 1080843 - RNA, 23 nt, Human
ccccugaggggggagggaaggga

SEQ ID NO: 1080844 - RNA, 24 nt, Human
cccuccugggaccccaugcccacu

SEQ ID NO: 1080845 - RNA, 26 nt, Human
ccucagcugcugggguggcggggucc

SEQ ID NO: 1080846 - RNA, 21 nt, Human
ccuccugggaccccaugccca

SEQ ID NO: 1080847 - RNA, 22 nt, Human
ccucggggcgggccuaggcccu

SEQ ID NO: 1080848 - RNA, 18 nt, Human
ccucugccccuagugcuc

SEQ ID NO: 1080849 - RNA, 18 nt, Human
ccugcauccuugugcugg

SEQ ID NO: 1080850 - RNA, 23 nt, Human
ccugggaccccaugcccacuggg

SEQ ID NO: 1080851 - RNA, 21 nt, Human
ccuugugcuggccugaaaauc

SEQ ID NO: 1080852 - RNA, 21 nt, Human
ccuugugcuggccugaaaauc

SEQ ID NO: 1080853 - RNA, 20 nt, Human
cuccagcguggcacccacga

SEQ ID NO: 1080854 - RNA, 23 nt, Human
cuccugggaccccaugcccacuu

SEQ ID NO: 1080855 - RNA, 23 nt, Human
cugaggggggagggaagggaggg

SEQ ID NO: 1080856 - RNA, 21 nt, Human
cugcauccuugugcuggccug

SEQ ID NO: 1080857 - RNA, 20 nt, Human
cugcccccucggggcgggcc

SEQ ID NO: 1080858 - RNA, 19 nt, Human
cuggccgccucugccccua

SEQ ID NO: 1080859 - RNA, 21 nt, Human
cugguacucagaaucccgaag

SEQ ID NO: 1080860 - RNA, 27 nt, Human
cuuugaagaggagguuggccuugggca

SEQ ID NO: 1080861 - RNA, 18 nt, Human
gagcuggagcuucuucuc

SEQ ID NO: 1080862 - RNA, 19 nt, Human
gaggauggggacgccagga

SEQ ID NO: 1080863 - RNA, 25 nt, Human
gccccaagggccagcgucaggggca

SEQ ID NO: 1080864 - RNA, 20 nt, Human
gcucagaauccugcgugccc

SEQ ID NO: 1080865 - RNA, 22 nt, Human
gcuggagcuucuucuccagcgu

SEQ ID NO: 1080866 - RNA, 19 nt, Human
ggaaagugggcggggcagg

SEQ ID NO: 1080867 - RNA, 18 nt, Human
ggaagggaggggggucag

SEQ ID NO: 1080868 - RNA, 19 nt, Human
ggaaucccuccugggaccc

SEQ ID NO: 1080869 - RNA, 23 nt, Human
ggaggugggaaagugggcggggc

SEQ ID NO: 1080870 - RNA, 19 nt, Human
ggccuaggcccuuuggagg

SEQ ID NO: 1080871 - RNA, 19 nt, Human
ggcgguggcgccugcuccc

SEQ ID NO: 1080872 - RNA, 20 nt, Human
gggaaagugggcggggcagg

SEQ ID NO: 1080873 - RNA, 20 nt, Human
gggaaagugggcggggcagg

SEQ ID NO: 1080874 - RNA, 22 nt, Human
gggcaggagcuggagcuucuuc

SEQ ID NO: 1080875 - RNA, 21 nt, Human
ggggagggaagggaggggggu

SEQ ID NO: 1080876 - RNA, 18 nt, Human
gggggagggaagggaggg

SEQ ID NO: 1080877 - RNA, 20 nt, Human
guggaaggcgggggccagga

SEQ ID NO: 1080878 - RNA, 19 nt, Human
uacucagaaucccgaagca

SEQ ID NO: 1080879 - RNA, 24 nt, Human
uauccugcauccuugugcuggccu

SEQ ID NO: 1080880 - RNA, 18 nt, Human
ucagaaucccgaagcacc

SEQ ID NO: 1080881 - RNA, 24 nt, Human
uccacacccaccugcaacugguca

SEQ ID NO: 1080882 - RNA, 18 nt, Human
ucgcugcccccucggggc

SEQ ID NO: 1080883 - RNA, 19 nt, Human
ucgcuggcgguggcgccug

SEQ ID NO: 1080884 - RNA, 24 nt, Human
ucgcuggcgguggcgccugcuccc

SEQ ID NO: 1080885 - RNA, 22 nt, Human
ucuccagcguggcacccacgau

SEQ ID NO: 1080886 - RNA, 22 nt, Human
ucuggccgccucugccccuagu

SEQ ID NO: 1080887 - RNA, 19 nt, Human
ucuucuccagcguggcacc

SEQ ID NO: 1080888 - RNA, 19 nt, Human
ugaggggggagggaaggga

SEQ ID NO: 1080889 - RNA, 20 nt, Human
ugcccacugggcacacugcc

SEQ ID NO: 1080890 - RNA, 21 nt, Human
uggaaggcgggggccaggagg

SEQ ID NO: 1080891 - RNA, 24 nt, Human
uggagguggagguggaaucggaag

SEQ ID NO: 1080892 - RNA, 21 nt, Human
uggccugaaaauccacaccca

SEQ ID NO: 1080893 - RNA, 22 nt, Human
uggggaagcuccucucgcugcc

SEQ ID NO: 1080894 - RNA, 20 nt, Human
ugguacucagaaucccgaag

SEQ ID NO: 1080895 - RNA, 22 nt, Human
uuccgaugucccccccaacccc

SEQ ID NO: 1080896 - RNA, 22 nt, Human
uugcgugcaugcccgccuggcu

SEQ ID NO: 1080897 - RNA, 18 nt, Human
aaaaaucacuuccaggac

SEQ ID NO: 1080898 - RNA, 27 nt, Human
aaaauuccugacucaccuaaaucacaa

SEQ ID NO: 1080899 - RNA, 24 nt, Human
aaagauaaaccaacacagugaguu

SEQ ID NO: 1080900 - RNA, 20 nt, Human
aaagcauagcaucugcauca

SEQ ID NO: 1080901 - RNA, 20 nt, Human
aaauacaccucugaaaacac

SEQ ID NO: 1080902 - RNA, 21 nt, Human
aacacaucuauaaacauagaa

SEQ ID NO: 1080903 - RNA, 24 nt, Human
aacagagcgaugugcaucauaaga

SEQ ID NO: 1080904 - RNA, 19 nt, Human
aacagugguauaagguugg

SEQ ID NO: 1080905 - RNA, 18 nt, Human
aagaagccucaaagcacu

SEQ ID NO: 1080906 - RNA, 23 nt, Human
aagcacugggaacuuuuacagcu

SEQ ID NO: 1080907 - RNA, 22 nt, Human
acaucuauaaacauagaacuac

SEQ ID NO: 1080908 - RNA, 22 nt, Human
agaagugaaagcauagcaucug

SEQ ID NO: 1080909 - RNA, 21 nt, Human
agcagcaggcgucuuccacag

SEQ ID NO: 1080910 - RNA, 21 nt, Human
aggcaaugucuauuuuuaaac

SEQ ID NO: 1080911 - RNA, 22 nt, Human
agucaaacuggaaaauauccaa

SEQ ID NO: 1080912 - RNA, 20 nt, Human
aucagaucccuaggccccaa

SEQ ID NO: 1080913 - RNA, 20 nt, Human
augggguguauguguaugua

SEQ ID NO: 1080914 - RNA, 18 nt, Human
cacagaggcaagagcagc

SEQ ID NO: 1080915 - RNA, 23 nt, Human
cacaucuauaaacauagaacuac

SEQ ID NO: 1080916 - RNA, 20 nt, Human
cagugagucagagggcagag

SEQ ID NO: 1080917 - RNA, 19 nt, Human
cauacugccuuucagaguc

SEQ ID NO: 1080918 - RNA, 24 nt, Human
cauuugaaaaaucacuuccaggac

SEQ ID NO: 1080919 - RNA, 22 nt, Human
ccagggaagccaaaagauugga

SEQ ID NO: 1080920 - RNA, 21 nt, Human
cccaaguuacaagcacacuga

SEQ ID NO: 1080921 - RNA, 20 nt, Human
cccccaguucccuggaaaau

SEQ ID NO: 1080922 - RNA, 20 nt, Human
ccuaaaucacacugaagaau

SEQ ID NO: 1080923 - RNA, 19 nt, Human
ccuacacacugaggauggg

SEQ ID NO: 1080924 - RNA, 18 nt, Human
ccucugaaaacacaucua

SEQ ID NO: 1080925 - RNA, 25 nt, Human
ccugcagcugaggagccuggaauuu

SEQ ID NO: 1080926 - RNA, 18 nt, Human
cuaggccccaaauguacc

SEQ ID NO: 1080927 - RNA, 23 nt, Human
cuaggccccaaauguaccaaagg

SEQ ID NO: 1080928 - RNA, 22 nt, Human
cugaagaagcagacauauagca

SEQ ID NO: 1080929 - RNA, 19 nt, Human
cugaggagccuggaauuua

SEQ ID NO: 1080930 - RNA, 19 nt, Human
cuggaaaauccuaaaggua

SEQ ID NO: 1080931 - RNA, 24 nt, Human
gaaauucuaaaacaaauacaccuc

SEQ ID NO: 1080932 - RNA, 19 nt, Human
gagauaauuauggcaucaa

SEQ ID NO: 1080933 - RNA, 22 nt, Human
gagcagcagcugugaacaagga

SEQ ID NO: 1080934 - RNA, 22 nt, Human
gaggcaagagcagcagcuguga

SEQ ID NO: 1080935 - RNA, 19 nt, Human
gcagaugugcccauuugua

SEQ ID NO: 1080936 - RNA, 22 nt, Human
uaaaacaaauacaccucugaaa

SEQ ID NO: 1080937 - RNA, 24 nt, Human
uaaaacaaauacaccucugaaaac

SEQ ID NO: 1080938 - RNA, 20 nt, Human
uaaugaaagugaauauagca

SEQ ID NO: 1080939 - RNA, 21 nt, Human
uacauaaauuauauauauaua

SEQ ID NO: 1080940 - RNA, 22 nt, Human
uacucuuguucucuuuugcagc

SEQ ID NO: 1080941 - RNA, 26 nt, Human
uacucuuguucucuuuugcagcucua

SEQ ID NO: 1080942 - RNA, 19 nt, Human
uaggccccaaauguaccaa

SEQ ID NO: 1080943 - RNA, 21 nt, Human
uauguguauguaucugucugu

SEQ ID NO: 1080944 - RNA, 20 nt, Human
uccaggacagagugaaauuc

SEQ ID NO: 1080945 - RNA, 24 nt, Human
uccaggacagagugaaauucuaaa

SEQ ID NO: 1080946 - RNA, 21 nt, Human
ucccuaggccccaaauguacc

SEQ ID NO: 1080947 - RNA, 24 nt, Human
ucccuggaaaauccuaaagguaaa

SEQ ID NO: 1080948 - RNA, 23 nt, Human
ucgaccaugagaagugaaagcau

SEQ ID NO: 1080949 - RNA, 22 nt, Human
ucuaaaacaaauacaccucuga

SEQ ID NO: 1080950 - RNA, 25 nt, Human
ucuaaaacaaauacaccucugaaaa

SEQ ID NO: 1080951 - RNA, 24 nt, Human
ucuauaaacauagaacuacauaaa

SEQ ID NO: 1080952 - RNA, 22 nt, Human
ucucuaaccuuuccuagucaaa

SEQ ID NO: 1080953 - RNA, 20 nt, Human
ucuuccacagaggcaagagc

SEQ ID NO: 1080954 - RNA, 22 nt, Human
ugaaauucuaaaacaaauacac

SEQ ID NO: 1080955 - RNA, 18 nt, Human
ugagucagagggcagagc

SEQ ID NO: 1080956 - RNA, 21 nt, Human
ugaguguggacugaagaagca

SEQ ID NO: 1080957 - RNA, 26 nt, Human
uggacaucccugauuuaggcagucuc

SEQ ID NO: 1080958 - RNA, 21 nt, Human
uggcuggacuccuaagcaguu

SEQ ID NO: 1080959 - RNA, 25 nt, Human
uggggaggaaugucuggcuggacuc

SEQ ID NO: 1080960 - RNA, 21 nt, Human
uguaucugucugucuccccca

SEQ ID NO: 1080961 - RNA, 23 nt, Human
uguccuauccauuuuaauaucca

SEQ ID NO: 1080962 - RNA, 25 nt, Human
uucaaaaaguaucgaccaugagaag

SEQ ID NO: 1080963 - RNA, 25 nt, Human
uucacauaacugauaaaagcaggcc

SEQ ID NO: 1080964 - RNA, 23 nt, Human
uuggaaauuuucaucauucucaa

SEQ ID NO: 1080965 - RNA, 21 nt, Human
uuggcacuagcauacuguacu

SEQ ID NO: 1080966 - RNA, 21 nt, Human
uuuugaagaagccucaaagca

SEQ ID NO: 1080967 - RNA, 19 nt, Human
aaaaaaaaaaagagagagg

SEQ ID NO: 1080968 - RNA, 25 nt, Human
aaaaaaaaaaagagagagggcgaga

SEQ ID NO: 1080969 - RNA, 21 nt, Human
agagagggcgagaggcaacag

SEQ ID NO: 1080970 - RNA, 19 nt, Human
caacagucgcccauccccu

SEQ ID NO: 1080971 - RNA, 18 nt, Human
caccgcggcgagcaggaa

SEQ ID NO: 1080972 - RNA, 24 nt, Human
caugauguggccaacugagcccug

SEQ ID NO: 1080973 - RNA, 19 nt, Human
ccccuggggaaacguccug

SEQ ID NO: 1080974 - RNA, 21 nt, Human
ccccuggggaaacguccugcu

SEQ ID NO: 1080975 - RNA, 23 nt, Human
ccuugggcugggccuggagguuc

SEQ ID NO: 1080976 - RNA, 18 nt, Human
cgaagaggcaacgcuucc

SEQ ID NO: 1080977 - RNA, 19 nt, Human
cgaggcugggagcgcggag

SEQ ID NO: 1080978 - RNA, 20 nt, Human
cgaggcugggagcgcggagc

SEQ ID NO: 1080979 - RNA, 21 nt, Human
cggcgcgcgcggcaccgcggc

SEQ ID NO: 1080980 - RNA, 24 nt, Human
cuuguucugagccuugggcugggc

SEQ ID NO: 1080981 - RNA, 21 nt, Human
gagcgcggagcgcccagcggc

SEQ ID NO: 1080982 - RNA, 21 nt, Human
gcacaacucgaggcugggagc

SEQ ID NO: 1080983 - RNA, 18 nt, Human
ggcugcaggggagggggc

SEQ ID NO: 1080984 - RNA, 19 nt, Human
ggggcugcaggggaggggg

SEQ ID NO: 1080985 - RNA, 20 nt, Human
guccugcuggaagccgggcu

SEQ ID NO: 1080986 - RNA, 21 nt, Human
ucacagcuugaaaaaaaaaaa

SEQ ID NO: 1080987 - RNA, 18 nt, Human
ucuggcgugcuacaaagg

SEQ ID NO: 1080988 - RNA, 21 nt, Human
ugcuacaaaggauugcacaac

SEQ ID NO: 1080989 - RNA, 23 nt, Human
aaacauaugcuuuucucaauaua

SEQ ID NO: 1080990 - RNA, 20 nt, Human
aaacccccaauccugccccc

SEQ ID NO: 1080991 - RNA, 22 nt, Human
aaaccgcuggucuccuauccca

SEQ ID NO: 1080992 - RNA, 21 nt, Human
aaagugccucucaagcguucu

SEQ ID NO: 1080993 - RNA, 19 nt, Human
aaagugcuaggauuacagg

SEQ ID NO: 1080994 - RNA, 20 nt, Human
aaauaacaccuaugaucaca

SEQ ID NO: 1080995 - RNA, 24 nt, Human
aaauacuccgcuggggcccgaagc

SEQ ID NO: 1080996 - RNA, 23 nt, Human
aacauuuccaguucaacaaaucu

SEQ ID NO: 1080997 - RNA, 24 nt, Human
aagugaucugcccgccucugccuc

SEQ ID NO: 1080998 - RNA, 22 nt, Human
aagugccucucaagcguucuau

SEQ ID NO: 1080999 - RNA, 19 nt, Human
aagugcuaggauuacaggc

SEQ ID NO: 1081000 - RNA, 24 nt, Human
aaugauucuccagccucagccucc

SEQ ID NO: 1081001 - RNA, 19 nt, Human
acccuaugcaacuaaaaau

SEQ ID NO: 1081002 - RNA, 24 nt, Human
accguguuggccaggcuggucuug

SEQ ID NO: 1081003 - RNA, 24 nt, Human
acucuugucgcccaggcuggagug

SEQ ID NO: 1081004 - RNA, 23 nt, Human
acugucuuuguugucaaucuguu

SEQ ID NO: 1081005 - RNA, 19 nt, Human
agagaugggguuucaccgu

SEQ ID NO: 1081006 - RNA, 23 nt, Human
agccucagccuccugaguagcug

SEQ ID NO: 1081007 - RNA, 24 nt, Human
aggcgugugccaccacgcccagcu

SEQ ID NO: 1081008 - RNA, 21 nt, Human
aguagcugggauuacaggcgu

SEQ ID NO: 1081009 - RNA, 23 nt, Human
aguagcugggauuacaggcgugu

SEQ ID NO: 1081010 - RNA, 18 nt, Human
aucaaauacccuaugcaa

SEQ ID NO: 1081011 - RNA, 20 nt, Human
aucaagagcuauguauaguc

SEQ ID NO: 1081012 - RNA, 22 nt, Human
aucuguuugcccucucaaucuu

SEQ ID NO: 1081013 - RNA, 24 nt, Human
augauucuccagccucagccuccu

SEQ ID NO: 1081014 - RNA, 23 nt, Human
augggguuucaccguguuggcca

SEQ ID NO: 1081015 - RNA, 24 nt, Human
augggguuucaccguguuggccag

SEQ ID NO: 1081016 - RNA, 19 nt, Human
auuacaggcgugugccacc

SEQ ID NO: 1081017 - RNA, 27 nt, Human
caaagugcuaggauuacaggcuugaga

SEQ ID NO: 1081018 - RNA, 24 nt, Human
caccacgcccagcuaauuuuugua

SEQ ID NO: 1081019 - RNA, 21 nt, Human
caccguguuggccaggcuggu

SEQ ID NO: 1081020 - RNA, 23 nt, Human
caccguguuggccaggcuggucu

SEQ ID NO: 1081021 - RNA, 24 nt, Human
caccguguuggccaggcuggucuu

SEQ ID NO: 1081022 - RNA, 24 nt, Human
cacucuugucgcccaggcuggagu

SEQ ID NO: 1081023 - RNA, 18 nt, Human
cagccucagccuccugag

SEQ ID NO: 1081024 - RNA, 25 nt, Human
cagccucagccuccugaguagcugg

SEQ ID NO: 1081025 - RNA, 20 nt, Human
cagccuccugaguagcuggg

SEQ ID NO: 1081026 - RNA, 18 nt, Human
cagcuucgggagccacag

SEQ ID NO: 1081027 - RNA, 18 nt, Human
caucucaauucuauuuuu

SEQ ID NO: 1081028 - RNA, 18 nt, Human
cauguaaaacauuuccag

SEQ ID NO: 1081029 - RNA, 18 nt, Human
cauguaaaacguuuccag

SEQ ID NO: 1081030 - RNA, 24 nt, Human
cauuaagucucuuuucagucuaca

SEQ ID NO: 1081031 - RNA, 19 nt, Human
ccaaagugcuaggauuaca

SEQ ID NO: 1081032 - RNA, 25 nt, Human
ccaauccugcccccagucccuaugu

SEQ ID NO: 1081033 - RNA, 21 nt, Human
ccacagucgcgggagccgcuc

SEQ ID NO: 1081034 - RNA, 20 nt, Human
ccaccacgcccagcuaauuu

SEQ ID NO: 1081035 - RNA, 22 nt, Human
ccagccucagccuccugaguag

SEQ ID NO: 1081036 - RNA, 25 nt, Human
ccagccucagccuccugaguagcuu

SEQ ID NO: 1081037 - RNA, 24 nt, Human
cccaaagugcuaggauuacaggcu

SEQ ID NO: 1081038 - RNA, 18 nt, Human
cccaggcuggagugcaau

SEQ ID NO: 1081039 - RNA, 24 nt, Human
cccauacuaaucccaacccaaaac

SEQ ID NO: 1081040 - RNA, 24 nt, Human
ccgccucugccucccaaagugcua

SEQ ID NO: 1081041 - RNA, 24 nt, Human
ccucccagguucaaaugauucucc

SEQ ID NO: 1081042 - RNA, 22 nt, Human
ccugaccucaagugaucugccc

SEQ ID NO: 1081043 - RNA, 23 nt, Human
ccugaguagcugggauuacaggc

SEQ ID NO: 1081044 - RNA, 24 nt, Human
ccugaguagcugggauuacaggcg

SEQ ID NO: 1081045 - RNA, 18 nt, Human
cgaagcagcuucgggagc

SEQ ID NO: 1081046 - RNA, 24 nt, Human
cgccucugccucccaaagugcuag

SEQ ID NO: 1081047 - RNA, 21 nt, Human
cggaaagaggcuguacugcac

SEQ ID NO: 1081048 - RNA, 19 nt, Human
cggcaaccucccccuccca

SEQ ID NO: 1081049 - RNA, 21 nt, Human
cgugugccaccacgcccagcu

SEQ ID NO: 1081050 - RNA, 24 nt, Human
cguguuggccaggcuggucuugaa

SEQ ID NO: 1081051 - RNA, 22 nt, Human
cuaaucccaacccaaaaccgcu

SEQ ID NO: 1081052 - RNA, 24 nt, Human
cucaagugaucugcccgccucugc

SEQ ID NO: 1081053 - RNA, 24 nt, Human
cucacggcaaccucccccucccag

SEQ ID NO: 1081054 - RNA, 23 nt, Human
cucagccuccugaguagcuggga

SEQ ID NO: 1081055 - RNA, 24 nt, Human
cuccagccucagccuccugaguag

SEQ ID NO: 1081056 - RNA, 25 nt, Human
cuccagccucagccuccugaguagc

SEQ ID NO: 1081057 - RNA, 26 nt, Human
cuccugaccucaagugaucugcccgc

SEQ ID NO: 1081058 - RNA, 19 nt, Human
cucuugucgcccaggcugg

SEQ ID NO: 1081059 - RNA, 22 nt, Human
cugaguagcugggauuacaggc

SEQ ID NO: 1081060 - RNA, 24 nt, Human
cugaguagcugggauuacaggcgu

SEQ ID NO: 1081061 - RNA, 18 nt, Human
cuggaguaaaucuuguca

SEQ ID NO: 1081062 - RNA, 24 nt, Human
cuugucgcccaggcuggagugcaa

SEQ ID NO: 1081063 - RNA, 24 nt, Human
gaccucaagugaucugcccgccuc

SEQ ID NO: 1081064 - RNA, 24 nt, Human
gagaugggguuucaccguguuggc

SEQ ID NO: 1081065 - RNA, 20 nt, Human
gaguagcugggauuacaggc

SEQ ID NO: 1081066 - RNA, 25 nt, Human
gaguagcugggauuacaggcgugug

SEQ ID NO: 1081067 - RNA, 18 nt, Human
gauuacaggcgugugcca

SEQ ID NO: 1081068 - RNA, 18 nt, Human
gauuacaggcuugagaca

SEQ ID NO: 1081069 - RNA, 22 nt, Human
gcaaccucccccucccagguuc

SEQ ID NO: 1081070 - RNA, 22 nt, Human
gcccagcuaauuuuuguauuuu

SEQ ID NO: 1081071 - RNA, 20 nt, Human
gcccaggcuggagugcaaug

SEQ ID NO: 1081072 - RNA, 20 nt, Human
gccucagccuccugaguagc

SEQ ID NO: 1081073 - RNA, 23 nt, Human
gcuggucuugaacuccugaccuc

SEQ ID NO: 1081074 - RNA, 24 nt, Human
ggcuggucuugaacuccugaccuc

SEQ ID NO: 1081075 - RNA, 19 nt, Human
gggcccgaagcagcuucgg

SEQ ID NO: 1081076 - RNA, 22 nt, Human
gggguuucaccguguuggccag

SEQ ID NO: 1081077 - RNA, 22 nt, Human
ggguuucaccguguuggccagg

SEQ ID NO: 1081078 - RNA, 19 nt, Human
ggucuugaacuccugaccu

SEQ ID NO: 1081079 - RNA, 18 nt, Human
guagcugggauuacaggc

SEQ ID NO: 1081080 - RNA, 18 nt, Human
guagcugggauuacaggc

SEQ ID NO: 1081081 - RNA, 22 nt, Human
guaguuccugaacauucauguu

SEQ ID NO: 1081082 - RNA, 20 nt, Human
guaugauucauuaaugguug

SEQ ID NO: 1081083 - RNA, 18 nt, Human
gucauuuucugaaacugu

SEQ ID NO: 1081084 - RNA, 26 nt, Human
gucuacaaugugaaaaaaaggccauc

SEQ ID NO: 1081085 - RNA, 24 nt, Human
gugaucugcccgccucugccuccc

SEQ ID NO: 1081086 - RNA, 18 nt, Human
gugccugcuaaccuaaaa

SEQ ID NO: 1081087 - RNA, 18 nt, Human
gugugccaccacgcccag

SEQ ID NO: 1081088 - RNA, 21 nt, Human
uaaaauaaacauaugcuuuuc

SEQ ID NO: 1081089 - RNA, 21 nt, Human
uaaggauuuuuuaacauaucu

SEQ ID NO: 1081090 - RNA, 18 nt, Human
uaauaaaacaaacuuuug

SEQ ID NO: 1081091 - RNA, 23 nt, Human
uaauuuuuguauuuuuagagaga

SEQ ID NO: 1081092 - RNA, 24 nt, Human
uacaaagagaugauccucuggagu

SEQ ID NO: 1081093 - RNA, 19 nt, Human
uacaauuaauaaaacaaac

SEQ ID NO: 1081094 - RNA, 22 nt, Human
uacacaagcuccgaaaccccca

SEQ ID NO: 1081095 - RNA, 24 nt, Human
uacaggcgugugccaccacgccca

SEQ ID NO: 1081096 - RNA, 20 nt, Human
uagagagaugggguuucacc

SEQ ID NO: 1081097 - RNA, 23 nt, Human
uagagagaugggguuucaccgug

SEQ ID NO: 1081098 - RNA, 21 nt, Human
uaggauuacaggcuugagaca

SEQ ID NO: 1081099 - RNA, 24 nt, Human
ucaccguguuggccaggcuggucu

SEQ ID NO: 1081100 - RNA, 24 nt, Human
ucacggcaaccucccccucccagg

SEQ ID NO: 1081101 - RNA, 21 nt, Human
ucacucuugucgcccaggcug

SEQ ID NO: 1081102 - RNA, 23 nt, Human
ucacucuugucgcccaggcugga

SEQ ID NO: 1081103 - RNA, 20 nt, Human
ucagccuccugaguagcugg

SEQ ID NO: 1081104 - RNA, 22 nt, Human
ucccaaaaacuguuacacaagc

SEQ ID NO: 1081105 - RNA, 24 nt, Human
ucccaaagugcuaggauuacaggc

SEQ ID NO: 1081106 - RNA, 19 nt, Human
ucccagguucaaaugauuc

SEQ ID NO: 1081107 - RNA, 21 nt, Human
ucccagguucaaaugauucuc

SEQ ID NO: 1081108 - RNA, 20 nt, Human
uccgaaacccccaauccugc

SEQ ID NO: 1081109 - RNA, 22 nt, Human
uccgaaacccccaauccugccc

SEQ ID NO: 1081110 - RNA, 24 nt, Human
uccugaguagcugggauuacaggc

SEQ ID NO: 1081111 - RNA, 18 nt, Human
ucgcccaggcuggagugc

SEQ ID NO: 1081112 - RNA, 19 nt, Human
ucuucaguuuuacuguucu

SEQ ID NO: 1081113 - RNA, 21 nt, Human
ucuugaacuccugaccucaag

SEQ ID NO: 1081114 - RNA, 18 nt, Human
ugaccucaagugaucugc

SEQ ID NO: 1081115 - RNA, 24 nt, Human
ugaccucaagugaucugcccgccu

SEQ ID NO: 1081116 - RNA, 20 nt, Human
ugaguacaauuaauaaaaca

SEQ ID NO: 1081117 - RNA, 22 nt, Human
ugaguacaauuaauaaaacaaa

SEQ ID NO: 1081118 - RNA, 20 nt, Human
ugcccccagucccuauguac

SEQ ID NO: 1081119 - RNA, 24 nt, Human
ugcuaggauuacaggcuugagaca

SEQ ID NO: 1081120 - RNA, 18 nt, Human
uggagugcaauggugcaa

SEQ ID NO: 1081121 - RNA, 23 nt, Human
uggagugcaauggugcaagcuca

SEQ ID NO: 1081122 - RNA, 24 nt, Human
uggccaggcuggucuugaacuccu

SEQ ID NO: 1081123 - RNA, 18 nt, Human
ugggauuacaggcgugug

SEQ ID NO: 1081124 - RNA, 19 nt, Human
ugggauuacaggcgugugc

SEQ ID NO: 1081125 - RNA, 21 nt, Human
ugggauuacaggcgugugcca

SEQ ID NO: 1081126 - RNA, 22 nt, Human
ugggauuacaggcgugugccac

SEQ ID NO: 1081127 - RNA, 24 nt, Human
ugggauuacaggcgugugccacca

SEQ ID NO: 1081128 - RNA, 24 nt, Human
ugggguuucaccguguuggccagg

SEQ ID NO: 1081129 - RNA, 21 nt, Human
uggugcaagcucagcucacgg

SEQ ID NO: 1081130 - RNA, 20 nt, Human
ugucgcccaggcuggagugc

SEQ ID NO: 1081131 - RNA, 23 nt, Human
ugugccugcuaaccuaaaauaaa

SEQ ID NO: 1081132 - RNA, 24 nt, Human
ugugccugcuaaccuaaaauaaac

SEQ ID NO: 1081133 - RNA, 24 nt, Human
uguguaugauucauuaaugguugu

SEQ ID NO: 1081134 - RNA, 20 nt, Human
uguugucaaucuguuuuugu

SEQ ID NO: 1081135 - RNA, 21 nt, Human
uuagagagaugggguuucacc

SEQ ID NO: 1081136 - RNA, 23 nt, Human
uuagagagaugggguuucaccgu

SEQ ID NO: 1081137 - RNA, 24 nt, Human
uuagagagaugggguuucaccgug

SEQ ID NO: 1081138 - RNA, 18 nt, Human
uucaaaugauucuccagc

SEQ ID NO: 1081139 - RNA, 23 nt, Human
uucaaaugauucuccagccucag

SEQ ID NO: 1081140 - RNA, 24 nt, Human
uucacucuugucgcccaggcugga

SEQ ID NO: 1081141 - RNA, 21 nt, Human
uucauuaaugguuguaucaga

SEQ ID NO: 1081142 - RNA, 24 nt, Human
uuuagagagaugggguuucaccgu

SEQ ID NO: 1081143 - RNA, 24 nt, Human
uuucaccguguuggccaggcuggu

SEQ ID NO: 1081144 - RNA, 24 nt, Human
uuucacucuugucgcccaggcugg

SEQ ID NO: 1081145 - RNA, 23 nt, Human
uuuuuagagagaugggguuucac

SEQ ID NO: 1081146 - RNA, 21 nt, Human
uuuuuguauuuuuagagagau

SEQ ID NO: 1081147 - RNA, 24 nt, Human
aaacacacaggcacauucuaaaca

SEQ ID NO: 1081148 - RNA, 24 nt, Human
aaaguguugggauuacaggcguga

SEQ ID NO: 1081149 - RNA, 25 nt, Human
aacccuuaacuuuaggcuaccaucc

SEQ ID NO: 1081150 - RNA, 24 nt, Human
aaguagcuaggauuacaggcacgu

SEQ ID NO: 1081151 - RNA, 26 nt, Human
aaguagcuaggauuacaggcacgugu

SEQ ID NO: 1081152 - RNA, 21 nt, Human
aaguguugggauuacaggcgu

SEQ ID NO: 1081153 - RNA, 26 nt, Human
aaguguugggauuacaggcgugagcc

SEQ ID NO: 1081154 - RNA, 18 nt, Human
acaggcacauucuaaaca

SEQ ID NO: 1081155 - RNA, 24 nt, Human
acccucaacaaagaauuagguggc

SEQ ID NO: 1081156 - RNA, 22 nt, Human
accucugccucuuggguucaag

SEQ ID NO: 1081157 - RNA, 22 nt, Human
acucaaacccaaguuagcugcu

SEQ ID NO: 1081158 - RNA, 23 nt, Human
acuggucucaaacuccugaccuc

SEQ ID NO: 1081159 - RNA, 19 nt, Human
agacauuuuugguugucac

SEQ ID NO: 1081160 - RNA, 19 nt, Human
agaugaucugccugccuca

SEQ ID NO: 1081161 - RNA, 19 nt, Human
agcagguaguggccaggga

SEQ ID NO: 1081162 - RNA, 22 nt, Human
agccaggcacauuuuugccccc

SEQ ID NO: 1081163 - RNA, 20 nt, Human
agccaugacucaaaacccaa

SEQ ID NO: 1081164 - RNA, 24 nt, Human
aggaacccuuaacuuuaggcuacc

SEQ ID NO: 1081165 - RNA, 26 nt, Human
aggcauuugggccugugcucucuuuu

SEQ ID NO: 1081166 - RNA, 18 nt, Human
aguagccaugacucaaaa

SEQ ID NO: 1081167 - RNA, 24 nt, Human
agugauucuccugccucagcuucc

SEQ ID NO: 1081168 - RNA, 19 nt, Human
agugcuguggagugaucuc

SEQ ID NO: 1081169 - RNA, 24 nt, Human
auaucuggagacauuuuugguugu

SEQ ID NO: 1081170 - RNA, 24 nt, Human
augaucugccugccucagccuccc

SEQ ID NO: 1081171 - RNA, 24 nt, Human
auuuuuguauuuuuaguagaggug

SEQ ID NO: 1081172 - RNA, 24 nt, Human
caaaacccaaguuuucccugccuu

SEQ ID NO: 1081173 - RNA, 24 nt, Human
caaaguguugggauuacaggcgug

SEQ ID NO: 1081174 - RNA, 19 nt, Human
caaauuucuggcuugauga

SEQ ID NO: 1081175 - RNA, 22 nt, Human
caagugauucuccugccucagc

SEQ ID NO: 1081176 - RNA, 28 nt, Human
caagugauucuccugccucagcuuccca

SEQ ID NO: 1081177 - RNA, 21 nt, Human
cacgcccagcuaauuuuugua

SEQ ID NO: 1081178 - RNA, 24 nt, Human
cagaguuuugcucugcugcccagg

SEQ ID NO: 1081179 - RNA, 21 nt, Human
cagcagcgacagugacagcga

SEQ ID NO: 1081180 - RNA, 23 nt, Human
cagcagcgguggcagcgagagcu

SEQ ID NO: 1081181 - RNA, 24 nt, Human
cagccaggcacauuuuugcccccu

SEQ ID NO: 1081182 - RNA, 21 nt, Human
cagcgacagugacagcgauag

SEQ ID NO: 1081183 - RNA, 19 nt, Human
caggcacauuuuugccccc

SEQ ID NO: 1081184 - RNA, 19 nt, Human
caguagccaugacucaaaa

SEQ ID NO: 1081185 - RNA, 19 nt, Human
caguucccuuccccaaccc

SEQ ID NO: 1081186 - RNA, 19 nt, Human
caucacgcccagcuaauuu

SEQ ID NO: 1081187 - RNA, 25 nt, Human
cauuuuugguugucacagcugggga

SEQ ID NO: 1081188 - RNA, 24 nt, Human
ccaaaauauuaauagcacugagga

SEQ ID NO: 1081189 - RNA, 22 nt, Human
ccaaaguguugggauuacaggc

SEQ ID NO: 1081190 - RNA, 22 nt, Human
ccaaaguguugggauuacaggc

SEQ ID NO: 1081191 - RNA, 24 nt, Human
ccaaaguguugggauuacaggcgu

SEQ ID NO: 1081192 - RNA, 23 nt, Human
cccaaguagcuaggauuacaggc

SEQ ID NO: 1081193 - RNA, 24 nt, Human
cccaaguagcuaggauuacaggca

SEQ ID NO: 1081194 - RNA, 18 nt, Human
ccccuuauaggcauuugg

SEQ ID NO: 1081195 - RNA, 20 nt, Human
ccccuuauaggcauuugggc

SEQ ID NO: 1081196 - RNA, 19 nt, Human
ccguguuggcuggacuggu

SEQ ID NO: 1081197 - RNA, 18 nt, Human
ccuauauuccagcaggau

SEQ ID NO: 1081198 - RNA, 24 nt, Human
ccucuuggguucaagugauucucc

SEQ ID NO: 1081199 - RNA, 21 nt, Human
ccugaccucagaugaucugcc

SEQ ID NO: 1081200 - RNA, 23 nt, Human
ccugaccucagaugaucugccug

SEQ ID NO: 1081201 - RNA, 21 nt, Human
cggggccaggguccaccccuu

SEQ ID NO: 1081202 - RNA, 19 nt, Human
cuacaauguacaggacagu

SEQ ID NO: 1081203 - RNA, 23 nt, Human
cucacauaaacacacaggcacau

SEQ ID NO: 1081204 - RNA, 24 nt, Human
cucauuacaaccucugccucuugg

SEQ ID NO: 1081205 - RNA, 18 nt, Human
cuccaccugagccucccc

SEQ ID NO: 1081206 - RNA, 21 nt, Human
cuccaccugagccuccccacu

SEQ ID NO: 1081207 - RNA, 26 nt, Human
cuccugaccucagaugaucugccugc

SEQ ID NO: 1081208 - RNA, 19 nt, Human
cucugcugcccaggcugga

SEQ ID NO: 1081209 - RNA, 20 nt, Human
cucugcugcccaggcuggag

SEQ ID NO: 1081210 - RNA, 20 nt, Human
cucuuggguucaagugauuc

SEQ ID NO: 1081211 - RNA, 18 nt, Human
cugcccaggcuggagugc

SEQ ID NO: 1081212 - RNA, 18 nt, Human
cugccucagccucccaaa

SEQ ID NO: 1081213 - RNA, 23 nt, Human
cugccucagcuucccaaguagcu

SEQ ID NO: 1081214 - RNA, 23 nt, Human
cugccucuuggguucaagugauu

SEQ ID NO: 1081215 - RNA, 19 nt, Human
cugcugcccaggcuggagu

SEQ ID NO: 1081216 - RNA, 22 nt, Human
cugcugcucuuuuuuuuucuca

SEQ ID NO: 1081217 - RNA, 18 nt, Human
cuguuaucugcugcucuu

SEQ ID NO: 1081218 - RNA, 21 nt, Human
cuuaaaaugaaccucaugcuc

SEQ ID NO: 1081219 - RNA, 24 nt, Human
gaccucagaugaucugccugccuc

SEQ ID NO: 1081220 - RNA, 24 nt, Human
gaugaucugccugccucagccucc

SEQ ID NO: 1081221 - RNA, 18 nt, Human
gauuacaggcgugagcca

SEQ ID NO: 1081222 - RNA, 22 nt, Human
gauuacaggcgugagccacugc

SEQ ID NO: 1081223 - RNA, 22 nt, Human
gauuacaggcgugagccacugc

SEQ ID NO: 1081224 - RNA, 22 nt, Human
gccaggcacauuuuugcccccu

SEQ ID NO: 1081225 - RNA, 25 nt, Human
gccaguuuuugcuucaugcagccau

SEQ ID NO: 1081226 - RNA, 22 nt, Human
gcccagcuaauuuuuguauuuu

SEQ ID NO: 1081227 - RNA, 19 nt, Human
gccucagccucccaaagug

SEQ ID NO: 1081228 - RNA, 24 nt, Human
gccucagcuucccaaguagcuagg

SEQ ID NO: 1081229 - RNA, 22 nt, Human
gcggggccaggguccaccccuu

SEQ ID NO: 1081230 - RNA, 19 nt, Human
gcucugcugcccaggcugg

SEQ ID NO: 1081231 - RNA, 20 nt, Human
gcucugcugcccaggcugga

SEQ ID NO: 1081232 - RNA, 27 nt, Human
gcucugcugcccaggcuggagugcugu

SEQ ID NO: 1081233 - RNA, 20 nt, Human
ggaguuuugccguguuggcu

SEQ ID NO: 1081234 - RNA, 21 nt, Human
ggggauaugcaauaucuggag

SEQ ID NO: 1081235 - RNA, 20 nt, Human
ggguucaagugauucuccug

SEQ ID NO: 1081236 - RNA, 24 nt, Human
gugauucuccugccucagcuuccc

SEQ ID NO: 1081237 - RNA, 20 nt, Human
guggcagcagcgguggcagc

SEQ ID NO: 1081238 - RNA, 24 nt, Human
guuuugcucugcugcccaggcugg

SEQ ID NO: 1081239 - RNA, 25 nt, Human
uaaacacacaggcacauucuaaaca

SEQ ID NO: 1081240 - RNA, 23 nt, Human
uaaguuuacuuaaaaugaaccuc

SEQ ID NO: 1081241 - RNA, 23 nt, Human
uaauuuuuguauuuuuaguagag

SEQ ID NO: 1081242 - RNA, 24 nt, Human
uaauuuuuguauuuuuaguagagg

SEQ ID NO: 1081243 - RNA, 20 nt, Human
uacaaccucugccucuuggg

SEQ ID NO: 1081244 - RNA, 24 nt, Human
uacaggcacgugucaucacgccca

SEQ ID NO: 1081245 - RNA, 22 nt, Human
uacaggcgugagccacugcgcc

SEQ ID NO: 1081246 - RNA, 22 nt, Human
uacaggcgugagccacugcgcc

SEQ ID NO: 1081247 - RNA, 21 nt, Human
uacugucuacacccacuccau

SEQ ID NO: 1081248 - RNA, 23 nt, Human
uacuuuccagugucuacuaucuc

SEQ ID NO: 1081249 - RNA, 18 nt, Human
uaggauuacaggcacgug

SEQ ID NO: 1081250 - RNA, 21 nt, Human
uaggauuacaggcacguguca

SEQ ID NO: 1081251 - RNA, 24 nt, Human
uaggauuacaggcacgugucauca

SEQ ID NO: 1081252 - RNA, 19 nt, Human
uaguagagguggaguuuug

SEQ ID NO: 1081253 - RNA, 21 nt, Human
uaguagagguggaguuuugcc

SEQ ID NO: 1081254 - RNA, 24 nt, Human
uaguagagguggaguuuugccgug

SEQ ID NO: 1081255 - RNA, 22 nt, Human
uauaggcauuugggccugugcu

SEQ ID NO: 1081256 - RNA, 22 nt, Human
uauguuucugcacuagccccuu

SEQ ID NO: 1081257 - RNA, 22 nt, Human
ucaaaacccaaguuuucccugc

SEQ ID NO: 1081258 - RNA, 19 nt, Human
ucaagugauucuccugccu

SEQ ID NO: 1081259 - RNA, 23 nt, Human
ucauuacaaccucugccucuugg

SEQ ID NO: 1081260 - RNA, 24 nt, Human
ucauuacaaccucugccucuuggg

SEQ ID NO: 1081261 - RNA, 25 nt, Human
ucauuacaaccucugccucuugggu

SEQ ID NO: 1081262 - RNA, 19 nt, Human
uccauccucuaacaguagc

SEQ ID NO: 1081263 - RNA, 24 nt, Human
ucccaaaguguugggauuacaggc

SEQ ID NO: 1081264 - RNA, 24 nt, Human
ucccaaguagcuaggauuacaggc

SEQ ID NO: 1081265 - RNA, 21 nt, Human
ucccccaugggcuagaucuga

SEQ ID NO: 1081266 - RNA, 19 nt, Human
ucccuccaccugagccucc

SEQ ID NO: 1081267 - RNA, 23 nt, Human
ucccuuccccaacccucaacaaa

SEQ ID NO: 1081268 - RNA, 19 nt, Human
ucuaaacagauaacgggag

SEQ ID NO: 1081269 - RNA, 23 nt, Human
ucuaaguaauuuuuaaauuaguu

SEQ ID NO: 1081270 - RNA, 18 nt, Human
ucucuguuaucugcugcu

SEQ ID NO: 1081271 - RNA, 24 nt, Human
ucuuggguucaagugauucuccug

SEQ ID NO: 1081272 - RNA, 22 nt, Human
ugacaugcauaaucacauagua

SEQ ID NO: 1081273 - RNA, 18 nt, Human
ugaccucagaugaucugc

SEQ ID NO: 1081274 - RNA, 19 nt, Human
ugaccucagaugaucugcc

SEQ ID NO: 1081275 - RNA, 22 nt, Human
ugaggcacaaagcaggaacccu

SEQ ID NO: 1081276 - RNA, 20 nt, Human
ugauucuccugccucagcuu

SEQ ID NO: 1081277 - RNA, 26 nt, Human
ugccaguuuuugcuucaugcagccau

SEQ ID NO: 1081278 - RNA, 19 nt, Human
ugcccaggcuggagugcug

SEQ ID NO: 1081279 - RNA, 21 nt, Human
ugcccaggcuggagugcugug

SEQ ID NO: 1081280 - RNA, 24 nt, Human
ugccguguuggcuggacuggucuc

SEQ ID NO: 1081281 - RNA, 24 nt, Human
ugccucagccucccaaaguguugg

SEQ ID NO: 1081282 - RNA, 24 nt, Human
ugccucagcuucccaaguagcuag

SEQ ID NO: 1081283 - RNA, 22 nt, Human
ugccucuuggguucaagugauu

SEQ ID NO: 1081284 - RNA, 20 nt, Human
ugcgccuggccuguuaaucu

SEQ ID NO: 1081285 - RNA, 22 nt, Human
ugcuguggagugaucucagcuc

SEQ ID NO: 1081286 - RNA, 24 nt, Human
uggagugaucucagcucauuacaa

SEQ ID NO: 1081287 - RNA, 23 nt, Human
uggagugcuguggagugaucuca

SEQ ID NO: 1081288 - RNA, 24 nt, Human
uggcagcgagagcuaugcggggcc

SEQ ID NO: 1081289 - RNA, 24 nt, Human
uggcuggacuggucucaaacuccu

SEQ ID NO: 1081290 - RNA, 18 nt, Human
ugggauuacaggcgugag

SEQ ID NO: 1081291 - RNA, 19 nt, Human
ugggauuacaggcgugagc

SEQ ID NO: 1081292 - RNA, 21 nt, Human
ugggauuacaggcgugagcca

SEQ ID NO: 1081293 - RNA, 22 nt, Human
ugggauuacaggcgugagccac

SEQ ID NO: 1081294 - RNA, 22 nt, Human
ugggauuacaggcgugagccac

SEQ ID NO: 1081295 - RNA, 24 nt, Human
ugggauuacaggcgugagccacug

SEQ ID NO: 1081296 - RNA, 24 nt, Human
ugggauuacaggcgugagccacug

SEQ ID NO: 1081297 - RNA, 21 nt, Human
uggggagagggguacuacugg

SEQ ID NO: 1081298 - RNA, 23 nt, Human
uggguucaagugauucuccugcc

SEQ ID NO: 1081299 - RNA, 24 nt, Human
uggguucaagugauucuccugccu

SEQ ID NO: 1081300 - RNA, 24 nt, Human
ugguugucacagcuggggagaggg

SEQ ID NO: 1081301 - RNA, 22 nt, Human
uguauuuuuaguagagguggag

SEQ ID NO: 1081302 - RNA, 24 nt, Human
uuacaaccucugccucuuggguuc

SEQ ID NO: 1081303 - RNA, 18 nt, Human
uuaguagagguggaguuu

SEQ ID NO: 1081304 - RNA, 18 nt, Human
uuaguagagguggaguuu

SEQ ID NO: 1081305 - RNA, 22 nt, Human
uuaguagagguggaguuuugcc

SEQ ID NO: 1081306 - RNA, 24 nt, Human
uuaguagagguggaguuuugccgu

SEQ ID NO: 1081307 - RNA, 21 nt, Human
uucaagugauucuccugccuc

SEQ ID NO: 1081308 - RNA, 23 nt, Human
uucaagugauucuccugccucag

SEQ ID NO: 1081309 - RNA, 24 nt, Human
uucaagugauucuccugccucagc

SEQ ID NO: 1081310 - RNA, 24 nt, Human
uucccaaguagcuaggauuacagg

SEQ ID NO: 1081311 - RNA, 20 nt, Human
uucucuguuaucugcugcuc

SEQ ID NO: 1081312 - RNA, 24 nt, Human
uucucuguuaucugcugcucuuuu

SEQ ID NO: 1081313 - RNA, 24 nt, Human
uugccguguuggcuggacuggucu

SEQ ID NO: 1081314 - RNA, 22 nt, Human
uugcucugcugcccaggcugga

SEQ ID NO: 1081315 - RNA, 23 nt, Human
uuguauuuuuaguagagguggag

SEQ ID NO: 1081316 - RNA, 21 nt, Human
uugucacagcuggggagaggg

SEQ ID NO: 1081317 - RNA, 18 nt, Human
uuuacuuaaaaugaaccu

SEQ ID NO: 1081318 - RNA, 18 nt, Human
uuugguugucacagcugg

SEQ ID NO: 1081319 - RNA, 24 nt, Human
uuuugcucugcugcccaggcugga

SEQ ID NO: 1081320 - RNA, 24 nt, Human
uuuuuaguagagguggaguuuugc

SEQ ID NO: 1081321 - RNA, 20 nt, Human
uuuuuguauuuuuaguagag

SEQ ID NO: 1081322 - RNA, 27 nt, Human
aagacgcccuccuccaugaugcaauug

SEQ ID NO: 1081323 - RNA, 24 nt, Human
acuucuuucuagaccagacuuguu

SEQ ID NO: 1081324 - RNA, 18 nt, Human
aggccuccagguacagcu

SEQ ID NO: 1081325 - RNA, 21 nt, Human
aggccuccagguacagcuccu

SEQ ID NO: 1081326 - RNA, 19 nt, Human
caccaggcucaagacgccc

SEQ ID NO: 1081327 - RNA, 19 nt, Human
caccagggcuauagcaaua

SEQ ID NO: 1081328 - RNA, 19 nt, Human
caggcucaagacgcccucc

SEQ ID NO: 1081329 - RNA, 21 nt, Human
caucagcuugcaggccuccag

SEQ ID NO: 1081330 - RNA, 23 nt, Human
caucugggagagugggacugcuc

SEQ ID NO: 1081331 - RNA, 19 nt, Human
caucugggggcaucccagg

SEQ ID NO: 1081332 - RNA, 19 nt, Human
ccaccauccgacuugcgag

SEQ ID NO: 1081333 - RNA, 22 nt, Human
cccuguugaaaggauccccacc

SEQ ID NO: 1081334 - RNA, 21 nt, Human
ccgggcugguuucacuuuuuc

SEQ ID NO: 1081335 - RNA, 23 nt, Human
ccugcaguuauccuucccuccca

SEQ ID NO: 1081336 - RNA, 21 nt, Human
cgaaugaaguaggagacaggc

SEQ ID NO: 1081337 - RNA, 24 nt, Human
cgaggacuccucucgccgagacuu

SEQ ID NO: 1081338 - RNA, 20 nt, Human
cgccugugacuuugugacuc

SEQ ID NO: 1081339 - RNA, 23 nt, Human
cucccagcaagcccugggaagag

SEQ ID NO: 1081340 - RNA, 22 nt, Human
cuccucccugccaccauccgac

SEQ ID NO: 1081341 - RNA, 20 nt, Human
cucgccgagacuucuuucua

SEQ ID NO: 1081342 - RNA, 20 nt, Human
gagucuuccuugaagucauu

SEQ ID NO: 1081343 - RNA, 21 nt, Human
gcccugggaagaguaggcuuu

SEQ ID NO: 1081344 - RNA, 21 nt, Human
ggagucuuccuugaagucauu

SEQ ID NO: 1081345 - RNA, 20 nt, Human
guaccccuggggcccaggcc

SEQ ID NO: 1081346 - RNA, 18 nt, Human
uagccuugguaccccugg

SEQ ID NO: 1081347 - RNA, 18 nt, Human
ucaucugggagaguggga

SEQ ID NO: 1081348 - RNA, 20 nt, Human
ucccagcaagcccugggaag

SEQ ID NO: 1081349 - RNA, 23 nt, Human
ucccucccagcaagcccugggaa

SEQ ID NO: 1081350 - RNA, 24 nt, Human
uccuuuuguccaguggugaaaaau

SEQ ID NO: 1081351 - RNA, 19 nt, Human
ucgcugcucugucguacug

SEQ ID NO: 1081352 - RNA, 22 nt, Human
ucuccuggagguaguaguucuc

SEQ ID NO: 1081353 - RNA, 18 nt, Human
ugaaguaggagacaggca

SEQ ID NO: 1081354 - RNA, 22 nt, Human
ugcugcggagucuuccuugaag

SEQ ID NO: 1081355 - RNA, 24 nt, Human
uggcagagcagugcugcggagucu

SEQ ID NO: 1081356 - RNA, 21 nt, Human
uggcccaggugcuccccuccu

SEQ ID NO: 1081357 - RNA, 21 nt, Human
ugggaagaguaggcuuugaug

SEQ ID NO: 1081358 - RNA, 23 nt, Human
ugggaagaguaggcuuugauggg

SEQ ID NO: 1081359 - RNA, 19 nt, Human
uggggcccaggccguggug

SEQ ID NO: 1081360 - RNA, 19 nt, Human
ugggggcaucccaggggag

SEQ ID NO: 1081361 - RNA, 21 nt, Human
uugcaggccuccagguacagc

SEQ ID NO: 1081362 - RNA, 19 nt, Human
aaaguucucccgugcaaca

SEQ ID NO: 1081363 - RNA, 22 nt, Human
aacucccagcccugcacauccc

SEQ ID NO: 1081364 - RNA, 19 nt, Human
aagagcccagcucccaagg

SEQ ID NO: 1081365 - RNA, 26 nt, Human
aagggaccagaauugggcagugggca

SEQ ID NO: 1081366 - RNA, 21 nt, Human
accacagaagcugcccaaaug

SEQ ID NO: 1081367 - RNA, 19 nt, Human
agcccagagagcuucaggg

SEQ ID NO: 1081368 - RNA, 18 nt, Human
agcgauuaugugcaucuc

SEQ ID NO: 1081369 - RNA, 23 nt, Human
aggagaaaaaugaguggccaggg

SEQ ID NO: 1081370 - RNA, 22 nt, Human
aggcaaggaagugcagccaggg

SEQ ID NO: 1081371 - RNA, 24 nt, Human
aggcaaggaagugcagccagggga

SEQ ID NO: 1081372 - RNA, 22 nt, Human
aggcagggaagaggcaugaggu

SEQ ID NO: 1081373 - RNA, 27 nt, Human
aggcagggaagaggcaugaggugugcc

SEQ ID NO: 1081374 - RNA, 22 nt, Human
aggggguugucggugcaggcuc

SEQ ID NO: 1081375 - RNA, 22 nt, Human
aucagcagaacagagggggcug

SEQ ID NO: 1081376 - RNA, 23 nt, Human
augaggugugccgggagagcgau

SEQ ID NO: 1081377 - RNA, 18 nt, Human
auggaacgcaggcagaag

SEQ ID NO: 1081378 - RNA, 25 nt, Human
auggaacgcaggcagaagcgcgccg

SEQ ID NO: 1081379 - RNA, 18 nt, Human
caacagcagcagccgccu

SEQ ID NO: 1081380 - RNA, 21 nt, Human
caacagcagcagccgccugcc

SEQ ID NO: 1081381 - RNA, 18 nt, Human
caaccucacugggggagc

SEQ ID NO: 1081382 - RNA, 22 nt, Human
caaccuucucacuaaccccacu

SEQ ID NO: 1081383 - RNA, 23 nt, Human
caacucccagcccugcacauccc

SEQ ID NO: 1081384 - RNA, 18 nt, Human
cacagggcuguccauggc

SEQ ID NO: 1081385 - RNA, 26 nt, Human
cacauaugcacauuuccagggcuccc

SEQ ID NO: 1081386 - RNA, 19 nt, Human
caccggaagcugcggcccu

SEQ ID NO: 1081387 - RNA, 21 nt, Human
cagagccagggcagaagagcc

SEQ ID NO: 1081388 - RNA, 22 nt, Human
cagcagcagccgccugcccucu

SEQ ID NO: 1081389 - RNA, 20 nt, Human
cagcccaagacuaaaguugg

SEQ ID NO: 1081390 - RNA, 22 nt, Human
cagcugggcaggucccgcagca

SEQ ID NO: 1081391 - RNA, 22 nt, Human
cccaacucugaguucagugcau

SEQ ID NO: 1081392 - RNA, 23 nt, Human
cccagagauaaggagggguggcc

SEQ ID NO: 1081393 - RNA, 20 nt, Human
ccccuaacuuuugguggcuc

SEQ ID NO: 1081394 - RNA, 25 nt, Human
cccggcagacacaugcacauaugca

SEQ ID NO: 1081395 - RNA, 18 nt, Human
cccgugcaacagcagcag

SEQ ID NO: 1081396 - RNA, 21 nt, Human
cccgugcaacagcagcagccg

SEQ ID NO: 1081397 - RNA, 24 nt, Human
cccgugcaacagcagcagccgccu

SEQ ID NO: 1081398 - RNA, 21 nt, Human
cccugcagugucuguucagca

SEQ ID NO: 1081399 - RNA, 19 nt, Human
cccugggcccuacauaccc

SEQ ID NO: 1081400 - RNA, 19 nt, Human
ccugcccucucccugcagu

SEQ ID NO: 1081401 - RNA, 21 nt, Human
ccugucugggcaggggcgggu

SEQ ID NO: 1081402 - RNA, 19 nt, Human
cgccugcccucucccugca

SEQ ID NO: 1081403 - RNA, 23 nt, Human
cggccagugugcugcucucccca

SEQ ID NO: 1081404 - RNA, 20 nt, Human
cggggucgcuggcagagggc

SEQ ID NO: 1081405 - RNA, 19 nt, Human
cuaguacuccuuggccucc

SEQ ID NO: 1081406 - RNA, 20 nt, Human
cucccagcccugcacauccc

SEQ ID NO: 1081407 - RNA, 18 nt, Human
cugaguucagugcauuca

SEQ ID NO: 1081408 - RNA, 21 nt, Human
gaaaggcagcuuggggcuaca

SEQ ID NO: 1081409 - RNA, 23 nt, Human
gaauuuacaccacagaagcugcc

SEQ ID NO: 1081410 - RNA, 22 nt, Human
gagacaguugagacuucaauau

SEQ ID NO: 1081411 - RNA, 18 nt, Human
gcagcaucuggcucagau

SEQ ID NO: 1081412 - RNA, 20 nt, Human
gccacccaggcuggaugccc

SEQ ID NO: 1081413 - RNA, 19 nt, Human
gcccuggugcucguccugu

SEQ ID NO: 1081414 - RNA, 19 nt, Human
gcugcggcccuggugcucg

SEQ ID NO: 1081415 - RNA, 23 nt, Human
gcuuuuuuccccucccagagaac

SEQ ID NO: 1081416 - RNA, 21 nt, Human
ggagcacagcguggaggcggc

SEQ ID NO: 1081417 - RNA, 21 nt, Human
ggcagggaguggggaaagaag

SEQ ID NO: 1081418 - RNA, 22 nt, Human
ggcagggaguggggaaagaagg

SEQ ID NO: 1081419 - RNA, 20 nt, Human
ggcaggucccgcagcaucug

SEQ ID NO: 1081420 - RNA, 24 nt, Human
ggcccuacauacccuucaaccuuc

SEQ ID NO: 1081421 - RNA, 19 nt, Human
ggcccuggugcucguccug

SEQ ID NO: 1081422 - RNA, 23 nt, Human
gggaggccccggcagacacaugc

SEQ ID NO: 1081423 - RNA, 23 nt, Human
gggaguggggaaagaagggcaug

SEQ ID NO: 1081424 - RNA, 19 nt, Human
gggauuuuucuggagcugc

SEQ ID NO: 1081425 - RNA, 18 nt, Human
gggcagaagagcccagcu

SEQ ID NO: 1081426 - RNA, 19 nt, Human
gggucccagcaggcagcag

SEQ ID NO: 1081427 - RNA, 23 nt, Human
guggccacccaggcuggaugccc

SEQ ID NO: 1081428 - RNA, 19 nt, Human
uaaggagggguggccaccc

SEQ ID NO: 1081429 - RNA, 24 nt, Human
ucaaccccauagaaggcaaggaag

SEQ ID NO: 1081430 - RNA, 18 nt, Human
ucaccuccccacucgggg

SEQ ID NO: 1081431 - RNA, 25 nt, Human
ucagcaaccccgucacuaguacucc

SEQ ID NO: 1081432 - RNA, 19 nt, Human
ucagcagaacagagggggc

SEQ ID NO: 1081433 - RNA, 21 nt, Human
ucccagagaacugguuuacua

SEQ ID NO: 1081434 - RNA, 19 nt, Human
ucccagcccugcacauccc

SEQ ID NO: 1081435 - RNA, 21 nt, Human
ucccagggacacccacccugg

SEQ ID NO: 1081436 - RNA, 19 nt, Human
ucccuacaaucagcagaac

SEQ ID NO: 1081437 - RNA, 19 nt, Human
ucccugcagugucuguuca

SEQ ID NO: 1081438 - RNA, 18 nt, Human
ugacucguggcagauccc

SEQ ID NO: 1081439 - RNA, 25 nt, Human
ugaggagcccagagagcuucagggc

SEQ ID NO: 1081440 - RNA, 23 nt, Human
ugcaccacccagagauaaggagg

SEQ ID NO: 1081441 - RNA, 19 nt, Human
ugcuagguacuccuccucc

SEQ ID NO: 1081442 - RNA, 24 nt, Human
uggaacgcaggcagaagcgcgccg

SEQ ID NO: 1081443 - RNA, 18 nt, Human
uggaggcggcuccagucc

SEQ ID NO: 1081444 - RNA, 21 nt, Human
uggcagggaguggggaaagaa

SEQ ID NO: 1081445 - RNA, 21 nt, Human
uggccagggucccagcaggca

SEQ ID NO: 1081446 - RNA, 19 nt, Human
uggggaggcagggaagagg

SEQ ID NO: 1081447 - RNA, 20 nt, Human
uggggaggcagggaagaggc

SEQ ID NO: 1081448 - RNA, 19 nt, Human
uguugggagggagcacagc

SEQ ID NO: 1081449 - RNA, 18 nt, Human
uuaugugcaucucuuccc

SEQ ID NO: 1081450 - RNA, 21 nt, Human
uucaaccccauagaaggcaag

SEQ ID NO: 1081451 - RNA, 23 nt, Human
uuuccccucccagagaacugguu

SEQ ID NO: 1081452 - RNA, 19 nt, Human
uuuuccccucccagagaac

SEQ ID NO: 1081453 - RNA, 23 nt, Human
aaaaaaucaguuguauauaaaug

SEQ ID NO: 1081454 - RNA, 26 nt, Human
aaaaaggaaaauacaaagugaaaaaa

SEQ ID NO: 1081455 - RNA, 25 nt, Human
aaaauacaaagugaaaaaauaucau

SEQ ID NO: 1081456 - RNA, 20 nt, Human
aaaucuucuaguaggcucag

SEQ ID NO: 1081457 - RNA, 20 nt, Human
aagagccaaagcugcaggua

SEQ ID NO: 1081458 - RNA, 22 nt, Human
aaguugggaugguagaagcaga

SEQ ID NO: 1081459 - RNA, 19 nt, Human
aauacaaagugaaaaaaua

SEQ ID NO: 1081460 - RNA, 24 nt, Human
acugcaggaaucucugaagucuuu

SEQ ID NO: 1081461 - RNA, 20 nt, Human
agaaagguucugucaccuuu

SEQ ID NO: 1081462 - RNA, 19 nt, Human
agaagcagauaggaccaaa

SEQ ID NO: 1081463 - RNA, 22 nt, Human
agaauuucugcgaacccuguau

SEQ ID NO: 1081464 - RNA, 21 nt, Human
agacaggaagcgacugugauc

SEQ ID NO: 1081465 - RNA, 20 nt, Human
agaugaacugcaggaaucuc

SEQ ID NO: 1081466 - RNA, 24 nt, Human
agcagauaggaccaaauuauacaa

SEQ ID NO: 1081467 - RNA, 20 nt, Human
agcucccauauuccucuuuu

SEQ ID NO: 1081468 - RNA, 24 nt, Human
auuuguaacauacucauguaaaau

SEQ ID NO: 1081469 - RNA, 23 nt, Human
cagaugguccaaggccacuuggg

SEQ ID NO: 1081470 - RNA, 20 nt, Human
ccaaagagccaaagcugcag

SEQ ID NO: 1081471 - RNA, 22 nt, Human
cuaacccacgagugugggaacc

SEQ ID NO: 1081472 - RNA, 22 nt, Human
cugugcuaguauaaguugcaaa

SEQ ID NO: 1081473 - RNA, 26 nt, Human
cuuuugguucuguacuuggugucauc

SEQ ID NO: 1081474 - RNA, 22 nt, Human
gaagagaauuucugcgaacccu

SEQ ID NO: 1081475 - RNA, 21 nt, Human
gacugugauccugccaagagg

SEQ ID NO: 1081476 - RNA, 20 nt, Human
gaugguagaagcagauagga

SEQ ID NO: 1081477 - RNA, 25 nt, Human
gcaauaccaaagagccaaagcugca

SEQ ID NO: 1081478 - RNA, 21 nt, Human
gguccaggauaugacugaagu

SEQ ID NO: 1081479 - RNA, 21 nt, Human
guugggaugguagaagcagau

SEQ ID NO: 1081480 - RNA, 24 nt, Human
uaaaccaaagacgguccaggauau

SEQ ID NO: 1081481 - RNA, 23 nt, Human
uaauuuucagcuacgguaugcag

SEQ ID NO: 1081482 - RNA, 21 nt, Human
uaccaaagagccaaagcugca

SEQ ID NO: 1081483 - RNA, 22 nt, Human
uaccaaagagccaaagcugcag

SEQ ID NO: 1081484 - RNA, 19 nt, Human
uagacaggaagcgacugug

SEQ ID NO: 1081485 - RNA, 19 nt, Human
uagauauaaaaguccugag

SEQ ID NO: 1081486 - RNA, 19 nt, Human
uauaaaaguccugagcauu

SEQ ID NO: 1081487 - RNA, 19 nt, Human
uauaaaucucauggacaaa

SEQ ID NO: 1081488 - RNA, 18 nt, Human
uauaugcacaucuccaca

SEQ ID NO: 1081489 - RNA, 20 nt, Human
ucaccuuugaaacuuuuggu

SEQ ID NO: 1081490 - RNA, 19 nt, Human
ucaguuguauauaaaugcu

SEQ ID NO: 1081491 - RNA, 19 nt, Human
ucucaggcacagacuccag

SEQ ID NO: 1081492 - RNA, 21 nt, Human
ucugcgaacccuguauuugga

SEQ ID NO: 1081493 - RNA, 20 nt, Human
ucuuccuuguuugaagcuga

SEQ ID NO: 1081494 - RNA, 20 nt, Human
ugaaaaaaguugggauggua

SEQ ID NO: 1081495 - RNA, 23 nt, Human
ugaaaaaaguugggaugguagaa

SEQ ID NO: 1081496 - RNA, 19 nt, Human
ugaaucuggagcaacaguu

SEQ ID NO: 1081497 - RNA, 19 nt, Human
ugaccacacuugaaaaagg

SEQ ID NO: 1081498 - RNA, 19 nt, Human
uggccacaaaaagacaaau

SEQ ID NO: 1081499 - RNA, 18 nt, Human
ugguugggaaaaugugac

SEQ ID NO: 1081500 - RNA, 24 nt, Human
ugucaauguuuggcaauaccaaag

SEQ ID NO: 1081501 - RNA, 23 nt, Human
uuagcucccauauuccucuuuuu

SEQ ID NO: 1081502 - RNA, 24 nt, Human
uuagggagaaaauuuuucaaaaaa

SEQ ID NO: 1081503 - RNA, 19 nt, Human
uuauauaugcacaucucca

SEQ ID NO: 1081504 - RNA, 18 nt, Human
uuggccacaaaaagacaa

SEQ ID NO: 1081505 - RNA, 20 nt, Human
aacaacuuuucacaagccga

SEQ ID NO: 1081506 - RNA, 22 nt, Human
aacucccuucuucaauggacua

SEQ ID NO: 1081507 - RNA, 22 nt, Human
acuaccaaaaaucagaaagcca

SEQ ID NO: 1081508 - RNA, 24 nt, Human
agaaagccacuauaaaacccaaug

SEQ ID NO: 1081509 - RNA, 21 nt, Human
cagaugucucggcucaaggga

SEQ ID NO: 1081510 - RNA, 23 nt, Human
cagcugcgcgcgggcuuugguca

SEQ ID NO: 1081511 - RNA, 19 nt, Human
ccaaaaaucagaaagccac

SEQ ID NO: 1081512 - RNA, 20 nt, Human
ccacaaucuagaaauggaac

SEQ ID NO: 1081513 - RNA, 19 nt, Human
cgggcuuuggucaguccgg

SEQ ID NO: 1081514 - RNA, 22 nt, Human
cgguggcgggauguaggugcug

SEQ ID NO: 1081515 - RNA, 23 nt, Human
cgguggcgggauguaggugcugg

SEQ ID NO: 1081516 - RNA, 20 nt, Human
cugggggucaggucccaaca

SEQ ID NO: 1081517 - RNA, 21 nt, Human
ggcaucacuggaaaguccaga

SEQ ID NO: 1081518 - RNA, 21 nt, Human
gugcuggaugcgggaugcagc

SEQ ID NO: 1081519 - RNA, 22 nt, Human
uacaacaacuuucaaacucccu

SEQ ID NO: 1081520 - RNA, 24 nt, Human
uaccaaaaaucagaaagccacuau

SEQ ID NO: 1081521 - RNA, 25 nt, Human
uagaaauggaaccacugcucuuuug

SEQ ID NO: 1081522 - RNA, 22 nt, Human
ucaggcaggacaugggcagaca

SEQ ID NO: 1081523 - RNA, 25 nt, Human
ucccaacagaugucucggcucaagg

SEQ ID NO: 1081524 - RNA, 20 nt, Human
ugaaaauggcagaauuuauc

SEQ ID NO: 1081525 - RNA, 21 nt, Human
ugaaaauggcagaauuuaucu

SEQ ID NO: 1081526 - RNA, 22 nt, Human
ugcgggaugcagcugcgcgcgg

SEQ ID NO: 1081527 - RNA, 23 nt, Human
uggaaccacugcucuuuugacag

SEQ ID NO: 1081528 - RNA, 19 nt, Human
uggaugcgggaugcagcug

SEQ ID NO: 1081529 - RNA, 18 nt, Human
uggcaucacuggaaaguc

SEQ ID NO: 1081530 - RNA, 20 nt, Human
uuaucugaagauccacaauc

SEQ ID NO: 1081531 - RNA, 29 nt, Human
uuuagagugaggguugacauuucacauuu

SEQ ID NO: 1081532 - RNA, 26 nt, Human
uuucaaacucccuucuucaauggacu

SEQ ID NO: 1081533 - RNA, 20 nt, Human
aaauucuccaaguaccccaa

SEQ ID NO: 1081534 - RNA, 18 nt, Human
aaccuguugccagaaccc

SEQ ID NO: 1081535 - RNA, 23 nt, Human
aacuugcugugugacuuugggug

SEQ ID NO: 1081536 - RNA, 20 nt, Human
accagguaggcaagggugcu

SEQ ID NO: 1081537 - RNA, 19 nt, Human
acccauuucccccuugccc

SEQ ID NO: 1081538 - RNA, 23 nt, Human
acucugcaaugccaagcguucug

SEQ ID NO: 1081539 - RNA, 21 nt, Human
acuuggggagaagacacugag

SEQ ID NO: 1081540 - RNA, 20 nt, Human
agagcacugcugggacaggg

SEQ ID NO: 1081541 - RNA, 22 nt, Human
agaggcaguccaggaagaggcc

SEQ ID NO: 1081542 - RNA, 21 nt, Human
agcugugcaggccacaccugg

SEQ ID NO: 1081543 - RNA, 24 nt, Human
aggaaagagagcaccugccaaaaa

SEQ ID NO: 1081544 - RNA, 24 nt, Human
aggaagaggccuugggccccaagg

SEQ ID NO: 1081545 - RNA, 18 nt, Human
aggccagccagagugacg

SEQ ID NO: 1081546 - RNA, 18 nt, Human
agggagggagagugaggc

SEQ ID NO: 1081547 - RNA, 19 nt, Human
agggggcacccccgcugcu

SEQ ID NO: 1081548 - RNA, 18 nt, Human
agucaaaugagguaggcc

SEQ ID NO: 1081549 - RNA, 18 nt, Human
augaacuugcugugugac

SEQ ID NO: 1081550 - RNA, 20 nt, Human
augccaagcguucuggcaac

SEQ ID NO: 1081551 - RNA, 19 nt, Human
caaaaggcacaacugaggg

SEQ ID NO: 1081552 - RNA, 23 nt, Human
cacaccuggcuugagaaagcuga

SEQ ID NO: 1081553 - RNA, 25 nt, Human
cacaggacucggggggugauacaga

SEQ ID NO: 1081554 - RNA, 23 nt, Human
cacaguuucauggccaagauaga

SEQ ID NO: 1081555 - RNA, 18 nt, Human
caccuggaaggaacucac

SEQ ID NO: 1081556 - RNA, 20 nt, Human
cagcggccuccccacagccu

SEQ ID NO: 1081557 - RNA, 24 nt, Human
caggaucgguggguagcgaaccuc

SEQ ID NO: 1081558 - RNA, 22 nt, Human
caucaagauccuugauuccugu

SEQ ID NO: 1081559 - RNA, 22 nt, Human
ccaacccauuucccccuugccc

SEQ ID NO: 1081560 - RNA, 20 nt, Human
cccacacuuuccacuucuca

SEQ ID NO: 1081561 - RNA, 20 nt, Human
ccccaaaagaacagguugga

SEQ ID NO: 1081562 - RNA, 21 nt, Human
cccccuuaaaacagaggccgg

SEQ ID NO: 1081563 - RNA, 19 nt, Human
cccugagagcugugcaggc

SEQ ID NO: 1081564 - RNA, 21 nt, Human
ccuaguucaaggcaauucagc

SEQ ID NO: 1081565 - RNA, 25 nt, Human
ccugccaaaaaucccacacuuucca

SEQ ID NO: 1081566 - RNA, 20 nt, Human
ccuggucucagcucagccau

SEQ ID NO: 1081567 - RNA, 19 nt, Human
ccuguggggucaacaccau

SEQ ID NO: 1081568 - RNA, 19 nt, Human
cgcauacagcaccagggag

SEQ ID NO: 1081569 - RNA, 19 nt, Human
cuagcagcagaaacccacg

SEQ ID NO: 1081570 - RNA, 24 nt, Human
cucacacucacugcaagggugauc

SEQ ID NO: 1081571 - RNA, 18 nt, Human
cuggcaaccugggcuaga

SEQ ID NO: 1081572 - RNA, 20 nt, Human
cuuugggaugggguugggag

SEQ ID NO: 1081573 - RNA, 19 nt, Human
gaaccuguugccagaaccc

SEQ ID NO: 1081574 - RNA, 21 nt, Human
gacauaccauuacagagagga

SEQ ID NO: 1081575 - RNA, 18 nt, Human
gacguggcacuggccuuc

SEQ ID NO: 1081576 - RNA, 18 nt, Human
gagagcaccugccaaaaa

SEQ ID NO: 1081577 - RNA, 19 nt, Human
gaggaagagaaagaauggc

SEQ ID NO: 1081578 - RNA, 18 nt, Human
gaggauggccagcccugc

SEQ ID NO: 1081579 - RNA, 21 nt, Human
gaggccugggaggauggccag

SEQ ID NO: 1081580 - RNA, 19 nt, Human
gagucaaaugagguaggcc

SEQ ID NO: 1081581 - RNA, 19 nt, Human
gaguuggagagaauguggg

SEQ ID NO: 1081582 - RNA, 18 nt, Human
gcacaacugagggccccc

SEQ ID NO: 1081583 - RNA, 24 nt, Human
gcacacaccuggaaggaacucaca

SEQ ID NO: 1081584 - RNA, 18 nt, Human
gcagacgcccugcccccu

SEQ ID NO: 1081585 - RNA, 18 nt, Human
gcaggccacaccuggcuu

SEQ ID NO: 1081586 - RNA, 18 nt, Human
gccuuuggcaaauucucc

SEQ ID NO: 1081587 - RNA, 21 nt, Human
ggagaugaagaguuggagaga

SEQ ID NO: 1081588 - RNA, 23 nt, Human
ggagguagaaggagcagaggacu

SEQ ID NO: 1081589 - RNA, 23 nt, Human
ggaugggguugggagggguuggg

SEQ ID NO: 1081590 - RNA, 22 nt, Human
ggcgcggggggcggaggaaaga

SEQ ID NO: 1081591 - RNA, 20 nt, Human
ggcuggccauccucccacuc

SEQ ID NO: 1081592 - RNA, 19 nt, Human
gggaugggguugggagggg

SEQ ID NO: 1081593 - RNA, 19 nt, Human
ggggaaagaggauacuugg

SEQ ID NO: 1081594 - RNA, 19 nt, Human
ggggaugcuggucccuagu

SEQ ID NO: 1081595 - RNA, 24 nt, Human
ggguguagcauuuugaaggauucu

SEQ ID NO: 1081596 - RNA, 22 nt, Human
uaagggcaaaggguccccaaaa

SEQ ID NO: 1081597 - RNA, 25 nt, Human
uacagcaccagggagggagagugag

SEQ ID NO: 1081598 - RNA, 18 nt, Human
uaggccaacccauuuccc

SEQ ID NO: 1081599 - RNA, 21 nt, Human
uaguucaaggcaauucagcaa

SEQ ID NO: 1081600 - RNA, 23 nt, Human
uauugacaaaucaaaugaaaaaa

SEQ ID NO: 1081601 - RNA, 21 nt, Human
ucaggaauugucuccauuggc

SEQ ID NO: 1081602 - RNA, 20 nt, Human
ucagggagaugaagaguugg

SEQ ID NO: 1081603 - RNA, 18 nt, Human
uccacuucucagcuauca

SEQ ID NO: 1081604 - RNA, 23 nt, Human
uccaggaagaggccuugggcccc

SEQ ID NO: 1081605 - RNA, 20 nt, Human
ucccaguguaaaacugccag

SEQ ID NO: 1081606 - RNA, 24 nt, Human
ucccaugcugacaagcugguggcu

SEQ ID NO: 1081607 - RNA, 22 nt, Human
uccccacagccugcccaggcuu

SEQ ID NO: 1081608 - RNA, 18 nt, Human
ucccucugugauccucuu

SEQ ID NO: 1081609 - RNA, 21 nt, Human
ucugcaaugccaagcguucug

SEQ ID NO: 1081610 - RNA, 22 nt, Human
ugaaaaaaauucacuuaaaaga

SEQ ID NO: 1081611 - RNA, 21 nt, Human
ugacaaaucaaaugaaaaaaa

SEQ ID NO: 1081612 - RNA, 26 nt, Human
ugacagccuuuggcaaauucuccaag

SEQ ID NO: 1081613 - RNA, 19 nt, Human
ugagaaagcugaccgugag

SEQ ID NO: 1081614 - RNA, 21 nt, Human
ugagaaagcugaccgugaggc

SEQ ID NO: 1081615 - RNA, 24 nt, Human
ugaggcuaggaggcagcggccucc

SEQ ID NO: 1081616 - RNA, 24 nt, Human
ugaggcuggacauaccauuacaga

SEQ ID NO: 1081617 - RNA, 20 nt, Human
ugcuccagcagaggcagucc

SEQ ID NO: 1081618 - RNA, 21 nt, Human
ugcugugugacuuugggugaa

SEQ ID NO: 1081619 - RNA, 22 nt, Human
uggaagaucagggagaugaaga

SEQ ID NO: 1081620 - RNA, 18 nt, Human
uggacugagagcacugcu

SEQ ID NO: 1081621 - RNA, 22 nt, Human
uggagggaggagcccacauuug

SEQ ID NO: 1081622 - RNA, 18 nt, Human
uggcaaauucuccaagua

SEQ ID NO: 1081623 - RNA, 20 nt, Human
uggcaaccugggcuagacca

SEQ ID NO: 1081624 - RNA, 22 nt, Human
uggcagcggcagcaauucagag

SEQ ID NO: 1081625 - RNA, 19 nt, Human
uggcaucaagauccuugau

SEQ ID NO: 1081626 - RNA, 22 nt, Human
uggccagcccugcccugagagc

SEQ ID NO: 1081627 - RNA, 21 nt, Human
uggcuggccauccucccacuc

SEQ ID NO: 1081628 - RNA, 24 nt, Human
uggcugugagggagccuggguuuu

SEQ ID NO: 1081629 - RNA, 19 nt, Human
uggcuuguggcuggccauc

SEQ ID NO: 1081630 - RNA, 24 nt, Human
uggggauguuuccauggggaugcu

SEQ ID NO: 1081631 - RNA, 19 nt, Human
ugguggcuuguggcuggcc

SEQ ID NO: 1081632 - RNA, 21 nt, Human
ugugcacaccaccacacaccu

SEQ ID NO: 1081633 - RNA, 26 nt, Human
ugugcacaccaccacacaccuacaug

SEQ ID NO: 1081634 - RNA, 20 nt, Human
ugugugcacaccaccacaca

SEQ ID NO: 1081635 - RNA, 20 nt, Human
uuccucugcuguaaaacaau

SEQ ID NO: 1081636 - RNA, 22 nt, Human
uuggagggaggagcccacauuu

SEQ ID NO: 1081637 - RNA, 23 nt, Human
uuuaugaagcaaguucucuacaa

SEQ ID NO: 1081638 - RNA, 19 nt, Human
uuugggugaaucauuuucc

SEQ ID NO: 1081639 - RNA, 20 nt, Human
aaaugccuucuugauuuccc

SEQ ID NO: 1081640 - RNA, 18 nt, Human
aagagugcgcucagcccu

SEQ ID NO: 1081641 - RNA, 19 nt, Human
acccagaaaggccagagag

SEQ ID NO: 1081642 - RNA, 21 nt, Human
agagaguguaaucugcgagag

SEQ ID NO: 1081643 - RNA, 19 nt, Human
agagcuccaguagcugguu

SEQ ID NO: 1081644 - RNA, 19 nt, Human
agaggaaggagagggaagg

SEQ ID NO: 1081645 - RNA, 23 nt, Human
agagugcgcucagcccuggcugg

SEQ ID NO: 1081646 - RNA, 22 nt, Human
cacccaaaucaaagacugccag

SEQ ID NO: 1081647 - RNA, 19 nt, Human
caccgggcaccccaaggcu

SEQ ID NO: 1081648 - RNA, 23 nt, Human
ccaguagcugguuggccccuucu

SEQ ID NO: 1081649 - RNA, 21 nt, Human
cccaaaucaaagacugccagc

SEQ ID NO: 1081650 - RNA, 20 nt, Human
cccuucuaucucacuugucc

SEQ ID NO: 1081651 - RNA, 18 nt, Human
ccugaagaggucaaagag

SEQ ID NO: 1081652 - RNA, 19 nt, Human
cugucccuaccucaccugc

SEQ ID NO: 1081653 - RNA, 21 nt, Human
cuucugcugcaaccucucaaa

SEQ ID NO: 1081654 - RNA, 19 nt, Human
gagaaaggaauuccagucu

SEQ ID NO: 1081655 - RNA, 19 nt, Human
gagagggaagguucagccu

SEQ ID NO: 1081656 - RNA, 25 nt, Human
gccccgccuaucucguacaguucca

SEQ ID NO: 1081657 - RNA, 20 nt, Human
ggaaaaggagagcaccuuac

SEQ ID NO: 1081658 - RNA, 23 nt, Human
ggcaccucuggguacagucggac

SEQ ID NO: 1081659 - RNA, 19 nt, Human
ggggcgggagaugcaggga

SEQ ID NO: 1081660 - RNA, 22 nt, Human
gucccucacccaaaucaaagac

SEQ ID NO: 1081661 - RNA, 20 nt, Human
uaaauuacaaaugcaccuga

SEQ ID NO: 1081662 - RNA, 19 nt, Human
uacagucggacgucuuggc

SEQ ID NO: 1081663 - RNA, 23 nt, Human
uacagucggacgucuuggccccg

SEQ ID NO: 1081664 - RNA, 22 nt, Human
uaccugaagaggucaaagagcu

SEQ ID NO: 1081665 - RNA, 18 nt, Human
uagcugguuggccccuuc

SEQ ID NO: 1081666 - RNA, 18 nt, Human
ucagcccuggcugggucc

SEQ ID NO: 1081667 - RNA, 25 nt, Human
ucccucacccaaaucaaagacugcc

SEQ ID NO: 1081668 - RNA, 24 nt, Human
ucccugucccuaccucaccugcuc

SEQ ID NO: 1081669 - RNA, 20 nt, Human
ugaagaggucaaagagcuca

SEQ ID NO: 1081670 - RNA, 19 nt, Human
ugaagcagccgcaccgggc

SEQ ID NO: 1081671 - RNA, 23 nt, Human
ugcgcucagcccuggcugggucc

SEQ ID NO: 1081672 - RNA, 19 nt, Human
ugcuguuagggauguggaa

SEQ ID NO: 1081673 - RNA, 24 nt, Human
ugcuguuagggauguggaaaagga

SEQ ID NO: 1081674 - RNA, 21 nt, Human
ugucacacacagaugaacuuu

SEQ ID NO: 1081675 - RNA, 19 nt, Human
uucagccuggggcgggaga

SEQ ID NO: 1081676 - RNA, 20 nt, Human
uugaagcagccgcaccgggc

SEQ ID NO: 1081677 - RNA, 23 nt, Human
aaacaggaggguuggcgagucug

SEQ ID NO: 1081678 - RNA, 23 nt, Human
aaacaggcauaaagaggggacgc

SEQ ID NO: 1081679 - RNA, 21 nt, Human
aaagaaaaacugaggcccaga

SEQ ID NO: 1081680 - RNA, 18 nt, Human
aacgcgcgcucccccacc

SEQ ID NO: 1081681 - RNA, 24 nt, Human
aagccagccccaaaugcuugcuau

SEQ ID NO: 1081682 - RNA, 22 nt, Human
aaggguagcuggugggggcugc

SEQ ID NO: 1081683 - RNA, 25 nt, Human
aauuagagagccaauuauaacucaa

SEQ ID NO: 1081684 - RNA, 25 nt, Human
acaacacagaagacacaggugacac

SEQ ID NO: 1081685 - RNA, 23 nt, Human
acacaaaaauacuauccuuuuca

SEQ ID NO: 1081686 - RNA, 24 nt, Human
acugcaugcaagugugaaccagca

SEQ ID NO: 1081687 - RNA, 20 nt, Human
acuugcccaagggccccagc

SEQ ID NO: 1081688 - RNA, 22 nt, Human
acuugcuggugggugugugggc

SEQ ID NO: 1081689 - RNA, 18 nt, Human
agaaaaaugagaaggcuc

SEQ ID NO: 1081690 - RNA, 19 nt, Human
agacugaacuggcaagggu

SEQ ID NO: 1081691 - RNA, 20 nt, Human
agagacaacacagaagacac

SEQ ID NO: 1081692 - RNA, 22 nt, Human
agccaauuuccuuguaaacugg

SEQ ID NO: 1081693 - RNA, 22 nt, Human
agccacuucugcuccugacacu

SEQ ID NO: 1081694 - RNA, 24 nt, Human
aggaagaggcagauuuugcuucua

SEQ ID NO: 1081695 - RNA, 20 nt, Human
aggcagaagcagauuuguca

SEQ ID NO: 1081696 - RNA, 18 nt, Human
agggcuggcuacagcccu

SEQ ID NO: 1081697 - RNA, 23 nt, Human
aguguugaggauucagaaaggga

SEQ ID NO: 1081698 - RNA, 23 nt, Human
auacagaaagaaaaacugaggcc

SEQ ID NO: 1081699 - RNA, 23 nt, Human
auucccuucaggagcagucacug

SEQ ID NO: 1081700 - RNA, 24 nt, Human
caacacagaagacacaggugacag

SEQ ID NO: 1081701 - RNA, 24 nt, Human
caacuggaucuaaucaagacugaa

SEQ ID NO: 1081702 - RNA, 18 nt, Human
caagguccuacaaacugc

SEQ ID NO: 1081703 - RNA, 21 nt, Human
cacaaaacacacugaucccau

SEQ ID NO: 1081704 - RNA, 19 nt, Human
cacagaagacacaggugac

SEQ ID NO: 1081705 - RNA, 25 nt, Human
cacagcccggugggaugaacaccau

SEQ ID NO: 1081706 - RNA, 21 nt, Human
caccaucguccccacauacag

SEQ ID NO: 1081707 - RNA, 22 nt, Human
caccaucguccccacauacaga

SEQ ID NO: 1081708 - RNA, 24 nt, Human
cacugaucccaucauccaaagcac

SEQ ID NO: 1081709 - RNA, 20 nt, Human
cacugcaugcaagugugaac

SEQ ID NO: 1081710 - RNA, 24 nt, Human
cacugucgucuugaugguugaggg

SEQ ID NO: 1081711 - RNA, 20 nt, Human
cacuguuguuaugggcuugg

SEQ ID NO: 1081712 - RNA, 19 nt, Human
cagaaggucacuggccagc

SEQ ID NO: 1081713 - RNA, 22 nt, Human
cagccuucugagcuugauuucc

SEQ ID NO: 1081714 - RNA, 23 nt, Human
cagcugcacugcaugcaagugug

SEQ ID NO: 1081715 - RNA, 19 nt, Human
cagcuucugcuucacucag

SEQ ID NO: 1081716 - RNA, 23 nt, Human
caggcauacuguacaugugugca

SEQ ID NO: 1081717 - RNA, 24 nt, Human
cauacagaaagaaaaacugaggcc

SEQ ID NO: 1081718 - RNA, 20 nt, Human
ccacauacagaaagaaaaac

SEQ ID NO: 1081719 - RNA, 29 nt, Human
cccacauacagaaagaaaaacugaggcug

SEQ ID NO: 1081720 - RNA, 24 nt, Human
cccacaucuagaaaaaugagaagg

SEQ ID NO: 1081721 - RNA, 24 nt, Human
cccagagaaucgacaugacuugcc

SEQ ID NO: 1081722 - RNA, 23 nt, Human
cccaucauccaaagcacacuguc

SEQ ID NO: 1081723 - RNA, 24 nt, Human
ccuaagcugagagcagacuggggc

SEQ ID NO: 1081724 - RNA, 23 nt, Human
ccucaggagccucauuucccucc

SEQ ID NO: 1081725 - RNA, 24 nt, Human
ccucauuucccuccugcuccccaa

SEQ ID NO: 1081726 - RNA, 21 nt, Human
ccucccauucaggcuccaaac

SEQ ID NO: 1081727 - RNA, 18 nt, Human
ccugugcacgguggcuug

SEQ ID NO: 1081728 - RNA, 19 nt, Human
ccuugcuuugaaaggccug

SEQ ID NO: 1081729 - RNA, 24 nt, Human
cuacagcccuaagcugagagcaga

SEQ ID NO: 1081730 - RNA, 20 nt, Human
cucaaagcaucauugaaaca

SEQ ID NO: 1081731 - RNA, 20 nt, Human
cuccacaacgcgcgcucccc

SEQ ID NO: 1081732 - RNA, 18 nt, Human
cuccuuggguucuguccu

SEQ ID NO: 1081733 - RNA, 21 nt, Human
cugaaaaaacguaugaacauc

SEQ ID NO: 1081734 - RNA, 19 nt, Human
cugauccugcagugggcau

SEQ ID NO: 1081735 - RNA, 19 nt, Human
cugcagugggcaugcuccg

SEQ ID NO: 1081736 - RNA, 25 nt, Human
cuggccccaugcaucuggggucccc

SEQ ID NO: 1081737 - RNA, 22 nt, Human
cugggcuguguccaugucauac

SEQ ID NO: 1081738 - RNA, 19 nt, Human
cuguguccaugucauacuu

SEQ ID NO: 1081739 - RNA, 20 nt, Human
cuguguggugcggggugccc

SEQ ID NO: 1081740 - RNA, 25 nt, Human
cuuccugugcacgguggcuuggugg

SEQ ID NO: 1081741 - RNA, 21 nt, Human
cuucugcuccugacacuuauc

SEQ ID NO: 1081742 - RNA, 21 nt, Human
cuugauuucccuacagccaau

SEQ ID NO: 1081743 - RNA, 18 nt, Human
gaggagaggcucaaagca

SEQ ID NO: 1081744 - RNA, 19 nt, Human
gauguagagaaugagagag

SEQ ID NO: 1081745 - RNA, 27 nt, Human
gcaguaaggguagcuggugggggcugc

SEQ ID NO: 1081746 - RNA, 21 nt, Human
gcuuggggucacccacugucc

SEQ ID NO: 1081747 - RNA, 19 nt, Human
ggaaacaggaggguuggcc

SEQ ID NO: 1081748 - RNA, 24 nt, Human
ggaagaggcagauuuugcuucuag

SEQ ID NO: 1081749 - RNA, 22 nt, Human
ggacaccuggcaagagaaucag

SEQ ID NO: 1081750 - RNA, 18 nt, Human
ggcaaagccagccccaaa

SEQ ID NO: 1081751 - RNA, 18 nt, Human
ggcagcuucugcuucacu

SEQ ID NO: 1081752 - RNA, 19 nt, Human
ggccaagguccuacaaacu

SEQ ID NO: 1081753 - RNA, 19 nt, Human
gggcugcuggcggcaagga

SEQ ID NO: 1081754 - RNA, 23 nt, Human
guccucaggagccucauuucccu

SEQ ID NO: 1081755 - RNA, 20 nt, Human
guggugcggggugcccugau

SEQ ID NO: 1081756 - RNA, 20 nt, Human
uaaggguagcuggugggggc

SEQ ID NO: 1081757 - RNA, 21 nt, Human
uacaaacugccaguguauggc

SEQ ID NO: 1081758 - RNA, 23 nt, Human
uacagaaagaaaaacugaggccc

SEQ ID NO: 1081759 - RNA, 20 nt, Human
uacaugugugcacgugugug

SEQ ID NO: 1081760 - RNA, 19 nt, Human
uagaauucaaacaaggggc

SEQ ID NO: 1081761 - RNA, 21 nt, Human
uagcaagguggacugaaaaaa

SEQ ID NO: 1081762 - RNA, 19 nt, Human
uauuacagagguuaaauca

SEQ ID NO: 1081763 - RNA, 19 nt, Human
ucauacuugcuggugggug

SEQ ID NO: 1081764 - RNA, 22 nt, Human
uccaaacgguggcucagcaaca

SEQ ID NO: 1081765 - RNA, 23 nt, Human
uccacaacgcgcgcucccccacc

SEQ ID NO: 1081766 - RNA, 19 nt, Human
uccucccauucaggcucca

SEQ ID NO: 1081767 - RNA, 21 nt, Human
uccugugcacgguggcuuggu

SEQ ID NO: 1081768 - RNA, 19 nt, Human
ucgacaugacuugcccaag

SEQ ID NO: 1081769 - RNA, 21 nt, Human
ucuagaaaaaugagaaggcuc

SEQ ID NO: 1081770 - RNA, 21 nt, Human
ucuggcaaagccagccccaaa

SEQ ID NO: 1081771 - RNA, 26 nt, Human
ucuuugaucauugcaaaggcagaagc

SEQ ID NO: 1081772 - RNA, 23 nt, Human
ugaaacauccucagaacacuucc

SEQ ID NO: 1081773 - RNA, 21 nt, Human
ugacacuuauccaagagugau

SEQ ID NO: 1081774 - RNA, 24 nt, Human
ugagaaccaaggugcggcauuugu

SEQ ID NO: 1081775 - RNA, 18 nt, Human
ugagagagaaccugcagg

SEQ ID NO: 1081776 - RNA, 19 nt, Human
ugcuggugggugugugggc

SEQ ID NO: 1081777 - RNA, 22 nt, Human
uggaugucacaaaacacacuga

SEQ ID NO: 1081778 - RNA, 23 nt, Human
uggcaaggguggaccccaggcau

SEQ ID NO: 1081779 - RNA, 18 nt, Human
uggcagggaagagggcug

SEQ ID NO: 1081780 - RNA, 19 nt, Human
uggcagggaagagggcugg

SEQ ID NO: 1081781 - RNA, 19 nt, Human
ugggaugaacaccaucguc

SEQ ID NO: 1081782 - RNA, 21 nt, Human
ugggcaugcuccgcuccucug

SEQ ID NO: 1081783 - RNA, 24 nt, Human
uggggcuguggaaacaggaggguu

SEQ ID NO: 1081784 - RNA, 19 nt, Human
uggggucacccacuguccc

SEQ ID NO: 1081785 - RNA, 22 nt, Human
uggugggugugugggcgggagu

SEQ ID NO: 1081786 - RNA, 22 nt, Human
uguacaugugugcacgugugug

SEQ ID NO: 1081787 - RNA, 19 nt, Human
ugucacaaaacacacugau

SEQ ID NO: 1081788 - RNA, 21 nt, Human
ugucauacuugcuggugggug

SEQ ID NO: 1081789 - RNA, 19 nt, Human
ugugcacgugugugugcau

SEQ ID NO: 1081790 - RNA, 22 nt, Human
ugugugcacgugugugugcaug

SEQ ID NO: 1081791 - RNA, 24 nt, Human
ugugugugcauguccaagauuccc

SEQ ID NO: 1081792 - RNA, 21 nt, Human
uucccuccugcuccccaaacg

SEQ ID NO: 1081793 - RNA, 20 nt, Human
uugcuggugggugugugggc

SEQ ID NO: 1081794 - RNA, 22 nt, Human
uuugcugagacccuuccugugc

SEQ ID NO: 1081795 - RNA, 19 nt, Human
auucuuguaggaauucuga

SEQ ID NO: 1081796 - RNA, 21 nt, Human
caggaucaauacccaugcugg

SEQ ID NO: 1081797 - RNA, 23 nt, Human
ccaagaaaucaguguaacucaga

SEQ ID NO: 1081798 - RNA, 22 nt, Human
cccucgguccagggcggcgguc

SEQ ID NO: 1081799 - RNA, 21 nt, Human
gaaaucaguguaacucagaua

SEQ ID NO: 1081800 - RNA, 22 nt, Human
gcggaccucagucagcuggggc

SEQ ID NO: 1081801 - RNA, 18 nt, Human
gguauugggaaggccuca

SEQ ID NO: 1081802 - RNA, 22 nt, Human
uaggaauucugacuuaagguuc

SEQ ID NO: 1081803 - RNA, 20 nt, Human
ucccucgguccagggcggcg

SEQ ID NO: 1081804 - RNA, 18 nt, Human
uugucagguauugggaag

SEQ ID NO: 1081805 - RNA, 19 nt, Human
aagagcuucuggagccuga

SEQ ID NO: 1081806 - RNA, 22 nt, Human
aagcugauuucagaggacggug

SEQ ID NO: 1081807 - RNA, 22 nt, Human
acagaacuugaugccaauguag

SEQ ID NO: 1081808 - RNA, 22 nt, Human
agacaauuucuucuacgacacc

SEQ ID NO: 1081809 - RNA, 23 nt, Human
agacacacgcucacacucacaca

SEQ ID NO: 1081810 - RNA, 22 nt, Human
aggcagggcggccgcgcacgca

SEQ ID NO: 1081811 - RNA, 19 nt, Human
cacacagacacacgcucac

SEQ ID NO: 1081812 - RNA, 24 nt, Human
caccuuggcuccuguagacaauuu

SEQ ID NO: 1081813 - RNA, 18 nt, Human
cccgcaucguagggaauc

SEQ ID NO: 1081814 - RNA, 21 nt, Human
ccgccgcugcccgcaggucgc

SEQ ID NO: 1081815 - RNA, 23 nt, Human
ccgccgcugcccgcaggucgcuc

SEQ ID NO: 1081816 - RNA, 24 nt, Human
ccgccgcugcccgcaggucgcucu

SEQ ID NO: 1081817 - RNA, 21 nt, Human
ccugccacugccgccgcugcc

SEQ ID NO: 1081818 - RNA, 22 nt, Human
ccugccacugccgccgcugccc

SEQ ID NO: 1081819 - RNA, 28 nt, Human
cgcacgcacacacagacacacgcucaca

SEQ ID NO: 1081820 - RNA, 22 nt, Human
cggcaagguggcuccagguggc

SEQ ID NO: 1081821 - RNA, 24 nt, Human
cuccugccacugccgccgcugccc

SEQ ID NO: 1081822 - RNA, 22 nt, Human
cugcagaagacggacagaguga

SEQ ID NO: 1081823 - RNA, 21 nt, Human
cuucuggagccugaagaguuc

SEQ ID NO: 1081824 - RNA, 20 nt, Human
gaaaagacggucguaggaag

SEQ ID NO: 1081825 - RNA, 20 nt, Human
gaaccauggucuaauggagc

SEQ ID NO: 1081826 - RNA, 18 nt, Human
gagaggagaaguggugcu

SEQ ID NO: 1081827 - RNA, 23 nt, Human
gaugaaccauggucuaauggagc

SEQ ID NO: 1081828 - RNA, 20 nt, Human
gcuccugccacugccgccgc

SEQ ID NO: 1081829 - RNA, 18 nt, Human
gggcagaggcagggcggc

SEQ ID NO: 1081830 - RNA, 21 nt, Human
guggcuccagguggcuuucac

SEQ ID NO: 1081831 - RNA, 21 nt, Human
uaagagcuucuggagccugaa

SEQ ID NO: 1081832 - RNA, 18 nt, Human
uacgacaccaguucaaca

SEQ ID NO: 1081833 - RNA, 26 nt, Human
ucaacaccuggaugaaugguuacagg

SEQ ID NO: 1081834 - RNA, 21 nt, Human
uccgcgcccggggagcgggca

SEQ ID NO: 1081835 - RNA, 21 nt, Human
uccugccacugccgccgcugc

SEQ ID NO: 1081836 - RNA, 23 nt, Human
ucgcugcccuuugccauagcuca

SEQ ID NO: 1081837 - RNA, 19 nt, Human
ugaaagcaucuccaaagcu

SEQ ID NO: 1081838 - RNA, 21 nt, Human
ugaaagcaucuccaaagcuga

SEQ ID NO: 1081839 - RNA, 21 nt, Human
ugcaaucgccccaugaaaccu

SEQ ID NO: 1081840 - RNA, 19 nt, Human
ugccauagcucagcacccg

SEQ ID NO: 1081841 - RNA, 19 nt, Human
uguaggcuuuuuuucuuuu

SEQ ID NO: 1081842 - RNA, 18 nt, Human
uucaagauucuacagucu

SEQ ID NO: 1081843 - RNA, 22 nt, Human
uucuucuacgacaccaguucaa

SEQ ID NO: 1081844 - RNA, 24 nt, Human
uugaugccaauguaggcuuuuuuu

SEQ ID NO: 1081845 - RNA, 26 nt, Human
uuucacagucguacgcgggucucgcu

SEQ ID NO: 1081846 - RNA, 24 nt, Human
uuuucaggagagagaggagaagug

SEQ ID NO: 1081847 - RNA, 25 nt, Human
uuuuucuuuuuuaaaaaaaaaauac

SEQ ID NO: 1081848 - RNA, 22 nt, Human
aaccgcagcggggcaacgagga

SEQ ID NO: 1081849 - RNA, 19 nt, Human
agaggcuguucucaacugg

SEQ ID NO: 1081850 - RNA, 22 nt, Human
augucaugcagaggcuguucuc

SEQ ID NO: 1081851 - RNA, 19 nt, Human
caauccuacccaacucagg

SEQ ID NO: 1081852 - RNA, 20 nt, Human
cagaggcuguucucaacugg

SEQ ID NO: 1081853 - RNA, 24 nt, Human
caugcagaggcuguucucaacugg

SEQ ID NO: 1081854 - RNA, 21 nt, Human
ccaauaaccuuaaugaccaag

SEQ ID NO: 1081855 - RNA, 21 nt, Human
cugacaucaaaacaguuccgu

SEQ ID NO: 1081856 - RNA, 19 nt, Human
gaggaugacuaaugugugc

SEQ ID NO: 1081857 - RNA, 24 nt, Human
gucaugcagaggcuguucucaacu

SEQ ID NO: 1081858 - RNA, 23 nt, Human
uacccaacucaggaaaguaaugc

SEQ ID NO: 1081859 - RNA, 18 nt, Human
ucauuuuagggcaauccu

SEQ ID NO: 1081860 - RNA, 20 nt, Human
uccaaaaucucuuucucacc

SEQ ID NO: 1081861 - RNA, 20 nt, Human
ugugcuguggucucgccugc

SEQ ID NO: 1081862 - RNA, 22 nt, Human
uucaaugccaauuuaaucacuu

SEQ ID NO: 1081863 - RNA, 22 nt, Human
uuccaaaaucucuuucucaccu

SEQ ID NO: 1081864 - RNA, 21 nt, Human
uucuugugggcgccauuuuua

SEQ ID NO: 1081865 - RNA, 22 nt, Human
uuuucaaaugcuuaaguuguag

SEQ ID NO: 1081866 - RNA, 21 nt, Human
aacgagagagcauaacagaaa

SEQ ID NO: 1081867 - RNA, 19 nt, Human
aagcaggaaaggagaucag

SEQ ID NO: 1081868 - RNA, 21 nt, Human
aagcaggaaaggagaucagag

SEQ ID NO: 1081869 - RNA, 20 nt, Human
aagcaggagucccugaugca

SEQ ID NO: 1081870 - RNA, 23 nt, Human
aaggaaugccuccggggacaggc

SEQ ID NO: 1081871 - RNA, 25 nt, Human
aauguguauuuauuauucaaauagc

SEQ ID NO: 1081872 - RNA, 23 nt, Human
aauguguuuaucccaggcagagc

SEQ ID NO: 1081873 - RNA, 18 nt, Human
acaaggccaacaagcauc

SEQ ID NO: 1081874 - RNA, 21 nt, Human
acagaaaaccuauagacaccu

SEQ ID NO: 1081875 - RNA, 21 nt, Human
acagauaccaccacacccgga

SEQ ID NO: 1081876 - RNA, 21 nt, Human
acagugccccaucauuuccga

SEQ ID NO: 1081877 - RNA, 23 nt, Human
accaccacacccggaaagagaua

SEQ ID NO: 1081878 - RNA, 22 nt, Human
acccuaauaaugggccuggguc

SEQ ID NO: 1081879 - RNA, 24 nt, Human
acccugacagcccccucccaggac

SEQ ID NO: 1081880 - RNA, 21 nt, Human
accuuggaaaaaucccauccc

SEQ ID NO: 1081881 - RNA, 18 nt, Human
acgagagagcauaacaga

SEQ ID NO: 1081882 - RNA, 23 nt, Human
agaaaaacaaccucaacugugaa

SEQ ID NO: 1081883 - RNA, 18 nt, Human
agacaaggccaacaagca

SEQ ID NO: 1081884 - RNA, 19 nt, Human
agaccagggccuuuggccu

SEQ ID NO: 1081885 - RNA, 19 nt, Human
agcacagcccuccccaggc

SEQ ID NO: 1081886 - RNA, 25 nt, Human
agcaggcuggcgggcucccccaggc

SEQ ID NO: 1081887 - RNA, 23 nt, Human
agccucgccugggaagccuuggc

SEQ ID NO: 1081888 - RNA, 19 nt, Human
agcgcccccuccccaacug

SEQ ID NO: 1081889 - RNA, 25 nt, Human
aggaauuccgcgguuccugcccggc

SEQ ID NO: 1081890 - RNA, 25 nt, Human
aggcagagcagccgcugaaagggga

SEQ ID NO: 1081891 - RNA, 18 nt, Human
aggcaggacaagaaggga

SEQ ID NO: 1081892 - RNA, 24 nt, Human
auagaggcaaccaguggaucuucu

SEQ ID NO: 1081893 - RNA, 18 nt, Human
aucccaucccugcuccag

SEQ ID NO: 1081894 - RNA, 18 nt, Human
auccccagggcucuccuu

SEQ ID NO: 1081895 - RNA, 18 nt, Human
auguaccuuggaaaaauc

SEQ ID NO: 1081896 - RNA, 19 nt, Human
auguguuuaucccaggcag

SEQ ID NO: 1081897 - RNA, 19 nt, Human
caaccagcccccuccccac

SEQ ID NO: 1081898 - RNA, 19 nt, Human
caacugugaaaagcagucc

SEQ ID NO: 1081899 - RNA, 19 nt, Human
caccaauggagcgaggagc

SEQ ID NO: 1081900 - RNA, 24 nt, Human
cacccugacagcccccucccagga

SEQ ID NO: 1081901 - RNA, 24 nt, Human
caccuggcugcugggugucaggcc

SEQ ID NO: 1081902 - RNA, 21 nt, Human
cagacccccagcucacagcca

SEQ ID NO: 1081903 - RNA, 23 nt, Human
cagacccccagcucacagccaca

SEQ ID NO: 1081904 - RNA, 18 nt, Human
cagcaggcuggcgggcuc

SEQ ID NO: 1081905 - RNA, 23 nt, Human
cagcauucuggaugguuuccugc

SEQ ID NO: 1081906 - RNA, 21 nt, Human
cagcccaaccucgcagaauga

SEQ ID NO: 1081907 - RNA, 18 nt, Human
cagcccccuccccacccg

SEQ ID NO: 1081908 - RNA, 18 nt, Human
cagcgcccccuccccaac

SEQ ID NO: 1081909 - RNA, 22 nt, Human
caggacagaaaaccuauagaca

SEQ ID NO: 1081910 - RNA, 19 nt, Human
caggacccgccgggugccc

SEQ ID NO: 1081911 - RNA, 22 nt, Human
caggcagagcagccgcugaaag

SEQ ID NO: 1081912 - RNA, 22 nt, Human
caggccagacccccagcucaca

SEQ ID NO: 1081913 - RNA, 20 nt, Human
caggcugcggcaaagacugu

SEQ ID NO: 1081914 - RNA, 24 nt, Human
cagguccugccgcuccccugccaa

SEQ ID NO: 1081915 - RNA, 21 nt, Human
cauccagcugggagaagagca

SEQ ID NO: 1081916 - RNA, 27 nt, Human
caucccugcuccaggcccaaauagagg

SEQ ID NO: 1081917 - RNA, 21 nt, Human
cauucuggaugguuuccugca

SEQ ID NO: 1081918 - RNA, 23 nt, Human
ccaaaucugaauuuuuuccggcc

SEQ ID NO: 1081919 - RNA, 19 nt, Human
ccaagggugugagcagaga

SEQ ID NO: 1081920 - RNA, 21 nt, Human
ccacauccccagggcucuccu

SEQ ID NO: 1081921 - RNA, 23 nt, Human
ccagccacagauaccaccacacc

SEQ ID NO: 1081922 - RNA, 19 nt, Human
cccaaccagcccccucccc

SEQ ID NO: 1081923 - RNA, 22 nt, Human
cccaaccagcccccuccccacc

SEQ ID NO: 1081924 - RNA, 23 nt, Human
cccaaccagcccccuccccaccc

SEQ ID NO: 1081925 - RNA, 22 nt, Human
cccacagaggagagacaaggcc

SEQ ID NO: 1081926 - RNA, 21 nt, Human
cccagcacagcccuccccagg

SEQ ID NO: 1081927 - RNA, 24 nt, Human
cccagggcucuccuucuuccccag

SEQ ID NO: 1081928 - RNA, 19 nt, Human
ccccacccggucccccuuc

SEQ ID NO: 1081929 - RNA, 19 nt, Human
ccccagcacagcccucccc

SEQ ID NO: 1081930 - RNA, 19 nt, Human
ccccagcacagcccucccc

SEQ ID NO: 1081931 - RNA, 21 nt, Human
ccccaugcuguagcacugucc

SEQ ID NO: 1081932 - RNA, 23 nt, Human
cccccagcucacagccacaucuc

SEQ ID NO: 1081933 - RNA, 18 nt, Human
cccccuucuauuuuuccu

SEQ ID NO: 1081934 - RNA, 20 nt, Human
ccccuccccacccggucccc

SEQ ID NO: 1081935 - RNA, 20 nt, Human
ccccuucuccuuggagcaag

SEQ ID NO: 1081936 - RNA, 19 nt, Human
cccgccgggugcccugugc

SEQ ID NO: 1081937 - RNA, 20 nt, Human
cccggccucgccauccagcc

SEQ ID NO: 1081938 - RNA, 23 nt, Human
cccggucccccuucuauuuuucc

SEQ ID NO: 1081939 - RNA, 26 nt, Human
cccggucccccuucuauuuuuccugg

SEQ ID NO: 1081940 - RNA, 19 nt, Human
cccuagaccccauguaccu

SEQ ID NO: 1081941 - RNA, 22 nt, Human
cccucaggacccgccgggugcc

SEQ ID NO: 1081942 - RNA, 18 nt, Human
ccgggugcccugugcugc

SEQ ID NO: 1081943 - RNA, 20 nt, Human
ccuauagacaccuggcugcu

SEQ ID NO: 1081944 - RNA, 22 nt, Human
ccuauagacaccuggcugcugg

SEQ ID NO: 1081945 - RNA, 23 nt, Human
ccucaggacccgccgggugcccu

SEQ ID NO: 1081946 - RNA, 22 nt, Human
ccuccuguccaagggugugagc

SEQ ID NO: 1081947 - RNA, 18 nt, Human
ccugcaagcuagcugccu

SEQ ID NO: 1081948 - RNA, 18 nt, Human
ccuugcacagggggcugu

SEQ ID NO: 1081949 - RNA, 21 nt, Human
cgcccccuccccaacuguuug

SEQ ID NO: 1081950 - RNA, 20 nt, Human
cgggacccugcaagcuagcu

SEQ ID NO: 1081951 - RNA, 23 nt, Human
cuaaaaccagccacagauaccac

SEQ ID NO: 1081952 - RNA, 24 nt, Human
cuaaaaccagccacagauaccacc

SEQ ID NO: 1081953 - RNA, 23 nt, Human
cucccccaggccuuggcaggucc

SEQ ID NO: 1081954 - RNA, 21 nt, Human
cuucucagcagccucuugccc

SEQ ID NO: 1081955 - RNA, 19 nt, Human
cuugccccaggaaagacca

SEQ ID NO: 1081956 - RNA, 18 nt, Human
cuuggcagguccugccgc

SEQ ID NO: 1081957 - RNA, 22 nt, Human
cuuuguuuuucugcuucuuuau

SEQ ID NO: 1081958 - RNA, 20 nt, Human
gaaaggagaucagaggagga

SEQ ID NO: 1081959 - RNA, 18 nt, Human
gaacucagcaggcuggcg

SEQ ID NO: 1081960 - RNA, 22 nt, Human
gacaagaagggagcagcccuga

SEQ ID NO: 1081961 - RNA, 20 nt, Human
gacagcccccucccaggaca

SEQ ID NO: 1081962 - RNA, 18 nt, Human
gacaggccagacccccag

SEQ ID NO: 1081963 - RNA, 19 nt, Human
gagaggcaggacaagaagg

SEQ ID NO: 1081964 - RNA, 24 nt, Human
gauucagccuucucugagaaccga

SEQ ID NO: 1081965 - RNA, 20 nt, Human
gauuuaugcccaucuucccc

SEQ ID NO: 1081966 - RNA, 26 nt, Human
gcacagcccuccccaggcugcggcaa

SEQ ID NO: 1081967 - RNA, 23 nt, Human
gcacuggguguuuuccugggguc

SEQ ID NO: 1081968 - RNA, 26 nt, Human
gcccgcuggcacaggggucugcagcc

SEQ ID NO: 1081969 - RNA, 21 nt, Human
gccgggugcccugugcugccc

SEQ ID NO: 1081970 - RNA, 21 nt, Human
gcggagggggcucugggcagg

SEQ ID NO: 1081971 - RNA, 23 nt, Human
gcugccuugcacagggggcuguc

SEQ ID NO: 1081972 - RNA, 21 nt, Human
ggaaaggagaucagaggagga

SEQ ID NO: 1081973 - RNA, 20 nt, Human
ggaggagaugguggcaaagc

SEQ ID NO: 1081974 - RNA, 21 nt, Human
ggaggagaugguggcaaagcg

SEQ ID NO: 1081975 - RNA, 22 nt, Human
ggccgagccuggucgaggcucc

SEQ ID NO: 1081976 - RNA, 22 nt, Human
ggccuuuggccucucgggaccc

SEQ ID NO: 1081977 - RNA, 18 nt, Human
ggcugcugggugucaggc

SEQ ID NO: 1081978 - RNA, 20 nt, Human
ggcuguguggggugcggagg

SEQ ID NO: 1081979 - RNA, 19 nt, Human
gggaucaaccgcaggcucu

SEQ ID NO: 1081980 - RNA, 21 nt, Human
gggcaucacccugacagcccc

SEQ ID NO: 1081981 - RNA, 18 nt, Human
ggggugcggagggggcuc

SEQ ID NO: 1081982 - RNA, 22 nt, Human
guagcacuguccaguuggcucu

SEQ ID NO: 1081983 - RNA, 20 nt, Human
uaaaagaaaaacaaccucaa

SEQ ID NO: 1081984 - RNA, 21 nt, Human
uaaauaaaagaaaaacaaccc

SEQ ID NO: 1081985 - RNA, 25 nt, Human
uaacagagacagcgcccccucccca

SEQ ID NO: 1081986 - RNA, 25 nt, Human
uacaguagaacucagcaggcuggcg

SEQ ID NO: 1081987 - RNA, 18 nt, Human
uaccuuggaaaaauccca

SEQ ID NO: 1081988 - RNA, 20 nt, Human
uagacaccuggcugcugggu

SEQ ID NO: 1081989 - RNA, 21 nt, Human
uagagaaaacgaagaucucac

SEQ ID NO: 1081990 - RNA, 21 nt, Human
uagcacuguccaguuggcucu

SEQ ID NO: 1081991 - RNA, 21 nt, Human
ucacccugacagcccccuccc

SEQ ID NO: 1081992 - RNA, 23 nt, Human
ucacccugacagcccccucccag

SEQ ID NO: 1081993 - RNA, 19 nt, Human
ucacuuaguccacggccac

SEQ ID NO: 1081994 - RNA, 19 nt, Human
ucagcaggcuggcgggcuc

SEQ ID NO: 1081995 - RNA, 20 nt, Human
ucauuuccgaaucaccaggc

SEQ ID NO: 1081996 - RNA, 20 nt, Human
uccagcugggagaagagcau

SEQ ID NO: 1081997 - RNA, 21 nt, Human
uccaggcccaaauagaggcaa

SEQ ID NO: 1081998 - RNA, 19 nt, Human
ucccaaccagcccccuccc

SEQ ID NO: 1081999 - RNA, 20 nt, Human
ucccaaccagcccccuccca

SEQ ID NO: 1082000 - RNA, 22 nt, Human
ucccaaccagcccccuccccac

SEQ ID NO: 1082001 - RNA, 21 nt, Human
uccccacccggucccccuucu

SEQ ID NO: 1082002 - RNA, 21 nt, Human
uccccagcacagcccucccca

SEQ ID NO: 1082003 - RNA, 21 nt, Human
uccccaggcugcggcaaagac

SEQ ID NO: 1082004 - RNA, 19 nt, Human
uccuuccagccuuuccucu

SEQ ID NO: 1082005 - RNA, 22 nt, Human
uccuuggagcaaggcugugugg

SEQ ID NO: 1082006 - RNA, 21 nt, Human
ucucccaaccagcccccuccc

SEQ ID NO: 1082007 - RNA, 22 nt, Human
ucuccuggcagaaguggccuga

SEQ ID NO: 1082008 - RNA, 21 nt, Human
ucucugaauccuugaggaccc

SEQ ID NO: 1082009 - RNA, 22 nt, Human
ucucugagaaccgagaagauuc

SEQ ID NO: 1082010 - RNA, 22 nt, Human
ucucugcaggcgggcaucaccc

SEQ ID NO: 1082011 - RNA, 20 nt, Human
ucuugccccaggaaagacca

SEQ ID NO: 1082012 - RNA, 21 nt, Human
ugaaaagcaguccaaaucuga

SEQ ID NO: 1082013 - RNA, 22 nt, Human
ugaaaagcaguccaaaucugaa

SEQ ID NO: 1082014 - RNA, 24 nt, Human
ugaaaggggagauggagagagaau

SEQ ID NO: 1082015 - RNA, 23 nt, Human
ugacccauggcuccggggaccag

SEQ ID NO: 1082016 - RNA, 21 nt, Human
ugaggugggagaagccgcaga

SEQ ID NO: 1082017 - RNA, 19 nt, Human
uggcagcacuugguggaga

SEQ ID NO: 1082018 - RNA, 23 nt, Human
uggcagcacuugguggagauuua

SEQ ID NO: 1082019 - RNA, 18 nt, Human
uggccacccccgccccag

SEQ ID NO: 1082020 - RNA, 22 nt, Human
uggccucucgggacccugcaag

SEQ ID NO: 1082021 - RNA, 22 nt, Human
uggccugaucucugccuucuca

SEQ ID NO: 1082022 - RNA, 20 nt, Human
uggcgggcucccccaggccu

SEQ ID NO: 1082023 - RNA, 22 nt, Human
uggcuaaaaccagccacagaua

SEQ ID NO: 1082024 - RNA, 20 nt, Human
ugggagaagagcauggucau

SEQ ID NO: 1082025 - RNA, 22 nt, Human
ugggagaagccgcagauugggg

SEQ ID NO: 1082026 - RNA, 18 nt, Human
uguccaguuggcucugac

SEQ ID NO: 1082027 - RNA, 21 nt, Human
ugugggggauguggcggggug

SEQ ID NO: 1082028 - RNA, 20 nt, Human
uguggggugcggagggggcu

SEQ ID NO: 1082029 - RNA, 21 nt, Human
uguguggggugcggagggggc

SEQ ID NO: 1082030 - RNA, 21 nt, Human
uguguuuaucccaggcagagc

SEQ ID NO: 1082031 - RNA, 21 nt, Human
uucaaguuaacagagacagcg

SEQ ID NO: 1082032 - RNA, 22 nt, Human
uuccggccugaguuaauuacac

SEQ ID NO: 1082033 - RNA, 23 nt, Human
uuccuggggucucuccacagugc

SEQ ID NO: 1082034 - RNA, 21 nt, Human
uuggcauguuuacugaucggg

SEQ ID NO: 1082035 - RNA, 19 nt, Human
uuggggguucucugaaucc

SEQ ID NO: 1082036 - RNA, 18 nt, Human
uuuccuggggucucucca

SEQ ID NO: 1082037 - RNA, 27 nt, Human
aaaacacugcucaggcgggcuuccccc

SEQ ID NO: 1082038 - RNA, 22 nt, Human
aaaccaaggacaauuccagaaa

SEQ ID NO: 1082039 - RNA, 22 nt, Human
aacaacaugaauuucccaagcc

SEQ ID NO: 1082040 - RNA, 21 nt, Human
aacauaauuuuucucaccacc

SEQ ID NO: 1082041 - RNA, 24 nt, Human
aaccaaauaggaaaaaaaaaaucc

SEQ ID NO: 1082042 - RNA, 24 nt, Human
aacugcccccuccucaacacaucc

SEQ ID NO: 1082043 - RNA, 26 nt, Human
aacuucuuuuuagggggccagguuuu

SEQ ID NO: 1082044 - RNA, 22 nt, Human
aagauguacaugagacgaaaug

SEQ ID NO: 1082045 - RNA, 20 nt, Human
aagcacacaaacaccauaug

SEQ ID NO: 1082046 - RNA, 20 nt, Human
aagccucaguacagucccag

SEQ ID NO: 1082047 - RNA, 20 nt, Human
acaaauaguaugcucccccu

SEQ ID NO: 1082048 - RNA, 23 nt, Human
acaauuccagaaauggcaaagaa

SEQ ID NO: 1082049 - RNA, 22 nt, Human
accaaauaggaaaaaaaaaauc

SEQ ID NO: 1082050 - RNA, 19 nt, Human
acccaggcuggagugcagu

SEQ ID NO: 1082051 - RNA, 23 nt, Human
acccaggcuggagugcaguggug

SEQ ID NO: 1082052 - RNA, 25 nt, Human
accccaagaaagugcagcuuggagu

SEQ ID NO: 1082053 - RNA, 23 nt, Human
acuccacuaccaaaaagggggaa

SEQ ID NO: 1082054 - RNA, 27 nt, Human
acuccacuaccaaaaagggggaaauaa

SEQ ID NO: 1082055 - RNA, 25 nt, Human
acucuggucugagaccagucuggga

SEQ ID NO: 1082056 - RNA, 20 nt, Human
acugcaagcuccgccucccg

SEQ ID NO: 1082057 - RNA, 20 nt, Human
agaaccccaagaaagugcag

SEQ ID NO: 1082058 - RNA, 22 nt, Human
agacagaacagagcacagcaaa

SEQ ID NO: 1082059 - RNA, 24 nt, Human
agacagaacagagcacagcaaacu

SEQ ID NO: 1082060 - RNA, 23 nt, Human
agagagcagcagacagaacagag

SEQ ID NO: 1082061 - RNA, 24 nt, Human
agagcacagcaaacugcccccucc

SEQ ID NO: 1082062 - RNA, 24 nt, Human
agagcagcugggaggaagccucau

SEQ ID NO: 1082063 - RNA, 24 nt, Human
agcagcugggaggaagccucaugg

SEQ ID NO: 1082064 - RNA, 22 nt, Human
aggcaaccagggcaucugagca

SEQ ID NO: 1082065 - RNA, 25 nt, Human
aggcuggagugcaguggugcgaucu

SEQ ID NO: 1082066 - RNA, 18 nt, Human
agucggggguggggggag

SEQ ID NO: 1082067 - RNA, 23 nt, Human
agugcagcuuggaguuuuggcuu

SEQ ID NO: 1082068 - RNA, 20 nt, Human
agugcaguggugcgaucucg

SEQ ID NO: 1082069 - RNA, 23 nt, Human
agugcaguggugcgaucucggcu

SEQ ID NO: 1082070 - RNA, 24 nt, Human
agugcaguggugcgaucucggcuc

SEQ ID NO: 1082071 - RNA, 22 nt, Human
auagagccauauuacacaugcu

SEQ ID NO: 1082072 - RNA, 20 nt, Human
auauuucugcaucuaugacc

SEQ ID NO: 1082073 - RNA, 20 nt, Human
auccuuacucuugcuggggg

SEQ ID NO: 1082074 - RNA, 19 nt, Human
auggacaauguagaaaaaa

SEQ ID NO: 1082075 - RNA, 21 nt, Human
auugucagguuuccuuuuuuu

SEQ ID NO: 1082076 - RNA, 24 nt, Human
caacuccacuaccaaaaaggggga

SEQ ID NO: 1082077 - RNA, 20 nt, Human
caauguagaaaaaagagguu

SEQ ID NO: 1082078 - RNA, 27 nt, Human
cacacaaacaccauaugaaaccaacag

SEQ ID NO: 1082079 - RNA, 23 nt, Human
cacacugaucccuugggccuggg

SEQ ID NO: 1082080 - RNA, 18 nt, Human
caccacuguuuugaccuc

SEQ ID NO: 1082081 - RNA, 24 nt, Human
cacccaggcuggagugcaguggug

SEQ ID NO: 1082082 - RNA, 19 nt, Human
caccucccaccuuacggca

SEQ ID NO: 1082083 - RNA, 19 nt, Human
caccuuguggaaaaucaau

SEQ ID NO: 1082084 - RNA, 22 nt, Human
cacgccguucuccugccucagc

SEQ ID NO: 1082085 - RNA, 22 nt, Human
cacgucuccacaguaaguuuug

SEQ ID NO: 1082086 - RNA, 21 nt, Human
cacugaucccuugggccuggg

SEQ ID NO: 1082087 - RNA, 24 nt, Human
cagaacagagcacagcaaacugcc

SEQ ID NO: 1082088 - RNA, 21 nt, Human
cagaaccccaagaaagugcag

SEQ ID NO: 1082089 - RNA, 22 nt, Human
cagcaaacugcccccuccucaa

SEQ ID NO: 1082090 - RNA, 21 nt, Human
cagcagacagaacagagcaca

SEQ ID NO: 1082091 - RNA, 19 nt, Human
cagcagagcagcugggagg

SEQ ID NO: 1082092 - RNA, 21 nt, Human
cagcuuggcucucaccacugu

SEQ ID NO: 1082093 - RNA, 19 nt, Human
caggucacagaagucagag

SEQ ID NO: 1082094 - RNA, 20 nt, Human
caggugcccccuacagccga

SEQ ID NO: 1082095 - RNA, 19 nt, Human
ccaagccaggcugauuucc

SEQ ID NO: 1082096 - RNA, 22 nt, Human
ccagaaccccaagaaagugcag

SEQ ID NO: 1082097 - RNA, 19 nt, Human
cccagagagagcagcagac

SEQ ID NO: 1082098 - RNA, 22 nt, Human
ccccaagaaagugcagcuugga

SEQ ID NO: 1082099 - RNA, 23 nt, Human
cccucucaacuccacuaccaaaa

SEQ ID NO: 1082100 - RNA, 22 nt, Human
ccuacagccgaggguccaaggc

SEQ ID NO: 1082101 - RNA, 28 nt, Human
ccuaugagcuaaggaaaaaccggggucc

SEQ ID NO: 1082102 - RNA, 19 nt, Human
ccucuuggccacaaaucug

SEQ ID NO: 1082103 - RNA, 23 nt, Human
ccucuugugggucagaggccagc

SEQ ID NO: 1082104 - RNA, 19 nt, Human
ccuggggguggaugccagg

SEQ ID NO: 1082105 - RNA, 24 nt, Human
ccuuuuguccuguaaagucagaga

SEQ ID NO: 1082106 - RNA, 19 nt, Human
cgccucccggguucacgcc

SEQ ID NO: 1082107 - RNA, 18 nt, Human
cggggguggggggaggug

SEQ ID NO: 1082108 - RNA, 23 nt, Human
cucccgaaauuaucaggcuucca

SEQ ID NO: 1082109 - RNA, 21 nt, Human
cucccggguucacgccguucu

SEQ ID NO: 1082110 - RNA, 19 nt, Human
cucucuggcaccacacuga

SEQ ID NO: 1082111 - RNA, 22 nt, Human
cucuuggccacaaaucugccuu

SEQ ID NO: 1082112 - RNA, 21 nt, Human
cucuuugccuauagucggggg

SEQ ID NO: 1082113 - RNA, 19 nt, Human
cugaucccuugggccuggg

SEQ ID NO: 1082114 - RNA, 18 nt, Human
cugccucagccucccgaa

SEQ ID NO: 1082115 - RNA, 24 nt, Human
cuugcucugucacccaggcuggag

SEQ ID NO: 1082116 - RNA, 24 nt, Human
cuuggaguuuuggcuuccuucccc

SEQ ID NO: 1082117 - RNA, 22 nt, Human
cuuguggaaaaucaaucagugu

SEQ ID NO: 1082118 - RNA, 24 nt, Human
cuuuauacaaauaguaugcucccc

SEQ ID NO: 1082119 - RNA, 19 nt, Human
gaaaaagauguacaugaga

SEQ ID NO: 1082120 - RNA, 23 nt, Human
gaauaaaaacauaauuuuucuca

SEQ ID NO: 1082121 - RNA, 18 nt, Human
gaccuagccagccaucca

SEQ ID NO: 1082122 - RNA, 21 nt, Human
gagcagcugggaggaagccuc

SEQ ID NO: 1082123 - RNA, 21 nt, Human
gagcuaaggaaaaaccaagga

SEQ ID NO: 1082124 - RNA, 18 nt, Human
gaguuuuggcuuccuucc

SEQ ID NO: 1082125 - RNA, 21 nt, Human
gauaacgugucaaguacaugc

SEQ ID NO: 1082126 - RNA, 19 nt, Human
gcaacccugugacucagag

SEQ ID NO: 1082127 - RNA, 21 nt, Human
gcacagcaaacugcccccucc

SEQ ID NO: 1082128 - RNA, 19 nt, Human
gcauggccagaaccccaag

SEQ ID NO: 1082129 - RNA, 19 nt, Human
gccagaaccccaagaaagu

SEQ ID NO: 1082130 - RNA, 25 nt, Human
gccucccggguucacgccguucucc

SEQ ID NO: 1082131 - RNA, 19 nt, Human
gcucucaccacuguuuuga

SEQ ID NO: 1082132 - RNA, 25 nt, Human
gcucugucacccaggcuggagugca

SEQ ID NO: 1082133 - RNA, 18 nt, Human
gcuuggaaacacggacag

SEQ ID NO: 1082134 - RNA, 22 nt, Human
ggagacggagucuugcucuguc

SEQ ID NO: 1082135 - RNA, 20 nt, Human
ggcaucugagcauaaccuga

SEQ ID NO: 1082136 - RNA, 21 nt, Human
ggccugaacucugaagugcug

SEQ ID NO: 1082137 - RNA, 22 nt, Human
gguuuccuuuuuuuuuuuuuuu

SEQ ID NO: 1082138 - RNA, 21 nt, Human
gugggguaccuuuuguccugu

SEQ ID NO: 1082139 - RNA, 21 nt, Human
guucuccugccucagccuccc

SEQ ID NO: 1082140 - RNA, 24 nt, Human
uaaguccuugagccagggccuaca

SEQ ID NO: 1082141 - RNA, 24 nt, Human
uacagcaucugggugucucaugaa

SEQ ID NO: 1082142 - RNA, 24 nt, Human
uacagccgaggguccaaggcaacc

SEQ ID NO: 1082143 - RNA, 22 nt, Human
uaccaaaaagggggaaauaaua

SEQ ID NO: 1082144 - RNA, 22 nt, Human
uaggcaaagcacacaaacacca

SEQ ID NO: 1082145 - RNA, 22 nt, Human
ucaacaacaugaauuucccaag

SEQ ID NO: 1082146 - RNA, 23 nt, Human
ucaagggucaguaauuuggggug

SEQ ID NO: 1082147 - RNA, 22 nt, Human
ucaaguacaugcugcccauacu

SEQ ID NO: 1082148 - RNA, 21 nt, Human
ucaccacuguuuugaccucug

SEQ ID NO: 1082149 - RNA, 24 nt, Human
ucacccaggcuggagugcaguggu

SEQ ID NO: 1082150 - RNA, 18 nt, Human
ucacugcaagcuccgccu

SEQ ID NO: 1082151 - RNA, 19 nt, Human
ucacugcaagcuccgccuc

SEQ ID NO: 1082152 - RNA, 24 nt, Human
ucacugcaagcuccgccucccggg

SEQ ID NO: 1082153 - RNA, 18 nt, Human
ucagcaagccagcagagc

SEQ ID NO: 1082154 - RNA, 22 nt, Human
ucagguuuccuuuuuuuuuuuu

SEQ ID NO: 1082155 - RNA, 22 nt, Human
uccacaguaaguuuugcaaggc

SEQ ID NO: 1082156 - RNA, 21 nt, Human
uccagaaauggcaaagaacac

SEQ ID NO: 1082157 - RNA, 21 nt, Human
ucccggguucacgccguucuc

SEQ ID NO: 1082158 - RNA, 24 nt, Human
ucccggguucacgccguucuccug

SEQ ID NO: 1082159 - RNA, 24 nt, Human
uccguuugguacugaugccuuucu

SEQ ID NO: 1082160 - RNA, 19 nt, Human
uccucaggccuugaaucua

SEQ ID NO: 1082161 - RNA, 21 nt, Human
uccuccaauguacgcacucuc

SEQ ID NO: 1082162 - RNA, 21 nt, Human
uccugccucagccucccgaaa

SEQ ID NO: 1082163 - RNA, 18 nt, Human
uccuuuuuuuuuuuuuuu

SEQ ID NO: 1082164 - RNA, 19 nt, Human
ucuccugccucagccuccc

SEQ ID NO: 1082165 - RNA, 19 nt, Human
ucuggucugagaccagucu

SEQ ID NO: 1082166 - RNA, 24 nt, Human
ucugucacccaggcuggagugcag

SEQ ID NO: 1082167 - RNA, 18 nt, Human
ucugugagcagcuuggcu

SEQ ID NO: 1082168 - RNA, 23 nt, Human
ucuugcucugucacccaggcugg

SEQ ID NO: 1082169 - RNA, 24 nt, Human
ucuugcucugucacccaggcugga

SEQ ID NO: 1082170 - RNA, 20 nt, Human
ugaccucugggauccuuacu

SEQ ID NO: 1082171 - RNA, 22 nt, Human
ugacucagagcuggcuucagca

SEQ ID NO: 1082172 - RNA, 22 nt, Human
ugauaauagagccucacauguc

SEQ ID NO: 1082173 - RNA, 19 nt, Human
ugcaaacggacguggggca

SEQ ID NO: 1082174 - RNA, 22 nt, Human
ugcacuuaaaccaucuucaggc

SEQ ID NO: 1082175 - RNA, 22 nt, Human
ugcaguggugcgaucucggcuc

SEQ ID NO: 1082176 - RNA, 18 nt, Human
ugccacaaacucuggucu

SEQ ID NO: 1082177 - RNA, 22 nt, Human
ugcggacauugugcggccccca

SEQ ID NO: 1082178 - RNA, 24 nt, Human
ugcucugucacccaggcuggagug

SEQ ID NO: 1082179 - RNA, 19 nt, Human
ugcugaccugaugcuaacg

SEQ ID NO: 1082180 - RNA, 20 nt, Human
uggaagugaucaacucucuu

SEQ ID NO: 1082181 - RNA, 23 nt, Human
uggagugcaguggugcgaucucg

SEQ ID NO: 1082182 - RNA, 24 nt, Human
uggagugcaguggugcgaucucgg

SEQ ID NO: 1082183 - RNA, 25 nt, Human
uggcaaagaacacuuaagaaaaaga

SEQ ID NO: 1082184 - RNA, 27 nt, Human
uggcauggcuguggcaucaagugggug

SEQ ID NO: 1082185 - RNA, 21 nt, Human
uggccagaaccccaagaaagu

SEQ ID NO: 1082186 - RNA, 20 nt, Human
uggcuguggcaucaaguggg

SEQ ID NO: 1082187 - RNA, 22 nt, Human
uggcuguggcaucaagugggug

SEQ ID NO: 1082188 - RNA, 18 nt, Human
ugggaggaagccucaugg

SEQ ID NO: 1082189 - RNA, 20 nt, Human
ugggaggaagccucauggca

SEQ ID NO: 1082190 - RNA, 21 nt, Human
ugggccugaacucugaagugc

SEQ ID NO: 1082191 - RNA, 21 nt, Human
ugucugaagggccugcacuua

SEQ ID NO: 1082192 - RNA, 25 nt, Human
ugugaagacaugaacuugaacucug

SEQ ID NO: 1082193 - RNA, 23 nt, Human
ugugggagguuugcuuugccugc

SEQ ID NO: 1082194 - RNA, 19 nt, Human
uucccaucaagccucagua

SEQ ID NO: 1082195 - RNA, 21 nt, Human
uuccugugccacaaacucugg

SEQ ID NO: 1082196 - RNA, 21 nt, Human
uuccuuccccaccgcuugggu

SEQ ID NO: 1082197 - RNA, 24 nt, Human
uugccaggaccugcugggccugaa

SEQ ID NO: 1082198 - RNA, 24 nt, Human
uugcucugucacccaggcuggagu

SEQ ID NO: 1082199 - RNA, 22 nt, Human
uuuuagggggccagguuuuccu

SEQ ID NO: 1082200 - RNA, 18 nt, Human
uuuuccucaaauccucag

SEQ ID NO: 1082201 - RNA, 25 nt, Human
uuuuuuuuuuugggagacggagucu

SEQ ID NO: 1082202 - RNA, 24 nt, Human
uuuuuuuuuuuuuuuuuuuuuggg

SEQ ID NO: 1082203 - RNA, 19 nt, Human
aaauuccacagagccacag

SEQ ID NO: 1082204 - RNA, 24 nt, Human
aaccaaauaggaaaaaaaaaaucc

SEQ ID NO: 1082205 - RNA, 20 nt, Human
aagcacacaaacaccauaug

SEQ ID NO: 1082206 - RNA, 18 nt, Human
aaugagaacuaccucuac

SEQ ID NO: 1082207 - RNA, 25 nt, Human
acaaaaggcacuucaaaauuccaca

SEQ ID NO: 1082208 - RNA, 23 nt, Human
acacaaaacagaaagacacacag

SEQ ID NO: 1082209 - RNA, 23 nt, Human
acacaggagccuggcuccugcag

SEQ ID NO: 1082210 - RNA, 22 nt, Human
accaaauaggaaaaaaaaaauc

SEQ ID NO: 1082211 - RNA, 19 nt, Human
acccaggcuggagugcagu

SEQ ID NO: 1082212 - RNA, 23 nt, Human
acccaggcuggagugcaguggug

SEQ ID NO: 1082213 - RNA, 22 nt, Human
acgcuggggcuacucaacccga

SEQ ID NO: 1082214 - RNA, 22 nt, Human
acuccacuaccaaaaaggggga

SEQ ID NO: 1082215 - RNA, 27 nt, Human
acuccacuaccaaaaagggggaaauaa

SEQ ID NO: 1082216 - RNA, 20 nt, Human
acugcaagcuccgccucccg

SEQ ID NO: 1082217 - RNA, 19 nt, Human
agaaacaugcauuuauuuc

SEQ ID NO: 1082218 - RNA, 23 nt, Human
agaagcucuaagacaaugggcua

SEQ ID NO: 1082219 - RNA, 23 nt, Human
agacaggaaaggacagaagggac

SEQ ID NO: 1082220 - RNA, 24 nt, Human
agagacaggaaaggacagaagaga

SEQ ID NO: 1082221 - RNA, 18 nt, Human
agagggacuucauccaca

SEQ ID NO: 1082222 - RNA, 22 nt, Human
agagguacucauugagcagaau

SEQ ID NO: 1082223 - RNA, 19 nt, Human
agcacaauguugggcaaag

SEQ ID NO: 1082224 - RNA, 27 nt, Human
aggaaaggacagaagagaugaccaaag

SEQ ID NO: 1082225 - RNA, 21 nt, Human
aggagccuggcuccugcaggc

SEQ ID NO: 1082226 - RNA, 25 nt, Human
aggcuggagugcaguggugcgaucu

SEQ ID NO: 1082227 - RNA, 21 nt, Human
aggcuuccaauuccaaaacuu

SEQ ID NO: 1082228 - RNA, 20 nt, Human
agugcaguggugcgaucucg

SEQ ID NO: 1082229 - RNA, 23 nt, Human
agugcaguggugcgaucucggcu

SEQ ID NO: 1082230 - RNA, 24 nt, Human
agugcaguggugcgaucucggcuc

SEQ ID NO: 1082231 - RNA, 20 nt, Human
auaaaguauucucaagucug

SEQ ID NO: 1082232 - RNA, 21 nt, Human
auagaaaacaacaucuuguua

SEQ ID NO: 1082233 - RNA, 20 nt, Human
auccucaggccuugaaucua

SEQ ID NO: 1082234 - RNA, 25 nt, Human
caaaggcacccccaagggaucaagg

SEQ ID NO: 1082235 - RNA, 24 nt, Human
caacuccacuaccaaaaaggggga

SEQ ID NO: 1082236 - RNA, 27 nt, Human
cacacaaacaccauaugaaaccaacag

SEQ ID NO: 1082237 - RNA, 21 nt, Human
cacacaguauguuugcacuuu

SEQ ID NO: 1082238 - RNA, 24 nt, Human
cacccaggcuggagugcaguggug

SEQ ID NO: 1082239 - RNA, 22 nt, Human
cacgccguucuccugccucagc

SEQ ID NO: 1082240 - RNA, 18 nt, Human
cagggccaggcuccagug

SEQ ID NO: 1082241 - RNA, 22 nt, Human
caguggggagggaagguguggg

SEQ ID NO: 1082242 - RNA, 19 nt, Human
caguuccaucaaacuaccc

SEQ ID NO: 1082243 - RNA, 30 nt, Human
caguuccaucaaacuacccaagggguaacu

SEQ ID NO: 1082244 - RNA, 20 nt, Human
cauggcucucggggcugcca

SEQ ID NO: 1082245 - RNA, 24 nt, Human
cccucggcacugaagaccuccacc

SEQ ID NO: 1082246 - RNA, 23 nt, Human
cccucucaacuccacuaccaaaa

SEQ ID NO: 1082247 - RNA, 24 nt, Human
ccuggcuuacccagaaaacagcug

SEQ ID NO: 1082248 - RNA, 19 nt, Human
cgccucccggguucacgcc

SEQ ID NO: 1082249 - RNA, 23 nt, Human
cucacaaggcaggcauccauaga

SEQ ID NO: 1082250 - RNA, 23 nt, Human
cucccgaaauuaucaggcuucca

SEQ ID NO: 1082251 - RNA, 21 nt, Human
cucccggguucacgccguucu

SEQ ID NO: 1082252 - RNA, 18 nt, Human
cuccugcaggccauggca

SEQ ID NO: 1082253 - RNA, 21 nt, Human
cucucuccugacugccagaua

SEQ ID NO: 1082254 - RNA, 19 nt, Human
cucugcggugggcccuugg

SEQ ID NO: 1082255 - RNA, 18 nt, Human
cugccucagccucccgaa

SEQ ID NO: 1082256 - RNA, 18 nt, Human
cugucacccaggcuggag

SEQ ID NO: 1082257 - RNA, 24 nt, Human
cuuuauacaaauaguaugcucccc

SEQ ID NO: 1082258 - RNA, 25 nt, Human
gccucccggguucacgccguucucc

SEQ ID NO: 1082259 - RNA, 25 nt, Human
gcucugucacccaggcuggagugca

SEQ ID NO: 1082260 - RNA, 22 nt, Human
ggagacggagucuugcucuguc

SEQ ID NO: 1082261 - RNA, 23 nt, Human
ggcacagaggaagagggacuuca

SEQ ID NO: 1082262 - RNA, 18 nt, Human
gggguaacagauucugga

SEQ ID NO: 1082263 - RNA, 24 nt, Human
guguuucaccugauggggucccug

SEQ ID NO: 1082264 - RNA, 21 nt, Human
guucuccugccucagccuccc

SEQ ID NO: 1082265 - RNA, 19 nt, Human
uaaaguauucucaagucug

SEQ ID NO: 1082266 - RNA, 19 nt, Human
uaaauucuaaccacaagca

SEQ ID NO: 1082267 - RNA, 20 nt, Human
uaacacagccacgcuggggc

SEQ ID NO: 1082268 - RNA, 21 nt, Human
uaacacagccacgcuggggcu

SEQ ID NO: 1082269 - RNA, 22 nt, Human
uaacacagccacgcuggggcua

SEQ ID NO: 1082270 - RNA, 20 nt, Human
uacacaaaacagaaagacac

SEQ ID NO: 1082271 - RNA, 22 nt, Human
uaccaaaaagggggaaauaaua

SEQ ID NO: 1082272 - RNA, 22 nt, Human
uaggcaaagcacacaaacacca

SEQ ID NO: 1082273 - RNA, 23 nt, Human
uauacaaauaguaugcucccccu

SEQ ID NO: 1082274 - RNA, 24 nt, Human
uaucauggcaguuuauaaaguauu

SEQ ID NO: 1082275 - RNA, 21 nt, Human
ucaaggcacagaggaagaggg

SEQ ID NO: 1082276 - RNA, 24 nt, Human
ucacccaggcuggagugcaguggu

SEQ ID NO: 1082277 - RNA, 24 nt, Human
ucaccugauggggucccuggccau

SEQ ID NO: 1082278 - RNA, 18 nt, Human
ucacugcaagcuccgccu

SEQ ID NO: 1082279 - RNA, 19 nt, Human
ucacugcaagcuccgccuc

SEQ ID NO: 1082280 - RNA, 24 nt, Human
ucacugcaagcuccgccucccggg

SEQ ID NO: 1082281 - RNA, 22 nt, Human
ucauugagcagaauuuucuaau

SEQ ID NO: 1082282 - RNA, 22 nt, Human
uccacagagccacagggucacu

SEQ ID NO: 1082283 - RNA, 22 nt, Human
uccccauagcauaggugugcuc

SEQ ID NO: 1082284 - RNA, 21 nt, Human
ucccggguucacgccguucuc

SEQ ID NO: 1082285 - RNA, 24 nt, Human
ucccggguucacgccguucuccug

SEQ ID NO: 1082286 - RNA, 21 nt, Human
uccugccucagccucccgaaa

SEQ ID NO: 1082287 - RNA, 19 nt, Human
ucuccugccucagccuccc

SEQ ID NO: 1082288 - RNA, 22 nt, Human
ucucggggcugccagcagggcu

SEQ ID NO: 1082289 - RNA, 24 nt, Human
ucugucacccaggcuggagugcag

SEQ ID NO: 1082290 - RNA, 22 nt, Human
ucuugcucugucacccaggcug

SEQ ID NO: 1082291 - RNA, 23 nt, Human
ucuugcucugucacccaggcugg

SEQ ID NO: 1082292 - RNA, 24 nt, Human
ucuugcucugucacccaggcugga

SEQ ID NO: 1082293 - RNA, 19 nt, Human
ugauggggucccuggccau

SEQ ID NO: 1082294 - RNA, 22 nt, Human
ugcaguggugcgaucucggcuc

SEQ ID NO: 1082295 - RNA, 23 nt, Human
ugcccagguccaagucaaagaac

SEQ ID NO: 1082296 - RNA, 25 nt, Human
ugccucagccucccgaaauuaucag

SEQ ID NO: 1082297 - RNA, 24 nt, Human
ugcucugucacccaggcuggagug

SEQ ID NO: 1082298 - RNA, 21 nt, Human
uggagaagcucuaagacaaug

SEQ ID NO: 1082299 - RNA, 23 nt, Human
uggagugcaguggugcgaucucg

SEQ ID NO: 1082300 - RNA, 24 nt, Human
uggagugcaguggugcgaucucgg

SEQ ID NO: 1082301 - RNA, 22 nt, Human
uggccauuuguaaauaaaucuc

SEQ ID NO: 1082302 - RNA, 22 nt, Human
uuaauccucaagacaauggacu

SEQ ID NO: 1082303 - RNA, 25 nt, Human
uuaauccucaagacaauggacucac

SEQ ID NO: 1082304 - RNA, 22 nt, Human
uuacagaaguuaacucugcaga

SEQ ID NO: 1082305 - RNA, 25 nt, Human
uuccacagagccacagggucacugu

SEQ ID NO: 1082306 - RNA, 19 nt, Human
uuccaucaaacuacccaag

SEQ ID NO: 1082307 - RNA, 25 nt, Human
uugaccuaagauccaacauuauaau

SEQ ID NO: 1082308 - RNA, 24 nt, Human
uugcucugucacccaggcuggagu

SEQ ID NO: 1082309 - RNA, 18 nt, Human
uuuuccucaaauccucag

SEQ ID NO: 1082310 - RNA, 24 nt, Human
aaaaucccagcucagugcaggaga

SEQ ID NO: 1082311 - RNA, 24 nt, Human
aaagacaaaggcgagaacagggac

SEQ ID NO: 1082312 - RNA, 22 nt, Human
aaagacauaguacuccccaugc

SEQ ID NO: 1082313 - RNA, 19 nt, Human
aaagauugaguauuuucag

SEQ ID NO: 1082314 - RNA, 22 nt, Human
aaagcaagcccaacagaagucu

SEQ ID NO: 1082315 - RNA, 24 nt, Human
aaccuggccaacguggugaaaccc

SEQ ID NO: 1082316 - RNA, 20 nt, Human
aacguggugaaacccccucu

SEQ ID NO: 1082317 - RNA, 21 nt, Human
aacguggugaaacccccucuc

SEQ ID NO: 1082318 - RNA, 18 nt, Human
aagcagaaagaggaaaca

SEQ ID NO: 1082319 - RNA, 18 nt, Human
aagcagaaagaggaaaca

SEQ ID NO: 1082320 - RNA, 20 nt, Human
aagcagaaagaggaaacagu

SEQ ID NO: 1082321 - RNA, 21 nt, Human
aagcagaaagaggaaacagug

SEQ ID NO: 1082322 - RNA, 22 nt, Human
aagcagaaagaggaaacagugg

SEQ ID NO: 1082323 - RNA, 23 nt, Human
aagcagaaagaggaaacaguggg

SEQ ID NO: 1082324 - RNA, 20 nt, Human
aagcagaucauaugccaaaa

SEQ ID NO: 1082325 - RNA, 19 nt, Human
aagccaaagaguacucuuc

SEQ ID NO: 1082326 - RNA, 24 nt, Human
aagccaaagaguacucuuccucag

SEQ ID NO: 1082327 - RNA, 21 nt, Human
aaggaucaugaccuaccaaug

SEQ ID NO: 1082328 - RNA, 18 nt, Human
aaguucacaggagaccaa

SEQ ID NO: 1082329 - RNA, 23 nt, Human
aaucauugcuaauuagaagcaga

SEQ ID NO: 1082330 - RNA, 24 nt, Human
aaucguuugaacccgggaggcaga

SEQ ID NO: 1082331 - RNA, 22 nt, Human
acacagcucagugcaggagacc

SEQ ID NO: 1082332 - RNA, 22 nt, Human
acacagcucagugcaggagacc

SEQ ID NO: 1082333 - RNA, 22 nt, Human
acacagcucaguucaggagacc

SEQ ID NO: 1082334 - RNA, 23 nt, Human
acacagcucaguucaggagacca

SEQ ID NO: 1082335 - RNA, 22 nt, Human
acacagggaaacuagagugcag

SEQ ID NO: 1082336 - RNA, 19 nt, Human
acaccaagcccacacaggg

SEQ ID NO: 1082337 - RNA, 18 nt, Human
acacuacaggccaggcac

SEQ ID NO: 1082338 - RNA, 18 nt, Human
acaguggcccuguugggg

SEQ ID NO: 1082339 - RNA, 21 nt, Human
accagggugccagggaggguc

SEQ ID NO: 1082340 - RNA, 21 nt, Human
accagugugccaggaaggguc

SEQ ID NO: 1082341 - RNA, 24 nt, Human
acccccucucuacuaaaaauacaa

SEQ ID NO: 1082342 - RNA, 24 nt, Human
accgacaccaagcccacacaggga

SEQ ID NO: 1082343 - RNA, 23 nt, Human
acugaaagacaaaggcgagaaca

SEQ ID NO: 1082344 - RNA, 21 nt, Human
agaaaugcgugcuccuauguc

SEQ ID NO: 1082345 - RNA, 21 nt, Human
agaauucuacguuuccuucag

SEQ ID NO: 1082346 - RNA, 24 nt, Human
agcacuuugggaggcugaggcggg

SEQ ID NO: 1082347 - RNA, 19 nt, Human
agccaaagaguacucuucc

SEQ ID NO: 1082348 - RNA, 24 nt, Human
agcgccccuccacucucaccccua

SEQ ID NO: 1082349 - RNA, 22 nt, Human
aggaaaagcaagcccaacagaa

SEQ ID NO: 1082350 - RNA, 22 nt, Human
aggaaaagcgaggccgacagaa

SEQ ID NO: 1082351 - RNA, 19 nt, Human
aggaacccuuuccugccgg

SEQ ID NO: 1082352 - RNA, 20 nt, Human
aggaagggcuggagcuucag

SEQ ID NO: 1082353 - RNA, 24 nt, Human
aggcacaguggcucacgccuguaa

SEQ ID NO: 1082354 - RNA, 19 nt, Human
aggcagaaguugcagugag

SEQ ID NO: 1082355 - RNA, 21 nt, Human
aggcagaaguugcagugagcc

SEQ ID NO: 1082356 - RNA, 19 nt, Human
aggccuucucuuuucccug

SEQ ID NO: 1082357 - RNA, 24 nt, Human
aggcgggcgaaucacgacgucaag

SEQ ID NO: 1082358 - RNA, 21 nt, Human
aggcugaggcgggcgaaucac

SEQ ID NO: 1082359 - RNA, 24 nt, Human
aggcugagguaggagaaucguuug

SEQ ID NO: 1082360 - RNA, 18 nt, Human
agggguguugggugccag

SEQ ID NO: 1082361 - RNA, 24 nt, Human
agguaggagaaucguuugaacccg

SEQ ID NO: 1082362 - RNA, 22 nt, Human
agucaggaagggucagagcuuc

SEQ ID NO: 1082363 - RNA, 18 nt, Human
agugcaggagaucagggc

SEQ ID NO: 1082364 - RNA, 24 nt, Human
aguggcucacgccuguaaucccag

SEQ ID NO: 1082365 - RNA, 23 nt, Human
auaaguauuaaguagucugcacc

SEQ ID NO: 1082366 - RNA, 20 nt, Human
aucacugacccaacccaggg

SEQ ID NO: 1082367 - RNA, 25 nt, Human
auggugccacugcauuccaaccccu

SEQ ID NO: 1082368 - RNA, 21 nt, Human
auuguauuuuaagagagaaag

SEQ ID NO: 1082369 - RNA, 25 nt, Human
caacaagccaaagaguacucuuccu

SEQ ID NO: 1082370 - RNA, 24 nt, Human
caacguggugaaacccccucucua

SEQ ID NO: 1082371 - RNA, 22 nt, Human
caagcccacacagggaaacuag

SEQ ID NO: 1082372 - RNA, 19 nt, Human
cacaacaggccaaagagug

SEQ ID NO: 1082373 - RNA, 21 nt, Human
cacaacaggccaaagagugcu

SEQ ID NO: 1082374 - RNA, 22 nt, Human
caccaggaaaggcuggagcuuc

SEQ ID NO: 1082375 - RNA, 22 nt, Human
caccaggaagggcuggagcuuc

SEQ ID NO: 1082376 - RNA, 23 nt, Human
caccccccuucccgcacaugcau

SEQ ID NO: 1082377 - RNA, 24 nt, Human
caccugggugaugggcacuggcuc

SEQ ID NO: 1082378 - RNA, 19 nt, Human
caccugggugcugucaacc

SEQ ID NO: 1082379 - RNA, 24 nt, Human
cacgccuguaaucccagcacuuug

SEQ ID NO: 1082380 - RNA, 19 nt, Human
cacgcuugcucccccucca

SEQ ID NO: 1082381 - RNA, 26 nt, Human
cacuacaggccaggcacaguggcuca

SEQ ID NO: 1082382 - RNA, 19 nt, Human
cacuaugccagucaaugcc

SEQ ID NO: 1082383 - RNA, 27 nt, Human
cacuggcccaggaaaagcgaggccgac

SEQ ID NO: 1082384 - RNA, 23 nt, Human
cacugggggauuagcaccaggcu

SEQ ID NO: 1082385 - RNA, 24 nt, Human
cagcacuuugggaggcugaggcgg

SEQ ID NO: 1082386 - RNA, 24 nt, Human
cagcauccuuuuccaaaauucucc

SEQ ID NO: 1082387 - RNA, 21 nt, Human
cagcuacuugggaggcugagg

SEQ ID NO: 1082388 - RNA, 26 nt, Human
caggaaggagccaucaacauucccug

SEQ ID NO: 1082389 - RNA, 20 nt, Human
caggagccgagggcacuagg

SEQ ID NO: 1082390 - RNA, 23 nt, Human
caggccaggcacaguggcucacg

SEQ ID NO: 1082391 - RNA, 22 nt, Human
cagggcaccaggaagggcugga

SEQ ID NO: 1082392 - RNA, 21 nt, Human
cagugagaccaagaacccacc

SEQ ID NO: 1082393 - RNA, 20 nt, Human
cagugcaagagaccagggaa

SEQ ID NO: 1082394 - RNA, 21 nt, Human
cagugccaggcaguugagugg

SEQ ID NO: 1082395 - RNA, 23 nt, Human
caucgggggcugggaaccuggcu

SEQ ID NO: 1082396 - RNA, 23 nt, Human
caucggggguugggaaccuggcu

SEQ ID NO: 1082397 - RNA, 21 nt, Human
caucuaggggaacagguggag

SEQ ID NO: 1082398 - RNA, 24 nt, Human
caucuguagucccagcuacuuggg

SEQ ID NO: 1082399 - RNA, 20 nt, Human
caugaauuaguucacacacu

SEQ ID NO: 1082400 - RNA, 19 nt, Human
cauguggccugggcagucc

SEQ ID NO: 1082401 - RNA, 19 nt, Human
cauguggccugggcagucc

SEQ ID NO: 1082402 - RNA, 18 nt, Human
ccaaacagauaucugggu

SEQ ID NO: 1082403 - RNA, 21 nt, Human
ccaacacagacgcagagcauc

SEQ ID NO: 1082404 - RNA, 23 nt, Human
ccaagcccacacagggaaacuag

SEQ ID NO: 1082405 - RNA, 21 nt, Human
ccacugcauuccaaccccugu

SEQ ID NO: 1082406 - RNA, 22 nt, Human
ccacugcauuccaaccccuguc

SEQ ID NO: 1082407 - RNA, 23 nt, Human
ccagcauccuuuuccaaaauucu

SEQ ID NO: 1082408 - RNA, 22 nt, Human
ccagcccgcugaguuucagcug

SEQ ID NO: 1082409 - RNA, 20 nt, Human
ccaggaagggucugagcuuc

SEQ ID NO: 1082410 - RNA, 20 nt, Human
ccaggaggacccccuuggca

SEQ ID NO: 1082411 - RNA, 20 nt, Human
ccaggcucaccaucuaugcc

SEQ ID NO: 1082412 - RNA, 25 nt, Human
ccagugugccaggaagggucagagu

SEQ ID NO: 1082413 - RNA, 22 nt, Human
ccaugaagaacacugauccaac

SEQ ID NO: 1082414 - RNA, 22 nt, Human
ccauguggagaaagggguguug

SEQ ID NO: 1082415 - RNA, 21 nt, Human
cccacacagggaaacuagagu

SEQ ID NO: 1082416 - RNA, 18 nt, Human
ccccuacacacacccaga

SEQ ID NO: 1082417 - RNA, 22 nt, Human
ccccuucccgcacaugcaucca

SEQ ID NO: 1082418 - RNA, 22 nt, Human
cccuacacacacccagaggcaa

SEQ ID NO: 1082419 - RNA, 24 nt, Human
ccgacaccaagcccacacagggaa

SEQ ID NO: 1082420 - RNA, 20 nt, Human
ccggacacacugggaccagc

SEQ ID NO: 1082421 - RNA, 19 nt, Human
ccugccgggaccaccauca

SEQ ID NO: 1082422 - RNA, 22 nt, Human
ccuggaugauggacacuggccc

SEQ ID NO: 1082423 - RNA, 18 nt, Human
ccuggccaacguggugaa

SEQ ID NO: 1082424 - RNA, 23 nt, Human
ccuggccaacguggugaaacccc

SEQ ID NO: 1082425 - RNA, 22 nt, Human
ccugggugaugggcacuggcuc

SEQ ID NO: 1082426 - RNA, 18 nt, Human
ccugggugcugucaacug

SEQ ID NO: 1082427 - RNA, 19 nt, Human
ccuucaggcccaacugaag

SEQ ID NO: 1082428 - RNA, 23 nt, Human
ccuuccggacauuugguacaguc

SEQ ID NO: 1082429 - RNA, 18 nt, Human
cgacaccaagcccacaca

SEQ ID NO: 1082430 - RNA, 19 nt, Human
cgagaccaaccuggccaac

SEQ ID NO: 1082431 - RNA, 23 nt, Human
cgaggccugaccagccuuccaag

SEQ ID NO: 1082432 - RNA, 22 nt, Human
cgccaggaagggcuggagcuuc

SEQ ID NO: 1082433 - RNA, 22 nt, Human
cgccaggaagggcuggagcuuc

SEQ ID NO: 1082434 - RNA, 23 nt, Human
cgccuguaaucccagcacuuugg

SEQ ID NO: 1082435 - RNA, 24 nt, Human
cgccuguaaucccagcacuuuggg

SEQ ID NO: 1082436 - RNA, 24 nt, Human
cgggaggcagaaguugcagugagc

SEQ ID NO: 1082437 - RNA, 22 nt, Human
cgggcgaaucacgacgucaaga

SEQ ID NO: 1082438 - RNA, 20 nt, Human
cuaauacuaaaacuccaagu

SEQ ID NO: 1082439 - RNA, 23 nt, Human
cuaccagggcuuagcgccccucc

SEQ ID NO: 1082440 - RNA, 20 nt, Human
cuacuguuacuguucccugu

SEQ ID NO: 1082441 - RNA, 23 nt, Human
cuagugcaggagaccagggugug

SEQ ID NO: 1082442 - RNA, 22 nt, Human
cucacgccuguaaucccagcac

SEQ ID NO: 1082443 - RNA, 24 nt, Human
cucacgccuguaaucccagcacuu

SEQ ID NO: 1082444 - RNA, 22 nt, Human
cucacuggauauggucaucaca

SEQ ID NO: 1082445 - RNA, 22 nt, Human
cuccaggcucaccaucuaugcc

SEQ ID NO: 1082446 - RNA, 22 nt, Human
cuccagucucaucaucuauguc

SEQ ID NO: 1082447 - RNA, 21 nt, Human
cucccccaggcugggccucag

SEQ ID NO: 1082448 - RNA, 22 nt, Human
cucccgucucaccaucuaugcc

SEQ ID NO: 1082449 - RNA, 22 nt, Human
cuccgggcucaccaccuaugcc

SEQ ID NO: 1082450 - RNA, 22 nt, Human
cuccggggucaccaucuauacc

SEQ ID NO: 1082451 - RNA, 22 nt, Human
cuccuggguggaagagcucaca

SEQ ID NO: 1082452 - RNA, 21 nt, Human
cugauggacacuggcccagga

SEQ ID NO: 1082453 - RNA, 20 nt, Human
cugcgcuauguugggcugaa

SEQ ID NO: 1082454 - RNA, 19 nt, Human
cugggugugucagcugugc

SEQ ID NO: 1082455 - RNA, 21 nt, Human
cuguagucccagcuacuuggg

SEQ ID NO: 1082456 - RNA, 21 nt, Human
cugugggcccaacacaagucu

SEQ ID NO: 1082457 - RNA, 21 nt, Human
cugugggcccaacacgagucu

SEQ ID NO: 1082458 - RNA, 23 nt, Human
cuguggggguccaacacaagucu

SEQ ID NO: 1082459 - RNA, 21 nt, Human
cuucagggucaccaucuaugc

SEQ ID NO: 1082460 - RNA, 20 nt, Human
cuucccgcacaugcauccag

SEQ ID NO: 1082461 - RNA, 19 nt, Human
cuucucuuuucccugaagu

SEQ ID NO: 1082462 - RNA, 21 nt, Human
cuuuuggccacgugcuccauc

SEQ ID NO: 1082463 - RNA, 19 nt, Human
gaaaagcaagcccaacaga

SEQ ID NO: 1082464 - RNA, 21 nt, Human
gaacaccuguaucaauaaacc

SEQ ID NO: 1082465 - RNA, 21 nt, Human
gaacaugugaccacccuccau

SEQ ID NO: 1082466 - RNA, 25 nt, Human
gaacccaccaauuccggacacacug

SEQ ID NO: 1082467 - RNA, 19 nt, Human
gaaccgcuuggcagaagag

SEQ ID NO: 1082468 - RNA, 18 nt, Human
gaagggcuggagcuucag

SEQ ID NO: 1082469 - RNA, 18 nt, Human
gaagggcuggagcuucag

SEQ ID NO: 1082470 - RNA, 18 nt, Human
gaagggcuggagcuucag

SEQ ID NO: 1082471 - RNA, 21 nt, Human
gaccagggcgccaggaagggc

SEQ ID NO: 1082472 - RNA, 21 nt, Human
gacuggggcaccaggaaaggc

SEQ ID NO: 1082473 - RNA, 22 nt, Human
gagaacagggacucaggaagga

SEQ ID NO: 1082474 - RNA, 23 nt, Human
gagaaucguuugaacccgggagg

SEQ ID NO: 1082475 - RNA, 23 nt, Human
gagcugcgcuauguugggcugaa

SEQ ID NO: 1082476 - RNA, 22 nt, Human
gaggacccccuuggcagaagag

SEQ ID NO: 1082477 - RNA, 23 nt, Human
gaggguccaaacuccagagcacu

SEQ ID NO: 1082478 - RNA, 21 nt, Human
gcacugggggcugggugccua

SEQ ID NO: 1082479 - RNA, 22 nt, Human
gcagaucauaugccaaaaguuc

SEQ ID NO: 1082480 - RNA, 24 nt, Human
gccaacguggugaaacccccucuc

SEQ ID NO: 1082481 - RNA, 18 nt, Human
gccacgugcuccaucuua

SEQ ID NO: 1082482 - RNA, 22 nt, Human
gccacuggcccaggaacagcag

SEQ ID NO: 1082483 - RNA, 22 nt, Human
gccagguggaccuccuaggugg

SEQ ID NO: 1082484 - RNA, 31 nt, Human
gcccaacacaagucuuccucccgucucaccc

SEQ ID NO: 1082485 - RNA, 25 nt, Human
gccugagcuucagcgccucaggggc

SEQ ID NO: 1082486 - RNA, 22 nt, Human
gccugggcaguccucgaggccu

SEQ ID NO: 1082487 - RNA, 18 nt, Human
gcugacguacacuggccu

SEQ ID NO: 1082488 - RNA, 22 nt, Human
gcugauggacacuggcccagga

SEQ ID NO: 1082489 - RNA, 22 nt, Human
gcugauggacacuggcccagga

SEQ ID NO: 1082490 - RNA, 21 nt, Human
gcuucagcacaccaugggcug

SEQ ID NO: 1082491 - RNA, 23 nt, Human
ggccugaccagcccgcugaguuu

SEQ ID NO: 1082492 - RNA, 23 nt, Human
ggccugaccagccuuccaaguuu

SEQ ID NO: 1082493 - RNA, 23 nt, Human
ggccugggcaguccucgaggccu

SEQ ID NO: 1082494 - RNA, 18 nt, Human
ggccuggggccugugggc

SEQ ID NO: 1082495 - RNA, 18 nt, Human
ggccuggggccugugggc

SEQ ID NO: 1082496 - RNA, 18 nt, Human
ggccuggggccugugggg

SEQ ID NO: 1082497 - RNA, 19 nt, Human
ggccuggggccuguggggg

SEQ ID NO: 1082498 - RNA, 20 nt, Human
ggcgagaacagggacucagg

SEQ ID NO: 1082499 - RNA, 24 nt, Human
gggaccacuugggccgaagagcuc

SEQ ID NO: 1082500 - RNA, 24 nt, Human
gggcaccaggaaaggcuggagcuu

SEQ ID NO: 1082501 - RNA, 18 nt, Human
gggcugagcaccuggcug

SEQ ID NO: 1082502 - RNA, 21 nt, Human
ggguccaaacuccagagcacu

SEQ ID NO: 1082503 - RNA, 22 nt, Human
gguugcagggacagaggaucag

SEQ ID NO: 1082504 - RNA, 21 nt, Human
guccaaaauucagaauucgau

SEQ ID NO: 1082505 - RNA, 24 nt, Human
gucuggaccaccaucaccuuugca

SEQ ID NO: 1082506 - RNA, 25 nt, Human
gugaaucuccaaaacuaggccacaa

SEQ ID NO: 1082507 - RNA, 19 nt, Human
gugggcccaauggaagucu

SEQ ID NO: 1082508 - RNA, 23 nt, Human
guuuucuuccuccacagucuuuu

SEQ ID NO: 1082509 - RNA, 19 nt, Human
uaaaguggacuggaugcca

SEQ ID NO: 1082510 - RNA, 18 nt, Human
uaaaugguccuacgucca

SEQ ID NO: 1082511 - RNA, 24 nt, Human
uaauguggaagcugcauugacuuu

SEQ ID NO: 1082512 - RNA, 23 nt, Human
uaccagggcuuagcgccccucca

SEQ ID NO: 1082513 - RNA, 19 nt, Human
uacguuuccuucagauaua

SEQ ID NO: 1082514 - RNA, 22 nt, Human
uagagugcagagacagguugga

SEQ ID NO: 1082515 - RNA, 21 nt, Human
uagcaccaggcugauggacac

SEQ ID NO: 1082516 - RNA, 21 nt, Human
uauugugguaacggacaggaa

SEQ ID NO: 1082517 - RNA, 24 nt, Human
ucacgacgucaagagaucgagacc

SEQ ID NO: 1082518 - RNA, 19 nt, Human
ucacugcagcaugccugug

SEQ ID NO: 1082519 - RNA, 23 nt, Human
ucagagaauuuuagaggcauuug

SEQ ID NO: 1082520 - RNA, 21 nt, Human
ucaggacaauauaagguucuc

SEQ ID NO: 1082521 - RNA, 23 nt, Human
ucagggcaccaggaagggcugga

SEQ ID NO: 1082522 - RNA, 23 nt, Human
ucagugcaagagaccagggaacc

SEQ ID NO: 1082523 - RNA, 18 nt, Human
ucagugcaccagggacug

SEQ ID NO: 1082524 - RNA, 21 nt, Human
ucagugcaggagccgagggca

SEQ ID NO: 1082525 - RNA, 19 nt, Human
ucaguuucucccugaacaa

SEQ ID NO: 1082526 - RNA, 21 nt, Human
uccaaguuauuuucuucagug

SEQ ID NO: 1082527 - RNA, 19 nt, Human
uccagacucaccaucucau

SEQ ID NO: 1082528 - RNA, 21 nt, Human
uccaggcucaccaccuauguu

SEQ ID NO: 1082529 - RNA, 23 nt, Human
uccaggcucaccaucuaugccgc

SEQ ID NO: 1082530 - RNA, 21 nt, Human
uccaggcucaccaucuauguu

SEQ ID NO: 1082531 - RNA, 25 nt, Human
ucccagguccaaaauacaguggccc

SEQ ID NO: 1082532 - RNA, 23 nt, Human
ucccugaaguuuccuugaaguug

SEQ ID NO: 1082533 - RNA, 25 nt, Human
ucccugaaguuuccuugaaguuguu

SEQ ID NO: 1082534 - RNA, 19 nt, Human
uccggacacacugggacca

SEQ ID NO: 1082535 - RNA, 18 nt, Human
uccuaggugaaagagcuc

SEQ ID NO: 1082536 - RNA, 23 nt, Human
uccuagguggaaaaucccagcuc

SEQ ID NO: 1082537 - RNA, 18 nt, Human
uccuggguggcagagcuc

SEQ ID NO: 1082538 - RNA, 18 nt, Human
ucguuugaacccgggagg

SEQ ID NO: 1082539 - RNA, 23 nt, Human
ucuauacccaucaauuccagggg

SEQ ID NO: 1082540 - RNA, 25 nt, Human
ucucuacuaaaaauacaaaaaaauu

SEQ ID NO: 1082541 - RNA, 18 nt, Human
ucugcaccaaacuguuuu

SEQ ID NO: 1082542 - RNA, 20 nt, Human
ucuggaaccucaggaugaug

SEQ ID NO: 1082543 - RNA, 21 nt, Human
ucuguagucccagcuacuugg

SEQ ID NO: 1082544 - RNA, 19 nt, Human
ucuuucuucagggucacca

SEQ ID NO: 1082545 - RNA, 19 nt, Human
ugaaagaagcagaaagagg

SEQ ID NO: 1082546 - RNA, 22 nt, Human
ugaaagaagcagaaagaggaaa

SEQ ID NO: 1082547 - RNA, 22 nt, Human
ugaaagacaaaggcgagaacag

SEQ ID NO: 1082548 - RNA, 19 nt, Human
ugaaagagcucacugaaag

SEQ ID NO: 1082549 - RNA, 19 nt, Human
ugaaaguucacaggagacc

SEQ ID NO: 1082550 - RNA, 22 nt, Human
ugaaguggaggaucagauucca

SEQ ID NO: 1082551 - RNA, 22 nt, Human
ugacaacaccagagggugcucu

SEQ ID NO: 1082552 - RNA, 19 nt, Human
ugacauacaagucagagaa

SEQ ID NO: 1082553 - RNA, 20 nt, Human
ugaccuaccaaugacagucu

SEQ ID NO: 1082554 - RNA, 22 nt, Human
ugaccuaccaaugacagucuuc

SEQ ID NO: 1082555 - RNA, 18 nt, Human
ugagaccaagaacccacc

SEQ ID NO: 1082556 - RNA, 19 nt, Human
ugagaccaagaacccacca

SEQ ID NO: 1082557 - RNA, 24 nt, Human
ugaggcgggcgaaucacgacguca

SEQ ID NO: 1082558 - RNA, 24 nt, Human
ugagguaggagaaucguuugaacc

SEQ ID NO: 1082559 - RNA, 22 nt, Human
ugaugaaagaagcagaaagagg

SEQ ID NO: 1082560 - RNA, 22 nt, Human
ugauggacacuggcccggggcc

SEQ ID NO: 1082561 - RNA, 22 nt, Human
ugauggacacuggccuggggcc

SEQ ID NO: 1082562 - RNA, 22 nt, Human
ugcaccagagaguaccaguaac

SEQ ID NO: 1082563 - RNA, 21 nt, Human
ugcagagacagguugggccac

SEQ ID NO: 1082564 - RNA, 22 nt, Human
ugccaggaaaggcuugagcuuc

SEQ ID NO: 1082565 - RNA, 22 nt, Human
ugccaggaaaggcuugagcuuc

SEQ ID NO: 1082566 - RNA, 22 nt, Human
ugccaggaagggucagaguuuc

SEQ ID NO: 1082567 - RNA, 22 nt, Human
ugccaggaggacccccuuggca

SEQ ID NO: 1082568 - RNA, 22 nt, Human
ugccagggaggguccaaacucc

SEQ ID NO: 1082569 - RNA, 21 nt, Human
ugccagguggaccuccuaggu

SEQ ID NO: 1082570 - RNA, 18 nt, Human
ugcccuucagagccacca

SEQ ID NO: 1082571 - RNA, 19 nt, Human
ugcccuucagagccaccag

SEQ ID NO: 1082572 - RNA, 19 nt, Human
ugccgggaccaccaucacc

SEQ ID NO: 1082573 - RNA, 25 nt, Human
uggaaaagcucacuaugccagucaa

SEQ ID NO: 1082574 - RNA, 24 nt, Human
uggaagucuuccucaagucucacc

SEQ ID NO: 1082575 - RNA, 19 nt, Human
uggaauccaugaagaacac

SEQ ID NO: 1082576 - RNA, 20 nt, Human
uggacacuggcccggggccu

SEQ ID NO: 1082577 - RNA, 19 nt, Human
uggagcaccgacaccaagc

SEQ ID NO: 1082578 - RNA, 21 nt, Human
uggagcaccgacaccaagccc

SEQ ID NO: 1082579 - RNA, 19 nt, Human
uggcacaucucuuggcagc

SEQ ID NO: 1082580 - RNA, 24 nt, Human
uggccaacguggugaaacccccuc

SEQ ID NO: 1082581 - RNA, 22 nt, Human
uggcccaggaaaagcaagccca

SEQ ID NO: 1082582 - RNA, 24 nt, Human
uggcccaggaaaagcaagcccaac

SEQ ID NO: 1082583 - RNA, 27 nt, Human
uggcccaggaaaagcgaggccgacagg

SEQ ID NO: 1082584 - RNA, 23 nt, Human
uggcccaggaaaagugggcccaa

SEQ ID NO: 1082585 - RNA, 21 nt, Human
uggcccaggaacagcaggccc

SEQ ID NO: 1082586 - RNA, 23 nt, Human
uggccugggcaguccucgaggcc

SEQ ID NO: 1082587 - RNA, 23 nt, Human
uggccugggcaguccucgaggcc

SEQ ID NO: 1082588 - RNA, 18 nt, Human
uggccuggggccuguggg

SEQ ID NO: 1082589 - RNA, 18 nt, Human
uggccuggggccuguggg

SEQ ID NO: 1082590 - RNA, 18 nt, Human
uggccuggggccuguggg

SEQ ID NO: 1082591 - RNA, 24 nt, Human
uggcucacgccuguaaucccagca

SEQ ID NO: 1082592 - RNA, 23 nt, Human
uggcucaggaaaagcaggcccag

SEQ ID NO: 1082593 - RNA, 19 nt, Human
ugggaggcugaggcgggcg

SEQ ID NO: 1082594 - RNA, 24 nt, Human
ugggaggcugaggcgggcgaauca

SEQ ID NO: 1082595 - RNA, 19 nt, Human
ugggaggcugagguaggag

SEQ ID NO: 1082596 - RNA, 23 nt, Human
ugggaggcugagguaggagaauc

SEQ ID NO: 1082597 - RNA, 18 nt, Human
ugggcacuggcucaggaa

SEQ ID NO: 1082598 - RNA, 19 nt, Human
uggggacccugggauccca

SEQ ID NO: 1082599 - RNA, 20 nt, Human
uggggacccugggaucccag

SEQ ID NO: 1082600 - RNA, 19 nt, Human
uggggcaccaggaaaggcu

SEQ ID NO: 1082601 - RNA, 22 nt, Human
uggggcaccaggaaaggcugga

SEQ ID NO: 1082602 - RNA, 18 nt, Human
uggggccugugggcccaa

SEQ ID NO: 1082603 - RNA, 18 nt, Human
uggggccugugggcccaa

SEQ ID NO: 1082604 - RNA, 18 nt, Human
ugggugaugggcacuggc

SEQ ID NO: 1082605 - RNA, 21 nt, Human
ugggugccagcucacgcuugc

SEQ ID NO: 1082606 - RNA, 21 nt, Human
ugggugcugucaacuguccca

SEQ ID NO: 1082607 - RNA, 18 nt, Human
uggguggcagagcucacu

SEQ ID NO: 1082608 - RNA, 24 nt, Human
ugguggcgugcaucuguaguccca

SEQ ID NO: 1082609 - RNA, 18 nt, Human
uguauuaguuuuuauuug

SEQ ID NO: 1082610 - RNA, 22 nt, Human
ugugaggaagggccugagcuuc

SEQ ID NO: 1082611 - RNA, 19 nt, Human
ugugaggaagggccugagg

SEQ ID NO: 1082612 - RNA, 21 nt, Human
uguuaacacuaauuacaaagu

SEQ ID NO: 1082613 - RNA, 25 nt, Human
uguuacuguucccuguucguuacug

SEQ ID NO: 1082614 - RNA, 26 nt, Human
uguucauaucuaauuacaguguuuuu

SEQ ID NO: 1082615 - RNA, 20 nt, Human
uuaggaaaaauguauuaagu

SEQ ID NO: 1082616 - RNA, 18 nt, Human
uucacaggagaccaaaca

SEQ ID NO: 1082617 - RNA, 24 nt, Human
uuccucaagucucaccaucagagc

SEQ ID NO: 1082618 - RNA, 25 nt, Human
uugaagucagugagaccaagaaccc

SEQ ID NO: 1082619 - RNA, 22 nt, Human
uugcagugagccgaaauggugc

SEQ ID NO: 1082620 - RNA, 23 nt, Human
uugcagugagccgaaauggugcc

SEQ ID NO: 1082621 - RNA, 25 nt, Human
uugggaggcugaggcgggcgaauca

SEQ ID NO: 1082622 - RNA, 24 nt, Human
uugggaggcugagguaggagaauc

SEQ ID NO: 1082623 - RNA, 19 nt, Human
uugggcccaacgcaagucu

SEQ ID NO: 1082624 - RNA, 19 nt, Human
uugggcccaaugcaagucu

SEQ ID NO: 1082625 - RNA, 21 nt, Human
uuguuuuuucuucugugacau

SEQ ID NO: 1082626 - RNA, 21 nt, Human
uuuugaaugacuaccagggcu

SEQ ID NO: 1082627 - RNA, 25 nt, Human
uuuuuguuuuuguuuuugcauuguu

SEQ ID NO: 1082628 - RNA, 19 nt, Human
aaaacauaauucugccucu

SEQ ID NO: 1082629 - RNA, 23 nt, Human
aaacaccaagaggccaaacucuc

SEQ ID NO: 1082630 - RNA, 20 nt, Human
aaacauucuaaacaaaauac

SEQ ID NO: 1082631 - RNA, 22 nt, Human
aaagacaucccacagucaugga

SEQ ID NO: 1082632 - RNA, 19 nt, Human
aacaagaaaaagaugucug

SEQ ID NO: 1082633 - RNA, 22 nt, Human
aacacugacaagauaacagaaa

SEQ ID NO: 1082634 - RNA, 23 nt, Human
aacagcuucaacauuauauggca

SEQ ID NO: 1082635 - RNA, 19 nt, Human
aacaugcccggcauaauua

SEQ ID NO: 1082636 - RNA, 21 nt, Human
aaccaaauccagcagcauaga

SEQ ID NO: 1082637 - RNA, 19 nt, Human
aacuaaaucccuaucaaga

SEQ ID NO: 1082638 - RNA, 21 nt, Human
aacuaaaucccuaucaagauc

SEQ ID NO: 1082639 - RNA, 19 nt, Human
aagaagcauuuaacaaaac

SEQ ID NO: 1082640 - RNA, 20 nt, Human
aagaaucccagugacuccuc

SEQ ID NO: 1082641 - RNA, 18 nt, Human
aagacugagaauccagaa

SEQ ID NO: 1082642 - RNA, 22 nt, Human
aagagcacacauuucuucacga

SEQ ID NO: 1082643 - RNA, 24 nt, Human
aagaucccagcuguuuugcaggaa

SEQ ID NO: 1082644 - RNA, 23 nt, Human
aagcaaaugcaaagacaucccac

SEQ ID NO: 1082645 - RNA, 19 nt, Human
aagcagguaaagggaucaa

SEQ ID NO: 1082646 - RNA, 20 nt, Human
aagcagguaaagggaucaag

SEQ ID NO: 1082647 - RNA, 20 nt, Human
aagcuacagccaucaagaca

SEQ ID NO: 1082648 - RNA, 19 nt, Human
aaguaguugucucaggaaa

SEQ ID NO: 1082649 - RNA, 18 nt, Human
acaaaacaacaugaaaau

SEQ ID NO: 1082650 - RNA, 22 nt, Human
acaagauaacagaaagauggag

SEQ ID NO: 1082651 - RNA, 21 nt, Human
acacugaaaucucuaaaacau

SEQ ID NO: 1082652 - RNA, 28 nt, Human
accauaauaauaaaacuugagaacugaa

SEQ ID NO: 1082653 - RNA, 23 nt, Human
acccuaagacacucuguaagaau

SEQ ID NO: 1082654 - RNA, 22 nt, Human
acccugagagccuuuucagagu

SEQ ID NO: 1082655 - RNA, 20 nt, Human
accucuccucccucaacagc

SEQ ID NO: 1082656 - RNA, 19 nt, Human
acgacauuucuuccucuga

SEQ ID NO: 1082657 - RNA, 21 nt, Human
acucucauccccaaacuggac

SEQ ID NO: 1082658 - RNA, 26 nt, Human
agaaaaaaaauuacaguaagcaggua

SEQ ID NO: 1082659 - RNA, 27 nt, Human
agaaaaaaaauuacaguaagcagguaa

SEQ ID NO: 1082660 - RNA, 22 nt, Human
agaagaaaaaaagauguaagaa

SEQ ID NO: 1082661 - RNA, 20 nt, Human
agacuggaaaggaagaaguc

SEQ ID NO: 1082662 - RNA, 24 nt, Human
agagaugcaagaugaagaauuuug

SEQ ID NO: 1082663 - RNA, 24 nt, Human
agagggagaugagagucagggagu

SEQ ID NO: 1082664 - RNA, 20 nt, Human
agcuuccaaccucuccuccc

SEQ ID NO: 1082665 - RNA, 22 nt, Human
aggaaaguguguaacacaaggc

SEQ ID NO: 1082666 - RNA, 22 nt, Human
aggaaggaaugaugggagaggu

SEQ ID NO: 1082667 - RNA, 24 nt, Human
aggcaagaaaaugaaauaauagga

SEQ ID NO: 1082668 - RNA, 19 nt, Human
agugagggagcaaauggaa

SEQ ID NO: 1082669 - RNA, 20 nt, Human
aguugucucaggaaaccagg

SEQ ID NO: 1082670 - RNA, 19 nt, Human
auaacaugugaaaggcaaa

SEQ ID NO: 1082671 - RNA, 20 nt, Human
auauaauaugaaaacuacag

SEQ ID NO: 1082672 - RNA, 19 nt, Human
aucaagacuacacagggac

SEQ ID NO: 1082673 - RNA, 24 nt, Human
augcaaaaaauggaugaaauagga

SEQ ID NO: 1082674 - RNA, 23 nt, Human
augcagcgaggaaaguguguaac

SEQ ID NO: 1082675 - RNA, 19 nt, Human
augcaugaucucauaugca

SEQ ID NO: 1082676 - RNA, 24 nt, Human
augcugccccauuacaaccaucug

SEQ ID NO: 1082677 - RNA, 25 nt, Human
auggcucauagcccaucucuuucag

SEQ ID NO: 1082678 - RNA, 18 nt, Human
caaaacccacagccccuc

SEQ ID NO: 1082679 - RNA, 20 nt, Human
caaacccacagcuagcuaac

SEQ ID NO: 1082680 - RNA, 18 nt, Human
caacaaaucaucaguuuc

SEQ ID NO: 1082681 - RNA, 23 nt, Human
caacacugacaagauaacagaaa

SEQ ID NO: 1082682 - RNA, 26 nt, Human
caacagcuucaacauuauauggcacu

SEQ ID NO: 1082683 - RNA, 19 nt, Human
caacaugaaaaucuugaua

SEQ ID NO: 1082684 - RNA, 21 nt, Human
caacuaagaaauguaccccau

SEQ ID NO: 1082685 - RNA, 21 nt, Human
caacuugaagcaaacccacag

SEQ ID NO: 1082686 - RNA, 18 nt, Human
caagaucccagcuguuuu

SEQ ID NO: 1082687 - RNA, 20 nt, Human
caccuucuuucccauucaag

SEQ ID NO: 1082688 - RNA, 21 nt, Human
cagaagaagcauuuaacaaaa

SEQ ID NO: 1082689 - RNA, 23 nt, Human
cagaagaagcauuuaacaaaacc

SEQ ID NO: 1082690 - RNA, 22 nt, Human
cagcuauucugugcaaccgacg

SEQ ID NO: 1082691 - RNA, 22 nt, Human
cauagcccaucucuuucaguga

SEQ ID NO: 1082692 - RNA, 21 nt, Human
caucaguuucucuagguauua

SEQ ID NO: 1082693 - RNA, 23 nt, Human
cauuucuuccucugacaguuugu

SEQ ID NO: 1082694 - RNA, 20 nt, Human
ccacagccccuccuuuuuuu

SEQ ID NO: 1082695 - RNA, 20 nt, Human
ccacaggccaguucagacac

SEQ ID NO: 1082696 - RNA, 19 nt, Human
ccagaaaaguuuggcugca

SEQ ID NO: 1082697 - RNA, 19 nt, Human
ccaggaaugcaaaguuaau

SEQ ID NO: 1082698 - RNA, 21 nt, Human
ccagugaugaauacaaaaaua

SEQ ID NO: 1082699 - RNA, 23 nt, Human
ccagugaugaauacaagguaccc

SEQ ID NO: 1082700 - RNA, 22 nt, Human
cccuauacaagcaagcaucccc

SEQ ID NO: 1082701 - RNA, 20 nt, Human
cccuccuuuuuuuuuuuuuc

SEQ ID NO: 1082702 - RNA, 23 nt, Human
ccuaagacacucuguaagaaucc

SEQ ID NO: 1082703 - RNA, 22 nt, Human
ccucccuccaccuucuuuccca

SEQ ID NO: 1082704 - RNA, 23 nt, Human
cuagguauuaaaaagccuacacu

SEQ ID NO: 1082705 - RNA, 22 nt, Human
cuauacaagcaagcauccccaa

SEQ ID NO: 1082706 - RNA, 24 nt, Human
cucccuccaccuucuuucccauuc

SEQ ID NO: 1082707 - RNA, 21 nt, Human
cuccucccucaacagcuucaa

SEQ ID NO: 1082708 - RNA, 22 nt, Human
cucucauccccaaacuggacag

SEQ ID NO: 1082709 - RNA, 21 nt, Human
cucuguacuuguaaaacccuc

SEQ ID NO: 1082710 - RNA, 19 nt, Human
cugaggucuuuggguggga

SEQ ID NO: 1082711 - RNA, 18 nt, Human
cuggauucguuuuucugg

SEQ ID NO: 1082712 - RNA, 19 nt, Human
cuuagacacuggcggaaag

SEQ ID NO: 1082713 - RNA, 22 nt, Human
cuuguaaaacccucuacccucc

SEQ ID NO: 1082714 - RNA, 25 nt, Human
cuuguaaaacccucuacccucccca

SEQ ID NO: 1082715 - RNA, 18 nt, Human
cuuucuggaggggaggga

SEQ ID NO: 1082716 - RNA, 24 nt, Human
gaaaccacagcugagauucucuaa

SEQ ID NO: 1082717 - RNA, 22 nt, Human
gaagagggagaugagagucagg

SEQ ID NO: 1082718 - RNA, 23 nt, Human
gaagaguauuugagaaauaugac

SEQ ID NO: 1082719 - RNA, 23 nt, Human
gaagcaaacccacagcuagcuaa

SEQ ID NO: 1082720 - RNA, 21 nt, Human
gaaggaaggaaugaugggaga

SEQ ID NO: 1082721 - RNA, 21 nt, Human
gaauuuacuuacacuccaggc

SEQ ID NO: 1082722 - RNA, 18 nt, Human
gacccaaaacagacaaaa

SEQ ID NO: 1082723 - RNA, 22 nt, Human
gagauucucuaagcuggcagcu

SEQ ID NO: 1082724 - RNA, 23 nt, Human
gaggaaguauccacuguagucaa

SEQ ID NO: 1082725 - RNA, 21 nt, Human
gauccugccuuacccagucac

SEQ ID NO: 1082726 - RNA, 19 nt, Human
gaugggagagguuuagggg

SEQ ID NO: 1082727 - RNA, 22 nt, Human
gcucauuugcuggagcugccaa

SEQ ID NO: 1082728 - RNA, 23 nt, Human
gcucauuugcuggagcugccaag

SEQ ID NO: 1082729 - RNA, 19 nt, Human
gcuuccaaccucuccuccc

SEQ ID NO: 1082730 - RNA, 21 nt, Human
ggaaacauacaucuugacucc

SEQ ID NO: 1082731 - RNA, 21 nt, Human
ggacccaaaacagacaaaaug

SEQ ID NO: 1082732 - RNA, 18 nt, Human
ggaggggagaaaagacuu

SEQ ID NO: 1082733 - RNA, 19 nt, Human
ggauuggaagagggagaug

SEQ ID NO: 1082734 - RNA, 20 nt, Human
guaaaacccucuacccuccc

SEQ ID NO: 1082735 - RNA, 20 nt, Human
uaaaaaauaccucaguaggu

SEQ ID NO: 1082736 - RNA, 28 nt, Human
uaaaaaauaccucaguagguuuaagaac

SEQ ID NO: 1082737 - RNA, 18 nt, Human
uaaaaagaaacaaagaau

SEQ ID NO: 1082738 - RNA, 23 nt, Human
uaaaacccucuacccuccccagg

SEQ ID NO: 1082739 - RNA, 24 nt, Human
uaaaaggagacaagugagggagca

SEQ ID NO: 1082740 - RNA, 25 nt, Human
uaaaaguauuucuguucacagaugc

SEQ ID NO: 1082741 - RNA, 25 nt, Human
uaaaggacaaaacaacaugaaaaag

SEQ ID NO: 1082742 - RNA, 23 nt, Human
uaacugccacaggccaguucaga

SEQ ID NO: 1082743 - RNA, 22 nt, Human
uaagaacagggaaagcucccaa

SEQ ID NO: 1082744 - RNA, 20 nt, Human
uaagugacaaaaaaagaauu

SEQ ID NO: 1082745 - RNA, 24 nt, Human
uacaacauauuaauaaaggacaaa

SEQ ID NO: 1082746 - RNA, 24 nt, Human
uacaagcaagcauccccaaaagua

SEQ ID NO: 1082747 - RNA, 19 nt, Human
uacacauuaagaagcacag

SEQ ID NO: 1082748 - RNA, 27 nt, Human
uacacauuaagaagcacaguggaugag

SEQ ID NO: 1082749 - RNA, 19 nt, Human
uaccauaauaauaaaacuu

SEQ ID NO: 1082750 - RNA, 25 nt, Human
uaccauaauaauaaaacuugagaac

SEQ ID NO: 1082751 - RNA, 27 nt, Human
uagaaaaaaauuaaagacgucaagacu

SEQ ID NO: 1082752 - RNA, 20 nt, Human
uagaugcaaacauucuaaac

SEQ ID NO: 1082753 - RNA, 22 nt, Human
uagcuuuucuggucccuuuuug

SEQ ID NO: 1082754 - RNA, 21 nt, Human
uauaaagaaggaaggaaugau

SEQ ID NO: 1082755 - RNA, 23 nt, Human
uaucaugaauuuacuuacacucc

SEQ ID NO: 1082756 - RNA, 22 nt, Human
uaucuggucaugaagaguauuu

SEQ ID NO: 1082757 - RNA, 23 nt, Human
uauuaaaaagccuacacuuuuga

SEQ ID NO: 1082758 - RNA, 21 nt, Human
uauuacuuugagccagggugg

SEQ ID NO: 1082759 - RNA, 20 nt, Human
ucacuguuaauuauuacuuu

SEQ ID NO: 1082760 - RNA, 20 nt, Human
ucagaggaucaggaccugua

SEQ ID NO: 1082761 - RNA, 21 nt, Human
ucagggagugaaauuaggcag

SEQ ID NO: 1082762 - RNA, 25 nt, Human
ucaguaaacuagguuuaauaaaaga

SEQ ID NO: 1082763 - RNA, 22 nt, Human
uccaaguaguucacuuaaaaaa

SEQ ID NO: 1082764 - RNA, 23 nt, Human
uccaccuucuuucccauucaaga

SEQ ID NO: 1082765 - RNA, 23 nt, Human
uccaccuucuuucccauucaaga

SEQ ID NO: 1082766 - RNA, 29 nt, Human
uccaccuucuuucccauucaagagcugac

SEQ ID NO: 1082767 - RNA, 20 nt, Human
ucccagugacuccucacugu

SEQ ID NO: 1082768 - RNA, 18 nt, Human
ucccuccaccuucuuucc

SEQ ID NO: 1082769 - RNA, 24 nt, Human
uccuuuuuuucccuccagagcuuc

SEQ ID NO: 1082770 - RNA, 19 nt, Human
ucuagacuggaaaggaaga

SEQ ID NO: 1082771 - RNA, 19 nt, Human
ucuauaauaauaaaagguu

SEQ ID NO: 1082772 - RNA, 18 nt, Human
ucuaucuaucuaucaucu

SEQ ID NO: 1082773 - RNA, 22 nt, Human
ucucagaauggucauguuuuua

SEQ ID NO: 1082774 - RNA, 22 nt, Human
ucucuaaaauuuuaaggguagg

SEQ ID NO: 1082775 - RNA, 23 nt, Human
ucucuaagcuggcagcuuccaac

SEQ ID NO: 1082776 - RNA, 20 nt, Human
ucuggauucguuuuucuggg

SEQ ID NO: 1082777 - RNA, 25 nt, Human
ugaaaaggcagcaaaaguaagagga

SEQ ID NO: 1082778 - RNA, 19 nt, Human
ugaaaggcaaaaugguuug

SEQ ID NO: 1082779 - RNA, 23 nt, Human
ugaaaucucuaaaacaucacuga

SEQ ID NO: 1082780 - RNA, 22 nt, Human
ugacaagauaacagaaagaugg

SEQ ID NO: 1082781 - RNA, 19 nt, Human
ugaccagcucauuugcugg

SEQ ID NO: 1082782 - RNA, 23 nt, Human
ugaccagcucauuugcuggagcu

SEQ ID NO: 1082783 - RNA, 21 nt, Human
ugagaaaaauuccucgaaggg

SEQ ID NO: 1082784 - RNA, 19 nt, Human
ugagagauuuugaugauug

SEQ ID NO: 1082785 - RNA, 19 nt, Human
ugaggaaugagagauuuug

SEQ ID NO: 1082786 - RNA, 19 nt, Human
ugagggagcaaauggaagg

SEQ ID NO: 1082787 - RNA, 19 nt, Human
ugagggggcaaucugugga

SEQ ID NO: 1082788 - RNA, 19 nt, Human
ugcaaugcaagggacccaa

SEQ ID NO: 1082789 - RNA, 21 nt, Human
ugcaaugcaagggacccaaaa

SEQ ID NO: 1082790 - RNA, 24 nt, Human
uggaaaccacagcugagauucucu

SEQ ID NO: 1082791 - RNA, 22 nt, Human
uggaaagaguaucaagaggaga

SEQ ID NO: 1082792 - RNA, 22 nt, Human
uggaagagggagaugagaguca

SEQ ID NO: 1082793 - RNA, 21 nt, Human
uggaauacacccugcuggaag

SEQ ID NO: 1082794 - RNA, 22 nt, Human
uggaauucuugagaaaaauucc

SEQ ID NO: 1082795 - RNA, 18 nt, Human
uggaggcacugaaugcag

SEQ ID NO: 1082796 - RNA, 21 nt, Human
uggaugagguacuuuaaauau

SEQ ID NO: 1082797 - RNA, 25 nt, Human
uggcaacacugacaagauaacagaa

SEQ ID NO: 1082798 - RNA, 20 nt, Human
uggcuccaggccggcagucc

SEQ ID NO: 1082799 - RNA, 19 nt, Human
uggggaaaaaaaaaaaaaa

SEQ ID NO: 1082800 - RNA, 21 nt, Human
uggggaaauaauagucuuuuc

SEQ ID NO: 1082801 - RNA, 27 nt, Human
uggguaggaaugcagcgaggaaagugu

SEQ ID NO: 1082802 - RNA, 18 nt, Human
uguucagggacauuccau

SEQ ID NO: 1082803 - RNA, 19 nt, Human
uguucagggacauuccauu

SEQ ID NO: 1082804 - RNA, 23 nt, Human
uguuuugcucuuccuuauuguuc

SEQ ID NO: 1082805 - RNA, 24 nt, Human
uguuuugcucuuccuuauuguuca

SEQ ID NO: 1082806 - RNA, 21 nt, Human
uuaaaaagaaacaaagaaugg

SEQ ID NO: 1082807 - RNA, 24 nt, Human
uuaagaugacuacaguugcacgaa

SEQ ID NO: 1082808 - RNA, 19 nt, Human
uucaagauggcucauagcc

SEQ ID NO: 1082809 - RNA, 22 nt, Human
uuccuuaugaauauagaugcaa

SEQ ID NO: 1082810 - RNA, 21 nt, Human
uuugguaaucaacaaaucauc

SEQ ID NO: 1082811 - RNA, 20 nt, Human
uuuuucaaguuucuuuuuga

SEQ ID NO: 1082812 - RNA, 22 nt, Human
uuuuuuuuuugcaagucugcuc

SEQ ID NO: 1082813 - RNA, 22 nt, Human
aaaaagacaaucucaaagagcu

SEQ ID NO: 1082814 - RNA, 20 nt, Human
aaacaagaagaaaaagaaac

SEQ ID NO: 1082815 - RNA, 22 nt, Human
aaacaagaagaaaaagaaacaa

SEQ ID NO: 1082816 - RNA, 22 nt, Human
aaacagauggccccaacguuuu

SEQ ID NO: 1082817 - RNA, 19 nt, Human
aaaccaguuccaaaccuga

SEQ ID NO: 1082818 - RNA, 22 nt, Human
aaaccaguuccaaaccugacga

SEQ ID NO: 1082819 - RNA, 23 nt, Human
aaaugcuaaaaauugcauuuacu

SEQ ID NO: 1082820 - RNA, 18 nt, Human
aacugcuucuucaaguug

SEQ ID NO: 1082821 - RNA, 18 nt, Human
aagaaaaagaaacaauaa

SEQ ID NO: 1082822 - RNA, 22 nt, Human
aagaaaaagaaacaauaauuua

SEQ ID NO: 1082823 - RNA, 19 nt, Human
aagaaacaagaagaaaaag

SEQ ID NO: 1082824 - RNA, 25 nt, Human
aagaacaccacccucuccucgcugc

SEQ ID NO: 1082825 - RNA, 18 nt, Human
aagaagaaaaagaaacaa

SEQ ID NO: 1082826 - RNA, 22 nt, Human
aagcacauacaguauugcauaa

SEQ ID NO: 1082827 - RNA, 21 nt, Human
aaucauuugauaaaccauuca

SEQ ID NO: 1082828 - RNA, 21 nt, Human
acaagaacaccacccucuccu

SEQ ID NO: 1082829 - RNA, 21 nt, Human
acaagaagaaaaagaaacaau

SEQ ID NO: 1082830 - RNA, 33 nt, Human
acacacaaauacacauacauacacauauguggu

SEQ ID NO: 1082831 - RNA, 25 nt, Human
acacacacacacaaauacacauaca

SEQ ID NO: 1082832 - RNA, 19 nt, Human
acagaaguagacuguaacc

SEQ ID NO: 1082833 - RNA, 21 nt, Human
acauacauacacauauguggc

SEQ ID NO: 1082834 - RNA, 24 nt, Human
acauuccacauggaccaaggcagg

SEQ ID NO: 1082835 - RNA, 20 nt, Human
accaaggcaggcguuccacu

SEQ ID NO: 1082836 - RNA, 19 nt, Human
accagaaacaagaacacca

SEQ ID NO: 1082837 - RNA, 21 nt, Human
acgcaauuucuuucugaaguc

SEQ ID NO: 1082838 - RNA, 18 nt, Human
acucaguggaaagaaaca

SEQ ID NO: 1082839 - RNA, 19 nt, Human
agaacaccacccucuccuc

SEQ ID NO: 1082840 - RNA, 24 nt, Human
agaagaaaaagaaacaauaauuua

SEQ ID NO: 1082841 - RNA, 20 nt, Human
agaagauacccagcacugcc

SEQ ID NO: 1082842 - RNA, 21 nt, Human
agaagauacccagcacugcca

SEQ ID NO: 1082843 - RNA, 19 nt, Human
agaggaucagugcagagcc

SEQ ID NO: 1082844 - RNA, 21 nt, Human
agcccugaaugggaagggguu

SEQ ID NO: 1082845 - RNA, 22 nt, Human
aggagaugacccagagacagaa

SEQ ID NO: 1082846 - RNA, 21 nt, Human
aggcaggcguuccacugggga

SEQ ID NO: 1082847 - RNA, 22 nt, Human
aggcaguugguacuauuuuccc

SEQ ID NO: 1082848 - RNA, 20 nt, Human
auacaggaagcucugacauc

SEQ ID NO: 1082849 - RNA, 21 nt, Human
auagauccauuauaacuucaa

SEQ ID NO: 1082850 - RNA, 25 nt, Human
auauacacacacacacacaaauaca

SEQ ID NO: 1082851 - RNA, 24 nt, Human
augauaagaaaaaaaguuugugcc

SEQ ID NO: 1082852 - RNA, 23 nt, Human
caaaaugcuaaaaauugcauuua

SEQ ID NO: 1082853 - RNA, 21 nt, Human
caacagccugaaaauagcauc

SEQ ID NO: 1082854 - RNA, 27 nt, Human
caagaaacuucccacagcaaguaggga

SEQ ID NO: 1082855 - RNA, 22 nt, Human
caauucuacaacagccugaaaa

SEQ ID NO: 1082856 - RNA, 18 nt, Human
cacacaaauacacauaca

SEQ ID NO: 1082857 - RNA, 21 nt, Human
cacacacaaauacacauacau

SEQ ID NO: 1082858 - RNA, 24 nt, Human
cacauacauacacauauguggcug

SEQ ID NO: 1082859 - RNA, 21 nt, Human
cagaagauacccagcacugcc

SEQ ID NO: 1082860 - RNA, 23 nt, Human
cagaagauacccagcacugccau

SEQ ID NO: 1082861 - RNA, 24 nt, Human
cagcuaugaacuuucuccagauac

SEQ ID NO: 1082862 - RNA, 18 nt, Human
caguacagaugcaaccau

SEQ ID NO: 1082863 - RNA, 25 nt, Human
cauaacuacaagaaacuucccacag

SEQ ID NO: 1082864 - RNA, 19 nt, Human
cauacauacacauaugugg

SEQ ID NO: 1082865 - RNA, 20 nt, Human
cauaugauccacaugcaucc

SEQ ID NO: 1082866 - RNA, 19 nt, Human
ccacccaggacacuaguaa

SEQ ID NO: 1082867 - RNA, 23 nt, Human
ccacccaggacacuaguaacugc

SEQ ID NO: 1082868 - RNA, 21 nt, Human
ccagagacagaagauacccag

SEQ ID NO: 1082869 - RNA, 20 nt, Human
cccucaauuuacaccuuuaa

SEQ ID NO: 1082870 - RNA, 22 nt, Human
cuaauacugcauuuuuaugccu

SEQ ID NO: 1082871 - RNA, 21 nt, Human
gaaaauacaggaagcucugac

SEQ ID NO: 1082872 - RNA, 21 nt, Human
gaaacaagaagaaaaagaaac

SEQ ID NO: 1082873 - RNA, 20 nt, Human
gaaacagauggccccaacgu

SEQ ID NO: 1082874 - RNA, 19 nt, Human
gaaauccuaccauaugccc

SEQ ID NO: 1082875 - RNA, 21 nt, Human
gagacagaagauacccagcac

SEQ ID NO: 1082876 - RNA, 22 nt, Human
gagcuggcaauuauuuugagau

SEQ ID NO: 1082877 - RNA, 18 nt, Human
gagucucucuuucaugga

SEQ ID NO: 1082878 - RNA, 20 nt, Human
ggaaagaaacaagaagaaaa

SEQ ID NO: 1082879 - RNA, 23 nt, Human
ggagcuggcaauuauuuugagau

SEQ ID NO: 1082880 - RNA, 18 nt, Human
gugaaagauaacuuuucu

SEQ ID NO: 1082881 - RNA, 24 nt, Human
uaacuacaaugagagaaacagaug

SEQ ID NO: 1082882 - RNA, 22 nt, Human
uaauuuaauuuuacacacccaa

SEQ ID NO: 1082883 - RNA, 23 nt, Human
uacaacagccugaaaauagcauc

SEQ ID NO: 1082884 - RNA, 26 nt, Human
uacacacacacacacaaauacacaua

SEQ ID NO: 1082885 - RNA, 19 nt, Human
uacacauacauacacauau

SEQ ID NO: 1082886 - RNA, 26 nt, Human
uacauauacacacacacacacaaaua

SEQ ID NO: 1082887 - RNA, 21 nt, Human
uaccaaacuccauggauguuc

SEQ ID NO: 1082888 - RNA, 22 nt, Human
uaccagaaacaagaacaccacc

SEQ ID NO: 1082889 - RNA, 19 nt, Human
uaccauaugcccacauucc

SEQ ID NO: 1082890 - RNA, 19 nt, Human
uaccauaugcccacauucc

SEQ ID NO: 1082891 - RNA, 20 nt, Human
uaccaugaucagaaaauaca

SEQ ID NO: 1082892 - RNA, 26 nt, Human
uacccagcacugccauuuuuaauugc

SEQ ID NO: 1082893 - RNA, 18 nt, Human
uagaggacaggaagguag

SEQ ID NO: 1082894 - RNA, 23 nt, Human
uaguaacugcuucuucaaguuga

SEQ ID NO: 1082895 - RNA, 23 nt, Human
uaucacccaccacauaccaaacu

SEQ ID NO: 1082896 - RNA, 24 nt, Human
uaucacccaccacauaccaaacuc

SEQ ID NO: 1082897 - RNA, 23 nt, Human
ucacccaccacauaccaaacucc

SEQ ID NO: 1082898 - RNA, 19 nt, Human
ucaguacagaugcaaccau

SEQ ID NO: 1082899 - RNA, 22 nt, Human
ucaguacagaugcaaccauauu

SEQ ID NO: 1082900 - RNA, 23 nt, Human
ucaguggaaagaaacaagaagaa

SEQ ID NO: 1082901 - RNA, 20 nt, Human
uccaaaccugacgacgcaau

SEQ ID NO: 1082902 - RNA, 19 nt, Human
ucccuguggcccacccagg

SEQ ID NO: 1082903 - RNA, 23 nt, Human
ucccuguggucuuugccauggcu

SEQ ID NO: 1082904 - RNA, 25 nt, Human
uccuccuauauacuuuaaucucuag

SEQ ID NO: 1082905 - RNA, 21 nt, Human
ucgcugcuuucguggaacuca

SEQ ID NO: 1082906 - RNA, 25 nt, Human
ucuaugccagguauuguaccagaaa

SEQ ID NO: 1082907 - RNA, 19 nt, Human
ucucaaagagcucauaguu

SEQ ID NO: 1082908 - RNA, 22 nt, Human
ucuccagauacgagucucucuu

SEQ ID NO: 1082909 - RNA, 30 nt, Human
ucucuuuaccauuuuaacuugucccugauu

SEQ ID NO: 1082910 - RNA, 19 nt, Human
ucugacaucaggauaugaa

SEQ ID NO: 1082911 - RNA, 23 nt, Human
ugaauccacaaaugugaaaccca

SEQ ID NO: 1082912 - RNA, 23 nt, Human
ugaaugggaagggguugugucaa

SEQ ID NO: 1082913 - RNA, 22 nt, Human
ugacaucaggauaugaaaaaga

SEQ ID NO: 1082914 - RNA, 26 nt, Human
ugagauuauaccgaaguagugcauga

SEQ ID NO: 1082915 - RNA, 25 nt, Human
ugaggcuggcaaugccucuuugccc

SEQ ID NO: 1082916 - RNA, 21 nt, Human
ugaucagaaaauacaggaagc

SEQ ID NO: 1082917 - RNA, 21 nt, Human
uggaaagaaacaagaagaaaa

SEQ ID NO: 1082918 - RNA, 23 nt, Human
uggaugaauccacaaaugugaaa

SEQ ID NO: 1082919 - RNA, 25 nt, Human
ugguguugacagccagugugaggcu

SEQ ID NO: 1082920 - RNA, 23 nt, Human
uguaccagaaacaagaacaccac

SEQ ID NO: 1082921 - RNA, 21 nt, Human
uguggucuuugccauggcuag

SEQ ID NO: 1082922 - RNA, 20 nt, Human
uguuagugaugaaucugaca

SEQ ID NO: 1082923 - RNA, 24 nt, Human
uguuagugaugaaucugacauuuc

SEQ ID NO: 1082924 - RNA, 20 nt, Human
uucaaguugaguugcuaaua

SEQ ID NO: 1082925 - RNA, 21 nt, Human
uugauaaaccauucaaaaugc

SEQ ID NO: 1082926 - RNA, 24 nt, Human
uugcauaugauccacaugcauccu

SEQ ID NO: 1082927 - RNA, 19 nt, Human
uuuaucaaggaugaagaaa

SEQ ID NO: 1082928 - RNA, 24 nt, Human
uuucuccagauacgagucucucuu

SEQ ID NO: 1082929 - RNA, 22 nt, Human
aacaaaccccauccugcagaac

SEQ ID NO: 1082930 - RNA, 18 nt, Human
aaucaguuuuacccucuc

SEQ ID NO: 1082931 - RNA, 21 nt, Human
acaaaccccauccugcagaac

SEQ ID NO: 1082932 - RNA, 21 nt, Human
guguguuguauuuauuuuuaa

SEQ ID NO: 1082933 - RNA, 19 nt, Human
uaacaaaccccauccugca

SEQ ID NO: 1082934 - RNA, 23 nt, Human
uaacaaaccccauccugcagaac

SEQ ID NO: 1082935 - RNA, 24 nt, Human
uaucugaaaaaucaucauagaaaa

SEQ ID NO: 1082936 - RNA, 18 nt, Human
uccgaguaucguaaucag

SEQ ID NO: 1082937 - RNA, 19 nt, Human
aaaaacuggagaaaggaca

SEQ ID NO: 1082938 - RNA, 20 nt, Human
aaauuaccagguuugagggu

SEQ ID NO: 1082939 - RNA, 24 nt, Human
aacaaaaacuggagaaaggacaau

SEQ ID NO: 1082940 - RNA, 19 nt, Human
aaccagcgaucgaugcagu

SEQ ID NO: 1082941 - RNA, 27 nt, Human
acacaacacuuucucuguuaccagaag

SEQ ID NO: 1082942 - RNA, 23 nt, Human
caaauggauagaaagcuucuucc

SEQ ID NO: 1082943 - RNA, 21 nt, Human
caagugauuccuguuugccca

SEQ ID NO: 1082944 - RNA, 19 nt, Human
cagucuauuauagagucac

SEQ ID NO: 1082945 - RNA, 19 nt, Human
caucauccucauuuaagag

SEQ ID NO: 1082946 - RNA, 20 nt, Human
cccacggucugggcuccugc

SEQ ID NO: 1082947 - RNA, 24 nt, Human
ccucauuuaagaggaaaacugagc

SEQ ID NO: 1082948 - RNA, 18 nt, Human
ccucuuugcccacuucuu

SEQ ID NO: 1082949 - RNA, 20 nt, Human
ccugcuucuugcccuccccg

SEQ ID NO: 1082950 - RNA, 25 nt, Human
cuccgaagcugcuccgcaccucccu

SEQ ID NO: 1082951 - RNA, 25 nt, Human
cuggaacaaaaacuggagaaaggac

SEQ ID NO: 1082952 - RNA, 25 nt, Human
cuguagucuucucagcaacucuucc

SEQ ID NO: 1082953 - RNA, 27 nt, Human
cuuuuauucuggaacaaaaacuggaga

SEQ ID NO: 1082954 - RNA, 18 nt, Human
gaucgaugcagucagugg

SEQ ID NO: 1082955 - RNA, 19 nt, Human
gcagauggcucauuuucau

SEQ ID NO: 1082956 - RNA, 30 nt, Human
gcaguggugggccuucuuuaguuugcuguu

SEQ ID NO: 1082957 - RNA, 22 nt, Human
ggaacaaaaacuggagaaagga

SEQ ID NO: 1082958 - RNA, 22 nt, Human
uaaguaccacucaaaaagugga

SEQ ID NO: 1082959 - RNA, 25 nt, Human
uacacaacacuuucucuguuaccag

SEQ ID NO: 1082960 - RNA, 18 nt, Human
uaccucagaaagcaacga

SEQ ID NO: 1082961 - RNA, 18 nt, Human
uaccucagaaagcaacga

SEQ ID NO: 1082962 - RNA, 21 nt, Human
uagaaagcuucuucccgaucc

SEQ ID NO: 1082963 - RNA, 19 nt, Human
uagaauucucagauaacca

SEQ ID NO: 1082964 - RNA, 21 nt, Human
uauuaaugaacaaguggaaaa

SEQ ID NO: 1082965 - RNA, 21 nt, Human
uauuauagagucaccauuaga

SEQ ID NO: 1082966 - RNA, 24 nt, Human
uauuuccaguuugucugacagagu

SEQ ID NO: 1082967 - RNA, 23 nt, Human
ucaccugaguuuugcaguggugg

SEQ ID NO: 1082968 - RNA, 24 nt, Human
ucagcucuugcucuggcucuccca

SEQ ID NO: 1082969 - RNA, 18 nt, Human
ucaguggacaugguacuc

SEQ ID NO: 1082970 - RNA, 20 nt, Human
ucccacggucugggcuccug

SEQ ID NO: 1082971 - RNA, 23 nt, Human
uccucuuugcccacuucuuguug

SEQ ID NO: 1082972 - RNA, 27 nt, Human
ucugaagagucuccuccucuauuuuca

SEQ ID NO: 1082973 - RNA, 23 nt, Human
ucugcgacaaauaggaccggggc

SEQ ID NO: 1082974 - RNA, 25 nt, Human
ucuuuagugaguccucuagguuggu

SEQ ID NO: 1082975 - RNA, 21 nt, Human
ugcaaacacuacagguuuuua

SEQ ID NO: 1082976 - RNA, 24 nt, Human
ugcaccauuuucaccaaaacuucu

SEQ ID NO: 1082977 - RNA, 22 nt, Human
ugcucuggcucucccacggucu

SEQ ID NO: 1082978 - RNA, 19 nt, Human
uggccgcagcucucaagcc

SEQ ID NO: 1082979 - RNA, 20 nt, Human
uggcuuuuaaaauauuuccu

SEQ ID NO: 1082980 - RNA, 23 nt, Human
uucaccaaaacuucucauugcca

SEQ ID NO: 1082981 - RNA, 20 nt, Human
aaaagaacauuugaaagaca

SEQ ID NO: 1082982 - RNA, 20 nt, Human
aaaaucaaaauaagaugacc

SEQ ID NO: 1082983 - RNA, 21 nt, Human
aaacagaaaaauuauuuccca

SEQ ID NO: 1082984 - RNA, 18 nt, Human
aaaugccaagguauuuac

SEQ ID NO: 1082985 - RNA, 19 nt, Human
aaaugucaaaacacagaac

SEQ ID NO: 1082986 - RNA, 23 nt, Human
aacauuugaaagacagaaagaga

SEQ ID NO: 1082987 - RNA, 24 nt, Human
acauuugaaagacagaaagagaga

SEQ ID NO: 1082988 - RNA, 19 nt, Human
acuuugagaaacagaaaaa

SEQ ID NO: 1082989 - RNA, 23 nt, Human
agaaagagagagggaaaagagaa

SEQ ID NO: 1082990 - RNA, 28 nt, Human
agaaggggaggagagaaagagagaggga

SEQ ID NO: 1082991 - RNA, 23 nt, Human
agacagaaagagagaagggggac

SEQ ID NO: 1082992 - RNA, 22 nt, Human
agagagagggaaaagagaaagc

SEQ ID NO: 1082993 - RNA, 18 nt, Human
agaggaggaggaggagga

SEQ ID NO: 1082994 - RNA, 25 nt, Human
agaggaggaggaggaggauugagag

SEQ ID NO: 1082995 - RNA, 20 nt, Human
agcaagaaagaggaggagga

SEQ ID NO: 1082996 - RNA, 22 nt, Human
caaaagggagcauuuuaugaua

SEQ ID NO: 1082997 - RNA, 24 nt, Human
cagaaacaguaauucagaaugcaa

SEQ ID NO: 1082998 - RNA, 22 nt, Human
cauuucacuaucccccaguacc

SEQ ID NO: 1082999 - RNA, 19 nt, Human
cccaguaccaaaagggagc

SEQ ID NO: 1083000 - RNA, 20 nt, Human
gagaaagagagagggaaaag

SEQ ID NO: 1083001 - RNA, 22 nt, Human
gagaaggggaggagagaaagag

SEQ ID NO: 1083002 - RNA, 21 nt, Human
gagaauauuugaacauguugu

SEQ ID NO: 1083003 - RNA, 19 nt, Human
gagagaaagagagagggaa

SEQ ID NO: 1083004 - RNA, 18 nt, Human
gaggaggaggaggaggau

SEQ ID NO: 1083005 - RNA, 19 nt, Human
gaggaggaggaggaggauu

SEQ ID NO: 1083006 - RNA, 22 nt, Human
gaggaggaggaggaggauugag

SEQ ID NO: 1083007 - RNA, 20 nt, Human
ggagaguuugagauugagac

SEQ ID NO: 1083008 - RNA, 21 nt, Human
gggaggagagaaagagagagg

SEQ ID NO: 1083009 - RNA, 23 nt, Human
ggggaggagagaaagagagaggg

SEQ ID NO: 1083010 - RNA, 21 nt, Human
uaaaauguuuuucuccauguu

SEQ ID NO: 1083011 - RNA, 24 nt, Human
uauuagaaaccauccaacaugaaa

SEQ ID NO: 1083012 - RNA, 25 nt, Human
ucaaaccagaaacaguaauucagaa

SEQ ID NO: 1083013 - RNA, 22 nt, Human
ugaaagacagaaagagagaagg

SEQ ID NO: 1083014 - RNA, 19 nt, Human
uguuguuaaaagcuagggg

SEQ ID NO: 1083015 - RNA, 23 nt, Human
uuaauagaauguuaaagccaaaa

SEQ ID NO: 1083016 - RNA, 22 nt, Human
aaaaaaaaaaaagaacaaaaaa

SEQ ID NO: 1083017 - RNA, 31 nt, Human
aaaaaaaaaaaagaacaaaaaaacaaaaaga

SEQ ID NO: 1083018 - RNA, 30 nt, Human
aaaaaaaaagaacaaaaaaacaaaaacaaa

SEQ ID NO: 1083019 - RNA, 24 nt, Human
aaaaaaacaaaaacaaagcaagga

SEQ ID NO: 1083020 - RNA, 22 nt, Human
aaaaaaacuaugaacaaagaca

SEQ ID NO: 1083021 - RNA, 23 nt, Human
aaaaaacaaaaacaaagcaagga

SEQ ID NO: 1083022 - RNA, 26 nt, Human
aaaaaacuaugaacaaagacaaaaau

SEQ ID NO: 1083023 - RNA, 28 nt, Human
aaaaaagaacaaaaaaacaaaaacaaag

SEQ ID NO: 1083024 - RNA, 23 nt, Human
aaaaaagaacaaaaaaacaaaag

SEQ ID NO: 1083025 - RNA, 22 nt, Human
aaaaacaaaaacaaagcaagga

SEQ ID NO: 1083026 - RNA, 23 nt, Human
aaagauagcuauaauuaauuugc

SEQ ID NO: 1083027 - RNA, 21 nt, Human
aagaaaaaaaaagagaaagaa

SEQ ID NO: 1083028 - RNA, 22 nt, Human
aaugagaaaaaugaaaaagucc

SEQ ID NO: 1083029 - RNA, 18 nt, Human
aauuuaaucacauuccau

SEQ ID NO: 1083030 - RNA, 19 nt, Human
acagcagaggugaacaaac

SEQ ID NO: 1083031 - RNA, 24 nt, Human
acuacagucccuaaacaaaaaaac

SEQ ID NO: 1083032 - RNA, 24 nt, Human
acuggauuguauuuuauuuggcuu

SEQ ID NO: 1083033 - RNA, 22 nt, Human
agaaaaaaaaagagaaagaaaa

SEQ ID NO: 1083034 - RNA, 21 nt, Human
agaaaaauaaaaagagagccg

SEQ ID NO: 1083035 - RNA, 21 nt, Human
agaaaucacacagccugcaaa

SEQ ID NO: 1083036 - RNA, 23 nt, Human
agaacaaaaaaacaaaaacaaag

SEQ ID NO: 1083037 - RNA, 23 nt, Human
agcucuauuuuugggaaaacaau

SEQ ID NO: 1083038 - RNA, 18 nt, Human
auuggcucugaauucuaa

SEQ ID NO: 1083039 - RNA, 25 nt, Human
caaaaaaacuaugaacaaagacaaa

SEQ ID NO: 1083040 - RNA, 21 nt, Human
caaaaacaaagcaaggagcuc

SEQ ID NO: 1083041 - RNA, 25 nt, Human
caaauuaacuuacagcagaggugaa

SEQ ID NO: 1083042 - RNA, 23 nt, Human
caagaugauaaauauuaguguua

SEQ ID NO: 1083043 - RNA, 19 nt, Human
caauaaauaagcuacuuuc

SEQ ID NO: 1083044 - RNA, 24 nt, Human
caauacaaacauauuaugaaauga

SEQ ID NO: 1083045 - RNA, 23 nt, Human
cagaacagcccccaagaugauaa

SEQ ID NO: 1083046 - RNA, 19 nt, Human
cagccagaacacauuugau

SEQ ID NO: 1083047 - RNA, 21 nt, Human
cagucccuaaacaaaaaaacu

SEQ ID NO: 1083048 - RNA, 24 nt, Human
cauuaucaaauauucagcacagcc

SEQ ID NO: 1083049 - RNA, 23 nt, Human
ccauaauaaaaaaaaaaaagaaa

SEQ ID NO: 1083050 - RNA, 23 nt, Human
ccauaauaaaaaaaaaaaagaac

SEQ ID NO: 1083051 - RNA, 25 nt, Human
cuagaaaaauaaaaagagagcaaaa

SEQ ID NO: 1083052 - RNA, 24 nt, Human
cucacuggcagaauuuuagcuguu

SEQ ID NO: 1083053 - RNA, 25 nt, Human
cucacuggcagaauuuuagcuguua

SEQ ID NO: 1083054 - RNA, 21 nt, Human
cugaugagauaaugguggacu

SEQ ID NO: 1083055 - RNA, 21 nt, Human
gaaaaaaaaagagaaagaaaa

SEQ ID NO: 1083056 - RNA, 26 nt, Human
gagaaaaaugaaaaaguccaauuagc

SEQ ID NO: 1083057 - RNA, 22 nt, Human
gcaaaaaucauguaauagauca

SEQ ID NO: 1083058 - RNA, 18 nt, Human
gggaaaacaaugggugcu

SEQ ID NO: 1083059 - RNA, 18 nt, Human
uaaaaagagagcaaaaau

SEQ ID NO: 1083060 - RNA, 21 nt, Human
uaaaaagagagcaaaaaucau

SEQ ID NO: 1083061 - RNA, 24 nt, Human
uaaaaagagagcaaaaaucaugua

SEQ ID NO: 1083062 - RNA, 28 nt, Human
uaaacaaaaaaacuaugaacaaagacaa

SEQ ID NO: 1083063 - RNA, 19 nt, Human
uaacaaccaauuccaauuc

SEQ ID NO: 1083064 - RNA, 18 nt, Human
uaacagaaauuaacaacc

SEQ ID NO: 1083065 - RNA, 21 nt, Human
uaagaauaucaaacaggaaaa

SEQ ID NO: 1083066 - RNA, 19 nt, Human
uacagucccuaaacaaaaa

SEQ ID NO: 1083067 - RNA, 19 nt, Human
uacauauuaucuaugauug

SEQ ID NO: 1083068 - RNA, 20 nt, Human
uacccgaauuaccagccuga

SEQ ID NO: 1083069 - RNA, 19 nt, Human
uagaucacagaacagcccc

SEQ ID NO: 1083070 - RNA, 21 nt, Human
uagcaaagccaguaacagaaa

SEQ ID NO: 1083071 - RNA, 23 nt, Human
uagcaaagccaguaacagaaauu

SEQ ID NO: 1083072 - RNA, 23 nt, Human
uagcuaaaaaacuaauaagcaag

SEQ ID NO: 1083073 - RNA, 24 nt, Human
uaugaaaugagugaaaagggcaua

SEQ ID NO: 1083074 - RNA, 23 nt, Human
uccaaauucacucagccagaaca

SEQ ID NO: 1083075 - RNA, 21 nt, Human
uccaauaucaauguauaagca

SEQ ID NO: 1083076 - RNA, 19 nt, Human
uccacuacagucccuaaac

SEQ ID NO: 1083077 - RNA, 22 nt, Human
uccacuacagucccuaaacaaa

SEQ ID NO: 1083078 - RNA, 22 nt, Human
ucccaaauuaauguaagucuca

SEQ ID NO: 1083079 - RNA, 23 nt, Human
ucccuaaacaaaaaaacuaugaa

SEQ ID NO: 1083080 - RNA, 26 nt, Human
ucccuaaacaaaaaaacuaugaacaa

SEQ ID NO: 1083081 - RNA, 21 nt, Human
ucuagcaaagccaguaacaga

SEQ ID NO: 1083082 - RNA, 21 nt, Human
ugaacaaagacaaaaauaauc

SEQ ID NO: 1083083 - RNA, 24 nt, Human
ugaacaaagacaaaaauaaucugu

SEQ ID NO: 1083084 - RNA, 22 nt, Human
ugagaaaaaugaaaaaguccaa

SEQ ID NO: 1083085 - RNA, 23 nt, Human
ugauacuagaaaaauaaaaagag

SEQ ID NO: 1083086 - RNA, 18 nt, Human
ugcaacagaaaucacaca

SEQ ID NO: 1083087 - RNA, 24 nt, Human
ugcacauaugaauucuagcaaagc

SEQ ID NO: 1083088 - RNA, 19 nt, Human
uggccccucacagacacaa

SEQ ID NO: 1083089 - RNA, 22 nt, Human
uguaauagaucacagaacagcc

SEQ ID NO: 1083090 - RNA, 23 nt, Human
uuaacacauuuauagcuuaaaga

SEQ ID NO: 1083091 - RNA, 19 nt, Human
uuaacuuacagcagaggug

SEQ ID NO: 1083092 - RNA, 22 nt, Human
uuacagcagaggugaacaaacu

SEQ ID NO: 1083093 - RNA, 23 nt, Human
uuaccagccugauucaaauaugu

SEQ ID NO: 1083094 - RNA, 21 nt, Human
uucaaauauguugcuagcuaa

SEQ ID NO: 1083095 - RNA, 21 nt, Human
uuccuuuuuuuaaugagaaaa

SEQ ID NO: 1083096 - RNA, 24 nt, Human
uucuaaaugugccuauuuuauuuu

SEQ ID NO: 1083097 - RNA, 22 nt, Human
uuuaagaaaaaaaaagagaaag

SEQ ID NO: 1083098 - RNA, 22 nt, Human
aagcaaagccccugcucuccga

SEQ ID NO: 1083099 - RNA, 21 nt, Human
ccucagccggaaaagcaaagc

SEQ ID NO: 1083100 - RNA, 23 nt, Human
cuccaaaucuuccaagccauuuc

SEQ ID NO: 1083101 - RNA, 21 nt, Human
uauugacuuuagucacccugu

SEQ ID NO: 1083102 - RNA, 22 nt, Human
ugcccauaagguggcuggcugg

SEQ ID NO: 1083103 - RNA, 25 nt, Human
uguuguucuuuauccauucaucugu

SEQ ID NO: 1083104 - RNA, 18 nt, Human
uuuguuuaagagauguuu

SEQ ID NO: 1083105 - RNA, 21 nt, Human
aaaauagaaauaucagucacu

SEQ ID NO: 1083106 - RNA, 18 nt, Human
aaaauccuaauauuccag

SEQ ID NO: 1083107 - RNA, 23 nt, Human
aagaacacacaaaguucuagaag

SEQ ID NO: 1083108 - RNA, 26 nt, Human
aaguauugagauugcaggcgugagcc

SEQ ID NO: 1083109 - RNA, 22 nt, Human
aauucucauuccaaaaaaugag

SEQ ID NO: 1083110 - RNA, 31 nt, Human
acacagaugaaccaggcagacgaaaccagag

SEQ ID NO: 1083111 - RNA, 24 nt, Human
accaucuuggccaggcuggucucg

SEQ ID NO: 1083112 - RNA, 19 nt, Human
accgcgcccggccaaaaua

SEQ ID NO: 1083113 - RNA, 18 nt, Human
acgggguuucaccaucuu

SEQ ID NO: 1083114 - RNA, 20 nt, Human
acgggguuucaccaucuugg

SEQ ID NO: 1083115 - RNA, 24 nt, Human
acgggguuucaccaucuuggccag

SEQ ID NO: 1083116 - RNA, 25 nt, Human
acucugcugcccagucuggagugca

SEQ ID NO: 1083117 - RNA, 21 nt, Human
agacgaaaccagauuaggaaa

SEQ ID NO: 1083118 - RNA, 23 nt, Human
agauugcaggcgugagccaccgc

SEQ ID NO: 1083119 - RNA, 18 nt, Human
agccuccagaguagcugg

SEQ ID NO: 1083120 - RNA, 24 nt, Human
aggugauccacccaccucagccuc

SEQ ID NO: 1083121 - RNA, 23 nt, Human
aguagcuggaacuacaggcaugu

SEQ ID NO: 1083122 - RNA, 22 nt, Human
auccacucaaguccugaacuag

SEQ ID NO: 1083123 - RNA, 22 nt, Human
auuuuuuguauuuuuagcagag

SEQ ID NO: 1083124 - RNA, 23 nt, Human
caaaauuaaucuguaauggacac

SEQ ID NO: 1083125 - RNA, 23 nt, Human
caaagcuuaaaauaggacagcuc

SEQ ID NO: 1083126 - RNA, 24 nt, Human
caaaguauugagauugcaggcgug

SEQ ID NO: 1083127 - RNA, 23 nt, Human
caaccuccaccuccugguucaag

SEQ ID NO: 1083128 - RNA, 26 nt, Human
caacuccaaccucaccgaugcucaaa

SEQ ID NO: 1083129 - RNA, 22 nt, Human
caagugauucuggugccucagc

SEQ ID NO: 1083130 - RNA, 27 nt, Human
caagugauucuggugccucagccucca

SEQ ID NO: 1083131 - RNA, 21 nt, Human
caccaucuuggccaggcuggu

SEQ ID NO: 1083132 - RNA, 24 nt, Human
caccaucuuggccaggcuggucuc

SEQ ID NO: 1083133 - RNA, 22 nt, Human
cacccaccucagccucccaaag

SEQ ID NO: 1083134 - RNA, 23 nt, Human
cacccaccucagccucccaaagu

SEQ ID NO: 1083135 - RNA, 24 nt, Human
cacucugcugcccagucuggagug

SEQ ID NO: 1083136 - RNA, 21 nt, Human
cacugcaaccuccaccuccug

SEQ ID NO: 1083137 - RNA, 19 nt, Human
cacuggcuagaaaguugca

SEQ ID NO: 1083138 - RNA, 21 nt, Human
caggcgugagccaccgcgccc

SEQ ID NO: 1083139 - RNA, 22 nt, Human
ccaaaguauugagauugcaggc

SEQ ID NO: 1083140 - RNA, 24 nt, Human
ccaaaguauugagauugcaggcgu

SEQ ID NO: 1083141 - RNA, 22 nt, Human
ccaacuccaaccucaccgaugc

SEQ ID NO: 1083142 - RNA, 19 nt, Human
ccacccaccucagccuccc

SEQ ID NO: 1083143 - RNA, 23 nt, Human
ccaccuccugguucaagugauuc

SEQ ID NO: 1083144 - RNA, 25 nt, Human
ccagaguagcuggaacuacaggcau

SEQ ID NO: 1083145 - RNA, 21 nt, Human
cccaacuccaaccucaccgau

SEQ ID NO: 1083146 - RNA, 21 nt, Human
ccccaacuccaaccucaccga

SEQ ID NO: 1083147 - RNA, 24 nt, Human
ccccaccuucucccuuuuuauuuc

SEQ ID NO: 1083148 - RNA, 27 nt, Human
ccgcgcccggccaaaauaguggaccuc

SEQ ID NO: 1083149 - RNA, 18 nt, Human
ccucccugacaacucagg

SEQ ID NO: 1083150 - RNA, 22 nt, Human
ccucccugacaacucagggagc

SEQ ID NO: 1083151 - RNA, 24 nt, Human
ccugaccucaggugauccacccac

SEQ ID NO: 1083152 - RNA, 18 nt, Human
ccugguucaagugauucu

SEQ ID NO: 1083153 - RNA, 20 nt, Human
cggcagagaacguguucucu

SEQ ID NO: 1083154 - RNA, 24 nt, Human
cgggguuucaccaucuuggccagg

SEQ ID NO: 1083155 - RNA, 18 nt, Human
cucacagaucacauaucg

SEQ ID NO: 1083156 - RNA, 24 nt, Human
cucacagguccugacaauuugacu

SEQ ID NO: 1083157 - RNA, 24 nt, Human
cucacugcaaccuccaccuccugg

SEQ ID NO: 1083158 - RNA, 27 nt, Human
cucacugcaaccuccaccuccugguuc

SEQ ID NO: 1083159 - RNA, 20 nt, Human
cuccaaccucaccgaugcuc

SEQ ID NO: 1083160 - RNA, 21 nt, Human
cucccaaaguauugagauugc

SEQ ID NO: 1083161 - RNA, 23 nt, Human
cugaauauucaaccucccugaca

SEQ ID NO: 1083162 - RNA, 23 nt, Human
cugcaaccuccaccuccugguuc

SEQ ID NO: 1083163 - RNA, 21 nt, Human
cuuaaaauaggacagcucuga

SEQ ID NO: 1083164 - RNA, 24 nt, Human
cuucccaaaacaauuagacucugg

SEQ ID NO: 1083165 - RNA, 18 nt, Human
cuuggccaggcuggucuc

SEQ ID NO: 1083166 - RNA, 21 nt, Human
gaaccaggcagacgaaaccag

SEQ ID NO: 1083167 - RNA, 24 nt, Human
gaccucaggugauccacccaccuc

SEQ ID NO: 1083168 - RNA, 24 nt, Human
gagacgggguuucaccaucuuggc

SEQ ID NO: 1083169 - RNA, 25 nt, Human
gaguagcuggaacuacaggcaugug

SEQ ID NO: 1083170 - RNA, 21 nt, Human
gauucuggugccucagccucc

SEQ ID NO: 1083171 - RNA, 18 nt, Human
gauugcaggcgugagcca

SEQ ID NO: 1083172 - RNA, 20 nt, Human
gauugcaggcgugagccacc

SEQ ID NO: 1083173 - RNA, 21 nt, Human
gcaaccuccaccuccugguuc

SEQ ID NO: 1083174 - RNA, 23 nt, Human
gcuggucucgaacuccugaccuc

SEQ ID NO: 1083175 - RNA, 18 nt, Human
gcuuaaaauaggacagcu

SEQ ID NO: 1083176 - RNA, 23 nt, Human
gcuuccauuuaguucuuccccac

SEQ ID NO: 1083177 - RNA, 23 nt, Human
ggcaccaucucagcucacugcaa

SEQ ID NO: 1083178 - RNA, 24 nt, Human
ggcuggucucgaacuccugaccuc

SEQ ID NO: 1083179 - RNA, 23 nt, Human
gggguuucaccaucuuggccagg

SEQ ID NO: 1083180 - RNA, 24 nt, Human
gguccugacaauuugacucugggg

SEQ ID NO: 1083181 - RNA, 19 nt, Human
ggucucgaacuccugaccu

SEQ ID NO: 1083182 - RNA, 24 nt, Human
ggugccucagccuccagaguagcu

SEQ ID NO: 1083183 - RNA, 24 nt, Human
gugauccacccaccucagccuccc

SEQ ID NO: 1083184 - RNA, 24 nt, Human
uaaucuguaauggacaccucgcuu

SEQ ID NO: 1083185 - RNA, 19 nt, Human
uaauggacaccucgcuucc

SEQ ID NO: 1083186 - RNA, 23 nt, Human
uacaggcaugugccaccaugccc

SEQ ID NO: 1083187 - RNA, 25 nt, Human
uagauagcuaggucccugcccuuaa

SEQ ID NO: 1083188 - RNA, 23 nt, Human
uagcagagacgggguuucaccau

SEQ ID NO: 1083189 - RNA, 26 nt, Human
uagcagagacgggguuucaccaucuu

SEQ ID NO: 1083190 - RNA, 18 nt, Human
uaggaccaaagcuuaaaa

SEQ ID NO: 1083191 - RNA, 19 nt, Human
uaggucccugcccuuaagg

SEQ ID NO: 1083192 - RNA, 19 nt, Human
uagugcaaggaagaaaucc

SEQ ID NO: 1083193 - RNA, 22 nt, Human
uagugcaaggaagaaauccacu

SEQ ID NO: 1083194 - RNA, 20 nt, Human
uauccuucuuuaaauucuca

SEQ ID NO: 1083195 - RNA, 19 nt, Human
uauuucaacacacuuacuu

SEQ ID NO: 1083196 - RNA, 24 nt, Human
uauuuuuuguauuuuuagcagaga

SEQ ID NO: 1083197 - RNA, 22 nt, Human
ucacucugcugcccagucugga

SEQ ID NO: 1083198 - RNA, 19 nt, Human
ucacugcaaccuccaccuc

SEQ ID NO: 1083199 - RNA, 23 nt, Human
ucacugcaaccuccaccuccugg

SEQ ID NO: 1083200 - RNA, 24 nt, Human
ucacugcaaccuccaccuccuggu

SEQ ID NO: 1083201 - RNA, 27 nt, Human
ucacugcaaccuccaccuccugguuca

SEQ ID NO: 1083202 - RNA, 23 nt, Human
ucagucacuaaauuucaaacugu

SEQ ID NO: 1083203 - RNA, 21 nt, Human
uccacccaccucagccuccca

SEQ ID NO: 1083204 - RNA, 20 nt, Human
ucccaaaguauugagauugc

SEQ ID NO: 1083205 - RNA, 24 nt, Human
ucccaaaguauugagauugcaggc

SEQ ID NO: 1083206 - RNA, 26 nt, Human
uccccaccuucucccuuuuuauuuca

SEQ ID NO: 1083207 - RNA, 23 nt, Human
ucucgaacuccugaccucaggug

SEQ ID NO: 1083208 - RNA, 25 nt, Human
ucuuuagaauucaagucaauuuagg

SEQ ID NO: 1083209 - RNA, 21 nt, Human
ugaaccaggcagacgaaacca

SEQ ID NO: 1083210 - RNA, 21 nt, Human
ugaccucaggugauccaccca

SEQ ID NO: 1083211 - RNA, 24 nt, Human
ugaccucaggugauccacccaccu

SEQ ID NO: 1083212 - RNA, 18 nt, Human
ugagauugcaggcgugag

SEQ ID NO: 1083213 - RNA, 19 nt, Human
ugagauugcaggcgugagc

SEQ ID NO: 1083214 - RNA, 21 nt, Human
ugagauugcaggcgugagcca

SEQ ID NO: 1083215 - RNA, 23 nt, Human
ugagauugcaggcgugagccacc

SEQ ID NO: 1083216 - RNA, 24 nt, Human
ugagauugcaggcgugagccaccg

SEQ ID NO: 1083217 - RNA, 24 nt, Human
ugauccacccaccucagccuccca

SEQ ID NO: 1083218 - RNA, 19 nt, Human
ugcaaagagccccaacucc

SEQ ID NO: 1083219 - RNA, 24 nt, Human
ugcaaggaagaaauccacucaagu

SEQ ID NO: 1083220 - RNA, 21 nt, Human
ugcauugcaaagagccccaac

SEQ ID NO: 1083221 - RNA, 24 nt, Human
ugccucagccuccagaguagcugg

SEQ ID NO: 1083222 - RNA, 21 nt, Human
uggaacuacaggcaugugcca

SEQ ID NO: 1083223 - RNA, 24 nt, Human
uggaacuacaggcaugugccacca

SEQ ID NO: 1083224 - RNA, 24 nt, Human
uggccaggcuggucucgaacuccu

SEQ ID NO: 1083225 - RNA, 23 nt, Human
uggcuagaaaguugcacaaugaa

SEQ ID NO: 1083226 - RNA, 19 nt, Human
uuaacauuacugauuauag

SEQ ID NO: 1083227 - RNA, 24 nt, Human
uuagcagagacgggguuucaccau

SEQ ID NO: 1083228 - RNA, 22 nt, Human
uuagugaaccacuuuggaacua

SEQ ID NO: 1083229 - RNA, 23 nt, Human
uucaagugauucuggugccucag

SEQ ID NO: 1083230 - RNA, 20 nt, Human
uucuuccccaccuucucccu

SEQ ID NO: 1083231 - RNA, 23 nt, Human
uuguauuuuuagcagagacgggg

SEQ ID NO: 1083232 - RNA, 25 nt, Human
uuuagaauucaagucaauuuaggac

SEQ ID NO: 1083233 - RNA, 24 nt, Human
uuucaccaucuuggccaggcuggu

SEQ ID NO: 1083234 - RNA, 24 nt, Human
uuucacucugcugcccagucugga

SEQ ID NO: 1083235 - RNA, 24 nt, Human
uuuuuagcagagacgggguuucac

SEQ ID NO: 1083236 - RNA, 21 nt, Human
uuuuuguauuuuuagcagaga

SEQ ID NO: 1083237 - RNA, 24 nt, Human
uuuuuuguauuuuuagcagagacg

SEQ ID NO: 1083238 - RNA, 23 nt, Human
aaacaagcuugagauaccaaaau

SEQ ID NO: 1083239 - RNA, 23 nt, Human
aaacuccugaccucaggcaaucc

SEQ ID NO: 1083240 - RNA, 18 nt, Human
aaagugcugggauuacaa

SEQ ID NO: 1083241 - RNA, 24 nt, Human
aaagugcugggauuacaagcauga

SEQ ID NO: 1083242 - RNA, 22 nt, Human
aaccucgugauccgcccgccuc

SEQ ID NO: 1083243 - RNA, 19 nt, Human
aagugcugggauuacaagc

SEQ ID NO: 1083244 - RNA, 21 nt, Human
aagugcugggauuacaagcau

SEQ ID NO: 1083245 - RNA, 26 nt, Human
aagugcugggauuacaagcaugagcc

SEQ ID NO: 1083246 - RNA, 23 nt, Human
acaggcgcccgccaccacgcccg

SEQ ID NO: 1083247 - RNA, 18 nt, Human
acaggguuucaucauguu

SEQ ID NO: 1083248 - RNA, 19 nt, Human
acaggguuucaucauguug

SEQ ID NO: 1083249 - RNA, 24 nt, Human
acaggguuucaucauguugaccag

SEQ ID NO: 1083250 - RNA, 18 nt, Human
acgggguuucaccauguu

SEQ ID NO: 1083251 - RNA, 19 nt, Human
acgggguuucaccauguua

SEQ ID NO: 1083252 - RNA, 20 nt, Human
acgggguuucaccauguuag

SEQ ID NO: 1083253 - RNA, 24 nt, Human
acgggguuucaccauguuagccag

SEQ ID NO: 1083254 - RNA, 21 nt, Human
acugcacccggccucauacag

SEQ ID NO: 1083255 - RNA, 24 nt, Human
agcucugucgcccaggcuggagug

SEQ ID NO: 1083256 - RNA, 22 nt, Human
aggcaauccgccugccucggcc

SEQ ID NO: 1083257 - RNA, 23 nt, Human
aggcaauccgccugccucggccu

SEQ ID NO: 1083258 - RNA, 25 nt, Human
aggcuggagugcaguggcgccaucu

SEQ ID NO: 1083259 - RNA, 22 nt, Human
aguagagacgggguuucaccau

SEQ ID NO: 1083260 - RNA, 19 nt, Human
agucucaaacuccugaccu

SEQ ID NO: 1083261 - RNA, 20 nt, Human
agugcaguggcgccaucucg

SEQ ID NO: 1083262 - RNA, 24 nt, Human
agugcugggauuacaagcaugagc

SEQ ID NO: 1083263 - RNA, 21 nt, Human
auccacagcaauuaagacugc

SEQ ID NO: 1083264 - RNA, 23 nt, Human
aucucuugcccccccuccugcua

SEQ ID NO: 1083265 - RNA, 20 nt, Human
augagccaccgcgcccgacc

SEQ ID NO: 1083266 - RNA, 21 nt, Human
auucuccugccucagccuccc

SEQ ID NO: 1083267 - RNA, 24 nt, Human
caaagugcugggauuacaagcaug

SEQ ID NO: 1083268 - RNA, 18 nt, Human
caaaucucuugccccccc

SEQ ID NO: 1083269 - RNA, 23 nt, Human
caacgggccuucuugcgacgcuc

SEQ ID NO: 1083270 - RNA, 19 nt, Human
caauugcugggauuacagg

SEQ ID NO: 1083271 - RNA, 24 nt, Human
caauugcugggauuacaggcguga

SEQ ID NO: 1083272 - RNA, 27 nt, Human
caauugcugggauuacaggcgugagcc

SEQ ID NO: 1083273 - RNA, 18 nt, Human
caccauguuagccaggau

SEQ ID NO: 1083274 - RNA, 22 nt, Human
caccauguuagccaggaugguc

SEQ ID NO: 1083275 - RNA, 23 nt, Human
caccauguuagccaggauggucu

SEQ ID NO: 1083276 - RNA, 24 nt, Human
caccauguuagccaggauggucuu

SEQ ID NO: 1083277 - RNA, 22 nt, Human
cacgccauucuccugccucagc

SEQ ID NO: 1083278 - RNA, 26 nt, Human
cagcaaccccccaugugcuagggaca

SEQ ID NO: 1083279 - RNA, 21 nt, Human
cagcaauuaagacugcacugu

SEQ ID NO: 1083280 - RNA, 21 nt, Human
caggcgcccgccaccacgccc

SEQ ID NO: 1083281 - RNA, 24 nt, Human
caggguuucaucauguugaccagg

SEQ ID NO: 1083282 - RNA, 19 nt, Human
caucugcucgucuggugcu

SEQ ID NO: 1083283 - RNA, 21 nt, Human
cauguugaccaggauagucuc

SEQ ID NO: 1083284 - RNA, 25 nt, Human
cauuuuggccucucagcaacccccc

SEQ ID NO: 1083285 - RNA, 22 nt, Human
ccaaaauugaaaagacagcuca

SEQ ID NO: 1083286 - RNA, 19 nt, Human
ccaaagugcugggauuaca

SEQ ID NO: 1083287 - RNA, 24 nt, Human
ccaaagugcugggauuacaagcau

SEQ ID NO: 1083288 - RNA, 21 nt, Human
ccaauugcugggauuacaggc

SEQ ID NO: 1083289 - RNA, 23 nt, Human
ccaauugcugggauuacaggcgu

SEQ ID NO: 1083290 - RNA, 22 nt, Human
ccacugcacccggccucauaca

SEQ ID NO: 1083291 - RNA, 24 nt, Human
cccaauugcugggauuacaggcgu

SEQ ID NO: 1083292 - RNA, 22 nt, Human
cccaggcuggagugcaguggcg

SEQ ID NO: 1083293 - RNA, 20 nt, Human
ccccgcuggcuaaaaaaggg

SEQ ID NO: 1083294 - RNA, 24 nt, Human
cccgaguagcugagacuacaggcg

SEQ ID NO: 1083295 - RNA, 20 nt, Human
ccggccucauacagcucuaa

SEQ ID NO: 1083296 - RNA, 24 nt, Human
ccucacuacaagcuccgccucccg

SEQ ID NO: 1083297 - RNA, 18 nt, Human
ccugaccucaggcaaucc

SEQ ID NO: 1083298 - RNA, 21 nt, Human
ccugaccucaggcaauccgcc

SEQ ID NO: 1083299 - RNA, 24 nt, Human
ccugccucagccucccgaguagcu

SEQ ID NO: 1083300 - RNA, 19 nt, Human
cgccucccggguucacgcc

SEQ ID NO: 1083301 - RNA, 19 nt, Human
cggccucauacagcucuaa

SEQ ID NO: 1083302 - RNA, 23 nt, Human
cucaaaucucuugcccccccucc

SEQ ID NO: 1083303 - RNA, 21 nt, Human
cucccggguucacgccauucu

SEQ ID NO: 1083304 - RNA, 24 nt, Human
cuccuaaccucgugauccgcccgc

SEQ ID NO: 1083305 - RNA, 23 nt, Human
cuccugaccucaggcaauccgcc

SEQ ID NO: 1083306 - RNA, 26 nt, Human
cuccugaccucaggcaauccgccugc

SEQ ID NO: 1083307 - RNA, 23 nt, Human
cucuugcccccccuccugcuagg

SEQ ID NO: 1083308 - RNA, 18 nt, Human
cugcauguacaaucucuc

SEQ ID NO: 1083309 - RNA, 19 nt, Human
cugucgcccaggcuggagu

SEQ ID NO: 1083310 - RNA, 21 nt, Human
cuuuccauccaugaacucugg

SEQ ID NO: 1083311 - RNA, 20 nt, Human
gaaaagacagcucaucaaaa

SEQ ID NO: 1083312 - RNA, 24 nt, Human
gaccucaggcaauccgccugccuc

SEQ ID NO: 1083313 - RNA, 24 nt, Human
gagacgggguuucaccauguuagc

SEQ ID NO: 1083314 - RNA, 25 nt, Human
gaguagcugagacuacaggcgcccg

SEQ ID NO: 1083315 - RNA, 18 nt, Human
gauuacaagcaugagcca

SEQ ID NO: 1083316 - RNA, 18 nt, Human
gauuacaggcgugagcca

SEQ ID NO: 1083317 - RNA, 22 nt, Human
gauuacaggcgugagccacugc

SEQ ID NO: 1083318 - RNA, 23 nt, Human
gauuacaggcgugagccacugca

SEQ ID NO: 1083319 - RNA, 20 nt, Human
gcccaggcuggagugcagug

SEQ ID NO: 1083320 - RNA, 25 nt, Human
gcccggcuaauuuuuuuuuguauuu

SEQ ID NO: 1083321 - RNA, 20 nt, Human
gccucagccucccgaguagc

SEQ ID NO: 1083322 - RNA, 25 nt, Human
gccucccggguucacgccauucucc

SEQ ID NO: 1083323 - RNA, 23 nt, Human
gccucggccucccaaagugcugg

SEQ ID NO: 1083324 - RNA, 25 nt, Human
gcucugucgcccaggcuggagugca

SEQ ID NO: 1083325 - RNA, 20 nt, Human
gcuggagugcaguggcgcca

SEQ ID NO: 1083326 - RNA, 22 nt, Human
ggauuacaagcaugagccaccg

SEQ ID NO: 1083327 - RNA, 23 nt, Human
gggguuucaccauguuagccagg

SEQ ID NO: 1083328 - RNA, 22 nt, Human
ggguuucaccauguuagccagg

SEQ ID NO: 1083329 - RNA, 24 nt, Human
gguuucaccauguuagccaggaug

SEQ ID NO: 1083330 - RNA, 23 nt, Human
guagagacgggguuucaccaugu

SEQ ID NO: 1083331 - RNA, 24 nt, Human
gugauccgcccgccucggccuccc

SEQ ID NO: 1083332 - RNA, 18 nt, Human
uacaaaaaugaaauacuc

SEQ ID NO: 1083333 - RNA, 23 nt, Human
uacaagcaugagccaccgcgccc

SEQ ID NO: 1083334 - RNA, 23 nt, Human
uacaggcgcccgccaccacgccc

SEQ ID NO: 1083335 - RNA, 19 nt, Human
uacaggcgugagccacugc

SEQ ID NO: 1083336 - RNA, 23 nt, Human
uacaggcgugagccacugcaccc

SEQ ID NO: 1083337 - RNA, 22 nt, Human
uagagacgggguuucaccaugu

SEQ ID NO: 1083338 - RNA, 22 nt, Human
uaguagacaggguuucaucaug

SEQ ID NO: 1083339 - RNA, 24 nt, Human
uaguagagacgggguuucaccaug

SEQ ID NO: 1083340 - RNA, 26 nt, Human
uaguagagacgggguuucaccauguu

SEQ ID NO: 1083341 - RNA, 22 nt, Human
uaguuuuuguauuuuuaguaga

SEQ ID NO: 1083342 - RNA, 23 nt, Human
ucaaguucugcauguacaaucuc

SEQ ID NO: 1083343 - RNA, 24 nt, Human
ucaccauguuagccaggauggucu

SEQ ID NO: 1083344 - RNA, 18 nt, Human
ucacuacaagcuccgccu

SEQ ID NO: 1083345 - RNA, 24 nt, Human
ucacuacaagcuccgccucccggg

SEQ ID NO: 1083346 - RNA, 18 nt, Human
ucccaaagugcugggauu

SEQ ID NO: 1083347 - RNA, 24 nt, Human
ucccaaagugcugggauuacaagc

SEQ ID NO: 1083348 - RNA, 23 nt, Human
ucccaauugcugggauuacaggc

SEQ ID NO: 1083349 - RNA, 24 nt, Human
ucccaauugcugggauuacaggcg

SEQ ID NO: 1083350 - RNA, 24 nt, Human
ucccgaguagcugagacuacaggc

SEQ ID NO: 1083351 - RNA, 21 nt, Human
ucccggguucacgccauucuc

SEQ ID NO: 1083352 - RNA, 24 nt, Human
ucccggguucacgccauucuccug

SEQ ID NO: 1083353 - RNA, 22 nt, Human
ucccucucggaggcucuuucca

SEQ ID NO: 1083354 - RNA, 22 nt, Human
ucgcccaggcuggagugcagug

SEQ ID NO: 1083355 - RNA, 25 nt, Human
ucuaaugccacgcaucaaguucugg

SEQ ID NO: 1083356 - RNA, 19 nt, Human
ucuagcucugucgcccagg

SEQ ID NO: 1083357 - RNA, 23 nt, Human
ucuagcucugucgcccaggcugg

SEQ ID NO: 1083358 - RNA, 24 nt, Human
ucuagcucugucgcccaggcugga

SEQ ID NO: 1083359 - RNA, 24 nt, Human
ucuccugccucagccucccgagua

SEQ ID NO: 1083360 - RNA, 20 nt, Human
ucucuagcucuguacaaauc

SEQ ID NO: 1083361 - RNA, 22 nt, Human
ucucuugcccccccuccugcua

SEQ ID NO: 1083362 - RNA, 24 nt, Human
ucugucgcccaggcuggagugcag

SEQ ID NO: 1083363 - RNA, 18 nt, Human
ugaaaagacagcucauca

SEQ ID NO: 1083364 - RNA, 25 nt, Human
ugaaauacucaaaucucuugccccc

SEQ ID NO: 1083365 - RNA, 21 nt, Human
ugaccucaggcaauccgccug

SEQ ID NO: 1083366 - RNA, 21 nt, Human
ugagacuacaggcgcccgcca

SEQ ID NO: 1083367 - RNA, 24 nt, Human
ugagacuacaggcgcccgccacca

SEQ ID NO: 1083368 - RNA, 22 nt, Human
ugcacccggccucauacagcuc

SEQ ID NO: 1083369 - RNA, 24 nt, Human
ugccucagccucccgaguagcuga

SEQ ID NO: 1083370 - RNA, 21 nt, Human
ugccucggccuucccaauugc

SEQ ID NO: 1083371 - RNA, 24 nt, Human
ugcugggauuacaagcaugagcca

SEQ ID NO: 1083372 - RNA, 20 nt, Human
ugcugggauuacaggcguga

SEQ ID NO: 1083373 - RNA, 24 nt, Human
ugcugggauuacaggcgugagcca

SEQ ID NO: 1083374 - RNA, 18 nt, Human
uggagugcaguggcgcca

SEQ ID NO: 1083375 - RNA, 28 nt, Human
uggagugcaguggcgccauccuagcacg

SEQ ID NO: 1083376 - RNA, 23 nt, Human
uggagugcaguggcgccaucucg

SEQ ID NO: 1083377 - RNA, 28 nt, Human
uggagugcaguggcgccauggcucuagc

SEQ ID NO: 1083378 - RNA, 19 nt, Human
uggccucucagcaaccccc

SEQ ID NO: 1083379 - RNA, 19 nt, Human
uggccucucagcaaccccc

SEQ ID NO: 1083380 - RNA, 20 nt, Human
uggccucucagcaacccccc

SEQ ID NO: 1083381 - RNA, 24 nt, Human
uggcgccaucucgccucacuacaa

SEQ ID NO: 1083382 - RNA, 21 nt, Human
uggcuaaaaaagggcaagcau

SEQ ID NO: 1083383 - RNA, 21 nt, Human
ugggauuacaagcaugagcca

SEQ ID NO: 1083384 - RNA, 22 nt, Human
ugggauuacaagcaugagccac

SEQ ID NO: 1083385 - RNA, 23 nt, Human
ugggauuacaagcaugagccacc

SEQ ID NO: 1083386 - RNA, 24 nt, Human
ugggauuacaagcaugagccaccg

SEQ ID NO: 1083387 - RNA, 24 nt, Human
ugggauuacaagcaugagccaccg

SEQ ID NO: 1083388 - RNA, 18 nt, Human
ugggauuacaggcgugag

SEQ ID NO: 1083389 - RNA, 19 nt, Human
ugggauuacaggcgugagc

SEQ ID NO: 1083390 - RNA, 21 nt, Human
ugggauuacaggcgugagcca

SEQ ID NO: 1083391 - RNA, 22 nt, Human
ugggauuacaggcgugagccac

SEQ ID NO: 1083392 - RNA, 22 nt, Human
ugggauuacaggcgugagccac

SEQ ID NO: 1083393 - RNA, 24 nt, Human
ugggauuacaggcgugagccacug

SEQ ID NO: 1083394 - RNA, 26 nt, Human
ugggauuacaggcgugagccacugca

SEQ ID NO: 1083395 - RNA, 24 nt, Human
uguacaaauccacagcaauuaaga

SEQ ID NO: 1083396 - RNA, 21 nt, Human
uguauuuuuaguagagacggg

SEQ ID NO: 1083397 - RNA, 22 nt, Human
uuaguagacaggguuucaucau

SEQ ID NO: 1083398 - RNA, 23 nt, Human
uuaguagacaggguuucaucaug

SEQ ID NO: 1083399 - RNA, 18 nt, Human
uuaguagagacgggguuu

SEQ ID NO: 1083400 - RNA, 22 nt, Human
uuaguagagacgggguuucacc

SEQ ID NO: 1083401 - RNA, 24 nt, Human
uuaguagagacgggguuucaccau

SEQ ID NO: 1083402 - RNA, 24 nt, Human
uugaaaagacagcucaucaaaaau

SEQ ID NO: 1083403 - RNA, 20 nt, Human
uugcgcgagacuccaacggg

SEQ ID NO: 1083404 - RNA, 23 nt, Human
uuguauuuuuaguagagacgggg

SEQ ID NO: 1083405 - RNA, 23 nt, Human
uuuaguagacaggguuucaucau

SEQ ID NO: 1083406 - RNA, 19 nt, Human
uuucaccauguuagccagg

SEQ ID NO: 1083407 - RNA, 20 nt, Human
uuucaccauguuagccagga

SEQ ID NO: 1083408 - RNA, 19 nt, Human
uuucaucauguugaccagg

SEQ ID NO: 1083409 - RNA, 21 nt, Human
uuuuuaguagacaggguuuca

SEQ ID NO: 1083410 - RNA, 24 nt, Human
uuuuuaguagagacgggguuucac

SEQ ID NO: 1083411 - RNA, 18 nt, Human
uuuuuguauuuuuaguag

SEQ ID NO: 1083412 - RNA, 19 nt, Human
uuuuuguauuuuuaguaga

SEQ ID NO: 1083413 - RNA, 21 nt, Human
uuuuuguauuuuuaguagaca

SEQ ID NO: 1083414 - RNA, 21 nt, Human
uuuuuguauuuuuaguagaga

SEQ ID NO: 1083415 - RNA, 21 nt, Human
uuuuuuguauuuuuaguagag

SEQ ID NO: 1083416 - RNA, 24 nt, Human
uuuuuuguauuuuuaguagagacg

SEQ ID NO: 1083417 - RNA, 22 nt, Human
agcaagaccucauuugggccug

SEQ ID NO: 1083418 - RNA, 21 nt, Human
gcaagaccucauuugggccug

SEQ ID NO: 1083419 - RNA, 18 nt, Human
ggccugguucagggauag

SEQ ID NO: 1083420 - RNA, 19 nt, Human
ucagaaauacauaucugaa

SEQ ID NO: 1083421 - RNA, 24 nt, Human
ugaguuuuccagcauauuucacuu

SEQ ID NO: 1083422 - RNA, 19 nt, Human
aaacacuuugugcagaagg

SEQ ID NO: 1083423 - RNA, 20 nt, Human
aaacucaaccuuccuuaacc

SEQ ID NO: 1083424 - RNA, 20 nt, Human
aaauaucgaaaguuaagaau

SEQ ID NO: 1083425 - RNA, 21 nt, Human
aaauuacuggaacccugagcu

SEQ ID NO: 1083426 - RNA, 18 nt, Human
aacacuuugugcagaagg

SEQ ID NO: 1083427 - RNA, 21 nt, Human
aacccacuccucugcucucca

SEQ ID NO: 1083428 - RNA, 20 nt, Human
aaccccuuguagagaugcac

SEQ ID NO: 1083429 - RNA, 18 nt, Human
aacccugguugcccacug

SEQ ID NO: 1083430 - RNA, 22 nt, Human
aagaggacuuugauuccccuag

SEQ ID NO: 1083431 - RNA, 19 nt, Human
aaguaauagaggucuacaa

SEQ ID NO: 1083432 - RNA, 20 nt, Human
aaguagggaggagaauuggu

SEQ ID NO: 1083433 - RNA, 18 nt, Human
aaucagagugcagggcca

SEQ ID NO: 1083434 - RNA, 25 nt, Human
acaaacuuucaaaaaugaugacaag

SEQ ID NO: 1083435 - RNA, 21 nt, Human
acaagcaaugccucagauucu

SEQ ID NO: 1083436 - RNA, 19 nt, Human
acaauggcuuugaggagau

SEQ ID NO: 1083437 - RNA, 21 nt, Human
acacugaggaccaggaauggc

SEQ ID NO: 1083438 - RNA, 18 nt, Human
acauuaagaaaagcaggc

SEQ ID NO: 1083439 - RNA, 21 nt, Human
accacagccacauuacacauc

SEQ ID NO: 1083440 - RNA, 24 nt, Human
accacagccacauuacacaucuug

SEQ ID NO: 1083441 - RNA, 18 nt, Human
acccugguugcccacugg

SEQ ID NO: 1083442 - RNA, 22 nt, Human
acugcuucaucuguguuccacc

SEQ ID NO: 1083443 - RNA, 23 nt, Human
acuguggaccauggcuuacaccu

SEQ ID NO: 1083444 - RNA, 26 nt, Human
agaggaaaggaagccauaucagagag

SEQ ID NO: 1083445 - RNA, 21 nt, Human
agcaacaacagucacacugaa

SEQ ID NO: 1083446 - RNA, 23 nt, Human
agcagaauuaaucaacucaauaa

SEQ ID NO: 1083447 - RNA, 19 nt, Human
agcauccagucuggcugca

SEQ ID NO: 1083448 - RNA, 25 nt, Human
aggaagaucagaaacaaggcaacug

SEQ ID NO: 1083449 - RNA, 24 nt, Human
aggagaagagcugagcagacaaaa

SEQ ID NO: 1083450 - RNA, 24 nt, Human
agggaggagaauugguaggaccug

SEQ ID NO: 1083451 - RNA, 24 nt, Human
aggggacgugaagaugacucugag

SEQ ID NO: 1083452 - RNA, 24 nt, Human
aguagggaggagaauugguaggac

SEQ ID NO: 1083453 - RNA, 18 nt, Human
agugguucugccuuccgu

SEQ ID NO: 1083454 - RNA, 21 nt, Human
auaugcuagggguugaaugua

SEQ ID NO: 1083455 - RNA, 18 nt, Human
augauaauuugcugccac

SEQ ID NO: 1083456 - RNA, 23 nt, Human
auggcuuacaccuucagagcacu

SEQ ID NO: 1083457 - RNA, 22 nt, Human
auucagagagcaucuccacugu

SEQ ID NO: 1083458 - RNA, 19 nt, Human
caaaaguaauagaggucua

SEQ ID NO: 1083459 - RNA, 19 nt, Human
caaaaguaauagaggucua

SEQ ID NO: 1083460 - RNA, 21 nt, Human
caacacugaggaccaggaaug

SEQ ID NO: 1083461 - RNA, 26 nt, Human
caagagcagaauuaaucaacucaaua

SEQ ID NO: 1083462 - RNA, 23 nt, Human
cacugcacacucuccaagcccaa

SEQ ID NO: 1083463 - RNA, 21 nt, Human
cacugcucccugaaaaagugg

SEQ ID NO: 1083464 - RNA, 21 nt, Human
cagcauaaaucccaacccacu

SEQ ID NO: 1083465 - RNA, 19 nt, Human
caggaaaacugaauagauu

SEQ ID NO: 1083466 - RNA, 20 nt, Human
cccacuccucugcucuccac

SEQ ID NO: 1083467 - RNA, 22 nt, Human
cccauacugcaaaaucaucagg

SEQ ID NO: 1083468 - RNA, 22 nt, Human
cccaugacaagcaaugccucag

SEQ ID NO: 1083469 - RNA, 18 nt, Human
ccccagaaaccacaaacu

SEQ ID NO: 1083470 - RNA, 22 nt, Human
cccugaaaaagugguccucaaa

SEQ ID NO: 1083471 - RNA, 18 nt, Human
cccuuggccaacacugag

SEQ ID NO: 1083472 - RNA, 25 nt, Human
ccucaaagugcacuuucuggcuaca

SEQ ID NO: 1083473 - RNA, 23 nt, Human
ccuuacauccaaccccuuguaga

SEQ ID NO: 1083474 - RNA, 24 nt, Human
cuaaagcaacaacagucacacuga

SEQ ID NO: 1083475 - RNA, 23 nt, Human
cucaagcaagcauaaaaucaaug

SEQ ID NO: 1083476 - RNA, 25 nt, Human
cucacagcagccugacaccacagcc

SEQ ID NO: 1083477 - RNA, 27 nt, Human
cucccauacugcaaaaucaucaggcug

SEQ ID NO: 1083478 - RNA, 22 nt, Human
cucccugaaaaagugguccuca

SEQ ID NO: 1083479 - RNA, 23 nt, Human
cugacaccacagccacauuacac

SEQ ID NO: 1083480 - RNA, 20 nt, Human
cugagcucuuucuucuucuu

SEQ ID NO: 1083481 - RNA, 21 nt, Human
cuucagaaauuacuggaaccc

SEQ ID NO: 1083482 - RNA, 19 nt, Human
cuucagagcacucugacau

SEQ ID NO: 1083483 - RNA, 21 nt, Human
cuucucuacaggaaaacugaa

SEQ ID NO: 1083484 - RNA, 23 nt, Human
cuugaaggaucccuuggccaaca

SEQ ID NO: 1083485 - RNA, 23 nt, Human
gaaaugcuaauucaaagaaucug

SEQ ID NO: 1083486 - RNA, 21 nt, Human
gaagaucagaaacaaggcaac

SEQ ID NO: 1083487 - RNA, 18 nt, Human
gaaucaucugaggagcug

SEQ ID NO: 1083488 - RNA, 22 nt, Human
gacauuaagaaaagcaggcagc

SEQ ID NO: 1083489 - RNA, 20 nt, Human
gacccuggacaggacuuuga

SEQ ID NO: 1083490 - RNA, 24 nt, Human
gagaggccugagaacacucacuga

SEQ ID NO: 1083491 - RNA, 23 nt, Human
gagccagcuucagaaauuacugg

SEQ ID NO: 1083492 - RNA, 19 nt, Human
gaugacaaggggaagagau

SEQ ID NO: 1083493 - RNA, 22 nt, Human
gcagcauaaaucccaacccacu

SEQ ID NO: 1083494 - RNA, 18 nt, Human
gcaguggugggguucugg

SEQ ID NO: 1083495 - RNA, 24 nt, Human
gcuggagcaaugcagcauaaaucc

SEQ ID NO: 1083496 - RNA, 21 nt, Human
ggacuguggggcagggugagg

SEQ ID NO: 1083497 - RNA, 21 nt, Human
ggagaauugguaggaccugaa

SEQ ID NO: 1083498 - RNA, 19 nt, Human
ggaggucaagcucuguuac

SEQ ID NO: 1083499 - RNA, 25 nt, Human
ggauaguagcaguggagaccauaag

SEQ ID NO: 1083500 - RNA, 20 nt, Human
ggccaggaggucaagcucug

SEQ ID NO: 1083501 - RNA, 19 nt, Human
gggcagggugaggauaguu

SEQ ID NO: 1083502 - RNA, 23 nt, Human
gguggggugaggagaggccugag

SEQ ID NO: 1083503 - RNA, 18 nt, Human
gugguuguacaguuaucc

SEQ ID NO: 1083504 - RNA, 20 nt, Human
guuagucaggaggcacugca

SEQ ID NO: 1083505 - RNA, 23 nt, Human
uaagacugcuucaucuguguucc

SEQ ID NO: 1083506 - RNA, 20 nt, Human
uaagguaagaguaaagaagg

SEQ ID NO: 1083507 - RNA, 22 nt, Human
uaccuuacauccaaccccuugu

SEQ ID NO: 1083508 - RNA, 20 nt, Human
uacuguagacccuggacagg

SEQ ID NO: 1083509 - RNA, 23 nt, Human
uagacucaugaguccuuucucaa

SEQ ID NO: 1083510 - RNA, 18 nt, Human
uaggaccugaagccagag

SEQ ID NO: 1083511 - RNA, 20 nt, Human
uaggaccugaagccagagag

SEQ ID NO: 1083512 - RNA, 18 nt, Human
uaggagaugcaugcagga

SEQ ID NO: 1083513 - RNA, 18 nt, Human
uaggagggaaaggcagug

SEQ ID NO: 1083514 - RNA, 23 nt, Human
uagggaggagaauugguaggacc

SEQ ID NO: 1083515 - RNA, 23 nt, Human
uaggguagggccauccacauguc

SEQ ID NO: 1083516 - RNA, 24 nt, Human
ucaacuuuccuucucugauuuuag

SEQ ID NO: 1083517 - RNA, 22 nt, Human
ucaagcucuguuacuauguaac

SEQ ID NO: 1083518 - RNA, 19 nt, Human
ucacagcagccugacacca

SEQ ID NO: 1083519 - RNA, 22 nt, Human
uccacaaacucaaccuuccuua

SEQ ID NO: 1083520 - RNA, 18 nt, Human
uccagcuaggagaugcau

SEQ ID NO: 1083521 - RNA, 24 nt, Human
uccagucucauacaucugcauccc

SEQ ID NO: 1083522 - RNA, 23 nt, Human
uccagucuggcugcagagaaagu

SEQ ID NO: 1083523 - RNA, 24 nt, Human
ucccaacccacuccucugcucucc

SEQ ID NO: 1083524 - RNA, 20 nt, Human
ucccugaggagugguucugc

SEQ ID NO: 1083525 - RNA, 22 nt, Human
ucuaagugggugaucguguggc

SEQ ID NO: 1083526 - RNA, 23 nt, Human
ucuggcuacaauggccacagagg

SEQ ID NO: 1083527 - RNA, 24 nt, Human
ucuggguuaagaaauaucuaagac

SEQ ID NO: 1083528 - RNA, 22 nt, Human
ucuuucuucuucuugugguucc

SEQ ID NO: 1083529 - RNA, 21 nt, Human
ugaaagaugcuggagcaaugc

SEQ ID NO: 1083530 - RNA, 25 nt, Human
ugaaagaugcuggagcaaugcagca

SEQ ID NO: 1083531 - RNA, 21 nt, Human
ugacaaggggaagagaugaaa

SEQ ID NO: 1083532 - RNA, 21 nt, Human
ugacaaggggaagagaugaaa

SEQ ID NO: 1083533 - RNA, 24 nt, Human
ugagaacacucacugauagccucc

SEQ ID NO: 1083534 - RNA, 23 nt, Human
ugauuuuagaucuauucagagag

SEQ ID NO: 1083535 - RNA, 23 nt, Human
ugcacuuucuggcuacaauggcc

SEQ ID NO: 1083536 - RNA, 20 nt, Human
ugcagagaaaguagggagga

SEQ ID NO: 1083537 - RNA, 21 nt, Human
ugcagcauaaaucccaaccca

SEQ ID NO: 1083538 - RNA, 18 nt, Human
ugcaucccugaggagugg

SEQ ID NO: 1083539 - RNA, 19 nt, Human
uggaacccugagcucuuuc

SEQ ID NO: 1083540 - RNA, 22 nt, Human
uggagaccauaagcaguggugg

SEQ ID NO: 1083541 - RNA, 21 nt, Human
uggauggaggugcugaggaag

SEQ ID NO: 1083542 - RNA, 21 nt, Human
uggauggaggugcugaggaag

SEQ ID NO: 1083543 - RNA, 19 nt, Human
uggcuacaauggccacaga

SEQ ID NO: 1083544 - RNA, 18 nt, Human
ugggaaaagcagggaugg

SEQ ID NO: 1083545 - RNA, 18 nt, Human
ugguggggugaggagagg

SEQ ID NO: 1083546 - RNA, 21 nt, Human
uguuacuauguaacaaggaga

SEQ ID NO: 1083547 - RNA, 23 nt, Human
uuaagaauagagaccaggcuuac

SEQ ID NO: 1083548 - RNA, 23 nt, Human
uuaguuccucagggcccuuccua

SEQ ID NO: 1083549 - RNA, 19 nt, Human
uuccucagggcccuuccua

SEQ ID NO: 1083550 - RNA, 24 nt, Human
uucuucuucuugugguuccuuaug

SEQ ID NO: 1083551 - RNA, 18 nt, Human
uuguuguuguuguuuuua

SEQ ID NO: 1083552 - RNA, 22 nt, Human
aaacucgaaacuagggcuggua

SEQ ID NO: 1083553 - RNA, 21 nt, Human
aaccagaggaagggagaaggc

SEQ ID NO: 1083554 - RNA, 24 nt, Human
aaccuagcucuccaagggaggcug

SEQ ID NO: 1083555 - RNA, 26 nt, Human
aagaaucaggugaggcacugaugcaa

SEQ ID NO: 1083556 - RNA, 19 nt, Human
aagcagccuacuugaacau

SEQ ID NO: 1083557 - RNA, 18 nt, Human
aagggagaaggcaggcca

SEQ ID NO: 1083558 - RNA, 23 nt, Human
aagguuuuauugugauugacuuu

SEQ ID NO: 1083559 - RNA, 20 nt, Human
aauauucaaaauguugaaaa

SEQ ID NO: 1083560 - RNA, 22 nt, Human
agaaggcaggccaaaccaagca

SEQ ID NO: 1083561 - RNA, 22 nt, Human
agaggaagggagaaggcaggcc

SEQ ID NO: 1083562 - RNA, 18 nt, Human
aggcauaggaggagaggc

SEQ ID NO: 1083563 - RNA, 24 nt, Human
aggggaaaugucaugagcuuucuc

SEQ ID NO: 1083564 - RNA, 23 nt, Human
aucauuccacaacagaggagggu

SEQ ID NO: 1083565 - RNA, 23 nt, Human
augacauucaaccagaggaaggg

SEQ ID NO: 1083566 - RNA, 23 nt, Human
auuacaacaaaaaagagcuguag

SEQ ID NO: 1083567 - RNA, 25 nt, Human
caaaaaagagcuguaguaaaccuua

SEQ ID NO: 1083568 - RNA, 25 nt, Human
caacaaaaaagagcuguaguaaacc

SEQ ID NO: 1083569 - RNA, 19 nt, Human
cagagcagauaaacaauau

SEQ ID NO: 1083570 - RNA, 25 nt, Human
cagagcagauaaacaauaugcagua

SEQ ID NO: 1083571 - RNA, 19 nt, Human
cagaggaagggagaaggca

SEQ ID NO: 1083572 - RNA, 28 nt, Human
caggauggcuccuggagcuccagucauc

SEQ ID NO: 1083573 - RNA, 27 nt, Human
cauauaauccacugauaugaaaacauc

SEQ ID NO: 1083574 - RNA, 24 nt, Human
cauauucaugcaugcaucuguaug

SEQ ID NO: 1083575 - RNA, 25 nt, Human
cauauucaugcaugcaucuguaugu

SEQ ID NO: 1083576 - RNA, 20 nt, Human
cauuuugcacuuuuguugcu

SEQ ID NO: 1083577 - RNA, 24 nt, Human
cauuuugcacuuuuguugcuuuuu

SEQ ID NO: 1083578 - RNA, 22 nt, Human
ccacauaucuaguuauagagaa

SEQ ID NO: 1083579 - RNA, 21 nt, Human
ccacccaguggcuuggagccc

SEQ ID NO: 1083580 - RNA, 22 nt, Human
ccacccucaaggucagaaauuc

SEQ ID NO: 1083581 - RNA, 20 nt, Human
ccagucaucaagaugacauu

SEQ ID NO: 1083582 - RNA, 24 nt, Human
ccaguuaaucagaacugaggcaga

SEQ ID NO: 1083583 - RNA, 23 nt, Human
cucucacaccguaggaguggcug

SEQ ID NO: 1083584 - RNA, 27 nt, Human
cugacucaugggaaggcauaggaggag

SEQ ID NO: 1083585 - RNA, 21 nt, Human
cugggaggggucacccuggua

SEQ ID NO: 1083586 - RNA, 24 nt, Human
cuuccuggguuuuaccagccccua

SEQ ID NO: 1083587 - RNA, 24 nt, Human
gaaaaagauuuuuucuuuugugaa

SEQ ID NO: 1083588 - RNA, 19 nt, Human
gaagcaggcggggguaaua

SEQ ID NO: 1083589 - RNA, 18 nt, Human
gaaugugacuggcccagu

SEQ ID NO: 1083590 - RNA, 19 nt, Human
gccagcuucaaaguuaagg

SEQ ID NO: 1083591 - RNA, 24 nt, Human
gggaaggcauaggaggagaggccu

SEQ ID NO: 1083592 - RNA, 18 nt, Human
gucucuucagugcucugg

SEQ ID NO: 1083593 - RNA, 21 nt, Human
uaaacucgaaacuagggcugg

SEQ ID NO: 1083594 - RNA, 23 nt, Human
uaaagggaaaagaauaaagugga

SEQ ID NO: 1083595 - RNA, 21 nt, Human
uaacaauauccuuacucuggc

SEQ ID NO: 1083596 - RNA, 18 nt, Human
uaaccaagaaucagguga

SEQ ID NO: 1083597 - RNA, 23 nt, Human
uaaccaagaaucaggugaggcac

SEQ ID NO: 1083598 - RNA, 22 nt, Human
uaacccucuaaugacugacuca

SEQ ID NO: 1083599 - RNA, 20 nt, Human
uaaccugagcucauccuggc

SEQ ID NO: 1083600 - RNA, 22 nt, Human
uaaccugagcucauccuggcau

SEQ ID NO: 1083601 - RNA, 18 nt, Human
uacauugucaucucaaau

SEQ ID NO: 1083602 - RNA, 22 nt, Human
uagacguacugcauacuuccug

SEQ ID NO: 1083603 - RNA, 21 nt, Human
uauguaaacacgcuaagcuau

SEQ ID NO: 1083604 - RNA, 23 nt, Human
ucagaacugaggcagaugagcug

SEQ ID NO: 1083605 - RNA, 21 nt, Human
uccacaacagaggagggugaa

SEQ ID NO: 1083606 - RNA, 23 nt, Human
uccacaacagaggagggugaagc

SEQ ID NO: 1083607 - RNA, 18 nt, Human
uccccagagcacauugcu

SEQ ID NO: 1083608 - RNA, 20 nt, Human
uccuggguuuuaccagcccc

SEQ ID NO: 1083609 - RNA, 18 nt, Human
ucucucacaccguaggag

SEQ ID NO: 1083610 - RNA, 24 nt, Human
ucugguacucagccucuuccucau

SEQ ID NO: 1083611 - RNA, 20 nt, Human
ucuuccucauccuucuauca

SEQ ID NO: 1083612 - RNA, 26 nt, Human
ucuucuagcuguauacauugucaucu

SEQ ID NO: 1083613 - RNA, 19 nt, Human
ugacuguggaugguaaagu

SEQ ID NO: 1083614 - RNA, 18 nt, Human
ugagagagguaaugagua

SEQ ID NO: 1083615 - RNA, 23 nt, Human
ugagagagguaaugaguauuuac

SEQ ID NO: 1083616 - RNA, 19 nt, Human
ugagcagaaacaacucaua

SEQ ID NO: 1083617 - RNA, 21 nt, Human
ugaggcagguguccauuccug

SEQ ID NO: 1083618 - RNA, 20 nt, Human
ugaguaggcaacuacgccug

SEQ ID NO: 1083619 - RNA, 21 nt, Human
ugaguaggcaacuacgccugc

SEQ ID NO: 1083620 - RNA, 20 nt, Human
ugaucaugugcucuacuggg

SEQ ID NO: 1083621 - RNA, 19 nt, Human
ugcaaaaaugaauauaaca

SEQ ID NO: 1083622 - RNA, 24 nt, Human
uggaagcaggcggggguaauauuc

SEQ ID NO: 1083623 - RNA, 22 nt, Human
uggaauuucagauuuucaguag

SEQ ID NO: 1083624 - RNA, 21 nt, Human
uggaugguaaaguugaaucuc

SEQ ID NO: 1083625 - RNA, 19 nt, Human
uggcuccuggagcuccagu

SEQ ID NO: 1083626 - RNA, 23 nt, Human
ugggaaggcauaggaggagaggc

SEQ ID NO: 1083627 - RNA, 18 nt, Human
ugggaggggucacccugg

SEQ ID NO: 1083628 - RNA, 20 nt, Human
ugggaggggucacccuggua

SEQ ID NO: 1083629 - RNA, 19 nt, Human
uggggggaauuuuauuuac

SEQ ID NO: 1083630 - RNA, 20 nt, Human
uguagaaaguuucagggcua

SEQ ID NO: 1083631 - RNA, 28 nt, Human
uguauguaaacacgcuaagcuaugaccc

SEQ ID NO: 1083632 - RNA, 23 nt, Human
ugucaugagcuuucuccccagag

SEQ ID NO: 1083633 - RNA, 20 nt, Human
uuaaggugguuuaaacaaga

SEQ ID NO: 1083634 - RNA, 25 nt, Human
uuaauacuaaccccaccucuaagug

SEQ ID NO: 1083635 - RNA, 24 nt, Human
uucauuguaguugcuaaauauugg

SEQ ID NO: 1083636 - RNA, 25 nt, Human
uugacuuuucuuucacagaagcagu

SEQ ID NO: 1083637 - RNA, 22 nt, Human
uuggcuggaaccuagcucucca

SEQ ID NO: 1083638 - RNA, 21 nt, Human
uugugccaaacauuaacccuc

SEQ ID NO: 1083639 - RNA, 23 nt, Human
uuuaccagccccuaaauuuacuc

SEQ ID NO: 1083640 - RNA, 19 nt, Human
uuuauuuaccaaagaccua

SEQ ID NO: 1083641 - RNA, 24 nt, Human
aaaaaagaaacugagggucagaga

SEQ ID NO: 1083642 - RNA, 21 nt, Human
aaaaagccuaauaaagcaagg

SEQ ID NO: 1083643 - RNA, 19 nt, Human
aaaacacaacuccaaauau

SEQ ID NO: 1083644 - RNA, 21 nt, Human
aaagcacacaucccugugcua

SEQ ID NO: 1083645 - RNA, 20 nt, Human
aaccuguuccuucagcaccu

SEQ ID NO: 1083646 - RNA, 22 nt, Human
acacacacacgcacaugcauac

SEQ ID NO: 1083647 - RNA, 25 nt, Human
acacccuuacaagaugcacagccac

SEQ ID NO: 1083648 - RNA, 19 nt, Human
accaggcaucucugcucac

SEQ ID NO: 1083649 - RNA, 19 nt, Human
accagguagcugcaaccug

SEQ ID NO: 1083650 - RNA, 19 nt, Human
acccaucacuggcccagac

SEQ ID NO: 1083651 - RNA, 20 nt, Human
acccugaaaggaaaaaaaga

SEQ ID NO: 1083652 - RNA, 23 nt, Human
acccugagcacuccaagagacag

SEQ ID NO: 1083653 - RNA, 30 nt, Human
acugguacguaucccaguccuucccacacc

SEQ ID NO: 1083654 - RNA, 19 nt, Human
agaagagagacaacuugcu

SEQ ID NO: 1083655 - RNA, 19 nt, Human
agagagccuggggcugaag

SEQ ID NO: 1083656 - RNA, 19 nt, Human
agagcacuuccaaaugcau

SEQ ID NO: 1083657 - RNA, 22 nt, Human
agagcagaggagggugauuuug

SEQ ID NO: 1083658 - RNA, 19 nt, Human
agaguagacuagagcccag

SEQ ID NO: 1083659 - RNA, 26 nt, Human
agccaccaaaaagccuaauaaagcaa

SEQ ID NO: 1083660 - RNA, 22 nt, Human
agccuuggaaaggcaaagcagg

SEQ ID NO: 1083661 - RNA, 30 nt, Human
agcgcaugucgcacgcacacacacacgcag

SEQ ID NO: 1083662 - RNA, 21 nt, Human
agcugcucuuccccgucuccu

SEQ ID NO: 1083663 - RNA, 19 nt, Human
aggcaggaauccagguggg

SEQ ID NO: 1083664 - RNA, 21 nt, Human
agggcuggcaaagggcccgcc

SEQ ID NO: 1083665 - RNA, 18 nt, Human
agggguggaacucacuuc

SEQ ID NO: 1083666 - RNA, 21 nt, Human
aggucucuggacucccagucc

SEQ ID NO: 1083667 - RNA, 19 nt, Human
agguggggcaccaggcauc

SEQ ID NO: 1083668 - RNA, 21 nt, Human
agguggggcaccaggcaucuc

SEQ ID NO: 1083669 - RNA, 19 nt, Human
agguguggauguuccaacc

SEQ ID NO: 1083670 - RNA, 23 nt, Human
aucaaggaggcucuccaggcucc

SEQ ID NO: 1083671 - RNA, 22 nt, Human
aucaguccagugccagccuuug

SEQ ID NO: 1083672 - RNA, 19 nt, Human
aucccaguccuucccacac

SEQ ID NO: 1083673 - RNA, 22 nt, Human
aucuucccaacuggugucagcu

SEQ ID NO: 1083674 - RNA, 23 nt, Human
caaaagcacacaucccugugcua

SEQ ID NO: 1083675 - RNA, 24 nt, Human
caaagggcccgccacccugagcac

SEQ ID NO: 1083676 - RNA, 30 nt, Human
caagcgcaugucgcacgcacacacacagug

SEQ ID NO: 1083677 - RNA, 22 nt, Human
cacaugcauacacacccuuaca

SEQ ID NO: 1083678 - RNA, 20 nt, Human
caccaggcaucucugcucac

SEQ ID NO: 1083679 - RNA, 23 nt, Human
caccuuggcugcugguggugggg

SEQ ID NO: 1083680 - RNA, 26 nt, Human
cacgcacacacacacgcacaugcaua

SEQ ID NO: 1083681 - RNA, 23 nt, Human
cacugugugugcccucagcaaac

SEQ ID NO: 1083682 - RNA, 26 nt, Human
cagcucccuccuuccagauccugccu

SEQ ID NO: 1083683 - RNA, 25 nt, Human
ccccaaacccaucacuggcccagac

SEQ ID NO: 1083684 - RNA, 26 nt, Human
cccccaaacccaucacuggcccagac

SEQ ID NO: 1083685 - RNA, 27 nt, Human
cccuggggaaagggugaggggcgcugc

SEQ ID NO: 1083686 - RNA, 19 nt, Human
cccugugcuauuccccuuc

SEQ ID NO: 1083687 - RNA, 20 nt, Human
cccugugcuauuccccuuca

SEQ ID NO: 1083688 - RNA, 21 nt, Human
cccuuacaagaugcacagcca

SEQ ID NO: 1083689 - RNA, 23 nt, Human
ccgacuagccuuggaaaggcaaa

SEQ ID NO: 1083690 - RNA, 21 nt, Human
ccuauucuucccccaaaccca

SEQ ID NO: 1083691 - RNA, 25 nt, Human
ccucccagagaaugcuucacacccu

SEQ ID NO: 1083692 - RNA, 21 nt, Human
ccucuguguaggccccagucu

SEQ ID NO: 1083693 - RNA, 24 nt, Human
ccugcugucucacugggucauuug

SEQ ID NO: 1083694 - RNA, 20 nt, Human
ccugugaccugggacaggau

SEQ ID NO: 1083695 - RNA, 21 nt, Human
ccugugauuccagcuccuuuc

SEQ ID NO: 1083696 - RNA, 25 nt, Human
cgcacacacacacgcacaugcauac

SEQ ID NO: 1083697 - RNA, 25 nt, Human
cgcacgcacacacacacgcacaugc

SEQ ID NO: 1083698 - RNA, 25 nt, Human
cgcacgcacacacacacgcacaugg

SEQ ID NO: 1083699 - RNA, 20 nt, Human
cuagagcccaggucucugga

SEQ ID NO: 1083700 - RNA, 19 nt, Human
cuccaggcucccugccggc

SEQ ID NO: 1083701 - RNA, 21 nt, Human
cuccuggagcugcucuucccc

SEQ ID NO: 1083702 - RNA, 22 nt, Human
cuccuugcugccuugcugucau

SEQ ID NO: 1083703 - RNA, 21 nt, Human
cucuuccccgucuccuugcug

SEQ ID NO: 1083704 - RNA, 18 nt, Human
cuggcagggucggggugg

SEQ ID NO: 1083705 - RNA, 20 nt, Human
cuggcccagacaucaaaagc

SEQ ID NO: 1083706 - RNA, 18 nt, Human
cugggacugggcuccacu

SEQ ID NO: 1083707 - RNA, 18 nt, Human
cugggcagcucccuccuu

SEQ ID NO: 1083708 - RNA, 19 nt, Human
cugguacguaucccagucc

SEQ ID NO: 1083709 - RNA, 24 nt, Human
cugguacguaucccaguccuuccc

SEQ ID NO: 1083710 - RNA, 20 nt, Human
cuggugguggggugccugcc

SEQ ID NO: 1083711 - RNA, 21 nt, Human
cuucuuuguccucuguguccc

SEQ ID NO: 1083712 - RNA, 21 nt, Human
cuuugccucacucuuucuucc

SEQ ID NO: 1083713 - RNA, 18 nt, Human
cuuugccucccagagaau

SEQ ID NO: 1083714 - RNA, 24 nt, Human
gaauggggugugagagacuccccc

SEQ ID NO: 1083715 - RNA, 19 nt, Human
gaccacgguucaggauccg

SEQ ID NO: 1083716 - RNA, 26 nt, Human
gagcccaggucucuggacucccaguc

SEQ ID NO: 1083717 - RNA, 19 nt, Human
gccggccuucggcuccugg

SEQ ID NO: 1083718 - RNA, 21 nt, Human
gccugugcugugcaugcugca

SEQ ID NO: 1083719 - RNA, 23 nt, Human
gcgguggggcugcgaguacccag

SEQ ID NO: 1083720 - RNA, 20 nt, Human
gcugcuggugguggggugcc

SEQ ID NO: 1083721 - RNA, 19 nt, Human
gcugucaugucaccugcug

SEQ ID NO: 1083722 - RNA, 18 nt, Human
ggaaaauaaaacacaacu

SEQ ID NO: 1083723 - RNA, 19 nt, Human
ggcagcucccuccuuccag

SEQ ID NO: 1083724 - RNA, 21 nt, Human
ggcuccugggguggagguggg

SEQ ID NO: 1083725 - RNA, 21 nt, Human
gggaggagcaggagcucagag

SEQ ID NO: 1083726 - RNA, 19 nt, Human
ggggaaagggugagggcug

SEQ ID NO: 1083727 - RNA, 19 nt, Human
ggucggggugggggcacca

SEQ ID NO: 1083728 - RNA, 21 nt, Human
guccaggcccagcgccuucca

SEQ ID NO: 1083729 - RNA, 24 nt, Human
guccaggcccagcgccuuccaguc

SEQ ID NO: 1083730 - RNA, 19 nt, Human
guggaauauacaugccugc

SEQ ID NO: 1083731 - RNA, 25 nt, Human
guuccuucagcaccugggaggagac

SEQ ID NO: 1083732 - RNA, 20 nt, Human
uaaagcaaggugcccaagac

SEQ ID NO: 1083733 - RNA, 22 nt, Human
uaaagcaaggugcccaagacca

SEQ ID NO: 1083734 - RNA, 26 nt, Human
uaacccugaaaggaaaaaaagaugau

SEQ ID NO: 1083735 - RNA, 19 nt, Human
uaagaacuugggucugaga

SEQ ID NO: 1083736 - RNA, 23 nt, Human
uacguaucccaguccuucccaca

SEQ ID NO: 1083737 - RNA, 18 nt, Human
uagacuagagcccagguc

SEQ ID NO: 1083738 - RNA, 21 nt, Human
ucacuccacaaaaaagaaacu

SEQ ID NO: 1083739 - RNA, 26 nt, Human
ucacuggcccagacaucaaaagcaca

SEQ ID NO: 1083740 - RNA, 21 nt, Human
ucacugggucauuugggcgug

SEQ ID NO: 1083741 - RNA, 22 nt, Human
ucacugggucauuugggcgugu

SEQ ID NO: 1083742 - RNA, 20 nt, Human
ucagagaagagagacaacuu

SEQ ID NO: 1083743 - RNA, 19 nt, Human
ucagcucgaaacccucugu

SEQ ID NO: 1083744 - RNA, 20 nt, Human
ucccaccucugcacuuugcc

SEQ ID NO: 1083745 - RNA, 21 nt, Human
ucccagagaaugcuucacacc

SEQ ID NO: 1083746 - RNA, 21 nt, Human
ucccaguccugugcucucuca

SEQ ID NO: 1083747 - RNA, 21 nt, Human
ucccccaaacccaucacuggc

SEQ ID NO: 1083748 - RNA, 24 nt, Human
ucccugaagccaaauguuucuucu

SEQ ID NO: 1083749 - RNA, 19 nt, Human
ucccuggggaaagggugag

SEQ ID NO: 1083750 - RNA, 22 nt, Human
ucccuggggaaagggugagggc

SEQ ID NO: 1083751 - RNA, 28 nt, Human
ucccuggggaaagggugaggggcgcugc

SEQ ID NO: 1083752 - RNA, 19 nt, Human
ucccuguucuccaccccau

SEQ ID NO: 1083753 - RNA, 21 nt, Human
ucuccaggcucccugccggcc

SEQ ID NO: 1083754 - RNA, 23 nt, Human
ucucugcucaccuuggcugcugg

SEQ ID NO: 1083755 - RNA, 18 nt, Human
ucucuggacucccagucc

SEQ ID NO: 1083756 - RNA, 18 nt, Human
ucugaauucagcauagag

SEQ ID NO: 1083757 - RNA, 20 nt, Human
ucugcacuuugccucacucu

SEQ ID NO: 1083758 - RNA, 23 nt, Human
ucuguggucugcagugcucagcc

SEQ ID NO: 1083759 - RNA, 18 nt, Human
ugaagccaaauguuucuu

SEQ ID NO: 1083760 - RNA, 19 nt, Human
ugaagggugggaggaaaga

SEQ ID NO: 1083761 - RNA, 20 nt, Human
ugacccgagucacagaguag

SEQ ID NO: 1083762 - RNA, 23 nt, Human
ugacuccuggagcugcucuuccc

SEQ ID NO: 1083763 - RNA, 21 nt, Human
ugagggucagagaagagagac

SEQ ID NO: 1083764 - RNA, 21 nt, Human
ugagggucuuguccaaggcua

SEQ ID NO: 1083765 - RNA, 18 nt, Human
ugcacagccaccaaaaag

SEQ ID NO: 1083766 - RNA, 24 nt, Human
ugccucacucuuucuuccugccca

SEQ ID NO: 1083767 - RNA, 22 nt, Human
ugccugugcugugcaugcugca

SEQ ID NO: 1083768 - RNA, 23 nt, Human
ugcucaaggccauuugauuggag

SEQ ID NO: 1083769 - RNA, 20 nt, Human
ugcugcagcuuuggcagggu

SEQ ID NO: 1083770 - RNA, 25 nt, Human
ugcuucacacccuauucuuccccca

SEQ ID NO: 1083771 - RNA, 22 nt, Human
uggaaaauaaaacacaacucca

SEQ ID NO: 1083772 - RNA, 21 nt, Human
uggaauauacaugccugccuc

SEQ ID NO: 1083773 - RNA, 21 nt, Human
ugggaggaaagagccuggugg

SEQ ID NO: 1083774 - RNA, 23 nt, Human
ugggaggagacacagagucuggu

SEQ ID NO: 1083775 - RNA, 20 nt, Human
ugggguggaggugggcgugg

SEQ ID NO: 1083776 - RNA, 23 nt, Human
ugggguggaggugggcguggggu

SEQ ID NO: 1083777 - RNA, 22 nt, Human
uggggugugagagacuccccug

SEQ ID NO: 1083778 - RNA, 24 nt, Human
ugguggggugccugccugugcugu

SEQ ID NO: 1083779 - RNA, 19 nt, Human
uggugucagcucgaaaccc

SEQ ID NO: 1083780 - RNA, 19 nt, Human
ugucaaacucuggucugug

SEQ ID NO: 1083781 - RNA, 19 nt, Human
ugucaugucaccugcuguc

SEQ ID NO: 1083782 - RNA, 21 nt, Human
ugucaugucaccugcugucuc

SEQ ID NO: 1083783 - RNA, 19 nt, Human
ugugagagacuccccuggg

SEQ ID NO: 1083784 - RNA, 27 nt, Human
ugugcuauuccccuucaaagagcuuca

SEQ ID NO: 1083785 - RNA, 21 nt, Human
uguggucugcagugcucagcc

SEQ ID NO: 1083786 - RNA, 24 nt, Human
ugugugcccucagcaaacaaggca

SEQ ID NO: 1083787 - RNA, 19 nt, Human
uuccaggucugggcagcuc

SEQ ID NO: 1083788 - RNA, 21 nt, Human
uuccccuucaaagagcuucau

SEQ ID NO: 1083789 - RNA, 22 nt, Human
uucccugaagccaaauguuucu

SEQ ID NO: 1083790 - RNA, 19 nt, Human
uucccuuuaagaacuuggg

SEQ ID NO: 1083791 - RNA, 22 nt, Human
uucuucuuuguccucugugucc

SEQ ID NO: 1083792 - RNA, 23 nt, Human
uucuucuuuguccucuguguccc

SEQ ID NO: 1083793 - RNA, 19 nt, Human
uugccugacuccuggagcu

SEQ ID NO: 1083794 - RNA, 19 nt, Human
uugcucaaggccauuugau

SEQ ID NO: 1083795 - RNA, 21 nt, Human
uugcugucaugucaccugcug

SEQ ID NO: 1083796 - RNA, 25 nt, Human
uugggcgugugccccucgcacgccu

SEQ ID NO: 1083797 - RNA, 22 nt, Human
uuuuucuccuucccuguucucc

SEQ ID NO: 1083798 - RNA, 22 nt, Human
aaaacaggagucgagacccagg

SEQ ID NO: 1083799 - RNA, 22 nt, Human
acugcaaugggaaccgcagaac

SEQ ID NO: 1083800 - RNA, 22 nt, Human
agagagggcggacgggggccga

SEQ ID NO: 1083801 - RNA, 19 nt, Human
agagugcaguuggccaacu

SEQ ID NO: 1083802 - RNA, 18 nt, Human
aggccgccgagcagggag

SEQ ID NO: 1083803 - RNA, 19 nt, Human
aggccucggggcugggggc

SEQ ID NO: 1083804 - RNA, 22 nt, Human
aggccucggggcugggggcaac

SEQ ID NO: 1083805 - RNA, 23 nt, Human
aggucuccugcaugauaauaccu

SEQ ID NO: 1083806 - RNA, 20 nt, Human
aucucccuccagcccugaca

SEQ ID NO: 1083807 - RNA, 23 nt, Human
auuccagaaagcucuccaagggu

SEQ ID NO: 1083808 - RNA, 21 nt, Human
auuuaguuuucccaagccaag

SEQ ID NO: 1083809 - RNA, 18 nt, Human
cacccgguucccgggggc

SEQ ID NO: 1083810 - RNA, 21 nt, Human
cacuuccgcggagguccugcc

SEQ ID NO: 1083811 - RNA, 23 nt, Human
cagccucugcagagugugccccc

SEQ ID NO: 1083812 - RNA, 28 nt, Human
ccagaaagcucuccaagggucaaacacc

SEQ ID NO: 1083813 - RNA, 24 nt, Human
cccccaagagucuguggcagugga

SEQ ID NO: 1083814 - RNA, 22 nt, Human
ccccccgccgccccgccugggc

SEQ ID NO: 1083815 - RNA, 18 nt, Human
cccccgccgccccgccug

SEQ ID NO: 1083816 - RNA, 19 nt, Human
cccgccgccccgccugggc

SEQ ID NO: 1083817 - RNA, 19 nt, Human
cccggugcugcugcggccg

SEQ ID NO: 1083818 - RNA, 19 nt, Human
cccgguucccgggggcggg

SEQ ID NO: 1083819 - RNA, 22 nt, Human
ccgccccgccugggccuccaag

SEQ ID NO: 1083820 - RNA, 22 nt, Human
ccgcccggugcugcugcggccg

SEQ ID NO: 1083821 - RNA, 24 nt, Human
ccgcccggugcugcugcggccgcg

SEQ ID NO: 1083822 - RNA, 24 nt, Human
ccgccgccccgccugggccuccaa

SEQ ID NO: 1083823 - RNA, 23 nt, Human
ccuccagaugaaccugagcucac

SEQ ID NO: 1083824 - RNA, 22 nt, Human
ccuccagaugaaccugagcucu

SEQ ID NO: 1083825 - RNA, 21 nt, Human
ccuccccacuuuccuucccug

SEQ ID NO: 1083826 - RNA, 21 nt, Human
ccucggggcugggggcaggcg

SEQ ID NO: 1083827 - RNA, 20 nt, Human
ccugccgcgucgccccccgc

SEQ ID NO: 1083828 - RNA, 24 nt, Human
ccugggccuccaaggggccaggaa

SEQ ID NO: 1083829 - RNA, 18 nt, Human
cgccccccgccgccccgc

SEQ ID NO: 1083830 - RNA, 20 nt, Human
cgcccggugcugcugcggcc

SEQ ID NO: 1083831 - RNA, 22 nt, Human
cgccugggccuccaaggggcca

SEQ ID NO: 1083832 - RNA, 21 nt, Human
cgcgggagccugggcgcggag

SEQ ID NO: 1083833 - RNA, 19 nt, Human
cggccguacgcgggcagcg

SEQ ID NO: 1083834 - RNA, 20 nt, Human
cggugcugcugcggccgcga

SEQ ID NO: 1083835 - RNA, 22 nt, Human
cuaggagacaagcgccacuucc

SEQ ID NO: 1083836 - RNA, 21 nt, Human
cuccagaugaaccugagcucc

SEQ ID NO: 1083837 - RNA, 18 nt, Human
cugcaucuccucucugcc

SEQ ID NO: 1083838 - RNA, 22 nt, Human
cugcaucuccucucugccuguu

SEQ ID NO: 1083839 - RNA, 21 nt, Human
cugcaugauaauaccugggcu

SEQ ID NO: 1083840 - RNA, 21 nt, Human
cugccgccgccuccagagugc

SEQ ID NO: 1083841 - RNA, 18 nt, Human
gagacccaggugaagggg

SEQ ID NO: 1083842 - RNA, 22 nt, Human
gagacccaggugaagggggcca

SEQ ID NO: 1083843 - RNA, 21 nt, Human
gcagcgcggacagcaucccgc

SEQ ID NO: 1083844 - RNA, 19 nt, Human
gcaguccuccucggggucc

SEQ ID NO: 1083845 - RNA, 18 nt, Human
gccaggaagggucggccc

SEQ ID NO: 1083846 - RNA, 22 nt, Human
gccgcgaccccaaagugggaac

SEQ ID NO: 1083847 - RNA, 22 nt, Human
gccuguuggcaacaccaggaag

SEQ ID NO: 1083848 - RNA, 24 nt, Human
gcuccguuucuggagagcccuggc

SEQ ID NO: 1083849 - RNA, 19 nt, Human
gcugggggcaggcgucucc

SEQ ID NO: 1083850 - RNA, 18 nt, Human
ggccgaggccucggggcu

SEQ ID NO: 1083851 - RNA, 23 nt, Human
gggcaguccuccucggggucccg

SEQ ID NO: 1083852 - RNA, 18 nt, Human
uaccugggcuccaacuag

SEQ ID NO: 1083853 - RNA, 19 nt, Human
uauuuaguuuucccaagcc

SEQ ID NO: 1083854 - RNA, 19 nt, Human
uccacucaggccgcggccg

SEQ ID NO: 1083855 - RNA, 21 nt, Human
uccacucaggccgcggccgua

SEQ ID NO: 1083856 - RNA, 21 nt, Human
ucccgcaugcgcguuugggcg

SEQ ID NO: 1083857 - RNA, 19 nt, Human
ucccgcccggugcugcugc

SEQ ID NO: 1083858 - RNA, 21 nt, Human
ucccgggacagccuuucccuu

SEQ ID NO: 1083859 - RNA, 18 nt, Human
ucccugugugugguauaa

SEQ ID NO: 1083860 - RNA, 22 nt, Human
ucgccuaggagacaagcgccac

SEQ ID NO: 1083861 - RNA, 19 nt, Human
ucgcuggcugccgccgccu

SEQ ID NO: 1083862 - RNA, 21 nt, Human
ucgcuggcugccgccgccucc

SEQ ID NO: 1083863 - RNA, 24 nt, Human
ucggagguggucucguguguggag

SEQ ID NO: 1083864 - RNA, 22 nt, Human
ucucaagaucucccuccagccc

SEQ ID NO: 1083865 - RNA, 21 nt, Human
ucugccuguuggcaacaccag

SEQ ID NO: 1083866 - RNA, 19 nt, Human
ugaagggggccagccccuc

SEQ ID NO: 1083867 - RNA, 19 nt, Human
ugaucucaagaucucccuc

SEQ ID NO: 1083868 - RNA, 21 nt, Human
ugcugcggccgcgaccccaaa

SEQ ID NO: 1083869 - RNA, 23 nt, Human
uggcugcaucuccucucugccug

SEQ ID NO: 1083870 - RNA, 20 nt, Human
uggcugccgccgccuccaga

SEQ ID NO: 1083871 - RNA, 20 nt, Human
ugggcgcggagaccccugcc

SEQ ID NO: 1083872 - RNA, 25 nt, Human
ugggggcaggcgucuccacucaggc

SEQ ID NO: 1083873 - RNA, 18 nt, Human
uguguggagcagagcgag

SEQ ID NO: 1083874 - RNA, 23 nt, Human
uuagaugggcuccguuucuggag

SEQ ID NO: 1083875 - RNA, 18 nt, Human
uuccugagcuucuggggg

SEQ ID NO: 1083876 - RNA, 21 nt, Human
uugaggccgagcccauccgcu

SEQ ID NO: 1083877 - RNA, 20 nt, Human
uuggcccguuugaaaugcgc

SEQ ID NO: 1083878 - RNA, 23 nt, Human
uuuccugagcuucugggggguca

SEQ ID NO: 1083879 - RNA, 19 nt, Human
uuucuugaaauccagaagc

SEQ ID NO: 1083880 - RNA, 18 nt, Human
aacuccuagcccaguccc

SEQ ID NO: 1083881 - RNA, 19 nt, Human
aagcaagagguggcccugg

SEQ ID NO: 1083882 - RNA, 24 nt, Human
aagcggcggcaaccgaggcgagca

SEQ ID NO: 1083883 - RNA, 24 nt, Human
aaguccccucccagaucugugacc

SEQ ID NO: 1083884 - RNA, 20 nt, Human
acagucccagaagggcccag

SEQ ID NO: 1083885 - RNA, 22 nt, Human
acccucccuguccucuccuggu

SEQ ID NO: 1083886 - RNA, 21 nt, Human
acccugauguccccaauucca

SEQ ID NO: 1083887 - RNA, 21 nt, Human
accuaugcaaccugcagcccc

SEQ ID NO: 1083888 - RNA, 22 nt, Human
acugaguccuggagguggucgu

SEQ ID NO: 1083889 - RNA, 18 nt, Human
acuugcaugacacuuccc

SEQ ID NO: 1083890 - RNA, 20 nt, Human
acuugcaugacacuucccuc

SEQ ID NO: 1083891 - RNA, 19 nt, Human
agaaagacaauaggcugcc

SEQ ID NO: 1083892 - RNA, 20 nt, Human
agaacccucccuguccucuc

SEQ ID NO: 1083893 - RNA, 22 nt, Human
agaacccucccuguccucuccu

SEQ ID NO: 1083894 - RNA, 20 nt, Human
agaagagggaagccgggggg

SEQ ID NO: 1083895 - RNA, 19 nt, Human
agagagggagggggguggg

SEQ ID NO: 1083896 - RNA, 18 nt, Human
agagaggggccucuggcg

SEQ ID NO: 1083897 - RNA, 21 nt, Human
agaggccaguguguguggggu

SEQ ID NO: 1083898 - RNA, 20 nt, Human
agagggaagccggggggguu

SEQ ID NO: 1083899 - RNA, 26 nt, Human
agagggaggggggugggaaucugagc

SEQ ID NO: 1083900 - RNA, 21 nt, Human
agcagacucacggaccuuggc

SEQ ID NO: 1083901 - RNA, 22 nt, Human
agccuccccugcuccugccugc

SEQ ID NO: 1083902 - RNA, 23 nt, Human
agcuucucccuccaucuuccucc

SEQ ID NO: 1083903 - RNA, 19 nt, Human
aggagcagaggcgagucug

SEQ ID NO: 1083904 - RNA, 21 nt, Human
aggcagccagggcuggcagag

SEQ ID NO: 1083905 - RNA, 20 nt, Human
aggcgagcagugggcacggc

SEQ ID NO: 1083906 - RNA, 25 nt, Human
agggaagccgggggggucaggagcc

SEQ ID NO: 1083907 - RNA, 19 nt, Human
agggaggggggugggaauc

SEQ ID NO: 1083908 - RNA, 19 nt, Human
agggcuggcagagccugcc

SEQ ID NO: 1083909 - RNA, 18 nt, Human
agucugagccaugcugcc

SEQ ID NO: 1083910 - RNA, 24 nt, Human
aucuuccuccccuuucccuuccaa

SEQ ID NO: 1083911 - RNA, 22 nt, Human
caaccgaggcgagcagugggca

SEQ ID NO: 1083912 - RNA, 19 nt, Human
caacuccuagcccaguccc

SEQ ID NO: 1083913 - RNA, 25 nt, Human
caaggacacacagcccccuucccuc

SEQ ID NO: 1083914 - RNA, 22 nt, Human
cacagacucacccccacucucu

SEQ ID NO: 1083915 - RNA, 21 nt, Human
caccccaccugagggcucuac

SEQ ID NO: 1083916 - RNA, 21 nt, Human
caccccgcgcaccggcuacaa

SEQ ID NO: 1083917 - RNA, 19 nt, Human
caccgugcggcucccgggg

SEQ ID NO: 1083918 - RNA, 20 nt, Human
caccgugcggcucccggggc

SEQ ID NO: 1083919 - RNA, 25 nt, Human
caccugagggcucuacucaccccgc

SEQ ID NO: 1083920 - RNA, 23 nt, Human
caccugugcuauucagccaagga

SEQ ID NO: 1083921 - RNA, 21 nt, Human
cacgcaagagggcaguaacgu

SEQ ID NO: 1083922 - RNA, 20 nt, Human
cacucucuggggcuggggcc

SEQ ID NO: 1083923 - RNA, 20 nt, Human
cacugaguccuggagguggu

SEQ ID NO: 1083924 - RNA, 23 nt, Human
cagaagagggaagccgggggggu

SEQ ID NO: 1083925 - RNA, 22 nt, Human
cagcacacccaagcuccugggc

SEQ ID NO: 1083926 - RNA, 22 nt, Human
cagcagcggcugcggcuaaagc

SEQ ID NO: 1083927 - RNA, 19 nt, Human
cagcccccaggcacuaccu

SEQ ID NO: 1083928 - RNA, 23 nt, Human
cauccuccauuccguccaacucc

SEQ ID NO: 1083929 - RNA, 20 nt, Human
caucuagcuaccugcccucc

SEQ ID NO: 1083930 - RNA, 23 nt, Human
caugacacuucccucuauuuuca

SEQ ID NO: 1083931 - RNA, 21 nt, Human
caugcaaggacacacagcccc

SEQ ID NO: 1083932 - RNA, 19 nt, Human
ccaaaaagaauggcaugca

SEQ ID NO: 1083933 - RNA, 23 nt, Human
ccaaacacagacucacccccacu

SEQ ID NO: 1083934 - RNA, 19 nt, Human
ccaccgugcggcucccggg

SEQ ID NO: 1083935 - RNA, 23 nt, Human
ccagccccucuuuuccaggaacc

SEQ ID NO: 1083936 - RNA, 20 nt, Human
ccagcucccagccugggagu

SEQ ID NO: 1083937 - RNA, 21 nt, Human
ccaggaaccuugccacgccca

SEQ ID NO: 1083938 - RNA, 23 nt, Human
ccagggucccuucaguggacccu

SEQ ID NO: 1083939 - RNA, 21 nt, Human
ccagguaccaucacagcugcu

SEQ ID NO: 1083940 - RNA, 18 nt, Human
ccaguguguguggggugg

SEQ ID NO: 1083941 - RNA, 21 nt, Human
ccaucuuccuccccuuucccu

SEQ ID NO: 1083942 - RNA, 18 nt, Human
cccaagcaagagguggcc

SEQ ID NO: 1083943 - RNA, 23 nt, Human
cccaccugagggcucuacucacc

SEQ ID NO: 1083944 - RNA, 20 nt, Human
ccccagggaucacugagucc

SEQ ID NO: 1083945 - RNA, 22 nt, Human
cccgcgcaccggcuacaagccg

SEQ ID NO: 1083946 - RNA, 24 nt, Human
cccuccaucuuccuccccuuuccc

SEQ ID NO: 1083947 - RNA, 21 nt, Human
cccucuuuuccaggaaccuug

SEQ ID NO: 1083948 - RNA, 21 nt, Human
cccugccuuccccaggguccc

SEQ ID NO: 1083949 - RNA, 21 nt, Human
cccugcuccugccugcccacc

SEQ ID NO: 1083950 - RNA, 18 nt, Human
cccugggccaguggguug

SEQ ID NO: 1083951 - RNA, 22 nt, Human
cccuuccagccccucuuuucca

SEQ ID NO: 1083952 - RNA, 22 nt, Human
ccuccccuuucccuuccagccc

SEQ ID NO: 1083953 - RNA, 19 nt, Human
ccucccuguccucuccugg

SEQ ID NO: 1083954 - RNA, 24 nt, Human
ccuccuucccagguaccaucacag

SEQ ID NO: 1083955 - RNA, 19 nt, Human
ccucuggcuucuucuggga

SEQ ID NO: 1083956 - RNA, 22 nt, Human
ccugcccucccugccuucccca

SEQ ID NO: 1083957 - RNA, 21 nt, Human
ccugggcuacuggggcuccua

SEQ ID NO: 1083958 - RNA, 21 nt, Human
ccuuucuucucgcuguccucc

SEQ ID NO: 1083959 - RNA, 19 nt, Human
cgaggcgagcagugggcac

SEQ ID NO: 1083960 - RNA, 19 nt, Human
cgagggccuucaccgcugc

SEQ ID NO: 1083961 - RNA, 24 nt, Human
cgcccggggguggccggggcacgc

SEQ ID NO: 1083962 - RNA, 22 nt, Human
cgcggagaaagacaauaggcug

SEQ ID NO: 1083963 - RNA, 21 nt, Human
cgcugcagcuucuccauggcc

SEQ ID NO: 1083964 - RNA, 22 nt, Human
cgcugcagcuucuccauggccc

SEQ ID NO: 1083965 - RNA, 20 nt, Human
cggccacuggaccacaggag

SEQ ID NO: 1083966 - RNA, 19 nt, Human
cggcucccggggcuccccc

SEQ ID NO: 1083967 - RNA, 26 nt, Human
cggugggucuccccaaacacagacuc

SEQ ID NO: 1083968 - RNA, 22 nt, Human
cguagccccagccaccccgcgc

SEQ ID NO: 1083969 - RNA, 23 nt, Human
cguuuuugaggagggggcugugg

SEQ ID NO: 1083970 - RNA, 23 nt, Human
cuacugaagcacuacugccagcc

SEQ ID NO: 1083971 - RNA, 23 nt, Human
cuccccaaacacagacucacccc

SEQ ID NO: 1083972 - RNA, 20 nt, Human
cucccuccaucuuccucccc

SEQ ID NO: 1083973 - RNA, 21 nt, Human
cucccucuucugcuuuuccca

SEQ ID NO: 1083974 - RNA, 22 nt, Human
cuccuagcccagucccgggggc

SEQ ID NO: 1083975 - RNA, 23 nt, Human
cuccugccugcccaccccaccug

SEQ ID NO: 1083976 - RNA, 24 nt, Human
cucuuccuuucuucucgcuguccu

SEQ ID NO: 1083977 - RNA, 23 nt, Human
cugcacguagccccagccacccc

SEQ ID NO: 1083978 - RNA, 22 nt, Human
cugcagcuucuccauggccccc

SEQ ID NO: 1083979 - RNA, 27 nt, Human
cugcccacacuuugcauuucucuuccu

SEQ ID NO: 1083980 - RNA, 19 nt, Human
cugccgccuucuguccagc

SEQ ID NO: 1083981 - RNA, 23 nt, Human
cuggaccucgguguccccaucug

SEQ ID NO: 1083982 - RNA, 24 nt, Human
cuggaucugcugugcagugggguu

SEQ ID NO: 1083983 - RNA, 26 nt, Human
cuggcagcacacccuuuguuccuccu

SEQ ID NO: 1083984 - RNA, 24 nt, Human
cuggggcuggggccgcuaccucug

SEQ ID NO: 1083985 - RNA, 21 nt, Human
cuuaaguccccucccagaucu

SEQ ID NO: 1083986 - RNA, 21 nt, Human
cuuccuuucuucucgcugucc

SEQ ID NO: 1083987 - RNA, 20 nt, Human
cuuggcggcugcccacacuu

SEQ ID NO: 1083988 - RNA, 23 nt, Human
cuuucccuuccagccccucuuuu

SEQ ID NO: 1083989 - RNA, 18 nt, Human
gaagagggaagccggggg

SEQ ID NO: 1083990 - RNA, 21 nt, Human
gacaauaggcugccucucccc

SEQ ID NO: 1083991 - RNA, 20 nt, Human
gacgaggccacugggugagc

SEQ ID NO: 1083992 - RNA, 24 nt, Human
gcaaggcagccagggcuggcagag

SEQ ID NO: 1083993 - RNA, 19 nt, Human
gcagcacacccuuuguucc

SEQ ID NO: 1083994 - RNA, 20 nt, Human
gcagccagggcuggcagagc

SEQ ID NO: 1083995 - RNA, 20 nt, Human
gccugggugcuccuggggag

SEQ ID NO: 1083996 - RNA, 23 nt, Human
gccuucaccgcugcugcuccggc

SEQ ID NO: 1083997 - RNA, 23 nt, Human
gcgacagcucugcacguagcccc

SEQ ID NO: 1083998 - RNA, 19 nt, Human
gcggcagcagcggcugcgg

SEQ ID NO: 1083999 - RNA, 22 nt, Human
gcggcucccggggcucccccgc

SEQ ID NO: 1084000 - RNA, 20 nt, Human
gcuccgcgacagcucugcac

SEQ ID NO: 1084001 - RNA, 23 nt, Human
gcugcagcuucuccauggccccc

SEQ ID NO: 1084002 - RNA, 18 nt, Human
gcugcccacacuuugcau

SEQ ID NO: 1084003 - RNA, 20 nt, Human
gcuggcagagccugcccccc

SEQ ID NO: 1084004 - RNA, 21 nt, Human
gcugggucccuggccagcgcu

SEQ ID NO: 1084005 - RNA, 18 nt, Human
ggaaccuugccacgccca

SEQ ID NO: 1084006 - RNA, 21 nt, Human
ggaaccuugccacgcccacac

SEQ ID NO: 1084007 - RNA, 18 nt, Human
ggaggggggugggaaucu

SEQ ID NO: 1084008 - RNA, 18 nt, Human
ggcacuggcuccagcgga

SEQ ID NO: 1084009 - RNA, 21 nt, Human
ggcagccagggcuggcagagc

SEQ ID NO: 1084010 - RNA, 22 nt, Human
ggccacugggugagccaggggc

SEQ ID NO: 1084011 - RNA, 20 nt, Human
ggcccggugggucuccccaa

SEQ ID NO: 1084012 - RNA, 18 nt, Human
ggcggcggcagcagcggc

SEQ ID NO: 1084013 - RNA, 21 nt, Human
gggaagccggggggguugagc

SEQ ID NO: 1084014 - RNA, 19 nt, Human
gggaaucugagcacagugc

SEQ ID NO: 1084015 - RNA, 23 nt, Human
gggcuacuggggcuccuagaguc

SEQ ID NO: 1084016 - RNA, 19 nt, Human
gggcucgucccaccugccg

SEQ ID NO: 1084017 - RNA, 22 nt, Human
ggggagguggaucuuccagucg

SEQ ID NO: 1084018 - RNA, 21 nt, Human
ggggcuccuagagugggcuca

SEQ ID NO: 1084019 - RNA, 20 nt, Human
ggggcuggggccgcuaccuc

SEQ ID NO: 1084020 - RNA, 23 nt, Human
ggucugaacuguggguggacugc

SEQ ID NO: 1084021 - RNA, 23 nt, Human
gucuuuuccucuggaccucggug

SEQ ID NO: 1084022 - RNA, 19 nt, Human
guucaagcaguguuccuuc

SEQ ID NO: 1084023 - RNA, 26 nt, Human
guuggaagauggggugaccacagaag

SEQ ID NO: 1084024 - RNA, 24 nt, Human
uagcuucucccuccaucuuccucc

SEQ ID NO: 1084025 - RNA, 20 nt, Human
uaggauaaaagccugagagu

SEQ ID NO: 1084026 - RNA, 25 nt, Human
uaggcugccucucccccggcggcgg

SEQ ID NO: 1084027 - RNA, 22 nt, Human
uaggucuuaaguccccucccag

SEQ ID NO: 1084028 - RNA, 20 nt, Human
ucagagagagggaggggggu

SEQ ID NO: 1084029 - RNA, 21 nt, Human
ucaguggacccugggcuuucu

SEQ ID NO: 1084030 - RNA, 19 nt, Human
uccacgcuaucagugaggc

SEQ ID NO: 1084031 - RNA, 27 nt, Human
uccagcgcacagucccagaagggcccc

SEQ ID NO: 1084032 - RNA, 22 nt, Human
uccccaaacacagacucacccc

SEQ ID NO: 1084033 - RNA, 23 nt, Human
ucccccgcgggccgagccgagac

SEQ ID NO: 1084034 - RNA, 21 nt, Human
uccccuuucccuuccagcccc

SEQ ID NO: 1084035 - RNA, 20 nt, Human
ucccggggcucccccgcggg

SEQ ID NO: 1084036 - RNA, 22 nt, Human
ucccugccuuccccaggguccc

SEQ ID NO: 1084037 - RNA, 19 nt, Human
uccggccacuggaccacag

SEQ ID NO: 1084038 - RNA, 21 nt, Human
uccggccacuggaccacagga

SEQ ID NO: 1084039 - RNA, 21 nt, Human
ucgcugcagcuucuccauggc

SEQ ID NO: 1084040 - RNA, 18 nt, Human
ucuacucaccacccugcu

SEQ ID NO: 1084041 - RNA, 23 nt, Human
ucuccccaaacacagacucaccc

SEQ ID NO: 1084042 - RNA, 21 nt, Human
ucucccucuucugcuuuuccc

SEQ ID NO: 1084043 - RNA, 22 nt, Human
ucugcuuuucccagcaggaagg

SEQ ID NO: 1084044 - RNA, 20 nt, Human
ucugucaggcuugguggcug

SEQ ID NO: 1084045 - RNA, 21 nt, Human
ucugucaggcuugguggcugu

SEQ ID NO: 1084046 - RNA, 22 nt, Human
ugaccacagaagagggaagccg

SEQ ID NO: 1084047 - RNA, 20 nt, Human
ugacuccuuugagccauccc

SEQ ID NO: 1084048 - RNA, 20 nt, Human
ugagaaaaggcaguggggag

SEQ ID NO: 1084049 - RNA, 21 nt, Human
ugagaaaaggcaguggggagg

SEQ ID NO: 1084050 - RNA, 23 nt, Human
ugagaaaaggcaguggggaggug

SEQ ID NO: 1084051 - RNA, 18 nt, Human
ugagagaggccagugugu

SEQ ID NO: 1084052 - RNA, 23 nt, Human
ugauagucagggucccaccuccu

SEQ ID NO: 1084053 - RNA, 22 nt, Human
ugccagggcagguauccagcuc

SEQ ID NO: 1084054 - RNA, 20 nt, Human
ugcccagagaggggccucug

SEQ ID NO: 1084055 - RNA, 23 nt, Human
ugccugggugcuccuggggaguc

SEQ ID NO: 1084056 - RNA, 21 nt, Human
ugcgagccuccccugcuccug

SEQ ID NO: 1084057 - RNA, 22 nt, Human
ugcuccggcuccgcgacagcuc

SEQ ID NO: 1084058 - RNA, 20 nt, Human
ugcuccugccugcccacccc

SEQ ID NO: 1084059 - RNA, 18 nt, Human
ugcuggaucugcugugca

SEQ ID NO: 1084060 - RNA, 19 nt, Human
uggaagauggggugaccac

SEQ ID NO: 1084061 - RNA, 26 nt, Human
uggauuuccuucagcuacccugaugu

SEQ ID NO: 1084062 - RNA, 20 nt, Human
ugggcuuucugacugcccag

SEQ ID NO: 1084063 - RNA, 19 nt, Human
uggggagaacccucccugu

SEQ ID NO: 1084064 - RNA, 24 nt, Human
uggggagggcugccacagccccca

SEQ ID NO: 1084065 - RNA, 24 nt, Human
uggggcuggggccgcuaccucugg

SEQ ID NO: 1084066 - RNA, 21 nt, Human
ugggugagccaggggcuggca

SEQ ID NO: 1084067 - RNA, 18 nt, Human
ugugcuauucagccaagg

SEQ ID NO: 1084068 - RNA, 20 nt, Human
ugugggguggggagggcugc

SEQ ID NO: 1084069 - RNA, 20 nt, Human
uucagagagagggagggggg

SEQ ID NO: 1084070 - RNA, 23 nt, Human
uucagcuacccugauguccccaa

SEQ ID NO: 1084071 - RNA, 23 nt, Human
uucaguggacccugggcuuucug

SEQ ID NO: 1084072 - RNA, 20 nt, Human
uuccguccaacuccuagccc

SEQ ID NO: 1084073 - RNA, 24 nt, Human
uuccuccccuuucccuuccagccc

SEQ ID NO: 1084074 - RNA, 19 nt, Human
uugaggagggggcuguggg

SEQ ID NO: 1084075 - RNA, 20 nt, Human
uuggcggcugcccacacuuu

SEQ ID NO: 1084076 - RNA, 18 nt, Human
uugguggcuguugggugg

SEQ ID NO: 1084077 - RNA, 18 nt, Human
uugguucaagcaguguuc

SEQ ID NO: 1084078 - RNA, 19 nt, Human
uuuugaggagggggcugug

SEQ ID NO: 1084079 - RNA, 22 nt, Human
uuuuugaggagggggcuguggg

SEQ ID NO: 1084080 - RNA, 19 nt, Human
aaaagaggggcuggaaagg

SEQ ID NO: 1084081 - RNA, 21 nt, Human
aaaauaaauaaaagcaggccc

SEQ ID NO: 1084082 - RNA, 25 nt, Human
aaaggaaaggggagggagauggagg

SEQ ID NO: 1084083 - RNA, 31 nt, Human
aacccaggcaauccacccauccacccacagg

SEQ ID NO: 1084084 - RNA, 20 nt, Human
aacuguagaccaggccaggg

SEQ ID NO: 1084085 - RNA, 23 nt, Human
aagcaacaggccaaggugcguga

SEQ ID NO: 1084086 - RNA, 19 nt, Human
aagcaacuuuucccucagg

SEQ ID NO: 1084087 - RNA, 20 nt, Human
aagcagaagagggagacucc

SEQ ID NO: 1084088 - RNA, 23 nt, Human
aagcagaagagggagacuccgcg

SEQ ID NO: 1084089 - RNA, 24 nt, Human
aagcagaagagggagacuccgcgg

SEQ ID NO: 1084090 - RNA, 19 nt, Human
aagcaggccccugucagca

SEQ ID NO: 1084091 - RNA, 20 nt, Human
aagcucccagccccuacacc

SEQ ID NO: 1084092 - RNA, 21 nt, Human
acacaacccccuccaagcucc

SEQ ID NO: 1084093 - RNA, 24 nt, Human
acacaacccccuccaagcucccag

SEQ ID NO: 1084094 - RNA, 19 nt, Human
acaggccaaggugcgugag

SEQ ID NO: 1084095 - RNA, 26 nt, Human
accccuccccagucagcccuuuacca

SEQ ID NO: 1084096 - RNA, 19 nt, Human
accugggagggagggaagg

SEQ ID NO: 1084097 - RNA, 19 nt, Human
acucccaggcugggagcug

SEQ ID NO: 1084098 - RNA, 20 nt, Human
agaagggcgggagggauggc

SEQ ID NO: 1084099 - RNA, 19 nt, Human
agagagaaaacggguuaga

SEQ ID NO: 1084100 - RNA, 18 nt, Human
agagguugguggaguugg

SEQ ID NO: 1084101 - RNA, 18 nt, Human
agaugccauuggccauag

SEQ ID NO: 1084102 - RNA, 19 nt, Human
agauggagggagaagcugg

SEQ ID NO: 1084103 - RNA, 23 nt, Human
agccaccagaccugauagagaag

SEQ ID NO: 1084104 - RNA, 20 nt, Human
agcgaggaagcaggcgggga

SEQ ID NO: 1084105 - RNA, 19 nt, Human
aggaagcaggcggggaugg

SEQ ID NO: 1084106 - RNA, 19 nt, Human
aggcaggcuuggaaaggga

SEQ ID NO: 1084107 - RNA, 19 nt, Human
aggcaggcuuggaaaggga

SEQ ID NO: 1084108 - RNA, 22 nt, Human
aggcaggcuuggaaagggaggu

SEQ ID NO: 1084109 - RNA, 20 nt, Human
aggccagggcacaggcugcu

SEQ ID NO: 1084110 - RNA, 22 nt, Human
aggccccugucagcauaagccu

SEQ ID NO: 1084111 - RNA, 24 nt, Human
aggccucuggccgccugaguccag

SEQ ID NO: 1084112 - RNA, 19 nt, Human
aggggcgaugucaggagac

SEQ ID NO: 1084113 - RNA, 24 nt, Human
aggggcuggaaaggaaaggggagg

SEQ ID NO: 1084114 - RNA, 19 nt, Human
agugccuggggacugcggc

SEQ ID NO: 1084115 - RNA, 18 nt, Human
agugcuucagcaggggcc

SEQ ID NO: 1084116 - RNA, 18 nt, Human
auauauauguauauaugu

SEQ ID NO: 1084117 - RNA, 22 nt, Human
auauauauguauauaugugugu

SEQ ID NO: 1084118 - RNA, 28 nt, Human
auauauguauauaugugugugugugugu

SEQ ID NO: 1084119 - RNA, 18 nt, Human
auccaacagccaccagac

SEQ ID NO: 1084120 - RNA, 22 nt, Human
augcugccuggugacaccuggu

SEQ ID NO: 1084121 - RNA, 22 nt, Human
augugugugugugugugugugg

SEQ ID NO: 1084122 - RNA, 22 nt, Human
augugugugugugugugugugu

SEQ ID NO: 1084123 - RNA, 23 nt, Human
auguguguguguguguguguguu

SEQ ID NO: 1084124 - RNA, 26 nt, Human
caaccccuagaagcaacaggccaagg

SEQ ID NO: 1084125 - RNA, 19 nt, Human
caaccccuccccagucagc

SEQ ID NO: 1084126 - RNA, 22 nt, Human
caaguuuucagcaacggucaca

SEQ ID NO: 1084127 - RNA, 22 nt, Human
cacaacccccuccaagcuccca

SEQ ID NO: 1084128 - RNA, 23 nt, Human
cacaacccccuccaagcucccag

SEQ ID NO: 1084129 - RNA, 19 nt, Human
cacaguucagaccaaugcc

SEQ ID NO: 1084130 - RNA, 19 nt, Human
caccaaagcaacuuuuccc

SEQ ID NO: 1084131 - RNA, 21 nt, Human
caccaaagcaacuuuucccuc

SEQ ID NO: 1084132 - RNA, 30 nt, Human
caccacuacaacagacuaagucacagaagg

SEQ ID NO: 1084133 - RNA, 21 nt, Human
cacguauauauauguauauau

SEQ ID NO: 1084134 - RNA, 23 nt, Human
cagaagagggagacuccgcggca

SEQ ID NO: 1084135 - RNA, 22 nt, Human
cagacuaagucacagaagaagg

SEQ ID NO: 1084136 - RNA, 20 nt, Human
cagcaguagugcuucagcag

SEQ ID NO: 1084137 - RNA, 21 nt, Human
cagccauggagaccuugagca

SEQ ID NO: 1084138 - RNA, 21 nt, Human
cagcuguggagggccggggag

SEQ ID NO: 1084139 - RNA, 19 nt, Human
caggacacccgcccaggca

SEQ ID NO: 1084140 - RNA, 19 nt, Human
caguucagaccaaugccag

SEQ ID NO: 1084141 - RNA, 25 nt, Human
cauaagccuggagaagugggucugg

SEQ ID NO: 1084142 - RNA, 19 nt, Human
cauccaacagccaccagac

SEQ ID NO: 1084143 - RNA, 22 nt, Human
ccaagcucccagccccuacacc

SEQ ID NO: 1084144 - RNA, 25 nt, Human
ccaagcucccagccccuacaccaua

SEQ ID NO: 1084145 - RNA, 19 nt, Human
ccacacaacccccuccaag

SEQ ID NO: 1084146 - RNA, 20 nt, Human
ccacagagggggcacaaguu

SEQ ID NO: 1084147 - RNA, 18 nt, Human
ccagaccugauagagaag

SEQ ID NO: 1084148 - RNA, 23 nt, Human
ccagggccaccucuugcuuggag

SEQ ID NO: 1084149 - RNA, 27 nt, Human
cccacacaacccccuccaagcucccag

SEQ ID NO: 1084150 - RNA, 21 nt, Human
cccacacacgcuggccugucu

SEQ ID NO: 1084151 - RNA, 22 nt, Human
cccacugaaugaggagccccag

SEQ ID NO: 1084152 - RNA, 19 nt, Human
cccaggcucagccauggag

SEQ ID NO: 1084153 - RNA, 19 nt, Human
cccagucagcccuuuacca

SEQ ID NO: 1084154 - RNA, 22 nt, Human
cccauccaacagccaccagacc

SEQ ID NO: 1084155 - RNA, 23 nt, Human
cccccaccaugucccuacaaccc

SEQ ID NO: 1084156 - RNA, 19 nt, Human
ccccccacacaacccccuc

SEQ ID NO: 1084157 - RNA, 20 nt, Human
cccuccaagcucccagcccc

SEQ ID NO: 1084158 - RNA, 18 nt, Human
ccuggagaagugggucug

SEQ ID NO: 1084159 - RNA, 21 nt, Human
cgcacuggcccagggccaccu

SEQ ID NO: 1084160 - RNA, 23 nt, Human
cggguuagagaaaagccagagcu

SEQ ID NO: 1084161 - RNA, 22 nt, Human
cguggcaagguuccuggaaaag

SEQ ID NO: 1084162 - RNA, 24 nt, Human
cucccagccccuacaccauaaacc

SEQ ID NO: 1084163 - RNA, 21 nt, Human
cucugggccaucagaaagccc

SEQ ID NO: 1084164 - RNA, 21 nt, Human
cucuugcuuggagagccccau

SEQ ID NO: 1084165 - RNA, 23 nt, Human
cuggagucuucacccccaccaug

SEQ ID NO: 1084166 - RNA, 23 nt, Human
cuggcuguccacaggccgcgcau

SEQ ID NO: 1084167 - RNA, 22 nt, Human
cugguuggcggggggcugcagg

SEQ ID NO: 1084168 - RNA, 21 nt, Human
cuuccucuugcugggcuacaa

SEQ ID NO: 1084169 - RNA, 23 nt, Human
gaaaagccagagcuggugaggca

SEQ ID NO: 1084170 - RNA, 23 nt, Human
gaaaaguuauuuuaaaaaguuau

SEQ ID NO: 1084171 - RNA, 22 nt, Human
gaacacugauugaaccaaaaug

SEQ ID NO: 1084172 - RNA, 20 nt, Human
gaacagggcaggggcauacc

SEQ ID NO: 1084173 - RNA, 19 nt, Human
gagaagcuggagcuucaua

SEQ ID NO: 1084174 - RNA, 21 nt, Human
gagggagaagcuggagcuuca

SEQ ID NO: 1084175 - RNA, 20 nt, Human
gaggucucugagaagaggag

SEQ ID NO: 1084176 - RNA, 21 nt, Human
gauggagggagaagcuggagc

SEQ ID NO: 1084177 - RNA, 20 nt, Human
gcaaccccuagaagcaacag

SEQ ID NO: 1084178 - RNA, 19 nt, Human
gcaauccacccauccaccc

SEQ ID NO: 1084179 - RNA, 20 nt, Human
gccaaggugcgugagccugc

SEQ ID NO: 1084180 - RNA, 19 nt, Human
gccagaggccccucugggc

SEQ ID NO: 1084181 - RNA, 19 nt, Human
gcccuuuaccauuagggua

SEQ ID NO: 1084182 - RNA, 19 nt, Human
gcgaggaagcaggcgggga

SEQ ID NO: 1084183 - RNA, 20 nt, Human
gcgggggcuggcuguccaca

SEQ ID NO: 1084184 - RNA, 21 nt, Human
gcucccaucuucuuacucaga

SEQ ID NO: 1084185 - RNA, 21 nt, Human
gcuggggguggccccccuucc

SEQ ID NO: 1084186 - RNA, 19 nt, Human
gcuuuggggcugggggagc

SEQ ID NO: 1084187 - RNA, 18 nt, Human
ggaaaaaaaguaaaaaaa

SEQ ID NO: 1084188 - RNA, 19 nt, Human
ggaaaggaaaggggaggga

SEQ ID NO: 1084189 - RNA, 20 nt, Human
ggagggauggcgggggcugg

SEQ ID NO: 1084190 - RNA, 22 nt, Human
ggaggucucugagaagaggagg

SEQ ID NO: 1084191 - RNA, 23 nt, Human
ggcaagguuccuggaaaagaggg

SEQ ID NO: 1084192 - RNA, 19 nt, Human
ggcaggaaagggaagugag

SEQ ID NO: 1084193 - RNA, 22 nt, Human
ggcaggggcauaccacagaggg

SEQ ID NO: 1084194 - RNA, 23 nt, Human
ggccagcaguagugcuucagcag

SEQ ID NO: 1084195 - RNA, 20 nt, Human
ggcugggggagccacuguca

SEQ ID NO: 1084196 - RNA, 23 nt, Human
gggagggagauggagggagaagc

SEQ ID NO: 1084197 - RNA, 26 nt, Human
gggagggagauggagggagaagcugg

SEQ ID NO: 1084198 - RNA, 21 nt, Human
gggaggucucugagaagagga

SEQ ID NO: 1084199 - RNA, 21 nt, Human
gggccggggaggggagggcgu

SEQ ID NO: 1084200 - RNA, 18 nt, Human
ggggaggggagggcguag

SEQ ID NO: 1084201 - RNA, 21 nt, Human
ggggcuggaaaggaaagggga

SEQ ID NO: 1084202 - RNA, 22 nt, Human
gggggcuggcuuuggggcuggg

SEQ ID NO: 1084203 - RNA, 22 nt, Human
gguuacauaggugaggcugggc

SEQ ID NO: 1084204 - RNA, 23 nt, Human
guaccuagcggagguugcagcug

SEQ ID NO: 1084205 - RNA, 21 nt, Human
gucuaagaggggagccuuaac

SEQ ID NO: 1084206 - RNA, 23 nt, Human
gucuggagucuucacccccacca

SEQ ID NO: 1084207 - RNA, 24 nt, Human
gucuuccaacgcacuggcccaggg

SEQ ID NO: 1084208 - RNA, 27 nt, Human
gugcccaggaugauguucccuacggua

SEQ ID NO: 1084209 - RNA, 22 nt, Human
guguacauacuguagcugugua

SEQ ID NO: 1084210 - RNA, 21 nt, Human
gugugugugugugugugugug

SEQ ID NO: 1084211 - RNA, 21 nt, Human
gugugugugugugugugugug

SEQ ID NO: 1084212 - RNA, 18 nt, Human
guuuguuuggaggagguc

SEQ ID NO: 1084213 - RNA, 24 nt, Human
guuuucagcaacggucacaccugg

SEQ ID NO: 1084214 - RNA, 27 nt, Human
uaaaagaacacaaacuaaaaaaguuaa

SEQ ID NO: 1084215 - RNA, 27 nt, Human
uaacugguuggcggggggcugcagguu

SEQ ID NO: 1084216 - RNA, 20 nt, Human
uaagagccagagguuggugg

SEQ ID NO: 1084217 - RNA, 20 nt, Human
uaagagcccccaggcucagc

SEQ ID NO: 1084218 - RNA, 26 nt, Human
uaccacagagggggcacaaguuuuca

SEQ ID NO: 1084219 - RNA, 22 nt, Human
uagagaaaagccagagcuggug

SEQ ID NO: 1084220 - RNA, 23 nt, Human
uauauaugugugugugugugugu

SEQ ID NO: 1084221 - RNA, 19 nt, Human
uauauguauauaugugugu

SEQ ID NO: 1084222 - RNA, 21 nt, Human
uauauguauauaugugugugu

SEQ ID NO: 1084223 - RNA, 23 nt, Human
uauauguauauaugugugugugu

SEQ ID NO: 1084224 - RNA, 19 nt, Human
uauaugugugugugugugu

SEQ ID NO: 1084225 - RNA, 25 nt, Human
uauaugugugugugugugugugugu

SEQ ID NO: 1084226 - RNA, 23 nt, Human
uauccuagaucaccacuggauug

SEQ ID NO: 1084227 - RNA, 21 nt, Human
uaugcugccuggugacaccug

SEQ ID NO: 1084228 - RNA, 22 nt, Human
uauguauauaugugugugugug

SEQ ID NO: 1084229 - RNA, 18 nt, Human
uaugugugugugugugug

SEQ ID NO: 1084230 - RNA, 23 nt, Human
uaugugugugugugugugugugu

SEQ ID NO: 1084231 - RNA, 24 nt, Human
uaugugugugugugugugugugug

SEQ ID NO: 1084232 - RNA, 22 nt, Human
ucacaggacacccgcccaggca

SEQ ID NO: 1084233 - RNA, 19 nt, Human
ucagagaggcagcugaggc

SEQ ID NO: 1084234 - RNA, 21 nt, Human
ucagcauguccagcugggcug

SEQ ID NO: 1084235 - RNA, 21 nt, Human
uccacaacugccaccuugggc

SEQ ID NO: 1084236 - RNA, 22 nt, Human
uccacaagcacagcacgggacu

SEQ ID NO: 1084237 - RNA, 19 nt, Human
ucccuacaaccccucccca

SEQ ID NO: 1084238 - RNA, 18 nt, Human
uccucugaggaacccugg

SEQ ID NO: 1084239 - RNA, 21 nt, Human
ucuucacccccaccauguccc

SEQ ID NO: 1084240 - RNA, 22 nt, Human
ucuuccaacgcacuggcccagg

SEQ ID NO: 1084241 - RNA, 19 nt, Human
ugacccgaucagcuggcag

SEQ ID NO: 1084242 - RNA, 20 nt, Human
ugacucagacugcgugacag

SEQ ID NO: 1084243 - RNA, 19 nt, Human
ugagaagaggagggaugug

SEQ ID NO: 1084244 - RNA, 21 nt, Human
ugagaagaggagggauguguu

SEQ ID NO: 1084245 - RNA, 21 nt, Human
ugaggcugggcccuuccugcu

SEQ ID NO: 1084246 - RNA, 20 nt, Human
ugccagaggccccucugggc

SEQ ID NO: 1084247 - RNA, 23 nt, Human
ugccagaggccccucugggccau

SEQ ID NO: 1084248 - RNA, 18 nt, Human
ugccguggauuuggcucu

SEQ ID NO: 1084249 - RNA, 20 nt, Human
ugcuggccagcaguagugcu

SEQ ID NO: 1084250 - RNA, 23 nt, Human
ugcugggaaaagcagaagaggga

SEQ ID NO: 1084251 - RNA, 18 nt, Human
ugcuggggguggcccccc

SEQ ID NO: 1084252 - RNA, 20 nt, Human
ugcuggggguggccccccuu

SEQ ID NO: 1084253 - RNA, 24 nt, Human
ugcuggggguggccccccuucccc

SEQ ID NO: 1084254 - RNA, 18 nt, Human
ugcuuggagagccccauc

SEQ ID NO: 1084255 - RNA, 19 nt, Human
uggaaaaaaaguaaaaaaa

SEQ ID NO: 1084256 - RNA, 20 nt, Human
uggaaaggaaaggggaggga

SEQ ID NO: 1084257 - RNA, 24 nt, Human
uggaaaggaaaggggagggagaug

SEQ ID NO: 1084258 - RNA, 19 nt, Human
uggaacccaggcaauccac

SEQ ID NO: 1084259 - RNA, 21 nt, Human
uggaacccaggcaauccaccc

SEQ ID NO: 1084260 - RNA, 21 nt, Human
uggaauaaauggauuuagcca

SEQ ID NO: 1084261 - RNA, 19 nt, Human
uggagaagugggucuggag

SEQ ID NO: 1084262 - RNA, 22 nt, Human
uggagguggugcacuuuggagg

SEQ ID NO: 1084263 - RNA, 21 nt, Human
uggauugcugacagauagagg

SEQ ID NO: 1084264 - RNA, 22 nt, Human
uggccgccugaguccagccccc

SEQ ID NO: 1084265 - RNA, 23 nt, Human
uggccgccugaguccagcccccc

SEQ ID NO: 1084266 - RNA, 24 nt, Human
ugggacuccuguuuuuuguuuuuu

SEQ ID NO: 1084267 - RNA, 21 nt, Human
ugggagggagggaagggggcu

SEQ ID NO: 1084268 - RNA, 19 nt, Human
uggguccugcaguuugucc

SEQ ID NO: 1084269 - RNA, 22 nt, Human
uggugaggcaagugcagaguau

SEQ ID NO: 1084270 - RNA, 19 nt, Human
uguauauaugugugugugu

SEQ ID NO: 1084271 - RNA, 21 nt, Human
uguauauaugugugugugugu

SEQ ID NO: 1084272 - RNA, 24 nt, Human
ugucaggagacagcuuccucuugc

SEQ ID NO: 1084273 - RNA, 22 nt, Human
ugucccuacaaccccuccccag

SEQ ID NO: 1084274 - RNA, 23 nt, Human
ugugggaugaccgcguguauagg

SEQ ID NO: 1084275 - RNA, 18 nt, Human
ugugugugugugugugug

SEQ ID NO: 1084276 - RNA, 18 nt, Human
ugugugugugugugugug

SEQ ID NO: 1084277 - RNA, 18 nt, Human
ugugugugugugugugug

SEQ ID NO: 1084278 - RNA, 18 nt, Human
ugugugugugugugugug

SEQ ID NO: 1084279 - RNA, 18 nt, Human
ugugugugugugugugug

SEQ ID NO: 1084280 - RNA, 18 nt, Human
ugugugugugugugugug

SEQ ID NO: 1084281 - RNA, 18 nt, Human
ugugugugugugugugug

SEQ ID NO: 1084282 - RNA, 18 nt, Human
ugugugugugugugugug

SEQ ID NO: 1084283 - RNA, 21 nt, Human
ugugugugugugugugugugu

SEQ ID NO: 1084284 - RNA, 21 nt, Human
ugugugugugugugugugugu

SEQ ID NO: 1084285 - RNA, 21 nt, Human
ugugugugugugugugugugu

SEQ ID NO: 1084286 - RNA, 21 nt, Human
ugugugugugugugugugugu

SEQ ID NO: 1084287 - RNA, 21 nt, Human
ugugugugugugugugugugu

SEQ ID NO: 1084288 - RNA, 21 nt, Human
ugugugugugugugugugugu

SEQ ID NO: 1084289 - RNA, 21 nt, Human
ugugugugugugugugugugu

SEQ ID NO: 1084290 - RNA, 21 nt, Human
ugugugugugugugugugugu

SEQ ID NO: 1084291 - RNA, 21 nt, Human
ugugugugugugugugugugu

SEQ ID NO: 1084292 - RNA, 21 nt, Human
ugugugugugugugugugugu

SEQ ID NO: 1084293 - RNA, 21 nt, Human
ugugugugugugugugugugu

SEQ ID NO: 1084294 - RNA, 22 nt, Human
ugugugugugugugugugugug

SEQ ID NO: 1084295 - RNA, 22 nt, Human
ugugugugugugugugugugug

SEQ ID NO: 1084296 - RNA, 22 nt, Human
ugugugugugugugugugugug

SEQ ID NO: 1084297 - RNA, 22 nt, Human
ugugugugugugugugugugug

SEQ ID NO: 1084298 - RNA, 20 nt, Human
uguuggggaccuuccaggcc

SEQ ID NO: 1084299 - RNA, 23 nt, Human
uguuuuuuguuuuuugcuuuuga

SEQ ID NO: 1084300 - RNA, 22 nt, Human
uuaaaagaacacaaacuaaaaa

SEQ ID NO: 1084301 - RNA, 26 nt, Human
uucccaggccucuggccgccugaguc

SEQ ID NO: 1084302 - RNA, 21 nt, Human
uucccucacuggguccugcag

SEQ ID NO: 1084303 - RNA, 29 nt, Human
uuggccacguauauauauguauauaugug

SEQ ID NO: 1084304 - RNA, 21 nt, Human
uuuguuuggaggaggucugac

SEQ ID NO: 1084305 - RNA, 22 nt, Human
uuuuuguuuuuuguuuuuugcu

SEQ ID NO: 1084306 - RNA, 22 nt, Human
aaaagccagagcuggugaggca

SEQ ID NO: 1084307 - RNA, 22 nt, Human
aaaaguuauuuuaaaaaguuau

SEQ ID NO: 1084308 - RNA, 21 nt, Human
aaaauaaauaaaagcaggccc

SEQ ID NO: 1084309 - RNA, 31 nt, Human; identical to SEQ ID NO: 1084083

SEQ ID NO: 1084310 - RNA, 20 nt, Human
aacuguagaccaggccaggg

SEQ ID NO: 1084311 - RNA, 23 nt, Human
aagcaacaggccaaggugcguga

SEQ ID NO: 1084312 - RNA, 19 nt, Human
aagcaacuuuucccucagg

SEQ ID NO: 1084313 - RNA, 20 nt, Human
aagcagaagagggagacucc

SEQ ID NO: 1084314 - RNA, 21 nt, Human
aagcagaagagggagacuccg

SEQ ID NO: 1084315 - RNA, 23 nt, Human
aagcagaagagggagacuccgug

SEQ ID NO: 1084316 - RNA, 19 nt, Human
aagcaggccccugucagca

SEQ ID NO: 1084317 - RNA, 20 nt, Human
aagcucccagccccuacacc

SEQ ID NO: 1084318 - RNA, 21 nt, Human
acacaacccccuccaagcucc

SEQ ID NO: 1084319 - RNA, 24 nt, Human
acacaacccccuccaagcucccag

SEQ ID NO: 1084320 - RNA, 19 nt, Human
acaggccaaggugcgugag

SEQ ID NO: 1084321 - RNA, 19 nt, Human
acucccaggcugggagcug

SEQ ID NO: 1084322 - RNA, 20 nt, Human
agaagggcgggagggauggc

SEQ ID NO: 1084323 - RNA, 19 nt, Human
agagagaaaacggguuaga

SEQ ID NO: 1084324 - RNA, 18 nt, Human
agagguugguggaguugg

SEQ ID NO: 1084325 - RNA, 20 nt, Human
agcgaggaagcaggcgggga

SEQ ID NO: 1084326 - RNA, 19 nt, Human
aggaagcaggcggggaugg

SEQ ID NO: 1084327 - RNA, 19 nt, Human
aggcaggcuuggaaaggga

SEQ ID NO: 1084328 - RNA, 19 nt, Human
aggcaggcuuggaaaggga

SEQ ID NO: 1084329 - RNA, 22 nt, Human
aggcaggcuuggaaagggaggu

SEQ ID NO: 1084330 - RNA, 20 nt, Human
aggccagggcacaggcugcu

SEQ ID NO: 1084331 - RNA, 22 nt, Human
aggccccugucagcauaagccu

SEQ ID NO: 1084332 - RNA, 24 nt, Human
aggccucuggccgccugaguccag

SEQ ID NO: 1084333 - RNA, 23 nt, Human
aggcggcgcucagcugggccagc

SEQ ID NO: 1084334 - RNA, 18 nt, Human
agggauggcuggcuggag

SEQ ID NO: 1084335 - RNA, 19 nt, Human
aggggcgaugucaggagac

SEQ ID NO: 1084336 - RNA, 23 nt, Human
agugagcucucuaggcggcgcuc

SEQ ID NO: 1084337 - RNA, 19 nt, Human
agugccuggggacugcggc

SEQ ID NO: 1084338 - RNA, 18 nt, Human
agugcuucagcaggggcc

SEQ ID NO: 1084339 - RNA, 18 nt, Human
auauauauguauauaugu

SEQ ID NO: 1084340 - RNA, 22 nt, Human
auauauauguauauaugugugu

SEQ ID NO: 1084341 - RNA, 28 nt, Human
auauauguauauaugugugugugugugu

SEQ ID NO: 1084342 - RNA, 18 nt, Human
auccaacagccaccagac

SEQ ID NO: 1084343 - RNA, 22 nt, Human
augcugccuggugacaccuggu

SEQ ID NO: 1084344 - RNA, 20 nt, Human
augggacuccuguuuuuugu

SEQ ID NO: 1084345 - RNA, 30 nt, Human
auguauauaugugugugugugugugugugg

SEQ ID NO: 1084346 - RNA, 22 nt, Human
augugugugugugugugugugu

SEQ ID NO: 1084347 - RNA, 23 nt, Human
auguguguguguguguguguguu

SEQ ID NO: 1084348 - RNA, 26 nt, Human
caaccccuagaagcaacaggccaagg

SEQ ID NO: 1084349 - RNA, 20 nt, Human
caaccccuccccagucagcc

SEQ ID NO: 1084350 - RNA, 24 nt, Human
caagcucccagccccuacaccaua

SEQ ID NO: 1084351 - RNA, 22 nt, Human
caaguuuucagcaacggucaca

SEQ ID NO: 1084352 - RNA, 18 nt, Human
caauccacccauccaccc

SEQ ID NO: 1084353 - RNA, 22 nt, Human
cacaacccccuccaagcuccca

SEQ ID NO: 1084354 - RNA, 23 nt, Human
cacaacccccuccaagcucccag

SEQ ID NO: 1084355 - RNA, 19 nt, Human
cacaguucagaccaaugcc

SEQ ID NO: 1084356 - RNA, 19 nt, Human
caccaaagcaacuuuuccc

SEQ ID NO: 1084357 - RNA, 21 nt, Human
caccaaagcaacuuuucccuc

SEQ ID NO: 1084358 - RNA, 30 nt, Human; identical to SEQ ID NO: 1084132

SEQ ID NO: 1084359 - RNA, 21 nt, Human
cacguauauauauguauauau

SEQ ID NO: 1084360 - RNA, 23 nt, Human
cagaagagggagacuccguggca

SEQ ID NO: 1084361 - RNA, 22 nt, Human
cagacuaagucacagaagaagg

SEQ ID NO: 1084362 - RNA, 19 nt, Human
cagcacgggacugauuccc

SEQ ID NO: 1084363 - RNA, 20 nt, Human
cagcaguagugcuucagcag

SEQ ID NO: 1084364 - RNA, 24 nt, Human
cagccaccagaccugauagagaag

SEQ ID NO: 1084365 - RNA, 21 nt, Human
cagccauggagaccuugagca

SEQ ID NO: 1084366 - RNA, 21 nt, Human
cagcuguggagggccggggag

SEQ ID NO: 1084367 - RNA, 19 nt, Human
caggacacccgcccaggca

SEQ ID NO: 1084368 - RNA, 19 nt, Human
caguucagaccaaugccag

SEQ ID NO: 1084369 - RNA, 25 nt, Human
cauaagccuggagaagugggucugg

SEQ ID NO: 1084370 - RNA, 19 nt, Human
cauccaacagccaccagac

SEQ ID NO: 1084371 - RNA, 22 nt, Human
ccaagcucccagccccuacacc

SEQ ID NO: 1084372 - RNA, 19 nt, Human
ccacacaacccccuccaag

SEQ ID NO: 1084373 - RNA, 21 nt, Human
ccacagagggggcacaaguuu

SEQ ID NO: 1084374 - RNA, 18 nt, Human
ccagaccugauagagaag

SEQ ID NO: 1084375 - RNA, 23 nt, Human
ccagggccaccucuugcuuggag

SEQ ID NO: 1084376 - RNA, 18 nt, Human
ccagucagcccuuuacca

SEQ ID NO: 1084377 - RNA, 27 nt, Human
cccacacaacccccuccaagcucccag

SEQ ID NO: 1084378 - RNA, 21 nt, Human
cccacacacgcuggccugucu

SEQ ID NO: 1084379 - RNA, 22 nt, Human
cccacugaaugaggagccccag

SEQ ID NO: 1084380 - RNA, 24 nt, Human
cccaggccucuggccgccugaguc

SEQ ID NO: 1084381 - RNA, 22 nt, Human
cccauccaacagccaccagacc

SEQ ID NO: 1084382 - RNA, 21 nt, Human
ccccaggcucagccauggaga

SEQ ID NO: 1084383 - RNA, 23 nt, Human
cccccaccaugucccuacaaccc

SEQ ID NO: 1084384 - RNA, 19 nt, Human
ccccccacacaacccccuc

SEQ ID NO: 1084385 - RNA, 20 nt, Human
cccuccaagcucccagcccc

SEQ ID NO: 1084386 - RNA, 24 nt, Human
cccuccccagucagcccuuuacca

SEQ ID NO: 1084387 - RNA, 18 nt, Human
cccucccuaccccacaca

SEQ ID NO: 1084388 - RNA, 18 nt, Human
ccuggagaagugggucug

SEQ ID NO: 1084389 - RNA, 23 nt, Human
cggguuagagaaaagccagagcu

SEQ ID NO: 1084390 - RNA, 21 nt, Human
cguauauauauguauauaugu

SEQ ID NO: 1084391 - RNA, 23 nt, Human
cguguacauacuguagcugugua

SEQ ID NO: 1084392 - RNA, 24 nt, Human
cucccagccccuacaccauaaacc

SEQ ID NO: 1084393 - RNA, 21 nt, Human
cucugggccaucagaaagccc

SEQ ID NO: 1084394 - RNA, 21 nt, Human
cucuugcuuggagagccccau

SEQ ID NO: 1084395 - RNA, 23 nt, Human
cuggagucuucacccccaccaug

SEQ ID NO: 1084396 - RNA, 23 nt, Human
cuggcuguccacaggccgcgcau

SEQ ID NO: 1084397 - RNA, 22 nt, Human
cuggggguggccccccuucccc

SEQ ID NO: 1084398 - RNA, 22 nt, Human
cugguuggcggggggcugcagg

SEQ ID NO: 1084399 - RNA, 21 nt, Human
cuuccucuugcugggcuacaa

SEQ ID NO: 1084400 - RNA, 22 nt, Human
gaacacugauugaaccaaaaug

SEQ ID NO: 1084401 - RNA, 20 nt, Human
gaacagggcaggggcauacc

SEQ ID NO: 1084402 - RNA, 20 nt, Human
gagaaaagccagagcuggug

SEQ ID NO: 1084403 - RNA, 19 nt, Human
gagaagcuggagcuucaua

SEQ ID NO: 1084404 - RNA, 21 nt, Human
gagggagaagcuggagcuuca

SEQ ID NO: 1084405 - RNA, 24 nt, Human
gaggggcuggaagggaaaggggag

SEQ ID NO: 1084406 - RNA, 20 nt, Human
gaggucucugagaagaggag

SEQ ID NO: 1084407 - RNA, 21 nt, Human
gauggagggagaagcuggagc

SEQ ID NO: 1084408 - RNA, 20 nt, Human
gcaaccccuagaagcaacag

SEQ ID NO: 1084409 - RNA, 20 nt, Human
gcacuggcccagggccaccu

SEQ ID NO: 1084410 - RNA, 20 nt, Human
gccaaggugcgugagccugc

SEQ ID NO: 1084411 - RNA, 19 nt, Human
gccagaggccccucugggc

SEQ ID NO: 1084412 - RNA, 25 nt, Human
gcccaggaugauguucccuacggua

SEQ ID NO: 1084413 - RNA, 19 nt, Human
gcccuuuaccauuagggua

SEQ ID NO: 1084414 - RNA, 19 nt, Human
gcgaggaagcaggcgggga

SEQ ID NO: 1084415 - RNA, 20 nt, Human
gcgggggcuggcuguccaca

SEQ ID NO: 1084416 - RNA, 21 nt, Human
gcucccaucuucuuacucaga

SEQ ID NO: 1084417 - RNA, 21 nt, Human
gcuggggguggccccccuucc

SEQ ID NO: 1084418 - RNA, 19 nt, Human
gcuuuggggcugggggagc

SEQ ID NO: 1084419 - RNA, 18 nt, Human
ggaaaaaaaguaaaaaaa

SEQ ID NO: 1084420 - RNA, 22 nt, Human
ggagauggagggagaagcugga

SEQ ID NO: 1084421 - RNA, 24 nt, Human
ggagcuauaagggauggcuggcug

SEQ ID NO: 1084422 - RNA, 20 nt, Human
ggagggauggcgggggcugg

SEQ ID NO: 1084423 - RNA, 22 nt, Human
ggaggucucugagaagaggagg

SEQ ID NO: 1084424 - RNA, 23 nt, Human
ggcaagguuccuggaaaagaggg

SEQ ID NO: 1084425 - RNA, 19 nt, Human
ggcaggaaagggaagugag

SEQ ID NO: 1084426 - RNA, 22 nt, Human
ggcaggggcauaccacagaggg

SEQ ID NO: 1084427 - RNA, 22 nt, Human
ggcggcgcucagcugggccagc

SEQ ID NO: 1084428 - RNA, 20 nt, Human
ggcugggggagccacuguca

SEQ ID NO: 1084429 - RNA, 21 nt, Human
gggaaaggggagggagaugga

SEQ ID NO: 1084430 - RNA, 26 nt, Human
gggagggagauggagggagaagcugg

SEQ ID NO: 1084431 - RNA, 21 nt, Human
gggaggucucugagaagagga

SEQ ID NO: 1084432 - RNA, 21 nt, Human
gggccggggaggggagggcgu

SEQ ID NO: 1084433 - RNA, 18 nt, Human
ggggaggggagggcguag

SEQ ID NO: 1084434 - RNA, 22 nt, Human
gggggcuggcuuuggggcuggg

SEQ ID NO: 1084435 - RNA, 22 nt, Human
gguuacauaggugaggcugggc

SEQ ID NO: 1084436 - RNA, 23 nt, Human
guaccuagcggagguugcagcug

SEQ ID NO: 1084437 - RNA, 20 nt, Human
guauauaugugugugugugu

SEQ ID NO: 1084438 - RNA, 19 nt, Human
guccucugaggaacccugg

SEQ ID NO: 1084439 - RNA, 23 nt, Human
gucuggagucuucacccccacca

SEQ ID NO: 1084440 - RNA, 24 nt, Human
gucuuccaacgcacuggcccaggg

SEQ ID NO: 1084441 - RNA, 21 nt, Human
gugugugugugugugugugug

SEQ ID NO: 1084442 - RNA, 18 nt, Human
guuuguuuggaggagguc

SEQ ID NO: 1084443 - RNA, 24 nt, Human
guuuucagcaacggucacaccugg

SEQ ID NO: 1084444 - RNA, 18 nt, Human
uaaaaauaaauaaaagca

SEQ ID NO: 1084445 - RNA, 28 nt, Human
uaaaagaacacaaacuaaaaaaguuaac

SEQ ID NO: 1084446 - RNA, 27 nt, Human
uaacugguuggcggggggcugcagguu

SEQ ID NO: 1084447 - RNA, 20 nt, Human
uaagagccagagguuggugg

SEQ ID NO: 1084448 - RNA, 20 nt, Human
uaagagcccccaggcucagc

SEQ ID NO: 1084449 - RNA, 26 nt, Human
uaccacagagggggcacaaguuuuca

SEQ ID NO: 1084450 - RNA, 23 nt, Human
uaccugggagggagggaaggggg

SEQ ID NO: 1084451 - RNA, 23 nt, Human
uauauaugugugugugugugugu

SEQ ID NO: 1084452 - RNA, 19 nt, Human
uauauguauauaugugugu

SEQ ID NO: 1084453 - RNA, 23 nt, Human
uauauguauauaugugugugugu

SEQ ID NO: 1084454 - RNA, 19 nt, Human
uauaugugugugugugugu

SEQ ID NO: 1084455 - RNA, 25 nt, Human
uauaugugugugugugugugugugu

SEQ ID NO: 1084456 - RNA, 23 nt, Human
uauccuagaucaccacuggauug

SEQ ID NO: 1084457 - RNA, 21 nt, Human
uaugcugccuggugacaccug

SEQ ID NO: 1084458 - RNA, 22 nt, Human
uauguauauaugugugugugug

SEQ ID NO: 1084459 - RNA, 18 nt, Human
uaugugugugugugugug

SEQ ID NO: 1084460 - RNA, 23 nt, Human
uaugugugugugugugugugugu

SEQ ID NO: 1084461 - RNA, 24 nt, Human
uaugugugugugugugugugugug

SEQ ID NO: 1084462 - RNA, 22 nt, Human
ucacaggacacccgcccaggca

SEQ ID NO: 1084463 - RNA, 19 nt, Human
ucagagaggcagcugaggc

SEQ ID NO: 1084464 - RNA, 18 nt, Human
ucagcauguccagcuggg

SEQ ID NO: 1084465 - RNA, 21 nt, Human
ucagcauguccagcugggcug

SEQ ID NO: 1084466 - RNA, 21 nt, Human
uccacaacugccaccuugggc

SEQ ID NO: 1084467 - RNA, 22 nt, Human
uccacaagcacagcacgggacu

SEQ ID NO: 1084468 - RNA, 19 nt, Human
ucccuacaaccccucccca

SEQ ID NO: 1084469 - RNA, 21 nt, Human
ucuucacccccaccauguccc

SEQ ID NO: 1084470 - RNA, 22 nt, Human
ucuuccaacgcacuggcccagg

SEQ ID NO: 1084471 - RNA, 19 nt, Human
ugacccgaucagcuggcag

SEQ ID NO: 1084472 - RNA, 20 nt, Human
ugacucagacugcgugacag

SEQ ID NO: 1084473 - RNA, 19 nt, Human
ugagaagaggagggaugug

SEQ ID NO: 1084474 - RNA, 21 nt, Human
ugagaagaggagggauguguu

SEQ ID NO: 1084475 - RNA, 21 nt, Human
ugaggcugggcccuuccugcu

SEQ ID NO: 1084476 - RNA, 20 nt, Human
ugccagaggccccucugggc

SEQ ID NO: 1084477 - RNA, 23 nt, Human
ugccagaggccccucugggccau

SEQ ID NO: 1084478 - RNA, 18 nt, Human
ugccguggauuuggcucu

SEQ ID NO: 1084479 - RNA, 20 nt, Human
ugcuggccagcaguagugcu

SEQ ID NO: 1084480 - RNA, 23 nt, Human
ugcugggaaaagcagaagaggga

SEQ ID NO: 1084481 - RNA, 18 nt, Human
ugcuggggguggcccccc

SEQ ID NO: 1084482 - RNA, 20 nt, Human
ugcuggggguggccccccuu

SEQ ID NO: 1084483 - RNA, 18 nt, Human
ugcuuggagagccccauc

SEQ ID NO: 1084484 - RNA, 19 nt, Human
uggaaaaaaaguaaaaaaa

SEQ ID NO: 1084485 - RNA, 19 nt, Human
uggaacccaggcaauccac

SEQ ID NO: 1084486 - RNA, 21 nt, Human
uggaacccaggcaauccaccc

SEQ ID NO: 1084487 - RNA, 23 nt, Human
uggaagggaaaggggagggagau

SEQ ID NO: 1084488 - RNA, 21 nt, Human
uggaauaaauggauuuagcca

SEQ ID NO: 1084489 - RNA, 19 nt, Human
uggagaagugggucuggag

SEQ ID NO: 1084490 - RNA, 22 nt, Human
uggagguggugcacuuuggagg

SEQ ID NO: 1084491 - RNA, 21 nt, Human
uggauugcugacagauagagg

SEQ ID NO: 1084492 - RNA, 20 nt, Human
uggcaagguuccuggaaaag

SEQ ID NO: 1084493 - RNA, 19 nt, Human
uggcaggaaagggaaguga

SEQ ID NO: 1084494 - RNA, 22 nt, Human
uggccgccugaguccagccccc

SEQ ID NO: 1084495 - RNA, 23 nt, Human
uggccgccugaguccagcccccc

SEQ ID NO: 1084496 - RNA, 24 nt, Human
ugggacuccuguuuuuuguuuuuu

SEQ ID NO: 1084497 - RNA, 21 nt, Human
ugggagggagggaagggggcu

SEQ ID NO: 1084498 - RNA, 19 nt, Human
uggguccugcaguuugucc

SEQ ID NO: 1084499 - RNA, 22 nt, Human
uggugaggcaagugcagaguau

SEQ ID NO: 1084500 - RNA, 19 nt, Human
uguauauaugugugugugu

SEQ ID NO: 1084501 - RNA, 24 nt, Human
ugucaggagacagcuuccucuugc

SEQ ID NO: 1084502 - RNA, 22 nt, Human
ugucccuacaaccccuccccag

SEQ ID NO: 1084503 - RNA, 23 nt, Human
ugugggaugaccgcguguauagg

SEQ ID NO: 1084504 - RNA, 18 nt, Human
ugugugugugugugugug

SEQ ID NO: 1084505 - RNA, 18 nt, Human
ugugugugugugugugug

SEQ ID NO: 1084506 - RNA, 18 nt, Human
ugugugugugugugugug

SEQ ID NO: 1084507 - RNA, 18 nt, Human
ugugugugugugugugug

SEQ ID NO: 1084508 - RNA, 18 nt, Human
ugugugugugugugugug

SEQ ID NO: 1084509 - RNA, 18 nt, Human
ugugugugugugugugug

SEQ ID NO: 1084510 - RNA, 18 nt, Human
ugugugugugugugugug

SEQ ID NO: 1084511 - RNA, 18 nt, Human
ugugugugugugugugug

SEQ ID NO: 1084512 - RNA, 21 nt, Human
ugugugugugugugugugugu

SEQ ID NO: 1084513 - RNA, 21 nt, Human
ugugugugugugugugugugu

SEQ ID NO: 1084514 - RNA, 21 nt, Human
ugugugugugugugugugugu

SEQ ID NO: 1084515 - RNA, 21 nt, Human
ugugugugugugugugugugu

SEQ ID NO: 1084516 - RNA, 21 nt, Human
ugugugugugugugugugugu

SEQ ID NO: 1084517 - RNA, 21 nt, Human
ugugugugugugugugugugu

SEQ ID NO: 1084518 - RNA, 21 nt, Human
ugugugugugugugugugugu

SEQ ID NO: 1084519 - RNA, 21 nt, Human
ugugugugugugugugugugu

SEQ ID NO: 1084520 - RNA, 21 nt, Human
ugugugugugugugugugugu

SEQ ID NO: 1084521 - RNA, 21 nt, Human
ugugugugugugugugugugu

SEQ ID NO: 1084522 - RNA, 21 nt, Human
ugugugugugugugugugugu

SEQ ID NO: 1084523 - RNA, 22 nt, Human
ugugugugugugugugugugug

SEQ ID NO: 1084524 - RNA, 22 nt, Human
ugugugugugugugugugugug

SEQ ID NO: 1084525 - RNA, 22 nt, Human
ugugugugugugugugugugug

SEQ ID NO: 1084526 - RNA, 22 nt, Human
ugugugugugugugugugugug

SEQ ID NO: 1084527 - RNA, 22 nt, Human
ugugugugugugugugugugug

SEQ ID NO: 1084528 - RNA, 20 nt, Human
uguuggggaccuuccaggcc

SEQ ID NO: 1084529 - RNA, 23 nt, Human
uguuuuuuguuuuuugcuuuuga

SEQ ID NO: 1084530 - RNA, 22 nt, Human
uuaaaagaacacaaacuaaaaa

SEQ ID NO: 1084531 - RNA, 24 nt, Human
uuucccucacuggguccugcaguu

SEQ ID NO: 1084532 - RNA, 21 nt, Human
uuuguuuggaggaggucugac

SEQ ID NO: 1084533 - RNA, 22 nt, Human
uuuuuguuuuuuguuuuuugcu

SEQ ID NO: 1084534 - RNA, 20 nt, Human
cagguucuggguggucuccu

SEQ ID NO: 1084535 - RNA, 23 nt, Human
ccagguucuggguggucuccuuu

SEQ ID NO: 1084536 - RNA, 18 nt, Human
cuaccagguucugggugg

SEQ ID NO: 1084537 - RNA, 23 nt, Human
guauaggagucuaccagguucug

SEQ ID NO: 1084538 - RNA, 19 nt, Human
uaccagguucugggugguc

SEQ ID NO: 1084539 - RNA, 20 nt, Human
uaccagguucuggguggucu

SEQ ID NO: 1084540 - RNA, 24 nt, Human
ucuaccagguucuggguggucucc

SEQ ID NO: 1084541 - RNA, 24 nt, Human
uguauaggagucuaccagguucug

SEQ ID NO: 1084542 - RNA, 19 nt, Human
aaaaaaaacugaguagaca

SEQ ID NO: 1084543 - RNA, 23 nt, Human
aacacagguaccaaagacugccc

SEQ ID NO: 1084544 - RNA, 23 nt, Human
aaccuucuucccuguuugcccac

SEQ ID NO: 1084545 - RNA, 18 nt, Human
aacuccuagcccaguccc

SEQ ID NO: 1084546 - RNA, 22 nt, Human
aaggagcacuggcugccggggg

SEQ ID NO: 1084547 - RNA, 24 nt, Human
aaguccccucccagaucugugacc

SEQ ID NO: 1084548 - RNA, 24 nt, Human
acacaaaaauuuuaaaaauagcug

SEQ ID NO: 1084549 - RNA, 20 nt, Human
acacagguaccaaagacugc

SEQ ID NO: 1084550 - RNA, 27 nt, Human
acacagguaccaaagacugccccccac

SEQ ID NO: 1084551 - RNA, 23 nt, Human
acagagggagccugggggccaca

SEQ ID NO: 1084552 - RNA, 20 nt, Human
acagucccagaagggcccag

SEQ ID NO: 1084553 - RNA, 23 nt, Human
accaaagacugccccccacggcc

SEQ ID NO: 1084554 - RNA, 21 nt, Human
accuggagugacggggggagc

SEQ ID NO: 1084555 - RNA, 23 nt, Human
acuguacuccagccuggugacag

SEQ ID NO: 1084556 - RNA, 25 nt, Human
acuguacuccagccuggugacagag

SEQ ID NO: 1084557 - RNA, 19 nt, Human
acugugugaccagcaaggu

SEQ ID NO: 1084558 - RNA, 23 nt, Human
acuuugagcccaggagguggagg

SEQ ID NO: 1084559 - RNA, 24 nt, Human
agacccuaucaccgccccccgccc

SEQ ID NO: 1084560 - RNA, 22 nt, Human
agacugccccccacggccccaa

SEQ ID NO: 1084561 - RNA, 22 nt, Human
agagcgagacccuaucaccgcc

SEQ ID NO: 1084562 - RNA, 23 nt, Human
agaguggggcugugggaccagcg

SEQ ID NO: 1084563 - RNA, 22 nt, Human
agcaaggcagccagggcggcac

SEQ ID NO: 1084564 - RNA, 23 nt, Human
agccugggccacauagugagacc

SEQ ID NO: 1084565 - RNA, 24 nt, Human
agccugggccacauagugagaccu

SEQ ID NO: 1084566 - RNA, 23 nt, Human
agccuggugacagagcgagaccc

SEQ ID NO: 1084567 - RNA, 26 nt, Human
agcugggcuuggugguggcaugugcc

SEQ ID NO: 1084568 - RNA, 19 nt, Human
aggagcagaggcgagucug

SEQ ID NO: 1084569 - RNA, 24 nt, Human
aggaguucgagaccagccugggcc

SEQ ID NO: 1084570 - RNA, 24 nt, Human
aggaucacuugagcccaggaguuc

SEQ ID NO: 1084571 - RNA, 18 nt, Human
aggcaggaggaucacuug

SEQ ID NO: 1084572 - RNA, 23 nt, Human
aggcaggaggaucacuugagccc

SEQ ID NO: 1084573 - RNA, 24 nt, Human
aggcaggaggaucacuugagccca

SEQ ID NO: 1084574 - RNA, 24 nt, Human
aggccgaggcaggaggaucacuug

SEQ ID NO: 1084575 - RNA, 22 nt, Human
aggcuauuuggcacccaggucu

SEQ ID NO: 1084576 - RNA, 26 nt, Human
agguaccaaagacugccccccacggc

SEQ ID NO: 1084577 - RNA, 19 nt, Human
agguggaggcugcagugag

SEQ ID NO: 1084578 - RNA, 20 nt, Human
agguggaggcugcagugagc

SEQ ID NO: 1084579 - RNA, 19 nt, Human
aguccagcgucaggaugcc

SEQ ID NO: 1084580 - RNA, 25 nt, Human
agugacggggggagcuugacaagga

SEQ ID NO: 1084581 - RNA, 23 nt, Human
aucacuguacuccagccugguga

SEQ ID NO: 1084582 - RNA, 26 nt, Human
aucucuccccucccugugccucccag

SEQ ID NO: 1084583 - RNA, 20 nt, Human
augaagcagggauuggggcu

SEQ ID NO: 1084584 - RNA, 21 nt, Human
augugggaaccagaacacacu

SEQ ID NO: 1084585 - RNA, 22 nt, Human
augugggaaccagaacacacug

SEQ ID NO: 1084586 - RNA, 18 nt, Human
auuucuucuccacacccc

SEQ ID NO: 1084587 - RNA, 19 nt, Human
caacuccuagcccaguccc

SEQ ID NO: 1084588 - RNA, 22 nt, Human
cacacugauggaggaguuggca

SEQ ID NO: 1084589 - RNA, 23 nt, Human
cacagguaccaaagacugccccc

SEQ ID NO: 1084590 - RNA, 26 nt, Human
caccaaaaaaaaacugaguagacagu

SEQ ID NO: 1084591 - RNA, 19 nt, Human
caccaugcccaugcccccg

SEQ ID NO: 1084592 - RNA, 20 nt, Human
caccaugcccaugcccccgc

SEQ ID NO: 1084593 - RNA, 21 nt, Human
cacccagaccugagcuaggac

SEQ ID NO: 1084594 - RNA, 21 nt, Human
cacuccuggaggccgaggcag

SEQ ID NO: 1084595 - RNA, 19 nt, Human
cacugcgcuggggcggggu

SEQ ID NO: 1084596 - RNA, 20 nt, Human
cacuggcugccggggggggg

SEQ ID NO: 1084597 - RNA, 18 nt, Human
cacuguacuccagccugg

SEQ ID NO: 1084598 - RNA, 18 nt, Human
cacuguacuccagccugg

SEQ ID NO: 1084599 - RNA, 18 nt, Human
cacuguacuccagccugg

SEQ ID NO: 1084600 - RNA, 22 nt, Human
cacuguacuccagccuggugac

SEQ ID NO: 1084601 - RNA, 23 nt, Human
cacuguacuccagccuggugaca

SEQ ID NO: 1084602 - RNA, 24 nt, Human
cacuguacuccagccuggugacag

SEQ ID NO: 1084603 - RNA, 21 nt, Human
cagagcaucccugacgaacac

SEQ ID NO: 1084604 - RNA, 19 nt, Human
cagagccucagcaucccuu

SEQ ID NO: 1084605 - RNA, 19 nt, Human
cagccagggcggcacaggc

SEQ ID NO: 1084606 - RNA, 20 nt, Human
caggagguggaggcugcagu

SEQ ID NO: 1084607 - RNA, 23 nt, Human
caggaugcccaggcuccugggcu

SEQ ID NO: 1084608 - RNA, 18 nt, Human
caggcacagcagcaugac

SEQ ID NO: 1084609 - RNA, 19 nt, Human
caggcaucaacuccaacuc

SEQ ID NO: 1084610 - RNA, 25 nt, Human
caggcuccugggcuuccuccccgag

SEQ ID NO: 1084611 - RNA, 24 nt, Human
cagggcggcacaggcaccaggucc

SEQ ID NO: 1084612 - RNA, 24 nt, Human
cagucaucacuguacuccagccug

SEQ ID NO: 1084613 - RNA, 24 nt, Human
cagugagcagucaucacuguacuc

SEQ ID NO: 1084614 - RNA, 18 nt, Human
cauccuuuggcugggccu

SEQ ID NO: 1084615 - RNA, 24 nt, Human
caucucuccccucccugugccucc

SEQ ID NO: 1084616 - RNA, 24 nt, Human
caugcaccacgcgcugaaggaggc

SEQ ID NO: 1084617 - RNA, 20 nt, Human
ccaaagacugccccccacgg

SEQ ID NO: 1084618 - RNA, 20 nt, Human
ccaacuccuagcccaguccc

SEQ ID NO: 1084619 - RNA, 18 nt, Human
ccacaccccuccccgccc

SEQ ID NO: 1084620 - RNA, 20 nt, Human
ccacauagugagaccuuguc

SEQ ID NO: 1084621 - RNA, 24 nt, Human
ccacggccccaaaaucccccaccc

SEQ ID NO: 1084622 - RNA, 24 nt, Human
ccacuggaccacaggagcagaggc

SEQ ID NO: 1084623 - RNA, 19 nt, Human
ccacuuccaaguccugacu

SEQ ID NO: 1084624 - RNA, 22 nt, Human
ccacuuccaaguccugacuccu

SEQ ID NO: 1084625 - RNA, 25 nt, Human
ccaggaguucgagaccagccugggc

SEQ ID NO: 1084626 - RNA, 20 nt, Human
ccaggucgcccaaguccagc

SEQ ID NO: 1084627 - RNA, 19 nt, Human
ccaugcccccgcccgugga

SEQ ID NO: 1084628 - RNA, 24 nt, Human
cccaaaaucccccacccgggaugc

SEQ ID NO: 1084629 - RNA, 25 nt, Human
cccaaaaucccccacccgggaugcc

SEQ ID NO: 1084630 - RNA, 25 nt, Human
cccacagagcuccuguauccaggca

SEQ ID NO: 1084631 - RNA, 22 nt, Human
cccacccgggaugcccagagga

SEQ ID NO: 1084632 - RNA, 24 nt, Human
cccacggccccaaaaucccccacc

SEQ ID NO: 1084633 - RNA, 20 nt, Human
cccauauauaaaaaugaagc

SEQ ID NO: 1084634 - RNA, 21 nt, Human
cccauauauaaaaaugaagca

SEQ ID NO: 1084635 - RNA, 23 nt, Human
cccccacccgggaugcccagagg

SEQ ID NO: 1084636 - RNA, 21 nt, Human
ccccccacggccccaaaaucc

SEQ ID NO: 1084637 - RNA, 25 nt, Human
cccccgccccaccaaaaaaaaacug

SEQ ID NO: 1084638 - RNA, 22 nt, Human
ccccgccccaccaaaaaaaaac

SEQ ID NO: 1084639 - RNA, 18 nt, Human
ccccgcccgacccugucu

SEQ ID NO: 1084640 - RNA, 18 nt, Human
ccccucccugugccuccc

SEQ ID NO: 1084641 - RNA, 19 nt, Human
cccgccccaccaaaaaaaa

SEQ ID NO: 1084642 - RNA, 23 nt, Human
cccgccccaccaaaaaaaaacug

SEQ ID NO: 1084643 - RNA, 21 nt, Human
cccugacgaacacagguacca

SEQ ID NO: 1084644 - RNA, 22 nt, Human
cccuuucccucccagagccuca

SEQ ID NO: 1084645 - RNA, 20 nt, Human
ccgccccaccaaaaaaaaac

SEQ ID NO: 1084646 - RNA, 20 nt, Human
ccgccccccgccccaccaaa

SEQ ID NO: 1084647 - RNA, 19 nt, Human
ccggggggggggggggugu

SEQ ID NO: 1084648 - RNA, 23 nt, Human
ccuaucaccgccccccgccccac

SEQ ID NO: 1084649 - RNA, 22 nt, Human
ccugagcuaggacagagggagc

SEQ ID NO: 1084650 - RNA, 21 nt, Human
ccugggccacauagugagacc

SEQ ID NO: 1084651 - RNA, 18 nt, Human
ccugucuaaacuaauggg

SEQ ID NO: 1084652 - RNA, 24 nt, Human
cgagaccagccugggccacauagu

SEQ ID NO: 1084653 - RNA, 21 nt, Human
cgagacccuaucaccgccccc

SEQ ID NO: 1084654 - RNA, 22 nt, Human
cgagacccuaucaccgcccccc

SEQ ID NO: 1084655 - RNA, 19 nt, Human
cgagcacacgaguguaaag

SEQ ID NO: 1084656 - RNA, 20 nt, Human
cgaggcaggaggaucacuug

SEQ ID NO: 1084657 - RNA, 24 nt, Human
cgaggcaggaggaucacuugagcc

SEQ ID NO: 1084658 - RNA, 20 nt, Human
cgcucagcaucaucggugac

SEQ ID NO: 1084659 - RNA, 21 nt, Human
cggccccaaaaucccccaccc

SEQ ID NO: 1084660 - RNA, 21 nt, Human
cuacugcauccuuuggcuggg

SEQ ID NO: 1084661 - RNA, 19 nt, Human
cuccacaccccuccccgcc

SEQ ID NO: 1084662 - RNA, 23 nt, Human
cuccacaccccuccccgcccgac

SEQ ID NO: 1084663 - RNA, 24 nt, Human
cuccagccuggugacagagcgaga

SEQ ID NO: 1084664 - RNA, 22 nt, Human
cuccuagcccagucccgggggc

SEQ ID NO: 1084665 - RNA, 22 nt, Human
cuccugccggguccgcccuugg

SEQ ID NO: 1084666 - RNA, 26 nt, Human
cugacuccagucuugcuaacacacac

SEQ ID NO: 1084667 - RNA, 23 nt, Human
cuggaccucgguguccccaucug

SEQ ID NO: 1084668 - RNA, 20 nt, Human
cugggcuuccuccugccggg

SEQ ID NO: 1084669 - RNA, 21 nt, Human
cuuaaguccccucccagaucu

SEQ ID NO: 1084670 - RNA, 19 nt, Human
cuuugagcccaggaggugg

SEQ ID NO: 1084671 - RNA, 23 nt, Human
cuuuggcugggccuuguugaccc

SEQ ID NO: 1084672 - RNA, 20 nt, Human
gagaugcugcacaugcaccc

SEQ ID NO: 1084673 - RNA, 18 nt, Human
gagcgagcacacgagugu

SEQ ID NO: 1084674 - RNA, 18 nt, Human
gagugcccugggggcaag

SEQ ID NO: 1084675 - RNA, 24 nt, Human
gaucacuugagcccaggaguucga

SEQ ID NO: 1084676 - RNA, 22 nt, Human
gcaugugccuguaguccuagcu

SEQ ID NO: 1084677 - RNA, 23 nt, Human
gccacauagugagaccuugucuc

SEQ ID NO: 1084678 - RNA, 24 nt, Human
gcccaggagguggaggcugcagug

SEQ ID NO: 1084679 - RNA, 22 nt, Human
gcccaggaguucgagaccagcc

SEQ ID NO: 1084680 - RNA, 23 nt, Human
gccgcgagggcagggaugggagu

SEQ ID NO: 1084681 - RNA, 22 nt, Human
gcgagacccuaucaccgccccc

SEQ ID NO: 1084682 - RNA, 21 nt, Human
gcugccggggggggggggggu

SEQ ID NO: 1084683 - RNA, 19 nt, Human
ggaagcgugccccauaccc

SEQ ID NO: 1084684 - RNA, 22 nt, Human
ggaggccgaggcaggaggauca

SEQ ID NO: 1084685 - RNA, 18 nt, Human
ggaggcugcagugagcag

SEQ ID NO: 1084686 - RNA, 23 nt, Human
ggaucacuugagcccaggaguuc

SEQ ID NO: 1084687 - RNA, 22 nt, Human
ggcaagaucacuggacugggag

SEQ ID NO: 1084688 - RNA, 22 nt, Human
ggcaagcucauuucuucuccac

SEQ ID NO: 1084689 - RNA, 18 nt, Human
ggcaaguggcacaccccc

SEQ ID NO: 1084690 - RNA, 18 nt, Human
ggcacccaggucuauggu

SEQ ID NO: 1084691 - RNA, 18 nt, Human
ggccgaggcaggaggauc

SEQ ID NO: 1084692 - RNA, 19 nt, Human
ggcuccugggcuuccuccu

SEQ ID NO: 1084693 - RNA, 22 nt, Human
ggcugccggggggggggggggu

SEQ ID NO: 1084694 - RNA, 20 nt, Human
ggcuuggugguggcaugugc

SEQ ID NO: 1084695 - RNA, 19 nt, Human
gggcaaguggcacaccccc

SEQ ID NO: 1084696 - RNA, 22 nt, Human
gggcaaguggcacacccccuuc

SEQ ID NO: 1084697 - RNA, 22 nt, Human
ggggagguggaucuuccagucg

SEQ ID NO: 1084698 - RNA, 19 nt, Human
ggggcugugggaccagcgc

SEQ ID NO: 1084699 - RNA, 22 nt, Human
ggggcugugggaccagcgccca

SEQ ID NO: 1084700 - RNA, 21 nt, Human
ggggggguguguggagcuggg

SEQ ID NO: 1084701 - RNA, 20 nt, Human
gggguauaggcaagcagcaa

SEQ ID NO: 1084702 - RNA, 23 nt, Human
gguagccgcgagggcagggaugg

SEQ ID NO: 1084703 - RNA, 25 nt, Human
ggucccaaccuucuucccuguuugc

SEQ ID NO: 1084704 - RNA, 23 nt, Human
guacuccagccuggugacagagc

SEQ ID NO: 1084705 - RNA, 18 nt, Human
guccagcgucaggaugcc

SEQ ID NO: 1084706 - RNA, 23 nt, Human
gucuuuuccucuggaccucggug

SEQ ID NO: 1084707 - RNA, 22 nt, Human
uaacugccaacgugaguucaga

SEQ ID NO: 1084708 - RNA, 19 nt, Human
uacuccagccuggugacag

SEQ ID NO: 1084709 - RNA, 23 nt, Human
uacuccagccuggugacagagcg

SEQ ID NO: 1084710 - RNA, 19 nt, Human
uaggacagagggagccugg

SEQ ID NO: 1084711 - RNA, 24 nt, Human
uaggcaagucccuuucccucccag

SEQ ID NO: 1084712 - RNA, 30 nt, Human
uaggcaagucccuuucccucccagagccuu

SEQ ID NO: 1084713 - RNA, 24 nt, Human
uaguccuagcuacucgagaggcug

SEQ ID NO: 1084714 - RNA, 18 nt, Human
uauugggcaagaucacug

SEQ ID NO: 1084715 - RNA, 21 nt, Human
ucaacuccaacucccacuccu

SEQ ID NO: 1084716 - RNA, 20 nt, Human
ucacuguacuccagccuggu

SEQ ID NO: 1084717 - RNA, 23 nt, Human
ucacuguacuccagccuggugac

SEQ ID NO: 1084718 - RNA, 20 nt, Human
ucacuugagcccaggaguuc

SEQ ID NO: 1084719 - RNA, 24 nt, Human
uccacaccccuccccgcccgaccc

SEQ ID NO: 1084720 - RNA, 22 nt, Human
uccagccuggugacagagcgag

SEQ ID NO: 1084721 - RNA, 27 nt, Human
uccagcgcacagucccagaagggcccc

SEQ ID NO: 1084722 - RNA, 21 nt, Human
uccccagagcucaggacccug

SEQ ID NO: 1084723 - RNA, 19 nt, Human
uccggccacuggaccacag

SEQ ID NO: 1084724 - RNA, 21 nt, Human
uccggccacuggaccacagga

SEQ ID NO: 1084725 - RNA, 24 nt, Human
ucgcccaucucuccccucccugug

SEQ ID NO: 1084726 - RNA, 22 nt, Human
ucggagccgcuggccaauaugu

SEQ ID NO: 1084727 - RNA, 23 nt, Human
ucuccuaggauggcuguggggau

SEQ ID NO: 1084728 - RNA, 21 nt, Human
ucucgcugcugggggcggggc

SEQ ID NO: 1084729 - RNA, 20 nt, Human
ucuuucaagaacauucacuc

SEQ ID NO: 1084730 - RNA, 22 nt, Human
ugaagccuacuucacucccaaa

SEQ ID NO: 1084731 - RNA, 18 nt, Human
ugacggggggagcuugac

SEQ ID NO: 1084732 - RNA, 20 nt, Human
ugacuccuuugagccauccc

SEQ ID NO: 1084733 - RNA, 20 nt, Human
ugagaaaaggcaguggggag

SEQ ID NO: 1084734 - RNA, 21 nt, Human
ugagaaaaggcaguggggagg

SEQ ID NO: 1084735 - RNA, 23 nt, Human
ugagaaaaggcaguggggaggug

SEQ ID NO: 1084736 - RNA, 23 nt, Human
ugagcccaggaguucgagaccag

SEQ ID NO: 1084737 - RNA, 19 nt, Human
ugaggugugacauauggga

SEQ ID NO: 1084738 - RNA, 22 nt, Human
ugcccagaggagugcccugggg

SEQ ID NO: 1084739 - RNA, 24 nt, Human
ugcccagaggagugcccugggggc

SEQ ID NO: 1084740 - RNA, 21 nt, Human
ugcccugggggcaaguggcac

SEQ ID NO: 1084741 - RNA, 23 nt, Human
ugcccugggggcaaguggcacac

SEQ ID NO: 1084742 - RNA, 19 nt, Human
ugcccugugaugugcuguu

SEQ ID NO: 1084743 - RNA, 22 nt, Human
ugccuguaguccuagcuacucg

SEQ ID NO: 1084744 - RNA, 23 nt, Human
ugccuguaguccuagcuacucga

SEQ ID NO: 1084745 - RNA, 21 nt, Human
ugcugggggcggggcuuaagc

SEQ ID NO: 1084746 - RNA, 26 nt, Human
uggauuuccuucagcuacccugaugu

SEQ ID NO: 1084747 - RNA, 24 nt, Human
uggcagagcaggcacagcagcauu

SEQ ID NO: 1084748 - RNA, 23 nt, Human
ugggauguucucgcugcuggggg

SEQ ID NO: 1084749 - RNA, 24 nt, Human
ugguagccgcgagggcagggaugg

SEQ ID NO: 1084750 - RNA, 22 nt, Human
ugguggcaugugccuguagucc

SEQ ID NO: 1084751 - RNA, 20 nt, Human
uguaaagaauggcacccaga

SEQ ID NO: 1084752 - RNA, 24 nt, Human
uguccggccacuggaccacaggag

SEQ ID NO: 1084753 - RNA, 24 nt, Human
ugugaugugugcgugagcgagcac

SEQ ID NO: 1084754 - RNA, 21 nt, Human
ugugccuguaguccuagcuac

SEQ ID NO: 1084755 - RNA, 24 nt, Human
uguuuuuguuuccaaauggcugga

SEQ ID NO: 1084756 - RNA, 20 nt, Human
uucuccacaccccuccccgc

SEQ ID NO: 1084757 - RNA, 24 nt, Human
uucucgcugcugggggcggggcuu

SEQ ID NO: 1084758 - RNA, 18 nt, Human
uucucuaaggaagaacaa

SEQ ID NO: 1084759 - RNA, 22 nt, Human
uugagcccaggaguucgagacc

SEQ ID NO: 1084760 - RNA, 19 nt, Human
uuucuaaggaaaaugguuc

SEQ ID NO: 1084761 - RNA, 21 nt, Human
uuugcccacucucagaccccg

SEQ ID NO: 1084762 - RNA, 22 nt, Human
ccucuaagauuauaguuauuaa

SEQ ID NO: 1084763 - RNA, 19 nt, Human
aaaaaaaacugaguagaca

SEQ ID NO: 1084764 - RNA, 23 nt, Human
aacacagguaccaaagacugccc

SEQ ID NO: 1084765 - RNA, 23 nt, Human
aaccuucuucccuguuugcccac

SEQ ID NO: 1084766 - RNA, 18 nt, Human
aacuccuagcccaguccc

SEQ ID NO: 1084767 - RNA, 22 nt, Human
aaggagcacuggcugccggggg

SEQ ID NO: 1084768 - RNA, 24 nt, Human
aaguccccucccagaucugugacc

SEQ ID NO: 1084769 - RNA, 24 nt, Human
acacaaaaauuuuaaaaauagcug

SEQ ID NO: 1084770 - RNA, 23 nt, Human
acagagggagccugggggccaca

SEQ ID NO: 1084771 - RNA, 25 nt, Human
acagguaccaaagacugccccccac

SEQ ID NO: 1084772 - RNA, 20 nt, Human
acagucccagaagggcccag

SEQ ID NO: 1084773 - RNA, 23 nt, Human
accaaagacugccccccacggcc

SEQ ID NO: 1084774 - RNA, 19 nt, Human
acccugauguccccacuuc

SEQ ID NO: 1084775 - RNA, 23 nt, Human
acuguacuccagccuggugacag

SEQ ID NO: 1084776 - RNA, 25 nt, Human
acuguacuccagccuggugacagag

SEQ ID NO: 1084777 - RNA, 19 nt, Human
acugugugaccagcaaggu

SEQ ID NO: 1084778 - RNA, 20 nt, Human
acuuccaaguccugacuccu

SEQ ID NO: 1084779 - RNA, 23 nt, Human
acuuugagcccaggagguggagg

SEQ ID NO: 1084780 - RNA, 24 nt, Human
agacccuaucaccgccccccgccc

SEQ ID NO: 1084781 - RNA, 22 nt, Human
agacugccccccacggccccaa

SEQ ID NO: 1084782 - RNA, 23 nt, Human
agaguggggcugugggaccagcg

SEQ ID NO: 1084783 - RNA, 22 nt, Human
agcaaggcagccagggcggcac

SEQ ID NO: 1084784 - RNA, 23 nt, Human
agccugggccacauagugagacc

SEQ ID NO: 1084785 - RNA, 24 nt, Human
agccugggccacauagugagaccu

SEQ ID NO: 1084786 - RNA, 23 nt, Human
agccuggugacagagcgagaccc

SEQ ID NO: 1084787 - RNA, 26 nt, Human
agcugggcuuggugguggcaugugcc

SEQ ID NO: 1084788 - RNA, 19 nt, Human
aggagcagaggcgagucug

SEQ ID NO: 1084789 - RNA, 24 nt, Human
aggaguucgagaccagccugggcc

SEQ ID NO: 1084790 - RNA, 24 nt, Human
aggaucacuugagcccaggaguuc

SEQ ID NO: 1084791 - RNA, 18 nt, Human
aggcaggaggaucacuug

SEQ ID NO: 1084792 - RNA, 23 nt, Human
aggcaggaggaucacuugagccc

SEQ ID NO: 1084793 - RNA, 24 nt, Human
aggcaggaggaucacuugagccca

SEQ ID NO: 1084794 - RNA, 24 nt, Human
aggccgaggcaggaggaucacuug

SEQ ID NO: 1084795 - RNA, 22 nt, Human
aggcuauuuggcacccaggucu

SEQ ID NO: 1084796 - RNA, 26 nt, Human
agguaccaaagacugccccccacggc

SEQ ID NO: 1084797 - RNA, 19 nt, Human
agguggaggcugcagugag

SEQ ID NO: 1084798 - RNA, 22 nt, Human
agguggaggcugcagugagcag

SEQ ID NO: 1084799 - RNA, 19 nt, Human
aguccagcgucaggaugcc

SEQ ID NO: 1084800 - RNA, 25 nt, Human
agugacggggggagcuugacaagga

SEQ ID NO: 1084801 - RNA, 26 nt, Human
aucucuccccucccugugccucccag

SEQ ID NO: 1084802 - RNA, 20 nt, Human
augaagcagggauuggggcu

SEQ ID NO: 1084803 - RNA, 25 nt, Human
augcccagaggagugcccugggggc

SEQ ID NO: 1084804 - RNA, 21 nt, Human
augugggaaccagaacacacu

SEQ ID NO: 1084805 - RNA, 22 nt, Human
augugggaaccagaacacacug

SEQ ID NO: 1084806 - RNA, 18 nt, Human
auuucuucuccacacccc

SEQ ID NO: 1084807 - RNA, 19 nt, Human
caacuccuagcccaguccc

SEQ ID NO: 1084808 - RNA, 22 nt, Human
cacacugauggaggaguuggca

SEQ ID NO: 1084809 - RNA, 19 nt, Human
cacagguaccaaagacugc

SEQ ID NO: 1084810 - RNA, 23 nt, Human
cacagguaccaaagacugccccc

SEQ ID NO: 1084811 - RNA, 25 nt, Human
caccaaaaaaaaacugaguagacag

SEQ ID NO: 1084812 - RNA, 19 nt, Human
caccaugcccaugcccccg

SEQ ID NO: 1084813 - RNA, 20 nt, Human
caccaugcccaugcccccgc

SEQ ID NO: 1084814 - RNA, 21 nt, Human
cacccagaccugagcuaggac

SEQ ID NO: 1084815 - RNA, 22 nt, Human
caccuggagugacggggggagc

SEQ ID NO: 1084816 - RNA, 21 nt, Human
cacuccuggaggccgaggcag

SEQ ID NO: 1084817 - RNA, 19 nt, Human
cacugcgcuggggcggggu

SEQ ID NO: 1084818 - RNA, 20 nt, Human
cacuggcugccggggggggg

SEQ ID NO: 1084819 - RNA, 18 nt, Human
cacuguacuccagccugg

SEQ ID NO: 1084820 - RNA, 18 nt, Human
cacuguacuccagccugg

SEQ ID NO: 1084821 - RNA, 18 nt, Human
cacuguacuccagccugg

SEQ ID NO: 1084822 - RNA, 21 nt, Human
cacuguacuccagccugguga

SEQ ID NO: 1084823 - RNA, 22 nt, Human
cacuguacuccagccuggugac

SEQ ID NO: 1084824 - RNA, 23 nt, Human
cacuguacuccagccuggugaca

SEQ ID NO: 1084825 - RNA, 23 nt, Human
cacuguacuccagccuggugaca

SEQ ID NO: 1084826 - RNA, 21 nt, Human
cagagcaucccugacgaacac

SEQ ID NO: 1084827 - RNA, 19 nt, Human
cagagccucagcaucccuu

SEQ ID NO: 1084828 - RNA, 23 nt, Human
cagagcgagacccuaucaccgcc

SEQ ID NO: 1084829 - RNA, 19 nt, Human
cagccagggcggcacaggc

SEQ ID NO: 1084830 - RNA, 20 nt, Human
caggagguggaggcugcagu

SEQ ID NO: 1084831 - RNA, 18 nt, Human
caggcacagcagcaugac

SEQ ID NO: 1084832 - RNA, 25 nt, Human
caggcuccugggcuuccuccccgag

SEQ ID NO: 1084833 - RNA, 21 nt, Human
caggcuccugggcuuccuccu

SEQ ID NO: 1084834 - RNA, 24 nt, Human
cagggcggcacaggcaccaggucc

SEQ ID NO: 1084835 - RNA, 24 nt, Human
cagucaucacuguacuccagccug

SEQ ID NO: 1084836 - RNA, 24 nt, Human
cagugagcagucaucacuguacuc

SEQ ID NO: 1084837 - RNA, 18 nt, Human
cauccuuuggcugggccu

SEQ ID NO: 1084838 - RNA, 24 nt, Human
caucucuccccucccugugccucc

SEQ ID NO: 1084839 - RNA, 24 nt, Human
caugcaccacgcgcugaaggaggc

SEQ ID NO: 1084840 - RNA, 22 nt, Human
ccaaaaucccccacccgggaug

SEQ ID NO: 1084841 - RNA, 24 nt, Human
ccaaaaucccccacccgggaugcc

SEQ ID NO: 1084842 - RNA, 20 nt, Human
ccaaagacugccccccacgg

SEQ ID NO: 1084843 - RNA, 21 nt, Human
ccaacuccuagcccagucccg

SEQ ID NO: 1084844 - RNA, 18 nt, Human
ccacaccccuccccgccc

SEQ ID NO: 1084845 - RNA, 21 nt, Human
ccacaccccuccccgcccgac

SEQ ID NO: 1084846 - RNA, 20 nt, Human
ccacauagugagaccuuguc

SEQ ID NO: 1084847 - RNA, 19 nt, Human
ccacuuccaaguccugacu

SEQ ID NO: 1084848 - RNA, 25 nt, Human
ccaggaguucgagaccagccugggc

SEQ ID NO: 1084849 - RNA, 20 nt, Human
ccaggucgcccaaguccagc

SEQ ID NO: 1084850 - RNA, 19 nt, Human
ccaugcccccgcccgugga

SEQ ID NO: 1084851 - RNA, 25 nt, Human
cccacagagcuccuguauccaggca

SEQ ID NO: 1084852 - RNA, 22 nt, Human
cccacccgggaugcccagagga

SEQ ID NO: 1084853 - RNA, 20 nt, Human
cccauauauaaaaaugaagc

SEQ ID NO: 1084854 - RNA, 21 nt, Human
cccauauauaaaaaugaagca

SEQ ID NO: 1084855 - RNA, 23 nt, Human
cccccacccgggaugcccagagg

SEQ ID NO: 1084856 - RNA, 21 nt, Human
ccccccacggccccaaaaucc

SEQ ID NO: 1084857 - RNA, 22 nt, Human
ccccgccccaccaaaaaaaaac

SEQ ID NO: 1084858 - RNA, 18 nt, Human
ccccgcccgacccugucu

SEQ ID NO: 1084859 - RNA, 18 nt, Human
ccccucccugugccuccc

SEQ ID NO: 1084860 - RNA, 19 nt, Human
cccgccccaccaaaaaaaa

SEQ ID NO: 1084861 - RNA, 23 nt, Human
cccgccccaccaaaaaaaaacug

SEQ ID NO: 1084862 - RNA, 21 nt, Human
cccugacgaacacagguacca

SEQ ID NO: 1084863 - RNA, 22 nt, Human
cccuuucccucccagagccuca

SEQ ID NO: 1084864 - RNA, 20 nt, Human
ccgccccaccaaaaaaaaac

SEQ ID NO: 1084865 - RNA, 22 nt, Human
ccgccccaccaaaaaaaaacug

SEQ ID NO: 1084866 - RNA, 20 nt, Human
ccgccccccgccccaccaaa

SEQ ID NO: 1084867 - RNA, 19 nt, Human
ccggggggggggggggugu

SEQ ID NO: 1084868 - RNA, 23 nt, Human
ccuaucaccgccccccgccccac

SEQ ID NO: 1084869 - RNA, 22 nt, Human
ccugagcuaggacagagggagc

SEQ ID NO: 1084870 - RNA, 21 nt, Human
ccugggccacauagugagacc

SEQ ID NO: 1084871 - RNA, 19 nt, Human
ccuguaguccuagcuacuc

SEQ ID NO: 1084872 - RNA, 18 nt, Human
ccugucuaaacuaauggg

SEQ ID NO: 1084873 - RNA, 24 nt, Human
cgagaccagccugggccacauagu

SEQ ID NO: 1084874 - RNA, 21 nt, Human
cgagacccuaucaccgccccc

SEQ ID NO: 1084875 - RNA, 22 nt, Human
cgagacccuaucaccgcccccc

SEQ ID NO: 1084876 - RNA, 19 nt, Human
cgagcacacgaguguaaag

SEQ ID NO: 1084877 - RNA, 20 nt, Human
cgaggcaggaggaucacuug

SEQ ID NO: 1084878 - RNA, 24 nt, Human
cgaggcaggaggaucacuugagcc

SEQ ID NO: 1084879 - RNA, 20 nt, Human
cgcucagcaucaucggugac

SEQ ID NO: 1084880 - RNA, 20 nt, Human
cggccccaaaaucccccacc

SEQ ID NO: 1084881 - RNA, 21 nt, Human
cggccccaaaaucccccaccc

SEQ ID NO: 1084882 - RNA, 21 nt, Human
cuacugcauccuuuggcuggg

SEQ ID NO: 1084883 - RNA, 19 nt, Human
cuccacaccccuccccgcc

SEQ ID NO: 1084884 - RNA, 22 nt, Human
cuccuagcccagucccgggggc

SEQ ID NO: 1084885 - RNA, 23 nt, Human
cuccugccggguccgcccuuggg

SEQ ID NO: 1084886 - RNA, 26 nt, Human
cugacuccagucuugcuaacacacac

SEQ ID NO: 1084887 - RNA, 23 nt, Human
cuggaccucgguguccccaucug

SEQ ID NO: 1084888 - RNA, 24 nt, Human
cuggaggccgaggcaggaggauca

SEQ ID NO: 1084889 - RNA, 20 nt, Human
cugggcuuccuccugccggg

SEQ ID NO: 1084890 - RNA, 21 nt, Human
cuuaaguccccucccagaucu

SEQ ID NO: 1084891 - RNA, 19 nt, Human
cuuugagcccaggaggugg

SEQ ID NO: 1084892 - RNA, 24 nt, Human
cuuuggcugggccuuguugacccc

SEQ ID NO: 1084893 - RNA, 20 nt, Human
gagaugcugcacaugcaccc

SEQ ID NO: 1084894 - RNA, 18 nt, Human
gagcgagcacacgagugu

SEQ ID NO: 1084895 - RNA, 18 nt, Human
gagugcccugggggcaag

SEQ ID NO: 1084896 - RNA, 24 nt, Human
gaucacuugagcccaggaguucga

SEQ ID NO: 1084897 - RNA, 23 nt, Human
gccacauagugagaccuugucuc

SEQ ID NO: 1084898 - RNA, 24 nt, Human
gcccaggagguggaggcugcagug

SEQ ID NO: 1084899 - RNA, 22 nt, Human
gcccaggaguucgagaccagcc

SEQ ID NO: 1084900 - RNA, 19 nt, Human
gccccaaaaucccccaccc

SEQ ID NO: 1084901 - RNA, 23 nt, Human
gccgcgagggcagggaugggagu

SEQ ID NO: 1084902 - RNA, 22 nt, Human
gcgagacccuaucaccgccccc

SEQ ID NO: 1084903 - RNA, 21 nt, Human
gcugccggggggggggggggu

SEQ ID NO: 1084904 - RNA, 19 nt, Human
ggaagcgugccccauaccc

SEQ ID NO: 1084905 - RNA, 18 nt, Human
ggaggcugcagugagcag

SEQ ID NO: 1084906 - RNA, 23 nt, Human
ggaucacuugagcccaggaguuc

SEQ ID NO: 1084907 - RNA, 22 nt, Human
ggcaagaucacuggacugggag

SEQ ID NO: 1084908 - RNA, 22 nt, Human
ggcaagcucauuucuucuccac

SEQ ID NO: 1084909 - RNA, 18 nt, Human
ggcaaguggcacaccccc

SEQ ID NO: 1084910 - RNA, 18 nt, Human
ggcaaguggcacaccccc

SEQ ID NO: 1084911 - RNA, 18 nt, Human
ggcacccaggucuauggu

SEQ ID NO: 1084912 - RNA, 18 nt, Human
ggccgaggcaggaggauc

SEQ ID NO: 1084913 - RNA, 22 nt, Human
ggcugccggggggggggggggu

SEQ ID NO: 1084914 - RNA, 20 nt, Human
ggcuuggugguggcaugugc

SEQ ID NO: 1084915 - RNA, 19 nt, Human
gggcaaguggcacaccccc

SEQ ID NO: 1084916 - RNA, 22 nt, Human
ggggagguggaucuuccagucg

SEQ ID NO: 1084917 - RNA, 19 nt, Human
ggggcugugggaccagcgc

SEQ ID NO: 1084918 - RNA, 22 nt, Human
ggggcugugggaccagcgccca

SEQ ID NO: 1084919 - RNA, 21 nt, Human
ggggggguguguggagcuggg

SEQ ID NO: 1084920 - RNA, 19 nt, Human
ggguauaggcaagcagcaa

SEQ ID NO: 1084921 - RNA, 23 nt, Human
gguagccgcgagggcagggaugg

SEQ ID NO: 1084922 - RNA, 25 nt, Human
ggucccaaccuucuucccuguuugc

SEQ ID NO: 1084923 - RNA, 23 nt, Human
guacuccagccuggugacagagc

SEQ ID NO: 1084924 - RNA, 18 nt, Human
guccagcgucaggaugcc

SEQ ID NO: 1084925 - RNA, 23 nt, Human
gucuuuuccucuggaccucggug

SEQ ID NO: 1084926 - RNA, 22 nt, Human
uaacugccaacgugaguucaga

SEQ ID NO: 1084927 - RNA, 19 nt, Human
uacuccagccuggugacag

SEQ ID NO: 1084928 - RNA, 23 nt, Human
uacuccagccuggugacagagcg

SEQ ID NO: 1084929 - RNA, 19 nt, Human
uaggacagagggagccugg

SEQ ID NO: 1084930 - RNA, 24 nt, Human
uaggcaagucccuuucccucccag

SEQ ID NO: 1084931 - RNA, 30 nt, Human; identical to SEQ ID NO: 1084712

SEQ ID NO: 1084932 - RNA, 24 nt, Human
uaguccuagcuacucgagaggcug

SEQ ID NO: 1084933 - RNA, 18 nt, Human
uauugggcaagaucacug

SEQ ID NO: 1084934 - RNA, 21 nt, Human
ucaacuccaacucccacuccu

SEQ ID NO: 1084935 - RNA, 19 nt, Human
ucacuguacuccagccugg

SEQ ID NO: 1084936 - RNA, 20 nt, Human
ucacuguacuccagccuggu

SEQ ID NO: 1084937 - RNA, 23 nt, Human
ucacuguacuccagccuggugac

SEQ ID NO: 1084938 - RNA, 20 nt, Human
ucacuugagcccaggaguuc

SEQ ID NO: 1084939 - RNA, 24 nt, Human
ucaggaugcccaggcuccugggcu

SEQ ID NO: 1084940 - RNA, 24 nt, Human
uccacaccccuccccgcccgaccc

SEQ ID NO: 1084941 - RNA, 22 nt, Human
uccagccuggugacagagcgag

SEQ ID NO: 1084942 - RNA, 23 nt, Human
uccagccuggugacagagcgaga

SEQ ID NO: 1084943 - RNA, 27 nt, Human
uccagcgcacagucccagaagggcccc

SEQ ID NO: 1084944 - RNA, 21 nt, Human
uccccagagcucaggacccug

SEQ ID NO: 1084945 - RNA, 19 nt, Human
uccggccacuggaccacag

SEQ ID NO: 1084946 - RNA, 21 nt, Human
uccggccacuggaccacagga

SEQ ID NO: 1084947 - RNA, 24 nt, Human
ucgcccaucucuccccucccugug

SEQ ID NO: 1084948 - RNA, 22 nt, Human
ucggagccgcuggccaauaugu

SEQ ID NO: 1084949 - RNA, 23 nt, Human
ucuccuaggauggcuguggggau

SEQ ID NO: 1084950 - RNA, 21 nt, Human
ucucgcugcugggggcggggc

SEQ ID NO: 1084951 - RNA, 20 nt, Human
ucuuucaagaacauucacuc

SEQ ID NO: 1084952 - RNA, 22 nt, Human
ugaagccuacuucacucccaaa

SEQ ID NO: 1084953 - RNA, 18 nt, Human
ugacggggggagcuugac

SEQ ID NO: 1084954 - RNA, 20 nt, Human
ugacuccuuugagccauccc

SEQ ID NO: 1084955 - RNA, 20 nt, Human
ugagaaaaggcaguggggag

SEQ ID NO: 1084956 - RNA, 21 nt, Human
ugagaaaaggcaguggggagg

SEQ ID NO: 1084957 - RNA, 23 nt, Human
ugagaaaaggcaguggggaggug

SEQ ID NO: 1084958 - RNA, 23 nt, Human
ugagcccaggaguucgagaccag

SEQ ID NO: 1084959 - RNA, 19 nt, Human
ugaggugugacauauggga

SEQ ID NO: 1084960 - RNA, 22 nt, Human
ugcccagaggagugcccugggg

SEQ ID NO: 1084961 - RNA, 21 nt, Human
ugcccugggggcaaguggcac

SEQ ID NO: 1084962 - RNA, 23 nt, Human
ugcccugggggcaaguggcacac

SEQ ID NO: 1084963 - RNA, 19 nt, Human
ugcccugugaugugcuguu

SEQ ID NO: 1084964 - RNA, 21 nt, Human
ugccuguaguccuagcuacuc

SEQ ID NO: 1084965 - RNA, 22 nt, Human
ugccuguaguccuagcuacucg

SEQ ID NO: 1084966 - RNA, 21 nt, Human
ugcugggggcggggcuuaagc

SEQ ID NO: 1084967 - RNA, 20 nt, Human
uggaccacaggagcagaggc

SEQ ID NO: 1084968 - RNA, 26 nt, Human
uggauuuccuucagcuacccugaugu

SEQ ID NO: 1084969 - RNA, 24 nt, Human
uggcagagcaggcacagcagcauu

SEQ ID NO: 1084970 - RNA, 24 nt, Human
uggcaugugccuguaguccuagcu

SEQ ID NO: 1084971 - RNA, 23 nt, Human
ugggauguucucgcugcuggggg

SEQ ID NO: 1084972 - RNA, 24 nt, Human
ugguagccgcgagggcagggaugg

SEQ ID NO: 1084973 - RNA, 22 nt, Human
ugguggcaugugccuguagucc

SEQ ID NO: 1084974 - RNA, 20 nt, Human
uguaaagaauggcacccaga

SEQ ID NO: 1084975 - RNA, 24 nt, Human
uguccggccacuggaccacaggag

SEQ ID NO: 1084976 - RNA, 24 nt, Human
ugugaugugugcgugagcgagcac

SEQ ID NO: 1084977 - RNA, 21 nt, Human
ugugccuguaguccuagcuac

SEQ ID NO: 1084978 - RNA, 18 nt, Human
uguggauuuccuucagcu

SEQ ID NO: 1084979 - RNA, 24 nt, Human
uguuuuuguuuccaaauggcugga

SEQ ID NO: 1084980 - RNA, 20 nt, Human
uucuccacaccccuccccgc

SEQ ID NO: 1084981 - RNA, 24 nt, Human
uucucgcugcugggggcggggcuu

SEQ ID NO: 1084982 - RNA, 18 nt, Human
uucucuaaggaagaacaa

SEQ ID NO: 1084983 - RNA, 22 nt, Human
uugagcccaggaguucgagacc

SEQ ID NO: 1084984 - RNA, 20 nt, Human
uuggugguggcaugugccug

SEQ ID NO: 1084985 - RNA, 19 nt, Human
uuucuaaggaaaaugguuc

SEQ ID NO: 1084986 - RNA, 21 nt, Human
uuugcccacucucagaccccg

SEQ ID NO: 1084987 - RNA, 20 nt, Human
aaaaaaaggcagagcuucuu

SEQ ID NO: 1084988 - RNA, 26 nt, Human
aaaaaagcaucccuaaauucacuucg

SEQ ID NO: 1084989 - RNA, 23 nt, Human
aaacagacuaaugauuaacaaac

SEQ ID NO: 1084990 - RNA, 21 nt, Human
aaaccagggucacucagagga

SEQ ID NO: 1084991 - RNA, 18 nt, Human
aaacccccaaauugaaca

SEQ ID NO: 1084992 - RNA, 19 nt, Human
aacagccacuaccugccac

SEQ ID NO: 1084993 - RNA, 18 nt, Human
aaccaguuggaucuggag

SEQ ID NO: 1084994 - RNA, 19 nt, Human
aagaaaugugagacaugaa

SEQ ID NO: 1084995 - RNA, 20 nt, Human
aagaauaaaauauggaucua

SEQ ID NO: 1084996 - RNA, 25 nt, Human
aagcagagagaaggagaaauaacuu

SEQ ID NO: 1084997 - RNA, 24 nt, Human
aaggugaucaaagccugggaugau

SEQ ID NO: 1084998 - RNA, 23 nt, Human
acuggaccauguucuggucccaa

SEQ ID NO: 1084999 - RNA, 20 nt, Human
agacaugaaagacuggauuu

SEQ ID NO: 1085000 - RNA, 24 nt, Human
agacuaaugauuaacaaacagaga

SEQ ID NO: 1085001 - RNA, 22 nt, Human
agagaaggagaaauaacuugac

SEQ ID NO: 1085002 - RNA, 24 nt, Human
agagacuaaugcaaaauuagguaa

SEQ ID NO: 1085003 - RNA, 19 nt, Human
agagagaaggagaaauaac

SEQ ID NO: 1085004 - RNA, 20 nt, Human
agaguaucacuaacccaaaa

SEQ ID NO: 1085005 - RNA, 19 nt, Human
agaguuucuggagcucaga

SEQ ID NO: 1085006 - RNA, 19 nt, Human
aggcacauaggggcugaag

SEQ ID NO: 1085007 - RNA, 22 nt, Human
aggcagagcuucuucugauguc

SEQ ID NO: 1085008 - RNA, 23 nt, Human
aggcagggugaccaguuaggagg

SEQ ID NO: 1085009 - RNA, 22 nt, Human
aggccagagguccaggccagaa

SEQ ID NO: 1085010 - RNA, 22 nt, Human
aguaggacccuuuuauauaaug

SEQ ID NO: 1085011 - RNA, 24 nt, Human
aguugacaaggagccuaggaaaaa

SEQ ID NO: 1085012 - RNA, 23 nt, Human
auagaaauuagucagaccuaaaa

SEQ ID NO: 1085013 - RNA, 19 nt, Human
auucaggaguacagaugau

SEQ ID NO: 1085014 - RNA, 25 nt, Human
caaaaaaugaugaguuauaauacaa

SEQ ID NO: 1085015 - RNA, 22 nt, Human
caaaacaaaacccccaaauuga

SEQ ID NO: 1085016 - RNA, 20 nt, Human
caaaacccccaaauugaaca

SEQ ID NO: 1085017 - RNA, 21 nt, Human
caaaacccccaaauugaacaa

SEQ ID NO: 1085018 - RNA, 19 nt, Human
cacccccuaaucucccacc

SEQ ID NO: 1085019 - RNA, 18 nt, Human
caccgcaaaacaaaaaua

SEQ ID NO: 1085020 - RNA, 21 nt, Human
caccgcaaaacaaaaauaguc

SEQ ID NO: 1085021 - RNA, 25 nt, Human
caccgcaaaacaaaaauagucucuc

SEQ ID NO: 1085022 - RNA, 19 nt, Human
cacuccauucaggaguaca

SEQ ID NO: 1085023 - RNA, 21 nt, Human
cagaaauaccauaacaggcac

SEQ ID NO: 1085024 - RNA, 22 nt, Human
cagaacagaguaggggaaggcg

SEQ ID NO: 1085025 - RNA, 18 nt, Human
cagaccuaaaagauauua

SEQ ID NO: 1085026 - RNA, 25 nt, Human
cagacuaaugauuaacaaacagaga

SEQ ID NO: 1085027 - RNA, 23 nt, Human
cagcaaugcuuugguuggaauga

SEQ ID NO: 1085028 - RNA, 25 nt, Human
cagccacuaccugccaccgcaaaac

SEQ ID NO: 1085029 - RNA, 20 nt, Human
caguaaauacuguagcaaac

SEQ ID NO: 1085030 - RNA, 22 nt, Human
cauguuuuuuuggcuugaaaac

SEQ ID NO: 1085031 - RNA, 18 nt, Human
ccacgcaguaauaugaac

SEQ ID NO: 1085032 - RNA, 22 nt, Human
ccacuaccugccaccgcaaaac

SEQ ID NO: 1085033 - RNA, 22 nt, Human
ccagaaauaccauaacaggcac

SEQ ID NO: 1085034 - RNA, 23 nt, Human
ccagagguccaggccagaaauac

SEQ ID NO: 1085035 - RNA, 18 nt, Human
ccagaguaugaaaaaaga

SEQ ID NO: 1085036 - RNA, 18 nt, Human
ccaggccagaaauaccau

SEQ ID NO: 1085037 - RNA, 19 nt, Human
cuaacccaaaaaagcaucc

SEQ ID NO: 1085038 - RNA, 25 nt, Human
cuaaugauuaacaaacagagacuaa

SEQ ID NO: 1085039 - RNA, 23 nt, Human
cuaccugccaccgcaaaacaaaa

SEQ ID NO: 1085040 - RNA, 19 nt, Human
cuagaguggaggccacgca

SEQ ID NO: 1085041 - RNA, 21 nt, Human
cugccacccccuaaucuccca

SEQ ID NO: 1085042 - RNA, 23 nt, Human
cuuuaaaggugaucaaagccugg

SEQ ID NO: 1085043 - RNA, 23 nt, Human
cuuugugugcauuggcacugugg

SEQ ID NO: 1085044 - RNA, 19 nt, Human
gaaaaacuuaagaguauca

SEQ ID NO: 1085045 - RNA, 23 nt, Human
gaaauaccauaacaggcacauag

SEQ ID NO: 1085046 - RNA, 22 nt, Human
gaggaagccaucuuagguuuuu

SEQ ID NO: 1085047 - RNA, 20 nt, Human
gccagguacaaaauugccca

SEQ ID NO: 1085048 - RNA, 18 nt, Human
gcucagaaaccaggguca

SEQ ID NO: 1085049 - RNA, 23 nt, Human
guacuuuauaaaaguaucaaaaa

SEQ ID NO: 1085050 - RNA, 20 nt, Human
guccaggccagaaauaccau

SEQ ID NO: 1085051 - RNA, 22 nt, Human
uaaaauaaucccuuaagacaaa

SEQ ID NO: 1085052 - RNA, 22 nt, Human
uaaauauuuuuuucauuggcuu

SEQ ID NO: 1085053 - RNA, 23 nt, Human
uaacccaaaaaagcaucccuaaa

SEQ ID NO: 1085054 - RNA, 20 nt, Human
uaacuagaguggaggccacg

SEQ ID NO: 1085055 - RNA, 19 nt, Human
uaauuuauauuuauuuucu

SEQ ID NO: 1085056 - RNA, 24 nt, Human
uacagaguuucuggagcucagaaa

SEQ ID NO: 1085057 - RNA, 26 nt, Human
uacuuuaaaggugaucaaagccuggg

SEQ ID NO: 1085058 - RNA, 21 nt, Human
uagcccugaugucucauagaa

SEQ ID NO: 1085059 - RNA, 22 nt, Human
uaucaaaaagacugucauauuu

SEQ ID NO: 1085060 - RNA, 21 nt, Human
uauggccagaguaugaaaaaa

SEQ ID NO: 1085061 - RNA, 23 nt, Human
uauggccagaguaugaaaaaaga

SEQ ID NO: 1085062 - RNA, 23 nt, Human
uaugguguaggcuuuuucuuuuc

SEQ ID NO: 1085063 - RNA, 18 nt, Human
uauuuugcaaaacaaaac

SEQ ID NO: 1085064 - RNA, 18 nt, Human
ucaggggaaaaagaauaa

SEQ ID NO: 1085065 - RNA, 19 nt, Human
uccucaaugaacuuacaaa

SEQ ID NO: 1085066 - RNA, 30 nt, Human
ugaagcaaauaagcaauauuuauugagugg

SEQ ID NO: 1085067 - RNA, 23 nt, Human
ugagaagggggaagauagaauga

SEQ ID NO: 1085068 - RNA, 26 nt, Human
ugagauuuugggaauauauggccagu

SEQ ID NO: 1085069 - RNA, 21 nt, Human
ugagugcuuugugugcauugg

SEQ ID NO: 1085070 - RNA, 23 nt, Human
ugaguuauaauacaacgguuguu

SEQ ID NO: 1085071 - RNA, 23 nt, Human
ugauggaacuagagaaggcuuaa

SEQ ID NO: 1085072 - RNA, 21 nt, Human
ugcaaaaaaaggcagagcuuc

SEQ ID NO: 1085073 - RNA, 18 nt, Human
ugcaaaacaaaaccccca

SEQ ID NO: 1085074 - RNA, 22 nt, Human
ugcaaaacaaaacccccaaauu

SEQ ID NO: 1085075 - RNA, 18 nt, Human
ugcauuggcacuguggug

SEQ ID NO: 1085076 - RNA, 21 nt, Human
ugcugaaaggcauuuugagga

SEQ ID NO: 1085077 - RNA, 20 nt, Human
uggaucuggagcacaggagg

SEQ ID NO: 1085078 - RNA, 18 nt, Human
ugggaacuguggggaaua

SEQ ID NO: 1085079 - RNA, 22 nt, Human
ugggaacuguggggaauaggau

SEQ ID NO: 1085080 - RNA, 19 nt, Human
uguuaucaggggaaaaaga

SEQ ID NO: 1085081 - RNA, 24 nt, Human
uguugagaacagcugggaucuaau

SEQ ID NO: 1085082 - RNA, 20 nt, Human
uucuggagcucagaaaccag

SEQ ID NO: 1085083 - RNA, 18 nt, Human
uuggcuuuuccacacaaa

SEQ ID NO: 1085084 - RNA, 25 nt, Human
uuuccacacaaauccaucaguuaug

SEQ ID NO: 1085085 - RNA, 23 nt, Human
uuucuguggcauuuuccuuuauu

SEQ ID NO: 1085086 - RNA, 20 nt, Human
uuuugcaaaacaaaaccccc

SEQ ID NO: 1085087 - RNA, 23 nt, Human
uuuuuuuuuuugcaaaaaaaggc

SEQ ID NO: 1085088 - RNA, 19 nt, Human
uuuuuuuuuuuuuuugcaa

SEQ ID NO: 1085089 - RNA, 28 nt, Human
aagcgcgcgcggcgggguuccgaggucg

SEQ ID NO: 1085090 - RNA, 18 nt, Human
caggagaggcgcuuagcg

SEQ ID NO: 1085091 - RNA, 20 nt, Human
cugcaccuuucugccuggga

SEQ ID NO: 1085092 - RNA, 23 nt, Human
gagguaucuauggaaaauaucau

SEQ ID NO: 1085093 - RNA, 21 nt, Human
gcagagcgccccggggagggc

SEQ ID NO: 1085094 - RNA, 18 nt, Human
gcgcggcgggguucagca

SEQ ID NO: 1085095 - RNA, 19 nt, Human
guccggagucccccgggca

SEQ ID NO: 1085096 - RNA, 21 nt, Human
ucugcaccuuucugccuggga

SEQ ID NO: 1085097 - RNA, 22 nt, Human
ucugcaccuuucugccugggac

SEQ ID NO: 1085098 - RNA, 22 nt, Human
ugggacaccgaccaggagaggc

SEQ ID NO: 1085099 - RNA, 21 nt, Human
uguaccacgcggcugucagug

SEQ ID NO: 1085100 - RNA, 19 nt, Human
uguccggagucccccgggc

SEQ ID NO: 1085101 - RNA, 18 nt, Human
aaaaaagcuuaaauugca

SEQ ID NO: 1085102 - RNA, 22 nt, Human
aacugcuucucacaggaaauac

SEQ ID NO: 1085103 - RNA, 26 nt, Human
aacuucuauuucucuguagaaacuuu

SEQ ID NO: 1085104 - RNA, 20 nt, Human
aagaaauacauaguaaauaa

SEQ ID NO: 1085105 - RNA, 20 nt, Human
aagaccuuuuucaccugcag

SEQ ID NO: 1085106 - RNA, 21 nt, Human
aagcagcccgaggaccacucg

SEQ ID NO: 1085107 - RNA, 21 nt, Human
aagcugguugaguccuguggc

SEQ ID NO: 1085108 - RNA, 23 nt, Human
aaugcuaaagguuguuguaaacu

SEQ ID NO: 1085109 - RNA, 23 nt, Human
acaaggcgcuggcuuugccacca

SEQ ID NO: 1085110 - RNA, 22 nt, Human
acgccagggccuacacuccagu

SEQ ID NO: 1085111 - RNA, 20 nt, Human
acucacuccaguaaagacgg

SEQ ID NO: 1085112 - RNA, 22 nt, Human
acucacuccaguaaagacggac

SEQ ID NO: 1085113 - RNA, 20 nt, Human
acuuaauggucaucucccuu

SEQ ID NO: 1085114 - RNA, 18 nt, Human
aggaagaggaguguuucu

SEQ ID NO: 1085115 - RNA, 21 nt, Human
aggcagccccuuccccuaaag

SEQ ID NO: 1085116 - RNA, 18 nt, Human
auagcugggguguaaagc

SEQ ID NO: 1085117 - RNA, 19 nt, Human
aucucaauuuuucccugaa

SEQ ID NO: 1085118 - RNA, 19 nt, Human
caacagcuguccuuccuca

SEQ ID NO: 1085119 - RNA, 19 nt, Human
caagaaauacauaguaaau

SEQ ID NO: 1085120 - RNA, 19 nt, Human
cacacacaacagcugggcc

SEQ ID NO: 1085121 - RNA, 18 nt, Human
cagcgcccaggcuccgcc

SEQ ID NO: 1085122 - RNA, 21 nt, Human
cagcuagaaaaugaaaaaucu

SEQ ID NO: 1085123 - RNA, 23 nt, Human
cagguggucccaaucaaaacucc

SEQ ID NO: 1085124 - RNA, 19 nt, Human
cagucggagcccugugcca

SEQ ID NO: 1085125 - RNA, 22 nt, Human
cauccugggucucaucaucucc

SEQ ID NO: 1085126 - RNA, 24 nt, Human
ccaaagcaaacgcagcuucucacg

SEQ ID NO: 1085127 - RNA, 23 nt, Human
ccaaagccuguuagagggggugg

SEQ ID NO: 1085128 - RNA, 20 nt, Human
cccacacacaacagcugggc

SEQ ID NO: 1085129 - RNA, 22 nt, Human
cccagccccaaaugcacauagc

SEQ ID NO: 1085130 - RNA, 20 nt, Human
cccaggcuccgccgcgaccg

SEQ ID NO: 1085131 - RNA, 19 nt, Human
ccccacuggccucccccuu

SEQ ID NO: 1085132 - RNA, 20 nt, Human
ccccuaaagcccucuccuuu

SEQ ID NO: 1085133 - RNA, 18 nt, Human
cccgccacccgcagccgc

SEQ ID NO: 1085134 - RNA, 19 nt, Human
ccgcagaaaguugcugagc

SEQ ID NO: 1085135 - RNA, 18 nt, Human
ccgcagccgccaccgcgc

SEQ ID NO: 1085136 - RNA, 21 nt, Human
ccgcgacccgccacccgcagc

SEQ ID NO: 1085137 - RNA, 25 nt, Human
ccgcgacccgccacccgcagccgcc

SEQ ID NO: 1085138 - RNA, 18 nt, Human
ccgcgaccggcgaccggc

SEQ ID NO: 1085139 - RNA, 27 nt, Human
ccgggucaucccugcuggucgccugcg

SEQ ID NO: 1085140 - RNA, 26 nt, Human
ccuacacuccagucacuuucuuacag

SEQ ID NO: 1085141 - RNA, 20 nt, Human
ccuccaagucccuucucagc

SEQ ID NO: 1085142 - RNA, 22 nt, Human
ccucccccuugucggcucccgg

SEQ ID NO: 1085143 - RNA, 20 nt, Human
cgacccgcgacccgccaccc

SEQ ID NO: 1085144 - RNA, 20 nt, Human
cgagacucugucauguuugc

SEQ ID NO: 1085145 - RNA, 21 nt, Human
cgcgacccgcgacccgccacc

SEQ ID NO: 1085146 - RNA, 22 nt, Human
cggcagcagcucgcaggcccgc

SEQ ID NO: 1085147 - RNA, 20 nt, Human
cggcggcagcagcucgcagg

SEQ ID NO: 1085148 - RNA, 18 nt, Human
cucacgugauauccagga

SEQ ID NO: 1085149 - RNA, 22 nt, Human
cuccuagcuaagcagauuccug

SEQ ID NO: 1085150 - RNA, 19 nt, Human
cucuucccaggcagcccca

SEQ ID NO: 1085151 - RNA, 18 nt, Human
cugcuuggcuccccuggg

SEQ ID NO: 1085152 - RNA, 20 nt, Human
cuggccucccccuugucggc

SEQ ID NO: 1085153 - RNA, 21 nt, Human
cugggccuuggaaggucuugg

SEQ ID NO: 1085154 - RNA, 28 nt, Human
cuguguugcauccugggucccggguccg

SEQ ID NO: 1085155 - RNA, 18 nt, Human
gcagcccgaggaccacuc

SEQ ID NO: 1085156 - RNA, 24 nt, Human
gccagcuccuagcuaagcagauuc

SEQ ID NO: 1085157 - RNA, 18 nt, Human
gcucaggggcggcggcag

SEQ ID NO: 1085158 - RNA, 20 nt, Human
gggcugaggacgagcucuuc

SEQ ID NO: 1085159 - RNA, 24 nt, Human
uaaaaauacucuaaucacagcugc

SEQ ID NO: 1085160 - RNA, 20 nt, Human
uaaacugaaaacuaaauuuu

SEQ ID NO: 1085161 - RNA, 19 nt, Human
uaaagcuuuggugcuccuc

SEQ ID NO: 1085162 - RNA, 21 nt, Human
uaaagcuuuggugcuccucau

SEQ ID NO: 1085163 - RNA, 23 nt, Human
uaaagucaauucauuacauuuuc

SEQ ID NO: 1085164 - RNA, 20 nt, Human
uaacaauuccucgugccuca

SEQ ID NO: 1085165 - RNA, 23 nt, Human
uaacuaguaaugcaucaacauaa

SEQ ID NO: 1085166 - RNA, 18 nt, Human
uagcuaagcagauuccug

SEQ ID NO: 1085167 - RNA, 21 nt, Human
uauccaggaaucuucccucca

SEQ ID NO: 1085168 - RNA, 18 nt, Human
ucaaggucuucgcuucug

SEQ ID NO: 1085169 - RNA, 20 nt, Human
ucagucuugcuucccagagg

SEQ ID NO: 1085170 - RNA, 19 nt, Human
uccaagucccuucucagcg

SEQ ID NO: 1085171 - RNA, 24 nt, Human
ucccaccggggccuaaucuggcug

SEQ ID NO: 1085172 - RNA, 23 nt, Human
ucccagcuguugcaggcuuuggg

SEQ ID NO: 1085173 - RNA, 28 nt, Human
ucccugaauguguuguuuuucuucauua

SEQ ID NO: 1085174 - RNA, 20 nt, Human
uccgccgcgaccggcgaccg

SEQ ID NO: 1085175 - RNA, 20 nt, Human
ucggagcccugugccagcug

SEQ ID NO: 1085176 - RNA, 19 nt, Human
ucggcucccgggucauccc

SEQ ID NO: 1085177 - RNA, 22 nt, Human
ucuaaucacagcugcagcuacu

SEQ ID NO: 1085178 - RNA, 18 nt, Human
ucucuggguugagacagg

SEQ ID NO: 1085179 - RNA, 22 nt, Human
ugaaaaagauuuuacaaaugua

SEQ ID NO: 1085180 - RNA, 24 nt, Human
ugagacagggucaaggaaaccguc

SEQ ID NO: 1085181 - RNA, 24 nt, Human
ugagagguaagcccugaucccucu

SEQ ID NO: 1085182 - RNA, 21 nt, Human
ugaguccuguggcuaaaaaua

SEQ ID NO: 1085183 - RNA, 20 nt, Human
ugcaagaagacacugcuuug

SEQ ID NO: 1085184 - RNA, 21 nt, Human
ugcaggcuucuuucucugggu

SEQ ID NO: 1085185 - RNA, 20 nt, Human
ugcaugcacagugcugugga

SEQ ID NO: 1085186 - RNA, 20 nt, Human
ugccagcugauuggcugcag

SEQ ID NO: 1085187 - RNA, 21 nt, Human
ugcccaaaauacauacaugau

SEQ ID NO: 1085188 - RNA, 18 nt, Human
ugccuggggacacaaggc

SEQ ID NO: 1085189 - RNA, 20 nt, Human
ugccuucuaagccagcuccu

SEQ ID NO: 1085190 - RNA, 23 nt, Human
ugcuuggcuccccugggugccuu

SEQ ID NO: 1085191 - RNA, 25 nt, Human
uggaucuuaagcuagaugauuagaa

SEQ ID NO: 1085192 - RNA, 19 nt, Human
uggcggcacaagcuggacu

SEQ ID NO: 1085193 - RNA, 20 nt, Human
ugggcuuguguccucauccc

SEQ ID NO: 1085194 - RNA, 19 nt, Human
uggguauguuagcuaucau

SEQ ID NO: 1085195 - RNA, 18 nt, Human
ugguaaauguuuguaguc

SEQ ID NO: 1085196 - RNA, 19 nt, Human
ugguaaauguuuguaguca

SEQ ID NO: 1085197 - RNA, 26 nt, Human
uguaaagcuuuggugcuccucauuuc

SEQ ID NO: 1085198 - RNA, 24 nt, Human
uguacacagguggucccaaucaaa

SEQ ID NO: 1085199 - RNA, 18 nt, Human
uguguguacacagguggu

SEQ ID NO: 1085200 - RNA, 24 nt, Human
uguugcaugcacagugcuguggau

SEQ ID NO: 1085201 - RNA, 22 nt, Human
uuaaaguacaguuuccaacagc

SEQ ID NO: 1085202 - RNA, 20 nt, Human
uucuauuucucuguagaaac

SEQ ID NO: 1085203 - RNA, 22 nt, Human
uucucuguagaaacuuucuuca

SEQ ID NO: 1085204 - RNA, 20 nt, Human
uugaaagcugguugaguccu

SEQ ID NO: 1085205 - RNA, 21 nt, Human
uugaguuuucagaguguuagg

SEQ ID NO: 1085206 - RNA, 19 nt, Human
uuggcugcagccugcucgg

SEQ ID NO: 1085207 - RNA, 19 nt, Human
uuugcuauauuuaaaaugg

SEQ ID NO: 1085208 - RNA, 25 nt, Human
aaacgauagaaauucaacccaaacu

SEQ ID NO: 1085209 - RNA, 22 nt, Human
ccucuaagauuauagucauuaa

SEQ ID NO: 1085210 - RNA, 19 nt, Human
uaaaaacaacuggcuuaaa

SEQ ID NO: 1085211 - RNA, 24 nt, Human
uuaaacacaaacuuaaaaacaacc

SEQ ID NO: 1085212 - RNA, 24 nt, Human
uuugaaggacuuaaaauacccaga

SEQ ID NO: 1085213 - RNA, 21 nt, Human
aaaaagaaacacacggcaaaa

SEQ ID NO: 1085214 - RNA, 20 nt, Human
aaaaccacaaugggucccug

SEQ ID NO: 1085215 - RNA, 19 nt, Human
aaaaggcccccauucauuc

SEQ ID NO: 1085216 - RNA, 24 nt, Human
aaagugcugggauuacaggcauga

SEQ ID NO: 1085217 - RNA, 24 nt, Human
aacacggugaccacaagccccauu

SEQ ID NO: 1085218 - RNA, 24 nt, Human
aagugauccaccugccuuggccuc

SEQ ID NO: 1085219 - RNA, 19 nt, Human
aagugcugggauuacaggc

SEQ ID NO: 1085220 - RNA, 21 nt, Human
aagugcugggauuacaggcau

SEQ ID NO: 1085221 - RNA, 26 nt, Human
aagugcugggauuacaggcaugagcc

SEQ ID NO: 1085222 - RNA, 24 nt, Human
aaucacuugaaccugggaggcaga

SEQ ID NO: 1085223 - RNA, 20 nt, Human
acacauguccuccauuuccc

SEQ ID NO: 1085224 - RNA, 19 nt, Human
acagagcaagacucuguag

SEQ ID NO: 1085225 - RNA, 27 nt, Human
acaguugcuguuuagaaaagugcggcu

SEQ ID NO: 1085226 - RNA, 22 nt, Human
acaugccugucuccccacaggc

SEQ ID NO: 1085227 - RNA, 20 nt, Human
accagguuuccucgucuggg

SEQ ID NO: 1085228 - RNA, 24 nt, Human
accauguuggccaggcuggucucg

SEQ ID NO: 1085229 - RNA, 24 nt, Human
accgcacuccagccugggcgacag

SEQ ID NO: 1085230 - RNA, 26 nt, Human
accgcacuccagccugggcgacagag

SEQ ID NO: 1085231 - RNA, 24 nt, Human
accuaggcuggaguacuguggugu

SEQ ID NO: 1085232 - RNA, 18 nt, Human
acgggguuucaccauguu

SEQ ID NO: 1085233 - RNA, 23 nt, Human
acgggguuucaccauguuggcca

SEQ ID NO: 1085234 - RNA, 24 nt, Human
acgggguuucaccauguuggccag

SEQ ID NO: 1085235 - RNA, 22 nt, Human
acgguccaugcucgggaaggug

SEQ ID NO: 1085236 - RNA, 21 nt, Human
acuccagcaacuuucuaacac

SEQ ID NO: 1085237 - RNA, 24 nt, Human
acucuguagucccagcuacucggg

SEQ ID NO: 1085238 - RNA, 24 nt, Human
acugcacuccagccugggcgacag

SEQ ID NO: 1085239 - RNA, 26 nt, Human
acugcacuccagccugggcgacagag

SEQ ID NO: 1085240 - RNA, 19 nt, Human
acugcaucccagcuccccc

SEQ ID NO: 1085241 - RNA, 19 nt, Human
acuugaagagagagaggcu

SEQ ID NO: 1085242 - RNA, 20 nt, Human
acuugaagagagagaggcug

SEQ ID NO: 1085243 - RNA, 20 nt, Human
agagccaucggaaacuggug

SEQ ID NO: 1085244 - RNA, 20 nt, Human
agaggaagcacaaaaccaca

SEQ ID NO: 1085245 - RNA, 25 nt, Human
agaggaagcacaaaaccacaauggg

SEQ ID NO: 1085246 - RNA, 23 nt, Human
agagguuguagugagccgagauc

SEQ ID NO: 1085247 - RNA, 24 nt, Human
agagguuguagugagccgagaucg

SEQ ID NO: 1085248 - RNA, 23 nt, Human
agcaaagccuucaccacacaugg

SEQ ID NO: 1085249 - RNA, 28 nt, Human
agcagaacaggcacagaggaagcacaaa

SEQ ID NO: 1085250 - RNA, 22 nt, Human
agccccacagcccgcccacccc

SEQ ID NO: 1085251 - RNA, 23 nt, Human
agccccacagcccgcccaccccc

SEQ ID NO: 1085252 - RNA, 24 nt, Human
agccugggcgacagagcaagacuc

SEQ ID NO: 1085253 - RNA, 24 nt, Human
agccugggcgacagagcgagacuc

SEQ ID NO: 1085254 - RNA, 20 nt, Human
agcgauucuccugccucagc

SEQ ID NO: 1085255 - RNA, 24 nt, Human
agcgauucuccugccucagccucc

SEQ ID NO: 1085256 - RNA, 23 nt, Human
aggaagucauaggaacaaugcau

SEQ ID NO: 1085257 - RNA, 21 nt, Human
aggcagagguuguagugagcc

SEQ ID NO: 1085258 - RNA, 24 nt, Human
aggcagagguuguagugagccgag

SEQ ID NO: 1085259 - RNA, 22 nt, Human
aggcaggagaaucacuugaacc

SEQ ID NO: 1085260 - RNA, 24 nt, Human
aggcaggagaaucacuugaaccug

SEQ ID NO: 1085261 - RNA, 21 nt, Human
aggcaggagaauggcgugaac

SEQ ID NO: 1085262 - RNA, 24 nt, Human
aggcaggagaauggcgugaacccg

SEQ ID NO: 1085263 - RNA, 24 nt, Human
aggcggagcuugcagugagccgag

SEQ ID NO: 1085264 - RNA, 19 nt, Human
aggcugagccagagcuggg

SEQ ID NO: 1085265 - RNA, 24 nt, Human
aggcugaggcaggagaaucacuug

SEQ ID NO: 1085266 - RNA, 19 nt, Human
aggcugaggcaggagaaug

SEQ ID NO: 1085267 - RNA, 23 nt, Human
agguaggaugagggccuaggggu

SEQ ID NO: 1085268 - RNA, 18 nt, Human
aguagcugggacuacugg

SEQ ID NO: 1085269 - RNA, 18 nt, Human
agugcugggauuacaggc

SEQ ID NO: 1085270 - RNA, 20 nt, Human
auccgaaggcuugacugggg

SEQ ID NO: 1085271 - RNA, 24 nt, Human
aucgcgccaccgcacuccagccug

SEQ ID NO: 1085272 - RNA, 24 nt, Human
aucgcgccacugcacuccagccug

SEQ ID NO: 1085273 - RNA, 22 nt, Human
augacauagaagcugguuuguc

SEQ ID NO: 1085274 - RNA, 19 nt, Human
augcagccggggaagaugg

SEQ ID NO: 1085275 - RNA, 20 nt, Human
augcaucucagagcagaagc

SEQ ID NO: 1085276 - RNA, 24 nt, Human
auuuuuguauuuuuaguagagacg

SEQ ID NO: 1085277 - RNA, 22 nt, Human
caaaaggcccccauucauucac

SEQ ID NO: 1085278 - RNA, 24 nt, Human
caaagugcugggauuacaggcaug

SEQ ID NO: 1085279 - RNA, 22 nt, Human
caagugauccaccugccuuggc

SEQ ID NO: 1085280 - RNA, 21 nt, Human
caagugcuuuugccccuuuua

SEQ ID NO: 1085281 - RNA, 24 nt, Human
cacaaaaccacaaugggucccugg

SEQ ID NO: 1085282 - RNA, 22 nt, Human
cacacauguccuccauuucccu

SEQ ID NO: 1085283 - RNA, 21 nt, Human
cacagcccagccccacagccc

SEQ ID NO: 1085284 - RNA, 25 nt, Human
cacagcccagccccacagcccgccc

SEQ ID NO: 1085285 - RNA, 18 nt, Human
cacagcccgcccaccccc

SEQ ID NO: 1085286 - RNA, 22 nt, Human
caccaccaugccuggcuaauuu

SEQ ID NO: 1085287 - RNA, 24 nt, Human
caccaugccuggcuaauuuuugua

SEQ ID NO: 1085288 - RNA, 21 nt, Human
caccauguuggccaggcuggu

SEQ ID NO: 1085289 - RNA, 24 nt, Human
caccauguuggccaggcuggucuc

SEQ ID NO: 1085290 - RNA, 19 nt, Human
cacccccaagauccccacu

SEQ ID NO: 1085291 - RNA, 24 nt, Human
caccgcacuccagccugggcgaca

SEQ ID NO: 1085292 - RNA, 23 nt, Human
caccugccuuggccucccaaagu

SEQ ID NO: 1085293 - RNA, 24 nt, Human
caccugccuuggccucccaaagug

SEQ ID NO: 1085294 - RNA, 21 nt, Human
cacggcaaaauaccuaucaag

SEQ ID NO: 1085295 - RNA, 23 nt, Human
cacuccagcaacuuucuaacacu

SEQ ID NO: 1085296 - RNA, 23 nt, Human
cacuccagccugggcgacagagc

SEQ ID NO: 1085297 - RNA, 23 nt, Human
cacuccagccugggcgacagagc

SEQ ID NO: 1085298 - RNA, 24 nt, Human
cacuccagccugggcgacagagcg

SEQ ID NO: 1085299 - RNA, 21 nt, Human
cacugcaaccuuugccuccug

SEQ ID NO: 1085300 - RNA, 23 nt, Human
cacugcaaccuuugccuccuggg

SEQ ID NO: 1085301 - RNA, 24 nt, Human
cacugcaaccuuugccuccugggu

SEQ ID NO: 1085302 - RNA, 19 nt, Human
cacugcacuccagccuggg

SEQ ID NO: 1085303 - RNA, 20 nt, Human
cacugcacuccagccugggc

SEQ ID NO: 1085304 - RNA, 20 nt, Human
cacugcacuccagccugggc

SEQ ID NO: 1085305 - RNA, 22 nt, Human
cacugcacuccagccugggcga

SEQ ID NO: 1085306 - RNA, 24 nt, Human
cacugcacuccagccugggcgaca

SEQ ID NO: 1085307 - RNA, 27 nt, Human
cacugcacuccagccugggcgacagag

SEQ ID NO: 1085308 - RNA, 22 nt, Human
cacugcaucccagcucccccug

SEQ ID NO: 1085309 - RNA, 18 nt, Human
cacuucucacuuccucac

SEQ ID NO: 1085310 - RNA, 24 nt, Human
cagcaaagccuucaccacacaugu

SEQ ID NO: 1085311 - RNA, 20 nt, Human
cagcaaguguucuaugugug

SEQ ID NO: 1085312 - RNA, 18 nt, Human
cagcagggcccagcugug

SEQ ID NO: 1085313 - RNA, 20 nt, Human
cagccuccugaguagcuggg

SEQ ID NO: 1085314 - RNA, 24 nt, Human
cagcuacucaggaggcugaggcag

SEQ ID NO: 1085315 - RNA, 24 nt, Human
cagcuacucgggaggcugaggcag

SEQ ID NO: 1085316 - RNA, 24 nt, Human
caggaggcugaggcaggagaauca

SEQ ID NO: 1085317 - RNA, 26 nt, Human
caggcacagaggaagcacaaaaccac

SEQ ID NO: 1085318 - RNA, 23 nt, Human
cauguuggccaggcuggucucga

SEQ ID NO: 1085319 - RNA, 18 nt, Human
cauugccaucuccugccu

SEQ ID NO: 1085320 - RNA, 21 nt, Human
cauugccaucuccugccuccu

SEQ ID NO: 1085321 - RNA, 22 nt, Human
ccaaagcaacaacuuuauguga

SEQ ID NO: 1085322 - RNA, 23 nt, Human
ccaaagugcugggauuacaggca

SEQ ID NO: 1085323 - RNA, 24 nt, Human
ccaaagugcugggauuacaggcau

SEQ ID NO: 1085324 - RNA, 20 nt, Human
ccaccgcacuccagccuggg

SEQ ID NO: 1085325 - RNA, 20 nt, Human
ccaccgcacuccagccuggg

SEQ ID NO: 1085326 - RNA, 21 nt, Human
ccaccgcacuccagccugggc

SEQ ID NO: 1085327 - RNA, 21 nt, Human
ccaccgcacuccagccugggc

SEQ ID NO: 1085328 - RNA, 23 nt, Human
ccaccgcacuccagccugggcga

SEQ ID NO: 1085329 - RNA, 20 nt, Human
ccacugcacuccagccuggg

SEQ ID NO: 1085330 - RNA, 20 nt, Human
ccacugcacuccagccuggg

SEQ ID NO: 1085331 - RNA, 21 nt, Human
ccacugcacuccagccugggc

SEQ ID NO: 1085332 - RNA, 21 nt, Human
ccacugcacuccagccugggc

SEQ ID NO: 1085333 - RNA, 24 nt, Human
ccacugcacuccagccugggcgac

SEQ ID NO: 1085334 - RNA, 24 nt, Human
ccacugcaucccagcucccccugg

SEQ ID NO: 1085335 - RNA, 27 nt, Human
ccacugcaucccagcucccccuggcca

SEQ ID NO: 1085336 - RNA, 20 nt, Human
ccacugcucucagccucugu

SEQ ID NO: 1085337 - RNA, 23 nt, Human
ccagcaacuuucuaacacuuccu

SEQ ID NO: 1085338 - RNA, 27 nt, Human
ccagcgauucuccugccucagccuccu

SEQ ID NO: 1085339 - RNA, 21 nt, Human
ccaggccuugcccugcuggcc

SEQ ID NO: 1085340 - RNA, 26 nt, Human
ccaggccuugcccugcuggccugggg

SEQ ID NO: 1085341 - RNA, 22 nt, Human
ccagucucagccacuuccagaa

SEQ ID NO: 1085342 - RNA, 24 nt, Human
ccaugucuuggucacccaaaaauc

SEQ ID NO: 1085343 - RNA, 24 nt, Human
cccaaagugcugggauuacaggca

SEQ ID NO: 1085344 - RNA, 24 nt, Human
cccaagauccccacuucucacuuc

SEQ ID NO: 1085345 - RNA, 21 nt, Human
cccacagcccgcccaccccca

SEQ ID NO: 1085346 - RNA, 24 nt, Human
cccacagcccgcccacccccaaga

SEQ ID NO: 1085347 - RNA, 24 nt, Human
cccacugcaucccagcucccccug

SEQ ID NO: 1085348 - RNA, 19 nt, Human
cccagauggcugccucagu

SEQ ID NO: 1085349 - RNA, 22 nt, Human
cccagccccacagcccgcccac

SEQ ID NO: 1085350 - RNA, 19 nt, Human
cccagcucccccuggcugg

SEQ ID NO: 1085351 - RNA, 19 nt, Human
cccaggagucuuuguccua

SEQ ID NO: 1085352 - RNA, 23 nt, Human
cccaggccuugcccugcuggccu

SEQ ID NO: 1085353 - RNA, 18 nt, Human
cccaggcucagacaaacg

SEQ ID NO: 1085354 - RNA, 22 nt, Human
cccccaagauccccacuucuca

SEQ ID NO: 1085355 - RNA, 23 nt, Human
cccgcccacccccaagaucccca

SEQ ID NO: 1085356 - RNA, 24 nt, Human
ccuccuggguuccagcgauucucc

SEQ ID NO: 1085357 - RNA, 21 nt, Human
ccugaccucaagugauccacc

SEQ ID NO: 1085358 - RNA, 23 nt, Human
ccugaccucaagugauccaccug

SEQ ID NO: 1085359 - RNA, 23 nt, Human
ccugaccucaagugauccaccug

SEQ ID NO: 1085360 - RNA, 20 nt, Human
ccugaguagcugggacuacu

SEQ ID NO: 1085361 - RNA, 18 nt, Human
ccugccuccugcccagug

SEQ ID NO: 1085362 - RNA, 24 nt, Human
ccugccuuggccucccaaagugcu

SEQ ID NO: 1085363 - RNA, 21 nt, Human
ccuggcuccgggagaccaggu

SEQ ID NO: 1085364 - RNA, 21 nt, Human
ccugggaggcagagguuguag

SEQ ID NO: 1085365 - RNA, 22 nt, Human
ccugggcgacagagcaagacuc

SEQ ID NO: 1085366 - RNA, 22 nt, Human
ccugggcgacagagcgagacuc

SEQ ID NO: 1085367 - RNA, 20 nt, Human
ccuugcccugcuggccuggg

SEQ ID NO: 1085368 - RNA, 23 nt, Human
ccuuugccuccuggguuccagcg

SEQ ID NO: 1085369 - RNA, 24 nt, Human
cgacacauauacucccugcuuguc

SEQ ID NO: 1085370 - RNA, 22 nt, Human
cgagacggagucucgcucuguc

SEQ ID NO: 1085371 - RNA, 24 nt, Human
cgagaucgcgccaccgcacuccag

SEQ ID NO: 1085372 - RNA, 26 nt, Human
cgccaccgcacuccagccugggcgac

SEQ ID NO: 1085373 - RNA, 26 nt, Human
cgccacugcacuccagccugggcgac

SEQ ID NO: 1085374 - RNA, 21 nt, Human
cgcccacccccaagaucccca

SEQ ID NO: 1085375 - RNA, 22 nt, Human
cgcucugucaccuaggcuggag

SEQ ID NO: 1085376 - RNA, 21 nt, Human
cggcuagggacgguccaugcu

SEQ ID NO: 1085377 - RNA, 20 nt, Human
cggggaagauggggagcugu

SEQ ID NO: 1085378 - RNA, 24 nt, Human
cgggguuucaccauguuggccagg

SEQ ID NO: 1085379 - RNA, 23 nt, Human
cucaagugauccaccugccuugg

SEQ ID NO: 1085380 - RNA, 24 nt, Human
cucaagugauccaccugccuuggc

SEQ ID NO: 1085381 - RNA, 24 nt, Human
cucacugcaaccuuugccuccugg

SEQ ID NO: 1085382 - RNA, 18 nt, Human
cucagccaggcccugcgu

SEQ ID NO: 1085383 - RNA, 24 nt, Human
cucagccuccugaguagcugggac

SEQ ID NO: 1085384 - RNA, 18 nt, Human
cuccuccuuuguuugucc

SEQ ID NO: 1085385 - RNA, 21 nt, Human
cuccuggguuccagcgauucu

SEQ ID NO: 1085386 - RNA, 23 nt, Human
cuccuggguuccagcgauucucc

SEQ ID NO: 1085387 - RNA, 24 nt, Human
cucgcucugucaccuaggcuggag

SEQ ID NO: 1085388 - RNA, 23 nt, Human
cugcaaccuuugccuccuggguu

SEQ ID NO: 1085389 - RNA, 24 nt, Human
cugcaaccuuugccuccuggguuc

SEQ ID NO: 1085390 - RNA, 18 nt, Human
cugcaccaaaucuccucc

SEQ ID NO: 1085391 - RNA, 28 nt, Human
cugccaagcccacuucaagggacaccuc

SEQ ID NO: 1085392 - RNA, 23 nt, Human
cugccucagccuccugaguagcu

SEQ ID NO: 1085393 - RNA, 19 nt, Human
cuggcuccaagaugccacu

SEQ ID NO: 1085394 - RNA, 18 nt, Human
cuguagucccagcuacuc

SEQ ID NO: 1085395 - RNA, 21 nt, Human
cuguagucccagcuacucggg

SEQ ID NO: 1085396 - RNA, 21 nt, Human
cuuccagucucagccacuucc

SEQ ID NO: 1085397 - RNA, 19 nt, Human
cuugcagugagccgagauc

SEQ ID NO: 1085398 - RNA, 21 nt, Human
cuugcagugagccgagaucgc

SEQ ID NO: 1085399 - RNA, 24 nt, Human
cuugguucuucagaauauguagug

SEQ ID NO: 1085400 - RNA, 19 nt, Human
cuuuauuuguuuauuuucg

SEQ ID NO: 1085401 - RNA, 21 nt, Human
gaacaggcacagaggaagcac

SEQ ID NO: 1085402 - RNA, 24 nt, Human
gaccucaagugauccaccugccuu

SEQ ID NO: 1085403 - RNA, 23 nt, Human
gagaaucacuugaaccugggagg

SEQ ID NO: 1085404 - RNA, 24 nt, Human
gagacgggguuucaccauguuggc

SEQ ID NO: 1085405 - RNA, 23 nt, Human
gagaucgcgccacugcacuccag

SEQ ID NO: 1085406 - RNA, 19 nt, Human
gagccagagcugggaggag

SEQ ID NO: 1085407 - RNA, 23 nt, Human
gagcuugcagugagccgagaucg

SEQ ID NO: 1085408 - RNA, 19 nt, Human
gaggacuguggggcagaga

SEQ ID NO: 1085409 - RNA, 21 nt, Human
gaggagcagaacaggcacaga

SEQ ID NO: 1085410 - RNA, 19 nt, Human
gaggaggugccugggcugg

SEQ ID NO: 1085411 - RNA, 22 nt, Human
gaggggacugggaggggcuggg

SEQ ID NO: 1085412 - RNA, 21 nt, Human
gaggugccugggcuggcugca

SEQ ID NO: 1085413 - RNA, 19 nt, Human
gaucguggcucacugcaac

SEQ ID NO: 1085414 - RNA, 23 nt, Human
gaugccagggacuugaagagaga

SEQ ID NO: 1085415 - RNA, 21 nt, Human
gaugugggguuuugcaccugg

SEQ ID NO: 1085416 - RNA, 18 nt, Human
gauuacaggcaugagcca

SEQ ID NO: 1085417 - RNA, 19 nt, Human
gauuacaggcaugagccac

SEQ ID NO: 1085418 - RNA, 21 nt, Human
gauuacaggcaugagccacug

SEQ ID NO: 1085419 - RNA, 24 nt, Human
gcacuccagccugggcgacagagc

SEQ ID NO: 1085420 - RNA, 24 nt, Human
gcacuccagccugggcgacagagc

SEQ ID NO: 1085421 - RNA, 21 nt, Human
gcagcacagcccagccccaca

SEQ ID NO: 1085422 - RNA, 23 nt, Human
gcaggagaaucacuugaaccugg

SEQ ID NO: 1085423 - RNA, 22 nt, Human
gccaccgcacuccagccugggc

SEQ ID NO: 1085424 - RNA, 22 nt, Human
gccacugcacuccagccugggc

SEQ ID NO: 1085425 - RNA, 24 nt, Human
gccacugcacuccagccugggcga

SEQ ID NO: 1085426 - RNA, 20 nt, Human
gccccacagcccgcccaccc

SEQ ID NO: 1085427 - RNA, 22 nt, Human
gcccugcguguccccucuccca

SEQ ID NO: 1085428 - RNA, 20 nt, Human
gccgagaucgcgccaccgca

SEQ ID NO: 1085429 - RNA, 20 nt, Human
gccgagaucgcgccacugca

SEQ ID NO: 1085430 - RNA, 20 nt, Human
gccucagccuccugaguagc

SEQ ID NO: 1085431 - RNA, 24 nt, Human
gccuucaccacacauguccuccau

SEQ ID NO: 1085432 - RNA, 22 nt, Human
gccuuggccucccaaagugcug

SEQ ID NO: 1085433 - RNA, 23 nt, Human
gcgauucuccugccucagccucc

SEQ ID NO: 1085434 - RNA, 21 nt, Human
gcucacugcaaccuuugccuc

SEQ ID NO: 1085435 - RNA, 22 nt, Human
gcugaggcaggagaauggcgug

SEQ ID NO: 1085436 - RNA, 23 nt, Human
gcuggucucgagcuccugaccuc

SEQ ID NO: 1085437 - RNA, 22 nt, Human
gcuguaaucccagcuacucagg

SEQ ID NO: 1085438 - RNA, 24 nt, Human
ggagcuugcagugagccgagaucg

SEQ ID NO: 1085439 - RNA, 22 nt, Human
ggauuacaggcaugagccacug

SEQ ID NO: 1085440 - RNA, 21 nt, Human
ggcagagagggggcuaugggc

SEQ ID NO: 1085441 - RNA, 27 nt, Human
ggcccaggcugagaccuuggugguggc

SEQ ID NO: 1085442 - RNA, 22 nt, Human
ggcugagccagagcugggagga

SEQ ID NO: 1085443 - RNA, 21 nt, Human
ggcugcugucccaggagucuu

SEQ ID NO: 1085444 - RNA, 22 nt, Human
ggcuggaguacuguggugugau

SEQ ID NO: 1085445 - RNA, 24 nt, Human
ggcuggucucgagcuccugaccuc

SEQ ID NO: 1085446 - RNA, 18 nt, Human
gggaagcagagacccaga

SEQ ID NO: 1085447 - RNA, 18 nt, Human
gggcaaaauguuuauagu

SEQ ID NO: 1085448 - RNA, 22 nt, Human
gggcagagagggggcuaugggc

SEQ ID NO: 1085449 - RNA, 19 nt, Human
ggggacugggaggggcugg

SEQ ID NO: 1085450 - RNA, 23 nt, Human
ggggagcugucgcuuccauugcc

SEQ ID NO: 1085451 - RNA, 19 nt, Human
ggggcuggggugcauggag

SEQ ID NO: 1085452 - RNA, 23 nt, Human
gggguuucaccauguuggccagg

SEQ ID NO: 1085453 - RNA, 19 nt, Human
ggucucgagcuccugaccu

SEQ ID NO: 1085454 - RNA, 21 nt, Human
ggugggaggaggugccugggc

SEQ ID NO: 1085455 - RNA, 23 nt, Human
guagagacgggguuucaccaugu

SEQ ID NO: 1085456 - RNA, 20 nt, Human
gucccaggagucuuuguccu

SEQ ID NO: 1085457 - RNA, 24 nt, Human
gugauccaccugccuuggccuccc

SEQ ID NO: 1085458 - RNA, 18 nt, Human
guggagggagugcagcuu

SEQ ID NO: 1085459 - RNA, 19 nt, Human
guuguagugagccgagauc

SEQ ID NO: 1085460 - RNA, 21 nt, Human
guuguagugagccgagaucgc

SEQ ID NO: 1085461 - RNA, 20 nt, Human
uaacuccugcaccaaaucuc

SEQ ID NO: 1085462 - RNA, 22 nt, Human
uaacuccugcaccaaaucuccu

SEQ ID NO: 1085463 - RNA, 26 nt, Human
uaagagaugcuucagcaaagccuuca

SEQ ID NO: 1085464 - RNA, 21 nt, Human
uaagaggggagccaugucuug

SEQ ID NO: 1085465 - RNA, 24 nt, Human
uaauuuuuguauuuuuaguagaga

SEQ ID NO: 1085466 - RNA, 19 nt, Human
uacacagcugcacagcuug

SEQ ID NO: 1085467 - RNA, 22 nt, Human
uagagacgggguuucaccaugu

SEQ ID NO: 1085468 - RNA, 20 nt, Human
uaggaugagggccuaggggu

SEQ ID NO: 1085469 - RNA, 24 nt, Human
uaguagagacgggguuucaccaug

SEQ ID NO: 1085470 - RNA, 26 nt, Human
uaguagagacgggguuucaccauguu

SEQ ID NO: 1085471 - RNA, 24 nt, Human
uauauaguuaaaaagaaacacacc

SEQ ID NO: 1085472 - RNA, 18 nt, Human
uauggccccaagugaggg

SEQ ID NO: 1085473 - RNA, 21 nt, Human
uauggccccaagugagggcug

SEQ ID NO: 1085474 - RNA, 21 nt, Human
ucaagugauccaccugccuug

SEQ ID NO: 1085475 - RNA, 20 nt, Human
ucacaugccugucuccccac

SEQ ID NO: 1085476 - RNA, 23 nt, Human
ucacugcaaccuuugccuccugg

SEQ ID NO: 1085477 - RNA, 24 nt, Human
ucacugcaaccuuugccuccuggg

SEQ ID NO: 1085478 - RNA, 25 nt, Human
ucacuugaaccugggaggcagaggu

SEQ ID NO: 1085479 - RNA, 18 nt, Human
ucagaauauguagugggg

SEQ ID NO: 1085480 - RNA, 19 nt, Human
ucagcaaagccuucaccac

SEQ ID NO: 1085481 - RNA, 23 nt, Human
ucagccuccugaguagcugggac

SEQ ID NO: 1085482 - RNA, 19 nt, Human
ucauucacuauggccccaa

SEQ ID NO: 1085483 - RNA, 24 nt, Human
uccagccugggcgacagagcaaga

SEQ ID NO: 1085484 - RNA, 23 nt, Human
uccagccugggcgacagagcgag

SEQ ID NO: 1085485 - RNA, 24 nt, Human
uccagccugggcgacagagcgaga

SEQ ID NO: 1085486 - RNA, 24 nt, Human
ucccaaagugcugggauuacaggc

SEQ ID NO: 1085487 - RNA, 25 nt, Human
ucccagcucccccuggcuggauucc

SEQ ID NO: 1085488 - RNA, 19 nt, Human
ucccaucccccugccccga

SEQ ID NO: 1085489 - RNA, 18 nt, Human
ucccccuggcuggauucc

SEQ ID NO: 1085490 - RNA, 22 nt, Human
uccccgucgccucuugucacuc

SEQ ID NO: 1085491 - RNA, 20 nt, Human
uccucagcgcaucugcugug

SEQ ID NO: 1085492 - RNA, 21 nt, Human
uccuccccgucgccucuuguc

SEQ ID NO: 1085493 - RNA, 22 nt, Human
uccuccccgucgccucuuguca

SEQ ID NO: 1085494 - RNA, 24 nt, Human
uccugaguagcugggacuacuggu

SEQ ID NO: 1085495 - RNA, 21 nt, Human
uccugccuccugcccagugug

SEQ ID NO: 1085496 - RNA, 21 nt, Human
uccuggguuccagcgauucuc

SEQ ID NO: 1085497 - RNA, 24 nt, Human
uccuggguuccagcgauucuccug

SEQ ID NO: 1085498 - RNA, 23 nt, Human
ucgcgccacugcacuccagccug

SEQ ID NO: 1085499 - RNA, 24 nt, Human
ucgcucugucaccuaggcuggagu

SEQ ID NO: 1085500 - RNA, 21 nt, Human
ucuaacacuuccuaacgagaa

SEQ ID NO: 1085501 - RNA, 20 nt, Human
ucucagccacuuccagaagc

SEQ ID NO: 1085502 - RNA, 24 nt, Human
ucuccugccucagccuccugagua

SEQ ID NO: 1085503 - RNA, 19 nt, Human
ucucgcucugucaccuagg

SEQ ID NO: 1085504 - RNA, 22 nt, Human
ucucgcucugucaccuaggcug

SEQ ID NO: 1085505 - RNA, 23 nt, Human
ucucgcucugucaccuaggcugg

SEQ ID NO: 1085506 - RNA, 24 nt, Human
ucucgcucugucaccuaggcugga

SEQ ID NO: 1085507 - RNA, 22 nt, Human
ucuggacagagaggccuacaca

SEQ ID NO: 1085508 - RNA, 22 nt, Human
ucuggcucagaaucucucauga

SEQ ID NO: 1085509 - RNA, 21 nt, Human
ucuguagucccagcuacucgg

SEQ ID NO: 1085510 - RNA, 18 nt, Human
ucugucaccuaggcugga

SEQ ID NO: 1085511 - RNA, 22 nt, Human
ucuuuaaauggcccucagucaa

SEQ ID NO: 1085512 - RNA, 22 nt, Human
ugaaccugggaggcagagguug

SEQ ID NO: 1085513 - RNA, 24 nt, Human
ugaccucaagugauccaccugccu

SEQ ID NO: 1085514 - RNA, 22 nt, Human
ugagccgagaucgcgccaccgc

SEQ ID NO: 1085515 - RNA, 22 nt, Human
ugagccgagaucgcgccacugc

SEQ ID NO: 1085516 - RNA, 24 nt, Human
ugagcugccugagugugcucauga

SEQ ID NO: 1085517 - RNA, 20 nt, Human
ugaggcaggagaaucacuug

SEQ ID NO: 1085518 - RNA, 24 nt, Human
ugaggcaggagaaucacuugaacc

SEQ ID NO: 1085519 - RNA, 25 nt, Human
ugaggcaggagaaucacuugaaccu

SEQ ID NO: 1085520 - RNA, 24 nt, Human
ugaggcaggagaauggcgugaacc

SEQ ID NO: 1085521 - RNA, 25 nt, Human
ugaggcaggagaauggcgugaaccc

SEQ ID NO: 1085522 - RNA, 23 nt, Human
ugaggggacugggaggggcuggg

SEQ ID NO: 1085523 - RNA, 23 nt, Human
ugaguuauaacuccuuacauuua

SEQ ID NO: 1085524 - RNA, 21 nt, Human
ugaucucacccuugcuggugu

SEQ ID NO: 1085525 - RNA, 18 nt, Human
ugcccagugugcagcaca

SEQ ID NO: 1085526 - RNA, 18 nt, Human
ugcccugcuggccugggg

SEQ ID NO: 1085527 - RNA, 24 nt, Human
ugccucagccuccugaguagcugg

SEQ ID NO: 1085528 - RNA, 28 nt, Human
ugccuccuggguuccagcgauucuccuu

SEQ ID NO: 1085529 - RNA, 18 nt, Human
ugccugggcuggcugcag

SEQ ID NO: 1085530 - RNA, 20 nt, Human
uggagccugaggacuguggg

SEQ ID NO: 1085531 - RNA, 20 nt, Human
uggaggaggaagugguuagg

SEQ ID NO: 1085532 - RNA, 18 nt, Human
uggcagccucauaaucug

SEQ ID NO: 1085533 - RNA, 24 nt, Human
uggccaggcuggucucgagcuccu

SEQ ID NO: 1085534 - RNA, 22 nt, Human
uggccgacacggucccaaauau

SEQ ID NO: 1085535 - RNA, 24 nt, Human
ugggacuacuggugugcaccacca

SEQ ID NO: 1085536 - RNA, 19 nt, Human
ugggaggaggugccugggc

SEQ ID NO: 1085537 - RNA, 21 nt, Human
ugggaggaggugccugggcug

SEQ ID NO: 1085538 - RNA, 22 nt, Human
ugggaggaggugccugggcugg

SEQ ID NO: 1085539 - RNA, 24 nt, Human
ugggaggcagagguuguagugagc

SEQ ID NO: 1085540 - RNA, 18 nt, Human
ugggauuacaggcaugag

SEQ ID NO: 1085541 - RNA, 19 nt, Human
ugggauuacaggcaugagc

SEQ ID NO: 1085542 - RNA, 21 nt, Human
ugggauuacaggcaugagcca

SEQ ID NO: 1085543 - RNA, 22 nt, Human
ugggauuacaggcaugagccac

SEQ ID NO: 1085544 - RNA, 22 nt, Human
ugggauuacaggcaugagccac

SEQ ID NO: 1085545 - RNA, 24 nt, Human
ugggauuacaggcaugagccacug

SEQ ID NO: 1085546 - RNA, 26 nt, Human
ugggauuacaggcaugagccacugcu

SEQ ID NO: 1085547 - RNA, 19 nt, Human
ugggugauucuggcucaga

SEQ ID NO: 1085548 - RNA, 20 nt, Human
uggguguucacaugccuguc

SEQ ID NO: 1085549 - RNA, 22 nt, Human
uggguuagacuuggguguucac

SEQ ID NO: 1085550 - RNA, 19 nt, Human
uggguuccagcgauucucc

SEQ ID NO: 1085551 - RNA, 20 nt, Human
uggguuccagcgauucuccu

SEQ ID NO: 1085552 - RNA, 19 nt, Human
uggucacccaaaaauccug

SEQ ID NO: 1085553 - RNA, 26 nt, Human
ugguuugucccagagcuguaauccca

SEQ ID NO: 1085554 - RNA, 21 nt, Human
uguauuuuuaguagagacggg

SEQ ID NO: 1085555 - RNA, 20 nt, Human
ugucccaggagucuuugucc

SEQ ID NO: 1085556 - RNA, 18 nt, Human
uguccuccagaccauccu

SEQ ID NO: 1085557 - RNA, 18 nt, Human
uguggggcagagaggggg

SEQ ID NO: 1085558 - RNA, 20 nt, Human
uguggggcagagagggggcu

SEQ ID NO: 1085559 - RNA, 24 nt, Human
ugugguuaaaaugucagccagggc

SEQ ID NO: 1085560 - RNA, 24 nt, Human
uuaaaaugucagccagggcugcag

SEQ ID NO: 1085561 - RNA, 18 nt, Human
uuaguagagacgggguuu

SEQ ID NO: 1085562 - RNA, 22 nt, Human
uuaguagagacgggguuucacc

SEQ ID NO: 1085563 - RNA, 24 nt, Human
uuaguagagacgggguuucaccau

SEQ ID NO: 1085564 - RNA, 23 nt, Human
uuauaacuccuuacauuuaccca

SEQ ID NO: 1085565 - RNA, 22 nt, Human
uuccagaagcugcccaaguccu

SEQ ID NO: 1085566 - RNA, 18 nt, Human
uuccagcgauucuccugc

SEQ ID NO: 1085567 - RNA, 23 nt, Human
uucccccagcucaccuugguucu

SEQ ID NO: 1085568 - RNA, 24 nt, Human
uugaaccugggaggcagagguugu

SEQ ID NO: 1085569 - RNA, 22 nt, Human
uugacuggggcuggagggucug

SEQ ID NO: 1085570 - RNA, 24 nt, Human
uugaggggacugggaggggcuggg

SEQ ID NO: 1085571 - RNA, 26 nt, Human
uugaggggacugggaggggcuggggu

SEQ ID NO: 1085572 - RNA, 18 nt, Human
uugcagugagccgagauc

SEQ ID NO: 1085573 - RNA, 19 nt, Human
uugcagugagccgagaucg

SEQ ID NO: 1085574 - RNA, 22 nt, Human
uugcagugagccgagaucgcgc

SEQ ID NO: 1085575 - RNA, 19 nt, Human
uugccuccuggguuccagc

SEQ ID NO: 1085576 - RNA, 18 nt, Human
uuggccucccaaagugcu

SEQ ID NO: 1085577 - RNA, 18 nt, Human
uuguagugagccgagauc

SEQ ID NO: 1085578 - RNA, 19 nt, Human
uuguagugagccgagaucg

SEQ ID NO: 1085579 - RNA, 22 nt, Human
uuguagugagccgagaucgcgc

SEQ ID NO: 1085580 - RNA, 23 nt, Human
uuguauuuuuaguagagacgggg

SEQ ID NO: 1085581 - RNA, 21 nt, Human
uuuaccaugcagaucucucca

SEQ ID NO: 1085582 - RNA, 24 nt, Human
uuucaccauguuggccaggcuggu

SEQ ID NO: 1085583 - RNA, 19 nt, Human
uuucaggaucugacucucg

SEQ ID NO: 1085584 - RNA, 20 nt, Human
uuugccuccuggguuccaga

SEQ ID NO: 1085585 - RNA, 24 nt, Human
uuuuuaguagagacgggguuucac

SEQ ID NO: 1085586 - RNA, 20 nt, Human
uuuuuguauuuuuaguagag

SEQ ID NO: 1085587 - RNA, 22 nt, Human
aaauggccuuaucccaaucaca

SEQ ID NO: 1085588 - RNA, 22 nt, Human
acagcagcaauacagaacaaag

SEQ ID NO: 1085589 - RNA, 18 nt, Human
acaguguguuaaauauuu

SEQ ID NO: 1085590 - RNA, 24 nt, Human
accccucugccuccuccuaucccu

SEQ ID NO: 1085591 - RNA, 23 nt, Human
acucaauucauuucuagccacac

SEQ ID NO: 1085592 - RNA, 24 nt, Human
acuuacauuaaaaaggaagaacaa

SEQ ID NO: 1085593 - RNA, 23 nt, Human
augcuagagucccucaugcucca

SEQ ID NO: 1085594 - RNA, 21 nt, Human
auugacccaaagcaaaacuua

SEQ ID NO: 1085595 - RNA, 25 nt, Human
caaaauacauuaugauauaacacac

SEQ ID NO: 1085596 - RNA, 25 nt, Human
caaacgcugugcuugagaaaacagc

SEQ ID NO: 1085597 - RNA, 21 nt, Human
caagcagaucagagucuaaga

SEQ ID NO: 1085598 - RNA, 19 nt, Human
cacacucagaguggcugcc

SEQ ID NO: 1085599 - RNA, 21 nt, Human
cacugcuggcucugaaaaagg

SEQ ID NO: 1085600 - RNA, 21 nt, Human
cacuucugggugaaacaguuu

SEQ ID NO: 1085601 - RNA, 21 nt, Human
cagaaacuccaggcaccccuc

SEQ ID NO: 1085602 - RNA, 23 nt, Human
cauucugggcucaugagcacucc

SEQ ID NO: 1085603 - RNA, 18 nt, Human
ccaaagcaaaacuuacau

SEQ ID NO: 1085604 - RNA, 25 nt, Human
ccagcaaucucccgaauaauccucu

SEQ ID NO: 1085605 - RNA, 19 nt, Human
cccgucuucggaaaccugu

SEQ ID NO: 1085606 - RNA, 24 nt, Human
ccuccaaacuaacaggcauggauu

SEQ ID NO: 1085607 - RNA, 21 nt, Human
ccugggguuguagggagaagu

SEQ ID NO: 1085608 - RNA, 18 nt, Human
cgcugugcuugagaaaac

SEQ ID NO: 1085609 - RNA, 22 nt, Human
cuccaggcaccccucugccucc

SEQ ID NO: 1085610 - RNA, 22 nt, Human
cugaaaaaggugaagccagaga

SEQ ID NO: 1085611 - RNA, 19 nt, Human
cuucugggugaaacaguuu

SEQ ID NO: 1085612 - RNA, 22 nt, Human
cuuuuuaagcuuccagauaaau

SEQ ID NO: 1085613 - RNA, 24 nt, Human
gaaacuccaggcaccccucugccu

SEQ ID NO: 1085614 - RNA, 18 nt, Human
gaagucacacucaauuca

SEQ ID NO: 1085615 - RNA, 21 nt, Human
gacucucucuggagauaacuu

SEQ ID NO: 1085616 - RNA, 18 nt, Human
ggacagacuacccguucc

SEQ ID NO: 1085617 - RNA, 22 nt, Human
ggacagacuacccguuccuauc

SEQ ID NO: 1085618 - RNA, 18 nt, Human
uaacaugaacaucacuga

SEQ ID NO: 1085619 - RNA, 23 nt, Human
uaauucaaauugacccaaagcaa

SEQ ID NO: 1085620 - RNA, 18 nt, Human
uagagucccucaugcucc

SEQ ID NO: 1085621 - RNA, 22 nt, Human
ucagaguggcugccugcgaaag

SEQ ID NO: 1085622 - RNA, 21 nt, Human
ucaggcuccagcuaguuugga

SEQ ID NO: 1085623 - RNA, 20 nt, Human
ucccugggccugggguugua

SEQ ID NO: 1085624 - RNA, 18 nt, Human
uccuauccaucaggcucc

SEQ ID NO: 1085625 - RNA, 18 nt, Human
uccuccaaacuaacaggc

SEQ ID NO: 1085626 - RNA, 22 nt, Human
uccuccuaucccugggccuggg

SEQ ID NO: 1085627 - RNA, 19 nt, Human
ucugaagucacagcagcaa

SEQ ID NO: 1085628 - RNA, 20 nt, Human
ucugccuccuccuauccccc

SEQ ID NO: 1085629 - RNA, 21 nt, Human
ugaaaaaggugaagccagaga

SEQ ID NO: 1085630 - RNA, 18 nt, Human
ugaauaaauuaacacaca

SEQ ID NO: 1085631 - RNA, 28 nt, Human
ugaauaaauuaacacacacauacgugga

SEQ ID NO: 1085632 - RNA, 23 nt, Human
ugacaaugaauuaaaaaaugaga

SEQ ID NO: 1085633 - RNA, 19 nt, Human
ugagaaaacagcacugcug

SEQ ID NO: 1085634 - RNA, 23 nt, Human
ugagaauacagcuuggcaacugu

SEQ ID NO: 1085635 - RNA, 19 nt, Human
ugcaggaaaguuagaaucu

SEQ ID NO: 1085636 - RNA, 18 nt, Human
ugccaaagagucuauggg

SEQ ID NO: 1085637 - RNA, 23 nt, Human
ugcgaaagagucuaugccaaaga

SEQ ID NO: 1085638 - RNA, 21 nt, Human
ugcuuaggcacaagcagauca

SEQ ID NO: 1085639 - RNA, 24 nt, Human
uggaaaccucugaauggcugggga

SEQ ID NO: 1085640 - RNA, 19 nt, Human
uggccuuaucccaaucaca

SEQ ID NO: 1085641 - RNA, 22 nt, Human
uggcuggggagagaaaaucuuu

SEQ ID NO: 1085642 - RNA, 20 nt, Human
uuccuauccaucaggcucca

SEQ ID NO: 1085643 - RNA, 22 nt, Human
uuggaaaccucugaauggcugg

SEQ ID NO: 1085644 - RNA, 20 nt, Human
uuuggaaaccucugaauggc

SEQ ID NO: 1085645 - RNA, 19 nt, Human
aggacugagaucuuuuccg

SEQ ID NO: 1085646 - RNA, 19 nt, Human
cauuacucucuugcuaaga

SEQ ID NO: 1085647 - RNA, 21 nt, Human
gaucuuguuucaucuuaacac

SEQ ID NO: 1085648 - RNA, 19 nt, Human
guuucaucuuaacacacac

SEQ ID NO: 1085649 - RNA, 21 nt, Human
uacucucuugcuaagaucuug

SEQ ID NO: 1085650 - RNA, 25 nt, Human
uucguggacaggcaaggccgaauuc

SEQ ID NO: 1085651 - RNA, 20 nt, Human
uuucguggacaggcaaggcc

SEQ ID NO: 1085652 - RNA, 18 nt, Human
aaacgugacccucucaaa

SEQ ID NO: 1085653 - RNA, 23 nt, Human
aaagguacuacaaaaggaaaaug

SEQ ID NO: 1085654 - RNA, 23 nt, Human
aacaaaauucacauuucucagca

SEQ ID NO: 1085655 - RNA, 24 nt, Human
aagcuuccaugccuuccacuuucu

SEQ ID NO: 1085656 - RNA, 18 nt, Human
aaggaaaaaaaucaagcu

SEQ ID NO: 1085657 - RNA, 24 nt, Human
aaggaaaaaaaucaagcugaaagc

SEQ ID NO: 1085658 - RNA, 22 nt, Human
aagggagucagagaaugaaggu

SEQ ID NO: 1085659 - RNA, 19 nt, Human
acaaaaggaaaaugaacac

SEQ ID NO: 1085660 - RNA, 26 nt, Human
acaagacaaacaagagccuuauacag

SEQ ID NO: 1085661 - RNA, 22 nt, Human
acccaaauccaagauccuccuc

SEQ ID NO: 1085662 - RNA, 23 nt, Human
agaagccuaagaaaauguaaggg

SEQ ID NO: 1085663 - RNA, 24 nt, Human
agaagcuagcaagaagccuaagaa

SEQ ID NO: 1085664 - RNA, 24 nt, Human
agcuuccaugccuuccacuuucuc

SEQ ID NO: 1085665 - RNA, 20 nt, Human
aggaaaaaaaucaagcugaa

SEQ ID NO: 1085666 - RNA, 22 nt, Human
aggcagugucuuucugagucug

SEQ ID NO: 1085667 - RNA, 20 nt, Human
agugcuucacacacagcagu

SEQ ID NO: 1085668 - RNA, 22 nt, Human
agugucuuucugagucugaucc

SEQ ID NO: 1085669 - RNA, 22 nt, Human
cacagcauuuccuccacaauac

SEQ ID NO: 1085670 - RNA, 18 nt, Human
cacugaacuuacaaauga

SEQ ID NO: 1085671 - RNA, 19 nt, Human
cagccacugacucauccug

SEQ ID NO: 1085672 - RNA, 22 nt, Human
cagcuucaguaaagagcagaac

SEQ ID NO: 1085673 - RNA, 19 nt, Human
cauccuuguauucaccagu

SEQ ID NO: 1085674 - RNA, 23 nt, Human
caugaggaagagugccagacccc

SEQ ID NO: 1085675 - RNA, 19 nt, Human
cauuacucucuugcuaaga

SEQ ID NO: 1085676 - RNA, 19 nt, Human
ccaagauccuccucagucu

SEQ ID NO: 1085677 - RNA, 23 nt, Human
ccaauucacucugccaaaggaaa

SEQ ID NO: 1085678 - RNA, 20 nt, Human
ccacaccagcaacuuccagc

SEQ ID NO: 1085679 - RNA, 22 nt, Human
ccacugacucauccugugacga

SEQ ID NO: 1085680 - RNA, 22 nt, Human
ccagagccgccgugccagaagc

SEQ ID NO: 1085681 - RNA, 21 nt, Human
ccccugccucccuggcagcca

SEQ ID NO: 1085682 - RNA, 18 nt, Human
cccucucaaaucccccaa

SEQ ID NO: 1085683 - RNA, 23 nt, Human
cccuguuuucaggagccgacucc

SEQ ID NO: 1085684 - RNA, 23 nt, Human
ccuguuaacauggaauccuuacc

SEQ ID NO: 1085685 - RNA, 23 nt, Human
ccuucccacugugcccuuaagag

SEQ ID NO: 1085686 - RNA, 22 nt, Human
cgacccuguuuucaggagccga

SEQ ID NO: 1085687 - RNA, 22 nt, Human
cgcagcaccuguucaagaugga

SEQ ID NO: 1085688 - RNA, 21 nt, Human
cucugccaaaggaaaaaaauc

SEQ ID NO: 1085689 - RNA, 18 nt, Human
cugaacuuacaaaugauu

SEQ ID NO: 1085690 - RNA, 21 nt, Human
cugccuccugccaucuaaucu

SEQ ID NO: 1085691 - RNA, 20 nt, Human
cugcugccucuucucugagc

SEQ ID NO: 1085692 - RNA, 22 nt, Human
cuguauaccccuuuucacugug

SEQ ID NO: 1085693 - RNA, 18 nt, Human
cuuaagagcugcugcucc

SEQ ID NO: 1085694 - RNA, 18 nt, Human
cuuuuuggcagaagcuag

SEQ ID NO: 1085695 - RNA, 20 nt, Human
gaaaauguaagguggcaaca

SEQ ID NO: 1085696 - RNA, 21 nt, Human
gaaaccacccagcccgaaagc

SEQ ID NO: 1085697 - RNA, 26 nt, Human
gaagaccaaagaggacugcggguucu

SEQ ID NO: 1085698 - RNA, 18 nt, Human
gaauucccuuugcccuuc

SEQ ID NO: 1085699 - RNA, 19 nt, Human
gaucugcugccucuucucu

SEQ ID NO: 1085700 - RNA, 21 nt, Human
gaucuuguuucaucuuaacac

SEQ ID NO: 1085701 - RNA, 20 nt, Human
gcagaagcuagcaagaagcc

SEQ ID NO: 1085702 - RNA, 22 nt, Human
gccacaccagcaacuuccagca

SEQ ID NO: 1085703 - RNA, 20 nt, Human
gccgacuccuggcagguugg

SEQ ID NO: 1085704 - RNA, 18 nt, Human
gccuaagaaaauguaagg

SEQ ID NO: 1085705 - RNA, 18 nt, Human
ggaccccaauucacucug

SEQ ID NO: 1085706 - RNA, 20 nt, Human
ggcugugcccagagccgccg

SEQ ID NO: 1085707 - RNA, 18 nt, Human
gugacccucucaaauccc

SEQ ID NO: 1085708 - RNA, 19 nt, Human
guuucaucuuaacacacac

SEQ ID NO: 1085709 - RNA, 24 nt, Human
uaacauggaauccuuaccucugcc

SEQ ID NO: 1085710 - RNA, 28 nt, Human
uaacauggaauccuuaccucugccuccu

SEQ ID NO: 1085711 - RNA, 23 nt, Human
uaccucugccuccugccaucuaa

SEQ ID NO: 1085712 - RNA, 21 nt, Human
uacucucuugcuaagaucuug

SEQ ID NO: 1085713 - RNA, 20 nt, Human
uagcaagaagccuaagaaaa

SEQ ID NO: 1085714 - RNA, 18 nt, Human
uauccuagaucugcugcc

SEQ ID NO: 1085715 - RNA, 19 nt, Human
ucauuugaggagcuuccuu

SEQ ID NO: 1085716 - RNA, 22 nt, Human
uccaagaccccugcguagacuc

SEQ ID NO: 1085717 - RNA, 20 nt, Human
ucccuggcagccacugacuc

SEQ ID NO: 1085718 - RNA, 25 nt, Human
uccucagucuugaaaccuucccacu

SEQ ID NO: 1085719 - RNA, 22 nt, Human
uccuccacaauacugugaacug

SEQ ID NO: 1085720 - RNA, 19 nt, Human
ucuuuuuuccccuaaggau

SEQ ID NO: 1085721 - RNA, 19 nt, Human
ugaaaauguaagguggcaa

SEQ ID NO: 1085722 - RNA, 20 nt, Human
ugaaaccacccagcccgaaa

SEQ ID NO: 1085723 - RNA, 18 nt, Human
ugagauagacaaagcucc

SEQ ID NO: 1085724 - RNA, 21 nt, Human
ugaggaaagguacuacaaaag

SEQ ID NO: 1085725 - RNA, 19 nt, Human
ugaggaagagugccagacc

SEQ ID NO: 1085726 - RNA, 21 nt, Human
ugagggaaagucgucuucaga

SEQ ID NO: 1085727 - RNA, 18 nt, Human
ugagucugaauucccuuu

SEQ ID NO: 1085728 - RNA, 21 nt, Human
ugagucugaauucccuuugcc

SEQ ID NO: 1085729 - RNA, 25 nt, Human
ugcccagagccgccgugccagaagc

SEQ ID NO: 1085730 - RNA, 26 nt, Human
ugcccagagccgccgugccagaagcu

SEQ ID NO: 1085731 - RNA, 22 nt, Human
ugcccggguuccaagaccccug

SEQ ID NO: 1085732 - RNA, 20 nt, Human
ugccucuucucugagcguuc

SEQ ID NO: 1085733 - RNA, 24 nt, Human
ugcugcuccauauccuagaucugc

SEQ ID NO: 1085734 - RNA, 21 nt, Human
uggaaguggguauguggggcu

SEQ ID NO: 1085735 - RNA, 19 nt, Human
uggaauccuuaccucugcc

SEQ ID NO: 1085736 - RNA, 22 nt, Human
uggcagaagcuagcaagaagcc

SEQ ID NO: 1085737 - RNA, 23 nt, Human
uggcagaagcuagcaagaagccu

SEQ ID NO: 1085738 - RNA, 23 nt, Human
ugggccaaacgugacccucucaa

SEQ ID NO: 1085739 - RNA, 23 nt, Human
ugguucgaacaccucugacagcu

SEQ ID NO: 1085740 - RNA, 19 nt, Human
ugucacaguucuggccacu

SEQ ID NO: 1085741 - RNA, 21 nt, Human
uuaaaaacaagacaaacaaga

SEQ ID NO: 1085742 - RNA, 22 nt, Human
uucagcuucaguaaagagcaga

SEQ ID NO: 1085743 - RNA, 25 nt, Human
uucguggacaggcaaggccgaauuc

SEQ ID NO: 1085744 - RNA, 18 nt, Human
uucucagcaucuuuuuuc

SEQ ID NO: 1085745 - RNA, 20 nt, Human
uuucguggacaggcaaggcc

SEQ ID NO: 1085746 - RNA, 18 nt, Human
uuugcccuucauccuugu

SEQ ID NO: 1085747 - RNA, 24 nt, Human
aaaaaaaaauugucaagccauuga

SEQ ID NO: 1085748 - RNA, 19 nt, Human
aaaacacccaucaucuaca

SEQ ID NO: 1085749 - RNA, 27 nt, Human
aaaacauuuuuuucuuuuuaauuguua

SEQ ID NO: 1085750 - RNA, 20 nt, Human
aaaauccccaugacauuuuu

SEQ ID NO: 1085751 - RNA, 21 nt, Human
aaacacccaucaucuacaaag

SEQ ID NO: 1085752 - RNA, 23 nt, Human
aagacagaagauuuacaagaaga

SEQ ID NO: 1085753 - RNA, 18 nt, Human
aagguaaacauuuagacc

SEQ ID NO: 1085754 - RNA, 19 nt, Human
aaugaagaagauaaaagcc

SEQ ID NO: 1085755 - RNA, 22 nt, Human
aauuaaaaaaaaauccccauga

SEQ ID NO: 1085756 - RNA, 23 nt, Human
acaaaagacagaagauuuacaag

SEQ ID NO: 1085757 - RNA, 18 nt, Human
acagugcauugacaugau

SEQ ID NO: 1085758 - RNA, 20 nt, Human
acauacagagaugaacaaac

SEQ ID NO: 1085759 - RNA, 21 nt, Human
acaugauaaaaccaaggcaca

SEQ ID NO: 1085760 - RNA, 20 nt, Human
aggaccuugucccagcuccc

SEQ ID NO: 1085761 - RNA, 19 nt, Human
aggcacaaaaauacaguua

SEQ ID NO: 1085762 - RNA, 24 nt, Human
agguggucaacgcagauauugagc

SEQ ID NO: 1085763 - RNA, 24 nt, Human
auaaaauccaaauuggacucaaag

SEQ ID NO: 1085764 - RNA, 24 nt, Human
auaccuuuccuuggugacacgaga

SEQ ID NO: 1085765 - RNA, 22 nt, Human
auccccaugacauuuuucaaaa

SEQ ID NO: 1085766 - RNA, 22 nt, Human
cacaguucagaacguugugucu

SEQ ID NO: 1085767 - RNA, 20 nt, Human
cacgagaaggaaauacagug

SEQ ID NO: 1085768 - RNA, 24 nt, Human
cagaucauaaagucugaaaaauua

SEQ ID NO: 1085769 - RNA, 21 nt, Human
cagcaaaauauguacuuuagc

SEQ ID NO: 1085770 - RNA, 22 nt, Human
cauuucuuggcacaugcacgcc

SEQ ID NO: 1085771 - RNA, 18 nt, Human
cccaucaucuacaaaguu

SEQ ID NO: 1085772 - RNA, 20 nt, Human
ccccuuacaaaagacagaag

SEQ ID NO: 1085773 - RNA, 23 nt, Human
cccuuacaaaagacagaagauuu

SEQ ID NO: 1085774 - RNA, 21 nt, Human
ccgcuggcgcuggcugagcag

SEQ ID NO: 1085775 - RNA, 20 nt, Human
cggcuccuagccccacuggc

SEQ ID NO: 1085776 - RNA, 18 nt, Human
cggcugcccauguccucg

SEQ ID NO: 1085777 - RNA, 21 nt, Human
cuacagagguauccggcuccu

SEQ ID NO: 1085778 - RNA, 19 nt, Human
gcgcggcugggugcggcgg

SEQ ID NO: 1085779 - RNA, 21 nt, Human
ggaacaauccugaaugcagcg

SEQ ID NO: 1085780 - RNA, 23 nt, Human
gggcgcgccgcggcugcccaugu

SEQ ID NO: 1085781 - RNA, 18 nt, Human
gugcggcggccgcuggcg

SEQ ID NO: 1085782 - RNA, 22 nt, Human
uaaaaaaaaauccccaugacau

SEQ ID NO: 1085783 - RNA, 23 nt, Human
uaaaacacccaucaucuacaaag

SEQ ID NO: 1085784 - RNA, 22 nt, Human
uaaaaccaaggcacaaaaauac

SEQ ID NO: 1085785 - RNA, 22 nt, Human
uaaaaccaaggcacaaaaauac

SEQ ID NO: 1085786 - RNA, 19 nt, Human
uaaaaccuguaauaucuag

SEQ ID NO: 1085787 - RNA, 21 nt, Human
uaaaguauuccuguuuuucuu

SEQ ID NO: 1085788 - RNA, 18 nt, Human
uaaguggaaauuuguggc

SEQ ID NO: 1085789 - RNA, 23 nt, Human
uaauuaaaaaaaaauccccauga

SEQ ID NO: 1085790 - RNA, 21 nt, Human
uacgauaaguguauauaaacc

SEQ ID NO: 1085791 - RNA, 23 nt, Human
uagaaaaugcuuuuuauuuuccu

SEQ ID NO: 1085792 - RNA, 18 nt, Human
uagggugaggagcaacac

SEQ ID NO: 1085793 - RNA, 23 nt, Human
ucaagccauugacagcaaaauau

SEQ ID NO: 1085794 - RNA, 21 nt, Human
uccauuaguaauacugaauga

SEQ ID NO: 1085795 - RNA, 20 nt, Human
ucuacugggacauucucuua

SEQ ID NO: 1085796 - RNA, 18 nt, Human
ucugcaaaacuuuuacag

SEQ ID NO: 1085797 - RNA, 24 nt, Human
ugaaauaaacugguaaaaacugua

SEQ ID NO: 1085798 - RNA, 23 nt, Human
ugaagaagauaaaagccuuucaa

SEQ ID NO: 1085799 - RNA, 20 nt, Human
ugaagucuaaucuacuggga

SEQ ID NO: 1085800 - RNA, 22 nt, Human
ugaguccuuggcaaacaaaaaa

SEQ ID NO: 1085801 - RNA, 22 nt, Human
ugauaaaaccaaggcacaaaaa

SEQ ID NO: 1085802 - RNA, 23 nt, Human
ugcauagacaacgauaauaaaau

SEQ ID NO: 1085803 - RNA, 21 nt, Human
uggaaacagaucauaaagucu

SEQ ID NO: 1085804 - RNA, 19 nt, Human
uggcaaacaaaaaacauuu

SEQ ID NO: 1085805 - RNA, 21 nt, Human
uggcugagcagggcgcccggc

SEQ ID NO: 1085806 - RNA, 24 nt, Human
ugguaaaaacuguauuucauacuu

SEQ ID NO: 1085807 - RNA, 23 nt, Human
uguauauaaacccuagcacuuug

SEQ ID NO: 1085808 - RNA, 18 nt, Human
uguuuuucuuuuuccugg

SEQ ID NO: 1085809 - RNA, 19 nt, Human
uuaaaaccuguaauaucua

SEQ ID NO: 1085810 - RNA, 22 nt, Human
uuaaauauuaaaaccuguaaua

SEQ ID NO: 1085811 - RNA, 19 nt, Human
uuagacccauaaaaacaca

SEQ ID NO: 1085812 - RNA, 25 nt, Human
uuagugcaucaagcauugaagaaaa

SEQ ID NO: 1085813 - RNA, 20 nt, Human
uucacaucggcgcggggggu

SEQ ID NO: 1085814 - RNA, 22 nt, Human
uuggacucaaagguugaagucu

SEQ ID NO: 1085815 - RNA, 22 nt, Human
uuuccugaguccuuggcaaaca

SEQ ID NO: 1085816 - RNA, 22 nt, Human
uuuucaagacucaagguaaaca

SEQ ID NO: 1085817 - RNA, 22 nt, Human
auccuuggcaaacccuucccag

SEQ ID NO: 1085818 - RNA, 18 nt, Human
caggugcagugauggguu

SEQ ID NO: 1085819 - RNA, 18 nt, Human
ccuuggcaaacccuuccc

SEQ ID NO: 1085820 - RNA, 19 nt, Human
cugcagcacugcagguccu

SEQ ID NO: 1085821 - RNA, 18 nt, Human
cugcugcucugagcacug

SEQ ID NO: 1085822 - RNA, 23 nt, Human
gagucugcagcuccaauccuugg

SEQ ID NO: 1085823 - RNA, 19 nt, Human
aaaaaaaucacaaguugaa

SEQ ID NO: 1085824 - RNA, 24 nt, Human
aaaacaccaauugauacugagaac

SEQ ID NO: 1085825 - RNA, 19 nt, Human
aaagaaaaaaaaaucacaa

SEQ ID NO: 1085826 - RNA, 20 nt, Human
aaagugagaaagaaaaaaaa

SEQ ID NO: 1085827 - RNA, 20 nt, Human
aaguagagcaugcaugaaca

SEQ ID NO: 1085828 - RNA, 19 nt, Human
accaagaggaaagagcacc

SEQ ID NO: 1085829 - RNA, 19 nt, Human
aguggaucagagccucagc

SEQ ID NO: 1085830 - RNA, 18 nt, Human
aguguggcucccacgacc

SEQ ID NO: 1085831 - RNA, 23 nt, Human
auaaaauucucuuuaaguuaaag

SEQ ID NO: 1085832 - RNA, 24 nt, Human
aucaaacaauccuggcaugaauaa

SEQ ID NO: 1085833 - RNA, 19 nt, Human
auuaaaccaagggacuagc

SEQ ID NO: 1085834 - RNA, 21 nt, Human
caaaggauuugaagccacagg

SEQ ID NO: 1085835 - RNA, 22 nt, Human
cacaagucucucaguguggcuc

SEQ ID NO: 1085836 - RNA, 19 nt, Human
cacaggguuccagagcuuu

SEQ ID NO: 1085837 - RNA, 19 nt, Human
cacucugccuucacuuucc

SEQ ID NO: 1085838 - RNA, 19 nt, Human
cccucucuuaccugcucac

SEQ ID NO: 1085839 - RNA, 24 nt, Human
ccucagcgauucccauuccggccg

SEQ ID NO: 1085840 - RNA, 21 nt, Human
ccugcgcgggggcgacgcggg

SEQ ID NO: 1085841 - RNA, 20 nt, Human
ccuucacuuuccuuccuguc

SEQ ID NO: 1085842 - RNA, 19 nt, Human
cggcaggguaugccgagug

SEQ ID NO: 1085843 - RNA, 23 nt, Human
cugagaacacuaaauuauuaaau

SEQ ID NO: 1085844 - RNA, 22 nt, Human
gaaacaacagucacccuuccca

SEQ ID NO: 1085845 - RNA, 23 nt, Human
gagaaagaaaaaaaaaucacaag

SEQ ID NO: 1085846 - RNA, 18 nt, Human
gccacaggguuccagagc

SEQ ID NO: 1085847 - RNA, 19 nt, Human
gccuucacuuuccuuccug

SEQ ID NO: 1085848 - RNA, 18 nt, Human
uaaggcacaaauuaaacc

SEQ ID NO: 1085849 - RNA, 26 nt, Human
uagcgggcuggacgccggcguuccuc

SEQ ID NO: 1085850 - RNA, 25 nt, Human
uaucaaaguagagcaugcaugaaca

SEQ ID NO: 1085851 - RNA, 24 nt, Human
uaugccgagugggugucugaaaug

SEQ ID NO: 1085852 - RNA, 19 nt, Human
ucccacgacccugcacaga

SEQ ID NO: 1085853 - RNA, 23 nt, Human
ucccacgacccugcacagaugcu

SEQ ID NO: 1085854 - RNA, 25 nt, Human
ucucuguaucagagaaacgcugccu

SEQ ID NO: 1085855 - RNA, 19 nt, Human
ucucuuaccugcucacucu

SEQ ID NO: 1085856 - RNA, 23 nt, Human
ugagaaagaaaaaaaaaucacaa

SEQ ID NO: 1085857 - RNA, 21 nt, Human
ugcaugaacagaugauucauu

SEQ ID NO: 1085858 - RNA, 20 nt, Human
ugccgagugggugucugaaa

SEQ ID NO: 1085859 - RNA, 23 nt, Human
ugccucuaauacuuuuaugggua

SEQ ID NO: 1085860 - RNA, 21 nt, Human
ugccuucacuuuccuuccugu

SEQ ID NO: 1085861 - RNA, 20 nt, Human
ugcgcgggggcgacgcggga

SEQ ID NO: 1085862 - RNA, 21 nt, Human
ugcggggcccgcccugcgcgg

SEQ ID NO: 1085863 - RNA, 18 nt, Human
ugggugcccaugcuucuu

SEQ ID NO: 1085864 - RNA, 22 nt, Human
uguaaaaaguguaugccucuga

SEQ ID NO: 1085865 - RNA, 22 nt, Human
uuaaagugagaaagaaaaaaaa

SEQ ID NO: 1085866 - RNA, 22 nt, Human
uuagaaguggaucagagccuca

SEQ ID NO: 1085867 - RNA, 24 nt, Human
uuagaaguggaucagagccucagc

SEQ ID NO: 1085868 - RNA, 18 nt, Human
uugaagccacaggguucc

SEQ ID NO: 1085869 - RNA, 24 nt, Human
aaaacuuuucccaacaaagaccag

SEQ ID NO: 1085870 - RNA, 30 nt, Human
aauugcuccucucauuggcccaaauauguu

SEQ ID NO: 1085871 - RNA, 25 nt, Human
acaugccccuguaaguaggcagagc

SEQ ID NO: 1085872 - RNA, 22 nt, Human
acucacuuaccuaagaggcaaa

SEQ ID NO: 1085873 - RNA, 19 nt, Human
acuuuucccaacaaagacc

SEQ ID NO: 1085874 - RNA, 22 nt, Human
agcucggggaccugggcagcgg

SEQ ID NO: 1085875 - RNA, 18 nt, Human
aggaagaguggauacugg

SEQ ID NO: 1085876 - RNA, 21 nt, Human
aggaagaguggauacugggga

SEQ ID NO: 1085877 - RNA, 23 nt, Human
caagaaaaucucacuucagccca

SEQ ID NO: 1085878 - RNA, 26 nt, Human
cacaugccccuguaaguaggcagagc

SEQ ID NO: 1085879 - RNA, 22 nt, Human
caccccgcucccaggaggcccu

SEQ ID NO: 1085880 - RNA, 22 nt, Human
cacuucagcccagaaucgaaga

SEQ ID NO: 1085881 - RNA, 21 nt, Human
caggaggcccggacgaggcuu

SEQ ID NO: 1085882 - RNA, 19 nt, Human
ccaaauauguuacgcucau

SEQ ID NO: 1085883 - RNA, 20 nt, Human
ccaagauaaggaagagugga

SEQ ID NO: 1085884 - RNA, 21 nt, Human
ccaccugacagcuccgguugu

SEQ ID NO: 1085885 - RNA, 23 nt, Human
ccccuccccaccggccccaacuc

SEQ ID NO: 1085886 - RNA, 18 nt, Human
ccccuguaaguaggcaga

SEQ ID NO: 1085887 - RNA, 26 nt, Human
ccccuguaaguaggcagagcagggau

SEQ ID NO: 1085888 - RNA, 19 nt, Human
cccuguaaguaggcagagc

SEQ ID NO: 1085889 - RNA, 19 nt, Human
ccgacugcagcccuccugg

SEQ ID NO: 1085890 - RNA, 18 nt, Human
ccgggaagcucggggacc

SEQ ID NO: 1085891 - RNA, 19 nt, Human
ccgggaagcucggggaccu

SEQ ID NO: 1085892 - RNA, 18 nt, Human
ccgggauucaaucaacuc

SEQ ID NO: 1085893 - RNA, 21 nt, Human
ccuccuggacgggagccucug

SEQ ID NO: 1085894 - RNA, 19 nt, Human
ccucugggcccagcuuagg

SEQ ID NO: 1085895 - RNA, 21 nt, Human
ccuucaguguccugcggccuc

SEQ ID NO: 1085896 - RNA, 19 nt, Human
cgagaaccagcaagaccaa

SEQ ID NO: 1085897 - RNA, 19 nt, Human
cgggagccucugggcccag

SEQ ID NO: 1085898 - RNA, 20 nt, Human
cgggagccucugggcccagc

SEQ ID NO: 1085899 - RNA, 22 nt, Human
cgguaccugccaccccgcuccc

SEQ ID NO: 1085900 - RNA, 24 nt, Human
cucaugccccuccccaccggcccc

SEQ ID NO: 1085901 - RNA, 20 nt, Human
cuccgcuucgggggccgaga

SEQ ID NO: 1085902 - RNA, 21 nt, Human
cuccuucuugccauguugucc

SEQ ID NO: 1085903 - RNA, 18 nt, Human
cucucggaacggccgagg

SEQ ID NO: 1085904 - RNA, 20 nt, Human
cugugucuccgucgcuccgc

SEQ ID NO: 1085905 - RNA, 23 nt, Human
cuucuugccauguuguccucggg

SEQ ID NO: 1085906 - RNA, 24 nt, Human
cuuggaaauccaccugacagcucc

SEQ ID NO: 1085907 - RNA, 19 nt, Human
gagaaccagcaagaccaac

SEQ ID NO: 1085908 - RNA, 19 nt, Human
gauaaggaagaguggauac

SEQ ID NO: 1085909 - RNA, 20 nt, Human
gcaaagccuuggaaauccac

SEQ ID NO: 1085910 - RNA, 24 nt, Human
gcaaagccuuggaaauccaccuga

SEQ ID NO: 1085911 - RNA, 23 nt, Human
gccucggguuccgggaagcucgg

SEQ ID NO: 1085912 - RNA, 24 nt, Human
gccucugggcccagcuuagggugg

SEQ ID NO: 1085913 - RNA, 19 nt, Human
gcguuggcugcuuccuccc

SEQ ID NO: 1085914 - RNA, 21 nt, Human
gcugugucuccgucgcuccgc

SEQ ID NO: 1085915 - RNA, 18 nt, Human
ggccgaggaggauggguc

SEQ ID NO: 1085916 - RNA, 19 nt, Human
gggaagcucggggaccugg

SEQ ID NO: 1085917 - RNA, 18 nt, Human
guacagccaaugcaaagc

SEQ ID NO: 1085918 - RNA, 22 nt, Human
uaaggaagaguggauacugggg

SEQ ID NO: 1085919 - RNA, 22 nt, Human
uaaguaggcagagcagggaugu

SEQ ID NO: 1085920 - RNA, 20 nt, Human
uaaguuucagguacagccaa

SEQ ID NO: 1085921 - RNA, 26 nt, Human
uaggguggcguccagcgugaccuacu

SEQ ID NO: 1085922 - RNA, 20 nt, Human
ucagaaaaugaaagaaaaac

SEQ ID NO: 1085923 - RNA, 23 nt, Human
ucagcccagaaucgaagaacugg

SEQ ID NO: 1085924 - RNA, 20 nt, Human
uccaaaggcuccuucuugcc

SEQ ID NO: 1085925 - RNA, 21 nt, Human
uccaucccaguccggaaucca

SEQ ID NO: 1085926 - RNA, 21 nt, Human
uccccaccggccccaacuccc

SEQ ID NO: 1085927 - RNA, 19 nt, Human
uccgggauucaaucaacuc

SEQ ID NO: 1085928 - RNA, 22 nt, Human
ucugcgccgacugcagcccucc

SEQ ID NO: 1085929 - RNA, 24 nt, Human
ucuucuuuccucaguguuucuucu

SEQ ID NO: 1085930 - RNA, 20 nt, Human
ucuugccauguuguccucgg

SEQ ID NO: 1085931 - RNA, 27 nt, Human
ugcacucacuuaccuaagaggcaaaac

SEQ ID NO: 1085932 - RNA, 19 nt, Human
ugcagaaagaauggguuac

SEQ ID NO: 1085933 - RNA, 20 nt, Human
ugcagcccuccuggacggga

SEQ ID NO: 1085934 - RNA, 22 nt, Human
uggaagauggcuacccaccauc

SEQ ID NO: 1085935 - RNA, 19 nt, Human
ugggauucugcugauuuag

SEQ ID NO: 1085936 - RNA, 18 nt, Human
ugucugcgccgacugcag

SEQ ID NO: 1085937 - RNA, 24 nt, Human
uuaccggucuuuacugcacucacu

SEQ ID NO: 1085938 - RNA, 20 nt, Human
uucaguguccugcggccucg

SEQ ID NO: 1085939 - RNA, 24 nt, Human
uuccacagcugugucuccgucgcu

SEQ ID NO: 1085940 - RNA, 20 nt, Human
uuggcccaaauauguuacgc

SEQ ID NO: 1085941 - RNA, 21 nt, Human
uuguaccguccgcccuccgua

SEQ ID NO: 1085942 - RNA, 21 nt, Human
uuugaggacaugcagaaagaa

SEQ ID NO: 1085943 - RNA, 22 nt, Human
uuuguuacuuuggaagugucuu

SEQ ID NO: 1085944 - RNA, 20 nt, Human
aaaaagaaacagcccugcaa

SEQ ID NO: 1085945 - RNA, 20 nt, Human
aaaagaaacagcccugcaag

SEQ ID NO: 1085946 - RNA, 22 nt, Human
aaacaccaucaacggcuuaaaa

SEQ ID NO: 1085947 - RNA, 24 nt, Human
aaacagcccugcaagcgccuugau

SEQ ID NO: 1085948 - RNA, 19 nt, Human
aaagaaacagcccugcaag

SEQ ID NO: 1085949 - RNA, 20 nt, Human
aaagccaagacaaacugaug

SEQ ID NO: 1085950 - RNA, 27 nt, Human
aaauggucaggaagaaagucugcaaaa

SEQ ID NO: 1085951 - RNA, 19 nt, Human
aaccucugucauuguuccc

SEQ ID NO: 1085952 - RNA, 23 nt, Human
aagcaggaagagaacuauacagg

SEQ ID NO: 1085953 - RNA, 24 nt, Human
aagcaggaagagaacuauacaggc

SEQ ID NO: 1085954 - RNA, 21 nt, Human
aagcaucccuauuauuaaggg

SEQ ID NO: 1085955 - RNA, 22 nt, Human
acagacaaaaguauagcaugug

SEQ ID NO: 1085956 - RNA, 18 nt, Human
accucagauuuccaaucu

SEQ ID NO: 1085957 - RNA, 24 nt, Human
acuaacuaggguuuguaucuugcc

SEQ ID NO: 1085958 - RNA, 19 nt, Human
acuauuaaaccaacagaau

SEQ ID NO: 1085959 - RNA, 23 nt, Human
acucagugcucacaaacugcaaa

SEQ ID NO: 1085960 - RNA, 19 nt, Human
agaaaaauuuguguuauuu

SEQ ID NO: 1085961 - RNA, 20 nt, Human
agaaaugcugaaaauugggg

SEQ ID NO: 1085962 - RNA, 21 nt, Human
agaagauuaaagccugaaaca

SEQ ID NO: 1085963 - RNA, 21 nt, Human
agagaugaaccaugugcuugg

SEQ ID NO: 1085964 - RNA, 23 nt, Human
agauggaaggagggguucccagc

SEQ ID NO: 1085965 - RNA, 26 nt, Human
aggaaaaauaauacaguaucugguaa

SEQ ID NO: 1085966 - RNA, 27 nt, Human
aggaaaaauaauacaguaucugguaaa

SEQ ID NO: 1085967 - RNA, 18 nt, Human
aggaacuucaguugggga

SEQ ID NO: 1085968 - RNA, 18 nt, Human
agugcucacaaacugcaa

SEQ ID NO: 1085969 - RNA, 26 nt, Human
auagauuuuucccuaaagccucaaaa

SEQ ID NO: 1085970 - RNA, 22 nt, Human
aucuugccuaaaccacucacua

SEQ ID NO: 1085971 - RNA, 18 nt, Human
augaaccaugugcuuggc

SEQ ID NO: 1085972 - RNA, 23 nt, Human
caaacauuucaauuuaacaacuc

SEQ ID NO: 1085973 - RNA, 23 nt, Human
caaagcauagcccacuuaaagaa

SEQ ID NO: 1085974 - RNA, 20 nt, Human
caacaaauggcaucauauua

SEQ ID NO: 1085975 - RNA, 21 nt, Human
caacauaaccacugaagagaa

SEQ ID NO: 1085976 - RNA, 19 nt, Human
caacucuaaauuccaaucu

SEQ ID NO: 1085977 - RNA, 21 nt, Human
caacucuuccccagcaacaua

SEQ ID NO: 1085978 - RNA, 21 nt, Human
cacaugugcagucuuagugac

SEQ ID NO: 1085979 - RNA, 22 nt, Human
cacuauagcuacugcugaagug

SEQ ID NO: 1085980 - RNA, 24 nt, Human
cagaaguccuuaacaaagccaaga

SEQ ID NO: 1085981 - RNA, 23 nt, Human
cagcuuuaucgauuuaguugaag

SEQ ID NO: 1085982 - RNA, 22 nt, Human
caugcccaaaucccuggaaccc

SEQ ID NO: 1085983 - RNA, 19 nt, Human
caugugcagucuuagugac

SEQ ID NO: 1085984 - RNA, 19 nt, Human
ccagcaacauaaccacuga

SEQ ID NO: 1085985 - RNA, 23 nt, Human
ccauuaaaguuugaaaacugagc

SEQ ID NO: 1085986 - RNA, 21 nt, Human
cccaacucuuccccagcaaca

SEQ ID NO: 1085987 - RNA, 18 nt, Human
cccccaacucuuccccag

SEQ ID NO: 1085988 - RNA, 22 nt, Human
ccuacagaaguccaugcccaaa

SEQ ID NO: 1085989 - RNA, 24 nt, Human
cggauaauacuugcuuuacagaau

SEQ ID NO: 1085990 - RNA, 22 nt, Human
cuaaucaaaauauaaaacccca

SEQ ID NO: 1085991 - RNA, 20 nt, Human
cuccagaaccugcuacucag

SEQ ID NO: 1085992 - RNA, 20 nt, Human
cugcauaagaacuugaacaa

SEQ ID NO: 1085993 - RNA, 18 nt, Human
cuugccuaaaccacucac

SEQ ID NO: 1085994 - RNA, 23 nt, Human
gaagauggaaggagggguuccca

SEQ ID NO: 1085995 - RNA, 19 nt, Human
gacaaaaguauagcaugug

SEQ ID NO: 1085996 - RNA, 23 nt, Human
gagaagauuaaagccugaaacau

SEQ ID NO: 1085997 - RNA, 18 nt, Human
gagcacaucuaucaaagc

SEQ ID NO: 1085998 - RNA, 18 nt, Human
gagcacauuucuggcaga

SEQ ID NO: 1085999 - RNA, 25 nt, Human
gauaacggaaggagcuucagagaga

SEQ ID NO: 1086000 - RNA, 20 nt, Human
gcaacauaaccacugaagag

SEQ ID NO: 1086001 - RNA, 21 nt, Human
gcugaagugaaaccacaucug

SEQ ID NO: 1086002 - RNA, 18 nt, Human
gggagaaguuguaaaaug

SEQ ID NO: 1086003 - RNA, 23 nt, Human
guagaugcucaacaaauggcauc

SEQ ID NO: 1086004 - RNA, 28 nt, Human
gugaaacagaaauguauauaagugaacc

SEQ ID NO: 1086005 - RNA, 25 nt, Human
uaaacaccaucaacggcuuaaaaag

SEQ ID NO: 1086006 - RNA, 21 nt, Human
uaaaccacucacuagcuguga

SEQ ID NO: 1086007 - RNA, 22 nt, Human
uaaagagcacaucuaucaaagc

SEQ ID NO: 1086008 - RNA, 18 nt, Human
uaaagccucaaaaagaaa

SEQ ID NO: 1086009 - RNA, 19 nt, Human
uaacaaagccaagacaaac

SEQ ID NO: 1086010 - RNA, 23 nt, Human
uaacacagaacucuacgguuaca

SEQ ID NO: 1086011 - RNA, 21 nt, Human
uaagaaucuaauuucuuuggu

SEQ ID NO: 1086012 - RNA, 23 nt, Human
uaauacuugcuuuacagaaugua

SEQ ID NO: 1086013 - RNA, 24 nt, Human
uaauguguuacagcagcaauagga

SEQ ID NO: 1086014 - RNA, 21 nt, Human
uaccaaacauagcaaaaggaa

SEQ ID NO: 1086015 - RNA, 18 nt, Human
uaccauaauacucugcaa

SEQ ID NO: 1086016 - RNA, 22 nt, Human
uaugaagcacauauucagaaac

SEQ ID NO: 1086017 - RNA, 19 nt, Human
uaugguagucuccagaacc

SEQ ID NO: 1086018 - RNA, 18 nt, Human
uauguuaccaaacauagc

SEQ ID NO: 1086019 - RNA, 21 nt, Human
ucaaaaagaaacagcccugca

SEQ ID NO: 1086020 - RNA, 18 nt, Human
ucagagacccauguggca

SEQ ID NO: 1086021 - RNA, 19 nt, Human
ucagagguaccauaauacu

SEQ ID NO: 1086022 - RNA, 23 nt, Human
ucauuuggcaaaaacaucaugug

SEQ ID NO: 1086023 - RNA, 21 nt, Human
uccaaucucacaccuuuaaag

SEQ ID NO: 1086024 - RNA, 22 nt, Human
uccaugcccaaaucccuggaac

SEQ ID NO: 1086025 - RNA, 21 nt, Human
ucccaauguuggcauugcucg

SEQ ID NO: 1086026 - RNA, 22 nt, Human
uccccaaggggcacaugaccuu

SEQ ID NO: 1086027 - RNA, 23 nt, Human
ucccccaacucuuccccagcaac

SEQ ID NO: 1086028 - RNA, 18 nt, Human
ucccuaaaaugcggauaa

SEQ ID NO: 1086029 - RNA, 18 nt, Human
uccgaagagacauguuug

SEQ ID NO: 1086030 - RNA, 18 nt, Human
ucuccagaaccugcuacu

SEQ ID NO: 1086031 - RNA, 19 nt, Human
ucugcaaaacacaugugca

SEQ ID NO: 1086032 - RNA, 21 nt, Human
ucugcaacauaaaagcuugcu

SEQ ID NO: 1086033 - RNA, 21 nt, Human
ugaaacagaaauguauauaag

SEQ ID NO: 1086034 - RNA, 18 nt, Human
ugaaacauacacauugca

SEQ ID NO: 1086035 - RNA, 22 nt, Human
ugaagugaaaccacaucugggu

SEQ ID NO: 1086036 - RNA, 24 nt, Human
ugaauuguuuucaaaggugucugc

SEQ ID NO: 1086037 - RNA, 22 nt, Human
ugacaugauuuguuugccucuu

SEQ ID NO: 1086038 - RNA, 21 nt, Human
ugaccucagauuuccaaucuc

SEQ ID NO: 1086039 - RNA, 19 nt, Human
ugagaagauuaaagccuga

SEQ ID NO: 1086040 - RNA, 24 nt, Human
ugagcauaaaucaacuuaacacag

SEQ ID NO: 1086041 - RNA, 24 nt, Human
ugaggaacuucaguuggggagauu

SEQ ID NO: 1086042 - RNA, 24 nt, Human
ugaguuccuguguuuugaggucuu

SEQ ID NO: 1086043 - RNA, 19 nt, Human
ugauaacggaaggagcuuc

SEQ ID NO: 1086044 - RNA, 21 nt, Human
ugaucuuauguccugagcaua

SEQ ID NO: 1086045 - RNA, 23 nt, Human
ugcaagcgccuugauuuuguccc

SEQ ID NO: 1086046 - RNA, 18 nt, Human
ugcccaaaucccuggaac

SEQ ID NO: 1086047 - RNA, 24 nt, Human
uggaaaguaucacaucauuuggca

SEQ ID NO: 1086048 - RNA, 25 nt, Human
uggaaaguaucacaucauuuggcaa

SEQ ID NO: 1086049 - RNA, 18 nt, Human
uggaaggagggguuccca

SEQ ID NO: 1086050 - RNA, 21 nt, Human
uggaaggagggguucccagcc

SEQ ID NO: 1086051 - RNA, 23 nt, Human
uggcaagagaucaggaagcuguu

SEQ ID NO: 1086052 - RNA, 24 nt, Human
ugggguuggacaaagagaaaugau

SEQ ID NO: 1086053 - RNA, 23 nt, Human
ugugaucuuauguccugagcaua

SEQ ID NO: 1086054 - RNA, 23 nt, Human
uguuaccaaacauagcaaaagga

SEQ ID NO: 1086055 - RNA, 21 nt, Human
uguuauuuuaagccaccaccu

SEQ ID NO: 1086056 - RNA, 21 nt, Human
uuaacaaagccaagacaaacu

SEQ ID NO: 1086057 - RNA, 25 nt, Human
uuaaucuuaaacaccaucaacggcu

SEQ ID NO: 1086058 - RNA, 23 nt, Human
uuaggacacuugcugauaaacau

SEQ ID NO: 1086059 - RNA, 21 nt, Human
uuccacagaaagaauguaccu

SEQ ID NO: 1086060 - RNA, 23 nt, Human
uuccccagcaacauaaccacuga

SEQ ID NO: 1086061 - RNA, 18 nt, Human
uuugaaaacugagcuccu

SEQ ID NO: 1086062 - RNA, 23 nt, Human
uuuggaaaguaucacaucauuug

SEQ ID NO: 1086063 - RNA, 22 nt, Human
aaacagaagaugaauagcuggg

SEQ ID NO: 1086064 - RNA, 23 nt, Human
aaccgcacccaauuaaagcagca

SEQ ID NO: 1086065 - RNA, 29 nt, Human
aagcagcaaacagaagaugaagggacccc

SEQ ID NO: 1086066 - RNA, 18 nt, Human
aauugauucaaaacuuuu

SEQ ID NO: 1086067 - RNA, 19 nt, Human
cacccaauuaaagcagcaa

SEQ ID NO: 1086068 - RNA, 19 nt, Human
cagcaaacagaagaugaau

SEQ ID NO: 1086069 - RNA, 22 nt, Human
cagcagauggcaagaaagccgg

SEQ ID NO: 1086070 - RNA, 21 nt, Human
uagcuggguggaucaguaugu

SEQ ID NO: 1086071 - RNA, 20 nt, Human
uagguauucuacccuuagau

SEQ ID NO: 1086072 - RNA, 22 nt, Human
ugaauagcuggguggaucagua

SEQ ID NO: 1086073 - RNA, 21 nt, Human
aaaacaugacuuuuggcauca

SEQ ID NO: 1086074 - RNA, 20 nt, Human
aaagaaacaaaauaaacaug

SEQ ID NO: 1086075 - RNA, 19 nt, Human
acaaaguacuguuuuacag

SEQ ID NO: 1086076 - RNA, 23 nt, Human
agagaacaaaguuuugucaauau

SEQ ID NO: 1086077 - RNA, 18 nt, Human
agugauauuucagaaagg

SEQ ID NO: 1086078 - RNA, 24 nt, Human
aucauaacaggcucuuguuucugc

SEQ ID NO: 1086079 - RNA, 18 nt, Human
augaaauaugguaaagcc

SEQ ID NO: 1086080 - RNA, 19 nt, Human
cacaugcaugcaguaguca

SEQ ID NO: 1086081 - RNA, 21 nt, Human
cagaaauaagaacucagccaa

SEQ ID NO: 1086082 - RNA, 23 nt, Human
cagaaugguucugacagucauga

SEQ ID NO: 1086083 - RNA, 18 nt, Human
cagguuuuuuacauaccu

SEQ ID NO: 1086084 - RNA, 18 nt, Human
cauaacaauacagaaaau

SEQ ID NO: 1086085 - RNA, 20 nt, Human
caugaacagauaucugaccc

SEQ ID NO: 1086086 - RNA, 20 nt, Human
caugauacuaagcacuucuu

SEQ ID NO: 1086087 - RNA, 26 nt, Human
ccuccagagauuauuucagaaauaag

SEQ ID NO: 1086088 - RNA, 19 nt, Human
cugcauucaauacuaauca

SEQ ID NO: 1086089 - RNA, 24 nt, Human
gaaugaaauaugguaaagccaaga

SEQ ID NO: 1086090 - RNA, 21 nt, Human
gcuuuaacagcauuucuucac

SEQ ID NO: 1086091 - RNA, 23 nt, Human
gugaaauggguaaagaaacaaaa

SEQ ID NO: 1086092 - RNA, 23 nt, Human
uaaaauuacaaaugcuuucuaga

SEQ ID NO: 1086093 - RNA, 20 nt, Human
uacuaagcacuucuguacuu

SEQ ID NO: 1086094 - RNA, 23 nt, Human
uauaaaauuacaaaugcuuucua

SEQ ID NO: 1086095 - RNA, 20 nt, Human
uauuuuggcauagacucuaa

SEQ ID NO: 1086096 - RNA, 20 nt, Human
ucauaacugucagagggaag

SEQ ID NO: 1086097 - RNA, 19 nt, Human
uccacuaacaguuaugacc

SEQ ID NO: 1086098 - RNA, 20 nt, Human
uccacuaacaguuaugacca

SEQ ID NO: 1086099 - RNA, 18 nt, Human
ucuaaaccauuaaugacu

SEQ ID NO: 1086100 - RNA, 22 nt, Human
ucuaugggcaauauaaucucaa

SEQ ID NO: 1086101 - RNA, 24 nt, Human
ucuuccgacuuaauuuuacuauuu

SEQ ID NO: 1086102 - RNA, 18 nt, Human
ugaguacuggcaaacauu

SEQ ID NO: 1086103 - RNA, 22 nt, Human
ugaugugaucuuggcaguuuua

SEQ ID NO: 1086104 - RNA, 21 nt, Human
uggcauagacucuaaaaaguc

SEQ ID NO: 1086105 - RNA, 25 nt, Human
uguuuuacagccauauauuuuggca

SEQ ID NO: 1086106 - RNA, 20 nt, Human
uuaaagaaugaaauauggua

SEQ ID NO: 1086107 - RNA, 19 nt, Human
uuaaugaaugugaaauggg

SEQ ID NO: 1086108 - RNA, 21 nt, Human
uuacauuguucuccuacugca

SEQ ID NO: 1086109 - RNA, 21 nt, Human
uuagaggagucauuaacaaag

SEQ ID NO: 1086110 - RNA, 21 nt, Human
uucagaaauaagaacucagcc

SEQ ID NO: 1086111 - RNA, 21 nt, Human
uucauggaacacugauuuccc

SEQ ID NO: 1086112 - RNA, 23 nt, Human
uugauauuucacuuuacaucaua

SEQ ID NO: 1086113 - RNA, 21 nt, Human
uuuccaucccauuucuaaacc

SEQ ID NO: 1086114 - RNA, 18 nt, Human
acccagcuccccacacaa

SEQ ID NO: 1086115 - RNA, 19 nt, Human
agaaauuggaaaagaacau

SEQ ID NO: 1086116 - RNA, 19 nt, Human
agaacacacacccagcucc

SEQ ID NO: 1086117 - RNA, 22 nt, Human
agccauggaggcuggggggcuu

SEQ ID NO: 1086118 - RNA, 18 nt, Human
auggaggcuggggggcuu

SEQ ID NO: 1086119 - RNA, 21 nt, Human
cagaacacacacccagcuccc

SEQ ID NO: 1086120 - RNA, 22 nt, Human
cagaacacacacccagcucccc

SEQ ID NO: 1086121 - RNA, 21 nt, Human
caggaccccagacucucccga

SEQ ID NO: 1086122 - RNA, 19 nt, Human
cccacacaaucuagagggu

SEQ ID NO: 1086123 - RNA, 21 nt, Human
cccagaauuugccuccauuuc

SEQ ID NO: 1086124 - RNA, 26 nt, Human
cucaggaccccagacucucccgauuc

SEQ ID NO: 1086125 - RNA, 20 nt, Human
cugcaccugcagucaggagu

SEQ ID NO: 1086126 - RNA, 21 nt, Human
cuggccagaacacacacccag

SEQ ID NO: 1086127 - RNA, 21 nt, Human
gccucgucuuaguucugacuc

SEQ ID NO: 1086128 - RNA, 24 nt, Human
ggggggcuuuggggccgugggggc

SEQ ID NO: 1086129 - RNA, 19 nt, Human
uacccagaauuugccucca

SEQ ID NO: 1086130 - RNA, 21 nt, Human
uccaguaggaugcucugcacc

SEQ ID NO: 1086131 - RNA, 18 nt, Human
ugcucugcaccugcaguc

SEQ ID NO: 1086132 - RNA, 21 nt, Human
uggaaaagaacaucuccaggu

SEQ ID NO: 1086133 - RNA, 21 nt, Human
uggaggcuggggggcuuuggg

SEQ ID NO: 1086134 - RNA, 22 nt, Human
ugggggccagcccugguaccug

SEQ ID NO: 1086135 - RNA, 22 nt, Human
uggggggcuuuggggccguggg

SEQ ID NO: 1086136 - RNA, 20 nt, Human
uuucaggucucugccucuca

SEQ ID NO: 1086137 - RNA, 21 nt, Human
accauccaccucagcaucuga

SEQ ID NO: 1086138 - RNA, 23 nt, Human
agcaucugagucagguuccuccu

SEQ ID NO: 1086139 - RNA, 21 nt, Human
agcuaccaaauccaugagcag

SEQ ID NO: 1086140 - RNA, 23 nt, Human
agcuaccuuuuuuuuuuuuuuuu

SEQ ID NO: 1086141 - RNA, 22 nt, Human
aggcgagcggagcccccggagc

SEQ ID NO: 1086142 - RNA, 24 nt, Human
aucacagcuaucuacgcuacagca

SEQ ID NO: 1086143 - RNA, 27 nt, Human
aucagcuaccuuuuuuuuuuuuuuuuu

SEQ ID NO: 1086144 - RNA, 24 nt, Human
caagagggacuacauggaggaaga

SEQ ID NO: 1086145 - RNA, 18 nt, Human
cagaaaguaaaaaugcug

SEQ ID NO: 1086146 - RNA, 18 nt, Human
cagcuaccuuuuuuuuuu

SEQ ID NO: 1086147 - RNA, 23 nt, Human
ccgcagcgggggcggauggggga

SEQ ID NO: 1086148 - RNA, 21 nt, Human
ccuccugguccucuuggucau

SEQ ID NO: 1086149 - RNA, 21 nt, Human
ccuggccugcacagcgagggc

SEQ ID NO: 1086150 - RNA, 24 nt, Human
ccugggguuuguaucagcuaccuu

SEQ ID NO: 1086151 - RNA, 19 nt, Human
cggcgugggggcaggcgag

SEQ ID NO: 1086152 - RNA, 21 nt, Human
cuccuacucuucauccacacc

SEQ ID NO: 1086153 - RNA, 20 nt, Human
cuucgucuucuucuucgccc

SEQ ID NO: 1086154 - RNA, 21 nt, Human
cuucgucuucuucuucgcccu

SEQ ID NO: 1086155 - RNA, 23 nt, Human
cuuuuuuuuuuuuuuuuuaacag

SEQ ID NO: 1086156 - RNA, 18 nt, Human
gaugggggagaggcaucc

SEQ ID NO: 1086157 - RNA, 19 nt, Human
gcgggcggcgugggggcag

SEQ ID NO: 1086158 - RNA, 19 nt, Human
ggcaggagcuugaagacac

SEQ ID NO: 1086159 - RNA, 20 nt, Human
ggccggcggcgcgguccugg

SEQ ID NO: 1086160 - RNA, 22 nt, Human
ggcggaugggggagaggcaucc

SEQ ID NO: 1086161 - RNA, 18 nt, Human
ggcggcgugggggcaggc

SEQ ID NO: 1086162 - RNA, 21 nt, Human
gggggcaggcgagcggagccc

SEQ ID NO: 1086163 - RNA, 24 nt, Human
ggguggcgggcggcgugggggcag

SEQ ID NO: 1086164 - RNA, 18 nt, Human
ggguggguguccuggggu

SEQ ID NO: 1086165 - RNA, 20 nt, Human
guaaaaaugcuguuacaguu

SEQ ID NO: 1086166 - RNA, 25 nt, Human
guuacagucccaguguaacugguag

SEQ ID NO: 1086167 - RNA, 25 nt, Human
uaaaaaugcuguuacagucccagug

SEQ ID NO: 1086168 - RNA, 22 nt, Human
uacagaaaguaaaaaugcuguu

SEQ ID NO: 1086169 - RNA, 19 nt, Human
uagguaagcuggggcagga

SEQ ID NO: 1086170 - RNA, 25 nt, Human
ucacacaaaaaccuaacaacgucac

SEQ ID NO: 1086171 - RNA, 21 nt, Human
ucaucuggggucuuaaucauc

SEQ ID NO: 1086172 - RNA, 19 nt, Human
ucaucuggggucuuaaucu

SEQ ID NO: 1086173 - RNA, 18 nt, Human
uccaugagcaguccaacc

SEQ ID NO: 1086174 - RNA, 20 nt, Human
uccauguagguaagcugggg

SEQ ID NO: 1086175 - RNA, 24 nt, Human
uccucgucuucuucgucuucuucu

SEQ ID NO: 1086176 - RNA, 20 nt, Human
ucugcaggucaucugggguc

SEQ ID NO: 1086177 - RNA, 22 nt, Human
ucuucauccacaccauccaccu

SEQ ID NO: 1086178 - RNA, 20 nt, Human
ucuucgcccuccuacucuuc

SEQ ID NO: 1086179 - RNA, 21 nt, Human
ucuucgcccuccuacucuuca

SEQ ID NO: 1086180 - RNA, 19 nt, Human
ucuuuggcucuuugggugg

SEQ ID NO: 1086181 - RNA, 23 nt, Human
ucuuuggcucuuugggugggugg

SEQ ID NO: 1086182 - RNA, 24 nt, Human
ucuuuggguggguggguguccugg

SEQ ID NO: 1086183 - RNA, 22 nt, Human
uggcgggcggcgugggggcagg

SEQ ID NO: 1086184 - RNA, 24 nt, Human
uggggcaggagcuugaagacacuc

SEQ ID NO: 1086185 - RNA, 23 nt, Human
ugggggcaggcgagcggagcccc

SEQ ID NO: 1086186 - RNA, 23 nt, Human
uggguggguggguguccuggggu

SEQ ID NO: 1086187 - RNA, 24 nt, Human
uggguggguggguguccugggguu

SEQ ID NO: 1086188 - RNA, 19 nt, Human
uggguggguguccuggggu

SEQ ID NO: 1086189 - RNA, 19 nt, Human
ugguugacucaccaaucac

SEQ ID NO: 1086190 - RNA, 18 nt, Human
ugucacaggaacuauucu

SEQ ID NO: 1086191 - RNA, 21 nt, Human
uucauccacaccauccaccuc

SEQ ID NO: 1086192 - RNA, 24 nt, Human
uuccccucuuccccccucuucaaa

SEQ ID NO: 1086193 - RNA, 27 nt, Human
uuuguaucagcuaccuuuuuuuuuuuu

SEQ ID NO: 1086194 - RNA, 22 nt, Human
aaaaacauccacccaugucucc

SEQ ID NO: 1086195 - RNA, 20 nt, Human
aaaacauccacccaugucuc

SEQ ID NO: 1086196 - RNA, 22 nt, Human
aaagagaaaggaauuuguccag

SEQ ID NO: 1086197 - RNA, 20 nt, Human
aagagaaaggaauuugucca

SEQ ID NO: 1086198 - RNA, 21 nt, Human
aagcagccagaggaagucccc

SEQ ID NO: 1086199 - RNA, 28 nt, Human
aagugggaggcaggguggaaggucgacc

SEQ ID NO: 1086200 - RNA, 21 nt, Human
agacuaagggggagggggagg

SEQ ID NO: 1086201 - RNA, 19 nt, Human
agagagacuaagggggagg

SEQ ID NO: 1086202 - RNA, 20 nt, Human
aggcaggguggagaggacca

SEQ ID NO: 1086203 - RNA, 23 nt, Human
aggcaggguggagaggaccaggg

SEQ ID NO: 1086204 - RNA, 25 nt, Human
aggcaggguggagaggaccagggcu

SEQ ID NO: 1086205 - RNA, 27 nt, Human
aggggacaagggggaaucagggagcag

SEQ ID NO: 1086206 - RNA, 18 nt, Human
agggggagggggaggagg

SEQ ID NO: 1086207 - RNA, 21 nt, Human
caaaaacauccacccaugucu

SEQ ID NO: 1086208 - RNA, 18 nt, Human
caggaaagcagccagagg

SEQ ID NO: 1086209 - RNA, 24 nt, Human
ccagcuugugcugcugcggggugg

SEQ ID NO: 1086210 - RNA, 20 nt, Human
cccccucgcccacugguucu

SEQ ID NO: 1086211 - RNA, 19 nt, Human
ccuaagccacacugcagcu

SEQ ID NO: 1086212 - RNA, 20 nt, Human
ccucuuaagugggaggcagg

SEQ ID NO: 1086213 - RNA, 18 nt, Human
ccugaggggacaaggggg

SEQ ID NO: 1086214 - RNA, 25 nt, Human
cugaacuaaagagaaaggaauuugu

SEQ ID NO: 1086215 - RNA, 21 nt, Human
cugcgggguggggaggacucc

SEQ ID NO: 1086216 - RNA, 22 nt, Human
gaaucagggagcagagagacua

SEQ ID NO: 1086217 - RNA, 20 nt, Human
gaggggacaagggggaauca

SEQ ID NO: 1086218 - RNA, 22 nt, Human
gaguuucuuucaaaaacaucca

SEQ ID NO: 1086219 - RNA, 27 nt, Human
gccacacugcagcugcaggacaucggg

SEQ ID NO: 1086220 - RNA, 21 nt, Human
gccacacugcagcugcaggga

SEQ ID NO: 1086221 - RNA, 19 nt, Human
gcugcgggguggggaggac

SEQ ID NO: 1086222 - RNA, 21 nt, Human
gcugcgggguggggaggacuc

SEQ ID NO: 1086223 - RNA, 21 nt, Human
ggacuccugaggggacaaggg

SEQ ID NO: 1086224 - RNA, 22 nt, Human
gguggagaggaccagggcuuug

SEQ ID NO: 1086225 - RNA, 22 nt, Human
gguuggcucgccuagcagcagg

SEQ ID NO: 1086226 - RNA, 24 nt, Human
ucuuaagugggaggcaggguggag

SEQ ID NO: 1086227 - RNA, 20 nt, Human
ucuuucaaaaacauccaccc

SEQ ID NO: 1086228 - RNA, 24 nt, Human
ugggguguguugcccagcaaccag

SEQ ID NO: 1086229 - RNA, 18 nt, Human
uucucuguaagucgcccc

SEQ ID NO: 1086230 - RNA, 20 nt, Human
uugcccagcaaccaguagag

SEQ ID NO: 1086231 - RNA, 19 nt, Human
uuggcucgccuagcagcag

SEQ ID NO: 1086232 - RNA, 18 nt, Human
aaaaaccacacacuggcc

SEQ ID NO: 1086233 - RNA, 21 nt, Human
aaaaaccacacacuggccccc

SEQ ID NO: 1086234 - RNA, 27 nt, Human
aaacaaacaaaauuaaucaucccccag

SEQ ID NO: 1086235 - RNA, 21 nt, Human
aaagaaacaggcaaauauugg

SEQ ID NO: 1086236 - RNA, 21 nt, Human
aaagaauaaagucacagagag

SEQ ID NO: 1086237 - RNA, 22 nt, Human
aacaacaaaaacaaacaaacaa

SEQ ID NO: 1086238 - RNA, 24 nt, Human
aacaugccauugcacuccagccug

SEQ ID NO: 1086239 - RNA, 21 nt, Human
aaccacacacuggcccccaag

SEQ ID NO: 1086240 - RNA, 18 nt, Human
aagcaggaggaucgcuug

SEQ ID NO: 1086241 - RNA, 24 nt, Human
aagcaggaggaucgcuugagccca

SEQ ID NO: 1086242 - RNA, 22 nt, Human
aagugagagaaucgcuugaacc

SEQ ID NO: 1086243 - RNA, 24 nt, Human
aagugagagaaucgcuugaaccug

SEQ ID NO: 1086244 - RNA, 18 nt, Human
aaucgcuugaaccuggga

SEQ ID NO: 1086245 - RNA, 18 nt, Human
aauuagccaggcauggug

SEQ ID NO: 1086246 - RNA, 18 nt, Human
acaaggcuuuucuccagc

SEQ ID NO: 1086247 - RNA, 18 nt, Human
acagagcgagacccuguc

SEQ ID NO: 1086248 - RNA, 19 nt, Human
acagagcgagacccugucu

SEQ ID NO: 1086249 - RNA, 24 nt, Human
acagagcgagacccugucuuaaaa

SEQ ID NO: 1086250 - RNA, 21 nt, Human
agaaacaggcaaauauuggcu

SEQ ID NO: 1086251 - RNA, 21 nt, Human
agaagaaaaacucgauccaau

SEQ ID NO: 1086252 - RNA, 19 nt, Human
agacaaaagugagagaauc

SEQ ID NO: 1086253 - RNA, 18 nt, Human
agacaggagacagggcag

SEQ ID NO: 1086254 - RNA, 19 nt, Human
agacaggagacagggcaga

SEQ ID NO: 1086255 - RNA, 24 nt, Human
agacaggagacagggcagacagaa

SEQ ID NO: 1086256 - RNA, 23 nt, Human
agccaggcaugguggugcaugcc

SEQ ID NO: 1086257 - RNA, 18 nt, Human
agcucuaccagggaacaa

SEQ ID NO: 1086258 - RNA, 19 nt, Human
aggaagacaggagacaggg

SEQ ID NO: 1086259 - RNA, 24 nt, Human
aggaguucaagaccagcgugggcc

SEQ ID NO: 1086260 - RNA, 24 nt, Human
aggaucgcuugagcccaggaguuc

SEQ ID NO: 1086261 - RNA, 24 nt, Human
aggccaaagcaggaggaucgcuug

SEQ ID NO: 1086262 - RNA, 19 nt, Human
agggaacaacaaaaacaaa

SEQ ID NO: 1086263 - RNA, 26 nt, Human
agggaacaacaaaaacaaacaaacaa

SEQ ID NO: 1086264 - RNA, 24 nt, Human
aggugcaguggcucacgccuauaa

SEQ ID NO: 1086265 - RNA, 19 nt, Human
aguggcucacgccuauaau

SEQ ID NO: 1086266 - RNA, 23 nt, Human
aguggcucacgccuauaauccca

SEQ ID NO: 1086267 - RNA, 24 nt, Human
aucgcuugagcccaggaguucaag

SEQ ID NO: 1086268 - RNA, 23 nt, Human
auggacacacaauccaaagaaac

SEQ ID NO: 1086269 - RNA, 21 nt, Human
augugucugggugggguucug

SEQ ID NO: 1086270 - RNA, 21 nt, Human
auugcacuccagccuggguga

SEQ ID NO: 1086271 - RNA, 24 nt, Human
auugcacuccagccugggugacag

SEQ ID NO: 1086272 - RNA, 28 nt, Human
caaacaaacaaaauuaaucaucccccag

SEQ ID NO: 1086273 - RNA, 18 nt, Human
caaagaggguggacccca

SEQ ID NO: 1086274 - RNA, 22 nt, Human
caacaaaaacaaacaaacaaaa

SEQ ID NO: 1086275 - RNA, 21 nt, Human
cacacaauccaaagaaacagg

SEQ ID NO: 1086276 - RNA, 24 nt, Human
cacgccuauaaucccaacaauuug

SEQ ID NO: 1086277 - RNA, 22 nt, Human
cacuccagccugggugacagag

SEQ ID NO: 1086278 - RNA, 24 nt, Human
cacuccagccugggugacagagcg

SEQ ID NO: 1086279 - RNA, 21 nt, Human
cacuggcccccaaggucacac

SEQ ID NO: 1086280 - RNA, 20 nt, Human
cagaaccugcaccauccuuu

SEQ ID NO: 1086281 - RNA, 22 nt, Human
cagccagaugccagaauguucc

SEQ ID NO: 1086282 - RNA, 19 nt, Human
cauugcacuccagccuggg

SEQ ID NO: 1086283 - RNA, 21 nt, Human
cauugcacuccagccugggug

SEQ ID NO: 1086284 - RNA, 22 nt, Human
cauugcacuccagccuggguga

SEQ ID NO: 1086285 - RNA, 24 nt, Human
cauugcacuccagccugggugaca

SEQ ID NO: 1086286 - RNA, 25 nt, Human
cauugcacuccagccugggugacag

SEQ ID NO: 1086287 - RNA, 21 nt, Human
ccaugucugugacagcucaca

SEQ ID NO: 1086288 - RNA, 20 nt, Human
ccauugcacuccagccuggg

SEQ ID NO: 1086289 - RNA, 21 nt, Human
ccauugcacuccagccugggu

SEQ ID NO: 1086290 - RNA, 21 nt, Human
ccauugcacuccagccugggu

SEQ ID NO: 1086291 - RNA, 22 nt, Human
ccauugcacuccagccugggug

SEQ ID NO: 1086292 - RNA, 23 nt, Human
ccauugcacuccagccuggguga

SEQ ID NO: 1086293 - RNA, 24 nt, Human
ccauugcacuccagccugggugac

SEQ ID NO: 1086294 - RNA, 22 nt, Human
ccccacaauuucugcagaagaa

SEQ ID NO: 1086295 - RNA, 18 nt, Human
cccccagcuccacuuaac

SEQ ID NO: 1086296 - RNA, 18 nt, Human
cccuccagggacucacug

SEQ ID NO: 1086297 - RNA, 19 nt, Human
ccuauaaucccaacaauuu

SEQ ID NO: 1086298 - RNA, 21 nt, Human
ccucucauccuuuuccuggga

SEQ ID NO: 1086299 - RNA, 20 nt, Human
ccugggugacagagcgagac

SEQ ID NO: 1086300 - RNA, 21 nt, Human
ccuguaguuccagcuacuugg

SEQ ID NO: 1086301 - RNA, 24 nt, Human
ccuuaggucacgcagcugcaugcc

SEQ ID NO: 1086302 - RNA, 22 nt, Human
ccuuuagcuucugggggaccag

SEQ ID NO: 1086303 - RNA, 24 nt, Human
cgagacccugucuuaaaaaacuaa

SEQ ID NO: 1086304 - RNA, 24 nt, Human
cgccuauaaucccaacaauuuggg

SEQ ID NO: 1086305 - RNA, 20 nt, Human
cuaccagggguucaugaaag

SEQ ID NO: 1086306 - RNA, 21 nt, Human
cucacgccuauaaucccaaca

SEQ ID NO: 1086307 - RNA, 21 nt, Human
cucacgccuauaaucccaaca

SEQ ID NO: 1086308 - RNA, 22 nt, Human
cucguauucaugcguucauuuc

SEQ ID NO: 1086309 - RNA, 23 nt, Human
cucuccgaguccagcugugcaca

SEQ ID NO: 1086310 - RNA, 22 nt, Human
cugccuuuaacaccgaggccga

SEQ ID NO: 1086311 - RNA, 21 nt, Human
cuugugagccucugaagccac

SEQ ID NO: 1086312 - RNA, 21 nt, Human
gaacaugccauugcacuccag

SEQ ID NO: 1086313 - RNA, 19 nt, Human
gaaccugcaccauccuuua

SEQ ID NO: 1086314 - RNA, 25 nt, Human
gaauguucccuccagggacucacug

SEQ ID NO: 1086315 - RNA, 21 nt, Human
gaccaggugcaguggcucacg

SEQ ID NO: 1086316 - RNA, 23 nt, Human
gacucugguggugguauuaucca

SEQ ID NO: 1086317 - RNA, 24 nt, Human
gagggguggcagguuguugggguu

SEQ ID NO: 1086318 - RNA, 24 nt, Human
gaucgcuugagcccaggaguucaa

SEQ ID NO: 1086319 - RNA, 18 nt, Human
gcaauagaggaguuggua

SEQ ID NO: 1086320 - RNA, 24 nt, Human
gcacuccagccugggugacagagc

SEQ ID NO: 1086321 - RNA, 19 nt, Human
gccauugcacuccagccug

SEQ ID NO: 1086322 - RNA, 24 nt, Human
gccauugcacuccagccuggguga

SEQ ID NO: 1086323 - RNA, 20 nt, Human
ggacucacuggguaagggca

SEQ ID NO: 1086324 - RNA, 24 nt, Human
ggagaauguuggaggaggaaaaug

SEQ ID NO: 1086325 - RNA, 23 nt, Human
ggaucgcuugagcccaggaguuc

SEQ ID NO: 1086326 - RNA, 20 nt, Human
ggauugugagaaagaaaaag

SEQ ID NO: 1086327 - RNA, 18 nt, Human
gggagaauguuggaggag

SEQ ID NO: 1086328 - RNA, 22 nt, Human
ggggaccaggugcaguggcuca

SEQ ID NO: 1086329 - RNA, 22 nt, Human
ggugggguucugcuugugagcc

SEQ ID NO: 1086330 - RNA, 19 nt, Human
gugccaaagaggguggacc

SEQ ID NO: 1086331 - RNA, 23 nt, Human
guuaaauuggguuuuguuugacu

SEQ ID NO: 1086332 - RNA, 23 nt, Human
uaaaaaccacacacuggccccca

SEQ ID NO: 1086333 - RNA, 18 nt, Human
uaaagccgcuuugagaca

SEQ ID NO: 1086334 - RNA, 21 nt, Human
uaaagccgcuuugagacacag

SEQ ID NO: 1086335 - RNA, 24 nt, Human
uaacaaauugucuugcuuuuuucu

SEQ ID NO: 1086336 - RNA, 18 nt, Human
uaacaaggcuuuucucca

SEQ ID NO: 1086337 - RNA, 25 nt, Human
uaggucccuguuaaaagaggaugac

SEQ ID NO: 1086338 - RNA, 21 nt, Human
ucaagaccagcgugggccacc

SEQ ID NO: 1086339 - RNA, 18 nt, Human
ucagugcuguuucuagug

SEQ ID NO: 1086340 - RNA, 21 nt, Human
ucaugguagguggcccugccu

SEQ ID NO: 1086341 - RNA, 24 nt, Human
uccagcauggacacacaauccaaa

SEQ ID NO: 1086342 - RNA, 23 nt, Human
uccagccugggugacagagcgag

SEQ ID NO: 1086343 - RNA, 24 nt, Human
uccagccugggugacagagcgaga

SEQ ID NO: 1086344 - RNA, 18 nt, Human
ucccaaacuccuuguucc

SEQ ID NO: 1086345 - RNA, 24 nt, Human
ucgcuugaaccugggacgucaagg

SEQ ID NO: 1086346 - RNA, 25 nt, Human
ucgcuugaaccugggacgucaaggu

SEQ ID NO: 1086347 - RNA, 23 nt, Human
ucuaaagccgcuuugagacacag

SEQ ID NO: 1086348 - RNA, 24 nt, Human
ucuauauuuacuucuaaagccgcu

SEQ ID NO: 1086349 - RNA, 20 nt, Human
ucucugguuuuguccccucu

SEQ ID NO: 1086350 - RNA, 18 nt, Human
ucugaagccaccucccca

SEQ ID NO: 1086351 - RNA, 20 nt, Human
ugacaaaaucccugcaccuc

SEQ ID NO: 1086352 - RNA, 24 nt, Human
ugacaacacuuguaaucaaggcug

SEQ ID NO: 1086353 - RNA, 21 nt, Human
ugacagagcgagacccugucu

SEQ ID NO: 1086354 - RNA, 22 nt, Human
ugaccacacccugugaauggag

SEQ ID NO: 1086355 - RNA, 23 nt, Human
ugagaaaacaguagggggauguc

SEQ ID NO: 1086356 - RNA, 23 nt, Human
ugagcccaggaguucaagaccag

SEQ ID NO: 1086357 - RNA, 24 nt, Human
ugagggacagugccaaagagggug

SEQ ID NO: 1086358 - RNA, 19 nt, Human
ugcaauaccauguaccaaa

SEQ ID NO: 1086359 - RNA, 22 nt, Human
ugcacuccagccugggugacag

SEQ ID NO: 1086360 - RNA, 24 nt, Human
ugcacuccagccugggugacagag

SEQ ID NO: 1086361 - RNA, 22 nt, Human
ugcagugagccaugaacaugcc

SEQ ID NO: 1086362 - RNA, 21 nt, Human
ugcaugccaucgaaucaaaau

SEQ ID NO: 1086363 - RNA, 23 nt, Human
ugccuguaguuccagcuacuugg

SEQ ID NO: 1086364 - RNA, 24 nt, Human
ugccuguaguuccagcuacuuggg

SEQ ID NO: 1086365 - RNA, 18 nt, Human
ugccuuaggucacgcagc

SEQ ID NO: 1086366 - RNA, 20 nt, Human
ugccuuuaacaccgaggccg

SEQ ID NO: 1086367 - RNA, 24 nt, Human
ugccuuuaacaccgaggccgacuu

SEQ ID NO: 1086368 - RNA, 21 nt, Human
ugcuaaagaauaaagucacag

SEQ ID NO: 1086369 - RNA, 20 nt, Human
uggaaacuucagaacagaaa

SEQ ID NO: 1086370 - RNA, 21 nt, Human
uggacacacaauccaaagaaa

SEQ ID NO: 1086371 - RNA, 20 nt, Human
uggcccccaaggucacaccc

SEQ ID NO: 1086372 - RNA, 21 nt, Human
uggcucacgccuauaauccca

SEQ ID NO: 1086373 - RNA, 18 nt, Human
uggcuguacuaacuuugg

SEQ ID NO: 1086374 - RNA, 24 nt, Human
ugggacgucaagguugcagugagc

SEQ ID NO: 1086375 - RNA, 19 nt, Human
ugggagaauguuggaggag

SEQ ID NO: 1086376 - RNA, 20 nt, Human
ugggagaauguuggaggagg

SEQ ID NO: 1086377 - RNA, 25 nt, Human
ugguagguggcccugccuuuaacac

SEQ ID NO: 1086378 - RNA, 18 nt, Human
uggugcaugccuguaguu

SEQ ID NO: 1086379 - RNA, 23 nt, Human
ugguggugcaugccuguaguucc

SEQ ID NO: 1086380 - RNA, 24 nt, Human
ugguggugcaugccuguaguucca

SEQ ID NO: 1086381 - RNA, 18 nt, Human
uguaccaaagaauuucua

SEQ ID NO: 1086382 - RNA, 18 nt, Human
ugucauuguggugacaca

SEQ ID NO: 1086383 - RNA, 19 nt, Human
uguuagggagggguggcag

SEQ ID NO: 1086384 - RNA, 23 nt, Human
uguuggaggaggaaaaugaggga

SEQ ID NO: 1086385 - RNA, 24 nt, Human
uguuguguuuuuuuuucucuccca

SEQ ID NO: 1086386 - RNA, 25 nt, Human
uguuucuaguguuguguuuuuuuuu

SEQ ID NO: 1086387 - RNA, 20 nt, Human
uuaaaaacagaaccugcacc

SEQ ID NO: 1086388 - RNA, 24 nt, Human
uuaaucaucccccagcuccacuua

SEQ ID NO: 1086389 - RNA, 18 nt, Human
uucaagaccagcgugggc

SEQ ID NO: 1086390 - RNA, 19 nt, Human
uucagggauacgugauggc

SEQ ID NO: 1086391 - RNA, 23 nt, Human
uucugggggaccaggugcagugg

SEQ ID NO: 1086392 - RNA, 24 nt, Human
uugaaccugggacgucaagguugc

SEQ ID NO: 1086393 - RNA, 22 nt, Human
uugagcccaggaguucaagacc

SEQ ID NO: 1086394 - RNA, 20 nt, Human
uugagcuaauacauacuuaa

SEQ ID NO: 1086395 - RNA, 25 nt, Human
uuggaggaggaaaaugagggacagu

SEQ ID NO: 1086396 - RNA, 19 nt, Human
uuucuaguguuguguuuuu

SEQ ID NO: 1086397 - RNA, 25 nt, Human
uuuuuuuuucucucccaaacuccuu

SEQ ID NO: 1086398 - RNA, 20 nt, Human
cacccucuuugucuuacaag

SEQ ID NO: 1086399 - RNA, 19 nt, Human
ccccugugaaauguccacc

SEQ ID NO: 1086400 - RNA, 23 nt, Human
uaacugaagcuaguucauccccu

SEQ ID NO: 1086401 - RNA, 22 nt, Human
ucuccugacaauaaaauaaccc

SEQ ID NO: 1086402 - RNA, 24 nt, Human
ugugaaauguccaccuuucagagu

SEQ ID NO: 1086403 - RNA, 24 nt, Human
uguucuuucuccugacaauaaaau

SEQ ID NO: 1086404 - RNA, 19 nt, Human
uguugggcuaauucagagu

SEQ ID NO: 1086405 - RNA, 25 nt, Human
uguugggcuaauucagaguuuuccc

SEQ ID NO: 1086406 - RNA, 20 nt, Human
uucuccugacaauaaaauaa

SEQ ID NO: 1086407 - RNA, 27 nt, Human
aaaaaaaaaaaaaaauggaucacaaag

SEQ ID NO: 1086408 - RNA, 22 nt, Human
aaaaaauggaucacaaacacac

SEQ ID NO: 1086409 - RNA, 19 nt, Human
aaaacccaaauaguuucca

SEQ ID NO: 1086410 - RNA, 23 nt, Human
aaaaugaaacccucugaccuguc

SEQ ID NO: 1086411 - RNA, 18 nt, Human
aaacaauguugaccagaa

SEQ ID NO: 1086412 - RNA, 27 nt, Human
aaacauccaaaugaaaaguugaaaaca

SEQ ID NO: 1086413 - RNA, 19 nt, Human
aaaccccagguguuuccca

SEQ ID NO: 1086414 - RNA, 22 nt, Human
aaaugaccaguaaaaaaugauc

SEQ ID NO: 1086415 - RNA, 19 nt, Human
aaauuuuuuuuuaacaaga

SEQ ID NO: 1086416 - RNA, 23 nt, Human
aaccucucaccucaaccucacug

SEQ ID NO: 1086417 - RNA, 23 nt, Human
aagaauccagaguauaucgcaau

SEQ ID NO: 1086418 - RNA, 25 nt, Human
aagaugcggacacacacacguggga

SEQ ID NO: 1086419 - RNA, 23 nt, Human
aagcaccccaaugugcaccgagc

SEQ ID NO: 1086420 - RNA, 19 nt, Human
aagcauccuagccuucuca

SEQ ID NO: 1086421 - RNA, 25 nt, Human
aagcauccuagccuucucacccauc

SEQ ID NO: 1086422 - RNA, 18 nt, Human
aagcauggggggaaaaga

SEQ ID NO: 1086423 - RNA, 23 nt, Human
aaggagaccugggguggucuggg

SEQ ID NO: 1086424 - RNA, 19 nt, Human
aaucuacuggacuuaagag

SEQ ID NO: 1086425 - RNA, 26 nt, Human
acaaaaugacaucaguaacucggaca

SEQ ID NO: 1086426 - RNA, 24 nt, Human
acagagaaaaaucaagaggcagag

SEQ ID NO: 1086427 - RNA, 25 nt, Human
acagagaaaaaucaagaggcagaga

SEQ ID NO: 1086428 - RNA, 19 nt, Human
acagaggaacauuaacgaa

SEQ ID NO: 1086429 - RNA, 30 nt, Human
acagguguccuaaaaaaaaaaaaaaaaaaa

SEQ ID NO: 1086430 - RNA, 22 nt, Human
accagaggguucuggaagacca

SEQ ID NO: 1086431 - RNA, 25 nt, Human
acccaccacccggucauuccaccau

SEQ ID NO: 1086432 - RNA, 19 nt, Human
acccugcugcucguaacuc

SEQ ID NO: 1086433 - RNA, 18 nt, Human
accucaaccucacuggcu

SEQ ID NO: 1086434 - RNA, 20 nt, Human
acgaaaagaacaaaccccaa

SEQ ID NO: 1086435 - RNA, 20 nt, Human
acugcugagccucgaugugg

SEQ ID NO: 1086436 - RNA, 18 nt, Human
acugggacugcuggaaug

SEQ ID NO: 1086437 - RNA, 19 nt, Human
acuucaagcagugugagcu

SEQ ID NO: 1086438 - RNA, 22 nt, Human
agaaaaaagcagaguaagagaa

SEQ ID NO: 1086439 - RNA, 23 nt, Human
agaauauacaaaaacauuuugaa

SEQ ID NO: 1086440 - RNA, 22 nt, Human
agacaaagggauacccagaggu

SEQ ID NO: 1086441 - RNA, 24 nt, Human
agaggguucuggaagaccaagaua

SEQ ID NO: 1086442 - RNA, 26 nt, Human
agccacuggcaagccauucccaucag

SEQ ID NO: 1086443 - RNA, 19 nt, Human
aggaacauuaacgaaaaga

SEQ ID NO: 1086444 - RNA, 19 nt, Human
aggccaggagaggccaggu

SEQ ID NO: 1086445 - RNA, 18 nt, Human
aguugaaaacaaaaccca

SEQ ID NO: 1086446 - RNA, 24 nt, Human
aucaaguucaaaaccuugcccaca

SEQ ID NO: 1086447 - RNA, 21 nt, Human
auucuuuucuguauuggaaau

SEQ ID NO: 1086448 - RNA, 18 nt, Human
caaaaaugaaacccucug

SEQ ID NO: 1086449 - RNA, 27 nt, Human
caaaaccuugcccacauuccuuccaag

SEQ ID NO: 1086450 - RNA, 24 nt, Human
caaaauagacaguuucuuuuuucc

SEQ ID NO: 1086451 - RNA, 23 nt, Human
caaagggauacccagagguagac

SEQ ID NO: 1086452 - RNA, 21 nt, Human
caacacagaggaacauuaacg

SEQ ID NO: 1086453 - RNA, 23 nt, Human
caagaacaaucaaguucaaaacc

SEQ ID NO: 1086454 - RNA, 18 nt, Human
caagcagugugagcugcu

SEQ ID NO: 1086455 - RNA, 20 nt, Human
cacaaacacacauuugcaca

SEQ ID NO: 1086456 - RNA, 19 nt, Human
caccaucacacaagccaag

SEQ ID NO: 1086457 - RNA, 18 nt, Human
cacuagacaagcauccua

SEQ ID NO: 1086458 - RNA, 20 nt, Human
cacuggcaagccauucggcc

SEQ ID NO: 1086459 - RNA, 23 nt, Human
cagaaaaugcauuauuugcggug

SEQ ID NO: 1086460 - RNA, 24 nt, Human
cagcuaagaacacuagacaagcau

SEQ ID NO: 1086461 - RNA, 20 nt, Human
caucccgccuucugguuuga

SEQ ID NO: 1086462 - RNA, 18 nt, Human
caucuuaagaaacaggcc

SEQ ID NO: 1086463 - RNA, 21 nt, Human
cauggaaaaugccacaacuca

SEQ ID NO: 1086464 - RNA, 22 nt, Human
ccaaagggaaaugaccaguaaa

SEQ ID NO: 1086465 - RNA, 23 nt, Human
ccaagauacugaagauacagaac

SEQ ID NO: 1086466 - RNA, 25 nt, Human
ccaagauacugaagauacagaacua

SEQ ID NO: 1086467 - RNA, 22 nt, Human
ccaaugcugcuuagcccaggaa

SEQ ID NO: 1086468 - RNA, 23 nt, Human
ccagagguagacaaacucuggca

SEQ ID NO: 1086469 - RNA, 24 nt, Human
cccaaagcaccccaaugugcaccg

SEQ ID NO: 1086470 - RNA, 22 nt, Human
cccacauuccuuccaagcccug

SEQ ID NO: 1086471 - RNA, 21 nt, Human
cccucugaccuguccaagguc

SEQ ID NO: 1086472 - RNA, 18 nt, Human
ccuaaaaaaaaaaaaaaa

SEQ ID NO: 1086473 - RNA, 18 nt, Human
ccuaaaaaaaaaaaaaaa

SEQ ID NO: 1086474 - RNA, 19 nt, Human
ccuaaaaaaaaaaaaaaaa

SEQ ID NO: 1086475 - RNA, 23 nt, Human
ccucucaccucaaccucacuggc

SEQ ID NO: 1086476 - RNA, 25 nt, Human
ccugcagagguggacugcuguggga

SEQ ID NO: 1086477 - RNA, 20 nt, Human
ccuugcccacauuccuucca

SEQ ID NO: 1086478 - RNA, 22 nt, Human
ccuugcccacauuccuuccaag

SEQ ID NO: 1086479 - RNA, 26 nt, Human
cgagcaucucgccauuugguaguucc

SEQ ID NO: 1086480 - RNA, 22 nt, Human
cgcaaaaaccccagguguuucc

SEQ ID NO: 1086481 - RNA, 19 nt, Human
cgucaugacaucccacgaa

SEQ ID NO: 1086482 - RNA, 24 nt, Human
cuaagaugaaggccaaaaaugaaa

SEQ ID NO: 1086483 - RNA, 22 nt, Human
cuagcuaguaaacagguguccu

SEQ ID NO: 1086484 - RNA, 22 nt, Human
cucguaacucuucucugugcca

SEQ ID NO: 1086485 - RNA, 23 nt, Human
cuggaagaccaagauacugaaga

SEQ ID NO: 1086486 - RNA, 23 nt, Human
cuuaagagcccuauugaaaacgc

SEQ ID NO: 1086487 - RNA, 22 nt, Human
cuucccaaccagaggguucugg

SEQ ID NO: 1086488 - RNA, 20 nt, Human
gaacaaaccccaaacuugaa

SEQ ID NO: 1086489 - RNA, 18 nt, Human
gacaaagggauacccaga

SEQ ID NO: 1086490 - RNA, 24 nt, Human
gagaggccaggucggccacgaaca

SEQ ID NO: 1086491 - RNA, 19 nt, Human
gagggugaaccacggaugg

SEQ ID NO: 1086492 - RNA, 19 nt, Human
gaucucugguccacaucuc

SEQ ID NO: 1086493 - RNA, 20 nt, Human
gcaaaaagcauggggggaaa

SEQ ID NO: 1086494 - RNA, 21 nt, Human
gcaacagagguucagucuaaa

SEQ ID NO: 1086495 - RNA, 24 nt, Human
gcaauaacaggaauaaauucuuac

SEQ ID NO: 1086496 - RNA, 18 nt, Human
gcagagaaaucagcauga

SEQ ID NO: 1086497 - RNA, 25 nt, Human
gccaacgugacagcuaagaacacca

SEQ ID NO: 1086498 - RNA, 21 nt, Human
gccaaguuuucucuuuuauug

SEQ ID NO: 1086499 - RNA, 21 nt, Human
gccacaacucagcuuaagauu

SEQ ID NO: 1086500 - RNA, 19 nt, Human
gcccugcacccugcugcuc

SEQ ID NO: 1086501 - RNA, 23 nt, Human
ggaaauacguaucuucgggguuc

SEQ ID NO: 1086502 - RNA, 21 nt, Human
ggaugugugugugcaacgcca

SEQ ID NO: 1086503 - RNA, 18 nt, Human
ggcaaaaagcaugggggg

SEQ ID NO: 1086504 - RNA, 21 nt, Human
ggccaaggcauaccacggcgg

SEQ ID NO: 1086505 - RNA, 21 nt, Human
ggcuuagaaagcagacaggug

SEQ ID NO: 1086506 - RNA, 22 nt, Human
gggucacugucaccaggagggc

SEQ ID NO: 1086507 - RNA, 18 nt, Human
gugaagaaagaaaguguc

SEQ ID NO: 1086508 - RNA, 21 nt, Human
guggucugggucuugaucaag

SEQ ID NO: 1086509 - RNA, 23 nt, Human
guuaaaacaauguugaccagaaa

SEQ ID NO: 1086510 - RNA, 23 nt, Human
uaaaacaaaaacaaaaugacauc

SEQ ID NO: 1086511 - RNA, 23 nt, Human
uaaaacaaaaacaaaaugacauc

SEQ ID NO: 1086512 - RNA, 26 nt, Human
uaaacagguguccuaaaaaaaaaaaa

SEQ ID NO: 1086513 - RNA, 23 nt, Human
uaaaguagcuacacuccaaaggg

SEQ ID NO: 1086514 - RNA, 27 nt, Human
uaacaggaauaaauucuuacaacagaa

SEQ ID NO: 1086515 - RNA, 23 nt, Human
uaacgaaaagaacaaaccccaaa

SEQ ID NO: 1086516 - RNA, 24 nt, Human
uaacugggacugcuggaaugggcc

SEQ ID NO: 1086517 - RNA, 23 nt, Human
uaagagaaacuaacguugccuua

SEQ ID NO: 1086518 - RNA, 18 nt, Human
uaagaugaaggccaaaaa

SEQ ID NO: 1086519 - RNA, 25 nt, Human
uaagaugaaggccaaaaaugaaacc

SEQ ID NO: 1086520 - RNA, 27 nt, Human
uaagcaaauggccuguguuguaaugac

SEQ ID NO: 1086521 - RNA, 19 nt, Human
uaauuaguucuuguaaacc

SEQ ID NO: 1086522 - RNA, 27 nt, Human
uacauaaaacaaaaacaaaaugacauc

SEQ ID NO: 1086523 - RNA, 20 nt, Human
uaccuacauaaaacaaaaac

SEQ ID NO: 1086524 - RNA, 21 nt, Human
uaccuacauaaaacaaaaaca

SEQ ID NO: 1086525 - RNA, 19 nt, Human
uacuuuacuagaaaaaagc

SEQ ID NO: 1086526 - RNA, 20 nt, Human
uagaaagcagacagguguuu

SEQ ID NO: 1086527 - RNA, 21 nt, Human
uagcccaggaaaugaagacag

SEQ ID NO: 1086528 - RNA, 20 nt, Human
uagcgcaaaaaccccaggug

SEQ ID NO: 1086529 - RNA, 24 nt, Human
uaggauguuagguuucuuuguuga

SEQ ID NO: 1086530 - RNA, 21 nt, Human
uaguuuccagaucuuucuccu

SEQ ID NO: 1086531 - RNA, 25 nt, Human
uauacacagaaagucauuuuaugua

SEQ ID NO: 1086532 - RNA, 18 nt, Human
uaucccaaagcaccccaa

SEQ ID NO: 1086533 - RNA, 19 nt, Human
ucagggaagggcugugugg

SEQ ID NO: 1086534 - RNA, 19 nt, Human
ucccagacaaagggauacc

SEQ ID NO: 1086535 - RNA, 25 nt, Human
ucccugugacaaugguucuguaccc

SEQ ID NO: 1086536 - RNA, 20 nt, Human
uccuagccuucucacccauc

SEQ ID NO: 1086537 - RNA, 21 nt, Human
uccuauguagcgcaaaaaccc

SEQ ID NO: 1086538 - RNA, 21 nt, Human
ucucccaaugcugcuuagccc

SEQ ID NO: 1086539 - RNA, 23 nt, Human
ucuccuauguagcgcaaaaacug

SEQ ID NO: 1086540 - RNA, 23 nt, Human
ucuucgggguucugccuuaaaua

SEQ ID NO: 1086541 - RNA, 25 nt, Human
ugaaaacaaaacccaaauaguuucc

SEQ ID NO: 1086542 - RNA, 20 nt, Human
ugaaaaguugaaaacaaaac

SEQ ID NO: 1086543 - RNA, 21 nt, Human
ugaaaaguugaaaacaaaacc

SEQ ID NO: 1086544 - RNA, 20 nt, Human
ugaagacagcugacaacaca

SEQ ID NO: 1086545 - RNA, 24 nt, Human
ugaagacagcugacaacacagagg

SEQ ID NO: 1086546 - RNA, 19 nt, Human
ugaagcauuugcuaugaug

SEQ ID NO: 1086547 - RNA, 22 nt, Human
ugaaggccaaaaaugaaacccu

SEQ ID NO: 1086548 - RNA, 20 nt, Human
ugaccaguaaaaaaugaucc

SEQ ID NO: 1086549 - RNA, 19 nt, Human
ugagguguuucugaagcau

SEQ ID NO: 1086550 - RNA, 20 nt, Human
ugagguguuucugaagcauu

SEQ ID NO: 1086551 - RNA, 20 nt, Human
ugcacacacagagaaaaaaa

SEQ ID NO: 1086552 - RNA, 19 nt, Human
ugcauggaaaaugccacaa

SEQ ID NO: 1086553 - RNA, 20 nt, Human
ugcauggaaaaugccacaac

SEQ ID NO: 1086554 - RNA, 19 nt, Human
ugccagagaauaguuggcu

SEQ ID NO: 1086555 - RNA, 18 nt, Human
ugcggacacacacacgug

SEQ ID NO: 1086556 - RNA, 25 nt, Human
ugcggacacacacacgugggacaua

SEQ ID NO: 1086557 - RNA, 22 nt, Human
uggaacacacagagaaaaauca

SEQ ID NO: 1086558 - RNA, 23 nt, Human
uggaacacacagagaaaagggag

SEQ ID NO: 1086559 - RNA, 20 nt, Human
uggaaggagccaacgugaca

SEQ ID NO: 1086560 - RNA, 25 nt, Human
uggaucucugguccacaucucccaa

SEQ ID NO: 1086561 - RNA, 20 nt, Human
uggcaaaccucucaccucac

SEQ ID NO: 1086562 - RNA, 22 nt, Human
uggcagaaggagguugcaugga

SEQ ID NO: 1086563 - RNA, 19 nt, Human
uggccaacaauccacugga

SEQ ID NO: 1086564 - RNA, 18 nt, Human
uggggucagggagaaauc

SEQ ID NO: 1086565 - RNA, 25 nt, Human
uggggucagggagaaauccuuuuuu

SEQ ID NO: 1086566 - RNA, 19 nt, Human
uggguugguccaguaaagu

SEQ ID NO: 1086567 - RNA, 18 nt, Human
uguaaagaauccagagua

SEQ ID NO: 1086568 - RNA, 21 nt, Human
ugugcaccgagcaucucgccc

SEQ ID NO: 1086569 - RNA, 20 nt, Human
ugugugccccauagcuguca

SEQ ID NO: 1086570 - RNA, 20 nt, Human
uuccagaguaggauguuagg

SEQ ID NO: 1086571 - RNA, 27 nt, Human
uucuccuauguagcgcaaaaaccccag

SEQ ID NO: 1086572 - RNA, 21 nt, Human
uugcccacauuccuuccaagc

SEQ ID NO: 1086573 - RNA, 23 nt, Human
uugcggugcauccauuccauccc

SEQ ID NO: 1086574 - RNA, 22 nt, Human
uuuaacaagaaaacucagaaaa

SEQ ID NO: 1086575 - RNA, 18 nt, Human
uuucuuacuuaaaaaaau

SEQ ID NO: 1086576 - RNA, 19 nt, Human
aaaauccaaagccugaaaa

SEQ ID NO: 1086577 - RNA, 24 nt, Human
aaagugcugggauuacaggcguga

SEQ ID NO: 1086578 - RNA, 21 nt, Human
aaccauggcuacccaggaucg

SEQ ID NO: 1086579 - RNA, 21 nt, Human
aagacacuuaacagcaggcuc

SEQ ID NO: 1086580 - RNA, 18 nt, Human
aagccagugaaaaccagg

SEQ ID NO: 1086581 - RNA, 19 nt, Human
aagugcugggauuacaggc

SEQ ID NO: 1086582 - RNA, 19 nt, Human
aagugcugggauuacaggc

SEQ ID NO: 1086583 - RNA, 26 nt, Human
aagugcugggauuacaggcgugagcc

SEQ ID NO: 1086584 - RNA, 21 nt, Human
acagauuuaaccauggcuacc

SEQ ID NO: 1086585 - RNA, 23 nt, Human
acaggaaacugcauaguuaaaac

SEQ ID NO: 1086586 - RNA, 21 nt, Human
acaggcgugagccauccuccc

SEQ ID NO: 1086587 - RNA, 24 nt, Human
acauccaucgacacaaauuaucuc

SEQ ID NO: 1086588 - RNA, 19 nt, Human
acaugcaaaaacauggcua

SEQ ID NO: 1086589 - RNA, 18 nt, Human
acgggguuucaccauguu

SEQ ID NO: 1086590 - RNA, 19 nt, Human
acgggguuucaccauguua

SEQ ID NO: 1086591 - RNA, 20 nt, Human
acgggguuucaccauguuag

SEQ ID NO: 1086592 - RNA, 24 nt, Human
acgggguuucaccauguuagccag

SEQ ID NO: 1086593 - RNA, 20 nt, Human
acugcaagcuccgccucccg

SEQ ID NO: 1086594 - RNA, 23 nt, Human
acuuaguccagguaguuaguaag

SEQ ID NO: 1086595 - RNA, 23 nt, Human
agaaaagcaguuuuucaaauggc

SEQ ID NO: 1086596 - RNA, 24 nt, Human
agaaagcaaaucagugauugcuua

SEQ ID NO: 1086597 - RNA, 21 nt, Human
agacacuuaacagcaggcuca

SEQ ID NO: 1086598 - RNA, 22 nt, Human
agauauacaauagcacugaacu

SEQ ID NO: 1086599 - RNA, 22 nt, Human
aggcagggggugaggagugggg

SEQ ID NO: 1086600 - RNA, 25 nt, Human
aggcauaaaacucccuugugacuug

SEQ ID NO: 1086601 - RNA, 20 nt, Human
aggcgcccuccaccacgccu

SEQ ID NO: 1086602 - RNA, 25 nt, Human
aggcuggagugcaguggcaugaucu

SEQ ID NO: 1086603 - RNA, 20 nt, Human
agggggugaggaguggggag

SEQ ID NO: 1086604 - RNA, 18 nt, Human
aguagcugggacuacagg

SEQ ID NO: 1086605 - RNA, 19 nt, Human
aguagcugggacuacaggc

SEQ ID NO: 1086606 - RNA, 19 nt, Human
agucaaugucugagccccu

SEQ ID NO: 1086607 - RNA, 20 nt, Human
agugcaguggcaugaucucg

SEQ ID NO: 1086608 - RNA, 23 nt, Human
agugcaguggcaugaucucggcu

SEQ ID NO: 1086609 - RNA, 24 nt, Human
agugcaguggcaugaucucggcuc

SEQ ID NO: 1086610 - RNA, 18 nt, Human
agugcugggauuacaggc

SEQ ID NO: 1086611 - RNA, 24 nt, Human
aguggcaugaucucggcucacugc

SEQ ID NO: 1086612 - RNA, 24 nt, Human
auuuacuuaacggcugucugcacc

SEQ ID NO: 1086613 - RNA, 24 nt, Human
caaagugcugggauuacaggcgug

SEQ ID NO: 1086614 - RNA, 18 nt, Human
caagccagugaaaaccag

SEQ ID NO: 1086615 - RNA, 22 nt, Human
caagccagugaaaaccagggca

SEQ ID NO: 1086616 - RNA, 18 nt, Human
caccauguuagccaggau

SEQ ID NO: 1086617 - RNA, 22 nt, Human
caccauguuagccaggaugguc

SEQ ID NO: 1086618 - RNA, 24 nt, Human
caccauguuagccaggauggucuc

SEQ ID NO: 1086619 - RNA, 18 nt, Human
cagaagacacuuaacagc

SEQ ID NO: 1086620 - RNA, 24 nt, Human
cagauauagauagauagauggaua

SEQ ID NO: 1086621 - RNA, 23 nt, Human
cagauuuaaccauggcuacccag

SEQ ID NO: 1086622 - RNA, 22 nt, Human
caggauggucuccaucuccuga

SEQ ID NO: 1086623 - RNA, 25 nt, Human
caggcucccacuguuaauggggcau

SEQ ID NO: 1086624 - RNA, 24 nt, Human
caucgacacaaauuaucucuguuc

SEQ ID NO: 1086625 - RNA, 23 nt, Human
cauuuuggccaggcucccuuacu

SEQ ID NO: 1086626 - RNA, 23 nt, Human
ccaaaccuggaaacaacccaaau

SEQ ID NO: 1086627 - RNA, 22 nt, Human
ccaaagugcugggauuacaggc

SEQ ID NO: 1086628 - RNA, 22 nt, Human
ccaaagugcugggauuacaggc

SEQ ID NO: 1086629 - RNA, 24 nt, Human
ccaaagugcugggauuacaggcgu

SEQ ID NO: 1086630 - RNA, 20 nt, Human
ccagagcuuugucacucuca

SEQ ID NO: 1086631 - RNA, 20 nt, Human
ccaggaacaaagcacuuugc

SEQ ID NO: 1086632 - RNA, 19 nt, Human
ccagugaaaaccagggcaa

SEQ ID NO: 1086633 - RNA, 23 nt, Human
ccauaaaauggauuaguacugag

SEQ ID NO: 1086634 - RNA, 18 nt, Human
ccccauucuccugccuca

SEQ ID NO: 1086635 - RNA, 21 nt, Human
ccccauucuccugccucaguc

SEQ ID NO: 1086636 - RNA, 23 nt, Human
cccgaguagcugggacuacaggc

SEQ ID NO: 1086637 - RNA, 24 nt, Human
cccgaguagcugggacuacaggcg

SEQ ID NO: 1086638 - RNA, 18 nt, Human
ccucccggguucucccca

SEQ ID NO: 1086639 - RNA, 24 nt, Human
ccuuacugaaauguaaguuucuug

SEQ ID NO: 1086640 - RNA, 24 nt, Human
cgacacaauaggccuucacagaac

SEQ ID NO: 1086641 - RNA, 24 nt, Human
cgggguuucaccauguuagccagg

SEQ ID NO: 1086642 - RNA, 22 nt, Human
cgucaaaaagcccaggcuccca

SEQ ID NO: 1086643 - RNA, 21 nt, Human
cuaggccucccaaagugcugg

SEQ ID NO: 1086644 - RNA, 24 nt, Human
cucagucucccgaguagcugggac

SEQ ID NO: 1086645 - RNA, 19 nt, Human
cuccccauucuccugccuc

SEQ ID NO: 1086646 - RNA, 21 nt, Human
cucccggguucuccccauucu

SEQ ID NO: 1086647 - RNA, 24 nt, Human
cuccugaccucgugauccgcccgc

SEQ ID NO: 1086648 - RNA, 24 nt, Human
cucuaacaagauauacaauagcac

SEQ ID NO: 1086649 - RNA, 23 nt, Human
cugccucagucucccgaguagcu

SEQ ID NO: 1086650 - RNA, 24 nt, Human
cuggagugcaguggcaugaucucg

SEQ ID NO: 1086651 - RNA, 20 nt, Human
gaccucgugauccgcccgcc

SEQ ID NO: 1086652 - RNA, 21 nt, Human
gaccucgugauccgcccgccu

SEQ ID NO: 1086653 - RNA, 23 nt, Human
gaccucgugauccgcccgccuag

SEQ ID NO: 1086654 - RNA, 18 nt, Human
gagaagaaaucccuccuc

SEQ ID NO: 1086655 - RNA, 24 nt, Human
gagacgggguuucaccauguuagc

SEQ ID NO: 1086656 - RNA, 27 nt, Human
gaguagcugggacuacaggcgcccucc

SEQ ID NO: 1086657 - RNA, 18 nt, Human
gauuacaggcgugagcca

SEQ ID NO: 1086658 - RNA, 21 nt, Human
gccagagcuuugucacucuca

SEQ ID NO: 1086659 - RNA, 23 nt, Human
gcccaggcuggagugcaguggca

SEQ ID NO: 1086660 - RNA, 24 nt, Human
gcccaggcuggagugcaguggcau

SEQ ID NO: 1086661 - RNA, 24 nt, Human
gccucagucucccgaguagcuggg

SEQ ID NO: 1086662 - RNA, 25 nt, Human
gccucccggguucuccccauucucc

SEQ ID NO: 1086663 - RNA, 18 nt, Human
gccugguuaauuuuuuuu

SEQ ID NO: 1086664 - RNA, 21 nt, Human
gcgucaaaaagcccaggcucc

SEQ ID NO: 1086665 - RNA, 25 nt, Human
gcucugucgcccaggcuggagugca

SEQ ID NO: 1086666 - RNA, 19 nt, Human
gcuggagugcaguggcaug

SEQ ID NO: 1086667 - RNA, 23 nt, Human
ggagucuugcucugucgcccagg

SEQ ID NO: 1086668 - RNA, 24 nt, Human
gggacuacaggcgcccuccaccac

SEQ ID NO: 1086669 - RNA, 25 nt, Human
gggcaauaucuugucggacacugau

SEQ ID NO: 1086670 - RNA, 23 nt, Human
gggguuucaccauguuagccagg

SEQ ID NO: 1086671 - RNA, 20 nt, Human
ggucuccaucuccugaccuc

SEQ ID NO: 1086672 - RNA, 24 nt, Human
gguuucaccauguuagccaggaug

SEQ ID NO: 1086673 - RNA, 23 nt, Human
guagagacgggguuucaccaugu

SEQ ID NO: 1086674 - RNA, 23 nt, Human
guccagguaguuaguaaaauguu

SEQ ID NO: 1086675 - RNA, 19 nt, Human
uaaaacaaaugagaugucc

SEQ ID NO: 1086676 - RNA, 22 nt, Human
uaaaacaaaugagauguccuuc

SEQ ID NO: 1086677 - RNA, 22 nt, Human
uaaaauggauuaguacugagca

SEQ ID NO: 1086678 - RNA, 21 nt, Human
uaaauauuuuuaaagucagga

SEQ ID NO: 1086679 - RNA, 24 nt, Human
uaacaagauauacaauagcacuga

SEQ ID NO: 1086680 - RNA, 20 nt, Human
uacaggcgugagccauccuu

SEQ ID NO: 1086681 - RNA, 22 nt, Human
uagagacgggguuucaccaugu

SEQ ID NO: 1086682 - RNA, 21 nt, Human
uagaugaauagaugauagaua

SEQ ID NO: 1086683 - RNA, 21 nt, Human
uagaugaauagaugauagaug

SEQ ID NO: 1086684 - RNA, 23 nt, Human
uagauggauagauagauagggau

SEQ ID NO: 1086685 - RNA, 21 nt, Human
uagauggauaguugauaggua

SEQ ID NO: 1086686 - RNA, 20 nt, Human
uagcagcuuuauuuguaaca

SEQ ID NO: 1086687 - RNA, 24 nt, Human
uagccaggauggucuccaucuccu

SEQ ID NO: 1086688 - RNA, 18 nt, Human
uaggaaaagccagguaga

SEQ ID NO: 1086689 - RNA, 19 nt, Human
uaggaaaagccagguagag

SEQ ID NO: 1086690 - RNA, 23 nt, Human
uaggaaaagccagguagaggggg

SEQ ID NO: 1086691 - RNA, 27 nt, Human
uaggcauaaaacucccuugugacuugu

SEQ ID NO: 1086692 - RNA, 22 nt, Human
uagguaaugcguugaaacuacc

SEQ ID NO: 1086693 - RNA, 24 nt, Human
uaguagagacgggguuucaccaug

SEQ ID NO: 1086694 - RNA, 26 nt, Human
uaguagagacgggguuucaccauguu

SEQ ID NO: 1086695 - RNA, 23 nt, Human
uauuuuuaaagucaggaagaaaa

SEQ ID NO: 1086696 - RNA, 20 nt, Human
ucaaaaagcccaggcuccca

SEQ ID NO: 1086697 - RNA, 21 nt, Human
ucaaugccuaaugcuucuucu

SEQ ID NO: 1086698 - RNA, 24 nt, Human
ucaccauguuagccaggauggucu

SEQ ID NO: 1086699 - RNA, 18 nt, Human
ucacugcaagcuccgccu

SEQ ID NO: 1086700 - RNA, 19 nt, Human
ucacugcaagcuccgccuc

SEQ ID NO: 1086701 - RNA, 24 nt, Human
ucacugcaagcuccgccucccggg

SEQ ID NO: 1086702 - RNA, 23 nt, Human
ucagucucccgaguagcugggac

SEQ ID NO: 1086703 - RNA, 19 nt, Human
uccaaauuuucucucuauu

SEQ ID NO: 1086704 - RNA, 19 nt, Human
uccauaaaauggauuagua

SEQ ID NO: 1086705 - RNA, 24 nt, Human
ucccaaagugcugggauuacaggc

SEQ ID NO: 1086706 - RNA, 24 nt, Human
ucccgaguagcugggacuacaggc

SEQ ID NO: 1086707 - RNA, 21 nt, Human
ucccggguucuccccauucuc

SEQ ID NO: 1086708 - RNA, 24 nt, Human
ucccggguucuccccauucuccug

SEQ ID NO: 1086709 - RNA, 22 nt, Human
ucgcccaggcuggagugcagug

SEQ ID NO: 1086710 - RNA, 23 nt, Human
ucuaacaagauauacaauagcac

SEQ ID NO: 1086711 - RNA, 23 nt, Human
ucuccugucugugauacagcugg

SEQ ID NO: 1086712 - RNA, 21 nt, Human
ucuguauccauaaaauggauu

SEQ ID NO: 1086713 - RNA, 24 nt, Human
ucugucgcccaggcuggagugcag

SEQ ID NO: 1086714 - RNA, 23 nt, Human
ucuugcucugucgcccaggcugg

SEQ ID NO: 1086715 - RNA, 24 nt, Human
ucuugcucugucgcccaggcugga

SEQ ID NO: 1086716 - RNA, 18 nt, Human
ugacagaugauaaaugag

SEQ ID NO: 1086717 - RNA, 23 nt, Human
ugacuuguuuuugguuuugaauu

SEQ ID NO: 1086718 - RNA, 23 nt, Human
ugagaagaaaucccuccucuccc

SEQ ID NO: 1086719 - RNA, 22 nt, Human
ugagauggagucuugcucuguc

SEQ ID NO: 1086720 - RNA, 21 nt, Human
ugauacugcaaauaaaaucag

SEQ ID NO: 1086721 - RNA, 22 nt, Human
ugcaguggcaugaucucggcuc

SEQ ID NO: 1086722 - RNA, 23 nt, Human
ugcauaguuaaaacaaaugagau

SEQ ID NO: 1086723 - RNA, 22 nt, Human
ugccuaaugcuucuucugcacu

SEQ ID NO: 1086724 - RNA, 24 nt, Human
ugccuaaugcuucuucugcacucc

SEQ ID NO: 1086725 - RNA, 23 nt, Human
ugccucagucucccgaguagcug

SEQ ID NO: 1086726 - RNA, 24 nt, Human
ugccucagucucccgaguagcugg

SEQ ID NO: 1086727 - RNA, 24 nt, Human
ugcucugucgcccaggcuggagug

SEQ ID NO: 1086728 - RNA, 24 nt, Human
ugcugggauuacaggcgugagcca

SEQ ID NO: 1086729 - RNA, 25 nt, Human
uggaacaauuauuauauugaagaca

SEQ ID NO: 1086730 - RNA, 23 nt, Human
uggagucuugcucugucgcccag

SEQ ID NO: 1086731 - RNA, 24 nt, Human
uggagucuugcucugucgcccagg

SEQ ID NO: 1086732 - RNA, 19 nt, Human
uggagugcaguggcaugau

SEQ ID NO: 1086733 - RNA, 24 nt, Human
uggagugcaguggcaugaucucgg

SEQ ID NO: 1086734 - RNA, 19 nt, Human
uggauagauagauagggau

SEQ ID NO: 1086735 - RNA, 20 nt, Human
uggcuaaaucucaaauugua

SEQ ID NO: 1086736 - RNA, 24 nt, Human
ugggacuacaggcgcccuccacca

SEQ ID NO: 1086737 - RNA, 23 nt, Human
ugggauagauagauagauagaca

SEQ ID NO: 1086738 - RNA, 18 nt, Human
ugggauuacaggcgugag

SEQ ID NO: 1086739 - RNA, 19 nt, Human
ugggauuacaggcgugagc

SEQ ID NO: 1086740 - RNA, 21 nt, Human
ugggauuacaggcgugagcca

SEQ ID NO: 1086741 - RNA, 21 nt, Human
ugggauuacaggcgugagcca

SEQ ID NO: 1086742 - RNA, 22 nt, Human
ugggauuacaggcgugagccau

SEQ ID NO: 1086743 - RNA, 23 nt, Human
ugggauuacaggcgugagccauc

SEQ ID NO: 1086744 - RNA, 27 nt, Human
ugggauuacaggcgugagccauccucc

SEQ ID NO: 1086745 - RNA, 28 nt, Human
ugggauuacaggcgugagccauccuccc

SEQ ID NO: 1086746 - RNA, 25 nt, Human
ugguagguaaugcguugaaacuacc

SEQ ID NO: 1086747 - RNA, 18 nt, Human
uguuucuuuugagaugga

SEQ ID NO: 1086748 - RNA, 25 nt, Human
uuaacugauagugacagaaagcaaa

SEQ ID NO: 1086749 - RNA, 18 nt, Human
uuaguagagacgggguuu

SEQ ID NO: 1086750 - RNA, 22 nt, Human
uuaguagagacgggguuucacc

SEQ ID NO: 1086751 - RNA, 24 nt, Human
uuaguagagacgggguuucaccau

SEQ ID NO: 1086752 - RNA, 23 nt, Human
uuaguugucacaauaaacuccau

SEQ ID NO: 1086753 - RNA, 19 nt, Human
uucucauuuaaccccugua

SEQ ID NO: 1086754 - RNA, 23 nt, Human
uugauacugcaaauaaaaucagu

SEQ ID NO: 1086755 - RNA, 24 nt, Human
uugcucugucgcccaggcuggagu

SEQ ID NO: 1086756 - RNA, 23 nt, Human
uuguauuuuuaguagagacgggg

SEQ ID NO: 1086757 - RNA, 22 nt, Human
uuuauuuguaacagcccaaacc

SEQ ID NO: 1086758 - RNA, 19 nt, Human
uuucaccauguuagccagg

SEQ ID NO: 1086759 - RNA, 20 nt, Human
uuucaccauguuagccagga

SEQ ID NO: 1086760 - RNA, 23 nt, Human
uuuucucucugaagaguccaagc

SEQ ID NO: 1086761 - RNA, 24 nt, Human
uuuuuaguagagacgggguuucac

SEQ ID NO: 1086762 - RNA, 22 nt, Human
uuuuuguauuuuuaguagagaa

SEQ ID NO: 1086763 - RNA, 24 nt, Human
uuuuuuguauuuuuaguagagacg

SEQ ID NO: 1086764 - RNA, 22 nt, Human
uuuuuuguauuuuuaguagagg

SEQ ID NO: 1086765 - RNA, 30 nt, Human; identical to SEQ ID NO: 1063475

SEQ ID NO: 1086766 - RNA, 23 nt, Human
aaaaaagcaucacugaugccucu

SEQ ID NO: 1086767 - RNA, 24 nt, Human
aaagugcugggauuacaggcauga

SEQ ID NO: 1086768 - RNA, 21 nt, Human
aagaaagacgaaagagaagga

SEQ ID NO: 1086769 - RNA, 19 nt, Human
aagugcugggauuacaggc

SEQ ID NO: 1086770 - RNA, 21 nt, Human
aagugcugggauuacaggcau

SEQ ID NO: 1086771 - RNA, 26 nt, Human
aagugcugggauuacaggcaugagcc

SEQ ID NO: 1086772 - RNA, 19 nt, Human
acaagaaagacgaugacac

SEQ ID NO: 1086773 - RNA, 18 nt, Human
agaacagaagaaggaagg

SEQ ID NO: 1086774 - RNA, 18 nt, Human
agaagaaagacgaaagag

SEQ ID NO: 1086775 - RNA, 19 nt, Human
agaagaaagacgaaagaga

SEQ ID NO: 1086776 - RNA, 18 nt, Human
agaagaaggaagguagaa

SEQ ID NO: 1086777 - RNA, 22 nt, Human
agacgaugacaacaacaaucau

SEQ ID NO: 1086778 - RNA, 18 nt, Human
aggaguuauguaaauuuc

SEQ ID NO: 1086779 - RNA, 23 nt, Human
agugagaagaaagacgaaagaga

SEQ ID NO: 1086780 - RNA, 18 nt, Human
agugcugggauuacaggc

SEQ ID NO: 1086781 - RNA, 22 nt, Human
auaaagugaacugcagccgccc

SEQ ID NO: 1086782 - RNA, 23 nt, Human
caaaauguuugacaaagccaaag

SEQ ID NO: 1086783 - RNA, 20 nt, Human
caaagaaaauauuccuaaga

SEQ ID NO: 1086784 - RNA, 20 nt, Human
caaagccaaagaaaauauuc

SEQ ID NO: 1086785 - RNA, 24 nt, Human
caaagugcugggauuacaggcaug

SEQ ID NO: 1086786 - RNA, 20 nt, Human
caacaucacagaaguauaaa

SEQ ID NO: 1086787 - RNA, 22 nt, Human
caacaucacagaaguauaaacu

SEQ ID NO: 1086788 - RNA, 20 nt, Human
cacugcaaacaucucccuga

SEQ ID NO: 1086789 - RNA, 18 nt, Human
cagaaugcauuuucccau

SEQ ID NO: 1086790 - RNA, 20 nt, Human
cagcagggcagcuuccacuc

SEQ ID NO: 1086791 - RNA, 21 nt, Human
cagggcugggagugagaagaa

SEQ ID NO: 1086792 - RNA, 21 nt, Human
caugcagugauaccauuuauu

SEQ ID NO: 1086793 - RNA, 21 nt, Human
cauuauuuggcaaaguuugcu

SEQ ID NO: 1086794 - RNA, 19 nt, Human
cauuuucccauaaaaacca

SEQ ID NO: 1086795 - RNA, 23 nt, Human
ccaaagugcugggauuacaggca

SEQ ID NO: 1086796 - RNA, 24 nt, Human
ccaaagugcugggauuacaggcau

SEQ ID NO: 1086797 - RNA, 22 nt, Human
ccacacugcaaacaucucccug

SEQ ID NO: 1086798 - RNA, 24 nt, Human
cccaaagugcugggauuacaggca

SEQ ID NO: 1086799 - RNA, 21 nt, Human
ccccaucgcuucuugcucuuc

SEQ ID NO: 1086800 - RNA, 25 nt, Human
ccgcccagcuggcuuucucuugcuc

SEQ ID NO: 1086801 - RNA, 22 nt, Human
ccuaccacggcuuagccacuga

SEQ ID NO: 1086802 - RNA, 22 nt, Human
ccuccuccuuucuauggggcag

SEQ ID NO: 1086803 - RNA, 21 nt, Human
cgaaagagaaggagaacagga

SEQ ID NO: 1086804 - RNA, 20 nt, Human
cucagaaucaaagauccaau

SEQ ID NO: 1086805 - RNA, 18 nt, Human
cuccacacugcaaacauc

SEQ ID NO: 1086806 - RNA, 21 nt, Human
cuccacacugcaaacaucucc

SEQ ID NO: 1086807 - RNA, 25 nt, Human
cuggaacaaaagcuaggagucugau

SEQ ID NO: 1086808 - RNA, 21 nt, Human
cuggcuuucucuugcucuuuc

SEQ ID NO: 1086809 - RNA, 23 nt, Human
gacaacaacaaucauagugcccc

SEQ ID NO: 1086810 - RNA, 18 nt, Human
gagaagaaagacgaaaga

SEQ ID NO: 1086811 - RNA, 19 nt, Human
gagaagaaagacgaaagag

SEQ ID NO: 1086812 - RNA, 18 nt, Human
gaggacaugggguucugc

SEQ ID NO: 1086813 - RNA, 21 nt, Human
gaggaggaaaaaaaagcauca

SEQ ID NO: 1086814 - RNA, 23 nt, Human
gagugagaagaaagacgaaagag

SEQ ID NO: 1086815 - RNA, 18 nt, Human
gauuacaggcaugagcca

SEQ ID NO: 1086816 - RNA, 21 nt, Human
gauuacaggcaugagccacug

SEQ ID NO: 1086817 - RNA, 24 nt, Human
gauuacaggcaugagccacugugc

SEQ ID NO: 1086818 - RNA, 23 nt, Human
gcaaagcaccuucagacuuuuug

SEQ ID NO: 1086819 - RNA, 24 nt, Human
ggagugagaagaaagacgaaagag

SEQ ID NO: 1086820 - RNA, 24 nt, Human
ggauuacaggcaugagccacugug

SEQ ID NO: 1086821 - RNA, 24 nt, Human
guagucuuuaaguggaucuguugu

SEQ ID NO: 1086822 - RNA, 23 nt, Human
gugacuggaugccucagcuuccu

SEQ ID NO: 1086823 - RNA, 20 nt, Human
guggaggaggaaaaaaaagc

SEQ ID NO: 1086824 - RNA, 21 nt, Human
uaaagugaacugcagccgccc

SEQ ID NO: 1086825 - RNA, 18 nt, Human
uaacaacaucacagaagu

SEQ ID NO: 1086826 - RNA, 19 nt, Human
uaacucagccgaucagcag

SEQ ID NO: 1086827 - RNA, 18 nt, Human
uaagaaauggaacuccaa

SEQ ID NO: 1086828 - RNA, 18 nt, Human
uaagaauaacaacaucac

SEQ ID NO: 1086829 - RNA, 24 nt, Human
uacaggcaugagccacugugccca

SEQ ID NO: 1086830 - RNA, 19 nt, Human
uaccacggcuuagccacug

SEQ ID NO: 1086831 - RNA, 19 nt, Human
uagagacuggcuuucugua

SEQ ID NO: 1086832 - RNA, 19 nt, Human
uagccacugacucuagaca

SEQ ID NO: 1086833 - RNA, 21 nt, Human
uagucauaaacucauuugucc

SEQ ID NO: 1086834 - RNA, 28 nt, Human
uagucuuuaaguggaucuguuguuucuc

SEQ ID NO: 1086835 - RNA, 19 nt, Human
uaugcaaauugcauaugua

SEQ ID NO: 1086836 - RNA, 19 nt, Human
uauguugcccaggcugguc

SEQ ID NO: 1086837 - RNA, 20 nt, Human
uauguugcccaggcuggucu

SEQ ID NO: 1086838 - RNA, 23 nt, Human
uauguugcccaggcuggucuuaa

SEQ ID NO: 1086839 - RNA, 24 nt, Human
uauguugcccaggcuggucuuaaa

SEQ ID NO: 1086840 - RNA, 21 nt, Human
ucacaggaguuauguaaauuu

SEQ ID NO: 1086841 - RNA, 18 nt, Human
ucagcagcugggugacug

SEQ ID NO: 1086842 - RNA, 26 nt, Human
uccacacugcaaacaucucccugggg

SEQ ID NO: 1086843 - RNA, 24 nt, Human
ucccaaagugcugggauuacaggc

SEQ ID NO: 1086844 - RNA, 21 nt, Human
uccccacuucauagagaccua

SEQ ID NO: 1086845 - RNA, 19 nt, Human
ucccugggguuggucagaa

SEQ ID NO: 1086846 - RNA, 18 nt, Human
uccuagaguuaagccucc

SEQ ID NO: 1086847 - RNA, 20 nt, Human
ucucaggauuaucacucuuc

SEQ ID NO: 1086848 - RNA, 19 nt, Human
ucuuauaauguuugcugcu

SEQ ID NO: 1086849 - RNA, 23 nt, Human
ucuucaauaauccauuuccauug

SEQ ID NO: 1086850 - RNA, 19 nt, Human
ugaacugcagccgcccagc

SEQ ID NO: 1086851 - RNA, 21 nt, Human
ugagggucaaagugaagcucu

SEQ ID NO: 1086852 - RNA, 18 nt, Human
ugaugccuucagggcugg

SEQ ID NO: 1086853 - RNA, 20 nt, Human
ugcagaaaaguccaaaaugu

SEQ ID NO: 1086854 - RNA, 18 nt, Human
ugcagugcuaaaccacag

SEQ ID NO: 1086855 - RNA, 21 nt, Human
ugcauuuucccauaaaaacca

SEQ ID NO: 1086856 - RNA, 24 nt, Human
ugcccaggcuggucuuaaacuccu

SEQ ID NO: 1086857 - RNA, 21 nt, Human
ugcuccucucucuuggcauca

SEQ ID NO: 1086858 - RNA, 20 nt, Human
uggaaagaacagaagaagga

SEQ ID NO: 1086859 - RNA, 24 nt, Human
uggaaagaacagaagaaggaaggu

SEQ ID NO: 1086860 - RNA, 18 nt, Human
ugggauccucucacuuca

SEQ ID NO: 1086861 - RNA, 18 nt, Human
ugggauuacaggcaugag

SEQ ID NO: 1086862 - RNA, 21 nt, Human
ugggauuacaggcaugagcca

SEQ ID NO: 1086863 - RNA, 22 nt, Human
ugggauuacaggcaugagccac

SEQ ID NO: 1086864 - RNA, 22 nt, Human
ugggauuacaggcaugagccac

SEQ ID NO: 1086865 - RNA, 22 nt, Human
ugggauuacaggcaugagccac

SEQ ID NO: 1086866 - RNA, 24 nt, Human
ugggauuacaggcaugagccacug

SEQ ID NO: 1086867 - RNA, 26 nt, Human
ugggauuacaggcaugagccacugug

SEQ ID NO: 1086868 - RNA, 19 nt, Human
ugguugcagaaaaguccaa

SEQ ID NO: 1086869 - RNA, 23 nt, Human
uguauguugcccaggcuggucuu

SEQ ID NO: 1086870 - RNA, 26 nt, Human
uguauguugcccaggcuggucuuaaa

SEQ ID NO: 1086871 - RNA, 19 nt, Human
ugugaggaacuccccauua

SEQ ID NO: 1086872 - RNA, 21 nt, Human
ugugaugccuucagggcuggg

SEQ ID NO: 1086873 - RNA, 24 nt, Human
uuacuacgggucuuugugucuuca

SEQ ID NO: 1086874 - RNA, 27 nt, Human
uuccccaucgcuucuugcucuucuuua

SEQ ID NO: 1086875 - RNA, 23 nt, Human
uuccuggggcccaccauaaagug

SEQ ID NO: 1086876 - RNA, 21 nt, Human
uucuggaacaaaagcuaggag

SEQ ID NO: 1086877 - RNA, 19 nt, Human
uugcagaaaaguccaaaau

SEQ ID NO: 1086878 - RNA, 19 nt, Human
uuuauagucauaaacucau

SEQ ID NO: 1086879 - RNA, 19 nt, Human
uuucaggguguuuucccca

SEQ ID NO: 1086880 - RNA, 18 nt, Human
uuucccauaaaaaccauu

SEQ ID NO: 1086881 - RNA, 22 nt, Human
uuucucaggauuaucacucuuc

SEQ ID NO: 1086882 - RNA, 23 nt, Human
uuucuguauguugcccaggcugg

SEQ ID NO: 1086883 - RNA, 23 nt, Human
agacaaaaaagcagcagagcuga

SEQ ID NO: 1086884 - RNA, 22 nt, Human
aggauguugcuuuggcuuguug

SEQ ID NO: 1086885 - RNA, 23 nt, Human
caaaaaagcagcagagcugaaag

SEQ ID NO: 1086886 - RNA, 21 nt, Human
caagacaaaaaagcagcagag

SEQ ID NO: 1086887 - RNA, 20 nt, Human
caccaagacaaaaaagcagc

SEQ ID NO: 1086888 - RNA, 22 nt, Human
caccaagacaaaaaagcagcag

SEQ ID NO: 1086889 - RNA, 21 nt, Human
ccaagacaaaaaagcagcaga

SEQ ID NO: 1086890 - RNA, 27 nt, Human
gacaaaaaagcagcagagcugaaagga

SEQ ID NO: 1086891 - RNA, 25 nt, Human
uccuccaccaagacaaaaaaggggg

SEQ ID NO: 1086892 - RNA, 24 nt, Human
ugcuuuggcuuguugacacccacu

SEQ ID NO: 1086893 - RNA, 20 nt, Human
aaaaccccaggcucagccag

SEQ ID NO: 1086894 - RNA, 21 nt, Human
aaaaggcugucacacugaccc

SEQ ID NO: 1086895 - RNA, 18 nt, Human
aaaccccaggcucagcca

SEQ ID NO: 1086896 - RNA, 19 nt, Human
aacccaagcacuaaaaagu

SEQ ID NO: 1086897 - RNA, 18 nt, Human
aagaggucagggaaauac

SEQ ID NO: 1086898 - RNA, 19 nt, Human
aagaggucagggaaauacc

SEQ ID NO: 1086899 - RNA, 20 nt, Human
aagggccugcacaaaguuua

SEQ ID NO: 1086900 - RNA, 19 nt, Human
aaguaucucucaauucuau

SEQ ID NO: 1086901 - RNA, 22 nt, Human
aaucccccacauuuaccaucac

SEQ ID NO: 1086902 - RNA, 23 nt, Human
aaugaaaaaacccaagcacuaaa

SEQ ID NO: 1086903 - RNA, 25 nt, Human
accaacaaaaucccccacauuuacc

SEQ ID NO: 1086904 - RNA, 19 nt, Human
accaucuuuauccguaugu

SEQ ID NO: 1086905 - RNA, 23 nt, Human
acccacucaccuguucucccccc

SEQ ID NO: 1086906 - RNA, 21 nt, Human
acccaugcacuccaguuccca

SEQ ID NO: 1086907 - RNA, 23 nt, Human
accuccuaaguaucucucaauuc

SEQ ID NO: 1086908 - RNA, 25 nt, Human
acucugagaaguccugccggaaagu

SEQ ID NO: 1086909 - RNA, 24 nt, Human
agaaagacacuaauaaucuacaaa

SEQ ID NO: 1086910 - RNA, 22 nt, Human
agacaaauagguacagggcaag

SEQ ID NO: 1086911 - RNA, 18 nt, Human
agagaggaaaagaagcug

SEQ ID NO: 1086912 - RNA, 19 nt, Human
agcacagcucucuacaacc

SEQ ID NO: 1086913 - RNA, 18 nt, Human
agcuaguucuagcaccca

SEQ ID NO: 1086914 - RNA, 18 nt, Human
aggcacauguuaguaucu

SEQ ID NO: 1086915 - RNA, 19 nt, Human
aggugcaaaaggcugucac

SEQ ID NO: 1086916 - RNA, 20 nt, Human
agugaaaggucagaaucuua

SEQ ID NO: 1086917 - RNA, 22 nt, Human
auaaacaaauuaagcaagggau

SEQ ID NO: 1086918 - RNA, 18 nt, Human
auccuuggcguuuuccuu

SEQ ID NO: 1086919 - RNA, 18 nt, Human
augguuggacacuggaga

SEQ ID NO: 1086920 - RNA, 22 nt, Human
caaaagcacucucccuggcucc

SEQ ID NO: 1086921 - RNA, 20 nt, Human
caaaaucccccacauuuacc

SEQ ID NO: 1086922 - RNA, 21 nt, Human
caagauaaauuaaauguagua

SEQ ID NO: 1086923 - RNA, 23 nt, Human
cacagcaggaccaagagagugga

SEQ ID NO: 1086924 - RNA, 24 nt, Human
cagacaacaccaaucaacaccucg

SEQ ID NO: 1086925 - RNA, 20 nt, Human
cagcagagagaggaaaagaa

SEQ ID NO: 1086926 - RNA, 23 nt, Human
caggcucagccagcagagagagg

SEQ ID NO: 1086927 - RNA, 21 nt, Human
cagugcccaaaagcacucucc

SEQ ID NO: 1086928 - RNA, 21 nt, Human
ccaacaaaaucccccacauuu

SEQ ID NO: 1086929 - RNA, 19 nt, Human
ccacauuuaccaucaccaa

SEQ ID NO: 1086930 - RNA, 19 nt, Human
ccacuuucaccaacaaaau

SEQ ID NO: 1086931 - RNA, 20 nt, Human
ccaugcacuccaguucccac

SEQ ID NO: 1086932 - RNA, 18 nt, Human
ccauucuaccuccuaagu

SEQ ID NO: 1086933 - RNA, 18 nt, Human
cccaaaagcacucucccu

SEQ ID NO: 1086934 - RNA, 18 nt, Human
cccaugcacuccaguucc

SEQ ID NO: 1086935 - RNA, 18 nt, Human
cccaugcacuccaguucc

SEQ ID NO: 1086936 - RNA, 19 nt, Human
cccaugcacuccaguuccc

SEQ ID NO: 1086937 - RNA, 20 nt, Human
ccccuuuucagcuccccuuc

SEQ ID NO: 1086938 - RNA, 22 nt, Human
ccccuuuucagcuccccuucca

SEQ ID NO: 1086939 - RNA, 23 nt, Human
cccgugccagcaccaaaguggcc

SEQ ID NO: 1086940 - RNA, 19 nt, Human
cccuagaugcugcugaagg

SEQ ID NO: 1086941 - RNA, 23 nt, Human
cccuagcuaaaccucauaacucc

SEQ ID NO: 1086942 - RNA, 21 nt, Human
ccuagcuaaaccucauaacuc

SEQ ID NO: 1086943 - RNA, 25 nt, Human
ccugcacccacucaccuguucuccc

SEQ ID NO: 1086944 - RNA, 25 nt, Human
ccugugaccauaaaaaccccaggcu

SEQ ID NO: 1086945 - RNA, 22 nt, Human
ccuuggcguuuuccuucccagg

SEQ ID NO: 1086946 - RNA, 21 nt, Human
cguuuuccuucccaggugcuc

SEQ ID NO: 1086947 - RNA, 19 nt, Human
cuaaaggagcacuguggca

SEQ ID NO: 1086948 - RNA, 21 nt, Human
cugaagcuuuagagguagugg

SEQ ID NO: 1086949 - RNA, 25 nt, Human
cugcucuuuccccuuuucagcuccc

SEQ ID NO: 1086950 - RNA, 22 nt, Human
cuuccagccacuuucaccaaca

SEQ ID NO: 1086951 - RNA, 19 nt, Human
cuucuacccaacacuucuc

SEQ ID NO: 1086952 - RNA, 20 nt, Human
cuuuccccuuuucagcuccc

SEQ ID NO: 1086953 - RNA, 22 nt, Human
gaaaaaacccaagcacuaaaaa

SEQ ID NO: 1086954 - RNA, 21 nt, Human
gaaagacacuaauaaucuaca

SEQ ID NO: 1086955 - RNA, 20 nt, Human
gacacuggagagaagcagcu

SEQ ID NO: 1086956 - RNA, 19 nt, Human
gagaguggaguccacccgu

SEQ ID NO: 1086957 - RNA, 25 nt, Human
gagggacagcuugacaguguagccu

SEQ ID NO: 1086958 - RNA, 20 nt, Human
gcagagagaggaaaagaagc

SEQ ID NO: 1086959 - RNA, 21 nt, Human
ggaaagacaaauagguacagg

SEQ ID NO: 1086960 - RNA, 24 nt, Human
gggugaaacacagcaggaccaaga

SEQ ID NO: 1086961 - RNA, 26 nt, Human
guaauaccuucucuaggcuuaagaua

SEQ ID NO: 1086962 - RNA, 22 nt, Human
uaaaaaccccaggcucagccag

SEQ ID NO: 1086963 - RNA, 23 nt, Human
uaaagcagccuuuucuaugcuga

SEQ ID NO: 1086964 - RNA, 18 nt, Human
uaaaggagcacuguggca

SEQ ID NO: 1086965 - RNA, 21 nt, Human
uaacccuagcuaaaccucaua

SEQ ID NO: 1086966 - RNA, 24 nt, Human
uaacuccuuaaugagaaagacacu

SEQ ID NO: 1086967 - RNA, 23 nt, Human
uaaguaucucucaauucuaucuc

SEQ ID NO: 1086968 - RNA, 19 nt, Human
uaagugauccacagacagg

SEQ ID NO: 1086969 - RNA, 22 nt, Human
uacaaaugaaaaaacccaagca

SEQ ID NO: 1086970 - RNA, 23 nt, Human
uacaaaugaaaaaacccaagcac

SEQ ID NO: 1086971 - RNA, 24 nt, Human
uacaccauguuuauugcuauuuaa

SEQ ID NO: 1086972 - RNA, 22 nt, Human
uagccuuggaaggaguccagcu

SEQ ID NO: 1086973 - RNA, 19 nt, Human
uaguaccagcucuucucca

SEQ ID NO: 1086974 - RNA, 22 nt, Human
uaguuugagaaaacacuaugcu

SEQ ID NO: 1086975 - RNA, 22 nt, Human
ucagagggacagcuugacagug

SEQ ID NO: 1086976 - RNA, 24 nt, Human
ucagcuccccuuccagccacuuuc

SEQ ID NO: 1086977 - RNA, 22 nt, Human
ucccucacauuuucacugcccu

SEQ ID NO: 1086978 - RNA, 21 nt, Human
ucccuggcuccugcacccacu

SEQ ID NO: 1086979 - RNA, 25 nt, Human
ucccuggcuccugcacccacucacc

SEQ ID NO: 1086980 - RNA, 20 nt, Human
uccuaaguaucucucaauuc

SEQ ID NO: 1086981 - RNA, 18 nt, Human
ucuccauggagcacagcc

SEQ ID NO: 1086982 - RNA, 20 nt, Human
ucuccccccgcucccacaag

SEQ ID NO: 1086983 - RNA, 23 nt, Human
ugaaaaaacccaagcacuaaaaa

SEQ ID NO: 1086984 - RNA, 24 nt, Human
ugaaaaaacccaagcacuaaaaag

SEQ ID NO: 1086985 - RNA, 27 nt, Human
ugaaaagggaaagacaaauagguacag

SEQ ID NO: 1086986 - RNA, 22 nt, Human
ugaccagacuccaggggaaguu

SEQ ID NO: 1086987 - RNA, 22 nt, Human
ugaccauaaaaaccccaggcuc

SEQ ID NO: 1086988 - RNA, 22 nt, Human
ugagaaaacacuaugcuacaag

SEQ ID NO: 1086989 - RNA, 18 nt, Human
ugagaaagacacuaauaa

SEQ ID NO: 1086990 - RNA, 19 nt, Human
ugaggaaaaacuaugguug

SEQ ID NO: 1086991 - RNA, 24 nt, Human
ugaggaaaaacuaugguuggacac

SEQ ID NO: 1086992 - RNA, 22 nt, Human
ugcaaaaggcugucacacugac

SEQ ID NO: 1086993 - RNA, 18 nt, Human
ugcccuaauucugagccu

SEQ ID NO: 1086994 - RNA, 23 nt, Human
uggacacuggagagaagcagcuu

SEQ ID NO: 1086995 - RNA, 20 nt, Human
uggaugaggaaaaacuaugg

SEQ ID NO: 1086996 - RNA, 21 nt, Human
uggcuccugcacccacucacc

SEQ ID NO: 1086997 - RNA, 24 nt, Human
uguccaagcuucccagcuagaaac

SEQ ID NO: 1086998 - RNA, 23 nt, Human
uuaagcacagcucucuacaaccu

SEQ ID NO: 1086999 - RNA, 24 nt, Human
uuccagacaacaccaaucaacacc

SEQ ID NO: 1087000 - RNA, 25 nt, Human
uucucuaggcuuaagauaauaaaca

SEQ ID NO: 1087001 - RNA, 24 nt, Human
uuuagagguagugggcacuccccu

SEQ ID NO: 1087002 - RNA, 18 nt, Human
uuuauuuuucccuuuuuu

SEQ ID NO: 1087003 - RNA, 20 nt, Human
uuuccuucccaggugcucag

SEQ ID NO: 1087004 - RNA, 24 nt, Human
aaaaagagaggagauauccacaaa

SEQ ID NO: 1087005 - RNA, 19 nt, Human
aaaagccuagacuuuccac

SEQ ID NO: 1087006 - RNA, 21 nt, Human
aaacaggcaccauggagaaca

SEQ ID NO: 1087007 - RNA, 20 nt, Human
aaacuuggagaaaaguagag

SEQ ID NO: 1087008 - RNA, 21 nt, Human
aaagcaggaaaaauacaaaga

SEQ ID NO: 1087009 - RNA, 22 nt, Human
aacaccaaccacacguccaccu

SEQ ID NO: 1087010 - RNA, 18 nt, Human
aagaagacagaagaaaca

SEQ ID NO: 1087011 - RNA, 19 nt, Human
aagaagacagaagaaacag

SEQ ID NO: 1087012 - RNA, 21 nt, Human
aagaagacagaagaaacagaa

SEQ ID NO: 1087013 - RNA, 22 nt, Human
aagagaggagauauccacaaau

SEQ ID NO: 1087014 - RNA, 24 nt, Human
aagcaaaaagagaggagauaucca

SEQ ID NO: 1087015 - RNA, 21 nt, Human
aagcaaaagccuagacuuucc

SEQ ID NO: 1087016 - RNA, 22 nt, Human
aagcaaaggcuaggagaucaaa

SEQ ID NO: 1087017 - RNA, 18 nt, Human
aagcaggaaaaauacaaa

SEQ ID NO: 1087018 - RNA, 23 nt, Human
aagcaggaaaaauacaaagaaaa

SEQ ID NO: 1087019 - RNA, 18 nt, Human
aagugcccugccccagga

SEQ ID NO: 1087020 - RNA, 19 nt, Human
acaaagcaaaaagagagga

SEQ ID NO: 1087021 - RNA, 21 nt, Human
acaaagcaaaaagagaggaga

SEQ ID NO: 1087022 - RNA, 24 nt, Human
acaauacuagcaaacacauagcac

SEQ ID NO: 1087023 - RNA, 19 nt, Human
accaacuaccccaccuaug

SEQ ID NO: 1087024 - RNA, 20 nt, Human
accaacuaccccaccuaugc

SEQ ID NO: 1087025 - RNA, 24 nt, Human
accaacuaccccaccuaugcaugc

SEQ ID NO: 1087026 - RNA, 22 nt, Human
acccccaugcuccuccccaagc

SEQ ID NO: 1087027 - RNA, 18 nt, Human
agaaacugagaaggggcu

SEQ ID NO: 1087028 - RNA, 18 nt, Human
agagaggagauauccaca

SEQ ID NO: 1087029 - RNA, 18 nt, Human
agaggaaaaccaucuaca

SEQ ID NO: 1087030 - RNA, 24 nt, Human
agcaaaaagagaggagauauccac

SEQ ID NO: 1087031 - RNA, 24 nt, Human
agcagaagauaaaugagaacagaa

SEQ ID NO: 1087032 - RNA, 18 nt, Human
agccacugggagggacug

SEQ ID NO: 1087033 - RNA, 21 nt, Human
aggaaccaugaaagaugaggc

SEQ ID NO: 1087034 - RNA, 21 nt, Human
aggagaucaaacaucuaaaac

SEQ ID NO: 1087035 - RNA, 21 nt, Human
aggggagagguuuacucuuca

SEQ ID NO: 1087036 - RNA, 19 nt, Human
aucaaccaacuaccccacc

SEQ ID NO: 1087037 - RNA, 23 nt, Human
aucuuacaccuccucucccuucc

SEQ ID NO: 1087038 - RNA, 24 nt, Human
aucuuacaccuccucucccuucca

SEQ ID NO: 1087039 - RNA, 23 nt, Human
auguaaaacauccuguaacauau

SEQ ID NO: 1087040 - RNA, 19 nt, Human
augugcaccucccaggccu

SEQ ID NO: 1087041 - RNA, 18 nt, Human
caagggaaagaaaucugu

SEQ ID NO: 1087042 - RNA, 23 nt, Human
caagugcccugccccaggauuca

SEQ ID NO: 1087043 - RNA, 24 nt, Human
caauacuagcaaacacauagcaca

SEQ ID NO: 1087044 - RNA, 18 nt, Human
cacacccuucagggaccc

SEQ ID NO: 1087045 - RNA, 18 nt, Human
caccauggagaacagagc

SEQ ID NO: 1087046 - RNA, 18 nt, Human
caccauggagaacagagc

SEQ ID NO: 1087047 - RNA, 21 nt, Human
cacccagaacaccaaccacac

SEQ ID NO: 1087048 - RNA, 24 nt, Human
caccuccacaggcaggagauucaa

SEQ ID NO: 1087049 - RNA, 20 nt, Human
caccuccucucccuuccaaa

SEQ ID NO: 1087050 - RNA, 20 nt, Human
cacggcacagggcaucugca

SEQ ID NO: 1087051 - RNA, 18 nt, Human
cagaacaccaaccacacg

SEQ ID NO: 1087052 - RNA, 24 nt, Human
cagaacaccaaccacacguccacc

SEQ ID NO: 1087053 - RNA, 23 nt, Human
cagaagaaacagaagcucgccac

SEQ ID NO: 1087054 - RNA, 22 nt, Human
cagaaggagcuagaagggaaau

SEQ ID NO: 1087055 - RNA, 25 nt, Human
cagcacaggcguaggcuuggagaaa

SEQ ID NO: 1087056 - RNA, 22 nt, Human
ccaagcagcagcagaagauaaa

SEQ ID NO: 1087057 - RNA, 22 nt, Human
cccaagcaggggagagguuuac

SEQ ID NO: 1087058 - RNA, 19 nt, Human
cccaguagcccagcccucg

SEQ ID NO: 1087059 - RNA, 19 nt, Human
cccauguuaugcagccagg

SEQ ID NO: 1087060 - RNA, 26 nt, Human
ccuccacaggcaggagauucaagggu

SEQ ID NO: 1087061 - RNA, 26 nt, Human
ccucccaggccugaagcaaaagccua

SEQ ID NO: 1087062 - RNA, 19 nt, Human
cuacuaagcccauguuaug

SEQ ID NO: 1087063 - RNA, 22 nt, Human
cucccaggccugaagcaaaagc

SEQ ID NO: 1087064 - RNA, 26 nt, Human
cucccaggccugaagcaaaagccuag

SEQ ID NO: 1087065 - RNA, 21 nt, Human
cuccuccccaagcaggggaga

SEQ ID NO: 1087066 - RNA, 24 nt, Human
cugaagcaaaagccuagacuuucc

SEQ ID NO: 1087067 - RNA, 21 nt, Human
cugacaagaagacagaagaaa

SEQ ID NO: 1087068 - RNA, 22 nt, Human
cugacagacaccccaguagccc

SEQ ID NO: 1087069 - RNA, 23 nt, Human
cugagcugcacggcacagggcau

SEQ ID NO: 1087070 - RNA, 19 nt, Human
cuggacugacagacacccc

SEQ ID NO: 1087071 - RNA, 19 nt, Human
cugguucaugauggaaaac

SEQ ID NO: 1087072 - RNA, 22 nt, Human
cuuacaccuccucucccuucca

SEQ ID NO: 1087073 - RNA, 24 nt, Human
cuuacaccuccucucccuuccaaa

SEQ ID NO: 1087074 - RNA, 19 nt, Human
gagaaaaccaaccaccuga

SEQ ID NO: 1087075 - RNA, 27 nt, Human
gagaaaaguagaggaaagccgguaccc

SEQ ID NO: 1087076 - RNA, 24 nt, Human
gagaacagaaggagcuagaaggga

SEQ ID NO: 1087077 - RNA, 19 nt, Human
gaggacaaagcaaaaagag

SEQ ID NO: 1087078 - RNA, 20 nt, Human
gauaaaugagaacagaagga

SEQ ID NO: 1087079 - RNA, 21 nt, Human
gcagacccaggaaacaggcac

SEQ ID NO: 1087080 - RNA, 23 nt, Human
gcagacccaggaaacaggcacca

SEQ ID NO: 1087081 - RNA, 24 nt, Human
ggaaaaauacaaagaaaagcaaag

SEQ ID NO: 1087082 - RNA, 18 nt, Human
ggagaaaaguagaggaaa

SEQ ID NO: 1087083 - RNA, 18 nt, Human
ggagcuagaagggaaaug

SEQ ID NO: 1087084 - RNA, 19 nt, Human
ggcacaggaaccaugaaag

SEQ ID NO: 1087085 - RNA, 22 nt, Human
ggcaggagauucaaggguucuu

SEQ ID NO: 1087086 - RNA, 23 nt, Human
gggcacccagaacaccaaccaca

SEQ ID NO: 1087087 - RNA, 19 nt, Human
gggccaggcauuuacauua

SEQ ID NO: 1087088 - RNA, 23 nt, Human
ggucucacacccuucagggaccc

SEQ ID NO: 1087089 - RNA, 20 nt, Human
guagaagaucuuugccaagg

SEQ ID NO: 1087090 - RNA, 20 nt, Human
guggaggaaacuugagaaca

SEQ ID NO: 1087091 - RNA, 26 nt, Human
uaaaacauccuguaacauaucuuagu

SEQ ID NO: 1087092 - RNA, 23 nt, Human
uaaaacguuuuaaccuaugagga

SEQ ID NO: 1087093 - RNA, 23 nt, Human
uaaaugagaacagaaggagcuag

SEQ ID NO: 1087094 - RNA, 20 nt, Human
uaacccccaugcuccucccc

SEQ ID NO: 1087095 - RNA, 21 nt, Human
uaaccuaugaggacaaagcaa

SEQ ID NO: 1087096 - RNA, 24 nt, Human
uaaccuaugaggacaaagcaaaaa

SEQ ID NO: 1087097 - RNA, 19 nt, Human
uaacuccaagcagcagcag

SEQ ID NO: 1087098 - RNA, 22 nt, Human
uaagaccaagagaauguaaaac

SEQ ID NO: 1087099 - RNA, 18 nt, Human
uaagaggaauguuuggua

SEQ ID NO: 1087100 - RNA, 19 nt, Human
uacaaagaaaagcaaaggc

SEQ ID NO: 1087101 - RNA, 23 nt, Human
uacaccuccucucccuuccaaaa

SEQ ID NO: 1087102 - RNA, 25 nt, Human
uacguaacccccaugcuccucccca

SEQ ID NO: 1087103 - RNA, 22 nt, Human
uccaaaacccuacuaaauuucc

SEQ ID NO: 1087104 - RNA, 24 nt, Human
uccaacaaaaaaagauagcucaaa

SEQ ID NO: 1087105 - RNA, 23 nt, Human
uccaagcagcagcagaagauaaa

SEQ ID NO: 1087106 - RNA, 23 nt, Human
ucucuggagaaaaccaaccaccu

SEQ ID NO: 1087107 - RNA, 19 nt, Human
ucuuaguagaagaucuuug

SEQ ID NO: 1087108 - RNA, 18 nt, Human
ugaagcaaaagccuagac

SEQ ID NO: 1087109 - RNA, 20 nt, Human
ugacaagaagacagaagaaa

SEQ ID NO: 1087110 - RNA, 22 nt, Human
ugacagacaccccaguagccca

SEQ ID NO: 1087111 - RNA, 24 nt, Human
ugacagacaccccaguagcccagc

SEQ ID NO: 1087112 - RNA, 24 nt, Human
ugagaacaaagccaucuggacuga

SEQ ID NO: 1087113 - RNA, 22 nt, Human
ugagagccuuugguucagagag

SEQ ID NO: 1087114 - RNA, 21 nt, Human
ugagaggaaaaccaucuacau

SEQ ID NO: 1087115 - RNA, 20 nt, Human
ugaggacaaagcaaaaagag

SEQ ID NO: 1087116 - RNA, 22 nt, Human
ugcagccaggcuacuacguaac

SEQ ID NO: 1087117 - RNA, 25 nt, Human
uggauaaacucaggccauacgucuu

SEQ ID NO: 1087118 - RNA, 19 nt, Human
ugggagggacuguuucaug

SEQ ID NO: 1087119 - RNA, 18 nt, Human
uucaugugcaccucccag

SEQ ID NO: 1087120 - RNA, 19 nt, Human
uugcugaaaauguaacucc

SEQ ID NO: 1087121 - RNA, 18 nt, Human
aaacgaaagcaaaccaga

SEQ ID NO: 1087122 - RNA, 19 nt, Human
agagguagaaguuuuuucc

SEQ ID NO: 1087123 - RNA, 23 nt, Human
agcaggacagaaaaacccagagc

SEQ ID NO: 1087124 - RNA, 18 nt, Human
cagcaggacagaaaaacc

SEQ ID NO: 1087125 - RNA, 22 nt, Human
cagcaggacagaaaaacccaga

SEQ ID NO: 1087126 - RNA, 22 nt, Human
cagccuuuucagcagaggaagg

SEQ ID NO: 1087127 - RNA, 21 nt, Human
ccagagcccugauugugccca

SEQ ID NO: 1087128 - RNA, 18 nt, Human
ccauuguccaaugacugc

SEQ ID NO: 1087129 - RNA, 18 nt, Human
cccagagcccugauugug

SEQ ID NO: 1087130 - RNA, 23 nt, Human
ccugccucuuccuccuuucuucc

SEQ ID NO: 1087131 - RNA, 20 nt, Human
cuccacacccuuucuccucc

SEQ ID NO: 1087132 - RNA, 24 nt, Human
cugcuaauaggcaaggcccucccu

SEQ ID NO: 1087133 - RNA, 20 nt, Human
gagguagaaguuuuuuccau

SEQ ID NO: 1087134 - RNA, 18 nt, Human
gcaaaccagagguagaag

SEQ ID NO: 1087135 - RNA, 24 nt, Human
gcgggagggugaugacugcauuga

SEQ ID NO: 1087136 - RNA, 23 nt, Human
ggaaaagcagccuuuucagcaga

SEQ ID NO: 1087137 - RNA, 22 nt, Human
gugcagcaggacagaaaaaccc

SEQ ID NO: 1087138 - RNA, 19 nt, Human
guggaaaagcagccuuuuc

SEQ ID NO: 1087139 - RNA, 23 nt, Human
uaauaggcaaggcccucccuucc

SEQ ID NO: 1087140 - RNA, 23 nt, Human
ucaacuggaaucagagcuaaggc

SEQ ID NO: 1087141 - RNA, 18 nt, Human
ugcuaauaggcaaggccc

SEQ ID NO: 1087142 - RNA, 23 nt, Human
ugugcagcaggacagaaaaaccc

SEQ ID NO: 1087143 - RNA, 19 nt, Human
agacaagaaaaaaaaacug

SEQ ID NO: 1087144 - RNA, 22 nt, Human
caaaaaaugcauaugaugacau

SEQ ID NO: 1087145 - RNA, 19 nt, Human
cagcuucuuaggaucuccu

SEQ ID NO: 1087146 - RNA, 19 nt, Human
cauaugaugacauuuugcc

SEQ ID NO: 1087147 - RNA, 24 nt, Human
cguuugcacaaaaaaugcauaugg

SEQ ID NO: 1087148 - RNA, 23 nt, Human
cuucuucuuaugcuccucccgac

SEQ ID NO: 1087149 - RNA, 18 nt, Human
gcccguccggcucucacu

SEQ ID NO: 1087150 - RNA, 20 nt, Human
uauagacaagaaaaaaaaac

SEQ ID NO: 1087151 - RNA, 21 nt, Human
ucuccuuugcccauguuuagu

SEQ ID NO: 1087152 - RNA, 20 nt, Human
ugcccuggcgcugucucugu

SEQ ID NO: 1087153 - RNA, 21 nt, Human
uucauagcaagagccuuuuuc

SEQ ID NO: 1087154 - RNA, 20 nt, Human
aaccagcuugugaggcauuc

SEQ ID NO: 1087155 - RNA, 21 nt, Human
aagacuucagggagaggccgg

SEQ ID NO: 1087156 - RNA, 21 nt, Human
aauguggaguguggggaggga

SEQ ID NO: 1087157 - RNA, 21 nt, Human
agggcuucaacauaugaaugu

SEQ ID NO: 1087158 - RNA, 18 nt, Human
agugaccucauuuuaaug

SEQ ID NO: 1087159 - RNA, 20 nt, Human
aucuccaaauacagugacau

SEQ ID NO: 1087160 - RNA, 27 nt, Human
augacauucccagagcaauuuggucgg

SEQ ID NO: 1087161 - RNA, 22 nt, Human
auuucgccuccucagcucuuca

SEQ ID NO: 1087162 - RNA, 18 nt, Human
caauaauuagaaugacau

SEQ ID NO: 1087163 - RNA, 20 nt, Human
ccaauaauuagaaugacauu

SEQ ID NO: 1087164 - RNA, 18 nt, Human
ccucuccagcuccccaca

SEQ ID NO: 1087165 - RNA, 21 nt, Human
cuccaaauacagugacauucu

SEQ ID NO: 1087166 - RNA, 20 nt, Human
cuccccacagcacagcuacc

SEQ ID NO: 1087167 - RNA, 21 nt, Human
cuguucacauuguuauucaau

SEQ ID NO: 1087168 - RNA, 20 nt, Human
cuucagggagaggccgguga

SEQ ID NO: 1087169 - RNA, 19 nt, Human
gacuucagggagaggccgg

SEQ ID NO: 1087170 - RNA, 19 nt, Human
ggugagcccuuuuaacugc

SEQ ID NO: 1087171 - RNA, 23 nt, Human
uaccuggaggacacaggcucccg

SEQ ID NO: 1087172 - RNA, 21 nt, Human
uaccuggaggacacaggcuuc

SEQ ID NO: 1087173 - RNA, 20 nt, Human
ucaacauaugaauguggagu

SEQ ID NO: 1087174 - RNA, 18 nt, Human
ucagggagaggccgguga

SEQ ID NO: 1087175 - RNA, 20 nt, Human
ucaguccucuccagcucccc

SEQ ID NO: 1087176 - RNA, 24 nt, Human
ucccagagcaauuuggucggagcg

SEQ ID NO: 1087177 - RNA, 19 nt, Human
uccccacagcacagcuacc

SEQ ID NO: 1087178 - RNA, 19 nt, Human
uccucagcucuucaguccu

SEQ ID NO: 1087179 - RNA, 22 nt, Human
ucggugcucuguucacauuguu

SEQ ID NO: 1087180 - RNA, 24 nt, Human
ugaccucauuuuaauguaaugacc

SEQ ID NO: 1087181 - RNA, 24 nt, Human
ugcauuucgccuccucagcucuuc

SEQ ID NO: 1087182 - RNA, 23 nt, Human
ugcucuguucacauuguuauuca

SEQ ID NO: 1087183 - RNA, 21 nt, Human
uggaggacacaggcucccggg

SEQ ID NO: 1087184 - RNA, 20 nt, Human
ugggucaggauccaauaauu

SEQ ID NO: 1087185 - RNA, 18 nt, Human
uguaaugaccucuuuaaa

SEQ ID NO: 1087186 - RNA, 23 nt, Human
uguaucuccaaauacagugacau

SEQ ID NO: 1087187 - RNA, 21 nt, Human
uucaacauaugaauguggagu

SEQ ID NO: 1087188 - RNA, 21 nt, Human
uucaguccucuccagcucccc

SEQ ID NO: 1087189 - RNA, 22 nt, Human
uucugcauuucgccuccucagc

SEQ ID NO: 1087190 - RNA, 19 nt, Human
acagggcagauggaagaag

SEQ ID NO: 1087191 - RNA, 18 nt, Human
agacagggcagauggaag

SEQ ID NO: 1087192 - RNA, 25 nt, Human
agauguuguuucaguugcuuccucu

SEQ ID NO: 1087193 - RNA, 22 nt, Human
agugccuuuaagccacccccau

SEQ ID NO: 1087194 - RNA, 25 nt, Human
caaggacagauuuuuccuggagaag

SEQ ID NO: 1087195 - RNA, 21 nt, Human
cccacacgagcccaaugaggu

SEQ ID NO: 1087196 - RNA, 22 nt, Human
cuccacuucaaauuucccaaga

SEQ ID NO: 1087197 - RNA, 20 nt, Human
cucgugccgcgcucucagac

SEQ ID NO: 1087198 - RNA, 22 nt, Human
gggcaguguuuuccguagccuc

SEQ ID NO: 1087199 - RNA, 20 nt, Human
ggguucuuggagagacaggg

SEQ ID NO: 1087200 - RNA, 18 nt, Human
ucagcucuguucugagac

SEQ ID NO: 1087201 - RNA, 18 nt, Human
uggaagaaguggaaggca

SEQ ID NO: 1087202 - RNA, 19 nt, Human
uggaaggcaucugcacacu

SEQ ID NO: 1087203 - RNA, 19 nt, Human
uggagaaggauuuuaccac

SEQ ID NO: 1087204 - RNA, 18 nt, Human
uggaguguaggagggcag

SEQ ID NO: 1087205 - RNA, 19 nt, Human
ugguacagguacuccacuu

SEQ ID NO: 1087206 - RNA, 20 nt, Human
uucugcacucagcucuguuc

SEQ ID NO: 1087207 - RNA, 24 nt, Human
uucuuggagagacagggcagaugg

SEQ ID NO: 1087208 - RNA, 21 nt, Human
uugccugaguuguuuuccuuu

SEQ ID NO: 1087209 - RNA, 18 nt, Human
uugcuuccucuuugguuc

SEQ ID NO: 1087210 - RNA, 23 nt, Human
uuuaccacugccaccaucuugaa

SEQ ID NO: 1087211 - RNA, 18 nt, Human
uuucauguugguacaggu

SEQ ID NO: 1087212 - RNA, 23 nt, Human
uuuucugggucucuccaaggugg

SEQ ID NO: 1087213 - RNA, 27 nt, Human
aaaaagccuauuaaauaagaaacaaac

SEQ ID NO: 1087214 - RNA, 22 nt, Human
aaacaaaaugcacuaagcaaaa

SEQ ID NO: 1087215 - RNA, 24 nt, Human
aaacaaacacugcaaucauaaaca

SEQ ID NO: 1087216 - RNA, 23 nt, Human
aacuaguccagcaacuggcacuc

SEQ ID NO: 1087217 - RNA, 22 nt, Human
aaugcaaaauaaaaaaaaaaaa

SEQ ID NO: 1087218 - RNA, 22 nt, Human
accacaaucugucaaacccgcc

SEQ ID NO: 1087219 - RNA, 20 nt, Human
acgcugcagccaacggccuu

SEQ ID NO: 1087220 - RNA, 22 nt, Human
acuaggcccucccucugggccu

SEQ ID NO: 1087221 - RNA, 21 nt, Human
agagaacauccucaaagcuca

SEQ ID NO: 1087222 - RNA, 23 nt, Human
agagaacauccucaaagcucaag

SEQ ID NO: 1087223 - RNA, 24 nt, Human
agguaacaaaauuucuccaguuau

SEQ ID NO: 1087224 - RNA, 22 nt, Human
aguaaagcuaauauucucagac

SEQ ID NO: 1087225 - RNA, 23 nt, Human
auaaacaaaaugcacuaagcaaa

SEQ ID NO: 1087226 - RNA, 20 nt, Human
auaaaggucuaguucaugag

SEQ ID NO: 1087227 - RNA, 21 nt, Human
caaacuccagcggaagcacua

SEQ ID NO: 1087228 - RNA, 19 nt, Human
caacuauguauuuuucuua

SEQ ID NO: 1087229 - RNA, 19 nt, Human
cacucagcuccccgcacag

SEQ ID NO: 1087230 - RNA, 20 nt, Human
cacucccccagccccucagg

SEQ ID NO: 1087231 - RNA, 20 nt, Human
cacugucacucccccagccc

SEQ ID NO: 1087232 - RNA, 21 nt, Human
cagaauuuucccuuuauaaag

SEQ ID NO: 1087233 - RNA, 22 nt, Human
cagagaacauccucaaagcuca

SEQ ID NO: 1087234 - RNA, 22 nt, Human
cagagagaaaacaaugcacuuc

SEQ ID NO: 1087235 - RNA, 18 nt, Human
cagcauugauagaagccc

SEQ ID NO: 1087236 - RNA, 20 nt, Human
cagcugcucagagagaaaac

SEQ ID NO: 1087237 - RNA, 22 nt, Human
cagggcacaucacucagcuccc

SEQ ID NO: 1087238 - RNA, 18 nt, Human
caugccaccagcucccca

SEQ ID NO: 1087239 - RNA, 22 nt, Human
ccaaaacccagagacacugacu

SEQ ID NO: 1087240 - RNA, 21 nt, Human
ccacugucacucccccagccc

SEQ ID NO: 1087241 - RNA, 25 nt, Human
ccauccguccugccacugucacucc

SEQ ID NO: 1087242 - RNA, 24 nt, Human
cccccagccccucaggauugcugc

SEQ ID NO: 1087243 - RNA, 18 nt, Human
ccccucaggauugcugcu

SEQ ID NO: 1087244 - RNA, 23 nt, Human
ccccucaggauugcugcuccucu

SEQ ID NO: 1087245 - RNA, 21 nt, Human
cccucaggauugcugcuccuc

SEQ ID NO: 1087246 - RNA, 18 nt, Human
cccuccucuucuuuuauc

SEQ ID NO: 1087247 - RNA, 21 nt, Human
cccuuuauaaaggaaaucaaa

SEQ ID NO: 1087248 - RNA, 19 nt, Human
ccuauuaaauaagaaacaa

SEQ ID NO: 1087249 - RNA, 21 nt, Human
ccuccaagcagaaaauccuga

SEQ ID NO: 1087250 - RNA, 22 nt, Human
ccugaacuaagacaacagucuc

SEQ ID NO: 1087251 - RNA, 20 nt, Human
ccuguauaaagcuggaaaac

SEQ ID NO: 1087252 - RNA, 24 nt, Human
cgcuguaucugcuaccaaaaccca

SEQ ID NO: 1087253 - RNA, 23 nt, Human
cggaagcacuaguguuagugcug

SEQ ID NO: 1087254 - RNA, 20 nt, Human
cuccagcggaagcacuagug

SEQ ID NO: 1087255 - RNA, 20 nt, Human
cugaaaaaugcaggucugca

SEQ ID NO: 1087256 - RNA, 23 nt, Human
cugcuaccaaaacccagagacac

SEQ ID NO: 1087257 - RNA, 19 nt, Human
cugcucagagagaaaacaa

SEQ ID NO: 1087258 - RNA, 18 nt, Human
cuguauaaagcuggaaaa

SEQ ID NO: 1087259 - RNA, 19 nt, Human
cuguaucugcuaccaaaac

SEQ ID NO: 1087260 - RNA, 19 nt, Human
cugucuggaagcugaaaga

SEQ ID NO: 1087261 - RNA, 22 nt, Human
cuucuucccaccacaaucuguc

SEQ ID NO: 1087262 - RNA, 21 nt, Human
gaggagugccagacaaucuuu

SEQ ID NO: 1087263 - RNA, 20 nt, Human
gauuugccagaauuuucccu

SEQ ID NO: 1087264 - RNA, 23 nt, Human
gccacugucacucccccagcccc

SEQ ID NO: 1087265 - RNA, 22 nt, Human
ggaagcacuaguguuagugcug

SEQ ID NO: 1087266 - RNA, 22 nt, Human
ggccuuggggcagagcccaugg

SEQ ID NO: 1087267 - RNA, 22 nt, Human
uaaaaagccuauuaaauaagaa

SEQ ID NO: 1087268 - RNA, 24 nt, Human
uaaacauggggguucacugauauc

SEQ ID NO: 1087269 - RNA, 22 nt, Human
uaacaaaugcaaaauaaaaaaa

SEQ ID NO: 1087270 - RNA, 27 nt, Human
uaacaaaugcaaaauaaaaaaaaaaaa

SEQ ID NO: 1087271 - RNA, 20 nt, Human
uaauaguaaaggcacgauuu

SEQ ID NO: 1087272 - RNA, 22 nt, Human
uaccaaaacccagagacacuga

SEQ ID NO: 1087273 - RNA, 23 nt, Human
uagcuuauacuagagagcaacac

SEQ ID NO: 1087274 - RNA, 22 nt, Human
uaggcccucccucugggccucc

SEQ ID NO: 1087275 - RNA, 21 nt, Human
uauuauacagccagucaggca

SEQ ID NO: 1087276 - RNA, 24 nt, Human
ucagcuccccgcacagcugcucag

SEQ ID NO: 1087277 - RNA, 20 nt, Human
uccaccagcuccagugaagc

SEQ ID NO: 1087278 - RNA, 23 nt, Human
ucccagggcacaucacucagcuc

SEQ ID NO: 1087279 - RNA, 18 nt, Human
uccccaaaagacaucaac

SEQ ID NO: 1087280 - RNA, 20 nt, Human
uccccaaaagacaucaacug

SEQ ID NO: 1087281 - RNA, 20 nt, Human
uccugccacugucacucccc

SEQ ID NO: 1087282 - RNA, 19 nt, Human
ucuacagagcagcaaauau

SEQ ID NO: 1087283 - RNA, 19 nt, Human
ucucacauaauaucagggc

SEQ ID NO: 1087284 - RNA, 22 nt, Human
ucugcuaccaaaacccagagac

SEQ ID NO: 1087285 - RNA, 23 nt, Human
ugaaaaaugcaggucugcaaaga

SEQ ID NO: 1087286 - RNA, 21 nt, Human
ugaaaugugauugagaagaaa

SEQ ID NO: 1087287 - RNA, 25 nt, Human
ugacuagaucuaaagagcauaugga

SEQ ID NO: 1087288 - RNA, 22 nt, Human
ugagaagaaaauguuaacgcug

SEQ ID NO: 1087289 - RNA, 21 nt, Human
ugauguguggcuagcccaaaa

SEQ ID NO: 1087290 - RNA, 22 nt, Human
ugcaaaauaaaaaaaaaaaagc

SEQ ID NO: 1087291 - RNA, 23 nt, Human
ugccacugucacucccccagccc

SEQ ID NO: 1087292 - RNA, 23 nt, Human
ugcugcuccucucuucugaaugu

SEQ ID NO: 1087293 - RNA, 21 nt, Human
uggcuauguuagcuuuaaaca

SEQ ID NO: 1087294 - RNA, 22 nt, Human
uggcuauguuagcuuuaaacau

SEQ ID NO: 1087295 - RNA, 18 nt, Human
uggggcagagcccaugga

SEQ ID NO: 1087296 - RNA, 23 nt, Human
uggggcagagcccauggaaagcu

SEQ ID NO: 1087297 - RNA, 27 nt, Human
uguauaacaucaauaacuccuguuugu

SEQ ID NO: 1087298 - RNA, 23 nt, Human
ugucacucccccagccccucagg

SEQ ID NO: 1087299 - RNA, 28 nt, Human
uuacacagugacaguacccgccucuucu

SEQ ID NO: 1087300 - RNA, 19 nt, Human
uucacagguaacaaaggau

SEQ ID NO: 1087301 - RNA, 19 nt, Human
uucaugccaccagcucccc

SEQ ID NO: 1087302 - RNA, 27 nt, Human
uuccugaacuaagacaaccggggguuc

SEQ ID NO: 1087303 - RNA, 25 nt, Human
uuuccacacucuacagagcagcaaa

SEQ ID NO: 1087304 - RNA, 21 nt, Human
uuugccagaauuuucccuuua

SEQ ID NO: 1087305 - RNA, 19 nt, Human
aaaguagaacaagccuacu

SEQ ID NO: 1087306 - RNA, 24 nt, Human
aacaaaccaaaaauaacacaaaac

SEQ ID NO: 1087307 - RNA, 24 nt, Human
aagaaauacagcaagaucauaauc

SEQ ID NO: 1087308 - RNA, 21 nt, Human
aagcaaaguagaacaagccua

SEQ ID NO: 1087309 - RNA, 22 nt, Human
aagucacaagaaacaauggaaa

SEQ ID NO: 1087310 - RNA, 20 nt, Human
aauaacacaaaacaaaacuu

SEQ ID NO: 1087311 - RNA, 24 nt, Human
aauggaaaauguuaauaaagcugg

SEQ ID NO: 1087312 - RNA, 18 nt, Human
acguauugaagaaauaca

SEQ ID NO: 1087313 - RNA, 23 nt, Human
acuacagcauugagccuggccca

SEQ ID NO: 1087314 - RNA, 22 nt, Human
acuuuuaaacauugugaaacaa

SEQ ID NO: 1087315 - RNA, 18 nt, Human
agaaacaauggaaaaugu

SEQ ID NO: 1087316 - RNA, 21 nt, Human
agaaagaaaacaaaguacuua

SEQ ID NO: 1087317 - RNA, 22 nt, Human
agaagaaaaaaaguuuacaaaa

SEQ ID NO: 1087318 - RNA, 23 nt, Human
agaagaaaaaaaguuuacaaaaa

SEQ ID NO: 1087319 - RNA, 24 nt, Human
agaagaaaaaaaguuuacaaaaaa

SEQ ID NO: 1087320 - RNA, 24 nt, Human
agacugcuuuuuuguuuuuuuuuu

SEQ ID NO: 1087321 - RNA, 20 nt, Human
agcaagaauaaagaaaagga

SEQ ID NO: 1087322 - RNA, 18 nt, Human
agucacaagaaacaaugg

SEQ ID NO: 1087323 - RNA, 24 nt, Human
auccuguuuugcgugcuaugaggg

SEQ ID NO: 1087324 - RNA, 23 nt, Human
caaaaauaacacaaaacaaaacu

SEQ ID NO: 1087325 - RNA, 23 nt, Human
caaaccaaaaauaacacaaaaca

SEQ ID NO: 1087326 - RNA, 20 nt, Human
caagaaauggaugugcacaa

SEQ ID NO: 1087327 - RNA, 19 nt, Human
caaucaaaaauggcaaaaa

SEQ ID NO: 1087328 - RNA, 27 nt, Human
cacaaaugcaagaaaauaaaagacaaa

SEQ ID NO: 1087329 - RNA, 19 nt, Human
caggugagcaacgagacau

SEQ ID NO: 1087330 - RNA, 26 nt, Human
caugucaucuuuucacaucaccuugu

SEQ ID NO: 1087331 - RNA, 22 nt, Human
cauuaaaacuacagcauugagc

SEQ ID NO: 1087332 - RNA, 24 nt, Human
ccccaaggacugcuuccugcaucu

SEQ ID NO: 1087333 - RNA, 22 nt, Human
cccccaauaaacaaaccaaaaa

SEQ ID NO: 1087334 - RNA, 22 nt, Human
cccccccaauaaacaaaccaaa

SEQ ID NO: 1087335 - RNA, 22 nt, Human
cucuucauccaaaaccaggacu

SEQ ID NO: 1087336 - RNA, 23 nt, Human
gaaaaaaaguuuacaaaaaauaa

SEQ ID NO: 1087337 - RNA, 21 nt, Human
gaaaaggccucucuaguugga

SEQ ID NO: 1087338 - RNA, 19 nt, Human
gaacaagccuacuuguucu

SEQ ID NO: 1087339 - RNA, 22 nt, Human
gagggucauuuuuuaaaauguu

SEQ ID NO: 1087340 - RNA, 25 nt, Human
gcuuuuggcauuaacagaauucuga

SEQ ID NO: 1087341 - RNA, 20 nt, Human
uaaaaaaagcccccccaaua

SEQ ID NO: 1087342 - RNA, 24 nt, Human
uaaaaaaagcccccccaauaaaca

SEQ ID NO: 1087343 - RNA, 20 nt, Human
uaaaacuacagcauugagcc

SEQ ID NO: 1087344 - RNA, 19 nt, Human
uaaaagacaaaugagggaa

SEQ ID NO: 1087345 - RNA, 21 nt, Human
uaaacaaaccaaaaauaacac

SEQ ID NO: 1087346 - RNA, 18 nt, Human
uaacacaaaacaaaacuu

SEQ ID NO: 1087347 - RNA, 22 nt, Human
uaaugcaggaaugaugcacuuu

SEQ ID NO: 1087348 - RNA, 19 nt, Human
uacaaaaaauaaaagauuc

SEQ ID NO: 1087349 - RNA, 18 nt, Human
uagcauaaaaaguucccu

SEQ ID NO: 1087350 - RNA, 23 nt, Human
uagcauuaaaacuacagcauuga

SEQ ID NO: 1087351 - RNA, 24 nt, Human
uauucugcccaugucaucuuuuca

SEQ ID NO: 1087352 - RNA, 19 nt, Human
ucaaaaauggcaaaaaacc

SEQ ID NO: 1087353 - RNA, 22 nt, Human
ucacaaaugcaagaaaauaaaa

SEQ ID NO: 1087354 - RNA, 19 nt, Human
ucauccaaaaccaggacuc

SEQ ID NO: 1087355 - RNA, 23 nt, Human
uccaaaucaagccaguuuugcaa

SEQ ID NO: 1087356 - RNA, 18 nt, Human
uccacaauucugcauucu

SEQ ID NO: 1087357 - RNA, 23 nt, Human
ugaaauuccccauccuguuuugc

SEQ ID NO: 1087358 - RNA, 24 nt, Human
ugaaauuccccauccuguuuugcg

SEQ ID NO: 1087359 - RNA, 22 nt, Human
ugaacuaauucacaaaugcaag

SEQ ID NO: 1087360 - RNA, 21 nt, Human
ugaagaaauacagcaagauca

SEQ ID NO: 1087361 - RNA, 24 nt, Human
ugacaauuaaaaaaagccccccca

SEQ ID NO: 1087362 - RNA, 23 nt, Human
ugagcuagggauugaaaccauaa

SEQ ID NO: 1087363 - RNA, 18 nt, Human
uggaagaggccucaugga

SEQ ID NO: 1087364 - RNA, 22 nt, Human
uuaaguucugaccacuuucuga

SEQ ID NO: 1087365 - RNA, 30 nt, Human
uuccaaaucaagccaguuuugcaauuugcc

SEQ ID NO: 1087366 - RNA, 19 nt, Human
uuguaccuauuaugcucuc

SEQ ID NO: 1087367 - RNA, 21 nt, Human
uuuacaaaaaauaaaagauuc

SEQ ID NO: 1087368 - RNA, 21 nt, Human
aaaaggaaacacacucagcaa

SEQ ID NO: 1087369 - RNA, 23 nt, Human
aacacacucagcaauuuuuaggg

SEQ ID NO: 1087370 - RNA, 22 nt, Human
aacaggauugaaccaaaguggg

SEQ ID NO: 1087371 - RNA, 21 nt, Human
aaccaaacagcacauuuuccu

SEQ ID NO: 1087372 - RNA, 21 nt, Human
aagaaaaggaaagguaaauaa

SEQ ID NO: 1087373 - RNA, 18 nt, Human
aagaaaccaaacagcaca

SEQ ID NO: 1087374 - RNA, 21 nt, Human
aagcuacccuguguugaagau

SEQ ID NO: 1087375 - RNA, 20 nt, Human
aaguggcuggcagccaggaa

SEQ ID NO: 1087376 - RNA, 24 nt, Human
aaguggcuggcagccaggaagaga

SEQ ID NO: 1087377 - RNA, 21 nt, Human
acauguuaauguauauauggg

SEQ ID NO: 1087378 - RNA, 20 nt, Human
acuggugcuucuauuaauua

SEQ ID NO: 1087379 - RNA, 21 nt, Human
acuuuuaauaaauaaucauaa

SEQ ID NO: 1087380 - RNA, 22 nt, Human
agaaaaacaaagcgucguugag

SEQ ID NO: 1087381 - RNA, 19 nt, Human
agaugacauuccuuguccc

SEQ ID NO: 1087382 - RNA, 20 nt, Human
agcaaccauuuauucucugc

SEQ ID NO: 1087383 - RNA, 18 nt, Human
agcacauuuuccuugcca

SEQ ID NO: 1087384 - RNA, 20 nt, Human
aggaaagguaaauaauccaa

SEQ ID NO: 1087385 - RNA, 22 nt, Human
aggaauggagacagaugucauc

SEQ ID NO: 1087386 - RNA, 22 nt, Human
auagaaaaaaaugcuuaaagga

SEQ ID NO: 1087387 - RNA, 25 nt, Human
caaaagaaaaacaaagcgucguuga

SEQ ID NO: 1087388 - RNA, 21 nt, Human
caagaacaggauugaaccaaa

SEQ ID NO: 1087389 - RNA, 20 nt, Human
cacaaaagaaaaacaaagcg

SEQ ID NO: 1087390 - RNA, 22 nt, Human
cacaaaagaaaaacaaagcguc

SEQ ID NO: 1087391 - RNA, 23 nt, Human
caccuggaggcuaaguggcuggc

SEQ ID NO: 1087392 - RNA, 20 nt, Human
cagaacuuuccaaaguaaac

SEQ ID NO: 1087393 - RNA, 23 nt, Human
cagugguggaccaagacauuccu

SEQ ID NO: 1087394 - RNA, 23 nt, Human
ccaaacagcacauuuuccuugcc

SEQ ID NO: 1087395 - RNA, 24 nt, Human
ccagucucuccauccagucucacu

SEQ ID NO: 1087396 - RNA, 18 nt, Human
ccuggagcaagaagcugu

SEQ ID NO: 1087397 - RNA, 22 nt, Human
cucacagggcaccaaacauuaa

SEQ ID NO: 1087398 - RNA, 21 nt, Human
cuccuugccauuuaccaucac

SEQ ID NO: 1087399 - RNA, 23 nt, Human
cuguugcucguguuuucuucuca

SEQ ID NO: 1087400 - RNA, 24 nt, Human
cuucuguuuucccuucuuugcccc

SEQ ID NO: 1087401 - RNA, 20 nt, Human
cuuuaagcccuucucagugg

SEQ ID NO: 1087402 - RNA, 22 nt, Human
gaagaugacauuccuugucccc

SEQ ID NO: 1087403 - RNA, 19 nt, Human
gauggcaggaauggagaca

SEQ ID NO: 1087404 - RNA, 19 nt, Human
gcaagaagcuguggcuaca

SEQ ID NO: 1087405 - RNA, 19 nt, Human
gcagccaggaagagauggc

SEQ ID NO: 1087406 - RNA, 19 nt, Human
gcuacagcuuuacagccac

SEQ ID NO: 1087407 - RNA, 25 nt, Human
gcuuuacagccacaaaucagucacu

SEQ ID NO: 1087408 - RNA, 22 nt, Human
ggacccaggagccagaauucca

SEQ ID NO: 1087409 - RNA, 20 nt, Human
ggcaaugaagaaaccaaaca

SEQ ID NO: 1087410 - RNA, 20 nt, Human
uaaacucuggguuacaccuc

SEQ ID NO: 1087411 - RNA, 22 nt, Human
uaaacucuggguuacaccuccu

SEQ ID NO: 1087412 - RNA, 24 nt, Human
uaaagacggaguugaaaagacaac

SEQ ID NO: 1087413 - RNA, 22 nt, Human
uaagaugaguaaagucacggga

SEQ ID NO: 1087414 - RNA, 22 nt, Human
uaaguuucucacucugcaauau

SEQ ID NO: 1087415 - RNA, 19 nt, Human
uacacaggccucucagaua

SEQ ID NO: 1087416 - RNA, 21 nt, Human
uaccugagcugcuacagcuuu

SEQ ID NO: 1087417 - RNA, 24 nt, Human
uacucauugucuuagauuugggag

SEQ ID NO: 1087418 - RNA, 19 nt, Human
uagaaaaaaaugcuuaaag

SEQ ID NO: 1087419 - RNA, 19 nt, Human
uagaacaagaagucuaaug

SEQ ID NO: 1087420 - RNA, 20 nt, Human
uagcaaaagaugaggaaauc

SEQ ID NO: 1087421 - RNA, 24 nt, Human
uagcugcaaggauuauguuaaaug

SEQ ID NO: 1087422 - RNA, 20 nt, Human
uagggacccaggagccagaa

SEQ ID NO: 1087423 - RNA, 21 nt, Human
uagggacccaggagccagaau

SEQ ID NO: 1087424 - RNA, 19 nt, Human
uauagcauaaaauuuaaug

SEQ ID NO: 1087425 - RNA, 19 nt, Human
uaucuuaaacucuggguua

SEQ ID NO: 1087426 - RNA, 21 nt, Human
uaugaucaaggcugaagaggc

SEQ ID NO: 1087427 - RNA, 18 nt, Human
ucaccaaagguagacaca

SEQ ID NO: 1087428 - RNA, 21 nt, Human
ucacuauguugauauucaacc

SEQ ID NO: 1087429 - RNA, 22 nt, Human
ucauuaugaucaaggcugaaga

SEQ ID NO: 1087430 - RNA, 24 nt, Human
uccaaaguaaaccuaaaugaaaag

SEQ ID NO: 1087431 - RNA, 20 nt, Human
uccauuucuuccaauuuccu

SEQ ID NO: 1087432 - RNA, 27 nt, Human
uccccggggccuuaauuccuccgcggg

SEQ ID NO: 1087433 - RNA, 22 nt, Human
ucccuaaagacggaguugaaaa

SEQ ID NO: 1087434 - RNA, 22 nt, Human
uccuuuuuauucuacuuccaga

SEQ ID NO: 1087435 - RNA, 26 nt, Human
ucgguggccugcugaguucucuggug

SEQ ID NO: 1087436 - RNA, 19 nt, Human
ucuaaaacuggugcuucua

SEQ ID NO: 1087437 - RNA, 20 nt, Human
ucuaaggcacaaguauagaa

SEQ ID NO: 1087438 - RNA, 22 nt, Human
ucucacucuuacaugugcuacc

SEQ ID NO: 1087439 - RNA, 18 nt, Human
ucucugcuauaugcuaga

SEQ ID NO: 1087440 - RNA, 18 nt, Human
ucuuaaagauccugcuca

SEQ ID NO: 1087441 - RNA, 19 nt, Human
ugaccacgaguagauagac

SEQ ID NO: 1087442 - RNA, 18 nt, Human
ugaccauucugugaccuu

SEQ ID NO: 1087443 - RNA, 18 nt, Human
ugaguugacucuuaaacu

SEQ ID NO: 1087444 - RNA, 20 nt, Human
ugauauaacucacuuuuuug

SEQ ID NO: 1087445 - RNA, 21 nt, Human
ugcagugucuuuaaucucaug

SEQ ID NO: 1087446 - RNA, 18 nt, Human
uggaaagagaguuggccu

SEQ ID NO: 1087447 - RNA, 19 nt, Human
uggaauguggauuggcuca

SEQ ID NO: 1087448 - RNA, 18 nt, Human
uggagcaagaagcugugg

SEQ ID NO: 1087449 - RNA, 24 nt, Human
uggauuggcucauuucaucuuaaa

SEQ ID NO: 1087450 - RNA, 19 nt, Human
uggcaggaauggagacaga

SEQ ID NO: 1087451 - RNA, 18 nt, Human
ugucuuuaaucucauguu

SEQ ID NO: 1087452 - RNA, 23 nt, Human
uuaauauaccuauuuuacaaaaa

SEQ ID NO: 1087453 - RNA, 19 nt, Human
uuccugacgacauguuaau

SEQ ID NO: 1087454 - RNA, 18 nt, Human
uuggauuucuuuuuccuu

SEQ ID NO: 1087455 - RNA, 20 nt, Human
uuugaaacaguuuucuuugc

SEQ ID NO: 1087456 - RNA, 23 nt, Human
uuugaaacaguuuucuuugcuuc

SEQ ID NO: 1087457 - RNA, 25 nt, Human
uuugcauauuucaauauuagauucc

SEQ ID NO: 1087458 - RNA, 21 nt, Human
aaguaaacacagcucugagau

SEQ ID NO: 1087459 - RNA, 22 nt, Human
acagcucugagauuuuuaggac

SEQ ID NO: 1087460 - RNA, 24 nt, Human
agcuaaguaaacacagcucugaga

SEQ ID NO: 1087461 - RNA, 24 nt, Human
caagcuaaguaaacacagcucuga

SEQ ID NO: 1087462 - RNA, 21 nt, Human
cccauaaaauaaaugauugcc

SEQ ID NO: 1087463 - RNA, 19 nt, Human
ccuccacaccccauaaaau

SEQ ID NO: 1087464 - RNA, 24 nt, Human
cgcuuucuaucccuuuccccucca

SEQ ID NO: 1087465 - RNA, 22 nt, Human
cucugagauuuuuaggacaggg

SEQ ID NO: 1087466 - RNA, 19 nt, Human
cugagauuuuuaggacagg

SEQ ID NO: 1087467 - RNA, 22 nt, Human
gcucugagauuuuuaggacagg

SEQ ID NO: 1087468 - RNA, 24 nt, Human
gcuuucuaucccuuuccccuccac

SEQ ID NO: 1087469 - RNA, 24 nt, Human
uaaguaaacacagcucugagauuu

SEQ ID NO: 1087470 - RNA, 23 nt, Human
uuucuaucccuuuccccuccaca

SEQ ID NO: 1087471 - RNA, 21 nt, Human
acagcggccccguggccuccc

SEQ ID NO: 1087472 - RNA, 18 nt, Human
cccccgggcgagcgccgg

SEQ ID NO: 1087473 - RNA, 18 nt, Human
ccucccgcugggggugga

SEQ ID NO: 1087474 - RNA, 22 nt, Human
ccucccgcuggggguggagucc

SEQ ID NO: 1087475 - RNA, 19 nt, Human
cgccgggaaggccaaccgg

SEQ ID NO: 1087476 - RNA, 21 nt, Human
cgcgggugcccgagagccccc

SEQ ID NO: 1087477 - RNA, 22 nt, Human
cgggcgagcgccgggaaggcca

SEQ ID NO: 1087478 - RNA, 24 nt, Human
cggugugcggcggcgcgugcgcac

SEQ ID NO: 1087479 - RNA, 23 nt, Human
gugcggcggcgcgugcgcacagc

SEQ ID NO: 1087480 - RNA, 22 nt, Human
ugcccgagagcccccggugugc

SEQ ID NO: 1087481 - RNA, 19 nt, Human
uggggguggaguccggggg

SEQ ID NO: 1087482 - RNA, 22 nt, Human
aaacaacaugguaauagaagua

SEQ ID NO: 1087483 - RNA, 21 nt, Human
aaagagugguuuucuuuagga

SEQ ID NO: 1087484 - RNA, 22 nt, Human
aagcauuuacacuuaaaaaaug

SEQ ID NO: 1087485 - RNA, 18 nt, Human
acucuccagcuuaaaauu

SEQ ID NO: 1087486 - RNA, 20 nt, Human
agcuacuaaaaaacuugcau

SEQ ID NO: 1087487 - RNA, 22 nt, Human
aggaaaacaggacuaccacaac

SEQ ID NO: 1087488 - RNA, 24 nt, Human
aggacugacuccauauugccauuu

SEQ ID NO: 1087489 - RNA, 20 nt, Human
agugacucuccagcuuaaaa

SEQ ID NO: 1087490 - RNA, 19 nt, Human
auuccagugacucuccagc

SEQ ID NO: 1087491 - RNA, 24 nt, Human
caauaucccacacuacuuucuggu

SEQ ID NO: 1087492 - RNA, 19 nt, Human
ccgcugccgcuccucccgc

SEQ ID NO: 1087493 - RNA, 20 nt, Human
ccgcugccgcuccucccgcc

SEQ ID NO: 1087494 - RNA, 20 nt, Human
ccuugccgcugccgcuccuc

SEQ ID NO: 1087495 - RNA, 23 nt, Human
ccuugccgcugccgcuccucccg

SEQ ID NO: 1087496 - RNA, 25 nt, Human
cuaccacaaccaaagauguuacaga

SEQ ID NO: 1087497 - RNA, 18 nt, Human
cuggcggcggggaaggcg

SEQ ID NO: 1087498 - RNA, 21 nt, Human
gagacagggaccacugaugag

SEQ ID NO: 1087499 - RNA, 22 nt, Human
gcgcgugccgggugccugcggg

SEQ ID NO: 1087500 - RNA, 21 nt, Human
gggauauaaaaacuaaccccc

SEQ ID NO: 1087501 - RNA, 22 nt, Human
guaacgaaauucuaaaaagcca

SEQ ID NO: 1087502 - RNA, 20 nt, Human
guuaucaaguaccaguaucu

SEQ ID NO: 1087503 - RNA, 26 nt, Human
uaaaaaaaagcauuuacacuuaaaaa

SEQ ID NO: 1087504 - RNA, 23 nt, Human
uaagagguuaucaaguaccagua

SEQ ID NO: 1087505 - RNA, 19 nt, Human
uacacuuaaaaaaugggau

SEQ ID NO: 1087506 - RNA, 22 nt, Human
uaggaaacaauucuacuaaaaa

SEQ ID NO: 1087507 - RNA, 24 nt, Human
uaggaaacaauucuacuaaaaaac

SEQ ID NO: 1087508 - RNA, 19 nt, Human
uauaaaaacuaacccccca

SEQ ID NO: 1087509 - RNA, 19 nt, Human
uaucaaguaccaguaucuu

SEQ ID NO: 1087510 - RNA, 18 nt, Human
uaugcuuuguauuauggg

SEQ ID NO: 1087511 - RNA, 22 nt, Human
uauggaauguuaagcugacacc

SEQ ID NO: 1087512 - RNA, 18 nt, Human
ucaagacauuaaaugcag

SEQ ID NO: 1087513 - RNA, 21 nt, Human
ucccacacuacuuucugguug

SEQ ID NO: 1087514 - RNA, 21 nt, Human
ucuagagcuacuaaaaaacuu

SEQ ID NO: 1087515 - RNA, 25 nt, Human
ugacacccgagacagucagagccuc

SEQ ID NO: 1087516 - RNA, 24 nt, Human
ugacuccauauugccauuuaauau

SEQ ID NO: 1087517 - RNA, 21 nt, Human
ugaggugggauucccuccucc

SEQ ID NO: 1087518 - RNA, 24 nt, Human
ugaggugggauucccuccuccuua

SEQ ID NO: 1087519 - RNA, 19 nt, Human
uggcggcggggaaggcgcg

SEQ ID NO: 1087520 - RNA, 25 nt, Human
uguaccaaaaaauaaacaaccagga

SEQ ID NO: 1087521 - RNA, 27 nt, Human
uucaauaucccacacuacuuucugguu

SEQ ID NO: 1087522 - RNA, 22 nt, Human
uuguaccaaaaaauaaacaacc

SEQ ID NO: 1087523 - RNA, 20 nt, Human
uuuacacuuaaaaaauggga

SEQ ID NO: 1087524 - RNA, 20 nt, Human
uuuagaauguucaagacauu

SEQ ID NO: 1087525 - RNA, 21 nt, Human
aaaaaaacccaccagacaaaa

SEQ ID NO: 1087526 - RNA, 23 nt, Human
aaaaccgagcccagccuggaauc

SEQ ID NO: 1087527 - RNA, 20 nt, Human
aaaauccuuuaucaaugccc

SEQ ID NO: 1087528 - RNA, 20 nt, Human
aacccaccagacaaaaccga

SEQ ID NO: 1087529 - RNA, 18 nt, Human
aagcaaaagaaagaccuc

SEQ ID NO: 1087530 - RNA, 28 nt, Human
aaugcccaucuuucucagcaggggugac

SEQ ID NO: 1087531 - RNA, 21 nt, Human
acaacggcaguggcaaaaaaa

SEQ ID NO: 1087532 - RNA, 21 nt, Human
accuuuaacucagcuuugcug

SEQ ID NO: 1087533 - RNA, 22 nt, Human
agacaaaaccgagcccagccug

SEQ ID NO: 1087534 - RNA, 20 nt, Human
agcccagccuggaaucagga

SEQ ID NO: 1087535 - RNA, 20 nt, Human
agcuggggcuacaccucugu

SEQ ID NO: 1087536 - RNA, 19 nt, Human
caaaaccgagcccagccug

SEQ ID NO: 1087537 - RNA, 19 nt, Human
caagcauuuggcuuguuca

SEQ ID NO: 1087538 - RNA, 24 nt, Human
cacaacggcaguggcaaaaaaacc

SEQ ID NO: 1087539 - RNA, 24 nt, Human
caccaggggccugagaggggcugc

SEQ ID NO: 1087540 - RNA, 18 nt, Human
cacccauuccuagggccu

SEQ ID NO: 1087541 - RNA, 18 nt, Human
cagaagcaaaagaaagac

SEQ ID NO: 1087542 - RNA, 18 nt, Human
cagaagccagaagcaaaa

SEQ ID NO: 1087543 - RNA, 23 nt, Human
cagaagccagaagcaaaagaaag

SEQ ID NO: 1087544 - RNA, 25 nt, Human
cagaagccagaagcaaaagaaagac

SEQ ID NO: 1087545 - RNA, 19 nt, Human
cagcaucaugcaaagaaaa

SEQ ID NO: 1087546 - RNA, 24 nt, Human
cagcaucaugcaaagaaaagccuu

SEQ ID NO: 1087547 - RNA, 19 nt, Human
caggagaugcccgggccau

SEQ ID NO: 1087548 - RNA, 22 nt, Human
caggaugccccccucuuccuga

SEQ ID NO: 1087549 - RNA, 19 nt, Human
caguggcaaaaaaacccac

SEQ ID NO: 1087550 - RNA, 23 nt, Human
ccaccagacaaaaccgagcccag

SEQ ID NO: 1087551 - RNA, 26 nt, Human
ccaccagacaaaaccgagcccagccu

SEQ ID NO: 1087552 - RNA, 25 nt, Human
ccagaagcaaaagaaagaccucaca

SEQ ID NO: 1087553 - RNA, 19 nt, Human
cccaccagacaaaaccgag

SEQ ID NO: 1087554 - RNA, 22 nt, Human
cccaccagacaaaaccgagccc

SEQ ID NO: 1087555 - RNA, 20 nt, Human
ccgagcccagccuggaauca

SEQ ID NO: 1087556 - RNA, 20 nt, Human
ccuagggccucgucgauccu

SEQ ID NO: 1087557 - RNA, 20 nt, Human
cgagcccagccuggaaucag

SEQ ID NO: 1087558 - RNA, 23 nt, Human
cgagcccagccuggaaucaggaa

SEQ ID NO: 1087559 - RNA, 23 nt, Human
cggcaguggcaaaaaaacccacc

SEQ ID NO: 1087560 - RNA, 24 nt, Human
cggucacagaaauucaggaacuga

SEQ ID NO: 1087561 - RNA, 21 nt, Human
cuccaaaggaagguugccaug

SEQ ID NO: 1087562 - RNA, 22 nt, Human
cuccaaaggaagguugccaugg

SEQ ID NO: 1087563 - RNA, 20 nt, Human
cucccgaucugaagggcgag

SEQ ID NO: 1087564 - RNA, 25 nt, Human
cucuggugggagccccugcaggaug

SEQ ID NO: 1087565 - RNA, 20 nt, Human
cucugugccaagcacaguuc

SEQ ID NO: 1087566 - RNA, 20 nt, Human
cucugugugaccuggugagc

SEQ ID NO: 1087567 - RNA, 21 nt, Human
cuggaugccugguuaaaaugg

SEQ ID NO: 1087568 - RNA, 21 nt, Human
cuucuggcuucagcaucaugc

SEQ ID NO: 1087569 - RNA, 19 nt, Human
cuuugcugucacuaccuga

SEQ ID NO: 1087570 - RNA, 21 nt, Human
gaaagaccucacaccaggggc

SEQ ID NO: 1087571 - RNA, 23 nt, Human
gccagaccuagguuucaggaggu

SEQ ID NO: 1087572 - RNA, 21 nt, Human
ggagaccuggaugccacuaac

SEQ ID NO: 1087573 - RNA, 18 nt, Human
ggcucuggugggagcccc

SEQ ID NO: 1087574 - RNA, 21 nt, Human
ggggaggcagagaacauggua

SEQ ID NO: 1087575 - RNA, 21 nt, Human
uaacacaacggcaguggcaaa

SEQ ID NO: 1087576 - RNA, 25 nt, Human
uaacacaacggcaguggcaaaagag

SEQ ID NO: 1087577 - RNA, 24 nt, Human
uacucugugccaagcacaguucua

SEQ ID NO: 1087578 - RNA, 22 nt, Human
uagacaggccuuuccucccacu

SEQ ID NO: 1087579 - RNA, 22 nt, Human
uagcuuccaaauaccagcuccu

SEQ ID NO: 1087580 - RNA, 23 nt, Human
uagcuuccaaauaccagcuccuu

SEQ ID NO: 1087581 - RNA, 19 nt, Human
ucacagaaauucaggaacu

SEQ ID NO: 1087582 - RNA, 18 nt, Human
ucccugaaggccagaccu

SEQ ID NO: 1087583 - RNA, 24 nt, Human
ucucagaagccagaagcaaaagaa

SEQ ID NO: 1087584 - RNA, 18 nt, Human
ugaggaaaguugggcaau

SEQ ID NO: 1087585 - RNA, 20 nt, Human
ugaggaaaguugggcaauuu

SEQ ID NO: 1087586 - RNA, 22 nt, Human
ugaugcuccaauagaaaaaaga

SEQ ID NO: 1087587 - RNA, 22 nt, Human
ugcaaagaaaagccuucucaac

SEQ ID NO: 1087588 - RNA, 19 nt, Human
ugccauggaagcggucaca

SEQ ID NO: 1087589 - RNA, 24 nt, Human
ugccucggugaacaugccagacaa

SEQ ID NO: 1087590 - RNA, 22 nt, Human
ugccugguuaaaaugguuguuc

SEQ ID NO: 1087591 - RNA, 18 nt, Human
uggagugauaaagaaggu

SEQ ID NO: 1087592 - RNA, 19 nt, Human
uggagugauaaagaagguc

SEQ ID NO: 1087593 - RNA, 18 nt, Human
uggggcuacaccucugug

SEQ ID NO: 1087594 - RNA, 22 nt, Human
ugguagacaggccuuuccuccc

SEQ ID NO: 1087595 - RNA, 24 nt, Human
uggucaggaaugccucggugaaca

SEQ ID NO: 1087596 - RNA, 20 nt, Human
uggugggagccccugcagga

SEQ ID NO: 1087597 - RNA, 20 nt, Human
uuaagugccuacucugugcc

SEQ ID NO: 1087598 - RNA, 23 nt, Human
uuauguuguuuccuugaaggcuu

SEQ ID NO: 1087599 - RNA, 25 nt, Human
uuccugauguuguuugccacccauu

SEQ ID NO: 1087600 - RNA, 20 nt, Human
uuggguguagaguggcauaa

SEQ ID NO: 1087601 - RNA, 18 nt, Human
uuguuuccuugaaggcuu

SEQ ID NO: 1087602 - RNA, 21 nt, Human
aacaaaacagauucuuuggaa

SEQ ID NO: 1087603 - RNA, 23 nt, Human
aacuggcuuccagcccuagcccc

SEQ ID NO: 1087604 - RNA, 23 nt, Human
agaacuggcuuccagcccuagcc

SEQ ID NO: 1087605 - RNA, 19 nt, Human
agaggugggcaggagaggc

SEQ ID NO: 1087606 - RNA, 23 nt, Human
agcggugcaggcggcgguggcgg

SEQ ID NO: 1087607 - RNA, 24 nt, Human
aggugggcaggagaggcccaaagc

SEQ ID NO: 1087608 - RNA, 20 nt, Human
caaagcccagcuccggaggc

SEQ ID NO: 1087609 - RNA, 21 nt, Human
cagauucuuuggaaccgagag

SEQ ID NO: 1087610 - RNA, 21 nt, Human
cagguaguacacccgccccuu

SEQ ID NO: 1087611 - RNA, 26 nt, Human
ccaaagcccagcuccggaggcccccg

SEQ ID NO: 1087612 - RNA, 21 nt, Human
cccacaaaaaauaguaaaaaa

SEQ ID NO: 1087613 - RNA, 20 nt, Human
cccccaggcugaggggcagg

SEQ ID NO: 1087614 - RNA, 25 nt, Human
cccccaggcugaggggcagggagaa

SEQ ID NO: 1087615 - RNA, 21 nt, Human
ccuggcaggccucccuugccu

SEQ ID NO: 1087616 - RNA, 18 nt, Human
cucccggcggcauucuag

SEQ ID NO: 1087617 - RNA, 21 nt, Human
cuccggaggcccccgaggccc

SEQ ID NO: 1087618 - RNA, 21 nt, Human
cuccuuaagggagggagacca

SEQ ID NO: 1087619 - RNA, 19 nt, Human
gaacccuccagaagcccac

SEQ ID NO: 1087620 - RNA, 23 nt, Human
gccuagaacuggcuuccagcccu

SEQ ID NO: 1087621 - RNA, 25 nt, Human
gcgaagcagaauacaucauagcggu

SEQ ID NO: 1087622 - RNA, 21 nt, Human
gcggugcaggcggcgguggcg

SEQ ID NO: 1087623 - RNA, 22 nt, Human
gcuccggaggcccccgaggccc

SEQ ID NO: 1087624 - RNA, 21 nt, Human
ggcaguagcgaagcagaauac

SEQ ID NO: 1087625 - RNA, 24 nt, Human
ggcugaggggcagggagaacugug

SEQ ID NO: 1087626 - RNA, 20 nt, Human
gggcaggagaggcccaaagc

SEQ ID NO: 1087627 - RNA, 18 nt, Human
ggggaacggggaggggag

SEQ ID NO: 1087628 - RNA, 21 nt, Human
ggggaaggggaacggggaggg

SEQ ID NO: 1087629 - RNA, 22 nt, Human
uagaggugggcaggagaggccc

SEQ ID NO: 1087630 - RNA, 21 nt, Human
uccagaagcccacaaaaaaua

SEQ ID NO: 1087631 - RNA, 18 nt, Human
ucccccaggcugaggggc

SEQ ID NO: 1087632 - RNA, 19 nt, Human
ucuucuucccccaggcuga

SEQ ID NO: 1087633 - RNA, 20 nt, Human
ugagggcaguagcgaagcag

SEQ ID NO: 1087634 - RNA, 21 nt, Human
ugcccggacucccggcggcau

SEQ ID NO: 1087635 - RNA, 23 nt, Human
ugccucugucagcgucagcuucu

SEQ ID NO: 1087636 - RNA, 23 nt, Human
uggaagccuagaacuggcuucca

SEQ ID NO: 1087637 - RNA, 21 nt, Human
uggcuuccagcccuagccccu

SEQ ID NO: 1087638 - RNA, 19 nt, Human
aaggggcagcuugcaagcc

SEQ ID NO: 1087639 - RNA, 24 nt, Human
auaacauuuauauaucauauuaua

SEQ ID NO: 1087640 - RNA, 19 nt, Human
auauauauauauauauaua

SEQ ID NO: 1087641 - RNA, 19 nt, Human
auauauguauauauauaua

SEQ ID NO: 1087642 - RNA, 19 nt, Human
aucucauuuaccuuuccaa

SEQ ID NO: 1087643 - RNA, 22 nt, Human
auggagacacucaaaacauacu

SEQ ID NO: 1087644 - RNA, 18 nt, Human
auguauauauauauauau

SEQ ID NO: 1087645 - RNA, 19 nt, Human
auguauauauauauauaua

SEQ ID NO: 1087646 - RNA, 20 nt, Human
auguauauauauauauauaa

SEQ ID NO: 1087647 - RNA, 22 nt, Human
caaucaccuuuuaaggccccac

SEQ ID NO: 1087648 - RNA, 20 nt, Human
cagaagagaccgcaagggca

SEQ ID NO: 1087649 - RNA, 19 nt, Human
cagucaaaccucaagccag

SEQ ID NO: 1087650 - RNA, 21 nt, Human
ccgaccaugcccuaccuccau

SEQ ID NO: 1087651 - RNA, 25 nt, Human
ccuccauggcacugccaggggaccc

SEQ ID NO: 1087652 - RNA, 23 nt, Human
ccuccuccuggaauuccuuuccu

SEQ ID NO: 1087653 - RNA, 23 nt, Human
cugcucguccuucaaggggcagc

SEQ ID NO: 1087654 - RNA, 20 nt, Human
cuguguuucaggugucccca

SEQ ID NO: 1087655 - RNA, 19 nt, Human
cuuccuagaacuaacucaa

SEQ ID NO: 1087656 - RNA, 23 nt, Human
cuugcaagccucccuuuagacac

SEQ ID NO: 1087657 - RNA, 18 nt, Human
cuuuaugaugagcugcuc

SEQ ID NO: 1087658 - RNA, 22 nt, Human
gacaccucuacagguacagccg

SEQ ID NO: 1087659 - RNA, 21 nt, Human
gagaccgcaagggcaagcuaa

SEQ ID NO: 1087660 - RNA, 21 nt, Human
gcaacuaaauuucagcauaag

SEQ ID NO: 1087661 - RNA, 18 nt, Human
gcagaagagaccgcaagg

SEQ ID NO: 1087662 - RNA, 23 nt, Human
gcagcuugcaagccucccuuuag

SEQ ID NO: 1087663 - RNA, 20 nt, Human
gcauuaauccauucgugagg

SEQ ID NO: 1087664 - RNA, 21 nt, Human
gggcagcuugcaagccucccu

SEQ ID NO: 1087665 - RNA, 23 nt, Human
ggggcagcuugcaagccucccuu

SEQ ID NO: 1087666 - RNA, 19 nt, Human
guauauauauauauauaua

SEQ ID NO: 1087667 - RNA, 22 nt, Human
guauauauauauauauauauag

SEQ ID NO: 1087668 - RNA, 24 nt, Human
uaaauauagguuuuaauauuuucu

SEQ ID NO: 1087669 - RNA, 25 nt, Human
uaacauuuauauauaucauauuaua

SEQ ID NO: 1087670 - RNA, 25 nt, Human
uaacauuuauauauaucauauuaua

SEQ ID NO: 1087671 - RNA, 23 nt, Human
uaacauuuauauaucauauuaua

SEQ ID NO: 1087672 - RNA, 25 nt, Human
uaacauuuuuauauaucauauuaua

SEQ ID NO: 1087673 - RNA, 24 nt, Human
uaacccaaucccagucugaccaug

SEQ ID NO: 1087674 - RNA, 22 nt, Human
uaacucaauccuguguuaaugg

SEQ ID NO: 1087675 - RNA, 21 nt, Human
uaaugcacuuccuagaacuaa

SEQ ID NO: 1087676 - RNA, 21 nt, Human
uauauauaacauauaacauuu

SEQ ID NO: 1087677 - RNA, 19 nt, Human
uauauauauauauauauau

SEQ ID NO: 1087678 - RNA, 20 nt, Human
uauauauauguauauauaua

SEQ ID NO: 1087679 - RNA, 23 nt, Human
uauauauauguauauauauauau

SEQ ID NO: 1087680 - RNA, 22 nt, Human
uauauguauauauauauauaua

SEQ ID NO: 1087681 - RNA, 24 nt, Human
uaucauauauaacauauaacauuu

SEQ ID NO: 1087682 - RNA, 22 nt, Human
uauguaauauauaacauauaua

SEQ ID NO: 1087683 - RNA, 18 nt, Human
uauguauauauauauaua

SEQ ID NO: 1087684 - RNA, 22 nt, Human
uauguauauauauauauauaua

SEQ ID NO: 1087685 - RNA, 24 nt, Human
uauuauauauaacacauaacauuu

SEQ ID NO: 1087686 - RNA, 22 nt, Human
uauuauauauaacauaacauuu

SEQ ID NO: 1087687 - RNA, 22 nt, Human
uauuauauauaacauaacauuu

SEQ ID NO: 1087688 - RNA, 22 nt, Human
uauuauauauaacauaacauuu

SEQ ID NO: 1087689 - RNA, 24 nt, Human
uauuauauauaacauauaacauuu

SEQ ID NO: 1087690 - RNA, 24 nt, Human
uauuauauauaacauauaacauuu

SEQ ID NO: 1087691 - RNA, 24 nt, Human
uauuauauauaacauauaacauuu

SEQ ID NO: 1087692 - RNA, 24 nt, Human
uauuauauauaacauauaacauuu

SEQ ID NO: 1087693 - RNA, 24 nt, Human
uauuauauauaacauauaacauuu

SEQ ID NO: 1087694 - RNA, 24 nt, Human
uauuauauauaacauauaacauuu

SEQ ID NO: 1087695 - RNA, 22 nt, Human
ucagcauaaguuuuucggaacc

SEQ ID NO: 1087696 - RNA, 24 nt, Human
ucccaucucauuuaccuuuccaaa

SEQ ID NO: 1087697 - RNA, 21 nt, Human
ucuauggacaaccuccaugcc

SEQ ID NO: 1087698 - RNA, 23 nt, Human
ucuuuucccaucucauuuaccuu

SEQ ID NO: 1087699 - RNA, 19 nt, Human
ugcauaaauauauauaugu

SEQ ID NO: 1087700 - RNA, 22 nt, Human
uggcauuaauccauucgugagg

SEQ ID NO: 1087701 - RNA, 18 nt, Human
uguauauauauauauaua

SEQ ID NO: 1087702 - RNA, 22 nt, Human
uguauauauauauauauauaua

SEQ ID NO: 1087703 - RNA, 24 nt, Human
uucauuuugcauaaauauauauau

SEQ ID NO: 1087704 - RNA, 24 nt, Human
uugcaagccucccuuuagacaccu

SEQ ID NO: 1087705 - RNA, 20 nt, Human
uuuauggagacacucaaaac

SEQ ID NO: 1087706 - RNA, 29 nt, Human
uuucauuuugcauaaauauauauauguau

SEQ ID NO: 1087707 - RNA, 23 nt, Human
acaacuuccggcuugaaccggaa

SEQ ID NO: 1087708 - RNA, 23 nt, Human
cuaacauuugcauccauuucuaa

SEQ ID NO: 1087709 - RNA, 24 nt, Human
gaucugcagaaaugggaccaaggg

SEQ ID NO: 1087710 - RNA, 22 nt, Human
gggcggcguugcgucgccuugg

SEQ ID NO: 1087711 - RNA, 25 nt, Human
uggaagacucaauuuaaugucuccu

SEQ ID NO: 1087712 - RNA, 27 nt, Human
uggaagacucaauuuaaugucuccuuu

SEQ ID NO: 1087713 - RNA, 22 nt, Human
uugcggcugucugacuuuuuuc

SEQ ID NO: 1087714 - RNA, 23 nt, Human
aaaccuauagagacagagacuag

SEQ ID NO: 1087715 - RNA, 22 nt, Human
aaagauugcaagaaccccuccc

SEQ ID NO: 1087716 - RNA, 20 nt, Human
aagaaccccucccaccucuc

SEQ ID NO: 1087717 - RNA, 18 nt, Human
acagauauuuugguuuua

SEQ ID NO: 1087718 - RNA, 23 nt, Human
accagguucaaagaaaagaugag

SEQ ID NO: 1087719 - RNA, 22 nt, Human
acucuggaggccuaccugggcu

SEQ ID NO: 1087720 - RNA, 26 nt, Human
acuucgaaggugcugaggccaaaaag

SEQ ID NO: 1087721 - RNA, 23 nt, Human
agaaaaggcagaugggaaaaugc

SEQ ID NO: 1087722 - RNA, 18 nt, Human
agacuagaagagugagug

SEQ ID NO: 1087723 - RNA, 20 nt, Human
agagaaaaggcagaugggaa

SEQ ID NO: 1087724 - RNA, 23 nt, Human
agccucggugcucacagagacgg

SEQ ID NO: 1087725 - RNA, 20 nt, Human
agcgcugggacucuggaggc

SEQ ID NO: 1087726 - RNA, 22 nt, Human
aggccaaaggggucugggccug

SEQ ID NO: 1087727 - RNA, 22 nt, Human
aggccccaacauguauggagcu

SEQ ID NO: 1087728 - RNA, 18 nt, Human
aggggucugggccugugg

SEQ ID NO: 1087729 - RNA, 21 nt, Human
aggggucugggccuguggggg

SEQ ID NO: 1087730 - RNA, 20 nt, Human
agguauacgguuucuuuugg

SEQ ID NO: 1087731 - RNA, 21 nt, Human
aggugcugaggccaaaaagcc

SEQ ID NO: 1087732 - RNA, 24 nt, Human
auaaauaaauucacauuaggcaga

SEQ ID NO: 1087733 - RNA, 27 nt, Human
aucuggacuagaugcugagccaggggg

SEQ ID NO: 1087734 - RNA, 24 nt, Human
augccggcggagggugggggaguu

SEQ ID NO: 1087735 - RNA, 26 nt, Human
auuuugguuuuaaccaguuccccacc

SEQ ID NO: 1087736 - RNA, 21 nt, Human
caagguggggaaaccagagaa

SEQ ID NO: 1087737 - RNA, 27 nt, Human
cacaaauaaauaaauucacauuaggca

SEQ ID NO: 1087738 - RNA, 20 nt, Human
cacaccauuauuuaugucuc

SEQ ID NO: 1087739 - RNA, 22 nt, Human
caccucucccaugcucuucuuu

SEQ ID NO: 1087740 - RNA, 21 nt, Human
caggccccaacauguauggag

SEQ ID NO: 1087741 - RNA, 20 nt, Human
caggcugacccaucuggacu

SEQ ID NO: 1087742 - RNA, 26 nt, Human
cagggcuggggguaaggccaaagggg

SEQ ID NO: 1087743 - RNA, 23 nt, Human
ccaggaaaggcagucugccaagg

SEQ ID NO: 1087744 - RNA, 22 nt, Human
ccagguucaaagaaaagaugag

SEQ ID NO: 1087745 - RNA, 22 nt, Human
ccccgucgggaucgcccgugcc

SEQ ID NO: 1087746 - RNA, 19 nt, Human
cccgugcccucuuccagga

SEQ ID NO: 1087747 - RNA, 20 nt, Human
cuacuugccgcugccuucuc

SEQ ID NO: 1087748 - RNA, 21 nt, Human
cucacaggacgucccucccca

SEQ ID NO: 1087749 - RNA, 21 nt, Human
cucacaggacgucccucccca

SEQ ID NO: 1087750 - RNA, 18 nt, Human
cugccaaggaaccacuuc

SEQ ID NO: 1087751 - RNA, 21 nt, Human
cuggcaaaaucccacaagagc

SEQ ID NO: 1087752 - RNA, 20 nt, Human
cuuggagcuguuaucccuca

SEQ ID NO: 1087753 - RNA, 19 nt, Human
gaaaauaaccccuuggagc

SEQ ID NO: 1087754 - RNA, 18 nt, Human
gaaggugcugaggccaaa

SEQ ID NO: 1087755 - RNA, 25 nt, Human
gcagagccuccugcuugccucaaag

SEQ ID NO: 1087756 - RNA, 25 nt, Human
gccaaaaagccucggugcucacaga

SEQ ID NO: 1087757 - RNA, 21 nt, Human
gccacuccagaggcgagaggg

SEQ ID NO: 1087758 - RNA, 24 nt, Human
gcggagggugggggaguuccaagg

SEQ ID NO: 1087759 - RNA, 23 nt, Human
ggagggagagagggagcucugug

SEQ ID NO: 1087760 - RNA, 19 nt, Human
ggaggggcugagaagggcc

SEQ ID NO: 1087761 - RNA, 25 nt, Human
ggcggagggugggggaguuccaagg

SEQ ID NO: 1087762 - RNA, 20 nt, Human
ggcugagaagggccgccgcg

SEQ ID NO: 1087763 - RNA, 20 nt, Human
gggccugugggggucggggg

SEQ ID NO: 1087764 - RNA, 29 nt, Human
gugggggucggggggcuaaaggguagucc

SEQ ID NO: 1087765 - RNA, 24 nt, Human
guuaacagguauacgguuucuuuu

SEQ ID NO: 1087766 - RNA, 24 nt, Human
uaagccacaagguggggaaaccag

SEQ ID NO: 1087767 - RNA, 27 nt, Human
uaagccacaagguggggaaaccagaga

SEQ ID NO: 1087768 - RNA, 22 nt, Human
uagaagagugagugccagggac

SEQ ID NO: 1087769 - RNA, 18 nt, Human
uccaaggccaggaugcuc

SEQ ID NO: 1087770 - RNA, 21 nt, Human
ucccacaagagcugagcgcug

SEQ ID NO: 1087771 - RNA, 18 nt, Human
ucccuccauggagggagg

SEQ ID NO: 1087772 - RNA, 21 nt, Human
uccucaggcagccacuccaga

SEQ ID NO: 1087773 - RNA, 19 nt, Human
ucuagcccuaugggucccu

SEQ ID NO: 1087774 - RNA, 18 nt, Human
ucucacaggacgucccuc

SEQ ID NO: 1087775 - RNA, 24 nt, Human
ucucacaggacgucccuccccacc

SEQ ID NO: 1087776 - RNA, 20 nt, Human
ucucccaugcucuucuuugg

SEQ ID NO: 1087777 - RNA, 24 nt, Human
ugaaaaagcaaaccuauagagaca

SEQ ID NO: 1087778 - RNA, 20 nt, Human
ugagaagggccgccgcggug

SEQ ID NO: 1087779 - RNA, 25 nt, Human
ugagccagggcuggggguaaggcca

SEQ ID NO: 1087780 - RNA, 23 nt, Human
ugagcgcugauccucauccuucu

SEQ ID NO: 1087781 - RNA, 24 nt, Human
ugcaagaaaauaaccccuuggagc

SEQ ID NO: 1087782 - RNA, 18 nt, Human
ugcccucuuccaggaaag

SEQ ID NO: 1087783 - RNA, 18 nt, Human
ugcugagccagggcuggg

SEQ ID NO: 1087784 - RNA, 25 nt, Human
uggagaauaagaccacaggaugcaa

SEQ ID NO: 1087785 - RNA, 21 nt, Human
uggcaaaaucccacaagagcu

SEQ ID NO: 1087786 - RNA, 20 nt, Human
ugggacucuggaggccuacc

SEQ ID NO: 1087787 - RNA, 18 nt, Human
ugggaguagggaauagug

SEQ ID NO: 1087788 - RNA, 21 nt, Human
ugggccugugggggucggggg

SEQ ID NO: 1087789 - RNA, 24 nt, Human
uuaugucucuaagccacaaggugg

SEQ ID NO: 1087790 - RNA, 22 nt, Human
uucaaagaaaagaugagcagau

SEQ ID NO: 1087791 - RNA, 18 nt, Human
uuccaaggccaggaugcu

SEQ ID NO: 1087792 - RNA, 19 nt, Human
aaagagggaagccgaggcc

SEQ ID NO: 1087793 - RNA, 20 nt, Human
aacauggcgagaccuugucu

SEQ ID NO: 1087794 - RNA, 24 nt, Human
aaggagaacaugaaaagccacuaa

SEQ ID NO: 1087795 - RNA, 24 nt, Human
acagugcccccgcccugacuccag

SEQ ID NO: 1087796 - RNA, 20 nt, Human
acccaagcuacaggacugau

SEQ ID NO: 1087797 - RNA, 18 nt, Human
accccuucuuagagcagc

SEQ ID NO: 1087798 - RNA, 21 nt, Human
accccuucuuagagcagcuca

SEQ ID NO: 1087799 - RNA, 18 nt, Human
acuugaguucaggaguuc

SEQ ID NO: 1087800 - RNA, 19 nt, Human
agagcagcucagacugugc

SEQ ID NO: 1087801 - RNA, 20 nt, Human
agccagcuccagacccacca

SEQ ID NO: 1087802 - RNA, 20 nt, Human
agccuuggcuaaaggagaac

SEQ ID NO: 1087803 - RNA, 22 nt, Human
aucacuuggaaaaagggagccu

SEQ ID NO: 1087804 - RNA, 21 nt, Human
augaaaagccacuaauuaaca

SEQ ID NO: 1087805 - RNA, 22 nt, Human
auggaaagagggaagccgaggc

SEQ ID NO: 1087806 - RNA, 22 nt, Human
caacauggcgagaccuugucuc

SEQ ID NO: 1087807 - RNA, 24 nt, Human
caacauggcgagaccuugucuccu

SEQ ID NO: 1087808 - RNA, 20 nt, Human
caccaagaagcagagccugg

SEQ ID NO: 1087809 - RNA, 18 nt, Human
cacccauucucccaccug

SEQ ID NO: 1087810 - RNA, 18 nt, Human
caccugucccugcccagc

SEQ ID NO: 1087811 - RNA, 21 nt, Human
caggacugauuccuggaugga

SEQ ID NO: 1087812 - RNA, 22 nt, Human
caugaaaagccacuaauuaaca

SEQ ID NO: 1087813 - RNA, 23 nt, Human
ccaccugucccugcccagcugcc

SEQ ID NO: 1087814 - RNA, 19 nt, Human
ccauucucccaccuguccc

SEQ ID NO: 1087815 - RNA, 19 nt, Human
cccccgcccugacuccauc

SEQ ID NO: 1087816 - RNA, 23 nt, Human
cccgcccugacuccauccaggga

SEQ ID NO: 1087817 - RNA, 27 nt, Human
cccugaaagacaucacuuggaaaaagg

SEQ ID NO: 1087818 - RNA, 20 nt, Human
ccuagcacuuugggaggcca

SEQ ID NO: 1087819 - RNA, 21 nt, Human
ccuccuacacccauucuccca

SEQ ID NO: 1087820 - RNA, 20 nt, Human
ccuguaauccuagcacuuug

SEQ ID NO: 1087821 - RNA, 21 nt, Human
cuacacccauucucccaccug

SEQ ID NO: 1087822 - RNA, 18 nt, Human
cucccaccugucccugcc

SEQ ID NO: 1087823 - RNA, 24 nt, Human
cugauuccuggauggaaagaggga

SEQ ID NO: 1087824 - RNA, 23 nt, Human
cuggggccugccuccuacaccca

SEQ ID NO: 1087825 - RNA, 20 nt, Human
gaacaugaaaagccacuaau

SEQ ID NO: 1087826 - RNA, 24 nt, Human
gauuacuugaguucaggaguucga

SEQ ID NO: 1087827 - RNA, 18 nt, Human
gccuguaauccuagcacu

SEQ ID NO: 1087828 - RNA, 23 nt, Human
gccuguaauccuagcacuuuggg

SEQ ID NO: 1087829 - RNA, 22 nt, Human
gucuccugcauugucagccagc

SEQ ID NO: 1087830 - RNA, 18 nt, Human
guggaggacagugccccc

SEQ ID NO: 1087831 - RNA, 20 nt, Human
gugucuagcaguggaggaca

SEQ ID NO: 1087832 - RNA, 21 nt, Human
uaaggaggcacccaagcuaca

SEQ ID NO: 1087833 - RNA, 24 nt, Human
uagcacuuugggaggccaaggugg

SEQ ID NO: 1087834 - RNA, 18 nt, Human
ucacuuggaaaaagggag

SEQ ID NO: 1087835 - RNA, 21 nt, Human
ugaguucaggaguucgagaac

SEQ ID NO: 1087836 - RNA, 24 nt, Human
uggauuacuugaguucaggaguuc

SEQ ID NO: 1087837 - RNA, 20 nt, Human
ugggaggccaagguggauua

SEQ ID NO: 1087838 - RNA, 18 nt, Human
ugucaccaagaagcagag

SEQ ID NO: 1087839 - RNA, 24 nt, Human
ugucaccaagaagcagagccuggg

SEQ ID NO: 1087840 - RNA, 20 nt, Human
ugucagccagcuccagaccc

SEQ ID NO: 1087841 - RNA, 19 nt, Human
ugucuagcaguggaggaca

SEQ ID NO: 1087842 - RNA, 20 nt, Human
uguguguguuuuuucuuuuu

SEQ ID NO: 1087843 - RNA, 21 nt, Human
uuacuugaguucaggaguucg

SEQ ID NO: 1087844 - RNA, 23 nt, Human
uuaggguaaaggagaccccuucu

SEQ ID NO: 1087845 - RNA, 22 nt, Human
uucugggggugucuagcagugg

SEQ ID NO: 1087846 - RNA, 18 nt, Human
uuggaaaaagggagccuu

SEQ ID NO: 1087847 - RNA, 25 nt, Human
aaaagagcacagcaaacagcuguac

SEQ ID NO: 1087848 - RNA, 22 nt, Human
acccaguuuccaaaagagcaca

SEQ ID NO: 1087849 - RNA, 22 nt, Human
acugguaccuucaaggagaggu

SEQ ID NO: 1087850 - RNA, 19 nt, Human
agaaggauauacaagugcu

SEQ ID NO: 1087851 - RNA, 21 nt, Human
cccaguuuccaaaagagcaca

SEQ ID NO: 1087852 - RNA, 22 nt, Human
cuguacgugugugccugugacu

SEQ ID NO: 1087853 - RNA, 20 nt, Human
uccagguggaggagaaccga

SEQ ID NO: 1087854 - RNA, 26 nt, Human
ugagcaaagagaaauauauagaagga

SEQ ID NO: 1087855 - RNA, 19 nt, Human
ugguaccuucaaggagagg

SEQ ID NO: 1087856 - RNA, 21 nt, Human
ugugacuauauauaugugugu

SEQ ID NO: 1087857 - RNA, 24 nt, Human
ugugugccugugacuauauauaug

SEQ ID NO: 1087858 - RNA, 22 nt, Human
uucuaaguuaaaaaaaaagcac

SEQ ID NO: 1087859 - RNA, 24 nt, Human
aagcagguaaagcuggcaaucaaa

SEQ ID NO: 1087860 - RNA, 24 nt, Human
acccaucaaaacucgcuguucacc

SEQ ID NO: 1087861 - RNA, 20 nt, Human
acugugaaagguaacaaaaa

SEQ ID NO: 1087862 - RNA, 20 nt, Human
aggcugggcuggguaaggag

SEQ ID NO: 1087863 - RNA, 24 nt, Human
aucaaaacucgcuguucacccuga

SEQ ID NO: 1087864 - RNA, 22 nt, Human
augaaacccaucaaaacucgcu

SEQ ID NO: 1087865 - RNA, 18 nt, Human
caacccauagaacuguga

SEQ ID NO: 1087866 - RNA, 25 nt, Human
caacugaaacagucuuccccaccaa

SEQ ID NO: 1087867 - RNA, 19 nt, Human
caccaaacuguuggugccu

SEQ ID NO: 1087868 - RNA, 19 nt, Human
cagaugagaacagugaagc

SEQ ID NO: 1087869 - RNA, 22 nt, Human
cagcccagcagacaucaacauc

SEQ ID NO: 1087870 - RNA, 21 nt, Human
cagcuggacccagucaaccca

SEQ ID NO: 1087871 - RNA, 23 nt, Human
caugaagcagguaaagcuggcaa

SEQ ID NO: 1087872 - RNA, 22 nt, Human
ccccaccaaacuguuggugccu

SEQ ID NO: 1087873 - RNA, 20 nt, Human
cucugagagguuaagugacu

SEQ ID NO: 1087874 - RNA, 20 nt, Human
cugagauagaauagauuuau

SEQ ID NO: 1087875 - RNA, 21 nt, Human
gaacagccccagugcagccca

SEQ ID NO: 1087876 - RNA, 20 nt, Human
gaacugacagcuggacccag

SEQ ID NO: 1087877 - RNA, 24 nt, Human
uaaaaagcagguaugguguccuug

SEQ ID NO: 1087878 - RNA, 21 nt, Human
uaaagcuggcaaucaaaauca

SEQ ID NO: 1087879 - RNA, 23 nt, Human
uagauuuauuagcaagagguaau

SEQ ID NO: 1087880 - RNA, 24 nt, Human
uaggcaacugaaacagucuucccc

SEQ ID NO: 1087881 - RNA, 19 nt, Human
ucaacauccagccauguga

SEQ ID NO: 1087882 - RNA, 22 nt, Human
uccuugacacucuggaucuccg

SEQ ID NO: 1087883 - RNA, 22 nt, Human
uccuugacacucuggaucuccg

SEQ ID NO: 1087884 - RNA, 22 nt, Human
ugaaacccaucaaaacucgcug

SEQ ID NO: 1087885 - RNA, 18 nt, Human
ugaaacuucaugagagac

SEQ ID NO: 1087886 - RNA, 24 nt, Human
ugaaacuucaugagagacuccaaa

SEQ ID NO: 1087887 - RNA, 22 nt, Human
ugaaauauuuuaggacuugaaa

SEQ ID NO: 1087888 - RNA, 24 nt, Human
ugaagcagguaaagcuggcaauca

SEQ ID NO: 1087889 - RNA, 20 nt, Human
ugacuuggcugagcucauga

SEQ ID NO: 1087890 - RNA, 19 nt, Human
ugagaacagugaagcucug

SEQ ID NO: 1087891 - RNA, 18 nt, Human
ugagagguuaagugacuu

SEQ ID NO: 1087892 - RNA, 24 nt, Human
ugagccuucagaugacuccagucc

SEQ ID NO: 1087893 - RNA, 21 nt, Human
ugcaauaggcaacugaaacag

SEQ ID NO: 1087894 - RNA, 22 nt, Human
ugcaccaacuagagcaccaccc

SEQ ID NO: 1087895 - RNA, 28 nt, Human
ugccuaaaaagcagguaugguguccuug

SEQ ID NO: 1087896 - RNA, 21 nt, Human
uggcugagcucaugaagcagg

SEQ ID NO: 1087897 - RNA, 18 nt, Human
uggguaaggagcaagugc

SEQ ID NO: 1087898 - RNA, 21 nt, Human
ugugacagcgccaucuuggug

SEQ ID NO: 1087899 - RNA, 27 nt, Human
uuacaaaaauggaaauuuuuuuccaaa

SEQ ID NO: 1087900 - RNA, 23 nt, Human
aaacaacagcagaacauaggcac

SEQ ID NO: 1087901 - RNA, 23 nt, Human
aaccucuagcucccuuucggcuu

SEQ ID NO: 1087902 - RNA, 21 nt, Human
aagaggaagacagagaucuaa

SEQ ID NO: 1087903 - RNA, 23 nt, Human
aagaguacaacugcugaagcuca

SEQ ID NO: 1087904 - RNA, 25 nt, Human
aagccacagagacccacucucuuuu

SEQ ID NO: 1087905 - RNA, 19 nt, Human
aagcccuuuuuaggucauc

SEQ ID NO: 1087906 - RNA, 24 nt, Human
aaucucuggauuugaaccucuagc

SEQ ID NO: 1087907 - RNA, 26 nt, Human
acaaagaaaucauguuacuucuucca

SEQ ID NO: 1087908 - RNA, 21 nt, Human
acaacagcagaacauaggcac

SEQ ID NO: 1087909 - RNA, 19 nt, Human
agaaugccaccacugcccc

SEQ ID NO: 1087910 - RNA, 20 nt, Human
agcacugaucaacaccucca

SEQ ID NO: 1087911 - RNA, 23 nt, Human
aguucucggccuuuaaacaacuc

SEQ ID NO: 1087912 - RNA, 22 nt, Human
augagcccagagcacauacaaa

SEQ ID NO: 1087913 - RNA, 19 nt, Human
auucuuggcaacagaacaa

SEQ ID NO: 1087914 - RNA, 23 nt, Human
caaaaucccaccaagcacugauc

SEQ ID NO: 1087915 - RNA, 21 nt, Human
caacagaacaaaugaaacaca

SEQ ID NO: 1087916 - RNA, 24 nt, Human
caccaagcacugaucaacaccucc

SEQ ID NO: 1087917 - RNA, 24 nt, Human
cagagugaacaucagugaaagcca

SEQ ID NO: 1087918 - RNA, 19 nt, Human
caucaaaaaagaguacaac

SEQ ID NO: 1087919 - RNA, 21 nt, Human
caucaaaaaagaguacaacug

SEQ ID NO: 1087920 - RNA, 18 nt, Human
cauguccccagaaugcca

SEQ ID NO: 1087921 - RNA, 19 nt, Human
ccaaaccgagcagucaugg

SEQ ID NO: 1087922 - RNA, 21 nt, Human
ccagaaguggcugucucaugg

SEQ ID NO: 1087923 - RNA, 21 nt, Human
ccagaaugccaccacugcccc

SEQ ID NO: 1087924 - RNA, 21 nt, Human
ccagaaugccaccacugcccc

SEQ ID NO: 1087925 - RNA, 18 nt, Human
ccagagcacauacaaauc

SEQ ID NO: 1087926 - RNA, 22 nt, Human
ccagcugauguuccacuuguuc

SEQ ID NO: 1087927 - RNA, 23 nt, Human
cccagaaugccaccacugccccu

SEQ ID NO: 1087928 - RNA, 23 nt, Human
cccaggcugggagugggugagac

SEQ ID NO: 1087929 - RNA, 24 nt, Human
ccccagaaugccaccacugccccu

SEQ ID NO: 1087930 - RNA, 27 nt, Human
ccccagaaugccaccacugccccugcc

SEQ ID NO: 1087931 - RNA, 18 nt, Human
ccccaggcugggaguggg

SEQ ID NO: 1087932 - RNA, 18 nt, Human
cccguggauaccuguugc

SEQ ID NO: 1087933 - RNA, 22 nt, Human
cccguggauaccuguugcugaa

SEQ ID NO: 1087934 - RNA, 25 nt, Human
ccucuacaucugagugucccccaaa

SEQ ID NO: 1087935 - RNA, 23 nt, Human
ccucuagcucccuuucgggggcc

SEQ ID NO: 1087936 - RNA, 18 nt, Human
ccugccccgggacaggcc

SEQ ID NO: 1087937 - RNA, 22 nt, Human
cuaaaggaacuacaauaguaca

SEQ ID NO: 1087938 - RNA, 21 nt, Human
cucccaucaccaauacacaga

SEQ ID NO: 1087939 - RNA, 18 nt, Human
cucuacaucugagugucc

SEQ ID NO: 1087940 - RNA, 21 nt, Human
cugcaaugaauguugcagacg

SEQ ID NO: 1087941 - RNA, 22 nt, Human
cugccauuuguuuuccuguucc

SEQ ID NO: 1087942 - RNA, 22 nt, Human
cuuaaacuauaaauuagaaaca

SEQ ID NO: 1087943 - RNA, 22 nt, Human
cuucuuccccaggcugggagug

SEQ ID NO: 1087944 - RNA, 19 nt, Human
gagcacauacaaauccuaa

SEQ ID NO: 1087945 - RNA, 19 nt, Human
gagcccagagcacauacaa

SEQ ID NO: 1087946 - RNA, 21 nt, Human
gaguuucuucugccaucgcag

SEQ ID NO: 1087947 - RNA, 19 nt, Human
gcaacagaacaaaugaaac

SEQ ID NO: 1087948 - RNA, 24 nt, Human
gcacugaucaacaccuccagucac

SEQ ID NO: 1087949 - RNA, 21 nt, Human
gcucccuuucggcuuucuguu

SEQ ID NO: 1087950 - RNA, 20 nt, Human
gcugccauuuguuuuccugu

SEQ ID NO: 1087951 - RNA, 26 nt, Human
gcuggaacaccagggcuguuucucug

SEQ ID NO: 1087952 - RNA, 21 nt, Human
ggaugcugccauuuguuuucc

SEQ ID NO: 1087953 - RNA, 19 nt, Human
ggccagauccuuggacucu

SEQ ID NO: 1087954 - RNA, 19 nt, Human
ggggaugggguggacucug

SEQ ID NO: 1087955 - RNA, 22 nt, Human
gggggaugggguggacucugga

SEQ ID NO: 1087956 - RNA, 23 nt, Human
guggggagggaggcgggcuuggg

SEQ ID NO: 1087957 - RNA, 25 nt, Human
uaaaaacacauggcagccuauucca

SEQ ID NO: 1087958 - RNA, 21 nt, Human
uaaaggaacuacaauaguaca

SEQ ID NO: 1087959 - RNA, 22 nt, Human
uaaauuagaaacacaaauaauc

SEQ ID NO: 1087960 - RNA, 21 nt, Human
uaagaagaaugccaaccagug

SEQ ID NO: 1087961 - RNA, 19 nt, Human
uacaaaguauuaaauagug

SEQ ID NO: 1087962 - RNA, 23 nt, Human
uacaaauccuaaaggaacuacaa

SEQ ID NO: 1087963 - RNA, 19 nt, Human
uacauuaagaagaaugcca

SEQ ID NO: 1087964 - RNA, 24 nt, Human
uagaaacacaaauaaucauaagug

SEQ ID NO: 1087965 - RNA, 23 nt, Human
uagcagaugauguagggcucucc

SEQ ID NO: 1087966 - RNA, 24 nt, Human
uagcucccuuucggcuuucuguuu

SEQ ID NO: 1087967 - RNA, 18 nt, Human
uaggaagaggaagacaga

SEQ ID NO: 1087968 - RNA, 21 nt, Human
uaguuuugugcaaauaguggg

SEQ ID NO: 1087969 - RNA, 23 nt, Human
uccccagaaugccaccacugccc

SEQ ID NO: 1087970 - RNA, 18 nt, Human
uccccaggcugggagugg

SEQ ID NO: 1087971 - RNA, 23 nt, Human
ucccccaaaauguuauuacuccc

SEQ ID NO: 1087972 - RNA, 26 nt, Human
uccuguaggaagaggaagacagagau

SEQ ID NO: 1087973 - RNA, 24 nt, Human
ucgcgagcaaacaaagaaaucaug

SEQ ID NO: 1087974 - RNA, 22 nt, Human
ucggccuuuaaacaacucuaaa

SEQ ID NO: 1087975 - RNA, 23 nt, Human
ucuaaccaggcagaggcagagau

SEQ ID NO: 1087976 - RNA, 22 nt, Human
ucucugccaauauucuuuuaac

SEQ ID NO: 1087977 - RNA, 20 nt, Human
ucucuggauuugaaccucua

SEQ ID NO: 1087978 - RNA, 24 nt, Human
ucuggggggugagccuucuucccc

SEQ ID NO: 1087979 - RNA, 28 nt, Human
ugaacucccaccacguaagggcaaacuc

SEQ ID NO: 1087980 - RNA, 21 nt, Human
ugaagagcucacugugauuaa

SEQ ID NO: 1087981 - RNA, 24 nt, Human
ugaauauacaugcugcaauaacau

SEQ ID NO: 1087982 - RNA, 21 nt, Human
ugacagcagagagagcccgcu

SEQ ID NO: 1087983 - RNA, 22 nt, Human
ugagagaacguuucguguggua

SEQ ID NO: 1087984 - RNA, 21 nt, Human
ugagggaaaggcuguuuccag

SEQ ID NO: 1087985 - RNA, 21 nt, Human
ugaguggcaaccaccagaagu

SEQ ID NO: 1087986 - RNA, 20 nt, Human
ugaucaacaccuccagucac

SEQ ID NO: 1087987 - RNA, 18 nt, Human
ugauguagggcucucccc

SEQ ID NO: 1087988 - RNA, 21 nt, Human
ugccaccacugccccugcccc

SEQ ID NO: 1087989 - RNA, 23 nt, Human
ugccccugccccgggacaggccc

SEQ ID NO: 1087990 - RNA, 23 nt, Human
uggacucuggggggugagccuuc

SEQ ID NO: 1087991 - RNA, 18 nt, Human
uggcaacagaacaaauga

SEQ ID NO: 1087992 - RNA, 23 nt, Human
ugggagugggugagacgagacuc

SEQ ID NO: 1087993 - RNA, 22 nt, Human
uggggagggaggcgggcuuggg

SEQ ID NO: 1087994 - RNA, 23 nt, Human
uggggggugagccuucuucccca

SEQ ID NO: 1087995 - RNA, 18 nt, Human
uuuccaguucucggccuu

SEQ ID NO: 1087996 - RNA, 18 nt, Human
aagcucccccugguuucc

SEQ ID NO: 1087997 - RNA, 19 nt, Human
aagcucccccugguuuccc

SEQ ID NO: 1087998 - RNA, 20 nt, Human
acuggaagaacgugguugcc

SEQ ID NO: 1087999 - RNA, 23 nt, Human
auccugcucugccagcaucuuca

SEQ ID NO: 1088000 - RNA, 20 nt, Human
auucuuaucguccugcagcc

SEQ ID NO: 1088001 - RNA, 18 nt, Human
cagcugcuggcacugccu

SEQ ID NO: 1088002 - RNA, 21 nt, Human
cccuaaauggccgcaauaagu

SEQ ID NO: 1088003 - RNA, 20 nt, Human
cccugccgaagcucccccug

SEQ ID NO: 1088004 - RNA, 22 nt, Human
ccguuuaauagacuccagcugc

SEQ ID NO: 1088005 - RNA, 18 nt, Human
ccuagcccagcucccagc

SEQ ID NO: 1088006 - RNA, 20 nt, Human
ccugguaggcuucaucuucc

SEQ ID NO: 1088007 - RNA, 20 nt, Human
cguguuauucuuuccuacau

SEQ ID NO: 1088008 - RNA, 21 nt, Human
cucucugcaggcccugccgaa

SEQ ID NO: 1088009 - RNA, 23 nt, Human
cugcuggcacugccuucugaguu

SEQ ID NO: 1088010 - RNA, 22 nt, Human
cugguccauucuucagcuucuu

SEQ ID NO: 1088011 - RNA, 19 nt, Human
cuugaauagagacgacagc

SEQ ID NO: 1088012 - RNA, 25 nt, Human
gagaauaucuuaugcuuucuucagc

SEQ ID NO: 1088013 - RNA, 19 nt, Human
gcaggcccugccgaagcuc

SEQ ID NO: 1088014 - RNA, 20 nt, Human
ggcaaagguugggggccuag

SEQ ID NO: 1088015 - RNA, 19 nt, Human
ggcaaguacacuaggcucu

SEQ ID NO: 1088016 - RNA, 20 nt, Human
gggggccuagcccagcuccc

SEQ ID NO: 1088017 - RNA, 22 nt, Human
guugcaaucugagccaaugauu

SEQ ID NO: 1088018 - RNA, 22 nt, Human
uaauagacuccagcugcuggca

SEQ ID NO: 1088019 - RNA, 21 nt, Human
uagcccagcucccagcggcaa

SEQ ID NO: 1088020 - RNA, 21 nt, Human
uaggcuucaucuuccucuugg

SEQ ID NO: 1088021 - RNA, 24 nt, Human
ucacuuccgaauucuuaucguccu

SEQ ID NO: 1088022 - RNA, 23 nt, Human
ucgcuuguccucucugcaggccc

SEQ ID NO: 1088023 - RNA, 19 nt, Human
ucugaauacugugaugcug

SEQ ID NO: 1088024 - RNA, 24 nt, Human
ugaguucuuucacuuccgaauucu

SEQ ID NO: 1088025 - RNA, 23 nt, Human
ugccccguuuaauagacuccagc

SEQ ID NO: 1088026 - RNA, 21 nt, Human
ugccuucugaguucuuucacu

SEQ ID NO: 1088027 - RNA, 21 nt, Human
ugcuggcacugccuucugagu

SEQ ID NO: 1088028 - RNA, 23 nt, Human
uuacaacauccugcucugccagc

SEQ ID NO: 1088029 - RNA, 19 nt, Human
uucagcuucuuucuccagg

SEQ ID NO: 1088030 - RNA, 23 nt, Human
uugcacugauccuuucuacucug

SEQ ID NO: 1088031 - RNA, 24 nt, Human
uuuucaguuugcuugcaguauuuc

SEQ ID NO: 1088032 - RNA, 21 nt, Human
aaacaucccuguggguggacc

SEQ ID NO: 1088033 - RNA, 18 nt, Human
aaccugcguuguucaagg

SEQ ID NO: 1088034 - RNA, 22 nt, Human
aggaagacauggaggaaguggg

SEQ ID NO: 1088035 - RNA, 25 nt, Human
aggaggaggggcuggucuugcugcc

SEQ ID NO: 1088036 - RNA, 24 nt, Human
aggcaggagaggcagggacacuug

SEQ ID NO: 1088037 - RNA, 27 nt, Human
aggcaggagaggcagggacacuugguc

SEQ ID NO: 1088038 - RNA, 19 nt, Human
aguggcugaggaggagggg

SEQ ID NO: 1088039 - RNA, 20 nt, Human
aguggcugaggaggaggggc

SEQ ID NO: 1088040 - RNA, 21 nt, Human
aguggcugaggaggaggggcu

SEQ ID NO: 1088041 - RNA, 23 nt, Human
caagaaggcguaccugugugaca

SEQ ID NO: 1088042 - RNA, 21 nt, Human
cagggacacuugguauaacuc

SEQ ID NO: 1088043 - RNA, 24 nt, Human
cagggacacuugguauaacucuga

SEQ ID NO: 1088044 - RNA, 22 nt, Human
cauguaaacaaugguugaauga

SEQ ID NO: 1088045 - RNA, 24 nt, Human
ccugugugacagcaccuguaagcc

SEQ ID NO: 1088046 - RNA, 22 nt, Human
cggcaaggaccuuccuccaaga

SEQ ID NO: 1088047 - RNA, 22 nt, Human
cguugucuucauguugaguggc

SEQ ID NO: 1088048 - RNA, 22 nt, Human
cucaggguggcagagaggaaga

SEQ ID NO: 1088049 - RNA, 21 nt, Human
gaaggagcaagggagccuaag

SEQ ID NO: 1088050 - RNA, 23 nt, Human
gacauggaggaagugggaaggga

SEQ ID NO: 1088051 - RNA, 23 nt, Human
gaggaggggcuggucuugcugcc

SEQ ID NO: 1088052 - RNA, 23 nt, Human
ggaagggaggcaggagaggcagg

SEQ ID NO: 1088053 - RNA, 19 nt, Human
ggguaaaaguaacuugaaa

SEQ ID NO: 1088054 - RNA, 19 nt, Human
uaacuugaaaaguuggugg

SEQ ID NO: 1088055 - RNA, 19 nt, Human
ucccuguggguggaccugc

SEQ ID NO: 1088056 - RNA, 18 nt, Human
ucuucauguugaguggcu

SEQ ID NO: 1088057 - RNA, 23 nt, Human
ugaaaaguuggugggcagauggc

SEQ ID NO: 1088058 - RNA, 22 nt, Human
ugacagcaccuguaagccaggu

SEQ ID NO: 1088059 - RNA, 25 nt, Human
ugaguggcugaggaggaggggcugg

SEQ ID NO: 1088060 - RNA, 26 nt, Human
uggaaguggauuaucauagaagucuu

SEQ ID NO: 1088061 - RNA, 19 nt, Human
uggaggaagugggaaggga

SEQ ID NO: 1088062 - RNA, 21 nt, Human
uggaggaagugggaagggagg

SEQ ID NO: 1088063 - RNA, 20 nt, Human
uggcagagaggaagacaugg

SEQ ID NO: 1088064 - RNA, 21 nt, Human
uggcagagaggaagacaugga

SEQ ID NO: 1088065 - RNA, 30 nt, Human
ugucauuaagaauaucauaagagaaagcaa

SEQ ID NO: 1088066 - RNA, 22 nt, Human
uguucaaggguccacugugcuu

SEQ ID NO: 1088067 - RNA, 19 nt, Human
uugaagguggguaaaagua

SEQ ID NO: 1088068 - RNA, 22 nt, Human
uuuaucacaucaguaauucuug

SEQ ID NO: 1088069 - RNA, 20 nt, Human
aagaagcaggagagacagag

SEQ ID NO: 1088070 - RNA, 23 nt, Human
aagaagcaggagagacagagcca

SEQ ID NO: 1088071 - RNA, 22 nt, Human
aagcaggagagacagaggggac

SEQ ID NO: 1088072 - RNA, 27 nt, Human
agacagagccauaaaaacaaagagaga

SEQ ID NO: 1088073 - RNA, 21 nt, Human
agagaagaauguuguaaggag

SEQ ID NO: 1088074 - RNA, 20 nt, Human
agagacagagccauaaaaac

SEQ ID NO: 1088075 - RNA, 25 nt, Human
agccauaaaaacaaagagagaagaa

SEQ ID NO: 1088076 - RNA, 20 nt, Human
agguggcgcuggcuggagac

SEQ ID NO: 1088077 - RNA, 19 nt, Human
aguaaugaaaaaggacgag

SEQ ID NO: 1088078 - RNA, 19 nt, Human
caagacauuuauuugaguu

SEQ ID NO: 1088079 - RNA, 19 nt, Human
caggagagacagagccaua

SEQ ID NO: 1088080 - RNA, 21 nt, Human
cauccaaaauccauuuuuucu

SEQ ID NO: 1088081 - RNA, 19 nt, Human
cccauguauuaaacaaggu

SEQ ID NO: 1088082 - RNA, 18 nt, Human
cuggcuggagacaugcug

SEQ ID NO: 1088083 - RNA, 18 nt, Human
cuuccugacccgcucuuc

SEQ ID NO: 1088084 - RNA, 21 nt, Human
cuucuugcuguuguuuuuguc

SEQ ID NO: 1088085 - RNA, 20 nt, Human
gaaauaauaaauggaaaaau

SEQ ID NO: 1088086 - RNA, 18 nt, Human
gaaugugugaggcucuca

SEQ ID NO: 1088087 - RNA, 20 nt, Human
gaggauaguguauuuucagg

SEQ ID NO: 1088088 - RNA, 23 nt, Human
gaguucccauguauuaaacaagg

SEQ ID NO: 1088089 - RNA, 18 nt, Human
ggaaguguuucuucugcu

SEQ ID NO: 1088090 - RNA, 23 nt, Human
uacacagucuuguuuuaucugug

SEQ ID NO: 1088091 - RNA, 24 nt, Human
uacagaaugaauuucagugaguuc

SEQ ID NO: 1088092 - RNA, 18 nt, Human
uagagaucacaggcuucc

SEQ ID NO: 1088093 - RNA, 20 nt, Human
ucccauguauuaaacaaggu

SEQ ID NO: 1088094 - RNA, 22 nt, Human
ucugauagcuggaggauagugu

SEQ ID NO: 1088095 - RNA, 22 nt, Human
ugaaaacuccaagaugggaucu

SEQ ID NO: 1088096 - RNA, 21 nt, Human
ugaaagcuuuaaaacuuugug

SEQ ID NO: 1088097 - RNA, 23 nt, Human
ugaaggaaguggaagccagacca

SEQ ID NO: 1088098 - RNA, 23 nt, Human
ugaagugaaggaaguggaagcca

SEQ ID NO: 1088099 - RNA, 19 nt, Human
ugaguagaucucaauauaa

SEQ ID NO: 1088100 - RNA, 25 nt, Human
ugcaaacaaaauucucugugucaaa

SEQ ID NO: 1088101 - RNA, 20 nt, Human
ugcugugcucaucuuccuga

SEQ ID NO: 1088102 - RNA, 23 nt, Human
uggaagccagaccacaaugguug

SEQ ID NO: 1088103 - RNA, 20 nt, Human
uggcagagccauguugguga

SEQ ID NO: 1088104 - RNA, 19 nt, Human
uggccuagagaucacaggc

SEQ ID NO: 1088105 - RNA, 18 nt, Human
uggcgcuggcuggagaca

SEQ ID NO: 1088106 - RNA, 22 nt, Human
ugguauaaguuuaauuccugac

SEQ ID NO: 1088107 - RNA, 19 nt, Human
uguauuaaacaagguggcg

SEQ ID NO: 1088108 - RNA, 22 nt, Human
uuacauaugagaggcauccaaa

SEQ ID NO: 1088109 - RNA, 19 nt, Human
uugaagaaugaauguaaug

SEQ ID NO: 1088110 - RNA, 21 nt, Human
uugaaugugugaggcucucau

SEQ ID NO: 1088111 - RNA, 23 nt, Human
uuguaaggagggcuuaacgacca

SEQ ID NO: 1088112 - RNA, 25 nt, Human
uuucuucuugcuguuguuuuuguca

SEQ ID NO: 1088113 - RNA, 23 nt, Human
aaaauaaaaaguugaauugcaga

SEQ ID NO: 1088114 - RNA, 18 nt, Human
aaagugcugagauucuac

SEQ ID NO: 1088115 - RNA, 20 nt, Human
aaagugcugagauucuacua

SEQ ID NO: 1088116 - RNA, 24 nt, Human
aacacgacugacagccagaaggga

SEQ ID NO: 1088117 - RNA, 26 nt, Human
aaccguaagcaacacgacugacagcc

SEQ ID NO: 1088118 - RNA, 20 nt, Human
aagcaaaaagcaaauguuga

SEQ ID NO: 1088119 - RNA, 29 nt, Human
aagcaaaaagcaaauguugaagggacccc

SEQ ID NO: 1088120 - RNA, 21 nt, Human
agaaaccguaagcaacacgac

SEQ ID NO: 1088121 - RNA, 18 nt, Human
caaagugcugagauucua

SEQ ID NO: 1088122 - RNA, 19 nt, Human
cacaagcaaaaagcaaaug

SEQ ID NO: 1088123 - RNA, 19 nt, Human
cacuaccccagagucgggg

SEQ ID NO: 1088124 - RNA, 20 nt, Human
caucaagcuguuucucucua

SEQ ID NO: 1088125 - RNA, 24 nt, Human
ccagagucgggggucgggacacag

SEQ ID NO: 1088126 - RNA, 22 nt, Human
ccgaugguacggaugugccaag

SEQ ID NO: 1088127 - RNA, 22 nt, Human
cuaaaguaacaaagaaaccgua

SEQ ID NO: 1088128 - RNA, 20 nt, Human
cuacuaccuaaaguaacaaa

SEQ ID NO: 1088129 - RNA, 22 nt, Human
gguggugaggagccauggggag

SEQ ID NO: 1088130 - RNA, 25 nt, Human
uaaaguaacaaagaaaccguaagca

SEQ ID NO: 1088131 - RNA, 24 nt, Human
uaagagguuuuuaguuuuuguuuu

SEQ ID NO: 1088132 - RNA, 22 nt, Human
uaccuaaaguaacaaagaaacc

SEQ ID NO: 1088133 - RNA, 18 nt, Human
uccaggcagugggcuaau

SEQ ID NO: 1088134 - RNA, 19 nt, Human
ugacagccagaagggaaca

SEQ ID NO: 1088135 - RNA, 23 nt, Human
ugagaauaugaaacaaagugcug

SEQ ID NO: 1088136 - RNA, 23 nt, Human
ugggcaaaaugacuacucagugg

SEQ ID NO: 1088137 - RNA, 18 nt, Human
uugaauugcagaaaagcu

SEQ ID NO: 1088138 - RNA, 21 nt, Human
caaggcacauuuggcgggugc

SEQ ID NO: 1088139 - RNA, 22 nt, Human
ccauucagcuuuucuauuuguc

SEQ ID NO: 1088140 - RNA, 27 nt, Human
ccuccagagcagccucaggcuuagcuu

SEQ ID NO: 1088141 - RNA, 21 nt, Human
ccugcaacaagucuuccuggg

SEQ ID NO: 1088142 - RNA, 21 nt, Human
cuucccgaauaucagcuccag

SEQ ID NO: 1088143 - RNA, 23 nt, Human
gaauuaaagagucauugucucca

SEQ ID NO: 1088144 - RNA, 23 nt, Human
ggccaucaguccuguccgggucc

SEQ ID NO: 1088145 - RNA, 18 nt, Human
gucccgagcccuugacuc

SEQ ID NO: 1088146 - RNA, 24 nt, Human
uaccugcaacaagucuuccuggga

SEQ ID NO: 1088147 - RNA, 18 nt, Human
ucaguccuguccgggucc

SEQ ID NO: 1088148 - RNA, 19 nt, Human
ucucugaggccaucagucc

SEQ ID NO: 1088149 - RNA, 21 nt, Human
ucugcugggcuccggagucgc

SEQ ID NO: 1088150 - RNA, 19 nt, Human
ugaagggcuaauagucuag

SEQ ID NO: 1088151 - RNA, 24 nt, Human
uggcaaggcacauuuggcgggugc

SEQ ID NO: 1088152 - RNA, 23 nt, Human
uggccgcucgcuucuccggcccu

SEQ ID NO: 1088153 - RNA, 18 nt, Human
ugggaagcgaugagucag

SEQ ID NO: 1088154 - RNA, 19 nt, Human
ugucacugaaaauucaggc

SEQ ID NO: 1088155 - RNA, 22 nt, Human
uguccggguccguaguccuggc

SEQ ID NO: 1088156 - RNA, 27 nt, Human
aagcaaaucucuuuccuccacaaguuu

SEQ ID NO: 1088157 - RNA, 20 nt, Human
acaaguuucaugccucccuu

SEQ ID NO: 1088158 - RNA, 28 nt, Human
aggcaaacggugaggaaaaaacugaagc

SEQ ID NO: 1088159 - RNA, 18 nt, Human
aucaaguacuauucagcc

SEQ ID NO: 1088160 - RNA, 23 nt, Human
cacuucccuucuauugcucaagg

SEQ ID NO: 1088161 - RNA, 24 nt, Human
cuacaggcucggaucccacuuccc

SEQ ID NO: 1088162 - RNA, 23 nt, Human
ggaaagaugacguggugacagaa

SEQ ID NO: 1088163 - RNA, 21 nt, Human
gugaggaaaaaacugaagcaa

SEQ ID NO: 1088164 - RNA, 23 nt, Human
guuucaugccucccuucuacagg

SEQ ID NO: 1088165 - RNA, 24 nt, Human
uaauuuaucaauuaacuuuucuua

SEQ ID NO: 1088166 - RNA, 22 nt, Human
uccccaaauggucaaauuuguu

SEQ ID NO: 1088167 - RNA, 19 nt, Human
ucuauuacagagcuuuuua

SEQ ID NO: 1088168 - RNA, 18 nt, Human
ugaggaaaaaacugaagc

SEQ ID NO: 1088169 - RNA, 25 nt, Human
ugucuugucuuccugauccuucccu

SEQ ID NO: 1088170 - RNA, 22 nt, Human
uuaauccuggaaagaugacgug

SEQ ID NO: 1088171 - RNA, 22 nt, Human
aaaaacacgugcccuguugccc

SEQ ID NO: 1088172 - RNA, 22 nt, Human
aaaaauaggggagagagggugc

SEQ ID NO: 1088173 - RNA, 19 nt, Human
aaaacacgcacuccaacca

SEQ ID NO: 1088174 - RNA, 18 nt, Human
aaaacggaagccuugugc

SEQ ID NO: 1088175 - RNA, 19 nt, Human
aaaauguuuuauccugaua

SEQ ID NO: 1088176 - RNA, 20 nt, Human
aaacagggcuacaauuuuuc

SEQ ID NO: 1088177 - RNA, 23 nt, Human
aaagccuauugaaacacucauug

SEQ ID NO: 1088178 - RNA, 25 nt, Human
aacugcagagaacuccagaaguuuc

SEQ ID NO: 1088179 - RNA, 20 nt, Human
aagacucucccaagcugugg

SEQ ID NO: 1088180 - RNA, 25 nt, Human
aagcgauccuccugccucagccucc

SEQ ID NO: 1088181 - RNA, 23 nt, Human
aauaaaauuugaacaagcuucug

SEQ ID NO: 1088182 - RNA, 21 nt, Human
aauaaccggccaaugaaaaaa

SEQ ID NO: 1088183 - RNA, 21 nt, Human
aaugucuauuuaaugcacagc

SEQ ID NO: 1088184 - RNA, 22 nt, Human
acaauucacccuucucucuccu

SEQ ID NO: 1088185 - RNA, 18 nt, Human
acacgcacacaagugugu

SEQ ID NO: 1088186 - RNA, 21 nt, Human
acacgcacacaaguguguggu

SEQ ID NO: 1088187 - RNA, 24 nt, Human
acacugcccagacccguuucuaaa

SEQ ID NO: 1088188 - RNA, 19 nt, Human
acagcugggacuucaagua

SEQ ID NO: 1088189 - RNA, 27 nt, Human
acaggacauagaaaauguuccguuucg

SEQ ID NO: 1088190 - RNA, 27 nt, Human
acauucugaauaaaaauguuuacagaa

SEQ ID NO: 1088191 - RNA, 19 nt, Human
accagcaucucaagggagu

SEQ ID NO: 1088192 - RNA, 19 nt, Human
accagcaucucaagggagu

SEQ ID NO: 1088193 - RNA, 22 nt, Human
accgaaacccuggagacugcaa

SEQ ID NO: 1088194 - RNA, 22 nt, Human
accuaguaacaggcucucuuga

SEQ ID NO: 1088195 - RNA, 21 nt, Human
acuacucauaaacuagggaug

SEQ ID NO: 1088196 - RNA, 24 nt, Human
acugcaauuuaacaaaacagggcu

SEQ ID NO: 1088197 - RNA, 22 nt, Human
acugcagccuugaacucacaca

SEQ ID NO: 1088198 - RNA, 20 nt, Human
agaauccuucccaaagacac

SEQ ID NO: 1088199 - RNA, 18 nt, Human
agagggcugaaaggaggg

SEQ ID NO: 1088200 - RNA, 18 nt, Human
agcaguaaauauuaguuu

SEQ ID NO: 1088201 - RNA, 20 nt, Human
agccccgcccagagccugcu

SEQ ID NO: 1088202 - RNA, 21 nt, Human
aggcauaagagacacaaagcc

SEQ ID NO: 1088203 - RNA, 18 nt, Human
aggcccuuggcugugugc

SEQ ID NO: 1088204 - RNA, 23 nt, Human
aggugcuagaaugucauuaugcu

SEQ ID NO: 1088205 - RNA, 22 nt, Human
aggugugcuaggaagugguaga

SEQ ID NO: 1088206 - RNA, 24 nt, Human
aguaggaaccgaaacccuggagac

SEQ ID NO: 1088207 - RNA, 18 nt, Human
auaccucacugcagccuu

SEQ ID NO: 1088208 - RNA, 19 nt, Human
aucaguuucuaucugucag

SEQ ID NO: 1088209 - RNA, 18 nt, Human
augcugcugaacauuucu

SEQ ID NO: 1088210 - RNA, 18 nt, Human
augcuucuggccuguucu

SEQ ID NO: 1088211 - RNA, 21 nt, Human
auguugcuaccucuguugccu

SEQ ID NO: 1088212 - RNA, 22 nt, Human
auuaugcugccauacucucagg

SEQ ID NO: 1088213 - RNA, 23 nt, Human
auucugguuaauggacuuucuac

SEQ ID NO: 1088214 - RNA, 20 nt, Human
auuucuggcccauuuccccu

SEQ ID NO: 1088215 - RNA, 21 nt, Human
caaaaugaacgaauacucuuc

SEQ ID NO: 1088216 - RNA, 19 nt, Human
caaaugcuuaauauguucc

SEQ ID NO: 1088217 - RNA, 20 nt, Human
caaauuuucuaaaguaaaac

SEQ ID NO: 1088218 - RNA, 18 nt, Human
caacaugaaugcaaacau

SEQ ID NO: 1088219 - RNA, 22 nt, Human
caagcgauccuccugccucagc

SEQ ID NO: 1088220 - RNA, 27 nt, Human
caagcgauccuccugccucagccuccc

SEQ ID NO: 1088221 - RNA, 18 nt, Human
cacuuugccaguacuuac

SEQ ID NO: 1088222 - RNA, 22 nt, Human
cagacacagaaacuacacucga

SEQ ID NO: 1088223 - RNA, 24 nt, Human
cagccucccaaacagcugggacuu

SEQ ID NO: 1088224 - RNA, 22 nt, Human
cauucaaaaaccuaguaacagg

SEQ ID NO: 1088225 - RNA, 22 nt, Human
ccaaaagagcaggaucacaugc

SEQ ID NO: 1088226 - RNA, 23 nt, Human
ccagugugcuggaugcaaugcau

SEQ ID NO: 1088227 - RNA, 19 nt, Human
cccauaaagucuaaucuuu

SEQ ID NO: 1088228 - RNA, 19 nt, Human
cccccgccccccuccggcc

SEQ ID NO: 1088229 - RNA, 24 nt, Human
ccccgcacgacgggcccgccgccu

SEQ ID NO: 1088230 - RNA, 21 nt, Human
cccguuucuaaaaaucagagg

SEQ ID NO: 1088231 - RNA, 21 nt, Human
ccgcccagagccugcuccgcu

SEQ ID NO: 1088232 - RNA, 21 nt, Human
ccgccccccuccggccucagg

SEQ ID NO: 1088233 - RNA, 18 nt, Human
ccuacucuuauucccccg

SEQ ID NO: 1088234 - RNA, 20 nt, Human
ccuagacgaguucgacaggg

SEQ ID NO: 1088235 - RNA, 22 nt, Human
ccucacauacauacaaugacac

SEQ ID NO: 1088236 - RNA, 23 nt, Human
ccucacugcagccuugaacucac

SEQ ID NO: 1088237 - RNA, 18 nt, Human
ccuuuggugacccccgcc

SEQ ID NO: 1088238 - RNA, 21 nt, Human
cgcccagagccugcuccgcuc

SEQ ID NO: 1088239 - RNA, 21 nt, Human
cguggccacaauguugcuacc

SEQ ID NO: 1088240 - RNA, 26 nt, Human
cuaucaaaaaagaaaacacgcacucc

SEQ ID NO: 1088241 - RNA, 24 nt, Human
cucaagcgauccuccugccucagc

SEQ ID NO: 1088242 - RNA, 21 nt, Human
cucacagcaaguaaguaacag

SEQ ID NO: 1088243 - RNA, 19 nt, Human
cucgggagccccgcccaga

SEQ ID NO: 1088244 - RNA, 23 nt, Human
cugccucagccucccaaacagcu

SEQ ID NO: 1088245 - RNA, 21 nt, Human
cugcugaacauuucuggccca

SEQ ID NO: 1088246 - RNA, 20 nt, Human
cuggaaagcaaccagcaucu

SEQ ID NO: 1088247 - RNA, 25 nt, Human
cuggagacccccucuaacauguucc

SEQ ID NO: 1088248 - RNA, 19 nt, Human
cuggagauucuucacacug

SEQ ID NO: 1088249 - RNA, 20 nt, Human
cuggauauuuucuauggucc

SEQ ID NO: 1088250 - RNA, 24 nt, Human
cuucaugcauggaaaagacucucc

SEQ ID NO: 1088251 - RNA, 24 nt, Human
cuugcucuguugcucaggcuggag

SEQ ID NO: 1088252 - RNA, 20 nt, Human
cuuuauacaauucacccuuc

SEQ ID NO: 1088253 - RNA, 21 nt, Human
cuuuggugacccccgcccccc

SEQ ID NO: 1088254 - RNA, 28 nt, Human
gaaagcaaccagcaucucaacuaacgag

SEQ ID NO: 1088255 - RNA, 21 nt, Human
gaaugcuuauuucugaagucu

SEQ ID NO: 1088256 - RNA, 18 nt, Human
gacacagaaacuacacuc

SEQ ID NO: 1088257 - RNA, 18 nt, Human
gagccucaguuucuuuag

SEQ ID NO: 1088258 - RNA, 23 nt, Human
gaugauguguaucagacacuuga

SEQ ID NO: 1088259 - RNA, 23 nt, Human
gaugggaugaugauuuucuuugu

SEQ ID NO: 1088260 - RNA, 23 nt, Human
gccuacucuuauucccccagaua

SEQ ID NO: 1088261 - RNA, 24 nt, Human
gcgauccuccugccucagccuccc

SEQ ID NO: 1088262 - RNA, 18 nt, Human
gcugaacauuucuggccc

SEQ ID NO: 1088263 - RNA, 19 nt, Human
gcugcugaacauuucuggc

SEQ ID NO: 1088264 - RNA, 20 nt, Human
gcuucuggccuguucucuag

SEQ ID NO: 1088265 - RNA, 19 nt, Human
ggaaaagacucucccaagc

SEQ ID NO: 1088266 - RNA, 27 nt, Human
ggaaaagacucucccaagcugugguua

SEQ ID NO: 1088267 - RNA, 20 nt, Human
ggacguuaggacaaggcacu

SEQ ID NO: 1088268 - RNA, 23 nt, Human
ggagauucuucacacuggugaug

SEQ ID NO: 1088269 - RNA, 22 nt, Human
ggaguacaguaucaccaucaac

SEQ ID NO: 1088270 - RNA, 18 nt, Human
ggauuugaucaucuccaa

SEQ ID NO: 1088271 - RNA, 19 nt, Human
ggccugaggacagccugag

SEQ ID NO: 1088272 - RNA, 21 nt, Human
gggagagaggcucaaaaacac

SEQ ID NO: 1088273 - RNA, 20 nt, Human
gguccaggugcuagaauguc

SEQ ID NO: 1088274 - RNA, 20 nt, Human
ggucuuggaaaugacuaaca

SEQ ID NO: 1088275 - RNA, 19 nt, Human
guccaggugcuagaauguc

SEQ ID NO: 1088276 - RNA, 18 nt, Human
gugaugccaaagugccuu

SEQ ID NO: 1088277 - RNA, 18 nt, Human
guggccacaauguugcua

SEQ ID NO: 1088278 - RNA, 22 nt, Human
uaaaaagaaagucugauuaucu

SEQ ID NO: 1088279 - RNA, 25 nt, Human
uaaaacuaacaagaaauuauuauuu

SEQ ID NO: 1088280 - RNA, 18 nt, Human
uaaagggauuggauuuga

SEQ ID NO: 1088281 - RNA, 26 nt, Human
uaagcuuuuauaacuuuuagcaguuu

SEQ ID NO: 1088282 - RNA, 21 nt, Human
uacacacugucaggcuccacu

SEQ ID NO: 1088283 - RNA, 21 nt, Human
uacaguaucaccaucauaccu

SEQ ID NO: 1088284 - RNA, 20 nt, Human
uaccacaacaugaaugcaaa

SEQ ID NO: 1088285 - RNA, 22 nt, Human
uaccacaacaugaaugcaaaca

SEQ ID NO: 1088286 - RNA, 22 nt, Human
uaccucacugcagccuugaacu

SEQ ID NO: 1088287 - RNA, 23 nt, Human
uaccucacugcagccuugaacuc

SEQ ID NO: 1088288 - RNA, 22 nt, Human
uaccuggcaagccuagguagcc

SEQ ID NO: 1088289 - RNA, 19 nt, Human
uagagggcuggaaucucau

SEQ ID NO: 1088290 - RNA, 18 nt, Human
uaggaaacacugacuccc

SEQ ID NO: 1088291 - RNA, 20 nt, Human
uaggaaacacugacucccau

SEQ ID NO: 1088292 - RNA, 18 nt, Human
uauaaagcauuuacaaca

SEQ ID NO: 1088293 - RNA, 23 nt, Human
uauagacaucuauuguugaccua

SEQ ID NO: 1088294 - RNA, 18 nt, Human
uaucaaaaaagaaaacac

SEQ ID NO: 1088295 - RNA, 19 nt, Human
uaucaaaaaagaaaacacg

SEQ ID NO: 1088296 - RNA, 19 nt, Human
uaucagacccacauauuug

SEQ ID NO: 1088297 - RNA, 21 nt, Human
uauccuguaaaaagaaagucu

SEQ ID NO: 1088298 - RNA, 22 nt, Human
uaucugaacaauaugauguguu

SEQ ID NO: 1088299 - RNA, 23 nt, Human
uaucugaacaauaugauguguua

SEQ ID NO: 1088300 - RNA, 21 nt, Human
ucaaguaugugccacuauacc

SEQ ID NO: 1088301 - RNA, 20 nt, Human
ucacauacauacaaugacac

SEQ ID NO: 1088302 - RNA, 19 nt, Human
ucacugcagccuugaacuc

SEQ ID NO: 1088303 - RNA, 23 nt, Human
ucacugcagccuugaacucacac

SEQ ID NO: 1088304 - RNA, 23 nt, Human
ucagaagauugguuaaauauuca

SEQ ID NO: 1088305 - RNA, 20 nt, Human
ucagccucccaaacagcugg

SEQ ID NO: 1088306 - RNA, 27 nt, Human
ucaguauuuugcaaagccuauugaaac

SEQ ID NO: 1088307 - RNA, 22 nt, Human
ucauaguaggaaccgaaacccu

SEQ ID NO: 1088308 - RNA, 24 nt, Human
uccaagaauccuucccaaagacac

SEQ ID NO: 1088309 - RNA, 18 nt, Human
uccaccauucaaugaggc

SEQ ID NO: 1088310 - RNA, 23 nt, Human
uccaggcccuuggcugugugcug

SEQ ID NO: 1088311 - RNA, 24 nt, Human
ucccaaacagcugggacuucaagu

SEQ ID NO: 1088312 - RNA, 19 nt, Human
ucccaaagacaccuggaga

SEQ ID NO: 1088313 - RNA, 24 nt, Human
uccuccugccucagccucccaaac

SEQ ID NO: 1088314 - RNA, 20 nt, Human
ucggggacuuugguuuauac

SEQ ID NO: 1088315 - RNA, 18 nt, Human
ucgguccaggugcuagaa

SEQ ID NO: 1088316 - RNA, 19 nt, Human
ucuaucaaaaaagaaaaca

SEQ ID NO: 1088317 - RNA, 24 nt, Human
ucuaucugucaggucaauuauucc

SEQ ID NO: 1088318 - RNA, 18 nt, Human
ucucacuccacgaggugu

SEQ ID NO: 1088319 - RNA, 21 nt, Human
ucuccaguguaguauauaaau

SEQ ID NO: 1088320 - RNA, 18 nt, Human
ucuccugcugaugaaaga

SEQ ID NO: 1088321 - RNA, 28 nt, Human
ucucuugaaugcacuagagcaguaaaua

SEQ ID NO: 1088322 - RNA, 24 nt, Human
ucuggagacccccucuaacauguu

SEQ ID NO: 1088323 - RNA, 24 nt, Human
ucuggagacccccucuaacauguu

SEQ ID NO: 1088324 - RNA, 20 nt, Human
ucuucaauugcuucaugcau

SEQ ID NO: 1088325 - RNA, 19 nt, Human
ucuugcucuguugcucagg

SEQ ID NO: 1088326 - RNA, 20 nt, Human
ucuugcucuguugcucaggc

SEQ ID NO: 1088327 - RNA, 23 nt, Human
ucuugcucuguugcucaggcugg

SEQ ID NO: 1088328 - RNA, 24 nt, Human
ucuugcucuguugcucaggcugga

SEQ ID NO: 1088329 - RNA, 19 nt, Human
ucuuggaaugcuuauuucu

SEQ ID NO: 1088330 - RNA, 25 nt, Human
ugaaacacaaucauacauucaaaaa

SEQ ID NO: 1088331 - RNA, 19 nt, Human
ugaaaggagggagagagaa

SEQ ID NO: 1088332 - RNA, 24 nt, Human
ugaacagaacauuuaacacagaag

SEQ ID NO: 1088333 - RNA, 19 nt, Human
ugaagucauacaaagcugc

SEQ ID NO: 1088334 - RNA, 20 nt, Human
ugaaugcaaacauuauaagc

SEQ ID NO: 1088335 - RNA, 20 nt, Human
ugacaugauugcaaauuugu

SEQ ID NO: 1088336 - RNA, 24 nt, Human
ugacccccgccccccuccggccuc

SEQ ID NO: 1088337 - RNA, 24 nt, Human
ugagccuacucuuauucccccaga

SEQ ID NO: 1088338 - RNA, 20 nt, Human
ugaggacagccugagucggu

SEQ ID NO: 1088339 - RNA, 18 nt, Human
ugaggcagagaacugccc

SEQ ID NO: 1088340 - RNA, 20 nt, Human
ugaucaucuccaaggccuuu

SEQ ID NO: 1088341 - RNA, 20 nt, Human
ugcagagaacuccagaaguu

SEQ ID NO: 1088342 - RNA, 23 nt, Human
ugcccagacccguuucuaaaaau

SEQ ID NO: 1088343 - RNA, 24 nt, Human
ugcccagacccguuucuaaaaauc

SEQ ID NO: 1088344 - RNA, 24 nt, Human
ugccucagccucccaaacagcugg

SEQ ID NO: 1088345 - RNA, 18 nt, Human
ugcgaaaaucugggaauu

SEQ ID NO: 1088346 - RNA, 18 nt, Human
uggaaagcaaccagcauc

SEQ ID NO: 1088347 - RNA, 23 nt, Human
uggaugcaaugcauucuacacaa

SEQ ID NO: 1088348 - RNA, 20 nt, Human
uggcagagcugggaguuuuc

SEQ ID NO: 1088349 - RNA, 18 nt, Human
uggcaggagaaguccuca

SEQ ID NO: 1088350 - RNA, 18 nt, Human
uggccaaggacaggggcc

SEQ ID NO: 1088351 - RNA, 24 nt, Human
ugggacuucaaguaugugccacua

SEQ ID NO: 1088352 - RNA, 18 nt, Human
ugggaugaugauuuucuu

SEQ ID NO: 1088353 - RNA, 21 nt, Human
uggugcagggacacgcacaca

SEQ ID NO: 1088354 - RNA, 20 nt, Human
ugguuuguuuuguuuucucc

SEQ ID NO: 1088355 - RNA, 20 nt, Human
ugguuuguuuuguuuucucc

SEQ ID NO: 1088356 - RNA, 20 nt, Human
uguaucagacacuugacugg

SEQ ID NO: 1088357 - RNA, 25 nt, Human
ugucuauuuucaaaauggucucaca

SEQ ID NO: 1088358 - RNA, 22 nt, Human
ugucuugcucuguugcucaggc

SEQ ID NO: 1088359 - RNA, 25 nt, Human
ugucuugcucuguugcucaggcugg

SEQ ID NO: 1088360 - RNA, 18 nt, Human
uguguuacuuuuccuauu

SEQ ID NO: 1088361 - RNA, 22 nt, Human
uguuuuguuuucuccaguguag

SEQ ID NO: 1088362 - RNA, 19 nt, Human
uuagaaaacacgccuucaa

SEQ ID NO: 1088363 - RNA, 21 nt, Human
uuaggaagcaaggauaaaggu

SEQ ID NO: 1088364 - RNA, 22 nt, Human
uucaagaguuuauacucauaaa

SEQ ID NO: 1088365 - RNA, 23 nt, Human
uucccugaguucauuuaagaaca

SEQ ID NO: 1088366 - RNA, 21 nt, Human
uuccugcauuucugacauuau

SEQ ID NO: 1088367 - RNA, 21 nt, Human
uucuacacaaccguggccaca

SEQ ID NO: 1088368 - RNA, 18 nt, Human
uucuaugguccaggcccu

SEQ ID NO: 1088369 - RNA, 21 nt, Human
uucucaucuuuaauauccugu

SEQ ID NO: 1088370 - RNA, 20 nt, Human
uucugucaacugagccuacu

SEQ ID NO: 1088371 - RNA, 20 nt, Human
uugacccauacuuaaaacaa

SEQ ID NO: 1088372 - RNA, 20 nt, Human
uugcaaauuuguugacagau

SEQ ID NO: 1088373 - RNA, 19 nt, Human
uugcucaggcuggaguaca

SEQ ID NO: 1088374 - RNA, 21 nt, Human
uugcucaggcuggaguacagu

SEQ ID NO: 1088375 - RNA, 24 nt, Human
uugcucaggcuggaguacaguauc

SEQ ID NO: 1088376 - RNA, 24 nt, Human
uugcucuguugcucaggcuggagu

SEQ ID NO: 1088377 - RNA, 26 nt, Human
uuggagucccagcgaagcugcugacc

SEQ ID NO: 1088378 - RNA, 20 nt, Human
uuuacacuuggaaaaauaga

SEQ ID NO: 1088379 - RNA, 22 nt, Human
uuucuaugguccaggcccuugg

SEQ ID NO: 1088380 - RNA, 26 nt, Human
uuucuugcaauauauggaguaagggu

SEQ ID NO: 1088381 - RNA, 23 nt, Human
uuugaacaagcuucuggaaaaau

SEQ ID NO: 1088382 - RNA, 19 nt, Human
uuuguuuuugagauuccug

SEQ ID NO: 1088383 - RNA, 22 nt, Human
uuuguuuuugagauuccugucu

SEQ ID NO: 1088384 - RNA, 19 nt, Human
uuuuuguuuguuuguuuuu

SEQ ID NO: 1088385 - RNA, 20 nt, Human
uuuuuguuuguuuguuuuuu

SEQ ID NO: 1088386 - RNA, 19 nt, Human
aaacuucaaagaccaggug

SEQ ID NO: 1088387 - RNA, 18 nt, Human
aaugaagagaaucuagcc

SEQ ID NO: 1088388 - RNA, 24 nt, Human
agaaagacacacaaguggaucccu

SEQ ID NO: 1088389 - RNA, 22 nt, Human
agaaauggagacaaugaagaga

SEQ ID NO: 1088390 - RNA, 19 nt, Human
agcuucaggguagggacac

SEQ ID NO: 1088391 - RNA, 19 nt, Human
aggcugccacuaaagacaa

SEQ ID NO: 1088392 - RNA, 21 nt, Human
agggagcuguggcacugguag

SEQ ID NO: 1088393 - RNA, 20 nt, Human
agguaguucagaagugggag

SEQ ID NO: 1088394 - RNA, 22 nt, Human
cagaauacaccauuccaggacu

SEQ ID NO: 1088395 - RNA, 19 nt, Human
ccagaauacaccauuccag

SEQ ID NO: 1088396 - RNA, 25 nt, Human
cccagaaagacacacaaguggaucc

SEQ ID NO: 1088397 - RNA, 21 nt, Human
cccuuccuuccccgaggccca

SEQ ID NO: 1088398 - RNA, 21 nt, Human
ccucaugcccuuccuuccccg

SEQ ID NO: 1088399 - RNA, 19 nt, Human
ccugcacucaggaacuaca

SEQ ID NO: 1088400 - RNA, 22 nt, Human
cuccaugaugaccaauggaaga

SEQ ID NO: 1088401 - RNA, 21 nt, Human
cugcugaggauggucucucuu

SEQ ID NO: 1088402 - RNA, 18 nt, Human
gcagccuggucugaacaa

SEQ ID NO: 1088403 - RNA, 24 nt, Human
gcccuauaggagcucuggagaaag

SEQ ID NO: 1088404 - RNA, 20 nt, Human
gcucuggagaaagagaaaug

SEQ ID NO: 1088405 - RNA, 20 nt, Human
ggagaaagagaaauggagac

SEQ ID NO: 1088406 - RNA, 23 nt, Human
ggagacaaugaagagaaucuagc

SEQ ID NO: 1088407 - RNA, 22 nt, Human
ggcccaggcugccacuaaagac

SEQ ID NO: 1088408 - RNA, 21 nt, Human
gguaagggaaaagggaaaaga

SEQ ID NO: 1088409 - RNA, 19 nt, Human
guaggacagaaacuucaaa

SEQ ID NO: 1088410 - RNA, 19 nt, Human
uacaccauuccaggacuag

SEQ ID NO: 1088411 - RNA, 19 nt, Human
uagagccagcugauugccc

SEQ ID NO: 1088412 - RNA, 21 nt, Human
uauagagccagcugauugccc

SEQ ID NO: 1088413 - RNA, 25 nt, Human
ucaugcccuuccuuccccgaggccc

SEQ ID NO: 1088414 - RNA, 20 nt, Human
uccccgaggcccaggcugcc

SEQ ID NO: 1088415 - RNA, 18 nt, Human
uccgagcuaagcuccaag

SEQ ID NO: 1088416 - RNA, 19 nt, Human
ugccacuaaagacaauuau

SEQ ID NO: 1088417 - RNA, 22 nt, Human
ugcccuuuccaggugaguucca

SEQ ID NO: 1088418 - RNA, 20 nt, Human
ugggagagggagcuguggca

SEQ ID NO: 1088419 - RNA, 21 nt, Human
ugggagagggagcuguggcac

SEQ ID NO: 1088420 - RNA, 26 nt, Human
uuaucccagaaagacacacaagugga

SEQ ID NO: 1088421 - RNA, 25 nt, Human
uucaggguagggacacuauugaaaa

SEQ ID NO: 1088422 - RNA, 18 nt, Human
aaacaggggacuccaucu

SEQ ID NO: 1088423 - RNA, 26 nt, Human
aacaucccaucuucuguuuccugcca

SEQ ID NO: 1088424 - RNA, 23 nt, Human
acagggagaugagaugucauugu

SEQ ID NO: 1088425 - RNA, 21 nt, Human
acaucacauguguugacccca

SEQ ID NO: 1088426 - RNA, 20 nt, Human
acgggggaggggcaguuucu

SEQ ID NO: 1088427 - RNA, 25 nt, Human
acuuccuuucuaaagaaucaaaggc

SEQ ID NO: 1088428 - RNA, 25 nt, Human
agacagaugcaccguugcagcuccc

SEQ ID NO: 1088429 - RNA, 24 nt, Human
aggggcccaagcacucaggcucug

SEQ ID NO: 1088430 - RNA, 21 nt, Human
aucaucuguaugggcaugagc

SEQ ID NO: 1088431 - RNA, 26 nt, Human
auggggcucuacaagucgaacuuugg

SEQ ID NO: 1088432 - RNA, 20 nt, Human
cagcucccaagaucugcaug

SEQ ID NO: 1088433 - RNA, 24 nt, Human
cagcucccaagaucugcauggaga

SEQ ID NO: 1088434 - RNA, 21 nt, Human
caggggcccaagcacucaggc

SEQ ID NO: 1088435 - RNA, 21 nt, Human
caguggguucuaccuuugucc

SEQ ID NO: 1088436 - RNA, 22 nt, Human
ccaccaacaucccaucuucugu

SEQ ID NO: 1088437 - RNA, 19 nt, Human
ccagguucacaggggccca

SEQ ID NO: 1088438 - RNA, 22 nt, Human
cccaggaagggggccaguggcu

SEQ ID NO: 1088439 - RNA, 22 nt, Human
ccccaaggucuguguccccuuc

SEQ ID NO: 1088440 - RNA, 23 nt, Human
ccuuccccacucaacuuuuucuu

SEQ ID NO: 1088441 - RNA, 21 nt, Human
ccuuugucccaggaagggggc

SEQ ID NO: 1088442 - RNA, 20 nt, Human
cgaaccaugaucugcucaca

SEQ ID NO: 1088443 - RNA, 22 nt, Human
cuaaagaaucaaaggcaucauu

SEQ ID NO: 1088444 - RNA, 26 nt, Human
cucccaagaucugcauggagaauagg

SEQ ID NO: 1088445 - RNA, 19 nt, Human
cuccguacucacugucccc

SEQ ID NO: 1088446 - RNA, 23 nt, Human
cugcauggagaauagguuccucu

SEQ ID NO: 1088447 - RNA, 22 nt, Human
gaauagguuccucuccguacuc

SEQ ID NO: 1088448 - RNA, 19 nt, Human
gaauuugcuugaaggagaa

SEQ ID NO: 1088449 - RNA, 19 nt, Human
gaccacuggcaccaaaagg

SEQ ID NO: 1088450 - RNA, 20 nt, Human
gccaguggcugagcccaugg

SEQ ID NO: 1088451 - RNA, 19 nt, Human
ggccaguggcugagcccau

SEQ ID NO: 1088452 - RNA, 23 nt, Human
ggccaguggcugagcccauggaa

SEQ ID NO: 1088453 - RNA, 23 nt, Human
gggacagucaauuaggacggggg

SEQ ID NO: 1088454 - RNA, 19 nt, Human
gggguagcugagcgggcag

SEQ ID NO: 1088455 - RNA, 19 nt, Human
gucgaacuuuggggguagc

SEQ ID NO: 1088456 - RNA, 25 nt, Human
gugguacuuaaguccauugaugugc

SEQ ID NO: 1088457 - RNA, 23 nt, Human
uacucacuguccccauccgcuuc

SEQ ID NO: 1088458 - RNA, 18 nt, Human
uaggacgggggaggggca

SEQ ID NO: 1088459 - RNA, 20 nt, Human
ucaucagagccaucauugga

SEQ ID NO: 1088460 - RNA, 23 nt, Human
uccccacucaacuuuuucuuaca

SEQ ID NO: 1088461 - RNA, 19 nt, Human
uccguacucacugucccca

SEQ ID NO: 1088462 - RNA, 24 nt, Human
ucugcucacagggagaugagaugu

SEQ ID NO: 1088463 - RNA, 23 nt, Human
ugccacacgaugccuucaagguu

SEQ ID NO: 1088464 - RNA, 20 nt, Human
uggauaaggccccaaggucu

SEQ ID NO: 1088465 - RNA, 19 nt, Human
uggugguacuuaaguccau

SEQ ID NO: 1088466 - RNA, 26 nt, Human
ugucuuguuccuccacguuacauuua

SEQ ID NO: 1088467 - RNA, 23 nt, Human
uuacagaggccuuuugugcugaa

SEQ ID NO: 1088468 - RNA, 19 nt, Human
uuccucuccguacucacug

SEQ ID NO: 1088469 - RNA, 18 nt, Human
uucuuacagaggccuuuu

SEQ ID NO: 1088470 - RNA, 18 nt, Human
uugcucccuuuggagucc

SEQ ID NO: 1088471 - RNA, 18 nt, Human
uuggaguccucugagcua

SEQ ID NO: 1088472 - RNA, 25 nt, Human
uuuaccaccaacaucccaucuucug

SEQ ID NO: 1088473 - RNA, 18 nt, Human
uuugucccaggaaggggg

SEQ ID NO: 1088474 - RNA, 24 nt, Human
auuuuguuggacaugcaguguuuc

SEQ ID NO: 1088475 - RNA, 19 nt, Human
cuagugguguuucauuuuc

SEQ ID NO: 1088476 - RNA, 25 nt, Human
uauaacaugucaaaaaucugauuua

SEQ ID NO: 1088477 - RNA, 23 nt, Human
ugaaaaacaguacauucacacaa

SEQ ID NO: 1088478 - RNA, 21 nt, Human
ugccuuuguaaaauaaaaaca

SEQ ID NO: 1088479 - RNA, 22 nt, Human
ugccuuuguaaaauaaaaacaa

SEQ ID NO: 1088480 - RNA, 22 nt, Human
ugguguuucauuuucugccuuu

SEQ ID NO: 1088481 - RNA, 18 nt, Human
uuaauucuuuuaccuagu

SEQ ID NO: 1088482 - RNA, 19 nt, Human
uuuguuggacaugcagugu

SEQ ID NO: 1088483 - RNA, 18 nt, Human
uuuuuuuuuuuuuuuuug

SEQ ID NO: 1088484 - RNA, 21 nt, Human
uuuuuuuuuuuuuuuuugguu

SEQ ID NO: 1088485 - RNA, 18 nt, Human
uaacaucauuuggagaag

SEQ ID NO: 1088486 - RNA, 23 nt, Human
ucauuuggagaagaagccgucuu

SEQ ID NO: 1088487 - RNA, 19 nt, Human
ucuucauguuugggcucua

SEQ ID NO: 1088488 - RNA, 19 nt, Human
ugguauaaggauuaaauga

SEQ ID NO: 1088489 - RNA, 20 nt, Human
ugguauaaggauuaaaugag

SEQ ID NO: 1088490 - RNA, 21 nt, Human
uuacuauaaaaauaaagauag

SEQ ID NO: 1088491 - RNA, 19 nt, Human
aaaaaugaaaacuccaucu

SEQ ID NO: 1088492 - RNA, 18 nt, Human
aaaaggaaaaagauccac

SEQ ID NO: 1088493 - RNA, 28 nt, Human
aaaaggaaaaagauccacugcuucagaa

SEQ ID NO: 1088494 - RNA, 22 nt, Human
aaaauagauaggaaaaugaaug

SEQ ID NO: 1088495 - RNA, 23 nt, Human
aaaccuauuuccucccacuucca

SEQ ID NO: 1088496 - RNA, 24 nt, Human
aaagagagguuuaaaauuguaacc

SEQ ID NO: 1088497 - RNA, 19 nt, Human
aaccuauuuccucccacuu

SEQ ID NO: 1088498 - RNA, 22 nt, Human
aaucacugccugccauucaaac

SEQ ID NO: 1088499 - RNA, 22 nt, Human
accuauuuccucccacuuccaa

SEQ ID NO: 1088500 - RNA, 19 nt, Human
agaaaagaauauuugaaga

SEQ ID NO: 1088501 - RNA, 22 nt, Human
agaggcguaggaggggagcccc

SEQ ID NO: 1088502 - RNA, 18 nt, Human
agaugcagauagugaaaa

SEQ ID NO: 1088503 - RNA, 19 nt, Human
agucuuagaguguccauau

SEQ ID NO: 1088504 - RNA, 24 nt, Human
caggugagaccuuccugcugggga

SEQ ID NO: 1088505 - RNA, 20 nt, Human
ccacuuccaaaucacugccu

SEQ ID NO: 1088506 - RNA, 22 nt, Human
cugaagaugacagcuuuccagg

SEQ ID NO: 1088507 - RNA, 18 nt, Human
cuuagaguguccauaucu

SEQ ID NO: 1088508 - RNA, 19 nt, Human
gaagaaaaaaaugagaaaa

SEQ ID NO: 1088509 - RNA, 19 nt, Human
gaagaugacagcuuuccag

SEQ ID NO: 1088510 - RNA, 23 nt, Human
gaaguccaaggucgaagguucac

SEQ ID NO: 1088511 - RNA, 21 nt, Human
gagaaaaugaaauaagauggc

SEQ ID NO: 1088512 - RNA, 23 nt, Human
gaggggagccccucaugccuguu

SEQ ID NO: 1088513 - RNA, 24 nt, Human
gaugugccauuuaaaaaugaaaac

SEQ ID NO: 1088514 - RNA, 24 nt, Human
gcauagucuucucaccuguuaaag

SEQ ID NO: 1088515 - RNA, 27 nt, Human
ggaggacaguugcuuauguugugcacu

SEQ ID NO: 1088516 - RNA, 19 nt, Human
ggaggcugagaaguccaag

SEQ ID NO: 1088517 - RNA, 21 nt, Human
uaacacaacguuucaaaguuc

SEQ ID NO: 1088518 - RNA, 22 nt, Human
uagcaaaaaauguacaggcuuc

SEQ ID NO: 1088519 - RNA, 23 nt, Human
uaguauugcauuguaacucuggu

SEQ ID NO: 1088520 - RNA, 22 nt, Human
uagucagagauaaaaaucucuu

SEQ ID NO: 1088521 - RNA, 24 nt, Human
uauaauaacugguuuauuucacuu

SEQ ID NO: 1088522 - RNA, 23 nt, Human
uaucccuacuaacugaagaugac

SEQ ID NO: 1088523 - RNA, 22 nt, Human
uaugauguuugcagacuguagg

SEQ ID NO: 1088524 - RNA, 19 nt, Human
ucaggugagaccuuccugc

SEQ ID NO: 1088525 - RNA, 20 nt, Human
ucauucuggaggcugagaag

SEQ ID NO: 1088526 - RNA, 19 nt, Human
uccaaaccuauuuccuccc

SEQ ID NO: 1088527 - RNA, 22 nt, Human
uccaaaccuauuuccucccacu

SEQ ID NO: 1088528 - RNA, 21 nt, Human
uccuuagucagagauaaaaau

SEQ ID NO: 1088529 - RNA, 20 nt, Human
ucucagucuauuugaccaaa

SEQ ID NO: 1088530 - RNA, 19 nt, Human
ugaaauaagauggcaaggc

SEQ ID NO: 1088531 - RNA, 18 nt, Human
ugagaaguccaaggucga

SEQ ID NO: 1088532 - RNA, 21 nt, Human
ugagaaguccaaggucgaagg

SEQ ID NO: 1088533 - RNA, 25 nt, Human
ugauguuugcagacuguagggcuuu

SEQ ID NO: 1088534 - RNA, 19 nt, Human
ugccaaacaguagcuuuua

SEQ ID NO: 1088535 - RNA, 25 nt, Human
ugcuucagaaaugucaacaacuacc

SEQ ID NO: 1088536 - RNA, 18 nt, Human
uggaggcugagaagucca

SEQ ID NO: 1088537 - RNA, 20 nt, Human
uggcauagucuucucaccug

SEQ ID NO: 1088538 - RNA, 19 nt, Human
ugggcuuggaacccugugc

SEQ ID NO: 1088539 - RNA, 18 nt, Human
ugggguggaggugggagg

SEQ ID NO: 1088540 - RNA, 21 nt, Human
ugggguggaggugggaggugg

SEQ ID NO: 1088541 - RNA, 19 nt, Human
uguagggcuuugggccaau

SEQ ID NO: 1088542 - RNA, 27 nt, Human
uguucuguccauggcauagucuucuca

SEQ ID NO: 1088543 - RNA, 22 nt, Human
uguugcagggcaaucgcauggu

SEQ ID NO: 1088544 - RNA, 20 nt, Human
uuagcaaaaaauguacaggc

SEQ ID NO: 1088545 - RNA, 22 nt, Human
uucagaaaugucaacaacuacc

SEQ ID NO: 1088546 - RNA, 20 nt, Human
uucguguuguagcaugcauc

SEQ ID NO: 1088547 - RNA, 19 nt, Human
uugcauuguaacucuggua

SEQ ID NO: 1088548 - RNA, 21 nt, Human
aaaaaaaaaaagcaaaaaaag

SEQ ID NO: 1088549 - RNA, 23 nt, Human
aaaaaaaaaagcaaaaaaagcau

SEQ ID NO: 1088550 - RNA, 18 nt, Human
aaaaaaacaagcaagaag

SEQ ID NO: 1088551 - RNA, 24 nt, Human
aaaaaaagcaaaaaaagcauguaa

SEQ ID NO: 1088552 - RNA, 27 nt, Human
aaaaagcaaaaaaagcauguaaaacac

SEQ ID NO: 1088553 - RNA, 18 nt, Human
aaacaagcaagaauugac

SEQ ID NO: 1088554 - RNA, 18 nt, Human
aaagcaaaaaaagcaugu

SEQ ID NO: 1088555 - RNA, 25 nt, Human
aaagcuccugucaccugaacugccc

SEQ ID NO: 1088556 - RNA, 18 nt, Human
aaagggccacagugacca

SEQ ID NO: 1088557 - RNA, 19 nt, Human
aaagggccacagugaccac

SEQ ID NO: 1088558 - RNA, 20 nt, Human
aacgguguucuccggaggua

SEQ ID NO: 1088559 - RNA, 21 nt, Human
aaugaaaaaaacaagcaagaa

SEQ ID NO: 1088560 - RNA, 23 nt, Human
aauguaggaggcaccaaaaaaga

SEQ ID NO: 1088561 - RNA, 20 nt, Human
aauuacugaaaacuccaccu

SEQ ID NO: 1088562 - RNA, 22 nt, Human
accgcagccccgggugcgcgcu

SEQ ID NO: 1088563 - RNA, 26 nt, Human
accugaacugcccggcacugggagcc

SEQ ID NO: 1088564 - RNA, 21 nt, Human
acuccaccugcuguggaauaa

SEQ ID NO: 1088565 - RNA, 23 nt, Human
acugaaaacuccaccugcugugg

SEQ ID NO: 1088566 - RNA, 22 nt, Human
agaaaaaaaaaaaagcaaaaaa

SEQ ID NO: 1088567 - RNA, 23 nt, Human
agaaaaaaaaaaaagcaaaaaaa

SEQ ID NO: 1088568 - RNA, 24 nt, Human
agcaaauccaaauugugagauggg

SEQ ID NO: 1088569 - RNA, 22 nt, Human
agccaguuuuagaaauuucugg

SEQ ID NO: 1088570 - RNA, 23 nt, Human
agccaucgcuguaccucacggcg

SEQ ID NO: 1088571 - RNA, 23 nt, Human
agccggggcugggggaggagguu

SEQ ID NO: 1088572 - RNA, 23 nt, Human
agccuguccuaucugcuccucua

SEQ ID NO: 1088573 - RNA, 25 nt, Human
aggagaaaaaaaaaaaagcaaaaaa

SEQ ID NO: 1088574 - RNA, 19 nt, Human
aggagccuccaccgcagcc

SEQ ID NO: 1088575 - RNA, 20 nt, Human
aggguaggagaaaaaaaaaa

SEQ ID NO: 1088576 - RNA, 20 nt, Human
aggucaucgcuaggguagga

SEQ ID NO: 1088577 - RNA, 21 nt, Human
caaaacaggguagcuaaggac

SEQ ID NO: 1088578 - RNA, 21 nt, Human
caaauugugagaugggaaccc

SEQ ID NO: 1088579 - RNA, 22 nt, Human
caacacuuucugugaucccaca

SEQ ID NO: 1088580 - RNA, 23 nt, Human
cacacauugaaaauauuguucag

SEQ ID NO: 1088581 - RNA, 18 nt, Human
caccaaaaaagagaccgc

SEQ ID NO: 1088582 - RNA, 18 nt, Human
cagaaagcugccacagac

SEQ ID NO: 1088583 - RNA, 21 nt, Human
cagaaagcugccacagacccu

SEQ ID NO: 1088584 - RNA, 20 nt, Human
cagcuuuggaugccaaagca

SEQ ID NO: 1088585 - RNA, 24 nt, Human
cagugagucccuuuaccuggcuga

SEQ ID NO: 1088586 - RNA, 24 nt, Human
caucgcuaggguaggagaaaaaaa

SEQ ID NO: 1088587 - RNA, 18 nt, Human
cauuucuuggaaacaagc

SEQ ID NO: 1088588 - RNA, 24 nt, Human
ccacagacccucuccaugagauuu

SEQ ID NO: 1088589 - RNA, 22 nt, Human
cccccagccccuucccuuugga

SEQ ID NO: 1088590 - RNA, 23 nt, Human
cccuaggugucuuuggaaagcuc

SEQ ID NO: 1088591 - RNA, 23 nt, Human
cccucuccaugagauuuuuaaaa

SEQ ID NO: 1088592 - RNA, 22 nt, Human
ccgcccaggggcccgccagcga

SEQ ID NO: 1088593 - RNA, 25 nt, Human
ccucauugugucacgagacggaggc

SEQ ID NO: 1088594 - RNA, 20 nt, Human
ccucuaugagcaaauccaaa

SEQ ID NO: 1088595 - RNA, 18 nt, Human
ccugaacugcccggcacu

SEQ ID NO: 1088596 - RNA, 22 nt, Human
ccugaagcaacacuuucuguga

SEQ ID NO: 1088597 - RNA, 21 nt, Human
cgcucagggaucgggcugcuc

SEQ ID NO: 1088598 - RNA, 21 nt, Human
cggaggcagggucguccugcc

SEQ ID NO: 1088599 - RNA, 22 nt, Human
cuaggugucuuuggaaagcucc

SEQ ID NO: 1088600 - RNA, 22 nt, Human
cucaaaacaggguagcuaagga

SEQ ID NO: 1088601 - RNA, 22 nt, Human
cucaagaaauguaggaggcacc

SEQ ID NO: 1088602 - RNA, 22 nt, Human
cucacagaggagccuccaccgc

SEQ ID NO: 1088603 - RNA, 18 nt, Human
cuccucaguguccuuggc

SEQ ID NO: 1088604 - RNA, 18 nt, Human
cucuuacugaggaacaaa

SEQ ID NO: 1088605 - RNA, 22 nt, Human
cugaaaacuccaccugcugugg

SEQ ID NO: 1088606 - RNA, 18 nt, Human
cugcucccucauuguguc

SEQ ID NO: 1088607 - RNA, 22 nt, Human
cugguucccccagccccuuccc

SEQ ID NO: 1088608 - RNA, 20 nt, Human
cuguaccucacggcgcccgc

SEQ ID NO: 1088609 - RNA, 22 nt, Human
cuuaugaaauggagcugugugu

SEQ ID NO: 1088610 - RNA, 20 nt, Human
gaauuucuuuauuucucuua

SEQ ID NO: 1088611 - RNA, 22 nt, Human
gagcaaauccaaauugugagau

SEQ ID NO: 1088612 - RNA, 18 nt, Human
gagcagcagccuaguggg

SEQ ID NO: 1088613 - RNA, 19 nt, Human
gagcagcagccuagugggg

SEQ ID NO: 1088614 - RNA, 18 nt, Human
gagccggggcugggggag

SEQ ID NO: 1088615 - RNA, 19 nt, Human
gagccggggcugggggagg

SEQ ID NO: 1088616 - RNA, 18 nt, Human
gagccuccaccgcagccc

SEQ ID NO: 1088617 - RNA, 19 nt, Human
gaguaauaaaagaaacccc

SEQ ID NO: 1088618 - RNA, 20 nt, Human
gaguuugguuucugaaugga

SEQ ID NO: 1088619 - RNA, 23 nt, Human
gaugccaaagcagcugcucagcg

SEQ ID NO: 1088620 - RNA, 22 nt, Human
gcgaauuucuuuauuucucuua

SEQ ID NO: 1088621 - RNA, 20 nt, Human
gcugccacagacccucucca

SEQ ID NO: 1088622 - RNA, 21 nt, Human
gcugccacagacccucuccau

SEQ ID NO: 1088623 - RNA, 21 nt, Human
ggaaaaguaaaacuuucaaaa

SEQ ID NO: 1088624 - RNA, 21 nt, Human
ggaaccacuuaugcaaaacuu

SEQ ID NO: 1088625 - RNA, 21 nt, Human
ggaggggccacgaucacagug

SEQ ID NO: 1088626 - RNA, 24 nt, Human
ggcggccagguacccgccuucucc

SEQ ID NO: 1088627 - RNA, 20 nt, Human
ggggcugggggaggagguuu

SEQ ID NO: 1088628 - RNA, 21 nt, Human
guaggagaaaaaaaaaaaagc

SEQ ID NO: 1088629 - RNA, 18 nt, Human
uaaaacaaagggcugcga

SEQ ID NO: 1088630 - RNA, 23 nt, Human
uaaaacacucccuucuuaaaaca

SEQ ID NO: 1088631 - RNA, 22 nt, Human
uacacagugaccaaagggucaa

SEQ ID NO: 1088632 - RNA, 21 nt, Human
uaccuggaagaggucaucgcu

SEQ ID NO: 1088633 - RNA, 18 nt, Human
uagagcucacagaggagc

SEQ ID NO: 1088634 - RNA, 20 nt, Human
uaugaaauggagcugugugu

SEQ ID NO: 1088635 - RNA, 26 nt, Human
uaugaaauggagcuguguguuucuaa

SEQ ID NO: 1088636 - RNA, 20 nt, Human
ucaauuccucgcugucuccc

SEQ ID NO: 1088637 - RNA, 18 nt, Human
ucaguccagaaagcugcc

SEQ ID NO: 1088638 - RNA, 26 nt, Human
ucaguccagaaagcugccacagaccc

SEQ ID NO: 1088639 - RNA, 18 nt, Human
uccaccgcagccccgggu

SEQ ID NO: 1088640 - RNA, 18 nt, Human
ucccuuuggaaagagcag

SEQ ID NO: 1088641 - RNA, 18 nt, Human
ugaaaaaaacaagcaaga

SEQ ID NO: 1088642 - RNA, 22 nt, Human
ugaaaacuccaccugcugugga

SEQ ID NO: 1088643 - RNA, 21 nt, Human
ugaacccagacagaugcaggg

SEQ ID NO: 1088644 - RNA, 23 nt, Human
ugagaugggaacccugcuuuuug

SEQ ID NO: 1088645 - RNA, 24 nt, Human
ugagaugggaacccugcuuuuugg

SEQ ID NO: 1088646 - RNA, 23 nt, Human
ugcauauugcugcucaaaacagg

SEQ ID NO: 1088647 - RNA, 23 nt, Human
ugccacagacccucuccaugaga

SEQ ID NO: 1088648 - RNA, 21 nt, Human
uggaaagagcagcagccuagu

SEQ ID NO: 1088649 - RNA, 22 nt, Human
uggaaagagcagcagccuagug

SEQ ID NO: 1088650 - RNA, 18 nt, Human
uggaaagcuccugucacc

SEQ ID NO: 1088651 - RNA, 20 nt, Human
uggaagaggucaucgcuagg

SEQ ID NO: 1088652 - RNA, 22 nt, Human
uggauggcagugugaauggugc

SEQ ID NO: 1088653 - RNA, 23 nt, Human
uggauggcagugugaauggugcu

SEQ ID NO: 1088654 - RNA, 22 nt, Human
uggccaagaacgguguucuccg

SEQ ID NO: 1088655 - RNA, 20 nt, Human
ugggaggcagguagagcuca

SEQ ID NO: 1088656 - RNA, 22 nt, Human
uguaggaggcaccaaaaaagag

SEQ ID NO: 1088657 - RNA, 25 nt, Human
uguccuuggccaagaacgguguucu

SEQ ID NO: 1088658 - RNA, 20 nt, Human
ugucuuuggaaagcuccugu

SEQ ID NO: 1088659 - RNA, 20 nt, Human
uguggaauaauuaaaaacaa

SEQ ID NO: 1088660 - RNA, 18 nt, Human
ugugggggugggcuuccu

SEQ ID NO: 1088661 - RNA, 21 nt, Human
uuaaaaacaaaaaggcauuac

SEQ ID NO: 1088662 - RNA, 22 nt, Human
uuacauuaagaaaugaaaaaaa

SEQ ID NO: 1088663 - RNA, 18 nt, Human
uucugugaucccacagcu

SEQ ID NO: 1088664 - RNA, 23 nt, Human
uugcugcucaaaacaggguagcu

SEQ ID NO: 1088665 - RNA, 22 nt, Human
uuggaaagcuccugucaccuga

SEQ ID NO: 1088666 - RNA, 18 nt, Human
uuggaaggaagaggcugc

SEQ ID NO: 1088667 - RNA, 22 nt, Human
uuugcuuaugaaauggagcugu

SEQ ID NO: 1088668 - RNA, 18 nt, Human
aagcgccugcccaggcca

SEQ ID NO: 1088669 - RNA, 22 nt, Human
aagcgccugcccaggccaggcc

SEQ ID NO: 1088670 - RNA, 23 nt, Human
agggucugccuccuuagcuuucu

SEQ ID NO: 1088671 - RNA, 20 nt, Human
caacuucaagcucuucuccc

SEQ ID NO: 1088672 - RNA, 18 nt, Human
caagcucuucucccugcu

SEQ ID NO: 1088673 - RNA, 19 nt, Human
caagcucuucucccugcuu

SEQ ID NO: 1088674 - RNA, 20 nt, Human
cacaguccaaggcuaaggcu

SEQ ID NO: 1088675 - RNA, 23 nt, Human
caccucuggaccuauggcagcuu

SEQ ID NO: 1088676 - RNA, 24 nt, Human
cacgcccaccaucucacaguccaa

SEQ ID NO: 1088677 - RNA, 18 nt, Human
ccaggccaggccgaaaca

SEQ ID NO: 1088678 - RNA, 20 nt, Human
ccaggccaggccgaaacaca

SEQ ID NO: 1088679 - RNA, 19 nt, Human
ccccggccuccccgggccc

SEQ ID NO: 1088680 - RNA, 23 nt, Human
cccgagaccccggccuccccggg

SEQ ID NO: 1088681 - RNA, 24 nt, Human
ccugcuugagguucucaggcugaa

SEQ ID NO: 1088682 - RNA, 24 nt, Human
ccugggccggccgccacccgagac

SEQ ID NO: 1088683 - RNA, 19 nt, Human
cgccugggccggccgccac

SEQ ID NO: 1088684 - RNA, 22 nt, Human
cuacuugucauaaacgcacuuc

SEQ ID NO: 1088685 - RNA, 24 nt, Human
cucacgcccaccaucucacagucc

SEQ ID NO: 1088686 - RNA, 23 nt, Human
cuugagguucucaggcugaaucc

SEQ ID NO: 1088687 - RNA, 24 nt, Human
gacucaacuguuuccucgcuaucu

SEQ ID NO: 1088688 - RNA, 20 nt, Human
gccgccacccgagaccccgg

SEQ ID NO: 1088689 - RNA, 21 nt, Human
ggccgccacccgagaccccgg

SEQ ID NO: 1088690 - RNA, 22 nt, Human
gguggggcagggucugccuccu

SEQ ID NO: 1088691 - RNA, 21 nt, Human
uccacgagucugaggcugacg

SEQ ID NO: 1088692 - RNA, 19 nt, Human
uccacgucgucaaaccaca

SEQ ID NO: 1088693 - RNA, 21 nt, Human
uccagcgccugggccggccgc

SEQ ID NO: 1088694 - RNA, 22 nt, Human
ucucacaguccaaggcuaaggc

SEQ ID NO: 1088695 - RNA, 19 nt, Human
ucugaacaacuucaagcuc

SEQ ID NO: 1088696 - RNA, 20 nt, Human
ucuggaccuauggcagcuuc

SEQ ID NO: 1088697 - RNA, 19 nt, Human
ugcccaggccaggccgaaa

SEQ ID NO: 1088698 - RNA, 22 nt, Human
uggcagcacaagcgccugccca

SEQ ID NO: 1088699 - RNA, 23 nt, Human
aaaaaaaaaacacaaaaagauaa

SEQ ID NO: 1088700 - RNA, 28 nt, Human
aaaaaaaaaacacaaaaagauaaggcag

SEQ ID NO: 1088701 - RNA, 29 nt, Human
aaaaaaaaaacacaaaaagauaaggcaga

SEQ ID NO: 1088702 - RNA, 20 nt, Human
agaaaaaaaaaacacaaaaa

SEQ ID NO: 1088703 - RNA, 21 nt, Human
agaaaaaaaaaacacaaaaag

SEQ ID NO: 1088704 - RNA, 23 nt, Human
agaaaaaaaaaacacaaaaagau

SEQ ID NO: 1088705 - RNA, 21 nt, Human
aggcagaaacaaaaauuccag

SEQ ID NO: 1088706 - RNA, 20 nt, Human
aggcagaaacaaaaauuccg

SEQ ID NO: 1088707 - RNA, 21 nt, Human
caaaaagauaaggcagaaaca

SEQ ID NO: 1088708 - RNA, 24 nt, Human
caauggcuaugguuccugaaauuu

SEQ ID NO: 1088709 - RNA, 18 nt, Human
cagaaaaaaaaaacacaa

SEQ ID NO: 1088710 - RNA, 22 nt, Human
cagaaaaaaaaaacacaaaaag

SEQ ID NO: 1088711 - RNA, 20 nt, Human
uauucagaaaaaaaaaacac

SEQ ID NO: 1088712 - RNA, 24 nt, Human
ucaccaaaguuuguuacuguucac

SEQ ID NO: 1088713 - RNA, 22 nt, Human
aaaaaagaaaaaugcuaaagga

SEQ ID NO: 1088714 - RNA, 19 nt, Human
aaacaauaccaccucuauc

SEQ ID NO: 1088715 - RNA, 26 nt, Human
aaacagaggcccaaagagcucaagca

SEQ ID NO: 1088716 - RNA, 21 nt, Human
aaaccgcauauugagcuaugg

SEQ ID NO: 1088717 - RNA, 19 nt, Human
aaauaaacuuaaacuauaa

SEQ ID NO: 1088718 - RNA, 19 nt, Human
aacugccacaguacagugc

SEQ ID NO: 1088719 - RNA, 23 nt, Human
aagaagaaugccaaccagcgccc

SEQ ID NO: 1088720 - RNA, 23 nt, Human
aaguguggggauuacaggcguga

SEQ ID NO: 1088721 - RNA, 21 nt, Human
acaaaguaauaaacagugcac

SEQ ID NO: 1088722 - RNA, 22 nt, Human
acaaauccaaagggaacugcca

SEQ ID NO: 1088723 - RNA, 20 nt, Human
acaagucaaacaauaccacc

SEQ ID NO: 1088724 - RNA, 24 nt, Human
acagaaaauggaggaaaggggacc

SEQ ID NO: 1088725 - RNA, 24 nt, Human
acagcaaagaccauauccugggug

SEQ ID NO: 1088726 - RNA, 19 nt, Human
acccagagccuccuaccuc

SEQ ID NO: 1088727 - RNA, 18 nt, Human
accgcauauugagcuaug

SEQ ID NO: 1088728 - RNA, 22 nt, Human
accuggaagacagcugcguaac

SEQ ID NO: 1088729 - RNA, 24 nt, Human
accuugugauccaccugccucggu

SEQ ID NO: 1088730 - RNA, 20 nt, Human
acgccauucuccucccucag

SEQ ID NO: 1088731 - RNA, 20 nt, Human
acuauaagagaugagacugc

SEQ ID NO: 1088732 - RNA, 20 nt, Human
acugcaagcuccgccuccua

SEQ ID NO: 1088733 - RNA, 19 nt, Human
agaauccuucaccaguacc

SEQ ID NO: 1088734 - RNA, 18 nt, Human
agauaguaaaaucaaacu

SEQ ID NO: 1088735 - RNA, 19 nt, Human
agcagcugggacugcaggc

SEQ ID NO: 1088736 - RNA, 22 nt, Human
agccaaaucccagcgagcgcug

SEQ ID NO: 1088737 - RNA, 20 nt, Human
agcgcugaucaacacaucca

SEQ ID NO: 1088738 - RNA, 26 nt, Human
aggaggaggcggaggaggagggaccc

SEQ ID NO: 1088739 - RNA, 22 nt, Human
aggcccaaagagcucaagcaag

SEQ ID NO: 1088740 - RNA, 20 nt, Human
aggcggaggaggacuuggga

SEQ ID NO: 1088741 - RNA, 23 nt, Human
aggcgugagccacugugcccggc

SEQ ID NO: 1088742 - RNA, 25 nt, Human
aggcuggagugcaguggcgugaucu

SEQ ID NO: 1088743 - RNA, 23 nt, Human
agugcaguggcgugaucuuggcu

SEQ ID NO: 1088744 - RNA, 24 nt, Human
agugcaguggcgugaucuuggcuc

SEQ ID NO: 1088745 - RNA, 23 nt, Human
aguucucggccuuuaaacagcuc

SEQ ID NO: 1088746 - RNA, 20 nt, Human
auccagucaccuggaagaca

SEQ ID NO: 1088747 - RNA, 24 nt, Human
auccagucaccuggaagacagcug

SEQ ID NO: 1088748 - RNA, 23 nt, Human
aucccacccugggggccuugcag

SEQ ID NO: 1088749 - RNA, 24 nt, Human
augaaaaaagaaaaaugcuaaagg

SEQ ID NO: 1088750 - RNA, 20 nt, Human
augaaacacacuguauccug

SEQ ID NO: 1088751 - RNA, 22 nt, Human
augagcccagagcacauacaaa

SEQ ID NO: 1088752 - RNA, 23 nt, Human
augccagagugaacaucagugag

SEQ ID NO: 1088753 - RNA, 26 nt, Human
caaaauaugucccugacugaaacuga

SEQ ID NO: 1088754 - RNA, 23 nt, Human
caaacagcaaagaccauauccug

SEQ ID NO: 1088755 - RNA, 21 nt, Human
caaauccagaauccuucaccg

SEQ ID NO: 1088756 - RNA, 24 nt, Human
caaccaccagaagcggccgucuca

SEQ ID NO: 1088757 - RNA, 19 nt, Human
caacucugcgaucguauag

SEQ ID NO: 1088758 - RNA, 19 nt, Human
caacugcugcagcucacga

SEQ ID NO: 1088759 - RNA, 19 nt, Human
cacaaucuuaacgauugcc

SEQ ID NO: 1088760 - RNA, 24 nt, Human
cacagcuuuccuucacucuaauuc

SEQ ID NO: 1088761 - RNA, 23 nt, Human
cacauggagauguucuguccccc

SEQ ID NO: 1088762 - RNA, 24 nt, Human
caccguguuugccuggauggucuc

SEQ ID NO: 1088763 - RNA, 21 nt, Human
caggcgcccgccaccacgccc

SEQ ID NO: 1088764 - RNA, 21 nt, Human
caggcgcccgccaccacgccc

SEQ ID NO: 1088765 - RNA, 22 nt, Human
caggcgcccgccaccacgcccg

SEQ ID NO: 1088766 - RNA, 19 nt, Human
caguguguaaacauuuuca

SEQ ID NO: 1088767 - RNA, 24 nt, Human
caguguguaaacauuuucaguugc

SEQ ID NO: 1088768 - RNA, 26 nt, Human
cauacaaauccaaagggaacugccac

SEQ ID NO: 1088769 - RNA, 24 nt, Human
cauccacaaucuuaacgauugccc

SEQ ID NO: 1088770 - RNA, 19 nt, Human
cauucuuggcaccggaaca

SEQ ID NO: 1088771 - RNA, 18 nt, Human
ccacccagagccuccuac

SEQ ID NO: 1088772 - RNA, 20 nt, Human
ccacccagagccuccuaccu

SEQ ID NO: 1088773 - RNA, 18 nt, Human
ccagagcacauacaaauc

SEQ ID NO: 1088774 - RNA, 22 nt, Human
ccagcugauguuccacuuguuc

SEQ ID NO: 1088775 - RNA, 19 nt, Human
ccaggcaagacucacagcc

SEQ ID NO: 1088776 - RNA, 18 nt, Human
ccaggcuggagugcagug

SEQ ID NO: 1088777 - RNA, 21 nt, Human
ccaggcuggagugcaguggcg

SEQ ID NO: 1088778 - RNA, 23 nt, Human
ccaguccccgcugcgggaggagg

SEQ ID NO: 1088779 - RNA, 22 nt, Human
ccaugaacagagaggaaugcca

SEQ ID NO: 1088780 - RNA, 19 nt, Human
cccaaaagccuguccaggc

SEQ ID NO: 1088781 - RNA, 18 nt, Human
cccagagccuccuaccuc

SEQ ID NO: 1088782 - RNA, 25 nt, Human
ccccaucaacuggcaacauuuucuu

SEQ ID NO: 1088783 - RNA, 18 nt, Human
cccccuguccccaaaagc

SEQ ID NO: 1088784 - RNA, 21 nt, Human
cccccuguccccaaaagccug

SEQ ID NO: 1088785 - RNA, 22 nt, Human
cccccuguccccaaaagccugu

SEQ ID NO: 1088786 - RNA, 18 nt, Human
cccguggauaccuguugc

SEQ ID NO: 1088787 - RNA, 21 nt, Human
cccucuacugcuccuugggcc

SEQ ID NO: 1088788 - RNA, 22 nt, Human
cccucuagcucccuuucagcuu

SEQ ID NO: 1088789 - RNA, 24 nt, Human
ccgaaguguggggauuacaggcgu

SEQ ID NO: 1088790 - RNA, 19 nt, Human
ccggaacagaugaaacaca

SEQ ID NO: 1088791 - RNA, 24 nt, Human
ccggagcagcugggacugcaggcg

SEQ ID NO: 1088792 - RNA, 26 nt, Human
ccuacaauuaugaaaugaaaaaagaa

SEQ ID NO: 1088793 - RNA, 19 nt, Human
ccuaugucagaguaaccga

SEQ ID NO: 1088794 - RNA, 19 nt, Human
ccugaccuugugauccacc

SEQ ID NO: 1088795 - RNA, 21 nt, Human
ccugaccuugugauccaccug

SEQ ID NO: 1088796 - RNA, 22 nt, Human
ccuguuucagagacauuuaaac

SEQ ID NO: 1088797 - RNA, 22 nt, Human
ccuugcagugacuccugauggg

SEQ ID NO: 1088798 - RNA, 19 nt, Human
cgccuccuagguucacgcc

SEQ ID NO: 1088799 - RNA, 23 nt, Human
cggaacagaugaaacacacugua

SEQ ID NO: 1088800 - RNA, 21 nt, Human
cguauagacauguuuccugau

SEQ ID NO: 1088801 - RNA, 24 nt, Human
cuaauucauucuugacuagagccu

SEQ ID NO: 1088802 - RNA, 27 nt, Human
cuacaauuaugaaaugaaaaaagaaaa

SEQ ID NO: 1088803 - RNA, 22 nt, Human
cuacugcuccuugggcccccug

SEQ ID NO: 1088804 - RNA, 22 nt, Human
cucaagcaacuugcccuaaauc

SEQ ID NO: 1088805 - RNA, 21 nt, Human
cucccaucaccaauacacaga

SEQ ID NO: 1088806 - RNA, 20 nt, Human
cuccccaccaucccacccug

SEQ ID NO: 1088807 - RNA, 20 nt, Human
cucccuuucagcuuucuguu

SEQ ID NO: 1088808 - RNA, 21 nt, Human
cuccuagguucacgccauucu

SEQ ID NO: 1088809 - RNA, 24 nt, Human
cuccugaccuugugauccaccugc

SEQ ID NO: 1088810 - RNA, 22 nt, Human
cucucucugccuuccaggcugg

SEQ ID NO: 1088811 - RNA, 24 nt, Human
cucucucugccuuccaggcuggag

SEQ ID NO: 1088812 - RNA, 21 nt, Human
cugaauucuguaaugaacauc

SEQ ID NO: 1088813 - RNA, 24 nt, Human
cugcaagcuccgccuccuagguuc

SEQ ID NO: 1088814 - RNA, 18 nt, Human
cugcacauaccugccaga

SEQ ID NO: 1088815 - RNA, 18 nt, Human
cugccucggucucccgaa

SEQ ID NO: 1088816 - RNA, 23 nt, Human
cugccuuccaggcuggagugcag

SEQ ID NO: 1088817 - RNA, 19 nt, Human
cuggcagaggggcacccag

SEQ ID NO: 1088818 - RNA, 18 nt, Human
cuguccaguuucuucugc

SEQ ID NO: 1088819 - RNA, 22 nt, Human
cuuaaacuauaaauuagaaaca

SEQ ID NO: 1088820 - RNA, 23 nt, Human
cuugcagugacuccugaugggaa

SEQ ID NO: 1088821 - RNA, 24 nt, Human
cuuggcacgggcucugacgcgcau

SEQ ID NO: 1088822 - RNA, 25 nt, Human
cuuggcacgggcucugacgcgcaug

SEQ ID NO: 1088823 - RNA, 20 nt, Human
gaagagcucacugugauuaa

SEQ ID NO: 1088824 - RNA, 22 nt, Human
gaccuugugauccaccugccuc

SEQ ID NO: 1088825 - RNA, 22 nt, Human
gaccuugugauccaccugccuc

SEQ ID NO: 1088826 - RNA, 24 nt, Human
gaccuugugauccaccugccucgg

SEQ ID NO: 1088827 - RNA, 19 nt, Human
gacuagagccuguaugccu

SEQ ID NO: 1088828 - RNA, 19 nt, Human
gagcccagagcacauacaa

SEQ ID NO: 1088829 - RNA, 20 nt, Human
gagcccuccgacuuccuuuc

SEQ ID NO: 1088830 - RNA, 18 nt, Human
gagccuauuccaaaccag

SEQ ID NO: 1088831 - RNA, 19 nt, Human
gagccuccuaccuccagau

SEQ ID NO: 1088832 - RNA, 18 nt, Human
gaggacuugggggagagg

SEQ ID NO: 1088833 - RNA, 19 nt, Human
gagguuggagggcuggccu

SEQ ID NO: 1088834 - RNA, 20 nt, Human
gaguaaccgaggugguugaa

SEQ ID NO: 1088835 - RNA, 18 nt, Human
gauuacaggcgugagcca

SEQ ID NO: 1088836 - RNA, 21 nt, Human
gauuacaggcgugagccacug

SEQ ID NO: 1088837 - RNA, 24 nt, Human
gauuacaggcgugagccacugugc

SEQ ID NO: 1088838 - RNA, 25 nt, Human
gccuccuagguucacgccauucucc

SEQ ID NO: 1088839 - RNA, 26 nt, Human
gcuggaacaccagggcgguuucucug

SEQ ID NO: 1088840 - RNA, 19 nt, Human
gcuggagugcaguggcgug

SEQ ID NO: 1088841 - RNA, 23 nt, Human
ggaaaagaaguaaauuccuaugu

SEQ ID NO: 1088842 - RNA, 21 nt, Human
ggaggacuugggggagaggua

SEQ ID NO: 1088843 - RNA, 23 nt, Human
ggaggacuugggggagagguaga

SEQ ID NO: 1088844 - RNA, 18 nt, Human
ggaggaggcggaggagga

SEQ ID NO: 1088845 - RNA, 19 nt, Human
ggagggcuggccugcgggg

SEQ ID NO: 1088846 - RNA, 22 nt, Human
ggcuggagugcaguggcgugau

SEQ ID NO: 1088847 - RNA, 22 nt, Human
ggcuggccugcggggucacugc

SEQ ID NO: 1088848 - RNA, 22 nt, Human
gggagccuauuccaaaccagcg

SEQ ID NO: 1088849 - RNA, 21 nt, Human
gggaggagguuggagggcugg

SEQ ID NO: 1088850 - RNA, 19 nt, Human
gggagggaggcggggcugg

SEQ ID NO: 1088851 - RNA, 21 nt, Human
gggauuacaggcgugagccac

SEQ ID NO: 1088852 - RNA, 21 nt, Human
gggauuacaggcgugagccac

SEQ ID NO: 1088853 - RNA, 23 nt, Human
gggauuacaggcgugagccacug

SEQ ID NO: 1088854 - RNA, 24 nt, Human
gggcccccuguccccaaaagccug

SEQ ID NO: 1088855 - RNA, 22 nt, Human
ggggauuacaggcgugagccac

SEQ ID NO: 1088856 - RNA, 24 nt, Human
ggggauuacaggcgugagccacug

SEQ ID NO: 1088857 - RNA, 19 nt, Human
gggguggggagggaggcgg

SEQ ID NO: 1088858 - RNA, 22 nt, Human
gggguggggagggaggcggggc

SEQ ID NO: 1088859 - RNA, 21 nt, Human
ggguggggagggaggcggggc

SEQ ID NO: 1088860 - RNA, 23 nt, Human
ggguggggagggaggcggggcug

SEQ ID NO: 1088861 - RNA, 19 nt, Human
ggucucgaucuccugaccu

SEQ ID NO: 1088862 - RNA, 20 nt, Human
ggucucgaucuccugaccuu

SEQ ID NO: 1088863 - RNA, 26 nt, Human
guccaguuucuucugccauugugggg

SEQ ID NO: 1088864 - RNA, 21 nt, Human
gugaaaacagaggcccaaaga

SEQ ID NO: 1088865 - RNA, 24 nt, Human
gugauccaccugccucggucuccc

SEQ ID NO: 1088866 - RNA, 19 nt, Human
guggcuguucucauugucc

SEQ ID NO: 1088867 - RNA, 20 nt, Human
guucuuggcacgggcucuga

SEQ ID NO: 1088868 - RNA, 19 nt, Human
uaaaacagggaacacgaac

SEQ ID NO: 1088869 - RNA, 19 nt, Human
uaaaucauaucccuagcag

SEQ ID NO: 1088870 - RNA, 22 nt, Human
uaaauuagaaacacaaauaauc

SEQ ID NO: 1088871 - RNA, 21 nt, Human
uaacuguugauucuuucccaa

SEQ ID NO: 1088872 - RNA, 21 nt, Human
uaagaagaaugccaaccagcg

SEQ ID NO: 1088873 - RNA, 27 nt, Human
uaagcuaggaaagguuuuccacaucca

SEQ ID NO: 1088874 - RNA, 19 nt, Human
uacaaaguaauaaacagug

SEQ ID NO: 1088875 - RNA, 23 nt, Human
uacaggcgugagccacugugccc

SEQ ID NO: 1088876 - RNA, 23 nt, Human
uacaggcgugagccacugugccc

SEQ ID NO: 1088877 - RNA, 19 nt, Human
uacauuaagaagaaugcca

SEQ ID NO: 1088878 - RNA, 21 nt, Human
uacauuaagaagaaugccaac

SEQ ID NO: 1088879 - RNA, 20 nt, Human
uacugcuccuugggcccccu

SEQ ID NO: 1088880 - RNA, 21 nt, Human
uagaaacacaaauaaucauga

SEQ ID NO: 1088881 - RNA, 19 nt, Human
uagaaagcucccccaaaag

SEQ ID NO: 1088882 - RNA, 18 nt, Human
uagcagacggagaggcag

SEQ ID NO: 1088883 - RNA, 18 nt, Human
uagcagacggagaggcag

SEQ ID NO: 1088884 - RNA, 27 nt, Human
uagcagaugauguagggcccuccucuu

SEQ ID NO: 1088885 - RNA, 24 nt, Human
uagcucccuuucagcuuucuguuu

SEQ ID NO: 1088886 - RNA, 19 nt, Human
uaucauacagacgugaaaa

SEQ ID NO: 1088887 - RNA, 19 nt, Human
uauccuggguguccugggu

SEQ ID NO: 1088888 - RNA, 19 nt, Human
uauuucaccguguuugccu

SEQ ID NO: 1088889 - RNA, 22 nt, Human
ucaccaguacccaacaguccau

SEQ ID NO: 1088890 - RNA, 18 nt, Human
ucacugcaagcuccgccu

SEQ ID NO: 1088891 - RNA, 19 nt, Human
ucacugcaagcuccgccuc

SEQ ID NO: 1088892 - RNA, 19 nt, Human
ucacugcaagcuccgccuc

SEQ ID NO: 1088893 - RNA, 24 nt, Human
ucacugcaagcuccgccuccuagg

SEQ ID NO: 1088894 - RNA, 19 nt, Human
ucacugcaccuccacccag

SEQ ID NO: 1088895 - RNA, 20 nt, Human
ucacugcaccuccacccaga

SEQ ID NO: 1088896 - RNA, 22 nt, Human
ucacugcaccuccacccagagc

SEQ ID NO: 1088897 - RNA, 24 nt, Human
ucagucgacugauuuuuauggacc

SEQ ID NO: 1088898 - RNA, 19 nt, Human
uccacaaucuuaacgauug

SEQ ID NO: 1088899 - RNA, 21 nt, Human
uccacaaucuuaacgauugcc

SEQ ID NO: 1088900 - RNA, 19 nt, Human
uccauccacaaucuuaacg

SEQ ID NO: 1088901 - RNA, 24 nt, Human
ucccgaaguguggggauuacaggc

SEQ ID NO: 1088902 - RNA, 20 nt, Human
ucccuagcagacggagaggc

SEQ ID NO: 1088903 - RNA, 23 nt, Human
ucccucagacuccggagcagcug

SEQ ID NO: 1088904 - RNA, 22 nt, Human
uccgacuuccuuucuuccccau

SEQ ID NO: 1088905 - RNA, 24 nt, Human
uccggagcagcugggacugcaggc

SEQ ID NO: 1088906 - RNA, 18 nt, Human
uccuggguguccugggug

SEQ ID NO: 1088907 - RNA, 18 nt, Human
uccuugggcccccugucc

SEQ ID NO: 1088908 - RNA, 22 nt, Human
uccuuucuuccccaucaacugg

SEQ ID NO: 1088909 - RNA, 21 nt, Human
ucggccuuuaaacagcucuaa

SEQ ID NO: 1088910 - RNA, 18 nt, Human
ucuacugcuccuugggcc

SEQ ID NO: 1088911 - RNA, 23 nt, Human
ucucagggcuacugccauuugcu

SEQ ID NO: 1088912 - RNA, 18 nt, Human
ucucccgaagugugggga

SEQ ID NO: 1088913 - RNA, 24 nt, Human
ucucucucugccuuccaggcugga

SEQ ID NO: 1088914 - RNA, 22 nt, Human
ucucucugccuuccaggcugga

SEQ ID NO: 1088915 - RNA, 24 nt, Human
ucucucugccuuccaggcuggagu

SEQ ID NO: 1088916 - RNA, 19 nt, Human
ucugagcccuccgacuucc

SEQ ID NO: 1088917 - RNA, 23 nt, Human
ucuguguucaaucucuggauuug

SEQ ID NO: 1088918 - RNA, 20 nt, Human
ucuuaucuccccaccauccc

SEQ ID NO: 1088919 - RNA, 22 nt, Human
ugaaacggagucucucucugcc

SEQ ID NO: 1088920 - RNA, 28 nt, Human
ugaacucccaccacguaagggcaaacuc

SEQ ID NO: 1088921 - RNA, 23 nt, Human
ugaccuugugauccaccugccuc

SEQ ID NO: 1088922 - RNA, 19 nt, Human
ugacgcgcaugcagagagg

SEQ ID NO: 1088923 - RNA, 20 nt, Human
ugacuagagccuguaugccu

SEQ ID NO: 1088924 - RNA, 21 nt, Human
ugagacugcacauggagaugu

SEQ ID NO: 1088925 - RNA, 24 nt, Human
ugagacugcacauggagauguucu

SEQ ID NO: 1088926 - RNA, 18 nt, Human
ugauguagggcccucccc

SEQ ID NO: 1088927 - RNA, 22 nt, Human
ugcaguggcgugaucuuggcuc

SEQ ID NO: 1088928 - RNA, 19 nt, Human
ugcgggaggagguuggagg

SEQ ID NO: 1088929 - RNA, 19 nt, Human
uggagugcaguggcgugau

SEQ ID NO: 1088930 - RNA, 23 nt, Human
uggagugcaguggcgugaucuug

SEQ ID NO: 1088931 - RNA, 24 nt, Human
uggagugcaguggcgugaucuugg

SEQ ID NO: 1088932 - RNA, 18 nt, Human
uggcucacugcaagcucc

SEQ ID NO: 1088933 - RNA, 21 nt, Human
ugggacugcaggcgcccgcca

SEQ ID NO: 1088934 - RNA, 22 nt, Human
uggggagggaggcggggcuggg

SEQ ID NO: 1088935 - RNA, 18 nt, Human
ugggguggggagggaggc

SEQ ID NO: 1088936 - RNA, 26 nt, Human
ugggguggggagggaggcggggcugg

SEQ ID NO: 1088937 - RNA, 20 nt, Human
ugugggguggggagggaggc

SEQ ID NO: 1088938 - RNA, 18 nt, Human
uguuucuucuguuguuuc

SEQ ID NO: 1088939 - RNA, 19 nt, Human
uuagggcuggguugugugu

SEQ ID NO: 1088940 - RNA, 21 nt, Human
uucacaaacaguagauugcag

SEQ ID NO: 1088941 - RNA, 22 nt, Human
uucacaaauacaagucaaacaa

SEQ ID NO: 1088942 - RNA, 24 nt, Human
uuccaggcuggagugcaguggcgu

SEQ ID NO: 1088943 - RNA, 20 nt, Human
uuuaaaaauuucuugagcag

SEQ ID NO: 1088944 - RNA, 18 nt, Human
uuuccaguucucggccuu

SEQ ID NO: 1088945 - RNA, 20 nt, Human
uuuucuuuuuugaaacggag

SEQ ID NO: 1088946 - RNA, 24 nt, Human
aaaaaauaaaagaccaggacaccc

SEQ ID NO: 1088947 - RNA, 20 nt, Human
aaaagaccaggacacccaga

SEQ ID NO: 1088948 - RNA, 23 nt, Human
aaaagaccaggacacccagagug

SEQ ID NO: 1088949 - RNA, 22 nt, Human
aaccgucccuuagccgcuucca

SEQ ID NO: 1088950 - RNA, 19 nt, Human
accccuacccccccgccac

SEQ ID NO: 1088951 - RNA, 24 nt, Human
accugggcgcagcucugcuccagg

SEQ ID NO: 1088952 - RNA, 19 nt, Human
accuugguggccuugcccg

SEQ ID NO: 1088953 - RNA, 23 nt, Human
accuugguggccuugcccgccuu

SEQ ID NO: 1088954 - RNA, 20 nt, Human
acucccagagcgaggcgggg

SEQ ID NO: 1088955 - RNA, 24 nt, Human
agccaguggccggcucggggcgcg

SEQ ID NO: 1088956 - RNA, 19 nt, Human
agcgagucgacgccccagg

SEQ ID NO: 1088957 - RNA, 19 nt, Human
aggccgcggcgcggccccg

SEQ ID NO: 1088958 - RNA, 21 nt, Human
aggggaguagggaaccagggg

SEQ ID NO: 1088959 - RNA, 21 nt, Human
agggggcgacgccuggcuuca

SEQ ID NO: 1088960 - RNA, 21 nt, Human
auaaaagaccaggacacccag

SEQ ID NO: 1088961 - RNA, 23 nt, Human
aucugaaaucccucccagggcca

SEQ ID NO: 1088962 - RNA, 19 nt, Human
caaaaaaacaccgaggcuc

SEQ ID NO: 1088963 - RNA, 21 nt, Human
caaaaaauaaaagaccaggac

SEQ ID NO: 1088964 - RNA, 24 nt, Human
cacaucacucacuacuacagccag

SEQ ID NO: 1088965 - RNA, 19 nt, Human
caccacccaaaaaaacacc

SEQ ID NO: 1088966 - RNA, 23 nt, Human
caccacccaaaaaaacaccgagg

SEQ ID NO: 1088967 - RNA, 28 nt, Human
cacccagagugagaugcaugucggggac

SEQ ID NO: 1088968 - RNA, 19 nt, Human
caccuggaggagaaggggu

SEQ ID NO: 1088969 - RNA, 20 nt, Human
caccuggaggagaagggguu

SEQ ID NO: 1088970 - RNA, 26 nt, Human
cagacccuguggccgucacacccugc

SEQ ID NO: 1088971 - RNA, 18 nt, Human
cagagaaauaaggcucag

SEQ ID NO: 1088972 - RNA, 23 nt, Human
cagagaaauaaggcucagagccg

SEQ ID NO: 1088973 - RNA, 21 nt, Human
cagagccgucugaggucagaa

SEQ ID NO: 1088974 - RNA, 18 nt, Human
cagcaggggggcccuggc

SEQ ID NO: 1088975 - RNA, 19 nt, Human
cagcccccaaccgucccuu

SEQ ID NO: 1088976 - RNA, 18 nt, Human
cagcguguagccaguggc

SEQ ID NO: 1088977 - RNA, 21 nt, Human
caggaaccgggaagggcgggc

SEQ ID NO: 1088978 - RNA, 19 nt, Human
cagggccaggccgcagccg

SEQ ID NO: 1088979 - RNA, 22 nt, Human
cauggcgcaggaagcggugguc

SEQ ID NO: 1088980 - RNA, 22 nt, Human
ccaaaaaaacaccgaggcucag

SEQ ID NO: 1088981 - RNA, 23 nt, Human
ccaaccgucccuuagccgcuucc

SEQ ID NO: 1088982 - RNA, 22 nt, Human
ccaccacccaaaaaaacaccga

SEQ ID NO: 1088983 - RNA, 19 nt, Human
ccacccaaaaaaacaccga

SEQ ID NO: 1088984 - RNA, 22 nt, Human
ccaccugacggcuucccuuccc

SEQ ID NO: 1088985 - RNA, 21 nt, Human
ccagcuccuggggggcuggga

SEQ ID NO: 1088986 - RNA, 19 nt, Human
ccaggcccagggcuggggc

SEQ ID NO: 1088987 - RNA, 25 nt, Human
cccacaucacucacuacuacagcca

SEQ ID NO: 1088988 - RNA, 20 nt, Human
cccacccacaucacucacua

SEQ ID NO: 1088989 - RNA, 24 nt, Human
cccagcccccaaccgucccuuagc

SEQ ID NO: 1088990 - RNA, 21 nt, Human
cccaggaggcccaggaagcac

SEQ ID NO: 1088991 - RNA, 21 nt, Human
cccagggccaggccgcagccg

SEQ ID NO: 1088992 - RNA, 18 nt, Human
cccagggcuggggcugga

SEQ ID NO: 1088993 - RNA, 19 nt, Human
ccccacaccccuacccccc

SEQ ID NO: 1088994 - RNA, 19 nt, Human
ccccacaccccuacccccc

SEQ ID NO: 1088995 - RNA, 23 nt, Human
ccccacaccccuacccccccgcc

SEQ ID NO: 1088996 - RNA, 20 nt, Human
ccccacccacaucacucacu

SEQ ID NO: 1088997 - RNA, 19 nt, Human
ccccagggcuccccgaggg

SEQ ID NO: 1088998 - RNA, 20 nt, Human
cccccacaccccuacccccc

SEQ ID NO: 1088999 - RNA, 21 nt, Human
cccccacaccccuaccccccc

SEQ ID NO: 1089000 - RNA, 21 nt, Human
cccccacaccccuaccccccc

SEQ ID NO: 1089001 - RNA, 23 nt, Human
cccccacaccccuacccccccgc

SEQ ID NO: 1089002 - RNA, 22 nt, Human
ccccccgccaccaccacccugg

SEQ ID NO: 1089003 - RNA, 18 nt, Human
cccccgccaccaccaccc

SEQ ID NO: 1089004 - RNA, 24 nt, Human
cccccgccaccaccacccuggcag

SEQ ID NO: 1089005 - RNA, 24 nt, Human
ccccgccaccaccacccuggcaga

SEQ ID NO: 1089006 - RNA, 19 nt, Human
ccccgggagguggguggcg

SEQ ID NO: 1089007 - RNA, 26 nt, Human
ccccuacccccccgccaccaccaccc

SEQ ID NO: 1089008 - RNA, 20 nt, Human
ccccugcuccuuuguucggc

SEQ ID NO: 1089009 - RNA, 22 nt, Human
ccgcagccgcugacccgagggg

SEQ ID NO: 1089010 - RNA, 20 nt, Human
ccgcggcgcggccccgggag

SEQ ID NO: 1089011 - RNA, 20 nt, Human
ccuacccccccgccaccacc

SEQ ID NO: 1089012 - RNA, 23 nt, Human
ccucccagggccaggccgcagcc

SEQ ID NO: 1089013 - RNA, 21 nt, Human
ccucccgcccgggggagccca

SEQ ID NO: 1089014 - RNA, 22 nt, Human
ccucccgcccgggggagcccac

SEQ ID NO: 1089015 - RNA, 28 nt, Human
ccucgcagucgcggaaggccacauugcc

SEQ ID NO: 1089016 - RNA, 18 nt, Human
ccugcagcacgaccuggg

SEQ ID NO: 1089017 - RNA, 22 nt, Human
ccuggcuucauccacccaggag

SEQ ID NO: 1089018 - RNA, 23 nt, Human
ccuugagcgugccgcugggcccc

SEQ ID NO: 1089019 - RNA, 25 nt, Human
cgcagcccaggcccagggcuggggc

SEQ ID NO: 1089020 - RNA, 23 nt, Human
cgccaccaccacccuggcagaac

SEQ ID NO: 1089021 - RNA, 21 nt, Human
cgccacggugaggaagcggcg

SEQ ID NO: 1089022 - RNA, 30 nt, Human; identical to SEQ ID NO: 372438

SEQ ID NO: 1089023 - RNA, 20 nt, Human
cgccccagggcacgucgcgg

SEQ ID NO: 1089024 - RNA, 21 nt, Human
cgccgccagguagcggcccag

SEQ ID NO: 1089025 - RNA, 22 nt, Human
cgcguuaaccuugaacccgaac

SEQ ID NO: 1089026 - RNA, 20 nt, Human
cggcccagguggcugcgcag

SEQ ID NO: 1089027 - RNA, 22 nt, Human
cggcccccacaccccuaccccc

SEQ ID NO: 1089028 - RNA, 24 nt, Human
cggcccccacaccccuaccccccc

SEQ ID NO: 1089029 - RNA, 18 nt, Human
cggcgccagguaacggcc

SEQ ID NO: 1089030 - RNA, 21 nt, Human
cggcucggggcgcgccaccag

SEQ ID NO: 1089031 - RNA, 20 nt, Human
cggugguccgcggucugcac

SEQ ID NO: 1089032 - RNA, 23 nt, Human
cuacagccaggcuugccugggac

SEQ ID NO: 1089033 - RNA, 18 nt, Human
cucgcccaccugacggcu

SEQ ID NO: 1089034 - RNA, 18 nt, Human
cugcagcacgaccugggc

SEQ ID NO: 1089035 - RNA, 18 nt, Human
cugcgcaggcacacggcc

SEQ ID NO: 1089036 - RNA, 26 nt, Human
cuuccggucaggcuagggugaaagga

SEQ ID NO: 1089037 - RNA, 20 nt, Human
gacgggacgggggagacugg

SEQ ID NO: 1089038 - RNA, 23 nt, Human
gagacgccccacccacaucacuc

SEQ ID NO: 1089039 - RNA, 21 nt, Human
gaucugcugcuucuucaggcu

SEQ ID NO: 1089040 - RNA, 22 nt, Human
gcacccccuggggagggugcug

SEQ ID NO: 1089041 - RNA, 24 nt, Human
gcagcacgaccugggcgcagcucu

SEQ ID NO: 1089042 - RNA, 21 nt, Human
gccacauugccggagcggaac

SEQ ID NO: 1089043 - RNA, 21 nt, Human
gccaccaccacccuggcagaa

SEQ ID NO: 1089044 - RNA, 21 nt, Human
gccacggugaggaagcggcag

SEQ ID NO: 1089045 - RNA, 19 nt, Human
gccacgugggagaggggcu

SEQ ID NO: 1089046 - RNA, 21 nt, Human
gcccagggcuggggcuggacc

SEQ ID NO: 1089047 - RNA, 22 nt, Human
gcccagguggcugcgcaggcac

SEQ ID NO: 1089048 - RNA, 19 nt, Human
gcccccaaccgucccuuag

SEQ ID NO: 1089049 - RNA, 21 nt, Human
gccgccugcagcacgaccugg

SEQ ID NO: 1089050 - RNA, 25 nt, Human
gcgccugucauggcgcaggaagcgg

SEQ ID NO: 1089051 - RNA, 20 nt, Human
gcgcugcccgccuagucagg

SEQ ID NO: 1089052 - RNA, 21 nt, Human
gcugcgcaggcacacggccgc

SEQ ID NO: 1089053 - RNA, 18 nt, Human
ggacacgugcccagcucc

SEQ ID NO: 1089054 - RNA, 18 nt, Human
ggacgggggagacuggca

SEQ ID NO: 1089055 - RNA, 26 nt, Human
ggaggagaagggguuagcagggaggg

SEQ ID NO: 1089056 - RNA, 25 nt, Human
ggagggccacugacaggcuugggac

SEQ ID NO: 1089057 - RNA, 20 nt, Human
ggcagcaggggggcccuggc

SEQ ID NO: 1089058 - RNA, 19 nt, Human
ggcgcagcucugcuccagg

SEQ ID NO: 1089059 - RNA, 20 nt, Human
ggcgguggacgggaggccgc

SEQ ID NO: 1089060 - RNA, 18 nt, Human
ggcucggggcgcgccacc

SEQ ID NO: 1089061 - RNA, 20 nt, Human
ggcugggaggagguggcugg

SEQ ID NO: 1089062 - RNA, 21 nt, Human
ggcugggaggggcaagagauu

SEQ ID NO: 1089063 - RNA, 24 nt, Human
gggcaggaaccgggaagggcgggc

SEQ ID NO: 1089064 - RNA, 21 nt, Human
gggcggaggggagacugggaa

SEQ ID NO: 1089065 - RNA, 24 nt, Human
gggggcugggaggagguggcuggg

SEQ ID NO: 1089066 - RNA, 25 nt, Human
uacagccaggcuugccugggacgcc

SEQ ID NO: 1089067 - RNA, 21 nt, Human
uagcggcccagguggcugcgc

SEQ ID NO: 1089068 - RNA, 21 nt, Human
uaggggcgacaggugggggca

SEQ ID NO: 1089069 - RNA, 22 nt, Human
ucacucacuacuacagccaggc

SEQ ID NO: 1089070 - RNA, 21 nt, Human
uccagagaaauaaggcucaga

SEQ ID NO: 1089071 - RNA, 22 nt, Human
uccagcguccagaucugcugcu

SEQ ID NO: 1089072 - RNA, 19 nt, Human
uccccgagggggcgacgcc

SEQ ID NO: 1089073 - RNA, 25 nt, Human
uccccgagggggcgacgccuggcuu

SEQ ID NO: 1089074 - RNA, 20 nt, Human
uccccgcggcggcgccccug

SEQ ID NO: 1089075 - RNA, 23 nt, Human
uccccgcggcggcgccccugcuc

SEQ ID NO: 1089076 - RNA, 20 nt, Human
ucccuucccaagcagggguu

SEQ ID NO: 1089077 - RNA, 21 nt, Human
uccgcagcccaggcccagggc

SEQ ID NO: 1089078 - RNA, 22 nt, Human
uccgcagcccaggcccagggcu

SEQ ID NO: 1089079 - RNA, 23 nt, Human
uccgcggaggcccuuaggacccc

SEQ ID NO: 1089080 - RNA, 20 nt, Human
uccuggggggcugggaggag

SEQ ID NO: 1089081 - RNA, 21 nt, Human
uccuggggggcugggaggagg

SEQ ID NO: 1089082 - RNA, 23 nt, Human
uccuggggggcugggaggaggug

SEQ ID NO: 1089083 - RNA, 19 nt, Human
ucgcggaaggccacauugc

SEQ ID NO: 1089084 - RNA, 18 nt, Human
ugaaaggaaagaggagga

SEQ ID NO: 1089085 - RNA, 24 nt, Human
ugaaaggaaagaggaggaagacgg

SEQ ID NO: 1089086 - RNA, 25 nt, Human
ugaaaggaaagaggaggaagacggc

SEQ ID NO: 1089087 - RNA, 22 nt, Human
ugacaggcuugggacacgugcc

SEQ ID NO: 1089088 - RNA, 26 nt, Human
ugcccagcuccuggggggcuggggcc

SEQ ID NO: 1089089 - RNA, 23 nt, Human
ugccgcugggccccgacggcgcc

SEQ ID NO: 1089090 - RNA, 22 nt, Human
ugcugcuucuucaggcugcugg

SEQ ID NO: 1089091 - RNA, 19 nt, Human
uggcagcaggggggcccug

SEQ ID NO: 1089092 - RNA, 18 nt, Human
uggcugggaggggcaaga

SEQ ID NO: 1089093 - RNA, 21 nt, Human
ugggagaggggcuguuuccag

SEQ ID NO: 1089094 - RNA, 18 nt, Human
ugggaggagguggcuggg

SEQ ID NO: 1089095 - RNA, 21 nt, Human
ugggaggagguggcugggagg

SEQ ID NO: 1089096 - RNA, 24 nt, Human
ugggaggagguggcugggaggggc

SEQ ID NO: 1089097 - RNA, 21 nt, Human
uggggcuggaccggaaggacg

SEQ ID NO: 1089098 - RNA, 22 nt, Human
uggggggcugggaggagguggc

SEQ ID NO: 1089099 - RNA, 21 nt, Human
uuacaaaaaauaaaagaccag

SEQ ID NO: 1089100 - RNA, 21 nt, Human
uucugcuuccggucaggcuag

SEQ ID NO: 1089101 - RNA, 20 nt, Human
uucuucaggcugcuggccga

SEQ ID NO: 1089102 - RNA, 23 nt, Human
uuuucucugggguuuccaguuug

SEQ ID NO: 1089103 - RNA, 26 nt, Human
aaacacaacuucagaguguaagggua

SEQ ID NO: 1089104 - RNA, 26 nt, Human
aaauaacaaaaacaaaaaccaaaaaa

SEQ ID NO: 1089105 - RNA, 23 nt, Human
aacaaaaacaaaaaccaaaaaau

SEQ ID NO: 1089106 - RNA, 21 nt, Human
aauaacaaaaacaaaaaccaa

SEQ ID NO: 1089107 - RNA, 25 nt, Human
aauaacaaaaacaaaaaccaaaaaa

SEQ ID NO: 1089108 - RNA, 22 nt, Human
acacaacuucagaguguaaggg

SEQ ID NO: 1089109 - RNA, 28 nt, Human
accuagcauuaaaaaaaaaaaaaaaaaa

SEQ ID NO: 1089110 - RNA, 24 nt, Human
agacauucagcuucugcccaaaca

SEQ ID NO: 1089111 - RNA, 19 nt, Human
agcacaaauguaugaacag

SEQ ID NO: 1089112 - RNA, 27 nt, Human
aggaaagagaaauaccuuccugcucag

SEQ ID NO: 1089113 - RNA, 20 nt, Human
aggcgugcugagcgguggag

SEQ ID NO: 1089114 - RNA, 20 nt, Human
agggguuuugugcaggucau

SEQ ID NO: 1089115 - RNA, 20 nt, Human
aguuccccucucccuccccc

SEQ ID NO: 1089116 - RNA, 20 nt, Human
auaacaaaaacaaaaaccaa

SEQ ID NO: 1089117 - RNA, 21 nt, Human
aucagccaucuccaccauggc

SEQ ID NO: 1089118 - RNA, 23 nt, Human
caaauaacaaaaacaaaaaccaa

SEQ ID NO: 1089119 - RNA, 18 nt, Human
cacagcguagccaucagc

SEQ ID NO: 1089120 - RNA, 19 nt, Human
caccgcauagcugaugggu

SEQ ID NO: 1089121 - RNA, 22 nt, Human
caccgccgccgccgccgccucc

SEQ ID NO: 1089122 - RNA, 20 nt, Human
caggaauuucaccuucucca

SEQ ID NO: 1089123 - RNA, 18 nt, Human
caguuccccucucccucc

SEQ ID NO: 1089124 - RNA, 23 nt, Human
caucgcucccgaccgccucugcc

SEQ ID NO: 1089125 - RNA, 19 nt, Human
ccaccgccaccgccgccgc

SEQ ID NO: 1089126 - RNA, 20 nt, Human
ccaccgccaccgccgccgcc

SEQ ID NO: 1089127 - RNA, 25 nt, Human
ccaccgccaccgccgccgccgccgg

SEQ ID NO: 1089128 - RNA, 20 nt, Human
ccaccgccgccgccgccgcc

SEQ ID NO: 1089129 - RNA, 21 nt, Human
ccagcucaucauagaucucaa

SEQ ID NO: 1089130 - RNA, 23 nt, Human
ccauacaagcagaagacauugaa

SEQ ID NO: 1089131 - RNA, 21 nt, Human
cccauuccagcaguccagagg

SEQ ID NO: 1089132 - RNA, 22 nt, Human
cccauuccagcaguccagagga

SEQ ID NO: 1089133 - RNA, 24 nt, Human
cccccgccgccaucuucaucgcuc

SEQ ID NO: 1089134 - RNA, 19 nt, Human
ccccgccgccccgccuccu

SEQ ID NO: 1089135 - RNA, 18 nt, Human
ccccgccgccgcccccgc

SEQ ID NO: 1089136 - RNA, 18 nt, Human
ccccgccuccuccaccgc

SEQ ID NO: 1089137 - RNA, 23 nt, Human
ccccugcuguggacaacugggga

SEQ ID NO: 1089138 - RNA, 23 nt, Human
ccgccaccgccgccgccgccgcc

SEQ ID NO: 1089139 - RNA, 24 nt, Human
ccgccaccgccgccgccgccgccu

SEQ ID NO: 1089140 - RNA, 22 nt, Human
ccgcccccgccgccccgccucc

SEQ ID NO: 1089141 - RNA, 23 nt, Human
ccgccgccaucuucaucgcuccc

SEQ ID NO: 1089142 - RNA, 23 nt, Human
ccgccgcccucacugccgccgcc

SEQ ID NO: 1089143 - RNA, 23 nt, Human
ccgccgcccucacugccgccgcc

SEQ ID NO: 1089144 - RNA, 24 nt, Human
ccgccgcccucacugccgccgccu

SEQ ID NO: 1089145 - RNA, 23 nt, Human
ccgccgccgcccccgccgccccg

SEQ ID NO: 1089146 - RNA, 25 nt, Human
ccgccgccgcccccgccgccccgcc

SEQ ID NO: 1089147 - RNA, 26 nt, Human
ccgccgccgcccccgccgccccgccu

SEQ ID NO: 1089148 - RNA, 21 nt, Human
ccgccgccgccgccgccuccg

SEQ ID NO: 1089149 - RNA, 18 nt, Human
ccgccgccgccgccuccg

SEQ ID NO: 1089150 - RNA, 18 nt, Human
ccgccgccgccuccgugc

SEQ ID NO: 1089151 - RNA, 25 nt, Human
ccugcagacuuccagcguuuccguu

SEQ ID NO: 1089152 - RNA, 31 nt, Human
ccugcuguggacaacuggggaggcagggguu

SEQ ID NO: 1089153 - RNA, 24 nt, Human
cgcccucacugccgccgccuuagu

SEQ ID NO: 1089154 - RNA, 21 nt, Human
cgcuuaggggcaccgccgccc

SEQ ID NO: 1089155 - RNA, 23 nt, Human
cgcuucacucccagcucaucaua

SEQ ID NO: 1089156 - RNA, 22 nt, Human
cucccagcucaucauagaucuc

SEQ ID NO: 1089157 - RNA, 19 nt, Human
cucccccugcagacuucca

SEQ ID NO: 1089158 - RNA, 22 nt, Human
cugccgccccccgccgccaucu

SEQ ID NO: 1089159 - RNA, 19 nt, Human
cugccgccgccuuaguagc

SEQ ID NO: 1089160 - RNA, 19 nt, Human
cuucaucgcucccgaccgc

SEQ ID NO: 1089161 - RNA, 28 nt, Human
gaaccuagcauuaaaaaaaaaaaaaaag

SEQ ID NO: 1089162 - RNA, 21 nt, Human
gaauacuuucacagaagaugg

SEQ ID NO: 1089163 - RNA, 23 nt, Human
gauggcuggcugcuuggagacac

SEQ ID NO: 1089164 - RNA, 25 nt, Human
gauucccauuccagcaguccagagg

SEQ ID NO: 1089165 - RNA, 20 nt, Human
gcaguccagaggagcugcgc

SEQ ID NO: 1089166 - RNA, 20 nt, Human
gcaugauggcuggcugcuug

SEQ ID NO: 1089167 - RNA, 21 nt, Human
gccaucagccaucuccaccau

SEQ ID NO: 1089168 - RNA, 21 nt, Human
gccccccgccgccaucuucau

SEQ ID NO: 1089169 - RNA, 22 nt, Human
gccccccgccgccaucuucauc

SEQ ID NO: 1089170 - RNA, 22 nt, Human
gccgccaccgccgccucugccg

SEQ ID NO: 1089171 - RNA, 25 nt, Human
gccgccaucuucaucgcucccgacc

SEQ ID NO: 1089172 - RNA, 20 nt, Human
gggcaugauggcuggcugcu

SEQ ID NO: 1089173 - RNA, 24 nt, Human
ggguggagaaccgauuguuccggg

SEQ ID NO: 1089174 - RNA, 19 nt, Human
gguccaaacuccugcaagg

SEQ ID NO: 1089175 - RNA, 20 nt, Human
guccacagcguagccaucag

SEQ ID NO: 1089176 - RNA, 18 nt, Human
uaacaaaaacaaaaacca

SEQ ID NO: 1089177 - RNA, 24 nt, Human
uaugaacaggaaaaaaaaaucaca

SEQ ID NO: 1089178 - RNA, 21 nt, Human
ucauagaucucaaagaaguuc

SEQ ID NO: 1089179 - RNA, 22 nt, Human
uccaccacaucgucaaucaggc

SEQ ID NO: 1089180 - RNA, 18 nt, Human
uccccgccgccgcccccg

SEQ ID NO: 1089181 - RNA, 21 nt, Human
uccccgccgccgcccccgccg

SEQ ID NO: 1089182 - RNA, 24 nt, Human
uccccgccgccgcccccgccgccc

SEQ ID NO: 1089183 - RNA, 23 nt, Human
uccuccaccgccaccgccgccgc

SEQ ID NO: 1089184 - RNA, 26 nt, Human
ucgccugagaauacuuucacagaaga

SEQ ID NO: 1089185 - RNA, 20 nt, Human
ucgcucccgaccgccucugc

SEQ ID NO: 1089186 - RNA, 19 nt, Human
ucucaaagaaguucuccuc

SEQ ID NO: 1089187 - RNA, 24 nt, Human
ucuccacauugccauacaagcaga

SEQ ID NO: 1089188 - RNA, 19 nt, Human
ucugggguggagaaccgau

SEQ ID NO: 1089189 - RNA, 18 nt, Human
ucuugggagauaucaguu

SEQ ID NO: 1089190 - RNA, 28 nt, Human
ugagaauacuuucacagaagauggccgc

SEQ ID NO: 1089191 - RNA, 19 nt, Human
ugagguggguaaugacccg

SEQ ID NO: 1089192 - RNA, 23 nt, Human
ugagguggguaaugacccggucc

SEQ ID NO: 1089193 - RNA, 23 nt, Human
ugcaggucaugguaguucucccc

SEQ ID NO: 1089194 - RNA, 19 nt, Human
ugcuggaugcgguucuugg

SEQ ID NO: 1089195 - RNA, 22 nt, Human
uggauucccauuccagcagucc

SEQ ID NO: 1089196 - RNA, 19 nt, Human
uggcauaaaggaaagagaa

SEQ ID NO: 1089197 - RNA, 19 nt, Human
uggcugccugcucuggggu

SEQ ID NO: 1089198 - RNA, 18 nt, Human
uggggugcuggaugcggu

SEQ ID NO: 1089199 - RNA, 20 nt, Human
ugguaguucuccccgccgcc

SEQ ID NO: 1089200 - RNA, 23 nt, Human
uguaugaacaggaaaaaaaaauc

SEQ ID NO: 1089201 - RNA, 20 nt, Human
uuaaaaaaaaaaaaaaaaaa

SEQ ID NO: 1089202 - RNA, 22 nt, Human
uuccccucucccucccccugca

SEQ ID NO: 1089203 - RNA, 22 nt, Human
uucuccccgccgccgcccccgc

SEQ ID NO: 1089204 - RNA, 19 nt, Human
uugaagaagugcagcacgu

SEQ ID NO: 1089205 - RNA, 21 nt, Human
uugcuuuucaggaauuucacc

SEQ ID NO: 1089206 - RNA, 20 nt, Human
aaucucauuccucuccaguc

SEQ ID NO: 1089207 - RNA, 23 nt, Human
agaggauguggcuucuggcccuc

SEQ ID NO: 1089208 - RNA, 18 nt, Human
aggagcugcaggcaccuc

SEQ ID NO: 1089209 - RNA, 19 nt, Human
aggagcugcaggcaccugc

SEQ ID NO: 1089210 - RNA, 22 nt, Human
auagccaggagcugcaggcacc

SEQ ID NO: 1089211 - RNA, 22 nt, Human
augagucucaagauccaaaggg

SEQ ID NO: 1089212 - RNA, 23 nt, Human
auggggguggugaccccugccuu

SEQ ID NO: 1089213 - RNA, 21 nt, Human
cacacagccugccacacauuc

SEQ ID NO: 1089214 - RNA, 23 nt, Human
cauagccaggagcugcaggcacc

SEQ ID NO: 1089215 - RNA, 21 nt, Human
cuagcacacagccugccacac

SEQ ID NO: 1089216 - RNA, 24 nt, Human
cucauuccucuccagucccuccug

SEQ ID NO: 1089217 - RNA, 21 nt, Human
cuccuuuucgcugauggggcc

SEQ ID NO: 1089218 - RNA, 23 nt, Human
cugaagcagaggauguggcuucu

SEQ ID NO: 1089219 - RNA, 24 nt, Human
cugaagcagaggauguggcuucug

SEQ ID NO: 1089220 - RNA, 20 nt, Human
gccaaucucauuccucucca

SEQ ID NO: 1089221 - RNA, 21 nt, Human
gcgaagaggccugaagcagag

SEQ ID NO: 1089222 - RNA, 21 nt, Human
gcgaagaggccugaagcagag

SEQ ID NO: 1089223 - RNA, 20 nt, Human
ggaaagcaggacauagccag

SEQ ID NO: 1089224 - RNA, 20 nt, Human
ggaacugguuuuguucucgg

SEQ ID NO: 1089225 - RNA, 18 nt, Human
gggaaaugggggugguga

SEQ ID NO: 1089226 - RNA, 26 nt, Human
ggggccgcaaggaggggaacugguuu

SEQ ID NO: 1089227 - RNA, 19 nt, Human
gugcugccuucuuggucug

SEQ ID NO: 1089228 - RNA, 23 nt, Human
ucaguagugggaggcagguucag

SEQ ID NO: 1089229 - RNA, 24 nt, Human
ucaguagugggaggcagguucagu

SEQ ID NO: 1089230 - RNA, 20 nt, Human
ucauuccucuccagucccuc

SEQ ID NO: 1089231 - RNA, 21 nt, Human
ugaagcagaggauguggcuuc

SEQ ID NO: 1089232 - RNA, 19 nt, Human
uggcuucuggcccuccccu

SEQ ID NO: 1089233 - RNA, 21 nt, Human
aaaaaaaaaaaaaagagcuag

SEQ ID NO: 1089234 - RNA, 20 nt, Human
aaaaaaagagcuagacccac

SEQ ID NO: 1089235 - RNA, 19 nt, Human
aaaaagcccggcgcagugg

SEQ ID NO: 1089236 - RNA, 21 nt, Human
aaagaaaaccaaccuaaaucc

SEQ ID NO: 1089237 - RNA, 27 nt, Human
aaagaaaaccaaccuaaauccuguaaa

SEQ ID NO: 1089238 - RNA, 24 nt, Human
aaaucuuccuuucauucuuuagac

SEQ ID NO: 1089239 - RNA, 19 nt, Human
aacauggagaaaccccauc

SEQ ID NO: 1089240 - RNA, 20 nt, Human
aacauggagaaaccccaucu

SEQ ID NO: 1089241 - RNA, 21 nt, Human
aacauggagaaaccccaucuc

SEQ ID NO: 1089242 - RNA, 19 nt, Human
aacauggugaaaccccauc

SEQ ID NO: 1089243 - RNA, 20 nt, Human
aacauggugaaaccccaucu

SEQ ID NO: 1089244 - RNA, 20 nt, Human
aacauggugaaaccccaucu

SEQ ID NO: 1089245 - RNA, 21 nt, Human
aacauggugaaaccccaucuc

SEQ ID NO: 1089246 - RNA, 21 nt, Human
aaccuucccuccuuugaccac

SEQ ID NO: 1089247 - RNA, 20 nt, Human
aagcagagguugcagugagc

SEQ ID NO: 1089248 - RNA, 24 nt, Human
aagcagagguugcagugagcugag

SEQ ID NO: 1089249 - RNA, 24 nt, Human
aaucacuugaacccgggaagcaga

SEQ ID NO: 1089250 - RNA, 20 nt, Human
aauccaucuucccugccauu

SEQ ID NO: 1089251 - RNA, 18 nt, Human
aauuaaucucuaacacaa

SEQ ID NO: 1089252 - RNA, 20 nt, Human
aauuguuugaacccagaagg

SEQ ID NO: 1089253 - RNA, 24 nt, Human
aauuguuugaacccagaaggcaga

SEQ ID NO: 1089254 - RNA, 21 nt, Human
acacaguaguccauuuuccca

SEQ ID NO: 1089255 - RNA, 22 nt, Human
acagaaagaaaaccaaccuaaa

SEQ ID NO: 1089256 - RNA, 24 nt, Human
acagagugagacuccaucucgaaa

SEQ ID NO: 1089257 - RNA, 20 nt, Human
acauuuauugagccucuuuc

SEQ ID NO: 1089258 - RNA, 18 nt, Human
accccaucucuacuaaaa

SEQ ID NO: 1089259 - RNA, 18 nt, Human
accccaucucuacuaaaa

SEQ ID NO: 1089260 - RNA, 23 nt, Human
acucagaagaaacuaagaaaucc

SEQ ID NO: 1089261 - RNA, 24 nt, Human
acuccagccuggacgacagaguga

SEQ ID NO: 1089262 - RNA, 24 nt, Human
acugcacuccagccuggacgacag

SEQ ID NO: 1089263 - RNA, 26 nt, Human
acugcacuccagccuggacgacagag

SEQ ID NO: 1089264 - RNA, 22 nt, Human
agaaucacuugaacccgggaag

SEQ ID NO: 1089265 - RNA, 18 nt, Human
agagguugcagugagcug

SEQ ID NO: 1089266 - RNA, 22 nt, Human
agagguugcagugagcugagau

SEQ ID NO: 1089267 - RNA, 22 nt, Human
agagguugcagugagcugagau

SEQ ID NO: 1089268 - RNA, 23 nt, Human
agagguugcagugagcugagauc

SEQ ID NO: 1089269 - RNA, 23 nt, Human
agagguugcagugagcugagauc

SEQ ID NO: 1089270 - RNA, 24 nt, Human
agagguugcagugagcugagauca

SEQ ID NO: 1089271 - RNA, 24 nt, Human
agagguugcagugagcugagaucg

SEQ ID NO: 1089272 - RNA, 20 nt, Human
agagguugcagugagcuggc

SEQ ID NO: 1089273 - RNA, 22 nt, Human
agaucaccugaggucgggaguu

SEQ ID NO: 1089274 - RNA, 24 nt, Human
agcacuuugggaggccgaggcagg

SEQ ID NO: 1089275 - RNA, 25 nt, Human
agcagaauccuaauuaaucucuaac

SEQ ID NO: 1089276 - RNA, 24 nt, Human
agccuggacgacagagugagacuc

SEQ ID NO: 1089277 - RNA, 22 nt, Human
agccuggccaacauggugaaac

SEQ ID NO: 1089278 - RNA, 24 nt, Human
agccuggccaacauggugaaaccc

SEQ ID NO: 1089279 - RNA, 23 nt, Human
agcugggcaugguggcgcaugcu

SEQ ID NO: 1089280 - RNA, 19 nt, Human
aggcaaagagagggacuga

SEQ ID NO: 1089281 - RNA, 19 nt, Human
aggcagagguugcagugag

SEQ ID NO: 1089282 - RNA, 20 nt, Human
aggcagagguugcagugagc

SEQ ID NO: 1089283 - RNA, 24 nt, Human
aggcagagguugcagugagcugag

SEQ ID NO: 1089284 - RNA, 26 nt, Human
aggcagaucaccugaggucgggaguu

SEQ ID NO: 1089285 - RNA, 19 nt, Human
aggcagaucaugaggucaa

SEQ ID NO: 1089286 - RNA, 23 nt, Human
aggcaggaaaauuguuugaaccc

SEQ ID NO: 1089287 - RNA, 18 nt, Human
aggcaggagaaucacuug

SEQ ID NO: 1089288 - RNA, 24 nt, Human
aggcaggagaaucacuugaacccg

SEQ ID NO: 1089289 - RNA, 22 nt, Human
aggcaggcagaucaccugaggg

SEQ ID NO: 1089290 - RNA, 22 nt, Human
aggcaggcagaucaccugaggu

SEQ ID NO: 1089291 - RNA, 26 nt, Human
aggcaggcagaucaccugaggucggg

SEQ ID NO: 1089292 - RNA, 22 nt, Human
aggcaggcagaucaugagguca

SEQ ID NO: 1089293 - RNA, 23 nt, Human
aggcaggcagaucaugaggucaa

SEQ ID NO: 1089294 - RNA, 27 nt, Human
aggcaggcagaucaugaggucaauuca

SEQ ID NO: 1089295 - RNA, 21 nt, Human
aggcugaggcaggaaaauugu

SEQ ID NO: 1089296 - RNA, 24 nt, Human
aggcugaggcaggaaaauuguuug

SEQ ID NO: 1089297 - RNA, 24 nt, Human
aggcugaggcaggagaaucacuug

SEQ ID NO: 1089298 - RNA, 24 nt, Human
aguggcucacaccuguaaucccag

SEQ ID NO: 1089299 - RNA, 23 nt, Human
aguggcucaugccuguaauccca

SEQ ID NO: 1089300 - RNA, 24 nt, Human
aguggcucaugccuguaaucccag

SEQ ID NO: 1089301 - RNA, 24 nt, Human
aucaugccacugcacuccagccug

SEQ ID NO: 1089302 - RNA, 24 nt, Human
aucgugccauugcacuccagccug

SEQ ID NO: 1089303 - RNA, 25 nt, Human
augccacugcacuccagccuggacu

SEQ ID NO: 1089304 - RNA, 19 nt, Human
augccuguaaucccagcac

SEQ ID NO: 1089305 - RNA, 24 nt, Human
auugcacuccagccugggcaacaa

SEQ ID NO: 1089306 - RNA, 25 nt, Human
auugcacuccagccugggcaacaag

SEQ ID NO: 1089307 - RNA, 22 nt, Human
caaaacaccuugcucccccuuu

SEQ ID NO: 1089308 - RNA, 23 nt, Human
caaacaguggcauaaauccuaaa

SEQ ID NO: 1089309 - RNA, 19 nt, Human
caacauaacagaaguacca

SEQ ID NO: 1089310 - RNA, 24 nt, Human
caacauggugaaaccccaucucua

SEQ ID NO: 1089311 - RNA, 26 nt, Human
caagaugauucauagggcagaaccaa

SEQ ID NO: 1089312 - RNA, 24 nt, Human
cacaccuguaaucccagcacuuug

SEQ ID NO: 1089313 - RNA, 19 nt, Human
caccuaaugggcaaagucu

SEQ ID NO: 1089314 - RNA, 23 nt, Human
caccuguaaucccagcacuuugg

SEQ ID NO: 1089315 - RNA, 24 nt, Human
caccuguaaucccagcacuuuggg

SEQ ID NO: 1089316 - RNA, 19 nt, Human
caccuguucuugacaagau

SEQ ID NO: 1089317 - RNA, 22 nt, Human
cacuccagccuggacgacagag

SEQ ID NO: 1089318 - RNA, 24 nt, Human
cacuccagccuggacgacagagug

SEQ ID NO: 1089319 - RNA, 24 nt, Human
cacuccagccugggcaacaagagc

SEQ ID NO: 1089320 - RNA, 18 nt, Human
cacugcacuccagccugg

SEQ ID NO: 1089321 - RNA, 19 nt, Human
cacugcacuccagccugga

SEQ ID NO: 1089322 - RNA, 20 nt, Human
cacugcacuccagccuggac

SEQ ID NO: 1089323 - RNA, 22 nt, Human
cacugcacuccagccuggacga

SEQ ID NO: 1089324 - RNA, 24 nt, Human
cacugcacuccagccuggacgaca

SEQ ID NO: 1089325 - RNA, 21 nt, Human
cagaaagaaaaccaaccuaaa

SEQ ID NO: 1089326 - RNA, 20 nt, Human
cagaagaaacuaagaaaucc

SEQ ID NO: 1089327 - RNA, 21 nt, Human
cagaaugaguaaagaaggaug

SEQ ID NO: 1089328 - RNA, 24 nt, Human
cagaucaccugaggucgggaguuu

SEQ ID NO: 1089329 - RNA, 22 nt, Human
cagaucaugaggucaauucaaa

SEQ ID NO: 1089330 - RNA, 21 nt, Human
cagcacuuugggagaccuagg

SEQ ID NO: 1089331 - RNA, 24 nt, Human
cagcacuuugggagaccuaggcag

SEQ ID NO: 1089332 - RNA, 24 nt, Human
cagcacuuugggaggccgaggcag

SEQ ID NO: 1089333 - RNA, 25 nt, Human
cagcacuuugggaggccgaggcagg

SEQ ID NO: 1089334 - RNA, 24 nt, Human
cagccacuugggaggcugaggcag

SEQ ID NO: 1089335 - RNA, 24 nt, Human
cagccugcccaacauggagaaacc

SEQ ID NO: 1089336 - RNA, 24 nt, Human
cagcuacucaggaggcugaggcag

SEQ ID NO: 1089337 - RNA, 24 nt, Human
caggcagaucaccugaggucggga

SEQ ID NO: 1089338 - RNA, 24 nt, Human
caugccuguaaucccagcacuuug

SEQ ID NO: 1089339 - RNA, 18 nt, Human
cauugcacuccagccugg

SEQ ID NO: 1089340 - RNA, 19 nt, Human
cauugcacuccagccuggg

SEQ ID NO: 1089341 - RNA, 21 nt, Human
cauugcacuccagccugggca

SEQ ID NO: 1089342 - RNA, 24 nt, Human
cauugcacuccagccugggcaaca

SEQ ID NO: 1089343 - RNA, 20 nt, Human
ccaagauggacauuaaacuc

SEQ ID NO: 1089344 - RNA, 19 nt, Human
ccacugcacuccagccugg

SEQ ID NO: 1089345 - RNA, 19 nt, Human
ccacugcacuccagccugg

SEQ ID NO: 1089346 - RNA, 20 nt, Human
ccacugcacuccagccugga

SEQ ID NO: 1089347 - RNA, 21 nt, Human
ccacugcacuccagccuggac

SEQ ID NO: 1089348 - RNA, 24 nt, Human
ccacugcacuccagccuggacgac

SEQ ID NO: 1089349 - RNA, 18 nt, Human
ccagccuggccaacaugg

SEQ ID NO: 1089350 - RNA, 18 nt, Human
ccauugcacuccagccug

SEQ ID NO: 1089351 - RNA, 20 nt, Human
ccauugcacuccagccuggg

SEQ ID NO: 1089352 - RNA, 21 nt, Human
ccauugcacuccagccugggc

SEQ ID NO: 1089353 - RNA, 23 nt, Human
ccauugcacuccagccugggcaa

SEQ ID NO: 1089354 - RNA, 24 nt, Human
ccauugcacuccagccugggcaac

SEQ ID NO: 1089355 - RNA, 23 nt, Human
cccaguccuuggccaucuggccg

SEQ ID NO: 1089356 - RNA, 19 nt, Human
cccauuccucaacccaccc

SEQ ID NO: 1089357 - RNA, 24 nt, Human
ccccuuuuucccauuccucaaccc

SEQ ID NO: 1089358 - RNA, 22 nt, Human
ccuaaaucaucugagauccuga

SEQ ID NO: 1089359 - RNA, 22 nt, Human
ccugaggucgggaguuugagac

SEQ ID NO: 1089360 - RNA, 24 nt, Human
ccugcccaacauggagaaacccca

SEQ ID NO: 1089361 - RNA, 20 nt, Human
ccugcuucaugaagccuucc

SEQ ID NO: 1089362 - RNA, 22 nt, Human
ccuggacgacagagugagacuc

SEQ ID NO: 1089363 - RNA, 23 nt, Human
ccuggccaacauggugaaacccc

SEQ ID NO: 1089364 - RNA, 24 nt, Human
ccuggccaacauggugaaacccca

SEQ ID NO: 1089365 - RNA, 22 nt, Human
ccuguaaucccagcacuuuggg

SEQ ID NO: 1089366 - RNA, 22 nt, Human
ccuucccuccuuugaccacuuc

SEQ ID NO: 1089367 - RNA, 21 nt, Human
ccuugcucccccuuuuuccca

SEQ ID NO: 1089368 - RNA, 20 nt, Human
ccuugugcuauacagggcuc

SEQ ID NO: 1089369 - RNA, 21 nt, Human
cgaaaaaaaaaagcccggcgc

SEQ ID NO: 1089370 - RNA, 24 nt, Human
cggcuacuuaucccaguccuuggc

SEQ ID NO: 1089371 - RNA, 24 nt, Human
cgggaagcagagguugcagugagc

SEQ ID NO: 1089372 - RNA, 22 nt, Human
cucacaccuguaaucccagcac

SEQ ID NO: 1089373 - RNA, 24 nt, Human
cucacaccuguaaucccagcacuu

SEQ ID NO: 1089374 - RNA, 23 nt, Human
cucaugccuguaaucccagcacu

SEQ ID NO: 1089375 - RNA, 24 nt, Human
cucaugccuguaaucccagcacuu

SEQ ID NO: 1089376 - RNA, 20 nt, Human
cucucccugaucuuauucca

SEQ ID NO: 1089377 - RNA, 23 nt, Human
cugcucuaccugucaccacaugc

SEQ ID NO: 1089378 - RNA, 23 nt, Human
cuggccaacauggugaaacccca

SEQ ID NO: 1089379 - RNA, 25 nt, Human
cuucaugaagccuuccugaauaaag

SEQ ID NO: 1089380 - RNA, 18 nt, Human
gacagaaagaaaaccaac

SEQ ID NO: 1089381 - RNA, 24 nt, Human
gacagagugagacuccaucucgaa

SEQ ID NO: 1089382 - RNA, 23 nt, Human
gagaucaugccacugcacuccag

SEQ ID NO: 1089383 - RNA, 23 nt, Human
gagaucgugccauugcacuccag

SEQ ID NO: 1089384 - RNA, 21 nt, Human
gagcaaaacuccgucuccaaa

SEQ ID NO: 1089385 - RNA, 19 nt, Human
gaggcaggcagaucaccug

SEQ ID NO: 1089386 - RNA, 24 nt, Human
gaucaccugaggucgggaguuuga

SEQ ID NO: 1089387 - RNA, 19 nt, Human
gauuucugaccuuuaucuc

SEQ ID NO: 1089388 - RNA, 24 nt, Human
gcacuccagccuggacgacagagu

SEQ ID NO: 1089389 - RNA, 22 nt, Human
gcaggaaaauuguuugaaccca

SEQ ID NO: 1089390 - RNA, 22 nt, Human
gcaggagaaucacuugaacccg

SEQ ID NO: 1089391 - RNA, 19 nt, Human
gcagucagcuguuuccuua

SEQ ID NO: 1089392 - RNA, 24 nt, Human
gccaacauggugaaaccccaucuc

SEQ ID NO: 1089393 - RNA, 22 nt, Human
gccauugcacuccagccugggc

SEQ ID NO: 1089394 - RNA, 24 nt, Human
gccauugcacuccagccugggcaa

SEQ ID NO: 1089395 - RNA, 19 nt, Human
gcccggcgcaguggcucau

SEQ ID NO: 1089396 - RNA, 19 nt, Human
gcuaguccccuaaaacugc

SEQ ID NO: 1089397 - RNA, 20 nt, Human
gcugagaucaugccacugca

SEQ ID NO: 1089398 - RNA, 20 nt, Human
ggaagcagagguugcaguga

SEQ ID NO: 1089399 - RNA, 23 nt, Human
ggacagaaagaaaaccaaccuaa

SEQ ID NO: 1089400 - RNA, 22 nt, Human
ggaccacaacauuuaugcauag

SEQ ID NO: 1089401 - RNA, 19 nt, Human
ggaguuugagaccagccug

SEQ ID NO: 1089402 - RNA, 21 nt, Human
ggcagguggcuguaaucccag

SEQ ID NO: 1089403 - RNA, 19 nt, Human
ggccgggugcaguggcuca

SEQ ID NO: 1089404 - RNA, 21 nt, Human
ggccgggugcaguggcucaca

SEQ ID NO: 1089405 - RNA, 23 nt, Human
ggcgcaguggcucaugccuguaa

SEQ ID NO: 1089406 - RNA, 22 nt, Human
ggcgcaugcuuguaauuccagc

SEQ ID NO: 1089407 - RNA, 19 nt, Human
ggucgggaguuugagacca

SEQ ID NO: 1089408 - RNA, 23 nt, Human
ggugcaguggcucacaccuguaa

SEQ ID NO: 1089409 - RNA, 18 nt, Human
guaguaccugauuuacua

SEQ ID NO: 1089410 - RNA, 20 nt, Human
gugaaacggcuacuuauccc

SEQ ID NO: 1089411 - RNA, 18 nt, Human
gugcaguggcucacaccu

SEQ ID NO: 1089412 - RNA, 24 nt, Human
guucgcacacaguaguccauuuuc

SEQ ID NO: 1089413 - RNA, 19 nt, Human
guuugagaccagccugccc

SEQ ID NO: 1089414 - RNA, 21 nt, Human
uaaaaaugcaaaauuuagccu

SEQ ID NO: 1089415 - RNA, 22 nt, Human
uaaaaaugcaaaauuuagccug

SEQ ID NO: 1089416 - RNA, 19 nt, Human
uaaaauuagcugggcaugg

SEQ ID NO: 1089417 - RNA, 18 nt, Human
uaaaucaucugagauccu

SEQ ID NO: 1089418 - RNA, 22 nt, Human
uaagguaaaugaagagggugcc

SEQ ID NO: 1089419 - RNA, 21 nt, Human
uacuaaaaaugcaaaauuuag

SEQ ID NO: 1089420 - RNA, 25 nt, Human
uagaucaggaaaaacaaggaacaaa

SEQ ID NO: 1089421 - RNA, 23 nt, Human
uaggcaacauaacagaaguacca

SEQ ID NO: 1089422 - RNA, 23 nt, Human
uaggcaggcagaucaugagguca

SEQ ID NO: 1089423 - RNA, 18 nt, Human
uaucccaguccuuggcca

SEQ ID NO: 1089424 - RNA, 18 nt, Human
uauucaguugaaugugua

SEQ ID NO: 1089425 - RNA, 21 nt, Human
ucaaaaccagccuggccaaca

SEQ ID NO: 1089426 - RNA, 18 nt, Human
ucagacugguguuucuug

SEQ ID NO: 1089427 - RNA, 19 nt, Human
ucaggaaaaacaaggaaca

SEQ ID NO: 1089428 - RNA, 23 nt, Human
ucaugccacugcacuccagccug

SEQ ID NO: 1089429 - RNA, 18 nt, Human
ucauuuuagcauuuccau

SEQ ID NO: 1089430 - RNA, 23 nt, Human
uccagccuggacgacagagugag

SEQ ID NO: 1089431 - RNA, 24 nt, Human
uccagccuggacgacagagugaga

SEQ ID NO: 1089432 - RNA, 23 nt, Human
uccgucuccaaaaaaaaaaaaaa

SEQ ID NO: 1089433 - RNA, 22 nt, Human
ucuaacacaacaagcuaugaau

SEQ ID NO: 1089434 - RNA, 20 nt, Human
ucuccaaaaaaaaaaaaaaa

SEQ ID NO: 1089435 - RNA, 20 nt, Human
ucucuacuaaaaauauaaaa

SEQ ID NO: 1089436 - RNA, 20 nt, Human
ucucuacuaaaaaugcaaaa

SEQ ID NO: 1089437 - RNA, 19 nt, Human
ucugcuccuaacacccaug

SEQ ID NO: 1089438 - RNA, 20 nt, Human
ucuuccuacugcucucccug

SEQ ID NO: 1089439 - RNA, 19 nt, Human
ugaaaccccaucucuacua

SEQ ID NO: 1089440 - RNA, 24 nt, Human
ugagaccagccugcccaacaugga

SEQ ID NO: 1089441 - RNA, 25 nt, Human
ugagacuggacagaaagaaaaccaa

SEQ ID NO: 1089442 - RNA, 26 nt, Human
ugagacuggacagaaagaaaaccaac

SEQ ID NO: 1089443 - RNA, 22 nt, Human
ugagcugagaucaugccacugc

SEQ ID NO: 1089444 - RNA, 24 nt, Human
ugaggcaggaaaauuguuugaacc

SEQ ID NO: 1089445 - RNA, 25 nt, Human
ugaggcaggaaaauuguuugaaccc

SEQ ID NO: 1089446 - RNA, 20 nt, Human
ugaggcaggagaaucacuug

SEQ ID NO: 1089447 - RNA, 24 nt, Human
ugaggcaggagaaucacuugaacc

SEQ ID NO: 1089448 - RNA, 25 nt, Human
ugaggcaggagaaucacuugaaccc

SEQ ID NO: 1089449 - RNA, 18 nt, Human
ugaggucgggaguuugag

SEQ ID NO: 1089450 - RNA, 22 nt, Human
ugaguaauuauauuugcauuua

SEQ ID NO: 1089451 - RNA, 19 nt, Human
ugcacuccagccugggcaa

SEQ ID NO: 1089452 - RNA, 24 nt, Human
ugcagguaagugcccauggagggc

SEQ ID NO: 1089453 - RNA, 24 nt, Human
ugccauugcacuccagccugggca

SEQ ID NO: 1089454 - RNA, 26 nt, Human
ugccgcaacuaugcaugugcacuugu

SEQ ID NO: 1089455 - RNA, 23 nt, Human
ugccuguaaucccagcacuuugg

SEQ ID NO: 1089456 - RNA, 19 nt, Human
ugcuacuccaagcuuuauc

SEQ ID NO: 1089457 - RNA, 18 nt, Human
ugcuccuaacacccaugu

SEQ ID NO: 1089458 - RNA, 23 nt, Human
ugcuuguaauuccagccacuugg

SEQ ID NO: 1089459 - RNA, 24 nt, Human
ugcuuguaauuccagccacuuggg

SEQ ID NO: 1089460 - RNA, 18 nt, Human
ugcuuuuaauuguauuca

SEQ ID NO: 1089461 - RNA, 24 nt, Human
uggaacuucuggaccacaagagac

SEQ ID NO: 1089462 - RNA, 24 nt, Human
uggccaacauggugaaaccccauc

SEQ ID NO: 1089463 - RNA, 21 nt, Human
uggcucacaccuguaauccca

SEQ ID NO: 1089464 - RNA, 24 nt, Human
uggcucacaccuguaaucccagca

SEQ ID NO: 1089465 - RNA, 22 nt, Human
uggcucaugccuguaaucccag

SEQ ID NO: 1089466 - RNA, 24 nt, Human
uggcucaugccuguaaucccagca

SEQ ID NO: 1089467 - RNA, 24 nt, Human
uggcuguaaucccagcuacucagg

SEQ ID NO: 1089468 - RNA, 24 nt, Human
ugggagaccuaggcaggcagauca

SEQ ID NO: 1089469 - RNA, 20 nt, Human
ugggaggccgaggcaggcag

SEQ ID NO: 1089470 - RNA, 24 nt, Human
ugggaggccgaggcaggcagauca

SEQ ID NO: 1089471 - RNA, 19 nt, Human
ugggaggcugaggcaggag

SEQ ID NO: 1089472 - RNA, 24 nt, Human
ugggaggcugaggcaggagaauca

SEQ ID NO: 1089473 - RNA, 20 nt, Human
uguaauuccagccacuuggg

SEQ ID NO: 1089474 - RNA, 19 nt, Human
uguauaaagaagagcuggg

SEQ ID NO: 1089475 - RNA, 18 nt, Human
ugucuagauuggcagcuc

SEQ ID NO: 1089476 - RNA, 18 nt, Human
uuagcugggcaugguggc

SEQ ID NO: 1089477 - RNA, 20 nt, Human
uuagcugggcaugguggcgc

SEQ ID NO: 1089478 - RNA, 18 nt, Human
uucaugaagccuuccuga

SEQ ID NO: 1089479 - RNA, 19 nt, Human
uuccugaauaaagagaaaa

SEQ ID NO: 1089480 - RNA, 24 nt, Human
uucucaugcuacuccaagcuuuau

SEQ ID NO: 1089481 - RNA, 18 nt, Human
uugcagugagcugagauc

SEQ ID NO: 1089482 - RNA, 18 nt, Human
uugcagugagcugagauc

SEQ ID NO: 1089483 - RNA, 21 nt, Human
uugcagugagcugagaucaug

SEQ ID NO: 1089484 - RNA, 23 nt, Human
uugcagugagcugagaucaugcc

SEQ ID NO: 1089485 - RNA, 21 nt, Human
uugcagugagcugagaucgug

SEQ ID NO: 1089486 - RNA, 22 nt, Human
uugcagugagcugagaucgugc

SEQ ID NO: 1089487 - RNA, 23 nt, Human
uugcagugagcugagaucgugcc

SEQ ID NO: 1089488 - RNA, 25 nt, Human
uuggaccacaacauuuaugcauagu

SEQ ID NO: 1089489 - RNA, 25 nt, Human
uugggaggccgaggcaggcagauca

SEQ ID NO: 1089490 - RNA, 25 nt, Human
uugggaggcugaggcaggagaauca

SEQ ID NO: 1089491 - RNA, 21 nt, Human
uuguaaggacaaggagaggac

SEQ ID NO: 1089492 - RNA, 24 nt, Human
uuuagauuguaaggacaaggagag

SEQ ID NO: 1089493 - RNA, 22 nt, Human
uuuguacuaagauucaacagca

SEQ ID NO: 1089494 - RNA, 19 nt, Human
aagaugccagacgcugagg

SEQ ID NO: 1089495 - RNA, 21 nt, Human
acauuuguacacuuuccuccu

SEQ ID NO: 1089496 - RNA, 20 nt, Human
agaaagcaguauaaaaauca

SEQ ID NO: 1089497 - RNA, 25 nt, Human
agaaagcaguauaaaaaucaacuug

SEQ ID NO: 1089498 - RNA, 18 nt, Human
aggagguggugguggcgg

SEQ ID NO: 1089499 - RNA, 18 nt, Human
agguggugguggcggcaa

SEQ ID NO: 1089500 - RNA, 21 nt, Human
aguuagaaucugugucuauug

SEQ ID NO: 1089501 - RNA, 24 nt, Human
auauugaagucuuucagugauuca

SEQ ID NO: 1089502 - RNA, 24 nt, Human
augccagacgcugaggggucuggg

SEQ ID NO: 1089503 - RNA, 18 nt, Human
augcuucaucuuuguuuu

SEQ ID NO: 1089504 - RNA, 18 nt, Human
cacaguugagaagguuaa

SEQ ID NO: 1089505 - RNA, 20 nt, Human
cacuuugcugaaagcagggc

SEQ ID NO: 1089506 - RNA, 20 nt, Human
caucaugauaucacaguuga

SEQ ID NO: 1089507 - RNA, 23 nt, Human
ccaccaagaugccagacgcugag

SEQ ID NO: 1089508 - RNA, 18 nt, Human
ccagacgcugaggggucu

SEQ ID NO: 1089509 - RNA, 19 nt, Human
ccgcucaaauacgguccug

SEQ ID NO: 1089510 - RNA, 21 nt, Human
cuaguaaacccaaugccagaa

SEQ ID NO: 1089511 - RNA, 20 nt, Human
cuccagccuccucguccgcc

SEQ ID NO: 1089512 - RNA, 25 nt, Human
cugauacaccugguuucuuaaaugu

SEQ ID NO: 1089513 - RNA, 22 nt, Human
gacauuuguacacuuuccuccu

SEQ ID NO: 1089514 - RNA, 24 nt, Human
gcagaauucaggaggugguggugg

SEQ ID NO: 1089515 - RNA, 19 nt, Human
gguggugguggcggcaaug

SEQ ID NO: 1089516 - RNA, 24 nt, Human
guccuucuggccuucuaacugggg

SEQ ID NO: 1089517 - RNA, 25 nt, Human
uaaauuucuggcaccaauugugcca

SEQ ID NO: 1089518 - RNA, 21 nt, Human
uacaucaugauaucacaguug

SEQ ID NO: 1089519 - RNA, 21 nt, Human
uaccuccagccuccucguccg

SEQ ID NO: 1089520 - RNA, 21 nt, Human
uacgguccugagaauguacau

SEQ ID NO: 1089521 - RNA, 19 nt, Human
uacuucuucuucaggagcu

SEQ ID NO: 1089522 - RNA, 23 nt, Human
uaucauguccuucuggccuucua

SEQ ID NO: 1089523 - RNA, 19 nt, Human
ucaggagguggugguggcg

SEQ ID NO: 1089524 - RNA, 21 nt, Human
ucaggagguggugguggcggc

SEQ ID NO: 1089525 - RNA, 18 nt, Human
uccauccucucaguaccc

SEQ ID NO: 1089526 - RNA, 22 nt, Human
ucuaguaaacccaaugccagaa

SEQ ID NO: 1089527 - RNA, 23 nt, Human
ucuccuuuucuucugcauauguu

SEQ ID NO: 1089528 - RNA, 21 nt, Human
ugacauuuguacacuuuccuc

SEQ ID NO: 1089529 - RNA, 21 nt, Human
ugagaagguuaaucacuuugc

SEQ ID NO: 1089530 - RNA, 24 nt, Human
ugauuuccauccucucaguaccuc

SEQ ID NO: 1089531 - RNA, 26 nt, Human
uggcugaacuucccaaucuugaagcc

SEQ ID NO: 1089532 - RNA, 23 nt, Human
uuuccauccucucaguaccucca

SEQ ID NO: 1089533 - RNA, 20 nt, Human
uuugcugaaagcagggcaga

SEQ ID NO: 1089534 - RNA, 23 nt, Human
uuuguacacuuuccuccugcuuu

SEQ ID NO: 1089535 - RNA, 18 nt, Human
acccgagcgcggcuucca

SEQ ID NO: 1089536 - RNA, 19 nt, Human
accugcucccccuccugcc

SEQ ID NO: 1089537 - RNA, 22 nt, Human
accugcucccccuccugccgcc

SEQ ID NO: 1089538 - RNA, 19 nt, Human
cagagcccgcugacccgac

SEQ ID NO: 1089539 - RNA, 23 nt, Human
cagcucaggaccgggaccggcgg

SEQ ID NO: 1089540 - RNA, 21 nt, Human
ccacugccugcccauccccca

SEQ ID NO: 1089541 - RNA, 23 nt, Human
ccacugccugcccaucccccacc

SEQ ID NO: 1089542 - RNA, 22 nt, Human
cccccuccugccgccgccgccg

SEQ ID NO: 1089543 - RNA, 22 nt, Human
cccccuccugccgccgccgcua

SEQ ID NO: 1089544 - RNA, 21 nt, Human
cccuccugccgccgccgccgc

SEQ ID NO: 1089545 - RNA, 18 nt, Human
ccgccucguccccaccgc

SEQ ID NO: 1089546 - RNA, 20 nt, Human
ccgccucguccccaccgcuc

SEQ ID NO: 1089547 - RNA, 24 nt, Human
ccgcguuuacuggcggcggcggcg

SEQ ID NO: 1089548 - RNA, 23 nt, Human
ccuccugccgccgccgccgccuc

SEQ ID NO: 1089549 - RNA, 18 nt, Human
ccugccgccgccgccgcc

SEQ ID NO: 1089550 - RNA, 18 nt, Human
ccugccgccgccgccgcc

SEQ ID NO: 1089551 - RNA, 18 nt, Human
ccugcucccccuccugcc

SEQ ID NO: 1089552 - RNA, 20 nt, Human
cggccggcuggguagucccc

SEQ ID NO: 1089553 - RNA, 22 nt, Human
cucccaucgccgcugcggcgac

SEQ ID NO: 1089554 - RNA, 20 nt, Human
cuccugccgccgccgccgcc

SEQ ID NO: 1089555 - RNA, 24 nt, Human
cuccugccgccgccgccgccucgg

SEQ ID NO: 1089556 - RNA, 22 nt, Human
cuuccagggccggccggcuggg

SEQ ID NO: 1089557 - RNA, 19 nt, Human
gccucguccccaccgcucc

SEQ ID NO: 1089558 - RNA, 21 nt, Human
gccugcccaucccccaccgcc

SEQ ID NO: 1089559 - RNA, 20 nt, Human
gcgacuacugcagagcccgc

SEQ ID NO: 1089560 - RNA, 21 nt, Human
gcggcggcggcggcggcugcu

SEQ ID NO: 1089561 - RNA, 20 nt, Human
gcggcggcugcugcugcugu

SEQ ID NO: 1089562 - RNA, 20 nt, Human
ggacgcagggguuucuggag

SEQ ID NO: 1089563 - RNA, 24 nt, Human
ggcugcugcugcuguuacugcugc

SEQ ID NO: 1089564 - RNA, 18 nt, Human
uaaccugggccguggcgg

SEQ ID NO: 1089565 - RNA, 20 nt, Human
uacacugauaugguagaaca

SEQ ID NO: 1089566 - RNA, 19 nt, Human
uacugcagagcccgcugac

SEQ ID NO: 1089567 - RNA, 20 nt, Human
uccugccgccgccgccgccu

SEQ ID NO: 1089568 - RNA, 26 nt, Human
ucguccccaccgcucccaucgccgcu

SEQ ID NO: 1089569 - RNA, 23 nt, Human
ucuugugccagcaccugcucccc

SEQ ID NO: 1089570 - RNA, 24 nt, Human
ugcugcugcuguuacugcugcugc

SEQ ID NO: 1089571 - RNA, 19 nt, Human
uggcggcggcggcggcggc

SEQ ID NO: 1089572 - RNA, 24 nt, Human
uggcggcggcggcggcggcugcug

SEQ ID NO: 1089573 - RNA, 21 nt, Human
uaacaacaaugacaacaauaa

SEQ ID NO: 1089574 - RNA, 23 nt, Human
aaagucagguuucaguugguuga

SEQ ID NO: 1089575 - RNA, 24 nt, Human
aaagugcugggauuacaggcauga

SEQ ID NO: 1089576 - RNA, 21 nt, Human
aacaccaccucuucuacucca

SEQ ID NO: 1089577 - RNA, 23 nt, Human
aagaaaauguagacucccaagau

SEQ ID NO: 1089578 - RNA, 19 nt, Human
aagugcugggauuacaggc

SEQ ID NO: 1089579 - RNA, 21 nt, Human
aagugcugggauuacaggcau

SEQ ID NO: 1089580 - RNA, 26 nt, Human
aagugcugggauuacaggcaugagcc

SEQ ID NO: 1089581 - RNA, 20 nt, Human
acaccaccaugcccagcuaa

SEQ ID NO: 1089582 - RNA, 21 nt, Human
acaccaccucuucuacuccag

SEQ ID NO: 1089583 - RNA, 21 nt, Human
aggcaguccgccgaccucagg

SEQ ID NO: 1089584 - RNA, 21 nt, Human
aggcagugacacccuuagagc

SEQ ID NO: 1089585 - RNA, 21 nt, Human
aggcaugagccaccagacccg

SEQ ID NO: 1089586 - RNA, 18 nt, Human
aguagcugggauuacagg

SEQ ID NO: 1089587 - RNA, 20 nt, Human
agugcaguggugcgaccucg

SEQ ID NO: 1089588 - RNA, 23 nt, Human
agugcaguggugcgaccucggcu

SEQ ID NO: 1089589 - RNA, 24 nt, Human
agugcaguggugcgaccucggcuc

SEQ ID NO: 1089590 - RNA, 18 nt, Human
agugcugggauuacaggc

SEQ ID NO: 1089591 - RNA, 24 nt, Human
augggguuuugccauguuggccag

SEQ ID NO: 1089592 - RNA, 24 nt, Human
auuuuuuuauuuuuaguagagaug

SEQ ID NO: 1089593 - RNA, 23 nt, Human
caaagugcugggauuacaggcau

SEQ ID NO: 1089594 - RNA, 24 nt, Human
caaagugcugggauuacaggcaug

SEQ ID NO: 1089595 - RNA, 22 nt, Human
caagagauaaacaaacaccacc

SEQ ID NO: 1089596 - RNA, 19 nt, Human
caagcccacacaccucauu

SEQ ID NO: 1089597 - RNA, 19 nt, Human
cacacaccaccaugcccag

SEQ ID NO: 1089598 - RNA, 18 nt, Human
cacaccaccaugcccagc

SEQ ID NO: 1089599 - RNA, 23 nt, Human
caccccaaccagugagggucugc

SEQ ID NO: 1089600 - RNA, 23 nt, Human
caccuccagguucaagcaggucu

SEQ ID NO: 1089601 - RNA, 18 nt, Human
caugaauuccaagacuac

SEQ ID NO: 1089602 - RNA, 24 nt, Human
cauguuggccaggcuggucuugaa

SEQ ID NO: 1089603 - RNA, 23 nt, Human
ccaccucuucuacuccaggacug

SEQ ID NO: 1089604 - RNA, 19 nt, Human
ccagguucaagcaggucuc

SEQ ID NO: 1089605 - RNA, 22 nt, Human
ccagguucaagcaggucuccug

SEQ ID NO: 1089606 - RNA, 19 nt, Human
ccauguuggccaggcuggu

SEQ ID NO: 1089607 - RNA, 21 nt, Human
ccauguuggccaggcuggucu

SEQ ID NO: 1089608 - RNA, 21 nt, Human
ccccaaccagugagggucugc

SEQ ID NO: 1089609 - RNA, 24 nt, Human
ccgaccucaggccucucaaagugc

SEQ ID NO: 1089610 - RNA, 22 nt, Human
ccuccagguucaagcaggucuc

SEQ ID NO: 1089611 - RNA, 22 nt, Human
ccucuaggauucgcgugguggg

SEQ ID NO: 1089612 - RNA, 23 nt, Human
ccugaguagcugggauuacaggc

SEQ ID NO: 1089613 - RNA, 24 nt, Human
ccugaguagcugggauuacaggca

SEQ ID NO: 1089614 - RNA, 23 nt, Human
cgcucuguuacccagacuggagu

SEQ ID NO: 1089615 - RNA, 24 nt, Human
cgcucuguuacccagacuggagug

SEQ ID NO: 1089616 - RNA, 24 nt, Human
cuaaaugcccugugcuuggucccu

SEQ ID NO: 1089617 - RNA, 20 nt, Human
cuacaccccaaccagugagg

SEQ ID NO: 1089618 - RNA, 27 nt, Human
cucacugcaaccuccaccuccagguuc

SEQ ID NO: 1089619 - RNA, 21 nt, Human
cuccagguucaagcaggucuc

SEQ ID NO: 1089620 - RNA, 18 nt, Human
cuccuggugauaagaaaa

SEQ ID NO: 1089621 - RNA, 24 nt, Human
cucuaaaugcccugugcuuggucc

SEQ ID NO: 1089622 - RNA, 19 nt, Human
cugaagguacagggggaaa

SEQ ID NO: 1089623 - RNA, 23 nt, Human
cugaguagcugggauuacaggca

SEQ ID NO: 1089624 - RNA, 23 nt, Human
cugccucauccuccugaguagcu

SEQ ID NO: 1089625 - RNA, 25 nt, Human
cugccucauccuccugaguagcugg

SEQ ID NO: 1089626 - RNA, 23 nt, Human
gaaaauguagacucccaagauuc

SEQ ID NO: 1089627 - RNA, 19 nt, Human
gaccucggcucacugcaac

SEQ ID NO: 1089628 - RNA, 20 nt, Human
gagaugggguuuugccaugu

SEQ ID NO: 1089629 - RNA, 24 nt, Human
gaguagcugggauuacaggcacac

SEQ ID NO: 1089630 - RNA, 22 nt, Human
gauuacaggcacacaccaccau

SEQ ID NO: 1089631 - RNA, 18 nt, Human
gauuacaggcaugagcca

SEQ ID NO: 1089632 - RNA, 21 nt, Human
gauuacaggcaugagccacca

SEQ ID NO: 1089633 - RNA, 24 nt, Human
gauuacaggcaugagccaccagac

SEQ ID NO: 1089634 - RNA, 21 nt, Human
gcaaccuccaccuccagguuc

SEQ ID NO: 1089635 - RNA, 22 nt, Human
gcaaugcccaaggcagggccac

SEQ ID NO: 1089636 - RNA, 19 nt, Human
gcacacaccaccaugccca

SEQ ID NO: 1089637 - RNA, 19 nt, Human
gcaguggugcgaccucggc

SEQ ID NO: 1089638 - RNA, 18 nt, Human
gcaucucuggacuuuucu

SEQ ID NO: 1089639 - RNA, 20 nt, Human
gccauguuggccaggcuggu

SEQ ID NO: 1089640 - RNA, 22 nt, Human
gccauguuggccaggcuggucu

SEQ ID NO: 1089641 - RNA, 24 nt, Human
gccauguuggccaggcuggucuug

SEQ ID NO: 1089642 - RNA, 25 nt, Human
gcucuguuacccagacuggagugca

SEQ ID NO: 1089643 - RNA, 19 nt, Human
ggagaggucucaagagguu

SEQ ID NO: 1089644 - RNA, 19 nt, Human
ggauuacaggcaugagcca

SEQ ID NO: 1089645 - RNA, 24 nt, Human
ggcuggucuugaauuccugaccuc

SEQ ID NO: 1089646 - RNA, 22 nt, Human
gggguuuugccauguuggccag

SEQ ID NO: 1089647 - RNA, 18 nt, Human
ggguuuugccauguuggc

SEQ ID NO: 1089648 - RNA, 22 nt, Human
ggguuuugccauguuggccagg

SEQ ID NO: 1089649 - RNA, 19 nt, Human
ggucuugaauuccugaccu

SEQ ID NO: 1089650 - RNA, 23 nt, Human
guagagaugggguuuugccaugu

SEQ ID NO: 1089651 - RNA, 23 nt, Human
uaauuuuuuuauuuuuaguagag

SEQ ID NO: 1089652 - RNA, 24 nt, Human
uaauuuuuuuauuuuuaguagaga

SEQ ID NO: 1089653 - RNA, 23 nt, Human
uacaggcaugagccaccagaccc

SEQ ID NO: 1089654 - RNA, 24 nt, Human
uacccagacuggagugcaguggug

SEQ ID NO: 1089655 - RNA, 22 nt, Human
uagagaugggguuuugccaugu

SEQ ID NO: 1089656 - RNA, 24 nt, Human
uaguagagaugggguuuugccaug

SEQ ID NO: 1089657 - RNA, 23 nt, Human
ucaaagugcugggauuacaggca

SEQ ID NO: 1089658 - RNA, 24 nt, Human
ucaaagugcugggauuacaggcau

SEQ ID NO: 1089659 - RNA, 23 nt, Human
ucacugcaaccuccaccuccagg

SEQ ID NO: 1089660 - RNA, 24 nt, Human
ucacugcaaccuccaccuccaggu

SEQ ID NO: 1089661 - RNA, 26 nt, Human
ucacugcaaccuccaccuccagguuc

SEQ ID NO: 1089662 - RNA, 21 nt, Human
ucaggccucucaaagugcugg

SEQ ID NO: 1089663 - RNA, 20 nt, Human
uccaagagauaaacaaacac

SEQ ID NO: 1089664 - RNA, 22 nt, Human
uccaagagauaaacaaacacca

SEQ ID NO: 1089665 - RNA, 23 nt, Human
uccaagagauaaacaaacaccac

SEQ ID NO: 1089666 - RNA, 20 nt, Human
ucccaaaucaggccaacucu

SEQ ID NO: 1089667 - RNA, 25 nt, Human
uccucuaggauucgcguggugggaa

SEQ ID NO: 1089668 - RNA, 26 nt, Human
uccugaccucaggcaguccgccgacc

SEQ ID NO: 1089669 - RNA, 24 nt, Human
uccugaguagcugggauuacaggc

SEQ ID NO: 1089670 - RNA, 24 nt, Human
ucucaaagugcugggauuacaggc

SEQ ID NO: 1089671 - RNA, 24 nt, Human
ucucgcucuguuacccagacugga

SEQ ID NO: 1089672 - RNA, 26 nt, Human
ucucgcucuguuacccagacuggagu

SEQ ID NO: 1089673 - RNA, 27 nt, Human
ucucgcucuguuacccagacuggagug

SEQ ID NO: 1089674 - RNA, 24 nt, Human
ucuguuacccagacuggagugcag

SEQ ID NO: 1089675 - RNA, 22 nt, Human
ucuucauaaguuaagcaggagu

SEQ ID NO: 1089676 - RNA, 24 nt, Human
ugaauuccugaccucaggcagucc

SEQ ID NO: 1089677 - RNA, 20 nt, Human
ugaccucaggcaguccgccg

SEQ ID NO: 1089678 - RNA, 18 nt, Human
ugaggcggggguccaggg

SEQ ID NO: 1089679 - RNA, 20 nt, Human
ugaggcggggguccaggguu

SEQ ID NO: 1089680 - RNA, 22 nt, Human
ugcaguggugcgaccucggcuc

SEQ ID NO: 1089681 - RNA, 18 nt, Human
ugccaggcagugacaccc

SEQ ID NO: 1089682 - RNA, 25 nt, Human
ugccauaaucccaaaucaggccaac

SEQ ID NO: 1089683 - RNA, 22 nt, Human
ugccauguuggccaggcugguc

SEQ ID NO: 1089684 - RNA, 24 nt, Human
ugccauguuggccaggcuggucuu

SEQ ID NO: 1089685 - RNA, 23 nt, Human
ugccucauccuccugaguagcug

SEQ ID NO: 1089686 - RNA, 24 nt, Human
ugccucauccuccugaguagcugg

SEQ ID NO: 1089687 - RNA, 28 nt, Human
ugccucauccuccugaguagcugggauu

SEQ ID NO: 1089688 - RNA, 21 nt, Human
ugccucugucaugaauuccaa

SEQ ID NO: 1089689 - RNA, 22 nt, Human
uggagugcaguggugcgaccuc

SEQ ID NO: 1089690 - RNA, 23 nt, Human
uggagugcaguggugcgaccucg

SEQ ID NO: 1089691 - RNA, 24 nt, Human
uggagugcaguggugcgaccucgg

SEQ ID NO: 1089692 - RNA, 20 nt, Human
uggcaucucuggacuuuucu

SEQ ID NO: 1089693 - RNA, 24 nt, Human
uggccaggcuggucuugaauuccu

SEQ ID NO: 1089694 - RNA, 21 nt, Human
ugggauuacaggcacacacca

SEQ ID NO: 1089695 - RNA, 22 nt, Human
ugggauuacaggcacacaccac

SEQ ID NO: 1089696 - RNA, 22 nt, Human
ugggauuacaggcacacaccac

SEQ ID NO: 1089697 - RNA, 24 nt, Human
ugggauuacaggcacacaccacca

SEQ ID NO: 1089698 - RNA, 18 nt, Human
ugggauuacaggcaugag

SEQ ID NO: 1089699 - RNA, 19 nt, Human
ugggauuacaggcaugagc

SEQ ID NO: 1089700 - RNA, 22 nt, Human
ugggauuacaggcaugagccac

SEQ ID NO: 1089701 - RNA, 23 nt, Human
ugggauuacaggcaugagccacc

SEQ ID NO: 1089702 - RNA, 24 nt, Human
ugggauuacaggcaugagccacca

SEQ ID NO: 1089703 - RNA, 24 nt, Human
ugggguuuugccauguuggccagg

SEQ ID NO: 1089704 - RNA, 18 nt, Human
uuaguagagaugggguuu

SEQ ID NO: 1089705 - RNA, 22 nt, Human
uuaguagagaugggguuuugcc

SEQ ID NO: 1089706 - RNA, 24 nt, Human
uuaguagagaugggguuuugccau

SEQ ID NO: 1089707 - RNA, 22 nt, Human
uuccugaccucaggcaguccgc

SEQ ID NO: 1089708 - RNA, 20 nt, Human
uuggucccuggucagggaga

SEQ ID NO: 1089709 - RNA, 19 nt, Human
uuuaacuuucuucauaagu

SEQ ID NO: 1089710 - RNA, 22 nt, Human
uuuuauuuuuaguagagauggg

SEQ ID NO: 1089711 - RNA, 24 nt, Human
uuuuauuuuuaguagagauggggu

SEQ ID NO: 1089712 - RNA, 23 nt, Human
uuuugccauguuggccaggcugg

SEQ ID NO: 1089713 - RNA, 21 nt, Human
uuuuuaguagagaugggguuu

SEQ ID NO: 1089714 - RNA, 24 nt, Human
uuuuuaguagagaugggguuuugc

SEQ ID NO: 1089715 - RNA, 27 nt, Human
aaacagcccuagaacacauauuuaaau

SEQ ID NO: 1089716 - RNA, 20 nt, Human
aaagaacuguuaaccuaaaa

SEQ ID NO: 1089717 - RNA, 21 nt, Human
aaagaacuguuaaccuaaaag

SEQ ID NO: 1089718 - RNA, 18 nt, Human
aagauggcggcggcugcg

SEQ ID NO: 1089719 - RNA, 24 nt, Human
acagugaguggccaccucuaccag

SEQ ID NO: 1089720 - RNA, 25 nt, Human
accauaauagaauuaacaaacagcc

SEQ ID NO: 1089721 - RNA, 21 nt, Human
acccagcugaccagguuccaa

SEQ ID NO: 1089722 - RNA, 20 nt, Human
acgccgcacagcaaacaagc

SEQ ID NO: 1089723 - RNA, 23 nt, Human
agaacacauauuuaaauuugcag

SEQ ID NO: 1089724 - RNA, 19 nt, Human
agaauuaacaaacagcccu

SEQ ID NO: 1089725 - RNA, 23 nt, Human
agacagaaaagacucaggccagg

SEQ ID NO: 1089726 - RNA, 20 nt, Human
agacucaggccaggcuggca

SEQ ID NO: 1089727 - RNA, 18 nt, Human
aggccaggcuggcaugua

SEQ ID NO: 1089728 - RNA, 19 nt, Human
agggaugaagggcuggggc

SEQ ID NO: 1089729 - RNA, 21 nt, Human
aguagguccaaagucucacgg

SEQ ID NO: 1089730 - RNA, 20 nt, Human
aucacaauuacauuaaaaca

SEQ ID NO: 1089731 - RNA, 23 nt, Human
auggugguagaaauagcuuuguc

SEQ ID NO: 1089732 - RNA, 23 nt, Human
cacccagaacugggaaucacaau

SEQ ID NO: 1089733 - RNA, 27 nt, Human
cacuccacggcugugaagauggcggcg

SEQ ID NO: 1089734 - RNA, 21 nt, Human
cacuccgaccagcucccagcu

SEQ ID NO: 1089735 - RNA, 18 nt, Human
cagaaaagacucaggcca

SEQ ID NO: 1089736 - RNA, 26 nt, Human
cagcaaacaagcuccgcgacguuucc

SEQ ID NO: 1089737 - RNA, 19 nt, Human
caggacaagggcccugggc

SEQ ID NO: 1089738 - RNA, 23 nt, Human
ccaggcuggcauguagcgaucuc

SEQ ID NO: 1089739 - RNA, 21 nt, Human
cggaaguagagagccaaaucc

SEQ ID NO: 1089740 - RNA, 23 nt, Human
cguuuuucagugcgggaccggca

SEQ ID NO: 1089741 - RNA, 25 nt, Human
cuagaacacauauuuaaauuugcag

SEQ ID NO: 1089742 - RNA, 23 nt, Human
cugaggcaccaggacucuucacu

SEQ ID NO: 1089743 - RNA, 25 nt, Human
cuuuuuauucacccagaacugggaa

SEQ ID NO: 1089744 - RNA, 23 nt, Human
gaaccgaaacugggcggcgguga

SEQ ID NO: 1089745 - RNA, 19 nt, Human
gaccagguuccaacaggau

SEQ ID NO: 1089746 - RNA, 18 nt, Human
gagcucacccgucaccac

SEQ ID NO: 1089747 - RNA, 22 nt, Human
gaucuugcuuuuccugaggcac

SEQ ID NO: 1089748 - RNA, 27 nt, Human
gccgcacagcaaacaagcuccgcgacg

SEQ ID NO: 1089749 - RNA, 27 nt, Human
gcucccagcucucaggacaagggcugg

SEQ ID NO: 1089750 - RNA, 22 nt, Human
ggaaguagagagccaaauccug

SEQ ID NO: 1089751 - RNA, 23 nt, Human
ggaaucacaauuaguaaagacca

SEQ ID NO: 1089752 - RNA, 19 nt, Human
ggcggcugcguggcuucag

SEQ ID NO: 1089753 - RNA, 19 nt, Human
gggcggcggugagggcgug

SEQ ID NO: 1089754 - RNA, 21 nt, Human
gggcuuuuccagacuuucugg

SEQ ID NO: 1089755 - RNA, 21 nt, Human
gguggcugaugaggaacgugc

SEQ ID NO: 1089756 - RNA, 22 nt, Human
guaaagaccauaauagaauuaa

SEQ ID NO: 1089757 - RNA, 19 nt, Human
guagaaauagcuuugucua

SEQ ID NO: 1089758 - RNA, 21 nt, Human
guagaaauagcuuugucuaug

SEQ ID NO: 1089759 - RNA, 19 nt, Human
guagcgaucucucuaaccc

SEQ ID NO: 1089760 - RNA, 21 nt, Human
uaacccagcugaccagguucc

SEQ ID NO: 1089761 - RNA, 18 nt, Human
uaccagauauuuuguaaa

SEQ ID NO: 1089762 - RNA, 23 nt, Human
uaccagauauuuuguaaacauca

SEQ ID NO: 1089763 - RNA, 21 nt, Human
uagaauuaacaaacagcccua

SEQ ID NO: 1089764 - RNA, 19 nt, Human
ugacuccaucaacucuucc

SEQ ID NO: 1089765 - RNA, 21 nt, Human
ugacuccaucaacucuuccuu

SEQ ID NO: 1089766 - RNA, 22 nt, Human
uggcggcggcugcguggggugc

SEQ ID NO: 1089767 - RNA, 23 nt, Human
ugggaagggaguccccuccagau

SEQ ID NO: 1089768 - RNA, 25 nt, Human
ugggaaucacaauuaguaaagacca

SEQ ID NO: 1089769 - RNA, 21 nt, Human
uguaaagaacuguuaaccuaa

SEQ ID NO: 1089770 - RNA, 20 nt, Human
uuaaaaaagccgauugggug

SEQ ID NO: 1089771 - RNA, 20 nt, Human
uuaaauuugcaguggguguu

SEQ ID NO: 1089772 - RNA, 20 nt, Human
uuagagcagagccggaagaa

SEQ ID NO: 1089773 - RNA, 18 nt, Human
uuccuugguagguugauc

SEQ ID NO: 1089774 - RNA, 18 nt, Human
uugccugucauucuucug

SEQ ID NO: 1089775 - RNA, 19 nt, Human
uuuauucacccagaacugg

SEQ ID NO: 1089776 - RNA, 24 nt, Human
uuucuggccccaaagucugacauu

SEQ ID NO: 1089777 - RNA, 21 nt, Human
cccacaguggcagugccccuu

SEQ ID NO: 1089778 - RNA, 19 nt, Human
aacacagguguuacguccu

SEQ ID NO: 1089779 - RNA, 20 nt, Human
aaccacugaacaauuacacc

SEQ ID NO: 1089780 - RNA, 24 nt, Human
acaaagagcgacuccaaaugucaa

SEQ ID NO: 1089781 - RNA, 21 nt, Human
agugcauucauugaauucaaa

SEQ ID NO: 1089782 - RNA, 22 nt, Human
caagucucaaaaauaucaagga

SEQ ID NO: 1089783 - RNA, 18 nt, Human
cacugaacaauuacaccc

SEQ ID NO: 1089784 - RNA, 19 nt, Human
cacugaacaauuacacccc

SEQ ID NO: 1089785 - RNA, 19 nt, Human
cugaaaagcacacccagca

SEQ ID NO: 1089786 - RNA, 24 nt, Human
cuggaaagcugggggaacacaggu

SEQ ID NO: 1089787 - RNA, 19 nt, Human
uaaagaauagucucugcag

SEQ ID NO: 1089788 - RNA, 24 nt, Human
uauaaacaauggucccagaaauuu

SEQ ID NO: 1089789 - RNA, 20 nt, Human
ucugcagugcauucauugaa

SEQ ID NO: 1089790 - RNA, 18 nt, Human
ugaaaagcacacccagca

SEQ ID NO: 1089791 - RNA, 19 nt, Human
ugagcaaaaaccacugaac

SEQ ID NO: 1089792 - RNA, 20 nt, Human
ugauggaccuggaaagcugg

SEQ ID NO: 1089793 - RNA, 21 nt, Human
uggaaagcugggggaacacag

SEQ ID NO: 1089794 - RNA, 24 nt, Human
uggaaagcugggggaacacaggug

SEQ ID NO: 1089795 - RNA, 21 nt, Human
acagacaccagccccucauac

SEQ ID NO: 1089796 - RNA, 22 nt, Human
agcuacaaaucugacacagaca

SEQ ID NO: 1089797 - RNA, 21 nt, Human
cagacaccagccccucauacu

SEQ ID NO: 1089798 - RNA, 23 nt, Human
caugcuuuccuccaccgcgccuc

SEQ ID NO: 1089799 - RNA, 19 nt, Human
ccacucccacagcgcccgc

SEQ ID NO: 1089800 - RNA, 23 nt, Human
cccacagcgcccgccguagucaa

SEQ ID NO: 1089801 - RNA, 19 nt, Human
cccucauacucuuggcucc

SEQ ID NO: 1089802 - RNA, 19 nt, Human
cuccacucccacagcgccc

SEQ ID NO: 1089803 - RNA, 24 nt, Human
cucccacagcgcccgccguaguca

SEQ ID NO: 1089804 - RNA, 19 nt, Human
gcucccaugcuuuccucca

SEQ ID NO: 1089805 - RNA, 24 nt, Human
gcucccaugcuuuccuccaccgcg

SEQ ID NO: 1089806 - RNA, 18 nt, Human
ugacacagacaccagccc

SEQ ID NO: 1089807 - RNA, 21 nt, Human
uggcucccaugcuuuccucca

SEQ ID NO: 1089808 - RNA, 20 nt, Human
uugggagucucaggggccgc

SEQ ID NO: 1089809 - RNA, 20 nt, Human
aaauguccagagguaaacag

SEQ ID NO: 1089810 - RNA, 23 nt, Human
agcaacauagagguacuuguagu

SEQ ID NO: 1089811 - RNA, 19 nt, Human
aguuccccaaauaagccau

SEQ ID NO: 1089812 - RNA, 28 nt, Human
aucaggcaucagcaacauagagguacuu

SEQ ID NO: 1089813 - RNA, 19 nt, Human
auuguagcagcagaagcug

SEQ ID NO: 1089814 - RNA, 20 nt, Human
cacugcucaaccauugccuu

SEQ ID NO: 1089815 - RNA, 18 nt, Human
cagcacagcugcuaccuu

SEQ ID NO: 1089816 - RNA, 22 nt, Human
cagcacagcugcuaccuucucc

SEQ ID NO: 1089817 - RNA, 23 nt, Human
cagcacagcugcuaccuucuccg

SEQ ID NO: 1089818 - RNA, 23 nt, Human
cagcagaagcuguugcaggugau

SEQ ID NO: 1089819 - RNA, 22 nt, Human
cauccuagaacaaaugcugagu

SEQ ID NO: 1089820 - RNA, 24 nt, Human
cccacuccacugcucaaccauugc

SEQ ID NO: 1089821 - RNA, 18 nt, Human
ccccugaggaaggggagg

SEQ ID NO: 1089822 - RNA, 23 nt, Human
ccuuccauuauuuaaaaaaagcc

SEQ ID NO: 1089823 - RNA, 23 nt, Human
cgugcugugugcuuuucuguugc

SEQ ID NO: 1089824 - RNA, 20 nt, Human
cucauagugcuccaggcaua

SEQ ID NO: 1089825 - RNA, 25 nt, Human
cugaggguagaggcugagucucacu

SEQ ID NO: 1089826 - RNA, 23 nt, Human
cuggaaaucucccuaaaaucuga

SEQ ID NO: 1089827 - RNA, 19 nt, Human
gaacucugaggguagaggc

SEQ ID NO: 1089828 - RNA, 18 nt, Human
gaagcuguugcaggugau

SEQ ID NO: 1089829 - RNA, 22 nt, Human
gacuuuaagagacagcacagcu

SEQ ID NO: 1089830 - RNA, 19 nt, Human
gaugaaggaugagugcccc

SEQ ID NO: 1089831 - RNA, 22 nt, Human
gcaugaagaggccuuuucugga

SEQ ID NO: 1089832 - RNA, 23 nt, Human
gcuaaagggaugaaggaugagug

SEQ ID NO: 1089833 - RNA, 21 nt, Human
ggugauagcuguuuuucagcu

SEQ ID NO: 1089834 - RNA, 20 nt, Human
guacuuguaguuccccaaau

SEQ ID NO: 1089835 - RNA, 18 nt, Human
guuuucccauuagauugu

SEQ ID NO: 1089836 - RNA, 21 nt, Human
uaccugggcucccacuccacu

SEQ ID NO: 1089837 - RNA, 21 nt, Human
uagcagcagaagcuguugcag

SEQ ID NO: 1089838 - RNA, 23 nt, Human
ucaagcacugcauuuguaaugcu

SEQ ID NO: 1089839 - RNA, 18 nt, Human
ucccacuccacugcucaa

SEQ ID NO: 1089840 - RNA, 21 nt, Human
ucccacuccacugcucaacca

SEQ ID NO: 1089841 - RNA, 21 nt, Human
uccuagggcugggacuguccu

SEQ ID NO: 1089842 - RNA, 23 nt, Human
ucucacauaaugaaauguccaga

SEQ ID NO: 1089843 - RNA, 20 nt, Human
ucuccggauuguccucuuuu

SEQ ID NO: 1089844 - RNA, 24 nt, Human
ucugucuuagaauauuuuguuucu

SEQ ID NO: 1089845 - RNA, 23 nt, Human
ugaacucugaggguagaggcuga

SEQ ID NO: 1089846 - RNA, 19 nt, Human
ugagugccccugaggaagg

SEQ ID NO: 1089847 - RNA, 20 nt, Human
ugagugccccugaggaaggg

SEQ ID NO: 1089848 - RNA, 19 nt, Human
ugcaucuucuccugcugcc

SEQ ID NO: 1089849 - RNA, 19 nt, Human
ugcuguuuugugcccgucu

SEQ ID NO: 1089850 - RNA, 22 nt, Human
uggaauaaaaucuaagaggagu

SEQ ID NO: 1089851 - RNA, 22 nt, Human
uguaguuccccaaauaagccau

SEQ ID NO: 1089852 - RNA, 22 nt, Human
uguauugguuuccucaucugau

SEQ ID NO: 1089853 - RNA, 18 nt, Human
uuaaaaaaagccaucucc

SEQ ID NO: 1089854 - RNA, 24 nt, Human
uuccauuauuuaaaaaaagccauc

SEQ ID NO: 1089855 - RNA, 20 nt, Human
uuggcugauacuggaauaaa

SEQ ID NO: 1089856 - RNA, 21 nt, Human
uuucuacauaccccuauugca

SEQ ID NO: 1089857 - RNA, 23 nt, Human
uuuuucagcuauguggcuuugcu

SEQ ID NO: 1089858 - RNA, 27 nt, Human
aagggaccaaggcauagacagugggca

SEQ ID NO: 1089859 - RNA, 19 nt, Human
acaaagcaagcccuuuccu

SEQ ID NO: 1089860 - RNA, 19 nt, Human
accaccgccugcgccccuc

SEQ ID NO: 1089861 - RNA, 23 nt, Human
accaccgccugcgccccuccgga

SEQ ID NO: 1089862 - RNA, 21 nt, Human
acgugggaaccuugcuagcag

SEQ ID NO: 1089863 - RNA, 19 nt, Human
acuggucugcugcccgggc

SEQ ID NO: 1089864 - RNA, 20 nt, Human
acuguuuccuccucugucuc

SEQ ID NO: 1089865 - RNA, 22 nt, Human
agaaaacaaagcaagcccuuuc

SEQ ID NO: 1089866 - RNA, 22 nt, Human
agacaugagagcuaacaacaac

SEQ ID NO: 1089867 - RNA, 18 nt, Human
agagugcuuccgaacucu

SEQ ID NO: 1089868 - RNA, 23 nt, Human
agcaagcccuuuccuuggaguuu

SEQ ID NO: 1089869 - RNA, 24 nt, Human
agccugggcaacaaaguaagacuc

SEQ ID NO: 1089870 - RNA, 19 nt, Human
aggaaggacacacagaggg

SEQ ID NO: 1089871 - RNA, 18 nt, Human
aggagccacagggcugac

SEQ ID NO: 1089872 - RNA, 20 nt, Human
aggaguuugagaccagccug

SEQ ID NO: 1089873 - RNA, 24 nt, Human
aggauugcuugaagccaggaguuu

SEQ ID NO: 1089874 - RNA, 19 nt, Human
agggagcagacacugggcu

SEQ ID NO: 1089875 - RNA, 19 nt, Human
agggggugugcagagcucc

SEQ ID NO: 1089876 - RNA, 22 nt, Human
aucccagcacuuuggaaggcca

SEQ ID NO: 1089877 - RNA, 20 nt, Human
auccugaggugaauuugggg

SEQ ID NO: 1089878 - RNA, 21 nt, Human
augaaggggcaggagggggcg

SEQ ID NO: 1089879 - RNA, 22 nt, Human
augaaggggcaggagggggcgg

SEQ ID NO: 1089880 - RNA, 23 nt, Human
augaaggggcaggagggggcggu

SEQ ID NO: 1089881 - RNA, 25 nt, Human
augaggaaggacacacagagggcaa

SEQ ID NO: 1089882 - RNA, 19 nt, Human
augccuguaaucccagcac

SEQ ID NO: 1089883 - RNA, 24 nt, Human
auggucacgugccauugucaugcc

SEQ ID NO: 1089884 - RNA, 24 nt, Human
auugcuugaagccaggaguuugag

SEQ ID NO: 1089885 - RNA, 26 nt, Human
caaaguggaaggauugcuugaagcca

SEQ ID NO: 1089886 - RNA, 21 nt, Human
caacagaaaacaaagcaagcc

SEQ ID NO: 1089887 - RNA, 21 nt, Human
caaccaacuucaagcaggccc

SEQ ID NO: 1089888 - RNA, 25 nt, Human
caaguccugaggggaaagggaccaa

SEQ ID NO: 1089889 - RNA, 24 nt, Human
caccaggauacucuguugaguucc

SEQ ID NO: 1089890 - RNA, 22 nt, Human
cacgucucccacaaagggagca

SEQ ID NO: 1089891 - RNA, 23 nt, Human
cacucccccucuuccagcuccac

SEQ ID NO: 1089892 - RNA, 20 nt, Human
cacugcauucaacagaaaac

SEQ ID NO: 1089893 - RNA, 18 nt, Human
cagaaaacaaagcaagcc

SEQ ID NO: 1089894 - RNA, 24 nt, Human
cagcacuuuggaaggccaaagugg

SEQ ID NO: 1089895 - RNA, 21 nt, Human
cagcggagaaguuaaauccug

SEQ ID NO: 1089896 - RNA, 23 nt, Human
cagcggcgagggauggcugcaga

SEQ ID NO: 1089897 - RNA, 25 nt, Human
cagcggcgagggauggcugcagagg

SEQ ID NO: 1089898 - RNA, 19 nt, Human
cagcgguggcugcagagac

SEQ ID NO: 1089899 - RNA, 20 nt, Human
cagcuaagggacagcggcga

SEQ ID NO: 1089900 - RNA, 18 nt, Human
caggaccagugaucccau

SEQ ID NO: 1089901 - RNA, 23 nt, Human
caggcggccuccgcgcaugcaug

SEQ ID NO: 1089902 - RNA, 18 nt, Human
cagggcgggcucccugga

SEQ ID NO: 1089903 - RNA, 21 nt, Human
caucccggcgucugcugccau

SEQ ID NO: 1089904 - RNA, 21 nt, Human
caugaccgacucuccccucag

SEQ ID NO: 1089905 - RNA, 20 nt, Human
caugccuguaaucccagcac

SEQ ID NO: 1089906 - RNA, 24 nt, Human
caugccuguaaucccagcacuuug

SEQ ID NO: 1089907 - RNA, 25 nt, Human
cauggucacgugccauugucaugcc

SEQ ID NO: 1089908 - RNA, 24 nt, Human
ccagugaucccauggucacgugcc

SEQ ID NO: 1089909 - RNA, 23 nt, Human
cccauaccuuccccacagaacug

SEQ ID NO: 1089910 - RNA, 22 nt, Human
cccauggucacgugccauuguc

SEQ ID NO: 1089911 - RNA, 20 nt, Human
ccccauaccuuccccacaga

SEQ ID NO: 1089912 - RNA, 20 nt, Human
ccccugauacugggaauaga

SEQ ID NO: 1089913 - RNA, 21 nt, Human
ccggccccgggcgcccgcugg

SEQ ID NO: 1089914 - RNA, 18 nt, Human
ccuuccccacagaacugg

SEQ ID NO: 1089915 - RNA, 21 nt, Human
cgcccugcaucccggccccgg

SEQ ID NO: 1089916 - RNA, 20 nt, Human
cgggcccaggagugccuggg

SEQ ID NO: 1089917 - RNA, 20 nt, Human
cgucagcuaagggacagcgg

SEQ ID NO: 1089918 - RNA, 20 nt, Human
cuagaagacaugaucuguag

SEQ ID NO: 1089919 - RNA, 23 nt, Human
cucaggauucacucugauuugac

SEQ ID NO: 1089920 - RNA, 23 nt, Human
cucaugccuguaaucccagcacu

SEQ ID NO: 1089921 - RNA, 24 nt, Human
cucaugccuguaaucccagcacuu

SEQ ID NO: 1089922 - RNA, 21 nt, Human
cuccucacucccccucuucca

SEQ ID NO: 1089923 - RNA, 22 nt, Human
cucugcacaaugccugcccucc

SEQ ID NO: 1089924 - RNA, 22 nt, Human
cucugccagagcccagacuaga

SEQ ID NO: 1089925 - RNA, 23 nt, Human
cugaagucacuugucuaccccug

SEQ ID NO: 1089926 - RNA, 20 nt, Human
cugcccgggcccaggagugc

SEQ ID NO: 1089927 - RNA, 20 nt, Human
cugcugcccgggcccaggag

SEQ ID NO: 1089928 - RNA, 22 nt, Human
cugcugggccugagcugucugu

SEQ ID NO: 1089929 - RNA, 23 nt, Human
cugggcaugguggcucaugccug

SEQ ID NO: 1089930 - RNA, 22 nt, Human
cugggccuccucacucccccuc

SEQ ID NO: 1089931 - RNA, 22 nt, Human
cuguccgcgcgcccugcauccc

SEQ ID NO: 1089932 - RNA, 18 nt, Human
cuuccagcuccaccccug

SEQ ID NO: 1089933 - RNA, 21 nt, Human
gaagcugccccauaccuuccc

SEQ ID NO: 1089934 - RNA, 24 nt, Human
gagcuugcgugcugcugggccuga

SEQ ID NO: 1089935 - RNA, 23 nt, Human
gaggagccacagggcugacuggu

SEQ ID NO: 1089936 - RNA, 24 nt, Human
gauugcuugaagccaggaguuuga

SEQ ID NO: 1089937 - RNA, 19 nt, Human
gcgagggauggcugcagag

SEQ ID NO: 1089938 - RNA, 21 nt, Human
gcugcugcuaagauaauaaga

SEQ ID NO: 1089939 - RNA, 19 nt, Human
gcugggcaugguggcucau

SEQ ID NO: 1089940 - RNA, 22 nt, Human
gcugggcaugguggcucaugcc

SEQ ID NO: 1089941 - RNA, 22 nt, Human
ggaaggacacacagagggcaag

SEQ ID NO: 1089942 - RNA, 22 nt, Human
ggauugcuugaagccaggaguu

SEQ ID NO: 1089943 - RNA, 23 nt, Human
ggauugcuugaagccaggaguuu

SEQ ID NO: 1089944 - RNA, 22 nt, Human
ggcaucgucacuguuuccuccu

SEQ ID NO: 1089945 - RNA, 23 nt, Human
ggcaugguggcucaugccuguaa

SEQ ID NO: 1089946 - RNA, 21 nt, Human
ggccaaaguggaaggauugcu

SEQ ID NO: 1089947 - RNA, 23 nt, Human
ggcugggcaugguggcucaugcc

SEQ ID NO: 1089948 - RNA, 19 nt, Human
ggugcgcgcgcgccgcgcg

SEQ ID NO: 1089949 - RNA, 24 nt, Human
gguggcucaugccuguaaucccag

SEQ ID NO: 1089950 - RNA, 23 nt, Human
guggcucaugccuguaaucccag

SEQ ID NO: 1089951 - RNA, 23 nt, Human
uaaauccugaggugaauuugggg

SEQ ID NO: 1089952 - RNA, 20 nt, Human
uagcuugggaucugaaaccu

SEQ ID NO: 1089953 - RNA, 24 nt, Human
ucaacagaaaacaaagcaagcccu

SEQ ID NO: 1089954 - RNA, 22 nt, Human
ucagaacccuaauuggccaagc

SEQ ID NO: 1089955 - RNA, 23 nt, Human
ucccaacacugguuauccgcacc

SEQ ID NO: 1089956 - RNA, 18 nt, Human
ucccggccccgggcgccc

SEQ ID NO: 1089957 - RNA, 19 nt, Human
uccgcgcgcccugcauccc

SEQ ID NO: 1089958 - RNA, 20 nt, Human
uccgcgcgcccugcaucccg

SEQ ID NO: 1089959 - RNA, 19 nt, Human
uccucacucccccucuucc

SEQ ID NO: 1089960 - RNA, 22 nt, Human
uccucagcgguggcugcagaga

SEQ ID NO: 1089961 - RNA, 18 nt, Human
ucgccgaggagccacagg

SEQ ID NO: 1089962 - RNA, 23 nt, Human
ucucugccagagcccagacuaga

SEQ ID NO: 1089963 - RNA, 18 nt, Human
ucugcacaaugccugccc

SEQ ID NO: 1089964 - RNA, 22 nt, Human
ucuguagcuugggaucugaaac

SEQ ID NO: 1089965 - RNA, 18 nt, Human
ucugucucguuucugucc

SEQ ID NO: 1089966 - RNA, 24 nt, Human
ucuuccagcuccaccccugaucac

SEQ ID NO: 1089967 - RNA, 22 nt, Human
ugaacgggcccuugggucugau

SEQ ID NO: 1089968 - RNA, 18 nt, Human
ugaaggggcaggaggggg

SEQ ID NO: 1089969 - RNA, 21 nt, Human
ugacaggaccagugaucccau

SEQ ID NO: 1089970 - RNA, 22 nt, Human
ugacgagcacuucacggcgcca

SEQ ID NO: 1089971 - RNA, 23 nt, Human
ugagauggagauucccaugcagg

SEQ ID NO: 1089972 - RNA, 19 nt, Human
ugagcggcggcuccuggcc

SEQ ID NO: 1089973 - RNA, 18 nt, Human
ugagcugucugucucguu

SEQ ID NO: 1089974 - RNA, 21 nt, Human
ugauuugaccaagagucagaa

SEQ ID NO: 1089975 - RNA, 25 nt, Human
ugcagagggggugugcagagcucca

SEQ ID NO: 1089976 - RNA, 20 nt, Human
ugcaugaaggggcaggaggg

SEQ ID NO: 1089977 - RNA, 20 nt, Human
ugccccauaccuuccccaca

SEQ ID NO: 1089978 - RNA, 21 nt, Human
ugccugguguagcagucgcgg

SEQ ID NO: 1089979 - RNA, 18 nt, Human
ugccuguaaucccagcac

SEQ ID NO: 1089980 - RNA, 21 nt, Human
ugcgcgcgcgccgcgcgugug

SEQ ID NO: 1089981 - RNA, 21 nt, Human
ugcgugcugcugggccugagc

SEQ ID NO: 1089982 - RNA, 18 nt, Human
ugcugccaugaccgacuc

SEQ ID NO: 1089983 - RNA, 18 nt, Human
ugcugcccgggcccagga

SEQ ID NO: 1089984 - RNA, 20 nt, Human
ugcugcuaagauaauaagag

SEQ ID NO: 1089985 - RNA, 18 nt, Human
ugcuugaagccaggaguu

SEQ ID NO: 1089986 - RNA, 20 nt, Human
uggcaagagagcaguuucau

SEQ ID NO: 1089987 - RNA, 20 nt, Human
uggcaucgucacuguuuccu

SEQ ID NO: 1089988 - RNA, 23 nt, Human
uggcaucucagcuacgccuucaa

SEQ ID NO: 1089989 - RNA, 21 nt, Human
uggccaggcccuucucuagcc

SEQ ID NO: 1089990 - RNA, 21 nt, Human
uggccgcgggaccgugagacg

SEQ ID NO: 1089991 - RNA, 19 nt, Human
uggcggagaaaaaguaggg

SEQ ID NO: 1089992 - RNA, 22 nt, Human
uggcucaugccuguaaucccag

SEQ ID NO: 1089993 - RNA, 24 nt, Human
uggcucaugccuguaaucccagca

SEQ ID NO: 1089994 - RNA, 18 nt, Human
uggcugagcagcggagaa

SEQ ID NO: 1089995 - RNA, 19 nt, Human
ugggucugaugugauguua

SEQ ID NO: 1089996 - RNA, 21 nt, Human
uggguggugcagaaugugaca

SEQ ID NO: 1089997 - RNA, 24 nt, Human
ugguggcucaugccuguaauccca

SEQ ID NO: 1089998 - RNA, 19 nt, Human
uucccuccuuggugccccu

SEQ ID NO: 1089999 - RNA, 22 nt, Human
uugaagccaggaguuugagacc

SEQ ID NO: 1090000 - RNA, 23 nt, Human
uugaguuccaugacagaaucugu

SEQ ID NO: 1090001 - RNA, 23 nt, Human
uuucagggcgggcucccuggagg

SEQ ID NO: 1090002 - RNA, 23 nt, Human
uuucccuccuuggugccccugac

SEQ ID NO: 1090003 - RNA, 18 nt, Human
uuuccuccucugucucca

SEQ ID NO: 1090004 - RNA, 21 nt, Human
aaagcccaagucauuaacagu

SEQ ID NO: 1090005 - RNA, 24 nt, Human
aacauccugaucaggguuuaaugu

SEQ ID NO: 1090006 - RNA, 24 nt, Human
aagaacaagucuaaguugguuguu

SEQ ID NO: 1090007 - RNA, 22 nt, Human
acaacagcuacuuccaaagccc

SEQ ID NO: 1090008 - RNA, 21 nt, Human
acagaacuucuuaacaaugga

SEQ ID NO: 1090009 - RNA, 19 nt, Human
acagcaauucccuguauag

SEQ ID NO: 1090010 - RNA, 20 nt, Human
acauagugcuucuaccacca

SEQ ID NO: 1090011 - RNA, 19 nt, Human
acuaauaacaucagagaaa

SEQ ID NO: 1090012 - RNA, 20 nt, Human
acugacuaacauccugauca

SEQ ID NO: 1090013 - RNA, 20 nt, Human
acugcugcaugccugcagac

SEQ ID NO: 1090014 - RNA, 21 nt, Human
agaacuggcaaagacugugaa

SEQ ID NO: 1090015 - RNA, 20 nt, Human
agaagaagaacaagucuaaa

SEQ ID NO: 1090016 - RNA, 20 nt, Human
agaagauguuuuccaacaau

SEQ ID NO: 1090017 - RNA, 22 nt, Human
agacagaauaaaggugcauaug

SEQ ID NO: 1090018 - RNA, 21 nt, Human
agacagcaauucccuguauag

SEQ ID NO: 1090019 - RNA, 27 nt, Human
agacggaagacagaauaaaggggaccc

SEQ ID NO: 1090020 - RNA, 19 nt, Human
agauuuuccagauacugca

SEQ ID NO: 1090021 - RNA, 18 nt, Human
agcuuagaaagaacagug

SEQ ID NO: 1090022 - RNA, 22 nt, Human
aucgcuuaggaaaacaccuaaa

SEQ ID NO: 1090023 - RNA, 23 nt, Human
auggauuucugagguucccuugg

SEQ ID NO: 1090024 - RNA, 22 nt, Human
caaucaacaccugucauggcac

SEQ ID NO: 1090025 - RNA, 23 nt, Human
cacugcaggcuggccugccaaca

SEQ ID NO: 1090026 - RNA, 27 nt, Human
cagcaaucaacaccugucauggcacac

SEQ ID NO: 1090027 - RNA, 23 nt, Human
cagcaauucccuguauagcuuca

SEQ ID NO: 1090028 - RNA, 20 nt, Human
cagccuguugagccacugag

SEQ ID NO: 1090029 - RNA, 22 nt, Human
caggcuggcacucuuacaccca

SEQ ID NO: 1090030 - RNA, 18 nt, Human
caugaugagugccaaccu

SEQ ID NO: 1090031 - RNA, 23 nt, Human
ccaaacaaacagaacuucuuaac

SEQ ID NO: 1090032 - RNA, 21 nt, Human
ccaaagcccaagucauuaaca

SEQ ID NO: 1090033 - RNA, 22 nt, Human
ccaccaucauaaugcuuacuuc

SEQ ID NO: 1090034 - RNA, 19 nt, Human
ccacugacuaacauccuga

SEQ ID NO: 1090035 - RNA, 26 nt, Human
ccacugaguuaauccacagaagaugu

SEQ ID NO: 1090036 - RNA, 21 nt, Human
cccagcacuggcuaaggugag

SEQ ID NO: 1090037 - RNA, 24 nt, Human
ccugcacagcagcccaaucggcag

SEQ ID NO: 1090038 - RNA, 21 nt, Human
cgaauacaaguuccacggugc

SEQ ID NO: 1090039 - RNA, 26 nt, Human
cuacuuccaaagcccaagucauuaac

SEQ ID NO: 1090040 - RNA, 20 nt, Human
cucaaagcugcuuaaugauu

SEQ ID NO: 1090041 - RNA, 21 nt, Human
cuccacagaggccuuuucaaa

SEQ ID NO: 1090042 - RNA, 23 nt, Human
cuguauagcuucaggacaaugaa

SEQ ID NO: 1090043 - RNA, 19 nt, Human
cuuacacccagcacuggcu

SEQ ID NO: 1090044 - RNA, 22 nt, Human
cuuccaaagcccaagucauuaa

SEQ ID NO: 1090045 - RNA, 25 nt, Human
cuucuuaacaauggaacuucaaugg

SEQ ID NO: 1090046 - RNA, 18 nt, Human
gaaagacggaagacagaa

SEQ ID NO: 1090047 - RNA, 24 nt, Human
gcacuaguuggacacggcaaacau

SEQ ID NO: 1090048 - RNA, 18 nt, Human
gccugccaacaauccuac

SEQ ID NO: 1090049 - RNA, 18 nt, Human
gguuguuuucaucucugu

SEQ ID NO: 1090050 - RNA, 23 nt, Human
guucacauagugcuucuaccacc

SEQ ID NO: 1090051 - RNA, 22 nt, Human
uaaaacuaauaacaucagagaa

SEQ ID NO: 1090052 - RNA, 21 nt, Human
uaaaagaucaucuggcaagga

SEQ ID NO: 1090053 - RNA, 21 nt, Human
uaaaaggccuuugcaaaauuu

SEQ ID NO: 1090054 - RNA, 24 nt, Human
uaaaguagaaagucucagaggucc

SEQ ID NO: 1090055 - RNA, 24 nt, Human
uacaacagcuacuuccaaagccca

SEQ ID NO: 1090056 - RNA, 19 nt, Human
uacugguacucuuuuucaa

SEQ ID NO: 1090057 - RNA, 23 nt, Human
uacuuccaaagcccaagucauua

SEQ ID NO: 1090058 - RNA, 20 nt, Human
uagaacagucuuuccaacca

SEQ ID NO: 1090059 - RNA, 20 nt, Human
uagaacuggcaaagacugug

SEQ ID NO: 1090060 - RNA, 18 nt, Human
uauagacugccacuucug

SEQ ID NO: 1090061 - RNA, 26 nt, Human
uaucgcuuaggaaaacaccuaaagga

SEQ ID NO: 1090062 - RNA, 28 nt, Human
uauuuuguucuacucgguuuuauucuua

SEQ ID NO: 1090063 - RNA, 18 nt, Human
ucacauagugcuucuacc

SEQ ID NO: 1090064 - RNA, 19 nt, Human
ucacugcaggcuggccugc

SEQ ID NO: 1090065 - RNA, 19 nt, Human
ucagagaaaucuugggggu

SEQ ID NO: 1090066 - RNA, 20 nt, Human
ucagccuguugagccacuga

SEQ ID NO: 1090067 - RNA, 20 nt, Human
ucaggacaaugaaguucaca

SEQ ID NO: 1090068 - RNA, 23 nt, Human
uccaacaauagaugaugaccaga

SEQ ID NO: 1090069 - RNA, 19 nt, Human
uccacugacuaacauccug

SEQ ID NO: 1090070 - RNA, 20 nt, Human
uccacugacuaacauccuga

SEQ ID NO: 1090071 - RNA, 21 nt, Human
ucccauauggcccacugccaa

SEQ ID NO: 1090072 - RNA, 23 nt, Human
ucuauuuuuucuuuugauccucc

SEQ ID NO: 1090073 - RNA, 25 nt, Human
ucucacugucacugcaggcuggccu

SEQ ID NO: 1090074 - RNA, 21 nt, Human
ucuggcaaggaagaggauaga

SEQ ID NO: 1090075 - RNA, 21 nt, Human
ucugugugauuguuaucgcuu

SEQ ID NO: 1090076 - RNA, 23 nt, Human
ugaaacuguuaaaguagaaaguc

SEQ ID NO: 1090077 - RNA, 18 nt, Human
ugaccagacagcaauucc

SEQ ID NO: 1090078 - RNA, 26 nt, Human
ugaccagacagcaauucccuguauag

SEQ ID NO: 1090079 - RNA, 18 nt, Human
ugaccuugggaggugaag

SEQ ID NO: 1090080 - RNA, 21 nt, Human
ugacuggucacgcuuauccag

SEQ ID NO: 1090081 - RNA, 19 nt, Human
ugagcucugcccagugggg

SEQ ID NO: 1090082 - RNA, 21 nt, Human
ugagggaagugcuacugguac

SEQ ID NO: 1090083 - RNA, 24 nt, Human
ugaucaggguuuaaugugugaccu

SEQ ID NO: 1090084 - RNA, 22 nt, Human
uggaauaagacaguccucuguu

SEQ ID NO: 1090085 - RNA, 19 nt, Human
uggcacucuuacacccagc

SEQ ID NO: 1090086 - RNA, 22 nt, Human
ugugacuucuuaaugcuaaaga

SEQ ID NO: 1090087 - RNA, 22 nt, Human
uguuuuguuuuuugaauuuuuu

SEQ ID NO: 1090088 - RNA, 23 nt, Human
uguuuuguuuuuugaauuuuuua

SEQ ID NO: 1090089 - RNA, 23 nt, Human
uuaauccacagaagauguuuucc

SEQ ID NO: 1090090 - RNA, 21 nt, Human
uuauauuauuuauuuauucuu

SEQ ID NO: 1090091 - RNA, 20 nt, Human
uucacauagugcuucuacca

SEQ ID NO: 1090092 - RNA, 24 nt, Human
uuccccugagauaggcugguuguu

SEQ ID NO: 1090093 - RNA, 21 nt, Human
uucccuguauagcuucaggac

SEQ ID NO: 1090094 - RNA, 22 nt, Human
uucgaaugauaccuucaauugu

SEQ ID NO: 1090095 - RNA, 21 nt, Human
uucuccaacaacugauucugg

SEQ ID NO: 1090096 - RNA, 21 nt, Human
uucuccugguaacaauucuaa

SEQ ID NO: 1090097 - RNA, 20 nt, Human
uugauuucaacaguuuucca

SEQ ID NO: 1090098 - RNA, 24 nt, Human
uugcucaggcuugagugcacuggc

SEQ ID NO: 1090099 - RNA, 24 nt, Human
uuuucaugucuauuuuuucuuuug

SEQ ID NO: 1090100 - RNA, 22 nt, Human
uuuucuccaacaacugauucug

SEQ ID NO: 1090101 - RNA, 18 nt, Human
uuuucuuuugauccucca

SEQ ID NO: 1090102 - RNA, 22 nt, Human
aaaccaguagucucaacuccgg

SEQ ID NO: 1090103 - RNA, 23 nt, Human
aacagaaacccacaacccaaaac

SEQ ID NO: 1090104 - RNA, 21 nt, Human
aacccaaaacaagggcagccc

SEQ ID NO: 1090105 - RNA, 22 nt, Human
aacuugguuucauucacuuugg

SEQ ID NO: 1090106 - RNA, 19 nt, Human
aagcagaauccugccuugg

SEQ ID NO: 1090107 - RNA, 22 nt, Human
aaggagaaacugaggcacagua

SEQ ID NO: 1090108 - RNA, 20 nt, Human
aauguuuuuaaaguugggca

SEQ ID NO: 1090109 - RNA, 26 nt, Human
acaacuaagcccacuaccuuuggaag

SEQ ID NO: 1090110 - RNA, 21 nt, Human
acaggcacucucaugaucccu

SEQ ID NO: 1090111 - RNA, 26 nt, Human
accaagcugccucauggggcuguccu

SEQ ID NO: 1090112 - RNA, 20 nt, Human
agaaacccacaacccaaaac

SEQ ID NO: 1090113 - RNA, 21 nt, Human
agaaaggaagguagcuggagu

SEQ ID NO: 1090114 - RNA, 21 nt, Human
agacaaaacggcagaaaggaa

SEQ ID NO: 1090115 - RNA, 23 nt, Human
agacaaaacggcagaaaggaagg

SEQ ID NO: 1090116 - RNA, 19 nt, Human
agccaguucccucccugcc

SEQ ID NO: 1090117 - RNA, 21 nt, Human
agcucugcaccaguggcgaag

SEQ ID NO: 1090118 - RNA, 26 nt, Human
aggccacacccagaaagucggcauca

SEQ ID NO: 1090119 - RNA, 18 nt, Human
aggccugggauggaggga

SEQ ID NO: 1090120 - RNA, 20 nt, Human
agggacaagagggagggaca

SEQ ID NO: 1090121 - RNA, 23 nt, Human
agggaugcuggcaggccugggau

SEQ ID NO: 1090122 - RNA, 18 nt, Human
auccugacagguguggag

SEQ ID NO: 1090123 - RNA, 21 nt, Human
aucugcaccccuccccuccug

SEQ ID NO: 1090124 - RNA, 19 nt, Human
caaauuacccaauuugagu

SEQ ID NO: 1090125 - RNA, 18 nt, Human
caaccccuacauuacacu

SEQ ID NO: 1090126 - RNA, 19 nt, Human
caagucccaguuaccaaga

SEQ ID NO: 1090127 - RNA, 20 nt, Human
cacaacccaaaacaagggca

SEQ ID NO: 1090128 - RNA, 21 nt, Human
cacaacccaaaacaagggcag

SEQ ID NO: 1090129 - RNA, 24 nt, Human
cacaacccaaaacaagggcagccc

SEQ ID NO: 1090130 - RNA, 18 nt, Human
cacccccuugcggcaggu

SEQ ID NO: 1090131 - RNA, 22 nt, Human
caccccuccccuccugucuucc

SEQ ID NO: 1090132 - RNA, 23 nt, Human
cacucuccucucugaccugggaa

SEQ ID NO: 1090133 - RNA, 21 nt, Human
cacugaacagaaacccacaac

SEQ ID NO: 1090134 - RNA, 19 nt, Human
cagcagccaggguucccug

SEQ ID NO: 1090135 - RNA, 21 nt, Human
caggugccccucucacuccuu

SEQ ID NO: 1090136 - RNA, 27 nt, Human
cauccuccaccacaaccaacagcacac

SEQ ID NO: 1090137 - RNA, 23 nt, Human
cauuacuuccuguccgaucugca

SEQ ID NO: 1090138 - RNA, 21 nt, Human
ccaaaacaagggcagcccaug

SEQ ID NO: 1090139 - RNA, 21 nt, Human
ccacaacccaaaacaagggca

SEQ ID NO: 1090140 - RNA, 19 nt, Human
ccacacugcuagccccagg

SEQ ID NO: 1090141 - RNA, 18 nt, Human
ccagaucgaagcccagcc

SEQ ID NO: 1090142 - RNA, 22 nt, Human
ccaggguucccugacaaaagca

SEQ ID NO: 1090143 - RNA, 23 nt, Human
cccacaacccaaaacaagggcag

SEQ ID NO: 1090144 - RNA, 23 nt, Human
cccacaacccaaaacaagggcag

SEQ ID NO: 1090145 - RNA, 22 nt, Human
cccauggccgugauuaagcucu

SEQ ID NO: 1090146 - RNA, 20 nt, Human
ccccacccccuugcggcagg

SEQ ID NO: 1090147 - RNA, 19 nt, Human
ccgggcuggccuccagggu

SEQ ID NO: 1090148 - RNA, 20 nt, Human
ccgguacagaccccaccccc

SEQ ID NO: 1090149 - RNA, 21 nt, Human
ccuggacccugucaucucaaa

SEQ ID NO: 1090150 - RNA, 18 nt, Human
ccugggauggagggaagu

SEQ ID NO: 1090151 - RNA, 18 nt, Human
cgaucugcaccccucccc

SEQ ID NO: 1090152 - RNA, 21 nt, Human
cggcaucagggaugcuggcag

SEQ ID NO: 1090153 - RNA, 19 nt, Human
cgguacagaccccaccccc

SEQ ID NO: 1090154 - RNA, 21 nt, Human
cguauauaugugccacauccu

SEQ ID NO: 1090155 - RNA, 20 nt, Human
cguguagguacguauauaug

SEQ ID NO: 1090156 - RNA, 23 nt, Human
cuaacacuuucauagugcucaca

SEQ ID NO: 1090157 - RNA, 24 nt, Human
cucaacuccgggcuggccuccagg

SEQ ID NO: 1090158 - RNA, 25 nt, Human
cuccaccacaaccaacagcacacaa

SEQ ID NO: 1090159 - RNA, 21 nt, Human
cuccagcaauccucugucugc

SEQ ID NO: 1090160 - RNA, 22 nt, Human
cugaacagaaacccacaaccca

SEQ ID NO: 1090161 - RNA, 21 nt, Human
cugccuuccaacuugguuuca

SEQ ID NO: 1090162 - RNA, 21 nt, Human
cuggaggguccccaugacugg

SEQ ID NO: 1090163 - RNA, 20 nt, Human
cuggcaccaaagucugugcu

SEQ ID NO: 1090164 - RNA, 23 nt, Human
cuuggcccgguggcuuccagcgg

SEQ ID NO: 1090165 - RNA, 18 nt, Human
gaaccuagcaaacuggca

SEQ ID NO: 1090166 - RNA, 22 nt, Human
gaaccuagcaaacuggcaccaa

SEQ ID NO: 1090167 - RNA, 18 nt, Human
gagcuacaaagagggagu

SEQ ID NO: 1090168 - RNA, 20 nt, Human
gagcugccaccaagcugccu

SEQ ID NO: 1090169 - RNA, 20 nt, Human
gagugggagaccagaauucc

SEQ ID NO: 1090170 - RNA, 21 nt, Human
gauucacucuccacucuccuc

SEQ ID NO: 1090171 - RNA, 21 nt, Human
gcagaaaggaagguagcugga

SEQ ID NO: 1090172 - RNA, 20 nt, Human
gcagcccauggccgugauua

SEQ ID NO: 1090173 - RNA, 18 nt, Human
gccacauccuccaccaca

SEQ ID NO: 1090174 - RNA, 19 nt, Human
gcucuaaaaccaguagucu

SEQ ID NO: 1090175 - RNA, 26 nt, Human
gcugccaccaagcugccucauggggc

SEQ ID NO: 1090176 - RNA, 23 nt, Human
ggacaggcacucucaugaucccu

SEQ ID NO: 1090177 - RNA, 19 nt, Human
ggacccagaaggccagcag

SEQ ID NO: 1090178 - RNA, 25 nt, Human
ggagaaacugaggcacaguauuuca

SEQ ID NO: 1090179 - RNA, 21 nt, Human
ggcagaaaggaagguagcugg

SEQ ID NO: 1090180 - RNA, 19 nt, Human
ggcaggaaagcaggucagg

SEQ ID NO: 1090181 - RNA, 23 nt, Human
ggccuccaggguugcagcaauuc

SEQ ID NO: 1090182 - RNA, 21 nt, Human
ggcuggccuccaggguugcag

SEQ ID NO: 1090183 - RNA, 20 nt, Human
ggcuggggggcaggaaagca

SEQ ID NO: 1090184 - RNA, 23 nt, Human
ggcuggggggcaggaaagcaggu

SEQ ID NO: 1090185 - RNA, 24 nt, Human
gggcuggggggcaggaaagcaggu

SEQ ID NO: 1090186 - RNA, 21 nt, Human
ggggccugggaugccauuacu

SEQ ID NO: 1090187 - RNA, 21 nt, Human
uaaaaccaguagucucaacuc

SEQ ID NO: 1090188 - RNA, 22 nt, Human
uaaagaacagcuaacacuuuca

SEQ ID NO: 1090189 - RNA, 19 nt, Human
uaacuccuuccccacucag

SEQ ID NO: 1090190 - RNA, 21 nt, Human
uaacuccuuccccacucaggc

SEQ ID NO: 1090191 - RNA, 22 nt, Human
uaagcaaaggucacagcuccuu

SEQ ID NO: 1090192 - RNA, 21 nt, Human
uaauccaaucccaggcacauc

SEQ ID NO: 1090193 - RNA, 19 nt, Human
uacaaagagggagucagga

SEQ ID NO: 1090194 - RNA, 19 nt, Human
uacauuacacugaggggcc

SEQ ID NO: 1090195 - RNA, 21 nt, Human
uacugccuuuauuaagcucug

SEQ ID NO: 1090196 - RNA, 22 nt, Human
uacuguacaccuuguauauaua

SEQ ID NO: 1090197 - RNA, 24 nt, Human
uccaggguugcagcaauucggggc

SEQ ID NO: 1090198 - RNA, 23 nt, Human
ucccaguuaccaagaaguaacag

SEQ ID NO: 1090199 - RNA, 22 nt, Human
ucccuuggcccgguggcuucca

SEQ ID NO: 1090200 - RNA, 18 nt, Human
uccgcccucugugcggcc

SEQ ID NO: 1090201 - RNA, 24 nt, Human
uccucugucugcuaaagauaacuc

SEQ ID NO: 1090202 - RNA, 24 nt, Human
uccugagcugccaccaagcugccu

SEQ ID NO: 1090203 - RNA, 23 nt, Human
ucgaaccuagcaaacuggcacca

SEQ ID NO: 1090204 - RNA, 22 nt, Human
ucgagugggagaccagaauucc

SEQ ID NO: 1090205 - RNA, 20 nt, Human
ucuaaaaccaguagucucaa

SEQ ID NO: 1090206 - RNA, 23 nt, Human
ucucaaagccaguucccucccug

SEQ ID NO: 1090207 - RNA, 20 nt, Human
ugaacagaaacccacaaccc

SEQ ID NO: 1090208 - RNA, 24 nt, Human
ugaacagaaacccacaacccaaaa

SEQ ID NO: 1090209 - RNA, 22 nt, Human
ugaaucuuuuacaugugcacau

SEQ ID NO: 1090210 - RNA, 23 nt, Human
ugaccugggaacaugcccgugug

SEQ ID NO: 1090211 - RNA, 18 nt, Human
ugauugguccagcuaugg

SEQ ID NO: 1090212 - RNA, 18 nt, Human
ugcaccaguggcgaaggg

SEQ ID NO: 1090213 - RNA, 20 nt, Human
ugcaccccuccccuccuggu

SEQ ID NO: 1090214 - RNA, 21 nt, Human
ugcagcaauucggggccuggg

SEQ ID NO: 1090215 - RNA, 19 nt, Human
ugccacauccuccaccaca

SEQ ID NO: 1090216 - RNA, 21 nt, Human
ugccacauccuccaccacaac

SEQ ID NO: 1090217 - RNA, 18 nt, Human
ugccccucucacuccucc

SEQ ID NO: 1090218 - RNA, 22 nt, Human
ugcuagccccaggguucugcac

SEQ ID NO: 1090219 - RNA, 20 nt, Human
uggagcuuagggaggcagag

SEQ ID NO: 1090220 - RNA, 21 nt, Human
uggcaggccugggauggaggg

SEQ ID NO: 1090221 - RNA, 21 nt, Human
uggcccgguggcuuccagcgg

SEQ ID NO: 1090222 - RNA, 20 nt, Human
ugguaaagaacagcuaacac

SEQ ID NO: 1090223 - RNA, 21 nt, Human
uuaauguauuaauccaauccc

SEQ ID NO: 1090224 - RNA, 21 nt, Human
uuccuguccgaucugcacccc

SEQ ID NO: 1090225 - RNA, 24 nt, Human
uuccuguccgaucugcaccccucc

SEQ ID NO: 1090226 - RNA, 25 nt, Human
aagcagcacuccuuucugcugcugu

SEQ ID NO: 1090227 - RNA, 24 nt, Human
acaaggaccugcuagccuuggaca

SEQ ID NO: 1090228 - RNA, 19 nt, Human
accacacacacgggaccca

SEQ ID NO: 1090229 - RNA, 22 nt, Human
acggaucugggaccagcaggag

SEQ ID NO: 1090230 - RNA, 22 nt, Human
agaaauucuccuccggacagaa

SEQ ID NO: 1090231 - RNA, 21 nt, Human
agacauccagagagcaaaaga

SEQ ID NO: 1090232 - RNA, 21 nt, Human
agagcaaaagacugugucccc

SEQ ID NO: 1090233 - RNA, 19 nt, Human
agcaaaagacugugucccc

SEQ ID NO: 1090234 - RNA, 23 nt, Human
aggaggcuccuaacgaggccagg

SEQ ID NO: 1090235 - RNA, 20 nt, Human
aggcagggacagggcacggu

SEQ ID NO: 1090236 - RNA, 20 nt, Human
aggcggugagguggagggag

SEQ ID NO: 1090237 - RNA, 22 nt, Human
aggguuggugcgggcgggcggg

SEQ ID NO: 1090238 - RNA, 19 nt, Human
aucugcauaaugguuucac

SEQ ID NO: 1090239 - RNA, 19 nt, Human
cacuccuuucugcugcugu

SEQ ID NO: 1090240 - RNA, 19 nt, Human
cagcaaggcagugugaaga

SEQ ID NO: 1090241 - RNA, 22 nt, Human
cagcagccaggcgguucauuga

SEQ ID NO: 1090242 - RNA, 21 nt, Human
cagcaggaggggcagcgcucc

SEQ ID NO: 1090243 - RNA, 21 nt, Human
cagcgaacagcagccaggcgg

SEQ ID NO: 1090244 - RNA, 20 nt, Human
cagcugagcucagcucacca

SEQ ID NO: 1090245 - RNA, 25 nt, Human
cagggaggugaugcgauggcccacg

SEQ ID NO: 1090246 - RNA, 18 nt, Human
ccaggcaucuccugggga

SEQ ID NO: 1090247 - RNA, 21 nt, Human
ccauggcccuucagggacaag

SEQ ID NO: 1090248 - RNA, 19 nt, Human
cccacggucacagcaaggc

SEQ ID NO: 1090249 - RNA, 24 nt, Human
cgggcuucaucuucuucaucugca

SEQ ID NO: 1090250 - RNA, 23 nt, Human
cugcugcuguccugcucucuucc

SEQ ID NO: 1090251 - RNA, 24 nt, Human
gacagggcacggucagacauccag

SEQ ID NO: 1090252 - RNA, 23 nt, Human
gacuguguccccagcgaacagca

SEQ ID NO: 1090253 - RNA, 18 nt, Human
gauggcccugugaggcag

SEQ ID NO: 1090254 - RNA, 19 nt, Human
gccaggcaucuccugggga

SEQ ID NO: 1090255 - RNA, 21 nt, Human
gcccugugaggcagggacagg

SEQ ID NO: 1090256 - RNA, 19 nt, Human
gggaccagcaggaggggca

SEQ ID NO: 1090257 - RNA, 20 nt, Human
uaaaauggaaacagaaaccc

SEQ ID NO: 1090258 - RNA, 21 nt, Human
uaacgaggccaggcaucuccu

SEQ ID NO: 1090259 - RNA, 18 nt, Human
uagaggccaggaaaccaa

SEQ ID NO: 1090260 - RNA, 18 nt, Human
uagcuccauggcccuuca

SEQ ID NO: 1090261 - RNA, 20 nt, Human
ucacauuccuggccugggag

SEQ ID NO: 1090262 - RNA, 19 nt, Human
ucagacauccagagagcaa

SEQ ID NO: 1090263 - RNA, 24 nt, Human
ucagaggguuggugcgggcgggcg

SEQ ID NO: 1090264 - RNA, 18 nt, Human
uccagagagcaaaagacu

SEQ ID NO: 1090265 - RNA, 20 nt, Human
uccugcucucuuccuguugu

SEQ ID NO: 1090266 - RNA, 22 nt, Human
ucgggcuucaucuucuucaucu

SEQ ID NO: 1090267 - RNA, 18 nt, Human
ucuaaggacuuggcuugc

SEQ ID NO: 1090268 - RNA, 20 nt, Human
ucuccuccggacagaacgga

SEQ ID NO: 1090269 - RNA, 22 nt, Human
ucuccuggggauaagaaauucu

SEQ ID NO: 1090270 - RNA, 19 nt, Human
ucuuccuguuguucccagg

SEQ ID NO: 1090271 - RNA, 23 nt, Human
ugagaagagccacauaagcagca

SEQ ID NO: 1090272 - RNA, 23 nt, Human
ugccuucauccuuacaaacaacc

SEQ ID NO: 1090273 - RNA, 24 nt, Human
ugccuucauccuuacaaacaaccc

SEQ ID NO: 1090274 - RNA, 19 nt, Human
uguccccagcgaacagcag

SEQ ID NO: 1090275 - RNA, 19 nt, Human
uguccugcucucuuccugu

SEQ ID NO: 1090276 - RNA, 24 nt, Human
ugugaagauuccuaccacacacac

SEQ ID NO: 1090277 - RNA, 21 nt, Human
ugugaggcagggacagggcac

SEQ ID NO: 1090278 - RNA, 19 nt, Human
uucauccuuacaaacaacc

SEQ ID NO: 1090279 - RNA, 20 nt, Human
uucccaggcggugaggugga

SEQ ID NO: 1090280 - RNA, 24 nt, Human
uucccaggcggugagguggaggga

SEQ ID NO: 1090281 - RNA, 19 nt, Human
uuucugcugcuguccugcu

SEQ ID NO: 1090282 - RNA, 23 nt, Human
aaaaccccugcccugguccacuu

SEQ ID NO: 1090283 - RNA, 24 nt, Human
aaaaugcugggauuccagguguga

SEQ ID NO: 1090284 - RNA, 23 nt, Human
aaagagcaggcaccagcggugcc

SEQ ID NO: 1090285 - RNA, 18 nt, Human
aacauggucccuagaaaa

SEQ ID NO: 1090286 - RNA, 21 nt, Human
aaccuagcgaaaauuugacua

SEQ ID NO: 1090287 - RNA, 24 nt, Human
aacuaacuucugaaauauaaccua

SEQ ID NO: 1090288 - RNA, 21 nt, Human
aagaggcaaacccaccgaaca

SEQ ID NO: 1090289 - RNA, 22 nt, Human
aagaguggaggugacaguaaga

SEQ ID NO: 1090290 - RNA, 20 nt, Human
aagcaggaaauguaaaaggg

SEQ ID NO: 1090291 - RNA, 24 nt, Human
aaggucuggaccucugugccucag

SEQ ID NO: 1090292 - RNA, 25 nt, Human
aagugauccuccugccucagccucc

SEQ ID NO: 1090293 - RNA, 22 nt, Human
acuaagcugaaauauuuugugu

SEQ ID NO: 1090294 - RNA, 21 nt, Human
agaaaagggaaaauuucacau

SEQ ID NO: 1090295 - RNA, 18 nt, Human
agaagaugggagagcccu

SEQ ID NO: 1090296 - RNA, 25 nt, Human
agagcccuauuuagcacccccaccc

SEQ ID NO: 1090297 - RNA, 18 nt, Human
agcacagaaaacagggcu

SEQ ID NO: 1090298 - RNA, 24 nt, Human
agccagucaaggggcugguagggc

SEQ ID NO: 1090299 - RNA, 20 nt, Human
agcuggcuucaaacccgagc

SEQ ID NO: 1090300 - RNA, 23 nt, Human
aggcaaggucucacuauguugcc

SEQ ID NO: 1090301 - RNA, 22 nt, Human
agggaaaauuucacauggggcu

SEQ ID NO: 1090302 - RNA, 24 nt, Human
aggugacaguaagagcgugggagc

SEQ ID NO: 1090303 - RNA, 19 nt, Human
auaaaauggagguaaggcc

SEQ ID NO: 1090304 - RNA, 20 nt, Human
auaaaugccugagcuacacc

SEQ ID NO: 1090305 - RNA, 19 nt, Human
auggggcuugcuuugucua

SEQ ID NO: 1090306 - RNA, 24 nt, Human
caaaaugcugggauuccaggugug

SEQ ID NO: 1090307 - RNA, 25 nt, Human
caaacuccuggguucaagugauccu

SEQ ID NO: 1090308 - RNA, 26 nt, Human
caaaugaccacacucaggaauauggc

SEQ ID NO: 1090309 - RNA, 23 nt, Human
caagagcaagaggcaaacccacc

SEQ ID NO: 1090310 - RNA, 20 nt, Human
caagaggcaaacccaccgaa

SEQ ID NO: 1090311 - RNA, 18 nt, Human
caagcuguacuuuaaaau

SEQ ID NO: 1090312 - RNA, 24 nt, Human
caagggcgucgguccugccaaggu

SEQ ID NO: 1090313 - RNA, 22 nt, Human
caagugauccuccugccucagc

SEQ ID NO: 1090314 - RNA, 27 nt, Human
caagugauccuccugccucagccuccc

SEQ ID NO: 1090315 - RNA, 20 nt, Human
cacagcucggucacagucau

SEQ ID NO: 1090316 - RNA, 22 nt, Human
cacccaguccucgaucacagcu

SEQ ID NO: 1090317 - RNA, 18 nt, Human
cacccucucccuuucucc

SEQ ID NO: 1090318 - RNA, 25 nt, Human
caccuggagccgcucauccaagggc

SEQ ID NO: 1090319 - RNA, 24 nt, Human
cacuauguugcccaugcuggucuc

SEQ ID NO: 1090320 - RNA, 18 nt, Human
cagcauuaguggggcugu

SEQ ID NO: 1090321 - RNA, 21 nt, Human
cagcggugccgcugcucccga

SEQ ID NO: 1090322 - RNA, 21 nt, Human
cagcugggcguugauguacau

SEQ ID NO: 1090323 - RNA, 20 nt, Human
caggugugagccacugcacc

SEQ ID NO: 1090324 - RNA, 21 nt, Human
caugcuggucucaaacuccug

SEQ ID NO: 1090325 - RNA, 21 nt, Human
ccaaaaugcugggauuccagg

SEQ ID NO: 1090326 - RNA, 24 nt, Human
ccaaaaugcugggauuccaggugu

SEQ ID NO: 1090327 - RNA, 18 nt, Human
ccacugcaccuggccugu

SEQ ID NO: 1090328 - RNA, 22 nt, Human
ccagaagucucuugccaucuag

SEQ ID NO: 1090329 - RNA, 23 nt, Human
ccagcggugccgcugcucccgag

SEQ ID NO: 1090330 - RNA, 23 nt, Human
cccaugcuggucucaaacuccug

SEQ ID NO: 1090331 - RNA, 19 nt, Human
cccccacccucucccuuuc

SEQ ID NO: 1090332 - RNA, 22 nt, Human
ccuggguucaagugauccuccu

SEQ ID NO: 1090333 - RNA, 23 nt, Human
ccuggguucaagugauccuccug

SEQ ID NO: 1090334 - RNA, 18 nt, Human
ccuugagggaaggaaaag

SEQ ID NO: 1090335 - RNA, 20 nt, Human
ccuugagggaaggaaaagaa

SEQ ID NO: 1090336 - RNA, 21 nt, Human
cgugggagcacacaccuggga

SEQ ID NO: 1090337 - RNA, 21 nt, Human
cucaaaaccccugcccugguc

SEQ ID NO: 1090338 - RNA, 18 nt, Human
cucaggaauauggccaca

SEQ ID NO: 1090339 - RNA, 24 nt, Human
cucuugcugacacaaaggccccau

SEQ ID NO: 1090340 - RNA, 22 nt, Human
cugacacaaaggccccauuuac

SEQ ID NO: 1090341 - RNA, 23 nt, Human
cugccucagccucccaaaaugcu

SEQ ID NO: 1090342 - RNA, 24 nt, Human
cugccucagccucccaaaaugcug

SEQ ID NO: 1090343 - RNA, 18 nt, Human
cuggaccucugugccuca

SEQ ID NO: 1090344 - RNA, 24 nt, Human
cuggaccucugugccucaguuucc

SEQ ID NO: 1090345 - RNA, 21 nt, Human
cuugcugacacaaaggcccca

SEQ ID NO: 1090346 - RNA, 22 nt, Human
cuuggagcccuauuuuccaucc

SEQ ID NO: 1090347 - RNA, 18 nt, Human
gaagaugggagagcccua

SEQ ID NO: 1090348 - RNA, 24 nt, Human
gagccacugcaccuggccuguguu

SEQ ID NO: 1090349 - RNA, 18 nt, Human
gauuccaggugugagcca

SEQ ID NO: 1090350 - RNA, 22 nt, Human
gauuccaggugugagccacugc

SEQ ID NO: 1090351 - RNA, 23 nt, Human
gauuccaggugugagccacugca

SEQ ID NO: 1090352 - RNA, 21 nt, Human
gcucagggaccaggguaguca

SEQ ID NO: 1090353 - RNA, 23 nt, Human
ggaugcucucaaaaccccugccc

SEQ ID NO: 1090354 - RNA, 21 nt, Human
ggcaaggucucacuauguugc

SEQ ID NO: 1090355 - RNA, 24 nt, Human
gggagcacacaccugggacucgaa

SEQ ID NO: 1090356 - RNA, 23 nt, Human
ggggcuggaauaaaugccugagc

SEQ ID NO: 1090357 - RNA, 22 nt, Human
ggucacagucauaguccagcca

SEQ ID NO: 1090358 - RNA, 23 nt, Human
guaaaauucuuuccaaguuccaa

SEQ ID NO: 1090359 - RNA, 24 nt, Human
guaaaauucuuuccaaguuccaaa

SEQ ID NO: 1090360 - RNA, 19 nt, Human
gucagaucaagagacgagc

SEQ ID NO: 1090361 - RNA, 24 nt, Human
gugauccuccugccucagccuccc

SEQ ID NO: 1090362 - RNA, 18 nt, Human
uaaaauggagguaaggcc

SEQ ID NO: 1090363 - RNA, 22 nt, Human
uaaaauggagguaaggccagaa

SEQ ID NO: 1090364 - RNA, 18 nt, Human
uaacauggucccuagaaa

SEQ ID NO: 1090365 - RNA, 27 nt, Human
uaacucaggcccauuuuauuaagcagg

SEQ ID NO: 1090366 - RNA, 22 nt, Human
uaagacgaauuacugauacuua

SEQ ID NO: 1090367 - RNA, 22 nt, Human
uagaggcaaggucucacuaugu

SEQ ID NO: 1090368 - RNA, 30 nt, Human
uagcacccccacccucucccuuucuccagg

SEQ ID NO: 1090369 - RNA, 20 nt, Human
uaucuaaacccacacugauc

SEQ ID NO: 1090370 - RNA, 24 nt, Human
uauguugcccaugcuggucucaaa

SEQ ID NO: 1090371 - RNA, 19 nt, Human
ucaagugauccuccugccu

SEQ ID NO: 1090372 - RNA, 23 nt, Human
ucccaaaaugcugggauuccagg

SEQ ID NO: 1090373 - RNA, 18 nt, Human
ucccuagaaaagggaaaa

SEQ ID NO: 1090374 - RNA, 24 nt, Human
ucccucacccacuaagaguggagg

SEQ ID NO: 1090375 - RNA, 27 nt, Human
uccuccugccucagccucccaaaaugc

SEQ ID NO: 1090376 - RNA, 21 nt, Human
uccuggguucaagugauccuc

SEQ ID NO: 1090377 - RNA, 24 nt, Human
uccuggguucaagugauccuccug

SEQ ID NO: 1090378 - RNA, 21 nt, Human
uccuugagggaaggaaaagaa

SEQ ID NO: 1090379 - RNA, 19 nt, Human
ucgaggacagccacacagg

SEQ ID NO: 1090380 - RNA, 23 nt, Human
ucuagagaaacacuuggagaaga

SEQ ID NO: 1090381 - RNA, 21 nt, Human
ucucaaacuccuggguucaag

SEQ ID NO: 1090382 - RNA, 23 nt, Human
ucucacuauguugcccaugcugg

SEQ ID NO: 1090383 - RNA, 24 nt, Human
ucucacuauguugcccaugcuggu

SEQ ID NO: 1090384 - RNA, 18 nt, Human
ucuccagagcucuuugcc

SEQ ID NO: 1090385 - RNA, 24 nt, Human
ucuuaccuugaaacugaggcuuca

SEQ ID NO: 1090386 - RNA, 23 nt, Human
ugacagagaggacauccaggaaa

SEQ ID NO: 1090387 - RNA, 22 nt, Human
ugagugauguggccacagagcu

SEQ ID NO: 1090388 - RNA, 20 nt, Human
ugauguggccacagagcugg

SEQ ID NO: 1090389 - RNA, 21 nt, Human
ugauguggccacagagcuggg

SEQ ID NO: 1090390 - RNA, 19 nt, Human
ugcaaagugauuugccaca

SEQ ID NO: 1090391 - RNA, 27 nt, Human
ugcaaagugauuugccacaagguuuuu

SEQ ID NO: 1090392 - RNA, 19 nt, Human
ugccaaggucuggaccucu

SEQ ID NO: 1090393 - RNA, 19 nt, Human
ugccaaggucuggaccucu

SEQ ID NO: 1090394 - RNA, 22 nt, Human
ugccaaggucuggaccucugug

SEQ ID NO: 1090395 - RNA, 23 nt, Human
ugccaaggucuggaccucugugc

SEQ ID NO: 1090396 - RNA, 20 nt, Human
ugcccuggcaauggggcugg

SEQ ID NO: 1090397 - RNA, 24 nt, Human
ugccucagccucccaaaaugcugg

SEQ ID NO: 1090398 - RNA, 18 nt, Human
ugcucucaaaaccccugc

SEQ ID NO: 1090399 - RNA, 19 nt, Human
uggaaggggaauguuccca

SEQ ID NO: 1090400 - RNA, 18 nt, Human
uggaccucugugccucag

SEQ ID NO: 1090401 - RNA, 20 nt, Human
ugggagagcccuauuuagca

SEQ ID NO: 1090402 - RNA, 22 nt, Human
ugggagagcccuauuuagcacc

SEQ ID NO: 1090403 - RNA, 18 nt, Human
ugggauuccaggugugag

SEQ ID NO: 1090404 - RNA, 22 nt, Human
ugggauuccaggugugagccac

SEQ ID NO: 1090405 - RNA, 24 nt, Human
ugggauuccaggugugagccacug

SEQ ID NO: 1090406 - RNA, 23 nt, Human
uggggccccagaagucucuugcc

SEQ ID NO: 1090407 - RNA, 19 nt, Human
uggguucaagugauccucc

SEQ ID NO: 1090408 - RNA, 20 nt, Human
uggguucaagugauccuccu

SEQ ID NO: 1090409 - RNA, 23 nt, Human
uggguucaagugauccuccugcc

SEQ ID NO: 1090410 - RNA, 24 nt, Human
ugguaugaaaaaagaauguaaaau

SEQ ID NO: 1090411 - RNA, 18 nt, Human
uuaccuugaaacugaggc

SEQ ID NO: 1090412 - RNA, 18 nt, Human
uucaagugauccuccugc

SEQ ID NO: 1090413 - RNA, 21 nt, Human
uucaagugauccuccugccuc

SEQ ID NO: 1090414 - RNA, 23 nt, Human
uucaagugauccuccugccucag

SEQ ID NO: 1090415 - RNA, 24 nt, Human
uucaagugauccuccugccucagc

SEQ ID NO: 1090416 - RNA, 23 nt, Human
uucaucagaguauucuuccuuga

SEQ ID NO: 1090417 - RNA, 19 nt, Human
uuccugggacuccugcagu

SEQ ID NO: 1090418 - RNA, 23 nt, Human
uucuagauggaugaacaguuuac

SEQ ID NO: 1090419 - RNA, 23 nt, Human
uugagggaaggaaaagaauuuac

SEQ ID NO: 1090420 - RNA, 22 nt, Human
ccccggagggccccuuccugcc

SEQ ID NO: 1090421 - RNA, 25 nt, Human
gaggccacagccaacacaggguuuc

SEQ ID NO: 1090422 - RNA, 20 nt, Human
gcaucggucuccuggcugca

SEQ ID NO: 1090423 - RNA, 22 nt, Human
uaugaggaaaagaaauggcauc

SEQ ID NO: 1090424 - RNA, 20 nt, Human
ucagcccccggagggccccu

SEQ ID NO: 1090425 - RNA, 23 nt, Human
ucuccuggcugcauacagcagcc

SEQ ID NO: 1090426 - RNA, 18 nt, Human
ugcauacagcagccacgu

SEQ ID NO: 1090427 - RNA, 20 nt, Human
ugcauacagcagccacguag

SEQ ID NO: 1090428 - RNA, 21 nt, Human
aaaggaucuggaguccauggg

SEQ ID NO: 1090429 - RNA, 25 nt, Human
acagcagagaacccacaagcuugaa

SEQ ID NO: 1090430 - RNA, 18 nt, Human
acccagaagaguugacuu

SEQ ID NO: 1090431 - RNA, 20 nt, Human
acccagaguccucuagucuu

SEQ ID NO: 1090432 - RNA, 19 nt, Human
acgccucccgccccauggg

SEQ ID NO: 1090433 - RNA, 19 nt, Human
agacagcagagaacccaca

SEQ ID NO: 1090434 - RNA, 19 nt, Human
agagaacccacaagcuuga

SEQ ID NO: 1090435 - RNA, 19 nt, Human
aguccauuccuuuuagcag

SEQ ID NO: 1090436 - RNA, 25 nt, Human
caaaaggccacacaaggaagaauca

SEQ ID NO: 1090437 - RNA, 21 nt, Human
caagacagcagagaacccaca

SEQ ID NO: 1090438 - RNA, 20 nt, Human
caccccccgagccccggaca

SEQ ID NO: 1090439 - RNA, 22 nt, Human
cacuggccauauuuacuaaagu

SEQ ID NO: 1090440 - RNA, 19 nt, Human
cagaguccucuagucuugg

SEQ ID NO: 1090441 - RNA, 27 nt, Human
caggaccaagucuuugcaaaaccuauc

SEQ ID NO: 1090442 - RNA, 20 nt, Human
ccagaggucagaacauagua

SEQ ID NO: 1090443 - RNA, 20 nt, Human
ccccaccccccgagccccgg

SEQ ID NO: 1090444 - RNA, 20 nt, Human
ccccaugggccgccgccggg

SEQ ID NO: 1090445 - RNA, 20 nt, Human
ccccaugggccgccgccggg

SEQ ID NO: 1090446 - RNA, 24 nt, Human
ccccaugggccgccgccggggccc

SEQ ID NO: 1090447 - RNA, 22 nt, Human
ccccccaccccccgagccccgg

SEQ ID NO: 1090448 - RNA, 24 nt, Human
ccccccgagccccggacaggcagc

SEQ ID NO: 1090449 - RNA, 19 nt, Human
cccccgagccccggacagg

SEQ ID NO: 1090450 - RNA, 24 nt, Human
ccccgagccccggacaggcagcgg

SEQ ID NO: 1090451 - RNA, 18 nt, Human
ccccgccccgcucccccc

SEQ ID NO: 1090452 - RNA, 21 nt, Human
ccccgccccgcuccccccacc

SEQ ID NO: 1090453 - RNA, 25 nt, Human
ccccgccccgcuccccccacccccc

SEQ ID NO: 1090454 - RNA, 22 nt, Human
ccccgcuccccccaccccccga

SEQ ID NO: 1090455 - RNA, 26 nt, Human
ccgccccgcuccccccaccccccgag

SEQ ID NO: 1090456 - RNA, 22 nt, Human
ccgccgccggggcccggagucc

SEQ ID NO: 1090457 - RNA, 23 nt, Human
ccuaaaaauaguuuucagcagau

SEQ ID NO: 1090458 - RNA, 20 nt, Human
cgccccgcuccccccacccc

SEQ ID NO: 1090459 - RNA, 23 nt, Human
cgccccgcuccccccaccccccg

SEQ ID NO: 1090460 - RNA, 19 nt, Human
cggccagaaagagacaucc

SEQ ID NO: 1090461 - RNA, 30 nt, Human
cuaaaaugagaucaaauccucgaguccauu

SEQ ID NO: 1090462 - RNA, 20 nt, Human
cuaaagugcuguaaaauggc

SEQ ID NO: 1090463 - RNA, 23 nt, Human
cuccaugguuuguacacagaacu

SEQ ID NO: 1090464 - RNA, 21 nt, Human
cuccccccaccccccgagccc

SEQ ID NO: 1090465 - RNA, 21 nt, Human
cuccccgccccgcucccccca

SEQ ID NO: 1090466 - RNA, 20 nt, Human
ggaaauucuuuauuuuuguu

SEQ ID NO: 1090467 - RNA, 21 nt, Human
guccugguccucucuguacag

SEQ ID NO: 1090468 - RNA, 19 nt, Human
uaaagugcuguaaaauggc

SEQ ID NO: 1090469 - RNA, 21 nt, Human
uacugaaauguuugcuuuuaa

SEQ ID NO: 1090470 - RNA, 21 nt, Human
uaucaaauggauggauggcuu

SEQ ID NO: 1090471 - RNA, 18 nt, Human
uccaugguuuguacacag

SEQ ID NO: 1090472 - RNA, 21 nt, Human
uccauuccuuuuagcagaaau

SEQ ID NO: 1090473 - RNA, 21 nt, Human
uccccccaccccccgagcccc

SEQ ID NO: 1090474 - RNA, 25 nt, Human
uccccccaccccccgagccccggac

SEQ ID NO: 1090475 - RNA, 21 nt, Human
uccccgccccgcuccccccac

SEQ ID NO: 1090476 - RNA, 23 nt, Human
ugagaaagagugccagaggucag

SEQ ID NO: 1090477 - RNA, 24 nt, Human
ugagaucaaauccucgaguccauu

SEQ ID NO: 1090478 - RNA, 25 nt, Human
ugagaugauggucaguuuauccauc

SEQ ID NO: 1090479 - RNA, 22 nt, Human
uggguaacugugacccagaaga

SEQ ID NO: 1090480 - RNA, 18 nt, Human
uguuugcuuuuaauaaau

SEQ ID NO: 1090481 - RNA, 21 nt, Human
uucaagacagcagagaaccca

SEQ ID NO: 1090482 - RNA, 25 nt, Human
uucuuuauuuuuguugcuggguaac

SEQ ID NO: 1090483 - RNA, 20 nt, Human
uuggcgaugcuggcgauggc

SEQ ID NO: 1090484 - RNA, 23 nt, Human
uuuaagaaaauacuugaauugcc

SEQ ID NO: 1090485 - RNA, 21 nt, Human
aaagaaugagguaaacugaag

SEQ ID NO: 1090486 - RNA, 20 nt, Human
aaauguccauagaacauguc

SEQ ID NO: 1090487 - RNA, 18 nt, Human
aacugcaaucccaaaugu

SEQ ID NO: 1090488 - RNA, 18 nt, Human
aagaacuuaaagcugugg

SEQ ID NO: 1090489 - RNA, 21 nt, Human
aagacucucuccacuaugcag

SEQ ID NO: 1090490 - RNA, 25 nt, Human
aauagccagauauuuacuagcgaac

SEQ ID NO: 1090491 - RNA, 23 nt, Human
acacacacacacacacauauaua

SEQ ID NO: 1090492 - RNA, 23 nt, Human
acacacacauacacacacacaca

SEQ ID NO: 1090493 - RNA, 24 nt, Human
acacacauacacacacacacacag

SEQ ID NO: 1090494 - RNA, 22 nt, Human
accaccauaagugaaagaagua

SEQ ID NO: 1090495 - RNA, 18 nt, Human
accuagaaagguauggga

SEQ ID NO: 1090496 - RNA, 20 nt, Human
accuccaagacaacaaugaa

SEQ ID NO: 1090497 - RNA, 20 nt, Human
agcuccacugccaugaaaca

SEQ ID NO: 1090498 - RNA, 18 nt, Human
aggaccaaucaaaucaga

SEQ ID NO: 1090499 - RNA, 25 nt, Human
aguaaacaguggggaaauucuuagc

SEQ ID NO: 1090500 - RNA, 23 nt, Human
auagccagauauuuacuagcgaa

SEQ ID NO: 1090501 - RNA, 33 nt, Human
auauaaauuuacacacacauacacacacacagu

SEQ ID NO: 1090502 - RNA, 22 nt, Human
caaaaaccuguuaaaaucaagg

SEQ ID NO: 1090503 - RNA, 21 nt, Human
caaacaaaggcauauaacaua

SEQ ID NO: 1090504 - RNA, 21 nt, Human
caaugucuggucugcaagagg

SEQ ID NO: 1090505 - RNA, 20 nt, Human
cacacacacacacacacaca

SEQ ID NO: 1090506 - RNA, 22 nt, Human
cacacacacacacacacacaua

SEQ ID NO: 1090507 - RNA, 26 nt, Human
cacacacacacacacacacauauaua

SEQ ID NO: 1090508 - RNA, 20 nt, Human
cacacacacacacacacaua

SEQ ID NO: 1090509 - RNA, 22 nt, Human
cacacacacacacacacauaua

SEQ ID NO: 1090510 - RNA, 19 nt, Human
cacacacacacacacauau

SEQ ID NO: 1090511 - RNA, 23 nt, Human
cacacacacacacacauauauac

SEQ ID NO: 1090512 - RNA, 23 nt, Human
cacacacacacauauauacacac

SEQ ID NO: 1090513 - RNA, 28 nt, Human
cacacacauacacacacacacacacaca

SEQ ID NO: 1090514 - RNA, 22 nt, Human
cacacauacacacacacacaca

SEQ ID NO: 1090515 - RNA, 26 nt, Human
cacauacacacacacacacacacaca

SEQ ID NO: 1090516 - RNA, 24 nt, Human
cacauuucaaacaggagauuaucu

SEQ ID NO: 1090517 - RNA, 22 nt, Human
caccacaguguuuugcuagcaa

SEQ ID NO: 1090518 - RNA, 23 nt, Human
caccaggaaaaacaagcauugau

SEQ ID NO: 1090519 - RNA, 24 nt, Human
caccaggaaaaacaagcauugaug

SEQ ID NO: 1090520 - RNA, 25 nt, Human
caccaggaaaaacaagcauugaugc

SEQ ID NO: 1090521 - RNA, 19 nt, Human
caccuagaaagguauggga

SEQ ID NO: 1090522 - RNA, 24 nt, Human
cacuguauacugcaucagcaaaau

SEQ ID NO: 1090523 - RNA, 19 nt, Human
cagaauagcaacugcaauc

SEQ ID NO: 1090524 - RNA, 21 nt, Human
cagaauagcaacugcaauccc

SEQ ID NO: 1090525 - RNA, 21 nt, Human
cagccuucagauaaauggcuu

SEQ ID NO: 1090526 - RNA, 23 nt, Human
caguagaaaaagaaucucuguac

SEQ ID NO: 1090527 - RNA, 24 nt, Human
caguagaaaaagaaucucuguaca

SEQ ID NO: 1090528 - RNA, 26 nt, Human
cauacacacacacacacacacacaua

SEQ ID NO: 1090529 - RNA, 20 nt, Human
ccaaagcuuuccuucaaagg

SEQ ID NO: 1090530 - RNA, 27 nt, Human
ccaaucaaaucagaauagcaacugcaa

SEQ ID NO: 1090531 - RNA, 21 nt, Human
ccacugccaugaaacacccug

SEQ ID NO: 1090532 - RNA, 21 nt, Human
cgaaggcauggagauguggag

SEQ ID NO: 1090533 - RNA, 21 nt, Human
cugcuugugugaagcaugggc

SEQ ID NO: 1090534 - RNA, 19 nt, Human
cuguaccuauuacaaaaac

SEQ ID NO: 1090535 - RNA, 22 nt, Human
cuguaccuauuacaaaaaccug

SEQ ID NO: 1090536 - RNA, 19 nt, Human
cuuaaagcuguggguuuag

SEQ ID NO: 1090537 - RNA, 24 nt, Human
cuucaaagugauccauuugacuga

SEQ ID NO: 1090538 - RNA, 24 nt, Human
gaaaaagaaucucuguacaacaga

SEQ ID NO: 1090539 - RNA, 20 nt, Human
gaagaacuuaaagcuguggg

SEQ ID NO: 1090540 - RNA, 21 nt, Human
gaagaacuuaaagcugugggu

SEQ ID NO: 1090541 - RNA, 23 nt, Human
ggaaaaacaagcauugaugcgaa

SEQ ID NO: 1090542 - RNA, 23 nt, Human
ggcauggagauguggagaagaga

SEQ ID NO: 1090543 - RNA, 18 nt, Human
gucugcaagaguacgaag

SEQ ID NO: 1090544 - RNA, 21 nt, Human
uaaauagccaaaauagccaga

SEQ ID NO: 1090545 - RNA, 22 nt, Human
uaaaugcaauaccaccauaagu

SEQ ID NO: 1090546 - RNA, 19 nt, Human
uaauuuuuagcuuaacuua

SEQ ID NO: 1090547 - RNA, 20 nt, Human
uacacacacacacacacaca

SEQ ID NO: 1090548 - RNA, 26 nt, Human
uacacacacacacacacacacauaua

SEQ ID NO: 1090549 - RNA, 22 nt, Human
uacacacacauacacacacaca

SEQ ID NO: 1090550 - RNA, 19 nt, Human
uaccaccauaagugaaaga

SEQ ID NO: 1090551 - RNA, 24 nt, Human
uacuguauuuuaaaacugugaguu

SEQ ID NO: 1090552 - RNA, 19 nt, Human
uagauacaaauaaaaccuu

SEQ ID NO: 1090553 - RNA, 19 nt, Human
uagccaaaauagccagaua

SEQ ID NO: 1090554 - RNA, 22 nt, Human
uagcuuaacuuaaaaucgcacc

SEQ ID NO: 1090555 - RNA, 28 nt, Human
uauaacggugacaaccaaagcuuuccuu

SEQ ID NO: 1090556 - RNA, 20 nt, Human
uauaguguucaccaggaaaa

SEQ ID NO: 1090557 - RNA, 21 nt, Human
uauauaacggugacaaccaaa

SEQ ID NO: 1090558 - RNA, 21 nt, Human
uauuacaaaaaccuguuaaaa

SEQ ID NO: 1090559 - RNA, 18 nt, Human
ucagauuccccaaauuau

SEQ ID NO: 1090560 - RNA, 23 nt, Human
ucaugucauaaguuaauuugaac

SEQ ID NO: 1090561 - RNA, 25 nt, Human
uccaagacaacaaugaaauuaaaga

SEQ ID NO: 1090562 - RNA, 19 nt, Human
ucccaaauguccauagaac

SEQ ID NO: 1090563 - RNA, 20 nt, Human
ucccaaauguccauagaaca

SEQ ID NO: 1090564 - RNA, 24 nt, Human
ucucuguacaacagacaacaguug

SEQ ID NO: 1090565 - RNA, 21 nt, Human
ugaaacacccugucccacauu

SEQ ID NO: 1090566 - RNA, 18 nt, Human
ugaaagaaguaaacagug

SEQ ID NO: 1090567 - RNA, 22 nt, Human
ugacuucacauacuauccccca

SEQ ID NO: 1090568 - RNA, 21 nt, Human
ugcaauaccaccauaagugaa

SEQ ID NO: 1090569 - RNA, 18 nt, Human
ugcauguguguguauaua

SEQ ID NO: 1090570 - RNA, 22 nt, Human
ugcguucauuucugcuugugug

SEQ ID NO: 1090571 - RNA, 31 nt, Human
uguguguguauauaaauuuacacacacauaa

SEQ ID NO: 1090572 - RNA, 22 nt, Human
uguuugcauguguguguauaua

SEQ ID NO: 1090573 - RNA, 22 nt, Human
uuugaaccauacuuugcuaaca

SEQ ID NO: 1090574 - RNA, 19 nt, Human
uuugcauguguguguauau

SEQ ID NO: 1090575 - RNA, 20 nt, Human
agcaguucaaggaaauggug

SEQ ID NO: 1090576 - RNA, 20 nt, Human
aggaagccagcuuucucagg

SEQ ID NO: 1090577 - RNA, 18 nt, Human
aucucuuuucucccugag

SEQ ID NO: 1090578 - RNA, 21 nt, Human
cacugagcccacgucauuccc

SEQ ID NO: 1090579 - RNA, 21 nt, Human
cagcaaugcuugcaagaugga

SEQ ID NO: 1090580 - RNA, 22 nt, Human
cagcaggcugugaauuuuggag

SEQ ID NO: 1090581 - RNA, 23 nt, Human
caucucuuuucucccugaguuuu

SEQ ID NO: 1090582 - RNA, 20 nt, Human
cauggaaacugaaagcuuuc

SEQ ID NO: 1090583 - RNA, 20 nt, Human
ccagcuucaauuuuuugagc

SEQ ID NO: 1090584 - RNA, 23 nt, Human
ccuucucaagccccuuccuugag

SEQ ID NO: 1090585 - RNA, 18 nt, Human
cucaugacacgcugcauc

SEQ ID NO: 1090586 - RNA, 23 nt, Human
cugaaagcucucugcaaagcuga

SEQ ID NO: 1090587 - RNA, 20 nt, Human
cuggaaaucuccagcuucaa

SEQ ID NO: 1090588 - RNA, 22 nt, Human
gagcccauauuuugccacccac

SEQ ID NO: 1090589 - RNA, 22 nt, Human
gaggugcugcccugagcuugca

SEQ ID NO: 1090590 - RNA, 22 nt, Human
gcccugagcuugcagguggguc

SEQ ID NO: 1090591 - RNA, 22 nt, Human
ggacaaggcugcagcuuguguc

SEQ ID NO: 1090592 - RNA, 22 nt, Human
ggagaguguguccucacccaca

SEQ ID NO: 1090593 - RNA, 22 nt, Human
gguacuucuuguacacugagcc

SEQ ID NO: 1090594 - RNA, 29 nt, Human
gucagcaggcugugaauuuuggagagugg

SEQ ID NO: 1090595 - RNA, 21 nt, Human
guccuucucaagccccuuccu

SEQ ID NO: 1090596 - RNA, 19 nt, Human
uaagucaauagaagagcua

SEQ ID NO: 1090597 - RNA, 20 nt, Human
uacacugagcccacgucauu

SEQ ID NO: 1090598 - RNA, 24 nt, Human
uagaagagcuaguccuucucaagc

SEQ ID NO: 1090599 - RNA, 24 nt, Human
ucaauagaagagcuaguccuucuc

SEQ ID NO: 1090600 - RNA, 23 nt, Human
ucccugaguuuuuggacuucauu

SEQ ID NO: 1090601 - RNA, 19 nt, Human
ucucaggaacucaaccgcc

SEQ ID NO: 1090602 - RNA, 24 nt, Human
ucuccaccagcguguccugccaug

SEQ ID NO: 1090603 - RNA, 21 nt, Human
ugaaagcucucugcaaagcug

SEQ ID NO: 1090604 - RNA, 19 nt, Human
ugaugaagccuuuggucag

SEQ ID NO: 1090605 - RNA, 24 nt, Human
uggaggugcugcccugagcuugca

SEQ ID NO: 1090606 - RNA, 23 nt, Human
uggcuuuccgucggucaggaggu

SEQ ID NO: 1090607 - RNA, 20 nt, Human
uguccugccaugacugaaag

SEQ ID NO: 1090608 - RNA, 22 nt, Human
aacacuguaauuuucuuaauug

SEQ ID NO: 1090609 - RNA, 19 nt, Human
cauaaaaugagguagccaa

SEQ ID NO: 1090610 - RNA, 20 nt, Human
ccugacucuaggcccaaaac

SEQ ID NO: 1090611 - RNA, 25 nt, Human
gaccaccuuaaaguucucagcuuga

SEQ ID NO: 1090612 - RNA, 18 nt, Human
gcacugaacugcuuuaac

SEQ ID NO: 1090613 - RNA, 26 nt, Human
ggcccaaaacuuucuuuucuuagagc

SEQ ID NO: 1090614 - RNA, 21 nt, Human
uaaaaagagaggaaguucaac

SEQ ID NO: 1090615 - RNA, 22 nt, Human
uaaaaugagguagccaagacca

SEQ ID NO: 1090616 - RNA, 24 nt, Human
uaaaguucucagcuugacuugaaa

SEQ ID NO: 1090617 - RNA, 28 nt, Human
ucacuaaaucgauuuaguaauucuguau

SEQ ID NO: 1090618 - RNA, 25 nt, Human
ugagguagccaagaccaccuuaaag

SEQ ID NO: 1090619 - RNA, 20 nt, Human
aagcagacgagcaauacagc

SEQ ID NO: 1090620 - RNA, 21 nt, Human
aagucagucccacgaugauga

SEQ ID NO: 1090621 - RNA, 19 nt, Human
aaugacaacuuuauaacuu

SEQ ID NO: 1090622 - RNA, 21 nt, Human
acagaacuucuuaacaaugga

SEQ ID NO: 1090623 - RNA, 21 nt, Human
agaacuggcaaagacugugaa

SEQ ID NO: 1090624 - RNA, 20 nt, Human
aggaacuguggggucaggac

SEQ ID NO: 1090625 - RNA, 23 nt, Human
auggauuucugagguucccuugg

SEQ ID NO: 1090626 - RNA, 18 nt, Human
caugaugagugccaaccu

SEQ ID NO: 1090627 - RNA, 23 nt, Human
ccaaacaaacagaacuucuuaac

SEQ ID NO: 1090628 - RNA, 22 nt, Human
ccaaagguaaacuauccagagg

SEQ ID NO: 1090629 - RNA, 18 nt, Human
ccaccaaagucaguccca

SEQ ID NO: 1090630 - RNA, 22 nt, Human
cuggcccuggucaugggacagg

SEQ ID NO: 1090631 - RNA, 25 nt, Human
cuucuuaacaauggaacuucaaugg

SEQ ID NO: 1090632 - RNA, 22 nt, Human
gaugauggucagccagaguauu

SEQ ID NO: 1090633 - RNA, 24 nt, Human
uaaaguagaaagucucagaggucc

SEQ ID NO: 1090634 - RNA, 19 nt, Human
uaacuugucggaaaugcaa

SEQ ID NO: 1090635 - RNA, 20 nt, Human
uaaugacaacuuuauaacuu

SEQ ID NO: 1090636 - RNA, 20 nt, Human
uagaacuggcaaagacugug

SEQ ID NO: 1090637 - RNA, 18 nt, Human
uauagacugccacuucug

SEQ ID NO: 1090638 - RNA, 25 nt, Human
uccaccaaagucagucccacgauga

SEQ ID NO: 1090639 - RNA, 23 nt, Human
ucuucugugugaaacaggaacug

SEQ ID NO: 1090640 - RNA, 23 nt, Human
ugaaacuguuaaaguagaaaguc

SEQ ID NO: 1090641 - RNA, 18 nt, Human
ugauggucagccagagua

SEQ ID NO: 1090642 - RNA, 22 nt, Human
uggaauaagacaguccucuguu

SEQ ID NO: 1090643 - RNA, 22 nt, Human
ugggacaggaacugugggguca

SEQ ID NO: 1090644 - RNA, 19 nt, Human
uuacaaguauaccucuaca

SEQ ID NO: 1090645 - RNA, 21 nt, Human
uucuccaacaacugauucugg

SEQ ID NO: 1090646 - RNA, 28 nt, Human
uuuucaguuauagacugccacuucugau

SEQ ID NO: 1090647 - RNA, 22 nt, Human
uuuucuccaacaacugauucug

SEQ ID NO: 1090648 - RNA, 18 nt, Human
aaaugaccuuuuagaagg

SEQ ID NO: 1090649 - RNA, 24 nt, Human
aaggaaaaucaucuugauuccaaa

SEQ ID NO: 1090650 - RNA, 27 nt, Human
aaucaucuugauuccaaaaaaggaucc

SEQ ID NO: 1090651 - RNA, 21 nt, Human
accuaaaugugacagcaaaaa

SEQ ID NO: 1090652 - RNA, 21 nt, Human
agacaguugucucuggaaaca

SEQ ID NO: 1090653 - RNA, 18 nt, Human
aggaaggggauaugaaga

SEQ ID NO: 1090654 - RNA, 20 nt, Human
aggaaggggauaugaagaac

SEQ ID NO: 1090655 - RNA, 20 nt, Human
auagaucuuccugaaugucu

SEQ ID NO: 1090656 - RNA, 27 nt, Human
auaugcaugccggagaaagcauaugca

SEQ ID NO: 1090657 - RNA, 22 nt, Human
caaaauagcuguggguguaggc

SEQ ID NO: 1090658 - RNA, 23 nt, Human
caacccacacagucuggaaagga

SEQ ID NO: 1090659 - RNA, 24 nt, Human
caagaagcacagagguggccaggc

SEQ ID NO: 1090660 - RNA, 20 nt, Human
cacuucagcaaaggcuaagg

SEQ ID NO: 1090661 - RNA, 22 nt, Human
caguggaaacugugaacccaaa

SEQ ID NO: 1090662 - RNA, 21 nt, Human
ccacacagucuggaaaggaua

SEQ ID NO: 1090663 - RNA, 27 nt, Human
ccagcaccugaacucuauccuauagcu

SEQ ID NO: 1090664 - RNA, 24 nt, Human
cuggcuggggcacuucagcucucc

SEQ ID NO: 1090665 - RNA, 22 nt, Human
cuggggcacuucagcucuccuc

SEQ ID NO: 1090666 - RNA, 19 nt, Human
gaggcaaaaccaauugaga

SEQ ID NO: 1090667 - RNA, 19 nt, Human
gaucuuccugaaugucuca

SEQ ID NO: 1090668 - RNA, 18 nt, Human
gcauaugcaugcaagaaa

SEQ ID NO: 1090669 - RNA, 18 nt, Human
gcuaaguggggaacgugu

SEQ ID NO: 1090670 - RNA, 25 nt, Human
ggggaccuggcauuagacaguuguc

SEQ ID NO: 1090671 - RNA, 25 nt, Human
uacacagugucuuaaaaaggaccag

SEQ ID NO: 1090672 - RNA, 24 nt, Human
uagaaagcauaugcaugccggaga

SEQ ID NO: 1090673 - RNA, 22 nt, Human
uauaaugaauacacaaaacuca

SEQ ID NO: 1090674 - RNA, 26 nt, Human
uaugucuacccugcccauuacuguaa

SEQ ID NO: 1090675 - RNA, 20 nt, Human
ucagcucuccuccacguggu

SEQ ID NO: 1090676 - RNA, 25 nt, Human
ucagcucuccuccacguggucucuc

SEQ ID NO: 1090677 - RNA, 20 nt, Human
ucccuccaugacugacacuc

SEQ ID NO: 1090678 - RNA, 21 nt, Human
uccuauagcugacuguuugcu

SEQ ID NO: 1090679 - RNA, 19 nt, Human
ucucuggaaacacuucagc

SEQ ID NO: 1090680 - RNA, 21 nt, Human
ucuggaaacacuucagcaaag

SEQ ID NO: 1090681 - RNA, 21 nt, Human
ucuucagagagauugugaugu

SEQ ID NO: 1090682 - RNA, 19 nt, Human
ugaaauuuucugguugaau

SEQ ID NO: 1090683 - RNA, 21 nt, Human
ugaaauuuucugguugaaugu

SEQ ID NO: 1090684 - RNA, 24 nt, Human
ugaaugucucaucaccaaaacuuu

SEQ ID NO: 1090685 - RNA, 22 nt, Human
ugaugugcugaaauuuucuggu

SEQ ID NO: 1090686 - RNA, 20 nt, Human
uggaacacaagcaaaauagc

SEQ ID NO: 1090687 - RNA, 21 nt, Human
uggaacacaagcaaaauagcu

SEQ ID NO: 1090688 - RNA, 22 nt, Human
uggaacacaagcaaaauagcug

SEQ ID NO: 1090689 - RNA, 26 nt, Human
uggguguaggcuagcugcuggcuggg

SEQ ID NO: 1090690 - RNA, 18 nt, Human
uguaggcuagcugcuggc

SEQ ID NO: 1090691 - RNA, 23 nt, Human
uuaccuaaaugugacagcaaaaa

SEQ ID NO: 1090692 - RNA, 21 nt, Human
uuaucuuuguuccaagcaacu

SEQ ID NO: 1090693 - RNA, 18 nt, Human
uucaugacaaggaguuga

SEQ ID NO: 1090694 - RNA, 21 nt, Human
uuccaaaaaaggaucccgaua

SEQ ID NO: 1090695 - RNA, 19 nt, Human
uuccccagcaccugaacuc

SEQ ID NO: 1090696 - RNA, 22 nt, Human
aaaaaaaaaaaaaaagacaaag

SEQ ID NO: 1090697 - RNA, 27 nt, Human
aaaaaaaaaaaaaaagacaaaguuugg

SEQ ID NO: 1090698 - RNA, 26 nt, Human
aaaaaaaaaagacaaaguuuggaaaa

SEQ ID NO: 1090699 - RNA, 24 nt, Human
aaaaaaaagacaaaguuuggaaaa

SEQ ID NO: 1090700 - RNA, 23 nt, Human
aaaaaaagacaaaguuuggaaaa

SEQ ID NO: 1090701 - RNA, 26 nt, Human
aagacaaaguuuggaaaauuaaaccc

SEQ ID NO: 1090702 - RNA, 18 nt, Human
augaaacaaaauguuccu

SEQ ID NO: 1090703 - RNA, 27 nt, Human
uggaaaauuaaacccccagggaaaugg

SEQ ID NO: 1090704 - RNA, 20 nt, Human
aagcaagcugaauccccagg

SEQ ID NO: 1090705 - RNA, 24 nt, Human
acagaagccugaggaggggacaac

SEQ ID NO: 1090706 - RNA, 18 nt, Human
accccccuccccacccca

SEQ ID NO: 1090707 - RNA, 19 nt, Human
accccccuccccaccccag

SEQ ID NO: 1090708 - RNA, 21 nt, Human
accccccuccccaccccagac

SEQ ID NO: 1090709 - RNA, 19 nt, Human
agagggagggaggacugag

SEQ ID NO: 1090710 - RNA, 20 nt, Human
agagggggcaguuagagaug

SEQ ID NO: 1090711 - RNA, 19 nt, Human
aggaagcaagcaagcugaa

SEQ ID NO: 1090712 - RNA, 23 nt, Human
aggacugaggucagacuggugga

SEQ ID NO: 1090713 - RNA, 19 nt, Human
aggggccagagggggcagu

SEQ ID NO: 1090714 - RNA, 23 nt, Human
caagcaagcugaauccccagggg

SEQ ID NO: 1090715 - RNA, 23 nt, Human
caagcugaauccccaggggccag

SEQ ID NO: 1090716 - RNA, 23 nt, Human
cagacugguggaggaagcaagca

SEQ ID NO: 1090717 - RNA, 19 nt, Human
ccccaggggccagaggggg

SEQ ID NO: 1090718 - RNA, 19 nt, Human
ccccccuccccaccccaga

SEQ ID NO: 1090719 - RNA, 19 nt, Human
cccccuccccaccccagac

SEQ ID NO: 1090720 - RNA, 24 nt, Human
cuggcaaucgauggaguguucccu

SEQ ID NO: 1090721 - RNA, 25 nt, Human
gaggacugaggucagacugguggag

SEQ ID NO: 1090722 - RNA, 19 nt, Human
ugaggaggggacaacagag

SEQ ID NO: 1090723 - RNA, 24 nt, Human
accacgggggggugagucacuuug

SEQ ID NO: 1090724 - RNA, 18 nt, Human
agaagccaucgcugccca

SEQ ID NO: 1090725 - RNA, 23 nt, Human
aggcuguccaccucacuggccuc

SEQ ID NO: 1090726 - RNA, 24 nt, Human
augcauucugggcuaucuccaauu

SEQ ID NO: 1090727 - RNA, 19 nt, Human
ccuaggcuguccaccucac

SEQ ID NO: 1090728 - RNA, 21 nt, Human
ccucugcuugcuccaguccuu

SEQ ID NO: 1090729 - RNA, 21 nt, Human
cucacuggccucgggcagagg

SEQ ID NO: 1090730 - RNA, 20 nt, Human
cuccaguccuucagggugcc

SEQ ID NO: 1090731 - RNA, 23 nt, Human
gaggauaaccccuaggcugucca

SEQ ID NO: 1090732 - RNA, 18 nt, Human
ggcacaugcauucugggc

SEQ ID NO: 1090733 - RNA, 20 nt, Human
ggcagggcuuucucucuccu

SEQ ID NO: 1090734 - RNA, 23 nt, Human
ggcggguggggcaugaggggcug

SEQ ID NO: 1090735 - RNA, 21 nt, Human
uaaccccuaggcuguccaccu

SEQ ID NO: 1090736 - RNA, 18 nt, Human
uggcggguggggcaugag

SEQ ID NO: 1090737 - RNA, 23 nt, Human
uggcggguggggcaugaggggcu

SEQ ID NO: 1090738 - RNA, 20 nt, Human
ugggcacaugcauucugggc

SEQ ID NO: 1090739 - RNA, 23 nt, Human
uuggcggguggggcaugaggggc

SEQ ID NO: 1090740 - RNA, 23 nt, Human
ccagcuggccucgauguacguca

SEQ ID NO: 1090741 - RNA, 24 nt, Human
ccggcgcgcgcgcccggggauccc

SEQ ID NO: 1090742 - RNA, 23 nt, Human
cgcgcccggggauccccagcugc

SEQ ID NO: 1090743 - RNA, 22 nt, Human
cgcgcgcgcccggggaucccca

SEQ ID NO: 1090744 - RNA, 22 nt, Human
cguguacgcgccggcgcgcgcg

SEQ ID NO: 1090745 - RNA, 23 nt, Human
cugccagugauggucugguuccc

SEQ ID NO: 1090746 - RNA, 21 nt, Human
uacaaguggcugcgcuucagc

SEQ ID NO: 1090747 - RNA, 22 nt, Human
ucuguaccugaacguguacgcg

SEQ ID NO: 1090748 - RNA, 18 nt, Human
ugccagugauggucuggu

SEQ ID NO: 1090749 - RNA, 23 nt, Human
ugccagugauggucugguucccg

SEQ ID NO: 1090750 - RNA, 21 nt, Human
aaguggaccugggcagugacg

SEQ ID NO: 1090751 - RNA, 24 nt, Human
agaaaacuugacugagagacaggc

SEQ ID NO: 1090752 - RNA, 22 nt, Human
agagacaggcacgaggacggga

SEQ ID NO: 1090753 - RNA, 19 nt, Human
aggacgggagggaggagga

SEQ ID NO: 1090754 - RNA, 23 nt, Human
agguggcucagagucaaaggaag

SEQ ID NO: 1090755 - RNA, 18 nt, Human
caacugaaucacauggaa

SEQ ID NO: 1090756 - RNA, 21 nt, Human
caacugaaucacauggaaauc

SEQ ID NO: 1090757 - RNA, 21 nt, Human
cacagccccaaacgcugaggg

SEQ ID NO: 1090758 - RNA, 23 nt, Human
cacugggccacucgggaaacccu

SEQ ID NO: 1090759 - RNA, 23 nt, Human
ccacagccccaaacgcugaggaa

SEQ ID NO: 1090760 - RNA, 23 nt, Human
ccacucgggaaacccuuucccaa

SEQ ID NO: 1090761 - RNA, 19 nt, Human
cccaaaaugaacuuuuacc

SEQ ID NO: 1090762 - RNA, 24 nt, Human
cccaaaaugaacuuuuaccaaaga

SEQ ID NO: 1090763 - RNA, 24 nt, Human
cccgcccacugggccacucgggaa

SEQ ID NO: 1090764 - RNA, 19 nt, Human
cccgcccgccgccgccgcc

SEQ ID NO: 1090765 - RNA, 25 nt, Human
cccgcccgccgccgccgccucucgc

SEQ ID NO: 1090766 - RNA, 23 nt, Human
cccgccgcccggcugcggcugcg

SEQ ID NO: 1090767 - RNA, 18 nt, Human
ccgcccgccgccgccgcc

SEQ ID NO: 1090768 - RNA, 23 nt, Human
ccgccgcaucgccgccgccgccg

SEQ ID NO: 1090769 - RNA, 22 nt, Human
ccgccgccgccgccgcccgacu

SEQ ID NO: 1090770 - RNA, 18 nt, Human
ccgccgccgccgccgccg

SEQ ID NO: 1090771 - RNA, 18 nt, Human
ccgccgccgccgccgccg

SEQ ID NO: 1090772 - RNA, 18 nt, Human
ccgccgccgccgccgccg

SEQ ID NO: 1090773 - RNA, 23 nt, Human
ccgccgccgccgccgccgcccga

SEQ ID NO: 1090774 - RNA, 24 nt, Human
ccgccgccgccgccgccgccgccc

SEQ ID NO: 1090775 - RNA, 24 nt, Human
ccgccgccgccgccgccgccgccg

SEQ ID NO: 1090776 - RNA, 27 nt, Human
ccgccgccgccgccgccgccgccgccc

SEQ ID NO: 1090777 - RNA, 18 nt, Human
ccgccgccgccgccucuc

SEQ ID NO: 1090778 - RNA, 18 nt, Human
ccgccgccgccucucgcc

SEQ ID NO: 1090779 - RNA, 22 nt, Human
ccgccgccgccucucgcccgcc

SEQ ID NO: 1090780 - RNA, 21 nt, Human
ccgccgccgccucucgcccgg

SEQ ID NO: 1090781 - RNA, 23 nt, Human
ccgccgccucucgcccgccgccc

SEQ ID NO: 1090782 - RNA, 21 nt, Human
ccucccaacuccaccgcggac

SEQ ID NO: 1090783 - RNA, 21 nt, Human
cgccgcccggcugcggcugcg

SEQ ID NO: 1090784 - RNA, 19 nt, Human
cgccgccgccgccgccgcc

SEQ ID NO: 1090785 - RNA, 22 nt, Human
cggcccgggccgccucgcgcgg

SEQ ID NO: 1090786 - RNA, 19 nt, Human
cucagagucaaaggaagcc

SEQ ID NO: 1090787 - RNA, 18 nt, Human
cucgggaaacccuuuccc

SEQ ID NO: 1090788 - RNA, 22 nt, Human
cugacaggacaagggaaagaaa

SEQ ID NO: 1090789 - RNA, 22 nt, Human
gagacaggcacgaggacgggag

SEQ ID NO: 1090790 - RNA, 20 nt, Human
gcuggcucccggcgccagga

SEQ ID NO: 1090791 - RNA, 20 nt, Human
guggaccugggcagugacgc

SEQ ID NO: 1090792 - RNA, 21 nt, Human
uaccaaagaggacaaaauuca

SEQ ID NO: 1090793 - RNA, 23 nt, Human
uaccaaagaggacaaaauucaac

SEQ ID NO: 1090794 - RNA, 19 nt, Human
ucccaaaaugaacuuuuac

SEQ ID NO: 1090795 - RNA, 19 nt, Human
ucccaacuccaccgcggac

SEQ ID NO: 1090796 - RNA, 19 nt, Human
ucgcccgccgcccggcugc

SEQ ID NO: 1090797 - RNA, 25 nt, Human
ucgccgccgccgccgccgccgccgg

SEQ ID NO: 1090798 - RNA, 20 nt, Human
ugcuccacagccccaaacgc

SEQ ID NO: 1090799 - RNA, 22 nt, Human
aaaccacaggggaaggagccgg

SEQ ID NO: 1090800 - RNA, 18 nt, Human
aaagugccaccaggugaa

SEQ ID NO: 1090801 - RNA, 21 nt, Human
aacaagaugcaggagaagcag

SEQ ID NO: 1090802 - RNA, 19 nt, Human
aagcaggaacaagaugcag

SEQ ID NO: 1090803 - RNA, 21 nt, Human
aagcaggaacaagaugcagga

SEQ ID NO: 1090804 - RNA, 22 nt, Human
aagcccacaguugugucuuuaa

SEQ ID NO: 1090805 - RNA, 26 nt, Human
aaggagaagcaaaaggagccggugaa

SEQ ID NO: 1090806 - RNA, 22 nt, Human
aaggagaagcaaaaggagcugg

SEQ ID NO: 1090807 - RNA, 23 nt, Human
aaggggcccaggccagagaauac

SEQ ID NO: 1090808 - RNA, 22 nt, Human
aauuauuucacagaaauauacu

SEQ ID NO: 1090809 - RNA, 22 nt, Human
acaacgaaccaaucugagaucc

SEQ ID NO: 1090810 - RNA, 20 nt, Human
acucugcaguggcaggaagg

SEQ ID NO: 1090811 - RNA, 18 nt, Human
acuuucuuuguacuguuu

SEQ ID NO: 1090812 - RNA, 20 nt, Human
agaaagcccacaguuguguc

SEQ ID NO: 1090813 - RNA, 21 nt, Human
agacaggaggucagggcucug

SEQ ID NO: 1090814 - RNA, 18 nt, Human
agaggaaagaggaauagc

SEQ ID NO: 1090815 - RNA, 23 nt, Human
agcaagugguuaaaaaaugccaa

SEQ ID NO: 1090816 - RNA, 22 nt, Human
agcuccucacagcaaacagccu

SEQ ID NO: 1090817 - RNA, 24 nt, Human
agcuggcugaggucccccaggaag

SEQ ID NO: 1090818 - RNA, 24 nt, Human
aggaggucagggcucugaugcuac

SEQ ID NO: 1090819 - RNA, 24 nt, Human
aggucccccaggaagcuucccacu

SEQ ID NO: 1090820 - RNA, 20 nt, Human
aguacgugucugugucuugg

SEQ ID NO: 1090821 - RNA, 20 nt, Human
caauggcucagcuaguuuac

SEQ ID NO: 1090822 - RNA, 22 nt, Human
caccauuuuacacccaaagaca

SEQ ID NO: 1090823 - RNA, 20 nt, Human
caggaggucagggcucugau

SEQ ID NO: 1090824 - RNA, 22 nt, Human
cagggcucugaugcuacucuuc

SEQ ID NO: 1090825 - RNA, 18 nt, Human
cauaacucacguccugca

SEQ ID NO: 1090826 - RNA, 21 nt, Human
caugacaauuuaauacaauag

SEQ ID NO: 1090827 - RNA, 19 nt, Human
ccaaagacaggaggucagg

SEQ ID NO: 1090828 - RNA, 19 nt, Human
ccacaggggaaggagccgg

SEQ ID NO: 1090829 - RNA, 24 nt, Human
cccccaaaagugccaccaggugaa

SEQ ID NO: 1090830 - RNA, 20 nt, Human
ccccggagcuggcugagguc

SEQ ID NO: 1090831 - RNA, 23 nt, Human
ccucucaccauuuuacacccaaa

SEQ ID NO: 1090832 - RNA, 22 nt, Human
cggccucucaccauuuuacacc

SEQ ID NO: 1090833 - RNA, 19 nt, Human
gaaccaaucugagauccga

SEQ ID NO: 1090834 - RNA, 20 nt, Human
gaaggacaccaaaagcuaca

SEQ ID NO: 1090835 - RNA, 18 nt, Human
gagcauccacaacgaacc

SEQ ID NO: 1090836 - RNA, 20 nt, Human
gaugagagccccggagcugg

SEQ ID NO: 1090837 - RNA, 22 nt, Human
gcaagugguuaaaaaaugccaa

SEQ ID NO: 1090838 - RNA, 19 nt, Human
gcaguggcuccaaacugag

SEQ ID NO: 1090839 - RNA, 18 nt, Human
ggagaaaucauauuggaa

SEQ ID NO: 1090840 - RNA, 21 nt, Human
ggccugaagccuggaaaaggc

SEQ ID NO: 1090841 - RNA, 23 nt, Human
uaaaaaaugccaaaugcaauuau

SEQ ID NO: 1090842 - RNA, 23 nt, Human
uaacauugccccccaaaagugcc

SEQ ID NO: 1090843 - RNA, 22 nt, Human
uaccuucauuugcaauggcuca

SEQ ID NO: 1090844 - RNA, 21 nt, Human
uagccagagcauccacaacga

SEQ ID NO: 1090845 - RNA, 23 nt, Human
uauuucacagaaauauacucuua

SEQ ID NO: 1090846 - RNA, 19 nt, Human
ucaccauuuuacacccaaa

SEQ ID NO: 1090847 - RNA, 22 nt, Human
uccacaacgaaccaaucugaga

SEQ ID NO: 1090848 - RNA, 27 nt, Human
ucccccaggaagcuucccacucugcag

SEQ ID NO: 1090849 - RNA, 21 nt, Human
ucgccucagaaagcccacagu

SEQ ID NO: 1090850 - RNA, 23 nt, Human
ucucaccauuuuacacccaaaga

SEQ ID NO: 1090851 - RNA, 22 nt, Human
ucuguuuguaaaauauggaacc

SEQ ID NO: 1090852 - RNA, 20 nt, Human
ugaaagagacuugaugagua

SEQ ID NO: 1090853 - RNA, 19 nt, Human
ugacccuucagaaggacac

SEQ ID NO: 1090854 - RNA, 21 nt, Human
ugaggucccccaggaagcuuc

SEQ ID NO: 1090855 - RNA, 19 nt, Human
ugaugaguaaaaugugaua

SEQ ID NO: 1090856 - RNA, 24 nt, Human
ugcaggaaggagaagcaaaaggag

SEQ ID NO: 1090857 - RNA, 21 nt, Human
ugcaggagaagcagcagcaga

SEQ ID NO: 1090858 - RNA, 22 nt, Human
ugcaguggcaggaaggccaugc

SEQ ID NO: 1090859 - RNA, 18 nt, Human
ugccaccaggugaaguac

SEQ ID NO: 1090860 - RNA, 23 nt, Human
uggcugaggucccccaggaagcu

SEQ ID NO: 1090861 - RNA, 24 nt, Human
uuccuucaugacaauuuaauacaa

SEQ ID NO: 1090862 - RNA, 22 nt, Human
uuuacacccaaagacaggaggu

SEQ ID NO: 1090863 - RNA, 28 nt, Human
uuuguucaggccugaagccuggaaaagg

SEQ ID NO: 1090864 - RNA, 18 nt, Human
aagcucucucugcccacc

SEQ ID NO: 1090865 - RNA, 21 nt, Human
aaggagacugagcacccuuca

SEQ ID NO: 1090866 - RNA, 18 nt, Human
acacuccacguuaggaaa

SEQ ID NO: 1090867 - RNA, 20 nt, Human
acagagcaagaaaaaaauca

SEQ ID NO: 1090868 - RNA, 21 nt, Human
acaggugcugcuagacacagc

SEQ ID NO: 1090869 - RNA, 19 nt, Human
accagcaaugcuuccagag

SEQ ID NO: 1090870 - RNA, 27 nt, Human
acccauacacuccacguuaggaaacaa

SEQ ID NO: 1090871 - RNA, 23 nt, Human
acucacaggggccugggagcggc

SEQ ID NO: 1090872 - RNA, 18 nt, Human
agcaagaaaaaaaucaug

SEQ ID NO: 1090873 - RNA, 19 nt, Human
aggcaaaaaaaaaaaaaaa

SEQ ID NO: 1090874 - RNA, 21 nt, Human
aggggccugggagcggccuug

SEQ ID NO: 1090875 - RNA, 25 nt, Human
caaagacagaccccacaugucaaga

SEQ ID NO: 1090876 - RNA, 27 nt, Human
caaagguucugccuucgccaguuuucc

SEQ ID NO: 1090877 - RNA, 18 nt, Human
caaaucccaacuuuccag

SEQ ID NO: 1090878 - RNA, 24 nt, Human
caaaucccaacuuuccagacuauc

SEQ ID NO: 1090879 - RNA, 25 nt, Human
caaauucucaaagacagaccccaca

SEQ ID NO: 1090880 - RNA, 20 nt, Human
caagaaaaaaaucaugggua

SEQ ID NO: 1090881 - RNA, 21 nt, Human
cacaagaacugguccaaacag

SEQ ID NO: 1090882 - RNA, 24 nt, Human
caccagcucugccugccgcagagg

SEQ ID NO: 1090883 - RNA, 20 nt, Human
cagaagcuaaaaucacuggc

SEQ ID NO: 1090884 - RNA, 18 nt, Human
cagagggacagcagcccu

SEQ ID NO: 1090885 - RNA, 23 nt, Human
cagcucccgccuggcugcugccu

SEQ ID NO: 1090886 - RNA, 24 nt, Human
caggaagaaccaggaguugcaggc

SEQ ID NO: 1090887 - RNA, 24 nt, Human
caggggccugggagcggccuugcu

SEQ ID NO: 1090888 - RNA, 25 nt, Human
ccaccuccaaagcuucaggaccagc

SEQ ID NO: 1090889 - RNA, 23 nt, Human
ccagccuccucuccaagguggaa

SEQ ID NO: 1090890 - RNA, 25 nt, Human
ccauacacuccacguuaggaaacac

SEQ ID NO: 1090891 - RNA, 23 nt, Human
cccaacuuuccagacuaucccca

SEQ ID NO: 1090892 - RNA, 19 nt, Human
ccccaccagcucugccugc

SEQ ID NO: 1090893 - RNA, 21 nt, Human
ccugcccccaccagcucugcc

SEQ ID NO: 1090894 - RNA, 23 nt, Human
ccugcccccaccagcucugccug

SEQ ID NO: 1090895 - RNA, 20 nt, Human
cgagaggaaauauuggacug

SEQ ID NO: 1090896 - RNA, 22 nt, Human
cucuauuuacagccaacagcug

SEQ ID NO: 1090897 - RNA, 23 nt, Human
cucugcccaccuccaaagcuuca

SEQ ID NO: 1090898 - RNA, 20 nt, Human
cugcccccaccagcucugcc

SEQ ID NO: 1090899 - RNA, 21 nt, Human
cugcccccaccagcucugccu

SEQ ID NO: 1090900 - RNA, 21 nt, Human
cuggcccagcaggggcacuug

SEQ ID NO: 1090901 - RNA, 19 nt, Human
cugguccaaacaggaagaa

SEQ ID NO: 1090902 - RNA, 24 nt, Human
cuuaggcaaaaaaaaaaaaaaaaa

SEQ ID NO: 1090903 - RNA, 20 nt, Human
cuuucuuucucuuguuuucu

SEQ ID NO: 1090904 - RNA, 18 nt, Human
gaagaaccaggaguugca

SEQ ID NO: 1090905 - RNA, 19 nt, Human
gaagcucucucugcccacc

SEQ ID NO: 1090906 - RNA, 20 nt, Human
gaaggaguuauuggguauca

SEQ ID NO: 1090907 - RNA, 18 nt, Human
gagcacccuucaggagcc

SEQ ID NO: 1090908 - RNA, 21 nt, Human
gaguugcaggccuugacuucc

SEQ ID NO: 1090909 - RNA, 18 nt, Human
gcaagaaaaaaaucaugg

SEQ ID NO: 1090910 - RNA, 20 nt, Human
gcccugguccauggugucuc

SEQ ID NO: 1090911 - RNA, 20 nt, Human
ggacacagacaguacgggag

SEQ ID NO: 1090912 - RNA, 19 nt, Human
ggcagggaggacagcaggc

SEQ ID NO: 1090913 - RNA, 24 nt, Human
ggccacagacuuucaguaauucca

SEQ ID NO: 1090914 - RNA, 18 nt, Human
gggcacuuggcaccucug

SEQ ID NO: 1090915 - RNA, 18 nt, Human
ggucucuaggcugggaga

SEQ ID NO: 1090916 - RNA, 19 nt, Human
gugccuuaggcaaaaaaaa

SEQ ID NO: 1090917 - RNA, 18 nt, Human
guuuucugcuugauccaa

SEQ ID NO: 1090918 - RNA, 21 nt, Human
guuuucugcuugauccaaggg

SEQ ID NO: 1090919 - RNA, 21 nt, Human
uaagguauuuucugagccaaa

SEQ ID NO: 1090920 - RNA, 23 nt, Human
uacagccaacagcugcucugaga

SEQ ID NO: 1090921 - RNA, 22 nt, Human
uauacaaggacacagacaguac

SEQ ID NO: 1090922 - RNA, 19 nt, Human
ucaaaaagacuuaaggcca

SEQ ID NO: 1090923 - RNA, 27 nt, Human
ucaaagacagaccccacaugucaagau

SEQ ID NO: 1090924 - RNA, 19 nt, Human
ucaauguccacaugaagau

SEQ ID NO: 1090925 - RNA, 21 nt, Human
uccaaagcuucaggaccagca

SEQ ID NO: 1090926 - RNA, 23 nt, Human
uccaagguggaaggcagggagga

SEQ ID NO: 1090927 - RNA, 19 nt, Human
ucucuuguuuucugcuuga

SEQ ID NO: 1090928 - RNA, 27 nt, Human
ucugcccaccuccaaagcuucaggacc

SEQ ID NO: 1090929 - RNA, 21 nt, Human
ugaaauaacacuucaaaaaga

SEQ ID NO: 1090930 - RNA, 22 nt, Human
ugaccccugcccccaccagcuc

SEQ ID NO: 1090931 - RNA, 18 nt, Human
ugagauugugccuuaggc

SEQ ID NO: 1090932 - RNA, 18 nt, Human
ugcccaccuccaaagcuu

SEQ ID NO: 1090933 - RNA, 21 nt, Human
ugcccccaccagcucugccug

SEQ ID NO: 1090934 - RNA, 18 nt, Human
ugcccuggccacugcuga

SEQ ID NO: 1090935 - RNA, 19 nt, Human
ugcccugguccaugguguc

SEQ ID NO: 1090936 - RNA, 20 nt, Human
uggaagccagggcuggcugc

SEQ ID NO: 1090937 - RNA, 23 nt, Human
uggacuguucauuuacaaauucu

SEQ ID NO: 1090938 - RNA, 24 nt, Human
uggcacaagaacugguccaaacag

SEQ ID NO: 1090939 - RNA, 24 nt, Human
uggcacaagaacugguccaaacag

SEQ ID NO: 1090940 - RNA, 19 nt, Human
uggcucgaggcauuucccu

SEQ ID NO: 1090941 - RNA, 22 nt, Human
ugggacuggcccagcaggggca

SEQ ID NO: 1090942 - RNA, 18 nt, Human
ugugaccccugcccccac

SEQ ID NO: 1090943 - RNA, 24 nt, Human
ugugccuuaggcaaaaaaaaaaaa

SEQ ID NO: 1090944 - RNA, 18 nt, Human
aaaagcuauucagcucca

SEQ ID NO: 1090945 - RNA, 19 nt, Human
aaacaagucccucccccag

SEQ ID NO: 1090946 - RNA, 22 nt, Human
aacggaaccucacuggggccug

SEQ ID NO: 1090947 - RNA, 21 nt, Human
acacccacgugggcaaggcca

SEQ ID NO: 1090948 - RNA, 20 nt, Human
accagcaggacccggcuggc

SEQ ID NO: 1090949 - RNA, 23 nt, Human
accccagacccaggucccccacc

SEQ ID NO: 1090950 - RNA, 23 nt, Human
acgugugcaucucugugugugug

SEQ ID NO: 1090951 - RNA, 20 nt, Human
agaaaacaguacaccacuaa

SEQ ID NO: 1090952 - RNA, 20 nt, Human
agaaggacagcaccagcucc

SEQ ID NO: 1090953 - RNA, 23 nt, Human
agaggugggagggaggcagagug

SEQ ID NO: 1090954 - RNA, 24 nt, Human
agaugcuuggcugccacccucugu

SEQ ID NO: 1090955 - RNA, 22 nt, Human
agcagccaccuagaaggacagc

SEQ ID NO: 1090956 - RNA, 23 nt, Human
aggaacaagaaaagcuauucagc

SEQ ID NO: 1090957 - RNA, 20 nt, Human
aggcacagcgcacaacggaa

SEQ ID NO: 1090958 - RNA, 19 nt, Human
aggcagcacuguggugaag

SEQ ID NO: 1090959 - RNA, 19 nt, Human
agggacaagaggugggagg

SEQ ID NO: 1090960 - RNA, 21 nt, Human
agggacugaggguacuggggu

SEQ ID NO: 1090961 - RNA, 21 nt, Human
aguccugggcaguggcuggac

SEQ ID NO: 1090962 - RNA, 22 nt, Human
augagcagccaccuagaaggac

SEQ ID NO: 1090963 - RNA, 22 nt, Human
augauggugguggugguggcuu

SEQ ID NO: 1090964 - RNA, 25 nt, Human
auggagucuggggcuccccucucug

SEQ ID NO: 1090965 - RNA, 30 nt, Human
caaacacccacgugggcaaggccagaacag

SEQ ID NO: 1090966 - RNA, 26 nt, Human
caaauccccuucuguggcagcaaggc

SEQ ID NO: 1090967 - RNA, 21 nt, Human
caacggaaccucacuggggcc

SEQ ID NO: 1090968 - RNA, 19 nt, Human
caagaggugggagggaggc

SEQ ID NO: 1090969 - RNA, 18 nt, Human
cacagcgcacaacggaac

SEQ ID NO: 1090970 - RNA, 20 nt, Human
caccagcacgggggacacga

SEQ ID NO: 1090971 - RNA, 20 nt, Human
caccuaugacggcacucgcc

SEQ ID NO: 1090972 - RNA, 20 nt, Human
caccuuguaaguggcagggu

SEQ ID NO: 1090973 - RNA, 22 nt, Human
cagccaccuagaaggacagcac

SEQ ID NO: 1090974 - RNA, 20 nt, Human
caggagaggaugaugaccac

SEQ ID NO: 1090975 - RNA, 26 nt, Human
caguacaccacuaagguggucagaac

SEQ ID NO: 1090976 - RNA, 21 nt, Human
ccagaacacagccacucacca

SEQ ID NO: 1090977 - RNA, 22 nt, Human
ccagaacacagccacucaccau

SEQ ID NO: 1090978 - RNA, 23 nt, Human
ccagcacgggggacacgagcaga

SEQ ID NO: 1090979 - RNA, 22 nt, Human
ccaggcagcacuguggugaagc

SEQ ID NO: 1090980 - RNA, 23 nt, Human
ccaggcagcacuguggugaagcc

SEQ ID NO: 1090981 - RNA, 21 nt, Human
ccaggucccccaccuuguaag

SEQ ID NO: 1090982 - RNA, 23 nt, Human
cccccagcacucucuggaauugc

SEQ ID NO: 1090983 - RNA, 19 nt, Human
ccccuucauuuugucucug

SEQ ID NO: 1090984 - RNA, 23 nt, Human
cccuucauuggaggaacagaaau

SEQ ID NO: 1090985 - RNA, 21 nt, Human
ccgggccugccugucccugcg

SEQ ID NO: 1090986 - RNA, 18 nt, Human
ccuagaaaacaguacacc

SEQ ID NO: 1090987 - RNA, 21 nt, Human
ccuccaguuugcgccugagac

SEQ ID NO: 1090988 - RNA, 19 nt, Human
ccugagaccccagacccag

SEQ ID NO: 1090989 - RNA, 24 nt, Human
ccuugccacuccucugcuuaagaa

SEQ ID NO: 1090990 - RNA, 26 nt, Human
cgacgagggacaagaggugggaggga

SEQ ID NO: 1090991 - RNA, 25 nt, Human
cgccugagaccccagacccaggucc

SEQ ID NO: 1090992 - RNA, 20 nt, Human
cgugcaggccacaguggucg

SEQ ID NO: 1090993 - RNA, 20 nt, Human
cuacaaauccccuucugugg

SEQ ID NO: 1090994 - RNA, 22 nt, Human
cucucugagaaugugggguaga

SEQ ID NO: 1090995 - RNA, 23 nt, Human
cucugccucagagaggugcccag

SEQ ID NO: 1090996 - RNA, 24 nt, Human
cucugccucagagaggugcccagg

SEQ ID NO: 1090997 - RNA, 25 nt, Human
cugaagccgggccugccugucccug

SEQ ID NO: 1090998 - RNA, 18 nt, Human
cugagaaugugggguaga

SEQ ID NO: 1090999 - RNA, 23 nt, Human
cugcagcgucagagauagcucua

SEQ ID NO: 1091000 - RNA, 21 nt, Human
cuguaugugugcucguccgac

SEQ ID NO: 1091001 - RNA, 18 nt, Human
cuuucagcuccgcaccag

SEQ ID NO: 1091002 - RNA, 20 nt, Human
gaacuucuggguggauuccu

SEQ ID NO: 1091003 - RNA, 19 nt, Human
gacacgagcagauggcugu

SEQ ID NO: 1091004 - RNA, 20 nt, Human
gacccuacaaauccccuucu

SEQ ID NO: 1091005 - RNA, 21 nt, Human
gacgagggacaagagguggga

SEQ ID NO: 1091006 - RNA, 24 nt, Human
gacugaggguacugggguugggag

SEQ ID NO: 1091007 - RNA, 21 nt, Human
gagccagccuuucugcagcca

SEQ ID NO: 1091008 - RNA, 20 nt, Human
gcgguggugaugaugguggu

SEQ ID NO: 1091009 - RNA, 23 nt, Human
gcggugguggcgguggcggugcc

SEQ ID NO: 1091010 - RNA, 19 nt, Human
gcugacccuacaaaucccc

SEQ ID NO: 1091011 - RNA, 19 nt, Human
ggacaagaggugggaggga

SEQ ID NO: 1091012 - RNA, 20 nt, Human
ggacugcauuuuaaaggcua

SEQ ID NO: 1091013 - RNA, 20 nt, Human
ggcaguggcuggacugauga

SEQ ID NO: 1091014 - RNA, 21 nt, Human
gggaagcaggauagggugcug

SEQ ID NO: 1091015 - RNA, 23 nt, Human
gggccuagugggcugugagggcc

SEQ ID NO: 1091016 - RNA, 22 nt, Human
ggggaagcaggauagggugcug

SEQ ID NO: 1091017 - RNA, 23 nt, Human
ggguacugggguugggagggggc

SEQ ID NO: 1091018 - RNA, 24 nt, Human
ggguugggagggggccuagugggc

SEQ ID NO: 1091019 - RNA, 28 nt, Human
gguggugaugauggugguggugguggcg

SEQ ID NO: 1091020 - RNA, 18 nt, Human
ggugguggcggugguggc

SEQ ID NO: 1091021 - RNA, 19 nt, Human
gucaagaucugagccagcc

SEQ ID NO: 1091022 - RNA, 22 nt, Human
gugaugauggugguggugguuu

SEQ ID NO: 1091023 - RNA, 19 nt, Human
gugcacgccuuugugugcc

SEQ ID NO: 1091024 - RNA, 20 nt, Human
guggcggugguggcgguggc

SEQ ID NO: 1091025 - RNA, 23 nt, Human
guggcggugguggcgguggcggu

SEQ ID NO: 1091026 - RNA, 20 nt, Human
guggugaugauggugguggu

SEQ ID NO: 1091027 - RNA, 20 nt, Human
gugguggcggugguggcggu

SEQ ID NO: 1091028 - RNA, 20 nt, Human
guggugguggcggugguggc

SEQ ID NO: 1091029 - RNA, 20 nt, Human
gugguggugguggcgguggu

SEQ ID NO: 1091030 - RNA, 23 nt, Human
gugguggugguggcggugguggc

SEQ ID NO: 1091031 - RNA, 18 nt, Human
uacaguacaacagacaga

SEQ ID NO: 1091032 - RNA, 22 nt, Human
uagguaggaauuuuuaucccuu

SEQ ID NO: 1091033 - RNA, 18 nt, Human
uaugagcagccaccuaga

SEQ ID NO: 1091034 - RNA, 26 nt, Human
uaugugcgcauauucacacauaugug

SEQ ID NO: 1091035 - RNA, 20 nt, Human
uccccuucauuuugucucug

SEQ ID NO: 1091036 - RNA, 22 nt, Human
ucgacgccggcgguggugauuu

SEQ ID NO: 1091037 - RNA, 18 nt, Human
ugacugagggacugaggg

SEQ ID NO: 1091038 - RNA, 20 nt, Human
ugagggacugaggguacugg

SEQ ID NO: 1091039 - RNA, 18 nt, Human
ugaguagccuucuggucc

SEQ ID NO: 1091040 - RNA, 21 nt, Human
ugaguagccuucugguccucu

SEQ ID NO: 1091041 - RNA, 19 nt, Human
ugauggugguggugguggc

SEQ ID NO: 1091042 - RNA, 21 nt, Human
ugauggugguggugguggcgg

SEQ ID NO: 1091043 - RNA, 24 nt, Human
ugauguuguggcucaucugcccug

SEQ ID NO: 1091044 - RNA, 22 nt, Human
ugccauccuugccacuccucug

SEQ ID NO: 1091045 - RNA, 19 nt, Human
ugcccaggcagcacugugg

SEQ ID NO: 1091046 - RNA, 20 nt, Human
ugccucagagaggugcccag

SEQ ID NO: 1091047 - RNA, 25 nt, Human
ugccucagagaggugcccaggcagc

SEQ ID NO: 1091048 - RNA, 21 nt, Human
ugcuuguaaacaagucccucc

SEQ ID NO: 1091049 - RNA, 19 nt, Human
uggcugccacccucugugg

SEQ ID NO: 1091050 - RNA, 21 nt, Human
uggcuggacugaugagggaac

SEQ ID NO: 1091051 - RNA, 19 nt, Human
uggugguggcggugguggc

SEQ ID NO: 1091052 - RNA, 18 nt, Human
uggugguggugguggcgg

SEQ ID NO: 1091053 - RNA, 20 nt, Human
uggugguggugguggcgguc

SEQ ID NO: 1091054 - RNA, 20 nt, Human
uguaaacaagucccuccccc

SEQ ID NO: 1091055 - RNA, 23 nt, Human
uguauacaaguuuggucuaugug

SEQ ID NO: 1091056 - RNA, 19 nt, Human
ugugugcacgccuuugugu

SEQ ID NO: 1091057 - RNA, 20 nt, Human
ugugugcacgccuuugugug

SEQ ID NO: 1091058 - RNA, 20 nt, Human
uguguguauacaaguuuggu

SEQ ID NO: 1091059 - RNA, 22 nt, Human
ugugugugugugcacgccuuug

SEQ ID NO: 1091060 - RNA, 22 nt, Human
uguugcuuauucauugccuagu

SEQ ID NO: 1091061 - RNA, 22 nt, Human
uuaccugcguggucuuugaugg

SEQ ID NO: 1091062 - RNA, 24 nt, Human
uuagcccuucauuggaggaacaga

SEQ ID NO: 1091063 - RNA, 20 nt, Human
uucagccuguagggaccagc

SEQ ID NO: 1091064 - RNA, 23 nt, Human
uuccuggacugcauuuuaaaggc

SEQ ID NO: 1091065 - RNA, 20 nt, Human
uugaacacagaaaagauaca

SEQ ID NO: 1091066 - RNA, 19 nt, Human
uugaagacccuuaguccug

SEQ ID NO: 1091067 - RNA, 27 nt, Human
uugugguggcaaggugguauuuauggg

SEQ ID NO: 1091068 - RNA, 23 nt, Human
uuuuuaucccuuuuuuuccccca

SEQ ID NO: 1091069 - RNA, 21 nt, Human
aaagacaaugacuccagaaaa

SEQ ID NO: 1091070 - RNA, 26 nt, Human
aaagaugcuggguaggauuacgguga

SEQ ID NO: 1091071 - RNA, 18 nt, Human
aaaugaagucuagguacu

SEQ ID NO: 1091072 - RNA, 26 nt, Human
aaaugaagucuagguacuugugaauu

SEQ ID NO: 1091073 - RNA, 21 nt, Human
aacacagcgaagugcagccuc

SEQ ID NO: 1091074 - RNA, 19 nt, Human
aacacgguaaaaccccguc

SEQ ID NO: 1091075 - RNA, 20 nt, Human
aacacgguaaaaccccgucu

SEQ ID NO: 1091076 - RNA, 21 nt, Human
aacacgguaaaaccccgucuc

SEQ ID NO: 1091077 - RNA, 20 nt, Human
aacagagcgagacuccaucu

SEQ ID NO: 1091078 - RNA, 18 nt, Human
aacauggugaaaccccgu

SEQ ID NO: 1091079 - RNA, 19 nt, Human
aacauggugaaaccccguc

SEQ ID NO: 1091080 - RNA, 19 nt, Human
aacauggugaaaccccguc

SEQ ID NO: 1091081 - RNA, 21 nt, Human
aacauggugaaaccccgucac

SEQ ID NO: 1091082 - RNA, 20 nt, Human
aacauggugaaaccccgucu

SEQ ID NO: 1091083 - RNA, 21 nt, Human
aacauggugaaaccccgucuc

SEQ ID NO: 1091084 - RNA, 18 nt, Human
aaccugggagccggagcu

SEQ ID NO: 1091085 - RNA, 28 nt, Human
aacuacccuugaaaaauucugaaacagg

SEQ ID NO: 1091086 - RNA, 19 nt, Human
aacuguguaaccugaaguu

SEQ ID NO: 1091087 - RNA, 19 nt, Human
aacuuuaugaacggccagu

SEQ ID NO: 1091088 - RNA, 19 nt, Human
aagagauaaauuaauuuca

SEQ ID NO: 1091089 - RNA, 18 nt, Human
aagcauuagggcccggga

SEQ ID NO: 1091090 - RNA, 24 nt, Human
aaucgcuugaacccgggaggugga

SEQ ID NO: 1091091 - RNA, 20 nt, Human
aauugcuugaacccaggagg

SEQ ID NO: 1091092 - RNA, 19 nt, Human
acaagaaugaaacuccauc

SEQ ID NO: 1091093 - RNA, 20 nt, Human
acaagaaugaaacuccaucu

SEQ ID NO: 1091094 - RNA, 21 nt, Human
acaagaaugaaacuccaucuc

SEQ ID NO: 1091095 - RNA, 20 nt, Human
acaccugccaccaccaaacc

SEQ ID NO: 1091096 - RNA, 20 nt, Human
acagagcgagacuccgucuc

SEQ ID NO: 1091097 - RNA, 24 nt, Human
acagagcgagacuccgucucaaaa

SEQ ID NO: 1091098 - RNA, 24 nt, Human
acagagugagaguccaucucaaaa

SEQ ID NO: 1091099 - RNA, 23 nt, Human
accaaggaaggacuacaagacaa

SEQ ID NO: 1091100 - RNA, 22 nt, Human
accacuguacuccagccuaggc

SEQ ID NO: 1091101 - RNA, 22 nt, Human
accaucuuggcaaggcuggucu

SEQ ID NO: 1091102 - RNA, 22 nt, Human
accauuuauugagcauuuaugu

SEQ ID NO: 1091103 - RNA, 26 nt, Human
acccagcuggucacugcguuuuagag

SEQ ID NO: 1091104 - RNA, 22 nt, Human
accccgucacuacuaaaaauac

SEQ ID NO: 1091105 - RNA, 23 nt, Human
accccgucucuacuaaaaauaca

SEQ ID NO: 1091106 - RNA, 24 nt, Human
accccgucucuauuaaaaauacaa

SEQ ID NO: 1091107 - RNA, 21 nt, Human
acccugugucuacuaaaacua

SEQ ID NO: 1091108 - RNA, 24 nt, Human
acccugugucuacuaaaacuacaa

SEQ ID NO: 1091109 - RNA, 24 nt, Human
accugaggucaggaguuugagacc

SEQ ID NO: 1091110 - RNA, 18 nt, Human
accugccaccaccaaacc

SEQ ID NO: 1091111 - RNA, 21 nt, Human
acgaaaauuagcugggugugg

SEQ ID NO: 1091112 - RNA, 23 nt, Human
acuacaagccaagaagcuugaga

SEQ ID NO: 1091113 - RNA, 24 nt, Human
acucaggagguggagguugcagug

SEQ ID NO: 1091114 - RNA, 24 nt, Human
acucuagccugggcgacagaguga

SEQ ID NO: 1091115 - RNA, 24 nt, Human
acugcacuccagccugggcgacag

SEQ ID NO: 1091116 - RNA, 26 nt, Human
acugcacuccagccugggcgacagag

SEQ ID NO: 1091117 - RNA, 24 nt, Human
acugcacucuagccugggcgacag

SEQ ID NO: 1091118 - RNA, 26 nt, Human
acugcacucuagccugggcgacagag

SEQ ID NO: 1091119 - RNA, 18 nt, Human
acuggugggagggguccg

SEQ ID NO: 1091120 - RNA, 24 nt, Human
acuguacuccagccuaggcaacag

SEQ ID NO: 1091121 - RNA, 25 nt, Human
acuguacuccagccuaggcaacaga

SEQ ID NO: 1091122 - RNA, 24 nt, Human
acuugaggucaggaguuugagacc

SEQ ID NO: 1091123 - RNA, 18 nt, Human
agaaguaaaacaugacug

SEQ ID NO: 1091124 - RNA, 22 nt, Human
agaaucgcuugaacccgggagg

SEQ ID NO: 1091125 - RNA, 24 nt, Human
agacaggagaaucgcuugaacccg

SEQ ID NO: 1091126 - RNA, 24 nt, Human
agagugcugggauuacaggcguga

SEQ ID NO: 1091127 - RNA, 20 nt, Human
agauccuagaauggagaaaa

SEQ ID NO: 1091128 - RNA, 18 nt, Human
agaugaggccguggggcg

SEQ ID NO: 1091129 - RNA, 24 nt, Human
agcacuuugggaggccaagguggg

SEQ ID NO: 1091130 - RNA, 24 nt, Human
agcacuuuuggaggcugagguggg

SEQ ID NO: 1091131 - RNA, 22 nt, Human
agcagggcauggugacucacgc

SEQ ID NO: 1091132 - RNA, 22 nt, Human
agcagugagaauaauaaaugau

SEQ ID NO: 1091133 - RNA, 21 nt, Human
agccggagcuugcagugagcc

SEQ ID NO: 1091134 - RNA, 22 nt, Human
agccggagcuugcagugagccg

SEQ ID NO: 1091135 - RNA, 24 nt, Human
agccggagcuugcagugagccgag

SEQ ID NO: 1091136 - RNA, 24 nt, Human
agccuaggcaacagagcgagacuc

SEQ ID NO: 1091137 - RNA, 18 nt, Human
agccuccugaguagcuag

SEQ ID NO: 1091138 - RNA, 22 nt, Human
agccuggccaacauggugaaac

SEQ ID NO: 1091139 - RNA, 22 nt, Human
agccuggccaacauggugaaac

SEQ ID NO: 1091140 - RNA, 24 nt, Human
agccuggccaacauggugaaaccc

SEQ ID NO: 1091141 - RNA, 24 nt, Human
agccuggccaacauggugaaaccc

SEQ ID NO: 1091142 - RNA, 22 nt, Human
agccuggccaauauggugaaac

SEQ ID NO: 1091143 - RNA, 24 nt, Human
agccuggccaauauggugaaaccc

SEQ ID NO: 1091144 - RNA, 25 nt, Human
agccuggccaauauggugaaacccu

SEQ ID NO: 1091145 - RNA, 24 nt, Human
agccugggcgacagagcgagacuc

SEQ ID NO: 1091146 - RNA, 21 nt, Human
agccugggcgacagagugaga

SEQ ID NO: 1091147 - RNA, 23 nt, Human
agcgaagugcagccucaccuccc

SEQ ID NO: 1091148 - RNA, 21 nt, Human
agcgggcaccuguagucccag

SEQ ID NO: 1091149 - RNA, 23 nt, Human
agcuggguguggaggugggcgcc

SEQ ID NO: 1091150 - RNA, 20 nt, Human
aggaguuugagaccagccug

SEQ ID NO: 1091151 - RNA, 20 nt, Human
aggaguuugagaccagccug

SEQ ID NO: 1091152 - RNA, 20 nt, Human
aggaguuugagaccagccug

SEQ ID NO: 1091153 - RNA, 18 nt, Human
aggcaacaagaaugaaac

SEQ ID NO: 1091154 - RNA, 22 nt, Human
aggcaggacaauggcgugaacc

SEQ ID NO: 1091155 - RNA, 24 nt, Human
aggcaggacaauggcgugaaccug

SEQ ID NO: 1091156 - RNA, 21 nt, Human
aggcaggagaaucccuugaac

SEQ ID NO: 1091157 - RNA, 23 nt, Human
aggcaggagaaucccuugaacuc

SEQ ID NO: 1091158 - RNA, 21 nt, Human
aggccaaggcggguggaucac

SEQ ID NO: 1091159 - RNA, 20 nt, Human
aggccaagguggguggauca

SEQ ID NO: 1091160 - RNA, 21 nt, Human
aggccgaggcgggcggaucac

SEQ ID NO: 1091161 - RNA, 24 nt, Human
aggcgggcggaucacgagggcagg

SEQ ID NO: 1091162 - RNA, 22 nt, Human
aggcggguggaucacuugaggu

SEQ ID NO: 1091163 - RNA, 23 nt, Human
aggcggguggaucacuugagguc

SEQ ID NO: 1091164 - RNA, 26 nt, Human
aggcggguggaucacuugaggucagg

SEQ ID NO: 1091165 - RNA, 24 nt, Human
aggcugaccccauuugugugacac

SEQ ID NO: 1091166 - RNA, 24 nt, Human
aggcugagguggguggaucaccug

SEQ ID NO: 1091167 - RNA, 21 nt, Human
agggcaaaucaaaagccaaag

SEQ ID NO: 1091168 - RNA, 24 nt, Human
agggugaggcaggagaaucccuug

SEQ ID NO: 1091169 - RNA, 24 nt, Human
agguggagguugcagggagccgag

SEQ ID NO: 1091170 - RNA, 21 nt, Human
agguggagguugcagugagcc

SEQ ID NO: 1091171 - RNA, 22 nt, Human
agguggagguugcagugagccg

SEQ ID NO: 1091172 - RNA, 21 nt, Human
agguggccugggauuguauuc

SEQ ID NO: 1091173 - RNA, 24 nt, Human
aggugggcgccuguaaucccagug

SEQ ID NO: 1091174 - RNA, 22 nt, Human
agguggguggaucaccugaggu

SEQ ID NO: 1091175 - RNA, 24 nt, Human
agucaggguggcucacgccuguaa

SEQ ID NO: 1091176 - RNA, 22 nt, Human
agugcagccucaccucccgccu

SEQ ID NO: 1091177 - RNA, 18 nt, Human
agugcugggauuacaggc

SEQ ID NO: 1091178 - RNA, 18 nt, Human
agugcugggauuacaggc

SEQ ID NO: 1091179 - RNA, 22 nt, Human
agugcugggauuacaggcguga

SEQ ID NO: 1091180 - RNA, 23 nt, Human
aguggcgccaucuuggcucacug

SEQ ID NO: 1091181 - RNA, 24 nt, Human
aguggcucacaccuauaaucccag

SEQ ID NO: 1091182 - RNA, 20 nt, Human
aguguaguggcgccaucuug

SEQ ID NO: 1091183 - RNA, 24 nt, Human
aguguaguggcgccaucuuggcuc

SEQ ID NO: 1091184 - RNA, 22 nt, Human
aguuuuguaggaaaauggaaaa

SEQ ID NO: 1091185 - RNA, 20 nt, Human
auaauaauaaaaagaauguc

SEQ ID NO: 1091186 - RNA, 26 nt, Human
auaauaauaauaaaucauaugaacca

SEQ ID NO: 1091187 - RNA, 23 nt, Human
auaauaauggcaacaaacgugag

SEQ ID NO: 1091188 - RNA, 18 nt, Human
auagaauaugcacggacc

SEQ ID NO: 1091189 - RNA, 20 nt, Human
aucaccugaggucaggaguu

SEQ ID NO: 1091190 - RNA, 24 nt, Human
aucaccugaggucaggaguuugag

SEQ ID NO: 1091191 - RNA, 24 nt, Human
aucacuugaggucaggaguuugag

SEQ ID NO: 1091192 - RNA, 20 nt, Human
aucucgccauugcacuccag

SEQ ID NO: 1091193 - RNA, 20 nt, Human
augaaccacuuacugaucac

SEQ ID NO: 1091194 - RNA, 24 nt, Human
auggcgccacugcacuccagccug

SEQ ID NO: 1091195 - RNA, 18 nt, Human
auggucggaaaucaucgc

SEQ ID NO: 1091196 - RNA, 23 nt, Human
auggugggugccuguaaucccag

SEQ ID NO: 1091197 - RNA, 25 nt, Human
auugcacuccagccuaggcaacaag

SEQ ID NO: 1091198 - RNA, 24 nt, Human
auugugccacugcacucuagccug

SEQ ID NO: 1091199 - RNA, 24 nt, Human
auuugaagucaggaguuugagacc

SEQ ID NO: 1091200 - RNA, 22 nt, Human
caaaaaaaaaaaaaaaaaggga

SEQ ID NO: 1091201 - RNA, 24 nt, Human
caacauggugaaaccccgucacua

SEQ ID NO: 1091202 - RNA, 24 nt, Human
caacauggugaaaccccgucucua

SEQ ID NO: 1091203 - RNA, 24 nt, Human
caaggcggguggaucacuugaggu

SEQ ID NO: 1091204 - RNA, 24 nt, Human
caagguggguggaucauuugaagu

SEQ ID NO: 1091205 - RNA, 24 nt, Human
caauauggugaaacccugugucua

SEQ ID NO: 1091206 - RNA, 25 nt, Human
cacaccuauaaucccagcacuuuug

SEQ ID NO: 1091207 - RNA, 20 nt, Human
cacauuugaaccugaacuac

SEQ ID NO: 1091208 - RNA, 23 nt, Human
caccaaggaaggacuacaagacu

SEQ ID NO: 1091209 - RNA, 24 nt, Human
caccacuguacuccagccuaggca

SEQ ID NO: 1091210 - RNA, 24 nt, Human
caccaucuuggcaaggcuggucuu

SEQ ID NO: 1091211 - RNA, 19 nt, Human
cacccccucgcuucucuac

SEQ ID NO: 1091212 - RNA, 20 nt, Human
cacccgccucagccucccag

SEQ ID NO: 1091213 - RNA, 19 nt, Human
caccuauaaucccagcacu

SEQ ID NO: 1091214 - RNA, 23 nt, Human
caccugaggucaggaguuugaga

SEQ ID NO: 1091215 - RNA, 19 nt, Human
caccugccaccaccaaacc

SEQ ID NO: 1091216 - RNA, 24 nt, Human
caccuguagucccagcuacucugg

SEQ ID NO: 1091217 - RNA, 23 nt, Human
caccuguagucccagcuacuugg

SEQ ID NO: 1091218 - RNA, 24 nt, Human
caccuguagucccagcuacuuggg

SEQ ID NO: 1091219 - RNA, 24 nt, Human
cacgccuauaaucccagcacuuug

SEQ ID NO: 1091220 - RNA, 24 nt, Human
cacgccuguaaucccagcacuuug

SEQ ID NO: 1091221 - RNA, 24 nt, Human
cacgccuguaaucccagcauucug

SEQ ID NO: 1091222 - RNA, 24 nt, Human
cacuccagccugggcgacagagcg

SEQ ID NO: 1091223 - RNA, 22 nt, Human
cacucuagccugggcgacagag

SEQ ID NO: 1091224 - RNA, 22 nt, Human
cacucuagccugggcgacagag

SEQ ID NO: 1091225 - RNA, 24 nt, Human
cacucuagccugggcgacagagug

SEQ ID NO: 1091226 - RNA, 23 nt, Human
cacugcaaccuccgccuuccggg

SEQ ID NO: 1091227 - RNA, 19 nt, Human
cacugcacuccagccuggg

SEQ ID NO: 1091228 - RNA, 21 nt, Human
cacugcacuccagccugggcg

SEQ ID NO: 1091229 - RNA, 22 nt, Human
cacugcacuccagccugggcga

SEQ ID NO: 1091230 - RNA, 23 nt, Human
cacugcacuccagccugggcgac

SEQ ID NO: 1091231 - RNA, 24 nt, Human
cacugcacuccagccugggcgaca

SEQ ID NO: 1091232 - RNA, 19 nt, Human
cacugcacucuagccuggg

SEQ ID NO: 1091233 - RNA, 20 nt, Human
cacugcacucuagccugggc

SEQ ID NO: 1091234 - RNA, 21 nt, Human
cacugcacucuagccugggcg

SEQ ID NO: 1091235 - RNA, 22 nt, Human
cacugcacucuagccugggcga

SEQ ID NO: 1091236 - RNA, 24 nt, Human
cacugcacucuagccugggcgaca

SEQ ID NO: 1091237 - RNA, 19 nt, Human
cacuguacuccagccuagg

SEQ ID NO: 1091238 - RNA, 21 nt, Human
cacuguacuccagccuaggca

SEQ ID NO: 1091239 - RNA, 22 nt, Human
cacuguacuccagccuaggcaa

SEQ ID NO: 1091240 - RNA, 23 nt, Human
cacuguacuccagccuaggcaac

SEQ ID NO: 1091241 - RNA, 24 nt, Human
cacuguacuccagccuaggcaaca

SEQ ID NO: 1091242 - RNA, 23 nt, Human
cacuugaggucaggaguuugaga

SEQ ID NO: 1091243 - RNA, 21 nt, Human
cacuuuggccacucucucuuc

SEQ ID NO: 1091244 - RNA, 22 nt, Human
cagacacccacagggcucaccc

SEQ ID NO: 1091245 - RNA, 24 nt, Human
cagcaaauagaauaugcacggacc

SEQ ID NO: 1091246 - RNA, 19 nt, Human
cagcaagaauagcagugag

SEQ ID NO: 1091247 - RNA, 22 nt, Human
cagcacuuugggaggccaaggc

SEQ ID NO: 1091248 - RNA, 24 nt, Human
cagcacuuugggaggccaaggcgg

SEQ ID NO: 1091249 - RNA, 24 nt, Human
cagcacuuugggaggccaaggugg

SEQ ID NO: 1091250 - RNA, 21 nt, Human
cagcacuuuuggaggcugagg

SEQ ID NO: 1091251 - RNA, 24 nt, Human
cagcacuuuuggaggcugaggugg

SEQ ID NO: 1091252 - RNA, 24 nt, Human
cagcauucugggaggccgaggcgg

SEQ ID NO: 1091253 - RNA, 20 nt, Human
cagccucaccucccgccuug

SEQ ID NO: 1091254 - RNA, 18 nt, Human
cagccuccugaguagcua

SEQ ID NO: 1091255 - RNA, 22 nt, Human
cagcgaagugcagccucaccuc

SEQ ID NO: 1091256 - RNA, 29 nt, Human
caggagguggagguugcagugacaacggu

SEQ ID NO: 1091257 - RNA, 24 nt, Human
caggagguggagguugcagugagc

SEQ ID NO: 1091258 - RNA, 26 nt, Human
cagggcaaaucaaaagccaaagucuc

SEQ ID NO: 1091259 - RNA, 20 nt, Human
caucucaaaaaauaaauaaa

SEQ ID NO: 1091260 - RNA, 19 nt, Human
cauggucggaaaucaucgc

SEQ ID NO: 1091261 - RNA, 19 nt, Human
cauuccacucuaccacgcc

SEQ ID NO: 1091262 - RNA, 19 nt, Human
cauugcacuccagccuagg

SEQ ID NO: 1091263 - RNA, 21 nt, Human
cauugcacuccagccuaggca

SEQ ID NO: 1091264 - RNA, 22 nt, Human
cauugcacuccagccuaggcaa

SEQ ID NO: 1091265 - RNA, 24 nt, Human
cauugcacuccagccuaggcaaca

SEQ ID NO: 1091266 - RNA, 23 nt, Human
cauuugaagucaggaguuugaga

SEQ ID NO: 1091267 - RNA, 21 nt, Human
ccacgccggccuucuccagag

SEQ ID NO: 1091268 - RNA, 20 nt, Human
ccacugcacuccagccuggg

SEQ ID NO: 1091269 - RNA, 20 nt, Human
ccacugcacuccagccuggg

SEQ ID NO: 1091270 - RNA, 21 nt, Human
ccacugcacuccagccugggc

SEQ ID NO: 1091271 - RNA, 21 nt, Human
ccacugcacuccagccugggc

SEQ ID NO: 1091272 - RNA, 23 nt, Human
ccacugcacuccagccugggcga

SEQ ID NO: 1091273 - RNA, 24 nt, Human
ccacugcacuccagccugggcgac

SEQ ID NO: 1091274 - RNA, 20 nt, Human
ccacugcacucuagccuggg

SEQ ID NO: 1091275 - RNA, 21 nt, Human
ccacugcacucuagccugggc

SEQ ID NO: 1091276 - RNA, 21 nt, Human
ccacugcacucuagccugggc

SEQ ID NO: 1091277 - RNA, 23 nt, Human
ccacugcacucuagccugggcga

SEQ ID NO: 1091278 - RNA, 24 nt, Human
ccacugcacucuagccugggcgac

SEQ ID NO: 1091279 - RNA, 19 nt, Human
ccacuguacuccagccuag

SEQ ID NO: 1091280 - RNA, 20 nt, Human
ccacuguacuccagccuagg

SEQ ID NO: 1091281 - RNA, 20 nt, Human
ccacuguacuccagccuagg

SEQ ID NO: 1091282 - RNA, 21 nt, Human
ccacuguacuccagccuaggc

SEQ ID NO: 1091283 - RNA, 24 nt, Human
ccacuguacuccagccuaggcaac

SEQ ID NO: 1091284 - RNA, 21 nt, Human
ccagacaccugccaccaccaa

SEQ ID NO: 1091285 - RNA, 22 nt, Human
ccagagugcugggauuacaggc

SEQ ID NO: 1091286 - RNA, 22 nt, Human
ccagagugcugggauuacaggc

SEQ ID NO: 1091287 - RNA, 24 nt, Human
ccagagugcugggauuacaggcgu

SEQ ID NO: 1091288 - RNA, 23 nt, Human
ccaggcccaccuuuccccagaca

SEQ ID NO: 1091289 - RNA, 20 nt, Human
ccagguccucuucuacacac

SEQ ID NO: 1091290 - RNA, 19 nt, Human
ccauugcacuccagccuag

SEQ ID NO: 1091291 - RNA, 20 nt, Human
ccauugcacuccagccuagg

SEQ ID NO: 1091292 - RNA, 21 nt, Human
ccauugcacuccagccuaggc

SEQ ID NO: 1091293 - RNA, 22 nt, Human
ccauugcacuccagccuaggca

SEQ ID NO: 1091294 - RNA, 24 nt, Human
ccauugcacuccagccuaggcaac

SEQ ID NO: 1091295 - RNA, 18 nt, Human
cccaccuuuccccagaca

SEQ ID NO: 1091296 - RNA, 20 nt, Human
cccaucccacucuaccucau

SEQ ID NO: 1091297 - RNA, 21 nt, Human
ccccagacacccacagggcuc

SEQ ID NO: 1091298 - RNA, 18 nt, Human
ccccucgcuucucuaccu

SEQ ID NO: 1091299 - RNA, 23 nt, Human
cccgcuccacgguguagcacaga

SEQ ID NO: 1091300 - RNA, 21 nt, Human
cccgggagguggagguugcag

SEQ ID NO: 1091301 - RNA, 21 nt, Human
ccgcagccugcugcugggugc

SEQ ID NO: 1091302 - RNA, 24 nt, Human
ccgccucagccucccagagugcug

SEQ ID NO: 1091303 - RNA, 24 nt, Human
ccgcucagauaccacuuccuaggu

SEQ ID NO: 1091304 - RNA, 19 nt, Human
ccggguucaagcaauucuc

SEQ ID NO: 1091305 - RNA, 19 nt, Human
ccggguucaagcaauucuc

SEQ ID NO: 1091306 - RNA, 22 nt, Human
ccuauaaucccagcacuuuggg

SEQ ID NO: 1091307 - RNA, 20 nt, Human
ccugaccucgugauccaccc

SEQ ID NO: 1091308 - RNA, 23 nt, Human
ccugaggucauccagcuggugaa

SEQ ID NO: 1091309 - RNA, 18 nt, Human
ccugccaccaccaaacca

SEQ ID NO: 1091310 - RNA, 24 nt, Human
ccuggauaacacgguaaaaccccg

SEQ ID NO: 1091311 - RNA, 23 nt, Human
ccuggccaacauggugaaacccc

SEQ ID NO: 1091312 - RNA, 23 nt, Human
ccuggccaacauggugaaacccc

SEQ ID NO: 1091313 - RNA, 24 nt, Human
ccuggccaacauggugaaaccccg

SEQ ID NO: 1091314 - RNA, 24 nt, Human
ccuggccaacauggugaaaccccg

SEQ ID NO: 1091315 - RNA, 22 nt, Human
ccuggccaauauggugaaaccc

SEQ ID NO: 1091316 - RNA, 24 nt, Human
ccuggccaauauggugaaacccug

SEQ ID NO: 1091317 - RNA, 24 nt, Human
ccugggccuggagucagcucugcc

SEQ ID NO: 1091318 - RNA, 22 nt, Human
ccugggcgacagagcgagacuc

SEQ ID NO: 1091319 - RNA, 22 nt, Human
ccuguaaucccagcacuuuggg

SEQ ID NO: 1091320 - RNA, 22 nt, Human
ccuguaaucccagcauucuggg

SEQ ID NO: 1091321 - RNA, 21 nt, Human
ccuguaaucccagcuccucgg

SEQ ID NO: 1091322 - RNA, 22 nt, Human
ccuguagucccagcuacucugg

SEQ ID NO: 1091323 - RNA, 23 nt, Human
ccuguagucccagcuacucugga

SEQ ID NO: 1091324 - RNA, 25 nt, Human
ccuguagucccagcuacuugggugg

SEQ ID NO: 1091325 - RNA, 24 nt, Human
ccuuccggguucaagcaauucucu

SEQ ID NO: 1091326 - RNA, 24 nt, Human
cgagaccauccuggauaacacggu

SEQ ID NO: 1091327 - RNA, 24 nt, Human
cgagacugcaccacuguacuccag

SEQ ID NO: 1091328 - RNA, 24 nt, Human
cgagauggcgccacugcacuccag

SEQ ID NO: 1091329 - RNA, 19 nt, Human
cgcagccugcugcugggug

SEQ ID NO: 1091330 - RNA, 24 nt, Human
cgcccaggcuggaguguaguggcg

SEQ ID NO: 1091331 - RNA, 23 nt, Human
cgccuauaaucccagcacuuugg

SEQ ID NO: 1091332 - RNA, 24 nt, Human
cgccucagccucccagagugcugg

SEQ ID NO: 1091333 - RNA, 23 nt, Human
cgccucgagaucccagcacgccc

SEQ ID NO: 1091334 - RNA, 23 nt, Human
cgccuguaaucccagcacuuugg

SEQ ID NO: 1091335 - RNA, 24 nt, Human
cgccuguaaucccagugacucggg

SEQ ID NO: 1091336 - RNA, 24 nt, Human
cgcucugucgcccaggcuggagug

SEQ ID NO: 1091337 - RNA, 24 nt, Human
cgggagguggagguugcagggagc

SEQ ID NO: 1091338 - RNA, 21 nt, Human
cgggcaccuguagucccagcu

SEQ ID NO: 1091339 - RNA, 24 nt, Human
cgugauccacccgccucagccucc

SEQ ID NO: 1091340 - RNA, 23 nt, Human
cuaaaacuacaaaaauuagcccu

SEQ ID NO: 1091341 - RNA, 22 nt, Human
cuacaagacaaaaaacaggcac

SEQ ID NO: 1091342 - RNA, 19 nt, Human
cuaggcuauucaaaucauc

SEQ ID NO: 1091343 - RNA, 22 nt, Human
cucacaccuauaaucccagcac

SEQ ID NO: 1091344 - RNA, 24 nt, Human
cucacaccuauaaucccagcacuu

SEQ ID NO: 1091345 - RNA, 22 nt, Human
cucacgccuauaaucccagcac

SEQ ID NO: 1091346 - RNA, 24 nt, Human
cucacgccuauaaucccagcacuu

SEQ ID NO: 1091347 - RNA, 21 nt, Human
cucacgccuguaaucccagca

SEQ ID NO: 1091348 - RNA, 22 nt, Human
cucacgccuguaaucccagcac

SEQ ID NO: 1091349 - RNA, 24 nt, Human
cucacgccuguaaucccagcacuu

SEQ ID NO: 1091350 - RNA, 24 nt, Human
cucacgccuguaaucccagcauuc

SEQ ID NO: 1091351 - RNA, 24 nt, Human
cucacugcaaccuccgccuuccgg

SEQ ID NO: 1091352 - RNA, 19 nt, Human
cucagauaccacuuccuag

SEQ ID NO: 1091353 - RNA, 20 nt, Human
cucauuccacucuaccacgc

SEQ ID NO: 1091354 - RNA, 19 nt, Human
cuccaucucaaaaaaaaaa

SEQ ID NO: 1091355 - RNA, 20 nt, Human
cucccaucccacucuaccuc

SEQ ID NO: 1091356 - RNA, 21 nt, Human
cucccugggccucaucugugg

SEQ ID NO: 1091357 - RNA, 24 nt, Human
cuccugaccucgugauccacccgc

SEQ ID NO: 1091358 - RNA, 23 nt, Human
cuccugaguagcuaggauuccag

SEQ ID NO: 1091359 - RNA, 21 nt, Human
cucgcucugucgcccaggcug

SEQ ID NO: 1091360 - RNA, 24 nt, Human
cucgcucugucgcccaggcuggag

SEQ ID NO: 1091361 - RNA, 27 nt, Human
cucgcuucucuaccucgcuucuccgcu

SEQ ID NO: 1091362 - RNA, 25 nt, Human
cugaucacuuaauggacagaagccu

SEQ ID NO: 1091363 - RNA, 24 nt, Human
cugcaaccuccgccuuccggguuc

SEQ ID NO: 1091364 - RNA, 23 nt, Human
cugccacagccuccugaguagcu

SEQ ID NO: 1091365 - RNA, 24 nt, Human
cuggccaauauggugaaacccugu

SEQ ID NO: 1091366 - RNA, 18 nt, Human
cuggugggagggguccgg

SEQ ID NO: 1091367 - RNA, 20 nt, Human
cugugugccagguccucuuc

SEQ ID NO: 1091368 - RNA, 21 nt, Human
cuugaacucaggagguggagg

SEQ ID NO: 1091369 - RNA, 24 nt, Human
cuugcagugagccgagauggcgcc

SEQ ID NO: 1091370 - RNA, 19 nt, Human
gaauauccaggcugacccc

SEQ ID NO: 1091371 - RNA, 21 nt, Human
gaauaugcacggaccucucac

SEQ ID NO: 1091372 - RNA, 24 nt, Human
gacagagcgagacuccgucucaaa

SEQ ID NO: 1091373 - RNA, 22 nt, Human
gaccucgugauccacccgccuc

SEQ ID NO: 1091374 - RNA, 24 nt, Human
gaccucgugauccacccgccucag

SEQ ID NO: 1091375 - RNA, 21 nt, Human
gacucacgccuauaaucccag

SEQ ID NO: 1091376 - RNA, 23 nt, Human
gagaccagccuggccaacauggu

SEQ ID NO: 1091377 - RNA, 22 nt, Human
gagaucccagcacgccccgccc

SEQ ID NO: 1091378 - RNA, 20 nt, Human
gagauugugccacugcacuc

SEQ ID NO: 1091379 - RNA, 21 nt, Human
gagccgagauugugccacugc

SEQ ID NO: 1091380 - RNA, 18 nt, Human
gagcuugcagugagccga

SEQ ID NO: 1091381 - RNA, 21 nt, Human
gagcuugcagugagccgagau

SEQ ID NO: 1091382 - RNA, 23 nt, Human
gagguggguggaucaccugaggu

SEQ ID NO: 1091383 - RNA, 23 nt, Human
gagguugcagggagccgagauug

SEQ ID NO: 1091384 - RNA, 21 nt, Human
gaucaccugaggucaggaguu

SEQ ID NO: 1091385 - RNA, 24 nt, Human
gaucaccugaggucaggaguuuga

SEQ ID NO: 1091386 - RNA, 24 nt, Human
gaucacuugaggucaggaguuuga

SEQ ID NO: 1091387 - RNA, 24 nt, Human
gaucauuugaagucaggaguuuga

SEQ ID NO: 1091388 - RNA, 21 nt, Human
gaucucgccauugcacuccag

SEQ ID NO: 1091389 - RNA, 24 nt, Human
gauggugggugccuguaaucccag

SEQ ID NO: 1091390 - RNA, 18 nt, Human
gauuacaggcgugagcca

SEQ ID NO: 1091391 - RNA, 23 nt, Human
gauuacaggcgugagccacagca

SEQ ID NO: 1091392 - RNA, 22 nt, Human
gauuccagacaccugccaccac

SEQ ID NO: 1091393 - RNA, 24 nt, Human
gcacuccagccugggcgacagagc

SEQ ID NO: 1091394 - RNA, 24 nt, Human
gcacucuagccugggcgacagagu

SEQ ID NO: 1091395 - RNA, 20 nt, Human
gcacuuugggaggccaaggu

SEQ ID NO: 1091396 - RNA, 22 nt, Human
gccaacauggugaaaccccguc

SEQ ID NO: 1091397 - RNA, 24 nt, Human
gccaacauggugaaaccccgucuc

SEQ ID NO: 1091398 - RNA, 24 nt, Human
gccaauauggugaaacccuguguc

SEQ ID NO: 1091399 - RNA, 22 nt, Human
gccacugcacuccagccugggc

SEQ ID NO: 1091400 - RNA, 24 nt, Human
gccacugcacuccagccugggcga

SEQ ID NO: 1091401 - RNA, 24 nt, Human
gccacugcacucuagccugggcga

SEQ ID NO: 1091402 - RNA, 20 nt, Human
gcccaggcuggaguguagug

SEQ ID NO: 1091403 - RNA, 24 nt, Human
gccccgcuccacgguguagcacag

SEQ ID NO: 1091404 - RNA, 21 nt, Human
gcccggggcucgacugguggg

SEQ ID NO: 1091405 - RNA, 18 nt, Human
gccgcagccugcugcugg

SEQ ID NO: 1091406 - RNA, 19 nt, Human
gcgguugcucacgccugua

SEQ ID NO: 1091407 - RNA, 20 nt, Human
gcucacgccuguaaucccag

SEQ ID NO: 1091408 - RNA, 22 nt, Human
gcucacgccuguaaucccagca

SEQ ID NO: 1091409 - RNA, 19 nt, Human
gcuggguguggaggugggc

SEQ ID NO: 1091410 - RNA, 18 nt, Human
ggagcuugcagugagccg

SEQ ID NO: 1091411 - RNA, 24 nt, Human
ggagcuugcagugagccgagaugg

SEQ ID NO: 1091412 - RNA, 21 nt, Human
ggaggcugagguggguggauc

SEQ ID NO: 1091413 - RNA, 22 nt, Human
ggaggcugagguggguggauca

SEQ ID NO: 1091414 - RNA, 24 nt, Human
ggaggugggcgccuguaaucccag

SEQ ID NO: 1091415 - RNA, 22 nt, Human
ggagguugcagggagccgagau

SEQ ID NO: 1091416 - RNA, 24 nt, Human
ggagguugcagggagccgagauug

SEQ ID NO: 1091417 - RNA, 18 nt, Human
ggagguugcagugagccg

SEQ ID NO: 1091418 - RNA, 22 nt, Human
ggaucacuugaggucaggaguu

SEQ ID NO: 1091419 - RNA, 25 nt, Human
ggcaccuguagucccagcuacucug

SEQ ID NO: 1091420 - RNA, 24 nt, Human
ggcaccuguagucccagcuacuug

SEQ ID NO: 1091421 - RNA, 21 nt, Human
ggcaggagggugggcaagugg

SEQ ID NO: 1091422 - RNA, 18 nt, Human
ggccccuccucugacucc

SEQ ID NO: 1091423 - RNA, 24 nt, Human
ggcuggucuugaacuccugaccuc

SEQ ID NO: 1091424 - RNA, 20 nt, Human
gggcaccuguagucccagcu

SEQ ID NO: 1091425 - RNA, 24 nt, Human
gggcauggugacucacgccuauaa

SEQ ID NO: 1091426 - RNA, 22 nt, Human
gggugccuguaaucccagcucc

SEQ ID NO: 1091427 - RNA, 24 nt, Human
gggugcgguugcucacgccuguaa

SEQ ID NO: 1091428 - RNA, 24 nt, Human
gggugugguagcgggcaccuguag

SEQ ID NO: 1091429 - RNA, 24 nt, Human
gguagcgggcaccuguagucccag

SEQ ID NO: 1091430 - RNA, 19 nt, Human
ggucaggaguuugagacca

SEQ ID NO: 1091431 - RNA, 19 nt, Human
ggucaggaguuugagacca

SEQ ID NO: 1091432 - RNA, 19 nt, Human
ggucuugaacuccugaccu

SEQ ID NO: 1091433 - RNA, 21 nt, Human
gguggaucaccugaggucagg

SEQ ID NO: 1091434 - RNA, 21 nt, Human
gguggaucacuugaggucagg

SEQ ID NO: 1091435 - RNA, 23 nt, Human
gguggcucacgccuguaauccca

SEQ ID NO: 1091436 - RNA, 24 nt, Human
gguggcucacgccuguaaucccag

SEQ ID NO: 1091437 - RNA, 20 nt, Human
ggugggcgccuguaauccca

SEQ ID NO: 1091438 - RNA, 21 nt, Human
guaauauuauuauccuccggg

SEQ ID NO: 1091439 - RNA, 21 nt, Human
guacagauucacuaucucaau

SEQ ID NO: 1091440 - RNA, 24 nt, Human
guacuccagccuaggcaacagagc

SEQ ID NO: 1091441 - RNA, 21 nt, Human
gugaaaccccgucacuacuaa

SEQ ID NO: 1091442 - RNA, 21 nt, Human
gugaaacccugugucuacuaa

SEQ ID NO: 1091443 - RNA, 24 nt, Human
gugauccacccgccucagccuccc

SEQ ID NO: 1091444 - RNA, 18 nt, Human
gugccuguaaucccagcu

SEQ ID NO: 1091445 - RNA, 21 nt, Human
gugccuuuggauuuggguccc

SEQ ID NO: 1091446 - RNA, 23 nt, Human
guugcucacgccuguaaucccag

SEQ ID NO: 1091447 - RNA, 25 nt, Human
uaaaaauacagaaaaacauuagccg

SEQ ID NO: 1091448 - RNA, 20 nt, Human
uaaaacuacaaaaauuagcc

SEQ ID NO: 1091449 - RNA, 18 nt, Human
uaaagcucccugggccuc

SEQ ID NO: 1091450 - RNA, 24 nt, Human
uaacaagauccuagaauggagaaa

SEQ ID NO: 1091451 - RNA, 24 nt, Human
uaacacgguaaaaccccgucucua

SEQ ID NO: 1091452 - RNA, 23 nt, Human
uaauaauaaaaagaauguccuuc

SEQ ID NO: 1091453 - RNA, 22 nt, Human
uaauggcaacaaacgugagacc

SEQ ID NO: 1091454 - RNA, 18 nt, Human
uacagaaaaacauuagcc

SEQ ID NO: 1091455 - RNA, 24 nt, Human
uacaggcgugagccacagcaccca

SEQ ID NO: 1091456 - RNA, 20 nt, Human
uacuaaaacuacaaaaauua

SEQ ID NO: 1091457 - RNA, 23 nt, Human
uacuccagccuaggcaacagagc

SEQ ID NO: 1091458 - RNA, 24 nt, Human
uacuccagccuaggcaacagagcg

SEQ ID NO: 1091459 - RNA, 19 nt, Human
uacucuggaggcugaggca

SEQ ID NO: 1091460 - RNA, 20 nt, Human
uacugacugugugccagguc

SEQ ID NO: 1091461 - RNA, 21 nt, Human
uacugcagucacuuuggccac

SEQ ID NO: 1091462 - RNA, 23 nt, Human
uaggucacaaaaacagaguuuga

SEQ ID NO: 1091463 - RNA, 21 nt, Human
uagugugcucuauuagguagu

SEQ ID NO: 1091464 - RNA, 18 nt, Human
uauccaggcugaccccau

SEQ ID NO: 1091465 - RNA, 19 nt, Human
uauucaaaucaucuccauc

SEQ ID NO: 1091466 - RNA, 25 nt, Human
ucaaaaaaaaaaaaaaaaagggaau

SEQ ID NO: 1091467 - RNA, 21 nt, Human
ucaaacacagcgaagugcagc

SEQ ID NO: 1091468 - RNA, 24 nt, Human
ucacgagggcaggagaucgagacc

SEQ ID NO: 1091469 - RNA, 21 nt, Human
ucacgccuguaaucccagcau

SEQ ID NO: 1091470 - RNA, 23 nt, Human
ucacugcaaccuccgccuuccgg

SEQ ID NO: 1091471 - RNA, 24 nt, Human
ucacugcaaccuccgccuuccggg

SEQ ID NO: 1091472 - RNA, 25 nt, Human
ucacugcaaccuccgccuuccgggu

SEQ ID NO: 1091473 - RNA, 26 nt, Human
ucacugcaaccuccgccuuccggguu

SEQ ID NO: 1091474 - RNA, 25 nt, Human
ucacugcguuuuagagacauuaagc

SEQ ID NO: 1091475 - RNA, 23 nt, Human
ucacugcuuaacaagauccuaga

SEQ ID NO: 1091476 - RNA, 22 nt, Human
ucagaguggaagagaaauuuau

SEQ ID NO: 1091477 - RNA, 20 nt, Human
ucaggagguggagguugcag

SEQ ID NO: 1091478 - RNA, 19 nt, Human
ucauuugaagucaggaguu

SEQ ID NO: 1091479 - RNA, 21 nt, Human
uccacccgccucagccuccca

SEQ ID NO: 1091480 - RNA, 22 nt, Human
uccacccgccucagccucccag

SEQ ID NO: 1091481 - RNA, 23 nt, Human
uccagccuaggcaacagagcgag

SEQ ID NO: 1091482 - RNA, 23 nt, Human
uccagccugggcgacagagcgag

SEQ ID NO: 1091483 - RNA, 24 nt, Human
uccagccugggcgacagagcgaga

SEQ ID NO: 1091484 - RNA, 23 nt, Human
uccaucucaaaaaaaaaaaaaaa

SEQ ID NO: 1091485 - RNA, 19 nt, Human
ucccaaaugccggccucca

SEQ ID NO: 1091486 - RNA, 24 nt, Human
ucccagagugcugggauuacaggc

SEQ ID NO: 1091487 - RNA, 20 nt, Human
ucccuugaacucaggaggug

SEQ ID NO: 1091488 - RNA, 24 nt, Human
uccgccuuccggguucaagcaauu

SEQ ID NO: 1091489 - RNA, 22 nt, Human
uccgccuuccggguucaagccg

SEQ ID NO: 1091490 - RNA, 20 nt, Human
uccgccuuuuggcaacacug

SEQ ID NO: 1091491 - RNA, 22 nt, Human
ucgcccaggcuggaguguagug

SEQ ID NO: 1091492 - RNA, 24 nt, Human
ucgcucugucgcccaggcuggagu

SEQ ID NO: 1091493 - RNA, 24 nt, Human
ucgcuugaacccgggagguggagg

SEQ ID NO: 1091494 - RNA, 24 nt, Human
ucuagccugggcgacagagugaga

SEQ ID NO: 1091495 - RNA, 19 nt, Human
ucucaaaaauaaauaaaua

SEQ ID NO: 1091496 - RNA, 19 nt, Human
ucucgcucugucgcccagg

SEQ ID NO: 1091497 - RNA, 23 nt, Human
ucucgcucugucgcccaggcugg

SEQ ID NO: 1091498 - RNA, 24 nt, Human
ucucgcucugucgcccaggcugga

SEQ ID NO: 1091499 - RNA, 26 nt, Human
ucucgcucugucgcccaggcuggagu

SEQ ID NO: 1091500 - RNA, 22 nt, Human
ucucuacuaaaaauacagaaaa

SEQ ID NO: 1091501 - RNA, 23 nt, Human
ucucuauuaaaaauacaaaaauu

SEQ ID NO: 1091502 - RNA, 24 nt, Human
ucucucugaguucaggagcauuua

SEQ ID NO: 1091503 - RNA, 23 nt, Human
ucugccaggcccaccuuucccca

SEQ ID NO: 1091504 - RNA, 24 nt, Human
ucugucgcccaggcuggaguguag

SEQ ID NO: 1091505 - RNA, 19 nt, Human
ucuugaacuccugaccucg

SEQ ID NO: 1091506 - RNA, 18 nt, Human
ugaaaggagaaguagccc

SEQ ID NO: 1091507 - RNA, 22 nt, Human
ugacucacgccuauaaucccag

SEQ ID NO: 1091508 - RNA, 24 nt, Human
ugacucacgccuauaaucccagca

SEQ ID NO: 1091509 - RNA, 19 nt, Human
ugacugugauuuuuaaaca

SEQ ID NO: 1091510 - RNA, 26 nt, Human
ugagaauaauaaaugauagauaccau

SEQ ID NO: 1091511 - RNA, 20 nt, Human
ugagacaggagaaucgcuug

SEQ ID NO: 1091512 - RNA, 24 nt, Human
ugagacaggagaaucgcuugaacc

SEQ ID NO: 1091513 - RNA, 23 nt, Human
ugagaccagccuggccaacaugg

SEQ ID NO: 1091514 - RNA, 23 nt, Human
ugagaccagccuggccaacaugg

SEQ ID NO: 1091515 - RNA, 24 nt, Human
ugagaccagccuggccaacauggu

SEQ ID NO: 1091516 - RNA, 23 nt, Human
ugagaccagccuggccaauaugg

SEQ ID NO: 1091517 - RNA, 24 nt, Human
ugagaccagccuggccaauauggu

SEQ ID NO: 1091518 - RNA, 21 nt, Human
ugagagcuggcauucacugaa

SEQ ID NO: 1091519 - RNA, 22 nt, Human
ugagccgagauggcgccacugc

SEQ ID NO: 1091520 - RNA, 18 nt, Human
ugagccgugaucucgcca

SEQ ID NO: 1091521 - RNA, 23 nt, Human
ugaggcaggacaauggcgugaac

SEQ ID NO: 1091522 - RNA, 24 nt, Human
ugaggcaggacaauggcgugaacc

SEQ ID NO: 1091523 - RNA, 19 nt, Human
ugaggcaggagaaucccuu

SEQ ID NO: 1091524 - RNA, 23 nt, Human
ugaggcaggagaaucccuugaac

SEQ ID NO: 1091525 - RNA, 24 nt, Human
ugaggcaggagaaucccuugaacu

SEQ ID NO: 1091526 - RNA, 25 nt, Human
ugaggcaggagaaucccuugaacuc

SEQ ID NO: 1091527 - RNA, 24 nt, Human
ugaggcaugucuucugccaggccc

SEQ ID NO: 1091528 - RNA, 18 nt, Human
ugaggucaggaguuugag

SEQ ID NO: 1091529 - RNA, 18 nt, Human
ugaggucaggaguuugag

SEQ ID NO: 1091530 - RNA, 20 nt, Human
ugagguggguggaucaccug

SEQ ID NO: 1091531 - RNA, 24 nt, Human
ugagguggguggaucaccugaggu

SEQ ID NO: 1091532 - RNA, 18 nt, Human
ugagucaggagaacacag

SEQ ID NO: 1091533 - RNA, 18 nt, Human
ugagugaagacuucccag

SEQ ID NO: 1091534 - RNA, 18 nt, Human
ugaguucaggagcauuua

SEQ ID NO: 1091535 - RNA, 21 nt, Human
ugauaaugaaaggaagaagaa

SEQ ID NO: 1091536 - RNA, 26 nt, Human
ugaucacagaaguaaaacaugacugg

SEQ ID NO: 1091537 - RNA, 21 nt, Human
ugcaccacuguacuccagccu

SEQ ID NO: 1091538 - RNA, 19 nt, Human
ugcacuccagccuaggcaa

SEQ ID NO: 1091539 - RNA, 22 nt, Human
ugcacuccagccuaggcaacaa

SEQ ID NO: 1091540 - RNA, 22 nt, Human
ugcagugagccgugaucucgcc

SEQ ID NO: 1091541 - RNA, 24 nt, Human
ugccacagccuccugaguagcuag

SEQ ID NO: 1091542 - RNA, 21 nt, Human
ugccuguaaucccagcuccuc

SEQ ID NO: 1091543 - RNA, 23 nt, Human
ugccuguaaucccagcuccucgg

SEQ ID NO: 1091544 - RNA, 24 nt, Human
ugccuguaaucccagcuccucggg

SEQ ID NO: 1091545 - RNA, 22 nt, Human
ugcuacagaauugcuugaaccc

SEQ ID NO: 1091546 - RNA, 23 nt, Human
ugcugcugggugccuuuggauuu

SEQ ID NO: 1091547 - RNA, 25 nt, Human
ugcugggauuacaggcgugagccac

SEQ ID NO: 1091548 - RNA, 19 nt, Human
ugcuuagaacagugccugg

SEQ ID NO: 1091549 - RNA, 19 nt, Human
uggaggcugaggugggugg

SEQ ID NO: 1091550 - RNA, 19 nt, Human
uggagucagcucugcccgg

SEQ ID NO: 1091551 - RNA, 23 nt, Human
uggaucaccugaggucaggaguu

SEQ ID NO: 1091552 - RNA, 24 nt, Human
uggaucaccugaggucaggaguuu

SEQ ID NO: 1091553 - RNA, 27 nt, Human
uggaucaccugaggucaggaguuugag

SEQ ID NO: 1091554 - RNA, 23 nt, Human
uggaucacuugaggucaggaguu

SEQ ID NO: 1091555 - RNA, 24 nt, Human
uggaucacuugaggucaggaguuu

SEQ ID NO: 1091556 - RNA, 27 nt, Human
uggaucacuugaggucaggaguuugag

SEQ ID NO: 1091557 - RNA, 23 nt, Human
uggaucauuugaagucaggaguu

SEQ ID NO: 1091558 - RNA, 24 nt, Human
uggaucauuugaagucaggaguuu

SEQ ID NO: 1091559 - RNA, 24 nt, Human
uggcaaggcuggucuugaacuccu

SEQ ID NO: 1091560 - RNA, 24 nt, Human
uggccaacauggugaaaccccguc

SEQ ID NO: 1091561 - RNA, 24 nt, Human
uggccaacauggugaaaccccguc

SEQ ID NO: 1091562 - RNA, 25 nt, Human
uggccaauauggugaaacccugugu

SEQ ID NO: 1091563 - RNA, 22 nt, Human
uggcucacaccuauaaucccag

SEQ ID NO: 1091564 - RNA, 24 nt, Human
uggcucacaccuauaaucccagca

SEQ ID NO: 1091565 - RNA, 22 nt, Human
uggcucacgccuguaaucccag

SEQ ID NO: 1091566 - RNA, 24 nt, Human
uggcucacgccuguaaucccagca

SEQ ID NO: 1091567 - RNA, 24 nt, Human
ugggaggccaaggcggguggauca

SEQ ID NO: 1091568 - RNA, 23 nt, Human
ugggaggccaagguggguggauc

SEQ ID NO: 1091569 - RNA, 24 nt, Human
ugggaggccaagguggguggauca

SEQ ID NO: 1091570 - RNA, 19 nt, Human
ugggaggccgaggcgggcg

SEQ ID NO: 1091571 - RNA, 24 nt, Human
ugggaggccgaggcgggcggauca

SEQ ID NO: 1091572 - RNA, 23 nt, Human
ugggauauuuugggguguauguu

SEQ ID NO: 1091573 - RNA, 19 nt, Human
ugggauggugggugccugu

SEQ ID NO: 1091574 - RNA, 18 nt, Human
ugggauuacaggcgugag

SEQ ID NO: 1091575 - RNA, 19 nt, Human
ugggauuacaggcgugagc

SEQ ID NO: 1091576 - RNA, 21 nt, Human
ugggauuacaggcgugagcca

SEQ ID NO: 1091577 - RNA, 22 nt, Human
ugggauuacaggcgugagccac

SEQ ID NO: 1091578 - RNA, 22 nt, Human
ugggauuacaggcgugagccac

SEQ ID NO: 1091579 - RNA, 23 nt, Human
ugggauuacaggcgugagccaca

SEQ ID NO: 1091580 - RNA, 24 nt, Human
ugggauuacaggcgugagccacag

SEQ ID NO: 1091581 - RNA, 26 nt, Human
ugggauuacaggcgugagccacagca

SEQ ID NO: 1091582 - RNA, 27 nt, Human
ugggauuacaggcgugagccacagcac

SEQ ID NO: 1091583 - RNA, 24 nt, Human
ugggauucuaacaaacacagucug

SEQ ID NO: 1091584 - RNA, 24 nt, Human
ugguagcgggcaccuguaguccca

SEQ ID NO: 1091585 - RNA, 21 nt, Human
uggugggcaccuguaguccca

SEQ ID NO: 1091586 - RNA, 22 nt, Human
uggugggcaccuguagucccag

SEQ ID NO: 1091587 - RNA, 21 nt, Human
uggugggugccuguaauccca

SEQ ID NO: 1091588 - RNA, 22 nt, Human
uguaguggcgccaucuuggcuc

SEQ ID NO: 1091589 - RNA, 23 nt, Human
ugucuacuaaaacuacaaaaauu

SEQ ID NO: 1091590 - RNA, 19 nt, Human
uuaacauauggugggcagg

SEQ ID NO: 1091591 - RNA, 24 nt, Human
uuagcagggcauggugacucacgc

SEQ ID NO: 1091592 - RNA, 18 nt, Human
uuagcuggguguggaggu

SEQ ID NO: 1091593 - RNA, 24 nt, Human
uuagcuggguguggaggugggcgc

SEQ ID NO: 1091594 - RNA, 19 nt, Human
uuccagacaccugccacca

SEQ ID NO: 1091595 - RNA, 23 nt, Human
uuccggguucaagcaauucucug

SEQ ID NO: 1091596 - RNA, 18 nt, Human
uuccucaucuguagccug

SEQ ID NO: 1091597 - RNA, 24 nt, Human
uugaacccgggagguggagguugc

SEQ ID NO: 1091598 - RNA, 24 nt, Human
uugaacucaggagguggagguugc

SEQ ID NO: 1091599 - RNA, 22 nt, Human
uugcagggagccgagauugugc

SEQ ID NO: 1091600 - RNA, 18 nt, Human
uugcagugagccgagaug

SEQ ID NO: 1091601 - RNA, 22 nt, Human
uugcagugagccgagauggcgc

SEQ ID NO: 1091602 - RNA, 22 nt, Human
uugcagugagccgugaucucgc

SEQ ID NO: 1091603 - RNA, 22 nt, Human
uugcggugcgccgagacugcac

SEQ ID NO: 1091604 - RNA, 24 nt, Human
uugcucacgccuguaaucccagca

SEQ ID NO: 1091605 - RNA, 18 nt, Human
uugcuugaacccaggagg

SEQ ID NO: 1091606 - RNA, 22 nt, Human
uugcuugaacccaggaggcagg

SEQ ID NO: 1091607 - RNA, 24 nt, Human
uuggaggcugagguggguggauca

SEQ ID NO: 1091608 - RNA, 19 nt, Human
uuggcaaggcuggucuuga

SEQ ID NO: 1091609 - RNA, 21 nt, Human
uuggccacucucucuuccaug

SEQ ID NO: 1091610 - RNA, 25 nt, Human
uuggguggcugagacaggagaaucg

SEQ ID NO: 1091611 - RNA, 20 nt, Human
aaacagagaacggagaccca

SEQ ID NO: 1091612 - RNA, 20 nt, Human
acagccgucccccauccccu

SEQ ID NO: 1091613 - RNA, 18 nt, Human
accugcugcagccacagg

SEQ ID NO: 1091614 - RNA, 18 nt, Human
agagaaagagggcagaga

SEQ ID NO: 1091615 - RNA, 20 nt, Human
agagggcagagagcacggga

SEQ ID NO: 1091616 - RNA, 20 nt, Human
agagguuucuagagaaagag

SEQ ID NO: 1091617 - RNA, 23 nt, Human
agagguuucuagagaaagagggc

SEQ ID NO: 1091618 - RNA, 21 nt, Human
aggaaguggggaugagaccua

SEQ ID NO: 1091619 - RNA, 20 nt, Human
aggaaugugagagcugugcu

SEQ ID NO: 1091620 - RNA, 19 nt, Human
aggacagagaaccaaacag

SEQ ID NO: 1091621 - RNA, 23 nt, Human
aggacagagaaccaaacagagaa

SEQ ID NO: 1091622 - RNA, 21 nt, Human
aggagaaagggggcaggagaa

SEQ ID NO: 1091623 - RNA, 19 nt, Human
aggaggagguggggaaaag

SEQ ID NO: 1091624 - RNA, 21 nt, Human
aggcacugcagguccaccagc

SEQ ID NO: 1091625 - RNA, 19 nt, Human
aggcagcagggagagguuu

SEQ ID NO: 1091626 - RNA, 25 nt, Human
auacacacacacacgugugcucaca

SEQ ID NO: 1091627 - RNA, 20 nt, Human
augccagagcuguucaugau

SEQ ID NO: 1091628 - RNA, 24 nt, Human
auggcauuugguggaaggcugggg

SEQ ID NO: 1091629 - RNA, 25 nt, Human
auucggugcaagaaagcgcagggag

SEQ ID NO: 1091630 - RNA, 18 nt, Human
caaacagagaacggagac

SEQ ID NO: 1091631 - RNA, 20 nt, Human
cacagcuucaccauagcaac

SEQ ID NO: 1091632 - RNA, 21 nt, Human
caccaccucucucgcgcucuc

SEQ ID NO: 1091633 - RNA, 18 nt, Human
caccggggcugcaugcag

SEQ ID NO: 1091634 - RNA, 22 nt, Human
caccucucucgcgcucucgguc

SEQ ID NO: 1091635 - RNA, 23 nt, Human
cacuaucaugaggggucugaggu

SEQ ID NO: 1091636 - RNA, 22 nt, Human
cacuuggcuuucccaguugcac

SEQ ID NO: 1091637 - RNA, 27 nt, Human
cagaaccccagagaggcagcagggaga

SEQ ID NO: 1091638 - RNA, 19 nt, Human
cagaaggcacacacccaag

SEQ ID NO: 1091639 - RNA, 19 nt, Human
cagcagggagagguuucua

SEQ ID NO: 1091640 - RNA, 23 nt, Human
cagcucuacagccccggaggggu

SEQ ID NO: 1091641 - RNA, 19 nt, Human
cagcugcgcccccccgccc

SEQ ID NO: 1091642 - RNA, 22 nt, Human
cagcugcgcccccccgcccccg

SEQ ID NO: 1091643 - RNA, 18 nt, Human
caguugcacucagcucuc

SEQ ID NO: 1091644 - RNA, 27 nt, Human
cauacacacacacacgugugcucacau

SEQ ID NO: 1091645 - RNA, 28 nt, Human
cauccucucccuccuucccucucucucu

SEQ ID NO: 1091646 - RNA, 23 nt, Human
caugcacaaacaggcccauccac

SEQ ID NO: 1091647 - RNA, 23 nt, Human
ccacacucaaacugggcuuccag

SEQ ID NO: 1091648 - RNA, 22 nt, Human
ccagccccggaguuucccggcu

SEQ ID NO: 1091649 - RNA, 18 nt, Human
ccaggagauggccccacc

SEQ ID NO: 1091650 - RNA, 28 nt, Human
ccauacacacacacacgugugcucacau

SEQ ID NO: 1091651 - RNA, 22 nt, Human
ccaugccugacuaguaaaacag

SEQ ID NO: 1091652 - RNA, 23 nt, Human
cccacacucaaacugggcuucca

SEQ ID NO: 1091653 - RNA, 19 nt, Human
cccacagagguucgguggc

SEQ ID NO: 1091654 - RNA, 19 nt, Human
cccaggagauggccccacc

SEQ ID NO: 1091655 - RNA, 18 nt, Human
cccauacacacacacacg

SEQ ID NO: 1091656 - RNA, 19 nt, Human
cccauacacacacacacgu

SEQ ID NO: 1091657 - RNA, 28 nt, Human
cccauacacacacacacgugugcucaca

SEQ ID NO: 1091658 - RNA, 22 nt, Human
cccccccgcccccgcccccacc

SEQ ID NO: 1091659 - RNA, 20 nt, Human
ccccccgcccccgcccccac

SEQ ID NO: 1091660 - RNA, 21 nt, Human
cccccgcccccgcccccaccc

SEQ ID NO: 1091661 - RNA, 22 nt, Human
ccccugccagccugcaccaccu

SEQ ID NO: 1091662 - RNA, 23 nt, Human
ccccuggggugugggggccacgg

SEQ ID NO: 1091663 - RNA, 22 nt, Human
cccgcccccgcccccacccuac

SEQ ID NO: 1091664 - RNA, 23 nt, Human
cccgcucuccauccucucccucc

SEQ ID NO: 1091665 - RNA, 19 nt, Human
cccuccuucccucucucuc

SEQ ID NO: 1091666 - RNA, 27 nt, Human
cccugccagccugcaccaccucucucg

SEQ ID NO: 1091667 - RNA, 18 nt, Human
cccuggggccagccccgg

SEQ ID NO: 1091668 - RNA, 20 nt, Human
ccucacucuccccgcucucc

SEQ ID NO: 1091669 - RNA, 20 nt, Human
ccugcugcagccacaggccc

SEQ ID NO: 1091670 - RNA, 22 nt, Human
ccuugggcugguaacuugccuc

SEQ ID NO: 1091671 - RNA, 22 nt, Human
ccuuguugcugaauuacaccuc

SEQ ID NO: 1091672 - RNA, 19 nt, Human
cggaggacaggaggaggug

SEQ ID NO: 1091673 - RNA, 20 nt, Human
cucacucuccccgcucucca

SEQ ID NO: 1091674 - RNA, 22 nt, Human
cuccaagccaagcacuuggcuu

SEQ ID NO: 1091675 - RNA, 22 nt, Human
cucggguucuccucuccuaagg

SEQ ID NO: 1091676 - RNA, 25 nt, Human
cucucccuccuucccucucucucug

SEQ ID NO: 1091677 - RNA, 22 nt, Human
cugacuaguaaaacagccgucc

SEQ ID NO: 1091678 - RNA, 21 nt, Human
cugcacccuaguggccagcag

SEQ ID NO: 1091679 - RNA, 18 nt, Human
cuggcggcuucccagccc

SEQ ID NO: 1091680 - RNA, 20 nt, Human
cuuccaggaguaaagggcca

SEQ ID NO: 1091681 - RNA, 18 nt, Human
cuugcucucaugcucugu

SEQ ID NO: 1091682 - RNA, 23 nt, Human
cuugggcugguaacuugccucug

SEQ ID NO: 1091683 - RNA, 20 nt, Human
gaaagaccuuucauggcauu

SEQ ID NO: 1091684 - RNA, 25 nt, Human
gaaccaaacagagaacggagaccca

SEQ ID NO: 1091685 - RNA, 19 nt, Human
gaaggcuggggguugcugg

SEQ ID NO: 1091686 - RNA, 21 nt, Human
gagagguuucuagagaaagag

SEQ ID NO: 1091687 - RNA, 22 nt, Human
gagagucagugcugggggcagc

SEQ ID NO: 1091688 - RNA, 19 nt, Human
gagcuagcuuguugaccuu

SEQ ID NO: 1091689 - RNA, 18 nt, Human
gagcuggcggcuucccag

SEQ ID NO: 1091690 - RNA, 19 nt, Human
gagggggacaaagacucag

SEQ ID NO: 1091691 - RNA, 20 nt, Human
gagggggacaaagacucagg

SEQ ID NO: 1091692 - RNA, 18 nt, Human
gauugugggcgguugcuc

SEQ ID NO: 1091693 - RNA, 20 nt, Human
gcacccuaguggccagcagc

SEQ ID NO: 1091694 - RNA, 24 nt, Human
gcacgggagaggaguuagaaacac

SEQ ID NO: 1091695 - RNA, 25 nt, Human
gcagaaccccagagaggcagcaggg

SEQ ID NO: 1091696 - RNA, 20 nt, Human
gcagcagggagagguuucua

SEQ ID NO: 1091697 - RNA, 21 nt, Human
gcaggagaaagggaaaagggg

SEQ ID NO: 1091698 - RNA, 19 nt, Human
gcagggagagguuucuaga

SEQ ID NO: 1091699 - RNA, 21 nt, Human
gccacaggcccgcuucauuca

SEQ ID NO: 1091700 - RNA, 21 nt, Human
gcccauccacacagacacaca

SEQ ID NO: 1091701 - RNA, 24 nt, Human
gccccggaguuucccggcuaacac

SEQ ID NO: 1091702 - RNA, 26 nt, Human
gccugccccugccagccugcaccacc

SEQ ID NO: 1091703 - RNA, 18 nt, Human
gccuggggucccacaggc

SEQ ID NO: 1091704 - RNA, 18 nt, Human
gcgggccggcaaagaugg

SEQ ID NO: 1091705 - RNA, 23 nt, Human
gcuaaagccugggccguuacugc

SEQ ID NO: 1091706 - RNA, 20 nt, Human
ggaauuccucccauacacac

SEQ ID NO: 1091707 - RNA, 18 nt, Human
ggagacccaggagauggc

SEQ ID NO: 1091708 - RNA, 18 nt, Human
ggaggacagagaaccaaa

SEQ ID NO: 1091709 - RNA, 18 nt, Human
ggcagagucccaaagagg

SEQ ID NO: 1091710 - RNA, 22 nt, Human
ggccaggcacacauggcuucuu

SEQ ID NO: 1091711 - RNA, 21 nt, Human
gggaaggaaugugagagcugu

SEQ ID NO: 1091712 - RNA, 20 nt, Human
gggacaaagacucagggaag

SEQ ID NO: 1091713 - RNA, 22 nt, Human
gggacaaagacucagggaagga

SEQ ID NO: 1091714 - RNA, 23 nt, Human
gggcagaaggcacacacccaaga

SEQ ID NO: 1091715 - RNA, 22 nt, Human
gggcagcagaaccccagagagg

SEQ ID NO: 1091716 - RNA, 21 nt, Human
gggggcagcagaaccccagag

SEQ ID NO: 1091717 - RNA, 21 nt, Human
gggguggccugcgacgaugac

SEQ ID NO: 1091718 - RNA, 18 nt, Human
ggugcaagaaagcgcagg

SEQ ID NO: 1091719 - RNA, 21 nt, Human
ggugguggugauggugaccgu

SEQ ID NO: 1091720 - RNA, 22 nt, Human
gucaccaaaccaauagcugcau

SEQ ID NO: 1091721 - RNA, 18 nt, Human
gucuggcagguccacuca

SEQ ID NO: 1091722 - RNA, 21 nt, Human
gugacugucacuuacucauuu

SEQ ID NO: 1091723 - RNA, 22 nt, Human
uaaaacagccgucccccauccc

SEQ ID NO: 1091724 - RNA, 18 nt, Human
uaacaagagaggguggca

SEQ ID NO: 1091725 - RNA, 24 nt, Human
uaacacagugcugaucaugaaggu

SEQ ID NO: 1091726 - RNA, 20 nt, Human
uaccuggaggggaggauggu

SEQ ID NO: 1091727 - RNA, 26 nt, Human
uaccuggaggggaggauggugccugc

SEQ ID NO: 1091728 - RNA, 24 nt, Human
uagaaacacagagagaggaggaca

SEQ ID NO: 1091729 - RNA, 23 nt, Human
uagcaacgcucagcugcgccccc

SEQ ID NO: 1091730 - RNA, 23 nt, Human
uaggaacaugccugcccccugaa

SEQ ID NO: 1091731 - RNA, 18 nt, Human
uaucugaggcuccaagcc

SEQ ID NO: 1091732 - RNA, 22 nt, Human
ucacaugcacaaacaggcccau

SEQ ID NO: 1091733 - RNA, 27 nt, Human
ucaccauagcaacgcucagcugcgccc

SEQ ID NO: 1091734 - RNA, 19 nt, Human
ucagggaaggaagugggga

SEQ ID NO: 1091735 - RNA, 21 nt, Human
ucagggaaggaaguggggaug

SEQ ID NO: 1091736 - RNA, 21 nt, Human
ucaugaagguggugguggugg

SEQ ID NO: 1091737 - RNA, 20 nt, Human
uccauccucucccuccuucc

SEQ ID NO: 1091738 - RNA, 26 nt, Human
ucccacacucaaacugggcuuccagu

SEQ ID NO: 1091739 - RNA, 19 nt, Human
ucccauacacacacacacg

SEQ ID NO: 1091740 - RNA, 18 nt, Human
uccccuggggccagcccc

SEQ ID NO: 1091741 - RNA, 20 nt, Human
uccccuggggugugggggcc

SEQ ID NO: 1091742 - RNA, 24 nt, Human
ucccugggcuugccaugccugacu

SEQ ID NO: 1091743 - RNA, 20 nt, Human
ucucccuccuucccucucuc

SEQ ID NO: 1091744 - RNA, 22 nt, Human
ucucuaccugcugcagccacag

SEQ ID NO: 1091745 - RNA, 24 nt, Human
ucugucucucucccucacucuccc

SEQ ID NO: 1091746 - RNA, 18 nt, Human
ugacuuccaggggucccu

SEQ ID NO: 1091747 - RNA, 20 nt, Human
ugaggaacuucucucagcuu

SEQ ID NO: 1091748 - RNA, 21 nt, Human
ugagugcccaacgggaccagg

SEQ ID NO: 1091749 - RNA, 27 nt, Human
ugccagccugcaccaccucucucgcgc

SEQ ID NO: 1091750 - RNA, 21 nt, Human
ugccccugccagccugcacug

SEQ ID NO: 1091751 - RNA, 22 nt, Human
ugccugagccuuucccauucau

SEQ ID NO: 1091752 - RNA, 24 nt, Human
ugcucguguguggguugugaucag

SEQ ID NO: 1091753 - RNA, 18 nt, Human
ugcugcagccacaggccc

SEQ ID NO: 1091754 - RNA, 20 nt, Human
ugcuuuuggcacugaaauug

SEQ ID NO: 1091755 - RNA, 18 nt, Human
uggaaggcuggggguugc

SEQ ID NO: 1091756 - RNA, 24 nt, Human
uggaaggcuggggguugcuggagg

SEQ ID NO: 1091757 - RNA, 23 nt, Human
uggagggggacaaagacucaggg

SEQ ID NO: 1091758 - RNA, 24 nt, Human
uggcacugaaauugcccccagcca

SEQ ID NO: 1091759 - RNA, 18 nt, Human
ugggcaucucuaccugcu

SEQ ID NO: 1091760 - RNA, 20 nt, Human
uggggguugcuggaggaaac

SEQ ID NO: 1091761 - RNA, 18 nt, Human
ugguaacuugccucugcc

SEQ ID NO: 1091762 - RNA, 25 nt, Human
ugguggaaggcuggggguugcugga

SEQ ID NO: 1091763 - RNA, 27 nt, Human
uggugguggugauggugaccgugacug

SEQ ID NO: 1091764 - RNA, 20 nt, Human
uggugguggugguggugaug

SEQ ID NO: 1091765 - RNA, 20 nt, Human
uggugguggugguggugguc

SEQ ID NO: 1091766 - RNA, 20 nt, Human
ugguggugguggugguggug

SEQ ID NO: 1091767 - RNA, 20 nt, Human
ugugcucguguguggguugu

SEQ ID NO: 1091768 - RNA, 18 nt, Human
uguugaccuugggcuggu

SEQ ID NO: 1091769 - RNA, 29 nt, Human
uuccucccauacacacacacacguggugu

SEQ ID NO: 1091770 - RNA, 23 nt, Human
uuggcacugaaauugcccccagc

SEQ ID NO: 1091771 - RNA, 21 nt, Human
uuuccaagcccuuccuuggcc

SEQ ID NO: 1091772 - RNA, 21 nt, Human
uuucuucggaggacaggagga

SEQ ID NO: 1091773 - RNA, 21 nt, Human
uuuuggcacugaaauugcccc

SEQ ID NO: 1091774 - RNA, 22 nt, Human
aacacaaauaugguaauaccau

SEQ ID NO: 1091775 - RNA, 21 nt, Human
aacagcauccauugccucagu

SEQ ID NO: 1091776 - RNA, 26 nt, Human
aagugcaagucugaagggccuagagc

SEQ ID NO: 1091777 - RNA, 21 nt, Human
acagagcagggagagaaacag

SEQ ID NO: 1091778 - RNA, 22 nt, Human
acagagcagggagagaaacagc

SEQ ID NO: 1091779 - RNA, 24 nt, Human
agaacagcccuggguuccugccaa

SEQ ID NO: 1091780 - RNA, 18 nt, Human
agacaaguacauaucucu

SEQ ID NO: 1091781 - RNA, 20 nt, Human
agaguguucauuggauaaaa

SEQ ID NO: 1091782 - RNA, 21 nt, Human
agcaaggagguuuggaagaga

SEQ ID NO: 1091783 - RNA, 26 nt, Human
agcugaaccuugacagaacagcccug

SEQ ID NO: 1091784 - RNA, 20 nt, Human
agggcgcugucagaacuucc

SEQ ID NO: 1091785 - RNA, 22 nt, Human
aucucuguggcaaaaccaggaa

SEQ ID NO: 1091786 - RNA, 22 nt, Human
auggggcuaggcagaagguggc

SEQ ID NO: 1091787 - RNA, 26 nt, Human
caaccaguccccaugccaggcggcca

SEQ ID NO: 1091788 - RNA, 18 nt, Human
cacccuuaucucagagcu

SEQ ID NO: 1091789 - RNA, 18 nt, Human
cacucugugacccaaucc

SEQ ID NO: 1091790 - RNA, 18 nt, Human
cacucugugacccaaucu

SEQ ID NO: 1091791 - RNA, 19 nt, Human
cagcauccauugccucagu

SEQ ID NO: 1091792 - RNA, 18 nt, Human
cagcccuggguuccugcc

SEQ ID NO: 1091793 - RNA, 26 nt, Human
cauagacaaguagaaaacuaaaauca

SEQ ID NO: 1091794 - RNA, 19 nt, Human
caucaggauaggagugggg

SEQ ID NO: 1091795 - RNA, 21 nt, Human
ccaggcggccaggcugggguc

SEQ ID NO: 1091796 - RNA, 21 nt, Human
cccaguggaggcugaaguaga

SEQ ID NO: 1091797 - RNA, 24 nt, Human
cccggcaggccccaugaauggacc

SEQ ID NO: 1091798 - RNA, 19 nt, Human
ccugcagcugaaccuugac

SEQ ID NO: 1091799 - RNA, 19 nt, Human
cgacaacacaaauauggua

SEQ ID NO: 1091800 - RNA, 25 nt, Human
cgacaacacaaauaugguaauacca

SEQ ID NO: 1091801 - RNA, 22 nt, Human
cggucugcccacagcuccucca

SEQ ID NO: 1091802 - RNA, 19 nt, Human
cucagagcuccgaucugac

SEQ ID NO: 1091803 - RNA, 20 nt, Human
gaaccuugacagaacagccc

SEQ ID NO: 1091804 - RNA, 19 nt, Human
gagcuccgaucugacgcaa

SEQ ID NO: 1091805 - RNA, 20 nt, Human
gagguuuggaagagaggaga

SEQ ID NO: 1091806 - RNA, 19 nt, Human
ggaagagaggagaguggag

SEQ ID NO: 1091807 - RNA, 20 nt, Human
ggccaggcuggggucggucu

SEQ ID NO: 1091808 - RNA, 22 nt, Human
ggcuuaguuuucugcccagugg

SEQ ID NO: 1091809 - RNA, 19 nt, Human
ggugaaaaugggcuuuaaa

SEQ ID NO: 1091810 - RNA, 26 nt, Human
gguuuggaagagaggagaguggaguu

SEQ ID NO: 1091811 - RNA, 19 nt, Human
uaaaggcaaacuaaaguca

SEQ ID NO: 1091812 - RNA, 21 nt, Human
uacagaguguucauuggauaa

SEQ ID NO: 1091813 - RNA, 19 nt, Human
uacagauuaaaggauaggg

SEQ ID NO: 1091814 - RNA, 21 nt, Human
uagaaaacuaaaaucaauaaa

SEQ ID NO: 1091815 - RNA, 19 nt, Human
uaggaguggggguuaggug

SEQ ID NO: 1091816 - RNA, 24 nt, Human
uagggugcaccauuuuuguaacuu

SEQ ID NO: 1091817 - RNA, 19 nt, Human
uagugaguuuucuuucucc

SEQ ID NO: 1091818 - RNA, 20 nt, Human
ucagagcuccgaucugacgc

SEQ ID NO: 1091819 - RNA, 23 nt, Human
ucaguuggaaaauggaguuggac

SEQ ID NO: 1091820 - RNA, 24 nt, Human
uccaaagcaaggagguuuggaaga

SEQ ID NO: 1091821 - RNA, 20 nt, Human
ucccaggaacacccggcagg

SEQ ID NO: 1091822 - RNA, 23 nt, Human
ucugcccacagcuccuccagaga

SEQ ID NO: 1091823 - RNA, 18 nt, Human
ucuggggaugucugucug

SEQ ID NO: 1091824 - RNA, 21 nt, Human
ucuguggcaaaaccaggaaac

SEQ ID NO: 1091825 - RNA, 18 nt, Human
ugaauggaccuugggcca

SEQ ID NO: 1091826 - RNA, 21 nt, Human
ugaauggaccuugggccaaaa

SEQ ID NO: 1091827 - RNA, 22 nt, Human
ugaugaggaugaugguauuugg

SEQ ID NO: 1091828 - RNA, 21 nt, Human
ugccaaagauuucauuugaag

SEQ ID NO: 1091829 - RNA, 19 nt, Human
ugccuagcggcuuuucagc

SEQ ID NO: 1091830 - RNA, 24 nt, Human
uggaaggggcucugguccugcagc

SEQ ID NO: 1091831 - RNA, 21 nt, Human
uggaggcugaaguagagacag

SEQ ID NO: 1091832 - RNA, 18 nt, Human
uggcaaaaccaggaaaca

SEQ ID NO: 1091833 - RNA, 18 nt, Human
uggcacggucaugagaca

SEQ ID NO: 1091834 - RNA, 21 nt, Human
uggggguuagguggaaggggc

SEQ ID NO: 1091835 - RNA, 23 nt, Human
ugguaauaccauuuagguggcac

SEQ ID NO: 1091836 - RNA, 20 nt, Human
uggugagaaaccacagcaga

SEQ ID NO: 1091837 - RNA, 22 nt, Human
uggugaugaucaugcccuggcc

SEQ ID NO: 1091838 - RNA, 18 nt, Human
ugugacccaaucucugug

SEQ ID NO: 1091839 - RNA, 20 nt, Human
uguuucuuuugaagaaacca

SEQ ID NO: 1091840 - RNA, 20 nt, Human
uguuuuuuuuuaaagaaagg

SEQ ID NO: 1091841 - RNA, 19 nt, Human
uuaaaggauagggugcacc

SEQ ID NO: 1091842 - RNA, 21 nt, Human
uucaaaccaagaggcgacaac

SEQ ID NO: 1091843 - RNA, 21 nt, Human
uucugucaaauauuuguccaa

SEQ ID NO: 1091844 - RNA, 22 nt, Human
uugggauuuucugcccaucuuc

SEQ ID NO: 1091845 - RNA, 19 nt, Human
uuuggccucuucuggaagu

SEQ ID NO: 1091846 - RNA, 25 nt, Human
uuuuaaagaaaggaaaggaggaaua

SEQ ID NO: 1091847 - RNA, 23 nt, Human
ccaucaucaugacuaaaacccaa

SEQ ID NO: 1091848 - RNA, 21 nt, Human
uagcgugccacuggcccugca

SEQ ID NO: 1091849 - RNA, 18 nt, Human
agcagggugggacugggg

SEQ ID NO: 1091850 - RNA, 18 nt, Human
cagcagcagggugggacu

SEQ ID NO: 1091851 - RNA, 23 nt, Human
cagcagcagggugggacuggggc

SEQ ID NO: 1091852 - RNA, 18 nt, Human
cagggugggacuggggca

SEQ ID NO: 1091853 - RNA, 22 nt, Human
cugcagaaccuggaucuugcgc

SEQ ID NO: 1091854 - RNA, 19 nt, Human
gagcagcagcaggguggga

SEQ ID NO: 1091855 - RNA, 21 nt, Human
gaggagcagcagcaggguggg

SEQ ID NO: 1091856 - RNA, 21 nt, Human
gcagcagcagggugggacugg

SEQ ID NO: 1091857 - RNA, 28 nt, Human
ggagcagcagcagggugggacuggggca

SEQ ID NO: 1091858 - RNA, 22 nt, Human
gggaggagcagcagcagggugg

SEQ ID NO: 1091859 - RNA, 24 nt, Human
gggaggagcagcagcaggguggga

SEQ ID NO: 1091860 - RNA, 23 nt, Human
ugcucagccucuagcccagcugg

SEQ ID NO: 1091861 - RNA, 24 nt, Human
uuaaagacauuaugcauugugcuc

SEQ ID NO: 1091862 - RNA, 22 nt, Human
agccugcugcuuccuccagccu

SEQ ID NO: 1091863 - RNA, 23 nt, Human
uagccugcugcuuccuccagccu

SEQ ID NO: 1091864 - RNA, 24 nt, Human
uccuccagccugggaucaugggug

SEQ ID NO: 1091865 - RNA, 22 nt, Human
ugguccugaauuccgcuagccu

SEQ ID NO: 1091866 - RNA, 22 nt, Human
uuuguaaaguguguuuucuuua

SEQ ID NO: 1091867 - RNA, 22 nt, Human
aaaagccacccaggcccaaguc

SEQ ID NO: 1091868 - RNA, 24 nt, Human
aaacaaaaccaagaagcaggccug

SEQ ID NO: 1091869 - RNA, 24 nt, Human
aaacauccaagauaaguggaaaca

SEQ ID NO: 1091870 - RNA, 21 nt, Human
aaaggcuguuuaggaggacac

SEQ ID NO: 1091871 - RNA, 21 nt, Human
aacagacggaggugagccaga

SEQ ID NO: 1091872 - RNA, 22 nt, Human
aacuacugggcaagcaucugcc

SEQ ID NO: 1091873 - RNA, 20 nt, Human
aagaagagacaaaaagaaug

SEQ ID NO: 1091874 - RNA, 24 nt, Human
aagaagagacaaaaagaaugaggg

SEQ ID NO: 1091875 - RNA, 23 nt, Human
aagaagcaggccuggagggagca

SEQ ID NO: 1091876 - RNA, 22 nt, Human
aagaaugagggaggucugggag

SEQ ID NO: 1091877 - RNA, 18 nt, Human
aagugcugugcggucaca

SEQ ID NO: 1091878 - RNA, 23 nt, Human
aauaucagggguuucggaaggaa

SEQ ID NO: 1091879 - RNA, 18 nt, Human
acagacauccucccuguu

SEQ ID NO: 1091880 - RNA, 18 nt, Human
acauuugcaaacugggaa

SEQ ID NO: 1091881 - RNA, 19 nt, Human
accagcugcccucuccacc

SEQ ID NO: 1091882 - RNA, 20 nt, Human
accgggccguccccaagggc

SEQ ID NO: 1091883 - RNA, 24 nt, Human
acugcaguuucucaacaugugguc

SEQ ID NO: 1091884 - RNA, 21 nt, Human
agaaugagggaggucugggag

SEQ ID NO: 1091885 - RNA, 25 nt, Human
agacaaaaagaaugagggaggucug

SEQ ID NO: 1091886 - RNA, 19 nt, Human
agacaagauccggacaggc

SEQ ID NO: 1091887 - RNA, 18 nt, Human
agacagagccccagcgcg

SEQ ID NO: 1091888 - RNA, 18 nt, Human
agacggaggugagccaga

SEQ ID NO: 1091889 - RNA, 20 nt, Human
agccacugcagaucacuucg

SEQ ID NO: 1091890 - RNA, 18 nt, Human
agccagaguggcaagugc

SEQ ID NO: 1091891 - RNA, 22 nt, Human
agccgagccugccuagcaacgc

SEQ ID NO: 1091892 - RNA, 20 nt, Human
agcggccccacugcaggagg

SEQ ID NO: 1091893 - RNA, 18 nt, Human
aggaaagggguuggggga

SEQ ID NO: 1091894 - RNA, 22 nt, Human
aggagagggacgguguggcccu

SEQ ID NO: 1091895 - RNA, 20 nt, Human
aggagaugugaacuuugugg

SEQ ID NO: 1091896 - RNA, 24 nt, Human
aggaggcgggaggcgugggucaga

SEQ ID NO: 1091897 - RNA, 25 nt, Human
aggcaaaaagaagagacaaaaagaa

SEQ ID NO: 1091898 - RNA, 25 nt, Human
aggcaaaaagaagagacaaaaagaa

SEQ ID NO: 1091899 - RNA, 29 nt, Human
aggcaaaaagaagagacaaaagggacccc

SEQ ID NO: 1091900 - RNA, 23 nt, Human
aggcaaccaaugagcaauccuuc

SEQ ID NO: 1091901 - RNA, 22 nt, Human
aggcagcaagccgacugugagc

SEQ ID NO: 1091902 - RNA, 23 nt, Human
aggcagcaagccgacugugagca

SEQ ID NO: 1091903 - RNA, 18 nt, Human
aggcagguaggagcuggg

SEQ ID NO: 1091904 - RNA, 19 nt, Human
aggcagguaggagcugggg

SEQ ID NO: 1091905 - RNA, 19 nt, Human
agggaaguggugggaagca

SEQ ID NO: 1091906 - RNA, 25 nt, Human
aggggacagcgaggagagggacggu

SEQ ID NO: 1091907 - RNA, 22 nt, Human
aguggagagugggaggugaggg

SEQ ID NO: 1091908 - RNA, 23 nt, Human
auacaaagcccuuugaaggucca

SEQ ID NO: 1091909 - RNA, 20 nt, Human
augcaagcugcaggucuggg

SEQ ID NO: 1091910 - RNA, 22 nt, Human
augcagccuacagggguucaaa

SEQ ID NO: 1091911 - RNA, 18 nt, Human
augugcaccaagacagag

SEQ ID NO: 1091912 - RNA, 19 nt, Human
augugcaccaagacagagc

SEQ ID NO: 1091913 - RNA, 24 nt, Human
auuaaauauuaaauaucagggguu

SEQ ID NO: 1091914 - RNA, 18 nt, Human
caaaaccaagaagcaggc

SEQ ID NO: 1091915 - RNA, 19 nt, Human
caagacagagccccagcgc

SEQ ID NO: 1091916 - RNA, 21 nt, Human
caagacagagccccagcgcgg

SEQ ID NO: 1091917 - RNA, 21 nt, Human
cacaucccagccgugccacaa

SEQ ID NO: 1091918 - RNA, 21 nt, Human
caccaccacgagccccaaagg

SEQ ID NO: 1091919 - RNA, 21 nt, Human
caccauuuacaaaccagcacu

SEQ ID NO: 1091920 - RNA, 26 nt, Human
cacccaggcccaagucccggccagac

SEQ ID NO: 1091921 - RNA, 23 nt, Human
cacgagggcagagcaggggaccc

SEQ ID NO: 1091922 - RNA, 18 nt, Human
cagccgagccugccuagc

SEQ ID NO: 1091923 - RNA, 18 nt, Human
caggacaggcagcaagcc

SEQ ID NO: 1091924 - RNA, 19 nt, Human
caugugcaccaagacagag

SEQ ID NO: 1091925 - RNA, 20 nt, Human
caugugguccguggaucacc

SEQ ID NO: 1091926 - RNA, 18 nt, Human
ccacgagccccaaaggug

SEQ ID NO: 1091927 - RNA, 18 nt, Human
ccagcaaagcacgagggc

SEQ ID NO: 1091928 - RNA, 19 nt, Human
ccagcaaagcacgagggca

SEQ ID NO: 1091929 - RNA, 22 nt, Human
ccaggcccaagucccggccaga

SEQ ID NO: 1091930 - RNA, 23 nt, Human
cccacaggcagccacaccugagg

SEQ ID NO: 1091931 - RNA, 24 nt, Human
cccacgaggagcucacagucuaga

SEQ ID NO: 1091932 - RNA, 21 nt, Human
cccagcgcggccuugcagcca

SEQ ID NO: 1091933 - RNA, 27 nt, Human
cccauagccgagaaagggaaaggggac

SEQ ID NO: 1091934 - RNA, 18 nt, Human
ccccaugcaagcugcagg

SEQ ID NO: 1091935 - RNA, 20 nt, Human
cccccaaguccccucaccau

SEQ ID NO: 1091936 - RNA, 21 nt, Human
cccccaaguccccucaccauu

SEQ ID NO: 1091937 - RNA, 22 nt, Human
cccccaaguccccucaccauuu

SEQ ID NO: 1091938 - RNA, 21 nt, Human
cccucuccaccaccacgagcc

SEQ ID NO: 1091939 - RNA, 22 nt, Human
cccucuccaccaccacgagccc

SEQ ID NO: 1091940 - RNA, 18 nt, Human
ccuccagaacuacugggc

SEQ ID NO: 1091941 - RNA, 24 nt, Human
ccuucuucacuggucucaaaagcc

SEQ ID NO: 1091942 - RNA, 21 nt, Human
cgagccccaaagguggggaaa

SEQ ID NO: 1091943 - RNA, 20 nt, Human
cgcaggaggaggggugacua

SEQ ID NO: 1091944 - RNA, 21 nt, Human
cgcccaggauggcccagacac

SEQ ID NO: 1091945 - RNA, 25 nt, Human
cggaggugagccagagacaccuccu

SEQ ID NO: 1091946 - RNA, 19 nt, Human
cggcaugaggccggcucuc

SEQ ID NO: 1091947 - RNA, 18 nt, Human
cucaggacuaggagacaa

SEQ ID NO: 1091948 - RNA, 26 nt, Human
cucucccuucuucacuggucucaaaa

SEQ ID NO: 1091949 - RNA, 25 nt, Human
cuuaacaccagcugcccucuccacc

SEQ ID NO: 1091950 - RNA, 20 nt, Human
gaaguggagagugggaggug

SEQ ID NO: 1091951 - RNA, 19 nt, Human
gaaugaagaggauucuucc

SEQ ID NO: 1091952 - RNA, 23 nt, Human
gacacuagagacaaacacaggga

SEQ ID NO: 1091953 - RNA, 18 nt, Human
gagaggggacagcgagga

SEQ ID NO: 1091954 - RNA, 27 nt, Human
gagcaguagacagggaagaggcgagcg

SEQ ID NO: 1091955 - RNA, 23 nt, Human
gagccugagcaguagacagggaa

SEQ ID NO: 1091956 - RNA, 18 nt, Human
gaggcagguaggagcugg

SEQ ID NO: 1091957 - RNA, 21 nt, Human
gagggaggucugggagugagg

SEQ ID NO: 1091958 - RNA, 22 nt, Human
gaguagcgggcaggggccagca

SEQ ID NO: 1091959 - RNA, 22 nt, Human
gaguucucagccuccgcuccuc

SEQ ID NO: 1091960 - RNA, 19 nt, Human
gaucaccugcaugggaacu

SEQ ID NO: 1091961 - RNA, 18 nt, Human
gauucccgggccuuccuc

SEQ ID NO: 1091962 - RNA, 20 nt, Human
gcaucugagaggaaacauga

SEQ ID NO: 1091963 - RNA, 20 nt, Human
gccacacugcagcaucugga

SEQ ID NO: 1091964 - RNA, 21 nt, Human
gccagaguggcaagugcuccu

SEQ ID NO: 1091965 - RNA, 22 nt, Human
gcccaccaccccugggugucug

SEQ ID NO: 1091966 - RNA, 23 nt, Human
gccccagcgcggccuugcagcca

SEQ ID NO: 1091967 - RNA, 21 nt, Human
gccuggagggagcacucuggg

SEQ ID NO: 1091968 - RNA, 24 nt, Human
gcgugggaggcagguaggagcugg

SEQ ID NO: 1091969 - RNA, 21 nt, Human
gcucauuugcagauucccggg

SEQ ID NO: 1091970 - RNA, 25 nt, Human
gcucauuugcagauucccgggaaac

SEQ ID NO: 1091971 - RNA, 20 nt, Human
gcugggagguggacagccac

SEQ ID NO: 1091972 - RNA, 20 nt, Human
gcugugcggucacaacauca

SEQ ID NO: 1091973 - RNA, 18 nt, Human
ggaaaagucugcaagcca

SEQ ID NO: 1091974 - RNA, 25 nt, Human
ggagggcggggagaagagggguuuc

SEQ ID NO: 1091975 - RNA, 24 nt, Human
ggcaaaaagaagagacaaaaagaa

SEQ ID NO: 1091976 - RNA, 19 nt, Human
ggcagagggcagcgcuggg

SEQ ID NO: 1091977 - RNA, 20 nt, Human
ggcaggacaggcagcaagcc

SEQ ID NO: 1091978 - RNA, 23 nt, Human
ggccaggaggcgggaggcguggg

SEQ ID NO: 1091979 - RNA, 19 nt, Human
ggcggggagaagagggguu

SEQ ID NO: 1091980 - RNA, 27 nt, Human
gggaaguggagagugggaggugagggg

SEQ ID NO: 1091981 - RNA, 23 nt, Human
gggcagcgcugggaggggccagc

SEQ ID NO: 1091982 - RNA, 22 nt, Human
ggggagggcggggagaagaggg

SEQ ID NO: 1091983 - RNA, 23 nt, Human
gggggagggcggggagaagaggg

SEQ ID NO: 1091984 - RNA, 19 nt, Human
ggguguuaaggacuggcuu

SEQ ID NO: 1091985 - RNA, 28 nt, Human
gguaaaucuggccacacugcagcaucug

SEQ ID NO: 1091986 - RNA, 18 nt, Human
gguguggaagaagggagg

SEQ ID NO: 1091987 - RNA, 20 nt, Human
gugcucaaagcgagacacaa

SEQ ID NO: 1091988 - RNA, 24 nt, Human
gugggaggcagguaggagcugggg

SEQ ID NO: 1091989 - RNA, 19 nt, Human
uaacugaugaaggcaacca

SEQ ID NO: 1091990 - RNA, 19 nt, Human
uaagucagaacacgaagac

SEQ ID NO: 1091991 - RNA, 22 nt, Human
uacagagaggggacagcgagga

SEQ ID NO: 1091992 - RNA, 20 nt, Human
uacagauacuuaugcagcag

SEQ ID NO: 1091993 - RNA, 18 nt, Human
uacauggaugccacgaag

SEQ ID NO: 1091994 - RNA, 22 nt, Human
uagaacagacaauauuaagaua

SEQ ID NO: 1091995 - RNA, 23 nt, Human
uaggagcugggggagggcgggga

SEQ ID NO: 1091996 - RNA, 20 nt, Human
uagggcccaccaccccuggg

SEQ ID NO: 1091997 - RNA, 24 nt, Human
uagggcccaccaccccuggguguc

SEQ ID NO: 1091998 - RNA, 19 nt, Human
uaucagggguuucggaagg

SEQ ID NO: 1091999 - RNA, 20 nt, Human
ucaaacaaaaccaagaagca

SEQ ID NO: 1092000 - RNA, 20 nt, Human
ucaacaugugguccguggau

SEQ ID NO: 1092001 - RNA, 24 nt, Human
ucacugacacugaauuugggcaac

SEQ ID NO: 1092002 - RNA, 26 nt, Human
ucacugacacugaauuugggcaacac

SEQ ID NO: 1092003 - RNA, 23 nt, Human
ucagagacacugcaggaacuggg

SEQ ID NO: 1092004 - RNA, 21 nt, Human
ucaugcccgguaaccuacauu

SEQ ID NO: 1092005 - RNA, 18 nt, Human
uccaccaccacgagcccc

SEQ ID NO: 1092006 - RNA, 23 nt, Human
uccaccaccacgagccccaaagg

SEQ ID NO: 1092007 - RNA, 23 nt, Human
uccaggagggaagccauuccguc

SEQ ID NO: 1092008 - RNA, 23 nt, Human
uccccaagggcugcucucagucc

SEQ ID NO: 1092009 - RNA, 22 nt, Human
uccguggaucaccugcauggga

SEQ ID NO: 1092010 - RNA, 18 nt, Human
uccugaaggucagggcca

SEQ ID NO: 1092011 - RNA, 20 nt, Human
ucgcaggaggaggggugacc

SEQ ID NO: 1092012 - RNA, 22 nt, Human
ucuccaccaccacgagccccaa

SEQ ID NO: 1092013 - RNA, 22 nt, Human
ucuuaacaccagcugcccucuc

SEQ ID NO: 1092014 - RNA, 24 nt, Human
ucuuaacaccagcugcccucucca

SEQ ID NO: 1092015 - RNA, 20 nt, Human
ugaaugagagugacaucucu

SEQ ID NO: 1092016 - RNA, 21 nt, Human
ugagcaacagacauccucccu

SEQ ID NO: 1092017 - RNA, 19 nt, Human
ugagcaauccuuccuuccc

SEQ ID NO: 1092018 - RNA, 23 nt, Human
ugaggcgugggaggcagguagga

SEQ ID NO: 1092019 - RNA, 21 nt, Human
ugagggaaguggugggaagca

SEQ ID NO: 1092020 - RNA, 19 nt, Human
ugaguucucagccuccgcu

SEQ ID NO: 1092021 - RNA, 19 nt, Human
ugaugaaggcaaccaauga

SEQ ID NO: 1092022 - RNA, 24 nt, Human
ugaugaaggcaaccaaugagcaau

SEQ ID NO: 1092023 - RNA, 19 nt, Human
ugccacaagccgcaucggc

SEQ ID NO: 1092024 - RNA, 18 nt, Human
ugcccccaaguccccuca

SEQ ID NO: 1092025 - RNA, 21 nt, Human
uggaaacacuggggaggaagg

SEQ ID NO: 1092026 - RNA, 21 nt, Human
uggaagaagggaggggcccca

SEQ ID NO: 1092027 - RNA, 18 nt, Human
uggagggagcacucuggg

SEQ ID NO: 1092028 - RNA, 21 nt, Human
uggcccagacaccuucugucu

SEQ ID NO: 1092029 - RNA, 21 nt, Human
ugggaggcagguaggagcugg

SEQ ID NO: 1092030 - RNA, 19 nt, Human
ugggaggugaggggaagca

SEQ ID NO: 1092031 - RNA, 26 nt, Human
ugggaggugaggggaagcacuagcaa

SEQ ID NO: 1092032 - RNA, 20 nt, Human
ugggaugcccccaagucccc

SEQ ID NO: 1092033 - RNA, 26 nt, Human
ugggcaacaccuagaacagacaauau

SEQ ID NO: 1092034 - RNA, 23 nt, Human
uggggacagucaaguauggcugg

SEQ ID NO: 1092035 - RNA, 20 nt, Human
uggguguggaagaagggagg

SEQ ID NO: 1092036 - RNA, 18 nt, Human
uggucaaacagccacugc

SEQ ID NO: 1092037 - RNA, 23 nt, Human
ugucauagggcuuccugguagag

SEQ ID NO: 1092038 - RNA, 19 nt, Human
uguggcccuaagggugacu

SEQ ID NO: 1092039 - RNA, 20 nt, Human
uguguguagaucugaguccu

SEQ ID NO: 1092040 - RNA, 22 nt, Human
uguuucaaucuaaaacauccaa

SEQ ID NO: 1092041 - RNA, 21 nt, Human
uuccuccagaacuacugggca

SEQ ID NO: 1092042 - RNA, 23 nt, Human
uugaagaacgcagugaucaaaca

SEQ ID NO: 1092043 - RNA, 19 nt, Human
uugcagccaggcaccgggc

SEQ ID NO: 1092044 - RNA, 20 nt, Human
aaacaggauggaaacgaggg

SEQ ID NO: 1092045 - RNA, 21 nt, Human
aaagagagagaggcacagacc

SEQ ID NO: 1092046 - RNA, 24 nt, Human
aaagugcugggauuacagguguga

SEQ ID NO: 1092047 - RNA, 23 nt, Human
aagccuccgauggcaggaacucc

SEQ ID NO: 1092048 - RNA, 25 nt, Human
aagcgauccuuccaccucagccucc

SEQ ID NO: 1092049 - RNA, 23 nt, Human
aagucacagaaacaggauggaaa

SEQ ID NO: 1092050 - RNA, 18 nt, Human
aagugcugggauuacagg

SEQ ID NO: 1092051 - RNA, 19 nt, Human
aagugcugggauuacaggu

SEQ ID NO: 1092052 - RNA, 26 nt, Human
aagugcugggauuacaggugugagcc

SEQ ID NO: 1092053 - RNA, 20 nt, Human
acagcauggaggcaggacac

SEQ ID NO: 1092054 - RNA, 22 nt, Human
accagccccagccccugcuccu

SEQ ID NO: 1092055 - RNA, 18 nt, Human
accagcccccuccaaccc

SEQ ID NO: 1092056 - RNA, 18 nt, Human
accucccugugccccucc

SEQ ID NO: 1092057 - RNA, 22 nt, Human
accucccugugccccuccccaa

SEQ ID NO: 1092058 - RNA, 26 nt, Human
accucccugugccccuccccaacccu

SEQ ID NO: 1092059 - RNA, 21 nt, Human
acuccagcacagguaaugggg

SEQ ID NO: 1092060 - RNA, 25 nt, Human
agcgauccuuccaccucagccuccc

SEQ ID NO: 1092061 - RNA, 21 nt, Human
agucacagaaacaggauggaa

SEQ ID NO: 1092062 - RNA, 19 nt, Human
agugggucuugugcugaga

SEQ ID NO: 1092063 - RNA, 22 nt, Human
aucaggacaggagccacaaagg

SEQ ID NO: 1092064 - RNA, 23 nt, Human
auccucucccuuagguuguuccc

SEQ ID NO: 1092065 - RNA, 25 nt, Human
auccuggaaccuuccccgcagcccc

SEQ ID NO: 1092066 - RNA, 21 nt, Human
aucuccaccagcccccuccaa

SEQ ID NO: 1092067 - RNA, 25 nt, Human
caaacuccugggcucaagcgauccu

SEQ ID NO: 1092068 - RNA, 24 nt, Human
caaagugcugggauuacaggugug

SEQ ID NO: 1092069 - RNA, 20 nt, Human
caccaccucccugugccccu

SEQ ID NO: 1092070 - RNA, 20 nt, Human
cacccccucuugccugcccu

SEQ ID NO: 1092071 - RNA, 20 nt, Human
caccucaaaucuccaccagc

SEQ ID NO: 1092072 - RNA, 21 nt, Human
caccucaaaucuccaccagcc

SEQ ID NO: 1092073 - RNA, 24 nt, Human
caccucagccucccaaagugcugg

SEQ ID NO: 1092074 - RNA, 20 nt, Human
caccuugugguugcaugucc

SEQ ID NO: 1092075 - RNA, 24 nt, Human
cagagucucccuguguugcccagg

SEQ ID NO: 1092076 - RNA, 21 nt, Human
cagccuggcgccuccaccccc

SEQ ID NO: 1092077 - RNA, 22 nt, Human
cagccuggcgccuccacccccu

SEQ ID NO: 1092078 - RNA, 21 nt, Human
caggacaggagccacaaaggu

SEQ ID NO: 1092079 - RNA, 19 nt, Human
caggacccagggccucaga

SEQ ID NO: 1092080 - RNA, 18 nt, Human
cagguaauguggcucgga

SEQ ID NO: 1092081 - RNA, 22 nt, Human
cauuuucugacagaguugagag

SEQ ID NO: 1092082 - RNA, 21 nt, Human
ccaaagugcugggauuacagg

SEQ ID NO: 1092083 - RNA, 21 nt, Human
ccaaagugcugggauuacagg

SEQ ID NO: 1092084 - RNA, 24 nt, Human
ccaaagugcugggauuacaggugu

SEQ ID NO: 1092085 - RNA, 22 nt, Human
ccacaaagguaugccuuucacc

SEQ ID NO: 1092086 - RNA, 23 nt, Human
ccaccuuaucaggacaggagcug

SEQ ID NO: 1092087 - RNA, 18 nt, Human
ccacugcaccuggcuggc

SEQ ID NO: 1092088 - RNA, 19 nt, Human
ccagcccccuccaaccccc

SEQ ID NO: 1092089 - RNA, 27 nt, Human
ccauugccaggccagccucccuucagu

SEQ ID NO: 1092090 - RNA, 21 nt, Human
cccaacccugacuguggcaau

SEQ ID NO: 1092091 - RNA, 24 nt, Human
cccauugugucccagcuucagaag

SEQ ID NO: 1092092 - RNA, 18 nt, Human
cccccagggacagugagc

SEQ ID NO: 1092093 - RNA, 22 nt, Human
cccccuccaacccccuaguuaa

SEQ ID NO: 1092094 - RNA, 18 nt, Human
cccuagccugucaagccc

SEQ ID NO: 1092095 - RNA, 23 nt, Human
cccugagcaguggccaagccaag

SEQ ID NO: 1092096 - RNA, 20 nt, Human
ccucccugugccccucccca

SEQ ID NO: 1092097 - RNA, 21 nt, Human
ccucugugucuucacucucag

SEQ ID NO: 1092098 - RNA, 19 nt, Human
ccugaagcuuccggagagc

SEQ ID NO: 1092099 - RNA, 20 nt, Human
ccuggcgccuccacccccuc

SEQ ID NO: 1092100 - RNA, 18 nt, Human
ccugggcucaagcgaucc

SEQ ID NO: 1092101 - RNA, 20 nt, Human
ccugugccccuccccaaccc

SEQ ID NO: 1092102 - RNA, 24 nt, Human
ccugugccccuccccaacccugac

SEQ ID NO: 1092103 - RNA, 18 nt, Human
ccuguguugcccaggcug

SEQ ID NO: 1092104 - RNA, 23 nt, Human
ccuguguugcccaggcuggucuc

SEQ ID NO: 1092105 - RNA, 26 nt, Human
ccuuccaccucagccucccaaagugc

SEQ ID NO: 1092106 - RNA, 24 nt, Human
cguccuaaggguuuggcaguccca

SEQ ID NO: 1092107 - RNA, 22 nt, Human
cuagccugucaagcccucccca

SEQ ID NO: 1092108 - RNA, 28 nt, Human
cucaaaucuccaccagcccccuccaacc

SEQ ID NO: 1092109 - RNA, 24 nt, Human
cucaagcgauccuuccaccucagc

SEQ ID NO: 1092110 - RNA, 23 nt, Human
cuccugggcucaagcgauccuuc

SEQ ID NO: 1092111 - RNA, 24 nt, Human
cuccugggcucaagcgauccuucc

SEQ ID NO: 1092112 - RNA, 21 nt, Human
cugcacacggcccacugcaca

SEQ ID NO: 1092113 - RNA, 18 nt, Human
cugggauccucugagcua

SEQ ID NO: 1092114 - RNA, 25 nt, Human
cuucagaagucaccgucugcccccu

SEQ ID NO: 1092115 - RNA, 20 nt, Human
cuuccagcaccaggaccccc

SEQ ID NO: 1092116 - RNA, 18 nt, Human
cuugccugccuccucaca

SEQ ID NO: 1092117 - RNA, 19 nt, Human
gagaggcacagacacagcc

SEQ ID NO: 1092118 - RNA, 21 nt, Human
gagcaguggccaagccaaggg

SEQ ID NO: 1092119 - RNA, 18 nt, Human
gagugcccuucaaaggcc

SEQ ID NO: 1092120 - RNA, 21 nt, Human
gagugcccuucaaaggcccau

SEQ ID NO: 1092121 - RNA, 18 nt, Human
gauuacaggugugagcca

SEQ ID NO: 1092122 - RNA, 22 nt, Human
gauuacaggugugagccacugc

SEQ ID NO: 1092123 - RNA, 23 nt, Human
gauuacaggugugagccacugca

SEQ ID NO: 1092124 - RNA, 20 nt, Human
gcucuggggguuucugaggc

SEQ ID NO: 1092125 - RNA, 19 nt, Human
ggacauucuccaccuugaa

SEQ ID NO: 1092126 - RNA, 20 nt, Human
ggacccagggccucagacaa

SEQ ID NO: 1092127 - RNA, 21 nt, Human
ggcgugcaggucagccccagg

SEQ ID NO: 1092128 - RNA, 20 nt, Human
ggcugcaggagccauggaua

SEQ ID NO: 1092129 - RNA, 24 nt, Human
gggcagacacagguccggggacuc

SEQ ID NO: 1092130 - RNA, 23 nt, Human
gggcgugcaggucagccccaggu

SEQ ID NO: 1092131 - RNA, 21 nt, Human
gguguggggagucaggaggga

SEQ ID NO: 1092132 - RNA, 22 nt, Human
gguucuaggaaagagagagagg

SEQ ID NO: 1092133 - RNA, 20 nt, Human
guccggggacucuggugcug

SEQ ID NO: 1092134 - RNA, 22 nt, Human
uaaggcagacugccagcccccu

SEQ ID NO: 1092135 - RNA, 22 nt, Human
uacaggugugagccacugcacc

SEQ ID NO: 1092136 - RNA, 22 nt, Human
uacaggugugagccacugcacc

SEQ ID NO: 1092137 - RNA, 23 nt, Human
uacaggugugagccacugcaccu

SEQ ID NO: 1092138 - RNA, 22 nt, Human
uagagacagagucucccugugu

SEQ ID NO: 1092139 - RNA, 24 nt, Human
uagggcagacacagguccggggac

SEQ ID NO: 1092140 - RNA, 18 nt, Human
ucaccgucugcccccuuc

SEQ ID NO: 1092141 - RNA, 18 nt, Human
ucagccucccaaagugcu

SEQ ID NO: 1092142 - RNA, 21 nt, Human
ucaggaagccuccgauggcag

SEQ ID NO: 1092143 - RNA, 20 nt, Human
ucauaucaggaaccugcucc

SEQ ID NO: 1092144 - RNA, 20 nt, Human
uccaccuugaaucuugcggu

SEQ ID NO: 1092145 - RNA, 20 nt, Human
uccagcacagguaauggggu

SEQ ID NO: 1092146 - RNA, 23 nt, Human
ucccaaagugcugggauuacagg

SEQ ID NO: 1092147 - RNA, 20 nt, Human
ucccagcuucagaagucacc

SEQ ID NO: 1092148 - RNA, 23 nt, Human
ucccugagcaguggccaagccaa

SEQ ID NO: 1092149 - RNA, 21 nt, Human
ucccuguguugcccaggcugg

SEQ ID NO: 1092150 - RNA, 26 nt, Human
uccucugugucuucacucucaggcag

SEQ ID NO: 1092151 - RNA, 21 nt, Human
uccugggcucaagcgauccuu

SEQ ID NO: 1092152 - RNA, 24 nt, Human
uccugggcucaagcgauccuucca

SEQ ID NO: 1092153 - RNA, 23 nt, Human
ucgagugcccuucaaaggcccau

SEQ ID NO: 1092154 - RNA, 19 nt, Human
ucgccuuaaucugggcaga

SEQ ID NO: 1092155 - RNA, 23 nt, Human
ucucaaacuccugggcucaagcg

SEQ ID NO: 1092156 - RNA, 19 nt, Human
ucucccuguguugcccagg

SEQ ID NO: 1092157 - RNA, 23 nt, Human
ucucccuguguugcccaggcugg

SEQ ID NO: 1092158 - RNA, 24 nt, Human
ucucccuguguugcccaggcuggu

SEQ ID NO: 1092159 - RNA, 24 nt, Human
ucugagcuagcccacaccugaagc

SEQ ID NO: 1092160 - RNA, 23 nt, Human
ugaaaaugccagggugcggcugc

SEQ ID NO: 1092161 - RNA, 23 nt, Human
ugaccugacuagacaagcagugg

SEQ ID NO: 1092162 - RNA, 18 nt, Human
ugacguccuaaggguuug

SEQ ID NO: 1092163 - RNA, 23 nt, Human
ugagaagggacagcauggaggca

SEQ ID NO: 1092164 - RNA, 18 nt, Human
ugcacacggcccacugca

SEQ ID NO: 1092165 - RNA, 22 nt, Human
ugccagggugcggcugccuucc

SEQ ID NO: 1092166 - RNA, 24 nt, Human
ugcccaggcuggucucaaacuccu

SEQ ID NO: 1092167 - RNA, 28 nt, Human
ugcccaggcuggucucaaacuccugggc

SEQ ID NO: 1092168 - RNA, 25 nt, Human
ugccugccuccucacagacccauug

SEQ ID NO: 1092169 - RNA, 21 nt, Human
ugccugggcagcaguguaugg

SEQ ID NO: 1092170 - RNA, 24 nt, Human
ugcgcagguaauguggcucggagg

SEQ ID NO: 1092171 - RNA, 20 nt, Human
ugcgcuguccucugugucuu

SEQ ID NO: 1092172 - RNA, 24 nt, Human
ugcugggauuacaggugugagcca

SEQ ID NO: 1092173 - RNA, 19 nt, Human
uggaaggacuucccugagc

SEQ ID NO: 1092174 - RNA, 19 nt, Human
uggcucggagggcgugcag

SEQ ID NO: 1092175 - RNA, 18 nt, Human
ugggauuacaggugugag

SEQ ID NO: 1092176 - RNA, 19 nt, Human
ugggauuacaggugugagc

SEQ ID NO: 1092177 - RNA, 21 nt, Human
ugggauuacaggugugagcca

SEQ ID NO: 1092178 - RNA, 22 nt, Human
ugggauuacaggugugagccac

SEQ ID NO: 1092179 - RNA, 22 nt, Human
ugggauuacaggugugagccac

SEQ ID NO: 1092180 - RNA, 24 nt, Human
ugggauuacaggugugagccacug

SEQ ID NO: 1092181 - RNA, 23 nt, Human
uggggggcuagacacacaguggg

SEQ ID NO: 1092182 - RNA, 19 nt, Human
uggggugaaggugcagggc

SEQ ID NO: 1092183 - RNA, 23 nt, Human
ugggucuugugcugagaagggac

SEQ ID NO: 1092184 - RNA, 22 nt, Human
ugguggagguggugguuucagc

SEQ ID NO: 1092185 - RNA, 19 nt, Human
ugugccccuccccaacccu

SEQ ID NO: 1092186 - RNA, 25 nt, Human
ugugcugagaagggacagcauggag

SEQ ID NO: 1092187 - RNA, 23 nt, Human
uguguugcccaggcuggucucaa

SEQ ID NO: 1092188 - RNA, 24 nt, Human
uguguugcccaggcuggucucaaa

SEQ ID NO: 1092189 - RNA, 22 nt, Human
uguugcccaggcuggucucaaa

SEQ ID NO: 1092190 - RNA, 21 nt, Human
uuaaacccaccucaaaucucc

SEQ ID NO: 1092191 - RNA, 19 nt, Human
uucaaaaccagccccagcc

SEQ ID NO: 1092192 - RNA, 24 nt, Human
uucaaaaccagccccagccccugc

SEQ ID NO: 1092193 - RNA, 22 nt, Human
uuguagagacagagucucccug

SEQ ID NO: 1092194 - RNA, 18 nt, Human
uuguucccuacccgaucc

SEQ ID NO: 1092195 - RNA, 23 nt, Human
aaaaacagguggaaaaagguggc

SEQ ID NO: 1092196 - RNA, 27 nt, Human
aaacagcccacaaagcucuugcugaac

SEQ ID NO: 1092197 - RNA, 21 nt, Human
auuccugccagccugcaccuc

SEQ ID NO: 1092198 - RNA, 19 nt, Human
cacucggaaaaacaggugg

SEQ ID NO: 1092199 - RNA, 23 nt, Human
cagccugcaccucugccacaguu

SEQ ID NO: 1092200 - RNA, 24 nt, Human
cagcuccgcccgucgccgcugaag

SEQ ID NO: 1092201 - RNA, 25 nt, Human
cagcuccgcccgucgccgcugaagg

SEQ ID NO: 1092202 - RNA, 23 nt, Human
caggagcccaccuggcgcccagg

SEQ ID NO: 1092203 - RNA, 21 nt, Human
cauuccugccagccugcacug

SEQ ID NO: 1092204 - RNA, 19 nt, Human
cccaggagcccaccuggcg

SEQ ID NO: 1092205 - RNA, 24 nt, Human
cccggggcuccagcuccgcccguc

SEQ ID NO: 1092206 - RNA, 21 nt, Human
ccuggcucuugggaacuucag

SEQ ID NO: 1092207 - RNA, 23 nt, Human
ccuggcucuugggaacuucaguu

SEQ ID NO: 1092208 - RNA, 24 nt, Human
cggaaaaacagguggaaaaaggug

SEQ ID NO: 1092209 - RNA, 23 nt, Human
cucccaggagcccaccuggcgcc

SEQ ID NO: 1092210 - RNA, 18 nt, Human
ggcccggggcuccagcuc

SEQ ID NO: 1092211 - RNA, 22 nt, Human
ggcccggggcuccagcuccgcc

SEQ ID NO: 1092212 - RNA, 19 nt, Human
uaccuggcucuugggaacu

SEQ ID NO: 1092213 - RNA, 22 nt, Human
ugccagccugcaccucugccac

SEQ ID NO: 1092214 - RNA, 18 nt, Human
ugcuucaucacccuccca

SEQ ID NO: 1092215 - RNA, 22 nt, Human
ugcuucaucacccucccaggag

SEQ ID NO: 1092216 - RNA, 19 nt, Human
uugcugaaccagucgcagc

SEQ ID NO: 1092217 - RNA, 20 nt, Human
aaaaauagccaugagguagc

SEQ ID NO: 1092218 - RNA, 22 nt, Human
aaacccaaaaauacagccaaga

SEQ ID NO: 1092219 - RNA, 21 nt, Human
aaagagcucgaggaggagggg

SEQ ID NO: 1092220 - RNA, 24 nt, Human
aaagcagggggacugggaccuaga

SEQ ID NO: 1092221 - RNA, 22 nt, Human
aagaaacugaagcaaaacaaac

SEQ ID NO: 1092222 - RNA, 21 nt, Human
aagaggaaaguccugagccca

SEQ ID NO: 1092223 - RNA, 23 nt, Human
aagcaaaacaaacccaaaaauac

SEQ ID NO: 1092224 - RNA, 27 nt, Human
aagcaaaacaaacccaaagccuuucgg

SEQ ID NO: 1092225 - RNA, 20 nt, Human
aagucagaggagagagacac

SEQ ID NO: 1092226 - RNA, 22 nt, Human
aagucagaggagagagacacag

SEQ ID NO: 1092227 - RNA, 24 nt, Human
aaguggggucugaauuucuguuuu

SEQ ID NO: 1092228 - RNA, 22 nt, Human
aauuucuguuuuagcucaagag

SEQ ID NO: 1092229 - RNA, 21 nt, Human
acaaacccaaaaauacagcca

SEQ ID NO: 1092230 - RNA, 19 nt, Human
acccauuuccuuacacaca

SEQ ID NO: 1092231 - RNA, 20 nt, Human
acugaagcaaaacaaaccca

SEQ ID NO: 1092232 - RNA, 25 nt, Human
agaaacagcuaaaagagcaagaaac

SEQ ID NO: 1092233 - RNA, 23 nt, Human
agaaucuggcacgacuuggauaa

SEQ ID NO: 1092234 - RNA, 22 nt, Human
agagggugggaaaggaacgcag

SEQ ID NO: 1092235 - RNA, 22 nt, Human
agcaaaacaaacccaaaaauac

SEQ ID NO: 1092236 - RNA, 19 nt, Human
agcaaggaaguagaaguca

SEQ ID NO: 1092237 - RNA, 23 nt, Human
agcacaaagagggugggaaagga

SEQ ID NO: 1092238 - RNA, 18 nt, Human
aggagagagacacagaga

SEQ ID NO: 1092239 - RNA, 24 nt, Human
aggaggagggggaauuagauggag

SEQ ID NO: 1092240 - RNA, 21 nt, Human
aggcugggaagcugaggccuc

SEQ ID NO: 1092241 - RNA, 22 nt, Human
auagacucccucaacuucaaag

SEQ ID NO: 1092242 - RNA, 24 nt, Human
caaaacaaacccaaaaauacagcc

SEQ ID NO: 1092243 - RNA, 24 nt, Human
caaacccaaaaauacagccaagaa

SEQ ID NO: 1092244 - RNA, 26 nt, Human
caagaaacugaagcaaaacaaaccca

SEQ ID NO: 1092245 - RNA, 25 nt, Human
caagcucaggacagcagaaccaccu

SEQ ID NO: 1092246 - RNA, 19 nt, Human
cagucuucccccaccccuc

SEQ ID NO: 1092247 - RNA, 24 nt, Human
cauguuugucuagguuuggcugca

SEQ ID NO: 1092248 - RNA, 20 nt, Human
ccaacaacuuccagacccaa

SEQ ID NO: 1092249 - RNA, 23 nt, Human
cccaaaaauacagccaagaaaag

SEQ ID NO: 1092250 - RNA, 21 nt, Human
ccccaccccucuuggcuccag

SEQ ID NO: 1092251 - RNA, 25 nt, Human
cccccaccccucuuggcuccagcua

SEQ ID NO: 1092252 - RNA, 20 nt, Human
cccugucucugucucucuca

SEQ ID NO: 1092253 - RNA, 22 nt, Human
ccuccaacaacuuccagaccca

SEQ ID NO: 1092254 - RNA, 23 nt, Human
ccuccaacaacuuccagacccaa

SEQ ID NO: 1092255 - RNA, 19 nt, Human
ccucuaaacugacggaaca

SEQ ID NO: 1092256 - RNA, 21 nt, Human
ccucuaaacugacggaacaag

SEQ ID NO: 1092257 - RNA, 18 nt, Human
ccugagcccagcuagagc

SEQ ID NO: 1092258 - RNA, 23 nt, Human
cgaggaggagggggaauuagaug

SEQ ID NO: 1092259 - RNA, 23 nt, Human
cuaaaagagcaagaaacugaagc

SEQ ID NO: 1092260 - RNA, 19 nt, Human
cucaggacagcagaaccac

SEQ ID NO: 1092261 - RNA, 21 nt, Human
cucagucuucccccaccccuc

SEQ ID NO: 1092262 - RNA, 22 nt, Human
cucccucaacuucaaagagcuc

SEQ ID NO: 1092263 - RNA, 22 nt, Human
cucuguggagcagggacuggcu

SEQ ID NO: 1092264 - RNA, 23 nt, Human
cugaagcaaaacaaacccaaaaa

SEQ ID NO: 1092265 - RNA, 19 nt, Human
gaaauccagaaacagcuaa

SEQ ID NO: 1092266 - RNA, 22 nt, Human
gagagcaaggaaguagaaguca

SEQ ID NO: 1092267 - RNA, 18 nt, Human
gagcccagcuagagccau

SEQ ID NO: 1092268 - RNA, 21 nt, Human
gaggaaaguccugagcccagc

SEQ ID NO: 1092269 - RNA, 21 nt, Human
gcagcugcaauggccucuggg

SEQ ID NO: 1092270 - RNA, 22 nt, Human
ggaaggugaaaugaauuaagaa

SEQ ID NO: 1092271 - RNA, 20 nt, Human
ggagggggaauuagauggag

SEQ ID NO: 1092272 - RNA, 22 nt, Human
ggcagguuuuuaacuccugcau

SEQ ID NO: 1092273 - RNA, 19 nt, Human
gggggguuguggcuuccag

SEQ ID NO: 1092274 - RNA, 21 nt, Human
guccugagcccagcuagagcc

SEQ ID NO: 1092275 - RNA, 19 nt, Human
guucugccacuuacuagcu

SEQ ID NO: 1092276 - RNA, 23 nt, Human
uaaaagagcaagaaacugaagca

SEQ ID NO: 1092277 - RNA, 20 nt, Human
uaaaaucaaagcagggggac

SEQ ID NO: 1092278 - RNA, 19 nt, Human
uaauaacaaugccugcccc

SEQ ID NO: 1092279 - RNA, 18 nt, Human
uaggaggagucugcugua

SEQ ID NO: 1092280 - RNA, 22 nt, Human
ucaagagguagcauugcauauc

SEQ ID NO: 1092281 - RNA, 20 nt, Human
uccaacaacuuccagacccu

SEQ ID NO: 1092282 - RNA, 24 nt, Human
ucgaggaggagggggaauuagaug

SEQ ID NO: 1092283 - RNA, 23 nt, Human
ucuaaacugacggaacaagaaga

SEQ ID NO: 1092284 - RNA, 22 nt, Human
ucucccugucucugucucucuc

SEQ ID NO: 1092285 - RNA, 21 nt, Human
ucuccgagaccagauggcaga

SEQ ID NO: 1092286 - RNA, 18 nt, Human
ucucuguggagcagggac

SEQ ID NO: 1092287 - RNA, 20 nt, Human
ucugucucucucagucuucc

SEQ ID NO: 1092288 - RNA, 22 nt, Human
ucugucucucucagucuucccc

SEQ ID NO: 1092289 - RNA, 24 nt, Human
ucuguggagcagggacuggcuguu

SEQ ID NO: 1092290 - RNA, 18 nt, Human
ugaagcaaaacaaaccca

SEQ ID NO: 1092291 - RNA, 23 nt, Human
ugaagcaaaacaaacccaaaaau

SEQ ID NO: 1092292 - RNA, 25 nt, Human
ugaagcaaaacaaacccaaaaauac

SEQ ID NO: 1092293 - RNA, 19 nt, Human
ugaaggagaaagcauccau

SEQ ID NO: 1092294 - RNA, 24 nt, Human
ugauggaaagcacaaagagggugg

SEQ ID NO: 1092295 - RNA, 18 nt, Human
uggcagaagaaaugauuu

SEQ ID NO: 1092296 - RNA, 22 nt, Human
uggcagaagaaaugauuuaucc

SEQ ID NO: 1092297 - RNA, 18 nt, Human
ugggaaaggaacgcagca

SEQ ID NO: 1092298 - RNA, 20 nt, Human
ugggaagcugaggccucuuu

SEQ ID NO: 1092299 - RNA, 23 nt, Human
ugggauaaauaggcaguuaggca

SEQ ID NO: 1092300 - RNA, 19 nt, Human
uguggagcagggacuggcu

SEQ ID NO: 1092301 - RNA, 19 nt, Human
ugugggcagagacggugag

SEQ ID NO: 1092302 - RNA, 22 nt, Human
uucccccaccccucuuggcucc

SEQ ID NO: 1092303 - RNA, 19 nt, Human
uuggcuccagcuaggugaa

SEQ ID NO: 1092304 - RNA, 23 nt, Human
aagaagcccuccagccacaaccc

SEQ ID NO: 1092305 - RNA, 24 nt, Human
caacccccacagcggccagcacca

SEQ ID NO: 1092306 - RNA, 23 nt, Human
cagccacaacccccacagcggcc

SEQ ID NO: 1092307 - RNA, 20 nt, Human
cccacuggauuggggacggg

SEQ ID NO: 1092308 - RNA, 18 nt, Human
cccuccagccacaacccc

SEQ ID NO: 1092309 - RNA, 24 nt, Human
cccugccagcagcuguccucccug

SEQ ID NO: 1092310 - RNA, 23 nt, Human
ccuggccagcccacuggauuggg

SEQ ID NO: 1092311 - RNA, 19 nt, Human
ccuuggcuugggagggccc

SEQ ID NO: 1092312 - RNA, 21 nt, Human
cuccagccacaacccccacag

SEQ ID NO: 1092313 - RNA, 24 nt, Human
cuccagccacaacccccacagcgg

SEQ ID NO: 1092314 - RNA, 21 nt, Human
cugccagcagcuguccucccu

SEQ ID NO: 1092315 - RNA, 22 nt, Human
gcccugagcagagccaagaagc

SEQ ID NO: 1092316 - RNA, 21 nt, Human
gggccaggcugggccaggucg

SEQ ID NO: 1092317 - RNA, 23 nt, Human
ucccugccagcagcuguccuccc

SEQ ID NO: 1092318 - RNA, 21 nt, Human
ucugcagccuuggcuugggag

SEQ ID NO: 1092319 - RNA, 24 nt, Human
uggccuggccagcccacuggauuc

SEQ ID NO: 1092320 - RNA, 20 nt, Human
ugggagggcccugagcagag

SEQ ID NO: 1092321 - RNA, 20 nt, Human
agaggcaggcaggccggggg

SEQ ID NO: 1092322 - RNA, 19 nt, Human
aggcaggcaggccgggggu

SEQ ID NO: 1092323 - RNA, 19 nt, Human
aggcaggcaggccgggggu

SEQ ID NO: 1092324 - RNA, 21 nt, Human
aggcaggcaggccgggggucu

SEQ ID NO: 1092325 - RNA, 21 nt, Human
cccaugaucugcgucuagaca

SEQ ID NO: 1092326 - RNA, 23 nt, Human
cccauggcagacggagccggggc

SEQ ID NO: 1092327 - RNA, 19 nt, Human
ccuacagcacggacagguc

SEQ ID NO: 1092328 - RNA, 22 nt, Human
ccuugcuggccucuugagaacc

SEQ ID NO: 1092329 - RNA, 25 nt, Human
cuagccaccggaggaugcacuuuuu

SEQ ID NO: 1092330 - RNA, 19 nt, Human
cugcauggcaaccuugcug

SEQ ID NO: 1092331 - RNA, 24 nt, Human
ugagaucauacccgccacccauga

SEQ ID NO: 1092332 - RNA, 26 nt, Human
ugagaucauacccgccacccaugauc

SEQ ID NO: 1092333 - RNA, 18 nt, Human
uggccucuugagaacccc

SEQ ID NO: 1092334 - RNA, 19 nt, Human
uggcgaagagguugagauc

SEQ ID NO: 1092335 - RNA, 22 nt, Human
aaaagguuucagugacagacac

SEQ ID NO: 1092336 - RNA, 21 nt, Human
aagaaggugggggaggugaca

SEQ ID NO: 1092337 - RNA, 22 nt, Human
aagagaaagaagaggucaaaga

SEQ ID NO: 1092338 - RNA, 27 nt, Human
aagcucccagcugaccuguuucucugg

SEQ ID NO: 1092339 - RNA, 19 nt, Human
aauaaaggaccucuagcug

SEQ ID NO: 1092340 - RNA, 26 nt, Human
aaugugaucucggggugguggaggcu

SEQ ID NO: 1092341 - RNA, 24 nt, Human
acagcagcaauggcagaaccaaag

SEQ ID NO: 1092342 - RNA, 18 nt, Human
acagcugccuccccaaca

SEQ ID NO: 1092343 - RNA, 20 nt, Human
acucaucuuuccuccaaucu

SEQ ID NO: 1092344 - RNA, 20 nt, Human
agaaagaagaggucaaagaa

SEQ ID NO: 1092345 - RNA, 20 nt, Human
agaagcucccagcugaccug

SEQ ID NO: 1092346 - RNA, 20 nt, Human
agacaacaggggccagaaga

SEQ ID NO: 1092347 - RNA, 22 nt, Human
agagaaagaagaggucaaagaa

SEQ ID NO: 1092348 - RNA, 24 nt, Human
agagggaggagagaagggcaguca

SEQ ID NO: 1092349 - RNA, 21 nt, Human
agccccugucuguccacccag

SEQ ID NO: 1092350 - RNA, 20 nt, Human
aggaagaggccuacuucugg

SEQ ID NO: 1092351 - RNA, 20 nt, Human
aggaggcuuuauaggccacc

SEQ ID NO: 1092352 - RNA, 24 nt, Human
agguuagggagcaaggcugcagga

SEQ ID NO: 1092353 - RNA, 22 nt, Human
aguugcuggaagucagacaccu

SEQ ID NO: 1092354 - RNA, 24 nt, Human
auggaagacagauuggauuccaca

SEQ ID NO: 1092355 - RNA, 20 nt, Human
caaaaaagguuucagugaca

SEQ ID NO: 1092356 - RNA, 18 nt, Human
caaagaaaaggcugacgg

SEQ ID NO: 1092357 - RNA, 20 nt, Human
caacacucuggauuccacac

SEQ ID NO: 1092358 - RNA, 19 nt, Human
caacaggggccagaagaug

SEQ ID NO: 1092359 - RNA, 22 nt, Human
caacuccccuuuccucuucucc

SEQ ID NO: 1092360 - RNA, 21 nt, Human
cacacagcagcaauggcagaa

SEQ ID NO: 1092361 - RNA, 21 nt, Human
cacagcaucaagacccuguga

SEQ ID NO: 1092362 - RNA, 22 nt, Human
caccagagccuuucuugggggc

SEQ ID NO: 1092363 - RNA, 20 nt, Human
caccugcagaucaagaccac

SEQ ID NO: 1092364 - RNA, 24 nt, Human
caccugcagaucaagaccacagca

SEQ ID NO: 1092365 - RNA, 23 nt, Human
cagaccaggcccaugacaaacac

SEQ ID NO: 1092366 - RNA, 22 nt, Human
cagcaaauacacaugaagagaa

SEQ ID NO: 1092367 - RNA, 24 nt, Human
cagcaauggcagaaccaaagguuu

SEQ ID NO: 1092368 - RNA, 22 nt, Human
cagcagcaauggcagaaccaaa

SEQ ID NO: 1092369 - RNA, 18 nt, Human
cagcagggcuccagauga

SEQ ID NO: 1092370 - RNA, 20 nt, Human
cagcaggggcagcuguugca

SEQ ID NO: 1092371 - RNA, 25 nt, Human
cagccuguccaggacagggugccgg

SEQ ID NO: 1092372 - RNA, 19 nt, Human
caggacccaccauuucuuc

SEQ ID NO: 1092373 - RNA, 23 nt, Human
caggagugaacuuccacacagca

SEQ ID NO: 1092374 - RNA, 20 nt, Human
caggauggaagacagauugg

SEQ ID NO: 1092375 - RNA, 21 nt, Human
caggcccaugacaaacaccgu

SEQ ID NO: 1092376 - RNA, 23 nt, Human
cagguucuccaccagagccuuuc

SEQ ID NO: 1092377 - RNA, 21 nt, Human
cagugcucagcuugcacccug

SEQ ID NO: 1092378 - RNA, 25 nt, Human
caucaagacccugugaccucucaaa

SEQ ID NO: 1092379 - RNA, 23 nt, Human
cauccccuucuccuuccucagcc

SEQ ID NO: 1092380 - RNA, 21 nt, Human
ccacaggaaaacuccacucca

SEQ ID NO: 1092381 - RNA, 20 nt, Human
ccaggcccaugacaaacacc

SEQ ID NO: 1092382 - RNA, 18 nt, Human
cccaguagagcccuaggg

SEQ ID NO: 1092383 - RNA, 19 nt, Human
cccaucccacucuaggcau

SEQ ID NO: 1092384 - RNA, 23 nt, Human
cccaugcggacuguuugcugcuu

SEQ ID NO: 1092385 - RNA, 22 nt, Human
ccccaacagugcauccccuucu

SEQ ID NO: 1092386 - RNA, 22 nt, Human
cccuucuccagccccugucugu

SEQ ID NO: 1092387 - RNA, 22 nt, Human
cccuucuccuuccucagccuca

SEQ ID NO: 1092388 - RNA, 24 nt, Human
cccuuuccucuucuccccuucucc

SEQ ID NO: 1092389 - RNA, 26 nt, Human
ccuccugccccuguuggucccuaggc

SEQ ID NO: 1092390 - RNA, 23 nt, Human
ccucugcaacacuggggacacuc

SEQ ID NO: 1092391 - RNA, 20 nt, Human
ccuggguccuggcaacacuc

SEQ ID NO: 1092392 - RNA, 22 nt, Human
ccuucuccuuccucagccucag

SEQ ID NO: 1092393 - RNA, 23 nt, Human
cuaaaaauagucaugcugagagc

SEQ ID NO: 1092394 - RNA, 24 nt, Human
cuaagagacagcaaauacacauga

SEQ ID NO: 1092395 - RNA, 25 nt, Human
cucacggauggccaggacccaccau

SEQ ID NO: 1092396 - RNA, 18 nt, Human
cucagcuugcacccuggc

SEQ ID NO: 1092397 - RNA, 21 nt, Human
cuccagugcucagcuugcacc

SEQ ID NO: 1092398 - RNA, 18 nt, Human
cuccccuucuccagcccc

SEQ ID NO: 1092399 - RNA, 22 nt, Human
cucuggagaccugaugcugggg

SEQ ID NO: 1092400 - RNA, 23 nt, Human
gaaagaagaggucaaagaaaagg

SEQ ID NO: 1092401 - RNA, 18 nt, Human
gaagaugaacaauggccc

SEQ ID NO: 1092402 - RNA, 21 nt, Human
gaguuacagcugccuccccaa

SEQ ID NO: 1092403 - RNA, 24 nt, Human
gaucuuuuuaaauggagacuaggg

SEQ ID NO: 1092404 - RNA, 20 nt, Human
gcaacacuggggacacucac

SEQ ID NO: 1092405 - RNA, 20 nt, Human
gcagcgccaggcaguggugc

SEQ ID NO: 1092406 - RNA, 21 nt, Human
gcagcucuggagaccugaugc

SEQ ID NO: 1092407 - RNA, 21 nt, Human
gcaggacaaauggcagccucc

SEQ ID NO: 1092408 - RNA, 22 nt, Human
gcaugccuggcaucaccacaca

SEQ ID NO: 1092409 - RNA, 22 nt, Human
gcccaugacaaacaccgucucc

SEQ ID NO: 1092410 - RNA, 20 nt, Human
gccccuggccugggcucuga

SEQ ID NO: 1092411 - RNA, 22 nt, Human
gcccuguggccauggggauccc

SEQ ID NO: 1092412 - RNA, 22 nt, Human
gccuggguccuggcaacacucu

SEQ ID NO: 1092413 - RNA, 18 nt, Human
ggcaaggcuguggggcag

SEQ ID NO: 1092414 - RNA, 18 nt, Human
ggccugggcucugagcug

SEQ ID NO: 1092415 - RNA, 21 nt, Human
gggcccuguggccauggggau

SEQ ID NO: 1092416 - RNA, 20 nt, Human
ggggaagggcaugccuggca

SEQ ID NO: 1092417 - RNA, 25 nt, Human
gguugugguauuaaguuacaugcag

SEQ ID NO: 1092418 - RNA, 20 nt, Human
gugcucagcuugcacccugg

SEQ ID NO: 1092419 - RNA, 19 nt, Human
guuagggagcaaggcugca

SEQ ID NO: 1092420 - RNA, 23 nt, Human
uaagagacagcaaauacacauga

SEQ ID NO: 1092421 - RNA, 18 nt, Human
uaggcauggcuccucucc

SEQ ID NO: 1092422 - RNA, 20 nt, Human
uaggccaccgcaagcagcag

SEQ ID NO: 1092423 - RNA, 19 nt, Human
uauggacugguugacagcc

SEQ ID NO: 1092424 - RNA, 19 nt, Human
ucaaaggcccgguggaaag

SEQ ID NO: 1092425 - RNA, 19 nt, Human
ucagauucaggccaacagc

SEQ ID NO: 1092426 - RNA, 23 nt, Human
ucaggaagaaggugggggaggug

SEQ ID NO: 1092427 - RNA, 21 nt, Human
uccacaggaaaacuccacucc

SEQ ID NO: 1092428 - RNA, 18 nt, Human
uccccuucuccuuccuca

SEQ ID NO: 1092429 - RNA, 20 nt, Human
uccucuccacaggaaaacuc

SEQ ID NO: 1092430 - RNA, 22 nt, Human
uccucuucuccccuucuccagg

SEQ ID NO: 1092431 - RNA, 20 nt, Human
ucuaagaaggugggcaggac

SEQ ID NO: 1092432 - RNA, 19 nt, Human
ucucacggauggccaggac

SEQ ID NO: 1092433 - RNA, 19 nt, Human
ucucacucaucuuuccucc

SEQ ID NO: 1092434 - RNA, 28 nt, Human
ucuccagcgggcagagcaaaggaagggc

SEQ ID NO: 1092435 - RNA, 23 nt, Human
ucucccacaaaaaagguuucagu

SEQ ID NO: 1092436 - RNA, 23 nt, Human
ucuccuggguuucaccuuuguag

SEQ ID NO: 1092437 - RNA, 19 nt, Human
ucuggagaccugaugcugg

SEQ ID NO: 1092438 - RNA, 19 nt, Human
ucuugggggccccuggccc

SEQ ID NO: 1092439 - RNA, 20 nt, Human
ugaacuuccacacagcagca

SEQ ID NO: 1092440 - RNA, 23 nt, Human
ugacagacacggggucucuaaaa

SEQ ID NO: 1092441 - RNA, 24 nt, Human
ugacagacacggggucucuaaaaa

SEQ ID NO: 1092442 - RNA, 21 nt, Human
ugacaucacagggaagagcaa

SEQ ID NO: 1092443 - RNA, 20 nt, Human
ugacgccacucccacucacu

SEQ ID NO: 1092444 - RNA, 18 nt, Human
ugacggcaaguuaacaaa

SEQ ID NO: 1092445 - RNA, 19 nt, Human
ugagagggaggagagaagg

SEQ ID NO: 1092446 - RNA, 19 nt, Human
ugagcugggagugaagggg

SEQ ID NO: 1092447 - RNA, 20 nt, Human
ugaguuacagcugccucccc

SEQ ID NO: 1092448 - RNA, 24 nt, Human
ugcagaucaagaccacagcaucaa

SEQ ID NO: 1092449 - RNA, 20 nt, Human
ugccccuguuggucccuagg

SEQ ID NO: 1092450 - RNA, 24 nt, Human
ugcccugggaagaucucacggaug

SEQ ID NO: 1092451 - RNA, 23 nt, Human
ugccuccugccccuguugguccc

SEQ ID NO: 1092452 - RNA, 25 nt, Human
ugccuggguccuggcaacacucugg

SEQ ID NO: 1092453 - RNA, 21 nt, Human
uggcacaggccagcaguugcu

SEQ ID NO: 1092454 - RNA, 22 nt, Human
uggcccaucccacucuaggcau

SEQ ID NO: 1092455 - RNA, 18 nt, Human
ugggaacagaggcuaagg

SEQ ID NO: 1092456 - RNA, 19 nt, Human
ugggaagaucucacggaug

SEQ ID NO: 1092457 - RNA, 23 nt, Human
ugggaugagagggaggagagaag

SEQ ID NO: 1092458 - RNA, 18 nt, Human
ugggcaggacaaauggca

SEQ ID NO: 1092459 - RNA, 20 nt, Human
ugggggcagaagcucccagc

SEQ ID NO: 1092460 - RNA, 20 nt, Human
ugggggccccuggccugggc

SEQ ID NO: 1092461 - RNA, 21 nt, Human
ugggggccccuggccugggcu

SEQ ID NO: 1092462 - RNA, 20 nt, Human
uggguccuggcaacacucug

SEQ ID NO: 1092463 - RNA, 24 nt, Human
uguagcaggaucccugcagaccag

SEQ ID NO: 1092464 - RNA, 18 nt, Human
ugucaggaagaggccuac

SEQ ID NO: 1092465 - RNA, 20 nt, Human
uguugcagaugggaggaaua

SEQ ID NO: 1092466 - RNA, 24 nt, Human
uuaauaaaggaccucuagcugugc

SEQ ID NO: 1092467 - RNA, 24 nt, Human
uuagggagcaaggcugcaggagug

SEQ ID NO: 1092468 - RNA, 19 nt, Human
uuggagccagaccaggagg

SEQ ID NO: 1092469 - RNA, 19 nt, Human
acaagggcuccagaaacuu

SEQ ID NO: 1092470 - RNA, 21 nt, Human
agagggguugaggggggagcc

SEQ ID NO: 1092471 - RNA, 23 nt, Human
agagggguugaggggggagccuc

SEQ ID NO: 1092472 - RNA, 22 nt, Human
cauccagacaggaccucugacc

SEQ ID NO: 1092473 - RNA, 25 nt, Human
ccauccagacaggaccucugaccgc

SEQ ID NO: 1092474 - RNA, 20 nt, Human
cuccagaaacuucaguccau

SEQ ID NO: 1092475 - RNA, 25 nt, Human
cuccagccuccauccagacaggacc

SEQ ID NO: 1092476 - RNA, 21 nt, Human
cugcuaggggccccuucucag

SEQ ID NO: 1092477 - RNA, 24 nt, Human
gagcagagggguugaggggggagc

SEQ ID NO: 1092478 - RNA, 21 nt, Human
gagccuccagccuccauccag

SEQ ID NO: 1092479 - RNA, 21 nt, Human
gggagccuccagccuccaucc

SEQ ID NO: 1092480 - RNA, 19 nt, Human
gggguugaggggggagccu

SEQ ID NO: 1092481 - RNA, 21 nt, Human
gguugaggggggagccuccag

SEQ ID NO: 1092482 - RNA, 24 nt, Human
uaggggccccuucucaggagguuc

SEQ ID NO: 1092483 - RNA, 18 nt, Human
ucagacaagggcuccaga

SEQ ID NO: 1092484 - RNA, 25 nt, Human
ucagucucagacaagggcuccagaa

SEQ ID NO: 1092485 - RNA, 21 nt, Human
ugcuccccacaggcacugagc

SEQ ID NO: 1092486 - RNA, 21 nt, Human
aacaguuucuguuuuaauguc

SEQ ID NO: 1092487 - RNA, 23 nt, Human
aacuucccgccccuccccgcccc

SEQ ID NO: 1092488 - RNA, 19 nt, Human
accauggccaccugcuccc

SEQ ID NO: 1092489 - RNA, 19 nt, Human
acuucccgccccuccccgc

SEQ ID NO: 1092490 - RNA, 21 nt, Human
aggcaggugaggggcaggggc

SEQ ID NO: 1092491 - RNA, 25 nt, Human
aggcaggugaggggcaggggcugca

SEQ ID NO: 1092492 - RNA, 19 nt, Human
aggggcugcaggagagggg

SEQ ID NO: 1092493 - RNA, 24 nt, Human
aggugaggggcaggggcugcagga

SEQ ID NO: 1092494 - RNA, 23 nt, Human
cagggccgggcaccauggccacc

SEQ ID NO: 1092495 - RNA, 21 nt, Human
caggucccaggcaggugaggg

SEQ ID NO: 1092496 - RNA, 21 nt, Human
cccaggcaggugaggggcagg

SEQ ID NO: 1092497 - RNA, 23 nt, Human
ccccgccccgcgccggccgcgac

SEQ ID NO: 1092498 - RNA, 20 nt, Human
ccccgcgccggccgcgacuc

SEQ ID NO: 1092499 - RNA, 23 nt, Human
cccucgagcggcagcgacucccg

SEQ ID NO: 1092500 - RNA, 19 nt, Human
cccuguguggccccaggga

SEQ ID NO: 1092501 - RNA, 21 nt, Human
ccgcagccuccgccgccgccc

SEQ ID NO: 1092502 - RNA, 19 nt, Human
ccucgagcggcagcgacuc

SEQ ID NO: 1092503 - RNA, 19 nt, Human
ccugcucccggccgggagc

SEQ ID NO: 1092504 - RNA, 19 nt, Human
ccuguguggccccagggac

SEQ ID NO: 1092505 - RNA, 23 nt, Human
cgaggccgcguguagggcgcaaa

SEQ ID NO: 1092506 - RNA, 21 nt, Human
cgcuggggcucuggggguggg

SEQ ID NO: 1092507 - RNA, 18 nt, Human
cggucccucgagcggcag

SEQ ID NO: 1092508 - RNA, 24 nt, Human
cucccgcagccuccgccgccgccc

SEQ ID NO: 1092509 - RNA, 18 nt, Human
cugcaggagaggggccgg

SEQ ID NO: 1092510 - RNA, 23 nt, Human
cugggggugggaugcggcucccg

SEQ ID NO: 1092511 - RNA, 19 nt, Human
gcaugcugcaggcagagac

SEQ ID NO: 1092512 - RNA, 22 nt, Human
gcgccgggagccggaccucccg

SEQ ID NO: 1092513 - RNA, 22 nt, Human
gcgcuggggcucuggggguggg

SEQ ID NO: 1092514 - RNA, 21 nt, Human
gcggcagcgacucccgcagcc

SEQ ID NO: 1092515 - RNA, 21 nt, Human
ggcgccgggagccggaccucc

SEQ ID NO: 1092516 - RNA, 20 nt, Human
ggcugcaggagaggggccgg

SEQ ID NO: 1092517 - RNA, 18 nt, Human
gggcaggggcugcaggag

SEQ ID NO: 1092518 - RNA, 18 nt, Human
gggcaggucccaggcagg

SEQ ID NO: 1092519 - RNA, 22 nt, Human
uauccacaugcaugcggaggcg

SEQ ID NO: 1092520 - RNA, 24 nt, Human
uccacaugcaugcggaggcggggc

SEQ ID NO: 1092521 - RNA, 23 nt, Human
ucccgcagccuccgccgccgccc

SEQ ID NO: 1092522 - RNA, 21 nt, Human
ucccuguguggccccagggac

SEQ ID NO: 1092523 - RNA, 23 nt, Human
ucccuguguggccccagggacaa

SEQ ID NO: 1092524 - RNA, 21 nt, Human
ugaccuccagugucccugugu

SEQ ID NO: 1092525 - RNA, 18 nt, Human
ugaggcagggccgggcac

SEQ ID NO: 1092526 - RNA, 23 nt, Human
ugaggcccggcgccgggagccgg

SEQ ID NO: 1092527 - RNA, 23 nt, Human
ugcggaggcggggcaggucccag

SEQ ID NO: 1092528 - RNA, 19 nt, Human
ugggggaaacugaggcccg

SEQ ID NO: 1092529 - RNA, 22 nt, Human
ugggggaaacugaggcccggcg

SEQ ID NO: 1092530 - RNA, 18 nt, Human
ugugaacaguuucuguuu

SEQ ID NO: 1092531 - RNA, 20 nt, Human
ugugaccuccagugucccug

SEQ ID NO: 1092532 - RNA, 22 nt, Human
uuuuuuuuuuuuuuugugaaca

SEQ ID NO: 1092533 - RNA, 18 nt, Human
uuuuuuuuuuuuuuuuug

SEQ ID NO: 1092534 - RNA, 19 nt, Human
uuuuuuuuuuuuuuuuugu

SEQ ID NO: 1092535 - RNA, 23 nt, Human
cacggcucaggcccgaaucgaga

SEQ ID NO: 1092536 - RNA, 21 nt, Human
cggcuuccacggcucaggccc

SEQ ID NO: 1092537 - RNA, 18 nt, Human
cugcccuccccccaccag

SEQ ID NO: 1092538 - RNA, 24 nt, Human
gggaagcagggaggcgcagagaga

SEQ ID NO: 1092539 - RNA, 26 nt, Human
uccacggcucaggcccgaaucgagac

SEQ ID NO: 1092540 - RNA, 21 nt, Human
ucgggcuccucuuuccugugc

SEQ ID NO: 1092541 - RNA, 21 nt, Human
acagcacgcgccgccaggccu

SEQ ID NO: 1092542 - RNA, 19 nt, Human
agaaauaccagaagagccc

SEQ ID NO: 1092543 - RNA, 20 nt, Human
auggccggguucccgcgacc

SEQ ID NO: 1092544 - RNA, 21 nt, Human
cagcacacacuucucgcaggc

SEQ ID NO: 1092545 - RNA, 18 nt, Human
caggccgagaaauaccag

SEQ ID NO: 1092546 - RNA, 19 nt, Human
caggucggagacgccaacc

SEQ ID NO: 1092547 - RNA, 21 nt, Human
cauggccggguucccgcgacc

SEQ ID NO: 1092548 - RNA, 20 nt, Human
ccaaccaggcagaagcccuc

SEQ ID NO: 1092549 - RNA, 20 nt, Human
ccaggcagaagcccucgaag

SEQ ID NO: 1092550 - RNA, 20 nt, Human
cccgcgaccggggcgggggc

SEQ ID NO: 1092551 - RNA, 19 nt, Human
ccgcgaccggggcgggggc

SEQ ID NO: 1092552 - RNA, 21 nt, Human
cuccuuggcaugcagcaccgg

SEQ ID NO: 1092553 - RNA, 21 nt, Human
gaggccugcccagaacuuggg

SEQ ID NO: 1092554 - RNA, 23 nt, Human
ucucgcaggccgagaaauaccag

SEQ ID NO: 1092555 - RNA, 22 nt, Human
uucccgcgaccggggcgggggc

SEQ ID NO: 1092556 - RNA, 18 nt, Human
aaaguggagguuguccaa

SEQ ID NO: 1092557 - RNA, 24 nt, Human
aaaguguugggauuacaggcguga

SEQ ID NO: 1092558 - RNA, 24 nt, Human
aagcagcaaggaaccugaggaggg

SEQ ID NO: 1092559 - RNA, 21 nt, Human
aaguguugggauuacaggcgu

SEQ ID NO: 1092560 - RNA, 26 nt, Human
aaguguugggauuacaggcgugagcc

SEQ ID NO: 1092561 - RNA, 23 nt, Human
aaugcuccaagacccauuugggc

SEQ ID NO: 1092562 - RNA, 24 nt, Human
accaggcacucugcugcuuggccu

SEQ ID NO: 1092563 - RNA, 24 nt, Human
acccacacugucucccuaucuccc

SEQ ID NO: 1092564 - RNA, 22 nt, Human
accccccuccccagguguccac

SEQ ID NO: 1092565 - RNA, 23 nt, Human
accccccuccccagguguccaca

SEQ ID NO: 1092566 - RNA, 18 nt, Human
acccugccagccugcagc

SEQ ID NO: 1092567 - RNA, 22 nt, Human
acgguuucaccauguuggccag

SEQ ID NO: 1092568 - RNA, 20 nt, Human
agaaguguuugggcuggggg

SEQ ID NO: 1092569 - RNA, 23 nt, Human
agacagcugguugcaaagccagg

SEQ ID NO: 1092570 - RNA, 22 nt, Human
agacagguagguagaagccagg

SEQ ID NO: 1092571 - RNA, 24 nt, Human
agacgguuucaccauguuggccag

SEQ ID NO: 1092572 - RNA, 23 nt, Human
agagaagcagcaaggaaccugag

SEQ ID NO: 1092573 - RNA, 24 nt, Human
agccaugggggaagucggcacccu

SEQ ID NO: 1092574 - RNA, 19 nt, Human
agcuccugcccaccugcuc

SEQ ID NO: 1092575 - RNA, 21 nt, Human
aggacggggcuggugggugca

SEQ ID NO: 1092576 - RNA, 18 nt, Human
aggagagguuguaggaag

SEQ ID NO: 1092577 - RNA, 22 nt, Human
aggcaagugggagccagccagg

SEQ ID NO: 1092578 - RNA, 21 nt, Human
aggcacucugcugcuuggccu

SEQ ID NO: 1092579 - RNA, 20 nt, Human
aggcugccccagaggagcgg

SEQ ID NO: 1092580 - RNA, 19 nt, Human
agggcugaagaugaaaaag

SEQ ID NO: 1092581 - RNA, 21 nt, Human
agggcugaagaugaaaaagug

SEQ ID NO: 1092582 - RNA, 21 nt, Human
aggguucggccagggcccagc

SEQ ID NO: 1092583 - RNA, 18 nt, Human
agguagguagaagccagg

SEQ ID NO: 1092584 - RNA, 18 nt, Human
agguccccacgugccccc

SEQ ID NO: 1092585 - RNA, 22 nt, Human
agguccccacgugccccccacc

SEQ ID NO: 1092586 - RNA, 23 nt, Human
agguccccacgugccccccaccc

SEQ ID NO: 1092587 - RNA, 25 nt, Human
auccacaggccccaggcuccuguag

SEQ ID NO: 1092588 - RNA, 19 nt, Human
aucugcuugccugggccuc

SEQ ID NO: 1092589 - RNA, 22 nt, Human
augaagccccuggucuaaugcu

SEQ ID NO: 1092590 - RNA, 24 nt, Human
caaaguguugggauuacaggcgug

SEQ ID NO: 1092591 - RNA, 18 nt, Human
caccauguuggccaggau

SEQ ID NO: 1092592 - RNA, 22 nt, Human
caccauguuggccaggaugguc

SEQ ID NO: 1092593 - RNA, 24 nt, Human
caccauguuggccaggauggucuc

SEQ ID NO: 1092594 - RNA, 19 nt, Human
cacccauccucaucagccc

SEQ ID NO: 1092595 - RNA, 19 nt, Human
cacccugccagccugcagc

SEQ ID NO: 1092596 - RNA, 20 nt, Human
cacccugccagccugcagcc

SEQ ID NO: 1092597 - RNA, 26 nt, Human
caccuggcacgggaggcaagugggag

SEQ ID NO: 1092598 - RNA, 27 nt, Human
cacgugccccccacccagcagcggccc

SEQ ID NO: 1092599 - RNA, 21 nt, Human
cacucugcagccaccuguacc

SEQ ID NO: 1092600 - RNA, 18 nt, Human
cagaaggugggagaaccc

SEQ ID NO: 1092601 - RNA, 25 nt, Human
cagcaaggaaccugaggaggggcag

SEQ ID NO: 1092602 - RNA, 25 nt, Human
cagcccaggguguuugugaacaggg

SEQ ID NO: 1092603 - RNA, 22 nt, Human
caggauggucuccaucuccuga

SEQ ID NO: 1092604 - RNA, 25 nt, Human
caggccccaggcuccuguagcuccu

SEQ ID NO: 1092605 - RNA, 18 nt, Human
cagggcaggcaugaagcc

SEQ ID NO: 1092606 - RNA, 19 nt, Human
cagggcugaagaugaaaaa

SEQ ID NO: 1092607 - RNA, 23 nt, Human
caguggaagucccagggcggcgc

SEQ ID NO: 1092608 - RNA, 22 nt, Human
ccaaaguguugggauuacaggc

SEQ ID NO: 1092609 - RNA, 22 nt, Human
ccaaaguguugggauuacaggc

SEQ ID NO: 1092610 - RNA, 24 nt, Human
ccaaaguguugggauuacaggcgu

SEQ ID NO: 1092611 - RNA, 25 nt, Human
ccacacugucucccuaucucccaug

SEQ ID NO: 1092612 - RNA, 18 nt, Human
ccacgggaaagccucucc

SEQ ID NO: 1092613 - RNA, 23 nt, Human
ccacugcgcccaaccuccccacu

SEQ ID NO: 1092614 - RNA, 22 nt, Human
ccacuuuggccaccugucccca

SEQ ID NO: 1092615 - RNA, 20 nt, Human
ccagaagcaccuggcacggg

SEQ ID NO: 1092616 - RNA, 20 nt, Human
cccaccguacccgagggacc

SEQ ID NO: 1092617 - RNA, 24 nt, Human
cccaccguacccgagggacccuau

SEQ ID NO: 1092618 - RNA, 18 nt, Human
cccagggcaggcaugaag

SEQ ID NO: 1092619 - RNA, 19 nt, Human
ccccacagugcaugacacc

SEQ ID NO: 1092620 - RNA, 19 nt, Human
ccccaccguacccgagggg

SEQ ID NO: 1092621 - RNA, 24 nt, Human
ccccacuccucucccguccacacc

SEQ ID NO: 1092622 - RNA, 18 nt, Human
ccccucugccccuuuccu

SEQ ID NO: 1092623 - RNA, 23 nt, Human
cccgagggacccuaugccccucu

SEQ ID NO: 1092624 - RNA, 27 nt, Human
ccucacccauccucaucagcccugcgg

SEQ ID NO: 1092625 - RNA, 18 nt, Human
ccuccccacuccucuccc

SEQ ID NO: 1092626 - RNA, 18 nt, Human
ccucuccaagacaggagu

SEQ ID NO: 1092627 - RNA, 23 nt, Human
ccucuccugcugagccccagaag

SEQ ID NO: 1092628 - RNA, 18 nt, Human
ccugaccucaugaucugc

SEQ ID NO: 1092629 - RNA, 18 nt, Human
ccugcagccccuucccuc

SEQ ID NO: 1092630 - RNA, 23 nt, Human
ccugcccccaccguacccgaggg

SEQ ID NO: 1092631 - RNA, 25 nt, Human
ccuggcucagagccggagcgcugug

SEQ ID NO: 1092632 - RNA, 26 nt, Human
cgagggacccuaugccccucugcccc

SEQ ID NO: 1092633 - RNA, 21 nt, Human
cgggcaaggacggggcuggug

SEQ ID NO: 1092634 - RNA, 18 nt, Human
cggggcuggugggugcag

SEQ ID NO: 1092635 - RNA, 25 nt, Human
cggggcuggugggugcagcagagca

SEQ ID NO: 1092636 - RNA, 21 nt, Human
cucacccauccucaucagccc

SEQ ID NO: 1092637 - RNA, 24 nt, Human
cuccugaccucaugaucugcuugc

SEQ ID NO: 1092638 - RNA, 21 nt, Human
cuccugcugagccccagaagc

SEQ ID NO: 1092639 - RNA, 20 nt, Human
cucuccaagacaggagugga

SEQ ID NO: 1092640 - RNA, 22 nt, Human
cugccagccugcagccccuucc

SEQ ID NO: 1092641 - RNA, 20 nt, Human
cugcgcccaaccuccccacu

SEQ ID NO: 1092642 - RNA, 21 nt, Human
cugcggcaggcaggugaucug

SEQ ID NO: 1092643 - RNA, 18 nt, Human
cugcugcuuggccuuugg

SEQ ID NO: 1092644 - RNA, 22 nt, Human
cuggaggugaccccccucccca

SEQ ID NO: 1092645 - RNA, 20 nt, Human
cugugcgcccgccugccccu

SEQ ID NO: 1092646 - RNA, 18 nt, Human
cuuuggccaccugucccc

SEQ ID NO: 1092647 - RNA, 22 nt, Human
gaagcaccuggcacgggaggca

SEQ ID NO: 1092648 - RNA, 23 nt, Human
gaccccccuccccagguguccac

SEQ ID NO: 1092649 - RNA, 20 nt, Human
gagccggagcgcugugcgcc

SEQ ID NO: 1092650 - RNA, 18 nt, Human
gauuacaggcgugagcca

SEQ ID NO: 1092651 - RNA, 22 nt, Human
gauuacaggcgugagccacugc

SEQ ID NO: 1092652 - RNA, 22 nt, Human
gauuacaggcgugagccacugc

SEQ ID NO: 1092653 - RNA, 22 nt, Human
gcaaggacggggcuggugggug

SEQ ID NO: 1092654 - RNA, 23 nt, Human
gcaggugaucugugugaaagggu

SEQ ID NO: 1092655 - RNA, 21 nt, Human
gcucacccacacugucucccu

SEQ ID NO: 1092656 - RNA, 21 nt, Human
ggacccuaugccccucugccc

SEQ ID NO: 1092657 - RNA, 19 nt, Human
ggaggugaccccccucccc

SEQ ID NO: 1092658 - RNA, 21 nt, Human
ggaggugaccccccuccccag

SEQ ID NO: 1092659 - RNA, 24 nt, Human
ggauggucuccaucuccugaccuc

SEQ ID NO: 1092660 - RNA, 22 nt, Human
ggcuggugggugcagcagagca

SEQ ID NO: 1092661 - RNA, 18 nt, Human
gggcaggcaugaagcccc

SEQ ID NO: 1092662 - RNA, 24 nt, Human
gggcauggcacucaucaggcaucu

SEQ ID NO: 1092663 - RNA, 23 nt, Human
gggcgggacggggccaaggauga

SEQ ID NO: 1092664 - RNA, 19 nt, Human
ggguguggcugaaaaggag

SEQ ID NO: 1092665 - RNA, 25 nt, Human
gguccugugccugagcccucagcgu

SEQ ID NO: 1092666 - RNA, 21 nt, Human
gguuucaccauguuggccagg

SEQ ID NO: 1092667 - RNA, 24 nt, Human
gguuucaccauguuggccaggaug

SEQ ID NO: 1092668 - RNA, 21 nt, Human
gugaacagguggacuugggug

SEQ ID NO: 1092669 - RNA, 20 nt, Human
gugggagaacccccacagug

SEQ ID NO: 1092670 - RNA, 23 nt, Human
uaauuuuuuguguuuuauuagag

SEQ ID NO: 1092671 - RNA, 19 nt, Human
uacaggcgugagccacugc

SEQ ID NO: 1092672 - RNA, 24 nt, Human
uacaggcgugagccacugcgccca

SEQ ID NO: 1092673 - RNA, 19 nt, Human
uagagacgguuucaccaug

SEQ ID NO: 1092674 - RNA, 19 nt, Human
uagcuccugcccaccugcu

SEQ ID NO: 1092675 - RNA, 22 nt, Human
uaggaagcuggccagagaauca

SEQ ID NO: 1092676 - RNA, 18 nt, Human
uaguguuugcagaagugu

SEQ ID NO: 1092677 - RNA, 20 nt, Human
uauuggaggcugccccagag

SEQ ID NO: 1092678 - RNA, 24 nt, Human
ucaccauguuggccaggauggucu

SEQ ID NO: 1092679 - RNA, 22 nt, Human
ucaggcacuuccugagacaggu

SEQ ID NO: 1092680 - RNA, 18 nt, Human
ucaggcaucugcauccgc

SEQ ID NO: 1092681 - RNA, 21 nt, Human
ucagggcugaagaugaaaaag

SEQ ID NO: 1092682 - RNA, 20 nt, Human
uccacaccaggcacucugcu

SEQ ID NO: 1092683 - RNA, 19 nt, Human
uccacagagggcauggcac

SEQ ID NO: 1092684 - RNA, 21 nt, Human
uccacaggccccaggcuccug

SEQ ID NO: 1092685 - RNA, 21 nt, Human
uccacaggccccaggcuccug

SEQ ID NO: 1092686 - RNA, 24 nt, Human
ucccaaaguguugggauuacaggc

SEQ ID NO: 1092687 - RNA, 26 nt, Human
uccccagggcaggcaugaagccccug

SEQ ID NO: 1092688 - RNA, 21 nt, Human
ucuccaucuccugaccucaug

SEQ ID NO: 1092689 - RNA, 24 nt, Human
ucuccugcugagccccagaagcug

SEQ ID NO: 1092690 - RNA, 23 nt, Human
ucucuugcacgugcaguggaagu

SEQ ID NO: 1092691 - RNA, 21 nt, Human
ucugccccuuuccucuccucc

SEQ ID NO: 1092692 - RNA, 21 nt, Human
ucugcgggcucacagcagcca

SEQ ID NO: 1092693 - RNA, 24 nt, Human
ugaaaaaguggagguuguccaagg

SEQ ID NO: 1092694 - RNA, 18 nt, Human
ugaagaugaaaaagugga

SEQ ID NO: 1092695 - RNA, 22 nt, Human
ugaccccccuccccaggugucc

SEQ ID NO: 1092696 - RNA, 20 nt, Human
ugagccccagaagcaccugg

SEQ ID NO: 1092697 - RNA, 20 nt, Human
ugaggaggggcagaaggugg

SEQ ID NO: 1092698 - RNA, 22 nt, Human
ugagugcagguccccacgugcc

SEQ ID NO: 1092699 - RNA, 24 nt, Human
ugcauccgcuaaccuagagaaagg

SEQ ID NO: 1092700 - RNA, 25 nt, Human
ugcauccgcuaaccuagagaaagga

SEQ ID NO: 1092701 - RNA, 21 nt, Human
ugccugagcccucagcgugcc

SEQ ID NO: 1092702 - RNA, 20 nt, Human
ugcugagccccagaagcacc

SEQ ID NO: 1092703 - RNA, 23 nt, Human
uggccagagaaucagggcaagug

SEQ ID NO: 1092704 - RNA, 24 nt, Human
uggccaggauggucuccaucuccu

SEQ ID NO: 1092705 - RNA, 22 nt, Human
uggcggugucugugauccacag

SEQ ID NO: 1092706 - RNA, 19 nt, Human
uggcugcgcuccucaccca

SEQ ID NO: 1092707 - RNA, 23 nt, Human
ugggagaggagagaagcagcaag

SEQ ID NO: 1092708 - RNA, 18 nt, Human
ugggagggucuguaggug

SEQ ID NO: 1092709 - RNA, 18 nt, Human
ugggauuacaggcgugag

SEQ ID NO: 1092710 - RNA, 19 nt, Human
ugggauuacaggcgugagc

SEQ ID NO: 1092711 - RNA, 21 nt, Human
ugggauuacaggcgugagcca

SEQ ID NO: 1092712 - RNA, 22 nt, Human
ugggauuacaggcgugagccac

SEQ ID NO: 1092713 - RNA, 22 nt, Human
ugggauuacaggcgugagccac

SEQ ID NO: 1092714 - RNA, 24 nt, Human
ugggauuacaggcgugagccacug

SEQ ID NO: 1092715 - RNA, 26 nt, Human
ugggauuacaggcgugagccacugcg

SEQ ID NO: 1092716 - RNA, 21 nt, Human
ugggggcagauggauguaagg

SEQ ID NO: 1092717 - RNA, 24 nt, Human
uugccugggccucccaaaguguug

SEQ ID NO: 1092718 - RNA, 23 nt, Human
uugugggcccugcacagcugugu

SEQ ID NO: 1092719 - RNA, 19 nt, Human
uuucaccauguuggccagg

SEQ ID NO: 1092720 - RNA, 20 nt, Human
uuucaccauguuggccagga

SEQ ID NO: 1092721 - RNA, 19 nt, Human
uuuggccaccuguccccag

SEQ ID NO: 1092722 - RNA, 20 nt, Human
uuuuuguguuuuauuagaga

SEQ ID NO: 1092723 - RNA, 20 nt, Human
aagaucccuggcuggaccag

SEQ ID NO: 1092724 - RNA, 20 nt, Human
accaggguuucagggcuggc

SEQ ID NO: 1092725 - RNA, 20 nt, Human
aggccaaagcugcacggugc

SEQ ID NO: 1092726 - RNA, 21 nt, Human
aggguuucagggcuggccccg

SEQ ID NO: 1092727 - RNA, 20 nt, Human
caugagaugccccuuccaca

SEQ ID NO: 1092728 - RNA, 25 nt, Human
cccggagcugagaccaagucgaguc

SEQ ID NO: 1092729 - RNA, 22 nt, Human
cccugcugcugucaccgcuggg

SEQ ID NO: 1092730 - RNA, 18 nt, Human
cccuggcuggaccagcug

SEQ ID NO: 1092731 - RNA, 19 nt, Human
cuggccccggagcugagac

SEQ ID NO: 1092732 - RNA, 19 nt, Human
gcucugguugugggggcug

SEQ ID NO: 1092733 - RNA, 20 nt, Human
ggagcugagaccaagugcug

SEQ ID NO: 1092734 - RNA, 20 nt, Human
gggcucuacgaagaucccug

SEQ ID NO: 1092735 - RNA, 19 nt, Human
guccggggccggcccaggg

SEQ ID NO: 1092736 - RNA, 22 nt, Human
guugugggggcuggggguuguc

SEQ ID NO: 1092737 - RNA, 21 nt, Human
guuucagggcuggccccggag

SEQ ID NO: 1092738 - RNA, 24 nt, Human
uaaccaggguuucagggcuggccc

SEQ ID NO: 1092739 - RNA, 18 nt, Human
uccaggcccugcugcugu

SEQ ID NO: 1092740 - RNA, 18 nt, Human
uccggggccggcccaggg

SEQ ID NO: 1092741 - RNA, 21 nt, Human
ugagaccaagugcuggcccau

SEQ ID NO: 1092742 - RNA, 20 nt, Human
ugagaugccccuuccacaga

SEQ ID NO: 1092743 - RNA, 18 nt, Human
uggcucugguuguggggg

SEQ ID NO: 1092744 - RNA, 21 nt, Human
ugugggggcuggggguugucc

SEQ ID NO: 1092745 - RNA, 24 nt, Human
ugugggggcuggggguuguccggg

SEQ ID NO: 1092746 - RNA, 18 nt, Human
aagagagagagagggagg

SEQ ID NO: 1092747 - RNA, 22 nt, Human
aagcccacgauggcuacagagc

SEQ ID NO: 1092748 - RNA, 18 nt, Human
acaacaaaaugccccuaa

SEQ ID NO: 1092749 - RNA, 18 nt, Human
acaccacugcacuccagc

SEQ ID NO: 1092750 - RNA, 21 nt, Human
acaccacugcacuccagcgac

SEQ ID NO: 1092751 - RNA, 26 nt, Human
acagagcuccaaggaggagggaacgc

SEQ ID NO: 1092752 - RNA, 18 nt, Human
acaggugagaccccgucu

SEQ ID NO: 1092753 - RNA, 25 nt, Human
acccgccucggccucccacagugcu

SEQ ID NO: 1092754 - RNA, 22 nt, Human
acgcagcacacuccuuccggag

SEQ ID NO: 1092755 - RNA, 23 nt, Human
acuccuguccucaggugauccac

SEQ ID NO: 1092756 - RNA, 27 nt, Human
acugcacuccagcgacaggacaacggg

SEQ ID NO: 1092757 - RNA, 27 nt, Human
acugcacuccagcgacaggacaucggg

SEQ ID NO: 1092758 - RNA, 19 nt, Human
agagagagggagggaggag

SEQ ID NO: 1092759 - RNA, 21 nt, Human
agaugggguccccagcaagcc

SEQ ID NO: 1092760 - RNA, 22 nt, Human
agcagaaacaccugugcuuucc

SEQ ID NO: 1092761 - RNA, 24 nt, Human
agccauguugcccaggcuggucuu

SEQ ID NO: 1092762 - RNA, 27 nt, Human
agccauguugcccaggcuggucuugaa

SEQ ID NO: 1092763 - RNA, 19 nt, Human
agcccaagaguucaaggcc

SEQ ID NO: 1092764 - RNA, 21 nt, Human
agcccaggcauuagaggcucc

SEQ ID NO: 1092765 - RNA, 19 nt, Human
agccugcaccggcugaacu

SEQ ID NO: 1092766 - RNA, 24 nt, Human
agcuacucgggaggcugagguggg

SEQ ID NO: 1092767 - RNA, 22 nt, Human
agcugccaggcgugguggcuca

SEQ ID NO: 1092768 - RNA, 24 nt, Human
aggaucacuugagcccaagaguuc

SEQ ID NO: 1092769 - RNA, 24 nt, Human
aggcauuagaggcuccagugagcu

SEQ ID NO: 1092770 - RNA, 18 nt, Human
aggcgagaggaucacuug

SEQ ID NO: 1092771 - RNA, 21 nt, Human
aggcgugguggcucaagccug

SEQ ID NO: 1092772 - RNA, 24 nt, Human
aggcugaggugggaggaucgcuug

SEQ ID NO: 1092773 - RNA, 20 nt, Human
agggaagguugcauucugag

SEQ ID NO: 1092774 - RNA, 19 nt, Human
aggggagauggggucccca

SEQ ID NO: 1092775 - RNA, 24 nt, Human
aggugauccacccgccucggccuc

SEQ ID NO: 1092776 - RNA, 23 nt, Human
aggugggaggaucgcuugagccc

SEQ ID NO: 1092777 - RNA, 24 nt, Human
agucaacaacaaaaugccccuaaa

SEQ ID NO: 1092778 - RNA, 18 nt, Human
agucaacacagauggagc

SEQ ID NO: 1092779 - RNA, 24 nt, Human
agugcugggaugacaggcuugagc

SEQ ID NO: 1092780 - RNA, 20 nt, Human
aucacaccacugcacuccag

SEQ ID NO: 1092781 - RNA, 29 nt, Human
aucccaaagucuccaaggggagauggggg

SEQ ID NO: 1092782 - RNA, 22 nt, Human
auccuaacacuuugggaggcca

SEQ ID NO: 1092783 - RNA, 19 nt, Human
auggaggaacaccagugac

SEQ ID NO: 1092784 - RNA, 19 nt, Human
auuacaucugcaaagcccu

SEQ ID NO: 1092785 - RNA, 20 nt, Human
caacacagauggagcugcca

SEQ ID NO: 1092786 - RNA, 21 nt, Human
caaggcgagaggaucacuuga

SEQ ID NO: 1092787 - RNA, 22 nt, Human
cacaacaagagagagagaggga

SEQ ID NO: 1092788 - RNA, 20 nt, Human
cacagccugccucccgcccu

SEQ ID NO: 1092789 - RNA, 22 nt, Human
cacaucccaaagucuccaaggg

SEQ ID NO: 1092790 - RNA, 23 nt, Human
caccuguagucccagcuacucgg

SEQ ID NO: 1092791 - RNA, 24 nt, Human
caccuguagucccagcuacucggg

SEQ ID NO: 1092792 - RNA, 18 nt, Human
cacugcacuccagcgaca

SEQ ID NO: 1092793 - RNA, 18 nt, Human
cacugcacuccagcgaca

SEQ ID NO: 1092794 - RNA, 19 nt, Human
cacugcacuccagcgacag

SEQ ID NO: 1092795 - RNA, 23 nt, Human
cacugcacuccagcgacagguga

SEQ ID NO: 1092796 - RNA, 18 nt, Human
cagagcuccaaggaggag

SEQ ID NO: 1092797 - RNA, 26 nt, Human
cagcagcacugcagggcaggcucuga

SEQ ID NO: 1092798 - RNA, 20 nt, Human
cagcaugucuuccccuuggg

SEQ ID NO: 1092799 - RNA, 19 nt, Human
cagccucaauccaggguga

SEQ ID NO: 1092800 - RNA, 18 nt, Human
cagcguccuggggcugcu

SEQ ID NO: 1092801 - RNA, 18 nt, Human
cagcguccuggggcugcu

SEQ ID NO: 1092802 - RNA, 24 nt, Human
cagcuacucgggaggcugaggugg

SEQ ID NO: 1092803 - RNA, 19 nt, Human
caggcuuacaacaucagaa

SEQ ID NO: 1092804 - RNA, 23 nt, Human
cagggaaaauggcucccuuuuca

SEQ ID NO: 1092805 - RNA, 23 nt, Human
caucagagaaccagcaugucuuc

SEQ ID NO: 1092806 - RNA, 20 nt, Human
cauguugcccaggcuggucu

SEQ ID NO: 1092807 - RNA, 23 nt, Human
cauguugcccaggcuggucuuga

SEQ ID NO: 1092808 - RNA, 24 nt, Human
cauguugcccaggcuggucuugaa

SEQ ID NO: 1092809 - RNA, 21 nt, Human
ccacagggcagcugucgccau

SEQ ID NO: 1092810 - RNA, 24 nt, Human
ccacgguuggaagcuuccuggggc

SEQ ID NO: 1092811 - RNA, 18 nt, Human
ccacugcacuccagcgac

SEQ ID NO: 1092812 - RNA, 19 nt, Human
ccacugcacuccagcgaca

SEQ ID NO: 1092813 - RNA, 21 nt, Human
ccacugcacuccagcgacagg

SEQ ID NO: 1092814 - RNA, 22 nt, Human
ccacugcacuccagcgacaggu

SEQ ID NO: 1092815 - RNA, 18 nt, Human
ccagcucugggggcucca

SEQ ID NO: 1092816 - RNA, 23 nt, Human
ccagggugaccucguccccagau

SEQ ID NO: 1092817 - RNA, 18 nt, Human
ccauaucgacagcagccg

SEQ ID NO: 1092818 - RNA, 20 nt, Human
ccaugugagacaccugcucc

SEQ ID NO: 1092819 - RNA, 21 nt, Human
ccauguugcccaggcuggucu

SEQ ID NO: 1092820 - RNA, 24 nt, Human
ccccugcugcggccgacgcuccag

SEQ ID NO: 1092821 - RNA, 22 nt, Human
cccgccgcuccuuccucuccug

SEQ ID NO: 1092822 - RNA, 18 nt, Human
cccgcuucgccuuccacc

SEQ ID NO: 1092823 - RNA, 22 nt, Human
cccuggggaggaucccucccuc

SEQ ID NO: 1092824 - RNA, 21 nt, Human
cccuuugacucuugcaagccc

SEQ ID NO: 1092825 - RNA, 21 nt, Human
ccgccgcuccuuccucuccug

SEQ ID NO: 1092826 - RNA, 18 nt, Human
ccggaggcccuggggagg

SEQ ID NO: 1092827 - RNA, 20 nt, Human
ccgucuaaaaaauaucucac

SEQ ID NO: 1092828 - RNA, 21 nt, Human
ccucaggugauccacccgccu

SEQ ID NO: 1092829 - RNA, 21 nt, Human
ccucccgcccugggaagcugg

SEQ ID NO: 1092830 - RNA, 24 nt, Human
ccucccgcccugggaagcuggggg

SEQ ID NO: 1092831 - RNA, 21 nt, Human
ccugcccgccgcuccuuccuc

SEQ ID NO: 1092832 - RNA, 21 nt, Human
ccugcccgccgcuccuuccuc

SEQ ID NO: 1092833 - RNA, 19 nt, Human
ccugcucugugcaucuguc

SEQ ID NO: 1092834 - RNA, 21 nt, Human
ccuggggaggaucccucccuc

SEQ ID NO: 1092835 - RNA, 19 nt, Human
ccuggggccucuccagaag

SEQ ID NO: 1092836 - RNA, 21 nt, Human
ccuguagucccagcuacucgg

SEQ ID NO: 1092837 - RNA, 24 nt, Human
ccuguccucaggugauccacccgc

SEQ ID NO: 1092838 - RNA, 22 nt, Human
cgagggcagcagcacugcaggg

SEQ ID NO: 1092839 - RNA, 23 nt, Human
cgagggcagcagcacugcagggc

SEQ ID NO: 1092840 - RNA, 24 nt, Human
cgccucggccucccacagugcugg

SEQ ID NO: 1092841 - RNA, 23 nt, Human
cgggaggcugaggugggaggauc

SEQ ID NO: 1092842 - RNA, 20 nt, Human
cucagccucaauccagggug

SEQ ID NO: 1092843 - RNA, 22 nt, Human
cucagccucaauccagggugac

SEQ ID NO: 1092844 - RNA, 22 nt, Human
cucccggggccaccugcccgcc

SEQ ID NO: 1092845 - RNA, 24 nt, Human
cuccuuccggaggcccuggggagg

SEQ ID NO: 1092846 - RNA, 21 nt, Human
cucuauucugcucugcucuuc

SEQ ID NO: 1092847 - RNA, 22 nt, Human
cucuuccagcucugggggcucc

SEQ ID NO: 1092848 - RNA, 19 nt, Human
cugaggggcuucagggaga

SEQ ID NO: 1092849 - RNA, 21 nt, Human
cugugcaucugucucuauucu

SEQ ID NO: 1092850 - RNA, 18 nt, Human
cuuccuggggccucucca

SEQ ID NO: 1092851 - RNA, 22 nt, Human
cuugcaagcccacgauggcuac

SEQ ID NO: 1092852 - RNA, 19 nt, Human
gagaccucccccaucucua

SEQ ID NO: 1092853 - RNA, 22 nt, Human
gagaugggguccccagcaagcc

SEQ ID NO: 1092854 - RNA, 19 nt, Human
gagggagggaggagccugc

SEQ ID NO: 1092855 - RNA, 21 nt, Human
gaggugggaggaucgcuugag

SEQ ID NO: 1092856 - RNA, 19 nt, Human
gagguucugggcggacaug

SEQ ID NO: 1092857 - RNA, 24 nt, Human
gaucacuugagcccaagaguucaa

SEQ ID NO: 1092858 - RNA, 26 nt, Human
gaucacuugagcccaagaguucaagg

SEQ ID NO: 1092859 - RNA, 19 nt, Human
gaugacaggcuugagccac

SEQ ID NO: 1092860 - RNA, 19 nt, Human
gauggcaccuguaguccca

SEQ ID NO: 1092861 - RNA, 20 nt, Human
gcagcagcacugcagggcag

SEQ ID NO: 1092862 - RNA, 22 nt, Human
gcccuacuaccagggaagguug

SEQ ID NO: 1092863 - RNA, 23 nt, Human
gcuaugaucacaccacugcacuu

SEQ ID NO: 1092864 - RNA, 23 nt, Human
ggaggcuuccuggaggaggcggc

SEQ ID NO: 1092865 - RNA, 23 nt, Human
ggaucacuugagcccaagaguuc

SEQ ID NO: 1092866 - RNA, 19 nt, Human
ggaugccacgaguccaaaa

SEQ ID NO: 1092867 - RNA, 22 nt, Human
ggcaaacaaaucagggaaaaug

SEQ ID NO: 1092868 - RNA, 19 nt, Human
ggcaccuguagucccagcu

SEQ ID NO: 1092869 - RNA, 21 nt, Human
ggcagcagcacugcagggcag

SEQ ID NO: 1092870 - RNA, 21 nt, Human
ggcggccacagggcagcuguc

SEQ ID NO: 1092871 - RNA, 24 nt, Human
ggcuggucuugaacuccuguccuc

SEQ ID NO: 1092872 - RNA, 18 nt, Human
gggaggcugaggugggag

SEQ ID NO: 1092873 - RNA, 22 nt, Human
gggaggcugaggugggaggauc

SEQ ID NO: 1092874 - RNA, 22 nt, Human
gggcagcagcacugcagggcag

SEQ ID NO: 1092875 - RNA, 18 nt, Human
ggggcaggacacugucca

SEQ ID NO: 1092876 - RNA, 19 nt, Human
gggggcuccacgccccugc

SEQ ID NO: 1092877 - RNA, 24 nt, Human
guccucaggugauccacccgccuc

SEQ ID NO: 1092878 - RNA, 24 nt, Human
gucugauggcaccuguagucccag

SEQ ID NO: 1092879 - RNA, 24 nt, Human
gugauccacccgccucggccuccc

SEQ ID NO: 1092880 - RNA, 18 nt, Human
gugcugggaugacaggcu

SEQ ID NO: 1092881 - RNA, 21 nt, Human
guugcauucugagguucuggg

SEQ ID NO: 1092882 - RNA, 20 nt, Human
uaacacuuugggaggccaag

SEQ ID NO: 1092883 - RNA, 23 nt, Human
uaacacuuugggaggccaaggcg

SEQ ID NO: 1092884 - RNA, 23 nt, Human
ucacuugagcccaagaguucaag

SEQ ID NO: 1092885 - RNA, 18 nt, Human
ucaggagucaacacagau

SEQ ID NO: 1092886 - RNA, 21 nt, Human
ucagggagacgcaggugcugg

SEQ ID NO: 1092887 - RNA, 19 nt, Human
ucagugccgggcgccgcug

SEQ ID NO: 1092888 - RNA, 21 nt, Human
ucagugccgggcgccgcugug

SEQ ID NO: 1092889 - RNA, 23 nt, Human
uccaaggaggaggcuuccuggag

SEQ ID NO: 1092890 - RNA, 21 nt, Human
uccacgccccugcugcggccg

SEQ ID NO: 1092891 - RNA, 24 nt, Human
uccaggaugcugcggccaggccag

SEQ ID NO: 1092892 - RNA, 19 nt, Human
uccauauagccauguugcc

SEQ ID NO: 1092893 - RNA, 24 nt, Human
ucccacagugcugggaugacaggc

SEQ ID NO: 1092894 - RNA, 25 nt, Human
uccccagauccuuaauuacaucugc

SEQ ID NO: 1092895 - RNA, 21 nt, Human
ucccucccucuuccagcucug

SEQ ID NO: 1092896 - RNA, 22 nt, Human
ucccuuuucauuucccucugag

SEQ ID NO: 1092897 - RNA, 20 nt, Human
uccgucugggcucccggggc

SEQ ID NO: 1092898 - RNA, 19 nt, Human
uccuggggcugcuguagug

SEQ ID NO: 1092899 - RNA, 20 nt, Human
uccuggggcugcuguagugc

SEQ ID NO: 1092900 - RNA, 24 nt, Human
ucgcuugagcccaggcauuagagg

SEQ ID NO: 1092901 - RNA, 24 nt, Human
ucgggaggcugaggugggaggauc

SEQ ID NO: 1092902 - RNA, 20 nt, Human
ucugcaaagcccuacuaccg

SEQ ID NO: 1092903 - RNA, 24 nt, Human
ucugcacguuucccugcucugucc

SEQ ID NO: 1092904 - RNA, 19 nt, Human
ucugucucuauucugcucu

SEQ ID NO: 1092905 - RNA, 18 nt, Human
ucugucuuucucguuccc

SEQ ID NO: 1092906 - RNA, 23 nt, Human
ugaaaaguugaugaggcaaacaa

SEQ ID NO: 1092907 - RNA, 18 nt, Human
ugaccucguccccagauc

SEQ ID NO: 1092908 - RNA, 24 nt, Human
ugaccucguccccagauccuuaau

SEQ ID NO: 1092909 - RNA, 23 nt, Human
ugagcccaagaguucaaggccag

SEQ ID NO: 1092910 - RNA, 18 nt, Human
ugaggugggaggaucgcu

SEQ ID NO: 1092911 - RNA, 20 nt, Human
ugaggugggaggaucgcuug

SEQ ID NO: 1092912 - RNA, 23 nt, Human
ugaggugggaggaucgcuugagc

SEQ ID NO: 1092913 - RNA, 24 nt, Human
ugaggugggaggaucgcuugagcc

SEQ ID NO: 1092914 - RNA, 19 nt, Human
ugauggcaccuguaguccc

SEQ ID NO: 1092915 - RNA, 19 nt, Human
ugcagggcaggcucugagg

SEQ ID NO: 1092916 - RNA, 24 nt, Human
ugcccaggcuggucuugaacuccu

SEQ ID NO: 1092917 - RNA, 22 nt, Human
ugccucuguccucacagggccu

SEQ ID NO: 1092918 - RNA, 18 nt, Human
ugcggccaggccaggcgc

SEQ ID NO: 1092919 - RNA, 24 nt, Human
ugcucugcucuucauggaggaaca

SEQ ID NO: 1092920 - RNA, 22 nt, Human
ugcugggaugacaggcuugagc

SEQ ID NO: 1092921 - RNA, 20 nt, Human
uggaggaccccggccacuug

SEQ ID NO: 1092922 - RNA, 24 nt, Human
ugggaggccaaggcgagaggauca

SEQ ID NO: 1092923 - RNA, 22 nt, Human
ugggaugacaggcuugagccac

SEQ ID NO: 1092924 - RNA, 24 nt, Human
ugggaugacaggcuugagccacug

SEQ ID NO: 1092925 - RNA, 22 nt, Human
ugggcagcacgcagcacacucc

SEQ ID NO: 1092926 - RNA, 18 nt, Human
ugggggcaggacacuguc

SEQ ID NO: 1092927 - RNA, 22 nt, Human
ugggugcaggggcggccacagg

SEQ ID NO: 1092928 - RNA, 23 nt, Human
uggucuugaacuccuguccucag

SEQ ID NO: 1092929 - RNA, 22 nt, Human
ugguggcucaagccugccaucc

SEQ ID NO: 1092930 - RNA, 24 nt, Human
uguccucaggugauccacccgccu

SEQ ID NO: 1092931 - RNA, 18 nt, Human
uguggaggaccccggcca

SEQ ID NO: 1092932 - RNA, 19 nt, Human
uguggaggaccccggccac

SEQ ID NO: 1092933 - RNA, 20 nt, Human
uucucguucccgcucacgcc

SEQ ID NO: 1092934 - RNA, 24 nt, Human
uugaaugagucaacaacaaaaugc

SEQ ID NO: 1092935 - RNA, 18 nt, Human
uuuugggggcaggacacu

SEQ ID NO: 1092936 - RNA, 19 nt, Human
aaaacagugcacugccucc

SEQ ID NO: 1092937 - RNA, 21 nt, Human
aaacagugcacugccuccuca

SEQ ID NO: 1092938 - RNA, 24 nt, Human
aaggagguggugggcccuggacac

SEQ ID NO: 1092939 - RNA, 20 nt, Human
accccacgggcaccccggcc

SEQ ID NO: 1092940 - RNA, 25 nt, Human
acccucaucaccccugaggccccac

SEQ ID NO: 1092941 - RNA, 25 nt, Human
acccuggacccccuucccgaggccu

SEQ ID NO: 1092942 - RNA, 26 nt, Human
acccuggacccccuucccgaggccuc

SEQ ID NO: 1092943 - RNA, 23 nt, Human
agaaacuccucaaccaggaagga

SEQ ID NO: 1092944 - RNA, 24 nt, Human
agaaggcagguccaaggcacagca

SEQ ID NO: 1092945 - RNA, 19 nt, Human
aggaaggagguggugggcc

SEQ ID NO: 1092946 - RNA, 22 nt, Human
aggaaggagguggugggcccug

SEQ ID NO: 1092947 - RNA, 24 nt, Human
aggaaggagguggugggcccugga

SEQ ID NO: 1092948 - RNA, 20 nt, Human
aggccaagguggguggauca

SEQ ID NO: 1092949 - RNA, 21 nt, Human
aggccucuccaggccacuccc

SEQ ID NO: 1092950 - RNA, 18 nt, Human
aggcucagccacccugga

SEQ ID NO: 1092951 - RNA, 22 nt, Human
agguucuagaggcugcgggucu

SEQ ID NO: 1092952 - RNA, 18 nt, Human
agguuuuggagauaaagc

SEQ ID NO: 1092953 - RNA, 19 nt, Human
agguuuuggagauaaagcu

SEQ ID NO: 1092954 - RNA, 21 nt, Human
agguuuuggagauaaagcuga

SEQ ID NO: 1092955 - RNA, 21 nt, Human
auuuuguucucugggaagugg

SEQ ID NO: 1092956 - RNA, 22 nt, Human
caagguggguggaucaugaggu

SEQ ID NO: 1092957 - RNA, 24 nt, Human
caagguggguggaucaugagguca

SEQ ID NO: 1092958 - RNA, 21 nt, Human
cacaggccgguggaguggagc

SEQ ID NO: 1092959 - RNA, 20 nt, Human
cacgcaccucugcggcgucc

SEQ ID NO: 1092960 - RNA, 20 nt, Human
cagagcccccaaaacagugc

SEQ ID NO: 1092961 - RNA, 24 nt, Human
cagcacuuuguaaggccaaggugg

SEQ ID NO: 1092962 - RNA, 22 nt, Human
cagcgugggaccggccuccacu

SEQ ID NO: 1092963 - RNA, 19 nt, Human
caucaacacgcaccucugc

SEQ ID NO: 1092964 - RNA, 23 nt, Human
ccaugagggccgguguccccuag

SEQ ID NO: 1092965 - RNA, 23 nt, Human
ccccaaaacagugcacugccucc

SEQ ID NO: 1092966 - RNA, 20 nt, Human
ccccacgggcaccccggccc

SEQ ID NO: 1092967 - RNA, 22 nt, Human
cccccaaaacagugcacugccu

SEQ ID NO: 1092968 - RNA, 20 nt, Human
ccccugaggccccaccucca

SEQ ID NO: 1092969 - RNA, 25 nt, Human
ccccugaggccccaccuccacgucc

SEQ ID NO: 1092970 - RNA, 22 nt, Human
cccggccccgucagaaggcagg

SEQ ID NO: 1092971 - RNA, 25 nt, Human
cccuggacccccuucccgaggccuc

SEQ ID NO: 1092972 - RNA, 19 nt, Human
cccugggacugcgccugac

SEQ ID NO: 1092973 - RNA, 23 nt, Human
ccucaucaccccugaggccccac

SEQ ID NO: 1092974 - RNA, 19 nt, Human
ccucugcggcguccuccuc

SEQ ID NO: 1092975 - RNA, 20 nt, Human
ccuguaccccggggucucug

SEQ ID NO: 1092976 - RNA, 20 nt, Human
ccugucaucccagcacuuug

SEQ ID NO: 1092977 - RNA, 20 nt, Human
ccuucagcccaucgcugugu

SEQ ID NO: 1092978 - RNA, 22 nt, Human
cggggagacguaacaagaauca

SEQ ID NO: 1092979 - RNA, 19 nt, Human
cuaggaggcuccacccugg

SEQ ID NO: 1092980 - RNA, 19 nt, Human
cucacucccugcgggaugc

SEQ ID NO: 1092981 - RNA, 22 nt, Human
cucaucuaacccucaucacccc

SEQ ID NO: 1092982 - RNA, 24 nt, Human
cucaugccugucaucccagcacuu

SEQ ID NO: 1092983 - RNA, 18 nt, Human
cuccuguaccccgggguc

SEQ ID NO: 1092984 - RNA, 23 nt, Human
cugcgggucuaagaucaaggucc

SEQ ID NO: 1092985 - RNA, 23 nt, Human
cugggcagcuccagcauucucuc

SEQ ID NO: 1092986 - RNA, 23 nt, Human
cuucaagucgggcaggccgggcu

SEQ ID NO: 1092987 - RNA, 18 nt, Human
cuucccgaggccucucca

SEQ ID NO: 1092988 - RNA, 18 nt, Human
gagcaucugccacuaugg

SEQ ID NO: 1092989 - RNA, 21 nt, Human
gcaggaccggccgggcacggu

SEQ ID NO: 1092990 - RNA, 19 nt, Human
gccaagguggguggaucau

SEQ ID NO: 1092991 - RNA, 18 nt, Human
gccccaccuccacguccc

SEQ ID NO: 1092992 - RNA, 22 nt, Human
gccgggcacgguggcucaugcc

SEQ ID NO: 1092993 - RNA, 23 nt, Human
gcuagaguugcccacucaggugu

SEQ ID NO: 1092994 - RNA, 21 nt, Human
ggagcuguaugucucagccag

SEQ ID NO: 1092995 - RNA, 19 nt, Human
ggcagcuccagcauucucu

SEQ ID NO: 1092996 - RNA, 21 nt, Human
ggccgggcacgguggcucaug

SEQ ID NO: 1092997 - RNA, 23 nt, Human
ggccgggcacgguggcucaugcc

SEQ ID NO: 1092998 - RNA, 20 nt, Human
gggaccccacgggcaccccg

SEQ ID NO: 1092999 - RNA, 20 nt, Human
gggcaccccggccccgucag

SEQ ID NO: 1093000 - RNA, 24 nt, Human
gggcacgguggcucaugccuguca

SEQ ID NO: 1093001 - RNA, 20 nt, Human
ggggucuagaccucccuggg

SEQ ID NO: 1093002 - RNA, 23 nt, Human
gguggcucaugccugucauccca

SEQ ID NO: 1093003 - RNA, 24 nt, Human
gguggcucaugccugucaucccag

SEQ ID NO: 1093004 - RNA, 19 nt, Human
guggguggaucaugagguc

SEQ ID NO: 1093005 - RNA, 19 nt, Human
uaaaaagcuucccccucau

SEQ ID NO: 1093006 - RNA, 20 nt, Human
uaccccaccuccuggcacaa

SEQ ID NO: 1093007 - RNA, 21 nt, Human
uaccccggggucucugggcac

SEQ ID NO: 1093008 - RNA, 18 nt, Human
uaggaggcuccacccugg

SEQ ID NO: 1093009 - RNA, 21 nt, Human
ucacacccugggcagcuccag

SEQ ID NO: 1093010 - RNA, 24 nt, Human
ucacacccugggcagcuccagcau

SEQ ID NO: 1093011 - RNA, 24 nt, Human
ucagaaggcagguccaaggcacag

SEQ ID NO: 1093012 - RNA, 22 nt, Human
ucaugccugucaucccagcacu

SEQ ID NO: 1093013 - RNA, 18 nt, Human
uccagggucggagggcuc

SEQ ID NO: 1093014 - RNA, 21 nt, Human
ucccagaaacuccucaaccag

SEQ ID NO: 1093015 - RNA, 22 nt, Human
ucccccucauuugcagucauuu

SEQ ID NO: 1093016 - RNA, 24 nt, Human
ucccugcccuucuaggaggcucca

SEQ ID NO: 1093017 - RNA, 22 nt, Human
ucccugggacugcgccugaccc

SEQ ID NO: 1093018 - RNA, 19 nt, Human
uccuguaccccggggucuc

SEQ ID NO: 1093019 - RNA, 19 nt, Human
ucucugggcacaggccggu

SEQ ID NO: 1093020 - RNA, 18 nt, Human
ucugcggcguccuccucc

SEQ ID NO: 1093021 - RNA, 18 nt, Human
ugaguugauacauugggg

SEQ ID NO: 1093022 - RNA, 22 nt, Human
ugcagguucuagaggcugcggg

SEQ ID NO: 1093023 - RNA, 19 nt, Human
ugcccacucagguguggga

SEQ ID NO: 1093024 - RNA, 21 nt, Human
uggcucaugccugucauccca

SEQ ID NO: 1093025 - RNA, 24 nt, Human
uggcucaugccugucaucccagca

SEQ ID NO: 1093026 - RNA, 19 nt, Human
ugggaagugguagguuuug

SEQ ID NO: 1093027 - RNA, 23 nt, Human
ugggaagugguagguuuuggaga

SEQ ID NO: 1093028 - RNA, 21 nt, Human
ugggaccccacgggcaccccg

SEQ ID NO: 1093029 - RNA, 18 nt, Human
ugggacugcgccugaccc

SEQ ID NO: 1093030 - RNA, 24 nt, Human
uguaaggccaagguggguggauca

SEQ ID NO: 1093031 - RNA, 21 nt, Human
uguuuuccaaugauaauuuca

SEQ ID NO: 1093032 - RNA, 19 nt, Human
uucaaaggcuagaguugcc

SEQ ID NO: 1093033 - RNA, 22 nt, Human
uucagagcccccaaaacagugc

SEQ ID NO: 1093034 - RNA, 21 nt, Human
uucucccagaaacuccucaac

SEQ ID NO: 1093035 - RNA, 22 nt, Human
uuggggucuagaccucccuggg

SEQ ID NO: 1093036 - RNA, 20 nt, Human
uuguguuugcgucuccuccc

SEQ ID NO: 1093037 - RNA, 23 nt, Human
aaaaaaccaaaaaagccauuacg

SEQ ID NO: 1093038 - RNA, 23 nt, Human
aaacaaaaaaccaaaaaagccau

SEQ ID NO: 1093039 - RNA, 21 nt, Human
aaacaaaacaaaaaaccaaaa

SEQ ID NO: 1093040 - RNA, 19 nt, Human
aacacggugaaaccccguc

SEQ ID NO: 1093041 - RNA, 20 nt, Human
aacacggugaaaccccgucu

SEQ ID NO: 1093042 - RNA, 21 nt, Human
aacacggugaaaccccgucuc

SEQ ID NO: 1093043 - RNA, 20 nt, Human
aacaugaugaaauccugucu

SEQ ID NO: 1093044 - RNA, 21 nt, Human
aaccacuuaggugcugcccaa

SEQ ID NO: 1093045 - RNA, 24 nt, Human
aacggagugagacuccaucucaga

SEQ ID NO: 1093046 - RNA, 23 nt, Human
aacucuuuauuaaauucucccau

SEQ ID NO: 1093047 - RNA, 21 nt, Human
aagaccaaugggagggaaggc

SEQ ID NO: 1093048 - RNA, 20 nt, Human
aagguggguggaccacaugu

SEQ ID NO: 1093049 - RNA, 24 nt, Human
aagugggcacaucaugaggucagg

SEQ ID NO: 1093050 - RNA, 19 nt, Human
acaaaacaaaaaaccaaaa

SEQ ID NO: 1093051 - RNA, 22 nt, Human
acaaaacaaaaaaccaaaaaag

SEQ ID NO: 1093052 - RNA, 23 nt, Human
acagcacuccagccuggcaacgg

SEQ ID NO: 1093053 - RNA, 25 nt, Human
acagcacuccagccuggcaacggag

SEQ ID NO: 1093054 - RNA, 24 nt, Human
accccgucucuacuaaaaauacaa

SEQ ID NO: 1093055 - RNA, 23 nt, Human
acgagugaaacugugucucaaaa

SEQ ID NO: 1093056 - RNA, 24 nt, Human
acggagugagacuccaucucagaa

SEQ ID NO: 1093057 - RNA, 23 nt, Human
acuccagccuggcaacggaguga

SEQ ID NO: 1093058 - RNA, 23 nt, Human
acuccagccugggcaacgaguga

SEQ ID NO: 1093059 - RNA, 18 nt, Human
acugcacuccagccuggg

SEQ ID NO: 1093060 - RNA, 22 nt, Human
acugcacuccagccugggcaac

SEQ ID NO: 1093061 - RNA, 25 nt, Human
acugcacuccagccugggcaacgag

SEQ ID NO: 1093062 - RNA, 22 nt, Human
agaaaaaaaaaaaaaaggccag

SEQ ID NO: 1093063 - RNA, 24 nt, Human
agaaauaaaaggaagcauucuggc

SEQ ID NO: 1093064 - RNA, 22 nt, Human
agaaguugcagugagccgagau

SEQ ID NO: 1093065 - RNA, 24 nt, Human
agaaguugcagugagccgagauug

SEQ ID NO: 1093066 - RNA, 18 nt, Human
agaguguguucuaaggag

SEQ ID NO: 1093067 - RNA, 25 nt, Human
agcaaccaaagaccaaugggaggga

SEQ ID NO: 1093068 - RNA, 21 nt, Human
agccuggcaacggagugagac

SEQ ID NO: 1093069 - RNA, 23 nt, Human
agccuggcaacggagugagacuc

SEQ ID NO: 1093070 - RNA, 21 nt, Human
agccugggcaacgagugaaac

SEQ ID NO: 1093071 - RNA, 22 nt, Human
agcgggagaggaccacggguca

SEQ ID NO: 1093072 - RNA, 18 nt, Human
agcugggugugguggugc

SEQ ID NO: 1093073 - RNA, 23 nt, Human
agcugggugugguggugcaugcc

SEQ ID NO: 1093074 - RNA, 22 nt, Human
aggaggcaggggaggaaauggg

SEQ ID NO: 1093075 - RNA, 23 nt, Human
aggaguucgaaaccagcguggcc

SEQ ID NO: 1093076 - RNA, 21 nt, Human
aggcagaaguugcagugagcc

SEQ ID NO: 1093077 - RNA, 24 nt, Human
aggcagaaguugcagugagccgag

SEQ ID NO: 1093078 - RNA, 22 nt, Human
aggcaggacaaucgcuugaacc

SEQ ID NO: 1093079 - RNA, 24 nt, Human
aggcaggacaaucgcuugaaccag

SEQ ID NO: 1093080 - RNA, 18 nt, Human
aggcaggagaacugcuug

SEQ ID NO: 1093081 - RNA, 24 nt, Human
aggcaggagaacugcuugaaccua

SEQ ID NO: 1093082 - RNA, 18 nt, Human
aggcaggggaggaaaugg

SEQ ID NO: 1093083 - RNA, 24 nt, Human
aggcaugguggugcaugcccguaa

SEQ ID NO: 1093084 - RNA, 21 nt, Human
aggccaagguggguggaccac

SEQ ID NO: 1093085 - RNA, 21 nt, Human
aggccgaagugggcacaucau

SEQ ID NO: 1093086 - RNA, 23 nt, Human
aggcgaguggggaggaaggaagu

SEQ ID NO: 1093087 - RNA, 21 nt, Human
aggcgaguggggaggaagggg

SEQ ID NO: 1093088 - RNA, 20 nt, Human
aggcugaggcaggacaaucg

SEQ ID NO: 1093089 - RNA, 24 nt, Human
aggcugaggcaggacaaucgcuug

SEQ ID NO: 1093090 - RNA, 24 nt, Human
aggcugaggcaggagaacugcuug

SEQ ID NO: 1093091 - RNA, 18 nt, Human
agggaaggcaggcaagaa

SEQ ID NO: 1093092 - RNA, 21 nt, Human
aguggccucuccccagaugac

SEQ ID NO: 1093093 - RNA, 23 nt, Human
agugggcacaucaugaggucagg

SEQ ID NO: 1093094 - RNA, 24 nt, Human
auagcgccacagcacuccagccug

SEQ ID NO: 1093095 - RNA, 24 nt, Human
auugcgccacugcacuccagccug

SEQ ID NO: 1093096 - RNA, 23 nt, Human
caaaaaaccaaaaaagccauuac

SEQ ID NO: 1093097 - RNA, 24 nt, Human
caacacggugaaaccccgucucua

SEQ ID NO: 1093098 - RNA, 24 nt, Human
caacaugaugaaauccugucucua

SEQ ID NO: 1093099 - RNA, 24 nt, Human
caacuacuugggaggcugaggcag

SEQ ID NO: 1093100 - RNA, 24 nt, Human
caaggccugagagagacccacagc

SEQ ID NO: 1093101 - RNA, 26 nt, Human
caagguggguggaccacaugugguca

SEQ ID NO: 1093102 - RNA, 18 nt, Human
caaguaaaaaccugcaaa

SEQ ID NO: 1093103 - RNA, 24 nt, Human
caaguaaaaaccugcaaacucuuu

SEQ ID NO: 1093104 - RNA, 20 nt, Human
cacagcacuccagccuggca

SEQ ID NO: 1093105 - RNA, 23 nt, Human
cacauaauugaggccaagguggg

SEQ ID NO: 1093106 - RNA, 19 nt, Human
cacauguggucaggaguuc

SEQ ID NO: 1093107 - RNA, 24 nt, Human
caccagauggcuuuggggagcucu

SEQ ID NO: 1093108 - RNA, 21 nt, Human
cacuccagccuggcaacggag

SEQ ID NO: 1093109 - RNA, 21 nt, Human
cacuccagccuggcaacggag

SEQ ID NO: 1093110 - RNA, 23 nt, Human
cacuccagccuggcaacggagug

SEQ ID NO: 1093111 - RNA, 21 nt, Human
cacuccagccugggcaacgag

SEQ ID NO: 1093112 - RNA, 21 nt, Human
cacuccagccugggcaacgag

SEQ ID NO: 1093113 - RNA, 23 nt, Human
cacuccagccugggcaacgagug

SEQ ID NO: 1093114 - RNA, 18 nt, Human
cacugcacuccagccugg

SEQ ID NO: 1093115 - RNA, 19 nt, Human
cacugcacuccagccuggg

SEQ ID NO: 1093116 - RNA, 21 nt, Human
cacugcacuccagccugggca

SEQ ID NO: 1093117 - RNA, 23 nt, Human
cacugcacuccagccugggcaac

SEQ ID NO: 1093118 - RNA, 24 nt, Human
cacugcacuccagccugggcaacg

SEQ ID NO: 1093119 - RNA, 27 nt, Human
cacugcacuccagccugggcaacgagu

SEQ ID NO: 1093120 - RNA, 18 nt, Human
cacuuuggaaggccgaag

SEQ ID NO: 1093121 - RNA, 18 nt, Human
cacuuuggaaggccgaag

SEQ ID NO: 1093122 - RNA, 19 nt, Human
cagaaacaaaacaaaaaac

SEQ ID NO: 1093123 - RNA, 20 nt, Human
cagaaacaaaacaaaaaacc

SEQ ID NO: 1093124 - RNA, 20 nt, Human
cagcacuccagccuggcaac

SEQ ID NO: 1093125 - RNA, 23 nt, Human
caggauccugucaccaccagccu

SEQ ID NO: 1093126 - RNA, 21 nt, Human
caggccgggcgugguggcuca

SEQ ID NO: 1093127 - RNA, 24 nt, Human
caugcccguaaucccaacuacuug

SEQ ID NO: 1093128 - RNA, 22 nt, Human
cauucuggccuuucagguuuuu

SEQ ID NO: 1093129 - RNA, 24 nt, Human
ccaaaaaagccauuacggccaaaa

SEQ ID NO: 1093130 - RNA, 21 nt, Human
ccaaagaccaaugggagggaa

SEQ ID NO: 1093131 - RNA, 23 nt, Human
ccaagaaggggugcaguuagagg

SEQ ID NO: 1093132 - RNA, 19 nt, Human
ccacagcacuccagccugg

SEQ ID NO: 1093133 - RNA, 20 nt, Human
ccacagcacuccagccuggc

SEQ ID NO: 1093134 - RNA, 23 nt, Human
ccacagcacuccagccuggcaac

SEQ ID NO: 1093135 - RNA, 18 nt, Human
ccacauguggucaggagu

SEQ ID NO: 1093136 - RNA, 20 nt, Human
ccacugcacuccagccuggg

SEQ ID NO: 1093137 - RNA, 21 nt, Human
ccacugcacuccagccugggc

SEQ ID NO: 1093138 - RNA, 23 nt, Human
ccacugcacuccagccugggcaa

SEQ ID NO: 1093139 - RNA, 24 nt, Human
ccacugcacuccagccugggcaac

SEQ ID NO: 1093140 - RNA, 21 nt, Human
ccaggcaugguggugcaugcc

SEQ ID NO: 1093141 - RNA, 25 nt, Human
ccaggccgggcgugguggcucacgc

SEQ ID NO: 1093142 - RNA, 25 nt, Human
ccaggccgggcgugguggcucacgg

SEQ ID NO: 1093143 - RNA, 19 nt, Human
cccacaaugaccucaccag

SEQ ID NO: 1093144 - RNA, 20 nt, Human
cccacaaugaccucaccaga

SEQ ID NO: 1093145 - RNA, 19 nt, Human
cccggccccacgcccucua

SEQ ID NO: 1093146 - RNA, 19 nt, Human
cccggccccacgcccucuc

SEQ ID NO: 1093147 - RNA, 23 nt, Human
ccuggacaacacggugaaacccc

SEQ ID NO: 1093148 - RNA, 24 nt, Human
ccuggacaacacggugaaaccccg

SEQ ID NO: 1093149 - RNA, 22 nt, Human
ccuguaaucccagcuacuccgg

SEQ ID NO: 1093150 - RNA, 23 nt, Human
ccuguaaucccagcuacuccgga

SEQ ID NO: 1093151 - RNA, 21 nt, Human
ccugucaccaccagccugagc

SEQ ID NO: 1093152 - RNA, 22 nt, Human
ccugucaccaccagccugagca

SEQ ID NO: 1093153 - RNA, 24 nt, Human
cgaagugggcacaucaugagguca

SEQ ID NO: 1093154 - RNA, 24 nt, Human
cgccacugcacuccagccugggca

SEQ ID NO: 1093155 - RNA, 24 nt, Human
cguggccaacaugaugaaauccug

SEQ ID NO: 1093156 - RNA, 18 nt, Human
cuaguggagaggaggcga

SEQ ID NO: 1093157 - RNA, 18 nt, Human
cucaaaagaaaaaaaaaa

SEQ ID NO: 1093158 - RNA, 22 nt, Human
cucagaaacaaaacaaaaaacc

SEQ ID NO: 1093159 - RNA, 20 nt, Human
cucagacccggccccacgcc

SEQ ID NO: 1093160 - RNA, 24 nt, Human
cugugucucaaaagaaaaaaaaaa

SEQ ID NO: 1093161 - RNA, 23 nt, Human
cuuuggaaggccgaagugggcac

SEQ ID NO: 1093162 - RNA, 24 nt, Human
gaccacauguggucaggaguucga

SEQ ID NO: 1093163 - RNA, 23 nt, Human
gaccucaccagauggcuuugggg

SEQ ID NO: 1093164 - RNA, 23 nt, Human
gagauugcgccacugcacuccag

SEQ ID NO: 1093165 - RNA, 20 nt, Human
gaggaaggaccaagaagggg

SEQ ID NO: 1093166 - RNA, 21 nt, Human
gauggcuuuggggagcucuuc

SEQ ID NO: 1093167 - RNA, 23 nt, Human
gcacuccagccuggcaacggagu

SEQ ID NO: 1093168 - RNA, 24 nt, Human
gccaacaugaugaaauccugucuc

SEQ ID NO: 1093169 - RNA, 22 nt, Human
gccacugcacuccagccugggc

SEQ ID NO: 1093170 - RNA, 24 nt, Human
gccacugcacuccagccugggcaa

SEQ ID NO: 1093171 - RNA, 24 nt, Human
gcccguaaucccaacuacuuggga

SEQ ID NO: 1093172 - RNA, 23 nt, Human
gcgccacagcacuccagccuggc

SEQ ID NO: 1093173 - RNA, 22 nt, Human
ggagaacugcuugaaccuagga

SEQ ID NO: 1093174 - RNA, 18 nt, Human
ggcacaucaugaggucag

SEQ ID NO: 1093175 - RNA, 24 nt, Human
gggcgugguggcucacgccuguaa

SEQ ID NO: 1093176 - RNA, 24 nt, Human
gggugugguggugcaugccuguaa

SEQ ID NO: 1093177 - RNA, 19 nt, Human
ggugacaaauaaucagucc

SEQ ID NO: 1093178 - RNA, 21 nt, Human
ggugcaugccuguaaucccag

SEQ ID NO: 1093179 - RNA, 20 nt, Human
gguggcucacgccuguaaug

SEQ ID NO: 1093180 - RNA, 24 nt, Human
gguggugcaugccuguaaucccag

SEQ ID NO: 1093181 - RNA, 21 nt, Human
gucucaaaagaaaaaaaaaaa

SEQ ID NO: 1093182 - RNA, 19 nt, Human
guugcagugagccgagauu

SEQ ID NO: 1093183 - RNA, 22 nt, Human
uaaaaaccugcaaacucuuuau

SEQ ID NO: 1093184 - RNA, 19 nt, Human
uacuccggaggcugaggca

SEQ ID NO: 1093185 - RNA, 24 nt, Human
uaggaggcagaaguugcagugagc

SEQ ID NO: 1093186 - RNA, 20 nt, Human
uaucuauuaucugaagucug

SEQ ID NO: 1093187 - RNA, 23 nt, Human
ucacaccacaggccuggaggaug

SEQ ID NO: 1093188 - RNA, 23 nt, Human
ucaccagauggcuuuggggagcu

SEQ ID NO: 1093189 - RNA, 24 nt, Human
ucaugaggucaggagauggagacc

SEQ ID NO: 1093190 - RNA, 22 nt, Human
uccagccuggcaacggagugag

SEQ ID NO: 1093191 - RNA, 23 nt, Human
uccagccuggcaacggagugaga

SEQ ID NO: 1093192 - RNA, 22 nt, Human
ucccugguccccacaaugaccu

SEQ ID NO: 1093193 - RNA, 26 nt, Human
ucccugguccccacaaugaccucacc

SEQ ID NO: 1093194 - RNA, 25 nt, Human
uccuggacaacacggugaaaccccg

SEQ ID NO: 1093195 - RNA, 20 nt, Human
ucggaggauucgguaagcug

SEQ ID NO: 1093196 - RNA, 22 nt, Human
ucggggcagaagucacaccaca

SEQ ID NO: 1093197 - RNA, 20 nt, Human
ucuagggcuggcugacuucc

SEQ ID NO: 1093198 - RNA, 20 nt, Human
ucuccccagaugacucacua

SEQ ID NO: 1093199 - RNA, 22 nt, Human
ucucuacuaaaaauaagaaaaa

SEQ ID NO: 1093200 - RNA, 21 nt, Human
ucucuacuaaaaauacaaaaa

SEQ ID NO: 1093201 - RNA, 21 nt, Human
ugaaauacaaguaaauauacc

SEQ ID NO: 1093202 - RNA, 22 nt, Human
ugacuuccaagguuccuggucc

SEQ ID NO: 1093203 - RNA, 19 nt, Human
ugagagagacccacagcac

SEQ ID NO: 1093204 - RNA, 22 nt, Human
ugagccgagauugcgccacugc

SEQ ID NO: 1093205 - RNA, 24 nt, Human
ugaggcaggacaaucgcuugaacc

SEQ ID NO: 1093206 - RNA, 24 nt, Human
ugaggcaggagaacugcuugaacc

SEQ ID NO: 1093207 - RNA, 25 nt, Human
ugaggcaggagaacugcuugaaccu

SEQ ID NO: 1093208 - RNA, 24 nt, Human
ugcacauaauugaggccaaggugg

SEQ ID NO: 1093209 - RNA, 23 nt, Human
ugcccguaaucccaacuacuugg

SEQ ID NO: 1093210 - RNA, 24 nt, Human
ugcccguaaucccaacuacuuggg

SEQ ID NO: 1093211 - RNA, 19 nt, Human
ugccuguaaucccagcuac

SEQ ID NO: 1093212 - RNA, 24 nt, Human
ugccuguaaucccagcuacuccgg

SEQ ID NO: 1093213 - RNA, 24 nt, Human
uggaaggccgaagugggcacauca

SEQ ID NO: 1093214 - RNA, 24 nt, Human
uggaccacauguggucaggaguuc

SEQ ID NO: 1093215 - RNA, 23 nt, Human
uggagaggaggcgaguggggagg

SEQ ID NO: 1093216 - RNA, 20 nt, Human
uggccaacaugaugaaaucc

SEQ ID NO: 1093217 - RNA, 24 nt, Human
uggccaacaugaugaaauccuguc

SEQ ID NO: 1093218 - RNA, 19 nt, Human
ugggaagggaaggccucuu

SEQ ID NO: 1093219 - RNA, 20 nt, Human
ugggaagggaaggccucuuu

SEQ ID NO: 1093220 - RNA, 20 nt, Human
ugggaagggaaggccucuuu

SEQ ID NO: 1093221 - RNA, 24 nt, Human
ugggaagggaaggccucuuuucag

SEQ ID NO: 1093222 - RNA, 24 nt, Human
ugggaagggaaggccucuuuucag

SEQ ID NO: 1093223 - RNA, 18 nt, Human
ugggaggcugaggcagga

SEQ ID NO: 1093224 - RNA, 19 nt, Human
ugggaggcugaggcaggag

SEQ ID NO: 1093225 - RNA, 24 nt, Human
uggguggaccacauguggucagga

SEQ ID NO: 1093226 - RNA, 21 nt, Human
uggugcaugccuguaauccca

SEQ ID NO: 1093227 - RNA, 22 nt, Human
uggugcaugccuguaaucccag

SEQ ID NO: 1093228 - RNA, 18 nt, Human
ugguggcucacgccugua

SEQ ID NO: 1093229 - RNA, 24 nt, Human
ugguggugcaugcccguaauccca

SEQ ID NO: 1093230 - RNA, 24 nt, Human
ugguggugcaugccuguaauccca

SEQ ID NO: 1093231 - RNA, 21 nt, Human
uguggaggaaggaccaagaag

SEQ ID NO: 1093232 - RNA, 24 nt, Human
uguggaggaaggaccaagaagggg

SEQ ID NO: 1093233 - RNA, 21 nt, Human
uguggucaggaguucgaaacc

SEQ ID NO: 1093234 - RNA, 18 nt, Human
uuacaaaaccacuuaggu

SEQ ID NO: 1093235 - RNA, 22 nt, Human
uuagcugggugugguggugcau

SEQ ID NO: 1093236 - RNA, 24 nt, Human
uuagcugggugugguggugcaugc

SEQ ID NO: 1093237 - RNA, 18 nt, Human
uucaguggccucucccca

SEQ ID NO: 1093238 - RNA, 22 nt, Human
uucgaaaccagcguggccaaca

SEQ ID NO: 1093239 - RNA, 18 nt, Human
uugcagugagccgagauu

SEQ ID NO: 1093240 - RNA, 19 nt, Human
uugcagugagccgagauug

SEQ ID NO: 1093241 - RNA, 20 nt, Human
uugcagugagccgagauugc

SEQ ID NO: 1093242 - RNA, 22 nt, Human
uugcagugagccgagauugcgc

SEQ ID NO: 1093243 - RNA, 23 nt, Human
uugcgccacugcacuccagccug

SEQ ID NO: 1093244 - RNA, 19 nt, Human
uuuggaaggccgaaguggg

SEQ ID NO: 1093245 - RNA, 25 nt, Human
uuuuucaaacucacaagauguugaa

SEQ ID NO: 1093246 - RNA, 23 nt, Human
ucccuuuaaguuacgacgggaau

SEQ ID NO: 1093247 - RNA, 20 nt, Human
ugcuuaagagcccaugcagg

SEQ ID NO: 1093248 - RNA, 21 nt, Human
aacuugcuuaugagaauggga

SEQ ID NO: 1093249 - RNA, 22 nt, Human
aagcagcacucacacagucuca

SEQ ID NO: 1093250 - RNA, 22 nt, Human
caaucacuuaaccucucugggc

SEQ ID NO: 1093251 - RNA, 25 nt, Human
cacaaauccacugggugcugcucuc

SEQ ID NO: 1093252 - RNA, 21 nt, Human
ccacugggugcugcucucagc

SEQ ID NO: 1093253 - RNA, 23 nt, Human
cugggccucaguuuccucaucug

SEQ ID NO: 1093254 - RNA, 18 nt, Human
gagaaugggaaguaagga

SEQ ID NO: 1093255 - RNA, 23 nt, Human
gcagcacucacacagucucauac

SEQ ID NO: 1093256 - RNA, 18 nt, Human
ggaaacuugcuuaugaga

SEQ ID NO: 1093257 - RNA, 19 nt, Human
ggcaggaacuuauaucuuc

SEQ ID NO: 1093258 - RNA, 18 nt, Human
uacaauaugcugugagag

SEQ ID NO: 1093259 - RNA, 21 nt, Human
uccucaucugccacaaaucca

SEQ ID NO: 1093260 - RNA, 21 nt, Human
ugcagggaccauggguuuuua

SEQ ID NO: 1093261 - RNA, 24 nt, Human
aaccccuaauguucuuuuuuuccc

SEQ ID NO: 1093262 - RNA, 22 nt, Human
aucuggaggguacaggagccug

SEQ ID NO: 1093263 - RNA, 19 nt, Human
cagcuuccugagguacaga

SEQ ID NO: 1093264 - RNA, 21 nt, Human
cccuccuucaucucucugguc

SEQ ID NO: 1093265 - RNA, 23 nt, Human
cccuccuucaucucucuggucuc

SEQ ID NO: 1093266 - RNA, 21 nt, Human
cuccacauggcaacgaacacc

SEQ ID NO: 1093267 - RNA, 24 nt, Human
uacaauucaaccccuaauguucuu

SEQ ID NO: 1093268 - RNA, 18 nt, Human
uaucuggaggguacagga

SEQ ID NO: 1093269 - RNA, 19 nt, Human
ucuggucuccugcugguac

SEQ ID NO: 1093270 - RNA, 27 nt, Human
ugaaaagcagcuuccugagguacagag

SEQ ID NO: 1093271 - RNA, 24 nt, Human
ugggaaggaucucuccacauggca

SEQ ID NO: 1093272 - RNA, 23 nt, Human
ugggcaaagaggauuuccaggac

SEQ ID NO: 1093273 - RNA, 20 nt, Human
uguagcaucuuucuucuugg

SEQ ID NO: 1093274 - RNA, 22 nt, Human
uguucuuuuuuucccuccuuca

SEQ ID NO: 1093275 - RNA, 18 nt, Human
uuccaggacacuuuguag

SEQ ID NO: 1093276 - RNA, 23 nt, Human
uucccuccuucaucucucugguc

SEQ ID NO: 1093277 - RNA, 25 nt, Human
caaaaaaggguaggagccgcgagac

SEQ ID NO: 1093278 - RNA, 23 nt, Human
cacgcgguccgcggccaagggcc

SEQ ID NO: 1093279 - RNA, 22 nt, Human
cccaaagggugccggcgccgaa

SEQ ID NO: 1093280 - RNA, 19 nt, Human
cccacgcgguccgcggcca

SEQ ID NO: 1093281 - RNA, 21 nt, Human
cccgugaccagugagaaaggc

SEQ ID NO: 1093282 - RNA, 19 nt, Human
cgagacccuccaacugccc

SEQ ID NO: 1093283 - RNA, 18 nt, Human
gacccuccaacugcccag

SEQ ID NO: 1093284 - RNA, 18 nt, Human
gugaccagugagaaaggc

SEQ ID NO: 1093285 - RNA, 21 nt, Human
ugcccagagaaaacaagucuc

SEQ ID NO: 1093286 - RNA, 19 nt, Human
ugcgaaauaacagcagccu

SEQ ID NO: 1093287 - RNA, 24 nt, Human
uuccaaaaaaggguaggagccgcg

SEQ ID NO: 1093288 - RNA, 19 nt, Human
aacuuuugcucaucaacag

SEQ ID NO: 1093289 - RNA, 26 nt, Human
acagaccgcuaauaaaagacgaucug

SEQ ID NO: 1093290 - RNA, 21 nt, Human
acccccaagccuucccagugc

SEQ ID NO: 1093291 - RNA, 23 nt, Human
agcagggaacuuuugcucaucaa

SEQ ID NO: 1093292 - RNA, 23 nt, Human
agggaggagguggggggcuuggg

SEQ ID NO: 1093293 - RNA, 18 nt, Human
caacaggagaggaggugg

SEQ ID NO: 1093294 - RNA, 22 nt, Human
ccaccaaggcccuugccaccaa

SEQ ID NO: 1093295 - RNA, 26 nt, Human
cccccaagccuucccagugcugacaa

SEQ ID NO: 1093296 - RNA, 18 nt, Human
cgcgcccucgggcccugc

SEQ ID NO: 1093297 - RNA, 23 nt, Human
cuacccccaagccuucccagugc

SEQ ID NO: 1093298 - RNA, 23 nt, Human
cuacugaccucucaaggcuuccu

SEQ ID NO: 1093299 - RNA, 19 nt, Human
gaaggagguggcugcuacc

SEQ ID NO: 1093300 - RNA, 20 nt, Human
gaagggaggagguggggggc

SEQ ID NO: 1093301 - RNA, 18 nt, Human
gagguggggggcuugggc

SEQ ID NO: 1093302 - RNA, 22 nt, Human
gcccucgggcccugccaugucc

SEQ ID NO: 1093303 - RNA, 21 nt, Human
gcugacaaccccgggggcagg

SEQ ID NO: 1093304 - RNA, 21 nt, Human
ggaggagguggggggcuuggg

SEQ ID NO: 1093305 - RNA, 19 nt, Human
ggcugggaagggaggaggu

SEQ ID NO: 1093306 - RNA, 18 nt, Human
gggcugggaagggaggag

SEQ ID NO: 1093307 - RNA, 20 nt, Human
ggguugggggaaggaggugg

SEQ ID NO: 1093308 - RNA, 21 nt, Human
ggucgggggacccugggaggu

SEQ ID NO: 1093309 - RNA, 26 nt, Human
ggugggugugggugcucagguugagu

SEQ ID NO: 1093310 - RNA, 19 nt, Human
ucagggaggaggaaagcag

SEQ ID NO: 1093311 - RNA, 20 nt, Human
uccaaucuggggucggggga

SEQ ID NO: 1093312 - RNA, 22 nt, Human
ucccagugcugacaaccccggg

SEQ ID NO: 1093313 - RNA, 23 nt, Human
ucccagugcugacaaccccgggg

SEQ ID NO: 1093314 - RNA, 18 nt, Human
uccccagcugcucgcugg

SEQ ID NO: 1093315 - RNA, 19 nt, Human
ucgcgcccucgggcccugc

SEQ ID NO: 1093316 - RNA, 22 nt, Human
ucgcugggcagucagggaggag

SEQ ID NO: 1093317 - RNA, 22 nt, Human
ucgggcccugccaugucccugg

SEQ ID NO: 1093318 - RNA, 18 nt, Human
ucucaaggcuuccuccaa

SEQ ID NO: 1093319 - RNA, 18 nt, Human
ugcucaucaacaggagag

SEQ ID NO: 1093320 - RNA, 22 nt, Human
ugggaagggaggaggugggggg

SEQ ID NO: 1093321 - RNA, 19 nt, Human
ugggggaaggagguggcug

SEQ ID NO: 1093322 - RNA, 20 nt, Human
ugggggaaggagguggcugc

SEQ ID NO: 1093323 - RNA, 21 nt, Human
uggggggcuugggccauggga

SEQ ID NO: 1093324 - RNA, 19 nt, Human
uggguugggggaaggaggu

SEQ ID NO: 1093325 - RNA, 21 nt, Human
uggguugggggaaggaggugg

SEQ ID NO: 1093326 - RNA, 19 nt, Human
uguuggguugggggaagga

SEQ ID NO: 1093327 - RNA, 25 nt, Human
uuauuuauuuacccaaauuugaacu

SEQ ID NO: 1093328 - RNA, 23 nt, Human
aagggucccgcgggaaucggggc

SEQ ID NO: 1093329 - RNA, 22 nt, Human
acggcagcacaccaggcaccca

SEQ ID NO: 1093330 - RNA, 23 nt, Human
aggcacccaggggaaggaaccag

SEQ ID NO: 1093331 - RNA, 24 nt, Human
aggcacccaggggaaggaaccagg

SEQ ID NO: 1093332 - RNA, 19 nt, Human
aggugcuggugagguucuc

SEQ ID NO: 1093333 - RNA, 20 nt, Human
caagucauuguagagacccg

SEQ ID NO: 1093334 - RNA, 20 nt, Human
caccugggagcccccagcuc

SEQ ID NO: 1093335 - RNA, 26 nt, Human
cacugucaacccuguucguccagcag

SEQ ID NO: 1093336 - RNA, 26 nt, Human
cagcaugcugaacugagcugcuggag

SEQ ID NO: 1093337 - RNA, 20 nt, Human
ccagcagcacaaugguggcc

SEQ ID NO: 1093338 - RNA, 18 nt, Human
ccaggcacccaggggaag

SEQ ID NO: 1093339 - RNA, 18 nt, Human
ccaggggaaggaaccagg

SEQ ID NO: 1093340 - RNA, 23 nt, Human
ccugggagcccccagcucccgag

SEQ ID NO: 1093341 - RNA, 18 nt, Human
ccuguuaagagggggagg

SEQ ID NO: 1093342 - RNA, 24 nt, Human
cgggcagcgucacuuuuucuuggg

SEQ ID NO: 1093343 - RNA, 23 nt, Human
cuacaggggcugcugcgcucaac

SEQ ID NO: 1093344 - RNA, 21 nt, Human
cuucuugaugucggugcugac

SEQ ID NO: 1093345 - RNA, 19 nt, Human
gagcccgagggcacagcag

SEQ ID NO: 1093346 - RNA, 21 nt, Human
gcacaaugguggccgcaaaaa

SEQ ID NO: 1093347 - RNA, 24 nt, Human
gccacugugggaagaaagggaggc

SEQ ID NO: 1093348 - RNA, 19 nt, Human
gcuggcccugaccccccag

SEQ ID NO: 1093349 - RNA, 20 nt, Human
ggaggccugaggccccaggg

SEQ ID NO: 1093350 - RNA, 22 nt, Human
ggaggccugaggccccagggac

SEQ ID NO: 1093351 - RNA, 19 nt, Human
ggagggacaaagcggguuc

SEQ ID NO: 1093352 - RNA, 22 nt, Human
ggagggacaaagcggguucuga

SEQ ID NO: 1093353 - RNA, 20 nt, Human
ggcacagcaggacugugacc

SEQ ID NO: 1093354 - RNA, 23 nt, Human
ggcuuggcggaccauuggccgag

SEQ ID NO: 1093355 - RNA, 18 nt, Human
gugccucuucagcgucca

SEQ ID NO: 1093356 - RNA, 24 nt, Human
uccucugcuguccugccccaagau

SEQ ID NO: 1093357 - RNA, 18 nt, Human
ucugugcccggaggaagg

SEQ ID NO: 1093358 - RNA, 19 nt, Human
ugaccugaucugccaggug

SEQ ID NO: 1093359 - RNA, 21 nt, Human
ugagacggcagcacaccaggc

SEQ ID NO: 1093360 - RNA, 25 nt, Human
ugagacggcagcacaccaggcaccc

SEQ ID NO: 1093361 - RNA, 24 nt, Human
ugaggccccagggacaggggcugg

SEQ ID NO: 1093362 - RNA, 22 nt, Human
ugccagguguccuacaggggcu

SEQ ID NO: 1093363 - RNA, 21 nt, Human
ugcuggugagguucucuucuu

SEQ ID NO: 1093364 - RNA, 20 nt, Human
ugucggugcugacacagaag

SEQ ID NO: 1093365 - RNA, 23 nt, Human
uuagugaaaaguuccuaaaauuc

SEQ ID NO: 1093366 - RNA, 24 nt, Human
aaucuuguucuucuacuguuuucu

SEQ ID NO: 1093367 - RNA, 21 nt, Human
agauccugcugagacaaacaa

SEQ ID NO: 1093368 - RNA, 22 nt, Human
ccuccaaacuuacaggugaagu

SEQ ID NO: 1093369 - RNA, 19 nt, Human
cuuaaaaggugaguucuua

SEQ ID NO: 1093370 - RNA, 22 nt, Human
uacacugucuucauuaauuucu

SEQ ID NO: 1093371 - RNA, 23 nt, Human
uacacugucuucauuaauuucug

SEQ ID NO: 1093372 - RNA, 19 nt, Human
uacuguuuucuuaauagaa

SEQ ID NO: 1093373 - RNA, 23 nt, Human
uagaacuugugggcaguuggcca

SEQ ID NO: 1093374 - RNA, 24 nt, Human
uaggaauguaucaacaccuuuuuc

SEQ ID NO: 1093375 - RNA, 22 nt, Human
uaggucgugaguaguaaguuca

SEQ ID NO: 1093376 - RNA, 19 nt, Human
uagugucuugcuguauucc

SEQ ID NO: 1093377 - RNA, 23 nt, Human
uccuuuaacuccaccagaaggua

SEQ ID NO: 1093378 - RNA, 21 nt, Human
ucuaaauuagaacuugugggc

SEQ ID NO: 1093379 - RNA, 21 nt, Human
ucuggagaaucuggaaguuca

SEQ ID NO: 1093380 - RNA, 20 nt, Human
ucugguugggcaguuggugg

SEQ ID NO: 1093381 - RNA, 21 nt, Human
ucuuaauagaaugcuuaaucu

SEQ ID NO: 1093382 - RNA, 21 nt, Human
ugcuuaaucuuuucagcucuu

SEQ ID NO: 1093383 - RNA, 24 nt, Human
uguaaaggaacuguagucgcccug

SEQ ID NO: 1093384 - RNA, 21 nt, Human
uguagagacagucauuuuuuu

SEQ ID NO: 1093385 - RNA, 23 nt, Human
uguaucaacaccuuuuucugguu

SEQ ID NO: 1093386 - RNA, 20 nt, Human
ugucuugcuguauucccuuu

SEQ ID NO: 1093387 - RNA, 19 nt, Human
uuuaagacuuaaaagguga

SEQ ID NO: 1093388 - RNA, 21 nt, Human
aaaaaaaaaaaaagaagaaga

SEQ ID NO: 1093389 - RNA, 19 nt, Human
aaaaaaaaaaagaagaaga

SEQ ID NO: 1093390 - RNA, 23 nt, Human
aaaaaaaaaaagaagaagaagaa

SEQ ID NO: 1093391 - RNA, 21 nt, Human
aaaaaaaaaagaagaagaaga

SEQ ID NO: 1093392 - RNA, 27 nt, Human
aaaaaaaaaagaagaagaagaagaucg

SEQ ID NO: 1093393 - RNA, 19 nt, Human
aaaaaaaagaagaagaaga

SEQ ID NO: 1093394 - RNA, 19 nt, Human
aaaaaaaagaagaagaaga

SEQ ID NO: 1093395 - RNA, 18 nt, Human
aaaaaagaagaagaagaa

SEQ ID NO: 1093396 - RNA, 19 nt, Human
aaaaaagaagaagaagaag

SEQ ID NO: 1093397 - RNA, 18 nt, Human
aaaaagaagaagaagaag

SEQ ID NO: 1093398 - RNA, 29 nt, Human
aagaagaagaagaagaucgaaaagucaaa

SEQ ID NO: 1093399 - RNA, 20 nt, Human
aagaagaagaagaucgaaaa

SEQ ID NO: 1093400 - RNA, 18 nt, Human
aagaagaagaucgaaaag

SEQ ID NO: 1093401 - RNA, 28 nt, Human
aagaggcugcugagugcggacacagccc

SEQ ID NO: 1093402 - RNA, 23 nt, Human
aaggcaggcggaucaugagguca

SEQ ID NO: 1093403 - RNA, 18 nt, Human
acaccacugcacuccagc

SEQ ID NO: 1093404 - RNA, 20 nt, Human
acaccacugcacuccagccu

SEQ ID NO: 1093405 - RNA, 24 nt, Human
acagagcgagacuccaucucaaaa

SEQ ID NO: 1093406 - RNA, 23 nt, Human
acagcccgggaggccaggagccc

SEQ ID NO: 1093407 - RNA, 24 nt, Human
acccugucuuuacuaaaaauacaa

SEQ ID NO: 1093408 - RNA, 23 nt, Human
acugcacuccagccuggugacag

SEQ ID NO: 1093409 - RNA, 25 nt, Human
acugcacuccagccuggugacagag

SEQ ID NO: 1093410 - RNA, 23 nt, Human
agaagaagaagaagaucgaaaag

SEQ ID NO: 1093411 - RNA, 26 nt, Human
agagaguuggaggcugcagugagcug

SEQ ID NO: 1093412 - RNA, 23 nt, Human
agaguuggaggcugcagugagcu

SEQ ID NO: 1093413 - RNA, 21 nt, Human
agccuggugacagagcgagac

SEQ ID NO: 1093414 - RNA, 23 nt, Human
agccuggugacagagcgagacuc

SEQ ID NO: 1093415 - RNA, 19 nt, Human
aggcaggaaccuggguggg

SEQ ID NO: 1093416 - RNA, 22 nt, Human
aggcaggagaaucgcuugaacc

SEQ ID NO: 1093417 - RNA, 24 nt, Human
aggcaggagaaucgcuugaaccag

SEQ ID NO: 1093418 - RNA, 18 nt, Human
aggcaggcggaucaugag

SEQ ID NO: 1093419 - RNA, 24 nt, Human
aggcaggcggaucaugaggucagg

SEQ ID NO: 1093420 - RNA, 23 nt, Human
aggccaaggcaggcggaucauga

SEQ ID NO: 1093421 - RNA, 18 nt, Human
aggcggaucaugagguca

SEQ ID NO: 1093422 - RNA, 22 nt, Human
aggcggaucaugaggucaggag

SEQ ID NO: 1093423 - RNA, 20 nt, Human
aggcugaggcaggagaaucg

SEQ ID NO: 1093424 - RNA, 24 nt, Human
aggcugaggcaggagaaucgcuug

SEQ ID NO: 1093425 - RNA, 24 nt, Human
aguuggaggcugcagugagcugag

SEQ ID NO: 1093426 - RNA, 20 nt, Human
aguugugcgugguggugggu

SEQ ID NO: 1093427 - RNA, 24 nt, Human
aucacaccacugcacuccagccug

SEQ ID NO: 1093428 - RNA, 20 nt, Human
aucaugaggucaggagaucc

SEQ ID NO: 1093429 - RNA, 20 nt, Human
aucauggugaaacccugucu

SEQ ID NO: 1093430 - RNA, 21 nt, Human
aucucaaaaaaaaaaaaaaag

SEQ ID NO: 1093431 - RNA, 19 nt, Human
aucucugcccccaccccgc

SEQ ID NO: 1093432 - RNA, 22 nt, Human
caaggcaggcggaucaugaggu

SEQ ID NO: 1093433 - RNA, 21 nt, Human
cacaccacugcacuccagccu

SEQ ID NO: 1093434 - RNA, 21 nt, Human
cacaccuacuggguguggcug

SEQ ID NO: 1093435 - RNA, 25 nt, Human
caccacugcacuccagccuggugac

SEQ ID NO: 1093436 - RNA, 19 nt, Human
caccauccaggagcagggc

SEQ ID NO: 1093437 - RNA, 21 nt, Human
caccugcacugagacacgggc

SEQ ID NO: 1093438 - RNA, 22 nt, Human
cacuccagccuggugacagagc

SEQ ID NO: 1093439 - RNA, 23 nt, Human
cacuccagccuggugacagagcg

SEQ ID NO: 1093440 - RNA, 18 nt, Human
cacugcacuccagccugg

SEQ ID NO: 1093441 - RNA, 18 nt, Human
cacugcacuccagccugg

SEQ ID NO: 1093442 - RNA, 18 nt, Human
cacugcacuccagccugg

SEQ ID NO: 1093443 - RNA, 23 nt, Human
cacugcacuccagccuggugaca

SEQ ID NO: 1093444 - RNA, 23 nt, Human
cacugcacuccagccuggugaca

SEQ ID NO: 1093445 - RNA, 24 nt, Human
cagcacuuugggaggccaaggcag

SEQ ID NO: 1093446 - RNA, 24 nt, Human
cagcacuuugggaggccaaggcag

SEQ ID NO: 1093447 - RNA, 22 nt, Human
cagcccgggaggccaggagccc

SEQ ID NO: 1093448 - RNA, 24 nt, Human
cagcuacucaggaggcugaggcag

SEQ ID NO: 1093449 - RNA, 20 nt, Human
caggagccccaggacagaga

SEQ ID NO: 1093450 - RNA, 19 nt, Human
caggcaggaaccugggugg

SEQ ID NO: 1093451 - RNA, 21 nt, Human
caguuccugagccgucugccc

SEQ ID NO: 1093452 - RNA, 18 nt, Human
cauggugaaacccugucu

SEQ ID NO: 1093453 - RNA, 18 nt, Human
cauggugaaacccugucu

SEQ ID NO: 1093454 - RNA, 18 nt, Human
cauggugaaacccugucu

SEQ ID NO: 1093455 - RNA, 21 nt, Human
ccaccuggccccuccucccca

SEQ ID NO: 1093456 - RNA, 19 nt, Human
ccacugcacuccagccugg

SEQ ID NO: 1093457 - RNA, 19 nt, Human
ccacugcacuccagccugg

SEQ ID NO: 1093458 - RNA, 20 nt, Human
ccacugcacuccagccuggu

SEQ ID NO: 1093459 - RNA, 23 nt, Human
ccacugcacuccagccuggugac

SEQ ID NO: 1093460 - RNA, 24 nt, Human
ccacugcacuccagccuggugaca

SEQ ID NO: 1093461 - RNA, 23 nt, Human
ccagagccuucugugagcagugg

SEQ ID NO: 1093462 - RNA, 23 nt, Human
ccaggacagagaggaacagcaca

SEQ ID NO: 1093463 - RNA, 25 nt, Human
ccaucucaaaaaaaaaaaaaaagaa

SEQ ID NO: 1093464 - RNA, 21 nt, Human
cccaccauccaggagcagggc

SEQ ID NO: 1093465 - RNA, 25 nt, Human
cccagcgaggagcagcaggguaccc

SEQ ID NO: 1093466 - RNA, 21 nt, Human
ccccacggcuccaccugcacu

SEQ ID NO: 1093467 - RNA, 23 nt, Human
ccccuccuccccaugagaggccc

SEQ ID NO: 1093468 - RNA, 21 nt, Human
ccugagccgucugcccagagc

SEQ ID NO: 1093469 - RNA, 18 nt, Human
ccugcacugagacacggg

SEQ ID NO: 1093470 - RNA, 22 nt, Human
ccuggcuaucauggugaaaccc

SEQ ID NO: 1093471 - RNA, 22 nt, Human
ccuggcuaucauggugaaaccc

SEQ ID NO: 1093472 - RNA, 24 nt, Human
ccuggcuaucauggugaaacccug

SEQ ID NO: 1093473 - RNA, 20 nt, Human
ccuggcuucaggccugcgug

SEQ ID NO: 1093474 - RNA, 18 nt, Human
ccugggugggguaugggg

SEQ ID NO: 1093475 - RNA, 21 nt, Human
ccuggugacagagcgagacuc

SEQ ID NO: 1093476 - RNA, 22 nt, Human
ccuguaaucccagcacuuuggg

SEQ ID NO: 1093477 - RNA, 19 nt, Human
ccuguaaucccagcuacuc

SEQ ID NO: 1093478 - RNA, 21 nt, Human
ccuguaaucccagcuacucag

SEQ ID NO: 1093479 - RNA, 24 nt, Human
cgagaccauccuggcuaucauggu

SEQ ID NO: 1093480 - RNA, 23 nt, Human
cgagacuccaucucaaaaaaaaa

SEQ ID NO: 1093481 - RNA, 23 nt, Human
cggccgcgaagaggcugcugagu

SEQ ID NO: 1093482 - RNA, 20 nt, Human
cgggcaacccugaagcucac

SEQ ID NO: 1093483 - RNA, 24 nt, Human
cucaaaaaaaaaaaaaaagaagaa

SEQ ID NO: 1093484 - RNA, 22 nt, Human
cucaucucugcccccaccccgc

SEQ ID NO: 1093485 - RNA, 24 nt, Human
cuccacaccuacuggguguggcug

SEQ ID NO: 1093486 - RNA, 24 nt, Human
cuccagccuggugacagagcgaga

SEQ ID NO: 1093487 - RNA, 19 nt, Human
cuccaucucaaaaaaaaaa

SEQ ID NO: 1093488 - RNA, 18 nt, Human
cugagacacgggcuucug

SEQ ID NO: 1093489 - RNA, 19 nt, Human
cugcagugagcugagauca

SEQ ID NO: 1093490 - RNA, 20 nt, Human
cugcagugagcugagaucac

SEQ ID NO: 1093491 - RNA, 19 nt, Human
cuggaggccuccucaucuc

SEQ ID NO: 1093492 - RNA, 24 nt, Human
cuggcuaucauggugaaacccugu

SEQ ID NO: 1093493 - RNA, 19 nt, Human
gaaacccugucuuuacuaa

SEQ ID NO: 1093494 - RNA, 22 nt, Human
gaggcugcagugagcugagauc

SEQ ID NO: 1093495 - RNA, 23 nt, Human
gcacuccagccuggugacagagc

SEQ ID NO: 1093496 - RNA, 18 nt, Human
gcccuggacccugcugug

SEQ ID NO: 1093497 - RNA, 18 nt, Human
gccuguaaucccagcacu

SEQ ID NO: 1093498 - RNA, 21 nt, Human
gccuguaaucccagcacuuug

SEQ ID NO: 1093499 - RNA, 21 nt, Human
gccuguaaucccagcacuuug

SEQ ID NO: 1093500 - RNA, 24 nt, Human
gcuaucauggugaaacccugucuu

SEQ ID NO: 1093501 - RNA, 20 nt, Human
gcugagaucacaccacugca

SEQ ID NO: 1093502 - RNA, 21 nt, Human
ggaagaccucggccgcgaaga

SEQ ID NO: 1093503 - RNA, 24 nt, Human
ggagcagggcagugcuuuaccccg

SEQ ID NO: 1093504 - RNA, 22 nt, Human
ggaggccuccucaucucugccc

SEQ ID NO: 1093505 - RNA, 18 nt, Human
ggaggcugcagugagcug

SEQ ID NO: 1093506 - RNA, 20 nt, Human
ggaggcugcagugagcugag

SEQ ID NO: 1093507 - RNA, 23 nt, Human
ggaggcugcagugagcugagauc

SEQ ID NO: 1093508 - RNA, 24 nt, Human
ggaggcugcagugagcugagauca

SEQ ID NO: 1093509 - RNA, 18 nt, Human
ggcaggaaccuggguggg

SEQ ID NO: 1093510 - RNA, 21 nt, Human
ggccuugacuuuggucccauc

SEQ ID NO: 1093511 - RNA, 24 nt, Human
gguggugggugccuguaaucccag

SEQ ID NO: 1093512 - RNA, 18 nt, Human
gugccuguaaucccagcu

SEQ ID NO: 1093513 - RNA, 21 nt, Human
uaucauggugaaacccugucu

SEQ ID NO: 1093514 - RNA, 19 nt, Human
ucaaaaaaaaaaaaaaaga

SEQ ID NO: 1093515 - RNA, 23 nt, Human
ucacaccacugcacuccagccug

SEQ ID NO: 1093516 - RNA, 18 nt, Human
ucaugaggucaggagauc

SEQ ID NO: 1093517 - RNA, 24 nt, Human
ucaugaggucaggagaucgagacc

SEQ ID NO: 1093518 - RNA, 18 nt, Human
ucauggugaaacccuguc

SEQ ID NO: 1093519 - RNA, 19 nt, Human
ucauggugaaacccugucu

SEQ ID NO: 1093520 - RNA, 22 nt, Human
uccagccuggugacagagcgag

SEQ ID NO: 1093521 - RNA, 20 nt, Human
uccaggagcagggcagugcu

SEQ ID NO: 1093522 - RNA, 23 nt, Human
uccaucucaaaaaaaaaaaaaaa

SEQ ID NO: 1093523 - RNA, 22 nt, Human
ucccaguuccugagccgucugc

SEQ ID NO: 1093524 - RNA, 22 nt, Human
uccucaucucugcccccacccc

SEQ ID NO: 1093525 - RNA, 21 nt, Human
uccuccacaccuacugggugu

SEQ ID NO: 1093526 - RNA, 25 nt, Human
uccugagccgucugcccagagccuu

SEQ ID NO: 1093527 - RNA, 19 nt, Human
ucucugcccccaccccgca

SEQ ID NO: 1093528 - RNA, 19 nt, Human
ugaaccagagaguuggagg

SEQ ID NO: 1093529 - RNA, 18 nt, Human
ugagaggcccuggacccu

SEQ ID NO: 1093530 - RNA, 18 nt, Human
ugagaucacaccacugca

SEQ ID NO: 1093531 - RNA, 24 nt, Human
ugagaucacaccacugcacuccag

SEQ ID NO: 1093532 - RNA, 20 nt, Human
ugaggcaggagaaucgcuug

SEQ ID NO: 1093533 - RNA, 24 nt, Human
ugaggcaggagaaucgcuugaacc

SEQ ID NO: 1093534 - RNA, 20 nt, Human
ugcccagagccuucugugag

SEQ ID NO: 1093535 - RNA, 21 nt, Human
ugcccagagccuucugugagc

SEQ ID NO: 1093536 - RNA, 24 nt, Human
ugccccaggccuugacuuuggucc

SEQ ID NO: 1093537 - RNA, 25 nt, Human
ugcccccaccccgcacuccuggcuu

SEQ ID NO: 1093538 - RNA, 22 nt, Human
ugcccuggaccagacgucuggg

SEQ ID NO: 1093539 - RNA, 22 nt, Human
ugccuggggccuggcuggagac

SEQ ID NO: 1093540 - RNA, 24 nt, Human
ugccuguaaucccagcuacucagg

SEQ ID NO: 1093541 - RNA, 22 nt, Human
ugcuguguggccgggcaacccu

SEQ ID NO: 1093542 - RNA, 20 nt, Human
uggauggaggaaucacaggc

SEQ ID NO: 1093543 - RNA, 19 nt, Human
uggccuucccuccccuucc

SEQ ID NO: 1093544 - RNA, 21 nt, Human
uggcuggggggagacccaggg

SEQ ID NO: 1093545 - RNA, 24 nt, Human
uggcuggggggagacccagggccu

SEQ ID NO: 1093546 - RNA, 22 nt, Human
uggcuucaggccugcguggccu

SEQ ID NO: 1093547 - RNA, 24 nt, Human
ugggaggccaaggcaggcggauca

SEQ ID NO: 1093548 - RNA, 19 nt, Human
uggggacagggccuccugu

SEQ ID NO: 1093549 - RNA, 24 nt, Human
ugguggugggugccuguaauccca

SEQ ID NO: 1093550 - RNA, 22 nt, Human
uguggccgggcaacccugaagc

SEQ ID NO: 1093551 - RNA, 24 nt, Human
uguggcuggggggagacccagggc

SEQ ID NO: 1093552 - RNA, 24 nt, Human
uuaguugugcgugguggugggugc

SEQ ID NO: 1093553 - RNA, 23 nt, Human
aaacacccuucccaggggucccc

SEQ ID NO: 1093554 - RNA, 18 nt, Human
aagcugagcccugcugug

SEQ ID NO: 1093555 - RNA, 20 nt, Human
aaggaaaaacacccuuccca

SEQ ID NO: 1093556 - RNA, 23 nt, Human
accaccaccccuugaagucucag

SEQ ID NO: 1093557 - RNA, 24 nt, Human
acccacagcugugcccucacugcu

SEQ ID NO: 1093558 - RNA, 22 nt, Human
accccaagcaggugccuaaggg

SEQ ID NO: 1093559 - RNA, 24 nt, Human
acccuucccagggguccucuccca

SEQ ID NO: 1093560 - RNA, 20 nt, Human
agaaaaaagaaacuggaaga

SEQ ID NO: 1093561 - RNA, 18 nt, Human
agaagcaggucugagccg

SEQ ID NO: 1093562 - RNA, 23 nt, Human
agcguggaggacagccggggggc

SEQ ID NO: 1093563 - RNA, 21 nt, Human
agggaagggcuggcccuggag

SEQ ID NO: 1093564 - RNA, 23 nt, Human
agguccccagguccccuccgcuc

SEQ ID NO: 1093565 - RNA, 19 nt, Human
auccaccuucaggucccca

SEQ ID NO: 1093566 - RNA, 25 nt, Human
auuugcugguggccuuaaggggcuc

SEQ ID NO: 1093567 - RNA, 23 nt, Human
caagucccauggcagcccagaag

SEQ ID NO: 1093568 - RNA, 27 nt, Human
caccccuugaagucucagacccaguug

SEQ ID NO: 1093569 - RNA, 20 nt, Human
caccgcccucugcccccagc

SEQ ID NO: 1093570 - RNA, 20 nt, Human
cacugcugcgggccacagga

SEQ ID NO: 1093571 - RNA, 21 nt, Human
cacugcugcgggccacaggag

SEQ ID NO: 1093572 - RNA, 23 nt, Human
cagaggccuaagcacggccuucc

SEQ ID NO: 1093573 - RNA, 19 nt, Human
cagcguggaggacagccgg

SEQ ID NO: 1093574 - RNA, 18 nt, Human
cagucaccauccagggug

SEQ ID NO: 1093575 - RNA, 22 nt, Human
cagugugaaaucuggcucuguu

SEQ ID NO: 1093576 - RNA, 20 nt, Human
ccaagcaggugccuaagggc

SEQ ID NO: 1093577 - RNA, 22 nt, Human
ccacagaggccuaagcacggcc

SEQ ID NO: 1093578 - RNA, 22 nt, Human
cccagcaguguguccacagagg

SEQ ID NO: 1093579 - RNA, 22 nt, Human
cccauccaccuucaggucccca

SEQ ID NO: 1093580 - RNA, 21 nt, Human
ccccauccaccuucagguccc

SEQ ID NO: 1093581 - RNA, 23 nt, Human
cccccagcuccccagucugccag

SEQ ID NO: 1093582 - RNA, 19 nt, Human
cccccuuuaggcgggggga

SEQ ID NO: 1093583 - RNA, 19 nt, Human
ccccuauccgcagucacca

SEQ ID NO: 1093584 - RNA, 22 nt, Human
ccccucaaaggaaaaacacccu

SEQ ID NO: 1093585 - RNA, 18 nt, Human
ccccucggaaucuggggc

SEQ ID NO: 1093586 - RNA, 26 nt, Human
ccccugcaacccacagcugugcccuc

SEQ ID NO: 1093587 - RNA, 21 nt, Human
cccuggaggaguggcugggcu

SEQ ID NO: 1093588 - RNA, 21 nt, Human
ccgcaagucccauggcagccc

SEQ ID NO: 1093589 - RNA, 21 nt, Human
ccggcagcguggaggacagcc

SEQ ID NO: 1093590 - RNA, 19 nt, Human
ccgugcuggcugucucccc

SEQ ID NO: 1093591 - RNA, 23 nt, Human
ccgugcuggcugucuccccugca

SEQ ID NO: 1093592 - RNA, 18 nt, Human
ccucugcccccagcuccc

SEQ ID NO: 1093593 - RNA, 21 nt, Human
cgggcagugggugccagguug

SEQ ID NO: 1093594 - RNA, 21 nt, Human
cggggucuuccuuuccaagga

SEQ ID NO: 1093595 - RNA, 21 nt, Human
cuaagggccacgggcaguggg

SEQ ID NO: 1093596 - RNA, 21 nt, Human
cucccaccaccaccccuugaa

SEQ ID NO: 1093597 - RNA, 24 nt, Human
cucccaccaccaccccuugaaguc

SEQ ID NO: 1093598 - RNA, 18 nt, Human
cucugcccccagcucccc

SEQ ID NO: 1093599 - RNA, 23 nt, Human
cuggaagagcauccacuauggca

SEQ ID NO: 1093600 - RNA, 22 nt, Human
gacagugagggcagcaccagga

SEQ ID NO: 1093601 - RNA, 21 nt, Human
gagagucccuggcaggccccu

SEQ ID NO: 1093602 - RNA, 25 nt, Human
gcagcccagaagcaggucugagccg

SEQ ID NO: 1093603 - RNA, 23 nt, Human
gccagguuggagaggcugaggcu

SEQ ID NO: 1093604 - RNA, 21 nt, Human
ggcugcgggagugagcaggug

SEQ ID NO: 1093605 - RNA, 24 nt, Human
gggaagggcuggcccuggaggagu

SEQ ID NO: 1093606 - RNA, 20 nt, Human
gggcucccaccaccaccccu

SEQ ID NO: 1093607 - RNA, 19 nt, Human
gucugccaggcuggggggu

SEQ ID NO: 1093608 - RNA, 20 nt, Human
gugagcaggugccccaaggg

SEQ ID NO: 1093609 - RNA, 20 nt, Human
uaagggccacgggcaguggg

SEQ ID NO: 1093610 - RNA, 24 nt, Human
uccacagaggccuaagcacggccu

SEQ ID NO: 1093611 - RNA, 18 nt, Human
ucccccucaaaggaaaaa

SEQ ID NO: 1093612 - RNA, 20 nt, Human
uccgcagucaccauccaggg

SEQ ID NO: 1093613 - RNA, 18 nt, Human
ucucagacccaguugaac

SEQ ID NO: 1093614 - RNA, 19 nt, Human
ucucugauuucuccgacug

SEQ ID NO: 1093615 - RNA, 21 nt, Human
ugcccggcagcguggaggaca

SEQ ID NO: 1093616 - RNA, 20 nt, Human
ugcugguggccuuaaggggc

SEQ ID NO: 1093617 - RNA, 24 nt, Human
uggaaggcaggaagcugagcccug

SEQ ID NO: 1093618 - RNA, 20 nt, Human
uggcaagauguggcacuugg

SEQ ID NO: 1093619 - RNA, 19 nt, Human
uggcacagaaucccccuca

SEQ ID NO: 1093620 - RNA, 22 nt, Human
uggcacagaaucccccucaaag

SEQ ID NO: 1093621 - RNA, 24 nt, Human
ugggugccagguuggagaggcuga

SEQ ID NO: 1093622 - RNA, 22 nt, Human
uggucuggcugccccuauccgc

SEQ ID NO: 1093623 - RNA, 20 nt, Human
uuaggcggggggacagugag

SEQ ID NO: 1093624 - RNA, 23 nt, Human
uuccucgucccccugagagcuca

SEQ ID NO: 1093625 - RNA, 20 nt, Human
aagaacgccacggccacugc

SEQ ID NO: 1093626 - RNA, 23 nt, Human
aagacgccacagggacuucguga

SEQ ID NO: 1093627 - RNA, 19 nt, Human
aagcgacgcccgaccgaga

SEQ ID NO: 1093628 - RNA, 23 nt, Human
aaguuguguaucuucuucuggcu

SEQ ID NO: 1093629 - RNA, 20 nt, Human
aggagcugcgggaaaagccg

SEQ ID NO: 1093630 - RNA, 25 nt, Human
auuaaguauuacaugggaaugugug

SEQ ID NO: 1093631 - RNA, 24 nt, Human
cacugcaaaacucccacgcucuca

SEQ ID NO: 1093632 - RNA, 21 nt, Human
cgcgacgaagaacgccacggc

SEQ ID NO: 1093633 - RNA, 21 nt, Human
cuucccaccauacagauacug

SEQ ID NO: 1093634 - RNA, 21 nt, Human
gaaaauugaauuuaaacaaaa

SEQ ID NO: 1093635 - RNA, 19 nt, Human
gccacagggacuucgugac

SEQ ID NO: 1093636 - RNA, 24 nt, Human
gcccgaccgagacgcgacgaagaa

SEQ ID NO: 1093637 - RNA, 23 nt, Human
uaauaacaggccucgcgcucccu

SEQ ID NO: 1093638 - RNA, 21 nt, Human
uagcacauugccugggacaua

SEQ ID NO: 1093639 - RNA, 21 nt, Human
uauuacaugggaaugugugua

SEQ ID NO: 1093640 - RNA, 27 nt, Human
uccgcgguuaauaacaggccggggucc

SEQ ID NO: 1093641 - RNA, 23 nt, Human
ugacaggagcugcagaaagcgac

SEQ ID NO: 1093642 - RNA, 20 nt, Human
uguguaaagugcuuagcaca

SEQ ID NO: 1093643 - RNA, 20 nt, Human
aaacaucaccaaugagaggc

SEQ ID NO: 1093644 - RNA, 24 nt, Human
aaacaucaccaaugagaggcauaa

SEQ ID NO: 1093645 - RNA, 18 nt, Human
aacaagcucugggacucg

SEQ ID NO: 1093646 - RNA, 23 nt, Human
aacccguuucccccaugauucca

SEQ ID NO: 1093647 - RNA, 18 nt, Human
aagcucugggacucaggc

SEQ ID NO: 1093648 - RNA, 22 nt, Human
aaugacaaaagaaagaaaaucc

SEQ ID NO: 1093649 - RNA, 20 nt, Human
aauuccaacccguuuccccc

SEQ ID NO: 1093650 - RNA, 21 nt, Human
agagaucaauacaaagccaac

SEQ ID NO: 1093651 - RNA, 21 nt, Human
agcccucucauacacaggcuc

SEQ ID NO: 1093652 - RNA, 19 nt, Human
agcucauggacugcaaccu

SEQ ID NO: 1093653 - RNA, 19 nt, Human
cacugccuccuuucccagc

SEQ ID NO: 1093654 - RNA, 21 nt, Human
caggaaaagcuagaaucuguu

SEQ ID NO: 1093655 - RNA, 25 nt, Human
caggaaaagcuagaaucuguugagu

SEQ ID NO: 1093656 - RNA, 18 nt, Human
cagucuuugguguuuguu

SEQ ID NO: 1093657 - RNA, 22 nt, Human
cccuaguggugguuaacaagau

SEQ ID NO: 1093658 - RNA, 24 nt, Human
ccucggccagcuuggcuuccgugg

SEQ ID NO: 1093659 - RNA, 20 nt, Human
ccucucauacacaggcucag

SEQ ID NO: 1093660 - RNA, 21 nt, Human
ccucucauacacaggcucagu

SEQ ID NO: 1093661 - RNA, 19 nt, Human
cuggccuaccgcagcccug

SEQ ID NO: 1093662 - RNA, 21 nt, Human
cuuuuauugcagaaaauucuu

SEQ ID NO: 1093663 - RNA, 24 nt, Human
gaaaggccgccgaucugaggagcg

SEQ ID NO: 1093664 - RNA, 21 nt, Human
gacuauggaaauugguaagcc

SEQ ID NO: 1093665 - RNA, 19 nt, Human
gauaacaggauccaagaga

SEQ ID NO: 1093666 - RNA, 20 nt, Human
gccuaccgcagcccugucca

SEQ ID NO: 1093667 - RNA, 19 nt, Human
gccugcuacugugaagaga

SEQ ID NO: 1093668 - RNA, 22 nt, Human
gcucagucucuuuaugaguauu

SEQ ID NO: 1093669 - RNA, 23 nt, Human
ggagcgcaaccgccagcccaccg

SEQ ID NO: 1093670 - RNA, 21 nt, Human
ggcuucagcccgaaacuugag

SEQ ID NO: 1093671 - RNA, 20 nt, Human
gugaaauguauguuuauccc

SEQ ID NO: 1093672 - RNA, 22 nt, Human
guuacugcuuuuuguuuuggaa

SEQ ID NO: 1093673 - RNA, 19 nt, Human
uaagaaggaacucaaguga

SEQ ID NO: 1093674 - RNA, 21 nt, Human
uaagaaggaacucaagugaug

SEQ ID NO: 1093675 - RNA, 20 nt, Human
uacacaggcucagucucuuu

SEQ ID NO: 1093676 - RNA, 20 nt, Human
uagugccaagcuccauuugg

SEQ ID NO: 1093677 - RNA, 23 nt, Human
uaguuucuuuuauugcagaaaau

SEQ ID NO: 1093678 - RNA, 21 nt, Human
uaugcaauuaaacaugcaugg

SEQ ID NO: 1093679 - RNA, 22 nt, Human
ucagcccgaaacuugaggccuc

SEQ ID NO: 1093680 - RNA, 23 nt, Human
ucaucuggagauucccuaguggu

SEQ ID NO: 1093681 - RNA, 18 nt, Human
uccaaaauucuucaucuu

SEQ ID NO: 1093682 - RNA, 21 nt, Human
uccaacuuugcaaaccguguc

SEQ ID NO: 1093683 - RNA, 20 nt, Human
uccaaugacaaaagaaagaa

SEQ ID NO: 1093684 - RNA, 22 nt, Human
uccaaugacaaaagaaagaaaa

SEQ ID NO: 1093685 - RNA, 19 nt, Human
ucucccaagagcacugccu

SEQ ID NO: 1093686 - RNA, 25 nt, Human
ucucccaagagcacugccuccuuuc

SEQ ID NO: 1093687 - RNA, 22 nt, Human
ucuguuggcuucagcccgaaac

SEQ ID NO: 1093688 - RNA, 20 nt, Human
ugaccacagaagacuacuga

SEQ ID NO: 1093689 - RNA, 20 nt, Human
ugaguggcugcagagcaagu

SEQ ID NO: 1093690 - RNA, 22 nt, Human
ugauuccauuagagaugucuuc

SEQ ID NO: 1093691 - RNA, 21 nt, Human
ugcauguuacugcuuuuuguu

SEQ ID NO: 1093692 - RNA, 20 nt, Human
ugccaauguuucuauuggau

SEQ ID NO: 1093693 - RNA, 22 nt, Human
uggaggccgcuccucgcuuucu

SEQ ID NO: 1093694 - RNA, 20 nt, Human
uggcugcagagcaagucuug

SEQ ID NO: 1093695 - RNA, 23 nt, Human
ugguaagccugcuacugugaaga

SEQ ID NO: 1093696 - RNA, 20 nt, Human
ugguaugcaauuaaacaugc

SEQ ID NO: 1093697 - RNA, 23 nt, Human
ugguugggacucuguuggcuuca

SEQ ID NO: 1093698 - RNA, 23 nt, Human
uguuuguuugcucaggaaaagcu

SEQ ID NO: 1093699 - RNA, 20 nt, Human
uuacugcuuuuuguuuugga

SEQ ID NO: 1093700 - RNA, 18 nt, Human
uucagaaugaggacacug

SEQ ID NO: 1093701 - RNA, 19 nt, Human
acccugaagguggggaagg

SEQ ID NO: 1093702 - RNA, 23 nt, Human
acccugaagguggggaagguggg

SEQ ID NO: 1093703 - RNA, 19 nt, Human
caagagcaggugcaaccca

SEQ ID NO: 1093704 - RNA, 22 nt, Human
caagagcaggugcaacccaggc

SEQ ID NO: 1093705 - RNA, 19 nt, Human
caagcaggcacuguggcca

SEQ ID NO: 1093706 - RNA, 19 nt, Human
cacgccuguaaucccagca

SEQ ID NO: 1093707 - RNA, 21 nt, Human
cucacgccuguaaucccagca

SEQ ID NO: 1093708 - RNA, 21 nt, Human
cucacgccuguaaucccagca

SEQ ID NO: 1093709 - RNA, 19 nt, Human
gccaccuagaaaguggacc

SEQ ID NO: 1093710 - RNA, 23 nt, Human
ggcgcgguggcucacgccuguaa

SEQ ID NO: 1093711 - RNA, 23 nt, Human
gguggcucacgccuguaauccca

SEQ ID NO: 1093712 - RNA, 24 nt, Human
gguggcucacgccuguaaucccag

SEQ ID NO: 1093713 - RNA, 23 nt, Human
uaggcugggcgcgguggcucacg

SEQ ID NO: 1093714 - RNA, 21 nt, Human
ucacgccuguaaucccagcau

SEQ ID NO: 1093715 - RNA, 24 nt, Human
ucgguaaauguucuaauuuuuuuu

SEQ ID NO: 1093716 - RNA, 24 nt, Human
uggcucacgccuguaaucccagca

SEQ ID NO: 1093717 - RNA, 18 nt, Human
aagcaucuugccgagcuc

SEQ ID NO: 1093718 - RNA, 21 nt, Human
agcacaaaggggaagaagccc

SEQ ID NO: 1093719 - RNA, 20 nt, Human
cagcacaaaggggaagaagc

SEQ ID NO: 1093720 - RNA, 19 nt, Human
ccagaagcaucuugccgag

SEQ ID NO: 1093721 - RNA, 23 nt, Human
ccccugagagcggcccggacggg

SEQ ID NO: 1093722 - RNA, 21 nt, Human
ccgcugggagaggcgcccccu

SEQ ID NO: 1093723 - RNA, 19 nt, Human
ccucgggcuccucaggccc

SEQ ID NO: 1093724 - RNA, 22 nt, Human
ccuucugcugcagcugcaaggc

SEQ ID NO: 1093725 - RNA, 25 nt, Human
cucaggcccugggcccccucccagg

SEQ ID NO: 1093726 - RNA, 23 nt, Human
cugcugcagcugcaaggcuaggu

SEQ ID NO: 1093727 - RNA, 20 nt, Human
cuugccgagcuccgcggcca

SEQ ID NO: 1093728 - RNA, 23 nt, Human
gcacaaaggggaagaagcccucg

SEQ ID NO: 1093729 - RNA, 19 nt, Human
gcccccucccaggaaugag

SEQ ID NO: 1093730 - RNA, 23 nt, Human
gcccugggcccccucccaggaau

SEQ ID NO: 1093731 - RNA, 24 nt, Human
gcugggcgcucagcgucuccagcu

SEQ ID NO: 1093732 - RNA, 21 nt, Human
ggaagcugggcccaucuggag

SEQ ID NO: 1093733 - RNA, 19 nt, Human
ggccaacagcaggucuuuc

SEQ ID NO: 1093734 - RNA, 23 nt, Human
ucaccugcagcaucugcggggac

SEQ ID NO: 1093735 - RNA, 19 nt, Human
ucccaggaaugagucccgc

SEQ ID NO: 1093736 - RNA, 18 nt, Human
ucccgccgcuccagcaca

SEQ ID NO: 1093737 - RNA, 18 nt, Human
uccucaggcccugggccc

SEQ ID NO: 1093738 - RNA, 20 nt, Human
ucuccagcugccgccgcagc

SEQ ID NO: 1093739 - RNA, 19 nt, Human
ugagagcggcccggacggg

SEQ ID NO: 1093740 - RNA, 22 nt, Human
aaaauagacaaaagacacgaag

SEQ ID NO: 1093741 - RNA, 19 nt, Human
aaaguggagaccaaggugg

SEQ ID NO: 1093742 - RNA, 20 nt, Human
aacugaaaucuucaaaggcu

SEQ ID NO: 1093743 - RNA, 18 nt, Human
aaucucugccugggucuc

SEQ ID NO: 1093744 - RNA, 23 nt, Human
acacgaagagaaauuucuccaaa

SEQ ID NO: 1093745 - RNA, 18 nt, Human
acugcacuccagcccggg

SEQ ID NO: 1093746 - RNA, 18 nt, Human
acugcacuccagcccggg

SEQ ID NO: 1093747 - RNA, 29 nt, Human
agacaaaagacacgaagagaagggacccc

SEQ ID NO: 1093748 - RNA, 24 nt, Human
agacacgaagagaaauuucuccaa

SEQ ID NO: 1093749 - RNA, 24 nt, Human
agaucccuggcaugggcaccgcuc

SEQ ID NO: 1093750 - RNA, 20 nt, Human
agcacuuugggagguuaagg

SEQ ID NO: 1093751 - RNA, 24 nt, Human
aggaaggcuugcaccacagggucc

SEQ ID NO: 1093752 - RNA, 23 nt, Human
aggagugagacucugucccaaaa

SEQ ID NO: 1093753 - RNA, 23 nt, Human
aggaguucaagaccagccugggc

SEQ ID NO: 1093754 - RNA, 23 nt, Human
aggcuugcaccacaggguccucc

SEQ ID NO: 1093755 - RNA, 21 nt, Human
aggggggucuggaggaaggcu

SEQ ID NO: 1093756 - RNA, 24 nt, Human
aucgugccacugcacuccagcccg

SEQ ID NO: 1093757 - RNA, 21 nt, Human
augaugauuucaucuucagau

SEQ ID NO: 1093758 - RNA, 22 nt, Human
auggacugucacagagcggagg

SEQ ID NO: 1093759 - RNA, 23 nt, Human
auggcucacaccuguaaucccag

SEQ ID NO: 1093760 - RNA, 18 nt, Human
augugcugagccugcugc

SEQ ID NO: 1093761 - RNA, 19 nt, Human
auucugugggguccaagag

SEQ ID NO: 1093762 - RNA, 23 nt, Human
caacaagcacaucaaaagauucu

SEQ ID NO: 1093763 - RNA, 24 nt, Human
cacaccuguaaucccagcacuuug

SEQ ID NO: 1093764 - RNA, 21 nt, Human
cacagagcggagggaaaagag

SEQ ID NO: 1093765 - RNA, 22 nt, Human
caccacaggguccuccaccagg

SEQ ID NO: 1093766 - RNA, 19 nt, Human
caccuguaaucccagcacu

SEQ ID NO: 1093767 - RNA, 24 nt, Human
caccuguaaucccagcacuuuggg

SEQ ID NO: 1093768 - RNA, 22 nt, Human
cacuccagcccgggguuaggag

SEQ ID NO: 1093769 - RNA, 23 nt, Human
cacuccagcccgggguuaggagu

SEQ ID NO: 1093770 - RNA, 24 nt, Human
cacuccagcccgggguuaggagug

SEQ ID NO: 1093771 - RNA, 18 nt, Human
cacugcacuccagcccgg

SEQ ID NO: 1093772 - RNA, 19 nt, Human
cacugcacuccagcccggg

SEQ ID NO: 1093773 - RNA, 19 nt, Human
cacugcacuccagcccggg

SEQ ID NO: 1093774 - RNA, 23 nt, Human
cacugcacuccagcccgggguua

SEQ ID NO: 1093775 - RNA, 20 nt, Human
cagcacuuugggagguuaag

SEQ ID NO: 1093776 - RNA, 22 nt, Human
cagcacuuugggagguuaaggg

SEQ ID NO: 1093777 - RNA, 20 nt, Human
cagccauggcugucucuggg

SEQ ID NO: 1093778 - RNA, 23 nt, Human
caucugcaaaaucucuuauucca

SEQ ID NO: 1093779 - RNA, 22 nt, Human
caucuucagaucuuuaacucaa

SEQ ID NO: 1093780 - RNA, 20 nt, Human
cauucugugggguccaagag

SEQ ID NO: 1093781 - RNA, 24 nt, Human
ccaccucuacuaaaaauaaaaaaa

SEQ ID NO: 1093782 - RNA, 18 nt, Human
ccacgggaaggaccagcc

SEQ ID NO: 1093783 - RNA, 20 nt, Human
ccacugcacuccagcccggg

SEQ ID NO: 1093784 - RNA, 20 nt, Human
ccacugcacuccagcccggg

SEQ ID NO: 1093785 - RNA, 21 nt, Human
ccacugcacuccagcccgggg

SEQ ID NO: 1093786 - RNA, 22 nt, Human
ccacugcacuccagcccggggu

SEQ ID NO: 1093787 - RNA, 19 nt, Human
cccgggguuaggagugaga

SEQ ID NO: 1093788 - RNA, 24 nt, Human
ccucuugucuucuuguaaggaugu

SEQ ID NO: 1093789 - RNA, 21 nt, Human
ccuguaaucccagcuacuugg

SEQ ID NO: 1093790 - RNA, 22 nt, Human
ccugugugcuuuuuuucuuuuu

SEQ ID NO: 1093791 - RNA, 19 nt, Human
cgaggugacagccgcuagg

SEQ ID NO: 1093792 - RNA, 21 nt, Human
cgccuguaaucccagcuacuu

SEQ ID NO: 1093793 - RNA, 23 nt, Human
cgccuguaaucccagcuacuugg

SEQ ID NO: 1093794 - RNA, 24 nt, Human
cgccuguaaucccagcuacuuggg

SEQ ID NO: 1093795 - RNA, 21 nt, Human
cgggaaggaccagccuuggaa

SEQ ID NO: 1093796 - RNA, 20 nt, Human
cgucauggacugucacagag

SEQ ID NO: 1093797 - RNA, 22 nt, Human
cuacaaaaaacuccaccucuac

SEQ ID NO: 1093798 - RNA, 26 nt, Human
cuacuuacaaacugaaaucuucaaag

SEQ ID NO: 1093799 - RNA, 22 nt, Human
cucacaccuguaaucccagcac

SEQ ID NO: 1093800 - RNA, 24 nt, Human
cucacaccuguaaucccagcacuu

SEQ ID NO: 1093801 - RNA, 24 nt, Human
cuccaaagauguacaaacggccaa

SEQ ID NO: 1093802 - RNA, 27 nt, Human
cugcagggccucucccagcuucuggcu

SEQ ID NO: 1093803 - RNA, 23 nt, Human
gacaguuugagcccaggaguuca

SEQ ID NO: 1093804 - RNA, 20 nt, Human
gagaacaagcauaggcaagu

SEQ ID NO: 1093805 - RNA, 22 nt, Human
gagcugggugguggcgugcgcc

SEQ ID NO: 1093806 - RNA, 18 nt, Human
gaggugacagccgcuagg

SEQ ID NO: 1093807 - RNA, 24 nt, Human
gcaaagccaagaucauugcucuca

SEQ ID NO: 1093808 - RNA, 22 nt, Human
gccaggggggucuggaggaagg

SEQ ID NO: 1093809 - RNA, 22 nt, Human
gcccaggaguucaagaccagcc

SEQ ID NO: 1093810 - RNA, 23 nt, Human
gccuguaaucccagcuacuuggg

SEQ ID NO: 1093811 - RNA, 22 nt, Human
gcgugcgccuguaaucccagcu

SEQ ID NO: 1093812 - RNA, 22 nt, Human
gcguggagaucgugccacugca

SEQ ID NO: 1093813 - RNA, 23 nt, Human
ggaacuggaagcugaaggcccac

SEQ ID NO: 1093814 - RNA, 23 nt, Human
ggagacacaaucucuacaaaaaa

SEQ ID NO: 1093815 - RNA, 24 nt, Human
ggagaucgugccacugcacuccag

SEQ ID NO: 1093816 - RNA, 18 nt, Human
ggccaacaagcacaucaa

SEQ ID NO: 1093817 - RNA, 20 nt, Human
ggccaacaagcacaucaaaa

SEQ ID NO: 1093818 - RNA, 19 nt, Human
ggguuaggagugagacucu

SEQ ID NO: 1093819 - RNA, 20 nt, Human
ggugccuguguccucuuguc

SEQ ID NO: 1093820 - RNA, 24 nt, Human
gguggcgugcgccuguaaucccag

SEQ ID NO: 1093821 - RNA, 21 nt, Human
ggugguggcgugcgccuguaa

SEQ ID NO: 1093822 - RNA, 22 nt, Human
guuugagcccaggaguucaaga

SEQ ID NO: 1093823 - RNA, 18 nt, Human
uaaaauagacaaaagaca

SEQ ID NO: 1093824 - RNA, 25 nt, Human
uaaaauagacaaaagacacgaagag

SEQ ID NO: 1093825 - RNA, 23 nt, Human
uaggagugagacucugucccaaa

SEQ ID NO: 1093826 - RNA, 18 nt, Human
ucacagagcggagggaaa

SEQ ID NO: 1093827 - RNA, 28 nt, Human
uccaccucuacuaaaaauaaccccuagg

SEQ ID NO: 1093828 - RNA, 19 nt, Human
uccccuacagcucuggagg

SEQ ID NO: 1093829 - RNA, 21 nt, Human
ucucacuacuuacaaacugaa

SEQ ID NO: 1093830 - RNA, 18 nt, Human
ucuccaaagauguacaaa

SEQ ID NO: 1093831 - RNA, 19 nt, Human
ucucccagcuucuggcucc

SEQ ID NO: 1093832 - RNA, 23 nt, Human
ucucccagcuucuggcuccuccu

SEQ ID NO: 1093833 - RNA, 24 nt, Human
ucucccagcuucuggcuccuccug

SEQ ID NO: 1093834 - RNA, 20 nt, Human
ucucuggggguggugccccu

SEQ ID NO: 1093835 - RNA, 21 nt, Human
ucugcaaaaucucuuauucca

SEQ ID NO: 1093836 - RNA, 23 nt, Human
ucuucagaucuuuaacucaauua

SEQ ID NO: 1093837 - RNA, 23 nt, Human
ugagcccaggaguucaagaccag

SEQ ID NO: 1093838 - RNA, 19 nt, Human
ugccauggcucacaccugu

SEQ ID NO: 1093839 - RNA, 19 nt, Human
ugccugggucuccuacggc

SEQ ID NO: 1093840 - RNA, 27 nt, Human
ugccugggucuccuacggccucuuccc

SEQ ID NO: 1093841 - RNA, 24 nt, Human
ugcgccuguaaucccagcuacuug

SEQ ID NO: 1093842 - RNA, 22 nt, Human
ugcugagccugcugccccagga

SEQ ID NO: 1093843 - RNA, 23 nt, Human
uggagaccaagguguggacaggg

SEQ ID NO: 1093844 - RNA, 21 nt, Human
uggcgugcgccuguaauccca

SEQ ID NO: 1093845 - RNA, 22 nt, Human
uggcgugcgccuguaaucccag

SEQ ID NO: 1093846 - RNA, 21 nt, Human
uggcucacaccuguaauccca

SEQ ID NO: 1093847 - RNA, 24 nt, Human
uggcucacaccuguaaucccagca

SEQ ID NO: 1093848 - RNA, 25 nt, Human
ugggaggcugagguacaagaauugu

SEQ ID NO: 1093849 - RNA, 24 nt, Human
ugguggcgugcgccuguaauccca

SEQ ID NO: 1093850 - RNA, 24 nt, Human
ugucacagagcggagggaaaagag

SEQ ID NO: 1093851 - RNA, 18 nt, Human
ugugcugagccugcugcc

SEQ ID NO: 1093852 - RNA, 23 nt, Human
uugggaggcugagguacaagaau

SEQ ID NO: 1093853 - RNA, 23 nt, Human
uuugagcccaggaguucaagacc

SEQ ID NO: 1093854 - RNA, 18 nt, Human
uuuguucauacucaaaau

SEQ ID NO: 1093855 - RNA, 24 nt, Human
uuuuugcugauuuguauauuuccu

SEQ ID NO: 1093856 - RNA, 24 nt, Human
aaaaacacccaaccacacaaagaa

SEQ ID NO: 1093857 - RNA, 23 nt, Human
aaaacacccaaccacacaaagaa

SEQ ID NO: 1093858 - RNA, 23 nt, Human
aaaagaagaaaaaaaacacccaa

SEQ ID NO: 1093859 - RNA, 25 nt, Human
aaacacccaaccacacaaagaacaa

SEQ ID NO: 1093860 - RNA, 21 nt, Human
aaagaaaagaagaaaaaaaac

SEQ ID NO: 1093861 - RNA, 20 nt, Human
aaccacacaaagaacaaaac

SEQ ID NO: 1093862 - RNA, 20 nt, Human
aaccacacaaagaacaaaac

SEQ ID NO: 1093863 - RNA, 22 nt, Human
aaccacacaaagaacaaaacca

SEQ ID NO: 1093864 - RNA, 18 nt, Human
aaccaugcgcccgcccug

SEQ ID NO: 1093865 - RNA, 27 nt, Human
aacccagucccgcccagacuagugggg

SEQ ID NO: 1093866 - RNA, 23 nt, Human
aagccagccagagcagagagggc

SEQ ID NO: 1093867 - RNA, 21 nt, Human
acaaagaacaaaaccaguaac

SEQ ID NO: 1093868 - RNA, 24 nt, Human
accacacaaagaacaaaaccagua

SEQ ID NO: 1093869 - RNA, 19 nt, Human
acugugugcugguccugcu

SEQ ID NO: 1093870 - RNA, 23 nt, Human
agaaaaaaaacacccaaccacac

SEQ ID NO: 1093871 - RNA, 23 nt, Human
agagccccucagagcuucuacau

SEQ ID NO: 1093872 - RNA, 22 nt, Human
agcaggcugccgaguggagggu

SEQ ID NO: 1093873 - RNA, 24 nt, Human
agcaguguuggucucuggggcugg

SEQ ID NO: 1093874 - RNA, 20 nt, Human
agcccucacucccuuugggg

SEQ ID NO: 1093875 - RNA, 24 nt, Human
aggccagauccaaacugagaggga

SEQ ID NO: 1093876 - RNA, 19 nt, Human
aggccuccgugugcccucg

SEQ ID NO: 1093877 - RNA, 20 nt, Human
aggcugccgaguggagggug

SEQ ID NO: 1093878 - RNA, 20 nt, Human
agggaaggugucguuuuuac

SEQ ID NO: 1093879 - RNA, 18 nt, Human
agggagcccugcgggggc

SEQ ID NO: 1093880 - RNA, 22 nt, Human
agguugucccuggagggcagcc

SEQ ID NO: 1093881 - RNA, 19 nt, Human
aguaacaaacacaaaggaa

SEQ ID NO: 1093882 - RNA, 25 nt, Human
aguaacaaacacaaaggaauucagg

SEQ ID NO: 1093883 - RNA, 19 nt, Human
aguggacagaccugguguc

SEQ ID NO: 1093884 - RNA, 22 nt, Human
augcugccggcucaucugggcc

SEQ ID NO: 1093885 - RNA, 22 nt, Human
auguccacgccucuccaguugc

SEQ ID NO: 1093886 - RNA, 26 nt, Human
caaagaacaaaaccaguaacaaacac

SEQ ID NO: 1093887 - RNA, 18 nt, Human
caaccacacaaagaacaa

SEQ ID NO: 1093888 - RNA, 19 nt, Human
caccaccgucacacacgcc

SEQ ID NO: 1093889 - RNA, 19 nt, Human
caccagggagggagcccug

SEQ ID NO: 1093890 - RNA, 21 nt, Human
caccagggagggagcccugcg

SEQ ID NO: 1093891 - RNA, 24 nt, Human
cacccaaccacacaaagaacaaaa

SEQ ID NO: 1093892 - RNA, 22 nt, Human
cacccucccuggucccuaccuc

SEQ ID NO: 1093893 - RNA, 24 nt, Human
cacgccagggagugcagacaccac

SEQ ID NO: 1093894 - RNA, 19 nt, Human
cagagccccucagagcuuc

SEQ ID NO: 1093895 - RNA, 20 nt, Human
cagccuucucaugcugccgg

SEQ ID NO: 1093896 - RNA, 21 nt, Human
caggcagguuugcguggugag

SEQ ID NO: 1093897 - RNA, 22 nt, Human
cauuuuuauuuaaaagaaaaga

SEQ ID NO: 1093898 - RNA, 21 nt, Human
ccaguaacaaacacaaaggaa

SEQ ID NO: 1093899 - RNA, 23 nt, Human
cccaagucacaggugacucagca

SEQ ID NO: 1093900 - RNA, 21 nt, Human
cccagguugucccuggagggc

SEQ ID NO: 1093901 - RNA, 20 nt, Human
ccccaagucacaggugacuc

SEQ ID NO: 1093902 - RNA, 18 nt, Human
ccccgcucugcagcacag

SEQ ID NO: 1093903 - RNA, 28 nt, Human
ccccgcucugcagcacagacaggccaga

SEQ ID NO: 1093904 - RNA, 23 nt, Human
cccgagcccuagguggggccagg

SEQ ID NO: 1093905 - RNA, 22 nt, Human
cccgcucugcagcacagacagg

SEQ ID NO: 1093906 - RNA, 19 nt, Human
cccuggcaucagcagaccc

SEQ ID NO: 1093907 - RNA, 20 nt, Human
cccuuaggccuggcugggcc

SEQ ID NO: 1093908 - RNA, 18 nt, Human
cccuucucucccugccca

SEQ ID NO: 1093909 - RNA, 22 nt, Human
ccgcagcuuuguggagggagcc

SEQ ID NO: 1093910 - RNA, 18 nt, Human
ccguguggagcagagagg

SEQ ID NO: 1093911 - RNA, 20 nt, Human
ccugccccaacugugugcug

SEQ ID NO: 1093912 - RNA, 21 nt, Human
ccugugguggcucugguggca

SEQ ID NO: 1093913 - RNA, 23 nt, Human
ccugugugccaggccagauccaa

SEQ ID NO: 1093914 - RNA, 24 nt, Human
cgaaccaugcgcccgcccugcccc

SEQ ID NO: 1093915 - RNA, 19 nt, Human
cgggagcaggcugccgagu

SEQ ID NO: 1093916 - RNA, 20 nt, Human
cgggagggguuggaguggug

SEQ ID NO: 1093917 - RNA, 22 nt, Human
cuagcaucaguccgaaccaugc

SEQ ID NO: 1093918 - RNA, 21 nt, Human
cuccugguggccuggcagguc

SEQ ID NO: 1093919 - RNA, 21 nt, Human
cucuuuaugccccucccgcug

SEQ ID NO: 1093920 - RNA, 19 nt, Human
cugguggcagcuuucugug

SEQ ID NO: 1093921 - RNA, 20 nt, Human
gaaaagaagaaaaaaaacac

SEQ ID NO: 1093922 - RNA, 23 nt, Human
gaacagcacacuucaaccccagc

SEQ ID NO: 1093923 - RNA, 25 nt, Human
gaagaaaaaaaacacccaaccacac

SEQ ID NO: 1093924 - RNA, 19 nt, Human
gagagggcugcugacuucc

SEQ ID NO: 1093925 - RNA, 21 nt, Human
gagccgccgugcuucugucac

SEQ ID NO: 1093926 - RNA, 22 nt, Human
gagccgccgugcuucugucacc

SEQ ID NO: 1093927 - RNA, 21 nt, Human
gagggugccaucgagggcucc

SEQ ID NO: 1093928 - RNA, 22 nt, Human
gcccacagaccugccucugacu

SEQ ID NO: 1093929 - RNA, 20 nt, Human
gcccugcgggggccgcagcu

SEQ ID NO: 1093930 - RNA, 22 nt, Human
gcccuuaggccuggcugggccc

SEQ ID NO: 1093931 - RNA, 21 nt, Human
gcuguggccgaggggaccggg

SEQ ID NO: 1093932 - RNA, 18 nt, Human
gcuuucuguggccccugc

SEQ ID NO: 1093933 - RNA, 22 nt, Human
ggagaagccagccagagcagag

SEQ ID NO: 1093934 - RNA, 19 nt, Human
ggccagaugcauuuguccu

SEQ ID NO: 1093935 - RNA, 22 nt, Human
ggcuggaagccgagcgcaugcu

SEQ ID NO: 1093936 - RNA, 19 nt, Human
gggagggguuggaguggug

SEQ ID NO: 1093937 - RNA, 19 nt, Human
gggcccuucucucccugcc

SEQ ID NO: 1093938 - RNA, 20 nt, Human
gggcccuucucucccugccc

SEQ ID NO: 1093939 - RNA, 18 nt, Human
gggggccgcagcuuugug

SEQ ID NO: 1093940 - RNA, 23 nt, Human
gguacugucagaagugagcccag

SEQ ID NO: 1093941 - RNA, 18 nt, Human
gucaccugcucccuuucu

SEQ ID NO: 1093942 - RNA, 18 nt, Human
gugcuccugguggccugg

SEQ ID NO: 1093943 - RNA, 24 nt, Human
guuuggcucuuuaugccccucccg

SEQ ID NO: 1093944 - RNA, 19 nt, Human
uagcaguguuggucucugg

SEQ ID NO: 1093945 - RNA, 21 nt, Human
uagggucugagagaacccugg

SEQ ID NO: 1093946 - RNA, 24 nt, Human
ucaacuguguccacccucccuggu

SEQ ID NO: 1093947 - RNA, 21 nt, Human
ucagcagugacccugugugcc

SEQ ID NO: 1093948 - RNA, 19 nt, Human
uccaaacugagagggaagg

SEQ ID NO: 1093949 - RNA, 20 nt, Human
uccaguugcugaaguagggu

SEQ ID NO: 1093950 - RNA, 23 nt, Human
uccaugcacgucaacccaguccc

SEQ ID NO: 1093951 - RNA, 22 nt, Human
ucccugugguggcucugguggc

SEQ ID NO: 1093952 - RNA, 23 nt, Human
uccguggaggccuccgugugccc

SEQ ID NO: 1093953 - RNA, 22 nt, Human
ucucacagccuucucaugcugc

SEQ ID NO: 1093954 - RNA, 23 nt, Human
ucucacagccuucucaugcugcc

SEQ ID NO: 1093955 - RNA, 25 nt, Human
ucuccugcagaccacgccagggagu

SEQ ID NO: 1093956 - RNA, 18 nt, Human
ucugcagcacagacaggc

SEQ ID NO: 1093957 - RNA, 23 nt, Human
ucugugcuccguggaggccuccg

SEQ ID NO: 1093958 - RNA, 18 nt, Human
ugacucaacuguguccac

SEQ ID NO: 1093959 - RNA, 24 nt, Human
ugaugggcccuuaggccuggcugg

SEQ ID NO: 1093960 - RNA, 21 nt, Human
ugcacaggaggcgagaacagc

SEQ ID NO: 1093961 - RNA, 27 nt, Human
ugccccaacugugugcugguccugcug

SEQ ID NO: 1093962 - RNA, 19 nt, Human
ugccgaguggagggugcca

SEQ ID NO: 1093963 - RNA, 22 nt, Human
ugccucugacucaacugugucc

SEQ ID NO: 1093964 - RNA, 19 nt, Human
ugcgcccgcccugccccaa

SEQ ID NO: 1093965 - RNA, 23 nt, Human
ugcuggucggcuuuccucuagag

SEQ ID NO: 1093966 - RNA, 20 nt, Human
ugcuugcucucugugcuccg

SEQ ID NO: 1093967 - RNA, 18 nt, Human
uggaagccgagcgcaugc

SEQ ID NO: 1093968 - RNA, 22 nt, Human
uggagggcagcccucacucccu

SEQ ID NO: 1093969 - RNA, 20 nt, Human
uggcucuuuaugccccuccc

SEQ ID NO: 1093970 - RNA, 21 nt, Human
uggcugggcccauuacauauc

SEQ ID NO: 1093971 - RNA, 19 nt, Human
ugggcuuugccaguugcug

SEQ ID NO: 1093972 - RNA, 22 nt, Human
uggggccaggaggugccuugga

SEQ ID NO: 1093973 - RNA, 22 nt, Human
uggucucuggggcuggaagccg

SEQ ID NO: 1093974 - RNA, 30 nt, Human
uggugaggagcgggagggguuggagugguu

SEQ ID NO: 1093975 - RNA, 18 nt, Human
ugugcccucguugccgug

SEQ ID NO: 1093976 - RNA, 19 nt, Human
uguguccacccucccuggu

SEQ ID NO: 1093977 - RNA, 19 nt, Human
uuaaaagaaaagaagaaaa

SEQ ID NO: 1093978 - RNA, 20 nt, Human
uuaaaagaaaagaagaaaaa

SEQ ID NO: 1093979 - RNA, 21 nt, Human
uuauuuaaaagaaaagaagaa

SEQ ID NO: 1093980 - RNA, 23 nt, Human
uugcuugcucucugugcuccgug

SEQ ID NO: 1093981 - RNA, 21 nt, Human
aauggugaccgacaugccaca

SEQ ID NO: 1093982 - RNA, 22 nt, Human
acaggcaucuuucaaauauuaa

SEQ ID NO: 1093983 - RNA, 18 nt, Human
agcugcugacuggggaac

SEQ ID NO: 1093984 - RNA, 22 nt, Human
caccacaccaugggccgguugg

SEQ ID NO: 1093985 - RNA, 18 nt, Human
caccaugggccgguuggc

SEQ ID NO: 1093986 - RNA, 18 nt, Human
caugggccgguuggcccg

SEQ ID NO: 1093987 - RNA, 19 nt, Human
caugggccgguuggcccgc

SEQ ID NO: 1093988 - RNA, 18 nt, Human
ccaugggccgguuggccc

SEQ ID NO: 1093989 - RNA, 19 nt, Human
gccacagugacuaccaagu

SEQ ID NO: 1093990 - RNA, 23 nt, Human
ggaggcacacaauggagggcaca

SEQ ID NO: 1093991 - RNA, 24 nt, Human
ggggugccugccucagccugaagc

SEQ ID NO: 1093992 - RNA, 24 nt, Human
ggguaugaccauuaaugagguguu

SEQ ID NO: 1093993 - RNA, 21 nt, Human
uagucaccacaccaugggccg

SEQ ID NO: 1093994 - RNA, 23 nt, Human
ucaaauauuaauggugaccgaca

SEQ ID NO: 1093995 - RNA, 20 nt, Human
ugaagcagagcacaggcauc

SEQ ID NO: 1093996 - RNA, 20 nt, Human
ugacuaccaaguagcugcug

SEQ ID NO: 1093997 - RNA, 21 nt, Human
ugccucagccugaagcagagc

SEQ ID NO: 1093998 - RNA, 19 nt, Human
ugguuggaagugcaaacgu

SEQ ID NO: 1093999 - RNA, 23 nt, Human
uuggcccgccugccugugauggu

SEQ ID NO: 1094000 - RNA, 22 nt, Human
acagaacuucuuaacaauugaa

SEQ ID NO: 1094001 - RNA, 21 nt, Human
agaacuggcaaagacugugaa

SEQ ID NO: 1094002 - RNA, 21 nt, Human
agcuucaccgaagaguggaau

SEQ ID NO: 1094003 - RNA, 23 nt, Human
auggauuucugagguucccuugg

SEQ ID NO: 1094004 - RNA, 24 nt, Human
caccuuuaauuuucucuuacaaaa

SEQ ID NO: 1094005 - RNA, 23 nt, Human
ccaaacaaacagaacuucuuaac

SEQ ID NO: 1094006 - RNA, 18 nt, Human
ccagacucgaagcugcuu

SEQ ID NO: 1094007 - RNA, 24 nt, Human
cugcauccauggccucacaucaug

SEQ ID NO: 1094008 - RNA, 22 nt, Human
cuuacaaaaaaaaaaaggaaaa

SEQ ID NO: 1094009 - RNA, 24 nt, Human
uaaaguagaaagucucagaggucc

SEQ ID NO: 1094010 - RNA, 20 nt, Human
uaacauguuacgaagcaggu

SEQ ID NO: 1094011 - RNA, 22 nt, Human
uacaaaaaaaaaaaggaaaacc

SEQ ID NO: 1094012 - RNA, 24 nt, Human
uagaaacuguguucuccaaagcag

SEQ ID NO: 1094013 - RNA, 20 nt, Human
uagaacuggcaaagacugug

SEQ ID NO: 1094014 - RNA, 18 nt, Human
uauagacugccacuucug

SEQ ID NO: 1094015 - RNA, 24 nt, Human
uauuuucuccugguaacaauucua

SEQ ID NO: 1094016 - RNA, 18 nt, Human
ucgaagcugcuuaaugau

SEQ ID NO: 1094017 - RNA, 23 nt, Human
ucuauuuuuucuuuugauccucc

SEQ ID NO: 1094018 - RNA, 20 nt, Human
ucuccugguaacaauucuaa

SEQ ID NO: 1094019 - RNA, 19 nt, Human
ucucuuacaaaaaaaaaaa

SEQ ID NO: 1094020 - RNA, 25 nt, Human
ucucuuacaaaaaaaaaaaggaaaa

SEQ ID NO: 1094021 - RNA, 23 nt, Human
ugaaacuguuaaaguagaaaguc

SEQ ID NO: 1094022 - RNA, 21 nt, Human
ugagggaagugcuacugguac

SEQ ID NO: 1094023 - RNA, 22 nt, Human
uggaauaagacaguccucuguu

SEQ ID NO: 1094024 - RNA, 18 nt, Human
uuacaaaaaaaaaaagga

SEQ ID NO: 1094025 - RNA, 21 nt, Human
uucuccaacaacugauucugg

SEQ ID NO: 1094026 - RNA, 28 nt, Human
uuuucaguuauagacugccacuucugau

SEQ ID NO: 1094027 - RNA, 24 nt, Human
uuuucaugucuauuuuuucuuuug

SEQ ID NO: 1094028 - RNA, 18 nt, Human
uuuucuuuugauccucca

SEQ ID NO: 1094029 - RNA, 23 nt, Human
uuuuucuccaacaacugauucug

SEQ ID NO: 1094030 - RNA, 20 nt, Human
uuuuucuuuugauccuccag

SEQ ID NO: 1094031 - RNA, 21 nt, Human
acucaaccucugccucuuggg

SEQ ID NO: 1094032 - RNA, 21 nt, Human
agagcauguuucuugcaccag

SEQ ID NO: 1094033 - RNA, 25 nt, Human
aggagguggcuggcggcccauccug

SEQ ID NO: 1094034 - RNA, 22 nt, Human
aggcggccggugguggcccggc

SEQ ID NO: 1094035 - RNA, 22 nt, Human
aggcugggguccugccccaggg

SEQ ID NO: 1094036 - RNA, 23 nt, Human
aucacccuuccacugaguacugc

SEQ ID NO: 1094037 - RNA, 21 nt, Human
augaaaagcccauuguccaca

SEQ ID NO: 1094038 - RNA, 21 nt, Human
caaaauuaccgccaccaacac

SEQ ID NO: 1094039 - RNA, 22 nt, Human
caaaauuaccgccaccaacacg

SEQ ID NO: 1094040 - RNA, 27 nt, Human
caacagacaguaagagaggcaugaaaa

SEQ ID NO: 1094041 - RNA, 22 nt, Human
caccaacacggucugcaccuuc

SEQ ID NO: 1094042 - RNA, 23 nt, Human
cagcugugagguagggccaguag

SEQ ID NO: 1094043 - RNA, 20 nt, Human
caugaaaagcccauugucca

SEQ ID NO: 1094044 - RNA, 18 nt, Human
cauguuugagacacagga

SEQ ID NO: 1094045 - RNA, 20 nt, Human
ccaccaacacggucugcacc

SEQ ID NO: 1094046 - RNA, 18 nt, Human
ccagggaagacagaguca

SEQ ID NO: 1094047 - RNA, 22 nt, Human
ccgcugccgccauucugaccug

SEQ ID NO: 1094048 - RNA, 25 nt, Human
ccggcggucccgggcucuacuuccu

SEQ ID NO: 1094049 - RNA, 22 nt, Human
ccucugccucuuggguuucagu

SEQ ID NO: 1094050 - RNA, 19 nt, Human
ccugaguagcuaagggagg

SEQ ID NO: 1094051 - RNA, 20 nt, Human
ccuguagggccgaagaaggg

SEQ ID NO: 1094052 - RNA, 22 nt, Human
ccuucuguugcuggugauagau

SEQ ID NO: 1094053 - RNA, 28 nt, Human
cggccggugguggcccggcggucccggg

SEQ ID NO: 1094054 - RNA, 24 nt, Human
cggccuccugaguagcuaagggag

SEQ ID NO: 1094055 - RNA, 23 nt, Human
cggucccgggcucuacuuccucc

SEQ ID NO: 1094056 - RNA, 23 nt, Human
cugccucggccuccugaguagcu

SEQ ID NO: 1094057 - RNA, 18 nt, Human
cugucugcaaauguaggc

SEQ ID NO: 1094058 - RNA, 23 nt, Human
cuuacucaaccucugccucuugg

SEQ ID NO: 1094059 - RNA, 24 nt, Human
cuuacucaaccucugccucuuggg

SEQ ID NO: 1094060 - RNA, 22 nt, Human
gacagcuggggaguaaagaaaa

SEQ ID NO: 1094061 - RNA, 20 nt, Human
gagaggcaugaaaagcccau

SEQ ID NO: 1094062 - RNA, 18 nt, Human
gccuccugaguagcuaag

SEQ ID NO: 1094063 - RNA, 21 nt, Human
gccucggccuccugaguagcu

SEQ ID NO: 1094064 - RNA, 21 nt, Human
ggaggguggaagaggagaggg

SEQ ID NO: 1094065 - RNA, 20 nt, Human
ggcauguuugagacacagga

SEQ ID NO: 1094066 - RNA, 20 nt, Human
gguggcccggcggucccggg

SEQ ID NO: 1094067 - RNA, 18 nt, Human
uaagaagacauucgggag

SEQ ID NO: 1094068 - RNA, 22 nt, Human
uaagagaggcaugaaaagccca

SEQ ID NO: 1094069 - RNA, 22 nt, Human
uacucaaccucugccucuuggg

SEQ ID NO: 1094070 - RNA, 27 nt, Human
ucagugauuuuucugccucggccuccu

SEQ ID NO: 1094071 - RNA, 24 nt, Human
ucccgggcucuacuuccuccuccc

SEQ ID NO: 1094072 - RNA, 19 nt, Human
uccucauuccucccucaca

SEQ ID NO: 1094073 - RNA, 22 nt, Human
ucuacuuccuccucccgcgccc

SEQ ID NO: 1094074 - RNA, 21 nt, Human
ugaggcucagggaguuaucag

SEQ ID NO: 1094075 - RNA, 18 nt, Human
ugaguuggaggagguggc

SEQ ID NO: 1094076 - RNA, 23 nt, Human
ugccucggccuccugaguagcua

SEQ ID NO: 1094077 - RNA, 24 nt, Human
ugccucggccuccugaguagcuaa

SEQ ID NO: 1094078 - RNA, 23 nt, Human
ugcuccgcugccgccauucugac

SEQ ID NO: 1094079 - RNA, 18 nt, Human
uggaagaggagagggugg

SEQ ID NO: 1094080 - RNA, 21 nt, Human
ugggacacacuguugucucca

SEQ ID NO: 1094081 - RNA, 23 nt, Human
ugucuauccucauuccucccuca

SEQ ID NO: 1094082 - RNA, 23 nt, Human
uuacucaaccucugccucuuggg

SEQ ID NO: 1094083 - RNA, 21 nt, Human
uugagacacaggagugucuau

SEQ ID NO: 1094084 - RNA, 18 nt, Human
uugcccaggcuugagugc

SEQ ID NO: 1094085 - RNA, 18 nt, Human
uuucacacauauucauuu

SEQ ID NO: 1094086 - RNA, 24 nt, Human
uuuuuaaaguuucagcugugaggu

SEQ ID NO: 1094087 - RNA, 28 nt, Human
aaaaaaaaaaaaaaaaacaacaaacaaa

SEQ ID NO: 1094088 - RNA, 21 nt, Human
aaaaaaaaaaaaaacaacaaa

SEQ ID NO: 1094089 - RNA, 26 nt, Human
aaaaaaaaaaaacaacaaacaaacca

SEQ ID NO: 1094090 - RNA, 18 nt, Human
aaaaaaaacaacaaacaa

SEQ ID NO: 1094091 - RNA, 25 nt, Human
aaaaaaaacaacaaacaaaccaaaa

SEQ ID NO: 1094092 - RNA, 20 nt, Human
aaaaaaacagaaugaucaag

SEQ ID NO: 1094093 - RNA, 24 nt, Human
aaaaaaacagaaugaucaagauua

SEQ ID NO: 1094094 - RNA, 20 nt, Human
aaaaacaacaaacaaaccaa

SEQ ID NO: 1094095 - RNA, 22 nt, Human
aaaaacaacaaacaaaccaaaa

SEQ ID NO: 1094096 - RNA, 25 nt, Human
aaaaacaacaaacaaaccaaaaaaa

SEQ ID NO: 1094097 - RNA, 23 nt, Human
aaaacaacaaacaaaccaaaaaa

SEQ ID NO: 1094098 - RNA, 21 nt, Human
aaaugaaacaagauggacaaa

SEQ ID NO: 1094099 - RNA, 21 nt, Human
aacaaacaaaccaaaaaaaca

SEQ ID NO: 1094100 - RNA, 20 nt, Human
aagaaaagcugugaacagca

SEQ ID NO: 1094101 - RNA, 19 nt, Human
aauccuuaugaaugaagac

SEQ ID NO: 1094102 - RNA, 29 nt, Human
acaauacaccaauggaaaaaaaaggcagc

SEQ ID NO: 1094103 - RNA, 20 nt, Human
acagaguaagacuccaucuc

SEQ ID NO: 1094104 - RNA, 21 nt, Human
accaauggaaaaaaaaggcac

SEQ ID NO: 1094105 - RNA, 18 nt, Human
acuacacuccagccuggg

SEQ ID NO: 1094106 - RNA, 24 nt, Human
acuacacuccagccugggcgacag

SEQ ID NO: 1094107 - RNA, 23 nt, Human
agacacaaaagggucauuccugg

SEQ ID NO: 1094108 - RNA, 24 nt, Human
agacuucaggaaugcaccacacag

SEQ ID NO: 1094109 - RNA, 24 nt, Human
agagauugcagugagccgagaucg

SEQ ID NO: 1094110 - RNA, 22 nt, Human
agcaaagugccucccacuuccc

SEQ ID NO: 1094111 - RNA, 22 nt, Human
agcauuuugggaggcugaggca

SEQ ID NO: 1094112 - RNA, 25 nt, Human
agcauuuugggaggcugaggcaggg

SEQ ID NO: 1094113 - RNA, 24 nt, Human
agccugggcgacagaguaagacuc

SEQ ID NO: 1094114 - RNA, 22 nt, Human
aggaagauuucccacaaaaaga

SEQ ID NO: 1094115 - RNA, 21 nt, Human
aggcagagauugcagugagcc

SEQ ID NO: 1094116 - RNA, 24 nt, Human
aggcagagauugcagugagccgag

SEQ ID NO: 1094117 - RNA, 20 nt, Human
aggcugaggcaggggaucac

SEQ ID NO: 1094118 - RNA, 23 nt, Human
aggggaucacgaggucaggaguu

SEQ ID NO: 1094119 - RNA, 24 nt, Human
agugagguugggcacgguggcuca

SEQ ID NO: 1094120 - RNA, 24 nt, Human
aucgugccacuacacuccagccug

SEQ ID NO: 1094121 - RNA, 20 nt, Human
augcggcuaaggucauuggg

SEQ ID NO: 1094122 - RNA, 25 nt, Human
auuggcggugguggcggcugcagcu

SEQ ID NO: 1094123 - RNA, 22 nt, Human
caaaaaaaaaaaaaaaaaaaaa

SEQ ID NO: 1094124 - RNA, 18 nt, Human
caaagugccucccacuuc

SEQ ID NO: 1094125 - RNA, 19 nt, Human
caaauacaauacaccaaug

SEQ ID NO: 1094126 - RNA, 28 nt, Human
caacaaacaaaccaaaaaaacagaauga

SEQ ID NO: 1094127 - RNA, 20 nt, Human
caagaaaagcugugaacagc

SEQ ID NO: 1094128 - RNA, 19 nt, Human
caauacaccaauggaaaaa

SEQ ID NO: 1094129 - RNA, 24 nt, Human
cacagcaugacuaccuaagauagg

SEQ ID NO: 1094130 - RNA, 19 nt, Human
caccccucccuuguccucu

SEQ ID NO: 1094131 - RNA, 24 nt, Human
caccccuguaaucccagcauuuug

SEQ ID NO: 1094132 - RNA, 19 nt, Human
caccugggagugaauggag

SEQ ID NO: 1094133 - RNA, 19 nt, Human
cacggccucucccgucccg

SEQ ID NO: 1094134 - RNA, 27 nt, Human
cacuacacuccagccugggcgacagag

SEQ ID NO: 1094135 - RNA, 22 nt, Human
cacuccagccugggcgacagag

SEQ ID NO: 1094136 - RNA, 24 nt, Human
cagcaaagugccucccacuucccu

SEQ ID NO: 1094137 - RNA, 24 nt, Human
cagcauuuugggaggcugaggcag

SEQ ID NO: 1094138 - RNA, 25 nt, Human
cagcauuuugggaggcugaggcagg

SEQ ID NO: 1094139 - RNA, 26 nt, Human
cauuucuuccucagugaugucgggag

SEQ ID NO: 1094140 - RNA, 21 nt, Human
ccacuacacuccagccugggc

SEQ ID NO: 1094141 - RNA, 21 nt, Human
ccacuacacuccagccugggc

SEQ ID NO: 1094142 - RNA, 23 nt, Human
ccacuacacuccagccugggcga

SEQ ID NO: 1094143 - RNA, 24 nt, Human
ccacuacacuccagccugggcgac

SEQ ID NO: 1094144 - RNA, 23 nt, Human
ccaguucucagaaaaacuccaaa

SEQ ID NO: 1094145 - RNA, 23 nt, Human
cccaagaaaaagauggaggcaag

SEQ ID NO: 1094146 - RNA, 24 nt, Human
cccacuucccucuaaccuggacuu

SEQ ID NO: 1094147 - RNA, 19 nt, Human
ccccuguaaucccagcauu

SEQ ID NO: 1094148 - RNA, 24 nt, Human
ccccuguaaucccagcauuuuggg

SEQ ID NO: 1094149 - RNA, 24 nt, Human
ccguauguacguugccugugaccu

SEQ ID NO: 1094150 - RNA, 18 nt, Human
ccucacccaagaaaaaga

SEQ ID NO: 1094151 - RNA, 21 nt, Human
ccuccagcauacucccuagag

SEQ ID NO: 1094152 - RNA, 18 nt, Human
ccucuaccgacuggucuc

SEQ ID NO: 1094153 - RNA, 22 nt, Human
ccugggcgacagaguaagacuc

SEQ ID NO: 1094154 - RNA, 22 nt, Human
ccuguaaucccagcauuuuggg

SEQ ID NO: 1094155 - RNA, 18 nt, Human
ccuucuuuuaaggguuuu

SEQ ID NO: 1094156 - RNA, 23 nt, Human
cgcuacacggccucucccguccc

SEQ ID NO: 1094157 - RNA, 22 nt, Human
cuaagagaaaaugucuucuuua

SEQ ID NO: 1094158 - RNA, 21 nt, Human
cucaccccuguaaucccagca

SEQ ID NO: 1094159 - RNA, 21 nt, Human
cuccaguucucagaaaaacuc

SEQ ID NO: 1094160 - RNA, 28 nt, Human
cugguggugauguugaugaugcuuucuu

SEQ ID NO: 1094161 - RNA, 21 nt, Human
cuucccucuaaccuggacuuc

SEQ ID NO: 1094162 - RNA, 22 nt, Human
cuucucuccugguuuucuaaaa

SEQ ID NO: 1094163 - RNA, 22 nt, Human
cuuuuccaggguagaauucugg

SEQ ID NO: 1094164 - RNA, 21 nt, Human
gaaaaaaaaggcacagcauga

SEQ ID NO: 1094165 - RNA, 22 nt, Human
gacaaaucaaauacaauacacc

SEQ ID NO: 1094166 - RNA, 23 nt, Human
gagaucgugccacuacacuccag

SEQ ID NO: 1094167 - RNA, 22 nt, Human
gaucacgaggucaggaguucaa

SEQ ID NO: 1094168 - RNA, 24 nt, Human
gaucacgaggucaggaguucaaga

SEQ ID NO: 1094169 - RNA, 22 nt, Human
gccacuacacuccagccugggc

SEQ ID NO: 1094170 - RNA, 20 nt, Human
gccgagaucgugccacuaca

SEQ ID NO: 1094171 - RNA, 18 nt, Human
ggaggcugaggcagggga

SEQ ID NO: 1094172 - RNA, 21 nt, Human
ggaucacgaggucaggaguuc

SEQ ID NO: 1094173 - RNA, 23 nt, Human
ggcacgguggcucaccccuguaa

SEQ ID NO: 1094174 - RNA, 20 nt, Human
ggccaaauagucaaagccuu

SEQ ID NO: 1094175 - RNA, 23 nt, Human
gguggcucaccccuguaauccca

SEQ ID NO: 1094176 - RNA, 24 nt, Human
gguggcucaccccuguaaucccag

SEQ ID NO: 1094177 - RNA, 28 nt, Human
guaacggcgacgcuacacggccucuccc

SEQ ID NO: 1094178 - RNA, 23 nt, Human
guggcucaccccuguaaucccag

SEQ ID NO: 1094179 - RNA, 24 nt, Human
guggugauguugaugaugcuuucu

SEQ ID NO: 1094180 - RNA, 19 nt, Human
uaaaaugaaaaucucuaag

SEQ ID NO: 1094181 - RNA, 19 nt, Human
uaacuggaucuacuuugcc

SEQ ID NO: 1094182 - RNA, 24 nt, Human
uaagagaaaaugucuucuuuagga

SEQ ID NO: 1094183 - RNA, 24 nt, Human
uaagagcuacugucagaccuucag

SEQ ID NO: 1094184 - RNA, 21 nt, Human
uacaauacaccaauggaaaaa

SEQ ID NO: 1094185 - RNA, 22 nt, Human
uacguugccugugaccuuugug

SEQ ID NO: 1094186 - RNA, 21 nt, Human
uacucugcauuuuugcacccu

SEQ ID NO: 1094187 - RNA, 26 nt, Human
uaggccuaucaagaaaagcugugaac

SEQ ID NO: 1094188 - RNA, 18 nt, Human
uauaauagaaccguaugu

SEQ ID NO: 1094189 - RNA, 19 nt, Human
uaucaagaaaagcugugaa

SEQ ID NO: 1094190 - RNA, 20 nt, Human
uaucagagacaaaucaaaua

SEQ ID NO: 1094191 - RNA, 21 nt, Human
uaucagagacaaaucaaauac

SEQ ID NO: 1094192 - RNA, 22 nt, Human
uauuacucugcauuuuugcacc

SEQ ID NO: 1094193 - RNA, 22 nt, Human
ucacccaagaaaaagauggagg

SEQ ID NO: 1094194 - RNA, 21 nt, Human
ucacgaggucaggaguucaag

SEQ ID NO: 1094195 - RNA, 24 nt, Human
ucacgaggucaggaguucaagauc

SEQ ID NO: 1094196 - RNA, 25 nt, Human
ucagaaaaacuccaaauauaucaga

SEQ ID NO: 1094197 - RNA, 19 nt, Human
ucaggccaaauagucaaag

SEQ ID NO: 1094198 - RNA, 24 nt, Human
uccaaaaaggguccuucuuuuaag

SEQ ID NO: 1094199 - RNA, 24 nt, Human
uccagccugggcgacagaguaaga

SEQ ID NO: 1094200 - RNA, 22 nt, Human
uccccaggcccucaacaaucac

SEQ ID NO: 1094201 - RNA, 21 nt, Human
ucgggaggaagauuucccaca

SEQ ID NO: 1094202 - RNA, 23 nt, Human
ucuacuuugccaugguuucccca

SEQ ID NO: 1094203 - RNA, 19 nt, Human
ucuuccucagugaugucgg

SEQ ID NO: 1094204 - RNA, 19 nt, Human
ugaaugaagacuucgccug

SEQ ID NO: 1094205 - RNA, 19 nt, Human
ugagaaacuagacacugca

SEQ ID NO: 1094206 - RNA, 19 nt, Human
ugagccgagaucgugccac

SEQ ID NO: 1094207 - RNA, 18 nt, Human
ugaggcaggggaucacga

SEQ ID NO: 1094208 - RNA, 23 nt, Human
ugaggcaggggaucacgagguca

SEQ ID NO: 1094209 - RNA, 23 nt, Human
ugaugucgggaggaagauuuccc

SEQ ID NO: 1094210 - RNA, 23 nt, Human
uggaaaaaaaaggcacagcauga

SEQ ID NO: 1094211 - RNA, 20 nt, Human
uggacaaaaaaaaaaaaaaa

SEQ ID NO: 1094212 - RNA, 21 nt, Human
uggcucaccccuguaauccca

SEQ ID NO: 1094213 - RNA, 22 nt, Human
uggcucaccccuguaaucccag

SEQ ID NO: 1094214 - RNA, 24 nt, Human
uggcucaccccuguaaucccagca

SEQ ID NO: 1094215 - RNA, 18 nt, Human
ugggaggcugaggcaggg

SEQ ID NO: 1094216 - RNA, 23 nt, Human
ugggaggcugaggcaggggauca

SEQ ID NO: 1094217 - RNA, 20 nt, Human
ugggggauguuugguuuuug

SEQ ID NO: 1094218 - RNA, 24 nt, Human
ugguguauguggcaguuucucugg

SEQ ID NO: 1094219 - RNA, 21 nt, Human
uguggcaguuucucugggacu

SEQ ID NO: 1094220 - RNA, 25 nt, Human
ugugguguauguggcaguuucucug

SEQ ID NO: 1094221 - RNA, 24 nt, Human
uuaaggguuuugagaaacuagaca

SEQ ID NO: 1094222 - RNA, 21 nt, Human
uucaggaaugcaccacacaga

SEQ ID NO: 1094223 - RNA, 23 nt, Human
uucgauugaagacagcaaagugc

SEQ ID NO: 1094224 - RNA, 22 nt, Human
uugaagacagcaaagugccucc

SEQ ID NO: 1094225 - RNA, 18 nt, Human
uugcagugagccgagauc

SEQ ID NO: 1094226 - RNA, 21 nt, Human
uugcagugagccgagaucgug

SEQ ID NO: 1094227 - RNA, 22 nt, Human
uugcagugagccgagaucgugc

SEQ ID NO: 1094228 - RNA, 23 nt, Human
uugcagugagccgagaucgugcc

SEQ ID NO: 1094229 - RNA, 24 nt, Human
uugggaggcugaggcaggggauca

SEQ ID NO: 1094230 - RNA, 21 nt, Human
uuuuaaggguuuugagaaacu

SEQ ID NO: 1094231 - RNA, 23 nt, Human
acaacagaaauauauucucuccc

SEQ ID NO: 1094232 - RNA, 23 nt, Human
accacagcaaguacccugaucug

SEQ ID NO: 1094233 - RNA, 24 nt, Human
agaaauauauucucucccagcucc

SEQ ID NO: 1094234 - RNA, 19 nt, Human
agccagccuucuagcuccu

SEQ ID NO: 1094235 - RNA, 21 nt, Human
agccagccuucuagcuccugg

SEQ ID NO: 1094236 - RNA, 18 nt, Human
aggccagaagucugcaau

SEQ ID NO: 1094237 - RNA, 21 nt, Human
agugcaguggugcgaucucag

SEQ ID NO: 1094238 - RNA, 23 nt, Human
agugcaguggugcgaucucagcu

SEQ ID NO: 1094239 - RNA, 24 nt, Human
agugcaguggugcgaucucagcuc

SEQ ID NO: 1094240 - RNA, 24 nt, Human
aguggugcgaucucagcucacugc

SEQ ID NO: 1094241 - RNA, 20 nt, Human
caacagaaauauauucucuc

SEQ ID NO: 1094242 - RNA, 22 nt, Human
cagcuccggaggccagaagucu

SEQ ID NO: 1094243 - RNA, 18 nt, Human
ccacaucacuccagccuc

SEQ ID NO: 1094244 - RNA, 24 nt, Human
cccucugucgcccaggcuugagug

SEQ ID NO: 1094245 - RNA, 20 nt, Human
ccucugucgcccaggcuuga

SEQ ID NO: 1094246 - RNA, 18 nt, Human
cucacugcaaccuccacc

SEQ ID NO: 1094247 - RNA, 18 nt, Human
cuccagccucacgugggc

SEQ ID NO: 1094248 - RNA, 20 nt, Human
cuccagguguuccuugguuu

SEQ ID NO: 1094249 - RNA, 22 nt, Human
gagugcaguggugcgaucucag

SEQ ID NO: 1094250 - RNA, 19 nt, Human
ggcagggcuccacucccuc

SEQ ID NO: 1094251 - RNA, 25 nt, Human
ggcuccacucccuccagaggcucua

SEQ ID NO: 1094252 - RNA, 23 nt, Human
gggcagggcuccacucccuccag

SEQ ID NO: 1094253 - RNA, 27 nt, Human
guguugucucuuuuuuuuuuuuuuuuu

SEQ ID NO: 1094254 - RNA, 19 nt, Human
uacccugaucugggguugc

SEQ ID NO: 1094255 - RNA, 18 nt, Human
ucacuccagccucacgug

SEQ ID NO: 1094256 - RNA, 18 nt, Human
ucacugcaaccuccaccg

SEQ ID NO: 1094257 - RNA, 19 nt, Human
ucccagcuccggaggccag

SEQ ID NO: 1094258 - RNA, 18 nt, Human
ucccagcuccggaggccg

SEQ ID NO: 1094259 - RNA, 21 nt, Human
ucccucugucgcccaggcuug

SEQ ID NO: 1094260 - RNA, 22 nt, Human
uccugccucuuccagccagccu

SEQ ID NO: 1094261 - RNA, 18 nt, Human
ucgcccaggcuugagugc

SEQ ID NO: 1094262 - RNA, 19 nt, Human
ucucccucugucgcccagg

SEQ ID NO: 1094263 - RNA, 24 nt, Human
ucucccucugucgcccaggcuuga

SEQ ID NO: 1094264 - RNA, 25 nt, Human
ucucccucugucgcccaggcuugag

SEQ ID NO: 1094265 - RNA, 18 nt, Human
ucugcaaucaaggugugg

SEQ ID NO: 1094266 - RNA, 25 nt, Human
ucugcaaucaaggugugggcagggc

SEQ ID NO: 1094267 - RNA, 24 nt, Human
ucugucgcccaggcuugagugcag

SEQ ID NO: 1094268 - RNA, 20 nt, Human
ucugucucuguguugucucu

SEQ ID NO: 1094269 - RNA, 21 nt, Human
ucuuuuuuuuuuuuuuuuugg

SEQ ID NO: 1094270 - RNA, 22 nt, Human
ugcaguggugcgaucucagcuc

SEQ ID NO: 1094271 - RNA, 24 nt, Human
ugggcagggcuccacucccuccag

SEQ ID NO: 1094272 - RNA, 24 nt, Human
uggugcgaucucagcucacugcaa

SEQ ID NO: 1094273 - RNA, 22 nt, Human
ugucucuuuuuuuuuuuuuuuu

SEQ ID NO: 1094274 - RNA, 27 nt, Human
ugucucuuuuuuuuuuuuuuuuugcag

SEQ ID NO: 1094275 - RNA, 21 nt, Human
ugugggcagggcuccacuccc

SEQ ID NO: 1094276 - RNA, 29 nt, Human
uguugucucuuuuuuuuuuuuuuuuuuuc

SEQ ID NO: 1094277 - RNA, 24 nt, Human
uugagugcaguggugcgaucucag

SEQ ID NO: 1094278 - RNA, 23 nt, Human
uuuuuuuuuuuuuugcagacgga

SEQ ID NO: 1094279 - RNA, 21 nt, Human
uuuuuuuuuuuuuuuuugcag

SEQ ID NO: 1094280 - RNA, 19 nt, Human
aaagacaucaaaugucuaa

SEQ ID NO: 1094281 - RNA, 19 nt, Human
aauuuaaaauuugcaaagg

SEQ ID NO: 1094282 - RNA, 18 nt, Human
acaagaaaagcagccuag

SEQ ID NO: 1094283 - RNA, 19 nt, Human
accauuuugaguauauugu

SEQ ID NO: 1094284 - RNA, 18 nt, Human
accuugcugcucaaaccc

SEQ ID NO: 1094285 - RNA, 23 nt, Human
agaaaagcagccuagauccugag

SEQ ID NO: 1094286 - RNA, 22 nt, Human
agacaccaccucagucccauca

SEQ ID NO: 1094287 - RNA, 19 nt, Human
agagaaacauauaacuuuu

SEQ ID NO: 1094288 - RNA, 18 nt, Human
agagcuaucaaacuguag

SEQ ID NO: 1094289 - RNA, 22 nt, Human
agcuaucaaacuguagaaggcu

SEQ ID NO: 1094290 - RNA, 23 nt, Human
aggguucaccauuuugaguauau

SEQ ID NO: 1094291 - RNA, 22 nt, Human
auuugaaucuuccccuccaucc

SEQ ID NO: 1094292 - RNA, 20 nt, Human
cagacaccaccucaguccca

SEQ ID NO: 1094293 - RNA, 24 nt, Human
cagcaaguguccccucaaaagccu

SEQ ID NO: 1094294 - RNA, 23 nt, Human
cagcugccucaccccuuccuacu

SEQ ID NO: 1094295 - RNA, 18 nt, Human
caggacagcugccucacc

SEQ ID NO: 1094296 - RNA, 22 nt, Human
caggaugggacacgauauggug

SEQ ID NO: 1094297 - RNA, 24 nt, Human
caggcaauguggcugaaacaagcc

SEQ ID NO: 1094298 - RNA, 25 nt, Human
caggugaacauuugaaucuuccccu

SEQ ID NO: 1094299 - RNA, 19 nt, Human
ccgccagaaccgggcaagc

SEQ ID NO: 1094300 - RNA, 22 nt, Human
ccucuauaaaagucaacugcuu

SEQ ID NO: 1094301 - RNA, 18 nt, Human
ccugagcauucagcuccu

SEQ ID NO: 1094302 - RNA, 22 nt, Human
cucaaaaauuuuuucagucacc

SEQ ID NO: 1094303 - RNA, 23 nt, Human
cugguuagagcuaucaaacugua

SEQ ID NO: 1094304 - RNA, 18 nt, Human
cuucacacaacagacacc

SEQ ID NO: 1094305 - RNA, 18 nt, Human
cuucugaguccccaaaua

SEQ ID NO: 1094306 - RNA, 20 nt, Human
gaacauuugaaucuuccccu

SEQ ID NO: 1094307 - RNA, 22 nt, Human
gagcauucagcuccugucuuca

SEQ ID NO: 1094308 - RNA, 23 nt, Human
gcaaguguccccucaaaagccuu

SEQ ID NO: 1094309 - RNA, 21 nt, Human
ggacagcugccucaccccuuc

SEQ ID NO: 1094310 - RNA, 18 nt, Human
ggccaggcaauguggcug

SEQ ID NO: 1094311 - RNA, 24 nt, Human
ggcuuagugccugucccagcaagu

SEQ ID NO: 1094312 - RNA, 26 nt, Human
guccccaaauauucucugagugccag

SEQ ID NO: 1094313 - RNA, 18 nt, Human
uaaaagagaaacauauaa

SEQ ID NO: 1094314 - RNA, 26 nt, Human
uaaaauagaaggucugcaccugagca

SEQ ID NO: 1094315 - RNA, 19 nt, Human
uaaaauuugcaaaggcaua

SEQ ID NO: 1094316 - RNA, 22 nt, Human
uaacccaacugaccacaagaaa

SEQ ID NO: 1094317 - RNA, 19 nt, Human
uagauccugagcauucagc

SEQ ID NO: 1094318 - RNA, 23 nt, Human
uagauccugagcauucagcuccu

SEQ ID NO: 1094319 - RNA, 31 nt, Human
uagcagguucuugcucucauuccaagaccuu

SEQ ID NO: 1094320 - RNA, 18 nt, Human
uauagcagguucuugcuc

SEQ ID NO: 1094321 - RNA, 26 nt, Human
uccaccauugagacauauuccagagc

SEQ ID NO: 1094322 - RNA, 22 nt, Human
uccagggcuggauccccagggc

SEQ ID NO: 1094323 - RNA, 23 nt, Human
ucccagcaaguguccccucaaaa

SEQ ID NO: 1094324 - RNA, 18 nt, Human
uccccucaaaagccuucu

SEQ ID NO: 1094325 - RNA, 20 nt, Human
uccuauagcagguucuugcu

SEQ ID NO: 1094326 - RNA, 20 nt, Human
uccugagcauucagcuccug

SEQ ID NO: 1094327 - RNA, 23 nt, Human
ucugaauuaaaagagaaacauau

SEQ ID NO: 1094328 - RNA, 20 nt, Human
ucugcugaauggggucaggg

SEQ ID NO: 1094329 - RNA, 23 nt, Human
ugaaagacaucaaaugucuaaca

SEQ ID NO: 1094330 - RNA, 18 nt, Human
ugaccacaagaaaagcag

SEQ ID NO: 1094331 - RNA, 18 nt, Human
ugagaaaagcauacaaga

SEQ ID NO: 1094332 - RNA, 22 nt, Human
ugagaaaagcauacaagaaugg

SEQ ID NO: 1094333 - RNA, 21 nt, Human
ugagaagucuguaucugcugg

SEQ ID NO: 1094334 - RNA, 20 nt, Human
ugcccaggcaagggaugggc

SEQ ID NO: 1094335 - RNA, 20 nt, Human
ugccuuaacaggaugggaca

SEQ ID NO: 1094336 - RNA, 21 nt, Human
ugccuuaacaggaugggacac

SEQ ID NO: 1094337 - RNA, 23 nt, Human
uuaacauuuucccacagggagua

SEQ ID NO: 1094338 - RNA, 21 nt, Human
uuagaggcuacagccuuuucu

SEQ ID NO: 1094339 - RNA, 21 nt, Human
uucuuuccuucugagaaaagc

SEQ ID NO: 1094340 - RNA, 22 nt, Human
uuggucccaaacagguaaccca

SEQ ID NO: 1094341 - RNA, 24 nt, Human
uuggucccaaacagguaacccaac

SEQ ID NO: 1094342 - RNA, 21 nt, Human
uuuaacaccuucugaguccuu

SEQ ID NO: 1094343 - RNA, 21 nt, Human
acauagaaguccggaguucac

SEQ ID NO: 1094344 - RNA, 21 nt, Human
accucaugagauauucuugag

SEQ ID NO: 1094345 - RNA, 24 nt, Human
auaccaaauucauuauggaaucca

SEQ ID NO: 1094346 - RNA, 24 nt, Human
auauuagaagcauguuuuagagca

SEQ ID NO: 1094347 - RNA, 22 nt, Human
auugcuaguuguuucuucgucu

SEQ ID NO: 1094348 - RNA, 18 nt, Human
caaaauguccuuccugga

SEQ ID NO: 1094349 - RNA, 20 nt, Human
caagggaugcugcacaccac

SEQ ID NO: 1094350 - RNA, 21 nt, Human
caccaagcauauuagaagcau

SEQ ID NO: 1094351 - RNA, 18 nt, Human
cagcacagguucgaagaa

SEQ ID NO: 1094352 - RNA, 19 nt, Human
cagccuguauggcuucauc

SEQ ID NO: 1094353 - RNA, 18 nt, Human
cauccauaagcuuguuuu

SEQ ID NO: 1094354 - RNA, 23 nt, Human
cauuauggaauccaccuggucuu

SEQ ID NO: 1094355 - RNA, 20 nt, Human
ccaacugugaucaaaaggua

SEQ ID NO: 1094356 - RNA, 21 nt, Human
cccuacaguuuacaacuugcu

SEQ ID NO: 1094357 - RNA, 21 nt, Human
ccucaagggaugcugcacacc

SEQ ID NO: 1094358 - RNA, 19 nt, Human
ccugcucauccugagggga

SEQ ID NO: 1094359 - RNA, 22 nt, Human
ccuguauggcuucauccaagag

SEQ ID NO: 1094360 - RNA, 18 nt, Human
cgcucugcucaucagcaa

SEQ ID NO: 1094361 - RNA, 20 nt, Human
cucaagggaugcugcacacc

SEQ ID NO: 1094362 - RNA, 20 nt, Human
cucaucagcaaaaucuucug

SEQ ID NO: 1094363 - RNA, 22 nt, Human
cucaucagcaaaaucuucugga

SEQ ID NO: 1094364 - RNA, 18 nt, Human
cugaggggacugcugugu

SEQ ID NO: 1094365 - RNA, 18 nt, Human
cugaucuugaaucaacgu

SEQ ID NO: 1094366 - RNA, 23 nt, Human
cuucgucuguuggcucuccuuca

SEQ ID NO: 1094367 - RNA, 21 nt, Human
cuugcuccaauaugccagaca

SEQ ID NO: 1094368 - RNA, 18 nt, Human
gaaugaagggcccacaac

SEQ ID NO: 1094369 - RNA, 20 nt, Human
gagcauccauaagcuuguuu

SEQ ID NO: 1094370 - RNA, 19 nt, Human
gcauccauaagcuuguuuu

SEQ ID NO: 1094371 - RNA, 19 nt, Human
gguccaucuucacaguggc

SEQ ID NO: 1094372 - RNA, 19 nt, Human
guucuugucuuucucgcuc

SEQ ID NO: 1094373 - RNA, 19 nt, Human
uaacucagcacagguucga

SEQ ID NO: 1094374 - RNA, 23 nt, Human
uaccaaaucuuucaaaauguccu

SEQ ID NO: 1094375 - RNA, 20 nt, Human
uagaccuccaaguagugcag

SEQ ID NO: 1094376 - RNA, 19 nt, Human
uagagaucugccacuuucc

SEQ ID NO: 1094377 - RNA, 23 nt, Human
uauacaacuccaacugugaucaa

SEQ ID NO: 1094378 - RNA, 20 nt, Human
ucaucagggaaaaccugaau

SEQ ID NO: 1094379 - RNA, 20 nt, Human
ucaucugucagguagaccuc

SEQ ID NO: 1094380 - RNA, 19 nt, Human
uccaagagcuuuuccugcu

SEQ ID NO: 1094381 - RNA, 21 nt, Human
ucugcugggauuccaggucca

SEQ ID NO: 1094382 - RNA, 25 nt, Human
ucuggaggugaaauucaucagggaa

SEQ ID NO: 1094383 - RNA, 22 nt, Human
ucuggaucagggucuucuacag

SEQ ID NO: 1094384 - RNA, 23 nt, Human
ugaauaacacaccucaugagaua

SEQ ID NO: 1094385 - RNA, 20 nt, Human
ugagccaaaguaucccuaca

SEQ ID NO: 1094386 - RNA, 27 nt, Human
ugcaccaaauguguucccacuaaaauu

SEQ ID NO: 1094387 - RNA, 18 nt, Human
ugcugcacaccacggcac

SEQ ID NO: 1094388 - RNA, 18 nt, Human
uggaaucacugauauugc

SEQ ID NO: 1094389 - RNA, 19 nt, Human
ugggauuccagguccaucu

SEQ ID NO: 1094390 - RNA, 19 nt, Human
ugguguaacucagcacagg

SEQ ID NO: 1094391 - RNA, 26 nt, Human
uguucuacauuuacaccuuccaacug

SEQ ID NO: 1094392 - RNA, 20 nt, Human
uucacaguggcaaauaaagc

SEQ ID NO: 1094393 - RNA, 18 nt, Human
uuccagcauacuguacaa

SEQ ID NO: 1094394 - RNA, 18 nt, Human
uuccagguccaucuucac

SEQ ID NO: 1094395 - RNA, 22 nt, Human
uuucucgcucucuuuuuucucu

SEQ ID NO: 1094396 - RNA, 21 nt, Human
cccgcgcugcucuccugggac

SEQ ID NO: 1094397 - RNA, 23 nt, Human
cuccugggacuccgccugaaguu

SEQ ID NO: 1094398 - RNA, 23 nt, Human
gaggaguuagaaccaucuucuug

SEQ ID NO: 1094399 - RNA, 18 nt, Human
gggaggaguuagaaccau

SEQ ID NO: 1094400 - RNA, 18 nt, Human
gucugggcaggcugaggc

SEQ ID NO: 1094401 - RNA, 18 nt, Human
uagaaccaucuucuugga

SEQ ID NO: 1094402 - RNA, 21 nt, Human
ugggaucccgcgcugcucucc

SEQ ID NO: 1094403 - RNA, 21 nt, Human
aacagggauggggagaggggu

SEQ ID NO: 1094404 - RNA, 19 nt, Human
aacucgaugacaggggacc

SEQ ID NO: 1094405 - RNA, 22 nt, Human
aagaaaagaaaaucuggguccc

SEQ ID NO: 1094406 - RNA, 18 nt, Human
aagcccuccacaccuaca

SEQ ID NO: 1094407 - RNA, 23 nt, Human
aagcgguuguagcugcccagggc

SEQ ID NO: 1094408 - RNA, 19 nt, Human
acagaaguagaccagcacc

SEQ ID NO: 1094409 - RNA, 22 nt, Human
accacacacacacauccacaca

SEQ ID NO: 1094410 - RNA, 18 nt, Human
acccucacgcagccccag

SEQ ID NO: 1094411 - RNA, 21 nt, Human
accuccagucccccagacagc

SEQ ID NO: 1094412 - RNA, 19 nt, Human
acgaagccagcaaagaagc

SEQ ID NO: 1094413 - RNA, 22 nt, Human
acgaccaggaccacguagggga

SEQ ID NO: 1094414 - RNA, 22 nt, Human
acgcagccccagcccuccagcc

SEQ ID NO: 1094415 - RNA, 24 nt, Human
acugcugcuucuggggugaggggu

SEQ ID NO: 1094416 - RNA, 25 nt, Human
acuggaggugcaggaagugcauccg

SEQ ID NO: 1094417 - RNA, 21 nt, Human
agaacucgaugacaggggacc

SEQ ID NO: 1094418 - RNA, 21 nt, Human
agaagaacagggcagcccaga

SEQ ID NO: 1094419 - RNA, 22 nt, Human
agaccacgaagccagcaaagaa

SEQ ID NO: 1094420 - RNA, 22 nt, Human
agacucgcacaugcaacagcuc

SEQ ID NO: 1094421 - RNA, 18 nt, Human
agaguggggccacuggca

SEQ ID NO: 1094422 - RNA, 18 nt, Human
agcaaagaagcugguccc

SEQ ID NO: 1094423 - RNA, 18 nt, Human
agcaacagcaugaagaag

SEQ ID NO: 1094424 - RNA, 19 nt, Human
agcaacagcaugaagaaga

SEQ ID NO: 1094425 - RNA, 20 nt, Human
agcagagccuggagaggugg

SEQ ID NO: 1094426 - RNA, 21 nt, Human
agcagugaaguacacgaucuu

SEQ ID NO: 1094427 - RNA, 18 nt, Human
agccucuguccggguguc

SEQ ID NO: 1094428 - RNA, 19 nt, Human
agccuggagaggugggcag

SEQ ID NO: 1094429 - RNA, 19 nt, Human
agcgagaucuccaagaaga

SEQ ID NO: 1094430 - RNA, 18 nt, Human
agcgguuguagcugccca

SEQ ID NO: 1094431 - RNA, 24 nt, Human
agcguggugguaaaggacuugacc

SEQ ID NO: 1094432 - RNA, 21 nt, Human
agcuucuauaacagggauggg

SEQ ID NO: 1094433 - RNA, 19 nt, Human
aggcagcagcacuccaagc

SEQ ID NO: 1094434 - RNA, 21 nt, Human
aggcgaugaaggccaggccuc

SEQ ID NO: 1094435 - RNA, 20 nt, Human
agggggugggcguggcaggg

SEQ ID NO: 1094436 - RNA, 30 nt, Human; identical to SEQ ID NO: 368013

SEQ ID NO: 1094437 - RNA, 19 nt, Human
aguguggggacagccccga

SEQ ID NO: 1094438 - RNA, 20 nt, Human
aguguuccagguguggccac

SEQ ID NO: 1094439 - RNA, 22 nt, Human
auccacacaacagacucgcacc

SEQ ID NO: 1094440 - RNA, 20 nt, Human
aucucauucucucaaguuuu

SEQ ID NO: 1094441 - RNA, 23 nt, Human
auggaggcauagcccaggccuuu

SEQ ID NO: 1094442 - RNA, 19 nt, Human
auggggagagggguauagc

SEQ ID NO: 1094443 - RNA, 21 nt, Human
caaagggacaguguggggaca

SEQ ID NO: 1094444 - RNA, 25 nt, Human
caaagggacaguguggggacagccc

SEQ ID NO: 1094445 - RNA, 19 nt, Human
caagcagcaacagcaugaa

SEQ ID NO: 1094446 - RNA, 20 nt, Human
caagcagcacgaccaggacc

SEQ ID NO: 1094447 - RNA, 24 nt, Human
cacacacacacauccacacaacag

SEQ ID NO: 1094448 - RNA, 24 nt, Human
caccuccagucccccagacagccu

SEQ ID NO: 1094449 - RNA, 25 nt, Human
cacgcagccccagcccuccagccuc

SEQ ID NO: 1094450 - RNA, 18 nt, Human
cagagccuggagaggugg

SEQ ID NO: 1094451 - RNA, 21 nt, Human
cagaguggggccacuggcauc

SEQ ID NO: 1094452 - RNA, 27 nt, Human
cagcacuccaagcacaagcagcacgac

SEQ ID NO: 1094453 - RNA, 25 nt, Human
cagcagacaaagggucaccucccag

SEQ ID NO: 1094454 - RNA, 24 nt, Human
caggauggaauauugcagccucuu

SEQ ID NO: 1094455 - RNA, 18 nt, Human
caggcccaccacccucac

SEQ ID NO: 1094456 - RNA, 23 nt, Human
caggccuuugaacaagggacaga

SEQ ID NO: 1094457 - RNA, 25 nt, Human
cauaagaaaagaaaaucuggguccc

SEQ ID NO: 1094458 - RNA, 23 nt, Human
cauccacacaacagacucgcaca

SEQ ID NO: 1094459 - RNA, 19 nt, Human
cauugaugcugccggccuu

SEQ ID NO: 1094460 - RNA, 18 nt, Human
ccaagcugccacugcugc

SEQ ID NO: 1094461 - RNA, 21 nt, Human
ccacacacacacauccacaca

SEQ ID NO: 1094462 - RNA, 21 nt, Human
ccagcaccaugauguaguagg

SEQ ID NO: 1094463 - RNA, 25 nt, Human
ccagcacccagcaggccagcagaca

SEQ ID NO: 1094464 - RNA, 24 nt, Human
ccagcagacaaagggucaccuccc

SEQ ID NO: 1094465 - RNA, 22 nt, Human
ccaggauggagaagaccacgaa

SEQ ID NO: 1094466 - RNA, 21 nt, Human
ccaggcagcagcacuccaagc

SEQ ID NO: 1094467 - RNA, 24 nt, Human
ccauggauuugacccccuuucaga

SEQ ID NO: 1094468 - RNA, 24 nt, Human
cccacagaccugugggcaaaggga

SEQ ID NO: 1094469 - RNA, 21 nt, Human
cccaccacccucacgcagccc

SEQ ID NO: 1094470 - RNA, 24 nt, Human
cccaccacccucacgcagccccag

SEQ ID NO: 1094471 - RNA, 22 nt, Human
cccagacacccaggauggaaua

SEQ ID NO: 1094472 - RNA, 20 nt, Human
cccagaguggggccacuggc

SEQ ID NO: 1094473 - RNA, 21 nt, Human
cccagcuuugaccagucaggc

SEQ ID NO: 1094474 - RNA, 18 nt, Human
cccaggauggagaagacc

SEQ ID NO: 1094475 - RNA, 19 nt, Human
cccagggcugugagggccc

SEQ ID NO: 1094476 - RNA, 23 nt, Human
ccccacaucuauccauaccuggu

SEQ ID NO: 1094477 - RNA, 20 nt, Human
cccggcccugacucugccac

SEQ ID NO: 1094478 - RNA, 19 nt, Human
ccgucucgggacuggacgu

SEQ ID NO: 1094479 - RNA, 19 nt, Human
ccgucucucccuccuuccc

SEQ ID NO: 1094480 - RNA, 18 nt, Human
ccucccaguugagggccc

SEQ ID NO: 1094481 - RNA, 18 nt, Human
ccucccgucucucccucc

SEQ ID NO: 1094482 - RNA, 18 nt, Human
ccucccuucuccucucuc

SEQ ID NO: 1094483 - RNA, 19 nt, Human
ccucucucuccucccuccc

SEQ ID NO: 1094484 - RNA, 21 nt, Human
ccucuguccgggugucaggga

SEQ ID NO: 1094485 - RNA, 19 nt, Human
ccugacucugccaccuugg

SEQ ID NO: 1094486 - RNA, 22 nt, Human
cgcacaugcaacagcucgaagc

SEQ ID NO: 1094487 - RNA, 21 nt, Human
cgggaguguuccagguguggc

SEQ ID NO: 1094488 - RNA, 18 nt, Human
cgucucgggacuggacgu

SEQ ID NO: 1094489 - RNA, 26 nt, Human
cgugcacucgcacccaagcucacaca

SEQ ID NO: 1094490 - RNA, 25 nt, Human
cgugcucacgcacgcgugcacucgc

SEQ ID NO: 1094491 - RNA, 24 nt, Human
cuccaagaagaaaauggggauucc

SEQ ID NO: 1094492 - RNA, 23 nt, Human
cuccacaccuacaaaucuggcug

SEQ ID NO: 1094493 - RNA, 30 nt, Human
cuccacaccuacaaaucuggcugucgagaa

SEQ ID NO: 1094494 - RNA, 19 nt, Human
cuccagccucuguccgggu

SEQ ID NO: 1094495 - RNA, 20 nt, Human
cuccagucccccagacagcc

SEQ ID NO: 1094496 - RNA, 19 nt, Human
cucccuucuccucucucuc

SEQ ID NO: 1094497 - RNA, 20 nt, Human
cucccuugccucccuucucc

SEQ ID NO: 1094498 - RNA, 19 nt, Human
cuccuaggcuaggggcaga

SEQ ID NO: 1094499 - RNA, 19 nt, Human
cuucuauaacagggauggg

SEQ ID NO: 1094500 - RNA, 19 nt, Human
cuucuccucucucuccucc

SEQ ID NO: 1094501 - RNA, 19 nt, Human
gaggggucacccaagggug

SEQ ID NO: 1094502 - RNA, 20 nt, Human
gaggggucacccaagggugu

SEQ ID NO: 1094503 - RNA, 18 nt, Human
gcaggaagugcauccgcc

SEQ ID NO: 1094504 - RNA, 19 nt, Human
gccacauguggcccagggc

SEQ ID NO: 1094505 - RNA, 20 nt, Human
gccacugcugcuucuggggu

SEQ ID NO: 1094506 - RNA, 21 nt, Human
gccaugaagcccaggauggag

SEQ ID NO: 1094507 - RNA, 19 nt, Human
gcccaggauggagaagacc

SEQ ID NO: 1094508 - RNA, 23 nt, Human
gccccgaggcccccaccaugcac

SEQ ID NO: 1094509 - RNA, 21 nt, Human
gccccuggcaccuccaguccc

SEQ ID NO: 1094510 - RNA, 26 nt, Human
gccucuugccccacagaccugugggc

SEQ ID NO: 1094511 - RNA, 23 nt, Human
ggagaggugggcagggggugggc

SEQ ID NO: 1094512 - RNA, 21 nt, Human
ggagaugugcaugcccugcuc

SEQ ID NO: 1094513 - RNA, 23 nt, Human
ggagggcacaacagagggccaca

SEQ ID NO: 1094514 - RNA, 21 nt, Human
ggcaaagggacagugugggga

SEQ ID NO: 1094515 - RNA, 23 nt, Human
ggcagggggugggcguggcaggg

SEQ ID NO: 1094516 - RNA, 18 nt, Human
ggcggggccuaggaccag

SEQ ID NO: 1094517 - RNA, 24 nt, Human
ggcugggaggagguugaggaggcc

SEQ ID NO: 1094518 - RNA, 20 nt, Human
gggcagggggugggcguggc

SEQ ID NO: 1094519 - RNA, 19 nt, Human
gggccccuggcaccuccag

SEQ ID NO: 1094520 - RNA, 22 nt, Human
gggccccuggcaccuccagucc

SEQ ID NO: 1094521 - RNA, 20 nt, Human
ggggugggcguggcaggggc

SEQ ID NO: 1094522 - RNA, 22 nt, Human
guaaggagaggaugguuugggc

SEQ ID NO: 1094523 - RNA, 25 nt, Human
gugcacucgcacccaagcucacaca

SEQ ID NO: 1094524 - RNA, 19 nt, Human
guggugguaaaggacuuga

SEQ ID NO: 1094525 - RNA, 22 nt, Human
uagaagccccaggccagcacca

SEQ ID NO: 1094526 - RNA, 25 nt, Human
uagaagccccaggccagcaccauga

SEQ ID NO: 1094527 - RNA, 20 nt, Human
uagcccaggccuuugaacaa

SEQ ID NO: 1094528 - RNA, 20 nt, Human
uaggggcagagggguaaggu

SEQ ID NO: 1094529 - RNA, 21 nt, Human
uaggggcagagggguaaggua

SEQ ID NO: 1094530 - RNA, 20 nt, Human
uauaacagggauggggagag

SEQ ID NO: 1094531 - RNA, 24 nt, Human
ucaccuuugcuaagagauagagau

SEQ ID NO: 1094532 - RNA, 20 nt, Human
ucagcaagcuggucacaagu

SEQ ID NO: 1094533 - RNA, 22 nt, Human
ucagggaagccuuucuuggggu

SEQ ID NO: 1094534 - RNA, 21 nt, Human
uccacacaacagacucgcaca

SEQ ID NO: 1094535 - RNA, 18 nt, Human
uccauucugggucugggg

SEQ ID NO: 1094536 - RNA, 20 nt, Human
ucccaagcugccacugcugc

SEQ ID NO: 1094537 - RNA, 20 nt, Human
uccccacaucuauccauacc

SEQ ID NO: 1094538 - RNA, 25 nt, Human
ucccccagacagccucaagacuuug

SEQ ID NO: 1094539 - RNA, 20 nt, Human
uccccgcaggcccaccaccc

SEQ ID NO: 1094540 - RNA, 21 nt, Human
ucccgggggugugcccagccc

SEQ ID NO: 1094541 - RNA, 20 nt, Human
ucccgucucucccuccuucc

SEQ ID NO: 1094542 - RNA, 20 nt, Human
ucccucccgucucucccucc

SEQ ID NO: 1094543 - RNA, 20 nt, Human
ucccuuccucacauuuccca

SEQ ID NO: 1094544 - RNA, 23 nt, Human
ucccuucuccucucucuccuccc

SEQ ID NO: 1094545 - RNA, 18 nt, Human
ucccuugccucccuucuc

SEQ ID NO: 1094546 - RNA, 27 nt, Human
ucccuugccucccuucuccucucucuc

SEQ ID NO: 1094547 - RNA, 18 nt, Human
ucgagaccaagcagcaac

SEQ ID NO: 1094548 - RNA, 21 nt, Human
ucgggacuggacgugacagac

SEQ ID NO: 1094549 - RNA, 25 nt, Human
ucuacgugcucacgcacgcgugcag

SEQ ID NO: 1094550 - RNA, 22 nt, Human
ucuauccauaccugaggggacc

SEQ ID NO: 1094551 - RNA, 23 nt, Human
ucucccuuuggaaacagaaguug

SEQ ID NO: 1094552 - RNA, 18 nt, Human
ucucuaagcuucuauaac

SEQ ID NO: 1094553 - RNA, 18 nt, Human
ucuggggugaggggucac

SEQ ID NO: 1094554 - RNA, 24 nt, Human
ugaagcccaggauggagaagacca

SEQ ID NO: 1094555 - RNA, 24 nt, Human
ugaagcccuccacaccuacaaauc

SEQ ID NO: 1094556 - RNA, 19 nt, Human
ugacagccuguggguaggc

SEQ ID NO: 1094557 - RNA, 20 nt, Human
ugacucugccaccuuggaga

SEQ ID NO: 1094558 - RNA, 19 nt, Human
ugagguuggccaggcuggc

SEQ ID NO: 1094559 - RNA, 22 nt, Human
ugagguuggccaggcuggcacu

SEQ ID NO: 1094560 - RNA, 24 nt, Human
ugauguaguagguguugcaguaga

SEQ ID NO: 1094561 - RNA, 25 nt, Human
ugauuggcgcaggaaccagaagguu

SEQ ID NO: 1094562 - RNA, 20 nt, Human
ugccacugcugcuucugggg

SEQ ID NO: 1094563 - RNA, 21 nt, Human
ugccacugcugcuucuggggu

SEQ ID NO: 1094564 - RNA, 19 nt, Human
ugccaggcagcagcacucc

SEQ ID NO: 1094565 - RNA, 24 nt, Human
ugccaggcagcagcacuccaagca

SEQ ID NO: 1094566 - RNA, 20 nt, Human
ugcccagcccagggcacagg

SEQ ID NO: 1094567 - RNA, 19 nt, Human
ugcuacagagcagagccug

SEQ ID NO: 1094568 - RNA, 21 nt, Human
uggagggggagaggcaucuau

SEQ ID NO: 1094569 - RNA, 22 nt, Human
uggaggugcaggaagugcaucc

SEQ ID NO: 1094570 - RNA, 20 nt, Human
uggcaccuccagucccccag

SEQ ID NO: 1094571 - RNA, 20 nt, Human
uggcauaagaaaagaaaauc

SEQ ID NO: 1094572 - RNA, 23 nt, Human
uggcauaagaaaagaaaaucugg

SEQ ID NO: 1094573 - RNA, 18 nt, Human
uggcccagggcagcgugg

SEQ ID NO: 1094574 - RNA, 23 nt, Human
uggcugucgagaccaagcagcaa

SEQ ID NO: 1094575 - RNA, 21 nt, Human
ugggaagccugagcaggccag

SEQ ID NO: 1094576 - RNA, 19 nt, Human
ugggcaaagggacagugug

SEQ ID NO: 1094577 - RNA, 24 nt, Human
ugggcuaggacuggagggggagag

SEQ ID NO: 1094578 - RNA, 19 nt, Human
uggggcacuaggcggggcc

SEQ ID NO: 1094579 - RNA, 22 nt, Human
uggggucacucagccgucucgg

SEQ ID NO: 1094580 - RNA, 19 nt, Human
uggguaggcgaugaaggcc

SEQ ID NO: 1094581 - RNA, 19 nt, Human
uggguggggguggggcacu

SEQ ID NO: 1094582 - RNA, 23 nt, Human
ugguggguugugauauuuuuggc

SEQ ID NO: 1094583 - RNA, 24 nt, Human
ugguuugggcuccuuccucuuuuu

SEQ ID NO: 1094584 - RNA, 22 nt, Human
uguagcugcccagggcugugag

SEQ ID NO: 1094585 - RNA, 24 nt, Human
uguccagggugccaggcagcagca

SEQ ID NO: 1094586 - RNA, 18 nt, Human
ugucgagaccaagcagca

SEQ ID NO: 1094587 - RNA, 23 nt, Human
uguugcaguagaagacgaucacc

SEQ ID NO: 1094588 - RNA, 25 nt, Human
uuccagguguggccacauguggccc

SEQ ID NO: 1094589 - RNA, 18 nt, Human
uugggcuccuuccucuuu

SEQ ID NO: 1094590 - RNA, 25 nt, Human
uugguggguugugauauuuuuggcg

SEQ ID NO: 1094591 - RNA, 19 nt, Human
uugguggugauuggcgcag

SEQ ID NO: 1094592 - RNA, 21 nt, Human
uugguggugauuggcgcagga

SEQ ID NO: 1094593 - RNA, 24 nt, Human
uuguuguugaagcgguuguagcug

SEQ ID NO: 1094594 - RNA, 22 nt, Human
uuuagcacaguaagaauguccc

SEQ ID NO: 1094595 - RNA, 19 nt, Human
aaagcccucuucaugucuc

SEQ ID NO: 1094596 - RNA, 25 nt, Human
aacauccaccacugacuuaggcaac

SEQ ID NO: 1094597 - RNA, 20 nt, Human
aagauggaugacugaagcca

SEQ ID NO: 1094598 - RNA, 21 nt, Human
aaucucgacaggagacagcgg

SEQ ID NO: 1094599 - RNA, 23 nt, Human
accacuuguaucugugaaccccu

SEQ ID NO: 1094600 - RNA, 24 nt, Human
agcaagcgaccgaccucuuccacg

SEQ ID NO: 1094601 - RNA, 22 nt, Human
augaacuaaagauaaugccaca

SEQ ID NO: 1094602 - RNA, 18 nt, Human
augaggcaaaaugcaggc

SEQ ID NO: 1094603 - RNA, 19 nt, Human
caaacauccaccacugacu

SEQ ID NO: 1094604 - RNA, 23 nt, Human
caacauaacagcaagcgaccgac

SEQ ID NO: 1094605 - RNA, 18 nt, Human
caagcgaccgaccucuuc

SEQ ID NO: 1094606 - RNA, 24 nt, Human
caauucauuagagaggaaucucaa

SEQ ID NO: 1094607 - RNA, 20 nt, Human
cagcaagcgaccgaccucuu

SEQ ID NO: 1094608 - RNA, 18 nt, Human
cauccacuggcucuuccu

SEQ ID NO: 1094609 - RNA, 27 nt, Human
ccaaagcuaccacuggguuuuccccug

SEQ ID NO: 1094610 - RNA, 20 nt, Human
ccccagggcccaucuguggg

SEQ ID NO: 1094611 - RNA, 19 nt, Human
ccccugcaaacugagcaag

SEQ ID NO: 1094612 - RNA, 27 nt, Human
ccccuguaacaguacucaacaguggcu

SEQ ID NO: 1094613 - RNA, 21 nt, Human
ccucugcucucuccaacuguu

SEQ ID NO: 1094614 - RNA, 23 nt, Human
ccucugcucucuccaacuguuuu

SEQ ID NO: 1094615 - RNA, 24 nt, Human
ccucugcucucuccaacuguuuua

SEQ ID NO: 1094616 - RNA, 21 nt, Human
cgaaagcagcuuccaaagcua

SEQ ID NO: 1094617 - RNA, 24 nt, Human
cgcaagcucacacagcuuccuaga

SEQ ID NO: 1094618 - RNA, 22 nt, Human
cuaaagcccucuucaugucucu

SEQ ID NO: 1094619 - RNA, 23 nt, Human
cugcuucaaccacuuguaucugu

SEQ ID NO: 1094620 - RNA, 22 nt, Human
cuggaaguccuuuauaucauac

SEQ ID NO: 1094621 - RNA, 18 nt, Human
cuucugagcuauccuccu

SEQ ID NO: 1094622 - RNA, 18 nt, Human
gaaagcagcuuccaaagc

SEQ ID NO: 1094623 - RNA, 23 nt, Human
gaaguccuuuauaucauacacuu

SEQ ID NO: 1094624 - RNA, 19 nt, Human
gacuaugaggcaaaaugca

SEQ ID NO: 1094625 - RNA, 25 nt, Human
gagaagcaggcccagauuccucucu

SEQ ID NO: 1094626 - RNA, 19 nt, Human
gagcaagaauacuauuucc

SEQ ID NO: 1094627 - RNA, 21 nt, Human
gcaaugggucucuuguccaca

SEQ ID NO: 1094628 - RNA, 19 nt, Human
gcagugguccucaucuuuc

SEQ ID NO: 1094629 - RNA, 21 nt, Human
gcgaaccucugcucucuccaa

SEQ ID NO: 1094630 - RNA, 19 nt, Human
gcuguaguggaucuggcug

SEQ ID NO: 1094631 - RNA, 23 nt, Human
ggcccuguucuugaugagucuua

SEQ ID NO: 1094632 - RNA, 22 nt, Human
gucacuuccucauuauuucuac

SEQ ID NO: 1094633 - RNA, 21 nt, Human
gugcauggauucccgggugac

SEQ ID NO: 1094634 - RNA, 22 nt, Human
uaaaaaguaaacuucauaaauu

SEQ ID NO: 1094635 - RNA, 21 nt, Human
uaagaagcaacauaacagcaa

SEQ ID NO: 1094636 - RNA, 20 nt, Human
uagacaacucuacaaacauc

SEQ ID NO: 1094637 - RNA, 23 nt, Human
uaucccuuccaggcgaaccucug

SEQ ID NO: 1094638 - RNA, 23 nt, Human
uaucucauuuuuuccacauccac

SEQ ID NO: 1094639 - RNA, 22 nt, Human
uauuaugguucuccaaaucagc

SEQ ID NO: 1094640 - RNA, 21 nt, Human
ucaaucacaauccagaagccu

SEQ ID NO: 1094641 - RNA, 27 nt, Human
ucaccagauacaauuucaaaauuguau

SEQ ID NO: 1094642 - RNA, 19 nt, Human
uccaaauauuggccaacac

SEQ ID NO: 1094643 - RNA, 18 nt, Human
ucccccagggcccaucug

SEQ ID NO: 1094644 - RNA, 24 nt, Human
uccucaucuuucuccucguuguag

SEQ ID NO: 1094645 - RNA, 21 nt, Human
ucuacaaacauccaccacuga

SEQ ID NO: 1094646 - RNA, 18 nt, Human
ucuacaguucugaacugu

SEQ ID NO: 1094647 - RNA, 23 nt, Human
ucuacaguucugaacuguaaaaa

SEQ ID NO: 1094648 - RNA, 21 nt, Human
ucugaacuguaaaaaaugacu

SEQ ID NO: 1094649 - RNA, 20 nt, Human
ugaaaaacacaggaaccacu

SEQ ID NO: 1094650 - RNA, 20 nt, Human
ugaacuguaaaaaaugacuc

SEQ ID NO: 1094651 - RNA, 18 nt, Human
ugagaauggucccccagg

SEQ ID NO: 1094652 - RNA, 19 nt, Human
ugcagugguccucaucuuu

SEQ ID NO: 1094653 - RNA, 18 nt, Human
uggaugacugaagccauu

SEQ ID NO: 1094654 - RNA, 21 nt, Human
uggcaggugugcccacuggga

SEQ ID NO: 1094655 - RNA, 21 nt, Human
uggcugccauuuguccuuggg

SEQ ID NO: 1094656 - RNA, 21 nt, Human
uggcugccauuuguccuuggg

SEQ ID NO: 1094657 - RNA, 18 nt, Human
ugguauggugacaacuuc

SEQ ID NO: 1094658 - RNA, 23 nt, Human
ugguauggugacaacuucuuggu

SEQ ID NO: 1094659 - RNA, 19 nt, Human
uguggucaaauggcacugc

SEQ ID NO: 1094660 - RNA, 21 nt, Human
uguuauugucugcaauggcuu

SEQ ID NO: 1094661 - RNA, 22 nt, Human
uuaaugagcgaacauuuugcuu

SEQ ID NO: 1094662 - RNA, 19 nt, Human
uuaggcaacguucugugcu

SEQ ID NO: 1094663 - RNA, 24 nt, Human
uuccccugcaaacugagcaagaau

SEQ ID NO: 1094664 - RNA, 21 nt, Human
uucuagguugcuaaagcccuc

SEQ ID NO: 1094665 - RNA, 23 nt, Human
uuggucaggcuccaaauauuggc

SEQ ID NO: 1094666 - RNA, 19 nt, Human
uugugauccugaauguuau

SEQ ID NO: 1094667 - RNA, 19 nt, Human
uuuccccugcaaacugagc

SEQ ID NO: 1094668 - RNA, 19 nt, Human
aauuucuuccuuguuucuc

SEQ ID NO: 1094669 - RNA, 20 nt, Human
cagggccuucugcaaggcuu

SEQ ID NO: 1094670 - RNA, 23 nt, Human
ccugaccaggugucuuucucacc

SEQ ID NO: 1094671 - RNA, 22 nt, Human
ccuuuagucugacaccauaggc

SEQ ID NO: 1094672 - RNA, 19 nt, Human
gauuggcuuauacagagag

SEQ ID NO: 1094673 - RNA, 19 nt, Human
gcccccuuaucccacugac

SEQ ID NO: 1094674 - RNA, 18 nt, Human
gccuuuagucugacacca

SEQ ID NO: 1094675 - RNA, 19 nt, Human
uccaaaugcuuuuucuugg

SEQ ID NO: 1094676 - RNA, 22 nt, Human
uccaaaugcuuuuucuuggcac

SEQ ID NO: 1094677 - RNA, 20 nt, Human
uccaagucuucaaagucacc

SEQ ID NO: 1094678 - RNA, 19 nt, Human
ucgcaugaagacaauaucg

SEQ ID NO: 1094679 - RNA, 22 nt, Human
ucugaguaucggggcccgauuu

SEQ ID NO: 1094680 - RNA, 18 nt, Human
ugaauuaaaauguuucuu

SEQ ID NO: 1094681 - RNA, 21 nt, Human
ugaccaggugucuuucucacc

SEQ ID NO: 1094682 - RNA, 21 nt, Human
uuccaagucuucaaagucacc

SEQ ID NO: 1094683 - RNA, 23 nt, Human
uucucacccacugguuucaacaa

SEQ ID NO: 1094684 - RNA, 19 nt, Human
aaagcccucuucaugucuc

SEQ ID NO: 1094685 - RNA, 24 nt, Human
aagaaaaaaaaaacuuaaaaaaaa

SEQ ID NO: 1094686 - RNA, 23 nt, Human
agaaaaaaaaaacuuaaaaaaaa

SEQ ID NO: 1094687 - RNA, 24 nt, Human
cgcaagcucacacagcuuccuaga

SEQ ID NO: 1094688 - RNA, 22 nt, Human
cuaaagcccucuucaugucucu

SEQ ID NO: 1094689 - RNA, 22 nt, Human
uaaaaaguaaacuucauaaauu

SEQ ID NO: 1094690 - RNA, 24 nt, Human
uaauaaaagaaaaaaaaaacuuaa

SEQ ID NO: 1094691 - RNA, 20 nt, Human
ugaaaaacacaggaaccacu

SEQ ID NO: 1094692 - RNA, 21 nt, Human
uucuagguugcuaaagcccuc

SEQ ID NO: 1094693 - RNA, 23 nt, Human
aacagagacaggaaugccacugg

SEQ ID NO: 1094694 - RNA, 22 nt, Human
aacccacccagugacuuccaaa

SEQ ID NO: 1094695 - RNA, 18 nt, Human
aacugaggggccgugggg

SEQ ID NO: 1094696 - RNA, 23 nt, Human
aagaaaaaaaaagagggggauaa

SEQ ID NO: 1094697 - RNA, 18 nt, Human
aagcacuaaaaaccagca

SEQ ID NO: 1094698 - RNA, 18 nt, Human
aagcgacagaaccugugc

SEQ ID NO: 1094699 - RNA, 18 nt, Human
acauggaguauuucugga

SEQ ID NO: 1094700 - RNA, 21 nt, Human
acauggccaacuccuaagcac

SEQ ID NO: 1094701 - RNA, 24 nt, Human
acuaaaaaccagcagcaccaacac

SEQ ID NO: 1094702 - RNA, 19 nt, Human
agacaggaagaagacagcc

SEQ ID NO: 1094703 - RNA, 23 nt, Human
agacaggaagaagacagccagag

SEQ ID NO: 1094704 - RNA, 20 nt, Human
agaccaggacuuccaacaga

SEQ ID NO: 1094705 - RNA, 22 nt, Human
agcuccgccucaucguugcacu

SEQ ID NO: 1094706 - RNA, 22 nt, Human
agcuggcugcagccucagccuc

SEQ ID NO: 1094707 - RNA, 20 nt, Human
aggaagaagacagccagagu

SEQ ID NO: 1094708 - RNA, 21 nt, Human
aggaagcugaggucaggggga

SEQ ID NO: 1094709 - RNA, 18 nt, Human
aggauuagcugcccacag

SEQ ID NO: 1094710 - RNA, 20 nt, Human
aggcaggaagcugaggucaa

SEQ ID NO: 1094711 - RNA, 21 nt, Human
aggcaggaagcugaggucagg

SEQ ID NO: 1094712 - RNA, 22 nt, Human
aggcaggaagcugaggucaggg

SEQ ID NO: 1094713 - RNA, 18 nt, Human
agggagccauggaggggc

SEQ ID NO: 1094714 - RNA, 18 nt, Human
aggucagggggagggggc

SEQ ID NO: 1094715 - RNA, 21 nt, Human
aguauagaggucggggagaga

SEQ ID NO: 1094716 - RNA, 18 nt, Human
aucugggagccugauggc

SEQ ID NO: 1094717 - RNA, 23 nt, Human
augaaguaaacaauaauaaccuu

SEQ ID NO: 1094718 - RNA, 21 nt, Human
caacccacccagugacuucca

SEQ ID NO: 1094719 - RNA, 23 nt, Human
caaccgagaagagcuccgccuca

SEQ ID NO: 1094720 - RNA, 21 nt, Human
caaggugguggcugccagauc

SEQ ID NO: 1094721 - RNA, 21 nt, Human
cacaacccacccagugacuuc

SEQ ID NO: 1094722 - RNA, 21 nt, Human
cacaauuccaaagaaaaaaaa

SEQ ID NO: 1094723 - RNA, 19 nt, Human
cacagcccaccugggccuu

SEQ ID NO: 1094724 - RNA, 21 nt, Human
cacauggaguauuucuggaag

SEQ ID NO: 1094725 - RNA, 22 nt, Human
cagaacucagcuuugcucucac

SEQ ID NO: 1094726 - RNA, 20 nt, Human
cagcucaacccaccggcccu

SEQ ID NO: 1094727 - RNA, 18 nt, Human
cagcuccacccagggaua

SEQ ID NO: 1094728 - RNA, 22 nt, Human
cagcuccuuguggggcacaggc

SEQ ID NO: 1094729 - RNA, 18 nt, Human
caggaaugccacuggcuu

SEQ ID NO: 1094730 - RNA, 24 nt, Human
cagggacugugaccuucacaaccc

SEQ ID NO: 1094731 - RNA, 25 nt, Human
ccacccagugacuuccaaaugcucc

SEQ ID NO: 1094732 - RNA, 22 nt, Human
ccagagcuucucucuucaacga

SEQ ID NO: 1094733 - RNA, 20 nt, Human
ccagcagcaccaacacucag

SEQ ID NO: 1094734 - RNA, 19 nt, Human
cccagacaggaagaagaca

SEQ ID NO: 1094735 - RNA, 19 nt, Human
cccgugcccgcagcagagu

SEQ ID NO: 1094736 - RNA, 20 nt, Human
cccucaaccgagaagagcuc

SEQ ID NO: 1094737 - RNA, 19 nt, Human
ccucacagggcugcuccuc

SEQ ID NO: 1094738 - RNA, 19 nt, Human
ccugauggcaggugggugg

SEQ ID NO: 1094739 - RNA, 19 nt, Human
cgagaagagcuccgccuca

SEQ ID NO: 1094740 - RNA, 23 nt, Human
cgauccagccccagaacaaccca

SEQ ID NO: 1094741 - RNA, 24 nt, Human
cgauccagccccagaacaacccag

SEQ ID NO: 1094742 - RNA, 20 nt, Human
cuaaaaaccagcagcaccaa

SEQ ID NO: 1094743 - RNA, 22 nt, Human
cuaaaaaccagcagcaccaaca

SEQ ID NO: 1094744 - RNA, 24 nt, Human
cuaagcacuaaaaaccagcagcac

SEQ ID NO: 1094745 - RNA, 22 nt, Human
cucuucaacgauccagccccag

SEQ ID NO: 1094746 - RNA, 21 nt, Human
cugaggucagggggagggggc

SEQ ID NO: 1094747 - RNA, 23 nt, Human
cugugaacugaggggccgugggg

SEQ ID NO: 1094748 - RNA, 26 nt, Human
cuucugcuacaagccggaccagaacu

SEQ ID NO: 1094749 - RNA, 25 nt, Human
gaccuucacaacccacccagugacu

SEQ ID NO: 1094750 - RNA, 25 nt, Human
gagaagaaugaagaggaccgguacc

SEQ ID NO: 1094751 - RNA, 24 nt, Human
gagcacaggcaggaaaggauuagc

SEQ ID NO: 1094752 - RNA, 19 nt, Human
gagcacuccucuggcagcu

SEQ ID NO: 1094753 - RNA, 28 nt, Human
gcagauccaggcaacacgaugggggcca

SEQ ID NO: 1094754 - RNA, 22 nt, Human
gcagccucagccucacagggcu

SEQ ID NO: 1094755 - RNA, 24 nt, Human
gcccucaaccgagaagagcuccgc

SEQ ID NO: 1094756 - RNA, 25 nt, Human
gcucuucuucacuguccagagcuuc

SEQ ID NO: 1094757 - RNA, 23 nt, Human
gcuggcacugcagccgaccagua

SEQ ID NO: 1094758 - RNA, 21 nt, Human
ggagagagcacaggcaggaaa

SEQ ID NO: 1094759 - RNA, 19 nt, Human
ggccugcugggccaggcac

SEQ ID NO: 1094760 - RNA, 24 nt, Human
ggcugcuccucaacugugcuccac

SEQ ID NO: 1094761 - RNA, 26 nt, Human
ggcuugcaaccaacacaaagcuccag

SEQ ID NO: 1094762 - RNA, 23 nt, Human
gggagagagcacaggcaggaaag

SEQ ID NO: 1094763 - RNA, 18 nt, Human
ggggagggggcucagcag

SEQ ID NO: 1094764 - RNA, 18 nt, Human
ggggaugagcugugagug

SEQ ID NO: 1094765 - RNA, 23 nt, Human
gugcugcugggccauggccugcu

SEQ ID NO: 1094766 - RNA, 21 nt, Human
gugguucucaccaaaaaacag

SEQ ID NO: 1094767 - RNA, 26 nt, Human
uaagcacuaaaaaccagcagcaccuc

SEQ ID NO: 1094768 - RNA, 22 nt, Human
uaaguagggagccauggagggg

SEQ ID NO: 1094769 - RNA, 20 nt, Human
uacccaggccgggugggggc

SEQ ID NO: 1094770 - RNA, 19 nt, Human
uagggagccauggaggggc

SEQ ID NO: 1094771 - RNA, 18 nt, Human
ucacagacccaggcaaca

SEQ ID NO: 1094772 - RNA, 24 nt, Human
ucaccaaaaaacaggggagagagc

SEQ ID NO: 1094773 - RNA, 27 nt, Human
uccaaagaaaaaaaaagagggggauaa

SEQ ID NO: 1094774 - RNA, 18 nt, Human
uccacaaagacauccacc

SEQ ID NO: 1094775 - RNA, 24 nt, Human
uccgccucaucguugcacugguuc

SEQ ID NO: 1094776 - RNA, 19 nt, Human
ucggggagagaggguccac

SEQ ID NO: 1094777 - RNA, 21 nt, Human
ucguugcacugguugagcaug

SEQ ID NO: 1094778 - RNA, 23 nt, Human
ucucaccaaaaaacaggggagag

SEQ ID NO: 1094779 - RNA, 22 nt, Human
ucuccccagacaggaagaagac

SEQ ID NO: 1094780 - RNA, 21 nt, Human
ugaaguaaacaauaauaaccc

SEQ ID NO: 1094781 - RNA, 18 nt, Human
ugacuuccaaaugcuccu

SEQ ID NO: 1094782 - RNA, 19 nt, Human
ugagaagaaugaagaggac

SEQ ID NO: 1094783 - RNA, 19 nt, Human
ugaggcucauccuacccag

SEQ ID NO: 1094784 - RNA, 18 nt, Human
ugaggucagggggagggg

SEQ ID NO: 1094785 - RNA, 22 nt, Human
ugcaggggaagcuggcauggga

SEQ ID NO: 1094786 - RNA, 23 nt, Human
ugccacuggcuucuggaaaagag

SEQ ID NO: 1094787 - RNA, 22 nt, Human
ugcuccacaaagacauccacca

SEQ ID NO: 1094788 - RNA, 25 nt, Human
ugcuccacaaagacauccaccagcu

SEQ ID NO: 1094789 - RNA, 21 nt, Human
ugcugcugggccauggccugc

SEQ ID NO: 1094790 - RNA, 22 nt, Human
uggaaaagaguuacuuguggug

SEQ ID NO: 1094791 - RNA, 22 nt, Human
uggcaggugggugggggauggg

SEQ ID NO: 1094792 - RNA, 26 nt, Human
uggccaacuccuaagcacuaaaaacc

SEQ ID NO: 1094793 - RNA, 23 nt, Human
ugggagccugauggcaggugggu

SEQ ID NO: 1094794 - RNA, 18 nt, Human
ugggggaugggaaagggg

SEQ ID NO: 1094795 - RNA, 21 nt, Human
ugguugagcaugcaguggcac

SEQ ID NO: 1094796 - RNA, 23 nt, Human
uuacauaucuuaaaaaacuaaag

SEQ ID NO: 1094797 - RNA, 24 nt, Human
uucacagugugcugcugggccaug

SEQ ID NO: 1094798 - RNA, 18 nt, Human
uucacuguccagagcuuu

SEQ ID NO: 1094799 - RNA, 23 nt, Human
aaagacaggcccgcccacaagca

SEQ ID NO: 1094800 - RNA, 18 nt, Human
aaagagccaguugauuuu

SEQ ID NO: 1094801 - RNA, 18 nt, Human
aacagaauccugcacaca

SEQ ID NO: 1094802 - RNA, 23 nt, Human
aacuccugggcucaagugauccu

SEQ ID NO: 1094803 - RNA, 19 nt, Human
acugcagccucaaacuccu

SEQ ID NO: 1094804 - RNA, 27 nt, Human
acuggcaccaagucuacuugguggucc

SEQ ID NO: 1094805 - RNA, 20 nt, Human
acugugcuuccaugaaaggc

SEQ ID NO: 1094806 - RNA, 21 nt, Human
agagagggaauggacgugacg

SEQ ID NO: 1094807 - RNA, 19 nt, Human
agagaguugugaugggacc

SEQ ID NO: 1094808 - RNA, 19 nt, Human
aggaguugcaauuaagcac

SEQ ID NO: 1094809 - RNA, 18 nt, Human
agugcuugugauguacca

SEQ ID NO: 1094810 - RNA, 21 nt, Human
auaaaacacucugcagaucua

SEQ ID NO: 1094811 - RNA, 18 nt, Human
auaguucacugcagccuc

SEQ ID NO: 1094812 - RNA, 19 nt, Human
caagugauccucugccuca

SEQ ID NO: 1094813 - RNA, 21 nt, Human
caagugauccucugccucacc

SEQ ID NO: 1094814 - RNA, 21 nt, Human
caagugauccucugccucacc

SEQ ID NO: 1094815 - RNA, 24 nt, Human
caccaagucuacuugcauaaaaca

SEQ ID NO: 1094816 - RNA, 22 nt, Human
cacccccucaaggagcuggggg

SEQ ID NO: 1094817 - RNA, 22 nt, Human
cacgcucugcccuuucucugcu

SEQ ID NO: 1094818 - RNA, 21 nt, Human
cagaauccugcacacacuucc

SEQ ID NO: 1094819 - RNA, 24 nt, Human
cagccucaaacuccugggcucaag

SEQ ID NO: 1094820 - RNA, 19 nt, Human
caggaguugcaauuaagca

SEQ ID NO: 1094821 - RNA, 18 nt, Human
caugugcaggaugugcag

SEQ ID NO: 1094822 - RNA, 19 nt, Human
ccagccuggugaaagacag

SEQ ID NO: 1094823 - RNA, 20 nt, Human
cccacaagcagaacugaggc

SEQ ID NO: 1094824 - RNA, 23 nt, Human
ccgcccacaagcagaacugaggc

SEQ ID NO: 1094825 - RNA, 25 nt, Human
ccgcccacaagcagaacugagggga

SEQ ID NO: 1094826 - RNA, 22 nt, Human
ccucgagccgcuucucgacccu

SEQ ID NO: 1094827 - RNA, 19 nt, Human
ccugggcucaagugauccu

SEQ ID NO: 1094828 - RNA, 20 nt, Human
ccugggcucaagugauccuc

SEQ ID NO: 1094829 - RNA, 18 nt, Human
cguggcuacggggaugcc

SEQ ID NO: 1094830 - RNA, 23 nt, Human
cuccugggcucaagugauccucu

SEQ ID NO: 1094831 - RNA, 24 nt, Human
cuccugggcucaagugauccucug

SEQ ID NO: 1094832 - RNA, 23 nt, Human
cugcagccucaaacuccugggcu

SEQ ID NO: 1094833 - RNA, 23 nt, Human
cugccacguucguucuuucucag

SEQ ID NO: 1094834 - RNA, 21 nt, Human
cugcuccugucaacccaucac

SEQ ID NO: 1094835 - RNA, 21 nt, Human
cugggagacucaggccaagcu

SEQ ID NO: 1094836 - RNA, 19 nt, Human
cuggggccagagagggaau

SEQ ID NO: 1094837 - RNA, 20 nt, Human
gaaaggacauccaaccucug

SEQ ID NO: 1094838 - RNA, 18 nt, Human
gcagccuggucuccucga

SEQ ID NO: 1094839 - RNA, 19 nt, Human
gccacguucguucuuucuc

SEQ ID NO: 1094840 - RNA, 22 nt, Human
gccauggugguuugcugcuccu

SEQ ID NO: 1094841 - RNA, 18 nt, Human
gcucaagugauccucugc

SEQ ID NO: 1094842 - RNA, 22 nt, Human
ggacgugacggucugugcagcc

SEQ ID NO: 1094843 - RNA, 18 nt, Human
gggcauucaaacucuuuu

SEQ ID NO: 1094844 - RNA, 22 nt, Human
gggcucaagugauccucugccu

SEQ ID NO: 1094845 - RNA, 27 nt, Human
gucacauuugccucugaggguuugcug

SEQ ID NO: 1094846 - RNA, 22 nt, Human
gugaaagacaggcccgcccaca

SEQ ID NO: 1094847 - RNA, 24 nt, Human
gugaaagacaggcccgcccacaag

SEQ ID NO: 1094848 - RNA, 19 nt, Human
gugcaggaugugcagguuu

SEQ ID NO: 1094849 - RNA, 18 nt, Human
guggaguacaguggugcc

SEQ ID NO: 1094850 - RNA, 18 nt, Human
guugcaauuaagcacguu

SEQ ID NO: 1094851 - RNA, 24 nt, Human
guugcaauuaagcacguugucagg

SEQ ID NO: 1094852 - RNA, 26 nt, Human
uaaaccccacaugcauuagcuauuca

SEQ ID NO: 1094853 - RNA, 19 nt, Human
uaacagaauccugcacacu

SEQ ID NO: 1094854 - RNA, 19 nt, Human
uaauaagugaaugaacugc

SEQ ID NO: 1094855 - RNA, 19 nt, Human
uacaguggugccauuauag

SEQ ID NO: 1094856 - RNA, 22 nt, Human
uagcaaacaugaaagacauaga

SEQ ID NO: 1094857 - RNA, 21 nt, Human
uaggaagagagaguugugaug

SEQ ID NO: 1094858 - RNA, 21 nt, Human
uaggaggcgggucacauuugc

SEQ ID NO: 1094859 - RNA, 24 nt, Human
uaguucacugcagccucaaacucc

SEQ ID NO: 1094860 - RNA, 22 nt, Human
ucaacccaucaccuagguauua

SEQ ID NO: 1094861 - RNA, 27 nt, Human
ucaacccaucaccuagguauuaaaccc

SEQ ID NO: 1094862 - RNA, 20 nt, Human
ucacugcagccucaaacucc

SEQ ID NO: 1094863 - RNA, 23 nt, Human
ucacugcagccucaaacuccugg

SEQ ID NO: 1094864 - RNA, 24 nt, Human
ucacugcagccucaaacuccuggg

SEQ ID NO: 1094865 - RNA, 21 nt, Human
uccugggcucaagugauccuc

SEQ ID NO: 1094866 - RNA, 23 nt, Human
uccugggcucaagugauccucug

SEQ ID NO: 1094867 - RNA, 18 nt, Human
uccugucaacccaucacc

SEQ ID NO: 1094868 - RNA, 21 nt, Human
ucuacugugcuuccaugaaag

SEQ ID NO: 1094869 - RNA, 18 nt, Human
ucugaaagcaucuuccuu

SEQ ID NO: 1094870 - RNA, 18 nt, Human
ugaaagacauagacaagc

SEQ ID NO: 1094871 - RNA, 19 nt, Human
ugaaaggcggaaaggacau

SEQ ID NO: 1094872 - RNA, 21 nt, Human
ugaggcacuucuaacuugaaa

SEQ ID NO: 1094873 - RNA, 20 nt, Human
ugagugcuugugauguacca

SEQ ID NO: 1094874 - RNA, 20 nt, Human
ugauccucugccucaccccc

SEQ ID NO: 1094875 - RNA, 19 nt, Human
ugcacugcuuuugccagcc

SEQ ID NO: 1094876 - RNA, 21 nt, Human
ugccucacccccucaaggagc

SEQ ID NO: 1094877 - RNA, 20 nt, Human
ugcuccugucaacccaucac

SEQ ID NO: 1094878 - RNA, 19 nt, Human
ugcugggugggggugugga

SEQ ID NO: 1094879 - RNA, 28 nt, Human
uggaguacaguggugccauucuagcacg

SEQ ID NO: 1094880 - RNA, 18 nt, Human
uggcagauugucccuggc

SEQ ID NO: 1094881 - RNA, 18 nt, Human
uggcuggucccugacauc

SEQ ID NO: 1094882 - RNA, 19 nt, Human
ugggagacucaggccaagc

SEQ ID NO: 1094883 - RNA, 22 nt, Human
ugggagacucaggccaagcuuc

SEQ ID NO: 1094884 - RNA, 19 nt, Human
ugggcucaagugauccucu

SEQ ID NO: 1094885 - RNA, 24 nt, Human
ugucaacccaucaccuagguauua

SEQ ID NO: 1094886 - RNA, 19 nt, Human
ugucugagccucuguugcc

SEQ ID NO: 1094887 - RNA, 20 nt, Human
ugugaugggacccacaggag

SEQ ID NO: 1094888 - RNA, 19 nt, Human
ugugggaugucuucuuccu

SEQ ID NO: 1094889 - RNA, 20 nt, Human
uuacauagguaguaaaugug

SEQ ID NO: 1094890 - RNA, 18 nt, Human
aggcacgggcaucaaggc

SEQ ID NO: 1094891 - RNA, 23 nt, Human
cacguacucauacuccugcucac

SEQ ID NO: 1094892 - RNA, 22 nt, Human
cacugugcacacagccugggac

SEQ ID NO: 1094893 - RNA, 23 nt, Human
ccaugcacucuugugaucacucc

SEQ ID NO: 1094894 - RNA, 18 nt, Human
ccccuggggaaccuuccu

SEQ ID NO: 1094895 - RNA, 18 nt, Human
cccugagacgggagaaag

SEQ ID NO: 1094896 - RNA, 22 nt, Human
ccggaaucacauuucugucaau

SEQ ID NO: 1094897 - RNA, 21 nt, Human
ccugcucacucaucccuuccc

SEQ ID NO: 1094898 - RNA, 27 nt, Human
ccugucacugugcacacagccugggac

SEQ ID NO: 1094899 - RNA, 25 nt, Human
cgaauucuuugaggucuggacagag

SEQ ID NO: 1094900 - RNA, 24 nt, Human
cucauacuccugcucacucauccc

SEQ ID NO: 1094901 - RNA, 19 nt, Human
cuggcauaacagugcuucc

SEQ ID NO: 1094902 - RNA, 21 nt, Human
cugggaccucccauccugugg

SEQ ID NO: 1094903 - RNA, 28 nt, Human
cugugcacacagccugggaccucccucc

SEQ ID NO: 1094904 - RNA, 19 nt, Human
gccagcuucacaggcacgg

SEQ ID NO: 1094905 - RNA, 24 nt, Human
gccagggugaguccccaugcacuc

SEQ ID NO: 1094906 - RNA, 25 nt, Human
gcccugagacgggagaaaggguagg

SEQ ID NO: 1094907 - RNA, 21 nt, Human
uccugucacugugcacacagc

SEQ ID NO: 1094908 - RNA, 22 nt, Human
ucgaaacucacguacucauacc

SEQ ID NO: 1094909 - RNA, 23 nt, Human
ucucuggccagggugagucccca

SEQ ID NO: 1094910 - RNA, 18 nt, Human
ugaggucuucgcugaugc

SEQ ID NO: 1094911 - RNA, 21 nt, Human
ugcacacagccugggaccucc

SEQ ID NO: 1094912 - RNA, 20 nt, Human
ugggaccucccauccugugg

SEQ ID NO: 1094913 - RNA, 26 nt, Human
aaagccaaaaccaaccaaacaaaaau

SEQ ID NO: 1094914 - RNA, 18 nt, Human
aacacuguuuaagucaaa

SEQ ID NO: 1094915 - RNA, 24 nt, Human
aagccaaaaccaaccaaacaaaaa

SEQ ID NO: 1094916 - RNA, 25 nt, Human
aagcuugcagcuguacagccuccaa

SEQ ID NO: 1094917 - RNA, 23 nt, Human
acagcccaggucccacccggcca

SEQ ID NO: 1094918 - RNA, 23 nt, Human
acucccaacccaagcuccgccca

SEQ ID NO: 1094919 - RNA, 23 nt, Human
agaagacggaauccacucaguac

SEQ ID NO: 1094920 - RNA, 20 nt, Human
agaccucuccuggugcccag

SEQ ID NO: 1094921 - RNA, 18 nt, Human
agauuuuuguuacagagc

SEQ ID NO: 1094922 - RNA, 22 nt, Human
agccuccaagagcaaacagccc

SEQ ID NO: 1094923 - RNA, 21 nt, Human
agcuguacagccuccaagagc

SEQ ID NO: 1094924 - RNA, 19 nt, Human
aggugugccaaagccaaaa

SEQ ID NO: 1094925 - RNA, 21 nt, Human
auccuuggggggcucuuucuc

SEQ ID NO: 1094926 - RNA, 26 nt, Human
aucugcagacacuucugucauccucu

SEQ ID NO: 1094927 - RNA, 21 nt, Human
caagaaaaccuaacucaggug

SEQ ID NO: 1094928 - RNA, 23 nt, Human
cacacauuccauuccugaguaga

SEQ ID NO: 1094929 - RNA, 23 nt, Human
cacuucugucauccucccauccu

SEQ ID NO: 1094930 - RNA, 21 nt, Human
cagagaccucuccuggugccc

SEQ ID NO: 1094931 - RNA, 20 nt, Human
cagcuguacagccuccaaga

SEQ ID NO: 1094932 - RNA, 21 nt, Human
caggaaaaacagaaagcggug

SEQ ID NO: 1094933 - RNA, 18 nt, Human
cagugggcuucccaaucu

SEQ ID NO: 1094934 - RNA, 22 nt, Human
cauauaucauacacacaaaaca

SEQ ID NO: 1094935 - RNA, 22 nt, Human
ccaaagccaaaaccaaccaaac

SEQ ID NO: 1094936 - RNA, 20 nt, Human
ccaaccaaacaaaaauggaa

SEQ ID NO: 1094937 - RNA, 21 nt, Human
ccaaccaaacaaaaauggaau

SEQ ID NO: 1094938 - RNA, 22 nt, Human
ccacccggggauccucagagac

SEQ ID NO: 1094939 - RNA, 18 nt, Human
ccaggcagugccaucugc

SEQ ID NO: 1094940 - RNA, 23 nt, Human
ccaucugcagacacuucugucau

SEQ ID NO: 1094941 - RNA, 21 nt, Human
cccaacccaagcuccgcccaa

SEQ ID NO: 1094942 - RNA, 22 nt, Human
cccaacccaagcuccgcccaac

SEQ ID NO: 1094943 - RNA, 20 nt, Human
cccuccccguccccuucuuu

SEQ ID NO: 1094944 - RNA, 22 nt, Human
ccuccaagagcaaacagcccag

SEQ ID NO: 1094945 - RNA, 22 nt, Human
ccugaaaacuucaaacaacugc

SEQ ID NO: 1094946 - RNA, 19 nt, Human
ccuuugagcgcggacucaa

SEQ ID NO: 1094947 - RNA, 21 nt, Human
cgcccaacuguggguccuugc

SEQ ID NO: 1094948 - RNA, 21 nt, Human
cgggaggaguuuccacccggg

SEQ ID NO: 1094949 - RNA, 21 nt, Human
cucccaacccaagcuccgcca

SEQ ID NO: 1094950 - RNA, 22 nt, Human
cugaguagaagacggaauccac

SEQ ID NO: 1094951 - RNA, 19 nt, Human
gacaucugaaucauuaacu

SEQ ID NO: 1094952 - RNA, 21 nt, Human
gaguagaagacggaauccacu

SEQ ID NO: 1094953 - RNA, 18 nt, Human
gcucuccaauucucagau

SEQ ID NO: 1094954 - RNA, 21 nt, Human
ggacucaaaacaggccagaag

SEQ ID NO: 1094955 - RNA, 20 nt, Human
guggcuguucaaacauuauc

SEQ ID NO: 1094956 - RNA, 18 nt, Human
uacuaguggugucugaua

SEQ ID NO: 1094957 - RNA, 20 nt, Human
uacuaguggugucugauaua

SEQ ID NO: 1094958 - RNA, 24 nt, Human
uacuuuggccuugcacccaggcuc

SEQ ID NO: 1094959 - RNA, 22 nt, Human
uauaucauacacacaaaacauu

SEQ ID NO: 1094960 - RNA, 21 nt, Human
uaucuacuaguggugucugau

SEQ ID NO: 1094961 - RNA, 22 nt, Human
ucccaacccaagcuccgcccaa

SEQ ID NO: 1094962 - RNA, 22 nt, Human
ucuguaagagucuaguucuucu

SEQ ID NO: 1094963 - RNA, 19 nt, Human
ucuugcaauccugggacuu

SEQ ID NO: 1094964 - RNA, 20 nt, Human
ugaaagcuuuuaguuuccuu

SEQ ID NO: 1094965 - RNA, 22 nt, Human
ugacgcccuccccguccccuuc

SEQ ID NO: 1094966 - RNA, 22 nt, Human
ugcacccaggcucacacgcgua

SEQ ID NO: 1094967 - RNA, 21 nt, Human
ugcagacacuucugucauccu

SEQ ID NO: 1094968 - RNA, 23 nt, Human
ugccaaagccaaaaccaaccaaa

SEQ ID NO: 1094969 - RNA, 26 nt, Human
ugccaaagccaaaaccaaccaaacaa

SEQ ID NO: 1094970 - RNA, 22 nt, Human
ugccaucugcagacacuucugu

SEQ ID NO: 1094971 - RNA, 19 nt, Human
ugggcggggggagaguauu

SEQ ID NO: 1094972 - RNA, 20 nt, Human
ugugguuuuacucccgggag

SEQ ID NO: 1094973 - RNA, 23 nt, Human
uguuacagagcucaaguuguuag

SEQ ID NO: 1094974 - RNA, 24 nt, Human
uuucccauauaucauacacacaaa

SEQ ID NO: 1094975 - RNA, 18 nt, Human
uuuggucaucuacugaca

SEQ ID NO: 1094976 - RNA, 23 nt, Human
aaacaggauacaagauaccacaa

SEQ ID NO: 1094977 - RNA, 21 nt, Human
aaaccacaccaccauccugug

SEQ ID NO: 1094978 - RNA, 26 nt, Human
aaaccacaccaccauccugugcuucc

SEQ ID NO: 1094979 - RNA, 23 nt, Human
aaacccucuccgaacuccagaau

SEQ ID NO: 1094980 - RNA, 19 nt, Human
aaccugcuuguuucucccu

SEQ ID NO: 1094981 - RNA, 22 nt, Human
aacugacagcugcaaagaccca

SEQ ID NO: 1094982 - RNA, 19 nt, Human
aagacaccacuaguagaaa

SEQ ID NO: 1094983 - RNA, 24 nt, Human
aagauagucagacauuuggagcca

SEQ ID NO: 1094984 - RNA, 20 nt, Human
aagccaccuggaugacaaca

SEQ ID NO: 1094985 - RNA, 24 nt, Human
aaguuaauacaacagaagacacca

SEQ ID NO: 1094986 - RNA, 22 nt, Human
acaaaggaaagaaguuaauaca

SEQ ID NO: 1094987 - RNA, 24 nt, Human
acaacagaagacaccacuaguaga

SEQ ID NO: 1094988 - RNA, 19 nt, Human
acagcugcaaagacccaga

SEQ ID NO: 1094989 - RNA, 24 nt, Human
accaccauccugugcuucccccua

SEQ ID NO: 1094990 - RNA, 18 nt, Human
accauccugugcuucccc

SEQ ID NO: 1094991 - RNA, 21 nt, Human
accccaggaaagcuggagagu

SEQ ID NO: 1094992 - RNA, 22 nt, Human
accucuccuccuuccgccccag

SEQ ID NO: 1094993 - RNA, 22 nt, Human
acuacgugcaaacucccugccc

SEQ ID NO: 1094994 - RNA, 19 nt, Human
acucccugcccagggggug

SEQ ID NO: 1094995 - RNA, 20 nt, Human
agaacccaauuugaggccau

SEQ ID NO: 1094996 - RNA, 21 nt, Human
agauagucagacauuuggagc

SEQ ID NO: 1094997 - RNA, 18 nt, Human
agcugcaaagacccagau

SEQ ID NO: 1094998 - RNA, 19 nt, Human
aggcagcagggcaaaccgc

SEQ ID NO: 1094999 - RNA, 19 nt, Human
auccauccagaccucccca

SEQ ID NO: 1095000 - RNA, 18 nt, Human
auccguauauucuucccu

SEQ ID NO: 1095001 - RNA, 22 nt, Human
augaaccggacgccuacacuua

SEQ ID NO: 1095002 - RNA, 20 nt, Human
caagcugagagcagucugcu

SEQ ID NO: 1095003 - RNA, 20 nt, Human
cacacacacugcaggcaaga

SEQ ID NO: 1095004 - RNA, 22 nt, Human
cacagauccauccagaccuccc

SEQ ID NO: 1095005 - RNA, 27 nt, Human
caccaccauccugugcuucccccuaaa

SEQ ID NO: 1095006 - RNA, 20 nt, Human
caccugacuaguucuaaggc

SEQ ID NO: 1095007 - RNA, 23 nt, Human
cacuccuuaggacccuaaagcca

SEQ ID NO: 1095008 - RNA, 23 nt, Human
cagaagacaccacuaguagaaac

SEQ ID NO: 1095009 - RNA, 19 nt, Human
cagagggcucccaacagca

SEQ ID NO: 1095010 - RNA, 26 nt, Human
cagcaauaccagcaaugcacuaacca

SEQ ID NO: 1095011 - RNA, 22 nt, Human
cagcacugaagccuuaucccuu

SEQ ID NO: 1095012 - RNA, 24 nt, Human
cagcagggcaaaccgcaacaccuc

SEQ ID NO: 1095013 - RNA, 26 nt, Human
cagcccaccagcagcauuucauacca

SEQ ID NO: 1095014 - RNA, 18 nt, Human
cagcgugaucacucaacu

SEQ ID NO: 1095015 - RNA, 21 nt, Human
cagcugcaaagacccagaugc

SEQ ID NO: 1095016 - RNA, 20 nt, Human
caguggaauggcuuugggau

SEQ ID NO: 1095017 - RNA, 19 nt, Human
caguuacaaaaaagcacaa

SEQ ID NO: 1095018 - RNA, 22 nt, Human
ccaccagcagcauuucauacca

SEQ ID NO: 1095019 - RNA, 22 nt, Human
ccaccuggaugacaacauuccc

SEQ ID NO: 1095020 - RNA, 18 nt, Human
ccagaccuccccagugcc

SEQ ID NO: 1095021 - RNA, 21 nt, Human
ccagaccuccccagugccauc

SEQ ID NO: 1095022 - RNA, 20 nt, Human
ccccagugccauccuucucc

SEQ ID NO: 1095023 - RNA, 24 nt, Human
cccuaaaucgcccaugaugcccgc

SEQ ID NO: 1095024 - RNA, 23 nt, Human
cccuauucccaaauugguauaca

SEQ ID NO: 1095025 - RNA, 20 nt, Human
ccgcagguaaaaauaaaacu

SEQ ID NO: 1095026 - RNA, 19 nt, Human
ccuaaggugcugugcaagc

SEQ ID NO: 1095027 - RNA, 19 nt, Human
ccugcccagggggugggug

SEQ ID NO: 1095028 - RNA, 19 nt, Human
ccugugugacuaagaaggu

SEQ ID NO: 1095029 - RNA, 25 nt, Human
ccuuucuauuccuaagagcuggaaa

SEQ ID NO: 1095030 - RNA, 19 nt, Human
cgcaacaccucuccuccuu

SEQ ID NO: 1095031 - RNA, 25 nt, Human
cuacagggaacuccuacacagaucc

SEQ ID NO: 1095032 - RNA, 19 nt, Human
cuauccguauauucuuccc

SEQ ID NO: 1095033 - RNA, 18 nt, Human
cucuccuccuuccgcccc

SEQ ID NO: 1095034 - RNA, 24 nt, Human
cugcagguuuaaaccacaccacca

SEQ ID NO: 1095035 - RNA, 19 nt, Human
cugcuggggaggcagcagg

SEQ ID NO: 1095036 - RNA, 21 nt, Human
cuggaaauguccuacugcuga

SEQ ID NO: 1095037 - RNA, 24 nt, Human
cuuaggacccuaaagccaccugga

SEQ ID NO: 1095038 - RNA, 26 nt, Human
cuuucuccaccccauucccuauccgu

SEQ ID NO: 1095039 - RNA, 22 nt, Human
gaauccaccuaacuggagcugg

SEQ ID NO: 1095040 - RNA, 20 nt, Human
gacagucagcaguccuccuu

SEQ ID NO: 1095041 - RNA, 19 nt, Human
gaccuucccuaccccagga

SEQ ID NO: 1095042 - RNA, 21 nt, Human
gagcagucugcucucugcagc

SEQ ID NO: 1095043 - RNA, 21 nt, Human
gauagucagacauuuggagcc

SEQ ID NO: 1095044 - RNA, 21 nt, Human
gcaaaccgcaacaccucuccu

SEQ ID NO: 1095045 - RNA, 18 nt, Human
gcacugaagccuuauccc

SEQ ID NO: 1095046 - RNA, 20 nt, Human
gcacugugcauggucugcag

SEQ ID NO: 1095047 - RNA, 23 nt, Human
gccacacacacugcaggcaagaa

SEQ ID NO: 1095048 - RNA, 23 nt, Human
gccagugucauccuaggcacaga

SEQ ID NO: 1095049 - RNA, 21 nt, Human
gcucucugcagcuggaucaua

SEQ ID NO: 1095050 - RNA, 19 nt, Human
ggcaagaacccaauuugag

SEQ ID NO: 1095051 - RNA, 20 nt, Human
ggcagcagggcaaaccgcaa

SEQ ID NO: 1095052 - RNA, 18 nt, Human
ggcccuaaugugguuccc

SEQ ID NO: 1095053 - RNA, 21 nt, Human
gggagcaccugacuaguucua

SEQ ID NO: 1095054 - RNA, 24 nt, Human
gggcauuugcaguggaauggcuuu

SEQ ID NO: 1095055 - RNA, 19 nt, Human
ggggauaguagauggggga

SEQ ID NO: 1095056 - RNA, 20 nt, Human
ggguaagaaaugguauuggg

SEQ ID NO: 1095057 - RNA, 24 nt, Human
gucaacugcucauucuuaaaaagu

SEQ ID NO: 1095058 - RNA, 19 nt, Human
gucaagugagggaucaacc

SEQ ID NO: 1095059 - RNA, 21 nt, Human
guccaaagauggauccuagag

SEQ ID NO: 1095060 - RNA, 27 nt, Human
uaaaaaguuggcaacuucccacuaaaa

SEQ ID NO: 1095061 - RNA, 22 nt, Human
uaaaaauaaaacuaaaccccac

SEQ ID NO: 1095062 - RNA, 21 nt, Human
uaaaacaggauacaagauacc

SEQ ID NO: 1095063 - RNA, 24 nt, Human
uaaaacaggauacaagauaccaca

SEQ ID NO: 1095064 - RNA, 23 nt, Human
uaaccacucacagcucacaacua

SEQ ID NO: 1095065 - RNA, 20 nt, Human
uaaugugggagaccuucccu

SEQ ID NO: 1095066 - RNA, 18 nt, Human
uagaaaccugcuuguuuc

SEQ ID NO: 1095067 - RNA, 22 nt, Human
uaggacccuaaagccaccugga

SEQ ID NO: 1095068 - RNA, 22 nt, Human
ucaacccugccuucagcaauac

SEQ ID NO: 1095069 - RNA, 24 nt, Human
ucagcaguccuccuuucuauuccu

SEQ ID NO: 1095070 - RNA, 22 nt, Human
ucagucccucccccaacacaau

SEQ ID NO: 1095071 - RNA, 23 nt, Human
ucauaccaucccuaucgaacaug

SEQ ID NO: 1095072 - RNA, 19 nt, Human
ucccagcaaagggcaaaca

SEQ ID NO: 1095073 - RNA, 20 nt, Human
ucccauccuuucuccacccc

SEQ ID NO: 1095074 - RNA, 26 nt, Human
uccccagugccauccuucuccacucc

SEQ ID NO: 1095075 - RNA, 20 nt, Human
ucccuaaaacuuagucucug

SEQ ID NO: 1095076 - RNA, 24 nt, Human
uccuaggcacagaccaggcuucug

SEQ ID NO: 1095077 - RNA, 21 nt, Human
uccugcuggggaggcagcagg

SEQ ID NO: 1095078 - RNA, 20 nt, Human
ucuauuccuaagagcuggaa

SEQ ID NO: 1095079 - RNA, 23 nt, Human
ucuccagcgugaucacucaacuc

SEQ ID NO: 1095080 - RNA, 19 nt, Human
ucucugaagaaccucaguc

SEQ ID NO: 1095081 - RNA, 18 nt, Human
ucucugcagcuggaucau

SEQ ID NO: 1095082 - RNA, 19 nt, Human
ucuggggccagugucaucc

SEQ ID NO: 1095083 - RNA, 21 nt, Human
ugaaagagcaacugacagcca

SEQ ID NO: 1095084 - RNA, 23 nt, Human
ugaaagagcaacugacagcugca

SEQ ID NO: 1095085 - RNA, 18 nt, Human
ugaaccggacgccuacac

SEQ ID NO: 1095086 - RNA, 20 nt, Human
ugacaacauucccauccuuu

SEQ ID NO: 1095087 - RNA, 24 nt, Human
ugacaacauucccauccuuucucc

SEQ ID NO: 1095088 - RNA, 18 nt, Human
ugacagcugcaaagaccc

SEQ ID NO: 1095089 - RNA, 23 nt, Human
ugaguacagucagucccuccccc

SEQ ID NO: 1095090 - RNA, 18 nt, Human
ugcagcuggaucauauac

SEQ ID NO: 1095091 - RNA, 19 nt, Human
ugcuuuguuaaagaucagg

SEQ ID NO: 1095092 - RNA, 23 nt, Human
ugggaucacaaaacuuugaguuc

SEQ ID NO: 1095093 - RNA, 18 nt, Human
uggguggagggagcaccu

SEQ ID NO: 1095094 - RNA, 21 nt, Human
uggguuccccuauucccaaau

SEQ ID NO: 1095095 - RNA, 26 nt, Human
ugguauuggguggagggagcaccuga

SEQ ID NO: 1095096 - RNA, 20 nt, Human
uggucugcagcuaaggagag

SEQ ID NO: 1095097 - RNA, 20 nt, Human
uguacacuuuugcccaucug

SEQ ID NO: 1095098 - RNA, 18 nt, Human
ugugggagaccuucccua

SEQ ID NO: 1095099 - RNA, 19 nt, Human
uucccauccuuucuccacc

SEQ ID NO: 1095100 - RNA, 22 nt, Human
uugcugcagguuuaaaccacac

SEQ ID NO: 1095101 - RNA, 24 nt, Human
uuucucugaagaaccucagucccc

SEQ ID NO: 1095102 - RNA, 24 nt, Human
uuuuuauacagcgccagacaguca

SEQ ID NO: 1095103 - RNA, 23 nt, Human
aaagggacacgcgccaauccagc

SEQ ID NO: 1095104 - RNA, 21 nt, Human
aaauauucccucucuucuccc

SEQ ID NO: 1095105 - RNA, 18 nt, Human
aagaaagaaaaagaaaag

SEQ ID NO: 1095106 - RNA, 20 nt, Human
acaaaaacaaacacauacaa

SEQ ID NO: 1095107 - RNA, 25 nt, Human
acaaaaacaaacacauacaaaaagg

SEQ ID NO: 1095108 - RNA, 28 nt, Human
acacaugcauacauccuacauaugugug

SEQ ID NO: 1095109 - RNA, 25 nt, Human
acagcaacgcagacaacguaaguac

SEQ ID NO: 1095110 - RNA, 26 nt, Human
acauacccauaccuguagcacaaaaa

SEQ ID NO: 1095111 - RNA, 24 nt, Human
acccuuuugcagauuuuuuaaaaa

SEQ ID NO: 1095112 - RNA, 23 nt, Human
agaauaugcccaaaagaugccag

SEQ ID NO: 1095113 - RNA, 18 nt, Human
agaaucccggccucugcu

SEQ ID NO: 1095114 - RNA, 21 nt, Human
agccaacagcuuguccccccc

SEQ ID NO: 1095115 - RNA, 25 nt, Human
aggacaaaaacaaacacauacaaaa

SEQ ID NO: 1095116 - RNA, 21 nt, Human
agggagcuuuaaaagccccca

SEQ ID NO: 1095117 - RNA, 18 nt, Human
agugcaggaacauuucug

SEQ ID NO: 1095118 - RNA, 21 nt, Human
auacaccuauauacauaccca

SEQ ID NO: 1095119 - RNA, 20 nt, Human
auaguuggagcagccuaggc

SEQ ID NO: 1095120 - RNA, 19 nt, Human
augcaaaagggacacgcgc

SEQ ID NO: 1095121 - RNA, 20 nt, Human
auuuguuguuuguuuuccuu

SEQ ID NO: 1095122 - RNA, 22 nt, Human
caaaagaaacaaauauaaucca

SEQ ID NO: 1095123 - RNA, 22 nt, Human
caaaagaaacaaauauaaucca

SEQ ID NO: 1095124 - RNA, 19 nt, Human
caaaccccaaguagccgag

SEQ ID NO: 1095125 - RNA, 23 nt, Human
caacaucccucuucaaaaagaaa

SEQ ID NO: 1095126 - RNA, 23 nt, Human
caagccaacagcuuguccccccc

SEQ ID NO: 1095127 - RNA, 23 nt, Human
caccaaaagaaaaauuagcccca

SEQ ID NO: 1095128 - RNA, 23 nt, Human
caccaagucccccccuccccaag

SEQ ID NO: 1095129 - RNA, 21 nt, Human
caccaguaguggcuaaccagc

SEQ ID NO: 1095130 - RNA, 25 nt, Human
caccaguguuuccucaguagccccu

SEQ ID NO: 1095131 - RNA, 22 nt, Human
caccuuucaggauccacagcaa

SEQ ID NO: 1095132 - RNA, 24 nt, Human
cacuguauucuuucucuccccacc

SEQ ID NO: 1095133 - RNA, 21 nt, Human
cagcugcuguuuuaccaggaa

SEQ ID NO: 1095134 - RNA, 25 nt, Human
cauacacauacaugcacauacacau

SEQ ID NO: 1095135 - RNA, 23 nt, Human
cauuaccccccaaaagaaacaaa

SEQ ID NO: 1095136 - RNA, 20 nt, Human
cauucaucucccuggugaua

SEQ ID NO: 1095137 - RNA, 22 nt, Human
ccaaaagaaaaauuagccccac

SEQ ID NO: 1095138 - RNA, 19 nt, Human
ccaaaccccaaguagccga

SEQ ID NO: 1095139 - RNA, 23 nt, Human
ccaacagcuugucccccccacca

SEQ ID NO: 1095140 - RNA, 19 nt, Human
ccaaguacucacauauucc

SEQ ID NO: 1095141 - RNA, 23 nt, Human
ccaccaaaagaaaaauuagcccc

SEQ ID NO: 1095142 - RNA, 18 nt, Human
ccagccguucccugaaac

SEQ ID NO: 1095143 - RNA, 22 nt, Human
ccauugaaucacuuuauuuuuu

SEQ ID NO: 1095144 - RNA, 23 nt, Human
cccaaaagaaacaaauauaaucc

SEQ ID NO: 1095145 - RNA, 22 nt, Human
ccccaaaccccaaguagccgag

SEQ ID NO: 1095146 - RNA, 24 nt, Human
ccccaaaccccaaguagccgaguc

SEQ ID NO: 1095147 - RNA, 24 nt, Human
ccccaaagagcuacuaguuucagc

SEQ ID NO: 1095148 - RNA, 18 nt, Human
ccccacacaagcgccuuc

SEQ ID NO: 1095149 - RNA, 23 nt, Human
ccccaccaaaagaaaaauuagcc

SEQ ID NO: 1095150 - RNA, 19 nt, Human
ccccaccaagucccccccu

SEQ ID NO: 1095151 - RNA, 19 nt, Human
ccccaccaagucccccccu

SEQ ID NO: 1095152 - RNA, 24 nt, Human
ccccaccaagucccccccucccca

SEQ ID NO: 1095153 - RNA, 25 nt, Human
ccccaccaagucccccccuccccaa

SEQ ID NO: 1095154 - RNA, 27 nt, Human
cccccaaaagaaacaaauauaauccac

SEQ ID NO: 1095155 - RNA, 25 nt, Human
ccccccaaaagaaacaaauauaauc

SEQ ID NO: 1095156 - RNA, 22 nt, Human
ccccccuccccaaguacucaca

SEQ ID NO: 1095157 - RNA, 21 nt, Human
cccuccuccuccuucacuccc

SEQ ID NO: 1095158 - RNA, 18 nt, Human
ccucucucucccuccuuu

SEQ ID NO: 1095159 - RNA, 18 nt, Human
ccucugugguguggaaga

SEQ ID NO: 1095160 - RNA, 24 nt, Human
cggcagaaucaaguuuaaaggaaa

SEQ ID NO: 1095161 - RNA, 32 nt, Human
cucacacaugcauacauccuacauauguggug

SEQ ID NO: 1095162 - RNA, 21 nt, Human
cuccucucucucccuccuuuu

SEQ ID NO: 1095163 - RNA, 19 nt, Human
cucucucccuccuuuuucu

SEQ ID NO: 1095164 - RNA, 20 nt, Human
cuguguggcaucccuccucc

SEQ ID NO: 1095165 - RNA, 21 nt, Human
cuguguggcaucccuccuccu

SEQ ID NO: 1095166 - RNA, 19 nt, Human
cuugucuucguuuucuuug

SEQ ID NO: 1095167 - RNA, 25 nt, Human
gaaaggacaaaaacaaacacauaca

SEQ ID NO: 1095168 - RNA, 20 nt, Human
gacuaggcugaauggugggg

SEQ ID NO: 1095169 - RNA, 28 nt, Human
gauguaugcauacacauacaugcacaua

SEQ ID NO: 1095170 - RNA, 23 nt, Human
gcaccagagcgauuaacggaaaa

SEQ ID NO: 1095171 - RNA, 18 nt, Human
gcaggagagguccccccc

SEQ ID NO: 1095172 - RNA, 26 nt, Human
gccccacacaagcgccuucugcugca

SEQ ID NO: 1095173 - RNA, 19 nt, Human
gccucuuuccccuucuucu

SEQ ID NO: 1095174 - RNA, 21 nt, Human
gcgcccggugccaacagaaca

SEQ ID NO: 1095175 - RNA, 19 nt, Human
gcuucucccacugcaggag

SEQ ID NO: 1095176 - RNA, 20 nt, Human
gcuugucccccccaccaaaa

SEQ ID NO: 1095177 - RNA, 19 nt, Human
ggaaaagaucagagcuaca

SEQ ID NO: 1095178 - RNA, 22 nt, Human
ggugguuuucaguuuuuucugu

SEQ ID NO: 1095179 - RNA, 18 nt, Human
gucuguguggcaucccuc

SEQ ID NO: 1095180 - RNA, 24 nt, Human
guucauuaccccccaaaagaaaca

SEQ ID NO: 1095181 - RNA, 18 nt, Human
guuuguuguugacuaggc

SEQ ID NO: 1095182 - RNA, 23 nt, Human
uaaaaggaagaauaugcccaaaa

SEQ ID NO: 1095183 - RNA, 22 nt, Human
uaaccaccaccuuucuguccug

SEQ ID NO: 1095184 - RNA, 18 nt, Human
uaagaaagaaaaagaaaa

SEQ ID NO: 1095185 - RNA, 18 nt, Human
uacacauauuuccuucuc

SEQ ID NO: 1095186 - RNA, 23 nt, Human
uacauacccauaccuguagcaca

SEQ ID NO: 1095187 - RNA, 23 nt, Human
uaccagccguucccugaaacccu

SEQ ID NO: 1095188 - RNA, 19 nt, Human
uaccccccaaaagaaacaa

SEQ ID NO: 1095189 - RNA, 18 nt, Human
uagcaaaaguagaagaca

SEQ ID NO: 1095190 - RNA, 24 nt, Human
uagcagugaauguagauaaaucuc

SEQ ID NO: 1095191 - RNA, 26 nt, Human
uauacacauacaaccuuacacaugug

SEQ ID NO: 1095192 - RNA, 22 nt, Human
uauauacauacccauaccugua

SEQ ID NO: 1095193 - RNA, 23 nt, Human
uauccuccuuucucugccuucuu

SEQ ID NO: 1095194 - RNA, 18 nt, Human
uauguguguauaugcaua

SEQ ID NO: 1095195 - RNA, 22 nt, Human
uauuuguuguuuguuuuccuug

SEQ ID NO: 1095196 - RNA, 22 nt, Human
ucaaaaagaaaggacaaaaaca

SEQ ID NO: 1095197 - RNA, 24 nt, Human
ucacauauucccuaaccaccaccu

SEQ ID NO: 1095198 - RNA, 22 nt, Human
ucagagcuacaaaauaauugac

SEQ ID NO: 1095199 - RNA, 25 nt, Human
ucaguagccccuuccaaaucgcucu

SEQ ID NO: 1095200 - RNA, 22 nt, Human
ucauuagccaaacgauuauucc

SEQ ID NO: 1095201 - RNA, 21 nt, Human
uccacaagagcagcaauuaau

SEQ ID NO: 1095202 - RNA, 19 nt, Human
uccagcgccugccccuggc

SEQ ID NO: 1095203 - RNA, 23 nt, Human
ucccaggguccgaggaagggcuc

SEQ ID NO: 1095204 - RNA, 19 nt, Human
ucccauugaaucacuuuau

SEQ ID NO: 1095205 - RNA, 21 nt, Human
uccccaccaagucccccccuc

SEQ ID NO: 1095206 - RNA, 18 nt, Human
uccccuucuucuccccug

SEQ ID NO: 1095207 - RNA, 22 nt, Human
ucccuccuccuccuucacuccc

SEQ ID NO: 1095208 - RNA, 18 nt, Human
ucccugaaacccuuuugc

SEQ ID NO: 1095209 - RNA, 20 nt, Human
uccgcugugcuggcuccacu

SEQ ID NO: 1095210 - RNA, 25 nt, Human
uccuccuuucucugccuucuucgca

SEQ ID NO: 1095211 - RNA, 24 nt, Human
uccugagucccguaaccucgggag

SEQ ID NO: 1095212 - RNA, 22 nt, Human
ucgcaccagagcgauuaacgga

SEQ ID NO: 1095213 - RNA, 20 nt, Human
ucucccagcagaggcugugg

SEQ ID NO: 1095214 - RNA, 22 nt, Human
ucucccuccuuuuucucacaca

SEQ ID NO: 1095215 - RNA, 21 nt, Human
ucuccucucucucccuccuuu

SEQ ID NO: 1095216 - RNA, 21 nt, Human
ucucucucccuccuuuuucuc

SEQ ID NO: 1095217 - RNA, 23 nt, Human
ucucuggcugccugcuugcugcu

SEQ ID NO: 1095218 - RNA, 23 nt, Human
ucugcuacugcauuccccaaaga

SEQ ID NO: 1095219 - RNA, 22 nt, Human
ucugcugcaacagaugcccaga

SEQ ID NO: 1095220 - RNA, 21 nt, Human
ucuguccugucgggugcaggg

SEQ ID NO: 1095221 - RNA, 21 nt, Human
ucugugguguggaagaccccc

SEQ ID NO: 1095222 - RNA, 21 nt, Human
ucuguuuguugcuguauuugu

SEQ ID NO: 1095223 - RNA, 24 nt, Human
ucuucguuuucuuuguuucuaauu

SEQ ID NO: 1095224 - RNA, 21 nt, Human
ucuuuaguucauuacccccca

SEQ ID NO: 1095225 - RNA, 27 nt, Human
ugaaauagcaaacaagccaacagcuug

SEQ ID NO: 1095226 - RNA, 22 nt, Human
ugaaauagcccauugagggagc

SEQ ID NO: 1095227 - RNA, 22 nt, Human
ugaauggugggguuuuuuuuaa

SEQ ID NO: 1095228 - RNA, 28 nt, Human
ugauagcagugaauguagauaaaucucc

SEQ ID NO: 1095229 - RNA, 21 nt, Human
ugcaacagaugcccagaucac

SEQ ID NO: 1095230 - RNA, 22 nt, Human
ugcaacagaugcccagaucacc

SEQ ID NO: 1095231 - RNA, 19 nt, Human
ugcaggaacauuucugcug

SEQ ID NO: 1095232 - RNA, 18 nt, Human
ugcccaaaagaugccagc

SEQ ID NO: 1095233 - RNA, 20 nt, Human
ugccugcuugcugcuggagu

SEQ ID NO: 1095234 - RNA, 19 nt, Human
ugccuucaaguuugugcau

SEQ ID NO: 1095235 - RNA, 18 nt, Human
ugcugcuggaguaugauu

SEQ ID NO: 1095236 - RNA, 19 nt, Human
uggaagacccccaaacccc

SEQ ID NO: 1095237 - RNA, 23 nt, Human
uggcugccugcuugcugcuggag

SEQ ID NO: 1095238 - RNA, 24 nt, Human
uggcugccugcuugcugcuggagu

SEQ ID NO: 1095239 - RNA, 28 nt, Human
uguaugcauacacauacaugcacauaca

SEQ ID NO: 1095240 - RNA, 21 nt, Human
ugucugcuuuuucuuuguuug

SEQ ID NO: 1095241 - RNA, 23 nt, Human
ugucugcuuuuucuuuguuuguu

SEQ ID NO: 1095242 - RNA, 20 nt, Human
uguguauaugcauaaacaua

SEQ ID NO: 1095243 - RNA, 20 nt, Human
uguguauaugcauaaacaua

SEQ ID NO: 1095244 - RNA, 24 nt, Human
uguguauaugcauaaacauauaca

SEQ ID NO: 1095245 - RNA, 18 nt, Human
uguguguauaugcauaaa

SEQ ID NO: 1095246 - RNA, 19 nt, Human
uguguguauaugcauaaac

SEQ ID NO: 1095247 - RNA, 24 nt, Human
uguguguauaugcauaaacauaua

SEQ ID NO: 1095248 - RNA, 23 nt, Human
uguuuccucaguagccccuucca

SEQ ID NO: 1095249 - RNA, 23 nt, Human
uuaaaaacaaccaccuaaaacau

SEQ ID NO: 1095250 - RNA, 23 nt, Human
uuaauauguugugcauguauaag

SEQ ID NO: 1095251 - RNA, 18 nt, Human
uuaaugaagggauaaauu

SEQ ID NO: 1095252 - RNA, 24 nt, Human
uuaaugaagggauaaauuaccgau

SEQ ID NO: 1095253 - RNA, 21 nt, Human
uuagccaaacgauuauuccuc

SEQ ID NO: 1095254 - RNA, 25 nt, Human
uucaaaaguaacaacaucccucuuc

SEQ ID NO: 1095255 - RNA, 18 nt, Human
uuccagcgccugccccug

SEQ ID NO: 1095256 - RNA, 22 nt, Human
uuccgaugucugcuuuuucuuu

SEQ ID NO: 1095257 - RNA, 21 nt, Human
uuccucaguagccccuuccaa

SEQ ID NO: 1095258 - RNA, 21 nt, Human
uucuucauucucuuuaguuca

SEQ ID NO: 1095259 - RNA, 23 nt, Human
uugaaauagcaaacaagccaaca

SEQ ID NO: 1095260 - RNA, 21 nt, Human
uugaagagucaccaguagugg

SEQ ID NO: 1095261 - RNA, 19 nt, Human
uugcgccuucgguugcugc

SEQ ID NO: 1095262 - RNA, 24 nt, Human
uugcugcuugcuguucgcuccugg

SEQ ID NO: 1095263 - RNA, 21 nt, Human
uugucucucccuuuuguuucc

SEQ ID NO: 1095264 - RNA, 21 nt, Human
uuguuguuuguuuuccuuguu

SEQ ID NO: 1095265 - RNA, 22 nt, Human
uuuagcaaaaguagaagacaga

SEQ ID NO: 1095266 - RNA, 23 nt, Human
uuuccucaguagccccuuccaaa

SEQ ID NO: 1095267 - RNA, 24 nt, Human
uuucuugucuucguuuucuuuguu

SEQ ID NO: 1095268 - RNA, 19 nt, Human
uuuguaaaauccacaagag

SEQ ID NO: 1095269 - RNA, 22 nt, Human
accccuucuuggggguagcuca

SEQ ID NO: 1095270 - RNA, 24 nt, Human
agcucaucauccaaggagaaacaa

SEQ ID NO: 1095271 - RNA, 21 nt, Human
cauccaaggagaaacaaacag

SEQ ID NO: 1095272 - RNA, 21 nt, Human
cucaucauccaaggagaaaca

SEQ ID NO: 1095273 - RNA, 24 nt, Human
uccaaggagaaacaaacaguuaca

SEQ ID NO: 1095274 - RNA, 20 nt, Human
uugaauggaaguucugugcc

SEQ ID NO: 1095275 - RNA, 23 nt, Human
aaagagauauuugagucacugac

SEQ ID NO: 1095276 - RNA, 19 nt, Human
aaaggccacacagccagug

SEQ ID NO: 1095277 - RNA, 24 nt, Human
aaagugcugggauuacagguguga

SEQ ID NO: 1095278 - RNA, 20 nt, Human
aaccucugucucccaggcuc

SEQ ID NO: 1095279 - RNA, 20 nt, Human
aagauaacaccccguuccca

SEQ ID NO: 1095280 - RNA, 19 nt, Human
aagcuaggaauccaggucc

SEQ ID NO: 1095281 - RNA, 22 nt, Human
aagggacuccugcccuuaacca

SEQ ID NO: 1095282 - RNA, 25 nt, Human
aagugauuaaccagccucagccucc

SEQ ID NO: 1095283 - RNA, 18 nt, Human
aagugcugggauuacagg

SEQ ID NO: 1095284 - RNA, 19 nt, Human
aagugcugggauuacaggu

SEQ ID NO: 1095285 - RNA, 26 nt, Human
aagugcugggauuacaggugugagcc

SEQ ID NO: 1095286 - RNA, 24 nt, Human
acagugcugggaucacagguguga

SEQ ID NO: 1095287 - RNA, 21 nt, Human
acugcaaccucugucucccag

SEQ ID NO: 1095288 - RNA, 22 nt, Human
acugcaaccucugucucccagg

SEQ ID NO: 1095289 - RNA, 23 nt, Human
agagauauuugagucacugacca

SEQ ID NO: 1095290 - RNA, 21 nt, Human
agccuccugaguagcugggac

SEQ ID NO: 1095291 - RNA, 24 nt, Human
agcuggucucaaacuccugaccuc

SEQ ID NO: 1095292 - RNA, 22 nt, Human
aggcucaagugauccucuugcc

SEQ ID NO: 1095293 - RNA, 23 nt, Human
aggcucaagugauccucuugccu

SEQ ID NO: 1095294 - RNA, 18 nt, Human
aguagaaaugaggucuug

SEQ ID NO: 1095295 - RNA, 19 nt, Human
aguagcugggacuacaggc

SEQ ID NO: 1095296 - RNA, 23 nt, Human
aguagcugggacuacaggcaugu

SEQ ID NO: 1095297 - RNA, 21 nt, Human
aguccguaagggacuccugcc

SEQ ID NO: 1095298 - RNA, 25 nt, Human
agugauccucuugccuuagccuccu

SEQ ID NO: 1095299 - RNA, 22 nt, Human
agugcugggaucacagguguga

SEQ ID NO: 1095300 - RNA, 21 nt, Human
auccuccugccucagccuccc

SEQ ID NO: 1095301 - RNA, 19 nt, Human
aucuugccucuuccucucc

SEQ ID NO: 1095302 - RNA, 18 nt, Human
augggguuucacuauauu

SEQ ID NO: 1095303 - RNA, 22 nt, Human
augucugcaacuuacuuugaaa

SEQ ID NO: 1095304 - RNA, 24 nt, Human
caaagugcugggauuacaggugug

SEQ ID NO: 1095305 - RNA, 23 nt, Human
caaccucugucucccaggcucaa

SEQ ID NO: 1095306 - RNA, 20 nt, Human
caagugauccucuugccuua

SEQ ID NO: 1095307 - RNA, 22 nt, Human
caagugauccucuugccuuagc

SEQ ID NO: 1095308 - RNA, 23 nt, Human
cacaggugugagccaccgugccc

SEQ ID NO: 1095309 - RNA, 24 nt, Human
cacagugcugggaucacaggugug

SEQ ID NO: 1095310 - RNA, 24 nt, Human
caccacgccuggcuaauuuuuugg

SEQ ID NO: 1095311 - RNA, 21 nt, Human
caccccucgccuuuccucucu

SEQ ID NO: 1095312 - RNA, 23 nt, Human
cacuauauugcccagcuggucuc

SEQ ID NO: 1095313 - RNA, 26 nt, Human
cagaucuugccucuuccucuccaggg

SEQ ID NO: 1095314 - RNA, 25 nt, Human
cagccucagccucccacagugcugg

SEQ ID NO: 1095315 - RNA, 24 nt, Human
caggugugagccaccgugcccggc

SEQ ID NO: 1095316 - RNA, 24 nt, Human
cagugcugggaucacaggugugag

SEQ ID NO: 1095317 - RNA, 21 nt, Human
ccaaagugcugggauuacagg

SEQ ID NO: 1095318 - RNA, 21 nt, Human
ccaaagugcugggauuacagg

SEQ ID NO: 1095319 - RNA, 24 nt, Human
ccaaagugcugggauuacaggugu

SEQ ID NO: 1095320 - RNA, 24 nt, Human
ccacagugcugggaucacaggugu

SEQ ID NO: 1095321 - RNA, 20 nt, Human
ccaccacgccuggcuaauuu

SEQ ID NO: 1095322 - RNA, 22 nt, Human
cccaggcucaagugauccucuu

SEQ ID NO: 1095323 - RNA, 23 nt, Human
cccaggcuggagugcaauggagc

SEQ ID NO: 1095324 - RNA, 24 nt, Human
cccaguuuuuguaucuguuuuugu

SEQ ID NO: 1095325 - RNA, 24 nt, Human
ccccguucccaguuuuuguaucug

SEQ ID NO: 1095326 - RNA, 19 nt, Human
ccccucgccuuuccucucu

SEQ ID NO: 1095327 - RNA, 24 nt, Human
ccucuugccuuagccuccugagua

SEQ ID NO: 1095328 - RNA, 23 nt, Human
ccugaguagcugggacuacaggc

SEQ ID NO: 1095329 - RNA, 24 nt, Human
ccugaguagcugggacuacaggca

SEQ ID NO: 1095330 - RNA, 20 nt, Human
cucaagugauccucuugccu

SEQ ID NO: 1095331 - RNA, 23 nt, Human
cucaagugauuaaccagccucag

SEQ ID NO: 1095332 - RNA, 25 nt, Human
cucccaggcucaagugauccucuug

SEQ ID NO: 1095333 - RNA, 23 nt, Human
cugcaaccucugucucccaggcu

SEQ ID NO: 1095334 - RNA, 24 nt, Human
cugcaaccucugucucccaggcuc

SEQ ID NO: 1095335 - RNA, 23 nt, Human
cugccucagccucccaaagugcu

SEQ ID NO: 1095336 - RNA, 24 nt, Human
cugccucagccucccaaagugcug

SEQ ID NO: 1095337 - RNA, 21 nt, Human
cuuaaguuucuugcauaaaac

SEQ ID NO: 1095338 - RNA, 24 nt, Human
cuuagccuccugaguagcugggac

SEQ ID NO: 1095339 - RNA, 23 nt, Human
cuugccuuagccuccugaguagc

SEQ ID NO: 1095340 - RNA, 24 nt, Human
cuugccuuagccuccugaguagcu

SEQ ID NO: 1095341 - RNA, 21 nt, Human
cuuggaacccaaggauucaaa

SEQ ID NO: 1095342 - RNA, 18 nt, Human
gaagguggagaugcuggc

SEQ ID NO: 1095343 - RNA, 21 nt, Human
gaauggauagagggauggaua

SEQ ID NO: 1095344 - RNA, 23 nt, Human
gaauggauagagggauggauagg

SEQ ID NO: 1095345 - RNA, 22 nt, Human
gagaugggguuucacuauauug

SEQ ID NO: 1095346 - RNA, 25 nt, Human
gaguagcugggacuacaggcaugug

SEQ ID NO: 1095347 - RNA, 18 nt, Human
gaucacaggugugagcca

SEQ ID NO: 1095348 - RNA, 20 nt, Human
gaucacaggugugagccacc

SEQ ID NO: 1095349 - RNA, 21 nt, Human
gaugcuaaaggccacacagcc

SEQ ID NO: 1095350 - RNA, 18 nt, Human
gauuacaggugugagcca

SEQ ID NO: 1095351 - RNA, 21 nt, Human
gauuacaggugugagccacug

SEQ ID NO: 1095352 - RNA, 24 nt, Human
gauuacaggugugagccacuguac

SEQ ID NO: 1095353 - RNA, 19 nt, Human
gcaauccuccugccucagc

SEQ ID NO: 1095354 - RNA, 19 nt, Human
gcccaggcuggagugcaau

SEQ ID NO: 1095355 - RNA, 21 nt, Human
gcuggagugcaauggagccag

SEQ ID NO: 1095356 - RNA, 19 nt, Human
ggacuacaggcaugugcca

SEQ ID NO: 1095357 - RNA, 19 nt, Human
ggcuggagugcaauggagc

SEQ ID NO: 1095358 - RNA, 21 nt, Human
gggaagguggagaugcuggcg

SEQ ID NO: 1095359 - RNA, 22 nt, Human
gggguuucacuauauugcccag

SEQ ID NO: 1095360 - RNA, 21 nt, Human
ggugaaguaaagauaacaccc

SEQ ID NO: 1095361 - RNA, 18 nt, Human
guagagaugggguuucac

SEQ ID NO: 1095362 - RNA, 18 nt, Human
guagagaugggguuucac

SEQ ID NO: 1095363 - RNA, 23 nt, Human
gucccaccuaccucuuuuguuca

SEQ ID NO: 1095364 - RNA, 24 nt, Human
gugauuaaccagccucagccuccc

SEQ ID NO: 1095365 - RNA, 23 nt, Human
uaaaacaaauagagaaaaauguu

SEQ ID NO: 1095366 - RNA, 23 nt, Human
uaaaauggauaaaugaauggaua

SEQ ID NO: 1095367 - RNA, 22 nt, Human
uaaccaagauggaaccuuccug

SEQ ID NO: 1095368 - RNA, 19 nt, Human
uaaguuucuugcauaaaac

SEQ ID NO: 1095369 - RNA, 22 nt, Human
uacaggcaugugccaccacgcc

SEQ ID NO: 1095370 - RNA, 19 nt, Human
uacaggugugagccacugu

SEQ ID NO: 1095371 - RNA, 24 nt, Human
uacaggugugagccacuguaccca

SEQ ID NO: 1095372 - RNA, 23 nt, Human
uacugcaaccucugucucccagg

SEQ ID NO: 1095373 - RNA, 19 nt, Human
uagcagaucuugccucuuc

SEQ ID NO: 1095374 - RNA, 18 nt, Human
uagcccaggcuggagugc

SEQ ID NO: 1095375 - RNA, 20 nt, Human
uagccuccugaguagcuggg

SEQ ID NO: 1095376 - RNA, 22 nt, Human
uaggcagauugacauguguaaa

SEQ ID NO: 1095377 - RNA, 23 nt, Human
uauauugcccagcuggucucaaa

SEQ ID NO: 1095378 - RNA, 19 nt, Human
ucaaaaguuuccucuucaa

SEQ ID NO: 1095379 - RNA, 23 nt, Human
ucaaacucccaaucucaugcaau

SEQ ID NO: 1095380 - RNA, 26 nt, Human
ucagcuuacugcaaccucugucuccc

SEQ ID NO: 1095381 - RNA, 25 nt, Human
uccagggaaacgcugaccaguuugu

SEQ ID NO: 1095382 - RNA, 23 nt, Human
ucccaaagugcugggauuacagg

SEQ ID NO: 1095383 - RNA, 23 nt, Human
ucccacagugcugggaucacagg

SEQ ID NO: 1095384 - RNA, 21 nt, Human
ucccaggcucaagugauccuc

SEQ ID NO: 1095385 - RNA, 24 nt, Human
ucccaggcucaagugauccucuug

SEQ ID NO: 1095386 - RNA, 25 nt, Human
uccggggaagguggagaugcuggcc

SEQ ID NO: 1095387 - RNA, 27 nt, Human
uccuccugccucagccucccaaagugc

SEQ ID NO: 1095388 - RNA, 24 nt, Human
uccugaguagcugggacuacaggc

SEQ ID NO: 1095389 - RNA, 23 nt, Human
uccugcuuuguagcccaggcugg

SEQ ID NO: 1095390 - RNA, 24 nt, Human
uccugcuuuguagcccaggcugga

SEQ ID NO: 1095391 - RNA, 24 nt, Human
ucuaggugaugcuaaaggccacac

SEQ ID NO: 1095392 - RNA, 25 nt, Human
ucugcaacuuacuuugaaauacauu

SEQ ID NO: 1095393 - RNA, 19 nt, Human
ucuugccucuuccucucca

SEQ ID NO: 1095394 - RNA, 19 nt, Human
ucuuuuguucauuccuuca

SEQ ID NO: 1095395 - RNA, 21 nt, Human
ugaggucuugcuguuuuccag

SEQ ID NO: 1095396 - RNA, 23 nt, Human
ugaggucuugcuguuuuccaggc

SEQ ID NO: 1095397 - RNA, 24 nt, Human
ugccucagccucccaaagugcugg

SEQ ID NO: 1095398 - RNA, 20 nt, Human
ugccuuagccuccugaguaa

SEQ ID NO: 1095399 - RNA, 24 nt, Human
ugccuuagccuccugaguagcugg

SEQ ID NO: 1095400 - RNA, 24 nt, Human
ugcugggaucacaggugugagcca

SEQ ID NO: 1095401 - RNA, 24 nt, Human
ugcugggauuacaggugugagcca

SEQ ID NO: 1095402 - RNA, 23 nt, Human
ugcuuuguagcccaggcuggagu

SEQ ID NO: 1095403 - RNA, 24 nt, Human
ugcuuuguagcccaggcuggagug

SEQ ID NO: 1095404 - RNA, 20 nt, Human
uggagaugcuggcgcuuucc

SEQ ID NO: 1095405 - RNA, 24 nt, Human
uggagccaucucagcuuacugcaa

SEQ ID NO: 1095406 - RNA, 23 nt, Human
uggagugcaauggagccaucuca

SEQ ID NO: 1095407 - RNA, 19 nt, Human
uggcaaagggaggcuuccg

SEQ ID NO: 1095408 - RNA, 21 nt, Human
uggcaaagggaggcuuccggg

SEQ ID NO: 1095409 - RNA, 18 nt, Human
ugggacuacaggcaugug

SEQ ID NO: 1095410 - RNA, 21 nt, Human
ugggacuacaggcaugugcca

SEQ ID NO: 1095411 - RNA, 22 nt, Human
ugggacuacaggcaugugccac

SEQ ID NO: 1095412 - RNA, 24 nt, Human
ugggacuacaggcaugugccacca

SEQ ID NO: 1095413 - RNA, 21 nt, Human
ugggaucacaggugugagcca

SEQ ID NO: 1095414 - RNA, 22 nt, Human
ugggaucacaggugugagccac

SEQ ID NO: 1095415 - RNA, 23 nt, Human
ugggaucacaggugugagccacc

SEQ ID NO: 1095416 - RNA, 23 nt, Human
ugggaucacaggugugagccacc

SEQ ID NO: 1095417 - RNA, 24 nt, Human
ugggaucacaggugugagccaccg

SEQ ID NO: 1095418 - RNA, 18 nt, Human
ugggauuacaggugugag

SEQ ID NO: 1095419 - RNA, 21 nt, Human
ugggauuacaggugugagcca

SEQ ID NO: 1095420 - RNA, 22 nt, Human
ugggauuacaggugugagccac

SEQ ID NO: 1095421 - RNA, 22 nt, Human
ugggauuacaggugugagccac

SEQ ID NO: 1095422 - RNA, 22 nt, Human
ugggauuacaggugugagccac

SEQ ID NO: 1095423 - RNA, 24 nt, Human
ugggauuacaggugugagccacug

SEQ ID NO: 1095424 - RNA, 23 nt, Human
ugggguuucacuauauugcccag

SEQ ID NO: 1095425 - RNA, 23 nt, Human
ugguagagaugggguuucacuau

SEQ ID NO: 1095426 - RNA, 24 nt, Human
ugguagagaugggguuucacuaua

SEQ ID NO: 1095427 - RNA, 24 nt, Human
ugucucccaggcucaagugauccu

SEQ ID NO: 1095428 - RNA, 19 nt, Human
uguggugaaguaaagauaa

SEQ ID NO: 1095429 - RNA, 20 nt, Human
uuaauuaucuuggaacccaa

SEQ ID NO: 1095430 - RNA, 19 nt, Human
uuacugcaaccucugucuc

SEQ ID NO: 1095431 - RNA, 24 nt, Human
uuacugcaaccucugucucccagg

SEQ ID NO: 1095432 - RNA, 19 nt, Human
uuagaagugaaauguaaug

SEQ ID NO: 1095433 - RNA, 22 nt, Human
uucaaagagauauuugagucac

SEQ ID NO: 1095434 - RNA, 18 nt, Human
uuccaggcucgucucaaa

SEQ ID NO: 1095435 - RNA, 20 nt, Human
uucccaguuuuuguaucugu

SEQ ID NO: 1095436 - RNA, 25 nt, Human
uuccuucaaaaguuuccucuucaaa

SEQ ID NO: 1095437 - RNA, 24 nt, Human
uugguagagaugggguuucacuau

SEQ ID NO: 1095438 - RNA, 18 nt, Human
uuguagcccaggcuggag

SEQ ID NO: 1095439 - RNA, 21 nt, Human
uuugagucacugaccaccagu

SEQ ID NO: 1095440 - RNA, 24 nt, Human
uuuguagcccaggcuggagugcaa

SEQ ID NO: 1095441 - RNA, 24 nt, Human
uuuuugguagagaugggguuucac

SEQ ID NO: 1095442 - RNA, 23 nt, Human
uuuuuugguagagaugggguuuc

SEQ ID NO: 1095443 - RNA, 18 nt, Human
aggaaagcccagggcaug

SEQ ID NO: 1095444 - RNA, 25 nt, Human
cacuuuucuuuuuacaaguuggaaa

SEQ ID NO: 1095445 - RNA, 20 nt, Human
cuugagggauccuugaggaa

SEQ ID NO: 1095446 - RNA, 18 nt, Human
gaaacuugagggauccuu

SEQ ID NO: 1095447 - RNA, 21 nt, Human
gagccgccgccuccccgcccu

SEQ ID NO: 1095448 - RNA, 18 nt, Human
gcccaccucagggauccg

SEQ ID NO: 1095449 - RNA, 20 nt, Human
gcccagggcaugaauuucag

SEQ ID NO: 1095450 - RNA, 21 nt, Human
gucaggcucaacuccagccug

SEQ ID NO: 1095451 - RNA, 21 nt, Human
ucaggcucaacuccagccugc

SEQ ID NO: 1095452 - RNA, 23 nt, Human
ucaguggcccaccucagggaucc

SEQ ID NO: 1095453 - RNA, 21 nt, Human
uccuugaggaaagcccagggc

SEQ ID NO: 1095454 - RNA, 24 nt, Human
uccuugaggaaagcccaggggaaa

SEQ ID NO: 1095455 - RNA, 23 nt, Human
ugaggaaagcccagggcaugaau

SEQ ID NO: 1095456 - RNA, 24 nt, Human
ugagggauccuugaggaaagccca

SEQ ID NO: 1095457 - RNA, 21 nt, Human
uuccggaguccccgacucagu

SEQ ID NO: 1095458 - RNA, 24 nt, Human
uuccggaguccccgacucaguggc

SEQ ID NO: 1095459 - RNA, 20 nt, Human
uuuuuuuuuuuuuuuuuguu

SEQ ID NO: 1095460 - RNA, 20 nt, Human
uuuuuuuuuuuuuuuuuugg

SEQ ID NO: 1095461 - RNA, 22 nt, Human
agcagcuguguuggucagcaac

SEQ ID NO: 1095462 - RNA, 19 nt, Human
aggcaggugguggucagga

SEQ ID NO: 1095463 - RNA, 24 nt, Human
aggugacagggcugccggcagggg

SEQ ID NO: 1095464 - RNA, 23 nt, Human
cagagagggauccaagacucacc

SEQ ID NO: 1095465 - RNA, 21 nt, Human
cagcaguuagcaccgccuccu

SEQ ID NO: 1095466 - RNA, 20 nt, Human
cagccaggaacugugagcag

SEQ ID NO: 1095467 - RNA, 20 nt, Human
cagggcugccggcaggggca

SEQ ID NO: 1095468 - RNA, 20 nt, Human
caucagccuggccucccagg

SEQ ID NO: 1095469 - RNA, 20 nt, Human
cccagggccauggggagggu

SEQ ID NO: 1095470 - RNA, 19 nt, Human
ccccagcccuacgcuccau

SEQ ID NO: 1095471 - RNA, 22 nt, Human
ccgcaggcuggcucccaguguc

SEQ ID NO: 1095472 - RNA, 24 nt, Human
ccgcaggcuggcucccagugucac

SEQ ID NO: 1095473 - RNA, 22 nt, Human
ccugcagccaggaacugugagc

SEQ ID NO: 1095474 - RNA, 22 nt, Human
ccugcuguccucaaggauccac

SEQ ID NO: 1095475 - RNA, 21 nt, Human
ccuggcgccugugcagaggca

SEQ ID NO: 1095476 - RNA, 18 nt, Human
cuccauuccucuggggcc

SEQ ID NO: 1095477 - RNA, 21 nt, Human
cuccucugacaccagggcucc

SEQ ID NO: 1095478 - RNA, 20 nt, Human
cugcuucaggccccacuccu

SEQ ID NO: 1095479 - RNA, 21 nt, Human
gagcugcuucaggccccacuc

SEQ ID NO: 1095480 - RNA, 27 nt, Human
ggccccacuccuccggucuggucccca

SEQ ID NO: 1095481 - RNA, 18 nt, Human
ggucaggauagggcaggc

SEQ ID NO: 1095482 - RNA, 18 nt, Human
ggugcaucagccuggccu

SEQ ID NO: 1095483 - RNA, 23 nt, Human
ucccuggugcaucagccuggccu

SEQ ID NO: 1095484 - RNA, 24 nt, Human
ucccuggugcaucagccuggccuc

SEQ ID NO: 1095485 - RNA, 18 nt, Human
uccggggucucugggcuc

SEQ ID NO: 1095486 - RNA, 22 nt, Human
ugggccaggaaagcugcccccu

SEQ ID NO: 1095487 - RNA, 20 nt, Human
acagaccaggggccccccag

SEQ ID NO: 1095488 - RNA, 22 nt, Human
agaggacccaggagggggcgau

SEQ ID NO: 1095489 - RNA, 18 nt, Human
cacacagcaucccuggca

SEQ ID NO: 1095490 - RNA, 21 nt, Human
cacagaccaggggccccccag

SEQ ID NO: 1095491 - RNA, 22 nt, Human
caggggccccccagagucaccc

SEQ ID NO: 1095492 - RNA, 19 nt, Human
ccccagagucacccuggca

SEQ ID NO: 1095493 - RNA, 19 nt, Human
ccgccuuccucacagacca

SEQ ID NO: 1095494 - RNA, 26 nt, Human
ccucuggguagccagcacacagcauc

SEQ ID NO: 1095495 - RNA, 26 nt, Human
ccuggcaggugucccugcggcccucu

SEQ ID NO: 1095496 - RNA, 19 nt, Human
gagagugagguugaaggga

SEQ ID NO: 1095497 - RNA, 24 nt, Human
gaggacccaggagggggcgaugag

SEQ ID NO: 1095498 - RNA, 20 nt, Human
gccgccuuccucacagacca

SEQ ID NO: 1095499 - RNA, 21 nt, Human
ggagaggacccaggagggggc

SEQ ID NO: 1095500 - RNA, 18 nt, Human
ucccuggcaauaucugga

SEQ ID NO: 1095501 - RNA, 18 nt, Human
uccucacagaccaggggc

SEQ ID NO: 1095502 - RNA, 18 nt, Human
ugucccugcggcccucug

SEQ ID NO: 1095503 - RNA, 18 nt, Human
aagggaugaggacuaaag

SEQ ID NO: 1095504 - RNA, 20 nt, Human
accugggucccucccggccc

SEQ ID NO: 1095505 - RNA, 19 nt, Human
caccugggucccucccggc

SEQ ID NO: 1095506 - RNA, 21 nt, Human
caguugcaguugaacuuuauu

SEQ ID NO: 1095507 - RNA, 22 nt, Human
cccaccuacccuggccuugccu

SEQ ID NO: 1095508 - RNA, 20 nt, Human
cccaggaugugauccgugcc

SEQ ID NO: 1095509 - RNA, 22 nt, Human
cccggcccccaccuacccuggc

SEQ ID NO: 1095510 - RNA, 22 nt, Human
ccuccaggaucuaagggaugag

SEQ ID NO: 1095511 - RNA, 21 nt, Human
gggucccucccggcccccacc

SEQ ID NO: 1095512 - RNA, 22 nt, Human
gggucccucccggcccccaccu

SEQ ID NO: 1095513 - RNA, 21 nt, Human
gggucuguuccuccuccaggc

SEQ ID NO: 1095514 - RNA, 19 nt, Human
ucccggcccccaccuaccc

SEQ ID NO: 1095515 - RNA, 24 nt, Human
ucuaagggaugaggacuaaagggg

SEQ ID NO: 1095516 - RNA, 18 nt, Human
uggcauggaaccguccgu

SEQ ID NO: 1095517 - RNA, 24 nt, Human
uuuauucauccguucacaccuggg

SEQ ID NO: 1095518 - RNA, 18 nt, Human
aagagaccccugcccauc

SEQ ID NO: 1095519 - RNA, 22 nt, Human
aagagaccccugcccauccuca

SEQ ID NO: 1095520 - RNA, 24 nt, Human
acagcgcuauaaacagccuccagc

SEQ ID NO: 1095521 - RNA, 18 nt, Human
acugccuccgccuucccc

SEQ ID NO: 1095522 - RNA, 19 nt, Human
acugccuccgccuuccccc

SEQ ID NO: 1095523 - RNA, 21 nt, Human
acugccuccgccuucccccca

SEQ ID NO: 1095524 - RNA, 20 nt, Human
agccuccagcgcgucagucc

SEQ ID NO: 1095525 - RNA, 27 nt, Human
agcucauuggcuaccgcgggcaucaga

SEQ ID NO: 1095526 - RNA, 22 nt, Human
aggugggagagggccugggggc

SEQ ID NO: 1095527 - RNA, 26 nt, Human
auggaagaaaaugggguugaagaaaa

SEQ ID NO: 1095528 - RNA, 19 nt, Human
augggguugaagaaaaaaa

SEQ ID NO: 1095529 - RNA, 22 nt, Human
augggguugaagaaaaaaaaag

SEQ ID NO: 1095530 - RNA, 20 nt, Human
cacucucccucucagcggag

SEQ ID NO: 1095531 - RNA, 25 nt, Human
cacucucccucucagcggagcuuua

SEQ ID NO: 1095532 - RNA, 19 nt, Human
cagcguaugggggcagagc

SEQ ID NO: 1095533 - RNA, 27 nt, Human
caggccccggaguggagggggcagggg

SEQ ID NO: 1095534 - RNA, 21 nt, Human
caggccucugccuccacuccc

SEQ ID NO: 1095535 - RNA, 18 nt, Human
ccacggggcaaacagcag

SEQ ID NO: 1095536 - RNA, 19 nt, Human
ccccaccccgcccagcucc

SEQ ID NO: 1095537 - RNA, 21 nt, Human
ccccaccccgcccagcuccuc

SEQ ID NO: 1095538 - RNA, 25 nt, Human
ccccaccccgcccagcuccucuuuc

SEQ ID NO: 1095539 - RNA, 19 nt, Human
ccccgcccagcuccucuuu

SEQ ID NO: 1095540 - RNA, 19 nt, Human
ccccuggagggcggggacg

SEQ ID NO: 1095541 - RNA, 21 nt, Human
ccccuggagggcggggacgga

SEQ ID NO: 1095542 - RNA, 19 nt, Human
cccgcgcuguccugacagc

SEQ ID NO: 1095543 - RNA, 20 nt, Human
ccggcgcccuacugugcugc

SEQ ID NO: 1095544 - RNA, 22 nt, Human
ccuccugggacuuuauggaagc

SEQ ID NO: 1095545 - RNA, 22 nt, Human
ccugccucuccugcccccccca

SEQ ID NO: 1095546 - RNA, 24 nt, Human
ccuuugcgcguccugccucuccug

SEQ ID NO: 1095547 - RNA, 22 nt, Human
cucaggccucugccuccacucc

SEQ ID NO: 1095548 - RNA, 22 nt, Human
cuccgccuuccccccaccccgc

SEQ ID NO: 1095549 - RNA, 19 nt, Human
gacugccuccgccuucccc

SEQ ID NO: 1095550 - RNA, 23 nt, Human
gacugccuccgccuuccccccac

SEQ ID NO: 1095551 - RNA, 21 nt, Human
gagaccccugcccauccucag

SEQ ID NO: 1095552 - RNA, 21 nt, Human
gagggcagcguaugggggcag

SEQ ID NO: 1095553 - RNA, 24 nt, Human
gcagccuggccuugugcccuacag

SEQ ID NO: 1095554 - RNA, 19 nt, Human
gcccaggcuuccagaugcc

SEQ ID NO: 1095555 - RNA, 21 nt, Human
gccccggaguggagggggcag

SEQ ID NO: 1095556 - RNA, 21 nt, Human
gcccgggagcccccccccgcu

SEQ ID NO: 1095557 - RNA, 22 nt, Human
gccuccgccuuccccccacccc

SEQ ID NO: 1095558 - RNA, 20 nt, Human
gcuguccccuucuucagcac

SEQ ID NO: 1095559 - RNA, 24 nt, Human
ggaagaaaaugggguugaagaaaa

SEQ ID NO: 1095560 - RNA, 21 nt, Human
ggagcucucaggccucugccu

SEQ ID NO: 1095561 - RNA, 19 nt, Human
ggaguggggucgggugggg

SEQ ID NO: 1095562 - RNA, 21 nt, Human
ggcagcguaugggggcagagc

SEQ ID NO: 1095563 - RNA, 18 nt, Human
ggcaggggagggucucug

SEQ ID NO: 1095564 - RNA, 22 nt, Human
ggcauuaaaaaggugggagaaa

SEQ ID NO: 1095565 - RNA, 22 nt, Human
ggccccggaguggagggggcag

SEQ ID NO: 1095566 - RNA, 21 nt, Human
ggcccggcgcccuacugugcu

SEQ ID NO: 1095567 - RNA, 20 nt, Human
ggccugggggcugggaggca

SEQ ID NO: 1095568 - RNA, 22 nt, Human
gggagggucucuguagguggga

SEQ ID NO: 1095569 - RNA, 18 nt, Human
ggguugaagaaaaaaaaa

SEQ ID NO: 1095570 - RNA, 18 nt, Human
guccugccucuccugccc

SEQ ID NO: 1095571 - RNA, 24 nt, Human
guccugccucuccugcccccccca

SEQ ID NO: 1095572 - RNA, 20 nt, Human
gugcugccugagcccguggc

SEQ ID NO: 1095573 - RNA, 22 nt, Human
uacuagacugccuccgccuucc

SEQ ID NO: 1095574 - RNA, 19 nt, Human
uacuggcauuaaaaaggug

SEQ ID NO: 1095575 - RNA, 22 nt, Human
uauggaagccugucuugccuuu

SEQ ID NO: 1095576 - RNA, 19 nt, Human
ucaguggccuggcagccag

SEQ ID NO: 1095577 - RNA, 20 nt, Human
ucaucauugggagugggguc

SEQ ID NO: 1095578 - RNA, 20 nt, Human
uccugccucuccugcccccc

SEQ ID NO: 1095579 - RNA, 18 nt, Human
ucuccugccccccccauu

SEQ ID NO: 1095580 - RNA, 24 nt, Human
ucuccugccccccccauugguucc

SEQ ID NO: 1095581 - RNA, 19 nt, Human
ugaaccccaggggaagcug

SEQ ID NO: 1095582 - RNA, 19 nt, Human
ugaagaaaaaaaaagccuu

SEQ ID NO: 1095583 - RNA, 18 nt, Human
ugaccggaagguccgggu

SEQ ID NO: 1095584 - RNA, 21 nt, Human
ugacuugcaaugaaaaugccc

SEQ ID NO: 1095585 - RNA, 18 nt, Human
ugcaaugaaaaugccccu

SEQ ID NO: 1095586 - RNA, 25 nt, Human
ugccugguacaaggcuugaugagag

SEQ ID NO: 1095587 - RNA, 20 nt, Human
uggaagaaaaugggguugaa

SEQ ID NO: 1095588 - RNA, 19 nt, Human
ugggacacugucccaaagg

SEQ ID NO: 1095589 - RNA, 19 nt, Human
ugggagaaauggaagaaaa

SEQ ID NO: 1095590 - RNA, 21 nt, Human
ugggagagggccugggggcug

SEQ ID NO: 1095591 - RNA, 22 nt, Human
ugggagagggccugggggcugg

SEQ ID NO: 1095592 - RNA, 24 nt, Human
ugggagagggccugggggcugguc

SEQ ID NO: 1095593 - RNA, 21 nt, Human
ugggaguggggucgggugggg

SEQ ID NO: 1095594 - RNA, 27 nt, Human
ugggggcagagcccgguucuccccgag

SEQ ID NO: 1095595 - RNA, 22 nt, Human
ugggggcagagcccgguucugg

SEQ ID NO: 1095596 - RNA, 23 nt, Human
uuccccccaccccgcccagcucc

SEQ ID NO: 1095597 - RNA, 18 nt, Human
uuccccuggagggcgggg

SEQ ID NO: 1095598 - RNA, 22 nt, Human
uucuucagcacucucccucuca

SEQ ID NO: 1095599 - RNA, 22 nt, Human
uuggaacagaguuuauuuucca

SEQ ID NO: 1095600 - RNA, 21 nt, Human
uuuauggaagccugucuugcc

SEQ ID NO: 1095601 - RNA, 25 nt, Human
uuuuccaucacuguaaaacauucuc

SEQ ID NO: 1095602 - RNA, 23 nt, Human
uuuuuuuuuuuuuugaacuugga

SEQ ID NO: 1095603 - RNA, 18 nt, Human
uuuuuuuuuuuuuuuuug

SEQ ID NO: 1095604 - RNA, 23 nt, Human
uuuuuuuuuuuuuuuuugaacuu

SEQ ID NO: 1095605 - RNA, 18 nt, Human
aggcagaaacaaaaaucc

SEQ ID NO: 1095606 - RNA, 21 nt, Human
caaaaagauaaggcagaaaca

SEQ ID NO: 1095607 - RNA, 26 nt, Human
caacaaguucaucugaauuuauacca

SEQ ID NO: 1095608 - RNA, 24 nt, Human
caauggcuaugguuccugaaauuu

SEQ ID NO: 1095609 - RNA, 25 nt, Human
cugaaugcccaacaacaaguucauc

SEQ ID NO: 1095610 - RNA, 21 nt, Human
uaaggcagaaacaaaaauccc

SEQ ID NO: 1095611 - RNA, 20 nt, Human
uagguucccucauccauuuc

SEQ ID NO: 1095612 - RNA, 24 nt, Human
ucaucaaaguuuguuacuguucac

SEQ ID NO: 1095613 - RNA, 23 nt, Human
ugcccaacaacaaguucaucuga

SEQ ID NO: 1095614 - RNA, 28 nt, Human
ugcccaacaacaaguucaucugaauuua

SEQ ID NO: 1095615 - RNA, 24 nt, Human
uguggagcucccaggguaaaaaga

SEQ ID NO: 1095616 - RNA, 22 nt, Human
uuccauagccagauuucagggu

SEQ ID NO: 1095617 - RNA, 18 nt, Human
aagccagcuuuguacugg

SEQ ID NO: 1095618 - RNA, 20 nt, Human
aagccagcuuuguacuggga

SEQ ID NO: 1095619 - RNA, 23 nt, Human
agcacuuugggaggcugaggcag

SEQ ID NO: 1095620 - RNA, 24 nt, Human
agcacuuugggaggcugaggcagg

SEQ ID NO: 1095621 - RNA, 18 nt, Human
aggcaggaggaucacuug

SEQ ID NO: 1095622 - RNA, 24 nt, Human
aggcugaggcaggaggaucacuug

SEQ ID NO: 1095623 - RNA, 21 nt, Human
caacuccucaagcucaagccu

SEQ ID NO: 1095624 - RNA, 20 nt, Human
cagaagggacccgaggggcg

SEQ ID NO: 1095625 - RNA, 19 nt, Human
cagaaguggaagccagcuu

SEQ ID NO: 1095626 - RNA, 20 nt, Human
ccacaagggcagaagggacc

SEQ ID NO: 1095627 - RNA, 24 nt, Human
ccccuggugggcagcggugacccc

SEQ ID NO: 1095628 - RNA, 23 nt, Human
ccugacaccuggugggccccaac

SEQ ID NO: 1095629 - RNA, 21 nt, Human
ccuggcuguguggccuuagcc

SEQ ID NO: 1095630 - RNA, 24 nt, Human
cuccucucccuggcuguguggccu

SEQ ID NO: 1095631 - RNA, 24 nt, Human
gacaccuggugggccccaacuccu

SEQ ID NO: 1095632 - RNA, 20 nt, Human
gaggccaaacuucaaggcca

SEQ ID NO: 1095633 - RNA, 23 nt, Human
gaucacuugaggccaaacuucaa

SEQ ID NO: 1095634 - RNA, 19 nt, Human
gcuguguaauccuagcacu

SEQ ID NO: 1095635 - RNA, 19 nt, Human
ggaggauaggaggacuggc

SEQ ID NO: 1095636 - RNA, 18 nt, Human
ggaucacuugaggccaaa

SEQ ID NO: 1095637 - RNA, 24 nt, Human
gggcuguguaauccuagcacuuug

SEQ ID NO: 1095638 - RNA, 21 nt, Human
gugaccacccaguccucgcug

SEQ ID NO: 1095639 - RNA, 25 nt, Human
uagcacuuugggaggcugaggcagg

SEQ ID NO: 1095640 - RNA, 18 nt, Human
uccucaagcucaagccuc

SEQ ID NO: 1095641 - RNA, 19 nt, Human
uccucaagcucaagccuca

SEQ ID NO: 1095642 - RNA, 18 nt, Human
ugacaccuggugggcccc

SEQ ID NO: 1095643 - RNA, 20 nt, Human
ugaggcaggaggaucacuug

SEQ ID NO: 1095644 - RNA, 25 nt, Human
ugaggcaggaggaucacuugaggcc

SEQ ID NO: 1095645 - RNA, 26 nt, Human
ugaggcaggaggaucacuugaggcca

SEQ ID NO: 1095646 - RNA, 20 nt, Human
ugggaggcugaggcaggagg

SEQ ID NO: 1095647 - RNA, 24 nt, Human
ugggaggcugaggcaggaggauca

SEQ ID NO: 1095648 - RNA, 20 nt, Human
uggugggccccaacuccuca

SEQ ID NO: 1095649 - RNA, 25 nt, Human
uugggaggcugaggcaggaggauca

SEQ ID NO: 1095650 - RNA, 21 nt, Human
aaaaagcagaaaaaaaagugu

SEQ ID NO: 1095651 - RNA, 23 nt, Human
aaaacaaaacaaaaaacccuuga

SEQ ID NO: 1095652 - RNA, 25 nt, Human
aaaacaaaacaaacccaaacaaaca

SEQ ID NO: 1095653 - RNA, 24 nt, Human
aaaaccaaaccaaaacaaaacaaa

SEQ ID NO: 1095654 - RNA, 25 nt, Human
aaaaccaaaccaaaacaaaacaaac

SEQ ID NO: 1095655 - RNA, 28 nt, Human
aaacaaaacaaaaaacccuugaaggcaa

SEQ ID NO: 1095656 - RNA, 19 nt, Human
aaacaaaacaaaacaaaaa

SEQ ID NO: 1095657 - RNA, 22 nt, Human
aaacaaaacaaaacaaaacaaa

SEQ ID NO: 1095658 - RNA, 18 nt, Human
aaacaaaacaaacccaaa

SEQ ID NO: 1095659 - RNA, 27 nt, Human
aaacaaaacaaacccaaacaaacaaaa

SEQ ID NO: 1095660 - RNA, 26 nt, Human
aaacaaacccaaacaaacaaaaaaca

SEQ ID NO: 1095661 - RNA, 23 nt, Human
aaacagacugcggaaaggacucu

SEQ ID NO: 1095662 - RNA, 24 nt, Human
aaaccaaaacaaaacaaacccaaa

SEQ ID NO: 1095663 - RNA, 21 nt, Human
aaaccacccacaaaaagcaga

SEQ ID NO: 1095664 - RNA, 27 nt, Human
aacaaaacaaaaaacccuugaaggcaa

SEQ ID NO: 1095665 - RNA, 26 nt, Human
aacaaaacaaaacaaaaaacccuuga

SEQ ID NO: 1095666 - RNA, 19 nt, Human
aacacggugaaaccccguc

SEQ ID NO: 1095667 - RNA, 20 nt, Human
aacacggugaaaccccgucu

SEQ ID NO: 1095668 - RNA, 21 nt, Human
aacacggugaaaccccgucuc

SEQ ID NO: 1095669 - RNA, 27 nt, Human
aaccaaaccaaaacaaaacaaacccaa

SEQ ID NO: 1095670 - RNA, 23 nt, Human
aaccugcucuuucacauaacccu

SEQ ID NO: 1095671 - RNA, 19 nt, Human
aagcagaaaaaaaaguguc

SEQ ID NO: 1095672 - RNA, 22 nt, Human
aagcaguuguggaaccaaucag

SEQ ID NO: 1095673 - RNA, 22 nt, Human
aaggcaagguuucugcccugga

SEQ ID NO: 1095674 - RNA, 22 nt, Human
acaaaacaaaacaaaaaacccu

SEQ ID NO: 1095675 - RNA, 24 nt, Human
acaaaacaaaacaaaaaacccuug

SEQ ID NO: 1095676 - RNA, 22 nt, Human
acaaaacaaaacaaaacaaaaa

SEQ ID NO: 1095677 - RNA, 25 nt, Human
acaaaacaaaacaaaacaaaaaacc

SEQ ID NO: 1095678 - RNA, 28 nt, Human
acaaacccaaacaaacaaaaaacaaaac

SEQ ID NO: 1095679 - RNA, 18 nt, Human
acaaauaaagggaaaaag

SEQ ID NO: 1095680 - RNA, 20 nt, Human
acagacugcggaaaggacuc

SEQ ID NO: 1095681 - RNA, 24 nt, Human
acagagcgagacuccguuucaaaa

SEQ ID NO: 1095682 - RNA, 26 nt, Human
acagaguacacacauauaguuccccc

SEQ ID NO: 1095683 - RNA, 19 nt, Human
acagcaauacaaauaaagg

SEQ ID NO: 1095684 - RNA, 23 nt, Human
acauugagcucauggccaacagc

SEQ ID NO: 1095685 - RNA, 18 nt, Human
accaaaacaaaacaaacc

SEQ ID NO: 1095686 - RNA, 19 nt, Human
accacccacaaaaagcaga

SEQ ID NO: 1095687 - RNA, 26 nt, Human
acccaaacaaacaaaaaacaaaacaa

SEQ ID NO: 1095688 - RNA, 24 nt, Human
accccgucucuacugaaaauacaa

SEQ ID NO: 1095689 - RNA, 24 nt, Human
acugcacuccagccugggcgacag

SEQ ID NO: 1095690 - RNA, 26 nt, Human
acugcacuccagccugggcgacagag

SEQ ID NO: 1095691 - RNA, 20 nt, Human
agaaaccaggggagggguga

SEQ ID NO: 1095692 - RNA, 23 nt, Human
agcaauacaaauaaagggaaaaa

SEQ ID NO: 1095693 - RNA, 24 nt, Human
agccugggcgacagagcgagacuc

SEQ ID NO: 1095694 - RNA, 18 nt, Human
aggaacacugggcagagc

SEQ ID NO: 1095695 - RNA, 24 nt, Human
aggcaggagaaugacgugaacccg

SEQ ID NO: 1095696 - RNA, 20 nt, Human
aggcaggcggaucaugaggu

SEQ ID NO: 1095697 - RNA, 24 nt, Human
aggcaggcggaucaugaggucagg

SEQ ID NO: 1095698 - RNA, 20 nt, Human
aggccgaggcaggcggauca

SEQ ID NO: 1095699 - RNA, 23 nt, Human
aggccgaggcaggcggaucauga

SEQ ID NO: 1095700 - RNA, 24 nt, Human
aggcggagcuugcagugagccgag

SEQ ID NO: 1095701 - RNA, 24 nt, Human
aggcggaucaugaggucaggagau

SEQ ID NO: 1095702 - RNA, 24 nt, Human
aggcgugguaguggacgccuguag

SEQ ID NO: 1095703 - RNA, 18 nt, Human
aggcugaggcaggagaau

SEQ ID NO: 1095704 - RNA, 22 nt, Human
aguaaacagacugcggaaagga

SEQ ID NO: 1095705 - RNA, 18 nt, Human
agucgcucuuggcauugg

SEQ ID NO: 1095706 - RNA, 25 nt, Human
caaaaaacaaaacaaaacaaaacaa

SEQ ID NO: 1095707 - RNA, 26 nt, Human
caaaaaacaaaacaaaacaaaacaaa

SEQ ID NO: 1095708 - RNA, 20 nt, Human
caaaaaauuauccaggcgug

SEQ ID NO: 1095709 - RNA, 21 nt, Human
caaaacaaaaaacccuugaag

SEQ ID NO: 1095710 - RNA, 23 nt, Human
caaaacaaaacaaaaaacccuug

SEQ ID NO: 1095711 - RNA, 25 nt, Human
caaaacaaaacaaaacaaaaaaccc

SEQ ID NO: 1095712 - RNA, 19 nt, Human
caaaacaaaacaaacccaa

SEQ ID NO: 1095713 - RNA, 19 nt, Human
caaaaccaaaccaaaacaa

SEQ ID NO: 1095714 - RNA, 27 nt, Human
caaacaaacaaaaaacaaaacaaaaca

SEQ ID NO: 1095715 - RNA, 25 nt, Human
caaacccaaacaaacaaaaaacaaa

SEQ ID NO: 1095716 - RNA, 24 nt, Human
caacacuuugggaggccgaggcag

SEQ ID NO: 1095717 - RNA, 25 nt, Human
caacacuuugggaggccgaggcagg

SEQ ID NO: 1095718 - RNA, 24 nt, Human
caagaccauccuggcuaacacggu

SEQ ID NO: 1095719 - RNA, 23 nt, Human
cacaaaaagcagaaaaaaaagug

SEQ ID NO: 1095720 - RNA, 23 nt, Human
cacacacagaguacacacauaua

SEQ ID NO: 1095721 - RNA, 21 nt, Human
cacacauauaguucccauaua

SEQ ID NO: 1095722 - RNA, 23 nt, Human
cacccacaaaaagcagaaaaaaa

SEQ ID NO: 1095723 - RNA, 24 nt, Human
cacgccuguaaucccaacacuuug

SEQ ID NO: 1095724 - RNA, 23 nt, Human
cacuccagccugggcgacagagc

SEQ ID NO: 1095725 - RNA, 24 nt, Human
cacuccagccugggcgacagagcg

SEQ ID NO: 1095726 - RNA, 19 nt, Human
cacugcacuccagccuggg

SEQ ID NO: 1095727 - RNA, 20 nt, Human
cacugcacuccagccugggc

SEQ ID NO: 1095728 - RNA, 20 nt, Human
cacugcacuccagccugggc

SEQ ID NO: 1095729 - RNA, 22 nt, Human
cacugcacuccagccugggcga

SEQ ID NO: 1095730 - RNA, 24 nt, Human
cacugcacuccagccugggcgaca

SEQ ID NO: 1095731 - RNA, 20 nt, Human
cacuuuagucgcucuuggca

SEQ ID NO: 1095732 - RNA, 21 nt, Human
cagcaauacaaauaaagggaa

SEQ ID NO: 1095733 - RNA, 21 nt, Human
cagcacaggagcugcgacuag

SEQ ID NO: 1095734 - RNA, 24 nt, Human
cagcuacucgggaggcugaggcag

SEQ ID NO: 1095735 - RNA, 25 nt, Human
caugaauccacaaauuuagccgcuu

SEQ ID NO: 1095736 - RNA, 19 nt, Human
cauuuuagaaagcaaaacc

SEQ ID NO: 1095737 - RNA, 22 nt, Human
ccaaacaaacaaaaaacaaaac

SEQ ID NO: 1095738 - RNA, 27 nt, Human
ccaaaccaaaacaaaacaaacccaaac

SEQ ID NO: 1095739 - RNA, 21 nt, Human
ccacaguaaacacauacacua

SEQ ID NO: 1095740 - RNA, 22 nt, Human
ccacccacaaaaagcagaaaaa

SEQ ID NO: 1095741 - RNA, 23 nt, Human
ccacccacaaaaagcagaaaaaa

SEQ ID NO: 1095742 - RNA, 20 nt, Human
ccacugcacuccagccuggg

SEQ ID NO: 1095743 - RNA, 20 nt, Human
ccacugcacuccagccuggg

SEQ ID NO: 1095744 - RNA, 21 nt, Human
ccacugcacuccagccugggc

SEQ ID NO: 1095745 - RNA, 21 nt, Human
ccacugcacuccagccugggc

SEQ ID NO: 1095746 - RNA, 23 nt, Human
ccacugcacuccagccugggcga

SEQ ID NO: 1095747 - RNA, 24 nt, Human
ccacugcacuccagccugggcgac

SEQ ID NO: 1095748 - RNA, 23 nt, Human
ccuggcuaacacggugaaacccc

SEQ ID NO: 1095749 - RNA, 24 nt, Human
ccuggcuaacacggugaaaccccg

SEQ ID NO: 1095750 - RNA, 22 nt, Human
ccugggcgacagagcgagacuc

SEQ ID NO: 1095751 - RNA, 19 nt, Human
ccuguagucccagcuacuc

SEQ ID NO: 1095752 - RNA, 21 nt, Human
ccuguagucccagcuacucgg

SEQ ID NO: 1095753 - RNA, 24 nt, Human
cgaggcaggcggaucaugagguca

SEQ ID NO: 1095754 - RNA, 25 nt, Human
cgcacaauaacaagggugcaugauc

SEQ ID NO: 1095755 - RNA, 20 nt, Human
cgccacugcacuccagccug

SEQ ID NO: 1095756 - RNA, 26 nt, Human
cgccacugcacuccagccugggcgac

SEQ ID NO: 1095757 - RNA, 23 nt, Human
cgccuguaaucccaacacuuugg

SEQ ID NO: 1095758 - RNA, 24 nt, Human
cgccuguaaucccaacacuuuggg

SEQ ID NO: 1095759 - RNA, 24 nt, Human
cgccuguagucccagcuacucggg

SEQ ID NO: 1095760 - RNA, 21 nt, Human
cguaucgccuuuugaaacgcg

SEQ ID NO: 1095761 - RNA, 22 nt, Human
cucacgccuguaaucccaacac

SEQ ID NO: 1095762 - RNA, 24 nt, Human
cucacgccuguaaucccaacacuu

SEQ ID NO: 1095763 - RNA, 18 nt, Human
cuggcuaacacggugaaa

SEQ ID NO: 1095764 - RNA, 19 nt, Human
cuugcagugagccgagauu

SEQ ID NO: 1095765 - RNA, 21 nt, Human
cuugcagugagccgagauugc

SEQ ID NO: 1095766 - RNA, 23 nt, Human
cuugccccacagaaaccagggga

SEQ ID NO: 1095767 - RNA, 26 nt, Human
cuuucagccucaccacaaugcugucc

SEQ ID NO: 1095768 - RNA, 19 nt, Human
gaaaccccgucucuacuga

SEQ ID NO: 1095769 - RNA, 24 nt, Human
gacagagcgagacuccguuucaaa

SEQ ID NO: 1095770 - RNA, 30 nt, Human
gacuccguuucaaaaccaaaccaaaacaag

SEQ ID NO: 1095771 - RNA, 20 nt, Human
gacucguuaacauugagcuc

SEQ ID NO: 1095772 - RNA, 23 nt, Human
gagauugcgccacugcacuccag

SEQ ID NO: 1095773 - RNA, 18 nt, Human
gagcuugcagugagccga

SEQ ID NO: 1095774 - RNA, 23 nt, Human
gagcuugcagugagccgagauug

SEQ ID NO: 1095775 - RNA, 23 nt, Human
gaggcaggcggaucaugagguca

SEQ ID NO: 1095776 - RNA, 24 nt, Human
gcacuccagccugggcgacagagc

SEQ ID NO: 1095777 - RNA, 23 nt, Human
gcagagcucgccucaccugcaag

SEQ ID NO: 1095778 - RNA, 22 nt, Human
gccacugcacuccagccugggc

SEQ ID NO: 1095779 - RNA, 24 nt, Human
gccacugcacuccagccugggcga

SEQ ID NO: 1095780 - RNA, 20 nt, Human
gcccggcgcgguggcucacg

SEQ ID NO: 1095781 - RNA, 23 nt, Human
gccuguagucccagcuacucggg

SEQ ID NO: 1095782 - RNA, 24 nt, Human
gcuaacacggugaaaccccgucuc

SEQ ID NO: 1095783 - RNA, 24 nt, Human
ggagcuugcagugagccgagauug

SEQ ID NO: 1095784 - RNA, 23 nt, Human
ggcaggcggaucaugaggucagg

SEQ ID NO: 1095785 - RNA, 23 nt, Human
ggcgcgguggcucacgccuguaa

SEQ ID NO: 1095786 - RNA, 24 nt, Human
gguaguggacgccuguagucccag

SEQ ID NO: 1095787 - RNA, 23 nt, Human
gguggcucacgccuguaauccca

SEQ ID NO: 1095788 - RNA, 21 nt, Human
uaaaauucuuccgcagccucc

SEQ ID NO: 1095789 - RNA, 29 nt, Human
uaaacacauacacuacuuugcacacauag

SEQ ID NO: 1095790 - RNA, 18 nt, Human
uaaacagacugcggaaag

SEQ ID NO: 1095791 - RNA, 23 nt, Human
uaaacagacugcggaaaggacuc

SEQ ID NO: 1095792 - RNA, 18 nt, Human
uaaaccucucgaccuugg

SEQ ID NO: 1095793 - RNA, 22 nt, Human
uaacaaaaccuugaaggugccc

SEQ ID NO: 1095794 - RNA, 22 nt, Human
uaacacggugaaaccccgucuc

SEQ ID NO: 1095795 - RNA, 24 nt, Human
uaacacggugaaaccccgucucua

SEQ ID NO: 1095796 - RNA, 18 nt, Human
uaacgugaccacagauau

SEQ ID NO: 1095797 - RNA, 21 nt, Human
uaagcacuacgcuugggggcc

SEQ ID NO: 1095798 - RNA, 19 nt, Human
uaagugcuuguggauuuug

SEQ ID NO: 1095799 - RNA, 22 nt, Human
uacccuacaguacagcaauaca

SEQ ID NO: 1095800 - RNA, 21 nt, Human
uagaaagcaaaaccacccaca

SEQ ID NO: 1095801 - RNA, 20 nt, Human
uaggaacacugggcagagcu

SEQ ID NO: 1095802 - RNA, 19 nt, Human
uauccaaaauuaacaaaac

SEQ ID NO: 1095803 - RNA, 19 nt, Human
uauccaaaauuaacaaaac

SEQ ID NO: 1095804 - RNA, 22 nt, Human
uaucuuuggcuuucagccucac

SEQ ID NO: 1095805 - RNA, 24 nt, Human
ucaguaaacagacugcggaaagga

SEQ ID NO: 1095806 - RNA, 18 nt, Human
ucaugaggucaggagauc

SEQ ID NO: 1095807 - RNA, 24 nt, Human
ucaugaggucaggagaucaagacc

SEQ ID NO: 1095808 - RNA, 26 nt, Human
uccacaaauuuagccgcuuuuccauc

SEQ ID NO: 1095809 - RNA, 23 nt, Human
uccagccugggcgacagagcgag

SEQ ID NO: 1095810 - RNA, 24 nt, Human
uccagccugggcgacagagcgaga

SEQ ID NO: 1095811 - RNA, 25 nt, Human
ucccacaguaaacacauacacuacu

SEQ ID NO: 1095812 - RNA, 19 nt, Human
ucccguuaagugcuugugg

SEQ ID NO: 1095813 - RNA, 20 nt, Human
ucgaguucuuugcagcaaug

SEQ ID NO: 1095814 - RNA, 22 nt, Human
ucucuacugaaaauacaaaaaa

SEQ ID NO: 1095815 - RNA, 21 nt, Human
ucuuuggcuuucagccucacc

SEQ ID NO: 1095816 - RNA, 22 nt, Human
ugagccgagauugcgccacugc

SEQ ID NO: 1095817 - RNA, 23 nt, Human
ugaggcaggagaaugacgugaac

SEQ ID NO: 1095818 - RNA, 24 nt, Human
ugaggcaggagaaugacgugaacc

SEQ ID NO: 1095819 - RNA, 25 nt, Human
ugaggcaggagaaugacgugaaccc

SEQ ID NO: 1095820 - RNA, 20 nt, Human
ugaucugcagagcucgccuc

SEQ ID NO: 1095821 - RNA, 23 nt, Human
uggaaccaaucagacaucaucca

SEQ ID NO: 1095822 - RNA, 18 nt, Human
uggagacaguguucagcu

SEQ ID NO: 1095823 - RNA, 26 nt, Human
uggcacacacagaguacacacauaua

SEQ ID NO: 1095824 - RNA, 22 nt, Human
uggcaugauuuaaagccagggg

SEQ ID NO: 1095825 - RNA, 24 nt, Human
uggcucacgccuguaaucccaaca

SEQ ID NO: 1095826 - RNA, 20 nt, Human
ugggaggccgaggcaggcgg

SEQ ID NO: 1095827 - RNA, 24 nt, Human
ugggaggccgaggcaggcggauca

SEQ ID NO: 1095828 - RNA, 24 nt, Human
ugguaguggacgccuguaguccca

SEQ ID NO: 1095829 - RNA, 19 nt, Human
uguggaaccaaucagacaa

SEQ ID NO: 1095830 - RNA, 24 nt, Human
ugugguuaaaccucucgaccuugg

SEQ ID NO: 1095831 - RNA, 20 nt, Human
uucaaaaccaaaccaaaaca

SEQ ID NO: 1095832 - RNA, 18 nt, Human
uucaaagauggagcaucc

SEQ ID NO: 1095833 - RNA, 20 nt, Human
uucccguuaagugcuugugg

SEQ ID NO: 1095834 - RNA, 21 nt, Human
uuccuuuuccuuuuucuugau

SEQ ID NO: 1095835 - RNA, 21 nt, Human
uucucccaguucaaacuucag

SEQ ID NO: 1095836 - RNA, 18 nt, Human
uugcagugagccgagauu

SEQ ID NO: 1095837 - RNA, 19 nt, Human
uugcagugagccgagauug

SEQ ID NO: 1095838 - RNA, 22 nt, Human
uugcagugagccgagauugcgc

SEQ ID NO: 1095839 - RNA, 23 nt, Human
uugcgccacugcacuccagccug

SEQ ID NO: 1095840 - RNA, 25 nt, Human
uugggaggccgaggcaggcggauca

SEQ ID NO: 1095841 - RNA, 24 nt, Human
uuuaaaauucuuccgcagccuccu

SEQ ID NO: 1095842 - RNA, 18 nt, Human
uuuccuuuuccuuuuucu

SEQ ID NO: 1095843 - RNA, 25 nt, Human
uuugaaacgcgcgagccggccagca

SEQ ID NO: 1095844 - RNA, 24 nt, Human
uuuucgaguucuuugcagcaaugg

SEQ ID NO: 1095845 - RNA, 24 nt, Human
aaauuaccuuguguauccaagagu

SEQ ID NO: 1095846 - RNA, 22 nt, Human
accuuguguauccaagagucua

SEQ ID NO: 1095847 - RNA, 18 nt, Human
gauucccuucuacacccc

SEQ ID NO: 1095848 - RNA, 19 nt, Human
uaacuuuuuaaaagguuca

SEQ ID NO: 1095849 - RNA, 21 nt, Human
ucuacaccccgauaggaggag

SEQ ID NO: 1095850 - RNA, 25 nt, Human
ucuguagccuuucuaauauugcucu

SEQ ID NO: 1095851 - RNA, 24 nt, Human
ugaccucuguagccuuucuaauau

SEQ ID NO: 1095852 - RNA, 21 nt, Human
uggauuuucggaauuacaaaa

SEQ ID NO: 1095853 - RNA, 18 nt, Human
ugguauguuuuggaaaau

SEQ ID NO: 1095854 - RNA, 26 nt, Human
uguaugcguauguuugcgcaugcgug

SEQ ID NO: 1095855 - RNA, 22 nt, Human
uguguauccaagagucuacaug

SEQ ID NO: 1095856 - RNA, 18 nt, Human
uuaacacacuaagguaaa

SEQ ID NO: 1095857 - RNA, 19 nt, Human
uuaccuuguguauccaaga

SEQ ID NO: 1095858 - RNA, 23 nt, Human
uuguguauccaagagucuacaug

SEQ ID NO: 1095859 - RNA, 18 nt, Human
aaaaaacaaaacagagag

SEQ ID NO: 1095860 - RNA, 21 nt, Human
aacaaaacagagaggcuaagu

SEQ ID NO: 1095861 - RNA, 23 nt, Human
caagugacuucagagcucacaug

SEQ ID NO: 1095862 - RNA, 18 nt, Human
cacuugccuaagguuacg

SEQ ID NO: 1095863 - RNA, 24 nt, Human
cagcaaggacuaaaagagcuggaa

SEQ ID NO: 1095864 - RNA, 18 nt, Human
cgcagcaaggacuaaaag

SEQ ID NO: 1095865 - RNA, 25 nt, Human
gcggagcucacaguaugugcuacac

SEQ ID NO: 1095866 - RNA, 28 nt, Human
uacaaaugaaaaaacaaaacagagaggg

SEQ ID NO: 1095867 - RNA, 23 nt, Human
ugcuacacaagaguguuugcaca

SEQ ID NO: 1095868 - RNA, 22 nt, Human
ccugcucugaguagcccuuccu

SEQ ID NO: 1095869 - RNA, 24 nt, Human
cucccgcugcaggauguggugcag

SEQ ID NO: 1095870 - RNA, 22 nt, Human
gaguagcccuuccuucgcaugu

SEQ ID NO: 1095871 - RNA, 24 nt, Human
gugcaggugcaugauguccaggau

SEQ ID NO: 1095872 - RNA, 28 nt, Human
ugaguagcccuuccuucgcauguccucc

SEQ ID NO: 1095873 - RNA, 19 nt, Human
uggcuuccagguccugcuc

SEQ ID NO: 1095874 - RNA, 20 nt, Human
uguggugcaggugcaugaug

SEQ ID NO: 1095875 - RNA, 23 nt, Human
aacagcugguccuccaguccccc

SEQ ID NO: 1095876 - RNA, 28 nt, Human
acacgugcauacgaacaugcacacacac

SEQ ID NO: 1095877 - RNA, 20 nt, Human
acagcugagaaaacuggggc

SEQ ID NO: 1095878 - RNA, 18 nt, Human
accuccgccaggcacgcu

SEQ ID NO: 1095879 - RNA, 21 nt, Human
agcgggugggaccaggcucag

SEQ ID NO: 1095880 - RNA, 23 nt, Human
agucaaaacaagugccccccuca

SEQ ID NO: 1095881 - RNA, 23 nt, Human
augcacacacacacgugcucaca

SEQ ID NO: 1095882 - RNA, 21 nt, Human
caacgcacacuggcugcgucu

SEQ ID NO: 1095883 - RNA, 23 nt, Human
cagucaaaacaagugccccccuc

SEQ ID NO: 1095884 - RNA, 21 nt, Human
caguccccaagcugaagcugg

SEQ ID NO: 1095885 - RNA, 23 nt, Human
cccaagcugaagcugggcagcuc

SEQ ID NO: 1095886 - RNA, 26 nt, Human
cccccucacucacacgugcauacgaa

SEQ ID NO: 1095887 - RNA, 18 nt, Human
cgcugcuaaaccuccgcc

SEQ ID NO: 1095888 - RNA, 20 nt, Human
cggcaggacagucaaaacaa

SEQ ID NO: 1095889 - RNA, 18 nt, Human
cugaagcugggcagcucu

SEQ ID NO: 1095890 - RNA, 20 nt, Human
cugagcaccggccgucaccu

SEQ ID NO: 1095891 - RNA, 20 nt, Human
gaagaauuacgggucugugc

SEQ ID NO: 1095892 - RNA, 18 nt, Human
gaccaggcucagaugucc

SEQ ID NO: 1095893 - RNA, 18 nt, Human
gagcaccggccgucacca

SEQ ID NO: 1095894 - RNA, 31 nt, Human
gugcauacgaacaugcacacacacacguggu

SEQ ID NO: 1095895 - RNA, 18 nt, Human
uaacucaguguuaagugg

SEQ ID NO: 1095896 - RNA, 20 nt, Human
uacgggucugugccccagac

SEQ ID NO: 1095897 - RNA, 23 nt, Human
ucacagcugagaaaacuggggcu

SEQ ID NO: 1095898 - RNA, 20 nt, Human
uccccaagcugaagcugggc

SEQ ID NO: 1095899 - RNA, 18 nt, Human
uccuccaguccccaagcu

SEQ ID NO: 1095900 - RNA, 20 nt, Human
ugcuaaaccuccgccaggca

SEQ ID NO: 1095901 - RNA, 22 nt, Human
ugucccggcaggacagucaaaa

SEQ ID NO: 1095902 - RNA, 22 nt, Human
ugugcagcgggugggaccaggc

SEQ ID NO: 1095903 - RNA, 27 nt, Human
aaagugcuggggggaucacagguguga

SEQ ID NO: 1095904 - RNA, 27 nt, Human
aauuuuauuuuuguagaaauggggucu

SEQ ID NO: 1095905 - RNA, 25 nt, Human
acacacgcacuuccccacuggcucc

SEQ ID NO: 1095906 - RNA, 25 nt, Human
acacgcacuuccccacuggcuccuu

SEQ ID NO: 1095907 - RNA, 24 nt, Human
acuauguugcucagacuggucucg

SEQ ID NO: 1095908 - RNA, 18 nt, Human
auggggucucacuauguu

SEQ ID NO: 1095909 - RNA, 23 nt, Human
caaagugcuggggggaucacagg

SEQ ID NO: 1095910 - RNA, 23 nt, Human
cacaggugugagccacugcgccc

SEQ ID NO: 1095911 - RNA, 24 nt, Human
cacuauguugcucagacuggucuc

SEQ ID NO: 1095912 - RNA, 20 nt, Human
cccacaaagucuuggagcca

SEQ ID NO: 1095913 - RNA, 21 nt, Human
ccccacuggcuccuuggcccg

SEQ ID NO: 1095914 - RNA, 20 nt, Human
ccugggcucaagcgauccuc

SEQ ID NO: 1095915 - RNA, 25 nt, Human
cgaacuccugggcucaagcgauccu

SEQ ID NO: 1095916 - RNA, 24 nt, Human
cucaagcgauccuccuaccuuggc

SEQ ID NO: 1095917 - RNA, 23 nt, Human
cuccugggcucaagcgauccucc

SEQ ID NO: 1095918 - RNA, 18 nt, Human
gaucacaggugugagcca

SEQ ID NO: 1095919 - RNA, 22 nt, Human
gaucacaggugugagccacugc

SEQ ID NO: 1095920 - RNA, 22 nt, Human
gaucacaggugugagccacugc

SEQ ID NO: 1095921 - RNA, 21 nt, Human
gggaucacaggugugagccac

SEQ ID NO: 1095922 - RNA, 23 nt, Human
gggaucacaggugugagccacug

SEQ ID NO: 1095923 - RNA, 22 nt, Human
gggcucaagcgauccuccuacc

SEQ ID NO: 1095924 - RNA, 22 nt, Human
ggggaucacaggugugagccac

SEQ ID NO: 1095925 - RNA, 24 nt, Human
ggggaucacaggugugagccacug

SEQ ID NO: 1095926 - RNA, 22 nt, Human
ggggucucacuauguugcucag

SEQ ID NO: 1095927 - RNA, 21 nt, Human
gggucucacuauguugcucag

SEQ ID NO: 1095928 - RNA, 22 nt, Human
guagaaauggggucucacuaug

SEQ ID NO: 1095929 - RNA, 22 nt, Human
uagaaauggggucucacuaugu

SEQ ID NO: 1095930 - RNA, 21 nt, Human
uauguugcucagacuggucuc

SEQ ID NO: 1095931 - RNA, 24 nt, Human
uauguugcucagacuggucucgaa

SEQ ID NO: 1095932 - RNA, 27 nt, Human
ucaaagugcuggggggaucacaggugu

SEQ ID NO: 1095933 - RNA, 24 nt, Human
ucaagcgauccuccuaccuuggcc

SEQ ID NO: 1095934 - RNA, 21 nt, Human
uccugggcucaagcgauccuc

SEQ ID NO: 1095935 - RNA, 22 nt, Human
uccugggcucaagcgauccucc

SEQ ID NO: 1095936 - RNA, 27 nt, Human
ucucaaagugcuggggggaucacaggu

SEQ ID NO: 1095937 - RNA, 19 nt, Human
ucucacuauguugcucaga

SEQ ID NO: 1095938 - RNA, 19 nt, Human
ucucgaacuccugggcuca

SEQ ID NO: 1095939 - RNA, 23 nt, Human
ucucgaacuccugggcucaagcg

SEQ ID NO: 1095940 - RNA, 24 nt, Human
ugcucagacuggucucgaacuccu

SEQ ID NO: 1095941 - RNA, 18 nt, Human
uggggucucacuauguug

SEQ ID NO: 1095942 - RNA, 19 nt, Human
ugguccaacacacgcacuu

SEQ ID NO: 1095943 - RNA, 24 nt, Human
uguagaaauggggucucacuaugu

SEQ ID NO: 1095944 - RNA, 20 nt, Human
uguugcucagacuggucucg

SEQ ID NO: 1095945 - RNA, 20 nt, Human
acaagcacguugacacuccu

SEQ ID NO: 1095946 - RNA, 19 nt, Human
acccugagggcggggagga

SEQ ID NO: 1095947 - RNA, 18 nt, Human
agggaaggcgugcacgug

SEQ ID NO: 1095948 - RNA, 19 nt, Human
augcugccgcaggcacugc

SEQ ID NO: 1095949 - RNA, 26 nt, Human
caagcacguugacacuccugaccuac

SEQ ID NO: 1095950 - RNA, 22 nt, Human
cacacagcuacagcagacacuc

SEQ ID NO: 1095951 - RNA, 18 nt, Human
cccugagggcggggagga

SEQ ID NO: 1095952 - RNA, 20 nt, Human
ccguggacccugagggcggg

SEQ ID NO: 1095953 - RNA, 21 nt, Human
cgcugcagagccuggugcugc

SEQ ID NO: 1095954 - RNA, 21 nt, Human
cgcuggggggugccgcugcag

SEQ ID NO: 1095955 - RNA, 18 nt, Human
cggaaaaaacuacaucug

SEQ ID NO: 1095956 - RNA, 19 nt, Human
cugcagagccuggugcugc

SEQ ID NO: 1095957 - RNA, 20 nt, Human
cugcugccccuaauaugcca

SEQ ID NO: 1095958 - RNA, 22 nt, Human
gacccugagggcggggaggagg

SEQ ID NO: 1095959 - RNA, 20 nt, Human
gccgugggaagcgccauggc

SEQ ID NO: 1095960 - RNA, 26 nt, Human
gcuggaaucgaguaaugugcuuaauu

SEQ ID NO: 1095961 - RNA, 20 nt, Human
gcuggggggugccgcugcag

SEQ ID NO: 1095962 - RNA, 22 nt, Human
gguggccguggacccugagggc

SEQ ID NO: 1095963 - RNA, 26 nt, Human
gugccgcugcagagccuggugcugcu

SEQ ID NO: 1095964 - RNA, 19 nt, Human
ugagggcggggaggaggga

SEQ ID NO: 1095965 - RNA, 22 nt, Human
ugagggcggggaggagggaagg

SEQ ID NO: 1095966 - RNA, 19 nt, Human
uggccguggacccugaggg

SEQ ID NO: 1095967 - RNA, 20 nt, Human
uggccguggacccugagggc

SEQ ID NO: 1095968 - RNA, 24 nt, Human
aaagcccuuccuugucuuucacuc

SEQ ID NO: 1095969 - RNA, 24 nt, Human
aaagugcugggauuacaggcauga

SEQ ID NO: 1095970 - RNA, 19 nt, Human
aagaagacacuacccugac

SEQ ID NO: 1095971 - RNA, 18 nt, Human
aagugcauacacagcaca

SEQ ID NO: 1095972 - RNA, 19 nt, Human
aagugcugggauuacaggc

SEQ ID NO: 1095973 - RNA, 21 nt, Human
aagugcugggauuacaggcau

SEQ ID NO: 1095974 - RNA, 26 nt, Human
aagugcugggauuacaggcaugagcc

SEQ ID NO: 1095975 - RNA, 23 nt, Human
acacacacacacacacacacaca

SEQ ID NO: 1095976 - RNA, 23 nt, Human
acacaccccccugcaggaaagcc

SEQ ID NO: 1095977 - RNA, 23 nt, Human
acacacucagcacacaccacaca

SEQ ID NO: 1095978 - RNA, 27 nt, Human
acacgugcacacacaugggggcacaca

SEQ ID NO: 1095979 - RNA, 23 nt, Human
acacgugcacacaugugcaggca

SEQ ID NO: 1095980 - RNA, 18 nt, Human
acaggcacacacaccccc

SEQ ID NO: 1095981 - RNA, 19 nt, Human
accauagccacccagacca

SEQ ID NO: 1095982 - RNA, 20 nt, Human
accccccugcaggaaagccc

SEQ ID NO: 1095983 - RNA, 20 nt, Human
acccucacccccgcccccgu

SEQ ID NO: 1095984 - RNA, 24 nt, Human
accgccucggccucccaaagugcu

SEQ ID NO: 1095985 - RNA, 18 nt, Human
acgggguuucaccauguu

SEQ ID NO: 1095986 - RNA, 19 nt, Human
acgggguuucaccauguua

SEQ ID NO: 1095987 - RNA, 20 nt, Human
acgggguuucaccauguuag

SEQ ID NO: 1095988 - RNA, 24 nt, Human
acgggguuucaccauguuagccag

SEQ ID NO: 1095989 - RNA, 20 nt, Human
acuugaggagaagagaaggg

SEQ ID NO: 1095990 - RNA, 22 nt, Human
agaagagaagggggacaggggc

SEQ ID NO: 1095991 - RNA, 19 nt, Human
agagaagggggacaggggc

SEQ ID NO: 1095992 - RNA, 21 nt, Human
agagaggcagagcuucuucca

SEQ ID NO: 1095993 - RNA, 18 nt, Human
agcaagggccccuccccc

SEQ ID NO: 1095994 - RNA, 20 nt, Human
agcacaagaacagagagaag

SEQ ID NO: 1095995 - RNA, 18 nt, Human
agccacccagaccaggaa

SEQ ID NO: 1095996 - RNA, 21 nt, Human
aggcacacaccacacaggucc

SEQ ID NO: 1095997 - RNA, 23 nt, Human
aggcagagcuucuuccagaucua

SEQ ID NO: 1095998 - RNA, 19 nt, Human
aggccaggccccuggcccu

SEQ ID NO: 1095999 - RNA, 21 nt, Human
aggccccuggcccugaaacag

SEQ ID NO: 1096000 - RNA, 21 nt, Human
aggggcugaggccaggccccu

SEQ ID NO: 1096001 - RNA, 22 nt, Human
auauacacacucagcacacagu

SEQ ID NO: 1096002 - RNA, 24 nt, Human
caaagugcugggauuacaggcaug

SEQ ID NO: 1096003 - RNA, 18 nt, Human
caacaggcuucccuccca

SEQ ID NO: 1096004 - RNA, 20 nt, Human
caacccugccccucuaguga

SEQ ID NO: 1096005 - RNA, 21 nt, Human
caagugcauacacagcacaca

SEQ ID NO: 1096006 - RNA, 20 nt, Human
cacacacacacacacacaca

SEQ ID NO: 1096007 - RNA, 20 nt, Human
cacacacacacacacacaca

SEQ ID NO: 1096008 - RNA, 20 nt, Human
cacacacacacacacacaca

SEQ ID NO: 1096009 - RNA, 22 nt, Human
cacacacacacacacacacaca

SEQ ID NO: 1096010 - RNA, 29 nt, Human
cacacacacacacacacacacacacugca

SEQ ID NO: 1096011 - RNA, 26 nt, Human
cacacacacacacacacacugcacug

SEQ ID NO: 1096012 - RNA, 20 nt, Human
cacacacacugcacuggagg

SEQ ID NO: 1096013 - RNA, 21 nt, Human
cacacacaggcacacacaccc

SEQ ID NO: 1096014 - RNA, 23 nt, Human
cacacaccacacagguccacacg

SEQ ID NO: 1096015 - RNA, 23 nt, Human
cacacaccacacagguccacacg

SEQ ID NO: 1096016 - RNA, 22 nt, Human
cacaccccccugcaggaaagcc

SEQ ID NO: 1096017 - RNA, 23 nt, Human
cacagcacacaggcacacacagg

SEQ ID NO: 1096018 - RNA, 23 nt, Human
cacaggaaggagggcucaacagg

SEQ ID NO: 1096019 - RNA, 27 nt, Human
cacaggaaggagggcucaacaggcuuc

SEQ ID NO: 1096020 - RNA, 18 nt, Human
caccauguuagccaggau

SEQ ID NO: 1096021 - RNA, 22 nt, Human
caccauguuagccaggaugguc

SEQ ID NO: 1096022 - RNA, 24 nt, Human
caccauguuagccaggauggucuc

SEQ ID NO: 1096023 - RNA, 20 nt, Human
cacucucucuccucucucuc

SEQ ID NO: 1096024 - RNA, 19 nt, Human
cagcaagggccccuccccc

SEQ ID NO: 1096025 - RNA, 20 nt, Human
caggacaguaacacagggcc

SEQ ID NO: 1096026 - RNA, 19 nt, Human
caggcuucccucccaaccc

SEQ ID NO: 1096027 - RNA, 21 nt, Human
cagucaccacccuggucuagc

SEQ ID NO: 1096028 - RNA, 23 nt, Human
caugugcaggcacacaccacaca

SEQ ID NO: 1096029 - RNA, 23 nt, Human
ccaaagugcugggauuacaggca

SEQ ID NO: 1096030 - RNA, 24 nt, Human
ccaaagugcugggauuacaggcau

SEQ ID NO: 1096031 - RNA, 24 nt, Human
ccacaugcugccugcuccaauccc

SEQ ID NO: 1096032 - RNA, 19 nt, Human
ccaccagcccuucuaguug

SEQ ID NO: 1096033 - RNA, 19 nt, Human
ccaccagcccuucuaguug

SEQ ID NO: 1096034 - RNA, 21 nt, Human
ccacccugucugcaaaagaug

SEQ ID NO: 1096035 - RNA, 24 nt, Human
cccaaagugcugggauuacaggca

SEQ ID NO: 1096036 - RNA, 24 nt, Human
ccccagggcugugggcugcacagg

SEQ ID NO: 1096037 - RNA, 26 nt, Human
cccccacggcagcccuuauuuugucu

SEQ ID NO: 1096038 - RNA, 19 nt, Human
ccccugcacagggcccgcc

SEQ ID NO: 1096039 - RNA, 18 nt, Human
cccugcacagggcccgcc

SEQ ID NO: 1096040 - RNA, 19 nt, Human
cccuggcccugaaacagcc

SEQ ID NO: 1096041 - RNA, 20 nt, Human
ccucagcaggguggcccagc

SEQ ID NO: 1096042 - RNA, 19 nt, Human
ccucccaacccugccccuc

SEQ ID NO: 1096043 - RNA, 23 nt, Human
ccuccugcaugccacugguagcc

SEQ ID NO: 1096044 - RNA, 21 nt, Human
ccuccuguucccacccucacc

SEQ ID NO: 1096045 - RNA, 19 nt, Human
ccucucucucgucucucuc

SEQ ID NO: 1096046 - RNA, 22 nt, Human
ccucucucucgucucucucaca

SEQ ID NO: 1096047 - RNA, 18 nt, Human
ccucucugcuccuuuagc

SEQ ID NO: 1096048 - RNA, 19 nt, Human
ccuggcccugaaacagccc

SEQ ID NO: 1096049 - RNA, 20 nt, Human
ccugugcuuuauuucacaga

SEQ ID NO: 1096050 - RNA, 21 nt, Human
ccuuugcacuuggacgggaau

SEQ ID NO: 1096051 - RNA, 19 nt, Human
cggcagcccuuauuuuguc

SEQ ID NO: 1096052 - RNA, 24 nt, Human
cgugauccaaccgccucggccucc

SEQ ID NO: 1096053 - RNA, 21 nt, Human
cguggcaucuacccaccuccu

SEQ ID NO: 1096054 - RNA, 24 nt, Human
cguuuccuccucucugcuccuuua

SEQ ID NO: 1096055 - RNA, 20 nt, Human
cuacccaccuccuguuccca

SEQ ID NO: 1096056 - RNA, 23 nt, Human
cuacccaccuccuguucccaccc

SEQ ID NO: 1096057 - RNA, 20 nt, Human
cuagagcucuagcgagugac

SEQ ID NO: 1096058 - RNA, 24 nt, Human
cuccugaccucgugauccaaccgc

SEQ ID NO: 1096059 - RNA, 18 nt, Human
cuccuuucugcaccccuc

SEQ ID NO: 1096060 - RNA, 20 nt, Human
cucguggcaucuacccaccu

SEQ ID NO: 1096061 - RNA, 20 nt, Human
cucucugcuccuuuagccca

SEQ ID NO: 1096062 - RNA, 19 nt, Human
cugaaacagccauaacucc

SEQ ID NO: 1096063 - RNA, 22 nt, Human
cugccugcuccaaucccaaccu

SEQ ID NO: 1096064 - RNA, 20 nt, Human
cugcguuacuggaagaagac

SEQ ID NO: 1096065 - RNA, 21 nt, Human
cuggcccugaaacagccauaa

SEQ ID NO: 1096066 - RNA, 20 nt, Human
cugggcaacuugaggagaag

SEQ ID NO: 1096067 - RNA, 21 nt, Human
cugggcaacuugaggagaaga

SEQ ID NO: 1096068 - RNA, 19 nt, Human
cuuggcagcucaguucccu

SEQ ID NO: 1096069 - RNA, 21 nt, Human
cuuggcagcucaguucccuuc

SEQ ID NO: 1096070 - RNA, 18 nt, Human
cuuucugcaccccucugg

SEQ ID NO: 1096071 - RNA, 24 nt, Human
gaaaggccccagcaaacagugguc

SEQ ID NO: 1096072 - RNA, 18 nt, Human
gaagggccgcugggcugg

SEQ ID NO: 1096073 - RNA, 19 nt, Human
gaagggugaguuucugccu

SEQ ID NO: 1096074 - RNA, 22 nt, Human
gaccucgugauccaaccgccuc

SEQ ID NO: 1096075 - RNA, 22 nt, Human
gaccucgugauccaaccgccuc

SEQ ID NO: 1096076 - RNA, 24 nt, Human
gaccucgugauccaaccgccucgg

SEQ ID NO: 1096077 - RNA, 24 nt, Human
gagacgggguuucaccauguuagc

SEQ ID NO: 1096078 - RNA, 18 nt, Human
gauuacaggcaugagcca

SEQ ID NO: 1096079 - RNA, 22 nt, Human
gauuacaggcaugagccaccgc

SEQ ID NO: 1096080 - RNA, 23 nt, Human
gauuacaggcaugagccaccgca

SEQ ID NO: 1096081 - RNA, 27 nt, Human
gcacacacaggcacacacaccccccug

SEQ ID NO: 1096082 - RNA, 23 nt, Human
gcacacaggcacacacauauaca

SEQ ID NO: 1096083 - RNA, 25 nt, Human
gcacacaggcacacacauauacaca

SEQ ID NO: 1096084 - RNA, 21 nt, Human
gcagagcuucuuccagaucua

SEQ ID NO: 1096085 - RNA, 22 nt, Human
gcagagcuucuuccagaucuag

SEQ ID NO: 1096086 - RNA, 24 nt, Human
gccccuggcccugaaacagccaua

SEQ ID NO: 1096087 - RNA, 21 nt, Human
gcccuuccuugucuuucacuc

SEQ ID NO: 1096088 - RNA, 23 nt, Human
gccucggccucccaaagugcugg

SEQ ID NO: 1096089 - RNA, 23 nt, Human
gccucguggcaucuacccaccuc

SEQ ID NO: 1096090 - RNA, 18 nt, Human
gccuugggaaggguggag

SEQ ID NO: 1096091 - RNA, 18 nt, Human
gcucaguucccuucucug

SEQ ID NO: 1096092 - RNA, 23 nt, Human
gcuucuuccagaucuagagcucu

SEQ ID NO: 1096093 - RNA, 24 nt, Human
ggauggucucgaucuccugaccuc

SEQ ID NO: 1096094 - RNA, 22 nt, Human
ggauuacaggcaugagccaccg

SEQ ID NO: 1096095 - RNA, 21 nt, Human
ggcacacacaccccccugcag

SEQ ID NO: 1096096 - RNA, 23 nt, Human
ggcacacacaggcacacacaccc

SEQ ID NO: 1096097 - RNA, 18 nt, Human
ggcugugggcugcacagg

SEQ ID NO: 1096098 - RNA, 18 nt, Human
gggcugaggccaggcccc

SEQ ID NO: 1096099 - RNA, 23 nt, Human
gggguuucaccauguuagccagg

SEQ ID NO: 1096100 - RNA, 22 nt, Human
ggguuucaccauguuagccagg

SEQ ID NO: 1096101 - RNA, 19 nt, Human
ggugaguuucugccuuugg

SEQ ID NO: 1096102 - RNA, 24 nt, Human
gguuucaccauguuagccaggaug

SEQ ID NO: 1096103 - RNA, 23 nt, Human
guagagacgggguuucaccaugu

SEQ ID NO: 1096104 - RNA, 20 nt, Human
guccacacgugcacacaugu

SEQ ID NO: 1096105 - RNA, 24 nt, Human
gugauccaaccgccucggccuccc

SEQ ID NO: 1096106 - RNA, 22 nt, Human
guggaaggcaugccucguggca

SEQ ID NO: 1096107 - RNA, 23 nt, Human
guguacacaugugcaagugcaua

SEQ ID NO: 1096108 - RNA, 31 nt, Human
gugugguccuggggcuccucucuccuguucc

SEQ ID NO: 1096109 - RNA, 19 nt, Human
uacacacucagcacacacc

SEQ ID NO: 1096110 - RNA, 25 nt, Human
uacacagcacacaggcacacacaua

SEQ ID NO: 1096111 - RNA, 21 nt, Human
uacaggcaugagccaccgcac

SEQ ID NO: 1096112 - RNA, 22 nt, Human
uagagacgggguuucaccaugu

SEQ ID NO: 1096113 - RNA, 22 nt, Human
uagccacccagaccaggaauuc

SEQ ID NO: 1096114 - RNA, 24 nt, Human
uaguagagacgggguuucaccaug

SEQ ID NO: 1096115 - RNA, 26 nt, Human
uaguagagacgggguuucaccauguu

SEQ ID NO: 1096116 - RNA, 20 nt, Human
uauacacacucagcacacac

SEQ ID NO: 1096117 - RNA, 23 nt, Human
uauacacacucagcacacaccac

SEQ ID NO: 1096118 - RNA, 18 nt, Human
ucacacucucucuccucu

SEQ ID NO: 1096119 - RNA, 21 nt, Human
ucacagagaaggaaaggcccc

SEQ ID NO: 1096120 - RNA, 24 nt, Human
ucaccauguuagccaggauggucu

SEQ ID NO: 1096121 - RNA, 24 nt, Human
ucacccagaugcucaccccggcuc

SEQ ID NO: 1096122 - RNA, 24 nt, Human
ucccaaagugcugggauuacaggc

SEQ ID NO: 1096123 - RNA, 18 nt, Human
ucccaacccugccccucu

SEQ ID NO: 1096124 - RNA, 21 nt, Human
ucccaacccugccccucuagu

SEQ ID NO: 1096125 - RNA, 21 nt, Human
ucccacccucacccccgcccc

SEQ ID NO: 1096126 - RNA, 19 nt, Human
ucccuggaagcacaagaac

SEQ ID NO: 1096127 - RNA, 18 nt, Human
ucggccucccaaagugcu

SEQ ID NO: 1096128 - RNA, 21 nt, Human
ucuagcgagugacgggauuuc

SEQ ID NO: 1096129 - RNA, 22 nt, Human
ucucucacagagaaggaaaggc

SEQ ID NO: 1096130 - RNA, 23 nt, Human
ucucucgucucucucacagagaa

SEQ ID NO: 1096131 - RNA, 23 nt, Human
ucugucuggagcauucuggucau

SEQ ID NO: 1096132 - RNA, 18 nt, Human
ugaaacagccauaacucc

SEQ ID NO: 1096133 - RNA, 21 nt, Human
ugaaacagccauaacuccugg

SEQ ID NO: 1096134 - RNA, 21 nt, Human
ugaccaagcaccugccguguc

SEQ ID NO: 1096135 - RNA, 22 nt, Human
ugaccucgugauccaaccgccu

SEQ ID NO: 1096136 - RNA, 18 nt, Human
ugaugccggggcucuggg

SEQ ID NO: 1096137 - RNA, 21 nt, Human
ugcaggaaagcccuuccuugu

SEQ ID NO: 1096138 - RNA, 21 nt, Human
ugcaggcacacaccacacagg

SEQ ID NO: 1096139 - RNA, 24 nt, Human
ugcugaccaagcaccugccguguc

SEQ ID NO: 1096140 - RNA, 27 nt, Human
uggaagaagacacuacccugacucacu

SEQ ID NO: 1096141 - RNA, 22 nt, Human
uggagaccccacauucggccag

SEQ ID NO: 1096142 - RNA, 18 nt, Human
uggaggagagaagagagg

SEQ ID NO: 1096143 - RNA, 18 nt, Human
uggcagucaccacccugg

SEQ ID NO: 1096144 - RNA, 18 nt, Human
ugggauuacaggcaugag

SEQ ID NO: 1096145 - RNA, 19 nt, Human
ugggauuacaggcaugagc

SEQ ID NO: 1096146 - RNA, 21 nt, Human
ugggauuacaggcaugagcca

SEQ ID NO: 1096147 - RNA, 22 nt, Human
ugggauuacaggcaugagccac

SEQ ID NO: 1096148 - RNA, 23 nt, Human
ugggauuacaggcaugagccacc

SEQ ID NO: 1096149 - RNA, 24 nt, Human
ugggauuacaggcaugagccaccg

SEQ ID NO: 1096150 - RNA, 24 nt, Human
ugggauuacaggcaugagccaccg

SEQ ID NO: 1096151 - RNA, 19 nt, Human
ugggccuccugcaugccac

SEQ ID NO: 1096152 - RNA, 20 nt, Human
ugggccuccugcaugccacu

SEQ ID NO: 1096153 - RNA, 21 nt, Human
ugggcugggcgccaaccagag

SEQ ID NO: 1096154 - RNA, 31 nt, Human
uggggacacacacacacacacacacacacag

SEQ ID NO: 1096155 - RNA, 28 nt, Human
uguggggacacacacacacacacacaca

SEQ ID NO: 1096156 - RNA, 19 nt, Human
ugugugguccuggggcucc

SEQ ID NO: 1096157 - RNA, 18 nt, Human
uuaguagagacgggguuu

SEQ ID NO: 1096158 - RNA, 22 nt, Human
uuaguagagacgggguuucacc

SEQ ID NO: 1096159 - RNA, 24 nt, Human
uuaguagagacgggguuucaccau

SEQ ID NO: 1096160 - RNA, 22 nt, Human
uucccacccucacccccgcccc

SEQ ID NO: 1096161 - RNA, 18 nt, Human
uucccuucucugcaccuc

SEQ ID NO: 1096162 - RNA, 23 nt, Human
uucuuccagaucuagagcucuag

SEQ ID NO: 1096163 - RNA, 19 nt, Human
uuucaccauguuagccagg

SEQ ID NO: 1096164 - RNA, 20 nt, Human
uuucaccauguuagccagga

SEQ ID NO: 1096165 - RNA, 21 nt, Human
uuuucuggacuguacuaauga

SEQ ID NO: 1096166 - RNA, 23 nt, Human
uuuucuggacuguacuaaugagg

SEQ ID NO: 1096167 - RNA, 24 nt, Human
uuuuuaguagagacgggguuucac

SEQ ID NO: 1096168 - RNA, 23 nt, Human
aaagacagaccugggcccaagcc

SEQ ID NO: 1096169 - RNA, 20 nt, Human
aaauggauuuugaaccuguu

SEQ ID NO: 1096170 - RNA, 23 nt, Human
aagcaagcagaaagcacggcugg

SEQ ID NO: 1096171 - RNA, 22 nt, Human
acaaaccaaaagcaagcagaaa

SEQ ID NO: 1096172 - RNA, 23 nt, Human
acagugcuggauuacaggcguga

SEQ ID NO: 1096173 - RNA, 20 nt, Human
acauggagaaacacugagcc

SEQ ID NO: 1096174 - RNA, 21 nt, Human
accugcccuucacuccaacuu

SEQ ID NO: 1096175 - RNA, 24 nt, Human
accugggagcucguuacacaugca

SEQ ID NO: 1096176 - RNA, 23 nt, Human
agaaagacagaccugggcccaag

SEQ ID NO: 1096177 - RNA, 18 nt, Human
agaaggagacgaugucac

SEQ ID NO: 1096178 - RNA, 18 nt, Human
agaaggagacgaugucac

SEQ ID NO: 1096179 - RNA, 22 nt, Human
agacaaugucaccagcagcuga

SEQ ID NO: 1096180 - RNA, 22 nt, Human
agagcauagggcaggggugggg

SEQ ID NO: 1096181 - RNA, 21 nt, Human
agaggaaaucccaggccaccc

SEQ ID NO: 1096182 - RNA, 18 nt, Human
agagggaaaacauccucc

SEQ ID NO: 1096183 - RNA, 19 nt, Human
agagugagggacagcugau

SEQ ID NO: 1096184 - RNA, 19 nt, Human
agaugccuggcuccgggau

SEQ ID NO: 1096185 - RNA, 21 nt, Human
agcacaccucuacacagacaa

SEQ ID NO: 1096186 - RNA, 21 nt, Human
agcagagcugcugaaauggca

SEQ ID NO: 1096187 - RNA, 22 nt, Human
agcagcugauugggcgucuaug

SEQ ID NO: 1096188 - RNA, 22 nt, Human
agcagcugguuggguguccaug

SEQ ID NO: 1096189 - RNA, 18 nt, Human
aggauuggugaggaugaa

SEQ ID NO: 1096190 - RNA, 20 nt, Human
aggcaaggcugagggaccug

SEQ ID NO: 1096191 - RNA, 23 nt, Human
aggcgugaaccacugugcucggc

SEQ ID NO: 1096192 - RNA, 22 nt, Human
aggcgugaggcugggaacccau

SEQ ID NO: 1096193 - RNA, 21 nt, Human
aggcugaggucagguggcagg

SEQ ID NO: 1096194 - RNA, 19 nt, Human
aggcugcagggcugaaugc

SEQ ID NO: 1096195 - RNA, 22 nt, Human
aggcugcagggcugaaugcugu

SEQ ID NO: 1096196 - RNA, 18 nt, Human
agggcugaaugcuguggu

SEQ ID NO: 1096197 - RNA, 20 nt, Human
agggguggggaaggaaugag

SEQ ID NO: 1096198 - RNA, 23 nt, Human
agggucuuccaggagaaaugaca

SEQ ID NO: 1096199 - RNA, 22 nt, Human
aggugguuugguguccauaucc

SEQ ID NO: 1096200 - RNA, 22 nt, Human
aggugguuugguguccaugucc

SEQ ID NO: 1096201 - RNA, 22 nt, Human
aguagagaugggguuucgccau

SEQ ID NO: 1096202 - RNA, 23 nt, Human
aguagagaugggguuucgccaug

SEQ ID NO: 1096203 - RNA, 23 nt, Human
aguaggagagacccuccagcugg

SEQ ID NO: 1096204 - RNA, 21 nt, Human
agugcuggauuacaggcguga

SEQ ID NO: 1096205 - RNA, 21 nt, Human
augaaaauagagaugccuguc

SEQ ID NO: 1096206 - RNA, 18 nt, Human
augggguuucgccauguu

SEQ ID NO: 1096207 - RNA, 24 nt, Human
augggguuucgccauguuggccag

SEQ ID NO: 1096208 - RNA, 24 nt, Human
caaaagcaagcagaaagcacggcc

SEQ ID NO: 1096209 - RNA, 22 nt, Human
caaucacugcuaaaggugacac

SEQ ID NO: 1096210 - RNA, 19 nt, Human
cacuccagaggcguuggca

SEQ ID NO: 1096211 - RNA, 19 nt, Human
cagaaggagacaauaucau

SEQ ID NO: 1096212 - RNA, 22 nt, Human
cagaaggagacaauaucaucgg

SEQ ID NO: 1096213 - RNA, 19 nt, Human
cagaaggagacaaugucac

SEQ ID NO: 1096214 - RNA, 19 nt, Human
cagaaggagacgaugucac

SEQ ID NO: 1096215 - RNA, 19 nt, Human
cagaaggagacgaugucac

SEQ ID NO: 1096216 - RNA, 19 nt, Human
cagaaggagacgaugucac

SEQ ID NO: 1096217 - RNA, 24 nt, Human
cagaaggagacgaugucaccggca

SEQ ID NO: 1096218 - RNA, 24 nt, Human
cagaaggagacgaugucaccggca

SEQ ID NO: 1096219 - RNA, 24 nt, Human
cagaaggagacgaugucaccggca

SEQ ID NO: 1096220 - RNA, 24 nt, Human
cagaaggagacgaugucaccggca

SEQ ID NO: 1096221 - RNA, 24 nt, Human
cagaaggagacgaugucacuggca

SEQ ID NO: 1096222 - RNA, 19 nt, Human
cagaaggagaugaugucac

SEQ ID NO: 1096223 - RNA, 24 nt, Human
cagaaggggacgaugucaccggca

SEQ ID NO: 1096224 - RNA, 24 nt, Human
cagaaggggacgaugucaccggca

SEQ ID NO: 1096225 - RNA, 24 nt, Human
cagaaggggacgaugucaccggca

SEQ ID NO: 1096226 - RNA, 21 nt, Human
cagaccucagaaggagacgau

SEQ ID NO: 1096227 - RNA, 21 nt, Human
cagaucucagaaggagaugau

SEQ ID NO: 1096228 - RNA, 23 nt, Human
cagaugcuggaccuaaccucaca

SEQ ID NO: 1096229 - RNA, 20 nt, Human
cagcacuccagaggcguugg

SEQ ID NO: 1096230 - RNA, 22 nt, Human
cagcaggauggggcuccccaga

SEQ ID NO: 1096231 - RNA, 24 nt, Human
cagcuccgaucagagaggaaaucc

SEQ ID NO: 1096232 - RNA, 19 nt, Human
caggccacccccugccuuu

SEQ ID NO: 1096233 - RNA, 22 nt, Human
cagguggcuggguaucaauguc

SEQ ID NO: 1096234 - RNA, 24 nt, Human
cauguuggccaggcuggucucgaa

SEQ ID NO: 1096235 - RNA, 21 nt, Human
ccacagugcuggauuacaggc

SEQ ID NO: 1096236 - RNA, 23 nt, Human
ccacagugcuggauuacaggcgu

SEQ ID NO: 1096237 - RNA, 18 nt, Human
ccagcagcagguugggug

SEQ ID NO: 1096238 - RNA, 19 nt, Human
ccauguuggccaggcuggu

SEQ ID NO: 1096239 - RNA, 22 nt, Human
ccauguuggccaggcuggucuc

SEQ ID NO: 1096240 - RNA, 23 nt, Human
ccauguuggccaggcuggucucg

SEQ ID NO: 1096241 - RNA, 22 nt, Human
cccaggccacccccugccuuug

SEQ ID NO: 1096242 - RNA, 23 nt, Human
ccccugaggcugaggucaggugg

SEQ ID NO: 1096243 - RNA, 21 nt, Human
ccucuggcuaggaucuggagc

SEQ ID NO: 1096244 - RNA, 21 nt, Human
ccugaccucaggugauccacc

SEQ ID NO: 1096245 - RNA, 23 nt, Human
ccugaccucaggugauccaccug

SEQ ID NO: 1096246 - RNA, 23 nt, Human
ccugaccucaggugauccaccug

SEQ ID NO: 1096247 - RNA, 23 nt, Human
cgcaaaauccagcucuccaggcg

SEQ ID NO: 1096248 - RNA, 24 nt, Human
cgccauguuggccaggcuggucuc

SEQ ID NO: 1096249 - RNA, 27 nt, Human
cgccauguuggccaggcuggucucgaa

SEQ ID NO: 1096250 - RNA, 22 nt, Human
cuaauaccucucucuucaauaa

SEQ ID NO: 1096251 - RNA, 18 nt, Human
cuaaugcaucuacgaaac

SEQ ID NO: 1096252 - RNA, 23 nt, Human
cuacacagacaaugcuagccaag

SEQ ID NO: 1096253 - RNA, 24 nt, Human
cucagggugagcagagcugcugaa

SEQ ID NO: 1096254 - RNA, 21 nt, Human
cucgcaaaauccagcucucca

SEQ ID NO: 1096255 - RNA, 24 nt, Human
cugcucucucugcaugcucagggu

SEQ ID NO: 1096256 - RNA, 20 nt, Human
cugucccagccagcacucca

SEQ ID NO: 1096257 - RNA, 21 nt, Human
cuucacagguucuaauaccuc

SEQ ID NO: 1096258 - RNA, 19 nt, Human
cuuccaggagaaaugacac

SEQ ID NO: 1096259 - RNA, 24 nt, Human
gaaaucccaggccacccccugccu

SEQ ID NO: 1096260 - RNA, 21 nt, Human
gaacucccucaugcgcaaaaa

SEQ ID NO: 1096261 - RNA, 24 nt, Human
gaccucaggugauccaccugccuc

SEQ ID NO: 1096262 - RNA, 19 nt, Human
gaccugcccuucacuccuu

SEQ ID NO: 1096263 - RNA, 21 nt, Human
gacucggucauucaucagcag

SEQ ID NO: 1096264 - RNA, 18 nt, Human
gagaagggagggaucucc

SEQ ID NO: 1096265 - RNA, 20 nt, Human
gagaugccuggcuccgggau

SEQ ID NO: 1096266 - RNA, 18 nt, Human
gagaugggguuucgccau

SEQ ID NO: 1096267 - RNA, 24 nt, Human
gagaugggguuucgccauguuggc

SEQ ID NO: 1096268 - RNA, 23 nt, Human
gagccaguuguuagacuuacuag

SEQ ID NO: 1096269 - RNA, 21 nt, Human
gaggccccuggagaaagacag

SEQ ID NO: 1096270 - RNA, 21 nt, Human
gauuacaggcgugaaccacug

SEQ ID NO: 1096271 - RNA, 24 nt, Human
gauuacaggcgugaaccacugugc

SEQ ID NO: 1096272 - RNA, 18 nt, Human
gcaggugguuggguguuc

SEQ ID NO: 1096273 - RNA, 18 nt, Human
gcaggugguuggguguuc

SEQ ID NO: 1096274 - RNA, 23 nt, Human
gcuggucucgaacuccugaccuc

SEQ ID NO: 1096275 - RNA, 20 nt, Human
ggaaggagauggaugugagg

SEQ ID NO: 1096276 - RNA, 20 nt, Human
ggagacgaugucacuggcag

SEQ ID NO: 1096277 - RNA, 24 nt, Human
ggagcuucucaagcccuaaugcau

SEQ ID NO: 1096278 - RNA, 20 nt, Human
ggauuacaggcgugaaccac

SEQ ID NO: 1096279 - RNA, 22 nt, Human
ggcagggguggggaaggaauga

SEQ ID NO: 1096280 - RNA, 21 nt, Human
ggcgucuaugugagugucugu

SEQ ID NO: 1096281 - RNA, 24 nt, Human
ggcuggucucgaacuccugaccuc

SEQ ID NO: 1096282 - RNA, 18 nt, Human
gggaagggacauggugcu

SEQ ID NO: 1096283 - RNA, 22 nt, Human
gggaaguggcaaaugcuaccag

SEQ ID NO: 1096284 - RNA, 21 nt, Human
gggcagggguggggaaggaau

SEQ ID NO: 1096285 - RNA, 22 nt, Human
gggguuucgccauguuggccag

SEQ ID NO: 1096286 - RNA, 18 nt, Human
ggguuucgccauguuggc

SEQ ID NO: 1096287 - RNA, 19 nt, Human
ggucucgaacuccugaccu

SEQ ID NO: 1096288 - RNA, 21 nt, Human
guagagaugggguuucgccau

SEQ ID NO: 1096289 - RNA, 23 nt, Human
guagagaugggguuucgccaugu

SEQ ID NO: 1096290 - RNA, 26 nt, Human
gugauccaccugccucgaggccuccc

SEQ ID NO: 1096291 - RNA, 20 nt, Human
uaaaaccagacagugucugu

SEQ ID NO: 1096292 - RNA, 21 nt, Human
uacaggggugagcgagaugcc

SEQ ID NO: 1096293 - RNA, 22 nt, Human
uacaggggugagcgagaugccu

SEQ ID NO: 1096294 - RNA, 24 nt, Human
uagaaaggagcuucucaagcccua

SEQ ID NO: 1096295 - RNA, 22 nt, Human
uagagaugggguuucgccaugu

SEQ ID NO: 1096296 - RNA, 24 nt, Human
uaggcucagagaagggagggaucu

SEQ ID NO: 1096297 - RNA, 23 nt, Human
uauucuaaauuccuagaaagcag

SEQ ID NO: 1096298 - RNA, 23 nt, Human
uccaugugagugucuguccucag

SEQ ID NO: 1096299 - RNA, 23 nt, Human
ucccacagugcuggauuacaggc

SEQ ID NO: 1096300 - RNA, 23 nt, Human
ucccucaugcgcaaaaaggaaga

SEQ ID NO: 1096301 - RNA, 19 nt, Human
ucccuggcaggauugguga

SEQ ID NO: 1096302 - RNA, 23 nt, Human
ucccuggcaggauuggugaggau

SEQ ID NO: 1096303 - RNA, 22 nt, Human
ucgccauguuggccaggcuggu

SEQ ID NO: 1096304 - RNA, 24 nt, Human
ucgccauguuggccaggcuggucu

SEQ ID NO: 1096305 - RNA, 23 nt, Human
ucucaaaaccacauggagaaaca

SEQ ID NO: 1096306 - RNA, 20 nt, Human
ucucagagagccaguuguua

SEQ ID NO: 1096307 - RNA, 19 nt, Human
ucucgaacuccugaccuca

SEQ ID NO: 1096308 - RNA, 21 nt, Human
ucugcaugcucagggugagca

SEQ ID NO: 1096309 - RNA, 21 nt, Human
ucuguccucagaucucagaag

SEQ ID NO: 1096310 - RNA, 20 nt, Human
ugaaauggcagagugaggga

SEQ ID NO: 1096311 - RNA, 23 nt, Human
ugaaugcugugguggcuacaggg

SEQ ID NO: 1096312 - RNA, 18 nt, Human
ugacauuugcagaaggcc

SEQ ID NO: 1096313 - RNA, 24 nt, Human
ugaccucaggugauccaccugccu

SEQ ID NO: 1096314 - RNA, 20 nt, Human
ugaggccccuggagaaagac

SEQ ID NO: 1096315 - RNA, 24 nt, Human
ugaguaggagagacccuccagcug

SEQ ID NO: 1096316 - RNA, 20 nt, Human
ugccccaggccuagcaaggu

SEQ ID NO: 1096317 - RNA, 23 nt, Human
ugccucgaggccucccacagugc

SEQ ID NO: 1096318 - RNA, 20 nt, Human
ugcgagacucggucauucau

SEQ ID NO: 1096319 - RNA, 22 nt, Human
ugcugcuuuauuucucuggacc

SEQ ID NO: 1096320 - RNA, 20 nt, Human
uggauuacaggcgugaacca

SEQ ID NO: 1096321 - RNA, 23 nt, Human
uggauuacaggcgugaaccacug

SEQ ID NO: 1096322 - RNA, 20 nt, Human
uggcaggugguuuggugucc

SEQ ID NO: 1096323 - RNA, 24 nt, Human
uggccaggcuggucucgaacuccu

SEQ ID NO: 1096324 - RNA, 23 nt, Human
uggcuacaggggugagcgagaug

SEQ ID NO: 1096325 - RNA, 18 nt, Human
ugggaaggagauggaugu

SEQ ID NO: 1096326 - RNA, 24 nt, Human
ugggguuucgccauguuggccagg

SEQ ID NO: 1096327 - RNA, 19 nt, Human
ugggucacugagggucuuc

SEQ ID NO: 1096328 - RNA, 25 nt, Human
ugguguccauguccucaggacccag

SEQ ID NO: 1096329 - RNA, 25 nt, Human
ugguguccauguccucaggacccag

SEQ ID NO: 1096330 - RNA, 23 nt, Human
ugguuugguguccauguccucag

SEQ ID NO: 1096331 - RNA, 22 nt, Human
ugugaggccccuggagaaagac

SEQ ID NO: 1096332 - RNA, 24 nt, Human
ugugaggccccuggagaaagacag

SEQ ID NO: 1096333 - RNA, 21 nt, Human
ugugguggcuacaggggugag

SEQ ID NO: 1096334 - RNA, 21 nt, Human
uuacacaugcagaugcuggac

SEQ ID NO: 1096335 - RNA, 22 nt, Human
uuagaacucauuuaaaagcugc

SEQ ID NO: 1096336 - RNA, 25 nt, Human
uuggugaggaugaaaauagagaugc

SEQ ID NO: 1096337 - RNA, 23 nt, Human
uuucgccauguuggccaggcugu

SEQ ID NO: 1096338 - RNA, 19 nt, Human
aacagagaagcucccuaaa

SEQ ID NO: 1096339 - RNA, 22 nt, Human
caaaccccacucccaaaacaga

SEQ ID NO: 1096340 - RNA, 27 nt, Human
caaaccccacucccaaaacagagaagc

SEQ ID NO: 1096341 - RNA, 25 nt, Human
caauugccaggaucccauuacaaag

SEQ ID NO: 1096342 - RNA, 18 nt, Human
caccaucugcaccgagau

SEQ ID NO: 1096343 - RNA, 21 nt, Human
caccgagaucaucaaacccca

SEQ ID NO: 1096344 - RNA, 21 nt, Human
cagcaauugccaggaucccau

SEQ ID NO: 1096345 - RNA, 19 nt, Human
caucaaaccccacucccaa

SEQ ID NO: 1096346 - RNA, 23 nt, Human
ccccacucccaaaacagagaagc

SEQ ID NO: 1096347 - RNA, 23 nt, Human
ccgagaucaucaaaccccacucc

SEQ ID NO: 1096348 - RNA, 24 nt, Human
gaaggcacccacucaggaaagcac

SEQ ID NO: 1096349 - RNA, 21 nt, Human
gagagaaagaaaucaguggga

SEQ ID NO: 1096350 - RNA, 23 nt, Human
gcagcaauugccaggaucccauu

SEQ ID NO: 1096351 - RNA, 21 nt, Human
gcccccagcaggaugcuuggc

SEQ ID NO: 1096352 - RNA, 20 nt, Human
uacaaagugggagaaggcac

SEQ ID NO: 1096353 - RNA, 23 nt, Human
ugcaccgagaucaucaaacccca

SEQ ID NO: 1096354 - RNA, 27 nt, Human
ugcaccgagaucaucaaaccccacucc

SEQ ID NO: 1096355 - RNA, 20 nt, Human
ugcucaauggagagaaagaa

SEQ ID NO: 1096356 - RNA, 23 nt, Human
ugggagaaggcacccacucagga

SEQ ID NO: 1096357 - RNA, 22 nt, Human
uuugaagcccccagcaggaugc

SEQ ID NO: 1096358 - RNA, 18 nt, Human
ugaguuuuugcaugugca

SEQ ID NO: 1096359 - RNA, 18 nt, Human
aagugcugggauuacagg

SEQ ID NO: 1096360 - RNA, 18 nt, Human
aagugcugggauuacagg

SEQ ID NO: 1096361 - RNA, 18 nt, Human
aagugcugggauuacagg

SEQ ID NO: 1096362 - RNA, 19 nt, Human
aagugcugggauuacaggu

SEQ ID NO: 1096363 - RNA, 20 nt, Human
aagugcugggauuacaggug

SEQ ID NO: 1096364 - RNA, 21 nt, Human
aagugcugggauuacaggugu

SEQ ID NO: 1096365 - RNA, 23 nt, Human
aagugcugggauuacagguguga

SEQ ID NO: 1096366 - RNA, 26 nt, Human
aagugcugggauuacaggugugagcc

SEQ ID NO: 1096367 - RNA, 25 nt, Human
auacuggacacguggcagggaaagg

SEQ ID NO: 1096368 - RNA, 21 nt, Human
caccucuucccccugcucuga

SEQ ID NO: 1096369 - RNA, 23 nt, Human
ccagggucucuuugcuuauuccu

SEQ ID NO: 1096370 - RNA, 19 nt, Human
cgcccuuggguccaggguc

SEQ ID NO: 1096371 - RNA, 22 nt, Human
cuggacacguggcagggaaagg

SEQ ID NO: 1096372 - RNA, 18 nt, Human
cuuauuccugcgccaauc

SEQ ID NO: 1096373 - RNA, 18 nt, Human
gauuacaggugugagcca

SEQ ID NO: 1096374 - RNA, 21 nt, Human
gauuacaggugugagccaccg

SEQ ID NO: 1096375 - RNA, 24 nt, Human
gauuacaggugugagccaccgugc

SEQ ID NO: 1096376 - RNA, 19 nt, Human
gcuuauuccugcgccaauc

SEQ ID NO: 1096377 - RNA, 20 nt, Human
gucucuuugcuuauuccugg

SEQ ID NO: 1096378 - RNA, 24 nt, Human
uacaggugugagccaccgugccca

SEQ ID NO: 1096379 - RNA, 18 nt, Human
uccagggucucuuugcuu

SEQ ID NO: 1096380 - RNA, 19 nt, Human
ucugucaguguccaacuga

SEQ ID NO: 1096381 - RNA, 24 nt, Human
ugcugggauuacaggugugagcca

SEQ ID NO: 1096382 - RNA, 18 nt, Human
ugggauuacaggugugag

SEQ ID NO: 1096383 - RNA, 21 nt, Human
ugggauuacaggugugagcca

SEQ ID NO: 1096384 - RNA, 22 nt, Human
ugggauuacaggugugagccac

SEQ ID NO: 1096385 - RNA, 23 nt, Human
ugggauuacaggugugagccacc

SEQ ID NO: 1096386 - RNA, 23 nt, Human
ugggauuacaggugugagccacc

SEQ ID NO: 1096387 - RNA, 24 nt, Human
ugggauuacaggugugagccaccg

SEQ ID NO: 1096388 - RNA, 28 nt, Human
ugugagccaccgugcccagccugcucug

SEQ ID NO: 1096389 - RNA, 21 nt, Human
uguggggauggggucacuuuu

SEQ ID NO: 1096390 - RNA, 21 nt, Human
uguggggauggggucacuuuu

SEQ ID NO: 1096391 - RNA, 23 nt, Human
aaaaggcaaaccacaaaauggag

SEQ ID NO: 1096392 - RNA, 24 nt, Human
aaaaggcaaaccacaaaauggagg

SEQ ID NO: 1096393 - RNA, 26 nt, Human
aaacacaccugaguucagggaccagg

SEQ ID NO: 1096394 - RNA, 27 nt, Human
aaaccaccaugagaacacacuccccaa

SEQ ID NO: 1096395 - RNA, 21 nt, Human
aaaugccuuucagacgugccc

SEQ ID NO: 1096396 - RNA, 27 nt, Human
aacacacuccccaaacggcuggcgacc

SEQ ID NO: 1096397 - RNA, 22 nt, Human
aaugaugcugucacucaaagcc

SEQ ID NO: 1096398 - RNA, 24 nt, Human
acacacuccccaaacggcuggcga

SEQ ID NO: 1096399 - RNA, 20 nt, Human
accacugcugucacucaaau

SEQ ID NO: 1096400 - RNA, 22 nt, Human
agacucacaccugaaaccacca

SEQ ID NO: 1096401 - RNA, 20 nt, Human
agcaggaggaaucggagcuu

SEQ ID NO: 1096402 - RNA, 21 nt, Human
agcaggaggaaucggagcuug

SEQ ID NO: 1096403 - RNA, 23 nt, Human
agcaggaggaaucggagcuuggu

SEQ ID NO: 1096404 - RNA, 19 nt, Human
agccgagcagcugggcccu

SEQ ID NO: 1096405 - RNA, 21 nt, Human
augaaaaggcaaaccacaaaa

SEQ ID NO: 1096406 - RNA, 20 nt, Human
augaugcugucacucaaagc

SEQ ID NO: 1096407 - RNA, 22 nt, Human
caaaccacaaaauggaggaaga

SEQ ID NO: 1096408 - RNA, 26 nt, Human
cacaccugaaaccaccaugagaacac

SEQ ID NO: 1096409 - RNA, 23 nt, Human
cacagcagguguccagaaaugcc

SEQ ID NO: 1096410 - RNA, 24 nt, Human
caccacaucagaauccauuacacc

SEQ ID NO: 1096411 - RNA, 18 nt, Human
caccaccuaccacugcug

SEQ ID NO: 1096412 - RNA, 19 nt, Human
caccaugagaacacacucc

SEQ ID NO: 1096413 - RNA, 24 nt, Human
caccaugagaacacacuccccaaa

SEQ ID NO: 1096414 - RNA, 18 nt, Human
caccuccugaacaaguuc

SEQ ID NO: 1096415 - RNA, 22 nt, Human
caccugaaaccaccaugagaac

SEQ ID NO: 1096416 - RNA, 19 nt, Human
cacucaaaugaugcuguca

SEQ ID NO: 1096417 - RNA, 24 nt, Human
cacugcugucacucaaaugaugcu

SEQ ID NO: 1096418 - RNA, 18 nt, Human
cagcugggcccucuggcu

SEQ ID NO: 1096419 - RNA, 21 nt, Human
caggaggaaucggagcuuggc

SEQ ID NO: 1096420 - RNA, 22 nt, Human
caucauccagagaagcugagga

SEQ ID NO: 1096421 - RNA, 23 nt, Human
ccagcccagugugagggagccga

SEQ ID NO: 1096422 - RNA, 18 nt, Human
ccaggccagcccagugcg

SEQ ID NO: 1096423 - RNA, 19 nt, Human
cccaccccugcaauggagu

SEQ ID NO: 1096424 - RNA, 22 nt, Human
cccagugcguguugacaccguc

SEQ ID NO: 1096425 - RNA, 23 nt, Human
ccccaaacggcuggcgaccaagu

SEQ ID NO: 1096426 - RNA, 20 nt, Human
cccccaccacaucagaaucc

SEQ ID NO: 1096427 - RNA, 22 nt, Human
cccccaccacaucagaauccau

SEQ ID NO: 1096428 - RNA, 18 nt, Human
ccccgggucccuggaugc

SEQ ID NO: 1096429 - RNA, 25 nt, Human
ccccgggucccuggaugcuuaaucu

SEQ ID NO: 1096430 - RNA, 21 nt, Human
ccccugcaauggagugagggc

SEQ ID NO: 1096431 - RNA, 22 nt, Human
cccucuggcucugggcauguuc

SEQ ID NO: 1096432 - RNA, 26 nt, Human
ccgucuuaaacaagacucuguuaaaa

SEQ ID NO: 1096433 - RNA, 26 nt, Human
ccuaccacugcugucacucaaaugau

SEQ ID NO: 1096434 - RNA, 19 nt, Human
ccugaacaaguuccugaag

SEQ ID NO: 1096435 - RNA, 18 nt, Human
ccugcaauggagugaggg

SEQ ID NO: 1096436 - RNA, 24 nt, Human
ccuuggccaggucaccuacucucc

SEQ ID NO: 1096437 - RNA, 21 nt, Human
cgccagagaggaaggaacucc

SEQ ID NO: 1096438 - RNA, 19 nt, Human
cggagcuuggcugcgcccc

SEQ ID NO: 1096439 - RNA, 24 nt, Human
cgugcaguaggccgguggggaacc

SEQ ID NO: 1096440 - RNA, 20 nt, Human
cucacaccugaaaccaccau

SEQ ID NO: 1096441 - RNA, 23 nt, Human
cuccugaacaaguuccugaagac

SEQ ID NO: 1096442 - RNA, 18 nt, Human
cuccuguaugaggccaca

SEQ ID NO: 1096443 - RNA, 21 nt, Human
cugugugcuggccuuggccag

SEQ ID NO: 1096444 - RNA, 24 nt, Human
cuuguccugugugcuggccuuggc

SEQ ID NO: 1096445 - RNA, 21 nt, Human
gcacgggggguuguuggucag

SEQ ID NO: 1096446 - RNA, 18 nt, Human
gcagagugguggacacaa

SEQ ID NO: 1096447 - RNA, 22 nt, Human
gccgagcagcugggcccucugg

SEQ ID NO: 1096448 - RNA, 18 nt, Human
gcgaccaagugcccagcc

SEQ ID NO: 1096449 - RNA, 22 nt, Human
gcucugggcauguuccugggca

SEQ ID NO: 1096450 - RNA, 22 nt, Human
ggaugcagccacacccacgacc

SEQ ID NO: 1096451 - RNA, 20 nt, Human
ggcgaccaagugcccagccc

SEQ ID NO: 1096452 - RNA, 25 nt, Human
uaaacaagacucuguuaaaacuaga

SEQ ID NO: 1096453 - RNA, 27 nt, Human
ucacaguccuugguccuuggucccugg

SEQ ID NO: 1096454 - RNA, 20 nt, Human
ucauccagagaagcugagga

SEQ ID NO: 1096455 - RNA, 20 nt, Human
ucccuggaugcuuaaucuug

SEQ ID NO: 1096456 - RNA, 20 nt, Human
ucccuugucucucugcucua

SEQ ID NO: 1096457 - RNA, 21 nt, Human
ucuggcucugggcauguuccu

SEQ ID NO: 1096458 - RNA, 24 nt, Human
ucuguccuuccucccuugucucuc

SEQ ID NO: 1096459 - RNA, 25 nt, Human
ugaaaaggcaaaccacaaaauggag

SEQ ID NO: 1096460 - RNA, 18 nt, Human
ugaagacagcccggcaga

SEQ ID NO: 1096461 - RNA, 18 nt, Human
ugagaaacaccgccagag

SEQ ID NO: 1096462 - RNA, 18 nt, Human
ugagaacacacuccccaa

SEQ ID NO: 1096463 - RNA, 20 nt, Human
ugagaacacacuccccaaac

SEQ ID NO: 1096464 - RNA, 18 nt, Human
ugaugagaaacaccgcca

SEQ ID NO: 1096465 - RNA, 23 nt, Human
ugcaaaacauuaaaccaacaaag

SEQ ID NO: 1096466 - RNA, 19 nt, Human
uggcaggacagaggaggga

SEQ ID NO: 1096467 - RNA, 22 nt, Human
uggcgaccaagugcccagccca

SEQ ID NO: 1096468 - RNA, 19 nt, Human
uggcucugggcauguuccu

SEQ ID NO: 1096469 - RNA, 18 nt, Human
ugggcaucauccagagaa

SEQ ID NO: 1096470 - RNA, 22 nt, Human
uuaaacaagacucuguuaaaac

SEQ ID NO: 1096471 - RNA, 19 nt, Human
uugguccuugggcccagca

SEQ ID NO: 1096472 - RNA, 24 nt, Human
aaaauguugagauuacaagcauga

SEQ ID NO: 1096473 - RNA, 18 nt, Human
aaacccaggaccuagcga

SEQ ID NO: 1096474 - RNA, 24 nt, Human
aaagugcugggauuacaggcguga

SEQ ID NO: 1096475 - RNA, 26 nt, Human
aaauguugagauuacaagcaugagcc

SEQ ID NO: 1096476 - RNA, 22 nt, Human
aacaugcucauaucugucaaaa

SEQ ID NO: 1096477 - RNA, 18 nt, Human
aagagagaacacgacaca

SEQ ID NO: 1096478 - RNA, 18 nt, Human
aagcaugagccaccaagc

SEQ ID NO: 1096479 - RNA, 21 nt, Human
aagcaugagccaccaagcccg

SEQ ID NO: 1096480 - RNA, 25 nt, Human
aagugauucucgugccucagccucc

SEQ ID NO: 1096481 - RNA, 19 nt, Human
aagugcugggauuacaggc

SEQ ID NO: 1096482 - RNA, 19 nt, Human
aagugcugggauuacaggc

SEQ ID NO: 1096483 - RNA, 26 nt, Human
aagugcugggauuacaggcgugagcc

SEQ ID NO: 1096484 - RNA, 26 nt, Human
aauggcucccucuuguccucucuugg

SEQ ID NO: 1096485 - RNA, 20 nt, Human
acaagagagaacacgacaca

SEQ ID NO: 1096486 - RNA, 22 nt, Human
acaagagagaacacgacacaga

SEQ ID NO: 1096487 - RNA, 26 nt, Human
acacagaggugcuaaacggcgccaag

SEQ ID NO: 1096488 - RNA, 20 nt, Human
acagagcaauggaccaaugg

SEQ ID NO: 1096489 - RNA, 21 nt, Human
acaggcacccgccaccaugcc

SEQ ID NO: 1096490 - RNA, 20 nt, Human
acauuggccaggcuggucuu

SEQ ID NO: 1096491 - RNA, 19 nt, Human
accaggcuggagugcagug

SEQ ID NO: 1096492 - RNA, 18 nt, Human
acgccacaugcccucagc

SEQ ID NO: 1096493 - RNA, 24 nt, Human
acggaguuuugcucuguugcccag

SEQ ID NO: 1096494 - RNA, 20 nt, Human
acgggguuucacuacauugg

SEQ ID NO: 1096495 - RNA, 24 nt, Human
acgggguuucacuacauuggccag

SEQ ID NO: 1096496 - RNA, 23 nt, Human
agaugaucuccaacuuacgaagg

SEQ ID NO: 1096497 - RNA, 19 nt, Human
agauuacaagcaugagcca

SEQ ID NO: 1096498 - RNA, 27 nt, Human
agccagucccccagcgagggucaacac

SEQ ID NO: 1096499 - RNA, 21 nt, Human
agccuucccuccacagccccc

SEQ ID NO: 1096500 - RNA, 21 nt, Human
agcucaugcaaccuccgccuc

SEQ ID NO: 1096501 - RNA, 21 nt, Human
aggacggaagcacccggcuca

SEQ ID NO: 1096502 - RNA, 19 nt, Human
aggaggcggcugugacggc

SEQ ID NO: 1096503 - RNA, 25 nt, Human
aggcuggagugcaguggugugaucu

SEQ ID NO: 1096504 - RNA, 24 nt, Human
agggccagccagccugcagcccua

SEQ ID NO: 1096505 - RNA, 19 nt, Human
aggguuucgccauguuggc

SEQ ID NO: 1096506 - RNA, 24 nt, Human
aggugauacgcccgccuuggccuc

SEQ ID NO: 1096507 - RNA, 24 nt, Human
aggugaucugcccaccuuggccuc

SEQ ID NO: 1096508 - RNA, 22 nt, Human
aggugcuaaacggcgccaagcc

SEQ ID NO: 1096509 - RNA, 18 nt, Human
agguggguaauggggguu

SEQ ID NO: 1096510 - RNA, 20 nt, Human
aguccugccuuucccagcac

SEQ ID NO: 1096511 - RNA, 19 nt, Human
agugcaguggugugaucuc

SEQ ID NO: 1096512 - RNA, 21 nt, Human
agugcaguggugugaucucag

SEQ ID NO: 1096513 - RNA, 23 nt, Human
agugcaguggugugaucucagcu

SEQ ID NO: 1096514 - RNA, 24 nt, Human
agugcaguggugugaucucagcuc

SEQ ID NO: 1096515 - RNA, 18 nt, Human
agugcugggauuacaggc

SEQ ID NO: 1096516 - RNA, 18 nt, Human
aguggcuccgaggugacc

SEQ ID NO: 1096517 - RNA, 21 nt, Human
aguggcuccgaggugaccugc

SEQ ID NO: 1096518 - RNA, 19 nt, Human
aguggugcaaucucggcuc

SEQ ID NO: 1096519 - RNA, 23 nt, Human
aguggugugaucucagcucaugc

SEQ ID NO: 1096520 - RNA, 26 nt, Human
auaauaaucuccccaaaguaaacucu

SEQ ID NO: 1096521 - RNA, 18 nt, Human
auaggguuucgccauguu

SEQ ID NO: 1096522 - RNA, 24 nt, Human
auaggguuucgccauguuggccag

SEQ ID NO: 1096523 - RNA, 19 nt, Human
aucuccccaaaguaaacuc

SEQ ID NO: 1096524 - RNA, 24 nt, Human
auuuuuguauuuuuaguagagacg

SEQ ID NO: 1096525 - RNA, 25 nt, Human
auuuuuguauuuuuuaguagagaua

SEQ ID NO: 1096526 - RNA, 24 nt, Human
caaaauguugagauuacaagcaug

SEQ ID NO: 1096527 - RNA, 24 nt, Human
caaagugcugggauuacaggcgug

SEQ ID NO: 1096528 - RNA, 23 nt, Human
caagugacucaccugggggcucc

SEQ ID NO: 1096529 - RNA, 22 nt, Human
caagugauucuccugccucggc

SEQ ID NO: 1096530 - RNA, 22 nt, Human
caagugauucucgugccucagc

SEQ ID NO: 1096531 - RNA, 18 nt, Human
cacacaccacccaaaacc

SEQ ID NO: 1096532 - RNA, 21 nt, Human
cacaccacccaaaacccagga

SEQ ID NO: 1096533 - RNA, 19 nt, Human
cacagccuucagcccuccc

SEQ ID NO: 1096534 - RNA, 24 nt, Human
caccaugcccggcuaauuuuugua

SEQ ID NO: 1096535 - RNA, 24 nt, Human
caccaugcccggcuaauuuuugua

SEQ ID NO: 1096536 - RNA, 25 nt, Human
caccccuucauccaaggagaccucu

SEQ ID NO: 1096537 - RNA, 21 nt, Human
cacccuggaccagcaagcugg

SEQ ID NO: 1096538 - RNA, 18 nt, Human
caccgcgcccggcccggc

SEQ ID NO: 1096539 - RNA, 20 nt, Human
cacggaaaacugcaucuaac

SEQ ID NO: 1096540 - RNA, 21 nt, Human
cacuacauuggccaggcuggu

SEQ ID NO: 1096541 - RNA, 24 nt, Human
cacuacauuggccaggcuggucuu

SEQ ID NO: 1096542 - RNA, 22 nt, Human
cacucaccccauaccagggugc

SEQ ID NO: 1096543 - RNA, 21 nt, Human
cacugcaaccucugccucccg

SEQ ID NO: 1096544 - RNA, 23 nt, Human
cacugcaaccucugccucccggg

SEQ ID NO: 1096545 - RNA, 21 nt, Human
cagccagaauugccuaaaaac

SEQ ID NO: 1096546 - RNA, 27 nt, Human
cagccccuccggcucccaguccugccu

SEQ ID NO: 1096547 - RNA, 20 nt, Human
caggacacaaccccauugaa

SEQ ID NO: 1096548 - RNA, 18 nt, Human
caggaccuagcgaagaga

SEQ ID NO: 1096549 - RNA, 27 nt, Human
caggcaccccuucauccaaggagaccu

SEQ ID NO: 1096550 - RNA, 19 nt, Human
caggugauacgcccgcccc

SEQ ID NO: 1096551 - RNA, 25 nt, Human
caguagcugggacuacaggcacccg

SEQ ID NO: 1096552 - RNA, 24 nt, Human
cauguuggccaggcuggucuugaa

SEQ ID NO: 1096553 - RNA, 22 nt, Human
cauuggccaggcuggucuugaa

SEQ ID NO: 1096554 - RNA, 18 nt, Human
ccaaacucuuccucccuc

SEQ ID NO: 1096555 - RNA, 23 nt, Human
ccaaacucuuccucccuccagug

SEQ ID NO: 1096556 - RNA, 22 nt, Human
ccaaaguaaacucugcaaguga

SEQ ID NO: 1096557 - RNA, 20 nt, Human
ccaaagugcugggauuacag

SEQ ID NO: 1096558 - RNA, 22 nt, Human
ccaaagugcugggauuacaggc

SEQ ID NO: 1096559 - RNA, 22 nt, Human
ccaaagugcugggauuacaggc

SEQ ID NO: 1096560 - RNA, 24 nt, Human
ccaaagugcugggauuacaggcgu

SEQ ID NO: 1096561 - RNA, 22 nt, Human
ccaccgcgcccggcccggcaaa

SEQ ID NO: 1096562 - RNA, 22 nt, Human
ccagcaagcuggggcugccuga

SEQ ID NO: 1096563 - RNA, 21 nt, Human
ccaggccaucuggucagugcc

SEQ ID NO: 1096564 - RNA, 22 nt, Human
ccaguagcugggacuacaggca

SEQ ID NO: 1096565 - RNA, 18 nt, Human
ccagucccccagcgaggg

SEQ ID NO: 1096566 - RNA, 19 nt, Human
ccauguuggccaggcuggu

SEQ ID NO: 1096567 - RNA, 21 nt, Human
ccauguuggccaggcuggucu

SEQ ID NO: 1096568 - RNA, 23 nt, Human
cccaaaacccaggaccuagcgaa

SEQ ID NO: 1096569 - RNA, 21 nt, Human
cccaaaguaaacucugcaagu

SEQ ID NO: 1096570 - RNA, 22 nt, Human
cccacugugggaagccugaggc

SEQ ID NO: 1096571 - RNA, 23 nt, Human
cccauguagcugggauuauaggu

SEQ ID NO: 1096572 - RNA, 24 nt, Human
cccauguagcugggauuauaggug

SEQ ID NO: 1096573 - RNA, 23 nt, Human
ccccaaacucuuccucccuccag

SEQ ID NO: 1096574 - RNA, 18 nt, Human
ccccagaaacuccuggcu

SEQ ID NO: 1096575 - RNA, 22 nt, Human
ccccagaaacuccuggcuuuca

SEQ ID NO: 1096576 - RNA, 21 nt, Human
cccccaaacucuuccucccuc

SEQ ID NO: 1096577 - RNA, 22 nt, Human
cccgccuuggccucccaaagug

SEQ ID NO: 1096578 - RNA, 20 nt, Human
cccggguucaagugauucuc

SEQ ID NO: 1096579 - RNA, 20 nt, Human
cccggguucaagugauucuc

SEQ ID NO: 1096580 - RNA, 23 nt, Human
cccggguucaagugauucuccuc

SEQ ID NO: 1096581 - RNA, 23 nt, Human
cccggguucaagugauucuccug

SEQ ID NO: 1096582 - RNA, 26 nt, Human
ccgaagccccuuccccgaggagacca

SEQ ID NO: 1096583 - RNA, 24 nt, Human
ccgccucccggguucaagugauuc

SEQ ID NO: 1096584 - RNA, 24 nt, Human
ccggcggccuuccugucuacuccc

SEQ ID NO: 1096585 - RNA, 24 nt, Human
ccucccggguucaagugauucucc

SEQ ID NO: 1096586 - RNA, 21 nt, Human
ccuccggcucccaguccugcc

SEQ ID NO: 1096587 - RNA, 18 nt, Human
ccucuuguccucucuugg

SEQ ID NO: 1096588 - RNA, 19 nt, Human
ccugaccucaggugauacg

SEQ ID NO: 1096589 - RNA, 22 nt, Human
ccugaccucaggugauacgccc

SEQ ID NO: 1096590 - RNA, 24 nt, Human
ccugaccucaggugaucugcccac

SEQ ID NO: 1096591 - RNA, 23 nt, Human
ccuggaccagcaagcuggggcug

SEQ ID NO: 1096592 - RNA, 19 nt, Human
cgaagccccuuccccgagg

SEQ ID NO: 1096593 - RNA, 18 nt, Human
cgccaagccuucccucca

SEQ ID NO: 1096594 - RNA, 24 nt, Human
cgccauguuggccaggcuggucuu

SEQ ID NO: 1096595 - RNA, 27 nt, Human
cgccauguuggccaggcuggucuugaa

SEQ ID NO: 1096596 - RNA, 19 nt, Human
cgcccggcccggcaaauga

SEQ ID NO: 1096597 - RNA, 24 nt, Human
cgcuggccuugugcacacaccacc

SEQ ID NO: 1096598 - RNA, 24 nt, Human
cggaguuuugcucuguugcccagg

SEQ ID NO: 1096599 - RNA, 23 nt, Human
cguggugaacacuugcgggcgcc

SEQ ID NO: 1096600 - RNA, 24 nt, Human
cuaaaaacaaucguccuccauccu

SEQ ID NO: 1096601 - RNA, 24 nt, Human
cuaccaguagcugggacuacaggc

SEQ ID NO: 1096602 - RNA, 24 nt, Human
cucacugcaaccucugccucccgg

SEQ ID NO: 1096603 - RNA, 24 nt, Human
cucagccucccauguagcugggau

SEQ ID NO: 1096604 - RNA, 24 nt, Human
cucaggugaucugcccaccuuggc

SEQ ID NO: 1096605 - RNA, 24 nt, Human
cucaugcaaccuccgccucccggg

SEQ ID NO: 1096606 - RNA, 21 nt, Human
cucccaguccugccuuuccca

SEQ ID NO: 1096607 - RNA, 20 nt, Human
cucccggguucaagugauuc

SEQ ID NO: 1096608 - RNA, 20 nt, Human
cucccggguucaagugauuc

SEQ ID NO: 1096609 - RNA, 23 nt, Human
cucggccuaccaguagcugggac

SEQ ID NO: 1096610 - RNA, 25 nt, Human
cucgugccucagccucccauguagc

SEQ ID NO: 1096611 - RNA, 21 nt, Human
cucuacacggaauggcucccu

SEQ ID NO: 1096612 - RNA, 18 nt, Human
cucuguugcccaggcugg

SEQ ID NO: 1096613 - RNA, 19 nt, Human
cucuguugcccaggcugga

SEQ ID NO: 1096614 - RNA, 23 nt, Human
cugcaaccucugccucccggguu

SEQ ID NO: 1096615 - RNA, 24 nt, Human
cugcaaccucugccucccggguuc

SEQ ID NO: 1096616 - RNA, 23 nt, Human
cugccucccggguucaagugauu

SEQ ID NO: 1096617 - RNA, 19 nt, Human
cugccucugcccgcagccc

SEQ ID NO: 1096618 - RNA, 24 nt, Human
cuggagugcaguggugugaucuca

SEQ ID NO: 1096619 - RNA, 20 nt, Human
cugucucuuuguccucuucc

SEQ ID NO: 1096620 - RNA, 28 nt, Human
cuuguccucucuuggcaagggccagcca

SEQ ID NO: 1096621 - RNA, 24 nt, Human
gaccaggcuggagugcaguggugu

SEQ ID NO: 1096622 - RNA, 18 nt, Human
gaccuagcgaagagaggc

SEQ ID NO: 1096623 - RNA, 24 nt, Human
gaccucaggugauacgcccgccuu

SEQ ID NO: 1096624 - RNA, 24 nt, Human
gaccucaggugaucugcccaccuu

SEQ ID NO: 1096625 - RNA, 24 nt, Human
gacuacaggcacccgccaccaugc

SEQ ID NO: 1096626 - RNA, 20 nt, Human
gagccaccaagcccggucca

SEQ ID NO: 1096627 - RNA, 18 nt, Human
gauuacaagcaugagcca

SEQ ID NO: 1096628 - RNA, 18 nt, Human
gauuacaggcgugagcca

SEQ ID NO: 1096629 - RNA, 20 nt, Human
gauuacaggcgugagccacc

SEQ ID NO: 1096630 - RNA, 22 nt, Human
gauuacaggcgugagccaccgc

SEQ ID NO: 1096631 - RNA, 22 nt, Human
gauuauaggugccugucaccau

SEQ ID NO: 1096632 - RNA, 21 nt, Human
gauucucgugccucagccucc

SEQ ID NO: 1096633 - RNA, 22 nt, Human
gcaaccuccgccucccggguuc

SEQ ID NO: 1096634 - RNA, 22 nt, Human
gcaaccucugccucccggguuc

SEQ ID NO: 1096635 - RNA, 20 nt, Human
gcaagggccagccagccugc

SEQ ID NO: 1096636 - RNA, 22 nt, Human
gcacacaccacccaaaacccag

SEQ ID NO: 1096637 - RNA, 18 nt, Human
gccagccugcagcccuag

SEQ ID NO: 1096638 - RNA, 21 nt, Human
gccauggagaugaguuggacc

SEQ ID NO: 1096639 - RNA, 24 nt, Human
gccauguuggccaggcuggucuug

SEQ ID NO: 1096640 - RNA, 22 nt, Human
gcccggcuaauuuuuguauuuu

SEQ ID NO: 1096641 - RNA, 22 nt, Human
gcccggcuaauuuuuguauuuu

SEQ ID NO: 1096642 - RNA, 20 nt, Human
gcccucccugucuccugcuc

SEQ ID NO: 1096643 - RNA, 20 nt, Human
gcccugaguggcuccgaggu

SEQ ID NO: 1096644 - RNA, 19 nt, Human
gccucggccuaccaguagc

SEQ ID NO: 1096645 - RNA, 18 nt, Human
gccugaggccaugugaag

SEQ ID NO: 1096646 - RNA, 26 nt, Human
gccuucccuccacagcccccaaacuc

SEQ ID NO: 1096647 - RNA, 22 nt, Human
gccuuggccucccaaagugcug

SEQ ID NO: 1096648 - RNA, 19 nt, Human
gcuccaggccaucugguca

SEQ ID NO: 1096649 - RNA, 25 nt, Human
gcucugucucuuuguccucuuccug

SEQ ID NO: 1096650 - RNA, 20 nt, Human
gcucuguugcccaggcugga

SEQ ID NO: 1096651 - RNA, 24 nt, Human
gcucuguugcccaggcuggaguaa

SEQ ID NO: 1096652 - RNA, 20 nt, Human
gcugcacagccuucagcccu

SEQ ID NO: 1096653 - RNA, 23 nt, Human
gcuggucuugaacuccugaccuc

SEQ ID NO: 1096654 - RNA, 23 nt, Human
gcuggucuugaacuccugaccuc

SEQ ID NO: 1096655 - RNA, 18 nt, Human
ggacggaagcacccggcu

SEQ ID NO: 1096656 - RNA, 24 nt, Human
ggagagccggcagcagagcccgag

SEQ ID NO: 1096657 - RNA, 25 nt, Human
ggagcaccugggguggggcgaaguc

SEQ ID NO: 1096658 - RNA, 22 nt, Human
ggagccccuucugugggcgccc

SEQ ID NO: 1096659 - RNA, 23 nt, Human
ggagccccuucugugggcgcccu

SEQ ID NO: 1096660 - RNA, 20 nt, Human
ggcccggcaaaugaauucuu

SEQ ID NO: 1096661 - RNA, 22 nt, Human
ggcuggagugcaguggugugau

SEQ ID NO: 1096662 - RNA, 24 nt, Human
ggcuggucuugaacuccugaccuc

SEQ ID NO: 1096663 - RNA, 24 nt, Human
ggcuggucuugaacuccugaccuc

SEQ ID NO: 1096664 - RNA, 18 nt, Human
gggggcauuaagugcuuu

SEQ ID NO: 1096665 - RNA, 23 nt, Human
gggguuucacuacauuggccagg

SEQ ID NO: 1096666 - RNA, 22 nt, Human
ggguucaagugauucuccugcc

SEQ ID NO: 1096667 - RNA, 22 nt, Human
ggguuucacuacauuggccagg

SEQ ID NO: 1096668 - RNA, 21 nt, Human
ggguuucgccauguuggccag

SEQ ID NO: 1096669 - RNA, 22 nt, Human
ggguuucgccauguuggccagg

SEQ ID NO: 1096670 - RNA, 19 nt, Human
ggucuugaacuccugaccu

SEQ ID NO: 1096671 - RNA, 19 nt, Human
ggucuugaacuccugaccu

SEQ ID NO: 1096672 - RNA, 24 nt, Human
ggugauacgcccgccuuggccucc

SEQ ID NO: 1096673 - RNA, 18 nt, Human
guagcugggacuacaggc

SEQ ID NO: 1096674 - RNA, 24 nt, Human
guagcugggauuauaggugccugu

SEQ ID NO: 1096675 - RNA, 24 nt, Human
gugauucucgugccucagccuccc

SEQ ID NO: 1096676 - RNA, 21 nt, Human
gugcacacaccacccaaaacc

SEQ ID NO: 1096677 - RNA, 23 nt, Human
gugccucagccucccauguagcu

SEQ ID NO: 1096678 - RNA, 22 nt, Human
guggugaacacuugcgggcgcc

SEQ ID NO: 1096679 - RNA, 19 nt, Human
guugaccaggcuggagugc

SEQ ID NO: 1096680 - RNA, 24 nt, Human
guuuugcucuguugcccaggcugg

SEQ ID NO: 1096681 - RNA, 22 nt, Human
uaaguggugcaaucucggcuca

SEQ ID NO: 1096682 - RNA, 24 nt, Human
uaauuuuuguauuuuuaguagaga

SEQ ID NO: 1096683 - RNA, 25 nt, Human
uaauuuuuguauuuuuuaguagaga

SEQ ID NO: 1096684 - RNA, 20 nt, Human
uacaagcaugagccaccaag

SEQ ID NO: 1096685 - RNA, 23 nt, Human
uacaggcacccgccaccaugccc

SEQ ID NO: 1096686 - RNA, 23 nt, Human
uacaggcgugagccaccgcgccc

SEQ ID NO: 1096687 - RNA, 24 nt, Human
uacauuggccaggcuggucuugaa

SEQ ID NO: 1096688 - RNA, 22 nt, Human
uacccagagcacgccacaugcc

SEQ ID NO: 1096689 - RNA, 26 nt, Human
uaccccauuuauccauuucccuuuca

SEQ ID NO: 1096690 - RNA, 22 nt, Human
uagagauaggguuucgccaugu

SEQ ID NO: 1096691 - RNA, 20 nt, Human
uaggcacccucacucacccc

SEQ ID NO: 1096692 - RNA, 21 nt, Human
uaggcacccucacucacccca

SEQ ID NO: 1096693 - RNA, 24 nt, Human
uaggguuucgccauguuggccagg

SEQ ID NO: 1096694 - RNA, 19 nt, Human
uaggugccugucaccaugc

SEQ ID NO: 1096695 - RNA, 23 nt, Human
uaguagagacgggguuucacuac

SEQ ID NO: 1096696 - RNA, 24 nt, Human
uaguagagacgggguuucacuaca

SEQ ID NO: 1096697 - RNA, 24 nt, Human
uaguagagauaggguuucgccaug

SEQ ID NO: 1096698 - RNA, 19 nt, Human
ucaagugauucuccugccu

SEQ ID NO: 1096699 - RNA, 24 nt, Human
ucacugcaaccucugccucccggg

SEQ ID NO: 1096700 - RNA, 25 nt, Human
ucacugcaaccucugccucccgggu

SEQ ID NO: 1096701 - RNA, 23 nt, Human
ucagcccucccugucuccugcuc

SEQ ID NO: 1096702 - RNA, 28 nt, Human
ucaggagccccuucugugggcgcccucu

SEQ ID NO: 1096703 - RNA, 18 nt, Human
ucaggucuagcuccaggc

SEQ ID NO: 1096704 - RNA, 23 nt, Human
ucagugcccacuucugagccaag

SEQ ID NO: 1096705 - RNA, 23 nt, Human
ucaugcaaccuccgccucccggg

SEQ ID NO: 1096706 - RNA, 24 nt, Human
uccacagcccccaaacucuuccuc

SEQ ID NO: 1096707 - RNA, 22 nt, Human
uccaguggcugggaaaccccag

SEQ ID NO: 1096708 - RNA, 24 nt, Human
ucccaaagugcugggauuacaggc

SEQ ID NO: 1096709 - RNA, 23 nt, Human
ucccauguagcugggauuauagg

SEQ ID NO: 1096710 - RNA, 18 nt, Human
uccccgaggagaccaggc

SEQ ID NO: 1096711 - RNA, 21 nt, Human
ucccggguucaagugauucuc

SEQ ID NO: 1096712 - RNA, 21 nt, Human
ucccggguucaagugauucuc

SEQ ID NO: 1096713 - RNA, 24 nt, Human
ucccggguucaagugauucuccug

SEQ ID NO: 1096714 - RNA, 24 nt, Human
ucccggguucaagugauucucgug

SEQ ID NO: 1096715 - RNA, 20 nt, Human
ucccuccaguggcugggaaa

SEQ ID NO: 1096716 - RNA, 22 nt, Human
ucgccauguuggccaggcuggu

SEQ ID NO: 1096717 - RNA, 24 nt, Human
ucgccauguuggccaggcuggucu

SEQ ID NO: 1096718 - RNA, 22 nt, Human
ucuaacccugacacacacaggc

SEQ ID NO: 1096719 - RNA, 19 nt, Human
ucuacaagugacucaccug

SEQ ID NO: 1096720 - RNA, 22 nt, Human
ucuacacggaauggcucccucu

SEQ ID NO: 1096721 - RNA, 19 nt, Human
ucucaggccagccagaauu

SEQ ID NO: 1096722 - RNA, 23 nt, Human
ucuccaacuuacgaagguuugac

SEQ ID NO: 1096723 - RNA, 23 nt, Human
ucuccccaaaguaaacucugcaa

SEQ ID NO: 1096724 - RNA, 24 nt, Human
ucugcccaccuuggccucccaaaa

SEQ ID NO: 1096725 - RNA, 21 nt, Human
ucugucucuuuguccucuucc

SEQ ID NO: 1096726 - RNA, 19 nt, Human
ucuguugaccaggcuggag

SEQ ID NO: 1096727 - RNA, 18 nt, Human
ucuguugcccaggcugga

SEQ ID NO: 1096728 - RNA, 23 nt, Human
ucuugaacuccugaccucaggug

SEQ ID NO: 1096729 - RNA, 23 nt, Human
ucuugaacuccugaccucaggug

SEQ ID NO: 1096730 - RNA, 22 nt, Human
ucuugcucuguugaccaggcug

SEQ ID NO: 1096731 - RNA, 23 nt, Human
ucuugcucuguugaccaggcugg

SEQ ID NO: 1096732 - RNA, 24 nt, Human
ucuugcucuguugaccaggcugga

SEQ ID NO: 1096733 - RNA, 24 nt, Human
ugaccaggcuggagugcaguggug

SEQ ID NO: 1096734 - RNA, 18 nt, Human
ugaccucaggugauacgc

SEQ ID NO: 1096735 - RNA, 24 nt, Human
ugaccucaggugauacgcccgccu

SEQ ID NO: 1096736 - RNA, 18 nt, Human
ugaccucaggugaucugc

SEQ ID NO: 1096737 - RNA, 20 nt, Human
ugaccucaggugaucugccc

SEQ ID NO: 1096738 - RNA, 21 nt, Human
ugaccucaggugaucugccca

SEQ ID NO: 1096739 - RNA, 24 nt, Human
ugaccucaggugaucugcccaccu

SEQ ID NO: 1096740 - RNA, 22 nt, Human
ugagauggagucuugcucuguu

SEQ ID NO: 1096741 - RNA, 22 nt, Human
ugagauuacaagcaugagccac

SEQ ID NO: 1096742 - RNA, 24 nt, Human
ugagauuacaagcaugagccacca

SEQ ID NO: 1096743 - RNA, 24 nt, Human
ugaucugcccaccuuggccuccca

SEQ ID NO: 1096744 - RNA, 20 nt, Human
ugauucuccugccucggccu

SEQ ID NO: 1096745 - RNA, 18 nt, Human
ugcacacaccacccaaaa

SEQ ID NO: 1096746 - RNA, 19 nt, Human
ugcacacaccacccaaaac

SEQ ID NO: 1096747 - RNA, 19 nt, Human
ugcacacaccacccaaaac

SEQ ID NO: 1096748 - RNA, 22 nt, Human
ugcaguggugugaucucagcuc

SEQ ID NO: 1096749 - RNA, 20 nt, Human
ugcccaggcuggaguaagug

SEQ ID NO: 1096750 - RNA, 23 nt, Human
ugcccaggcuggaguaaguggug

SEQ ID NO: 1096751 - RNA, 24 nt, Human
ugcccggcuaauuuuuguauuuuu

SEQ ID NO: 1096752 - RNA, 25 nt, Human
ugcccggcuaauuuuuguauuuuuu

SEQ ID NO: 1096753 - RNA, 22 nt, Human
ugcccucagcucccugaggccu

SEQ ID NO: 1096754 - RNA, 24 nt, Human
ugccucagccucccauguagcugg

SEQ ID NO: 1096755 - RNA, 20 nt, Human
ugccucggccuaccaguagc

SEQ ID NO: 1096756 - RNA, 18 nt, Human
ugccucugcccgcagccc

SEQ ID NO: 1096757 - RNA, 22 nt, Human
ugcucuguugcccaggcuggag

SEQ ID NO: 1096758 - RNA, 24 nt, Human
ugcugggauuacaggcgugagcca

SEQ ID NO: 1096759 - RNA, 19 nt, Human
uggagugcaguggugugau

SEQ ID NO: 1096760 - RNA, 24 nt, Human
uggagugcaguggugugaucucag

SEQ ID NO: 1096761 - RNA, 24 nt, Human
uggcaagggccagccagccugcag

SEQ ID NO: 1096762 - RNA, 24 nt, Human
uggccaggcuggucuugaacuccu

SEQ ID NO: 1096763 - RNA, 24 nt, Human
uggccaggcuggucuugaacuccu

SEQ ID NO: 1096764 - RNA, 20 nt, Human
ugggaagccugaggccaugu

SEQ ID NO: 1096765 - RNA, 21 nt, Human
ugggacuacaggcacccgcca

SEQ ID NO: 1096766 - RNA, 22 nt, Human
ugggacuacaggcacccgccac

SEQ ID NO: 1096767 - RNA, 24 nt, Human
ugggacuacaggcacccgccacca

SEQ ID NO: 1096768 - RNA, 25 nt, Human
ugggacuacaggcacccgccaccau

SEQ ID NO: 1096769 - RNA, 18 nt, Human
ugggauuacaggcgugag

SEQ ID NO: 1096770 - RNA, 19 nt, Human
ugggauuacaggcgugagc

SEQ ID NO: 1096771 - RNA, 21 nt, Human
ugggauuacaggcgugagcca

SEQ ID NO: 1096772 - RNA, 22 nt, Human
ugggauuacaggcgugagccac

SEQ ID NO: 1096773 - RNA, 23 nt, Human
ugggauuacaggcgugagccacc

SEQ ID NO: 1096774 - RNA, 24 nt, Human
ugggauuacaggcgugagccaccg

SEQ ID NO: 1096775 - RNA, 22 nt, Human
ugggauuauaggugccugucac

SEQ ID NO: 1096776 - RNA, 24 nt, Human
ugggauuauaggugccugucacca

SEQ ID NO: 1096777 - RNA, 25 nt, Human
ugggauuauaggugccugucaccau

SEQ ID NO: 1096778 - RNA, 24 nt, Human
ugggcgcccucuaggcacccuuuu

SEQ ID NO: 1096779 - RNA, 20 nt, Human
ugggggagggaaaggaucag

SEQ ID NO: 1096780 - RNA, 19 nt, Human
uggggugggggaccuuggg

SEQ ID NO: 1096781 - RNA, 21 nt, Human
uggggugggggaccuuggggu

SEQ ID NO: 1096782 - RNA, 22 nt, Human
uggggugggggaccuugggguu

SEQ ID NO: 1096783 - RNA, 20 nt, Human
ugggguugggggagggaaag

SEQ ID NO: 1096784 - RNA, 26 nt, Human
uggguggccaugcgcggagcaccugg

SEQ ID NO: 1096785 - RNA, 18 nt, Human
uguagcugggauuauagg

SEQ ID NO: 1096786 - RNA, 21 nt, Human
uguauuuuuaguagagacggg

SEQ ID NO: 1096787 - RNA, 20 nt, Human
ugugaaggggacccccuggg

SEQ ID NO: 1096788 - RNA, 18 nt, Human
ugugcacacaccacccaa

SEQ ID NO: 1096789 - RNA, 21 nt, Human
uguugaccaggcuggagugca

SEQ ID NO: 1096790 - RNA, 24 nt, Human
uguugagauuacaagcaugagcca

SEQ ID NO: 1096791 - RNA, 19 nt, Human
uguugcccaggcuggagua

SEQ ID NO: 1096792 - RNA, 18 nt, Human
uuaguagagacgggguuu

SEQ ID NO: 1096793 - RNA, 21 nt, Human
uuaguagagacgggguuucac

SEQ ID NO: 1096794 - RNA, 22 nt, Human
uuaguagagacgggguuucacu

SEQ ID NO: 1096795 - RNA, 18 nt, Human
uuaguagagauaggguuu

SEQ ID NO: 1096796 - RNA, 22 nt, Human
uuaguagagauaggguuucgcc

SEQ ID NO: 1096797 - RNA, 24 nt, Human
uuaguagagauaggguuucgccau

SEQ ID NO: 1096798 - RNA, 21 nt, Human
uucaagugauucuccugccuc

SEQ ID NO: 1096799 - RNA, 21 nt, Human
uucaagugauucuccugccuc

SEQ ID NO: 1096800 - RNA, 25 nt, Human
uucaagugauucuccugccucggcc

SEQ ID NO: 1096801 - RNA, 23 nt, Human
uucaagugauucucgugccucag

SEQ ID NO: 1096802 - RNA, 20 nt, Human
uuccccgaggagaccaggcc

SEQ ID NO: 1096803 - RNA, 21 nt, Human
uugagauggagucuugcucug

SEQ ID NO: 1096804 - RNA, 18 nt, Human
uugcgggcgccugugagg

SEQ ID NO: 1096805 - RNA, 22 nt, Human
uugcucuguugcccaggcugga

SEQ ID NO: 1096806 - RNA, 24 nt, Human
uugcucuguugcccaggcuggagu

SEQ ID NO: 1096807 - RNA, 18 nt, Human
uuggccucccaaagugcu

SEQ ID NO: 1096808 - RNA, 24 nt, Human
uugugcacacaccacccaaaaccc

SEQ ID NO: 1096809 - RNA, 24 nt, Human
uuucgccauguuggccaggcuggu

SEQ ID NO: 1096810 - RNA, 19 nt, Human
uuugggcucauccaugggg

SEQ ID NO: 1096811 - RNA, 23 nt, Human
uuuguucacacuaaauauacauu

SEQ ID NO: 1096812 - RNA, 24 nt, Human
uuuugcucuguugcccaggcugga

SEQ ID NO: 1096813 - RNA, 24 nt, Human
uuuuuaguagagacgggguuucac

SEQ ID NO: 1096814 - RNA, 24 nt, Human
uuuuuaguagagauaggguuucgc

SEQ ID NO: 1096815 - RNA, 20 nt, Human
uuuuuguauuuuuaguagag

SEQ ID NO: 1096816 - RNA, 21 nt, Human
uuuuuguauuuuuuaguagag

SEQ ID NO: 1096817 - RNA, 24 nt, Human
uuuuuuaguagagauaggguuucg

SEQ ID NO: 1096818 - RNA, 24 nt, Human
uuuuuuuuuuuugagauggagucu

SEQ ID NO: 1096819 - RNA, 22 nt, Human
uuuuuuuuuuuuuugagaugga

SEQ ID NO: 1096820 - RNA, 18 nt, Human
uuuuuuuuuuuuuuuuug

SEQ ID NO: 1096821 - RNA, 24 nt, Human
aaaaaauuccccccuugaggauca

SEQ ID NO: 1096822 - RNA, 21 nt, Human
aaacaucaucacaagcaagcc

SEQ ID NO: 1096823 - RNA, 22 nt, Human
aaagaggcaguucuggcggccc

SEQ ID NO: 1096824 - RNA, 20 nt, Human
aaggaaaugaggccgagagg

SEQ ID NO: 1096825 - RNA, 21 nt, Human
aaggaaaugaggccgagaggu

SEQ ID NO: 1096826 - RNA, 23 nt, Human
aaggaaaugaggccgagagguuc

SEQ ID NO: 1096827 - RNA, 19 nt, Human
acagcucagccauugcucc

SEQ ID NO: 1096828 - RNA, 21 nt, Human
accacuaaaggcauccaagac

SEQ ID NO: 1096829 - RNA, 22 nt, Human
acccauccaccaugccuccccu

SEQ ID NO: 1096830 - RNA, 20 nt, Human
accucauuuggaaauaggau

SEQ ID NO: 1096831 - RNA, 19 nt, Human
accuccccuccuguuccac

SEQ ID NO: 1096832 - RNA, 20 nt, Human
accucucuucuuucccuuug

SEQ ID NO: 1096833 - RNA, 21 nt, Human
accugcccacacugccccucc

SEQ ID NO: 1096834 - RNA, 18 nt, Human
acuaaaggcauccaagac

SEQ ID NO: 1096835 - RNA, 20 nt, Human
agauuccuuuucuuuuucuu

SEQ ID NO: 1096836 - RNA, 19 nt, Human
agccaaacaccugugaccc

SEQ ID NO: 1096837 - RNA, 19 nt, Human
aggaggggaaagaggcagu

SEQ ID NO: 1096838 - RNA, 20 nt, Human
aggucacuguccaggacucc

SEQ ID NO: 1096839 - RNA, 23 nt, Human
auccccauuuugcagauaaggaa

SEQ ID NO: 1096840 - RNA, 22 nt, Human
caacuccucugccagggccccc

SEQ ID NO: 1096841 - RNA, 21 nt, Human
caagccaaacaccugugaccc

SEQ ID NO: 1096842 - RNA, 25 nt, Human
cacaagcaagccuuccagcaaggug

SEQ ID NO: 1096843 - RNA, 22 nt, Human
cacccugucuuuccuugccauu

SEQ ID NO: 1096844 - RNA, 21 nt, Human
caccucuuuucuccuggcggg

SEQ ID NO: 1096845 - RNA, 19 nt, Human
caccugcaaacucuccagc

SEQ ID NO: 1096846 - RNA, 20 nt, Human
caccugugacccauccacca

SEQ ID NO: 1096847 - RNA, 24 nt, Human
caccuucucuguucucccccuacc

SEQ ID NO: 1096848 - RNA, 23 nt, Human
cacucccuuccuccuucuugcca

SEQ ID NO: 1096849 - RNA, 22 nt, Human
cacugucagcucccugcacccc

SEQ ID NO: 1096850 - RNA, 18 nt, Human
cagcaaagugagccccgc

SEQ ID NO: 1096851 - RNA, 18 nt, Human
cagcaaggugagccccac

SEQ ID NO: 1096852 - RNA, 22 nt, Human
cagcgccugcaaagagagcgau

SEQ ID NO: 1096853 - RNA, 18 nt, Human
cagcucccugcacccccc

SEQ ID NO: 1096854 - RNA, 20 nt, Human
ccaaacaccugugacccauc

SEQ ID NO: 1096855 - RNA, 24 nt, Human
ccacacugccccucccugugccug

SEQ ID NO: 1096856 - RNA, 23 nt, Human
ccaccacugcccucauccaccug

SEQ ID NO: 1096857 - RNA, 24 nt, Human
ccaccugcaaacucuccagcaaag

SEQ ID NO: 1096858 - RNA, 20 nt, Human
ccacugcccucauccaccug

SEQ ID NO: 1096859 - RNA, 20 nt, Human
ccacugggccuagggggcaa

SEQ ID NO: 1096860 - RNA, 23 nt, Human
ccaggacuccucgcaggcagcag

SEQ ID NO: 1096861 - RNA, 20 nt, Human
ccagugucaacacccugucu

SEQ ID NO: 1096862 - RNA, 19 nt, Human
cccacagaggacauugguc

SEQ ID NO: 1096863 - RNA, 22 nt, Human
cccacuggcaugaccaugacaa

SEQ ID NO: 1096864 - RNA, 19 nt, Human
ccccccaccucuuuucucc

SEQ ID NO: 1096865 - RNA, 20 nt, Human
ccccccuugaggaucacuac

SEQ ID NO: 1096866 - RNA, 20 nt, Human
cccccucugcgaaucacucc

SEQ ID NO: 1096867 - RNA, 27 nt, Human
cccccuugucuucacacgccuccuugu

SEQ ID NO: 1096868 - RNA, 19 nt, Human
cccucugcgaaucacuccc

SEQ ID NO: 1096869 - RNA, 20 nt, Human
cccucugcgaaucacucccu

SEQ ID NO: 1096870 - RNA, 21 nt, Human
cccugaaacgucucccucuca

SEQ ID NO: 1096871 - RNA, 25 nt, Human
cccuucccacuccugccucugagag

SEQ ID NO: 1096872 - RNA, 26 nt, Human
cccuucccuaaaagccucuccuccug

SEQ ID NO: 1096873 - RNA, 21 nt, Human
cccuuccuccuucuugccacc

SEQ ID NO: 1096874 - RNA, 21 nt, Human
ccuaaaagccucuccuccugc

SEQ ID NO: 1096875 - RNA, 19 nt, Human
ccucuggauccuccucccc

SEQ ID NO: 1096876 - RNA, 21 nt, Human
ccugcccugcagcaucugggg

SEQ ID NO: 1096877 - RNA, 23 nt, Human
ccugugcugaucacuuccaaaga

SEQ ID NO: 1096878 - RNA, 21 nt, Human
ccuguuccacugucagcuccc

SEQ ID NO: 1096879 - RNA, 20 nt, Human
ccuugccauuagcauuuaaa

SEQ ID NO: 1096880 - RNA, 19 nt, Human
ccuuuucuuuuucuuucuc

SEQ ID NO: 1096881 - RNA, 27 nt, Human
cuaaaagccucuccuccugcacucccc

SEQ ID NO: 1096882 - RNA, 24 nt, Human
cucaaaaaugucaguuuccaugga

SEQ ID NO: 1096883 - RNA, 21 nt, Human
cucccccuaccugacuuucug

SEQ ID NO: 1096884 - RNA, 24 nt, Human
cuccccuguguugcucaagccaaa

SEQ ID NO: 1096885 - RNA, 18 nt, Human
cuccccuucuccuguacc

SEQ ID NO: 1096886 - RNA, 20 nt, Human
cucccucucacccccuuguc

SEQ ID NO: 1096887 - RNA, 18 nt, Human
cuccucugccagggcccc

SEQ ID NO: 1096888 - RNA, 20 nt, Human
cuccuggcggggccuggguc

SEQ ID NO: 1096889 - RNA, 22 nt, Human
cuccuuguccagcuuagcuguu

SEQ ID NO: 1096890 - RNA, 22 nt, Human
cucgcaggcagcaggugcucaa

SEQ ID NO: 1096891 - RNA, 24 nt, Human
cucucccccucugcgaaucacucc

SEQ ID NO: 1096892 - RNA, 24 nt, Human
cucuccugaguucagaaccaucuc

SEQ ID NO: 1096893 - RNA, 19 nt, Human
cugcacuccccagcucaag

SEQ ID NO: 1096894 - RNA, 18 nt, Human
cugcagguguacugaccu

SEQ ID NO: 1096895 - RNA, 22 nt, Human
cugcucccuuuuucccaacucc

SEQ ID NO: 1096896 - RNA, 23 nt, Human
cuggauccuccuccccgucuccc

SEQ ID NO: 1096897 - RNA, 20 nt, Human
cugucacuguccucucucca

SEQ ID NO: 1096898 - RNA, 24 nt, Human
cuucuccauucagcgagcaucugu

SEQ ID NO: 1096899 - RNA, 19 nt, Human
cuugucuucacacgccucc

SEQ ID NO: 1096900 - RNA, 18 nt, Human
gaaaauaugcaucuuuuc

SEQ ID NO: 1096901 - RNA, 19 nt, Human
gaccuccccuccuguucca

SEQ ID NO: 1096902 - RNA, 24 nt, Human
gaggcaguucuggcggcccuguuc

SEQ ID NO: 1096903 - RNA, 23 nt, Human
gaugacuuaauuuucagggccca

SEQ ID NO: 1096904 - RNA, 18 nt, Human
gcaccacuaaaggcaucc

SEQ ID NO: 1096905 - RNA, 19 nt, Human
gccaggacgcaccacuaaa

SEQ ID NO: 1096906 - RNA, 21 nt, Human
gcccaggacugaugacuuaau

SEQ ID NO: 1096907 - RNA, 20 nt, Human
gcccucagggccucugcugc

SEQ ID NO: 1096908 - RNA, 23 nt, Human
gcccucagggccucugcugcuuc

SEQ ID NO: 1096909 - RNA, 22 nt, Human
gcuagggcuggauucagauucc

SEQ ID NO: 1096910 - RNA, 23 nt, Human
ggaaaaaauuccccccuugagga

SEQ ID NO: 1096911 - RNA, 18 nt, Human
ggacagcucagccauugc

SEQ ID NO: 1096912 - RNA, 25 nt, Human
ggcaugaccaugacaauaccuugca

SEQ ID NO: 1096913 - RNA, 24 nt, Human
ggcccauugcaaaaugaaaauaug

SEQ ID NO: 1096914 - RNA, 20 nt, Human
ggucacuguccaggacuccu

SEQ ID NO: 1096915 - RNA, 22 nt, Human
guccacuggggucccucagaua

SEQ ID NO: 1096916 - RNA, 20 nt, Human
gucccauccacaccuucucu

SEQ ID NO: 1096917 - RNA, 22 nt, Human
gucccauccacaccuucucugu

SEQ ID NO: 1096918 - RNA, 18 nt, Human
guuguacugggguguccc

SEQ ID NO: 1096919 - RNA, 22 nt, Human
uaggcagaguaaggaggggaaa

SEQ ID NO: 1096920 - RNA, 23 nt, Human
ucagauuccuuuucuuuuucuuu

SEQ ID NO: 1096921 - RNA, 23 nt, Human
ucagggcccauugcaaaaugaaa

SEQ ID NO: 1096922 - RNA, 24 nt, Human
ucaguacccuucccuaaaagccuc

SEQ ID NO: 1096923 - RNA, 23 nt, Human
uccaaagcccaggacugaugacu

SEQ ID NO: 1096924 - RNA, 20 nt, Human
uccaagacuggucccccucc

SEQ ID NO: 1096925 - RNA, 20 nt, Human
uccacaaacacacagaggga

SEQ ID NO: 1096926 - RNA, 30 nt, Human
uccacaaacacacagagggacaacaggcuu

SEQ ID NO: 1096927 - RNA, 24 nt, Human
uccacaccuucucuguucuccccc

SEQ ID NO: 1096928 - RNA, 23 nt, Human
ucccucagauacccaaaccucua

SEQ ID NO: 1096929 - RNA, 24 nt, Human
ucccugaaacgucucccucucacc

SEQ ID NO: 1096930 - RNA, 19 nt, Human
ucccugugccugcccugca

SEQ ID NO: 1096931 - RNA, 30 nt, Human
ucccuuugccacugggcaggaacaagggcu

SEQ ID NO: 1096932 - RNA, 21 nt, Human
uccgccucuguggccacccuc

SEQ ID NO: 1096933 - RNA, 18 nt, Human
uccucgcaggcagcaggu

SEQ ID NO: 1096934 - RNA, 24 nt, Human
uccugguucuccuccguccuccuu

SEQ ID NO: 1096935 - RNA, 18 nt, Human
ucgcuggucuuccgccuc

SEQ ID NO: 1096936 - RNA, 21 nt, Human
ucgcuggucuuccgccucugu

SEQ ID NO: 1096937 - RNA, 19 nt, Human
ucuccugaguucagaacca

SEQ ID NO: 1096938 - RNA, 23 nt, Human
ucucugcagguguacugaccugu

SEQ ID NO: 1096939 - RNA, 26 nt, Human
ucugccggugaccuccccuccuguuc

SEQ ID NO: 1096940 - RNA, 18 nt, Human
ucugccuucuuggcuuga

SEQ ID NO: 1096941 - RNA, 19 nt, Human
ucugggguggggacgccac

SEQ ID NO: 1096942 - RNA, 18 nt, Human
ucuuuccucucccuuguc

SEQ ID NO: 1096943 - RNA, 24 nt, Human
ucuuuucuuuuuuguuuuuuucuu

SEQ ID NO: 1096944 - RNA, 23 nt, Human
ugaaacgucucccucucaccccc

SEQ ID NO: 1096945 - RNA, 21 nt, Human
ugacaauaccuugcacagagc

SEQ ID NO: 1096946 - RNA, 24 nt, Human
ugacccauccaccaugccuccccu

SEQ ID NO: 1096947 - RNA, 21 nt, Human
ugacuuucugccggugaccuc

SEQ ID NO: 1096948 - RNA, 20 nt, Human
ugaucucaguacccuucccu

SEQ ID NO: 1096949 - RNA, 28 nt, Human
ugcaaaaugaaaauaugcaucuuuucuu

SEQ ID NO: 1096950 - RNA, 20 nt, Human
ugcagauaaggaaaugaggc

SEQ ID NO: 1096951 - RNA, 18 nt, Human
ugccagggcccccgccau

SEQ ID NO: 1096952 - RNA, 21 nt, Human
ugcccucagggccucugcugc

SEQ ID NO: 1096953 - RNA, 26 nt, Human
ugcccugcagcaucugggguggggac

SEQ ID NO: 1096954 - RNA, 23 nt, Human
ugcccuuauccaccugcccacac

SEQ ID NO: 1096955 - RNA, 21 nt, Human
ugccggugaccuccccuccug

SEQ ID NO: 1096956 - RNA, 20 nt, Human
ugccuucuuggcuugaccuc

SEQ ID NO: 1096957 - RNA, 20 nt, Human
uggcccucuggauccuccuc

SEQ ID NO: 1096958 - RNA, 20 nt, Human
ugucaacacccugucuuucc

SEQ ID NO: 1096959 - RNA, 19 nt, Human
ugucagcucccugcacccc

SEQ ID NO: 1096960 - RNA, 19 nt, Human
ugucuuuccuugccauuag

SEQ ID NO: 1096961 - RNA, 18 nt, Human
uguggccacccuccuggu

SEQ ID NO: 1096962 - RNA, 20 nt, Human
uguggccacccuccugguuc

SEQ ID NO: 1096963 - RNA, 22 nt, Human
uguuccuccuccacugggccua

SEQ ID NO: 1096964 - RNA, 23 nt, Human
uguuuuuuucuucuccaaagccc

SEQ ID NO: 1096965 - RNA, 18 nt, Human
uugcagauaaggaaauga

SEQ ID NO: 1096966 - RNA, 22 nt, Human
uugccacugggcaggaacaagg

SEQ ID NO: 1096967 - RNA, 21 nt, Human
uugguccugggccuaauuagg

SEQ ID NO: 1096968 - RNA, 21 nt, Human
uuguacuggggugucccccca

SEQ ID NO: 1096969 - RNA, 18 nt, Human
uuuaauccacaaacacac

SEQ ID NO: 1096970 - RNA, 19 nt, Human
uuuuucuucuccaaagccc

SEQ ID NO: 1096971 - RNA, 19 nt, Human
aaaaaaugaaucgauucag

SEQ ID NO: 1096972 - RNA, 29 nt, Human
aaacaggagagaaaaaaugaagggacccc

SEQ ID NO: 1096973 - RNA, 19 nt, Human
aaagcagauuugggcaugg

SEQ ID NO: 1096974 - RNA, 18 nt, Human
aaagugcuggauuacagg

SEQ ID NO: 1096975 - RNA, 23 nt, Human
aaagugcuggauuacaggcauga

SEQ ID NO: 1096976 - RNA, 21 nt, Human
aacaaaacaaagaugugacca

SEQ ID NO: 1096977 - RNA, 25 nt, Human
aacaaaacaaagaugugaccacuga

SEQ ID NO: 1096978 - RNA, 21 nt, Human
aagaaaguggggagagaccgg

SEQ ID NO: 1096979 - RNA, 25 nt, Human
aagaaaguggggagagaccgguacc

SEQ ID NO: 1096980 - RNA, 23 nt, Human
aagaagucaguucgggcgucagc

SEQ ID NO: 1096981 - RNA, 19 nt, Human
aagcagacaacaaaacaaa

SEQ ID NO: 1096982 - RNA, 22 nt, Human
aaggggcagugggucagacagc

SEQ ID NO: 1096983 - RNA, 22 nt, Human
aaguagauuacaacagcagcca

SEQ ID NO: 1096984 - RNA, 20 nt, Human
aaucaauauuugauccaagg

SEQ ID NO: 1096985 - RNA, 23 nt, Human
acaagcaugaaauaaacaauaua

SEQ ID NO: 1096986 - RNA, 23 nt, Human
accauggugacccugauauccca

SEQ ID NO: 1096987 - RNA, 24 nt, Human
accgcauugucuuuauccacucau

SEQ ID NO: 1096988 - RNA, 20 nt, Human
agaagaagcagacaacaaaa

SEQ ID NO: 1096989 - RNA, 18 nt, Human
agagcuauuuuauauacu

SEQ ID NO: 1096990 - RNA, 26 nt, Human
aggagagaaaaaaugaaucgauucag

SEQ ID NO: 1096991 - RNA, 22 nt, Human
aggcgugugccaccaccuggcu

SEQ ID NO: 1096992 - RNA, 19 nt, Human
agggaggaugaaaucaggg

SEQ ID NO: 1096993 - RNA, 20 nt, Human
agggaggaugaaaucagggc

SEQ ID NO: 1096994 - RNA, 24 nt, Human
agguggucuguccgccuuggccuc

SEQ ID NO: 1096995 - RNA, 22 nt, Human
aguaaucaaagaaccaaaaaaa

SEQ ID NO: 1096996 - RNA, 22 nt, Human
aguagagaugggguuucuccau

SEQ ID NO: 1096997 - RNA, 21 nt, Human
aguagcugggauuacaggcgu

SEQ ID NO: 1096998 - RNA, 23 nt, Human
aguagcugggauuacaggcgugu

SEQ ID NO: 1096999 - RNA, 24 nt, Human
aucaguaaucaaagaaccaaaaaa

SEQ ID NO: 1097000 - RNA, 18 nt, Human
augggguuucuccauguu

SEQ ID NO: 1097001 - RNA, 20 nt, Human
augggguuucuccauguugg

SEQ ID NO: 1097002 - RNA, 24 nt, Human
augggguuucuccauguuggccag

SEQ ID NO: 1097003 - RNA, 19 nt, Human
auguagaacaaagcccaca

SEQ ID NO: 1097004 - RNA, 24 nt, Human
auuuuuguauuuuuaguagagaug

SEQ ID NO: 1097005 - RNA, 23 nt, Human
caaagugcuggauuacaggcaug

SEQ ID NO: 1097006 - RNA, 24 nt, Human
caaagugcuggauuacaggcauga

SEQ ID NO: 1097007 - RNA, 23 nt, Human
caaaugaagccccuauacccauc

SEQ ID NO: 1097008 - RNA, 21 nt, Human
caagaaucagcagacacuuga

SEQ ID NO: 1097009 - RNA, 24 nt, Human
caagcaugaaauaaacaauauaaa

SEQ ID NO: 1097010 - RNA, 19 nt, Human
caaggauaaggucuuuagc

SEQ ID NO: 1097011 - RNA, 23 nt, Human
cacagauauggaaaauauaaaac

SEQ ID NO: 1097012 - RNA, 22 nt, Human
caccaccuggcuaauuuuugua

SEQ ID NO: 1097013 - RNA, 23 nt, Human
caccauggugacccugauauccc

SEQ ID NO: 1097014 - RNA, 21 nt, Human
cacugcaaucuccaccuccca

SEQ ID NO: 1097015 - RNA, 20 nt, Human
cagacacuugaggaaggcuc

SEQ ID NO: 1097016 - RNA, 23 nt, Human
cagcccagggcaggaagaggcaa

SEQ ID NO: 1097017 - RNA, 24 nt, Human
cagcccagggcaggaagaggcaau

SEQ ID NO: 1097018 - RNA, 20 nt, Human
cagccuccugaguagcuggg

SEQ ID NO: 1097019 - RNA, 23 nt, Human
cagcuuuggcuucagagugauuu

SEQ ID NO: 1097020 - RNA, 22 nt, Human
caggcgauucuccugccucagc

SEQ ID NO: 1097021 - RNA, 20 nt, Human
caucaguaaucaaagaacca

SEQ ID NO: 1097022 - RNA, 19 nt, Human
cauggaguccaauuucugu

SEQ ID NO: 1097023 - RNA, 24 nt, Human
cauguuggccaggcugguuucgaa

SEQ ID NO: 1097024 - RNA, 18 nt, Human
ccaaagugcuggauuaca

SEQ ID NO: 1097025 - RNA, 23 nt, Human
ccaaagugcuggauuacaggcau

SEQ ID NO: 1097026 - RNA, 24 nt, Human
ccaccucccagguucaggcgauuc

SEQ ID NO: 1097027 - RNA, 21 nt, Human
ccaccuggcuaauuuuuguau

SEQ ID NO: 1097028 - RNA, 19 nt, Human
ccauguuggccaggcuggu

SEQ ID NO: 1097029 - RNA, 19 nt, Human
ccauguuggccaggcuggu

SEQ ID NO: 1097030 - RNA, 22 nt, Human
ccauguuggccaggcugguuuc

SEQ ID NO: 1097031 - RNA, 23 nt, Human
ccauguuggccaggcugguuucg

SEQ ID NO: 1097032 - RNA, 24 nt, Human
cccaaagugcuggauuacaggcau

SEQ ID NO: 1097033 - RNA, 19 nt, Human
cccaaauguagaacaaagc

SEQ ID NO: 1097034 - RNA, 23 nt, Human
cccagguucaggcgauucuccug

SEQ ID NO: 1097035 - RNA, 18 nt, Human
ccccacugagcccagcuu

SEQ ID NO: 1097036 - RNA, 22 nt, Human
ccccuauacccaucuuucccca

SEQ ID NO: 1097037 - RNA, 18 nt, Human
ccccugcauccuuucccc

SEQ ID NO: 1097038 - RNA, 18 nt, Human
cccuaaguccccaaaauc

SEQ ID NO: 1097039 - RNA, 21 nt, Human
ccgccuuggccucccaaagug

SEQ ID NO: 1097040 - RNA, 21 nt, Human
ccuacauacucugaggucuca

SEQ ID NO: 1097041 - RNA, 24 nt, Human
ccucccagguucaggcgauucucc

SEQ ID NO: 1097042 - RNA, 23 nt, Human
ccugaguagcugggauuacaggc

SEQ ID NO: 1097043 - RNA, 24 nt, Human
ccugaguagcugggauuacaggcg

SEQ ID NO: 1097044 - RNA, 23 nt, Human
ccugccucagccuccugaguagc

SEQ ID NO: 1097045 - RNA, 21 nt, Human
ccuuggguuguggagcucugc

SEQ ID NO: 1097046 - RNA, 22 nt, Human
ccuuggguuguggagcucugcc

SEQ ID NO: 1097047 - RNA, 24 nt, Human
cucacugcaaucuccaccucccag

SEQ ID NO: 1097048 - RNA, 24 nt, Human
cucagccuccugaguagcugggau

SEQ ID NO: 1097049 - RNA, 21 nt, Human
cucccacuuauaagugaggau

SEQ ID NO: 1097050 - RNA, 26 nt, Human
cuccugaccucagguggucuguccgc

SEQ ID NO: 1097051 - RNA, 22 nt, Human
cugaguagcugggauuacaggc

SEQ ID NO: 1097052 - RNA, 24 nt, Human
cugaguagcugggauuacaggcgu

SEQ ID NO: 1097053 - RNA, 24 nt, Human
cugcaaucuccaccucccagguuc

SEQ ID NO: 1097054 - RNA, 23 nt, Human
cugccucagccuccugaguagcu

SEQ ID NO: 1097055 - RNA, 18 nt, Human
cuggagcaguguacacug

SEQ ID NO: 1097056 - RNA, 20 nt, Human
cuguccgccuuggccuccca

SEQ ID NO: 1097057 - RNA, 24 nt, Human
cuuuccccuaaguccccaaaaucc

SEQ ID NO: 1097058 - RNA, 18 nt, Human
cuuuuuuggaacuaguuu

SEQ ID NO: 1097059 - RNA, 23 nt, Human
gaaagggagagaaagagggaagg

SEQ ID NO: 1097060 - RNA, 22 nt, Human
gaaaguacaagcaugaaauaaa

SEQ ID NO: 1097061 - RNA, 25 nt, Human
gaacaaaugaagccccuauacccau

SEQ ID NO: 1097062 - RNA, 23 nt, Human
gaaggggcagugggucagacagc

SEQ ID NO: 1097063 - RNA, 24 nt, Human
gaccucagguggucuguccgccuu

SEQ ID NO: 1097064 - RNA, 18 nt, Human
gagaugggguuucuccau

SEQ ID NO: 1097065 - RNA, 24 nt, Human
gagaugggguuucuccauguuggc

SEQ ID NO: 1097066 - RNA, 20 nt, Human
gaguagcugggauuacaggc

SEQ ID NO: 1097067 - RNA, 25 nt, Human
gaguagcugggauuacaggcgugug

SEQ ID NO: 1097068 - RNA, 18 nt, Human
gauuacaggcaugagcca

SEQ ID NO: 1097069 - RNA, 21 nt, Human
gauuacaggcaugagccacca

SEQ ID NO: 1097070 - RNA, 21 nt, Human
gauuacaggcaugagccacca

SEQ ID NO: 1097071 - RNA, 18 nt, Human
gauuacaggcgugugcca

SEQ ID NO: 1097072 - RNA, 22 nt, Human
gcaaucuccaccucccagguuc

SEQ ID NO: 1097073 - RNA, 22 nt, Human
gccuuggccucccaaagugcug

SEQ ID NO: 1097074 - RNA, 23 nt, Human
gcgauucuccugccucagccucc

SEQ ID NO: 1097075 - RNA, 23 nt, Human
gcugguuucgaacuccugaccuc

SEQ ID NO: 1097076 - RNA, 19 nt, Human
gcuucagagugauuucaga

SEQ ID NO: 1097077 - RNA, 26 nt, Human
ggaaagggagagaaagagggaaggga

SEQ ID NO: 1097078 - RNA, 18 nt, Human
ggaagaggcaaugagaug

SEQ ID NO: 1097079 - RNA, 19 nt, Human
ggauuacaggcaugagcca

SEQ ID NO: 1097080 - RNA, 22 nt, Human
ggauuacaggcaugagccacca

SEQ ID NO: 1097081 - RNA, 24 nt, Human
ggcgauucuccugccucagccucc

SEQ ID NO: 1097082 - RNA, 24 nt, Human
ggcugguuucgaacuccugaccuc

SEQ ID NO: 1097083 - RNA, 23 nt, Human
gggggaaggggcagugggucaga

SEQ ID NO: 1097084 - RNA, 22 nt, Human
gggguuucuccauguuggccag

SEQ ID NO: 1097085 - RNA, 19 nt, Human
gguuucgaacuccugaccu

SEQ ID NO: 1097086 - RNA, 18 nt, Human
guagcugggauuacaggc

SEQ ID NO: 1097087 - RNA, 18 nt, Human
guagcugggauuacaggc

SEQ ID NO: 1097088 - RNA, 21 nt, Human
gucuuuagcagugacuucuga

SEQ ID NO: 1097089 - RNA, 24 nt, Human
guggcugaauaguauuccauggug

SEQ ID NO: 1097090 - RNA, 22 nt, Human
uaaaaauacagucucuaaaauc

SEQ ID NO: 1097091 - RNA, 24 nt, Human
uaaacaauauaaaaagcuccccaa

SEQ ID NO: 1097092 - RNA, 21 nt, Human
uaaccaagaaucagcagacac

SEQ ID NO: 1097093 - RNA, 22 nt, Human
uaaccaagaaucagcagacacu

SEQ ID NO: 1097094 - RNA, 19 nt, Human
uaacgagaaaaggcaauuu

SEQ ID NO: 1097095 - RNA, 24 nt, Human
uaagugaggauguacaauauuugg

SEQ ID NO: 1097096 - RNA, 24 nt, Human
uaauauagaagaagcagacaacaa

SEQ ID NO: 1097097 - RNA, 25 nt, Human
uaaugaucuccaacuccauccaggu

SEQ ID NO: 1097098 - RNA, 24 nt, Human
uaauuuuuguauuuuuaguagaga

SEQ ID NO: 1097099 - RNA, 19 nt, Human
uacaacagcagccagggga

SEQ ID NO: 1097100 - RNA, 21 nt, Human
uacaaggauaaggucuuuagc

SEQ ID NO: 1097101 - RNA, 18 nt, Human
uacaggcaugagccacca

SEQ ID NO: 1097102 - RNA, 18 nt, Human
uacaguggggcugccugg

SEQ ID NO: 1097103 - RNA, 20 nt, Human
uacaguggggcugccuggaa

SEQ ID NO: 1097104 - RNA, 20 nt, Human
uagaacaaagcccacagaua

SEQ ID NO: 1097105 - RNA, 20 nt, Human
uagaacaaagcccacagauu

SEQ ID NO: 1097106 - RNA, 19 nt, Human
uagauuacaacagcagcca

SEQ ID NO: 1097107 - RNA, 22 nt, Human
uagcagugacuucugagauuuu

SEQ ID NO: 1097108 - RNA, 24 nt, Human
uaguagagaugggguuucuccaug

SEQ ID NO: 1097109 - RNA, 19 nt, Human
uaguuuuuggggagcagau

SEQ ID NO: 1097110 - RNA, 24 nt, Human
uauaaaacaggagagaaaaaauga

SEQ ID NO: 1097111 - RNA, 28 nt, Human
uaucauucuugugccuuuguaucuucau

SEQ ID NO: 1097112 - RNA, 20 nt, Human
uaucccaguaccucuuuagg

SEQ ID NO: 1097113 - RNA, 28 nt, Human
uauuuuauuucaauaguuuuuggggagc

SEQ ID NO: 1097114 - RNA, 24 nt, Human
ucacugcaaucuccaccucccagg

SEQ ID NO: 1097115 - RNA, 25 nt, Human
ucacugcaaucuccaccucccaggu

SEQ ID NO: 1097116 - RNA, 22 nt, Human
ucagagugacucaugaucccag

SEQ ID NO: 1097117 - RNA, 20 nt, Human
ucagccuccugaguagcugg

SEQ ID NO: 1097118 - RNA, 22 nt, Human
uccaaggauuggaagggaaagu

SEQ ID NO: 1097119 - RNA, 23 nt, Human
ucccaaagugcuggauuacaggc

SEQ ID NO: 1097120 - RNA, 19 nt, Human
ucccagguucaggcgauuc

SEQ ID NO: 1097121 - RNA, 21 nt, Human
ucccagguucaggcgauucuc

SEQ ID NO: 1097122 - RNA, 24 nt, Human
ucccagguucaggcgauucuccug

SEQ ID NO: 1097123 - RNA, 25 nt, Human
uccccaaauguagaacaaagcccac

SEQ ID NO: 1097124 - RNA, 20 nt, Human
ucccucauccccugcauccu

SEQ ID NO: 1097125 - RNA, 24 nt, Human
uccugaguagcugggauuacaggc

SEQ ID NO: 1097126 - RNA, 18 nt, Human
uccugggggaaggggcag

SEQ ID NO: 1097127 - RNA, 23 nt, Human
ucguguguaguuucuuaguuccc

SEQ ID NO: 1097128 - RNA, 21 nt, Human
ucuaaaaucaauauuugaucc

SEQ ID NO: 1097129 - RNA, 22 nt, Human
ucuccaacuccauccagguugc

SEQ ID NO: 1097130 - RNA, 24 nt, Human
ucuccugccucagccuccugagua

SEQ ID NO: 1097131 - RNA, 23 nt, Human
ugaaauaaacaauauaaaaagcu

SEQ ID NO: 1097132 - RNA, 25 nt, Human
ugaaauaaacaauauaaaaagcucc

SEQ ID NO: 1097133 - RNA, 18 nt, Human
ugaacaaaugaagccccu

SEQ ID NO: 1097134 - RNA, 26 nt, Human
ugaagccccuauacccaucuuucccc

SEQ ID NO: 1097135 - RNA, 27 nt, Human
ugaagccccuauacccaucuuucccca

SEQ ID NO: 1097136 - RNA, 20 nt, Human
ugacccugauaucccaguac

SEQ ID NO: 1097137 - RNA, 19 nt, Human
ugaccucagguggucuguc

SEQ ID NO: 1097138 - RNA, 24 nt, Human
ugaccucagguggucuguccgccu

SEQ ID NO: 1097139 - RNA, 24 nt, Human
ugccucagccuccugaguagcugg

SEQ ID NO: 1097140 - RNA, 22 nt, Human
uggaaaauauaaaacaggagag

SEQ ID NO: 1097141 - RNA, 21 nt, Human
uggauuacaggcaugagccac

SEQ ID NO: 1097142 - RNA, 23 nt, Human
uggauuacaggcaugagccacca

SEQ ID NO: 1097143 - RNA, 24 nt, Human
uggccaggcugguuucgaacuccu

SEQ ID NO: 1097144 - RNA, 18 nt, Human
ugggauuacaggcgugug

SEQ ID NO: 1097145 - RNA, 19 nt, Human
ugggauuacaggcgugugc

SEQ ID NO: 1097146 - RNA, 21 nt, Human
ugggauuacaggcgugugcca

SEQ ID NO: 1097147 - RNA, 22 nt, Human
ugggauuacaggcgugugccac

SEQ ID NO: 1097148 - RNA, 24 nt, Human
ugggauuacaggcgugugccacca

SEQ ID NO: 1097149 - RNA, 24 nt, Human
ugggcauggaguccaauuucuguu

SEQ ID NO: 1097150 - RNA, 19 nt, Human
ugggggaaggggcaguggg

SEQ ID NO: 1097151 - RNA, 22 nt, Human
ugggggaaggggcaguggguca

SEQ ID NO: 1097152 - RNA, 24 nt, Human
ugggguuucuccauguuggccagg

SEQ ID NO: 1097153 - RNA, 24 nt, Human
ugugcugcuauaaacaugcgugua

SEQ ID NO: 1097154 - RNA, 22 nt, Human
uguggcugaauaguauuccaug

SEQ ID NO: 1097155 - RNA, 18 nt, Human
uuaguagagaugggguuu

SEQ ID NO: 1097156 - RNA, 24 nt, Human
uuaguagagaugggguuucuccau

SEQ ID NO: 1097157 - RNA, 19 nt, Human
uucagagugaacaaaugaa

SEQ ID NO: 1097158 - RNA, 18 nt, Human
uucaggagggaaagggag

SEQ ID NO: 1097159 - RNA, 21 nt, Human
uucaggcgauucuccugccuc

SEQ ID NO: 1097160 - RNA, 23 nt, Human
uucaggcgauucuccugccucag

SEQ ID NO: 1097161 - RNA, 22 nt, Human
uuccaugguguauauguacacc

SEQ ID NO: 1097162 - RNA, 23 nt, Human
uuccugaguuauuucacuuagaa

SEQ ID NO: 1097163 - RNA, 19 nt, Human
uuccugggggaaggggcag

SEQ ID NO: 1097164 - RNA, 19 nt, Human
uuggaacuauuuucuuuuc

SEQ ID NO: 1097165 - RNA, 18 nt, Human
uuggccucccaaagugcu

SEQ ID NO: 1097166 - RNA, 19 nt, Human
uugguuacaaggauaaggu

SEQ ID NO: 1097167 - RNA, 23 nt, Human
uuguauuuuuaguagagaugggg

SEQ ID NO: 1097168 - RNA, 18 nt, Human
uuguggagcucugccugu

SEQ ID NO: 1097169 - RNA, 23 nt, Human
uuguggcugaauaguauuccaug

SEQ ID NO: 1097170 - RNA, 20 nt, Human
uuuccccuaaguccccaaaa

SEQ ID NO: 1097171 - RNA, 24 nt, Human
uuucgaacuccugaccucaggugg

SEQ ID NO: 1097172 - RNA, 21 nt, Human
uuucuccauguuggccaggcu

SEQ ID NO: 1097173 - RNA, 23 nt, Human
uuuggcuucagagugauuucaga

SEQ ID NO: 1097174 - RNA, 22 nt, Human
uuuuauuucaauaguuuuuggg

SEQ ID NO: 1097175 - RNA, 24 nt, Human
uuuucaaucgcaaauugugcugcu

SEQ ID NO: 1097176 - RNA, 22 nt, Human
uuuuuaguagagaugggguuuc

SEQ ID NO: 1097177 - RNA, 20 nt, Human
uuuuuguauuuuuaguagag

SEQ ID NO: 1097178 - RNA, 24 nt, Human
uuuuuugcccaggcuagagagcag

SEQ ID NO: 1097179 - RNA, 25 nt, Human
aaacucccuccaagccagaacacua

SEQ ID NO: 1097180 - RNA, 24 nt, Human
aagccagaacacggguccggggga

SEQ ID NO: 1097181 - RNA, 21 nt, Human
acggguccgggggacuccuca

SEQ ID NO: 1097182 - RNA, 20 nt, Human
cacggguccgggggacuccu

SEQ ID NO: 1097183 - RNA, 23 nt, Human
ccaaagucaaacucccuccaagc

SEQ ID NO: 1097184 - RNA, 18 nt, Human
ccacggcacaagcaccca

SEQ ID NO: 1097185 - RNA, 26 nt, Human
cccagguggugguucucgacgggcua

SEQ ID NO: 1097186 - RNA, 19 nt, Human
ccgugggccccgccugccc

SEQ ID NO: 1097187 - RNA, 21 nt, Human
ccugccccacggcacaagcac

SEQ ID NO: 1097188 - RNA, 24 nt, Human
cucccaagacugaauggggucuag

SEQ ID NO: 1097189 - RNA, 22 nt, Human
gaacacggguccgggggacucc

SEQ ID NO: 1097190 - RNA, 24 nt, Human
gaacuggcucucucaccucccaag

SEQ ID NO: 1097191 - RNA, 21 nt, Human
uaccuuuggccaaagucaaac

SEQ ID NO: 1097192 - RNA, 24 nt, Human
ucaccccuggcuguuccccccaac

SEQ ID NO: 1097193 - RNA, 27 nt, Human
uccucaccccuggcuguuccccccaag

SEQ ID NO: 1097194 - RNA, 18 nt, Human
aaaccagggcagggaggg

SEQ ID NO: 1097195 - RNA, 24 nt, Human
aaacuguugggauuauaggcguga

SEQ ID NO: 1097196 - RNA, 24 nt, Human
aaauagcugggauuauaggcaggu

SEQ ID NO: 1097197 - RNA, 25 nt, Human
aaaugauucucuugccucagccucc

SEQ ID NO: 1097198 - RNA, 23 nt, Human
aacuccaugaccggccacaccuc

SEQ ID NO: 1097199 - RNA, 27 nt, Human
aagcgauccuccugccucaaccuccca

SEQ ID NO: 1097200 - RNA, 22 nt, Human
aaguugaaaccagggcagggag

SEQ ID NO: 1097201 - RNA, 24 nt, Human
aauggugugaucucagcucacugc

SEQ ID NO: 1097202 - RNA, 18 nt, Human
acagcucacugcagccuc

SEQ ID NO: 1097203 - RNA, 20 nt, Human
accaauccuccagccucagc

SEQ ID NO: 1097204 - RNA, 22 nt, Human
accacccagcaagcagaaggug

SEQ ID NO: 1097205 - RNA, 18 nt, Human
accauguuggccaggcug

SEQ ID NO: 1097206 - RNA, 23 nt, Human
acccaucacaguccuccuaggcu

SEQ ID NO: 1097207 - RNA, 20 nt, Human
acccccaccccccaccccac

SEQ ID NO: 1097208 - RNA, 23 nt, Human
acccccaccccccaccccacucc

SEQ ID NO: 1097209 - RNA, 25 nt, Human
acccccaccccccaccccacuccac

SEQ ID NO: 1097210 - RNA, 22 nt, Human
acccuaucuccaaauagucaca

SEQ ID NO: 1097211 - RNA, 22 nt, Human
accuccuaagcucaaccaaucc

SEQ ID NO: 1097212 - RNA, 18 nt, Human
acgagguuucaccauguu

SEQ ID NO: 1097213 - RNA, 20 nt, Human
acgagguuucaccauguugg

SEQ ID NO: 1097214 - RNA, 24 nt, Human
acgagguuucaccauguuggccag

SEQ ID NO: 1097215 - RNA, 25 nt, Human
acucugcuucccaggcuggagugca

SEQ ID NO: 1097216 - RNA, 19 nt, Human
acugcagccucaaccuccu

SEQ ID NO: 1097217 - RNA, 24 nt, Human
agacuccugggcucaagcgauccu

SEQ ID NO: 1097218 - RNA, 26 nt, Human
agcagguacaugcaagucucccaugg

SEQ ID NO: 1097219 - RNA, 18 nt, Human
agccccaagcaccauguc

SEQ ID NO: 1097220 - RNA, 23 nt, Human
agccucagccuccugaguagcug

SEQ ID NO: 1097221 - RNA, 25 nt, Human
agccuguugcccaggcuggucucaa

SEQ ID NO: 1097222 - RNA, 21 nt, Human
aggaaguugaaaccagggcag

SEQ ID NO: 1097223 - RNA, 21 nt, Human
aggaaguugaaaccagggcag

SEQ ID NO: 1097224 - RNA, 24 nt, Human
aggcacagggggcggaaccacaga

SEQ ID NO: 1097225 - RNA, 20 nt, Human
aggcugcggugcccccagag

SEQ ID NO: 1097226 - RNA, 23 nt, Human
agggagggagcaggcucugcagc

SEQ ID NO: 1097227 - RNA, 22 nt, Human
agggcuucagcagauggauuug

SEQ ID NO: 1097228 - RNA, 23 nt, Human
aggggagccaucuugaauagggu

SEQ ID NO: 1097229 - RNA, 24 nt, Human
aggugauguaccugccucggccuc

SEQ ID NO: 1097230 - RNA, 26 nt, Human
agguggugcguuagguggucgagggc

SEQ ID NO: 1097231 - RNA, 21 nt, Human
aggugugugggcccagcugcu

SEQ ID NO: 1097232 - RNA, 23 nt, Human
agguucaaaugauucucuugccu

SEQ ID NO: 1097233 - RNA, 22 nt, Human
agguuucaccauguuggccagg

SEQ ID NO: 1097234 - RNA, 21 nt, Human
agugagugggagugggaggga

SEQ ID NO: 1097235 - RNA, 23 nt, Human
agugcaguggugggagcacagcu

SEQ ID NO: 1097236 - RNA, 24 nt, Human
agugcaguggugggagcacagcuc

SEQ ID NO: 1097237 - RNA, 24 nt, Human
auaaacuccaugaccggccacacc

SEQ ID NO: 1097238 - RNA, 19 nt, Human
auccagucaccacccagca

SEQ ID NO: 1097239 - RNA, 24 nt, Human
augauucucuugccucagccuccc

SEQ ID NO: 1097240 - RNA, 18 nt, Human
caaaaaauagccuguugc

SEQ ID NO: 1097241 - RNA, 22 nt, Human
caaaugauucucuugccucagc

SEQ ID NO: 1097242 - RNA, 20 nt, Human
caaccuccaccucccagguu

SEQ ID NO: 1097243 - RNA, 23 nt, Human
caaccuccaccucccagguucaa

SEQ ID NO: 1097244 - RNA, 25 nt, Human
caaccuccuaagcucaaccaauccu

SEQ ID NO: 1097245 - RNA, 23 nt, Human
caagcgauccuccugccucaacc

SEQ ID NO: 1097246 - RNA, 24 nt, Human
caaguccuccacugaucauucaca

SEQ ID NO: 1097247 - RNA, 18 nt, Human
cacaaagccccaagcacc

SEQ ID NO: 1097248 - RNA, 23 nt, Human
cacaguuugacccaucacagucc

SEQ ID NO: 1097249 - RNA, 20 nt, Human
caccaggucuuuggaauccc

SEQ ID NO: 1097250 - RNA, 24 nt, Human
caccaggucuuuggaaucccccug

SEQ ID NO: 1097251 - RNA, 21 nt, Human
caccauguuggccaggcuggu

SEQ ID NO: 1097252 - RNA, 24 nt, Human
caccauguuggccaggcuggucuc

SEQ ID NO: 1097253 - RNA, 27 nt, Human
caccauguuggccaggcuggucucaaa

SEQ ID NO: 1097254 - RNA, 25 nt, Human
caccccacaccccccgcugggucac

SEQ ID NO: 1097255 - RNA, 27 nt, Human
caccccacuccaccccacuccgacccg

SEQ ID NO: 1097256 - RNA, 18 nt, Human
caccccccaccccacucc

SEQ ID NO: 1097257 - RNA, 19 nt, Human
caccccccaccccacucca

SEQ ID NO: 1097258 - RNA, 19 nt, Human
caccccccaccccacucca

SEQ ID NO: 1097259 - RNA, 23 nt, Human
caccccccaccccacuccacccc

SEQ ID NO: 1097260 - RNA, 26 nt, Human
caccccccaccccacuccaccccacu

SEQ ID NO: 1097261 - RNA, 24 nt, Human
cacucugcuucccaggcuggagug

SEQ ID NO: 1097262 - RNA, 21 nt, Human
cacugcaaccuccaccuccca

SEQ ID NO: 1097263 - RNA, 24 nt, Human
cagaggcccugggaagcccaaggg

SEQ ID NO: 1097264 - RNA, 23 nt, Human
cagccccuggggcucuggcaccu

SEQ ID NO: 1097265 - RNA, 23 nt, Human
cagccucaaccuccuaagcucaa

SEQ ID NO: 1097266 - RNA, 25 nt, Human
cagccucaaccuccuaagcucaacc

SEQ ID NO: 1097267 - RNA, 18 nt, Human
cagccucagccuccugag

SEQ ID NO: 1097268 - RNA, 25 nt, Human
cagccucagccuccugaguagcugg

SEQ ID NO: 1097269 - RNA, 20 nt, Human
cagccuccugaguagcuggg

SEQ ID NO: 1097270 - RNA, 22 nt, Human
cagcugcuuccggcugccgcug

SEQ ID NO: 1097271 - RNA, 20 nt, Human
cagggagggagcaggcucug

SEQ ID NO: 1097272 - RNA, 18 nt, Human
cagggcuccagacaccgg

SEQ ID NO: 1097273 - RNA, 22 nt, Human
cagguacaugcaagucugugua

SEQ ID NO: 1097274 - RNA, 19 nt, Human
caggugauguaccugcccc

SEQ ID NO: 1097275 - RNA, 22 nt, Human
caggugauguaccugccucggc

SEQ ID NO: 1097276 - RNA, 20 nt, Human
caggugccaccaugccuggc

SEQ ID NO: 1097277 - RNA, 24 nt, Human
caguagagacgagguuucaccaug

SEQ ID NO: 1097278 - RNA, 26 nt, Human
caguagagacgagguuucaccauguu

SEQ ID NO: 1097279 - RNA, 23 nt, Human
caugcaccaccacaccuggcuaa

SEQ ID NO: 1097280 - RNA, 20 nt, Human
caugcuugacccccaccccc

SEQ ID NO: 1097281 - RNA, 22 nt, Human
cauggcuggauggccccaggug

SEQ ID NO: 1097282 - RNA, 24 nt, Human
cauguuggccaggcuggucucaaa

SEQ ID NO: 1097283 - RNA, 21 nt, Human
cauucacaaagccccaagcac

SEQ ID NO: 1097284 - RNA, 22 nt, Human
ccaaacuguugggauuauaggc

SEQ ID NO: 1097285 - RNA, 24 nt, Human
ccaaacuguugggauuauaggcgu

SEQ ID NO: 1097286 - RNA, 24 nt, Human
ccaccucccagguucaaaugauuc

SEQ ID NO: 1097287 - RNA, 18 nt, Human
ccaccugucagcauggcc

SEQ ID NO: 1097288 - RNA, 20 nt, Human
ccacugaucauucacaaagc

SEQ ID NO: 1097289 - RNA, 22 nt, Human
ccagccucagccuccugaguag

SEQ ID NO: 1097290 - RNA, 25 nt, Human
ccagccucagccuccugaguagcuu

SEQ ID NO: 1097291 - RNA, 19 nt, Human
cccaaauagcugggauuau

SEQ ID NO: 1097292 - RNA, 24 nt, Human
cccaaauagcugggauuauaggca

SEQ ID NO: 1097293 - RNA, 18 nt, Human
cccaccccacuccacccc

SEQ ID NO: 1097294 - RNA, 20 nt, Human
cccaccccacuccaccccac

SEQ ID NO: 1097295 - RNA, 22 nt, Human
cccaccccccaccccacuccac

SEQ ID NO: 1097296 - RNA, 18 nt, Human
cccacuccaccccacucc

SEQ ID NO: 1097297 - RNA, 19 nt, Human
cccaggcuggagugcagug

SEQ ID NO: 1097298 - RNA, 22 nt, Human
cccaggcuggagugcaguggug

SEQ ID NO: 1097299 - RNA, 22 nt, Human
ccccacuccaccccacuccgac

SEQ ID NO: 1097300 - RNA, 22 nt, Human
ccccagaggcccugggaagccc

SEQ ID NO: 1097301 - RNA, 27 nt, Human
cccccaccccccaccccacuccacccc

SEQ ID NO: 1097302 - RNA, 20 nt, Human
cccuaaguccuaggauuuac

SEQ ID NO: 1097303 - RNA, 21 nt, Human
cccugggaagcccaagggacu

SEQ ID NO: 1097304 - RNA, 25 nt, Human
ccgagcuggugaaggcacagggggc

SEQ ID NO: 1097305 - RNA, 18 nt, Human
ccgcuggguggggaagag

SEQ ID NO: 1097306 - RNA, 21 nt, Human
ccgguggugacaccaggggag

SEQ ID NO: 1097307 - RNA, 23 nt, Human
ccuccagccucagccuccugagu

SEQ ID NO: 1097308 - RNA, 24 nt, Human
ccucccagguucaaaugauucucu

SEQ ID NO: 1097309 - RNA, 22 nt, Human
ccuccugccucaaccucccaaa

SEQ ID NO: 1097310 - RNA, 18 nt, Human
ccugcaccccacaccccc

SEQ ID NO: 1097311 - RNA, 18 nt, Human
ccugggcucaagcgaucc

SEQ ID NO: 1097312 - RNA, 23 nt, Human
ccugggcucaagcgauccuccug

SEQ ID NO: 1097313 - RNA, 21 nt, Human
ccugucagcauggccaggaaa

SEQ ID NO: 1097314 - RNA, 21 nt, Human
ccuguugcccaggcuggucuc

SEQ ID NO: 1097315 - RNA, 19 nt, Human
ccuuacucaccucuuuaaa

SEQ ID NO: 1097316 - RNA, 20 nt, Human
ccuuacucaccucuuuaaag

SEQ ID NO: 1097317 - RNA, 19 nt, Human
ccuuuuagguccucucuuc

SEQ ID NO: 1097318 - RNA, 22 nt, Human
cgauccagucaccacccagcaa

SEQ ID NO: 1097319 - RNA, 19 nt, Human
cggccacaccuccuucugg

SEQ ID NO: 1097320 - RNA, 23 nt, Human
cuauuccggagcaccugggcagc

SEQ ID NO: 1097321 - RNA, 25 nt, Human
cucaaccaauccuccagccucagcc

SEQ ID NO: 1097322 - RNA, 22 nt, Human
cucaaccuccuaagcucaacca

SEQ ID NO: 1097323 - RNA, 24 nt, Human
cucaagcgauccuccugccucaac

SEQ ID NO: 1097324 - RNA, 24 nt, Human
cucacugcaaccuccaccucccag

SEQ ID NO: 1097325 - RNA, 24 nt, Human
cucagccuccugaguagcugggac

SEQ ID NO: 1097326 - RNA, 21 nt, Human
cucaggugauguaccugccuc

SEQ ID NO: 1097327 - RNA, 24 nt, Human
cuccagccucagccuccugaguag

SEQ ID NO: 1097328 - RNA, 25 nt, Human
cuccagccucagccuccugaguagc

SEQ ID NO: 1097329 - RNA, 24 nt, Human
cucccaaauagcugggauuauagg

SEQ ID NO: 1097330 - RNA, 24 nt, Human
cuccugaguagcugggaccacagg

SEQ ID NO: 1097331 - RNA, 23 nt, Human
cuccugccucaaccucccaaacu

SEQ ID NO: 1097332 - RNA, 23 nt, Human
cuccugggcucaagcgauccucc

SEQ ID NO: 1097333 - RNA, 19 nt, Human
cucuguuguccagucugga

SEQ ID NO: 1097334 - RNA, 24 nt, Human
cugcaaccuccaccucccagguuc

SEQ ID NO: 1097335 - RNA, 20 nt, Human
cugcaccccacaccccccgc

SEQ ID NO: 1097336 - RNA, 27 nt, Human
cugcagccucaaccuccuaagcucaac

SEQ ID NO: 1097337 - RNA, 23 nt, Human
cugcuucccaggcuggagugcag

SEQ ID NO: 1097338 - RNA, 24 nt, Human
cuggagggcaauggugugaucuca

SEQ ID NO: 1097339 - RNA, 19 nt, Human
cuggcaccugcaccccaca

SEQ ID NO: 1097340 - RNA, 19 nt, Human
cugugcgguugccgagcug

SEQ ID NO: 1097341 - RNA, 24 nt, Human
cuugacccccaccccccaccccac

SEQ ID NO: 1097342 - RNA, 23 nt, Human
cuugaccucaggugauguaccug

SEQ ID NO: 1097343 - RNA, 24 nt, Human
cuugccucagccucccaaauagcu

SEQ ID NO: 1097344 - RNA, 25 nt, Human
cuugccucagccucccaaauagcug

SEQ ID NO: 1097345 - RNA, 23 nt, Human
gaagaggcacaugcuugaccccc

SEQ ID NO: 1097346 - RNA, 20 nt, Human
gaaguugaaaccagggcagg

SEQ ID NO: 1097347 - RNA, 21 nt, Human
gacagggucagugagugggag

SEQ ID NO: 1097348 - RNA, 19 nt, Human
gacccaguuuucccagggc

SEQ ID NO: 1097349 - RNA, 22 nt, Human
gacccaguuuucccagggcucc

SEQ ID NO: 1097350 - RNA, 19 nt, Human
gacccccaccccccacccc

SEQ ID NO: 1097351 - RNA, 21 nt, Human
gacccccaccccccaccccac

SEQ ID NO: 1097352 - RNA, 24 nt, Human
gaccucaggugauguaccugccuc

SEQ ID NO: 1097353 - RNA, 21 nt, Human
gagaggugugugggcccagcu

SEQ ID NO: 1097354 - RNA, 23 nt, Human
gagguuucaccauguuggccagg

SEQ ID NO: 1097355 - RNA, 24 nt, Human
gaguagcugggaccacaggcaugc

SEQ ID NO: 1097356 - RNA, 22 nt, Human
gauccaguuuucccagggcucc

SEQ ID NO: 1097357 - RNA, 24 nt, Human
gauuauaggcaggugccaccaugc

SEQ ID NO: 1097358 - RNA, 18 nt, Human
gauuauaggcgugagcca

SEQ ID NO: 1097359 - RNA, 21 nt, Human
gauucucuugccucagccucc

SEQ ID NO: 1097360 - RNA, 22 nt, Human
gcaaccuccaccucccagguuc

SEQ ID NO: 1097361 - RNA, 18 nt, Human
gcaagucuguguagaggc

SEQ ID NO: 1097362 - RNA, 21 nt, Human
gcaauggugugaucucagcuc

SEQ ID NO: 1097363 - RNA, 21 nt, Human
gccucaaccucccaaacuguu

SEQ ID NO: 1097364 - RNA, 25 nt, Human
gccucaaccuccuaagcucaaccaa

SEQ ID NO: 1097365 - RNA, 20 nt, Human
gccucagccuccugaguagc

SEQ ID NO: 1097366 - RNA, 20 nt, Human
gcucuguuguccagucugga

SEQ ID NO: 1097367 - RNA, 19 nt, Human
gcuucagcagauggauuug

SEQ ID NO: 1097368 - RNA, 23 nt, Human
ggaagcccaagggacuccaaggu

SEQ ID NO: 1097369 - RNA, 18 nt, Human
gggaagcccaagggacuc

SEQ ID NO: 1097370 - RNA, 22 nt, Human
gggcaauggugugaucucagcu

SEQ ID NO: 1097371 - RNA, 22 nt, Human
gggcucaagcgauccuccugcc

SEQ ID NO: 1097372 - RNA, 22 nt, Human
ggggacacaguuugacccauca

SEQ ID NO: 1097373 - RNA, 19 nt, Human
ggucucggaagacaucgug

SEQ ID NO: 1097374 - RNA, 24 nt, Human
ggugauguaccugccucggccucc

SEQ ID NO: 1097375 - RNA, 21 nt, Human
gguguccccucgcaccugccu

SEQ ID NO: 1097376 - RNA, 21 nt, Human
uaaacuccaugaccggccaca

SEQ ID NO: 1097377 - RNA, 19 nt, Human
uaagcucaaccaauccucc

SEQ ID NO: 1097378 - RNA, 20 nt, Human
uaagcucaaccaauccucca

SEQ ID NO: 1097379 - RNA, 26 nt, Human
uaauuuucguauuuuuugguaagaga

SEQ ID NO: 1097380 - RNA, 24 nt, Human
uaauuuuuauauuuucaguagaga

SEQ ID NO: 1097381 - RNA, 24 nt, Human
uacagguaugagcuaccgccccca

SEQ ID NO: 1097382 - RNA, 21 nt, Human
uacucaccucuuuaaagaccc

SEQ ID NO: 1097383 - RNA, 22 nt, Human
uagagacgagguuucaccaugu

SEQ ID NO: 1097384 - RNA, 19 nt, Human
uagguggugcugagacuga

SEQ ID NO: 1097385 - RNA, 22 nt, Human
uauaggcaggugccaccaugcc

SEQ ID NO: 1097386 - RNA, 19 nt, Human
ucaaaugauucucuugccu

SEQ ID NO: 1097387 - RNA, 18 nt, Human
ucaccacccagcaagcag

SEQ ID NO: 1097388 - RNA, 22 nt, Human
ucaccucuuuuuuuuuuuuuuu

SEQ ID NO: 1097389 - RNA, 24 nt, Human
ucacugcaaccuccaccucccagg

SEQ ID NO: 1097390 - RNA, 25 nt, Human
ucacugcaaccuccaccucccaggu

SEQ ID NO: 1097391 - RNA, 27 nt, Human
ucacugcaaccuccaccucccagguuc

SEQ ID NO: 1097392 - RNA, 24 nt, Human
ucacugcagccucaaccuccuaag

SEQ ID NO: 1097393 - RNA, 18 nt, Human
ucagccucccaaauagcu

SEQ ID NO: 1097394 - RNA, 20 nt, Human
ucagccucccaaauagcugg

SEQ ID NO: 1097395 - RNA, 23 nt, Human
ucagccuccugaguagcugggac

SEQ ID NO: 1097396 - RNA, 25 nt, Human
ucagcucacugcaaccuccaccucc

SEQ ID NO: 1097397 - RNA, 24 nt, Human
ucaguagagacgagguuucaccau

SEQ ID NO: 1097398 - RNA, 19 nt, Human
uccacaggcugaagaauga

SEQ ID NO: 1097399 - RNA, 24 nt, Human
ucccaaacuguugggauuauaggc

SEQ ID NO: 1097400 - RNA, 24 nt, Human
ucccaaauagcugggauuauaggc

SEQ ID NO: 1097401 - RNA, 22 nt, Human
ucccaggcuggagugcaguggu

SEQ ID NO: 1097402 - RNA, 21 nt, Human
ucccagggcuccagacaccag

SEQ ID NO: 1097403 - RNA, 21 nt, Human
ucccagguucaaaugauucuc

SEQ ID NO: 1097404 - RNA, 21 nt, Human
ucccagguucaaaugauucuc

SEQ ID NO: 1097405 - RNA, 24 nt, Human
uccggagcaccugggcagccugga

SEQ ID NO: 1097406 - RNA, 20 nt, Human
uccggcugccgcuggguggg

SEQ ID NO: 1097407 - RNA, 19 nt, Human
uccuccagccucagccucc

SEQ ID NO: 1097408 - RNA, 24 nt, Human
uccuccugccucaaccucccaaac

SEQ ID NO: 1097409 - RNA, 24 nt, Human
uccugaguagcugggaccacaggc

SEQ ID NO: 1097410 - RNA, 20 nt, Human
uccugccucaaccucccaaa

SEQ ID NO: 1097411 - RNA, 21 nt, Human
uccugggcucaagcgauccuc

SEQ ID NO: 1097412 - RNA, 22 nt, Human
uccugggcucaagcgauccucc

SEQ ID NO: 1097413 - RNA, 24 nt, Human
uccugggcucaagcgauccuccug

SEQ ID NO: 1097414 - RNA, 23 nt, Human
ucucacucugcuucccaggcugg

SEQ ID NO: 1097415 - RNA, 24 nt, Human
ucucacucugcuucccaggcugga

SEQ ID NO: 1097416 - RNA, 19 nt, Human
ucugcuucccaggcuggag

SEQ ID NO: 1097417 - RNA, 24 nt, Human
ucugcuucccaggcuggagugcag

SEQ ID NO: 1097418 - RNA, 23 nt, Human
ucugugcgguugccgagcuggug

SEQ ID NO: 1097419 - RNA, 22 nt, Human
ucuuuuuuuuuuuuuuugacag

SEQ ID NO: 1097420 - RNA, 18 nt, Human
ugaaggcacagggggcgg

SEQ ID NO: 1097421 - RNA, 20 nt, Human
ugacccccaccccccacccc

SEQ ID NO: 1097422 - RNA, 19 nt, Human
ugaccucaggugauguacc

SEQ ID NO: 1097423 - RNA, 24 nt, Human
ugaccucaggugauguaccugccu

SEQ ID NO: 1097424 - RNA, 25 nt, Human
ugcccaggcuggucucaagacuccu

SEQ ID NO: 1097425 - RNA, 24 nt, Human
ugccucaaccucccaaacuguugg

SEQ ID NO: 1097426 - RNA, 26 nt, Human
ugccucagccucccaaauagcuggga

SEQ ID NO: 1097427 - RNA, 21 nt, Human
ugccucggccucccuaagucc

SEQ ID NO: 1097428 - RNA, 24 nt, Human
ugccuggcuaauuuuuauauuuuc

SEQ ID NO: 1097429 - RNA, 24 nt, Human
ugcuugacccccaccccccacccc

SEQ ID NO: 1097430 - RNA, 19 nt, Human
uggagggcaauggugugau

SEQ ID NO: 1097431 - RNA, 18 nt, Human
uggagugcagugguggga

SEQ ID NO: 1097432 - RNA, 20 nt, Human
uggagugcaguggugggagc

SEQ ID NO: 1097433 - RNA, 28 nt, Human
uggagugcaguggugggagggcucuagc

SEQ ID NO: 1097434 - RNA, 24 nt, Human
uggccaggcuggucucaaacucuu

SEQ ID NO: 1097435 - RNA, 18 nt, Human
uggcuggauggccccagg

SEQ ID NO: 1097436 - RNA, 19 nt, Human
uggcuggauggccccaggu

SEQ ID NO: 1097437 - RNA, 21 nt, Human
ugggaccacaggcaugcacca

SEQ ID NO: 1097438 - RNA, 24 nt, Human
ugggaccacaggcaugcaccacca

SEQ ID NO: 1097439 - RNA, 23 nt, Human
ugggagcacagcucacugcagcc

SEQ ID NO: 1097440 - RNA, 21 nt, Human
ugggauuauaggcaggugcca

SEQ ID NO: 1097441 - RNA, 22 nt, Human
ugggauuauaggcaggugccac

SEQ ID NO: 1097442 - RNA, 24 nt, Human
ugggauuauaggcaggugccacca

SEQ ID NO: 1097443 - RNA, 25 nt, Human
ugggauuauaggcaggugccaccau

SEQ ID NO: 1097444 - RNA, 18 nt, Human
ugggauuauaggcgugag

SEQ ID NO: 1097445 - RNA, 19 nt, Human
ugggauuauaggcgugagc

SEQ ID NO: 1097446 - RNA, 21 nt, Human
ugggauuauaggcgugagcca

SEQ ID NO: 1097447 - RNA, 22 nt, Human
ugggcccagcugcuuccggcug

SEQ ID NO: 1097448 - RNA, 24 nt, Human
ugggcucaagcgauccuccugccu

SEQ ID NO: 1097449 - RNA, 21 nt, Human
ugggggacacaguuugaccca

SEQ ID NO: 1097450 - RNA, 21 nt, Human
ugggugcaagagcuuggggau

SEQ ID NO: 1097451 - RNA, 23 nt, Human
ugggugcaagagcuuggggaugg

SEQ ID NO: 1097452 - RNA, 23 nt, Human
ugguaccaccaggacagggcagc

SEQ ID NO: 1097453 - RNA, 25 nt, Human
uggugacaccaggggagccaucuug

SEQ ID NO: 1097454 - RNA, 24 nt, Human
uggugugaucucagcucacugcaa

SEQ ID NO: 1097455 - RNA, 20 nt, Human
ugugaugaguggcaagauug

SEQ ID NO: 1097456 - RNA, 21 nt, Human
ugugugggcccagcugcuucc

SEQ ID NO: 1097457 - RNA, 21 nt, Human
uguugcccaggcuggucucaa

SEQ ID NO: 1097458 - RNA, 24 nt, Human
uguuugugaugaguggcaagauca

SEQ ID NO: 1097459 - RNA, 20 nt, Human
uuagggcuucagcagaugga

SEQ ID NO: 1097460 - RNA, 23 nt, Human
uucaaaugauucucuugccucag

SEQ ID NO: 1097461 - RNA, 20 nt, Human
uucacaaagccccaagcacc

SEQ ID NO: 1097462 - RNA, 23 nt, Human
uucccaggcuggagugcaguggu

SEQ ID NO: 1097463 - RNA, 24 nt, Human
uucccaggcuggagugcaguggug

SEQ ID NO: 1097464 - RNA, 21 nt, Human
uucccugcagaguggcuucac

SEQ ID NO: 1097465 - RNA, 18 nt, Human
uuccggagcaccugggca

SEQ ID NO: 1097466 - RNA, 24 nt, Human
uucucuguuaaaccaaagugagaa

SEQ ID NO: 1097467 - RNA, 23 nt, Human
uucugugcaugucuaaucucccu

SEQ ID NO: 1097468 - RNA, 22 nt, Human
uugcucuguuguccagucugga

SEQ ID NO: 1097469 - RNA, 24 nt, Human
uugcugccuauuccggagcaccug

SEQ ID NO: 1097470 - RNA, 23 nt, Human
uuggaaucccccuggggaccugg

SEQ ID NO: 1097471 - RNA, 21 nt, Human
uugggauuauaggcgugagcc

SEQ ID NO: 1097472 - RNA, 24 nt, Human
uuucaccauguuggccaggcuggu

SEQ ID NO: 1097473 - RNA, 23 nt, Human
uuuccuuuuagguccucucuucu

SEQ ID NO: 1097474 - RNA, 24 nt, Human
uuuucaguagagacgagguuucac

SEQ ID NO: 1097475 - RNA, 23 nt, Human
uuuugcucuguuguccagucugg

SEQ ID NO: 1097476 - RNA, 24 nt, Human
uuuugcucuguuguccagucugga

SEQ ID NO: 1097477 - RNA, 22 nt, Human
aaaaauaaccauacccuguugc

SEQ ID NO: 1097478 - RNA, 22 nt, Human
aaacacgucaguauaaaaugag

SEQ ID NO: 1097479 - RNA, 19 nt, Human
aacaaugagaacacuugga

SEQ ID NO: 1097480 - RNA, 23 nt, Human
aaccaguaggggcuuugcauggg

SEQ ID NO: 1097481 - RNA, 23 nt, Human
aagcgcagcccuggagagggugc

SEQ ID NO: 1097482 - RNA, 20 nt, Human
aagcucagagcaggcugcgg

SEQ ID NO: 1097483 - RNA, 18 nt, Human
acaaggacagaaaaccaa

SEQ ID NO: 1097484 - RNA, 23 nt, Human
acagacaccuccauuaucuguaa

SEQ ID NO: 1097485 - RNA, 21 nt, Human
acaucacacaccagggccagu

SEQ ID NO: 1097486 - RNA, 20 nt, Human
acaucagaaagcucagagca

SEQ ID NO: 1097487 - RNA, 18 nt, Human
accaaacaccgcauguuc

SEQ ID NO: 1097488 - RNA, 23 nt, Human
accaacccaaauguccaucaaua

SEQ ID NO: 1097489 - RNA, 21 nt, Human
acccuaugaccccacacccug

SEQ ID NO: 1097490 - RNA, 19 nt, Human
agaaaaacgcagagaucaa

SEQ ID NO: 1097491 - RNA, 20 nt, Human
agaaaaccaaacaccgcaug

SEQ ID NO: 1097492 - RNA, 21 nt, Human
agacaacacccuuaacagagc

SEQ ID NO: 1097493 - RNA, 21 nt, Human
agcugugugcagggauggugg

SEQ ID NO: 1097494 - RNA, 24 nt, Human
aggaaguagggcgcugagcugagg

SEQ ID NO: 1097495 - RNA, 21 nt, Human
aggaggaaggggaggucccag

SEQ ID NO: 1097496 - RNA, 23 nt, Human
aggaggaaggggaggucccagaa

SEQ ID NO: 1097497 - RNA, 22 nt, Human
aggagggaacaugugccugaga

SEQ ID NO: 1097498 - RNA, 23 nt, Human
aggagggagguacaaagaacugg

SEQ ID NO: 1097499 - RNA, 19 nt, Human
aggcgccuggccccgcccc

SEQ ID NO: 1097500 - RNA, 19 nt, Human
aggcgccuggcccugcccg

SEQ ID NO: 1097501 - RNA, 22 nt, Human
agggaagaaucuuggaagagcu

SEQ ID NO: 1097502 - RNA, 18 nt, Human
agggacauggauuaaacu

SEQ ID NO: 1097503 - RNA, 23 nt, Human
agggagaggagggagguacaaag

SEQ ID NO: 1097504 - RNA, 20 nt, Human
agggcgcugagcugaggugg

SEQ ID NO: 1097505 - RNA, 20 nt, Human
agggggaaccaguaggggcu

SEQ ID NO: 1097506 - RNA, 26 nt, Human
agggggaggagcugguaccugcucca

SEQ ID NO: 1097507 - RNA, 19 nt, Human
aggugggcaggcccagggc

SEQ ID NO: 1097508 - RNA, 20 nt, Human
aggugggggagugggggagg

SEQ ID NO: 1097509 - RNA, 22 nt, Human
auccaugguccagucguccugg

SEQ ID NO: 1097510 - RNA, 21 nt, Human
caaggacagaaaaccaaacac

SEQ ID NO: 1097511 - RNA, 22 nt, Human
caauagcaaagacuuggaacca

SEQ ID NO: 1097512 - RNA, 19 nt, Human
cacaaggacagaaaaccaa

SEQ ID NO: 1097513 - RNA, 23 nt, Human
caccccuagcucuccaugccugg

SEQ ID NO: 1097514 - RNA, 19 nt, Human
cacccuaugaccccacacc

SEQ ID NO: 1097515 - RNA, 21 nt, Human
cacccuaugaccccacacccu

SEQ ID NO: 1097516 - RNA, 18 nt, Human
cagaaaaccaaacaccgc

SEQ ID NO: 1097517 - RNA, 22 nt, Human
cagaauggagggaagaaucuug

SEQ ID NO: 1097518 - RNA, 20 nt, Human
cagagugaggagaggaaggg

SEQ ID NO: 1097519 - RNA, 21 nt, Human
cagcaaacuaucacaaggaca

SEQ ID NO: 1097520 - RNA, 18 nt, Human
cagcaagccaacauggca

SEQ ID NO: 1097521 - RNA, 22 nt, Human
cagcacgaugacuaaacacguc

SEQ ID NO: 1097522 - RNA, 19 nt, Human
cagcaggcaggggcaggca

SEQ ID NO: 1097523 - RNA, 18 nt, Human
cagcugggugagaugugu

SEQ ID NO: 1097524 - RNA, 24 nt, Human
caggcccagggcagugggggagcc

SEQ ID NO: 1097525 - RNA, 21 nt, Human
caggggaccacagcccccccu

SEQ ID NO: 1097526 - RNA, 22 nt, Human
caguaggggaggugggggaguc

SEQ ID NO: 1097527 - RNA, 18 nt, Human
caucuuucucagcaaacu

SEQ ID NO: 1097528 - RNA, 19 nt, Human
caugaagcaugcugugccc

SEQ ID NO: 1097529 - RNA, 21 nt, Human
caugacaacauacacagacac

SEQ ID NO: 1097530 - RNA, 23 nt, Human
caugacaacauacacagacaccu

SEQ ID NO: 1097531 - RNA, 22 nt, Human
caugagugagggagaggaggga

SEQ ID NO: 1097532 - RNA, 22 nt, Human
cauguccaaaucucuucuuccc

SEQ ID NO: 1097533 - RNA, 19 nt, Human
cauguccccagagaaucca

SEQ ID NO: 1097534 - RNA, 20 nt, Human
ccaaacgcucaggaaacacc

SEQ ID NO: 1097535 - RNA, 21 nt, Human
ccaaagacugaaaaauaacca

SEQ ID NO: 1097536 - RNA, 22 nt, Human
ccaaagacugaaaaauaaccau

SEQ ID NO: 1097537 - RNA, 20 nt, Human
ccacagcccccccugccugg

SEQ ID NO: 1097538 - RNA, 18 nt, Human
ccaggagagggcacuugc

SEQ ID NO: 1097539 - RNA, 20 nt, Human
ccauaaaaaagaugaauuca

SEQ ID NO: 1097540 - RNA, 21 nt, Human
ccauuuugacgacccuccauu

SEQ ID NO: 1097541 - RNA, 21 nt, Human
cccaaauguccaucaauaaca

SEQ ID NO: 1097542 - RNA, 19 nt, Human
cccaaccguucacacaucu

SEQ ID NO: 1097543 - RNA, 21 nt, Human
ccccacacccugcagcugcac

SEQ ID NO: 1097544 - RNA, 23 nt, Human
ccccagccguuugguguuuggug

SEQ ID NO: 1097545 - RNA, 23 nt, Human
ccccaucagcccggucaccuggu

SEQ ID NO: 1097546 - RNA, 22 nt, Human
cccccagggcagggaugggcca

SEQ ID NO: 1097547 - RNA, 20 nt, Human
ccccgccccuccccucaguc

SEQ ID NO: 1097548 - RNA, 18 nt, Human
cccgcaggcgccuggccc

SEQ ID NO: 1097549 - RNA, 18 nt, Human
cccgcaggcgccuggccc

SEQ ID NO: 1097550 - RNA, 26 nt, Human
cccgcccacaucagaaagcucagagc

SEQ ID NO: 1097551 - RNA, 19 nt, Human
cccgccccuccccgcaggc

SEQ ID NO: 1097552 - RNA, 19 nt, Human
ccgccccuccccgcaggcu

SEQ ID NO: 1097553 - RNA, 19 nt, Human
ccgggccccgccccucccc

SEQ ID NO: 1097554 - RNA, 20 nt, Human
ccgggccccgccccuccccg

SEQ ID NO: 1097555 - RNA, 21 nt, Human
ccggucccgcccacaucagaa

SEQ ID NO: 1097556 - RNA, 22 nt, Human
ccggucccgcccacaucagaaa

SEQ ID NO: 1097557 - RNA, 19 nt, Human
ccguucacacaucugaaca

SEQ ID NO: 1097558 - RNA, 21 nt, Human
ccucaucccuuuaccuaauaa

SEQ ID NO: 1097559 - RNA, 24 nt, Human
ccuccuaugcaggucaaacuacua

SEQ ID NO: 1097560 - RNA, 18 nt, Human
ccugcacugagcgacucc

SEQ ID NO: 1097561 - RNA, 20 nt, Human
ccuggaccaggucuccuccc

SEQ ID NO: 1097562 - RNA, 22 nt, Human
ccuguggugucgcccccagggc

SEQ ID NO: 1097563 - RNA, 22 nt, Human
cgcaggcgccuggccccgcccc

SEQ ID NO: 1097564 - RNA, 19 nt, Human
cgcugagcugagguggucc

SEQ ID NO: 1097565 - RNA, 20 nt, Human
cgucaguauaaaaugagauc

SEQ ID NO: 1097566 - RNA, 27 nt, Human
cguugugcaccuguacccuagaacuua

SEQ ID NO: 1097567 - RNA, 22 nt, Human
cuauuuuaaagaaacuauggau

SEQ ID NO: 1097568 - RNA, 23 nt, Human
cucagagcaggcugcgggcaguu

SEQ ID NO: 1097569 - RNA, 20 nt, Human
cuccgugcuccaaauccuga

SEQ ID NO: 1097570 - RNA, 21 nt, Human
cugcagagccuccucaccaug

SEQ ID NO: 1097571 - RNA, 18 nt, Human
cugccuggacugcccuag

SEQ ID NO: 1097572 - RNA, 19 nt, Human
cugcuucuugaagagguga

SEQ ID NO: 1097573 - RNA, 23 nt, Human
cuggacugcccuaggcucuggaa

SEQ ID NO: 1097574 - RNA, 24 nt, Human
cuggcuugcuccccauucgccugc

SEQ ID NO: 1097575 - RNA, 19 nt, Human
cuugccuccgugcuccaaa

SEQ ID NO: 1097576 - RNA, 18 nt, Human
cuuggaagagcugcagug

SEQ ID NO: 1097577 - RNA, 21 nt, Human
gaacucugggccgguccugca

SEQ ID NO: 1097578 - RNA, 20 nt, Human
gaauggagggugaagaugga

SEQ ID NO: 1097579 - RNA, 20 nt, Human
gagaacacuuggacacaggg

SEQ ID NO: 1097580 - RNA, 21 nt, Human
gagacaacacccuuaacagag

SEQ ID NO: 1097581 - RNA, 21 nt, Human
gaggacacaggcccuggagga

SEQ ID NO: 1097582 - RNA, 24 nt, Human
gagguggauucugggucaacaccc

SEQ ID NO: 1097583 - RNA, 18 nt, Human
gagugagggagaggaggg

SEQ ID NO: 1097584 - RNA, 19 nt, Human
gaucaagauuucuaacucg

SEQ ID NO: 1097585 - RNA, 24 nt, Human
gauccuggaccaggucuccucccg

SEQ ID NO: 1097586 - RNA, 25 nt, Human
gaugggaagugaguuuaucagggga

SEQ ID NO: 1097587 - RNA, 22 nt, Human
gcaaacuaucacaaggacagaa

SEQ ID NO: 1097588 - RNA, 23 nt, Human
gcagaugcucguggggcuguugu

SEQ ID NO: 1097589 - RNA, 23 nt, Human
gccacauauuaaagugacucaga

SEQ ID NO: 1097590 - RNA, 18 nt, Human
gcccuaggcucuggaucc

SEQ ID NO: 1097591 - RNA, 22 nt, Human
gcugcacugagcuucacugacc

SEQ ID NO: 1097592 - RNA, 19 nt, Human
gcugcuucuugaagaggug

SEQ ID NO: 1097593 - RNA, 18 nt, Human
gcuggggaaggugggcag

SEQ ID NO: 1097594 - RNA, 21 nt, Human
ggaaaaaacuucuguuuuucu

SEQ ID NO: 1097595 - RNA, 23 nt, Human
ggagggaacaugugccugagacu

SEQ ID NO: 1097596 - RNA, 24 nt, Human
ggaggugggggagugggggaggga

SEQ ID NO: 1097597 - RNA, 22 nt, Human
ggccacaggggcucaggaggaa

SEQ ID NO: 1097598 - RNA, 21 nt, Human
ggccauggagcuuaguugagg

SEQ ID NO: 1097599 - RNA, 19 nt, Human
ggccuggcggcuccagcug

SEQ ID NO: 1097600 - RNA, 19 nt, Human
ggcuggggaaggugggcag

SEQ ID NO: 1097601 - RNA, 18 nt, Human
gggaagggggaaccagua

SEQ ID NO: 1097602 - RNA, 22 nt, Human
gggaaggugggcaggcccaggg

SEQ ID NO: 1097603 - RNA, 18 nt, Human
gggagggaaagcauuagg

SEQ ID NO: 1097604 - RNA, 22 nt, Human
gggcagcaggcaggggcaggca

SEQ ID NO: 1097605 - RNA, 19 nt, Human
ggggaggugggggaguggg

SEQ ID NO: 1097606 - RNA, 18 nt, Human
ggggcgcgugaggcggcc

SEQ ID NO: 1097607 - RNA, 24 nt, Human
gguacaaagaacuggggaaaggga

SEQ ID NO: 1097608 - RNA, 28 nt, Human
gguacaaagaacuggggaaagggaguaa

SEQ ID NO: 1097609 - RNA, 21 nt, Human
guauuugcacaaacuuugaga

SEQ ID NO: 1097610 - RNA, 18 nt, Human
gugcugcuucuugaagag

SEQ ID NO: 1097611 - RNA, 20 nt, Human
gugggucugugugugugugu

SEQ ID NO: 1097612 - RNA, 18 nt, Human
guguggaguuggagagcc

SEQ ID NO: 1097613 - RNA, 20 nt, Human
guugcuggaucucucuugcc

SEQ ID NO: 1097614 - RNA, 18 nt, Human
uaacaaaugauguggcug

SEQ ID NO: 1097615 - RNA, 21 nt, Human
uaacagaguagauuaagaaaa

SEQ ID NO: 1097616 - RNA, 19 nt, Human
uaaccccuggcuugcuccc

SEQ ID NO: 1097617 - RNA, 19 nt, Human
uagaacagcccaugucuga

SEQ ID NO: 1097618 - RNA, 24 nt, Human
uagaacagcccaugucugaaaccc

SEQ ID NO: 1097619 - RNA, 23 nt, Human
uaggcucuggaucuguaaccccu

SEQ ID NO: 1097620 - RNA, 20 nt, Human
uauaaaaugagaucaugaag

SEQ ID NO: 1097621 - RNA, 25 nt, Human
uauauacaccacggaauacuaugca

SEQ ID NO: 1097622 - RNA, 23 nt, Human
uaucuguaaacccaaccguucac

SEQ ID NO: 1097623 - RNA, 18 nt, Human
ucaaaucuuauucaggua

SEQ ID NO: 1097624 - RNA, 25 nt, Human
ucaagccagggaugugaacucuggg

SEQ ID NO: 1097625 - RNA, 25 nt, Human
ucaagccagggauguugucucccga

SEQ ID NO: 1097626 - RNA, 22 nt, Human
ucagcaaacuaucacaaggaca

SEQ ID NO: 1097627 - RNA, 20 nt, Human
uccaaaucucuucuucccca

SEQ ID NO: 1097628 - RNA, 22 nt, Human
uccaaaucucuucuuccccagc

SEQ ID NO: 1097629 - RNA, 25 nt, Human
uccauuaucuguaaacccaaccguu

SEQ ID NO: 1097630 - RNA, 24 nt, Human
uccauuccauguuguaggugacac

SEQ ID NO: 1097631 - RNA, 19 nt, Human
uccccgcaggcgccuggcc

SEQ ID NO: 1097632 - RNA, 19 nt, Human
ucccgugucuuugacaucc

SEQ ID NO: 1097633 - RNA, 23 nt, Human
ucccuguggugucgcccccaggg

SEQ ID NO: 1097634 - RNA, 18 nt, Human
ucgcaucucuccagccac

SEQ ID NO: 1097635 - RNA, 24 nt, Human
ucgccugccugaccacagcuccga

SEQ ID NO: 1097636 - RNA, 22 nt, Human
ucuaagaagcucaccccuagcu

SEQ ID NO: 1097637 - RNA, 19 nt, Human
ucuguaaccccuggcuugc

SEQ ID NO: 1097638 - RNA, 21 nt, Human
ucuucacguuggaggugagga

SEQ ID NO: 1097639 - RNA, 19 nt, Human
ugaacucugggccgguccu

SEQ ID NO: 1097640 - RNA, 22 nt, Human
ugacuugccagcucuagagggu

SEQ ID NO: 1097641 - RNA, 23 nt, Human
ugagaugugucaucagucacagg

SEQ ID NO: 1097642 - RNA, 20 nt, Human
ugagcugugugcagggaugg

SEQ ID NO: 1097643 - RNA, 18 nt, Human
ugagggagaggagggagg

SEQ ID NO: 1097644 - RNA, 19 nt, Human
ugaguggaggugaaguggg

SEQ ID NO: 1097645 - RNA, 21 nt, Human
ugauccuggaccaggucuccu

SEQ ID NO: 1097646 - RNA, 20 nt, Human
ugccaaagacugaaaaauaa

SEQ ID NO: 1097647 - RNA, 21 nt, Human
ugccaaagacugaaaaauaac

SEQ ID NO: 1097648 - RNA, 23 nt, Human
ugccaaagacugaaaaauaacca

SEQ ID NO: 1097649 - RNA, 24 nt, Human
ugcccuaggcucuggaucuguaac

SEQ ID NO: 1097650 - RNA, 28 nt, Human
ugccuccgugcuccaaauccugaaaucu

SEQ ID NO: 1097651 - RNA, 20 nt, Human
ugccugagacugugcugcuu

SEQ ID NO: 1097652 - RNA, 19 nt, Human
ugccuggacugcccuaggc

SEQ ID NO: 1097653 - RNA, 22 nt, Human
ugccuggacugcccuaggcucu

SEQ ID NO: 1097654 - RNA, 18 nt, Human
ugccuggauggcagaugc

SEQ ID NO: 1097655 - RNA, 20 nt, Human
ugcgggcaguucccggguua

SEQ ID NO: 1097656 - RNA, 20 nt, Human
ugcgggggcuggggaaggug

SEQ ID NO: 1097657 - RNA, 21 nt, Human
uggaauggagggugaagaugg

SEQ ID NO: 1097658 - RNA, 22 nt, Human
uggaccaggucuccucccgcag

SEQ ID NO: 1097659 - RNA, 25 nt, Human
uggaggugaggacacaggcccugga

SEQ ID NO: 1097660 - RNA, 21 nt, Human
uggauucugggucaacacccu

SEQ ID NO: 1097661 - RNA, 22 nt, Human
uggauucugggucaacacccuu

SEQ ID NO: 1097662 - RNA, 18 nt, Human
uggcaaggucacagaagu

SEQ ID NO: 1097663 - RNA, 19 nt, Human
uggcaaggugagcggaagg

SEQ ID NO: 1097664 - RNA, 21 nt, Human
uggcacauguauaccuaugua

SEQ ID NO: 1097665 - RNA, 22 nt, Human
uggcauauauacaccacggaau

SEQ ID NO: 1097666 - RNA, 18 nt, Human
uggccuggcggcuccagc

SEQ ID NO: 1097667 - RNA, 18 nt, Human
ugggaggggacaugagug

SEQ ID NO: 1097668 - RNA, 20 nt, Human
ugggucugugugugugugug

SEQ ID NO: 1097669 - RNA, 20 nt, Human
uggugucgcccccagggcag

SEQ ID NO: 1097670 - RNA, 24 nt, Human
ugguguggaguuggagagccuuga

SEQ ID NO: 1097671 - RNA, 24 nt, Human
uguaaaugacgaguuuaugggugc

SEQ ID NO: 1097672 - RNA, 18 nt, Human
uguagaucaagccaggga

SEQ ID NO: 1097673 - RNA, 27 nt, Human
uguauaccuauguaacaaaccugcacg

SEQ ID NO: 1097674 - RNA, 22 nt, Human
uguauuugcacaaacuuugaga

SEQ ID NO: 1097675 - RNA, 23 nt, Human
uguccaaaucucuucuuccccag

SEQ ID NO: 1097676 - RNA, 19 nt, Human
ugucugaaacccuagucag

SEQ ID NO: 1097677 - RNA, 24 nt, Human
ugugaacucugggccgguccugca

SEQ ID NO: 1097678 - RNA, 21 nt, Human
ugugccugagacugugcugcu

SEQ ID NO: 1097679 - RNA, 19 nt, Human
uguggaguuggagagccuu

SEQ ID NO: 1097680 - RNA, 18 nt, Human
uguguguguggcggggag

SEQ ID NO: 1097681 - RNA, 22 nt, Human
uuaaaauuaaugucauguagaa

SEQ ID NO: 1097682 - RNA, 24 nt, Human
uuaucuguaaacccaaccguucac

SEQ ID NO: 1097683 - RNA, 20 nt, Human
uucacaguauuuuacaaagc

SEQ ID NO: 1097684 - RNA, 23 nt, Human
uucugggucaacacccuuuucag

SEQ ID NO: 1097685 - RNA, 19 nt, Human
uugauccuggaccaggucu

SEQ ID NO: 1097686 - RNA, 18 nt, Human
uuggaagagcugcagugg

SEQ ID NO: 1097687 - RNA, 23 nt, Human
uuggagagccuugacugcggggg

SEQ ID NO: 1097688 - RNA, 24 nt, Human
agagcuccagccauugugacaugg

SEQ ID NO: 1097689 - RNA, 22 nt, Human
agcuccagccauugugacaugg

SEQ ID NO: 1097690 - RNA, 23 nt, Human
augguuggagugggggugggguu

SEQ ID NO: 1097691 - RNA, 20 nt, Human
auugugacaugguuggagug

SEQ ID NO: 1097692 - RNA, 20 nt, Human
ccucagagcuccagccauug

SEQ ID NO: 1097693 - RNA, 19 nt, Human
ccuccuggcucagggagcc

SEQ ID NO: 1097694 - RNA, 24 nt, Human
ccuccuggcucagggagccugggc

SEQ ID NO: 1097695 - RNA, 18 nt, Human
gccugggccccucagagc

SEQ ID NO: 1097696 - RNA, 20 nt, Human
gccugggccccucagagcuc

SEQ ID NO: 1097697 - RNA, 23 nt, Human
gggagccugggccccucagagcu

SEQ ID NO: 1097698 - RNA, 22 nt, Human
ugacaugguuggagugggggug

SEQ ID NO: 1097699 - RNA, 20 nt, Human
ugggccccucagagcuccag

SEQ ID NO: 1097700 - RNA, 25 nt, Human
ugggguucuucccuggaacucuccu

SEQ ID NO: 1097701 - RNA, 23 nt, Human
aacggcgguggcggcggcggcgg

SEQ ID NO: 1097702 - RNA, 28 nt, Human
acccugguggccccacagccccacauug

SEQ ID NO: 1097703 - RNA, 20 nt, Human
acccugguggccccacagcu

SEQ ID NO: 1097704 - RNA, 20 nt, Human
agcugguuuucucauggagg

SEQ ID NO: 1097705 - RNA, 24 nt, Human
cacagccccacauuggagggcagg

SEQ ID NO: 1097706 - RNA, 18 nt, Human
caccugcacaggguccag

SEQ ID NO: 1097707 - RNA, 18 nt, Human
cagcagcaggaguaagag

SEQ ID NO: 1097708 - RNA, 21 nt, Human
cagcagcgacggcgacaacgg

SEQ ID NO: 1097709 - RNA, 18 nt, Human
cagcgacggcgacaacgg

SEQ ID NO: 1097710 - RNA, 27 nt, Human
caggagaaagaggaguacugcgugggu

SEQ ID NO: 1097711 - RNA, 24 nt, Human
caucauaguugccacguugaugcc

SEQ ID NO: 1097712 - RNA, 22 nt, Human
ccacauuggagggcaggcccgc

SEQ ID NO: 1097713 - RNA, 20 nt, Human
ccgcugcuggugguugcagc

SEQ ID NO: 1097714 - RNA, 23 nt, Human
ccuccuccuccagguaggaauug

SEQ ID NO: 1097715 - RNA, 19 nt, Human
ccugaucaaagaaaggcac

SEQ ID NO: 1097716 - RNA, 24 nt, Human
cggcgacgaacacagcgaagaaga

SEQ ID NO: 1097717 - RNA, 30 nt, Human
cggcggcggcggcgacgaacacagcgaagg

SEQ ID NO: 1097718 - RNA, 21 nt, Human
cuaaggcguucuggaguccau

SEQ ID NO: 1097719 - RNA, 23 nt, Human
gacaacggcgguggcggcggcgg

SEQ ID NO: 1097720 - RNA, 20 nt, Human
gacaagaacgaugaggccca

SEQ ID NO: 1097721 - RNA, 23 nt, Human
gcagcgacggcgacaacggcggu

SEQ ID NO: 1097722 - RNA, 21 nt, Human
gcaucgugggggcuuucuugg

SEQ ID NO: 1097723 - RNA, 22 nt, Human
gcgacgaacacagcgaagaaga

SEQ ID NO: 1097724 - RNA, 23 nt, Human
gcggcggcggcggcgacgaacac

SEQ ID NO: 1097725 - RNA, 20 nt, Human
gcgguggcggcggcggcggc

SEQ ID NO: 1097726 - RNA, 22 nt, Human
ggacaucuucaccugcacaggg

SEQ ID NO: 1097727 - RNA, 19 nt, Human
ggacugcagccucagcuca

SEQ ID NO: 1097728 - RNA, 19 nt, Human
ggcaggagaaagaggagua

SEQ ID NO: 1097729 - RNA, 30 nt, Human
ggcgacaacggcgguggcggcggcggcgac

SEQ ID NO: 1097730 - RNA, 21 nt, Human
ggcgacgaacacagcgaagaa

SEQ ID NO: 1097731 - RNA, 23 nt, Human
ggcgacgaacacagcgaagaaga

SEQ ID NO: 1097732 - RNA, 20 nt, Human
gucugggggaccacuugggg

SEQ ID NO: 1097733 - RNA, 21 nt, Human
uaaaacccgccccagccgcga

SEQ ID NO: 1097734 - RNA, 22 nt, Human
uaccacccugguggccccacag

SEQ ID NO: 1097735 - RNA, 21 nt, Human
uacgggaagggcagguugucc

SEQ ID NO: 1097736 - RNA, 20 nt, Human
uagagagagggugguggcag

SEQ ID NO: 1097737 - RNA, 24 nt, Human
uagcugguuuucucauggaggggg

SEQ ID NO: 1097738 - RNA, 24 nt, Human
uauugauugcaacaucucacggug

SEQ ID NO: 1097739 - RNA, 19 nt, Human
ucugaguagcccaaucaau

SEQ ID NO: 1097740 - RNA, 18 nt, Human
ucuguaguucugcggccg

SEQ ID NO: 1097741 - RNA, 19 nt, Human
ucuguaguucugcggccgc

SEQ ID NO: 1097742 - RNA, 20 nt, Human
ugacaagaacgaugaggccc

SEQ ID NO: 1097743 - RNA, 21 nt, Human
ugacaagaacgaugaggccca

SEQ ID NO: 1097744 - RNA, 24 nt, Human
ugacagguagagagaggguggugg

SEQ ID NO: 1097745 - RNA, 21 nt, Human
ugcaguggauguggacauccu

SEQ ID NO: 1097746 - RNA, 21 nt, Human
uggauguggacauccugagcc

SEQ ID NO: 1097747 - RNA, 19 nt, Human
uggcggcggcggcggcgac

SEQ ID NO: 1097748 - RNA, 20 nt, Human
ugggauacgggaagggcagg

SEQ ID NO: 1097749 - RNA, 19 nt, Human
uguccuccuccuccaggua

SEQ ID NO: 1097750 - RNA, 18 nt, Human
uuggagaaaugguggcag

SEQ ID NO: 1097751 - RNA, 22 nt, Human
uuugucuguaguucugcggccg

SEQ ID NO: 1097752 - RNA, 21 nt, Human
aacacaacuagguaucuccag

SEQ ID NO: 1097753 - RNA, 21 nt, Human
acacaaauucggccaagguca

SEQ ID NO: 1097754 - RNA, 23 nt, Human
acacaaauucggccaaggucaaa

SEQ ID NO: 1097755 - RNA, 19 nt, Human
cacaucacacaaauucggc

SEQ ID NO: 1097756 - RNA, 21 nt, Human
cucaagcggagaagaggagga

SEQ ID NO: 1097757 - RNA, 20 nt, Human
cuccuggagucccugacccu

SEQ ID NO: 1097758 - RNA, 24 nt, Human
cuccuggagucccugacccucucu

SEQ ID NO: 1097759 - RNA, 21 nt, Human
cugucuuagcuccuggagucc

SEQ ID NO: 1097760 - RNA, 23 nt, Human
gacccucucucucaagcggagaa

SEQ ID NO: 1097761 - RNA, 24 nt, Human
guaucuccagggccacaucacaca

SEQ ID NO: 1097762 - RNA, 20 nt, Human
gucccugacccucucucuca

SEQ ID NO: 1097763 - RNA, 23 nt, Human
uagcuccuggagucccugacccu

SEQ ID NO: 1097764 - RNA, 20 nt, Human
ucggccaaggucaaagucug

SEQ ID NO: 1097765 - RNA, 21 nt, Human
ucuuagcuccuggagucccug

SEQ ID NO: 1097766 - RNA, 22 nt, Human
aaacagaaaggauccaccaggg

SEQ ID NO: 1097767 - RNA, 24 nt, Human
aaagugcugggauuacaggcguga

SEQ ID NO: 1097768 - RNA, 24 nt, Human
aaagugcugggauuacaggcguga

SEQ ID NO: 1097769 - RNA, 22 nt, Human
aaccccugaccucaagugaucc

SEQ ID NO: 1097770 - RNA, 26 nt, Human
aagcacugggauuacagggaugagcc

SEQ ID NO: 1097771 - RNA, 19 nt, Human
aaguagcugggacuacagg

SEQ ID NO: 1097772 - RNA, 20 nt, Human
aaguagcugggacuacaggc

SEQ ID NO: 1097773 - RNA, 19 nt, Human
aagugcugggauuacaggc

SEQ ID NO: 1097774 - RNA, 19 nt, Human
aagugcugggauuacaggc

SEQ ID NO: 1097775 - RNA, 19 nt, Human
aagugcugggauuacaggc

SEQ ID NO: 1097776 - RNA, 19 nt, Human
aagugcugggauuacaggc

SEQ ID NO: 1097777 - RNA, 26 nt, Human
aagugcugggauuacaggcgugagcc

SEQ ID NO: 1097778 - RNA, 26 nt, Human
aagugcugggauuacaggcgugagcc

SEQ ID NO: 1097779 - RNA, 22 nt, Human
accaaaguucaagacucgccca

SEQ ID NO: 1097780 - RNA, 23 nt, Human
accauguuggucaggcuggucuc

SEQ ID NO: 1097781 - RNA, 21 nt, Human
accauuguuaagugccaggcg

SEQ ID NO: 1097782 - RNA, 19 nt, Human
accugcucacccugaccac

SEQ ID NO: 1097783 - RNA, 19 nt, Human
acgcggcugccacacaagu

SEQ ID NO: 1097784 - RNA, 20 nt, Human
acgggguuucaccguuuuag

SEQ ID NO: 1097785 - RNA, 19 nt, Human
acucgcccagggccaccaa

SEQ ID NO: 1097786 - RNA, 20 nt, Human
acugcaagcuccgccucccg

SEQ ID NO: 1097787 - RNA, 26 nt, Human
agacaguccucuagacuuuggucuuc

SEQ ID NO: 1097788 - RNA, 27 nt, Human
agacgggcuggcacccuugaguuaggc

SEQ ID NO: 1097789 - RNA, 19 nt, Human
agagacgggguuucaccgu

SEQ ID NO: 1097790 - RNA, 23 nt, Human
agcccaauacuggaugucccgcc

SEQ ID NO: 1097791 - RNA, 18 nt, Human
agcugcagacagaggccu

SEQ ID NO: 1097792 - RNA, 23 nt, Human
agcugcauaucggcucacauuca

SEQ ID NO: 1097793 - RNA, 18 nt, Human
aggaagagggcugagcug

SEQ ID NO: 1097794 - RNA, 25 nt, Human
aggcuggagugcaguggcgggaucu

SEQ ID NO: 1097795 - RNA, 21 nt, Human
agggauuggggugagucaggg

SEQ ID NO: 1097796 - RNA, 19 nt, Human
aggggagcugcugcugaag

SEQ ID NO: 1097797 - RNA, 20 nt, Human
aguagagacgggguuucacc

SEQ ID NO: 1097798 - RNA, 21 nt, Human
aguagagacgggguuucaccg

SEQ ID NO: 1097799 - RNA, 23 nt, Human
aguagcugggacuacaggcgccc

SEQ ID NO: 1097800 - RNA, 22 nt, Human
agugaggagagggacugggggc

SEQ ID NO: 1097801 - RNA, 20 nt, Human
agugcaguggcgggaucucg

SEQ ID NO: 1097802 - RNA, 23 nt, Human
agugcaguggcgggaucucggcu

SEQ ID NO: 1097803 - RNA, 24 nt, Human
agugcaguggcgggaucucggcuc

SEQ ID NO: 1097804 - RNA, 18 nt, Human
agugcugggauuacaggc

SEQ ID NO: 1097805 - RNA, 18 nt, Human
agugcugggauuacaggc

SEQ ID NO: 1097806 - RNA, 24 nt, Human
caaaaccccaagggcagggagccc

SEQ ID NO: 1097807 - RNA, 26 nt, Human
caaaccccugaccucaagugauccaa

SEQ ID NO: 1097808 - RNA, 24 nt, Human
caaagcacugggauuacagggaug

SEQ ID NO: 1097809 - RNA, 24 nt, Human
caaagugcugggauuacaggcgug

SEQ ID NO: 1097810 - RNA, 24 nt, Human
caaagugcugggauuacaggcgug

SEQ ID NO: 1097811 - RNA, 19 nt, Human
caagacaguccucuagacu

SEQ ID NO: 1097812 - RNA, 23 nt, Human
caagccccccuccucacugauca

SEQ ID NO: 1097813 - RNA, 28 nt, Human
caagugauccaccccgcccccugaaagg

SEQ ID NO: 1097814 - RNA, 18 nt, Human
cacaaagacacgccuaga

SEQ ID NO: 1097815 - RNA, 22 nt, Human
cacaccauucuccugccucagc

SEQ ID NO: 1097816 - RNA, 21 nt, Human
caccauguuggucaggcuggu

SEQ ID NO: 1097817 - RNA, 24 nt, Human
caccauguuggucaggcuggucuc

SEQ ID NO: 1097818 - RNA, 19 nt, Human
cacccagguggagugugcu

SEQ ID NO: 1097819 - RNA, 28 nt, Human
caccccgcccccgcuucggccucccaaa

SEQ ID NO: 1097820 - RNA, 24 nt, Human
cacccugaccaccccaccccaggg

SEQ ID NO: 1097821 - RNA, 24 nt, Human
caccguuuuagccgggauggucuu

SEQ ID NO: 1097822 - RNA, 22 nt, Human
cacugaucaaaaccccaagggc

SEQ ID NO: 1097823 - RNA, 19 nt, Human
cacugcguauccacguagc

SEQ ID NO: 1097824 - RNA, 23 nt, Human
cagacccagacucagacccaagc

SEQ ID NO: 1097825 - RNA, 21 nt, Human
cagacucagacccaagccccc

SEQ ID NO: 1097826 - RNA, 21 nt, Human
cagagcuccuggcaggagccc

SEQ ID NO: 1097827 - RNA, 22 nt, Human
cagagcuccuggcaggagcccc

SEQ ID NO: 1097828 - RNA, 18 nt, Human
cagcugcagacagaggcc

SEQ ID NO: 1097829 - RNA, 21 nt, Human
caggcgcccgccacuacgccc

SEQ ID NO: 1097830 - RNA, 24 nt, Human
caggcgucccaccaugcgggucuu

SEQ ID NO: 1097831 - RNA, 26 nt, Human
caggcucacagagcccaccugcucac

SEQ ID NO: 1097832 - RNA, 27 nt, Human
caggcuccuaacucucagaaucccaca

SEQ ID NO: 1097833 - RNA, 19 nt, Human
cagucucagagcugcccgg

SEQ ID NO: 1097834 - RNA, 22 nt, Human
ccaaagugcugggauuacaggc

SEQ ID NO: 1097835 - RNA, 22 nt, Human
ccaaagugcugggauuacaggc

SEQ ID NO: 1097836 - RNA, 22 nt, Human
ccaaagugcugggauuacaggc

SEQ ID NO: 1097837 - RNA, 22 nt, Human
ccaaagugcugggauuacaggc

SEQ ID NO: 1097838 - RNA, 24 nt, Human
ccaaagugcugggauuacaggcgu

SEQ ID NO: 1097839 - RNA, 24 nt, Human
ccaaagugcugggauuacaggcgu

SEQ ID NO: 1097840 - RNA, 23 nt, Human
ccacaaagacacgccuagacccc

SEQ ID NO: 1097841 - RNA, 25 nt, Human
ccacaaagacacgccuagaccccag

SEQ ID NO: 1097842 - RNA, 26 nt, Human
ccaccccaccccaggggaccccaggc

SEQ ID NO: 1097843 - RNA, 24 nt, Human
ccaccugcucacccugaccacccc

SEQ ID NO: 1097844 - RNA, 22 nt, Human
ccagagccuggaggaugagggg

SEQ ID NO: 1097845 - RNA, 23 nt, Human
cccaaguagcugggacuacaggc

SEQ ID NO: 1097846 - RNA, 23 nt, Human
cccaaguagcugggacuacaggc

SEQ ID NO: 1097847 - RNA, 24 nt, Human
cccagggccaccaagacaguccuc

SEQ ID NO: 1097848 - RNA, 18 nt, Human
ccccaagggcagggagcc

SEQ ID NO: 1097849 - RNA, 24 nt, Human
ccccaccccaggggaccccaggcu

SEQ ID NO: 1097850 - RNA, 23 nt, Human
ccccaggggaccccaggcuccua

SEQ ID NO: 1097851 - RNA, 20 nt, Human
cccggagggggugaggaugg

SEQ ID NO: 1097852 - RNA, 18 nt, Human
ccgaccacaaagacacgc

SEQ ID NO: 1097853 - RNA, 24 nt, Human
ccgaccacaaagacacgccuagac

SEQ ID NO: 1097854 - RNA, 22 nt, Human
ccucaccgcaggaggcccacaa

SEQ ID NO: 1097855 - RNA, 21 nt, Human
ccucccagcugcauaucggcu

SEQ ID NO: 1097856 - RNA, 22 nt, Human
ccugaccaccccaccccagggg

SEQ ID NO: 1097857 - RNA, 23 nt, Human
ccugaccucaagugauccacccc

SEQ ID NO: 1097858 - RNA, 22 nt, Human
ccugcucacccugaccacccca

SEQ ID NO: 1097859 - RNA, 19 nt, Human
ccuggaggaugaggggcag

SEQ ID NO: 1097860 - RNA, 26 nt, Human
ccugucccagcugccuucuuccuggg

SEQ ID NO: 1097861 - RNA, 20 nt, Human
ccuugccuccucggccuggg

SEQ ID NO: 1097862 - RNA, 24 nt, Human
cgcccaggcuggagugcaguggcg

SEQ ID NO: 1097863 - RNA, 24 nt, Human
cgcccagggccaccaagacagucc

SEQ ID NO: 1097864 - RNA, 19 nt, Human
cgccucccggguucacacc

SEQ ID NO: 1097865 - RNA, 24 nt, Human
cgcucugucgcccaggcuggagug

SEQ ID NO: 1097866 - RNA, 24 nt, Human
cgggguuucaccguuuuagccggg

SEQ ID NO: 1097867 - RNA, 24 nt, Human
cuagaccccagagucuagugagga

SEQ ID NO: 1097868 - RNA, 25 nt, Human
cucaagugauccaccccgcccccgc

SEQ ID NO: 1097869 - RNA, 23 nt, Human
cucacccugaccaccccacccca

SEQ ID NO: 1097870 - RNA, 20 nt, Human
cucacugaucaaaaccccaa

SEQ ID NO: 1097871 - RNA, 24 nt, Human
cucagccucccaaguagcugggac

SEQ ID NO: 1097872 - RNA, 21 nt, Human
cucccggguucacaccauucu

SEQ ID NO: 1097873 - RNA, 24 nt, Human
cuccugaccucgugauccgcccgc

SEQ ID NO: 1097874 - RNA, 21 nt, Human
cucgcucugucgcccaggcug

SEQ ID NO: 1097875 - RNA, 24 nt, Human
cucgcucugucgcccaggcuggag

SEQ ID NO: 1097876 - RNA, 20 nt, Human
cucuaggccucguuuuucag

SEQ ID NO: 1097877 - RNA, 23 nt, Human
cucugucgcccaggcuggagugc

SEQ ID NO: 1097878 - RNA, 19 nt, Human
cugagaagggucgaggucu

SEQ ID NO: 1097879 - RNA, 23 nt, Human
cugccucagccucccaaguagcu

SEQ ID NO: 1097880 - RNA, 18 nt, Human
cugcuccuucccgccaga

SEQ ID NO: 1097881 - RNA, 20 nt, Human
cuguagucccuuccccuuca

SEQ ID NO: 1097882 - RNA, 20 nt, Human
gacccaagccccccuccuca

SEQ ID NO: 1097883 - RNA, 18 nt, Human
gaccucaagugauccacc

SEQ ID NO: 1097884 - RNA, 22 nt, Human
gaccucgugauccgcccgccuc

SEQ ID NO: 1097885 - RNA, 22 nt, Human
gaccucgugauccgcccgccuc

SEQ ID NO: 1097886 - RNA, 25 nt, Human
gaccuuacuuucuugacuuggccac

SEQ ID NO: 1097887 - RNA, 19 nt, Human
gagcaaaacagaaaggauc

SEQ ID NO: 1097888 - RNA, 18 nt, Human
gagcugcugcugaaggag

SEQ ID NO: 1097889 - RNA, 22 nt, Human
gagguuucaccauguuggucag

SEQ ID NO: 1097890 - RNA, 20 nt, Human
gagugcaguggcgggaucuc

SEQ ID NO: 1097891 - RNA, 18 nt, Human
gauuacaggcgugagcca

SEQ ID NO: 1097892 - RNA, 18 nt, Human
gauuacaggcgugagcca

SEQ ID NO: 1097893 - RNA, 19 nt, Human
gauuacaggcgugagccac

SEQ ID NO: 1097894 - RNA, 22 nt, Human
gauuacaggcgugagccaccgc

SEQ ID NO: 1097895 - RNA, 22 nt, Human
gauuacaggcgugagccaccgc

SEQ ID NO: 1097896 - RNA, 22 nt, Human
gauuacaggcgugagccacugc

SEQ ID NO: 1097897 - RNA, 18 nt, Human
gauuacagggaugagcca

SEQ ID NO: 1097898 - RNA, 23 nt, Human
gauucuguggaggcuucucagag

SEQ ID NO: 1097899 - RNA, 18 nt, Human
gcacccuugaguuaggcc

SEQ ID NO: 1097900 - RNA, 22 nt, Human
gcacggcaggcaaggaagguuu

SEQ ID NO: 1097901 - RNA, 19 nt, Human
gcccaggcuggagugcagu

SEQ ID NO: 1097902 - RNA, 20 nt, Human
gcccaggcuggagugcagug

SEQ ID NO: 1097903 - RNA, 20 nt, Human
gcccggcccuaauuuuugua

SEQ ID NO: 1097904 - RNA, 23 nt, Human
gcccggcuaauuuuuuguauuuu

SEQ ID NO: 1097905 - RNA, 23 nt, Human
gccucagccucccaaagugcugg

SEQ ID NO: 1097906 - RNA, 20 nt, Human
gccucagccucccaaguagc

SEQ ID NO: 1097907 - RNA, 25 nt, Human
gccucccggguucacaccauucucc

SEQ ID NO: 1097908 - RNA, 23 nt, Human
gccucggccucccaaagugcugg

SEQ ID NO: 1097909 - RNA, 20 nt, Human
gccuucaggagcucuguccu

SEQ ID NO: 1097910 - RNA, 23 nt, Human
gcuggucucaaaccccugaccuc

SEQ ID NO: 1097911 - RNA, 22 nt, Human
gcuuggguguggugugguggcc

SEQ ID NO: 1097912 - RNA, 21 nt, Human
ggagagggacugggggcagug

SEQ ID NO: 1097913 - RNA, 18 nt, Human
ggagcccuuccugcuccu

SEQ ID NO: 1097914 - RNA, 19 nt, Human
ggaugaggggcagacggga

SEQ ID NO: 1097915 - RNA, 24 nt, Human
ggauggucuugaucuccugaccuc

SEQ ID NO: 1097916 - RNA, 23 nt, Human
ggcagcagcagcugcagacagag

SEQ ID NO: 1097917 - RNA, 24 nt, Human
ggcccuggcucagucucagagcug

SEQ ID NO: 1097918 - RNA, 25 nt, Human
ggccuagaggguuuggagaaggccg

SEQ ID NO: 1097919 - RNA, 24 nt, Human
gggagcugcugcugaaggagcccg

SEQ ID NO: 1097920 - RNA, 25 nt, Human
gggaggcccggccacuggugccugc

SEQ ID NO: 1097921 - RNA, 21 nt, Human
gggcagacgggaggcccggcc

SEQ ID NO: 1097922 - RNA, 22 nt, Human
gggccugcaaccacgucuuugg

SEQ ID NO: 1097923 - RNA, 18 nt, Human
ggggagcugcugcugaag

SEQ ID NO: 1097924 - RNA, 23 nt, Human
ggguguggugugguggcccuuuc

SEQ ID NO: 1097925 - RNA, 21 nt, Human
ggugcugcuaguggcccuggc

SEQ ID NO: 1097926 - RNA, 19 nt, Human
guagagacgggguuucacc

SEQ ID NO: 1097927 - RNA, 24 nt, Human
gugauccgcccgccucggccuccc

SEQ ID NO: 1097928 - RNA, 20 nt, Human
guggagugugcugcaccucc

SEQ ID NO: 1097929 - RNA, 22 nt, Human
uaauuuuuguauuuuuaguaga

SEQ ID NO: 1097930 - RNA, 24 nt, Human
uaauuuuuuguauuuuuaguagag

SEQ ID NO: 1097931 - RNA, 23 nt, Human
uacaggcgugagccaccgcgccc

SEQ ID NO: 1097932 - RNA, 19 nt, Human
uacaggcgugagccacugc

SEQ ID NO: 1097933 - RNA, 23 nt, Human
uacaggcgugagccacugcgccc

SEQ ID NO: 1097934 - RNA, 18 nt, Human
uacagggaugagccaccu

SEQ ID NO: 1097935 - RNA, 23 nt, Human
uaggcccccagucguuggcacag

SEQ ID NO: 1097936 - RNA, 21 nt, Human
uaguagagacgggguuucacc

SEQ ID NO: 1097937 - RNA, 22 nt, Human
uaguagagacgggguuucaccg

SEQ ID NO: 1097938 - RNA, 26 nt, Human
uaguagagacgggguuucaccguuuu

SEQ ID NO: 1097939 - RNA, 24 nt, Human
uaguagaguugagguuucaccaug

SEQ ID NO: 1097940 - RNA, 21 nt, Human
ucacaccauucuccugccuca

SEQ ID NO: 1097941 - RNA, 18 nt, Human
ucacugcaagcuccgccu

SEQ ID NO: 1097942 - RNA, 19 nt, Human
ucacugcaagcuccgccuc

SEQ ID NO: 1097943 - RNA, 24 nt, Human
ucacugcaagcuccgccucccggg

SEQ ID NO: 1097944 - RNA, 18 nt, Human
ucagacccaagccccccu

SEQ ID NO: 1097945 - RNA, 18 nt, Human
ucagccucccaaagugcu

SEQ ID NO: 1097946 - RNA, 18 nt, Human
ucagccucccaaguagcu

SEQ ID NO: 1097947 - RNA, 20 nt, Human
ucagccucccaaguagcugg

SEQ ID NO: 1097948 - RNA, 20 nt, Human
uccaccagggccugcaacca

SEQ ID NO: 1097949 - RNA, 22 nt, Human
uccaccagggccugcaaccacg

SEQ ID NO: 1097950 - RNA, 24 nt, Human
ucccaaagugcugggauuacaggc

SEQ ID NO: 1097951 - RNA, 24 nt, Human
ucccaaagugcugggauuacaggc

SEQ ID NO: 1097952 - RNA, 24 nt, Human
ucccaaguagcugggacuacaggc

SEQ ID NO: 1097953 - RNA, 21 nt, Human
ucccagcugccuucuuccugg

SEQ ID NO: 1097954 - RNA, 21 nt, Human
ucccggguucacaccauucuc

SEQ ID NO: 1097955 - RNA, 24 nt, Human
ucccggguucacaccauucuccug

SEQ ID NO: 1097956 - RNA, 18 nt, Human
ucccugucccagcugccu

SEQ ID NO: 1097957 - RNA, 22 nt, Human
ucccugucccagcugccuucuu

SEQ ID NO: 1097958 - RNA, 25 nt, Human
uccuugccuccucggccuggggugg

SEQ ID NO: 1097959 - RNA, 21 nt, Human
ucgaggucugggugcugcuag

SEQ ID NO: 1097960 - RNA, 24 nt, Human
ucgcccaggcuggagugcaguggc

SEQ ID NO: 1097961 - RNA, 22 nt, Human
ucgcccagggccaccaagacag

SEQ ID NO: 1097962 - RNA, 24 nt, Human
ucgcucugucgcccaggcuggagu

SEQ ID NO: 1097963 - RNA, 20 nt, Human
ucggccuggggugguggcgc

SEQ ID NO: 1097964 - RNA, 26 nt, Human
ucuccugccucagccucccaaguagc

SEQ ID NO: 1097965 - RNA, 19 nt, Human
ucucgcucugucgcccagg

SEQ ID NO: 1097966 - RNA, 23 nt, Human
ucucgcucugucgcccaggcugg

SEQ ID NO: 1097967 - RNA, 24 nt, Human
ucucgcucugucgcccaggcugga

SEQ ID NO: 1097968 - RNA, 26 nt, Human
ucucgcucugucgcccaggcuggagu

SEQ ID NO: 1097969 - RNA, 27 nt, Human
ucucgcucugucgcccaggcuggagug

SEQ ID NO: 1097970 - RNA, 18 nt, Human
ucugggacagucuuaugc

SEQ ID NO: 1097971 - RNA, 26 nt, Human
ucuguccugcucagagcugcugaaag

SEQ ID NO: 1097972 - RNA, 24 nt, Human
ucugucgcccaggcuggagugcag

SEQ ID NO: 1097973 - RNA, 21 nt, Human
ugaccucaagugauccacccc

SEQ ID NO: 1097974 - RNA, 23 nt, Human
ugagaagggucgaggucugggug

SEQ ID NO: 1097975 - RNA, 22 nt, Human
ugagacggagucucgcucuguc

SEQ ID NO: 1097976 - RNA, 19 nt, Human
ugagcugcggaaggccacc

SEQ ID NO: 1097977 - RNA, 24 nt, Human
ugagguuucaccauguuggucagg

SEQ ID NO: 1097978 - RNA, 22 nt, Human
ugcaguggcgggaucucggcuc

SEQ ID NO: 1097979 - RNA, 18 nt, Human
ugcccggagggggugagg

SEQ ID NO: 1097980 - RNA, 24 nt, Human
ugccucagccucccaaguagcugg

SEQ ID NO: 1097981 - RNA, 21 nt, Human
ugcugcaccuccuucaguggc

SEQ ID NO: 1097982 - RNA, 24 nt, Human
ugcugggauuacaggcgugagcca

SEQ ID NO: 1097983 - RNA, 24 nt, Human
ugcugggauuacaggcgugagcca

SEQ ID NO: 1097984 - RNA, 24 nt, Human
uggagugcaguggcgggaucucgg

SEQ ID NO: 1097985 - RNA, 21 nt, Human
uggagugugcugcaccuccuu

SEQ ID NO: 1097986 - RNA, 25 nt, Human
uggaugucccgccauuuucagcccu

SEQ ID NO: 1097987 - RNA, 19 nt, Human
uggcaaagugacgcccccc

SEQ ID NO: 1097988 - RNA, 22 nt, Human
uggcaaagugacgccccccucg

SEQ ID NO: 1097989 - RNA, 26 nt, Human
uggcaggaagagggcugaccggaacg

SEQ ID NO: 1097990 - RNA, 23 nt, Human
uggcaggaagagggcugagcugc

SEQ ID NO: 1097991 - RNA, 18 nt, Human
ugggacagucuuaugcac

SEQ ID NO: 1097992 - RNA, 24 nt, Human
ugggaccuuguguauagguccagg

SEQ ID NO: 1097993 - RNA, 21 nt, Human
ugggacuacaggcgcccgcca

SEQ ID NO: 1097994 - RNA, 22 nt, Human
ugggacuacaggcgcccgccac

SEQ ID NO: 1097995 - RNA, 22 nt, Human
ugggacuacaggcgcccgccac

SEQ ID NO: 1097996 - RNA, 24 nt, Human
ugggacuacaggcgcccgccacua

SEQ ID NO: 1097997 - RNA, 18 nt, Human
ugggauuacaggcgugag

SEQ ID NO: 1097998 - RNA, 18 nt, Human
ugggauuacaggcgugag

SEQ ID NO: 1097999 - RNA, 19 nt, Human
ugggauuacaggcgugagc

SEQ ID NO: 1098000 - RNA, 19 nt, Human
ugggauuacaggcgugagc

SEQ ID NO: 1098001 - RNA, 21 nt, Human
ugggauuacaggcgugagcca

SEQ ID NO: 1098002 - RNA, 21 nt, Human
ugggauuacaggcgugagcca

SEQ ID NO: 1098003 - RNA, 22 nt, Human
ugggauuacaggcgugagccac

SEQ ID NO: 1098004 - RNA, 22 nt, Human
ugggauuacaggcgugagccac

SEQ ID NO: 1098005 - RNA, 22 nt, Human
ugggauuacaggcgugagccac

SEQ ID NO: 1098006 - RNA, 23 nt, Human
ugggauuacaggcgugagccacc

SEQ ID NO: 1098007 - RNA, 24 nt, Human
ugggauuacaggcgugagccaccg

SEQ ID NO: 1098008 - RNA, 24 nt, Human
ugggauuacaggcgugagccacug

SEQ ID NO: 1098009 - RNA, 26 nt, Human
ugggauuacaggcgugagccacugcg

SEQ ID NO: 1098010 - RNA, 21 nt, Human
ugggauuacagggaugagcca

SEQ ID NO: 1098011 - RNA, 22 nt, Human
ugggauuacagggaugagccac

SEQ ID NO: 1098012 - RNA, 23 nt, Human
ugggauuacagggaugagccacc

SEQ ID NO: 1098013 - RNA, 24 nt, Human
ugggauuacagggaugagccaccu

SEQ ID NO: 1098014 - RNA, 24 nt, Human
uggucaggcuggucucaaaccccu

SEQ ID NO: 1098015 - RNA, 21 nt, Human
uggucuucccuccuugccucc

SEQ ID NO: 1098016 - RNA, 19 nt, Human
uggugugguggcccuuucc

SEQ ID NO: 1098017 - RNA, 20 nt, Human
uguauagguccaggcagcag

SEQ ID NO: 1098018 - RNA, 21 nt, Human
uguauuuuuaguagagacggg

SEQ ID NO: 1098019 - RNA, 21 nt, Human
ugucccagcugccuucuuccu

SEQ ID NO: 1098020 - RNA, 22 nt, Human
uuaguagagacgggguuucacc

SEQ ID NO: 1098021 - RNA, 22 nt, Human
uuaguagagacgggguuucacc

SEQ ID NO: 1098022 - RNA, 24 nt, Human
uuaguagagacgggguuucaccgu

SEQ ID NO: 1098023 - RNA, 24 nt, Human
uuaguagaguugagguuucaccau

SEQ ID NO: 1098024 - RNA, 19 nt, Human
uucagguguauaugaugau

SEQ ID NO: 1098025 - RNA, 22 nt, Human
uucaguuguaaagcagggauga

SEQ ID NO: 1098026 - RNA, 24 nt, Human
uugagguuucaccauguuggucag

SEQ ID NO: 1098027 - RNA, 23 nt, Human
uuguaugggcuuggguguggugu

SEQ ID NO: 1098028 - RNA, 23 nt, Human
uuguuuuuuuuuuuuuuuuuggg

SEQ ID NO: 1098029 - RNA, 24 nt, Human
uuucaccauguuggucaggcuggu

SEQ ID NO: 1098030 - RNA, 24 nt, Human
uuucccugucccagcugccuucuu

SEQ ID NO: 1098031 - RNA, 18 nt, Human
uuuggccccggugagggg

SEQ ID NO: 1098032 - RNA, 24 nt, Human
uuuuuaguagagacgggguuucac

SEQ ID NO: 1098033 - RNA, 24 nt, Human
uuuuuaguagaguugagguuucac

SEQ ID NO: 1098034 - RNA, 20 nt, Human
uuuuuguauuuuuaguagag

SEQ ID NO: 1098035 - RNA, 21 nt, Human
uuuuuguauuuuuaguagaga

SEQ ID NO: 1098036 - RNA, 24 nt, Human
uuuuuuguauuuuuaguagagacg

SEQ ID NO: 1098037 - RNA, 25 nt, Human
uuuuuuuuuuuugagacggagucuc

SEQ ID NO: 1098038 - RNA, 22 nt, Human
uuuuuuuuuuuuuugagacgga

SEQ ID NO: 1098039 - RNA, 19 nt, Human
aaaaaaaaagccaagucuc

SEQ ID NO: 1098040 - RNA, 22 nt, Human
aaaaaaaaagccaagucuccca

SEQ ID NO: 1098041 - RNA, 24 nt, Human
aaaaaaagccaagucucccacaaa

SEQ ID NO: 1098042 - RNA, 24 nt, Human
aaacacggcgcagcugccccgcgc

SEQ ID NO: 1098043 - RNA, 25 nt, Human
aaacccugaauuugaaaaaggcaac

SEQ ID NO: 1098044 - RNA, 24 nt, Human
aagcgcaggacagacccuuccccu

SEQ ID NO: 1098045 - RNA, 22 nt, Human
acaauacauuuugugaaaaaca

SEQ ID NO: 1098046 - RNA, 19 nt, Human
accaagaaaccggcagggc

SEQ ID NO: 1098047 - RNA, 25 nt, Human
accccgaggccgggcagcagcagcg

SEQ ID NO: 1098048 - RNA, 22 nt, Human
agaaaaagaugaaaagagggac

SEQ ID NO: 1098049 - RNA, 21 nt, Human
agaagaaaaaaaaaagccaag

SEQ ID NO: 1098050 - RNA, 23 nt, Human
agcagcagcagcagccgccgggc

SEQ ID NO: 1098051 - RNA, 23 nt, Human
agcugugccucgucuucucuggg

SEQ ID NO: 1098052 - RNA, 23 nt, Human
aggaauuccccucaagucauauc

SEQ ID NO: 1098053 - RNA, 21 nt, Human
aggcagcgccggcgcccgccc

SEQ ID NO: 1098054 - RNA, 26 nt, Human
aguacagacaguuauuuaccuaaaau

SEQ ID NO: 1098055 - RNA, 18 nt, Human
agucgcaguguucacagc

SEQ ID NO: 1098056 - RNA, 29 nt, Human
caaauuuuccuuuauuuaaaaaaaaaaac

SEQ ID NO: 1098057 - RNA, 25 nt, Human
caaccagaagaaaaaaaaaagccaa

SEQ ID NO: 1098058 - RNA, 21 nt, Human
caagaaaccggcagggcaagu

SEQ ID NO: 1098059 - RNA, 22 nt, Human
caccccgaggccgggcagcagc

SEQ ID NO: 1098060 - RNA, 19 nt, Human
caccugguacaugauaucc

SEQ ID NO: 1098061 - RNA, 22 nt, Human
cacgcuccccggucacucaccc

SEQ ID NO: 1098062 - RNA, 22 nt, Human
cagacccuuccccuggauccca

SEQ ID NO: 1098063 - RNA, 18 nt, Human
cagcagcagcagcagccg

SEQ ID NO: 1098064 - RNA, 22 nt, Human
cagcagcagcagccgccgggcc

SEQ ID NO: 1098065 - RNA, 18 nt, Human
cagcagcagcgucagcag

SEQ ID NO: 1098066 - RNA, 23 nt, Human
cagcagcuaccggaggcuuccag

SEQ ID NO: 1098067 - RNA, 21 nt, Human
cagccgcgcuggcuugggagg

SEQ ID NO: 1098068 - RNA, 22 nt, Human
caguaccaagaaaccggcaggg

SEQ ID NO: 1098069 - RNA, 25 nt, Human
caguaccaagaaaccggcagggcaa

SEQ ID NO: 1098070 - RNA, 23 nt, Human
ccacaaagugcccccaaauccac

SEQ ID NO: 1098071 - RNA, 21 nt, Human
ccagaaaaagaugaaaagaca

SEQ ID NO: 1098072 - RNA, 21 nt, Human
ccagaagaaaaaaaaaagcca

SEQ ID NO: 1098073 - RNA, 22 nt, Human
cccacaaagugcccccaaaucc

SEQ ID NO: 1098074 - RNA, 23 nt, Human
cccacaaagugcccccaaaucca

SEQ ID NO: 1098075 - RNA, 31 nt, Human
cccacaaagugcccccaaauccacagcugag

SEQ ID NO: 1098076 - RNA, 25 nt, Human
cccacgcuccccggucacucacccc

SEQ ID NO: 1098077 - RNA, 22 nt, Human
cccacggcugggcucacggggc

SEQ ID NO: 1098078 - RNA, 24 nt, Human
cccagcucggacuccagccccggc

SEQ ID NO: 1098079 - RNA, 21 nt, Human
cccaguaccaagaaaccggca

SEQ ID NO: 1098080 - RNA, 21 nt, Human
cccccaaauccacagcugagu

SEQ ID NO: 1098081 - RNA, 22 nt, Human
ccccgaggccgggcagcagcag

SEQ ID NO: 1098082 - RNA, 18 nt, Human
ccccgccaggcagcgccg

SEQ ID NO: 1098083 - RNA, 19 nt, Human
ccccucaagucauauccac

SEQ ID NO: 1098084 - RNA, 18 nt, Human
ccccuuucuuccuuuucc

SEQ ID NO: 1098085 - RNA, 26 nt, Human
cccggccccgacccggccgucgcgag

SEQ ID NO: 1098086 - RNA, 22 nt, Human
cccggcccgagccucccacggc

SEQ ID NO: 1098087 - RNA, 18 nt, Human
cccuaucauucgucuccu

SEQ ID NO: 1098088 - RNA, 18 nt, Human
cccuggaucccaacgccc

SEQ ID NO: 1098089 - RNA, 19 nt, Human
ccgcaggugggcggccucc

SEQ ID NO: 1098090 - RNA, 24 nt, Human
ccgcgacgcugccccggccccgac

SEQ ID NO: 1098091 - RNA, 18 nt, Human
ccggcgccgcgacgcugc

SEQ ID NO: 1098092 - RNA, 18 nt, Human
ccgucgcgagcuguccuc

SEQ ID NO: 1098093 - RNA, 23 nt, Human
ccgucgcgcucccagcucggacu

SEQ ID NO: 1098094 - RNA, 20 nt, Human
ccuaaaaugcaaaaccucca

SEQ ID NO: 1098095 - RNA, 19 nt, Human
ccuccaccccacgcucccc

SEQ ID NO: 1098096 - RNA, 20 nt, Human
ccuccagaaaaagaugaaaa

SEQ ID NO: 1098097 - RNA, 21 nt, Human
ccuccuacgcccggcccgagc

SEQ ID NO: 1098098 - RNA, 22 nt, Human
ccuccuuuucgucuuuccgccg

SEQ ID NO: 1098099 - RNA, 22 nt, Human
ccugcagccucccaguaccaag

SEQ ID NO: 1098100 - RNA, 18 nt, Human
ccuggcuccgggggcggu

SEQ ID NO: 1098101 - RNA, 22 nt, Human
ccuuauuuauuuacuucuccug

SEQ ID NO: 1098102 - RNA, 24 nt, Human
cgaacccaugcgggaucuuccaag

SEQ ID NO: 1098103 - RNA, 18 nt, Human
cgacagcgaggcggugac

SEQ ID NO: 1098104 - RNA, 22 nt, Human
cggaggcuuccagcaaacacgg

SEQ ID NO: 1098105 - RNA, 18 nt, Human
cggcgccgcgacgcugcc

SEQ ID NO: 1098106 - RNA, 25 nt, Human
cuagaagccuccuuuucgucuuucc

SEQ ID NO: 1098107 - RNA, 21 nt, Human
cuccagccccggcgccgcgac

SEQ ID NO: 1098108 - RNA, 22 nt, Human
cuccuccagaaaaagaugaaaa

SEQ ID NO: 1098109 - RNA, 20 nt, Human
cuccuccgcggcccccgcca

SEQ ID NO: 1098110 - RNA, 21 nt, Human
cucggcccuggcuccgggggc

SEQ ID NO: 1098111 - RNA, 22 nt, Human
cugauggccccaggugcucucc

SEQ ID NO: 1098112 - RNA, 23 nt, Human
cugcagccucccaguaccaagaa

SEQ ID NO: 1098113 - RNA, 24 nt, Human
cuggcuccgggggcgguacggaca

SEQ ID NO: 1098114 - RNA, 21 nt, Human
cuucugggacccccaagugcc

SEQ ID NO: 1098115 - RNA, 19 nt, Human
gaagcucucccggcccggu

SEQ ID NO: 1098116 - RNA, 24 nt, Human
gcaaaaccuccaaagaguucacac

SEQ ID NO: 1098117 - RNA, 19 nt, Human
gcaauucccacagcuccac

SEQ ID NO: 1098118 - RNA, 20 nt, Human
gcagaagccagcucucgggg

SEQ ID NO: 1098119 - RNA, 18 nt, Human
gcagcagcagcgucagca

SEQ ID NO: 1098120 - RNA, 19 nt, Human
gcagcagcagcgucagcag

SEQ ID NO: 1098121 - RNA, 23 nt, Human
gccccuuucuuccuuuuccuugc

SEQ ID NO: 1098122 - RNA, 21 nt, Human
gccgcgcuggcuugggaggcu

SEQ ID NO: 1098123 - RNA, 20 nt, Human
gcgcagcugccccgcgcggc

SEQ ID NO: 1098124 - RNA, 20 nt, Human
gcugcccgugacagccgcgc

SEQ ID NO: 1098125 - RNA, 21 nt, Human
ggaauuccccucaagucauau

SEQ ID NO: 1098126 - RNA, 23 nt, Human
ggaauuccccucaagucauaucc

SEQ ID NO: 1098127 - RNA, 21 nt, Human
gggcagcagcagcgucagcag

SEQ ID NO: 1098128 - RNA, 22 nt, Human
ggggaaaagggcgggacacggg

SEQ ID NO: 1098129 - RNA, 21 nt, Human
ggugcacagaaggaagccugc

SEQ ID NO: 1098130 - RNA, 19 nt, Human
gucgcaguguucacagccu

SEQ ID NO: 1098131 - RNA, 22 nt, Human
uaaaaugcaaaaccuccaaaga

SEQ ID NO: 1098132 - RNA, 23 nt, Human
uaaaaugcaaaaccuccaaagag

SEQ ID NO: 1098133 - RNA, 21 nt, Human
uaaaugaauguaaaccaggcc

SEQ ID NO: 1098134 - RNA, 24 nt, Human
uaccuaaaaugcaaaaccuccaaa

SEQ ID NO: 1098135 - RNA, 19 nt, Human
uacggacagaggacggggc

SEQ ID NO: 1098136 - RNA, 21 nt, Human
uagaagccuccuuuucgucuu

SEQ ID NO: 1098137 - RNA, 23 nt, Human
ucaaacaaggauucgaagcgcag

SEQ ID NO: 1098138 - RNA, 24 nt, Human
uccaaagaguucacacgguggcug

SEQ ID NO: 1098139 - RNA, 19 nt, Human
uccaaccagaagaaaaaaa

SEQ ID NO: 1098140 - RNA, 23 nt, Human
uccccggucacucaccccgaggc

SEQ ID NO: 1098141 - RNA, 23 nt, Human
uccuccagaaaaagaugaaaaga

SEQ ID NO: 1098142 - RNA, 23 nt, Human
ucgcgagcuguccuccaccccac

SEQ ID NO: 1098143 - RNA, 19 nt, Human
ucggacuccagccccggcg

SEQ ID NO: 1098144 - RNA, 19 nt, Human
ucucccggcccggugccgc

SEQ ID NO: 1098145 - RNA, 21 nt, Human
ucucccggcccggugccgccu

SEQ ID NO: 1098146 - RNA, 18 nt, Human
ucuuccuuuuccuugccc

SEQ ID NO: 1098147 - RNA, 24 nt, Human
ucuucucuggggccccuuucuucc

SEQ ID NO: 1098148 - RNA, 24 nt, Human
ugagaguccuuacucccuguugca

SEQ ID NO: 1098149 - RNA, 21 nt, Human
ugcacagaaggaagccugcag

SEQ ID NO: 1098150 - RNA, 19 nt, Human
uggccccaggugcucuccc

SEQ ID NO: 1098151 - RNA, 21 nt, Human
uggcgaggacucggcccuggc

SEQ ID NO: 1098152 - RNA, 21 nt, Human
uggggccccuuucuuccuuuu

SEQ ID NO: 1098153 - RNA, 21 nt, Human
uguccuccaccccacgcuccc

SEQ ID NO: 1098154 - RNA, 23 nt, Human
uuaaaugaauguaaaccaggccc

SEQ ID NO: 1098155 - RNA, 24 nt, Human
uuagguucuuccaaccagaagaaa

SEQ ID NO: 1098156 - RNA, 24 nt, Human
uuccuuuuccuugcccucaggaau

SEQ ID NO: 1098157 - RNA, 18 nt, Human
agacaaaagcaagaaaca

SEQ ID NO: 1098158 - RNA, 19 nt, Human
agaugucaaaauuuccagc

SEQ ID NO: 1098159 - RNA, 25 nt, Human
aagcaauccucccaccucagccucc

SEQ ID NO: 1098160 - RNA, 21 nt, Human
aagugcagggauuacaggcau

SEQ ID NO: 1098161 - RNA, 23 nt, Human
aagugcagggauuacaggcauga

SEQ ID NO: 1098162 - RNA, 21 nt, Human
acaggccugugccaccacacc

SEQ ID NO: 1098163 - RNA, 22 nt, Human
acccgccuuggccucccuaagu

SEQ ID NO: 1098164 - RNA, 23 nt, Human
accucagccuccugaguggcuag

SEQ ID NO: 1098165 - RNA, 24 nt, Human
accucagccuccugaguggcuagg

SEQ ID NO: 1098166 - RNA, 21 nt, Human
accucccaaagggguaggagu

SEQ ID NO: 1098167 - RNA, 24 nt, Human
accucgugauccacccgccuuggc

SEQ ID NO: 1098168 - RNA, 19 nt, Human
agaaacugaugaguaagac

SEQ ID NO: 1098169 - RNA, 18 nt, Human
agacagggucuugcuacg

SEQ ID NO: 1098170 - RNA, 23 nt, Human
agacagggucuugcuacguugcc

SEQ ID NO: 1098171 - RNA, 18 nt, Human
agagguuucucuguaagg

SEQ ID NO: 1098172 - RNA, 18 nt, Human
agccaccgcacccggccu

SEQ ID NO: 1098173 - RNA, 25 nt, Human
agcgauccucuugccuugaccuccc

SEQ ID NO: 1098174 - RNA, 18 nt, Human
agcuggucuugaacuccu

SEQ ID NO: 1098175 - RNA, 24 nt, Human
agcuggucuugaacuccugggcuc

SEQ ID NO: 1098176 - RNA, 24 nt, Human
aggcacaagcaauccucccaccuc

SEQ ID NO: 1098177 - RNA, 22 nt, Human
agggauuacaggcaugagccac

SEQ ID NO: 1098178 - RNA, 24 nt, Human
agggauuacaggcaugagccaccg

SEQ ID NO: 1098179 - RNA, 22 nt, Human
aguagaggcgggguuucaccau

SEQ ID NO: 1098180 - RNA, 23 nt, Human
aguagaggcgggguuucaccaug

SEQ ID NO: 1098181 - RNA, 24 nt, Human
aguuuuacuuuuuaaacugcuucu

SEQ ID NO: 1098182 - RNA, 19 nt, Human
auccacccgccuuggccuc

SEQ ID NO: 1098183 - RNA, 27 nt, Human
caagcaauccucccaccucagccuccu

SEQ ID NO: 1098184 - RNA, 28 nt, Human
caagcgauccucuugccuugaccuccca

SEQ ID NO: 1098185 - RNA, 24 nt, Human
cacaagcaauccucccaccucagc

SEQ ID NO: 1098186 - RNA, 20 nt, Human
caccacaacaacguuuauac

SEQ ID NO: 1098187 - RNA, 18 nt, Human
caccauguuagccaggau

SEQ ID NO: 1098188 - RNA, 22 nt, Human
caccauguuagccaggaugguc

SEQ ID NO: 1098189 - RNA, 24 nt, Human
caccauguuagccaggauggucuc

SEQ ID NO: 1098190 - RNA, 19 nt, Human
cagccuccugaguggcuag

SEQ ID NO: 1098191 - RNA, 24 nt, Human
cagccuugaccucccaggcacaag

SEQ ID NO: 1098192 - RNA, 23 nt, Human
caggcacaagcaauccucccacc

SEQ ID NO: 1098193 - RNA, 18 nt, Human
cagggucuugcuacguug

SEQ ID NO: 1098194 - RNA, 22 nt, Human
cagugcagccuugaccucccag

SEQ ID NO: 1098195 - RNA, 24 nt, Human
ccaagcuggucuugaacuccuggg

SEQ ID NO: 1098196 - RNA, 20 nt, Human
ccaccacaccuggcuaauuu

SEQ ID NO: 1098197 - RNA, 23 nt, Human
ccaccucagccuccugaguggcu

SEQ ID NO: 1098198 - RNA, 23 nt, Human
ccaguaagcagaaacugaugagu

SEQ ID NO: 1098199 - RNA, 18 nt, Human
cccaaagggguaggagua

SEQ ID NO: 1098200 - RNA, 23 nt, Human
cccaccucagccuccugaguggc

SEQ ID NO: 1098201 - RNA, 23 nt, Human
ccuaagugcagggauuacaggca

SEQ ID NO: 1098202 - RNA, 24 nt, Human
ccuaagugcagggauuacaggcau

SEQ ID NO: 1098203 - RNA, 24 nt, Human
ccucccaccucagccuccugagug

SEQ ID NO: 1098204 - RNA, 20 nt, Human
ccucccuaagugcagggauu

SEQ ID NO: 1098205 - RNA, 20 nt, Human
ccugaccucgugauccaccc

SEQ ID NO: 1098206 - RNA, 19 nt, Human
ccugggcucaagcgauccu

SEQ ID NO: 1098207 - RNA, 19 nt, Human
cgggguuucaccauguuag

SEQ ID NO: 1098208 - RNA, 23 nt, Human
cgggguuucaccauguuagccag

SEQ ID NO: 1098209 - RNA, 23 nt, Human
cuaagugcagggauuacaggcau

SEQ ID NO: 1098210 - RNA, 21 nt, Human
cuaggacuacaggccugugcc

SEQ ID NO: 1098211 - RNA, 21 nt, Human
cucaauaaaugaaaggucacc

SEQ ID NO: 1098212 - RNA, 24 nt, Human
cuccugaccucgugauccacccgc

SEQ ID NO: 1098213 - RNA, 24 nt, Human
cuccugaguggcuaggacuacagg

SEQ ID NO: 1098214 - RNA, 19 nt, Human
cuggucuugaacuccuggg

SEQ ID NO: 1098215 - RNA, 21 nt, Human
gaccucgugauccacccgccu

SEQ ID NO: 1098216 - RNA, 21 nt, Human
gaccucgugauccacccgccu

SEQ ID NO: 1098217 - RNA, 22 nt, Human
gaccucgugauccacccgccuu

SEQ ID NO: 1098218 - RNA, 24 nt, Human
gaccucgugauccacccgccuugg

SEQ ID NO: 1098219 - RNA, 24 nt, Human
gaggcgggguuucaccauguuagc

SEQ ID NO: 1098220 - RNA, 21 nt, Human
gaguacagguaugagccacca

SEQ ID NO: 1098221 - RNA, 18 nt, Human
gauuacaggcaugagcca

SEQ ID NO: 1098222 - RNA, 22 nt, Human
gauuacaggcaugagccaccgc

SEQ ID NO: 1098223 - RNA, 23 nt, Human
gauuacaggcaugagccaccgca

SEQ ID NO: 1098224 - RNA, 18 nt, Human
gcgggguuucaccauguu

SEQ ID NO: 1098225 - RNA, 19 nt, Human
gcgggguuucaccauguua

SEQ ID NO: 1098226 - RNA, 24 nt, Human
gcgggguuucaccauguuagccag

SEQ ID NO: 1098227 - RNA, 24 nt, Human
gcuacguugcccaagcuggucuug

SEQ ID NO: 1098228 - RNA, 22 nt, Human
ggacuacaggccugugccacca

SEQ ID NO: 1098229 - RNA, 22 nt, Human
ggaguacagguaugagccacca

SEQ ID NO: 1098230 - RNA, 24 nt, Human
ggaguacagguaugagccaccaug

SEQ ID NO: 1098231 - RNA, 24 nt, Human
ggauggucucgaucuccugaccuc

SEQ ID NO: 1098232 - RNA, 22 nt, Human
ggauuacaggcaugagccaccg

SEQ ID NO: 1098233 - RNA, 22 nt, Human
gggauuacaggcaugagccacc

SEQ ID NO: 1098234 - RNA, 23 nt, Human
gggauuacaggcaugagccaccg

SEQ ID NO: 1098235 - RNA, 18 nt, Human
gggcaaguuuagggcaga

SEQ ID NO: 1098236 - RNA, 18 nt, Human
gggcagaggaggaucuca

SEQ ID NO: 1098237 - RNA, 22 nt, Human
gggcucaagcgauccucuugcc

SEQ ID NO: 1098238 - RNA, 23 nt, Human
gggguuucaccauguuagccagg

SEQ ID NO: 1098239 - RNA, 22 nt, Human
ggguuucaccauguuagccagg

SEQ ID NO: 1098240 - RNA, 24 nt, Human
gguuucaccauguuagccaggaug

SEQ ID NO: 1098241 - RNA, 23 nt, Human
guagaggcgggguuucaccaugu

SEQ ID NO: 1098242 - RNA, 22 nt, Human
gucuugaacuccugggcucaag

SEQ ID NO: 1098243 - RNA, 24 nt, Human
gugauccacccgccuuggccuccc

SEQ ID NO: 1098244 - RNA, 18 nt, Human
uaagggaagggugauggg

SEQ ID NO: 1098245 - RNA, 23 nt, Human
uacaggcaugagccaccgcaccc

SEQ ID NO: 1098246 - RNA, 21 nt, Human
uacaggccugugccaccacac

SEQ ID NO: 1098247 - RNA, 22 nt, Human
uacaggccugugccaccacacc

SEQ ID NO: 1098248 - RNA, 18 nt, Human
uacagguaugagccacca

SEQ ID NO: 1098249 - RNA, 24 nt, Human
uacguugcccaagcuggucuugaa

SEQ ID NO: 1098250 - RNA, 22 nt, Human
uagagacagggucuugcuacgu

SEQ ID NO: 1098251 - RNA, 21 nt, Human
uagaggcgggguuucaccaug

SEQ ID NO: 1098252 - RNA, 24 nt, Human
uaggacuacaggccugugccacca

SEQ ID NO: 1098253 - RNA, 24 nt, Human
uaggaguacagguaugagccacca

SEQ ID NO: 1098254 - RNA, 19 nt, Human
uaggauaguagacuggaua

SEQ ID NO: 1098255 - RNA, 18 nt, Human
uauacacccauacauaug

SEQ ID NO: 1098256 - RNA, 24 nt, Human
ucaccauguuagccaggauggucu

SEQ ID NO: 1098257 - RNA, 23 nt, Human
ucacccaggguuucaaauuuuca

SEQ ID NO: 1098258 - RNA, 23 nt, Human
ucagugcagccuugaccucccag

SEQ ID NO: 1098259 - RNA, 24 nt, Human
ucagugcagccuugaccucccagg

SEQ ID NO: 1098260 - RNA, 22 nt, Human
uccacccgccuuggccucccua

SEQ ID NO: 1098261 - RNA, 24 nt, Human
ucccuaagugcagggauuacaggc

SEQ ID NO: 1098262 - RNA, 22 nt, Human
uccucaauaaaugaaaggucac

SEQ ID NO: 1098263 - RNA, 24 nt, Human
uccugaguggcuaggacuacaggc

SEQ ID NO: 1098264 - RNA, 21 nt, Human
uccugggcucaagcgauccuc

SEQ ID NO: 1098265 - RNA, 21 nt, Human
uccugggcucaagcgauccuc

SEQ ID NO: 1098266 - RNA, 21 nt, Human
uccugggcucaagcgauccuc

SEQ ID NO: 1098267 - RNA, 24 nt, Human
uccugggcucaagcgauccucuug

SEQ ID NO: 1098268 - RNA, 22 nt, Human
ucucacuguucauccuguagcu

SEQ ID NO: 1098269 - RNA, 19 nt, Human
ucuugaacuccugggcuca

SEQ ID NO: 1098270 - RNA, 23 nt, Human
ucuugaacuccugggcucaagcg

SEQ ID NO: 1098271 - RNA, 20 nt, Human
ucuugccuugaccucccaaa

SEQ ID NO: 1098272 - RNA, 23 nt, Human
ucuugcuacguugcccaagcugg

SEQ ID NO: 1098273 - RNA, 24 nt, Human
ucuugcuacguugcccaagcuggu

SEQ ID NO: 1098274 - RNA, 25 nt, Human
ugaacuccugggcucaagcgauccu

SEQ ID NO: 1098275 - RNA, 24 nt, Human
ugaccucccaggcacaagcaaucc

SEQ ID NO: 1098276 - RNA, 24 nt, Human
ugcccaagcuggucuugaacuccu

SEQ ID NO: 1098277 - RNA, 27 nt, Human
ugcuacguugcccaagcuggucuugaa

SEQ ID NO: 1098278 - RNA, 19 nt, Human
ugggcucaagcgauccucu

SEQ ID NO: 1098279 - RNA, 24 nt, Human
ugggcucaagcgauccucuugccu

SEQ ID NO: 1098280 - RNA, 19 nt, Human
uguagagacagggucuugc

SEQ ID NO: 1098281 - RNA, 26 nt, Human
uuauuucacucucuuauacacccaua

SEQ ID NO: 1098282 - RNA, 19 nt, Human
uucacucucuuauacaccc

SEQ ID NO: 1098283 - RNA, 24 nt, Human
uuguagagacagggucuugcuacg

SEQ ID NO: 1098284 - RNA, 19 nt, Human
uuucaccauguuagccagg

SEQ ID NO: 1098285 - RNA, 20 nt, Human
uuucaccauguuagccagga

SEQ ID NO: 1098286 - RNA, 18 nt, Human
uuuguagagacagggucu

SEQ ID NO: 1098287 - RNA, 22 nt, Human
aauuauccagccaugagcccug

SEQ ID NO: 1098288 - RNA, 23 nt, Human
aggggcugggcaugguuggcuuu

SEQ ID NO: 1098289 - RNA, 23 nt, Human
caaaaaauaaaacgaggaggcga

SEQ ID NO: 1098290 - RNA, 21 nt, Human
cgucagaauucagaacgaugg

SEQ ID NO: 1098291 - RNA, 19 nt, Human
ggaggcgaagcuugcuugg

SEQ ID NO: 1098292 - RNA, 20 nt, Human
ggggcuggggguguugggag

SEQ ID NO: 1098293 - RNA, 18 nt, Human
guguugggaggggcuggg

SEQ ID NO: 1098294 - RNA, 19 nt, Human
uaaaacgaggaggcgaagc

SEQ ID NO: 1098295 - RNA, 21 nt, Human
uaacaaaaaauaaaacgagga

SEQ ID NO: 1098296 - RNA, 24 nt, Human
uauccagccaugagcccuggccca

SEQ ID NO: 1098297 - RNA, 23 nt, Human
ucucucgagcugcacucuuucuu

SEQ ID NO: 1098298 - RNA, 23 nt, Human
uggcuuugugaucuggggucugg

SEQ ID NO: 1098299 - RNA, 18 nt, Human
ugggaggggcugggcaug

SEQ ID NO: 1098300 - RNA, 18 nt, Human
ugggaggggcugggcaug

SEQ ID NO: 1098301 - RNA, 20 nt, Human
ugggaggggcugggcauggu

SEQ ID NO: 1098302 - RNA, 18 nt, Human
uggggcuggggguguugg

SEQ ID NO: 1098303 - RNA, 19 nt, Human
uguugggaggggcugggca

SEQ ID NO: 1098304 - RNA, 23 nt, Human
accuccacugccaccucucugau

SEQ ID NO: 1098305 - RNA, 20 nt, Human
acugacuccugauuccuagu

SEQ ID NO: 1098306 - RNA, 26 nt, Human
agcuggcacuggcaacaccuggcaca

SEQ ID NO: 1098307 - RNA, 20 nt, Human
aggaguuugagaccagcgug

SEQ ID NO: 1098308 - RNA, 21 nt, Human
aguuuccaacucuuggguagc

SEQ ID NO: 1098309 - RNA, 21 nt, Human
caacaaccgcagcgaggcgag

SEQ ID NO: 1098310 - RNA, 21 nt, Human
caacaccuggcacaucgcucc

SEQ ID NO: 1098311 - RNA, 24 nt, Human
cacugcuuugggaggccaaggugg

SEQ ID NO: 1098312 - RNA, 22 nt, Human
cagccgcacuccuaucuccguc

SEQ ID NO: 1098313 - RNA, 24 nt, Human
ccaugaguccaggaguuugagacc

SEQ ID NO: 1098314 - RNA, 21 nt, Human
cccacagccacacagcaggcu

SEQ ID NO: 1098315 - RNA, 19 nt, Human
ccgcgcucccgcggcucca

SEQ ID NO: 1098316 - RNA, 24 nt, Human
ccuggcacaucgcuccagccgcac

SEQ ID NO: 1098317 - RNA, 18 nt, Human
cgaggcgagccgcgcucc

SEQ ID NO: 1098318 - RNA, 18 nt, Human
cggcuccagccuccagca

SEQ ID NO: 1098319 - RNA, 18 nt, Human
cugccaccucucugauga

SEQ ID NO: 1098320 - RNA, 28 nt, Human
cuucucugcuuuaagugccaucugaaga

SEQ ID NO: 1098321 - RNA, 20 nt, Human
cuuugggaggccaagguggg

SEQ ID NO: 1098322 - RNA, 23 nt, Human
gccaccucucugaugacucccac

SEQ ID NO: 1098323 - RNA, 23 nt, Human
gcuccagccgcacuccuaucucc

SEQ ID NO: 1098324 - RNA, 18 nt, Human
uaacaaaccuccacugcc

SEQ ID NO: 1098325 - RNA, 23 nt, Human
uaacaaaccuccacugccaccuc

SEQ ID NO: 1098326 - RNA, 22 nt, Human
uaucuccgucgcugccaacaac

SEQ ID NO: 1098327 - RNA, 18 nt, Human
ucccgcggcuccagccuc

SEQ ID NO: 1098328 - RNA, 18 nt, Human
ugacucccacagccacac

SEQ ID NO: 1098329 - RNA, 21 nt, Human
ugacuccugauuccuaguccu

SEQ ID NO: 1098330 - RNA, 25 nt, Human
ugcacaguguucacggugcugccaa

SEQ ID NO: 1098331 - RNA, 22 nt, Human
ugccaacaaccgcagcgaggcg

SEQ ID NO: 1098332 - RNA, 27 nt, Human
uggcaacaccuggcacaucgcuccagc

SEQ ID NO: 1098333 - RNA, 19 nt, Human
ugggaggccaaggugggag

SEQ ID NO: 1098334 - RNA, 25 nt, Human
aaacagguaacauucccuggaucug

SEQ ID NO: 1098335 - RNA, 19 nt, Human
aacauggugaaaccccauc

SEQ ID NO: 1098336 - RNA, 20 nt, Human
aacauggugaaaccccaucu

SEQ ID NO: 1098337 - RNA, 21 nt, Human
aacauggugaaaccccaucuc

SEQ ID NO: 1098338 - RNA, 21 nt, Human
aacauggugaaaccccaucuc

SEQ ID NO: 1098339 - RNA, 24 nt, Human
aagaauaucaacaaaagucuacaa

SEQ ID NO: 1098340 - RNA, 19 nt, Human
aaggcuguuggauggcuga

SEQ ID NO: 1098341 - RNA, 24 nt, Human
aaucgcuugaaccugggaggugga

SEQ ID NO: 1098342 - RNA, 22 nt, Human
aaugauauucuuccaggaagaa

SEQ ID NO: 1098343 - RNA, 19 nt, Human
acaagagugaaacuccauc

SEQ ID NO: 1098344 - RNA, 20 nt, Human
acaagagugaaacuccaucu

SEQ ID NO: 1098345 - RNA, 21 nt, Human
acaagagugaaacuccaucuc

SEQ ID NO: 1098346 - RNA, 19 nt, Human
accaccgcacuccagccug

SEQ ID NO: 1098347 - RNA, 24 nt, Human
accccaucucuacuaaaaacacaa

SEQ ID NO: 1098348 - RNA, 21 nt, Human
acccuaggagcaugggaaaau

SEQ ID NO: 1098349 - RNA, 18 nt, Human
accgcacuccagccuggg

SEQ ID NO: 1098350 - RNA, 24 nt, Human
accgcacuccagccugggcaacaa

SEQ ID NO: 1098351 - RNA, 18 nt, Human
accugaacuugcagucau

SEQ ID NO: 1098352 - RNA, 25 nt, Human
acuccagccugggcaacaagaguga

SEQ ID NO: 1098353 - RNA, 22 nt, Human
acugaaaaaaaaagcaaugcag

SEQ ID NO: 1098354 - RNA, 20 nt, Human
acuugggaggcugaggcagg

SEQ ID NO: 1098355 - RNA, 21 nt, Human
agaaaaccuuuagacucaaaa

SEQ ID NO: 1098356 - RNA, 22 nt, Human
agcacccuuguccuuccuggug

SEQ ID NO: 1098357 - RNA, 24 nt, Human
agcacuuugggaggccgaggcagg

SEQ ID NO: 1098358 - RNA, 20 nt, Human
aggaagaauaucaacaaaag

SEQ ID NO: 1098359 - RNA, 24 nt, Human
aggcagaucaugaggucagggguu

SEQ ID NO: 1098360 - RNA, 22 nt, Human
aggcaggagaaucgcuugaacc

SEQ ID NO: 1098361 - RNA, 24 nt, Human
aggcaggagaaucgcuugaaccug

SEQ ID NO: 1098362 - RNA, 24 nt, Human
aggcaggcagaucaugaggucagg

SEQ ID NO: 1098363 - RNA, 18 nt, Human
aggccgaggcaggcagau

SEQ ID NO: 1098364 - RNA, 23 nt, Human
aggccgaggcaggcagaucauga

SEQ ID NO: 1098365 - RNA, 20 nt, Human
aggcugaggcaggagaaucg

SEQ ID NO: 1098366 - RNA, 24 nt, Human
aggcugaggcaggagaaucgcuug

SEQ ID NO: 1098367 - RNA, 21 nt, Human
agguggagguugcagugagcc

SEQ ID NO: 1098368 - RNA, 24 nt, Human
agguggagguugcagugagccgag

SEQ ID NO: 1098369 - RNA, 20 nt, Human
auaaaaauuucgcaacacuc

SEQ ID NO: 1098370 - RNA, 22 nt, Human
auacaaacugaaaaaaaaagca

SEQ ID NO: 1098371 - RNA, 22 nt, Human
aucaugaggucagggguucaag

SEQ ID NO: 1098372 - RNA, 21 nt, Human
auccuggccaacauggugaaa

SEQ ID NO: 1098373 - RNA, 19 nt, Human
augccuguaaucccagcac

SEQ ID NO: 1098374 - RNA, 24 nt, Human
auuuuggcugggcgugguggcuca

SEQ ID NO: 1098375 - RNA, 22 nt, Human
caacaaaagucuacaaucacag

SEQ ID NO: 1098376 - RNA, 19 nt, Human
caacagagcacccuugucc

SEQ ID NO: 1098377 - RNA, 24 nt, Human
caacauggugaaaccccaucucua

SEQ ID NO: 1098378 - RNA, 23 nt, Human
caacccuucaagaaaagaaugau

SEQ ID NO: 1098379 - RNA, 23 nt, Human
caagaaaagaaugauauucuucc

SEQ ID NO: 1098380 - RNA, 24 nt, Human
caagaccauccuggccaacauggu

SEQ ID NO: 1098381 - RNA, 22 nt, Human
cacccuuugggccccuggcuca

SEQ ID NO: 1098382 - RNA, 24 nt, Human
caccgcacuccagccugggcaaca

SEQ ID NO: 1098383 - RNA, 19 nt, Human
caccugaucacauaaaugg

SEQ ID NO: 1098384 - RNA, 21 nt, Human
caccuguagucccagguacuu

SEQ ID NO: 1098385 - RNA, 23 nt, Human
caccuguagucccagguacuugg

SEQ ID NO: 1098386 - RNA, 24 nt, Human
caccuguagucccagguacuuggg

SEQ ID NO: 1098387 - RNA, 23 nt, Human
cacuccagccugggcaacaagag

SEQ ID NO: 1098388 - RNA, 24 nt, Human
cacuccagccugggcaacaagagu

SEQ ID NO: 1098389 - RNA, 25 nt, Human
cacuccagccugggcaacaagagug

SEQ ID NO: 1098390 - RNA, 18 nt, Human
cagaaaaugcaaagccac

SEQ ID NO: 1098391 - RNA, 20 nt, Human
cagagcacccuuguccuucc

SEQ ID NO: 1098392 - RNA, 24 nt, Human
cagcacuuugggaggccgaggcag

SEQ ID NO: 1098393 - RNA, 25 nt, Human
cagcacuuugggaggccgaggcagg

SEQ ID NO: 1098394 - RNA, 27 nt, Human
cagcagaaacagguaacauucccugga

SEQ ID NO: 1098395 - RNA, 24 nt, Human
cagguacuugggaggcugaggcag

SEQ ID NO: 1098396 - RNA, 23 nt, Human
caguacugagaaaacaaauucca

SEQ ID NO: 1098397 - RNA, 20 nt, Human
cauacuguugaccuucccga

SEQ ID NO: 1098398 - RNA, 20 nt, Human
caugccuguaaucccagcac

SEQ ID NO: 1098399 - RNA, 24 nt, Human
caugccuguaaucccagcacuuug

SEQ ID NO: 1098400 - RNA, 20 nt, Human
ccaccgcacuccagccuggg

SEQ ID NO: 1098401 - RNA, 20 nt, Human
ccaccgcacuccagccuggg

SEQ ID NO: 1098402 - RNA, 21 nt, Human
ccaccgcacuccagccugggc

SEQ ID NO: 1098403 - RNA, 24 nt, Human
ccaccgcacuccagccugggcaac

SEQ ID NO: 1098404 - RNA, 18 nt, Human
ccacguggacuccauacc

SEQ ID NO: 1098405 - RNA, 24 nt, Human
ccuccgucucuuccuccaaacaaa

SEQ ID NO: 1098406 - RNA, 22 nt, Human
ccuggccaacauggugaaaccc

SEQ ID NO: 1098407 - RNA, 23 nt, Human
ccuggccaacauggugaaacccc

SEQ ID NO: 1098408 - RNA, 24 nt, Human
ccuggccaacauggugaaacccca

SEQ ID NO: 1098409 - RNA, 21 nt, Human
ccugggagguggagguugcag

SEQ ID NO: 1098410 - RNA, 21 nt, Human
ccuguagucccagguacuugg

SEQ ID NO: 1098411 - RNA, 24 nt, Human
cgaggcaggcagaucaugagguca

SEQ ID NO: 1098412 - RNA, 24 nt, Human
cucaugccuguaaucccagcacuu

SEQ ID NO: 1098413 - RNA, 19 nt, Human
cuccaaacaaaguuggggc

SEQ ID NO: 1098414 - RNA, 23 nt, Human
cuccacgguuauuaacugucacc

SEQ ID NO: 1098415 - RNA, 22 nt, Human
cucuacauuuugucaguaggug

SEQ ID NO: 1098416 - RNA, 23 nt, Human
cucuacauuuugucaguaggugc

SEQ ID NO: 1098417 - RNA, 23 nt, Human
cugaaaaaaaaagcaaugcagua

SEQ ID NO: 1098418 - RNA, 21 nt, Human
cuggaucugcugcaucagccc

SEQ ID NO: 1098419 - RNA, 23 nt, Human
cuggccaacauggugaaacccca

SEQ ID NO: 1098420 - RNA, 19 nt, Human
cuugaaccugggaggugga

SEQ ID NO: 1098421 - RNA, 21 nt, Human
cuuuuaaaaauacaagauugu

SEQ ID NO: 1098422 - RNA, 23 nt, Human
gagaaucgcuugaaccugggagg

SEQ ID NO: 1098423 - RNA, 21 nt, Human
gagguugcagugagccgagau

SEQ ID NO: 1098424 - RNA, 23 nt, Human
gagguugcagugagccgagauug

SEQ ID NO: 1098425 - RNA, 24 nt, Human
gaucaugaggucagggguucaaga

SEQ ID NO: 1098426 - RNA, 21 nt, Human
gauugucacuuuuucucuuuu

SEQ ID NO: 1098427 - RNA, 24 nt, Human
gccaacauggugaaaccccaucuc

SEQ ID NO: 1098428 - RNA, 19 nt, Human
gcuaaguccuccuacaagc

SEQ ID NO: 1098429 - RNA, 24 nt, Human
gcucuacuggaauuaacaaauaau

SEQ ID NO: 1098430 - RNA, 21 nt, Human
gcugggcgugguggcucaugc

SEQ ID NO: 1098431 - RNA, 25 nt, Human
ggagaucaggucgggggugcuccag

SEQ ID NO: 1098432 - RNA, 22 nt, Human
ggagguugcagugagccgagau

SEQ ID NO: 1098433 - RNA, 24 nt, Human
ggagguugcagugagccgagauug

SEQ ID NO: 1098434 - RNA, 23 nt, Human
ggcgugguggcucaugccuguaa

SEQ ID NO: 1098435 - RNA, 18 nt, Human
gggccccuggcucagugu

SEQ ID NO: 1098436 - RNA, 24 nt, Human
gguggcucaugccuguaaucccag

SEQ ID NO: 1098437 - RNA, 22 nt, Human
ggugugguggcacgcaccugua

SEQ ID NO: 1098438 - RNA, 18 nt, Human
gucauucccacguggacu

SEQ ID NO: 1098439 - RNA, 22 nt, Human
gugguugaccccauuucuagau

SEQ ID NO: 1098440 - RNA, 19 nt, Human
guugcagugagccgagauu

SEQ ID NO: 1098441 - RNA, 24 nt, Human
uaaaagauauucugaaagacccua

SEQ ID NO: 1098442 - RNA, 20 nt, Human
uaaagaaacaggaaauggug

SEQ ID NO: 1098443 - RNA, 21 nt, Human
uaacacaauugugguugaccc

SEQ ID NO: 1098444 - RNA, 22 nt, Human
uaacacaauugugguugacccc

SEQ ID NO: 1098445 - RNA, 21 nt, Human
uaaggaaaaugacuuuaaaaa

SEQ ID NO: 1098446 - RNA, 20 nt, Human
uaagugguaacuaugaaaca

SEQ ID NO: 1098447 - RNA, 22 nt, Human
uaaucagaaaaugcaaagccac

SEQ ID NO: 1098448 - RNA, 26 nt, Human
uacaaacugaaaaaaaaagcaaugca

SEQ ID NO: 1098449 - RNA, 21 nt, Human
uacaaucacaggaauggauac

SEQ ID NO: 1098450 - RNA, 24 nt, Human
uaccaccgcacuccagccugggca

SEQ ID NO: 1098451 - RNA, 20 nt, Human
uacuggaauuaacaaauaaa

SEQ ID NO: 1098452 - RNA, 22 nt, Human
uagaaaaccuuuagacucaaaa

SEQ ID NO: 1098453 - RNA, 18 nt, Human
uagaugauggccuucauc

SEQ ID NO: 1098454 - RNA, 22 nt, Human
uagcagcagaaacagguaacau

SEQ ID NO: 1098455 - RNA, 20 nt, Human
uagcugggugugguggcacg

SEQ ID NO: 1098456 - RNA, 24 nt, Human
uauacagaaggaaaaaccucaacc

SEQ ID NO: 1098457 - RNA, 19 nt, Human
uauuauuaaaguucucuau

SEQ ID NO: 1098458 - RNA, 20 nt, Human
ucaagaccauccuggccaac

SEQ ID NO: 1098459 - RNA, 22 nt, Human
ucaagaccauccuggccaacau

SEQ ID NO: 1098460 - RNA, 18 nt, Human
ucagaaaaugcaaagcca

SEQ ID NO: 1098461 - RNA, 23 nt, Human
ucagaauccuucauacuguugac

SEQ ID NO: 1098462 - RNA, 21 nt, Human
ucagcccaaaugggaggagac

SEQ ID NO: 1098463 - RNA, 20 nt, Human
ucaggucgggggugcuccag

SEQ ID NO: 1098464 - RNA, 18 nt, Human
ucaguacugagaaaacaa

SEQ ID NO: 1098465 - RNA, 23 nt, Human
ucaguacugagaaaacaaauucc

SEQ ID NO: 1098466 - RNA, 24 nt, Human
ucaugaggucagggguucaagacc

SEQ ID NO: 1098467 - RNA, 19 nt, Human
ucaugccuacugcuguccc

SEQ ID NO: 1098468 - RNA, 22 nt, Human
ucaugccuguaaucccagcacu

SEQ ID NO: 1098469 - RNA, 22 nt, Human
uccaaacaaaguuggggcuuau

SEQ ID NO: 1098470 - RNA, 25 nt, Human
uccaggaagaauaucaacaaaaguc

SEQ ID NO: 1098471 - RNA, 24 nt, Human
ucgcuugaaccugggagguggagg

SEQ ID NO: 1098472 - RNA, 18 nt, Human
ucucaaaauaaauaaaua

SEQ ID NO: 1098473 - RNA, 22 nt, Human
ucucuacuaaaaacacaaaauu

SEQ ID NO: 1098474 - RNA, 18 nt, Human
ucugaaagacccuaacag

SEQ ID NO: 1098475 - RNA, 19 nt, Human
ucuuuggaauuugggggcu

SEQ ID NO: 1098476 - RNA, 19 nt, Human
ugaaaccccaucucuacua

SEQ ID NO: 1098477 - RNA, 24 nt, Human
ugaaccugggagguggagguugca

SEQ ID NO: 1098478 - RNA, 24 nt, Human
ugacccaggcuaaguccuccuaca

SEQ ID NO: 1098479 - RNA, 19 nt, Human
ugacuucaaaugcuucugu

SEQ ID NO: 1098480 - RNA, 24 nt, Human
ugacuuuaaaaaaauauuuuggcu

SEQ ID NO: 1098481 - RNA, 22 nt, Human
ugagccgagauuguaccaccgc

SEQ ID NO: 1098482 - RNA, 20 nt, Human
ugaggcaggagaaucgcuug

SEQ ID NO: 1098483 - RNA, 24 nt, Human
ugaggcaggagaaucgcuugaacc

SEQ ID NO: 1098484 - RNA, 24 nt, Human
ugaggcaggagaaucgcuugaacc

SEQ ID NO: 1098485 - RNA, 23 nt, Human
ugccuguaaucccagcacuuugg

SEQ ID NO: 1098486 - RNA, 23 nt, Human
ugccuguaaucccagcacuuugg

SEQ ID NO: 1098487 - RNA, 24 nt, Human
ugccuguaaucccagcacuuuggg

SEQ ID NO: 1098488 - RNA, 23 nt, Human
uggaauuaacaaauaauuucuuc

SEQ ID NO: 1098489 - RNA, 19 nt, Human
uggaauuugggggcuuuug

SEQ ID NO: 1098490 - RNA, 22 nt, Human
uggcacgcaccuguagucccag

SEQ ID NO: 1098491 - RNA, 21 nt, Human
uggcagugggagaucaggucg

SEQ ID NO: 1098492 - RNA, 23 nt, Human
uggcagugggagaucaggucggg

SEQ ID NO: 1098493 - RNA, 24 nt, Human
uggccaacauggugaaaccccauc

SEQ ID NO: 1098494 - RNA, 24 nt, Human
uggcucaugccuguaaucccagca

SEQ ID NO: 1098495 - RNA, 21 nt, Human
uggcugagugugaccuccacg

SEQ ID NO: 1098496 - RNA, 19 nt, Human
uggcugggcgugguggcuc

SEQ ID NO: 1098497 - RNA, 23 nt, Human
uggcugggcgugguggcucaugc

SEQ ID NO: 1098498 - RNA, 24 nt, Human
uggcugggcgugguggcucaugcc

SEQ ID NO: 1098499 - RNA, 18 nt, Human
ugggaaaaucuggcagug

SEQ ID NO: 1098500 - RNA, 19 nt, Human
ugggaggagacaggaaugg

SEQ ID NO: 1098501 - RNA, 23 nt, Human
ugggaggagacaggaauguugac

SEQ ID NO: 1098502 - RNA, 20 nt, Human
ugggaggccgaggcaggcag

SEQ ID NO: 1098503 - RNA, 24 nt, Human
ugggaggccgaggcaggcagauca

SEQ ID NO: 1098504 - RNA, 19 nt, Human
ugggaggcugaggcaggag

SEQ ID NO: 1098505 - RNA, 23 nt, Human
ugggaggcugaggcaggagaauc

SEQ ID NO: 1098506 - RNA, 18 nt, Human
ugggagguggagguugca

SEQ ID NO: 1098507 - RNA, 29 nt, Human
ugggagguggagguugcagugacaacggu

SEQ ID NO: 1098508 - RNA, 24 nt, Human
ugggagguggagguugcagugagc

SEQ ID NO: 1098509 - RNA, 19 nt, Human
ugggggcuuuuguguaggg

SEQ ID NO: 1098510 - RNA, 22 nt, Human
ugggugugguggcacgcaccug

SEQ ID NO: 1098511 - RNA, 22 nt, Human
ugguauguccuucacacacaca

SEQ ID NO: 1098512 - RNA, 24 nt, Human
ugguggcacgcaccuguaguccca

SEQ ID NO: 1098513 - RNA, 24 nt, Human
ugguggcucaugccuguaauccca

SEQ ID NO: 1098514 - RNA, 20 nt, Human
uguagggucacuguaaggcu

SEQ ID NO: 1098515 - RNA, 20 nt, Human
ugucaugccuacugcugucc

SEQ ID NO: 1098516 - RNA, 23 nt, Human
uguguggccacuaacaacagagc

SEQ ID NO: 1098517 - RNA, 18 nt, Human
uuagcugggugugguggc

SEQ ID NO: 1098518 - RNA, 19 nt, Human
uuagcugggugugguggca

SEQ ID NO: 1098519 - RNA, 22 nt, Human
uuagcugggugugguggcacgc

SEQ ID NO: 1098520 - RNA, 23 nt, Human
uuauaaagaaacaggaaauggug

SEQ ID NO: 1098521 - RNA, 24 nt, Human
uugaaccugggagguggagguugc

SEQ ID NO: 1098522 - RNA, 18 nt, Human
uugcagugagccgagauu

SEQ ID NO: 1098523 - RNA, 19 nt, Human
uugcagugagccgagauug

SEQ ID NO: 1098524 - RNA, 22 nt, Human
uugcagugagccgagauuguac

SEQ ID NO: 1098525 - RNA, 23 nt, Human
uuggcugggcgugguggcucaug

SEQ ID NO: 1098526 - RNA, 25 nt, Human
uugggaggccgaggcaggcagauca

SEQ ID NO: 1098527 - RNA, 24 nt, Human
uugggaggcugaggcaggagaauc

SEQ ID NO: 1098528 - RNA, 25 nt, Human
uuuaaucagaaaaugcaaagccacc

SEQ ID NO: 1098529 - RNA, 18 nt, Human
uuuagcuggguguggugg

SEQ ID NO: 1098530 - RNA, 21 nt, Human
uuucugaaaagccgaguucug

SEQ ID NO: 1098531 - RNA, 18 nt, Human
uuuggcugggcguggugg

SEQ ID NO: 1098532 - RNA, 22 nt, Human
uuuuggcugggcgugguggcuc

SEQ ID NO: 1098533 - RNA, 20 nt, Human
ugaccaagcggcccagcuug

SEQ ID NO: 1098534 - RNA, 18 nt, Human
cccucaaaugcccucccu

SEQ ID NO: 1098535 - RNA, 18 nt, Human
cccucggucauuucuucc

SEQ ID NO: 1098536 - RNA, 25 nt, Human
ccuauaaucacgugaggggaucguc

SEQ ID NO: 1098537 - RNA, 19 nt, Human
ccucccuucucccucgguc

SEQ ID NO: 1098538 - RNA, 21 nt, Human
ccucccuucucccucggucau

SEQ ID NO: 1098539 - RNA, 23 nt, Human
cucaaaugcccucccuucucccu

SEQ ID NO: 1098540 - RNA, 24 nt, Human
cucaaaugcccucccuucucccuc

SEQ ID NO: 1098541 - RNA, 24 nt, Human
cucuucuucuccccucaaaugccc

SEQ ID NO: 1098542 - RNA, 19 nt, Human
cuucuccccucaaaugccc

SEQ ID NO: 1098543 - RNA, 23 nt, Human
cuucucccucggucauuucuucc

SEQ ID NO: 1098544 - RNA, 24 nt, Human
gaccuuucuuuccaugucacgaga

SEQ ID NO: 1098545 - RNA, 24 nt, Human
gagcgaaugccucagaucacagga

SEQ ID NO: 1098546 - RNA, 21 nt, Human
ucagagcucagaccuuucuuu

SEQ ID NO: 1098547 - RNA, 23 nt, Human
ucauuucuuccuuuccagugagc

SEQ ID NO: 1098548 - RNA, 20 nt, Human
ucccucggucauuucuuccu

SEQ ID NO: 1098549 - RNA, 21 nt, Human
ucucugagcuauguguugugc

SEQ ID NO: 1098550 - RNA, 21 nt, Human
uggccugaugccccacauuga

SEQ ID NO: 1098551 - RNA, 20 nt, Human
uuccaugucacgagaugauc

SEQ ID NO: 1098552 - RNA, 20 nt, Human
acugcuuccccgucccaaga

SEQ ID NO: 1098553 - RNA, 24 nt, Human
acuucagugggcucucuaaugagc

SEQ ID NO: 1098554 - RNA, 23 nt, Human
agacuccccucuccccagcuccu

SEQ ID NO: 1098555 - RNA, 22 nt, Human
agagaaaaaaacuggcagagga

SEQ ID NO: 1098556 - RNA, 22 nt, Human
agcagcacaaaucggcucagcu

SEQ ID NO: 1098557 - RNA, 18 nt, Human
agccuggcacugagcccu

SEQ ID NO: 1098558 - RNA, 19 nt, Human
agcgaggagcagaaugcaa

SEQ ID NO: 1098559 - RNA, 26 nt, Human
aggaagagguggaaaccuugccagaa

SEQ ID NO: 1098560 - RNA, 21 nt, Human
agguagagaaaagacaauggu

SEQ ID NO: 1098561 - RNA, 20 nt, Human
auccuugagcgguuccucca

SEQ ID NO: 1098562 - RNA, 18 nt, Human
auuauccuugggaauaag

SEQ ID NO: 1098563 - RNA, 27 nt, Human
caaacauccuucuucauuuacggucuu

SEQ ID NO: 1098564 - RNA, 18 nt, Human
caagagaaaaaaacuggc

SEQ ID NO: 1098565 - RNA, 23 nt, Human
cacaguucccuuuggggugagga

SEQ ID NO: 1098566 - RNA, 18 nt, Human
caccccucccuaaagcca

SEQ ID NO: 1098567 - RNA, 25 nt, Human
caccccucccuaaagccauggcuug

SEQ ID NO: 1098568 - RNA, 19 nt, Human
cagaacacacacaguuccc

SEQ ID NO: 1098569 - RNA, 23 nt, Human
cagacuccccucuccccagcucc

SEQ ID NO: 1098570 - RNA, 24 nt, Human
cagaggagagccgugcccucucac

SEQ ID NO: 1098571 - RNA, 21 nt, Human
cagcacugcuuccccguccca

SEQ ID NO: 1098572 - RNA, 22 nt, Human
cagcaggguggccuuccaggcg

SEQ ID NO: 1098573 - RNA, 24 nt, Human
cagcuccaggagccugcccagcug

SEQ ID NO: 1098574 - RNA, 20 nt, Human
caggagccugcccagcuguc

SEQ ID NO: 1098575 - RNA, 22 nt, Human
cagugggcucucuaaugagccu

SEQ ID NO: 1098576 - RNA, 25 nt, Human
ccaagagaaaaaaacuggcagagga

SEQ ID NO: 1098577 - RNA, 19 nt, Human
ccccaaagaaaucauugug

SEQ ID NO: 1098578 - RNA, 20 nt, Human
cccgguggcugcugagagca

SEQ ID NO: 1098579 - RNA, 26 nt, Human
cccuagaugcugucauugucuugggg

SEQ ID NO: 1098580 - RNA, 20 nt, Human
ccuccaugggccugccacuu

SEQ ID NO: 1098581 - RNA, 22 nt, Human
ccucucaccccuccucucugca

SEQ ID NO: 1098582 - RNA, 23 nt, Human
ccuugagcgguuccuccaucccc

SEQ ID NO: 1098583 - RNA, 21 nt, Human
ccuugccagaacaggucucca

SEQ ID NO: 1098584 - RNA, 19 nt, Human
ccuugggaauaaggguggg

SEQ ID NO: 1098585 - RNA, 23 nt, Human
cgggagccuggcacugagcccua

SEQ ID NO: 1098586 - RNA, 24 nt, Human
cucacaccacuagguugggcaacu

SEQ ID NO: 1098587 - RNA, 22 nt, Human
cucccuccuucccaagccauca

SEQ ID NO: 1098588 - RNA, 23 nt, Human
cugcaccccucccuaaagccaug

SEQ ID NO: 1098589 - RNA, 19 nt, Human
cugugcgugugugagucag

SEQ ID NO: 1098590 - RNA, 22 nt, Human
cuuccccgucccaagagaaaaa

SEQ ID NO: 1098591 - RNA, 19 nt, Human
cuucugacucccuccuucc

SEQ ID NO: 1098592 - RNA, 24 nt, Human
gaaggcccuccaugggccugccac

SEQ ID NO: 1098593 - RNA, 20 nt, Human
gagccugcaccccucccuaa

SEQ ID NO: 1098594 - RNA, 18 nt, Human
gcccucucaccccucccu

SEQ ID NO: 1098595 - RNA, 21 nt, Human
gccgugcccucucaccccucc

SEQ ID NO: 1098596 - RNA, 21 nt, Human
gcucucuaaugagccugcacc

SEQ ID NO: 1098597 - RNA, 21 nt, Human
gcuuccccgucccaagagaaa

SEQ ID NO: 1098598 - RNA, 18 nt, Human
ggaugucauuaacaucaa

SEQ ID NO: 1098599 - RNA, 19 nt, Human
guccuuguggccuggacuc

SEQ ID NO: 1098600 - RNA, 21 nt, Human
guucucaggcugggcgagggg

SEQ ID NO: 1098601 - RNA, 20 nt, Human
guuuuuuuuucuccuccccc

SEQ ID NO: 1098602 - RNA, 23 nt, Human
uaguuuuuuuuucuccuccccaa

SEQ ID NO: 1098603 - RNA, 23 nt, Human
ucagugggcucucuaaugagccu

SEQ ID NO: 1098604 - RNA, 22 nt, Human
ucagugugcugugcagcagggu

SEQ ID NO: 1098605 - RNA, 18 nt, Human
ucaguugaccuugaguaa

SEQ ID NO: 1098606 - RNA, 21 nt, Human
uccaaaguuuccuguuuucag

SEQ ID NO: 1098607 - RNA, 19 nt, Human
uccaagcagcacugcuucc

SEQ ID NO: 1098608 - RNA, 22 nt, Human
uccccucuccccagcuccuuac

SEQ ID NO: 1098609 - RNA, 19 nt, Human
uccucauuuccccauugaa

SEQ ID NO: 1098610 - RNA, 24 nt, Human
uccuucccaagccaucagcuccag

SEQ ID NO: 1098611 - RNA, 18 nt, Human
uccuugggaauaagggug

SEQ ID NO: 1098612 - RNA, 20 nt, Human
uccuugggaauaaggguggg

SEQ ID NO: 1098613 - RNA, 20 nt, Human
uccuuguggccuggacuccu

SEQ ID NO: 1098614 - RNA, 19 nt, Human
ucggcucagcuggugcugu

SEQ ID NO: 1098615 - RNA, 23 nt, Human
ucucuuccaagggaggcggaggu

SEQ ID NO: 1098616 - RNA, 21 nt, Human
ucugcuccggccauccagagg

SEQ ID NO: 1098617 - RNA, 21 nt, Human
ucuggaaaguucucaggcugg

SEQ ID NO: 1098618 - RNA, 20 nt, Human
ugaaccaucagaacacacac

SEQ ID NO: 1098619 - RNA, 22 nt, Human
ugagccugcaccccucccuaaa

SEQ ID NO: 1098620 - RNA, 22 nt, Human
ugaggaagagguggaaaccuug

SEQ ID NO: 1098621 - RNA, 24 nt, Human
ugaggaaggcaagaccugcacagg

SEQ ID NO: 1098622 - RNA, 25 nt, Human
ugccagaacaggucuccaaaguuuc

SEQ ID NO: 1098623 - RNA, 22 nt, Human
uggaaaguucucaggcugggcg

SEQ ID NO: 1098624 - RNA, 23 nt, Human
uggcucacaccacuagguugggc

SEQ ID NO: 1098625 - RNA, 18 nt, Human
uggcugcugagagcagca

SEQ ID NO: 1098626 - RNA, 22 nt, Human
uggugcugugugcacgugugcg

SEQ ID NO: 1098627 - RNA, 24 nt, Human
uguaaugcggggagagcccgagac

SEQ ID NO: 1098628 - RNA, 24 nt, Human
ugucccgaaccaggcucgcacucu

SEQ ID NO: 1098629 - RNA, 19 nt, Human
ugugugagucagagcugcu

SEQ ID NO: 1098630 - RNA, 21 nt, Human
ugugugagucagagcugcugg

SEQ ID NO: 1098631 - RNA, 21 nt, Human
uucaggcaagcgaggagcaga

SEQ ID NO: 1098632 - RNA, 24 nt, Human
uuccaggcgcaugcucccaucugc

SEQ ID NO: 1098633 - RNA, 18 nt, Human
uugaccuugaguaaagga

SEQ ID NO: 1098634 - RNA, 25 nt, Human
uuggggacagacuccccucucccca

SEQ ID NO: 1098635 - RNA, 23 nt, Human
aaacacgugaaagacacuauaaa

SEQ ID NO: 1098636 - RNA, 22 nt, Human
aaacagcuggaacucugaauac

SEQ ID NO: 1098637 - RNA, 23 nt, Human
aagcaacaaaggcagcaguugcc

SEQ ID NO: 1098638 - RNA, 20 nt, Human
aaggccugcuucccaguucc

SEQ ID NO: 1098639 - RNA, 21 nt, Human
aauaagaacaagggggaaaaa

SEQ ID NO: 1098640 - RNA, 20 nt, Human
aaucccuggacucugacucg

SEQ ID NO: 1098641 - RNA, 20 nt, Human
aauccuagaaagaacauuuu

SEQ ID NO: 1098642 - RNA, 21 nt, Human
acacaggccagcaugcccagc

SEQ ID NO: 1098643 - RNA, 21 nt, Human
acauugaaaacagcuggaacu

SEQ ID NO: 1098644 - RNA, 20 nt, Human
accagcuguuucacugauag

SEQ ID NO: 1098645 - RNA, 21 nt, Human
acuccagcuugaccagaacag

SEQ ID NO: 1098646 - RNA, 25 nt, Human
acugagcaagagacaucagcagcug

SEQ ID NO: 1098647 - RNA, 19 nt, Human
acuggcuacccugcacgcc

SEQ ID NO: 1098648 - RNA, 22 nt, Human
agacacaggccagcaugcccag

SEQ ID NO: 1098649 - RNA, 22 nt, Human
agaggagacaggagucacagaa

SEQ ID NO: 1098650 - RNA, 29 nt, Human
agcaacaaaggcagcaguugccaggaaag

SEQ ID NO: 1098651 - RNA, 21 nt, Human
aggcccaggucugguugcagu

SEQ ID NO: 1098652 - RNA, 21 nt, Human
agggggaaaaaacugagcaag

SEQ ID NO: 1098653 - RNA, 24 nt, Human
auagacacagauggccucaaacac

SEQ ID NO: 1098654 - RNA, 18 nt, Human
aucaguguggcugacgcc

SEQ ID NO: 1098655 - RNA, 19 nt, Human
auggccucaaacacgugaa

SEQ ID NO: 1098656 - RNA, 18 nt, Human
caacacaaugacauuccu

SEQ ID NO: 1098657 - RNA, 19 nt, Human
caagcuucuuugcuagugc

SEQ ID NO: 1098658 - RNA, 18 nt, Human
cacuauaaaccggcaaga

SEQ ID NO: 1098659 - RNA, 20 nt, Human
cagaaggaugcccaguggua

SEQ ID NO: 1098660 - RNA, 18 nt, Human
cagccccacggcggauga

SEQ ID NO: 1098661 - RNA, 20 nt, Human
cagcggcaccaaaggccugc

SEQ ID NO: 1098662 - RNA, 21 nt, Human
caggaaauguguaaucuuuaa

SEQ ID NO: 1098663 - RNA, 19 nt, Human
caguauaagcaacaaaggc

SEQ ID NO: 1098664 - RNA, 23 nt, Human
cauagacacauugaaaacagcug

SEQ ID NO: 1098665 - RNA, 22 nt, Human
ccacaaaggucagaaggaugcc

SEQ ID NO: 1098666 - RNA, 18 nt, Human
ccacugaagauaggacug

SEQ ID NO: 1098667 - RNA, 21 nt, Human
cccacacauggaucugucagc

SEQ ID NO: 1098668 - RNA, 19 nt, Human
ccccucugagugucaccac

SEQ ID NO: 1098669 - RNA, 20 nt, Human
ccgcccccagagcagcccca

SEQ ID NO: 1098670 - RNA, 21 nt, Human
ccuguagccacugaagauagg

SEQ ID NO: 1098671 - RNA, 18 nt, Human
cgcccccagagcagcccc

SEQ ID NO: 1098672 - RNA, 20 nt, Human
cugaagaaguccacguggca

SEQ ID NO: 1098673 - RNA, 20 nt, Human
cugcagcaagcuuccagucc

SEQ ID NO: 1098674 - RNA, 18 nt, Human
cugcucucugcugcugcu

SEQ ID NO: 1098675 - RNA, 21 nt, Human
cugucagcagagaauggaagc

SEQ ID NO: 1098676 - RNA, 23 nt, Human
cuugaccagaacagaauugucaa

SEQ ID NO: 1098677 - RNA, 23 nt, Human
gacaaucccuggacucugacucg

SEQ ID NO: 1098678 - RNA, 19 nt, Human
gaccuggcucaccagggca

SEQ ID NO: 1098679 - RNA, 20 nt, Human
gagcaagagacaucagcagc

SEQ ID NO: 1098680 - RNA, 18 nt, Human
gcaagaccuggcucacca

SEQ ID NO: 1098681 - RNA, 21 nt, Human
gccauagacacauugaaaaca

SEQ ID NO: 1098682 - RNA, 20 nt, Human
gcuacccugcacgccugagc

SEQ ID NO: 1098683 - RNA, 24 nt, Human
ggaaauguguaaucuuuaauauaa

SEQ ID NO: 1098684 - RNA, 20 nt, Human
gguaggccgaugauguaaua

SEQ ID NO: 1098685 - RNA, 21 nt, Human
gguguugaacacagucucuga

SEQ ID NO: 1098686 - RNA, 18 nt, Human
gucagaaggaugcccagu

SEQ ID NO: 1098687 - RNA, 18 nt, Human
uaagaacaagggggaaaa

SEQ ID NO: 1098688 - RNA, 24 nt, Human
uaagaacaagggggaaaaaacuga

SEQ ID NO: 1098689 - RNA, 18 nt, Human
uaauaauagugacaaucc

SEQ ID NO: 1098690 - RNA, 18 nt, Human
uacccugcacgccugagc

SEQ ID NO: 1098691 - RNA, 25 nt, Human
uagaaagaacauuuuaaacuagaaa

SEQ ID NO: 1098692 - RNA, 19 nt, Human
ucacaugcagcauucucca

SEQ ID NO: 1098693 - RNA, 20 nt, Human
ucagaaggaugcccaguggu

SEQ ID NO: 1098694 - RNA, 18 nt, Human
ucagcagagaauggaagc

SEQ ID NO: 1098695 - RNA, 22 nt, Human
uccaagcuucuuugcuagugcc

SEQ ID NO: 1098696 - RNA, 19 nt, Human
uccaagucacagaagaaaa

SEQ ID NO: 1098697 - RNA, 22 nt, Human
uccaagucacagaagaaaacuc

SEQ ID NO: 1098698 - RNA, 20 nt, Human
uccucugcagcaagcuucca

SEQ ID NO: 1098699 - RNA, 19 nt, Human
uccuggccggggcacuggc

SEQ ID NO: 1098700 - RNA, 18 nt, Human
uccuugggucucacaugc

SEQ ID NO: 1098701 - RNA, 19 nt, Human
ucucaggcccaggucuggu

SEQ ID NO: 1098702 - RNA, 23 nt, Human
ucucugcucucugcugcugcugc

SEQ ID NO: 1098703 - RNA, 21 nt, Human
ucugcagcaagcuuccagucc

SEQ ID NO: 1098704 - RNA, 20 nt, Human
ugacaaucccuggacucuga

SEQ ID NO: 1098705 - RNA, 21 nt, Human
ugaccagaacagaauugucaa

SEQ ID NO: 1098706 - RNA, 18 nt, Human
ugaccgugagccccacca

SEQ ID NO: 1098707 - RNA, 20 nt, Human
ugacgccgcccccagagcag

SEQ ID NO: 1098708 - RNA, 21 nt, Human
ugccuguagccacugaagaua

SEQ ID NO: 1098709 - RNA, 23 nt, Human
ugcugguaggagcugaaagggcg

SEQ ID NO: 1098710 - RNA, 20 nt, Human
ugguaggagcugaaagggcg

SEQ ID NO: 1098711 - RNA, 19 nt, Human
uguccaccugcacuagacc

SEQ ID NO: 1098712 - RNA, 24 nt, Human
uuaaacuagaaagcuagacuuaaa

SEQ ID NO: 1098713 - RNA, 19 nt, Human
uucaaaguguccaccugca

SEQ ID NO: 1098714 - RNA, 23 nt, Human
uucccaguuccucucagaacucc

SEQ ID NO: 1098715 - RNA, 19 nt, Human
uuccuugggucucacaugc

SEQ ID NO: 1098716 - RNA, 19 nt, Human
uugaaaacagcuggaacuc

SEQ ID NO: 1098717 - RNA, 19 nt, Human
uugcagggcagaccguggu

SEQ ID NO: 1098718 - RNA, 18 nt, Human
uuggcugaacacuaagcu

SEQ ID NO: 1098719 - RNA, 21 nt, Human
uuguagaggagacaggaguca

SEQ ID NO: 1098720 - RNA, 18 nt, Human
agugugcagcugcagccc

SEQ ID NO: 1098721 - RNA, 24 nt, Human
caaggacagugugcagcugcagcc

SEQ ID NO: 1098722 - RNA, 18 nt, Human
cagugcucuuacuucugc

SEQ ID NO: 1098723 - RNA, 19 nt, Human
ccugcuagggccugcccca

SEQ ID NO: 1098724 - RNA, 18 nt, Human
cgcuggugcuggcagugc

SEQ ID NO: 1098725 - RNA, 26 nt, Human
cucaaaguggagaagcaacacgagaa

SEQ ID NO: 1098726 - RNA, 22 nt, Human
cuccgccgcuggugcuggcagu

SEQ ID NO: 1098727 - RNA, 19 nt, Human
cuccugaaucuccuggaca

SEQ ID NO: 1098728 - RNA, 20 nt, Human
cucucucuggaggggccucu

SEQ ID NO: 1098729 - RNA, 20 nt, Human
cuggugcuggcagugcucuu

SEQ ID NO: 1098730 - RNA, 20 nt, Human
cuuggcuggagcucccucca

SEQ ID NO: 1098731 - RNA, 22 nt, Human
gcaacacgagaacaucuugcuc

SEQ ID NO: 1098732 - RNA, 18 nt, Human
ucccaugcuggcucuggc

SEQ ID NO: 1098733 - RNA, 28 nt, Human
ucucuggaggggccucuucccaugcugg

SEQ ID NO: 1098734 - RNA, 21 nt, Human
ugaagcagcaaccucucaaag

SEQ ID NO: 1098735 - RNA, 25 nt, Human
ugguguggccuggccugcuagggcc

SEQ ID NO: 1098736 - RNA, 22 nt, Human
aaaagcaagaaaaagaaggaaa

SEQ ID NO: 1098737 - RNA, 18 nt, Human
aaaaugcucacauuagaa

SEQ ID NO: 1098738 - RNA, 18 nt, Human
aaacagaagaaacgcuuu

SEQ ID NO: 1098739 - RNA, 22 nt, Human
aaacagaagaaacgcuuuccaa

SEQ ID NO: 1098740 - RNA, 24 nt, Human
aaaccagacaaacuauauacaaaa

SEQ ID NO: 1098741 - RNA, 24 nt, Human
aaagaaaaaaagacauaauggcac

SEQ ID NO: 1098742 - RNA, 21 nt, Human
aaagcaagaaaaagaaggaaa

SEQ ID NO: 1098743 - RNA, 23 nt, Human
aaauaauaaagauaaaaguagaa

SEQ ID NO: 1098744 - RNA, 22 nt, Human
aaaucaaugaaacugaaaccaa

SEQ ID NO: 1098745 - RNA, 23 nt, Human
aacaccucucaauaauccaauua

SEQ ID NO: 1098746 - RNA, 19 nt, Human
aacauacagaaaauugacc

SEQ ID NO: 1098747 - RNA, 21 nt, Human
aacuaauagaacugaaaggaa

SEQ ID NO: 1098748 - RNA, 25 nt, Human
aagaaaaaaagacauaauggcacaa

SEQ ID NO: 1098749 - RNA, 25 nt, Human
aagaaaaagaaggaaauaauaaaga

SEQ ID NO: 1098750 - RNA, 21 nt, Human
aagaaggaaauaauaaagaua

SEQ ID NO: 1098751 - RNA, 22 nt, Human
aagaaggaaauaauaaagauaa

SEQ ID NO: 1098752 - RNA, 18 nt, Human
aagaggaaaggucucaaa

SEQ ID NO: 1098753 - RNA, 23 nt, Human
aagcaagaaaaagaaggagggac

SEQ ID NO: 1098754 - RNA, 23 nt, Human
aaguaguccuaggagggaacuaa

SEQ ID NO: 1098755 - RNA, 18 nt, Human
aauacaauucuacaaaua

SEQ ID NO: 1098756 - RNA, 22 nt, Human
aaugaccagagacugagaggaa

SEQ ID NO: 1098757 - RNA, 18 nt, Human
acaaaaaaaucuccgagc

SEQ ID NO: 1098758 - RNA, 26 nt, Human
acaaacuucugacaagaucaacaaag

SEQ ID NO: 1098759 - RNA, 20 nt, Human
acaaagaaaaaaagacauaa

SEQ ID NO: 1098760 - RNA, 21 nt, Human
acaaagaaaaugaccagagac

SEQ ID NO: 1098761 - RNA, 24 nt, Human
agaaaaaaagacauaauggcacaa

SEQ ID NO: 1098762 - RNA, 25 nt, Human
agaaaaaaagacauaauggcacaaa

SEQ ID NO: 1098763 - RNA, 23 nt, Human
agaaaaagaaggaaauaauaaag

SEQ ID NO: 1098764 - RNA, 19 nt, Human
agaaaucaaugaaacugaa

SEQ ID NO: 1098765 - RNA, 24 nt, Human
aggaaaacagaagaaaccgguacc

SEQ ID NO: 1098766 - RNA, 18 nt, Human
auaccaaaaccagacaaa

SEQ ID NO: 1098767 - RNA, 23 nt, Human
caaaagcaagaaaaagaaggaaa

SEQ ID NO: 1098768 - RNA, 21 nt, Human
caaaaggauaaugaagaauac

SEQ ID NO: 1098769 - RNA, 20 nt, Human
caaagaaaaugaccagagac

SEQ ID NO: 1098770 - RNA, 24 nt, Human
caacaaagaaaaaaagacauaaug

SEQ ID NO: 1098771 - RNA, 19 nt, Human
caagagaagccauaaagug

SEQ ID NO: 1098772 - RNA, 18 nt, Human
cacccuuucucccaucca

SEQ ID NO: 1098773 - RNA, 24 nt, Human
caccucuagaaccuagaaaaagaa

SEQ ID NO: 1098774 - RNA, 18 nt, Human
caccugccccuuagucac

SEQ ID NO: 1098775 - RNA, 18 nt, Human
cagcacaaagaaaaugac

SEQ ID NO: 1098776 - RNA, 22 nt, Human
cagccacagccugaccccuugg

SEQ ID NO: 1098777 - RNA, 20 nt, Human
cauaaagugcugccuuuaag

SEQ ID NO: 1098778 - RNA, 23 nt, Human
cauuagaaaagaggaaaggucuc

SEQ ID NO: 1098779 - RNA, 20 nt, Human
cccuuucucccauccacugu

SEQ ID NO: 1098780 - RNA, 22 nt, Human
ccuagaaaaagaagcacaaaau

SEQ ID NO: 1098781 - RNA, 23 nt, Human
ccugaaaauauuaaauggaaaau

SEQ ID NO: 1098782 - RNA, 20 nt, Human
ccuuuaagugaaaggguaaa

SEQ ID NO: 1098783 - RNA, 22 nt, Human
cgaguagugaugguagcaauuu

SEQ ID NO: 1098784 - RNA, 20 nt, Human
cucagguaugucuuuaucag

SEQ ID NO: 1098785 - RNA, 25 nt, Human
cugacaagaucaacaaagaaaaaaa

SEQ ID NO: 1098786 - RNA, 22 nt, Human
cugagaggaauauuacguaaug

SEQ ID NO: 1098787 - RNA, 22 nt, Human
cugcaaaauaaugugaagcuaa

SEQ ID NO: 1098788 - RNA, 22 nt, Human
cugguucuuggaacaaauugau

SEQ ID NO: 1098789 - RNA, 27 nt, Human
gaaauaaaacagggauaccauuacaga

SEQ ID NO: 1098790 - RNA, 25 nt, Human
gaagcacaaaauauaccaaaagcaa

SEQ ID NO: 1098791 - RNA, 20 nt, Human
gaggaaaggucucaaaucaa

SEQ ID NO: 1098792 - RNA, 23 nt, Human
gcaaaauaaugugaagcuaaaac

SEQ ID NO: 1098793 - RNA, 23 nt, Human
ggaaaaaagaaacuauggacuaa

SEQ ID NO: 1098794 - RNA, 22 nt, Human
ggaaaaauaaauaaauccacaa

SEQ ID NO: 1098795 - RNA, 23 nt, Human
ggaaaaauaaauaaauccacaaa

SEQ ID NO: 1098796 - RNA, 24 nt, Human
uaaaguauauuucagcacaaagaa

SEQ ID NO: 1098797 - RNA, 26 nt, Human
uaaauaaauccacaaauacaguugga

SEQ ID NO: 1098798 - RNA, 24 nt, Human
uaacacacacaaaaaaaucuccga

SEQ ID NO: 1098799 - RNA, 22 nt, Human
uaaggaaacugaauauguaauu

SEQ ID NO: 1098800 - RNA, 24 nt, Human
uacccugauaccaaaaccagacaa

SEQ ID NO: 1098801 - RNA, 19 nt, Human
uagaaaaaauucacugcaa

SEQ ID NO: 1098802 - RNA, 20 nt, Human
uagaaccuagaaaaagaagc

SEQ ID NO: 1098803 - RNA, 22 nt, Human
uaggagggaacuaaauguaacu

SEQ ID NO: 1098804 - RNA, 20 nt, Human
uaguagccaacaguuaucag

SEQ ID NO: 1098805 - RNA, 22 nt, Human
uagugaugguagcaauuuggau

SEQ ID NO: 1098806 - RNA, 22 nt, Human
uauaacacacacaaaaaaaucu

SEQ ID NO: 1098807 - RNA, 22 nt, Human
uauaccaaaagcaagaaaaaga

SEQ ID NO: 1098808 - RNA, 21 nt, Human
uaugcuuccaccucuagaacc

SEQ ID NO: 1098809 - RNA, 19 nt, Human
ucaacaaagaaaaaaagac

SEQ ID NO: 1098810 - RNA, 23 nt, Human
ucagcacaaagaaaaugaccaga

SEQ ID NO: 1098811 - RNA, 21 nt, Human
ucagucucagguaugucuuua

SEQ ID NO: 1098812 - RNA, 21 nt, Human
ucugcaguuucgcuuuccugg

SEQ ID NO: 1098813 - RNA, 20 nt, Human
ugaaaccaaaucaaugagcu

SEQ ID NO: 1098814 - RNA, 22 nt, Human
ugaaaggguaaaagcuuucaau

SEQ ID NO: 1098815 - RNA, 20 nt, Human
ugacaagaucaacaaagaaa

SEQ ID NO: 1098816 - RNA, 21 nt, Human
ugacaagaucaacaaagaaaa

SEQ ID NO: 1098817 - RNA, 24 nt, Human
ugacaagaucaacaaagaaaaaaa

SEQ ID NO: 1098818 - RNA, 26 nt, Human
ugacaagaucaacaaagaaaaaaaga

SEQ ID NO: 1098819 - RNA, 24 nt, Human
uggaacaaauugauaaaauugaca

SEQ ID NO: 1098820 - RNA, 20 nt, Human
uuccuggguuuguuacucac

SEQ ID NO: 1098821 - RNA, 20 nt, Human
uuccuggguuuguuacucac

SEQ ID NO: 1098822 - RNA, 22 nt, Human
uugcaucguccugcuccauccc

SEQ ID NO: 1098823 - RNA, 23 nt, Human
uugugaggccuccccagccaugu

SEQ ID NO: 1098824 - RNA, 20 nt, Human
uuuguuaaaagggaaaaaag

SEQ ID NO: 1098825 - RNA, 18 nt, Human
aaucgcuugaacccggga

SEQ ID NO: 1098826 - RNA, 22 nt, Human
agaggaugggcuuccuaauuuc

SEQ ID NO: 1098827 - RNA, 22 nt, Human
agccaguaucauucaugccaga

SEQ ID NO: 1098828 - RNA, 18 nt, Human
agcuuuugccucugagca

SEQ ID NO: 1098829 - RNA, 24 nt, Human
aggcaggagaaucgcuugaacccg

SEQ ID NO: 1098830 - RNA, 20 nt, Human
aggcugaggcaggagaaucg

SEQ ID NO: 1098831 - RNA, 24 nt, Human
aggcugaggcaggagaaucgcuug

SEQ ID NO: 1098832 - RNA, 18 nt, Human
aucuuccaugcucucguu

SEQ ID NO: 1098833 - RNA, 18 nt, Human
augaaguucuacaccugg

SEQ ID NO: 1098834 - RNA, 21 nt, Human
cccgggaugcggagguugcag

SEQ ID NO: 1098835 - RNA, 21 nt, Human
ccuguaaucccagcuacucug

SEQ ID NO: 1098836 - RNA, 22 nt, Human
ccuguaaucccagcuacucugg

SEQ ID NO: 1098837 - RNA, 23 nt, Human
ccuguaaucccagcuacucugga

SEQ ID NO: 1098838 - RNA, 24 nt, Human
cgggaugcggagguugcagugagc

SEQ ID NO: 1098839 - RNA, 19 nt, Human
gcggagguugcagugagcc

SEQ ID NO: 1098840 - RNA, 22 nt, Human
gcggagguugcagugagccgag

SEQ ID NO: 1098841 - RNA, 18 nt, Human
ggagguugcagugagccg

SEQ ID NO: 1098842 - RNA, 20 nt, Human
ggagguugcagugagccgag

SEQ ID NO: 1098843 - RNA, 19 nt, Human
guaggugccuguaauccca

SEQ ID NO: 1098844 - RNA, 20 nt, Human
guaggugccuguaaucccag

SEQ ID NO: 1098845 - RNA, 19 nt, Human
uacucuggaggcugaggca

SEQ ID NO: 1098846 - RNA, 23 nt, Human
uccaguccaccaacaucucaggg

SEQ ID NO: 1098847 - RNA, 24 nt, Human
ucgcuugaacccgggaugcggagg

SEQ ID NO: 1098848 - RNA, 25 nt, Human
ucugcaaucugggggccggaagagc

SEQ ID NO: 1098849 - RNA, 20 nt, Human
ugaggcaggagaaucgcuug

SEQ ID NO: 1098850 - RNA, 24 nt, Human
ugaggcaggagaaucgcuugaacc

SEQ ID NO: 1098851 - RNA, 25 nt, Human
ugaggcaggagaaucgcuugaaccc

SEQ ID NO: 1098852 - RNA, 19 nt, Human
ugccuguaaucccagcuac

SEQ ID NO: 1098853 - RNA, 24 nt, Human
ugccuguaaucccagcuacucugg

SEQ ID NO: 1098854 - RNA, 21 nt, Human
ugcggagguugcagugagccg

SEQ ID NO: 1098855 - RNA, 19 nt, Human
ugguugggugaucucuucc

SEQ ID NO: 1098856 - RNA, 20 nt, Human
uguacgaagucucugguugg

SEQ ID NO: 1098857 - RNA, 24 nt, Human
uguuguaggugccuguaaucccag

SEQ ID NO: 1098858 - RNA, 24 nt, Human
uuagcaauuauuccaacaucuucc

SEQ ID NO: 1098859 - RNA, 21 nt, Human
uucaugauggucaguuccucu

SEQ ID NO: 1098860 - RNA, 24 nt, Human
uucuagaucagagauccaguccac

SEQ ID NO: 1098861 - RNA, 24 nt, Human
uuugccucugagcaguuuuuucua

SEQ ID NO: 1098862 - RNA, 22 nt, Human
aaaagcaagaaaaagaaggaaa

SEQ ID NO: 1098863 - RNA, 18 nt, Human
aaaaugcucacauuagaa

SEQ ID NO: 1098864 - RNA, 18 nt, Human
aaacagaagaaacgcuuu

SEQ ID NO: 1098865 - RNA, 22 nt, Human
aaacagaagaaacgcuuuccaa

SEQ ID NO: 1098866 - RNA, 24 nt, Human
aaaccagacaaacuauauacaaaa

SEQ ID NO: 1098867 - RNA, 23 nt, Human
aaagaaaaaaagacauaacggca

SEQ ID NO: 1098868 - RNA, 21 nt, Human
aaagcaagaaaaagaaggaaa

SEQ ID NO: 1098869 - RNA, 23 nt, Human
aaauaauaaagauaaaaguagaa

SEQ ID NO: 1098870 - RNA, 22 nt, Human
aaaucaaugaaacugaaaccaa

SEQ ID NO: 1098871 - RNA, 23 nt, Human
aacaccucucaauaacccaauua

SEQ ID NO: 1098872 - RNA, 19 nt, Human
aacauacagaaaauggacc

SEQ ID NO: 1098873 - RNA, 21 nt, Human
aacuaauagaacugaaaggaa

SEQ ID NO: 1098874 - RNA, 25 nt, Human
aagaaaaagaaggaaauaauaaaga

SEQ ID NO: 1098875 - RNA, 20 nt, Human
aagaaggaaauaauaaagau

SEQ ID NO: 1098876 - RNA, 21 nt, Human
aagaaggaaauaauaaagaua

SEQ ID NO: 1098877 - RNA, 22 nt, Human
aagaaggaaauaauaaagauaa

SEQ ID NO: 1098878 - RNA, 18 nt, Human
aagagaagccauaaagug

SEQ ID NO: 1098879 - RNA, 18 nt, Human
aagaggaaaggucucaaa

SEQ ID NO: 1098880 - RNA, 20 nt, Human
aagcaagaaaaagaaggagg

SEQ ID NO: 1098881 - RNA, 23 nt, Human
aaguaguccuaggagggaacuaa

SEQ ID NO: 1098882 - RNA, 18 nt, Human
aauacaauucuacaaaua

SEQ ID NO: 1098883 - RNA, 22 nt, Human
aaugaccagagacugagaggaa

SEQ ID NO: 1098884 - RNA, 18 nt, Human
acaaaaaaaucuccgagc

SEQ ID NO: 1098885 - RNA, 26 nt, Human
acaaacuucugacaagaucaacaaag

SEQ ID NO: 1098886 - RNA, 20 nt, Human
acaaagaaaaaaagacauaa

SEQ ID NO: 1098887 - RNA, 21 nt, Human
acaaagaaaaugaccagagac

SEQ ID NO: 1098888 - RNA, 24 nt, Human
agaaaaaaagacauaacggcacaa

SEQ ID NO: 1098889 - RNA, 23 nt, Human
agaaaaagaaggaaauaauaaag

SEQ ID NO: 1098890 - RNA, 19 nt, Human
agaaaucaaugaaacugaa

SEQ ID NO: 1098891 - RNA, 18 nt, Human
auaccaaaaccagacaaa

SEQ ID NO: 1098892 - RNA, 23 nt, Human
caaaagcaagaaaaagaaggaaa

SEQ ID NO: 1098893 - RNA, 21 nt, Human
caaaaggauaauuaagaauac

SEQ ID NO: 1098894 - RNA, 23 nt, Human
caaagaaaaaaagacauaacggc

SEQ ID NO: 1098895 - RNA, 26 nt, Human
caaagaaaaaaagacauaacggcaca

SEQ ID NO: 1098896 - RNA, 20 nt, Human
caaagaaaaugaccagagac

SEQ ID NO: 1098897 - RNA, 24 nt, Human
caacaaagaaaaaaagacauaacg

SEQ ID NO: 1098898 - RNA, 24 nt, Human
caccucuagaaccuagaaaaagaa

SEQ ID NO: 1098899 - RNA, 18 nt, Human
cagcacaaagaaaaugac

SEQ ID NO: 1098900 - RNA, 22 nt, Human
cagccacagccugaccccuugg

SEQ ID NO: 1098901 - RNA, 20 nt, Human
cauaaagugcugccuuuaag

SEQ ID NO: 1098902 - RNA, 23 nt, Human
cauuagaaaagaggaaaggucuc

SEQ ID NO: 1098903 - RNA, 21 nt, Human
ccccuuuguccaucgcaucca

SEQ ID NO: 1098904 - RNA, 20 nt, Human
cccuuucucccauccacugu

SEQ ID NO: 1098905 - RNA, 20 nt, Human
ccuagaaaaagaagcacaaa

SEQ ID NO: 1098906 - RNA, 23 nt, Human
ccugaaaauauuaaauggaaaau

SEQ ID NO: 1098907 - RNA, 20 nt, Human
ccuuuaagugaaaggguaaa

SEQ ID NO: 1098908 - RNA, 23 nt, Human
cgaguagugaugguagcaguuuu

SEQ ID NO: 1098909 - RNA, 20 nt, Human
cucagguaugucuuuaucag

SEQ ID NO: 1098910 - RNA, 22 nt, Human
cugcaaaauaaugugaagcuaa

SEQ ID NO: 1098911 - RNA, 22 nt, Human
cugguucuuggaacaaauugau

SEQ ID NO: 1098912 - RNA, 27 nt, Human
gaaauaaaacagggauaccauuacaga

SEQ ID NO: 1098913 - RNA, 25 nt, Human
gaagcacaaaauauaccaaaagcaa

SEQ ID NO: 1098914 - RNA, 18 nt, Human
gagguagauccuccccuu

SEQ ID NO: 1098915 - RNA, 23 nt, Human
gcaaaauaaugugaagcuaaaac

SEQ ID NO: 1098916 - RNA, 24 nt, Human
gcugggagguagauccuccccuuu

SEQ ID NO: 1098917 - RNA, 23 nt, Human
ggaaaaaagaaacuauggacuaa

SEQ ID NO: 1098918 - RNA, 22 nt, Human
ggaaaaauaaauaaauccacaa

SEQ ID NO: 1098919 - RNA, 23 nt, Human
ggaaaaauaaauaaauccacaaa

SEQ ID NO: 1098920 - RNA, 23 nt, Human
ggaaaacagaagaaacgcuuucc

SEQ ID NO: 1098921 - RNA, 24 nt, Human
uaaaguauauuucagcacaaagaa

SEQ ID NO: 1098922 - RNA, 26 nt, Human
uaaauaaauccacaaauacaguugga

SEQ ID NO: 1098923 - RNA, 22 nt, Human
uaagaauacuaauacaauucua

SEQ ID NO: 1098924 - RNA, 23 nt, Human
uaagaauacuaauacaauucuac

SEQ ID NO: 1098925 - RNA, 22 nt, Human
uaaggaaacugaauauguaauu

SEQ ID NO: 1098926 - RNA, 20 nt, Human
uaccaaaagcaagaaaaaga

SEQ ID NO: 1098927 - RNA, 24 nt, Human
uacccugauaccaaaaccagacaa

SEQ ID NO: 1098928 - RNA, 20 nt, Human
uagaaccuagaaaaagaagc

SEQ ID NO: 1098929 - RNA, 23 nt, Human
uaggagggaacuaaauguaacua

SEQ ID NO: 1098930 - RNA, 20 nt, Human
uaguagccaacaguuaucag

SEQ ID NO: 1098931 - RNA, 22 nt, Human
uagugaugguagcaguuuggau

SEQ ID NO: 1098932 - RNA, 22 nt, Human
uauaacacacacaaaaaaaucu

SEQ ID NO: 1098933 - RNA, 21 nt, Human
uaugcuuccaccucuagaacc

SEQ ID NO: 1098934 - RNA, 19 nt, Human
ucaacaaagaaaaaaagac

SEQ ID NO: 1098935 - RNA, 19 nt, Human
ucacccuuucucccaucca

SEQ ID NO: 1098936 - RNA, 23 nt, Human
ucagcacaaagaaaaugaccaga

SEQ ID NO: 1098937 - RNA, 21 nt, Human
ucagucucagguaugucuuua

SEQ ID NO: 1098938 - RNA, 19 nt, Human
uccuggguuuguuacucac

SEQ ID NO: 1098939 - RNA, 19 nt, Human
ucugcaguuucgcuuuccu

SEQ ID NO: 1098940 - RNA, 21 nt, Human
ucugcaguuucgcuuuccugg

SEQ ID NO: 1098941 - RNA, 20 nt, Human
ugaaaccaaaucaaugagcu

SEQ ID NO: 1098942 - RNA, 22 nt, Human
ugaaaggguaaaagcuuucaau

SEQ ID NO: 1098943 - RNA, 20 nt, Human
ugacaagaucaacaaagaaa

SEQ ID NO: 1098944 - RNA, 21 nt, Human
ugacaagaucaacaaagaaaa

SEQ ID NO: 1098945 - RNA, 24 nt, Human
ugacaagaucaacaaagaaaaaaa

SEQ ID NO: 1098946 - RNA, 26 nt, Human
ugacaagaucaacaaagaaaaaaaga

SEQ ID NO: 1098947 - RNA, 21 nt, Human
ugagaggaauauuacauaaug

SEQ ID NO: 1098948 - RNA, 24 nt, Human
uggaacaaauugauaaaauugaca

SEQ ID NO: 1098949 - RNA, 19 nt, Human
uguggugguauugcagucc

SEQ ID NO: 1098950 - RNA, 20 nt, Human
uuccuggguuuguuacucac

SEQ ID NO: 1098951 - RNA, 22 nt, Human
uugcaucguccugcuccauccc

SEQ ID NO: 1098952 - RNA, 23 nt, Human
uugcgaggccuccccagccaugu

SEQ ID NO: 1098953 - RNA, 20 nt, Human
uuuguuaaaagggaaaaaag

SEQ ID NO: 1098954 - RNA, 18 nt, Human
acccuuuggagccaccuc

SEQ ID NO: 1098955 - RNA, 19 nt, Human
augguagggcagguggugg

SEQ ID NO: 1098956 - RNA, 20 nt, Human
ccuccugguccccucaccca

SEQ ID NO: 1098957 - RNA, 21 nt, Human
cuccugguccccucacccacu

SEQ ID NO: 1098958 - RNA, 20 nt, Human
ugcuuuacccuuuggagcca

SEQ ID NO: 1098959 - RNA, 20 nt, Human
aagcagccagcccuucagga

SEQ ID NO: 1098960 - RNA, 21 nt, Human
aaggagcuggaggagaagagg

SEQ ID NO: 1098961 - RNA, 24 nt, Human
aaugcuagaagcaucaugaaggaa

SEQ ID NO: 1098962 - RNA, 19 nt, Human
acauggcagcgcuuccugu

SEQ ID NO: 1098963 - RNA, 18 nt, Human
acucuuacaaggaauuuc

SEQ ID NO: 1098964 - RNA, 20 nt, Human
agagaaccaagggacuguca

SEQ ID NO: 1098965 - RNA, 21 nt, Human
agagaaccaagggacugucag

SEQ ID NO: 1098966 - RNA, 21 nt, Human
agauggcucagggaugaggag

SEQ ID NO: 1098967 - RNA, 19 nt, Human
agcaaucauaagagaacca

SEQ ID NO: 1098968 - RNA, 24 nt, Human
agcaucuacaugcucaaagaaacu

SEQ ID NO: 1098969 - RNA, 21 nt, Human
agccagcccuucaggagccag

SEQ ID NO: 1098970 - RNA, 21 nt, Human
aggcuaggaaacuugaaggca

SEQ ID NO: 1098971 - RNA, 20 nt, Human
aucacauuuuccuccaucaa

SEQ ID NO: 1098972 - RNA, 20 nt, Human
aucucuaucacauuuuccuc

SEQ ID NO: 1098973 - RNA, 20 nt, Human
augccaggguccuggcauga

SEQ ID NO: 1098974 - RNA, 19 nt, Human
caaauggaggaccacagau

SEQ ID NO: 1098975 - RNA, 24 nt, Human
caaugcauacagcaccugcacccu

SEQ ID NO: 1098976 - RNA, 24 nt, Human
cagcgcacaccccuacuccucaug

SEQ ID NO: 1098977 - RNA, 18 nt, Human
caggagccagccaggaga

SEQ ID NO: 1098978 - RNA, 22 nt, Human
caggagccagccaggagacagc

SEQ ID NO: 1098979 - RNA, 23 nt, Human
cagggaugaggagauggcaaagg

SEQ ID NO: 1098980 - RNA, 22 nt, Human
cauauaaaccaaugcauacagc

SEQ ID NO: 1098981 - RNA, 24 nt, Human
ccacagauggcuggugguacugag

SEQ ID NO: 1098982 - RNA, 21 nt, Human
ccacagggagauggcucaggg

SEQ ID NO: 1098983 - RNA, 21 nt, Human
cccaaggagcagugggagcuc

SEQ ID NO: 1098984 - RNA, 24 nt, Human
cccugucagcaucuacaugcucaa

SEQ ID NO: 1098985 - RNA, 19 nt, Human
ccuucaggagccagccagg

SEQ ID NO: 1098986 - RNA, 23 nt, Human
cuagaugcuuuccgcaaucgugg

SEQ ID NO: 1098987 - RNA, 23 nt, Human
cuaugaagagaagcaaaaaaaaa

SEQ ID NO: 1098988 - RNA, 19 nt, Human
cucagacuccccauccuuc

SEQ ID NO: 1098989 - RNA, 22 nt, Human
cugaggcucagaaauguuguac

SEQ ID NO: 1098990 - RNA, 21 nt, Human
cuggacuuccaggugggggaa

SEQ ID NO: 1098991 - RNA, 21 nt, Human
cuggaggauuuccaaugcuag

SEQ ID NO: 1098992 - RNA, 18 nt, Human
cuggaugcugaugguaac

SEQ ID NO: 1098993 - RNA, 19 nt, Human
cuuuccgcaaucguggaga

SEQ ID NO: 1098994 - RNA, 24 nt, Human
gaaagugcaccauucccaaggagc

SEQ ID NO: 1098995 - RNA, 22 nt, Human
gaagcagccagcccuucagggg

SEQ ID NO: 1098996 - RNA, 18 nt, Human
gaaggaagagaggggcug

SEQ ID NO: 1098997 - RNA, 21 nt, Human
gaggauuuccaaugcuagaag

SEQ ID NO: 1098998 - RNA, 18 nt, Human
gaugcagugcugguggcc

SEQ ID NO: 1098999 - RNA, 19 nt, Human
gauucccugucccuuucuc

SEQ ID NO: 1099000 - RNA, 23 nt, Human
gcaaaaaaaaaaaaaaaaaaaaa

SEQ ID NO: 1099001 - RNA, 19 nt, Human
gcccuucaggagccagcca

SEQ ID NO: 1099002 - RNA, 21 nt, Human
ggacugucaggcugugcggag

SEQ ID NO: 1099003 - RNA, 22 nt, Human
ggagaagaggacacccaggaac

SEQ ID NO: 1099004 - RNA, 23 nt, Human
ggagcagugggagcucgcucugg

SEQ ID NO: 1099005 - RNA, 20 nt, Human
ggaggagaagaggacaccca

SEQ ID NO: 1099006 - RNA, 18 nt, Human
ggcuggugguacugaggc

SEQ ID NO: 1099007 - RNA, 19 nt, Human
uacagcaccugcacccuuc

SEQ ID NO: 1099008 - RNA, 22 nt, Human
uacagcaccugcacccuucagc

SEQ ID NO: 1099009 - RNA, 21 nt, Human
uaugaagagaagcaaaaaaaa

SEQ ID NO: 1099010 - RNA, 21 nt, Human
ucccaaggagcagugggagcu

SEQ ID NO: 1099011 - RNA, 19 nt, Human
uccgcggagccuuccagcc

SEQ ID NO: 1099012 - RNA, 21 nt, Human
ucucuugcaggagagaaggcu

SEQ ID NO: 1099013 - RNA, 23 nt, Human
ucugccacagggagauggcucag

SEQ ID NO: 1099014 - RNA, 23 nt, Human
ugaagagaagcaaaaaaaaaaaa

SEQ ID NO: 1099015 - RNA, 31 nt, Human
ugaagagaagcaaaaaaaaaaaaaaaaaaaa

SEQ ID NO: 1099016 - RNA, 22 nt, Human
ugaagcgggaggagagcaauca

SEQ ID NO: 1099017 - RNA, 21 nt, Human
ugaaggaagagaggggcugga

SEQ ID NO: 1099018 - RNA, 22 nt, Human
ugaaggaagagaggggcuggag

SEQ ID NO: 1099019 - RNA, 20 nt, Human
ugagaaauguuaucucuugc

SEQ ID NO: 1099020 - RNA, 18 nt, Human
ugcuagaagcaucaugaa

SEQ ID NO: 1099021 - RNA, 18 nt, Human
uggaaucagcgcacaccc

SEQ ID NO: 1099022 - RNA, 18 nt, Human
uggaaucagcgcacaccc

SEQ ID NO: 1099023 - RNA, 19 nt, Human
uggaaucagcgcacacccc

SEQ ID NO: 1099024 - RNA, 21 nt, Human
uggagugccaacuggugugga

SEQ ID NO: 1099025 - RNA, 19 nt, Human
uggcaaaggcugagaagcg

SEQ ID NO: 1099026 - RNA, 22 nt, Human
ugguaagugggagcuguccuug

SEQ ID NO: 1099027 - RNA, 23 nt, Human
uggugguacugaggcucagaaau

SEQ ID NO: 1099028 - RNA, 27 nt, Human
ugguguggagguuugguuggggguacu

SEQ ID NO: 1099029 - RNA, 18 nt, Human
uguuguacagcuugagca

SEQ ID NO: 1099030 - RNA, 24 nt, Human
aaacaaaaaagguauauaaucacu

SEQ ID NO: 1099031 - RNA, 25 nt, Human
aaacaagaaaaagaaauaaaaagua

SEQ ID NO: 1099032 - RNA, 20 nt, Human
aaaccagcaauuuccauggg

SEQ ID NO: 1099033 - RNA, 24 nt, Human
aaagaaccauuuccacucuagaaa

SEQ ID NO: 1099034 - RNA, 19 nt, Human
aaagagccaauccaauuga

SEQ ID NO: 1099035 - RNA, 18 nt, Human
aacacauuccuaacaacu

SEQ ID NO: 1099036 - RNA, 19 nt, Human
aacacggugaaaccccguc

SEQ ID NO: 1099037 - RNA, 20 nt, Human
aacacggugaaaccccgucu

SEQ ID NO: 1099038 - RNA, 21 nt, Human
aacacggugaaaccccgucuc

SEQ ID NO: 1099039 - RNA, 22 nt, Human
aagaaaauacaaaacacaauca

SEQ ID NO: 1099040 - RNA, 20 nt, Human
aagaaaggcaggagucaaaa

SEQ ID NO: 1099041 - RNA, 22 nt, Human
aagcauaauucaaaacaaccac

SEQ ID NO: 1099042 - RNA, 24 nt, Human
aauaaaagaagguuuugcaacuag

SEQ ID NO: 1099043 - RNA, 20 nt, Human
acaaaaacuacaaauuucca

SEQ ID NO: 1099044 - RNA, 19 nt, Human
acaaaccaacagucaccau

SEQ ID NO: 1099045 - RNA, 23 nt, Human
acagagugagauuccaucucaaa

SEQ ID NO: 1099046 - RNA, 24 nt, Human
acagagugagauuccaucucaaaa

SEQ ID NO: 1099047 - RNA, 24 nt, Human
acccaggaggcggagguuguggug

SEQ ID NO: 1099048 - RNA, 24 nt, Human
accccgucucuacuaaaaacacaa

SEQ ID NO: 1099049 - RNA, 24 nt, Human
acuccagccugggcaacagaguga

SEQ ID NO: 1099050 - RNA, 24 nt, Human
acugcacuccagccugggcaacag

SEQ ID NO: 1099051 - RNA, 24 nt, Human
acugcacuccagccugggcaacag

SEQ ID NO: 1099052 - RNA, 19 nt, Human
agaaauaagagagagagcc

SEQ ID NO: 1099053 - RNA, 23 nt, Human
agaaucagaggcuguuugcagcu

SEQ ID NO: 1099054 - RNA, 22 nt, Human
agaccaaaauguaaacuaguca

SEQ ID NO: 1099055 - RNA, 20 nt, Human
agagaaagagagaagaaaau

SEQ ID NO: 1099056 - RNA, 18 nt, Human
agagagaagaaaauagug

SEQ ID NO: 1099057 - RNA, 20 nt, Human
agagccaauccaauugaaau

SEQ ID NO: 1099058 - RNA, 24 nt, Human
agccugggcaacagagugagauuc

SEQ ID NO: 1099059 - RNA, 23 nt, Human
aggcaaaaauaaaccacacaaag

SEQ ID NO: 1099060 - RNA, 24 nt, Human
aggcaggagaauggcaugaaccca

SEQ ID NO: 1099061 - RNA, 27 nt, Human
aggcaggagaauggcaugaacccagga

SEQ ID NO: 1099062 - RNA, 21 nt, Human
aggcaggagucaaaauucaac

SEQ ID NO: 1099063 - RNA, 26 nt, Human
aggcaggagucaaaauucaacaucca

SEQ ID NO: 1099064 - RNA, 24 nt, Human
aggcaggcauaucacgaggucagg

SEQ ID NO: 1099065 - RNA, 19 nt, Human
aggcauaucacgaggucag

SEQ ID NO: 1099066 - RNA, 21 nt, Human
aggccgaggcaggcauaucac

SEQ ID NO: 1099067 - RNA, 21 nt, Human
aggcggagguuguggugagcc

SEQ ID NO: 1099068 - RNA, 24 nt, Human
aggcggagguuguggugagccgag

SEQ ID NO: 1099069 - RNA, 19 nt, Human
aggcugaggcaggagaaug

SEQ ID NO: 1099070 - RNA, 18 nt, Human
aggcuggagugcaguggc

SEQ ID NO: 1099071 - RNA, 24 nt, Human
aggugugguggcgggcgccuguag

SEQ ID NO: 1099072 - RNA, 19 nt, Human
agucaccaucaggcaaaaa

SEQ ID NO: 1099073 - RNA, 24 nt, Human
agugguucacgccuguaaucccag

SEQ ID NO: 1099074 - RNA, 22 nt, Human
auaaagaccaaaauguaaacua

SEQ ID NO: 1099075 - RNA, 18 nt, Human
auagaggacaguuuaacu

SEQ ID NO: 1099076 - RNA, 23 nt, Human
aucaaugcuaauauaucauucua

SEQ ID NO: 1099077 - RNA, 21 nt, Human
aucucaaaaaaaaaaaaaaag

SEQ ID NO: 1099078 - RNA, 28 nt, Human
auuccaucucaaaaaaaaaaaaaaagaa

SEQ ID NO: 1099079 - RNA, 24 nt, Human
auugcgccacugcacuccagccug

SEQ ID NO: 1099080 - RNA, 23 nt, Human
caaaaaaaaaaaaaaagaaagaa

SEQ ID NO: 1099081 - RNA, 21 nt, Human
caaaaacuacaaauuuccaaa

SEQ ID NO: 1099082 - RNA, 24 nt, Human
caaauaaagaccaaaauguaaacu

SEQ ID NO: 1099083 - RNA, 24 nt, Human
caacacuaauuuguacacuaacug

SEQ ID NO: 1099084 - RNA, 23 nt, Human
caacagagugagauuccaucuca

SEQ ID NO: 1099085 - RNA, 24 nt, Human
cacaagcacucagugauacaaaac

SEQ ID NO: 1099086 - RNA, 23 nt, Human
cacgccuguaaucccagcacuuu

SEQ ID NO: 1099087 - RNA, 22 nt, Human
cacuccagccugggcaacagag

SEQ ID NO: 1099088 - RNA, 22 nt, Human
cacuccagccugggcaacagag

SEQ ID NO: 1099089 - RNA, 24 nt, Human
cacuccagccugggcaacagagug

SEQ ID NO: 1099090 - RNA, 18 nt, Human
cacugcacuccagccugg

SEQ ID NO: 1099091 - RNA, 19 nt, Human
cacugcacuccagccuggg

SEQ ID NO: 1099092 - RNA, 21 nt, Human
cacugcacuccagccugggca

SEQ ID NO: 1099093 - RNA, 23 nt, Human
cacugcacuccagccugggcaac

SEQ ID NO: 1099094 - RNA, 24 nt, Human
cacugcacuccagccugggcaaca

SEQ ID NO: 1099095 - RNA, 21 nt, Human
cagaggcauagcuugcuaugu

SEQ ID NO: 1099096 - RNA, 18 nt, Human
cagcacuuuaggaggccg

SEQ ID NO: 1099097 - RNA, 24 nt, Human
cagcacuuuaggaggccgaggcag

SEQ ID NO: 1099098 - RNA, 24 nt, Human
cagcuacuugggaggcugaggcag

SEQ ID NO: 1099099 - RNA, 24 nt, Human
cagugcaguuaaacaagaaaaaga

SEQ ID NO: 1099100 - RNA, 19 nt, Human
caguggaagaaauuaacac

SEQ ID NO: 1099101 - RNA, 24 nt, Human
caguuaagaucaauuacaaaccaa

SEQ ID NO: 1099102 - RNA, 23 nt, Human
cauaaugcaagaaaauacaaaac

SEQ ID NO: 1099103 - RNA, 20 nt, Human
cauacacacacaaaaacuac

SEQ ID NO: 1099104 - RNA, 23 nt, Human
cauacacacacaaaaacuacaaa

SEQ ID NO: 1099105 - RNA, 28 nt, Human
cauaugccaugcauacacacacaaaaac

SEQ ID NO: 1099106 - RNA, 25 nt, Human
cauccucguuaucagaugauaagaa

SEQ ID NO: 1099107 - RNA, 21 nt, Human
cauuuccacucuagaaagaag

SEQ ID NO: 1099108 - RNA, 21 nt, Human
ccacagauauuuagaacacac

SEQ ID NO: 1099109 - RNA, 20 nt, Human
ccacugcacuccagccuggg

SEQ ID NO: 1099110 - RNA, 21 nt, Human
ccacugcacuccagccugggc

SEQ ID NO: 1099111 - RNA, 23 nt, Human
ccacugcacuccagccugggcaa

SEQ ID NO: 1099112 - RNA, 24 nt, Human
ccacugcacuccagccugggcaac

SEQ ID NO: 1099113 - RNA, 24 nt, Human
ccagaccauccuggcuaacacggu

SEQ ID NO: 1099114 - RNA, 19 nt, Human
cccaggcuggagugcagug

SEQ ID NO: 1099115 - RNA, 23 nt, Human
ccuggcuaacacggugaaacccc

SEQ ID NO: 1099116 - RNA, 24 nt, Human
ccuggcuaacacggugaaaccccg

SEQ ID NO: 1099117 - RNA, 22 nt, Human
ccugggcaacagagugagauuc

SEQ ID NO: 1099118 - RNA, 21 nt, Human
ccuguagucccagcuacuugg

SEQ ID NO: 1099119 - RNA, 24 nt, Human
cgagauugcgccacugcacuccag

SEQ ID NO: 1099120 - RNA, 24 nt, Human
cgaggcaggcauaucacgagguca

SEQ ID NO: 1099121 - RNA, 24 nt, Human
cgccacugcacuccagccugggca

SEQ ID NO: 1099122 - RNA, 22 nt, Human
cgccuguaaucccagcacuuua

SEQ ID NO: 1099123 - RNA, 23 nt, Human
cgccuguagucccagcuacuugg

SEQ ID NO: 1099124 - RNA, 24 nt, Human
cgccuguagucccagcuacuuggg

SEQ ID NO: 1099125 - RNA, 24 nt, Human
cggcacagugguucacgccuguaa

SEQ ID NO: 1099126 - RNA, 18 nt, Human
cgggucagccagugcagu

SEQ ID NO: 1099127 - RNA, 22 nt, Human
cuaaaaacacaaaaacuuagcc

SEQ ID NO: 1099128 - RNA, 25 nt, Human
cucaaaaaaaaaaaaaaagaaagaa

SEQ ID NO: 1099129 - RNA, 18 nt, Human
cuggcuaacacggugaaa

SEQ ID NO: 1099130 - RNA, 18 nt, Human
cuugcuauguugcccagg

SEQ ID NO: 1099131 - RNA, 23 nt, Human
cuugcuauguugcccaggcugga

SEQ ID NO: 1099132 - RNA, 23 nt, Human
gaagagcuauuucagaaucagag

SEQ ID NO: 1099133 - RNA, 18 nt, Human
gagaaagagagaagaaaa

SEQ ID NO: 1099134 - RNA, 24 nt, Human
gagaaucaguggaagaaaauggaa

SEQ ID NO: 1099135 - RNA, 20 nt, Human
gaggaaaaagagagaaagag

SEQ ID NO: 1099136 - RNA, 21 nt, Human
gaggcggagguuguggugagc

SEQ ID NO: 1099137 - RNA, 20 nt, Human
gcacagugguucacgccugu

SEQ ID NO: 1099138 - RNA, 24 nt, Human
gcacuccagccugggcaacagagu

SEQ ID NO: 1099139 - RNA, 22 nt, Human
gcaggagaauggcaugaaccca

SEQ ID NO: 1099140 - RNA, 24 nt, Human
gcauagcuugcuauguugcccagg

SEQ ID NO: 1099141 - RNA, 22 nt, Human
gccacugcacuccagccugggc

SEQ ID NO: 1099142 - RNA, 24 nt, Human
gccacugcacuccagccugggcaa

SEQ ID NO: 1099143 - RNA, 19 nt, Human
gccaggugugguggcgggc

SEQ ID NO: 1099144 - RNA, 20 nt, Human
gcccaggcuggagugcagug

SEQ ID NO: 1099145 - RNA, 23 nt, Human
gccuguagucccagcuacuuggg

SEQ ID NO: 1099146 - RNA, 24 nt, Human
gcuaacacggugaaaccccgucuc

SEQ ID NO: 1099147 - RNA, 19 nt, Human
gcuauguugcccaggcugg

SEQ ID NO: 1099148 - RNA, 20 nt, Human
gcuauguugcccaggcugga

SEQ ID NO: 1099149 - RNA, 22 nt, Human
gcuggagugcaguggcuauuca

SEQ ID NO: 1099150 - RNA, 23 nt, Human
gcuugcuauguugcccaggcugg

SEQ ID NO: 1099151 - RNA, 24 nt, Human
gcuugcuauguugcccaggcugga

SEQ ID NO: 1099152 - RNA, 22 nt, Human
ggaaaccagcaauuuccauggc

SEQ ID NO: 1099153 - RNA, 23 nt, Human
ggacaguuuaacucaugaaaaua

SEQ ID NO: 1099154 - RNA, 21 nt, Human
ggaggaaaaagagagaaagag

SEQ ID NO: 1099155 - RNA, 22 nt, Human
ggagguuguggugagccgagau

SEQ ID NO: 1099156 - RNA, 24 nt, Human
ggagguuguggugagccgagauug

SEQ ID NO: 1099157 - RNA, 21 nt, Human
ggcaaaaauaaaccacacaaa

SEQ ID NO: 1099158 - RNA, 24 nt, Human
gguggcgggcgccuguagucccag

SEQ ID NO: 1099159 - RNA, 22 nt, Human
uaaaaacacaaaaacuuagcca

SEQ ID NO: 1099160 - RNA, 21 nt, Human
uaaaagaagguuuugcaacua

SEQ ID NO: 1099161 - RNA, 21 nt, Human
uaaauagauauccccuuaaga

SEQ ID NO: 1099162 - RNA, 25 nt, Human
uaacaaaauaugaacaaagagccaa

SEQ ID NO: 1099163 - RNA, 22 nt, Human
uaacacggugaaaccccgucuc

SEQ ID NO: 1099164 - RNA, 24 nt, Human
uaacacggugaaaccccgucucua

SEQ ID NO: 1099165 - RNA, 22 nt, Human
uaagaaaggcaggagucaaaau

SEQ ID NO: 1099166 - RNA, 19 nt, Human
uaagaucaauuacaaacca

SEQ ID NO: 1099167 - RNA, 23 nt, Human
uacaaaacaaaaaagguauauaa

SEQ ID NO: 1099168 - RNA, 27 nt, Human
uacaaaacaaaaaagguauauaaucac

SEQ ID NO: 1099169 - RNA, 18 nt, Human
uacuguguaaaguagaau

SEQ ID NO: 1099170 - RNA, 19 nt, Human
uagaaaacucaagagaauc

SEQ ID NO: 1099171 - RNA, 22 nt, Human
uagaacacaccaguaacaaaaa

SEQ ID NO: 1099172 - RNA, 22 nt, Human
uagagaagaacuuacagcugca

SEQ ID NO: 1099173 - RNA, 23 nt, Human
uagcauuauuucaaaaggguaac

SEQ ID NO: 1099174 - RNA, 24 nt, Human
uaggaggccgaggcaggcauauca

SEQ ID NO: 1099175 - RNA, 24 nt, Human
uaggucacaaaaucuaccuaaaau

SEQ ID NO: 1099176 - RNA, 18 nt, Human
uauguugcccaggcugga

SEQ ID NO: 1099177 - RNA, 22 nt, Human
uauguugcccaggcuggagugc

SEQ ID NO: 1099178 - RNA, 23 nt, Human
uauguugcccaggcuggagugca

SEQ ID NO: 1099179 - RNA, 19 nt, Human
ucaaaaaaaaaaaaaaaga

SEQ ID NO: 1099180 - RNA, 24 nt, Human
ucacaaaaucuaccuaaaaugcaa

SEQ ID NO: 1099181 - RNA, 18 nt, Human
ucacgaggucaggagauc

SEQ ID NO: 1099182 - RNA, 24 nt, Human
ucacgaggucaggagauccagacc

SEQ ID NO: 1099183 - RNA, 23 nt, Human
ucacgccuguaaucccagcacuu

SEQ ID NO: 1099184 - RNA, 19 nt, Human
ucagcaauaauuagugaga

SEQ ID NO: 1099185 - RNA, 20 nt, Human
ucaggcaaaaauaaaccaca

SEQ ID NO: 1099186 - RNA, 23 nt, Human
ucagugauacaaaacaaaaaagg

SEQ ID NO: 1099187 - RNA, 23 nt, Human
uccagccugggcaacagagugag

SEQ ID NO: 1099188 - RNA, 24 nt, Human
uccagccugggcaacagagugaga

SEQ ID NO: 1099189 - RNA, 23 nt, Human
uccaucucaaaaaaaaaaaaaaa

SEQ ID NO: 1099190 - RNA, 19 nt, Human
uccauggccaacagcaggg

SEQ ID NO: 1099191 - RNA, 22 nt, Human
uccccuuaagaaaggcaggagu

SEQ ID NO: 1099192 - RNA, 24 nt, Human
ucucaaaaaaaaaaaaaaagaaag

SEQ ID NO: 1099193 - RNA, 21 nt, Human
ucucuacuaaaaacacaaaaa

SEQ ID NO: 1099194 - RNA, 22 nt, Human
ugaacccaggaggcggagguug

SEQ ID NO: 1099195 - RNA, 22 nt, Human
ugagccgagauugcgccacugc

SEQ ID NO: 1099196 - RNA, 23 nt, Human
ugaggcaggagaauggcaugaac

SEQ ID NO: 1099197 - RNA, 24 nt, Human
ugaggcaggagaauggcaugaacc

SEQ ID NO: 1099198 - RNA, 25 nt, Human
ugaggcaggagaauggcaugaaccc

SEQ ID NO: 1099199 - RNA, 28 nt, Human
ugauauauuaauuauacauugugaagau

SEQ ID NO: 1099200 - RNA, 21 nt, Human
ugcaauagugaaaaagacuac

SEQ ID NO: 1099201 - RNA, 27 nt, Human
ugcagcaauaaaagaagguuuugcaac

SEQ ID NO: 1099202 - RNA, 22 nt, Human
ugcaguuaaacaagaaaaagaa

SEQ ID NO: 1099203 - RNA, 23 nt, Human
ugccaugcauacacacacaaaaa

SEQ ID NO: 1099204 - RNA, 18 nt, Human
ugcccaggcuggagugca

SEQ ID NO: 1099205 - RNA, 22 nt, Human
ugcccaggcuggagugcagugg

SEQ ID NO: 1099206 - RNA, 24 nt, Human
ugcuauguugcccaggcuggagug

SEQ ID NO: 1099207 - RNA, 25 nt, Human
ugcuauguugcccaggcuggagugc

SEQ ID NO: 1099208 - RNA, 21 nt, Human
uggaaacuaguaagaaucuuc

SEQ ID NO: 1099209 - RNA, 22 nt, Human
uggaagaaaauggaaacuagua

SEQ ID NO: 1099210 - RNA, 23 nt, Human
uggagugcaguggcuauucacag

SEQ ID NO: 1099211 - RNA, 18 nt, Human
ugggaggcugaggcagga

SEQ ID NO: 1099212 - RNA, 24 nt, Human
ugggaggcugaggcaggagaaugg

SEQ ID NO: 1099213 - RNA, 31 nt, Human
ugggcaaaagcauaauucaaaacaaccaccc

SEQ ID NO: 1099214 - RNA, 24 nt, Human
ugguggcgggcgccuguaguccca

SEQ ID NO: 1099215 - RNA, 24 nt, Human
ugguucacgccuguaaucccagca

SEQ ID NO: 1099216 - RNA, 18 nt, Human
uguauuuauuauuugaaa

SEQ ID NO: 1099217 - RNA, 23 nt, Human
ugugguggcgggcgccuguaguc

SEQ ID NO: 1099218 - RNA, 25 nt, Human
uguuguguauuuauuauuugaaaga

SEQ ID NO: 1099219 - RNA, 19 nt, Human
uuaauuguuuugaccuagg

SEQ ID NO: 1099220 - RNA, 21 nt, Human
uuacaaaccaacagucaccau

SEQ ID NO: 1099221 - RNA, 19 nt, Human
uucagucagaaauaagaga

SEQ ID NO: 1099222 - RNA, 23 nt, Human
uugcgccacugcacuccagccug

SEQ ID NO: 1099223 - RNA, 24 nt, Human
uugcuauguugcccaggcuggagu

SEQ ID NO: 1099224 - RNA, 28 nt, Human
uuguacauaugccaugcauacacacagu

SEQ ID NO: 1099225 - RNA, 18 nt, Human
uuguggugagccgagauu

SEQ ID NO: 1099226 - RNA, 22 nt, Human
uuguggugagccgagauugcgc

SEQ ID NO: 1099227 - RNA, 21 nt, Human
uuuaaucaagagaacaaaaau

SEQ ID NO: 1099228 - RNA, 23 nt, Human
uuuuaggugugaaaaaaauuuug

SEQ ID NO: 1099229 - RNA, 20 nt, Human
gaccgagacccccgccucgg

SEQ ID NO: 1099230 - RNA, 20 nt, Human
gagaacacggcgcggggcgg

SEQ ID NO: 1099231 - RNA, 18 nt, Human
gccucgguuucggugccu

SEQ ID NO: 1099232 - RNA, 23 nt, Human
gcgcggagggaccgagacccccg

SEQ ID NO: 1099233 - RNA, 19 nt, Human
ggagaacacggcgcggggc

SEQ ID NO: 1099234 - RNA, 22 nt, Human
ggcgcggggcggugaguccugc

SEQ ID NO: 1099235 - RNA, 29 nt, Human
uccgccuuccuccuugcgcggagggaccg

SEQ ID NO: 1099236 - RNA, 27 nt, Human
agaaaaagagaaaaauugacucaagaa

SEQ ID NO: 1099237 - RNA, 21 nt, Human
aguguuggaguuaucuaaacu

SEQ ID NO: 1099238 - RNA, 22 nt, Human
gaaaaagagaaaaauugacuca

SEQ ID NO: 1099239 - RNA, 21 nt, Human
gacugcgugcaacgccaaggc

SEQ ID NO: 1099240 - RNA, 21 nt, Human
ucuauaaagaaaaagagaaaa

SEQ ID NO: 1099241 - RNA, 20 nt, Human
ugacucaagaacaaaaacag

SEQ ID NO: 1099242 - RNA, 23 nt, Human
ugcacaaauuauucuugaacaua

SEQ ID NO: 1099243 - RNA, 21 nt, Human
uuuuuuuuuuuuuuuugccaa

SEQ ID NO: 1099244 - RNA, 25 nt, Human
aacaaugagagucgacguaaagaaa

SEQ ID NO: 1099245 - RNA, 18 nt, Human
aggagggagaugcauaug

SEQ ID NO: 1099246 - RNA, 19 nt, Human
cacguacauuacagugugc

SEQ ID NO: 1099247 - RNA, 24 nt, Human
cagcuucugggcuccccaaguccu

SEQ ID NO: 1099248 - RNA, 22 nt, Human
caggagggagaugcauauggua

SEQ ID NO: 1099249 - RNA, 19 nt, Human
ccccacgguccugagcgag

SEQ ID NO: 1099250 - RNA, 21 nt, Human
ccugagcgagguccccagucc

SEQ ID NO: 1099251 - RNA, 23 nt, Human
cuucugggcuccccaaguccuuc

SEQ ID NO: 1099252 - RNA, 22 nt, Human
cuuuccgccuucuguuucugac

SEQ ID NO: 1099253 - RNA, 20 nt, Human
gagaagcagaugucuugggg

SEQ ID NO: 1099254 - RNA, 19 nt, Human
gaggaggaugugguugucu

SEQ ID NO: 1099255 - RNA, 22 nt, Human
gcagcaagggaaugaugacaug

SEQ ID NO: 1099256 - RNA, 18 nt, Human
gcuucugggcuccccaag

SEQ ID NO: 1099257 - RNA, 19 nt, Human
gguucgguggcagcuucug

SEQ ID NO: 1099258 - RNA, 24 nt, Human
guccugagcgagguccccaguccc

SEQ ID NO: 1099259 - RNA, 27 nt, Human
uaaaacaaugagagucgaccgguaccc

SEQ ID NO: 1099260 - RNA, 21 nt, Human
uacauuacagugugcagcaag

SEQ ID NO: 1099261 - RNA, 19 nt, Human
uaggaggaggaggaugugg

SEQ ID NO: 1099262 - RNA, 22 nt, Human
uauucaaguaaaacaaugagag

SEQ ID NO: 1099263 - RNA, 18 nt, Human
ucgguggcagcuucuggg

SEQ ID NO: 1099264 - RNA, 18 nt, Human
ugacaagugaugcggguu

SEQ ID NO: 1099265 - RNA, 21 nt, Human
ugggcuccccaaguccuucag

SEQ ID NO: 1099266 - RNA, 18 nt, Human
ugguucgguggcagcuuc

SEQ ID NO: 1099267 - RNA, 22 nt, Human
uguaggaggaggaggauguggu

SEQ ID NO: 1099268 - RNA, 19 nt, Human
ugucuugggggagccucca

SEQ ID NO: 1099269 - RNA, 21 nt, Human
uucaaguaaaacaaugagagu

SEQ ID NO: 1099270 - RNA, 21 nt, Human
aggcagggagaaagcagagga

SEQ ID NO: 1099271 - RNA, 23 nt, Human
aucaaggcagggagaaagcagag

SEQ ID NO: 1099272 - RNA, 24 nt, Human
aucaaggcagggagaaagcagagg

SEQ ID NO: 1099273 - RNA, 21 nt, Human
caaggcagggagaaagcagag

SEQ ID NO: 1099274 - RNA, 24 nt, Human
caagggcugggggaggaugaggag

SEQ ID NO: 1099275 - RNA, 22 nt, Human
caaugaugaggaccaaccuauu

SEQ ID NO: 1099276 - RNA, 19 nt, Human
ccaaccuauucaagggcug

SEQ ID NO: 1099277 - RNA, 18 nt, Human
cuuggugccaggaguuca

SEQ ID NO: 1099278 - RNA, 19 nt, Human
ggaggaugaggagaugggg

SEQ ID NO: 1099279 - RNA, 20 nt, Human
gggcugggggaggaugagga

SEQ ID NO: 1099280 - RNA, 22 nt, Human
ggugccaggaguucagaaaaga

SEQ ID NO: 1099281 - RNA, 19 nt, Human
uauuccacaucacucaagc

SEQ ID NO: 1099282 - RNA, 22 nt, Human
ucagaugaauggacagaacuug

SEQ ID NO: 1099283 - RNA, 21 nt, Human
ugcaaaauccucccuuucuca

SEQ ID NO: 1099284 - RNA, 23 nt, Human
ugggggaggaugaggagaugggg

SEQ ID NO: 1099285 - RNA, 23 nt, Human
ugggggaggaugaggagaugggg

SEQ ID NO: 1099286 - RNA, 23 nt, Human
aagaggcagguuugucagaggga

SEQ ID NO: 1099287 - RNA, 22 nt, Human
agagggaugagggaacccugag

SEQ ID NO: 1099288 - RNA, 20 nt, Human
aggcagguuugucagaggga

SEQ ID NO: 1099289 - RNA, 22 nt, Human
gaggugaaggugaggcugugug

SEQ ID NO: 1099290 - RNA, 19 nt, Human
gcgugggggcggggagccc

SEQ ID NO: 1099291 - RNA, 20 nt, Human
gggccagagcggaucugaaa

SEQ ID NO: 1099292 - RNA, 25 nt, Human
uaggcgaugccucugcccccugaag

SEQ ID NO: 1099293 - RNA, 20 nt, Human
ucccaaggcugugcccugcu

SEQ ID NO: 1099294 - RNA, 18 nt, Human
ucucuaggcgaugccucu

SEQ ID NO: 1099295 - RNA, 19 nt, Human
ugaaauacccaagagguga

SEQ ID NO: 1099296 - RNA, 22 nt, Human
ugaaauacccaagaggugaagg

SEQ ID NO: 1099297 - RNA, 21 nt, Human
ugagcggacagagucaggugu

SEQ ID NO: 1099298 - RNA, 21 nt, Human
uggugcugcgugggggcgggg

SEQ ID NO: 1099299 - RNA, 26 nt, Human
uuuuuuggcacuuugaucagagguuu

SEQ ID NO: 1099300 - RNA, 26 nt, Human
aaaaaagaaaaaaaguuuuaacccag

SEQ ID NO: 1099301 - RNA, 24 nt, Human
aacccaacauuccccagucugaca

SEQ ID NO: 1099302 - RNA, 21 nt, Human
aaccuucuccccucacugauc

SEQ ID NO: 1099303 - RNA, 23 nt, Human
aaguuuuaacccagggggugauc

SEQ ID NO: 1099304 - RNA, 22 nt, Human
agaaggccuggccucacaaaga

SEQ ID NO: 1099305 - RNA, 23 nt, Human
aggaagagugaggggcaccuggc

SEQ ID NO: 1099306 - RNA, 20 nt, Human
caggaagagugaggggcacc

SEQ ID NO: 1099307 - RNA, 23 nt, Human
cagucagaaggccuggccucaca

SEQ ID NO: 1099308 - RNA, 18 nt, Human
cagucugacagaucagau

SEQ ID NO: 1099309 - RNA, 22 nt, Human
caucaugaaaaagaagcuaucc

SEQ ID NO: 1099310 - RNA, 22 nt, Human
ccacacucuguccaaaaaaaaa

SEQ ID NO: 1099311 - RNA, 33 nt, Human
ccacacucuguccaaaaaaaaaaaagaaaaaaa

SEQ ID NO: 1099312 - RNA, 20 nt, Human
cccagaacccaacauucccc

SEQ ID NO: 1099313 - RNA, 18 nt, Human
ccccagaacccaacauuc

SEQ ID NO: 1099314 - RNA, 20 nt, Human
cccuggaagccggagagcuc

SEQ ID NO: 1099315 - RNA, 20 nt, Human
cucccuuuccacacucuguc

SEQ ID NO: 1099316 - RNA, 18 nt, Human
cucuguccaaaaaaaaaa

SEQ ID NO: 1099317 - RNA, 20 nt, Human
cucuguccaaaaaaaaaaaa

SEQ ID NO: 1099318 - RNA, 18 nt, Human
cugcccacgaccagaccc

SEQ ID NO: 1099319 - RNA, 22 nt, Human
cuguccaaaaaaaaaaaagaaa

SEQ ID NO: 1099320 - RNA, 18 nt, Human
cuuuggggucaggaagag

SEQ ID NO: 1099321 - RNA, 22 nt, Human
gaccccagaacccaacauuccc

SEQ ID NO: 1099322 - RNA, 19 nt, Human
gcccugugccgguggugcu

SEQ ID NO: 1099323 - RNA, 22 nt, Human
gcguggcugcaggggccucagg

SEQ ID NO: 1099324 - RNA, 23 nt, Human
ggaucgggaggugcguggcugca

SEQ ID NO: 1099325 - RNA, 23 nt, Human
ggcggggaggucucccuggaagc

SEQ ID NO: 1099326 - RNA, 19 nt, Human
ggcuuuggggucaggaaga

SEQ ID NO: 1099327 - RNA, 20 nt, Human
gggaggucucccuggaagcc

SEQ ID NO: 1099328 - RNA, 21 nt, Human
uauccuuuggggggcucccuu

SEQ ID NO: 1099329 - RNA, 23 nt, Human
uccaaaaaaaaaaaagaaaaaaa

SEQ ID NO: 1099330 - RNA, 18 nt, Human
uccacacucuguccaaaa

SEQ ID NO: 1099331 - RNA, 21 nt, Human
ucccccggaccccuugaucgu

SEQ ID NO: 1099332 - RNA, 26 nt, Human
ucccuggaagccggagagcucaaccu

SEQ ID NO: 1099333 - RNA, 24 nt, Human
uccuugggccacccgcaucucugc

SEQ ID NO: 1099334 - RNA, 18 nt, Human
ucucugggggcugcuggg

SEQ ID NO: 1099335 - RNA, 24 nt, Human
ucuguccaaaaaaaaaaaagaaaa

SEQ ID NO: 1099336 - RNA, 23 nt, Human
ugaucgugguccuugggccaccc

SEQ ID NO: 1099337 - RNA, 21 nt, Human
ugcccacgaccagaccccaga

SEQ ID NO: 1099338 - RNA, 24 nt, Human
ugcccacgaccagaccccagaacc

SEQ ID NO: 1099339 - RNA, 20 nt, Human
ugcccugugccgguggugcu

SEQ ID NO: 1099340 - RNA, 21 nt, Human
ugcccugugccgguggugcug

SEQ ID NO: 1099341 - RNA, 23 nt, Human
ugcugggcggggaggucucccug

SEQ ID NO: 1099342 - RNA, 18 nt, Human
uggcagggacggaccauc

SEQ ID NO: 1099343 - RNA, 18 nt, Human
uggccucacaaagaagcu

SEQ ID NO: 1099344 - RNA, 21 nt, Human
uggcugcaggggccucaggcc

SEQ ID NO: 1099345 - RNA, 21 nt, Human
uggggggcucccuuuccacac

SEQ ID NO: 1099346 - RNA, 22 nt, Human
caggcccucuuuguuacccucc

SEQ ID NO: 1099347 - RNA, 23 nt, Human
aaacauacacccacgcauaccca

SEQ ID NO: 1099348 - RNA, 27 nt, Human
aaaccccacagugcauuuccaguaggc

SEQ ID NO: 1099349 - RNA, 19 nt, Human
aaacugaauuaugacagua

SEQ ID NO: 1099350 - RNA, 24 nt, Human
aaagacaugcauucuguggagaag

SEQ ID NO: 1099351 - RNA, 21 nt, Human
aaagagaucgcugaugccuuc

SEQ ID NO: 1099352 - RNA, 25 nt, Human
aaagcucccucucccucccccaccc

SEQ ID NO: 1099353 - RNA, 25 nt, Human
aaagugcuggugucaccugucuuga

SEQ ID NO: 1099354 - RNA, 21 nt, Human
aaaucagcuuugugcagcugg

SEQ ID NO: 1099355 - RNA, 19 nt, Human
aacacauuggggacagggg

SEQ ID NO: 1099356 - RNA, 20 nt, Human
aaccccacagugcauuucca

SEQ ID NO: 1099357 - RNA, 21 nt, Human
aagaaaguaggaagggacaac

SEQ ID NO: 1099358 - RNA, 23 nt, Human
aagaaauucauuucauacuuuug

SEQ ID NO: 1099359 - RNA, 24 nt, Human
aagcccaguaacuggaaaaaaucu

SEQ ID NO: 1099360 - RNA, 20 nt, Human
aaguaggcauuugcuacaaa

SEQ ID NO: 1099361 - RNA, 26 nt, Human
aauuucaacaaaacacacaacaaucu

SEQ ID NO: 1099362 - RNA, 18 nt, Human
acaaagcuggaagcagag

SEQ ID NO: 1099363 - RNA, 20 nt, Human
acaaagcuggaagcagaggc

SEQ ID NO: 1099364 - RNA, 20 nt, Human
acaaaucaacuagaaacuca

SEQ ID NO: 1099365 - RNA, 20 nt, Human
acauuuuguaccaaguccag

SEQ ID NO: 1099366 - RNA, 24 nt, Human
accacuuugcauauuguggaaauc

SEQ ID NO: 1099367 - RNA, 19 nt, Human
acccacgcauacccacaca

SEQ ID NO: 1099368 - RNA, 18 nt, Human
acuaacccacuuugugug

SEQ ID NO: 1099369 - RNA, 21 nt, Human
acuacacuugaagucuuccac

SEQ ID NO: 1099370 - RNA, 18 nt, Human
acugggacacacaguuca

SEQ ID NO: 1099371 - RNA, 21 nt, Human
agaaacucacaaacacauugg

SEQ ID NO: 1099372 - RNA, 21 nt, Human
agacuuuggagaaaaucagcu

SEQ ID NO: 1099373 - RNA, 20 nt, Human
agcgggagacacccuggaau

SEQ ID NO: 1099374 - RNA, 19 nt, Human
aggaaggaggaaggaaaag

SEQ ID NO: 1099375 - RNA, 21 nt, Human
aggaggagcagcaggggaggc

SEQ ID NO: 1099376 - RNA, 20 nt, Human
aggcucaggaggagcagcag

SEQ ID NO: 1099377 - RNA, 24 nt, Human
aggcucaggaggagcagcagggga

SEQ ID NO: 1099378 - RNA, 18 nt, Human
agggagccugcaacugug

SEQ ID NO: 1099379 - RNA, 20 nt, Human
aucuucuugaccuccuacug

SEQ ID NO: 1099380 - RNA, 21 nt, Human
auuccuaagaagagcugaaga

SEQ ID NO: 1099381 - RNA, 25 nt, Human
caaaaaucgcuucaaaguaaacaau

SEQ ID NO: 1099382 - RNA, 19 nt, Human
caaagcucccucucccucc

SEQ ID NO: 1099383 - RNA, 21 nt, Human
cacaaagcucccucucccucc

SEQ ID NO: 1099384 - RNA, 19 nt, Human
cacacagguuuagaugcuc

SEQ ID NO: 1099385 - RNA, 21 nt, Human
cacagcaagccaauccgggga

SEQ ID NO: 1099386 - RNA, 22 nt, Human
cagcaagccaauccggggagga

SEQ ID NO: 1099387 - RNA, 20 nt, Human
cagcaggggaggcaguaagu

SEQ ID NO: 1099388 - RNA, 19 nt, Human
caggaaaaaccccacagug

SEQ ID NO: 1099389 - RNA, 20 nt, Human
caggaaaaaccccacagugc

SEQ ID NO: 1099390 - RNA, 21 nt, Human
caggaaaauccacaacagcuu

SEQ ID NO: 1099391 - RNA, 22 nt, Human
caggaggagcagcaggggaggc

SEQ ID NO: 1099392 - RNA, 19 nt, Human
cagggauggagguugaaga

SEQ ID NO: 1099393 - RNA, 21 nt, Human
cagguucuucauccagaagcc

SEQ ID NO: 1099394 - RNA, 24 nt, Human
caguaggcacuuuacacaaagcuc

SEQ ID NO: 1099395 - RNA, 24 nt, Human
cauuucauacuuuugcaugacuuc

SEQ ID NO: 1099396 - RNA, 20 nt, Human
ccaaugcuuccucuaggacc

SEQ ID NO: 1099397 - RNA, 21 nt, Human
ccacaaagaacuaaguaggca

SEQ ID NO: 1099398 - RNA, 23 nt, Human
ccacacugacauuuuguaccaag

SEQ ID NO: 1099399 - RNA, 19 nt, Human
ccacugccaccugcccgag

SEQ ID NO: 1099400 - RNA, 22 nt, Human
cccaaugcuuccucuaggacca

SEQ ID NO: 1099401 - RNA, 21 nt, Human
cccacacaaagaauuuaaagu

SEQ ID NO: 1099402 - RNA, 18 nt, Human
cccagcaggccagguggc

SEQ ID NO: 1099403 - RNA, 19 nt, Human
ccccacagugcauuuccag

SEQ ID NO: 1099404 - RNA, 20 nt, Human
cccccucauucccacagucc

SEQ ID NO: 1099405 - RNA, 23 nt, Human
ccccuaagggauauuuucaauuc

SEQ ID NO: 1099406 - RNA, 23 nt, Human
ccgaggcucaggaggagcagcag

SEQ ID NO: 1099407 - RNA, 19 nt, Human
ccuccaacuugggacacca

SEQ ID NO: 1099408 - RNA, 24 nt, Human
ccuccuccccgaggcucaggagga

SEQ ID NO: 1099409 - RNA, 22 nt, Human
ccucuaggaccacacugacauu

SEQ ID NO: 1099410 - RNA, 21 nt, Human
ccugaagaguaaagcgggaga

SEQ ID NO: 1099411 - RNA, 23 nt, Human
cuaaaaaaauaaaaaguucaaaa

SEQ ID NO: 1099412 - RNA, 24 nt, Human
cuaagaagagcugaagaaauucau

SEQ ID NO: 1099413 - RNA, 19 nt, Human
cuaccuggaguaaacuggc

SEQ ID NO: 1099414 - RNA, 25 nt, Human
cucccucccccaccccaaugcuucc

SEQ ID NO: 1099415 - RNA, 20 nt, Human
cucucccucccccaccccaa

SEQ ID NO: 1099416 - RNA, 19 nt, Human
cucuugugguuuuuugcuu

SEQ ID NO: 1099417 - RNA, 20 nt, Human
cucuugugguuuuuugcuug

SEQ ID NO: 1099418 - RNA, 20 nt, Human
cugacacaaaaccuccaacu

SEQ ID NO: 1099419 - RNA, 20 nt, Human
cuguggagaucuucuugacc

SEQ ID NO: 1099420 - RNA, 22 nt, Human
cuuuacacaaagcucccucucc

SEQ ID NO: 1099421 - RNA, 20 nt, Human
gaggagcagcaggggaggca

SEQ ID NO: 1099422 - RNA, 19 nt, Human
gagugguucauggagacag

SEQ ID NO: 1099423 - RNA, 20 nt, Human
gagugguucauggagacagg

SEQ ID NO: 1099424 - RNA, 20 nt, Human
gccacaggaaugcuuaaaug

SEQ ID NO: 1099425 - RNA, 24 nt, Human
gccuuccuccuccccgaggcucag

SEQ ID NO: 1099426 - RNA, 23 nt, Human
gcugaggcucuugugguuuuuug

SEQ ID NO: 1099427 - RNA, 20 nt, Human
gcuggaagcagaggcagcua

SEQ ID NO: 1099428 - RNA, 22 nt, Human
ggaaaauccacaacagcuuaga

SEQ ID NO: 1099429 - RNA, 21 nt, Human
ggaaauaggggaaagcuuggc

SEQ ID NO: 1099430 - RNA, 21 nt, Human
ggaaugggagugguucaugga

SEQ ID NO: 1099431 - RNA, 18 nt, Human
ggacaggggaaugggagu

SEQ ID NO: 1099432 - RNA, 18 nt, Human
ggagaaggcauggcuuga

SEQ ID NO: 1099433 - RNA, 24 nt, Human
ggagcuuuuccaaaucauaggcau

SEQ ID NO: 1099434 - RNA, 20 nt, Human
ggaggaagaaaguaggaagg

SEQ ID NO: 1099435 - RNA, 18 nt, Human
gggauggagguugaagaa

SEQ ID NO: 1099436 - RNA, 21 nt, Human
gggauggagguugaagaagaa

SEQ ID NO: 1099437 - RNA, 22 nt, Human
gugagagacaacugauuguaca

SEQ ID NO: 1099438 - RNA, 19 nt, Human
gugcagcuggcaaagagaa

SEQ ID NO: 1099439 - RNA, 20 nt, Human
gugcuggugucaccugucuu

SEQ ID NO: 1099440 - RNA, 24 nt, Human
uaaagcgggagacacccuggaauu

SEQ ID NO: 1099441 - RNA, 23 nt, Human
uaacuggaaaaaaucuuaggcau

SEQ ID NO: 1099442 - RNA, 19 nt, Human
uaaggagaguucacaugaa

SEQ ID NO: 1099443 - RNA, 18 nt, Human
uacaaagcuggaagcaga

SEQ ID NO: 1099444 - RNA, 18 nt, Human
uacaaagcuggaagcaga

SEQ ID NO: 1099445 - RNA, 19 nt, Human
uacaaagcuggaagcagag

SEQ ID NO: 1099446 - RNA, 23 nt, Human
uacaaagcuggaagcagaggcag

SEQ ID NO: 1099447 - RNA, 22 nt, Human
uacacccacgcauacccacaca

SEQ ID NO: 1099448 - RNA, 21 nt, Human
uagcaaagcagggcuuuccca

SEQ ID NO: 1099449 - RNA, 22 nt, Human
uaggcacuuuacacaaagcucc

SEQ ID NO: 1099450 - RNA, 22 nt, Human
uccacaacagcuuagaguggca

SEQ ID NO: 1099451 - RNA, 18 nt, Human
uccagaagccuguggaga

SEQ ID NO: 1099452 - RNA, 19 nt, Human
uccccgaggcucaggagga

SEQ ID NO: 1099453 - RNA, 22 nt, Human
ucgcugaugccuuccuccuccc

SEQ ID NO: 1099454 - RNA, 19 nt, Human
ucuucccaaacauacaccc

SEQ ID NO: 1099455 - RNA, 22 nt, Human
ucuuuagacuuuggagaaaauc

SEQ ID NO: 1099456 - RNA, 25 nt, Human
ugaagcauaaucaacuacacuugaa

SEQ ID NO: 1099457 - RNA, 21 nt, Human
ugaagucuuccaccaguggga

SEQ ID NO: 1099458 - RNA, 26 nt, Human
ugaagucuuccaccagugggagcuuu

SEQ ID NO: 1099459 - RNA, 24 nt, Human
ugacacaaaaccuccaacuuggga

SEQ ID NO: 1099460 - RNA, 19 nt, Human
ugacauuuuguaccaaguc

SEQ ID NO: 1099461 - RNA, 21 nt, Human
ugaccuccuacugggacacac

SEQ ID NO: 1099462 - RNA, 19 nt, Human
ugagagacaacugauugua

SEQ ID NO: 1099463 - RNA, 24 nt, Human
ugagcucagucuuuagacuuugga

SEQ ID NO: 1099464 - RNA, 18 nt, Human
ugaggggaggaagccagg

SEQ ID NO: 1099465 - RNA, 20 nt, Human
ugaggggaggaagccaggga

SEQ ID NO: 1099466 - RNA, 23 nt, Human
ugaggggaggaagccagggaugg

SEQ ID NO: 1099467 - RNA, 19 nt, Human
ugagugccuacuaugugcc

SEQ ID NO: 1099468 - RNA, 23 nt, Human
ugcaacaaguauauuugaaaaca

SEQ ID NO: 1099469 - RNA, 18 nt, Human
ugcuugugugugugugug

SEQ ID NO: 1099470 - RNA, 21 nt, Human
uggagaaggcauggcuugaaa

SEQ ID NO: 1099471 - RNA, 23 nt, Human
uggccagaccccauucugcagcc

SEQ ID NO: 1099472 - RNA, 24 nt, Human
ugggacaaagcuccuugcagaagc

SEQ ID NO: 1099473 - RNA, 19 nt, Human
ugggacaccauuccugaag

SEQ ID NO: 1099474 - RNA, 23 nt, Human
ugguuuuuugcuugugugugugu

SEQ ID NO: 1099475 - RNA, 21 nt, Human
ugugugugaggggaggaagcc

SEQ ID NO: 1099476 - RNA, 23 nt, Human
uguguguguguguguuuuuuuuu

SEQ ID NO: 1099477 - RNA, 18 nt, Human
uucaugauacucuccugg

SEQ ID NO: 1099478 - RNA, 24 nt, Human
uucccagugggagaugaccacugc

SEQ ID NO: 1099479 - RNA, 18 nt, Human
uucugcagcccaucccuc

SEQ ID NO: 1099480 - RNA, 19 nt, Human
uucuuuaucugacccccuc

SEQ ID NO: 1099481 - RNA, 22 nt, Human
uuggagaaaaucagcuuugugc

SEQ ID NO: 1099482 - RNA, 19 nt, Human
uuggagccuguagcaaagc

SEQ ID NO: 1099483 - RNA, 25 nt, Human
uuggagccuguagcaaagcagggcu

SEQ ID NO: 1099484 - RNA, 20 nt, Human
uuugggaaauaggggaaagc

SEQ ID NO: 1099485 - RNA, 19 nt, Human
uuuguuuugagguuuguuc

SEQ ID NO: 1099486 - RNA, 22 nt, Human
uuuuugcuugugugugugugug

SEQ ID NO: 1099487 - RNA, 19 nt, Human
uuuuuuuuccccuaaggga

SEQ ID NO: 1099488 - RNA, 21 nt, Human
aucccugucccucccaacccc

SEQ ID NO: 1099489 - RNA, 20 nt, Human
auuuaucccugucccuccca

SEQ ID NO: 1099490 - RNA, 19 nt, Human
cccucccaacccccgggcu

SEQ ID NO: 1099491 - RNA, 20 nt, Human
ccucagagcuccagccauug

SEQ ID NO: 1099492 - RNA, 19 nt, Human
ccuccuggcucagggagcc

SEQ ID NO: 1099493 - RNA, 24 nt, Human
ccuccuggcucagggagccugggc

SEQ ID NO: 1099494 - RNA, 25 nt, Human
cucccaacccccgggcucccaaguu

SEQ ID NO: 1099495 - RNA, 18 nt, Human
gccugggccccucagagc

SEQ ID NO: 1099496 - RNA, 20 nt, Human
gccugggccccucagagcuc

SEQ ID NO: 1099497 - RNA, 22 nt, Human
gggagccugggccccucagagc

SEQ ID NO: 1099498 - RNA, 21 nt, Human
ucccaacccccgggcucccaa

SEQ ID NO: 1099499 - RNA, 19 nt, Human
ucccucccaacccccgggc

SEQ ID NO: 1099500 - RNA, 22 nt, Human
ucccucccaacccccgggcucc

SEQ ID NO: 1099501 - RNA, 27 nt, Human
ugccuuuauuuaucccugucccuccca

SEQ ID NO: 1099502 - RNA, 25 nt, Human
ugggauucuucccuggaacucuccu

SEQ ID NO: 1099503 - RNA, 20 nt, Human
ugggccccucagagcuccag

SEQ ID NO: 1099504 - RNA, 19 nt, Human
uuaucccugucccucccaa

SEQ ID NO: 1099505 - RNA, 23 nt, Human
aaacaauaagacaaaauaccaaa

SEQ ID NO: 1099506 - RNA, 26 nt, Human
aaacauaguacacaacaaauuuaugc

SEQ ID NO: 1099507 - RNA, 24 nt, Human
aaauggcauccaggauaaccagaa

SEQ ID NO: 1099508 - RNA, 24 nt, Human
aaccguuccauuugaacucuccug

SEQ ID NO: 1099509 - RNA, 23 nt, Human
aacugguuuaacugcacacucca

SEQ ID NO: 1099510 - RNA, 22 nt, Human
aagaaaggaugaagggauguug

SEQ ID NO: 1099511 - RNA, 21 nt, Human
acagcuuccuuuugugucuca

SEQ ID NO: 1099512 - RNA, 21 nt, Human
accaaacauaguacacaacaa

SEQ ID NO: 1099513 - RNA, 20 nt, Human
accagugacgauauucccua

SEQ ID NO: 1099514 - RNA, 21 nt, Human
acccacugcgagcccuuccaa

SEQ ID NO: 1099515 - RNA, 26 nt, Human
agaaacaauaagacaaaauaccaaac

SEQ ID NO: 1099516 - RNA, 23 nt, Human
agaaaccuagucagaggacaagc

SEQ ID NO: 1099517 - RNA, 24 nt, Human
agagcgcccggcagaacuuccucc

SEQ ID NO: 1099518 - RNA, 21 nt, Human
agucaagaaaaggguggacuu

SEQ ID NO: 1099519 - RNA, 26 nt, Human
auacagcuuccuuuugugucucaaaa

SEQ ID NO: 1099520 - RNA, 23 nt, Human
aucaggaaaugagcuuacauuuc

SEQ ID NO: 1099521 - RNA, 22 nt, Human
auccuucuuagcuuuccucagc

SEQ ID NO: 1099522 - RNA, 22 nt, Human
caaccggauuguagaccugcca

SEQ ID NO: 1099523 - RNA, 18 nt, Human
cacaacuugcuguaucug

SEQ ID NO: 1099524 - RNA, 24 nt, Human
cacccugaaucacccacugcgagc

SEQ ID NO: 1099525 - RNA, 22 nt, Human
caccggagcgcagugucucggg

SEQ ID NO: 1099526 - RNA, 19 nt, Human
caccuaguuucucagcagc

SEQ ID NO: 1099527 - RNA, 18 nt, Human
caccucccccaacagggc

SEQ ID NO: 1099528 - RNA, 23 nt, Human
caccucccccaacagggccuuuc

SEQ ID NO: 1099529 - RNA, 19 nt, Human
cagcagccugaaagauauu

SEQ ID NO: 1099530 - RNA, 21 nt, Human
cagcuacaugaucuaaaaguu

SEQ ID NO: 1099531 - RNA, 20 nt, Human
cagcuccgggcccaccuccc

SEQ ID NO: 1099532 - RNA, 22 nt, Human
cagcuccgggcccaccuccccc

SEQ ID NO: 1099533 - RNA, 19 nt, Human
cagcucuacagagaaauac

SEQ ID NO: 1099534 - RNA, 22 nt, Human
cauaguacacaacaaauuuaug

SEQ ID NO: 1099535 - RNA, 19 nt, Human
caucugaacugccuugauc

SEQ ID NO: 1099536 - RNA, 21 nt, Human
ccagcuccgggcccaccuccc

SEQ ID NO: 1099537 - RNA, 21 nt, Human
ccaggccugcguggauguccu

SEQ ID NO: 1099538 - RNA, 18 nt, Human
ccaugauucacaacuugc

SEQ ID NO: 1099539 - RNA, 19 nt, Human
ccccauccugaacuuggaa

SEQ ID NO: 1099540 - RNA, 20 nt, Human
cccggcagaacuuccucccg

SEQ ID NO: 1099541 - RNA, 24 nt, Human
cccugaaucacccacugcgagccc

SEQ ID NO: 1099542 - RNA, 21 nt, Human
ccggcagaacuuccucccgga

SEQ ID NO: 1099543 - RNA, 22 nt, Human
ccucuccagcaauggguggcuc

SEQ ID NO: 1099544 - RNA, 20 nt, Human
ccugaaucacccacugcgag

SEQ ID NO: 1099545 - RNA, 21 nt, Human
ccugcguggauguccucucca

SEQ ID NO: 1099546 - RNA, 20 nt, Human
ccuggcggcuggcugugaug

SEQ ID NO: 1099547 - RNA, 21 nt, Human
ccuugauccaguuugcccuau

SEQ ID NO: 1099548 - RNA, 24 nt, Human
cgccaaaccucggggcguccgcuc

SEQ ID NO: 1099549 - RNA, 19 nt, Human
cgcgauacuucccuucuug

SEQ ID NO: 1099550 - RNA, 21 nt, Human
cggcccauacagcuuccuuuu

SEQ ID NO: 1099551 - RNA, 22 nt, Human
cuaaagauucucgccauauugg

SEQ ID NO: 1099552 - RNA, 22 nt, Human
cuauaaccagugaggcaccggc

SEQ ID NO: 1099553 - RNA, 22 nt, Human
cuccucgaccgcgcggcuccgg

SEQ ID NO: 1099554 - RNA, 24 nt, Human
cuccucuucagcaucuggucaucc

SEQ ID NO: 1099555 - RNA, 20 nt, Human
cucugugcuggugcuuauuc

SEQ ID NO: 1099556 - RNA, 19 nt, Human
cucuuaucauggucuucuc

SEQ ID NO: 1099557 - RNA, 24 nt, Human
cuggagucagacagaacuuaugug

SEQ ID NO: 1099558 - RNA, 22 nt, Human
cuuaucauggucuucucugugc

SEQ ID NO: 1099559 - RNA, 21 nt, Human
gaacaagguacacaaucuguu

SEQ ID NO: 1099560 - RNA, 25 nt, Human
gaccugccagcuccgggcccaccuc

SEQ ID NO: 1099561 - RNA, 20 nt, Human
gagaaagcugguauguccuu

SEQ ID NO: 1099562 - RNA, 21 nt, Human
gaugaagaaaggaugaaggga

SEQ ID NO: 1099563 - RNA, 19 nt, Human
gcugagugcugaguugcag

SEQ ID NO: 1099564 - RNA, 19 nt, Human
ggacuggggcugggcugcg

SEQ ID NO: 1099565 - RNA, 21 nt, Human
ggaugaagggauguuguuuuc

SEQ ID NO: 1099566 - RNA, 20 nt, Human
ggcguccgcucgccggccuc

SEQ ID NO: 1099567 - RNA, 24 nt, Human
gggaugaagaaaggaugaagggaa

SEQ ID NO: 1099568 - RNA, 22 nt, Human
gguuaugagacaaagggagaaa

SEQ ID NO: 1099569 - RNA, 24 nt, Human
guacacaacaaauuuaugccucag

SEQ ID NO: 1099570 - RNA, 21 nt, Human
gucaagaaaaggguggacuug

SEQ ID NO: 1099571 - RNA, 22 nt, Human
guccucuccagcaauggguggc

SEQ ID NO: 1099572 - RNA, 21 nt, Human
gugaggcaccggcggagagcg

SEQ ID NO: 1099573 - RNA, 19 nt, Human
guuaaaggucccaggagcc

SEQ ID NO: 1099574 - RNA, 21 nt, Human
guuucaccuaguuucucagca

SEQ ID NO: 1099575 - RNA, 26 nt, Human
uaaaaagugcuacaauaacaaaccac

SEQ ID NO: 1099576 - RNA, 25 nt, Human
uaagacaaaauaccaaacauaguag

SEQ ID NO: 1099577 - RNA, 25 nt, Human
uacaauaacaaaccacauuuaagaa

SEQ ID NO: 1099578 - RNA, 23 nt, Human
uacaguuggaacuguucaaguau

SEQ ID NO: 1099579 - RNA, 19 nt, Human
uagaaaccuagucagagga

SEQ ID NO: 1099580 - RNA, 24 nt, Human
uagaucugugaagaugggcagcuu

SEQ ID NO: 1099581 - RNA, 22 nt, Human
uauacagacucauuuucauggu

SEQ ID NO: 1099582 - RNA, 23 nt, Human
uauacuaaguuucucaguuucac

SEQ ID NO: 1099583 - RNA, 24 nt, Human
ucagauacggaggaaauccuuagu

SEQ ID NO: 1099584 - RNA, 24 nt, Human
ucagcucugcucuggcagcucuac

SEQ ID NO: 1099585 - RNA, 23 nt, Human
ucauccuucuuagcuuuccucag

SEQ ID NO: 1099586 - RNA, 19 nt, Human
uccacauagaaauuagaaa

SEQ ID NO: 1099587 - RNA, 21 nt, Human
uccacggcccauacagcuucc

SEQ ID NO: 1099588 - RNA, 20 nt, Human
ucccgcaugcagcugagugc

SEQ ID NO: 1099589 - RNA, 22 nt, Human
uccucagcuccacauugaccuc

SEQ ID NO: 1099590 - RNA, 19 nt, Human
uccucccggacuggggcug

SEQ ID NO: 1099591 - RNA, 18 nt, Human
ucucugaguuugcuacac

SEQ ID NO: 1099592 - RNA, 22 nt, Human
ucuggucauccuucuuagcuuu

SEQ ID NO: 1099593 - RNA, 18 nt, Human
ucuguucaucuguaccag

SEQ ID NO: 1099594 - RNA, 21 nt, Human
ugaaucacccacugcgagccc

SEQ ID NO: 1099595 - RNA, 19 nt, Human
ugagacaaagggagaaagc

SEQ ID NO: 1099596 - RNA, 18 nt, Human
ugaggcaccggcggagag

SEQ ID NO: 1099597 - RNA, 23 nt, Human
ugagucuguucaucuguaccagu

SEQ ID NO: 1099598 - RNA, 18 nt, Human
ugaucuaaaaguuaaagg

SEQ ID NO: 1099599 - RNA, 21 nt, Human
ugcuacaauaacaaaccacau

SEQ ID NO: 1099600 - RNA, 21 nt, Human
ugcucuggcagcucuacagag

SEQ ID NO: 1099601 - RNA, 22 nt, Human
uggacaugguuaugagacaaag

SEQ ID NO: 1099602 - RNA, 19 nt, Human
ugguccuggcggcuggcug

SEQ ID NO: 1099603 - RNA, 20 nt, Human
uguucaaguauaguuucagu

SEQ ID NO: 1099604 - RNA, 19 nt, Human
uguugcaguuuuccugcag

SEQ ID NO: 1099605 - RNA, 22 nt, Human
uuaugagacaaagggagaaagc

SEQ ID NO: 1099606 - RNA, 20 nt, Human
uuaugccacagugaacaagg

SEQ ID NO: 1099607 - RNA, 18 nt, Human
uucccuuguucuuagauc

SEQ ID NO: 1099608 - RNA, 18 nt, Human
uucucaguuucaccuagu

SEQ ID NO: 1099609 - RNA, 23 nt, Human
uuggaacuguucaaguauaguuu

SEQ ID NO: 1099610 - RNA, 20 nt, Human
uuuaugccucagcuacauga

SEQ ID NO: 1099611 - RNA, 19 nt, Human
uuucaugguuuuguagagc

SEQ ID NO: 1099612 - RNA, 19 nt, Human
uuugcccuaugugaugccc

SEQ ID NO: 1099613 - RNA, 21 nt, Human
agccccugugccugcgucucc

SEQ ID NO: 1099614 - RNA, 21 nt, Human
caacuacuccacucaccaccc

SEQ ID NO: 1099615 - RNA, 18 nt, Human
cacucaccacccuucugg

SEQ ID NO: 1099616 - RNA, 23 nt, Human
cagccccugugccugcgucuccu

SEQ ID NO: 1099617 - RNA, 28 nt, Human
caguccuuuaucucccccucugaaaucc

SEQ ID NO: 1099618 - RNA, 23 nt, Human
ccccugugccugcgucuccugcg

SEQ ID NO: 1099619 - RNA, 18 nt, Human
cccuucugggcaguccuu

SEQ ID NO: 1099620 - RNA, 27 nt, Human
ccuccuccucgccugacuacuucugac

SEQ ID NO: 1099621 - RNA, 22 nt, Human
ccucugaaauccgaucgcugag

SEQ ID NO: 1099622 - RNA, 23 nt, Human
ccuucaaauuccccuuuucauca

SEQ ID NO: 1099623 - RNA, 23 nt, Human
cugugccugcgucuccugcggcu

SEQ ID NO: 1099624 - RNA, 19 nt, Human
guccuuuaucucccccucu

SEQ ID NO: 1099625 - RNA, 21 nt, Human
uagggaaagcugcuucucugc

SEQ ID NO: 1099626 - RNA, 23 nt, Human
uccacucaccacccuucugggca

SEQ ID NO: 1099627 - RNA, 19 nt, Human
uccccagccccugugccug

SEQ ID NO: 1099628 - RNA, 22 nt, Human
uggaauggcuccuucaaauucc

SEQ ID NO: 1099629 - RNA, 18 nt, Human
uguccugugcuguguagg

SEQ ID NO: 1099630 - RNA, 20 nt, Human
ugucuucuggaauggcuccu

SEQ ID NO: 1099631 - RNA, 21 nt, Human
ugucuucuggaauggcuccuu

SEQ ID NO: 1099632 - RNA, 20 nt, Human
uucaaauuccccuuuucauc

SEQ ID NO: 1099633 - RNA, 19 nt, Human
aacauggugaaaccccauc

SEQ ID NO: 1099634 - RNA, 20 nt, Human
aacauggugaaaccccaucu

SEQ ID NO: 1099635 - RNA, 20 nt, Human
aacauggugaaaccccaucu

SEQ ID NO: 1099636 - RNA, 21 nt, Human
aacauggugaaaccccaucuc

SEQ ID NO: 1099637 - RNA, 21 nt, Human
aaccuaucagggaugucccag

SEQ ID NO: 1099638 - RNA, 19 nt, Human
aagaagaaaagaguggaag

SEQ ID NO: 1099639 - RNA, 23 nt, Human
aagaagaaaagaguggaaggaag

SEQ ID NO: 1099640 - RNA, 23 nt, Human
aagaaucacuugaacccaggagg

SEQ ID NO: 1099641 - RNA, 18 nt, Human
aagcuggaggggucugag

SEQ ID NO: 1099642 - RNA, 24 nt, Human
aaucacuugaacccaggaggcgga

SEQ ID NO: 1099643 - RNA, 24 nt, Human
accccaucucuacuaaaaguacaa

SEQ ID NO: 1099644 - RNA, 19 nt, Human
acccccgaccccuucucca

SEQ ID NO: 1099645 - RNA, 24 nt, Human
acugagccuugucuggcccugcug

SEQ ID NO: 1099646 - RNA, 20 nt, Human
acugcacuccagccugggca

SEQ ID NO: 1099647 - RNA, 24 nt, Human
acugcacuccagccugggcagcag

SEQ ID NO: 1099648 - RNA, 19 nt, Human
acugcuggccuggccagga

SEQ ID NO: 1099649 - RNA, 24 nt, Human
acuuaggcaggccucaggggaguc

SEQ ID NO: 1099650 - RNA, 22 nt, Human
agaacccauaggcaaguaaccc

SEQ ID NO: 1099651 - RNA, 18 nt, Human
agacaaggaaggagccaa

SEQ ID NO: 1099652 - RNA, 22 nt, Human
agacaagguggggucuggagug

SEQ ID NO: 1099653 - RNA, 24 nt, Human
agacacaguggcucaugccuguaa

SEQ ID NO: 1099654 - RNA, 20 nt, Human
agacgcugggaaccguccgc

SEQ ID NO: 1099655 - RNA, 24 nt, Human
agaggagaaccuggggaggguggg

SEQ ID NO: 1099656 - RNA, 23 nt, Human
agccaggugugguggugcgugcc

SEQ ID NO: 1099657 - RNA, 21 nt, Human
agcccuggaguccgggcagcu

SEQ ID NO: 1099658 - RNA, 22 nt, Human
agccuggccaacauggugaaac

SEQ ID NO: 1099659 - RNA, 24 nt, Human
agccuggccaacauggugaaaccc

SEQ ID NO: 1099660 - RNA, 24 nt, Human
agccugggcagcagcacgagauuc

SEQ ID NO: 1099661 - RNA, 23 nt, Human
aggaaggcaggguccgacacugg

SEQ ID NO: 1099662 - RNA, 24 nt, Human
aggaaguacaacaaaacgaaauaa

SEQ ID NO: 1099663 - RNA, 21 nt, Human
aggcaaguaacccuuuccaga

SEQ ID NO: 1099664 - RNA, 18 nt, Human
aggcagaagaaucacuug

SEQ ID NO: 1099665 - RNA, 23 nt, Human
aggcagaagaaucacuugaaccc

SEQ ID NO: 1099666 - RNA, 24 nt, Human
aggcagaagaaucacuugaaccca

SEQ ID NO: 1099667 - RNA, 21 nt, Human
aggcaggguccgacacugggc

SEQ ID NO: 1099668 - RNA, 22 nt, Human
aggcaggguccgacacugggca

SEQ ID NO: 1099669 - RNA, 23 nt, Human
aggcucauuugaggucaggaguu

SEQ ID NO: 1099670 - RNA, 24 nt, Human
aggcucauuugaggucaggaguuc

SEQ ID NO: 1099671 - RNA, 24 nt, Human
aggcugaggcagaagaaucacuug

SEQ ID NO: 1099672 - RNA, 21 nt, Human
agggagggaagacaagguggg

SEQ ID NO: 1099673 - RNA, 19 nt, Human
aggucaggaguucaagacc

SEQ ID NO: 1099674 - RNA, 19 nt, Human
agguggggucuggaguggg

SEQ ID NO: 1099675 - RNA, 22 nt, Human
aggugguucaaagagaagccag

SEQ ID NO: 1099676 - RNA, 24 nt, Human
aggugugguggugcgugccuguaa

SEQ ID NO: 1099677 - RNA, 22 nt, Human
aguggcucaugccuguaauccc

SEQ ID NO: 1099678 - RNA, 24 nt, Human
aguggcucaugccuguaaucccgg

SEQ ID NO: 1099679 - RNA, 25 nt, Human
auacugaacaacucuuaauuucacu

SEQ ID NO: 1099680 - RNA, 24 nt, Human
aucgugccacugcacuccagccug

SEQ ID NO: 1099681 - RNA, 24 nt, Human
auuugaggucaggaguucaagacc

SEQ ID NO: 1099682 - RNA, 24 nt, Human
caacauggugaaaccccaucucua

SEQ ID NO: 1099683 - RNA, 24 nt, Human
caagaccagccuggccaacauggu

SEQ ID NO: 1099684 - RNA, 19 nt, Human
caagaggagaaccugggga

SEQ ID NO: 1099685 - RNA, 22 nt, Human
caagccccagagaugguuuugg

SEQ ID NO: 1099686 - RNA, 20 nt, Human
caaguaacccuuuccagaca

SEQ ID NO: 1099687 - RNA, 21 nt, Human
caaguuuugcauacugaacaa

SEQ ID NO: 1099688 - RNA, 20 nt, Human
cacagcccaaaugcagacuc

SEQ ID NO: 1099689 - RNA, 24 nt, Human
cacccccgaccccuucuccagggg

SEQ ID NO: 1099690 - RNA, 18 nt, Human
cacuccagccugggcagc

SEQ ID NO: 1099691 - RNA, 18 nt, Human
cacugcacuccagccugg

SEQ ID NO: 1099692 - RNA, 19 nt, Human
cacugcacuccagccuggg

SEQ ID NO: 1099693 - RNA, 23 nt, Human
cacugcacuccagccugggcagc

SEQ ID NO: 1099694 - RNA, 24 nt, Human
cacugcacuccagccugggcagca

SEQ ID NO: 1099695 - RNA, 26 nt, Human
cacugcacuccagccugggcagcagc

SEQ ID NO: 1099696 - RNA, 19 nt, Human
cagaacccauaggcaagua

SEQ ID NO: 1099697 - RNA, 18 nt, Human
cagacucuaagcuggagg

SEQ ID NO: 1099698 - RNA, 21 nt, Human
cagaguccugcaccaagcccc

SEQ ID NO: 1099699 - RNA, 19 nt, Human
cagcagcacgagauucugu

SEQ ID NO: 1099700 - RNA, 24 nt, Human
cagcuacucgggaggcugaggcag

SEQ ID NO: 1099701 - RNA, 18 nt, Human
caugccuguaaucccggc

SEQ ID NO: 1099702 - RNA, 24 nt, Human
caugccuguaaucccggcaauuug

SEQ ID NO: 1099703 - RNA, 23 nt, Human
cauuugaggucaggaguucaaga

SEQ ID NO: 1099704 - RNA, 19 nt, Human
ccaaaugcagacucuaagc

SEQ ID NO: 1099705 - RNA, 19 nt, Human
ccacucucugccgguccug

SEQ ID NO: 1099706 - RNA, 20 nt, Human
ccacugcacuccagccuggg

SEQ ID NO: 1099707 - RNA, 21 nt, Human
ccacugcacuccagccugggc

SEQ ID NO: 1099708 - RNA, 22 nt, Human
ccacugcacuccagccugggca

SEQ ID NO: 1099709 - RNA, 22 nt, Human
ccacugcacuccagccugggca

SEQ ID NO: 1099710 - RNA, 23 nt, Human
ccacugcacuccagccugggcag

SEQ ID NO: 1099711 - RNA, 23 nt, Human
ccacugcacuccagccugggcag

SEQ ID NO: 1099712 - RNA, 24 nt, Human
ccacugcacuccagccugggcagc

SEQ ID NO: 1099713 - RNA, 19 nt, Human
ccccagcaugcuccucuuc

SEQ ID NO: 1099714 - RNA, 22 nt, Human
cccgaccccuucuccagggggc

SEQ ID NO: 1099715 - RNA, 24 nt, Human
ccgguccugggcuuaucccugcaa

SEQ ID NO: 1099716 - RNA, 23 nt, Human
ccuggccaacauggugaaacccc

SEQ ID NO: 1099717 - RNA, 24 nt, Human
ccuggccaacauggugaaacccca

SEQ ID NO: 1099718 - RNA, 21 nt, Human
ccuguaaucccagcuacucgg

SEQ ID NO: 1099719 - RNA, 22 nt, Human
ccuguaaucccagcuacucggg

SEQ ID NO: 1099720 - RNA, 24 nt, Human
cgggaggcugaggcagaagaauca

SEQ ID NO: 1099721 - RNA, 18 nt, Human
cgguccugggcuuauccc

SEQ ID NO: 1099722 - RNA, 25 nt, Human
cucaugccuguaaucccggcaauuu

SEQ ID NO: 1099723 - RNA, 24 nt, Human
cucauuugaggucaggaguucaag

SEQ ID NO: 1099724 - RNA, 24 nt, Human
cucugaggcugagguggaaagcuu

SEQ ID NO: 1099725 - RNA, 23 nt, Human
cuggccaacauggugaaacccca

SEQ ID NO: 1099726 - RNA, 24 nt, Human
gaagagcaaggccaccgcucuggg

SEQ ID NO: 1099727 - RNA, 21 nt, Human
gacaagguggggucuggagug

SEQ ID NO: 1099728 - RNA, 22 nt, Human
gcagaagaaucacuugaaccca

SEQ ID NO: 1099729 - RNA, 24 nt, Human
gcagaucgugccacugcacuccag

SEQ ID NO: 1099730 - RNA, 24 nt, Human
gccaacauggugaaaccccaucuc

SEQ ID NO: 1099731 - RNA, 22 nt, Human
gccacugcacuccagccugggc

SEQ ID NO: 1099732 - RNA, 24 nt, Human
gccacugcacuccagccugggcag

SEQ ID NO: 1099733 - RNA, 20 nt, Human
gcgugccuguaaucccagcu

SEQ ID NO: 1099734 - RNA, 18 nt, Human
gcucauuugaggucagga

SEQ ID NO: 1099735 - RNA, 23 nt, Human
gcucauuugaggucaggaguuca

SEQ ID NO: 1099736 - RNA, 24 nt, Human
gcucauuugaggucaggaguucaa

SEQ ID NO: 1099737 - RNA, 20 nt, Human
gcuccucuucaucaccagcu

SEQ ID NO: 1099738 - RNA, 18 nt, Human
ggagaaccuggggagggu

SEQ ID NO: 1099739 - RNA, 22 nt, Human
ggcaagaaggcauggccaggga

SEQ ID NO: 1099740 - RNA, 24 nt, Human
ggcagcuggacucugaggcugagg

SEQ ID NO: 1099741 - RNA, 21 nt, Human
ggccagacacaguggcucaug

SEQ ID NO: 1099742 - RNA, 23 nt, Human
ggcucauuugaggucaggaguuc

SEQ ID NO: 1099743 - RNA, 19 nt, Human
gggcagcuggacucugagg

SEQ ID NO: 1099744 - RNA, 24 nt, Human
gggccagacacaguggcucaugcc

SEQ ID NO: 1099745 - RNA, 23 nt, Human
ggggaggguggggagagcccugg

SEQ ID NO: 1099746 - RNA, 25 nt, Human
ggggaggguggggagagcccuggag

SEQ ID NO: 1099747 - RNA, 21 nt, Human
ggggucuggagugggaggaag

SEQ ID NO: 1099748 - RNA, 19 nt, Human
gguggggcccaggaaucac

SEQ ID NO: 1099749 - RNA, 24 nt, Human
gguggugcgugccuguaaucccag

SEQ ID NO: 1099750 - RNA, 20 nt, Human
guaguugugcuacuuuacca

SEQ ID NO: 1099751 - RNA, 18 nt, Human
guccugcaccaagcccca

SEQ ID NO: 1099752 - RNA, 24 nt, Human
gugaagaagaaaagaguggaaggg

SEQ ID NO: 1099753 - RNA, 19 nt, Human
guggggagagcccuggagu

SEQ ID NO: 1099754 - RNA, 18 nt, Human
gugggucuugguggggcc

SEQ ID NO: 1099755 - RNA, 24 nt, Human
guggugcgugccuguaaucccagc

SEQ ID NO: 1099756 - RNA, 23 nt, Human
ucacaggcuuccugaagggcugg

SEQ ID NO: 1099757 - RNA, 22 nt, Human
ucaugccuguaaucccggcaau

SEQ ID NO: 1099758 - RNA, 21 nt, Human
ucauuugaggucaggaguuca

SEQ ID NO: 1099759 - RNA, 21 nt, Human
uccagggcugacaaacgcuuc

SEQ ID NO: 1099760 - RNA, 21 nt, Human
uccccagcuggaucuuggugu

SEQ ID NO: 1099761 - RNA, 23 nt, Human
ucccugcaaugugcaccugaccu

SEQ ID NO: 1099762 - RNA, 22 nt, Human
uccgggcagcuggacucugagg

SEQ ID NO: 1099763 - RNA, 23 nt, Human
uccucuucaucaccagcugaugc

SEQ ID NO: 1099764 - RNA, 23 nt, Human
uccugaagggcugggaugcaggu

SEQ ID NO: 1099765 - RNA, 25 nt, Human
ucgggaggcugaggcagaagaauca

SEQ ID NO: 1099766 - RNA, 23 nt, Human
ucgugccacugcacuccagccug

SEQ ID NO: 1099767 - RNA, 23 nt, Human
ucuagccaccagaacccauaggc

SEQ ID NO: 1099768 - RNA, 22 nt, Human
ucuccagccggaagagcaaggc

SEQ ID NO: 1099769 - RNA, 23 nt, Human
ucucuacuaaaaguacaaaaauu

SEQ ID NO: 1099770 - RNA, 19 nt, Human
ucucuggugagacuauggg

SEQ ID NO: 1099771 - RNA, 22 nt, Human
ucugaggacgccagggagggaa

SEQ ID NO: 1099772 - RNA, 18 nt, Human
ucugaggcugagguggaa

SEQ ID NO: 1099773 - RNA, 19 nt, Human
ugaaaccccaucucuacua

SEQ ID NO: 1099774 - RNA, 18 nt, Human
ugaagaagaaaagagugg

SEQ ID NO: 1099775 - RNA, 23 nt, Human
ugacauuuuuuucuuccuuuucu

SEQ ID NO: 1099776 - RNA, 22 nt, Human
ugagacuaugggugacauuuuu

SEQ ID NO: 1099777 - RNA, 20 nt, Human
ugaggcagaagaaucacuug

SEQ ID NO: 1099778 - RNA, 24 nt, Human
ugaggcagaagaaucacuugaacc

SEQ ID NO: 1099779 - RNA, 25 nt, Human
ugaggcagaagaaucacuugaaccc

SEQ ID NO: 1099780 - RNA, 24 nt, Human
ugcaccaagccccagagaugguuu

SEQ ID NO: 1099781 - RNA, 23 nt, Human
ugcaggagaccgugggacuaagu

SEQ ID NO: 1099782 - RNA, 24 nt, Human
ugccacugcacuccagccugggca

SEQ ID NO: 1099783 - RNA, 23 nt, Human
ugccuguaaucccagcuacucgg

SEQ ID NO: 1099784 - RNA, 24 nt, Human
ugccuguaaucccagcuacucggg

SEQ ID NO: 1099785 - RNA, 24 nt, Human
ugccuguaaucccggcaauuuggg

SEQ ID NO: 1099786 - RNA, 21 nt, Human
uggacucugaggcugaggugg

SEQ ID NO: 1099787 - RNA, 18 nt, Human
uggagugggaggaaggca

SEQ ID NO: 1099788 - RNA, 20 nt, Human
uggagugggaggaaggcagg

SEQ ID NO: 1099789 - RNA, 24 nt, Human
uggccaacauggugaaaccccauc

SEQ ID NO: 1099790 - RNA, 24 nt, Human
uggccagggagggcaaauggaaaa

SEQ ID NO: 1099791 - RNA, 24 nt, Human
uggcucaugccuguaaucccggca

SEQ ID NO: 1099792 - RNA, 18 nt, Human
ugggcaugaggcccagga

SEQ ID NO: 1099793 - RNA, 21 nt, Human
uggugcgugccuguaauccca

SEQ ID NO: 1099794 - RNA, 22 nt, Human
uggugcgugccuguaaucccag

SEQ ID NO: 1099795 - RNA, 24 nt, Human
ugguggugcgugccuguaauccca

SEQ ID NO: 1099796 - RNA, 20 nt, Human
uuagccaggugugguggugc

SEQ ID NO: 1099797 - RNA, 21 nt, Human
uucaucauuuuuccaaaggca

SEQ ID NO: 1099798 - RNA, 19 nt, Human
uuccagacaaggaaggagc

SEQ ID NO: 1099799 - RNA, 23 nt, Human
uuccugaagggcugggaugcagg

SEQ ID NO: 1099800 - RNA, 22 nt, Human
uuccuuuucuuuuucuccucca

SEQ ID NO: 1099801 - RNA, 19 nt, Human
uucuuccuuuucuuuuucu

SEQ ID NO: 1099802 - RNA, 25 nt, Human
uuggugggucuugguggggcccagg

SEQ ID NO: 1099803 - RNA, 19 nt, Human
uugucuggcccugcugagg

SEQ ID NO: 1099804 - RNA, 19 nt, Human
uuucuuuuucuccuccauc

SEQ ID NO: 1099805 - RNA, 26 nt, Human
uuuucacaggcuuccugaagggcugg

SEQ ID NO: 1099806 - RNA, 20 nt, Human
uuuucuccuccaucuuucca

SEQ ID NO: 1099807 - RNA, 21 nt, Human
uuuuuuuuuuuuuugcagcug

SEQ ID NO: 1099808 - RNA, 20 nt, Human
uuuuuuuuuuuuuuuugcag

SEQ ID NO: 1099809 - RNA, 20 nt, Human
aaaaaaaaaaaaaaaagcaa

SEQ ID NO: 1099810 - RNA, 21 nt, Human
aaaaaagccauccuggccagg

SEQ ID NO: 1099811 - RNA, 23 nt, Human
aacccuugcuucuucaucaccuc

SEQ ID NO: 1099812 - RNA, 21 nt, Human
aaccuuagacagccucagcua

SEQ ID NO: 1099813 - RNA, 24 nt, Human
aacggcucacagcuauaaucccag

SEQ ID NO: 1099814 - RNA, 19 nt, Human
aagagguaccacuaucauc

SEQ ID NO: 1099815 - RNA, 19 nt, Human
aagaguaauuccugccucc

SEQ ID NO: 1099816 - RNA, 21 nt, Human
aagccaggcuggaaccacgug

SEQ ID NO: 1099817 - RNA, 23 nt, Human
aaguagcaaagaggcauuuguaa

SEQ ID NO: 1099818 - RNA, 22 nt, Human
aaguagcugggauuacaggcac

SEQ ID NO: 1099819 - RNA, 25 nt, Human
aaguagcugggauuacaggcaccua

SEQ ID NO: 1099820 - RNA, 21 nt, Human
aauaaaaaaaaaaaauagcag

SEQ ID NO: 1099821 - RNA, 21 nt, Human
acacuuuuggucccagcuccu

SEQ ID NO: 1099822 - RNA, 21 nt, Human
acaggcaccuaccaccaugcc

SEQ ID NO: 1099823 - RNA, 24 nt, Human
acuccagccugggugacagaguga

SEQ ID NO: 1099824 - RNA, 24 nt, Human
acucugugaccucagguguuccug

SEQ ID NO: 1099825 - RNA, 24 nt, Human
acugcacuccagccugggugacag

SEQ ID NO: 1099826 - RNA, 26 nt, Human
acugcacuccagccugggugacagag

SEQ ID NO: 1099827 - RNA, 20 nt, Human
agacauuggccuaagagcug

SEQ ID NO: 1099828 - RNA, 28 nt, Human
agaugaucugugaguaagguucugaagc

SEQ ID NO: 1099829 - RNA, 20 nt, Human
agcacuuuaggaggcugagg

SEQ ID NO: 1099830 - RNA, 21 nt, Human
agccugggugacagagugaga

SEQ ID NO: 1099831 - RNA, 23 nt, Human
agcuuugaccucuuuguagaacc

SEQ ID NO: 1099832 - RNA, 21 nt, Human
aggcauuuguaagaugaucug

SEQ ID NO: 1099833 - RNA, 23 nt, Human
aggcugagguguguagaugcuug

SEQ ID NO: 1099834 - RNA, 22 nt, Human
agggcgugguguugggcagggg

SEQ ID NO: 1099835 - RNA, 24 nt, Human
agugcaauggugccaucucggcuc

SEQ ID NO: 1099836 - RNA, 24 nt, Human
aucaugccacugcacuccagccug

SEQ ID NO: 1099837 - RNA, 22 nt, Human
augccacugcacuccagccugg

SEQ ID NO: 1099838 - RNA, 19 nt, Human
augggguuucaucacguug

SEQ ID NO: 1099839 - RNA, 21 nt, Human
caagcaauucuccugccucag

SEQ ID NO: 1099840 - RNA, 28 nt, Human
caagcaauucuccugccucagucuccca

SEQ ID NO: 1099841 - RNA, 25 nt, Human
caccuugugccagagggcguggugu

SEQ ID NO: 1099842 - RNA, 24 nt, Human
cacguuggccaggcuguucucaaa

SEQ ID NO: 1099843 - RNA, 22 nt, Human
cacuccagccugggugacagag

SEQ ID NO: 1099844 - RNA, 24 nt, Human
cacuccagccugggugacagagug

SEQ ID NO: 1099845 - RNA, 21 nt, Human
cacugcaacaucugccuccca

SEQ ID NO: 1099846 - RNA, 19 nt, Human
cacugcacuccagccuggg

SEQ ID NO: 1099847 - RNA, 19 nt, Human
cacugcacuccagccuggg

SEQ ID NO: 1099848 - RNA, 19 nt, Human
cacugcacuccagccuggg

SEQ ID NO: 1099849 - RNA, 22 nt, Human
cacugcacuccagccuggguga

SEQ ID NO: 1099850 - RNA, 24 nt, Human
cacugcacuccagccugggugaca

SEQ ID NO: 1099851 - RNA, 25 nt, Human
cacugcacuccagccugggugacag

SEQ ID NO: 1099852 - RNA, 24 nt, Human
cacuuuuggucccagcuccuuggg

SEQ ID NO: 1099853 - RNA, 26 nt, Human
cacuuuuggucccagcuccuugggaa

SEQ ID NO: 1099854 - RNA, 22 nt, Human
cagaacagaugugcaaugaaug

SEQ ID NO: 1099855 - RNA, 18 nt, Human
cagcacuuuaggaggcug

SEQ ID NO: 1099856 - RNA, 20 nt, Human
cagcacuuuaggaggcugag

SEQ ID NO: 1099857 - RNA, 22 nt, Human
cagcuccuugggaagcugagau

SEQ ID NO: 1099858 - RNA, 18 nt, Human
caguacagaugggguuuc

SEQ ID NO: 1099859 - RNA, 24 nt, Human
caguacagaugggguuucaucacg

SEQ ID NO: 1099860 - RNA, 22 nt, Human
caucacguuggccaggcuguuc

SEQ ID NO: 1099861 - RNA, 24 nt, Human
caucacguuggccaggcuguucuc

SEQ ID NO: 1099862 - RNA, 26 nt, Human
caucucuccaagaaauaaaaaaaaaa

SEQ ID NO: 1099863 - RNA, 21 nt, Human
ccaagaaauaaaaaaaaaaaa

SEQ ID NO: 1099864 - RNA, 23 nt, Human
ccaaguagcugggauuacaggca

SEQ ID NO: 1099865 - RNA, 20 nt, Human
ccacugcacuccagccuggg

SEQ ID NO: 1099866 - RNA, 20 nt, Human
ccacugcacuccagccuggg

SEQ ID NO: 1099867 - RNA, 20 nt, Human
ccacugcacuccagccuggg

SEQ ID NO: 1099868 - RNA, 20 nt, Human
ccacugcacuccagccuggg

SEQ ID NO: 1099869 - RNA, 21 nt, Human
ccacugcacuccagccugggu

SEQ ID NO: 1099870 - RNA, 21 nt, Human
ccacugcacuccagccugggu

SEQ ID NO: 1099871 - RNA, 23 nt, Human
ccacugcacuccagccuggguga

SEQ ID NO: 1099872 - RNA, 24 nt, Human
ccacugcacuccagccugggugac

SEQ ID NO: 1099873 - RNA, 19 nt, Human
ccaggaacuggugcuuucu

SEQ ID NO: 1099874 - RNA, 21 nt, Human
ccaggaugcggggguggggcg

SEQ ID NO: 1099875 - RNA, 23 nt, Human
cccaaguagcugggauuacaggc

SEQ ID NO: 1099876 - RNA, 24 nt, Human
cccaaguagcugggauuacaggca

SEQ ID NO: 1099877 - RNA, 18 nt, Human
cccaggcuggagugcaau

SEQ ID NO: 1099878 - RNA, 23 nt, Human
cccagguucaagcaauucuccug

SEQ ID NO: 1099879 - RNA, 18 nt, Human
cccccauucccuuugcuc

SEQ ID NO: 1099880 - RNA, 25 nt, Human
cccuuugcuccuuuaccugccuuca

SEQ ID NO: 1099881 - RNA, 18 nt, Human
ccgcugcccccaugaggc

SEQ ID NO: 1099882 - RNA, 23 nt, Human
ccucagcuaccucacugggccuu

SEQ ID NO: 1099883 - RNA, 24 nt, Human
ccucccagguucaagcaauucucc

SEQ ID NO: 1099884 - RNA, 23 nt, Human
ccucccgcugcccccaugaggcc

SEQ ID NO: 1099885 - RNA, 24 nt, Human
ccuggccaggugcaacggcucaca

SEQ ID NO: 1099886 - RNA, 19 nt, Human
ccugggugacagagugaga

SEQ ID NO: 1099887 - RNA, 21 nt, Human
cgcagggcuaggugagggacg

SEQ ID NO: 1099888 - RNA, 24 nt, Human
cggcucacagcuauaaucccagca

SEQ ID NO: 1099889 - RNA, 20 nt, Human
cgucuaaaaaaaaaaaaaaa

SEQ ID NO: 1099890 - RNA, 22 nt, Human
cguuggccaggcuguucucaaa

SEQ ID NO: 1099891 - RNA, 23 nt, Human
cguuggccaggcuguucucaaac

SEQ ID NO: 1099892 - RNA, 24 nt, Human
cucacagcuauaaucccagcacuu

SEQ ID NO: 1099893 - RNA, 20 nt, Human
cucacguagcuuugaccucu

SEQ ID NO: 1099894 - RNA, 24 nt, Human
cucacugcaacaucugccucccag

SEQ ID NO: 1099895 - RNA, 24 nt, Human
cucagucucccaaguagcugggau

SEQ ID NO: 1099896 - RNA, 21 nt, Human
cucauagcacuuacuccaucc

SEQ ID NO: 1099897 - RNA, 24 nt, Human
cucauagcacuuacuccaucccca

SEQ ID NO: 1099898 - RNA, 24 nt, Human
cucccgcugcccccaugaggccca

SEQ ID NO: 1099899 - RNA, 25 nt, Human
cuccuagucucauagcacuuacucc

SEQ ID NO: 1099900 - RNA, 23 nt, Human
cugcaacaucugccucccagguu

SEQ ID NO: 1099901 - RNA, 24 nt, Human
cugcaacaucugccucccagguuc

SEQ ID NO: 1099902 - RNA, 18 nt, Human
cugcaggaccacagccag

SEQ ID NO: 1099903 - RNA, 23 nt, Human
cugccucagucucccaaguagcu

SEQ ID NO: 1099904 - RNA, 23 nt, Human
cuggaaccacguggaccuggguu

SEQ ID NO: 1099905 - RNA, 23 nt, Human
cugggccuugguuuucucaucug

SEQ ID NO: 1099906 - RNA, 24 nt, Human
cuugcucuugucacccaggcugga

SEQ ID NO: 1099907 - RNA, 24 nt, Human
cuugucacccaggcuggagugcaa

SEQ ID NO: 1099908 - RNA, 25 nt, Human
cuuuuggucccagcuccuugggaag

SEQ ID NO: 1099909 - RNA, 18 nt, Human
gacccuuccugacuccca

SEQ ID NO: 1099910 - RNA, 21 nt, Human
gaucaugccacugcacuccag

SEQ ID NO: 1099911 - RNA, 22 nt, Human
gauuacaggcaccuaccaccau

SEQ ID NO: 1099912 - RNA, 19 nt, Human
gcaaugaucaugccacugc

SEQ ID NO: 1099913 - RNA, 23 nt, Human
gcacuccagccugggugacagag

SEQ ID NO: 1099914 - RNA, 24 nt, Human
gcacuccagccugggugacagagu

SEQ ID NO: 1099915 - RNA, 21 nt, Human
gccaagcugcugcccuggggu

SEQ ID NO: 1099916 - RNA, 19 nt, Human
gccacugcacuccagccug

SEQ ID NO: 1099917 - RNA, 24 nt, Human
gccacugcacuccagccuggguga

SEQ ID NO: 1099918 - RNA, 18 nt, Human
gccaggaugcgggggugg

SEQ ID NO: 1099919 - RNA, 23 nt, Human
gcccggcuaauuuuuuguauuuu

SEQ ID NO: 1099920 - RNA, 26 nt, Human
gcccgucuaaaaaaaaaaaaaaaaaa

SEQ ID NO: 1099921 - RNA, 21 nt, Human
gccuaagagcugggccaggcu

SEQ ID NO: 1099922 - RNA, 24 nt, Human
gccucagucucccaaguagcuggg

SEQ ID NO: 1099923 - RNA, 21 nt, Human
gcucuugucacccaggcugga

SEQ ID NO: 1099924 - RNA, 24 nt, Human
gcucuugucacccaggcuggagug

SEQ ID NO: 1099925 - RNA, 21 nt, Human
gcuggagugcaauggugccag

SEQ ID NO: 1099926 - RNA, 20 nt, Human
ggcggguugggauugggggg

SEQ ID NO: 1099927 - RNA, 19 nt, Human
ggcucuggccaguggcggg

SEQ ID NO: 1099928 - RNA, 20 nt, Human
gggaagcugagauggcagga

SEQ ID NO: 1099929 - RNA, 22 nt, Human
gggccaggcucuggccaguggc

SEQ ID NO: 1099930 - RNA, 19 nt, Human
gggcgugguguugggcagg

SEQ ID NO: 1099931 - RNA, 18 nt, Human
gggguuucaucacguugg

SEQ ID NO: 1099932 - RNA, 22 nt, Human
gggguuucaucacguuggccag

SEQ ID NO: 1099933 - RNA, 22 nt, Human
ggguuucaucacguuggccagg

SEQ ID NO: 1099934 - RNA, 19 nt, Human
guagaugcuugagcccauc

SEQ ID NO: 1099935 - RNA, 21 nt, Human
uaagaugaucugugaguaagg

SEQ ID NO: 1099936 - RNA, 19 nt, Human
uaauuuuuuguauuuucag

SEQ ID NO: 1099937 - RNA, 22 nt, Human
uaccaccaugcccggcuaauuu

SEQ ID NO: 1099938 - RNA, 23 nt, Human
uaccaccaugcccggcuaauuuu

SEQ ID NO: 1099939 - RNA, 21 nt, Human
uaccucacugggccuugguuu

SEQ ID NO: 1099940 - RNA, 22 nt, Human
uagcaaagaggcauuuguaaga

SEQ ID NO: 1099941 - RNA, 21 nt, Human
uagcacuuacuccauccccau

SEQ ID NO: 1099942 - RNA, 20 nt, Human
uagugagcaaugaucaugcc

SEQ ID NO: 1099943 - RNA, 21 nt, Human
ucaaaaaaagccauccuggcc

SEQ ID NO: 1099944 - RNA, 20 nt, Human
ucacagcuauaaucccagca

SEQ ID NO: 1099945 - RNA, 18 nt, Human
ucacccaggcuggagugc

SEQ ID NO: 1099946 - RNA, 24 nt, Human
ucacugcaacaucugccucccagg

SEQ ID NO: 1099947 - RNA, 25 nt, Human
ucacugcaacaucugccucccaggu

SEQ ID NO: 1099948 - RNA, 22 nt, Human
ucacugggccuugguuuucuca

SEQ ID NO: 1099949 - RNA, 20 nt, Human
ucaguacagaugggguuuca

SEQ ID NO: 1099950 - RNA, 21 nt, Human
ucaguacagaugggguuuccu

SEQ ID NO: 1099951 - RNA, 23 nt, Human
ucaugccacugcacuccagccug

SEQ ID NO: 1099952 - RNA, 23 nt, Human
uccaagaaauaaaaaaaaaaaau

SEQ ID NO: 1099953 - RNA, 23 nt, Human
uccagccugggugacagagugag

SEQ ID NO: 1099954 - RNA, 24 nt, Human
uccagccugggugacagagugaga

SEQ ID NO: 1099955 - RNA, 24 nt, Human
ucccaaguagcugggauuacaggc

SEQ ID NO: 1099956 - RNA, 21 nt, Human
ucccagguucaagcaauucuc

SEQ ID NO: 1099957 - RNA, 24 nt, Human
ucccagguucaagcaauucuccug

SEQ ID NO: 1099958 - RNA, 21 nt, Human
uccucacguagcuuugaccuc

SEQ ID NO: 1099959 - RNA, 21 nt, Human
ucuaaaaaaaaaaaaaaaaaa

SEQ ID NO: 1099960 - RNA, 24 nt, Human
ucuugcucuugucacccaggcugg

SEQ ID NO: 1099961 - RNA, 25 nt, Human
ucuugcucuugucacccaggcugga

SEQ ID NO: 1099962 - RNA, 18 nt, Human
ucuuuguagaacccuugc

SEQ ID NO: 1099963 - RNA, 18 nt, Human
ugaccucagguguuccuu

SEQ ID NO: 1099964 - RNA, 25 nt, Human
ugcccggcuaauuuuuuguauuuuc

SEQ ID NO: 1099965 - RNA, 23 nt, Human
ugccucagucucccaaguagcug

SEQ ID NO: 1099966 - RNA, 24 nt, Human
ugccucagucucccaaguagcugg

SEQ ID NO: 1099967 - RNA, 18 nt, Human
ugcggggguggggcgggg

SEQ ID NO: 1099968 - RNA, 24 nt, Human
ugcucuugucacccaggcuggagu

SEQ ID NO: 1099969 - RNA, 21 nt, Human
ugcugcaggaccacagccagu

SEQ ID NO: 1099970 - RNA, 21 nt, Human
uggaaccacguggaccugggu

SEQ ID NO: 1099971 - RNA, 28 nt, Human
uggagugcaauggugccauccuagcacg

SEQ ID NO: 1099972 - RNA, 23 nt, Human
uggagugcaauggugccaucucg

SEQ ID NO: 1099973 - RNA, 24 nt, Human
uggagugcaauggugccaucucgg

SEQ ID NO: 1099974 - RNA, 21 nt, Human
uggccaggcuguucucaaacu

SEQ ID NO: 1099975 - RNA, 20 nt, Human
uggccaguggcggguuggga

SEQ ID NO: 1099976 - RNA, 19 nt, Human
ugggaagcugagauggcag

SEQ ID NO: 1099977 - RNA, 21 nt, Human
ugggauuacaggcaccuacca

SEQ ID NO: 1099978 - RNA, 24 nt, Human
ugggauuacaggcaccuaccacca

SEQ ID NO: 1099979 - RNA, 25 nt, Human
ugggauuacaggcaccuaccaccau

SEQ ID NO: 1099980 - RNA, 22 nt, Human
ugggccaggcucuggccagugg

SEQ ID NO: 1099981 - RNA, 24 nt, Human
ugggguuucaucacguuggccagg

SEQ ID NO: 1099982 - RNA, 23 nt, Human
ugguggcacacacuuuugguccc

SEQ ID NO: 1099983 - RNA, 24 nt, Human
uguagaugcuugagcccaucucuc

SEQ ID NO: 1099984 - RNA, 20 nt, Human
ugucacccaggcuggagugc

SEQ ID NO: 1099985 - RNA, 20 nt, Human
ugugaccucagguguuccug

SEQ ID NO: 1099986 - RNA, 18 nt, Human
uguuccucuccuagucuc

SEQ ID NO: 1099987 - RNA, 21 nt, Human
uucaagcaauucuccugccuc

SEQ ID NO: 1099988 - RNA, 24 nt, Human
uucaagcaauucuccugccucagu

SEQ ID NO: 1099989 - RNA, 24 nt, Human
uugagcccaugaaacaucgcugua

SEQ ID NO: 1099990 - RNA, 20 nt, Human
uugcuccuuuaccugccuuc

SEQ ID NO: 1099991 - RNA, 23 nt, Human
uugggaagcugagauggcaggau

SEQ ID NO: 1099992 - RNA, 21 nt, Human
uuucaucacguuggccaggcu

SEQ ID NO: 1099993 - RNA, 23 nt, Human
uuuggaauaagacauuggccuaa

SEQ ID NO: 1099994 - RNA, 23 nt, Human
uuuucaguacagaugggguuuca

SEQ ID NO: 1099995 - RNA, 24 nt, Human
uuuuuuuuuuuugacacggagucu

SEQ ID NO: 1099996 - RNA, 21 nt, Human
aaaaaaaaaagaaaacaaaua

SEQ ID NO: 1099997 - RNA, 27 nt, Human
aaaaacucaacaccaacaacaaaaacc

SEQ ID NO: 1099998 - RNA, 24 nt, Human
aaaaaugaacaaaggacuugaaua

SEQ ID NO: 1099999 - RNA, 20 nt, Human
aaaacaaauagccaguaaac

SEQ ID NO: 1100000 - RNA, 19 nt, Human
aaaagcuucccaacacugg

SEQ ID NO: 1100001 - RNA, 22 nt, Human
aaaagcuucccaacacuggagg

SEQ ID NO: 1100002 - RNA, 23 nt, Human
aaaauggaucaaauaccuaaaug

SEQ ID NO: 1100003 - RNA, 24 nt, Human
aaagaugggggcaacaauaacaac

SEQ ID NO: 1100004 - RNA, 24 nt, Human
aaagugcggggauuacagguguga

SEQ ID NO: 1100005 - RNA, 22 nt, Human
aacaauaacaacaaaauagaca

SEQ ID NO: 1100006 - RNA, 21 nt, Human
aacaccaacaacaaaaaccaa

SEQ ID NO: 1100007 - RNA, 19 nt, Human
aacauggugaaaccccguc

SEQ ID NO: 1100008 - RNA, 20 nt, Human
aacauggugaaaccccgucu

SEQ ID NO: 1100009 - RNA, 21 nt, Human
aacauggugaaaccccgucuc

SEQ ID NO: 1100010 - RNA, 22 nt, Human
aagaaaacauauggcaaaagcu

SEQ ID NO: 1100011 - RNA, 21 nt, Human
aagcaacccaaaaaugaacaa

SEQ ID NO: 1100012 - RNA, 24 nt, Human
aagcaacccaaaaaugaacaaagg

SEQ ID NO: 1100013 - RNA, 20 nt, Human
aagcuucccaacacuggauu

SEQ ID NO: 1100014 - RNA, 24 nt, Human
aagugauccaccugccucggccuu

SEQ ID NO: 1100015 - RNA, 25 nt, Human
aagugauucucccaccucggccuuc

SEQ ID NO: 1100016 - RNA, 22 nt, Human
aauagugcuggaaaaaacggau

SEQ ID NO: 1100017 - RNA, 21 nt, Human
acaaaaaccaagcaacccaaa

SEQ ID NO: 1100018 - RNA, 25 nt, Human
acaaaaauuaacucaaaauggauca

SEQ ID NO: 1100019 - RNA, 21 nt, Human
acaccaaagaugggggcaaca

SEQ ID NO: 1100020 - RNA, 25 nt, Human
acaccacggagcacaggucagaaac

SEQ ID NO: 1100021 - RNA, 21 nt, Human
accaacaacaaaaaccaagca

SEQ ID NO: 1100022 - RNA, 23 nt, Human
accaagcaacccaaaaaugaaca

SEQ ID NO: 1100023 - RNA, 24 nt, Human
accauguuggccaggcuggucucg

SEQ ID NO: 1100024 - RNA, 18 nt, Human
accccgucucuguuaaaa

SEQ ID NO: 1100025 - RNA, 20 nt, Human
accucggccuucugaguagc

SEQ ID NO: 1100026 - RNA, 24 nt, Human
accugaggucaggaguucgagacc

SEQ ID NO: 1100027 - RNA, 18 nt, Human
acgggguuucaccauguu

SEQ ID NO: 1100028 - RNA, 23 nt, Human
acgggguuucaccauguuggcca

SEQ ID NO: 1100029 - RNA, 24 nt, Human
acgggguuucaccauguuggccag

SEQ ID NO: 1100030 - RNA, 19 nt, Human
acuggagugcaguggcgcg

SEQ ID NO: 1100031 - RNA, 21 nt, Human
acuuugugcaucaaaaaacca

SEQ ID NO: 1100032 - RNA, 21 nt, Human
agaagaaaacauauggcaaaa

SEQ ID NO: 1100033 - RNA, 23 nt, Human
agacucgaggcgaggcgaggcga

SEQ ID NO: 1100034 - RNA, 24 nt, Human
agcacauugggaggcugaggcggg

SEQ ID NO: 1100035 - RNA, 22 nt, Human
agccuggccaacauggugaaac

SEQ ID NO: 1100036 - RNA, 24 nt, Human
agccuggccaacauggugaaaccc

SEQ ID NO: 1100037 - RNA, 26 nt, Human
aggaggagcgaggagucucgggccca

SEQ ID NO: 1100038 - RNA, 21 nt, Human
aggcagcuccuaaaaaacuca

SEQ ID NO: 1100039 - RNA, 22 nt, Human
aggcggguggaucaccugaggu

SEQ ID NO: 1100040 - RNA, 26 nt, Human
aggcggguggaucaccugaggucagg

SEQ ID NO: 1100041 - RNA, 24 nt, Human
aggcugaaguacaguggcgugauc

SEQ ID NO: 1100042 - RNA, 21 nt, Human
aggcugaggcggguggaucac

SEQ ID NO: 1100043 - RNA, 24 nt, Human
aggcugaggcggguggaucaccug

SEQ ID NO: 1100044 - RNA, 22 nt, Human
agggaucauuucccuuuuucug

SEQ ID NO: 1100045 - RNA, 24 nt, Human
aggugcgguggcucaugccuguaa

SEQ ID NO: 1100046 - RNA, 21 nt, Human
agguggagguugcaaugagcc

SEQ ID NO: 1100047 - RNA, 24 nt, Human
agguggagguugcaaugagccgag

SEQ ID NO: 1100048 - RNA, 19 nt, Human
aguacaguggcgugaucau

SEQ ID NO: 1100049 - RNA, 20 nt, Human
aguacaguggcgugaucaug

SEQ ID NO: 1100050 - RNA, 19 nt, Human
aguagcugggauuauaggc

SEQ ID NO: 1100051 - RNA, 21 nt, Human
aguagcugggauuauaggcau

SEQ ID NO: 1100052 - RNA, 20 nt, Human
agugcaguggcgcgaucucg

SEQ ID NO: 1100053 - RNA, 23 nt, Human
agugcaguggcgcgaucucggcu

SEQ ID NO: 1100054 - RNA, 24 nt, Human
agugcaguggcgcgaucucggcuc

SEQ ID NO: 1100055 - RNA, 18 nt, Human
agugcuggaaaaaacgga

SEQ ID NO: 1100056 - RNA, 21 nt, Human
aucaccugaggucaggaguuc

SEQ ID NO: 1100057 - RNA, 24 nt, Human
aucaugccacugcacuccagccug

SEQ ID NO: 1100058 - RNA, 18 nt, Human
aucugaaucaauguagag

SEQ ID NO: 1100059 - RNA, 21 nt, Human
augccacugcacuccagccug

SEQ ID NO: 1100060 - RNA, 19 nt, Human
augccuguaaucccagcac

SEQ ID NO: 1100061 - RNA, 23 nt, Human
augccuguaaucccagcacauug

SEQ ID NO: 1100062 - RNA, 24 nt, Human
augggggcaacaauaacaacaaaa

SEQ ID NO: 1100063 - RNA, 25 nt, Human
auucuguugcccaaacuggagugca

SEQ ID NO: 1100064 - RNA, 22 nt, Human
auuuuuguauuuuuaguagaga

SEQ ID NO: 1100065 - RNA, 24 nt, Human
auuuuuguauuuuuaguagagacg

SEQ ID NO: 1100066 - RNA, 24 nt, Human
caaagugcggggauuacaggugug

SEQ ID NO: 1100067 - RNA, 22 nt, Human
caaauaaaaacuacaacaaaag

SEQ ID NO: 1100068 - RNA, 23 nt, Human
caacaaaaaccaagcaacccaaa

SEQ ID NO: 1100069 - RNA, 26 nt, Human
caacaaaaaccaagcaacccaaaaau

SEQ ID NO: 1100070 - RNA, 25 nt, Human
caacaacaaaaaccaagcaacccaa

SEQ ID NO: 1100071 - RNA, 23 nt, Human
caacaccaacaacaaaaaccaag

SEQ ID NO: 1100072 - RNA, 23 nt, Human
caacauggugaaaccccgucucu

SEQ ID NO: 1100073 - RNA, 24 nt, Human
caacauggugaaaccccgucucug

SEQ ID NO: 1100074 - RNA, 22 nt, Human
caagugauccaccugccucggc

SEQ ID NO: 1100075 - RNA, 27 nt, Human
caagugaucuucccaucucagccuucc

SEQ ID NO: 1100076 - RNA, 22 nt, Human
caagugauucucccaccucggc

SEQ ID NO: 1100077 - RNA, 24 nt, Human
cacaccacuacgccuggcuaauuu

SEQ ID NO: 1100078 - RNA, 24 nt, Human
cacaccuguaaucucagcuacuug

SEQ ID NO: 1100079 - RNA, 21 nt, Human
cacaggucagaaacaagggag

SEQ ID NO: 1100080 - RNA, 22 nt, Human
cacauugggaggcugaggcggg

SEQ ID NO: 1100081 - RNA, 19 nt, Human
caccaaagaugggggcaac

SEQ ID NO: 1100082 - RNA, 20 nt, Human
caccaaagaugggggcaaca

SEQ ID NO: 1100083 - RNA, 19 nt, Human
caccaacaacaaaaaccaa

SEQ ID NO: 1100084 - RNA, 20 nt, Human
caccaacaacaaaaaccaag

SEQ ID NO: 1100085 - RNA, 19 nt, Human
caccaugccuugcucauuu

SEQ ID NO: 1100086 - RNA, 21 nt, Human
caccauguuggccaggcuggu

SEQ ID NO: 1100087 - RNA, 24 nt, Human
caccauguuggccaggcuggucuc

SEQ ID NO: 1100088 - RNA, 27 nt, Human
caccauguuggccaggcuggucucgaa

SEQ ID NO: 1100089 - RNA, 23 nt, Human
caccugaggucaggaguucgaga

SEQ ID NO: 1100090 - RNA, 23 nt, Human
caccugccucggccuuccaaagu

SEQ ID NO: 1100091 - RNA, 23 nt, Human
caccuguaaucucagcuacuugg

SEQ ID NO: 1100092 - RNA, 24 nt, Human
caccuguaaucucagcuacuuggg

SEQ ID NO: 1100093 - RNA, 24 nt, Human
cacuacgccuggcuaauuuuugua

SEQ ID NO: 1100094 - RNA, 23 nt, Human
cacugcaaccucugucuccuggg

SEQ ID NO: 1100095 - RNA, 18 nt, Human
cacugcacuccagccuga

SEQ ID NO: 1100096 - RNA, 27 nt, Human
cacugcacuccagccugauuuuugaca

SEQ ID NO: 1100097 - RNA, 21 nt, Human
cacuggcagagcaucagguga

SEQ ID NO: 1100098 - RNA, 22 nt, Human
cagcacauugggaggcugaggc

SEQ ID NO: 1100099 - RNA, 24 nt, Human
cagcacauugggaggcugaggcgg

SEQ ID NO: 1100100 - RNA, 23 nt, Human
cagcuccuaaaaaacucaacacc

SEQ ID NO: 1100101 - RNA, 27 nt, Human
caucucagccuuccaaguagcugggga

SEQ ID NO: 1100102 - RNA, 24 nt, Human
cauguuggccaggcuggucucgaa

SEQ ID NO: 1100103 - RNA, 24 nt, Human
cauucuguugcccaaacuggagug

SEQ ID NO: 1100104 - RNA, 21 nt, Human
ccaaagugcggggauuacagg

SEQ ID NO: 1100105 - RNA, 21 nt, Human
ccaaagugcggggauuacagg

SEQ ID NO: 1100106 - RNA, 24 nt, Human
ccaaagugcggggauuacaggugu

SEQ ID NO: 1100107 - RNA, 20 nt, Human
ccaauaucaacaaauucaaa

SEQ ID NO: 1100108 - RNA, 23 nt, Human
ccaccucggccuucugaguagcu

SEQ ID NO: 1100109 - RNA, 18 nt, Human
ccacugcacuccagccug

SEQ ID NO: 1100110 - RNA, 19 nt, Human
ccacugcacuccagccuga

SEQ ID NO: 1100111 - RNA, 20 nt, Human
ccacugcacuccagccugau

SEQ ID NO: 1100112 - RNA, 18 nt, Human
ccaggauauagaggcagc

SEQ ID NO: 1100113 - RNA, 20 nt, Human
ccggggcucaagugaucuuc

SEQ ID NO: 1100114 - RNA, 23 nt, Human
ccucauucuguugcccaaacugg

SEQ ID NO: 1100115 - RNA, 24 nt, Human
ccucauucuguugcccaaacugga

SEQ ID NO: 1100116 - RNA, 22 nt, Human
ccugaggucaggaguucgagac

SEQ ID NO: 1100117 - RNA, 21 nt, Human
ccugaucucaagugauccacc

SEQ ID NO: 1100118 - RNA, 23 nt, Human
ccugaucucaagugauccaccug

SEQ ID NO: 1100119 - RNA, 23 nt, Human
ccuggccaacauggugaaacccc

SEQ ID NO: 1100120 - RNA, 24 nt, Human
ccuggccaacauggugaaaccccg

SEQ ID NO: 1100121 - RNA, 21 nt, Human
ccugggauucaagugauucuc

SEQ ID NO: 1100122 - RNA, 20 nt, Human
ccuguaaucccagcacauug

SEQ ID NO: 1100123 - RNA, 22 nt, Human
ccuguaaucccagcacauuggg

SEQ ID NO: 1100124 - RNA, 21 nt, Human
ccuguaaucucagcuacuugg

SEQ ID NO: 1100125 - RNA, 24 nt, Human
cgagaccagccuggccaacauggu

SEQ ID NO: 1100126 - RNA, 20 nt, Human
cgaggaggagcgaggagucu

SEQ ID NO: 1100127 - RNA, 22 nt, Human
cgaggaggagcgaggagucucg

SEQ ID NO: 1100128 - RNA, 19 nt, Human
cggagcacaggucagaaac

SEQ ID NO: 1100129 - RNA, 24 nt, Human
cggguggaucaccugaggucagga

SEQ ID NO: 1100130 - RNA, 23 nt, Human
cuaaacuuuuaaaacucuuagaa

SEQ ID NO: 1100131 - RNA, 19 nt, Human
cucaacaccaacaacaaaa

SEQ ID NO: 1100132 - RNA, 21 nt, Human
cucaagugauccaccugccuc

SEQ ID NO: 1100133 - RNA, 21 nt, Human
cucaagugauccaccugccuc

SEQ ID NO: 1100134 - RNA, 24 nt, Human
cucaagugaucuucccaucucagc

SEQ ID NO: 1100135 - RNA, 24 nt, Human
cucacugcaaccucugucuccugg

SEQ ID NO: 1100136 - RNA, 25 nt, Human
cucaugccuguaaucccagcacauu

SEQ ID NO: 1100137 - RNA, 21 nt, Human
cuccugggauucaagugauuc

SEQ ID NO: 1100138 - RNA, 22 nt, Human
cuccugggauucaagugauucu

SEQ ID NO: 1100139 - RNA, 24 nt, Human
cuccugggauucaagugauucucc

SEQ ID NO: 1100140 - RNA, 24 nt, Human
cucggccuucugaguagcugggau

SEQ ID NO: 1100141 - RNA, 29 nt, Human
cugaggcaagagaaucuggaagguggagg

SEQ ID NO: 1100142 - RNA, 29 nt, Human
cugaggcaagagaaucuggaagguggagg

SEQ ID NO: 1100143 - RNA, 24 nt, Human
cugaguagcugggauuauaggcau

SEQ ID NO: 1100144 - RNA, 25 nt, Human
cugcaaccucugucuccugggauuc

SEQ ID NO: 1100145 - RNA, 21 nt, Human
cuguaaucucagcuacuuggg

SEQ ID NO: 1100146 - RNA, 26 nt, Human
cuucccaucucagccuuccaaguagc

SEQ ID NO: 1100147 - RNA, 24 nt, Human
gagacgggguuucaccauguuggc

SEQ ID NO: 1100148 - RNA, 20 nt, Human
gagaucagagacaccacgga

SEQ ID NO: 1100149 - RNA, 23 nt, Human
gagaucaugccacugcacuccag

SEQ ID NO: 1100150 - RNA, 23 nt, Human
gagauggggucucucccaugggc

SEQ ID NO: 1100151 - RNA, 23 nt, Human
gaggcggguggaucaccugaggu

SEQ ID NO: 1100152 - RNA, 22 nt, Human
gagguugcaaugagccgagauc

SEQ ID NO: 1100153 - RNA, 22 nt, Human
gaguagcugggauuauaggcau

SEQ ID NO: 1100154 - RNA, 18 nt, Human
gagugaguccugggaggg

SEQ ID NO: 1100155 - RNA, 24 nt, Human
gauauagaggcagcuccuaaaaaa

SEQ ID NO: 1100156 - RNA, 24 nt, Human
gaucaccugaggucaggaguucga

SEQ ID NO: 1100157 - RNA, 21 nt, Human
gauuacaggugugaaccaccg

SEQ ID NO: 1100158 - RNA, 22 nt, Human
gauuauaggcauccaccaccau

SEQ ID NO: 1100159 - RNA, 23 nt, Human
gcaagagaaucuggaagguggag

SEQ ID NO: 1100160 - RNA, 24 nt, Human
gccaacauggugaaaccccgucuc

SEQ ID NO: 1100161 - RNA, 20 nt, Human
gccgagaucaugccacugca

SEQ ID NO: 1100162 - RNA, 18 nt, Human
gcgaggcgaggaggagcg

SEQ ID NO: 1100163 - RNA, 20 nt, Human
gcucaagugaucuucccauc

SEQ ID NO: 1100164 - RNA, 22 nt, Human
gcuccaaaaaaaaaaaaaaaaa

SEQ ID NO: 1100165 - RNA, 19 nt, Human
gcugaaguacaguggcgug

SEQ ID NO: 1100166 - RNA, 20 nt, Human
ggaaaaaacggauauccaca

SEQ ID NO: 1100167 - RNA, 23 nt, Human
ggaaaaaacggauauccacaugu

SEQ ID NO: 1100168 - RNA, 18 nt, Human
ggagcacaggucagaaac

SEQ ID NO: 1100169 - RNA, 18 nt, Human
ggagguugcaaugagccg

SEQ ID NO: 1100170 - RNA, 24 nt, Human
ggagguugcaaugagccgagauca

SEQ ID NO: 1100171 - RNA, 22 nt, Human
ggaucaccugaggucaggaguu

SEQ ID NO: 1100172 - RNA, 22 nt, Human
ggcagggggagaucagagacac

SEQ ID NO: 1100173 - RNA, 23 nt, Human
ggcgugguggugcacaccuguaa

SEQ ID NO: 1100174 - RNA, 24 nt, Human
ggcuggucucgaacuccugaucuc

SEQ ID NO: 1100175 - RNA, 22 nt, Human
gggauuacaggugugaaccacc

SEQ ID NO: 1100176 - RNA, 22 nt, Human
gggauuacaggugugaaccacc

SEQ ID NO: 1100177 - RNA, 23 nt, Human
gggauuacaggugugaaccaccg

SEQ ID NO: 1100178 - RNA, 19 nt, Human
ggggauuacaggugugaac

SEQ ID NO: 1100179 - RNA, 24 nt, Human
ggggauuacaggugugaaccaccg

SEQ ID NO: 1100180 - RNA, 24 nt, Human
ggggcucaagugaucuucccaucu

SEQ ID NO: 1100181 - RNA, 23 nt, Human
gggguuucaccauguuggccagg

SEQ ID NO: 1100182 - RNA, 22 nt, Human
ggguuucaccauguuggccagg

SEQ ID NO: 1100183 - RNA, 21 nt, Human
gguggaucaccugaggucagg

SEQ ID NO: 1100184 - RNA, 23 nt, Human
gguggcucaugccuguaauccca

SEQ ID NO: 1100185 - RNA, 24 nt, Human
gguggcucaugccuguaaucccag

SEQ ID NO: 1100186 - RNA, 24 nt, Human
gguggugcacaccuguaaucucag

SEQ ID NO: 1100187 - RNA, 23 nt, Human
guagagacgggguuucaccaugu

SEQ ID NO: 1100188 - RNA, 23 nt, Human
guagagauggggucucucccaug

SEQ ID NO: 1100189 - RNA, 20 nt, Human
guagcugggauuauaggcau

SEQ ID NO: 1100190 - RNA, 19 nt, Human
guauuuuuuguagagaugg

SEQ ID NO: 1100191 - RNA, 24 nt, Human
gugauccaccugccucggccuucc

SEQ ID NO: 1100192 - RNA, 24 nt, Human
gugaucuucccaucucagccuucc

SEQ ID NO: 1100193 - RNA, 24 nt, Human
gugauucucccaccucggccuucu

SEQ ID NO: 1100194 - RNA, 18 nt, Human
guugcaaugagccgagau

SEQ ID NO: 1100195 - RNA, 25 nt, Human
uaaaaaacucaacaccaacaacaaa

SEQ ID NO: 1100196 - RNA, 24 nt, Human
uaauuuuuguauuuuuuguagaga

SEQ ID NO: 1100197 - RNA, 19 nt, Human
uagaagaaaacauauggca

SEQ ID NO: 1100198 - RNA, 22 nt, Human
uagaagaaaacauauggcaaaa

SEQ ID NO: 1100199 - RNA, 20 nt, Human
uagagacaucagcaauccag

SEQ ID NO: 1100200 - RNA, 22 nt, Human
uagagacgggguuucaccaugu

SEQ ID NO: 1100201 - RNA, 20 nt, Human
uaggcauccaccaccaugcc

SEQ ID NO: 1100202 - RNA, 22 nt, Human
uaggcauccaccaccaugccuu

SEQ ID NO: 1100203 - RNA, 24 nt, Human
uaguagagacgggguuucaccaug

SEQ ID NO: 1100204 - RNA, 26 nt, Human
uaguagagacgggguuucaccauguu

SEQ ID NO: 1100205 - RNA, 18 nt, Human
ucaaauaccuaaauguaa

SEQ ID NO: 1100206 - RNA, 24 nt, Human
ucaacaccaacaacaaaaaccaag

SEQ ID NO: 1100207 - RNA, 21 nt, Human
ucaagugauccaccugccucg

SEQ ID NO: 1100208 - RNA, 26 nt, Human
ucaauguagagacaucagcaauccac

SEQ ID NO: 1100209 - RNA, 20 nt, Human
ucaccugaggucaggaguuc

SEQ ID NO: 1100210 - RNA, 24 nt, Human
ucacugcaaccucugucuccuggg

SEQ ID NO: 1100211 - RNA, 25 nt, Human
ucagaccaggugcgguggcucaugc

SEQ ID NO: 1100212 - RNA, 22 nt, Human
ucagagacaccacggagcacag

SEQ ID NO: 1100213 - RNA, 23 nt, Human
ucaugccacugcacuccagccug

SEQ ID NO: 1100214 - RNA, 22 nt, Human
ucaugccuguaaucccagcaca

SEQ ID NO: 1100215 - RNA, 24 nt, Human
ucauuuuuguauuuuuaguagaga

SEQ ID NO: 1100216 - RNA, 25 nt, Human
uccaaaaaaaaaaaaaaaaaaagaa

SEQ ID NO: 1100217 - RNA, 23 nt, Human
uccaaguagcuggggaauccagg

SEQ ID NO: 1100218 - RNA, 23 nt, Human
uccaaguagcuggggaauccagg

SEQ ID NO: 1100219 - RNA, 22 nt, Human
uccacauguaagagaauaaagu

SEQ ID NO: 1100220 - RNA, 22 nt, Human
ucgcuccaaaaaaaaaaaaaaa

SEQ ID NO: 1100221 - RNA, 23 nt, Human
ucgcuccaaaaaaaaaaaaaaaa

SEQ ID NO: 1100222 - RNA, 23 nt, Human
ucgcuuugucacugaaggucggc

SEQ ID NO: 1100223 - RNA, 23 nt, Human
ucggccuucugaguagcugggau

SEQ ID NO: 1100224 - RNA, 21 nt, Human
ucuaggcugcagugcuguggu

SEQ ID NO: 1100225 - RNA, 21 nt, Human
ucucgaacuccugaucucaag

SEQ ID NO: 1100226 - RNA, 23 nt, Human
ucugaguagcugggauuauaggc

SEQ ID NO: 1100227 - RNA, 24 nt, Human
ucugaguagcugggauuauaggca

SEQ ID NO: 1100228 - RNA, 18 nt, Human
ucuggaagguggagguug

SEQ ID NO: 1100229 - RNA, 24 nt, Human
ucuguugcccaaacuggagugcag

SEQ ID NO: 1100230 - RNA, 19 nt, Human
ucuuaaacuugaucagacc

SEQ ID NO: 1100231 - RNA, 23 nt, Human
ucuuagaagaaaacauauggcaa

SEQ ID NO: 1100232 - RNA, 18 nt, Human
ucuugcucuguugucuag

SEQ ID NO: 1100233 - RNA, 20 nt, Human
ucuugcucuguugucuaggc

SEQ ID NO: 1100234 - RNA, 22 nt, Human
ucuugcucuguugucuaggcug

SEQ ID NO: 1100235 - RNA, 22 nt, Human
ugaaaaggugcucaacaucacu

SEQ ID NO: 1100236 - RNA, 21 nt, Human
ugaacaaaggacuugaauagg

SEQ ID NO: 1100237 - RNA, 19 nt, Human
ugaaguacaguggcgugau

SEQ ID NO: 1100238 - RNA, 22 nt, Human
ugagauggagccucauucuguu

SEQ ID NO: 1100239 - RNA, 22 nt, Human
ugagccgagaucaugccacugc

SEQ ID NO: 1100240 - RNA, 22 nt, Human
ugaggcaagagaaucuggaagg

SEQ ID NO: 1100241 - RNA, 20 nt, Human
ugaggcggguggaucaccug

SEQ ID NO: 1100242 - RNA, 22 nt, Human
ugaggcggguggaucaccugag

SEQ ID NO: 1100243 - RNA, 24 nt, Human
ugaggcggguggaucaccugaggu

SEQ ID NO: 1100244 - RNA, 26 nt, Human
ugaggcggguggaucaccugagguca

SEQ ID NO: 1100245 - RNA, 24 nt, Human
ugaguccugggagggauguuccuu

SEQ ID NO: 1100246 - RNA, 24 nt, Human
ugaucucaagugauccaccugccu

SEQ ID NO: 1100247 - RNA, 22 nt, Human
ugcaaugagccgagaucaugcc

SEQ ID NO: 1100248 - RNA, 25 nt, Human
ugcaucaaaaaaccaauaucaacaa

SEQ ID NO: 1100249 - RNA, 19 nt, Human
ugccaagaccauuuaaugg

SEQ ID NO: 1100250 - RNA, 20 nt, Human
ugccaagaccauuuaauggg

SEQ ID NO: 1100251 - RNA, 21 nt, Human
ugcccaaacuggagugcagug

SEQ ID NO: 1100252 - RNA, 24 nt, Human
ugcccaaacuggagugcaguggcg

SEQ ID NO: 1100253 - RNA, 23 nt, Human
ugccuguaaucccagcacauugg

SEQ ID NO: 1100254 - RNA, 23 nt, Human
ugccuguaaucccagcacauugg

SEQ ID NO: 1100255 - RNA, 25 nt, Human
ugccuugcucauuuuuguauuuuua

SEQ ID NO: 1100256 - RNA, 24 nt, Human
ugcucaacaucacuaaucguuagc

SEQ ID NO: 1100257 - RNA, 21 nt, Human
uggaaaaaacggauauccaca

SEQ ID NO: 1100258 - RNA, 29 nt, Human
uggaagguggagguugcaaugacaacggu

SEQ ID NO: 1100259 - RNA, 24 nt, Human
uggaagguggagguugcaaugagc

SEQ ID NO: 1100260 - RNA, 23 nt, Human
uggagugcaguggcgcgaucucg

SEQ ID NO: 1100261 - RNA, 24 nt, Human
uggagugcaguggcgcgaucucgg

SEQ ID NO: 1100262 - RNA, 24 nt, Human
uggaucaccugaggucaggaguuc

SEQ ID NO: 1100263 - RNA, 27 nt, Human
uggaucaccugaggucaggaguucgag

SEQ ID NO: 1100264 - RNA, 18 nt, Human
uggcagaaugggagaaaa

SEQ ID NO: 1100265 - RNA, 24 nt, Human
uggccaacauggugaaaccccguc

SEQ ID NO: 1100266 - RNA, 24 nt, Human
uggccaggcuggucucgaacuccu

SEQ ID NO: 1100267 - RNA, 22 nt, Human
uggcucaugccuguaaucccag

SEQ ID NO: 1100268 - RNA, 24 nt, Human
uggcucaugccuguaaucccagca

SEQ ID NO: 1100269 - RNA, 20 nt, Human
ugggaggcugaggcaagaga

SEQ ID NO: 1100270 - RNA, 26 nt, Human
ugggaggcugaggcaagagaaucugg

SEQ ID NO: 1100271 - RNA, 23 nt, Human
ugggaggcugaggcggguggauc

SEQ ID NO: 1100272 - RNA, 24 nt, Human
ugggaggcugaggcggguggauca

SEQ ID NO: 1100273 - RNA, 21 nt, Human
ugggauuauaggcauccacca

SEQ ID NO: 1100274 - RNA, 24 nt, Human
ugggauuauaggcauccaccacca

SEQ ID NO: 1100275 - RNA, 23 nt, Human
ugggggcaacaauaacaacaaaa

SEQ ID NO: 1100276 - RNA, 24 nt, Human
ugguggugcacaccuguaaucuca

SEQ ID NO: 1100277 - RNA, 21 nt, Human
uguauuuuuaguagagacggg

SEQ ID NO: 1100278 - RNA, 22 nt, Human
ugucuaggcugcagugcugugg

SEQ ID NO: 1100279 - RNA, 23 nt, Human
ugucuaggcugcagugcuguggu

SEQ ID NO: 1100280 - RNA, 24 nt, Human
ugucuaggcugcagugcuguggug

SEQ ID NO: 1100281 - RNA, 18 nt, Human
uuaauggggaaaggacag

SEQ ID NO: 1100282 - RNA, 20 nt, Human
uuagccgggcgugguggugc

SEQ ID NO: 1100283 - RNA, 22 nt, Human
uuagccgggcgugguggugcac

SEQ ID NO: 1100284 - RNA, 18 nt, Human
uuaguagagacgggguuu

SEQ ID NO: 1100285 - RNA, 22 nt, Human
uuaguagagacgggguuucacc

SEQ ID NO: 1100286 - RNA, 24 nt, Human
uuaguagagacgggguuucaccau

SEQ ID NO: 1100287 - RNA, 23 nt, Human
uucaagugauucucccaccucgg

SEQ ID NO: 1100288 - RNA, 24 nt, Human
uucaagugauucucccaccucggc

SEQ ID NO: 1100289 - RNA, 20 nt, Human
uucgcuuugucacugaggcu

SEQ ID NO: 1100290 - RNA, 24 nt, Human
uucugaguagcugggauuauaggc

SEQ ID NO: 1100291 - RNA, 20 nt, Human
uugcaaugagccgagaucau

SEQ ID NO: 1100292 - RNA, 25 nt, Human
uugggaggcugaggcggguggauca

SEQ ID NO: 1100293 - RNA, 25 nt, Human
uuguagagauggggucucucccaug

SEQ ID NO: 1100294 - RNA, 23 nt, Human
uuguauuuuuaguagagacgggg

SEQ ID NO: 1100295 - RNA, 18 nt, Human
uugucacugaggcugaag

SEQ ID NO: 1100296 - RNA, 24 nt, Human
uuucaccauguuggccaggcuggu

SEQ ID NO: 1100297 - RNA, 24 nt, Human
uuucgcuuugucacugaggcugaa

SEQ ID NO: 1100298 - RNA, 18 nt, Human
uuuguagagauggggucu

SEQ ID NO: 1100299 - RNA, 25 nt, Human
uuuguagagauggggucucucccau

SEQ ID NO: 1100300 - RNA, 18 nt, Human
uuuuguuuguuugauuuu

SEQ ID NO: 1100301 - RNA, 24 nt, Human
uuuuuaguagagacgggguuucac

SEQ ID NO: 1100302 - RNA, 23 nt, Human
uuuuuggaucugacaccaaagau

SEQ ID NO: 1100303 - RNA, 20 nt, Human
uuuuuguauuuuuaguagag

SEQ ID NO: 1100304 - RNA, 20 nt, Human
uuuuuguauuuuuuguagag

SEQ ID NO: 1100305 - RNA, 23 nt, Human
uuuuuguauuuuuuguagagaug

SEQ ID NO: 1100306 - RNA, 19 nt, Human
uuuuuuguagagauggggu

SEQ ID NO: 1100307 - RNA, 20 nt, Human
uuuuuuuuuuugaaacaggg

SEQ ID NO: 1100308 - RNA, 21 nt, Human
uuuuuuuuuuuugaaacaggc

SEQ ID NO: 1100309 - RNA, 22 nt, Human
uuuuuuuuuuuugaaacaggcu

SEQ ID NO: 1100310 - RNA, 21 nt, Human
aaaaaaacaaaaaacaaaaac

SEQ ID NO: 1100311 - RNA, 24 nt, Human
aaaaaaacaaaaaacaaaaaccac

SEQ ID NO: 1100312 - RNA, 27 nt, Human
aaaaaaacaaaaaacaaaaaccaccaa

SEQ ID NO: 1100313 - RNA, 23 nt, Human
aaaaaacaaaaaccaccaaaaaa

SEQ ID NO: 1100314 - RNA, 30 nt, Human
aaaaaacaaaaaccaccaaaaaacaaaaaa

SEQ ID NO: 1100315 - RNA, 22 nt, Human
aaaaaacaaaaaccaccaaaag

SEQ ID NO: 1100316 - RNA, 20 nt, Human
aaaaaacagcagcacauuaa

SEQ ID NO: 1100317 - RNA, 26 nt, Human
aaaaacaaaaaacaaaaaccaccaaa

SEQ ID NO: 1100318 - RNA, 28 nt, Human
aaaacaaaaaaaacaaaaaacaaaaacc

SEQ ID NO: 1100319 - RNA, 23 nt, Human
aaaacaaaaaccaccaaaaaaca

SEQ ID NO: 1100320 - RNA, 28 nt, Human
aaaacaaaaaccaccaaaaaacaaaaaa

SEQ ID NO: 1100321 - RNA, 25 nt, Human
aaacaaaaaacaaaaaccaccaaaa

SEQ ID NO: 1100322 - RNA, 31 nt, Human
aaacaaaaaacaaaaaccaccaaaaaacaaa

SEQ ID NO: 1100323 - RNA, 24 nt, Human
aaacaaaaaacagcagcacauuaa

SEQ ID NO: 1100324 - RNA, 22 nt, Human
aaaccaggaagagccaagccgc

SEQ ID NO: 1100325 - RNA, 24 nt, Human
aaacccccucucuauuaaaaagac

SEQ ID NO: 1100326 - RNA, 19 nt, Human
aacaaaaaccaccaaaaaa

SEQ ID NO: 1100327 - RNA, 19 nt, Human
aacacggugaaaccccauc

SEQ ID NO: 1100328 - RNA, 20 nt, Human
aacacggugaaaccccaucu

SEQ ID NO: 1100329 - RNA, 21 nt, Human
aacacggugaaaccccaucuc

SEQ ID NO: 1100330 - RNA, 21 nt, Human
aacacggugaaaccccaucuc

SEQ ID NO: 1100331 - RNA, 23 nt, Human
aaccaccaaaaaacaaaaaacag

SEQ ID NO: 1100332 - RNA, 23 nt, Human
aacccauccucauuccuccucua

SEQ ID NO: 1100333 - RNA, 23 nt, Human
aagccgcgacuccccgcucccca

SEQ ID NO: 1100334 - RNA, 18 nt, Human
aagggcucuaggcccugc

SEQ ID NO: 1100335 - RNA, 19 nt, Human
aagggcucuaggcccugca

SEQ ID NO: 1100336 - RNA, 23 nt, Human
acaaaaaacaaaaaccaccaaaa

SEQ ID NO: 1100337 - RNA, 27 nt, Human
acaaaaaacaaaaaccaccaaaaaaca

SEQ ID NO: 1100338 - RNA, 20 nt, Human
acaaaaaccaccaaaaaaca

SEQ ID NO: 1100339 - RNA, 24 nt, Human
acagagcgagacuccaucucaaaa

SEQ ID NO: 1100340 - RNA, 24 nt, Human
acagaguaagacuccaucucaaaa

SEQ ID NO: 1100341 - RNA, 19 nt, Human
accaaaaaacaaaaaacag

SEQ ID NO: 1100342 - RNA, 22 nt, Human
accacugcacuccagccugggc

SEQ ID NO: 1100343 - RNA, 22 nt, Human
accacugcacuccagccugggc

SEQ ID NO: 1100344 - RNA, 24 nt, Human
accauuaucauccacaucuucacc

SEQ ID NO: 1100345 - RNA, 24 nt, Human
acccaggaggcggagguugcagug

SEQ ID NO: 1100346 - RNA, 24 nt, Human
accccaucucuacuaaaaauacaa

SEQ ID NO: 1100347 - RNA, 20 nt, Human
acccuaggcccuccuuucuu

SEQ ID NO: 1100348 - RNA, 24 nt, Human
accugaggucaggaguucaagacc

SEQ ID NO: 1100349 - RNA, 18 nt, Human
acucaagggcagcucugc

SEQ ID NO: 1100350 - RNA, 24 nt, Human
acugcacuccagccugggcgacag

SEQ ID NO: 1100351 - RNA, 24 nt, Human
acugcacuccagccugggcgacag

SEQ ID NO: 1100352 - RNA, 26 nt, Human
acugcacuccagccugggcgacagag

SEQ ID NO: 1100353 - RNA, 26 nt, Human
acugcacuccagccugggcgacagag

SEQ ID NO: 1100354 - RNA, 20 nt, Human
acuugaacccaggaggcgga

SEQ ID NO: 1100355 - RNA, 22 nt, Human
agaauuacuugaacccaggagg

SEQ ID NO: 1100356 - RNA, 22 nt, Human
agaggggaggccgggcgcagug

SEQ ID NO: 1100357 - RNA, 20 nt, Human
agcacuuugggaagcugagg

SEQ ID NO: 1100358 - RNA, 24 nt, Human
agcacuuugggaggccgaggcggg

SEQ ID NO: 1100359 - RNA, 20 nt, Human
agcaggauggaugucugggg

SEQ ID NO: 1100360 - RNA, 23 nt, Human
agccaggcgugguggugggcgcc

SEQ ID NO: 1100361 - RNA, 24 nt, Human
agccuggccaacauggaaaaaccc

SEQ ID NO: 1100362 - RNA, 24 nt, Human
agccuggcuaacacggugaaaccc

SEQ ID NO: 1100363 - RNA, 24 nt, Human
agccugggcgacagagcgagacuc

SEQ ID NO: 1100364 - RNA, 24 nt, Human
agccugggcgacagaguaagacuc

SEQ ID NO: 1100365 - RNA, 21 nt, Human
agcucaugccuguaaucucag

SEQ ID NO: 1100366 - RNA, 23 nt, Human
agcuggguguggugaugggugcc

SEQ ID NO: 1100367 - RNA, 18 nt, Human
aggcaggagaauggugug

SEQ ID NO: 1100368 - RNA, 22 nt, Human
aggcaggagaauggugugaacc

SEQ ID NO: 1100369 - RNA, 24 nt, Human
aggcaggagaauggugugaaccug

SEQ ID NO: 1100370 - RNA, 18 nt, Human
aggcaggagaauuacuug

SEQ ID NO: 1100371 - RNA, 23 nt, Human
aggcaggagaauuacuugaaccc

SEQ ID NO: 1100372 - RNA, 24 nt, Human
aggcaggagaauuacuugaaccca

SEQ ID NO: 1100373 - RNA, 18 nt, Human
aggcaggcggaucaccug

SEQ ID NO: 1100374 - RNA, 22 nt, Human
aggcaggcggaucaccugaggu

SEQ ID NO: 1100375 - RNA, 26 nt, Human
aggcaggcggaucaccugaggucagg

SEQ ID NO: 1100376 - RNA, 20 nt, Human
aggccgaggcggguggauca

SEQ ID NO: 1100377 - RNA, 22 nt, Human
aggccgggcgcaguggcucacg

SEQ ID NO: 1100378 - RNA, 24 nt, Human
aggcggagcuugcagugagccaag

SEQ ID NO: 1100379 - RNA, 24 nt, Human
aggcggagguugcagugagccaag

SEQ ID NO: 1100380 - RNA, 23 nt, Human
aggcggguggaucaugaggucag

SEQ ID NO: 1100381 - RNA, 24 nt, Human
aggcggguggaucaugaggucaga

SEQ ID NO: 1100382 - RNA, 24 nt, Human
aggcgugguagcucaugccuguaa

SEQ ID NO: 1100383 - RNA, 24 nt, Human
aggcgugguggugggcgccuguag

SEQ ID NO: 1100384 - RNA, 19 nt, Human
aggcugaggcaggagaaug

SEQ ID NO: 1100385 - RNA, 24 nt, Human
aguggcucacgccuguaaucccag

SEQ ID NO: 1100386 - RNA, 21 nt, Human
auauaucuauauauauaugca

SEQ ID NO: 1100387 - RNA, 24 nt, Human
aucaccugaggucaggaguucaag

SEQ ID NO: 1100388 - RNA, 24 nt, Human
aucguaccacugcacuccagccug

SEQ ID NO: 1100389 - RNA, 19 nt, Human
augccuguaaucucagcac

SEQ ID NO: 1100390 - RNA, 20 nt, Human
augggugccuguaaucccag

SEQ ID NO: 1100391 - RNA, 27 nt, Human
caaaacaaaaaaaacaaaaaacaaaaa

SEQ ID NO: 1100392 - RNA, 22 nt, Human
caacauggaaaaacccccucuc

SEQ ID NO: 1100393 - RNA, 25 nt, Human
caacauggaaaaacccccucucuau

SEQ ID NO: 1100394 - RNA, 18 nt, Human
caagagggguauccagca

SEQ ID NO: 1100395 - RNA, 23 nt, Human
caccaaaaaacaaaaaacagcag

SEQ ID NO: 1100396 - RNA, 22 nt, Human
caccaggacugugguuggggac

SEQ ID NO: 1100397 - RNA, 23 nt, Human
caccugaggucaggaguucaaga

SEQ ID NO: 1100398 - RNA, 24 nt, Human
cacgccuguaaucccagcacuuug

SEQ ID NO: 1100399 - RNA, 24 nt, Human
cacuccagccugggcgacagagcg

SEQ ID NO: 1100400 - RNA, 19 nt, Human
cacugcacuccagccuggg

SEQ ID NO: 1100401 - RNA, 19 nt, Human
cacugcacuccagccuggg

SEQ ID NO: 1100402 - RNA, 20 nt, Human
cacugcacuccagccugggc

SEQ ID NO: 1100403 - RNA, 20 nt, Human
cacugcacuccagccugggc

SEQ ID NO: 1100404 - RNA, 20 nt, Human
cacugcacuccagccugggc

SEQ ID NO: 1100405 - RNA, 22 nt, Human
cacugcacuccagccugggcga

SEQ ID NO: 1100406 - RNA, 22 nt, Human
cacugcacuccagccugggcga

SEQ ID NO: 1100407 - RNA, 23 nt, Human
cacugcacuccagccugggcgac

SEQ ID NO: 1100408 - RNA, 24 nt, Human
cacugcacuccagccugggcgaca

SEQ ID NO: 1100409 - RNA, 24 nt, Human
cacugcacuccagccugggcgaca

SEQ ID NO: 1100410 - RNA, 27 nt, Human
cacugcacuccagccugggcgacagag

SEQ ID NO: 1100411 - RNA, 25 nt, Human
cagcaacacgggccaggcgugguag

SEQ ID NO: 1100412 - RNA, 18 nt, Human
cagcacauuaacacucac

SEQ ID NO: 1100413 - RNA, 24 nt, Human
cagcacuuugggaagcugaggcag

SEQ ID NO: 1100414 - RNA, 26 nt, Human
cagcacuuugggaagcugaggcaggc

SEQ ID NO: 1100415 - RNA, 24 nt, Human
cagcacuuugggaggccgaggcgg

SEQ ID NO: 1100416 - RNA, 25 nt, Human
cagcagcaucccugagaugcuuggc

SEQ ID NO: 1100417 - RNA, 19 nt, Human
cagcccaccucccaccugu

SEQ ID NO: 1100418 - RNA, 24 nt, Human
cagcuacuugggaggcugaggcag

SEQ ID NO: 1100419 - RNA, 21 nt, Human
cagcuccccguccccuccucc

SEQ ID NO: 1100420 - RNA, 19 nt, Human
cagcuccuggugcaggugg

SEQ ID NO: 1100421 - RNA, 24 nt, Human
caggcggaucaccugaggucagga

SEQ ID NO: 1100422 - RNA, 20 nt, Human
caggcgugguagcucaugcc

SEQ ID NO: 1100423 - RNA, 27 nt, Human
caucucaaaacaaaaaaaacaaaaaac

SEQ ID NO: 1100424 - RNA, 24 nt, Human
caugccuguaaucucagcacuuug

SEQ ID NO: 1100425 - RNA, 20 nt, Human
ccacugcacuccagccuggg

SEQ ID NO: 1100426 - RNA, 20 nt, Human
ccacugcacuccagccuggg

SEQ ID NO: 1100427 - RNA, 20 nt, Human
ccacugcacuccagccuggg

SEQ ID NO: 1100428 - RNA, 21 nt, Human
ccacugcacuccagccugggc

SEQ ID NO: 1100429 - RNA, 21 nt, Human
ccacugcacuccagccugggc

SEQ ID NO: 1100430 - RNA, 21 nt, Human
ccacugcacuccagccugggc

SEQ ID NO: 1100431 - RNA, 21 nt, Human
ccacugcacuccagccugggc

SEQ ID NO: 1100432 - RNA, 21 nt, Human
ccacugcacuccagccugggc

SEQ ID NO: 1100433 - RNA, 23 nt, Human
ccacugcacuccagccugggcga

SEQ ID NO: 1100434 - RNA, 23 nt, Human
ccacugcacuccagccugggcga

SEQ ID NO: 1100435 - RNA, 23 nt, Human
ccacugcacuccagccugggcga

SEQ ID NO: 1100436 - RNA, 24 nt, Human
ccacugcacuccagccugggcgac

SEQ ID NO: 1100437 - RNA, 24 nt, Human
ccacugcacuccagccugggcgac

SEQ ID NO: 1100438 - RNA, 22 nt, Human
ccaguuggauggguggcgggga

SEQ ID NO: 1100439 - RNA, 23 nt, Human
ccaucaccguggggccuguguua

SEQ ID NO: 1100440 - RNA, 23 nt, Human
ccaucucaaaacaaaaaaaacaa

SEQ ID NO: 1100441 - RNA, 25 nt, Human
ccaucucaaaacaaaaaaaacaaaa

SEQ ID NO: 1100442 - RNA, 22 nt, Human
ccccgcuccccaacccauccuc

SEQ ID NO: 1100443 - RNA, 18 nt, Human
ccccuccuccuucuuguc

SEQ ID NO: 1100444 - RNA, 18 nt, Human
cccuccuccuucuugucu

SEQ ID NO: 1100445 - RNA, 23 nt, Human
cccugcugagagugcucucccca

SEQ ID NO: 1100446 - RNA, 19 nt, Human
ccgguugcuagggcacagg

SEQ ID NO: 1100447 - RNA, 20 nt, Human
ccuccuccuucuugucuuca

SEQ ID NO: 1100448 - RNA, 22 nt, Human
ccugcugagagugcucucccca

SEQ ID NO: 1100449 - RNA, 24 nt, Human
ccuggcuaacacggugaaacccca

SEQ ID NO: 1100450 - RNA, 22 nt, Human
ccugggcgacagagcgagacuc

SEQ ID NO: 1100451 - RNA, 22 nt, Human
ccugggcgacagaguaagacuc

SEQ ID NO: 1100452 - RNA, 21 nt, Human
ccuguaaucccagcuacuugg

SEQ ID NO: 1100453 - RNA, 21 nt, Human
ccuguagucccagcuacuugg

SEQ ID NO: 1100454 - RNA, 25 nt, Human
ccuguggccaucaccguggggccug

SEQ ID NO: 1100455 - RNA, 25 nt, Human
cgacuccccgcuccccaacccaucc

SEQ ID NO: 1100456 - RNA, 24 nt, Human
cgagaccagccuggcuaacacggu

SEQ ID NO: 1100457 - RNA, 23 nt, Human
cgagacuccaucucaaaaaaaaa

SEQ ID NO: 1100458 - RNA, 22 nt, Human
cgaggcggguggaucaugaggu

SEQ ID NO: 1100459 - RNA, 24 nt, Human
cgaggcggguggaucaugagguca

SEQ ID NO: 1100460 - RNA, 23 nt, Human
cgccuguaaucccagcacuuugg

SEQ ID NO: 1100461 - RNA, 24 nt, Human
cgccuguaaucccagcacuuuggg

SEQ ID NO: 1100462 - RNA, 23 nt, Human
cgccuguagucccagcuacuugg

SEQ ID NO: 1100463 - RNA, 24 nt, Human
cgccuguagucccagcuacuuggg

SEQ ID NO: 1100464 - RNA, 24 nt, Human
cggaucaccugaggucaggaguuc

SEQ ID NO: 1100465 - RNA, 20 nt, Human
cuaggcccuccuuucuucug

SEQ ID NO: 1100466 - RNA, 20 nt, Human
cuaggcccugcagggagcuc

SEQ ID NO: 1100467 - RNA, 26 nt, Human
cucaaaacaaaaaaaacaaaaaacaa

SEQ ID NO: 1100468 - RNA, 26 nt, Human
cucaaaacaaaaaaaacaaaaaacaa

SEQ ID NO: 1100469 - RNA, 22 nt, Human
cucacgccuguaaucccagcac

SEQ ID NO: 1100470 - RNA, 24 nt, Human
cucacgccuguaaucccagcacuu

SEQ ID NO: 1100471 - RNA, 20 nt, Human
cucaucagcagcaucccuga

SEQ ID NO: 1100472 - RNA, 22 nt, Human
cucaucagcagcaucccugaga

SEQ ID NO: 1100473 - RNA, 24 nt, Human
cucaugccuguaaucucagcacuu

SEQ ID NO: 1100474 - RNA, 19 nt, Human
cuccaucucaaaaaaaaaa

SEQ ID NO: 1100475 - RNA, 22 nt, Human
cuccuggugcagguggcuacag

SEQ ID NO: 1100476 - RNA, 22 nt, Human
cugaauuccccuuuacacuuua

SEQ ID NO: 1100477 - RNA, 23 nt, Human
cuggcuaacacggugaaacccca

SEQ ID NO: 1100478 - RNA, 20 nt, Human
cugggucucagcuccccguc

SEQ ID NO: 1100479 - RNA, 20 nt, Human
cuucugggucucagcucccc

SEQ ID NO: 1100480 - RNA, 18 nt, Human
gagcuugcagugagccaa

SEQ ID NO: 1100481 - RNA, 23 nt, Human
gagcuugcagugagccaagaucg

SEQ ID NO: 1100482 - RNA, 21 nt, Human
gaggcggagguugcagugagc

SEQ ID NO: 1100483 - RNA, 23 nt, Human
gagguugcagugagccaagaucg

SEQ ID NO: 1100484 - RNA, 21 nt, Human
gaucaccugaggucaggaguu

SEQ ID NO: 1100485 - RNA, 23 nt, Human
gaucaccugaggucaggaguuca

SEQ ID NO: 1100486 - RNA, 24 nt, Human
gaucaccugaggucaggaguucaa

SEQ ID NO: 1100487 - RNA, 26 nt, Human
gaucgccaccacugcacuccagccug

SEQ ID NO: 1100488 - RNA, 21 nt, Human
gcaccauuaucauccacaucu

SEQ ID NO: 1100489 - RNA, 24 nt, Human
gcacuccagccugggcgacagagc

SEQ ID NO: 1100490 - RNA, 24 nt, Human
gcacuccagccugggcgacagagu

SEQ ID NO: 1100491 - RNA, 22 nt, Human
gcaggagaauuacuugaaccca

SEQ ID NO: 1100492 - RNA, 20 nt, Human
gccaagaucguaccacugca

SEQ ID NO: 1100493 - RNA, 18 nt, Human
gcccuccuuucuucuggg

SEQ ID NO: 1100494 - RNA, 23 nt, Human
gccuguagucccagcuacuuggg

SEQ ID NO: 1100495 - RNA, 20 nt, Human
gcgcaguggcucacgccugu

SEQ ID NO: 1100496 - RNA, 23 nt, Human
gcggguggaucaugaggucagau

SEQ ID NO: 1100497 - RNA, 24 nt, Human
gcuaacacggugaaaccccaucuc

SEQ ID NO: 1100498 - RNA, 18 nt, Human
gcucuguccccguccucc

SEQ ID NO: 1100499 - RNA, 18 nt, Human
ggagcucuggggugcagg

SEQ ID NO: 1100500 - RNA, 24 nt, Human
ggagcuugcagugagccaagaucg

SEQ ID NO: 1100501 - RNA, 20 nt, Human
ggagguugcagugagccaag

SEQ ID NO: 1100502 - RNA, 24 nt, Human
ggagguugcagugagccaagaucg

SEQ ID NO: 1100503 - RNA, 23 nt, Human
ggaucaccugaggucaggaguuc

SEQ ID NO: 1100504 - RNA, 25 nt, Human
ggaucaccugaggucaggaguucaa

SEQ ID NO: 1100505 - RNA, 18 nt, Human
ggauggguggcggggagu

SEQ ID NO: 1100506 - RNA, 22 nt, Human
ggcaccauuaucauccacaucu

SEQ ID NO: 1100507 - RNA, 22 nt, Human
ggcagguccagcuccuggugca

SEQ ID NO: 1100508 - RNA, 21 nt, Human
ggccaggcgugguagcucaug

SEQ ID NO: 1100509 - RNA, 23 nt, Human
ggccaggcgugguagcucaugcc

SEQ ID NO: 1100510 - RNA, 24 nt, Human
ggccuccauggcccaggcuauccc

SEQ ID NO: 1100511 - RNA, 23 nt, Human
ggcgcaguggcucacgccuguaa

SEQ ID NO: 1100512 - RNA, 19 nt, Human
gggaaaagagcccaagagc

SEQ ID NO: 1100513 - RNA, 22 nt, Human
ggggagggauguuaauacagca

SEQ ID NO: 1100514 - RNA, 18 nt, Human
gggugccuguaaucccag

SEQ ID NO: 1100515 - RNA, 24 nt, Human
gguagcucaugccuguaaucucag

SEQ ID NO: 1100516 - RNA, 24 nt, Human
ggugaugggugccuguaaucccag

SEQ ID NO: 1100517 - RNA, 24 nt, Human
ggugccuguaaucccagcuacuug

SEQ ID NO: 1100518 - RNA, 24 nt, Human
gguggugggcgccuguagucccag

SEQ ID NO: 1100519 - RNA, 18 nt, Human
uaaaacagcaacacgggc

SEQ ID NO: 1100520 - RNA, 22 nt, Human
uaacacggugaaaccccaucuc

SEQ ID NO: 1100521 - RNA, 24 nt, Human
uaacacggugaaaccccaucucua

SEQ ID NO: 1100522 - RNA, 22 nt, Human
uacaauagaguuaagcaauaaa

SEQ ID NO: 1100523 - RNA, 22 nt, Human
uaccacugcacuccagccuggg

SEQ ID NO: 1100524 - RNA, 22 nt, Human
uagcucaugccuguaaucucag

SEQ ID NO: 1100525 - RNA, 24 nt, Human
uagcucaugccuguaaucucagca

SEQ ID NO: 1100526 - RNA, 22 nt, Human
uauauaucuauauauauaugca

SEQ ID NO: 1100527 - RNA, 22 nt, Human
uauauguauauaucuauauaua

SEQ ID NO: 1100528 - RNA, 18 nt, Human
uauguauauaucuauaua

SEQ ID NO: 1100529 - RNA, 20 nt, Human
uauguauauaucuauauaua

SEQ ID NO: 1100530 - RNA, 18 nt, Human
ucaaaaaaaaaaaagaug

SEQ ID NO: 1100531 - RNA, 18 nt, Human
ucagcuccccguccccuc

SEQ ID NO: 1100532 - RNA, 21 nt, Human
ucaugaggucagaucgagacc

SEQ ID NO: 1100533 - RNA, 23 nt, Human
uccagccugggcgacagagcgag

SEQ ID NO: 1100534 - RNA, 24 nt, Human
uccagccugggcgacagagcgaga

SEQ ID NO: 1100535 - RNA, 24 nt, Human
uccagccugggcgacagaguaaga

SEQ ID NO: 1100536 - RNA, 23 nt, Human
uccaucucaaaacaaaaaaaaca

SEQ ID NO: 1100537 - RNA, 20 nt, Human
ucccucucagaaaccaggaa

SEQ ID NO: 1100538 - RNA, 26 nt, Human
ucccugcugagagugcucuccccacc

SEQ ID NO: 1100539 - RNA, 19 nt, Human
ucgccaccacugcacucca

SEQ ID NO: 1100540 - RNA, 23 nt, Human
ucguaccacugcacuccagccug

SEQ ID NO: 1100541 - RNA, 24 nt, Human
ucucuacuaaaaauacaaaaaauu

SEQ ID NO: 1100542 - RNA, 21 nt, Human
ucucuauuaaaaagacgaaaa

SEQ ID NO: 1100543 - RNA, 19 nt, Human
ugaaaccccaucucuacua

SEQ ID NO: 1100544 - RNA, 20 nt, Human
ugaagggcucuaggcccugc

SEQ ID NO: 1100545 - RNA, 21 nt, Human
ugaagggcucuaggcccugca

SEQ ID NO: 1100546 - RNA, 22 nt, Human
ugagaggggaggccgggcgcag

SEQ ID NO: 1100547 - RNA, 23 nt, Human
ugaggcaggagaauggugugaac

SEQ ID NO: 1100548 - RNA, 24 nt, Human
ugaggcaggagaauggugugaacc

SEQ ID NO: 1100549 - RNA, 25 nt, Human
ugaggcaggagaauggugugaaccu

SEQ ID NO: 1100550 - RNA, 24 nt, Human
ugaggcaggagaauuacuugaacc

SEQ ID NO: 1100551 - RNA, 25 nt, Human
ugaggcaggagaauuacuugaaccc

SEQ ID NO: 1100552 - RNA, 20 nt, Human
ugaggcaggcggaucaccug

SEQ ID NO: 1100553 - RNA, 26 nt, Human
ugaggcaggcggaucaccugagguca

SEQ ID NO: 1100554 - RNA, 20 nt, Human
ugccuguaaucccagcuacu

SEQ ID NO: 1100555 - RNA, 23 nt, Human
ugccuguaaucccagcuacuugg

SEQ ID NO: 1100556 - RNA, 23 nt, Human
ugccuguaaucucagcacuuugg

SEQ ID NO: 1100557 - RNA, 24 nt, Human
ugccuguaaucucagcacuuuggg

SEQ ID NO: 1100558 - RNA, 22 nt, Human
uggaaaaacccccucucuauua

SEQ ID NO: 1100559 - RNA, 24 nt, Human
uggaaaaacccccucucuauuaaa

SEQ ID NO: 1100560 - RNA, 20 nt, Human
uggaaagcugaggcaggaga

SEQ ID NO: 1100561 - RNA, 20 nt, Human
uggcaauacccuaggcccuc

SEQ ID NO: 1100562 - RNA, 18 nt, Human
uggcagcaccuuuaaaac

SEQ ID NO: 1100563 - RNA, 22 nt, Human
uggcucacgccuguaaucccag

SEQ ID NO: 1100564 - RNA, 24 nt, Human
uggcucacgccuguaaucccagca

SEQ ID NO: 1100565 - RNA, 24 nt, Human
ugggaagcugaggcaggcggauca

SEQ ID NO: 1100566 - RNA, 23 nt, Human
ugggaggccgaggcggguggauc

SEQ ID NO: 1100567 - RNA, 24 nt, Human
ugggaggccgaggcggguggauca

SEQ ID NO: 1100568 - RNA, 29 nt, Human
ugggaggcggagcuugcagugacaacggu

SEQ ID NO: 1100569 - RNA, 24 nt, Human
ugggaggcggagcuugcagugagc

SEQ ID NO: 1100570 - RNA, 18 nt, Human
ugggaggcugaggcagga

SEQ ID NO: 1100571 - RNA, 24 nt, Human
ugggaggcugaggcaggagaaugg

SEQ ID NO: 1100572 - RNA, 22 nt, Human
uggggaaaagagcccaagagcc

SEQ ID NO: 1100573 - RNA, 24 nt, Human
ugguagcucaugccuguaaucuca

SEQ ID NO: 1100574 - RNA, 20 nt, Human
uggucaggacauucuggcgg

SEQ ID NO: 1100575 - RNA, 24 nt, Human
uggugaugggugccuguaauccca

SEQ ID NO: 1100576 - RNA, 19 nt, Human
uggugcagguggcuacagg

SEQ ID NO: 1100577 - RNA, 24 nt, Human
ugguggugggcgccuguaguccca

SEQ ID NO: 1100578 - RNA, 24 nt, Human
uuacuugaacccaggaggcggagg

SEQ ID NO: 1100579 - RNA, 24 nt, Human
uuagccaggcgugguggugggcgc

SEQ ID NO: 1100580 - RNA, 24 nt, Human
uuagcuggguguggugaugggugc

SEQ ID NO: 1100581 - RNA, 24 nt, Human
uugaacccaggaggcggagguugc

SEQ ID NO: 1100582 - RNA, 20 nt, Human
uugcagugagccaagaucgc

SEQ ID NO: 1100583 - RNA, 22 nt, Human
uugcagugagccaagaucguac

SEQ ID NO: 1100584 - RNA, 23 nt, Human
uuggaaagcugaggcaggagaau

SEQ ID NO: 1100585 - RNA, 19 nt, Human
uuggauggguggcggggag

SEQ ID NO: 1100586 - RNA, 25 nt, Human
uugggaagcugaggcaggcggauca

SEQ ID NO: 1100587 - RNA, 25 nt, Human
uugggaggccgaggcggguggauca

SEQ ID NO: 1100588 - RNA, 21 nt, Human
uuuggaaaucaaggcaccauu

SEQ ID NO: 1100589 - RNA, 23 nt, Human
aaaaugccuuuaaccccaccucu

SEQ ID NO: 1100590 - RNA, 24 nt, Human
aaaaugccuuuaaccccaccucug

SEQ ID NO: 1100591 - RNA, 24 nt, Human
aaagugcugggauuacagguguga

SEQ ID NO: 1100592 - RNA, 18 nt, Human
aagugcugggauuacagg

SEQ ID NO: 1100593 - RNA, 19 nt, Human
aagugcugggauuacaggu

SEQ ID NO: 1100594 - RNA, 26 nt, Human
aagugcugggauuacaggugugagcc

SEQ ID NO: 1100595 - RNA, 24 nt, Human
accuugugauccgcccgccucggc

SEQ ID NO: 1100596 - RNA, 21 nt, Human
acuacaggugccugccaccau

SEQ ID NO: 1100597 - RNA, 25 nt, Human
acucugucgcccaggcuggagugca

SEQ ID NO: 1100598 - RNA, 20 nt, Human
acugcaagcuccgccuccug

SEQ ID NO: 1100599 - RNA, 19 nt, Human
acuuugcacucauuuggcc

SEQ ID NO: 1100600 - RNA, 19 nt, Human
agagaugggguuucaccgu

SEQ ID NO: 1100601 - RNA, 18 nt, Human
agcuccgccuccuggguu

SEQ ID NO: 1100602 - RNA, 18 nt, Human
aggauggucucgaacucc

SEQ ID NO: 1100603 - RNA, 25 nt, Human
aggcuggagugcaguggcgcgaucu

SEQ ID NO: 1100604 - RNA, 18 nt, Human
aguagcugggacuacagg

SEQ ID NO: 1100605 - RNA, 23 nt, Human
agugcaguggcgcgaucuuggcu

SEQ ID NO: 1100606 - RNA, 24 nt, Human
agugcaguggcgcgaucuuggcuc

SEQ ID NO: 1100607 - RNA, 23 nt, Human
augccuuuaaccccaccucugau

SEQ ID NO: 1100608 - RNA, 18 nt, Human
augggguuucaccguguu

SEQ ID NO: 1100609 - RNA, 19 nt, Human
augggguuucaccguguua

SEQ ID NO: 1100610 - RNA, 21 nt, Human
auucuccugccucagccuccc

SEQ ID NO: 1100611 - RNA, 24 nt, Human
caaagugcugggauuacaggugug

SEQ ID NO: 1100612 - RNA, 24 nt, Human
caccguguuagacaggauggucuc

SEQ ID NO: 1100613 - RNA, 22 nt, Human
cacgccauucuccugccucagc

SEQ ID NO: 1100614 - RNA, 22 nt, Human
cacucugucgcccaggcuggag

SEQ ID NO: 1100615 - RNA, 21 nt, Human
caggugccugccaccaugucc

SEQ ID NO: 1100616 - RNA, 19 nt, Human
caguggcgcgaucuuggcu

SEQ ID NO: 1100617 - RNA, 21 nt, Human
ccaaagugcugggauuacagg

SEQ ID NO: 1100618 - RNA, 21 nt, Human
ccaaagugcugggauuacagg

SEQ ID NO: 1100619 - RNA, 24 nt, Human
ccaaagugcugggauuacaggugu

SEQ ID NO: 1100620 - RNA, 23 nt, Human
cccgaguagcugggacuacaggu

SEQ ID NO: 1100621 - RNA, 24 nt, Human
cccgaguagcugggacuacaggug

SEQ ID NO: 1100622 - RNA, 22 nt, Human
ccgcgcccggccuggcagaacc

SEQ ID NO: 1100623 - RNA, 24 nt, Human
ccuccagcacaucuuuccgagagc

SEQ ID NO: 1100624 - RNA, 23 nt, Human
ccugccucagccucccgaguagc

SEQ ID NO: 1100625 - RNA, 24 nt, Human
ccugccucagccucccgaguagcu

SEQ ID NO: 1100626 - RNA, 24 nt, Human
cgcccaggcuggagugcaguggcg

SEQ ID NO: 1100627 - RNA, 19 nt, Human
cgccuccuggguucacgcc

SEQ ID NO: 1100628 - RNA, 24 nt, Human
cucacucugucgcccaggcuggag

SEQ ID NO: 1100629 - RNA, 24 nt, Human
cucagccucccgaguagcugggac

SEQ ID NO: 1100630 - RNA, 24 nt, Human
cuccugaccuugugauccgcccgc

SEQ ID NO: 1100631 - RNA, 21 nt, Human
cuccuggguucacgccauucu

SEQ ID NO: 1100632 - RNA, 19 nt, Human
cugucgcccaggcuggagu

SEQ ID NO: 1100633 - RNA, 22 nt, Human
gaccuugugauccgcccgccuc

SEQ ID NO: 1100634 - RNA, 24 nt, Human
gaccuugugauccgcccgccucgg

SEQ ID NO: 1100635 - RNA, 24 nt, Human
gacuacaggugccugccaccaugu

SEQ ID NO: 1100636 - RNA, 18 nt, Human
gauuacaggugugagcca

SEQ ID NO: 1100637 - RNA, 20 nt, Human
gauuacaggugugagccacc

SEQ ID NO: 1100638 - RNA, 22 nt, Human
gauuacaggugugagccaccgc

SEQ ID NO: 1100639 - RNA, 19 nt, Human
gcagaaccuucuuaacaag

SEQ ID NO: 1100640 - RNA, 21 nt, Human
gcagaaccuucuuaacaagga

SEQ ID NO: 1100641 - RNA, 20 nt, Human
gcccaggcuggagugcagug

SEQ ID NO: 1100642 - RNA, 25 nt, Human
gccuccuggguucacgccauucucc

SEQ ID NO: 1100643 - RNA, 23 nt, Human
gccucggccucccaaagugcugg

SEQ ID NO: 1100644 - RNA, 19 nt, Human
gcuggagugcaguggcgcg

SEQ ID NO: 1100645 - RNA, 18 nt, Human
gggguuucaccguguuag

SEQ ID NO: 1100646 - RNA, 19 nt, Human
ggucucgaacuccugaccu

SEQ ID NO: 1100647 - RNA, 20 nt, Human
ggucucgaacuccugaccuu

SEQ ID NO: 1100648 - RNA, 24 nt, Human
guccgacuaauuuuuuuguauuuu

SEQ ID NO: 1100649 - RNA, 24 nt, Human
gugauccgcccgccucggccuccc

SEQ ID NO: 1100650 - RNA, 26 nt, Human
uaauuuuuuuguauuuuuaguagaga

SEQ ID NO: 1100651 - RNA, 23 nt, Human
uacaggugugagccaccgcgccc

SEQ ID NO: 1100652 - RNA, 21 nt, Human
uaguagagaugggguuucacc

SEQ ID NO: 1100653 - RNA, 24 nt, Human
uaguagagaugggguuucaccgug

SEQ ID NO: 1100654 - RNA, 26 nt, Human
uaguagagaugggguuucaccguguu

SEQ ID NO: 1100655 - RNA, 24 nt, Human
uaugcuagaagacuagcacaucua

SEQ ID NO: 1100656 - RNA, 19 nt, Human
ucaccguguuagacaggau

SEQ ID NO: 1100657 - RNA, 24 nt, Human
ucaccguguuagacaggauggucu

SEQ ID NO: 1100658 - RNA, 18 nt, Human
ucacugcaagcuccgccu

SEQ ID NO: 1100659 - RNA, 23 nt, Human
ucacugcaagcuccgccuccugg

SEQ ID NO: 1100660 - RNA, 24 nt, Human
ucacugcaagcuccgccuccuggg

SEQ ID NO: 1100661 - RNA, 23 nt, Human
ucagccucccgaguagcugggac

SEQ ID NO: 1100662 - RNA, 23 nt, Human
ucccaaagugcugggauuacagg

SEQ ID NO: 1100663 - RNA, 23 nt, Human
ucccgaguagcugggacuacagg

SEQ ID NO: 1100664 - RNA, 24 nt, Human
ucccgaguagcugggacuacaggu

SEQ ID NO: 1100665 - RNA, 24 nt, Human
uccuggguucacgccauucuccug

SEQ ID NO: 1100666 - RNA, 22 nt, Human
ucgcccaggcuggagugcagug

SEQ ID NO: 1100667 - RNA, 18 nt, Human
ucggccucccaaagugcu

SEQ ID NO: 1100668 - RNA, 22 nt, Human
ucucacucugucgcccaggcug

SEQ ID NO: 1100669 - RNA, 23 nt, Human
ucucacucugucgcccaggcugg

SEQ ID NO: 1100670 - RNA, 24 nt, Human
ucucacucugucgcccaggcugga

SEQ ID NO: 1100671 - RNA, 26 nt, Human
ucucacucugucgcccaggcuggagu

SEQ ID NO: 1100672 - RNA, 24 nt, Human
ucuccugccucagccucccgagua

SEQ ID NO: 1100673 - RNA, 24 nt, Human
ucugucgcccaggcuggagugcag

SEQ ID NO: 1100674 - RNA, 22 nt, Human
ugcaguggcgcgaucuuggcuc

SEQ ID NO: 1100675 - RNA, 24 nt, Human
ugccucagccucccgaguagcugg

SEQ ID NO: 1100676 - RNA, 24 nt, Human
ugccuuuaaccccaccucugauuc

SEQ ID NO: 1100677 - RNA, 24 nt, Human
ugcugggauuacaggugugagcca

SEQ ID NO: 1100678 - RNA, 23 nt, Human
uggagugcaguggcgcgaucuug

SEQ ID NO: 1100679 - RNA, 24 nt, Human
uggagugcaguggcgcgaucuugg

SEQ ID NO: 1100680 - RNA, 18 nt, Human
uggcucacugcaagcucc

SEQ ID NO: 1100681 - RNA, 23 nt, Human
ugggaaaaaugccuuuaacccca

SEQ ID NO: 1100682 - RNA, 21 nt, Human
ugggacuacaggugccugcca

SEQ ID NO: 1100683 - RNA, 22 nt, Human
ugggacuacaggugccugccac

SEQ ID NO: 1100684 - RNA, 24 nt, Human
ugggacuacaggugccugccacca

SEQ ID NO: 1100685 - RNA, 25 nt, Human
ugggacuacaggugccugccaccau

SEQ ID NO: 1100686 - RNA, 18 nt, Human
ugggauuacaggugugag

SEQ ID NO: 1100687 - RNA, 19 nt, Human
ugggauuacaggugugagc

SEQ ID NO: 1100688 - RNA, 21 nt, Human
ugggauuacaggugugagcca

SEQ ID NO: 1100689 - RNA, 22 nt, Human
ugggauuacaggugugagccac

SEQ ID NO: 1100690 - RNA, 23 nt, Human
ugggauuacaggugugagccacc

SEQ ID NO: 1100691 - RNA, 24 nt, Human
ugggauuacaggugugagccaccg

SEQ ID NO: 1100692 - RNA, 24 nt, Human
ugggguuucaccguguuagacagg

SEQ ID NO: 1100693 - RNA, 20 nt, Human
uggguucacgccauucuccu

SEQ ID NO: 1100694 - RNA, 18 nt, Human
ugguggggaaaacagacu

SEQ ID NO: 1100695 - RNA, 18 nt, Human
uuaguagagaugggguuu

SEQ ID NO: 1100696 - RNA, 22 nt, Human
uuaguagagaugggguuucacc

SEQ ID NO: 1100697 - RNA, 24 nt, Human
uuaguagagaugggguuucaccgu

SEQ ID NO: 1100698 - RNA, 23 nt, Human
uuguauuuuuaguagagaugggg

SEQ ID NO: 1100699 - RNA, 20 nt, Human
uuuuguauuuuuaguagaga

SEQ ID NO: 1100700 - RNA, 24 nt, Human
uuuuuaguagagaugggguuucac

SEQ ID NO: 1100701 - RNA, 21 nt, Human
uuuuuguauuuuuaguagaga

SEQ ID NO: 1100702 - RNA, 21 nt, Human
uuuuuuguauuuuuaguagag

SEQ ID NO: 1100703 - RNA, 19 nt, Human
agccgucacuguuggggau

SEQ ID NO: 1100704 - RNA, 18 nt, Human
aucaguucucguucaucu

SEQ ID NO: 1100705 - RNA, 20 nt, Human
cucauggaagcccagcuccc

SEQ ID NO: 1100706 - RNA, 19 nt, Human
gaguuggggagcggggagg

SEQ ID NO: 1100707 - RNA, 20 nt, Human
gucuaggggcggcaugcucc

SEQ ID NO: 1100708 - RNA, 18 nt, Human
guggugcaggggaagccc

SEQ ID NO: 1100709 - RNA, 20 nt, Human
uacagcccuugcagcucggc

SEQ ID NO: 1100710 - RNA, 21 nt, Human
ucccuaucuuucuccggcucc

SEQ ID NO: 1100711 - RNA, 21 nt, Human
uggaagcccagcucccuaucu

SEQ ID NO: 1100712 - RNA, 21 nt, Human
uggggaagggagccgucacug

SEQ ID NO: 1100713 - RNA, 21 nt, Human
ugucguaagaucggaaagagg

SEQ ID NO: 1100714 - RNA, 20 nt, Human
aaacaucccgaaagaaucuc

SEQ ID NO: 1100715 - RNA, 18 nt, Human
auacugagcauaugcggc

SEQ ID NO: 1100716 - RNA, 20 nt, Human
aucucuucuuuuccuuucag

SEQ ID NO: 1100717 - RNA, 21 nt, Human
cagcccccggauuuccccccu

SEQ ID NO: 1100718 - RNA, 25 nt, Human
caucagggccucaugggguccaacg

SEQ ID NO: 1100719 - RNA, 19 nt, Human
ccccgagcccgcggcgccc

SEQ ID NO: 1100720 - RNA, 19 nt, Human
ccccggcugggcccagacc

SEQ ID NO: 1100721 - RNA, 21 nt, Human
cccgcggcgcccccuccccgg

SEQ ID NO: 1100722 - RNA, 21 nt, Human
cccuuuaacucggguggcccc

SEQ ID NO: 1100723 - RNA, 19 nt, Human
ccuuuaacucggguggccc

SEQ ID NO: 1100724 - RNA, 18 nt, Human
cggcgcccccuccccggg

SEQ ID NO: 1100725 - RNA, 22 nt, Human
cggcgcccccuccccgggcugg

SEQ ID NO: 1100726 - RNA, 21 nt, Human
cugggggcaggugccucuccc

SEQ ID NO: 1100727 - RNA, 24 nt, Human
gauccuuuguguuuuccaucaggg

SEQ ID NO: 1100728 - RNA, 21 nt, Human
gcagcagcccccggauuuccc

SEQ ID NO: 1100729 - RNA, 19 nt, Human
ggcaggugccucuccccgg

SEQ ID NO: 1100730 - RNA, 23 nt, Human
gggcaggugccucuccccgggac

SEQ ID NO: 1100731 - RNA, 20 nt, Human
gggcccccggcugggcccag

SEQ ID NO: 1100732 - RNA, 24 nt, Human
ucagauccuuuguguuuuccauca

SEQ ID NO: 1100733 - RNA, 19 nt, Human
ucagggccucauggguagg

SEQ ID NO: 1100734 - RNA, 20 nt, Human
ugcagaggggacggcugcuu

SEQ ID NO: 1100735 - RNA, 20 nt, Human
ugggggcaggugccucuccc

SEQ ID NO: 1100736 - RNA, 23 nt, Human
ugggggcaggugccucuccccgg

SEQ ID NO: 1100737 - RNA, 19 nt, Human
uuccccccuuuaacucggg

SEQ ID NO: 1100738 - RNA, 21 nt, Human
aacagagccagacuccgucuc

SEQ ID NO: 1100739 - RNA, 25 nt, Human
aacugaaauuacaaacauaaggaca

SEQ ID NO: 1100740 - RNA, 24 nt, Human
aagcacuucgggaggccaaggcgg

SEQ ID NO: 1100741 - RNA, 19 nt, Human
aaggacaagccuuuaaagc

SEQ ID NO: 1100742 - RNA, 22 nt, Human
aaugaacaauacaguaacugaa

SEQ ID NO: 1100743 - RNA, 23 nt, Human
acagagccagacuccgucucaaa

SEQ ID NO: 1100744 - RNA, 24 nt, Human
acagagccagacuccgucucaaaa

SEQ ID NO: 1100745 - RNA, 19 nt, Human
acauuccuuugcugcuugu

SEQ ID NO: 1100746 - RNA, 22 nt, Human
accacugcauuccagccugggc

SEQ ID NO: 1100747 - RNA, 24 nt, Human
acccugucucuacuaaaaauacaa

SEQ ID NO: 1100748 - RNA, 21 nt, Human
acgcaagccucuucucucccu

SEQ ID NO: 1100749 - RNA, 24 nt, Human
acugcauuccagccugggcaacag

SEQ ID NO: 1100750 - RNA, 24 nt, Human
acugcauuccagccugggcaacag

SEQ ID NO: 1100751 - RNA, 20 nt, Human
agaacuacuugaaccugaga

SEQ ID NO: 1100752 - RNA, 21 nt, Human
agaagcuuacauuuuggcauu

SEQ ID NO: 1100753 - RNA, 22 nt, Human
agaucaucugaggucaggaguu

SEQ ID NO: 1100754 - RNA, 22 nt, Human
agccuggccaauguggugaaac

SEQ ID NO: 1100755 - RNA, 24 nt, Human
agccuggccaauguggugaaaccc

SEQ ID NO: 1100756 - RNA, 25 nt, Human
agccuggccaauguggugaaacccu

SEQ ID NO: 1100757 - RNA, 24 nt, Human
agccugggcaacagagccagacuc

SEQ ID NO: 1100758 - RNA, 23 nt, Human
agcugcaauuaagagauucauuc

SEQ ID NO: 1100759 - RNA, 20 nt, Human
aggaguuugagaccagccug

SEQ ID NO: 1100760 - RNA, 22 nt, Human
aggcaggagaacuacuugaacc

SEQ ID NO: 1100761 - RNA, 24 nt, Human
aggcaggagaacuacuugaaccug

SEQ ID NO: 1100762 - RNA, 19 nt, Human
aggcauuuuuguccucucu

SEQ ID NO: 1100763 - RNA, 20 nt, Human
aggccaaggcggguagauca

SEQ ID NO: 1100764 - RNA, 26 nt, Human
aggcggguagaucaucugaggucagg

SEQ ID NO: 1100765 - RNA, 24 nt, Human
aggcugaggcaggagaacuacuug

SEQ ID NO: 1100766 - RNA, 19 nt, Human
aggucaggaguuugagacc

SEQ ID NO: 1100767 - RNA, 24 nt, Human
agguggagguugcagugagcugag

SEQ ID NO: 1100768 - RNA, 20 nt, Human
aguaguccuucugaugauug

SEQ ID NO: 1100769 - RNA, 20 nt, Human
aucaucugaggucaggaguu

SEQ ID NO: 1100770 - RNA, 24 nt, Human
aucgcaccacugcauuccagccug

SEQ ID NO: 1100771 - RNA, 24 nt, Human
aucugaggucaggaguuugagacc

SEQ ID NO: 1100772 - RNA, 22 nt, Human
caaaaaaagcaauuacaaccau

SEQ ID NO: 1100773 - RNA, 19 nt, Human
caacccaaaguacgcaagc

SEQ ID NO: 1100774 - RNA, 20 nt, Human
caagaagcuugagagggaaa

SEQ ID NO: 1100775 - RNA, 21 nt, Human
caagcuauggaaaaguagccu

SEQ ID NO: 1100776 - RNA, 26 nt, Human
caaggcggguagaucaucugagguca

SEQ ID NO: 1100777 - RNA, 21 nt, Human
caauggauccaaaugccuccu

SEQ ID NO: 1100778 - RNA, 24 nt, Human
caauguggugaaacccugucucua

SEQ ID NO: 1100779 - RNA, 23 nt, Human
cacaccuguaaucccagcuacuu

SEQ ID NO: 1100780 - RNA, 19 nt, Human
cacauguggcccaauggau

SEQ ID NO: 1100781 - RNA, 24 nt, Human
caccacugcauuccagccugggca

SEQ ID NO: 1100782 - RNA, 23 nt, Human
caccuguaaucccagcuacuugg

SEQ ID NO: 1100783 - RNA, 24 nt, Human
caccuguaaucccagcuacuuggg

SEQ ID NO: 1100784 - RNA, 19 nt, Human
cacgccuguaauucaagca

SEQ ID NO: 1100785 - RNA, 19 nt, Human
cacugcauuccagccuggg

SEQ ID NO: 1100786 - RNA, 22 nt, Human
cacugcauuccagccugggcaa

SEQ ID NO: 1100787 - RNA, 23 nt, Human
cacugcauuccagccugggcaac

SEQ ID NO: 1100788 - RNA, 24 nt, Human
cacugcauuccagccugggcaaca

SEQ ID NO: 1100789 - RNA, 24 nt, Human
cagcuacuugggaggcugaggcag

SEQ ID NO: 1100790 - RNA, 19 nt, Human
caguuaauuaacagggcca

SEQ ID NO: 1100791 - RNA, 18 nt, Human
cauaaaaugguuaagaua

SEQ ID NO: 1100792 - RNA, 24 nt, Human
cauagcaaacaagcuauggaaaag

SEQ ID NO: 1100793 - RNA, 23 nt, Human
caucugaggucaggaguuugaga

SEQ ID NO: 1100794 - RNA, 19 nt, Human
cauuuuggcauuuucuucc

SEQ ID NO: 1100795 - RNA, 21 nt, Human
ccaauagggguacacuuuuuu

SEQ ID NO: 1100796 - RNA, 22 nt, Human
ccaauggauccaaaugccuccu

SEQ ID NO: 1100797 - RNA, 20 nt, Human
ccacugcauuccagccuggg

SEQ ID NO: 1100798 - RNA, 20 nt, Human
ccacugcauuccagccuggg

SEQ ID NO: 1100799 - RNA, 21 nt, Human
ccacugcauuccagccugggc

SEQ ID NO: 1100800 - RNA, 23 nt, Human
ccacugcauuccagccugggcaa

SEQ ID NO: 1100801 - RNA, 24 nt, Human
ccacugcauuccagccugggcaac

SEQ ID NO: 1100802 - RNA, 20 nt, Human
ccuagagaauauuaucccuu

SEQ ID NO: 1100803 - RNA, 19 nt, Human
ccucucucuggucccugca

SEQ ID NO: 1100804 - RNA, 21 nt, Human
ccugagagguggagguugcag

SEQ ID NO: 1100805 - RNA, 21 nt, Human
ccugcaguuaauuaacagggc

SEQ ID NO: 1100806 - RNA, 23 nt, Human
ccugcaguuaauuaacagggcca

SEQ ID NO: 1100807 - RNA, 22 nt, Human
ccuggccaauguggugaaaccc

SEQ ID NO: 1100808 - RNA, 24 nt, Human
ccuggccaauguggugaaacccug

SEQ ID NO: 1100809 - RNA, 21 nt, Human
ccuguaaucccagcuacuugg

SEQ ID NO: 1100810 - RNA, 24 nt, Human
ccuguaauucaagcacuucgggag

SEQ ID NO: 1100811 - RNA, 20 nt, Human
ccuucugaugauugggggcc

SEQ ID NO: 1100812 - RNA, 23 nt, Human
cgccuguaauucaagcacuucgg

SEQ ID NO: 1100813 - RNA, 24 nt, Human
cggguagaucaucugaggucagga

SEQ ID NO: 1100814 - RNA, 24 nt, Human
cuacuugaaccugagagguggagg

SEQ ID NO: 1100815 - RNA, 18 nt, Human
cucaaaaaaaaaaaaaaa

SEQ ID NO: 1100816 - RNA, 24 nt, Human
cucaaguguaaaaaaaggagaaac

SEQ ID NO: 1100817 - RNA, 24 nt, Human
cucacgccuguaauucaagcacuu

SEQ ID NO: 1100818 - RNA, 19 nt, Human
cuccgucucaaaaaaaaaa

SEQ ID NO: 1100819 - RNA, 21 nt, Human
cucucaaaagugaguuccuag

SEQ ID NO: 1100820 - RNA, 24 nt, Human
cucuccacaagcugcaauuaagag

SEQ ID NO: 1100821 - RNA, 23 nt, Human
cugaaauuacaaacauaaggaca

SEQ ID NO: 1100822 - RNA, 24 nt, Human
cuggccaauguggugaaacccugu

SEQ ID NO: 1100823 - RNA, 21 nt, Human
cuguaaucccagcuacuuggg

SEQ ID NO: 1100824 - RNA, 23 nt, Human
gagguugcagugagcugagaucg

SEQ ID NO: 1100825 - RNA, 24 nt, Human
gaucaucugaggucaggaguuuga

SEQ ID NO: 1100826 - RNA, 20 nt, Human
gcaccacugcauuccagccu

SEQ ID NO: 1100827 - RNA, 28 nt, Human
gcaccacugcauuccagccugggcaaca

SEQ ID NO: 1100828 - RNA, 24 nt, Human
gcauuccagccugggcaacagagc

SEQ ID NO: 1100829 - RNA, 24 nt, Human
gccaauguggugaaacccugucuc

SEQ ID NO: 1100830 - RNA, 20 nt, Human
gccucuucucucccuugaug

SEQ ID NO: 1100831 - RNA, 20 nt, Human
gcugagaucgcaccacugca

SEQ ID NO: 1100832 - RNA, 22 nt, Human
ggagguugcagugagcugagau

SEQ ID NO: 1100833 - RNA, 23 nt, Human
ggagguugcagugagcugagauc

SEQ ID NO: 1100834 - RNA, 24 nt, Human
ggagguugcagugagcugagaucg

SEQ ID NO: 1100835 - RNA, 23 nt, Human
ggcaggguggcacacaccuguaa

SEQ ID NO: 1100836 - RNA, 23 nt, Human
ggcgcgggggcucacgccuguaa

SEQ ID NO: 1100837 - RNA, 23 nt, Human
gggaggccaaggcggguagauca

SEQ ID NO: 1100838 - RNA, 24 nt, Human
gggcaggguggcacacaccuguaa

SEQ ID NO: 1100839 - RNA, 20 nt, Human
gggcucacgccuguaauuca

SEQ ID NO: 1100840 - RNA, 21 nt, Human
gguagaucaucugaggucagg

SEQ ID NO: 1100841 - RNA, 19 nt, Human
ggucaggaguuugagacca

SEQ ID NO: 1100842 - RNA, 19 nt, Human
gguggagguugcagugagc

SEQ ID NO: 1100843 - RNA, 23 nt, Human
gguggcacacaccuguaauccca

SEQ ID NO: 1100844 - RNA, 24 nt, Human
gguggcacacaccuguaaucccag

SEQ ID NO: 1100845 - RNA, 21 nt, Human
gugaaacccugucucuacuaa

SEQ ID NO: 1100846 - RNA, 20 nt, Human
guggagguugcagugagcug

SEQ ID NO: 1100847 - RNA, 19 nt, Human
guugcagugagcugagauc

SEQ ID NO: 1100848 - RNA, 21 nt, Human
guugcagugagcugagaucgc

SEQ ID NO: 1100849 - RNA, 23 nt, Human
uaaaauucccaaacacuuuggug

SEQ ID NO: 1100850 - RNA, 20 nt, Human
uaaaucacacauuuucaaga

SEQ ID NO: 1100851 - RNA, 23 nt, Human
uaagauauauucaaauagagaaa

SEQ ID NO: 1100852 - RNA, 22 nt, Human
uacaagaaaugaacaauacagu

SEQ ID NO: 1100853 - RNA, 21 nt, Human
uaccacguugaccaaaguaaa

SEQ ID NO: 1100854 - RNA, 19 nt, Human
uagaaugucuuggacaaaa

SEQ ID NO: 1100855 - RNA, 23 nt, Human
uagaucaucugaggucaggaguu

SEQ ID NO: 1100856 - RNA, 24 nt, Human
uagaucaucugaggucaggaguuu

SEQ ID NO: 1100857 - RNA, 24 nt, Human
uagcaaacaagcuauggaaaagua

SEQ ID NO: 1100858 - RNA, 24 nt, Human
uaguccagaaaaaaaaaaucagug

SEQ ID NO: 1100859 - RNA, 18 nt, Human
uauucuuuuaauacagcu

SEQ ID NO: 1100860 - RNA, 21 nt, Human
uauugccaaaaauggcucaga

SEQ ID NO: 1100861 - RNA, 22 nt, Human
uauuguguacacaaugugcuua

SEQ ID NO: 1100862 - RNA, 23 nt, Human
ucaacccaaaguacgcaagccuc

SEQ ID NO: 1100863 - RNA, 20 nt, Human
ucaguaguccuucugaugau

SEQ ID NO: 1100864 - RNA, 19 nt, Human
ucaucugaggucaggaguu

SEQ ID NO: 1100865 - RNA, 20 nt, Human
uccaaaugccuccucuggcu

SEQ ID NO: 1100866 - RNA, 24 nt, Human
uccagaaaaaaaaaaucaguggua

SEQ ID NO: 1100867 - RNA, 20 nt, Human
ucccaaacacuuuggugucu

SEQ ID NO: 1100868 - RNA, 23 nt, Human
uccgucucaaaaaaaaaaaaaaa

SEQ ID NO: 1100869 - RNA, 25 nt, Human
uccgucucaaaaaaaaaaaaaaaaa

SEQ ID NO: 1100870 - RNA, 24 nt, Human
uccgucucaaaaaaaaaaaaaaag

SEQ ID NO: 1100871 - RNA, 23 nt, Human
ucgcaccacugcauuccagccug

SEQ ID NO: 1100872 - RNA, 21 nt, Human
ucucuacuaaaaauacaaaaa

SEQ ID NO: 1100873 - RNA, 22 nt, Human
ucugaggucaggaguuugagac

SEQ ID NO: 1100874 - RNA, 19 nt, Human
ucugauagaaugucuugga

SEQ ID NO: 1100875 - RNA, 18 nt, Human
ugaaauuacaaacauaag

SEQ ID NO: 1100876 - RNA, 22 nt, Human
ugaaauuacaaacauaaggaca

SEQ ID NO: 1100877 - RNA, 21 nt, Human
ugaacaacagcaaaugggauc

SEQ ID NO: 1100878 - RNA, 23 nt, Human
ugagaccagccuggccaaugugg

SEQ ID NO: 1100879 - RNA, 24 nt, Human
ugagaccagccuggccaauguggu

SEQ ID NO: 1100880 - RNA, 24 nt, Human
ugagagguggagguugcagugagc

SEQ ID NO: 1100881 - RNA, 22 nt, Human
ugagaucaacccaaaguacgca

SEQ ID NO: 1100882 - RNA, 24 nt, Human
ugagaucgcaccacugcauuccag

SEQ ID NO: 1100883 - RNA, 22 nt, Human
ugagcugagaucgcaccacugc

SEQ ID NO: 1100884 - RNA, 20 nt, Human
ugaggcaggagaacuacuug

SEQ ID NO: 1100885 - RNA, 24 nt, Human
ugaggcaggagaacuacuugaacc

SEQ ID NO: 1100886 - RNA, 25 nt, Human
ugaggcaggagaacuacuugaaccu

SEQ ID NO: 1100887 - RNA, 18 nt, Human
ugaggucaggaguuugag

SEQ ID NO: 1100888 - RNA, 19 nt, Human
ugcccugcaaaaaagugac

SEQ ID NO: 1100889 - RNA, 25 nt, Human
uggaaaaguagccuacauuuuggug

SEQ ID NO: 1100890 - RNA, 22 nt, Human
uggcacacaccuguaaucccag

SEQ ID NO: 1100891 - RNA, 24 nt, Human
uggccaauguggugaaacccuguc

SEQ ID NO: 1100892 - RNA, 23 nt, Human
uggcugaacaacagcaaauggga

SEQ ID NO: 1100893 - RNA, 18 nt, Human
ugggaggcugaggcagga

SEQ ID NO: 1100894 - RNA, 19 nt, Human
ugggaggcugaggcaggag

SEQ ID NO: 1100895 - RNA, 19 nt, Human
uggugaaacccugucucua

SEQ ID NO: 1100896 - RNA, 20 nt, Human
ugguucaaccuugcacauga

SEQ ID NO: 1100897 - RNA, 24 nt, Human
uguaaaaaaaggagaaaccuucaa

SEQ ID NO: 1100898 - RNA, 18 nt, Human
uguacacaaugugcuuau

SEQ ID NO: 1100899 - RNA, 22 nt, Human
uuacaaacauaaggacaagccu

SEQ ID NO: 1100900 - RNA, 18 nt, Human
uuagcugggcaggguggc

SEQ ID NO: 1100901 - RNA, 19 nt, Human
uuauagucacauguggccc

SEQ ID NO: 1100902 - RNA, 26 nt, Human
uucccaaacacuuuggugucucuuuc

SEQ ID NO: 1100903 - RNA, 24 nt, Human
uugaaccugagagguggagguugc

SEQ ID NO: 1100904 - RNA, 18 nt, Human
uugcagugagcugagauc

SEQ ID NO: 1100905 - RNA, 19 nt, Human
uugcagugagcugagaucg

SEQ ID NO: 1100906 - RNA, 22 nt, Human
uugcagugagcugagaucgcac

SEQ ID NO: 1100907 - RNA, 18 nt, Human
uuuuauuuuguuacuaag

SEQ ID NO: 1100908 - RNA, 25 nt, Human
uuuucaucucuaacuccugauuucc

SEQ ID NO: 1100909 - RNA, 27 nt, Human
aaaaaaaaaaaaaaucacauuaaucag

SEQ ID NO: 1100910 - RNA, 24 nt, Human
aaaaaacccaaacacucaaaaaaa

SEQ ID NO: 1100911 - RNA, 23 nt, Human
aaaaagaaaacugaacaaaucau

SEQ ID NO: 1100912 - RNA, 20 nt, Human
aaacaugaaaucagucaccu

SEQ ID NO: 1100913 - RNA, 23 nt, Human
aaacccaaacacucaaaaaaaaa

SEQ ID NO: 1100914 - RNA, 24 nt, Human
aacccaucuucccaccccuucucc

SEQ ID NO: 1100915 - RNA, 19 nt, Human
aaccgggcgucagccgccc

SEQ ID NO: 1100916 - RNA, 21 nt, Human
aacuaaaaaacccaaacacuc

SEQ ID NO: 1100917 - RNA, 24 nt, Human
aaggagucacuuaguaaaacuaug

SEQ ID NO: 1100918 - RNA, 23 nt, Human
acacucaaaaaaaaaaaaaaauc

SEQ ID NO: 1100919 - RNA, 22 nt, Human
acccaucuucccaccccuucuc

SEQ ID NO: 1100920 - RNA, 24 nt, Human
acccaucuucccaccccuucuccu

SEQ ID NO: 1100921 - RNA, 21 nt, Human
accccaccccuuucucucuca

SEQ ID NO: 1100922 - RNA, 23 nt, Human
acuccuguuugcaacuaaaaaac

SEQ ID NO: 1100923 - RNA, 18 nt, Human
agacuuuccccuuuuccc

SEQ ID NO: 1100924 - RNA, 21 nt, Human
agauggacuugucauuacaga

SEQ ID NO: 1100925 - RNA, 19 nt, Human
agccgcccuaccccacccc

SEQ ID NO: 1100926 - RNA, 18 nt, Human
agggcacuuucuggguac

SEQ ID NO: 1100927 - RNA, 21 nt, Human
auuacagaaaaccaaaaacaa

SEQ ID NO: 1100928 - RNA, 27 nt, Human
caaaaacaaacaaauaaaaaaagaaaa

SEQ ID NO: 1100929 - RNA, 21 nt, Human
caaacccaucuucccaccccu

SEQ ID NO: 1100930 - RNA, 20 nt, Human
caacuaaaaaacccaaacac

SEQ ID NO: 1100931 - RNA, 24 nt, Human
caauaaacaugaaaucagucaccu

SEQ ID NO: 1100932 - RNA, 24 nt, Human
cacccccagcccggcuccacgucu

SEQ ID NO: 1100933 - RNA, 20 nt, Human
cacucaaaaaaaaaaaaaaa

SEQ ID NO: 1100934 - RNA, 18 nt, Human
cagaaaaccaaaaacaaa

SEQ ID NO: 1100935 - RNA, 19 nt, Human
cagaaaaccaaaaacaaac

SEQ ID NO: 1100936 - RNA, 20 nt, Human
cagaaaaccaaaaacaaaca

SEQ ID NO: 1100937 - RNA, 21 nt, Human
cagcccauuccacaaacccau

SEQ ID NO: 1100938 - RNA, 24 nt, Human
cagcccauuccacaaacccaucuu

SEQ ID NO: 1100939 - RNA, 19 nt, Human
cagccgcccuaccccaccc

SEQ ID NO: 1100940 - RNA, 21 nt, Human
cagccgcccuaccccaccccu

SEQ ID NO: 1100941 - RNA, 22 nt, Human
cagccggggucgcaccgggagg

SEQ ID NO: 1100942 - RNA, 19 nt, Human
caugaaaucagucaccuga

SEQ ID NO: 1100943 - RNA, 24 nt, Human
cauuccacaaacccaucuucccac

SEQ ID NO: 1100944 - RNA, 25 nt, Human
cauuccacaaacccaucuucccacc

SEQ ID NO: 1100945 - RNA, 24 nt, Human
cauuucaauuccacuccuguuugc

SEQ ID NO: 1100946 - RNA, 26 nt, Human
ccaaacacucaaaaaaaaaaaaaaau

SEQ ID NO: 1100947 - RNA, 25 nt, Human
ccacaaacccaucuucccaccccuu

SEQ ID NO: 1100948 - RNA, 21 nt, Human
ccacuccccacccucagccca

SEQ ID NO: 1100949 - RNA, 26 nt, Human
cccaaacacucaaaaaaaaaaaaaaa

SEQ ID NO: 1100950 - RNA, 26 nt, Human
cccacccucagcccauuccacaaacc

SEQ ID NO: 1100951 - RNA, 23 nt, Human
ccccgccccuggggugggcugga

SEQ ID NO: 1100952 - RNA, 18 nt, Human
ccccuuuucccaguccga

SEQ ID NO: 1100953 - RNA, 20 nt, Human
cccguccccuccuucgcucc

SEQ ID NO: 1100954 - RNA, 20 nt, Human
cccucugcccggcgcucucc

SEQ ID NO: 1100955 - RNA, 24 nt, Human
ccuccagccccgguucuccugagc

SEQ ID NO: 1100956 - RNA, 25 nt, Human
ccuccagccccgguucuccugagcc

SEQ ID NO: 1100957 - RNA, 21 nt, Human
ccuccuucgcuccccccagac

SEQ ID NO: 1100958 - RNA, 27 nt, Human
cgcccuaccccaccccuuucucucuca

SEQ ID NO: 1100959 - RNA, 20 nt, Human
cgccuaaaccgggcgucagc

SEQ ID NO: 1100960 - RNA, 21 nt, Human
cggccucccuuccccaccccc

SEQ ID NO: 1100961 - RNA, 23 nt, Human
cuaaaaaacccaaacacucaaaa

SEQ ID NO: 1100962 - RNA, 21 nt, Human
cucacuuuuauuacagaugga

SEQ ID NO: 1100963 - RNA, 18 nt, Human
cucuggguggcgguuggc

SEQ ID NO: 1100964 - RNA, 18 nt, Human
cuuccccacccccagccc

SEQ ID NO: 1100965 - RNA, 21 nt, Human
gcauugagccuucagaaauac

SEQ ID NO: 1100966 - RNA, 23 nt, Human
gccgcagacccccgcggagaggg

SEQ ID NO: 1100967 - RNA, 22 nt, Human
gccgcccuaccccaccccuuuc

SEQ ID NO: 1100968 - RNA, 18 nt, Human
gccuaaaccgggcgucag

SEQ ID NO: 1100969 - RNA, 19 nt, Human
gccucccuuccccaccccc

SEQ ID NO: 1100970 - RNA, 21 nt, Human
ggcacuuucuggguacucuug

SEQ ID NO: 1100971 - RNA, 23 nt, Human
ggccugaggcugcggaagcaguu

SEQ ID NO: 1100972 - RNA, 20 nt, Human
ggggcgggagcuguggcggc

SEQ ID NO: 1100973 - RNA, 19 nt, Human
uaaaaaaagaaaacugaac

SEQ ID NO: 1100974 - RNA, 19 nt, Human
uaaaaaacccaaacacuca

SEQ ID NO: 1100975 - RNA, 22 nt, Human
uaaaacuauguuuuaggaaucu

SEQ ID NO: 1100976 - RNA, 19 nt, Human
uaaaccgggcgucagccgc

SEQ ID NO: 1100977 - RNA, 21 nt, Human
uacagaaaaccaaaaacaaac

SEQ ID NO: 1100978 - RNA, 24 nt, Human
uacgcauugagccuucagaaauac

SEQ ID NO: 1100979 - RNA, 23 nt, Human
uacucuugccgcuccuccagccc

SEQ ID NO: 1100980 - RNA, 19 nt, Human
ucagcccauuccacaaacc

SEQ ID NO: 1100981 - RNA, 18 nt, Human
ucauuggcacgucugccc

SEQ ID NO: 1100982 - RNA, 21 nt, Human
uccacaaacccaucuucccac

SEQ ID NO: 1100983 - RNA, 21 nt, Human
uccccacccccagcccggcuc

SEQ ID NO: 1100984 - RNA, 21 nt, Human
uccccacccucagcccauucc

SEQ ID NO: 1100985 - RNA, 19 nt, Human
ucccccucccccucugccc

SEQ ID NO: 1100986 - RNA, 19 nt, Human
uccuggauaccaggcagcc

SEQ ID NO: 1100987 - RNA, 23 nt, Human
ucuccgccuaaaccgggcgucag

SEQ ID NO: 1100988 - RNA, 21 nt, Human
ucucuggguggcgguuggccu

SEQ ID NO: 1100989 - RNA, 21 nt, Human
ucugcccggcgcucuccgccu

SEQ ID NO: 1100990 - RNA, 24 nt, Human
ucuuucuccccguccccuccuucg

SEQ ID NO: 1100991 - RNA, 20 nt, Human
ugaaaucagucaccugacca

SEQ ID NO: 1100992 - RNA, 21 nt, Human
ugcgaagggaccagcgcagcc

SEQ ID NO: 1100993 - RNA, 19 nt, Human
uggggugggcuggaggccg

SEQ ID NO: 1100994 - RNA, 22 nt, Human
uggguucugcagcugccacucu

SEQ ID NO: 1100995 - RNA, 20 nt, Human
uuacagaaaaccaaaaacaa

SEQ ID NO: 1100996 - RNA, 19 nt, Human
uucaauuccacuccuguuu

SEQ ID NO: 1100997 - RNA, 22 nt, Human
uucuccuacgcauugagccuuc

SEQ ID NO: 1100998 - RNA, 21 nt, Human
uugcaacuaaaaaacccaaac

SEQ ID NO: 1100999 - RNA, 18 nt, Human
uugcccuuucucuacccc

SEQ ID NO: 1101000 - RNA, 21 nt, Human
uugcuucuuucuccccguccc

SEQ ID NO: 1101001 - RNA, 20 nt, Human
uuucacaguuuugccauacu

SEQ ID NO: 1101002 - RNA, 18 nt, Human
uuucuccccguccccucc

SEQ ID NO: 1101003 - RNA, 21 nt, Human
aauaauaagacccaagaaaga

SEQ ID NO: 1101004 - RNA, 18 nt, Human
acaaugagaugaagacaa

SEQ ID NO: 1101005 - RNA, 20 nt, Human
auccucaucccugagggcua

SEQ ID NO: 1101006 - RNA, 19 nt, Human
cagcuucacucacgacuuc

SEQ ID NO: 1101007 - RNA, 18 nt, Human
caguauuucagucucugc

SEQ ID NO: 1101008 - RNA, 18 nt, Human
cagucucugccccagccg

SEQ ID NO: 1101009 - RNA, 22 nt, Human
ccagucaagccaacccgcagcu

SEQ ID NO: 1101010 - RNA, 22 nt, Human
ccagucucuucauuacagucag

SEQ ID NO: 1101011 - RNA, 19 nt, Human
cccaagaaagacugggccu

SEQ ID NO: 1101012 - RNA, 23 nt, Human
cccgccacucuuucaacugccac

SEQ ID NO: 1101013 - RNA, 19 nt, Human
ccucaucccugagggcuag

SEQ ID NO: 1101014 - RNA, 23 nt, Human
ccuucacaaauaauaagacccaa

SEQ ID NO: 1101015 - RNA, 22 nt, Human
cuaggcuuguguuccaggaggu

SEQ ID NO: 1101016 - RNA, 20 nt, Human
gagaugaagacaauauagaa

SEQ ID NO: 1101017 - RNA, 24 nt, Human
gagcccagucaagccaacccgcag

SEQ ID NO: 1101018 - RNA, 18 nt, Human
ggcucugagguuggggaa

SEQ ID NO: 1101019 - RNA, 23 nt, Human
gggggugguuugucuguggcagu

SEQ ID NO: 1101020 - RNA, 19 nt, Human
gucucugccccagccgaca

SEQ ID NO: 1101021 - RNA, 23 nt, Human
uaggagugggggugguuugucug

SEQ ID NO: 1101022 - RNA, 24 nt, Human
ucccugcaacuucucccgccacuc

SEQ ID NO: 1101023 - RNA, 22 nt, Human
uccuuuguguuuugagggcugg

SEQ ID NO: 1101024 - RNA, 20 nt, Human
ucuacaguuauuaaauaagu

SEQ ID NO: 1101025 - RNA, 19 nt, Human
ugccaggagaggaacauua

SEQ ID NO: 1101026 - RNA, 20 nt, Human
uggcuggguaggaguggggg

SEQ ID NO: 1101027 - RNA, 23 nt, Human
uggguaggagugggggugguuug

SEQ ID NO: 1101028 - RNA, 27 nt, Human
uuacagucaggcucugagguuggggaa

SEQ ID NO: 1101029 - RNA, 21 nt, Human
uucacaaauaauaagacccaa

SEQ ID NO: 1101030 - RNA, 21 nt, Human
uuuuugccaggagaggaacau

SEQ ID NO: 1101031 - RNA, 18 nt, Human
aagcaguccucccgcucc

SEQ ID NO: 1101032 - RNA, 19 nt, Human
aagcaguccucccgcucca

SEQ ID NO: 1101033 - RNA, 24 nt, Human
aagccaagaccagaagacagccaa

SEQ ID NO: 1101034 - RNA, 23 nt, Human
acacaucacccccugggcugcag

SEQ ID NO: 1101035 - RNA, 21 nt, Human
acaugcacucgccgcaucccu

SEQ ID NO: 1101036 - RNA, 23 nt, Human
accagccuccaggacuccuccug

SEQ ID NO: 1101037 - RNA, 20 nt, Human
accauggacaacagccuccu

SEQ ID NO: 1101038 - RNA, 21 nt, Human
accauuaaaaaaaaaaaaaaa

SEQ ID NO: 1101039 - RNA, 22 nt, Human
accuacugccauuccguguccc

SEQ ID NO: 1101040 - RNA, 19 nt, Human
agaagacagccaauuaaca

SEQ ID NO: 1101041 - RNA, 24 nt, Human
agacagccaauuaacauccagagc

SEQ ID NO: 1101042 - RNA, 20 nt, Human
agaggcaggagaggcugagc

SEQ ID NO: 1101043 - RNA, 18 nt, Human
agccacuacuccuggccu

SEQ ID NO: 1101044 - RNA, 18 nt, Human
agccacuacuccuggccu

SEQ ID NO: 1101045 - RNA, 18 nt, Human
agccugggcagagaggcu

SEQ ID NO: 1101046 - RNA, 23 nt, Human
aggcaggcugggcccccagagcu

SEQ ID NO: 1101047 - RNA, 20 nt, Human
aggcagggaagggacagggc

SEQ ID NO: 1101048 - RNA, 19 nt, Human
aggcugagcuccuggaaag

SEQ ID NO: 1101049 - RNA, 21 nt, Human
aggggagcaguguggaaaggg

SEQ ID NO: 1101050 - RNA, 24 nt, Human
aggggucucuccauguugcccagg

SEQ ID NO: 1101051 - RNA, 23 nt, Human
agggguguggcaccucggggagg

SEQ ID NO: 1101052 - RNA, 27 nt, Human
agggucagcccuguggcccugcuggcu

SEQ ID NO: 1101053 - RNA, 21 nt, Human
aguguucucuaucccccaccu

SEQ ID NO: 1101054 - RNA, 18 nt, Human
aucugggacugagaagug

SEQ ID NO: 1101055 - RNA, 22 nt, Human
auggacaacagccuccuggcca

SEQ ID NO: 1101056 - RNA, 22 nt, Human
caaaggcaggcugggcccccag

SEQ ID NO: 1101057 - RNA, 19 nt, Human
caagaccagaagacagcca

SEQ ID NO: 1101058 - RNA, 23 nt, Human
caagcaguccucccgcuccaacc

SEQ ID NO: 1101059 - RNA, 21 nt, Human
cacccccgacccaaauccuga

SEQ ID NO: 1101060 - RNA, 21 nt, Human
caccugugcucuggccaagga

SEQ ID NO: 1101061 - RNA, 19 nt, Human
cacuggggucaaaaucagg

SEQ ID NO: 1101062 - RNA, 23 nt, Human
cagaacuagggaagcguaacccc

SEQ ID NO: 1101063 - RNA, 18 nt, Human
cagcagaagcagggccug

SEQ ID NO: 1101064 - RNA, 18 nt, Human
cagcauccagccuggguu

SEQ ID NO: 1101065 - RNA, 19 nt, Human
cagcccuguggcccugcug

SEQ ID NO: 1101066 - RNA, 20 nt, Human
cagccuccaggacuccuccu

SEQ ID NO: 1101067 - RNA, 21 nt, Human
caggacccaggaccagccucc

SEQ ID NO: 1101068 - RNA, 21 nt, Human
caguccucccgcuccaaccuc

SEQ ID NO: 1101069 - RNA, 23 nt, Human
cauguugcccaggcuggucucaa

SEQ ID NO: 1101070 - RNA, 24 nt, Human
cauguugcccaggcuggucucaaa

SEQ ID NO: 1101071 - RNA, 24 nt, Human
ccaaagcguugggaugacaggcau

SEQ ID NO: 1101072 - RNA, 20 nt, Human
ccacugcuucuccgugugca

SEQ ID NO: 1101073 - RNA, 18 nt, Human
ccagggguggggcagagg

SEQ ID NO: 1101074 - RNA, 24 nt, Human
ccauuaaaaaaaaaaaaaaaucuu

SEQ ID NO: 1101075 - RNA, 24 nt, Human
cccacccccgacccaaauccugac

SEQ ID NO: 1101076 - RNA, 24 nt, Human
ccccagagcugcacaauaacugcu

SEQ ID NO: 1101077 - RNA, 20 nt, Human
cccccacccccgacccaaau

SEQ ID NO: 1101078 - RNA, 21 nt, Human
cccccacccccgacccaaauc

SEQ ID NO: 1101079 - RNA, 24 nt, Human
cccucacuguaggcaaagcccaga

SEQ ID NO: 1101080 - RNA, 20 nt, Human
cccugcugcucuggcaggcc

SEQ ID NO: 1101081 - RNA, 21 nt, Human
ccucaagcaacagcccuccca

SEQ ID NO: 1101082 - RNA, 25 nt, Human
ccuccaggacuccuccugacagguu

SEQ ID NO: 1101083 - RNA, 22 nt, Human
ccucccgcuccaaccucccaaa

SEQ ID NO: 1101084 - RNA, 24 nt, Human
ccucccgcuccaaccucccaaagc

SEQ ID NO: 1101085 - RNA, 18 nt, Human
ccugacagaggauucuga

SEQ ID NO: 1101086 - RNA, 33 nt, Human
cucaaaguaccauuaaaaaaaaaaaaaaauccu

SEQ ID NO: 1101087 - RNA, 21 nt, Human
cucaagcaacagcccucccca

SEQ ID NO: 1101088 - RNA, 24 nt, Human
cuccauguugcccaggcuggucuc

SEQ ID NO: 1101089 - RNA, 27 nt, Human
cuccauguugcccaggcuggucucaaa

SEQ ID NO: 1101090 - RNA, 23 nt, Human
cucccauucucuccccuguccag

SEQ ID NO: 1101091 - RNA, 19 nt, Human
cuccuggaaagcugcuuac

SEQ ID NO: 1101092 - RNA, 22 nt, Human
cuccuggccucaaaguaccauu

SEQ ID NO: 1101093 - RNA, 23 nt, Human
cucugcucccccucacaaaucuc

SEQ ID NO: 1101094 - RNA, 19 nt, Human
cugcagcauccagccuggg

SEQ ID NO: 1101095 - RNA, 21 nt, Human
cugcccucaagacugaugccc

SEQ ID NO: 1101096 - RNA, 21 nt, Human
cugcccucaagacugaugccc

SEQ ID NO: 1101097 - RNA, 20 nt, Human
cuggccucaaaguaccauua

SEQ ID NO: 1101098 - RNA, 21 nt, Human
cuggccucaaaguaccauuaa

SEQ ID NO: 1101099 - RNA, 18 nt, Human
cuggccucaagcaguccu

SEQ ID NO: 1101100 - RNA, 25 nt, Human
cugggccaggguucccagggagggg

SEQ ID NO: 1101101 - RNA, 19 nt, Human
cuuacagaugccccugcuc

SEQ ID NO: 1101102 - RNA, 22 nt, Human
gaagguuguagugggacacuca

SEQ ID NO: 1101103 - RNA, 20 nt, Human
gacaguguucucuauccccc

SEQ ID NO: 1101104 - RNA, 18 nt, Human
gagccaaugggaagugga

SEQ ID NO: 1101105 - RNA, 23 nt, Human
gaggagagccugggcagagaggc

SEQ ID NO: 1101106 - RNA, 20 nt, Human
gaggauucugauuuaacggu

SEQ ID NO: 1101107 - RNA, 18 nt, Human
gagggaggaggagagccu

SEQ ID NO: 1101108 - RNA, 19 nt, Human
gcaacagcccuccccagcc

SEQ ID NO: 1101109 - RNA, 22 nt, Human
gcaacagcccuccccagccaag

SEQ ID NO: 1101110 - RNA, 23 nt, Human
gcaccaggagcuguugagcuggg

SEQ ID NO: 1101111 - RNA, 21 nt, Human
gcauccccugccacugcuucu

SEQ ID NO: 1101112 - RNA, 20 nt, Human
gccacuggggucaaaaucag

SEQ ID NO: 1101113 - RNA, 20 nt, Human
gccugcagaggcaggagagg

SEQ ID NO: 1101114 - RNA, 18 nt, Human
gccuuuggaaucuuucuc

SEQ ID NO: 1101115 - RNA, 19 nt, Human
gcggccaaaggcaggcugg

SEQ ID NO: 1101116 - RNA, 23 nt, Human
gcuccaaccucccaaagcguugg

SEQ ID NO: 1101117 - RNA, 21 nt, Human
gcucuggcaggccugucuugg

SEQ ID NO: 1101118 - RNA, 23 nt, Human
gcuggucucaaacuccuggccuc

SEQ ID NO: 1101119 - RNA, 22 nt, Human
ggaggugggcaauggggcuggg

SEQ ID NO: 1101120 - RNA, 20 nt, Human
ggcaauggggcugggaggga

SEQ ID NO: 1101121 - RNA, 21 nt, Human
ggccacuggggucaaaaucag

SEQ ID NO: 1101122 - RNA, 24 nt, Human
ggcuggucucaaacuccuggccuc

SEQ ID NO: 1101123 - RNA, 20 nt, Human
gggaagcguaaccccacccc

SEQ ID NO: 1101124 - RNA, 18 nt, Human
gggcaauggggcugggag

SEQ ID NO: 1101125 - RNA, 21 nt, Human
gggcaccaggagcuguugagc

SEQ ID NO: 1101126 - RNA, 22 nt, Human
gggcagagaggcuuuuguauuu

SEQ ID NO: 1101127 - RNA, 20 nt, Human
gggccaggguucccagggag

SEQ ID NO: 1101128 - RNA, 21 nt, Human
gggccaggguucccagggagg

SEQ ID NO: 1101129 - RNA, 18 nt, Human
gggcugggcaccaggagc

SEQ ID NO: 1101130 - RNA, 22 nt, Human
gggggcggggagcggccaaagg

SEQ ID NO: 1101131 - RNA, 18 nt, Human
ggggucucuccauguugc

SEQ ID NO: 1101132 - RNA, 23 nt, Human
ggguucccagggagggguguggc

SEQ ID NO: 1101133 - RNA, 19 nt, Human
guaaaaucucccuuacaca

SEQ ID NO: 1101134 - RNA, 25 nt, Human
guaccauuaaaaaaaaaaaaaaauc

SEQ ID NO: 1101135 - RNA, 21 nt, Human
guucccagggagggguguggc

SEQ ID NO: 1101136 - RNA, 20 nt, Human
uaaagcuccucaggccuuuc

SEQ ID NO: 1101137 - RNA, 21 nt, Human
uagcaaaaagggaucugccug

SEQ ID NO: 1101138 - RNA, 24 nt, Human
uagcucagccuggaggcuuggguu

SEQ ID NO: 1101139 - RNA, 25 nt, Human
uagcucagccuggaggcuuggguuu

SEQ ID NO: 1101140 - RNA, 22 nt, Human
uaggcaaagcccagauucuuca

SEQ ID NO: 1101141 - RNA, 18 nt, Human
ucaguauggaaaagaaag

SEQ ID NO: 1101142 - RNA, 19 nt, Human
ucaguauggaaaagaaagg

SEQ ID NO: 1101143 - RNA, 24 nt, Human
ucccaaagcguugggaugacaggc

SEQ ID NO: 1101144 - RNA, 24 nt, Human
uccccauuauugucaccugcugua

SEQ ID NO: 1101145 - RNA, 19 nt, Human
ucccccucacaaaucucug

SEQ ID NO: 1101146 - RNA, 19 nt, Human
uccccugccacugcuucuc

SEQ ID NO: 1101147 - RNA, 24 nt, Human
ucccugugccagguccuaugaugc

SEQ ID NO: 1101148 - RNA, 25 nt, Human
ucccuuugugucucuguaaaaucuc

SEQ ID NO: 1101149 - RNA, 21 nt, Human
uccuccugacagguucagagg

SEQ ID NO: 1101150 - RNA, 21 nt, Human
uccucugggccaggguuccca

SEQ ID NO: 1101151 - RNA, 20 nt, Human
uccugacaaaagggcaccug

SEQ ID NO: 1101152 - RNA, 25 nt, Human
uccuggaaagcugcuuacagaugcc

SEQ ID NO: 1101153 - RNA, 24 nt, Human
ucucaaacuccuggccucaagcag

SEQ ID NO: 1101154 - RNA, 21 nt, Human
ucucaggguaucugcuccauc

SEQ ID NO: 1101155 - RNA, 20 nt, Human
ucuccauguugcccaggcug

SEQ ID NO: 1101156 - RNA, 23 nt, Human
ucucuccauguugcccaggcugg

SEQ ID NO: 1101157 - RNA, 20 nt, Human
ucugcagcauccagccuggg

SEQ ID NO: 1101158 - RNA, 21 nt, Human
ucuuggcauccccugccacug

SEQ ID NO: 1101159 - RNA, 21 nt, Human
ucuuggguccuuuccugccuc

SEQ ID NO: 1101160 - RNA, 22 nt, Human
ucuuugguaacaagaggggcug

SEQ ID NO: 1101161 - RNA, 18 nt, Human
ugagucaggggagcagug

SEQ ID NO: 1101162 - RNA, 23 nt, Human
ugaguuggaagcacugcaggacc

SEQ ID NO: 1101163 - RNA, 19 nt, Human
ugcagagaucugggcgagu

SEQ ID NO: 1101164 - RNA, 24 nt, Human
ugcccaggcuggucucaaacuccu

SEQ ID NO: 1101165 - RNA, 18 nt, Human
ugcuccauccccucccuu

SEQ ID NO: 1101166 - RNA, 21 nt, Human
ugcuguaaacauuuggaguuu

SEQ ID NO: 1101167 - RNA, 23 nt, Human
ugcuguaaacauuuggaguuuac

SEQ ID NO: 1101168 - RNA, 19 nt, Human
ugcuuacagaugccccugc

SEQ ID NO: 1101169 - RNA, 22 nt, Human
uggaagccaagaccagaagaca

SEQ ID NO: 1101170 - RNA, 23 nt, Human
uggaggugggcaauggggcuggg

SEQ ID NO: 1101171 - RNA, 21 nt, Human
uggcaccucggggagggucag

SEQ ID NO: 1101172 - RNA, 20 nt, Human
uggccucaagcaguccuccc

SEQ ID NO: 1101173 - RNA, 21 nt, Human
uggccucaagcaguccucccg

SEQ ID NO: 1101174 - RNA, 21 nt, Human
ugggaaguggaggugggcaau

SEQ ID NO: 1101175 - RNA, 19 nt, Human
ugggaaguggaggugggcc

SEQ ID NO: 1101176 - RNA, 19 nt, Human
ugggacacucauagcugcc

SEQ ID NO: 1101177 - RNA, 21 nt, Human
ugggaugacaggcaucagcca

SEQ ID NO: 1101178 - RNA, 22 nt, Human
ugggaugacaggcaucagccac

SEQ ID NO: 1101179 - RNA, 22 nt, Human
ugggcugcaggcagggaaggga

SEQ ID NO: 1101180 - RNA, 21 nt, Human
uggggcugggagggaucuggg

SEQ ID NO: 1101181 - RNA, 23 nt, Human
uggggcugggagggaucugggac

SEQ ID NO: 1101182 - RNA, 24 nt, Human
uguagugggacacucauagcugcc

SEQ ID NO: 1101183 - RNA, 18 nt, Human
ugugcagacaucaccaug

SEQ ID NO: 1101184 - RNA, 23 nt, Human
uucagcagaagcagggccuguuc

SEQ ID NO: 1101185 - RNA, 25 nt, Human
uucccagggagggguguggcaccuc

SEQ ID NO: 1101186 - RNA, 18 nt, Human
uucccugugccagguccu

SEQ ID NO: 1101187 - RNA, 19 nt, Human
uucccugugccagguccua

SEQ ID NO: 1101188 - RNA, 20 nt, Human
uuccucugggccaggguucc

SEQ ID NO: 1101189 - RNA, 23 nt, Human
uugucaccugcuguaaacauuug

SEQ ID NO: 1101190 - RNA, 24 nt, Human
uuucucugcagcauccagccuggg

SEQ ID NO: 1101191 - RNA, 19 nt, Human
uuugguaacaagaggggcu

SEQ ID NO: 1101192 - RNA, 21 nt, Human
aaagcacauuggaggaaccga

SEQ ID NO: 1101193 - RNA, 19 nt, Human
aaagugcugguauuacagg

SEQ ID NO: 1101194 - RNA, 19 nt, Human
aaagugcugguauuacagg

SEQ ID NO: 1101195 - RNA, 24 nt, Human
aaagugcugguauuacaggaguga

SEQ ID NO: 1101196 - RNA, 18 nt, Human
aaggagcaggagggcugg

SEQ ID NO: 1101197 - RNA, 18 nt, Human
acagcucacugcagcuuc

SEQ ID NO: 1101198 - RNA, 23 nt, Human
accacagacucacaccaccauga

SEQ ID NO: 1101199 - RNA, 22 nt, Human
accaugagugaagccaaaaaau

SEQ ID NO: 1101200 - RNA, 19 nt, Human
acccaggcuggagugcagu

SEQ ID NO: 1101201 - RNA, 24 nt, Human
acggagucucgcugugucacccag

SEQ ID NO: 1101202 - RNA, 18 nt, Human
acugcagcuucaaccucu

SEQ ID NO: 1101203 - RNA, 20 nt, Human
acugcugguucagagggcug

SEQ ID NO: 1101204 - RNA, 24 nt, Human
acugcugguucagagggcugggug

SEQ ID NO: 1101205 - RNA, 23 nt, Human
agaccuugggaaggacuggauuu

SEQ ID NO: 1101206 - RNA, 26 nt, Human
agauggagacaagccuggaggcagaa

SEQ ID NO: 1101207 - RNA, 25 nt, Human
aggcuggagugcaguggcacgaucu

SEQ ID NO: 1101208 - RNA, 23 nt, Human
agggggcacgcguggauacuggg

SEQ ID NO: 1101209 - RNA, 23 nt, Human
aggggugcugguucuugagccau

SEQ ID NO: 1101210 - RNA, 19 nt, Human
agguagaguggaggaaagc

SEQ ID NO: 1101211 - RNA, 24 nt, Human
aggugugcuggugugggugcaucc

SEQ ID NO: 1101212 - RNA, 21 nt, Human
aguacaguggugcgaucacag

SEQ ID NO: 1101213 - RNA, 23 nt, Human
aguacaguggugcgaucacagcu

SEQ ID NO: 1101214 - RNA, 21 nt, Human
agugcaguggcacgaucucag

SEQ ID NO: 1101215 - RNA, 23 nt, Human
agugcaguggcacgaucucagcu

SEQ ID NO: 1101216 - RNA, 20 nt, Human
aucuccuguaacggugggga

SEQ ID NO: 1101217 - RNA, 23 nt, Human
augauaggagaccuugggaagga

SEQ ID NO: 1101218 - RNA, 26 nt, Human
caaacauacuuuuuguauuuuuuugu

SEQ ID NO: 1101219 - RNA, 24 nt, Human
caaagugcugguauuacaggagug

SEQ ID NO: 1101220 - RNA, 28 nt, Human
caaucgaucuucccucccaccuuggccu

SEQ ID NO: 1101221 - RNA, 18 nt, Human
cacugcaaccucugccuc

SEQ ID NO: 1101222 - RNA, 19 nt, Human
cagaaaucagguaguucau

SEQ ID NO: 1101223 - RNA, 21 nt, Human
cagcugaaauugagguugggg

SEQ ID NO: 1101224 - RNA, 18 nt, Human
caggagugagacauggcg

SEQ ID NO: 1101225 - RNA, 19 nt, Human
cagggccaggcccuaagga

SEQ ID NO: 1101226 - RNA, 19 nt, Human
ccaaagugcugguauuaca

SEQ ID NO: 1101227 - RNA, 20 nt, Human
ccacagacucacaccaccau

SEQ ID NO: 1101228 - RNA, 20 nt, Human
ccacugugcucuggcggggg

SEQ ID NO: 1101229 - RNA, 19 nt, Human
cccccugccccaccuccgc

SEQ ID NO: 1101230 - RNA, 24 nt, Human
cccccugccccaccuccgcacuac

SEQ ID NO: 1101231 - RNA, 26 nt, Human
ccccugccccaccuccgcacuacccc

SEQ ID NO: 1101232 - RNA, 21 nt, Human
ccgggaaggggagaaaggcuc

SEQ ID NO: 1101233 - RNA, 26 nt, Human
ccucccaccuuggccucccaaagugc

SEQ ID NO: 1101234 - RNA, 26 nt, Human
cgcacuaccccgcccugccaucggau

SEQ ID NO: 1101235 - RNA, 22 nt, Human
cgcucugucacccaggcuggag

SEQ ID NO: 1101236 - RNA, 23 nt, Human
cgcuuuagaaagaucucccuaag

SEQ ID NO: 1101237 - RNA, 18 nt, Human
cgggggaagggggcacgc

SEQ ID NO: 1101238 - RNA, 18 nt, Human
cuagucacacaggggugc

SEQ ID NO: 1101239 - RNA, 20 nt, Human
cucaaucgaucuucccuccc

SEQ ID NO: 1101240 - RNA, 25 nt, Human
cucacugcaaccucugccucauugg

SEQ ID NO: 1101241 - RNA, 19 nt, Human
cucccccugccccaccucc

SEQ ID NO: 1101242 - RNA, 24 nt, Human
cucccccugccccaccuccgcacu

SEQ ID NO: 1101243 - RNA, 23 nt, Human
cuccugggcucaaucgaucuucc

SEQ ID NO: 1101244 - RNA, 21 nt, Human
cucgcucugucacccaggcug

SEQ ID NO: 1101245 - RNA, 24 nt, Human
cucgcucugucacccaggcuggag

SEQ ID NO: 1101246 - RNA, 24 nt, Human
cucuauguugcccaggcuggucuc

SEQ ID NO: 1101247 - RNA, 23 nt, Human
cucugucacccaggcuggaguac

SEQ ID NO: 1101248 - RNA, 20 nt, Human
cugaaauugagguugggggu

SEQ ID NO: 1101249 - RNA, 18 nt, Human
cuggaaguacaggaggug

SEQ ID NO: 1101250 - RNA, 21 nt, Human
cugggggccuccagggagagu

SEQ ID NO: 1101251 - RNA, 20 nt, Human
cugugucacccaggcuggag

SEQ ID NO: 1101252 - RNA, 18 nt, Human
gaaaguggggagggggga

SEQ ID NO: 1101253 - RNA, 19 nt, Human
gaaaugagucuagucacac

SEQ ID NO: 1101254 - RNA, 20 nt, Human
gaagggcugggggccuccag

SEQ ID NO: 1101255 - RNA, 20 nt, Human
gagcacgaugcagcuuccac

SEQ ID NO: 1101256 - RNA, 19 nt, Human
gagcugacaagauaaggua

SEQ ID NO: 1101257 - RNA, 25 nt, Human
gaggaaagccuguugguguuaagga

SEQ ID NO: 1101258 - RNA, 23 nt, Human
gaggcagaaaucagguaguucau

SEQ ID NO: 1101259 - RNA, 19 nt, Human
gagggaaaaagaaaucaca

SEQ ID NO: 1101260 - RNA, 22 nt, Human
gcauggaggugaggugugcugg

SEQ ID NO: 1101261 - RNA, 18 nt, Human
gccugcuuuuggcuggga

SEQ ID NO: 1101262 - RNA, 19 nt, Human
gcuggagugcaguggcacg

SEQ ID NO: 1101263 - RNA, 22 nt, Human
ggaugauggagugagggaaaaa

SEQ ID NO: 1101264 - RNA, 20 nt, Human
ggcauggaggugaggugugc

SEQ ID NO: 1101265 - RNA, 20 nt, Human
ggcauggaggugaggugugc

SEQ ID NO: 1101266 - RNA, 19 nt, Human
ggcccagugcaggcuggag

SEQ ID NO: 1101267 - RNA, 18 nt, Human
gggaaggggagaaaggcu

SEQ ID NO: 1101268 - RNA, 22 nt, Human
gggcauggaggugaggugugcu

SEQ ID NO: 1101269 - RNA, 18 nt, Human
gggcuagggaugaaggug

SEQ ID NO: 1101270 - RNA, 18 nt, Human
gguagaguggaggaaagc

SEQ ID NO: 1101271 - RNA, 23 nt, Human
gucgagggcuguaaccgugaaau

SEQ ID NO: 1101272 - RNA, 22 nt, Human
gugaagccaaaaaauacaaaca

SEQ ID NO: 1101273 - RNA, 22 nt, Human
guggaacagcagaugccagaag

SEQ ID NO: 1101274 - RNA, 23 nt, Human
guggugcgaucacagcucacugc

SEQ ID NO: 1101275 - RNA, 23 nt, Human
guuucuaaaggaggaaggguggg

SEQ ID NO: 1101276 - RNA, 22 nt, Human
uacaaacauacuuuuuguauuu

SEQ ID NO: 1101277 - RNA, 19 nt, Human
uagaaagaucucccuaagu

SEQ ID NO: 1101278 - RNA, 23 nt, Human
uagagacagaggucucucuaugu

SEQ ID NO: 1101279 - RNA, 24 nt, Human
uagggucucgcucugucacccagg

SEQ ID NO: 1101280 - RNA, 23 nt, Human
uauguugcccaggcuggucucga

SEQ ID NO: 1101281 - RNA, 24 nt, Human
uauguugcccaggcuggucucgaa

SEQ ID NO: 1101282 - RNA, 19 nt, Human
uauuacaggagugagacau

SEQ ID NO: 1101283 - RNA, 22 nt, Human
ucacccaggcuggagugcagug

SEQ ID NO: 1101284 - RNA, 19 nt, Human
ucacugcaaccucugccuc

SEQ ID NO: 1101285 - RNA, 24 nt, Human
ucacugcaaccucugccucauugg

SEQ ID NO: 1101286 - RNA, 25 nt, Human
ucacugcaaccucugccucauugga

SEQ ID NO: 1101287 - RNA, 19 nt, Human
ucacugcagcuucaaccuc

SEQ ID NO: 1101288 - RNA, 22 nt, Human
ucacugcagcuucaaccucuug

SEQ ID NO: 1101289 - RNA, 24 nt, Human
uccagggagaguuucuaaaggagg

SEQ ID NO: 1101290 - RNA, 18 nt, Human
ucccccugccccaccucc

SEQ ID NO: 1101291 - RNA, 24 nt, Human
ucccucccaccuuggccucccaaa

SEQ ID NO: 1101292 - RNA, 20 nt, Human
uccgcacuaccccgcccugc

SEQ ID NO: 1101293 - RNA, 24 nt, Human
ucgcucugucacccaggcuggagu

SEQ ID NO: 1101294 - RNA, 24 nt, Human
ucgcugugucacccaggcuggagu

SEQ ID NO: 1101295 - RNA, 23 nt, Human
ucgucccaccucagucucccccu

SEQ ID NO: 1101296 - RNA, 18 nt, Human
ucuauguugcccaggcug

SEQ ID NO: 1101297 - RNA, 18 nt, Human
ucuauguugcccaggcug

SEQ ID NO: 1101298 - RNA, 24 nt, Human
ucuauguugcccaggcuggucucg

SEQ ID NO: 1101299 - RNA, 19 nt, Human
ucucgaacuccugggcuca

SEQ ID NO: 1101300 - RNA, 21 nt, Human
ucucgaacuccugggcucaau

SEQ ID NO: 1101301 - RNA, 19 nt, Human
ucucgcucugucacccagg

SEQ ID NO: 1101302 - RNA, 23 nt, Human
ucucgcucugucacccaggcugg

SEQ ID NO: 1101303 - RNA, 24 nt, Human
ucucgcucugucacccaggcugga

SEQ ID NO: 1101304 - RNA, 25 nt, Human
ucucgcucugucacccaggcuggag

SEQ ID NO: 1101305 - RNA, 23 nt, Human
ucucgcugugucacccaggcugg

SEQ ID NO: 1101306 - RNA, 24 nt, Human
ucucgcugugucacccaggcugga

SEQ ID NO: 1101307 - RNA, 20 nt, Human
ucucuauguugcccaggcug

SEQ ID NO: 1101308 - RNA, 23 nt, Human
ucucucuauguugcccaggcugg

SEQ ID NO: 1101309 - RNA, 24 nt, Human
ucucucuauguugcccaggcuggu

SEQ ID NO: 1101310 - RNA, 24 nt, Human
ucucugaauauucuuacuuggccc

SEQ ID NO: 1101311 - RNA, 18 nt, Human
ucuggcgggggaaggggg

SEQ ID NO: 1101312 - RNA, 18 nt, Human
ucugucacccaggcugga

SEQ ID NO: 1101313 - RNA, 24 nt, Human
ucugucacccaggcuggaguacag

SEQ ID NO: 1101314 - RNA, 23 nt, Human
ugaaagcacauuggaggaaccga

SEQ ID NO: 1101315 - RNA, 19 nt, Human
ugaaaguggggagggggga

SEQ ID NO: 1101316 - RNA, 19 nt, Human
ugaaauugagguugggggu

SEQ ID NO: 1101317 - RNA, 21 nt, Human
ugagacauggcgcccagccca

SEQ ID NO: 1101318 - RNA, 22 nt, Human
ugcaguggcacgaucucagcuc

SEQ ID NO: 1101319 - RNA, 22 nt, Human
ugccagaagggcugggggccuc

SEQ ID NO: 1101320 - RNA, 24 nt, Human
ugcccaggcuggucucgaacuccu

SEQ ID NO: 1101321 - RNA, 28 nt, Human
ugcccaggcuggucucgaacuccugggc

SEQ ID NO: 1101322 - RNA, 25 nt, Human
ugcugguucagagggcugggugggc

SEQ ID NO: 1101323 - RNA, 22 nt, Human
uggaacagcagaugccagaagg

SEQ ID NO: 1101324 - RNA, 22 nt, Human
uggaggagcacgaugcagcuuc

SEQ ID NO: 1101325 - RNA, 19 nt, Human
uggagggaaauucgagccu

SEQ ID NO: 1101326 - RNA, 19 nt, Human
uggaguacaguggugcgau

SEQ ID NO: 1101327 - RNA, 23 nt, Human
uggagugcaguggcacgaucuca

SEQ ID NO: 1101328 - RNA, 24 nt, Human
uggagugcaguggcacgaucucag

SEQ ID NO: 1101329 - RNA, 24 nt, Human
uggcacgaucucagcucacugcaa

SEQ ID NO: 1101330 - RNA, 18 nt, Human
uggcauggugugguggug

SEQ ID NO: 1101331 - RNA, 21 nt, Human
uggcauggugugguggugaca

SEQ ID NO: 1101332 - RNA, 19 nt, Human
uggcuuggucgagggcugu

SEQ ID NO: 1101333 - RNA, 20 nt, Human
uggcuuggucgagggcugua

SEQ ID NO: 1101334 - RNA, 18 nt, Human
ugggaaggacuggauuug

SEQ ID NO: 1101335 - RNA, 22 nt, Human
ugggaaggacuggauuugaggg

SEQ ID NO: 1101336 - RNA, 24 nt, Human
ugggaccacagacucacaccacca

SEQ ID NO: 1101337 - RNA, 19 nt, Human
ugggaggcuugaggugauc

SEQ ID NO: 1101338 - RNA, 18 nt, Human
uggggaggggggaggugg

SEQ ID NO: 1101339 - RNA, 22 nt, Human
uggggaggggggagguggaaca

SEQ ID NO: 1101340 - RNA, 20 nt, Human
uggggcccagugcaggcugg

SEQ ID NO: 1101341 - RNA, 18 nt, Human
ugggggccuccagggaga

SEQ ID NO: 1101342 - RNA, 24 nt, Human
uggugcgaucacagcucacugcag

SEQ ID NO: 1101343 - RNA, 18 nt, Human
uggugugggugcauccuu

SEQ ID NO: 1101344 - RNA, 22 nt, Human
uguaacgguggggacaaacggc

SEQ ID NO: 1101345 - RNA, 21 nt, Human
ugugguggugacauaggaccu

SEQ ID NO: 1101346 - RNA, 24 nt, Human
ugugucacccaggcuggagugcag

SEQ ID NO: 1101347 - RNA, 21 nt, Human
uucgagccugcuuuuggcugg

SEQ ID NO: 1101348 - RNA, 18 nt, Human
uuggauccaacuggaguu

SEQ ID NO: 1101349 - RNA, 18 nt, Human
uuucuaaaggaggaaggg

SEQ ID NO: 1101350 - RNA, 21 nt, Human
uuugaaaugagucauuucaag

SEQ ID NO: 1101351 - RNA, 19 nt, Human
uuugagggggugguggagg

SEQ ID NO: 1101352 - RNA, 22 nt, Human
uuuuuguauuuuuuuguagaga

SEQ ID NO: 1101353 - RNA, 24 nt, Human
uuuuuguauuuuuuuguagagaca

SEQ ID NO: 1101354 - RNA, 19 nt, Human
uuuuuuuguagagacagag

SEQ ID NO: 1101355 - RNA, 24 nt, Human
aaaucagccaaaaaucaggagccu

SEQ ID NO: 1101356 - RNA, 23 nt, Human
agacaaaggugagucugacagag

SEQ ID NO: 1101357 - RNA, 24 nt, Human
agggucucggggagcgggucuggg

SEQ ID NO: 1101358 - RNA, 22 nt, Human
cccugcaggagauagugagggu

SEQ ID NO: 1101359 - RNA, 24 nt, Human
ccuccagggcggcuggaagucucc

SEQ ID NO: 1101360 - RNA, 24 nt, Human
ccuucucacagagaagacaaaggu

SEQ ID NO: 1101361 - RNA, 21 nt, Human
cggcaggcucugugacacccu

SEQ ID NO: 1101362 - RNA, 18 nt, Human
cuccagggcggcuggaag

SEQ ID NO: 1101363 - RNA, 22 nt, Human
cuccagggcggcuggaagucuc

SEQ ID NO: 1101364 - RNA, 20 nt, Human
cugacagagcggcaggcucu

SEQ ID NO: 1101365 - RNA, 24 nt, Human
gcuggaagucuccacugggcugcc

SEQ ID NO: 1101366 - RNA, 18 nt, Human
ucugacagagcggcaggc

SEQ ID NO: 1101367 - RNA, 23 nt, Human
ucugugacacccugcaggagaua

SEQ ID NO: 1101368 - RNA, 21 nt, Human
ugaaaaaucagccaaaaauca

SEQ ID NO: 1101369 - RNA, 24 nt, Human
ugaaaaaucagccaaaaaucagga

SEQ ID NO: 1101370 - RNA, 21 nt, Human
ugggugcaaggaccuccaggg

SEQ ID NO: 1101371 - RNA, 23 nt, Human
aaaaaaagccccaguuccacacc

SEQ ID NO: 1101372 - RNA, 21 nt, Human
aaagccccaguuccacaccaa

SEQ ID NO: 1101373 - RNA, 24 nt, Human
aaagugcugggauuauagguguga

SEQ ID NO: 1101374 - RNA, 19 nt, Human
aagauaguaacagcaacaa

SEQ ID NO: 1101375 - RNA, 18 nt, Human
aagugcugggauuauagg

SEQ ID NO: 1101376 - RNA, 26 nt, Human
aagugcugggauuauaggugugagcc

SEQ ID NO: 1101377 - RNA, 24 nt, Human
acaacagccacccuaacuuauguu

SEQ ID NO: 1101378 - RNA, 20 nt, Human
acagcaacaacagccacccu

SEQ ID NO: 1101379 - RNA, 21 nt, Human
acuuccagaaagaccauauug

SEQ ID NO: 1101380 - RNA, 21 nt, Human
aggugugagccaccgugccca

SEQ ID NO: 1101381 - RNA, 23 nt, Human
aguaacagcaacaacagccaccc

SEQ ID NO: 1101382 - RNA, 22 nt, Human
auaccuuaaaaaaaagccccag

SEQ ID NO: 1101383 - RNA, 24 nt, Human
caaagugcugggauuauaggugug

SEQ ID NO: 1101384 - RNA, 20 nt, Human
cacaacaaucaccuggauac

SEQ ID NO: 1101385 - RNA, 23 nt, Human
caccugccucggccucccaaagu

SEQ ID NO: 1101386 - RNA, 22 nt, Human
caccuggauaccuuaaaaaaaa

SEQ ID NO: 1101387 - RNA, 18 nt, Human
cagccuagaggauccuuc

SEQ ID NO: 1101388 - RNA, 24 nt, Human
cauauuggccaggcuggccucgaa

SEQ ID NO: 1101389 - RNA, 21 nt, Human
ccaaagugcugggauuauagg

SEQ ID NO: 1101390 - RNA, 24 nt, Human
ccaaagugcugggauuauaggugu

SEQ ID NO: 1101391 - RNA, 19 nt, Human
ccugaccucgugauccacc

SEQ ID NO: 1101392 - RNA, 21 nt, Human
ccugaccucgugauccaccug

SEQ ID NO: 1101393 - RNA, 24 nt, Human
cuccugaccucgugauccaccugc

SEQ ID NO: 1101394 - RNA, 23 nt, Human
cugccucggccucccaaagugcu

SEQ ID NO: 1101395 - RNA, 21 nt, Human
cugggauuauaggugugagcc

SEQ ID NO: 1101396 - RNA, 19 nt, Human
cuuccagaaagaccauauu

SEQ ID NO: 1101397 - RNA, 22 nt, Human
gaccucgugauccaccugccuc

SEQ ID NO: 1101398 - RNA, 22 nt, Human
gaccucgugauccaccugccuc

SEQ ID NO: 1101399 - RNA, 24 nt, Human
gaccucgugauccaccugccucgg

SEQ ID NO: 1101400 - RNA, 18 nt, Human
gauuauaggugugagcca

SEQ ID NO: 1101401 - RNA, 21 nt, Human
gauuauaggugugagccaccg

SEQ ID NO: 1101402 - RNA, 24 nt, Human
gauuauaggugugagccaccgugc

SEQ ID NO: 1101403 - RNA, 23 nt, Human
gcuggccucgaacuccugaccuc

SEQ ID NO: 1101404 - RNA, 24 nt, Human
ggcuggccucgaacuccugaccuc

SEQ ID NO: 1101405 - RNA, 24 nt, Human
gugauccaccugccucggccuccc

SEQ ID NO: 1101406 - RNA, 24 nt, Human
uaaaaaaaagccccaguuccacac

SEQ ID NO: 1101407 - RNA, 22 nt, Human
uaacagcaacaacagccacccu

SEQ ID NO: 1101408 - RNA, 20 nt, Human
uacugucugaguagauaucc

SEQ ID NO: 1101409 - RNA, 25 nt, Human
uagaggauccuucuucggagaaucu

SEQ ID NO: 1101410 - RNA, 26 nt, Human
uaguaacagcaacaacagccacccua

SEQ ID NO: 1101411 - RNA, 21 nt, Human
uccagaaagaccauauuggcc

SEQ ID NO: 1101412 - RNA, 23 nt, Human
ucccaaagugcugggauuauagg

SEQ ID NO: 1101413 - RNA, 18 nt, Human
ucggccucccaaagugcu

SEQ ID NO: 1101414 - RNA, 23 nt, Human
ugaguagauauccacuuccagaa

SEQ ID NO: 1101415 - RNA, 21 nt, Human
ugccucggccucccaaagugc

SEQ ID NO: 1101416 - RNA, 24 nt, Human
ugccucggccucccaaagugcugg

SEQ ID NO: 1101417 - RNA, 23 nt, Human
uggauaccuuaaaaaaaagcccc

SEQ ID NO: 1101418 - RNA, 24 nt, Human
uggccaggcuggccucgaacuccu

SEQ ID NO: 1101419 - RNA, 20 nt, Human
uggccucgaacuccugaccu

SEQ ID NO: 1101420 - RNA, 18 nt, Human
ugggauuauaggugugag

SEQ ID NO: 1101421 - RNA, 21 nt, Human
ugggauuauaggugugagcca

SEQ ID NO: 1101422 - RNA, 22 nt, Human
ugggauuauaggugugagccac

SEQ ID NO: 1101423 - RNA, 23 nt, Human
ugggauuauaggugugagccacc

SEQ ID NO: 1101424 - RNA, 23 nt, Human
ugggauuauaggugugagccacc

SEQ ID NO: 1101425 - RNA, 24 nt, Human
ugggauuauaggugugagccaccg

SEQ ID NO: 1101426 - RNA, 18 nt, Human
aagcucuuuuugaaucuc

SEQ ID NO: 1101427 - RNA, 24 nt, Human
auggaaccuccggaagcucuuuuu

SEQ ID NO: 1101428 - RNA, 19 nt, Human
uuagugguguggacccccc

SEQ ID NO: 1101429 - RNA, 19 nt, Human
uuuuucggauuuacuugua

SEQ ID NO: 1101430 - RNA, 24 nt, Human
aaaaaaaaaaaaaaaacgaaagag

SEQ ID NO: 1101431 - RNA, 20 nt, Human
aaaaaaaaaaaacgaaagag

SEQ ID NO: 1101432 - RNA, 26 nt, Human
aaaaaaaaaaaacgaaagagcgagga

SEQ ID NO: 1101433 - RNA, 30 nt, Human
aaaaaaaacgaaagagcgaggagaccggua

SEQ ID NO: 1101434 - RNA, 21 nt, Human
aagcagugcgcccuuuauggc

SEQ ID NO: 1101435 - RNA, 26 nt, Human
acaacagaggggaggaaaaaaaagaa

SEQ ID NO: 1101436 - RNA, 25 nt, Human
acagaggggaggaaaaaaaagaagc

SEQ ID NO: 1101437 - RNA, 19 nt, Human
accagggcuuugaauuuuc

SEQ ID NO: 1101438 - RNA, 23 nt, Human
agaaaaaaaacacaacagagggg

SEQ ID NO: 1101439 - RNA, 23 nt, Human
agaaaaaaaacacaacagagggg

SEQ ID NO: 1101440 - RNA, 18 nt, Human
agaccuccagcugcucaa

SEQ ID NO: 1101441 - RNA, 18 nt, Human
agagaggggcuagaagcg

SEQ ID NO: 1101442 - RNA, 22 nt, Human
agagauaaaggaaaagaggagg

SEQ ID NO: 1101443 - RNA, 18 nt, Human
agcagccgcagagguggc

SEQ ID NO: 1101444 - RNA, 20 nt, Human
aggaaaaaaaagaagcccua

SEQ ID NO: 1101445 - RNA, 26 nt, Human
aggaauggagagaaccagggcuuuga

SEQ ID NO: 1101446 - RNA, 23 nt, Human
caaagcagugcgcccuuuauggc

SEQ ID NO: 1101447 - RNA, 25 nt, Human
cacugagcccuccucuuggggaaaa

SEQ ID NO: 1101448 - RNA, 18 nt, Human
cagauuuauuagagaaac

SEQ ID NO: 1101449 - RNA, 24 nt, Human
cagccaccggcuccaccaguuuuc

SEQ ID NO: 1101450 - RNA, 19 nt, Human
cagccgcagagguggccag

SEQ ID NO: 1101451 - RNA, 22 nt, Human
cagggccaaggcgcacugaagc

SEQ ID NO: 1101452 - RNA, 23 nt, Human
ccagggccaaggcgcacugaagc

SEQ ID NO: 1101453 - RNA, 18 nt, Human
ccagggcuuugaauuuuc

SEQ ID NO: 1101454 - RNA, 24 nt, Human
ccccagguuugccugcggccaggg

SEQ ID NO: 1101455 - RNA, 20 nt, Human
ccccauacaccccaacauuu

SEQ ID NO: 1101456 - RNA, 21 nt, Human
cccggaguccagaccuccagc

SEQ ID NO: 1101457 - RNA, 18 nt, Human
ccgaacacagcaacuggg

SEQ ID NO: 1101458 - RNA, 22 nt, Human
ccucccaccccugccccuaauu

SEQ ID NO: 1101459 - RNA, 31 nt, Human
ccugcggccagggccaaggcgcacugaagcc

SEQ ID NO: 1101460 - RNA, 22 nt, Human
ccugcugacccgcauccaggga

SEQ ID NO: 1101461 - RNA, 26 nt, Human
cgcagccaccggcuccaccaguuuuc

SEQ ID NO: 1101462 - RNA, 21 nt, Human
cgcgcccagacgucuggcccc

SEQ ID NO: 1101463 - RNA, 31 nt, Human
cggaccugagugugugugugugugugugugg

SEQ ID NO: 1101464 - RNA, 23 nt, Human
cuugcacuaaguccugguggggg

SEQ ID NO: 1101465 - RNA, 21 nt, Human
gaaaggaccggcgcccccagg

SEQ ID NO: 1101466 - RNA, 18 nt, Human
gagacuguaaaagaauca

SEQ ID NO: 1101467 - RNA, 19 nt, Human
gaggagaaacaguugggcu

SEQ ID NO: 1101468 - RNA, 20 nt, Human
gaggagaaacaguugggcuu

SEQ ID NO: 1101469 - RNA, 23 nt, Human
gaggagaaacuccgcuuaccucc

SEQ ID NO: 1101470 - RNA, 22 nt, Human
gaggaggaauggagagaaccag

SEQ ID NO: 1101471 - RNA, 21 nt, Human
gaggggaccgugaggcaacgg

SEQ ID NO: 1101472 - RNA, 21 nt, Human
gauaaaggaaaagaggaggaa

SEQ ID NO: 1101473 - RNA, 25 nt, Human
gauaagcuaaaaaauagaaaaaaaa

SEQ ID NO: 1101474 - RNA, 18 nt, Human
gccgcagccaccggcucc

SEQ ID NO: 1101475 - RNA, 21 nt, Human
gccgcagccaccggcuccacc

SEQ ID NO: 1101476 - RNA, 18 nt, Human
gccgggaggacacaggag

SEQ ID NO: 1101477 - RNA, 20 nt, Human
gcgcccagacgucuggcccc

SEQ ID NO: 1101478 - RNA, 20 nt, Human
ggcagggauccggcggggcc

SEQ ID NO: 1101479 - RNA, 20 nt, Human
gggaaaauucagaaaauuga

SEQ ID NO: 1101480 - RNA, 21 nt, Human
gggggagaggagaggcugcag

SEQ ID NO: 1101481 - RNA, 20 nt, Human
guaaaagaaucaagaggcug

SEQ ID NO: 1101482 - RNA, 21 nt, Human
gugaggcaacggagggccgag

SEQ ID NO: 1101483 - RNA, 21 nt, Human
gugcgggucucagaacgaaag

SEQ ID NO: 1101484 - RNA, 20 nt, Human
gugugugugugugugugugu

SEQ ID NO: 1101485 - RNA, 23 nt, Human
uaaaaaauagaaaaaaaacacaa

SEQ ID NO: 1101486 - RNA, 24 nt, Human
uaaaaaugaaacuaucacuuuucc

SEQ ID NO: 1101487 - RNA, 18 nt, Human
uaaaauggggguaaggcc

SEQ ID NO: 1101488 - RNA, 22 nt, Human
uaacgagcccuauuuuuuuuau

SEQ ID NO: 1101489 - RNA, 23 nt, Human
uaagcuaaaaaauagaaaaaaaa

SEQ ID NO: 1101490 - RNA, 25 nt, Human
uagaaaaaaaacacaacagagggga

SEQ ID NO: 1101491 - RNA, 20 nt, Human
uagaguuggagugucccugg

SEQ ID NO: 1101492 - RNA, 20 nt, Human
uaggaaaaaaaaaaaaaaaa

SEQ ID NO: 1101493 - RNA, 18 nt, Human
uauggcguguaaaaaggg

SEQ ID NO: 1101494 - RNA, 18 nt, Human
uauuugaaaacucaccgg

SEQ ID NO: 1101495 - RNA, 21 nt, Human
ucagggccgaccaaggcgcgg

SEQ ID NO: 1101496 - RNA, 18 nt, Human
ucccaccccugccccuaa

SEQ ID NO: 1101497 - RNA, 22 nt, Human
uccgcagcugccgcuccaggga

SEQ ID NO: 1101498 - RNA, 22 nt, Human
ucgccuccuuucacggaaaauc

SEQ ID NO: 1101499 - RNA, 22 nt, Human
ucuuuugccggcuagccccucu

SEQ ID NO: 1101500 - RNA, 21 nt, Human
ugaaacuaucacuuuuccaaa

SEQ ID NO: 1101501 - RNA, 28 nt, Human
ugaaccuagagaaugagagaggggcuag

SEQ ID NO: 1101502 - RNA, 19 nt, Human
ugaauuuucagcgcguggc

SEQ ID NO: 1101503 - RNA, 21 nt, Human
ugaggaaaggaccggcgcccc

SEQ ID NO: 1101504 - RNA, 19 nt, Human
ugaggagaaacaguugggc

SEQ ID NO: 1101505 - RNA, 21 nt, Human
ugaggcaacggagggccgagu

SEQ ID NO: 1101506 - RNA, 28 nt, Human
ugcaaggggcugugaacaaccagggugc

SEQ ID NO: 1101507 - RNA, 19 nt, Human
ugccccaccgaacacagca

SEQ ID NO: 1101508 - RNA, 23 nt, Human
ugccccaccgaacacagcaacug

SEQ ID NO: 1101509 - RNA, 26 nt, Human
ugcccggaguccagaccuccagcugc

SEQ ID NO: 1101510 - RNA, 21 nt, Human
ugcugacccgcauccagggac

SEQ ID NO: 1101511 - RNA, 19 nt, Human
uggcguguaaaaaggggga

SEQ ID NO: 1101512 - RNA, 22 nt, Human
uggggaccccauacaccccaac

SEQ ID NO: 1101513 - RNA, 22 nt, Human
uguguguguguguggaugucug

SEQ ID NO: 1101514 - RNA, 19 nt, Human
uguguguguguguguggau

SEQ ID NO: 1101515 - RNA, 21 nt, Human
uguguguguguguguggaugu

SEQ ID NO: 1101516 - RNA, 18 nt, Human
ugugugugugugugugug

SEQ ID NO: 1101517 - RNA, 18 nt, Human
ugugugugugugugugug

SEQ ID NO: 1101518 - RNA, 18 nt, Human
ugugugugugugugugug

SEQ ID NO: 1101519 - RNA, 20 nt, Human
ugugugugugugugugugug

SEQ ID NO: 1101520 - RNA, 21 nt, Human
ugugugugugugugugugugu

SEQ ID NO: 1101521 - RNA, 21 nt, Human
ugugugugugugugugugugu

SEQ ID NO: 1101522 - RNA, 21 nt, Human
ugugugugugugugugugugu

SEQ ID NO: 1101523 - RNA, 21 nt, Human
ugugugugugugugugugugu

SEQ ID NO: 1101524 - RNA, 22 nt, Human
ugugugugugugugugugugug

SEQ ID NO: 1101525 - RNA, 22 nt, Human
ugugugugugugugugugugug

SEQ ID NO: 1101526 - RNA, 22 nt, Human
uguuauaggaaaaaaaaaaaaa

SEQ ID NO: 1101527 - RNA, 26 nt, Human
uguucuaaaucaucucuacaccgugc

SEQ ID NO: 1101528 - RNA, 18 nt, Human
uguuucaaauucugagga

SEQ ID NO: 1101529 - RNA, 22 nt, Human
uucuacguacaccucccacccc

SEQ ID NO: 1101530 - RNA, 25 nt, Human
uucuacguacaccucccaccccugc

SEQ ID NO: 1101531 - RNA, 21 nt, Human
uugaggagaaacuccgcuuac

SEQ ID NO: 1101532 - RNA, 22 nt, Human
uugccccaccgaacacagcaac

SEQ ID NO: 1101533 - RNA, 18 nt, Human
uuuauaaacacccagcgg

SEQ ID NO: 1101534 - RNA, 20 nt, Human
aaaaccccaaucggcuccuc

SEQ ID NO: 1101535 - RNA, 20 nt, Human
aaagagagagaaacagcugu

SEQ ID NO: 1101536 - RNA, 18 nt, Human
aacaacacaaaaacaacc

SEQ ID NO: 1101537 - RNA, 24 nt, Human
aacaacacaaaaacaacccucuaa

SEQ ID NO: 1101538 - RNA, 25 nt, Human
acaaaaugcgcugcuaggauccccc

SEQ ID NO: 1101539 - RNA, 27 nt, Human
acaacacaaaaacaacccucuaacugc

SEQ ID NO: 1101540 - RNA, 19 nt, Human
acaacuagguccagagacc

SEQ ID NO: 1101541 - RNA, 18 nt, Human
acaggaacaacacaaaaa

SEQ ID NO: 1101542 - RNA, 21 nt, Human
acaggaacaacacaaaaacaa

SEQ ID NO: 1101543 - RNA, 18 nt, Human
accccccucaccccucca

SEQ ID NO: 1101544 - RNA, 26 nt, Human
accucgccccucccagccacccuccg

SEQ ID NO: 1101545 - RNA, 22 nt, Human
agaccaagcagauggggcccca

SEQ ID NO: 1101546 - RNA, 24 nt, Human
agagagaaacagcuguaaagaaaa

SEQ ID NO: 1101547 - RNA, 18 nt, Human
agagaggaacaggcggca

SEQ ID NO: 1101548 - RNA, 19 nt, Human
agcgaaaccgaaggcccga

SEQ ID NO: 1101549 - RNA, 24 nt, Human
aggaagucaaaauaauaucaauuu

SEQ ID NO: 1101550 - RNA, 18 nt, Human
aggauccccaccagcucc

SEQ ID NO: 1101551 - RNA, 24 nt, Human
aggcggcugggugugaagguggug

SEQ ID NO: 1101552 - RNA, 19 nt, Human
auaauaguaaaauaagagc

SEQ ID NO: 1101553 - RNA, 22 nt, Human
aucggcuccuccgugccccucc

SEQ ID NO: 1101554 - RNA, 25 nt, Human
auuucauuaacaaauacaggaacaa

SEQ ID NO: 1101555 - RNA, 23 nt, Human
caaaaacaacccucuaacugcaa

SEQ ID NO: 1101556 - RNA, 23 nt, Human
caacucgccagcucucggaaacc

SEQ ID NO: 1101557 - RNA, 21 nt, Human
caagccuuuaguuugugauca

SEQ ID NO: 1101558 - RNA, 23 nt, Human
cacaaaaacaacccucuaacugc

SEQ ID NO: 1101559 - RNA, 27 nt, Human
cacaaaaacaacccucuaacugcaaca

SEQ ID NO: 1101560 - RNA, 21 nt, Human
cacaacuagguccagagaccc

SEQ ID NO: 1101561 - RNA, 23 nt, Human
caccaaggcgccgcaccccccuc

SEQ ID NO: 1101562 - RNA, 18 nt, Human
caccaccugccaauccca

SEQ ID NO: 1101563 - RNA, 22 nt, Human
caccccaagagagaggaacagg

SEQ ID NO: 1101564 - RNA, 20 nt, Human
caccccccucaccccuccag

SEQ ID NO: 1101565 - RNA, 18 nt, Human
caccggagcgggaggcug

SEQ ID NO: 1101566 - RNA, 19 nt, Human
caccggagcgggaggcugc

SEQ ID NO: 1101567 - RNA, 23 nt, Human
caccuccccugcgcucccggguc

SEQ ID NO: 1101568 - RNA, 24 nt, Human
cagcaccccaagagagaggaacag

SEQ ID NO: 1101569 - RNA, 21 nt, Human
caggaacaacacaaaaacaac

SEQ ID NO: 1101570 - RNA, 20 nt, Human
cagguggguaggaggagagu

SEQ ID NO: 1101571 - RNA, 25 nt, Human
cauaggccacuuagggucuccagga

SEQ ID NO: 1101572 - RNA, 22 nt, Human
ccaaggcgccgcaccccccuca

SEQ ID NO: 1101573 - RNA, 23 nt, Human
ccaccaaggcgccgcaccccccu

SEQ ID NO: 1101574 - RNA, 24 nt, Human
ccaccgcggguuuggguauccuuc

SEQ ID NO: 1101575 - RNA, 19 nt, Human
ccagacaggcugaacucac

SEQ ID NO: 1101576 - RNA, 24 nt, Human
ccagagaucucugccuaugcccag

SEQ ID NO: 1101577 - RNA, 19 nt, Human
ccaguccugggaccuugca

SEQ ID NO: 1101578 - RNA, 21 nt, Human
cccacaacuagguccagagac

SEQ ID NO: 1101579 - RNA, 23 nt, Human
cccagccacccuccgccguccag

SEQ ID NO: 1101580 - RNA, 19 nt, Human
cccaggugccccagcaccc

SEQ ID NO: 1101581 - RNA, 24 nt, Human
ccccaccccauaccuccuguccuu

SEQ ID NO: 1101582 - RNA, 18 nt, Human
ccccccucaccccuccag

SEQ ID NO: 1101583 - RNA, 21 nt, Human
ccccucaccccuccagccgcc

SEQ ID NO: 1101584 - RNA, 23 nt, Human
ccccucaccccuccagccgcccg

SEQ ID NO: 1101585 - RNA, 18 nt, Human
ccccuccagccgcccgag

SEQ ID NO: 1101586 - RNA, 23 nt, Human
ccccucccagccacccuccgccg

SEQ ID NO: 1101587 - RNA, 19 nt, Human
cccucccccaccccauacc

SEQ ID NO: 1101588 - RNA, 20 nt, Human
cccucuaacugcaacacucc

SEQ ID NO: 1101589 - RNA, 21 nt, Human
ccgcccgagauggagaacagg

SEQ ID NO: 1101590 - RNA, 19 nt, Human
ccuaugcccaguccuggga

SEQ ID NO: 1101591 - RNA, 23 nt, Human
ccuccgccguccaggcgugccca

SEQ ID NO: 1101592 - RNA, 24 nt, Human
ccucgccccucccagccacccucc

SEQ ID NO: 1101593 - RNA, 18 nt, Human
ccucugggccugauuucu

SEQ ID NO: 1101594 - RNA, 24 nt, Human
ccugcccacaacuagguccagaga

SEQ ID NO: 1101595 - RNA, 23 nt, Human
ccugcgcaccggcggcggcggcg

SEQ ID NO: 1101596 - RNA, 21 nt, Human
cgaaaccgaaggcccgagcgg

SEQ ID NO: 1101597 - RNA, 22 nt, Human
cgagauggagaacaggguuuau

SEQ ID NO: 1101598 - RNA, 21 nt, Human
cgagcugagccaccuccccug

SEQ ID NO: 1101599 - RNA, 23 nt, Human
cgcauaauaguaaaauaagagca

SEQ ID NO: 1101600 - RNA, 18 nt, Human
cgccccucccagccaccc

SEQ ID NO: 1101601 - RNA, 21 nt, Human
cgcgagcugagccaccucccc

SEQ ID NO: 1101602 - RNA, 22 nt, Human
cgcuaggaaucaucaccuuuug

SEQ ID NO: 1101603 - RNA, 22 nt, Human
cggcggcggcggcgcggaggag

SEQ ID NO: 1101604 - RNA, 21 nt, Human
cggcuccuccgugccccucca

SEQ ID NO: 1101605 - RNA, 23 nt, Human
cuccagagaucucugccuaugcc

SEQ ID NO: 1101606 - RNA, 18 nt, Human
cucccccaccccauaccu

SEQ ID NO: 1101607 - RNA, 20 nt, Human
cucccccaccccauaccucc

SEQ ID NO: 1101608 - RNA, 21 nt, Human
cuccccuucaccgcccagaag

SEQ ID NO: 1101609 - RNA, 20 nt, Human
cuccuccgugccccuccaaa

SEQ ID NO: 1101610 - RNA, 25 nt, Human
cugcccacaacuagguccagagacc

SEQ ID NO: 1101611 - RNA, 21 nt, Human
cugccucuccccuucaccgcc

SEQ ID NO: 1101612 - RNA, 23 nt, Human
cuuagggucuccaggacccacuc

SEQ ID NO: 1101613 - RNA, 24 nt, Human
cuuagggucuccaggacccacucc

SEQ ID NO: 1101614 - RNA, 20 nt, Human
cuucccagccgccuucuccu

SEQ ID NO: 1101615 - RNA, 25 nt, Human
gaccucgccccucccagccacccuc

SEQ ID NO: 1101616 - RNA, 20 nt, Human
gaggaagaggcggcugggug

SEQ ID NO: 1101617 - RNA, 21 nt, Human
gccccucccccaccccauacc

SEQ ID NO: 1101618 - RNA, 22 nt, Human
gccgcaccccccucaccccucc

SEQ ID NO: 1101619 - RNA, 21 nt, Human
gcgagcugagccaccuccccu

SEQ ID NO: 1101620 - RNA, 19 nt, Human
gcggcagagccaccgcggg

SEQ ID NO: 1101621 - RNA, 21 nt, Human
ggccggcggccgggccucucu

SEQ ID NO: 1101622 - RNA, 18 nt, Human
ggcggcggcggcgcggag

SEQ ID NO: 1101623 - RNA, 18 nt, Human
uaaaauaagagcaggggc

SEQ ID NO: 1101624 - RNA, 23 nt, Human
uacaggaacaacacaaaaacaac

SEQ ID NO: 1101625 - RNA, 23 nt, Human
uaccuccuguccuucucaacucg

SEQ ID NO: 1101626 - RNA, 18 nt, Human
uagcgugaccucgccccu

SEQ ID NO: 1101627 - RNA, 22 nt, Human
uagcgugaccucgccccuccca

SEQ ID NO: 1101628 - RNA, 23 nt, Human
uagcgugaccucgccccucccag

SEQ ID NO: 1101629 - RNA, 19 nt, Human
uaggauccccaccagcucc

SEQ ID NO: 1101630 - RNA, 25 nt, Human
ucaccaccugccaaucccaccaagg

SEQ ID NO: 1101631 - RNA, 24 nt, Human
ucagcgagggagcgaaaccgaagg

SEQ ID NO: 1101632 - RNA, 20 nt, Human
ucagggagacuagagucugg

SEQ ID NO: 1101633 - RNA, 19 nt, Human
ucagugguaaaaagagaga

SEQ ID NO: 1101634 - RNA, 20 nt, Human
uccaaagcgccucucagcga

SEQ ID NO: 1101635 - RNA, 21 nt, Human
uccaggccccucccccacccc

SEQ ID NO: 1101636 - RNA, 25 nt, Human
ucccaccaaggcgccgcaccccccu

SEQ ID NO: 1101637 - RNA, 20 nt, Human
ucccgggucuuuccguggcu

SEQ ID NO: 1101638 - RNA, 22 nt, Human
ucgccagcucucggaaacccgu

SEQ ID NO: 1101639 - RNA, 22 nt, Human
ucuaacugcaacacuccagaga

SEQ ID NO: 1101640 - RNA, 23 nt, Human
ucucccagacaggcugaacucac

SEQ ID NO: 1101641 - RNA, 19 nt, Human
ucucugccuaugcccaguc

SEQ ID NO: 1101642 - RNA, 23 nt, Human
ugcggcccaggugccccagcacc

SEQ ID NO: 1101643 - RNA, 21 nt, Human
uggcagccacagguugcuagc

SEQ ID NO: 1101644 - RNA, 21 nt, Human
uggcccagggcccacagacaa

SEQ ID NO: 1101645 - RNA, 23 nt, Human
uggcuucccagccgccuucuccu

SEQ ID NO: 1101646 - RNA, 19 nt, Human
ugggaccuugcaggugggu

SEQ ID NO: 1101647 - RNA, 22 nt, Human
ugggagggccgcugggccggcg

SEQ ID NO: 1101648 - RNA, 24 nt, Human
uggguauccuugauccuggcgccc

SEQ ID NO: 1101649 - RNA, 19 nt, Human
uucccagccgccuucuccu

SEQ ID NO: 1101650 - RNA, 27 nt, Human
aagaccccuacccuggggugggggggg

SEQ ID NO: 1101651 - RNA, 21 nt, Human
aaggagccaggguugggaaug

SEQ ID NO: 1101652 - RNA, 24 nt, Human
aauagaggucacaaguggccucca

SEQ ID NO: 1101653 - RNA, 19 nt, Human
aaugcaagaaucagaagga

SEQ ID NO: 1101654 - RNA, 24 nt, Human
acacaucaccacacggaccaaucc

SEQ ID NO: 1101655 - RNA, 20 nt, Human
acaggacagcguccagagga

SEQ ID NO: 1101656 - RNA, 22 nt, Human
acaucaccacacggaccaaucc

SEQ ID NO: 1101657 - RNA, 20 nt, Human
accucguucgccccaguggu

SEQ ID NO: 1101658 - RNA, 20 nt, Human
agaaguugaagcuguucauu

SEQ ID NO: 1101659 - RNA, 20 nt, Human
agagcacagucuucaucuuc

SEQ ID NO: 1101660 - RNA, 19 nt, Human
aggaaagugucaugagagu

SEQ ID NO: 1101661 - RNA, 21 nt, Human
aggaggagcugggagugaggu

SEQ ID NO: 1101662 - RNA, 22 nt, Human
aggguucucaucggcaagaagu

SEQ ID NO: 1101663 - RNA, 23 nt, Human
agguagagcacagucuucaucuu

SEQ ID NO: 1101664 - RNA, 23 nt, Human
aguggugggcuggggauggggag

SEQ ID NO: 1101665 - RNA, 19 nt, Human
auacugcuccugccucgug

SEQ ID NO: 1101666 - RNA, 21 nt, Human
auauauaugcacagcaauccc

SEQ ID NO: 1101667 - RNA, 21 nt, Human
aucugaaggcaugaugugagg

SEQ ID NO: 1101668 - RNA, 19 nt, Human
augaugcuggggagugauc

SEQ ID NO: 1101669 - RNA, 23 nt, Human
auggggagcaggaggagguagag

SEQ ID NO: 1101670 - RNA, 24 nt, Human
caaguggccuccagccaaaauccu

SEQ ID NO: 1101671 - RNA, 18 nt, Human
caccuggccauguugagc

SEQ ID NO: 1101672 - RNA, 24 nt, Human
cacugagccaauaggagugagugg

SEQ ID NO: 1101673 - RNA, 21 nt, Human
cagcaguccugagugcuacac

SEQ ID NO: 1101674 - RNA, 22 nt, Human
cagcguccagaggaggaagaga

SEQ ID NO: 1101675 - RNA, 25 nt, Human
caggacccacaaagaccccuacccu

SEQ ID NO: 1101676 - RNA, 24 nt, Human
cauuauguuaaccuucuugggagc

SEQ ID NO: 1101677 - RNA, 25 nt, Human
cauuauguuaaccuucuugggagcu

SEQ ID NO: 1101678 - RNA, 26 nt, Human
ccagcuacacguauauacuuacugca

SEQ ID NO: 1101679 - RNA, 20 nt, Human
ccaggcacacaguagaugcu

SEQ ID NO: 1101680 - RNA, 18 nt, Human
cccugggguggggggggu

SEQ ID NO: 1101681 - RNA, 19 nt, Human
ccuccagccaaaauccugc

SEQ ID NO: 1101682 - RNA, 23 nt, Human
ccugugccagcuacacguauaua

SEQ ID NO: 1101683 - RNA, 18 nt, Human
ccuucaagcuguuaccua

SEQ ID NO: 1101684 - RNA, 21 nt, Human
cuacacugaugcagcaaugac

SEQ ID NO: 1101685 - RNA, 19 nt, Human
cucccucucagcuugauuc

SEQ ID NO: 1101686 - RNA, 23 nt, Human
cugaaccucguucgccccagugg

SEQ ID NO: 1101687 - RNA, 19 nt, Human
cugccucgugagcagagag

SEQ ID NO: 1101688 - RNA, 20 nt, Human
cugcuccucccugaaccucg

SEQ ID NO: 1101689 - RNA, 24 nt, Human
cuucuuucuaggcuucaguuucau

SEQ ID NO: 1101690 - RNA, 19 nt, Human
gaggccuucugggcacuga

SEQ ID NO: 1101691 - RNA, 27 nt, Human
gcacugagccaauaggagugagugguu

SEQ ID NO: 1101692 - RNA, 23 nt, Human
gcagucacuucuuucuaggcuuc

SEQ ID NO: 1101693 - RNA, 21 nt, Human
ggcuccagucugcgcuccacc

SEQ ID NO: 1101694 - RNA, 18 nt, Human
gguggcccuccaggacag

SEQ ID NO: 1101695 - RNA, 23 nt, Human
gugggcucucucugaggccuucu

SEQ ID NO: 1101696 - RNA, 18 nt, Human
gugggcuggggaugggga

SEQ ID NO: 1101697 - RNA, 22 nt, Human
guggugggcuggggauggggag

SEQ ID NO: 1101698 - RNA, 19 nt, Human
guucaggaaagugucauga

SEQ ID NO: 1101699 - RNA, 19 nt, Human
uaagaugagacacaucacc

SEQ ID NO: 1101700 - RNA, 22 nt, Human
uacacacaggacagcguccaga

SEQ ID NO: 1101701 - RNA, 24 nt, Human
uaccucuaaggacuguucuucagc

SEQ ID NO: 1101702 - RNA, 19 nt, Human
uacgaugaguagcaaaacc

SEQ ID NO: 1101703 - RNA, 19 nt, Human
uagaugucuucagcagucc

SEQ ID NO: 1101704 - RNA, 19 nt, Human
uagcaagguccugugccag

SEQ ID NO: 1101705 - RNA, 19 nt, Human
uaggagugagugguuccau

SEQ ID NO: 1101706 - RNA, 27 nt, Human
uaggcuccagucugcgcuccacccagg

SEQ ID NO: 1101707 - RNA, 21 nt, Human
uauucaguguaaacuaagcac

SEQ ID NO: 1101708 - RNA, 20 nt, Human
ucacaaguggccuccagcca

SEQ ID NO: 1101709 - RNA, 21 nt, Human
ucaccacacggaccaaucccc

SEQ ID NO: 1101710 - RNA, 21 nt, Human
ucaucggcaagaaguugaagc

SEQ ID NO: 1101711 - RNA, 19 nt, Human
ucaugagagugacaggggc

SEQ ID NO: 1101712 - RNA, 23 nt, Human
uccugggcucaggugagucccug

SEQ ID NO: 1101713 - RNA, 19 nt, Human
uccugugcuagcaaggucc

SEQ ID NO: 1101714 - RNA, 22 nt, Human
ucgugagcagagagaggguucu

SEQ ID NO: 1101715 - RNA, 21 nt, Human
ucuccuggugguggcccucca

SEQ ID NO: 1101716 - RNA, 24 nt, Human
ucucucugaggccuucugggcacu

SEQ ID NO: 1101717 - RNA, 23 nt, Human
ucucuugguaaggaagaugagga

SEQ ID NO: 1101718 - RNA, 25 nt, Human
ucugagugcuggugaaaugguucag

SEQ ID NO: 1101719 - RNA, 18 nt, Human
ucugcgcuccacccagga

SEQ ID NO: 1101720 - RNA, 22 nt, Human
ucuugggagcugagcucugggg

SEQ ID NO: 1101721 - RNA, 21 nt, Human
ugaagcuguucauuuucuaag

SEQ ID NO: 1101722 - RNA, 21 nt, Human
ugagcugcaggaggagcuggg

SEQ ID NO: 1101723 - RNA, 20 nt, Human
ugagucugaggugggaggcc

SEQ ID NO: 1101724 - RNA, 21 nt, Human
ugagugggcagaguuagaugu

SEQ ID NO: 1101725 - RNA, 24 nt, Human
ugcuccaguggugggccguccccg

SEQ ID NO: 1101726 - RNA, 20 nt, Human
uggccauguugagcugcagg

SEQ ID NO: 1101727 - RNA, 20 nt, Human
uggccuccagccaaaauccu

SEQ ID NO: 1101728 - RNA, 18 nt, Human
uggcuggggcaaagucga

SEQ ID NO: 1101729 - RNA, 24 nt, Human
ugggcagaguuagauguuuguugg

SEQ ID NO: 1101730 - RNA, 19 nt, Human
ugggcucucucugaggccu

SEQ ID NO: 1101731 - RNA, 24 nt, Human
uggggagcaggaggagguagagcu

SEQ ID NO: 1101732 - RNA, 19 nt, Human
uggggauggggagcaggag

SEQ ID NO: 1101733 - RNA, 21 nt, Human
ugggguggggggggugcguuu

SEQ ID NO: 1101734 - RNA, 21 nt, Human
ugugcuuugcaacaauggccu

SEQ ID NO: 1101735 - RNA, 22 nt, Human
uuagauguuuguuggcuccccu

SEQ ID NO: 1101736 - RNA, 19 nt, Human
uuaggcuccagucugcgcu

SEQ ID NO: 1101737 - RNA, 18 nt, Human
uucaacucuuccagugaa

SEQ ID NO: 1101738 - RNA, 18 nt, Human
uucccgguuuauccugug

SEQ ID NO: 1101739 - RNA, 21 nt, Human
uucuaagacuucucccucuca

SEQ ID NO: 1101740 - RNA, 25 nt, Human
uucuaagacuucucccucucagcuu

SEQ ID NO: 1101741 - RNA, 24 nt, Human
uucuaggcuucaguuucauccacu

SEQ ID NO: 1101742 - RNA, 22 nt, Human
uucugagugcuggugaaauggu

SEQ ID NO: 1101743 - RNA, 24 nt, Human
uugaauuugaagaaugaugcuggg

SEQ ID NO: 1101744 - RNA, 21 nt, Human
aaauaucuguucaauaccuaa

SEQ ID NO: 1101745 - RNA, 20 nt, Human
agagccccccaaccacccuc

SEQ ID NO: 1101746 - RNA, 21 nt, Human
cacugcuaaagguaucaggag

SEQ ID NO: 1101747 - RNA, 23 nt, Human
ccccaaccacccucuaaguuggg

SEQ ID NO: 1101748 - RNA, 23 nt, Human
cccccaaccacccucuaaguugg

SEQ ID NO: 1101749 - RNA, 22 nt, Human
ccugggguuauuaccuaaccuc

SEQ ID NO: 1101750 - RNA, 22 nt, Human
cuggaaagcucuaaugcucccc

SEQ ID NO: 1101751 - RNA, 22 nt, Human
gagccccccaaccacccucuaa

SEQ ID NO: 1101752 - RNA, 18 nt, Human
ggaggggaagaaaagaga

SEQ ID NO: 1101753 - RNA, 20 nt, Human
gggaagaaaagagaaugugg

SEQ ID NO: 1101754 - RNA, 21 nt, Human
uaaagguaucaggagacccac

SEQ ID NO: 1101755 - RNA, 24 nt, Human
uaccuaaccucccgugacugcugg

SEQ ID NO: 1101756 - RNA, 24 nt, Human
ucuccugggguuauuaccuaaccu

SEQ ID NO: 1101757 - RNA, 19 nt, Human
uggagagccccccaaccac

SEQ ID NO: 1101758 - RNA, 23 nt, Human
uuaaugaggauggagagcccccc

SEQ ID NO: 1101759 - RNA, 19 nt, Human
uuccagggguaaagcacug

SEQ ID NO: 1101760 - RNA, 23 nt, Human
aaaugacuugcaacguuauaggc

SEQ ID NO: 1101761 - RNA, 24 nt, Human
acuuuaugaucaugaaccuguaau

SEQ ID NO: 1101762 - RNA, 20 nt, Human
augaaccuguaauuuccaaa

SEQ ID NO: 1101763 - RNA, 18 nt, Human
cagccgcugcugcggcug

SEQ ID NO: 1101764 - RNA, 24 nt, Human
caggcucugcuucuucaaagcucu

SEQ ID NO: 1101765 - RNA, 19 nt, Human
ccgcugcugcggcugccgc

SEQ ID NO: 1101766 - RNA, 18 nt, Human
ccuguaauuuccaaaagu

SEQ ID NO: 1101767 - RNA, 21 nt, Human
ccuguaauuuccaaaaguaag

SEQ ID NO: 1101768 - RNA, 22 nt, Human
cguuauaggcuauggaguuuca

SEQ ID NO: 1101769 - RNA, 23 nt, Human
cugcagccgcugcugcggcugcc

SEQ ID NO: 1101770 - RNA, 24 nt, Human
gcaaagccggauagagcggagcca

SEQ ID NO: 1101771 - RNA, 23 nt, Human
gcuauggaguuucaaccaccaag

SEQ ID NO: 1101772 - RNA, 22 nt, Human
ucaaccaccaagaagugggugc

SEQ ID NO: 1101773 - RNA, 18 nt, Human
ugcagccgcugcugcggc

SEQ ID NO: 1101774 - RNA, 26 nt, Human
ugccgcagcuccccuagcaaagccgg

SEQ ID NO: 1101775 - RNA, 18 nt, Human
ugcugcggcugccgcagc

SEQ ID NO: 1101776 - RNA, 21 nt, Human
ugcugugguuuuuugaacaua

SEQ ID NO: 1101777 - RNA, 22 nt, Human
uuguaguuaaaauuaacaauac

SEQ ID NO: 1101778 - RNA, 20 nt, Human
uuuccuuuuuauggugcagg

SEQ ID NO: 1101779 - RNA, 21 nt, Human
uuuuauggugcaggcucugcu

SEQ ID NO: 1101780 - RNA, 19 nt, Human
acccugagccucagcccgg

SEQ ID NO: 1101781 - RNA, 19 nt, Human
agccccuaaccccgccuca

SEQ ID NO: 1101782 - RNA, 24 nt, Human
ccaacccugagccucagcccggcc

SEQ ID NO: 1101783 - RNA, 22 nt, Human
ccccgccggccuccccagcccg

SEQ ID NO: 1101784 - RNA, 24 nt, Human
cccgccuagccccuaaccccgccu

SEQ ID NO: 1101785 - RNA, 22 nt, Human
ccuaaccccgccucaugcuggc

SEQ ID NO: 1101786 - RNA, 19 nt, Human
ccuagccccuaaccccgcc

SEQ ID NO: 1101787 - RNA, 21 nt, Human
ccucaugcuggcgcagccccc

SEQ ID NO: 1101788 - RNA, 23 nt, Human
cucagcccggccgagcccucggc

SEQ ID NO: 1101789 - RNA, 18 nt, Human
cuccccagcccggcuccc

SEQ ID NO: 1101790 - RNA, 21 nt, Human
gagcccucggcccagccguga

SEQ ID NO: 1101791 - RNA, 23 nt, Human
gcccccgccuagccccuaacccc

SEQ ID NO: 1101792 - RNA, 20 nt, Human
uagccccuaaccccgccuca

SEQ ID NO: 1101793 - RNA, 21 nt, Human
ucuugcgugaaguccaacccu

SEQ ID NO: 1101794 - RNA, 21 nt, Human
aaaggccaggacccacagaua

SEQ ID NO: 1101795 - RNA, 23 nt, Human
aaccccaaacaggccuggacaug

SEQ ID NO: 1101796 - RNA, 23 nt, Human
aaccccaacaggccccuccuggc

SEQ ID NO: 1101797 - RNA, 21 nt, Human
aacuacuaauugucaaccacc

SEQ ID NO: 1101798 - RNA, 19 nt, Human
aaggaggggggcgaagagg

SEQ ID NO: 1101799 - RNA, 20 nt, Human
aaggaggggggcgaagaggg

SEQ ID NO: 1101800 - RNA, 23 nt, Human
acacacacacacacacacacaca

SEQ ID NO: 1101801 - RNA, 31 nt, Human
acacacacacacacacacacacacccugugg

SEQ ID NO: 1101802 - RNA, 25 nt, Human
acacacacacacacacacacacccu

SEQ ID NO: 1101803 - RNA, 20 nt, Human
acaccgaaagaaaagaaaag

SEQ ID NO: 1101804 - RNA, 23 nt, Human
acccagcuucaggaguagaagcc

SEQ ID NO: 1101805 - RNA, 22 nt, Human
accccauucucucuccucccca

SEQ ID NO: 1101806 - RNA, 28 nt, Human
accccauucucucuccuccccacaguca

SEQ ID NO: 1101807 - RNA, 19 nt, Human
acccugugauuaaacuacu

SEQ ID NO: 1101808 - RNA, 24 nt, Human
acucaaaccccaacaggccccucc

SEQ ID NO: 1101809 - RNA, 21 nt, Human
agaaaggccaggacccacaga

SEQ ID NO: 1101810 - RNA, 18 nt, Human
agaaauaaugugugcccc

SEQ ID NO: 1101811 - RNA, 23 nt, Human
agaaaucccaucccuucccaucu

SEQ ID NO: 1101812 - RNA, 18 nt, Human
agaaccuucccuaccccu

SEQ ID NO: 1101813 - RNA, 24 nt, Human
agagaagagaugaaaagagcagag

SEQ ID NO: 1101814 - RNA, 24 nt, Human
agagaggggaagggagcuugaggu

SEQ ID NO: 1101815 - RNA, 21 nt, Human
agagaugaaaagagcagaggg

SEQ ID NO: 1101816 - RNA, 21 nt, Human
agaggggaagggagcuugagg

SEQ ID NO: 1101817 - RNA, 19 nt, Human
agauaugaaccaggaugcc

SEQ ID NO: 1101818 - RNA, 18 nt, Human
agcaacacagauaugaac

SEQ ID NO: 1101819 - RNA, 19 nt, Human
agccgcugagguccucucc

SEQ ID NO: 1101820 - RNA, 21 nt, Human
aggccaggccacccagcuuca

SEQ ID NO: 1101821 - RNA, 18 nt, Human
aggcccagcuaagcccag

SEQ ID NO: 1101822 - RNA, 21 nt, Human
aggcccagcuaagcccaguga

SEQ ID NO: 1101823 - RNA, 24 nt, Human
aggccucagaggcccagcuaagcc

SEQ ID NO: 1101824 - RNA, 22 nt, Human
aggccuggccuggcugccggcc

SEQ ID NO: 1101825 - RNA, 23 nt, Human
aguacaggagacaccgaaagaaa

SEQ ID NO: 1101826 - RNA, 19 nt, Human
auaaugugugccccacccc

SEQ ID NO: 1101827 - RNA, 19 nt, Human
auaccacagacacacccug

SEQ ID NO: 1101828 - RNA, 25 nt, Human
auauacaugcgugcacauaaacaca

SEQ ID NO: 1101829 - RNA, 21 nt, Human
aucccaucccuucccaucucc

SEQ ID NO: 1101830 - RNA, 23 nt, Human
aucccuucccaucuccuccccca

SEQ ID NO: 1101831 - RNA, 23 nt, Human
augaagaaaggccaggacccaca

SEQ ID NO: 1101832 - RNA, 31 nt, Human
augcgugcacauaaacacacacacacacaca

SEQ ID NO: 1101833 - RNA, 18 nt, Human
caacacagauaugaacca

SEQ ID NO: 1101834 - RNA, 22 nt, Human
caaccccaaacaggccuggaca

SEQ ID NO: 1101835 - RNA, 20 nt, Human
cacacacacacacacacaca

SEQ ID NO: 1101836 - RNA, 20 nt, Human
cacacacacacacacacaca

SEQ ID NO: 1101837 - RNA, 20 nt, Human
cacacacacacacacacaca

SEQ ID NO: 1101838 - RNA, 20 nt, Human
cacacacacacacacacaca

SEQ ID NO: 1101839 - RNA, 22 nt, Human
cacacacacacacacacacaca

SEQ ID NO: 1101840 - RNA, 22 nt, Human
cacacacacacacacacacaca

SEQ ID NO: 1101841 - RNA, 26 nt, Human
cacacacacacacacacacacacaca

SEQ ID NO: 1101842 - RNA, 30 nt, Human; identical to SEQ ID NO: 326474

SEQ ID NO: 1101843 - RNA, 22 nt, Human
cacacacacacccugugauuaa

SEQ ID NO: 1101844 - RNA, 20 nt, Human
cacagacacuguagucagca

SEQ ID NO: 1101845 - RNA, 20 nt, Human
cagacacacccugugccaga

SEQ ID NO: 1101846 - RNA, 20 nt, Human
cagacacuguagucagcaac

SEQ ID NO: 1101847 - RNA, 30 nt, Human
cagcaacacagauaugaaccaggaugccaa

SEQ ID NO: 1101848 - RNA, 18 nt, Human
cagccagggcucuggggc

SEQ ID NO: 1101849 - RNA, 22 nt, Human
cagcgacaccccucuguggucu

SEQ ID NO: 1101850 - RNA, 28 nt, Human
cagcgacaccccucuguggucuucagac

SEQ ID NO: 1101851 - RNA, 24 nt, Human
caggaagaucccagugacucaaac

SEQ ID NO: 1101852 - RNA, 24 nt, Human
caggacccacagauacuacccucu

SEQ ID NO: 1101853 - RNA, 23 nt, Human
caggaguagaagccaugguccaa

SEQ ID NO: 1101854 - RNA, 19 nt, Human
caggaguuucgggacccgg

SEQ ID NO: 1101855 - RNA, 20 nt, Human
caggccaggccaggccaccc

SEQ ID NO: 1101856 - RNA, 18 nt, Human
caguggguuuccggaauc

SEQ ID NO: 1101857 - RNA, 31 nt, Human
cauaaacacacacacacacacacacacacag

SEQ ID NO: 1101858 - RNA, 21 nt, Human
caucacagacacuguagucag

SEQ ID NO: 1101859 - RNA, 27 nt, Human
caugaccagugagaaauaaugugugcc

SEQ ID NO: 1101860 - RNA, 23 nt, Human
caugcggacaucacagacacugu

SEQ ID NO: 1101861 - RNA, 20 nt, Human
ccaaaggaggggggcgaaga

SEQ ID NO: 1101862 - RNA, 22 nt, Human
ccaaagugguggaauauagugu

SEQ ID NO: 1101863 - RNA, 21 nt, Human
ccacccagcuucaggaguaga

SEQ ID NO: 1101864 - RNA, 24 nt, Human
ccacccagcuucaggaguagaagc

SEQ ID NO: 1101865 - RNA, 24 nt, Human
ccaggaagaucccagugacucaaa

SEQ ID NO: 1101866 - RNA, 26 nt, Human
cccaaaagguugagagaagagaugaa

SEQ ID NO: 1101867 - RNA, 21 nt, Human
cccagugacucaaaccccaac

SEQ ID NO: 1101868 - RNA, 21 nt, Human
cccauugccauggggacuguc

SEQ ID NO: 1101869 - RNA, 22 nt, Human
ccccaaaagguugagagaagag

SEQ ID NO: 1101870 - RNA, 19 nt, Human
ccccaccccccaccaguga

SEQ ID NO: 1101871 - RNA, 18 nt, Human
cccgcucugggacccaga

SEQ ID NO: 1101872 - RNA, 22 nt, Human
cccggccgcgccgccuucccug

SEQ ID NO: 1101873 - RNA, 27 nt, Human
cccuggccagcccugccaucaguaugg

SEQ ID NO: 1101874 - RNA, 20 nt, Human
cccugggcggccuugggccu

SEQ ID NO: 1101875 - RNA, 21 nt, Human
cccugggcggccuugggccuu

SEQ ID NO: 1101876 - RNA, 22 nt, Human
cccuuaaacacugagcuccaaa

SEQ ID NO: 1101877 - RNA, 19 nt, Human
ccucccccacugucccaaa

SEQ ID NO: 1101878 - RNA, 19 nt, Human
ccuccgagaccccgggcag

SEQ ID NO: 1101879 - RNA, 18 nt, Human
ccugccaucaguauggga

SEQ ID NO: 1101880 - RNA, 23 nt, Human
ccuuggugggcucagguuuggga

SEQ ID NO: 1101881 - RNA, 19 nt, Human
cgcacacaugaagaaaggc

SEQ ID NO: 1101882 - RNA, 20 nt, Human
cgcugagguccucuccgccc

SEQ ID NO: 1101883 - RNA, 20 nt, Human
cguggugaugcauauacaug

SEQ ID NO: 1101884 - RNA, 21 nt, Human
cuccugaagcagagcuggaaa

SEQ ID NO: 1101885 - RNA, 19 nt, Human
cuucagacaguggguuucc

SEQ ID NO: 1101886 - RNA, 21 nt, Human
cuucaggggugcuaguacccc

SEQ ID NO: 1101887 - RNA, 27 nt, Human
gaaaagagcagagggcagccgguaccc

SEQ ID NO: 1101888 - RNA, 21 nt, Human
gaaagaaaagaaaaggcagaa

SEQ ID NO: 1101889 - RNA, 20 nt, Human
gaagaagcugugcgugagua

SEQ ID NO: 1101890 - RNA, 21 nt, Human
gaaguacaggagacaccgaaa

SEQ ID NO: 1101891 - RNA, 24 nt, Human
gacacacccugugccagaagaguc

SEQ ID NO: 1101892 - RNA, 19 nt, Human
gaggagaaauuuugggaag

SEQ ID NO: 1101893 - RNA, 20 nt, Human
gaggagaaauuuugggaagu

SEQ ID NO: 1101894 - RNA, 19 nt, Human
gauucuuccagaugaggga

SEQ ID NO: 1101895 - RNA, 25 nt, Human
gcaaccccaaacaggccuggacaug

SEQ ID NO: 1101896 - RNA, 33 nt, Human
gcacauaaacacacacacacacacacacacagu

SEQ ID NO: 1101897 - RNA, 23 nt, Human
gccaggccacccagcuucaggag

SEQ ID NO: 1101898 - RNA, 20 nt, Human
gcccccaaaggaggggggcc

SEQ ID NO: 1101899 - RNA, 22 nt, Human
gcccccaaaggaggggggcgaa

SEQ ID NO: 1101900 - RNA, 20 nt, Human
gcccugggcggccuugggcc

SEQ ID NO: 1101901 - RNA, 19 nt, Human
gcccuuaaacacugagcuc

SEQ ID NO: 1101902 - RNA, 20 nt, Human
gccgcgccgccuucccuggg

SEQ ID NO: 1101903 - RNA, 29 nt, Human
gcgugcacauaaacacacacacacacaca

SEQ ID NO: 1101904 - RNA, 24 nt, Human
gcgugcucagcccgggcugggagu

SEQ ID NO: 1101905 - RNA, 19 nt, Human
gcuggguuggaggcacagg

SEQ ID NO: 1101906 - RNA, 21 nt, Human
ggagguggugucaggacacag

SEQ ID NO: 1101907 - RNA, 25 nt, Human
ggcaaccccaaacaggccuggacau

SEQ ID NO: 1101908 - RNA, 19 nt, Human
ggccucagaggcccagcua

SEQ ID NO: 1101909 - RNA, 22 nt, Human
gggccacucagaggccuggccu

SEQ ID NO: 1101910 - RNA, 19 nt, Human
gguggauggggagguggug

SEQ ID NO: 1101911 - RNA, 21 nt, Human
gguuggaggcacagguggagc

SEQ ID NO: 1101912 - RNA, 21 nt, Human
guagauggcuuggaacauagc

SEQ ID NO: 1101913 - RNA, 21 nt, Human
gucacggggcccccaaaggag

SEQ ID NO: 1101914 - RNA, 21 nt, Human
guccagccagggcucuggggc

SEQ ID NO: 1101915 - RNA, 27 nt, Human
gugaugcauauacaugcgugcacauag

SEQ ID NO: 1101916 - RNA, 27 nt, Human
gugcacauaaacacacacacacacaca

SEQ ID NO: 1101917 - RNA, 19 nt, Human
guggaauauagugugcccc

SEQ ID NO: 1101918 - RNA, 20 nt, Human
guggaauauagugugccccc

SEQ ID NO: 1101919 - RNA, 21 nt, Human
gugguggauggggagguggug

SEQ ID NO: 1101920 - RNA, 25 nt, Human
uacaggagacaccgaaagaaaagaa

SEQ ID NO: 1101921 - RNA, 21 nt, Human
uaccccauucucucuccuccc

SEQ ID NO: 1101922 - RNA, 21 nt, Human
uagauggcuuggaacauagca

SEQ ID NO: 1101923 - RNA, 23 nt, Human
uagucagcaacacagauaugaac

SEQ ID NO: 1101924 - RNA, 22 nt, Human
uagugugccccccacauucagg

SEQ ID NO: 1101925 - RNA, 20 nt, Human
ucaaccaccucacagguaua

SEQ ID NO: 1101926 - RNA, 23 nt, Human
ucacagguauaccacagacacac

SEQ ID NO: 1101927 - RNA, 20 nt, Human
ucagcaacacagauaugaac

SEQ ID NO: 1101928 - RNA, 21 nt, Human
ucaggggugcuaguaccccau

SEQ ID NO: 1101929 - RNA, 21 nt, Human
uccaaagugguggaauauagu

SEQ ID NO: 1101930 - RNA, 23 nt, Human
uccagaguguucuggccucucau

SEQ ID NO: 1101931 - RNA, 22 nt, Human
uccagccagggcucuggggcca

SEQ ID NO: 1101932 - RNA, 22 nt, Human
uccagccccauugccaugggga

SEQ ID NO: 1101933 - RNA, 26 nt, Human
ucccaucuccucccccacugucccaa

SEQ ID NO: 1101934 - RNA, 24 nt, Human
uccccagaccucaauauccuucca

SEQ ID NO: 1101935 - RNA, 22 nt, Human
ucccugggugucgccgcagccg

SEQ ID NO: 1101936 - RNA, 19 nt, Human
ucccuucccaucuccuccc

SEQ ID NO: 1101937 - RNA, 23 nt, Human
uccugcccacaucugagcuccag

SEQ ID NO: 1101938 - RNA, 18 nt, Human
ucucauagcuccugaagc

SEQ ID NO: 1101939 - RNA, 21 nt, Human
ucuccucccccacugucccaa

SEQ ID NO: 1101940 - RNA, 24 nt, Human
ucuccucucucugcccugggcggc

SEQ ID NO: 1101941 - RNA, 23 nt, Human
ucucucuccuccccacagucaaa

SEQ ID NO: 1101942 - RNA, 21 nt, Human
ucucuuaccucucaccaggaa

SEQ ID NO: 1101943 - RNA, 24 nt, Human
ucugggaagcgggucagggucucc

SEQ ID NO: 1101944 - RNA, 19 nt, Human
ucuggggccacucagaggc

SEQ ID NO: 1101945 - RNA, 24 nt, Human
ucuguggucuucagacaguggguu

SEQ ID NO: 1101946 - RNA, 19 nt, Human
ugaaaagagcagagggcag

SEQ ID NO: 1101947 - RNA, 22 nt, Human
ugaaaagagcagagggcagcca

SEQ ID NO: 1101948 - RNA, 21 nt, Human
ugacgguggcgagcacagggc

SEQ ID NO: 1101949 - RNA, 18 nt, Human
ugacucaaaccccaacag

SEQ ID NO: 1101950 - RNA, 21 nt, Human
ugacuucucuuaccucucacc

SEQ ID NO: 1101951 - RNA, 19 nt, Human
ugagagaaccuucccuacc

SEQ ID NO: 1101952 - RNA, 23 nt, Human
ugcaaaguccucccuuuucccca

SEQ ID NO: 1101953 - RNA, 19 nt, Human
ugcacauaaacacacacac

SEQ ID NO: 1101954 - RNA, 21 nt, Human
ugcacauaaacacacacacac

SEQ ID NO: 1101955 - RNA, 28 nt, Human
ugcgugcacauaaacacacacacacagg

SEQ ID NO: 1101956 - RNA, 22 nt, Human
ugcucagcccgggcugggagug

SEQ ID NO: 1101957 - RNA, 21 nt, Human
uggaauauagugugcccccca

SEQ ID NO: 1101958 - RNA, 18 nt, Human
ugggacccagaaauccca

SEQ ID NO: 1101959 - RNA, 20 nt, Human
ugggaguguccgagggcucu

SEQ ID NO: 1101960 - RNA, 18 nt, Human
ugguggauggggaggugg

SEQ ID NO: 1101961 - RNA, 23 nt, Human
ugugugccccaccccccaccagu

SEQ ID NO: 1101962 - RNA, 25 nt, Human
uguuccccccuuuuccaagcccuua

SEQ ID NO: 1101963 - RNA, 21 nt, Human
uucucucuccuccccacaguc

SEQ ID NO: 1101964 - RNA, 19 nt, Human
uuggugggcucagguuugg

SEQ ID NO: 1101965 - RNA, 21 nt, Human
uuuccaagcccuuaaacacug

SEQ ID NO: 1101966 - RNA, 19 nt, Human
aaaacacacagaagacucc

SEQ ID NO: 1101967 - RNA, 18 nt, Human
aaacacacagaagacucc

SEQ ID NO: 1101968 - RNA, 19 nt, Human
aagaaggaaauaaaaugga

SEQ ID NO: 1101969 - RNA, 22 nt, Human
aaggaaccagacacauacucgg

SEQ ID NO: 1101970 - RNA, 22 nt, Human
acaagaaggaaauaaaauggac

SEQ ID NO: 1101971 - RNA, 18 nt, Human
acuuucuccugcccugga

SEQ ID NO: 1101972 - RNA, 19 nt, Human
agagcgccaucacugccca

SEQ ID NO: 1101973 - RNA, 21 nt, Human
agcuguguccacucugggccu

SEQ ID NO: 1101974 - RNA, 22 nt, Human
aggugcccauaggugaacacga

SEQ ID NO: 1101975 - RNA, 22 nt, Human
aguaacuucaaguagauuggcc

SEQ ID NO: 1101976 - RNA, 24 nt, Human
agucaacaaagggaagauuuuacc

SEQ ID NO: 1101977 - RNA, 21 nt, Human
auagcccacuguggcccccag

SEQ ID NO: 1101978 - RNA, 19 nt, Human
augggguuuccugaggcuc

SEQ ID NO: 1101979 - RNA, 23 nt, Human
caaaaacacacagaagacuccaa

SEQ ID NO: 1101980 - RNA, 19 nt, Human
caagagcuggacagugugg

SEQ ID NO: 1101981 - RNA, 19 nt, Human
cacaagaaggaaauaaaau

SEQ ID NO: 1101982 - RNA, 22 nt, Human
cacgggcagggguuguuugcug

SEQ ID NO: 1101983 - RNA, 23 nt, Human
cacucgcacuccagcagugggag

SEQ ID NO: 1101984 - RNA, 18 nt, Human
cagaggcuucaggaggcu

SEQ ID NO: 1101985 - RNA, 20 nt, Human
cagccaaggcgucucggcaa

SEQ ID NO: 1101986 - RNA, 21 nt, Human
caguguggucaggaaucgucc

SEQ ID NO: 1101987 - RNA, 22 nt, Human
caugaaagacucugaaguggca

SEQ ID NO: 1101988 - RNA, 21 nt, Human
caugucugucucuuacagggg

SEQ ID NO: 1101989 - RNA, 23 nt, Human
ccaaggaguugaaggaggcucac

SEQ ID NO: 1101990 - RNA, 18 nt, Human
ccagagcagcacaagaag

SEQ ID NO: 1101991 - RNA, 23 nt, Human
ccagucgauuaaaacagaaccaa

SEQ ID NO: 1101992 - RNA, 19 nt, Human
cccagaaaagaugaccugc

SEQ ID NO: 1101993 - RNA, 22 nt, Human
cccagacaacaggggaccaagg

SEQ ID NO: 1101994 - RNA, 22 nt, Human
ccccagagcgccaucacugccc

SEQ ID NO: 1101995 - RNA, 18 nt, Human
ccuagcuauuuggggaug

SEQ ID NO: 1101996 - RNA, 18 nt, Human
ccugaggaggguaagggc

SEQ ID NO: 1101997 - RNA, 26 nt, Human
cgaguaacuucaaguagauuggccca

SEQ ID NO: 1101998 - RNA, 18 nt, Human
cucagauuccucauccuu

SEQ ID NO: 1101999 - RNA, 21 nt, Human
cucuuugcuacugccucucuu

SEQ ID NO: 1102000 - RNA, 22 nt, Human
cuuugcuacugccucucuucca

SEQ ID NO: 1102001 - RNA, 24 nt, Human
gaaucgucccacccaaggaaccag

SEQ ID NO: 1102002 - RNA, 19 nt, Human
gacaacaggggaccaagga

SEQ ID NO: 1102003 - RNA, 19 nt, Human
gagcucaucucuuugcuac

SEQ ID NO: 1102004 - RNA, 18 nt, Human
gagggugccagccaaggc

SEQ ID NO: 1102005 - RNA, 22 nt, Human
gauccucuguugucaccagcca

SEQ ID NO: 1102006 - RNA, 25 nt, Human
ggagacagagcauuuaaugagagca

SEQ ID NO: 1102007 - RNA, 19 nt, Human
ggagaggugggacaggggg

SEQ ID NO: 1102008 - RNA, 20 nt, Human
gggaccaaggaguugaagga

SEQ ID NO: 1102009 - RNA, 23 nt, Human
ggggauggcaggggaagcaucuc

SEQ ID NO: 1102010 - RNA, 22 nt, Human
gguaagggcugugugugugguc

SEQ ID NO: 1102011 - RNA, 18 nt, Human
gucaccagccauggcugu

SEQ ID NO: 1102012 - RNA, 24 nt, Human
gugaaccccaaaacucuguacaag

SEQ ID NO: 1102013 - RNA, 25 nt, Human
gugcacuguggguggcaagccaggu

SEQ ID NO: 1102014 - RNA, 19 nt, Human
uagauuggcccacgggcag

SEQ ID NO: 1102015 - RNA, 24 nt, Human
ucaacgauccucuguugucaccag

SEQ ID NO: 1102016 - RNA, 21 nt, Human
ucaccaagcgcugcucaaucu

SEQ ID NO: 1102017 - RNA, 21 nt, Human
ucacugcccauacuuggagug

SEQ ID NO: 1102018 - RNA, 20 nt, Human
ucacuggagaggugggacag

SEQ ID NO: 1102019 - RNA, 18 nt, Human
ucauacuuucuccugccc

SEQ ID NO: 1102020 - RNA, 20 nt, Human
ucaugucugucucuuacagg

SEQ ID NO: 1102021 - RNA, 22 nt, Human
ucccagaggcuucaggaggcuc

SEQ ID NO: 1102022 - RNA, 19 nt, Human
uccucuguugucaccagcc

SEQ ID NO: 1102023 - RNA, 20 nt, Human
ucugaagauucccacagccu

SEQ ID NO: 1102024 - RNA, 22 nt, Human
ugaaggaggcucacuggagagg

SEQ ID NO: 1102025 - RNA, 18 nt, Human
ugacccagacaacagggg

SEQ ID NO: 1102026 - RNA, 23 nt, Human
ugacccagacaacaggggaccaa

SEQ ID NO: 1102027 - RNA, 25 nt, Human
ugagagcaagagcuggacaguguug

SEQ ID NO: 1102028 - RNA, 20 nt, Human
ugaugaagggcguagguugg

SEQ ID NO: 1102029 - RNA, 18 nt, Human
ugauucccacucgcacuc

SEQ ID NO: 1102030 - RNA, 18 nt, Human
ugccagaagguucgguag

SEQ ID NO: 1102031 - RNA, 24 nt, Human
ugccccacuuuggggucuuugucc

SEQ ID NO: 1102032 - RNA, 20 nt, Human
uggaaaaugccauccaggag

SEQ ID NO: 1102033 - RNA, 23 nt, Human
uggaaaaugccauccaggagcuc

SEQ ID NO: 1102034 - RNA, 18 nt, Human
uggagugugauccuagcu

SEQ ID NO: 1102035 - RNA, 21 nt, Human
uggcaggggaagcaucuccca

SEQ ID NO: 1102036 - RNA, 22 nt, Human
ugggacagggggccagucgauu

SEQ ID NO: 1102037 - RNA, 21 nt, Human
ugggagaaaagggggacccca

SEQ ID NO: 1102038 - RNA, 18 nt, Human
uggggugugaaccccaaa

SEQ ID NO: 1102039 - RNA, 24 nt, Human
ugugauccuagcuauuuggggaug

SEQ ID NO: 1102040 - RNA, 22 nt, Human
uguggucaggaaucgucccacc

SEQ ID NO: 1102041 - RNA, 23 nt, Human
uucaaguagauuggcccacgggc

SEQ ID NO: 1102042 - RNA, 20 nt, Human
uuccuaagucucaauaugug

SEQ ID NO: 1102043 - RNA, 18 nt, Human
uuccucauccuuuggugg

SEQ ID NO: 1102044 - RNA, 22 nt, Human
uugacccagacaacaggggacc

SEQ ID NO: 1102045 - RNA, 21 nt, Human
uuggcccacgggcagggguug

SEQ ID NO: 1102046 - RNA, 18 nt, Human
agcuccucccaaauugcu

SEQ ID NO: 1102047 - RNA, 20 nt, Human
cagcuccccuucugaugccu

SEQ ID NO: 1102048 - RNA, 22 nt, Human
cccggcugucauugcuuccugu

SEQ ID NO: 1102049 - RNA, 22 nt, Human
cccucuguacacuggcagaauc

SEQ ID NO: 1102050 - RNA, 21 nt, Human
ccuuucugccuguucucacug

SEQ ID NO: 1102051 - RNA, 19 nt, Human
cucuguacacuggcagaau

SEQ ID NO: 1102052 - RNA, 22 nt, Human
cucuuggaucugcccauuucug

SEQ ID NO: 1102053 - RNA, 21 nt, Human
cuggcagaauccccacuuccu

SEQ ID NO: 1102054 - RNA, 22 nt, Human
cuuccugucuggacuugcugca

SEQ ID NO: 1102055 - RNA, 24 nt, Human
cuuguagccguggcagcuccuccc

SEQ ID NO: 1102056 - RNA, 18 nt, Human
guguggacagcuccccuu

SEQ ID NO: 1102057 - RNA, 22 nt, Human
ucacaaccuucuuguagccgug

SEQ ID NO: 1102058 - RNA, 21 nt, Human
ucugcucuguaagcaaaacua

SEQ ID NO: 1102059 - RNA, 23 nt, Human
ucugcucuguaagcaaaacuaaa

SEQ ID NO: 1102060 - RNA, 22 nt, Human
ugagagugaauuuucacaaccu

SEQ ID NO: 1102061 - RNA, 21 nt, Human
ugcccauuucuguccaccuug

SEQ ID NO: 1102062 - RNA, 21 nt, Human
uguacacuggcagaaucccca

SEQ ID NO: 1102063 - RNA, 19 nt, Human
ugucauugcuuccugucug

SEQ ID NO: 1102064 - RNA, 19 nt, Human
ugucccggcugucauugcu

SEQ ID NO: 1102065 - RNA, 24 nt, Human
uuguagccguggcagcuccuccca

SEQ ID NO: 1102066 - RNA, 23 nt, Human
uuucugccuguucucacuggagg

SEQ ID NO: 1102067 - RNA, 18 nt, Human
aaagcaugcauucccggc

SEQ ID NO: 1102068 - RNA, 18 nt, Human
aacauggagaaaccccau

SEQ ID NO: 1102069 - RNA, 19 nt, Human
aacauggagaaaccccauc

SEQ ID NO: 1102070 - RNA, 20 nt, Human
aacauggagaaaccccaucc

SEQ ID NO: 1102071 - RNA, 18 nt, Human
aagaaggagaacuaagaa

SEQ ID NO: 1102072 - RNA, 24 nt, Human
aagcauggucuacggagaaggcac

SEQ ID NO: 1102073 - RNA, 25 nt, Human
aauauauaaugaaauaauuacacaa

SEQ ID NO: 1102074 - RNA, 20 nt, Human
aauugcuugaacccaggagg

SEQ ID NO: 1102075 - RNA, 24 nt, Human
aauugcuugaacccaggaggcgga

SEQ ID NO: 1102076 - RNA, 18 nt, Human
acacuuugggggcuguag

SEQ ID NO: 1102077 - RNA, 22 nt, Human
acccaagggucccgcagcacac

SEQ ID NO: 1102078 - RNA, 20 nt, Human
acgugugugugugugugugu

SEQ ID NO: 1102079 - RNA, 25 nt, Human
acgugugugugugugugugugcgug

SEQ ID NO: 1102080 - RNA, 19 nt, Human
acuaagaaagagacugaag

SEQ ID NO: 1102081 - RNA, 22 nt, Human
acuggcuggcugcucaccuccu

SEQ ID NO: 1102082 - RNA, 18 nt, Human
acuuugggggcuguagau

SEQ ID NO: 1102083 - RNA, 22 nt, Human
agaagaggagacuuggacaaaa

SEQ ID NO: 1102084 - RNA, 22 nt, Human
agaauugcuugaacccaggagg

SEQ ID NO: 1102085 - RNA, 21 nt, Human
agcagcuggguacaugcuggg

SEQ ID NO: 1102086 - RNA, 18 nt, Human
agcauggucuacggagaa

SEQ ID NO: 1102087 - RNA, 22 nt, Human
agcuggguacaugcuggggcuc

SEQ ID NO: 1102088 - RNA, 23 nt, Human
aggcaggagaauugcuugaaccc

SEQ ID NO: 1102089 - RNA, 24 nt, Human
aggcaggagaauugcuugaaccca

SEQ ID NO: 1102090 - RNA, 20 nt, Human
aggcggaaguugcagagagc

SEQ ID NO: 1102091 - RNA, 21 nt, Human
aggcggaaguugcagagagcc

SEQ ID NO: 1102092 - RNA, 24 nt, Human
aggcggaaguugcagagagccgag

SEQ ID NO: 1102093 - RNA, 22 nt, Human
aggcgggcggaucaccugagag

SEQ ID NO: 1102094 - RNA, 22 nt, Human
aggcgggcggaucaccugagau

SEQ ID NO: 1102095 - RNA, 21 nt, Human
aggcugaggcaggagaauugc

SEQ ID NO: 1102096 - RNA, 24 nt, Human
aggcugaggcaggagaauugcuug

SEQ ID NO: 1102097 - RNA, 21 nt, Human
aggcugaggcgggcggaucac

SEQ ID NO: 1102098 - RNA, 24 nt, Human
aggcugaggcgggcggaucaccug

SEQ ID NO: 1102099 - RNA, 20 nt, Human
augcuggggcucugcuucuc

SEQ ID NO: 1102100 - RNA, 28 nt, Human
augugugcauguuugugugugugugugu

SEQ ID NO: 1102101 - RNA, 20 nt, Human
auugcgccauugcacuccag

SEQ ID NO: 1102102 - RNA, 24 nt, Human
caacagcuggggcugggcccucug

SEQ ID NO: 1102103 - RNA, 21 nt, Human
cacccugucccagugggugcu

SEQ ID NO: 1102104 - RNA, 23 nt, Human
cacgccuguaaucccagcacuuu

SEQ ID NO: 1102105 - RNA, 22 nt, Human
cacgugugugugugugugugug

SEQ ID NO: 1102106 - RNA, 23 nt, Human
cacucacccugcguguuugcugc

SEQ ID NO: 1102107 - RNA, 18 nt, Human
cacuuuagaaggcugagg

SEQ ID NO: 1102108 - RNA, 22 nt, Human
cagcacuuuagaaggcugaggc

SEQ ID NO: 1102109 - RNA, 24 nt, Human
cagcacuuuagaaggcugaggcgg

SEQ ID NO: 1102110 - RNA, 20 nt, Human
cagcccgcacacucacccug

SEQ ID NO: 1102111 - RNA, 24 nt, Human
cagccugaccaacauggagaaacc

SEQ ID NO: 1102112 - RNA, 24 nt, Human
cagcuacucgggaggcugaggcag

SEQ ID NO: 1102113 - RNA, 22 nt, Human
cagggagugcgcacacgggguc

SEQ ID NO: 1102114 - RNA, 18 nt, Human
caguacuggaggucauga

SEQ ID NO: 1102115 - RNA, 25 nt, Human
cagugccuuccacucacuaggcucc

SEQ ID NO: 1102116 - RNA, 23 nt, Human
caugagugucaguccaagaucaa

SEQ ID NO: 1102117 - RNA, 21 nt, Human
ccaggcaugguggcacaugcc

SEQ ID NO: 1102118 - RNA, 19 nt, Human
ccagggugggucccuucug

SEQ ID NO: 1102119 - RNA, 18 nt, Human
cccaggcccuguccuggu

SEQ ID NO: 1102120 - RNA, 18 nt, Human
cccaggccggcgugcccc

SEQ ID NO: 1102121 - RNA, 23 nt, Human
cccauuuuuauuagcauuuaaac

SEQ ID NO: 1102122 - RNA, 20 nt, Human
ccccacgcagcucucuccgc

SEQ ID NO: 1102123 - RNA, 20 nt, Human
ccccgcuuguccccagggag

SEQ ID NO: 1102124 - RNA, 24 nt, Human
cccgcagcacacuuugggggcugu

SEQ ID NO: 1102125 - RNA, 24 nt, Human
cccggcugggcgcggugacucacg

SEQ ID NO: 1102126 - RNA, 20 nt, Human
cccugggugcccuugaucac

SEQ ID NO: 1102127 - RNA, 19 nt, Human
cccuguccugcuggcuccc

SEQ ID NO: 1102128 - RNA, 23 nt, Human
ccgcucugcacugccugggcagc

SEQ ID NO: 1102129 - RNA, 20 nt, Human
ccguguccugguaggguccc

SEQ ID NO: 1102130 - RNA, 22 nt, Human
ccuacacccacccaaggguccc

SEQ ID NO: 1102131 - RNA, 24 nt, Human
ccugaccaacauggagaaacccca

SEQ ID NO: 1102132 - RNA, 22 nt, Human
ccugagaucgggaguucgagac

SEQ ID NO: 1102133 - RNA, 18 nt, Human
ccugguucucagccaccc

SEQ ID NO: 1102134 - RNA, 21 nt, Human
ccuguagucccagcuacucgg

SEQ ID NO: 1102135 - RNA, 22 nt, Human
ccuguagucccagcuacucggg

SEQ ID NO: 1102136 - RNA, 22 nt, Human
ccuguccacacaugccuaggag

SEQ ID NO: 1102137 - RNA, 22 nt, Human
ccugugacucuucauuaagggu

SEQ ID NO: 1102138 - RNA, 24 nt, Human
ccuugaaccacccaaaauuaccuu

SEQ ID NO: 1102139 - RNA, 22 nt, Human
cgaacgaagcccagcaugugcu

SEQ ID NO: 1102140 - RNA, 24 nt, Human
cgagauugcgccauugcacuccag

SEQ ID NO: 1102141 - RNA, 18 nt, Human
cgcacacucacccugcgu

SEQ ID NO: 1102142 - RNA, 18 nt, Human
cgccuguaaucccagcac

SEQ ID NO: 1102143 - RNA, 22 nt, Human
cgccuguaaucccagcacuuua

SEQ ID NO: 1102144 - RNA, 24 nt, Human
cggaucaccugagaucgggaguuc

SEQ ID NO: 1102145 - RNA, 24 nt, Human
cgggcggaucaccugagaucggga

SEQ ID NO: 1102146 - RNA, 19 nt, Human
cguggagcauuccaucccu

SEQ ID NO: 1102147 - RNA, 22 nt, Human
cgugucugcacacgugugcgug

SEQ ID NO: 1102148 - RNA, 24 nt, Human
cuaaaaauacagaauuacccaggc

SEQ ID NO: 1102149 - RNA, 28 nt, Human
cuaagaaagagacugaagcauggucuac

SEQ ID NO: 1102150 - RNA, 22 nt, Human
cucacgccuguaaucccagcac

SEQ ID NO: 1102151 - RNA, 24 nt, Human
cucacgccuguaaucccagcacuu

SEQ ID NO: 1102152 - RNA, 20 nt, Human
cucauugcaucacucacuuc

SEQ ID NO: 1102153 - RNA, 21 nt, Human
cucuguuccaggccugucucc

SEQ ID NO: 1102154 - RNA, 24 nt, Human
cugacaggaggcagagcucaugcg

SEQ ID NO: 1102155 - RNA, 22 nt, Human
cugaggcugugcaggaaggcuc

SEQ ID NO: 1102156 - RNA, 23 nt, Human
cugaggcugugcaggaaggcucc

SEQ ID NO: 1102157 - RNA, 21 nt, Human
cugcaguguccucguauaguu

SEQ ID NO: 1102158 - RNA, 22 nt, Human
cugcgggucccuguccugcugg

SEQ ID NO: 1102159 - RNA, 20 nt, Human
cugguuccuaacaguuggga

SEQ ID NO: 1102160 - RNA, 21 nt, Human
cugugggcuaacaggcugcgu

SEQ ID NO: 1102161 - RNA, 20 nt, Human
cuucccaggcccuguccugg

SEQ ID NO: 1102162 - RNA, 22 nt, Human
cuugcacaccugcguguguccc

SEQ ID NO: 1102163 - RNA, 19 nt, Human
gaacuuguuuuccugcaac

SEQ ID NO: 1102164 - RNA, 21 nt, Human
gaagcccagcaugugcuggca

SEQ ID NO: 1102165 - RNA, 23 nt, Human
gaaguugcagagagccgagauug

SEQ ID NO: 1102166 - RNA, 21 nt, Human
gagaaaccccaucccuacuaa

SEQ ID NO: 1102167 - RNA, 23 nt, Human
gagaccagccugaccaacaugga

SEQ ID NO: 1102168 - RNA, 21 nt, Human
gagccgagauugcgccauugc

SEQ ID NO: 1102169 - RNA, 22 nt, Human
gaguaugugugcacagacugug

SEQ ID NO: 1102170 - RNA, 24 nt, Human
gaucaccugagaucgggaguucga

SEQ ID NO: 1102171 - RNA, 21 nt, Human
gcacuugcgcaaacaccagga

SEQ ID NO: 1102172 - RNA, 22 nt, Human
gcagcuggguacaugcuggggc

SEQ ID NO: 1102173 - RNA, 22 nt, Human
gcaggagaauugcuugaaccca

SEQ ID NO: 1102174 - RNA, 20 nt, Human
gcauaccuacacccacccaa

SEQ ID NO: 1102175 - RNA, 18 nt, Human
gccacccugucccagugg

SEQ ID NO: 1102176 - RNA, 19 nt, Human
gccgggugacgcgggcugg

SEQ ID NO: 1102177 - RNA, 20 nt, Human
gccugucuccugaugugugg

SEQ ID NO: 1102178 - RNA, 22 nt, Human
ggaaguugcagagagccgagau

SEQ ID NO: 1102179 - RNA, 24 nt, Human
ggaauccauccaugcccagggcuu

SEQ ID NO: 1102180 - RNA, 23 nt, Human
ggaucaccugagaucgggaguuc

SEQ ID NO: 1102181 - RNA, 24 nt, Human
gggcgcggugacucacgccuguaa

SEQ ID NO: 1102182 - RNA, 19 nt, Human
ggggaagggaugauaugga

SEQ ID NO: 1102183 - RNA, 18 nt, Human
ggguaucccucauuuacc

SEQ ID NO: 1102184 - RNA, 24 nt, Human
gggucccgcagcacacuuuggggg

SEQ ID NO: 1102185 - RNA, 22 nt, Human
gggugguugggugggggguggu

SEQ ID NO: 1102186 - RNA, 19 nt, Human
gguauggaagauucugccc

SEQ ID NO: 1102187 - RNA, 19 nt, Human
ggucccuguccugcuggcu

SEQ ID NO: 1102188 - RNA, 24 nt, Human
ggugacucacgccuguaaucccag

SEQ ID NO: 1102189 - RNA, 22 nt, Human
guccugguucucagccacccug

SEQ ID NO: 1102190 - RNA, 19 nt, Human
gugcgagugaguguggccc

SEQ ID NO: 1102191 - RNA, 21 nt, Human
gugugugugcgcacgugcgug

SEQ ID NO: 1102192 - RNA, 21 nt, Human
guugcagagagccgagauugc

SEQ ID NO: 1102193 - RNA, 21 nt, Human
uaaaaaaccgacgccucuuuu

SEQ ID NO: 1102194 - RNA, 18 nt, Human
uaaaaauacagaauuacc

SEQ ID NO: 1102195 - RNA, 20 nt, Human
uaacagcauccucaaccaac

SEQ ID NO: 1102196 - RNA, 24 nt, Human
uacaguaccacagacugggcaccu

SEQ ID NO: 1102197 - RNA, 26 nt, Human
uacccgagaccaguuuucuugaagac

SEQ ID NO: 1102198 - RNA, 22 nt, Human
uaccuacacccacccaaggguc

SEQ ID NO: 1102199 - RNA, 24 nt, Human
uagaaggcugaggcgggcggauca

SEQ ID NO: 1102200 - RNA, 21 nt, Human
uaugugugcauguuugugugu

SEQ ID NO: 1102201 - RNA, 25 nt, Human
uaugugugcauguuugugugugugu

SEQ ID NO: 1102202 - RNA, 31 nt, Human
uaugugugcauguuugugugugugugugugu

SEQ ID NO: 1102203 - RNA, 21 nt, Human
ucaccagggugggucccuucu

SEQ ID NO: 1102204 - RNA, 21 nt, Human
ucacuaggcuccccaggaaac

SEQ ID NO: 1102205 - RNA, 21 nt, Human
ucaugagugucaguccaagau

SEQ ID NO: 1102206 - RNA, 19 nt, Human
uccacacaugccuaggagu

SEQ ID NO: 1102207 - RNA, 22 nt, Human
uccacggacccgggagaagggg

SEQ ID NO: 1102208 - RNA, 24 nt, Human
uccaugcccagggcuuucugggga

SEQ ID NO: 1102209 - RNA, 22 nt, Human
ucccaaccgaguucuguuuccc

SEQ ID NO: 1102210 - RNA, 19 nt, Human
ucccaggccggcgugcccc

SEQ ID NO: 1102211 - RNA, 27 nt, Human
uccccaggaaacuugcgcacuuggcuu

SEQ ID NO: 1102212 - RNA, 21 nt, Human
uccccgcuuguccccagggag

SEQ ID NO: 1102213 - RNA, 21 nt, Human
uccccugauuacuucuauggg

SEQ ID NO: 1102214 - RNA, 24 nt, Human
ucccuggcaugcgcaguucacagu

SEQ ID NO: 1102215 - RNA, 23 nt, Human
ucgggaggcugaggcaggagaau

SEQ ID NO: 1102216 - RNA, 21 nt, Human
ucucagccacccugucccagu

SEQ ID NO: 1102217 - RNA, 23 nt, Human
ucucuuucaguaagaaggagaac

SEQ ID NO: 1102218 - RNA, 18 nt, Human
ucugacaggaggcagagc

SEQ ID NO: 1102219 - RNA, 18 nt, Human
ugaacuuguuuuccugca

SEQ ID NO: 1102220 - RNA, 21 nt, Human
ugacucacgccuguaauccca

SEQ ID NO: 1102221 - RNA, 24 nt, Human
ugacucacgccuguaaucccagca

SEQ ID NO: 1102222 - RNA, 24 nt, Human
ugaggcaggagaauugcuugaacc

SEQ ID NO: 1102223 - RNA, 25 nt, Human
ugaggcaggagaauugcuugaaccc

SEQ ID NO: 1102224 - RNA, 19 nt, Human
ugaggcgggcggaucaccu

SEQ ID NO: 1102225 - RNA, 20 nt, Human
ugaggcgggcggaucaccug

SEQ ID NO: 1102226 - RNA, 19 nt, Human
ugagggcucagaagaggag

SEQ ID NO: 1102227 - RNA, 19 nt, Human
ugaucacgugugugugugu

SEQ ID NO: 1102228 - RNA, 21 nt, Human
ugcauaccuacacccacccaa

SEQ ID NO: 1102229 - RNA, 20 nt, Human
ugcauaccuacacccacccu

SEQ ID NO: 1102230 - RNA, 21 nt, Human
ugcccagggcuuucuggggac

SEQ ID NO: 1102231 - RNA, 23 nt, Human
ugccugggcagcccgcacacuca

SEQ ID NO: 1102232 - RNA, 23 nt, Human
ugccuguagucccagcuacucgg

SEQ ID NO: 1102233 - RNA, 24 nt, Human
ugccuguagucccagcuacucggg

SEQ ID NO: 1102234 - RNA, 22 nt, Human
ugcgcaaacaccaggagaauga

SEQ ID NO: 1102235 - RNA, 24 nt, Human
ugcgcacgugcgugcuugcgcgcg

SEQ ID NO: 1102236 - RNA, 20 nt, Human
ugcgugugucccgugagagc

SEQ ID NO: 1102237 - RNA, 21 nt, Human
ugcgugugugugugugcgcac

SEQ ID NO: 1102238 - RNA, 24 nt, Human
ugcgugugugugugugcgcacgug

SEQ ID NO: 1102239 - RNA, 20 nt, Human
ugcugccgggugacgcgggc

SEQ ID NO: 1102240 - RNA, 21 nt, Human
ugcuucucucuuucaguaaga

SEQ ID NO: 1102241 - RNA, 18 nt, Human
uggagaaaccccaucccu

SEQ ID NO: 1102242 - RNA, 22 nt, Human
uggaugcuuccacuacgugucu

SEQ ID NO: 1102243 - RNA, 19 nt, Human
uggcuggcugcucaccucc

SEQ ID NO: 1102244 - RNA, 20 nt, Human
uggcuugggcccuaagcagc

SEQ ID NO: 1102245 - RNA, 20 nt, Human
uggguaucccucauuuaccc

SEQ ID NO: 1102246 - RNA, 20 nt, Human
ugggugguuggguggggggu

SEQ ID NO: 1102247 - RNA, 24 nt, Human
ugguggcacaugccuguaguccca

SEQ ID NO: 1102248 - RNA, 21 nt, Human
ugucaguccaagaucaaggug

SEQ ID NO: 1102249 - RNA, 21 nt, Human
ugugcacagacugugccugca

SEQ ID NO: 1102250 - RNA, 19 nt, Human
ugugccugcaguguccucg

SEQ ID NO: 1102251 - RNA, 20 nt, Human
ugugcgcacgugcgugcuug

SEQ ID NO: 1102252 - RNA, 24 nt, Human
ugugcgcacgugcgugcuugcgcg

SEQ ID NO: 1102253 - RNA, 23 nt, Human
uguggccccacgcagcucucucc

SEQ ID NO: 1102254 - RNA, 21 nt, Human
ugugggaagccuggacugggu

SEQ ID NO: 1102255 - RNA, 19 nt, Human
ugugugcauguuugugugu

SEQ ID NO: 1102256 - RNA, 19 nt, Human
ugugugcauguuugugugu

SEQ ID NO: 1102257 - RNA, 19 nt, Human
ugugugcauguuugugugu

SEQ ID NO: 1102258 - RNA, 22 nt, Human
ugugugcauguuugugugugug

SEQ ID NO: 1102259 - RNA, 31 nt, Human
ugugugcauguuuguguguguguguguggug

SEQ ID NO: 1102260 - RNA, 19 nt, Human
ugugugcgugugugugugu

SEQ ID NO: 1102261 - RNA, 21 nt, Human
ugugugugcgugugugugugu

SEQ ID NO: 1102262 - RNA, 21 nt, Human
ugugugugcgugugugugugu

SEQ ID NO: 1102263 - RNA, 21 nt, Human
ugugugugugcgugugugugu

SEQ ID NO: 1102264 - RNA, 22 nt, Human
ugugugugugugcgcacgugcg

SEQ ID NO: 1102265 - RNA, 20 nt, Human
ugugugugugugcgugugug

SEQ ID NO: 1102266 - RNA, 22 nt, Human
ugugugugugugcgugugugug

SEQ ID NO: 1102267 - RNA, 25 nt, Human
ugugugugugugcgugugugugugu

SEQ ID NO: 1102268 - RNA, 21 nt, Human
ugugugugugugugcgugugu

SEQ ID NO: 1102269 - RNA, 21 nt, Human
ugugugugugugugcgugugu

SEQ ID NO: 1102270 - RNA, 22 nt, Human
uguguguguguguguguccuac

SEQ ID NO: 1102271 - RNA, 19 nt, Human
uguuucuggaaagccaggc

SEQ ID NO: 1102272 - RNA, 22 nt, Human
uuacuguaauauauaaugaaau

SEQ ID NO: 1102273 - RNA, 25 nt, Human
uuagaaggcugaggcgggcggauca

SEQ ID NO: 1102274 - RNA, 21 nt, Human
uuauucaccuugaaccaccca

SEQ ID NO: 1102275 - RNA, 24 nt, Human
uuauucaccuugaaccacccaaaa

SEQ ID NO: 1102276 - RNA, 24 nt, Human
uucaguaagaaggagaacuaagaa

SEQ ID NO: 1102277 - RNA, 22 nt, Human
uugcagagagccgagauugcgc

SEQ ID NO: 1102278 - RNA, 21 nt, Human
uugcauaccuacacccaccca

SEQ ID NO: 1102279 - RNA, 18 nt, Human
uugcuugaacccaggagg

SEQ ID NO: 1102280 - RNA, 24 nt, Human
uugcuugaacccaggaggcggaag

SEQ ID NO: 1102281 - RNA, 21 nt, Human
aaaaaaaaaagagagcgagag

SEQ ID NO: 1102282 - RNA, 23 nt, Human
aaaaaaacaaaaaacaaacaaaa

SEQ ID NO: 1102283 - RNA, 25 nt, Human
aaaaaaacaaaaaacaaacaaaaaa

SEQ ID NO: 1102284 - RNA, 20 nt, Human
aaaaacaaaaaacaaacaaa

SEQ ID NO: 1102285 - RNA, 19 nt, Human
aaaacaaaaaaacaaaaaa

SEQ ID NO: 1102286 - RNA, 22 nt, Human
aaaacaaaaaaacaaaaaacaa

SEQ ID NO: 1102287 - RNA, 21 nt, Human
aaaacaaaaaacaaacaaaaa

SEQ ID NO: 1102288 - RNA, 24 nt, Human
aaaacaaacaaaaaaaaaaagaga

SEQ ID NO: 1102289 - RNA, 23 nt, Human
aaacaaaaaaaaaaagagagcga

SEQ ID NO: 1102290 - RNA, 22 nt, Human
aaacaaaaagcgagaaaaucug

SEQ ID NO: 1102291 - RNA, 23 nt, Human
aaacaaaaagcgagaaaaucugg

SEQ ID NO: 1102292 - RNA, 24 nt, Human
aaagugcugggauuacaggcauga

SEQ ID NO: 1102293 - RNA, 18 nt, Human
aacaaaaaacaaacaaaa

SEQ ID NO: 1102294 - RNA, 22 nt, Human
aacaggaauaacucuaagaagu

SEQ ID NO: 1102295 - RNA, 20 nt, Human
aagaaguuuggggacaggag

SEQ ID NO: 1102296 - RNA, 21 nt, Human
aagagagcgagagagaagugg

SEQ ID NO: 1102297 - RNA, 22 nt, Human
aagcugagcgcacagcagaaga

SEQ ID NO: 1102298 - RNA, 18 nt, Human
aagggaaaugcacugauc

SEQ ID NO: 1102299 - RNA, 19 nt, Human
aagugcugggauuacaggc

SEQ ID NO: 1102300 - RNA, 21 nt, Human
aagugcugggauuacaggcau

SEQ ID NO: 1102301 - RNA, 26 nt, Human
aagugcugggauuacaggcaugagcc

SEQ ID NO: 1102302 - RNA, 25 nt, Human
acaaaaaaaaaaagagagcgagaga

SEQ ID NO: 1102303 - RNA, 24 nt, Human
acagcagaagagccgccagcuaaa

SEQ ID NO: 1102304 - RNA, 25 nt, Human
acaguggagggaacucaagcccaga

SEQ ID NO: 1102305 - RNA, 18 nt, Human
accggguuucaccguguu

SEQ ID NO: 1102306 - RNA, 24 nt, Human
accggguuucaccguguuggccag

SEQ ID NO: 1102307 - RNA, 24 nt, Human
accuugugauccgccugccucggc

SEQ ID NO: 1102308 - RNA, 20 nt, Human
acucugucgcccaguggcgg

SEQ ID NO: 1102309 - RNA, 24 nt, Human
acuggcuaggcgcuggugaggggg

SEQ ID NO: 1102310 - RNA, 18 nt, Human
agaaguuuggggacagga

SEQ ID NO: 1102311 - RNA, 22 nt, Human
agagcgagagagaagugggugu

SEQ ID NO: 1102312 - RNA, 22 nt, Human
agcagcaggcaugggaguggcg

SEQ ID NO: 1102313 - RNA, 20 nt, Human
agcggaccgcccgggguggg

SEQ ID NO: 1102314 - RNA, 22 nt, Human
aggcgcuggugagggggcggcg

SEQ ID NO: 1102315 - RNA, 18 nt, Human
aggggagcuguucugggc

SEQ ID NO: 1102316 - RNA, 20 nt, Human
aguagagaccggguuucacc

SEQ ID NO: 1102317 - RNA, 18 nt, Human
aguagcugggacuacagg

SEQ ID NO: 1102318 - RNA, 19 nt, Human
aguagcugggacuacaggc

SEQ ID NO: 1102319 - RNA, 18 nt, Human
agugcugggauuacaggc

SEQ ID NO: 1102320 - RNA, 22 nt, Human
aguggccucccgccccccagcc

SEQ ID NO: 1102321 - RNA, 25 nt, Human
aucaugcuguuucuuccauugcuuu

SEQ ID NO: 1102322 - RNA, 24 nt, Human
aucgcaguggcgcgaucucggcuc

SEQ ID NO: 1102323 - RNA, 23 nt, Human
auuuagggcccacaccacugcuc

SEQ ID NO: 1102324 - RNA, 28 nt, Human
caaaaaaacaaaaaacaaacaaaaaaaa

SEQ ID NO: 1102325 - RNA, 19 nt, Human
caaacaaaaaaaaaaagag

SEQ ID NO: 1102326 - RNA, 24 nt, Human
caaagugcugggauuacaggcaug

SEQ ID NO: 1102327 - RNA, 22 nt, Human
caagcgauucuccugccucagc

SEQ ID NO: 1102328 - RNA, 21 nt, Human
caccacgggcuucuguccccu

SEQ ID NO: 1102329 - RNA, 19 nt, Human
cacccaggguagcugcccu

SEQ ID NO: 1102330 - RNA, 18 nt, Human
caccgcgcccgguccaac

SEQ ID NO: 1102331 - RNA, 23 nt, Human
caccgcuccgcuucuccucuacc

SEQ ID NO: 1102332 - RNA, 18 nt, Human
caccguguuggccaggau

SEQ ID NO: 1102333 - RNA, 21 nt, Human
caccguguuggccaggauggu

SEQ ID NO: 1102334 - RNA, 24 nt, Human
caccguguuggccaggauggucuc

SEQ ID NO: 1102335 - RNA, 19 nt, Human
cacucugucgcccaguggc

SEQ ID NO: 1102336 - RNA, 21 nt, Human
cagaaucugcucccaccucuu

SEQ ID NO: 1102337 - RNA, 22 nt, Human
cagcccggggucaguccugcag

SEQ ID NO: 1102338 - RNA, 18 nt, Human
cagccgguccccgccucc

SEQ ID NO: 1102339 - RNA, 18 nt, Human
cagcuuuuccauuuagug

SEQ ID NO: 1102340 - RNA, 22 nt, Human
caggauggucucuaucucuuga

SEQ ID NO: 1102341 - RNA, 19 nt, Human
caggcccucacgacucaag

SEQ ID NO: 1102342 - RNA, 24 nt, Human
caggcgcgcgccaagacgccgccc

SEQ ID NO: 1102343 - RNA, 21 nt, Human
cagggggacguggagccaggc

SEQ ID NO: 1102344 - RNA, 20 nt, Human
caguggagggaacucaagcc

SEQ ID NO: 1102345 - RNA, 23 nt, Human
ccaaagugcugggauuacaggca

SEQ ID NO: 1102346 - RNA, 24 nt, Human
ccaaagugcugggauuacaggcau

SEQ ID NO: 1102347 - RNA, 22 nt, Human
ccaccagauggacuccuaauuu

SEQ ID NO: 1102348 - RNA, 24 nt, Human
ccaccagauggacuccuaauuugc

SEQ ID NO: 1102349 - RNA, 20 nt, Human
ccaccgcgcccgguccaaca

SEQ ID NO: 1102350 - RNA, 24 nt, Human
ccaccuccuggguucaagcgauuc

SEQ ID NO: 1102351 - RNA, 18 nt, Human
ccagagccugcuggccga

SEQ ID NO: 1102352 - RNA, 18 nt, Human
ccagcccugcggcacugg

SEQ ID NO: 1102353 - RNA, 23 nt, Human
ccagguccggcaggagucgggaa

SEQ ID NO: 1102354 - RNA, 24 nt, Human
cccaaagugcugggauuacaggca

SEQ ID NO: 1102355 - RNA, 19 nt, Human
cccacaccacugcucagua

SEQ ID NO: 1102356 - RNA, 23 nt, Human
cccacaccacugcucaguagggg

SEQ ID NO: 1102357 - RNA, 23 nt, Human
ccccagccgguccccgccuccuu

SEQ ID NO: 1102358 - RNA, 25 nt, Human
cccccaaauucccuucacccaguuc

SEQ ID NO: 1102359 - RNA, 18 nt, Human
cccccagccgguccccgc

SEQ ID NO: 1102360 - RNA, 21 nt, Human
ccccccagccgguccccgccu

SEQ ID NO: 1102361 - RNA, 18 nt, Human
cccgaaggggaugugggg

SEQ ID NO: 1102362 - RNA, 23 nt, Human
cccgaguagcugggacuacaggc

SEQ ID NO: 1102363 - RNA, 24 nt, Human
cccgaguagcugggacuacaggcg

SEQ ID NO: 1102364 - RNA, 19 nt, Human
cccgccucgccuuccucgc

SEQ ID NO: 1102365 - RNA, 18 nt, Human
cccgcgccgcggccgccu

SEQ ID NO: 1102366 - RNA, 22 nt, Human
cccggagaggaaacagccuccg

SEQ ID NO: 1102367 - RNA, 20 nt, Human
cccucgggggaugcugggcc

SEQ ID NO: 1102368 - RNA, 20 nt, Human
cccuggaggccccggagagg

SEQ ID NO: 1102369 - RNA, 22 nt, Human
ccgcacccagagccugcuggcc

SEQ ID NO: 1102370 - RNA, 24 nt, Human
ccggguuucaccguguuggccagg

SEQ ID NO: 1102371 - RNA, 19 nt, Human
ccuccaccuccuggguuca

SEQ ID NO: 1102372 - RNA, 24 nt, Human
ccuccuggguucaagcgauucucc

SEQ ID NO: 1102373 - RNA, 19 nt, Human
ccucgccuuccucgccuuc

SEQ ID NO: 1102374 - RNA, 22 nt, Human
ccucuugcuacagcuggcccua

SEQ ID NO: 1102375 - RNA, 23 nt, Human
ccugccucagccucccgaguagc

SEQ ID NO: 1102376 - RNA, 24 nt, Human
ccugccucagccucccgaguagcu

SEQ ID NO: 1102377 - RNA, 24 nt, Human
ccugccucggccucccaaagugcu

SEQ ID NO: 1102378 - RNA, 21 nt, Human
ccugcuccagcuggccuaaga

SEQ ID NO: 1102379 - RNA, 23 nt, Human
ccuggguucaagcgauucuccug

SEQ ID NO: 1102380 - RNA, 21 nt, Human
ccuucccgggucgccgccgcc

SEQ ID NO: 1102381 - RNA, 22 nt, Human
ccuucccgggucgccgccgccu

SEQ ID NO: 1102382 - RNA, 18 nt, Human
cgagagagaagugggugu

SEQ ID NO: 1102383 - RNA, 19 nt, Human
cgcacagcagaagagccgc

SEQ ID NO: 1102384 - RNA, 23 nt, Human
cgcacccaggguagcugcccuuu

SEQ ID NO: 1102385 - RNA, 18 nt, Human
cgccucagggcaccacgg

SEQ ID NO: 1102386 - RNA, 20 nt, Human
cgcgccaagacgccgccccg

SEQ ID NO: 1102387 - RNA, 22 nt, Human
cgcugguccgggccgccggcac

SEQ ID NO: 1102388 - RNA, 22 nt, Human
cggcaaagggcggguccucccc

SEQ ID NO: 1102389 - RNA, 20 nt, Human
cggcugcggggaccggcggg

SEQ ID NO: 1102390 - RNA, 19 nt, Human
cgggauggagggcacucgu

SEQ ID NO: 1102391 - RNA, 24 nt, Human
cgggcuucuguccccuccuggagg

SEQ ID NO: 1102392 - RNA, 24 nt, Human
cggggucaguccugcagcccgcgc

SEQ ID NO: 1102393 - RNA, 22 nt, Human
cggguuucaccguguuggccag

SEQ ID NO: 1102394 - RNA, 23 nt, Human
cggguuucaccguguuggccagg

SEQ ID NO: 1102395 - RNA, 21 nt, Human
cucaagccucuuucucgagcc

SEQ ID NO: 1102396 - RNA, 24 nt, Human
cucagccucccgaguagcugggac

SEQ ID NO: 1102397 - RNA, 21 nt, Human
cucccaccucuucccaucgug

SEQ ID NO: 1102398 - RNA, 18 nt, Human
cuccccaccagguccggc

SEQ ID NO: 1102399 - RNA, 22 nt, Human
cuccugccucagccucccgagu

SEQ ID NO: 1102400 - RNA, 21 nt, Human
cuccuggguucaagcgauucu

SEQ ID NO: 1102401 - RNA, 24 nt, Human
cucuugaccuugugauccgccugc

SEQ ID NO: 1102402 - RNA, 24 nt, Human
cugcuaccuccaccuccuggguuc

SEQ ID NO: 1102403 - RNA, 18 nt, Human
cugcugcuuuaucucagu

SEQ ID NO: 1102404 - RNA, 22 nt, Human
cugggcccucgggggaugcugg

SEQ ID NO: 1102405 - RNA, 23 nt, Human
gaaggggauguggggcugucgcc

SEQ ID NO: 1102406 - RNA, 20 nt, Human
gaaucccccaaauucccuuc

SEQ ID NO: 1102407 - RNA, 21 nt, Human
gaaucugcucccaccucuucc

SEQ ID NO: 1102408 - RNA, 22 nt, Human
gaccuugugauccgccugccuc

SEQ ID NO: 1102409 - RNA, 24 nt, Human
gaccuugugauccgccugccucgg

SEQ ID NO: 1102410 - RNA, 24 nt, Human
gagcugccccuucccucacuugcu

SEQ ID NO: 1102411 - RNA, 24 nt, Human
gaguagcugggacuacaggcgcgc

SEQ ID NO: 1102412 - RNA, 20 nt, Human
gaguggccucccgcccccca

SEQ ID NO: 1102413 - RNA, 18 nt, Human
gauuacaggcaugagcca

SEQ ID NO: 1102414 - RNA, 22 nt, Human
gauuacaggcaugagccaccgc

SEQ ID NO: 1102415 - RNA, 22 nt, Human
gauuacaggcaugagccaccgc

SEQ ID NO: 1102416 - RNA, 21 nt, Human
gauucuccugccucagccucc

SEQ ID NO: 1102417 - RNA, 23 nt, Human
gccaggauggucucuaucucuug

SEQ ID NO: 1102418 - RNA, 18 nt, Human
gccagucugaaacccgaa

SEQ ID NO: 1102419 - RNA, 18 nt, Human
gccccgcuaauuuuugua

SEQ ID NO: 1102420 - RNA, 22 nt, Human
gccccgcuaauuuuuguauuuu

SEQ ID NO: 1102421 - RNA, 22 nt, Human
gcccgccucgccuuccucgccu

SEQ ID NO: 1102422 - RNA, 24 nt, Human
gcgauucuccugccucagccuccc

SEQ ID NO: 1102423 - RNA, 23 nt, Human
gcgcagcccggggucaguccugc

SEQ ID NO: 1102424 - RNA, 21 nt, Human
gcggcccccagcccugcggca

SEQ ID NO: 1102425 - RNA, 21 nt, Human
gcuccgcuucuccucuaccca

SEQ ID NO: 1102426 - RNA, 19 nt, Human
gcuggugagggggcggcgg

SEQ ID NO: 1102427 - RNA, 22 nt, Human
ggagcuguucugggcccugccu

SEQ ID NO: 1102428 - RNA, 22 nt, Human
ggauuacaggcaugagccaccg

SEQ ID NO: 1102429 - RNA, 24 nt, Human
ggcaucgcaguggcgcgaucucgg

SEQ ID NO: 1102430 - RNA, 26 nt, Human
ggcccccagcccugcggcacugguuc

SEQ ID NO: 1102431 - RNA, 21 nt, Human
ggccccggagaggaaacagcc

SEQ ID NO: 1102432 - RNA, 22 nt, Human
ggcgcgggcgcuccaggaggga

SEQ ID NO: 1102433 - RNA, 18 nt, Human
gggauggagggcacucgu

SEQ ID NO: 1102434 - RNA, 19 nt, Human
gggcggcggucccagcagc

SEQ ID NO: 1102435 - RNA, 19 nt, Human
ggguccggcaaagggcggg

SEQ ID NO: 1102436 - RNA, 21 nt, Human
ggguccucccccggucuaccc

SEQ ID NO: 1102437 - RNA, 24 nt, Human
gucacugcugucgaaucccccaaa

SEQ ID NO: 1102438 - RNA, 24 nt, Human
uaauuuuuguauuuuuaguagaga

SEQ ID NO: 1102439 - RNA, 23 nt, Human
uacaggcaugagccaccgcgccc

SEQ ID NO: 1102440 - RNA, 20 nt, Human
uaggggagcuguucugggcc

SEQ ID NO: 1102441 - RNA, 21 nt, Human
uaguagagaccggguuucacc

SEQ ID NO: 1102442 - RNA, 24 nt, Human
uaguagagaccggguuucaccgug

SEQ ID NO: 1102443 - RNA, 26 nt, Human
uaguagagaccggguuucaccguguu

SEQ ID NO: 1102444 - RNA, 22 nt, Human
uauccucaauuuacaguggagg

SEQ ID NO: 1102445 - RNA, 19 nt, Human
ucaagcgauucuccugccu

SEQ ID NO: 1102446 - RNA, 24 nt, Human
ucaccguguuggccaggauggucu

SEQ ID NO: 1102447 - RNA, 23 nt, Human
ucacugcuaccuccaccuccugg

SEQ ID NO: 1102448 - RNA, 24 nt, Human
ucacugcuaccuccaccuccuggg

SEQ ID NO: 1102449 - RNA, 27 nt, Human
ucacugcuaccuccaccuccuggguuc

SEQ ID NO: 1102450 - RNA, 23 nt, Human
ucagccucccgaguagcugggac

SEQ ID NO: 1102451 - RNA, 23 nt, Human
uccagguacgcuaggcgcaggau

SEQ ID NO: 1102452 - RNA, 24 nt, Human
ucccaaagugcugggauuacaggc

SEQ ID NO: 1102453 - RNA, 19 nt, Human
ucccaauacucagagugcc

SEQ ID NO: 1102454 - RNA, 19 nt, Human
ucccagagccggacaaugc

SEQ ID NO: 1102455 - RNA, 20 nt, Human
ucccaucgugucuccccacc

SEQ ID NO: 1102456 - RNA, 21 nt, Human
ucccccaaauucccuucaccc

SEQ ID NO: 1102457 - RNA, 18 nt, Human
ucccccggucuacccucu

SEQ ID NO: 1102458 - RNA, 24 nt, Human
ucccgaguagcugggacuacaggc

SEQ ID NO: 1102459 - RNA, 21 nt, Human
ucccucacuugcuccgggagg

SEQ ID NO: 1102460 - RNA, 23 nt, Human
uccugcagcccgcgccgcggccg

SEQ ID NO: 1102461 - RNA, 21 nt, Human
uccuggguucaagcgauucuc

SEQ ID NO: 1102462 - RNA, 24 nt, Human
uccuggguucaagcgauucuccug

SEQ ID NO: 1102463 - RNA, 20 nt, Human
ucgaaucccccaaauucccu

SEQ ID NO: 1102464 - RNA, 22 nt, Human
ucgccuucccgggucgccgccg

SEQ ID NO: 1102465 - RNA, 18 nt, Human
ucggccucccaaagugcu

SEQ ID NO: 1102466 - RNA, 25 nt, Human
ucucaaaaaacaaaaaaacaaaaaa

SEQ ID NO: 1102467 - RNA, 18 nt, Human
ucucacucugucgcccag

SEQ ID NO: 1102468 - RNA, 19 nt, Human
ucucacucugucgcccagu

SEQ ID NO: 1102469 - RNA, 21 nt, Human
ucucacucugucgcccagugg

SEQ ID NO: 1102470 - RNA, 25 nt, Human
ucucacucugucgcccaguggcggc

SEQ ID NO: 1102471 - RNA, 23 nt, Human
ugaccaccagauggacuccuaau

SEQ ID NO: 1102472 - RNA, 21 nt, Human
ugagacgaagucucaaaaaac

SEQ ID NO: 1102473 - RNA, 19 nt, Human
ugaguggccucccgccccc

SEQ ID NO: 1102474 - RNA, 21 nt, Human
ugaguggccucccgcccccca

SEQ ID NO: 1102475 - RNA, 22 nt, Human
ugaguggccucccgccccccag

SEQ ID NO: 1102476 - RNA, 24 nt, Human
ugccucagccucccgaguagcugg

SEQ ID NO: 1102477 - RNA, 21 nt, Human
ugccucggccucccaaagugc

SEQ ID NO: 1102478 - RNA, 24 nt, Human
ugccucggccucccaaagugcugg

SEQ ID NO: 1102479 - RNA, 23 nt, Human
ugcggggaccggcgggaacggag

SEQ ID NO: 1102480 - RNA, 18 nt, Human
uggaggaugucuacaacc

SEQ ID NO: 1102481 - RNA, 24 nt, Human
uggccaggauggucucuaucucuu

SEQ ID NO: 1102482 - RNA, 19 nt, Human
uggcuaaguauguuuuuug

SEQ ID NO: 1102483 - RNA, 21 nt, Human
ugggacuacaggcgcgcgcca

SEQ ID NO: 1102484 - RNA, 22 nt, Human
ugggaguggcggcgcggccccc

SEQ ID NO: 1102485 - RNA, 18 nt, Human
ugggauuacaggcaugag

SEQ ID NO: 1102486 - RNA, 19 nt, Human
ugggauuacaggcaugagc

SEQ ID NO: 1102487 - RNA, 21 nt, Human
ugggauuacaggcaugagcca

SEQ ID NO: 1102488 - RNA, 22 nt, Human
ugggauuacaggcaugagccac

SEQ ID NO: 1102489 - RNA, 23 nt, Human
ugggauuacaggcaugagccacc

SEQ ID NO: 1102490 - RNA, 24 nt, Human
ugggauuacaggcaugagccaccg

SEQ ID NO: 1102491 - RNA, 24 nt, Human
ugggauuacaggcaugagccaccg

SEQ ID NO: 1102492 - RNA, 23 nt, Human
uggguucaagcgauucuccugcc

SEQ ID NO: 1102493 - RNA, 24 nt, Human
uggguucaagcgauucuccugccu

SEQ ID NO: 1102494 - RNA, 18 nt, Human
ugucccggagccaccgag

SEQ ID NO: 1102495 - RNA, 22 nt, Human
ugucccggagccaccgaggcgg

SEQ ID NO: 1102496 - RNA, 22 nt, Human
uuaguagagaccggguuucacc

SEQ ID NO: 1102497 - RNA, 24 nt, Human
uuaguagagaccggguuucaccgu

SEQ ID NO: 1102498 - RNA, 21 nt, Human
uucaagcgauucuccugccuc

SEQ ID NO: 1102499 - RNA, 23 nt, Human
uucaagcgauucuccugccucag

SEQ ID NO: 1102500 - RNA, 24 nt, Human
uucaagcgauucuccugccucagc

SEQ ID NO: 1102501 - RNA, 19 nt, Human
uuggggcgaagggcacagg

SEQ ID NO: 1102502 - RNA, 19 nt, Human
uuucaccguguuggccagg

SEQ ID NO: 1102503 - RNA, 24 nt, Human
uuuuuaguagagaccggguuucac

SEQ ID NO: 1102504 - RNA, 20 nt, Human
uuuuuguauuuuuaguagag

SEQ ID NO: 1102505 - RNA, 21 nt, Human
aaacuuucuguagagacagag

SEQ ID NO: 1102506 - RNA, 25 nt, Human
acucuguugcccaggcuggucucaa

SEQ ID NO: 1102507 - RNA, 24 nt, Human
acugaauuugauuuucuuuuuuuu

SEQ ID NO: 1102508 - RNA, 18 nt, Human
agccauccucccgccuug

SEQ ID NO: 1102509 - RNA, 21 nt, Human
agccauccucccgccuuggcc

SEQ ID NO: 1102510 - RNA, 22 nt, Human
agccauccucccgccuuggccu

SEQ ID NO: 1102511 - RNA, 18 nt, Human
agcgaguggagcgggagg

SEQ ID NO: 1102512 - RNA, 23 nt, Human
agcuucucagcacgucucuguuc

SEQ ID NO: 1102513 - RNA, 19 nt, Human
aggcaggucaggucuuagg

SEQ ID NO: 1102514 - RNA, 21 nt, Human
aggcaggucaggucuuaggga

SEQ ID NO: 1102515 - RNA, 19 nt, Human
agggauuuuucuuucuuuc

SEQ ID NO: 1102516 - RNA, 19 nt, Human
aggggaaugagacugugau

SEQ ID NO: 1102517 - RNA, 20 nt, Human
caaacaacggcagguucccc

SEQ ID NO: 1102518 - RNA, 18 nt, Human
cacucuguugcccaggcu

SEQ ID NO: 1102519 - RNA, 24 nt, Human
cacucuguugcccaggcuggucuc

SEQ ID NO: 1102520 - RNA, 22 nt, Human
cacugaugccuugaccucccag

SEQ ID NO: 1102521 - RNA, 24 nt, Human
cagagucucacucuguugcccagg

SEQ ID NO: 1102522 - RNA, 20 nt, Human
cccaggcucaagccauccuc

SEQ ID NO: 1102523 - RNA, 19 nt, Human
ccucccgccuuggccuucc

SEQ ID NO: 1102524 - RNA, 25 nt, Human
cuaucuccaggcaguggcacaacca

SEQ ID NO: 1102525 - RNA, 18 nt, Human
cucaagccauccucccgc

SEQ ID NO: 1102526 - RNA, 25 nt, Human
cucacucuaucuccaggcaguggca

SEQ ID NO: 1102527 - RNA, 25 nt, Human
cucccaggcucaagccauccucccg

SEQ ID NO: 1102528 - RNA, 24 nt, Human
gcacaaccaucgcucacugaugcc

SEQ ID NO: 1102529 - RNA, 22 nt, Human
guagagacagagucucacucug

SEQ ID NO: 1102530 - RNA, 22 nt, Human
uacaagcaugugucacuacacc

SEQ ID NO: 1102531 - RNA, 24 nt, Human
uacaagcaugugucacuacaccug

SEQ ID NO: 1102532 - RNA, 22 nt, Human
uagagacagagucucacucugu

SEQ ID NO: 1102533 - RNA, 23 nt, Human
ucacugaugccuugaccucccag

SEQ ID NO: 1102534 - RNA, 20 nt, Human
uccaggcaguggcacaacca

SEQ ID NO: 1102535 - RNA, 18 nt, Human
ucccaggcucaagccauc

SEQ ID NO: 1102536 - RNA, 19 nt, Human
ucucacucuguugcccagg

SEQ ID NO: 1102537 - RNA, 23 nt, Human
ucucacucuguugcccaggcugg

SEQ ID NO: 1102538 - RNA, 26 nt, Human
ucucacucuguugcccaggcuggucu

SEQ ID NO: 1102539 - RNA, 27 nt, Human
ucucacucuguugcccaggcuggucuc

SEQ ID NO: 1102540 - RNA, 23 nt, Human
ucuguugcccaggcuggucucaa

SEQ ID NO: 1102541 - RNA, 24 nt, Human
ucuguugcccaggcuggucucaaa

SEQ ID NO: 1102542 - RNA, 22 nt, Human
ucuuucuuucuuucuuucuuuu

SEQ ID NO: 1102543 - RNA, 19 nt, Human
ucuuucuuucuuucuuuuu

SEQ ID NO: 1102544 - RNA, 22 nt, Human
ugagacagggucucacucuauc

SEQ ID NO: 1102545 - RNA, 19 nt, Human
ugaugccuugaccucccag

SEQ ID NO: 1102546 - RNA, 21 nt, Human
ugcccaggcuggucucaaacu

SEQ ID NO: 1102547 - RNA, 19 nt, Human
ugccuugaccucccaggcu

SEQ ID NO: 1102548 - RNA, 21 nt, Human
ugccuugaccucccaggcuca

SEQ ID NO: 1102549 - RNA, 26 nt, Human
uggcacaaccaucgcucacugaugcc

SEQ ID NO: 1102550 - RNA, 22 nt, Human
uguugcccaggcuggucucaaa

SEQ ID NO: 1102551 - RNA, 25 nt, Human
uuccucgcuggccucguuuuuugac

SEQ ID NO: 1102552 - RNA, 25 nt, Human
uucuuucuuucuuucuuuuuugaga

SEQ ID NO: 1102553 - RNA, 24 nt, Human
uugacaaacaacggcagguucccc

SEQ ID NO: 1102554 - RNA, 22 nt, Human
uugagacagggucucacucuau

SEQ ID NO: 1102555 - RNA, 22 nt, Human
uuggugcuuucuagggaguagg

SEQ ID NO: 1102556 - RNA, 18 nt, Human
uuucuuuuuugagacagg

SEQ ID NO: 1102557 - RNA, 23 nt, Human
uuuucuuuuuuuuuuucagucuc

SEQ ID NO: 1102558 - RNA, 23 nt, Human
aaagcaggagaaucgcuugaacc

SEQ ID NO: 1102559 - RNA, 24 nt, Human
aaagugcugggauuacaggcguga

SEQ ID NO: 1102560 - RNA, 22 nt, Human
aacagccaacucuccuacauau

SEQ ID NO: 1102561 - RNA, 20 nt, Human
aacauggugaaacuccgucu

SEQ ID NO: 1102562 - RNA, 21 nt, Human
aacauggugaaacuccgucuc

SEQ ID NO: 1102563 - RNA, 22 nt, Human
aacuagaacccagcugacuucc

SEQ ID NO: 1102564 - RNA, 18 nt, Human
aagaaggugcuucaucuu

SEQ ID NO: 1102565 - RNA, 19 nt, Human
aagagaaugaggagaaggg

SEQ ID NO: 1102566 - RNA, 19 nt, Human
aagcaaaggugaaagcaga

SEQ ID NO: 1102567 - RNA, 21 nt, Human
aagcaaaggugaaagcagaaa

SEQ ID NO: 1102568 - RNA, 22 nt, Human
aagcaggagaaucgcuugaacc

SEQ ID NO: 1102569 - RNA, 24 nt, Human
aagcaggagaaucgcuugaaccug

SEQ ID NO: 1102570 - RNA, 25 nt, Human
aagcaggagaaucgcuugaaccugg

SEQ ID NO: 1102571 - RNA, 21 nt, Human
aaggcccaggaaggccuccag

SEQ ID NO: 1102572 - RNA, 19 nt, Human
aagugcugggauuacaggc

SEQ ID NO: 1102573 - RNA, 19 nt, Human
aagugcugggauuacaggc

SEQ ID NO: 1102574 - RNA, 26 nt, Human
aagugcugggauuacaggcgugagcc

SEQ ID NO: 1102575 - RNA, 21 nt, Human
aauacuaaaggcaacugucac

SEQ ID NO: 1102576 - RNA, 18 nt, Human
aaucgcuugaaccuggga

SEQ ID NO: 1102577 - RNA, 24 nt, Human
aaucgcuugaaccugggaggcaga

SEQ ID NO: 1102578 - RNA, 23 nt, Human
acaagcaaaggugaaagcagaaa

SEQ ID NO: 1102579 - RNA, 20 nt, Human
acaccccucuccuccccuua

SEQ ID NO: 1102580 - RNA, 21 nt, Human
acagcacuucuagggucaccu

SEQ ID NO: 1102581 - RNA, 19 nt, Human
acauggugaaacuccgucu

SEQ ID NO: 1102582 - RNA, 21 nt, Human
acauugcacuucagccugggc

SEQ ID NO: 1102583 - RNA, 23 nt, Human
acauugcacuucagccugggcaa

SEQ ID NO: 1102584 - RNA, 24 nt, Human
acauugcacuucagccugggcaac

SEQ ID NO: 1102585 - RNA, 24 nt, Human
accaacauggugaaacuccgucuc

SEQ ID NO: 1102586 - RNA, 23 nt, Human
accagaguaaaaggaaaagacug

SEQ ID NO: 1102587 - RNA, 19 nt, Human
accccucuccuccccuuag

SEQ ID NO: 1102588 - RNA, 24 nt, Human
acuagaacccagcugacuuccccc

SEQ ID NO: 1102589 - RNA, 18 nt, Human
acuccagcgccugcugug

SEQ ID NO: 1102590 - RNA, 18 nt, Human
acuccagcgccugcugug

SEQ ID NO: 1102591 - RNA, 24 nt, Human
acuccgucucuacuaaaaauacaa

SEQ ID NO: 1102592 - RNA, 20 nt, Human
acugcaagcucugccuccca

SEQ ID NO: 1102593 - RNA, 22 nt, Human
acuuugggaggccgaggugggg

SEQ ID NO: 1102594 - RNA, 23 nt, Human
agaaacaaucccuauuuaagagc

SEQ ID NO: 1102595 - RNA, 18 nt, Human
agaaacuccaucucaaaa

SEQ ID NO: 1102596 - RNA, 21 nt, Human
agaacccagcugacuuccccc

SEQ ID NO: 1102597 - RNA, 24 nt, Human
agaacuuugggaggccgagguggg

SEQ ID NO: 1102598 - RNA, 19 nt, Human
agacaguagcauacuuggc

SEQ ID NO: 1102599 - RNA, 18 nt, Human
agagguugcagugagccg

SEQ ID NO: 1102600 - RNA, 23 nt, Human
agagguugcagugagccgagauc

SEQ ID NO: 1102601 - RNA, 24 nt, Human
agagguugcagugagccgagauca

SEQ ID NO: 1102602 - RNA, 19 nt, Human
agcacgccuucccauccug

SEQ ID NO: 1102603 - RNA, 21 nt, Human
agccaacucuccuacauaugc

SEQ ID NO: 1102604 - RNA, 18 nt, Human
agccaggugugauggugc

SEQ ID NO: 1102605 - RNA, 22 nt, Human
agccuaaccaacauggugaaac

SEQ ID NO: 1102606 - RNA, 18 nt, Human
aggaaauugagucacagg

SEQ ID NO: 1102607 - RNA, 20 nt, Human
aggaaggauuugggccucag

SEQ ID NO: 1102608 - RNA, 25 nt, Human
aggaaggccuccaggaaaaggcugc

SEQ ID NO: 1102609 - RNA, 18 nt, Human
aggagaagggagaguuga

SEQ ID NO: 1102610 - RNA, 21 nt, Human
aggcagagguugcagugagcc

SEQ ID NO: 1102611 - RNA, 24 nt, Human
aggcagagguugcagugagccgag

SEQ ID NO: 1102612 - RNA, 18 nt, Human
aggcaggacacagaggac

SEQ ID NO: 1102613 - RNA, 21 nt, Human
aggccgagguggggggaucac

SEQ ID NO: 1102614 - RNA, 23 nt, Human
aggccgagguggggggaucacug

SEQ ID NO: 1102615 - RNA, 25 nt, Human
aggcuggagugcaguggugcaaucu

SEQ ID NO: 1102616 - RNA, 24 nt, Human
aggggggccgggugugguggcuca

SEQ ID NO: 1102617 - RNA, 21 nt, Human
agguggggggaucacugaggu

SEQ ID NO: 1102618 - RNA, 21 nt, Human
aggugguguagccaccauacc

SEQ ID NO: 1102619 - RNA, 20 nt, Human
aguaaaaggaaaagacugga

SEQ ID NO: 1102620 - RNA, 22 nt, Human
aguagagaugggguuucaccau

SEQ ID NO: 1102621 - RNA, 19 nt, Human
aguagcugggacuccaggc

SEQ ID NO: 1102622 - RNA, 20 nt, Human
agugcaguggugcaaucucg

SEQ ID NO: 1102623 - RNA, 24 nt, Human
agugcaguggugcaaucucggcuc

SEQ ID NO: 1102624 - RNA, 18 nt, Human
agugcugggauuacaggc

SEQ ID NO: 1102625 - RNA, 18 nt, Human
auaaaacacuguagcccc

SEQ ID NO: 1102626 - RNA, 18 nt, Human
auaaaacacuguagcccc

SEQ ID NO: 1102627 - RNA, 24 nt, Human
aucacaacauugcacuucagccug

SEQ ID NO: 1102628 - RNA, 24 nt, Human
augauccgcccgccucggccuccc

SEQ ID NO: 1102629 - RNA, 18 nt, Human
augggguuucaccauguu

SEQ ID NO: 1102630 - RNA, 20 nt, Human
augggguuucaccauguuag

SEQ ID NO: 1102631 - RNA, 24 nt, Human
augggguuucaccauguuagccag

SEQ ID NO: 1102632 - RNA, 23 nt, Human
auggugcauaccugcaaucccag

SEQ ID NO: 1102633 - RNA, 24 nt, Human
auugcacuucagccugggcaacaa

SEQ ID NO: 1102634 - RNA, 25 nt, Human
auugcacuucagccugggcaacaag

SEQ ID NO: 1102635 - RNA, 24 nt, Human
caaagugcugggauuacaggcgug

SEQ ID NO: 1102636 - RNA, 24 nt, Human
caacauggugaaacuccgucucua

SEQ ID NO: 1102637 - RNA, 24 nt, Human
caagcacgccuucccauccugccc

SEQ ID NO: 1102638 - RNA, 18 nt, Human
cacacauggagaagaggc

SEQ ID NO: 1102639 - RNA, 19 nt, Human
caccacacccagccucuuc

SEQ ID NO: 1102640 - RNA, 18 nt, Human
caccauguuagccaggau

SEQ ID NO: 1102641 - RNA, 22 nt, Human
caccauguuagccaggaugguc

SEQ ID NO: 1102642 - RNA, 24 nt, Human
caccauguuagccaggauggucuu

SEQ ID NO: 1102643 - RNA, 18 nt, Human
cacccaccaccaugccug

SEQ ID NO: 1102644 - RNA, 18 nt, Human
caccccucuccuccccuu

SEQ ID NO: 1102645 - RNA, 24 nt, Human
cagaacuuugggaggccgaggugg

SEQ ID NO: 1102646 - RNA, 18 nt, Human
cagagaucuacccugugu

SEQ ID NO: 1102647 - RNA, 22 nt, Human
cagaguaaaaggaaaagacugg

SEQ ID NO: 1102648 - RNA, 18 nt, Human
cagccugggcaacaagag

SEQ ID NO: 1102649 - RNA, 20 nt, Human
caggacuccagcgccugcug

SEQ ID NO: 1102650 - RNA, 19 nt, Human
caggauauucagaagugcu

SEQ ID NO: 1102651 - RNA, 21 nt, Human
caguagcauacuuggcccugg

SEQ ID NO: 1102652 - RNA, 22 nt, Human
caugccauucuccugccucagc

SEQ ID NO: 1102653 - RNA, 18 nt, Human
cauguuaaaucauuuccu

SEQ ID NO: 1102654 - RNA, 19 nt, Human
cauugcacuucagccuggg

SEQ ID NO: 1102655 - RNA, 19 nt, Human
cauugcacuucagccuggg

SEQ ID NO: 1102656 - RNA, 20 nt, Human
cauugcacuucagccugggc

SEQ ID NO: 1102657 - RNA, 21 nt, Human
cauugcacuucagccugggca

SEQ ID NO: 1102658 - RNA, 22 nt, Human
cauugcacuucagccugggcaa

SEQ ID NO: 1102659 - RNA, 24 nt, Human
cauugcacuucagccugggcaaca

SEQ ID NO: 1102660 - RNA, 22 nt, Human
ccaaagugcugggauuacaggc

SEQ ID NO: 1102661 - RNA, 22 nt, Human
ccaaagugcugggauuacaggc

SEQ ID NO: 1102662 - RNA, 24 nt, Human
ccaaagugcugggauuacaggcgu

SEQ ID NO: 1102663 - RNA, 18 nt, Human
ccaacucuccuacauaug

SEQ ID NO: 1102664 - RNA, 22 nt, Human
ccagcgccugcugugguggggu

SEQ ID NO: 1102665 - RNA, 21 nt, Human
ccaggcacccaccaccaugcc

SEQ ID NO: 1102666 - RNA, 19 nt, Human
cccaggcuggagugcagug

SEQ ID NO: 1102667 - RNA, 20 nt, Human
cccagguucaugccauucuc

SEQ ID NO: 1102668 - RNA, 21 nt, Human
cccauccugcccugccggaac

SEQ ID NO: 1102669 - RNA, 21 nt, Human
ccccacagccguucuuaccua

SEQ ID NO: 1102670 - RNA, 21 nt, Human
cccccacagccguucuuaccu

SEQ ID NO: 1102671 - RNA, 23 nt, Human
ccuaaccaacauggugaaacucc

SEQ ID NO: 1102672 - RNA, 23 nt, Human
ccucagacccugguggucccagg

SEQ ID NO: 1102673 - RNA, 18 nt, Human
ccucaggauauucagaag

SEQ ID NO: 1102674 - RNA, 21 nt, Human
ccugcaaucccagcuacucag

SEQ ID NO: 1102675 - RNA, 22 nt, Human
ccugccggaacaccccucuccu

SEQ ID NO: 1102676 - RNA, 23 nt, Human
ccugccucagccucccgaguagc

SEQ ID NO: 1102677 - RNA, 24 nt, Human
ccugccucagccucccgaguagcu

SEQ ID NO: 1102678 - RNA, 25 nt, Human
ccugggaggcagagguugcagugag

SEQ ID NO: 1102679 - RNA, 24 nt, Human
cgagaccagccuaaccaacauggu

SEQ ID NO: 1102680 - RNA, 23 nt, Human
cgagguggggggaucacugaggu

SEQ ID NO: 1102681 - RNA, 25 nt, Human
cgagguggggggaucacugagguca

SEQ ID NO: 1102682 - RNA, 21 nt, Human
cgcccugucuuuaugacaccu

SEQ ID NO: 1102683 - RNA, 25 nt, Human
cuagaacccagcugacuucccccac

SEQ ID NO: 1102684 - RNA, 20 nt, Human
cuaggcuacaaaccuguacu

SEQ ID NO: 1102685 - RNA, 22 nt, Human
cucacacccauaaucccagaac

SEQ ID NO: 1102686 - RNA, 22 nt, Human
cucaccuaaauuucacaacaau

SEQ ID NO: 1102687 - RNA, 24 nt, Human
cucagccucccgaguagcugggac

SEQ ID NO: 1102688 - RNA, 18 nt, Human
cucaugauccgcccgccu

SEQ ID NO: 1102689 - RNA, 24 nt, Human
cuccugaccucaugauccgcccgc

SEQ ID NO: 1102690 - RNA, 23 nt, Human
cucuccuccccuuagugaggaag

SEQ ID NO: 1102691 - RNA, 24 nt, Human
cugcaagcucugccucccagguuc

SEQ ID NO: 1102692 - RNA, 22 nt, Human
cuguauuuuuaguagagauggg

SEQ ID NO: 1102693 - RNA, 23 nt, Human
cuguauuuuuaguagagaugggg

SEQ ID NO: 1102694 - RNA, 22 nt, Human
cuuaggacuccuaggcuacaaa

SEQ ID NO: 1102695 - RNA, 18 nt, Human
cuucaucuuauuuuagug

SEQ ID NO: 1102696 - RNA, 20 nt, Human
cuugaagucuccuugguggg

SEQ ID NO: 1102697 - RNA, 24 nt, Human
gaaaaauuucaaaacacuuugcaa

SEQ ID NO: 1102698 - RNA, 20 nt, Human
gaaauccgagaacacucuuc

SEQ ID NO: 1102699 - RNA, 21 nt, Human
gaaggggggccggguguggug

SEQ ID NO: 1102700 - RNA, 22 nt, Human
gaccucaugauccgcccgccuc

SEQ ID NO: 1102701 - RNA, 22 nt, Human
gacuccaggcacccaccaccau

SEQ ID NO: 1102702 - RNA, 20 nt, Human
gacuccuaggcuacaaaccu

SEQ ID NO: 1102703 - RNA, 23 nt, Human
gagaaucgcuugaaccugggagg

SEQ ID NO: 1102704 - RNA, 23 nt, Human
gagaucacaacauugcacuucag

SEQ ID NO: 1102705 - RNA, 21 nt, Human
gagauggagucuugcucuguc

SEQ ID NO: 1102706 - RNA, 20 nt, Human
gagaugggguuucaccaugu

SEQ ID NO: 1102707 - RNA, 24 nt, Human
gagaugggguuucaccauguuagc

SEQ ID NO: 1102708 - RNA, 21 nt, Human
gagguggggggaucacugagg

SEQ ID NO: 1102709 - RNA, 18 nt, Human
gagugcugacuuccucuc

SEQ ID NO: 1102710 - RNA, 23 nt, Human
gaucacugaggucagaaguucga

SEQ ID NO: 1102711 - RNA, 18 nt, Human
gauuacaggcgugagcca

SEQ ID NO: 1102712 - RNA, 21 nt, Human
gauuacaggcgugagccacca

SEQ ID NO: 1102713 - RNA, 22 nt, Human
gauuacaggcgugagccaccac

SEQ ID NO: 1102714 - RNA, 19 nt, Human
gcccaggcuggagugcagu

SEQ ID NO: 1102715 - RNA, 20 nt, Human
gcccaggcuggagugcagug

SEQ ID NO: 1102716 - RNA, 23 nt, Human
gcccaggcuggagugcaguggug

SEQ ID NO: 1102717 - RNA, 22 nt, Human
gcccuggguuugacauaaaacu

SEQ ID NO: 1102718 - RNA, 25 nt, Human
gccucccagguucaugccauucucc

SEQ ID NO: 1102719 - RNA, 23 nt, Human
gccucggccucccaaagugcugg

SEQ ID NO: 1102720 - RNA, 25 nt, Human
gcucugucgcccaggcuggagugca

SEQ ID NO: 1102721 - RNA, 21 nt, Human
gcuuggggagauaaagaaggc

SEQ ID NO: 1102722 - RNA, 27 nt, Human
ggacuccagcgccugcugugguggggu

SEQ ID NO: 1102723 - RNA, 24 nt, Human
ggauggucuugaucuccugaccuc

SEQ ID NO: 1102724 - RNA, 19 nt, Human
ggauuacaggcgugagcca

SEQ ID NO: 1102725 - RNA, 21 nt, Human
ggccgggugugguggcucaca

SEQ ID NO: 1102726 - RNA, 22 nt, Human
gggggccgggugugguggcuca

SEQ ID NO: 1102727 - RNA, 22 nt, Human
gggguuucaccauguuagccag

SEQ ID NO: 1102728 - RNA, 19 nt, Human
ggugggggcgcggcagagc

SEQ ID NO: 1102729 - RNA, 23 nt, Human
ggugugguggcucacacccauaa

SEQ ID NO: 1102730 - RNA, 24 nt, Human
gguuucaccauguuagccaggaug

SEQ ID NO: 1102731 - RNA, 23 nt, Human
guagagaugggguuucaccaugu

SEQ ID NO: 1102732 - RNA, 20 nt, Human
gucaguuguccauauggcuc

SEQ ID NO: 1102733 - RNA, 21 nt, Human
gugaaacuccgucucuacuaa

SEQ ID NO: 1102734 - RNA, 24 nt, Human
gugagccaccacacccagccucuu

SEQ ID NO: 1102735 - RNA, 18 nt, Human
guggugggguaggguggg

SEQ ID NO: 1102736 - RNA, 19 nt, Human
guugcagugagccgagauc

SEQ ID NO: 1102737 - RNA, 20 nt, Human
uaaaaauacaaaauuagcca

SEQ ID NO: 1102738 - RNA, 22 nt, Human
uaaaaauacaaaauuagccagg

SEQ ID NO: 1102739 - RNA, 23 nt, Human
uaaaaauacaaaauuagccaggu

SEQ ID NO: 1102740 - RNA, 21 nt, Human
uaaagaaggcccaggaaggcc

SEQ ID NO: 1102741 - RNA, 22 nt, Human
uaaagagggugaagcgaaaaug

SEQ ID NO: 1102742 - RNA, 22 nt, Human
uaaggugaaauccgagaacacu

SEQ ID NO: 1102743 - RNA, 24 nt, Human
uaauuuagaaacaaucccuauuua

SEQ ID NO: 1102744 - RNA, 23 nt, Human
uacacaaaccuaggugguguagc

SEQ ID NO: 1102745 - RNA, 24 nt, Human
uacaggcgugagccaccacaccca

SEQ ID NO: 1102746 - RNA, 24 nt, Human
uaccugcaaucccagcuacucagg

SEQ ID NO: 1102747 - RNA, 22 nt, Human
uagagaugggguuucaccaugu

SEQ ID NO: 1102748 - RNA, 20 nt, Human
uagcaugauccccaguuuaa

SEQ ID NO: 1102749 - RNA, 22 nt, Human
uagccccaaguuaaguucccuc

SEQ ID NO: 1102750 - RNA, 24 nt, Human
uaguagagaugggguuucaccaug

SEQ ID NO: 1102751 - RNA, 26 nt, Human
uaguagagaugggguuucaccauguu

SEQ ID NO: 1102752 - RNA, 23 nt, Human
uauucacucaccuaaauuucaca

SEQ ID NO: 1102753 - RNA, 23 nt, Human
ucaacacagccauuccccuagaa

SEQ ID NO: 1102754 - RNA, 24 nt, Human
ucaccauguuagccaggauggucu

SEQ ID NO: 1102755 - RNA, 21 nt, Human
ucaccuguguucagagaucua

SEQ ID NO: 1102756 - RNA, 25 nt, Human
ucacuaggugauuucaccauugugc

SEQ ID NO: 1102757 - RNA, 18 nt, Human
ucacugcaagcucugccu

SEQ ID NO: 1102758 - RNA, 18 nt, Human
ucacugcaagcucugccu

SEQ ID NO: 1102759 - RNA, 19 nt, Human
ucacugcaagcucugccuc

SEQ ID NO: 1102760 - RNA, 24 nt, Human
ucacugcaagcucugccucccagg

SEQ ID NO: 1102761 - RNA, 23 nt, Human
ucagccucccgaguagcugggac

SEQ ID NO: 1102762 - RNA, 21 nt, Human
ucaggcaggacacagaggaca

SEQ ID NO: 1102763 - RNA, 23 nt, Human
ucauauauucacucaccuaaaag

SEQ ID NO: 1102764 - RNA, 18 nt, Human
ucaugccauucuccugcc

SEQ ID NO: 1102765 - RNA, 24 nt, Human
ucccaaagugcugggauuacaggc

SEQ ID NO: 1102766 - RNA, 21 nt, Human
ucccaaggaagucaccggacc

SEQ ID NO: 1102767 - RNA, 22 nt, Human
ucccaaggaagucaccggaccu

SEQ ID NO: 1102768 - RNA, 18 nt, Human
ucccaggacuccagcgcc

SEQ ID NO: 1102769 - RNA, 20 nt, Human
ucccagguucaugccauucu

SEQ ID NO: 1102770 - RNA, 21 nt, Human
ucccagguucaugccauucuc

SEQ ID NO: 1102771 - RNA, 24 nt, Human
ucccagguucaugccauucuccug

SEQ ID NO: 1102772 - RNA, 19 nt, Human
ucccauccugcccugccgg

SEQ ID NO: 1102773 - RNA, 23 nt, Human
uccccaguuuaaaggugaggaaa

SEQ ID NO: 1102774 - RNA, 19 nt, Human
uccccuagaaguuacagca

SEQ ID NO: 1102775 - RNA, 24 nt, Human
ucccgaguagcugggacuccaggc

SEQ ID NO: 1102776 - RNA, 24 nt, Human
ucgcccaggcuggagugcaguggu

SEQ ID NO: 1102777 - RNA, 18 nt, Human
ucgcuugaaccugggagg

SEQ ID NO: 1102778 - RNA, 18 nt, Human
ucggccucccaaagugcu

SEQ ID NO: 1102779 - RNA, 23 nt, Human
ucuacauauagaaagcuagggac

SEQ ID NO: 1102780 - RNA, 24 nt, Human
ucuccugccucagccucccgagua

SEQ ID NO: 1102781 - RNA, 20 nt, Human
ucucuacuaaaaauacaaaa

SEQ ID NO: 1102782 - RNA, 23 nt, Human
ucuugcucugucgcccaggcugg

SEQ ID NO: 1102783 - RNA, 24 nt, Human
ucuugcucugucgcccaggcugga

SEQ ID NO: 1102784 - RNA, 20 nt, Human
ugaaaugcuaacuagcauga

SEQ ID NO: 1102785 - RNA, 24 nt, Human
ugaaccugggaggcagagguugca

SEQ ID NO: 1102786 - RNA, 20 nt, Human
ugaggagaagggagaguuga

SEQ ID NO: 1102787 - RNA, 19 nt, Human
ugcacuucagccugggcaa

SEQ ID NO: 1102788 - RNA, 24 nt, Human
ugccucagccucccgaguagcugg

SEQ ID NO: 1102789 - RNA, 20 nt, Human
ugccuggcauagacauaggg

SEQ ID NO: 1102790 - RNA, 24 nt, Human
ugcucugucgcccaggcuggagug

SEQ ID NO: 1102791 - RNA, 24 nt, Human
ugcugggauuacaggcgugagcca

SEQ ID NO: 1102792 - RNA, 23 nt, Human
uggagucuugcucugucgcccag

SEQ ID NO: 1102793 - RNA, 24 nt, Human
uggagucuugcucugucgcccagg

SEQ ID NO: 1102794 - RNA, 23 nt, Human
uggagugcaguggugcaaucucg

SEQ ID NO: 1102795 - RNA, 24 nt, Human
uggagugcaguggugcaaucucgg

SEQ ID NO: 1102796 - RNA, 22 nt, Human
uggcucacacccauaaucccag

SEQ ID NO: 1102797 - RNA, 18 nt, Human
ugggaggaggcugaacug

SEQ ID NO: 1102798 - RNA, 24 nt, Human
ugggaggcagagguugcagugagc

SEQ ID NO: 1102799 - RNA, 24 nt, Human
ugggaggccgagguggggggauca

SEQ ID NO: 1102800 - RNA, 18 nt, Human
ugggauuacaggcgugag

SEQ ID NO: 1102801 - RNA, 19 nt, Human
ugggauuacaggcgugagc

SEQ ID NO: 1102802 - RNA, 22 nt, Human
ugggauuacaggcgugagccac

SEQ ID NO: 1102803 - RNA, 23 nt, Human
ugggauuacaggcgugagccacc

SEQ ID NO: 1102804 - RNA, 24 nt, Human
ugggauuacaggcgugagccacca

SEQ ID NO: 1102805 - RNA, 27 nt, Human
ugggccucagacccugguggucccagg

SEQ ID NO: 1102806 - RNA, 23 nt, Human
uggggugggggcgcggcagagcu

SEQ ID NO: 1102807 - RNA, 24 nt, Human
ugggguuucaccauguuagccagg

SEQ ID NO: 1102808 - RNA, 21 nt, Human
uguaacuagaacccagcugac

SEQ ID NO: 1102809 - RNA, 21 nt, Human
ugucgcccaggcuggagugca

SEQ ID NO: 1102810 - RNA, 18 nt, Human
uuaguagagaugggguuu

SEQ ID NO: 1102811 - RNA, 22 nt, Human
uuaguagagaugggguuucacc

SEQ ID NO: 1102812 - RNA, 24 nt, Human
uuaguagagaugggguuucaccau

SEQ ID NO: 1102813 - RNA, 23 nt, Human
uucaucuuauuuuagugccuggc

SEQ ID NO: 1102814 - RNA, 19 nt, Human
uucaugccauucuccugcc

SEQ ID NO: 1102815 - RNA, 24 nt, Human
uugaaccugggaggcagagguugc

SEQ ID NO: 1102816 - RNA, 21 nt, Human
uugacucaacacagccauucc

SEQ ID NO: 1102817 - RNA, 22 nt, Human
uugagucacaggcagaauaacu

SEQ ID NO: 1102818 - RNA, 18 nt, Human
uugcagugagccgagauc

SEQ ID NO: 1102819 - RNA, 19 nt, Human
uugcagugagccgagauca

SEQ ID NO: 1102820 - RNA, 20 nt, Human
uugcagugagccgagaucac

SEQ ID NO: 1102821 - RNA, 24 nt, Human
uugcucugucgcccaggcuggagu

SEQ ID NO: 1102822 - RNA, 25 nt, Human
uugggaggccgagguggggggauca

SEQ ID NO: 1102823 - RNA, 25 nt, Human
uugggguaaaaguuaaauaaaacac

SEQ ID NO: 1102824 - RNA, 19 nt, Human
uuucaccauguuagccagg

SEQ ID NO: 1102825 - RNA, 20 nt, Human
uuucaccauguuagccagga

SEQ ID NO: 1102826 - RNA, 24 nt, Human
uuucauaugcagucaugcauugcu

SEQ ID NO: 1102827 - RNA, 21 nt, Human
uuucuguauuuuuaguagaga

SEQ ID NO: 1102828 - RNA, 21 nt, Human
uuuucuguauuuuuaguagag

SEQ ID NO: 1102829 - RNA, 24 nt, Human
uuuucuguauuuuuaguagagaug

SEQ ID NO: 1102830 - RNA, 24 nt, Human
uuuuuaguagagaugggguuucac

SEQ ID NO: 1102831 - RNA, 21 nt, Human
aacuggaauaagucuuccaga

SEQ ID NO: 1102832 - RNA, 25 nt, Human
aagcaacuggaauaagucuuccaga

SEQ ID NO: 1102833 - RNA, 20 nt, Human
aaggauggcugccaagaugg

SEQ ID NO: 1102834 - RNA, 21 nt, Human
acagagccuuaacugaguuau

SEQ ID NO: 1102835 - RNA, 22 nt, Human
accucguucuccccgcucgcac

SEQ ID NO: 1102836 - RNA, 22 nt, Human
agaguccaucuucaguuucuuc

SEQ ID NO: 1102837 - RNA, 24 nt, Human
agugcuaacaaacuaaaugaaaau

SEQ ID NO: 1102838 - RNA, 18 nt, Human
agugguuuggauugacug

SEQ ID NO: 1102839 - RNA, 23 nt, Human
aucaagauacuuccaucaugggu

SEQ ID NO: 1102840 - RNA, 19 nt, Human
aucauuauucugcugaagu

SEQ ID NO: 1102841 - RNA, 22 nt, Human
augcaguuuguuucauuauguu

SEQ ID NO: 1102842 - RNA, 19 nt, Human
caaaacagagccuuaacug

SEQ ID NO: 1102843 - RNA, 19 nt, Human
caaggggccacuccgagcc

SEQ ID NO: 1102844 - RNA, 22 nt, Human
cacagccuggcugccgccgucc

SEQ ID NO: 1102845 - RNA, 22 nt, Human
cagagagaaauaaguaucuguc

SEQ ID NO: 1102846 - RNA, 18 nt, Human
cagccccccugcacagcc

SEQ ID NO: 1102847 - RNA, 18 nt, Human
cagccccccugcacagcc

SEQ ID NO: 1102848 - RNA, 23 nt, Human
caugcaguuuguuucauuauguu

SEQ ID NO: 1102849 - RNA, 19 nt, Human
cauuuuccucacgcuggga

SEQ ID NO: 1102850 - RNA, 21 nt, Human
ccaucauggguacacugaaga

SEQ ID NO: 1102851 - RNA, 18 nt, Human
cccccagauuucccacaa

SEQ ID NO: 1102852 - RNA, 22 nt, Human
cccgcagccccccugcacagcc

SEQ ID NO: 1102853 - RNA, 20 nt, Human
ccgcgggugccuucuccucu

SEQ ID NO: 1102854 - RNA, 22 nt, Human
cgcucgggaguccccgcagccc

SEQ ID NO: 1102855 - RNA, 18 nt, Human
cuaugauccacagcuucg

SEQ ID NO: 1102856 - RNA, 24 nt, Human
gaauaucucccaaugagaagcccu

SEQ ID NO: 1102857 - RNA, 18 nt, Human
gcugaagugaguucuccu

SEQ ID NO: 1102858 - RNA, 23 nt, Human
guccacgcuggcgccggcuccuc

SEQ ID NO: 1102859 - RNA, 21 nt, Human
uaaaugaaaauaaggcuauuu

SEQ ID NO: 1102860 - RNA, 22 nt, Human
uaccucguucuccccgcucgca

SEQ ID NO: 1102861 - RNA, 20 nt, Human
uagauucaguggucuuuucu

SEQ ID NO: 1102862 - RNA, 24 nt, Human
uauguuaauagcuuugauacauug

SEQ ID NO: 1102863 - RNA, 18 nt, Human
uauuuuucccucuucguc

SEQ ID NO: 1102864 - RNA, 25 nt, Human
ucagaugucucucauuucuagauuc

SEQ ID NO: 1102865 - RNA, 23 nt, Human
ucccaaugagaagcccuccguga

SEQ ID NO: 1102866 - RNA, 21 nt, Human
ucccccagauuucccacaagu

SEQ ID NO: 1102867 - RNA, 23 nt, Human
ucccccagauuucccacaagugu

SEQ ID NO: 1102868 - RNA, 19 nt, Human
uccgugaauuuucaggcug

SEQ ID NO: 1102869 - RNA, 24 nt, Human
uccucugcuauuuuguuuucauca

SEQ ID NO: 1102870 - RNA, 20 nt, Human
ucucucauuucuagauucag

SEQ ID NO: 1102871 - RNA, 18 nt, Human
ucugccucccaaucaggu

SEQ ID NO: 1102872 - RNA, 22 nt, Human
ucuucaguuucuucucacuuuc

SEQ ID NO: 1102873 - RNA, 26 nt, Human
ugaaaauaaggcuauuuugcauuuaa

SEQ ID NO: 1102874 - RNA, 23 nt, Human
ugaaauaccucuuaaaacaauuu

SEQ ID NO: 1102875 - RNA, 20 nt, Human
ugaagagcauagugguuugg

SEQ ID NO: 1102876 - RNA, 24 nt, Human
ugaaguccuaaacauuuguccaug

SEQ ID NO: 1102877 - RNA, 22 nt, Human
ugauacauugugcucgcucucu

SEQ ID NO: 1102878 - RNA, 19 nt, Human
ugauccccaguguuugcuc

SEQ ID NO: 1102879 - RNA, 22 nt, Human
ugccgccguccacgcuggcgcc

SEQ ID NO: 1102880 - RNA, 21 nt, Human
ugccuggaagaggaauaucuc

SEQ ID NO: 1102881 - RNA, 20 nt, Human
uggaagaggaauaucuccca

SEQ ID NO: 1102882 - RNA, 24 nt, Human
ugggaacuaugauccacagcuucg

SEQ ID NO: 1102883 - RNA, 21 nt, Human
ugggcugacacccuuucuuca

SEQ ID NO: 1102884 - RNA, 20 nt, Human
uggguuuccuuuuucuggcc

SEQ ID NO: 1102885 - RNA, 19 nt, Human
ugugauccaaauaaucagu

SEQ ID NO: 1102886 - RNA, 20 nt, Human
ugugaugaaagcaacuggaa

SEQ ID NO: 1102887 - RNA, 22 nt, Human
uuaaaacaauuugauccccagu

SEQ ID NO: 1102888 - RNA, 25 nt, Human
uuaaaauaguauuugaaaagcucac

SEQ ID NO: 1102889 - RNA, 24 nt, Human
uucaucaucauuauucugcugaag

SEQ ID NO: 1102890 - RNA, 18 nt, Human
uuccucacgcugggaacu

SEQ ID NO: 1102891 - RNA, 23 nt, Human
uugaagcaguuucaaugguuugu

SEQ ID NO: 1102892 - RNA, 24 nt, Human
aaaagcacaggcugugugucugga

SEQ ID NO: 1102893 - RNA, 22 nt, Human
aaaugcagccgaaacuguuggc

SEQ ID NO: 1102894 - RNA, 19 nt, Human
aaccagauguccauauucc

SEQ ID NO: 1102895 - RNA, 19 nt, Human
aaccgaaucagaucaugag

SEQ ID NO: 1102896 - RNA, 25 nt, Human
aacuauugauaaagugagucagcag

SEQ ID NO: 1102897 - RNA, 23 nt, Human
aaggggacaucaucgcuucaguc

SEQ ID NO: 1102898 - RNA, 23 nt, Human
acacauuccuccccccucccccc

SEQ ID NO: 1102899 - RNA, 22 nt, Human
acauucacagacagaaagcuaa

SEQ ID NO: 1102900 - RNA, 22 nt, Human
acccucagaauuaccgaagaaa

SEQ ID NO: 1102901 - RNA, 22 nt, Human
acggccuccuuagcugcuagaa

SEQ ID NO: 1102902 - RNA, 23 nt, Human
acuaucuuacacauuccuccccc

SEQ ID NO: 1102903 - RNA, 24 nt, Human
agaaaucagaaguuuuaugaagcc

SEQ ID NO: 1102904 - RNA, 29 nt, Human
agacagaaagcuaagcuaagagggacccc

SEQ ID NO: 1102905 - RNA, 19 nt, Human
agagggcagcaggccaaag

SEQ ID NO: 1102906 - RNA, 23 nt, Human
agaugaggagggugaagcgagug

SEQ ID NO: 1102907 - RNA, 23 nt, Human
agccagaccagccacaagaccua

SEQ ID NO: 1102908 - RNA, 18 nt, Human
agcuugaaggagccggca

SEQ ID NO: 1102909 - RNA, 19 nt, Human
aggagacagggaaccgaau

SEQ ID NO: 1102910 - RNA, 21 nt, Human
aggcuggggucccacucuugu

SEQ ID NO: 1102911 - RNA, 19 nt, Human
aggguaacccuuuucaaag

SEQ ID NO: 1102912 - RNA, 22 nt, Human
aguaauaacuuuauuuccaaau

SEQ ID NO: 1102913 - RNA, 19 nt, Human
agucugugcccugacacag

SEQ ID NO: 1102914 - RNA, 24 nt, Human
aucaucgcuucaguccuaauccug

SEQ ID NO: 1102915 - RNA, 18 nt, Human
aucccaaucccugcugug

SEQ ID NO: 1102916 - RNA, 23 nt, Human
augaagccgcaggucuguagaug

SEQ ID NO: 1102917 - RNA, 22 nt, Human
auuucaugucccuccccccacc

SEQ ID NO: 1102918 - RNA, 26 nt, Human
caacaagcaauagcaaacaggauaca

SEQ ID NO: 1102919 - RNA, 21 nt, Human
cacaacaagcaauagcaaaca

SEQ ID NO: 1102920 - RNA, 25 nt, Human
cacacaauacacuauauagacauuc

SEQ ID NO: 1102921 - RNA, 27 nt, Human
cacacaauacacuauauagacauucac

SEQ ID NO: 1102922 - RNA, 19 nt, Human
cacaggcugugugucugga

SEQ ID NO: 1102923 - RNA, 23 nt, Human
caccacacaggccacacgagucc

SEQ ID NO: 1102924 - RNA, 21 nt, Human
caccacugacaaccaagacac

SEQ ID NO: 1102925 - RNA, 27 nt, Human
caccacugacaaccaagacacccagcc

SEQ ID NO: 1102926 - RNA, 23 nt, Human
cagaaguggcagaauugggccug

SEQ ID NO: 1102927 - RNA, 22 nt, Human
cagacagaaagcuaagcuaaga

SEQ ID NO: 1102928 - RNA, 19 nt, Human
cagcagauggaguuugugc

SEQ ID NO: 1102929 - RNA, 18 nt, Human
cagcagcuugaaggagcc

SEQ ID NO: 1102930 - RNA, 22 nt, Human
cagcaggguggcaccacacagg

SEQ ID NO: 1102931 - RNA, 24 nt, Human
cagccacaagaccuagucugugcc

SEQ ID NO: 1102932 - RNA, 18 nt, Human
caggaagaggaaccgagg

SEQ ID NO: 1102933 - RNA, 23 nt, Human
caggaaggggccaggccuucuca

SEQ ID NO: 1102934 - RNA, 18 nt, Human
caggccaaagcaaccaga

SEQ ID NO: 1102935 - RNA, 28 nt, Human
caggugaucaccucugcccccugaaagg

SEQ ID NO: 1102936 - RNA, 22 nt, Human
caguauggaguagguaccuccu

SEQ ID NO: 1102937 - RNA, 18 nt, Human
caguggaaaagagaaacc

SEQ ID NO: 1102938 - RNA, 21 nt, Human
cagugugagagguggcacaga

SEQ ID NO: 1102939 - RNA, 18 nt, Human
caguuggaugaguggaac

SEQ ID NO: 1102940 - RNA, 25 nt, Human
caugucccuccccccacccucagaa

SEQ ID NO: 1102941 - RNA, 23 nt, Human
ccaaaccagaaguggcagaauug

SEQ ID NO: 1102942 - RNA, 20 nt, Human
ccacaagggggagaucccag

SEQ ID NO: 1102943 - RNA, 24 nt, Human
ccacauuuccuucuccuucucaga

SEQ ID NO: 1102944 - RNA, 21 nt, Human
cccaagagccugcccccacaa

SEQ ID NO: 1102945 - RNA, 18 nt, Human
ccccaagagccugccccc

SEQ ID NO: 1102946 - RNA, 19 nt, Human
ccccaagagccugccccca

SEQ ID NO: 1102947 - RNA, 19 nt, Human
ccccaagaucucccuuugc

SEQ ID NO: 1102948 - RNA, 20 nt, Human
ccccaagggccucuaacucc

SEQ ID NO: 1102949 - RNA, 22 nt, Human
ccccauagcacaacaagcaaua

SEQ ID NO: 1102950 - RNA, 21 nt, Human
ccccccagcuggcaguggcuu

SEQ ID NO: 1102951 - RNA, 21 nt, Human
ccuaucuagcccacccaagga

SEQ ID NO: 1102952 - RNA, 19 nt, Human
ccuccccccacccucagaa

SEQ ID NO: 1102953 - RNA, 21 nt, Human
ccuccugcaaccaaccagggu

SEQ ID NO: 1102954 - RNA, 18 nt, Human
ccucgcgccgcaagccag

SEQ ID NO: 1102955 - RNA, 22 nt, Human
ccugcaaccaaccagggucauu

SEQ ID NO: 1102956 - RNA, 18 nt, Human
ccuggcucacaucuguga

SEQ ID NO: 1102957 - RNA, 20 nt, Human
ccugucaguggaaaagagaa

SEQ ID NO: 1102958 - RNA, 20 nt, Human
ccuucuccuucucagauccc

SEQ ID NO: 1102959 - RNA, 18 nt, Human
cucgcgccgcaagccaga

SEQ ID NO: 1102960 - RNA, 20 nt, Human
cucgcgccgcaagccagacc

SEQ ID NO: 1102961 - RNA, 28 nt, Human
cugccagccccaggggaggcccuggauu

SEQ ID NO: 1102962 - RNA, 20 nt, Human
cugcgcugccccuccagagg

SEQ ID NO: 1102963 - RNA, 18 nt, Human
cugcucccucccucuagc

SEQ ID NO: 1102964 - RNA, 20 nt, Human
cuugugaugcaggaguugua

SEQ ID NO: 1102965 - RNA, 21 nt, Human
gaaacaccuagggucacagcu

SEQ ID NO: 1102966 - RNA, 18 nt, Human
gaacccagucugaggggu

SEQ ID NO: 1102967 - RNA, 22 nt, Human
gagagguggcacagaggugcca

SEQ ID NO: 1102968 - RNA, 20 nt, Human
gagccagugugagagguggc

SEQ ID NO: 1102969 - RNA, 18 nt, Human
gaggcugggaauucggga

SEQ ID NO: 1102970 - RNA, 18 nt, Human
gaguagguaccuccugca

SEQ ID NO: 1102971 - RNA, 23 nt, Human
gcagggcacaagaacuucaggaa

SEQ ID NO: 1102972 - RNA, 25 nt, Human
gccagccccaggggagggggaacgc

SEQ ID NO: 1102973 - RNA, 19 nt, Human
gccaugagacuucgggcua

SEQ ID NO: 1102974 - RNA, 22 nt, Human
gcccugacacagggagccccaa

SEQ ID NO: 1102975 - RNA, 19 nt, Human
gccuggacuuugccuuccc

SEQ ID NO: 1102976 - RNA, 21 nt, Human
gcgugaagaaaugcagccgaa

SEQ ID NO: 1102977 - RNA, 20 nt, Human
gcuaugaccagagagaacca

SEQ ID NO: 1102978 - RNA, 27 nt, Human
gcuggcaguggcuuccuuuuucuugau

SEQ ID NO: 1102979 - RNA, 22 nt, Human
ggaaagccuuucaaaacuuggg

SEQ ID NO: 1102980 - RNA, 22 nt, Human
ggagaacaaagaugaggagggu

SEQ ID NO: 1102981 - RNA, 21 nt, Human
ggagcuucugggagcugcaga

SEQ ID NO: 1102982 - RNA, 22 nt, Human
ggagggaaugaacuagccagcu

SEQ ID NO: 1102983 - RNA, 23 nt, Human
ggcacaagaacuucaggaagagg

SEQ ID NO: 1102984 - RNA, 18 nt, Human
ggcccuuggugggaggcu

SEQ ID NO: 1102985 - RNA, 23 nt, Human
gggacuugcaagugccagaaaua

SEQ ID NO: 1102986 - RNA, 24 nt, Human
gggaggccccagcaggguggcacc

SEQ ID NO: 1102987 - RNA, 21 nt, Human
gggccaggccuucucagggga

SEQ ID NO: 1102988 - RNA, 20 nt, Human
gucauuacugagaaggggug

SEQ ID NO: 1102989 - RNA, 24 nt, Human
guugggucccaggugcugaggaaa

SEQ ID NO: 1102990 - RNA, 24 nt, Human
guuguaagccuccuuugggacugc

SEQ ID NO: 1102991 - RNA, 25 nt, Human
uaaccaccaccaaaucuaccccagu

SEQ ID NO: 1102992 - RNA, 19 nt, Human
uaacuccguggcugcuccc

SEQ ID NO: 1102993 - RNA, 22 nt, Human
uaagaucacaagccagcgugcc

SEQ ID NO: 1102994 - RNA, 20 nt, Human
uaagcuaagaugauuucaug

SEQ ID NO: 1102995 - RNA, 19 nt, Human
uaggaccccugaaagaggg

SEQ ID NO: 1102996 - RNA, 19 nt, Human
uaggagaauugcugggacu

SEQ ID NO: 1102997 - RNA, 23 nt, Human
uauaagaaggcccauggugcuga

SEQ ID NO: 1102998 - RNA, 19 nt, Human
ucaaagcugaagagaaauc

SEQ ID NO: 1102999 - RNA, 21 nt, Human
ucagaauuaccgaagaaauca

SEQ ID NO: 1103000 - RNA, 23 nt, Human
ucagcuccaaaagcacaggcugu

SEQ ID NO: 1103001 - RNA, 23 nt, Human
ucaguccuaauccugugcuucag

SEQ ID NO: 1103002 - RNA, 24 nt, Human
ucaugagauucguggugagggucc

SEQ ID NO: 1103003 - RNA, 23 nt, Human
uccaggacaggcaauucauccca

SEQ ID NO: 1103004 - RNA, 21 nt, Human
ucccaguuggaugaguggaac

SEQ ID NO: 1103005 - RNA, 27 nt, Human
uccccccagcuggcaguggcuuccuuu

SEQ ID NO: 1103006 - RNA, 18 nt, Human
ucccugcuguggucgcag

SEQ ID NO: 1103007 - RNA, 24 nt, Human
ucgcgccgcaagccagaccagcca

SEQ ID NO: 1103008 - RNA, 24 nt, Human
ucuccaugucaacaaggcagaaac

SEQ ID NO: 1103009 - RNA, 24 nt, Human
ucugccagcacugaucacccuaaa

SEQ ID NO: 1103010 - RNA, 20 nt, Human
ucugcccucgccccgaccuc

SEQ ID NO: 1103011 - RNA, 20 nt, Human
ucugggcccagagacuuccu

SEQ ID NO: 1103012 - RNA, 21 nt, Human
ucugugacgggaggaggagac

SEQ ID NO: 1103013 - RNA, 20 nt, Human
ugaagagaaaucagaaguuu

SEQ ID NO: 1103014 - RNA, 21 nt, Human
ugacuugucaagucauccuuc

SEQ ID NO: 1103015 - RNA, 18 nt, Human
ugagagugagaggcuggg

SEQ ID NO: 1103016 - RNA, 20 nt, Human
ugagagugagaggcuggggu

SEQ ID NO: 1103017 - RNA, 23 nt, Human
ugagcagugcccuggcucacauc

SEQ ID NO: 1103018 - RNA, 21 nt, Human
ugaggagggugaagcgaguga

SEQ ID NO: 1103019 - RNA, 18 nt, Human
ugaguggaacugagagug

SEQ ID NO: 1103020 - RNA, 22 nt, Human
ugaucaccucugcccucgcccc

SEQ ID NO: 1103021 - RNA, 22 nt, Human
ugccagcacugaucacccuaaa

SEQ ID NO: 1103022 - RNA, 19 nt, Human
ugcccugacacagggagcc

SEQ ID NO: 1103023 - RNA, 18 nt, Human
ugcuagaagcuggucucu

SEQ ID NO: 1103024 - RNA, 23 nt, Human
ugcuguggucgcagggcccuugg

SEQ ID NO: 1103025 - RNA, 21 nt, Human
uggacuuugccuucccuuaau

SEQ ID NO: 1103026 - RNA, 22 nt, Human
uggagaacaaagaugaggaggg

SEQ ID NO: 1103027 - RNA, 18 nt, Human
uggcaccacacaggccac

SEQ ID NO: 1103028 - RNA, 20 nt, Human
uggcagaauugggccugagg

SEQ ID NO: 1103029 - RNA, 18 nt, Human
uggcaguggcuuccuuuu

SEQ ID NO: 1103030 - RNA, 20 nt, Human
uggcaguggcuuccuuuuuc

SEQ ID NO: 1103031 - RNA, 21 nt, Human
ugggaacagugucuccugacu

SEQ ID NO: 1103032 - RNA, 24 nt, Human
ugggagaagugaggggaggggagg

SEQ ID NO: 1103033 - RNA, 23 nt, Human
ugggaggccccagcaggguggca

SEQ ID NO: 1103034 - RNA, 23 nt, Human
uggugaggcugggaauucgggac

SEQ ID NO: 1103035 - RNA, 18 nt, Human
ugucuggagccaguguga

SEQ ID NO: 1103036 - RNA, 20 nt, Human
ugucuggagccagugugaga

SEQ ID NO: 1103037 - RNA, 18 nt, Human
ugugcaaggucagcgggc

SEQ ID NO: 1103038 - RNA, 21 nt, Human
ugugugucuggagccagugug

SEQ ID NO: 1103039 - RNA, 24 nt, Human
uguuuugcaaaggcggcuucccuu

SEQ ID NO: 1103040 - RNA, 23 nt, Human
uucaauuuaucugccagcacuga

SEQ ID NO: 1103041 - RNA, 19 nt, Human
uuccucaggcaggcagcuu

SEQ ID NO: 1103042 - RNA, 23 nt, Human
uucugggcccagagacuuccuuu

SEQ ID NO: 1103043 - RNA, 20 nt, Human
uuggagaacaaagaugagga

SEQ ID NO: 1103044 - RNA, 23 nt, Human
uuuccuucuccuucucagauccc

SEQ ID NO: 1103045 - RNA, 21 nt, Human
aacaaguaucuccagugacag

SEQ ID NO: 1103046 - RNA, 19 nt, Human
aacauggugaaaccuuguc

SEQ ID NO: 1103047 - RNA, 20 nt, Human
aacauggugaaaccuugucu

SEQ ID NO: 1103048 - RNA, 21 nt, Human
aacauggugaaaccuugucuc

SEQ ID NO: 1103049 - RNA, 23 nt, Human
aagaauccccaacuucagccacc

SEQ ID NO: 1103050 - RNA, 19 nt, Human
aagugcugggauuacaggc

SEQ ID NO: 1103051 - RNA, 19 nt, Human
aagugcugggauuacaggc

SEQ ID NO: 1103052 - RNA, 23 nt, Human
aagugcugggauuacaggccuga

SEQ ID NO: 1103053 - RNA, 26 nt, Human
aagugcugggauuacaggccugagcc

SEQ ID NO: 1103054 - RNA, 24 nt, Human
aaugauucacagaauucagggaca

SEQ ID NO: 1103055 - RNA, 21 nt, Human
acacucugcuaggcugacuuc

SEQ ID NO: 1103056 - RNA, 20 nt, Human
acagagccagacuccgucuc

SEQ ID NO: 1103057 - RNA, 22 nt, Human
acauagaucugggaggacacca

SEQ ID NO: 1103058 - RNA, 22 nt, Human
accuuggcuuccugaagugcug

SEQ ID NO: 1103059 - RNA, 24 nt, Human
accuugucucuacugaaaauacaa

SEQ ID NO: 1103060 - RNA, 22 nt, Human
acucugcuaggcugacuucugu

SEQ ID NO: 1103061 - RNA, 25 nt, Human
acucugucaccuaagcuggagugca

SEQ ID NO: 1103062 - RNA, 20 nt, Human
acugcacuccagccuggcgg

SEQ ID NO: 1103063 - RNA, 24 nt, Human
acugcacuccagccuggcggacag

SEQ ID NO: 1103064 - RNA, 21 nt, Human
acuucuaggcuugguugaacc

SEQ ID NO: 1103065 - RNA, 24 nt, Human
agcacuuugggaggccgaggcggg

SEQ ID NO: 1103066 - RNA, 24 nt, Human
aggcaggagaauggugcaaacccg

SEQ ID NO: 1103067 - RNA, 21 nt, Human
aggccgaggcgggcggaucac

SEQ ID NO: 1103068 - RNA, 23 nt, Human
aggccgaggcgggcggaucacaa

SEQ ID NO: 1103069 - RNA, 24 nt, Human
aggcggagcuugcagugagccaag

SEQ ID NO: 1103070 - RNA, 24 nt, Human
aggcgggcggaucacaaggucagg

SEQ ID NO: 1103071 - RNA, 19 nt, Human
aggcugaggcaggagaaug

SEQ ID NO: 1103072 - RNA, 24 nt, Human
agugcugggauuacaggccugagc

SEQ ID NO: 1103073 - RNA, 24 nt, Human
auagcagcuguucuucauauggcc

SEQ ID NO: 1103074 - RNA, 25 nt, Human
aucauagacuuucagcuacuugaag

SEQ ID NO: 1103075 - RNA, 24 nt, Human
aucgcgccacugcacuccagccug

SEQ ID NO: 1103076 - RNA, 24 nt, Human
augauaacaaagauacugcugauc

SEQ ID NO: 1103077 - RNA, 24 nt, Human
auuuuuguauuuuuaguagagaug

SEQ ID NO: 1103078 - RNA, 24 nt, Human
caagaucgcgccacugcacuccag

SEQ ID NO: 1103079 - RNA, 21 nt, Human
cacaaacaaguaucuccagug

SEQ ID NO: 1103080 - RNA, 22 nt, Human
cacagguacgcgucaccacgcc

SEQ ID NO: 1103081 - RNA, 19 nt, Human
caccacgccuggcuaauuu

SEQ ID NO: 1103082 - RNA, 24 nt, Human
caccacgccuggcuaauuuuugua

SEQ ID NO: 1103083 - RNA, 24 nt, Human
cacccucauuuccccagaggugau

SEQ ID NO: 1103084 - RNA, 19 nt, Human
caccuuguuagcaucaacu

SEQ ID NO: 1103085 - RNA, 24 nt, Human
cacgccuguaaucccagcacuuug

SEQ ID NO: 1103086 - RNA, 23 nt, Human
cacuccagccuggcggacagagc

SEQ ID NO: 1103087 - RNA, 20 nt, Human
cacucugcuaggcugacuuc

SEQ ID NO: 1103088 - RNA, 23 nt, Human
cacucugucaccuaagcuggagu

SEQ ID NO: 1103089 - RNA, 24 nt, Human
cacucugucaccuaagcuggagug

SEQ ID NO: 1103090 - RNA, 21 nt, Human
cacugcaacugcugccucccg

SEQ ID NO: 1103091 - RNA, 23 nt, Human
cacugcaacugcugccucccggg

SEQ ID NO: 1103092 - RNA, 18 nt, Human
cacugcacuccagccugg

SEQ ID NO: 1103093 - RNA, 18 nt, Human
cacugcacuccagccugg

SEQ ID NO: 1103094 - RNA, 24 nt, Human
cacugcacuccagccuggcggaca

SEQ ID NO: 1103095 - RNA, 25 nt, Human
cacugcacuccagccuggcggacag

SEQ ID NO: 1103096 - RNA, 24 nt, Human
cagcacuuugggaggccgaggcgg

SEQ ID NO: 1103097 - RNA, 24 nt, Human
cagcugcucgggaggcugaggcag

SEQ ID NO: 1103098 - RNA, 24 nt, Human
caguagcugggaucacagguacgc

SEQ ID NO: 1103099 - RNA, 23 nt, Human
caugugacucaaacuuuagcacc

SEQ ID NO: 1103100 - RNA, 18 nt, Human
ccacugcacuccagccug

SEQ ID NO: 1103101 - RNA, 19 nt, Human
ccacugcacuccagccugg

SEQ ID NO: 1103102 - RNA, 19 nt, Human
ccacugcacuccagccugg

SEQ ID NO: 1103103 - RNA, 20 nt, Human
ccacugcacuccagccuggc

SEQ ID NO: 1103104 - RNA, 24 nt, Human
ccacugcacuccagccuggcggac

SEQ ID NO: 1103105 - RNA, 18 nt, Human
ccauauaacguucccagg

SEQ ID NO: 1103106 - RNA, 18 nt, Human
cccauauaacguucccag

SEQ ID NO: 1103107 - RNA, 21 nt, Human
cccauauaacguucccaggau

SEQ ID NO: 1103108 - RNA, 25 nt, Human
ccccccaguagcugggaucacaggu

SEQ ID NO: 1103109 - RNA, 21 nt, Human
cccguggagucaggggcuguu

SEQ ID NO: 1103110 - RNA, 23 nt, Human
ccuaagcuggagugcaguggcac

SEQ ID NO: 1103111 - RNA, 24 nt, Human
ccucccggguucaagcaauucuuu

SEQ ID NO: 1103112 - RNA, 23 nt, Human
ccugaagugcugggauuacaggc

SEQ ID NO: 1103113 - RNA, 21 nt, Human
ccuggcuaacauggugaaacc

SEQ ID NO: 1103114 - RNA, 21 nt, Human
ccuggcuaacauggugaaacc

SEQ ID NO: 1103115 - RNA, 24 nt, Human
ccuggcuaacauggugaaaccuug

SEQ ID NO: 1103116 - RNA, 22 nt, Human
ccuguaaucccagcacuuuggg

SEQ ID NO: 1103117 - RNA, 21 nt, Human
ccuguagucccagcugcucgg

SEQ ID NO: 1103118 - RNA, 22 nt, Human
ccuguagucccagcugcucggg

SEQ ID NO: 1103119 - RNA, 18 nt, Human
ccuuugcucuccugauca

SEQ ID NO: 1103120 - RNA, 24 nt, Human
cgaaaccauccuggcuaacauggu

SEQ ID NO: 1103121 - RNA, 26 nt, Human
cgaggcgggcggaucacaaggucagg

SEQ ID NO: 1103122 - RNA, 20 nt, Human
cgcaaagcuuucauuguucu

SEQ ID NO: 1103123 - RNA, 26 nt, Human
cgccacugcacuccagccuggcggac

SEQ ID NO: 1103124 - RNA, 23 nt, Human
cgccuguagucccagcugcucgg

SEQ ID NO: 1103125 - RNA, 24 nt, Human
cgccuguagucccagcugcucggg

SEQ ID NO: 1103126 - RNA, 24 nt, Human
cucaagucaucugcccaccuuggc

SEQ ID NO: 1103127 - RNA, 19 nt, Human
cucacagagcucuauaaaa

SEQ ID NO: 1103128 - RNA, 22 nt, Human
cucacgccuguaaucccagcac

SEQ ID NO: 1103129 - RNA, 24 nt, Human
cucacgccuguaaucccagcacuu

SEQ ID NO: 1103130 - RNA, 24 nt, Human
cucacucugucaccuaagcuggag

SEQ ID NO: 1103131 - RNA, 23 nt, Human
cucacugcaacugcugccucccg

SEQ ID NO: 1103132 - RNA, 24 nt, Human
cucacugcaacugcugccucccgg

SEQ ID NO: 1103133 - RNA, 24 nt, Human
cucagcccccccaguagcugggau

SEQ ID NO: 1103134 - RNA, 21 nt, Human
cuccccguggagucaggggcu

SEQ ID NO: 1103135 - RNA, 24 nt, Human
cugaagugcugggauuacaggccu

SEQ ID NO: 1103136 - RNA, 18 nt, Human
cugagcuucaguauuugu

SEQ ID NO: 1103137 - RNA, 22 nt, Human
cugaggcagccauugcaucuuc

SEQ ID NO: 1103138 - RNA, 23 nt, Human
cugcaacugcugccucccggguu

SEQ ID NO: 1103139 - RNA, 23 nt, Human
cugccucccggguucaagcaauu

SEQ ID NO: 1103140 - RNA, 20 nt, Human
cugcuaggcugacuucuguu

SEQ ID NO: 1103141 - RNA, 24 nt, Human
cuggcuaacauggugaaaccuugu

SEQ ID NO: 1103142 - RNA, 19 nt, Human
gaaaccuugucucuacuga

SEQ ID NO: 1103143 - RNA, 25 nt, Human
gacacauagaucugggaggacacca

SEQ ID NO: 1103144 - RNA, 21 nt, Human
gaccucaagucaucugcccac

SEQ ID NO: 1103145 - RNA, 24 nt, Human
gaccucaagucaucugcccaccuu

SEQ ID NO: 1103146 - RNA, 18 nt, Human
gagcuugcagugagccaa

SEQ ID NO: 1103147 - RNA, 23 nt, Human
gagcuugcagugagccaagaucg

SEQ ID NO: 1103148 - RNA, 18 nt, Human
gauuacaggccugagcca

SEQ ID NO: 1103149 - RNA, 21 nt, Human
gauuacaggccugagccacca

SEQ ID NO: 1103150 - RNA, 26 nt, Human
gcaauucuuuuaccucagccccccca

SEQ ID NO: 1103151 - RNA, 24 nt, Human
gcacuccagccuggcggacagagc

SEQ ID NO: 1103152 - RNA, 20 nt, Human
gccaagaucgcgccacugca

SEQ ID NO: 1103153 - RNA, 19 nt, Human
gccuaggaucaaacuguuc

SEQ ID NO: 1103154 - RNA, 24 nt, Human
gcuaacauggugaaaccuugucuc

SEQ ID NO: 1103155 - RNA, 24 nt, Human
gcugaucgggcgcgguggcucacg

SEQ ID NO: 1103156 - RNA, 20 nt, Human
gcuggagugcaguggcacca

SEQ ID NO: 1103157 - RNA, 23 nt, Human
gcugguuucgaaccccugaccuc

SEQ ID NO: 1103158 - RNA, 23 nt, Human
gcuuaaauccucuuuacaucaua

SEQ ID NO: 1103159 - RNA, 24 nt, Human
ggagcuugcagugagccaagaucg

SEQ ID NO: 1103160 - RNA, 19 nt, Human
ggauuacaggccugagcca

SEQ ID NO: 1103161 - RNA, 21 nt, Human
ggcggaucacaaggucaggag

SEQ ID NO: 1103162 - RNA, 24 nt, Human
gggcgcgguggcucacgccuguaa

SEQ ID NO: 1103163 - RNA, 22 nt, Human
gguacgguagcgggcgccugua

SEQ ID NO: 1103164 - RNA, 24 nt, Human
gguagcgggcgccuguagucccag

SEQ ID NO: 1103165 - RNA, 23 nt, Human
gguggcucacgccuguaauccca

SEQ ID NO: 1103166 - RNA, 24 nt, Human
gguggcucacgccuguaaucccag

SEQ ID NO: 1103167 - RNA, 19 nt, Human
gguuucgaaccccugaccu

SEQ ID NO: 1103168 - RNA, 24 nt, Human
uaaaacgcuuaaauccucuuuaca

SEQ ID NO: 1103169 - RNA, 24 nt, Human
uaaagcaaaaggauauaaaugaac

SEQ ID NO: 1103170 - RNA, 25 nt, Human
uaaagcaaaaggauauaaaugaacc

SEQ ID NO: 1103171 - RNA, 22 nt, Human
uaacauggugaaaccuugucuc

SEQ ID NO: 1103172 - RNA, 24 nt, Human
uaacauggugaaaccuugucucua

SEQ ID NO: 1103173 - RNA, 22 nt, Human
uaagggucucuucugcaggguc

SEQ ID NO: 1103174 - RNA, 24 nt, Human
uaauuuuuguauuuuuaguagaga

SEQ ID NO: 1103175 - RNA, 22 nt, Human
uacaggccugagccaccacacc

SEQ ID NO: 1103176 - RNA, 21 nt, Human
uaccucagcccccccaguagc

SEQ ID NO: 1103177 - RNA, 24 nt, Human
uaccucagcccccccaguagcugg

SEQ ID NO: 1103178 - RNA, 26 nt, Human
uaccucagcccccccaguagcuggga

SEQ ID NO: 1103179 - RNA, 22 nt, Human
uagccaucagccgcuacgugac

SEQ ID NO: 1103180 - RNA, 19 nt, Human
uaguagagaugggguuuug

SEQ ID NO: 1103181 - RNA, 24 nt, Human
uaguagagaugggguuuugccaag

SEQ ID NO: 1103182 - RNA, 21 nt, Human
uauggccuagugucuaaugcc

SEQ ID NO: 1103183 - RNA, 18 nt, Human
ucacaaggucaggagauc

SEQ ID NO: 1103184 - RNA, 24 nt, Human
ucacaaggucaggagaucgaaacc

SEQ ID NO: 1103185 - RNA, 24 nt, Human
ucacugcaacugcugccucccggg

SEQ ID NO: 1103186 - RNA, 22 nt, Human
uccacaagaauccccaacuuca

SEQ ID NO: 1103187 - RNA, 18 nt, Human
uccacuaucuaggggccc

SEQ ID NO: 1103188 - RNA, 24 nt, Human
uccccaacuucagccaccagcugg

SEQ ID NO: 1103189 - RNA, 27 nt, Human
uccccguggagucaggggcuguuaccu

SEQ ID NO: 1103190 - RNA, 20 nt, Human
ucccggguucaagcaauucu

SEQ ID NO: 1103191 - RNA, 23 nt, Human
ucccggguucaagcaauucuuuu

SEQ ID NO: 1103192 - RNA, 21 nt, Human
uccucagcccacccucacuuc

SEQ ID NO: 1103193 - RNA, 24 nt, Human
uccugaagugcugggauuacaggc

SEQ ID NO: 1103194 - RNA, 22 nt, Human
ucucacucugucaccuaagcug

SEQ ID NO: 1103195 - RNA, 24 nt, Human
ucucacucugucaccuaagcugga

SEQ ID NO: 1103196 - RNA, 21 nt, Human
ucuccaauuauagcagcuguu

SEQ ID NO: 1103197 - RNA, 24 nt, Human
ucuccagguaaaaucuccaauuau

SEQ ID NO: 1103198 - RNA, 25 nt, Human
ucuccagguaaaaucuccaauuaua

SEQ ID NO: 1103199 - RNA, 22 nt, Human
ucucuacugaaaauacaaaaaa

SEQ ID NO: 1103200 - RNA, 24 nt, Human
ucugucaccuaagcuggagugcag

SEQ ID NO: 1103201 - RNA, 19 nt, Human
ugaaguugugcacaaacaa

SEQ ID NO: 1103202 - RNA, 18 nt, Human
ugaccucaagucaucugc

SEQ ID NO: 1103203 - RNA, 20 nt, Human
ugaccucaagucaucugccc

SEQ ID NO: 1103204 - RNA, 20 nt, Human
ugacuucuguaguuuucacc

SEQ ID NO: 1103205 - RNA, 22 nt, Human
ugagccaagaucgcgccacugc

SEQ ID NO: 1103206 - RNA, 24 nt, Human
ugaggcaggagaauggugcaaacc

SEQ ID NO: 1103207 - RNA, 22 nt, Human
ugcaacugcugccucccggguu

SEQ ID NO: 1103208 - RNA, 22 nt, Human
ugcaguggcaccaucucagcuc

SEQ ID NO: 1103209 - RNA, 23 nt, Human
ugccccggucucagaguguggga

SEQ ID NO: 1103210 - RNA, 19 nt, Human
ugcgugacaauguauagag

SEQ ID NO: 1103211 - RNA, 21 nt, Human
ugcgugacaauguauagagua

SEQ ID NO: 1103212 - RNA, 22 nt, Human
ugcgugacaauguauagaguau

SEQ ID NO: 1103213 - RNA, 19 nt, Human
uggagugcaguggcaccau

SEQ ID NO: 1103214 - RNA, 23 nt, Human
uggagugcaguggcaccaucuca

SEQ ID NO: 1103215 - RNA, 21 nt, Human
uggaugccucuuaagggucuc

SEQ ID NO: 1103216 - RNA, 19 nt, Human
uggcaccaucucagcucac

SEQ ID NO: 1103217 - RNA, 24 nt, Human
uggcaccaucucagcucacugcaa

SEQ ID NO: 1103218 - RNA, 21 nt, Human
uggccuggcugguuucgaacc

SEQ ID NO: 1103219 - RNA, 24 nt, Human
uggccuggcugguuucgaaccccu

SEQ ID NO: 1103220 - RNA, 24 nt, Human
uggcucacgccuguaaucccagca

SEQ ID NO: 1103221 - RNA, 22 nt, Human
uggcugaaguugugcacaaaca

SEQ ID NO: 1103222 - RNA, 26 nt, Human
ugggaggacaccaaacgcaaagcuuu

SEQ ID NO: 1103223 - RNA, 19 nt, Human
ugggaggccgaggcgggcg

SEQ ID NO: 1103224 - RNA, 24 nt, Human
ugggaggccgaggcgggcggauca

SEQ ID NO: 1103225 - RNA, 22 nt, Human
ugggaucacagguacgcgucac

SEQ ID NO: 1103226 - RNA, 24 nt, Human
ugggaucacagguacgcgucacca

SEQ ID NO: 1103227 - RNA, 18 nt, Human
ugggauuacaggccugag

SEQ ID NO: 1103228 - RNA, 19 nt, Human
ugggauuacaggccugagc

SEQ ID NO: 1103229 - RNA, 21 nt, Human
ugggauuacaggccugagcca

SEQ ID NO: 1103230 - RNA, 22 nt, Human
ugggauuacaggccugagccac

SEQ ID NO: 1103231 - RNA, 24 nt, Human
ugggauuacaggccugagccacca

SEQ ID NO: 1103232 - RNA, 23 nt, Human
ugggguuuugccaaguuggccug

SEQ ID NO: 1103233 - RNA, 21 nt, Human
ugucagaaugauucacagaau

SEQ ID NO: 1103234 - RNA, 19 nt, Human
uguuuuguuuuguuuuuug

SEQ ID NO: 1103235 - RNA, 22 nt, Human
uguuuuguuuuuuguuuuuucc

SEQ ID NO: 1103236 - RNA, 23 nt, Human
uuacucuuagccaaacacaaauu

SEQ ID NO: 1103237 - RNA, 18 nt, Human
uuaguagagaugggguuu

SEQ ID NO: 1103238 - RNA, 22 nt, Human
uuaguagagaugggguuuugcc

SEQ ID NO: 1103239 - RNA, 23 nt, Human
uuaguagagaugggguuuugcca

SEQ ID NO: 1103240 - RNA, 24 nt, Human
uucaagcaauucuuuuaccucagc

SEQ ID NO: 1103241 - RNA, 20 nt, Human
uucaguuugccccggucuca

SEQ ID NO: 1103242 - RNA, 24 nt, Human
uuccugaagugcugggauuacagg

SEQ ID NO: 1103243 - RNA, 18 nt, Human
uucuaagacuucuugcuc

SEQ ID NO: 1103244 - RNA, 22 nt, Human
uugcagugagccaagaucgcgc

SEQ ID NO: 1103245 - RNA, 25 nt, Human
uugggaggccgaggcgggcggauca

SEQ ID NO: 1103246 - RNA, 23 nt, Human
uuguauuuuuaguagagaugggg

SEQ ID NO: 1103247 - RNA, 19 nt, Human
uuguggcugaaguugugca

SEQ ID NO: 1103248 - RNA, 20 nt, Human
uuugccaaguuggccuggcu

SEQ ID NO: 1103249 - RNA, 26 nt, Human
uuuggcagccacuucacauuuuugug

SEQ ID NO: 1103250 - RNA, 21 nt, Human
uuuguuuuguuuuguuuuuug

SEQ ID NO: 1103251 - RNA, 24 nt, Human
uuuguuuuguuuuguuuuuuguuu

SEQ ID NO: 1103252 - RNA, 25 nt, Human
uuuguuuuguuuuuuguuuuuuccg

SEQ ID NO: 1103253 - RNA, 20 nt, Human
uuuuccuaccugcuuauacu

SEQ ID NO: 1103254 - RNA, 21 nt, Human
uuuuuaguagagaugggguuu

SEQ ID NO: 1103255 - RNA, 21 nt, Human
uuuuuaguagagaugggguuu

SEQ ID NO: 1103256 - RNA, 20 nt, Human
uuuuuguauuuuuaguagag

SEQ ID NO: 1103257 - RNA, 20 nt, Human
aaacaggagugggcugcuuu

SEQ ID NO: 1103258 - RNA, 23 nt, Human
aaccaugacuacaguccaguugc

SEQ ID NO: 1103259 - RNA, 22 nt, Human
acuccagcgguucguccagcac

SEQ ID NO: 1103260 - RNA, 23 nt, Human
auagauuuuuuccccaaagaaca

SEQ ID NO: 1103261 - RNA, 20 nt, Human
augcacuagaacaaaagagg

SEQ ID NO: 1103262 - RNA, 22 nt, Human
cagcagcaugcuaauuacuggc

SEQ ID NO: 1103263 - RNA, 19 nt, Human
caggguaguaaaaaaaagu

SEQ ID NO: 1103264 - RNA, 18 nt, Human
caguccaguugcagaaac

SEQ ID NO: 1103265 - RNA, 21 nt, Human
ccuacagaacagcugagaccu

SEQ ID NO: 1103266 - RNA, 22 nt, Human
cuacuacaucaggacaccuugg

SEQ ID NO: 1103267 - RNA, 20 nt, Human
cuacucuuccucuucucaaa

SEQ ID NO: 1103268 - RNA, 20 nt, Human
cucaaagugccuacagaaca

SEQ ID NO: 1103269 - RNA, 23 nt, Human
cucaaagugccuacagaacagcu

SEQ ID NO: 1103270 - RNA, 20 nt, Human
cucuacacuugggaaacccc

SEQ ID NO: 1103271 - RNA, 22 nt, Human
cucuacacuugggaaaccccaa

SEQ ID NO: 1103272 - RNA, 22 nt, Human
cugcaaccaugacuacagucca

SEQ ID NO: 1103273 - RNA, 18 nt, Human
gaaaguauucaagcagaa

SEQ ID NO: 1103274 - RNA, 23 nt, Human
gaugcauguggguuacuugggaa

SEQ ID NO: 1103275 - RNA, 22 nt, Human
gccaaaugcaggagcuugucua

SEQ ID NO: 1103276 - RNA, 22 nt, Human
uaaaaaaaaguuuaaaaagcau

SEQ ID NO: 1103277 - RNA, 24 nt, Human
uagaacaaaagaggauguggagaa

SEQ ID NO: 1103278 - RNA, 25 nt, Human
uaggagaaaacuucucaguguaaug

SEQ ID NO: 1103279 - RNA, 22 nt, Human
uauacaguucugcaaccaugac

SEQ ID NO: 1103280 - RNA, 18 nt, Human
ucaguguaaugcuccuca

SEQ ID NO: 1103281 - RNA, 24 nt, Human
ucuacacuugggaaaccccaaggc

SEQ ID NO: 1103282 - RNA, 21 nt, Human
ucucaaagugccuacagaaca

SEQ ID NO: 1103283 - RNA, 20 nt, Human
ugauuauagauuuuuucccc

SEQ ID NO: 1103284 - RNA, 24 nt, Human
ugcagcagcaugcuaauuacuggc

SEQ ID NO: 1103285 - RNA, 18 nt, Human
uggccacagcauccuccu

SEQ ID NO: 1103286 - RNA, 18 nt, Human
ugggaaaccccaaggcug

SEQ ID NO: 1103287 - RNA, 18 nt, Human
uguggagaaugaaagaca

SEQ ID NO: 1103288 - RNA, 20 nt, Human
uguguggccacagcauccuc

SEQ ID NO: 1103289 - RNA, 23 nt, Human
uucaagcagaagcuggacgccau

SEQ ID NO: 1103290 - RNA, 24 nt, Human
uucacagcaguacuagaauaauaa

SEQ ID NO: 1103291 - RNA, 24 nt, Human
uuccucuacacuugggaaaccccc

SEQ ID NO: 1103292 - RNA, 22 nt, Human
acccugggacagcggagagagg

SEQ ID NO: 1103293 - RNA, 22 nt, Human
ccccuuuagccagcugucgcuc

SEQ ID NO: 1103294 - RNA, 18 nt, Human
ccuuuagccagcugucgc

SEQ ID NO: 1103295 - RNA, 25 nt, Human
gggacagcggagagaggccgguacc

SEQ ID NO: 1103296 - RNA, 20 nt, Human
ugggacagcggagagaggcc

SEQ ID NO: 1103297 - RNA, 24 nt, Human
uguggggggccccuuuagccagcu

SEQ ID NO: 1103298 - RNA, 18 nt, Human
uuuucccuacuacaucuu

SEQ ID NO: 1103299 - RNA, 19 nt, Human
aagaagacauuuccagagc

SEQ ID NO: 1103300 - RNA, 23 nt, Human
aagcacuuuaagcaaacaaaagc

SEQ ID NO: 1103301 - RNA, 21 nt, Human
aagcuuggggaaugcagaucu

SEQ ID NO: 1103302 - RNA, 18 nt, Human
acaagaauucccucagac

SEQ ID NO: 1103303 - RNA, 24 nt, Human
acccaucuucuugccuuguccucc

SEQ ID NO: 1103304 - RNA, 19 nt, Human
acucacuucagagccaagg

SEQ ID NO: 1103305 - RNA, 25 nt, Human
agaaauaaggaagaugaccgguacc

SEQ ID NO: 1103306 - RNA, 21 nt, Human
agaauucccucagacaauccc

SEQ ID NO: 1103307 - RNA, 23 nt, Human
agagggugggcuugcgggucaga

SEQ ID NO: 1103308 - RNA, 19 nt, Human
agauggggagugcuucaga

SEQ ID NO: 1103309 - RNA, 20 nt, Human
agcugcuugcuuuccaagaa

SEQ ID NO: 1103310 - RNA, 21 nt, Human
agcugcuugcuuuccaagaag

SEQ ID NO: 1103311 - RNA, 25 nt, Human
aggaacagagaaaggaaccgguacc

SEQ ID NO: 1103312 - RNA, 24 nt, Human
aggccaaggccaaaagcuuugaga

SEQ ID NO: 1103313 - RNA, 19 nt, Human
aggggcucagcuggguagg

SEQ ID NO: 1103314 - RNA, 24 nt, Human
aggugcagugacccacgccuguag

SEQ ID NO: 1103315 - RNA, 26 nt, Human
aggugggugggggggugugacgggcu

SEQ ID NO: 1103316 - RNA, 22 nt, Human
aguaagaggaacagagaaagga

SEQ ID NO: 1103317 - RNA, 24 nt, Human
agugacccacgccuguagucccag

SEQ ID NO: 1103318 - RNA, 20 nt, Human
auagaggcuguuguccauag

SEQ ID NO: 1103319 - RNA, 20 nt, Human
aucucagucuaguaagagga

SEQ ID NO: 1103320 - RNA, 22 nt, Human
augaggugaagagggugggcuu

SEQ ID NO: 1103321 - RNA, 18 nt, Human
cacaagaauucccucaga

SEQ ID NO: 1103322 - RNA, 23 nt, Human
caccuugggaggccaaggccaaa

SEQ ID NO: 1103323 - RNA, 24 nt, Human
cacgccuguagucccagcaccuug

SEQ ID NO: 1103324 - RNA, 23 nt, Human
cacugucaucugagaauugaggg

SEQ ID NO: 1103325 - RNA, 21 nt, Human
cacuucagagccaaggcagcc

SEQ ID NO: 1103326 - RNA, 21 nt, Human
cagaacaaaagcuguuggcag

SEQ ID NO: 1103327 - RNA, 20 nt, Human
cagcaccuugggaggccaag

SEQ ID NO: 1103328 - RNA, 22 nt, Human
cagcaccuugggaggccaaggc

SEQ ID NO: 1103329 - RNA, 21 nt, Human
cagcauggagcggggucaggg

SEQ ID NO: 1103330 - RNA, 25 nt, Human
cagccaggcccugucacuuaaaagc

SEQ ID NO: 1103331 - RNA, 26 nt, Human
cagccaggcccugucacuuaaaagcu

SEQ ID NO: 1103332 - RNA, 24 nt, Human
cagcugccauacagaggaggugac

SEQ ID NO: 1103333 - RNA, 20 nt, Human
caggggcaggagccucugag

SEQ ID NO: 1103334 - RNA, 20 nt, Human
cauagagcacacuccuugga

SEQ ID NO: 1103335 - RNA, 21 nt, Human
caucuucuugccuuguccucc

SEQ ID NO: 1103336 - RNA, 19 nt, Human
caugccccugcccuggagg

SEQ ID NO: 1103337 - RNA, 18 nt, Human
cauggagcggggucaggg

SEQ ID NO: 1103338 - RNA, 22 nt, Human
ccacgccuguagucccagcacc

SEQ ID NO: 1103339 - RNA, 21 nt, Human
ccagagcuuuccugcucgugg

SEQ ID NO: 1103340 - RNA, 19 nt, Human
ccagcaccuugggaggcca

SEQ ID NO: 1103341 - RNA, 21 nt, Human
ccaggugcagugacccacgcc

SEQ ID NO: 1103342 - RNA, 24 nt, Human
cccacgccuguagucccagcaccu

SEQ ID NO: 1103343 - RNA, 20 nt, Human
cccaucuucuugccuugucc

SEQ ID NO: 1103344 - RNA, 23 nt, Human
ccucagggagaagaaagcuuggg

SEQ ID NO: 1103345 - RNA, 23 nt, Human
ccuccacugcagggcucuccuca

SEQ ID NO: 1103346 - RNA, 23 nt, Human
ccuggagguuacucaguggggcu

SEQ ID NO: 1103347 - RNA, 21 nt, Human
ccuguuugggccugagauggg

SEQ ID NO: 1103348 - RNA, 22 nt, Human
cgccccauuccuuuaucaguca

SEQ ID NO: 1103349 - RNA, 23 nt, Human
cgccuguagucccagcaccuugg

SEQ ID NO: 1103350 - RNA, 22 nt, Human
cggggucaggggugcagaagga

SEQ ID NO: 1103351 - RNA, 21 nt, Human
cucagggagaagaaagcuugg

SEQ ID NO: 1103352 - RNA, 22 nt, Human
cugagccucaguuucccaucug

SEQ ID NO: 1103353 - RNA, 21 nt, Human
gagccucaguuucccaucugg

SEQ ID NO: 1103354 - RNA, 25 nt, Human
gagccucugaggugggucggguguc

SEQ ID NO: 1103355 - RNA, 20 nt, Human
gaggagggacccaacucaga

SEQ ID NO: 1103356 - RNA, 18 nt, Human
gaggugggugggggggug

SEQ ID NO: 1103357 - RNA, 20 nt, Human
gcaagaccuuccucaaauug

SEQ ID NO: 1103358 - RNA, 19 nt, Human
gcacuuuaagcaaacaaaa

SEQ ID NO: 1103359 - RNA, 19 nt, Human
gcagaagugacuuguuuac

SEQ ID NO: 1103360 - RNA, 18 nt, Human
gcaugaggugaagagggu

SEQ ID NO: 1103361 - RNA, 19 nt, Human
gccaacagguucuccuccu

SEQ ID NO: 1103362 - RNA, 18 nt, Human
gccucaguuucccaucug

SEQ ID NO: 1103363 - RNA, 18 nt, Human
ggccugagauggggagug

SEQ ID NO: 1103364 - RNA, 20 nt, Human
gggcaggagccucugaggug

SEQ ID NO: 1103365 - RNA, 20 nt, Human
gggcuggugggagcucguaa

SEQ ID NO: 1103366 - RNA, 25 nt, Human
ggggguagugagaaauaaggaagau

SEQ ID NO: 1103367 - RNA, 25 nt, Human
ggggugcagaaggaggcgcuaggag

SEQ ID NO: 1103368 - RNA, 20 nt, Human
gggugggggggugugacggg

SEQ ID NO: 1103369 - RNA, 22 nt, Human
ggucaaaguuggaucuucccag

SEQ ID NO: 1103370 - RNA, 22 nt, Human
guuguugcaucauuucuugaac

SEQ ID NO: 1103371 - RNA, 19 nt, Human
uaagaggaacagagaaagg

SEQ ID NO: 1103372 - RNA, 25 nt, Human
uaagaggaacagagaaaggaacuga

SEQ ID NO: 1103373 - RNA, 25 nt, Human
uaagcaaacaaaagcuuuggccagg

SEQ ID NO: 1103374 - RNA, 23 nt, Human
uaccagaagcucagccaguggag

SEQ ID NO: 1103375 - RNA, 19 nt, Human
ucacgcucgcgcaagcacu

SEQ ID NO: 1103376 - RNA, 23 nt, Human
ucacucaggucaggggcaggagc

SEQ ID NO: 1103377 - RNA, 26 nt, Human
ucagggagaagaaagcuuggggaaug

SEQ ID NO: 1103378 - RNA, 22 nt, Human
ucccaggacagacgaggcccag

SEQ ID NO: 1103379 - RNA, 24 nt, Human
ucgcgcaagcacuggccucugccu

SEQ ID NO: 1103380 - RNA, 19 nt, Human
ucucucuuuaagauugaug

SEQ ID NO: 1103381 - RNA, 19 nt, Human
ucuugccuuguccuccucc

SEQ ID NO: 1103382 - RNA, 20 nt, Human
ugaaccacugucaucugaga

SEQ ID NO: 1103383 - RNA, 21 nt, Human
ugaaccugucuaagacucagg

SEQ ID NO: 1103384 - RNA, 24 nt, Human
ugacccacgccuguagucccagca

SEQ ID NO: 1103385 - RNA, 20 nt, Human
ugacugaaccacugucaucu

SEQ ID NO: 1103386 - RNA, 21 nt, Human
ugagaauugagggucaaaguu

SEQ ID NO: 1103387 - RNA, 19 nt, Human
ugagauggggagugcuuca

SEQ ID NO: 1103388 - RNA, 27 nt, Human
ugaggugaagagggugggccggaaccc

SEQ ID NO: 1103389 - RNA, 25 nt, Human
ugauuucuggguucuguagccuccu

SEQ ID NO: 1103390 - RNA, 23 nt, Human
ugccccugcccuggagguuacuc

SEQ ID NO: 1103391 - RNA, 19 nt, Human
ugcccuggagguuacucag

SEQ ID NO: 1103392 - RNA, 26 nt, Human
ugcccuggagguuacucaguggggcu

SEQ ID NO: 1103393 - RNA, 21 nt, Human
ugccugggaccuaccagaagc

SEQ ID NO: 1103394 - RNA, 23 nt, Human
uggccaggugcagugacccacgg

SEQ ID NO: 1103395 - RNA, 18 nt, Human
ugggaagcuggggguagu

SEQ ID NO: 1103396 - RNA, 19 nt, Human
ugggaagcuggggguagug

SEQ ID NO: 1103397 - RNA, 19 nt, Human
ugggaggccaaggccaaaa

SEQ ID NO: 1103398 - RNA, 21 nt, Human
ugggaggccaaggccaaaagc

SEQ ID NO: 1103399 - RNA, 18 nt, Human
ugggccugagauggggag

SEQ ID NO: 1103400 - RNA, 20 nt, Human
uggguagguuguugcaaaga

SEQ ID NO: 1103401 - RNA, 22 nt, Human
ugggugggggggugugacgggc

SEQ ID NO: 1103402 - RNA, 23 nt, Human
ugggugggggggugugacgggcu

SEQ ID NO: 1103403 - RNA, 21 nt, Human
uguccauagagcacacuccuu

SEQ ID NO: 1103404 - RNA, 24 nt, Human
ugucuaacgugccugggaccuacc

SEQ ID NO: 1103405 - RNA, 20 nt, Human
ugugacgggcuggugggagc

SEQ ID NO: 1103406 - RNA, 24 nt, Human
uuacucaguggggcugggaguuuc

SEQ ID NO: 1103407 - RNA, 22 nt, Human
uucaguaucauaaaucgguaga

SEQ ID NO: 1103408 - RNA, 23 nt, Human
uucucaguccagcgcugcuuccg

SEQ ID NO: 1103409 - RNA, 19 nt, Human
uugccuuguccuccuccac

SEQ ID NO: 1103410 - RNA, 24 nt, Human
uugggaggccaaggccaaaagcuu

SEQ ID NO: 1103411 - RNA, 20 nt, Human
uuuaagauugaugacuuuca

SEQ ID NO: 1103412 - RNA, 20 nt, Human
uuuccagagcuuuccugcuc

SEQ ID NO: 1103413 - RNA, 24 nt, Human
uuuggccaggugcagugacccacg

SEQ ID NO: 1103414 - RNA, 22 nt, Human
aagcaguaccagacggcuucca

SEQ ID NO: 1103415 - RNA, 20 nt, Human
aaggacccccaggccacaga

SEQ ID NO: 1103416 - RNA, 22 nt, Human
aaggacccccaggccacagaug

SEQ ID NO: 1103417 - RNA, 23 nt, Human
acggcuuccaggaagaggagcca

SEQ ID NO: 1103418 - RNA, 21 nt, Human
acuggugcagcgggugucugg

SEQ ID NO: 1103419 - RNA, 23 nt, Human
aggaaggacccccaggccacaga

SEQ ID NO: 1103420 - RNA, 23 nt, Human
agggaaagccggggcaggagggc

SEQ ID NO: 1103421 - RNA, 18 nt, Human
ccccuggacuccuucagg

SEQ ID NO: 1103422 - RNA, 24 nt, Human
ccccuggacuccuucagguaguag

SEQ ID NO: 1103423 - RNA, 22 nt, Human
cgcgguugaagcaguaccagac

SEQ ID NO: 1103424 - RNA, 18 nt, Human
cgggagggccugcuggug

SEQ ID NO: 1103425 - RNA, 18 nt, Human
cugggccccucagugccg

SEQ ID NO: 1103426 - RNA, 22 nt, Human
gccaccgccggcugccccugga

SEQ ID NO: 1103427 - RNA, 21 nt, Human
gccggggcaggagggcaguga

SEQ ID NO: 1103428 - RNA, 24 nt, Human
gggcugccgucguugcaggucacc

SEQ ID NO: 1103429 - RNA, 19 nt, Human
uaaaauaauauaaaagggc

SEQ ID NO: 1103430 - RNA, 23 nt, Human
uaguagcugcggggcugccgucg

SEQ ID NO: 1103431 - RNA, 18 nt, Human
uaucuggagucgcaguuc

SEQ ID NO: 1103432 - RNA, 20 nt, Human
ucacuuuauaaaauaauaua

SEQ ID NO: 1103433 - RNA, 25 nt, Human
ucauucaucauauauucuuauuuuc

SEQ ID NO: 1103434 - RNA, 24 nt, Human
ucauuuuuaaaaaguuacaaaaca

SEQ ID NO: 1103435 - RNA, 21 nt, Human
uccaggaagaggagccaccgc

SEQ ID NO: 1103436 - RNA, 21 nt, Human
ucccgaagagacgggagggcc

SEQ ID NO: 1103437 - RNA, 26 nt, Human
ucuggcuacccccucguugucaggaa

SEQ ID NO: 1103438 - RNA, 22 nt, Human
ucuucuggcuacccccucguug

SEQ ID NO: 1103439 - RNA, 23 nt, Human
ugagguggcacuggugcagcggg

SEQ ID NO: 1103440 - RNA, 23 nt, Human
ugauggguggggccggugggugc

SEQ ID NO: 1103441 - RNA, 19 nt, Human
ugggcugugggagaggggc

SEQ ID NO: 1103442 - RNA, 21 nt, Human
uggggaugacagcaggucccu

SEQ ID NO: 1103443 - RNA, 22 nt, Human
uggggccggugggugcugucug

SEQ ID NO: 1103444 - RNA, 19 nt, Human
uggguggggccggugggug

SEQ ID NO: 1103445 - RNA, 21 nt, Human
uguggggugagguggcacugg

SEQ ID NO: 1103446 - RNA, 24 nt, Human
uuauuuuccuuuuuuuaaccuucg

SEQ ID NO: 1103447 - RNA, 24 nt, Human
accguccuggcaggccugaggcug

SEQ ID NO: 1103448 - RNA, 18 nt, Human
aggccugaggcugggaug

SEQ ID NO: 1103449 - RNA, 19 nt, Human
auccacccacaaaugaggu

SEQ ID NO: 1103450 - RNA, 23 nt, Human
caacccagcagaaacagguuugg

SEQ ID NO: 1103451 - RNA, 22 nt, Human
caccagaccuaaccaacccagc

SEQ ID NO: 1103452 - RNA, 20 nt, Human
ccguggggcauuuguccugg

SEQ ID NO: 1103453 - RNA, 18 nt, Human
cggccccuugcgacuccu

SEQ ID NO: 1103454 - RNA, 18 nt, Human
cguggagaggucaggccg

SEQ ID NO: 1103455 - RNA, 18 nt, Human
cucauccugcucggcccc

SEQ ID NO: 1103456 - RNA, 21 nt, Human
cucuugaucccgaacaccguc

SEQ ID NO: 1103457 - RNA, 23 nt, Human
gccugaggcugggaugccacgcu

SEQ ID NO: 1103458 - RNA, 19 nt, Human
guccugggcuggagugugg

SEQ ID NO: 1103459 - RNA, 27 nt, Human
guggaccccguggagaggucgguaccc

SEQ ID NO: 1103460 - RNA, 21 nt, Human
gugggucugcuccucuccugc

SEQ ID NO: 1103461 - RNA, 19 nt, Human
uauggaagacaagagcucc

SEQ ID NO: 1103462 - RNA, 20 nt, Human
uccacccacaaaugagguga

SEQ ID NO: 1103463 - RNA, 19 nt, Human
uccugggcuggaguguggu

SEQ ID NO: 1103464 - RNA, 19 nt, Human
ugaucccgaacaccguccu

SEQ ID NO: 1103465 - RNA, 24 nt, Human
ugccacgcugcuuccccuggacuc

SEQ ID NO: 1103466 - RNA, 21 nt, Human
uggcaggccugaggcugggau

SEQ ID NO: 1103467 - RNA, 22 nt, Human
ugggaugccacgcugcuucccc

SEQ ID NO: 1103468 - RNA, 21 nt, Human
ugugcuaccguggggcauuug

SEQ ID NO: 1103469 - RNA, 18 nt, Human
aagcuggcaaccaggccu

SEQ ID NO: 1103470 - RNA, 22 nt, Human
acagagcugcucacagauacca

SEQ ID NO: 1103471 - RNA, 24 nt, Human
agcacugugugccaccugcccucu

SEQ ID NO: 1103472 - RNA, 18 nt, Human
auuuccauccacuugcuc

SEQ ID NO: 1103473 - RNA, 23 nt, Human
caagguugaagggcccaugaugg

SEQ ID NO: 1103474 - RNA, 24 nt, Human
cacagagcugcucacagauaccac

SEQ ID NO: 1103475 - RNA, 18 nt, Human
cacagauaccacugucug

SEQ ID NO: 1103476 - RNA, 21 nt, Human
cacugugugccaccugcccuc

SEQ ID NO: 1103477 - RNA, 22 nt, Human
cagccaugggugccuguccccu

SEQ ID NO: 1103478 - RNA, 21 nt, Human
ccacagccaugggugccuguc

SEQ ID NO: 1103479 - RNA, 22 nt, Human
ccacagccaugggugccugucc

SEQ ID NO: 1103480 - RNA, 19 nt, Human
ccucucagggagaaaaccu

SEQ ID NO: 1103481 - RNA, 21 nt, Human
cuaccauguccauccugcccc

SEQ ID NO: 1103482 - RNA, 22 nt, Human
gaaaaccuuugaguccacagag

SEQ ID NO: 1103483 - RNA, 26 nt, Human
gacuggggucagggaccagaggucuc

SEQ ID NO: 1103484 - RNA, 23 nt, Human
gcaaccaggccugcgguccucug

SEQ ID NO: 1103485 - RNA, 22 nt, Human
gccacagccaugggugccuguc

SEQ ID NO: 1103486 - RNA, 20 nt, Human
ggagaaaaccuuugagucca

SEQ ID NO: 1103487 - RNA, 24 nt, Human
ggagaaaaccuuugaguccacaga

SEQ ID NO: 1103488 - RNA, 20 nt, Human
gggcaguaaagcuggcaacc

SEQ ID NO: 1103489 - RNA, 22 nt, Human
uaccauguccauccugccccag

SEQ ID NO: 1103490 - RNA, 19 nt, Human
uccauccugccccagcaug

SEQ ID NO: 1103491 - RNA, 24 nt, Human
ucucccauucucccagcauuucca

SEQ ID NO: 1103492 - RNA, 26 nt, Human
ugaaucagcuggccugggucggaucc

SEQ ID NO: 1103493 - RNA, 20 nt, Human
ugcaugaacgggcaguaaag

SEQ ID NO: 1103494 - RNA, 19 nt, Human
ugccaagguugaagggccc

SEQ ID NO: 1103495 - RNA, 23 nt, Human
ugccccagcauguugaauggugu

SEQ ID NO: 1103496 - RNA, 18 nt, Human
uguccaccugccaagguu

SEQ ID NO: 1103497 - RNA, 19 nt, Human
aaggacacugggaaaggag

SEQ ID NO: 1103498 - RNA, 20 nt, Human
acaaucccagucagcugccu

SEQ ID NO: 1103499 - RNA, 18 nt, Human
agcagacagcugguggcu

SEQ ID NO: 1103500 - RNA, 21 nt, Human
agcccccggccccagggccag

SEQ ID NO: 1103501 - RNA, 20 nt, Human
aggaagacaaucccagucaa

SEQ ID NO: 1103502 - RNA, 21 nt, Human
aggaccccgacugccccaccg

SEQ ID NO: 1103503 - RNA, 21 nt, Human
aggcacgguuggaaaggcugg

SEQ ID NO: 1103504 - RNA, 24 nt, Human
aguugguggaggccagugggaagc

SEQ ID NO: 1103505 - RNA, 21 nt, Human
cacaccccagcccccggcccc

SEQ ID NO: 1103506 - RNA, 23 nt, Human
cagaucccaggcacgguuggaaa

SEQ ID NO: 1103507 - RNA, 22 nt, Human
cagcagcuggcgccccaggugc

SEQ ID NO: 1103508 - RNA, 20 nt, Human
cagcccccggccccagggcc

SEQ ID NO: 1103509 - RNA, 20 nt, Human
cagcugccuucucaauucca

SEQ ID NO: 1103510 - RNA, 21 nt, Human
cagcugguggcuugagacugg

SEQ ID NO: 1103511 - RNA, 18 nt, Human
caggaccagauaaggaca

SEQ ID NO: 1103512 - RNA, 22 nt, Human
caggaggggugaaggguuggug

SEQ ID NO: 1103513 - RNA, 21 nt, Human
caucagaccugcuuuccagga

SEQ ID NO: 1103514 - RNA, 25 nt, Human
cauuuucauuucuuuauuuuaagga

SEQ ID NO: 1103515 - RNA, 22 nt, Human
ccaccgcugccuuucacaccug

SEQ ID NO: 1103516 - RNA, 21 nt, Human
cccagcccccggccccagggc

SEQ ID NO: 1103517 - RNA, 21 nt, Human
ccccacaccccagcccccggc

SEQ ID NO: 1103518 - RNA, 23 nt, Human
ccccacaccccagcccccggccc

SEQ ID NO: 1103519 - RNA, 18 nt, Human
ccccagggccagggagcc

SEQ ID NO: 1103520 - RNA, 20 nt, Human
ccccaggugcugcugcggcu

SEQ ID NO: 1103521 - RNA, 26 nt, Human
ccccaggugcugcugcgggggaccgc

SEQ ID NO: 1103522 - RNA, 21 nt, Human
ccucuguggccaccgcugccu

SEQ ID NO: 1103523 - RNA, 19 nt, Human
cucccuggcugugcccgcc

SEQ ID NO: 1103524 - RNA, 19 nt, Human
cugcauuaaagcccagauc

SEQ ID NO: 1103525 - RNA, 19 nt, Human
cuggcgccccaggugcugc

SEQ ID NO: 1103526 - RNA, 20 nt, Human
gaagcaggaccagauaagga

SEQ ID NO: 1103527 - RNA, 23 nt, Human
gaggaggggcugaggaggccauc

SEQ ID NO: 1103528 - RNA, 18 nt, Human
ggaagccaucagaccugc

SEQ ID NO: 1103529 - RNA, 20 nt, Human
ggaggggacugagcaugggg

SEQ ID NO: 1103530 - RNA, 18 nt, Human
ggcugugcccgccuucug

SEQ ID NO: 1103531 - RNA, 22 nt, Human
gggaaguggggaugaugagagg

SEQ ID NO: 1103532 - RNA, 22 nt, Human
ggugagagugagguuaaagguc

SEQ ID NO: 1103533 - RNA, 24 nt, Human
uaaaggucagagaggaggggcuga

SEQ ID NO: 1103534 - RNA, 23 nt, Human
uaaggacacugggaaaggagcca

SEQ ID NO: 1103535 - RNA, 20 nt, Human
ucagcugccuucucaauucc

SEQ ID NO: 1103536 - RNA, 22 nt, Human
ucagcugccuucucaauuccag

SEQ ID NO: 1103537 - RNA, 20 nt, Human
ucccagucagcugccuucuc

SEQ ID NO: 1103538 - RNA, 23 nt, Human
ucccagucagcugccuucucaau

SEQ ID NO: 1103539 - RNA, 26 nt, Human
ucccuggcugugcccgccuucuggga

SEQ ID NO: 1103540 - RNA, 20 nt, Human
ugagacugggguggagcugc

SEQ ID NO: 1103541 - RNA, 18 nt, Human
ugcaaggugagagugagg

SEQ ID NO: 1103542 - RNA, 21 nt, Human
uggaaaggcugggccugggaa

SEQ ID NO: 1103543 - RNA, 21 nt, Human
uggagcugcgugggggauggg

SEQ ID NO: 1103544 - RNA, 20 nt, Human
uggccucugcauuaaagccc

SEQ ID NO: 1103545 - RNA, 19 nt, Human
ugggaggggacugagcaug

SEQ ID NO: 1103546 - RNA, 21 nt, Human
ugggccugggaaguggggaug

SEQ ID NO: 1103547 - RNA, 18 nt, Human
uggugcagggugcaaggu

SEQ ID NO: 1103548 - RNA, 25 nt, Human
ugguggcuugagacugggguggagc

SEQ ID NO: 1103549 - RNA, 20 nt, Human
uucacugcccgcuccucccc

SEQ ID NO: 1103550 - RNA, 19 nt, Human
aagaggggagagcaaagag

SEQ ID NO: 1103551 - RNA, 18 nt, Human
aagcacccaccccacccu

SEQ ID NO: 1103552 - RNA, 25 nt, Human
aagccugcccaucaaggaggccacc

SEQ ID NO: 1103553 - RNA, 21 nt, Human
aagucccuuccaagccugccc

SEQ ID NO: 1103554 - RNA, 21 nt, Human
acaacgcagccaugaagaagc

SEQ ID NO: 1103555 - RNA, 23 nt, Human
acaacgcagccaugaagaagccc

SEQ ID NO: 1103556 - RNA, 18 nt, Human
acccacuccuccuccccc

SEQ ID NO: 1103557 - RNA, 22 nt, Human
acccacuccuccucccccgacc

SEQ ID NO: 1103558 - RNA, 19 nt, Human
accccaucucccaaaagcu

SEQ ID NO: 1103559 - RNA, 20 nt, Human
accccugcccaccccaucuc

SEQ ID NO: 1103560 - RNA, 20 nt, Human
acuggacuccccuggaccug

SEQ ID NO: 1103561 - RNA, 25 nt, Human
agaagguagguccugggagugaagg

SEQ ID NO: 1103562 - RNA, 20 nt, Human
agacagggaccaaagcugug

SEQ ID NO: 1103563 - RNA, 21 nt, Human
agacgugaccaccuagaggca

SEQ ID NO: 1103564 - RNA, 23 nt, Human
agagcaaagaggccugcagaggu

SEQ ID NO: 1103565 - RNA, 26 nt, Human
agagcaaagaggccugcagagguagg

SEQ ID NO: 1103566 - RNA, 22 nt, Human
agaggaacagaaagcacccacc

SEQ ID NO: 1103567 - RNA, 21 nt, Human
agaggggagagcaaagaggcc

SEQ ID NO: 1103568 - RNA, 25 nt, Human
agccaagcgacaccauaggcaggga

SEQ ID NO: 1103569 - RNA, 19 nt, Human
aggcaaggugggccagaag

SEQ ID NO: 1103570 - RNA, 20 nt, Human
aggcaggagggaggguggcu

SEQ ID NO: 1103571 - RNA, 21 nt, Human
aggcccccugcccuauguccu

SEQ ID NO: 1103572 - RNA, 19 nt, Human
agggggcuugggcugggag

SEQ ID NO: 1103573 - RNA, 20 nt, Human
agggggcuugggcugggagu

SEQ ID NO: 1103574 - RNA, 18 nt, Human
agguccugggagugaagg

SEQ ID NO: 1103575 - RNA, 19 nt, Human
auacaagcuagcucccaga

SEQ ID NO: 1103576 - RNA, 22 nt, Human
caacaaggcagugaggcccccu

SEQ ID NO: 1103577 - RNA, 20 nt, Human
caacgcagccaugaagaagc

SEQ ID NO: 1103578 - RNA, 18 nt, Human
caagacagggaccaaagc

SEQ ID NO: 1103579 - RNA, 21 nt, Human
caagcuagcucccagacguga

SEQ ID NO: 1103580 - RNA, 22 nt, Human
caccucagccccugcaagacag

SEQ ID NO: 1103581 - RNA, 21 nt, Human
caccucugggcugcccugccu

SEQ ID NO: 1103582 - RNA, 22 nt, Human
caccuggagccacaggugccac

SEQ ID NO: 1103583 - RNA, 19 nt, Human
cacggccaacacuugcagc

SEQ ID NO: 1103584 - RNA, 21 nt, Human
cacugaacucugggcuuuuua

SEQ ID NO: 1103585 - RNA, 23 nt, Human
cacugcuguccuccaggucuccg

SEQ ID NO: 1103586 - RNA, 24 nt, Human
cacuucaucacugccggcucaggc

SEQ ID NO: 1103587 - RNA, 21 nt, Human
cacuugcagcacaggcagagc

SEQ ID NO: 1103588 - RNA, 20 nt, Human
cagaaagcacccaccccacc

SEQ ID NO: 1103589 - RNA, 24 nt, Human
cagaaagcacccaccccacccucu

SEQ ID NO: 1103590 - RNA, 18 nt, Human
cagacgugaccaccuaga

SEQ ID NO: 1103591 - RNA, 22 nt, Human
cagaggaacagaaagcacccac

SEQ ID NO: 1103592 - RNA, 29 nt, Human
cagcacugcuguccuccaggucuccgggg

SEQ ID NO: 1103593 - RNA, 23 nt, Human
cagccaggaccaccccugcccac

SEQ ID NO: 1103594 - RNA, 24 nt, Human
cagccccugcaagacagggaccaa

SEQ ID NO: 1103595 - RNA, 21 nt, Human
cagcugccugccacugucuuu

SEQ ID NO: 1103596 - RNA, 23 nt, Human
cagggcugaaggcaaggugggcc

SEQ ID NO: 1103597 - RNA, 26 nt, Human
cagggcugaaggcaaggugggccaga

SEQ ID NO: 1103598 - RNA, 21 nt, Human
ccaagcagggaaccccuaaag

SEQ ID NO: 1103599 - RNA, 22 nt, Human
ccaagcagggaaccccuaaagg

SEQ ID NO: 1103600 - RNA, 22 nt, Human
ccacaggccuccuuggcguggg

SEQ ID NO: 1103601 - RNA, 28 nt, Human
ccaccccugcccaccccaucucccaaaa

SEQ ID NO: 1103602 - RNA, 20 nt, Human
ccacuccagggcugaaggca

SEQ ID NO: 1103603 - RNA, 21 nt, Human
ccacuggacuccccuggaccu

SEQ ID NO: 1103604 - RNA, 19 nt, Human
ccagcacugcuguccucca

SEQ ID NO: 1103605 - RNA, 21 nt, Human
ccaugaagaagcccgcucugu

SEQ ID NO: 1103606 - RNA, 18 nt, Human
cccacacaggacguaggg

SEQ ID NO: 1103607 - RNA, 20 nt, Human
cccacacaggacguagggag

SEQ ID NO: 1103608 - RNA, 19 nt, Human
ccccuaaaggugaugggga

SEQ ID NO: 1103609 - RNA, 20 nt, Human
ccccugcccaccccaucucc

SEQ ID NO: 1103610 - RNA, 21 nt, Human
cccucuaccaggcgggccccc

SEQ ID NO: 1103611 - RNA, 22 nt, Human
cccucuaccaggcgggcccccu

SEQ ID NO: 1103612 - RNA, 21 nt, Human
cccugcccaccccaucuccca

SEQ ID NO: 1103613 - RNA, 22 nt, Human
cccugccuugcugcccacgcug

SEQ ID NO: 1103614 - RNA, 20 nt, Human
ccuauguccugggacagagu

SEQ ID NO: 1103615 - RNA, 18 nt, Human
ccucugggcugcccugcc

SEQ ID NO: 1103616 - RNA, 19 nt, Human
ccugaggcaagaggggaga

SEQ ID NO: 1103617 - RNA, 19 nt, Human
ccugccaaggguccugccc

SEQ ID NO: 1103618 - RNA, 23 nt, Human
ccugcccaccccaucucccaaaa

SEQ ID NO: 1103619 - RNA, 24 nt, Human
ccugcccaccccaucucccaaaag

SEQ ID NO: 1103620 - RNA, 24 nt, Human
ccugccgcugccaccucugggcug

SEQ ID NO: 1103621 - RNA, 26 nt, Human
ccuuuugcucugggggcaggggcugg

SEQ ID NO: 1103622 - RNA, 24 nt, Human
cggcagacgggcccauggacaccc

SEQ ID NO: 1103623 - RNA, 19 nt, Human
cuccccacaauacucucug

SEQ ID NO: 1103624 - RNA, 22 nt, Human
cuccccuggaccugagcaccuc

SEQ ID NO: 1103625 - RNA, 21 nt, Human
cucugggcuuuuuagaaaugg

SEQ ID NO: 1103626 - RNA, 21 nt, Human
cugccaccucugggcugcccu

SEQ ID NO: 1103627 - RNA, 21 nt, Human
cugcggcacugggugggucuc

SEQ ID NO: 1103628 - RNA, 23 nt, Human
cuggacuuggauuuggagggagc

SEQ ID NO: 1103629 - RNA, 21 nt, Human
cuggccaugccuccccacaau

SEQ ID NO: 1103630 - RNA, 19 nt, Human
cuucagagcugccaggccu

SEQ ID NO: 1103631 - RNA, 20 nt, Human
cuucccgggacccucuacca

SEQ ID NO: 1103632 - RNA, 28 nt, Human
gaaaaugauacuccucaaggaaugccuc

SEQ ID NO: 1103633 - RNA, 21 nt, Human
gaaguccccuccugacaccuu

SEQ ID NO: 1103634 - RNA, 22 nt, Human
gaagucccuuccaagccugccc

SEQ ID NO: 1103635 - RNA, 24 nt, Human
gaagucccuuccaagccugcccau

SEQ ID NO: 1103636 - RNA, 20 nt, Human
gacagaguggggugcgggag

SEQ ID NO: 1103637 - RNA, 23 nt, Human
gaggagcaguucaaacucagcaa

SEQ ID NO: 1103638 - RNA, 18 nt, Human
gagugaagggaggggcuu

SEQ ID NO: 1103639 - RNA, 19 nt, Human
gauccagcuucccgggacc

SEQ ID NO: 1103640 - RNA, 24 nt, Human
gaugacguggaggaagaggaggaa

SEQ ID NO: 1103641 - RNA, 21 nt, Human
gcagcuugcuggccggggccc

SEQ ID NO: 1103642 - RNA, 19 nt, Human
gccaggaccaccccugccc

SEQ ID NO: 1103643 - RNA, 18 nt, Human
gccaugaagaagcccgcu

SEQ ID NO: 1103644 - RNA, 19 nt, Human
gccccagccagcccccacc

SEQ ID NO: 1103645 - RNA, 20 nt, Human
gccugcagagguaggaacaa

SEQ ID NO: 1103646 - RNA, 20 nt, Human
gcgcagcugguggcgccggg

SEQ ID NO: 1103647 - RNA, 20 nt, Human
gcgcugaguggagggggcag

SEQ ID NO: 1103648 - RNA, 26 nt, Human
gcuguggccagauggagggaacacua

SEQ ID NO: 1103649 - RNA, 21 nt, Human
ggacuccccuggaccugagca

SEQ ID NO: 1103650 - RNA, 18 nt, Human
ggagggggcagcuugcug

SEQ ID NO: 1103651 - RNA, 20 nt, Human
ggagggggcagcuugcuggc

SEQ ID NO: 1103652 - RNA, 18 nt, Human
ggauccuucagcucgggu

SEQ ID NO: 1103653 - RNA, 22 nt, Human
ggcaagaggggagagcaaagag

SEQ ID NO: 1103654 - RNA, 23 nt, Human
ggccccagccagcccccaccugu

SEQ ID NO: 1103655 - RNA, 21 nt, Human
ggcuauggaugcugcccugaa

SEQ ID NO: 1103656 - RNA, 18 nt, Human
gggaggggcuugccugcc

SEQ ID NO: 1103657 - RNA, 20 nt, Human
gggagugaagggaggggcuu

SEQ ID NO: 1103658 - RNA, 23 nt, Human
gggcaggaggugggucuggguuu

SEQ ID NO: 1103659 - RNA, 21 nt, Human
gggcugaaggcaaggugggcc

SEQ ID NO: 1103660 - RNA, 24 nt, Human
gggggcgcugaguggagggggcag

SEQ ID NO: 1103661 - RNA, 21 nt, Human
gggugggucucgcggccccgg

SEQ ID NO: 1103662 - RNA, 18 nt, Human
gguccugcccacuggacu

SEQ ID NO: 1103663 - RNA, 19 nt, Human
gguccugggagugaaggga

SEQ ID NO: 1103664 - RNA, 21 nt, Human
gguccugggagugaagggagg

SEQ ID NO: 1103665 - RNA, 19 nt, Human
gugauucagucacgcaggc

SEQ ID NO: 1103666 - RNA, 22 nt, Human
uacaagcuagcucccagacgug

SEQ ID NO: 1103667 - RNA, 22 nt, Human
uaccaggcgggcccccuagacu

SEQ ID NO: 1103668 - RNA, 21 nt, Human
ucacugggacacaggcaggag

SEQ ID NO: 1103669 - RNA, 22 nt, Human
ucagugggccuggggcaggagg

SEQ ID NO: 1103670 - RNA, 19 nt, Human
uccagcuuccccaauggca

SEQ ID NO: 1103671 - RNA, 21 nt, Human
uccccacaauacucucugccc

SEQ ID NO: 1103672 - RNA, 19 nt, Human
ucccgggacccucuaccag

SEQ ID NO: 1103673 - RNA, 20 nt, Human
ucccgggacccucuaccagg

SEQ ID NO: 1103674 - RNA, 21 nt, Human
uccuccucccccgacccagac

SEQ ID NO: 1103675 - RNA, 20 nt, Human
uccuucagcucggguuuggc

SEQ ID NO: 1103676 - RNA, 23 nt, Human
ucuccggggcagucugugggcca

SEQ ID NO: 1103677 - RNA, 20 nt, Human
ugagcaccuccacuuugggu

SEQ ID NO: 1103678 - RNA, 23 nt, Human
ugagcaccuccacuuuggguuuu

SEQ ID NO: 1103679 - RNA, 23 nt, Human
ugaggaagaggaggaugacgugg

SEQ ID NO: 1103680 - RNA, 18 nt, Human
ugagggggcuugggcugg

SEQ ID NO: 1103681 - RNA, 25 nt, Human
ugaguggagggggcagcuugcuggg

SEQ ID NO: 1103682 - RNA, 21 nt, Human
ugauucagucacgcaggccag

SEQ ID NO: 1103683 - RNA, 23 nt, Human
ugcaagacagggaccaaagcugu

SEQ ID NO: 1103684 - RNA, 22 nt, Human
ugccaggccugcaacgggggcg

SEQ ID NO: 1103685 - RNA, 19 nt, Human
ugcccaccccaucucccaa

SEQ ID NO: 1103686 - RNA, 19 nt, Human
ugccucauccacuugggca

SEQ ID NO: 1103687 - RNA, 23 nt, Human
uggacacccaagugccagcacug

SEQ ID NO: 1103688 - RNA, 19 nt, Human
uggagggggcagcuugcug

SEQ ID NO: 1103689 - RNA, 20 nt, Human
ugggauccuucagcucgggu

SEQ ID NO: 1103690 - RNA, 22 nt, Human
ugggauccuucagcucggguuu

SEQ ID NO: 1103691 - RNA, 23 nt, Human
ugggcuauggaugcugcccugaa

SEQ ID NO: 1103692 - RNA, 23 nt, Human
ugggcuuuuuagaaauggaacau

SEQ ID NO: 1103693 - RNA, 20 nt, Human
uggucagaagccauacaagc

SEQ ID NO: 1103694 - RNA, 23 nt, Human
uguccuccaggucuccggggcag

SEQ ID NO: 1103695 - RNA, 22 nt, Human
uguucaagacagucaccuggag

SEQ ID NO: 1103696 - RNA, 19 nt, Human
uuaaggccccagccagccc

SEQ ID NO: 1103697 - RNA, 21 nt, Human
uucaaacucagcaacaacgca

SEQ ID NO: 1103698 - RNA, 22 nt, Human
uucaagacagucaccuggagcc

SEQ ID NO: 1103699 - RNA, 18 nt, Human
uucagcuggaaaggagcc

SEQ ID NO: 1103700 - RNA, 25 nt, Human
uuccuugggacacacugaacucugg

SEQ ID NO: 1103701 - RNA, 24 nt, Human
uuggaaggggacucaggucaguuc

SEQ ID NO: 1103702 - RNA, 25 nt, Human
uuggccaccaggaucugggccuucu

SEQ ID NO: 1103703 - RNA, 23 nt, Human
uugugggcuauggaugcugcccu

SEQ ID NO: 1103704 - RNA, 18 nt, Human
uuuggaaggggacucagg

SEQ ID NO: 1103705 - RNA, 18 nt, Human
uuuuagggcugcugggcu

SEQ ID NO: 1103706 - RNA, 18 nt, Human
agagcagcuaaaacacac

SEQ ID NO: 1103707 - RNA, 23 nt, Human
cagcuaaaacacacucauuuugc

SEQ ID NO: 1103708 - RNA, 18 nt, Human
caguccucugccgugcuu

SEQ ID NO: 1103709 - RNA, 24 nt, Human
ccauucccuauccugaacccccca

SEQ ID NO: 1103710 - RNA, 21 nt, Human
ccccccaaacuccucuucacu

SEQ ID NO: 1103711 - RNA, 28 nt, Human
cccuauccugaaccccccaaacuccucc

SEQ ID NO: 1103712 - RNA, 18 nt, Human
cccugccaguccuccauc

SEQ ID NO: 1103713 - RNA, 18 nt, Human
ccugcaguccucugccgu

SEQ ID NO: 1103714 - RNA, 18 nt, Human
ccuguagagcggcaaggc

SEQ ID NO: 1103715 - RNA, 20 nt, Human
gaaccccccaaacuccucuu

SEQ ID NO: 1103716 - RNA, 18 nt, Human
gccucgguggguguaggg

SEQ ID NO: 1103717 - RNA, 27 nt, Human
gcuccuguagagcggcaaggcaaggau

SEQ ID NO: 1103718 - RNA, 22 nt, Human
gguggguguagggccucugcuc

SEQ ID NO: 1103719 - RNA, 27 nt, Human
uaaaacacacucauuuugcaugaacuc

SEQ ID NO: 1103720 - RNA, 19 nt, Human
uccugaaccccccaaacuc

SEQ ID NO: 1103721 - RNA, 24 nt, Human
uccugaaccccccaaacuccucuu

SEQ ID NO: 1103722 - RNA, 18 nt, Human
ucuccaggggacccugcc

SEQ ID NO: 1103723 - RNA, 23 nt, Human
ucuccaggggacccugccagucc

SEQ ID NO: 1103724 - RNA, 25 nt, Human
ugcuuugcguccucugaccucccca

SEQ ID NO: 1103725 - RNA, 21 nt, Human
uggacgguucauucuacaugg

SEQ ID NO: 1103726 - RNA, 22 nt, Human
uggcaagagcagcuaaaacaca

SEQ ID NO: 1103727 - RNA, 19 nt, Human
uggccugcaguccucugcc

SEQ ID NO: 1103728 - RNA, 21 nt, Human
aaccgguccaccagcagccuc

SEQ ID NO: 1103729 - RNA, 18 nt, Human
accaggaaggcgaaggcc

SEQ ID NO: 1103730 - RNA, 19 nt, Human
acucacagcugcucuuguc

SEQ ID NO: 1103731 - RNA, 21 nt, Human
aggcagggugaccaggaaggc

SEQ ID NO: 1103732 - RNA, 22 nt, Human
aggcccagaaccggccugagaa

SEQ ID NO: 1103733 - RNA, 20 nt, Human
caaugcacaguauggucuga

SEQ ID NO: 1103734 - RNA, 23 nt, Human
cacaguauggucugacccaggga

SEQ ID NO: 1103735 - RNA, 24 nt, Human
caccagcagccuccgaggcagggu

SEQ ID NO: 1103736 - RNA, 20 nt, Human
cagcagccuccgaggcaggg

SEQ ID NO: 1103737 - RNA, 21 nt, Human
cagcagccuccgaggcaggga

SEQ ID NO: 1103738 - RNA, 22 nt, Human
cagcagccuccgaggcagggug

SEQ ID NO: 1103739 - RNA, 25 nt, Human
ccagccaggcccagaaccggccuga

SEQ ID NO: 1103740 - RNA, 25 nt, Human
ccaggcccagaaccggccugagaac

SEQ ID NO: 1103741 - RNA, 20 nt, Human
cccacggaguucucccagca

SEQ ID NO: 1103742 - RNA, 19 nt, Human
ccccagggaggcuucgggg

SEQ ID NO: 1103743 - RNA, 22 nt, Human
cccccacggaguucucccagca

SEQ ID NO: 1103744 - RNA, 24 nt, Human
cggugaggaggaaguugaagauac

SEQ ID NO: 1103745 - RNA, 19 nt, Human
cugccaaugcacaguaugg

SEQ ID NO: 1103746 - RNA, 19 nt, Human
cugccccgccacgaugucc

SEQ ID NO: 1103747 - RNA, 23 nt, Human
gcccagaaccggccugagaaccc

SEQ ID NO: 1103748 - RNA, 22 nt, Human
ggaacuccucccguuccagcca

SEQ ID NO: 1103749 - RNA, 18 nt, Human
uccaccagcagccuccga

SEQ ID NO: 1103750 - RNA, 21 nt, Human
ugccccgccacgauguccagc

SEQ ID NO: 1103751 - RNA, 20 nt, Human
uuguacagcuccucccccac

SEQ ID NO: 1103752 - RNA, 28 nt, Human
acccccucccucccacuucucucuccag

SEQ ID NO: 1103753 - RNA, 24 nt, Human
agcauuaaggccaguggcuacagu

SEQ ID NO: 1103754 - RNA, 21 nt, Human
caacacgagaacaucuugcuc

SEQ ID NO: 1103755 - RNA, 18 nt, Human
cacccccucccucccacu

SEQ ID NO: 1103756 - RNA, 20 nt, Human
cauuaaggccaguggcuaca

SEQ ID NO: 1103757 - RNA, 18 nt, Human
cccccucccucccacuuc

SEQ ID NO: 1103758 - RNA, 25 nt, Human
cccccucccucccacuucucucucc

SEQ ID NO: 1103759 - RNA, 24 nt, Human
ccccucccucccacuucucucucc

SEQ ID NO: 1103760 - RNA, 21 nt, Human
ccucccucccacuucucucuc

SEQ ID NO: 1103761 - RNA, 18 nt, Human
ccuggucuccgccuccau

SEQ ID NO: 1103762 - RNA, 26 nt, Human
cucgaaguggggaagcaacacgagaa

SEQ ID NO: 1103763 - RNA, 21 nt, Human
cuugucacccccucccuccca

SEQ ID NO: 1103764 - RNA, 24 nt, Human
cuugucacccccucccucccacuu

SEQ ID NO: 1103765 - RNA, 25 nt, Human
cuugucacccccucccucccacuuc

SEQ ID NO: 1103766 - RNA, 21 nt, Human
ugaagcagcaaccucucgaag

SEQ ID NO: 1103767 - RNA, 19 nt, Human
ugcccaggacuaggggcag

SEQ ID NO: 1103768 - RNA, 18 nt, Human
uggcuggggcugugcuug

SEQ ID NO: 1103769 - RNA, 25 nt, Human
ugugcuugucacccccucccuccca

SEQ ID NO: 1103770 - RNA, 22 nt, Human
acaaagcaggacacuuggucuu

SEQ ID NO: 1103771 - RNA, 26 nt, Human
acaaagcaggacacuuggucuugggg

SEQ ID NO: 1103772 - RNA, 24 nt, Human
auaucuccaucagggaaucauaca

SEQ ID NO: 1103773 - RNA, 24 nt, Human
cacucuuccgcacaaagcaggaca

SEQ ID NO: 1103774 - RNA, 23 nt, Human
cagagaagacccaaggggccauu

SEQ ID NO: 1103775 - RNA, 18 nt, Human
cagcggguuccaucuuuc

SEQ ID NO: 1103776 - RNA, 22 nt, Human
caggacacuuggucuuggggcu

SEQ ID NO: 1103777 - RNA, 19 nt, Human
ggccucccugcacucuucc

SEQ ID NO: 1103778 - RNA, 21 nt, Human
gggaccagggaggccccagcu

SEQ ID NO: 1103779 - RNA, 21 nt, Human
gguguucguuuuuuaaacaga

SEQ ID NO: 1103780 - RNA, 19 nt, Human
uacagagaagacccaaggg

SEQ ID NO: 1103781 - RNA, 23 nt, Human
uacagagaagacccaaggggcca

SEQ ID NO: 1103782 - RNA, 23 nt, Human
ucuccaagggaccagggaggccc

SEQ ID NO: 1103783 - RNA, 23 nt, Human
uggcauugaagauuucgucucca

SEQ ID NO: 1103784 - RNA, 21 nt, Human
uggucacuugaaguggugcac

SEQ ID NO: 1103785 - RNA, 21 nt, Human
ugguggucacuugaaguggug

SEQ ID NO: 1103786 - RNA, 20 nt, Human
uuccugguggucacuugaag

SEQ ID NO: 1103787 - RNA, 20 nt, Human
uuggucuuggggcuucaguu

SEQ ID NO: 1103788 - RNA, 21 nt, Human
aagaaggagcaaaggcaccug

SEQ ID NO: 1103789 - RNA, 23 nt, Human
aagacccaggcccagcccugacc

SEQ ID NO: 1103790 - RNA, 20 nt, Human
aagacuuccuguaggaggag

SEQ ID NO: 1103791 - RNA, 18 nt, Human
aagcacccgcaggcugag

SEQ ID NO: 1103792 - RNA, 22 nt, Human
aagcagcacgagcugcugagcc

SEQ ID NO: 1103793 - RNA, 18 nt, Human
aagcuggucugcgcaggc

SEQ ID NO: 1103794 - RNA, 22 nt, Human
aaguggggauuucuggccaggu

SEQ ID NO: 1103795 - RNA, 19 nt, Human
aauggcucacccuggguga

SEQ ID NO: 1103796 - RNA, 21 nt, Human
acaauagaggaacagugggga

SEQ ID NO: 1103797 - RNA, 20 nt, Human
acagaaaaagcccuggggug

SEQ ID NO: 1103798 - RNA, 19 nt, Human
acagaguucuuccagacug

SEQ ID NO: 1103799 - RNA, 24 nt, Human
accagcaggagacgggcagcagcc

SEQ ID NO: 1103800 - RNA, 19 nt, Human
accaggaggcccugaagau

SEQ ID NO: 1103801 - RNA, 22 nt, Human
agaaggagugaguggggcugcg

SEQ ID NO: 1103802 - RNA, 19 nt, Human
agacagagcuggcaagucg

SEQ ID NO: 1103803 - RNA, 23 nt, Human
agaggaacaguggggaagggccc

SEQ ID NO: 1103804 - RNA, 20 nt, Human
agagugagaagggacguggu

SEQ ID NO: 1103805 - RNA, 20 nt, Human
agaguucuuccagacugcug

SEQ ID NO: 1103806 - RNA, 24 nt, Human
agcaaaggcaccugccaggaggaa

SEQ ID NO: 1103807 - RNA, 22 nt, Human
agcaaguuagggcacaaucugg

SEQ ID NO: 1103808 - RNA, 20 nt, Human
agcacuuugggaggcugagg

SEQ ID NO: 1103809 - RNA, 19 nt, Human
agcagcagcgccgcauccu

SEQ ID NO: 1103810 - RNA, 20 nt, Human
agcaggagacgggcagcagc

SEQ ID NO: 1103811 - RNA, 25 nt, Human
agcaggagggagggucgggcagggu

SEQ ID NO: 1103812 - RNA, 20 nt, Human
agcagggcguucugagggcc

SEQ ID NO: 1103813 - RNA, 21 nt, Human
agcuggggucccaaagguggg

SEQ ID NO: 1103814 - RNA, 19 nt, Human
aggagagcagcugcggagc

SEQ ID NO: 1103815 - RNA, 19 nt, Human
aggagggagggucgggcag

SEQ ID NO: 1103816 - RNA, 23 nt, Human
aggcaggaagcacugaggcuggg

SEQ ID NO: 1103817 - RNA, 24 nt, Human
aggcaggaagcacugaggcugggu

SEQ ID NO: 1103818 - RNA, 18 nt, Human
aggcauagauauuuuuau

SEQ ID NO: 1103819 - RNA, 19 nt, Human
aggcccggcggcucaagca

SEQ ID NO: 1103820 - RNA, 20 nt, Human
aggcucguccacgcucugcc

SEQ ID NO: 1103821 - RNA, 19 nt, Human
agggggccgucucccugug

SEQ ID NO: 1103822 - RNA, 19 nt, Human
aggggugggugggguaugg

SEQ ID NO: 1103823 - RNA, 22 nt, Human
aguagugaggagaggacaauuc

SEQ ID NO: 1103824 - RNA, 24 nt, Human
agucgcgguggcucacaccuguaa

SEQ ID NO: 1103825 - RNA, 18 nt, Human
auggagcuggagacuucu

SEQ ID NO: 1103826 - RNA, 21 nt, Human
auggcgccuuuugccccccac

SEQ ID NO: 1103827 - RNA, 23 nt, Human
augguggagcugcggcaccccgc

SEQ ID NO: 1103828 - RNA, 19 nt, Human
caacaucgugcagaaggag

SEQ ID NO: 1103829 - RNA, 19 nt, Human
caaggcccggcggcucaag

SEQ ID NO: 1103830 - RNA, 23 nt, Human
caaggcccggcggcucaagcacc

SEQ ID NO: 1103831 - RNA, 24 nt, Human
cacaccuguaaucccagcacuuug

SEQ ID NO: 1103832 - RNA, 22 nt, Human
cacagcauuaaugauggagaaa

SEQ ID NO: 1103833 - RNA, 18 nt, Human
cacccugcagagcagaau

SEQ ID NO: 1103834 - RNA, 23 nt, Human
caccuguaaucccagcacuuugg

SEQ ID NO: 1103835 - RNA, 24 nt, Human
caccuguaaucccagcacuuuggg

SEQ ID NO: 1103836 - RNA, 22 nt, Human
cacugcagggcugcacguggca

SEQ ID NO: 1103837 - RNA, 23 nt, Human
cagaaaaagcccugggguggaag

SEQ ID NO: 1103838 - RNA, 21 nt, Human
cagaauggcucacccugggug

SEQ ID NO: 1103839 - RNA, 18 nt, Human
cagcacuuugggaggcug

SEQ ID NO: 1103840 - RNA, 20 nt, Human
cagcacuuugggaggcugag

SEQ ID NO: 1103841 - RNA, 18 nt, Human
cagcagccugaaggaggc

SEQ ID NO: 1103842 - RNA, 19 nt, Human
cagcaggggugugggggcu

SEQ ID NO: 1103843 - RNA, 22 nt, Human
cagcaggugcucuauggaggcu

SEQ ID NO: 1103844 - RNA, 20 nt, Human
caggaccggcugaacaguga

SEQ ID NO: 1103845 - RNA, 20 nt, Human
caggcccagcccugaccugc

SEQ ID NO: 1103846 - RNA, 19 nt, Human
cagggcugcacguggcagc

SEQ ID NO: 1103847 - RNA, 20 nt, Human
cauccccugcccacaggacc

SEQ ID NO: 1103848 - RNA, 24 nt, Human
caugcacacagcaggugcucuaug

SEQ ID NO: 1103849 - RNA, 25 nt, Human
ccaauggcgccuuuugccccccacu

SEQ ID NO: 1103850 - RNA, 22 nt, Human
ccagaaagaaggagcaaaggca

SEQ ID NO: 1103851 - RNA, 18 nt, Human
ccagcuccagcacgugga

SEQ ID NO: 1103852 - RNA, 25 nt, Human
ccaggcccagcccugaccugcuggc

SEQ ID NO: 1103853 - RNA, 19 nt, Human
cccaaaugaccaaguccac

SEQ ID NO: 1103854 - RNA, 21 nt, Human
cccacaggaccggcugaacag

SEQ ID NO: 1103855 - RNA, 20 nt, Human
cccacaggagaggcacugca

SEQ ID NO: 1103856 - RNA, 20 nt, Human
ccccacccgacucgcccccc

SEQ ID NO: 1103857 - RNA, 22 nt, Human
ccccacuuucucucuccccacc

SEQ ID NO: 1103858 - RNA, 18 nt, Human
cccccauaaggcacugug

SEQ ID NO: 1103859 - RNA, 24 nt, Human
cccugaccugcuggccaccuucuu

SEQ ID NO: 1103860 - RNA, 18 nt, Human
cccugcagcaccagcagg

SEQ ID NO: 1103861 - RNA, 21 nt, Human
cccugcccacaggaccggcug

SEQ ID NO: 1103862 - RNA, 25 nt, Human
cccugugccuggcgugggccuccuu

SEQ ID NO: 1103863 - RNA, 21 nt, Human
cccuuggucaaggcaggaugc

SEQ ID NO: 1103864 - RNA, 25 nt, Human
ccgcccaauggcgccuuuugccccc

SEQ ID NO: 1103865 - RNA, 20 nt, Human
ccuaacacacggugggagag

SEQ ID NO: 1103866 - RNA, 19 nt, Human
ccucugcaguggccacccu

SEQ ID NO: 1103867 - RNA, 21 nt, Human
ccugcccggggccaguguucc

SEQ ID NO: 1103868 - RNA, 23 nt, Human
ccugugucuuugucaccugccuc

SEQ ID NO: 1103869 - RNA, 22 nt, Human
cgcaggccaguaugggccgggc

SEQ ID NO: 1103870 - RNA, 20 nt, Human
cgcccccagcacuucaagca

SEQ ID NO: 1103871 - RNA, 21 nt, Human
cggagccugguggggccggug

SEQ ID NO: 1103872 - RNA, 19 nt, Human
cggcagggcggcagggcgg

SEQ ID NO: 1103873 - RNA, 21 nt, Human
cggcgggaauacgaggucggc

SEQ ID NO: 1103874 - RNA, 19 nt, Human
cgggcaggguggcugcagg

SEQ ID NO: 1103875 - RNA, 18 nt, Human
cguggaggacuacagccg

SEQ ID NO: 1103876 - RNA, 22 nt, Human
cucacaccuguaaucccagcac

SEQ ID NO: 1103877 - RNA, 24 nt, Human
cucacaccuguaaucccagcacuu

SEQ ID NO: 1103878 - RNA, 27 nt, Human
cucaggggccacugcagaauggccucu

SEQ ID NO: 1103879 - RNA, 24 nt, Human
cugagcccagcgucugggaaccag

SEQ ID NO: 1103880 - RNA, 20 nt, Human
cugaggcugagcccagcguc

SEQ ID NO: 1103881 - RNA, 21 nt, Human
cugcaggugggccuggguggc

SEQ ID NO: 1103882 - RNA, 18 nt, Human
cugccaggaggaagccua

SEQ ID NO: 1103883 - RNA, 22 nt, Human
cugcccauccccugcccacagg

SEQ ID NO: 1103884 - RNA, 23 nt, Human
cugcggagccugguggggccggu

SEQ ID NO: 1103885 - RNA, 19 nt, Human
cugggccugacccugugcc

SEQ ID NO: 1103886 - RNA, 20 nt, Human
cugggccugacccugugccu

SEQ ID NO: 1103887 - RNA, 23 nt, Human
cugggccugacccugugccuggc

SEQ ID NO: 1103888 - RNA, 19 nt, Human
cugggggcagggcgagagu

SEQ ID NO: 1103889 - RNA, 21 nt, Human
cuuggccuugugaccuccaca

SEQ ID NO: 1103890 - RNA, 18 nt, Human
gaaggaggccgaggugcu

SEQ ID NO: 1103891 - RNA, 21 nt, Human
gaagggcccgggugcagcagg

SEQ ID NO: 1103892 - RNA, 22 nt, Human
gacaauagaggaacagugggga

SEQ ID NO: 1103893 - RNA, 22 nt, Human
gagcguaaaccagcuggaggag

SEQ ID NO: 1103894 - RNA, 19 nt, Human
gaggacaauuccagaaaga

SEQ ID NO: 1103895 - RNA, 22 nt, Human
gaggaggacggcaagcgcaugg

SEQ ID NO: 1103896 - RNA, 19 nt, Human
gaggcugcagggcgaaugc

SEQ ID NO: 1103897 - RNA, 18 nt, Human
gauagggguggguggggu

SEQ ID NO: 1103898 - RNA, 24 nt, Human
gaugggcagcaggggugugggggc

SEQ ID NO: 1103899 - RNA, 19 nt, Human
gcaagucgcgguggcucac

SEQ ID NO: 1103900 - RNA, 22 nt, Human
gcagagcagaauggcucacccu

SEQ ID NO: 1103901 - RNA, 18 nt, Human
gcagcagggguguggggg

SEQ ID NO: 1103902 - RNA, 19 nt, Human
gcccggacccugcccgggg

SEQ ID NO: 1103903 - RNA, 25 nt, Human
gcccucgggcagcggcagggcggca

SEQ ID NO: 1103904 - RNA, 18 nt, Human
gcccugggguggaagcaa

SEQ ID NO: 1103905 - RNA, 21 nt, Human
gccuuuugccccccacuuucu

SEQ ID NO: 1103906 - RNA, 21 nt, Human
gcgaaugcacagaaaaagccc

SEQ ID NO: 1103907 - RNA, 25 nt, Human
gcgcaggccaguaugggccgggcau

SEQ ID NO: 1103908 - RNA, 24 nt, Human
gcugcacgagcgggugacccagga

SEQ ID NO: 1103909 - RNA, 19 nt, Human
ggaagacccaggcccagcc

SEQ ID NO: 1103910 - RNA, 19 nt, Human
ggaaguggggauuucuggc

SEQ ID NO: 1103911 - RNA, 21 nt, Human
ggacgcccugggccugacccu

SEQ ID NO: 1103912 - RNA, 25 nt, Human
ggacguggacaaggcccggcggcuc

SEQ ID NO: 1103913 - RNA, 20 nt, Human
ggcccggcggcucaagcacc

SEQ ID NO: 1103914 - RNA, 21 nt, Human
ggcgccuuuugccccccacuu

SEQ ID NO: 1103915 - RNA, 18 nt, Human
ggcggggaaggggggggu

SEQ ID NO: 1103916 - RNA, 18 nt, Human
ggcucacccugggugagc

SEQ ID NO: 1103917 - RNA, 18 nt, Human
ggcugcggcagggcuggg

SEQ ID NO: 1103918 - RNA, 20 nt, Human
ggcugcggcagggcuggggg

SEQ ID NO: 1103919 - RNA, 24 nt, Human
gggaagacuuccuguaggaggagg

SEQ ID NO: 1103920 - RNA, 23 nt, Human
gggaaguggggauuucuggccag

SEQ ID NO: 1103921 - RNA, 20 nt, Human
gggcagagccugggcagccu

SEQ ID NO: 1103922 - RNA, 19 nt, Human
gggcagcagccugaaggag

SEQ ID NO: 1103923 - RNA, 21 nt, Human
gggcagcaggggugugggggc

SEQ ID NO: 1103924 - RNA, 24 nt, Human
gggcagcaggggugugggggcucu

SEQ ID NO: 1103925 - RNA, 21 nt, Human
gggcagcggcagggcggcagg

SEQ ID NO: 1103926 - RNA, 18 nt, Human
gggcggggaagggggggg

SEQ ID NO: 1103927 - RNA, 19 nt, Human
gggcggggaaggggggggu

SEQ ID NO: 1103928 - RNA, 19 nt, Human
ggggcugcggcagggcugg

SEQ ID NO: 1103929 - RNA, 23 nt, Human
gggggcucuggacccuggcaagu

SEQ ID NO: 1103930 - RNA, 21 nt, Human
ggguucucuggcucuccaccc

SEQ ID NO: 1103931 - RNA, 23 nt, Human
gguggcucacaccuguaauccca

SEQ ID NO: 1103932 - RNA, 24 nt, Human
gguggcucacaccuguaaucccag

SEQ ID NO: 1103933 - RNA, 22 nt, Human
guaggcuugaacagucagugua

SEQ ID NO: 1103934 - RNA, 19 nt, Human
gugagagggcucgguuggg

SEQ ID NO: 1103935 - RNA, 24 nt, Human
gugaguggggcugcggcagggcug

SEQ ID NO: 1103936 - RNA, 21 nt, Human
guggggaagggcccgggugca

SEQ ID NO: 1103937 - RNA, 25 nt, Human
uaacucagagcaaguuagggcacaa

SEQ ID NO: 1103938 - RNA, 25 nt, Human
uacacgcacugcagggcugcacgug

SEQ ID NO: 1103939 - RNA, 21 nt, Human
uacccaggcccaccaggaggc

SEQ ID NO: 1103940 - RNA, 21 nt, Human
ucagagcaaguuagggcacaa

SEQ ID NO: 1103941 - RNA, 23 nt, Human
uccccacccgacucgcccccagc

SEQ ID NO: 1103942 - RNA, 22 nt, Human
ucccuggggaagacccaggccc

SEQ ID NO: 1103943 - RNA, 25 nt, Human
ucccugguugaggaguugggguucc

SEQ ID NO: 1103944 - RNA, 20 nt, Human
uccgggugggagacgugugg

SEQ ID NO: 1103945 - RNA, 24 nt, Human
uccugcagaagcuggucugcgcag

SEQ ID NO: 1103946 - RNA, 24 nt, Human
ucucaggcucguccacgcucugcc

SEQ ID NO: 1103947 - RNA, 22 nt, Human
ucucaggggucugggcagggag

SEQ ID NO: 1103948 - RNA, 19 nt, Human
ucucuggcucuccacccug

SEQ ID NO: 1103949 - RNA, 21 nt, Human
ucucuggcucuccacccuggu

SEQ ID NO: 1103950 - RNA, 26 nt, Human
ucugcccauccccugcccacaggacc

SEQ ID NO: 1103951 - RNA, 20 nt, Human
ugaccacguaacucagagca

SEQ ID NO: 1103952 - RNA, 18 nt, Human
ugacuguaggcuugaaca

SEQ ID NO: 1103953 - RNA, 23 nt, Human
ugagcccagcgucugggaaccag

SEQ ID NO: 1103954 - RNA, 21 nt, Human
ugaggcugggucacagacaag

SEQ ID NO: 1103955 - RNA, 18 nt, Human
ugcagaaggagaucaacg

SEQ ID NO: 1103956 - RNA, 20 nt, Human
ugcagaaggagaucaacgac

SEQ ID NO: 1103957 - RNA, 22 nt, Human
ugcagcaccagcaggagacggg

SEQ ID NO: 1103958 - RNA, 23 nt, Human
ugcagggcgugcacccgggcugc

SEQ ID NO: 1103959 - RNA, 18 nt, Human
ugcaggugggccugggug

SEQ ID NO: 1103960 - RNA, 19 nt, Human
ugcaugcacacagcaggug

SEQ ID NO: 1103961 - RNA, 27 nt, Human
ugcccggggccaguguuccugagcgcc

SEQ ID NO: 1103962 - RNA, 23 nt, Human
ugccgccaccauccggagccaau

SEQ ID NO: 1103963 - RNA, 23 nt, Human
ugccucauggacgcccugggccu

SEQ ID NO: 1103964 - RNA, 19 nt, Human
ugcggagccugguggggcc

SEQ ID NO: 1103965 - RNA, 18 nt, Human
ugcggcgggaauacgagg

SEQ ID NO: 1103966 - RNA, 20 nt, Human
uggcaagucugcccaucccc

SEQ ID NO: 1103967 - RNA, 22 nt, Human
uggccucugcaguggccacccu

SEQ ID NO: 1103968 - RNA, 21 nt, Human
uggcucacaccuguaauccca

SEQ ID NO: 1103969 - RNA, 22 nt, Human
uggcucacaccuguaaucccag

SEQ ID NO: 1103970 - RNA, 24 nt, Human
uggcucacaccuguaaucccagca

SEQ ID NO: 1103971 - RNA, 23 nt, Human
ugggcagagccaggacauggggc

SEQ ID NO: 1103972 - RNA, 20 nt, Human
ugggccucgagguuggccag

SEQ ID NO: 1103973 - RNA, 19 nt, Human
ugggcggggaagggggggg

SEQ ID NO: 1103974 - RNA, 22 nt, Human
uggggaagacccaggcccagcc

SEQ ID NO: 1103975 - RNA, 25 nt, Human
uggggcugcggcagggcuggggguc

SEQ ID NO: 1103976 - RNA, 18 nt, Human
ugggguggaagcaagguu

SEQ ID NO: 1103977 - RNA, 20 nt, Human
ugggugcgggggcggggcgu

SEQ ID NO: 1103978 - RNA, 24 nt, Human
uggugagcaggagggagggucggg

SEQ ID NO: 1103979 - RNA, 24 nt, Human
ugguggggccggugggugagccgg

SEQ ID NO: 1103980 - RNA, 24 nt, Human
ugucaccugccucauggacgcccu

SEQ ID NO: 1103981 - RNA, 19 nt, Human
ugucucaggggucugggca

SEQ ID NO: 1103982 - RNA, 19 nt, Human
ugucuuggccacagaguuc

SEQ ID NO: 1103983 - RNA, 23 nt, Human
uuccuggacguggacaaggcccg

SEQ ID NO: 1103984 - RNA, 23 nt, Human
uuccuucuuugcugggcuccccu

SEQ ID NO: 1103985 - RNA, 21 nt, Human
uucucuggcucuccacccugg

SEQ ID NO: 1103986 - RNA, 19 nt, Human
uuggaccaaucugcccucu

SEQ ID NO: 1103987 - RNA, 26 nt, Human
aaaaacagagacagaguaagaaagga

SEQ ID NO: 1103988 - RNA, 27 nt, Human
aaccugucuccuacaaggaccauccug

SEQ ID NO: 1103989 - RNA, 19 nt, Human
aagaagaggcucccccagg

SEQ ID NO: 1103990 - RNA, 19 nt, Human
aagcaggaagagccaccug

SEQ ID NO: 1103991 - RNA, 19 nt, Human
aagcgcccgcgcuggggaa

SEQ ID NO: 1103992 - RNA, 22 nt, Human
acaaacccaacacccgcagggc

SEQ ID NO: 1103993 - RNA, 21 nt, Human
accauccugugugggacccug

SEQ ID NO: 1103994 - RNA, 23 nt, Human
agaaaacagcccagagagaaagc

SEQ ID NO: 1103995 - RNA, 20 nt, Human
agagaaagcagcccgaggga

SEQ ID NO: 1103996 - RNA, 22 nt, Human
agcauaaaaaugauaccaaaau

SEQ ID NO: 1103997 - RNA, 24 nt, Human
agccccucagccccucagccuccu

SEQ ID NO: 1103998 - RNA, 22 nt, Human
agccccucagccgccucagccc

SEQ ID NO: 1103999 - RNA, 20 nt, Human
aggagaaaacgcguaauaaa

SEQ ID NO: 1104000 - RNA, 26 nt, Human
aggagaaaacgcguaauaaaacaaaa

SEQ ID NO: 1104001 - RNA, 27 nt, Human
agggcagcuugugcccgagagugggau

SEQ ID NO: 1104002 - RNA, 24 nt, Human
aguaagaaaacagcccagagagaa

SEQ ID NO: 1104003 - RNA, 19 nt, Human
auaaaacaaaaugcugcaa

SEQ ID NO: 1104004 - RNA, 21 nt, Human
auccugugugggacccugcca

SEQ ID NO: 1104005 - RNA, 21 nt, Human
caaaaucuaggagaaaacgcg

SEQ ID NO: 1104006 - RNA, 19 nt, Human
caaaaugcugcaaaacaca

SEQ ID NO: 1104007 - RNA, 24 nt, Human
caaacccaacacccgcagggcuga

SEQ ID NO: 1104008 - RNA, 21 nt, Human
caagagaucauggcccagagc

SEQ ID NO: 1104009 - RNA, 18 nt, Human
caccucagcaacuuguca

SEQ ID NO: 1104010 - RNA, 21 nt, Human
caccugagcccgaaauugucc

SEQ ID NO: 1104011 - RNA, 23 nt, Human
caccugggugaccccccucccua

SEQ ID NO: 1104012 - RNA, 20 nt, Human
cacgugacgugcgguggacc

SEQ ID NO: 1104013 - RNA, 20 nt, Human
cagcaaagggcagcuugugc

SEQ ID NO: 1104014 - RNA, 25 nt, Human
cagcaacuugucaaaccugucuccu

SEQ ID NO: 1104015 - RNA, 19 nt, Human
cagcccagagagaaagcag

SEQ ID NO: 1104016 - RNA, 21 nt, Human
cagccccucagccccucagcc

SEQ ID NO: 1104017 - RNA, 21 nt, Human
cagccccucagccccucagcc

SEQ ID NO: 1104018 - RNA, 19 nt, Human
cagccccucagccgccuca

SEQ ID NO: 1104019 - RNA, 19 nt, Human
cagccccucagccgccuca

SEQ ID NO: 1104020 - RNA, 20 nt, Human
cagccgccucagccgccuca

SEQ ID NO: 1104021 - RNA, 22 nt, Human
caggagcccacggccucagaaa

SEQ ID NO: 1104022 - RNA, 19 nt, Human
caggcaaaggggaaauugg

SEQ ID NO: 1104023 - RNA, 25 nt, Human
cagugccaagagaucauggcccaga

SEQ ID NO: 1104024 - RNA, 20 nt, Human
caucacccaccaggaguccc

SEQ ID NO: 1104025 - RNA, 19 nt, Human
caucaggcaccucagcaac

SEQ ID NO: 1104026 - RNA, 19 nt, Human
cauggcccagagcuggcag

SEQ ID NO: 1104027 - RNA, 19 nt, Human
ccaagagaucauggcccag

SEQ ID NO: 1104028 - RNA, 22 nt, Human
ccaagagaucauggcccagagc

SEQ ID NO: 1104029 - RNA, 22 nt, Human
ccaccugggugaccccccuccc

SEQ ID NO: 1104030 - RNA, 21 nt, Human
ccacgcugucgcgggcuucug

SEQ ID NO: 1104031 - RNA, 22 nt, Human
ccagccaaggccucccggagcc

SEQ ID NO: 1104032 - RNA, 19 nt, Human
cccagagagaaagcagccc

SEQ ID NO: 1104033 - RNA, 19 nt, Human
cccccaggaugcaaacuca

SEQ ID NO: 1104034 - RNA, 22 nt, Human
cccgcgcuggggaagcgccccc

SEQ ID NO: 1104035 - RNA, 23 nt, Human
ccucagcaacuugucaaaccugu

SEQ ID NO: 1104036 - RNA, 18 nt, Human
ccuccugccaggagccca

SEQ ID NO: 1104037 - RNA, 18 nt, Human
cgcccccugcaccugagc

SEQ ID NO: 1104038 - RNA, 24 nt, Human
cgccugccacugacuccuggccgc

SEQ ID NO: 1104039 - RNA, 19 nt, Human
cggcagggaccggccaggc

SEQ ID NO: 1104040 - RNA, 24 nt, Human
cggugucuuccaaacccaagccuc

SEQ ID NO: 1104041 - RNA, 24 nt, Human
cguaauaaaacaaaaugcugcaaa

SEQ ID NO: 1104042 - RNA, 20 nt, Human
cuccagguccuccugccagg

SEQ ID NO: 1104043 - RNA, 21 nt, Human
cucccggagccaucacccacc

SEQ ID NO: 1104044 - RNA, 21 nt, Human
gaaauugucccuaacaaaccc

SEQ ID NO: 1104045 - RNA, 18 nt, Human
gagccgcagccgggcucg

SEQ ID NO: 1104046 - RNA, 21 nt, Human
gaggccccacucugucccagc

SEQ ID NO: 1104047 - RNA, 22 nt, Human
gcaaagggcagcuugugcccga

SEQ ID NO: 1104048 - RNA, 21 nt, Human
gcaggaagagccaccugggug

SEQ ID NO: 1104049 - RNA, 24 nt, Human
gcagucagcucagcagcucucccu

SEQ ID NO: 1104050 - RNA, 24 nt, Human
gccgcgccugccacugacuccugg

SEQ ID NO: 1104051 - RNA, 25 nt, Human
gccucagccgccucagccccucagc

SEQ ID NO: 1104052 - RNA, 20 nt, Human
ggaauggucuggaaaguggg

SEQ ID NO: 1104053 - RNA, 20 nt, Human
ggaggccccacucuguccca

SEQ ID NO: 1104054 - RNA, 21 nt, Human
gggcagggccaguccggggga

SEQ ID NO: 1104055 - RNA, 23 nt, Human
gggcagggccaguccgggggagc

SEQ ID NO: 1104056 - RNA, 19 nt, Human
gucccuaacaaacccaaca

SEQ ID NO: 1104057 - RNA, 21 nt, Human
uaaaacaaaaugcugcaaaac

SEQ ID NO: 1104058 - RNA, 18 nt, Human
uaagaaaggacaccgagc

SEQ ID NO: 1104059 - RNA, 23 nt, Human
ucagauggggcccaggaagcgcc

SEQ ID NO: 1104060 - RNA, 18 nt, Human
ucagccccucagccccuc

SEQ ID NO: 1104061 - RNA, 18 nt, Human
ucagccccucagccccuc

SEQ ID NO: 1104062 - RNA, 18 nt, Human
ucagccccucagccccuc

SEQ ID NO: 1104063 - RNA, 21 nt, Human
ucagccccucagccgccucag

SEQ ID NO: 1104064 - RNA, 21 nt, Human
ucagccccucagccgccucag

SEQ ID NO: 1104065 - RNA, 21 nt, Human
ucagccccucagccuccucag

SEQ ID NO: 1104066 - RNA, 21 nt, Human
ucagccgccucagccccucag

SEQ ID NO: 1104067 - RNA, 21 nt, Human
ucagccgccucagccccucag

SEQ ID NO: 1104068 - RNA, 22 nt, Human
ucagccgccucagccgccucag

SEQ ID NO: 1104069 - RNA, 19 nt, Human
ucagccuccucagccccuc

SEQ ID NO: 1104070 - RNA, 21 nt, Human
ucagccuccucagccccucag

SEQ ID NO: 1104071 - RNA, 18 nt, Human
ucagcucagcagcucucc

SEQ ID NO: 1104072 - RNA, 21 nt, Human
ucaggcaaaggggaaauugga

SEQ ID NO: 1104073 - RNA, 23 nt, Human
ucccagccaaggccucccggagc

SEQ ID NO: 1104074 - RNA, 23 nt, Human
uccgugcccaacgccagcaaagg

SEQ ID NO: 1104075 - RNA, 24 nt, Human
ugaaaacuccagguccuccugcca

SEQ ID NO: 1104076 - RNA, 24 nt, Human
ugaaaugggcaccgcgugcuuucc

SEQ ID NO: 1104077 - RNA, 19 nt, Human
ugccuggaauggucuggaa

SEQ ID NO: 1104078 - RNA, 23 nt, Human
ugcggugucgaugaaaugggcac

SEQ ID NO: 1104079 - RNA, 24 nt, Human
uggaauggucuggaaagugggggc

SEQ ID NO: 1104080 - RNA, 20 nt, Human
uggccgcccgcuacuacucg

SEQ ID NO: 1104081 - RNA, 21 nt, Human
ugggacccugccaagcuccua

SEQ ID NO: 1104082 - RNA, 18 nt, Human
ugggugaccccccucccu

SEQ ID NO: 1104083 - RNA, 20 nt, Human
ugucccagccaaggccuccc

SEQ ID NO: 1104084 - RNA, 21 nt, Human
ugucccuaacaaacccaacac

SEQ ID NO: 1104085 - RNA, 21 nt, Human
uucccggggaucugaaaacuc

SEQ ID NO: 1104086 - RNA, 24 nt, Human
uuggauccuugccagguuuccagu

SEQ ID NO: 1104087 - RNA, 24 nt, Human
uugucccuaacaaacccaacaccc

SEQ ID NO: 1104088 - RNA, 27 nt, Human
aaaaaaaaaaaaagaauuacugcaaac

SEQ ID NO: 1104089 - RNA, 23 nt, Human
aaaaaaaaaagaauuacugcaaa

SEQ ID NO: 1104090 - RNA, 18 nt, Human
aaagaauuacugcaaaca

SEQ ID NO: 1104091 - RNA, 21 nt, Human
aacagcaccauauggagcaaa

SEQ ID NO: 1104092 - RNA, 21 nt, Human
aacagugcgagacuccgucuc

SEQ ID NO: 1104093 - RNA, 24 nt, Human
aacagugcgagacuccgucucaaa

SEQ ID NO: 1104094 - RNA, 19 nt, Human
aacauggugaaaccccauc

SEQ ID NO: 1104095 - RNA, 20 nt, Human
aacauggugaaaccccaucu

SEQ ID NO: 1104096 - RNA, 21 nt, Human
aacauggugaaaccccaucuc

SEQ ID NO: 1104097 - RNA, 21 nt, Human
aacauggugaaaccccaucuc

SEQ ID NO: 1104098 - RNA, 24 nt, Human
aauugcuugaacucgggaggcgga

SEQ ID NO: 1104099 - RNA, 24 nt, Human
acagugcgagacuccgucucaaaa

SEQ ID NO: 1104100 - RNA, 23 nt, Human
accccauaggauuucaaaagcca

SEQ ID NO: 1104101 - RNA, 24 nt, Human
accccaucucuacuaaaaauacaa

SEQ ID NO: 1104102 - RNA, 23 nt, Human
acgccacugcacuccagccuggg

SEQ ID NO: 1104103 - RNA, 24 nt, Human
acgccacugcacuccagccugggc

SEQ ID NO: 1104104 - RNA, 24 nt, Human
acugcacuccagccugggcaacag

SEQ ID NO: 1104105 - RNA, 21 nt, Human
agaacagcaccauauggagca

SEQ ID NO: 1104106 - RNA, 29 nt, Human
agagaccccauaggauuucaaaagccagg

SEQ ID NO: 1104107 - RNA, 26 nt, Human
agagagcagcuggagaauguuuucau

SEQ ID NO: 1104108 - RNA, 19 nt, Human
agauggcauuuucauucaa

SEQ ID NO: 1104109 - RNA, 22 nt, Human
agcacuuugggaggccgaggug

SEQ ID NO: 1104110 - RNA, 23 nt, Human
agcaguuauuuuugcccccaaau

SEQ ID NO: 1104111 - RNA, 22 nt, Human
agccuggagccuggagauggca

SEQ ID NO: 1104112 - RNA, 24 nt, Human
agccugggcaacagugcgagacuc

SEQ ID NO: 1104113 - RNA, 24 nt, Human
aggcaggagaauugcuugaacucg

SEQ ID NO: 1104114 - RNA, 21 nt, Human
aggccgaggugagugcaucac

SEQ ID NO: 1104115 - RNA, 24 nt, Human
aggcggagcuugcagugagccaag

SEQ ID NO: 1104116 - RNA, 21 nt, Human
aggcugaggcaggagaauugc

SEQ ID NO: 1104117 - RNA, 24 nt, Human
aggcugaggcaggagaauugcuug

SEQ ID NO: 1104118 - RNA, 18 nt, Human
agugcaucacgaggucag

SEQ ID NO: 1104119 - RNA, 24 nt, Human
aguggcucacgccuguaaucccag

SEQ ID NO: 1104120 - RNA, 24 nt, Human
aucacgccacugcacuccagccug

SEQ ID NO: 1104121 - RNA, 23 nt, Human
auucugggcacagugugacauuu

SEQ ID NO: 1104122 - RNA, 24 nt, Human
caacauggugaaaccccaucucua

SEQ ID NO: 1104123 - RNA, 24 nt, Human
caagaucacgccacugcacuccag

SEQ ID NO: 1104124 - RNA, 25 nt, Human
cacccuaaaaugcaaaucccaucac

SEQ ID NO: 1104125 - RNA, 23 nt, Human
caccuguaaucccagcuacucgg

SEQ ID NO: 1104126 - RNA, 24 nt, Human
caccuguaaucccagcuacucggg

SEQ ID NO: 1104127 - RNA, 24 nt, Human
cacgccuguaaucccagcacuuug

SEQ ID NO: 1104128 - RNA, 20 nt, Human
cacuccagccugggcaacag

SEQ ID NO: 1104129 - RNA, 21 nt, Human
cacuccagccugggcaacagu

SEQ ID NO: 1104130 - RNA, 19 nt, Human
cacugcacuccagccuggg

SEQ ID NO: 1104131 - RNA, 21 nt, Human
cacugcacuccagccugggca

SEQ ID NO: 1104132 - RNA, 22 nt, Human
cacugcacuccagccugggcaa

SEQ ID NO: 1104133 - RNA, 23 nt, Human
cacugcacuccagccugggcaac

SEQ ID NO: 1104134 - RNA, 24 nt, Human
cacugcacuccagccugggcaaca

SEQ ID NO: 1104135 - RNA, 22 nt, Human
cacuguagcuggcaaaggucug

SEQ ID NO: 1104136 - RNA, 21 nt, Human
cagcacuuugggaggccgagg

SEQ ID NO: 1104137 - RNA, 23 nt, Human
cagcacuuugggaggccgaggug

SEQ ID NO: 1104138 - RNA, 24 nt, Human
cagcuacucgggaggcugaggcag

SEQ ID NO: 1104139 - RNA, 23 nt, Human
caggcagggcgcaguggcucacg

SEQ ID NO: 1104140 - RNA, 24 nt, Human
cauucagagaccccauaggauuuc

SEQ ID NO: 1104141 - RNA, 21 nt, Human
ccaaaucacccuaaaaugcaa

SEQ ID NO: 1104142 - RNA, 20 nt, Human
ccacugcacuccagccuggg

SEQ ID NO: 1104143 - RNA, 20 nt, Human
ccacugcacuccagccuggg

SEQ ID NO: 1104144 - RNA, 21 nt, Human
ccacugcacuccagccugggc

SEQ ID NO: 1104145 - RNA, 23 nt, Human
ccacugcacuccagccugggcaa

SEQ ID NO: 1104146 - RNA, 24 nt, Human
ccacugcacuccagccugggcaac

SEQ ID NO: 1104147 - RNA, 20 nt, Human
cccaaaucacccuaaaaugc

SEQ ID NO: 1104148 - RNA, 18 nt, Human
ccgacaccagaacagacu

SEQ ID NO: 1104149 - RNA, 26 nt, Human
ccucugacaccgacaccagaacagac

SEQ ID NO: 1104150 - RNA, 23 nt, Human
ccuggccaacauggugaaacccc

SEQ ID NO: 1104151 - RNA, 24 nt, Human
ccuggccaacauggugaaacccca

SEQ ID NO: 1104152 - RNA, 21 nt, Human
ccuguaaucccagcuacucgg

SEQ ID NO: 1104153 - RNA, 24 nt, Human
cgccacugcacuccagccugggca

SEQ ID NO: 1104154 - RNA, 23 nt, Human
cgccuguaaucccagcacuuugg

SEQ ID NO: 1104155 - RNA, 24 nt, Human
cgccuguaaucccagcacuuuggg

SEQ ID NO: 1104156 - RNA, 19 nt, Human
cuacaaacaggcagggcgc

SEQ ID NO: 1104157 - RNA, 18 nt, Human
cucaaaaaaaaaaaaaaa

SEQ ID NO: 1104158 - RNA, 23 nt, Human
cucaaaaaaaaaaaaaaaaagaa

SEQ ID NO: 1104159 - RNA, 22 nt, Human
cucacgccuguaaucccagcac

SEQ ID NO: 1104160 - RNA, 24 nt, Human
cucacgccuguaaucccagcacuu

SEQ ID NO: 1104161 - RNA, 19 nt, Human
cuccgucucaaaaaaaaaa

SEQ ID NO: 1104162 - RNA, 23 nt, Human
cuggccaacauggugaaacccca

SEQ ID NO: 1104163 - RNA, 21 nt, Human
cuguaaucccagcuacucggg

SEQ ID NO: 1104164 - RNA, 23 nt, Human
gagaauugcuugaacucgggagg

SEQ ID NO: 1104165 - RNA, 22 nt, Human
gagcuugcagugagccaagauc

SEQ ID NO: 1104166 - RNA, 23 nt, Human
gaggugagugcaucacgagguca

SEQ ID NO: 1104167 - RNA, 19 nt, Human
gcaaaagagagcagcugga

SEQ ID NO: 1104168 - RNA, 24 nt, Human
gccaacauggugaaaccccaucuc

SEQ ID NO: 1104169 - RNA, 20 nt, Human
gccaagaucacgccacugca

SEQ ID NO: 1104170 - RNA, 22 nt, Human
gccacugcacuccagccugggc

SEQ ID NO: 1104171 - RNA, 24 nt, Human
gccacugcacuccagccugggcaa

SEQ ID NO: 1104172 - RNA, 23 nt, Human
gccuggccaacauggugaaaccc

SEQ ID NO: 1104173 - RNA, 20 nt, Human
gcgcaguggcucacgccugu

SEQ ID NO: 1104174 - RNA, 20 nt, Human
ggagcuugcagugagccaag

SEQ ID NO: 1104175 - RNA, 24 nt, Human
ggagcuugcagugagccaagauca

SEQ ID NO: 1104176 - RNA, 19 nt, Human
ggcaccuguaaucccagcu

SEQ ID NO: 1104177 - RNA, 18 nt, Human
ggcagggcgcaguggcuc

SEQ ID NO: 1104178 - RNA, 23 nt, Human
ggcgcaguggcucacgccuguaa

SEQ ID NO: 1104179 - RNA, 18 nt, Human
gggcgcaguggcucacgc

SEQ ID NO: 1104180 - RNA, 24 nt, Human
gguggcaggcaccuguaaucccag

SEQ ID NO: 1104181 - RNA, 23 nt, Human
ggugugguggcaggcaccuguaa

SEQ ID NO: 1104182 - RNA, 21 nt, Human
gugacauuuaccugaacagag

SEQ ID NO: 1104183 - RNA, 22 nt, Human
uaaaaauacaaaacguuagcug

SEQ ID NO: 1104184 - RNA, 20 nt, Human
uaacucugcaaucuuuucag

SEQ ID NO: 1104185 - RNA, 18 nt, Human
uaacugggugcacuggag

SEQ ID NO: 1104186 - RNA, 23 nt, Human
uacaaacaggcagggcgcagugg

SEQ ID NO: 1104187 - RNA, 24 nt, Human
uaccugaacagagaggagaauggc

SEQ ID NO: 1104188 - RNA, 19 nt, Human
uacuacaaacaggcagggc

SEQ ID NO: 1104189 - RNA, 21 nt, Human
uauggagcaaaagagagcagc

SEQ ID NO: 1104190 - RNA, 23 nt, Human
ucaaaaaaaaaaaaaaaaagaau

SEQ ID NO: 1104191 - RNA, 22 nt, Human
ucacgaggucagaaguuugaga

SEQ ID NO: 1104192 - RNA, 24 nt, Human
ucacgaggucagaaguuugagauc

SEQ ID NO: 1104193 - RNA, 23 nt, Human
ucacgccacugcacuccagccug

SEQ ID NO: 1104194 - RNA, 23 nt, Human
ucacuguagcuggcaaaggucug

SEQ ID NO: 1104195 - RNA, 23 nt, Human
uccgucucaaaaaaaaaaaaaaa

SEQ ID NO: 1104196 - RNA, 23 nt, Human
ucgggaggcugaggcaggagaau

SEQ ID NO: 1104197 - RNA, 20 nt, Human
ucucuacuaaaaauacaaaa

SEQ ID NO: 1104198 - RNA, 24 nt, Human
ucugacaccgacaccagaacagac

SEQ ID NO: 1104199 - RNA, 19 nt, Human
ucugcaaucuuuucagcca

SEQ ID NO: 1104200 - RNA, 23 nt, Human
ucugcaaucuuuucagccacucu

SEQ ID NO: 1104201 - RNA, 19 nt, Human
ugaaaccccaucucuacua

SEQ ID NO: 1104202 - RNA, 20 nt, Human
ugacaccgacaccagaacag

SEQ ID NO: 1104203 - RNA, 20 nt, Human
ugaccucugacaccgacacc

SEQ ID NO: 1104204 - RNA, 24 nt, Human
ugagaucugccuggccaacauggu

SEQ ID NO: 1104205 - RNA, 23 nt, Human
ugaggcaggagaauugcuugaac

SEQ ID NO: 1104206 - RNA, 25 nt, Human
ugaggcaggagaauugcuugaacuc

SEQ ID NO: 1104207 - RNA, 22 nt, Human
ugagugcaucacgaggucagaa

SEQ ID NO: 1104208 - RNA, 20 nt, Human
ugcaaaucccaucacuguag

SEQ ID NO: 1104209 - RNA, 22 nt, Human
ugcaucacgaggucagaaguuu

SEQ ID NO: 1104210 - RNA, 23 nt, Human
ugccuaaaaauuacuacaaacag

SEQ ID NO: 1104211 - RNA, 21 nt, Human
uggagcaaaagagagcagcug

SEQ ID NO: 1104212 - RNA, 22 nt, Human
uggcaggcaccuguaaucccag

SEQ ID NO: 1104213 - RNA, 24 nt, Human
uggccaacauggugaaaccccauc

SEQ ID NO: 1104214 - RNA, 22 nt, Human
uggcucacgccuguaaucccag

SEQ ID NO: 1104215 - RNA, 24 nt, Human
uggcucacgccuguaaucccagca

SEQ ID NO: 1104216 - RNA, 19 nt, Human
ugggaggccgaggugagug

SEQ ID NO: 1104217 - RNA, 24 nt, Human
ugggaggccgaggugagugcauca

SEQ ID NO: 1104218 - RNA, 24 nt, Human
ugguggcaggcaccuguaauccca

SEQ ID NO: 1104219 - RNA, 19 nt, Human
ugugguggcaggcaccugu

SEQ ID NO: 1104220 - RNA, 18 nt, Human
uuagcugggugugguggc

SEQ ID NO: 1104221 - RNA, 24 nt, Human
uuagcugggugugguggcaggcac

SEQ ID NO: 1104222 - RNA, 20 nt, Human
uugcagugagccaagaucac

SEQ ID NO: 1104223 - RNA, 18 nt, Human
uugcuugaacucgggagg

SEQ ID NO: 1104224 - RNA, 23 nt, Human
uugcuugaacucgggaggcggag

SEQ ID NO: 1104225 - RNA, 19 nt, Human
uugggaggccgaggugagu

SEQ ID NO: 1104226 - RNA, 22 nt, Human
aaaaagacgaacacaacggaga

SEQ ID NO: 1104227 - RNA, 21 nt, Human
aaaagacgaacacaacggaga

SEQ ID NO: 1104228 - RNA, 24 nt, Human
aaaugacugcaguccacaacuugg

SEQ ID NO: 1104229 - RNA, 20 nt, Human
acaacggagaaauccagcac

SEQ ID NO: 1104230 - RNA, 20 nt, Human
acaugaacuuucucacaucc

SEQ ID NO: 1104231 - RNA, 18 nt, Human
acauucaaugccuuugcu

SEQ ID NO: 1104232 - RNA, 20 nt, Human
acugcaguccacaacuuguc

SEQ ID NO: 1104233 - RNA, 18 nt, Human
agaaggcuggacugugag

SEQ ID NO: 1104234 - RNA, 18 nt, Human
agacgaacacaacggaga

SEQ ID NO: 1104235 - RNA, 18 nt, Human
agcucagugcucaugugc

SEQ ID NO: 1104236 - RNA, 23 nt, Human
aggaggccuguucgcgacaugag

SEQ ID NO: 1104237 - RNA, 24 nt, Human
auggcacuggaaaaagacgaacac

SEQ ID NO: 1104238 - RNA, 22 nt, Human
caaauaaaugacugcaguccac

SEQ ID NO: 1104239 - RNA, 19 nt, Human
caaccucugauaaccagug

SEQ ID NO: 1104240 - RNA, 18 nt, Human
cacuugacuucugcucuu

SEQ ID NO: 1104241 - RNA, 24 nt, Human
ccucugauaaccagugucuuugag

SEQ ID NO: 1104242 - RNA, 24 nt, Human
cgccuccgacucaauagucagcuc

SEQ ID NO: 1104243 - RNA, 22 nt, Human
cucuuucuauuguuuuucaaaa

SEQ ID NO: 1104244 - RNA, 18 nt, Human
cugcucacucccaaagcc

SEQ ID NO: 1104245 - RNA, 23 nt, Human
cuuggcacagcucccuugcacau

SEQ ID NO: 1104246 - RNA, 24 nt, Human
cuuggcacagcucccuugcacaug

SEQ ID NO: 1104247 - RNA, 24 nt, Human
cuuguccuccugugccgauuuggu

SEQ ID NO: 1104248 - RNA, 21 nt, Human
gaaaauagcuguucagugaac

SEQ ID NO: 1104249 - RNA, 23 nt, Human
gaacuucuuucaugagcucacuu

SEQ ID NO: 1104250 - RNA, 22 nt, Human
gacagucacagauauugcgaag

SEQ ID NO: 1104251 - RNA, 19 nt, Human
gcuucaucaggaggccugu

SEQ ID NO: 1104252 - RNA, 20 nt, Human
ggaacuucuuucaugagcuc

SEQ ID NO: 1104253 - RNA, 18 nt, Human
uacacugauuguaacuga

SEQ ID NO: 1104254 - RNA, 22 nt, Human
uacuacugucuucuaacugucc

SEQ ID NO: 1104255 - RNA, 20 nt, Human
uacucaggagccuaucucca

SEQ ID NO: 1104256 - RNA, 21 nt, Human
uagaaggcuggacugugaggg

SEQ ID NO: 1104257 - RNA, 23 nt, Human
ucaggagccuaucuccaucuugu

SEQ ID NO: 1104258 - RNA, 21 nt, Human
uccugcugcucgcugagaagc

SEQ ID NO: 1104259 - RNA, 20 nt, Human
ucuuauagucauauccugga

SEQ ID NO: 1104260 - RNA, 22 nt, Human
ucuuauagucauauccuggaac

SEQ ID NO: 1104261 - RNA, 23 nt, Human
ucuuauagucauauccuggaacu

SEQ ID NO: 1104262 - RNA, 22 nt, Human
ucuuucuguucauucuguucca

SEQ ID NO: 1104263 - RNA, 25 nt, Human
ugccuuugcuuccugcugcucgcug

SEQ ID NO: 1104264 - RNA, 22 nt, Human
ugcucacucccaaagccugaca

SEQ ID NO: 1104265 - RNA, 21 nt, Human
uggaaaaagacgaacacaacg

SEQ ID NO: 1104266 - RNA, 23 nt, Human
uguugguccguaucccauucuac

SEQ ID NO: 1104267 - RNA, 21 nt, Human
uuauggaucuucuugugauuc

SEQ ID NO: 1104268 - RNA, 21 nt, Human
uugcauaaauccaaccucuga

SEQ ID NO: 1104269 - RNA, 18 nt, Human
cuuccugcugcgcugaac

SEQ ID NO: 1104270 - RNA, 20 nt, Human
gggggaaccuccucugccag

SEQ ID NO: 1104271 - RNA, 18 nt, Human
uaauuucugugcauuccc

SEQ ID NO: 1104272 - RNA, 22 nt, Human
uccugcugcgcugaaccccugc

SEQ ID NO: 1104273 - RNA, 21 nt, Human
ugcgcugaaccccugcccuuu

SEQ ID NO: 1104274 - RNA, 19 nt, Human
ugcugcgcugaaccccugc

SEQ ID NO: 1104275 - RNA, 19 nt, Human
ugggggaaccuccucugcc

SEQ ID NO: 1104276 - RNA, 22 nt, Human
ugugauuuuucaccaauuuggg

SEQ ID NO: 1104277 - RNA, 21 nt, Human
aaucuugcucuugccgcucug

SEQ ID NO: 1104278 - RNA, 22 nt, Human
accccggagggcacugcccagg

SEQ ID NO: 1104279 - RNA, 19 nt, Human
agacagccggcaggaggug

SEQ ID NO: 1104280 - RNA, 24 nt, Human
agccaaagcaguagcagcuggaau

SEQ ID NO: 1104281 - RNA, 19 nt, Human
aggccaccagcagauccca

SEQ ID NO: 1104282 - RNA, 19 nt, Human
caaagcaguagcagcugga

SEQ ID NO: 1104283 - RNA, 21 nt, Human
cacccaggccgccagacagcc

SEQ ID NO: 1104284 - RNA, 23 nt, Human
cagcagcccaucaacgcccccaa

SEQ ID NO: 1104285 - RNA, 23 nt, Human
caggcacacaggagaagggcugg

SEQ ID NO: 1104286 - RNA, 24 nt, Human
cauagccaccgccagagccaaagc

SEQ ID NO: 1104287 - RNA, 24 nt, Human
ccacacugccgaucagccccugga

SEQ ID NO: 1104288 - RNA, 24 nt, Human
ccagagccaaagcaguagcagcug

SEQ ID NO: 1104289 - RNA, 22 nt, Human
ccagcagcccaucaacgccccc

SEQ ID NO: 1104290 - RNA, 23 nt, Human
cccaaagcugcugccauagccac

SEQ ID NO: 1104291 - RNA, 22 nt, Human
cccaggccaccagcagauccca

SEQ ID NO: 1104292 - RNA, 23 nt, Human
ccccaaagcugcugccauagccu

SEQ ID NO: 1104293 - RNA, 24 nt, Human
ccccuggaucugggacagcugcau

SEQ ID NO: 1104294 - RNA, 19 nt, Human
ccgccagagccaaagcagu

SEQ ID NO: 1104295 - RNA, 25 nt, Human
ccgccagguugcccuccagggaugc

SEQ ID NO: 1104296 - RNA, 23 nt, Human
ccggcaggaggugcgggaugagc

SEQ ID NO: 1104297 - RNA, 20 nt, Human
ccugcauggugcgccagagc

SEQ ID NO: 1104298 - RNA, 21 nt, Human
cgccagagccaaagcaguagc

SEQ ID NO: 1104299 - RNA, 23 nt, Human
cgcccccaaagcugcugccauag

SEQ ID NO: 1104300 - RNA, 19 nt, Human
cggcacccaggccgccaga

SEQ ID NO: 1104301 - RNA, 19 nt, Human
cgggaugagccacucccag

SEQ ID NO: 1104302 - RNA, 21 nt, Human
cugguggauggugguggucau

SEQ ID NO: 1104303 - RNA, 19 nt, Human
gaugagccacucccaggcc

SEQ ID NO: 1104304 - RNA, 20 nt, Human
gccaccgccagagccaaagc

SEQ ID NO: 1104305 - RNA, 19 nt, Human
gccggcaggaggugcggga

SEQ ID NO: 1104306 - RNA, 19 nt, Human
gcugagcugggacugcagc

SEQ ID NO: 1104307 - RNA, 23 nt, Human
gcuggaggaggugaacuggugga

SEQ ID NO: 1104308 - RNA, 23 nt, Human
ggagcuggaggaggugaacugga

SEQ ID NO: 1104309 - RNA, 19 nt, Human
gggaugcuuucaugcugag

SEQ ID NO: 1104310 - RNA, 24 nt, Human
guggcggcggcaggaggcaggcac

SEQ ID NO: 1104311 - RNA, 21 nt, Human
guggucaugguggcggcggca

SEQ ID NO: 1104312 - RNA, 20 nt, Human
ucagccccuggaucugggac

SEQ ID NO: 1104313 - RNA, 22 nt, Human
uccagggaugcuuucaugcuga

SEQ ID NO: 1104314 - RNA, 21 nt, Human
ugcaguagcggcucucugucu

SEQ ID NO: 1104315 - RNA, 24 nt, Human
uggaauagcugcuaccccggaggg

SEQ ID NO: 1104316 - RNA, 18 nt, Human
uggauggugguggucaug

SEQ ID NO: 1104317 - RNA, 20 nt, Human
ugggacagcugcaugcagua

SEQ ID NO: 1104318 - RNA, 25 nt, Human
ugggccagcugcuccuccacacugc

SEQ ID NO: 1104319 - RNA, 19 nt, Human
uggucaugguggcggcggc

SEQ ID NO: 1104320 - RNA, 22 nt, Human
uggugguggucaugguggcggc

SEQ ID NO: 1104321 - RNA, 20 nt, Human
uuccucugucuugcugaaga

SEQ ID NO: 1104322 - RNA, 18 nt, Human
uugauggagcuggaggag

SEQ ID NO: 1104323 - RNA, 23 nt, Human
uuggcauccuugcgguucuucuc

SEQ ID NO: 1104324 - RNA, 19 nt, Human
aauuucuuccuuguuucuc

SEQ ID NO: 1104325 - RNA, 20 nt, Human
cagggccuucugcaaggcuu

SEQ ID NO: 1104326 - RNA, 23 nt, Human
ccugaccaggugucuuucucacc

SEQ ID NO: 1104327 - RNA, 22 nt, Human
ccuuuagucugacaccauaggc

SEQ ID NO: 1104328 - RNA, 19 nt, Human
gauuggcuuauacagagag

SEQ ID NO: 1104329 - RNA, 18 nt, Human
gccuuuagucugacacca

SEQ ID NO: 1104330 - RNA, 19 nt, Human
uccaaaugcuuuuucuugg

SEQ ID NO: 1104331 - RNA, 22 nt, Human
uccaaaugcuuuuucuuggcac

SEQ ID NO: 1104332 - RNA, 20 nt, Human
uccaagucuucaaagucacc

SEQ ID NO: 1104333 - RNA, 19 nt, Human
ucgcaugaagacaauaucg

SEQ ID NO: 1104334 - RNA, 22 nt, Human
ucucacccacugguuucaacaa

SEQ ID NO: 1104335 - RNA, 22 nt, Human
ucugaguaucggggcccgauuu

SEQ ID NO: 1104336 - RNA, 18 nt, Human
ugaauuaaaauguuucuu

SEQ ID NO: 1104337 - RNA, 21 nt, Human
uuccaagucuucaaagucacc

SEQ ID NO: 1104338 - RNA, 23 nt, Human
aaaaaccaaagugggcuggcuug

SEQ ID NO: 1104339 - RNA, 20 nt, Human
aaagaggcucgggcagcuuu

SEQ ID NO: 1104340 - RNA, 22 nt, Human
aagugggcuggcuuguacaggg

SEQ ID NO: 1104341 - RNA, 23 nt, Human
aauugccauucccucaauucucu

SEQ ID NO: 1104342 - RNA, 23 nt, Human
acaccacugcauuguugccaggc

SEQ ID NO: 1104343 - RNA, 26 nt, Human
accccaaaugcccuugggacagccuu

SEQ ID NO: 1104344 - RNA, 25 nt, Human
agcacugucaucuuugcucccugcg

SEQ ID NO: 1104345 - RNA, 22 nt, Human
agccuuugggggaggaaucagc

SEQ ID NO: 1104346 - RNA, 24 nt, Human
aggaaucagcuuugggcccagagc

SEQ ID NO: 1104347 - RNA, 24 nt, Human
aggcacucgguaaaagccugugga

SEQ ID NO: 1104348 - RNA, 20 nt, Human
aggcaugugggucaccaugu

SEQ ID NO: 1104349 - RNA, 21 nt, Human
aggcaugugggucaccauguc

SEQ ID NO: 1104350 - RNA, 18 nt, Human
aggggcucucucucuccc

SEQ ID NO: 1104351 - RNA, 22 nt, Human
auucccauuuuauagaugagga

SEQ ID NO: 1104352 - RNA, 28 nt, Human
caccccacagauuuacugauauucccaa

SEQ ID NO: 1104353 - RNA, 22 nt, Human
cagaacucaaacccaggacugu

SEQ ID NO: 1104354 - RNA, 24 nt, Human
cagaacucaaacccaggacugucu

SEQ ID NO: 1104355 - RNA, 20 nt, Human
cagcguccucauccacuccc

SEQ ID NO: 1104356 - RNA, 21 nt, Human
caggagguacucaauguuggg

SEQ ID NO: 1104357 - RNA, 21 nt, Human
caucuuguuuuucucagagug

SEQ ID NO: 1104358 - RNA, 18 nt, Human
cauuguugccaggcacuc

SEQ ID NO: 1104359 - RNA, 19 nt, Human
ccagggccagguuccgggg

SEQ ID NO: 1104360 - RNA, 22 nt, Human
cccaaaugcccuugggacagcc

SEQ ID NO: 1104361 - RNA, 22 nt, Human
ccccaaaugcccuugggacagc

SEQ ID NO: 1104362 - RNA, 18 nt, Human
ccccaggccgcgagagcc

SEQ ID NO: 1104363 - RNA, 18 nt, Human
ccccaggggguuuugggg

SEQ ID NO: 1104364 - RNA, 19 nt, Human
ccccaggggguuuuggggg

SEQ ID NO: 1104365 - RNA, 18 nt, Human
ccccccaggccgcgagag

SEQ ID NO: 1104366 - RNA, 19 nt, Human
ccccgggucaccagggggc

SEQ ID NO: 1104367 - RNA, 20 nt, Human
cccggaucagcuuccgcagc

SEQ ID NO: 1104368 - RNA, 25 nt, Human
ccuccuagccacauaacucccaggc

SEQ ID NO: 1104369 - RNA, 22 nt, Human
ccugaccccaaaugcccuuggg

SEQ ID NO: 1104370 - RNA, 21 nt, Human
cuauggcucacuuugcgauaa

SEQ ID NO: 1104371 - RNA, 23 nt, Human
cucagacuugaggccccccaggc

SEQ ID NO: 1104372 - RNA, 23 nt, Human
cucccugcgggcagguccugagu

SEQ ID NO: 1104373 - RNA, 20 nt, Human
cucugcuugaggaacucaga

SEQ ID NO: 1104374 - RNA, 22 nt, Human
cugcagcacugucaucuuugcu

SEQ ID NO: 1104375 - RNA, 24 nt, Human
cugcagcacugucaucuuugcucc

SEQ ID NO: 1104376 - RNA, 18 nt, Human
cuggcaguccuccagccu

SEQ ID NO: 1104377 - RNA, 24 nt, Human
gaacucagacuugaggccccccag

SEQ ID NO: 1104378 - RNA, 23 nt, Human
gaagaaccagucugacugcugga

SEQ ID NO: 1104379 - RNA, 20 nt, Human
gaccugguucuccguggcug

SEQ ID NO: 1104380 - RNA, 22 nt, Human
gagccagaacucaaacccagga

SEQ ID NO: 1104381 - RNA, 22 nt, Human
gccuccuagccacauaacuccc

SEQ ID NO: 1104382 - RNA, 21 nt, Human
gcuggcaguccuccagccuga

SEQ ID NO: 1104383 - RNA, 18 nt, Human
gggcagguccugaguccu

SEQ ID NO: 1104384 - RNA, 19 nt, Human
ggggaggaaucagcuuugg

SEQ ID NO: 1104385 - RNA, 24 nt, Human
ggucaggcaugugggucaccaugu

SEQ ID NO: 1104386 - RNA, 24 nt, Human
guaaaagccuguggacuccagccc

SEQ ID NO: 1104387 - RNA, 20 nt, Human
gucagugcuggggcuggugg

SEQ ID NO: 1104388 - RNA, 24 nt, Human
gugggcuggcuuguacagggauca

SEQ ID NO: 1104389 - RNA, 20 nt, Human
uaacucccaggccagguccu

SEQ ID NO: 1104390 - RNA, 21 nt, Human
uaaguaacuugcccaauaucc

SEQ ID NO: 1104391 - RNA, 18 nt, Human
uacagcagaugccucacc

SEQ ID NO: 1104392 - RNA, 22 nt, Human
uaucccaaacuacuaaauggug

SEQ ID NO: 1104393 - RNA, 19 nt, Human
ucaccaguguccgcccaaa

SEQ ID NO: 1104394 - RNA, 24 nt, Human
ucacugaagaaccagucugacugc

SEQ ID NO: 1104395 - RNA, 21 nt, Human
uccaucuuguuuuucucagag

SEQ ID NO: 1104396 - RNA, 25 nt, Human
ucccaaacuacuaaaugguggagcc

SEQ ID NO: 1104397 - RNA, 18 nt, Human
ucccaggccagguccuuc

SEQ ID NO: 1104398 - RNA, 24 nt, Human
ucccagggaccaucaacuuucccc

SEQ ID NO: 1104399 - RNA, 18 nt, Human
uccgcagcguccucaucc

SEQ ID NO: 1104400 - RNA, 24 nt, Human
uccucaccaguguccgcccaaaga

SEQ ID NO: 1104401 - RNA, 24 nt, Human
uccugaggccacgugccgcacucu

SEQ ID NO: 1104402 - RNA, 19 nt, Human
uccuucugcuugcuuuagg

SEQ ID NO: 1104403 - RNA, 21 nt, Human
ucuccacgaucuuguagaggu

SEQ ID NO: 1104404 - RNA, 21 nt, Human
ucucccuuguccucuucguca

SEQ ID NO: 1104405 - RNA, 19 nt, Human
ucucucucccuuguccucu

SEQ ID NO: 1104406 - RNA, 24 nt, Human
ucuuguagaggucaggcauguggg

SEQ ID NO: 1104407 - RNA, 20 nt, Human
ucuuuauuuccuucugcuuc

SEQ ID NO: 1104408 - RNA, 24 nt, Human
ugaaaagaggcucgggcagcuuuu

SEQ ID NO: 1104409 - RNA, 18 nt, Human
ugacugaacuacaggugg

SEQ ID NO: 1104410 - RNA, 20 nt, Human
ugacuucccucccagggacc

SEQ ID NO: 1104411 - RNA, 21 nt, Human
ugaguccugaggccacgugcc

SEQ ID NO: 1104412 - RNA, 23 nt, Human
ugccaggcacucgguaaaagccu

SEQ ID NO: 1104413 - RNA, 22 nt, Human
ugccccaggggguuuugggggc

SEQ ID NO: 1104414 - RNA, 21 nt, Human
ugcccuugggacagccuucuu

SEQ ID NO: 1104415 - RNA, 18 nt, Human
ugccugaggcuccuugcu

SEQ ID NO: 1104416 - RNA, 21 nt, Human
ugcgggcagguccugaguccu

SEQ ID NO: 1104417 - RNA, 21 nt, Human
ugcuuggcuuggaggucagug

SEQ ID NO: 1104418 - RNA, 18 nt, Human
uggcucacuuugcgauaa

SEQ ID NO: 1104419 - RNA, 22 nt, Human
ugguugaugucaccaggcccac

SEQ ID NO: 1104420 - RNA, 20 nt, Human
uguccgcccaaagaccaggg

SEQ ID NO: 1104421 - RNA, 25 nt, Human
uugcucccugcgggcagguccugag

SEQ ID NO: 1104422 - RNA, 21 nt, Human
aaaaaaaaaacacuuugauaa

SEQ ID NO: 1104423 - RNA, 20 nt, Human
aaaaacaucacaaaaccaaa

SEQ ID NO: 1104424 - RNA, 23 nt, Human
aaaaauaaaugggaagacuucac

SEQ ID NO: 1104425 - RNA, 22 nt, Human
aaaacaucacaaaaccaaaccc

SEQ ID NO: 1104426 - RNA, 24 nt, Human
aaaauagacugauaacuaugcaga

SEQ ID NO: 1104427 - RNA, 18 nt, Human
aaacaucacaaaaccaaa

SEQ ID NO: 1104428 - RNA, 24 nt, Human
aacaaguauacaaucaauacccau

SEQ ID NO: 1104429 - RNA, 20 nt, Human
aacaucacaaaaccaaaccc

SEQ ID NO: 1104430 - RNA, 19 nt, Human
aaccuggagguuugcccug

SEQ ID NO: 1104431 - RNA, 21 nt, Human
aacucuuguacucucuccuuu

SEQ ID NO: 1104432 - RNA, 22 nt, Human
aagaagaaugauacauaaaaaa

SEQ ID NO: 1104433 - RNA, 19 nt, Human
aaucuuccacgaaagagac

SEQ ID NO: 1104434 - RNA, 21 nt, Human
acagagaaaaucacaccugga

SEQ ID NO: 1104435 - RNA, 26 nt, Human
acagagaaaaucacaccuggaauauc

SEQ ID NO: 1104436 - RNA, 24 nt, Human
accauguuggacaggcuggucucg

SEQ ID NO: 1104437 - RNA, 18 nt, Human
acgggguuucaccauguu

SEQ ID NO: 1104438 - RNA, 23 nt, Human
acgggguuucaccauguuggaca

SEQ ID NO: 1104439 - RNA, 24 nt, Human
acgggguuucaccauguuggacag

SEQ ID NO: 1104440 - RNA, 26 nt, Human
acucccauuucaaaaauaaaugggaa

SEQ ID NO: 1104441 - RNA, 21 nt, Human
acucucuccuuuucccuccac

SEQ ID NO: 1104442 - RNA, 25 nt, Human
acucugucacccgggcuggagcgca

SEQ ID NO: 1104443 - RNA, 21 nt, Human
agaggaagaggggcaucuagc

SEQ ID NO: 1104444 - RNA, 22 nt, Human
agauuacaggcauaagccacag

SEQ ID NO: 1104445 - RNA, 23 nt, Human
agauuacaggcauaagccacagc

SEQ ID NO: 1104446 - RNA, 24 nt, Human
agcgauucuccugccucagccucc

SEQ ID NO: 1104447 - RNA, 25 nt, Human
aggaaaaaaaaaaaaacacuuugau

SEQ ID NO: 1104448 - RNA, 21 nt, Human
aggaagaggggcaucuagcuc

SEQ ID NO: 1104449 - RNA, 24 nt, Human
agggaaaaacaucacaaaaccaaa

SEQ ID NO: 1104450 - RNA, 24 nt, Human
aggugauccgcccgccucggccuc

SEQ ID NO: 1104451 - RNA, 24 nt, Human
aguauccuugccacugccaguuaa

SEQ ID NO: 1104452 - RNA, 22 nt, Human
aucagccccagugaaaagcugg

SEQ ID NO: 1104453 - RNA, 23 nt, Human
auccccaugacagagaaaaucac

SEQ ID NO: 1104454 - RNA, 21 nt, Human
augaggccaagacaacaagua

SEQ ID NO: 1104455 - RNA, 24 nt, Human
auuuuuguguuuuuaguggagacg

SEQ ID NO: 1104456 - RNA, 21 nt, Human
caaaauagacugauaacuaug

SEQ ID NO: 1104457 - RNA, 24 nt, Human
caaauugcugagauuacaggcaua

SEQ ID NO: 1104458 - RNA, 22 nt, Human
caacauacaaaauagacugaua

SEQ ID NO: 1104459 - RNA, 25 nt, Human
caacaugcucuaaaaaaaacucauc

SEQ ID NO: 1104460 - RNA, 23 nt, Human
caaccuccaccuccuggauucaa

SEQ ID NO: 1104461 - RNA, 20 nt, Human
caagcgauucuccugccuca

SEQ ID NO: 1104462 - RNA, 22 nt, Human
caagcgauucuccugccucagc

SEQ ID NO: 1104463 - RNA, 21 nt, Human
caaucaauacccaugugacac

SEQ ID NO: 1104464 - RNA, 18 nt, Human
cacaaaaccaaacccaua

SEQ ID NO: 1104465 - RNA, 26 nt, Human
cacaccuggaauaucaaagugcuuug

SEQ ID NO: 1104466 - RNA, 19 nt, Human
cacagcuuccugaugcuua

SEQ ID NO: 1104467 - RNA, 24 nt, Human
caccauguuggacaggcuggucuc

SEQ ID NO: 1104468 - RNA, 26 nt, Human
caccccaacccugaguugccggcgcc

SEQ ID NO: 1104469 - RNA, 21 nt, Human
caccccaacccugaguugcuc

SEQ ID NO: 1104470 - RNA, 20 nt, Human
caccuggaauaucaaagugc

SEQ ID NO: 1104471 - RNA, 24 nt, Human
cacucugucacccgggcuggagcg

SEQ ID NO: 1104472 - RNA, 21 nt, Human
cacugcaaccuccaccuccug

SEQ ID NO: 1104473 - RNA, 19 nt, Human
cacugccaguuaacagggc

SEQ ID NO: 1104474 - RNA, 18 nt, Human
cagcagccucacauccau

SEQ ID NO: 1104475 - RNA, 25 nt, Human
caggaugcuagggauacuucuggga

SEQ ID NO: 1104476 - RNA, 20 nt, Human
cagggcaguaagaaacaacu

SEQ ID NO: 1104477 - RNA, 25 nt, Human
caguagcugggacuacaggcacaug

SEQ ID NO: 1104478 - RNA, 19 nt, Human
caguggagcaaauccccau

SEQ ID NO: 1104479 - RNA, 24 nt, Human
caugccaccacgcccagauaauuu

SEQ ID NO: 1104480 - RNA, 23 nt, Human
ccaaauugcugagauuacaggca

SEQ ID NO: 1104481 - RNA, 24 nt, Human
ccaaauugcugagauuacaggcau

SEQ ID NO: 1104482 - RNA, 22 nt, Human
ccacaagcagauaaaaagagca

SEQ ID NO: 1104483 - RNA, 24 nt, Human
ccaccuccuggauucaagcgauuc

SEQ ID NO: 1104484 - RNA, 22 nt, Human
ccacuagcaugcccucucucag

SEQ ID NO: 1104485 - RNA, 24 nt, Human
ccagcccaccuuaaaccuaaauua

SEQ ID NO: 1104486 - RNA, 20 nt, Human
ccaugacagagaaaaucaca

SEQ ID NO: 1104487 - RNA, 19 nt, Human
cccacaagcagauaaaaag

SEQ ID NO: 1104488 - RNA, 23 nt, Human
cccaccuuaaaccuaaauuagaa

SEQ ID NO: 1104489 - RNA, 23 nt, Human
cccaguagcugggacuacaggca

SEQ ID NO: 1104490 - RNA, 24 nt, Human
ccuccuggauucaagcgauucucc

SEQ ID NO: 1104491 - RNA, 23 nt, Human
ccuggauucaagcgauucuccug

SEQ ID NO: 1104492 - RNA, 19 nt, Human
ccuuaaaccuaaauuagaa

SEQ ID NO: 1104493 - RNA, 21 nt, Human
cgaaagagacgacauucccac

SEQ ID NO: 1104494 - RNA, 24 nt, Human
cgccucggccucccaaauugcuga

SEQ ID NO: 1104495 - RNA, 24 nt, Human
cgggguuucaccauguuggacagg

SEQ ID NO: 1104496 - RNA, 24 nt, Human
cucacugcaaccuccaccuccugg

SEQ ID NO: 1104497 - RNA, 27 nt, Human
cucacugcaaccuccaccuccuggauu

SEQ ID NO: 1104498 - RNA, 24 nt, Human
cucagccuccccaguagcugggac

SEQ ID NO: 1104499 - RNA, 21 nt, Human
cucccaaauugcugagauuac

SEQ ID NO: 1104500 - RNA, 21 nt, Human
cugaccucaggugauccgccc

SEQ ID NO: 1104501 - RNA, 18 nt, Human
cugcaaccuccaccuccu

SEQ ID NO: 1104502 - RNA, 23 nt, Human
cugcaaccuccaccuccuggauu

SEQ ID NO: 1104503 - RNA, 23 nt, Human
cugccucagccuccccaguagcu

SEQ ID NO: 1104504 - RNA, 18 nt, Human
cuguggggggacaaggga

SEQ ID NO: 1104505 - RNA, 26 nt, Human
cuucugaccucaggugauccgcccgc

SEQ ID NO: 1104506 - RNA, 23 nt, Human
cuuguagccagcccaccuuaaac

SEQ ID NO: 1104507 - RNA, 23 nt, Human
gaaagagacgacauucccacaag

SEQ ID NO: 1104508 - RNA, 22 nt, Human
gaagggcuuuuaacacagcuuc

SEQ ID NO: 1104509 - RNA, 24 nt, Human
gaccucaggugauccgcccgccuc

SEQ ID NO: 1104510 - RNA, 20 nt, Human
gagacgggguuucaccaugu

SEQ ID NO: 1104511 - RNA, 18 nt, Human
gauuacaggcauaagcca

SEQ ID NO: 1104512 - RNA, 22 nt, Human
gcaaccuccaccuccuggauuc

SEQ ID NO: 1104513 - RNA, 24 nt, Human
gcgauucuccugccucagccuccc

SEQ ID NO: 1104514 - RNA, 24 nt, Human
gcuggagcgcaguggcgccaucuc

SEQ ID NO: 1104515 - RNA, 21 nt, Human
ggaauaugagggggcaguggg

SEQ ID NO: 1104516 - RNA, 20 nt, Human
ggaguuucacucugucaccc

SEQ ID NO: 1104517 - RNA, 24 nt, Human
ggcuggucucgaacuucugaccuc

SEQ ID NO: 1104518 - RNA, 23 nt, Human
gggaagccauggggugagggagu

SEQ ID NO: 1104519 - RNA, 23 nt, Human
gggaauaugagggggcagugggc

SEQ ID NO: 1104520 - RNA, 19 nt, Human
gggcaaugucucuuccuuc

SEQ ID NO: 1104521 - RNA, 21 nt, Human
gggcaaugucucuuccuucug

SEQ ID NO: 1104522 - RNA, 18 nt, Human
gggguuucaccauguugg

SEQ ID NO: 1104523 - RNA, 19 nt, Human
ggucucgaacuucugaccu

SEQ ID NO: 1104524 - RNA, 19 nt, Human
guaaaggaggaaaaaaaaa

SEQ ID NO: 1104525 - RNA, 22 nt, Human
guagacagcagccucacaucca

SEQ ID NO: 1104526 - RNA, 18 nt, Human
guagcugggacuacaggc

SEQ ID NO: 1104527 - RNA, 25 nt, Human
gucugaguaaaggaggaaaaaaaaa

SEQ ID NO: 1104528 - RNA, 24 nt, Human
gugauccgcccgccucggccuccc

SEQ ID NO: 1104529 - RNA, 23 nt, Human
guggagacgggguuucaccaugu

SEQ ID NO: 1104530 - RNA, 19 nt, Human
guuugcuucaggaugcuag

SEQ ID NO: 1104531 - RNA, 23 nt, Human
uaaaaaaaacucaucugacuaga

SEQ ID NO: 1104532 - RNA, 19 nt, Human
uaacacagcuuccugaugc

SEQ ID NO: 1104533 - RNA, 24 nt, Human
uaauuuuuguguuuuuaguggaga

SEQ ID NO: 1104534 - RNA, 24 nt, Human
uacaggcacaugccaccacgccca

SEQ ID NO: 1104535 - RNA, 18 nt, Human
uagcccuagguucucacu

SEQ ID NO: 1104536 - RNA, 24 nt, Human
uaguggagacgggguuucaccaug

SEQ ID NO: 1104537 - RNA, 19 nt, Human
ucaagcgauucuccugccu

SEQ ID NO: 1104538 - RNA, 19 nt, Human
ucaauacccaugugacaca

SEQ ID NO: 1104539 - RNA, 22 nt, Human
ucacucugucacccgggcugga

SEQ ID NO: 1104540 - RNA, 23 nt, Human
ucacucugucacccgggcuggag

SEQ ID NO: 1104541 - RNA, 19 nt, Human
ucacugcaaccuccaccuc

SEQ ID NO: 1104542 - RNA, 23 nt, Human
ucacugcaaccuccaccuccugg

SEQ ID NO: 1104543 - RNA, 24 nt, Human
ucacugcaaccuccaccuccugga

SEQ ID NO: 1104544 - RNA, 27 nt, Human
ucacugcaaccuccaccuccuggauuc

SEQ ID NO: 1104545 - RNA, 19 nt, Human
ucagccccagugaaaagcu

SEQ ID NO: 1104546 - RNA, 20 nt, Human
ucagccuccccaguagcugg

SEQ ID NO: 1104547 - RNA, 24 nt, Human
ucccaaauugcugagauuacaggc

SEQ ID NO: 1104548 - RNA, 23 nt, Human
ucccacaagcagauaaaaagagc

SEQ ID NO: 1104549 - RNA, 22 nt, Human
uccccaguagcugggacuacag

SEQ ID NO: 1104550 - RNA, 24 nt, Human
uccccaguagcugggacuacaggc

SEQ ID NO: 1104551 - RNA, 21 nt, Human
uccuggauucaagcgauucuc

SEQ ID NO: 1104552 - RNA, 24 nt, Human
uccuggauucaagcgauucuccug

SEQ ID NO: 1104553 - RNA, 18 nt, Human
ucucacucuguuggccua

SEQ ID NO: 1104554 - RNA, 27 nt, Human
ucucacucuguuggccuacgcugugaa

SEQ ID NO: 1104555 - RNA, 25 nt, Human
ucuccugccucagccuccccaguag

SEQ ID NO: 1104556 - RNA, 19 nt, Human
ucucgaacuucugaccuca

SEQ ID NO: 1104557 - RNA, 18 nt, Human
ucugucacccgggcugga

SEQ ID NO: 1104558 - RNA, 21 nt, Human
ugaccagagaagaggaagagg

SEQ ID NO: 1104559 - RNA, 18 nt, Human
ugaccucaggugauccgc

SEQ ID NO: 1104560 - RNA, 20 nt, Human
ugaccucaggugauccgccc

SEQ ID NO: 1104561 - RNA, 24 nt, Human
ugaccucaggugauccgcccgccu

SEQ ID NO: 1104562 - RNA, 20 nt, Human
ugagaccacccaaucuucca

SEQ ID NO: 1104563 - RNA, 23 nt, Human
ugagaccacccaaucuuccacga

SEQ ID NO: 1104564 - RNA, 21 nt, Human
ugagauuacaggcauaagcca

SEQ ID NO: 1104565 - RNA, 22 nt, Human
ugagauuacaggcauaagccac

SEQ ID NO: 1104566 - RNA, 23 nt, Human
ugagauuacaggcauaagccaca

SEQ ID NO: 1104567 - RNA, 26 nt, Human
ugagauuacaggcauaagccacagcg

SEQ ID NO: 1104568 - RNA, 27 nt, Human
ugagauuacaggcauaagccacagcgc

SEQ ID NO: 1104569 - RNA, 21 nt, Human
ugaguugcucuuuagcaaguc

SEQ ID NO: 1104570 - RNA, 21 nt, Human
ugcagaucacauucccaucuu

SEQ ID NO: 1104571 - RNA, 19 nt, Human
ugcccuggaacucugaugc

SEQ ID NO: 1104572 - RNA, 21 nt, Human
ugccucagccuccccaguagc

SEQ ID NO: 1104573 - RNA, 24 nt, Human
ugccucagccuccccaguagcugg

SEQ ID NO: 1104574 - RNA, 25 nt, Human
ugcugagauuacaggcauaagccac

SEQ ID NO: 1104575 - RNA, 20 nt, Human
uggaauaucaaagugcuuug

SEQ ID NO: 1104576 - RNA, 24 nt, Human
uggacaggcuggucucgaacuucu

SEQ ID NO: 1104577 - RNA, 24 nt, Human
uggauucaagcgauucuccugccu

SEQ ID NO: 1104578 - RNA, 21 nt, Human
uggccgaugacgaguauccuu

SEQ ID NO: 1104579 - RNA, 21 nt, Human
ugggacuacaggcacaugcca

SEQ ID NO: 1104580 - RNA, 22 nt, Human
ugggacuacaggcacaugccac

SEQ ID NO: 1104581 - RNA, 24 nt, Human
ugggacuacaggcacaugccacca

SEQ ID NO: 1104582 - RNA, 20 nt, Human
ugugacacaguccaagugcu

SEQ ID NO: 1104583 - RNA, 21 nt, Human
uguguuuuuaguggagacggg

SEQ ID NO: 1104584 - RNA, 24 nt, Human
uguuuguuuucugagauggaguuu
